United States Patent Application Publication US 2009/0311680 A1 - sequence listing, part 9

SEQ ID NO: 105781 - DNA, 25 bp, Saccharomyces pastorianus
agcgacgttttatgcaatgtttttc

SEQ ID NO: 105782 - DNA, 25 bp, Saccharomyces pastorianus
gaatttcactttggcgtgtccatat

SEQ ID NO: 105783 - DNA, 25 bp, Saccharomyces pastorianus
gtccatatgctattattgcccacta

SEQ ID NO: 105784 - DNA, 25 bp, Saccharomyces pastorianus
attgcccactaccaggaattagacg

SEQ ID NO: 105785 - DNA, 25 bp, Saccharomyces pastorianus
agcggcgactcgaacgttattgcag

SEQ ID NO: 105786 - DNA, 25 bp, Saccharomyces pastorianus
aaaggtgttattgcctcaggtggga

SEQ ID NO: 105787 - DNA, 25 bp, Saccharomyces pastorianus
taacgaaaatcttcagcggcgactc

SEQ ID NO: 105788 - DNA, 25 bp, Saccharomyces pastorianus
caaaggaccttctctcggtacgaat

SEQ ID NO: 105789 - DNA, 25 bp, Saccharomyces pastorianus
accgtatgccgatattgtttgtagt

SEQ ID NO: 105790 - DNA, 25 bp, Saccharomyces pastorianus
aggtagctcaatatggtgtcgaaac

SEQ ID NO: 105791 - DNA, 25 bp, Saccharomyces pastorianus
gaatattccgattcaggccatcggc

SEQ ID NO: 105792 - DNA, 25 bp, Saccharomyces pastorianus
gactacctgactccatgatgaattc

SEQ ID NO: 105793 - DNA, 25 bp, Saccharomyces pastorianus
gaaccaacatttcgattccttaatt

SEQ ID NO: 105794 - DNA, 25 bp, Saccharomyces pastorianus
tggtggtatgatccccgcaagaatt

SEQ ID NO: 105795 - DNA, 25 bp, Saccharomyces pastorianus
gccatcggcctatctttgtatgaag

SEQ ID NO: 105796 - DNA, 25 bp, Saccharomyces pastorianus
atggctggacttcggtgctttgaac

SEQ ID NO: 105797 - DNA, 25 bp, Saccharomyces pastorianus
caagctttgtcagggagtggctaaa

SEQ ID NO: 105798 - DNA, 25 bp, Saccharomyces pastorianus
cactatgctgtttctgagctggaaa

SEQ ID NO: 105799 - DNA, 25 bp, Saccharomyces pastorianus
gttgtgttatccatgggacgctgaa

SEQ ID NO: 105800 - DNA, 25 bp, Saccharomyces pastorianus
ttgacgatactagaactaccctcca

SEQ ID NO: 105801 - DNA, 25 bp, Saccharomyces pastorianus
aattctggacgttacattgctgcgc

SEQ ID NO: 105802 - DNA, 25 bp, Saccharomyces pastorianus
tagcgtccagctatcgaattctaac

SEQ ID NO: 105803 - DNA, 25 bp, Saccharomyces pastorianus
agaagaggccgctgctttacaagca

SEQ ID NO: 105804 - DNA, 25 bp, Saccharomyces pastorianus
ttggaaacctccttacaactattag

SEQ ID NO: 105805 - DNA, 25 bp, Saccharomyces pastorianus
taccatacagaagagctagcgtcca

SEQ ID NO: 105806 - DNA, 25 bp, Saccharomyces pastorianus
gatccgtctctaaaacccatttaca

SEQ ID NO: 105807 - DNA, 25 bp, Saccharomyces pastorianus
gatttcagcattgacgatattccag

SEQ ID NO: 105808 - DNA, 25 bp, Saccharomyces pastorianus
gaatctcacgaaaccatatgtagcg

SEQ ID NO: 105809 - DNA, 25 bp, Saccharomyces pastorianus
ataagcgctcatctggtgaacaagt

SEQ ID NO: 105810 - DNA, 25 bp, Saccharomyces pastorianus
gcgaattaggaagcgatccgtctct

SEQ ID NO: 105811 - DNA, 25 bp, Saccharomyces pastorianus
aattctaacggccacataagcgctc

SEQ ID NO: 105812 - DNA, 25 bp, Saccharomyces pastorianus
gatattccagaagaggccgctgctt

SEQ ID NO: 105813 - DNA, 25 bp, Saccharomyces pastorianus
accggtcaattctgaggtctttaca

SEQ ID NO: 105814 - DNA, 25 bp, Saccharomyces pastorianus
tgagagcccaaagttccagtgaatg

SEQ ID NO: 105815 - DNA, 25 bp, Saccharomyces pastorianus
actggcggactttctcaagggttat

SEQ ID NO: 105816 - DNA, 25 bp, Saccharomyces pastorianus
gcttaacgaacgaagtcatgctgtt

SEQ ID NO: 105817 - DNA, 25 bp, Saccharomyces pastorianus
gagagagctgatcctattggtttca

SEQ ID NO: 105818 - DNA, 25 bp, Saccharomyces pastorianus
aagagctttgggactcactggcgga

SEQ ID NO: 105819 - DNA, 25 bp, Saccharomyces pastorianus
gaattttttgtctttgagagcccaa

SEQ ID NO: 105820 - DNA, 25 bp, Saccharomyces pastorianus
gagggctctacaaatccagggacta

SEQ ID NO: 105821 - DNA, 25 bp, Saccharomyces pastorianus
gaatggctctcgcttatgaatgatc

SEQ ID NO: 105822 - DNA, 25 bp, Saccharomyces pastorianus
aaaacccatgttcttttcagagaga

SEQ ID NO: 105823 - DNA, 25 bp, Saccharomyces pastorianus
agaagcaagatcacgcccatattag

SEQ ID NO: 105824 - DNA, 25 bp, Saccharomyces pastorianus
ttcccttgacgacacttccaaaaag

SEQ ID NO: 105825 - DNA, 25 bp, Saccharomyces pastorianus
gcaatgtttgtctaactgtgtgaat

SEQ ID NO: 105826 - DNA, 25 bp, Saccharomyces pastorianus
gtgttgagtctgtcaatgattctaa

SEQ ID NO: 105827 - DNA, 25 bp, Saccharomyces pastorianus
aatgattctaatttaagttcgcaag

SEQ ID NO: 105828 - DNA, 25 bp, Saccharomyces pastorianus
aaattgctactttcttggagggaga

SEQ ID NO: 105829 - DNA, 25 bp, Saccharomyces pastorianus
gtccagatgtcaatccatcagttca

SEQ ID NO: 105830 - DNA, 25 bp, Saccharomyces pastorianus
tcttctctatcaacgtctgatttgg

SEQ ID NO: 105831 - DNA, 25 bp, Saccharomyces pastorianus
atcagttcactaatatatgcttcaa

SEQ ID NO: 105832 - DNA, 25 bp, Saccharomyces pastorianus
ctgtgtgaatcggtttttggatact

SEQ ID NO: 105833 - DNA, 25 bp, Saccharomyces pastorianus
gttcgcaagaagagcaatgtttgtc

SEQ ID NO: 105834 - DNA, 25 bp, Saccharomyces pastorianus
aacgtctgatttggcttcccttgac

SEQ ID NO: 105835 - DNA, 25 bp, Saccharomyces pastorianus
actttgtactatcccttcggtcaat

SEQ ID NO: 105836 - DNA, 25 bp, Saccharomyces pastorianus
aaggtcaattttccttgacgcaaag

SEQ ID NO: 105837 - DNA, 25 bp, Saccharomyces pastorianus
gcaaattctactaccacgtttatct

SEQ ID NO: 105838 - DNA, 25 bp, Saccharomyces pastorianus
aatcaacttgcttggactatcagaa

SEQ ID NO: 105839 - DNA, 25 bp, Saccharomyces pastorianus
tggaatggttgactaccaccccaaa

SEQ ID NO: 105840 - DNA, 25 bp, Saccharomyces pastorianus
ggtcaatccatttcactcttttgtg

SEQ ID NO: 105841 - DNA, 25 bp, Saccharomyces pastorianus
catacgggtgcttacgttgcggaat

SEQ ID NO: 105842 - DNA, 25 bp, Saccharomyces pastorianus
atcgggaaaattcattctgcttcaa

SEQ ID NO: 105843 - DNA, 25 bp, Saccharomyces pastorianus
gacaatagggcatccaaatttttac

SEQ ID NO: 105844 - DNA, 25 bp, Saccharomyces pastorianus
atggctgcctatttttagctcctaa

SEQ ID NO: 105845 - DNA, 25 bp, Saccharomyces pastorianus
tctgcttcaagctcttcattagatg

SEQ ID NO: 105846 - DNA, 25 bp, Saccharomyces pastorianus
gactaagcgttacaccaatcctgtt

SEQ ID NO: 105847 - DNA, 25 bp, Saccharomyces pastorianus
ttccctgtccagtctttgattccaa

SEQ ID NO: 105848 - DNA, 25 bp, Saccharomyces pastorianus
aagtacgattactcacacccatttg

SEQ ID NO: 105849 - DNA, 25 bp, Saccharomyces pastorianus
aacgagttctccactagtcaagcta

SEQ ID NO: 105850 - DNA, 25 bp, Saccharomyces pastorianus
gttacaccaatcctgttgtcattca

SEQ ID NO: 105851 - DNA, 25 bp, Saccharomyces pastorianus
ttgtcattcaaggtgccggtgccgg

SEQ ID NO: 105852 - DNA, 25 bp, Saccharomyces pastorianus
ctgtcaagtctgctgatgaattctt

SEQ ID NO: 105853 - DNA, 25 bp, Saccharomyces pastorianus
gttgccaccaaatctgtgtctgtag

SEQ ID NO: 105854 - DNA, 25 bp, Saccharomyces pastorianus
ttgcctatcatcagtttcttaagag

SEQ ID NO: 105855 - DNA, 25 bp, Saccharomyces pastorianus
cattggtaaagtcgatgttgccacc

SEQ ID NO: 105856 - DNA, 25 bp, Saccharomyces pastorianus
ggatcagataacgttatttccatca

SEQ ID NO: 105857 - DNA, 25 bp, Saccharomyces pastorianus
gctaaggcgatttggttctggaact

SEQ ID NO: 105858 - DNA, 25 bp, Saccharomyces pastorianus
attttcctctagctcgacaggatca

SEQ ID NO: 105859 - DNA, 25 bp, Saccharomyces pastorianus
gaaaacaatccagcactaccgtcat

SEQ ID NO: 105860 - DNA, 25 bp, Saccharomyces pastorianus
cagcgtttgcttgggaatttatttc

SEQ ID NO: 105861 - DNA, 25 bp, Saccharomyces pastorianus
tggagcaaatccttccaaccttgaa

SEQ ID NO: 105862 - DNA, 25 bp, Saccharomyces pastorianus
taccgtcatcaggttctgtgacatc

SEQ ID NO: 105863 - DNA, 25 bp, Saccharomyces pastorianus
agaccctacttctaagccaagtgca

SEQ ID NO: 105864 - DNA, 25 bp, Saccharomyces pastorianus
gggaaacatttcatctatacttacc

SEQ ID NO: 105865 - DNA, 25 bp, Saccharomyces pastorianus
gtatttggatttactcttcgcaata

SEQ ID NO: 105866 - DNA, 25 bp, Saccharomyces pastorianus
agcggaattgcatttgacagcgttt

SEQ ID NO: 105867 - DNA, 25 bp, Saccharomyces pastorianus
aggatcaatccctcacagacgtgaa

SEQ ID NO: 105868 - DNA, 25 bp, Saccharomyces pastorianus
tggtataattacctacgggattcat

SEQ ID NO: 105869 - DNA, 25 bp, Saccharomyces pastorianus
aaacatggccgctaatgcttgacaa

SEQ ID NO: 105870 - DNA, 25 bp, Saccharomyces pastorianus
agcaactggttcagtttcctacctt

SEQ ID NO: 105871 - DNA, 25 bp, Saccharomyces pastorianus
aatgcttgacaacattatcgccggg

SEQ ID NO: 105872 - DNA, 25 bp, Saccharomyces pastorianus
aactcagcgaagacatcattccaaa

SEQ ID NO: 105873 - DNA, 25 bp, Saccharomyces pastorianus
gagtttcaatttattcagcctgcaa

SEQ ID NO: 105874 - DNA, 25 bp, Saccharomyces pastorianus
tgagcccaattatcttgaactagta

SEQ ID NO: 105875 - DNA, 25 bp, Saccharomyces pastorianus
accctatgtactggttgagcgtgca

SEQ ID NO: 105876 - DNA, 25 bp, Saccharomyces pastorianus
cgtgcagtagcaggtgttcttggta

SEQ ID NO: 105877 - DNA, 25 bp, Saccharomyces pastorianus
agacatggctacatcactccagaaa

SEQ ID NO: 105878 - DNA, 25 bp, Saccharomyces pastorianus
gtgtacgatctaaaactcagcgaag

SEQ ID NO: 105879 - DNA, 25 bp, Saccharomyces pastorianus
ggcattaactctaaactcggcggga

SEQ ID NO: 105880 - DNA, 25 bp, Saccharomyces pastorianus
taatcgagcctctggaccctaagga

SEQ ID NO: 105881 - DNA, 25 bp, Saccharomyces pastorianus
agctggtcactagggagtacggtct

SEQ ID NO: 105882 - DNA, 25 bp, Saccharomyces pastorianus
gactatttcaacgaagccggcatac

SEQ ID NO: 105883 - DNA, 25 bp, Saccharomyces pastorianus
agatggtttgatatacttgcctgaa

SEQ ID NO: 105884 - DNA, 25 bp, Saccharomyces pastorianus
tggcctaggtatgaagccctttgaa

SEQ ID NO: 105885 - DNA, 25 bp, Saccharomyces pastorianus
gccggcataccaactgctacagaag

SEQ ID NO: 105886 - DNA, 25 bp, Saccharomyces pastorianus
aaagatctcggcgtcggttctgaat

SEQ ID NO: 105887 - DNA, 25 bp, Saccharomyces pastorianus
agcaccgccgatgattctttgaaca

SEQ ID NO: 105888 - DNA, 25 bp, Saccharomyces pastorianus
gtacggtcttatttgccatggtcaa

SEQ ID NO: 105889 - DNA, 25 bp, Saccharomyces pastorianus
aacaaagcttttggcgcaggcggtt

SEQ ID NO: 105890 - DNA, 25 bp, Saccharomyces pastorianus
ctcctcttcacccaggtggtatata

SEQ ID NO: 105891 - DNA, 25 bp, Saccharomyces pastorianus
tctgcgcattgttctgtggccacgg

SEQ ID NO: 105892 - DNA, 25 bp, Saccharomyces pastorianus
gcgacatttgcggactgtatatatt

SEQ ID NO: 105893 - DNA, 25 bp, Saccharomyces pastorianus
atattgccagtcagggcagtcgcca

SEQ ID NO: 105894 - DNA, 25 bp, Saccharomyces pastorianus
taagtggacgcatcagtccgcgaca

SEQ ID NO: 105895 - DNA, 25 bp, Saccharomyces pastorianus
gcgacgcacgtcagacatggatgca

SEQ ID NO: 105896 - DNA, 25 bp, Saccharomyces pastorianus
aaactggatctgcaaatatttggac

SEQ ID NO: 105897 - DNA, 25 bp, Saccharomyces pastorianus
agggcagtcgccaagtgtgtctctt

SEQ ID NO: 105898 - DNA, 25 bp, Saccharomyces pastorianus
aactttgtcgcccaaaaggcatctc

SEQ ID NO: 105899 - DNA, 25 bp, Saccharomyces pastorianus
gaaaccggaaatcttctctgcgcat

SEQ ID NO: 105900 - DNA, 25 bp, Saccharomyces pastorianus
aagtgtgtctctttcgtgtagcgac

SEQ ID NO: 105901 - DNA, 25 bp, Saccharomyces pastorianus
tctcgctattatttccaccattttt

SEQ ID NO: 105902 - DNA, 25 bp, Saccharomyces pastorianus
tagccattattaacagacccgtctc

SEQ ID NO: 105903 - DNA, 25 bp, Saccharomyces pastorianus
acgctactcgttgctgttactaata

SEQ ID NO: 105904 - DNA, 25 bp, Saccharomyces pastorianus
ggttcagtgacatcctagttagccc

SEQ ID NO: 105905 - DNA, 25 bp, Saccharomyces pastorianus
tactcccaagctttcctgtaatagc

SEQ ID NO: 105906 - DNA, 25 bp, Saccharomyces pastorianus
agttgcatctcgaggcatacgacct

SEQ ID NO: 105907 - DNA, 25 bp, Saccharomyces pastorianus
tgttgacaggcttcagggcaatctt

SEQ ID NO: 105908 - DNA, 25 bp, Saccharomyces pastorianus
aaaaggttgtatgcccggactcttg

SEQ ID NO: 105909 - DNA, 25 bp, Saccharomyces pastorianus
aactgctctttggatacggccactc

SEQ ID NO: 105910 - DNA, 25 bp, Saccharomyces pastorianus
ttaacgccagcttacagacaatctc

SEQ ID NO: 105911 - DNA, 25 bp, Saccharomyces pastorianus
cagaaacacctttgatgcgcttcgc

SEQ ID NO: 105912 - DNA, 25 bp, Saccharomyces pastorianus
gaacggtgaactacttgaagccttt

SEQ ID NO: 105913 - DNA, 25 bp, Saccharomyces pastorianus
ggcggtcagactggaagccactgat

SEQ ID NO: 105914 - DNA, 25 bp, Saccharomyces pastorianus
gttctggtactgctgtgattgtttc

SEQ ID NO: 105915 - DNA, 25 bp, Saccharomyces pastorianus
gaaggaactagttactgctccacta

SEQ ID NO: 105916 - DNA, 25 bp, Saccharomyces pastorianus
taatattccgttgttgcccggcgaa

SEQ ID NO: 105917 - DNA, 25 bp, Saccharomyces pastorianus
tgctccactagacggtaccattttg

SEQ ID NO: 105918 - DNA, 25 bp, Saccharomyces pastorianus
tgccctgtgggtccttattacaaaa

SEQ ID NO: 105919 - DNA, 25 bp, Saccharomyces pastorianus
gaacaaaccggtccattggccaaag

SEQ ID NO: 105920 - DNA, 25 bp, Saccharomyces pastorianus
gctgtgattgtttctcccattaagg

SEQ ID NO: 105921 - DNA, 25 bp, Saccharomyces pastorianus
agtcggcaccatgaatgcttttttc

SEQ ID NO: 105922 - DNA, 25 bp, Saccharomyces pastorianus
gaaggtgttactagggattccattt

SEQ ID NO: 105923 - DNA, 25 bp, Saccharomyces pastorianus
tgcttttcttggttgcagtgaatcc

SEQ ID NO: 105924 - DNA, 25 bp, Saccharomyces pastorianus
agcacgtctcggcattaatggcata

SEQ ID NO: 105925 - DNA, 25 bp, Saccharomyces pastorianus
ggaaagcctgcaaggaccatctcta

SEQ ID NO: 105926 - DNA, 25 bp, Saccharomyces pastorianus
agaagttcgattgttagcacgtctc

SEQ ID NO: 105927 - DNA, 25 bp, Saccharomyces pastorianus
tccctttgtcattgcagcaggtggt

SEQ ID NO: 105928 - DNA, 25 bp, Saccharomyces pastorianus
gtgactgccacctctgtaagagaag

SEQ ID NO: 105929 - DNA, 25 bp, Saccharomyces pastorianus
ttttcaagccccttcactcgagaaa

SEQ ID NO: 105930 - DNA, 25 bp, Saccharomyces pastorianus
agcttcctccatatggctacatgta

SEQ ID NO: 105931 - DNA, 25 bp, Saccharomyces pastorianus
aggtcttatacatgctactcccttt

SEQ ID NO: 105932 - DNA, 25 bp, Saccharomyces pastorianus
ccatctctactccttttatcgaaaa

SEQ ID NO: 105933 - DNA, 25 bp, Saccharomyces pastorianus
ggatttcagaacgtccaatcaggaa

SEQ ID NO: 105934 - DNA, 25 bp, Saccharomyces pastorianus
agctctgctgtaagcaccattgcaa

SEQ ID NO: 105935 - DNA, 25 bp, Saccharomyces pastorianus
aagactcaagcttccactgttgaaa

SEQ ID NO: 105936 - DNA, 25 bp, Saccharomyces pastorianus
acatcgtcagcatctcgtgttattg

SEQ ID NO: 105937 - DNA, 25 bp, Saccharomyces pastorianus
gaaagttctgttgcaagctctgttg

SEQ ID NO: 105938 - DNA, 25 bp, Saccharomyces pastorianus
ctctgttgcaagctctgctagtttt

SEQ ID NO: 105939 - DNA, 25 bp, Saccharomyces pastorianus
gtttcatctgaatctagctctgctg

SEQ ID NO: 105940 - DNA, 25 bp, Saccharomyces pastorianus
gagtcttctagctcctctgaaagtt

SEQ ID NO: 105941 - DNA, 25 bp, Saccharomyces pastorianus
tagttttgccaataccacagctcca

SEQ ID NO: 105942 - DNA, 25 bp, Saccharomyces pastorianus
cggtgtgccatggtactctactaga

SEQ ID NO: 105943 - DNA, 25 bp, Saccharomyces pastorianus
aatggtactgacagcaccgtcacaa

SEQ ID NO: 105944 - DNA, 25 bp, Saccharomyces pastorianus
cacccaagctactgtttcatctgaa

SEQ ID NO: 105945 - DNA, 25 bp, Saccharomyces pastorianus
catccagagaaattcgtccgcacta

SEQ ID NO: 105946 - DNA, 25 bp, Saccharomyces pastorianus
gagactttgagggtccacacaataa

SEQ ID NO: 105947 - DNA, 25 bp, Saccharomyces pastorianus
tttgtgctttaatgtccttgagacc

SEQ ID NO: 105948 - DNA, 25 bp, Saccharomyces pastorianus
gtgccttctttgatacagctatttc

SEQ ID NO: 105949 - DNA, 25 bp, Saccharomyces pastorianus
gtccgcactaacttatcctatatgt

SEQ ID NO: 105950 - DNA, 25 bp, Saccharomyces pastorianus
tattaggttctccaagtgccttctt

SEQ ID NO: 105951 - DNA, 25 bp, Saccharomyces pastorianus
atggccccatttaaacaatgcgttg

SEQ ID NO: 105952 - DNA, 25 bp, Saccharomyces pastorianus
gaaacctcttactcaaatttggcaa

SEQ ID NO: 105953 - DNA, 25 bp, Saccharomyces pastorianus
atgcctctccaaaaaatggccccat

SEQ ID NO: 105954 - DNA, 25 bp, Saccharomyces pastorianus
aacgctttcagagcattaattcaaa

SEQ ID NO: 105955 - DNA, 25 bp, Saccharomyces pastorianus
atcttctaagtcattatgcctctcc

SEQ ID NO: 105956 - DNA, 25 bp, Saccharomyces pastorianus
aaatttggccactgcgatagctttt

SEQ ID NO: 105957 - DNA, 25 bp, Saccharomyces pastorianus
gcgtgaagcctattcagctgaccaa

SEQ ID NO: 105958 - DNA, 25 bp, Saccharomyces pastorianus
gtcttcaaaagcttcctggtacctt

SEQ ID NO: 105959 - DNA, 25 bp, Saccharomyces pastorianus
tgtccttttgtattccttgtctgat

SEQ ID NO: 105960 - DNA, 25 bp, Saccharomyces pastorianus
gtacctggatttttatggcggcttt

SEQ ID NO: 105961 - DNA, 25 bp, Saccharomyces pastorianus
tatcgtgcatggtgagtgtcggctc

SEQ ID NO: 105962 - DNA, 25 bp, Saccharomyces pastorianus
gttacacgcattgttggtcttcaaa

SEQ ID NO: 105963 - DNA, 25 bp, Saccharomyces pastorianus
ataatcggtctggaacttcgttcaa

SEQ ID NO: 105964 - DNA, 25 bp, Saccharomyces pastorianus
gatattgcaccttgtcatggccatc

SEQ ID NO: 105965 - DNA, 25 bp, Saccharomyces pastorianus
atattcgtgggttttgcgtactttg

SEQ ID NO: 105966 - DNA, 25 bp, Saccharomyces pastorianus
gccatcctttgttgggccatgtgga

SEQ ID NO: 105967 - DNA, 25 bp, Saccharomyces pastorianus
gtggagccctgataacttggaacat

SEQ ID NO: 105968 - DNA, 25 bp, Saccharomyces pastorianus
ctggcttgtatctacgtgtcatggg

SEQ ID NO: 105969 - DNA, 25 bp, Saccharomyces pastorianus
agacctctaaacgtggaactatggc

SEQ ID NO: 105970 - DNA, 25 bp, Saccharomyces pastorianus
ggaggttttctccttatggtaagag

SEQ ID NO: 105971 - DNA, 25 bp, Saccharomyces pastorianus
tgtcccctacatcgaagaggccttg

SEQ ID NO: 105972 - DNA, 25 bp, Saccharomyces pastorianus
aaatatgaggcccttttccatgcac

SEQ ID NO: 105973 - DNA, 25 bp, Saccharomyces pastorianus
gccttgcaggtctattccacagaat

SEQ ID NO: 105974 - DNA, 25 bp, Saccharomyces pastorianus
gcatttattctgtttctggcttgta

SEQ ID NO: 105975 - DNA, 25 bp, Saccharomyces pastorianus
tggaacatgttcagctccccaagaa

SEQ ID NO: 105976 - DNA, 25 bp, Saccharomyces pastorianus
agggccatctatttcgtatcttgtg

SEQ ID NO: 105977 - DNA, 25 bp, Saccharomyces pastorianus
gattttcaatctctggctttttcca

SEQ ID NO: 105978 - DNA, 25 bp, Saccharomyces pastorianus
ggacaacaatccttcagatcgggtt

SEQ ID NO: 105979 - DNA, 25 bp, Saccharomyces pastorianus
gattgggcgtcaactagcagccgaa

SEQ ID NO: 105980 - DNA, 25 bp, Saccharomyces pastorianus
atgcattatttgttcctttgggcgg

SEQ ID NO: 105981 - DNA, 25 bp, Saccharomyces pastorianus
aatgcatgcactttcttgcggaacg

SEQ ID NO: 105982 - DNA, 25 bp, Saccharomyces pastorianus
tcgcagatggcgctcaaacacaaca

SEQ ID NO: 105983 - DNA, 25 bp, Saccharomyces pastorianus
tcaggatctgcacttgccgctagaa

SEQ ID NO: 105984 - DNA, 25 bp, Saccharomyces pastorianus
gttgagcccacagcttgtttgggat

SEQ ID NO: 105985 - DNA, 25 bp, Saccharomyces pastorianus
atggttttgcattgattccgcccta

SEQ ID NO: 105986 - DNA, 25 bp, Saccharomyces pastorianus
tagaagcctttctccaggctgcaaa

SEQ ID NO: 105987 - DNA, 25 bp, Saccharomyces pastorianus
gatcgggttccattgttcatatcaa

SEQ ID NO: 105988 - DNA, 25 bp, Saccharomyces pastorianus
gtacacatttgccattattcgcgaa

SEQ ID NO: 105989 - DNA, 25 bp, Saccharomyces pastorianus
attaggtgccggtttcatgttatat

SEQ ID NO: 105990 - DNA, 25 bp, Saccharomyces pastorianus
gactggttctgttttcatcttcaca

SEQ ID NO: 105991 - DNA, 25 bp, Saccharomyces pastorianus
gttgccggtttatcttaccagctag

SEQ ID NO: 105992 - DNA, 25 bp, Saccharomyces pastorianus
gttatggctatcttgactggttctg

SEQ ID NO: 105993 - DNA, 25 bp, Saccharomyces pastorianus
gatttgtcctctcctgttatgaaga

SEQ ID NO: 105994 - DNA, 25 bp, Saccharomyces pastorianus
agagttggcccctgctgatgcaagg

SEQ ID NO: 105995 - DNA, 25 bp, Saccharomyces pastorianus
acaatgggtggttgcttcacctacc

SEQ ID NO: 105996 - DNA, 25 bp, Saccharomyces pastorianus
aggtaatctagcttctgcagcggct

SEQ ID NO: 105997 - DNA, 25 bp, Saccharomyces pastorianus
agatgcctctggtgctgtgattaaa

SEQ ID NO: 105998 - DNA, 25 bp, Saccharomyces pastorianus
agcggcttccacgattgagacacag

SEQ ID NO: 105999 - DNA, 25 bp, Saccharomyces pastorianus
ttcacctaccctgcatttatgttga

SEQ ID NO: 106000 - DNA, 25 bp, Saccharomyces pastorianus
gatagcgaattcaacggtattaccg

SEQ ID NO: 106001 - DNA, 25 bp, Saccharomyces pastorianus
gctcgccaatgttcgtgcattttac

SEQ ID NO: 106002 - DNA, 25 bp, Saccharomyces pastorianus
gaacgagttcccattagcttatgtc

SEQ ID NO: 106003 - DNA, 25 bp, Saccharomyces pastorianus
gaacatcttctatgtggtgcctcta

SEQ ID NO: 106004 - DNA, 25 bp, Saccharomyces pastorianus
taaacttgtcgtgtcctaatgtgcc

SEQ ID NO: 106005 - DNA, 25 bp, Saccharomyces pastorianus
gtgtcctaatgtgcctgggaaacca

SEQ ID NO: 106006 - DNA, 25 bp, Saccharomyces pastorianus
aaacctcttggtgtcaagttgcctc

SEQ ID NO: 106007 - DNA, 25 bp, Saccharomyces pastorianus
gttgcttatgactttgacttgacaa

SEQ ID NO: 106008 - DNA, 25 bp, Saccharomyces pastorianus
aatatgttaagccaaccgcgctcgc

SEQ ID NO: 106009 - DNA, 25 bp, Saccharomyces pastorianus
gggaaaccacaagttgcttatgact

SEQ ID NO: 106010 - DNA, 25 bp, Saccharomyces pastorianus
tctatgtggtgcctctatgctacag

SEQ ID NO: 106011 - DNA, 25 bp, Saccharomyces pastorianus
aaatcccactagacgtttctgacta

SEQ ID NO: 106012 - DNA, 25 bp, Saccharomyces pastorianus
aggccagggagccattatcgccaaa

SEQ ID NO: 106013 - DNA, 25 bp, Saccharomyces pastorianus
agggaagagcctcctttgcctaaga

SEQ ID NO: 106014 - DNA, 25 bp, Saccharomyces pastorianus
tctagaatgaatgcccacaaccgtc

SEQ ID NO: 106015 - DNA, 25 bp, Saccharomyces pastorianus
tggagatttaccaaccacagagaaa

SEQ ID NO: 106016 - DNA, 25 bp, Saccharomyces pastorianus
gccaaaggcctaacagagtctccaa

SEQ ID NO: 106017 - DNA, 25 bp, Saccharomyces pastorianus
tttgcgccttcggatgctgcatcaa

SEQ ID NO: 106018 - DNA, 25 bp, Saccharomyces pastorianus
tctgactacaccctcgatgatatga

SEQ ID NO: 106019 - DNA, 25 bp, Saccharomyces pastorianus
gtcacacagacagctcatctaatca

SEQ ID NO: 106020 - DNA, 25 bp, Saccharomyces pastorianus
gacctagactgggatttgcgccttc

SEQ ID NO: 106021 - DNA, 25 bp, Saccharomyces pastorianus
gaataacactcctacttctgtcgaa

SEQ ID NO: 106022 - DNA, 25 bp, Saccharomyces pastorianus
aactattcagctctcgtcacgaaag

SEQ ID NO: 106023 - DNA, 25 bp, Saccharomyces pastorianus
tagctgacgccatcaacaccaagta

SEQ ID NO: 106024 - DNA, 25 bp, Saccharomyces pastorianus
attaagactcctgcatacgacatag

SEQ ID NO: 106025 - DNA, 25 bp, Saccharomyces pastorianus
gggagttgctactttcatttgctaa

SEQ ID NO: 106026 - DNA, 25 bp, Saccharomyces pastorianus
tgaattttctcaggcatctgctaaa

SEQ ID NO: 106027 - DNA, 25 bp, Saccharomyces pastorianus
tctaaccatgttaactgtgcgtatt

SEQ ID NO: 106028 - DNA, 25 bp, Saccharomyces pastorianus
gaacttttgcctatcgtagctgacg

SEQ ID NO: 106029 - DNA, 25 bp, Saccharomyces pastorianus
gccgcatataggctaaccgtagctt

SEQ ID NO: 106030 - DNA, 25 bp, Saccharomyces pastorianus
aactccgtaacttggcttgcaaaca

SEQ ID NO: 106031 - DNA, 25 bp, Saccharomyces pastorianus
tggctattgcagtttccacactaat

SEQ ID NO: 106032 - DNA, 25 bp, Saccharomyces pastorianus
cttacggaaatttggctactgttga

SEQ ID NO: 106033 - DNA, 25 bp, Saccharomyces pastorianus
tagacgttgggttcttggtcgttca

SEQ ID NO: 106034 - DNA, 25 bp, Saccharomyces pastorianus
gcatattcgggcactggagctttga

SEQ ID NO: 106035 - DNA, 25 bp, Saccharomyces pastorianus
agcgtacacgtctaggtgcattcaa

SEQ ID NO: 106036 - DNA, 25 bp, Saccharomyces pastorianus
attgtcttggcgctctcaacgaaat

SEQ ID NO: 106037 - DNA, 25 bp, Saccharomyces pastorianus
caacgctccattgttaacttcttac

SEQ ID NO: 106038 - DNA, 25 bp, Saccharomyces pastorianus
caatgatcatttgcgcagccttgac

SEQ ID NO: 106039 - DNA, 25 bp, Saccharomyces pastorianus
cagccttgaccgttttaggtgctac

SEQ ID NO: 106040 - DNA, 25 bp, Saccharomyces pastorianus
agtgccgatgtcgttgctactggaa

SEQ ID NO: 106041 - DNA, 25 bp, Saccharomyces pastorianus
tggatttagaccacataccgcttct

SEQ ID NO: 106042 - DNA, 25 bp, Saccharomyces pastorianus
attccccgacagaagaccagtgtat

SEQ ID NO: 106043 - DNA, 25 bp, Saccharomyces pastorianus
gaattcagcatcacgttattaccag

SEQ ID NO: 106044 - DNA, 25 bp, Saccharomyces pastorianus
attaccaccagggacgatgctgaaa

SEQ ID NO: 106045 - DNA, 25 bp, Saccharomyces pastorianus
tttgaacatggaacctctcgttgag

SEQ ID NO: 106046 - DNA, 25 bp, Saccharomyces pastorianus
taatagggacctgcactcattcaac

SEQ ID NO: 106047 - DNA, 25 bp, Saccharomyces pastorianus
aatacgcagaggctggtgcatccgc

SEQ ID NO: 106048 - DNA, 25 bp, Saccharomyces pastorianus
attagctggagctgacactgtcctt

SEQ ID NO: 106049 - DNA, 25 bp, Saccharomyces pastorianus
gacactgtccttcttatagtcaaga

SEQ ID NO: 106050 - DNA, 25 bp, Saccharomyces pastorianus
tgttgctgctgaacaggctctcaaa

SEQ ID NO: 106051 - DNA, 25 bp, Saccharomyces pastorianus
atttccgtattgaccgaacctcatt

SEQ ID NO: 106052 - DNA, 25 bp, Saccharomyces pastorianus
tagatttgaaatttcctcccaagga

SEQ ID NO: 106053 - DNA, 25 bp, Saccharomyces pastorianus
ttgctctatcgggaattaccaccag

SEQ ID NO: 106054 - DNA, 25 bp, Saccharomyces pastorianus
ctcattggtttcacggttcgttaca

SEQ ID NO: 106055 - DNA, 25 bp, Saccharomyces pastorianus
aactggagcctgtagatttcgagaa

SEQ ID NO: 106056 - DNA, 25 bp, Saccharomyces pastorianus
ataacggcttgttctaactgtagag

SEQ ID NO: 106057 - DNA, 25 bp, Saccharomyces pastorianus
gtttctcttctttatgcctcatttt

SEQ ID NO: 106058 - DNA, 25 bp, Saccharomyces pastorianus
atgcctcatttttccctccaaagaa

SEQ ID NO: 106059 - DNA, 25 bp, Saccharomyces pastorianus
aataacaatgctttcttatggcgtt

SEQ ID NO: 106060 - DNA, 25 bp, Saccharomyces pastorianus
cgtattattcctgccatcgcaacaa

SEQ ID NO: 106061 - DNA, 25 bp, Saccharomyces pastorianus
accaaattcacagctggccgtatta

SEQ ID NO: 106062 - DNA, 25 bp, Saccharomyces pastorianus
ctttgttaatttagctttgccattt

SEQ ID NO: 106063 - DNA, 25 bp, Saccharomyces pastorianus
ttcatcgaaactgctgatcgccaaa

SEQ ID NO: 106064 - DNA, 25 bp, Saccharomyces pastorianus
agagctcaaaactacttcatcgaaa

SEQ ID NO: 106065 - DNA, 25 bp, Saccharomyces pastorianus
gcaacaaccacttctttggttactg

SEQ ID NO: 106066 - DNA, 25 bp, Saccharomyces pastorianus
atcaggcacaggaaagtctacactt

SEQ ID NO: 106067 - DNA, 25 bp, Saccharomyces pastorianus
acctcagggcttggatacacgtatt

SEQ ID NO: 106068 - DNA, 25 bp, Saccharomyces pastorianus
gtccacctgctctactaacaatggt

SEQ ID NO: 106069 - DNA, 25 bp, Saccharomyces pastorianus
tgagtgtacttcagccttggattct

SEQ ID NO: 106070 - DNA, 25 bp, Saccharomyces pastorianus
tgtcaggtggacaagcgcaaaggct

SEQ ID NO: 106071 - DNA, 25 bp, Saccharomyces pastorianus
acgtaggaatccatgactttgtaat

SEQ ID NO: 106072 - DNA, 25 bp, Saccharomyces pastorianus
gagatcgtcaaaaaaggtccacctg

SEQ ID NO: 106073 - DNA, 25 bp, Saccharomyces pastorianus
gctttgcatagccagagcacttctg

SEQ ID NO: 106074 - DNA, 25 bp, Saccharomyces pastorianus
tgatacaactttactgtcaggtgga

SEQ ID NO: 106075 - DNA, 25 bp, Saccharomyces pastorianus
ttgtaatttcatcacctcagggctt

SEQ ID NO: 106076 - DNA, 25 bp, Saccharomyces pastorianus
ttggattctgtcagctcctctatca

SEQ ID NO: 106077 - DNA, 25 bp, Saccharomyces pastorianus
gaatcctcgagaatgtaccgcaatt

SEQ ID NO: 106078 - DNA, 25 bp, Saccharomyces pastorianus
attggcgacgaaccgaattacctca

SEQ ID NO: 106079 - DNA, 25 bp, Saccharomyces pastorianus
acagcatgccaaacgttccagtaag

SEQ ID NO: 106080 - DNA, 25 bp, Saccharomyces pastorianus
agtcttgtcgattcttcctacaatc

SEQ ID NO: 106081 - DNA, 25 bp, Saccharomyces pastorianus
ggacttgatttcctgactgatccga

SEQ ID NO: 106082 - DNA, 25 bp, Saccharomyces pastorianus
gacaaactcagcgttgggtcactgt

SEQ ID NO: 106083 - DNA, 25 bp, Saccharomyces pastorianus
ggctgcaaacgttccctgataagca

SEQ ID NO: 106084 - DNA, 25 bp, Saccharomyces pastorianus
acagtggcgctggtagtcttgtcga

SEQ ID NO: 106085 - DNA, 25 bp, Saccharomyces pastorianus
gtttcagacagttcaggacatccca

SEQ ID NO: 106086 - DNA, 25 bp, Saccharomyces pastorianus
gaagcagtctcttatatccagcctt

SEQ ID NO: 106087 - DNA, 25 bp, Saccharomyces pastorianus
acaatctcccctctttatggaagga

SEQ ID NO: 106088 - DNA, 25 bp, Saccharomyces pastorianus
gaatgcgtcgcagaggcctaaagcc

SEQ ID NO: 106089 - DNA, 25 bp, Saccharomyces pastorianus
agagatcatcttgccgttcttgagc

SEQ ID NO: 106090 - DNA, 25 bp, Saccharomyces pastorianus
tagcagcgctttggaagttttctac

SEQ ID NO: 106091 - DNA, 25 bp, Saccharomyces pastorianus
gaagcgaggactttttgccatacag

SEQ ID NO: 106092 - DNA, 25 bp, Saccharomyces pastorianus
taaagccctccgcagcattaagtac

SEQ ID NO: 106093 - DNA, 25 bp, Saccharomyces pastorianus
gaaatatgcatttgggactctctat

SEQ ID NO: 106094 - DNA, 25 bp, Saccharomyces pastorianus
tacattttactcctaccagtttcca

SEQ ID NO: 106095 - DNA, 25 bp, Saccharomyces pastorianus
caagatatccgttgatcagccgatc

SEQ ID NO: 106096 - DNA, 25 bp, Saccharomyces pastorianus
aacgcgccaccaattgtaaagtttg

SEQ ID NO: 106097 - DNA, 25 bp, Saccharomyces pastorianus
cactcgtgtccgttaactatctgaa

SEQ ID NO: 106098 - DNA, 25 bp, Saccharomyces pastorianus
tgagcttttatcgaacctccatcta

SEQ ID NO: 106099 - DNA, 25 bp, Saccharomyces pastorianus
aaacgatttggtcacctatacgccg

SEQ ID NO: 106100 - DNA, 25 bp, Saccharomyces pastorianus
gaatatcgtggtcaccgattcgtat

SEQ ID NO: 106101 - DNA, 25 bp, Saccharomyces pastorianus
agcaaccccaccacaaatgagaatg

SEQ ID NO: 106102 - DNA, 25 bp, Saccharomyces pastorianus
cttccacaaatccaattaccacagg

SEQ ID NO: 106103 - DNA, 25 bp, Saccharomyces pastorianus
tagatggtctcaacgaatacttcat

SEQ ID NO: 106104 - DNA, 25 bp, Saccharomyces pastorianus
aatgttttgggaatgggacctgctt

SEQ ID NO: 106105 - DNA, 25 bp, Saccharomyces pastorianus
tatacgccgcaagagatccaggaaa

SEQ ID NO: 106106 - DNA, 25 bp, Saccharomyces pastorianus
gggagctatttatcgtcagcagcaa

SEQ ID NO: 106107 - DNA, 25 bp, Saccharomyces pastorianus
ggacctgcttggataatgacgacat

SEQ ID NO: 106108 - DNA, 25 bp, Saccharomyces pastorianus
gcaatcctgccggtcatattaaacg

SEQ ID NO: 106109 - DNA, 25 bp, Saccharomyces pastorianus
atttaactcagatctaccttccaca

SEQ ID NO: 106110 - DNA, 25 bp, Saccharomyces pastorianus
ttttggtagtaactcccctatgcca

SEQ ID NO: 106111 - DNA, 25 bp, Saccharomyces pastorianus
acctccagggttttttccaatgcat

SEQ ID NO: 106112 - DNA, 25 bp, Saccharomyces pastorianus
ggtaacaggacaacagccacagcca

SEQ ID NO: 106113 - DNA, 25 bp, Saccharomyces pastorianus
tgggtgtaccaccaaattttccaca

SEQ ID NO: 106114 - DNA, 25 bp, Saccharomyces pastorianus
actaattgctcatcagggtccacaa

SEQ ID NO: 106115 - DNA, 25 bp, Saccharomyces pastorianus
aatgcatcctaactttcctaacggc

SEQ ID NO: 106116 - DNA, 25 bp, Saccharomyces pastorianus
accaggtctcgttcaattccagaaa

SEQ ID NO: 106117 - DNA, 25 bp, Saccharomyces pastorianus
atctgcctcaacagcaatacatgcc

SEQ ID NO: 106118 - DNA, 25 bp, Saccharomyces pastorianus
gcatcctcctaataacaacgcattt

SEQ ID NO: 106119 - DNA, 25 bp, Saccharomyces pastorianus
gaggaaacagcaacgccagatctgc

SEQ ID NO: 106120 - DNA, 25 bp, Saccharomyces pastorianus
aattttccacaacgcatgatgccac

SEQ ID NO: 106121 - DNA, 25 bp, Saccharomyces pastorianus
gaaacgggcattcaacttcccgtga

SEQ ID NO: 106122 - DNA, 25 bp, Saccharomyces pastorianus
tgaccgccaccctagtaatttgatg

SEQ ID NO: 106123 - DNA, 25 bp, Saccharomyces pastorianus
aacttcccgtgatgaatgccaatga

SEQ ID NO: 106124 - DNA, 25 bp, Saccharomyces pastorianus
gaagcgcattactgacaaattaacg

SEQ ID NO: 106125 - DNA, 25 bp, Saccharomyces pastorianus
agccgtgatgtccatgaccggttat

SEQ ID NO: 106126 - DNA, 25 bp, Saccharomyces pastorianus
aacgagcacaagaatgccattcgaa

SEQ ID NO: 106127 - DNA, 25 bp, Saccharomyces pastorianus
gccattcgaaatgcaagggccatgt

SEQ ID NO: 106128 - DNA, 25 bp, Saccharomyces pastorianus
gcaatccttgaagcttttgctttcg

SEQ ID NO: 106129 - DNA, 25 bp, Saccharomyces pastorianus
aggtttaatgacttggacgttccag

SEQ ID NO: 106130 - DNA, 25 bp, Saccharomyces pastorianus
ggccatgttggtattgaagcgcatt

SEQ ID NO: 106131 - DNA, 25 bp, Saccharomyces pastorianus
aggtagcttccgtattacttgtgag

SEQ ID NO: 106132 - DNA, 25 bp, Saccharomyces pastorianus
cttcttcttcctatactattttctc

SEQ ID NO: 106133 - DNA, 25 bp, Saccharomyces pastorianus
atgaattttcagtcaggttctccga

SEQ ID NO: 106134 - DNA, 25 bp, Saccharomyces pastorianus
cttcttttcttcatcttcattcttc

SEQ ID NO: 106135 - DNA, 25 bp, Saccharomyces pastorianus
gacttttaattgctgtgcccctcct

SEQ ID NO: 106136 - DNA, 25 bp, Saccharomyces pastorianus
acctcttccttctatatcttttctt

SEQ ID NO: 106137 - DNA, 25 bp, Saccharomyces pastorianus
aggttctccgacttttaattgctgt

SEQ ID NO: 106138 - DNA, 25 bp, Saccharomyces pastorianus
atcttcattcttcttattttcttca

SEQ ID NO: 106139 - DNA, 25 bp, Saccharomyces pastorianus
atcttcattcttcttgttttcctct

SEQ ID NO: 106140 - DNA, 25 bp, Saccharomyces pastorianus
ttcttctcttactactatccttcta

SEQ ID NO: 106141 - DNA, 25 bp, Saccharomyces pastorianus
tattaactctactatacctcttcct

SEQ ID NO: 106142 - DNA, 25 bp, Saccharomyces pastorianus
tattttctctcttcttacttccttc

SEQ ID NO: 106143 - DNA, 25 bp, Saccharomyces pastorianus
atctgtacataggtggctgtctgct

SEQ ID NO: 106144 - DNA, 25 bp, Saccharomyces pastorianus
gactacggctaaagactctattgca

SEQ ID NO: 106145 - DNA, 25 bp, Saccharomyces pastorianus
ctggtttttcgggtgctgatttaca

SEQ ID NO: 106146 - DNA, 25 bp, Saccharomyces pastorianus
gtggtacccggcaatgataatatag

SEQ ID NO: 106147 - DNA, 25 bp, Saccharomyces pastorianus
aagcacttcagctgcttctgagctg

SEQ ID NO: 106148 - DNA, 25 bp, Saccharomyces pastorianus
gggctctgctacaatgcttatttga

SEQ ID NO: 106149 - DNA, 25 bp, Saccharomyces pastorianus
ctgagctgacagctgtggtcacaat

SEQ ID NO: 106150 - DNA, 25 bp, Saccharomyces pastorianus
gggcgatttacgataggttccagaa

SEQ ID NO: 106151 - DNA, 25 bp, Saccharomyces pastorianus
gatagcgcattgttaagaccgggaa

SEQ ID NO: 106152 - DNA, 25 bp, Saccharomyces pastorianus
ctgtctgctgcaggccaatcggaag

SEQ ID NO: 106153 - DNA, 25 bp, Saccharomyces pastorianus
ttcagtatcaatgagcacgggcgta

SEQ ID NO: 106154 - DNA, 25 bp, Saccharomyces pastorianus
aaattgggactgtccttgcttggga

SEQ ID NO: 106155 - DNA, 25 bp, Saccharomyces pastorianus
gaaaataccccgagcattatgcaga

SEQ ID NO: 106156 - DNA, 25 bp, Saccharomyces pastorianus
aggtgcttataacccagacactggt

SEQ ID NO: 106157 - DNA, 25 bp, Saccharomyces pastorianus
gacaacaatgctggatcttctgaaa

SEQ ID NO: 106158 - DNA, 25 bp, Saccharomyces pastorianus
tccttgcttgggaggtatggcccat

SEQ ID NO: 106159 - DNA, 25 bp, Saccharomyces pastorianus
agaggttcaacacgaaggtgcttat

SEQ ID NO: 106160 - DNA, 25 bp, Saccharomyces pastorianus
tatggcccatggaccctgtggtgaa

SEQ ID NO: 106161 - DNA, 25 bp, Saccharomyces pastorianus
gagttcaaatctgcattttcttgct

SEQ ID NO: 106162 - DNA, 25 bp, Saccharomyces pastorianus
agaatcagcgccaaatgtttcaagc

SEQ ID NO: 106163 - DNA, 25 bp, Saccharomyces pastorianus
aaagcaaatgggtcctactgaagaa

SEQ ID NO: 106164 - DNA, 25 bp, Saccharomyces pastorianus
cattttcttgcttcgtctattctga

SEQ ID NO: 106165 - DNA, 25 bp, Saccharomyces pastorianus
ttacggaccatttacgcaaaactca

SEQ ID NO: 106166 - DNA, 25 bp, Saccharomyces pastorianus
gtcgctaccattcagttggactttc

SEQ ID NO: 106167 - DNA, 25 bp, Saccharomyces pastorianus
tggactttcaactacctgagaggtt

SEQ ID NO: 106168 - DNA, 25 bp, Saccharomyces pastorianus
ggtataggatcaagtcggccatttt

SEQ ID NO: 106169 - DNA, 25 bp, Saccharomyces pastorianus
agattctaatgagggccgttggccg

SEQ ID NO: 106170 - DNA, 25 bp, Saccharomyces pastorianus
tagacatgtgcactgccttgcagaa

SEQ ID NO: 106171 - DNA, 25 bp, Saccharomyces pastorianus
gaagccgacgacatggaaccagttc

SEQ ID NO: 106172 - DNA, 25 bp, Saccharomyces pastorianus
gcaaaactcatcaagtcgctaccat

SEQ ID NO: 106173 - DNA, 25 bp, Saccharomyces pastorianus
gatggtgcgttctatggtccaaagc

SEQ ID NO: 106174 - DNA, 25 bp, Saccharomyces pastorianus
agagctacttttggttctatcgaaa

SEQ ID NO: 106175 - DNA, 25 bp, Saccharomyces pastorianus
accaagctgtaattattcccgtcaa

SEQ ID NO: 106176 - DNA, 25 bp, Saccharomyces pastorianus
ggaaaacttgaaccacctgtcaaat

SEQ ID NO: 106177 - DNA, 25 bp, Saccharomyces pastorianus
gtgacctccaacaaaattacctctc

SEQ ID NO: 106178 - DNA, 25 bp, Saccharomyces pastorianus
ggcctatcacgcttggagaccattt

SEQ ID NO: 106179 - DNA, 25 bp, Saccharomyces pastorianus
caatcctttgagagcttgggtgaaa

SEQ ID NO: 106180 - DNA, 25 bp, Saccharomyces pastorianus
tgaagagctctatctgtcacataat

SEQ ID NO: 106181 - DNA, 25 bp, Saccharomyces pastorianus
gaccatttatctggagggaaaccct

SEQ ID NO: 106182 - DNA, 25 bp, Saccharomyces pastorianus
ttgggtgaaaacctgtccggcctat

SEQ ID NO: 106183 - DNA, 25 bp, Saccharomyces pastorianus
ttaactgacatatgggcctccttta

SEQ ID NO: 106184 - DNA, 25 bp, Saccharomyces pastorianus
actgactatgaacttacctccatcc

SEQ ID NO: 106185 - DNA, 25 bp, Saccharomyces pastorianus
ctaactactttggacgtgacctcca

SEQ ID NO: 106186 - DNA, 25 bp, Saccharomyces pastorianus
tattgaacccgattccttcgaaggt

SEQ ID NO: 106187 - DNA, 25 bp, Saccharomyces pastorianus
gcgatacccaatttcacaaggattt

SEQ ID NO: 106188 - DNA, 25 bp, Saccharomyces pastorianus
tgcgtaccgcactataatgggccgt

SEQ ID NO: 106189 - DNA, 25 bp, Saccharomyces pastorianus
gctgctcgtagctattgaagaagaa

SEQ ID NO: 106190 - DNA, 25 bp, Saccharomyces pastorianus
ttatgtccaacaccatactcgcaca

SEQ ID NO: 106191 - DNA, 25 bp, Saccharomyces pastorianus
taatgggccgttccgttatgtccaa

SEQ ID NO: 106192 - DNA, 25 bp, Saccharomyces pastorianus
cttggacactgtcgagctgctcgta

SEQ ID NO: 106193 - DNA, 25 bp, Saccharomyces pastorianus
aggcgtttgataagaactctcccaa

SEQ ID NO: 106194 - DNA, 25 bp, Saccharomyces pastorianus
aagcaaatctccagcgatacccaat

SEQ ID NO: 106195 - DNA, 25 bp, Saccharomyces pastorianus
gaaatccctgacaaagtggctgatg

SEQ ID NO: 106196 - DNA, 25 bp, Saccharomyces pastorianus
atgtttagatccgtttgccgcattt

SEQ ID NO: 106197 - DNA, 25 bp, Saccharomyces pastorianus
agatcaggtttctcaaagggtcatt

SEQ ID NO: 106198 - DNA, 25 bp, Saccharomyces pastorianus
ggttgtggacttcagagacgccatt

SEQ ID NO: 106199 - DNA, 25 bp, Saccharomyces pastorianus
aggtactgtatccacttcagcatca

SEQ ID NO: 106200 - DNA, 25 bp, Saccharomyces pastorianus
gactacaagacatactgcctcaggt

SEQ ID NO: 106201 - DNA, 25 bp, Saccharomyces pastorianus
ttagaggcggccgacgacgacgatt

SEQ ID NO: 106202 - DNA, 25 bp, Saccharomyces pastorianus
tgggcggacaagataccatctctgc

SEQ ID NO: 106203 - DNA, 25 bp, Saccharomyces pastorianus
gaagcgatttcgactctactgaggt

SEQ ID NO: 106204 - DNA, 25 bp, Saccharomyces pastorianus
ggtgcattctcggttgtagccaaag

SEQ ID NO: 106205 - DNA, 25 bp, Saccharomyces pastorianus
cggtgtcgcacgtggttatggattt

SEQ ID NO: 106206 - DNA, 25 bp, Saccharomyces pastorianus
actgcctcaggtgccgtcattaaag

SEQ ID NO: 106207 - DNA, 25 bp, Saccharomyces pastorianus
gcatcagcactgcagaatcgttcgt

SEQ ID NO: 106208 - DNA, 25 bp, Saccharomyces pastorianus
acttcaagaccactgcgagcgctaa

SEQ ID NO: 106209 - DNA, 25 bp, Saccharomyces pastorianus
gaatatatatatcaactctccagaa

SEQ ID NO: 106210 - DNA, 25 bp, Saccharomyces pastorianus
gatggtagcaaacccaaggaagtca

SEQ ID NO: 106211 - DNA, 25 bp, Saccharomyces pastorianus
gagcactaaactgttggcgtcatta

SEQ ID NO: 106212 - DNA, 25 bp, Saccharomyces pastorianus
tgccgcatttactgcacatcctaaa

SEQ ID NO: 106213 - DNA, 25 bp, Saccharomyces pastorianus
atttcgtccacaacagaagtttcta

SEQ ID NO: 106214 - DNA, 25 bp, Saccharomyces pastorianus
aacaatgcatcctcaagtaacgccg

SEQ ID NO: 106215 - DNA, 25 bp, Saccharomyces pastorianus
gtataacttcgccatcatcagtaat

SEQ ID NO: 106216 - DNA, 25 bp, Saccharomyces pastorianus
ttgccgcgtataatttcgtccacaa

SEQ ID NO: 106217 - DNA, 25 bp, Saccharomyces pastorianus
agtaacgccgccagtataacttcgc

SEQ ID NO: 106218 - DNA, 25 bp, Saccharomyces pastorianus
gataagatctaacaacgcgttgatg

SEQ ID NO: 106219 - DNA, 25 bp, Saccharomyces pastorianus
caggattctacttttcttgatgaaa

SEQ ID NO: 106220 - DNA, 25 bp, Saccharomyces pastorianus
attatggctcattgccctagctcta

SEQ ID NO: 106221 - DNA, 25 bp, Saccharomyces pastorianus
acacgtttgcgttggtgtagccact

SEQ ID NO: 106222 - DNA, 25 bp, Saccharomyces pastorianus
ttggcagccattatcatatccgtta

SEQ ID NO: 106223 - DNA, 25 bp, Saccharomyces pastorianus
tagggatggttctgccatttctgca

SEQ ID NO: 106224 - DNA, 25 bp, Saccharomyces pastorianus
gtctgttttggctttgaacctctta

SEQ ID NO: 106225 - DNA, 25 bp, Saccharomyces pastorianus
tagaacagagctaagtcaccccgac

SEQ ID NO: 106226 - DNA, 25 bp, Saccharomyces pastorianus
gtcccgcctatacagggctgatatg

SEQ ID NO: 106227 - DNA, 25 bp, Saccharomyces pastorianus
gtttcggcgaccataacttgggtga

SEQ ID NO: 106228 - DNA, 25 bp, Saccharomyces pastorianus
tgcgttgtcttttatcgccacagga

SEQ ID NO: 106229 - DNA, 25 bp, Saccharomyces pastorianus
gagtggtcgttacatgtccggatct

SEQ ID NO: 106230 - DNA, 25 bp, Saccharomyces pastorianus
ttagcgatcatcttttccttcttta

SEQ ID NO: 106231 - DNA, 25 bp, Saccharomyces pastorianus
tccatattttggcatttccctgcag

SEQ ID NO: 106232 - DNA, 25 bp, Saccharomyces pastorianus
aataacggccacatttacgaagaag

SEQ ID NO: 106233 - DNA, 25 bp, Saccharomyces pastorianus
gatcatcgacgaccgcatatttaga

SEQ ID NO: 106234 - DNA, 25 bp, Saccharomyces pastorianus
gggatccggcacgttgatatgcaac

SEQ ID NO: 106235 - DNA, 25 bp, Saccharomyces pastorianus
tttccctgcagctgatcatcgacga

SEQ ID NO: 106236 - DNA, 25 bp, Saccharomyces pastorianus
gcgcatttggatgatccggactcca

SEQ ID NO: 106237 - DNA, 25 bp, Saccharomyces pastorianus
tggcccaattcgtacagctttttaa

SEQ ID NO: 106238 - DNA, 25 bp, Saccharomyces pastorianus
agactatcatgctattccgggatcc

SEQ ID NO: 106239 - DNA, 25 bp, Saccharomyces pastorianus
gcaagacgcgacagttcccattcaa

SEQ ID NO: 106240 - DNA, 25 bp, Saccharomyces pastorianus
ggtcgtacaaacacaacatgcccta

SEQ ID NO: 106241 - DNA, 25 bp, Saccharomyces pastorianus
cttcgcgcaagcaacagtttttctg

SEQ ID NO: 106242 - DNA, 25 bp, Saccharomyces pastorianus
gattggttttattttcctgccctgg

SEQ ID NO: 106243 - DNA, 25 bp, Saccharomyces pastorianus
ggtcctcgactctatcaacaaaaca

SEQ ID NO: 106244 - DNA, 25 bp, Saccharomyces pastorianus
ttattcgatcatcaagagccccatc

SEQ ID NO: 106245 - DNA, 25 bp, Saccharomyces pastorianus
ggtgcctacacatcatcggcggcta

SEQ ID NO: 106246 - DNA, 25 bp, Saccharomyces pastorianus
ggcggctactcaattcaacggtttt

SEQ ID NO: 106247 - DNA, 25 bp, Saccharomyces pastorianus
tgctgttttgcgtctagcgctagag

SEQ ID NO: 106248 - DNA, 25 bp, Saccharomyces pastorianus
gcgctagaggaatttttccccgtag

SEQ ID NO: 106249 - DNA, 25 bp, Saccharomyces pastorianus
gattttgaatccactactgcggtcc

SEQ ID NO: 106250 - DNA, 25 bp, Saccharomyces pastorianus
gctacagcgtttactttggcatctc

SEQ ID NO: 106251 - DNA, 25 bp, Saccharomyces pastorianus
ttccccgtaggttgtggtgttgata

SEQ ID NO: 106252 - DNA, 25 bp, Saccharomyces pastorianus
gctgctaacgaatacgggttgcccc

SEQ ID NO: 106253 - DNA, 25 bp, Saccharomyces pastorianus
gttctgttcatgaactttttctctg

SEQ ID NO: 106254 - DNA, 25 bp, Saccharomyces pastorianus
accgtagtaacgttctgttcatgaa

SEQ ID NO: 106255 - DNA, 25 bp, Saccharomyces pastorianus
tttctctgtttttgtatgtacaatt

SEQ ID NO: 106256 - DNA, 25 bp, Saccharomyces pastorianus
ttcttgcgtcggcatttttccaaag

SEQ ID NO: 106257 - DNA, 25 bp, Saccharomyces pastorianus
ggttttcgcagatgtctatgttctt

SEQ ID NO: 106258 - DNA, 25 bp, Saccharomyces pastorianus
tgcgtcggcatttttccaaagtaaa

SEQ ID NO: 106259 - DNA, 25 bp, Saccharomyces pastorianus
agatgtctatgttcttgcgtcggca

SEQ ID NO: 106260 - DNA, 25 bp, Saccharomyces pastorianus
gttcatgaactttttctctgttttt

SEQ ID NO: 106261 - DNA, 25 bp, Saccharomyces pastorianus
atgatcttgctataccgtagtaacg

SEQ ID NO: 106262 - DNA, 25 bp, Saccharomyces pastorianus
actttatttttggttttcgcagatg

SEQ ID NO: 106263 - DNA, 25 bp, Saccharomyces pastorianus
caaaatttaagcattttcactacca

SEQ ID NO: 106264 - DNA, 25 bp, Saccharomyces pastorianus
ggacctgcacggtgaggacgtacaa

SEQ ID NO: 106265 - DNA, 25 bp, Saccharomyces pastorianus
agaacgacgggctggcagacgatct

SEQ ID NO: 106266 - DNA, 25 bp, Saccharomyces pastorianus
gaagaagcacatgccttcaccgtgc

SEQ ID NO: 106267 - DNA, 25 bp, Saccharomyces pastorianus
ggatggcgacctcgttatggacaac

SEQ ID NO: 106268 - DNA, 25 bp, Saccharomyces pastorianus
acaggcctgcgaattcgacggcgaa

SEQ ID NO: 106269 - DNA, 25 bp, Saccharomyces pastorianus
gtggaattgaccatcaggcccaaat

SEQ ID NO: 106270 - DNA, 25 bp, Saccharomyces pastorianus
tggaaattccctacagcagcgtttt

SEQ ID NO: 106271 - DNA, 25 bp, Saccharomyces pastorianus
ttcaccgtgcgcagcgtggaattga

SEQ ID NO: 106272 - DNA, 25 bp, Saccharomyces pastorianus
agatctcaacgccacgtattctggg

SEQ ID NO: 106273 - DNA, 25 bp, Saccharomyces pastorianus
gcagcgttttgtaccatgcatcaag

SEQ ID NO: 106274 - DNA, 25 bp, Saccharomyces pastorianus
gggccgcccgtgtatcagaacgacg

SEQ ID NO: 106275 - DNA, 25 bp, Saccharomyces pastorianus
gtcgctctgccatcattctagatga

SEQ ID NO: 106276 - DNA, 25 bp, Saccharomyces pastorianus
tttcgcagaatgtatccgtcgtgat

SEQ ID NO: 106277 - DNA, 25 bp, Saccharomyces pastorianus
taacggccacgttatcggtgacgat

SEQ ID NO: 106278 - DNA, 25 bp, Saccharomyces pastorianus
ttgatggcttagactcgcatggctt

SEQ ID NO: 106279 - DNA, 25 bp, Saccharomyces pastorianus
tagcgctgctgaacatttggtgcaa

SEQ ID NO: 106280 - DNA, 25 bp, Saccharomyces pastorianus
gtttatgttgttgctactcacggta

SEQ ID NO: 106281 - DNA, 25 bp, Saccharomyces pastorianus
gtacatatgatgctgtcgactccga

SEQ ID NO: 106282 - DNA, 25 bp, Saccharomyces pastorianus
gaaaagtccgatgccattgacacaa

SEQ ID NO: 106283 - DNA, 25 bp, Saccharomyces pastorianus
ggttactatcgatgtttctccaatt

SEQ ID NO: 106284 - DNA, 25 bp, Saccharomyces pastorianus
ctggcgaacgcatagctgggtccaa

SEQ ID NO: 106285 - DNA, 25 bp, Saccharomyces pastorianus
gacctgggtcatttattagcgctgc

SEQ ID NO: 106286 - DNA, 25 bp, Saccharomyces pastorianus
acgagttctattattggtattccag

SEQ ID NO: 106287 - DNA, 25 bp, Saccharomyces pastorianus
ggaatcccaatactcaagggtgtat

SEQ ID NO: 106288 - DNA, 25 bp, Saccharomyces pastorianus
tagcggctacatgacacctgaggtt

SEQ ID NO: 106289 - DNA, 25 bp, Saccharomyces pastorianus
cggtttacacggactcgtattcatg

SEQ ID NO: 106290 - DNA, 25 bp, Saccharomyces pastorianus
gatgaatcgttgcatccaatggcaa

SEQ ID NO: 106291 - DNA, 25 bp, Saccharomyces pastorianus
gagggtattgacgtggaatcccaat

SEQ ID NO: 106292 - DNA, 25 bp, Saccharomyces pastorianus
gaacggattaggtatctgcaatcct

SEQ ID NO: 106293 - DNA, 25 bp, Saccharomyces pastorianus
tctggaaaccaatcaacccttttgc

SEQ ID NO: 106294 - DNA, 25 bp, Saccharomyces pastorianus
aacgctcccgttaatcaaagtacag

SEQ ID NO: 106295 - DNA, 25 bp, Saccharomyces pastorianus
gttactgtatcggtttacacggact

SEQ ID NO: 106296 - DNA, 25 bp, Saccharomyces pastorianus
ggatggtattcctctgttactgtat

SEQ ID NO: 106297 - DNA, 25 bp, Saccharomyces pastorianus
aattctgcaagctccaattttgaag

SEQ ID NO: 106298 - DNA, 25 bp, Saccharomyces pastorianus
gaaaactattctccctgtgtaggta

SEQ ID NO: 106299 - DNA, 25 bp, Saccharomyces pastorianus
gaactatatctccacgtgtacagaa

SEQ ID NO: 106300 - DNA, 25 bp, Saccharomyces pastorianus
taaacaagctgtcctcacgcaaaga

SEQ ID NO: 106301 - DNA, 25 bp, Saccharomyces pastorianus
caagcgcatttctatgtcgactata

SEQ ID NO: 106302 - DNA, 25 bp, Saccharomyces pastorianus
gggaaagtctttgctactctccagc

SEQ ID NO: 106303 - DNA, 25 bp, Saccharomyces pastorianus
agagccgtaacccattttctacaga

SEQ ID NO: 106304 - DNA, 25 bp, Saccharomyces pastorianus
gaaagtaggcacatcccttacgtca

SEQ ID NO: 106305 - DNA, 25 bp, Saccharomyces pastorianus
atgtactctaaattcctgcgttcca

SEQ ID NO: 106306 - DNA, 25 bp, Saccharomyces pastorianus
ggtacaccaatatcacaagcgcatt

SEQ ID NO: 106307 - DNA, 25 bp, Saccharomyces pastorianus
ggcttaggttctgatgctttgcata

SEQ ID NO: 106308 - DNA, 25 bp, Saccharomyces pastorianus
gttggtaacggcacatgatatgcca

SEQ ID NO: 106309 - DNA, 25 bp, Saccharomyces pastorianus
tttaccatcccatctcgtgaggaaa

SEQ ID NO: 106310 - DNA, 25 bp, Saccharomyces pastorianus
gcaccaacctgcaacttgatgacaa

SEQ ID NO: 106311 - DNA, 25 bp, Saccharomyces pastorianus
gggcgctaatagtatcacagctagc

SEQ ID NO: 106312 - DNA, 25 bp, Saccharomyces pastorianus
cttggtatgtgaatgccatgctaaa

SEQ ID NO: 106313 - DNA, 25 bp, Saccharomyces pastorianus
gtcactccatattgccgcatctaca

SEQ ID NO: 106314 - DNA, 25 bp, Saccharomyces pastorianus
atatgccaatattcgcaccaacctg

SEQ ID NO: 106315 - DNA, 25 bp, Saccharomyces pastorianus
gattgctggaatattcttggtatgt

SEQ ID NO: 106316 - DNA, 25 bp, Saccharomyces pastorianus
gaggaaatcgtcgtcactccatatt

SEQ ID NO: 106317 - DNA, 25 bp, Saccharomyces pastorianus
tcattgtaagaagccatgttatcaa

SEQ ID NO: 106318 - DNA, 25 bp, Saccharomyces pastorianus
cacagctagcaaacaaagccctatt

SEQ ID NO: 106319 - DNA, 25 bp, Saccharomyces pastorianus
ggctgaccttaattccacttacgaa

SEQ ID NO: 106320 - DNA, 25 bp, Saccharomyces pastorianus
aacctctggaactattgccgaaata

SEQ ID NO: 106321 - DNA, 25 bp, Saccharomyces pastorianus
aattttttccagttgcaagcatgtc

SEQ ID NO: 106322 - DNA, 25 bp, Saccharomyces pastorianus
agtatcgttacgttcaagggacatt

SEQ ID NO: 106323 - DNA, 25 bp, Saccharomyces pastorianus
gcaagcatgtcctgctggtcaagaa

SEQ ID NO: 106324 - DNA, 25 bp, Saccharomyces pastorianus
ggcggattacacaagaagtctatta

SEQ ID NO: 106325 - DNA, 25 bp, Saccharomyces pastorianus
tttccaggtaactcttcttatgcgg

SEQ ID NO: 106326 - DNA, 25 bp, Saccharomyces pastorianus
atggcttgatgaataaacctctgga

SEQ ID NO: 106327 - DNA, 25 bp, Saccharomyces pastorianus
aagaatatgtcagccctctttggct

SEQ ID NO: 106328 - DNA, 25 bp, Saccharomyces pastorianus
tttcctgtggcaagattggcaagct

SEQ ID NO: 106329 - DNA, 25 bp, Saccharomyces pastorianus
gcggatattttgactactgattctg

SEQ ID NO: 106330 - DNA, 25 bp, Saccharomyces pastorianus
agggatcacgaacccaacatggatt

SEQ ID NO: 106331 - DNA, 25 bp, Saccharomyces pastorianus
atgaaacagtcccatagctcaggca

SEQ ID NO: 106332 - DNA, 25 bp, Saccharomyces pastorianus
tgagcgttactgcagggttcctatt

SEQ ID NO: 106333 - DNA, 25 bp, Saccharomyces pastorianus
atcatcacttagagacccctttttc

SEQ ID NO: 106334 - DNA, 25 bp, Saccharomyces pastorianus
gcattacacaaatttcccgaagggt

SEQ ID NO: 106335 - DNA, 25 bp, Saccharomyces pastorianus
tagctcaggcacaacttgcttgaaa

SEQ ID NO: 106336 - DNA, 25 bp, Saccharomyces pastorianus
acttgtctagtccttgcattacaca

SEQ ID NO: 106337 - DNA, 25 bp, Saccharomyces pastorianus
tgccgttctcggtggtggatctcaa

SEQ ID NO: 106338 - DNA, 25 bp, Saccharomyces pastorianus
gacgttaccattctacactgttttc

SEQ ID NO: 106339 - DNA, 25 bp, Saccharomyces pastorianus
tgtaactgagaatccggccgcattg

SEQ ID NO: 106340 - DNA, 25 bp, Saccharomyces pastorianus
gtcaaagtccttgggattttccatt

SEQ ID NO: 106341 - DNA, 25 bp, Saccharomyces pastorianus
gattacccttggcagatgacatcaa

SEQ ID NO: 106342 - DNA, 25 bp, Saccharomyces pastorianus
tactttttaggactgctggctttga

SEQ ID NO: 106343 - DNA, 25 bp, Saccharomyces pastorianus
gaagagctatccgaagcgcgccagt

SEQ ID NO: 106344 - DNA, 25 bp, Saccharomyces pastorianus
atcactggtctttacttcaaatggg

SEQ ID NO: 106345 - DNA, 25 bp, Saccharomyces pastorianus
aaggctccaattcccagtgatgcgg

SEQ ID NO: 106346 - DNA, 25 bp, Saccharomyces pastorianus
gtggctcttgttatctatggtttct

SEQ ID NO: 106347 - DNA, 25 bp, Saccharomyces pastorianus
tgttctgcgacttttattccgttag

SEQ ID NO: 106348 - DNA, 25 bp, Saccharomyces pastorianus
tatggtttctgtttgcctaccaacg

SEQ ID NO: 106349 - DNA, 25 bp, Saccharomyces pastorianus
cattgtttctattgtgtggctcttg

SEQ ID NO: 106350 - DNA, 25 bp, Saccharomyces pastorianus
attccgttagtcttagtgctgttta

SEQ ID NO: 106351 - DNA, 25 bp, Saccharomyces pastorianus
gctttgatttcaacggccgcattta

SEQ ID NO: 106352 - DNA, 25 bp, Saccharomyces pastorianus
gtgtcaactgtacttttggcacaag

SEQ ID NO: 106353 - DNA, 25 bp, Saccharomyces pastorianus
gtaccttccgacgtaaacattgacg

SEQ ID NO: 106354 - DNA, 25 bp, Saccharomyces pastorianus
aaagtggcagggacaccattgttgg

SEQ ID NO: 106355 - DNA, 25 bp, Saccharomyces pastorianus
atgaagttgacatcacggtccacgc

SEQ ID NO: 106356 - DNA, 25 bp, Saccharomyces pastorianus
ggcttactgacagcaatcccaattt

SEQ ID NO: 106357 - DNA, 25 bp, Saccharomyces pastorianus
ttgttatcgatctcagtaccttccg

SEQ ID NO: 106358 - DNA, 25 bp, Saccharomyces pastorianus
aagcctgttacgttggcttactgac

SEQ ID NO: 106359 - DNA, 25 bp, Saccharomyces pastorianus
gtcaaatgatggtcctacgctagaa

SEQ ID NO: 106360 - DNA, 25 bp, Saccharomyces pastorianus
acccgcacctatcaacagtttaagt

SEQ ID NO: 106361 - DNA, 25 bp, Saccharomyces pastorianus
cgaatggtcttggtatgtgtcaact

SEQ ID NO: 106362 - DNA, 25 bp, Saccharomyces pastorianus
caagttccggttattgaatctgcag

SEQ ID NO: 106363 - DNA, 25 bp, Saccharomyces pastorianus
gctgttttagtagcacgtgacgaac

SEQ ID NO: 106364 - DNA, 25 bp, Saccharomyces pastorianus
gctacctcttctgctgatgtcagcg

SEQ ID NO: 106365 - DNA, 25 bp, Saccharomyces pastorianus
gtacccttcaaaagaccattggatt

SEQ ID NO: 106366 - DNA, 25 bp, Saccharomyces pastorianus
agcacaacgagatcgatcactccga

SEQ ID NO: 106367 - DNA, 25 bp, Saccharomyces pastorianus
aaacgctaagtatggccaaggaggc

SEQ ID NO: 106368 - DNA, 25 bp, Saccharomyces pastorianus
atcactccgagttcaacgtcggtgt

SEQ ID NO: 106369 - DNA, 25 bp, Saccharomyces pastorianus
atgtcagcggcttttcttccagaaa

SEQ ID NO: 106370 - DNA, 25 bp, Saccharomyces pastorianus
gagcaccaaagcgttacatcagaaa

SEQ ID NO: 106371 - DNA, 25 bp, Saccharomyces pastorianus
aaggttcgatagaggcaggcctaac

SEQ ID NO: 106372 - DNA, 25 bp, Saccharomyces pastorianus
gcaagtccaaaacgctaccttacag

SEQ ID NO: 106373 - DNA, 25 bp, Saccharomyces pastorianus
gcaatcactggacgctgttttagta

SEQ ID NO: 106374 - DNA, 25 bp, Saccharomyces pastorianus
aattagcgcagcatcatcatcttcc

SEQ ID NO: 106375 - DNA, 25 bp, Saccharomyces pastorianus
ttacgcttcgccagaacttctaaga

SEQ ID NO: 106376 - DNA, 25 bp, Saccharomyces pastorianus
taatttatcttctctgtcatcctct

SEQ ID NO: 106377 - DNA, 25 bp, Saccharomyces pastorianus
aatatatcggatctctgccttacgc

SEQ ID NO: 106378 - DNA, 25 bp, Saccharomyces pastorianus
ggttcatcgactgattttccatgta

SEQ ID NO: 106379 - DNA, 25 bp, Saccharomyces pastorianus
ccgattttctttagctcaggtctgt

SEQ ID NO: 106380 - DNA, 25 bp, Saccharomyces pastorianus
atttatgattcaccagactcctctc

SEQ ID NO: 106381 - DNA, 25 bp, Saccharomyces pastorianus
gtaactacaagttcaccgtctggtt

SEQ ID NO: 106382 - DNA, 25 bp, Saccharomyces pastorianus
ggaccagcatccgatatttgggcct

SEQ ID NO: 106383 - DNA, 25 bp, Saccharomyces pastorianus
gaacctaggttacgctctctgatta

SEQ ID NO: 106384 - DNA, 25 bp, Saccharomyces pastorianus
aaaggcatccgcagtcacgaattcc

SEQ ID NO: 106385 - DNA, 25 bp, Saccharomyces pastorianus
aaaattagcgccactaccagactac

SEQ ID NO: 106386 - DNA, 25 bp, Saccharomyces pastorianus
taccgcagattctagtcgatcctaa

SEQ ID NO: 106387 - DNA, 25 bp, Saccharomyces pastorianus
gcacgttcctcttcctgaaaatgag

SEQ ID NO: 106388 - DNA, 25 bp, Saccharomyces pastorianus
aaagcgttccatgcaaactggagat

SEQ ID NO: 106389 - DNA, 25 bp, Saccharomyces pastorianus
atggacatatgggtgctagagtttt

SEQ ID NO: 106390 - DNA, 25 bp, Saccharomyces pastorianus
aaggctccgttgtagagactattga

SEQ ID NO: 106391 - DNA, 25 bp, Saccharomyces pastorianus
tttttggcataactacctacccact

SEQ ID NO: 106392 - DNA, 25 bp, Saccharomyces pastorianus
cctacccactttgcagttctataat

SEQ ID NO: 106393 - DNA, 25 bp, Saccharomyces pastorianus
aaaatagagcacgttcctcttcctg

SEQ ID NO: 106394 - DNA, 25 bp, Saccharomyces pastorianus
gattttatctcatgaaggctccgtt

SEQ ID NO: 106395 - DNA, 25 bp, Saccharomyces pastorianus
ctcaggtcttagattgacttttcaa

SEQ ID NO: 106396 - DNA, 25 bp, Saccharomyces pastorianus
acgttcccgatgtcacatacacatt

SEQ ID NO: 106397 - DNA, 25 bp, Saccharomyces pastorianus
atagcgccggaagtggtcagtacaa

SEQ ID NO: 106398 - DNA, 25 bp, Saccharomyces pastorianus
aatacttgccggatacactccattt

SEQ ID NO: 106399 - DNA, 25 bp, Saccharomyces pastorianus
gaaccaccaatccaacagggccaag

SEQ ID NO: 106400 - DNA, 25 bp, Saccharomyces pastorianus
tagaaacgccgtacgaaccaccaat

SEQ ID NO: 106401 - DNA, 25 bp, Saccharomyces pastorianus
gataaccgactttggcttcgcaaaa

SEQ ID NO: 106402 - DNA, 25 bp, Saccharomyces pastorianus
agatgtcaagaaccatccgtggttt

SEQ ID NO: 106403 - DNA, 25 bp, Saccharomyces pastorianus
aacgccgaattgaagttcccaccat

SEQ ID NO: 106404 - DNA, 25 bp, Saccharomyces pastorianus
atttttccatccagacgcgcaggac

SEQ ID NO: 106405 - DNA, 25 bp, Saccharomyces pastorianus
ggcttcgcaaaatacgttcccgatg

SEQ ID NO: 106406 - DNA, 25 bp, Saccharomyces pastorianus
ggagttttggtgtgctaatctatga

SEQ ID NO: 106407 - DNA, 25 bp, Saccharomyces pastorianus
gaaaagacactttttaccagctgat

SEQ ID NO: 106408 - DNA, 25 bp, Saccharomyces pastorianus
ttgtctgctttattacttctatcgg

SEQ ID NO: 106409 - DNA, 25 bp, Saccharomyces pastorianus
cggtaagaaactcgagtggacatac

SEQ ID NO: 106410 - DNA, 25 bp, Saccharomyces pastorianus
tattttttttccgttgcttcagcta

SEQ ID NO: 106411 - DNA, 25 bp, Saccharomyces pastorianus
gtctgctttattacttctatcggta

SEQ ID NO: 106412 - DNA, 25 bp, Saccharomyces pastorianus
gtggacatacgagacactttgtgca

SEQ ID NO: 106413 - DNA, 25 bp, Saccharomyces pastorianus
acttctatcggtaagaaactcgagt

SEQ ID NO: 106414 - DNA, 25 bp, Saccharomyces pastorianus
atacgagacactttgtgcagtcgtc

SEQ ID NO: 106415 - DNA, 25 bp, Saccharomyces pastorianus
gctgatcttaaaagttttgtctgct

SEQ ID NO: 106416 - DNA, 25 bp, Saccharomyces pastorianus
acactttttaccagctgatcttaaa

SEQ ID NO: 106417 - DNA, 25 bp, Saccharomyces pastorianus
gagacactttgtgcagtcgtcggag

SEQ ID NO: 106418 - DNA, 25 bp, Saccharomyces pastorianus
gaaaagacactttttaccagctgat

SEQ ID NO: 106419 - DNA, 25 bp, Saccharomyces pastorianus
ttgtctgctttattacttctatcgg

SEQ ID NO: 106420 - DNA, 25 bp, Saccharomyces pastorianus
cggtaagaaactcgagtggacatac

SEQ ID NO: 106421 - DNA, 25 bp, Saccharomyces pastorianus
tattttttttccgttgcttcagcta

SEQ ID NO: 106422 - DNA, 25 bp, Saccharomyces pastorianus
gtctgctttattacttctatcggta

SEQ ID NO: 106423 - DNA, 25 bp, Saccharomyces pastorianus
gtggacatacgagacactttgtgca

SEQ ID NO: 106424 - DNA, 25 bp, Saccharomyces pastorianus
acttctatcggtaagaaactcgagt

SEQ ID NO: 106425 - DNA, 25 bp, Saccharomyces pastorianus
gctgatcttaaaagttttgtctgct

SEQ ID NO: 106426 - DNA, 25 bp, Saccharomyces pastorianus
acactttttaccagctgatcttaaa

SEQ ID NO: 106427 - DNA, 25 bp, Saccharomyces pastorianus
gagacactttgtgcagtcgtcggag

SEQ ID NO: 106428 - DNA, 25 bp, Saccharomyces pastorianus
tacgggatttcttcgatgccattga

SEQ ID NO: 106429 - DNA, 25 bp, Saccharomyces pastorianus
ggaaacttctacaacttatacgatg

SEQ ID NO: 106430 - DNA, 25 bp, Saccharomyces pastorianus
gggtggtatcctgactgacggtaaa

SEQ ID NO: 106431 - DNA, 25 bp, Saccharomyces pastorianus
ttctgcaaccattataccatctcca

SEQ ID NO: 106432 - DNA, 25 bp, Saccharomyces pastorianus
ggtactgacccagtaactgctgaaa

SEQ ID NO: 106433 - DNA, 25 bp, Saccharomyces pastorianus
ctgcagccgtctcccaaattggtga

SEQ ID NO: 106434 - DNA, 25 bp, Saccharomyces pastorianus
agccacaactttaacttctgcaacc

SEQ ID NO: 106435 - DNA, 25 bp, Saccharomyces pastorianus
accaatactactgttgctccagtct

SEQ ID NO: 106436 - DNA, 25 bp, Saccharomyces pastorianus
ttatacgatgagcacattggaactc

SEQ ID NO: 106437 - DNA, 25 bp, Saccharomyces pastorianus
gcagtggcactttagaaatgaactt

SEQ ID NO: 106438 - DNA, 25 bp, Saccharomyces pastorianus
gtctcccaaatcactgatggccaaa

SEQ ID NO: 106439 - DNA, 25 bp, Saccharomyces pastorianus
tccagctccaattactaatggtact

SEQ ID NO: 106440 - DNA, 25 bp, Saccharomyces pastorianus
aagtccaggctactgctgaagtgaa

SEQ ID NO: 106441 - DNA, 25 bp, Saccharomyces pastorianus
gtctggtgacttctataacttgtat

SEQ ID NO: 106442 - DNA, 25 bp, Saccharomyces pastorianus
gcatctaaaactaccagtggcgcta

SEQ ID NO: 106443 - DNA, 25 bp, Saccharomyces pastorianus
cgatccagtcgatgttgtttcctgt

SEQ ID NO: 106444 - DNA, 25 bp, Saccharomyces pastorianus
accagtggcgctagtcaagtaagtg

SEQ ID NO: 106445 - DNA, 25 bp, Saccharomyces pastorianus
agtgatggccaagtccaggctactg

SEQ ID NO: 106446 - DNA, 25 bp, Saccharomyces pastorianus
gaaagacgctaacgatccagtcgat

SEQ ID NO: 106447 - DNA, 25 bp, Saccharomyces pastorianus
ccgctgccgtttcccaaataactga

SEQ ID NO: 106448 - DNA, 25 bp, Saccharomyces pastorianus
gcacattggttctcagtgccatgaa

SEQ ID NO: 106449 - DNA, 25 bp, Saccharomyces pastorianus
aaggctgctgcatcccaaattacag

SEQ ID NO: 106450 - DNA, 25 bp, Saccharomyces pastorianus
gaagggtagaattggctctatcgtt

SEQ ID NO: 106451 - DNA, 25 bp, Saccharomyces pastorianus
gggatctgccccttagtggcgaaga

SEQ ID NO: 106452 - DNA, 25 bp, Saccharomyces pastorianus
tcttttatcaatactcgttcagcag

SEQ ID NO: 106453 - DNA, 25 bp, Saccharomyces pastorianus
gatctgccccttagtggcgaagata

SEQ ID NO: 106454 - DNA, 25 bp, Saccharomyces pastorianus
acaagttggtgttatctatgctcct

SEQ ID NO: 106455 - DNA, 25 bp, Saccharomyces pastorianus
atgaccctccaccacaagttggtgt

SEQ ID NO: 106456 - DNA, 25 bp, Saccharomyces pastorianus
gatatcttttatcaatactcgttca

SEQ ID NO: 106457 - DNA, 25 bp, Saccharomyces pastorianus
ccccttagtggcgaagatatctttt

SEQ ID NO: 106458 - DNA, 25 bp, Saccharomyces pastorianus
agttggtgttatctatgctcctggg

SEQ ID NO: 106459 - DNA, 25 bp, Saccharomyces pastorianus
tcaatactcgttcagcagtttttac

SEQ ID NO: 106460 - DNA, 25 bp, Saccharomyces pastorianus
ctgccccttagtggcgaagatatct

SEQ ID NO: 106461 - DNA, 25 bp, Saccharomyces pastorianus
tggggttgtctatcacaccagaagg

SEQ ID NO: 106462 - DNA, 25 bp, Saccharomyces pastorianus
gatcgagcccaacaatagtatcgtt

SEQ ID NO: 106463 - DNA, 25 bp, Saccharomyces pastorianus
ttttcattgtagacaccccgcaaag

SEQ ID NO: 106464 - DNA, 25 bp, Saccharomyces pastorianus
aatccaagagctttgatagcgccat

SEQ ID NO: 106465 - DNA, 25 bp, Saccharomyces pastorianus
aagaatatgcttcatgacggacttc

SEQ ID NO: 106466 - DNA, 25 bp, Saccharomyces pastorianus
acggccgacgggatctagccagata

SEQ ID NO: 106467 - DNA, 25 bp, Saccharomyces pastorianus
taacagttcttctagtagctgcgaa

SEQ ID NO: 106468 - DNA, 25 bp, Saccharomyces pastorianus
gatagtacagccatattcggattca

SEQ ID NO: 106469 - DNA, 25 bp, Saccharomyces pastorianus
gagaagcacactttcgtcgcagaat

SEQ ID NO: 106470 - DNA, 25 bp, Saccharomyces pastorianus
gtggcaacagtgctttgtggatatc

SEQ ID NO: 106471 - DNA, 25 bp, Saccharomyces pastorianus
atagcgccattgactactcatgtga

SEQ ID NO: 106472 - DNA, 25 bp, Saccharomyces pastorianus
aacgatcgatcccatgtaagtcctg

SEQ ID NO: 106473 - DNA, 25 bp, Saccharomyces pastorianus
atcacagcctgttgatgtatatagt

SEQ ID NO: 106474 - DNA, 25 bp, Saccharomyces pastorianus
caattctggccgtggaagtgacaca

SEQ ID NO: 106475 - DNA, 25 bp, Saccharomyces pastorianus
ataaattcattatcacagcctgttg

SEQ ID NO: 106476 - DNA, 25 bp, Saccharomyces pastorianus
gaaagtgattcagagcaagatgcta

SEQ ID NO: 106477 - DNA, 25 bp, Saccharomyces pastorianus
tgacgccgtcgaagaagtcaattct

SEQ ID NO: 106478 - DNA, 25 bp, Saccharomyces pastorianus
gagactggtccaaaaattagatacg

SEQ ID NO: 106479 - DNA, 25 bp, Saccharomyces pastorianus
gtgcaagatttgtgggcagtcgttc

SEQ ID NO: 106480 - DNA, 25 bp, Saccharomyces pastorianus
gtataggaactttatcgtgcaagat

SEQ ID NO: 106481 - DNA, 25 bp, Saccharomyces pastorianus
tagtgattggtttgacgccgtcgaa

SEQ ID NO: 106482 - DNA, 25 bp, Saccharomyces pastorianus
ggcagtcgttccaaacgcgcataaa

SEQ ID NO: 106483 - DNA, 25 bp, Saccharomyces pastorianus
atcagtttcatgcactctggacaaa

SEQ ID NO: 106484 - DNA, 25 bp, Saccharomyces pastorianus
ctcccgaattcgatttcagcaaatg

SEQ ID NO: 106485 - DNA, 25 bp, Saccharomyces pastorianus
ggaagctagccaactattgcctaat

SEQ ID NO: 106486 - DNA, 25 bp, Saccharomyces pastorianus
aaggtgggcgcaattaccattgata

SEQ ID NO: 106487 - DNA, 25 bp, Saccharomyces pastorianus
gaaaaaatgttcctgatatcgcccc

SEQ ID NO: 106488 - DNA, 25 bp, Saccharomyces pastorianus
tatggatgcgtctcgtgctttagaa

SEQ ID NO: 106489 - DNA, 25 bp, Saccharomyces pastorianus
tgccccagtcatgatatatctcagc

SEQ ID NO: 106490 - DNA, 25 bp, Saccharomyces pastorianus
cagatgcaattagcggaccacgtta

SEQ ID NO: 106491 - DNA, 25 bp, Saccharomyces pastorianus
cattgatagatgtcccacgaacgat

SEQ ID NO: 106492 - DNA, 25 bp, Saccharomyces pastorianus
ttataacctcggataagtgcgacat

SEQ ID NO: 106493 - DNA, 25 bp, Saccharomyces pastorianus
ttttaacttcagctactccttgcaa

SEQ ID NO: 106494 - DNA, 25 bp, Saccharomyces pastorianus
tacaacaggaccagcagcagcggtt

SEQ ID NO: 106495 - DNA, 25 bp, Saccharomyces pastorianus
agtcacgcctgtgcgaagtgccaaa

SEQ ID NO: 106496 - DNA, 25 bp, Saccharomyces pastorianus
caccagcaggcgtcagtagatcact

SEQ ID NO: 106497 - DNA, 25 bp, Saccharomyces pastorianus
tattgctgcacaccctagatattta

SEQ ID NO: 106498 - DNA, 25 bp, Saccharomyces pastorianus
aaaagcgcagttagaggttcttctc

SEQ ID NO: 106499 - DNA, 25 bp, Saccharomyces pastorianus
atctaatgtgtactcaccaccagca

SEQ ID NO: 106500 - DNA, 25 bp, Saccharomyces pastorianus
gaggttcttctctaataggcaaagc

SEQ ID NO: 106501 - DNA, 25 bp, Saccharomyces pastorianus
ccttgtttaaggtctattgctgcac

SEQ ID NO: 106502 - DNA, 25 bp, Saccharomyces pastorianus
agatcactgcgcatcaatgtaatgt

SEQ ID NO: 106503 - DNA, 25 bp, Saccharomyces pastorianus
taggcaaagctcacccttgtttaag

SEQ ID NO: 106504 - DNA, 25 bp, Saccharomyces pastorianus
tgttcacagaaactagtcacgcctg

SEQ ID NO: 106505 - DNA, 25 bp, Saccharomyces pastorianus
gatcatgaatagacgccctctgttc

SEQ ID NO: 106506 - DNA, 25 bp, Saccharomyces pastorianus
atgttcaaacaacctgggcacttaa

SEQ ID NO: 106507 - DNA, 25 bp, Saccharomyces pastorianus
tggaccttggactaatgtctttaat

SEQ ID NO: 106508 - DNA, 25 bp, Saccharomyces pastorianus
gatcttggaccttggactaatgtct

SEQ ID NO: 106509 - DNA, 25 bp, Saccharomyces pastorianus
tctaggaagtacgatcttggacctt

SEQ ID NO: 106510 - DNA, 25 bp, Saccharomyces pastorianus
gtacgatcttggaccttggactaat

SEQ ID NO: 106511 - DNA, 25 bp, Saccharomyces pastorianus
gaagtacgatcttggaccttggact

SEQ ID NO: 106512 - DNA, 25 bp, Saccharomyces pastorianus
acctgggcacttaacgtctaggaag

SEQ ID NO: 106513 - DNA, 25 bp, Saccharomyces pastorianus
ggactaatgtctttaatttgtgctt

SEQ ID NO: 106514 - DNA, 25 bp, Saccharomyces pastorianus
tgtctttaatttgtgctttcttgct

SEQ ID NO: 106515 - DNA, 25 bp, Saccharomyces pastorianus
tgggcacttaacgtctaggaagtac

SEQ ID NO: 106516 - DNA, 25 bp, Saccharomyces pastorianus
aacaacctgggcacttaacgtctag

SEQ ID NO: 106517 - DNA, 25 bp, Saccharomyces pastorianus
aaacttctcgctacttcatgggatg

SEQ ID NO: 106518 - DNA, 25 bp, Saccharomyces pastorianus
gatcactgggtgatgacacgcaaaa

SEQ ID NO: 106519 - DNA, 25 bp, Saccharomyces pastorianus
tgacacgcaaaattcctggcctaga

SEQ ID NO: 106520 - DNA, 25 bp, Saccharomyces pastorianus
gatgatcatcagttctcaaactttg

SEQ ID NO: 106521 - DNA, 25 bp, Saccharomyces pastorianus
aaggtgatttatgggcttcagcggc

SEQ ID NO: 106522 - DNA, 25 bp, Saccharomyces pastorianus
ttatgtgcgccatcaggagaacttg

SEQ ID NO: 106523 - DNA, 25 bp, Saccharomyces pastorianus
gaagaaattgtccactttccacggt

SEQ ID NO: 106524 - DNA, 25 bp, Saccharomyces pastorianus
tcgcggtcgttttctaaacaaacat

SEQ ID NO: 106525 - DNA, 25 bp, Saccharomyces pastorianus
gcttcagcggccaaaacacagatta

SEQ ID NO: 106526 - DNA, 25 bp, Saccharomyces pastorianus
aatgaattggaggactctcttcaat

SEQ ID NO: 106527 - DNA, 25 bp, Saccharomyces pastorianus
gatggttctcaaggaaatgcgtcga

SEQ ID NO: 106528 - DNA, 25 bp, Saccharomyces pastorianus
gaccaactgttgtttctcaagaacc

SEQ ID NO: 106529 - DNA, 25 bp, Saccharomyces pastorianus
ggcgtcacgttagtggacttcccag

SEQ ID NO: 106530 - DNA, 25 bp, Saccharomyces pastorianus
aaaacgagcttgcttacgctgctaa

SEQ ID NO: 106531 - DNA, 25 bp, Saccharomyces pastorianus
gtctaccgacgggttcaaatttgca

SEQ ID NO: 106532 - DNA, 25 bp, Saccharomyces pastorianus
ggattacgatggttccggcgtcacg

SEQ ID NO: 106533 - DNA, 25 bp, Saccharomyces pastorianus
gaatcgttcactgcaagaccaccat

SEQ ID NO: 106534 - DNA, 25 bp, Saccharomyces pastorianus
gttgcgttataaactctcagattat

SEQ ID NO: 106535 - DNA, 25 bp, Saccharomyces pastorianus
tcccaggccatgtcaagttgcgtta

SEQ ID NO: 106536 - DNA, 25 bp, Saccharomyces pastorianus
tacgctgctaaccacagattcagta

SEQ ID NO: 106537 - DNA, 25 bp, Saccharomyces pastorianus
tagacgttttacagtctaccgacgg

SEQ ID NO: 106538 - DNA, 25 bp, Saccharomyces pastorianus
gcatctgtagttgcttttgagggca

SEQ ID NO: 106539 - DNA, 25 bp, Saccharomyces pastorianus
gacttatttcttaccttggttggca

SEQ ID NO: 106540 - DNA, 25 bp, Saccharomyces pastorianus
gagataccttccaagtgcttaacca

SEQ ID NO: 106541 - DNA, 25 bp, Saccharomyces pastorianus
gtgttgaatttttcttcaccgaact

SEQ ID NO: 106542 - DNA, 25 bp, Saccharomyces pastorianus
tgggtcaacgtacttgtatctttca

SEQ ID NO: 106543 - DNA, 25 bp, Saccharomyces pastorianus
ggatgttcaacttagcaatgtcagc

SEQ ID NO: 106544 - DNA, 25 bp, Saccharomyces pastorianus
aaacctctcaaggagttaccgtgag

SEQ ID NO: 106545 - DNA, 25 bp, Saccharomyces pastorianus
ttggttggcaacagcagcggcacca

SEQ ID NO: 106546 - DNA, 25 bp, Saccharomyces pastorianus
tgagcggcgatcatgacggtcttac

SEQ ID NO: 106547 - DNA, 25 bp, Saccharomyces pastorianus
gatggcttcaagttttcgtccaatt

SEQ ID NO: 106548 - DNA, 25 bp, Saccharomyces pastorianus
cttaccactcaacaagtccttggca

SEQ ID NO: 106549 - DNA, 25 bp, Saccharomyces pastorianus
agcggcagcttctgggtccaagtag

SEQ ID NO: 106550 - DNA, 25 bp, Saccharomyces pastorianus
gatacaagtacgttgacccaaatgt

SEQ ID NO: 106551 - DNA, 25 bp, Saccharomyces pastorianus
gtaaggacaaggctgaaactttgaa

SEQ ID NO: 106552 - DNA, 25 bp, Saccharomyces pastorianus
cgcttcttctccattctctcaaaag

SEQ ID NO: 106553 - DNA, 25 bp, Saccharomyces pastorianus
agacgtcttgtacacttccaagttg

SEQ ID NO: 106554 - DNA, 25 bp, Saccharomyces pastorianus
tatggattccagtcaacagatcctg

SEQ ID NO: 106555 - DNA, 25 bp, Saccharomyces pastorianus
tcatgatcgccgctcacggtaactc

SEQ ID NO: 106556 - DNA, 25 bp, Saccharomyces pastorianus
agaaggtctacccagacgtcttgta

SEQ ID NO: 106557 - DNA, 25 bp, Saccharomyces pastorianus
cttccaagttgtccagagctatcca

SEQ ID NO: 106558 - DNA, 25 bp, Saccharomyces pastorianus
gtggtaagaccgtcatgatcgccgc

SEQ ID NO: 106559 - DNA, 25 bp, Saccharomyces pastorianus
tgtcattgccaaggacttgttgagt

SEQ ID NO: 106560 - DNA, 25 bp, Saccharomyces pastorianus
aagacattacggtgacttacaaggt

SEQ ID NO: 106561 - DNA, 25 bp, Saccharomyces pastorianus
acgcaggctgcacaattacacgaga

SEQ ID NO: 106562 - DNA, 25 bp, Saccharomyces pastorianus
atgcatgcttgcatttagtcgtgca

SEQ ID NO: 106563 - DNA, 25 bp, Saccharomyces pastorianus
gataagatattctcacccgatagtg

SEQ ID NO: 106564 - DNA, 25 bp, Saccharomyces pastorianus
ctacgctatgttgagttgctacgca

SEQ ID NO: 106565 - DNA, 25 bp, Saccharomyces pastorianus
gggcaagatcccgttagtaattgat

SEQ ID NO: 106566 - DNA, 25 bp, Saccharomyces pastorianus
gaagggagactctcactccgagatg

SEQ ID NO: 106567 - DNA, 25 bp, Saccharomyces pastorianus
aggaggccaaggtgatactttgaca

SEQ ID NO: 106568 - DNA, 25 bp, Saccharomyces pastorianus
agcttgatcgcccaggaattgaatt

SEQ ID NO: 106569 - DNA, 25 bp, Saccharomyces pastorianus
gaatgctcccgcctaggatttaagg

SEQ ID NO: 106570 - DNA, 25 bp, Saccharomyces pastorianus
gacaggagctatatcatgcatgctt

SEQ ID NO: 106571 - DNA, 25 bp, Saccharomyces pastorianus
gctgatggactgttcttagtaactc

SEQ ID NO: 106572 - DNA, 25 bp, Saccharomyces pastorianus
gtgacctggcaactactaagagatt

SEQ ID NO: 106573 - DNA, 25 bp, Saccharomyces pastorianus
agaagccacgaaccgcctaataagt

SEQ ID NO: 106574 - DNA, 25 bp, Saccharomyces pastorianus
atgtcaggttcatggcctccattaa

SEQ ID NO: 106575 - DNA, 25 bp, Saccharomyces pastorianus
cggatacatcgcatgcttcgtggaa

SEQ ID NO: 106576 - DNA, 25 bp, Saccharomyces pastorianus
atcaccgtatgttctgggatcctga

SEQ ID NO: 106577 - DNA, 25 bp, Saccharomyces pastorianus
gagatttgcagcctcaatggtggtt

SEQ ID NO: 106578 - DNA, 25 bp, Saccharomyces pastorianus
gcgttggacaagtgcctgccaagaa

SEQ ID NO: 106579 - DNA, 25 bp, Saccharomyces pastorianus
gagacacggttcttggcgttggaca

SEQ ID NO: 106580 - DNA, 25 bp, Saccharomyces pastorianus
tgagcgctcatttgcatgtcaggtt

SEQ ID NO: 106581 - DNA, 25 bp, Saccharomyces pastorianus
ccattcctgcatacaccttagatat

SEQ ID NO: 106582 - DNA, 25 bp, Saccharomyces pastorianus
gaaaactaggcagcccagtgacctg

SEQ ID NO: 106583 - DNA, 25 bp, Saccharomyces pastorianus
agaacttattaacctgtgcctccca

SEQ ID NO: 106584 - DNA, 25 bp, Saccharomyces pastorianus
tgcccatacggttgctgacacttta

SEQ ID NO: 106585 - DNA, 25 bp, Saccharomyces pastorianus
tgtgtttctgtccatggtgccaata

SEQ ID NO: 106586 - DNA, 25 bp, Saccharomyces pastorianus
caaaccactaccttctgatttgggt

SEQ ID NO: 106587 - DNA, 25 bp, Saccharomyces pastorianus
ggatgtttccgtctttagaacacaa

SEQ ID NO: 106588 - DNA, 25 bp, Saccharomyces pastorianus
gggttatcgatcacactttggacga

SEQ ID NO: 106589 - DNA, 25 bp, Saccharomyces pastorianus
gaagcatacattatcctggcaaaag

SEQ ID NO: 106590 - DNA, 25 bp, Saccharomyces pastorianus
aaacagctgtttccgctgctaatag

SEQ ID NO: 106591 - DNA, 25 bp, Saccharomyces pastorianus
aggtgccaattccttgttggatctt

SEQ ID NO: 106592 - DNA, 25 bp, Saccharomyces pastorianus
tttacagcctgggttgccacacaaa

SEQ ID NO: 106593 - DNA, 25 bp, Saccharomyces pastorianus
gtgttcggaacattactgcagtaga

SEQ ID NO: 106594 - DNA, 25 bp, Saccharomyces pastorianus
gtttggagttgctgtcatggcctac

SEQ ID NO: 106595 - DNA, 25 bp, Saccharomyces pastorianus
atttgtatcactggtaggctccttc

SEQ ID NO: 106596 - DNA, 25 bp, Saccharomyces pastorianus
gaaggtataggcctacttatcccca

SEQ ID NO: 106597 - DNA, 25 bp, Saccharomyces pastorianus
gtaccgccatattcacctttgaagg

SEQ ID NO: 106598 - DNA, 25 bp, Saccharomyces pastorianus
gagagccaggcttcttttagattta

SEQ ID NO: 106599 - DNA, 25 bp, Saccharomyces pastorianus
atacccgccattgttgcactataag

SEQ ID NO: 106600 - DNA, 25 bp, Saccharomyces pastorianus
attagccattttgttatccacgccg

SEQ ID NO: 106601 - DNA, 25 bp, Saccharomyces pastorianus
atgccgcttttggatctgacgtgaa

SEQ ID NO: 106602 - DNA, 25 bp, Saccharomyces pastorianus
ctatttcccgcgatacgtattttgg

SEQ ID NO: 106603 - DNA, 25 bp, Saccharomyces pastorianus
tgaattttccgcaggacacttccta

SEQ ID NO: 106604 - DNA, 25 bp, Saccharomyces pastorianus
aaggcgtccatcttatctggaacct

SEQ ID NO: 106605 - DNA, 25 bp, Saccharomyces pastorianus
aatatgtcggtgaaggtgctcgtat

SEQ ID NO: 106606 - DNA, 25 bp, Saccharomyces pastorianus
ggctcgtaccaaaaaggcttgcatt

SEQ ID NO: 106607 - DNA, 25 bp, Saccharomyces pastorianus
taggcccaacactttagatccagct

SEQ ID NO: 106608 - DNA, 25 bp, Saccharomyces pastorianus
atcttccgtattcactcgaaatcga

SEQ ID NO: 106609 - DNA, 25 bp, Saccharomyces pastorianus
gaccctcgtggtaacattaaagtga

SEQ ID NO: 106610 - DNA, 25 bp, Saccharomyces pastorianus
gagttttcattacctgacttggaag

SEQ ID NO: 106611 - DNA, 25 bp, Saccharomyces pastorianus
cagttagacgggtttgaccctcgtg

SEQ ID NO: 106612 - DNA, 25 bp, Saccharomyces pastorianus
atccagctttattgagacccggtag

SEQ ID NO: 106613 - DNA, 25 bp, Saccharomyces pastorianus
gtgatgtttgccaccaataggccca

SEQ ID NO: 106614 - DNA, 25 bp, Saccharomyces pastorianus
gaaggtcgtgcaaatatcttccgta

SEQ ID NO: 106615 - DNA, 25 bp, Saccharomyces pastorianus
tggtgctcgttttgatgatggtgct

SEQ ID NO: 106616 - DNA, 25 bp, Saccharomyces pastorianus
aagacattatgtgctcgtgctgttg

SEQ ID NO: 106617 - DNA, 25 bp, Saccharomyces pastorianus
ggccacctggtactggtaagacatt

SEQ ID NO: 106618 - DNA, 25 bp, Saccharomyces pastorianus
tactggtaagacattatgtgctcgt

SEQ ID NO: 106619 - DNA, 25 bp, Saccharomyces pastorianus
taagacattatgtgctcgtgctgtt

SEQ ID NO: 106620 - DNA, 25 bp, Saccharomyces pastorianus
ctggtaagacattatgtgctcgtgc

SEQ ID NO: 106621 - DNA, 25 bp, Saccharomyces pastorianus
tggtaagacattatgtgctcgtgct

SEQ ID NO: 106622 - DNA, 25 bp, Saccharomyces pastorianus
ggtactggtaagacattatgtgctc

SEQ ID NO: 106623 - DNA, 25 bp, Saccharomyces pastorianus
gacattatgtgctcgtgctgttgct

SEQ ID NO: 106624 - DNA, 25 bp, Saccharomyces pastorianus
agacattatgtgctcgtgctgttgc

SEQ ID NO: 106625 - DNA, 25 bp, Saccharomyces pastorianus
gctgttgctaatagaactgatgcaa

SEQ ID NO: 106626 - DNA, 25 bp, Saccharomyces pastorianus
tgctgttgctaatagaactgatgca

SEQ ID NO: 106627 - DNA, 25 bp, Saccharomyces pastorianus
gatggatcatcctatattaacgtta

SEQ ID NO: 106628 - DNA, 25 bp, Saccharomyces pastorianus
gttacatttcgagccgttgttttca

SEQ ID NO: 106629 - DNA, 25 bp, Saccharomyces pastorianus
atatcggcaatcacacatcagttaa

SEQ ID NO: 106630 - DNA, 25 bp, Saccharomyces pastorianus
tattaaccgtcgaggaaggccaatt

SEQ ID NO: 106631 - DNA, 25 bp, Saccharomyces pastorianus
gaagccaaagtcacccaaagaacga

SEQ ID NO: 106632 - DNA, 25 bp, Saccharomyces pastorianus
gattattcccaatgtcggtctatgt

SEQ ID NO: 106633 - DNA, 25 bp, Saccharomyces pastorianus
atttgatgacatttttatcccacaa

SEQ ID NO: 106634 - DNA, 25 bp, Saccharomyces pastorianus
aatcgctgacttggtacgaatcccg

SEQ ID NO: 106635 - DNA, 25 bp, Saccharomyces pastorianus
ggatgctattatacccctgaagaaa

SEQ ID NO: 106636 - DNA, 25 bp, Saccharomyces pastorianus
tgttttcaaaccgtttctaggtgag

SEQ ID NO: 106637 - DNA, 25 bp, Saccharomyces pastorianus
tgccctattaggtagttgtcaaact

SEQ ID NO: 106638 - DNA, 25 bp, Saccharomyces pastorianus
gaattgccctctatccaagacaaaa

SEQ ID NO: 106639 - DNA, 25 bp, Saccharomyces pastorianus
gatcagtacgatcaaatcatcaatg

SEQ ID NO: 106640 - DNA, 25 bp, Saccharomyces pastorianus
gaaagatctgattttgagtcaatgc

SEQ ID NO: 106641 - DNA, 25 bp, Saccharomyces pastorianus
attaccaaccatttgacatgtcagc

SEQ ID NO: 106642 - DNA, 25 bp, Saccharomyces pastorianus
gtttagacagtgtaaatccctctga

SEQ ID NO: 106643 - DNA, 25 bp, Saccharomyces pastorianus
agatgtatctggattttccatgagt

SEQ ID NO: 106644 - DNA, 25 bp, Saccharomyces pastorianus
atcaagctgatgttcgaagatttca

SEQ ID NO: 106645 - DNA, 25 bp, Saccharomyces pastorianus
aaagggtgccatgtcagatgtatct

SEQ ID NO: 106646 - DNA, 25 bp, Saccharomyces pastorianus
gatgtgctgggcgaattgccctcta

SEQ ID NO: 106647 - DNA, 25 bp, Saccharomyces pastorianus
tgcgcgtacagagacgatgacagta

SEQ ID NO: 106648 - DNA, 25 bp, Saccharomyces pastorianus
aactggagagtggtggccgtaaact

SEQ ID NO: 106649 - DNA, 25 bp, Saccharomyces pastorianus
ggtggaagcctttcacattaatgag

SEQ ID NO: 106650 - DNA, 25 bp, Saccharomyces pastorianus
tttaatgatgttgcccgctatctag

SEQ ID NO: 106651 - DNA, 25 bp, Saccharomyces pastorianus
tgctatttcagacggagtgttccct

SEQ ID NO: 106652 - DNA, 25 bp, Saccharomyces pastorianus
gaaagattgccaccaactctaaagg

SEQ ID NO: 106653 - DNA, 25 bp, Saccharomyces pastorianus
agcacgacgtaactgattttgattc

SEQ ID NO: 106654 - DNA, 25 bp, Saccharomyces pastorianus
gatggtgatattcctgctatttcag

SEQ ID NO: 106655 - DNA, 25 bp, Saccharomyces pastorianus
agcgccactgcctaatgcagatggt

SEQ ID NO: 106656 - DNA, 25 bp, Saccharomyces pastorianus
gctactcaattcgatgccactgatt

SEQ ID NO: 106657 - DNA, 25 bp, Saccharomyces pastorianus
gatgccactgattttgccacaaatg

SEQ ID NO: 106658 - DNA, 25 bp, Saccharomyces pastorianus
atgatgacgttatagcgccactgcc

SEQ ID NO: 106659 - DNA, 25 bp, Saccharomyces pastorianus
agaaatcaggatccgctactcaatt

SEQ ID NO: 106660 - DNA, 25 bp, Saccharomyces pastorianus
tacttgtttactatactcttcggag

SEQ ID NO: 106661 - DNA, 25 bp, Saccharomyces pastorianus
tttacagaactggttacgccctcat

SEQ ID NO: 106662 - DNA, 25 bp, Saccharomyces pastorianus
cggagtctctggtttattaggtctt

SEQ ID NO: 106663 - DNA, 25 bp, Saccharomyces pastorianus
ttgcaattcactatggtggcgccat

SEQ ID NO: 106664 - DNA, 25 bp, Saccharomyces pastorianus
attaacttggtacctgtcttctctt

SEQ ID NO: 106665 - DNA, 25 bp, Saccharomyces pastorianus
gtatttcgttggtgcttatgggact

SEQ ID NO: 106666 - DNA, 25 bp, Saccharomyces pastorianus
agtcggctctattactgaaaccctc

SEQ ID NO: 106667 - DNA, 25 bp, Saccharomyces pastorianus
aaagagacctatttctccacatctg

SEQ ID NO: 106668 - DNA, 25 bp, Saccharomyces pastorianus
ttcctttctacctcaccattgaaga

SEQ ID NO: 106669 - DNA, 25 bp, Saccharomyces pastorianus
ggtggcgccattagacacttgatct

SEQ ID NO: 106670 - DNA, 25 bp, Saccharomyces pastorianus
gacacttgatctgggataccgctaa

SEQ ID NO: 106671 - DNA, 25 bp, Saccharomyces pastorianus
ccttcaactccgtctttgatgttaa

SEQ ID NO: 106672 - DNA, 25 bp, Saccharomyces pastorianus
gttctccgttgtctgtacaagctga

SEQ ID NO: 106673 - DNA, 25 bp, Saccharomyces pastorianus
gaagacaactcatccaacgcatggt

SEQ ID NO: 106674 - DNA, 25 bp, Saccharomyces pastorianus
aagacggttaagtgcctatctggaa

SEQ ID NO: 106675 - DNA, 25 bp, Saccharomyces pastorianus
gacgagtgttttctactagtgccat

SEQ ID NO: 106676 - DNA, 25 bp, Saccharomyces pastorianus
gatgaggtccacaatgctgacaatt

SEQ ID NO: 106677 - DNA, 25 bp, Saccharomyces pastorianus
cttaactaggccttaccaaattgct

SEQ ID NO: 106678 - DNA, 25 bp, Saccharomyces pastorianus
gactaaccagttactaccatcagca

SEQ ID NO: 106679 - DNA, 25 bp, Saccharomyces pastorianus
gttatagaactcactcggcagaccg

SEQ ID NO: 106680 - DNA, 25 bp, Saccharomyces pastorianus
acaactagatgccaactcttcgaca

SEQ ID NO: 106681 - DNA, 25 bp, Saccharomyces pastorianus
gatgccgataccttggtcattgcta

SEQ ID NO: 106682 - DNA, 25 bp, Saccharomyces pastorianus
ggaaacgacaaaacaactagatatc

SEQ ID NO: 106683 - DNA, 25 bp, Saccharomyces pastorianus
caactagatatcatgtcgaaacaat

SEQ ID NO: 106684 - DNA, 25 bp, Saccharomyces pastorianus
tgtaacgaaaacttggtaggccaat

SEQ ID NO: 106685 - DNA, 25 bp, Saccharomyces pastorianus
gaagttggttgataggtagttacat

SEQ ID NO: 106686 - DNA, 25 bp, Saccharomyces pastorianus
gtaaggtacatggaagttggttgat

SEQ ID NO: 106687 - DNA, 25 bp, Saccharomyces pastorianus
ttgcacacgaacttagagagcttca

SEQ ID NO: 106688 - DNA, 25 bp, Saccharomyces pastorianus
ggtaggccaattgggtaaggtacat

SEQ ID NO: 106689 - DNA, 25 bp, Saccharomyces pastorianus
gtataatcagcttgcacacgaactt

SEQ ID NO: 106690 - DNA, 25 bp, Saccharomyces pastorianus
aaggcagtataatcagcttgcacac

SEQ ID NO: 106691 - DNA, 25 bp, Saccharomyces pastorianus
gagagcttcaaacgaatttacagga

SEQ ID NO: 106692 - DNA, 25 bp, Saccharomyces pastorianus
atcagcttgcacacgaacttagaga

SEQ ID NO: 106693 - DNA, 25 bp, Saccharomyces pastorianus
gcccattcaaattaacaagccccgt

SEQ ID NO: 106694 - DNA, 25 bp, Saccharomyces pastorianus
ggagaatcaaatgtcttctaaagat

SEQ ID NO: 106695 - DNA, 25 bp, Saccharomyces pastorianus
agcaattaactttaggtctccacgt

SEQ ID NO: 106696 - DNA, 25 bp, Saccharomyces pastorianus
ggtctccacgtccaaagatgtcagg

SEQ ID NO: 106697 - DNA, 25 bp, Saccharomyces pastorianus
gtcttacttatcaagaagccatgga

SEQ ID NO: 106698 - DNA, 25 bp, Saccharomyces pastorianus
gttgttaaacaaaccatcagtcttt

SEQ ID NO: 106699 - DNA, 25 bp, Saccharomyces pastorianus
atgtccacacatcaaaaaacccgtc

SEQ ID NO: 106700 - DNA, 25 bp, Saccharomyces pastorianus
gatgtcaggataaaggtcttactta

SEQ ID NO: 106701 - DNA, 25 bp, Saccharomyces pastorianus
gaaacgttgatcaagtcataaagca

SEQ ID NO: 106702 - DNA, 25 bp, Saccharomyces pastorianus
tcataaggtgcccaagtggacgaag

SEQ ID NO: 106703 - DNA, 25 bp, Saccharomyces pastorianus
ccatcagtctttccaaaggagaatc

SEQ ID NO: 106704 - DNA, 25 bp, Saccharomyces pastorianus
gcacatcatcgttagccttgctaga

SEQ ID NO: 106705 - DNA, 25 bp, Saccharomyces pastorianus
cagcattcctgcatttgtatttgtt

SEQ ID NO: 106706 - DNA, 25 bp, Saccharomyces pastorianus
gcatcctcagatggtccgaaatcaa

SEQ ID NO: 106707 - DNA, 25 bp, Saccharomyces pastorianus
aacccttgtacagccttggtatcat

SEQ ID NO: 106708 - DNA, 25 bp, Saccharomyces pastorianus
tgtgacactatattgccgcccgaaa

SEQ ID NO: 106709 - DNA, 25 bp, Saccharomyces pastorianus
tgttacatcatctctttcatcaaaa

SEQ ID NO: 106710 - DNA, 25 bp, Saccharomyces pastorianus
agatataccgtttgagtcgccacct

SEQ ID NO: 106711 - DNA, 25 bp, Saccharomyces pastorianus
gtatttatttgtgtggcatcctcag

SEQ ID NO: 106712 - DNA, 25 bp, Saccharomyces pastorianus
taagttcactacaacggacgtttat

SEQ ID NO: 106713 - DNA, 25 bp, Saccharomyces pastorianus
gggattgtttttaccaccagaagat

SEQ ID NO: 106714 - DNA, 25 bp, Saccharomyces pastorianus
attttttgccatgctttctaattcc

SEQ ID NO: 106715 - DNA, 25 bp, Saccharomyces pastorianus
tggtacgcccttttcgaggatgatc

SEQ ID NO: 106716 - DNA, 25 bp, Saccharomyces pastorianus
ggctatgctggatcaatcatttcat

SEQ ID NO: 106717 - DNA, 25 bp, Saccharomyces pastorianus
gggcaacttattacagctacttatt

SEQ ID NO: 106718 - DNA, 25 bp, Saccharomyces pastorianus
gaggatgatccgtacagtcgaaaaa

SEQ ID NO: 106719 - DNA, 25 bp, Saccharomyces pastorianus
gattggcaaacattacgggactgga

SEQ ID NO: 106720 - DNA, 25 bp, Saccharomyces pastorianus
gtcctagtggacgatcagagtaatt

SEQ ID NO: 106721 - DNA, 25 bp, Saccharomyces pastorianus
gtatcctgatggagcacttcgctaa

SEQ ID NO: 106722 - DNA, 25 bp, Saccharomyces pastorianus
ctgatatgttacagcgcttcatgaa

SEQ ID NO: 106723 - DNA, 25 bp, Saccharomyces pastorianus
gaaaagcactaacttccttcaaaat

SEQ ID NO: 106724 - DNA, 25 bp, Saccharomyces pastorianus
gatgttttagaatgccccatgctag

SEQ ID NO: 106725 - DNA, 25 bp, Saccharomyces pastorianus
agcttctaaaatctggtacgccctt

SEQ ID NO: 106726 - DNA, 25 bp, Saccharomyces pastorianus
gaaaaaggtgtctcccttacttgat

SEQ ID NO: 106727 - DNA, 25 bp, Saccharomyces pastorianus
gaaccggtgaatcttctcgcattta

SEQ ID NO: 106728 - DNA, 25 bp, Saccharomyces pastorianus
tggatccaatccctagaaccggtga

SEQ ID NO: 106729 - DNA, 25 bp, Saccharomyces pastorianus
agtgtctggaccttccttgaaacaa

SEQ ID NO: 106730 - DNA, 25 bp, Saccharomyces pastorianus
cggtgatacgccattaacatttgtc

SEQ ID NO: 106731 - DNA, 25 bp, Saccharomyces pastorianus
catgcagccggatcttcaaagtgtc

SEQ ID NO: 106732 - DNA, 25 bp, Saccharomyces pastorianus
gttgcgatagcggttttagactttt

SEQ ID NO: 106733 - DNA, 25 bp, Saccharomyces pastorianus
ttacttgatccgctaatacgtccac

SEQ ID NO: 106734 - DNA, 25 bp, Saccharomyces pastorianus
ctgccatttaaggaccacgtacggt

SEQ ID NO: 106735 - DNA, 25 bp, Saccharomyces pastorianus
actcttgaagtttgcctgccataca

SEQ ID NO: 106736 - DNA, 25 bp, Saccharomyces pastorianus
cagctcgaaatttagcctgccattt

SEQ ID NO: 106737 - DNA, 25 bp, Saccharomyces pastorianus
taaagtttgccttccgcttatatca

SEQ ID NO: 106738 - DNA, 25 bp, Saccharomyces pastorianus
gcttatatcatccatctgcttctta

SEQ ID NO: 106739 - DNA, 25 bp, Saccharomyces pastorianus
ttaccatttgttcccgctatatgta

SEQ ID NO: 106740 - DNA, 25 bp, Saccharomyces pastorianus
tcttatgtaatctgttgccggccaa

SEQ ID NO: 106741 - DNA, 25 bp, Saccharomyces pastorianus
aatatcctcttctttggcgtttagc

SEQ ID NO: 106742 - DNA, 25 bp, Saccharomyces pastorianus
atctgcttctataagttccttctcg

SEQ ID NO: 106743 - DNA, 25 bp, Saccharomyces pastorianus
gaaactggtcgacttgactcaagtt

SEQ ID NO: 106744 - DNA, 25 bp, Saccharomyces pastorianus
ctgttgctccggatgctgcaatatg

SEQ ID NO: 106745 - DNA, 25 bp, Saccharomyces pastorianus
agtatacctaccaatcaagaccctt

SEQ ID NO: 106746 - DNA, 25 bp, Saccharomyces pastorianus
caccattggcaatttttcttagcga

SEQ ID NO: 106747 - DNA, 25 bp, Saccharomyces pastorianus
gggatttccaacgtgctccaacaaa

SEQ ID NO: 106748 - DNA, 25 bp, Saccharomyces pastorianus
gtcgcagtaaagaaagcctcctcaa

SEQ ID NO: 106749 - DNA, 25 bp, Saccharomyces pastorianus
ggtatcgatgccaccttcaaaaggg

SEQ ID NO: 106750 - DNA, 25 bp, Saccharomyces pastorianus
gacggtttagcttctgcattggcag

SEQ ID NO: 106751 - DNA, 25 bp, Saccharomyces pastorianus
atgggccaaccaaaggatccgaaat

SEQ ID NO: 106752 - DNA, 25 bp, Saccharomyces pastorianus
gtgcaacagttggacccactagtga

SEQ ID NO: 106753 - DNA, 25 bp, Saccharomyces pastorianus
gttgggttcctactgcttatatgac

SEQ ID NO: 106754 - DNA, 25 bp, Saccharomyces pastorianus
aaatacggtgcctgttgcagcgaca

SEQ ID NO: 106755 - DNA, 25 bp, Saccharomyces pastorianus
ggatcatcttcggagttgccattaa

SEQ ID NO: 106756 - DNA, 25 bp, Saccharomyces pastorianus
gaagctgcatacgactttccaggtt

SEQ ID NO: 106757 - DNA, 25 bp, Saccharomyces pastorianus
gaacctagtggttggtctttagcaa

SEQ ID NO: 106758 - DNA, 25 bp, Saccharomyces pastorianus
gacaataccatttcaagtgcacaag

SEQ ID NO: 106759 - DNA, 25 bp, Saccharomyces pastorianus
agacgttgggctctcacacttgtga

SEQ ID NO: 106760 - DNA, 25 bp, Saccharomyces pastorianus
taaagtcgtcgctgtcgtcgtggaa

SEQ ID NO: 106761 - DNA, 25 bp, Saccharomyces pastorianus
tgtgtttttcagttctccgatgaga

SEQ ID NO: 106762 - DNA, 25 bp, Saccharomyces pastorianus
aggtatgctacctcatgtgtttttc

SEQ ID NO: 106763 - DNA, 25 bp, Saccharomyces pastorianus
ggaatcgggccacactgtacattgg

SEQ ID NO: 106764 - DNA, 25 bp, Saccharomyces pastorianus
ttgactctaaactgacacctctggg

SEQ ID NO: 106765 - DNA, 25 bp, Saccharomyces pastorianus
aaattcatctcgcttacttgtcact

SEQ ID NO: 106766 - DNA, 25 bp, Saccharomyces pastorianus
gaattgtggcttcctgatcatagag

SEQ ID NO: 106767 - DNA, 25 bp, Saccharomyces pastorianus
caggatcgaatgtcttgctaccaat

SEQ ID NO: 106768 - DNA, 25 bp, Saccharomyces pastorianus
gagtggctcactcaatggcagttga

SEQ ID NO: 106769 - DNA, 25 bp, Saccharomyces pastorianus
gaaacttacagcatcctccaattta

SEQ ID NO: 106770 - DNA, 25 bp, Saccharomyces pastorianus
tggaacgagtatggccgtactttct

SEQ ID NO: 106771 - DNA, 25 bp, Saccharomyces pastorianus
aaaggacggtctatgggccattatt

SEQ ID NO: 106772 - DNA, 25 bp, Saccharomyces pastorianus
tcttctgtgccttatttgatgctaa

SEQ ID NO: 106773 - DNA, 25 bp, Saccharomyces pastorianus
aggttatccggcacaggcagttctg

SEQ ID NO: 106774 - DNA, 25 bp, Saccharomyces pastorianus
cacttcccagctgatgagtctttaa

SEQ ID NO: 106775 - DNA, 25 bp, Saccharomyces pastorianus
gatggctccatctctgaaaatcaag

SEQ ID NO: 106776 - DNA, 25 bp, Saccharomyces pastorianus
atcttggctatctaccataggcgta

SEQ ID NO: 106777 - DNA, 25 bp, Saccharomyces pastorianus
gaatccttcggtacaggttccaatc

SEQ ID NO: 106778 - DNA, 25 bp, Saccharomyces pastorianus
aaacccgtcatcaactccattgtaa

SEQ ID NO: 106779 - DNA, 25 bp, Saccharomyces pastorianus
caaacagccgacgtcttcttgaaac

SEQ ID NO: 106780 - DNA, 25 bp, Saccharomyces pastorianus
caaggccaaacgtttgtggctccca

SEQ ID NO: 106781 - DNA, 25 bp, Saccharomyces pastorianus
gattatcaaggccacattgcccttt

SEQ ID NO: 106782 - DNA, 25 bp, Saccharomyces pastorianus
gatgaagggttatattccaccatat

SEQ ID NO: 106783 - DNA, 25 bp, Saccharomyces pastorianus
gcaatttggtggctggacatacgtt

SEQ ID NO: 106784 - DNA, 25 bp, Saccharomyces pastorianus
tcggaaccatccttttttcagtcaa

SEQ ID NO: 106785 - DNA, 25 bp, Saccharomyces pastorianus
aggtcttcctccttattatgatgaa

SEQ ID NO: 106786 - DNA, 25 bp, Saccharomyces pastorianus
cagatactttttgtgggaccccaga

SEQ ID NO: 106787 - DNA, 25 bp, Saccharomyces pastorianus
gtcaattatcatggaagcgcctgtt

SEQ ID NO: 106788 - DNA, 25 bp, Saccharomyces pastorianus
gattctacaggagccactagttttc

SEQ ID NO: 106789 - DNA, 25 bp, Saccharomyces pastorianus
atacgagatgctcacaggtcttcct

SEQ ID NO: 106790 - DNA, 25 bp, Saccharomyces pastorianus
ggaccccagaatacttggcaccaga

SEQ ID NO: 106791 - DNA, 25 bp, Saccharomyces pastorianus
gaagattgggctacaatggtgccga

SEQ ID NO: 106792 - DNA, 25 bp, Saccharomyces pastorianus
gaaaccgacgataacaacaccgata

SEQ ID NO: 106793 - DNA, 25 bp, Saccharomyces pastorianus
gaaacagaggcaaatcttctaaaaa

SEQ ID NO: 106794 - DNA, 25 bp, Saccharomyces pastorianus
accacgacagtcttgaaaccgacga

SEQ ID NO: 106795 - DNA, 25 bp, Saccharomyces pastorianus
gatggcaataaaagaccggaaaatt

SEQ ID NO: 106796 - DNA, 25 bp, Saccharomyces pastorianus
ccccgtgaagtatcagatggagcta

SEQ ID NO: 106797 - DNA, 25 bp, Saccharomyces pastorianus
gaaaattcgccattattggaagatg

SEQ ID NO: 106798 - DNA, 25 bp, Saccharomyces pastorianus
gatggagctatcaataagaacccta

SEQ ID NO: 106799 - DNA, 25 bp, Saccharomyces pastorianus
gacgataacaacaccgataacaatg

SEQ ID NO: 106800 - DNA, 25 bp, Saccharomyces pastorianus
acgctggttgcaatgaaaattcgcc

SEQ ID NO: 106801 - DNA, 25 bp, Saccharomyces pastorianus
ataatgtttaccacgacagtcttga

SEQ ID NO: 106802 - DNA, 25 bp, Saccharomyces pastorianus
acaacgatgagaacgctggttgcaa

SEQ ID NO: 106803 - DNA, 25 bp, Saccharomyces pastorianus
taactcgcatttatccttgaactat

SEQ ID NO: 106804 - DNA, 25 bp, Saccharomyces pastorianus
aaacgctcttctccatatcatataa

SEQ ID NO: 106805 - DNA, 25 bp, Saccharomyces pastorianus
ggtgaatccatctcaaacgctcttc

SEQ ID NO: 106806 - DNA, 25 bp, Saccharomyces pastorianus
gttggtttagccaccttaattgtca

SEQ ID NO: 106807 - DNA, 25 bp, Saccharomyces pastorianus
attaggcccacgaggcgtatctata

SEQ ID NO: 106808 - DNA, 25 bp, Saccharomyces pastorianus
aacagtgttcgcctttttgaggtga

SEQ ID NO: 106809 - DNA, 25 bp, Saccharomyces pastorianus
aggcgtatctataactccaggtaaa

SEQ ID NO: 106810 - DNA, 25 bp, Saccharomyces pastorianus
aacaatggcaactctgcagcttcaa

SEQ ID NO: 106811 - DNA, 25 bp, Saccharomyces pastorianus
aaaagagcgatcctgcggctgagaa

SEQ ID NO: 106812 - DNA, 25 bp, Saccharomyces pastorianus
agtgtcctttagaactcataactcg

SEQ ID NO: 106813 - DNA, 25 bp, Saccharomyces pastorianus
gattacttagtgcattaggcccacg

SEQ ID NO: 106814 - DNA, 25 bp, Saccharomyces pastorianus
taatgagtttagcacaaccccacca

SEQ ID NO: 106815 - DNA, 25 bp, Saccharomyces pastorianus
aatttattccacctcgaagctgctg

SEQ ID NO: 106816 - DNA, 25 bp, Saccharomyces pastorianus
cacgatttttgtgagctgcatccta

SEQ ID NO: 106817 - DNA, 25 bp, Saccharomyces pastorianus
gtgatttccggcatgccatcaagag

SEQ ID NO: 106818 - DNA, 25 bp, Saccharomyces pastorianus
ggaggattcagctcaaacctatcga

SEQ ID NO: 106819 - DNA, 25 bp, Saccharomyces pastorianus
gaaagtacgagctccacggtgtttg

SEQ ID NO: 106820 - DNA, 25 bp, Saccharomyces pastorianus
gaccgcatgatattccgagagtttc

SEQ ID NO: 106821 - DNA, 25 bp, Saccharomyces pastorianus
aaaaaccccattgctggcggcgata

SEQ ID NO: 106822 - DNA, 25 bp, Saccharomyces pastorianus
gtcaaggtctaatccgtgttttcag

SEQ ID NO: 106823 - DNA, 25 bp, Saccharomyces pastorianus
gcgatagcggtttcacgtgtgctga

SEQ ID NO: 106824 - DNA, 25 bp, Saccharomyces pastorianus
gagagtttctaccacttatccgaag

SEQ ID NO: 106825 - DNA, 25 bp, Saccharomyces pastorianus
agttaacgtcttttctggtgccgca

SEQ ID NO: 106826 - DNA, 25 bp, Saccharomyces pastorianus
aagacttcagtcatattccgagttt

SEQ ID NO: 106827 - DNA, 25 bp, Saccharomyces pastorianus
agtgttcagaatcgcacctcataca

SEQ ID NO: 106828 - DNA, 25 bp, Saccharomyces pastorianus
aactgctagtactatctctgggtta

SEQ ID NO: 106829 - DNA, 25 bp, Saccharomyces pastorianus
agatggcccagcattacatttaact

SEQ ID NO: 106830 - DNA, 25 bp, Saccharomyces pastorianus
gaatcgaaggtgtaaccgctttgta

SEQ ID NO: 106831 - DNA, 25 bp, Saccharomyces pastorianus
attggctctccattattcttggtga

SEQ ID NO: 106832 - DNA, 25 bp, Saccharomyces pastorianus
tggtgccgcatctggtataattggt

SEQ ID NO: 106833 - DNA, 25 bp, Saccharomyces pastorianus
gaacaaacgcactacaccggtgttt

SEQ ID NO: 106834 - DNA, 25 bp, Saccharomyces pastorianus
taattggtgcagtcattggctctcc

SEQ ID NO: 106835 - DNA, 25 bp, Saccharomyces pastorianus
ttcttcccagatcaagagccacata

SEQ ID NO: 106836 - DNA, 25 bp, Saccharomyces pastorianus
ggaacaagttaccactgtcttcaac

SEQ ID NO: 106837 - DNA, 25 bp, Saccharomyces pastorianus
gatttgttcctgaagcgacacgcaa

SEQ ID NO: 106838 - DNA, 25 bp, Saccharomyces pastorianus
atcggttgttgtggccatttggtac

SEQ ID NO: 106839 - DNA, 25 bp, Saccharomyces pastorianus
atacctatgcagtcacttctttttt

SEQ ID NO: 106840 - DNA, 25 bp, Saccharomyces pastorianus
aaaagacagtgatctcccatgctct

SEQ ID NO: 106841 - DNA, 25 bp, Saccharomyces pastorianus
ggtactggaccggatcttcaacaaa

SEQ ID NO: 106842 - DNA, 25 bp, Saccharomyces pastorianus
ggagttcgaattcaagcccaaggcc

SEQ ID NO: 106843 - DNA, 25 bp, Saccharomyces pastorianus
catgttcgtcttttgttgtgcttgt

SEQ ID NO: 106844 - DNA, 25 bp, Saccharomyces pastorianus
gcaagtctgtcttttcacttcaaga

SEQ ID NO: 106845 - DNA, 25 bp, Saccharomyces pastorianus
aaactttccgatccatgttcgtctt

SEQ ID NO: 106846 - DNA, 25 bp, Saccharomyces pastorianus
aaggccgtcagaggttcacactatt

SEQ ID NO: 106847 - DNA, 25 bp, Saccharomyces pastorianus
aatattcacacgtccgtcatgtcta

SEQ ID NO: 106848 - DNA, 25 bp, Saccharomyces pastorianus
atcctatcttaccttttcttcattt

SEQ ID NO: 106849 - DNA, 25 bp, Saccharomyces pastorianus
cgcttcctcgtttctcattttaaat

SEQ ID NO: 106850 - DNA, 25 bp, Saccharomyces pastorianus
gtccgtcatgtctattttgagtcag

SEQ ID NO: 106851 - DNA, 25 bp, Saccharomyces pastorianus
gagttcttttatgtgatgccaatcg

SEQ ID NO: 106852 - DNA, 25 bp, Saccharomyces pastorianus
gccaatcgtcaattatcctatctta

SEQ ID NO: 106853 - DNA, 25 bp, Saccharomyces pastorianus
tcttcatttctttcagcgttttcat

SEQ ID NO: 106854 - DNA, 25 bp, Saccharomyces pastorianus
gaaattcagttattctatcattcag

SEQ ID NO: 106855 - DNA, 25 bp, Saccharomyces pastorianus
atttcgcgctattcttgaactttcg

SEQ ID NO: 106856 - DNA, 25 bp, Saccharomyces pastorianus
aattccttcgtttgatttcgcgcta

SEQ ID NO: 106857 - DNA, 25 bp, Saccharomyces pastorianus
gatttgctttattttcgcttcctcg

SEQ ID NO: 106858 - DNA, 25 bp, Saccharomyces pastorianus
aatggccagcactactttttgaaat

SEQ ID NO: 106859 - DNA, 25 bp, Saccharomyces pastorianus
gatgccgctcaaggaatggatttca

SEQ ID NO: 106860 - DNA, 25 bp, Saccharomyces pastorianus
gctggaggcatggacttcagcaaaa

SEQ ID NO: 106861 - DNA, 25 bp, Saccharomyces pastorianus
ggtgaagtacccttacatcaaaact

SEQ ID NO: 106862 - DNA, 25 bp, Saccharomyces pastorianus
aattgcagactgtgatgcccctgag

SEQ ID NO: 106863 - DNA, 25 bp, Saccharomyces pastorianus
gtgatgcccctgagttaaccattaa

SEQ ID NO: 106864 - DNA, 25 bp, Saccharomyces pastorianus
taaccattaagccatcatacatcga

SEQ ID NO: 106865 - DNA, 25 bp, Saccharomyces pastorianus
gctggtggcgctggttctccagata

SEQ ID NO: 106866 - DNA, 25 bp, Saccharomyces pastorianus
aaggtctagtactactgatccagaa

SEQ ID NO: 106867 - DNA, 25 bp, Saccharomyces pastorianus
atgcataaggttgctaatggccagc

SEQ ID NO: 106868 - DNA, 25 bp, Saccharomyces pastorianus
atcaaagcctcatgttggcgatgaa

SEQ ID NO: 106869 - DNA, 25 bp, Saccharomyces pastorianus
gtgggccttaggtgtcatactatac

SEQ ID NO: 106870 - DNA, 25 bp, Saccharomyces pastorianus
tcctccaaacgcttcagcaagacag

SEQ ID NO: 106871 - DNA, 25 bp, Saccharomyces pastorianus
acgtcacatcgtattgccaggtttg

SEQ ID NO: 106872 - DNA, 25 bp, Saccharomyces pastorianus
atcaacagttttagggactcaccca

SEQ ID NO: 106873 - DNA, 25 bp, Saccharomyces pastorianus
aacagtattattcatcgggacctaa

SEQ ID NO: 106874 - DNA, 25 bp, Saccharomyces pastorianus
cagaggattatgtctcaccagaaat

SEQ ID NO: 106875 - DNA, 25 bp, Saccharomyces pastorianus
gagttccctacgatggccatttaag

SEQ ID NO: 106876 - DNA, 25 bp, Saccharomyces pastorianus
cagaaatcctgatgggagttcccta

SEQ ID NO: 106877 - DNA, 25 bp, Saccharomyces pastorianus
gccatttaagcgacacgtgggcctt

SEQ ID NO: 106878 - DNA, 25 bp, Saccharomyces pastorianus
aggacagattaccatttgaccctcc

SEQ ID NO: 106879 - DNA, 25 bp, Saccharomyces pastorianus
gactcacccatttactgcaagcaaa

SEQ ID NO: 106880 - DNA, 25 bp, Saccharomyces pastorianus
gcagggtatccctattgtcttggaa

SEQ ID NO: 106881 - DNA, 25 bp, Saccharomyces pastorianus
agcaggctacgatatcagcaccact

SEQ ID NO: 106882 - DNA, 25 bp, Saccharomyces pastorianus
gtgtttagaatgatcgcgcactctg

SEQ ID NO: 106883 - DNA, 25 bp, Saccharomyces pastorianus
cagcaccactgaaacgtttaacaat

SEQ ID NO: 106884 - DNA, 25 bp, Saccharomyces pastorianus
aagaatcggcgtttgcatagataca

SEQ ID NO: 106885 - DNA, 25 bp, Saccharomyces pastorianus
gaaagccactgcagagccaagcgat

SEQ ID NO: 106886 - DNA, 25 bp, Saccharomyces pastorianus
agatttgcatgaacgcttgggtcaa

SEQ ID NO: 106887 - DNA, 25 bp, Saccharomyces pastorianus
gcgcactctgaatacctgcagggta

SEQ ID NO: 106888 - DNA, 25 bp, Saccharomyces pastorianus
gtgctgttcacttaaatgattccaa

SEQ ID NO: 106889 - DNA, 25 bp, Saccharomyces pastorianus
gatacatgccatacatttgcagcag

SEQ ID NO: 106890 - DNA, 25 bp, Saccharomyces pastorianus
atgattccaaggctcctttaggagc

SEQ ID NO: 106891 - DNA, 25 bp, Saccharomyces pastorianus
atgggttcttccaagtggtgcctaa

SEQ ID NO: 106892 - DNA, 25 bp, Saccharomyces pastorianus
gagacatttgactttttcagaggcc

SEQ ID NO: 106893 - DNA, 25 bp, Saccharomyces pastorianus
gcataatgcttggttgtgactactg

SEQ ID NO: 106894 - DNA, 25 bp, Saccharomyces pastorianus
gaatgctgtttcttgaccctgaagt

SEQ ID NO: 106895 - DNA, 25 bp, Saccharomyces pastorianus
tgagaggactcgacttgacaataga

SEQ ID NO: 106896 - DNA, 25 bp, Saccharomyces pastorianus
gagcagtttgttgatctttgcataa

SEQ ID NO: 106897 - DNA, 25 bp, Saccharomyces pastorianus
gacacactctgttatagaacaccct

SEQ ID NO: 106898 - DNA, 25 bp, Saccharomyces pastorianus
gttggtccagtgacagccttaaaat

SEQ ID NO: 106899 - DNA, 25 bp, Saccharomyces pastorianus
gaagactggccttacaaacaagcaa

SEQ ID NO: 106900 - DNA, 25 bp, Saccharomyces pastorianus
acagctggctgctgcggcgaaaaga

SEQ ID NO: 106901 - DNA, 25 bp, Saccharomyces pastorianus
agaacacccttcttgttgagacatt

SEQ ID NO: 106902 - DNA, 25 bp, Saccharomyces pastorianus
tgctcagttagccatagacaagatc

SEQ ID NO: 106903 - DNA, 25 bp, Saccharomyces pastorianus
gaagacgacaaactaccacatgatg

SEQ ID NO: 106904 - DNA, 25 bp, Saccharomyces pastorianus
tggattcagaagatgctcacaagtt

SEQ ID NO: 106905 - DNA, 25 bp, Saccharomyces pastorianus
gttaaggttactgtcatcgcatttg

SEQ ID NO: 106906 - DNA, 25 bp, Saccharomyces pastorianus
caaccttggctgaagtagacgctca

SEQ ID NO: 106907 - DNA, 25 bp, Saccharomyces pastorianus
gtaatgaaaatgtccacccaacctt

SEQ ID NO: 106908 - DNA, 25 bp, Saccharomyces pastorianus
tcaacccaagaagatgccaagcgtc

SEQ ID NO: 106909 - DNA, 25 bp, Saccharomyces pastorianus
ggtgatggccataacaattcgtcga

SEQ ID NO: 106910 - DNA, 25 bp, Saccharomyces pastorianus
aaataactcattcagacgtgtccat

SEQ ID NO: 106911 - DNA, 25 bp, Saccharomyces pastorianus
agacgtgtccatggttggcctagat

SEQ ID NO: 106912 - DNA, 25 bp, Saccharomyces pastorianus
agaagctcgtgaaactgctcagtta

SEQ ID NO: 106913 - DNA, 25 bp, Saccharomyces pastorianus
agcaacatcttcttcatcgtgatga

SEQ ID NO: 106914 - DNA, 25 bp, Saccharomyces pastorianus
gagttgtgttcttattatactgcga

SEQ ID NO: 106915 - DNA, 25 bp, Saccharomyces pastorianus
tcaactgggtatctattgacctctt

SEQ ID NO: 106916 - DNA, 25 bp, Saccharomyces pastorianus
aaaatagctcgtcttctcaactggg

SEQ ID NO: 106917 - DNA, 25 bp, Saccharomyces pastorianus
tttccctattagtccagcaacatct

SEQ ID NO: 106918 - DNA, 25 bp, Saccharomyces pastorianus
ggtgtagattctctacctctttcaa

SEQ ID NO: 106919 - DNA, 25 bp, Saccharomyces pastorianus
agtaaccttaactgttccgccacat

SEQ ID NO: 106920 - DNA, 25 bp, Saccharomyces pastorianus
agaaaggtcttcttcatcatcggct

SEQ ID NO: 106921 - DNA, 25 bp, Saccharomyces pastorianus
gtcatcatcattattctggtgtaga

SEQ ID NO: 106922 - DNA, 25 bp, Saccharomyces pastorianus
cattacatcgtctacgtcatcatca

SEQ ID NO: 106923 - DNA, 25 bp, Saccharomyces pastorianus
tatactgcgattctacatccacgtc

SEQ ID NO: 106924 - DNA, 25 bp, Saccharomyces pastorianus
caaaagcctgacttctattggcggg

SEQ ID NO: 106925 - DNA, 25 bp, Saccharomyces pastorianus
atgggactctccactctttgctatt

SEQ ID NO: 106926 - DNA, 25 bp, Saccharomyces pastorianus
aaacactgtgtccaccagagactat

SEQ ID NO: 106927 - DNA, 25 bp, Saccharomyces pastorianus
gatgatggttgcttcttcgtagact

SEQ ID NO: 106928 - DNA, 25 bp, Saccharomyces pastorianus
ttgctattcttactcctcaggacaa

SEQ ID NO: 106929 - DNA, 25 bp, Saccharomyces pastorianus
aagagtcattgtttccgaagggatt

SEQ ID NO: 106930 - DNA, 25 bp, Saccharomyces pastorianus
aactcagccacggtactaaagcctg

SEQ ID NO: 106931 - DNA, 25 bp, Saccharomyces pastorianus
ttcatccaggttctcgacatcgaaa

SEQ ID NO: 106932 - DNA, 25 bp, Saccharomyces pastorianus
gacttgcccattggtaacgtcgtta

SEQ ID NO: 106933 - DNA, 25 bp, Saccharomyces pastorianus
taaagcctgcgtctcagtccaactt

SEQ ID NO: 106934 - DNA, 25 bp, Saccharomyces pastorianus
acgtcgttacgttggcgcaattgca

SEQ ID NO: 106935 - DNA, 25 bp, Saccharomyces pastorianus
gattcgcatcaccatgacgagttag

SEQ ID NO: 106936 - DNA, 25 bp, Saccharomyces pastorianus
gtcgaagtcgaacgctaacctttat

SEQ ID NO: 106937 - DNA, 25 bp, Saccharomyces pastorianus
atgaaagcgctgattcgcatcacca

SEQ ID NO: 106938 - DNA, 25 bp, Saccharomyces pastorianus
aacaatgatgcaactgccaccaatg

SEQ ID NO: 106939 - DNA, 25 bp, Saccharomyces pastorianus
gaagattcatcacgtgctttgaaaa

SEQ ID NO: 106940 - DNA, 25 bp, Saccharomyces pastorianus
tcatgttttccaacgataccggtat

SEQ ID NO: 106941 - DNA, 25 bp, Saccharomyces pastorianus
gaggaaaccgtatcttcagggcaag

SEQ ID NO: 106942 - DNA, 25 bp, Saccharomyces pastorianus
ggtagtgccggtactgatgacgact

SEQ ID NO: 106943 - DNA, 25 bp, Saccharomyces pastorianus
aaacctatctgtttcttcaggatca

SEQ ID NO: 106944 - DNA, 25 bp, Saccharomyces pastorianus
gatgacgactacaccaaagttctga

SEQ ID NO: 106945 - DNA, 25 bp, Saccharomyces pastorianus
aagcagtttcatcgacgaccttgac

SEQ ID NO: 106946 - DNA, 25 bp, Saccharomyces pastorianus
gctcagagcaaaagcctacggctaa

SEQ ID NO: 106947 - DNA, 25 bp, Saccharomyces pastorianus
ggatccacctcacaaatctctgata

SEQ ID NO: 106948 - DNA, 25 bp, Saccharomyces pastorianus
aatgatccagaaaccgagaccgcag

SEQ ID NO: 106949 - DNA, 25 bp, Saccharomyces pastorianus
gaagaccactgacgaaatccctgat

SEQ ID NO: 106950 - DNA, 25 bp, Saccharomyces pastorianus
aaccacgaagacgactttgggctag

SEQ ID NO: 106951 - DNA, 25 bp, Saccharomyces pastorianus
caagcagcggcgttgtaagctcaga

SEQ ID NO: 106952 - DNA, 25 bp, Saccharomyces pastorianus
atttgaacatgatccggaggcaagc

SEQ ID NO: 106953 - DNA, 25 bp, Saccharomyces pastorianus
ggatcaagcggatatttcaacttca

SEQ ID NO: 106954 - DNA, 25 bp, Saccharomyces pastorianus
tagtccgtctccactcattagaaga

SEQ ID NO: 106955 - DNA, 25 bp, Saccharomyces pastorianus
ttcaacttcatttagtccgtctcca

SEQ ID NO: 106956 - DNA, 25 bp, Saccharomyces pastorianus
acgaaatccctgatagagttggcca

SEQ ID NO: 106957 - DNA, 25 bp, Saccharomyces pastorianus
ctacctcagccgcattacagaatgg

SEQ ID NO: 106958 - DNA, 25 bp, Saccharomyces pastorianus
tcagctggacctgtcaaagcgcaga

SEQ ID NO: 106959 - DNA, 25 bp, Saccharomyces pastorianus
gtgggagacccagatgacttgaatt

SEQ ID NO: 106960 - DNA, 25 bp, Saccharomyces pastorianus
aagttttcatagcagggtttccagg

SEQ ID NO: 106961 - DNA, 25 bp, Saccharomyces pastorianus
aaacaatttgcaccctgattgcgag

SEQ ID NO: 106962 - DNA, 25 bp, Saccharomyces pastorianus
gaaccctgggctgatcaaaacgaac

SEQ ID NO: 106963 - DNA, 25 bp, Saccharomyces pastorianus
taatcttcttggcagtgacacctac

SEQ ID NO: 106964 - DNA, 25 bp, Saccharomyces pastorianus
gaagtatagtgcctacgctacacat

SEQ ID NO: 106965 - DNA, 25 bp, Saccharomyces pastorianus
taccttcgcctggtttgaccaaaga

SEQ ID NO: 106966 - DNA, 25 bp, Saccharomyces pastorianus
ggtatttttgcatcacgccagagac

SEQ ID NO: 106967 - DNA, 25 bp, Saccharomyces pastorianus
atcacgcagtggtacaatgttcagc

SEQ ID NO: 106968 - DNA, 25 bp, Saccharomyces pastorianus
gatatgcgagctatgactccaacaa

SEQ ID NO: 106969 - DNA, 25 bp, Saccharomyces pastorianus
ctgacaataggaagatatgcgagct

SEQ ID NO: 106970 - DNA, 25 bp, Saccharomyces pastorianus
gtcgatattacatctgacaatagga

SEQ ID NO: 106971 - DNA, 25 bp, Saccharomyces pastorianus
gctatgactccaacaatcacatgag

SEQ ID NO: 106972 - DNA, 25 bp, Saccharomyces pastorianus
atgcgagctatgactccaacaatca

SEQ ID NO: 106973 - DNA, 25 bp, Saccharomyces pastorianus
aatcacatgagacggcgtgcaaaac

SEQ ID NO: 106974 - DNA, 25 bp, Saccharomyces pastorianus
gagctatgactccaacaatcacatg

SEQ ID NO: 106975 - DNA, 25 bp, Saccharomyces pastorianus
aacaatcacatgagacggcgtgcaa

SEQ ID NO: 106976 - DNA, 25 bp, Saccharomyces pastorianus
gaagatatgcgagctatgactccaa

SEQ ID NO: 106977 - DNA, 25 bp, Saccharomyces pastorianus
tgactccaacaatcacatgagacgg

SEQ ID NO: 106978 - DNA, 25 bp, Saccharomyces pastorianus
ccgtcgatattacatctgacaatag

SEQ ID NO: 106979 - DNA, 25 bp, Saccharomyces pastorianus
tgtaaatttcgcacaacagcacggt

SEQ ID NO: 106980 - DNA, 25 bp, Saccharomyces pastorianus
ccaggatacggttctcgtgtggtaa

SEQ ID NO: 106981 - DNA, 25 bp, Saccharomyces pastorianus
gaaagttcaaccctctacaacagaa

SEQ ID NO: 106982 - DNA, 25 bp, Saccharomyces pastorianus
ggtatctttctttgtcaatcttttg

SEQ ID NO: 106983 - DNA, 25 bp, Saccharomyces pastorianus
tatgtattcttctccaccaggatac

SEQ ID NO: 106984 - DNA, 25 bp, Saccharomyces pastorianus
ctagggtggccggatcttgtaaatt

SEQ ID NO: 106985 - DNA, 25 bp, Saccharomyces pastorianus
ttatcacgccggcaactgcgaacaa

SEQ ID NO: 106986 - DNA, 25 bp, Saccharomyces pastorianus
agatgtttgaccgtctagggtggcc

SEQ ID NO: 106987 - DNA, 25 bp, Saccharomyces pastorianus
gttggttccttaagcgttatcacgc

SEQ ID NO: 106988 - DNA, 25 bp, Saccharomyces pastorianus
acatgggcctttatggtgaacgagt

SEQ ID NO: 106989 - DNA, 25 bp, Saccharomyces pastorianus
agagattgcatcacgtcagacagga

SEQ ID NO: 106990 - DNA, 25 bp, Saccharomyces pastorianus
taatcccgggccaaattaagcaagt

SEQ ID NO: 106991 - DNA, 25 bp, Saccharomyces pastorianus
taatgtttgctctatcgctgtcaga

SEQ ID NO: 106992 - DNA, 25 bp, Saccharomyces pastorianus
ttgcttttggtaccagagactctct

SEQ ID NO: 106993 - DNA, 25 bp, Saccharomyces pastorianus
aggttaccaatttgctgctgctctg

SEQ ID NO: 106994 - DNA, 25 bp, Saccharomyces pastorianus
aaatcaatcgacctgcaaactttag

SEQ ID NO: 106995 - DNA, 25 bp, Saccharomyces pastorianus
aaagtagtttcctctattgagcaag

SEQ ID NO: 106996 - DNA, 25 bp, Saccharomyces pastorianus
tgaaacacggtgtcttggccttggt

SEQ ID NO: 106997 - DNA, 25 bp, Saccharomyces pastorianus
ctgctgctctggaaggtgctttgaa

SEQ ID NO: 106998 - DNA, 25 bp, Saccharomyces pastorianus
aaaaagctctgtgcgactgaattaa

SEQ ID NO: 106999 - DNA, 25 bp, Saccharomyces pastorianus
ttggccttggtggacgaaaacttgc

SEQ ID NO: 107000 - DNA, 25 bp, Saccharomyces pastorianus
gagactctctattccctaaagtagt

SEQ ID NO: 107001 - DNA, 25 bp, Saccharomyces pastorianus
gtcgatttgcatacggtttgggcta

SEQ ID NO: 107002 - DNA, 25 bp, Saccharomyces pastorianus
attagcacgccgcaatggagacaaa

SEQ ID NO: 107003 - DNA, 25 bp, Saccharomyces pastorianus
taattccatcatcttgtccgcagac

SEQ ID NO: 107004 - DNA, 25 bp, Saccharomyces pastorianus
ttgcacagttgtccatgcacagcat

SEQ ID NO: 107005 - DNA, 25 bp, Saccharomyces pastorianus
ggtgctcgtaccatagacctgggaa

SEQ ID NO: 107006 - DNA, 25 bp, Saccharomyces pastorianus
ttggcttctcaaacaggtgctcgta

SEQ ID NO: 107007 - DNA, 25 bp, Saccharomyces pastorianus
gaacgcagttcttctgcattcacta

SEQ ID NO: 107008 - DNA, 25 bp, Saccharomyces pastorianus
atcaggtggtactatcggcccatca

SEQ ID NO: 107009 - DNA, 25 bp, Saccharomyces pastorianus
tgattgctttgatttgctacgctaa

SEQ ID NO: 107010 - DNA, 25 bp, Saccharomyces pastorianus
ggatcctaacggtcatatggccaca

SEQ ID NO: 107011 - DNA, 25 bp, Saccharomyces pastorianus
gaagaatcattttccagtgcctaat

SEQ ID NO: 107012 - DNA, 25 bp, Saccharomyces pastorianus
acattgtaatcccttatctcttgcg

SEQ ID NO: 107013 - DNA, 25 bp, Saccharomyces pastorianus
cactccttccttttctcatggataa

SEQ ID NO: 107014 - DNA, 25 bp, Saccharomyces pastorianus
gttcattcggttttctcttgtgcag

SEQ ID NO: 107015 - DNA, 25 bp, Saccharomyces pastorianus
agctgcagccagttgttcattcggt

SEQ ID NO: 107016 - DNA, 25 bp, Saccharomyces pastorianus
ttgtgcagcggctcaaattgtggca

SEQ ID NO: 107017 - DNA, 25 bp, Saccharomyces pastorianus
tgtaggctccgaacgccgtaaggta

SEQ ID NO: 107018 - DNA, 25 bp, Saccharomyces pastorianus
gtcatcctattactttctgaggcat

SEQ ID NO: 107019 - DNA, 25 bp, Saccharomyces pastorianus
attgtggcaggcttgtaggctccga

SEQ ID NO: 107020 - DNA, 25 bp, Saccharomyces pastorianus
ttatctcttgcgcttgttggtatca

SEQ ID NO: 107021 - DNA, 25 bp, Saccharomyces pastorianus
tgaggtttcatcgacagctgcagcc

SEQ ID NO: 107022 - DNA, 25 bp, Saccharomyces pastorianus
gtgtgctttattcgctgaggtttca

SEQ ID NO: 107023 - DNA, 25 bp, Saccharomyces pastorianus
gttacgaaggataccgctatggaat

SEQ ID NO: 107024 - DNA, 25 bp, Saccharomyces pastorianus
gaattggttcgtcaaactatttcaa

SEQ ID NO: 107025 - DNA, 25 bp, Saccharomyces pastorianus
agaacctagatcacaaatttgggag

SEQ ID NO: 107026 - DNA, 25 bp, Saccharomyces pastorianus
aagaagcgccttccagtgataaaaa

SEQ ID NO: 107027 - DNA, 25 bp, Saccharomyces pastorianus
gatgatgcgcatatgctaacattaa

SEQ ID NO: 107028 - DNA, 25 bp, Saccharomyces pastorianus
ttctcaacttgtgttgccggtggtt

SEQ ID NO: 107029 - DNA, 25 bp, Saccharomyces pastorianus
acacccaatgcatctacggtaatta

SEQ ID NO: 107030 - DNA, 25 bp, Saccharomyces pastorianus
gaagagcacaccaagctagacaata

SEQ ID NO: 107031 - DNA, 25 bp, Saccharomyces pastorianus
atcaagattactagcacacccaatg

SEQ ID NO: 107032 - DNA, 25 bp, Saccharomyces pastorianus
gctactaaggcatccaagaatcatg

SEQ ID NO: 107033 - DNA, 25 bp, Saccharomyces pastorianus
gaatatccgaggaatcttctcaact

SEQ ID NO: 107034 - DNA, 25 bp, Saccharomyces pastorianus
gtagctactaaccttgatattcccg

SEQ ID NO: 107035 - DNA, 25 bp, Saccharomyces pastorianus
tatgccttgcttggtgatgatgtaa

SEQ ID NO: 107036 - DNA, 25 bp, Saccharomyces pastorianus
ttgcttctttggtatctgccatggt

SEQ ID NO: 107037 - DNA, 25 bp, Saccharomyces pastorianus
atggtctccttgtccattttcaata

SEQ ID NO: 107038 - DNA, 25 bp, Saccharomyces pastorianus
ataacttattcgaccttcatcctat

SEQ ID NO: 107039 - DNA, 25 bp, Saccharomyces pastorianus
gccttgcctggtatgtttattgcga

SEQ ID NO: 107040 - DNA, 25 bp, Saccharomyces pastorianus
gatgacactgaattccactttttga

SEQ ID NO: 107041 - DNA, 25 bp, Saccharomyces pastorianus
tttcaatactgctcaaccggcttta

SEQ ID NO: 107042 - DNA, 25 bp, Saccharomyces pastorianus
atgacatctggaagtggcaccttga

SEQ ID NO: 107043 - DNA, 25 bp, Saccharomyces pastorianus
gctatggttagttacgttgcttctt

SEQ ID NO: 107044 - DNA, 25 bp, Saccharomyces pastorianus
tggtctgggtgatattgccttgcct

SEQ ID NO: 107045 - DNA, 25 bp, Saccharomyces pastorianus
gtgccacttccagatgtcatatttg

SEQ ID NO: 107046 - DNA, 25 bp, Saccharomyces pastorianus
tcaaggtgccacttccagatgtcat

SEQ ID NO: 107047 - DNA, 25 bp, Saccharomyces pastorianus
cttccagatgtcatatttgtagcac

SEQ ID NO: 107048 - DNA, 25 bp, Saccharomyces pastorianus
gccacttccagatgtcatatttgta

SEQ ID NO: 107049 - DNA, 25 bp, Saccharomyces pastorianus
atcaaggtgccacttccagatgtca

SEQ ID NO: 107050 - DNA, 25 bp, Saccharomyces pastorianus
atatttgtagcacatcgcaataaac

SEQ ID NO: 107051 - DNA, 25 bp, Saccharomyces pastorianus
aaggtgccacttccagatgtcatat

SEQ ID NO: 107052 - DNA, 25 bp, Saccharomyces pastorianus
gtcatatttgtagcacatcgcaata

SEQ ID NO: 107053 - DNA, 25 bp, Saccharomyces pastorianus
agcacatcgcaataaacataccagg

SEQ ID NO: 107054 - DNA, 25 bp, Saccharomyces pastorianus
aggtgccacttccagatgtcatatt

SEQ ID NO: 107055 - DNA, 25 bp, Saccharomyces pastorianus
atgtcatatttgtagcacatcgcaa

SEQ ID NO: 107056 - DNA, 25 bp, Saccharomyces pastorianus
tagcgaccccaacttggtggacgaa

SEQ ID NO: 107057 - DNA, 25 bp, Saccharomyces pastorianus
tattctcgatatcatggtccatttg

SEQ ID NO: 107058 - DNA, 25 bp, Saccharomyces pastorianus
atgagtttgagaatccccttttcct

SEQ ID NO: 107059 - DNA, 25 bp, Saccharomyces pastorianus
gtatgggcgcttggctcaaacacaa

SEQ ID NO: 107060 - DNA, 25 bp, Saccharomyces pastorianus
ccttttcctggaatctctcgtagtg

SEQ ID NO: 107061 - DNA, 25 bp, Saccharomyces pastorianus
gcgttcctccatggatagttcctta

SEQ ID NO: 107062 - DNA, 25 bp, Saccharomyces pastorianus
gcggcaagatgtttgtgtcaccttc

SEQ ID NO: 107063 - DNA, 25 bp, Saccharomyces pastorianus
gtacttccccatgcacttggaattg

SEQ ID NO: 107064 - DNA, 25 bp, Saccharomyces pastorianus
tagttccttattgtacggtagcgac

SEQ ID NO: 107065 - DNA, 25 bp, Saccharomyces pastorianus
ttggaattggttcagcgttcctcca

SEQ ID NO: 107066 - DNA, 25 bp, Saccharomyces pastorianus
tcacatgtcaaagaggcgtccaggt

SEQ ID NO: 107067 - DNA, 25 bp, Saccharomyces pastorianus
ttacgtttaccattcttgagagtga

SEQ ID NO: 107068 - DNA, 25 bp, Saccharomyces pastorianus
ctagcatatcagtggcgcagaacgc

SEQ ID NO: 107069 - DNA, 25 bp, Saccharomyces pastorianus
ggcagttcagttcgtgttgtttacc

SEQ ID NO: 107070 - DNA, 25 bp, Saccharomyces pastorianus
cataggttgctgctgcctagcatat

SEQ ID NO: 107071 - DNA, 25 bp, Saccharomyces pastorianus
gttgtttacctctgccgaaactgag

SEQ ID NO: 107072 - DNA, 25 bp, Saccharomyces pastorianus
cggcgatcgctgcattgtttcaagt

SEQ ID NO: 107073 - DNA, 25 bp, Saccharomyces pastorianus
gtttcaagtgccctggagacgtaaa

SEQ ID NO: 107074 - DNA, 25 bp, Saccharomyces pastorianus
tgttatggccccaaaacgcgcatat

SEQ ID NO: 107075 - DNA, 25 bp, Saccharomyces pastorianus
atattccacgccttttgggccttgg

SEQ ID NO: 107076 - DNA, 25 bp, Saccharomyces pastorianus
gcggagtgcctgtggaattgccctt

SEQ ID NO: 107077 - DNA, 25 bp, Saccharomyces pastorianus
attgcccttcggagctaaggcagtt

SEQ ID NO: 107078 - DNA, 25 bp, Saccharomyces pastorianus
gcctgatttatatacgattattgta

SEQ ID NO: 107079 - DNA, 25 bp, Saccharomyces pastorianus
gaagcctgatttatatacgattatt

SEQ ID NO: 107080 - DNA, 25 bp, Saccharomyces pastorianus
gaagttatttattcttgattatgag

SEQ ID NO: 107081 - DNA, 25 bp, Saccharomyces pastorianus
acaagaagcctgatttatatacgat

SEQ ID NO: 107082 - DNA, 25 bp, Saccharomyces pastorianus
agcctgatttatatacgattattgt

SEQ ID NO: 107083 - DNA, 25 bp, Saccharomyces pastorianus
caagaagcctgatttatatacgatt

SEQ ID NO: 107084 - DNA, 25 bp, Saccharomyces pastorianus
aagcctgatttatatacgattattg

SEQ ID NO: 107085 - DNA, 25 bp, Saccharomyces pastorianus
gaacaagaagcctgatttatatacg

SEQ ID NO: 107086 - DNA, 25 bp, Saccharomyces pastorianus
aagaagcctgatttatatacgatta

SEQ ID NO: 107087 - DNA, 25 bp, Saccharomyces pastorianus
acaaagataggaaaagggatggcaa

SEQ ID NO: 107088 - DNA, 25 bp, Saccharomyces pastorianus
agaagcctgatttatatacgattat

SEQ ID NO: 107089 - DNA, 25 bp, Saccharomyces pastorianus
tgtcgcttccgttgctttcgtcgct

SEQ ID NO: 107090 - DNA, 25 bp, Saccharomyces pastorianus
ccatccagcaccgttgaaactgttt

SEQ ID NO: 107091 - DNA, 25 bp, Saccharomyces pastorianus
gcaccgttgaaactgtttctccatc

SEQ ID NO: 107092 - DNA, 25 bp, Saccharomyces pastorianus
tccagcaccgttgaaactgtttctc

SEQ ID NO: 107093 - DNA, 25 bp, Saccharomyces pastorianus
gttgaaactgtttctccatccagca

SEQ ID NO: 107094 - DNA, 25 bp, Saccharomyces pastorianus
tgctttcgtcgctttggctaacttt

SEQ ID NO: 107095 - DNA, 25 bp, Saccharomyces pastorianus
ccgttgctttcgtcgctttggctaa

SEQ ID NO: 107096 - DNA, 25 bp, Saccharomyces pastorianus
gtttctccatccagcaccgaaacta

SEQ ID NO: 107097 - DNA, 25 bp, Saccharomyces pastorianus
catccagcaccgaaactatctctca

SEQ ID NO: 107098 - DNA, 25 bp, Saccharomyces pastorianus
accactgctaccaccgaagctacca

SEQ ID NO: 107099 - DNA, 25 bp, Saccharomyces pastorianus
aaactgtttctccatccagcaccga

SEQ ID NO: 107100 - DNA, 25 bp, Saccharomyces pastorianus
tgtcgcttccgttgctttcgtcgct

SEQ ID NO: 107101 - DNA, 25 bp, Saccharomyces pastorianus
ccatccagcaccgttgaaactgttt

SEQ ID NO: 107102 - DNA, 25 bp, Saccharomyces pastorianus
gttgaaactgtttctccatccagca

SEQ ID NO: 107103 - DNA, 25 bp, Saccharomyces pastorianus
tccagcaccgttgaaactgtttctc

SEQ ID NO: 107104 - DNA, 25 bp, Saccharomyces pastorianus
tgctttcgtcgctttggctaacttt

SEQ ID NO: 107105 - DNA, 25 bp, Saccharomyces pastorianus
ccgttgctttcgtcgctttggctaa

SEQ ID NO: 107106 - DNA, 25 bp, Saccharomyces pastorianus
gtttctccatccagcaccgaaacta

SEQ ID NO: 107107 - DNA, 25 bp, Saccharomyces pastorianus
tgccgccatttctcaaatcactgac

SEQ ID NO: 107108 - DNA, 25 bp, Saccharomyces pastorianus
aaactgtttctccatccagcaccga

SEQ ID NO: 107109 - DNA, 25 bp, Saccharomyces pastorianus
gctaactttgttgccgctgaatccg

SEQ ID NO: 107110 - DNA, 25 bp, Saccharomyces pastorianus
agcaccgaaactatctctcaacaaa

SEQ ID NO: 107111 - DNA, 25 bp, Saccharomyces pastorianus
gactaaccatttcatgtccacgttg

SEQ ID NO: 107112 - DNA, 25 bp, Saccharomyces pastorianus
gactgatgatctggacaacctcgta

SEQ ID NO: 107113 - DNA, 25 bp, Saccharomyces pastorianus
aaagctctgtgcgtacgaatccgtt

SEQ ID NO: 107114 - DNA, 25 bp, Saccharomyces pastorianus
ggcgtaagaaactatgtccctcaga

SEQ ID NO: 107115 - DNA, 25 bp, Saccharomyces pastorianus
attgcatttagaacagaccccggta

SEQ ID NO: 107116 - DNA, 25 bp, Saccharomyces pastorianus
actccgttgtttaatcctacatcca

SEQ ID NO: 107117 - DNA, 25 bp, Saccharomyces pastorianus
atagacgagacactgcaacgcttag

SEQ ID NO: 107118 - DNA, 25 bp, Saccharomyces pastorianus
atttgacaatcacaggcagcgtacc

SEQ ID NO: 107119 - DNA, 25 bp, Saccharomyces pastorianus
ggcagcgtaccaataaacctggcaa

SEQ ID NO: 107120 - DNA, 25 bp, Saccharomyces pastorianus
acagaccccggtaattcagattatg

SEQ ID NO: 107121 - DNA, 25 bp, Saccharomyces pastorianus
acgttgtgccaattccattgcattt

SEQ ID NO: 107122 - DNA, 25 bp, Saccharomyces pastorianus
aggactgtccttctgctgacaaaga

SEQ ID NO: 107123 - DNA, 25 bp, Saccharomyces pastorianus
aaagcctatcgtgctttcctcggaa

SEQ ID NO: 107124 - DNA, 25 bp, Saccharomyces pastorianus
gccgacccaaattattgctccatta

SEQ ID NO: 107125 - DNA, 25 bp, Saccharomyces pastorianus
gacaaacccgttattattatgcatg

SEQ ID NO: 107126 - DNA, 25 bp, Saccharomyces pastorianus
aggccaaaggcatacccttgttcat

SEQ ID NO: 107127 - DNA, 25 bp, Saccharomyces pastorianus
gtggtatctgcctaaactatgcctg

SEQ ID NO: 107128 - DNA, 25 bp, Saccharomyces pastorianus
gatcctatgtctgttccactatatg

SEQ ID NO: 107129 - DNA, 25 bp, Saccharomyces pastorianus
taagcggatatatcgggtcaggccc

SEQ ID NO: 107130 - DNA, 25 bp, Saccharomyces pastorianus
gaattaaagctgtatccgggcgcaa

SEQ ID NO: 107131 - DNA, 25 bp, Saccharomyces pastorianus
gatcctaagggctctgaaaagttca

SEQ ID NO: 107132 - DNA, 25 bp, Saccharomyces pastorianus
ccgggcgcaagacattcgattttct

SEQ ID NO: 107133 - DNA, 25 bp, Saccharomyces pastorianus
atcggccccgtgaaatatcatcgtg

SEQ ID NO: 107134 - DNA, 25 bp, Saccharomyces pastorianus
acctgggttggatactttgactgct

SEQ ID NO: 107135 - DNA, 25 bp, Saccharomyces pastorianus
gacagtctataccagagctctttag

SEQ ID NO: 107136 - DNA, 25 bp, Saccharomyces pastorianus
ttgcaactcaaggtcgttttctcta

SEQ ID NO: 107137 - DNA, 25 bp, Saccharomyces pastorianus
atggccttttagtgagctcaagctc

SEQ ID NO: 107138 - DNA, 25 bp, Saccharomyces pastorianus
acgtcgtactttacttcatcttcat

SEQ ID NO: 107139 - DNA, 25 bp, Saccharomyces pastorianus
gccattgccataccaacacatttgt

SEQ ID NO: 107140 - DNA, 25 bp, Saccharomyces pastorianus
agctctttagcggtgcgtgtactaa

SEQ ID NO: 107141 - DNA, 25 bp, Saccharomyces pastorianus
gttttctctacccaggtcaagatca

SEQ ID NO: 107142 - DNA, 25 bp, Saccharomyces pastorianus
aagatcaaggtcttctgccattgcc

SEQ ID NO: 107143 - DNA, 25 bp, Saccharomyces pastorianus
cgaacacttcctcatcactaaattt

SEQ ID NO: 107144 - DNA, 25 bp, Saccharomyces pastorianus
tgtgcttccagcactttgtttgaag

SEQ ID NO: 107145 - DNA, 25 bp, Saccharomyces pastorianus
atcggtacatggaacatcatcggaa

SEQ ID NO: 107146 - DNA, 25 bp, Saccharomyces pastorianus
gtcaggttatgaatgtgcttccagc

SEQ ID NO: 107147 - DNA, 25 bp, Saccharomyces pastorianus
tactccatttcactctcacataaaa

SEQ ID NO: 107148 - DNA, 25 bp, Saccharomyces pastorianus
tgacgcttccaaactcgcaaggtaa

SEQ ID NO: 107149 - DNA, 25 bp, Saccharomyces pastorianus
aaaattcccgtaagctgacaagatg

SEQ ID NO: 107150 - DNA, 25 bp, Saccharomyces pastorianus
gattttccccgacaaagttatctag

SEQ ID NO: 107151 - DNA, 25 bp, Saccharomyces pastorianus
aaggatgattacttgacgcttccaa

SEQ ID NO: 107152 - DNA, 25 bp, Saccharomyces pastorianus
gaggaaacctcctaacgcagatgtt

SEQ ID NO: 107153 - DNA, 25 bp, Saccharomyces pastorianus
aggtgtctctagtaaatccaataac

SEQ ID NO: 107154 - DNA, 25 bp, Saccharomyces pastorianus
ataatggcgctaattcaggcatcaa

SEQ ID NO: 107155 - DNA, 25 bp, Saccharomyces pastorianus
tggtggtacatctgtcttgcacaac

SEQ ID NO: 107156 - DNA, 25 bp, Saccharomyces pastorianus
gaagagctggctaccttattgaaac

SEQ ID NO: 107157 - DNA, 25 bp, Saccharomyces pastorianus
agtccatttggtttctcgacgatgt

SEQ ID NO: 107158 - DNA, 25 bp, Saccharomyces pastorianus
aatgtaccctcagtattaccatcac

SEQ ID NO: 107159 - DNA, 25 bp, Saccharomyces pastorianus
agggtatctcactttctaatgctta

SEQ ID NO: 107160 - DNA, 25 bp, Saccharomyces pastorianus
tattgaaacttcgtgcactgtgctg

SEQ ID NO: 107161 - DNA, 25 bp, Saccharomyces pastorianus
aatgcttatcatgtgctttcctata

SEQ ID NO: 107162 - DNA, 25 bp, Saccharomyces pastorianus
aaatctttattcttggctcttctta

SEQ ID NO: 107163 - DNA, 25 bp, Saccharomyces pastorianus
gagaccctagatacatcggaccaga

SEQ ID NO: 107164 - DNA, 25 bp, Saccharomyces pastorianus
gatggttaaacccttcttggatcca

SEQ ID NO: 107165 - DNA, 25 bp, Saccharomyces pastorianus
ctactattccgatattggtccctgg

SEQ ID NO: 107166 - DNA, 25 bp, Saccharomyces pastorianus
agaggtatccacagcatcggcggga

SEQ ID NO: 107167 - DNA, 25 bp, Saccharomyces pastorianus
ggtgttgaacatatcgtccttattg

SEQ ID NO: 107168 - DNA, 25 bp, Saccharomyces pastorianus
tttacccaaattttcaacaccgcag

SEQ ID NO: 107169 - DNA, 25 bp, Saccharomyces pastorianus
aggttttaccttgacatccagagat

SEQ ID NO: 107170 - DNA, 25 bp, Saccharomyces pastorianus
ataaattgccccttcatgacaaaga

SEQ ID NO: 107171 - DNA, 25 bp, Saccharomyces pastorianus
cgagggagctgtgccggttataaat

SEQ ID NO: 107172 - DNA, 25 bp, Saccharomyces pastorianus
gataatcgcgatctcaaagccataa

SEQ ID NO: 107173 - DNA, 25 bp, Saccharomyces pastorianus
gatctcaaaggttcgactgcaggtt

SEQ ID NO: 107174 - DNA, 25 bp, Saccharomyces pastorianus
gtacagtttgtaagcccgttaatcg

SEQ ID NO: 107175 - DNA, 25 bp, Saccharomyces pastorianus
aacaccgcagatttcccgcagaaat

SEQ ID NO: 107176 - DNA, 25 bp, Saccharomyces pastorianus
ttccatggttttcttcccagtgaag

SEQ ID NO: 107177 - DNA, 25 bp, Saccharomyces pastorianus
taccggcattcaacgagtacgcgat

SEQ ID NO: 107178 - DNA, 25 bp, Saccharomyces pastorianus
aggacatatattacgttccacgtga

SEQ ID NO: 107179 - DNA, 25 bp, Saccharomyces pastorianus
aattattgcattcgcgcccaatttg

SEQ ID NO: 107180 - DNA, 25 bp, Saccharomyces pastorianus
aagtgaccgtttcagaagacgctaa

SEQ ID NO: 107181 - DNA, 25 bp, Saccharomyces pastorianus
aacgagtacgcgattgccaatagag

SEQ ID NO: 107182 - DNA, 25 bp, Saccharomyces pastorianus
gttcttgagcgttaaaggttccact

SEQ ID NO: 107183 - DNA, 25 bp, Saccharomyces pastorianus
gcgcccaatttgtcgcaaactgaac

SEQ ID NO: 107184 - DNA, 25 bp, Saccharomyces pastorianus
cagaccttacaactacgtacctacg

SEQ ID NO: 107185 - DNA, 25 bp, Saccharomyces pastorianus
gttccactttccaaataccggcatt

SEQ ID NO: 107186 - DNA, 25 bp, Saccharomyces pastorianus
aaatgttcttcgtccaagtgaccgt

SEQ ID NO: 107187 - DNA, 25 bp, Saccharomyces pastorianus
aagaatactttgctagcggcatatt

SEQ ID NO: 107188 - DNA, 25 bp, Saccharomyces pastorianus
gaatgatactagcttgagtctgaac

SEQ ID NO: 107189 - DNA, 25 bp, Saccharomyces pastorianus
gagagattggtcaccactgacccca

SEQ ID NO: 107190 - DNA, 25 bp, Saccharomyces pastorianus
tgggctgatattttcctgattgcgc

SEQ ID NO: 107191 - DNA, 25 bp, Saccharomyces pastorianus
tgattgcgcctttgtcagctaacac

SEQ ID NO: 107192 - DNA, 25 bp, Saccharomyces pastorianus
aacacacttgctaaactggccaatg

SEQ ID NO: 107193 - DNA, 25 bp, Saccharomyces pastorianus
gagtctgaacttaatattgcaccat

SEQ ID NO: 107194 - DNA, 25 bp, Saccharomyces pastorianus
aagacgcttgggtattcgacgctgt

SEQ ID NO: 107195 - DNA, 25 bp, Saccharomyces pastorianus
actgaccccagtgttgattgcgcct

SEQ ID NO: 107196 - DNA, 25 bp, Saccharomyces pastorianus
gtaacaatttgctaacttctgtgat

SEQ ID NO: 107197 - DNA, 25 bp, Saccharomyces pastorianus
agtgcaagactatccgttcatccaa

SEQ ID NO: 107198 - DNA, 25 bp, Saccharomyces pastorianus
gaaacacctgacgagtttagtgcaa

SEQ ID NO: 107199 - DNA, 25 bp, Saccharomyces pastorianus
tagagtgctctgcaaacccacaaga

SEQ ID NO: 107200 - DNA, 25 bp, Saccharomyces pastorianus
attgggatccgaactcagatgacat

SEQ ID NO: 107201 - DNA, 25 bp, Saccharomyces pastorianus
atttctattccaccgatctgaacga

SEQ ID NO: 107202 - DNA, 25 bp, Saccharomyces pastorianus
aactgacaccaagggcctggttcag

SEQ ID NO: 107203 - DNA, 25 bp, Saccharomyces pastorianus
gcaacaaccacttatttatctcgat

SEQ ID NO: 107204 - DNA, 25 bp, Saccharomyces pastorianus
aacgaagcgcatcctggtgctactg

SEQ ID NO: 107205 - DNA, 25 bp, Saccharomyces pastorianus
aaggtggatctctctcagtccagag

SEQ ID NO: 107206 - DNA, 25 bp, Saccharomyces pastorianus
ggttgtgcctttacataactccatc

SEQ ID NO: 107207 - DNA, 25 bp, Saccharomyces pastorianus
gaaactggatatacccgtcggagaa

SEQ ID NO: 107208 - DNA, 25 bp, Saccharomyces pastorianus
gaggtttcgaccataccaaggacga

SEQ ID NO: 107209 - DNA, 25 bp, Saccharomyces pastorianus
gcacctggccaaaccttttgataga

SEQ ID NO: 107210 - DNA, 25 bp, Saccharomyces pastorianus
tctacaggcatacgaccgccgggct

SEQ ID NO: 107211 - DNA, 25 bp, Saccharomyces pastorianus
ggctacaatgaagggcattcccacc

SEQ ID NO: 107212 - DNA, 25 bp, Saccharomyces pastorianus
aaccaacagaaattcctctctcaga

SEQ ID NO: 107213 - DNA, 25 bp, Saccharomyces pastorianus
tagcgcctgtgttggatcctcaaaa

SEQ ID NO: 107214 - DNA, 25 bp, Saccharomyces pastorianus
agacatgctctctagaacaggctga

SEQ ID NO: 107215 - DNA, 25 bp, Saccharomyces pastorianus
attcccaccgctagcaagacatgct

SEQ ID NO: 107216 - DNA, 25 bp, Saccharomyces pastorianus
aagatcgacgcaatggtggctacaa

SEQ ID NO: 107217 - DNA, 25 bp, Saccharomyces pastorianus
tagaacaggctgaggcggctgcctc

SEQ ID NO: 107218 - DNA, 25 bp, Saccharomyces pastorianus
gggacagacgctatattatgccttc

SEQ ID NO: 107219 - DNA, 25 bp, Saccharomyces pastorianus
aattcctctctcagagatcagacgc

SEQ ID NO: 107220 - DNA, 25 bp, Saccharomyces pastorianus
tatattatgccttcggcggctgcca

SEQ ID NO: 107221 - DNA, 25 bp, Saccharomyces pastorianus
tcatcggtggacattctggtattac

SEQ ID NO: 107222 - DNA, 25 bp, Saccharomyces pastorianus
attcgctaatgctgttttgtccggt

SEQ ID NO: 107223 - DNA, 25 bp, Saccharomyces pastorianus
atgctgccattctggtcatttccaa

SEQ ID NO: 107224 - DNA, 25 bp, Saccharomyces pastorianus
ccaattgtcgcccaagtcttgaaaa

SEQ ID NO: 107225 - DNA, 25 bp, Saccharomyces pastorianus
tagagccgccagattcatctcagaa

SEQ ID NO: 107226 - DNA, 25 bp, Saccharomyces pastorianus
tctgctacgttgtcaatggcccatg

SEQ ID NO: 107227 - DNA, 25 bp, Saccharomyces pastorianus
aaagaacggtgctggctctgctacg

SEQ ID NO: 107228 - DNA, 25 bp, Saccharomyces pastorianus
gcccatgctggtgctaaattcgcta

SEQ ID NO: 107229 - DNA, 25 bp, Saccharomyces pastorianus
gactctcccttgttcaaatccgaag

SEQ ID NO: 107230 - DNA, 25 bp, Saccharomyces pastorianus
aattctttgcatctccggtcacttt

SEQ ID NO: 107231 - DNA, 25 bp, Saccharomyces pastorianus
ggtgtgactaccttggactctatta

SEQ ID NO: 107232 - DNA, 25 bp, Saccharomyces pastorianus
gattatttgcggagtttgccgtcat

SEQ ID NO: 107233 - DNA, 25 bp, Saccharomyces pastorianus
gtttgcagagtatcacgactacaat

SEQ ID NO: 107234 - DNA, 25 bp, Saccharomyces pastorianus
gtaattgccatcaggtttaaatgct

SEQ ID NO: 107235 - DNA, 25 bp, Saccharomyces pastorianus
aagagttaagttctcacccgctaga

SEQ ID NO: 107236 - DNA, 25 bp, Saccharomyces pastorianus
ggctgtaaattgcactaccatttgt

SEQ ID NO: 107237 - DNA, 25 bp, Saccharomyces pastorianus
tgctgtgataagtactatgcgtgct

SEQ ID NO: 107238 - DNA, 25 bp, Saccharomyces pastorianus
tgtccactggcatcttccaaaggat

SEQ ID NO: 107239 - DNA, 25 bp, Saccharomyces pastorianus
ttatttgtcccaattgcagatcccc

SEQ ID NO: 107240 - DNA, 25 bp, Saccharomyces pastorianus
aatatgatctccttgacgatgcaaa

SEQ ID NO: 107241 - DNA, 25 bp, Saccharomyces pastorianus
atgaccaatctcgatgtgtccactg

SEQ ID NO: 107242 - DNA, 25 bp, Saccharomyces pastorianus
tactatgcgtgctttgaatgccacc

SEQ ID NO: 107243 - DNA, 25 bp, Saccharomyces pastorianus
gaactgtttccactggagagccgat

SEQ ID NO: 107244 - DNA, 25 bp, Saccharomyces pastorianus
aagctgccccggtataatgtacacg

SEQ ID NO: 107245 - DNA, 25 bp, Saccharomyces pastorianus
atcgtctcttgccttagtgtggaaa

SEQ ID NO: 107246 - DNA, 25 bp, Saccharomyces pastorianus
gaagttgtcactaatgcagccgctg

SEQ ID NO: 107247 - DNA, 25 bp, Saccharomyces pastorianus
tatagggatgccagacaggtcttat

SEQ ID NO: 107248 - DNA, 25 bp, Saccharomyces pastorianus
gtttgtccttatgcaacgctggtaa

SEQ ID NO: 107249 - DNA, 25 bp, Saccharomyces pastorianus
gtaagcgtttgttttcttcaatcag

SEQ ID NO: 107250 - DNA, 25 bp, Saccharomyces pastorianus
ggtatggtgaccttatcatgctgaa

SEQ ID NO: 107251 - DNA, 25 bp, Saccharomyces pastorianus
gagccgataagcattcatccatcat

SEQ ID NO: 107252 - DNA, 25 bp, Saccharomyces pastorianus
aggtgaacgagcgtcgtttgtcctt

SEQ ID NO: 107253 - DNA, 25 bp, Saccharomyces pastorianus
aatttactgttgaatccgtcaccag

SEQ ID NO: 107254 - DNA, 25 bp, Saccharomyces pastorianus
gctgatgcattctctatttatctgg

SEQ ID NO: 107255 - DNA, 25 bp, Saccharomyces pastorianus
ttttcttttgaaccctggaggatgc

SEQ ID NO: 107256 - DNA, 25 bp, Saccharomyces pastorianus
gaagcaagatccagcattttctttt

SEQ ID NO: 107257 - DNA, 25 bp, Saccharomyces pastorianus
agcattttcttttgaaccctggagg

SEQ ID NO: 107258 - DNA, 25 bp, Saccharomyces pastorianus
gatgcattctctatttatctggtat

SEQ ID NO: 107259 - DNA, 25 bp, Saccharomyces pastorianus
cattttcttttgaaccctggaggat

SEQ ID NO: 107260 - DNA, 25 bp, Saccharomyces pastorianus
gatgctgatgcattctctatttatc

SEQ ID NO: 107261 - DNA, 25 bp, Saccharomyces pastorianus
ggaaaagaagcaagatccagcattt

SEQ ID NO: 107262 - DNA, 25 bp, Saccharomyces pastorianus
cttttgaaccctggaggatgctgat

SEQ ID NO: 107263 - DNA, 25 bp, Saccharomyces pastorianus
ggaggatgctgatgcattctctatt

SEQ ID NO: 107264 - DNA, 25 bp, Saccharomyces pastorianus
gaaccctggaggatgctgatgcatt

SEQ ID NO: 107265 - DNA, 25 bp, Saccharomyces pastorianus
gatgataacgtggttgagcgtcatt

SEQ ID NO: 107266 - DNA, 25 bp, Saccharomyces pastorianus
agcctgatccaagggtcattacact

SEQ ID NO: 107267 - DNA, 25 bp, Saccharomyces pastorianus
gagcgtcattttaagcctgatccaa

SEQ ID NO: 107268 - DNA, 25 bp, Saccharomyces pastorianus
atgtcttgtttgctaattgtggcac

SEQ ID NO: 107269 - DNA, 25 bp, Saccharomyces pastorianus
aaagcttacttagcaggaatgtgga

SEQ ID NO: 107270 - DNA, 25 bp, Saccharomyces pastorianus
tgttggaaccctttttctactacat

SEQ ID NO: 107271 - DNA, 25 bp, Saccharomyces pastorianus
attgtggcacgaacaacttctggaa

SEQ ID NO: 107272 - DNA, 25 bp, Saccharomyces pastorianus
ataatgtggacaatagcgagggcga

SEQ ID NO: 107273 - DNA, 25 bp, Saccharomyces pastorianus
aaatatgtgaagttgctgcaagaca

SEQ ID NO: 107274 - DNA, 25 bp, Saccharomyces pastorianus
tactacattgaagacgtcggcggag

SEQ ID NO: 107275 - DNA, 25 bp, Saccharomyces pastorianus
cgagggcgaggaagaaagcttactt

SEQ ID NO: 107276 - DNA, 25 bp, Saccharomyces pastorianus
gtattctacattatctgctgatgag

SEQ ID NO: 107277 - DNA, 25 bp, Saccharomyces pastorianus
aagaacggattcttgccttctctac

SEQ ID NO: 107278 - DNA, 25 bp, Saccharomyces pastorianus
gtctgtcagcaattatacaagccta

SEQ ID NO: 107279 - DNA, 25 bp, Saccharomyces pastorianus
acctgcccttgtagatgtcttgttt

SEQ ID NO: 107280 - DNA, 25 bp, Saccharomyces pastorianus
tgaattggaatacctacctgccctt

SEQ ID NO: 107281 - DNA, 25 bp, Saccharomyces pastorianus
tatggcaagctcgagaagatattcc

SEQ ID NO: 107282 - DNA, 25 bp, Saccharomyces pastorianus
tgaaaattatctccctctataacga

SEQ ID NO: 107283 - DNA, 25 bp, Saccharomyces pastorianus
gccttctctacaagactccgaaaat

SEQ ID NO: 107284 - DNA, 25 bp, Saccharomyces pastorianus
aaggatgatgccgttagccaagaaa

SEQ ID NO: 107285 - DNA, 25 bp, Saccharomyces pastorianus
agatgaatttgtttgttgcgcagag

SEQ ID NO: 107286 - DNA, 25 bp, Saccharomyces pastorianus
aagggcgcaaaagctgttatggcaa

SEQ ID NO: 107287 - DNA, 25 bp, Saccharomyces pastorianus
ggattacatttcaaagcctgccaaa

SEQ ID NO: 107288 - DNA, 25 bp, Saccharomyces pastorianus
ttaaaatatgccaacccggcgtcga

SEQ ID NO: 107289 - DNA, 25 bp, Saccharomyces pastorianus
ggtacgcaattcaacgatcgcactg

SEQ ID NO: 107290 - DNA, 25 bp, Saccharomyces pastorianus
ggttacccaatctgttcgtgttgaa

SEQ ID NO: 107291 - DNA, 25 bp, Saccharomyces pastorianus
tatcgtttgaagtcgtcactcagga

SEQ ID NO: 107292 - DNA, 25 bp, Saccharomyces pastorianus
tgaaaacttggcttccggagccggt

SEQ ID NO: 107293 - DNA, 25 bp, Saccharomyces pastorianus
acccggcgtcgattacagacttaat

SEQ ID NO: 107294 - DNA, 25 bp, Saccharomyces pastorianus
gttgctcttaaattgtcttgatcca

SEQ ID NO: 107295 - DNA, 25 bp, Saccharomyces pastorianus
aagcctgccaaatctggttacccaa

SEQ ID NO: 107296 - DNA, 25 bp, Saccharomyces pastorianus
gatcgcactgttctgtgtacttata

SEQ ID NO: 107297 - DNA, 25 bp, Saccharomyces pastorianus
gaccttggaggcagcaaaacacgca

SEQ ID NO: 107298 - DNA, 25 bp, Saccharomyces pastorianus
gacagtaatcaactcggctgacgat

SEQ ID NO: 107299 - DNA, 25 bp, Saccharomyces pastorianus
accagcgtatgtgtcgaaggcgtta

SEQ ID NO: 107300 - DNA, 25 bp, Saccharomyces pastorianus
gaagaccttcgtgaacatttatttg

SEQ ID NO: 107301 - DNA, 25 bp, Saccharomyces pastorianus
ttgaaaccgagtttgcggataccat

SEQ ID NO: 107302 - DNA, 25 bp, Saccharomyces pastorianus
gttacttcaggctatagaaacccat

SEQ ID NO: 107303 - DNA, 25 bp, Saccharomyces pastorianus
gaaggcgttatctacatgggaggaa

SEQ ID NO: 107304 - DNA, 25 bp, Saccharomyces pastorianus
acatggattctgcaaaggaaccttt

SEQ ID NO: 107305 - DNA, 25 bp, Saccharomyces pastorianus
aacctatttggcgaagaccttcgtg

SEQ ID NO: 107306 - DNA, 25 bp, Saccharomyces pastorianus
ggaacctttgaactctcaacaattt

SEQ ID NO: 107307 - DNA, 25 bp, Saccharomyces pastorianus
tacatttaagaaacttccgcctaca

SEQ ID NO: 107308 - DNA, 25 bp, Saccharomyces pastorianus
aagaccaccgagtcgaatccaagtt

SEQ ID NO: 107309 - DNA, 25 bp, Saccharomyces pastorianus
gaagccagcgtagatcattttgatc

SEQ ID NO: 107310 - DNA, 25 bp, Saccharomyces pastorianus
ataacgttcgtatcctagatagacg

SEQ ID NO: 107311 - DNA, 25 bp, Saccharomyces pastorianus
aaagtctaatgtcagttcaacgtca

SEQ ID NO: 107312 - DNA, 25 bp, Saccharomyces pastorianus
gaatttgacagttttatggactcta

SEQ ID NO: 107313 - DNA, 25 bp, Saccharomyces pastorianus
atgagatcactttcttcgaaactga

SEQ ID NO: 107314 - DNA, 25 bp, Saccharomyces pastorianus
ggagcacttggacattcgatacctt

SEQ ID NO: 107315 - DNA, 25 bp, Saccharomyces pastorianus
actctatagtgcagtcccaacagac

SEQ ID NO: 107316 - DNA, 25 bp, Saccharomyces pastorianus
aaatacgtgacggatatctgggaaa

SEQ ID NO: 107317 - DNA, 25 bp, Saccharomyces pastorianus
ggacattcgataccttcttatacaa

SEQ ID NO: 107318 - DNA, 25 bp, Saccharomyces pastorianus
tcgattcatcagtcatcagattagc

SEQ ID NO: 107319 - DNA, 25 bp, Saccharomyces pastorianus
gaggttctaacgaatttcactggga

SEQ ID NO: 107320 - DNA, 25 bp, Saccharomyces pastorianus
gctagcaggcaaggtttcttcggat

SEQ ID NO: 107321 - DNA, 25 bp, Saccharomyces pastorianus
tgtgcgcatcacatattccatttgt

SEQ ID NO: 107322 - DNA, 25 bp, Saccharomyces pastorianus
gtggtatttcagagcgtcgattcat

SEQ ID NO: 107323 - DNA, 25 bp, Saccharomyces pastorianus
gaccccgattttggtatgtgcgcat

SEQ ID NO: 107324 - DNA, 25 bp, Saccharomyces pastorianus
gtccatggaactctcaaggtacaaa

SEQ ID NO: 107325 - DNA, 25 bp, Saccharomyces pastorianus
aacatgggattttgccgctgtgcac

SEQ ID NO: 107326 - DNA, 25 bp, Saccharomyces pastorianus
attcatacatttctccggcgtggta

SEQ ID NO: 107327 - DNA, 25 bp, Saccharomyces pastorianus
atccgcgacgataaagactggctta

SEQ ID NO: 107328 - DNA, 25 bp, Saccharomyces pastorianus
gaacactattctcctctaaggctag

SEQ ID NO: 107329 - DNA, 25 bp, Saccharomyces pastorianus
gctgtgcacgtttacggtacaccaa

SEQ ID NO: 107330 - DNA, 25 bp, Saccharomyces pastorianus
ggacccataagttcgtaccaacatg

SEQ ID NO: 107331 - DNA, 25 bp, Saccharomyces pastorianus
aacgcagattgttccagatgtcaac

SEQ ID NO: 107332 - DNA, 25 bp, Saccharomyces pastorianus
gaacagcttctgctttcatacgagg

SEQ ID NO: 107333 - DNA, 25 bp, Saccharomyces pastorianus
gaaaggtcgcttgccaaatgattca

SEQ ID NO: 107334 - DNA, 25 bp, Saccharomyces pastorianus
aaacgcttcgtcattgatctggcat

SEQ ID NO: 107335 - DNA, 25 bp, Saccharomyces pastorianus
cggtcatattgcgtgcgacggtgaa

SEQ ID NO: 107336 - DNA, 25 bp, Saccharomyces pastorianus
attgggctggattttacgttactca

SEQ ID NO: 107337 - DNA, 25 bp, Saccharomyces pastorianus
atcaaccgggtttcatcatgccgat

SEQ ID NO: 107338 - DNA, 25 bp, Saccharomyces pastorianus
tgtcaacaagtatcccggtcatatt

SEQ ID NO: 107339 - DNA, 25 bp, Saccharomyces pastorianus
gaaggattcgaccacgtagacaaag

SEQ ID NO: 107340 - DNA, 25 bp, Saccharomyces pastorianus
aacacactgatattgggcccatttc

SEQ ID NO: 107341 - DNA, 25 bp, Saccharomyces pastorianus
gtttgcggaactgcagcctctacaa

SEQ ID NO: 107342 - DNA, 25 bp, Saccharomyces pastorianus
gatgaagacctgatggtagacctca

SEQ ID NO: 107343 - DNA, 25 bp, Saccharomyces pastorianus
aagaggtcaaatgggctcttttctc

SEQ ID NO: 107344 - DNA, 25 bp, Saccharomyces pastorianus
gtcagttacctttacgaatcaagta

SEQ ID NO: 107345 - DNA, 25 bp, Saccharomyces pastorianus
cattccgtcagttacctttacgaat

SEQ ID NO: 107346 - DNA, 25 bp, Saccharomyces pastorianus
aaagctttaagtcaaactcaggaag

SEQ ID NO: 107347 - DNA, 25 bp, Saccharomyces pastorianus
ctcaacacaggatctttaactcccg

SEQ ID NO: 107348 - DNA, 25 bp, Saccharomyces pastorianus
aggcaaaccattccgtcagttacct

SEQ ID NO: 107349 - DNA, 25 bp, Saccharomyces pastorianus
gaatcaagtacttcaaagaggtcaa

SEQ ID NO: 107350 - DNA, 25 bp, Saccharomyces pastorianus
gatggtagacctcaacacaggatct

SEQ ID NO: 107351 - DNA, 25 bp, Saccharomyces pastorianus
ggtagacctcaacacaggatcttta

SEQ ID NO: 107352 - DNA, 25 bp, Saccharomyces pastorianus
cacaggatctttaactcccgttaag

SEQ ID NO: 107353 - DNA, 25 bp, Saccharomyces pastorianus
gtatcctttatgaagtctggtccca

SEQ ID NO: 107354 - DNA, 25 bp, Saccharomyces pastorianus
actagagcaacattacgcagagcat

SEQ ID NO: 107355 - DNA, 25 bp, Saccharomyces pastorianus
cagaaacgtctgtcacggcagtgat

SEQ ID NO: 107356 - DNA, 25 bp, Saccharomyces pastorianus
aagtctggtcccattttggccacgg

SEQ ID NO: 107357 - DNA, 25 bp, Saccharomyces pastorianus
acgcagagcatgttggtaaaccatt

SEQ ID NO: 107358 - DNA, 25 bp, Saccharomyces pastorianus
tttcggtattgacctaggcagaaac

SEQ ID NO: 107359 - DNA, 25 bp, Saccharomyces pastorianus
ggccagtgcaccaggtaccattaga

SEQ ID NO: 107360 - DNA, 25 bp, Saccharomyces pastorianus
agtatctcaaattctgtctcgtttt

SEQ ID NO: 107361 - DNA, 25 bp, Saccharomyces pastorianus
attcttggtgctactaatcctttgg

SEQ ID NO: 107362 - DNA, 25 bp, Saccharomyces pastorianus
tgctactaatcctttggccagtgca

SEQ ID NO: 107363 - DNA, 25 bp, Saccharomyces pastorianus
cggcagtgattctgttgatagcgct

SEQ ID NO: 107364 - DNA, 25 bp, Saccharomyces pastorianus
tcgggtcatctgctgtaactccaat

SEQ ID NO: 107365 - DNA, 25 bp, Saccharomyces pastorianus
gcaaatttctctggagggcctacaa

SEQ ID NO: 107366 - DNA, 25 bp, Saccharomyces pastorianus
gctgattccaccaaacttcaagagg

SEQ ID NO: 107367 - DNA, 25 bp, Saccharomyces pastorianus
attgtacttttctatctgcatccca

SEQ ID NO: 107368 - DNA, 25 bp, Saccharomyces pastorianus
tatttccgggttcatattgtacttt

SEQ ID NO: 107369 - DNA, 25 bp, Saccharomyces pastorianus
acaacagtggctcaatcgggtcatc

SEQ ID NO: 107370 - DNA, 25 bp, Saccharomyces pastorianus
gaacaaaccttcctcaaacagcaag

SEQ ID NO: 107371 - DNA, 25 bp, Saccharomyces pastorianus
attatttttattgctcaccgttgag

SEQ ID NO: 107372 - DNA, 25 bp, Saccharomyces pastorianus
gttggcctgttgtttattgattcat

SEQ ID NO: 107373 - DNA, 25 bp, Saccharomyces pastorianus
aaaggtctcaaatccgtgtttcatt

SEQ ID NO: 107374 - DNA, 25 bp, Saccharomyces pastorianus
tataacgggttgtcttgttggcctg

SEQ ID NO: 107375 - DNA, 25 bp, Saccharomyces pastorianus
aaagacgtcctactctagtgcaaaa

SEQ ID NO: 107376 - DNA, 25 bp, Saccharomyces pastorianus
ggacaatacagggattcgttgacat

SEQ ID NO: 107377 - DNA, 25 bp, Saccharomyces pastorianus
tgtaaccatggtctcatcgctaaac

SEQ ID NO: 107378 - DNA, 25 bp, Saccharomyces pastorianus
gatgcatttccgttcgatgtctatt

SEQ ID NO: 107379 - DNA, 25 bp, Saccharomyces pastorianus
ccatactgggtactattgttctgcc

SEQ ID NO: 107380 - DNA, 25 bp, Saccharomyces pastorianus
tgccaatgaatgtgattacgggtct

SEQ ID NO: 107381 - DNA, 25 bp, Saccharomyces pastorianus
gagcacttctgaagcgtcattcaat

SEQ ID NO: 107382 - DNA, 25 bp, Saccharomyces pastorianus
gtgtatgctagcatgttctgcatat

SEQ ID NO: 107383 - DNA, 25 bp, Saccharomyces pastorianus
aagattgctaggatccaaggctgat

SEQ ID NO: 107384 - DNA, 25 bp, Saccharomyces pastorianus
gaatgttatcgtgcccggacaatac

SEQ ID NO: 107385 - DNA, 25 bp, Saccharomyces pastorianus
ggcgctagcgatgaggatgcatttc

SEQ ID NO: 107386 - DNA, 25 bp, Saccharomyces pastorianus
gcaacgacaacaagctaaagtacct

SEQ ID NO: 107387 - DNA, 25 bp, Saccharomyces pastorianus
taaaagttgcctattctgatctgaa

SEQ ID NO: 107388 - DNA, 25 bp, Saccharomyces pastorianus
gaaaccgagatcaagctagaaagcc

SEQ ID NO: 107389 - DNA, 25 bp, Saccharomyces pastorianus
ggcggtgtagctgatgcgactaaca

SEQ ID NO: 107390 - DNA, 25 bp, Saccharomyces pastorianus
taccaatattgcagccggcggtgta

SEQ ID NO: 107391 - DNA, 25 bp, Saccharomyces pastorianus
cggttatctgactacccctatgaaa

SEQ ID NO: 107392 - DNA, 25 bp, Saccharomyces pastorianus
tcttctgatgtttctgcaagtgcaa

SEQ ID NO: 107393 - DNA, 25 bp, Saccharomyces pastorianus
aagccattcttctgatgtttctgca

SEQ ID NO: 107394 - DNA, 25 bp, Saccharomyces pastorianus
aagtgcaagcgatcataccaatatt

SEQ ID NO: 107395 - DNA, 25 bp, Saccharomyces pastorianus
gatcttttacctcgttataaaacag

SEQ ID NO: 107396 - DNA, 25 bp, Saccharomyces pastorianus
gttatgtggcgtttatttcgttata

SEQ ID NO: 107397 - DNA, 25 bp, Saccharomyces pastorianus
atggtaaggttcctgtccaacctcg

SEQ ID NO: 107398 - DNA, 25 bp, Saccharomyces pastorianus
ggaacgcccttttgcttgtatgttc

SEQ ID NO: 107399 - DNA, 25 bp, Saccharomyces pastorianus
ggcattcagacgcagtgagcacttg

SEQ ID NO: 107400 - DNA, 25 bp, Saccharomyces pastorianus
aattggcgacttctggtgttgataa

SEQ ID NO: 107401 - DNA, 25 bp, Saccharomyces pastorianus
tgttgtcggataatgcctctgctgc

SEQ ID NO: 107402 - DNA, 25 bp, Saccharomyces pastorianus
caaaccctctatgatgttgtcggat

SEQ ID NO: 107403 - DNA, 25 bp, Saccharomyces pastorianus
ttcaacattctcaagtcatctccgg

SEQ ID NO: 107404 - DNA, 25 bp, Saccharomyces pastorianus
atctccggctcaggatcaacagttt

SEQ ID NO: 107405 - DNA, 25 bp, Saccharomyces pastorianus
aaatctattactaccattgacccca

SEQ ID NO: 107406 - DNA, 25 bp, Saccharomyces pastorianus
ttcgacaataacgtagaccccttca

SEQ ID NO: 107407 - DNA, 25 bp, Saccharomyces pastorianus
tgataatatcacacctacaccagct

SEQ ID NO: 107408 - DNA, 25 bp, Saccharomyces pastorianus
ttaagagccgaaattgacatgaagt

SEQ ID NO: 107409 - DNA, 25 bp, Saccharomyces pastorianus
atgatgttgaacttgatgatgtgga

SEQ ID NO: 107410 - DNA, 25 bp, Saccharomyces pastorianus
aagttttgacctggattgcgcgcaa

SEQ ID NO: 107411 - DNA, 25 bp, Saccharomyces pastorianus
ttttcaccagtaaatcaaggagcaa

SEQ ID NO: 107412 - DNA, 25 bp, Saccharomyces pastorianus
attctttgcaggaaagttttgacct

SEQ ID NO: 107413 - DNA, 25 bp, Saccharomyces pastorianus
agactttacaaagaactcgaagagt

SEQ ID NO: 107414 - DNA, 25 bp, Saccharomyces pastorianus
aactcgaagagttccagaatgaaat

SEQ ID NO: 107415 - DNA, 25 bp, Saccharomyces pastorianus
gaaattggtgaattctttgcaggaa

SEQ ID NO: 107416 - DNA, 25 bp, Saccharomyces pastorianus
gcaaagtgtatcacttttcaccagt

SEQ ID NO: 107417 - DNA, 25 bp, Saccharomyces pastorianus
caaattgtactatgatgtcgagaaa

SEQ ID NO: 107418 - DNA, 25 bp, Saccharomyces pastorianus
ggattgcgcgcaaagtgtatcactt

SEQ ID NO: 107419 - DNA, 25 bp, Saccharomyces pastorianus
gaagaaaacatctctacttgtgtca

SEQ ID NO: 107420 - DNA, 25 bp, Saccharomyces pastorianus
aacgctgacaaggaagacttgtaca

SEQ ID NO: 107421 - DNA, 25 bp, Saccharomyces pastorianus
aaaacatctctacttgtgtcaagta

SEQ ID NO: 107422 - DNA, 25 bp, Saccharomyces pastorianus
aaaagaccatgggtgctaagatcac

SEQ ID NO: 107423 - DNA, 25 bp, Saccharomyces pastorianus
gttgcaaggaagaaaagccattgtt

SEQ ID NO: 107424 - DNA, 25 bp, Saccharomyces pastorianus
accaaaagtacaccagagaacaaat

SEQ ID NO: 107425 - DNA, 25 bp, Saccharomyces pastorianus
aagaaaagccattgttcttggtctt

SEQ ID NO: 107426 - DNA, 25 bp, Saccharomyces pastorianus
agagaatggccgctatggaccaatg

SEQ ID NO: 107427 - DNA, 25 bp, Saccharomyces pastorianus
ccagagaacaaattggttgcaagga

SEQ ID NO: 107428 - DNA, 25 bp, Saccharomyces pastorianus
catgggtgctaagatcaccaagtct

SEQ ID NO: 107429 - DNA, 25 bp, Saccharomyces pastorianus
agaatggccgctatggaccaatggt

SEQ ID NO: 107430 - DNA, 25 bp, Saccharomyces pastorianus
actgactgtcaatacgcttacttga

SEQ ID NO: 107431 - DNA, 25 bp, Saccharomyces pastorianus
actacataatgtccccagtcggtaa

SEQ ID NO: 107432 - DNA, 25 bp, Saccharomyces pastorianus
tacaccaagccagaacaagtttaca

SEQ ID NO: 107433 - DNA, 25 bp, Saccharomyces pastorianus
caagtttacaacgtctacaaggctt

SEQ ID NO: 107434 - DNA, 25 bp, Saccharomyces pastorianus
attccacactggtattgacaacggt

SEQ ID NO: 107435 - DNA, 25 bp, Saccharomyces pastorianus
ttgctgctgctttcggtaactgtca

SEQ ID NO: 107436 - DNA, 25 bp, Saccharomyces pastorianus
aatctctccaaacttctccattgct

SEQ ID NO: 107437 - DNA, 25 bp, Saccharomyces pastorianus
acaacggtgttgtcaaggtcaactt

SEQ ID NO: 107438 - DNA, 25 bp, Saccharomyces pastorianus
taactgtcacggtttgtacgctggt

SEQ ID NO: 107439 - DNA, 25 bp, Saccharomyces pastorianus
aggtcaacttggacactgactgtca

SEQ ID NO: 107440 - DNA, 25 bp, Saccharomyces pastorianus
tacgctggtgacatcgctttgagac

SEQ ID NO: 107441 - DNA, 25 bp, Saccharomyces pastorianus
agagagcgactttgtatgccccaat

SEQ ID NO: 107442 - DNA, 25 bp, Saccharomyces pastorianus
aaataacggcggtacgccagtgcca

SEQ ID NO: 107443 - DNA, 25 bp, Saccharomyces pastorianus
ggcaccgctggcttgaacaacaata

SEQ ID NO: 107444 - DNA, 25 bp, Saccharomyces pastorianus
aaggccatttcaaagatcttcctga

SEQ ID NO: 107445 - DNA, 25 bp, Saccharomyces pastorianus
gtggtcttttgaggcagccggtaaa

SEQ ID NO: 107446 - DNA, 25 bp, Saccharomyces pastorianus
gcgatatccttctcgattctttagt

SEQ ID NO: 107447 - DNA, 25 bp, Saccharomyces pastorianus
gattctttagtacccgaccaggaca

SEQ ID NO: 107448 - DNA, 25 bp, Saccharomyces pastorianus
ggaactacacggaagctctaaagat

SEQ ID NO: 107449 - DNA, 25 bp, Saccharomyces pastorianus
ttgatggatccaactggcaccgctg

SEQ ID NO: 107450 - DNA, 25 bp, Saccharomyces pastorianus
aatgtcccttgacaggtggtctttt

SEQ ID NO: 107451 - DNA, 25 bp, Saccharomyces pastorianus
ataccagccttccaacttctgtaaa

SEQ ID NO: 107452 - DNA, 25 bp, Saccharomyces pastorianus
gacaatacccaatctaaattgactg

SEQ ID NO: 107453 - DNA, 25 bp, Saccharomyces pastorianus
aattgactgtgaaaggaaacctgga

SEQ ID NO: 107454 - DNA, 25 bp, Saccharomyces pastorianus
gagatagccaaagtgtaatttcggt

SEQ ID NO: 107455 - DNA, 25 bp, Saccharomyces pastorianus
gcgtcgttagctatgcgtgttttag

SEQ ID NO: 107456 - DNA, 25 bp, Saccharomyces pastorianus
catttgacaaagtggtggctgagac

SEQ ID NO: 107457 - DNA, 25 bp, Saccharomyces pastorianus
tactgttgaggacagccaccgcgac

SEQ ID NO: 107458 - DNA, 25 bp, Saccharomyces pastorianus
ggaaacctggacacatatggatttt

SEQ ID NO: 107459 - DNA, 25 bp, Saccharomyces pastorianus
gtggtggctgagactttaaaagaca

SEQ ID NO: 107460 - DNA, 25 bp, Saccharomyces pastorianus
gcgtgttttagagacatttgacaaa

SEQ ID NO: 107461 - DNA, 25 bp, Saccharomyces pastorianus
ggacacatatggattttgcgatgat

SEQ ID NO: 107462 - DNA, 25 bp, Saccharomyces pastorianus
atgggagaatagaagcgtcgttagc

SEQ ID NO: 107463 - DNA, 25 bp, Saccharomyces pastorianus
ttcagattgaagaaccgcaagactt

SEQ ID NO: 107464 - DNA, 25 bp, Saccharomyces pastorianus
attgggtcacgagtgtctttccgac

SEQ ID NO: 107465 - DNA, 25 bp, Saccharomyces pastorianus
acttctgcgcttgtgtaacgcacat

SEQ ID NO: 107466 - DNA, 25 bp, Saccharomyces pastorianus
tctagctttgatagtgcatacgatc

SEQ ID NO: 107467 - DNA, 25 bp, Saccharomyces pastorianus
caagctgatcttgatgttattcgaa

SEQ ID NO: 107468 - DNA, 25 bp, Saccharomyces pastorianus
tattctgtcacaaaatctacggagt

SEQ ID NO: 107469 - DNA, 25 bp, Saccharomyces pastorianus
gggctgctgcagaagtactgtacca

SEQ ID NO: 107470 - DNA, 25 bp, Saccharomyces pastorianus
ggcgagctatatcttcgtacagtag

SEQ ID NO: 107471 - DNA, 25 bp, Saccharomyces pastorianus
ggtcatcaacgttttatctagcttt

SEQ ID NO: 107472 - DNA, 25 bp, Saccharomyces pastorianus
agattttttcagcacacttctgcgc

SEQ ID NO: 107473 - DNA, 25 bp, Saccharomyces pastorianus
gcacattcagacaatggcgagctat

SEQ ID NO: 107474 - DNA, 25 bp, Saccharomyces pastorianus
aaggtggtgacgatgatgttgaaga

SEQ ID NO: 107475 - DNA, 25 bp, Saccharomyces pastorianus
gacgctaagttagttgatgacgtta

SEQ ID NO: 107476 - DNA, 25 bp, Saccharomyces pastorianus
cgctaagttagttgatgacgttatc

SEQ ID NO: 107477 - DNA, 25 bp, Saccharomyces pastorianus
tgatgcttacgacgctaagttagtt

SEQ ID NO: 107478 - DNA, 25 bp, Saccharomyces pastorianus
gcttacgacgctaagttagttgatg

SEQ ID NO: 107479 - DNA, 25 bp, Saccharomyces pastorianus
tctacaacaaaccgcttttgacaag

SEQ ID NO: 107480 - DNA, 25 bp, Saccharomyces pastorianus
tatggtcaatgtcggaggtgacaac

SEQ ID NO: 107481 - DNA, 25 bp, Saccharomyces pastorianus
taagttagttgatgacgttatctac

SEQ ID NO: 107482 - DNA, 25 bp, Saccharomyces pastorianus
tcaatgtcggaggtgacaacatcga

SEQ ID NO: 107483 - DNA, 25 bp, Saccharomyces pastorianus
ttcctaaattcgaaaagggtgctca

SEQ ID NO: 107484 - DNA, 25 bp, Saccharomyces pastorianus
atgcttacgacgctaagttagttga

SEQ ID NO: 107485 - DNA, 25 bp, Saccharomyces pastorianus
gtgaatccatggacccagatgccat

SEQ ID NO: 107486 - DNA, 25 bp, Saccharomyces pastorianus
atatcggtgctaacccatctgctga

SEQ ID NO: 107487 - DNA, 25 bp, Saccharomyces pastorianus
gaagtccttcttgacctacattaag

SEQ ID NO: 107488 - DNA, 25 bp, Saccharomyces pastorianus
tcttcactggtgaatccatggaccc

SEQ ID NO: 107489 - DNA, 25 bp, Saccharomyces pastorianus
tggtcaacaacgttgtccactcttt

SEQ ID NO: 107490 - DNA, 25 bp, Saccharomyces pastorianus
aattgttgtctgatgcttacgacgc

SEQ ID NO: 107491 - DNA, 25 bp, Saccharomyces pastorianus
gaaggtgctgaaatggtcaacaacg

SEQ ID NO: 107492 - DNA, 25 bp, Saccharomyces pastorianus
gtcatgttgaactaccgtgaagatg

SEQ ID NO: 107493 - DNA, 25 bp, Saccharomyces pastorianus
acatcgatatcggtgctaacccatc

SEQ ID NO: 107494 - DNA, 25 bp, Saccharomyces pastorianus
ggttattggttctttcaaggactgg

SEQ ID NO: 107495 - DNA, 25 bp, Saccharomyces pastorianus
aaggatatcttctctaacgacgaat

SEQ ID NO: 107496 - DNA, 25 bp, Saccharomyces pastorianus
aatggcctcactggcttgactatga

SEQ ID NO: 107497 - DNA, 25 bp, Saccharomyces pastorianus
aatattccacattgttcgacccatg

SEQ ID NO: 107498 - DNA, 25 bp, Saccharomyces pastorianus
gtgtaagaaccactgcatctcaaat

SEQ ID NO: 107499 - DNA, 25 bp, Saccharomyces pastorianus
ggtacaagcgcacccgctgaaatag

SEQ ID NO: 107500 - DNA, 25 bp, Saccharomyces pastorianus
taactgcgcaggcttgactcaagaa

SEQ ID NO: 107501 - DNA, 25 bp, Saccharomyces pastorianus
gttaactttatgagccctgtgacga

SEQ ID NO: 107502 - DNA, 25 bp, Saccharomyces pastorianus
atcgtaaatatttcctccatcctac

SEQ ID NO: 107503 - DNA, 25 bp, Saccharomyces pastorianus
gaacgccgctactacgtaaacttat

SEQ ID NO: 107504 - DNA, 25 bp, Saccharomyces pastorianus
gccggaactcggtggtcaatctgct

SEQ ID NO: 107505 - DNA, 25 bp, Saccharomyces pastorianus
aaggtgttttacgatatctccaggt

SEQ ID NO: 107506 - DNA, 25 bp, Saccharomyces pastorianus
taaagccgcactgtccagatttaca

SEQ ID NO: 107507 - DNA, 25 bp, Saccharomyces pastorianus
aatacggtgtagctggtcaatatcc

SEQ ID NO: 107508 - DNA, 25 bp, Saccharomyces pastorianus
tgcaaaatggccaacctgttaaccc

SEQ ID NO: 107509 - DNA, 25 bp, Saccharomyces pastorianus
gaacactgctgctgctaatttgact

SEQ ID NO: 107510 - DNA, 25 bp, Saccharomyces pastorianus
gtcaaccccaacctgaagttcaaat

SEQ ID NO: 107511 - DNA, 25 bp, Saccharomyces pastorianus
ttgcccagcattctgaagactctca

SEQ ID NO: 107512 - DNA, 25 bp, Saccharomyces pastorianus
acttttaccaacagtcattcccata

SEQ ID NO: 107513 - DNA, 25 bp, Saccharomyces pastorianus
tgctgcccaacaaggtgtaccatat

SEQ ID NO: 107514 - DNA, 25 bp, Saccharomyces pastorianus
ttatggtcaagcaggcgcgaacact

SEQ ID NO: 107515 - DNA, 25 bp, Saccharomyces pastorianus
gtccaaatcaaggtgttgcccagca

SEQ ID NO: 107516 - DNA, 25 bp, Saccharomyces pastorianus
gtcattcccatatggtcaacctcaa

SEQ ID NO: 107517 - DNA, 25 bp, Saccharomyces pastorianus
tacggtggctcattcatgccatact

SEQ ID NO: 107518 - DNA, 25 bp, Saccharomyces pastorianus
atgtgtcaacgcagctctcgtcaag

SEQ ID NO: 107519 - DNA, 25 bp, Saccharomyces pastorianus
gcaaggtattaagcctgctctagac

SEQ ID NO: 107520 - DNA, 25 bp, Saccharomyces pastorianus
atggtacgcttatactacatgtgtc

SEQ ID NO: 107521 - DNA, 25 bp, Saccharomyces pastorianus
tgcactgacctgaagacgaaatacg

SEQ ID NO: 107522 - DNA, 25 bp, Saccharomyces pastorianus
gcgcctgaatgcactgacctgaaga

SEQ ID NO: 107523 - DNA, 25 bp, Saccharomyces pastorianus
agcctgctctagacgaagctaggga

SEQ ID NO: 107524 - DNA, 25 bp, Saccharomyces pastorianus
aacgagtgctcaaaacaatggtacg

SEQ ID NO: 107525 - DNA, 25 bp, Saccharomyces pastorianus
tataatgtcagctagttttgcgcct

SEQ ID NO: 107526 - DNA, 25 bp, Saccharomyces pastorianus
tagttttgcgcctgaatgcactgac

SEQ ID NO: 107527 - DNA, 25 bp, Saccharomyces pastorianus
tactacatgtgtcaacgcagctctc

SEQ ID NO: 107528 - DNA, 25 bp, Saccharomyces pastorianus
aaaatccgttgagaacgagtgctca

SEQ ID NO: 107529 - DNA, 25 bp, Saccharomyces pastorianus
gtcgttatcgccgtcgttattaata

SEQ ID NO: 107530 - DNA, 25 bp, Saccharomyces pastorianus
ttggtacttctttcgtactctcttc

SEQ ID NO: 107531 - DNA, 25 bp, Saccharomyces pastorianus
tggctctccctttatcgaagaaaaa

SEQ ID NO: 107532 - DNA, 25 bp, Saccharomyces pastorianus
tatgttcttcatgagccagttgctt

SEQ ID NO: 107533 - DNA, 25 bp, Saccharomyces pastorianus
caatcggagacggtaccatgctgga

SEQ ID NO: 107534 - DNA, 25 bp, Saccharomyces pastorianus
ttaccctgcgttctgatattcatca

SEQ ID NO: 107535 - DNA, 25 bp, Saccharomyces pastorianus
attattgctgttctcatcgtcgtta

SEQ ID NO: 107536 - DNA, 25 bp, Saccharomyces pastorianus
gaggcgagctctctatattattgct

SEQ ID NO: 107537 - DNA, 25 bp, Saccharomyces pastorianus
gcttccgcattttattgggcacaat

SEQ ID NO: 107538 - DNA, 25 bp, Saccharomyces pastorianus
tcatcgggcccttcgttgttatcat

SEQ ID NO: 107539 - DNA, 25 bp, Saccharomyces pastorianus
aatgatggtcccaggctttggtact

SEQ ID NO: 107540 - DNA, 25 bp, Saccharomyces pastorianus
atatagagagctcgcctctgaagca

SEQ ID NO: 107541 - DNA, 25 bp, Saccharomyces pastorianus
gggagcaaacagaccttacaggcga

SEQ ID NO: 107542 - DNA, 25 bp, Saccharomyces pastorianus
agatactggctcagaggcggtgcct

SEQ ID NO: 107543 - DNA, 25 bp, Saccharomyces pastorianus
gtcaaccgggatgtccattctatgt

SEQ ID NO: 107544 - DNA, 25 bp, Saccharomyces pastorianus
agcagtacgggtctagttccagcat

SEQ ID NO: 107545 - DNA, 25 bp, Saccharomyces pastorianus
agcttcagctgtacatgtcaaccgg

SEQ ID NO: 107546 - DNA, 25 bp, Saccharomyces pastorianus
gaaacttccggactctagcgacgaa

SEQ ID NO: 107547 - DNA, 25 bp, Saccharomyces pastorianus
agcatggtaccgtctccgattgtgc

SEQ ID NO: 107548 - DNA, 25 bp, Saccharomyces pastorianus
gatttcgctacttttgcagcagcag

SEQ ID NO: 107549 - DNA, 25 bp, Saccharomyces pastorianus
agtatagatgatttccacacagcga

SEQ ID NO: 107550 - DNA, 25 bp, Saccharomyces pastorianus
tggtatatttcctacatccgctgaa

SEQ ID NO: 107551 - DNA, 25 bp, Saccharomyces pastorianus
tcgaaaataccaacgttccacggat

SEQ ID NO: 107552 - DNA, 25 bp, Saccharomyces pastorianus
cagtcaatggcgattatggcgttac

SEQ ID NO: 107553 - DNA, 25 bp, Saccharomyces pastorianus
aagagcgacaaagaacctgtttcca

SEQ ID NO: 107554 - DNA, 25 bp, Saccharomyces pastorianus
gcaagcgaagcgtatctggtaggat

SEQ ID NO: 107555 - DNA, 25 bp, Saccharomyces pastorianus
actcctagtgaattagctctgtacg

SEQ ID NO: 107556 - DNA, 25 bp, Saccharomyces pastorianus
ggaacatacaaacctcttggcgctg

SEQ ID NO: 107557 - DNA, 25 bp, Saccharomyces pastorianus
atcaggatttacgttggcagtcaat

SEQ ID NO: 107558 - DNA, 25 bp, Saccharomyces pastorianus
aacctcttggcgctgcatgcaaaaa

SEQ ID NO: 107559 - DNA, 25 bp, Saccharomyces pastorianus
gatcgtgcgttatcgttattgcaga

SEQ ID NO: 107560 - DNA, 25 bp, Saccharomyces pastorianus
actgaagtacctgcaccagtgcgaa

SEQ ID NO: 107561 - DNA, 25 bp, Saccharomyces pastorianus
gaactcattcatatgccttagacag

SEQ ID NO: 107562 - DNA, 25 bp, Saccharomyces pastorianus
tttcgactacggtccttagatcttc

SEQ ID NO: 107563 - DNA, 25 bp, Saccharomyces pastorianus
gaaagcttacctaatttgactgtga

SEQ ID NO: 107564 - DNA, 25 bp, Saccharomyces pastorianus
gtcatcctctcattcgtcattgaaa

SEQ ID NO: 107565 - DNA, 25 bp, Saccharomyces pastorianus
ggactgttggaaagcgcacggttaa

SEQ ID NO: 107566 - DNA, 25 bp, Saccharomyces pastorianus
aaccgagttccccactaatggatag

SEQ ID NO: 107567 - DNA, 25 bp, Saccharomyces pastorianus
gacagaagcgagtcatcctctcatt

SEQ ID NO: 107568 - DNA, 25 bp, Saccharomyces pastorianus
gacaaggtattggtatctgcaacta

SEQ ID NO: 107569 - DNA, 25 bp, Saccharomyces pastorianus
gaaaatcccaacacctatcaaagcc

SEQ ID NO: 107570 - DNA, 25 bp, Saccharomyces pastorianus
ttagatcttcgccagactcgagcga

SEQ ID NO: 107571 - DNA, 25 bp, Saccharomyces pastorianus
gaacccatattaattgctcacagga

SEQ ID NO: 107572 - DNA, 25 bp, Saccharomyces pastorianus
agccattcaggttacggatttctta

SEQ ID NO: 107573 - DNA, 25 bp, Saccharomyces pastorianus
atttagttcgctattttcaccgcag

SEQ ID NO: 107574 - DNA, 25 bp, Saccharomyces pastorianus
tcaagattccgaggcacgtttctgg

SEQ ID NO: 107575 - DNA, 25 bp, Saccharomyces pastorianus
gaggatgcctctacaaatgcgacat

SEQ ID NO: 107576 - DNA, 25 bp, Saccharomyces pastorianus
gaggtgacagaacccatatcatggc

SEQ ID NO: 107577 - DNA, 25 bp, Saccharomyces pastorianus
aaacaaagcaactcctcttgactta

SEQ ID NO: 107578 - DNA, 25 bp, Saccharomyces pastorianus
ttttcttttaactactgcaggctat

SEQ ID NO: 107579 - DNA, 25 bp, Saccharomyces pastorianus
gatatcgcccttaaatggttccaaa

SEQ ID NO: 107580 - DNA, 25 bp, Saccharomyces pastorianus
gtcaaacttacttcgagctcaacta

SEQ ID NO: 107581 - DNA, 25 bp, Saccharomyces pastorianus
tagcgccatatcaccttgcaaagaa

SEQ ID NO: 107582 - DNA, 25 bp, Saccharomyces pastorianus
tgcaggctatctggtagcgccatat

SEQ ID NO: 107583 - DNA, 25 bp, Saccharomyces pastorianus
agtggaaattcttaccgcatctggt

SEQ ID NO: 107584 - DNA, 25 bp, Saccharomyces pastorianus
aactttacgggatcagacctctggc

SEQ ID NO: 107585 - DNA, 25 bp, Saccharomyces pastorianus
atgtccgccttagaagtaatggtca

SEQ ID NO: 107586 - DNA, 25 bp, Saccharomyces pastorianus
gtactaaagcgcaacccacaaattt

SEQ ID NO: 107587 - DNA, 25 bp, Saccharomyces pastorianus
gatggtatcgtgtatgaagctgctt

SEQ ID NO: 107588 - DNA, 25 bp, Saccharomyces pastorianus
tctgcctacctttacaactttacgg

SEQ ID NO: 107589 - DNA, 25 bp, Saccharomyces pastorianus
gagggccttagataaacccgcacca

SEQ ID NO: 107590 - DNA, 25 bp, Saccharomyces pastorianus
atcaaggttttctgttggctggctc

SEQ ID NO: 107591 - DNA, 25 bp, Saccharomyces pastorianus
ttccttcaaagcctattttgcccgt

SEQ ID NO: 107592 - DNA, 25 bp, Saccharomyces pastorianus
gaatggtggttcatctgttggtgat

SEQ ID NO: 107593 - DNA, 25 bp, Saccharomyces pastorianus
attgcggccgcgaaatcatgttctg

SEQ ID NO: 107594 - DNA, 25 bp, Saccharomyces pastorianus
ggttgaatacatctgccattgcggc

SEQ ID NO: 107595 - DNA, 25 bp, Saccharomyces pastorianus
gttacacctggtgccatcactattg

SEQ ID NO: 107596 - DNA, 25 bp, Saccharomyces pastorianus
acgcgcttcctcttttgtttgggct

SEQ ID NO: 107597 - DNA, 25 bp, Saccharomyces pastorianus
tccggcgcttgcaaagtccaaagtt

SEQ ID NO: 107598 - DNA, 25 bp, Saccharomyces pastorianus
ttgttctcacacagatccctgtaca

SEQ ID NO: 107599 - DNA, 25 bp, Saccharomyces pastorianus
tgtacagcgtcttgtaacctgatcc

SEQ ID NO: 107600 - DNA, 25 bp, Saccharomyces pastorianus
actattgccattgccattgctacag

SEQ ID NO: 107601 - DNA, 25 bp, Saccharomyces pastorianus
tgctacagattcaattccggcgctt

SEQ ID NO: 107602 - DNA, 25 bp, Saccharomyces pastorianus
tttctttctcctacttttggcatac

SEQ ID NO: 107603 - DNA, 25 bp, Saccharomyces pastorianus
agcaccttcttctttcacagctaaa

SEQ ID NO: 107604 - DNA, 25 bp, Saccharomyces pastorianus
aagttctggtgtcggtttgttctca

SEQ ID NO: 107605 - DNA, 25 bp, Saccharomyces pastorianus
agaagtccttattacgcacgttgct

SEQ ID NO: 107606 - DNA, 25 bp, Saccharomyces pastorianus
aacttcaatctcatggtacctgctg

SEQ ID NO: 107607 - DNA, 25 bp, Saccharomyces pastorianus
gggatcaggttacaagacgctgtac

SEQ ID NO: 107608 - DNA, 25 bp, Saccharomyces pastorianus
tggtacctgctggaagaactttgtt

SEQ ID NO: 107609 - DNA, 25 bp, Saccharomyces pastorianus
tgaatctccaactcctaaaaccgta

SEQ ID NO: 107610 - DNA, 25 bp, Saccharomyces pastorianus
gccttttaacgttgctgatgtggaa

SEQ ID NO: 107611 - DNA, 25 bp, Saccharomyces pastorianus
ttatgttatgatacacttgctgtgg

SEQ ID NO: 107612 - DNA, 25 bp, Saccharomyces pastorianus
aaacaaaagaggaagcgcgtcaggc

SEQ ID NO: 107613 - DNA, 25 bp, Saccharomyces pastorianus
agacgctgtacagggatctgtgtga

SEQ ID NO: 107614 - DNA, 25 bp, Saccharomyces pastorianus
gttttggtgtgcttcttagtggaca

SEQ ID NO: 107615 - DNA, 25 bp, Saccharomyces pastorianus
tgagaacaaaccgacaccagaactt

SEQ ID NO: 107616 - DNA, 25 bp, Saccharomyces pastorianus
ggactaggccttttaacgttgctga

SEQ ID NO: 107617 - DNA, 25 bp, Saccharomyces pastorianus
gggtactgtcatcatcgtttgctcc

SEQ ID NO: 107618 - DNA, 25 bp, Saccharomyces pastorianus
tgttccgatttgttgctggttaaat

SEQ ID NO: 107619 - DNA, 25 bp, Saccharomyces pastorianus
tggttaaatcagatctattccgtct

SEQ ID NO: 107620 - DNA, 25 bp, Saccharomyces pastorianus
tattccgtctggaacacggttcttt

SEQ ID NO: 107621 - DNA, 25 bp, Saccharomyces pastorianus
ggcattttgatagtgctcacggtgt

SEQ ID NO: 107622 - DNA, 25 bp, Saccharomyces pastorianus
tgaagttagacccatcccgttttgg

SEQ ID NO: 107623 - DNA, 25 bp, Saccharomyces pastorianus
gtggtgctgctatcaggcattttga

SEQ ID NO: 107624 - DNA, 25 bp, Saccharomyces pastorianus
taaaatcgatattccaaacggctcc

SEQ ID NO: 107625 - DNA, 25 bp, Saccharomyces pastorianus
gagctagatcatttgaccatcactg

SEQ ID NO: 107626 - DNA, 25 bp, Saccharomyces pastorianus
accatcactggtaacgtctttttag

SEQ ID NO: 107627 - DNA, 25 bp, Saccharomyces pastorianus
atcgtttgctccgacggtcataaaa

SEQ ID NO: 107628 - DNA, 25 bp, Saccharomyces pastorianus
gaagccgttcctgccgatttaatga

SEQ ID NO: 107629 - DNA, 25 bp, Saccharomyces pastorianus
tagaccaatcattttcccattatcc

SEQ ID NO: 107630 - DNA, 25 bp, Saccharomyces pastorianus
aaacccacgtgtttggttggctgct

SEQ ID NO: 107631 - DNA, 25 bp, Saccharomyces pastorianus
gggaaccgcccgtatcgagcaagaa

SEQ ID NO: 107632 - DNA, 25 bp, Saccharomyces pastorianus
ttaggtgccgtactatcgcgtgcca

SEQ ID NO: 107633 - DNA, 25 bp, Saccharomyces pastorianus
aacaacgctcttgtagctaccggat

SEQ ID NO: 107634 - DNA, 25 bp, Saccharomyces pastorianus
agacaagatgatctccgctgcagtg

SEQ ID NO: 107635 - DNA, 25 bp, Saccharomyces pastorianus
caacaattgttactctttcccaggt

SEQ ID NO: 107636 - DNA, 25 bp, Saccharomyces pastorianus
tagctaccgctgtgatcttgcaagc

SEQ ID NO: 107637 - DNA, 25 bp, Saccharomyces pastorianus
ggcgaaactgtcaaggttcctcgtg

SEQ ID NO: 107638 - DNA, 25 bp, Saccharomyces pastorianus
acaagcaggcgcatttactcaagat

SEQ ID NO: 107639 - DNA, 25 bp, Saccharomyces pastorianus
tactagagctgcaaagtcaacccac

SEQ ID NO: 107640 - DNA, 25 bp, Saccharomyces pastorianus
tacgttaagcaatataagccggtca

SEQ ID NO: 107641 - DNA, 25 bp, Saccharomyces pastorianus
gtcaacccaccgaagtagatttcag

SEQ ID NO: 107642 - DNA, 25 bp, Saccharomyces pastorianus
aagccggtcaaaatcgatgcctcca

SEQ ID NO: 107643 - DNA, 25 bp, Saccharomyces pastorianus
gacctggcaaagatcaaacctgaaa

SEQ ID NO: 107644 - DNA, 25 bp, Saccharomyces pastorianus
gaattaactgttgacgacctggcaa

SEQ ID NO: 107645 - DNA, 25 bp, Saccharomyces pastorianus
caatctgcaagacctttcgatgaat

SEQ ID NO: 107646 - DNA, 25 bp, Saccharomyces pastorianus
ggtcgactgccactcaattatcgag

SEQ ID NO: 107647 - DNA, 25 bp, Saccharomyces pastorianus
cgatgaggcacgtagacaattacta

SEQ ID NO: 107648 - DNA, 25 bp, Saccharomyces pastorianus
ggagacagaatccttagtttccaag

SEQ ID NO: 107649 - DNA, 25 bp, Saccharomyces pastorianus
tcgatgcctccaaacaattacaagt

SEQ ID NO: 107650 - DNA, 25 bp, Saccharomyces pastorianus
gcatacttccggaaagcgcgaaacc

SEQ ID NO: 107651 - DNA, 25 bp, Saccharomyces pastorianus
aaagatggcgatcgcattgaccctt

SEQ ID NO: 107652 - DNA, 25 bp, Saccharomyces pastorianus
taacgtcaacaactcggaaccttct

SEQ ID NO: 107653 - DNA, 25 bp, Saccharomyces pastorianus
ttgatatcataactgcgagcttgga

SEQ ID NO: 107654 - DNA, 25 bp, Saccharomyces pastorianus
gcgcgaaaccaacgctgactgatta

SEQ ID NO: 107655 - DNA, 25 bp, Saccharomyces pastorianus
ttgacccttcaattatagactgtga

SEQ ID NO: 107656 - DNA, 25 bp, Saccharomyces pastorianus
gaacattgttagcatacttccggaa

SEQ ID NO: 107657 - DNA, 25 bp, Saccharomyces pastorianus
ggcaaatttggatttccacggcata

SEQ ID NO: 107658 - DNA, 25 bp, Saccharomyces pastorianus
aaccacgctaactgaaaagggctct

SEQ ID NO: 107659 - DNA, 25 bp, Saccharomyces pastorianus
actatggatccaactgcagctgctg

SEQ ID NO: 107660 - DNA, 25 bp, Saccharomyces pastorianus
aaaagggctctcaggtgatggaaaa

SEQ ID NO: 107661 - DNA, 25 bp, Saccharomyces pastorianus
gagcaatttctcttcgcaggaagtg

SEQ ID NO: 107662 - DNA, 25 bp, Saccharomyces pastorianus
acggctgttcgttattccctggaag

SEQ ID NO: 107663 - DNA, 25 bp, Saccharomyces pastorianus
acctggctacagtatttcttttcta

SEQ ID NO: 107664 - DNA, 25 bp, Saccharomyces pastorianus
tgaagtccctaacactagcgccgaa

SEQ ID NO: 107665 - DNA, 25 bp, Saccharomyces pastorianus
ttctgagacgtgtaccaatacctgg

SEQ ID NO: 107666 - DNA, 25 bp, Saccharomyces pastorianus
aaactgtttttgaatgccagagcaa

SEQ ID NO: 107667 - DNA, 25 bp, Saccharomyces pastorianus
tggagaggcacaacagaccggaagt

SEQ ID NO: 107668 - DNA, 25 bp, Saccharomyces pastorianus
gaagcattctacattctgagacgtg

SEQ ID NO: 107669 - DNA, 25 bp, Saccharomyces pastorianus
tccctggaagctgcgttgactttga

SEQ ID NO: 107670 - DNA, 25 bp, Saccharomyces pastorianus
agcccagtgtaaactcggtgcgtat

SEQ ID NO: 107671 - DNA, 25 bp, Saccharomyces pastorianus
ttacgtccgtatctaacggctgttc

SEQ ID NO: 107672 - DNA, 25 bp, Saccharomyces pastorianus
ataccgaatacgtccaagttgaggt

SEQ ID NO: 107673 - DNA, 25 bp, Saccharomyces pastorianus
atatggtatgttcgtccgatccaca

SEQ ID NO: 107674 - DNA, 25 bp, Saccharomyces pastorianus
gtaccagaactatgtcttcgaggca

SEQ ID NO: 107675 - DNA, 25 bp, Saccharomyces pastorianus
cacagttcggacaggtgtttgaatt

SEQ ID NO: 107676 - DNA, 25 bp, Saccharomyces pastorianus
gcagattcattcctccattgtttgt

SEQ ID NO: 107677 - DNA, 25 bp, Saccharomyces pastorianus
gttctacaaaactggtcgagttcat

SEQ ID NO: 107678 - DNA, 25 bp, Saccharomyces pastorianus
gatgacttcatattggtgcattcca

SEQ ID NO: 107679 - DNA, 25 bp, Saccharomyces pastorianus
agagaagagacaccgaccagttcaa

SEQ ID NO: 107680 - DNA, 25 bp, Saccharomyces pastorianus
aaaatactttcaacctcaatactag

SEQ ID NO: 107681 - DNA, 25 bp, Saccharomyces pastorianus
gaacagattcttttctctaacttgg

SEQ ID NO: 107682 - DNA, 25 bp, Saccharomyces pastorianus
gtcttcgaggcatattttagaccca

SEQ ID NO: 107683 - DNA, 25 bp, Saccharomyces pastorianus
ggtgtcggcctactatgacaacgat

SEQ ID NO: 107684 - DNA, 25 bp, Saccharomyces pastorianus
tatagatacgtctgggtcctacatc

SEQ ID NO: 107685 - DNA, 25 bp, Saccharomyces pastorianus
gaacacgaaagcaccactaacattt

SEQ ID NO: 107686 - DNA, 25 bp, Saccharomyces pastorianus
ttgacagtccatatttagtttgcac

SEQ ID NO: 107687 - DNA, 25 bp, Saccharomyces pastorianus
acgtggtggtcaaattccagctgag

SEQ ID NO: 107688 - DNA, 25 bp, Saccharomyces pastorianus
gggtcctacatcttgacgacgtaag

SEQ ID NO: 107689 - DNA, 25 bp, Saccharomyces pastorianus
agggcattgtctactcacgtggtgg

SEQ ID NO: 107690 - DNA, 25 bp, Saccharomyces pastorianus
tagcggtgtcactggtttattgttc

SEQ ID NO: 107691 - DNA, 25 bp, Saccharomyces pastorianus
taacatttacaattcctgagggcat

SEQ ID NO: 107692 - DNA, 25 bp, Saccharomyces pastorianus
tactttaagtcatacgttcgttcag

SEQ ID NO: 107693 - DNA, 25 bp, Saccharomyces pastorianus
gaattcaaagtcaaggtgtcggcct

SEQ ID NO: 107694 - DNA, 25 bp, Saccharomyces pastorianus
atttggactctggattggcattttt

SEQ ID NO: 107695 - DNA, 25 bp, Saccharomyces pastorianus
tttgctatctttgttgttgcgtgga

SEQ ID NO: 107696 - DNA, 25 bp, Saccharomyces pastorianus
gggactgccaatctatatcacaatg

SEQ ID NO: 107697 - DNA, 25 bp, Saccharomyces pastorianus
tccagatttcactaatcccttctta

SEQ ID NO: 107698 - DNA, 25 bp, Saccharomyces pastorianus
ttgggctcaacaagcctgcattctt

SEQ ID NO: 107699 - DNA, 25 bp, Saccharomyces pastorianus
gtgaatctttattggctgttcctta

SEQ ID NO: 107700 - DNA, 25 bp, Saccharomyces pastorianus
gttgcgtggatttatttgcgtcatt

SEQ ID NO: 107701 - DNA, 25 bp, Saccharomyces pastorianus
gttttaacgcaatttcgcacggaag

SEQ ID NO: 107702 - DNA, 25 bp, Saccharomyces pastorianus
atgtcttgaattttgccactcagca

SEQ ID NO: 107703 - DNA, 25 bp, Saccharomyces pastorianus
ggtattctatttgggtcaagctgca

SEQ ID NO: 107704 - DNA, 25 bp, Saccharomyces pastorianus
gatttggtcttcctacgtatttcat

SEQ ID NO: 107705 - DNA, 25 bp, Saccharomyces pastorianus
aaggaaatttcttgctctagagcta

SEQ ID NO: 107706 - DNA, 25 bp, Saccharomyces pastorianus
gtatcccggcttaggacttgagttt

SEQ ID NO: 107707 - DNA, 25 bp, Saccharomyces pastorianus
atatcgttccatcgaagggcggtga

SEQ ID NO: 107708 - DNA, 25 bp, Saccharomyces pastorianus
gtaagacaacttttgccgacgttgt

SEQ ID NO: 107709 - DNA, 25 bp, Saccharomyces pastorianus
ttcgaaagaacccagcccaagtaca

SEQ ID NO: 107710 - DNA, 25 bp, Saccharomyces pastorianus
taaactgcgcatttttgtatcccgg

SEQ ID NO: 107711 - DNA, 25 bp, Saccharomyces pastorianus
ccactgctgcaccatatcttaagga

SEQ ID NO: 107712 - DNA, 25 bp, Saccharomyces pastorianus
gaacagactcatgccatttcgaaag

SEQ ID NO: 107713 - DNA, 25 bp, Saccharomyces pastorianus
gtagaagggcgcttacctacaacca

SEQ ID NO: 107714 - DNA, 25 bp, Saccharomyces pastorianus
gacgttgtagactccctggaaaaca

SEQ ID NO: 107715 - DNA, 25 bp, Saccharomyces pastorianus
gtataccaattatttccttcgaatg

SEQ ID NO: 107716 - DNA, 25 bp, Saccharomyces pastorianus
tttcggtgcttttccttcactgcat

SEQ ID NO: 107717 - DNA, 25 bp, Saccharomyces pastorianus
ggttctgtgctgtcatacgttattt

SEQ ID NO: 107718 - DNA, 25 bp, Saccharomyces pastorianus
actgcattccgggtgtgctactatg

SEQ ID NO: 107719 - DNA, 25 bp, Saccharomyces pastorianus
tgatgaacccagtgtaagcccttcg

SEQ ID NO: 107720 - DNA, 25 bp, Saccharomyces pastorianus
actatgatatgcatggctcgcctgg

SEQ ID NO: 107721 - DNA, 25 bp, Saccharomyces pastorianus
gtgatccattggctgcagattcaaa

SEQ ID NO: 107722 - DNA, 25 bp, Saccharomyces pastorianus
actacagctttttcaaattcctccg

SEQ ID NO: 107723 - DNA, 25 bp, Saccharomyces pastorianus
gtgtgctactatggaagccctgttt

SEQ ID NO: 107724 - DNA, 25 bp, Saccharomyces pastorianus
atgcaaaatgtctttccagccgctc

SEQ ID NO: 107725 - DNA, 25 bp, Saccharomyces pastorianus
aaattcctccgtcattttcggtgct

SEQ ID NO: 107726 - DNA, 25 bp, Saccharomyces pastorianus
ctcgcctggtggattagctagaatt

SEQ ID NO: 107727 - DNA, 25 bp, Saccharomyces pastorianus
tgctttatgagctgatcggacttgt

SEQ ID NO: 107728 - DNA, 25 bp, Saccharomyces pastorianus
aagaattgtcttccacaatcgggaa

SEQ ID NO: 107729 - DNA, 25 bp, Saccharomyces pastorianus
gacattgtacccatgggcataaggt

SEQ ID NO: 107730 - DNA, 25 bp, Saccharomyces pastorianus
aagcagctggatagagcctcatcgt

SEQ ID NO: 107731 - DNA, 25 bp, Saccharomyces pastorianus
gatcggacttgttcgcataaccaac

SEQ ID NO: 107732 - DNA, 25 bp, Saccharomyces pastorianus
tttaaagaaagatccccgtgtcata

SEQ ID NO: 107733 - DNA, 25 bp, Saccharomyces pastorianus
gctgcggtacagtctgaaattctaa

SEQ ID NO: 107734 - DNA, 25 bp, Saccharomyces pastorianus
cctcatcgttacaccgttctttggg

SEQ ID NO: 107735 - DNA, 25 bp, Saccharomyces pastorianus
ataaccaactccaatgcgccaaagt

SEQ ID NO: 107736 - DNA, 25 bp, Saccharomyces pastorianus
gtttgattcatcagctgcggtacag

SEQ ID NO: 107737 - DNA, 25 bp, Saccharomyces pastorianus
ccgtgtcataagatcatccatcgtt

SEQ ID NO: 107738 - DNA, 25 bp, Saccharomyces pastorianus
gagctacatttgagaaccgaccaga

SEQ ID NO: 107739 - DNA, 25 bp, Saccharomyces pastorianus
ttctgccccatatgaagcgccaaaa

SEQ ID NO: 107740 - DNA, 25 bp, Saccharomyces pastorianus
tgaagcgccaaaagctccagagcta

SEQ ID NO: 107741 - DNA, 25 bp, Saccharomyces pastorianus
ttacttacgacgaacgcaaggcatt

SEQ ID NO: 107742 - DNA, 25 bp, Saccharomyces pastorianus
gtaaaagtacaatcgcctgtgcgct

SEQ ID NO: 107743 - DNA, 25 bp, Saccharomyces pastorianus
atttcaatcacctcatttatctctc

SEQ ID NO: 107744 - DNA, 25 bp, Saccharomyces pastorianus
gattggatggtgacaacattcgttt

SEQ ID NO: 107745 - DNA, 25 bp, Saccharomyces pastorianus
tgtgcgctagaacagttactgctcc

SEQ ID NO: 107746 - DNA, 25 bp, Saccharomyces pastorianus
gagatagagctcgtgaactacataa

SEQ ID NO: 107747 - DNA, 25 bp, Saccharomyces pastorianus
gagtttacaggtatttctgccccat

SEQ ID NO: 107748 - DNA, 25 bp, Saccharomyces pastorianus
ttgctgattcatgtgctatttcaat

SEQ ID NO: 107749 - DNA, 25 bp, Saccharomyces pastorianus
atctgtgtctcctgcaaattacgaa

SEQ ID NO: 107750 - DNA, 25 bp, Saccharomyces pastorianus
acagcctgcggatgcatttactcag

SEQ ID NO: 107751 - DNA, 25 bp, Saccharomyces pastorianus
atggactctgtcttattgacttgga

SEQ ID NO: 107752 - DNA, 25 bp, Saccharomyces pastorianus
gaacgtatgctgcagattggcctcc

SEQ ID NO: 107753 - DNA, 25 bp, Saccharomyces pastorianus
gtgaattttgcacattttggctata

SEQ ID NO: 107754 - DNA, 25 bp, Saccharomyces pastorianus
ggattgttcctcatggagcgcatta

SEQ ID NO: 107755 - DNA, 25 bp, Saccharomyces pastorianus
gaattttcaagtacagcctgcggat

SEQ ID NO: 107756 - DNA, 25 bp, Saccharomyces pastorianus
caagctcttttaatgttccgttcaa

SEQ ID NO: 107757 - DNA, 25 bp, Saccharomyces pastorianus
tctggatcccaacatttctctaatt

SEQ ID NO: 107758 - DNA, 25 bp, Saccharomyces pastorianus
gtatttcattcttctggatcccaac

SEQ ID NO: 107759 - DNA, 25 bp, Saccharomyces pastorianus
ttcaaacgatctcctaacttctgtg

SEQ ID NO: 107760 - DNA, 25 bp, Saccharomyces pastorianus
gatttcaggttaaccattactgcca

SEQ ID NO: 107761 - DNA, 25 bp, Saccharomyces pastorianus
ttaaccattactgccaatcaacctt

SEQ ID NO: 107762 - DNA, 25 bp, Saccharomyces pastorianus
aatcaaccttcaattactctccctt

SEQ ID NO: 107763 - DNA, 25 bp, Saccharomyces pastorianus
tactctcccttactacgtagacgaa

SEQ ID NO: 107764 - DNA, 25 bp, Saccharomyces pastorianus
tttccaagaagcacatacatatttt

SEQ ID NO: 107765 - DNA, 25 bp, Saccharomyces pastorianus
gattatcatgatttcaggttaacca

SEQ ID NO: 107766 - DNA, 25 bp, Saccharomyces pastorianus
aagcccattccatagaactaattat

SEQ ID NO: 107767 - DNA, 25 bp, Saccharomyces pastorianus
acaacatttttatctcttttccaag

SEQ ID NO: 107768 - DNA, 25 bp, Saccharomyces pastorianus
atgcaatcttctcttcccctttgca

SEQ ID NO: 107769 - DNA, 25 bp, Saccharomyces pastorianus
gtagacgaaaaagcccattccatag

SEQ ID NO: 107770 - DNA, 25 bp, Saccharomyces pastorianus
ctcttcccctttgcagagaattttt

SEQ ID NO: 107771 - DNA, 25 bp, Saccharomyces pastorianus
actttaagcacacccttgcagttta

SEQ ID NO: 107772 - DNA, 25 bp, Saccharomyces pastorianus
agaccaggacgtccaattctctgat

SEQ ID NO: 107773 - DNA, 25 bp, Saccharomyces pastorianus
ctctcaatcctcttccaataacaaa

SEQ ID NO: 107774 - DNA, 25 bp, Saccharomyces pastorianus
gccaacgatcctaaactcgcttata

SEQ ID NO: 107775 - DNA, 25 bp, Saccharomyces pastorianus
agaaggcactaacgaggcttcctct

SEQ ID NO: 107776 - DNA, 25 bp, Saccharomyces pastorianus
aaaattttgccatctgccaacgatc

SEQ ID NO: 107777 - DNA, 25 bp, Saccharomyces pastorianus
ctctgcgccattcaatcagtggtta

SEQ ID NO: 107778 - DNA, 25 bp, Saccharomyces pastorianus
ctaaatctggctatctaattcctga

SEQ ID NO: 107779 - DNA, 25 bp, Saccharomyces pastorianus
gagttgaagcttgcggtctcctctg

SEQ ID NO: 107780 - DNA, 25 bp, Saccharomyces pastorianus
atgctatccacccattttctgataa

SEQ ID NO: 107781 - DNA, 25 bp, Saccharomyces pastorianus
gataattacgcgtcaccaaacatat

SEQ ID NO: 107782 - DNA, 25 bp, Saccharomyces pastorianus
ggatttatgtcaagaaacgcctagc

SEQ ID NO: 107783 - DNA, 25 bp, Saccharomyces pastorianus
tgcttttttatctcaatcaatcact

SEQ ID NO: 107784 - DNA, 25 bp, Saccharomyces pastorianus
gacgaaattctctctaagcaaaata

SEQ ID NO: 107785 - DNA, 25 bp, Saccharomyces pastorianus
gaaagatacaagtcattggcaccaa

SEQ ID NO: 107786 - DNA, 25 bp, Saccharomyces pastorianus
gacattacgcaggaagattcactac

SEQ ID NO: 107787 - DNA, 25 bp, Saccharomyces pastorianus
aggtaggcgacgacgacttggttat

SEQ ID NO: 107788 - DNA, 25 bp, Saccharomyces pastorianus
gaaacgcctagcactgagacaagcc

SEQ ID NO: 107789 - DNA, 25 bp, Saccharomyces pastorianus
acaagggttgctgttccgagaagtt

SEQ ID NO: 107790 - DNA, 25 bp, Saccharomyces pastorianus
aatcggtggaggcaataacggacaa

SEQ ID NO: 107791 - DNA, 25 bp, Saccharomyces pastorianus
gagacaagcccagattcaaacgaag

SEQ ID NO: 107792 - DNA, 25 bp, Saccharomyces pastorianus
caatcactattcacccaaacgatgg

SEQ ID NO: 107793 - DNA, 25 bp, Saccharomyces pastorianus
aaatggccagctttttgtatcgaga

SEQ ID NO: 107794 - DNA, 25 bp, Saccharomyces pastorianus
acgatcgactataccgcccaagaat

SEQ ID NO: 107795 - DNA, 25 bp, Saccharomyces pastorianus
gggaaccagctatatactttacttg

SEQ ID NO: 107796 - DNA, 25 bp, Saccharomyces pastorianus
tcctttggattttacacgtcgtacg

SEQ ID NO: 107797 - DNA, 25 bp, Saccharomyces pastorianus
agaagatgcattgcgtgggcccacg

SEQ ID NO: 107798 - DNA, 25 bp, Saccharomyces pastorianus
gactcttattgtcgatagcgcggtt

SEQ ID NO: 107799 - DNA, 25 bp, Saccharomyces pastorianus
gttcgtatgtttccattgtcttcag

SEQ ID NO: 107800 - DNA, 25 bp, Saccharomyces pastorianus
aaatctcgtgggtacctattcagtg

SEQ ID NO: 107801 - DNA, 25 bp, Saccharomyces pastorianus
aagggcatacccgtgactcttattg

SEQ ID NO: 107802 - DNA, 25 bp, Saccharomyces pastorianus
ttcagatgatctacctatggccggc

SEQ ID NO: 107803 - DNA, 25 bp, Saccharomyces pastorianus
gaaaaccattctatgtggtcactga

SEQ ID NO: 107804 - DNA, 25 bp, Saccharomyces pastorianus
ttaatcatcctactgtgcctatact

SEQ ID NO: 107805 - DNA, 25 bp, Saccharomyces pastorianus
atacaaccagttgccattcttgaaa

SEQ ID NO: 107806 - DNA, 25 bp, Saccharomyces pastorianus
gcttattgtttcgacgttcattgta

SEQ ID NO: 107807 - DNA, 25 bp, Saccharomyces pastorianus
aactggatttccttactcattggta

SEQ ID NO: 107808 - DNA, 25 bp, Saccharomyces pastorianus
gtttttactactgcccataattaat

SEQ ID NO: 107809 - DNA, 25 bp, Saccharomyces pastorianus
cactcagttctattatttggtcgat

SEQ ID NO: 107810 - DNA, 25 bp, Saccharomyces pastorianus
aatagccttaatttcactcagttct

SEQ ID NO: 107811 - DNA, 25 bp, Saccharomyces pastorianus
gtgcctatacttcattcagttttta

SEQ ID NO: 107812 - DNA, 25 bp, Saccharomyces pastorianus
cttcctttttcatcttccaaatagc

SEQ ID NO: 107813 - DNA, 25 bp, Saccharomyces pastorianus
aatcagtttatttggcatcgactta

SEQ ID NO: 107814 - DNA, 25 bp, Saccharomyces pastorianus
gtgggcgagagatgatccttccttt

SEQ ID NO: 107815 - DNA, 25 bp, Saccharomyces pastorianus
tgtttgtgtcttttgttcaacccaa

SEQ ID NO: 107816 - DNA, 25 bp, Saccharomyces pastorianus
cagcgtcagcttgaatttggatgcg

SEQ ID NO: 107817 - DNA, 25 bp, Saccharomyces pastorianus
tactgttttttcgattttctcttgg

SEQ ID NO: 107818 - DNA, 25 bp, Saccharomyces pastorianus
ataacgagtttccaccttatcgctt

SEQ ID NO: 107819 - DNA, 25 bp, Saccharomyces pastorianus
gttcaacccaaagggctgtagcaat

SEQ ID NO: 107820 - DNA, 25 bp, Saccharomyces pastorianus
atatatatacatccagcgtcagctt

SEQ ID NO: 107821 - DNA, 25 bp, Saccharomyces pastorianus
ttatctcgctgcatcgtggcggcat

SEQ ID NO: 107822 - DNA, 25 bp, Saccharomyces pastorianus
ggcatccctggactgtaatcagcaa

SEQ ID NO: 107823 - DNA, 25 bp, Saccharomyces pastorianus
tttggatgcgttcacagttactgtt

SEQ ID NO: 107824 - DNA, 25 bp, Saccharomyces pastorianus
tagaaaccgatcctgggcttatctc

SEQ ID NO: 107825 - DNA, 25 bp, Saccharomyces pastorianus
gcgtattcatcgttatgtttgtgtc

SEQ ID NO: 107826 - DNA, 25 bp, Saccharomyces pastorianus
gcttccatcgatttacttgccaagg

SEQ ID NO: 107827 - DNA, 25 bp, Saccharomyces pastorianus
aacttggtagaacttccctatacag

SEQ ID NO: 107828 - DNA, 25 bp, Saccharomyces pastorianus
tgaagatacctaatgagccctcgcc

SEQ ID NO: 107829 - DNA, 25 bp, Saccharomyces pastorianus
gacttttctgaaactgttgttacgc

SEQ ID NO: 107830 - DNA, 25 bp, Saccharomyces pastorianus
gaacctattcgccatgctagttgaa

SEQ ID NO: 107831 - DNA, 25 bp, Saccharomyces pastorianus
ttgcccaagcaggactactagagta

SEQ ID NO: 107832 - DNA, 25 bp, Saccharomyces pastorianus
ataacggagttatgattgcccaagc

SEQ ID NO: 107833 - DNA, 25 bp, Saccharomyces pastorianus
gagtggtatattggcttccatcgat

SEQ ID NO: 107834 - DNA, 25 bp, Saccharomyces pastorianus
gaaacgcttgatattgctatcggta

SEQ ID NO: 107835 - DNA, 25 bp, Saccharomyces pastorianus
gagctatggctcacgttaactccaa

SEQ ID NO: 107836 - DNA, 25 bp, Saccharomyces pastorianus
taccgtatctttggtgaaacgcttg

SEQ ID NO: 107837 - DNA, 25 bp, Saccharomyces pastorianus
gtcgacggcttgctgtacaattgga

SEQ ID NO: 107838 - DNA, 25 bp, Saccharomyces pastorianus
taaagccattgtatccaccgggttg

SEQ ID NO: 107839 - DNA, 25 bp, Saccharomyces pastorianus
gttgtcttcaacgaccagaggtatg

SEQ ID NO: 107840 - DNA, 25 bp, Saccharomyces pastorianus
gaaatcacattccaacacgccaggg

SEQ ID NO: 107841 - DNA, 25 bp, Saccharomyces pastorianus
atcgaaggagatcggctcttccggt

SEQ ID NO: 107842 - DNA, 25 bp, Saccharomyces pastorianus
aacgcttcaccactgtctatgaaaa

SEQ ID NO: 107843 - DNA, 25 bp, Saccharomyces pastorianus
acgtcgccaacatttctaatactct

SEQ ID NO: 107844 - DNA, 25 bp, Saccharomyces pastorianus
aaggtcactgatgcttcttctttgc

SEQ ID NO: 107845 - DNA, 25 bp, Saccharomyces pastorianus
agggagttcctgatcaagccattgc

SEQ ID NO: 107846 - DNA, 25 bp, Saccharomyces pastorianus
atctgaaagcgtccctaaagccatt

SEQ ID NO: 107847 - DNA, 25 bp, Saccharomyces pastorianus
attgcacttgcaaggttctaccgca

SEQ ID NO: 107848 - DNA, 25 bp, Saccharomyces pastorianus
gtagacccggtttcaagctgttgtt

SEQ ID NO: 107849 - DNA, 25 bp, Saccharomyces pastorianus
tctagctttagactactccatcggg

SEQ ID NO: 107850 - DNA, 25 bp, Saccharomyces pastorianus
gatcactcccatagaatcctttttc

SEQ ID NO: 107851 - DNA, 25 bp, Saccharomyces pastorianus
ggaagttctggagtacctgcaagat

SEQ ID NO: 107852 - DNA, 25 bp, Saccharomyces pastorianus
gttcagatttgattcttccgccaac

SEQ ID NO: 107853 - DNA, 25 bp, Saccharomyces pastorianus
ggactttatctacgaccacgcagaa

SEQ ID NO: 107854 - DNA, 25 bp, Saccharomyces pastorianus
ggacctcgaggaacgtctagcttta

SEQ ID NO: 107855 - DNA, 25 bp, Saccharomyces pastorianus
aagctaattcctagagccgtggact

SEQ ID NO: 107856 - DNA, 25 bp, Saccharomyces pastorianus
ggcgcagccttggaattcgagttcg

SEQ ID NO: 107857 - DNA, 25 bp, Saccharomyces pastorianus
gtcactgtggacctagaaatgcgca

SEQ ID NO: 107858 - DNA, 25 bp, Saccharomyces pastorianus
cattctgtgcaagacctacttctac

SEQ ID NO: 107859 - DNA, 25 bp, Saccharomyces pastorianus
agatatcgattcttctactggagat

SEQ ID NO: 107860 - DNA, 25 bp, Saccharomyces pastorianus
tccaatcatgctagtcggccttaaa

SEQ ID NO: 107861 - DNA, 25 bp, Saccharomyces pastorianus
cagcgtctctatttccggaacgaaa

SEQ ID NO: 107862 - DNA, 25 bp, Saccharomyces pastorianus
tggcattatgggacactgccggcca

SEQ ID NO: 107863 - DNA, 25 bp, Saccharomyces pastorianus
atgtggaagatctctggttcccaga

SEQ ID NO: 107864 - DNA, 25 bp, Saccharomyces pastorianus
agtagacttagaccgctttcatata

SEQ ID NO: 107865 - DNA, 25 bp, Saccharomyces pastorianus
gtgcctgctgatatcttatgtccaa

SEQ ID NO: 107866 - DNA, 25 bp, Saccharomyces pastorianus
agttcagcagaatccttggccaggc

SEQ ID NO: 107867 - DNA, 25 bp, Saccharomyces pastorianus
taacctttcagatctggtggaacca

SEQ ID NO: 107868 - DNA, 25 bp, Saccharomyces pastorianus
tttccgattcattatatgctcccag

SEQ ID NO: 107869 - DNA, 25 bp, Saccharomyces pastorianus
ggttcccagaggttaagcatttttg

SEQ ID NO: 107870 - DNA, 25 bp, Saccharomyces pastorianus
acttccggaggttcttggtagcaga

SEQ ID NO: 107871 - DNA, 25 bp, Saccharomyces pastorianus
ggatccctctgccttgtatagagaa

SEQ ID NO: 107872 - DNA, 25 bp, Saccharomyces pastorianus
gtcgttgccgattacagagttcacc

SEQ ID NO: 107873 - DNA, 25 bp, Saccharomyces pastorianus
agtttgcctatatatcagttttcag

SEQ ID NO: 107874 - DNA, 25 bp, Saccharomyces pastorianus
catactactcattaccaaggatccc

SEQ ID NO: 107875 - DNA, 25 bp, Saccharomyces pastorianus
atgtgaccccatttacgtgagagca

SEQ ID NO: 107876 - DNA, 25 bp, Saccharomyces pastorianus
aaaattgccatacatgatccgcatg

SEQ ID NO: 107877 - DNA, 25 bp, Saccharomyces pastorianus
gaatacctcatacattcccaacaat

SEQ ID NO: 107878 - DNA, 25 bp, Saccharomyces pastorianus
agagttcaccacttacttccggagg

SEQ ID NO: 107879 - DNA, 25 bp, Saccharomyces pastorianus
actgcttaagcgtcagggtcggtta

SEQ ID NO: 107880 - DNA, 25 bp, Saccharomyces pastorianus
aagattttgacttggtcgttgccga

SEQ ID NO: 107881 - DNA, 25 bp, Saccharomyces pastorianus
gaacaagtagctgaaactccgcaaa

SEQ ID NO: 107882 - DNA, 25 bp, Saccharomyces pastorianus
aggacatctgtccaataatactaga

SEQ ID NO: 107883 - DNA, 25 bp, Saccharomyces pastorianus
tacaacaacctttagcacccgcttt

SEQ ID NO: 107884 - DNA, 25 bp, Saccharomyces pastorianus
atggagaaatattccgacaggttta

SEQ ID NO: 107885 - DNA, 25 bp, Saccharomyces pastorianus
gggtctcgtctgtgtattttaacga

SEQ ID NO: 107886 - DNA, 25 bp, Saccharomyces pastorianus
acccgctttgcctgttaatgattta

SEQ ID NO: 107887 - DNA, 25 bp, Saccharomyces pastorianus
aatgttcaccgctaaaattgcctac

SEQ ID NO: 107888 - DNA, 25 bp, Saccharomyces pastorianus
attgtctcagagtttgacgtgattg

SEQ ID NO: 107889 - DNA, 25 bp, Saccharomyces pastorianus
gttgataccaacataagcattacga

SEQ ID NO: 107890 - DNA, 25 bp, Saccharomyces pastorianus
tccttttatgatcacgccagttcac

SEQ ID NO: 107891 - DNA, 25 bp, Saccharomyces pastorianus
gaacaatgagttttatcccataggt

SEQ ID NO: 107892 - DNA, 25 bp, Saccharomyces pastorianus
taccagtgccattagattgtcatcg

SEQ ID NO: 107893 - DNA, 25 bp, Saccharomyces pastorianus
cgactgctacaaccttatccttaag

SEQ ID NO: 107894 - DNA, 25 bp, Saccharomyces pastorianus
gggataatagcctctggtgcactag

SEQ ID NO: 107895 - DNA, 25 bp, Saccharomyces pastorianus
aagactgttcgctagtcaaccttct

SEQ ID NO: 107896 - DNA, 25 bp, Saccharomyces pastorianus
gactccagtatcttgacatggtctg

SEQ ID NO: 107897 - DNA, 25 bp, Saccharomyces pastorianus
attcggattcgacccattaactgta

SEQ ID NO: 107898 - DNA, 25 bp, Saccharomyces pastorianus
aataacagggtcgatgcctcttctc

SEQ ID NO: 107899 - DNA, 25 bp, Saccharomyces pastorianus
atcaatgttggttcttcgctgttta

SEQ ID NO: 107900 - DNA, 25 bp, Saccharomyces pastorianus
tgggctgtaacgtttcatgggctta

SEQ ID NO: 107901 - DNA, 25 bp, Saccharomyces pastorianus
atgggcttacctttccacaatggaa

SEQ ID NO: 107902 - DNA, 25 bp, Saccharomyces pastorianus
actaggctacttgttgggtccgata

SEQ ID NO: 107903 - DNA, 25 bp, Saccharomyces pastorianus
atgcagggtcccaagattccatgga

SEQ ID NO: 107904 - DNA, 25 bp, Saccharomyces pastorianus
gagtcgacacgccagaggatactac

SEQ ID NO: 107905 - DNA, 25 bp, Saccharomyces pastorianus
agccgctaacaacgtctttaccaat

SEQ ID NO: 107906 - DNA, 25 bp, Saccharomyces pastorianus
atctcctcgggtgatctgttcagtc

SEQ ID NO: 107907 - DNA, 25 bp, Saccharomyces pastorianus
atgctgcccactgattattctttga

SEQ ID NO: 107908 - DNA, 25 bp, Saccharomyces pastorianus
gctttaagttcctggagcccattca

SEQ ID NO: 107909 - DNA, 25 bp, Saccharomyces pastorianus
agcccattcacaaagagtttccctg

SEQ ID NO: 107910 - DNA, 25 bp, Saccharomyces pastorianus
cggtatcactttccctaaagacgcg

SEQ ID NO: 107911 - DNA, 25 bp, Saccharomyces pastorianus
ggacgctggctatgtcagaacgttt

SEQ ID NO: 107912 - DNA, 25 bp, Saccharomyces pastorianus
ggatactacccctgacaacgggaga

SEQ ID NO: 107913 - DNA, 25 bp, Saccharomyces pastorianus
acgggagactgcctgacgctgataa

SEQ ID NO: 107914 - DNA, 25 bp, Saccharomyces pastorianus
gggatattccagatttaaccactaa

SEQ ID NO: 107915 - DNA, 25 bp, Saccharomyces pastorianus
gatttcgctcatcatgttctcattg

SEQ ID NO: 107916 - DNA, 25 bp, Saccharomyces pastorianus
ggtgccttccgcttactagttagaa

SEQ ID NO: 107917 - DNA, 25 bp, Saccharomyces pastorianus
aacttctccattccatgcggttttt

SEQ ID NO: 107918 - DNA, 25 bp, Saccharomyces pastorianus
gcaagtgacatcattggagctcaaa

SEQ ID NO: 107919 - DNA, 25 bp, Saccharomyces pastorianus
aaaactgccactcttaggcacgaaa

SEQ ID NO: 107920 - DNA, 25 bp, Saccharomyces pastorianus
atcctcatgattgggctgccgatat

SEQ ID NO: 107921 - DNA, 25 bp, Saccharomyces pastorianus
gtcttggtatttaacgatcctcatg

SEQ ID NO: 107922 - DNA, 25 bp, Saccharomyces pastorianus
cgaaccaggatttactgtgggccaa

SEQ ID NO: 107923 - DNA, 25 bp, Saccharomyces pastorianus
catccccatttacttttcgaaccag

SEQ ID NO: 107924 - DNA, 25 bp, Saccharomyces pastorianus
agcctaccttgatcgtgaatgatgt

SEQ ID NO: 107925 - DNA, 25 bp, Saccharomyces pastorianus
aaaatggcatcgatgcttttctggg

SEQ ID NO: 107926 - DNA, 25 bp, Saccharomyces pastorianus
atcacgatccctcacttgtacttgt

SEQ ID NO: 107927 - DNA, 25 bp, Saccharomyces pastorianus
agagatctttttttagcctggcctt

SEQ ID NO: 107928 - DNA, 25 bp, Saccharomyces pastorianus
tgggcagtgacgcacgcaacttttt

SEQ ID NO: 107929 - DNA, 25 bp, Saccharomyces pastorianus
atgatcgtctttgatgtatctctaa

SEQ ID NO: 107930 - DNA, 25 bp, Saccharomyces pastorianus
acagagtgctcttggatcacgatcc

SEQ ID NO: 107931 - DNA, 25 bp, Saccharomyces pastorianus
gatgtatctctaacgatcattatta

SEQ ID NO: 107932 - DNA, 25 bp, Saccharomyces pastorianus
atgttatataactcaccccatgtgc

SEQ ID NO: 107933 - DNA, 25 bp, Saccharomyces pastorianus
ttatcagcgccgtccagttacattt

SEQ ID NO: 107934 - DNA, 25 bp, Saccharomyces pastorianus
tttcttttgcttttaacatgagtca

SEQ ID NO: 107935 - DNA, 25 bp, Saccharomyces pastorianus
acttgtacttgtccacttatcagcg

SEQ ID NO: 107936 - DNA, 25 bp, Saccharomyces pastorianus
caagacggttaatctcgtgatcaat

SEQ ID NO: 107937 - DNA, 25 bp, Saccharomyces pastorianus
gccagaccactaaagaactccgtta

SEQ ID NO: 107938 - DNA, 25 bp, Saccharomyces pastorianus
gcacgcacatggttccaagacggtt

SEQ ID NO: 107939 - DNA, 25 bp, Saccharomyces pastorianus
gcaaaggacctgttcaatgacgttt

SEQ ID NO: 107940 - DNA, 25 bp, Saccharomyces pastorianus
cgacgacgactggactttagacata

SEQ ID NO: 107941 - DNA, 25 bp, Saccharomyces pastorianus
accgaaatttcgctgttcaacaaag

SEQ ID NO: 107942 - DNA, 25 bp, Saccharomyces pastorianus
tttaaagatatacacgcacgcacat

SEQ ID NO: 107943 - DNA, 25 bp, Saccharomyces pastorianus
gctgcacgattacgatcttgctgat

SEQ ID NO: 107944 - DNA, 25 bp, Saccharomyces pastorianus
aaacgtcaagaacatagtgctgcac

SEQ ID NO: 107945 - DNA, 25 bp, Saccharomyces pastorianus
aaagctgttcgagtatggcattgag

SEQ ID NO: 107946 - DNA, 25 bp, Saccharomyces pastorianus
gatcaattttgaccacgacgacgac

SEQ ID NO: 107947 - DNA, 25 bp, Saccharomyces pastorianus
aatccactgtccatcaactggaaca

SEQ ID NO: 107948 - DNA, 25 bp, Saccharomyces pastorianus
gaaatatcgccggtccagaaccaaa

SEQ ID NO: 107949 - DNA, 25 bp, Saccharomyces pastorianus
gttcagcaactatacatttggcact

SEQ ID NO: 107950 - DNA, 25 bp, Saccharomyces pastorianus
ttcgaccagcattctacatgcacta

SEQ ID NO: 107951 - DNA, 25 bp, Saccharomyces pastorianus
tgaagtttaaccaagccgtgatgaa

SEQ ID NO: 107952 - DNA, 25 bp, Saccharomyces pastorianus
acatcttccattttcgaccagcatt

SEQ ID NO: 107953 - DNA, 25 bp, Saccharomyces pastorianus
atgaacgatatccaacattcccgcc

SEQ ID NO: 107954 - DNA, 25 bp, Saccharomyces pastorianus
aagatatttcatgcccatcgtctgt

SEQ ID NO: 107955 - DNA, 25 bp, Saccharomyces pastorianus
atcgtctgttgattctcacacatct

SEQ ID NO: 107956 - DNA, 25 bp, Saccharomyces pastorianus
taacagtgttgtacggtccagattt

SEQ ID NO: 107957 - DNA, 25 bp, Saccharomyces pastorianus
gaatccctcatcaacatgaacgata

SEQ ID NO: 107958 - DNA, 25 bp, Saccharomyces pastorianus
tatcaagttacactacacgcgttcc

SEQ ID NO: 107959 - DNA, 25 bp, Saccharomyces pastorianus
gatgccttcaggtacacaacagatt

SEQ ID NO: 107960 - DNA, 25 bp, Saccharomyces pastorianus
acctctattagagccggatatccat

SEQ ID NO: 107961 - DNA, 25 bp, Saccharomyces pastorianus
aactctagtgcgttcgatgaatttg

SEQ ID NO: 107962 - DNA, 25 bp, Saccharomyces pastorianus
aagattcgatcctgtgtacgtccaa

SEQ ID NO: 107963 - DNA, 25 bp, Saccharomyces pastorianus
gagttcttcactgtgggtgatcaat

SEQ ID NO: 107964 - DNA, 25 bp, Saccharomyces pastorianus
aattcttgggtttacgacagcatca

SEQ ID NO: 107965 - DNA, 25 bp, Saccharomyces pastorianus
atacaagaccggattcgcagagaaa

SEQ ID NO: 107966 - DNA, 25 bp, Saccharomyces pastorianus
agatcgatgacttcaattcttgggt

SEQ ID NO: 107967 - DNA, 25 bp, Saccharomyces pastorianus
gaccttgttcctgctcagttgaaaa

SEQ ID NO: 107968 - DNA, 25 bp, Saccharomyces pastorianus
gccggatatccatttattcatttgt

SEQ ID NO: 107969 - DNA, 25 bp, Saccharomyces pastorianus
aaatcgtcggtagaccactggcggc

SEQ ID NO: 107970 - DNA, 25 bp, Saccharomyces pastorianus
gtatactctgtggacgttaacaaca

SEQ ID NO: 107971 - DNA, 25 bp, Saccharomyces pastorianus
gggagtactctgaagatctgttgaa

SEQ ID NO: 107972 - DNA, 25 bp, Saccharomyces pastorianus
ttgcacaccactagctatcgttaag

SEQ ID NO: 107973 - DNA, 25 bp, Saccharomyces pastorianus
aaggtgccgtctgcatcaattttgc

SEQ ID NO: 107974 - DNA, 25 bp, Saccharomyces pastorianus
ttgaaatccattctaccttgcacac

SEQ ID NO: 107975 - DNA, 25 bp, Saccharomyces pastorianus
actggtgtccctagtgaaaattaca

SEQ ID NO: 107976 - DNA, 25 bp, Saccharomyces pastorianus
atgacggtgccacagtatactctgt

SEQ ID NO: 107977 - DNA, 25 bp, Saccharomyces pastorianus
gctattagccaatgacggtgccaca

SEQ ID NO: 107978 - DNA, 25 bp, Saccharomyces pastorianus
aaaagtgttctcttgattcagatgt

SEQ ID NO: 107979 - DNA, 25 bp, Saccharomyces pastorianus
ttcagatgtggtcatcactggtgtc

SEQ ID NO: 107980 - DNA, 25 bp, Saccharomyces pastorianus
gggccacgtctagatttcaaaatcg

SEQ ID NO: 107981 - DNA, 25 bp, Saccharomyces pastorianus
gaagcgtcgtattcggatgatggac

SEQ ID NO: 107982 - DNA, 25 bp, Saccharomyces pastorianus
gagattgggccacgtctagatttca

SEQ ID NO: 107983 - DNA, 25 bp, Saccharomyces pastorianus
tatggtcactgaagctcacaagaag

SEQ ID NO: 107984 - DNA, 25 bp, Saccharomyces pastorianus
gatttacaggatgttgcgggattac

SEQ ID NO: 107985 - DNA, 25 bp, Saccharomyces pastorianus
tcggcagaattcatactccaagtcc

SEQ ID NO: 107986 - DNA, 25 bp, Saccharomyces pastorianus
tggtgagccattgccgaacgttcta

SEQ ID NO: 107987 - DNA, 25 bp, Saccharomyces pastorianus
actccaagtccagatatggtcactg

SEQ ID NO: 107988 - DNA, 25 bp, Saccharomyces pastorianus
gatacacatcccgtatacaagcaaa

SEQ ID NO: 107989 - DNA, 25 bp, Saccharomyces pastorianus
ttagaggcgaatctactgatttaca

SEQ ID NO: 107990 - DNA, 25 bp, Saccharomyces pastorianus
ggtttgaaatccaaattcgaccaag

SEQ ID NO: 107991 - DNA, 25 bp, Saccharomyces pastorianus
aatgaaacaggtcttgaagcccaag

SEQ ID NO: 107992 - DNA, 25 bp, Saccharomyces pastorianus
ctaacagagttgaatgagcagatca

SEQ ID NO: 107993 - DNA, 25 bp, Saccharomyces pastorianus
atatatcgcaagcaagtttgggatt

SEQ ID NO: 107994 - DNA, 25 bp, Saccharomyces pastorianus
gtttgggattattgcaatatgcaga

SEQ ID NO: 107995 - DNA, 25 bp, Saccharomyces pastorianus
attgcaatatgcagagggtgattat

SEQ ID NO: 107996 - DNA, 25 bp, Saccharomyces pastorianus
gaatgcggattcagtggcccaattg

SEQ ID NO: 107997 - DNA, 25 bp, Saccharomyces pastorianus
ttcagtggcccaattgatgaacaat

SEQ ID NO: 107998 - DNA, 25 bp, Saccharomyces pastorianus
gataaccagtttaacggatggctta

SEQ ID NO: 107999 - DNA, 25 bp, Saccharomyces pastorianus
gcgaaaagaacttcagtcattacaa

SEQ ID NO: 108000 - DNA, 25 bp, Saccharomyces pastorianus
gagataggaccgtggaaagattcta

SEQ ID NO: 108001 - DNA, 25 bp, Saccharomyces pastorianus
gatggcttaaaaattcagctaacag

SEQ ID NO: 108002 - DNA, 25 bp, Saccharomyces pastorianus
gtatccatggtctcgaaacctagtg

SEQ ID NO: 108003 - DNA, 25 bp, Saccharomyces pastorianus
tgagaccattccacgtagctttatg

SEQ ID NO: 108004 - DNA, 25 bp, Saccharomyces pastorianus
agatcgttccacactgctggatctg

SEQ ID NO: 108005 - DNA, 25 bp, Saccharomyces pastorianus
gacgctccaggaatgtactatcaac

SEQ ID NO: 108006 - DNA, 25 bp, Saccharomyces pastorianus
gaggtgtgtgctgtagatcgttcca

SEQ ID NO: 108007 - DNA, 25 bp, Saccharomyces pastorianus
gatccggaagttacgtcttgacaat

SEQ ID NO: 108008 - DNA, 25 bp, Saccharomyces pastorianus
aagcagtgtccaaatgttctcgtag

SEQ ID NO: 108009 - DNA, 25 bp, Saccharomyces pastorianus
gaatccatcgcaaccggatctgtta

SEQ ID NO: 108010 - DNA, 25 bp, Saccharomyces pastorianus
agagggcttgacatgcctgttcaaa

SEQ ID NO: 108011 - DNA, 25 bp, Saccharomyces pastorianus
ggcatttcgccattatttgtatcca

SEQ ID NO: 108012 - DNA, 25 bp, Saccharomyces pastorianus
atggcagccagtgaccctcgtagag

SEQ ID NO: 108013 - DNA, 25 bp, Saccharomyces pastorianus
cactatgaacatactctggacaagg

SEQ ID NO: 108014 - DNA, 25 bp, Saccharomyces pastorianus
agacagtgtgatacaggagctcaaa

SEQ ID NO: 108015 - DNA, 25 bp, Saccharomyces pastorianus
actacaccctacaagtgcattacac

SEQ ID NO: 108016 - DNA, 25 bp, Saccharomyces pastorianus
tcatttcctccggtaaggactggga

SEQ ID NO: 108017 - DNA, 25 bp, Saccharomyces pastorianus
acaactacaggcctctttggtgaac

SEQ ID NO: 108018 - DNA, 25 bp, Saccharomyces pastorianus
ggagctcaaaatgaccgacaattca

SEQ ID NO: 108019 - DNA, 25 bp, Saccharomyces pastorianus
ccccttacgtggtatatcatgaatt

SEQ ID NO: 108020 - DNA, 25 bp, Saccharomyces pastorianus
aaactggcgtaagtgttcaactaca

SEQ ID NO: 108021 - DNA, 25 bp, Saccharomyces pastorianus
aaatgatcaggaggccacaactaca

SEQ ID NO: 108022 - DNA, 25 bp, Saccharomyces pastorianus
gagacattcgagaccagttgctaac

SEQ ID NO: 108023 - DNA, 25 bp, Saccharomyces pastorianus
ggtgggttactctacgacatcaagc

SEQ ID NO: 108024 - DNA, 25 bp, Saccharomyces pastorianus
tacggtatctcggtacgcaactttt

SEQ ID NO: 108025 - DNA, 25 bp, Saccharomyces pastorianus
attgcctctttcgttgtgttcaaga

SEQ ID NO: 108026 - DNA, 25 bp, Saccharomyces pastorianus
atcctaagtcttacagcatggctct

SEQ ID NO: 108027 - DNA, 25 bp, Saccharomyces pastorianus
tcccttcccatattctttgactaat

SEQ ID NO: 108028 - DNA, 25 bp, Saccharomyces pastorianus
ggttacgctagctttgggatctgta

SEQ ID NO: 108029 - DNA, 25 bp, Saccharomyces pastorianus
tctactgagattatgtcccttccca

SEQ ID NO: 108030 - DNA, 25 bp, Saccharomyces pastorianus
attggctactccttattatccacca

SEQ ID NO: 108031 - DNA, 25 bp, Saccharomyces pastorianus
atctgtaacaggttccattgcctct

SEQ ID NO: 108032 - DNA, 25 bp, Saccharomyces pastorianus
gcatttcctcctatgattggctact

SEQ ID NO: 108033 - DNA, 25 bp, Saccharomyces pastorianus
aatggttctgatattctttgtcgca

SEQ ID NO: 108034 - DNA, 25 bp, Saccharomyces pastorianus
aaccacaccaaagctgttcatctat

SEQ ID NO: 108035 - DNA, 25 bp, Saccharomyces pastorianus
tatttcaacttcaaggcgaccagcc

SEQ ID NO: 108036 - DNA, 25 bp, Saccharomyces pastorianus
aaagagctcaccgtttcgatcgagg

SEQ ID NO: 108037 - DNA, 25 bp, Saccharomyces pastorianus
ttagaccgcggtattccattacgtc

SEQ ID NO: 108038 - DNA, 25 bp, Saccharomyces pastorianus
gaagaccatcctacattgagactga

SEQ ID NO: 108039 - DNA, 25 bp, Saccharomyces pastorianus
tgccagcattgaaacacctgccatg

SEQ ID NO: 108040 - DNA, 25 bp, Saccharomyces pastorianus
ttttcattttcagttgcttctccca

SEQ ID NO: 108041 - DNA, 25 bp, Saccharomyces pastorianus
aagtaacttcgattcagacgcaatg

SEQ ID NO: 108042 - DNA, 25 bp, Saccharomyces pastorianus
ggaaagccatgaacttatcccacat

SEQ ID NO: 108043 - DNA, 25 bp, Saccharomyces pastorianus
ggatgccaagacctatgacccggaa

SEQ ID NO: 108044 - DNA, 25 bp, Saccharomyces pastorianus
agcgggcaatttcaggcgtcatagc

SEQ ID NO: 108045 - DNA, 25 bp, Saccharomyces pastorianus
ggccggctaatgtttcctatggatg

SEQ ID NO: 108046 - DNA, 25 bp, Saccharomyces pastorianus
attccacgtggattgtctaaactgt

SEQ ID NO: 108047 - DNA, 25 bp, Saccharomyces pastorianus
aactgtcgggtcaatggcatcgtga

SEQ ID NO: 108048 - DNA, 25 bp, Saccharomyces pastorianus
gtaatcacgacatggaagctctctt

SEQ ID NO: 108049 - DNA, 25 bp, Saccharomyces pastorianus
cattgagtttaaatatccgcctggg

SEQ ID NO: 108050 - DNA, 25 bp, Saccharomyces pastorianus
tcatgtattatctaacggcggcact

SEQ ID NO: 108051 - DNA, 25 bp, Saccharomyces pastorianus
ggtgaaattccattgtgcggtaatc

SEQ ID NO: 108052 - DNA, 25 bp, Saccharomyces pastorianus
ggaaggtatcgacaatgctacatca

SEQ ID NO: 108053 - DNA, 25 bp, Saccharomyces pastorianus
ggcggcactacgagatacagctctg

SEQ ID NO: 108054 - DNA, 25 bp, Saccharomyces pastorianus
atgttccctgttatattctaggcga

SEQ ID NO: 108055 - DNA, 25 bp, Saccharomyces pastorianus
aactgtttcttatgcaagactgcca

SEQ ID NO: 108056 - DNA, 25 bp, Saccharomyces pastorianus
agggaccttgcagagcatgcggctt

SEQ ID NO: 108057 - DNA, 25 bp, Saccharomyces pastorianus
cccagtgaccgttgatcctaaattt

SEQ ID NO: 108058 - DNA, 25 bp, Saccharomyces pastorianus
ctttgcctctatcactgggttggaa

SEQ ID NO: 108059 - DNA, 25 bp, Saccharomyces pastorianus
tgttgcctgctttatttctggttgt

SEQ ID NO: 108060 - DNA, 25 bp, Saccharomyces pastorianus
ttgactaacgcctttggttctgcaa

SEQ ID NO: 108061 - DNA, 25 bp, Saccharomyces pastorianus
aatcggttgtgcattgtccccagtg

SEQ ID NO: 108062 - DNA, 25 bp, Saccharomyces pastorianus
cgtttgctggcaaatacccgcatat

SEQ ID NO: 108063 - DNA, 25 bp, Saccharomyces pastorianus
atgacatgggctgctgttctacaaa

SEQ ID NO: 108064 - DNA, 25 bp, Saccharomyces pastorianus
caatttccgcacctaaagctaacga

SEQ ID NO: 108065 - DNA, 25 bp, Saccharomyces pastorianus
aagccccagcttccatgaaatcgtt

SEQ ID NO: 108066 - DNA, 25 bp, Saccharomyces pastorianus
ttattcactggtttggctgttgcct

SEQ ID NO: 108067 - DNA, 25 bp, Saccharomyces pastorianus
tacccgcatatgtcttgatttcttt

SEQ ID NO: 108068 - DNA, 25 bp, Saccharomyces pastorianus
aaagtattacccctaagattcacag

SEQ ID NO: 108069 - DNA, 25 bp, Saccharomyces pastorianus
ctcgccgctttaactacgtagttct

SEQ ID NO: 108070 - DNA, 25 bp, Saccharomyces pastorianus
ttggctaagacattccgcacgcata

SEQ ID NO: 108071 - DNA, 25 bp, Saccharomyces pastorianus
gttctgatatctgacgacgacgcca

SEQ ID NO: 108072 - DNA, 25 bp, Saccharomyces pastorianus
actagagagtgccagcgaaccgcgt

SEQ ID NO: 108073 - DNA, 25 bp, Saccharomyces pastorianus
aaccacatactttgtctttgatgca

SEQ ID NO: 108074 - DNA, 25 bp, Saccharomyces pastorianus
aagatttgccatttgtttaaccaca

SEQ ID NO: 108075 - DNA, 25 bp, Saccharomyces pastorianus
gtctttgatgcaacttcttggctaa

SEQ ID NO: 108076 - DNA, 25 bp, Saccharomyces pastorianus
ttccgcacgcatattcaagctagct

SEQ ID NO: 108077 - DNA, 25 bp, Saccharomyces pastorianus
gtttaaccacattccaagagttgag

SEQ ID NO: 108078 - DNA, 25 bp, Saccharomyces pastorianus
tggaggctgccacaagaggtataat

SEQ ID NO: 108079 - DNA, 25 bp, Saccharomyces pastorianus
ggacactatacttctgttgtgaaca

SEQ ID NO: 108080 - DNA, 25 bp, Saccharomyces pastorianus
tttacctccgatacttgtcattcat

SEQ ID NO: 108081 - DNA, 25 bp, Saccharomyces pastorianus
gaacggtgaatcattccggtaacct

SEQ ID NO: 108082 - DNA, 25 bp, Saccharomyces pastorianus
ctgtctggcgacaatgcttgggatt

SEQ ID NO: 108083 - DNA, 25 bp, Saccharomyces pastorianus
ggtaaccttatcaatggacactata

SEQ ID NO: 108084 - DNA, 25 bp, Saccharomyces pastorianus
gcgatgaggtatacgtcttattcta

SEQ ID NO: 108085 - DNA, 25 bp, Saccharomyces pastorianus
tatacagcaacatcgcaaggatcgc

SEQ ID NO: 108086 - DNA, 25 bp, Saccharomyces pastorianus
gttttcattccagatcaaggtcaaa

SEQ ID NO: 108087 - DNA, 25 bp, Saccharomyces pastorianus
agcactgtaataacctatcctttga

SEQ ID NO: 108088 - DNA, 25 bp, Saccharomyces pastorianus
gatcgcaacaactttgaagccggca

SEQ ID NO: 108089 - DNA, 25 bp, Saccharomyces pastorianus
tagactttatagttttacctccgat

SEQ ID NO: 108090 - DNA, 25 bp, Saccharomyces pastorianus
tactacgaatccaaatcctccagtt

SEQ ID NO: 108091 - DNA, 25 bp, Saccharomyces pastorianus
aagatagcagcctaggttcccatag

SEQ ID NO: 108092 - DNA, 25 bp, Saccharomyces pastorianus
tatgacgtcaggaggttctaccgat

SEQ ID NO: 108093 - DNA, 25 bp, Saccharomyces pastorianus
gacggcatcatatacaacgagcggt

SEQ ID NO: 108094 - DNA, 25 bp, Saccharomyces pastorianus
gcgcatttcaactatttgccaccaa

SEQ ID NO: 108095 - DNA, 25 bp, Saccharomyces pastorianus
gttaagatccttggctactacgaat

SEQ ID NO: 108096 - DNA, 25 bp, Saccharomyces pastorianus
aatcatctcagcatcattctacatc

SEQ ID NO: 108097 - DNA, 25 bp, Saccharomyces pastorianus
tggtgccaagcctcaagtggtacat

SEQ ID NO: 108098 - DNA, 25 bp, Saccharomyces pastorianus
catccagatctgatactccattgag

SEQ ID NO: 108099 - DNA, 25 bp, Saccharomyces pastorianus
ggtacatcaagggattggctcacat

SEQ ID NO: 108100 - DNA, 25 bp, Saccharomyces pastorianus
gaaatgccacctgatgtaggtccta

SEQ ID NO: 108101 - DNA, 25 bp, Saccharomyces pastorianus
agttttgtgttcctgtgtccctatt

SEQ ID NO: 108102 - DNA, 25 bp, Saccharomyces pastorianus
ccgcgcttactgacactgctaaaag

SEQ ID NO: 108103 - DNA, 25 bp, Saccharomyces pastorianus
gagcctgacctcctttttcaagagg

SEQ ID NO: 108104 - DNA, 25 bp, Saccharomyces pastorianus
gacggatgcgacatttaactgctta

SEQ ID NO: 108105 - DNA, 25 bp, Saccharomyces pastorianus
aattcctacgaggtgcggacttcaa

SEQ ID NO: 108106 - DNA, 25 bp, Saccharomyces pastorianus
gtttcgccgaggtttttagtagcag

SEQ ID NO: 108107 - DNA, 25 bp, Saccharomyces pastorianus
aaatatcaagatcctatcccgctga

SEQ ID NO: 108108 - DNA, 25 bp, Saccharomyces pastorianus
gattaacccaaaggatccgcgctta

SEQ ID NO: 108109 - DNA, 25 bp, Saccharomyces pastorianus
aaatgtctttgcaaatggagcctga

SEQ ID NO: 108110 - DNA, 25 bp, Saccharomyces pastorianus
ggatttctaatcgacctagcagagg

SEQ ID NO: 108111 - DNA, 25 bp, Saccharomyces pastorianus
tcatcagcgtgccatgattgaccaa

SEQ ID NO: 108112 - DNA, 25 bp, Saccharomyces pastorianus
agatattatttcgaagcccttttat

SEQ ID NO: 108113 - DNA, 25 bp, Saccharomyces pastorianus
gtgtcagtttcaatcaatcggcatt

SEQ ID NO: 108114 - DNA, 25 bp, Saccharomyces pastorianus
atgcctctgctagtttacccaaaca

SEQ ID NO: 108115 - DNA, 25 bp, Saccharomyces pastorianus
tttctgtccatataaaaggcctcgg

SEQ ID NO: 108116 - DNA, 25 bp, Saccharomyces pastorianus
aatgttgcacgagcatctacctggc

SEQ ID NO: 108117 - DNA, 25 bp, Saccharomyces pastorianus
caatagtttgctgcgagacggtacc

SEQ ID NO: 108118 - DNA, 25 bp, Saccharomyces pastorianus
gaacgtctcctaaagatatcgccga

SEQ ID NO: 108119 - DNA, 25 bp, Saccharomyces pastorianus
atggcaccggccgactaataagttg

SEQ ID NO: 108120 - DNA, 25 bp, Saccharomyces pastorianus
ggctttttcaaaccccagctggaga

SEQ ID NO: 108121 - DNA, 25 bp, Saccharomyces pastorianus
catgggcagcacatgtatcctgtga

SEQ ID NO: 108122 - DNA, 25 bp, Saccharomyces pastorianus
tatggtccccatcctgagaatattg

SEQ ID NO: 108123 - DNA, 25 bp, Saccharomyces pastorianus
agcatgtccatatgtccatctagcg

SEQ ID NO: 108124 - DNA, 25 bp, Saccharomyces pastorianus
ggtactaactttaccttagcatgtc

SEQ ID NO: 108125 - DNA, 25 bp, Saccharomyces pastorianus
acgtccctgactaagcttttcaatg

SEQ ID NO: 108126 - DNA, 25 bp, Saccharomyces pastorianus
tggctatggatgcttgttctctgta

SEQ ID NO: 108127 - DNA, 25 bp, Saccharomyces pastorianus
gaatgatttgcttttacccgaggag

SEQ ID NO: 108128 - DNA, 25 bp, Saccharomyces pastorianus
ttgttctctgtagcctttttcaatg

SEQ ID NO: 108129 - DNA, 25 bp, Saccharomyces pastorianus
gggccgaccccaacattattagagt

SEQ ID NO: 108130 - DNA, 25 bp, Saccharomyces pastorianus
gagtacttcaggagcgctaatttcg

SEQ ID NO: 108131 - DNA, 25 bp, Saccharomyces pastorianus
catctagcgcaccactcagaattag

SEQ ID NO: 108132 - DNA, 25 bp, Saccharomyces pastorianus
atgggcggctctgtcgttttaaatc

SEQ ID NO: 108133 - DNA, 25 bp, Saccharomyces pastorianus
atcatctctgtatccatatgctcgt

SEQ ID NO: 108134 - DNA, 25 bp, Saccharomyces pastorianus
agagaattcacagcgccagggcggc

SEQ ID NO: 108135 - DNA, 25 bp, Saccharomyces pastorianus
ggtcagagttcatcctgtcttgaaa

SEQ ID NO: 108136 - DNA, 25 bp, Saccharomyces pastorianus
gcacacagacgtctcttacgagtta

SEQ ID NO: 108137 - DNA, 25 bp, Saccharomyces pastorianus
gcaagatttcttgagcacgcttcat

SEQ ID NO: 108138 - DNA, 25 bp, Saccharomyces pastorianus
tcgatatcatctggtggctggcaca

SEQ ID NO: 108139 - DNA, 25 bp, Saccharomyces pastorianus
agccaccttcttatactttctttag

SEQ ID NO: 108140 - DNA, 25 bp, Saccharomyces pastorianus
aagagcacctgtcacgcatattcat

SEQ ID NO: 108141 - DNA, 25 bp, Saccharomyces pastorianus
gacaggttgtcgaagcctttgcaag

SEQ ID NO: 108142 - DNA, 25 bp, Saccharomyces pastorianus
aaatgggaacctcattccgtcgtca

SEQ ID NO: 108143 - DNA, 25 bp, Saccharomyces pastorianus
atttgcggatacgatcgaggctttc

SEQ ID NO: 108144 - DNA, 25 bp, Saccharomyces pastorianus
cagacatgcgttcaggattactcca

SEQ ID NO: 108145 - DNA, 25 bp, Saccharomyces pastorianus
gaagttcggtgtccttatttgcgat

SEQ ID NO: 108146 - DNA, 25 bp, Saccharomyces pastorianus
tttgtgccttcatcgctacgttgat

SEQ ID NO: 108147 - DNA, 25 bp, Saccharomyces pastorianus
agagaaggactctcctcgcttttta

SEQ ID NO: 108148 - DNA, 25 bp, Saccharomyces pastorianus
agccatcttttggactttaccagca

SEQ ID NO: 108149 - DNA, 25 bp, Saccharomyces pastorianus
gcaccagccattttgttactgatcc

SEQ ID NO: 108150 - DNA, 25 bp, Saccharomyces pastorianus
gaaagcgaaaatccttcttccattg

SEQ ID NO: 108151 - DNA, 25 bp, Saccharomyces pastorianus
tttttacctgcctggattgttcaaa

SEQ ID NO: 108152 - DNA, 25 bp, Saccharomyces pastorianus
agcattggtgggatccatcgctgca

SEQ ID NO: 108153 - DNA, 25 bp, Saccharomyces pastorianus
tgcagctgctttaccatgggacaat

SEQ ID NO: 108154 - DNA, 25 bp, Saccharomyces pastorianus
gacattggtatcagttgccggtgct

SEQ ID NO: 108155 - DNA, 25 bp, Saccharomyces pastorianus
gttcaagtgcatctgggtacaccaa

SEQ ID NO: 108156 - DNA, 25 bp, Saccharomyces pastorianus
aagtattctcaagatctcctgcaac

SEQ ID NO: 108157 - DNA, 25 bp, Saccharomyces pastorianus
ataggcgccggatacagcgcgaatt

SEQ ID NO: 108158 - DNA, 25 bp, Saccharomyces pastorianus
gatctcctgcaactctttaatactt

SEQ ID NO: 108159 - DNA, 25 bp, Saccharomyces pastorianus
gaacgtgggagctcctgatgatatt

SEQ ID NO: 108160 - DNA, 25 bp, Saccharomyces pastorianus
catcgtctatatttccagggtctaa

SEQ ID NO: 108161 - DNA, 25 bp, Saccharomyces pastorianus
gcgaattccgatgtttcagtgcaat

SEQ ID NO: 108162 - DNA, 25 bp, Saccharomyces pastorianus
tttttgctagttgctttgacgatat

SEQ ID NO: 108163 - DNA, 25 bp, Saccharomyces pastorianus
gttaacggattcttccagttccaga

SEQ ID NO: 108164 - DNA, 25 bp, Saccharomyces pastorianus
ttctaaaccgtttcatcgactggaa

SEQ ID NO: 108165 - DNA, 25 bp, Saccharomyces pastorianus
atgcctggtcttaagcttgttgaag

SEQ ID NO: 108166 - DNA, 25 bp, Saccharomyces pastorianus
gttcgttggatcagatttccttcaa

SEQ ID NO: 108167 - DNA, 25 bp, Saccharomyces pastorianus
ggcagaggctatcttaaccaacaat

SEQ ID NO: 108168 - DNA, 25 bp, Saccharomyces pastorianus
acaatactctaccattacttgcctt

SEQ ID NO: 108169 - DNA, 25 bp, Saccharomyces pastorianus
ttttgaatactatctccagtcccca

SEQ ID NO: 108170 - DNA, 25 bp, Saccharomyces pastorianus
aaggcttcgccggtgtgaaactcgt

SEQ ID NO: 108171 - DNA, 25 bp, Saccharomyces pastorianus
atccaccaattctcttcttacaaag

SEQ ID NO: 108172 - DNA, 25 bp, Saccharomyces pastorianus
tttggcaaggtcttcatttgtcgat

SEQ ID NO: 108173 - DNA, 25 bp, Saccharomyces pastorianus
tcctccttcttgtttctgttcattt

SEQ ID NO: 108174 - DNA, 25 bp, Saccharomyces pastorianus
gttcatttttctaggcagaggctat

SEQ ID NO: 108175 - DNA, 25 bp, Saccharomyces pastorianus
cagtccccaggttgtcaaacttgat

SEQ ID NO: 108176 - DNA, 25 bp, Saccharomyces pastorianus
tgccttccgacctttaaattctcga

SEQ ID NO: 108177 - DNA, 25 bp, Saccharomyces pastorianus
tatttttgtattttctcctccttct

SEQ ID NO: 108178 - DNA, 25 bp, Saccharomyces pastorianus
atcgaatcgctgcttgatgttcaag

SEQ ID NO: 108179 - DNA, 25 bp, Saccharomyces pastorianus
ggccctttgccaagatgttcatttg

SEQ ID NO: 108180 - DNA, 25 bp, Saccharomyces pastorianus
tgcaatcgttgtatgactcccagat

SEQ ID NO: 108181 - DNA, 25 bp, Saccharomyces pastorianus
ttttgcgtttaatacctactcgaca

SEQ ID NO: 108182 - DNA, 25 bp, Saccharomyces pastorianus
gagcccttactacttttgcgaatat

SEQ ID NO: 108183 - DNA, 25 bp, Saccharomyces pastorianus
tttggtattctttccatccatgcga

SEQ ID NO: 108184 - DNA, 25 bp, Saccharomyces pastorianus
ggatactatcactaacctggaaggt

SEQ ID NO: 108185 - DNA, 25 bp, Saccharomyces pastorianus
atgctcccaactgatatcgaatcgc

SEQ ID NO: 108186 - DNA, 25 bp, Saccharomyces pastorianus
gatttttcataactgggccctttgc

SEQ ID NO: 108187 - DNA, 25 bp, Saccharomyces pastorianus
agtggcatagccaactgcaatcgtt

SEQ ID NO: 108188 - DNA, 25 bp, Saccharomyces pastorianus
gaccaggctgagttcatgtcaactt

SEQ ID NO: 108189 - DNA, 25 bp, Saccharomyces pastorianus
tccattaccccacatgtttattgtc

SEQ ID NO: 108190 - DNA, 25 bp, Saccharomyces pastorianus
atctgaatgactgtgggcccatggt

SEQ ID NO: 108191 - DNA, 25 bp, Saccharomyces pastorianus
gcccatggtacttgatgcgctgtta

SEQ ID NO: 108192 - DNA, 25 bp, Saccharomyces pastorianus
ggcggtagaaacacgctagcttgta

SEQ ID NO: 108193 - DNA, 25 bp, Saccharomyces pastorianus
aatgtattctgtgtgcatgctgctc

SEQ ID NO: 108194 - DNA, 25 bp, Saccharomyces pastorianus
gaaaggccatgctaaacaactccat

SEQ ID NO: 108195 - DNA, 25 bp, Saccharomyces pastorianus
aagaacagtatttgggccctgccgt

SEQ ID NO: 108196 - DNA, 25 bp, Saccharomyces pastorianus
gacgaacaggattctaccctaactt

SEQ ID NO: 108197 - DNA, 25 bp, Saccharomyces pastorianus
cctaccgttggctaattgactctag

SEQ ID NO: 108198 - DNA, 25 bp, Saccharomyces pastorianus
gaactgtactagaacttgtccaaag

SEQ ID NO: 108199 - DNA, 25 bp, Saccharomyces pastorianus
tgccgtgctaatgcaagcctaccgt

SEQ ID NO: 108200 - DNA, 25 bp, Saccharomyces pastorianus
tattattagccctttactctccgga

SEQ ID NO: 108201 - DNA, 25 bp, Saccharomyces pastorianus
caaactgtggtttgctttgacctaa

SEQ ID NO: 108202 - DNA, 25 bp, Saccharomyces pastorianus
tgttgagtacagcagcggtgcccta

SEQ ID NO: 108203 - DNA, 25 bp, Saccharomyces pastorianus
aggagagcgccctttgtttgcaaag

SEQ ID NO: 108204 - DNA, 25 bp, Saccharomyces pastorianus
aagctctagattccccgtagatgaa

SEQ ID NO: 108205 - DNA, 25 bp, Saccharomyces pastorianus
gtttacaacttgtcatcacctgacc

SEQ ID NO: 108206 - DNA, 25 bp, Saccharomyces pastorianus
atccaacttacacaatcccagaatt

SEQ ID NO: 108207 - DNA, 25 bp, Saccharomyces pastorianus
aaaggatgtcggcacgctagcgtat

SEQ ID NO: 108208 - DNA, 25 bp, Saccharomyces pastorianus
gacactgccgatttcactgatatgg

SEQ ID NO: 108209 - DNA, 25 bp, Saccharomyces pastorianus
ggtattgccgctattctgaagacaa

SEQ ID NO: 108210 - DNA, 25 bp, Saccharomyces pastorianus
gggcaccgttacctatgacattgac

SEQ ID NO: 108211 - DNA, 25 bp, Saccharomyces pastorianus
ggatctatcggttggcgtatctggc

SEQ ID NO: 108212 - DNA, 25 bp, Saccharomyces pastorianus
ttcaggcgctgacttggctgcttta

SEQ ID NO: 108213 - DNA, 25 bp, Saccharomyces pastorianus
gaactggacgctttggtgccaagaa

SEQ ID NO: 108214 - DNA, 25 bp, Saccharomyces pastorianus
gggagagttcagtcttggctctaaa

SEQ ID NO: 108215 - DNA, 25 bp, Saccharomyces pastorianus
aatcacacggaacacctctgagtag

SEQ ID NO: 108216 - DNA, 25 bp, Saccharomyces pastorianus
gattggcgccactaatagacctgat

SEQ ID NO: 108217 - DNA, 25 bp, Saccharomyces pastorianus
gaccgggcagattggataagacttt

SEQ ID NO: 108218 - DNA, 25 bp, Saccharomyces pastorianus
agtgcaacaatttttcaggcgctga

SEQ ID NO: 108219 - DNA, 25 bp, Saccharomyces pastorianus
gagatacttctttgtccgaatcctc

SEQ ID NO: 108220 - DNA, 25 bp, Saccharomyces pastorianus
gaatcctcctcaagagtcgtcaaca

SEQ ID NO: 108221 - DNA, 25 bp, Saccharomyces pastorianus
aagattaaaccctctgtgagcgata

SEQ ID NO: 108222 - DNA, 25 bp, Saccharomyces pastorianus
aagcttgagcttctcagcaacacga

SEQ ID NO: 108223 - DNA, 25 bp, Saccharomyces pastorianus
gaaaactacttctagtccgctaact

SEQ ID NO: 108224 - DNA, 25 bp, Saccharomyces pastorianus
gaggcttaagcctttcatatcgaat

SEQ ID NO: 108225 - DNA, 25 bp, Saccharomyces pastorianus
cttggtattcaatcctgatggcttg

SEQ ID NO: 108226 - DNA, 25 bp, Saccharomyces pastorianus
aagctagatgcagactcacctgaga

SEQ ID NO: 108227 - DNA, 25 bp, Saccharomyces pastorianus
gcattctaaataccaacttccttca

SEQ ID NO: 108228 - DNA, 25 bp, Saccharomyces pastorianus
gttgttaagctattttaccgccgat

SEQ ID NO: 108229 - DNA, 25 bp, Saccharomyces pastorianus
atactccccgtgactgagatgcaaa

SEQ ID NO: 108230 - DNA, 25 bp, Saccharomyces pastorianus
tgttgtgaaaggatactccccgtga

SEQ ID NO: 108231 - DNA, 25 bp, Saccharomyces pastorianus
gcttgacgtcaaattctctcatttg

SEQ ID NO: 108232 - DNA, 25 bp, Saccharomyces pastorianus
gaagagctgttcatacttgcccgaa

SEQ ID NO: 108233 - DNA, 25 bp, Saccharomyces pastorianus
agagccattctgtgcttccaaaggt

SEQ ID NO: 108234 - DNA, 25 bp, Saccharomyces pastorianus
aaatgaggttggtccgcttgtctga

SEQ ID NO: 108235 - DNA, 25 bp, Saccharomyces pastorianus
ggcttccataaaatcacgcgttgct

SEQ ID NO: 108236 - DNA, 25 bp, Saccharomyces pastorianus
gagctgcttattttcattttggtcc

SEQ ID NO: 108237 - DNA, 25 bp, Saccharomyces pastorianus
attttggtccttttcagagccattc

SEQ ID NO: 108238 - DNA, 25 bp, Saccharomyces pastorianus
atacttgttgtgtacgccatcttta

SEQ ID NO: 108239 - DNA, 25 bp, Saccharomyces pastorianus
aagtaagatcctcagcttcatcgac

SEQ ID NO: 108240 - DNA, 25 bp, Saccharomyces pastorianus
ttttcgcgtttgctgtattccatgt

SEQ ID NO: 108241 - DNA, 25 bp, Saccharomyces pastorianus
ttgtgcatgcactgggtcggtactg

SEQ ID NO: 108242 - DNA, 25 bp, Saccharomyces pastorianus
attcagcttaatcccatttttcgcg

SEQ ID NO: 108243 - DNA, 25 bp, Saccharomyces pastorianus
agccgcctttgctcaatggagagtt

SEQ ID NO: 108244 - DNA, 25 bp, Saccharomyces pastorianus
aacttcgcaagtctggtttccacat

SEQ ID NO: 108245 - DNA, 25 bp, Saccharomyces pastorianus
agcatgccaaggctctgcttgaaaa

SEQ ID NO: 108246 - DNA, 25 bp, Saccharomyces pastorianus
atcaggtgccggctaaggacaaact

SEQ ID NO: 108247 - DNA, 25 bp, Saccharomyces pastorianus
gaaaatcagcagcacggctccaaga

SEQ ID NO: 108248 - DNA, 25 bp, Saccharomyces pastorianus
tacttgaaggcgcttggctattaca

SEQ ID NO: 108249 - DNA, 25 bp, Saccharomyces pastorianus
aaagccccttggtgacttcaatgat

SEQ ID NO: 108250 - DNA, 25 bp, Saccharomyces pastorianus
ggcaaggctcgcacagattcaagac

SEQ ID NO: 108251 - DNA, 25 bp, Saccharomyces pastorianus
gcagatggccaatctctaaccgaga

SEQ ID NO: 108252 - DNA, 25 bp, Saccharomyces pastorianus
gagaatgctttggacctactggcgc

SEQ ID NO: 108253 - DNA, 25 bp, Saccharomyces pastorianus
tacaagaccttgaaacccgcagaac

SEQ ID NO: 108254 - DNA, 25 bp, Saccharomyces pastorianus
gaacagcagattgcgcatcggtgat

SEQ ID NO: 108255 - DNA, 25 bp, Saccharomyces pastorianus
gatagtgggtgttctcgttctactt

SEQ ID NO: 108256 - DNA, 25 bp, Saccharomyces pastorianus
tagtgggtgttctcgttctactttt

SEQ ID NO: 108257 - DNA, 25 bp, Saccharomyces pastorianus
tttcacatcttttactagttccgtt

SEQ ID NO: 108258 - DNA, 25 bp, Saccharomyces pastorianus
ggatagtgggtgttctcgttctact

SEQ ID NO: 108259 - DNA, 25 bp, Saccharomyces pastorianus
aggatagtgggtgttctcgttctac

SEQ ID NO: 108260 - DNA, 25 bp, Saccharomyces pastorianus
atagtgggtgttctcgttctacttt

SEQ ID NO: 108261 - DNA, 25 bp, Saccharomyces pastorianus
caaggatagtgggtgttctcgttct

SEQ ID NO: 108262 - DNA, 25 bp, Saccharomyces pastorianus
aaggatagtgggtgttctcgttcta

SEQ ID NO: 108263 - DNA, 25 bp, Saccharomyces pastorianus
ttcacatcttttactagttccgttt

SEQ ID NO: 108264 - DNA, 25 bp, Saccharomyces pastorianus
tttttcacatcttttactagttccg

SEQ ID NO: 108265 - DNA, 25 bp, Saccharomyces pastorianus
tcacatcttttactagttccgtttt

SEQ ID NO: 108266 - DNA, 25 bp, Saccharomyces pastorianus
gcaaaggacgctctggaccatgaat

SEQ ID NO: 108267 - DNA, 25 bp, Saccharomyces pastorianus
tgaactcgataaggaaactttcttg

SEQ ID NO: 108268 - DNA, 25 bp, Saccharomyces pastorianus
tgcaacttataataatacccaagga

SEQ ID NO: 108269 - DNA, 25 bp, Saccharomyces pastorianus
cgctctggaccatgaatggtttaat

SEQ ID NO: 108270 - DNA, 25 bp, Saccharomyces pastorianus
ggttcatcgatctactcaggaaaat

SEQ ID NO: 108271 - DNA, 25 bp, Saccharomyces pastorianus
atcgatctactcaggaaaatgtttg

SEQ ID NO: 108272 - DNA, 25 bp, Saccharomyces pastorianus
gtactggttcatcgatctactcagg

SEQ ID NO: 108273 - DNA, 25 bp, Saccharomyces pastorianus
tgagttcgacccaacaaaaaggatt

SEQ ID NO: 108274 - DNA, 25 bp, Saccharomyces pastorianus
gaaaatgtttgagttcgacccaaca

SEQ ID NO: 108275 - DNA, 25 bp, Saccharomyces pastorianus
actggatgatggtattgcaacttat

SEQ ID NO: 108276 - DNA, 25 bp, Saccharomyces pastorianus
aaggattaccgcaaaggacgctctg

SEQ ID NO: 108277 - DNA, 25 bp, Saccharomyces pastorianus
accaaacgtgccttggcccaatagg

SEQ ID NO: 108278 - DNA, 25 bp, Saccharomyces pastorianus
tggcccaataggtccttcacaacaa

SEQ ID NO: 108279 - DNA, 25 bp, Saccharomyces pastorianus
gcccaataggtccttcacaacaaag

SEQ ID NO: 108280 - DNA, 25 bp, Saccharomyces pastorianus
ggcccaataggtccttcacaacaaa

SEQ ID NO: 108281 - DNA, 25 bp, Saccharomyces pastorianus
ttggcccaataggtccttcacaaca

SEQ ID NO: 108282 - DNA, 25 bp, Saccharomyces pastorianus
aataggtccttcacaacaaagcggc

SEQ ID NO: 108283 - DNA, 25 bp, Saccharomyces pastorianus
taccaaacgtgccttggcccaatag

SEQ ID NO: 108284 - DNA, 25 bp, Saccharomyces pastorianus
taagtactttaccaaacgtgccttg

SEQ ID NO: 108285 - DNA, 25 bp, Saccharomyces pastorianus
taggtccttcacaacaaagcggccg

SEQ ID NO: 108286 - DNA, 25 bp, Saccharomyces pastorianus
caaacgtgccttggcccaataggtc

SEQ ID NO: 108287 - DNA, 25 bp, Saccharomyces pastorianus
tttaccaaacgtgccttggcccaat

SEQ ID NO: 108288 - DNA, 25 bp, Saccharomyces pastorianus
agggaacccaggaagctcgctgagc

SEQ ID NO: 108289 - DNA, 25 bp, Saccharomyces pastorianus
gagagaggttcgttcccgctagacc

SEQ ID NO: 108290 - DNA, 25 bp, Saccharomyces pastorianus
agacctactccacccgagagaggtt

SEQ ID NO: 108291 - DNA, 25 bp, Saccharomyces pastorianus
tcgctgagcgcattgagacctactc

SEQ ID NO: 108292 - DNA, 25 bp, Saccharomyces pastorianus
ctggcaaaggactacctgcggtgca

SEQ ID NO: 108293 - DNA, 25 bp, Saccharomyces pastorianus
ggaccaccaattgatggactacgat

SEQ ID NO: 108294 - DNA, 25 bp, Saccharomyces pastorianus
aatggtcacatttaggtcttcctga

SEQ ID NO: 108295 - DNA, 25 bp, Saccharomyces pastorianus
ctgcggtgcaggatggaccaccaat

SEQ ID NO: 108296 - DNA, 25 bp, Saccharomyces pastorianus
gtatctcaaatgtatgcagcttgtg

SEQ ID NO: 108297 - DNA, 25 bp, Saccharomyces pastorianus
gaccacgacggcgaatgcaccaagt

SEQ ID NO: 108298 - DNA, 25 bp, Saccharomyces pastorianus
tgaggatgctccaggcaacaacggt

SEQ ID NO: 108299 - DNA, 25 bp, Saccharomyces pastorianus
ttcttgggtaagttggttcgcgaca

SEQ ID NO: 108300 - DNA, 25 bp, Saccharomyces pastorianus
tccacgaccatgctctattacaaga

SEQ ID NO: 108301 - DNA, 25 bp, Saccharomyces pastorianus
gtttgtctcctgaagacccaggttt

SEQ ID NO: 108302 - DNA, 25 bp, Saccharomyces pastorianus
tttacatcctagacaagttcccctt

SEQ ID NO: 108303 - DNA, 25 bp, Saccharomyces pastorianus
gaagaaatcttgtccggtgcacaac

SEQ ID NO: 108304 - DNA, 25 bp, Saccharomyces pastorianus
gacggcttcagctatgggtgtcctc

SEQ ID NO: 108305 - DNA, 25 bp, Saccharomyces pastorianus
ttaaaggactactgtgacggcttca

SEQ ID NO: 108306 - DNA, 25 bp, Saccharomyces pastorianus
aatacgacaccgacttttacatcct

SEQ ID NO: 108307 - DNA, 25 bp, Saccharomyces pastorianus
cagccaaccctaagtattctaactc

SEQ ID NO: 108308 - DNA, 25 bp, Saccharomyces pastorianus
gatgaaagcccatggtttgtctcct

SEQ ID NO: 108309 - DNA, 25 bp, Saccharomyces pastorianus
gtacgtaagcaataccctgttgaag

SEQ ID NO: 108310 - DNA, 25 bp, Saccharomyces pastorianus
agaacaagaaaaccacgcggagtgc

SEQ ID NO: 108311 - DNA, 25 bp, Saccharomyces pastorianus
agccatgttgcgtctgtaagccaga

SEQ ID NO: 108312 - DNA, 25 bp, Saccharomyces pastorianus
aaacctaagccatgttgcgtctgta

SEQ ID NO: 108313 - DNA, 25 bp, Saccharomyces pastorianus
cttattcaatggacaagactctgaa

SEQ ID NO: 108314 - DNA, 25 bp, Saccharomyces pastorianus
gtgcgaggacaaacctaagccatgt

SEQ ID NO: 108315 - DNA, 25 bp, Saccharomyces pastorianus
aaaccacgcggagtgcgaggacaaa

SEQ ID NO: 108316 - DNA, 25 bp, Saccharomyces pastorianus
gttgcgtctgtaagccagaaaagga

SEQ ID NO: 108317 - DNA, 25 bp, Saccharomyces pastorianus
gcgggatacatgcatcttattcaat

SEQ ID NO: 108318 - DNA, 25 bp, Saccharomyces pastorianus
ggaggagcgggatacatgcatctta

SEQ ID NO: 108319 - DNA, 25 bp, Saccharomyces pastorianus
acatgcatcttattcaatggacaag

SEQ ID NO: 108320 - DNA, 25 bp, Saccharomyces pastorianus
agactctgaaaaatgcaaggaattc

SEQ ID NO: 108321 - DNA, 25 bp, Saccharomyces pastorianus
gtccaggttctgaggcattagctaa

SEQ ID NO: 108322 - DNA, 25 bp, Saccharomyces pastorianus
gagaacccactgaatcctgaagctg

SEQ ID NO: 108323 - DNA, 25 bp, Saccharomyces pastorianus
agaacttactacaccgagtcgtcgg

SEQ ID NO: 108324 - DNA, 25 bp, Saccharomyces pastorianus
atttgaacgttcgtcaggacatcat

SEQ ID NO: 108325 - DNA, 25 bp, Saccharomyces pastorianus
aagtctacttcctcatagtttcaga

SEQ ID NO: 108326 - DNA, 25 bp, Saccharomyces pastorianus
cgatttaccttatctattcgacaat

SEQ ID NO: 108327 - DNA, 25 bp, Saccharomyces pastorianus
aggacatcatagtgcctccacctga

SEQ ID NO: 108328 - DNA, 25 bp, Saccharomyces pastorianus
aaattgatatctccattccagcatg

SEQ ID NO: 108329 - DNA, 25 bp, Saccharomyces pastorianus
aagctggcacgcctaaagtctactt

SEQ ID NO: 108330 - DNA, 25 bp, Saccharomyces pastorianus
aaccacgcaaatttattagccagag

SEQ ID NO: 108331 - DNA, 25 bp, Saccharomyces pastorianus
gtcgtcggacgagcagtaatgttta

SEQ ID NO: 108332 - DNA, 25 bp, Saccharomyces pastorianus
gttgcatctcattttcgatggtttt

SEQ ID NO: 108333 - DNA, 25 bp, Saccharomyces pastorianus
tctaacagtaatcacgcacgccaaa

SEQ ID NO: 108334 - DNA, 25 bp, Saccharomyces pastorianus
tatcctatattctcagtgttgggct

SEQ ID NO: 108335 - DNA, 25 bp, Saccharomyces pastorianus
acaggcccttatgcaattgtacgcg

SEQ ID NO: 108336 - DNA, 25 bp, Saccharomyces pastorianus
ataatgcttgttgtctttgctctaa

SEQ ID NO: 108337 - DNA, 25 bp, Saccharomyces pastorianus
actcgggctgttcactctttttgat

SEQ ID NO: 108338 - DNA, 25 bp, Saccharomyces pastorianus
gtttccatgatattttctccatttg

SEQ ID NO: 108339 - DNA, 25 bp, Saccharomyces pastorianus
gtacgcgggcatttatttcatggaa

SEQ ID NO: 108340 - DNA, 25 bp, Saccharomyces pastorianus
gcctcaacgcataccaactttggaa

SEQ ID NO: 108341 - DNA, 25 bp, Saccharomyces pastorianus
tggagaagtcgtatcacctgaaatt

SEQ ID NO: 108342 - DNA, 25 bp, Saccharomyces pastorianus
atggaattttgtttactcgggctgt

SEQ ID NO: 108343 - DNA, 25 bp, Saccharomyces pastorianus
aagtttgttgctcgattcctcgaag

SEQ ID NO: 108344 - DNA, 25 bp, Saccharomyces pastorianus
ggatcggcttcattttgaacccatt

SEQ ID NO: 108345 - DNA, 25 bp, Saccharomyces pastorianus
aatggctccggtactgggtcagcta

SEQ ID NO: 108346 - DNA, 25 bp, Saccharomyces pastorianus
aaacaccggacgcatttgacaaagt

SEQ ID NO: 108347 - DNA, 25 bp, Saccharomyces pastorianus
gtcgattttcccttcttacaagtca

SEQ ID NO: 108348 - DNA, 25 bp, Saccharomyces pastorianus
tcctatctagatcgttggtcagcat

SEQ ID NO: 108349 - DNA, 25 bp, Saccharomyces pastorianus
aggtgctgccttcgcttgataaaga

SEQ ID NO: 108350 - DNA, 25 bp, Saccharomyces pastorianus
ataagaaaagatccctccaacacca

SEQ ID NO: 108351 - DNA, 25 bp, Saccharomyces pastorianus
tcttcgcctttgaaaacatgggtct

SEQ ID NO: 108352 - DNA, 25 bp, Saccharomyces pastorianus
gtggattacttactcagtcgatttt

SEQ ID NO: 108353 - DNA, 25 bp, Saccharomyces pastorianus
gcttattggcaaactagactcctat

SEQ ID NO: 108354 - DNA, 25 bp, Saccharomyces pastorianus
gtgtcacatcatctgtaatgggtat

SEQ ID NO: 108355 - DNA, 25 bp, Saccharomyces pastorianus
gtgccgatgttattgtaccgaagtc

SEQ ID NO: 108356 - DNA, 25 bp, Saccharomyces pastorianus
tattcgtgattttctattgctcaga

SEQ ID NO: 108357 - DNA, 25 bp, Saccharomyces pastorianus
gaaggcgcaatagaagctttcacca

SEQ ID NO: 108358 - DNA, 25 bp, Saccharomyces pastorianus
agtaagcttatcatccttctggatt

SEQ ID NO: 108359 - DNA, 25 bp, Saccharomyces pastorianus
ggtatttcgggatactctcttgcca

SEQ ID NO: 108360 - DNA, 25 bp, Saccharomyces pastorianus
agatcgcctcctcaaagtaagctta

SEQ ID NO: 108361 - DNA, 25 bp, Saccharomyces pastorianus
catctttatttccatctagtgccga

SEQ ID NO: 108362 - DNA, 25 bp, Saccharomyces pastorianus
gataccgggcgaagatcctgctcga

SEQ ID NO: 108363 - DNA, 25 bp, Saccharomyces pastorianus
gaaatcagccggttcctgcaagcaa

SEQ ID NO: 108364 - DNA, 25 bp, Saccharomyces pastorianus
tcctgctcgagtaagatcataccta

SEQ ID NO: 108365 - DNA, 25 bp, Saccharomyces pastorianus
aaattcgtcgatgggctttacgcgc

SEQ ID NO: 108366 - DNA, 25 bp, Saccharomyces pastorianus
tgctgaggtccgtaaggctttgctt

SEQ ID NO: 108367 - DNA, 25 bp, Saccharomyces pastorianus
ggagtaacccagaggcagcaacctt

SEQ ID NO: 108368 - DNA, 25 bp, Saccharomyces pastorianus
gaacttctgctaaaggctctggacc

SEQ ID NO: 108369 - DNA, 25 bp, Saccharomyces pastorianus
ttgtacatgtgcatcagccataccc

SEQ ID NO: 108370 - DNA, 25 bp, Saccharomyces pastorianus
taaggttggctgacccactcaataa

SEQ ID NO: 108371 - DNA, 25 bp, Saccharomyces pastorianus
ggctctggaccatatatttttccgc

SEQ ID NO: 108372 - DNA, 25 bp, Saccharomyces pastorianus
atttttccgctctaaatcagggact

SEQ ID NO: 108373 - DNA, 25 bp, Saccharomyces pastorianus
ggctacggcgtttaccaaaagattg

SEQ ID NO: 108374 - DNA, 25 bp, Saccharomyces pastorianus
tcaggcctttactcttccgaagata

SEQ ID NO: 108375 - DNA, 25 bp, Saccharomyces pastorianus
tgaattcgataacctttcctctgct

SEQ ID NO: 108376 - DNA, 25 bp, Saccharomyces pastorianus
taagggtttcacactcgtaaagatg

SEQ ID NO: 108377 - DNA, 25 bp, Saccharomyces pastorianus
gttgccagtcaagatttcccatact

SEQ ID NO: 108378 - DNA, 25 bp, Saccharomyces pastorianus
ctactgacaagttctcgctatcgtt

SEQ ID NO: 108379 - DNA, 25 bp, Saccharomyces pastorianus
ccacagtctgtccatgttgtgactt

SEQ ID NO: 108380 - DNA, 25 bp, Saccharomyces pastorianus
gtgacttgatgctaatcctttctac

SEQ ID NO: 108381 - DNA, 25 bp, Saccharomyces pastorianus
ggatacttctgtcccaattgtcata

SEQ ID NO: 108382 - DNA, 25 bp, Saccharomyces pastorianus
tactccaactttttgttcgtgccat

SEQ ID NO: 108383 - DNA, 25 bp, Saccharomyces pastorianus
tattcaacgaggctgttaccccttt

SEQ ID NO: 108384 - DNA, 25 bp, Saccharomyces pastorianus
tgtgttgactgcgatgtgttcatcc

SEQ ID NO: 108385 - DNA, 25 bp, Saccharomyces pastorianus
gatcatatcaccatctgatgccgtt

SEQ ID NO: 108386 - DNA, 25 bp, Saccharomyces pastorianus
gttcgtgccattccaagttagttta

SEQ ID NO: 108387 - DNA, 25 bp, Saccharomyces pastorianus
gttctgccgttctaaatgtcacaag

SEQ ID NO: 108388 - DNA, 25 bp, Saccharomyces pastorianus
aatagagagttagttgccacaactt

SEQ ID NO: 108389 - DNA, 25 bp, Saccharomyces pastorianus
aggttctgccgttctaaatgtcaca

SEQ ID NO: 108390 - DNA, 25 bp, Saccharomyces pastorianus
gaatcagggaagttgaaattgccag

SEQ ID NO: 108391 - DNA, 25 bp, Saccharomyces pastorianus
gtatccgaacaagaggaatctgaag

SEQ ID NO: 108392 - DNA, 25 bp, Saccharomyces pastorianus
gaaattgccagaaagttggctaaag

SEQ ID NO: 108393 - DNA, 25 bp, Saccharomyces pastorianus
tgtccctgttagatacaatagagag

SEQ ID NO: 108394 - DNA, 25 bp, Saccharomyces pastorianus
gaggatatggaaatcgacagtgacg

SEQ ID NO: 108395 - DNA, 25 bp, Saccharomyces pastorianus
ggctatggctagaatcgaagaaatt

SEQ ID NO: 108396 - DNA, 25 bp, Saccharomyces pastorianus
gagctgaatcagtatccgaacaaga

SEQ ID NO: 108397 - DNA, 25 bp, Saccharomyces pastorianus
taaagagtttaggttctgccgttct

SEQ ID NO: 108398 - DNA, 25 bp, Saccharomyces pastorianus
aaccaaacattattcatccgtccga

SEQ ID NO: 108399 - DNA, 25 bp, Saccharomyces pastorianus
atgagccagttagttctagacttaa

SEQ ID NO: 108400 - DNA, 25 bp, Saccharomyces pastorianus
gaaagattattctcagcccataaag

SEQ ID NO: 108401 - DNA, 25 bp, Saccharomyces pastorianus
attcaggatggttgttcgattagta

SEQ ID NO: 108402 - DNA, 25 bp, Saccharomyces pastorianus
atttcttgttctgtgaatcggatga

SEQ ID NO: 108403 - DNA, 25 bp, Saccharomyces pastorianus
tggaatacaccaaagtccgccaatt

SEQ ID NO: 108404 - DNA, 25 bp, Saccharomyces pastorianus
gaaatcttcattgcctcaattcaac

SEQ ID NO: 108405 - DNA, 25 bp, Saccharomyces pastorianus
tgggcaggtactggatgttcgcatt

SEQ ID NO: 108406 - DNA, 25 bp, Saccharomyces pastorianus
attcatccgtccgaaagattcagga

SEQ ID NO: 108407 - DNA, 25 bp, Saccharomyces pastorianus
gacgttcgtgatttctgtgaatttg

SEQ ID NO: 108408 - DNA, 25 bp, Saccharomyces pastorianus
tactatccaggaatgacgttcgtga

SEQ ID NO: 108409 - DNA, 25 bp, Saccharomyces pastorianus
aacagattgctcttcccttatatga

SEQ ID NO: 108410 - DNA, 25 bp, Saccharomyces pastorianus
gcaattgatcgtctttaccatgaat

SEQ ID NO: 108411 - DNA, 25 bp, Saccharomyces pastorianus
gggtatccagcagccttaaaaaatg

SEQ ID NO: 108412 - DNA, 25 bp, Saccharomyces pastorianus
aactcgatcgtggagtcgcatcgta

SEQ ID NO: 108413 - DNA, 25 bp, Saccharomyces pastorianus
gagggtatgcccagaaattgcagca

SEQ ID NO: 108414 - DNA, 25 bp, Saccharomyces pastorianus
atgcagacagcaaaactcgatcgtg

SEQ ID NO: 108415 - DNA, 25 bp, Saccharomyces pastorianus
gatgatgacgaactgatccctgcgc

SEQ ID NO: 108416 - DNA, 25 bp, Saccharomyces pastorianus
ggacattgtaccacaactcagcgtg

SEQ ID NO: 108417 - DNA, 25 bp, Saccharomyces pastorianus
tacgataccgttacccgaggacatt

SEQ ID NO: 108418 - DNA, 25 bp, Saccharomyces pastorianus
gaactgatccctgcgcaaataaaga

SEQ ID NO: 108419 - DNA, 25 bp, Saccharomyces pastorianus
gaaaacctgccctggtggtaagcta

SEQ ID NO: 108420 - DNA, 25 bp, Saccharomyces pastorianus
tagactgcgaaaaacctcactctca

SEQ ID NO: 108421 - DNA, 25 bp, Saccharomyces pastorianus
agatgtccacagtgtgcggtgataa

SEQ ID NO: 108422 - DNA, 25 bp, Saccharomyces pastorianus
ttggtttttggcaaggatctggcaa

SEQ ID NO: 108423 - DNA, 25 bp, Saccharomyces pastorianus
actgctaaacccattagtgcatctt

SEQ ID NO: 108424 - DNA, 25 bp, Saccharomyces pastorianus
aaaggcgtcaccaggagatgtccac

SEQ ID NO: 108425 - DNA, 25 bp, Saccharomyces pastorianus
agtgcatctttgtatgtcacaacga

SEQ ID NO: 108426 - DNA, 25 bp, Saccharomyces pastorianus
gctgttgttcagcacaatgtccaaa

SEQ ID NO: 108427 - DNA, 25 bp, Saccharomyces pastorianus
ggtgataaaaacttctccgcaatgg

SEQ ID NO: 108428 - DNA, 25 bp, Saccharomyces pastorianus
gaatctccgttgaatcgttattgaa

SEQ ID NO: 108429 - DNA, 25 bp, Saccharomyces pastorianus
gatctggcaaaacggtactttaacg

SEQ ID NO: 108430 - DNA, 25 bp, Saccharomyces pastorianus
agactttgtgtcatccagaatataa

SEQ ID NO: 108431 - DNA, 25 bp, Saccharomyces pastorianus
gaggcagaacctgttaccgtagaaa

SEQ ID NO: 108432 - DNA, 25 bp, Saccharomyces pastorianus
aagatcatcgtctcaatggccaagg

SEQ ID NO: 108433 - DNA, 25 bp, Saccharomyces pastorianus
taccgtaccagaggctatgtccaag

SEQ ID NO: 108434 - DNA, 25 bp, Saccharomyces pastorianus
acagccgttctctcaaaaattcgca

SEQ ID NO: 108435 - DNA, 25 bp, Saccharomyces pastorianus
taggtcacgttggtttcggacagcc

SEQ ID NO: 108436 - DNA, 25 bp, Saccharomyces pastorianus
agaaatctatctctaccgtaccaga

SEQ ID NO: 108437 - DNA, 25 bp, Saccharomyces pastorianus
aagcctagagattttgtgttaccac

SEQ ID NO: 108438 - DNA, 25 bp, Saccharomyces pastorianus
gaccgttgtgtgtatggaaggccca

SEQ ID NO: 108439 - DNA, 25 bp, Saccharomyces pastorianus
gaatccgaagaaccgtgccatttgc

SEQ ID NO: 108440 - DNA, 25 bp, Saccharomyces pastorianus
tgagctgccttaccagatgatttgt

SEQ ID NO: 108441 - DNA, 25 bp, Saccharomyces pastorianus
ttcatgcatactggcgatgggctgc

SEQ ID NO: 108442 - DNA, 25 bp, Saccharomyces pastorianus
ggcatagcggtatcagtagcacatt

SEQ ID NO: 108443 - DNA, 25 bp, Saccharomyces pastorianus
aagctcttatccaccgtcaaagtaa

SEQ ID NO: 108444 - DNA, 25 bp, Saccharomyces pastorianus
tgtatttggcacactgcagaggcat

SEQ ID NO: 108445 - DNA, 25 bp, Saccharomyces pastorianus
gccgcatacccctgtaactaggaag

SEQ ID NO: 108446 - DNA, 25 bp, Saccharomyces pastorianus
aatcatctgtcgatactgggttgca

SEQ ID NO: 108447 - DNA, 25 bp, Saccharomyces pastorianus
actgttttctctttggaagctctta

SEQ ID NO: 108448 - DNA, 25 bp, Saccharomyces pastorianus
aacttcttgactacttgttccacct

SEQ ID NO: 108449 - DNA, 25 bp, Saccharomyces pastorianus
tgttccacctattaatctcgctcaa

SEQ ID NO: 108450 - DNA, 25 bp, Saccharomyces pastorianus
tacaatctcaatccttacacacaaa

SEQ ID NO: 108451 - DNA, 25 bp, Saccharomyces pastorianus
acatcatatatcacaccacgttcag

SEQ ID NO: 108452 - DNA, 25 bp, Saccharomyces pastorianus
gagacagttttgcaaccggctatcc

SEQ ID NO: 108453 - DNA, 25 bp, Saccharomyces pastorianus
gccgatcctaaagtacccgtggtat

SEQ ID NO: 108454 - DNA, 25 bp, Saccharomyces pastorianus
gtgagcggtacgatggcccaagaca

SEQ ID NO: 108455 - DNA, 25 bp, Saccharomyces pastorianus
aagttgggagatagtgccgatccta

SEQ ID NO: 108456 - DNA, 25 bp, Saccharomyces pastorianus
aaggactaaacccaattctcgatat

SEQ ID NO: 108457 - DNA, 25 bp, Saccharomyces pastorianus
tcgatatcaacgtaccactggcagg

SEQ ID NO: 108458 - DNA, 25 bp, Saccharomyces pastorianus
tgaattccaaactcatccaccgaaa

SEQ ID NO: 108459 - DNA, 25 bp, Saccharomyces pastorianus
atagctcattgaacgcttcatccga

SEQ ID NO: 108460 - DNA, 25 bp, Saccharomyces pastorianus
gtatgcgtacagattgccgaactat

SEQ ID NO: 108461 - DNA, 25 bp, Saccharomyces pastorianus
ttgtatgtacaagccacgcacttta

SEQ ID NO: 108462 - DNA, 25 bp, Saccharomyces pastorianus
ggattccacctatgaggtatcttca

SEQ ID NO: 108463 - DNA, 25 bp, Saccharomyces pastorianus
attcagcttgctgatatccatgagc

SEQ ID NO: 108464 - DNA, 25 bp, Saccharomyces pastorianus
gacatgtacaggtcttatcgatcct

SEQ ID NO: 108465 - DNA, 25 bp, Saccharomyces pastorianus
gaagccggaattggatccttggaca

SEQ ID NO: 108466 - DNA, 25 bp, Saccharomyces pastorianus
aattgatagcttcatcgcctggaga

SEQ ID NO: 108467 - DNA, 25 bp, Saccharomyces pastorianus
gaagtgctgcagatacatcaagttt

SEQ ID NO: 108468 - DNA, 25 bp, Saccharomyces pastorianus
gtgtttcgggactacaaatgttgat

SEQ ID NO: 108469 - DNA, 25 bp, Saccharomyces pastorianus
agagatttgatgaccctatgtgata

SEQ ID NO: 108470 - DNA, 25 bp, Saccharomyces pastorianus
aagtgagccatctagacaacccgaa

SEQ ID NO: 108471 - DNA, 25 bp, Saccharomyces pastorianus
cgcccacaatgatccacaaagcttt

SEQ ID NO: 108472 - DNA, 25 bp, Saccharomyces pastorianus
aaatgcttaccatagttagcgctaa

SEQ ID NO: 108473 - DNA, 25 bp, Saccharomyces pastorianus
gaactgaagttcagccctgttatta

SEQ ID NO: 108474 - DNA, 25 bp, Saccharomyces pastorianus
gcctggagagtcaacgaagccggaa

SEQ ID NO: 108475 - DNA, 25 bp, Saccharomyces pastorianus
aaacgcaaagcaatcacgccgcgga

SEQ ID NO: 108476 - DNA, 25 bp, Saccharomyces pastorianus
ggacatgcaccagctgatgaccaaa

SEQ ID NO: 108477 - DNA, 25 bp, Saccharomyces pastorianus
gtataacaactccaacccattcatg

SEQ ID NO: 108478 - DNA, 25 bp, Saccharomyces pastorianus
ggaaatctcttccaacaactggcct

SEQ ID NO: 108479 - DNA, 25 bp, Saccharomyces pastorianus
aaactaaccaccgacactggacatg

SEQ ID NO: 108480 - DNA, 25 bp, Saccharomyces pastorianus
gccgcggacttgaccacgtataaca

SEQ ID NO: 108481 - DNA, 25 bp, Saccharomyces pastorianus
aacattagtggtgctcaaagggaac

SEQ ID NO: 108482 - DNA, 25 bp, Saccharomyces pastorianus
tttccctcaaaacgactctcaacta

SEQ ID NO: 108483 - DNA, 25 bp, Saccharomyces pastorianus
ccattcatgacctcactactagatg

SEQ ID NO: 108484 - DNA, 25 bp, Saccharomyces pastorianus
gaataacaactcgtccaaccaagga

SEQ ID NO: 108485 - DNA, 25 bp, Saccharomyces pastorianus
aagcaacctagtgccgtacagcact

SEQ ID NO: 108486 - DNA, 25 bp, Saccharomyces pastorianus
aaattcgatggacgtctctcattaa

SEQ ID NO: 108487 - DNA, 25 bp, Saccharomyces pastorianus
ttcggcaggcgaacaagttgtcatt

SEQ ID NO: 108488 - DNA, 25 bp, Saccharomyces pastorianus
gtcattttttcccaattttctacat

SEQ ID NO: 108489 - DNA, 25 bp, Saccharomyces pastorianus
tttctacatacttggatatcctgga

SEQ ID NO: 108490 - DNA, 25 bp, Saccharomyces pastorianus
gaattggccagacaaacagcgtcaa

SEQ ID NO: 108491 - DNA, 25 bp, Saccharomyces pastorianus
gtttgaatctaacgtgtgcttccca

SEQ ID NO: 108492 - DNA, 25 bp, Saccharomyces pastorianus
gtgcttcccacgcttatatgatgga

SEQ ID NO: 108493 - DNA, 25 bp, Saccharomyces pastorianus
attactctctctgaaggctggtggc

SEQ ID NO: 108494 - DNA, 25 bp, Saccharomyces pastorianus
aactatcggtgaggccatggacaca

SEQ ID NO: 108495 - DNA, 25 bp, Saccharomyces pastorianus
gcttgtcggttgttggcattggtac

SEQ ID NO: 108496 - DNA, 25 bp, Saccharomyces pastorianus
aattcaaaccatattcaccagcctc

SEQ ID NO: 108497 - DNA, 25 bp, Saccharomyces pastorianus
taaagttttgaagcctactacggag

SEQ ID NO: 108498 - DNA, 25 bp, Saccharomyces pastorianus
aaaagcaatggcgttcaggacgata

SEQ ID NO: 108499 - DNA, 25 bp, Saccharomyces pastorianus
gagaactttcgaaatggcacaccag

SEQ ID NO: 108500 - DNA, 25 bp, Saccharomyces pastorianus
tagcatacctgtggtaagggcgcaa

SEQ ID NO: 108501 - DNA, 25 bp, Saccharomyces pastorianus
gataagttggtttcagagtctctct

SEQ ID NO: 108502 - DNA, 25 bp, Saccharomyces pastorianus
gcgactatcgcttctgcaaattcag

SEQ ID NO: 108503 - DNA, 25 bp, Saccharomyces pastorianus
aacggcaccgttgtggattcgacaa

SEQ ID NO: 108504 - DNA, 25 bp, Saccharomyces pastorianus
tgtaagggcctttccagtattacaa

SEQ ID NO: 108505 - DNA, 25 bp, Saccharomyces pastorianus
ctacggaggaacgagaactatactt

SEQ ID NO: 108506 - DNA, 25 bp, Saccharomyces pastorianus
aattggacaccatctaattacattg

SEQ ID NO: 108507 - DNA, 25 bp, Saccharomyces pastorianus
gtttccaaggttcctataaacaatg

SEQ ID NO: 108508 - DNA, 25 bp, Saccharomyces pastorianus
atcgtatccgctcctttaatttatt

SEQ ID NO: 108509 - DNA, 25 bp, Saccharomyces pastorianus
ttatgttctggtcaatctgccggta

SEQ ID NO: 108510 - DNA, 25 bp, Saccharomyces pastorianus
tgtggtaagagcacctgccgatgtt

SEQ ID NO: 108511 - DNA, 25 bp, Saccharomyces pastorianus
tcgtttgttgacctatacctctgtt

SEQ ID NO: 108512 - DNA, 25 bp, Saccharomyces pastorianus
attgccacctttgtgaattccgcta

SEQ ID NO: 108513 - DNA, 25 bp, Saccharomyces pastorianus
tgccgatgttaacgccattgctgat

SEQ ID NO: 108514 - DNA, 25 bp, Saccharomyces pastorianus
gggttaatctttgcattggccatgt

SEQ ID NO: 108515 - DNA, 25 bp, Saccharomyces pastorianus
gcaggtgctactttatcaggccaac

SEQ ID NO: 108516 - DNA, 25 bp, Saccharomyces pastorianus
cctctgttttcgtatgggctttaat

SEQ ID NO: 108517 - DNA, 25 bp, Saccharomyces pastorianus
ttgccgggcaaatcgtttctgaggg

SEQ ID NO: 108518 - DNA, 25 bp, Saccharomyces pastorianus
aatctgccggtatcatctgtacact

SEQ ID NO: 108519 - DNA, 25 bp, Saccharomyces pastorianus
caacaactacgtctataccctgaag

SEQ ID NO: 108520 - DNA, 25 bp, Saccharomyces pastorianus
atgcatttttccgagtataccaaca

SEQ ID NO: 108521 - DNA, 25 bp, Saccharomyces pastorianus
acaaggccgaaactcatgcattttt

SEQ ID NO: 108522 - DNA, 25 bp, Saccharomyces pastorianus
gacgcttctatttctaatcctttta

SEQ ID NO: 108523 - DNA, 25 bp, Saccharomyces pastorianus
ttcttccagtcttttgcaagccttg

SEQ ID NO: 108524 - DNA, 25 bp, Saccharomyces pastorianus
ggacatggccattccacgaaattcg

SEQ ID NO: 108525 - DNA, 25 bp, Saccharomyces pastorianus
aaccgggacacattgaagccacgac

SEQ ID NO: 108526 - DNA, 25 bp, Saccharomyces pastorianus
tagcaggagctggatcctcaacatt

SEQ ID NO: 108527 - DNA, 25 bp, Saccharomyces pastorianus
acttgaggccaaacgtactagctgt

SEQ ID NO: 108528 - DNA, 25 bp, Saccharomyces pastorianus
taaagcttcagcaaacctacggtaa

SEQ ID NO: 108529 - DNA, 25 bp, Saccharomyces pastorianus
tcaacattaccctcgtcattaactt

SEQ ID NO: 108530 - DNA, 25 bp, Saccharomyces pastorianus
tattaatttacaccgactatcacag

SEQ ID NO: 108531 - DNA, 25 bp, Saccharomyces pastorianus
aagtatcctaaatggtttcagctaa

SEQ ID NO: 108532 - DNA, 25 bp, Saccharomyces pastorianus
gtaacaatttccctcgttattatag

SEQ ID NO: 108533 - DNA, 25 bp, Saccharomyces pastorianus
gtcccagctgtgctgccagaaaaaa

SEQ ID NO: 108534 - DNA, 25 bp, Saccharomyces pastorianus
gagatcccaaagtctaattccttat

SEQ ID NO: 108535 - DNA, 25 bp, Saccharomyces pastorianus
gctatttagattgcagctaggctgg

SEQ ID NO: 108536 - DNA, 25 bp, Saccharomyces pastorianus
taggctggatatgtactactgcatt

SEQ ID NO: 108537 - DNA, 25 bp, Saccharomyces pastorianus
gctttcagcttctacttttgtacca

SEQ ID NO: 108538 - DNA, 25 bp, Saccharomyces pastorianus
tgcgttgatattacatagcgggttc

SEQ ID NO: 108539 - DNA, 25 bp, Saccharomyces pastorianus
gaaggtagtatgtcccagctgtgct

SEQ ID NO: 108540 - DNA, 25 bp, Saccharomyces pastorianus
ttggtatcaatgactgctttcagct

SEQ ID NO: 108541 - DNA, 25 bp, Saccharomyces pastorianus
gaagacctataacgccttatgtccc

SEQ ID NO: 108542 - DNA, 25 bp, Saccharomyces pastorianus
tcttttggaagacctataacgcctt

SEQ ID NO: 108543 - DNA, 25 bp, Saccharomyces pastorianus
ggtttcgatgctagatttccccaac

SEQ ID NO: 108544 - DNA, 25 bp, Saccharomyces pastorianus
gatgctagatttccccaacaaaacc

SEQ ID NO: 108545 - DNA, 25 bp, Saccharomyces pastorianus
aactctccactacatacagttggtt

SEQ ID NO: 108546 - DNA, 25 bp, Saccharomyces pastorianus
ggctgatcaagaaaactctccacta

SEQ ID NO: 108547 - DNA, 25 bp, Saccharomyces pastorianus
ctataacgccttatgtcccctagac

SEQ ID NO: 108548 - DNA, 25 bp, Saccharomyces pastorianus
ggcaatcttatgtggattatcacaa

SEQ ID NO: 108549 - DNA, 25 bp, Saccharomyces pastorianus
aacaaagcattgttggcaatcttat

SEQ ID NO: 108550 - DNA, 25 bp, Saccharomyces pastorianus
aagggcgaagattttgctccgtgca

SEQ ID NO: 108551 - DNA, 25 bp, Saccharomyces pastorianus
tttgctccgtgcaaggtcttttgga

SEQ ID NO: 108552 - DNA, 25 bp, Saccharomyces pastorianus
gcaggccagtccatgatttccatga

SEQ ID NO: 108553 - DNA, 25 bp, Saccharomyces pastorianus
atttggcctcaacagcagatttaca

SEQ ID NO: 108554 - DNA, 25 bp, Saccharomyces pastorianus
acagcacttatatccgcatcaaact

SEQ ID NO: 108555 - DNA, 25 bp, Saccharomyces pastorianus
ttccaaacattcattacggcctttc

SEQ ID NO: 108556 - DNA, 25 bp, Saccharomyces pastorianus
attctgttcctttctcgacagcgaa

SEQ ID NO: 108557 - DNA, 25 bp, Saccharomyces pastorianus
caacctgttgctgactactactatc

SEQ ID NO: 108558 - DNA, 25 bp, Saccharomyces pastorianus
aatgacgatacacttgccaggtccg

SEQ ID NO: 108559 - DNA, 25 bp, Saccharomyces pastorianus
ttatgccagccaacaaaactccgtt

SEQ ID NO: 108560 - DNA, 25 bp, Saccharomyces pastorianus
agaagctaccatgactaactcctct

SEQ ID NO: 108561 - DNA, 25 bp, Saccharomyces pastorianus
aatggtgcccatgccaaaagcttat

SEQ ID NO: 108562 - DNA, 25 bp, Saccharomyces pastorianus
gagttttccgttcactcaattccaa

SEQ ID NO: 108563 - DNA, 25 bp, Saccharomyces pastorianus
tgcatctgcagctgcggacctggca

SEQ ID NO: 108564 - DNA, 25 bp, Saccharomyces pastorianus
ctagacgttaaagttttggcagcaa

SEQ ID NO: 108565 - DNA, 25 bp, Saccharomyces pastorianus
actgtggctgattagaaagcttacc

SEQ ID NO: 108566 - DNA, 25 bp, Saccharomyces pastorianus
gaaagcttaccaggagaatattttt

SEQ ID NO: 108567 - DNA, 25 bp, Saccharomyces pastorianus
cggacctggcaagtgtatcgtcatt

SEQ ID NO: 108568 - DNA, 25 bp, Saccharomyces pastorianus
gatacgcaatattttcaggaatgtt

SEQ ID NO: 108569 - DNA, 25 bp, Saccharomyces pastorianus
aactggatatcgaaatcacttgatt

SEQ ID NO: 108570 - DNA, 25 bp, Saccharomyces pastorianus
gtaaatggttcgtaactggatatcg

SEQ ID NO: 108571 - DNA, 25 bp, Saccharomyces pastorianus
aagaatgccatgtctgcatctgcag

SEQ ID NO: 108572 - DNA, 25 bp, Saccharomyces pastorianus
ggcaagtgtatcgtcattggaacta

SEQ ID NO: 108573 - DNA, 25 bp, Saccharomyces pastorianus
tggaaaagcggtgtcgaaatcgttt

SEQ ID NO: 108574 - DNA, 25 bp, Saccharomyces pastorianus
gtgtaggttcagtcaagccatgtct

SEQ ID NO: 108575 - DNA, 25 bp, Saccharomyces pastorianus
aactgttcattgttcaagcgcaact

SEQ ID NO: 108576 - DNA, 25 bp, Saccharomyces pastorianus
tttcgccccaattgtgctactacaa

SEQ ID NO: 108577 - DNA, 25 bp, Saccharomyces pastorianus
tgctgctaatttcaccggttcttca

SEQ ID NO: 108578 - DNA, 25 bp, Saccharomyces pastorianus
ggatttgaatactgcccttggacag

SEQ ID NO: 108579 - DNA, 25 bp, Saccharomyces pastorianus
aaagtcacttccagcgtcataacat

SEQ ID NO: 108580 - DNA, 25 bp, Saccharomyces pastorianus
tcttcatcatcgtcgtctataccaa

SEQ ID NO: 108581 - DNA, 25 bp, Saccharomyces pastorianus
caagccatgtctttacttcgtttta

SEQ ID NO: 108582 - DNA, 25 bp, Saccharomyces pastorianus
gccattgccttcttcgtcgagaaat

SEQ ID NO: 108583 - DNA, 25 bp, Saccharomyces pastorianus
aattctacggtagtcacccagttca

SEQ ID NO: 108584 - DNA, 25 bp, Saccharomyces pastorianus
attactggttcattagctgctgcta

SEQ ID NO: 108585 - DNA, 25 bp, Saccharomyces pastorianus
cgctatgccaactttgcttctattc

SEQ ID NO: 108586 - DNA, 25 bp, Saccharomyces pastorianus
atgtcgatgaattgggtgatgttgc

SEQ ID NO: 108587 - DNA, 25 bp, Saccharomyces pastorianus
aaattctctgaacaacacccacaag

SEQ ID NO: 108588 - DNA, 25 bp, Saccharomyces pastorianus
caacacccacaagctgatttctata

SEQ ID NO: 108589 - DNA, 25 bp, Saccharomyces pastorianus
tgcaaaggttgttggtgccaaccca

SEQ ID NO: 108590 - DNA, 25 bp, Saccharomyces pastorianus
atttctataaattggatgtcgatga

SEQ ID NO: 108591 - DNA, 25 bp, Saccharomyces pastorianus
aagttgcaaaggttgttggtgccaa

SEQ ID NO: 108592 - DNA, 25 bp, Saccharomyces pastorianus
gaagtttccgctatgccaactttgc

SEQ ID NO: 108593 - DNA, 25 bp, Saccharomyces pastorianus
aaaatgaagtttccgctatgccaac

SEQ ID NO: 108594 - DNA, 25 bp, Saccharomyces pastorianus
tgctcaagacaagctagttgtcgta

SEQ ID NO: 108595 - DNA, 25 bp, Saccharomyces pastorianus
caagctagttgtcgtagatttctac

SEQ ID NO: 108596 - DNA, 25 bp, Saccharomyces pastorianus
gtagtccttgagctagttctgcaac

SEQ ID NO: 108597 - DNA, 25 bp, Saccharomyces pastorianus
ggttattcccgctaaatggcaacta

SEQ ID NO: 108598 - DNA, 25 bp, Saccharomyces pastorianus
caattctacttgtggtacttcatcg

SEQ ID NO: 108599 - DNA, 25 bp, Saccharomyces pastorianus
atgcctctctaactaccttgatatg

SEQ ID NO: 108600 - DNA, 25 bp, Saccharomyces pastorianus
atcaccatattcatcgactcatcag

SEQ ID NO: 108601 - DNA, 25 bp, Saccharomyces pastorianus
gtatctatggctggaatgcctctct

SEQ ID NO: 108602 - DNA, 25 bp, Saccharomyces pastorianus
gcaacacgatttcctgctatcagag

SEQ ID NO: 108603 - DNA, 25 bp, Saccharomyces pastorianus
ggacatcgtgagcaacaattctact

SEQ ID NO: 108604 - DNA, 25 bp, Saccharomyces pastorianus
aacaagcttgtccatgacccagaag

SEQ ID NO: 108605 - DNA, 25 bp, Saccharomyces pastorianus
gactcatcagtggttattcccgcta

SEQ ID NO: 108606 - DNA, 25 bp, Saccharomyces pastorianus
gaagtgtcagttagcctcggtgtac

SEQ ID NO: 108607 - DNA, 25 bp, Saccharomyces pastorianus
aagcaccctcaagacaaggttgtac

SEQ ID NO: 108608 - DNA, 25 bp, Saccharomyces pastorianus
gaacgtcaatgcgaattcactagca

SEQ ID NO: 108609 - DNA, 25 bp, Saccharomyces pastorianus
gtggcaggaaggcaagccatccaat

SEQ ID NO: 108610 - DNA, 25 bp, Saccharomyces pastorianus
tcacacaaacaccacgacattcaaa

SEQ ID NO: 108611 - DNA, 25 bp, Saccharomyces pastorianus
gaccaagaaactgaggaccctgact

SEQ ID NO: 108612 - DNA, 25 bp, Saccharomyces pastorianus
ggacaatctttacgctatgaatgac

SEQ ID NO: 108613 - DNA, 25 bp, Saccharomyces pastorianus
taacgcagatggcttgaatcaacaa

SEQ ID NO: 108614 - DNA, 25 bp, Saccharomyces pastorianus
gaggaccctgacttatcagatgatg

SEQ ID NO: 108615 - DNA, 25 bp, Saccharomyces pastorianus
agtagccataccaacgaacgtcaat

SEQ ID NO: 108616 - DNA, 25 bp, Saccharomyces pastorianus
gaatcaacaaggttcttcgacccca

SEQ ID NO: 108617 - DNA, 25 bp, Saccharomyces pastorianus
agacacattgttgccgtagatgaca

SEQ ID NO: 108618 - DNA, 25 bp, Saccharomyces pastorianus
gcatagaggatttcttgttctttaa

SEQ ID NO: 108619 - DNA, 25 bp, Saccharomyces pastorianus
aaaaattgcaatacgatgacctcgg

SEQ ID NO: 108620 - DNA, 25 bp, Saccharomyces pastorianus
gatgacctcgggaacaccggatttt

SEQ ID NO: 108621 - DNA, 25 bp, Saccharomyces pastorianus
aagcacctccaatagcaatttgagt

SEQ ID NO: 108622 - DNA, 25 bp, Saccharomyces pastorianus
taacccattctatgtaccgtcagag

SEQ ID NO: 108623 - DNA, 25 bp, Saccharomyces pastorianus
gaaccaaagacaatatgagcacacg

SEQ ID NO: 108624 - DNA, 25 bp, Saccharomyces pastorianus
aaaagacaaagaagcataacccatt

SEQ ID NO: 108625 - DNA, 25 bp, Saccharomyces pastorianus
taccgtcagaggtagtgcgagagat

SEQ ID NO: 108626 - DNA, 25 bp, Saccharomyces pastorianus
gtgatgctatcaaaagcacctccaa

SEQ ID NO: 108627 - DNA, 25 bp, Saccharomyces pastorianus
taacccaggaggttgagttcgagaa

SEQ ID NO: 108628 - DNA, 25 bp, Saccharomyces pastorianus
ggaacaccggattttctgaactatt

SEQ ID NO: 108629 - DNA, 25 bp, Saccharomyces pastorianus
gaagacgacttttcttgccttggaa

SEQ ID NO: 108630 - DNA, 25 bp, Saccharomyces pastorianus
tttggagtggttgctgtgccacact

SEQ ID NO: 108631 - DNA, 25 bp, Saccharomyces pastorianus
gtatgattccatcttgagggaccaa

SEQ ID NO: 108632 - DNA, 25 bp, Saccharomyces pastorianus
tattcacctccagtactgttcgata

SEQ ID NO: 108633 - DNA, 25 bp, Saccharomyces pastorianus
gtatgagctattactggaccacatt

SEQ ID NO: 108634 - DNA, 25 bp, Saccharomyces pastorianus
aacaaagcccacaaagcctctagaa

SEQ ID NO: 108635 - DNA, 25 bp, Saccharomyces pastorianus
ggtcaaatcactttatgttcgccaa

SEQ ID NO: 108636 - DNA, 25 bp, Saccharomyces pastorianus
gagggaccaatccacgatcatggaa

SEQ ID NO: 108637 - DNA, 25 bp, Saccharomyces pastorianus
gtgccacacttcatcaggaggtttt

SEQ ID NO: 108638 - DNA, 25 bp, Saccharomyces pastorianus
tgatgttttgaaccgtggcaacact

SEQ ID NO: 108639 - DNA, 25 bp, Saccharomyces pastorianus
gataaacggtgtgcctattcacctc

SEQ ID NO: 108640 - DNA, 25 bp, Saccharomyces pastorianus
gccgggccatcacggtggtattata

SEQ ID NO: 108641 - DNA, 25 bp, Saccharomyces pastorianus
tgacctcagggttgaacggttccgt

SEQ ID NO: 108642 - DNA, 25 bp, Saccharomyces pastorianus
tcagggcctgtctcttgtgttaaag

SEQ ID NO: 108643 - DNA, 25 bp, Saccharomyces pastorianus
gaacggttccgtgcatatttgggac

SEQ ID NO: 108644 - DNA, 25 bp, Saccharomyces pastorianus
tgacttgaagatgccctcgaaacct

SEQ ID NO: 108645 - DNA, 25 bp, Saccharomyces pastorianus
tatttgggaccgacgcatgacgcag

SEQ ID NO: 108646 - DNA, 25 bp, Saccharomyces pastorianus
agtcgccagcattgtctctggagag

SEQ ID NO: 108647 - DNA, 25 bp, Saccharomyces pastorianus
catttactatgtgcatcgcgggata

SEQ ID NO: 108648 - DNA, 25 bp, Saccharomyces pastorianus
aagatgctggcaacgaacccgtcga

SEQ ID NO: 108649 - DNA, 25 bp, Saccharomyces pastorianus
gatgaatccgtttttatgacctcag

SEQ ID NO: 108650 - DNA, 25 bp, Saccharomyces pastorianus
accgtggtgtttgtccgcatgttgg

SEQ ID NO: 108651 - DNA, 25 bp, Saccharomyces pastorianus
ggtttccctggacaaacacatctta

SEQ ID NO: 108652 - DNA, 25 bp, Saccharomyces pastorianus
cgattgctgaaatagacggcgacga

SEQ ID NO: 108653 - DNA, 25 bp, Saccharomyces pastorianus
agcgatggtgacaaggtttccctgg

SEQ ID NO: 108654 - DNA, 25 bp, Saccharomyces pastorianus
ggccattttgggtcaacaaggtaga

SEQ ID NO: 108655 - DNA, 25 bp, Saccharomyces pastorianus
tacagttggaagctcgaaatcgatt

SEQ ID NO: 108656 - DNA, 25 bp, Saccharomyces pastorianus
tacaacggacgataccatgggttct

SEQ ID NO: 108657 - DNA, 25 bp, Saccharomyces pastorianus
gttctcagtggaaaaaccatccgga

SEQ ID NO: 108658 - DNA, 25 bp, Saccharomyces pastorianus
aaatgacctagatgtcgggatcaaa

SEQ ID NO: 108659 - DNA, 25 bp, Saccharomyces pastorianus
gatatcaaaccgcatattacaacgg

SEQ ID NO: 108660 - DNA, 25 bp, Saccharomyces pastorianus
tgggtaagcagtcttttggaatctt

SEQ ID NO: 108661 - DNA, 25 bp, Saccharomyces pastorianus
aatactatttgctactattcagcga

SEQ ID NO: 108662 - DNA, 25 bp, Saccharomyces pastorianus
gccacgtgggttgaggttttaccat

SEQ ID NO: 108663 - DNA, 25 bp, Saccharomyces pastorianus
aagcaaatcggccacttgggtgtct

SEQ ID NO: 108664 - DNA, 25 bp, Saccharomyces pastorianus
gttgttagaaccactttattgcctg

SEQ ID NO: 108665 - DNA, 25 bp, Saccharomyces pastorianus
attttcagagttgcatcctctcaag

SEQ ID NO: 108666 - DNA, 25 bp, Saccharomyces pastorianus
actgggctgccatctacgtgggtaa

SEQ ID NO: 108667 - DNA, 25 bp, Saccharomyces pastorianus
gattgcagactacggtgctgctgct

SEQ ID NO: 108668 - DNA, 25 bp, Saccharomyces pastorianus
ggtgccaaggtcatgttcagatcca

SEQ ID NO: 108669 - DNA, 25 bp, Saccharomyces pastorianus
tacttcccaggtagaggtgccaagg

SEQ ID NO: 108670 - DNA, 25 bp, Saccharomyces pastorianus
ttagctgtcaaattggccaacccaa

SEQ ID NO: 108671 - DNA, 25 bp, Saccharomyces pastorianus
aatttcgacgttccattcgctgcat

SEQ ID NO: 108672 - DNA, 25 bp, Saccharomyces pastorianus
gctgctgcttctggcagaggttact

SEQ ID NO: 108673 - DNA, 25 bp, Saccharomyces pastorianus
gaatggacccaaaactcgactactc

SEQ ID NO: 108674 - DNA, 25 bp, Saccharomyces pastorianus
gcctcgacctaataactctactttt

SEQ ID NO: 108675 - DNA, 25 bp, Saccharomyces pastorianus
gtccatggtcactagtatccgagaa

SEQ ID NO: 108676 - DNA, 25 bp, Saccharomyces pastorianus
gcgagcatattcactttatcgagag

SEQ ID NO: 108677 - DNA, 25 bp, Saccharomyces pastorianus
agttcccaatccaatttcttatcga

SEQ ID NO: 108678 - DNA, 25 bp, Saccharomyces pastorianus
tcgactactcgattccattggaaaa

SEQ ID NO: 108679 - DNA, 25 bp, Saccharomyces pastorianus
tagatatcgccgactggtccacagt

SEQ ID NO: 108680 - DNA, 25 bp, Saccharomyces pastorianus
gaagctattctcacattaccatcaa

SEQ ID NO: 108681 - DNA, 25 bp, Saccharomyces pastorianus
tttacccacaaggactgcctacaaa

SEQ ID NO: 108682 - DNA, 25 bp, Saccharomyces pastorianus
tcaagatatatcaaggcctcgacct

SEQ ID NO: 108683 - DNA, 25 bp, Saccharomyces pastorianus
gatttttcgtctaaatttgcctctg

SEQ ID NO: 108684 - DNA, 25 bp, Saccharomyces pastorianus
cttttcaatctttcacttcctgaac

SEQ ID NO: 108685 - DNA, 25 bp, Saccharomyces pastorianus
atatgccatcgttctttaccagttt

SEQ ID NO: 108686 - DNA, 25 bp, Saccharomyces pastorianus
tgccatttttgcctttgataccact

SEQ ID NO: 108687 - DNA, 25 bp, Saccharomyces pastorianus
ggatgcatatgtcagccgtactttg

SEQ ID NO: 108688 - DNA, 25 bp, Saccharomyces pastorianus
attcatactttttctcttatcacag

SEQ ID NO: 108689 - DNA, 25 bp, Saccharomyces pastorianus
atacagtcccgttatcttttcaatc

SEQ ID NO: 108690 - DNA, 25 bp, Saccharomyces pastorianus
attttacgcttttgcgccaagagat

SEQ ID NO: 108691 - DNA, 25 bp, Saccharomyces pastorianus
gtacaatgttggcagggctaaccta

SEQ ID NO: 108692 - DNA, 25 bp, Saccharomyces pastorianus
tttgagattatctgcggcctacgtg

SEQ ID NO: 108693 - DNA, 25 bp, Saccharomyces pastorianus
ctacgtgtgggcctcttcttagtgc

SEQ ID NO: 108694 - DNA, 25 bp, Saccharomyces pastorianus
agtgcccttcaattttttcttgttg

SEQ ID NO: 108695 - DNA, 25 bp, Saccharomyces pastorianus
gctggttacaagttatatggcctca

SEQ ID NO: 108696 - DNA, 25 bp, Saccharomyces pastorianus
tattgtgccccatctatgctggtta

SEQ ID NO: 108697 - DNA, 25 bp, Saccharomyces pastorianus
gttcctatgttcgttgctctgtata

SEQ ID NO: 108698 - DNA, 25 bp, Saccharomyces pastorianus
tttggtggtgtctactattgtgccc

SEQ ID NO: 108699 - DNA, 25 bp, Saccharomyces pastorianus
ggtattatagctttcaggacattca

SEQ ID NO: 108700 - DNA, 25 bp, Saccharomyces pastorianus
gctctgtatatcattgtgctatccg

SEQ ID NO: 108701 - DNA, 25 bp, Saccharomyces pastorianus
aaacatgttcatgcctggcgctcaa

SEQ ID NO: 108702 - DNA, 25 bp, Saccharomyces pastorianus
tgtgctatccggtaagcccaaatat

SEQ ID NO: 108703 - DNA, 25 bp, Saccharomyces pastorianus
taggaatggctatcgtacgtctatt

SEQ ID NO: 108704 - DNA, 25 bp, Saccharomyces pastorianus
aagctggtggctttgaacgttccta

SEQ ID NO: 108705 - DNA, 25 bp, Saccharomyces pastorianus
tggcgctcaacaaactcaggcagat

SEQ ID NO: 108706 - DNA, 25 bp, Saccharomyces pastorianus
gccagcccttgatgggccctaagat

SEQ ID NO: 108707 - DNA, 25 bp, Saccharomyces pastorianus
aaggacaggccagcccttgatgggc

SEQ ID NO: 108708 - DNA, 25 bp, Saccharomyces pastorianus
tgggccctaagatagaggatctttt

SEQ ID NO: 108709 - DNA, 25 bp, Saccharomyces pastorianus
gagtataaggttaaggagatccaaa

SEQ ID NO: 108710 - DNA, 25 bp, Saccharomyces pastorianus
gtatgccgtaccagaaaaggaacca

SEQ ID NO: 108711 - DNA, 25 bp, Saccharomyces pastorianus
ggagatccaaagaagtattacaaag

SEQ ID NO: 108712 - DNA, 25 bp, Saccharomyces pastorianus
aactagactgagaaaggaatacctt

SEQ ID NO: 108713 - DNA, 25 bp, Saccharomyces pastorianus
gaagattaaggaagccagggcaata

SEQ ID NO: 108714 - DNA, 25 bp, Saccharomyces pastorianus
aaaccgtggcaaaagaatctgtaag

SEQ ID NO: 108715 - DNA, 25 bp, Saccharomyces pastorianus
gatgaagggtatgccgtaccagaaa

SEQ ID NO: 108716 - DNA, 25 bp, Saccharomyces pastorianus
gactcaaagaacaaggacaggccag

SEQ ID NO: 108717 - DNA, 25 bp, Saccharomyces pastorianus
aggcaacatattcgagaccgctatt

SEQ ID NO: 108718 - DNA, 25 bp, Saccharomyces pastorianus
ggtttcgccacctcattaagagcct

SEQ ID NO: 108719 - DNA, 25 bp, Saccharomyces pastorianus
ttgagcacgatgttcggtttcgcca

SEQ ID NO: 108720 - DNA, 25 bp, Saccharomyces pastorianus
atctggtggcgctggtcaatatggt

SEQ ID NO: 108721 - DNA, 25 bp, Saccharomyces pastorianus
accgctattgttggtggccgtatac

SEQ ID NO: 108722 - DNA, 25 bp, Saccharomyces pastorianus
gcacagccggtgatcatggaaccta

SEQ ID NO: 108723 - DNA, 25 bp, Saccharomyces pastorianus
tatctcccgtggatgacattaccaa

SEQ ID NO: 108724 - DNA, 25 bp, Saccharomyces pastorianus
aaacagctactatgtcagccttccg

SEQ ID NO: 108725 - DNA, 25 bp, Saccharomyces pastorianus
agagttatcggtaccttatctcccg

SEQ ID NO: 108726 - DNA, 25 bp, Saccharomyces pastorianus
acagcgccccatgttcaaaaagaat

SEQ ID NO: 108727 - DNA, 25 bp, Saccharomyces pastorianus
cattgatcggtcatcgtgttttgga

SEQ ID NO: 108728 - DNA, 25 bp, Saccharomyces pastorianus
gcacgcgactctattggacatacca

SEQ ID NO: 108729 - DNA, 25 bp, Saccharomyces pastorianus
aaaagcagatacactcaagccgttg

SEQ ID NO: 108730 - DNA, 25 bp, Saccharomyces pastorianus
gttacatcttttggatcacctagga

SEQ ID NO: 108731 - DNA, 25 bp, Saccharomyces pastorianus
caaatgttcctagtggtaccagttt

SEQ ID NO: 108732 - DNA, 25 bp, Saccharomyces pastorianus
gataagctgacgaacctcatgaccc

SEQ ID NO: 108733 - DNA, 25 bp, Saccharomyces pastorianus
aagccgttgcccagtgttacatctt

SEQ ID NO: 108734 - DNA, 25 bp, Saccharomyces pastorianus
aattagcgccactaaggacttggta

SEQ ID NO: 108735 - DNA, 25 bp, Saccharomyces pastorianus
aacgaggtacatgttccgatgggat

SEQ ID NO: 108736 - DNA, 25 bp, Saccharomyces pastorianus
ggtgctcttggtgttaaatctgctg

SEQ ID NO: 108737 - DNA, 25 bp, Saccharomyces pastorianus
ggacgaagttgtagcgcacgcgact

SEQ ID NO: 108738 - DNA, 25 bp, Saccharomyces pastorianus
gtaccagtttcagcaccagaacgag

SEQ ID NO: 108739 - DNA, 25 bp, Saccharomyces pastorianus
agtcaggccactgcccgtgatgaag

SEQ ID NO: 108740 - DNA, 25 bp, Saccharomyces pastorianus
aaactatctagacaccctgagcttt

SEQ ID NO: 108741 - DNA, 25 bp, Saccharomyces pastorianus
aaagttggaagtgcctgcggtctgc

SEQ ID NO: 108742 - DNA, 25 bp, Saccharomyces pastorianus
tggagcaacaaccactgccgaagaa

SEQ ID NO: 108743 - DNA, 25 bp, Saccharomyces pastorianus
aggattatcgcttcaatccggcgat

SEQ ID NO: 108744 - DNA, 25 bp, Saccharomyces pastorianus
aatccggcgataccattgagaattt

SEQ ID NO: 108745 - DNA, 25 bp, Saccharomyces pastorianus
ggagcaagctctcagagtcaggcca

SEQ ID NO: 108746 - DNA, 25 bp, Saccharomyces pastorianus
accctgagcttttgcgcatggatgc

SEQ ID NO: 108747 - DNA, 25 bp, Saccharomyces pastorianus
aaggcacagtgtgcgttccaggcca

SEQ ID NO: 108748 - DNA, 25 bp, Saccharomyces pastorianus
ttcgacgagtacagcttcaaccaat

SEQ ID NO: 108749 - DNA, 25 bp, Saccharomyces pastorianus
gaaagcttacgcacccaaattgact

SEQ ID NO: 108750 - DNA, 25 bp, Saccharomyces pastorianus
aacagaacctactctaccgtgggcg

SEQ ID NO: 108751 - DNA, 25 bp, Saccharomyces pastorianus
gcatttggacagtaccttggcaaac

SEQ ID NO: 108752 - DNA, 25 bp, Saccharomyces pastorianus
aagaagtctctgatgctgctgcggg

SEQ ID NO: 108753 - DNA, 25 bp, Saccharomyces pastorianus
gggtgtcccttacacacaagaagtc

SEQ ID NO: 108754 - DNA, 25 bp, Saccharomyces pastorianus
gaacacgagacttggacctgatcta

SEQ ID NO: 108755 - DNA, 25 bp, Saccharomyces pastorianus
tggatgaaaccaaaccaggccttgg

SEQ ID NO: 108756 - DNA, 25 bp, Saccharomyces pastorianus
gatctataacgacttgtccaccaag

SEQ ID NO: 108757 - DNA, 25 bp, Saccharomyces pastorianus
tgctgatgccgaggcgaataccgct

SEQ ID NO: 108758 - DNA, 25 bp, Saccharomyces pastorianus
aggccttggtcagcactattgcata

SEQ ID NO: 108759 - DNA, 25 bp, Saccharomyces pastorianus
atcacgcaatcggtgggtccggaga

SEQ ID NO: 108760 - DNA, 25 bp, Saccharomyces pastorianus
caagttcttgaaccgtgtacaggag

SEQ ID NO: 108761 - DNA, 25 bp, Saccharomyces pastorianus
gggtcgtaccatacactggcaatag

SEQ ID NO: 108762 - DNA, 25 bp, Saccharomyces pastorianus
atcgtttgtgaccattcgtaagcct

SEQ ID NO: 108763 - DNA, 25 bp, Saccharomyces pastorianus
agttgcggctctcattgtgtgttca

SEQ ID NO: 108764 - DNA, 25 bp, Saccharomyces pastorianus
gctggaataggttcggccaattggc

SEQ ID NO: 108765 - DNA, 25 bp, Saccharomyces pastorianus
gctcaacgccagaccatcattattt

SEQ ID NO: 108766 - DNA, 25 bp, Saccharomyces pastorianus
gccaattggcactacctatttcgta

SEQ ID NO: 108767 - DNA, 25 bp, Saccharomyces pastorianus
aacattcccgaagttctcaaaccag

SEQ ID NO: 108768 - DNA, 25 bp, Saccharomyces pastorianus
gaatatgtttctttcccaagatcgg

SEQ ID NO: 108769 - DNA, 25 bp, Saccharomyces pastorianus
aagaactcgcaatgtgatcccataa

SEQ ID NO: 108770 - DNA, 25 bp, Saccharomyces pastorianus
gatcggtaacgcatgcatttaaacc

SEQ ID NO: 108771 - DNA, 25 bp, Saccharomyces pastorianus
aaaagatagcttgcgggtcgtacca

SEQ ID NO: 108772 - DNA, 25 bp, Saccharomyces pastorianus
aaatccctttgcatcagatgaactg

SEQ ID NO: 108773 - DNA, 25 bp, Saccharomyces pastorianus
taggatattgtttcccacgcagcaa

SEQ ID NO: 108774 - DNA, 25 bp, Saccharomyces pastorianus
gccaggcagttacatttatcacttg

SEQ ID NO: 108775 - DNA, 25 bp, Saccharomyces pastorianus
catcaatccagtgcgggtgggtaaa

SEQ ID NO: 108776 - DNA, 25 bp, Saccharomyces pastorianus
gaggacactattccaatttgaaagt

SEQ ID NO: 108777 - DNA, 25 bp, Saccharomyces pastorianus
gagatgagtttgatcagacacatag

SEQ ID NO: 108778 - DNA, 25 bp, Saccharomyces pastorianus
tcgccgtttccaaaatcttcagtga

SEQ ID NO: 108779 - DNA, 25 bp, Saccharomyces pastorianus
gacatcatcatcaatccagtgcggg

SEQ ID NO: 108780 - DNA, 25 bp, Saccharomyces pastorianus
gagcaggaaccattgggtcgtgtaa

SEQ ID NO: 108781 - DNA, 25 bp, Saccharomyces pastorianus
cagatgaactggtcactcaggaaat

SEQ ID NO: 108782 - DNA, 25 bp, Saccharomyces pastorianus
acaactctccgaaaaatgacgccag

SEQ ID NO: 108783 - DNA, 25 bp, Saccharomyces pastorianus
cattcatcacatctgccattaactt

SEQ ID NO: 108784 - DNA, 25 bp, Saccharomyces pastorianus
gttcttgattgcatttttcacccca

SEQ ID NO: 108785 - DNA, 25 bp, Saccharomyces pastorianus
tttgcctccactttctttagtttgt

SEQ ID NO: 108786 - DNA, 25 bp, Saccharomyces pastorianus
attttctgttatgccacaacctggg

SEQ ID NO: 108787 - DNA, 25 bp, Saccharomyces pastorianus
agccatcttctaaaggtgccggtaa

SEQ ID NO: 108788 - DNA, 25 bp, Saccharomyces pastorianus
aaatgtttacttttgggcgctgcca

SEQ ID NO: 108789 - DNA, 25 bp, Saccharomyces pastorianus
aaatgtatggcgttggcctctgctt

SEQ ID NO: 108790 - DNA, 25 bp, Saccharomyces pastorianus
gttgcctgggtcatcacagcagaat

SEQ ID NO: 108791 - DNA, 25 bp, Saccharomyces pastorianus
ttgtatggtcatctacgcctctgtt

SEQ ID NO: 108792 - DNA, 25 bp, Saccharomyces pastorianus
cattggtgtagtcaactttgcctcc

SEQ ID NO: 108793 - DNA, 25 bp, Saccharomyces pastorianus
agcagaatcattcccactgagagtc

SEQ ID NO: 108794 - DNA, 25 bp, Saccharomyces pastorianus
gacagtttctgtccttggtattgca

SEQ ID NO: 108795 - DNA, 25 bp, Saccharomyces pastorianus
atagctctattagctctgtttcagc

SEQ ID NO: 108796 - DNA, 25 bp, Saccharomyces pastorianus
gttacctggcaatgatagctctatt

SEQ ID NO: 108797 - DNA, 25 bp, Saccharomyces pastorianus
tgaattcaactctcagtcaccactt

SEQ ID NO: 108798 - DNA, 25 bp, Saccharomyces pastorianus
tataagcccattaaaccgcgaattg

SEQ ID NO: 108799 - DNA, 25 bp, Saccharomyces pastorianus
atggcagtatcctcttacttaatgg

SEQ ID NO: 108800 - DNA, 25 bp, Saccharomyces pastorianus
aatggaccccatattttatttcaga

SEQ ID NO: 108801 - DNA, 25 bp, Saccharomyces pastorianus
gaatattacctcgttacctggcaat

SEQ ID NO: 108802 - DNA, 25 bp, Saccharomyces pastorianus
gtcgttttaattggtcttgcactag

SEQ ID NO: 108803 - DNA, 25 bp, Saccharomyces pastorianus
gaacattactgtgacaagtcctctg

SEQ ID NO: 108804 - DNA, 25 bp, Saccharomyces pastorianus
atatttcgcaatacggatacctaca

SEQ ID NO: 108805 - DNA, 25 bp, Saccharomyces pastorianus
ttgcccgaaatagtgcgacctctta

SEQ ID NO: 108806 - DNA, 25 bp, Saccharomyces pastorianus
aaccaggcattgtggaggccatcct

SEQ ID NO: 108807 - DNA, 25 bp, Saccharomyces pastorianus
attggacttgtcatgtttcggtgcc

SEQ ID NO: 108808 - DNA, 25 bp, Saccharomyces pastorianus
gttagcccggtgtcttattttgata

SEQ ID NO: 108809 - DNA, 25 bp, Saccharomyces pastorianus
aacaatgcttgttcgttagcccggt

SEQ ID NO: 108810 - DNA, 25 bp, Saccharomyces pastorianus
gtttgcaaagacagactcctaccga

SEQ ID NO: 108811 - DNA, 25 bp, Saccharomyces pastorianus
aatatgtacttcctgacttccaaac

SEQ ID NO: 108812 - DNA, 25 bp, Saccharomyces pastorianus
ctatgagcatggtcccgattggtgt

SEQ ID NO: 108813 - DNA, 25 bp, Saccharomyces pastorianus
ggaggaaactttaatctgcccaatt

SEQ ID NO: 108814 - DNA, 25 bp, Saccharomyces pastorianus
atgtaccgttacctgaagatgcgca

SEQ ID NO: 108815 - DNA, 25 bp, Saccharomyces pastorianus
tagagagcctttccatgttgcccga

SEQ ID NO: 108816 - DNA, 25 bp, Saccharomyces pastorianus
gacggcgccggagaagatttgtata

SEQ ID NO: 108817 - DNA, 25 bp, Saccharomyces pastorianus
ttgtgcctcacatgcgactgtaaat

SEQ ID NO: 108818 - DNA, 25 bp, Saccharomyces pastorianus
attcacacggacgatcttccagaag

SEQ ID NO: 108819 - DNA, 25 bp, Saccharomyces pastorianus
ttggcccattctagataaccctcat

SEQ ID NO: 108820 - DNA, 25 bp, Saccharomyces pastorianus
gttcatattgagtttccaccagata

SEQ ID NO: 108821 - DNA, 25 bp, Saccharomyces pastorianus
aaaaacgaatctgccgtcatcttca

SEQ ID NO: 108822 - DNA, 25 bp, Saccharomyces pastorianus
ggtgacaccatcaaaatcgccaatg

SEQ ID NO: 108823 - DNA, 25 bp, Saccharomyces pastorianus
ttgaagaactttgacgacggcgccg

SEQ ID NO: 108824 - DNA, 25 bp, Saccharomyces pastorianus
ttaagcgaggccttgacgggatttg

SEQ ID NO: 108825 - DNA, 25 bp, Saccharomyces pastorianus
ccggtgcggcgatctgtatgttttc

SEQ ID NO: 108826 - DNA, 25 bp, Saccharomyces pastorianus
atcaaatttccggatcattcacacg

SEQ ID NO: 108827 - DNA, 25 bp, Saccharomyces pastorianus
ttctactgactcactggccatttga

SEQ ID NO: 108828 - DNA, 25 bp, Saccharomyces pastorianus
ggtagattccatcgctgtaaacaat

SEQ ID NO: 108829 - DNA, 25 bp, Saccharomyces pastorianus
ttcctatcaggaacgctcttggcga

SEQ ID NO: 108830 - DNA, 25 bp, Saccharomyces pastorianus
aacgtcttcaaggagcgtctggctg

SEQ ID NO: 108831 - DNA, 25 bp, Saccharomyces pastorianus
caacttttcgcaagacagctgtctc

SEQ ID NO: 108832 - DNA, 25 bp, Saccharomyces pastorianus
atgcgcatctcttccaaaaacacta

SEQ ID NO: 108833 - DNA, 25 bp, Saccharomyces pastorianus
attgactgccgtcttctatgacgag

SEQ ID NO: 108834 - DNA, 25 bp, Saccharomyces pastorianus
aaaacactaccactttctactgact

SEQ ID NO: 108835 - DNA, 25 bp, Saccharomyces pastorianus
tatacgactactaatgccgactcca

SEQ ID NO: 108836 - DNA, 25 bp, Saccharomyces pastorianus
gacgagactgtagagcgacgcctta

SEQ ID NO: 108837 - DNA, 25 bp, Saccharomyces pastorianus
agatcttgataccttcacaccagag

SEQ ID NO: 108838 - DNA, 25 bp, Saccharomyces pastorianus
ttcccacggcaatagaaggtcttct

SEQ ID NO: 108839 - DNA, 25 bp, Saccharomyces pastorianus
agggaactaaccgagtctgtctcac

SEQ ID NO: 108840 - DNA, 25 bp, Saccharomyces pastorianus
gataaacgcaaaccgctgtctgaat

SEQ ID NO: 108841 - DNA, 25 bp, Saccharomyces pastorianus
aaaacaaatccagccatcaatccag

SEQ ID NO: 108842 - DNA, 25 bp, Saccharomyces pastorianus
tcaccccataattacatactcgcag

SEQ ID NO: 108843 - DNA, 25 bp, Saccharomyces pastorianus
ttatctgcgcttggtgcatcaggga

SEQ ID NO: 108844 - DNA, 25 bp, Saccharomyces pastorianus
aacgcctaatatcgccgcttacgaa

SEQ ID NO: 108845 - DNA, 25 bp, Saccharomyces pastorianus
gctgcgcaacatttttgtgcctgaa

SEQ ID NO: 108846 - DNA, 25 bp, Saccharomyces pastorianus
tgaacccagcaccaagtcttcaaga

SEQ ID NO: 108847 - DNA, 25 bp, Saccharomyces pastorianus
tgtctgaatgctccacttttatctg

SEQ ID NO: 108848 - DNA, 25 bp, Saccharomyces pastorianus
tctgtctcacctccagtgtttaata

SEQ ID NO: 108849 - DNA, 25 bp, Saccharomyces pastorianus
atccggagggcaatggttcaatgtt

SEQ ID NO: 108850 - DNA, 25 bp, Saccharomyces pastorianus
gtcttgtgttccataaagtgggcca

SEQ ID NO: 108851 - DNA, 25 bp, Saccharomyces pastorianus
gacccgatattgacatcatgtgcgg

SEQ ID NO: 108852 - DNA, 25 bp, Saccharomyces pastorianus
tgaagagtaccttcttttgcaagaa

SEQ ID NO: 108853 - DNA, 25 bp, Saccharomyces pastorianus
aagtgggccatctagacggcataga

SEQ ID NO: 108854 - DNA, 25 bp, Saccharomyces pastorianus
tagagagtgtacctggatgcaacaa

SEQ ID NO: 108855 - DNA, 25 bp, Saccharomyces pastorianus
atatgacagtgcgaatccggagggc

SEQ ID NO: 108856 - DNA, 25 bp, Saccharomyces pastorianus
aaatgccatgacagagtgccaatag

SEQ ID NO: 108857 - DNA, 25 bp, Saccharomyces pastorianus
ctgaatactttgagccacatcgagg

SEQ ID NO: 108858 - DNA, 25 bp, Saccharomyces pastorianus
gattattcaccgctttgtgagcgca

SEQ ID NO: 108859 - DNA, 25 bp, Saccharomyces pastorianus
gcatagacagctatcgacccgatat

SEQ ID NO: 108860 - DNA, 25 bp, Saccharomyces pastorianus
agtatcgttctcatctttgcattgt

SEQ ID NO: 108861 - DNA, 25 bp, Saccharomyces pastorianus
gttgcacagcagaaagactgtcctt

SEQ ID NO: 108862 - DNA, 25 bp, Saccharomyces pastorianus
ttgtttatttttggcagcactggag

SEQ ID NO: 108863 - DNA, 25 bp, Saccharomyces pastorianus
tgatgggtatttgtgtccggacacc

SEQ ID NO: 108864 - DNA, 25 bp, Saccharomyces pastorianus
gatgaccctgtcaagggccccaaag

SEQ ID NO: 108865 - DNA, 25 bp, Saccharomyces pastorianus
gcactggagtgaatgccttcttcaa

SEQ ID NO: 108866 - DNA, 25 bp, Saccharomyces pastorianus
agttgaaatgtgtccttcctgataa

SEQ ID NO: 108867 - DNA, 25 bp, Saccharomyces pastorianus
tccaaaccagccacacacaatgaaa

SEQ ID NO: 108868 - DNA, 25 bp, Saccharomyces pastorianus
ggacaccctaacgtgcgttgcacag

SEQ ID NO: 108869 - DNA, 25 bp, Saccharomyces pastorianus
gtcaaagtcgttggagtatcgttct

SEQ ID NO: 108870 - DNA, 25 bp, Saccharomyces pastorianus
gagagcaatatatgatgaccctgtc

SEQ ID NO: 108871 - DNA, 25 bp, Saccharomyces pastorianus
tgcacttcctgttcttgacatatct

SEQ ID NO: 108872 - DNA, 25 bp, Saccharomyces pastorianus
gatctggtataaaattcggctgcga

SEQ ID NO: 108873 - DNA, 25 bp, Saccharomyces pastorianus
agaacggtgatcttttgccactcga

SEQ ID NO: 108874 - DNA, 25 bp, Saccharomyces pastorianus
atgtttttaacttttgcacttcctg

SEQ ID NO: 108875 - DNA, 25 bp, Saccharomyces pastorianus
gtggtattctagcatagcccgtgtt

SEQ ID NO: 108876 - DNA, 25 bp, Saccharomyces pastorianus
aagacgtgggcatcgttgcacaaca

SEQ ID NO: 108877 - DNA, 25 bp, Saccharomyces pastorianus
ttgccactcgagtcactagaactaa

SEQ ID NO: 108878 - DNA, 25 bp, Saccharomyces pastorianus
ggaaactgtttcaattcgatgccaa

SEQ ID NO: 108879 - DNA, 25 bp, Saccharomyces pastorianus
gatattcactcctttgtcagatcat

SEQ ID NO: 108880 - DNA, 25 bp, Saccharomyces pastorianus
catcactacagatcacacggttggt

SEQ ID NO: 108881 - DNA, 25 bp, Saccharomyces pastorianus
gtcttgaccacgacgtctctaaaga

SEQ ID NO: 108882 - DNA, 25 bp, Saccharomyces pastorianus
aatagccagcactcaaagcagttct

SEQ ID NO: 108883 - DNA, 25 bp, Saccharomyces pastorianus
ggcgcgcggcaaaggattcccaaaa

SEQ ID NO: 108884 - DNA, 25 bp, Saccharomyces pastorianus
tactcctgagaaatacttgtacggg

SEQ ID NO: 108885 - DNA, 25 bp, Saccharomyces pastorianus
aaagcagttctggacccattgcgat

SEQ ID NO: 108886 - DNA, 25 bp, Saccharomyces pastorianus
gaaatcagacgccaatagccagcac

SEQ ID NO: 108887 - DNA, 25 bp, Saccharomyces pastorianus
ctttctgggacttgtgcggagtttt

SEQ ID NO: 108888 - DNA, 25 bp, Saccharomyces pastorianus
tacgggataatccagggcctaccac

SEQ ID NO: 108889 - DNA, 25 bp, Saccharomyces pastorianus
cattgcgattttcccatttggttct

SEQ ID NO: 108890 - DNA, 25 bp, Saccharomyces pastorianus
tccgacacgcgcgtctataaatagc

SEQ ID NO: 108891 - DNA, 25 bp, Saccharomyces pastorianus
cacgcttcgaggattggcttttatt

SEQ ID NO: 108892 - DNA, 25 bp, Saccharomyces pastorianus
gttcttgcgcgtgctgattccgaca

SEQ ID NO: 108893 - DNA, 25 bp, Saccharomyces pastorianus
gagattatcgtttttggtagccctt

SEQ ID NO: 108894 - DNA, 25 bp, Saccharomyces pastorianus
gttttgtggcaaaagggtccgcatt

SEQ ID NO: 108895 - DNA, 25 bp, Saccharomyces pastorianus
agatacatcctcagggcaccagcat

SEQ ID NO: 108896 - DNA, 25 bp, Saccharomyces pastorianus
ttacatccggcggtagcgcatgatg

SEQ ID NO: 108897 - DNA, 25 bp, Saccharomyces pastorianus
atgatgccatggctggctccagata

SEQ ID NO: 108898 - DNA, 25 bp, Saccharomyces pastorianus
ggcgaagtgcgcaacctcgaaggtt

SEQ ID NO: 108899 - DNA, 25 bp, Saccharomyces pastorianus
tagattggcgcaacatggctggctg

SEQ ID NO: 108900 - DNA, 25 bp, Saccharomyces pastorianus
ggtccgcattgtacctgtttacagt

SEQ ID NO: 108901 - DNA, 25 bp, Saccharomyces pastorianus
cttctttctttttccggcaatgaat

SEQ ID NO: 108902 - DNA, 25 bp, Saccharomyces pastorianus
ggtagcccttcattacggcataacg

SEQ ID NO: 108903 - DNA, 25 bp, Saccharomyces pastorianus
gtttcttttattttgctttgccctg

SEQ ID NO: 108904 - DNA, 25 bp, Saccharomyces pastorianus
atctgccacgtttgatgaccaagtt

SEQ ID NO: 108905 - DNA, 25 bp, Saccharomyces pastorianus
cttcgttaccacacagagatccaat

SEQ ID NO: 108906 - DNA, 25 bp, Saccharomyces pastorianus
ctgtcgatacctggcgtgttatgat

SEQ ID NO: 108907 - DNA, 25 bp, Saccharomyces pastorianus
taatgacgctgatctgcctgtcgat

SEQ ID NO: 108908 - DNA, 25 bp, Saccharomyces pastorianus
gttcgattggcactttaatgacgct

SEQ ID NO: 108909 - DNA, 25 bp, Saccharomyces pastorianus
atggcgctggcactactggaaatga

SEQ ID NO: 108910 - DNA, 25 bp, Saccharomyces pastorianus
gatgaaccagtagccgatgccaagt

SEQ ID NO: 108911 - DNA, 25 bp, Saccharomyces pastorianus
gttaaacatggctgcgcattcgcat

SEQ ID NO: 108912 - DNA, 25 bp, Saccharomyces pastorianus
gagatccaattccattttctgaaag

SEQ ID NO: 108913 - DNA, 25 bp, Saccharomyces pastorianus
aagagaatcactgcggcggatgcct

SEQ ID NO: 108914 - DNA, 25 bp, Saccharomyces pastorianus
atcactgacttgttgggatctccgc

SEQ ID NO: 108915 - DNA, 25 bp, Saccharomyces pastorianus
atatccatggcacaagctcgctata

SEQ ID NO: 108916 - DNA, 25 bp, Saccharomyces pastorianus
gttggattccggtactactttgact

SEQ ID NO: 108917 - DNA, 25 bp, Saccharomyces pastorianus
gagtactggcactacatgtctttta

SEQ ID NO: 108918 - DNA, 25 bp, Saccharomyces pastorianus
gtgcatctattgttaccggtggtaa

SEQ ID NO: 108919 - DNA, 25 bp, Saccharomyces pastorianus
ggtaacctgacgaccagtactgcat

SEQ ID NO: 108920 - DNA, 25 bp, Saccharomyces pastorianus
acatcaatgcaccactttcgagttt

SEQ ID NO: 108921 - DNA, 25 bp, Saccharomyces pastorianus
actgcttcctttagcggtaacctga

SEQ ID NO: 108922 - DNA, 25 bp, Saccharomyces pastorianus
attattacatcctctgttccaagcg

SEQ ID NO: 108923 - DNA, 25 bp, Saccharomyces pastorianus
atcatatagttccatctttacccct

SEQ ID NO: 108924 - DNA, 25 bp, Saccharomyces pastorianus
gtaaattcctcacaaactgcttcct

SEQ ID NO: 108925 - DNA, 25 bp, Saccharomyces pastorianus
aggtgcgcaatactcttccaggata

SEQ ID NO: 108926 - DNA, 25 bp, Saccharomyces pastorianus
aaggatgttcatcttcaggtgagaa

SEQ ID NO: 108927 - DNA, 25 bp, Saccharomyces pastorianus
ttgaatggaacagcggcatggccag

SEQ ID NO: 108928 - DNA, 25 bp, Saccharomyces pastorianus
aataagaatttcatgagccacttga

SEQ ID NO: 108929 - DNA, 25 bp, Saccharomyces pastorianus
gagaattcaggcttatgttcagaag

SEQ ID NO: 108930 - DNA, 25 bp, Saccharomyces pastorianus
gataactatcctctattgaatggaa

SEQ ID NO: 108931 - DNA, 25 bp, Saccharomyces pastorianus
agaggaatctgcaagggcttttgga

SEQ ID NO: 108932 - DNA, 25 bp, Saccharomyces pastorianus
gacataacttcgcaagaatccttga

SEQ ID NO: 108933 - DNA, 25 bp, Saccharomyces pastorianus
gagttagttgcagtcttgcgggaca

SEQ ID NO: 108934 - DNA, 25 bp, Saccharomyces pastorianus
ttggacgaacctcagatgaaagatt

SEQ ID NO: 108935 - DNA, 25 bp, Saccharomyces pastorianus
gcgggacaaagacataccactgaat

SEQ ID NO: 108936 - DNA, 25 bp, Saccharomyces pastorianus
aaatggtgatgtcgctagcccgaaa

SEQ ID NO: 108937 - DNA, 25 bp, Saccharomyces pastorianus
aaacgtgttccctcaattgtcagat

SEQ ID NO: 108938 - DNA, 25 bp, Saccharomyces pastorianus
agcaagactgaatatccgcccgtag

SEQ ID NO: 108939 - DNA, 25 bp, Saccharomyces pastorianus
taggcatatacatcactggttcaaa

SEQ ID NO: 108940 - DNA, 25 bp, Saccharomyces pastorianus
ctaaaactgaactctgtgggtcaaa

SEQ ID NO: 108941 - DNA, 25 bp, Saccharomyces pastorianus
gaattcaatagtgatgtcgctcaga

SEQ ID NO: 108942 - DNA, 25 bp, Saccharomyces pastorianus
ttggtcatcaagttatcgcggctgc

SEQ ID NO: 108943 - DNA, 25 bp, Saccharomyces pastorianus
tatcgcggctgctctaggaagttca

SEQ ID NO: 108944 - DNA, 25 bp, Saccharomyces pastorianus
gaagtctcaagacaagcttaccctt

SEQ ID NO: 108945 - DNA, 25 bp, Saccharomyces pastorianus
ccgcccgtagctggaatatgttttg

SEQ ID NO: 108946 - DNA, 25 bp, Saccharomyces pastorianus
gagtgctgacgtttcaaggacaccc

SEQ ID NO: 108947 - DNA, 25 bp, Saccharomyces pastorianus
agtgactgcgtgttcgatgtcccag

SEQ ID NO: 108948 - DNA, 25 bp, Saccharomyces pastorianus
atctaaggcataactacgaattcgt

SEQ ID NO: 108949 - DNA, 25 bp, Saccharomyces pastorianus
gatctaggctttaatgttcaagggt

SEQ ID NO: 108950 - DNA, 25 bp, Saccharomyces pastorianus
gatgcactgatggttatgccattct

SEQ ID NO: 108951 - DNA, 25 bp, Saccharomyces pastorianus
atgccattctcatatgtcctcaaat

SEQ ID NO: 108952 - DNA, 25 bp, Saccharomyces pastorianus
gaatgtctcagttagaagatgcact

SEQ ID NO: 108953 - DNA, 25 bp, Saccharomyces pastorianus
gcaatatattatggataccctgtta

SEQ ID NO: 108954 - DNA, 25 bp, Saccharomyces pastorianus
gaaagacttatggaggcgctagatt

SEQ ID NO: 108955 - DNA, 25 bp, Saccharomyces pastorianus
tgcactctcacttaccattaatttg

SEQ ID NO: 108956 - DNA, 25 bp, Saccharomyces pastorianus
ggtaactctgttctaattgctgtga

SEQ ID NO: 108957 - DNA, 25 bp, Saccharomyces pastorianus
acaaaactttgctgcactctcactt

SEQ ID NO: 108958 - DNA, 25 bp, Saccharomyces pastorianus
gcatccggtgttcataaacagactt

SEQ ID NO: 108959 - DNA, 25 bp, Saccharomyces pastorianus
gggcgcttttactactcaataatga

SEQ ID NO: 108960 - DNA, 25 bp, Saccharomyces pastorianus
taaacttcaaatctgcccatatccg

SEQ ID NO: 108961 - DNA, 25 bp, Saccharomyces pastorianus
ggcacagatttctcctttcaaaacg

SEQ ID NO: 108962 - DNA, 25 bp, Saccharomyces pastorianus
ggtggattttgacccgttgttcatc

SEQ ID NO: 108963 - DNA, 25 bp, Saccharomyces pastorianus
gttgttcatctcacacttgggagcc

SEQ ID NO: 108964 - DNA, 25 bp, Saccharomyces pastorianus
tttacacgtttccttaactcgatcg

SEQ ID NO: 108965 - DNA, 25 bp, Saccharomyces pastorianus
ccctgtctcagaatgtcccaataag

SEQ ID NO: 108966 - DNA, 25 bp, Saccharomyces pastorianus
agcaacccttcaaaagccacattaa

SEQ ID NO: 108967 - DNA, 25 bp, Saccharomyces pastorianus
atatcagaacgagccaacaccttgt

SEQ ID NO: 108968 - DNA, 25 bp, Saccharomyces pastorianus
tacatgtttcaattgccatcgccag

SEQ ID NO: 108969 - DNA, 25 bp, Saccharomyces pastorianus
agcgattcaccgacaacttcagaaa

SEQ ID NO: 108970 - DNA, 25 bp, Saccharomyces pastorianus
gtacttactgtaacgtctcttcgac

SEQ ID NO: 108971 - DNA, 25 bp, Saccharomyces pastorianus
agagaagcaatggtcgcggctccgc

SEQ ID NO: 108972 - DNA, 25 bp, Saccharomyces pastorianus
gtctcttcgactagcaaacaatcag

SEQ ID NO: 108973 - DNA, 25 bp, Saccharomyces pastorianus
gtaagtgtcagtttgctcacggact

SEQ ID NO: 108974 - DNA, 25 bp, Saccharomyces pastorianus
actaggttattgtccttatggcaga

SEQ ID NO: 108975 - DNA, 25 bp, Saccharomyces pastorianus
ggactatgtcccaaaatcttcacaa

SEQ ID NO: 108976 - DNA, 25 bp, Saccharomyces pastorianus
tagcacggcacctactacttttaaa

SEQ ID NO: 108977 - DNA, 25 bp, Saccharomyces pastorianus
tttgctcacggactcggcgaattaa

SEQ ID NO: 108978 - DNA, 25 bp, Saccharomyces pastorianus
aaagccaagtgcaggaaactcccaa

SEQ ID NO: 108979 - DNA, 25 bp, Saccharomyces pastorianus
gagctgtgcgaatcattcactttaa

SEQ ID NO: 108980 - DNA, 25 bp, Saccharomyces pastorianus
gaatcctcagctcaacctaaggtga

SEQ ID NO: 108981 - DNA, 25 bp, Saccharomyces pastorianus
tgaggcacagggacatatcgtttct

SEQ ID NO: 108982 - DNA, 25 bp, Saccharomyces pastorianus
gatctcttaaagaatgcaccattat

SEQ ID NO: 108983 - DNA, 25 bp, Saccharomyces pastorianus
tacgtgggtcacagatcaaatttat

SEQ ID NO: 108984 - DNA, 25 bp, Saccharomyces pastorianus
atttatcgttgttccagatctctta

SEQ ID NO: 108985 - DNA, 25 bp, Saccharomyces pastorianus
agcgacttatcgtggtaaacttgtt

SEQ ID NO: 108986 - DNA, 25 bp, Saccharomyces pastorianus
agctaacaacgggagcgacttatcg

SEQ ID NO: 108987 - DNA, 25 bp, Saccharomyces pastorianus
gatgtaatagctacagagccccagg

SEQ ID NO: 108988 - DNA, 25 bp, Saccharomyces pastorianus
ggacatatcgtttctctggagctaa

SEQ ID NO: 108989 - DNA, 25 bp, Saccharomyces pastorianus
gatcaaatattcgtacgtgggtcac

SEQ ID NO: 108990 - DNA, 25 bp, Saccharomyces pastorianus
gcatgaacgtacagctaagagatgt

SEQ ID NO: 108991 - DNA, 25 bp, Saccharomyces pastorianus
gggctgtaacacacatggatcaaat

SEQ ID NO: 108992 - DNA, 25 bp, Saccharomyces pastorianus
tgtatgctttcttggtttatttcta

SEQ ID NO: 108993 - DNA, 25 bp, Saccharomyces pastorianus
gtatgctttcttggtttatttctac

SEQ ID NO: 108994 - DNA, 25 bp, Saccharomyces pastorianus
atttctacttcacctctaaaagaat

SEQ ID NO: 108995 - DNA, 25 bp, Saccharomyces pastorianus
acttcacctctaaaagaatactgtg

SEQ ID NO: 108996 - DNA, 25 bp, Saccharomyces pastorianus
tatttctacttcacctctaaaagaa

SEQ ID NO: 108997 - DNA, 25 bp, Saccharomyces pastorianus
gtgtatgctttcttggtttatttct

SEQ ID NO: 108998 - DNA, 25 bp, Saccharomyces pastorianus
tctacttcacctctaaaagaatact

SEQ ID NO: 108999 - DNA, 25 bp, Saccharomyces pastorianus
atgtgtatgctttcttggtttattt

SEQ ID NO: 109000 - DNA, 25 bp, Saccharomyces pastorianus
tgtgtatgctttcttggtttatttc

SEQ ID NO: 109001 - DNA, 25 bp, Saccharomyces pastorianus
tacttcacctctaaaagaatactgt

SEQ ID NO: 109002 - DNA, 25 bp, Saccharomyces pastorianus
tatgctttcttggtttatttctact

SEQ ID NO: 109003 - DNA, 25 bp, Saccharomyces pastorianus
gacgccttccagtagcgataacaca

SEQ ID NO: 109004 - DNA, 25 bp, Saccharomyces pastorianus
tcgcaacgaattggcgcgattgcaa

SEQ ID NO: 109005 - DNA, 25 bp, Saccharomyces pastorianus
gagagggcactgatcgcaacgaatt

SEQ ID NO: 109006 - DNA, 25 bp, Saccharomyces pastorianus
aataccttcagtaatggcgccatcc

SEQ ID NO: 109007 - DNA, 25 bp, Saccharomyces pastorianus
atcctctcgggaaacacaataactg

SEQ ID NO: 109008 - DNA, 25 bp, Saccharomyces pastorianus
gatgcttacaccgtgagcttcatgc

SEQ ID NO: 109009 - DNA, 25 bp, Saccharomyces pastorianus
cttcatgcctttctataccgagtat

SEQ ID NO: 109010 - DNA, 25 bp, Saccharomyces pastorianus
ataccgagtatcaaggaccaaccga

SEQ ID NO: 109011 - DNA, 25 bp, Saccharomyces pastorianus
gatgccgtgaatctagatgcttaca

SEQ ID NO: 109012 - DNA, 25 bp, Saccharomyces pastorianus
gagggaaaagtctgcgacgccttcc

SEQ ID NO: 109013 - DNA, 25 bp, Saccharomyces pastorianus
gatactatttactttcgtggcaagg

SEQ ID NO: 109014 - DNA, 25 bp, Saccharomyces pastorianus
ggaaatacatccactgtccctaatg

SEQ ID NO: 109015 - DNA, 25 bp, Saccharomyces pastorianus
agccattggcacaggtacaaactcc

SEQ ID NO: 109016 - DNA, 25 bp, Saccharomyces pastorianus
acctcttacgctgattcaggtctgt

SEQ ID NO: 109017 - DNA, 25 bp, Saccharomyces pastorianus
tatatgtcattttccacctcttacg

SEQ ID NO: 109018 - DNA, 25 bp, Saccharomyces pastorianus
agctctgttgctatcgttggatgga

SEQ ID NO: 109019 - DNA, 25 bp, Saccharomyces pastorianus
ggtctgcacctgattattttgtagc

SEQ ID NO: 109020 - DNA, 25 bp, Saccharomyces pastorianus
aagctcagctaaaggcagctctgtt

SEQ ID NO: 109021 - DNA, 25 bp, Saccharomyces pastorianus
ccagtttcaatggttgccctaggaa

SEQ ID NO: 109022 - DNA, 25 bp, Saccharomyces pastorianus
tgtagctctggcaacacaagcgatt

SEQ ID NO: 109023 - DNA, 25 bp, Saccharomyces pastorianus
atggttctttggctaattcttatat

SEQ ID NO: 109024 - DNA, 25 bp, Saccharomyces pastorianus
agaaggcgtgtcatggtctgcacct

SEQ ID NO: 109025 - DNA, 25 bp, Saccharomyces pastorianus
cctttctctctcaatagcactatta

SEQ ID NO: 109026 - DNA, 25 bp, Saccharomyces pastorianus
gacatccctttctctctcaatagca

SEQ ID NO: 109027 - DNA, 25 bp, Saccharomyces pastorianus
atgatgacatccctttctctctcaa

SEQ ID NO: 109028 - DNA, 25 bp, Saccharomyces pastorianus
attatctaaaactgacttagtcaaa

SEQ ID NO: 109029 - DNA, 25 bp, Saccharomyces pastorianus
agcactattatctaaaactgactta

SEQ ID NO: 109030 - DNA, 25 bp, Saccharomyces pastorianus
atgacatccctttctctctcaatag

SEQ ID NO: 109031 - DNA, 25 bp, Saccharomyces pastorianus
tgatgacatccctttctctctcaat

SEQ ID NO: 109032 - DNA, 25 bp, Saccharomyces pastorianus
ttctctctcaatagcactattatct

SEQ ID NO: 109033 - DNA, 25 bp, Saccharomyces pastorianus
ctttctctctcaatagcactattat

SEQ ID NO: 109034 - DNA, 25 bp, Saccharomyces pastorianus
aatatcacttagaatatcaacagcc

SEQ ID NO: 109035 - DNA, 25 bp, Saccharomyces pastorianus
atccctttctctctcaatagcacta

SEQ ID NO: 109036 - DNA, 25 bp, Saccharomyces pastorianus
acaaggtcgatgctgaaggtaaggt

SEQ ID NO: 109037 - DNA, 25 bp, Saccharomyces pastorianus
ctacaaggtcgatgctgaaggtaag

SEQ ID NO: 109038 - DNA, 25 bp, Saccharomyces pastorianus
tacaaggtcgatgctgaaggtaagg

SEQ ID NO: 109039 - DNA, 25 bp, Saccharomyces pastorianus
aggtctacaccaccccaaagaagat

SEQ ID NO: 109040 - DNA, 25 bp, Saccharomyces pastorianus
gaaggtctacaccaccccaaagaag

SEQ ID NO: 109041 - DNA, 25 bp, Saccharomyces pastorianus
ggtctacaccaccccaaagaagatc

SEQ ID NO: 109042 - DNA, 25 bp, Saccharomyces pastorianus
tgagaagagaatgtagcaacccaac

SEQ ID NO: 109043 - DNA, 25 bp, Saccharomyces pastorianus
tactacaaggtcgatgctgaaggta

SEQ ID NO: 109044 - DNA, 25 bp, Saccharomyces pastorianus
actacaaggtcgatgctgaaggtaa

SEQ ID NO: 109045 - DNA, 25 bp, Saccharomyces pastorianus
gaagaaggtctacaccaccccaaag

SEQ ID NO: 109046 - DNA, 25 bp, Saccharomyces pastorianus
gtctacaccaccccaaagaagatca

SEQ ID NO: 109047 - DNA, 25 bp, Saccharomyces pastorianus
agagaatgtagcaacccaacttgtg

SEQ ID NO: 109048 - DNA, 25 bp, Saccharomyces pastorianus
ccaacttgtggtgctggtgttttct

SEQ ID NO: 109049 - DNA, 25 bp, Saccharomyces pastorianus
tggtgttttcttggctaaccacaag

SEQ ID NO: 109050 - DNA, 25 bp, Saccharomyces pastorianus
tttcttggctaaccacaaggacaga

SEQ ID NO: 109051 - DNA, 25 bp, Saccharomyces pastorianus
gactattaccctggaagttgaatct

SEQ ID NO: 109052 - DNA, 25 bp, Saccharomyces pastorianus
tcaagttggctgtcttgtcctacta

SEQ ID NO: 109053 - DNA, 25 bp, Saccharomyces pastorianus
ttgtcctactacaaggtcgatgctg

SEQ ID NO: 109054 - DNA, 25 bp, Saccharomyces pastorianus
gttttcttggctaaccacaaggaca

SEQ ID NO: 109055 - DNA, 25 bp, Saccharomyces pastorianus
gtgttttcttggctaaccacaagga

SEQ ID NO: 109056 - DNA, 25 bp, Saccharomyces pastorianus
tacaccaccccaaagaagatcaagc

SEQ ID NO: 109057 - DNA, 25 bp, Saccharomyces pastorianus
aagcacaagcacaagaaggtcaagt

SEQ ID NO: 109058 - DNA, 25 bp, Saccharomyces pastorianus
atatggatccattagaaagctgtgt

SEQ ID NO: 109059 - DNA, 25 bp, Saccharomyces pastorianus
tatccgcaggtacgcttcttaaagg

SEQ ID NO: 109060 - DNA, 25 bp, Saccharomyces pastorianus
tcatgatgatgctaggagggaccaa

SEQ ID NO: 109061 - DNA, 25 bp, Saccharomyces pastorianus
gcaggaagcccaaattacagcatat

SEQ ID NO: 109062 - DNA, 25 bp, Saccharomyces pastorianus
aacacttttccagcaggaagcccaa

SEQ ID NO: 109063 - DNA, 25 bp, Saccharomyces pastorianus
cgcatcccgatgactcggctaataa

SEQ ID NO: 109064 - DNA, 25 bp, Saccharomyces pastorianus
gattggtcagttcaaaggttttgcg

SEQ ID NO: 109065 - DNA, 25 bp, Saccharomyces pastorianus
tacacatgtcatcgcagtggacgtt

SEQ ID NO: 109066 - DNA, 25 bp, Saccharomyces pastorianus
gacttgagcaatcaacttgtcagta

SEQ ID NO: 109067 - DNA, 25 bp, Saccharomyces pastorianus
gagcggcagaaccatcttacagcaa

SEQ ID NO: 109068 - DNA, 25 bp, Saccharomyces pastorianus
aggtcttagttactgaacggttgat

SEQ ID NO: 109069 - DNA, 25 bp, Saccharomyces pastorianus
tcaagattatcgttgctctccatgg

SEQ ID NO: 109070 - DNA, 25 bp, Saccharomyces pastorianus
agatatttttgtccgggcaacggct

SEQ ID NO: 109071 - DNA, 25 bp, Saccharomyces pastorianus
ttattcttctcctttcttcttcatt

SEQ ID NO: 109072 - DNA, 25 bp, Saccharomyces pastorianus
atggtgtccatcacggtcacatggt

SEQ ID NO: 109073 - DNA, 25 bp, Saccharomyces pastorianus
aacggcttttgcgacagacggtaat

SEQ ID NO: 109074 - DNA, 25 bp, Saccharomyces pastorianus
aacgttgtgccgatgctcgcaaaag

SEQ ID NO: 109075 - DNA, 25 bp, Saccharomyces pastorianus
acattcattgctttttaccgctctg

SEQ ID NO: 109076 - DNA, 25 bp, Saccharomyces pastorianus
taccgctctgaccaatcaacgttgt

SEQ ID NO: 109077 - DNA, 25 bp, Saccharomyces pastorianus
cctaactcagtaccctttcaagatt

SEQ ID NO: 109078 - DNA, 25 bp, Saccharomyces pastorianus
ttgttttttagtggccctaactcag

SEQ ID NO: 109079 - DNA, 25 bp, Saccharomyces pastorianus
ggtcacatggtgcagtacttccttc

SEQ ID NO: 109080 - DNA, 25 bp, Saccharomyces pastorianus
tacaagcgatatgctagtctatatt

SEQ ID NO: 109081 - DNA, 25 bp, Saccharomyces pastorianus
gcaatgtccgctggtgaaaaggcaa

SEQ ID NO: 109082 - DNA, 25 bp, Saccharomyces pastorianus
aatggtacacggcaatgtccgctgg

SEQ ID NO: 109083 - DNA, 25 bp, Saccharomyces pastorianus
ggacacatatttcggcaatgtttgt

SEQ ID NO: 109084 - DNA, 25 bp, Saccharomyces pastorianus
gaaagacttgacacctacgatatta

SEQ ID NO: 109085 - DNA, 25 bp, Saccharomyces pastorianus
gggtgacgcccgatgttgacaatga

SEQ ID NO: 109086 - DNA, 25 bp, Saccharomyces pastorianus
tgttgctggtttctaggcaaggaaa

SEQ ID NO: 109087 - DNA, 25 bp, Saccharomyces pastorianus
gacaatgaactgttgaccttggaaa

SEQ ID NO: 109088 - DNA, 25 bp, Saccharomyces pastorianus
gaagtactgcaccatgtgaccgtga

SEQ ID NO: 109089 - DNA, 25 bp, Saccharomyces pastorianus
acttcagtaaggtctacgatatctt

SEQ ID NO: 109090 - DNA, 25 bp, Saccharomyces pastorianus
tggaaattatccatcggtttgtcga

SEQ ID NO: 109091 - DNA, 25 bp, Saccharomyces pastorianus
gtgtccattgtttcgacaaaccgat

SEQ ID NO: 109092 - DNA, 25 bp, Saccharomyces pastorianus
tttgggttttcttgctaatatcgta

SEQ ID NO: 109093 - DNA, 25 bp, Saccharomyces pastorianus
cggacattgccgtgtaccatttctt

SEQ ID NO: 109094 - DNA, 25 bp, Saccharomyces pastorianus
gggcgtcaccccaacaataaaatat

SEQ ID NO: 109095 - DNA, 25 bp, Saccharomyces pastorianus
tgatttttccttgcctagaaaccag

SEQ ID NO: 109096 - DNA, 25 bp, Saccharomyces pastorianus
aattgcgtcatcttgtgtacctgtg

SEQ ID NO: 109097 - DNA, 25 bp, Saccharomyces pastorianus
ctagcatatcgcttgtatactactt

SEQ ID NO: 109098 - DNA, 25 bp, Saccharomyces pastorianus
agttcattgtcaacatcgggcgtca

SEQ ID NO: 109099 - DNA, 25 bp, Saccharomyces pastorianus
gtatccgtatataatctcctccagg

SEQ ID NO: 109100 - DNA, 25 bp, Saccharomyces pastorianus
acaatttttgccttttcaccagcgg

SEQ ID NO: 109101 - DNA, 25 bp, Saccharomyces pastorianus
actactttgtggtcattatactcga

SEQ ID NO: 109102 - DNA, 25 bp, Saccharomyces pastorianus
caattacgattcaggcgagccactt

SEQ ID NO: 109103 - DNA, 25 bp, Saccharomyces pastorianus
aaattggccttcatactttagtgtt

SEQ ID NO: 109104 - DNA, 25 bp, Saccharomyces pastorianus
catgtctatcgctcaatgttgtgaa

SEQ ID NO: 109105 - DNA, 25 bp, Saccharomyces pastorianus
gggcatgtggcctacaactatacaa

SEQ ID NO: 109106 - DNA, 25 bp, Saccharomyces pastorianus
tcccgatactccagcagttgcaatt

SEQ ID NO: 109107 - DNA, 25 bp, Saccharomyces pastorianus
atacctgctagagtttgccgacgac

SEQ ID NO: 109108 - DNA, 25 bp, Saccharomyces pastorianus
agtagattaggctcgagctcccaaa

SEQ ID NO: 109109 - DNA, 25 bp, Saccharomyces pastorianus
ggtacaaaggcatacactcccgata

SEQ ID NO: 109110 - DNA, 25 bp, Saccharomyces pastorianus
gtcatcctcggcagacaatgtcatg

SEQ ID NO: 109111 - DNA, 25 bp, Saccharomyces pastorianus
gtatttcaaacctgcggcatgggtc

SEQ ID NO: 109112 - DNA, 25 bp, Saccharomyces pastorianus
acgtgaggcaattcccgtcgaaatt

SEQ ID NO: 109113 - DNA, 25 bp, Saccharomyces pastorianus
tactaccgaggagttcattgacgcg

SEQ ID NO: 109114 - DNA, 25 bp, Saccharomyces pastorianus
tattgttgcacaaggatttggctcc

SEQ ID NO: 109115 - DNA, 25 bp, Saccharomyces pastorianus
agaagtttgaatcccttggcatctg

SEQ ID NO: 109116 - DNA, 25 bp, Saccharomyces pastorianus
gagacgtcaacaaattccattgcat

SEQ ID NO: 109117 - DNA, 25 bp, Saccharomyces pastorianus
agccgcccacggtacagtaacaaga

SEQ ID NO: 109118 - DNA, 25 bp, Saccharomyces pastorianus
aaagatttggcgctcattctcggta

SEQ ID NO: 109119 - DNA, 25 bp, Saccharomyces pastorianus
agatccgcttatgttactaccgagg

SEQ ID NO: 109120 - DNA, 25 bp, Saccharomyces pastorianus
ggcatctggtacgagcactgtttaa

SEQ ID NO: 109121 - DNA, 25 bp, Saccharomyces pastorianus
agatgtagttaagttcggccaaata

SEQ ID NO: 109122 - DNA, 25 bp, Saccharomyces pastorianus
ttgcatcaattttcgcgtggactag

SEQ ID NO: 109123 - DNA, 25 bp, Saccharomyces pastorianus
tgacatctgtgttgattaccccgga

SEQ ID NO: 109124 - DNA, 25 bp, Saccharomyces pastorianus
catttccccaatgaccagtttatca

SEQ ID NO: 109125 - DNA, 25 bp, Saccharomyces pastorianus
gactctggttgataccaccaatggt

SEQ ID NO: 109126 - DNA, 25 bp, Saccharomyces pastorianus
gaatgcagagttccaatttgacaga

SEQ ID NO: 109127 - DNA, 25 bp, Saccharomyces pastorianus
aatagtcaacagcatttccccaatg

SEQ ID NO: 109128 - DNA, 25 bp, Saccharomyces pastorianus
aaaggctcttcacattgcacagcta

SEQ ID NO: 109129 - DNA, 25 bp, Saccharomyces pastorianus
gtggcccctgaactgaatcgtttga

SEQ ID NO: 109130 - DNA, 25 bp, Saccharomyces pastorianus
aattgactttctactacatttgcca

SEQ ID NO: 109131 - DNA, 25 bp, Saccharomyces pastorianus
gtaagccggtcgctcatgagttgaa

SEQ ID NO: 109132 - DNA, 25 bp, Saccharomyces pastorianus
aagcaggttctgagatttgccaccc

SEQ ID NO: 109133 - DNA, 25 bp, Saccharomyces pastorianus
aacactggaattgtcgtggcccctg

SEQ ID NO: 109134 - DNA, 25 bp, Saccharomyces pastorianus
ctccggtggcgggttgaacatcaaa

SEQ ID NO: 109135 - DNA, 25 bp, Saccharomyces pastorianus
gtacgttccccaagacgacgatttg

SEQ ID NO: 109136 - DNA, 25 bp, Saccharomyces pastorianus
cccaattccagttcacgttcaataa

SEQ ID NO: 109137 - DNA, 25 bp, Saccharomyces pastorianus
gagtactcatcaagtgcacctgttg

SEQ ID NO: 109138 - DNA, 25 bp, Saccharomyces pastorianus
ggtccccacagatatgttttcttgt

SEQ ID NO: 109139 - DNA, 25 bp, Saccharomyces pastorianus
gagacctccggagcaaccgaatttt

SEQ ID NO: 109140 - DNA, 25 bp, Saccharomyces pastorianus
ggtctgaattctgccacttggtaga

SEQ ID NO: 109141 - DNA, 25 bp, Saccharomyces pastorianus
gtaatgaccgatccggatgttccct

SEQ ID NO: 109142 - DNA, 25 bp, Saccharomyces pastorianus
agcctaagggcgtggactcatctaa

SEQ ID NO: 109143 - DNA, 25 bp, Saccharomyces pastorianus
ggatgttccctctaagacagatcac

SEQ ID NO: 109144 - DNA, 25 bp, Saccharomyces pastorianus
agtgcacctgttgccatgggtaaca

SEQ ID NO: 109145 - DNA, 25 bp, Saccharomyces pastorianus
aaagcgtaccacaggcgaatgcgta

SEQ ID NO: 109146 - DNA, 25 bp, Saccharomyces pastorianus
gtgcgggtgcctatgactatatcaa

SEQ ID NO: 109147 - DNA, 25 bp, Saccharomyces pastorianus
gattcgtccacttttaccaaggttg

SEQ ID NO: 109148 - DNA, 25 bp, Saccharomyces pastorianus
gttgtcggtttcgtacgttgattct

SEQ ID NO: 109149 - DNA, 25 bp, Saccharomyces pastorianus
atacgtgttcttcctgtgcaagcaa

SEQ ID NO: 109150 - DNA, 25 bp, Saccharomyces pastorianus
tcgctttgttgatgactgacccgga

SEQ ID NO: 109151 - DNA, 25 bp, Saccharomyces pastorianus
aaaagccaattgtcagccgaggata

SEQ ID NO: 109152 - DNA, 25 bp, Saccharomyces pastorianus
gttcacgcccttcgataaaagccaa

SEQ ID NO: 109153 - DNA, 25 bp, Saccharomyces pastorianus
gatattcctgtcgagtacggacctg

SEQ ID NO: 109154 - DNA, 25 bp, Saccharomyces pastorianus
aacaatctgcaactggtcggtgcca

SEQ ID NO: 109155 - DNA, 25 bp, Saccharomyces pastorianus
atattgggcctggtccaccaaagaa

SEQ ID NO: 109156 - DNA, 25 bp, Saccharomyces pastorianus
ggtcggaggtttgtcactacatcat

SEQ ID NO: 109157 - DNA, 25 bp, Saccharomyces pastorianus
gcgaatatgatgcagatgaaccctt

SEQ ID NO: 109158 - DNA, 25 bp, Saccharomyces pastorianus
cccacaagacattgacactgacgaa

SEQ ID NO: 109159 - DNA, 25 bp, Saccharomyces pastorianus
gttacaggccatatcttctgaagac

SEQ ID NO: 109160 - DNA, 25 bp, Saccharomyces pastorianus
ttccaccaacggtcttattgaaggc

SEQ ID NO: 109161 - DNA, 25 bp, Saccharomyces pastorianus
tatcttctgaagacccacaagacat

SEQ ID NO: 109162 - DNA, 25 bp, Saccharomyces pastorianus
gtattgattgggactctggcgaata

SEQ ID NO: 109163 - DNA, 25 bp, Saccharomyces pastorianus
gcggaatgataaacacctaaccaat

SEQ ID NO: 109164 - DNA, 25 bp, Saccharomyces pastorianus
tgaacccttcaaagtagagttcctt

SEQ ID NO: 109165 - DNA, 25 bp, Saccharomyces pastorianus
gaaggcgatatttccaaactattag

SEQ ID NO: 109166 - DNA, 25 bp, Saccharomyces pastorianus
tatgcttgatggtttgttacaggcc

SEQ ID NO: 109167 - DNA, 25 bp, Saccharomyces pastorianus
ggatacaatcagcaccaaacaatca

SEQ ID NO: 109168 - DNA, 25 bp, Saccharomyces pastorianus
aattacccattgtctgcctcagttg

SEQ ID NO: 109169 - DNA, 25 bp, Saccharomyces pastorianus
ggtattagcgatggcatccctcgag

SEQ ID NO: 109170 - DNA, 25 bp, Saccharomyces pastorianus
atcacctacctactaagtgccgtaa

SEQ ID NO: 109171 - DNA, 25 bp, Saccharomyces pastorianus
gtccttttgaactgtgacgaccatc

SEQ ID NO: 109172 - DNA, 25 bp, Saccharomyces pastorianus
ggaattctgatcgaggttaacccca

SEQ ID NO: 109173 - DNA, 25 bp, Saccharomyces pastorianus
gttatccgcgttcaagattacatcg

SEQ ID NO: 109174 - DNA, 25 bp, Saccharomyces pastorianus
ttaagaacccaattaccgatcacct

SEQ ID NO: 109175 - DNA, 25 bp, Saccharomyces pastorianus
aaagtcggcttgtccaattacccat

SEQ ID NO: 109176 - DNA, 25 bp, Saccharomyces pastorianus
tgacattatcctttgacgcaccagt

SEQ ID NO: 109177 - DNA, 25 bp, Saccharomyces pastorianus
ttgacgttgctagattctccaatca

SEQ ID NO: 109178 - DNA, 25 bp, Saccharomyces pastorianus
acacaagatatcgtccaatgggcct

SEQ ID NO: 109179 - DNA, 25 bp, Saccharomyces pastorianus
caagaatcccatgccctaagactag

SEQ ID NO: 109180 - DNA, 25 bp, Saccharomyces pastorianus
tttcaatgcaaatggcctctatggc

SEQ ID NO: 109181 - DNA, 25 bp, Saccharomyces pastorianus
tatttccacaacagcatctgtgcag

SEQ ID NO: 109182 - DNA, 25 bp, Saccharomyces pastorianus
gaacagccagattcttcttcgggaa

SEQ ID NO: 109183 - DNA, 25 bp, Saccharomyces pastorianus
actggcacgcgtttctgttttagac

SEQ ID NO: 109184 - DNA, 25 bp, Saccharomyces pastorianus
agaggagccaacttctgctatttcc

SEQ ID NO: 109185 - DNA, 25 bp, Saccharomyces pastorianus
tcttcgggaacttcgtccgaggaag

SEQ ID NO: 109186 - DNA, 25 bp, Saccharomyces pastorianus
aaaattagtgcattccatgacgacg

SEQ ID NO: 109187 - DNA, 25 bp, Saccharomyces pastorianus
ctaagactagactggcacgcgtttc

SEQ ID NO: 109188 - DNA, 25 bp, Saccharomyces pastorianus
gaaattgactgaatcctccgcagta

SEQ ID NO: 109189 - DNA, 25 bp, Saccharomyces pastorianus
gaaggatcctagtatacaggctcaa

SEQ ID NO: 109190 - DNA, 25 bp, Saccharomyces pastorianus
ggagtctgacttaaacaatgctgca

SEQ ID NO: 109191 - DNA, 25 bp, Saccharomyces pastorianus
gacagagccctattggatattgaca

SEQ ID NO: 109192 - DNA, 25 bp, Saccharomyces pastorianus
agaccaatttgggtggcgcatttaa

SEQ ID NO: 109193 - DNA, 25 bp, Saccharomyces pastorianus
aagatttcgacctagatggccccga

SEQ ID NO: 109194 - DNA, 25 bp, Saccharomyces pastorianus
gaaacacatcctttgtttaacgccg

SEQ ID NO: 109195 - DNA, 25 bp, Saccharomyces pastorianus
aaaaaatctccgctgaactactcct

SEQ ID NO: 109196 - DNA, 25 bp, Saccharomyces pastorianus
tctggcccgtgttagaggtggtact

SEQ ID NO: 109197 - DNA, 25 bp, Saccharomyces pastorianus
gaactactcctcatcgttagcgatt

SEQ ID NO: 109198 - DNA, 25 bp, Saccharomyces pastorianus
ggaaagaatcctccgctgacagagc

SEQ ID NO: 109199 - DNA, 25 bp, Saccharomyces pastorianus
gaaaggctcttactgctgctattac

SEQ ID NO: 109200 - DNA, 25 bp, Saccharomyces pastorianus
cgaagaacatccaagggctcgtgct

SEQ ID NO: 109201 - DNA, 25 bp, Saccharomyces pastorianus
tcatcttcgggatcctcatcaaaag

SEQ ID NO: 109202 - DNA, 25 bp, Saccharomyces pastorianus
gtggccgaaagcaactctgccgtaa

SEQ ID NO: 109203 - DNA, 25 bp, Saccharomyces pastorianus
taagcacaacttcaactgcctctgt

SEQ ID NO: 109204 - DNA, 25 bp, Saccharomyces pastorianus
ataccactacgtcaggttctacagt

SEQ ID NO: 109205 - DNA, 25 bp, Saccharomyces pastorianus
acatctactgtttggtggctaccgt

SEQ ID NO: 109206 - DNA, 25 bp, Saccharomyces pastorianus
gcaaaaccacgacacagtacctatg

SEQ ID NO: 109207 - DNA, 25 bp, Saccharomyces pastorianus
aacacctatgctgtggctccaagta

SEQ ID NO: 109208 - DNA, 25 bp, Saccharomyces pastorianus
ggtagcgtccgtaatgtccaattct

SEQ ID NO: 109209 - DNA, 25 bp, Saccharomyces pastorianus
ttgccggcactcacatagcttatgg

SEQ ID NO: 109210 - DNA, 25 bp, Saccharomyces pastorianus
acaactgacaacacggcttcatcaa

SEQ ID NO: 109211 - DNA, 25 bp, Saccharomyces pastorianus
gagagacgtcaagcggaatcaccaa

SEQ ID NO: 109212 - DNA, 25 bp, Saccharomyces pastorianus
aaattccccttggatgatgctacga

SEQ ID NO: 109213 - DNA, 25 bp, Saccharomyces pastorianus
gttctgtctcgtgatttcgatgtcg

SEQ ID NO: 109214 - DNA, 25 bp, Saccharomyces pastorianus
gtaaatactggtctgccatggcagg

SEQ ID NO: 109215 - DNA, 25 bp, Saccharomyces pastorianus
aagggcccaagcatggttctgtctc

SEQ ID NO: 109216 - DNA, 25 bp, Saccharomyces pastorianus
gtattgacatcgtcattcgctccag

SEQ ID NO: 109217 - DNA, 25 bp, Saccharomyces pastorianus
gctggtatctccacattatgttcaa

SEQ ID NO: 109218 - DNA, 25 bp, Saccharomyces pastorianus
tcattcgctccagacatcgaggtag

SEQ ID NO: 109219 - DNA, 25 bp, Saccharomyces pastorianus
gatgctacgaacactaagggcccaa

SEQ ID NO: 109220 - DNA, 25 bp, Saccharomyces pastorianus
gaatcgccagaaaatacaccagtaa

SEQ ID NO: 109221 - DNA, 25 bp, Saccharomyces pastorianus
cgaggtagcgggtaccatggtcatt

SEQ ID NO: 109222 - DNA, 25 bp, Saccharomyces pastorianus
ttggacattgaaggcacacgatgct

SEQ ID NO: 109223 - DNA, 25 bp, Saccharomyces pastorianus
catcatcttctaattttctcttctt

SEQ ID NO: 109224 - DNA, 25 bp, Saccharomyces pastorianus
gtagaattctaatctttgctcaact

SEQ ID NO: 109225 - DNA, 25 bp, Saccharomyces pastorianus
cattcttcaaagttggcttaccagt

SEQ ID NO: 109226 - DNA, 25 bp, Saccharomyces pastorianus
acttctgcagctggtttatctttgt

SEQ ID NO: 109227 - DNA, 25 bp, Saccharomyces pastorianus
ttttccttggtttcttccacttctg

SEQ ID NO: 109228 - DNA, 25 bp, Saccharomyces pastorianus
aaagttccatggcttcttgaatggc

SEQ ID NO: 109229 - DNA, 25 bp, Saccharomyces pastorianus
actttatttcgattcattgttcctt

SEQ ID NO: 109230 - DNA, 25 bp, Saccharomyces pastorianus
tcattgttccttttaatccttactt

SEQ ID NO: 109231 - DNA, 25 bp, Saccharomyces pastorianus
ggcttaccagtgttgtagaattcta

SEQ ID NO: 109232 - DNA, 25 bp, Saccharomyces pastorianus
ttctcttctttgaggattccttttc

SEQ ID NO: 109233 - DNA, 25 bp, Saccharomyces pastorianus
atggctaattcattcttcaaagttg

SEQ ID NO: 109234 - DNA, 25 bp, Saccharomyces pastorianus
cacaattgattgtcggtcccagtaa

SEQ ID NO: 109235 - DNA, 25 bp, Saccharomyces pastorianus
agaaactttcgttgtctgacatggg

SEQ ID NO: 109236 - DNA, 25 bp, Saccharomyces pastorianus
atatggcttttctttcccgatttat

SEQ ID NO: 109237 - DNA, 25 bp, Saccharomyces pastorianus
gtcttccccaatcttcaggtaaaca

SEQ ID NO: 109238 - DNA, 25 bp, Saccharomyces pastorianus
cccagttctcccctgatataatagt

SEQ ID NO: 109239 - DNA, 25 bp, Saccharomyces pastorianus
aatggcttggttttgagccttcaag

SEQ ID NO: 109240 - DNA, 25 bp, Saccharomyces pastorianus
gtgaaaagtccaagtcttccccaat

SEQ ID NO: 109241 - DNA, 25 bp, Saccharomyces pastorianus
tcatatcacagttagcccagttctc

SEQ ID NO: 109242 - DNA, 25 bp, Saccharomyces pastorianus
aaatgtcttgtagcgcctagtgagg

SEQ ID NO: 109243 - DNA, 25 bp, Saccharomyces pastorianus
taattggcacctctgataaaatcgc

SEQ ID NO: 109244 - DNA, 25 bp, Saccharomyces pastorianus
gtatatcgccgatttttggtaacat

SEQ ID NO: 109245 - DNA, 25 bp, Saccharomyces pastorianus
gtaatgtccttttaccagttgaaca

SEQ ID NO: 109246 - DNA, 25 bp, Saccharomyces pastorianus
gatacacctgtgtacaaattgacag

SEQ ID NO: 109247 - DNA, 25 bp, Saccharomyces pastorianus
ggtgccaaatatcaacagttgcaaa

SEQ ID NO: 109248 - DNA, 25 bp, Saccharomyces pastorianus
gagaagcgagctaattaaactgaac

SEQ ID NO: 109249 - DNA, 25 bp, Saccharomyces pastorianus
ccagttgaacaaagtgaggcacgta

SEQ ID NO: 109250 - DNA, 25 bp, Saccharomyces pastorianus
aacataagggacaagcaggaagaac

SEQ ID NO: 109251 - DNA, 25 bp, Saccharomyces pastorianus
ggccagacaaaaattagagacacaa

SEQ ID NO: 109252 - DNA, 25 bp, Saccharomyces pastorianus
gagtttgaccaattagaagaagata

SEQ ID NO: 109253 - DNA, 25 bp, Saccharomyces pastorianus
atgtctgaattaggtgccaaatatc

SEQ ID NO: 109254 - DNA, 25 bp, Saccharomyces pastorianus
gtgaggcacgtaccaacgtggacaa

SEQ ID NO: 109255 - DNA, 25 bp, Saccharomyces pastorianus
ttgacaggtaatgtccttttaccag

SEQ ID NO: 109256 - DNA, 25 bp, Saccharomyces pastorianus
gaatctttaaatgagctcggctatc

SEQ ID NO: 109257 - DNA, 25 bp, Saccharomyces pastorianus
aggaatcaaccctgacgtaactcca

SEQ ID NO: 109258 - DNA, 25 bp, Saccharomyces pastorianus
gaactacacagattgtccgatgata

SEQ ID NO: 109259 - DNA, 25 bp, Saccharomyces pastorianus
gtttcgagcacctacatcggttcaa

SEQ ID NO: 109260 - DNA, 25 bp, Saccharomyces pastorianus
tcccgagcacggtttctctgaaaga

SEQ ID NO: 109261 - DNA, 25 bp, Saccharomyces pastorianus
tccaccgctgtcatggaactgataa

SEQ ID NO: 109262 - DNA, 25 bp, Saccharomyces pastorianus
gaagagtttgcctggtacacgttaa

SEQ ID NO: 109263 - DNA, 25 bp, Saccharomyces pastorianus
ggtcatgcgtttgggtgagtactac

SEQ ID NO: 109264 - DNA, 25 bp, Saccharomyces pastorianus
attccaagcgcctttctctttgaaa

SEQ ID NO: 109265 - DNA, 25 bp, Saccharomyces pastorianus
atgatctcttcaataggtgctccca

SEQ ID NO: 109266 - DNA, 25 bp, Saccharomyces pastorianus
aatcggtgggcatttgtcggaacta

SEQ ID NO: 109267 - DNA, 25 bp, Saccharomyces pastorianus
tgaagaaaccaagttgcgggtccta

SEQ ID NO: 109268 - DNA, 25 bp, Saccharomyces pastorianus
gtcagtgagccattaaacggttcaa

SEQ ID NO: 109269 - DNA, 25 bp, Saccharomyces pastorianus
gatgaagaaacacaaactgcggaaa

SEQ ID NO: 109270 - DNA, 25 bp, Saccharomyces pastorianus
aattaacactacaatgcctcccatg

SEQ ID NO: 109271 - DNA, 25 bp, Saccharomyces pastorianus
tagtgatgcaactcgattcagtgat

SEQ ID NO: 109272 - DNA, 25 bp, Saccharomyces pastorianus
aagagggcatgctgagtacaatgat

SEQ ID NO: 109273 - DNA, 25 bp, Saccharomyces pastorianus
tgatgacggctacggcaacaaggat

SEQ ID NO: 109274 - DNA, 25 bp, Saccharomyces pastorianus
tgcgggtcctactttaacagaacct

SEQ ID NO: 109275 - DNA, 25 bp, Saccharomyces pastorianus
aatgcctcccatgcaagagggcatg

SEQ ID NO: 109276 - DNA, 25 bp, Saccharomyces pastorianus
ggcaacaaggatcactggcacagtc

SEQ ID NO: 109277 - DNA, 25 bp, Saccharomyces pastorianus
gaacctttcaaacagcaattaacac

SEQ ID NO: 109278 - DNA, 25 bp, Saccharomyces pastorianus
aaggccattccagttatgacgtcat

SEQ ID NO: 109279 - DNA, 25 bp, Saccharomyces pastorianus
gtagaacctcgtcagatatcgcgtg

SEQ ID NO: 109280 - DNA, 25 bp, Saccharomyces pastorianus
aattctcttgtctctaccgcgatga

SEQ ID NO: 109281 - DNA, 25 bp, Saccharomyces pastorianus
ttacaacaacgcatcaaattcccct

SEQ ID NO: 109282 - DNA, 25 bp, Saccharomyces pastorianus
gtctaccgtggtgaacgtctttgag

SEQ ID NO: 109283 - DNA, 25 bp, Saccharomyces pastorianus
gttcaagatgaattcgccgagtcaa

SEQ ID NO: 109284 - DNA, 25 bp, Saccharomyces pastorianus
gatatcgcgtgctatgaccaaatta

SEQ ID NO: 109285 - DNA, 25 bp, Saccharomyces pastorianus
atggtcctcttctgcgatgcacgtt

SEQ ID NO: 109286 - DNA, 25 bp, Saccharomyces pastorianus
aagccctagtttcactccatttaca

SEQ ID NO: 109287 - DNA, 25 bp, Saccharomyces pastorianus
ttattagacccttccaattctcttg

SEQ ID NO: 109288 - DNA, 25 bp, Saccharomyces pastorianus
aagatcgccatacttgcctttacaa

SEQ ID NO: 109289 - DNA, 25 bp, Saccharomyces pastorianus
gggcctcagccattaaaggtagtga

SEQ ID NO: 109290 - DNA, 25 bp, Saccharomyces pastorianus
gagaatatccaagaccggatgctac

SEQ ID NO: 109291 - DNA, 25 bp, Saccharomyces pastorianus
agctctggcaggctaaaactggcag

SEQ ID NO: 109292 - DNA, 25 bp, Saccharomyces pastorianus
tgtgccatgccgaaacaggtgactg

SEQ ID NO: 109293 - DNA, 25 bp, Saccharomyces pastorianus
atgtgtgggacacgagaatatccaa

SEQ ID NO: 109294 - DNA, 25 bp, Saccharomyces pastorianus
caggtgactggaggcagtgcttcaa

SEQ ID NO: 109295 - DNA, 25 bp, Saccharomyces pastorianus
aaggcacttctaagagttgcgccaa

SEQ ID NO: 109296 - DNA, 25 bp, Saccharomyces pastorianus
ttttttctcacaacaaatgtccgaa

SEQ ID NO: 109297 - DNA, 25 bp, Saccharomyces pastorianus
tcatgagtgaaactggcgaaacttc

SEQ ID NO: 109298 - DNA, 25 bp, Saccharomyces pastorianus
tagagagcgcgtaagcacagtggac

SEQ ID NO: 109299 - DNA, 25 bp, Saccharomyces pastorianus
aaactggcagactggtcatgagtga

SEQ ID NO: 109300 - DNA, 25 bp, Saccharomyces pastorianus
tacgagcccattccattgcagaaga

SEQ ID NO: 109301 - DNA, 25 bp, Saccharomyces pastorianus
taaagtgctgcaattctctcaagaa

SEQ ID NO: 109302 - DNA, 25 bp, Saccharomyces pastorianus
gtgtgacaaccgcaaagccatcttc

SEQ ID NO: 109303 - DNA, 25 bp, Saccharomyces pastorianus
agtagttacagattcaccttcaccc

SEQ ID NO: 109304 - DNA, 25 bp, Saccharomyces pastorianus
cccagcagcgtctatttcggaaggt

SEQ ID NO: 109305 - DNA, 25 bp, Saccharomyces pastorianus
gaatgaattatctgccgctgagcca

SEQ ID NO: 109306 - DNA, 25 bp, Saccharomyces pastorianus
aagtcagggcaatgtacctacctcc

SEQ ID NO: 109307 - DNA, 25 bp, Saccharomyces pastorianus
aactactgcgtcctcgaatgggcaa

SEQ ID NO: 109308 - DNA, 25 bp, Saccharomyces pastorianus
acaatggtcacttcgacacatgcca

SEQ ID NO: 109309 - DNA, 25 bp, Saccharomyces pastorianus
gatcctcccacgaagcacaagaagt

SEQ ID NO: 109310 - DNA, 25 bp, Saccharomyces pastorianus
aaagtcttcttcttcgcttttacag

SEQ ID NO: 109311 - DNA, 25 bp, Saccharomyces pastorianus
tgcagtcactatcggtggcggttat

SEQ ID NO: 109312 - DNA, 25 bp, Saccharomyces pastorianus
gtgggcacaggtctcatttattcta

SEQ ID NO: 109313 - DNA, 25 bp, Saccharomyces pastorianus
tggcggttatctacttggtgggcta

SEQ ID NO: 109314 - DNA, 25 bp, Saccharomyces pastorianus
attaccggtggctttgctgagttga

SEQ ID NO: 109315 - DNA, 25 bp, Saccharomyces pastorianus
gggtctagacgaacctgccgagaat

SEQ ID NO: 109316 - DNA, 25 bp, Saccharomyces pastorianus
gagattaaccctaatttctcggacg

SEQ ID NO: 109317 - DNA, 25 bp, Saccharomyces pastorianus
atctcaggtgcgatttctatgggcc

SEQ ID NO: 109318 - DNA, 25 bp, Saccharomyces pastorianus
taacagctggtctatcttcacttgg

SEQ ID NO: 109319 - DNA, 25 bp, Saccharomyces pastorianus
ttttttgtctcagatgtgggcacag

SEQ ID NO: 109320 - DNA, 25 bp, Saccharomyces pastorianus
acacctgagctaatggttgacttca

SEQ ID NO: 109321 - DNA, 25 bp, Saccharomyces pastorianus
atgggtagtggcagttcgacttcaa

SEQ ID NO: 109322 - DNA, 25 bp, Saccharomyces pastorianus
aagtgatcatgttttctcaaaaggt

SEQ ID NO: 109323 - DNA, 25 bp, Saccharomyces pastorianus
aaatcactatccattttggcagatg

SEQ ID NO: 109324 - DNA, 25 bp, Saccharomyces pastorianus
gtttcggatgtcgagcttacagacg

SEQ ID NO: 109325 - DNA, 25 bp, Saccharomyces pastorianus
gattcttcatcatcggatccatcat

SEQ ID NO: 109326 - DNA, 25 bp, Saccharomyces pastorianus
gggccatcgaagaacacgttggaga

SEQ ID NO: 109327 - DNA, 25 bp, Saccharomyces pastorianus
gctgccccggatttcacgaataaat

SEQ ID NO: 109328 - DNA, 25 bp, Saccharomyces pastorianus
tgagcaagatcccagagcctacgaa

SEQ ID NO: 109329 - DNA, 25 bp, Saccharomyces pastorianus
ggacattgcaatagaagtttcggat

SEQ ID NO: 109330 - DNA, 25 bp, Saccharomyces pastorianus
atcaatcgtcttagagctgccccgg

SEQ ID NO: 109331 - DNA, 25 bp, Saccharomyces pastorianus
attgccgaaaatatcaagcttgcga

SEQ ID NO: 109332 - DNA, 25 bp, Saccharomyces pastorianus
ggcagatgctctgcaggaaggcata

SEQ ID NO: 109333 - DNA, 25 bp, Saccharomyces pastorianus
gaggtttttgcaatggtaccatctc

SEQ ID NO: 109334 - DNA, 25 bp, Saccharomyces pastorianus
aagccattcatttaccaattctgcc

SEQ ID NO: 109335 - DNA, 25 bp, Saccharomyces pastorianus
gatcatgctgttaaatttccatcta

SEQ ID NO: 109336 - DNA, 25 bp, Saccharomyces pastorianus
gggctaatacccaataaggcggcta

SEQ ID NO: 109337 - DNA, 25 bp, Saccharomyces pastorianus
tggacttgaaggacacgcctatgtt

SEQ ID NO: 109338 - DNA, 25 bp, Saccharomyces pastorianus
aagagactcttctagtacgtccaga

SEQ ID NO: 109339 - DNA, 25 bp, Saccharomyces pastorianus
gatataatgagtgagctgcccgctt

SEQ ID NO: 109340 - DNA, 25 bp, Saccharomyces pastorianus
gataaacctgtgaagctggacttga

SEQ ID NO: 109341 - DNA, 25 bp, Saccharomyces pastorianus
tcatttccgcgtggttttgaagaat

SEQ ID NO: 109342 - DNA, 25 bp, Saccharomyces pastorianus
tgcccgctttcattaggtctattgc

SEQ ID NO: 109343 - DNA, 25 bp, Saccharomyces pastorianus
actacagtgactatatgggcggtta

SEQ ID NO: 109344 - DNA, 25 bp, Saccharomyces pastorianus
aacttcttcaaggatagattcccta

SEQ ID NO: 109345 - DNA, 25 bp, Saccharomyces pastorianus
tgccaatatctttaccgattacaag

SEQ ID NO: 109346 - DNA, 25 bp, Saccharomyces pastorianus
gaaatctctgatccgtttaactacg

SEQ ID NO: 109347 - DNA, 25 bp, Saccharomyces pastorianus
taacgccggaaaattttgccaatat

SEQ ID NO: 109348 - DNA, 25 bp, Saccharomyces pastorianus
attgtgcgacggttatacgttcatt

SEQ ID NO: 109349 - DNA, 25 bp, Saccharomyces pastorianus
aagcatgattgattcggtgattgac

SEQ ID NO: 109350 - DNA, 25 bp, Saccharomyces pastorianus
agattccctatcgaagtaacgccgg

SEQ ID NO: 109351 - DNA, 25 bp, Saccharomyces pastorianus
aacagggatcacaatctgccagaaa

SEQ ID NO: 109352 - DNA, 25 bp, Saccharomyces pastorianus
ttttatggtccaagctgtcacccag

SEQ ID NO: 109353 - DNA, 25 bp, Saccharomyces pastorianus
cccagccagtttctttattgtgcga

SEQ ID NO: 109354 - DNA, 25 bp, Saccharomyces pastorianus
acgttcattgtactatctctcatat

SEQ ID NO: 109355 - DNA, 25 bp, Saccharomyces pastorianus
cactgttggaacatagtcggctgga

SEQ ID NO: 109356 - DNA, 25 bp, Saccharomyces pastorianus
accgcatagttatcgaacactgttg

SEQ ID NO: 109357 - DNA, 25 bp, Saccharomyces pastorianus
gtcggctggaaattgattcgttgta

SEQ ID NO: 109358 - DNA, 25 bp, Saccharomyces pastorianus
gacaagggtctcaatcgatcgtaat

SEQ ID NO: 109359 - DNA, 25 bp, Saccharomyces pastorianus
actttagcgtttgcattttgtggaa

SEQ ID NO: 109360 - DNA, 25 bp, Saccharomyces pastorianus
atcaccgacaacaacacactttagc

SEQ ID NO: 109361 - DNA, 25 bp, Saccharomyces pastorianus
tataagttttgcttctctaattcgt

SEQ ID NO: 109362 - DNA, 25 bp, Saccharomyces pastorianus
tcatcacagtcaccgcatagttatc

SEQ ID NO: 109363 - DNA, 25 bp, Saccharomyces pastorianus
atcgtaatcttcttgaccggccgta

SEQ ID NO: 109364 - DNA, 25 bp, Saccharomyces pastorianus
ttagaaggcacgttttcccaacagc

SEQ ID NO: 109365 - DNA, 25 bp, Saccharomyces pastorianus
atggttcatcaccaatcatcacagt

SEQ ID NO: 109366 - DNA, 25 bp, Saccharomyces pastorianus
ttatttgtccactcgaagcatacta

SEQ ID NO: 109367 - DNA, 25 bp, Saccharomyces pastorianus
gggcaatgatcctgctaagcgattt

SEQ ID NO: 109368 - DNA, 25 bp, Saccharomyces pastorianus
atgacggaactgttggaagcctcca

SEQ ID NO: 109369 - DNA, 25 bp, Saccharomyces pastorianus
gctcctgctcccttatataatacat

SEQ ID NO: 109370 - DNA, 25 bp, Saccharomyces pastorianus
acaagtacttgaatgccgggcctgg

SEQ ID NO: 109371 - DNA, 25 bp, Saccharomyces pastorianus
acgtaattagattggctcctgctcc

SEQ ID NO: 109372 - DNA, 25 bp, Saccharomyces pastorianus
atggcgcccaattgtcactttactt

SEQ ID NO: 109373 - DNA, 25 bp, Saccharomyces pastorianus
actttacttcgattctgacactgga

SEQ ID NO: 109374 - DNA, 25 bp, Saccharomyces pastorianus
tattcgagccgattccaggagcatt

SEQ ID NO: 109375 - DNA, 25 bp, Saccharomyces pastorianus
attcaggcaatctaatccaagcgtt

SEQ ID NO: 109376 - DNA, 25 bp, Saccharomyces pastorianus
tttgcctgttggtgttcttacaagt

SEQ ID NO: 109377 - DNA, 25 bp, Saccharomyces pastorianus
agtcaatgctgacccaaggcacctt

SEQ ID NO: 109378 - DNA, 25 bp, Saccharomyces pastorianus
gaaatgcgattccacagcacagtcg

SEQ ID NO: 109379 - DNA, 25 bp, Saccharomyces pastorianus
tatcgtcggacgatagtcccatgga

SEQ ID NO: 109380 - DNA, 25 bp, Saccharomyces pastorianus
cggatattctccgtctaattccaaa

SEQ ID NO: 109381 - DNA, 25 bp, Saccharomyces pastorianus
gtctaattccaaagctttctccata

SEQ ID NO: 109382 - DNA, 25 bp, Saccharomyces pastorianus
gaattcccgcataagtacgtcacag

SEQ ID NO: 109383 - DNA, 25 bp, Saccharomyces pastorianus
cctctggcttcttcaggatgtttga

SEQ ID NO: 109384 - DNA, 25 bp, Saccharomyces pastorianus
tccacgcatctagctcagcattaat

SEQ ID NO: 109385 - DNA, 25 bp, Saccharomyces pastorianus
gtacgtcacaggcttatcgtcggac

SEQ ID NO: 109386 - DNA, 25 bp, Saccharomyces pastorianus
gaattcatccctcagagattccgga

SEQ ID NO: 109387 - DNA, 25 bp, Saccharomyces pastorianus
gaattcctagttgacttcggcatca

SEQ ID NO: 109388 - DNA, 25 bp, Saccharomyces pastorianus
acatacatcttaggtgtcggcgata

SEQ ID NO: 109389 - DNA, 25 bp, Saccharomyces pastorianus
tcggcgataggcacttagacaactt

SEQ ID NO: 109390 - DNA, 25 bp, Saccharomyces pastorianus
gaaggtgccattgaatttatcccta

SEQ ID NO: 109391 - DNA, 25 bp, Saccharomyces pastorianus
taccttaaactccactatcctgatg

SEQ ID NO: 109392 - DNA, 25 bp, Saccharomyces pastorianus
accagatgggcacttttttcacgca

SEQ ID NO: 109393 - DNA, 25 bp, Saccharomyces pastorianus
atcacggtattcttggctaccttaa

SEQ ID NO: 109394 - DNA, 25 bp, Saccharomyces pastorianus
cttgtgctggctattgtgttattac

SEQ ID NO: 109395 - DNA, 25 bp, Saccharomyces pastorianus
tcgcagctactgttttgtggcatat

SEQ ID NO: 109396 - DNA, 25 bp, Saccharomyces pastorianus
gatcccaatggtgctatattacgtg

SEQ ID NO: 109397 - DNA, 25 bp, Saccharomyces pastorianus
aaatgctttgctgcctatcgtgatt

SEQ ID NO: 109398 - DNA, 25 bp, Saccharomyces pastorianus
gccacagtgcattttcagaatctaa

SEQ ID NO: 109399 - DNA, 25 bp, Saccharomyces pastorianus
ggccttatgatactctaatttcgat

SEQ ID NO: 109400 - DNA, 25 bp, Saccharomyces pastorianus
tacctggagcccaccaatacaatat

SEQ ID NO: 109401 - DNA, 25 bp, Saccharomyces pastorianus
taattttcgtggcaaagttcaactt

SEQ ID NO: 109402 - DNA, 25 bp, Saccharomyces pastorianus
gatggtaagctcatcatgctttcaa

SEQ ID NO: 109403 - DNA, 25 bp, Saccharomyces pastorianus
aagcactattccgtttcttcaaagg

SEQ ID NO: 109404 - DNA, 25 bp, Saccharomyces pastorianus
ttacgatatttcatggttaagccaa

SEQ ID NO: 109405 - DNA, 25 bp, Saccharomyces pastorianus
gatcttattatcgtacggtgccaaa

SEQ ID NO: 109406 - DNA, 25 bp, Saccharomyces pastorianus
cacacctttacccagtatttcatac

SEQ ID NO: 109407 - DNA, 25 bp, Saccharomyces pastorianus
atgggactcggcaatcatgcgcaat

SEQ ID NO: 109408 - DNA, 25 bp, Saccharomyces pastorianus
ttgacgtttctttattccacacctt

SEQ ID NO: 109409 - DNA, 25 bp, Saccharomyces pastorianus
attgtaactaatctttcctattgga

SEQ ID NO: 109410 - DNA, 25 bp, Saccharomyces pastorianus
ggaactaccccatatcaatgtgttg

SEQ ID NO: 109411 - DNA, 25 bp, Saccharomyces pastorianus
ttagcggtgcactatctgctatgtc

SEQ ID NO: 109412 - DNA, 25 bp, Saccharomyces pastorianus
aacatagtgcgccatttaactcaac

SEQ ID NO: 109413 - DNA, 25 bp, Saccharomyces pastorianus
cgtcgatgatttcggtatggttcaa

SEQ ID NO: 109414 - DNA, 25 bp, Saccharomyces pastorianus
tctgctatgtctgcgatgattctat

SEQ ID NO: 109415 - DNA, 25 bp, Saccharomyces pastorianus
tcaagcatccaaccctaaatttcta

SEQ ID NO: 109416 - DNA, 25 bp, Saccharomyces pastorianus
gatgattctattggaactaccccat

SEQ ID NO: 109417 - DNA, 25 bp, Saccharomyces pastorianus
gtgcatagccaacctcgtcgatgat

SEQ ID NO: 109418 - DNA, 25 bp, Saccharomyces pastorianus
aaaaatctagactggcttgacgaag

SEQ ID NO: 109419 - DNA, 25 bp, Saccharomyces pastorianus
tatccctgtcttaccgaacatagtg

SEQ ID NO: 109420 - DNA, 25 bp, Saccharomyces pastorianus
aattgaactctacacgcatatccct

SEQ ID NO: 109421 - DNA, 25 bp, Saccharomyces pastorianus
caggtaccaccttccaagagttagg

SEQ ID NO: 109422 - DNA, 25 bp, Saccharomyces pastorianus
cccaagacggtaaactgagtgctca

SEQ ID NO: 109423 - DNA, 25 bp, Saccharomyces pastorianus
ttagatgtttccttatactaccaag

SEQ ID NO: 109424 - DNA, 25 bp, Saccharomyces pastorianus
gaacatacactgttggttaccgaac

SEQ ID NO: 109425 - DNA, 25 bp, Saccharomyces pastorianus
aaatattccccactacgccaagaat

SEQ ID NO: 109426 - DNA, 25 bp, Saccharomyces pastorianus
agttatttgtcacggtgtgcccgat

SEQ ID NO: 109427 - DNA, 25 bp, Saccharomyces pastorianus
gaagctcttaatactactgagacct

SEQ ID NO: 109428 - DNA, 25 bp, Saccharomyces pastorianus
gatcatattgaaaaacacgctaccg

SEQ ID NO: 109429 - DNA, 25 bp, Saccharomyces pastorianus
tgtgcccgataaaactgtcttgaag

SEQ ID NO: 109430 - DNA, 25 bp, Saccharomyces pastorianus
tttcaccatcgaacctatgattaat

SEQ ID NO: 109431 - DNA, 25 bp, Saccharomyces pastorianus
acgctaccgaaaataagtgcagtgt

SEQ ID NO: 109432 - DNA, 25 bp, Saccharomyces pastorianus
accagctgctgttgctatgcgtgac

SEQ ID NO: 109433 - DNA, 25 bp, Saccharomyces pastorianus
gatacgtccacgattctgcaaagaa

SEQ ID NO: 109434 - DNA, 25 bp, Saccharomyces pastorianus
ttgaccagtttttggacgacccatg

SEQ ID NO: 109435 - DNA, 25 bp, Saccharomyces pastorianus
aggtacttccgaaagacgccatccg

SEQ ID NO: 109436 - DNA, 25 bp, Saccharomyces pastorianus
gcgtgacgcctttgatattggtaat

SEQ ID NO: 109437 - DNA, 25 bp, Saccharomyces pastorianus
gagtatacctttctgaaaccttggt

SEQ ID NO: 109438 - DNA, 25 bp, Saccharomyces pastorianus
aagatagttacagtggcgcccaagg

SEQ ID NO: 109439 - DNA, 25 bp, Saccharomyces pastorianus
aacacgtggaggattaggctcgctt

SEQ ID NO: 109440 - DNA, 25 bp, Saccharomyces pastorianus
ggctcgcttgctgaggacgaagaat

SEQ ID NO: 109441 - DNA, 25 bp, Saccharomyces pastorianus
aaatcagcgccggtgccaagaatgc

SEQ ID NO: 109442 - DNA, 25 bp, Saccharomyces pastorianus
aaagagactcctcgctactgttttc

SEQ ID NO: 109443 - DNA, 25 bp, Saccharomyces pastorianus
ggcagagagcagaccaacttcataa

SEQ ID NO: 109444 - DNA, 25 bp, Saccharomyces pastorianus
cccgtggtcgaataactggataaga

SEQ ID NO: 109445 - DNA, 25 bp, Saccharomyces pastorianus
atttgagtcaccaaagttggctagc

SEQ ID NO: 109446 - DNA, 25 bp, Saccharomyces pastorianus
gggtactggaacagcatatacctaa

SEQ ID NO: 109447 - DNA, 25 bp, Saccharomyces pastorianus
tatttatcagaccttgttccttggg

SEQ ID NO: 109448 - DNA, 25 bp, Saccharomyces pastorianus
tttcggcagagagcagaccaacttc

SEQ ID NO: 109449 - DNA, 25 bp, Saccharomyces pastorianus
tatacctaatagactttcggcagag

SEQ ID NO: 109450 - DNA, 25 bp, Saccharomyces pastorianus
accaaagttggctagcaatctgctt

SEQ ID NO: 109451 - DNA, 25 bp, Saccharomyces pastorianus
aactagcatatttatcagaccttgt

SEQ ID NO: 109452 - DNA, 25 bp, Saccharomyces pastorianus
gagcagaccaacttcataaaaattt

SEQ ID NO: 109453 - DNA, 25 bp, Saccharomyces pastorianus
tggctagcaatctgcttttccttta

SEQ ID NO: 109454 - DNA, 25 bp, Saccharomyces pastorianus
aaggattcgcaaacatcaccgacga

SEQ ID NO: 109455 - DNA, 25 bp, Saccharomyces pastorianus
aatccctcgtgtggtgcttttgata

SEQ ID NO: 109456 - DNA, 25 bp, Saccharomyces pastorianus
agtttccccttttagcggctgcaat

SEQ ID NO: 109457 - DNA, 25 bp, Saccharomyces pastorianus
agcattttgtctagaatccctcgtg

SEQ ID NO: 109458 - DNA, 25 bp, Saccharomyces pastorianus
gaatgtctacagaatccactcgggc

SEQ ID NO: 109459 - DNA, 25 bp, Saccharomyces pastorianus
caaattttggttgtcgctcctattc

SEQ ID NO: 109460 - DNA, 25 bp, Saccharomyces pastorianus
attacgggccgtagcattgatgctg

SEQ ID NO: 109461 - DNA, 25 bp, Saccharomyces pastorianus
aggaacgttactgagcgacttgatg

SEQ ID NO: 109462 - DNA, 25 bp, Saccharomyces pastorianus
gaggactttcctgatcatgacgcaa

SEQ ID NO: 109463 - DNA, 25 bp, Saccharomyces pastorianus
aatactgcgccaagacggtctacga

SEQ ID NO: 109464 - DNA, 25 bp, Saccharomyces pastorianus
gttttatttgaccacggactctata

SEQ ID NO: 109465 - DNA, 25 bp, Saccharomyces pastorianus
tttatacggtcttgccttgtaaggc

SEQ ID NO: 109466 - DNA, 25 bp, Saccharomyces pastorianus
actgtggtttgctaatgcgctgggc

SEQ ID NO: 109467 - DNA, 25 bp, Saccharomyces pastorianus
cacacgaaattcaggatacggcgga

SEQ ID NO: 109468 - DNA, 25 bp, Saccharomyces pastorianus
atacggcggaggagttatctttatt

SEQ ID NO: 109469 - DNA, 25 bp, Saccharomyces pastorianus
gaggattgtatcgtttagacagccg

SEQ ID NO: 109470 - DNA, 25 bp, Saccharomyces pastorianus
ttgtaaggccctactcaagctggaa

SEQ ID NO: 109471 - DNA, 25 bp, Saccharomyces pastorianus
agacaggtgcagtggctcagccgta

SEQ ID NO: 109472 - DNA, 25 bp, Saccharomyces pastorianus
ggccctactcaagctggaacaagaa

SEQ ID NO: 109473 - DNA, 25 bp, Saccharomyces pastorianus
gttgtagcttccacaagatgttggc

SEQ ID NO: 109474 - DNA, 25 bp, Saccharomyces pastorianus
agccgtacagctcgtactgtggttt

SEQ ID NO: 109475 - DNA, 25 bp, Saccharomyces pastorianus
tagacagccgaattattacccggtt

SEQ ID NO: 109476 - DNA, 25 bp, Saccharomyces pastorianus
agtaagtactcttcatcaggcaccc

SEQ ID NO: 109477 - DNA, 25 bp, Saccharomyces pastorianus
aaacaattccaacaggccacatttg

SEQ ID NO: 109478 - DNA, 25 bp, Saccharomyces pastorianus
atattacaggtgaggcagacgacga

SEQ ID NO: 109479 - DNA, 25 bp, Saccharomyces pastorianus
aagggtgaatcgtaccagtccgcgg

SEQ ID NO: 109480 - DNA, 25 bp, Saccharomyces pastorianus
gacaaaaatcttcggctgagtttct

SEQ ID NO: 109481 - DNA, 25 bp, Saccharomyces pastorianus
gattacatcaactgatcctgtcgaa

SEQ ID NO: 109482 - DNA, 25 bp, Saccharomyces pastorianus
atcctgtcgaagatcacatcagtaa

SEQ ID NO: 109483 - DNA, 25 bp, Saccharomyces pastorianus
tctctgcgtgcttccaaatctaatt

SEQ ID NO: 109484 - DNA, 25 bp, Saccharomyces pastorianus
gtttctaagatccttatcgaggtca

SEQ ID NO: 109485 - DNA, 25 bp, Saccharomyces pastorianus
ggaaatagatcatacggcgcctgaa

SEQ ID NO: 109486 - DNA, 25 bp, Saccharomyces pastorianus
ggaaagtttttcctctccttctctg

SEQ ID NO: 109487 - DNA, 25 bp, Saccharomyces pastorianus
gtgttgcctcactattagctactac

SEQ ID NO: 109488 - DNA, 25 bp, Saccharomyces pastorianus
aagggttacgatgcctctaagtcag

SEQ ID NO: 109489 - DNA, 25 bp, Saccharomyces pastorianus
tagctactaccgaagttgccattgt

SEQ ID NO: 109490 - DNA, 25 bp, Saccharomyces pastorianus
cagaatacaccgacatgttagccac

SEQ ID NO: 109491 - DNA, 25 bp, Saccharomyces pastorianus
gaaggttcagttatcatcggcaaat

SEQ ID NO: 109492 - DNA, 25 bp, Saccharomyces pastorianus
aaatcaagggctccatcgacattac

SEQ ID NO: 109493 - DNA, 25 bp, Saccharomyces pastorianus
catcgacattaccaccacaaattca

SEQ ID NO: 109494 - DNA, 25 bp, Saccharomyces pastorianus
agttgccattgttgatgccccagaa

SEQ ID NO: 109495 - DNA, 25 bp, Saccharomyces pastorianus
aactgcaagagcgtttggccaaatt

SEQ ID NO: 109496 - DNA, 25 bp, Saccharomyces pastorianus
gccattacaagaccagccaagcaga

SEQ ID NO: 109497 - DNA, 25 bp, Saccharomyces pastorianus
ctgtcatcagggtcggtggtgcatc

SEQ ID NO: 109498 - DNA, 25 bp, Saccharomyces pastorianus
tagatcctgaagacattgccttcaa

SEQ ID NO: 109499 - DNA, 25 bp, Saccharomyces pastorianus
atgtctagtcgccaaggtggtaaga

SEQ ID NO: 109500 - DNA, 25 bp, Saccharomyces pastorianus
gacttagatcctgaagacattgcct

SEQ ID NO: 109501 - DNA, 25 bp, Saccharomyces pastorianus
acttagatcctgaagacattgcctt

SEQ ID NO: 109502 - DNA, 25 bp, Saccharomyces pastorianus
gatcctgaagacattgccttcaaag

SEQ ID NO: 109503 - DNA, 25 bp, Saccharomyces pastorianus
gacattgccttcaaagagaagcaaa

SEQ ID NO: 109504 - DNA, 25 bp, Saccharomyces pastorianus
tggctaatatgaaaagtggtaaacc

SEQ ID NO: 109505 - DNA, 25 bp, Saccharomyces pastorianus
aaaaggccgatgctgctgctaagaa

SEQ ID NO: 109506 - DNA, 25 bp, Saccharomyces pastorianus
gaagcaacaacaggacttagatcct

SEQ ID NO: 109507 - DNA, 25 bp, Saccharomyces pastorianus
cctgaagacattgccttcaaagaga

SEQ ID NO: 109508 - DNA, 25 bp, Saccharomyces pastorianus
tatgaaaagtggtaaacctttagtg

SEQ ID NO: 109509 - DNA, 25 bp, Saccharomyces pastorianus
tctcccggaagatcagctagttcat

SEQ ID NO: 109510 - DNA, 25 bp, Saccharomyces pastorianus
ttgcactcaccccatggattatctg

SEQ ID NO: 109511 - DNA, 25 bp, Saccharomyces pastorianus
gacgctaaagtatctctcgagtcca

SEQ ID NO: 109512 - DNA, 25 bp, Saccharomyces pastorianus
aaagacatgatgaatctcccggaag

SEQ ID NO: 109513 - DNA, 25 bp, Saccharomyces pastorianus
gaacaagcagtgagcagagcaacta

SEQ ID NO: 109514 - DNA, 25 bp, Saccharomyces pastorianus
gctcctggtcagaatactttcacaa

SEQ ID NO: 109515 - DNA, 25 bp, Saccharomyces pastorianus
tgcttaaattcatgggcgagatcaa

SEQ ID NO: 109516 - DNA, 25 bp, Saccharomyces pastorianus
aaaagcgctttccagatgtcaatga

SEQ ID NO: 109517 - DNA, 25 bp, Saccharomyces pastorianus
tgatcagactgtgcgtagcaacgat

SEQ ID NO: 109518 - DNA, 25 bp, Saccharomyces pastorianus
gaatctaccactgttatcgacttgc

SEQ ID NO: 109519 - DNA, 25 bp, Saccharomyces pastorianus
atggattatctgctcctggtcagaa

SEQ ID NO: 109520 - DNA, 25 bp, Saccharomyces pastorianus
tgtcagaaatgtcaagggtccagtc

SEQ ID NO: 109521 - DNA, 25 bp, Saccharomyces pastorianus
cccgtaccattgtcagaaatgtcaa

SEQ ID NO: 109522 - DNA, 25 bp, Saccharomyces pastorianus
gtcagaaatgtcaagggtccagtca

SEQ ID NO: 109523 - DNA, 25 bp, Saccharomyces pastorianus
aaatgtcaagggtccagtcagagaa

SEQ ID NO: 109524 - DNA, 25 bp, Saccharomyces pastorianus
tgtcaagggtccagtcagagaaaac

SEQ ID NO: 109525 - DNA, 25 bp, Saccharomyces pastorianus
ttcccgtaccattgtcagaaatgtc

SEQ ID NO: 109526 - DNA, 25 bp, Saccharomyces pastorianus
acttcccgtaccattgtcagaaatg

SEQ ID NO: 109527 - DNA, 25 bp, Saccharomyces pastorianus
gaaatgtcaagggtccagtcagaga

SEQ ID NO: 109528 - DNA, 25 bp, Saccharomyces pastorianus
aatgtcaagggtccagtcagagaaa

SEQ ID NO: 109529 - DNA, 25 bp, Saccharomyces pastorianus
cacttcccgtaccattgtcagaaat

SEQ ID NO: 109530 - DNA, 25 bp, Saccharomyces pastorianus
cagaaatgtcaagggtccagtcaga

SEQ ID NO: 109531 - DNA, 25 bp, Saccharomyces pastorianus
cccgtaccattgtcagaaatgtcaa

SEQ ID NO: 109532 - DNA, 25 bp, Saccharomyces pastorianus
gtcagaaatgtcaagggtccagtca

SEQ ID NO: 109533 - DNA, 25 bp, Saccharomyces pastorianus
taagaccccagtcaccttagctaaa

SEQ ID NO: 109534 - DNA, 25 bp, Saccharomyces pastorianus
tgtcaagggtccagtcagagaaaac

SEQ ID NO: 109535 - DNA, 25 bp, Saccharomyces pastorianus
ttcccgtaccattgtcagaaatgtc

SEQ ID NO: 109536 - DNA, 25 bp, Saccharomyces pastorianus
acttcccgtaccattgtcagaaatg

SEQ ID NO: 109537 - DNA, 25 bp, Saccharomyces pastorianus
ggtgttacccaagttcgtgttgagt

SEQ ID NO: 109538 - DNA, 25 bp, Saccharomyces pastorianus
gaaatgtcaagggtccagtcagaga

SEQ ID NO: 109539 - DNA, 25 bp, Saccharomyces pastorianus
aatgtcaagggtccagtcagagaaa

SEQ ID NO: 109540 - DNA, 25 bp, Saccharomyces pastorianus
cacttcccgtaccattgtcagaaat

SEQ ID NO: 109541 - DNA, 25 bp, Saccharomyces pastorianus
cagaaatgtcaagggtccagtcaga

SEQ ID NO: 109542 - DNA, 25 bp, Saccharomyces pastorianus
aaaaagagcgcgtcagatttcctgc

SEQ ID NO: 109543 - DNA, 25 bp, Saccharomyces pastorianus
gcaacttcgcctggagaatttttct

SEQ ID NO: 109544 - DNA, 25 bp, Saccharomyces pastorianus
gtcaatgggctcctgaaaattctaa

SEQ ID NO: 109545 - DNA, 25 bp, Saccharomyces pastorianus
gaggctcgatcaaatagctgcggta

SEQ ID NO: 109546 - DNA, 25 bp, Saccharomyces pastorianus
atcaagaatttctggcggactcatt

SEQ ID NO: 109547 - DNA, 25 bp, Saccharomyces pastorianus
gtagaccctacaaatgaggctcgat

SEQ ID NO: 109548 - DNA, 25 bp, Saccharomyces pastorianus
gaactatgaatctctgcagcaatgc

SEQ ID NO: 109549 - DNA, 25 bp, Saccharomyces pastorianus
caaatttcaagatgtgtcgcggttt

SEQ ID NO: 109550 - DNA, 25 bp, Saccharomyces pastorianus
atttttctgaatctgaggctacacc

SEQ ID NO: 109551 - DNA, 25 bp, Saccharomyces pastorianus
gatttcctgcggtgaatcattttta

SEQ ID NO: 109552 - DNA, 25 bp, Saccharomyces pastorianus
aagtagtaccagttcgcaacttcgc

SEQ ID NO: 109553 - DNA, 25 bp, Saccharomyces pastorianus
gagaacgtgttaactgaagggctaa

SEQ ID NO: 109554 - DNA, 25 bp, Saccharomyces pastorianus
agacctttggtccattgacaaaaag

SEQ ID NO: 109555 - DNA, 25 bp, Saccharomyces pastorianus
gattccttttccttattgaccttga

SEQ ID NO: 109556 - DNA, 25 bp, Saccharomyces pastorianus
gataaatttctctcattttcaggaa

SEQ ID NO: 109557 - DNA, 25 bp, Saccharomyces pastorianus
tttattcgataaagcgtcccaagca

SEQ ID NO: 109558 - DNA, 25 bp, Saccharomyces pastorianus
gtatcgcaagtgtacagtttagcat

SEQ ID NO: 109559 - DNA, 25 bp, Saccharomyces pastorianus
gggctaaaactgtctattattctaa

SEQ ID NO: 109560 - DNA, 25 bp, Saccharomyces pastorianus
gaacttttgacaggattcgatgtta

SEQ ID NO: 109561 - DNA, 25 bp, Saccharomyces pastorianus
cagttaacttcaactttggcgtttg

SEQ ID NO: 109562 - DNA, 25 bp, Saccharomyces pastorianus
agagcctatcaacgaccaggagaac

SEQ ID NO: 109563 - DNA, 25 bp, Saccharomyces pastorianus
tatggagcacttcagtgatctcatg

SEQ ID NO: 109564 - DNA, 25 bp, Saccharomyces pastorianus
cccctttacttcttcatttagcgat

SEQ ID NO: 109565 - DNA, 25 bp, Saccharomyces pastorianus
aactctttaagatcgctcactgtca

SEQ ID NO: 109566 - DNA, 25 bp, Saccharomyces pastorianus
gggattttacctaccaaatctgcag

SEQ ID NO: 109567 - DNA, 25 bp, Saccharomyces pastorianus
gaggacgactctaactacgttctta

SEQ ID NO: 109568 - DNA, 25 bp, Saccharomyces pastorianus
ataatcaactggatcccctttactt

SEQ ID NO: 109569 - DNA, 25 bp, Saccharomyces pastorianus
atcaacaataccctttgcgacacca

SEQ ID NO: 109570 - DNA, 25 bp, Saccharomyces pastorianus
taccaaatctggacctgcgggagag

SEQ ID NO: 109571 - DNA, 25 bp, Saccharomyces pastorianus
gaggccaatgatttgcttgaagaac

SEQ ID NO: 109572 - DNA, 25 bp, Saccharomyces pastorianus
aaatgttcatccatccgaatccagg

SEQ ID NO: 109573 - DNA, 25 bp, Saccharomyces pastorianus
aacaacattttcaggttcaccagaa

SEQ ID NO: 109574 - DNA, 25 bp, Saccharomyces pastorianus
ggaatgaactaccacaatgcaagaa

SEQ ID NO: 109575 - DNA, 25 bp, Saccharomyces pastorianus
gagtgacatgagttcttctttgaaa

SEQ ID NO: 109576 - DNA, 25 bp, Saccharomyces pastorianus
gtaggtgtcaagcaaatcatgtcca

SEQ ID NO: 109577 - DNA, 25 bp, Saccharomyces pastorianus
aagcctaccgtaagaccataccagt

SEQ ID NO: 109578 - DNA, 25 bp, Saccharomyces pastorianus
ttgctaatgagtaccccaagcctac

SEQ ID NO: 109579 - DNA, 25 bp, Saccharomyces pastorianus
atggtgtactacttcgtcatttgcg

SEQ ID NO: 109580 - DNA, 25 bp, Saccharomyces pastorianus
aagtggctcttttgagatccattat

SEQ ID NO: 109581 - DNA, 25 bp, Saccharomyces pastorianus
tgccacggaggccactttggaaagt

SEQ ID NO: 109582 - DNA, 25 bp, Saccharomyces pastorianus
atatgctcctattgtcattgtcgct

SEQ ID NO: 109583 - DNA, 25 bp, Saccharomyces pastorianus
attgacaccacagtctgccacggag

SEQ ID NO: 109584 - DNA, 25 bp, Saccharomyces pastorianus
gtcatttgcgaatctggatacccaa

SEQ ID NO: 109585 - DNA, 25 bp, Saccharomyces pastorianus
aatcgtcgtttccagattgacacca

SEQ ID NO: 109586 - DNA, 25 bp, Saccharomyces pastorianus
gactctttatatctagttgcgatcg

SEQ ID NO: 109587 - DNA, 25 bp, Saccharomyces pastorianus
taaagcatcccggtttaggtaatag

SEQ ID NO: 109588 - DNA, 25 bp, Saccharomyces pastorianus
aaggccatcttgttggaagacatca

SEQ ID NO: 109589 - DNA, 25 bp, Saccharomyces pastorianus
gggatggcatgaacttagactcttt

SEQ ID NO: 109590 - DNA, 25 bp, Saccharomyces pastorianus
gacggcttcctaattttacctgata

SEQ ID NO: 109591 - DNA, 25 bp, Saccharomyces pastorianus
cattctttatgaaggcgctgagtca

SEQ ID NO: 109592 - DNA, 25 bp, Saccharomyces pastorianus
aagaattgttcagccttacatcgaa

SEQ ID NO: 109593 - DNA, 25 bp, Saccharomyces pastorianus
gttgcgatcgtctacaggaccgata

SEQ ID NO: 109594 - DNA, 25 bp, Saccharomyces pastorianus
taggtaatagtattgccgcgggcaa

SEQ ID NO: 109595 - DNA, 25 bp, Saccharomyces pastorianus
aactatgctgtccatccggatgagt

SEQ ID NO: 109596 - DNA, 25 bp, Saccharomyces pastorianus
tttggttcactaccaaccttcttat

SEQ ID NO: 109597 - DNA, 25 bp, Saccharomyces pastorianus
gtacaactacggcatgaacccactg

SEQ ID NO: 109598 - DNA, 25 bp, Saccharomyces pastorianus
aaatcgaaagcttgcccggcttaag

SEQ ID NO: 109599 - DNA, 25 bp, Saccharomyces pastorianus
agaggaggcgcttctacagtggcac

SEQ ID NO: 109600 - DNA, 25 bp, Saccharomyces pastorianus
gtacgacacgatgccgtccagagag

SEQ ID NO: 109601 - DNA, 25 bp, Saccharomyces pastorianus
gtggcaccgtcaacagaaacgctcg

SEQ ID NO: 109602 - DNA, 25 bp, Saccharomyces pastorianus
cagagggcccggtggccaaaagatt

SEQ ID NO: 109603 - DNA, 25 bp, Saccharomyces pastorianus
tgaagaggccgctcgagtcgaaaaa

SEQ ID NO: 109604 - DNA, 25 bp, Saccharomyces pastorianus
gaacttgcggcgtcgtacgacacga

SEQ ID NO: 109605 - DNA, 25 bp, Saccharomyces pastorianus
gaacccactgggatcgttgtcgagt

SEQ ID NO: 109606 - DNA, 25 bp, Saccharomyces pastorianus
cgcagcgtcgcgaagtacgagcagc

SEQ ID NO: 109607 - DNA, 25 bp, Saccharomyces pastorianus
aaagaggaacgcgaggcccgagaca

SEQ ID NO: 109608 - DNA, 25 bp, Saccharomyces pastorianus
agcacaatgcactgagaaattcctt

SEQ ID NO: 109609 - DNA, 25 bp, Saccharomyces pastorianus
cgcgaccaaagttcacgccagagat

SEQ ID NO: 109610 - DNA, 25 bp, Saccharomyces pastorianus
aggtcaatcagcagtgccgcagtgc

SEQ ID NO: 109611 - DNA, 25 bp, Saccharomyces pastorianus
aaattccttcatggtggcagagggc

SEQ ID NO: 109612 - DNA, 25 bp, Saccharomyces pastorianus
gttcacgccagagatggaagcacaa

SEQ ID NO: 109613 - DNA, 25 bp, Saccharomyces pastorianus
aacaagctaccaccgcgaccaaagt

SEQ ID NO: 109614 - DNA, 25 bp, Saccharomyces pastorianus
gccgcagtgctgctgattaaaaaga

SEQ ID NO: 109615 - DNA, 25 bp, Saccharomyces pastorianus
cagtgccgcagtgctgctgattaaa

SEQ ID NO: 109616 - DNA, 25 bp, Saccharomyces pastorianus
ggagcgagtaagaggtcaatcagca

SEQ ID NO: 109617 - DNA, 25 bp, Saccharomyces pastorianus
gagaaattccttcatggtggcagag

SEQ ID NO: 109618 - DNA, 25 bp, Saccharomyces pastorianus
taaaaagaacaagctaccaccgcga

SEQ ID NO: 109619 - DNA, 25 bp, Saccharomyces pastorianus
tatacataaacctcttccattcttc

SEQ ID NO: 109620 - DNA, 25 bp, Saccharomyces pastorianus
atggagtgctttccttcgttttcct

SEQ ID NO: 109621 - DNA, 25 bp, Saccharomyces pastorianus
catcgaagcggtaatgtacgtatta

SEQ ID NO: 109622 - DNA, 25 bp, Saccharomyces pastorianus
ttcttccttcatcgataaagttact

SEQ ID NO: 109623 - DNA, 25 bp, Saccharomyces pastorianus
ccttgttcttggataatggcgatga

SEQ ID NO: 109624 - DNA, 25 bp, Saccharomyces pastorianus
tttgaatacgaactaaagcaccgca

SEQ ID NO: 109625 - DNA, 25 bp, Saccharomyces pastorianus
ctgcttctccttgttcttggataat

SEQ ID NO: 109626 - DNA, 25 bp, Saccharomyces pastorianus
accgcaaacacaacaacgagccttg

SEQ ID NO: 109627 - DNA, 25 bp, Saccharomyces pastorianus
ggcgatgaggataggtctgataact

SEQ ID NO: 109628 - DNA, 25 bp, Saccharomyces pastorianus
cttgccgccgtattctagttttgaa

SEQ ID NO: 109629 - DNA, 25 bp, Saccharomyces pastorianus
acgtattaaccgtatcattagtcta

SEQ ID NO: 109630 - DNA, 25 bp, Saccharomyces pastorianus
gattatgatcggtgtaagcgcatct

SEQ ID NO: 109631 - DNA, 25 bp, Saccharomyces pastorianus
catctaagaaggaacgcccaggttt

SEQ ID NO: 109632 - DNA, 25 bp, Saccharomyces pastorianus
aaagaggcaatttttccgatgaaca

SEQ ID NO: 109633 - DNA, 25 bp, Saccharomyces pastorianus
attcaaaactctagggacacgcaac

SEQ ID NO: 109634 - DNA, 25 bp, Saccharomyces pastorianus
gcggtcttttggtaatattagtcct

SEQ ID NO: 109635 - DNA, 25 bp, Saccharomyces pastorianus
gacacgcaactaaatgagcaccact

SEQ ID NO: 109636 - DNA, 25 bp, Saccharomyces pastorianus
ggcagacaaccagaagcggtctttt

SEQ ID NO: 109637 - DNA, 25 bp, Saccharomyces pastorianus
gaaaacacccttttgtatcgacaat

SEQ ID NO: 109638 - DNA, 25 bp, Saccharomyces pastorianus
aatcacatttgttcagctcgctaga

SEQ ID NO: 109639 - DNA, 25 bp, Saccharomyces pastorianus
gaggaacctgaaattttagcaccaa

SEQ ID NO: 109640 - DNA, 25 bp, Saccharomyces pastorianus
atcatagctctattgttgcaactac

SEQ ID NO: 109641 - DNA, 25 bp, Saccharomyces pastorianus
aaatgtttatgtcactgatgccttc

SEQ ID NO: 109642 - DNA, 25 bp, Saccharomyces pastorianus
gatgccttcatcaagcattccaaag

SEQ ID NO: 109643 - DNA, 25 bp, Saccharomyces pastorianus
tatacctgcccagttgcttagggat

SEQ ID NO: 109644 - DNA, 25 bp, Saccharomyces pastorianus
caacatgccatcttcaaacgctgaa

SEQ ID NO: 109645 - DNA, 25 bp, Saccharomyces pastorianus
cagcaatagggttgagcgcggcact

SEQ ID NO: 109646 - DNA, 25 bp, Saccharomyces pastorianus
acgacgtatgaatgcctcatgttca

SEQ ID NO: 109647 - DNA, 25 bp, Saccharomyces pastorianus
gacaaggtttatttgctatacccct

SEQ ID NO: 109648 - DNA, 25 bp, Saccharomyces pastorianus
gcggcactggtagcgttatgtgaca

SEQ ID NO: 109649 - DNA, 25 bp, Saccharomyces pastorianus
tacaacggtctctttgccattgaag

SEQ ID NO: 109650 - DNA, 25 bp, Saccharomyces pastorianus
gctatacccctttgctaacttagga

SEQ ID NO: 109651 - DNA, 25 bp, Saccharomyces pastorianus
aagtgggtgtcgaattttgttgcta

SEQ ID NO: 109652 - DNA, 25 bp, Saccharomyces pastorianus
tgccttccgttatttgtgctttgaa

SEQ ID NO: 109653 - DNA, 25 bp, Saccharomyces pastorianus
ggtcaggcattggtagtattttcac

SEQ ID NO: 109654 - DNA, 25 bp, Saccharomyces pastorianus
aatgtcactacggagggttatattt

SEQ ID NO: 109655 - DNA, 25 bp, Saccharomyces pastorianus
gcaggaatatacaccgcaaatcact

SEQ ID NO: 109656 - DNA, 25 bp, Saccharomyces pastorianus
gcaaatcacttggattctcatccag

SEQ ID NO: 109657 - DNA, 25 bp, Saccharomyces pastorianus
gaaaccgatgtttgacgaagacgag

SEQ ID NO: 109658 - DNA, 25 bp, Saccharomyces pastorianus
agttccatttggttcctcagctaat

SEQ ID NO: 109659 - DNA, 25 bp, Saccharomyces pastorianus
attctccattgttggcacatatcga

SEQ ID NO: 109660 - DNA, 25 bp, Saccharomyces pastorianus
ggtcatctcttgtggaatgcaggaa

SEQ ID NO: 109661 - DNA, 25 bp, Saccharomyces pastorianus
ataaagtctaacgttcctgaaggat

SEQ ID NO: 109662 - DNA, 25 bp, Saccharomyces pastorianus
tcaactgattatccagatcctgatt

SEQ ID NO: 109663 - DNA, 25 bp, Saccharomyces pastorianus
cgatttactgtgtttctgccatttt

SEQ ID NO: 109664 - DNA, 25 bp, Saccharomyces pastorianus
ttctgccattttgcgaattcgtgcc

SEQ ID NO: 109665 - DNA, 25 bp, Saccharomyces pastorianus
atttaattttcttcgatttactgtg

SEQ ID NO: 109666 - DNA, 25 bp, Saccharomyces pastorianus
tcttcgatttactgtgtttctgcca

SEQ ID NO: 109667 - DNA, 25 bp, Saccharomyces pastorianus
gaattcgtgccccatcatgtcttat

SEQ ID NO: 109668 - DNA, 25 bp, Saccharomyces pastorianus
gccccatcatgtcttattttattta

SEQ ID NO: 109669 - DNA, 25 bp, Saccharomyces pastorianus
attttgcgaattcgtgccccatcat

SEQ ID NO: 109670 - DNA, 25 bp, Saccharomyces pastorianus
tactgtgtttctgccattttgcgaa

SEQ ID NO: 109671 - DNA, 25 bp, Saccharomyces pastorianus
tcgtgccccatcatgtcttatttta

SEQ ID NO: 109672 - DNA, 25 bp, Saccharomyces pastorianus
gtgtttctgccattttgcgaattcg

SEQ ID NO: 109673 - DNA, 25 bp, Saccharomyces pastorianus
aatcgactactttatatctataacg

SEQ ID NO: 109674 - DNA, 25 bp, Saccharomyces pastorianus
gatttaccgttcaatttaccagccg

SEQ ID NO: 109675 - DNA, 25 bp, Saccharomyces pastorianus
gaacttcccatcagcagaacatgca

SEQ ID NO: 109676 - DNA, 25 bp, Saccharomyces pastorianus
accagccgcatattgagcattcaat

SEQ ID NO: 109677 - DNA, 25 bp, Saccharomyces pastorianus
gcaatttcaccttcagtacaggtag

SEQ ID NO: 109678 - DNA, 25 bp, Saccharomyces pastorianus
gcagaacatgcaatttcaccttcag

SEQ ID NO: 109679 - DNA, 25 bp, Saccharomyces pastorianus
ccttcagtacaggtagatttaccgt

SEQ ID NO: 109680 - DNA, 25 bp, Saccharomyces pastorianus
atttaccagccgcatattgagcatt

SEQ ID NO: 109681 - DNA, 25 bp, Saccharomyces pastorianus
aacggcgaacttcccatcagcagaa

SEQ ID NO: 109682 - DNA, 25 bp, Saccharomyces pastorianus
attacaaacggcgaacttcccatca

SEQ ID NO: 109683 - DNA, 25 bp, Saccharomyces pastorianus
acatgcaatttcaccttcagtacag

SEQ ID NO: 109684 - DNA, 25 bp, Saccharomyces pastorianus
accgttcaatttaccagccgcatat

SEQ ID NO: 109685 - DNA, 25 bp, Saccharomyces pastorianus
aatgcgtgcgattctctctctaatt

SEQ ID NO: 109686 - DNA, 25 bp, Saccharomyces pastorianus
gatttttcagcaaactcggacgata

SEQ ID NO: 109687 - DNA, 25 bp, Saccharomyces pastorianus
ggtgtcaaaagattttactcctaag

SEQ ID NO: 109688 - DNA, 25 bp, Saccharomyces pastorianus
aactttcaggaaaactctggtgtca

SEQ ID NO: 109689 - DNA, 25 bp, Saccharomyces pastorianus
gtatccactgtacaatttgagccga

SEQ ID NO: 109690 - DNA, 25 bp, Saccharomyces pastorianus
gtggcttgaggaacccgatttttca

SEQ ID NO: 109691 - DNA, 25 bp, Saccharomyces pastorianus
ctctaattgttccaaggctggacct

SEQ ID NO: 109692 - DNA, 25 bp, Saccharomyces pastorianus
tttgagccgaagaactttaccaatg

SEQ ID NO: 109693 - DNA, 25 bp, Saccharomyces pastorianus
atgggatcctagcaaacatcttaaa

SEQ ID NO: 109694 - DNA, 25 bp, Saccharomyces pastorianus
ggctggaccttatgggatcctagca

SEQ ID NO: 109695 - DNA, 25 bp, Saccharomyces pastorianus
agaagaacaggctgcattagttgca

SEQ ID NO: 109696 - DNA, 25 bp, Saccharomyces pastorianus
gctgctttccatgaaccgtttatag

SEQ ID NO: 109697 - DNA, 25 bp, Saccharomyces pastorianus
aggtagtgtcatacgcttatgcgat

SEQ ID NO: 109698 - DNA, 25 bp, Saccharomyces pastorianus
aatcggtgtccagaggatttgcctc

SEQ ID NO: 109699 - DNA, 25 bp, Saccharomyces pastorianus
aggtcgttatacaggcccgagctaa

SEQ ID NO: 109700 - DNA, 25 bp, Saccharomyces pastorianus
aaatgcgattgatgccttgtcaaga

SEQ ID NO: 109701 - DNA, 25 bp, Saccharomyces pastorianus
aaatattaccttccgctatcgcatc

SEQ ID NO: 109702 - DNA, 25 bp, Saccharomyces pastorianus
gctatcgcatctagtcgatgacttt

SEQ ID NO: 109703 - DNA, 25 bp, Saccharomyces pastorianus
ctgcatgcttctgatgtctcacgaa

SEQ ID NO: 109704 - DNA, 25 bp, Saccharomyces pastorianus
ggatgctggctatagaatttctgat

SEQ ID NO: 109705 - DNA, 25 bp, Saccharomyces pastorianus
agagggtgaacgttgctgctttcca

SEQ ID NO: 109706 - DNA, 25 bp, Saccharomyces pastorianus
gatgttctccaaaagctgcatgctt

SEQ ID NO: 109707 - DNA, 25 bp, Saccharomyces pastorianus
ggcctattattgtgagacccggttt

SEQ ID NO: 109708 - DNA, 25 bp, Saccharomyces pastorianus
gcacttgaactactttactgcggta

SEQ ID NO: 109709 - DNA, 25 bp, Saccharomyces pastorianus
cccggttttatgttcgatgagcaca

SEQ ID NO: 109710 - DNA, 25 bp, Saccharomyces pastorianus
agttcattctttgggaatcctccta

SEQ ID NO: 109711 - DNA, 25 bp, Saccharomyces pastorianus
agctgcagcttttgaacgacttgat

SEQ ID NO: 109712 - DNA, 25 bp, Saccharomyces pastorianus
aaaatcacgccttctatcttttggt

SEQ ID NO: 109713 - DNA, 25 bp, Saccharomyces pastorianus
ttccgccgataaaggttttccattg

SEQ ID NO: 109714 - DNA, 25 bp, Saccharomyces pastorianus
gttttccattgattcctagtggcta

SEQ ID NO: 109715 - DNA, 25 bp, Saccharomyces pastorianus
gatcttttacgtatatttccgccga

SEQ ID NO: 109716 - DNA, 25 bp, Saccharomyces pastorianus
gattaggccaacagtatccactcag

SEQ ID NO: 109717 - DNA, 25 bp, Saccharomyces pastorianus
ggaccacggtcttttattcatactg

SEQ ID NO: 109718 - DNA, 25 bp, Saccharomyces pastorianus
gcgagagaggtttagctttagcccc

SEQ ID NO: 109719 - DNA, 25 bp, Saccharomyces pastorianus
tcactgcgagtgatgctgttgttgc

SEQ ID NO: 109720 - DNA, 25 bp, Saccharomyces pastorianus
attcagctaccagagctacacttta

SEQ ID NO: 109721 - DNA, 25 bp, Saccharomyces pastorianus
tgttctcactacatctttgattgga

SEQ ID NO: 109722 - DNA, 25 bp, Saccharomyces pastorianus
gggacttatccaaccagacgtattt

SEQ ID NO: 109723 - DNA, 25 bp, Saccharomyces pastorianus
ttttacaccacaaccgaatgaagct

SEQ ID NO: 109724 - DNA, 25 bp, Saccharomyces pastorianus
gctgttgttgcactatctaccgaaa

SEQ ID NO: 109725 - DNA, 25 bp, Saccharomyces pastorianus
ttagaggcgttgcaagacttggatt

SEQ ID NO: 109726 - DNA, 25 bp, Saccharomyces pastorianus
gagctacactttatgcttcgtagta

SEQ ID NO: 109727 - DNA, 25 bp, Saccharomyces pastorianus
gaaggcggactgtttgctaaaattg

SEQ ID NO: 109728 - DNA, 25 bp, Saccharomyces pastorianus
gacttggatttcttacttggtacgg

SEQ ID NO: 109729 - DNA, 25 bp, Saccharomyces pastorianus
aaagcaaaatacactacgcactctt

SEQ ID NO: 109730 - DNA, 25 bp, Saccharomyces pastorianus
aacagaaccacaagctgaacaagat

SEQ ID NO: 109731 - DNA, 25 bp, Saccharomyces pastorianus
attatttttggctttcttcctctca

SEQ ID NO: 109732 - DNA, 25 bp, Saccharomyces pastorianus
ctttcttcctctcatctttttatat

SEQ ID NO: 109733 - DNA, 25 bp, Saccharomyces pastorianus
atcagccacacaaaatgcagaattt

SEQ ID NO: 109734 - DNA, 25 bp, Saccharomyces pastorianus
acttttcatagcattttccttgtcg

SEQ ID NO: 109735 - DNA, 25 bp, Saccharomyces pastorianus
gaacaagatcattatttttggcttt

SEQ ID NO: 109736 - DNA, 25 bp, Saccharomyces pastorianus
atctttttatattcgaatccagtac

SEQ ID NO: 109737 - DNA, 25 bp, Saccharomyces pastorianus
gaaagtcattgaacttttcatagca

SEQ ID NO: 109738 - DNA, 25 bp, Saccharomyces pastorianus
cactctttgtaatcagccacacaaa

SEQ ID NO: 109739 - DNA, 25 bp, Saccharomyces pastorianus
tcatagcattttccttgtcgaagaa

SEQ ID NO: 109740 - DNA, 25 bp, Saccharomyces pastorianus
tcctcaatgcttcagttctgccatt

SEQ ID NO: 109741 - DNA, 25 bp, Saccharomyces pastorianus
gtgcaatagaaatttcactaccaca

SEQ ID NO: 109742 - DNA, 25 bp, Saccharomyces pastorianus
actggctccaagtaccttgcaagat

SEQ ID NO: 109743 - DNA, 25 bp, Saccharomyces pastorianus
acttcaaggcccagaggctttaaag

SEQ ID NO: 109744 - DNA, 25 bp, Saccharomyces pastorianus
gtagaaactgctcatgttgctaaag

SEQ ID NO: 109745 - DNA, 25 bp, Saccharomyces pastorianus
taatgttaagccttggaacccacca

SEQ ID NO: 109746 - DNA, 25 bp, Saccharomyces pastorianus
aaaagacaccaaactggctccaagt

SEQ ID NO: 109747 - DNA, 25 bp, Saccharomyces pastorianus
agagggtgagtcagagccaattgaa

SEQ ID NO: 109748 - DNA, 25 bp, Saccharomyces pastorianus
agttctgccattgagactgtgcaat

SEQ ID NO: 109749 - DNA, 25 bp, Saccharomyces pastorianus
ggctttaaaggcttacaccgagcaa

SEQ ID NO: 109750 - DNA, 25 bp, Saccharomyces pastorianus
tcactaccacaagaatatcctacaa

SEQ ID NO: 109751 - DNA, 25 bp, Saccharomyces pastorianus
tactacttgggttgattggcatgat

SEQ ID NO: 109752 - DNA, 25 bp, Saccharomyces pastorianus
taagctccaaatccatgtgtggtga

SEQ ID NO: 109753 - DNA, 25 bp, Saccharomyces pastorianus
cgaacattgccttactaagctccaa

SEQ ID NO: 109754 - DNA, 25 bp, Saccharomyces pastorianus
tgggaccccggatctctcaaatttt

SEQ ID NO: 109755 - DNA, 25 bp, Saccharomyces pastorianus
gaaccactggaaaacatactcgctg

SEQ ID NO: 109756 - DNA, 25 bp, Saccharomyces pastorianus
tctccgttcaggcagcagtaatgat

SEQ ID NO: 109757 - DNA, 25 bp, Saccharomyces pastorianus
tttaacctcgataatgaaccactgg

SEQ ID NO: 109758 - DNA, 25 bp, Saccharomyces pastorianus
atactcgctgttttcataatatctt

SEQ ID NO: 109759 - DNA, 25 bp, Saccharomyces pastorianus
gtggtgatcatcatagcgtcaagaa

SEQ ID NO: 109760 - DNA, 25 bp, Saccharomyces pastorianus
atgtgcacacactcgtttctgggac

SEQ ID NO: 109761 - DNA, 25 bp, Saccharomyces pastorianus
gatattcatatctctccgttcaggc

SEQ ID NO: 109762 - DNA, 25 bp, Saccharomyces pastorianus
gcaaaccacgatcaaggagtccaag

SEQ ID NO: 109763 - DNA, 25 bp, Saccharomyces pastorianus
tggcacaaacctcaatagatacctt

SEQ ID NO: 109764 - DNA, 25 bp, Saccharomyces pastorianus
gaagcggatgcattccgacggcata

SEQ ID NO: 109765 - DNA, 25 bp, Saccharomyces pastorianus
caccattccttcaagcaaacttcaa

SEQ ID NO: 109766 - DNA, 25 bp, Saccharomyces pastorianus
tgaaaaatctgcacaccattccttc

SEQ ID NO: 109767 - DNA, 25 bp, Saccharomyces pastorianus
aaattgttatacgatggctcaccag

SEQ ID NO: 109768 - DNA, 25 bp, Saccharomyces pastorianus
gcgagagcaatccatttcctaggtt

SEQ ID NO: 109769 - DNA, 25 bp, Saccharomyces pastorianus
gatggctcaccaggatattccaaag

SEQ ID NO: 109770 - DNA, 25 bp, Saccharomyces pastorianus
gcacttggtcggtaagaatcacctt

SEQ ID NO: 109771 - DNA, 25 bp, Saccharomyces pastorianus
taaagccagcaaattaccccaaaga

SEQ ID NO: 109772 - DNA, 25 bp, Saccharomyces pastorianus
gaatcaccttcgtataacagctgac

SEQ ID NO: 109773 - DNA, 25 bp, Saccharomyces pastorianus
ggtcaattgtcctcaaagttactga

SEQ ID NO: 109774 - DNA, 25 bp, Saccharomyces pastorianus
aggagacaggcgctgtttacccatt

SEQ ID NO: 109775 - DNA, 25 bp, Saccharomyces pastorianus
agaagatctagtcatcgtctcacca

SEQ ID NO: 109776 - DNA, 25 bp, Saccharomyces pastorianus
gttctcgtcgaatgctaggtcaatt

SEQ ID NO: 109777 - DNA, 25 bp, Saccharomyces pastorianus
gaaaggttccactgtaaccagcaat

SEQ ID NO: 109778 - DNA, 25 bp, Saccharomyces pastorianus
tgagaccatttgttaagccaagcgg

SEQ ID NO: 109779 - DNA, 25 bp, Saccharomyces pastorianus
gtttacccatttggtgccgacaaag

SEQ ID NO: 109780 - DNA, 25 bp, Saccharomyces pastorianus
aacggtgtcgttactcaagatttca

SEQ ID NO: 109781 - DNA, 25 bp, Saccharomyces pastorianus
aaacacccatcgtggcgaagtgaac

SEQ ID NO: 109782 - DNA, 25 bp, Saccharomyces pastorianus
tatcttttcctttcgaatgggcctt

SEQ ID NO: 109783 - DNA, 25 bp, Saccharomyces pastorianus
gtacttgaacgttccaaacacccat

SEQ ID NO: 109784 - DNA, 25 bp, Saccharomyces pastorianus
gctagtactactcaatgtcgcagaa

SEQ ID NO: 109785 - DNA, 25 bp, Saccharomyces pastorianus
aactgccaagtgttatgtcccaaaa

SEQ ID NO: 109786 - DNA, 25 bp, Saccharomyces pastorianus
agaacagttcatgataagccaattg

SEQ ID NO: 109787 - DNA, 25 bp, Saccharomyces pastorianus
ctacatcaacaactattccggttat

SEQ ID NO: 109788 - DNA, 25 bp, Saccharomyces pastorianus
ggatattctccatctccaagaacag

SEQ ID NO: 109789 - DNA, 25 bp, Saccharomyces pastorianus
aagccaattgttatttgcactgaca

SEQ ID NO: 109790 - DNA, 25 bp, Saccharomyces pastorianus
gagtctgaaaggatattctccatct

SEQ ID NO: 109791 - DNA, 25 bp, Saccharomyces pastorianus
gtcccaaaaagttcacctacatcaa

SEQ ID NO: 109792 - DNA, 25 bp, Saccharomyces pastorianus
taccgtcatcaatattacgagtctg

SEQ ID NO: 109793 - DNA, 25 bp, Saccharomyces pastorianus
ccggttataagggatgctagtacta

SEQ ID NO: 109794 - DNA, 25 bp, Saccharomyces pastorianus
gtcgcagaataactaccgtcatcaa

SEQ ID NO: 109795 - DNA, 25 bp, Saccharomyces pastorianus
aatagtgcttctcccaatgttaacc

SEQ ID NO: 109796 - DNA, 25 bp, Saccharomyces pastorianus
tcagttttcaaagagttcgatccaa

SEQ ID NO: 109797 - DNA, 25 bp, Saccharomyces pastorianus
gtaatcaagtgagaggccgttccta

SEQ ID NO: 109798 - DNA, 25 bp, Saccharomyces pastorianus
cttatgctgttattggttccaacga

SEQ ID NO: 109799 - DNA, 25 bp, Saccharomyces pastorianus
atcgagctgttcaagcctccaattt

SEQ ID NO: 109800 - DNA, 25 bp, Saccharomyces pastorianus
tggacaatgacaaccactctgattt

SEQ ID NO: 109801 - DNA, 25 bp, Saccharomyces pastorianus
agccatttatccgaaagactattta

SEQ ID NO: 109802 - DNA, 25 bp, Saccharomyces pastorianus
caagcctccaatttattccaacgat

SEQ ID NO: 109803 - DNA, 25 bp, Saccharomyces pastorianus
aactacaggtcttctaaattggcaa

SEQ ID NO: 109804 - DNA, 25 bp, Saccharomyces pastorianus
ttagtagtttaccttatgctgttat

SEQ ID NO: 109805 - DNA, 25 bp, Saccharomyces pastorianus
caaccactctgatttcaaccttttg

SEQ ID NO: 109806 - DNA, 25 bp, Saccharomyces pastorianus
aaatatggttcgctcaccgagtgca

SEQ ID NO: 109807 - DNA, 25 bp, Saccharomyces pastorianus
atgaactctgaacagctgctgcata

SEQ ID NO: 109808 - DNA, 25 bp, Saccharomyces pastorianus
agcagcaactacagtcgtacacgag

SEQ ID NO: 109809 - DNA, 25 bp, Saccharomyces pastorianus
gagacactgatcgacgcgctgtaca

SEQ ID NO: 109810 - DNA, 25 bp, Saccharomyces pastorianus
gtacgaattgcttcaggccagggat

SEQ ID NO: 109811 - DNA, 25 bp, Saccharomyces pastorianus
actatgtttcggattcgctactcac

SEQ ID NO: 109812 - DNA, 25 bp, Saccharomyces pastorianus
ataacgttgcgctctagattactgc

SEQ ID NO: 109813 - DNA, 25 bp, Saccharomyces pastorianus
aaagacctcggaactagcagaattt

SEQ ID NO: 109814 - DNA, 25 bp, Saccharomyces pastorianus
attcgctactcactactctgataag

SEQ ID NO: 109815 - DNA, 25 bp, Saccharomyces pastorianus
gatgcgcgagtgacctctgagttag

SEQ ID NO: 109816 - DNA, 25 bp, Saccharomyces pastorianus
gccattcctggcctattacaaatta

SEQ ID NO: 109817 - DNA, 25 bp, Saccharomyces pastorianus
aagctgagctcgataaggtctgtga

SEQ ID NO: 109818 - DNA, 25 bp, Saccharomyces pastorianus
tatggtggccgtccaatctttaaac

SEQ ID NO: 109819 - DNA, 25 bp, Saccharomyces pastorianus
aacagtttctcacgttgcaggaaga

SEQ ID NO: 109820 - DNA, 25 bp, Saccharomyces pastorianus
aatgcccaagcagatgtacttaaac

SEQ ID NO: 109821 - DNA, 25 bp, Saccharomyces pastorianus
gagcaagttatggtggccgtccaat

SEQ ID NO: 109822 - DNA, 25 bp, Saccharomyces pastorianus
tcctattttgcctattatgagaccg

SEQ ID NO: 109823 - DNA, 25 bp, Saccharomyces pastorianus
ggtctcagcccgctaaaaagaagct

SEQ ID NO: 109824 - DNA, 25 bp, Saccharomyces pastorianus
agctagaaaccgtatccaaggattt

SEQ ID NO: 109825 - DNA, 25 bp, Saccharomyces pastorianus
atgagaccgggcacatttaatcagg

SEQ ID NO: 109826 - DNA, 25 bp, Saccharomyces pastorianus
tagggtcgaagctattgacaaggct

SEQ ID NO: 109827 - DNA, 25 bp, Saccharomyces pastorianus
ggtaaggcattagaaactttcgatc

SEQ ID NO: 109828 - DNA, 25 bp, Saccharomyces pastorianus
gatgaactgggctccaattggtgcc

SEQ ID NO: 109829 - DNA, 25 bp, Saccharomyces pastorianus
aacgatgccgcatttgggtacttat

SEQ ID NO: 109830 - DNA, 25 bp, Saccharomyces pastorianus
gttcatccctttaatatctcaatcg

SEQ ID NO: 109831 - DNA, 25 bp, Saccharomyces pastorianus
taatgtctgacctccacgtgataat

SEQ ID NO: 109832 - DNA, 25 bp, Saccharomyces pastorianus
ttccgctaccttacaaactcaaatt

SEQ ID NO: 109833 - DNA, 25 bp, Saccharomyces pastorianus
agatcttgatatgacttccgctacc

SEQ ID NO: 109834 - DNA, 25 bp, Saccharomyces pastorianus
gaacgacaaatcacttactccagaa

SEQ ID NO: 109835 - DNA, 25 bp, Saccharomyces pastorianus
aggaatttgcctctatatactgtaa

SEQ ID NO: 109836 - DNA, 25 bp, Saccharomyces pastorianus
gtagatggccacttgattcaggacc

SEQ ID NO: 109837 - DNA, 25 bp, Saccharomyces pastorianus
tgacgactccatatctccggaggaa

SEQ ID NO: 109838 - DNA, 25 bp, Saccharomyces pastorianus
atcaacctaacctgcaacttacaag

SEQ ID NO: 109839 - DNA, 25 bp, Saccharomyces pastorianus
agattacaagtctccagtggtcaca

SEQ ID NO: 109840 - DNA, 25 bp, Saccharomyces pastorianus
agaggcgacctagtgatgacaatga

SEQ ID NO: 109841 - DNA, 25 bp, Saccharomyces pastorianus
gatagctgcaagttcttacactcga

SEQ ID NO: 109842 - DNA, 25 bp, Saccharomyces pastorianus
caagactggctggaagctgaaccaa

SEQ ID NO: 109843 - DNA, 25 bp, Saccharomyces pastorianus
gataccgtttaagtgcactctttgt

SEQ ID NO: 109844 - DNA, 25 bp, Saccharomyces pastorianus
agcaggacacttcaactttcacatg

SEQ ID NO: 109845 - DNA, 25 bp, Saccharomyces pastorianus
acaaggagacccacggcagtgcaaa

SEQ ID NO: 109846 - DNA, 25 bp, Saccharomyces pastorianus
gtcacaaactgtggccattattttt

SEQ ID NO: 109847 - DNA, 25 bp, Saccharomyces pastorianus
ccggaccacggtgctgatggatttt

SEQ ID NO: 109848 - DNA, 25 bp, Saccharomyces pastorianus
gactccaaagcggttactctagact

SEQ ID NO: 109849 - DNA, 25 bp, Saccharomyces pastorianus
ttaacggtcaacgacgacagcacta

SEQ ID NO: 109850 - DNA, 25 bp, Saccharomyces pastorianus
caacgatgctggtaaggctaagaaa

SEQ ID NO: 109851 - DNA, 25 bp, Saccharomyces pastorianus
aaattgaacaaggccggtaagccat

SEQ ID NO: 109852 - DNA, 25 bp, Saccharomyces pastorianus
ggctaagaaattgatccaatctttg

SEQ ID NO: 109853 - DNA, 25 bp, Saccharomyces pastorianus
gttatcaacgatgctggtaaggcta

SEQ ID NO: 109854 - DNA, 25 bp, Saccharomyces pastorianus
tgtacactttggttatcaacgatgc

SEQ ID NO: 109855 - DNA, 25 bp, Saccharomyces pastorianus
tgctggtaaggctaagaaattgatc

SEQ ID NO: 109856 - DNA, 25 bp, Saccharomyces pastorianus
acgatgctggtaaggctaagaaatt

SEQ ID NO: 109857 - DNA, 25 bp, Saccharomyces pastorianus
gtaaggctaagaaattgatccaatc

SEQ ID NO: 109858 - DNA, 25 bp, Saccharomyces pastorianus
ttatcaacgatgctggtaaggctaa

SEQ ID NO: 109859 - DNA, 25 bp, Saccharomyces pastorianus
ctttgtacactttggttatcaacga

SEQ ID NO: 109860 - DNA, 25 bp, Saccharomyces pastorianus
atcaacgatgctggtaaggctaaga

SEQ ID NO: 109861 - DNA, 25 bp, Saccharomyces pastorianus
aggctcttcttctttgtacactttg

SEQ ID NO: 109862 - DNA, 25 bp, Saccharomyces pastorianus
tgaacaaggccggtaagccattcag

SEQ ID NO: 109863 - DNA, 25 bp, Saccharomyces pastorianus
ggctaagaaattgatccaatctttg

SEQ ID NO: 109864 - DNA, 25 bp, Saccharomyces pastorianus
gttaagaccgccactgttaagatta

SEQ ID NO: 109865 - DNA, 25 bp, Saccharomyces pastorianus
gttatcaacgatgctggtaaggcta

SEQ ID NO: 109866 - DNA, 25 bp, Saccharomyces pastorianus
tgtacactttggttatcaacgatgc

SEQ ID NO: 109867 - DNA, 25 bp, Saccharomyces pastorianus
aacgatgctggtaaggctaagaaat

SEQ ID NO: 109868 - DNA, 25 bp, Saccharomyces pastorianus
gtaagccattcagacaaaccaagtt

SEQ ID NO: 109869 - DNA, 25 bp, Saccharomyces pastorianus
ttagaggctcttcttctttgtacac

SEQ ID NO: 109870 - DNA, 25 bp, Saccharomyces pastorianus
ctttgtacactttggttatcaacga

SEQ ID NO: 109871 - DNA, 25 bp, Saccharomyces pastorianus
accaagttcaaggttagaggctctt

SEQ ID NO: 109872 - DNA, 25 bp, Saccharomyces pastorianus
gtaagatgtacaacagaccgcctgt

SEQ ID NO: 109873 - DNA, 25 bp, Saccharomyces pastorianus
aagcaagcggagctcatgcatcaaa

SEQ ID NO: 109874 - DNA, 25 bp, Saccharomyces pastorianus
atggtaaaaagcaccgccgcagact

SEQ ID NO: 109875 - DNA, 25 bp, Saccharomyces pastorianus
gcctggctgcatgacaaatcactgt

SEQ ID NO: 109876 - DNA, 25 bp, Saccharomyces pastorianus
tacttgcacttctaccggttatagg

SEQ ID NO: 109877 - DNA, 25 bp, Saccharomyces pastorianus
tttgcatggttgcacgcatgttcca

SEQ ID NO: 109878 - DNA, 25 bp, Saccharomyces pastorianus
ggtccaaaacaaagcctggctgcat

SEQ ID NO: 109879 - DNA, 25 bp, Saccharomyces pastorianus
gccgcagactgccatattattgcac

SEQ ID NO: 109880 - DNA, 25 bp, Saccharomyces pastorianus
acattccaatgccaatactgcacct

SEQ ID NO: 109881 - DNA, 25 bp, Saccharomyces pastorianus
ggatgggcaccattacttgcacttc

SEQ ID NO: 109882 - DNA, 25 bp, Saccharomyces pastorianus
actgcacctccagtagttggtggca

SEQ ID NO: 109883 - DNA, 25 bp, Saccharomyces pastorianus
gacttaatcgattctggcgaaatta

SEQ ID NO: 109884 - DNA, 25 bp, Saccharomyces pastorianus
gtatttcacccataacggcaacttt

SEQ ID NO: 109885 - DNA, 25 bp, Saccharomyces pastorianus
gtctaacccaaagtatttcacccat

SEQ ID NO: 109886 - DNA, 25 bp, Saccharomyces pastorianus
ggctctaactcccaaaacaatgaaa

SEQ ID NO: 109887 - DNA, 25 bp, Saccharomyces pastorianus
cgaagcaaagtctaacccaaagtat

SEQ ID NO: 109888 - DNA, 25 bp, Saccharomyces pastorianus
ggcaagcctggcgatgagattaatg

SEQ ID NO: 109889 - DNA, 25 bp, Saccharomyces pastorianus
atttcacccataacggcaactttgg

SEQ ID NO: 109890 - DNA, 25 bp, Saccharomyces pastorianus
caagcctggcgatgagattaatgac

SEQ ID NO: 109891 - DNA, 25 bp, Saccharomyces pastorianus
aaccacgtcaagagaggaggctatg

SEQ ID NO: 109892 - DNA, 25 bp, Saccharomyces pastorianus
gacagtcttcaacaagaccagaagg

SEQ ID NO: 109893 - DNA, 25 bp, Saccharomyces pastorianus
tctggcgaaattaagacagtcttca

SEQ ID NO: 109894 - DNA, 25 bp, Saccharomyces pastorianus
gccgaacctaaagatgctaccgaaa

SEQ ID NO: 109895 - DNA, 25 bp, Saccharomyces pastorianus
gacgttttgtccactaaagaagcta

SEQ ID NO: 109896 - DNA, 25 bp, Saccharomyces pastorianus
aaaaactgaggcctctgcttctctt

SEQ ID NO: 109897 - DNA, 25 bp, Saccharomyces pastorianus
aacgagtttactaccgacattgcct

SEQ ID NO: 109898 - DNA, 25 bp, Saccharomyces pastorianus
gaggctgcctctggtgagagtacta

SEQ ID NO: 109899 - DNA, 25 bp, Saccharomyces pastorianus
aaagtgttgcagtcgagccatccaa

SEQ ID NO: 109900 - DNA, 25 bp, Saccharomyces pastorianus
ttctcttgaaagcagtgccgtcacg

SEQ ID NO: 109901 - DNA, 25 bp, Saccharomyces pastorianus
cattgcctctccaagacatcaagaa

SEQ ID NO: 109902 - DNA, 25 bp, Saccharomyces pastorianus
aacaacgtttccaaggaggctgcct

SEQ ID NO: 109903 - DNA, 25 bp, Saccharomyces pastorianus
gtgaacctgtggaggatgccaacaa

SEQ ID NO: 109904 - DNA, 25 bp, Saccharomyces pastorianus
ggaagataccagtgagcctgcgaaa

SEQ ID NO: 109905 - DNA, 25 bp, Saccharomyces pastorianus
atgtgaacgatatggaggcaatgct

SEQ ID NO: 109906 - DNA, 25 bp, Saccharomyces pastorianus
ggcaatgctggtagacgaactcgta

SEQ ID NO: 109907 - DNA, 25 bp, Saccharomyces pastorianus
gagtcagcacttgaggaagaaacca

SEQ ID NO: 109908 - DNA, 25 bp, Saccharomyces pastorianus
agagctgctggtgcttgaatctgat

SEQ ID NO: 109909 - DNA, 25 bp, Saccharomyces pastorianus
cgtatgtgacacgagggacctactt

SEQ ID NO: 109910 - DNA, 25 bp, Saccharomyces pastorianus
gagggacctacttaatgtcgatgaa

SEQ ID NO: 109911 - DNA, 25 bp, Saccharomyces pastorianus
tcgtcgatatgcatgacagtattaa

SEQ ID NO: 109912 - DNA, 25 bp, Saccharomyces pastorianus
gaagaactaactctacttacggaag

SEQ ID NO: 109913 - DNA, 25 bp, Saccharomyces pastorianus
agtagatactgctgaagaattcgaa

SEQ ID NO: 109914 - DNA, 25 bp, Saccharomyces pastorianus
acggaagaacgtgcagtagatactg

SEQ ID NO: 109915 - DNA, 25 bp, Saccharomyces pastorianus
aattgtgcacgtatcgtcgatatgc

SEQ ID NO: 109916 - DNA, 25 bp, Saccharomyces pastorianus
caccgccgaccataataataccaat

SEQ ID NO: 109917 - DNA, 25 bp, Saccharomyces pastorianus
ataccactccgattcaccattaggt

SEQ ID NO: 109918 - DNA, 25 bp, Saccharomyces pastorianus
atcgtccgcaggtggtttagaccta

SEQ ID NO: 109919 - DNA, 25 bp, Saccharomyces pastorianus
agctcccttttcgacgtcagaataa

SEQ ID NO: 109920 - DNA, 25 bp, Saccharomyces pastorianus
actgattctggtgatactggcttta

SEQ ID NO: 109921 - DNA, 25 bp, Saccharomyces pastorianus
tcaaggaaccactatcaccagtatt

SEQ ID NO: 109922 - DNA, 25 bp, Saccharomyces pastorianus
aaggacggactttattgactcagat

SEQ ID NO: 109923 - DNA, 25 bp, Saccharomyces pastorianus
attaggtggtagtgcatcgtccgca

SEQ ID NO: 109924 - DNA, 25 bp, Saccharomyces pastorianus
aggtcgttacggcatatagagctaa

SEQ ID NO: 109925 - DNA, 25 bp, Saccharomyces pastorianus
tatactaccgttacgtacacaccat

SEQ ID NO: 109926 - DNA, 25 bp, Saccharomyces pastorianus
catcgtcattggttgtgtggttggt

SEQ ID NO: 109927 - DNA, 25 bp, Saccharomyces pastorianus
ggtggttctcttgccagaattgctt

SEQ ID NO: 109928 - DNA, 25 bp, Saccharomyces pastorianus
ggttctcttgccagaattgctttga

SEQ ID NO: 109929 - DNA, 25 bp, Saccharomyces pastorianus
agctcaacacgctgttattttggat

SEQ ID NO: 109930 - DNA, 25 bp, Saccharomyces pastorianus
ttctcttgccagaattgctttgagg

SEQ ID NO: 109931 - DNA, 25 bp, Saccharomyces pastorianus
aagattggtggttctcttgccagaa

SEQ ID NO: 109932 - DNA, 25 bp, Saccharomyces pastorianus
tcaacacgctgttattttggatcaa

SEQ ID NO: 109933 - DNA, 25 bp, Saccharomyces pastorianus
gattggtggttctcttgccagaatt

SEQ ID NO: 109934 - DNA, 25 bp, Saccharomyces pastorianus
ttggtggttctcttgccagaattgc

SEQ ID NO: 109935 - DNA, 25 bp, Saccharomyces pastorianus
cacgctgttattttggatcaagaaa

SEQ ID NO: 109936 - DNA, 25 bp, Saccharomyces pastorianus
aacacgctgttattttggatcaaga

SEQ ID NO: 109937 - DNA, 25 bp, Saccharomyces pastorianus
tgccagaattgctttgaggcacttg

SEQ ID NO: 109938 - DNA, 25 bp, Saccharomyces pastorianus
agatacgtctctgtttccgttttgg

SEQ ID NO: 109939 - DNA, 25 bp, Saccharomyces pastorianus
ggtggttctcttgccagaattgctt

SEQ ID NO: 109940 - DNA, 25 bp, Saccharomyces pastorianus
ggttctcttgccagaattgctttga

SEQ ID NO: 109941 - DNA, 25 bp, Saccharomyces pastorianus
agctcaacacgctgttattttggat

SEQ ID NO: 109942 - DNA, 25 bp, Saccharomyces pastorianus
ttctcttgccagaattgctttgagg

SEQ ID NO: 109943 - DNA, 25 bp, Saccharomyces pastorianus
aagattggtggttctcttgccagaa

SEQ ID NO: 109944 - DNA, 25 bp, Saccharomyces pastorianus
gattggtggttctcttgccagaatt

SEQ ID NO: 109945 - DNA, 25 bp, Saccharomyces pastorianus
tcaagccaatctcgaagcattccaa

SEQ ID NO: 109946 - DNA, 25 bp, Saccharomyces pastorianus
cacgctgttattttggatcaagaaa

SEQ ID NO: 109947 - DNA, 25 bp, Saccharomyces pastorianus
aacacgctgttattttggatcaaga

SEQ ID NO: 109948 - DNA, 25 bp, Saccharomyces pastorianus
tgccagaattgctttgaggcacttg

SEQ ID NO: 109949 - DNA, 25 bp, Saccharomyces pastorianus
aaatccctatttttacataatgcta

SEQ ID NO: 109950 - DNA, 25 bp, Saccharomyces pastorianus
taggaatcctcaaatccctattttt

SEQ ID NO: 109951 - DNA, 25 bp, Saccharomyces pastorianus
aattgctgggattttattgttgatc

SEQ ID NO: 109952 - DNA, 25 bp, Saccharomyces pastorianus
gatatactaataacacggatactta

SEQ ID NO: 109953 - DNA, 25 bp, Saccharomyces pastorianus
gtttcatccaatacgaacgattatc

SEQ ID NO: 109954 - DNA, 25 bp, Saccharomyces pastorianus
caaattattgcaacatttcccagtg

SEQ ID NO: 109955 - DNA, 25 bp, Saccharomyces pastorianus
acagatgatgttacagtttcatcca

SEQ ID NO: 109956 - DNA, 25 bp, Saccharomyces pastorianus
ctgggattttattgttgatcaaggc

SEQ ID NO: 109957 - DNA, 25 bp, Saccharomyces pastorianus
gttacagtttcatccaatacgaacg

SEQ ID NO: 109958 - DNA, 25 bp, Saccharomyces pastorianus
gaatcctcaaatccctatttttaca

SEQ ID NO: 109959 - DNA, 25 bp, Saccharomyces pastorianus
ggctatgatattctgtatagttaat

SEQ ID NO: 109960 - DNA, 25 bp, Saccharomyces pastorianus
cggagcagctttcggtgtcagtaat

SEQ ID NO: 109961 - DNA, 25 bp, Saccharomyces pastorianus
gggtttttttgtacagttatgtgat

SEQ ID NO: 109962 - DNA, 25 bp, Saccharomyces pastorianus
ttttttcaccagtatcggcctctat

SEQ ID NO: 109963 - DNA, 25 bp, Saccharomyces pastorianus
tttcaccagtatcggcctctattta

SEQ ID NO: 109964 - DNA, 25 bp, Saccharomyces pastorianus
ccagtatcggcctctatttataaaa

SEQ ID NO: 109965 - DNA, 25 bp, Saccharomyces pastorianus
agcagctttcggtgtcagtaattct

SEQ ID NO: 109966 - DNA, 25 bp, Saccharomyces pastorianus
ttataaaaaacggagcagctttcgg

SEQ ID NO: 109967 - DNA, 25 bp, Saccharomyces pastorianus
aacggagcagctttcggtgtcagta

SEQ ID NO: 109968 - DNA, 25 bp, Saccharomyces pastorianus
gattataaacagtcttttgtctagt

SEQ ID NO: 109969 - DNA, 25 bp, Saccharomyces pastorianus
atgtgtttatgccaataagggtttt

SEQ ID NO: 109970 - DNA, 25 bp, Saccharomyces pastorianus
gctttcggtgtcagtaattctgaaa

SEQ ID NO: 109971 - DNA, 25 bp, Saccharomyces pastorianus
gagttcttaccatgcatatggccac

SEQ ID NO: 109972 - DNA, 25 bp, Saccharomyces pastorianus
agcatcggaaggtccatcttttcga

SEQ ID NO: 109973 - DNA, 25 bp, Saccharomyces pastorianus
aggtttccggaactcgcaatgctaa

SEQ ID NO: 109974 - DNA, 25 bp, Saccharomyces pastorianus
aaagtgaaaccttgagccctggaga

SEQ ID NO: 109975 - DNA, 25 bp, Saccharomyces pastorianus
tacgtgatgttatgttctcccgcaa

SEQ ID NO: 109976 - DNA, 25 bp, Saccharomyces pastorianus
gtcatttagacaagcggtaccctta

SEQ ID NO: 109977 - DNA, 25 bp, Saccharomyces pastorianus
ggtggaccccagaggcaagattgta

SEQ ID NO: 109978 - DNA, 25 bp, Saccharomyces pastorianus
ttagatcccgaagtcattgagtcat

SEQ ID NO: 109979 - DNA, 25 bp, Saccharomyces pastorianus
catgatctaccctagtgcattcaac

SEQ ID NO: 109980 - DNA, 25 bp, Saccharomyces pastorianus
cacagggcccttgcattggcattta

SEQ ID NO: 109981 - DNA, 25 bp, Saccharomyces pastorianus
caagggtgcgtttgccatgatctac

SEQ ID NO: 109982 - DNA, 25 bp, Saccharomyces pastorianus
gacgaatatttgcacgatcccgact

SEQ ID NO: 109983 - DNA, 25 bp, Saccharomyces pastorianus
ggagaaggtcccaacttcacttatt

SEQ ID NO: 109984 - DNA, 25 bp, Saccharomyces pastorianus
gaattctctgttgagcagacccact

SEQ ID NO: 109985 - DNA, 25 bp, Saccharomyces pastorianus
aaaggatcctctgacgactcaaaga

SEQ ID NO: 109986 - DNA, 25 bp, Saccharomyces pastorianus
ggtcggtccatgatttacgtgagct

SEQ ID NO: 109987 - DNA, 25 bp, Saccharomyces pastorianus
tttaactggtgaacactcgtcctcg

SEQ ID NO: 109988 - DNA, 25 bp, Saccharomyces pastorianus
gaattattatttcacgcatcccgat

SEQ ID NO: 109989 - DNA, 25 bp, Saccharomyces pastorianus
aatgtttctcctgcatctcaaatca

SEQ ID NO: 109990 - DNA, 25 bp, Saccharomyces pastorianus
aatcacgtgaatgccatcccaagaa

SEQ ID NO: 109991 - DNA, 25 bp, Saccharomyces pastorianus
aaagttcgcgctcacgttcaggaaa

SEQ ID NO: 109992 - DNA, 25 bp, Saccharomyces pastorianus
aacccctttgctatcaatgtttctc

SEQ ID NO: 109993 - DNA, 25 bp, Saccharomyces pastorianus
gaagcctgttttccaagacttgtac

SEQ ID NO: 109994 - DNA, 25 bp, Saccharomyces pastorianus
tggactggtacccaatcttcaagaa

SEQ ID NO: 109995 - DNA, 25 bp, Saccharomyces pastorianus
tggttgctccaaagggttccggtag

SEQ ID NO: 109996 - DNA, 25 bp, Saccharomyces pastorianus
aagaggtgctttggactggtaccca

SEQ ID NO: 109997 - DNA, 25 bp, Saccharomyces pastorianus
gtcaactctgacttgtacggtgaaa

SEQ ID NO: 109998 - DNA, 25 bp, Saccharomyces pastorianus
gtaaggctcacgaaaaggcccaagc

SEQ ID NO: 109999 - DNA, 25 bp, Saccharomyces pastorianus
aatctctatacccattgatcggtaa

SEQ ID NO: 110000 - DNA, 25 bp, Saccharomyces pastorianus
tgagagaaaacggtcactccccatc

SEQ ID NO: 110001 - DNA, 25 bp, Saccharomyces pastorianus
gtatccacggtatgttcttggctca

SEQ ID NO: 110002 - DNA, 25 bp, Saccharomyces pastorianus
gtcagatctttgttcaaggaaggtc

SEQ ID NO: 110003 - DNA, 25 bp, Saccharomyces pastorianus
gaacggtaccgaaaccaagagatct

SEQ ID NO: 110004 - DNA, 25 bp, Saccharomyces pastorianus
ggtatcgcagtttcttctataggcc

SEQ ID NO: 110005 - DNA, 25 bp, Saccharomyces pastorianus
tttggcttccgcttcattgattaca

SEQ ID NO: 110006 - DNA, 25 bp, Saccharomyces pastorianus
ataggcctctactctggtcttttgg

SEQ ID NO: 110007 - DNA, 25 bp, Saccharomyces pastorianus
accgccttgggagcgtttgcgtcaa

SEQ ID NO: 110008 - DNA, 25 bp, Saccharomyces pastorianus
gtttgcgtcaactttcttttgtgtg

SEQ ID NO: 110009 - DNA, 25 bp, Saccharomyces pastorianus
cttgcagctccattatcttcatttg

SEQ ID NO: 110010 - DNA, 25 bp, Saccharomyces pastorianus
gctgcttccgaactgagcgattcta

SEQ ID NO: 110011 - DNA, 25 bp, Saccharomyces pastorianus
ttactctatggtatgcttgcagctc

SEQ ID NO: 110012 - DNA, 25 bp, Saccharomyces pastorianus
aatacacctcgagacgggaagcctg

SEQ ID NO: 110013 - DNA, 25 bp, Saccharomyces pastorianus
attgattacatctactactccacta

SEQ ID NO: 110014 - DNA, 25 bp, Saccharomyces pastorianus
tgtgcctccaactatcagtctagaa

SEQ ID NO: 110015 - DNA, 25 bp, Saccharomyces pastorianus
ggttctaagccatcatcatctttgt

SEQ ID NO: 110016 - DNA, 25 bp, Saccharomyces pastorianus
tctttctcattttcaacatccggtt

SEQ ID NO: 110017 - DNA, 25 bp, Saccharomyces pastorianus
ttactatcacactaggtcctctgaa

SEQ ID NO: 110018 - DNA, 25 bp, Saccharomyces pastorianus
gaggaggctgcatcgatcattatat

SEQ ID NO: 110019 - DNA, 25 bp, Saccharomyces pastorianus
aatgggcctggcaaggactctttct

SEQ ID NO: 110020 - DNA, 25 bp, Saccharomyces pastorianus
catagagagtctgtgcgccgtgaac

SEQ ID NO: 110021 - DNA, 25 bp, Saccharomyces pastorianus
gtcacatcttccatggtttcttcaa

SEQ ID NO: 110022 - DNA, 25 bp, Saccharomyces pastorianus
agatctcttggtttggctgtgcaga

SEQ ID NO: 110023 - DNA, 25 bp, Saccharomyces pastorianus
caaattacctcttgatgcctgcgat

SEQ ID NO: 110024 - DNA, 25 bp, Saccharomyces pastorianus
tattatgctgccattgcttttacaa

SEQ ID NO: 110025 - DNA, 25 bp, Saccharomyces pastorianus
gaacttagccgagggtcttaatcca

SEQ ID NO: 110026 - DNA, 25 bp, Saccharomyces pastorianus
actggaaccatccacttttgttggt

SEQ ID NO: 110027 - DNA, 25 bp, Saccharomyces pastorianus
agagagtgtgctccttggctagaca

SEQ ID NO: 110028 - DNA, 25 bp, Saccharomyces pastorianus
atctcatccggtttagttgtgtatc

SEQ ID NO: 110029 - DNA, 25 bp, Saccharomyces pastorianus
atcaagccgcagcagtagtcaagga

SEQ ID NO: 110030 - DNA, 25 bp, Saccharomyces pastorianus
tggctagacacttaggttccttgtt

SEQ ID NO: 110031 - DNA, 25 bp, Saccharomyces pastorianus
gccgttcaaactgcatccgttcaat

SEQ ID NO: 110032 - DNA, 25 bp, Saccharomyces pastorianus
ttccttgtttagtgacgccgttcaa

SEQ ID NO: 110033 - DNA, 25 bp, Saccharomyces pastorianus
atgaatttttcaagcctatctggga

SEQ ID NO: 110034 - DNA, 25 bp, Saccharomyces pastorianus
attagagtgctctctcatcaagccg

SEQ ID NO: 110035 - DNA, 25 bp, Saccharomyces pastorianus
aaatcggatcctctgctatggctta

SEQ ID NO: 110036 - DNA, 25 bp, Saccharomyces pastorianus
actttgttgaacatctcatccggtt

SEQ ID NO: 110037 - DNA, 25 bp, Saccharomyces pastorianus
aagccggcgaatccacaaagcacag

SEQ ID NO: 110038 - DNA, 25 bp, Saccharomyces pastorianus
agaaatggcgcaactcgagagtaat

SEQ ID NO: 110039 - DNA, 25 bp, Saccharomyces pastorianus
atatccgttgtatttcactgatcaa

SEQ ID NO: 110040 - DNA, 25 bp, Saccharomyces pastorianus
ggctcctttaccctatagactaatg

SEQ ID NO: 110041 - DNA, 25 bp, Saccharomyces pastorianus
agaactgtctctgatgtcgcaggac

SEQ ID NO: 110042 - DNA, 25 bp, Saccharomyces pastorianus
gatattacttagacaagccggcgaa

SEQ ID NO: 110043 - DNA, 25 bp, Saccharomyces pastorianus
gtatcagctgatagggatcttccat

SEQ ID NO: 110044 - DNA, 25 bp, Saccharomyces pastorianus
ccatccaaattttcaaggctccttt

SEQ ID NO: 110045 - DNA, 25 bp, Saccharomyces pastorianus
gggatcttccattcaacggatttat

SEQ ID NO: 110046 - DNA, 25 bp, Saccharomyces pastorianus
atttctccatttgacagccatccaa

SEQ ID NO: 110047 - DNA, 25 bp, Saccharomyces pastorianus
gtgatcgacagtcaatatccgttgt

SEQ ID NO: 110048 - DNA, 25 bp, Saccharomyces pastorianus
gggcgagaatccaaagattacttta

SEQ ID NO: 110049 - DNA, 25 bp, Saccharomyces pastorianus
tagtaatagtaaagaacgcacccaa

SEQ ID NO: 110050 - DNA, 25 bp, Saccharomyces pastorianus
aggcccagtgcaagatttccagttg

SEQ ID NO: 110051 - DNA, 25 bp, Saccharomyces pastorianus
gaacgcacccaaaatataaaagaag

SEQ ID NO: 110052 - DNA, 25 bp, Saccharomyces pastorianus
aagccccattgcgtaaggcccagtg

SEQ ID NO: 110053 - DNA, 25 bp, Saccharomyces pastorianus
tttgaacagttacgcaagccccatt

SEQ ID NO: 110054 - DNA, 25 bp, Saccharomyces pastorianus
acaggcctcagctaagtgatgaaga

SEQ ID NO: 110055 - DNA, 25 bp, Saccharomyces pastorianus
ggtttattgagaacgggtggccaca

SEQ ID NO: 110056 - DNA, 25 bp, Saccharomyces pastorianus
tgatgaagaagtctctaaaaggcac

SEQ ID NO: 110057 - DNA, 25 bp, Saccharomyces pastorianus
gtggccacaggcctcagctaagtga

SEQ ID NO: 110058 - DNA, 25 bp, Saccharomyces pastorianus
gttgaagatactgccggtggtttat

SEQ ID NO: 110059 - DNA, 25 bp, Saccharomyces pastorianus
aaggcgtaaaagttttgcagctcga

SEQ ID NO: 110060 - DNA, 25 bp, Saccharomyces pastorianus
ggtgctcggactgtacagaagctgt

SEQ ID NO: 110061 - DNA, 25 bp, Saccharomyces pastorianus
tgcaatgcaatattccttcctgttc

SEQ ID NO: 110062 - DNA, 25 bp, Saccharomyces pastorianus
aacatcaagaggtggtgctcggact

SEQ ID NO: 110063 - DNA, 25 bp, Saccharomyces pastorianus
aatccgggaaatggccatgcaatgc

SEQ ID NO: 110064 - DNA, 25 bp, Saccharomyces pastorianus
tattccttcctgttcaattgttgat

SEQ ID NO: 110065 - DNA, 25 bp, Saccharomyces pastorianus
tgcagctcgagaatccttgaagttt

SEQ ID NO: 110066 - DNA, 25 bp, Saccharomyces pastorianus
tgtagattcaatcttgtccaaggac

SEQ ID NO: 110067 - DNA, 25 bp, Saccharomyces pastorianus
tagtgaagatcctcaaatccgggaa

SEQ ID NO: 110068 - DNA, 25 bp, Saccharomyces pastorianus
gaagctgtgactttgaacttttata

SEQ ID NO: 110069 - DNA, 25 bp, Saccharomyces pastorianus
ttggatttccttcaacaaaggcgta

SEQ ID NO: 110070 - DNA, 25 bp, Saccharomyces pastorianus
ttagttgcgagtaaagtcgggcatt

SEQ ID NO: 110071 - DNA, 25 bp, Saccharomyces pastorianus
aaagaaatctttgcaacatctgaag

SEQ ID NO: 110072 - DNA, 25 bp, Saccharomyces pastorianus
aaagtcgggcatttggagttgttga

SEQ ID NO: 110073 - DNA, 25 bp, Saccharomyces pastorianus
aaaatttgagaaaagctgccccatt

SEQ ID NO: 110074 - DNA, 25 bp, Saccharomyces pastorianus
gctgccccattgcaattgaaatcaa

SEQ ID NO: 110075 - DNA, 25 bp, Saccharomyces pastorianus
gaaaccactgaaagattagttgcga

SEQ ID NO: 110076 - DNA, 25 bp, Saccharomyces pastorianus
tgaaaaagagctcttcccttaccga

SEQ ID NO: 110077 - DNA, 25 bp, Saccharomyces pastorianus
atttgagaaaagctgccccattgca

SEQ ID NO: 110078 - DNA, 25 bp, Saccharomyces pastorianus
gaaaagctgccccattgcaattgaa

SEQ ID NO: 110079 - DNA, 25 bp, Saccharomyces pastorianus
tcccttaccgaaaccactgaaagat

SEQ ID NO: 110080 - DNA, 25 bp, Saccharomyces pastorianus
gcatttggagttgttgagaggtact

SEQ ID NO: 110081 - DNA, 25 bp, Saccharomyces pastorianus
aaagtcgccgtcagccatgcgtttt

SEQ ID NO: 110082 - DNA, 25 bp, Saccharomyces pastorianus
catgcgttttactttcgtttgcaaa

SEQ ID NO: 110083 - DNA, 25 bp, Saccharomyces pastorianus
aaggtcaactggatcgttgctcgaa

SEQ ID NO: 110084 - DNA, 25 bp, Saccharomyces pastorianus
caatctttcatttacatggctcaag

SEQ ID NO: 110085 - DNA, 25 bp, Saccharomyces pastorianus
gatcgttgctcgaaagtcgccgtca

SEQ ID NO: 110086 - DNA, 25 bp, Saccharomyces pastorianus
gaccaagattcttaagcttcatcaa

SEQ ID NO: 110087 - DNA, 25 bp, Saccharomyces pastorianus
ttacgtaatgcttcgttgttacaaa

SEQ ID NO: 110088 - DNA, 25 bp, Saccharomyces pastorianus
ggctcaagaagtgttgctgctcaaa

SEQ ID NO: 110089 - DNA, 25 bp, Saccharomyces pastorianus
gtgtatcgtatttagcccgaaatta

SEQ ID NO: 110090 - DNA, 25 bp, Saccharomyces pastorianus
aaaactccttctcttgtgtatcgta

SEQ ID NO: 110091 - DNA, 25 bp, Saccharomyces pastorianus
gcttcatcaatcctttggaactgca

SEQ ID NO: 110092 - DNA, 25 bp, Saccharomyces pastorianus
gtcttactggcacttctcgagcact

SEQ ID NO: 110093 - DNA, 25 bp, Saccharomyces pastorianus
ggaagtcttccaatgctggacttga

SEQ ID NO: 110094 - DNA, 25 bp, Saccharomyces pastorianus
aatagggtgtcgtcttactggcact

SEQ ID NO: 110095 - DNA, 25 bp, Saccharomyces pastorianus
aagagtgttcattggaagtcttcca

SEQ ID NO: 110096 - DNA, 25 bp, Saccharomyces pastorianus
agggtgtcgtcttactggcacttct

SEQ ID NO: 110097 - DNA, 25 bp, Saccharomyces pastorianus
aatgctggacttgaaaaatagggtg

SEQ ID NO: 110098 - DNA, 25 bp, Saccharomyces pastorianus
tgtcgtcttactggcacttctcgag

SEQ ID NO: 110099 - DNA, 25 bp, Saccharomyces pastorianus
tggcacttctcgagcactccggttg

SEQ ID NO: 110100 - DNA, 25 bp, Saccharomyces pastorianus
agtcttccaatgctggacttgaaaa

SEQ ID NO: 110101 - DNA, 25 bp, Saccharomyces pastorianus
aaaatagggtgtcgtcttactggca

SEQ ID NO: 110102 - DNA, 25 bp, Saccharomyces pastorianus
gcacttctcgagcactccggttgcg

SEQ ID NO: 110103 - DNA, 25 bp, Saccharomyces pastorianus
aagttttctacgctggataaattgt

SEQ ID NO: 110104 - DNA, 25 bp, Saccharomyces pastorianus
gacggacgcaacttttctcagaaat

SEQ ID NO: 110105 - DNA, 25 bp, Saccharomyces pastorianus
attctttatgcattacgtttcgcag

SEQ ID NO: 110106 - DNA, 25 bp, Saccharomyces pastorianus
ggaagacttccaatgaacactctta

SEQ ID NO: 110107 - DNA, 25 bp, Saccharomyces pastorianus
cggagtgctcgagaagtgccagtaa

SEQ ID NO: 110108 - DNA, 25 bp, Saccharomyces pastorianus
ggataaattgttctcttccctttga

SEQ ID NO: 110109 - DNA, 25 bp, Saccharomyces pastorianus
gttctcttccctttgaaatatggag

SEQ ID NO: 110110 - DNA, 25 bp, Saccharomyces pastorianus
acaccctatttttcaagtccagcat

SEQ ID NO: 110111 - DNA, 25 bp, Saccharomyces pastorianus
tgccagtaagacgacaccctatttt

SEQ ID NO: 110112 - DNA, 25 bp, Saccharomyces pastorianus
ttattcttctcgcaaccggagtgct

SEQ ID NO: 110113 - DNA, 25 bp, Saccharomyces pastorianus
gtttcgcagtaatcctagaacccta

SEQ ID NO: 110114 - DNA, 25 bp, Saccharomyces pastorianus
acttatattcagcagttccgtcaag

SEQ ID NO: 110115 - DNA, 25 bp, Saccharomyces pastorianus
atcgacgagtgcttggacctatttc

SEQ ID NO: 110116 - DNA, 25 bp, Saccharomyces pastorianus
agtgctcatctacggaattctcttt

SEQ ID NO: 110117 - DNA, 25 bp, Saccharomyces pastorianus
atgtggccttggacaactttacttt

SEQ ID NO: 110118 - DNA, 25 bp, Saccharomyces pastorianus
aacactgaccgcatggtagggaact

SEQ ID NO: 110119 - DNA, 25 bp, Saccharomyces pastorianus
ctcaaagttttggttggcgttcaca

SEQ ID NO: 110120 - DNA, 25 bp, Saccharomyces pastorianus
gaaattaaatcacccgccgacagag

SEQ ID NO: 110121 - DNA, 25 bp, Saccharomyces pastorianus
tacaccgggtttccctctgaataat

SEQ ID NO: 110122 - DNA, 25 bp, Saccharomyces pastorianus
accccagcaattccgattacgatat

SEQ ID NO: 110123 - DNA, 25 bp, Saccharomyces pastorianus
ttcgtgccaattccttcttcaagaa

SEQ ID NO: 110124 - DNA, 25 bp, Saccharomyces pastorianus
caatgattgcctagcccatttgaaa

SEQ ID NO: 110125 - DNA, 25 bp, Saccharomyces pastorianus
atattaggcagtgtcggatgtgtcg

SEQ ID NO: 110126 - DNA, 25 bp, Saccharomyces pastorianus
atgcagcgcttaccaacagtctgtc

SEQ ID NO: 110127 - DNA, 25 bp, Saccharomyces pastorianus
agatggtactgccatgcttccaacg

SEQ ID NO: 110128 - DNA, 25 bp, Saccharomyces pastorianus
acagtctgtcttctttataccgttg

SEQ ID NO: 110129 - DNA, 25 bp, Saccharomyces pastorianus
gaagcctcgccattatattgtctct

SEQ ID NO: 110130 - DNA, 25 bp, Saccharomyces pastorianus
caacgtgatgtggttcatagcacta

SEQ ID NO: 110131 - DNA, 25 bp, Saccharomyces pastorianus
tttttgtcaccaacatgcagcgctt

SEQ ID NO: 110132 - DNA, 25 bp, Saccharomyces pastorianus
tggcgcaattattcaccgtgtagtc

SEQ ID NO: 110133 - DNA, 25 bp, Saccharomyces pastorianus
tgatttctcgaaaccaactttttgt

SEQ ID NO: 110134 - DNA, 25 bp, Saccharomyces pastorianus
attatattgtctctcggctgccttg

SEQ ID NO: 110135 - DNA, 25 bp, Saccharomyces pastorianus
ttataccgttgctttgttccagatg

SEQ ID NO: 110136 - DNA, 25 bp, Saccharomyces pastorianus
gatctacatgaattcgctatcttgc

SEQ ID NO: 110137 - DNA, 25 bp, Saccharomyces pastorianus
gactctcccatggatgcgttaagga

SEQ ID NO: 110138 - DNA, 25 bp, Saccharomyces pastorianus
gtaaactagggttcttgcacatcat

SEQ ID NO: 110139 - DNA, 25 bp, Saccharomyces pastorianus
gctatcttgcataaacatcacggga

SEQ ID NO: 110140 - DNA, 25 bp, Saccharomyces pastorianus
caaaggcagcatggcgcgatctaca

SEQ ID NO: 110141 - DNA, 25 bp, Saccharomyces pastorianus
cagagaagttgttgacggcaggcca

SEQ ID NO: 110142 - DNA, 25 bp, Saccharomyces pastorianus
taaaccttcggtagcgctgcaaaag

SEQ ID NO: 110143 - DNA, 25 bp, Saccharomyces pastorianus
agttactgtatgactctcccatgga

SEQ ID NO: 110144 - DNA, 25 bp, Saccharomyces pastorianus
atttttgggctgctggatcatcacc

SEQ ID NO: 110145 - DNA, 25 bp, Saccharomyces pastorianus
taccccacaaaactacctgattcat

SEQ ID NO: 110146 - DNA, 25 bp, Saccharomyces pastorianus
agttttcccacagacttctataatg

SEQ ID NO: 110147 - DNA, 25 bp, Saccharomyces pastorianus
aggccttcccaatggctttcttaat

SEQ ID NO: 110148 - DNA, 25 bp, Saccharomyces pastorianus
aacaagcctttctcggctaggtatg

SEQ ID NO: 110149 - DNA, 25 bp, Saccharomyces pastorianus
gcctcaaaaggccatctactcaatt

SEQ ID NO: 110150 - DNA, 25 bp, Saccharomyces pastorianus
tcctctacgcacctagtattgacat

SEQ ID NO: 110151 - DNA, 25 bp, Saccharomyces pastorianus
ggatccatggttgctgatgttcaca

SEQ ID NO: 110152 - DNA, 25 bp, Saccharomyces pastorianus
gatgttcacaggacgtttctttacg

SEQ ID NO: 110153 - DNA, 25 bp, Saccharomyces pastorianus
ttccgttggaactatcgcgtctata

SEQ ID NO: 110154 - DNA, 25 bp, Saccharomyces pastorianus
taacaccctttactggaacgagact

SEQ ID NO: 110155 - DNA, 25 bp, Saccharomyces pastorianus
ggcgaattcatcttgactcatccta

SEQ ID NO: 110156 - DNA, 25 bp, Saccharomyces pastorianus
catcctaacttaagaattccgcctc

SEQ ID NO: 110157 - DNA, 25 bp, Saccharomyces pastorianus
tattcagactgctaccagactcatc

SEQ ID NO: 110158 - DNA, 25 bp, Saccharomyces pastorianus
accccaatcatgttgcagagtgcat

SEQ ID NO: 110159 - DNA, 25 bp, Saccharomyces pastorianus
tatctaccccatcaaactcttttat

SEQ ID NO: 110160 - DNA, 25 bp, Saccharomyces pastorianus
atcacatttgttctcggttcatgcg

SEQ ID NO: 110161 - DNA, 25 bp, Saccharomyces pastorianus
agaagatcattccaactgctgctgc

SEQ ID NO: 110162 - DNA, 25 bp, Saccharomyces pastorianus
tgatctctcaaatccttttccagaa

SEQ ID NO: 110163 - DNA, 25 bp, Saccharomyces pastorianus
ggttcatgcgcagtattttccaaga

SEQ ID NO: 110164 - DNA, 25 bp, Saccharomyces pastorianus
ggctccgacctactaggtactttag

SEQ ID NO: 110165 - DNA, 25 bp, Saccharomyces pastorianus
ggcctactacatccaaccattaatg

SEQ ID NO: 110166 - DNA, 25 bp, Saccharomyces pastorianus
aagaccatcgtctacatcacatttg

SEQ ID NO: 110167 - DNA, 25 bp, Saccharomyces pastorianus
gacgtggatcgaaatctccggcact

SEQ ID NO: 110168 - DNA, 25 bp, Saccharomyces pastorianus
tgaagctcttctggaccctatcaag

SEQ ID NO: 110169 - DNA, 25 bp, Saccharomyces pastorianus
tactgccgcgacatatctctgagag

SEQ ID NO: 110170 - DNA, 25 bp, Saccharomyces pastorianus
agtgactgtagtggacctggccaat

SEQ ID NO: 110171 - DNA, 25 bp, Saccharomyces pastorianus
cgctgttaaaagatcccgtcattga

SEQ ID NO: 110172 - DNA, 25 bp, Saccharomyces pastorianus
gtcggttgatttgcaaacgctgtta

SEQ ID NO: 110173 - DNA, 25 bp, Saccharomyces pastorianus
aaaatgcgcaatcttcagggaatga

SEQ ID NO: 110174 - DNA, 25 bp, Saccharomyces pastorianus
gttttgcagcgccaacaaactctag

SEQ ID NO: 110175 - DNA, 25 bp, Saccharomyces pastorianus
aaacgttgtgttattgttgctgcaa

SEQ ID NO: 110176 - DNA, 25 bp, Saccharomyces pastorianus
ggtgcaattatatggccctcaatac

SEQ ID NO: 110177 - DNA, 25 bp, Saccharomyces pastorianus
agggaatgatcaaccagtgactgta

SEQ ID NO: 110178 - DNA, 25 bp, Saccharomyces pastorianus
ggacctggccaattactactacatg

SEQ ID NO: 110179 - DNA, 25 bp, Saccharomyces pastorianus
atggattgcccctcaaacgttgtgt

SEQ ID NO: 110180 - DNA, 25 bp, Saccharomyces pastorianus
gacaaaatttaccttcgcagccaaa

SEQ ID NO: 110181 - DNA, 25 bp, Saccharomyces pastorianus
ttaatacgcagatccgtcgcgaaat

SEQ ID NO: 110182 - DNA, 25 bp, Saccharomyces pastorianus
gagcgcatatggcttctaagcgtca

SEQ ID NO: 110183 - DNA, 25 bp, Saccharomyces pastorianus
atatcacgttggtctcatccgaaaa

SEQ ID NO: 110184 - DNA, 25 bp, Saccharomyces pastorianus
aaaggaggagcgtcagcttttcgcc

SEQ ID NO: 110185 - DNA, 25 bp, Saccharomyces pastorianus
gccaacaggcgctaggctaggtcat

SEQ ID NO: 110186 - DNA, 25 bp, Saccharomyces pastorianus
ttacttccaagctttcatctgtcta

SEQ ID NO: 110187 - DNA, 25 bp, Saccharomyces pastorianus
taactttcatggctccggtttggaa

SEQ ID NO: 110188 - DNA, 25 bp, Saccharomyces pastorianus
catcgtgcgggccagaggtactata

SEQ ID NO: 110189 - DNA, 25 bp, Saccharomyces pastorianus
ctaagcgtcattgcaggctgccata

SEQ ID NO: 110190 - DNA, 25 bp, Saccharomyces pastorianus
ggtttagaacttaccttgccaacag

SEQ ID NO: 110191 - DNA, 25 bp, Saccharomyces pastorianus
cttcccacaccggtttgatcagaaa

SEQ ID NO: 110192 - DNA, 25 bp, Saccharomyces pastorianus
tcgtgtttgttcttcccacaccggt

SEQ ID NO: 110193 - DNA, 25 bp, Saccharomyces pastorianus
gtcgtgtttgttcttcccacaccgg

SEQ ID NO: 110194 - DNA, 25 bp, Saccharomyces pastorianus
ttcttcccacaccggtttgatcaga

SEQ ID NO: 110195 - DNA, 25 bp, Saccharomyces pastorianus
cggtttgatcagaaagtacggctta

SEQ ID NO: 110196 - DNA, 25 bp, Saccharomyces pastorianus
gtacggcttaaacatctgtcgtcaa

SEQ ID NO: 110197 - DNA, 25 bp, Saccharomyces pastorianus
ttgttcttcccacaccggtttgatc

SEQ ID NO: 110198 - DNA, 25 bp, Saccharomyces pastorianus
tgttcttcccacaccggtttgatca

SEQ ID NO: 110199 - DNA, 25 bp, Saccharomyces pastorianus
gttcttcccacaccggtttgatcag

SEQ ID NO: 110200 - DNA, 25 bp, Saccharomyces pastorianus
aaaggctcccgtcaatgtcgtgttt

SEQ ID NO: 110201 - DNA, 25 bp, Saccharomyces pastorianus
tttgttcttcccacaccggtttgat

SEQ ID NO: 110202 - DNA, 25 bp, Saccharomyces pastorianus
atcgcatgccttgtgggagtctaca

SEQ ID NO: 110203 - DNA, 25 bp, Saccharomyces pastorianus
attcccatcccagaatacgacgagg

SEQ ID NO: 110204 - DNA, 25 bp, Saccharomyces pastorianus
gaaacttgagaacggacattcccat

SEQ ID NO: 110205 - DNA, 25 bp, Saccharomyces pastorianus
atggtcactataggtatcgcatgcc

SEQ ID NO: 110206 - DNA, 25 bp, Saccharomyces pastorianus
gaaacgtcaagtccagtgcaatatg

SEQ ID NO: 110207 - DNA, 25 bp, Saccharomyces pastorianus
tgtagtgttattcagtcattcaact

SEQ ID NO: 110208 - DNA, 25 bp, Saccharomyces pastorianus
gtctacacgggcacgagatttttcg

SEQ ID NO: 110209 - DNA, 25 bp, Saccharomyces pastorianus
aagttcacgccatctttatcatcca

SEQ ID NO: 110210 - DNA, 25 bp, Saccharomyces pastorianus
cgagatttttcgagcccattgttat

SEQ ID NO: 110211 - DNA, 25 bp, Saccharomyces pastorianus
ggaaatctgttaaagttcacgccat

SEQ ID NO: 110212 - DNA, 25 bp, Saccharomyces pastorianus
gcccattgttatcgatagattgcgt

SEQ ID NO: 110213 - DNA, 25 bp, Saccharomyces pastorianus
aagctttgttttttcctcatttgat

SEQ ID NO: 110214 - DNA, 25 bp, Saccharomyces pastorianus
tgctctagtgaaaacgcttgctcgt

SEQ ID NO: 110215 - DNA, 25 bp, Saccharomyces pastorianus
aagagttggccgttgaattcagcaa

SEQ ID NO: 110216 - DNA, 25 bp, Saccharomyces pastorianus
caaatctggactttatgacgtgcaa

SEQ ID NO: 110217 - DNA, 25 bp, Saccharomyces pastorianus
tcgaatgttctagaggccaatggcc

SEQ ID NO: 110218 - DNA, 25 bp, Saccharomyces pastorianus
ccaatggccattttccgtcagggaa

SEQ ID NO: 110219 - DNA, 25 bp, Saccharomyces pastorianus
ctggcgccagccattttatttcgaa

SEQ ID NO: 110220 - DNA, 25 bp, Saccharomyces pastorianus
acttgactgaagctgatgcgcgttt

SEQ ID NO: 110221 - DNA, 25 bp, Saccharomyces pastorianus
aattgtttatagctccagtttcata

SEQ ID NO: 110222 - DNA, 25 bp, Saccharomyces pastorianus
gatacgtctttcttgtggaccagca

SEQ ID NO: 110223 - DNA, 25 bp, Saccharomyces pastorianus
gtaacgtccaaatcatcgaggtcaa

SEQ ID NO: 110224 - DNA, 25 bp, Saccharomyces pastorianus
gtagcaatatcatgaccagacctat

SEQ ID NO: 110225 - DNA, 25 bp, Saccharomyces pastorianus
tgtgccaacagatgattagaacgac

SEQ ID NO: 110226 - DNA, 25 bp, Saccharomyces pastorianus
ttacgccttatctcatttcgggttc

SEQ ID NO: 110227 - DNA, 25 bp, Saccharomyces pastorianus
aaagacaccttacgccttatctcat

SEQ ID NO: 110228 - DNA, 25 bp, Saccharomyces pastorianus
ggtcagtacacttcaaagacggtgt

SEQ ID NO: 110229 - DNA, 25 bp, Saccharomyces pastorianus
ttatcatgaagaggtcagtacactt

SEQ ID NO: 110230 - DNA, 25 bp, Saccharomyces pastorianus
gacggtgtgtatgaaaatatcccat

SEQ ID NO: 110231 - DNA, 25 bp, Saccharomyces pastorianus
tggatttgctgttccatttgttgcc

SEQ ID NO: 110232 - DNA, 25 bp, Saccharomyces pastorianus
ggttcttcgctattggatttgctgt

SEQ ID NO: 110233 - DNA, 25 bp, Saccharomyces pastorianus
tgaccagacctattatcatgaagag

SEQ ID NO: 110234 - DNA, 25 bp, Saccharomyces pastorianus
tcatttcgggttcttcgctattgga

SEQ ID NO: 110235 - DNA, 25 bp, Saccharomyces pastorianus
atagagacgggagttccacctctgc

SEQ ID NO: 110236 - DNA, 25 bp, Saccharomyces pastorianus
aagaagcgggcttggctgccataat

SEQ ID NO: 110237 - DNA, 25 bp, Saccharomyces pastorianus
agacacatttacgttggccctccag

SEQ ID NO: 110238 - DNA, 25 bp, Saccharomyces pastorianus
tgtagcggcgacgaatagacctgat

SEQ ID NO: 110239 - DNA, 25 bp, Saccharomyces pastorianus
tccagacgtaaacgcccgcttggaa

SEQ ID NO: 110240 - DNA, 25 bp, Saccharomyces pastorianus
agctgaagttgtgctgctttgtcaa

SEQ ID NO: 110241 - DNA, 25 bp, Saccharomyces pastorianus
atgctgctcttctaaggcctggtag

SEQ ID NO: 110242 - DNA, 25 bp, Saccharomyces pastorianus
agctaatcacgtgctcacatcttta

SEQ ID NO: 110243 - DNA, 25 bp, Saccharomyces pastorianus
gctctgcagctccaagtattatctt

SEQ ID NO: 110244 - DNA, 25 bp, Saccharomyces pastorianus
gagtctggagtcgatcttcatgaat

SEQ ID NO: 110245 - DNA, 25 bp, Saccharomyces pastorianus
agaaattttccgcaaagcacgctct

SEQ ID NO: 110246 - DNA, 25 bp, Saccharomyces pastorianus
aatactgttgttaaccatgagattg

SEQ ID NO: 110247 - DNA, 25 bp, Saccharomyces pastorianus
gccatttgtgatatgcccgcatttg

SEQ ID NO: 110248 - DNA, 25 bp, Saccharomyces pastorianus
ttgccatttgtgatatgcccgcatt

SEQ ID NO: 110249 - DNA, 25 bp, Saccharomyces pastorianus
atatgcccgcatttggaccgttgaa

SEQ ID NO: 110250 - DNA, 25 bp, Saccharomyces pastorianus
gcatttggaccgttgaatttaatac

SEQ ID NO: 110251 - DNA, 25 bp, Saccharomyces pastorianus
gtgatatgcccgcatttggaccgtt

SEQ ID NO: 110252 - DNA, 25 bp, Saccharomyces pastorianus
gcccgcatttggaccgttgaattta

SEQ ID NO: 110253 - DNA, 25 bp, Saccharomyces pastorianus
atgtttcttgccatttgtgatatgc

SEQ ID NO: 110254 - DNA, 25 bp, Saccharomyces pastorianus
ttggaccgttgaatttaatactgtt

SEQ ID NO: 110255 - DNA, 25 bp, Saccharomyces pastorianus
ttcttgccatttgtgatatgcccgc

SEQ ID NO: 110256 - DNA, 25 bp, Saccharomyces pastorianus
atgcccgcatttggaccgttgaatt

SEQ ID NO: 110257 - DNA, 25 bp, Saccharomyces pastorianus
ggattacgattcatggccgaacacg

SEQ ID NO: 110258 - DNA, 25 bp, Saccharomyces pastorianus
gtagaactaggtcatcgcagccggc

SEQ ID NO: 110259 - DNA, 25 bp, Saccharomyces pastorianus
gcaccatctgtactgtatgcttgaa

SEQ ID NO: 110260 - DNA, 25 bp, Saccharomyces pastorianus
ggttgttaagcaatccagcgttatt

SEQ ID NO: 110261 - DNA, 25 bp, Saccharomyces pastorianus
ttttcaattggctcagcaccatctg

SEQ ID NO: 110262 - DNA, 25 bp, Saccharomyces pastorianus
acactggtgcacatggtgtcatggc

SEQ ID NO: 110263 - DNA, 25 bp, Saccharomyces pastorianus
cctttgagttcaagcgttacggcga

SEQ ID NO: 110264 - DNA, 25 bp, Saccharomyces pastorianus
tttggcatgggcgttgaaattcctt

SEQ ID NO: 110265 - DNA, 25 bp, Saccharomyces pastorianus
agccggctaacctggatgcgataaa

SEQ ID NO: 110266 - DNA, 25 bp, Saccharomyces pastorianus
gagtttggtggcttgccttttcaat

SEQ ID NO: 110267 - DNA, 25 bp, Saccharomyces pastorianus
atttgctggatatactacctgccct

SEQ ID NO: 110268 - DNA, 25 bp, Saccharomyces pastorianus
attgtcttgacctttgtgaatctag

SEQ ID NO: 110269 - DNA, 25 bp, Saccharomyces pastorianus
aacgtattgcgctggatcatccaca

SEQ ID NO: 110270 - DNA, 25 bp, Saccharomyces pastorianus
gtggactcctcgcataacatacaat

SEQ ID NO: 110271 - DNA, 25 bp, Saccharomyces pastorianus
tcgtgtttgggcacttactcataca

SEQ ID NO: 110272 - DNA, 25 bp, Saccharomyces pastorianus
ctttgccgccctattagtcagtata

SEQ ID NO: 110273 - DNA, 25 bp, Saccharomyces pastorianus
acatacaatcatgttcttcgcctca

SEQ ID NO: 110274 - DNA, 25 bp, Saccharomyces pastorianus
ttcgcctcacggtatccagaatttt

SEQ ID NO: 110275 - DNA, 25 bp, Saccharomyces pastorianus
ttctttgagttctgctacgctatct

SEQ ID NO: 110276 - DNA, 25 bp, Saccharomyces pastorianus
atcatccacataaggccgctaacgt

SEQ ID NO: 110277 - DNA, 25 bp, Saccharomyces pastorianus
atagggctttggtcgtactgtacag

SEQ ID NO: 110278 - DNA, 25 bp, Saccharomyces pastorianus
gggcctgccctcatatataaatata

SEQ ID NO: 110279 - DNA, 25 bp, Saccharomyces pastorianus
ctcggtatttttagcgcttctcgca

SEQ ID NO: 110280 - DNA, 25 bp, Saccharomyces pastorianus
gctcttccatgtctcagtagtcaat

SEQ ID NO: 110281 - DNA, 25 bp, Saccharomyces pastorianus
agtagtcaatgagtgtccagtggtg

SEQ ID NO: 110282 - DNA, 25 bp, Saccharomyces pastorianus
acgcctcgagcgttatttccaaatc

SEQ ID NO: 110283 - DNA, 25 bp, Saccharomyces pastorianus
aatcgggcgtactatcagccaagcc

SEQ ID NO: 110284 - DNA, 25 bp, Saccharomyces pastorianus
aaaaaaggacgcagcacgcctcgag

SEQ ID NO: 110285 - DNA, 25 bp, Saccharomyces pastorianus
tagcgcttctcgcaggaaaattggc

SEQ ID NO: 110286 - DNA, 25 bp, Saccharomyces pastorianus
gttatttccaaatcgggcgtactat

SEQ ID NO: 110287 - DNA, 25 bp, Saccharomyces pastorianus
cagatagccgccgttgaatggtgcg

SEQ ID NO: 110288 - DNA, 25 bp, Saccharomyces pastorianus
gaatgttgctcttccatgtctcagt

SEQ ID NO: 110289 - DNA, 25 bp, Saccharomyces pastorianus
tgaatggtgcgggacaacccggcct

SEQ ID NO: 110290 - DNA, 25 bp, Saccharomyces pastorianus
ggacagagttgtcgctatcttcact

SEQ ID NO: 110291 - DNA, 25 bp, Saccharomyces pastorianus
acaaatggttcatcaggtggccctc

SEQ ID NO: 110292 - DNA, 25 bp, Saccharomyces pastorianus
aattattttgattccttcggctgcg

SEQ ID NO: 110293 - DNA, 25 bp, Saccharomyces pastorianus
ggccctcgcaaagatccaattattt

SEQ ID NO: 110294 - DNA, 25 bp, Saccharomyces pastorianus
caacgctgcaaaggctactatttcc

SEQ ID NO: 110295 - DNA, 25 bp, Saccharomyces pastorianus
gctatcttcactactggtcatacgt

SEQ ID NO: 110296 - DNA, 25 bp, Saccharomyces pastorianus
tgaatcctcgtaacttaccgtcagt

SEQ ID NO: 110297 - DNA, 25 bp, Saccharomyces pastorianus
gcgcacggtcgtatttccaaaacaa

SEQ ID NO: 110298 - DNA, 25 bp, Saccharomyces pastorianus
tactatttccatttcgccggtgatt

SEQ ID NO: 110299 - DNA, 25 bp, Saccharomyces pastorianus
gatctaaattgcctcccggtcataa

SEQ ID NO: 110300 - DNA, 25 bp, Saccharomyces pastorianus
ttcggctgcgtcatcaattttaact

SEQ ID NO: 110301 - DNA, 25 bp, Saccharomyces pastorianus
ggaagcctttttgccagccttgaaa

SEQ ID NO: 110302 - DNA, 25 bp, Saccharomyces pastorianus
aattctggaacactgcactagcgag

SEQ ID NO: 110303 - DNA, 25 bp, Saccharomyces pastorianus
tcacaatcttttgcgatcccttata

SEQ ID NO: 110304 - DNA, 25 bp, Saccharomyces pastorianus
aagggccctagtcaaagctgctgta

SEQ ID NO: 110305 - DNA, 25 bp, Saccharomyces pastorianus
gatcccttatatcgcccaagttttt

SEQ ID NO: 110306 - DNA, 25 bp, Saccharomyces pastorianus
aacggctcatcacttatttttaaca

SEQ ID NO: 110307 - DNA, 25 bp, Saccharomyces pastorianus
gccactgacgtaaaggttgctgcca

SEQ ID NO: 110308 - DNA, 25 bp, Saccharomyces pastorianus
tatccctcaggttatcagcgatggc

SEQ ID NO: 110309 - DNA, 25 bp, Saccharomyces pastorianus
ttcagcacctcatcctgtacaaaat

SEQ ID NO: 110310 - DNA, 25 bp, Saccharomyces pastorianus
ggttgctgccacattaacggctcat

SEQ ID NO: 110311 - DNA, 25 bp, Saccharomyces pastorianus
gggtgtttgcgcaggagtttactca

SEQ ID NO: 110312 - DNA, 25 bp, Saccharomyces pastorianus
aattcctggagagactatgtgggtt

SEQ ID NO: 110313 - DNA, 25 bp, Saccharomyces pastorianus
attttgggatttcgagtggcgtcca

SEQ ID NO: 110314 - DNA, 25 bp, Saccharomyces pastorianus
tacgccaattccagttcagggtgaa

SEQ ID NO: 110315 - DNA, 25 bp, Saccharomyces pastorianus
gaagattcacgtctatgtacgccaa

SEQ ID NO: 110316 - DNA, 25 bp, Saccharomyces pastorianus
tttgcccttaaatgaattgagtgcg

SEQ ID NO: 110317 - DNA, 25 bp, Saccharomyces pastorianus
tcagggctggtgtttgtgaatacaa

SEQ ID NO: 110318 - DNA, 25 bp, Saccharomyces pastorianus
cggtcgggagggaacttgattctat

SEQ ID NO: 110319 - DNA, 25 bp, Saccharomyces pastorianus
gaagaactcaggtaatttgccctta

SEQ ID NO: 110320 - DNA, 25 bp, Saccharomyces pastorianus
tggcgtccaacggaaaagccggtcg

SEQ ID NO: 110321 - DNA, 25 bp, Saccharomyces pastorianus
aaggtacttcttttggctgcaagag

SEQ ID NO: 110322 - DNA, 25 bp, Saccharomyces pastorianus
tgctttagttttttcatccaacgaa

SEQ ID NO: 110323 - DNA, 25 bp, Saccharomyces pastorianus
gttcctttatttgagatccgaaacg

SEQ ID NO: 110324 - DNA, 25 bp, Saccharomyces pastorianus
aatggcatctttatagtacagtgga

SEQ ID NO: 110325 - DNA, 25 bp, Saccharomyces pastorianus
gctatgtctcataggtaccaccttg

SEQ ID NO: 110326 - DNA, 25 bp, Saccharomyces pastorianus
gaaacacaagtgaccgacgatatta

SEQ ID NO: 110327 - DNA, 25 bp, Saccharomyces pastorianus
taggtacactcaactgccatatgga

SEQ ID NO: 110328 - DNA, 25 bp, Saccharomyces pastorianus
gaatacggtatttgagcactcttta

SEQ ID NO: 110329 - DNA, 25 bp, Saccharomyces pastorianus
gagaccaagattgtatagttccttt

SEQ ID NO: 110330 - DNA, 25 bp, Saccharomyces pastorianus
aagttagcagctctttcaaggatgt

SEQ ID NO: 110331 - DNA, 25 bp, Saccharomyces pastorianus
tactgtacaaaatattccgcttgga

SEQ ID NO: 110332 - DNA, 25 bp, Saccharomyces pastorianus
agcgaacaagaacctacctatactg

SEQ ID NO: 110333 - DNA, 25 bp, Saccharomyces pastorianus
ggtaccaccttgataaatctacatt

SEQ ID NO: 110334 - DNA, 25 bp, Saccharomyces pastorianus
tgtcacagattcgacggattctcct

SEQ ID NO: 110335 - DNA, 25 bp, Saccharomyces pastorianus
gagattgcccttttagacttggact

SEQ ID NO: 110336 - DNA, 25 bp, Saccharomyces pastorianus
ggaaaatggcaattctctcaagttt

SEQ ID NO: 110337 - DNA, 25 bp, Saccharomyces pastorianus
gtcaccttccaatcggcactgagat

SEQ ID NO: 110338 - DNA, 25 bp, Saccharomyces pastorianus
aatccattgtaagctcttccatacc

SEQ ID NO: 110339 - DNA, 25 bp, Saccharomyces pastorianus
aacggagcaattgattcgccgctac

SEQ ID NO: 110340 - DNA, 25 bp, Saccharomyces pastorianus
ggaatttctatgctgggtccaccga

SEQ ID NO: 110341 - DNA, 25 bp, Saccharomyces pastorianus
ttacgaacagtttgctcatgagcta

SEQ ID NO: 110342 - DNA, 25 bp, Saccharomyces pastorianus
ggattctcctcctacaagtaatggt

SEQ ID NO: 110343 - DNA, 25 bp, Saccharomyces pastorianus
catacctctcaactccttaggaatt

SEQ ID NO: 110344 - DNA, 25 bp, Saccharomyces pastorianus
aaattcctgctctactcctcaaaag

SEQ ID NO: 110345 - DNA, 25 bp, Saccharomyces pastorianus
gccgcttggccaaagacgtgtctat

SEQ ID NO: 110346 - DNA, 25 bp, Saccharomyces pastorianus
gagtgtatcttttatccctttttca

SEQ ID NO: 110347 - DNA, 25 bp, Saccharomyces pastorianus
tccctttttcactgtactcttttga

SEQ ID NO: 110348 - DNA, 25 bp, Saccharomyces pastorianus
aacaaattttccactcatcttgcgc

SEQ ID NO: 110349 - DNA, 25 bp, Saccharomyces pastorianus
tccagaggcattccaattcacagca

SEQ ID NO: 110350 - DNA, 25 bp, Saccharomyces pastorianus
catgcattgttggtcactttgagtt

SEQ ID NO: 110351 - DNA, 25 bp, Saccharomyces pastorianus
tgcagttcctttttggccgcttggc

SEQ ID NO: 110352 - DNA, 25 bp, Saccharomyces pastorianus
gcaagttggagtcccatgcattgtt

SEQ ID NO: 110353 - DNA, 25 bp, Saccharomyces pastorianus
cttgcgcccttctaagtggagtgta

SEQ ID NO: 110354 - DNA, 25 bp, Saccharomyces pastorianus
gagtttttcatactgcagttccttt

SEQ ID NO: 110355 - DNA, 25 bp, Saccharomyces pastorianus
tttaccattcgtttttagcaagttg

SEQ ID NO: 110356 - DNA, 25 bp, Saccharomyces pastorianus
atccgcggcaaagacatcacctaag

SEQ ID NO: 110357 - DNA, 25 bp, Saccharomyces pastorianus
gttaacaacgccgaagatccgtcta

SEQ ID NO: 110358 - DNA, 25 bp, Saccharomyces pastorianus
cattgggtctaaaacagtctgtcga

SEQ ID NO: 110359 - DNA, 25 bp, Saccharomyces pastorianus
aagacagccattactgccagcagta

SEQ ID NO: 110360 - DNA, 25 bp, Saccharomyces pastorianus
gctcctatcaaaatcgaaaccccag

SEQ ID NO: 110361 - DNA, 25 bp, Saccharomyces pastorianus
tccttcttcaattacggctgctaag

SEQ ID NO: 110362 - DNA, 25 bp, Saccharomyces pastorianus
aagatccgtctagggatacctccgg

SEQ ID NO: 110363 - DNA, 25 bp, Saccharomyces pastorianus
tgagaaaacaaagtcccctgagcag

SEQ ID NO: 110364 - DNA, 25 bp, Saccharomyces pastorianus
tcctcatcttctacaatcaaccatg

SEQ ID NO: 110365 - DNA, 25 bp, Saccharomyces pastorianus
aaaggatcgcacacctaaggtcgaa

SEQ ID NO: 110366 - DNA, 25 bp, Saccharomyces pastorianus
gaagccagagccagtgtctatcgca

SEQ ID NO: 110367 - DNA, 25 bp, Saccharomyces pastorianus
aagatgggtcaagcgcactaccttc

SEQ ID NO: 110368 - DNA, 25 bp, Saccharomyces pastorianus
gaaagtaccactccacaagatgggt

SEQ ID NO: 110369 - DNA, 25 bp, Saccharomyces pastorianus
aatgagtcttctaccgtactaacgc

SEQ ID NO: 110370 - DNA, 25 bp, Saccharomyces pastorianus
aaccaaacttcggagcagcagcaac

SEQ ID NO: 110371 - DNA, 25 bp, Saccharomyces pastorianus
gcgcactaccttctaaaccaattga

SEQ ID NO: 110372 - DNA, 25 bp, Saccharomyces pastorianus
agcagcaactccaaaatacctccaa

SEQ ID NO: 110373 - DNA, 25 bp, Saccharomyces pastorianus
tccctcattcttggttgctagcaaa

SEQ ID NO: 110374 - DNA, 25 bp, Saccharomyces pastorianus
gttgctagcaaatcgccaccaaaga

SEQ ID NO: 110375 - DNA, 25 bp, Saccharomyces pastorianus
agggacgtactttcgaaagcttgtg

SEQ ID NO: 110376 - DNA, 25 bp, Saccharomyces pastorianus
ataaccttcttgactcttctgatga

SEQ ID NO: 110377 - DNA, 25 bp, Saccharomyces pastorianus
tattcaatttaaggctgtccagcgc

SEQ ID NO: 110378 - DNA, 25 bp, Saccharomyces pastorianus
aatgcatctacctcccgttactttt

SEQ ID NO: 110379 - DNA, 25 bp, Saccharomyces pastorianus
ccgaatcagacagtgttttggtcgc

SEQ ID NO: 110380 - DNA, 25 bp, Saccharomyces pastorianus
ttccgaatcagacagtgttttggtc

SEQ ID NO: 110381 - DNA, 25 bp, Saccharomyces pastorianus
ggtaatgcatctacctcccgttact

SEQ ID NO: 110382 - DNA, 25 bp, Saccharomyces pastorianus
taatgcatctacctcccgttacttt

SEQ ID NO: 110383 - DNA, 25 bp, Saccharomyces pastorianus
aaggtaatgcatctacctcccgtta

SEQ ID NO: 110384 - DNA, 25 bp, Saccharomyces pastorianus
aaaggtaatgcatctacctcccgtt

SEQ ID NO: 110385 - DNA, 25 bp, Saccharomyces pastorianus
aggtaatgcatctacctcccgttac

SEQ ID NO: 110386 - DNA, 25 bp, Saccharomyces pastorianus
gtaatgcatctacctcccgttactt

SEQ ID NO: 110387 - DNA, 25 bp, Saccharomyces pastorianus
cgaatcagacagtgttttggtcgca

SEQ ID NO: 110388 - DNA, 25 bp, Saccharomyces pastorianus
atgcatctacctcccgttacttttc

SEQ ID NO: 110389 - DNA, 25 bp, Saccharomyces pastorianus
gacattggttacaagtccctaactt

SEQ ID NO: 110390 - DNA, 25 bp, Saccharomyces pastorianus
agacattggttacaagtccctaact

SEQ ID NO: 110391 - DNA, 25 bp, Saccharomyces pastorianus
tactgaatctcctggtgaatatttc

SEQ ID NO: 110392 - DNA, 25 bp, Saccharomyces pastorianus
gtcaagacattggttacaagtccct

SEQ ID NO: 110393 - DNA, 25 bp, Saccharomyces pastorianus
ctgaatctcctggtgaatatttcta

SEQ ID NO: 110394 - DNA, 25 bp, Saccharomyces pastorianus
gttagctggtactactgaatctcct

SEQ ID NO: 110395 - DNA, 25 bp, Saccharomyces pastorianus
caagacattggttacaagtccctaa

SEQ ID NO: 110396 - DNA, 25 bp, Saccharomyces pastorianus
gttcaggctctatttgtatcactca

SEQ ID NO: 110397 - DNA, 25 bp, Saccharomyces pastorianus
attggtatgggttcaggctctattt

SEQ ID NO: 110398 - DNA, 25 bp, Saccharomyces pastorianus
actgaatctcctggtgaatatttct

SEQ ID NO: 110399 - DNA, 25 bp, Saccharomyces pastorianus
tgaatctcctggtgaatatttctat

SEQ ID NO: 110400 - DNA, 25 bp, Saccharomyces pastorianus
tggtgctctagctcgtgggactgaa

SEQ ID NO: 110401 - DNA, 25 bp, Saccharomyces pastorianus
aaattaccaccatctttatcggagg

SEQ ID NO: 110402 - DNA, 25 bp, Saccharomyces pastorianus
gttgcctgattttatggacgtcttc

SEQ ID NO: 110403 - DNA, 25 bp, Saccharomyces pastorianus
accccatctggtgaaaaggcgtcat

SEQ ID NO: 110404 - DNA, 25 bp, Saccharomyces pastorianus
gagcaggaacttgacccagaatcgg

SEQ ID NO: 110405 - DNA, 25 bp, Saccharomyces pastorianus
gcaactaaggagaccggcaccccat

SEQ ID NO: 110406 - DNA, 25 bp, Saccharomyces pastorianus
ggtgtcttacctcgtggtgctctag

SEQ ID NO: 110407 - DNA, 25 bp, Saccharomyces pastorianus
aaaactatgaatgccggtgtcttac

SEQ ID NO: 110408 - DNA, 25 bp, Saccharomyces pastorianus
gaatcggaacccaaagctgcggagg

SEQ ID NO: 110409 - DNA, 25 bp, Saccharomyces pastorianus
tggtcactaccttttgttggcgaaa

SEQ ID NO: 110410 - DNA, 25 bp, Saccharomyces pastorianus
acatcaggcagtttcacatgtctcc

SEQ ID NO: 110411 - DNA, 25 bp, Saccharomyces pastorianus
agaaatgggacgtcgcggaacctgc

SEQ ID NO: 110412 - DNA, 25 bp, Saccharomyces pastorianus
ttccgcaatttacaaggtcgccctt

SEQ ID NO: 110413 - DNA, 25 bp, Saccharomyces pastorianus
tatgcgaatcagacagcgggtcgac

SEQ ID NO: 110414 - DNA, 25 bp, Saccharomyces pastorianus
gacgcacaactggaatgggcaagca

SEQ ID NO: 110415 - DNA, 25 bp, Saccharomyces pastorianus
gctaccacctatgctgataaaccag

SEQ ID NO: 110416 - DNA, 25 bp, Saccharomyces pastorianus
gttatgcatcgaggacgccgagcac

SEQ ID NO: 110417 - DNA, 25 bp, Saccharomyces pastorianus
aagcagcctcgtcccaaagagacag

SEQ ID NO: 110418 - DNA, 25 bp, Saccharomyces pastorianus
agcgggtcgaccagggttatgcatc

SEQ ID NO: 110419 - DNA, 25 bp, Saccharomyces pastorianus
gcttcactacatccgggtgtcatta

SEQ ID NO: 110420 - DNA, 25 bp, Saccharomyces pastorianus
aggatttccacaaggaccagttgat

SEQ ID NO: 110421 - DNA, 25 bp, Saccharomyces pastorianus
actcgagcgttattgttccgcaatt

SEQ ID NO: 110422 - DNA, 25 bp, Saccharomyces pastorianus
tttccttggaggagagggtagcttc

SEQ ID NO: 110423 - DNA, 25 bp, Saccharomyces pastorianus
tagccttgtgaaaaacgacgggcaa

SEQ ID NO: 110424 - DNA, 25 bp, Saccharomyces pastorianus
ttgttttcccattcaatggtttcct

SEQ ID NO: 110425 - DNA, 25 bp, Saccharomyces pastorianus
gggtcccacacatgtgcgcccttag

SEQ ID NO: 110426 - DNA, 25 bp, Saccharomyces pastorianus
tcgaggtacagcttaccctccgggt

SEQ ID NO: 110427 - DNA, 25 bp, Saccharomyces pastorianus
gaagtcgaggtacagcttaccctcc

SEQ ID NO: 110428 - DNA, 25 bp, Saccharomyces pastorianus
gcaatggccctggttgacggcagaa

SEQ ID NO: 110429 - DNA, 25 bp, Saccharomyces pastorianus
tgcgcccttagccttgtgaaaaacg

SEQ ID NO: 110430 - DNA, 25 bp, Saccharomyces pastorianus
taagcgctcaggaagtcgaggtaca

SEQ ID NO: 110431 - DNA, 25 bp, Saccharomyces pastorianus
ggttgacggcagaataagcgctcag

SEQ ID NO: 110432 - DNA, 25 bp, Saccharomyces pastorianus
tagcttcggacattggtgttgtggt

SEQ ID NO: 110433 - DNA, 25 bp, Saccharomyces pastorianus
tcacggttctactttcggcggtaat

SEQ ID NO: 110434 - DNA, 25 bp, Saccharomyces pastorianus
gatgaaggatcacggcctcttggct

SEQ ID NO: 110435 - DNA, 25 bp, Saccharomyces pastorianus
atgccgtaagcacaacgtcctattg

SEQ ID NO: 110436 - DNA, 25 bp, Saccharomyces pastorianus
agaccgcttgggacttgtgtctatt

SEQ ID NO: 110437 - DNA, 25 bp, Saccharomyces pastorianus
tagaaccggtgagttgctttgctac

SEQ ID NO: 110438 - DNA, 25 bp, Saccharomyces pastorianus
aaaggtctccgcattatgccgtaag

SEQ ID NO: 110439 - DNA, 25 bp, Saccharomyces pastorianus
atcgcccaattgaaagctctccaag

SEQ ID NO: 110440 - DNA, 25 bp, Saccharomyces pastorianus
ggtaaggctctctcaggtggtgttc

SEQ ID NO: 110441 - DNA, 25 bp, Saccharomyces pastorianus
tcatgtgttctgtcttctcacgaca

SEQ ID NO: 110442 - DNA, 25 bp, Saccharomyces pastorianus
atcatgtcttgctttaccccaggat

SEQ ID NO: 110443 - DNA, 25 bp, Saccharomyces pastorianus
gtggtatgggactgcttaccgccat

SEQ ID NO: 110444 - DNA, 25 bp, Saccharomyces pastorianus
actcaatctcgatgagagggtgtac

SEQ ID NO: 110445 - DNA, 25 bp, Saccharomyces pastorianus
agtgactctaatcagcacgccctct

SEQ ID NO: 110446 - DNA, 25 bp, Saccharomyces pastorianus
aacgaagagttgagtgagtccgaaa

SEQ ID NO: 110447 - DNA, 25 bp, Saccharomyces pastorianus
gagaccatataccaattaaacaacg

SEQ ID NO: 110448 - DNA, 25 bp, Saccharomyces pastorianus
tggtgggcacactgcaagcgttcga

SEQ ID NO: 110449 - DNA, 25 bp, Saccharomyces pastorianus
actgcaagcgttcgactcacactgc

SEQ ID NO: 110450 - DNA, 25 bp, Saccharomyces pastorianus
gaaatggtgttcatcagaggagaca

SEQ ID NO: 110451 - DNA, 25 bp, Saccharomyces pastorianus
gagacacctttggatttattgaaac

SEQ ID NO: 110452 - DNA, 25 bp, Saccharomyces pastorianus
ggagacacagtgactctaatcagca

SEQ ID NO: 110453 - DNA, 25 bp, Saccharomyces pastorianus
tgctgagtgatgcagtagagaccat

SEQ ID NO: 110454 - DNA, 25 bp, Saccharomyces pastorianus
caggacgctggtgggcacactgcaa

SEQ ID NO: 110455 - DNA, 25 bp, Saccharomyces pastorianus
tactttggccaacgattacttcttg

SEQ ID NO: 110456 - DNA, 25 bp, Saccharomyces pastorianus
ttgctcgcgaaaaccatctcttgaa

SEQ ID NO: 110457 - DNA, 25 bp, Saccharomyces pastorianus
agcgcttcacgcgaatttttacagg

SEQ ID NO: 110458 - DNA, 25 bp, Saccharomyces pastorianus
gacattaacttcatcgacgggatca

SEQ ID NO: 110459 - DNA, 25 bp, Saccharomyces pastorianus
aagagagctggcctatagcgcttca

SEQ ID NO: 110460 - DNA, 25 bp, Saccharomyces pastorianus
aagaggcttgtgtcgccatcaaaga

SEQ ID NO: 110461 - DNA, 25 bp, Saccharomyces pastorianus
ttggctccacgcatgacgaattcag

SEQ ID NO: 110462 - DNA, 25 bp, Saccharomyces pastorianus
attccagttggccattttcggcata

SEQ ID NO: 110463 - DNA, 25 bp, Saccharomyces pastorianus
gtgagctctctaactctatcagaac

SEQ ID NO: 110464 - DNA, 25 bp, Saccharomyces pastorianus
actacagcggttcaaggactccaac

SEQ ID NO: 110465 - DNA, 25 bp, Saccharomyces pastorianus
gatatccctgatgacgaagtcgcct

SEQ ID NO: 110466 - DNA, 25 bp, Saccharomyces pastorianus
agaagcgggccaacatatgatgaag

SEQ ID NO: 110467 - DNA, 25 bp, Saccharomyces pastorianus
cgggatttacgatagcttatccatt

SEQ ID NO: 110468 - DNA, 25 bp, Saccharomyces pastorianus
tacgaattgggcaagcaagcgtttg

SEQ ID NO: 110469 - DNA, 25 bp, Saccharomyces pastorianus
gaacccgcgattgtataaggatctg

SEQ ID NO: 110470 - DNA, 25 bp, Saccharomyces pastorianus
aacttattagagctgaacccgcgat

SEQ ID NO: 110471 - DNA, 25 bp, Saccharomyces pastorianus
ggcgcaagggataccgctttcaaac

SEQ ID NO: 110472 - DNA, 25 bp, Saccharomyces pastorianus
gattttggcacagcatacgaattgg

SEQ ID NO: 110473 - DNA, 25 bp, Saccharomyces pastorianus
catattgactatgccttggtgaatt

SEQ ID NO: 110474 - DNA, 25 bp, Saccharomyces pastorianus
ggatctgccaactacaaaaagcttg

SEQ ID NO: 110475 - DNA, 25 bp, Saccharomyces pastorianus
tatccattaatagagagggccaaac

SEQ ID NO: 110476 - DNA, 25 bp, Saccharomyces pastorianus
taagtcgcacaatggcgcaagggat

SEQ ID NO: 110477 - DNA, 25 bp, Saccharomyces pastorianus
cttggctgacttacagggttctgaa

SEQ ID NO: 110478 - DNA, 25 bp, Saccharomyces pastorianus
attgaaaacgccaccaaggacattt

SEQ ID NO: 110479 - DNA, 25 bp, Saccharomyces pastorianus
gaagagtgcttcagatgctttgaaa

SEQ ID NO: 110480 - DNA, 25 bp, Saccharomyces pastorianus
cgaagtttgcttggctgacttacag

SEQ ID NO: 110481 - DNA, 25 bp, Saccharomyces pastorianus
gttatttccgaaatcttgactaagg

SEQ ID NO: 110482 - DNA, 25 bp, Saccharomyces pastorianus
tttgcttggctgacttacagggttc

SEQ ID NO: 110483 - DNA, 25 bp, Saccharomyces pastorianus
agtgcttcagatgctttgaaaggta

SEQ ID NO: 110484 - DNA, 25 bp, Saccharomyces pastorianus
cgaagtccaaggtaagaatttattg

SEQ ID NO: 110485 - DNA, 25 bp, Saccharomyces pastorianus
tgaaaacgccaccaaggacattttc

SEQ ID NO: 110486 - DNA, 25 bp, Saccharomyces pastorianus
tccgaaatcttgactaaggaagttc

SEQ ID NO: 110487 - DNA, 25 bp, Saccharomyces pastorianus
gactaaggaagttcaaggatctacc

SEQ ID NO: 110488 - DNA, 25 bp, Saccharomyces pastorianus
aattagttgttgtggtgctcgagga

SEQ ID NO: 110489 - DNA, 25 bp, Saccharomyces pastorianus
gacaacccagggtacaaggcgtcaa

SEQ ID NO: 110490 - DNA, 25 bp, Saccharomyces pastorianus
aacatttttatataccctggcgcaa

SEQ ID NO: 110491 - DNA, 25 bp, Saccharomyces pastorianus
cctgggagcccgcaataactataga

SEQ ID NO: 110492 - DNA, 25 bp, Saccharomyces pastorianus
aatcgtcatacgcttgctctggaga

SEQ ID NO: 110493 - DNA, 25 bp, Saccharomyces pastorianus
gctctggagaccgtcctgattaaga

SEQ ID NO: 110494 - DNA, 25 bp, Saccharomyces pastorianus
aataaattacgccttttcgatggat

SEQ ID NO: 110495 - DNA, 25 bp, Saccharomyces pastorianus
tcgaggagcccagtgcaagcattat

SEQ ID NO: 110496 - DNA, 25 bp, Saccharomyces pastorianus
atggtaccacgctatttctcagaag

SEQ ID NO: 110497 - DNA, 25 bp, Saccharomyces pastorianus
gtgaagctgccgtagaaatttctaa

SEQ ID NO: 110498 - DNA, 25 bp, Saccharomyces pastorianus
gaaaccgaaggcacgaatcgtcata

SEQ ID NO: 110499 - DNA, 25 bp, Saccharomyces pastorianus
gaaatcactcatttgatccgggaat

SEQ ID NO: 110500 - DNA, 25 bp, Saccharomyces pastorianus
ggacgtgaccaacaatataccaagt

SEQ ID NO: 110501 - DNA, 25 bp, Saccharomyces pastorianus
tccgggaatcgtacaaagacctctc

SEQ ID NO: 110502 - DNA, 25 bp, Saccharomyces pastorianus
ttagccgccgaatggcaaatcaaca

SEQ ID NO: 110503 - DNA, 25 bp, Saccharomyces pastorianus
aagacctctccagtcaagatgggat

SEQ ID NO: 110504 - DNA, 25 bp, Saccharomyces pastorianus
aactcatcaaaaagtccggacgtga

SEQ ID NO: 110505 - DNA, 25 bp, Saccharomyces pastorianus
gaaaccttccaaaaccatatcctgg

SEQ ID NO: 110506 - DNA, 25 bp, Saccharomyces pastorianus
gtgatactacggaagtccctaggca

SEQ ID NO: 110507 - DNA, 25 bp, Saccharomyces pastorianus
gaagtccctaggcaatcatctgaga

SEQ ID NO: 110508 - DNA, 25 bp, Saccharomyces pastorianus
gttttgtactgttcctgtaaacatt

SEQ ID NO: 110509 - DNA, 25 bp, Saccharomyces pastorianus
aagtcttgtcaaattagccgccgaa

SEQ ID NO: 110510 - DNA, 25 bp, Saccharomyces pastorianus
tcatattggctacgttggatccttt

SEQ ID NO: 110511 - DNA, 25 bp, Saccharomyces pastorianus
gactctactaatgcttggttcgaaa

SEQ ID NO: 110512 - DNA, 25 bp, Saccharomyces pastorianus
gcaaccgtttgacattcatggagca

SEQ ID NO: 110513 - DNA, 25 bp, Saccharomyces pastorianus
acggatatttaccacctttcaagag

SEQ ID NO: 110514 - DNA, 25 bp, Saccharomyces pastorianus
taatttgtcagatcgcacggctatt

SEQ ID NO: 110515 - DNA, 25 bp, Saccharomyces pastorianus
gagccgcattttatgttgctgcaat

SEQ ID NO: 110516 - DNA, 25 bp, Saccharomyces pastorianus
ttacttctggtaaatggcttcccct

SEQ ID NO: 110517 - DNA, 25 bp, Saccharomyces pastorianus
ggatcctttctccacaattcaaatt

SEQ ID NO: 110518 - DNA, 25 bp, Saccharomyces pastorianus
gccagctggcagaagactctactaa

SEQ ID NO: 110519 - DNA, 25 bp, Saccharomyces pastorianus
tgccactagagtgcgttacttctgg

SEQ ID NO: 110520 - DNA, 25 bp, Saccharomyces pastorianus
agtaatcttctaggcgctgcaatag

SEQ ID NO: 110521 - DNA, 25 bp, Saccharomyces pastorianus
actggcaccttacttcaaaaactgt

SEQ ID NO: 110522 - DNA, 25 bp, Saccharomyces pastorianus
tcttgcaacgtttcacttggcgcaa

SEQ ID NO: 110523 - DNA, 25 bp, Saccharomyces pastorianus
aaaactgttttgacacggcagagga

SEQ ID NO: 110524 - DNA, 25 bp, Saccharomyces pastorianus
gtattggtggataccccactggcac

SEQ ID NO: 110525 - DNA, 25 bp, Saccharomyces pastorianus
ttgcccacgttaagtgttgctactg

SEQ ID NO: 110526 - DNA, 25 bp, Saccharomyces pastorianus
gaagatcacttttaccaattggaaa

SEQ ID NO: 110527 - DNA, 25 bp, Saccharomyces pastorianus
ggcgcaagcccaagatttcgaagga

SEQ ID NO: 110528 - DNA, 25 bp, Saccharomyces pastorianus
gaagaaattccggaacctgctaaag

SEQ ID NO: 110529 - DNA, 25 bp, Saccharomyces pastorianus
gcaacaatttgccatcagcactgtt

SEQ ID NO: 110530 - DNA, 25 bp, Saccharomyces pastorianus
aactatgtagagatgctttcacgca

SEQ ID NO: 110531 - DNA, 25 bp, Saccharomyces pastorianus
aggtaagttgtaccctcttgcaacg

SEQ ID NO: 110532 - DNA, 25 bp, Saccharomyces pastorianus
cgtatgcctacggtaaacaagcttt

SEQ ID NO: 110533 - DNA, 25 bp, Saccharomyces pastorianus
gaaagtcgtcttgatgaattagtcg

SEQ ID NO: 110534 - DNA, 25 bp, Saccharomyces pastorianus
gacgaagctactggaaggcggtatt

SEQ ID NO: 110535 - DNA, 25 bp, Saccharomyces pastorianus
gaaagtgctaaacctgccgagaaaa

SEQ ID NO: 110536 - DNA, 25 bp, Saccharomyces pastorianus
gcgtcacaggaaaaggcccacatgc

SEQ ID NO: 110537 - DNA, 25 bp, Saccharomyces pastorianus
tagaattgtcattcctgctccgtat

SEQ ID NO: 110538 - DNA, 25 bp, Saccharomyces pastorianus
aagttccggtgatgacgatcttgat

SEQ ID NO: 110539 - DNA, 25 bp, Saccharomyces pastorianus
taaacaagctttgcccggtattcct

SEQ ID NO: 110540 - DNA, 25 bp, Saccharomyces pastorianus
tatcattgaagaccgcgtcacagga

SEQ ID NO: 110541 - DNA, 25 bp, Saccharomyces pastorianus
ccggtattcctgctaactctgaatt

SEQ ID NO: 110542 - DNA, 25 bp, Saccharomyces pastorianus
ttgggccaaggcgaagtaattaaag

SEQ ID NO: 110543 - DNA, 25 bp, Saccharomyces pastorianus
gaatcacccaattccatcatggcag

SEQ ID NO: 110544 - DNA, 25 bp, Saccharomyces pastorianus
aatgcaggctctatcagcagtggaa

SEQ ID NO: 110545 - DNA, 25 bp, Saccharomyces pastorianus
ggaagctcattaacgaccccaaata

SEQ ID NO: 110546 - DNA, 25 bp, Saccharomyces pastorianus
attagaaacgtatcccattgttcaa

SEQ ID NO: 110547 - DNA, 25 bp, Saccharomyces pastorianus
attgttcaatcaaaccccgttgcaa

SEQ ID NO: 110548 - DNA, 25 bp, Saccharomyces pastorianus
gaaaacacactacctgcgacacaag

SEQ ID NO: 110549 - DNA, 25 bp, Saccharomyces pastorianus
gaatgctgaacatccggcaaatcaa

SEQ ID NO: 110550 - DNA, 25 bp, Saccharomyces pastorianus
gaagctgtcaatgaacctctgccaa

SEQ ID NO: 110551 - DNA, 25 bp, Saccharomyces pastorianus
ttccagtgtttctacagacatcaag

SEQ ID NO: 110552 - DNA, 25 bp, Saccharomyces pastorianus
gtcacctagggaacaactgaatcat

SEQ ID NO: 110553 - DNA, 25 bp, Saccharomyces pastorianus
gaaacaattccgctagacccaaatc

SEQ ID NO: 110554 - DNA, 25 bp, Saccharomyces pastorianus
gttcgttatggcatggacaacaccc

SEQ ID NO: 110555 - DNA, 25 bp, Saccharomyces pastorianus
cattcgcctaatgcatcggtagaaa

SEQ ID NO: 110556 - DNA, 25 bp, Saccharomyces pastorianus
actctggcagaaacgcattcgccta

SEQ ID NO: 110557 - DNA, 25 bp, Saccharomyces pastorianus
tctgacatcatgttacaccctcatt

SEQ ID NO: 110558 - DNA, 25 bp, Saccharomyces pastorianus
ttccagcaactttgaaggtcctcag

SEQ ID NO: 110559 - DNA, 25 bp, Saccharomyces pastorianus
ttagctcaacggaggctgacacgtt

SEQ ID NO: 110560 - DNA, 25 bp, Saccharomyces pastorianus
ggaacactttcctactaatctatac

SEQ ID NO: 110561 - DNA, 25 bp, Saccharomyces pastorianus
gcatccgcggaatcagcagcttcat

SEQ ID NO: 110562 - DNA, 25 bp, Saccharomyces pastorianus
aaatcggttgattcatttccagcaa

SEQ ID NO: 110563 - DNA, 25 bp, Saccharomyces pastorianus
aggaaattatatcccctcttcgaga

SEQ ID NO: 110564 - DNA, 25 bp, Saccharomyces pastorianus
ggcatatcacatttattcgtcctat

SEQ ID NO: 110565 - DNA, 25 bp, Saccharomyces pastorianus
actcgcttgtcacatgccagttgaa

SEQ ID NO: 110566 - DNA, 25 bp, Saccharomyces pastorianus
ttgtttaacgcttacactgagatta

SEQ ID NO: 110567 - DNA, 25 bp, Saccharomyces pastorianus
tatactgtgtttgagatgccgatat

SEQ ID NO: 110568 - DNA, 25 bp, Saccharomyces pastorianus
ctcctatcgacatccctcaaaaaga

SEQ ID NO: 110569 - DNA, 25 bp, Saccharomyces pastorianus
tgccgatattaacatgcgcccaaga

SEQ ID NO: 110570 - DNA, 25 bp, Saccharomyces pastorianus
taacgttagcatttcgtctctccta

SEQ ID NO: 110571 - DNA, 25 bp, Saccharomyces pastorianus
atccaacttagcaatctttttcgaa

SEQ ID NO: 110572 - DNA, 25 bp, Saccharomyces pastorianus
tcgaatttttgaaggtctttccgca

SEQ ID NO: 110573 - DNA, 25 bp, Saccharomyces pastorianus
gcatttaaggtcctcatttattcaa

SEQ ID NO: 110574 - DNA, 25 bp, Saccharomyces pastorianus
tattacagtcttacaactcgcttgt

SEQ ID NO: 110575 - DNA, 25 bp, Saccharomyces pastorianus
gtatcgatcatattgtctacttcaa

SEQ ID NO: 110576 - DNA, 25 bp, Saccharomyces pastorianus
gcaaaccgaacatcaaaccgtccaa

SEQ ID NO: 110577 - DNA, 25 bp, Saccharomyces pastorianus
gcgaatttcacccactttgtaaaga

SEQ ID NO: 110578 - DNA, 25 bp, Saccharomyces pastorianus
gaagatccctttgtaggtcgaacaa

SEQ ID NO: 110579 - DNA, 25 bp, Saccharomyces pastorianus
gagaattctgacaccaaacggccct

SEQ ID NO: 110580 - DNA, 25 bp, Saccharomyces pastorianus
aacacctcctactgagcatgagaag

SEQ ID NO: 110581 - DNA, 25 bp, Saccharomyces pastorianus
ttttttgatttgaaggccctgcgcg

SEQ ID NO: 110582 - DNA, 25 bp, Saccharomyces pastorianus
atttcacagttatttcgccgcagga

SEQ ID NO: 110583 - DNA, 25 bp, Saccharomyces pastorianus
gaaggttctaaaatcgttgccggag

SEQ ID NO: 110584 - DNA, 25 bp, Saccharomyces pastorianus
aattttactgtcctgggcagaccta

SEQ ID NO: 110585 - DNA, 25 bp, Saccharomyces pastorianus
gagacccacagctaattcgggagga

SEQ ID NO: 110586 - DNA, 25 bp, Saccharomyces pastorianus
aatgatcctgacttaagcgaatttc

SEQ ID NO: 110587 - DNA, 25 bp, Saccharomyces pastorianus
gttgcattgctatttcacgattgga

SEQ ID NO: 110588 - DNA, 25 bp, Saccharomyces pastorianus
cagtcaatccagacgcagatatttt

SEQ ID NO: 110589 - DNA, 25 bp, Saccharomyces pastorianus
aagtgagcgctactatcaatggtat

SEQ ID NO: 110590 - DNA, 25 bp, Saccharomyces pastorianus
accatctgtttcgttgatgcattac

SEQ ID NO: 110591 - DNA, 25 bp, Saccharomyces pastorianus
gtattgctgatattgtgaaccctaa

SEQ ID NO: 110592 - DNA, 25 bp, Saccharomyces pastorianus
ttacatatttgtttcatccgcggaa

SEQ ID NO: 110593 - DNA, 25 bp, Saccharomyces pastorianus
atcagtaacctttcgtaatgtcatg

SEQ ID NO: 110594 - DNA, 25 bp, Saccharomyces pastorianus
ttcatttgttgagtcagagtccaca

SEQ ID NO: 110595 - DNA, 25 bp, Saccharomyces pastorianus
gtggcgacatgctcgtcaaattgta

SEQ ID NO: 110596 - DNA, 25 bp, Saccharomyces pastorianus
taccaaaagacctgttacgcctgat

SEQ ID NO: 110597 - DNA, 25 bp, Saccharomyces pastorianus
taatgtcatgagcaacccaaacgtt

SEQ ID NO: 110598 - DNA, 25 bp, Saccharomyces pastorianus
tctttccccgtctccaataagaaga

SEQ ID NO: 110599 - DNA, 25 bp, Saccharomyces pastorianus
ttgaaaattgatctttccccgtctc

SEQ ID NO: 110600 - DNA, 25 bp, Saccharomyces pastorianus
gaattcattattcacttccagaccc

SEQ ID NO: 110601 - DNA, 25 bp, Saccharomyces pastorianus
gagatcccagggaagaccttcttat

SEQ ID NO: 110602 - DNA, 25 bp, Saccharomyces pastorianus
gatacagccaaatctaggatcctaa

SEQ ID NO: 110603 - DNA, 25 bp, Saccharomyces pastorianus
ggagaaccatgtctaatctagctag

SEQ ID NO: 110604 - DNA, 25 bp, Saccharomyces pastorianus
aatataccagagatgcagccgttac

SEQ ID NO: 110605 - DNA, 25 bp, Saccharomyces pastorianus
gaaaacgatgagattaagcccttga

SEQ ID NO: 110606 - DNA, 25 bp, Saccharomyces pastorianus
ttacaggaaaacatatctcccgcct

SEQ ID NO: 110607 - DNA, 25 bp, Saccharomyces pastorianus
cactccaccctatcgttcaagggaa

SEQ ID NO: 110608 - DNA, 25 bp, Saccharomyces pastorianus
gagaaattcttctacagcggcaaat

SEQ ID NO: 110609 - DNA, 25 bp, Saccharomyces pastorianus
gaatatctttgttaaccttcgtttg

SEQ ID NO: 110610 - DNA, 25 bp, Saccharomyces pastorianus
ctgccatcatctcgtattccaaaaa

SEQ ID NO: 110611 - DNA, 25 bp, Saccharomyces pastorianus
agttttcctatctgtcacctttcta

SEQ ID NO: 110612 - DNA, 25 bp, Saccharomyces pastorianus
tccctgtacggattttagcatatta

SEQ ID NO: 110613 - DNA, 25 bp, Saccharomyces pastorianus
atctgctttcttctgctccttaagg

SEQ ID NO: 110614 - DNA, 25 bp, Saccharomyces pastorianus
aaggcagatcgttttctcacttcat

SEQ ID NO: 110615 - DNA, 25 bp, Saccharomyces pastorianus
ttttacccgtaggacgcatctgctt

SEQ ID NO: 110616 - DNA, 25 bp, Saccharomyces pastorianus
aaaatctttccacagtccctgtacg

SEQ ID NO: 110617 - DNA, 25 bp, Saccharomyces pastorianus
aaaacatctctgattgtctggaata

SEQ ID NO: 110618 - DNA, 25 bp, Saccharomyces pastorianus
gtgttttcctcctgttactacgaat

SEQ ID NO: 110619 - DNA, 25 bp, Saccharomyces pastorianus
tctcacttcatcaagggacccgtat

SEQ ID NO: 110620 - DNA, 25 bp, Saccharomyces pastorianus
aaagccatatccctcactaggtgac

SEQ ID NO: 110621 - DNA, 25 bp, Saccharomyces pastorianus
cttcataccgttcttcaaggctgta

SEQ ID NO: 110622 - DNA, 25 bp, Saccharomyces pastorianus
ataccccatcatatcagcattactg

SEQ ID NO: 110623 - DNA, 25 bp, Saccharomyces pastorianus
tacaccatttactttgcgctatcat

SEQ ID NO: 110624 - DNA, 25 bp, Saccharomyces pastorianus
gggtggattgtccttacaaagccat

SEQ ID NO: 110625 - DNA, 25 bp, Saccharomyces pastorianus
tacacgcaattgttttggcgccaat

SEQ ID NO: 110626 - DNA, 25 bp, Saccharomyces pastorianus
aatctgggtttgtggtggtacttct

SEQ ID NO: 110627 - DNA, 25 bp, Saccharomyces pastorianus
attatctgccattgtttccatacta

SEQ ID NO: 110628 - DNA, 25 bp, Saccharomyces pastorianus
gttgacttgaactgggcgatgctga

SEQ ID NO: 110629 - DNA, 25 bp, Saccharomyces pastorianus
tggcgccaattttctatcatctttg

SEQ ID NO: 110630 - DNA, 25 bp, Saccharomyces pastorianus
ctaggtgacgctggttttttcttca

SEQ ID NO: 110631 - DNA, 25 bp, Saccharomyces pastorianus
gattgcactattacaaactttcggt

SEQ ID NO: 110632 - DNA, 25 bp, Saccharomyces pastorianus
aacaaccggttacgcaactgccttg

SEQ ID NO: 110633 - DNA, 25 bp, Saccharomyces pastorianus
aacgacgctgatgaattcaccaaac

SEQ ID NO: 110634 - DNA, 25 bp, Saccharomyces pastorianus
ggaggcaggcaagtcgattcgttac

SEQ ID NO: 110635 - DNA, 25 bp, Saccharomyces pastorianus
aacaggttaagctcattcttccaaa

SEQ ID NO: 110636 - DNA, 25 bp, Saccharomyces pastorianus
tccaaggccctctaacggtacagta

SEQ ID NO: 110637 - DNA, 25 bp, Saccharomyces pastorianus
aagtcgattcgttacaccatagaga

SEQ ID NO: 110638 - DNA, 25 bp, Saccharomyces pastorianus
gcagaaatagttccaaggccctcta

SEQ ID NO: 110639 - DNA, 25 bp, Saccharomyces pastorianus
agctatttggatttacccaggaaca

SEQ ID NO: 110640 - DNA, 25 bp, Saccharomyces pastorianus
aggaacatctgggaattatctttga

SEQ ID NO: 110641 - DNA, 25 bp, Saccharomyces pastorianus
aattcatcggtgttgctgattacgt

SEQ ID NO: 110642 - DNA, 25 bp, Saccharomyces pastorianus
tactgacgttggttggtggtacgtt

SEQ ID NO: 110643 - DNA, 25 bp, Saccharomyces pastorianus
ttaacggtactgacgttggttggtg

SEQ ID NO: 110644 - DNA, 25 bp, Saccharomyces pastorianus
tataccagagttacagatacattac

SEQ ID NO: 110645 - DNA, 25 bp, Saccharomyces pastorianus
gacccaacaaaaggcacttgaagaa

SEQ ID NO: 110646 - DNA, 25 bp, Saccharomyces pastorianus
cagatacattacatcgtttaacggt

SEQ ID NO: 110647 - DNA, 25 bp, Saccharomyces pastorianus
gcacttgaagaagacaaccaacaac

SEQ ID NO: 110648 - DNA, 25 bp, Saccharomyces pastorianus
gagttacagatacattacatcgttt

SEQ ID NO: 110649 - DNA, 25 bp, Saccharomyces pastorianus
catcgtttaacggtactgacgttgg

SEQ ID NO: 110650 - DNA, 25 bp, Saccharomyces pastorianus
gtgacccaacaaaaggcacttgaag

SEQ ID NO: 110651 - DNA, 25 bp, Saccharomyces pastorianus
gatacattacatcgtttaacggtac

SEQ ID NO: 110652 - DNA, 25 bp, Saccharomyces pastorianus
ttacatcgtttaacggtactgacgt

SEQ ID NO: 110653 - DNA, 25 bp, Saccharomyces pastorianus
tactgacgttggttggtggtacgtt

SEQ ID NO: 110654 - DNA, 25 bp, Saccharomyces pastorianus
gtcgggtggcttagcttacacttta

SEQ ID NO: 110655 - DNA, 25 bp, Saccharomyces pastorianus
ttaacggtactgacgttggttggtg

SEQ ID NO: 110656 - DNA, 25 bp, Saccharomyces pastorianus
tataccagagttacagatacattac

SEQ ID NO: 110657 - DNA, 25 bp, Saccharomyces pastorianus
gcacttgaagaagacaaccaacaac

SEQ ID NO: 110658 - DNA, 25 bp, Saccharomyces pastorianus
gagttacagatacattacatcgttt

SEQ ID NO: 110659 - DNA, 25 bp, Saccharomyces pastorianus
catcgtttaacggtactgacgttgg

SEQ ID NO: 110660 - DNA, 25 bp, Saccharomyces pastorianus
gtacgttatacatgtcgggtggctt

SEQ ID NO: 110661 - DNA, 25 bp, Saccharomyces pastorianus
gtgacccaacaaaaggcacttgaag

SEQ ID NO: 110662 - DNA, 25 bp, Saccharomyces pastorianus
agatacattacatcgtttaacggta

SEQ ID NO: 110663 - DNA, 25 bp, Saccharomyces pastorianus
ttacatcgtttaacggtactgacgt

SEQ ID NO: 110664 - DNA, 25 bp, Saccharomyces pastorianus
gaaggacgacttaatcaacttggcc

SEQ ID NO: 110665 - DNA, 25 bp, Saccharomyces pastorianus
aagattctcagacttactccacaat

SEQ ID NO: 110666 - DNA, 25 bp, Saccharomyces pastorianus
gcctgcttacaagaggtacctacat

SEQ ID NO: 110667 - DNA, 25 bp, Saccharomyces pastorianus
ggcactgttaaggagcctgcttaca

SEQ ID NO: 110668 - DNA, 25 bp, Saccharomyces pastorianus
acgcaatggttgttcggcactgtta

SEQ ID NO: 110669 - DNA, 25 bp, Saccharomyces pastorianus
aaatacctttcagagctggtctcaa

SEQ ID NO: 110670 - DNA, 25 bp, Saccharomyces pastorianus
gcctagactcttggccaaaggacaa

SEQ ID NO: 110671 - DNA, 25 bp, Saccharomyces pastorianus
gatacttttttggttggcctagact

SEQ ID NO: 110672 - DNA, 25 bp, Saccharomyces pastorianus
gaagacctattgcagtacctaaaat

SEQ ID NO: 110673 - DNA, 25 bp, Saccharomyces pastorianus
atcattcggtgttccggttaaacag

SEQ ID NO: 110674 - DNA, 25 bp, Saccharomyces pastorianus
gtactcaatgctgtctactgaacat

SEQ ID NO: 110675 - DNA, 25 bp, Saccharomyces pastorianus
gctatcgtaatcactgacccggtaa

SEQ ID NO: 110676 - DNA, 25 bp, Saccharomyces pastorianus
gtcaaattccctcaagaactctcag

SEQ ID NO: 110677 - DNA, 25 bp, Saccharomyces pastorianus
aagagaatcccaggtacccatttcg

SEQ ID NO: 110678 - DNA, 25 bp, Saccharomyces pastorianus
taaagtggcctgtacgtttttgtgc

SEQ ID NO: 110679 - DNA, 25 bp, Saccharomyces pastorianus
gctggttccgcattttgtcaacgca

SEQ ID NO: 110680 - DNA, 25 bp, Saccharomyces pastorianus
gaatgctttcaataacgccgctgct

SEQ ID NO: 110681 - DNA, 25 bp, Saccharomyces pastorianus
aacgcatcaggccactggttttaca

SEQ ID NO: 110682 - DNA, 25 bp, Saccharomyces pastorianus
ggacgcaaattgttacctgccgtgg

SEQ ID NO: 110683 - DNA, 25 bp, Saccharomyces pastorianus
caaatttggtcagcctgttcgcgaa

SEQ ID NO: 110684 - DNA, 25 bp, Saccharomyces pastorianus
aaaggagcctcccaatttatctgag

SEQ ID NO: 110685 - DNA, 25 bp, Saccharomyces pastorianus
ttgtgccttttatccaacgacacgg

SEQ ID NO: 110686 - DNA, 25 bp, Saccharomyces pastorianus
aactatgttggatctgacgacttac

SEQ ID NO: 110687 - DNA, 25 bp, Saccharomyces pastorianus
ggtttagctgcatctctatattctt

SEQ ID NO: 110688 - DNA, 25 bp, Saccharomyces pastorianus
aatcctcaattgttcccagaagttg

SEQ ID NO: 110689 - DNA, 25 bp, Saccharomyces pastorianus
atgtacaccgcatctgtttatgccg

SEQ ID NO: 110690 - DNA, 25 bp, Saccharomyces pastorianus
tgtttatgccgcctttgcatctcta

SEQ ID NO: 110691 - DNA, 25 bp, Saccharomyces pastorianus
aaggattacgaagctgccatcgaat

SEQ ID NO: 110692 - DNA, 25 bp, Saccharomyces pastorianus
gactacaacgttttccatgttccaa

SEQ ID NO: 110693 - DNA, 25 bp, Saccharomyces pastorianus
aacgatttcagagccaatcctcaat

SEQ ID NO: 110694 - DNA, 25 bp, Saccharomyces pastorianus
acgccgaattagctactcgcgatta

SEQ ID NO: 110695 - DNA, 25 bp, Saccharomyces pastorianus
gttgctaagccattccacaaagaga

SEQ ID NO: 110696 - DNA, 25 bp, Saccharomyces pastorianus
gcaagcgtgttggtttattttctta

SEQ ID NO: 110697 - DNA, 25 bp, Saccharomyces pastorianus
aacttggcccttcaatacgctaaag

SEQ ID NO: 110698 - DNA, 25 bp, Saccharomyces pastorianus
tggtcatcatattgccgtacgcgtt

SEQ ID NO: 110699 - DNA, 25 bp, Saccharomyces pastorianus
ttccaggtccattacgtggtacact

SEQ ID NO: 110700 - DNA, 25 bp, Saccharomyces pastorianus
aaaatacccacatttccaggtccat

SEQ ID NO: 110701 - DNA, 25 bp, Saccharomyces pastorianus
taacgaaagtctccctgctatatgc

SEQ ID NO: 110702 - DNA, 25 bp, Saccharomyces pastorianus
gtggtacactatccatccgacagat

SEQ ID NO: 110703 - DNA, 25 bp, Saccharomyces pastorianus
gtctctaaatattttgccggcttaa

SEQ ID NO: 110704 - DNA, 25 bp, Saccharomyces pastorianus
gaatgaagtcataaccgttcctgaa

SEQ ID NO: 110705 - DNA, 25 bp, Saccharomyces pastorianus
gtacgcgttccaattgacggcaaag

SEQ ID NO: 110706 - DNA, 25 bp, Saccharomyces pastorianus
gtatcacaccagttctgcagatctt

SEQ ID NO: 110707 - DNA, 25 bp, Saccharomyces pastorianus
ctcctccaagcacttaggcattgta

SEQ ID NO: 110708 - DNA, 25 bp, Saccharomyces pastorianus
attagccggtttcatcatcttgacc

SEQ ID NO: 110709 - DNA, 25 bp, Saccharomyces pastorianus
gtgctggttcattacctggttactg

SEQ ID NO: 110710 - DNA, 25 bp, Saccharomyces pastorianus
actgctgtcggtaatctgattttga

SEQ ID NO: 110711 - DNA, 25 bp, Saccharomyces pastorianus
ttgggtatcttcacaaccttgttga

SEQ ID NO: 110712 - DNA, 25 bp, Saccharomyces pastorianus
gatgaaatcgatcctgctaccctaa

SEQ ID NO: 110713 - DNA, 25 bp, Saccharomyces pastorianus
gtgtcatcggtttcgcataccataa

SEQ ID NO: 110714 - DNA, 25 bp, Saccharomyces pastorianus
aacacaaccacctttattgttcctg

SEQ ID NO: 110715 - DNA, 25 bp, Saccharomyces pastorianus
cgctttgggtactctaatcgaccat

SEQ ID NO: 110716 - DNA, 25 bp, Saccharomyces pastorianus
atttctgctgcatctggtaaggtcg

SEQ ID NO: 110717 - DNA, 25 bp, Saccharomyces pastorianus
gttggttacctcacgtcatggaaat

SEQ ID NO: 110718 - DNA, 25 bp, Saccharomyces pastorianus
gtatccgtcttcaccgtcgatataa

SEQ ID NO: 110719 - DNA, 25 bp, Saccharomyces pastorianus
acaccgcccgatgccaatttaatag

SEQ ID NO: 110720 - DNA, 25 bp, Saccharomyces pastorianus
gtaagggccctttcaactcatctag

SEQ ID NO: 110721 - DNA, 25 bp, Saccharomyces pastorianus
atgttgcccggctgaaaaacacccg

SEQ ID NO: 110722 - DNA, 25 bp, Saccharomyces pastorianus
gttggtgctgttataggcgccctat

SEQ ID NO: 110723 - DNA, 25 bp, Saccharomyces pastorianus
aattgattatggttcgccgcagtcc

SEQ ID NO: 110724 - DNA, 25 bp, Saccharomyces pastorianus
tcccgttttgcctgcttattagcta

SEQ ID NO: 110725 - DNA, 25 bp, Saccharomyces pastorianus
cacgtggacgtgttatttccagcac

SEQ ID NO: 110726 - DNA, 25 bp, Saccharomyces pastorianus
gcagcatttgctcgtaagggccctt

SEQ ID NO: 110727 - DNA, 25 bp, Saccharomyces pastorianus
gccgcagtccatcgaaatcagtgag

SEQ ID NO: 110728 - DNA, 25 bp, Saccharomyces pastorianus
aggcgccctatacgtgcagcatttg

SEQ ID NO: 110729 - DNA, 25 bp, Saccharomyces pastorianus
gtgaaaggctttccttatccctctt

SEQ ID NO: 110730 - DNA, 25 bp, Saccharomyces pastorianus
aggagattatgaacgcccttgaaat

SEQ ID NO: 110731 - DNA, 25 bp, Saccharomyces pastorianus
aacaacatctacgtcagcgagttat

SEQ ID NO: 110732 - DNA, 25 bp, Saccharomyces pastorianus
atgtcttgctagacccgaagcgatt

SEQ ID NO: 110733 - DNA, 25 bp, Saccharomyces pastorianus
ctttcttagtgatatgctccagtaa

SEQ ID NO: 110734 - DNA, 25 bp, Saccharomyces pastorianus
aacctgagtgaaacgtcttcggaat

SEQ ID NO: 110735 - DNA, 25 bp, Saccharomyces pastorianus
ttgggtttcccaatctgataggttt

SEQ ID NO: 110736 - DNA, 25 bp, Saccharomyces pastorianus
ggttttcctacttcgatttgggatg

SEQ ID NO: 110737 - DNA, 25 bp, Saccharomyces pastorianus
agcgagttatcgtccaatatggtgt

SEQ ID NO: 110738 - DNA, 25 bp, Saccharomyces pastorianus
taaggaagtattctcccgacgccaa

SEQ ID NO: 110739 - DNA, 25 bp, Saccharomyces pastorianus
atggtcgcagattgtatgctcgcta

SEQ ID NO: 110740 - DNA, 25 bp, Saccharomyces pastorianus
tgctcgctaatacccaatatgtcca

SEQ ID NO: 110741 - DNA, 25 bp, Saccharomyces pastorianus
aaagggccattgcaaccatacgttc

SEQ ID NO: 110742 - DNA, 25 bp, Saccharomyces pastorianus
gtagcgcaccaagaggccgaatatt

SEQ ID NO: 110743 - DNA, 25 bp, Saccharomyces pastorianus
aatgcatttgctgggttgccaccaa

SEQ ID NO: 110744 - DNA, 25 bp, Saccharomyces pastorianus
gtggcttaatgaccttctacttatg

SEQ ID NO: 110745 - DNA, 25 bp, Saccharomyces pastorianus
agagaacattttacaccggtggtgg

SEQ ID NO: 110746 - DNA, 25 bp, Saccharomyces pastorianus
ggcagcaacaacattttcgccattg

SEQ ID NO: 110747 - DNA, 25 bp, Saccharomyces pastorianus
agaccggtaatcacagaccttttca

SEQ ID NO: 110748 - DNA, 25 bp, Saccharomyces pastorianus
tacggtactttgatttgggccacgg

SEQ ID NO: 110749 - DNA, 25 bp, Saccharomyces pastorianus
gtacttgtccatgattctatctgca

SEQ ID NO: 110750 - DNA, 25 bp, Saccharomyces pastorianus
tgccttagcatacctgggatccgaa

SEQ ID NO: 110751 - DNA, 25 bp, Saccharomyces pastorianus
aatacaacgatttaggtgccttagc

SEQ ID NO: 110752 - DNA, 25 bp, Saccharomyces pastorianus
gggccagtgtttccacaaatgccaa

SEQ ID NO: 110753 - DNA, 25 bp, Saccharomyces pastorianus
gattcttttagcatcgccatttcag

SEQ ID NO: 110754 - DNA, 25 bp, Saccharomyces pastorianus
agcaagcccgtaaagaatctcccta

SEQ ID NO: 110755 - DNA, 25 bp, Saccharomyces pastorianus
gaatctccctaattccaacgcgaag

SEQ ID NO: 110756 - DNA, 25 bp, Saccharomyces pastorianus
gttgacgaattctcccacgaaatca

SEQ ID NO: 110757 - DNA, 25 bp, Saccharomyces pastorianus
taaattaccatctccagtgcacgaa

SEQ ID NO: 110758 - DNA, 25 bp, Saccharomyces pastorianus
agtgtggcacctaagttgacgaatt

SEQ ID NO: 110759 - DNA, 25 bp, Saccharomyces pastorianus
aactatcacttcttgcaacctattc

SEQ ID NO: 110760 - DNA, 25 bp, Saccharomyces pastorianus
agaagtgcatcttacctaggtccgt

SEQ ID NO: 110761 - DNA, 25 bp, Saccharomyces pastorianus
ctaggtccgtcgttaccacatataa

SEQ ID NO: 110762 - DNA, 25 bp, Saccharomyces pastorianus
gcggagtgcagctgacatcaacgtt

SEQ ID NO: 110763 - DNA, 25 bp, Saccharomyces pastorianus
gaagctcgagtcagaccgtcattaa

SEQ ID NO: 110764 - DNA, 25 bp, Saccharomyces pastorianus
gctgtggcgagctctgacgtcaaac

SEQ ID NO: 110765 - DNA, 25 bp, Saccharomyces pastorianus
ggatcttccgactcgtcatcagacg

SEQ ID NO: 110766 - DNA, 25 bp, Saccharomyces pastorianus
tgacgtcaaacgtgcgacatcggat

SEQ ID NO: 110767 - DNA, 25 bp, Saccharomyces pastorianus
aagtttcggtggactgggtctcgct

SEQ ID NO: 110768 - DNA, 25 bp, Saccharomyces pastorianus
gagctccctcaactttgtcatataa

SEQ ID NO: 110769 - DNA, 25 bp, Saccharomyces pastorianus
cgtcattaagacaagctcctccaag

SEQ ID NO: 110770 - DNA, 25 bp, Saccharomyces pastorianus
gacgtcgaggtcattatgcactccc

SEQ ID NO: 110771 - DNA, 25 bp, Saccharomyces pastorianus
gtcacagctcaattataggtcgtca

SEQ ID NO: 110772 - DNA, 25 bp, Saccharomyces pastorianus
tttaacaagtcatcgggatcttccg

SEQ ID NO: 110773 - DNA, 25 bp, Saccharomyces pastorianus
gaagccgtaggaatgtcacagctca

SEQ ID NO: 110774 - DNA, 25 bp, Saccharomyces pastorianus
gcatatccatcggactatttagaca

SEQ ID NO: 110775 - DNA, 25 bp, Saccharomyces pastorianus
acgcatcctgacgagtaatatagct

SEQ ID NO: 110776 - DNA, 25 bp, Saccharomyces pastorianus
aaggaagcctaaggcggcctgccaa

SEQ ID NO: 110777 - DNA, 25 bp, Saccharomyces pastorianus
gctgtgctgagcctgaagtataatg

SEQ ID NO: 110778 - DNA, 25 bp, Saccharomyces pastorianus
aaggcggcctgccaaggtgtttctc

SEQ ID NO: 110779 - DNA, 25 bp, Saccharomyces pastorianus
gagcctgaagtataatgcatatcca

SEQ ID NO: 110780 - DNA, 25 bp, Saccharomyces pastorianus
gacaaagcccaaggaagcctaaggc

SEQ ID NO: 110781 - DNA, 25 bp, Saccharomyces pastorianus
tcctgacgagtaatatagctgtgct

SEQ ID NO: 110782 - DNA, 25 bp, Saccharomyces pastorianus
gtataatgcatatccatcggactat

SEQ ID NO: 110783 - DNA, 25 bp, Saccharomyces pastorianus
cggactatttagacaaagcccaagg

SEQ ID NO: 110784 - DNA, 25 bp, Saccharomyces pastorianus
gtaatatagctgtgctgagcctgaa

SEQ ID NO: 110785 - DNA, 25 bp, Saccharomyces pastorianus
aggatctgacgtcatggcccaatac

SEQ ID NO: 110786 - DNA, 25 bp, Saccharomyces pastorianus
tgcacaagtgcaacattcgacattt

SEQ ID NO: 110787 - DNA, 25 bp, Saccharomyces pastorianus
attcgacatttatgtatgcagccaa

SEQ ID NO: 110788 - DNA, 25 bp, Saccharomyces pastorianus
gagaggatcttttccaaggcataga

SEQ ID NO: 110789 - DNA, 25 bp, Saccharomyces pastorianus
ttgggtgcctctgcggaagacaaca

SEQ ID NO: 110790 - DNA, 25 bp, Saccharomyces pastorianus
caatattttgggtgcctctgcggaa

SEQ ID NO: 110791 - DNA, 25 bp, Saccharomyces pastorianus
cggaagacaacacgcatcctgacga

SEQ ID NO: 110792 - DNA, 25 bp, Saccharomyces pastorianus
aacgataccaggatctgacgtcatg

SEQ ID NO: 110793 - DNA, 25 bp, Saccharomyces pastorianus
atgcagccaatattttgggtgcctc

SEQ ID NO: 110794 - DNA, 25 bp, Saccharomyces pastorianus
gaagagaggatcttttccaaggcat

SEQ ID NO: 110795 - DNA, 25 bp, Saccharomyces pastorianus
cgtcatggcccaataccttgcacaa

SEQ ID NO: 110796 - DNA, 25 bp, Saccharomyces pastorianus
aatggcaagcgttacaccggttcac

SEQ ID NO: 110797 - DNA, 25 bp, Saccharomyces pastorianus
gagacatactttcgtactcagttag

SEQ ID NO: 110798 - DNA, 25 bp, Saccharomyces pastorianus
gtaccaaggcatggctgggtcattg

SEQ ID NO: 110799 - DNA, 25 bp, Saccharomyces pastorianus
ggcattatgggctggtggaacttac

SEQ ID NO: 110800 - DNA, 25 bp, Saccharomyces pastorianus
tcctgcttcttccattatctttagt

SEQ ID NO: 110801 - DNA, 25 bp, Saccharomyces pastorianus
tattgccgccttactggtaggattt

SEQ ID NO: 110802 - DNA, 25 bp, Saccharomyces pastorianus
ggatggatctttcatttcctgcttc

SEQ ID NO: 110803 - DNA, 25 bp, Saccharomyces pastorianus
atgtgtctccatcagtgtttttgtt

SEQ ID NO: 110804 - DNA, 25 bp, Saccharomyces pastorianus
gctcttttggcatcttcacgtttta

SEQ ID NO: 110805 - DNA, 25 bp, Saccharomyces pastorianus
gtagcattcaatgtgggctcaataa

SEQ ID NO: 110806 - DNA, 25 bp, Saccharomyces pastorianus
tgtcaattactccatgtccttgtgt

SEQ ID NO: 110807 - DNA, 25 bp, Saccharomyces pastorianus
tgctttgaaaccttaccactcatgg

SEQ ID NO: 110808 - DNA, 25 bp, Saccharomyces pastorianus
gatgtagagctgtgccctggttcag

SEQ ID NO: 110809 - DNA, 25 bp, Saccharomyces pastorianus
aatctcaggaggcactagcattggc

SEQ ID NO: 110810 - DNA, 25 bp, Saccharomyces pastorianus
gagggttcacttagcctatatcaga

SEQ ID NO: 110811 - DNA, 25 bp, Saccharomyces pastorianus
gccctggttcagtcattcaagattt

SEQ ID NO: 110812 - DNA, 25 bp, Saccharomyces pastorianus
gaatatcctacgtggagggttcact

SEQ ID NO: 110813 - DNA, 25 bp, Saccharomyces pastorianus
ggagtttctatcttggcgaaggcca

SEQ ID NO: 110814 - DNA, 25 bp, Saccharomyces pastorianus
gtacagggttggtggtttaccgcat

SEQ ID NO: 110815 - DNA, 25 bp, Saccharomyces pastorianus
ggagaccactacctacatttttggg

SEQ ID NO: 110816 - DNA, 25 bp, Saccharomyces pastorianus
aacggtgtacagtttcctgcattta

SEQ ID NO: 110817 - DNA, 25 bp, Saccharomyces pastorianus
atgttatcgtccctaacgtttggag

SEQ ID NO: 110818 - DNA, 25 bp, Saccharomyces pastorianus
tgtcgagtatgcctgcggagaacct

SEQ ID NO: 110819 - DNA, 25 bp, Saccharomyces pastorianus
caagggacgctgcagacgacacgac

SEQ ID NO: 110820 - DNA, 25 bp, Saccharomyces pastorianus
tatcgatgctactacaagccactct

SEQ ID NO: 110821 - DNA, 25 bp, Saccharomyces pastorianus
agttatcaacacaaacgccgaggat

SEQ ID NO: 110822 - DNA, 25 bp, Saccharomyces pastorianus
aggccatgatcttgagcttctacta

SEQ ID NO: 110823 - DNA, 25 bp, Saccharomyces pastorianus
tcatgcacaatttacctaaggtcca

SEQ ID NO: 110824 - DNA, 25 bp, Saccharomyces pastorianus
gaccacccctaatgcattaaacaac

SEQ ID NO: 110825 - DNA, 25 bp, Saccharomyces pastorianus
aatttctgaaactctctaccttcca

SEQ ID NO: 110826 - DNA, 25 bp, Saccharomyces pastorianus
aatcggaaccgccaacaatgacagc

SEQ ID NO: 110827 - DNA, 25 bp, Saccharomyces pastorianus
ttcgacgcctaatgaaaacgccccg

SEQ ID NO: 110828 - DNA, 25 bp, Saccharomyces pastorianus
gagagtcctcaccagtctcacaaaa

SEQ ID NO: 110829 - DNA, 25 bp, Saccharomyces pastorianus
agcagcatcaaatcagccacggacg

SEQ ID NO: 110830 - DNA, 25 bp, Saccharomyces pastorianus
gtttatcacccacaagatcctgtta

SEQ ID NO: 110831 - DNA, 25 bp, Saccharomyces pastorianus
gaaaccatatcttgatctgtccaca

SEQ ID NO: 110832 - DNA, 25 bp, Saccharomyces pastorianus
atcttcaacgggaaactctggcggc

SEQ ID NO: 110833 - DNA, 25 bp, Saccharomyces pastorianus
acttacagcggcctttcattgtgaa

SEQ ID NO: 110834 - DNA, 25 bp, Saccharomyces pastorianus
agagagtggacgtcgttccgcccaa

SEQ ID NO: 110835 - DNA, 25 bp, Saccharomyces pastorianus
acgccgaccacagcattaatcataa

SEQ ID NO: 110836 - DNA, 25 bp, Saccharomyces pastorianus
ctctggcggccatgtgaattcaaat

SEQ ID NO: 110837 - DNA, 25 bp, Saccharomyces pastorianus
gagtcgcgtcttattagttccaggg

SEQ ID NO: 110838 - DNA, 25 bp, Saccharomyces pastorianus
cgccggcagcacatatcactaagaa

SEQ ID NO: 110839 - DNA, 25 bp, Saccharomyces pastorianus
gaccgacgggtctcagcaagatcag

SEQ ID NO: 110840 - DNA, 25 bp, Saccharomyces pastorianus
cattaaagaaacgttagtgcccaat

SEQ ID NO: 110841 - DNA, 25 bp, Saccharomyces pastorianus
agtttactcagcaaattgtgcatga

SEQ ID NO: 110842 - DNA, 25 bp, Saccharomyces pastorianus
atccaccgctactaagtttactcag

SEQ ID NO: 110843 - DNA, 25 bp, Saccharomyces pastorianus
agtgcccaattttgaaacgtgtttg

SEQ ID NO: 110844 - DNA, 25 bp, Saccharomyces pastorianus
aggaagttccaatcctccttccgcg

SEQ ID NO: 110845 - DNA, 25 bp, Saccharomyces pastorianus
taaccacttgggttctatgaaagtt

SEQ ID NO: 110846 - DNA, 25 bp, Saccharomyces pastorianus
tttagcaatggtgcatccaccgcta

SEQ ID NO: 110847 - DNA, 25 bp, Saccharomyces pastorianus
gaagctcaaccccaacattaaagaa

SEQ ID NO: 110848 - DNA, 25 bp, Saccharomyces pastorianus
gatcatttcactccaaaagagcttt

SEQ ID NO: 110849 - DNA, 25 bp, Saccharomyces pastorianus
gaaaaccatgcgaagctaaacgagc

SEQ ID NO: 110850 - DNA, 25 bp, Saccharomyces pastorianus
ccttccgcgtcatccagtaataata

SEQ ID NO: 110851 - DNA, 25 bp, Saccharomyces pastorianus
gatgcgggaaaaaggccaaactcta

SEQ ID NO: 110852 - DNA, 25 bp, Saccharomyces pastorianus
atatttcaaggatcctcgtgtgaga

SEQ ID NO: 110853 - DNA, 25 bp, Saccharomyces pastorianus
gattgattctgattccaaggacatc

SEQ ID NO: 110854 - DNA, 25 bp, Saccharomyces pastorianus
gggctcgatgattgctaatgactac

SEQ ID NO: 110855 - DNA, 25 bp, Saccharomyces pastorianus
acgactcttaccagtatttggtgga

SEQ ID NO: 110856 - DNA, 25 bp, Saccharomyces pastorianus
ctctacgactcctttgaacttcata

SEQ ID NO: 110857 - DNA, 25 bp, Saccharomyces pastorianus
ccaacagtgggctaaggtcctacct

SEQ ID NO: 110858 - DNA, 25 bp, Saccharomyces pastorianus
tacacagtctccttcggtatcagaa

SEQ ID NO: 110859 - DNA, 25 bp, Saccharomyces pastorianus
tggactttgcttaccaacagtgggc

SEQ ID NO: 110860 - DNA, 25 bp, Saccharomyces pastorianus
aggtcctacctgtaatgggctcgat

SEQ ID NO: 110861 - DNA, 25 bp, Saccharomyces pastorianus
gagaatcccctaatggactttgctt

SEQ ID NO: 110862 - DNA, 25 bp, Saccharomyces pastorianus
catttaatgttgacgaactggacga

SEQ ID NO: 110863 - DNA, 25 bp, Saccharomyces pastorianus
aatgcatgaatttgttgacgagttg

SEQ ID NO: 110864 - DNA, 25 bp, Saccharomyces pastorianus
tacctggtttgataagttcgatgcc

SEQ ID NO: 110865 - DNA, 25 bp, Saccharomyces pastorianus
gttcgatgccgaaatatgtataccg

SEQ ID NO: 110866 - DNA, 25 bp, Saccharomyces pastorianus
atacgaaattagtagcgatggttta

SEQ ID NO: 110867 - DNA, 25 bp, Saccharomyces pastorianus
tacttataggatgctcgtcttacta

SEQ ID NO: 110868 - DNA, 25 bp, Saccharomyces pastorianus
gaactggacgaattaaatacctggt

SEQ ID NO: 110869 - DNA, 25 bp, Saccharomyces pastorianus
tttgttgacgagttggtacttccat

SEQ ID NO: 110870 - DNA, 25 bp, Saccharomyces pastorianus
gacgagttggtacttccatttaatg

SEQ ID NO: 110871 - DNA, 25 bp, Saccharomyces pastorianus
tgccgaaatatgtataccgaacgaa

SEQ ID NO: 110872 - DNA, 25 bp, Saccharomyces pastorianus
gtaatacttataggatgctcgtctt

SEQ ID NO: 110873 - DNA, 25 bp, Saccharomyces pastorianus
gaatttaacggacacgctctatggt

SEQ ID NO: 110874 - DNA, 25 bp, Saccharomyces pastorianus
gctttcatcgagcatccctgaagaa

SEQ ID NO: 110875 - DNA, 25 bp, Saccharomyces pastorianus
acgctctatggtgtcggtattacaa

SEQ ID NO: 110876 - DNA, 25 bp, Saccharomyces pastorianus
ggatgatctggttcaatgcacggct

SEQ ID NO: 110877 - DNA, 25 bp, Saccharomyces pastorianus
aatgcacggcttgctttcatcgagc

SEQ ID NO: 110878 - DNA, 25 bp, Saccharomyces pastorianus
taagtgctgttgttgccatgccatt

SEQ ID NO: 110879 - DNA, 25 bp, Saccharomyces pastorianus
aagactattctctcgtaggtctgtt

SEQ ID NO: 110880 - DNA, 25 bp, Saccharomyces pastorianus
gatgatgtcgccgattacaacatga

SEQ ID NO: 110881 - DNA, 25 bp, Saccharomyces pastorianus
tcccagtcgcaagtgccatttaagt

SEQ ID NO: 110882 - DNA, 25 bp, Saccharomyces pastorianus
agttgttgcccacaatgttgctgga

SEQ ID NO: 110883 - DNA, 25 bp, Saccharomyces pastorianus
taggtctgttgcttctcggctacac

SEQ ID NO: 110884 - DNA, 25 bp, Saccharomyces pastorianus
gatcatcagtaacgccaagggtcag

SEQ ID NO: 110885 - DNA, 25 bp, Saccharomyces pastorianus
aaagaaggactcagcgccactcaaa

SEQ ID NO: 110886 - DNA, 25 bp, Saccharomyces pastorianus
gagcattgtctccttaattcacata

SEQ ID NO: 110887 - DNA, 25 bp, Saccharomyces pastorianus
gactgctggtactgccattaacgag

SEQ ID NO: 110888 - DNA, 25 bp, Saccharomyces pastorianus
caggctctaagatttggttcattca

SEQ ID NO: 110889 - DNA, 25 bp, Saccharomyces pastorianus
atttgatgtgattttcggtcctgcc

SEQ ID NO: 110890 - DNA, 25 bp, Saccharomyces pastorianus
caagggtcaggtagttggctccata

SEQ ID NO: 110891 - DNA, 25 bp, Saccharomyces pastorianus
atacggtatcccagtcttgagcatt

SEQ ID NO: 110892 - DNA, 25 bp, Saccharomyces pastorianus
atcgacgacgtcatgactgctggta

SEQ ID NO: 110893 - DNA, 25 bp, Saccharomyces pastorianus
gtcggctctgccctagaaaacaaga

SEQ ID NO: 110894 - DNA, 25 bp, Saccharomyces pastorianus
ttaacgaggcctttgagatcatcag

SEQ ID NO: 110895 - DNA, 25 bp, Saccharomyces pastorianus
gttgaacgttcggaggctatttcga

SEQ ID NO: 110896 - DNA, 25 bp, Saccharomyces pastorianus
atgggccacccaatgacaaaatctg

SEQ ID NO: 110897 - DNA, 25 bp, Saccharomyces pastorianus
aactatggcagatgctgtccgtgaa

SEQ ID NO: 110898 - DNA, 25 bp, Saccharomyces pastorianus
atggccctgatttcgacaatattga

SEQ ID NO: 110899 - DNA, 25 bp, Saccharomyces pastorianus
gaaactcctaagattacagcggcag

SEQ ID NO: 110900 - DNA, 25 bp, Saccharomyces pastorianus
aatgagattgttccgctgcatagtc

SEQ ID NO: 110901 - DNA, 25 bp, Saccharomyces pastorianus
gattccaagtactctatccatgtta

SEQ ID NO: 110902 - DNA, 25 bp, Saccharomyces pastorianus
ttggcgcagccactaaattcaaagg

SEQ ID NO: 110903 - DNA, 25 bp, Saccharomyces pastorianus
gggagattccatatggccctgattt

SEQ ID NO: 110904 - DNA, 25 bp, Saccharomyces pastorianus
tgcatagtccgttcttgatgggcca

SEQ ID NO: 110905 - DNA, 25 bp, Saccharomyces pastorianus
ttggctgttgaaaatcctttggcta

SEQ ID NO: 110906 - DNA, 25 bp, Saccharomyces pastorianus
taagtcagttcggtatcaaggtttt

SEQ ID NO: 110907 - DNA, 25 bp, Saccharomyces pastorianus
aagttagcagtgtcaagttcgttga

SEQ ID NO: 110908 - DNA, 25 bp, Saccharomyces pastorianus
attggagttcgtcaagggtatcagc

SEQ ID NO: 110909 - DNA, 25 bp, Saccharomyces pastorianus
accaagaattgtttatccagcctaa

SEQ ID NO: 110910 - DNA, 25 bp, Saccharomyces pastorianus
ggtttgttatccattgttctactac

SEQ ID NO: 110911 - DNA, 25 bp, Saccharomyces pastorianus
ggttaagcgctgcattaagcaagtt

SEQ ID NO: 110912 - DNA, 25 bp, Saccharomyces pastorianus
ctccgaattgtgttctattgagcca

SEQ ID NO: 110913 - DNA, 25 bp, Saccharomyces pastorianus
gaattttcgcctagattgcacaaga

SEQ ID NO: 110914 - DNA, 25 bp, Saccharomyces pastorianus
gaaagtccactatctgttgcaatac

SEQ ID NO: 110915 - DNA, 25 bp, Saccharomyces pastorianus
tacctgagacatgcctatttgtttc

SEQ ID NO: 110916 - DNA, 25 bp, Saccharomyces pastorianus
tatagcgttctattggaaagtccac

SEQ ID NO: 110917 - DNA, 25 bp, Saccharomyces pastorianus
gatgcatgcagagccactagacact

SEQ ID NO: 110918 - DNA, 25 bp, Saccharomyces pastorianus
ggatcgtgaacatgctgccggtgaa

SEQ ID NO: 110919 - DNA, 25 bp, Saccharomyces pastorianus
gaagatcccctgcaatagtagcgat

SEQ ID NO: 110920 - DNA, 25 bp, Saccharomyces pastorianus
gttcaaggatagagccgccagcgat

SEQ ID NO: 110921 - DNA, 25 bp, Saccharomyces pastorianus
gcagcatatcgcctcgtggtggttt

SEQ ID NO: 110922 - DNA, 25 bp, Saccharomyces pastorianus
gagccgttatgcgttgtgggaaata

SEQ ID NO: 110923 - DNA, 25 bp, Saccharomyces pastorianus
aagagtgtgcttaagctgccctata

SEQ ID NO: 110924 - DNA, 25 bp, Saccharomyces pastorianus
tgaggatggctcgaccctactaatc

SEQ ID NO: 110925 - DNA, 25 bp, Saccharomyces pastorianus
gacacagatgtattggagccgttat

SEQ ID NO: 110926 - DNA, 25 bp, Saccharomyces pastorianus
aaaccggcctgcgattagaatccca

SEQ ID NO: 110927 - DNA, 25 bp, Saccharomyces pastorianus
agaaaccagcgctgatggcggcttt

SEQ ID NO: 110928 - DNA, 25 bp, Saccharomyces pastorianus
taccgcgctctcgtcagtgtctagt

SEQ ID NO: 110929 - DNA, 25 bp, Saccharomyces pastorianus
attgcgtttctgtgtcgatcgatac

SEQ ID NO: 110930 - DNA, 25 bp, Saccharomyces pastorianus
cagaatccgtctgttgatgagatta

SEQ ID NO: 110931 - DNA, 25 bp, Saccharomyces pastorianus
ggcagcatgttcacgatcccacctg

SEQ ID NO: 110932 - DNA, 25 bp, Saccharomyces pastorianus
gctctatccttgaaccgaattgcgt

SEQ ID NO: 110933 - DNA, 25 bp, Saccharomyces pastorianus
agtgtctagtggctctgcatgcatc

SEQ ID NO: 110934 - DNA, 25 bp, Saccharomyces pastorianus
gggatcttcttcaccggcagcatgt

SEQ ID NO: 110935 - DNA, 25 bp, Saccharomyces pastorianus
gattagtagggtcgagccatcctca

SEQ ID NO: 110936 - DNA, 25 bp, Saccharomyces pastorianus
gatgtatgcgcctctttttactatc

SEQ ID NO: 110937 - DNA, 25 bp, Saccharomyces pastorianus
aatcgactggcgtaggatgtatgcg

SEQ ID NO: 110938 - DNA, 25 bp, Saccharomyces pastorianus
tgcatgcatcgctggcggctctatc

SEQ ID NO: 110939 - DNA, 25 bp, Saccharomyces pastorianus
ggcgccacatgtgcctcaggaaaaa

SEQ ID NO: 110940 - DNA, 25 bp, Saccharomyces pastorianus
gtgcttgtttgtttacaccgtgaaa

SEQ ID NO: 110941 - DNA, 25 bp, Saccharomyces pastorianus
agtaccatcggctccggaggaacgc

SEQ ID NO: 110942 - DNA, 25 bp, Saccharomyces pastorianus
aaagtcgtgcaagatctcaggaaca

SEQ ID NO: 110943 - DNA, 25 bp, Saccharomyces pastorianus
ctcgcgaaccgtacaggatgccaaa

SEQ ID NO: 110944 - DNA, 25 bp, Saccharomyces pastorianus
gaacacagggtccattgagcacaca

SEQ ID NO: 110945 - DNA, 25 bp, Saccharomyces pastorianus
gggcgccaagcaagtaccctcgcga

SEQ ID NO: 110946 - DNA, 25 bp, Saccharomyces pastorianus
tatactgacgatggtgtgcttgttt

SEQ ID NO: 110947 - DNA, 25 bp, Saccharomyces pastorianus
gaggaacgcgttgctcggttaaaca

SEQ ID NO: 110948 - DNA, 25 bp, Saccharomyces pastorianus
tcgtgatgacgatggcgccacatgt

SEQ ID NO: 110949 - DNA, 25 bp, Saccharomyces pastorianus
gagagccgttaatagtgacatggtt

SEQ ID NO: 110950 - DNA, 25 bp, Saccharomyces pastorianus
agaggtattcatgcctacgtttaca

SEQ ID NO: 110951 - DNA, 25 bp, Saccharomyces pastorianus
aaaagccggacacgccattgtttat

SEQ ID NO: 110952 - DNA, 25 bp, Saccharomyces pastorianus
tataattctgcttcggatccactgg

SEQ ID NO: 110953 - DNA, 25 bp, Saccharomyces pastorianus
aagtgggactttccttatcggcagc

SEQ ID NO: 110954 - DNA, 25 bp, Saccharomyces pastorianus
tgatgctacttctacttatgccaaa

SEQ ID NO: 110955 - DNA, 25 bp, Saccharomyces pastorianus
tatcggcagctcaatttcttttcag

SEQ ID NO: 110956 - DNA, 25 bp, Saccharomyces pastorianus
ttacctggctcgtactacaagataa

SEQ ID NO: 110957 - DNA, 25 bp, Saccharomyces pastorianus
attgatttcgcatgtgtctctggtt

SEQ ID NO: 110958 - DNA, 25 bp, Saccharomyces pastorianus
tctcccactgtgtcgatgaaccata

SEQ ID NO: 110959 - DNA, 25 bp, Saccharomyces pastorianus
acgagttccggccaaatcacaaata

SEQ ID NO: 110960 - DNA, 25 bp, Saccharomyces pastorianus
gtctcctgtgcttgaaccattgttc

SEQ ID NO: 110961 - DNA, 25 bp, Saccharomyces pastorianus
aatttggcaaggtttcatggcagga

SEQ ID NO: 110962 - DNA, 25 bp, Saccharomyces pastorianus
gtgcttgcacagatgaaaacagaca

SEQ ID NO: 110963 - DNA, 25 bp, Saccharomyces pastorianus
tttcatggcaggatgtgcttgcaca

SEQ ID NO: 110964 - DNA, 25 bp, Saccharomyces pastorianus
tgaaaattgtccctttaatttggca

SEQ ID NO: 110965 - DNA, 25 bp, Saccharomyces pastorianus
aacggctgaagcactatatcaccat

SEQ ID NO: 110966 - DNA, 25 bp, Saccharomyces pastorianus
aaagcttcataaactcaacggctga

SEQ ID NO: 110967 - DNA, 25 bp, Saccharomyces pastorianus
aacataattggtacagattcactct

SEQ ID NO: 110968 - DNA, 25 bp, Saccharomyces pastorianus
gattcactctatggattgcctaatt

SEQ ID NO: 110969 - DNA, 25 bp, Saccharomyces pastorianus
gagccgggcgataattggtattcta

SEQ ID NO: 110970 - DNA, 25 bp, Saccharomyces pastorianus
atattactattttcagactgtgtta

SEQ ID NO: 110971 - DNA, 25 bp, Saccharomyces pastorianus
ttagctgaaagtggagtgggctcct

SEQ ID NO: 110972 - DNA, 25 bp, Saccharomyces pastorianus
gcagccactacaagctactgtgcag

SEQ ID NO: 110973 - DNA, 25 bp, Saccharomyces pastorianus
taacgcattccatacagcccagaat

SEQ ID NO: 110974 - DNA, 25 bp, Saccharomyces pastorianus
tgccctccgtaaagacccgataaag

SEQ ID NO: 110975 - DNA, 25 bp, Saccharomyces pastorianus
tcagcgcaataagctccgattggaa

SEQ ID NO: 110976 - DNA, 25 bp, Saccharomyces pastorianus
gaagatttcaagtttgccctccgta

SEQ ID NO: 110977 - DNA, 25 bp, Saccharomyces pastorianus
aagcagcgggccgtaatagcgctaa

SEQ ID NO: 110978 - DNA, 25 bp, Saccharomyces pastorianus
ttacggcgatgtgccgcagccacta

SEQ ID NO: 110979 - DNA, 25 bp, Saccharomyces pastorianus
taagttccttgctttacgcttacgg

SEQ ID NO: 110980 - DNA, 25 bp, Saccharomyces pastorianus
gctactgtgcagtgtttggatgaat

SEQ ID NO: 110981 - DNA, 25 bp, Saccharomyces pastorianus
tacagcccagaattctcagcgcaat

SEQ ID NO: 110982 - DNA, 25 bp, Saccharomyces pastorianus
gtggatgtttgtactaacgcattcc

SEQ ID NO: 110983 - DNA, 25 bp, Saccharomyces pastorianus
ggcactttactgaaacccttagacg

SEQ ID NO: 110984 - DNA, 25 bp, Saccharomyces pastorianus
tcaggctgctcttaacttcattatg

SEQ ID NO: 110985 - DNA, 25 bp, Saccharomyces pastorianus
ggcgctgacagctttatacctgtgc

SEQ ID NO: 110986 - DNA, 25 bp, Saccharomyces pastorianus
gagattccggatgagttacagccaa

SEQ ID NO: 110987 - DNA, 25 bp, Saccharomyces pastorianus
aatgaactgttttctccaattggag

SEQ ID NO: 110988 - DNA, 25 bp, Saccharomyces pastorianus
gactgaacgttctttaactatcgaa

SEQ ID NO: 110989 - DNA, 25 bp, Saccharomyces pastorianus
gattcagatcaccagacttcattcg

SEQ ID NO: 110990 - DNA, 25 bp, Saccharomyces pastorianus
taaaaaatcgcgtattgggccctgt

SEQ ID NO: 110991 - DNA, 25 bp, Saccharomyces pastorianus
ggacacgttgaacacattacagaat

SEQ ID NO: 110992 - DNA, 25 bp, Saccharomyces pastorianus
tattacttgagcagtcttcaggctg

SEQ ID NO: 110993 - DNA, 25 bp, Saccharomyces pastorianus
tatgtttccagatatggacccaagc

SEQ ID NO: 110994 - DNA, 25 bp, Saccharomyces pastorianus
taatccttcgaaaagttgcctcgca

SEQ ID NO: 110995 - DNA, 25 bp, Saccharomyces pastorianus
aaaccaccccatgaacttgtggagg

SEQ ID NO: 110996 - DNA, 25 bp, Saccharomyces pastorianus
agttgcctcgcagtatttgaagttg

SEQ ID NO: 110997 - DNA, 25 bp, Saccharomyces pastorianus
aaagggccattcaattcggtgctaa

SEQ ID NO: 110998 - DNA, 25 bp, Saccharomyces pastorianus
gaagttgacgttccttatgatgagt

SEQ ID NO: 110999 - DNA, 25 bp, Saccharomyces pastorianus
cagcgccatgggatagtgttattca

SEQ ID NO: 111000 - DNA, 25 bp, Saccharomyces pastorianus
gaaagaacgccatatcagcgccatg

SEQ ID NO: 111001 - DNA, 25 bp, Saccharomyces pastorianus
ggacttgtctatagccattgctttt

SEQ ID NO: 111002 - DNA, 25 bp, Saccharomyces pastorianus
gagcagacgaactctacggtggata

SEQ ID NO: 111003 - DNA, 25 bp, Saccharomyces pastorianus
gaggtttcttaacttctctgaatgg

SEQ ID NO: 111004 - DNA, 25 bp, Saccharomyces pastorianus
tatgatcgcaacctgaatcgtgatg

SEQ ID NO: 111005 - DNA, 25 bp, Saccharomyces pastorianus
gtgtactgttcttaactttgactta

SEQ ID NO: 111006 - DNA, 25 bp, Saccharomyces pastorianus
gatactaccggatctcaatcgttag

SEQ ID NO: 111007 - DNA, 25 bp, Saccharomyces pastorianus
ggaaccgcaaacatcaagacgcata

SEQ ID NO: 111008 - DNA, 25 bp, Saccharomyces pastorianus
gatgcatcaaaactccagcagcagg

SEQ ID NO: 111009 - DNA, 25 bp, Saccharomyces pastorianus
atactgatcctacttcatttgaaag

SEQ ID NO: 111010 - DNA, 25 bp, Saccharomyces pastorianus
tatctctaggagaatgcagccctta

SEQ ID NO: 111011 - DNA, 25 bp, Saccharomyces pastorianus
aacgccttcaatcagcaaaaaccgg

SEQ ID NO: 111012 - DNA, 25 bp, Saccharomyces pastorianus
aacggatttactctacttttagcat

SEQ ID NO: 111013 - DNA, 25 bp, Saccharomyces pastorianus
gcagcccttatctagaaacgaaaat

SEQ ID NO: 111014 - DNA, 25 bp, Saccharomyces pastorianus
agagacccttcaggagtactcgacc

SEQ ID NO: 111015 - DNA, 25 bp, Saccharomyces pastorianus
gaatggaccgactcaaaggctacag

SEQ ID NO: 111016 - DNA, 25 bp, Saccharomyces pastorianus
cttcatttcctgcttgggagactgt

SEQ ID NO: 111017 - DNA, 25 bp, Saccharomyces pastorianus
aacttgcccttagccatggttaatg

SEQ ID NO: 111018 - DNA, 25 bp, Saccharomyces pastorianus
cagctgctcgggatttagtttagtt

SEQ ID NO: 111019 - DNA, 25 bp, Saccharomyces pastorianus
gtgtctgtacggtggcaacaacgaa

SEQ ID NO: 111020 - DNA, 25 bp, Saccharomyces pastorianus
ggcttgatttttacagtgctctttc

SEQ ID NO: 111021 - DNA, 25 bp, Saccharomyces pastorianus
tattgtctacaatcttacctgggat

SEQ ID NO: 111022 - DNA, 25 bp, Saccharomyces pastorianus
ggtgctattcatttacatacttttt

SEQ ID NO: 111023 - DNA, 25 bp, Saccharomyces pastorianus
atacattctgtgaacttgcccttag

SEQ ID NO: 111024 - DNA, 25 bp, Saccharomyces pastorianus
ttcttggtcgaattgctgttttaca

SEQ ID NO: 111025 - DNA, 25 bp, Saccharomyces pastorianus
tggaaccagtagtttttgcccttca

SEQ ID NO: 111026 - DNA, 25 bp, Saccharomyces pastorianus
tttacagcattcagctgctcgggat

SEQ ID NO: 111027 - DNA, 25 bp, Saccharomyces pastorianus
gttgataccactttacctggttggg

SEQ ID NO: 111028 - DNA, 25 bp, Saccharomyces pastorianus
ataccaatcttcagcggtaccattc

SEQ ID NO: 111029 - DNA, 25 bp, Saccharomyces pastorianus
tgaagatctcttgttgacggcggat

SEQ ID NO: 111030 - DNA, 25 bp, Saccharomyces pastorianus
gacggcggatgattctacacggcta

SEQ ID NO: 111031 - DNA, 25 bp, Saccharomyces pastorianus
gatctttacgtatgccgataggtca

SEQ ID NO: 111032 - DNA, 25 bp, Saccharomyces pastorianus
tcatgttcaagcagcaagacgtcat

SEQ ID NO: 111033 - DNA, 25 bp, Saccharomyces pastorianus
gagaatcatgactaagccaggccaa

SEQ ID NO: 111034 - DNA, 25 bp, Saccharomyces pastorianus
gacgtcattgcggaagcctttgctg

SEQ ID NO: 111035 - DNA, 25 bp, Saccharomyces pastorianus
cgatccatatggtggttctgatgac

SEQ ID NO: 111036 - DNA, 25 bp, Saccharomyces pastorianus
ggcgacgacgtggtagcagaatttc

SEQ ID NO: 111037 - DNA, 25 bp, Saccharomyces pastorianus
gaatgggccggtgcaggttctaaac

SEQ ID NO: 111038 - DNA, 25 bp, Saccharomyces pastorianus
gaagaaagcttcatcactagtggaa

SEQ ID NO: 111039 - DNA, 25 bp, Saccharomyces pastorianus
gaccttggtttcagtcgagtctttt

SEQ ID NO: 111040 - DNA, 25 bp, Saccharomyces pastorianus
gatcacctcatgaacttcaacgtcg

SEQ ID NO: 111041 - DNA, 25 bp, Saccharomyces pastorianus
tttaaatcctttcactccttcaatg

SEQ ID NO: 111042 - DNA, 25 bp, Saccharomyces pastorianus
gaactactgcagattcaaagcttat

SEQ ID NO: 111043 - DNA, 25 bp, Saccharomyces pastorianus
tcaacgtcggtggaatggcagcaaa

SEQ ID NO: 111044 - DNA, 25 bp, Saccharomyces pastorianus
taaacgaacacgcttcctcgttagt

SEQ ID NO: 111045 - DNA, 25 bp, Saccharomyces pastorianus
tcctcgttagtccttcagaatgggt

SEQ ID NO: 111046 - DNA, 25 bp, Saccharomyces pastorianus
agactattgtctcccagcattgaaa

SEQ ID NO: 111047 - DNA, 25 bp, Saccharomyces pastorianus
gacgtacaacttaattgcccattca

SEQ ID NO: 111048 - DNA, 25 bp, Saccharomyces pastorianus
gaatgggttgatctattcactccaa

SEQ ID NO: 111049 - DNA, 25 bp, Saccharomyces pastorianus
tcttttctgtttgttgtagtctcta

SEQ ID NO: 111050 - DNA, 25 bp, Saccharomyces pastorianus
aaatgcacttatctttttatgcaaa

SEQ ID NO: 111051 - DNA, 25 bp, Saccharomyces pastorianus
acaatcctgttgtcttggtttatta

SEQ ID NO: 111052 - DNA, 25 bp, Saccharomyces pastorianus
tgtcttggttctttgggtgcgatat

SEQ ID NO: 111053 - DNA, 25 bp, Saccharomyces pastorianus
acgcacagcaaattttcttctgctt

SEQ ID NO: 111054 - DNA, 25 bp, Saccharomyces pastorianus
gatattagggaaacaacgcacagca

SEQ ID NO: 111055 - DNA, 25 bp, Saccharomyces pastorianus
ttcacggatcaattttataaagcat

SEQ ID NO: 111056 - DNA, 25 bp, Saccharomyces pastorianus
gtcagagttgaagctatagctcctt

SEQ ID NO: 111057 - DNA, 25 bp, Saccharomyces pastorianus
tttcttctgctttcttataacgtta

SEQ ID NO: 111058 - DNA, 25 bp, Saccharomyces pastorianus
atagctccttttatgatgtgtcttg

SEQ ID NO: 111059 - DNA, 25 bp, Saccharomyces pastorianus
aagctgggcgagttatttgtttcta

SEQ ID NO: 111060 - DNA, 25 bp, Saccharomyces pastorianus
agctgtatatttgactcttttagta

SEQ ID NO: 111061 - DNA, 25 bp, Saccharomyces pastorianus
tggattaagttgtctctcgttcgtc

SEQ ID NO: 111062 - DNA, 25 bp, Saccharomyces pastorianus
atttgtagagcttttcctggcatac

SEQ ID NO: 111063 - DNA, 25 bp, Saccharomyces pastorianus
agtttccctcgaatcatacacacgt

SEQ ID NO: 111064 - DNA, 25 bp, Saccharomyces pastorianus
aagactttatttccgctcgagtccg

SEQ ID NO: 111065 - DNA, 25 bp, Saccharomyces pastorianus
gaattcctccggctaaccaatgaaa

SEQ ID NO: 111066 - DNA, 25 bp, Saccharomyces pastorianus
gagactcggtgtgccttacaattcc

SEQ ID NO: 111067 - DNA, 25 bp, Saccharomyces pastorianus
aaactgtcagtttccctcgaatcat

SEQ ID NO: 111068 - DNA, 25 bp, Saccharomyces pastorianus
ccgcacgcttggcaaagctgtatat

SEQ ID NO: 111069 - DNA, 25 bp, Saccharomyces pastorianus
tcgtccatactacacttttctcttt

SEQ ID NO: 111070 - DNA, 25 bp, Saccharomyces pastorianus
gctcgagtccgcttttaaccgccga

SEQ ID NO: 111071 - DNA, 25 bp, Saccharomyces pastorianus
tagaatcacaggaggcgcaagcacg

SEQ ID NO: 111072 - DNA, 25 bp, Saccharomyces pastorianus
gggcgctggaggaatctcaactgat

SEQ ID NO: 111073 - DNA, 25 bp, Saccharomyces pastorianus
ctacaggtcgacgaaatgggccctt

SEQ ID NO: 111074 - DNA, 25 bp, Saccharomyces pastorianus
gaagagtttctcagagccatcagac

SEQ ID NO: 111075 - DNA, 25 bp, Saccharomyces pastorianus
gaatagctctgcgaatcatggtaat

SEQ ID NO: 111076 - DNA, 25 bp, Saccharomyces pastorianus
tgatcgatgcgtatggtggagacct

SEQ ID NO: 111077 - DNA, 25 bp, Saccharomyces pastorianus
ggtgcagcagagtcatccgaacgaa

SEQ ID NO: 111078 - DNA, 25 bp, Saccharomyces pastorianus
gaaactttgaacacggagctgcaat

SEQ ID NO: 111079 - DNA, 25 bp, Saccharomyces pastorianus
aatgggcccttgagcgacgataatt

SEQ ID NO: 111080 - DNA, 25 bp, Saccharomyces pastorianus
gagaccttgaactttcaggcgacac

SEQ ID NO: 111081 - DNA, 25 bp, Saccharomyces pastorianus
cactatcggtagttctgttggcgtt

SEQ ID NO: 111082 - DNA, 25 bp, Saccharomyces pastorianus
ctctccagaagacctaacacacatt

SEQ ID NO: 111083 - DNA, 25 bp, Saccharomyces pastorianus
gtgctgcaagaaatcataccctctc

SEQ ID NO: 111084 - DNA, 25 bp, Saccharomyces pastorianus
acatggtgtcgtttctaagtatttt

SEQ ID NO: 111085 - DNA, 25 bp, Saccharomyces pastorianus
ccatgggataccacctggcagtaag

SEQ ID NO: 111086 - DNA, 25 bp, Saccharomyces pastorianus
ataacccctgtattgcaagtgctgc

SEQ ID NO: 111087 - DNA, 25 bp, Saccharomyces pastorianus
aagatacctgcctaaacaagcggag

SEQ ID NO: 111088 - DNA, 25 bp, Saccharomyces pastorianus
tatgatcaggacaccgcaacagagt

SEQ ID NO: 111089 - DNA, 25 bp, Saccharomyces pastorianus
cggtgatgttgggtacgtaactcta

SEQ ID NO: 111090 - DNA, 25 bp, Saccharomyces pastorianus
ctaatacggagggtcacttggaatt

SEQ ID NO: 111091 - DNA, 25 bp, Saccharomyces pastorianus
agcggaggaccatcgtttattgatt

SEQ ID NO: 111092 - DNA, 25 bp, Saccharomyces pastorianus
atggctaaggagtacccgcatttta

SEQ ID NO: 111093 - DNA, 25 bp, Saccharomyces pastorianus
accttctgaacccttggatactagc

SEQ ID NO: 111094 - DNA, 25 bp, Saccharomyces pastorianus
aatactacattaccttctgaaccct

SEQ ID NO: 111095 - DNA, 25 bp, Saccharomyces pastorianus
tggatcattctattgcgcaggctgc

SEQ ID NO: 111096 - DNA, 25 bp, Saccharomyces pastorianus
gataacacaccatcccattgcagat

SEQ ID NO: 111097 - DNA, 25 bp, Saccharomyces pastorianus
ccggtcccgtttatggcaatgtgtg

SEQ ID NO: 111098 - DNA, 25 bp, Saccharomyces pastorianus
cattgcagatttgctccgttggaaa

SEQ ID NO: 111099 - DNA, 25 bp, Saccharomyces pastorianus
gtgcctatggaagtccgttgctcaa

SEQ ID NO: 111100 - DNA, 25 bp, Saccharomyces pastorianus
aggccgtttggctgtaatactccaa

SEQ ID NO: 111101 - DNA, 25 bp, Saccharomyces pastorianus
agaattttatgtccacgtgcctatg

SEQ ID NO: 111102 - DNA, 25 bp, Saccharomyces pastorianus
ggaagtcttacgttcattggatcat

SEQ ID NO: 111103 - DNA, 25 bp, Saccharomyces pastorianus
atgtgtgccgcccattcctggataa

SEQ ID NO: 111104 - DNA, 25 bp, Saccharomyces pastorianus
aatactttctattgcagaatctgaa

SEQ ID NO: 111105 - DNA, 25 bp, Saccharomyces pastorianus
actatcgtctggcatatatatatat

SEQ ID NO: 111106 - DNA, 25 bp, Saccharomyces pastorianus
taacccggccggaaactacagtgat

SEQ ID NO: 111107 - DNA, 25 bp, Saccharomyces pastorianus
tattaatagtttccgatcgtcttat

SEQ ID NO: 111108 - DNA, 25 bp, Saccharomyces pastorianus
ctcgaggcgttttcgcgtggcataa

SEQ ID NO: 111109 - DNA, 25 bp, Saccharomyces pastorianus
tttcgcgtggcataacccggccgga

SEQ ID NO: 111110 - DNA, 25 bp, Saccharomyces pastorianus
cagtgatactatcgtctggcatata

SEQ ID NO: 111111 - DNA, 25 bp, Saccharomyces pastorianus
cgtcttattactcacttactatcaa

SEQ ID NO: 111112 - DNA, 25 bp, Saccharomyces pastorianus
ttagtttttcccttggctcgaggcg

SEQ ID NO: 111113 - DNA, 25 bp, Saccharomyces pastorianus
gaaagcactatttcattacttaaaa

SEQ ID NO: 111114 - DNA, 25 bp, Saccharomyces pastorianus
tttccgatcgtcttattactcactt

SEQ ID NO: 111115 - DNA, 25 bp, Saccharomyces pastorianus
gggactttattttcaagcatccaaa

SEQ ID NO: 111116 - DNA, 25 bp, Saccharomyces pastorianus
ctatgtaccctgtcgtttgagcagt

SEQ ID NO: 111117 - DNA, 25 bp, Saccharomyces pastorianus
gaatgccagcgccacattgaagaaa

SEQ ID NO: 111118 - DNA, 25 bp, Saccharomyces pastorianus
cttccttacccactgcattaataaa

SEQ ID NO: 111119 - DNA, 25 bp, Saccharomyces pastorianus
aggagacatttcaagcgctcacacc

SEQ ID NO: 111120 - DNA, 25 bp, Saccharomyces pastorianus
tgagtctatcaatggcgggcactgc

SEQ ID NO: 111121 - DNA, 25 bp, Saccharomyces pastorianus
tactgaccttcaaccactgtacgaa

SEQ ID NO: 111122 - DNA, 25 bp, Saccharomyces pastorianus
gtgtcagaccctaccgatttgaaat

SEQ ID NO: 111123 - DNA, 25 bp, Saccharomyces pastorianus
gagagacgccttagaagcccttgat

SEQ ID NO: 111124 - DNA, 25 bp, Saccharomyces pastorianus
aatcctccttcgagttcctatgtac

SEQ ID NO: 111125 - DNA, 25 bp, Saccharomyces pastorianus
ataaatgccaccagaccgtgtcaga

SEQ ID NO: 111126 - DNA, 25 bp, Saccharomyces pastorianus
tgggcacaaatttcacactcgcatt

SEQ ID NO: 111127 - DNA, 25 bp, Saccharomyces pastorianus
gctgcggccttttatgacaatctaa

SEQ ID NO: 111128 - DNA, 25 bp, Saccharomyces pastorianus
gactctaacgtcattggtggctcta

SEQ ID NO: 111129 - DNA, 25 bp, Saccharomyces pastorianus
tgacgaagatcatgctgcggccttt

SEQ ID NO: 111130 - DNA, 25 bp, Saccharomyces pastorianus
gatacggcgggctcttttcactaac

SEQ ID NO: 111131 - DNA, 25 bp, Saccharomyces pastorianus
gtaggcctcgaaagtcagtcaatat

SEQ ID NO: 111132 - DNA, 25 bp, Saccharomyces pastorianus
ttctcagaatcagcgtaggcctcga

SEQ ID NO: 111133 - DNA, 25 bp, Saccharomyces pastorianus
tgaacaagggtccttccttgggcac

SEQ ID NO: 111134 - DNA, 25 bp, Saccharomyces pastorianus
gtttgcctcccgttttatgcaatta

SEQ ID NO: 111135 - DNA, 25 bp, Saccharomyces pastorianus
tacagcaccgaatacctcttagata

SEQ ID NO: 111136 - DNA, 25 bp, Saccharomyces pastorianus
atacgctcatgacatactaccacga

SEQ ID NO: 111137 - DNA, 25 bp, Saccharomyces pastorianus
gtaaagctgccgacctttcttctaa

SEQ ID NO: 111138 - DNA, 25 bp, Saccharomyces pastorianus
tgaaaagattccctacccctatcct

SEQ ID NO: 111139 - DNA, 25 bp, Saccharomyces pastorianus
agtatactggcctttctttgtggct

SEQ ID NO: 111140 - DNA, 25 bp, Saccharomyces pastorianus
tatgagtaaagctgccgacctttct

SEQ ID NO: 111141 - DNA, 25 bp, Saccharomyces pastorianus
tgatccaagaaatcccagattcgca

SEQ ID NO: 111142 - DNA, 25 bp, Saccharomyces pastorianus
atactggcctttctttgtggctggc

SEQ ID NO: 111143 - DNA, 25 bp, Saccharomyces pastorianus
ctggcgccgcagtgtattatggtat

SEQ ID NO: 111144 - DNA, 25 bp, Saccharomyces pastorianus
tacccctatccttaaagtatactgg

SEQ ID NO: 111145 - DNA, 25 bp, Saccharomyces pastorianus
tgccgacctttcttctaacacgaag

SEQ ID NO: 111146 - DNA, 25 bp, Saccharomyces pastorianus
tttctttgtggctggcgccgcagtg

SEQ ID NO: 111147 - DNA, 25 bp, Saccharomyces pastorianus
gccgcagtgtattatggtatgagta

SEQ ID NO: 111148 - DNA, 25 bp, Saccharomyces pastorianus
ctttctggattgatactgtctctgt

SEQ ID NO: 111149 - DNA, 25 bp, Saccharomyces pastorianus
tctgttgtttgctcatgccttacaa

SEQ ID NO: 111150 - DNA, 25 bp, Saccharomyces pastorianus
attcttggcgatacaccagtctggc

SEQ ID NO: 111151 - DNA, 25 bp, Saccharomyces pastorianus
agtctggcccgtatctctgttgttt

SEQ ID NO: 111152 - DNA, 25 bp, Saccharomyces pastorianus
gctgtatccgttatcactttctgga

SEQ ID NO: 111153 - DNA, 25 bp, Saccharomyces pastorianus
agcgctggacataatcacgagaaca

SEQ ID NO: 111154 - DNA, 25 bp, Saccharomyces pastorianus
gtattgcggtgctagaattcttggc

SEQ ID NO: 111155 - DNA, 25 bp, Saccharomyces pastorianus
gactccaatcttcaccattacttgt

SEQ ID NO: 111156 - DNA, 25 bp, Saccharomyces pastorianus
gaggccacagagtacgctgtatccg

SEQ ID NO: 111157 - DNA, 25 bp, Saccharomyces pastorianus
tgatgttaccaatcaagcgctggac

SEQ ID NO: 111158 - DNA, 25 bp, Saccharomyces pastorianus
gggtaaatcgacacagactccaatc

SEQ ID NO: 111159 - DNA, 25 bp, Saccharomyces pastorianus
gtggtaccaggttttgactttgagg

SEQ ID NO: 111160 - DNA, 25 bp, Saccharomyces pastorianus
gtttcgttaaagtcccaatgcctga

SEQ ID NO: 111161 - DNA, 25 bp, Saccharomyces pastorianus
aaggcaagtttccttctgccaaacg

SEQ ID NO: 111162 - DNA, 25 bp, Saccharomyces pastorianus
tgaactgaaacaccttgtgggacct

SEQ ID NO: 111163 - DNA, 25 bp, Saccharomyces pastorianus
gactttgaggaccataccttcttga

SEQ ID NO: 111164 - DNA, 25 bp, Saccharomyces pastorianus
agccaccaagtagtttgcaacaatt

SEQ ID NO: 111165 - DNA, 25 bp, Saccharomyces pastorianus
gaggcaagggtcaatacgttctagt

SEQ ID NO: 111166 - DNA, 25 bp, Saccharomyces pastorianus
tatagagccggccagtttcgttaaa

SEQ ID NO: 111167 - DNA, 25 bp, Saccharomyces pastorianus
gcaaatgcagctatagagccggcca

SEQ ID NO: 111168 - DNA, 25 bp, Saccharomyces pastorianus
tacgttctagtatatcctgatggtc

SEQ ID NO: 111169 - DNA, 25 bp, Saccharomyces pastorianus
taggtctccctacaccatggaagta

SEQ ID NO: 111170 - DNA, 25 bp, Saccharomyces pastorianus
atggtgtgactaactctgctgactc

SEQ ID NO: 111171 - DNA, 25 bp, Saccharomyces pastorianus
tgaatccccacatgaacaccgagag

SEQ ID NO: 111172 - DNA, 25 bp, Saccharomyces pastorianus
acgatactgtcgcaatgaacctgaa

SEQ ID NO: 111173 - DNA, 25 bp, Saccharomyces pastorianus
ctattaccaccaccatttatttcta

SEQ ID NO: 111174 - DNA, 25 bp, Saccharomyces pastorianus
atgctgccagtatactcaagagttc

SEQ ID NO: 111175 - DNA, 25 bp, Saccharomyces pastorianus
cgctgtacctgatgaaatgctgcca

SEQ ID NO: 111176 - DNA, 25 bp, Saccharomyces pastorianus
aaacatcagagttgtatcccttcaa

SEQ ID NO: 111177 - DNA, 25 bp, Saccharomyces pastorianus
atgacaggcacaactctattaccac

SEQ ID NO: 111178 - DNA, 25 bp, Saccharomyces pastorianus
aaccatcacctagttcatcggtaga

SEQ ID NO: 111179 - DNA, 25 bp, Saccharomyces pastorianus
gttattgatgttgctgatcgctaca

SEQ ID NO: 111180 - DNA, 25 bp, Saccharomyces pastorianus
taagcaatggccacgatggtacgaa

SEQ ID NO: 111181 - DNA, 25 bp, Saccharomyces pastorianus
gcagtcatgttgcaattcgttgata

SEQ ID NO: 111182 - DNA, 25 bp, Saccharomyces pastorianus
gtattaaaagacctcactcgtgggt

SEQ ID NO: 111183 - DNA, 25 bp, Saccharomyces pastorianus
ttgcctgcagttggtgtactgttca

SEQ ID NO: 111184 - DNA, 25 bp, Saccharomyces pastorianus
gctcgcccgggcaattgacaagaga

SEQ ID NO: 111185 - DNA, 25 bp, Saccharomyces pastorianus
tcactcgtgggttaaatagcatcaa

SEQ ID NO: 111186 - DNA, 25 bp, Saccharomyces pastorianus
atagcatcaagctgagtgactccgt

SEQ ID NO: 111187 - DNA, 25 bp, Saccharomyces pastorianus
aggagccaagcaaaaagattcggac

SEQ ID NO: 111188 - DNA, 25 bp, Saccharomyces pastorianus
tgacactagcttgtttacgaccgag

SEQ ID NO: 111189 - DNA, 25 bp, Saccharomyces pastorianus
gtactgttcattccgtctttgcgac

SEQ ID NO: 111190 - DNA, 25 bp, Saccharomyces pastorianus
tgagtgactccgtttgcctgcagtt

SEQ ID NO: 111191 - DNA, 25 bp, Saccharomyces pastorianus
tccgtctttgcgacctgaatcgaaa

SEQ ID NO: 111192 - DNA, 25 bp, Saccharomyces pastorianus
gcagtttcatgttctttcaaagcaa

SEQ ID NO: 111193 - DNA, 25 bp, Saccharomyces pastorianus
gaggattttcaggtcagctctgata

SEQ ID NO: 111194 - DNA, 25 bp, Saccharomyces pastorianus
gtatccattagataacgcgttcttc

SEQ ID NO: 111195 - DNA, 25 bp, Saccharomyces pastorianus
ggacaaacttctacgtcatcgagga

SEQ ID NO: 111196 - DNA, 25 bp, Saccharomyces pastorianus
actgtagagtcattgttcctggaga

SEQ ID NO: 111197 - DNA, 25 bp, Saccharomyces pastorianus
taccacttttgccaacatcagtaag

SEQ ID NO: 111198 - DNA, 25 bp, Saccharomyces pastorianus
tatgggttccgctggtgaagatgat

SEQ ID NO: 111199 - DNA, 25 bp, Saccharomyces pastorianus
ggtactgcgttcaaatagaggttct

SEQ ID NO: 111200 - DNA, 25 bp, Saccharomyces pastorianus
taagccaactttgtacataccattc

SEQ ID NO: 111201 - DNA, 25 bp, Saccharomyces pastorianus
gagtttgattcagatgcggctttaa

SEQ ID NO: 111202 - DNA, 25 bp, Saccharomyces pastorianus
ggttgcaaaccgctttaggttcaga

SEQ ID NO: 111203 - DNA, 25 bp, Saccharomyces pastorianus
ccgtatgcttgtgtgacttgtcgaa

SEQ ID NO: 111204 - DNA, 25 bp, Saccharomyces pastorianus
cctgaggacccttatgaacatttta

SEQ ID NO: 111205 - DNA, 25 bp, Saccharomyces pastorianus
caggcggctacaagactctcaaaat

SEQ ID NO: 111206 - DNA, 25 bp, Saccharomyces pastorianus
gaaagtttcgttatcgaccgatatt

SEQ ID NO: 111207 - DNA, 25 bp, Saccharomyces pastorianus
gggttcgaatttgcagcgatgtcca

SEQ ID NO: 111208 - DNA, 25 bp, Saccharomyces pastorianus
ctttgattccagtgtccttcttaaa

SEQ ID NO: 111209 - DNA, 25 bp, Saccharomyces pastorianus
tgataccgttacttcatatgagaga

SEQ ID NO: 111210 - DNA, 25 bp, Saccharomyces pastorianus
aaaatgttctacaaccaggcggcta

SEQ ID NO: 111211 - DNA, 25 bp, Saccharomyces pastorianus
atgcgggatgctgttctgttttata

SEQ ID NO: 111212 - DNA, 25 bp, Saccharomyces pastorianus
gaagtcaatgattaccttgctgaaa

SEQ ID NO: 111213 - DNA, 25 bp, Saccharomyces pastorianus
ggtattactttatcctgaggaccct

SEQ ID NO: 111214 - DNA, 25 bp, Saccharomyces pastorianus
taggatctgacaacgctgctgtaca

SEQ ID NO: 111215 - DNA, 25 bp, Saccharomyces pastorianus
gtgtcaacctggcatttatactgat

SEQ ID NO: 111216 - DNA, 25 bp, Saccharomyces pastorianus
tgttgggaaacgacaccgcttattt

SEQ ID NO: 111217 - DNA, 25 bp, Saccharomyces pastorianus
tgacctaccgtttggcattgacatc

SEQ ID NO: 111218 - DNA, 25 bp, Saccharomyces pastorianus
ggcagtcctgatccaaatgtaaaag

SEQ ID NO: 111219 - DNA, 25 bp, Saccharomyces pastorianus
ggaaatgccctatcaaaggccttga

SEQ ID NO: 111220 - DNA, 25 bp, Saccharomyces pastorianus
gatgttcaacggcatggttttttac

SEQ ID NO: 111221 - DNA, 25 bp, Saccharomyces pastorianus
acaccgcttatttcctatacttttg

SEQ ID NO: 111222 - DNA, 25 bp, Saccharomyces pastorianus
cagtgggtcctattggtactcgcat

SEQ ID NO: 111223 - DNA, 25 bp, Saccharomyces pastorianus
aggtatgccatccagtgggtcctat

SEQ ID NO: 111224 - DNA, 25 bp, Saccharomyces pastorianus
gtactcgcatttcttgcagcaaatc

SEQ ID NO: 111225 - DNA, 25 bp, Saccharomyces pastorianus
gggatttcgttctcaatcagttact

SEQ ID NO: 111226 - DNA, 25 bp, Saccharomyces pastorianus
tcagttacttgacgcgggaatattg

SEQ ID NO: 111227 - DNA, 25 bp, Saccharomyces pastorianus
aacagttcacatcacgcacgttatg

SEQ ID NO: 111228 - DNA, 25 bp, Saccharomyces pastorianus
atcacgcacgttatgaaagccttaa

SEQ ID NO: 111229 - DNA, 25 bp, Saccharomyces pastorianus
catgtaattacgtttatgacgcgac

SEQ ID NO: 111230 - DNA, 25 bp, Saccharomyces pastorianus
aaaacactatatggctaagcatggt

SEQ ID NO: 111231 - DNA, 25 bp, Saccharomyces pastorianus
gatctcaagagcaagaactgggcga

SEQ ID NO: 111232 - DNA, 25 bp, Saccharomyces pastorianus
aagaactgggcgatattgtcgatga

SEQ ID NO: 111233 - DNA, 25 bp, Saccharomyces pastorianus
ttatgacgcgactttcatttacagc

SEQ ID NO: 111234 - DNA, 25 bp, Saccharomyces pastorianus
tagccaaaacattgttccaacaggg

SEQ ID NO: 111235 - DNA, 25 bp, Saccharomyces pastorianus
aataagtttgtcatggagatagcca

SEQ ID NO: 111236 - DNA, 25 bp, Saccharomyces pastorianus
gtataggcaggcgtacgggctaaat

SEQ ID NO: 111237 - DNA, 25 bp, Saccharomyces pastorianus
gacggtagggtcttcagtgatcata

SEQ ID NO: 111238 - DNA, 25 bp, Saccharomyces pastorianus
gaaatcggcgatcctcttttgatat

SEQ ID NO: 111239 - DNA, 25 bp, Saccharomyces pastorianus
agtaagcatacgctccacggatatt

SEQ ID NO: 111240 - DNA, 25 bp, Saccharomyces pastorianus
gcaattcctattttggtgggcacaa

SEQ ID NO: 111241 - DNA, 25 bp, Saccharomyces pastorianus
gaattcatcaacatgctcccaattg

SEQ ID NO: 111242 - DNA, 25 bp, Saccharomyces pastorianus
atttctgtttgacctgacacgtcca

SEQ ID NO: 111243 - DNA, 25 bp, Saccharomyces pastorianus
aatgctcctcttatattctgctcta

SEQ ID NO: 111244 - DNA, 25 bp, Saccharomyces pastorianus
ataatatcaggaagccctcctcgtc

SEQ ID NO: 111245 - DNA, 25 bp, Saccharomyces pastorianus
gtggccagcaacatcgacatcataa

SEQ ID NO: 111246 - DNA, 25 bp, Saccharomyces pastorianus
gggctaaatgattcggcaattccta

SEQ ID NO: 111247 - DNA, 25 bp, Saccharomyces pastorianus
aaggcaggaggtatcgtcttacaaa

SEQ ID NO: 111248 - DNA, 25 bp, Saccharomyces pastorianus
gaagagccagatgcggttaatgacg

SEQ ID NO: 111249 - DNA, 25 bp, Saccharomyces pastorianus
agacagcgatcactcaagcaggaaa

SEQ ID NO: 111250 - DNA, 25 bp, Saccharomyces pastorianus
atttatgacgatttctctaagggcc

SEQ ID NO: 111251 - DNA, 25 bp, Saccharomyces pastorianus
aacttctgaagagagatggcctgct

SEQ ID NO: 111252 - DNA, 25 bp, Saccharomyces pastorianus
agatggcctgctcaatgaggcagaa

SEQ ID NO: 111253 - DNA, 25 bp, Saccharomyces pastorianus
aagcaggaaacttggaggcactaca

SEQ ID NO: 111254 - DNA, 25 bp, Saccharomyces pastorianus
gtatcaacgcctcaatgaaatcgga

SEQ ID NO: 111255 - DNA, 25 bp, Saccharomyces pastorianus
gcagaggaggcagacagcgatcact

SEQ ID NO: 111256 - DNA, 25 bp, Saccharomyces pastorianus
gaagataatagtcgccagggtaata

SEQ ID NO: 111257 - DNA, 25 bp, Saccharomyces pastorianus
ttggaggcactacaagcgattttag

SEQ ID NO: 111258 - DNA, 25 bp, Saccharomyces pastorianus
ggatcatacgctggttgggcccaag

SEQ ID NO: 111259 - DNA, 25 bp, Saccharomyces pastorianus
tacaacgccttacctatctcaagaa

SEQ ID NO: 111260 - DNA, 25 bp, Saccharomyces pastorianus
gagggactaccaaatatctgcgaac

SEQ ID NO: 111261 - DNA, 25 bp, Saccharomyces pastorianus
gctgattgcgtttgtctaatgggac

SEQ ID NO: 111262 - DNA, 25 bp, Saccharomyces pastorianus
agtgaggagctcacttctcgagcca

SEQ ID NO: 111263 - DNA, 25 bp, Saccharomyces pastorianus
gcccaaggtgtcctattctctaaag

SEQ ID NO: 111264 - DNA, 25 bp, Saccharomyces pastorianus
atattacttctgacaccacatacct

SEQ ID NO: 111265 - DNA, 25 bp, Saccharomyces pastorianus
aacccagagctcgaccatattagat

SEQ ID NO: 111266 - DNA, 25 bp, Saccharomyces pastorianus
tcgagccactgaagccaagttgcgt

SEQ ID NO: 111267 - DNA, 25 bp, Saccharomyces pastorianus
gtccccgtagatgtccatgttagta

SEQ ID NO: 111268 - DNA, 25 bp, Saccharomyces pastorianus
tgggacttcacatggatggcatcgt

SEQ ID NO: 111269 - DNA, 25 bp, Saccharomyces pastorianus
gtacatcagagcttcgatgtctctt

SEQ ID NO: 111270 - DNA, 25 bp, Saccharomyces pastorianus
gatgccatatatacctggttcacaa

SEQ ID NO: 111271 - DNA, 25 bp, Saccharomyces pastorianus
gaacgggtctatgttactggatggt

SEQ ID NO: 111272 - DNA, 25 bp, Saccharomyces pastorianus
tggcgactccctaaatgggttttgg

SEQ ID NO: 111273 - DNA, 25 bp, Saccharomyces pastorianus
gtgtcgtttatgtgagaccacctat

SEQ ID NO: 111274 - DNA, 25 bp, Saccharomyces pastorianus
tgcaaaggcttattgacgacgacaa

SEQ ID NO: 111275 - DNA, 25 bp, Saccharomyces pastorianus
agttagattgggttacgtcgcatca

SEQ ID NO: 111276 - DNA, 25 bp, Saccharomyces pastorianus
tggtcttttacctcctttggaagag

SEQ ID NO: 111277 - DNA, 25 bp, Saccharomyces pastorianus
gactatggtcgtatctttttgcaaa

SEQ ID NO: 111278 - DNA, 25 bp, Saccharomyces pastorianus
ggaatccattttcttctcatccaaa

SEQ ID NO: 111279 - DNA, 25 bp, Saccharomyces pastorianus
agatgagagcgcgtggttgccaaac

SEQ ID NO: 111280 - DNA, 25 bp, Saccharomyces pastorianus
aagacactttgtgctcgatgagcaa

SEQ ID NO: 111281 - DNA, 25 bp, Saccharomyces pastorianus
atcattgccgtcgaacgtcgcggcg

SEQ ID NO: 111282 - DNA, 25 bp, Saccharomyces pastorianus
ttctgccaacatcattgccgtcgaa

SEQ ID NO: 111283 - DNA, 25 bp, Saccharomyces pastorianus
gaccggctacttattccccaaggat

SEQ ID NO: 111284 - DNA, 25 bp, Saccharomyces pastorianus
aagagtgtcaagaccggctacttat

SEQ ID NO: 111285 - DNA, 25 bp, Saccharomyces pastorianus
gcaaccgtgtcaacaagagtgtcaa

SEQ ID NO: 111286 - DNA, 25 bp, Saccharomyces pastorianus
aaggatcacgttccttctgccaaca

SEQ ID NO: 111287 - DNA, 25 bp, Saccharomyces pastorianus
atgaccatggaccaaggccttaacc

SEQ ID NO: 111288 - DNA, 25 bp, Saccharomyces pastorianus
aagcaattcttccttgacgatgtcg

SEQ ID NO: 111289 - DNA, 25 bp, Saccharomyces pastorianus
gacgatgtcgtcctacaagacactt

SEQ ID NO: 111290 - DNA, 25 bp, Saccharomyces pastorianus
tacttattccccaaggatcacgttc

SEQ ID NO: 111291 - DNA, 25 bp, Saccharomyces pastorianus
gagactcaactctatcgatcatgac

SEQ ID NO: 111292 - DNA, 25 bp, Saccharomyces pastorianus
ttgcgtaccgtgaccatggcggaat

SEQ ID NO: 111293 - DNA, 25 bp, Saccharomyces pastorianus
tgccacctatggctgaggttcctat

SEQ ID NO: 111294 - DNA, 25 bp, Saccharomyces pastorianus
ttagaagggtgcctttgccacctat

SEQ ID NO: 111295 - DNA, 25 bp, Saccharomyces pastorianus
gaggttcctatgttgtctactcaaa

SEQ ID NO: 111296 - DNA, 25 bp, Saccharomyces pastorianus
attcccaagactacttttacgctca

SEQ ID NO: 111297 - DNA, 25 bp, Saccharomyces pastorianus
ggttctggcgaactaaaatctatgt

SEQ ID NO: 111298 - DNA, 25 bp, Saccharomyces pastorianus
tttacgctcaaaatcgctcccaaca

SEQ ID NO: 111299 - DNA, 25 bp, Saccharomyces pastorianus
gcctccgcttcttcgttagaaatgt

SEQ ID NO: 111300 - DNA, 25 bp, Saccharomyces pastorianus
gtctactcaaaactccatgggcagc

SEQ ID NO: 111301 - DNA, 25 bp, Saccharomyces pastorianus
acaacaaatttggttctggcgaact

SEQ ID NO: 111302 - DNA, 25 bp, Saccharomyces pastorianus
ggacgctctgttttgttttctataa

SEQ ID NO: 111303 - DNA, 25 bp, Saccharomyces pastorianus
gactcttccgtcatctagggtatat

SEQ ID NO: 111304 - DNA, 25 bp, Saccharomyces pastorianus
aatagcggcgtttatctgctcagta

SEQ ID NO: 111305 - DNA, 25 bp, Saccharomyces pastorianus
gaatatctccttttgtttgtatcgt

SEQ ID NO: 111306 - DNA, 25 bp, Saccharomyces pastorianus
agcagcaactgtactagccttcgaa

SEQ ID NO: 111307 - DNA, 25 bp, Saccharomyces pastorianus
ttgtggacgattgcggacgctctgt

SEQ ID NO: 111308 - DNA, 25 bp, Saccharomyces pastorianus
aagaagtactggctcctgtgtgact

SEQ ID NO: 111309 - DNA, 25 bp, Saccharomyces pastorianus
tattctgcggtttgtcgatacgact

SEQ ID NO: 111310 - DNA, 25 bp, Saccharomyces pastorianus
gtggccgtggaattagcagcagcaa

SEQ ID NO: 111311 - DNA, 25 bp, Saccharomyces pastorianus
gcaattggcttaatactgttccagt

SEQ ID NO: 111312 - DNA, 25 bp, Saccharomyces pastorianus
aggtctctggaagtttctgtggccg

SEQ ID NO: 111313 - DNA, 25 bp, Saccharomyces pastorianus
aagtcggaagcaactccacaaccag

SEQ ID NO: 111314 - DNA, 25 bp, Saccharomyces pastorianus
gccacgtggcgctttatctaatggt

SEQ ID NO: 111315 - DNA, 25 bp, Saccharomyces pastorianus
gccgtcgccaaagtttccagaatgt

SEQ ID NO: 111316 - DNA, 25 bp, Saccharomyces pastorianus
attgccacaagctggtaagtcggaa

SEQ ID NO: 111317 - DNA, 25 bp, Saccharomyces pastorianus
gttacagagatgcttgtcgcaattc

SEQ ID NO: 111318 - DNA, 25 bp, Saccharomyces pastorianus
ttaccgccttcactagacgaactga

SEQ ID NO: 111319 - DNA, 25 bp, Saccharomyces pastorianus
agatcacaattcaggcgtgttgcca

SEQ ID NO: 111320 - DNA, 25 bp, Saccharomyces pastorianus
gtcgcctaaacatgcttccatttta

SEQ ID NO: 111321 - DNA, 25 bp, Saccharomyces pastorianus
gtcgcaattctaaacatctgtactg

SEQ ID NO: 111322 - DNA, 25 bp, Saccharomyces pastorianus
gaaataagattctggccgtcgccaa

SEQ ID NO: 111323 - DNA, 25 bp, Saccharomyces pastorianus
atgaagccctgtctacctttgaaag

SEQ ID NO: 111324 - DNA, 25 bp, Saccharomyces pastorianus
cattatatctggttgagcttgttca

SEQ ID NO: 111325 - DNA, 25 bp, Saccharomyces pastorianus
ctaccttctgttttcgcgagattaa

SEQ ID NO: 111326 - DNA, 25 bp, Saccharomyces pastorianus
tgttctctcgctacttttctggtat

SEQ ID NO: 111327 - DNA, 25 bp, Saccharomyces pastorianus
gatcatacgctttactcgatgctaa

SEQ ID NO: 111328 - DNA, 25 bp, Saccharomyces pastorianus
gctttagatgaagccctaccttctg

SEQ ID NO: 111329 - DNA, 25 bp, Saccharomyces pastorianus
gcgtattttaagtggttctctgaac

SEQ ID NO: 111330 - DNA, 25 bp, Saccharomyces pastorianus
tggtaggcgcatattttgttctctc

SEQ ID NO: 111331 - DNA, 25 bp, Saccharomyces pastorianus
attaatgtatattcaatcccggagt

SEQ ID NO: 111332 - DNA, 25 bp, Saccharomyces pastorianus
agctggtttgagtttcttcttggat

SEQ ID NO: 111333 - DNA, 25 bp, Saccharomyces pastorianus
atcccggagttgaaccaagctttag

SEQ ID NO: 111334 - DNA, 25 bp, Saccharomyces pastorianus
ttctggtatttctctcgttttattg

SEQ ID NO: 111335 - DNA, 25 bp, Saccharomyces pastorianus
caaggtgcttcgagagcgttatcaa

SEQ ID NO: 111336 - DNA, 25 bp, Saccharomyces pastorianus
aagggctcccattgaagtcctggct

SEQ ID NO: 111337 - DNA, 25 bp, Saccharomyces pastorianus
gttggagtaccaaacgacgtgctgt

SEQ ID NO: 111338 - DNA, 25 bp, Saccharomyces pastorianus
gtggttctatccaatcatggtggta

SEQ ID NO: 111339 - DNA, 25 bp, Saccharomyces pastorianus
ggctgaaaccatgccaatcctggaa

SEQ ID NO: 111340 - DNA, 25 bp, Saccharomyces pastorianus
aaagcgttatgtctaggtgctaaag

SEQ ID NO: 111341 - DNA, 25 bp, Saccharomyces pastorianus
cattgcggaattgaagcctgatctt

SEQ ID NO: 111342 - DNA, 25 bp, Saccharomyces pastorianus
aggtgttcaacgtaccgaagatgtt

SEQ ID NO: 111343 - DNA, 25 bp, Saccharomyces pastorianus
ggtagaccattcttgtatgcgaact

SEQ ID NO: 111344 - DNA, 25 bp, Saccharomyces pastorianus
gtgttcgtcgtggtacagatgtctt

SEQ ID NO: 111345 - DNA, 25 bp, Saccharomyces pastorianus
attaggtgttactagcattgcggaa

SEQ ID NO: 111346 - DNA, 25 bp, Saccharomyces pastorianus
taattgcatcacaagcacccggtac

SEQ ID NO: 111347 - DNA, 25 bp, Saccharomyces pastorianus
ggttagcatgcaccacactatgaac

SEQ ID NO: 111348 - DNA, 25 bp, Saccharomyces pastorianus
ggttccgggtgtgctaatcttaata

SEQ ID NO: 111349 - DNA, 25 bp, Saccharomyces pastorianus
cactacatacaacagcgacgccaat

SEQ ID NO: 111350 - DNA, 25 bp, Saccharomyces pastorianus
tatcatcttctaccatcccaaagta

SEQ ID NO: 111351 - DNA, 25 bp, Saccharomyces pastorianus
aattccggtagcaatgccgccacta

SEQ ID NO: 111352 - DNA, 25 bp, Saccharomyces pastorianus
tgccatggccgcgttgactaacaac

SEQ ID NO: 111353 - DNA, 25 bp, Saccharomyces pastorianus
acatgattcatggttatttcggtaa

SEQ ID NO: 111354 - DNA, 25 bp, Saccharomyces pastorianus
aacaggcacgagtcctactggaagt

SEQ ID NO: 111355 - DNA, 25 bp, Saccharomyces pastorianus
atatgtcccctgaaaccggttagca

SEQ ID NO: 111356 - DNA, 25 bp, Saccharomyces pastorianus
ggtaacactaatcgcgacataacag

SEQ ID NO: 111357 - DNA, 25 bp, Saccharomyces pastorianus
aatattgactgccactggacctgaa

SEQ ID NO: 111358 - DNA, 25 bp, Saccharomyces pastorianus
gacgctttttactacctgactagat

SEQ ID NO: 111359 - DNA, 25 bp, Saccharomyces pastorianus
tccctcaccagtttatttccaaaag

SEQ ID NO: 111360 - DNA, 25 bp, Saccharomyces pastorianus
tagggcaaggttggcctctacttac

SEQ ID NO: 111361 - DNA, 25 bp, Saccharomyces pastorianus
aagaatgctttccacgacgatcatc

SEQ ID NO: 111362 - DNA, 25 bp, Saccharomyces pastorianus
agagatggtgcttatcctcatgtct

SEQ ID NO: 111363 - DNA, 25 bp, Saccharomyces pastorianus
gtttgtcttcaatacggcagccgtt

SEQ ID NO: 111364 - DNA, 25 bp, Saccharomyces pastorianus
cgtggaatttatcctgctggtcttc

SEQ ID NO: 111365 - DNA, 25 bp, Saccharomyces pastorianus
tttacgttttgacttggtgctcgaa

SEQ ID NO: 111366 - DNA, 25 bp, Saccharomyces pastorianus
gacgatcatcgtagtgcccaattgg

SEQ ID NO: 111367 - DNA, 25 bp, Saccharomyces pastorianus
ctggtcttctggtctgttagggcaa

SEQ ID NO: 111368 - DNA, 25 bp, Saccharomyces pastorianus
aaattgcgctcccatttaggtggtt

SEQ ID NO: 111369 - DNA, 25 bp, Saccharomyces pastorianus
agcaccaaagctatccttccaggat

SEQ ID NO: 111370 - DNA, 25 bp, Saccharomyces pastorianus
tctagccttaatttctcatatcggg

SEQ ID NO: 111371 - DNA, 25 bp, Saccharomyces pastorianus
gttattcctgacatgaagctctatg

SEQ ID NO: 111372 - DNA, 25 bp, Saccharomyces pastorianus
gggacccgacataattgcagcattt

SEQ ID NO: 111373 - DNA, 25 bp, Saccharomyces pastorianus
gtttacccacacaacttgaagctgt

SEQ ID NO: 111374 - DNA, 25 bp, Saccharomyces pastorianus
taggtggttctccaggaatactaat

SEQ ID NO: 111375 - DNA, 25 bp, Saccharomyces pastorianus
caaggcttcccaacaggttcatgaa

SEQ ID NO: 111376 - DNA, 25 bp, Saccharomyces pastorianus
gtggtaaggccaaggcttcccaaca

SEQ ID NO: 111377 - DNA, 25 bp, Saccharomyces pastorianus
ggtcatatttttgctggtaatgtca

SEQ ID NO: 111378 - DNA, 25 bp, Saccharomyces pastorianus
acggacatcgaggaatttgcatctt

SEQ ID NO: 111379 - DNA, 25 bp, Saccharomyces pastorianus
gagagctacttacgacgattaccag

SEQ ID NO: 111380 - DNA, 25 bp, Saccharomyces pastorianus
gcggcaataacaacactactgactt

SEQ ID NO: 111381 - DNA, 25 bp, Saccharomyces pastorianus
taaagacacgtttgcgctctctggg

SEQ ID NO: 111382 - DNA, 25 bp, Saccharomyces pastorianus
aaactggcctcgctagttaagctca

SEQ ID NO: 111383 - DNA, 25 bp, Saccharomyces pastorianus
gaaagctgcagcaccaggtatccaa

SEQ ID NO: 111384 - DNA, 25 bp, Saccharomyces pastorianus
gctctctgggctggattggtgctaa

SEQ ID NO: 111385 - DNA, 25 bp, Saccharomyces pastorianus
ttgctgcttatagagcgggcgcgat

SEQ ID NO: 111386 - DNA, 25 bp, Saccharomyces pastorianus
aaattaggcattgccaaccccatca

SEQ ID NO: 111387 - DNA, 25 bp, Saccharomyces pastorianus
agatttaacttctccttctgctaac

SEQ ID NO: 111388 - DNA, 25 bp, Saccharomyces pastorianus
gcttccactttcacggctattaaaa

SEQ ID NO: 111389 - DNA, 25 bp, Saccharomyces pastorianus
gggtttccaaagtcctctagaagat

SEQ ID NO: 111390 - DNA, 25 bp, Saccharomyces pastorianus
gacccctccgtttatggaagacgct

SEQ ID NO: 111391 - DNA, 25 bp, Saccharomyces pastorianus
gcagctgatggatttatcgccggag

SEQ ID NO: 111392 - DNA, 25 bp, Saccharomyces pastorianus
aactcttttggagacgtgtatgaaa

SEQ ID NO: 111393 - DNA, 25 bp, Saccharomyces pastorianus
gtttgccgtccctagcagattaatt

SEQ ID NO: 111394 - DNA, 25 bp, Saccharomyces pastorianus
gaaggccgatacattgtcgaggcaa

SEQ ID NO: 111395 - DNA, 25 bp, Saccharomyces pastorianus
gagggatgtagccaacgtatatgat

SEQ ID NO: 111396 - DNA, 25 bp, Saccharomyces pastorianus
ggttcatttatgcatcttgtcattt

SEQ ID NO: 111397 - DNA, 25 bp, Saccharomyces pastorianus
cgagtcaagactgtacggcgaagca

SEQ ID NO: 111398 - DNA, 25 bp, Saccharomyces pastorianus
agaatttctagatacgcagctgatg

SEQ ID NO: 111399 - DNA, 25 bp, Saccharomyces pastorianus
tcacgtacctttggtcttctttaat

SEQ ID NO: 111400 - DNA, 25 bp, Saccharomyces pastorianus
tgcgaaatttgctatcacgtacctt

SEQ ID NO: 111401 - DNA, 25 bp, Saccharomyces pastorianus
ttacgaggctgcttccacgagaaaa

SEQ ID NO: 111402 - DNA, 25 bp, Saccharomyces pastorianus
taatgatgaccaaattccgcccctt

SEQ ID NO: 111403 - DNA, 25 bp, Saccharomyces pastorianus
aaaacgccatggcatgtcacctgat

SEQ ID NO: 111404 - DNA, 25 bp, Saccharomyces pastorianus
caagttatccaactggcggttttca

SEQ ID NO: 111405 - DNA, 25 bp, Saccharomyces pastorianus
gacaacgggtttggactggcataca

SEQ ID NO: 111406 - DNA, 25 bp, Saccharomyces pastorianus
aaaagagcattctacgtacctgaga

SEQ ID NO: 111407 - DNA, 25 bp, Saccharomyces pastorianus
tcgatcgtcatttcttcggtctaaa

SEQ ID NO: 111408 - DNA, 25 bp, Saccharomyces pastorianus
gtccaccgcttccttagaatttgtt

SEQ ID NO: 111409 - DNA, 25 bp, Saccharomyces pastorianus
ccacatctcaactatcttcggaata

SEQ ID NO: 111410 - DNA, 25 bp, Saccharomyces pastorianus
aactggtagatctgtgtccaccgct

SEQ ID NO: 111411 - DNA, 25 bp, Saccharomyces pastorianus
aaatggcgatgttcctactgcagaa

SEQ ID NO: 111412 - DNA, 25 bp, Saccharomyces pastorianus
aagtgatctcacaggcgtaccacga

SEQ ID NO: 111413 - DNA, 25 bp, Saccharomyces pastorianus
acctctgatggtctctctgcattaa

SEQ ID NO: 111414 - DNA, 25 bp, Saccharomyces pastorianus
gatacttcaaagttgtacccctaat

SEQ ID NO: 111415 - DNA, 25 bp, Saccharomyces pastorianus
gattctgcgctgctaaacttgatgg

SEQ ID NO: 111416 - DNA, 25 bp, Saccharomyces pastorianus
agatttgccaaatgtaccgacttta

SEQ ID NO: 111417 - DNA, 25 bp, Saccharomyces pastorianus
aaaccgatctcacagacctctgatg

SEQ ID NO: 111418 - DNA, 25 bp, Saccharomyces pastorianus
catgctctatttgcggtggctacga

SEQ ID NO: 111419 - DNA, 25 bp, Saccharomyces pastorianus
ctgcattaatgggtggttcttcttt

SEQ ID NO: 111420 - DNA, 25 bp, Saccharomyces pastorianus
caagagattctccagtcggacagga

SEQ ID NO: 111421 - DNA, 25 bp, Saccharomyces pastorianus
gtatggtcatggttgggtgcttaaa

SEQ ID NO: 111422 - DNA, 25 bp, Saccharomyces pastorianus
tacccctaattacgacatgctctat

SEQ ID NO: 111423 - DNA, 25 bp, Saccharomyces pastorianus
agttagctcctataatgggcattac

SEQ ID NO: 111424 - DNA, 25 bp, Saccharomyces pastorianus
tttacctggttttgcagtctttttg

SEQ ID NO: 111425 - DNA, 25 bp, Saccharomyces pastorianus
atgggcattactctgttgcttacct

SEQ ID NO: 111426 - DNA, 25 bp, Saccharomyces pastorianus
gaaaatcgcaccatattctattagt

SEQ ID NO: 111427 - DNA, 25 bp, Saccharomyces pastorianus
aaactaccgtcctatccattgtgag

SEQ ID NO: 111428 - DNA, 25 bp, Saccharomyces pastorianus
gcttacctcgctacttgtggaaaaa

SEQ ID NO: 111429 - DNA, 25 bp, Saccharomyces pastorianus
tggagaatccaagcctcacccaatt

SEQ ID NO: 111430 - DNA, 25 bp, Saccharomyces pastorianus
atacaatccaccagttagctcctat

SEQ ID NO: 111431 - DNA, 25 bp, Saccharomyces pastorianus
tcctggtatattcagctctagcata

SEQ ID NO: 111432 - DNA, 25 bp, Saccharomyces pastorianus
ccgtgctgaccgtatctattgtggg

SEQ ID NO: 111433 - DNA, 25 bp, Saccharomyces pastorianus
gtattttggagcaaacgcccgtgct

SEQ ID NO: 111434 - DNA, 25 bp, Saccharomyces pastorianus
acaggtacctgcacaatctagttat

SEQ ID NO: 111435 - DNA, 25 bp, Saccharomyces pastorianus
ggcaagaaaccttctacgtgggcta

SEQ ID NO: 111436 - DNA, 25 bp, Saccharomyces pastorianus
gcactccttcattaactctagattc

SEQ ID NO: 111437 - DNA, 25 bp, Saccharomyces pastorianus
agtggacccgctacagaaattcgtt

SEQ ID NO: 111438 - DNA, 25 bp, Saccharomyces pastorianus
gagcccgcagttactaacactggat

SEQ ID NO: 111439 - DNA, 25 bp, Saccharomyces pastorianus
ctacgtgggctaattccgatttcaa

SEQ ID NO: 111440 - DNA, 25 bp, Saccharomyces pastorianus
tgaacccaaagtacacgagcccgca

SEQ ID NO: 111441 - DNA, 25 bp, Saccharomyces pastorianus
atctagttatcatccatccagcgag

SEQ ID NO: 111442 - DNA, 25 bp, Saccharomyces pastorianus
aaaaatctggcctatcacctgacga

SEQ ID NO: 111443 - DNA, 25 bp, Saccharomyces pastorianus
atgaggcacatacagctgatggcaa

SEQ ID NO: 111444 - DNA, 25 bp, Saccharomyces pastorianus
gggccattctggttctaaatcaggt

SEQ ID NO: 111445 - DNA, 25 bp, Saccharomyces pastorianus
cagcctcaccagaaacacattgtac

SEQ ID NO: 111446 - DNA, 25 bp, Saccharomyces pastorianus
agttccatactaatactgacgatgt

SEQ ID NO: 111447 - DNA, 25 bp, Saccharomyces pastorianus
gtatccatcataccacaatttcctg

SEQ ID NO: 111448 - DNA, 25 bp, Saccharomyces pastorianus
tttcctgacatcaaggtttcactag

SEQ ID NO: 111449 - DNA, 25 bp, Saccharomyces pastorianus
tgtcgacatcctttgcctttattga

SEQ ID NO: 111450 - DNA, 25 bp, Saccharomyces pastorianus
gaaatttgaattccgagtgcgtact

SEQ ID NO: 111451 - DNA, 25 bp, Saccharomyces pastorianus
cgagattttatgacgaagcgctcat

SEQ ID NO: 111452 - DNA, 25 bp, Saccharomyces pastorianus
gattcgtcacagttaatatgcctta

SEQ ID NO: 111453 - DNA, 25 bp, Saccharomyces pastorianus
ttagtgatgctttcctcaaattcgg

SEQ ID NO: 111454 - DNA, 25 bp, Saccharomyces pastorianus
gagtgcgtactatgtctttcaccca

SEQ ID NO: 111455 - DNA, 25 bp, Saccharomyces pastorianus
acacattgtactaacttcacctttg

SEQ ID NO: 111456 - DNA, 25 bp, Saccharomyces pastorianus
agaaattccgtgttgcaaagtgggt

SEQ ID NO: 111457 - DNA, 25 bp, Saccharomyces pastorianus
gataaaaacccatttccgagatact

SEQ ID NO: 111458 - DNA, 25 bp, Saccharomyces pastorianus
aggttggtatcgcaatgtcacccct

SEQ ID NO: 111459 - DNA, 25 bp, Saccharomyces pastorianus
gatcctttacaattctcatatacca

SEQ ID NO: 111460 - DNA, 25 bp, Saccharomyces pastorianus
cagcatatctattggcacatggtat

SEQ ID NO: 111461 - DNA, 25 bp, Saccharomyces pastorianus
tggtgaagccggtgaccccgagcat

SEQ ID NO: 111462 - DNA, 25 bp, Saccharomyces pastorianus
gtcacccctttctaataacgcatta

SEQ ID NO: 111463 - DNA, 25 bp, Saccharomyces pastorianus
aaatgtcgcgtctttgaatcaatgg

SEQ ID NO: 111464 - DNA, 25 bp, Saccharomyces pastorianus
gaatgtctcactatctactgatgat

SEQ ID NO: 111465 - DNA, 25 bp, Saccharomyces pastorianus
gaagaatactcagttgcagcacaaa

SEQ ID NO: 111466 - DNA, 25 bp, Saccharomyces pastorianus
gagcatctcgtttcagcatatctat

SEQ ID NO: 111467 - DNA, 25 bp, Saccharomyces pastorianus
ttaaccttttcatcgaacagcccca

SEQ ID NO: 111468 - DNA, 25 bp, Saccharomyces pastorianus
ccagcgcatttttcctagcattaga

SEQ ID NO: 111469 - DNA, 25 bp, Saccharomyces pastorianus
gagctcgtctacttctacgaggtga

SEQ ID NO: 111470 - DNA, 25 bp, Saccharomyces pastorianus
ttattttctaccaatatcctcctca

SEQ ID NO: 111471 - DNA, 25 bp, Saccharomyces pastorianus
gatacattttccgtaactgcgggat

SEQ ID NO: 111472 - DNA, 25 bp, Saccharomyces pastorianus
gaattcggatcaaaaccgtcctcta

SEQ ID NO: 111473 - DNA, 25 bp, Saccharomyces pastorianus
gagggacggtccattttcacaatac

SEQ ID NO: 111474 - DNA, 25 bp, Saccharomyces pastorianus
ttttcacaataccttcatcgctggg

SEQ ID NO: 111475 - DNA, 25 bp, Saccharomyces pastorianus
atcgctgggccgaacgttcagatac

SEQ ID NO: 111476 - DNA, 25 bp, Saccharomyces pastorianus
gggaagcagatttctccctgcgagc

SEQ ID NO: 111477 - DNA, 25 bp, Saccharomyces pastorianus
aactgcgggatctgcggtttaacct

SEQ ID NO: 111478 - DNA, 25 bp, Saccharomyces pastorianus
atgccaatgccagtttccataacgg

SEQ ID NO: 111479 - DNA, 25 bp, Saccharomyces pastorianus
tgtaatgtcctttcgtcttctcaat

SEQ ID NO: 111480 - DNA, 25 bp, Saccharomyces pastorianus
gtatcatctgcttgccctgtaatgt

SEQ ID NO: 111481 - DNA, 25 bp, Saccharomyces pastorianus
ggcaacgccagcagtgaaatcacca

SEQ ID NO: 111482 - DNA, 25 bp, Saccharomyces pastorianus
tgcacacgtcgctaaagatggtatg

SEQ ID NO: 111483 - DNA, 25 bp, Saccharomyces pastorianus
actcccttggcgtctgtatcatctg

SEQ ID NO: 111484 - DNA, 25 bp, Saccharomyces pastorianus
gcagtgaaatcaccacagtttggat

SEQ ID NO: 111485 - DNA, 25 bp, Saccharomyces pastorianus
cataacggtgagtgtggcaacgcca

SEQ ID NO: 111486 - DNA, 25 bp, Saccharomyces pastorianus
aactaaatggttgaatcgggtcttg

SEQ ID NO: 111487 - DNA, 25 bp, Saccharomyces pastorianus
tcttctcaatcacacttactcatcg

SEQ ID NO: 111488 - DNA, 25 bp, Saccharomyces pastorianus
tactcatcgccaaagagtctgctct

SEQ ID NO: 111489 - DNA, 25 bp, Saccharomyces pastorianus
gtaagaaacagccattggtacccat

SEQ ID NO: 111490 - DNA, 25 bp, Saccharomyces pastorianus
tcgcactagtcgcaggttcatttat

SEQ ID NO: 111491 - DNA, 25 bp, Saccharomyces pastorianus
aggagctgtcattctggctgctcaa

SEQ ID NO: 111492 - DNA, 25 bp, Saccharomyces pastorianus
atttatctatgggacttctggtaag

SEQ ID NO: 111493 - DNA, 25 bp, Saccharomyces pastorianus
acgcatgccatctagtttcgatgtt

SEQ ID NO: 111494 - DNA, 25 bp, Saccharomyces pastorianus
gaatgaagacccttgagaacgaaga

SEQ ID NO: 111495 - DNA, 25 bp, Saccharomyces pastorianus
ggctgctcaaaatgttcgtcttggt

SEQ ID NO: 111496 - DNA, 25 bp, Saccharomyces pastorianus
gaaagctcagtactacttccgttgg

SEQ ID NO: 111497 - DNA, 25 bp, Saccharomyces pastorianus
gtgcttgctgactacaggagctgtc

SEQ ID NO: 111498 - DNA, 25 bp, Saccharomyces pastorianus
gtacccattgggtgcttgctgacta

SEQ ID NO: 111499 - DNA, 25 bp, Saccharomyces pastorianus
gtgggtctacaagcggccacactag

SEQ ID NO: 111500 - DNA, 25 bp, Saccharomyces pastorianus
atggttccaaaccttgtgctcgcaa

SEQ ID NO: 111501 - DNA, 25 bp, Saccharomyces pastorianus
aggacgcgctagatgagttgttcaa

SEQ ID NO: 111502 - DNA, 25 bp, Saccharomyces pastorianus
aaaggctatcggtctattccaagta

SEQ ID NO: 111503 - DNA, 25 bp, Saccharomyces pastorianus
aacacccctgacgttggacaattga

SEQ ID NO: 111504 - DNA, 25 bp, Saccharomyces pastorianus
ggttacactactcccctatgtgaag

SEQ ID NO: 111505 - DNA, 25 bp, Saccharomyces pastorianus
gaacttcgtgctcttttgggttaca

SEQ ID NO: 111506 - DNA, 25 bp, Saccharomyces pastorianus
gactctttgaacgaattgctgctga

SEQ ID NO: 111507 - DNA, 25 bp, Saccharomyces pastorianus
atagcggagcataacgtccttgacg

SEQ ID NO: 111508 - DNA, 25 bp, Saccharomyces pastorianus
gtccttgacgtcgtactcaggtaca

SEQ ID NO: 111509 - DNA, 25 bp, Saccharomyces pastorianus
gaacacactatatcctcaagactct

SEQ ID NO: 111510 - DNA, 25 bp, Saccharomyces pastorianus
caggtacataattccagacccggta

SEQ ID NO: 111511 - DNA, 25 bp, Saccharomyces pastorianus
aaggcctcatcattccctaaatagg

SEQ ID NO: 111512 - DNA, 25 bp, Saccharomyces pastorianus
gagtcaaggcggacatacttcgtga

SEQ ID NO: 111513 - DNA, 25 bp, Saccharomyces pastorianus
gaaaaatgtcctgctccatcgaagg

SEQ ID NO: 111514 - DNA, 25 bp, Saccharomyces pastorianus
agccaggctttaacattccatctaa

SEQ ID NO: 111515 - DNA, 25 bp, Saccharomyces pastorianus
gaagaagaacctcgtcccaggaact

SEQ ID NO: 111516 - DNA, 25 bp, Saccharomyces pastorianus
gatggaagctcatgttctcgttctt

SEQ ID NO: 111517 - DNA, 25 bp, Saccharomyces pastorianus
ggaactatctattcttcaggctgaa

SEQ ID NO: 111518 - DNA, 25 bp, Saccharomyces pastorianus
aaagccaagcgtccggtaagcaatc

SEQ ID NO: 111519 - DNA, 25 bp, Saccharomyces pastorianus
gttagctgaatcttgccatatgact

SEQ ID NO: 111520 - DNA, 25 bp, Saccharomyces pastorianus
ttcttcaccgctggaaaatacgccg

SEQ ID NO: 111521 - DNA, 25 bp, Saccharomyces pastorianus
gcatagatcattctccatccaaagc

SEQ ID NO: 111522 - DNA, 25 bp, Saccharomyces pastorianus
tcttctgcatttgatcgggaccgaa

SEQ ID NO: 111523 - DNA, 25 bp, Saccharomyces pastorianus
gcttttaccgagcaatgtagccaag

SEQ ID NO: 111524 - DNA, 25 bp, Saccharomyces pastorianus
cacggacgttggcttcttttaatga

SEQ ID NO: 111525 - DNA, 25 bp, Saccharomyces pastorianus
atcagatggcgtttcattttgcaac

SEQ ID NO: 111526 - DNA, 25 bp, Saccharomyces pastorianus
cctactggtcctactacgatatctt

SEQ ID NO: 111527 - DNA, 25 bp, Saccharomyces pastorianus
aaaagtgtgacgtctgcctactggt

SEQ ID NO: 111528 - DNA, 25 bp, Saccharomyces pastorianus
gaaggtaccctttctgagatactca

SEQ ID NO: 111529 - DNA, 25 bp, Saccharomyces pastorianus
gtcttattttatacccctattagct

SEQ ID NO: 111530 - DNA, 25 bp, Saccharomyces pastorianus
ggaatgtgtcgctattttaacgcta

SEQ ID NO: 111531 - DNA, 25 bp, Saccharomyces pastorianus
gacagtgggccaaagcgcttaactt

SEQ ID NO: 111532 - DNA, 25 bp, Saccharomyces pastorianus
ttattgtatcccatagtctcccaaa

SEQ ID NO: 111533 - DNA, 25 bp, Saccharomyces pastorianus
ggtaagctacctggcgaatgtttta

SEQ ID NO: 111534 - DNA, 25 bp, Saccharomyces pastorianus
gaacccaggtcttttccagaagttg

SEQ ID NO: 111535 - DNA, 25 bp, Saccharomyces pastorianus
attccagcaggttccaacgttatca

SEQ ID NO: 111536 - DNA, 25 bp, Saccharomyces pastorianus
gaacaactcgaagccaaccttttgg

SEQ ID NO: 111537 - DNA, 25 bp, Saccharomyces pastorianus
ttcttacccattttcaggaacccag

SEQ ID NO: 111538 - DNA, 25 bp, Saccharomyces pastorianus
aggagtacggttctgatctttttga

SEQ ID NO: 111539 - DNA, 25 bp, Saccharomyces pastorianus
gcagccggcggattagttgaacaac

SEQ ID NO: 111540 - DNA, 25 bp, Saccharomyces pastorianus
gtgttggtttcgttccagtcaggaa

SEQ ID NO: 111541 - DNA, 25 bp, Saccharomyces pastorianus
ttagctttggccctaggtgttggtt

SEQ ID NO: 111542 - DNA, 25 bp, Saccharomyces pastorianus
gttcttgttcggaccaactttagct

SEQ ID NO: 111543 - DNA, 25 bp, Saccharomyces pastorianus
gaatgctccagtgttcactttactg

SEQ ID NO: 111544 - DNA, 25 bp, Saccharomyces pastorianus
gattatcggtcaagatccctaccac

SEQ ID NO: 111545 - DNA, 25 bp, Saccharomyces pastorianus
gcatggcttggcttttagcgtcaaa

SEQ ID NO: 111546 - DNA, 25 bp, Saccharomyces pastorianus
ttggctatacaatacccgcggagag

SEQ ID NO: 111547 - DNA, 25 bp, Saccharomyces pastorianus
agagtctctgttgggatctacttcc

SEQ ID NO: 111548 - DNA, 25 bp, Saccharomyces pastorianus
gactggagtgttgttcctggaacgt

SEQ ID NO: 111549 - DNA, 25 bp, Saccharomyces pastorianus
atgaagtcagtgcatccgtctccat

SEQ ID NO: 111550 - DNA, 25 bp, Saccharomyces pastorianus
gtagttcagttgttgatccaggaca

SEQ ID NO: 111551 - DNA, 25 bp, Saccharomyces pastorianus
atccaggacagagaggccgacggta

SEQ ID NO: 111552 - DNA, 25 bp, Saccharomyces pastorianus
gcatccgtctccattaagtgcaagt

SEQ ID NO: 111553 - DNA, 25 bp, Saccharomyces pastorianus
acaactttaatcaggcgcatggctt

SEQ ID NO: 111554 - DNA, 25 bp, Saccharomyces pastorianus
ccagcaccaccgtcattaaagaaca

SEQ ID NO: 111555 - DNA, 25 bp, Saccharomyces pastorianus
tttcgataacggttcctcaagcctt

SEQ ID NO: 111556 - DNA, 25 bp, Saccharomyces pastorianus
tcatcttgtggtatatccgccagca

SEQ ID NO: 111557 - DNA, 25 bp, Saccharomyces pastorianus
gaagcttttctccatgatattgtca

SEQ ID NO: 111558 - DNA, 25 bp, Saccharomyces pastorianus
atgctatccctttcattgcacgtga

SEQ ID NO: 111559 - DNA, 25 bp, Saccharomyces pastorianus
gtcattaggcatacttctaccaagt

SEQ ID NO: 111560 - DNA, 25 bp, Saccharomyces pastorianus
acaatttggcgattttctggctaaa

SEQ ID NO: 111561 - DNA, 25 bp, Saccharomyces pastorianus
ggcatgtgttctattctacttcttt

SEQ ID NO: 111562 - DNA, 25 bp, Saccharomyces pastorianus
tacattgtgatgtccgcactgtctg

SEQ ID NO: 111563 - DNA, 25 bp, Saccharomyces pastorianus
aagccttcaacgttcaggaatttgt

SEQ ID NO: 111564 - DNA, 25 bp, Saccharomyces pastorianus
ctgtgcttttaatttatgtgcccaa

SEQ ID NO: 111565 - DNA, 25 bp, Saccharomyces pastorianus
ggactattgtcgtcatttttggcat

SEQ ID NO: 111566 - DNA, 25 bp, Saccharomyces pastorianus
gtcgttcatttcctttgtgggcata

SEQ ID NO: 111567 - DNA, 25 bp, Saccharomyces pastorianus
attgagcataacgatacccctagca

SEQ ID NO: 111568 - DNA, 25 bp, Saccharomyces pastorianus
gcgctctatttatttggtgctaccc

SEQ ID NO: 111569 - DNA, 25 bp, Saccharomyces pastorianus
ggctttgttggtctctttaatttgc

SEQ ID NO: 111570 - DNA, 25 bp, Saccharomyces pastorianus
taaccgtcaccgtaggattgagcat

SEQ ID NO: 111571 - DNA, 25 bp, Saccharomyces pastorianus
ttctctctgcccaaagatcctaaag

SEQ ID NO: 111572 - DNA, 25 bp, Saccharomyces pastorianus
ttttttggctgggaaccattctctc

SEQ ID NO: 111573 - DNA, 25 bp, Saccharomyces pastorianus
aaatcagattctcatcagcgctacc

SEQ ID NO: 111574 - DNA, 25 bp, Saccharomyces pastorianus
aatcttcgtcaattgtctcatcaca

SEQ ID NO: 111575 - DNA, 25 bp, Saccharomyces pastorianus
acaaaaccatgtctgcgctctattt

SEQ ID NO: 111576 - DNA, 25 bp, Saccharomyces pastorianus
taacgatgccgtgcgagttctgata

SEQ ID NO: 111577 - DNA, 25 bp, Saccharomyces pastorianus
ggccccaacggcagcagttataaag

SEQ ID NO: 111578 - DNA, 25 bp, Saccharomyces pastorianus
ggatatcgcagtggcagctcataca

SEQ ID NO: 111579 - DNA, 25 bp, Saccharomyces pastorianus
gtaatagatatcgtggaggccccaa

SEQ ID NO: 111580 - DNA, 25 bp, Saccharomyces pastorianus
accagcaagtgggttccttggccaa

SEQ ID NO: 111581 - DNA, 25 bp, Saccharomyces pastorianus
gaagcagcggtaactactccaacta

SEQ ID NO: 111582 - DNA, 25 bp, Saccharomyces pastorianus
gcggtaactataacagcagcggtac

SEQ ID NO: 111583 - DNA, 25 bp, Saccharomyces pastorianus
aatattccattttcaaaccagcaag

SEQ ID NO: 111584 - DNA, 25 bp, Saccharomyces pastorianus
aagggttaacctcagattcatcttt

SEQ ID NO: 111585 - DNA, 25 bp, Saccharomyces pastorianus
tcatctttagatgcctcaggaaata

SEQ ID NO: 111586 - DNA, 25 bp, Saccharomyces pastorianus
aacaatcgtggtaatcgcggcggat

SEQ ID NO: 111587 - DNA, 25 bp, Saccharomyces pastorianus
gatttcacgaactcaacatccaata

SEQ ID NO: 111588 - DNA, 25 bp, Saccharomyces pastorianus
gatctggaagacattcatcgatact

SEQ ID NO: 111589 - DNA, 25 bp, Saccharomyces pastorianus
aatgatcttttgtggtccgatccca

SEQ ID NO: 111590 - DNA, 25 bp, Saccharomyces pastorianus
gatccactagatagtgcagctttga

SEQ ID NO: 111591 - DNA, 25 bp, Saccharomyces pastorianus
gctaacgtcacaagggtttatggat

SEQ ID NO: 111592 - DNA, 25 bp, Saccharomyces pastorianus
atgatagaagtctcgttacggtgtt

SEQ ID NO: 111593 - DNA, 25 bp, Saccharomyces pastorianus
gtggattgtcgccagttttaaattc

SEQ ID NO: 111594 - DNA, 25 bp, Saccharomyces pastorianus
aatacattaccattagctgctatcg

SEQ ID NO: 111595 - DNA, 25 bp, Saccharomyces pastorianus
gttttccgcgccaaattattgtggt

SEQ ID NO: 111596 - DNA, 25 bp, Saccharomyces pastorianus
tgtagttaggcctactgatgtgcca

SEQ ID NO: 111597 - DNA, 25 bp, Saccharomyces pastorianus
tagctgctatcgtagccggaaagat

SEQ ID NO: 111598 - DNA, 25 bp, Saccharomyces pastorianus
aacgtcgttgtaacatcaagatctg

SEQ ID NO: 111599 - DNA, 25 bp, Saccharomyces pastorianus
ttattgcccgaacacatccgtgagg

SEQ ID NO: 111600 - DNA, 25 bp, Saccharomyces pastorianus
tataacaacagtcccttattgcccg

SEQ ID NO: 111601 - DNA, 25 bp, Saccharomyces pastorianus
agtacaataagctcgtcctccaatt

SEQ ID NO: 111602 - DNA, 25 bp, Saccharomyces pastorianus
ggcaactcgttgctacagtccaaat

SEQ ID NO: 111603 - DNA, 25 bp, Saccharomyces pastorianus
gaacctgatttctacttcgacgatg

SEQ ID NO: 111604 - DNA, 25 bp, Saccharomyces pastorianus
atattcgtgtttttctgcaagcggt

SEQ ID NO: 111605 - DNA, 25 bp, Saccharomyces pastorianus
tatcaatccgatagcgttcccgaag

SEQ ID NO: 111606 - DNA, 25 bp, Saccharomyces pastorianus
atccgtgaggcgtggagactctacc

SEQ ID NO: 111607 - DNA, 25 bp, Saccharomyces pastorianus
gtctgcagtcggacactttgcctaa

SEQ ID NO: 111608 - DNA, 25 bp, Saccharomyces pastorianus
tttgcctaacgcttactggagaact

SEQ ID NO: 111609 - DNA, 25 bp, Saccharomyces pastorianus
aagcgcgaatctacgctgggcaact

SEQ ID NO: 111610 - DNA, 25 bp, Saccharomyces pastorianus
aacgccgccttctaaagtcaagaca

SEQ ID NO: 111611 - DNA, 25 bp, Saccharomyces pastorianus
agatggtcttattgagtgcgccaga

SEQ ID NO: 111612 - DNA, 25 bp, Saccharomyces pastorianus
tggagcaagatgtctttgtcccctg

SEQ ID NO: 111613 - DNA, 25 bp, Saccharomyces pastorianus
gacgggctgaacttaccacacaaaa

SEQ ID NO: 111614 - DNA, 25 bp, Saccharomyces pastorianus
actatcacttataccgagagggcga

SEQ ID NO: 111615 - DNA, 25 bp, Saccharomyces pastorianus
aggtgatcaggcacgttctatcgaa

SEQ ID NO: 111616 - DNA, 25 bp, Saccharomyces pastorianus
agtgcatcactggtctacaagggag

SEQ ID NO: 111617 - DNA, 25 bp, Saccharomyces pastorianus
ttcgccatctcaattgctgtagtgc

SEQ ID NO: 111618 - DNA, 25 bp, Saccharomyces pastorianus
gcagctcccgtagaggttaccatga

SEQ ID NO: 111619 - DNA, 25 bp, Saccharomyces pastorianus
ttctatcgaaactacgtcagggcgg

SEQ ID NO: 111620 - DNA, 25 bp, Saccharomyces pastorianus
aggagcgttccgaatacttgcagcg

SEQ ID NO: 111621 - DNA, 25 bp, Saccharomyces pastorianus
atccacttgggcgtcgggtggtgaa

SEQ ID NO: 111622 - DNA, 25 bp, Saccharomyces pastorianus
gtggtaccggtgataggtcagccta

SEQ ID NO: 111623 - DNA, 25 bp, Saccharomyces pastorianus
gtggtgaatctaatggtgccatgtc

SEQ ID NO: 111624 - DNA, 25 bp, Saccharomyces pastorianus
aaataggtctgcttggaacaaccaa

SEQ ID NO: 111625 - DNA, 25 bp, Saccharomyces pastorianus
aaggtaatggaggtgcatccgcttg

SEQ ID NO: 111626 - DNA, 25 bp, Saccharomyces pastorianus
ataagtcaaactatggtggtaacag

SEQ ID NO: 111627 - DNA, 25 bp, Saccharomyces pastorianus
ggtactggtgctacttctacttggg

SEQ ID NO: 111628 - DNA, 25 bp, Saccharomyces pastorianus
taaaagtacaagagatggcggagct

SEQ ID NO: 111629 - DNA, 25 bp, Saccharomyces pastorianus
cgatggaaataggtctgcttggaac

SEQ ID NO: 111630 - DNA, 25 bp, Saccharomyces pastorianus
accggtgataggtcagcctacggcg

SEQ ID NO: 111631 - DNA, 25 bp, Saccharomyces pastorianus
ggcggccaaggtactggtgctactt

SEQ ID NO: 111632 - DNA, 25 bp, Saccharomyces pastorianus
tgacttatttccttggttgttccaa

SEQ ID NO: 111633 - DNA, 25 bp, Saccharomyces pastorianus
cgagattcagtatttcatcgaaaca

SEQ ID NO: 111634 - DNA, 25 bp, Saccharomyces pastorianus
ttattattgttatttcctccccagg

SEQ ID NO: 111635 - DNA, 25 bp, Saccharomyces pastorianus
tccgccatctcttgtacttttatta

SEQ ID NO: 111636 - DNA, 25 bp, Saccharomyces pastorianus
ttcttcttgggtgatattggttctc

SEQ ID NO: 111637 - DNA, 25 bp, Saccharomyces pastorianus
tggtgattaatgacctccccatgta

SEQ ID NO: 111638 - DNA, 25 bp, Saccharomyces pastorianus
gtactgttaccaccatagtttgact

SEQ ID NO: 111639 - DNA, 25 bp, Saccharomyces pastorianus
attggttctccttttggtgattaat

SEQ ID NO: 111640 - DNA, 25 bp, Saccharomyces pastorianus
gacctatttccatcgtcttggttac

SEQ ID NO: 111641 - DNA, 25 bp, Saccharomyces pastorianus
ttggttaccccatgcagaagctccg

SEQ ID NO: 111642 - DNA, 25 bp, Saccharomyces pastorianus
ggttgttccaagcagacctatttcc

SEQ ID NO: 111643 - DNA, 25 bp, Saccharomyces pastorianus
gcacctttggttactcaggtcagat

SEQ ID NO: 111644 - DNA, 25 bp, Saccharomyces pastorianus
ataaagctattgtctacagcggcaa

SEQ ID NO: 111645 - DNA, 25 bp, Saccharomyces pastorianus
ggttactcaggtcagatacgatcct

SEQ ID NO: 111646 - DNA, 25 bp, Saccharomyces pastorianus
aaaggtgcacctttggttactcagg

SEQ ID NO: 111647 - DNA, 25 bp, Saccharomyces pastorianus
gaaacggcatgtgcttttcaaagaa

SEQ ID NO: 111648 - DNA, 25 bp, Saccharomyces pastorianus
tacagcggcaagtggatactctcgt

SEQ ID NO: 111649 - DNA, 25 bp, Saccharomyces pastorianus
ggatactctcgttacatctcgatta

SEQ ID NO: 111650 - DNA, 25 bp, Saccharomyces pastorianus
tacgatcctgtggtgaaacggcatg

SEQ ID NO: 111651 - DNA, 25 bp, Saccharomyces pastorianus
aagtggatactctcgttacatctcg

SEQ ID NO: 111652 - DNA, 25 bp, Saccharomyces pastorianus
catctcgattaagaaaggtgcacct

SEQ ID NO: 111653 - DNA, 25 bp, Saccharomyces pastorianus
cctgtggtgaaacggcatgtgcttt

SEQ ID NO: 111654 - DNA, 25 bp, Saccharomyces pastorianus
aaaacttagctaatttggccacatt

SEQ ID NO: 111655 - DNA, 25 bp, Saccharomyces pastorianus
aagtcctcgttagcgaagacctggc

SEQ ID NO: 111656 - DNA, 25 bp, Saccharomyces pastorianus
aaatgctgcggttggtttagttgct

SEQ ID NO: 111657 - DNA, 25 bp, Saccharomyces pastorianus
aaggaagttactgctgctctagaaa

SEQ ID NO: 111658 - DNA, 25 bp, Saccharomyces pastorianus
atgttccatgtcgacgtggctagga

SEQ ID NO: 111659 - DNA, 25 bp, Saccharomyces pastorianus
aagacctggcggacaatgatgatga

SEQ ID NO: 111660 - DNA, 25 bp, Saccharomyces pastorianus
tgaaaccgggtggtacctttgctgt

SEQ ID NO: 111661 - DNA, 25 bp, Saccharomyces pastorianus
gaaaaagtaggtctagccccagaag

SEQ ID NO: 111662 - DNA, 25 bp, Saccharomyces pastorianus
tgcaattgaggccacatgtcacgct

SEQ ID NO: 111663 - DNA, 25 bp, Saccharomyces pastorianus
ccaatgatgcttttcgtcgctagga

SEQ ID NO: 111664 - DNA, 25 bp, Saccharomyces pastorianus
agaactgtggtttcgaagtcctcgt

SEQ ID NO: 111665 - DNA, 25 bp, Saccharomyces pastorianus
acttcatttttatcgccttacgaag

SEQ ID NO: 111666 - DNA, 25 bp, Saccharomyces pastorianus
ggtacacttcatttttatcgcctta

SEQ ID NO: 111667 - DNA, 25 bp, Saccharomyces pastorianus
tacacttcatttttatcgccttacg

SEQ ID NO: 111668 - DNA, 25 bp, Saccharomyces pastorianus
acacttcatttttatcgccttacga

SEQ ID NO: 111669 - DNA, 25 bp, Saccharomyces pastorianus
cgttttatgcgaagattggtgagaa

SEQ ID NO: 111670 - DNA, 25 bp, Saccharomyces pastorianus
tggtacacttcatttttatcgcctt

SEQ ID NO: 111671 - DNA, 25 bp, Saccharomyces pastorianus
tcatttttatcgccttacgaagcat

SEQ ID NO: 111672 - DNA, 25 bp, Saccharomyces pastorianus
cttcatttttatcgccttacgaagc

SEQ ID NO: 111673 - DNA, 25 bp, Saccharomyces pastorianus
tggtgagaaacctccaatacttgct

SEQ ID NO: 111674 - DNA, 25 bp, Saccharomyces pastorianus
ggtgagaaacctccaatacttgctg

SEQ ID NO: 111675 - DNA, 25 bp, Saccharomyces pastorianus
tgcgaagattggtgagaaacctcca

SEQ ID NO: 111676 - DNA, 25 bp, Saccharomyces pastorianus
aaagccgctaatatgtcagacgatg

SEQ ID NO: 111677 - DNA, 25 bp, Saccharomyces pastorianus
ggtttatgttccgagctaatggcaa

SEQ ID NO: 111678 - DNA, 25 bp, Saccharomyces pastorianus
aatcccagcctactgcaaagcagca

SEQ ID NO: 111679 - DNA, 25 bp, Saccharomyces pastorianus
aatcacaacctttctctgaatctca

SEQ ID NO: 111680 - DNA, 25 bp, Saccharomyces pastorianus
gagctcccgaaacaatatctacaat

SEQ ID NO: 111681 - DNA, 25 bp, Saccharomyces pastorianus
gtcgttccatctaaggaaggctctt

SEQ ID NO: 111682 - DNA, 25 bp, Saccharomyces pastorianus
aataatgctgcctctaacaccaatc

SEQ ID NO: 111683 - DNA, 25 bp, Saccharomyces pastorianus
acctttctctgaatctcaatctcaa

SEQ ID NO: 111684 - DNA, 25 bp, Saccharomyces pastorianus
attaacgaagaaccagagctcccga

SEQ ID NO: 111685 - DNA, 25 bp, Saccharomyces pastorianus
tatctacaatcggtaccaggaaatg

SEQ ID NO: 111686 - DNA, 25 bp, Saccharomyces pastorianus
gaggatataccttttatcaacgcaa

SEQ ID NO: 111687 - DNA, 25 bp, Saccharomyces pastorianus
taaagagttccatcaatgctatgag

SEQ ID NO: 111688 - DNA, 25 bp, Saccharomyces pastorianus
tacgacttcctcgaattttagccat

SEQ ID NO: 111689 - DNA, 25 bp, Saccharomyces pastorianus
gtcaggcccacaaatgtacatacca

SEQ ID NO: 111690 - DNA, 25 bp, Saccharomyces pastorianus
cgttactacagcacatcgttctatt

SEQ ID NO: 111691 - DNA, 25 bp, Saccharomyces pastorianus
ctttatcagaacagtcaggcccaca

SEQ ID NO: 111692 - DNA, 25 bp, Saccharomyces pastorianus
gatggtgacgatgcttctttatcag

SEQ ID NO: 111693 - DNA, 25 bp, Saccharomyces pastorianus
gtctttaagcggcatagataaccct

SEQ ID NO: 111694 - DNA, 25 bp, Saccharomyces pastorianus
gacacaactgtcgaactctaatacg

SEQ ID NO: 111695 - DNA, 25 bp, Saccharomyces pastorianus
gttttatcaagtgaacctcatccaa

SEQ ID NO: 111696 - DNA, 25 bp, Saccharomyces pastorianus
aattctcacaaacctaattccaagg

SEQ ID NO: 111697 - DNA, 25 bp, Saccharomyces pastorianus
tagataaccctactcatgccactaa

SEQ ID NO: 111698 - DNA, 25 bp, Saccharomyces pastorianus
gagaatgatccaaacttccactatc

SEQ ID NO: 111699 - DNA, 25 bp, Saccharomyces pastorianus
agatccaatggtctcctaaatttaa

SEQ ID NO: 111700 - DNA, 25 bp, Saccharomyces pastorianus
tatggcgttccaaagaccgacagcg

SEQ ID NO: 111701 - DNA, 25 bp, Saccharomyces pastorianus
ataagttgcgatgacgctggcgccc

SEQ ID NO: 111702 - DNA, 25 bp, Saccharomyces pastorianus
ataacggtaactcagagccccaggg

SEQ ID NO: 111703 - DNA, 25 bp, Saccharomyces pastorianus
cacatctgtttttctgtatccgata

SEQ ID NO: 111704 - DNA, 25 bp, Saccharomyces pastorianus
gggctcagtaggtaacaagttcaat

SEQ ID NO: 111705 - DNA, 25 bp, Saccharomyces pastorianus
agccccagggttatggtcacatctg

SEQ ID NO: 111706 - DNA, 25 bp, Saccharomyces pastorianus
gaccgacagcgttttttcatgtgaa

SEQ ID NO: 111707 - DNA, 25 bp, Saccharomyces pastorianus
acattgcgtttgctttagaccctga

SEQ ID NO: 111708 - DNA, 25 bp, Saccharomyces pastorianus
tatactttcttggttatggcgttcc

SEQ ID NO: 111709 - DNA, 25 bp, Saccharomyces pastorianus
taatgatgccatcaatattcgccta

SEQ ID NO: 111710 - DNA, 25 bp, Saccharomyces pastorianus
gttgggaagacctccttgatgcacc

SEQ ID NO: 111711 - DNA, 25 bp, Saccharomyces pastorianus
aatcatcctaggtgactctggtgtt

SEQ ID NO: 111712 - DNA, 25 bp, Saccharomyces pastorianus
gcatgcgaacgtaaactcaccagaa

SEQ ID NO: 111713 - DNA, 25 bp, Saccharomyces pastorianus
gtgaccaatgccagttcctttgaga

SEQ ID NO: 111714 - DNA, 25 bp, Saccharomyces pastorianus
gatgaatttctagtgcatgcgaacg

SEQ ID NO: 111715 - DNA, 25 bp, Saccharomyces pastorianus
caaggagtgctttacaacagaatca

SEQ ID NO: 111716 - DNA, 25 bp, Saccharomyces pastorianus
tgtatcagaaaagtccgctcaggag

SEQ ID NO: 111717 - DNA, 25 bp, Saccharomyces pastorianus
tccgctcaggagcttgctaaatcat

SEQ ID NO: 111718 - DNA, 25 bp, Saccharomyces pastorianus
cggtgataaagttgccaccatgcaa

SEQ ID NO: 111719 - DNA, 25 bp, Saccharomyces pastorianus
gccataaacgttgataccgcatttg

SEQ ID NO: 111720 - DNA, 25 bp, Saccharomyces pastorianus
gaacagttactcttgtgctactcaa

SEQ ID NO: 111721 - DNA, 25 bp, Saccharomyces pastorianus
gtgtcaaattctgattctgcttttt

SEQ ID NO: 111722 - DNA, 25 bp, Saccharomyces pastorianus
gaacaataagccttttgtgtcaaat

SEQ ID NO: 111723 - DNA, 25 bp, Saccharomyces pastorianus
gatagtaaatcccattcaagcggca

SEQ ID NO: 111724 - DNA, 25 bp, Saccharomyces pastorianus
gtgctactcaactttcgtacaatac

SEQ ID NO: 111725 - DNA, 25 bp, Saccharomyces pastorianus
aaggcatatcttgaacagttactct

SEQ ID NO: 111726 - DNA, 25 bp, Saccharomyces pastorianus
tcaagcggcagtttcaaagaacaat

SEQ ID NO: 111727 - DNA, 25 bp, Saccharomyces pastorianus
aaatcccattcaagcggcagtttca

SEQ ID NO: 111728 - DNA, 25 bp, Saccharomyces pastorianus
gtacatcctttgaaacaaggcatat

SEQ ID NO: 111729 - DNA, 25 bp, Saccharomyces pastorianus
tattttttcatccttcaattttgtg

SEQ ID NO: 111730 - DNA, 25 bp, Saccharomyces pastorianus
gatctttgaatgtacatcctttgaa

SEQ ID NO: 111731 - DNA, 25 bp, Saccharomyces pastorianus
aaaatatagccaacacctccggcca

SEQ ID NO: 111732 - DNA, 25 bp, Saccharomyces pastorianus
agacaaggtccgcttctaccatggc

SEQ ID NO: 111733 - DNA, 25 bp, Saccharomyces pastorianus
ggtgcccaaacgagacagccaggta

SEQ ID NO: 111734 - DNA, 25 bp, Saccharomyces pastorianus
caacggcaacttccagatatgtgat

SEQ ID NO: 111735 - DNA, 25 bp, Saccharomyces pastorianus
ttggacacaccctaggtgcaggtat

SEQ ID NO: 111736 - DNA, 25 bp, Saccharomyces pastorianus
ggctccagttcatccacaacaacaa

SEQ ID NO: 111737 - DNA, 25 bp, Saccharomyces pastorianus
agatggcctccactgctgcaggtgt

SEQ ID NO: 111738 - DNA, 25 bp, Saccharomyces pastorianus
gaggatcatcaagacctatatcgag

SEQ ID NO: 111739 - DNA, 25 bp, Saccharomyces pastorianus
ggccaaacccaaacggaccagcagt

SEQ ID NO: 111740 - DNA, 25 bp, Saccharomyces pastorianus
gttgccgttggtagcaccattggac

SEQ ID NO: 111741 - DNA, 25 bp, Saccharomyces pastorianus
atcgagatcgagacctactcagaca

SEQ ID NO: 111742 - DNA, 25 bp, Saccharomyces pastorianus
atttcttcactgcagaacacacctg

SEQ ID NO: 111743 - DNA, 25 bp, Saccharomyces pastorianus
ttactattgaaacagcccggtgctt

SEQ ID NO: 111744 - DNA, 25 bp, Saccharomyces pastorianus
gacgttcattcacacttgcaaccaa

SEQ ID NO: 111745 - DNA, 25 bp, Saccharomyces pastorianus
tagtacccaaacgaagagccacttg

SEQ ID NO: 111746 - DNA, 25 bp, Saccharomyces pastorianus
aacacacctgttatcgaaactccct

SEQ ID NO: 111747 - DNA, 25 bp, Saccharomyces pastorianus
gcccggtgcttacaaggtgagccta

SEQ ID NO: 111748 - DNA, 25 bp, Saccharomyces pastorianus
gagatctctatatttaccgtttacc

SEQ ID NO: 111749 - DNA, 25 bp, Saccharomyces pastorianus
atttttcatgttatcgtgtctttgg

SEQ ID NO: 111750 - DNA, 25 bp, Saccharomyces pastorianus
ggctgggccagggagatctctatat

SEQ ID NO: 111751 - DNA, 25 bp, Saccharomyces pastorianus
gacttatcacgcacgattcatgttc

SEQ ID NO: 111752 - DNA, 25 bp, Saccharomyces pastorianus
tgtttcacaacaattctccggcata

SEQ ID NO: 111753 - DNA, 25 bp, Saccharomyces pastorianus
aaactacgagtagtatctgcaaaca

SEQ ID NO: 111754 - DNA, 25 bp, Saccharomyces pastorianus
aaccatgccggtctcaaactgaatg

SEQ ID NO: 111755 - DNA, 25 bp, Saccharomyces pastorianus
aacacgtgccttccaggattgggca

SEQ ID NO: 111756 - DNA, 25 bp, Saccharomyces pastorianus
agtgactccaaaactatatccggta

SEQ ID NO: 111757 - DNA, 25 bp, Saccharomyces pastorianus
tagagcaatcaaacagagcttggtt

SEQ ID NO: 111758 - DNA, 25 bp, Saccharomyces pastorianus
aaaattgaactccaaccatgccggt

SEQ ID NO: 111759 - DNA, 25 bp, Saccharomyces pastorianus
tgagtgggaaaagctcgtcacaagc

SEQ ID NO: 111760 - DNA, 25 bp, Saccharomyces pastorianus
gaaatatcgggaacgttatcgccaa

SEQ ID NO: 111761 - DNA, 25 bp, Saccharomyces pastorianus
ggaagagtttacaatctttcaggaa

SEQ ID NO: 111762 - DNA, 25 bp, Saccharomyces pastorianus
aattttcacggacatcttactttct

SEQ ID NO: 111763 - DNA, 25 bp, Saccharomyces pastorianus
tcagtggagcagagtacgacaggat

SEQ ID NO: 111764 - DNA, 25 bp, Saccharomyces pastorianus
ggatttactctttgctctcgaaaat

SEQ ID NO: 111765 - DNA, 25 bp, Saccharomyces pastorianus
gacatgatgtcaagtgcctgcgaaa

SEQ ID NO: 111766 - DNA, 25 bp, Saccharomyces pastorianus
aaatcttcaggcaaagtcgcctccg

SEQ ID NO: 111767 - DNA, 25 bp, Saccharomyces pastorianus
gtatggttggctaacttcatcagta

SEQ ID NO: 111768 - DNA, 25 bp, Saccharomyces pastorianus
gcgcaacggcgttcagactattatt

SEQ ID NO: 111769 - DNA, 25 bp, Saccharomyces pastorianus
gaagtgaagtttctgcggctttaag

SEQ ID NO: 111770 - DNA, 25 bp, Saccharomyces pastorianus
aataagccaacgtccttgggagcaa

SEQ ID NO: 111771 - DNA, 25 bp, Saccharomyces pastorianus
ggctttaagagccattgcactaatt

SEQ ID NO: 111772 - DNA, 25 bp, Saccharomyces pastorianus
ttaccattccttcatccggaacaag

SEQ ID NO: 111773 - DNA, 25 bp, Saccharomyces pastorianus
aagagacgttacacagagcatcgaa

SEQ ID NO: 111774 - DNA, 25 bp, Saccharomyces pastorianus
gcatcgaacgttacggctggcctta

SEQ ID NO: 111775 - DNA, 25 bp, Saccharomyces pastorianus
ggattactgctggaacggcacacta

SEQ ID NO: 111776 - DNA, 25 bp, Saccharomyces pastorianus
aaagcggtgctattgcctctgcaat

SEQ ID NO: 111777 - DNA, 25 bp, Saccharomyces pastorianus
ttcttcttcctctacggcaaacaaa

SEQ ID NO: 111778 - DNA, 25 bp, Saccharomyces pastorianus
aaagcgaatgctgcggctatttcct

SEQ ID NO: 111779 - DNA, 25 bp, Saccharomyces pastorianus
aagaaagcctaaatgccaccttgcc

SEQ ID NO: 111780 - DNA, 25 bp, Saccharomyces pastorianus
ggcacactaagtacctcagctaatc

SEQ ID NO: 111781 - DNA, 25 bp, Saccharomyces pastorianus
atgggcaactttacggatgactcta

SEQ ID NO: 111782 - DNA, 25 bp, Saccharomyces pastorianus
ggtattccaataacggctctcttag

SEQ ID NO: 111783 - DNA, 25 bp, Saccharomyces pastorianus
ggttcatcaacctccggaaatacta

SEQ ID NO: 111784 - DNA, 25 bp, Saccharomyces pastorianus
caatctctgaggctactgacggtat

SEQ ID NO: 111785 - DNA, 25 bp, Saccharomyces pastorianus
atgtcacttctaactcaaactcttc

SEQ ID NO: 111786 - DNA, 25 bp, Saccharomyces pastorianus
tgatttactgattcttccaccaggc

SEQ ID NO: 111787 - DNA, 25 bp, Saccharomyces pastorianus
gtcaacatctgcgaaggttccttca

SEQ ID NO: 111788 - DNA, 25 bp, Saccharomyces pastorianus
ggcatttatcatcgtttcaccttga

SEQ ID NO: 111789 - DNA, 25 bp, Saccharomyces pastorianus
aatggcaagctatcaacaggtcaaa

SEQ ID NO: 111790 - DNA, 25 bp, Saccharomyces pastorianus
gaacagaactttccctggatgaatt

SEQ ID NO: 111791 - DNA, 25 bp, Saccharomyces pastorianus
aaggttgactccgattatcgcgcac

SEQ ID NO: 111792 - DNA, 25 bp, Saccharomyces pastorianus
ggatgcttccacaccagagaactgg

SEQ ID NO: 111793 - DNA, 25 bp, Saccharomyces pastorianus
ggctgattcattgcctgtacgcaag

SEQ ID NO: 111794 - DNA, 25 bp, Saccharomyces pastorianus
gagactgtttaaggacgagcccaaa

SEQ ID NO: 111795 - DNA, 25 bp, Saccharomyces pastorianus
atactttgacgtcagggatgcttcc

SEQ ID NO: 111796 - DNA, 25 bp, Saccharomyces pastorianus
gatactgtctcgagggtgctggata

SEQ ID NO: 111797 - DNA, 25 bp, Saccharomyces pastorianus
aatattggtcacatttttcatctct

SEQ ID NO: 111798 - DNA, 25 bp, Saccharomyces pastorianus
gtcattagacttttacatcggtggt

SEQ ID NO: 111799 - DNA, 25 bp, Saccharomyces pastorianus
ttattggtggagtcgcttttgccgt

SEQ ID NO: 111800 - DNA, 25 bp, Saccharomyces pastorianus
actgggactcattagctcaaggact

SEQ ID NO: 111801 - DNA, 25 bp, Saccharomyces pastorianus
gttaccacaaatcgccattctttat

SEQ ID NO: 111802 - DNA, 25 bp, Saccharomyces pastorianus
aaggcatcaacatcaccctaatgac

SEQ ID NO: 111803 - DNA, 25 bp, Saccharomyces pastorianus
gatccttttggtaagctggctttgt

SEQ ID NO: 111804 - DNA, 25 bp, Saccharomyces pastorianus
gaggtttttagctctttttgcaact

SEQ ID NO: 111805 - DNA, 25 bp, Saccharomyces pastorianus
atgacagtaattcgccatcagatga

SEQ ID NO: 111806 - DNA, 25 bp, Saccharomyces pastorianus
caaggactgggctctatcatagggt

SEQ ID NO: 111807 - DNA, 25 bp, Saccharomyces pastorianus
aatgatacgtcagattcacctcaag

SEQ ID NO: 111808 - DNA, 25 bp, Saccharomyces pastorianus
gaatcctatcctttgcgtgtcaaaa

SEQ ID NO: 111809 - DNA, 25 bp, Saccharomyces pastorianus
gctgccggtaacgtcatgattgtct

SEQ ID NO: 111810 - DNA, 25 bp, Saccharomyces pastorianus
gtcggtgtcacaagcttatatccaa

SEQ ID NO: 111811 - DNA, 25 bp, Saccharomyces pastorianus
ttttgttatcttctctactgtcggt

SEQ ID NO: 111812 - DNA, 25 bp, Saccharomyces pastorianus
tgcttccatggccatttgttttgtt

SEQ ID NO: 111813 - DNA, 25 bp, Saccharomyces pastorianus
actttcgtggccttatacactgttg

SEQ ID NO: 111814 - DNA, 25 bp, Saccharomyces pastorianus
aatcgcctacgttattgttgccgaa

SEQ ID NO: 111815 - DNA, 25 bp, Saccharomyces pastorianus
ttcttcgctattagttgggccccaa

SEQ ID NO: 111816 - DNA, 25 bp, Saccharomyces pastorianus
gggctgtttggtattttcattcttc

SEQ ID NO: 111817 - DNA, 25 bp, Saccharomyces pastorianus
agtgtctattgggtggttctgcttc

SEQ ID NO: 111818 - DNA, 25 bp, Saccharomyces pastorianus
tactactattttcaacgccgtcggt

SEQ ID NO: 111819 - DNA, 25 bp, Saccharomyces pastorianus
caaactgttatattgttgggcactt

SEQ ID NO: 111820 - DNA, 25 bp, Saccharomyces pastorianus
gtgcttttattcgaattttgttcaa

SEQ ID NO: 111821 - DNA, 25 bp, Saccharomyces pastorianus
tattgttgggcacttttttttactg

SEQ ID NO: 111822 - DNA, 25 bp, Saccharomyces pastorianus
actgttatattgttgggcacttttt

SEQ ID NO: 111823 - DNA, 25 bp, Saccharomyces pastorianus
attcgaattttgttcaaactgttat

SEQ ID NO: 111824 - DNA, 25 bp, Saccharomyces pastorianus
ttttttactgtgttgaaaggcttca

SEQ ID NO: 111825 - DNA, 25 bp, Saccharomyces pastorianus
ttttactgtgttgaaaggcttcagc

SEQ ID NO: 111826 - DNA, 25 bp, Saccharomyces pastorianus
atgtgggcgggaattctcgagattt

SEQ ID NO: 111827 - DNA, 25 bp, Saccharomyces pastorianus
ggaattctcgagattttgagtgctt

SEQ ID NO: 111828 - DNA, 25 bp, Saccharomyces pastorianus
tgtgggcgggaattctcgagatttt

SEQ ID NO: 111829 - DNA, 25 bp, Saccharomyces pastorianus
gagattttgagtgcttttattcgaa

SEQ ID NO: 111830 - DNA, 25 bp, Saccharomyces pastorianus
cggtcaactgtgtttttcgaatgtt

SEQ ID NO: 111831 - DNA, 25 bp, Saccharomyces pastorianus
gatttccacatttcacgacggtcaa

SEQ ID NO: 111832 - DNA, 25 bp, Saccharomyces pastorianus
tcaactgtgtttttcgaatgtttat

SEQ ID NO: 111833 - DNA, 25 bp, Saccharomyces pastorianus
ttcacgacggtcaactgtgtttttc

SEQ ID NO: 111834 - DNA, 25 bp, Saccharomyces pastorianus
cgacggtcaactgtgtttttcgaat

SEQ ID NO: 111835 - DNA, 25 bp, Saccharomyces pastorianus
tccacatttcacgacggtcaactgt

SEQ ID NO: 111836 - DNA, 25 bp, Saccharomyces pastorianus
atgatttccacatttcacgacggtc

SEQ ID NO: 111837 - DNA, 25 bp, Saccharomyces pastorianus
cacgacggtcaactgtgtttttcga

SEQ ID NO: 111838 - DNA, 25 bp, Saccharomyces pastorianus
gacggtcaactgtgtttttcgaatg

SEQ ID NO: 111839 - DNA, 25 bp, Saccharomyces pastorianus
catttcacgacggtcaactgtgttt

SEQ ID NO: 111840 - DNA, 25 bp, Saccharomyces pastorianus
atttcacgacggtcaactgtgtttt

SEQ ID NO: 111841 - DNA, 25 bp, Saccharomyces pastorianus
aaagcagaggcaaatcgagtacgaa

SEQ ID NO: 111842 - DNA, 25 bp, Saccharomyces pastorianus
aaacagcagaagaccgtacggccag

SEQ ID NO: 111843 - DNA, 25 bp, Saccharomyces pastorianus
atgaagaatctagcgaagcgtcatc

SEQ ID NO: 111844 - DNA, 25 bp, Saccharomyces pastorianus
aaaagaaactgcatccactggagaa

SEQ ID NO: 111845 - DNA, 25 bp, Saccharomyces pastorianus
tgacagtgacgaacgcttcagcgac

SEQ ID NO: 111846 - DNA, 25 bp, Saccharomyces pastorianus
gtacggccagagagcagatgtcaaa

SEQ ID NO: 111847 - DNA, 25 bp, Saccharomyces pastorianus
aagcagcatcattagaggcctctag

SEQ ID NO: 111848 - DNA, 25 bp, Saccharomyces pastorianus
gaagaacatccttcttggattgcaa

SEQ ID NO: 111849 - DNA, 25 bp, Saccharomyces pastorianus
gggaacgcgaagacagacgtactga

SEQ ID NO: 111850 - DNA, 25 bp, Saccharomyces pastorianus
ataatttacctgaactaatggctgg

SEQ ID NO: 111851 - DNA, 25 bp, Saccharomyces pastorianus
ggctcacaagccaagcacgttcaaa

SEQ ID NO: 111852 - DNA, 25 bp, Saccharomyces pastorianus
agaaactttgcgttacagacctcct

SEQ ID NO: 111853 - DNA, 25 bp, Saccharomyces pastorianus
acctcctgtcttgatggttccatat

SEQ ID NO: 111854 - DNA, 25 bp, Saccharomyces pastorianus
gatttccatcatacagtgactccat

SEQ ID NO: 111855 - DNA, 25 bp, Saccharomyces pastorianus
atatgtcatgattaccttcgccgct

SEQ ID NO: 111856 - DNA, 25 bp, Saccharomyces pastorianus
ggtccacacgtttgcttaggtcaaa

SEQ ID NO: 111857 - DNA, 25 bp, Saccharomyces pastorianus
cttatacccagctttacatgatcct

SEQ ID NO: 111858 - DNA, 25 bp, Saccharomyces pastorianus
atgcctcttcttctttagcttgttg

SEQ ID NO: 111859 - DNA, 25 bp, Saccharomyces pastorianus
gggcgctatgttaattccaacctta

SEQ ID NO: 111860 - DNA, 25 bp, Saccharomyces pastorianus
ttatttgcttctcaagatgcctctt

SEQ ID NO: 111861 - DNA, 25 bp, Saccharomyces pastorianus
tcgccgctttgttgggtaaatttgc

SEQ ID NO: 111862 - DNA, 25 bp, Saccharomyces pastorianus
accgtccagatgtctcagctaagat

SEQ ID NO: 111863 - DNA, 25 bp, Saccharomyces pastorianus
gtggaatctgaatcggcatcacatt

SEQ ID NO: 111864 - DNA, 25 bp, Saccharomyces pastorianus
tagtcaattaccaatctccgctttg

SEQ ID NO: 111865 - DNA, 25 bp, Saccharomyces pastorianus
tcaaagtctttgacaccttctccaa

SEQ ID NO: 111866 - DNA, 25 bp, Saccharomyces pastorianus
gctgtaagtacaatcgctgcgggtg

SEQ ID NO: 111867 - DNA, 25 bp, Saccharomyces pastorianus
tataactaacctacagaccctttcg

SEQ ID NO: 111868 - DNA, 25 bp, Saccharomyces pastorianus
ttaggcattacaccagcagattcaa

SEQ ID NO: 111869 - DNA, 25 bp, Saccharomyces pastorianus
gagctggcgatgtctccaacgaaga

SEQ ID NO: 111870 - DNA, 25 bp, Saccharomyces pastorianus
gagtcagagtcatccaaatcacaag

SEQ ID NO: 111871 - DNA, 25 bp, Saccharomyces pastorianus
atgcacaatgcctaactctaaccaa

SEQ ID NO: 111872 - DNA, 25 bp, Saccharomyces pastorianus
atgggcaacatagcttcacccttat

SEQ ID NO: 111873 - DNA, 25 bp, Saccharomyces pastorianus
gctttgacttcgacggatactgaca

SEQ ID NO: 111874 - DNA, 25 bp, Saccharomyces pastorianus
gacagcgtattcttagagatgccca

SEQ ID NO: 111875 - DNA, 25 bp, Saccharomyces pastorianus
gaaatcgacttgtacggaaacctag

SEQ ID NO: 111876 - DNA, 25 bp, Saccharomyces pastorianus
gttaaagcatcgtcacttacagcaa

SEQ ID NO: 111877 - DNA, 25 bp, Saccharomyces pastorianus
agattgacgaacttgcccatgaaaa

SEQ ID NO: 111878 - DNA, 25 bp, Saccharomyces pastorianus
attcaatctaacgtagccgaccgaa

SEQ ID NO: 111879 - DNA, 25 bp, Saccharomyces pastorianus
ctatagaggctcgatgtactggaaa

SEQ ID NO: 111880 - DNA, 25 bp, Saccharomyces pastorianus
gagatgcccagaagtatcagtttga

SEQ ID NO: 111881 - DNA, 25 bp, Saccharomyces pastorianus
aaattatggctcacgcttttggcag

SEQ ID NO: 111882 - DNA, 25 bp, Saccharomyces pastorianus
gagcaaccaactcaccaagatcgag

SEQ ID NO: 111883 - DNA, 25 bp, Saccharomyces pastorianus
agcctgcttgcattaaaatcaccca

SEQ ID NO: 111884 - DNA, 25 bp, Saccharomyces pastorianus
gataatgctttacaggccaagcgat

SEQ ID NO: 111885 - DNA, 25 bp, Saccharomyces pastorianus
aacatactatcatggacggcgccgg

SEQ ID NO: 111886 - DNA, 25 bp, Saccharomyces pastorianus
catacgagtgttacttgttggagcc

SEQ ID NO: 111887 - DNA, 25 bp, Saccharomyces pastorianus
tggagccagcctttatttttcgtaa

SEQ ID NO: 111888 - DNA, 25 bp, Saccharomyces pastorianus
tttatgatgttgatgcaggcaccgc

SEQ ID NO: 111889 - DNA, 25 bp, Saccharomyces pastorianus
gatccttactcacgcggtgcttatt

SEQ ID NO: 111890 - DNA, 25 bp, Saccharomyces pastorianus
ttagcaactggacacgcgatcctta

SEQ ID NO: 111891 - DNA, 25 bp, Saccharomyces pastorianus
ctgtgcctatggtgcttgggaaagc

SEQ ID NO: 111892 - DNA, 25 bp, Saccharomyces pastorianus
aggcaccgcttacaaatcacataga

SEQ ID NO: 111893 - DNA, 25 bp, Saccharomyces pastorianus
aatggtcaagactcccgcataagat

SEQ ID NO: 111894 - DNA, 25 bp, Saccharomyces pastorianus
agttttttccaacctgtgctgaaca

SEQ ID NO: 111895 - DNA, 25 bp, Saccharomyces pastorianus
gtaactttggctaactctaccaatg

SEQ ID NO: 111896 - DNA, 25 bp, Saccharomyces pastorianus
acaatagttctgttcctggtgcgca

SEQ ID NO: 111897 - DNA, 25 bp, Saccharomyces pastorianus
tacttgacattcatgcgtggtttca

SEQ ID NO: 111898 - DNA, 25 bp, Saccharomyces pastorianus
aagctgcccatgtgttaattgtcta

SEQ ID NO: 111899 - DNA, 25 bp, Saccharomyces pastorianus
gaagtcctgactcataagggcattt

SEQ ID NO: 111900 - DNA, 25 bp, Saccharomyces pastorianus
aagcacgcagtgctcttgtgaagat

SEQ ID NO: 111901 - DNA, 25 bp, Saccharomyces pastorianus
ttcctggtgcgcatgacagttcaga

SEQ ID NO: 111902 - DNA, 25 bp, Saccharomyces pastorianus
gtgccattgatgacagatgctcagt

SEQ ID NO: 111903 - DNA, 25 bp, Saccharomyces pastorianus
gatggatgtttttctcactctacaa

SEQ ID NO: 111904 - DNA, 25 bp, Saccharomyces pastorianus
tgctcctcattcaagcgacgttgct

SEQ ID NO: 111905 - DNA, 25 bp, Saccharomyces pastorianus
agtacaacaacgattgctgctcctc

SEQ ID NO: 111906 - DNA, 25 bp, Saccharomyces pastorianus
gtcctccggataactgcacttgtga

SEQ ID NO: 111907 - DNA, 25 bp, Saccharomyces pastorianus
acatattcatttgggactgcctaat

SEQ ID NO: 111908 - DNA, 25 bp, Saccharomyces pastorianus
tacgccatacgctgatggtgttttt

SEQ ID NO: 111909 - DNA, 25 bp, Saccharomyces pastorianus
acctggtatagtggctggtcccaaa

SEQ ID NO: 111910 - DNA, 25 bp, Saccharomyces pastorianus
tatccgttatctccacctaaactta

SEQ ID NO: 111911 - DNA, 25 bp, Saccharomyces pastorianus
aattaaagattctccacctggtata

SEQ ID NO: 111912 - DNA, 25 bp, Saccharomyces pastorianus
ggtgccaacattgatgcttgcatct

SEQ ID NO: 111913 - DNA, 25 bp, Saccharomyces pastorianus
taaacttactttcacacccagcata

SEQ ID NO: 111914 - DNA, 25 bp, Saccharomyces pastorianus
actgcctaattcaagggcctccaga

SEQ ID NO: 111915 - DNA, 25 bp, Saccharomyces pastorianus
gagtttcctaaagactatccgttat

SEQ ID NO: 111916 - DNA, 25 bp, Saccharomyces pastorianus
gatggtcgccagtgcaaagtgtaga

SEQ ID NO: 111917 - DNA, 25 bp, Saccharomyces pastorianus
cgctcagaaacgtctcctcaaggag

SEQ ID NO: 111918 - DNA, 25 bp, Saccharomyces pastorianus
gaaactacgtctgttttatcacgct

SEQ ID NO: 111919 - DNA, 25 bp, Saccharomyces pastorianus
gaaatcacctgtctttattgtgcat

SEQ ID NO: 111920 - DNA, 25 bp, Saccharomyces pastorianus
tgccatctgggcagtaacggagcaa

SEQ ID NO: 111921 - DNA, 25 bp, Saccharomyces pastorianus
gcggtactggcgcacattgctaaat

SEQ ID NO: 111922 - DNA, 25 bp, Saccharomyces pastorianus
attgtgcatgtattttcaggcgaag

SEQ ID NO: 111923 - DNA, 25 bp, Saccharomyces pastorianus
gaaccattcgaattcactttgggaa

SEQ ID NO: 111924 - DNA, 25 bp, Saccharomyces pastorianus
gagccgctactgatgctttgatgaa

SEQ ID NO: 111925 - DNA, 25 bp, Saccharomyces pastorianus
acttttcagaaacaagcgctcttgc

SEQ ID NO: 111926 - DNA, 25 bp, Saccharomyces pastorianus
aatggtattgctacgagcctcttgc

SEQ ID NO: 111927 - DNA, 25 bp, Saccharomyces pastorianus
gaattggctatgctatgtcgtagag

SEQ ID NO: 111928 - DNA, 25 bp, Saccharomyces pastorianus
aggtgaaggttatggttcctcatta

SEQ ID NO: 111929 - DNA, 25 bp, Saccharomyces pastorianus
aggcgcggaaattatccttgatttt

SEQ ID NO: 111930 - DNA, 25 bp, Saccharomyces pastorianus
gtagacccaggttttgatgagtttc

SEQ ID NO: 111931 - DNA, 25 bp, Saccharomyces pastorianus
aagtgacatgaattacctgctggat

SEQ ID NO: 111932 - DNA, 25 bp, Saccharomyces pastorianus
ataccaaattcccacacctaataat

SEQ ID NO: 111933 - DNA, 25 bp, Saccharomyces pastorianus
tataacgtgtttcgccaacatacct

SEQ ID NO: 111934 - DNA, 25 bp, Saccharomyces pastorianus
gaccgccttggcattgaaatatctg

SEQ ID NO: 111935 - DNA, 25 bp, Saccharomyces pastorianus
tatgatgccactgacaagcctttct

SEQ ID NO: 111936 - DNA, 25 bp, Saccharomyces pastorianus
aagcctttctcttccacgcaagatg

SEQ ID NO: 111937 - DNA, 25 bp, Saccharomyces pastorianus
aatagtgtacagataggcgcggaaa

SEQ ID NO: 111938 - DNA, 25 bp, Saccharomyces pastorianus
gagaaagtgctcacccaattgaccg

SEQ ID NO: 111939 - DNA, 25 bp, Saccharomyces pastorianus
aacatacctccttccaagaagctgt

SEQ ID NO: 111940 - DNA, 25 bp, Saccharomyces pastorianus
tgatttcgagggtaagcttctacaa

SEQ ID NO: 111941 - DNA, 25 bp, Saccharomyces pastorianus
ttgtagattctacgccggtgttaat

SEQ ID NO: 111942 - DNA, 25 bp, Saccharomyces pastorianus
gaaggaacaattgactccatcgtca

SEQ ID NO: 111943 - DNA, 25 bp, Saccharomyces pastorianus
accagcttaccatatatgatttcga

SEQ ID NO: 111944 - DNA, 25 bp, Saccharomyces pastorianus
gtcgtagcagacatcaacttctcgg

SEQ ID NO: 111945 - DNA, 25 bp, Saccharomyces pastorianus
gagcctgtggtattttcttcaaatc

SEQ ID NO: 111946 - DNA, 25 bp, Saccharomyces pastorianus
aggctcctgaggatgtcccaattaa

SEQ ID NO: 111947 - DNA, 25 bp, Saccharomyces pastorianus
gaaaacctaaaaccatccatcgacg

SEQ ID NO: 111948 - DNA, 25 bp, Saccharomyces pastorianus
tcgtcaacactaccaatacaactcg

SEQ ID NO: 111949 - DNA, 25 bp, Saccharomyces pastorianus
tgtcttcaaatccataccagcttac

SEQ ID NO: 111950 - DNA, 25 bp, Saccharomyces pastorianus
aacgacagcataatcgccgtatcat

SEQ ID NO: 111951 - DNA, 25 bp, Saccharomyces pastorianus
atttcaacagatactttgccggatg

SEQ ID NO: 111952 - DNA, 25 bp, Saccharomyces pastorianus
gtatacttcaaaactgatccaggcg

SEQ ID NO: 111953 - DNA, 25 bp, Saccharomyces pastorianus
ctgaaaccggatcgagcctcatcaa

SEQ ID NO: 111954 - DNA, 25 bp, Saccharomyces pastorianus
aaccaccaggtccaacagcaaaatg

SEQ ID NO: 111955 - DNA, 25 bp, Saccharomyces pastorianus
aaatcacctctaactatcaacacat

SEQ ID NO: 111956 - DNA, 25 bp, Saccharomyces pastorianus
aagttcacgatgtccagctaacacc

SEQ ID NO: 111957 - DNA, 25 bp, Saccharomyces pastorianus
gatgcgtgatttacttgttgaacca

SEQ ID NO: 111958 - DNA, 25 bp, Saccharomyces pastorianus
gccaattttatgaccgtagaaccaa

SEQ ID NO: 111959 - DNA, 25 bp, Saccharomyces pastorianus
acaatagcaataccggtactcctca

SEQ ID NO: 111960 - DNA, 25 bp, Saccharomyces pastorianus
cttttccaggaatgctatgactatc

SEQ ID NO: 111961 - DNA, 25 bp, Saccharomyces pastorianus
gatcataattctccacttttccagg

SEQ ID NO: 111962 - DNA, 25 bp, Saccharomyces pastorianus
gagtgcactattttgcttcttgtca

SEQ ID NO: 111963 - DNA, 25 bp, Saccharomyces pastorianus
gtagttgccaaagagctgaaccttt

SEQ ID NO: 111964 - DNA, 25 bp, Saccharomyces pastorianus
ggttccctatatgcaaagctattta

SEQ ID NO: 111965 - DNA, 25 bp, Saccharomyces pastorianus
acattggtgatatactgcaagcaac

SEQ ID NO: 111966 - DNA, 25 bp, Saccharomyces pastorianus
gtgcccctttcggtagtttgcgatt

SEQ ID NO: 111967 - DNA, 25 bp, Saccharomyces pastorianus
tggttattttgcgttggttccctat

SEQ ID NO: 111968 - DNA, 25 bp, Saccharomyces pastorianus
aagcaacaaggagttctccccatcg

SEQ ID NO: 111969 - DNA, 25 bp, Saccharomyces pastorianus
gactgtgtaatcgtcagagtgcact

SEQ ID NO: 111970 - DNA, 25 bp, Saccharomyces pastorianus
gctgaacctttaggatccaccgaat

SEQ ID NO: 111971 - DNA, 25 bp, Saccharomyces pastorianus
ggatccaccgaattaataaacattg

SEQ ID NO: 111972 - DNA, 25 bp, Saccharomyces pastorianus
ttgcttcttgtcaaagtagttgcca

SEQ ID NO: 111973 - DNA, 25 bp, Saccharomyces pastorianus
aagcttttccctcatgaaccaatag

SEQ ID NO: 111974 - DNA, 25 bp, Saccharomyces pastorianus
gtttagttcattctcaactgccttt

SEQ ID NO: 111975 - DNA, 25 bp, Saccharomyces pastorianus
gacggaagcgagtcatcttgtgcaa

SEQ ID NO: 111976 - DNA, 25 bp, Saccharomyces pastorianus
aaggccatggttcatcctcaagctt

SEQ ID NO: 111977 - DNA, 25 bp, Saccharomyces pastorianus
ggatgcgtttactagcgtttctcat

SEQ ID NO: 111978 - DNA, 25 bp, Saccharomyces pastorianus
cattatgttttgtggcccggctaaa

SEQ ID NO: 111979 - DNA, 25 bp, Saccharomyces pastorianus
tacaagattgtaccgctattcgtat

SEQ ID NO: 111980 - DNA, 25 bp, Saccharomyces pastorianus
aactgccttttatcaggatgcgttt

SEQ ID NO: 111981 - DNA, 25 bp, Saccharomyces pastorianus
attcttcacgggtctgtcatactta

SEQ ID NO: 111982 - DNA, 25 bp, Saccharomyces pastorianus
gtcatacttatgtgcaaggccatgg

SEQ ID NO: 111983 - DNA, 25 bp, Saccharomyces pastorianus
aactgcagcactgggtgtatcacta

SEQ ID NO: 111984 - DNA, 25 bp, Saccharomyces pastorianus
gatagcaatacttttggccccattt

SEQ ID NO: 111985 - DNA, 25 bp, Saccharomyces pastorianus
taaaggtacctctatgcagcctacg

SEQ ID NO: 111986 - DNA, 25 bp, Saccharomyces pastorianus
aatgtggtccatattgcgcaagtta

SEQ ID NO: 111987 - DNA, 25 bp, Saccharomyces pastorianus
aatagcaatttcatgggttccggta

SEQ ID NO: 111988 - DNA, 25 bp, Saccharomyces pastorianus
gctataacgattgtttggccaccct

SEQ ID NO: 111989 - DNA, 25 bp, Saccharomyces pastorianus
tgggttccggtacttctaacaatca

SEQ ID NO: 111990 - DNA, 25 bp, Saccharomyces pastorianus
gtttaccgtttgataccattgacac

SEQ ID NO: 111991 - DNA, 25 bp, Saccharomyces pastorianus
taccctaaacctcaagtgaacctgc

SEQ ID NO: 111992 - DNA, 25 bp, Saccharomyces pastorianus
tgacacgaagtttccataccctaaa

SEQ ID NO: 111993 - DNA, 25 bp, Saccharomyces pastorianus
ctggcaacagattgggtgctgcttt

SEQ ID NO: 111994 - DNA, 25 bp, Saccharomyces pastorianus
gacattatccttttcaaagctccta

SEQ ID NO: 111995 - DNA, 25 bp, Saccharomyces pastorianus
tatgctactaatggacggactggat

SEQ ID NO: 111996 - DNA, 25 bp, Saccharomyces pastorianus
acaatggcatcttctgcactatcgt

SEQ ID NO: 111997 - DNA, 25 bp, Saccharomyces pastorianus
gaccgagaagatttacccaggcccg

SEQ ID NO: 111998 - DNA, 25 bp, Saccharomyces pastorianus
gcactatcgttcaggtttgagccgc

SEQ ID NO: 111999 - DNA, 25 bp, Saccharomyces pastorianus
gaactatgttatccacgtcagtacg

SEQ ID NO: 112000 - DNA, 25 bp, Saccharomyces pastorianus
ggcgacgaaaatttcttccccatct

SEQ ID NO: 112001 - DNA, 25 bp, Saccharomyces pastorianus
aagagtctctagtggttcatcatta

SEQ ID NO: 112002 - DNA, 25 bp, Saccharomyces pastorianus
ccaggcccgcaagaagatcgttatt

SEQ ID NO: 112003 - DNA, 25 bp, Saccharomyces pastorianus
aagctgtttttgacaattttcctga

SEQ ID NO: 112004 - DNA, 25 bp, Saccharomyces pastorianus
atcccaaattattctatcccgacat

SEQ ID NO: 112005 - DNA, 25 bp, Saccharomyces pastorianus
gactggataccccatcatattttag

SEQ ID NO: 112006 - DNA, 25 bp, Saccharomyces pastorianus
agaaaggcgacgtctccaagggcgt

SEQ ID NO: 112007 - DNA, 25 bp, Saccharomyces pastorianus
agaggcgccgggaagccgaattctt

SEQ ID NO: 112008 - DNA, 25 bp, Saccharomyces pastorianus
agtgggaagacctttctgagcgctc

SEQ ID NO: 112009 - DNA, 25 bp, Saccharomyces pastorianus
ttaccacgccagcattcacgagaaa

SEQ ID NO: 112010 - DNA, 25 bp, Saccharomyces pastorianus
gacatcactgtaaatggcgtcccag

SEQ ID NO: 112011 - DNA, 25 bp, Saccharomyces pastorianus
aaacaagtgtgtgcgtgtaccggaa

SEQ ID NO: 112012 - DNA, 25 bp, Saccharomyces pastorianus
cgttaaggactactcatttctggga

SEQ ID NO: 112013 - DNA, 25 bp, Saccharomyces pastorianus
aacatggcaacttatcggccgcagc

SEQ ID NO: 112014 - DNA, 25 bp, Saccharomyces pastorianus
gtggaaagctcagtagccccttcaa

SEQ ID NO: 112015 - DNA, 25 bp, Saccharomyces pastorianus
agctttgtcatttccaagtctctga

SEQ ID NO: 112016 - DNA, 25 bp, Saccharomyces pastorianus
gttcgacgagcccattgaatgcttc

SEQ ID NO: 112017 - DNA, 25 bp, Saccharomyces pastorianus
ggtatttcgttgacagaagatctat

SEQ ID NO: 112018 - DNA, 25 bp, Saccharomyces pastorianus
gaatttgctcaaagcttggaagctg

SEQ ID NO: 112019 - DNA, 25 bp, Saccharomyces pastorianus
ttgatcatcccaggccaggcaggta

SEQ ID NO: 112020 - DNA, 25 bp, Saccharomyces pastorianus
gaagatattgtctccaacataaacg

SEQ ID NO: 112021 - DNA, 25 bp, Saccharomyces pastorianus
gacttggagccacgttcaaagaaga

SEQ ID NO: 112022 - DNA, 25 bp, Saccharomyces pastorianus
agccaatgctactttgatcatccca

SEQ ID NO: 112023 - DNA, 25 bp, Saccharomyces pastorianus
gagagtcatgacttggagccacgtt

SEQ ID NO: 112024 - DNA, 25 bp, Saccharomyces pastorianus
gttagactattgtccgacgacgaat

SEQ ID NO: 112025 - DNA, 25 bp, Saccharomyces pastorianus
ccactctacttccacacgaggaaaa

SEQ ID NO: 112026 - DNA, 25 bp, Saccharomyces pastorianus
tctatacgacgaattgcttaagcac

SEQ ID NO: 112027 - DNA, 25 bp, Saccharomyces pastorianus
aaagatagctgaacctgtacccaca

SEQ ID NO: 112028 - DNA, 25 bp, Saccharomyces pastorianus
gatttggccacaagatacgcgattt

SEQ ID NO: 112029 - DNA, 25 bp, Saccharomyces pastorianus
agaatgcgcatctcaggctgccaaa

SEQ ID NO: 112030 - DNA, 25 bp, Saccharomyces pastorianus
gtttcacccgtgttctcatgaattg

SEQ ID NO: 112031 - DNA, 25 bp, Saccharomyces pastorianus
tgctgagtactgctctaccgaggaa

SEQ ID NO: 112032 - DNA, 25 bp, Saccharomyces pastorianus
gagcatgtcgctactaaggtcacag

SEQ ID NO: 112033 - DNA, 25 bp, Saccharomyces pastorianus
tatcaggctacccaatcgactttat

SEQ ID NO: 112034 - DNA, 25 bp, Saccharomyces pastorianus
gatgcagtattgtcctattgtaact

SEQ ID NO: 112035 - DNA, 25 bp, Saccharomyces pastorianus
ctttcgagaaagactgctacgcaat

SEQ ID NO: 112036 - DNA, 25 bp, Saccharomyces pastorianus
actttatcacctggcttgctgagta

SEQ ID NO: 112037 - DNA, 25 bp, Saccharomyces pastorianus
gagacaagacagtttcacccgtgtt

SEQ ID NO: 112038 - DNA, 25 bp, Saccharomyces pastorianus
aaatgtcgacttagccgatttggcc

SEQ ID NO: 112039 - DNA, 25 bp, Saccharomyces pastorianus
aaaagcatatgagctctccgtccta

SEQ ID NO: 112040 - DNA, 25 bp, Saccharomyces pastorianus
taagagcctcatcagggcatgcatc

SEQ ID NO: 112041 - DNA, 25 bp, Saccharomyces pastorianus
aacgcctaagctcgagccggtggta

SEQ ID NO: 112042 - DNA, 25 bp, Saccharomyces pastorianus
tggtctacactttcacaacgcctaa

SEQ ID NO: 112043 - DNA, 25 bp, Saccharomyces pastorianus
atgtcaccttctcgaagaggcggca

SEQ ID NO: 112044 - DNA, 25 bp, Saccharomyces pastorianus
atgcatcaatgcttcagacactcct

SEQ ID NO: 112045 - DNA, 25 bp, Saccharomyces pastorianus
gacggttcaagtaccagtccagttg

SEQ ID NO: 112046 - DNA, 25 bp, Saccharomyces pastorianus
taccaaaccaatacggcggctttca

SEQ ID NO: 112047 - DNA, 25 bp, Saccharomyces pastorianus
gcgccaatattctgcttctaattct

SEQ ID NO: 112048 - DNA, 25 bp, Saccharomyces pastorianus
taattctggcaaactctggcctggt

SEQ ID NO: 112049 - DNA, 25 bp, Saccharomyces pastorianus
ataagacccggagacatgtcacctt

SEQ ID NO: 112050 - DNA, 25 bp, Saccharomyces pastorianus
gtagaaacctgatccaggcctgtct

SEQ ID NO: 112051 - DNA, 25 bp, Saccharomyces pastorianus
aagtcacaattgctaggtggtgcca

SEQ ID NO: 112052 - DNA, 25 bp, Saccharomyces pastorianus
tgcacacgcgaatagcttaggccat

SEQ ID NO: 112053 - DNA, 25 bp, Saccharomyces pastorianus
gtttgaacctatagtcacgcagcag

SEQ ID NO: 112054 - DNA, 25 bp, Saccharomyces pastorianus
atcaagatcaggtaccggcaggcgc

SEQ ID NO: 112055 - DNA, 25 bp, Saccharomyces pastorianus
cagcagcaacatcacacgcagaatt

SEQ ID NO: 112056 - DNA, 25 bp, Saccharomyces pastorianus
aggcctgtcttaacgcccctgatga

SEQ ID NO: 112057 - DNA, 25 bp, Saccharomyces pastorianus
ggtggtgccaatcctaatcaaaact

SEQ ID NO: 112058 - DNA, 25 bp, Saccharomyces pastorianus
aatgatatgcaacgccagcaaccac

SEQ ID NO: 112059 - DNA, 25 bp, Saccharomyces pastorianus
tgaacagaatgctgcctaccaacaa

SEQ ID NO: 112060 - DNA, 25 bp, Saccharomyces pastorianus
gcaacaaatgtcacagcatcctcga

SEQ ID NO: 112061 - DNA, 25 bp, Saccharomyces pastorianus
gaattgcagattgcccttgacacca

SEQ ID NO: 112062 - DNA, 25 bp, Saccharomyces pastorianus
gatctgtgggatcgtttccaggata

SEQ ID NO: 112063 - DNA, 25 bp, Saccharomyces pastorianus
cctaaaccacctaagccaatcaaat

SEQ ID NO: 112064 - DNA, 25 bp, Saccharomyces pastorianus
agctcctctgtgatgtcttatgttc

SEQ ID NO: 112065 - DNA, 25 bp, Saccharomyces pastorianus
ggttgggcccacaagatctatcaat

SEQ ID NO: 112066 - DNA, 25 bp, Saccharomyces pastorianus
gatctcgaggataaactagcaggca

SEQ ID NO: 112067 - DNA, 25 bp, Saccharomyces pastorianus
aaccaggctgtttcgataaaggatg

SEQ ID NO: 112068 - DNA, 25 bp, Saccharomyces pastorianus
gagcattgttgggttgggcccacaa

SEQ ID NO: 112069 - DNA, 25 bp, Saccharomyces pastorianus
atacctgatacggaagattggcaac

SEQ ID NO: 112070 - DNA, 25 bp, Saccharomyces pastorianus
ctagcaggcatcaacaagctcctct

SEQ ID NO: 112071 - DNA, 25 bp, Saccharomyces pastorianus
aagcatatttattcctaccagttta

SEQ ID NO: 112072 - DNA, 25 bp, Saccharomyces pastorianus
aagcgccttgccaaacagtcaggaa

SEQ ID NO: 112073 - DNA, 25 bp, Saccharomyces pastorianus
aatattgccacatttacatcagaaa

SEQ ID NO: 112074 - DNA, 25 bp, Saccharomyces pastorianus
gcggtggtagtgatagtttcgatta

SEQ ID NO: 112075 - DNA, 25 bp, Saccharomyces pastorianus
ggctaacagacaagagaccgatcga

SEQ ID NO: 112076 - DNA, 25 bp, Saccharomyces pastorianus
gattccagagattacagccgcttta

SEQ ID NO: 112077 - DNA, 25 bp, Saccharomyces pastorianus
tacaaaggctgttgcgctaattaac

SEQ ID NO: 112078 - DNA, 25 bp, Saccharomyces pastorianus
aagtggattgggatcgtatatctaa

SEQ ID NO: 112079 - DNA, 25 bp, Saccharomyces pastorianus
gaggcacagaaacttatcagcgaaa

SEQ ID NO: 112080 - DNA, 25 bp, Saccharomyces pastorianus
gtttcgattatcttcttcaattaac

SEQ ID NO: 112081 - DNA, 25 bp, Saccharomyces pastorianus
agaactattgttaaagcgccttgcc

SEQ ID NO: 112082 - DNA, 25 bp, Saccharomyces pastorianus
tttaagtgcagagtgtcgggctaac

SEQ ID NO: 112083 - DNA, 25 bp, Saccharomyces pastorianus
aagcgcagcaacacatacaagaaat

SEQ ID NO: 112084 - DNA, 25 bp, Saccharomyces pastorianus
gaaatacgacatccaagcgcagcaa

SEQ ID NO: 112085 - DNA, 25 bp, Saccharomyces pastorianus
tgttgctcagtttgattccaaatta

SEQ ID NO: 112086 - DNA, 25 bp, Saccharomyces pastorianus
gatttgatgaccactaacaacccca

SEQ ID NO: 112087 - DNA, 25 bp, Saccharomyces pastorianus
gatccatctgttgttcgaatagcta

SEQ ID NO: 112088 - DNA, 25 bp, Saccharomyces pastorianus
tgctctgcaatagatcccaatagtg

SEQ ID NO: 112089 - DNA, 25 bp, Saccharomyces pastorianus
tttaaagatgctgagccgccgttat

SEQ ID NO: 112090 - DNA, 25 bp, Saccharomyces pastorianus
ggtaaaactggaatatgctctgcaa

SEQ ID NO: 112091 - DNA, 25 bp, Saccharomyces pastorianus
gggaactgttggtcagtactctaaa

SEQ ID NO: 112092 - DNA, 25 bp, Saccharomyces pastorianus
gcaacaacttcttctccatgagatg

SEQ ID NO: 112093 - DNA, 25 bp, Saccharomyces pastorianus
aaagctctcttcagggacagggtaa

SEQ ID NO: 112094 - DNA, 25 bp, Saccharomyces pastorianus
gggtcattaccatgggtgcttccac

SEQ ID NO: 112095 - DNA, 25 bp, Saccharomyces pastorianus
atgatgatgacttcgggccagacca

SEQ ID NO: 112096 - DNA, 25 bp, Saccharomyces pastorianus
aaagagggcgcgtattccttgttca

SEQ ID NO: 112097 - DNA, 25 bp, Saccharomyces pastorianus
tacgattctttcaagcctgtactgt

SEQ ID NO: 112098 - DNA, 25 bp, Saccharomyces pastorianus
tgttcaagggctgtggtgccaacat

SEQ ID NO: 112099 - DNA, 25 bp, Saccharomyces pastorianus
tacgacggtgctctggactgtttga

SEQ ID NO: 112100 - DNA, 25 bp, Saccharomyces pastorianus
cctctttcctattgggttgggtcat

SEQ ID NO: 112101 - DNA, 25 bp, Saccharomyces pastorianus
gtggtttgtcgcttctatttgtata

SEQ ID NO: 112102 - DNA, 25 bp, Saccharomyces pastorianus
cctcagttctgggtatcattgtcta

SEQ ID NO: 112103 - DNA, 25 bp, Saccharomyces pastorianus
aaatctgttttctggtggagcggct

SEQ ID NO: 112104 - DNA, 25 bp, Saccharomyces pastorianus
cagctggtgtcatctcattgtacga

SEQ ID NO: 112105 - DNA, 25 bp, Saccharomyces pastorianus
attacccatcaatatgtcacagtac

SEQ ID NO: 112106 - DNA, 25 bp, Saccharomyces pastorianus
caagctgagcaacgatgtagacaca

SEQ ID NO: 112107 - DNA, 25 bp, Saccharomyces pastorianus
tgaaaatagcttgtcatcgccacgc

SEQ ID NO: 112108 - DNA, 25 bp, Saccharomyces pastorianus
gcccgctagagttcatattacccat

SEQ ID NO: 112109 - DNA, 25 bp, Saccharomyces pastorianus
gaattttctcactttggaatgcttg

SEQ ID NO: 112110 - DNA, 25 bp, Saccharomyces pastorianus
tggtacaattgtttactacttcgtt

SEQ ID NO: 112111 - DNA, 25 bp, Saccharomyces pastorianus
gaatgcttgagccagacatttactc

SEQ ID NO: 112112 - DNA, 25 bp, Saccharomyces pastorianus
aatactgctggccataattaacgat

SEQ ID NO: 112113 - DNA, 25 bp, Saccharomyces pastorianus
ctgagattactgagaggtcgtcccc

SEQ ID NO: 112114 - DNA, 25 bp, Saccharomyces pastorianus
tctactgaaagaatactgctggcca

SEQ ID NO: 112115 - DNA, 25 bp, Saccharomyces pastorianus
ttactcacttatgtagtccatctac

SEQ ID NO: 112116 - DNA, 25 bp, Saccharomyces pastorianus
aaagagactcagagcttccaacaga

SEQ ID NO: 112117 - DNA, 25 bp, Saccharomyces pastorianus
gtgcaagatttaacccagttgaagg

SEQ ID NO: 112118 - DNA, 25 bp, Saccharomyces pastorianus
taaacaacgtttattctctagagaa

SEQ ID NO: 112119 - DNA, 25 bp, Saccharomyces pastorianus
tcttgatttattgagcgttatacca

SEQ ID NO: 112120 - DNA, 25 bp, Saccharomyces pastorianus
ggattcgcagatcaaaaccttattt

SEQ ID NO: 112121 - DNA, 25 bp, Saccharomyces pastorianus
gctcttacaatatgagttcgtcaga

SEQ ID NO: 112122 - DNA, 25 bp, Saccharomyces pastorianus
aatacaaatttactcgatgcgcaga

SEQ ID NO: 112123 - DNA, 25 bp, Saccharomyces pastorianus
ctcgatgcgcagaaattggtgaatt

SEQ ID NO: 112124 - DNA, 25 bp, Saccharomyces pastorianus
gggatggccatcatggctcttacaa

SEQ ID NO: 112125 - DNA, 25 bp, Saccharomyces pastorianus
gacagttacttttcttctggaaacg

SEQ ID NO: 112126 - DNA, 25 bp, Saccharomyces pastorianus
gagcttccaacagaggttcttgatt

SEQ ID NO: 112127 - DNA, 25 bp, Saccharomyces pastorianus
tacctatcgctatcgtcattcagaa

SEQ ID NO: 112128 - DNA, 25 bp, Saccharomyces pastorianus
acagtacagatgtcgactcctccgg

SEQ ID NO: 112129 - DNA, 25 bp, Saccharomyces pastorianus
agtcaattgcgcatgcgtgctcaat

SEQ ID NO: 112130 - DNA, 25 bp, Saccharomyces pastorianus
aaccactattatggcctgtttggct

SEQ ID NO: 112131 - DNA, 25 bp, Saccharomyces pastorianus
gaagtggccccaacacatacagata

SEQ ID NO: 112132 - DNA, 25 bp, Saccharomyces pastorianus
gaactcaaaagtggtcgtctccaat

SEQ ID NO: 112133 - DNA, 25 bp, Saccharomyces pastorianus
gatattcttctgttcatctccaaac

SEQ ID NO: 112134 - DNA, 25 bp, Saccharomyces pastorianus
acagcactcaatttccgacatttac

SEQ ID NO: 112135 - DNA, 25 bp, Saccharomyces pastorianus
gccaacgttcatgctatgtctttta

SEQ ID NO: 112136 - DNA, 25 bp, Saccharomyces pastorianus
tgagatgttattgttcacggccctt

SEQ ID NO: 112137 - DNA, 25 bp, Saccharomyces pastorianus
tagcgtagcactttgttgttccatg

SEQ ID NO: 112138 - DNA, 25 bp, Saccharomyces pastorianus
agcagatcttgcacccataatagaa

SEQ ID NO: 112139 - DNA, 25 bp, Saccharomyces pastorianus
tatactgtcttttgcacttcaagga

SEQ ID NO: 112140 - DNA, 25 bp, Saccharomyces pastorianus
cgacgaattgtgttctctgctaaat

SEQ ID NO: 112141 - DNA, 25 bp, Saccharomyces pastorianus
aatttttgatacctatgtgccggca

SEQ ID NO: 112142 - DNA, 25 bp, Saccharomyces pastorianus
gggctgtggatagcaccttacctat

SEQ ID NO: 112143 - DNA, 25 bp, Saccharomyces pastorianus
gaatacgggcgctgtaggttataat

SEQ ID NO: 112144 - DNA, 25 bp, Saccharomyces pastorianus
gggtattttaccagaggctactatc

SEQ ID NO: 112145 - DNA, 25 bp, Saccharomyces pastorianus
ctccggaaatctatccactgttttc

SEQ ID NO: 112146 - DNA, 25 bp, Saccharomyces pastorianus
aaatcacgcgcttaagaatacgggc

SEQ ID NO: 112147 - DNA, 25 bp, Saccharomyces pastorianus
aaaacgtgcccagcgaattcgtgga

SEQ ID NO: 112148 - DNA, 25 bp, Saccharomyces pastorianus
atgtgccggcatttcgacgaattgt

SEQ ID NO: 112149 - DNA, 25 bp, Saccharomyces pastorianus
gagctcttgcaagggttcaattcca

SEQ ID NO: 112150 - DNA, 25 bp, Saccharomyces pastorianus
tagtacctgagatgacgaacttcaa

SEQ ID NO: 112151 - DNA, 25 bp, Saccharomyces pastorianus
gctccgttgtgtggatttggtcaaa

SEQ ID NO: 112152 - DNA, 25 bp, Saccharomyces pastorianus
agatgtgggtaccttgcagtcaaga

SEQ ID NO: 112153 - DNA, 25 bp, Saccharomyces pastorianus
gagttggaaaacttctcgatgggtt

SEQ ID NO: 112154 - DNA, 25 bp, Saccharomyces pastorianus
acgctattaccaatgggcagctctt

SEQ ID NO: 112155 - DNA, 25 bp, Saccharomyces pastorianus
aatactactggttactgtgctccgt

SEQ ID NO: 112156 - DNA, 25 bp, Saccharomyces pastorianus
ggcagctcttctactttcaatttat

SEQ ID NO: 112157 - DNA, 25 bp, Saccharomyces pastorianus
ggtcaaaataccgtacgtctcgagt

SEQ ID NO: 112158 - DNA, 25 bp, Saccharomyces pastorianus
aatcagagtctcacttgtccataaa

SEQ ID NO: 112159 - DNA, 25 bp, Saccharomyces pastorianus
ggacagctataacatctacactaaa

SEQ ID NO: 112160 - DNA, 25 bp, Saccharomyces pastorianus
aataaatccaatccacagggccctt

SEQ ID NO: 112161 - DNA, 25 bp, Saccharomyces pastorianus
gtttgctgagagtcaagttccccga

SEQ ID NO: 112162 - DNA, 25 bp, Saccharomyces pastorianus
tacgttaaaccaatctcatcctttc

SEQ ID NO: 112163 - DNA, 25 bp, Saccharomyces pastorianus
gaaacgaggacaaccccatcagtta

SEQ ID NO: 112164 - DNA, 25 bp, Saccharomyces pastorianus
gatgacctggaatttggctctaaaa

SEQ ID NO: 112165 - DNA, 25 bp, Saccharomyces pastorianus
agttccccgatagaagccatattca

SEQ ID NO: 112166 - DNA, 25 bp, Saccharomyces pastorianus
tataacgtcgtgtcgcagttcctga

SEQ ID NO: 112167 - DNA, 25 bp, Saccharomyces pastorianus
aaggctcatcttttggaagacgcac

SEQ ID NO: 112168 - DNA, 25 bp, Saccharomyces pastorianus
agggcccttctgataacgctacaag

SEQ ID NO: 112169 - DNA, 25 bp, Saccharomyces pastorianus
tttcaaacccttggccaaagacgat

SEQ ID NO: 112170 - DNA, 25 bp, Saccharomyces pastorianus
tttgccctcggatgagccattagca

SEQ ID NO: 112171 - DNA, 25 bp, Saccharomyces pastorianus
gtgaactccatcaacgtcaagactc

SEQ ID NO: 112172 - DNA, 25 bp, Saccharomyces pastorianus
aatgcgaaggccactttcgaggacg

SEQ ID NO: 112173 - DNA, 25 bp, Saccharomyces pastorianus
gcatgaattcgccatattcgctcta

SEQ ID NO: 112174 - DNA, 25 bp, Saccharomyces pastorianus
ggccttccccagttttaagcatgaa

SEQ ID NO: 112175 - DNA, 25 bp, Saccharomyces pastorianus
gaaaaccaaccttgtctacggacag

SEQ ID NO: 112176 - DNA, 25 bp, Saccharomyces pastorianus
gaggagactcacagacagctacaat

SEQ ID NO: 112177 - DNA, 25 bp, Saccharomyces pastorianus
taatagtccgttgccggtattacca

SEQ ID NO: 112178 - DNA, 25 bp, Saccharomyces pastorianus
gagtgtcacttctgaacatacccat

SEQ ID NO: 112179 - DNA, 25 bp, Saccharomyces pastorianus
aagtccgcacaacaacatcgcgttg

SEQ ID NO: 112180 - DNA, 25 bp, Saccharomyces pastorianus
ggacagtttttcgtcaagctcaaat

SEQ ID NO: 112181 - DNA, 25 bp, Saccharomyces pastorianus
aagactccagtaggtgtgtcgccca

SEQ ID NO: 112182 - DNA, 25 bp, Saccharomyces pastorianus
agtattgacagcgttgacagcctca

SEQ ID NO: 112183 - DNA, 25 bp, Saccharomyces pastorianus
gggcctcgcgcattatgtacggcaa

SEQ ID NO: 112184 - DNA, 25 bp, Saccharomyces pastorianus
aaaagcgccggccttgtgtatgtct

SEQ ID NO: 112185 - DNA, 25 bp, Saccharomyces pastorianus
gtgctaggtgcatttacttcattca

SEQ ID NO: 112186 - DNA, 25 bp, Saccharomyces pastorianus
ttagcgtgcccgtgatataccttta

SEQ ID NO: 112187 - DNA, 25 bp, Saccharomyces pastorianus
ttgatagacaagcacctgggcgcca

SEQ ID NO: 112188 - DNA, 25 bp, Saccharomyces pastorianus
aagtacatgtagctagcgcgcaccg

SEQ ID NO: 112189 - DNA, 25 bp, Saccharomyces pastorianus
gcgacaatttcttcggtgtagcact

SEQ ID NO: 112190 - DNA, 25 bp, Saccharomyces pastorianus
tatatgaggcgcttgggttctaccg

SEQ ID NO: 112191 - DNA, 25 bp, Saccharomyces pastorianus
gctactggagcatgcactgtgcgat

SEQ ID NO: 112192 - DNA, 25 bp, Saccharomyces pastorianus
gctggacgcctgtgtgcaattgata

SEQ ID NO: 112193 - DNA, 25 bp, Saccharomyces pastorianus
aatccagtatatttccattgcagtg

SEQ ID NO: 112194 - DNA, 25 bp, Saccharomyces pastorianus
tgcagtgatggctacgagtctaatt

SEQ ID NO: 112195 - DNA, 25 bp, Saccharomyces pastorianus
atccaagggttagtgatcctattca

SEQ ID NO: 112196 - DNA, 25 bp, Saccharomyces pastorianus
gatagcgaatctgttccacgttagt

SEQ ID NO: 112197 - DNA, 25 bp, Saccharomyces pastorianus
gctgtcgggctaacgatatcgtcaa

SEQ ID NO: 112198 - DNA, 25 bp, Saccharomyces pastorianus
tctagcaatggcgataatccagtat

SEQ ID NO: 112199 - DNA, 25 bp, Saccharomyces pastorianus
gacagttcatcaatgtgggtggtat

SEQ ID NO: 112200 - DNA, 25 bp, Saccharomyces pastorianus
atcgtcaatcagttatgcggtagca

SEQ ID NO: 112201 - DNA, 25 bp, Saccharomyces pastorianus
ttgtgtattgcactcgggatagcga

SEQ ID NO: 112202 - DNA, 25 bp, Saccharomyces pastorianus
ggagatgtcttttctatctagcaat

SEQ ID NO: 112203 - DNA, 25 bp, Saccharomyces pastorianus
gtctaattgtggtagctgtcgggct

SEQ ID NO: 112204 - DNA, 25 bp, Saccharomyces pastorianus
agtttttgcacaacatcctgacaag

SEQ ID NO: 112205 - DNA, 25 bp, Saccharomyces pastorianus
tcttctaagccccttttcaatttgg

SEQ ID NO: 112206 - DNA, 25 bp, Saccharomyces pastorianus
caatttggctagcaccttgttgaag

SEQ ID NO: 112207 - DNA, 25 bp, Saccharomyces pastorianus
taaaaggcccacatctgcttatttc

SEQ ID NO: 112208 - DNA, 25 bp, Saccharomyces pastorianus
gatctttccacgaatcttctaagcc

SEQ ID NO: 112209 - DNA, 25 bp, Saccharomyces pastorianus
tcctgacaagtctcaattggatcta

SEQ ID NO: 112210 - DNA, 25 bp, Saccharomyces pastorianus
aggacccttcattaagtatgccaat

SEQ ID NO: 112211 - DNA, 25 bp, Saccharomyces pastorianus
gccaatgaagttcgttcgcaagttt

SEQ ID NO: 112212 - DNA, 25 bp, Saccharomyces pastorianus
gaaggcttccaagagaacgcagctt

SEQ ID NO: 112213 - DNA, 25 bp, Saccharomyces pastorianus
caaagaaaccagcaggacccttcat

SEQ ID NO: 112214 - DNA, 25 bp, Saccharomyces pastorianus
aaccttacgtcctgctgaaatcagc

SEQ ID NO: 112215 - DNA, 25 bp, Saccharomyces pastorianus
taagcgttgctcatcctaccatatc

SEQ ID NO: 112216 - DNA, 25 bp, Saccharomyces pastorianus
ctaacctccaatccagcgaattatt

SEQ ID NO: 112217 - DNA, 25 bp, Saccharomyces pastorianus
gttccatccaggtggtacggacatc

SEQ ID NO: 112218 - DNA, 25 bp, Saccharomyces pastorianus
ttcgctacagcttatccaggattta

SEQ ID NO: 112219 - DNA, 25 bp, Saccharomyces pastorianus
gctgcatatgcccatgtcgaagtca

SEQ ID NO: 112220 - DNA, 25 bp, Saccharomyces pastorianus
tacaaaattcgtttcgctacagctt

SEQ ID NO: 112221 - DNA, 25 bp, Saccharomyces pastorianus
gatttactcgatgatccggtatttc

SEQ ID NO: 112222 - DNA, 25 bp, Saccharomyces pastorianus
agactagatcctgggcacagtgctc

SEQ ID NO: 112223 - DNA, 25 bp, Saccharomyces pastorianus
cttcaagttttcaccttcacaactg

SEQ ID NO: 112224 - DNA, 25 bp, Saccharomyces pastorianus
aaatgtcagattcgctgctcctcag

SEQ ID NO: 112225 - DNA, 25 bp, Saccharomyces pastorianus
attgcttgtccaaaagatacccctt

SEQ ID NO: 112226 - DNA, 25 bp, Saccharomyces pastorianus
acggcgatagaaatagcggtgctaa

SEQ ID NO: 112227 - DNA, 25 bp, Saccharomyces pastorianus
gccagattggctcagttgaaaaaca

SEQ ID NO: 112228 - DNA, 25 bp, Saccharomyces pastorianus
gcaaatttcttggagccacaagctt

SEQ ID NO: 112229 - DNA, 25 bp, Saccharomyces pastorianus
cttggtccgtagagacagggcccaa

SEQ ID NO: 112230 - DNA, 25 bp, Saccharomyces pastorianus
gaagatctgaattcatttgacaagc

SEQ ID NO: 112231 - DNA, 25 bp, Saccharomyces pastorianus
gaggtgaaaattccgctcccgttgg

SEQ ID NO: 112232 - DNA, 25 bp, Saccharomyces pastorianus
atggacccagagttacaagctatta

SEQ ID NO: 112233 - DNA, 25 bp, Saccharomyces pastorianus
agattatctcgagtggccttggtcc

SEQ ID NO: 112234 - DNA, 25 bp, Saccharomyces pastorianus
ctcccgttggtgcagctattgcaaa

SEQ ID NO: 112235 - DNA, 25 bp, Saccharomyces pastorianus
gacagggcccaagcagtagagacat

SEQ ID NO: 112236 - DNA, 25 bp, Saccharomyces pastorianus
gattgctacaaacaacgtcactcat

SEQ ID NO: 112237 - DNA, 25 bp, Saccharomyces pastorianus
atagcctcgttaatatatttccaag

SEQ ID NO: 112238 - DNA, 25 bp, Saccharomyces pastorianus
gtgtcgaacgaactagattctatac

SEQ ID NO: 112239 - DNA, 25 bp, Saccharomyces pastorianus
aattcaatgacttttccaacgatga

SEQ ID NO: 112240 - DNA, 25 bp, Saccharomyces pastorianus
ataccaacaactagtcatgcagatt

SEQ ID NO: 112241 - DNA, 25 bp, Saccharomyces pastorianus
gactaacgtagtcgtgtcgaacgaa

SEQ ID NO: 112242 - DNA, 25 bp, Saccharomyces pastorianus
tatttccaagttagcaacaacgaca

SEQ ID NO: 112243 - DNA, 25 bp, Saccharomyces pastorianus
tggtcaaagacatagcctcgttaat

SEQ ID NO: 112244 - DNA, 25 bp, Saccharomyces pastorianus
ggatcccaaaatggcaatagcgagg

SEQ ID NO: 112245 - DNA, 25 bp, Saccharomyces pastorianus
aagttagtatcaaatggatcccaaa

SEQ ID NO: 112246 - DNA, 25 bp, Saccharomyces pastorianus
gtagtaacaataaatcggcttccaa

SEQ ID NO: 112247 - DNA, 25 bp, Saccharomyces pastorianus
aaagatacaccattgtcaagaagat

SEQ ID NO: 112248 - DNA, 25 bp, Saccharomyces pastorianus
attcgcgacggaggagagatcagac

SEQ ID NO: 112249 - DNA, 25 bp, Saccharomyces pastorianus
ggatgctctagaaagtgaactcaat

SEQ ID NO: 112250 - DNA, 25 bp, Saccharomyces pastorianus
cattatctagaagcttagtcggaac

SEQ ID NO: 112251 - DNA, 25 bp, Saccharomyces pastorianus
gcaggcttcggatcagcttattaat

SEQ ID NO: 112252 - DNA, 25 bp, Saccharomyces pastorianus
atggtgtcaacacttgagttcaaaa

SEQ ID NO: 112253 - DNA, 25 bp, Saccharomyces pastorianus
gcatttgttgcagcaggcttcggat

SEQ ID NO: 112254 - DNA, 25 bp, Saccharomyces pastorianus
gccatcaacagaaggtttgccatca

SEQ ID NO: 112255 - DNA, 25 bp, Saccharomyces pastorianus
attcattatcaggagcatttgttgc

SEQ ID NO: 112256 - DNA, 25 bp, Saccharomyces pastorianus
gtttgccatcattgcctcaaggaga

SEQ ID NO: 112257 - DNA, 25 bp, Saccharomyces pastorianus
aaagtagctaacatgccatcaacag

SEQ ID NO: 112258 - DNA, 25 bp, Saccharomyces pastorianus
gatgaactgatggacgatgtacaag

SEQ ID NO: 112259 - DNA, 25 bp, Saccharomyces pastorianus
cgaagtccaacataaacgggctaat

SEQ ID NO: 112260 - DNA, 25 bp, Saccharomyces pastorianus
aaaggcatatagaccaagtgactga

SEQ ID NO: 112261 - DNA, 25 bp, Saccharomyces pastorianus
tgggttaaattcttcctcaagtaca

SEQ ID NO: 112262 - DNA, 25 bp, Saccharomyces pastorianus
gcagatgactgcaatcaaacggtta

SEQ ID NO: 112263 - DNA, 25 bp, Saccharomyces pastorianus
agccatcatggaggaattagttcaa

SEQ ID NO: 112264 - DNA, 25 bp, Saccharomyces pastorianus
gttcagtccccactaatggcaagtt

SEQ ID NO: 112265 - DNA, 25 bp, Saccharomyces pastorianus
agtacaatcgactttttcaagaatc

SEQ ID NO: 112266 - DNA, 25 bp, Saccharomyces pastorianus
gattcgatgatctcttccgatttta

SEQ ID NO: 112267 - DNA, 25 bp, Saccharomyces pastorianus
gaatctaatccaaaatcggtcagaa

SEQ ID NO: 112268 - DNA, 25 bp, Saccharomyces pastorianus
tagactacagtcacaggaaatgcat

SEQ ID NO: 112269 - DNA, 25 bp, Saccharomyces pastorianus
ggaacctgaaactcaaacaagccat

SEQ ID NO: 112270 - DNA, 25 bp, Saccharomyces pastorianus
ataccaacacatctatacggccttg

SEQ ID NO: 112271 - DNA, 25 bp, Saccharomyces pastorianus
aatctattcctcacacttctaattg

SEQ ID NO: 112272 - DNA, 25 bp, Saccharomyces pastorianus
gaagagaatccttttcgcttctttc

SEQ ID NO: 112273 - DNA, 25 bp, Saccharomyces pastorianus
ggcggattcctgttttgaccacaaa

SEQ ID NO: 112274 - DNA, 25 bp, Saccharomyces pastorianus
gcattcttcctgttacggtatacca

SEQ ID NO: 112275 - DNA, 25 bp, Saccharomyces pastorianus
ataacgtcccaggtcacagtggaaa

SEQ ID NO: 112276 - DNA, 25 bp, Saccharomyces pastorianus
tactagtgtggcttcttctaacgaa

SEQ ID NO: 112277 - DNA, 25 bp, Saccharomyces pastorianus
aatacgtttcatccgagctagactc

SEQ ID NO: 112278 - DNA, 25 bp, Saccharomyces pastorianus
ccaactctttggtgaaatctccttc

SEQ ID NO: 112279 - DNA, 25 bp, Saccharomyces pastorianus
aagacagtcttccttgggcgacgcg

SEQ ID NO: 112280 - DNA, 25 bp, Saccharomyces pastorianus
gaaacaactcgtattccaactcttt

SEQ ID NO: 112281 - DNA, 25 bp, Saccharomyces pastorianus
acgtgacaacgaaattccccgcaca

SEQ ID NO: 112282 - DNA, 25 bp, Saccharomyces pastorianus
tcttacccctttttatttggcaatg

SEQ ID NO: 112283 - DNA, 25 bp, Saccharomyces pastorianus
aatgttttaggtcatccgtggccaa

SEQ ID NO: 112284 - DNA, 25 bp, Saccharomyces pastorianus
gaaaacagcgcgaggcagatgccac

SEQ ID NO: 112285 - DNA, 25 bp, Saccharomyces pastorianus
cgcacacgcgcattagaaacatatc

SEQ ID NO: 112286 - DNA, 25 bp, Saccharomyces pastorianus
taggtcatccgtggccaagaaatgt

SEQ ID NO: 112287 - DNA, 25 bp, Saccharomyces pastorianus
aatgcttttatttcgaaccgcaaat

SEQ ID NO: 112288 - DNA, 25 bp, Saccharomyces pastorianus
tacgggttttctctgccgctagaaa

SEQ ID NO: 112289 - DNA, 25 bp, Saccharomyces pastorianus
tttctctgccgctagaaaacagcgc

SEQ ID NO: 112290 - DNA, 25 bp, Saccharomyces pastorianus
tcgttctggcggctcgtaacatctg

SEQ ID NO: 112291 - DNA, 25 bp, Saccharomyces pastorianus
tcgtaacatctgcttcgagaagcca

SEQ ID NO: 112292 - DNA, 25 bp, Saccharomyces pastorianus
atttgccaggtgatatcttcttact

SEQ ID NO: 112293 - DNA, 25 bp, Saccharomyces pastorianus
gcgcccttggttatgcacagtattt

SEQ ID NO: 112294 - DNA, 25 bp, Saccharomyces pastorianus
acttgaaatacgcagatcctcttct

SEQ ID NO: 112295 - DNA, 25 bp, Saccharomyces pastorianus
aatgaccatggctctgggtggaaga

SEQ ID NO: 112296 - DNA, 25 bp, Saccharomyces pastorianus
tacagaatcgtccaagaatgccatg

SEQ ID NO: 112297 - DNA, 25 bp, Saccharomyces pastorianus
aattacatttcccatcagttacaag

SEQ ID NO: 112298 - DNA, 25 bp, Saccharomyces pastorianus
caagtggcgcatctgatgacttcaa

SEQ ID NO: 112299 - DNA, 25 bp, Saccharomyces pastorianus
agtattattccacgtggccagggcg

SEQ ID NO: 112300 - DNA, 25 bp, Saccharomyces pastorianus
taagcgccctttcccagaaaggaat

SEQ ID NO: 112301 - DNA, 25 bp, Saccharomyces pastorianus
gaagattgctcaagtactactgaaa

SEQ ID NO: 112302 - DNA, 25 bp, Saccharomyces pastorianus
atggccacggcaatggtcacagaat

SEQ ID NO: 112303 - DNA, 25 bp, Saccharomyces pastorianus
ggccaacgatagtttctcaacacca

SEQ ID NO: 112304 - DNA, 25 bp, Saccharomyces pastorianus
ttatgatgccgtggtctttagcgcc

SEQ ID NO: 112305 - DNA, 25 bp, Saccharomyces pastorianus
gtttcagcgctcaaggcggaggata

SEQ ID NO: 112306 - DNA, 25 bp, Saccharomyces pastorianus
ggtcttttgcaaccccttgacaaat

SEQ ID NO: 112307 - DNA, 25 bp, Saccharomyces pastorianus
aaaggttcgttgttgtttcagcgct

SEQ ID NO: 112308 - DNA, 25 bp, Saccharomyces pastorianus
ggattacactattttacagcctgga

SEQ ID NO: 112309 - DNA, 25 bp, Saccharomyces pastorianus
ttacagcctggatcgttggaactaa

SEQ ID NO: 112310 - DNA, 25 bp, Saccharomyces pastorianus
gaaagcttctgttaactactccatt

SEQ ID NO: 112311 - DNA, 25 bp, Saccharomyces pastorianus
agggcttgcgtgaatactatattgc

SEQ ID NO: 112312 - DNA, 25 bp, Saccharomyces pastorianus
attttcacggttgatctggatggct

SEQ ID NO: 112313 - DNA, 25 bp, Saccharomyces pastorianus
aacgcgtccgttagtgagatcacag

SEQ ID NO: 112314 - DNA, 25 bp, Saccharomyces pastorianus
gagcgaagcactcgacaatgccttt

SEQ ID NO: 112315 - DNA, 25 bp, Saccharomyces pastorianus
atgcctttgtaccaggtatggccaa

SEQ ID NO: 112316 - DNA, 25 bp, Saccharomyces pastorianus
gtggcaaagttcgtgtagcgctata

SEQ ID NO: 112317 - DNA, 25 bp, Saccharomyces pastorianus
gcgaggctcggaataccaaggtgat

SEQ ID NO: 112318 - DNA, 25 bp, Saccharomyces pastorianus
agcaggtttatcatcaggactacta

SEQ ID NO: 112319 - DNA, 25 bp, Saccharomyces pastorianus
gattgggtcgccgtggttttagaat

SEQ ID NO: 112320 - DNA, 25 bp, Saccharomyces pastorianus
cgcacccgccagttttaataagaat

SEQ ID NO: 112321 - DNA, 25 bp, Saccharomyces pastorianus
gagatcagcatctattgtagcggat

SEQ ID NO: 112322 - DNA, 25 bp, Saccharomyces pastorianus
attagagccgctactgaattggtgc

SEQ ID NO: 112323 - DNA, 25 bp, Saccharomyces pastorianus
agaaagctctccagttcttcaagaa

SEQ ID NO: 112324 - DNA, 25 bp, Saccharomyces pastorianus
ggccaaagagttgacacttactgtt

SEQ ID NO: 112325 - DNA, 25 bp, Saccharomyces pastorianus
ctggctgtgataattttcctgctac

SEQ ID NO: 112326 - DNA, 25 bp, Saccharomyces pastorianus
tgcgacgccttaattattcccggag

SEQ ID NO: 112327 - DNA, 25 bp, Saccharomyces pastorianus
gagaatctacgtcgatgtccctcat

SEQ ID NO: 112328 - DNA, 25 bp, Saccharomyces pastorianus
gagaattcttgatcctatcgcagtt

SEQ ID NO: 112329 - DNA, 25 bp, Saccharomyces pastorianus
gggtacttgtgctggtctcatcttt

SEQ ID NO: 112330 - DNA, 25 bp, Saccharomyces pastorianus
aaactcctgaggatctagcccagtg

SEQ ID NO: 112331 - DNA, 25 bp, Saccharomyces pastorianus
tttccaatttcatacctggctgtga

SEQ ID NO: 112332 - DNA, 25 bp, Saccharomyces pastorianus
attcgcgcacccgtgatcgagagaa

SEQ ID NO: 112333 - DNA, 25 bp, Saccharomyces pastorianus
ggtctcatctttttaagcgcgcaat

SEQ ID NO: 112334 - DNA, 25 bp, Saccharomyces pastorianus
tgtccctcatcgctcaaagaacagg

SEQ ID NO: 112335 - DNA, 25 bp, Saccharomyces pastorianus
ttttcatccagagcttgctgacagt

SEQ ID NO: 112336 - DNA, 25 bp, Saccharomyces pastorianus
atggtgtgtttgttggctcaggaat

SEQ ID NO: 112337 - DNA, 25 bp, Saccharomyces pastorianus
gggcgatgtctctgaagccgtcaag

SEQ ID NO: 112338 - DNA, 25 bp, Saccharomyces pastorianus
gttccatttgtttgtggcgctaaag

SEQ ID NO: 112339 - DNA, 25 bp, Saccharomyces pastorianus
aatcctgtaaggttggccactgcag

SEQ ID NO: 112340 - DNA, 25 bp, Saccharomyces pastorianus
aggtggtgtagcaacgccagccgat

SEQ ID NO: 112341 - DNA, 25 bp, Saccharomyces pastorianus
cactcactttgacaatcccagcaaa

SEQ ID NO: 112342 - DNA, 25 bp, Saccharomyces pastorianus
gagggtaccagtttctttgctgaaa

SEQ ID NO: 112343 - DNA, 25 bp, Saccharomyces pastorianus
cagccgatgccgcattgttaatgca

SEQ ID NO: 112344 - DNA, 25 bp, Saccharomyces pastorianus
gggtggtgtatcaatcgaatctatt

SEQ ID NO: 112345 - DNA, 25 bp, Saccharomyces pastorianus
tagtagaggctaccactcactttga

SEQ ID NO: 112346 - DNA, 25 bp, Saccharomyces pastorianus
aggcgtgccaacaattgaagagcga

SEQ ID NO: 112347 - DNA, 25 bp, Saccharomyces pastorianus
agcaccaattctcccacaaatgata

SEQ ID NO: 112348 - DNA, 25 bp, Saccharomyces pastorianus
gaacagagctttaccctggaagcac

SEQ ID NO: 112349 - DNA, 25 bp, Saccharomyces pastorianus
tgaccctgaggtactgttgaataat

SEQ ID NO: 112350 - DNA, 25 bp, Saccharomyces pastorianus
gaagctggtgttactagagccacaa

SEQ ID NO: 112351 - DNA, 25 bp, Saccharomyces pastorianus
tcaacggctatcgagtggactaaca

SEQ ID NO: 112352 - DNA, 25 bp, Saccharomyces pastorianus
cccggtcgcgtttcagatcataata

SEQ ID NO: 112353 - DNA, 25 bp, Saccharomyces pastorianus
tagaatgctaggactggcgttgtgt

SEQ ID NO: 112354 - DNA, 25 bp, Saccharomyces pastorianus
gagccacaagcgaggttattagagt

SEQ ID NO: 112355 - DNA, 25 bp, Saccharomyces pastorianus
atactccaggaatcggtgttcccgg

SEQ ID NO: 112356 - DNA, 25 bp, Saccharomyces pastorianus
agcggattaccttttatacctaatg

SEQ ID NO: 112357 - DNA, 25 bp, Saccharomyces pastorianus
tctttcgtatgagggattgtctaac

SEQ ID NO: 112358 - DNA, 25 bp, Saccharomyces pastorianus
ttatcagaatgtcagcgccgaacgg

SEQ ID NO: 112359 - DNA, 25 bp, Saccharomyces pastorianus
ggaacaatggtctctaatttagctg

SEQ ID NO: 112360 - DNA, 25 bp, Saccharomyces pastorianus
acccagtcgttaccttcaatcaaga

SEQ ID NO: 112361 - DNA, 25 bp, Saccharomyces pastorianus
aacttgcccgacactgttgtttgga

SEQ ID NO: 112362 - DNA, 25 bp, Saccharomyces pastorianus
gactgttgaattaggctccgattat

SEQ ID NO: 112363 - DNA, 25 bp, Saccharomyces pastorianus
atgattttatttccttggctcctgg

SEQ ID NO: 112364 - DNA, 25 bp, Saccharomyces pastorianus
cgccgaacgggccattcaaatagtt

SEQ ID NO: 112365 - DNA, 25 bp, Saccharomyces pastorianus
gaaggaatcctacgtcgacaagcac

SEQ ID NO: 112366 - DNA, 25 bp, Saccharomyces pastorianus
aagggcgttcaaattcacactctaa

SEQ ID NO: 112367 - DNA, 25 bp, Saccharomyces pastorianus
ggttgttccatacatacttccgtat

SEQ ID NO: 112368 - DNA, 25 bp, Saccharomyces pastorianus
caccgaccgtacaatttggcttgaa

SEQ ID NO: 112369 - DNA, 25 bp, Saccharomyces pastorianus
gagcctagttctttaaatgccactg

SEQ ID NO: 112370 - DNA, 25 bp, Saccharomyces pastorianus
agtgtgccaatttttcgtgcggaaa

SEQ ID NO: 112371 - DNA, 25 bp, Saccharomyces pastorianus
gtgtcaataccccaaatgagcctag

SEQ ID NO: 112372 - DNA, 25 bp, Saccharomyces pastorianus
gagatccacgaatactaccacaggt

SEQ ID NO: 112373 - DNA, 25 bp, Saccharomyces pastorianus
agcagctgatgtttcgaattctacc

SEQ ID NO: 112374 - DNA, 25 bp, Saccharomyces pastorianus
tcttaggtgtgcgtcagtgtgccaa

SEQ ID NO: 112375 - DNA, 25 bp, Saccharomyces pastorianus
gtttgagcgctaccgtgtaccgaaa

SEQ ID NO: 112376 - DNA, 25 bp, Saccharomyces pastorianus
gaaacctagcgacgacaatgcctat

SEQ ID NO: 112377 - DNA, 25 bp, Saccharomyces pastorianus
atgttgtaaacatcttccccttagt

SEQ ID NO: 112378 - DNA, 25 bp, Saccharomyces pastorianus
agtacgttcactcctaatatatcca

SEQ ID NO: 112379 - DNA, 25 bp, Saccharomyces pastorianus
tatccaccaccgtacctgatgaaat

SEQ ID NO: 112380 - DNA, 25 bp, Saccharomyces pastorianus
accggcagcggcgtatactaatact

SEQ ID NO: 112381 - DNA, 25 bp, Saccharomyces pastorianus
attttctccaatgcacatgggccta

SEQ ID NO: 112382 - DNA, 25 bp, Saccharomyces pastorianus
gcgaaatcaaacttggctggccaac

SEQ ID NO: 112383 - DNA, 25 bp, Saccharomyces pastorianus
gctatcccagatgttgttgacgcaa

SEQ ID NO: 112384 - DNA, 25 bp, Saccharomyces pastorianus
gcaacgggacgtggatactctaata

SEQ ID NO: 112385 - DNA, 25 bp, Saccharomyces pastorianus
aacagttctgattctttgcattctt

SEQ ID NO: 112386 - DNA, 25 bp, Saccharomyces pastorianus
gaatttacctatccgttgcaatgtt

SEQ ID NO: 112387 - DNA, 25 bp, Saccharomyces pastorianus
agagtcgtctttgggctacaattct

SEQ ID NO: 112388 - DNA, 25 bp, Saccharomyces pastorianus
ggtttgaggctttttctggtgctaa

SEQ ID NO: 112389 - DNA, 25 bp, Saccharomyces pastorianus
tatgtcccaaaagcagtacctcact

SEQ ID NO: 112390 - DNA, 25 bp, Saccharomyces pastorianus
aaccaggctcgatttctaatgcttc

SEQ ID NO: 112391 - DNA, 25 bp, Saccharomyces pastorianus
ggcgcaagtcgaggttaccggaatt

SEQ ID NO: 112392 - DNA, 25 bp, Saccharomyces pastorianus
aggacggacgcttatacccgcggat

SEQ ID NO: 112393 - DNA, 25 bp, Saccharomyces pastorianus
ttgagatcaaagaccgacctgttgt

SEQ ID NO: 112394 - DNA, 25 bp, Saccharomyces pastorianus
agaggctgcgctcttcttttagcaa

SEQ ID NO: 112395 - DNA, 25 bp, Saccharomyces pastorianus
ttatcagaattcttccgtctacgga

SEQ ID NO: 112396 - DNA, 25 bp, Saccharomyces pastorianus
ttttagcaactctcacacgacttat

SEQ ID NO: 112397 - DNA, 25 bp, Saccharomyces pastorianus
agcagcttatttcttccgcggatga

SEQ ID NO: 112398 - DNA, 25 bp, Saccharomyces pastorianus
cgcggatgatcctggatttccttgc

SEQ ID NO: 112399 - DNA, 25 bp, Saccharomyces pastorianus
aaagattcgcttttctgtctgttgc

SEQ ID NO: 112400 - DNA, 25 bp, Saccharomyces pastorianus
ttcttacatagtctgggccgggagc

SEQ ID NO: 112401 - DNA, 25 bp, Saccharomyces pastorianus
tgtctgttgccacttttcttacata

SEQ ID NO: 112402 - DNA, 25 bp, Saccharomyces pastorianus
attctgggcaaagtacggccgtact

SEQ ID NO: 112403 - DNA, 25 bp, Saccharomyces pastorianus
aaaggacggtgtttgggccattatg

SEQ ID NO: 112404 - DNA, 25 bp, Saccharomyces pastorianus
gatgagtctcttaaggtcaccgatt

SEQ ID NO: 112405 - DNA, 25 bp, Saccharomyces pastorianus
gaagccaattattaactcggtcatc

SEQ ID NO: 112406 - DNA, 25 bp, Saccharomyces pastorianus
gagagcatatgttaccaaatcgggt

SEQ ID NO: 112407 - DNA, 25 bp, Saccharomyces pastorianus
atttacaacaagcatcatccggaga

SEQ ID NO: 112408 - DNA, 25 bp, Saccharomyces pastorianus
ggtgttgttaattccgccttcccag

SEQ ID NO: 112409 - DNA, 25 bp, Saccharomyces pastorianus
tcgtttggtactggttccaaccacg

SEQ ID NO: 112410 - DNA, 25 bp, Saccharomyces pastorianus
atatgtcaagctttccaatggtgca

SEQ ID NO: 112411 - DNA, 25 bp, Saccharomyces pastorianus
gtacaggttcttcaggtgctaccat

SEQ ID NO: 112412 - DNA, 25 bp, Saccharomyces pastorianus
ctgtgctttgttcgacgctaaaaaa

SEQ ID NO: 112413 - DNA, 25 bp, Saccharomyces pastorianus
tctacccacgttttattgttgttgc

SEQ ID NO: 112414 - DNA, 25 bp, Saccharomyces pastorianus
gctagtgttcaaagttacaaggtaa

SEQ ID NO: 112415 - DNA, 25 bp, Saccharomyces pastorianus
ggaggaaaagcaacctgcatggcta

SEQ ID NO: 112416 - DNA, 25 bp, Saccharomyces pastorianus
gtcctctacccacgttttattgttg

SEQ ID NO: 112417 - DNA, 25 bp, Saccharomyces pastorianus
acctgcatggctagtgttcaaagtt

SEQ ID NO: 112418 - DNA, 25 bp, Saccharomyces pastorianus
gcatttacttttgaacagcgacagg

SEQ ID NO: 112419 - DNA, 25 bp, Saccharomyces pastorianus
gtacatacagggaacgtcctctacc

SEQ ID NO: 112420 - DNA, 25 bp, Saccharomyces pastorianus
caaggtaacaatgcaaatcagtagt

SEQ ID NO: 112421 - DNA, 25 bp, Saccharomyces pastorianus
aagcaacctgcatggctagtgttca

SEQ ID NO: 112422 - DNA, 25 bp, Saccharomyces pastorianus
gcatggctagtgttcaaagttacaa

SEQ ID NO: 112423 - DNA, 25 bp, Saccharomyces pastorianus
ttttagtacatacagggaacgtcct

SEQ ID NO: 112424 - DNA, 25 bp, Saccharomyces pastorianus
gtgctactggaatggattcaccaac

SEQ ID NO: 112425 - DNA, 25 bp, Saccharomyces pastorianus
ccacggtttttgtctacaggcaaca

SEQ ID NO: 112426 - DNA, 25 bp, Saccharomyces pastorianus
gattccgttaggcaactactatcaa

SEQ ID NO: 112427 - DNA, 25 bp, Saccharomyces pastorianus
gttaagagccttaccttgtgtagat

SEQ ID NO: 112428 - DNA, 25 bp, Saccharomyces pastorianus
gtgtagattaccattcgcggaagac

SEQ ID NO: 112429 - DNA, 25 bp, Saccharomyces pastorianus
aaataagtccttacacgcacaagaa

SEQ ID NO: 112430 - DNA, 25 bp, Saccharomyces pastorianus
aggatcctcttagaatacccacggt

SEQ ID NO: 112431 - DNA, 25 bp, Saccharomyces pastorianus
agatcccggacctagaaacgctatt

SEQ ID NO: 112432 - DNA, 25 bp, Saccharomyces pastorianus
cagagcttcctgactcattgaaaaa

SEQ ID NO: 112433 - DNA, 25 bp, Saccharomyces pastorianus
aaattggttgaagtgctcggcatca

SEQ ID NO: 112434 - DNA, 25 bp, Saccharomyces pastorianus
agatgagctaccagagattccgtta

SEQ ID NO: 112435 - DNA, 25 bp, Saccharomyces pastorianus
aacgcaggttatgttttcgaaagag

SEQ ID NO: 112436 - DNA, 25 bp, Saccharomyces pastorianus
aagcacgcagatccaagtgtatatg

SEQ ID NO: 112437 - DNA, 25 bp, Saccharomyces pastorianus
tgggtagtttttgggacgcattcgc

SEQ ID NO: 112438 - DNA, 25 bp, Saccharomyces pastorianus
tacgacaagaaaaagcacgcagatc

SEQ ID NO: 112439 - DNA, 25 bp, Saccharomyces pastorianus
gcacgcagatccaagtgtatatgga

SEQ ID NO: 112440 - DNA, 25 bp, Saccharomyces pastorianus
tccaagtgtatatggaggaaaccat

SEQ ID NO: 112441 - DNA, 25 bp, Saccharomyces pastorianus
gaaaaagcacgcagatccaagtgta

SEQ ID NO: 112442 - DNA, 25 bp, Saccharomyces pastorianus
tagtttttgggacgcattcgcagta

SEQ ID NO: 112443 - DNA, 25 bp, Saccharomyces pastorianus
ggtagtttttgggacgcattcgcag

SEQ ID NO: 112444 - DNA, 25 bp, Saccharomyces pastorianus
aaaagcacgcagatccaagtgtata

SEQ ID NO: 112445 - DNA, 25 bp, Saccharomyces pastorianus
gtagtttttgggacgcattcgcagt

SEQ ID NO: 112446 - DNA, 25 bp, Saccharomyces pastorianus
ggagattacccgcagaagtagaaat

SEQ ID NO: 112447 - DNA, 25 bp, Saccharomyces pastorianus
taggacacatcagcaagagaacttg

SEQ ID NO: 112448 - DNA, 25 bp, Saccharomyces pastorianus
gaatgttgacatctctaacatgtcg

SEQ ID NO: 112449 - DNA, 25 bp, Saccharomyces pastorianus
cttgcagagcatgagaagatcttcc

SEQ ID NO: 112450 - DNA, 25 bp, Saccharomyces pastorianus
gtaccgtcaacctaggacacatcag

SEQ ID NO: 112451 - DNA, 25 bp, Saccharomyces pastorianus
gaagatcttccataggatcacagga

SEQ ID NO: 112452 - DNA, 25 bp, Saccharomyces pastorianus
gacagttccgatgttgaggacgtta

SEQ ID NO: 112453 - DNA, 25 bp, Saccharomyces pastorianus
gtcgcaaggtgagtttttaagactt

SEQ ID NO: 112454 - DNA, 25 bp, Saccharomyces pastorianus
tctctaacatgtcgcaaggtgagtt

SEQ ID NO: 112455 - DNA, 25 bp, Saccharomyces pastorianus
taggatcacaggacagttccgatgt

SEQ ID NO: 112456 - DNA, 25 bp, Saccharomyces pastorianus
tttcgaaagagtaccgtcaacctag

SEQ ID NO: 112457 - DNA, 25 bp, Saccharomyces pastorianus
atggcaatccctgttctacgaacat

SEQ ID NO: 112458 - DNA, 25 bp, Saccharomyces pastorianus
cgccatcggtgctcaagttgcaaag

SEQ ID NO: 112459 - DNA, 25 bp, Saccharomyces pastorianus
ggtacgatgggttacggtctccctg

SEQ ID NO: 112460 - DNA, 25 bp, Saccharomyces pastorianus
ccaagggcccagttttgcttgaagt

SEQ ID NO: 112461 - DNA, 25 bp, Saccharomyces pastorianus
gaattcgtttctaccaagggcccag

SEQ ID NO: 112462 - DNA, 25 bp, Saccharomyces pastorianus
aagaaactatccaaggttgccaacg

SEQ ID NO: 112463 - DNA, 25 bp, Saccharomyces pastorianus
atggtgacgcatcctttaacatgac

SEQ ID NO: 112464 - DNA, 25 bp, Saccharomyces pastorianus
tatggtcactcaatggcaatccctg

SEQ ID NO: 112465 - DNA, 25 bp, Saccharomyces pastorianus
gtggtagcggtctagacgagttcat

SEQ ID NO: 112466 - DNA, 25 bp, Saccharomyces pastorianus
tacgaacatcgttattcccacacac

SEQ ID NO: 112467 - DNA, 25 bp, Saccharomyces pastorianus
acccacatactttcatcacatcagg

SEQ ID NO: 112468 - DNA, 25 bp, Saccharomyces pastorianus
taggaattaccgacgctccatttgg

SEQ ID NO: 112469 - DNA, 25 bp, Saccharomyces pastorianus
cggctccaagattgtgccttcaaaa

SEQ ID NO: 112470 - DNA, 25 bp, Saccharomyces pastorianus
gaggatctatgccttgtaccaccaa

SEQ ID NO: 112471 - DNA, 25 bp, Saccharomyces pastorianus
aatatttttcattatctgccgccgt

SEQ ID NO: 112472 - DNA, 25 bp, Saccharomyces pastorianus
tgagataccctccaaatagcgcaca

SEQ ID NO: 112473 - DNA, 25 bp, Saccharomyces pastorianus
ggaatgattttaccctttttatgag

SEQ ID NO: 112474 - DNA, 25 bp, Saccharomyces pastorianus
gtataaactcaactaacggctccaa

SEQ ID NO: 112475 - DNA, 25 bp, Saccharomyces pastorianus
tggagggatcggtacttcaggttat

SEQ ID NO: 112476 - DNA, 25 bp, Saccharomyces pastorianus
aggaaaagctcgtccgttttgcgat

SEQ ID NO: 112477 - DNA, 25 bp, Saccharomyces pastorianus
aaaactttgctcctgtattacccat

SEQ ID NO: 112478 - DNA, 25 bp, Saccharomyces pastorianus
gacgcgcttaagatctggtgactgt

SEQ ID NO: 112479 - DNA, 25 bp, Saccharomyces pastorianus
ttgccgattatcaatgtcccagtta

SEQ ID NO: 112480 - DNA, 25 bp, Saccharomyces pastorianus
accccgattctgttagcaatgccga

SEQ ID NO: 112481 - DNA, 25 bp, Saccharomyces pastorianus
agaacgttacagatgcggcccgtga

SEQ ID NO: 112482 - DNA, 25 bp, Saccharomyces pastorianus
aaatatggtttgtcgctacctgaga

SEQ ID NO: 112483 - DNA, 25 bp, Saccharomyces pastorianus
gaagactattcacttactctaaaga

SEQ ID NO: 112484 - DNA, 25 bp, Saccharomyces pastorianus
atatgggtccacttggaggcgatct

SEQ ID NO: 112485 - DNA, 25 bp, Saccharomyces pastorianus
tagattatcattacagcagccacat

SEQ ID NO: 112486 - DNA, 25 bp, Saccharomyces pastorianus
taccttcaaaggacatcattgccga

SEQ ID NO: 112487 - DNA, 25 bp, Saccharomyces pastorianus
tttgaaggcttaccgggccaaccat

SEQ ID NO: 112488 - DNA, 25 bp, Saccharomyces pastorianus
ccatcagttctttcccttgagagga

SEQ ID NO: 112489 - DNA, 25 bp, Saccharomyces pastorianus
gatgcggcccgtgaatactttgaag

SEQ ID NO: 112490 - DNA, 25 bp, Saccharomyces pastorianus
aaccccaattcgaaaatcatgtcaa

SEQ ID NO: 112491 - DNA, 25 bp, Saccharomyces pastorianus
atgcaggttctcaatacgaaaagtg

SEQ ID NO: 112492 - DNA, 25 bp, Saccharomyces pastorianus
gaacgttggaacacgactactgccc

SEQ ID NO: 112493 - DNA, 25 bp, Saccharomyces pastorianus
gataaatcaaccacacagctacgta

SEQ ID NO: 112494 - DNA, 25 bp, Saccharomyces pastorianus
gactactgcccatcaatgtcaacaa

SEQ ID NO: 112495 - DNA, 25 bp, Saccharomyces pastorianus
agagacccagttatgctccatgttg

SEQ ID NO: 112496 - DNA, 25 bp, Saccharomyces pastorianus
gtaatgaatcagtgaaaccccaatt

SEQ ID NO: 112497 - DNA, 25 bp, Saccharomyces pastorianus
aggcgtctcaagtcacgttcatatt

SEQ ID NO: 112498 - DNA, 25 bp, Saccharomyces pastorianus
gcagccaccatatatacaagaacgt

SEQ ID NO: 112499 - DNA, 25 bp, Saccharomyces pastorianus
tccatgttgcaggaggcgtctcaag

SEQ ID NO: 112500 - DNA, 25 bp, Saccharomyces pastorianus
gaaaacgaaacaatgcagccaccat

SEQ ID NO: 112501 - DNA, 25 bp, Saccharomyces pastorianus
cttctctggcgcatgtatcagacga

SEQ ID NO: 112502 - DNA, 25 bp, Saccharomyces pastorianus
tgctccagccattattgaggcctat

SEQ ID NO: 112503 - DNA, 25 bp, Saccharomyces pastorianus
tgggaaaaacttggagccgctgctc

SEQ ID NO: 112504 - DNA, 25 bp, Saccharomyces pastorianus
gtggccatgggtatgttagactact

SEQ ID NO: 112505 - DNA, 25 bp, Saccharomyces pastorianus
gacctttgtgatggcagtaacgcat

SEQ ID NO: 112506 - DNA, 25 bp, Saccharomyces pastorianus
gatatttaatctcagggtggccatg

SEQ ID NO: 112507 - DNA, 25 bp, Saccharomyces pastorianus
ttaatggacggtgcccacaatggct

SEQ ID NO: 112508 - DNA, 25 bp, Saccharomyces pastorianus
tacatcaggtattgccttctctggc

SEQ ID NO: 112509 - DNA, 25 bp, Saccharomyces pastorianus
gaaaccagcctttgacctttgtgat

SEQ ID NO: 112510 - DNA, 25 bp, Saccharomyces pastorianus
ggattcatgccactgatcctgaaga

SEQ ID NO: 112511 - DNA, 25 bp, Saccharomyces pastorianus
acaatggctcagctgcagtagagtt

SEQ ID NO: 112512 - DNA, 25 bp, Saccharomyces pastorianus
aaccaggcaccgaaagttgggatgc

SEQ ID NO: 112513 - DNA, 25 bp, Saccharomyces pastorianus
agaatgccttgcgtgctggaaccag

SEQ ID NO: 112514 - DNA, 25 bp, Saccharomyces pastorianus
aaacgacatggagcactgaagaact

SEQ ID NO: 112515 - DNA, 25 bp, Saccharomyces pastorianus
ataactgcacaaggccccagagagt

SEQ ID NO: 112516 - DNA, 25 bp, Saccharomyces pastorianus
gaatggctccacgaaagaatgcctt

SEQ ID NO: 112517 - DNA, 25 bp, Saccharomyces pastorianus
agaagccttgctcgaaaatgataac

SEQ ID NO: 112518 - DNA, 25 bp, Saccharomyces pastorianus
agaagaagctaatttgtcacccaaa

SEQ ID NO: 112519 - DNA, 25 bp, Saccharomyces pastorianus
ggaagatttatatacgttcaccata

SEQ ID NO: 112520 - DNA, 25 bp, Saccharomyces pastorianus
agaggattcggacatgttcagcgta

SEQ ID NO: 112521 - DNA, 25 bp, Saccharomyces pastorianus
taccaacactggagagcggctgata

SEQ ID NO: 112522 - DNA, 25 bp, Saccharomyces pastorianus
aaagctgctgaagccggactacgat

SEQ ID NO: 112523 - DNA, 25 bp, Saccharomyces pastorianus
tccgacacgatcttgatgttataaa

SEQ ID NO: 112524 - DNA, 25 bp, Saccharomyces pastorianus
gaatattgatattttacccttggac

SEQ ID NO: 112525 - DNA, 25 bp, Saccharomyces pastorianus
gtaattgaacctgagctggaagaac

SEQ ID NO: 112526 - DNA, 25 bp, Saccharomyces pastorianus
gaacaaagtgcggtcaccccggaag

SEQ ID NO: 112527 - DNA, 25 bp, Saccharomyces pastorianus
ttacccttggacaataacctcagcg

SEQ ID NO: 112528 - DNA, 25 bp, Saccharomyces pastorianus
ggacaataacctcagcgatttctat

SEQ ID NO: 112529 - DNA, 25 bp, Saccharomyces pastorianus
ggataacctactcgacaatccggtt

SEQ ID NO: 112530 - DNA, 25 bp, Saccharomyces pastorianus
gaagctatacagatctttaggagtt

SEQ ID NO: 112531 - DNA, 25 bp, Saccharomyces pastorianus
gaaataatatccacaccgaacggtt

SEQ ID NO: 112532 - DNA, 25 bp, Saccharomyces pastorianus
ggaacgtaatattgtgtcacttcga

SEQ ID NO: 112533 - DNA, 25 bp, Saccharomyces pastorianus
ctactcgacaatccggttgaatttt

SEQ ID NO: 112534 - DNA, 25 bp, Saccharomyces pastorianus
gtatatctggcgttttactggctct

SEQ ID NO: 112535 - DNA, 25 bp, Saccharomyces pastorianus
cgatctctcctcatttaactgttta

SEQ ID NO: 112536 - DNA, 25 bp, Saccharomyces pastorianus
acatctctatttggagttccccgag

SEQ ID NO: 112537 - DNA, 25 bp, Saccharomyces pastorianus
aaggctctgcagcatatctgtttgc

SEQ ID NO: 112538 - DNA, 25 bp, Saccharomyces pastorianus
aatggccgcgtatccaaatctgatc

SEQ ID NO: 112539 - DNA, 25 bp, Saccharomyces pastorianus
acggtataaggcatctcatctggga

SEQ ID NO: 112540 - DNA, 25 bp, Saccharomyces pastorianus
ggcagaatggtccttttttccaaag

SEQ ID NO: 112541 - DNA, 25 bp, Saccharomyces pastorianus
tggtatctttcctctttacatcgta

SEQ ID NO: 112542 - DNA, 25 bp, Saccharomyces pastorianus
cgagcatctgtattcgtgccaagaa

SEQ ID NO: 112543 - DNA, 25 bp, Saccharomyces pastorianus
ggctcttggattctatgctttcaca

SEQ ID NO: 112544 - DNA, 25 bp, Saccharomyces pastorianus
aaagatgcctaagtggtcccaatgg

SEQ ID NO: 112545 - DNA, 25 bp, Saccharomyces pastorianus
aacaaggacgaggacatccccgaca

SEQ ID NO: 112546 - DNA, 25 bp, Saccharomyces pastorianus
gagccttctgaagttgagtcactgg

SEQ ID NO: 112547 - DNA, 25 bp, Saccharomyces pastorianus
gagtattctgaagattacgagcctt

SEQ ID NO: 112548 - DNA, 25 bp, Saccharomyces pastorianus
gataactaaaacgaactctctcaat

SEQ ID NO: 112549 - DNA, 25 bp, Saccharomyces pastorianus
cgggatgccctactggatttatttt

SEQ ID NO: 112550 - DNA, 25 bp, Saccharomyces pastorianus
gatcatgtcaactagccgtatcctt

SEQ ID NO: 112551 - DNA, 25 bp, Saccharomyces pastorianus
gtattctttggcttcagagataaca

SEQ ID NO: 112552 - DNA, 25 bp, Saccharomyces pastorianus
tctctcaataatagtgccggccaca

SEQ ID NO: 112553 - DNA, 25 bp, Saccharomyces pastorianus
tgattttcaacgaaacccgggatgc

SEQ ID NO: 112554 - DNA, 25 bp, Saccharomyces pastorianus
aagctcgtaggccaagtattctttg

SEQ ID NO: 112555 - DNA, 25 bp, Saccharomyces pastorianus
aaactttgacaagggcatctatctt

SEQ ID NO: 112556 - DNA, 25 bp, Saccharomyces pastorianus
ttcgtttgggagctctagcattaat

SEQ ID NO: 112557 - DNA, 25 bp, Saccharomyces pastorianus
gtttaagaacttttgcatggtatct

SEQ ID NO: 112558 - DNA, 25 bp, Saccharomyces pastorianus
gctagagctttctgtgttggacata

SEQ ID NO: 112559 - DNA, 25 bp, Saccharomyces pastorianus
tttttcgtttgggagctctagcatt

SEQ ID NO: 112560 - DNA, 25 bp, Saccharomyces pastorianus
gagctttctgtgttggacatataaa

SEQ ID NO: 112561 - DNA, 25 bp, Saccharomyces pastorianus
gcatggtatctaaaagaggtttttc

SEQ ID NO: 112562 - DNA, 25 bp, Saccharomyces pastorianus
gcattaattactatagctagagctt

SEQ ID NO: 112563 - DNA, 25 bp, Saccharomyces pastorianus
gggagctctagcattaattactata

SEQ ID NO: 112564 - DNA, 25 bp, Saccharomyces pastorianus
ggtttttcgtttgggagctctagca

SEQ ID NO: 112565 - DNA, 25 bp, Saccharomyces pastorianus
atagctagagctttctgtgttggac

SEQ ID NO: 112566 - DNA, 25 bp, Saccharomyces pastorianus
tctgtgttggacatataaacatcat

SEQ ID NO: 112567 - DNA, 25 bp, Saccharomyces pastorianus
tcagcacttgcgtatgttgtaggag

SEQ ID NO: 112568 - DNA, 25 bp, Saccharomyces pastorianus
ccgatgttttgccatttgcgaggat

SEQ ID NO: 112569 - DNA, 25 bp, Saccharomyces pastorianus
ttacgtgggttcagcacttgcgtat

SEQ ID NO: 112570 - DNA, 25 bp, Saccharomyces pastorianus
ttttgatctatcttgcgccgtatgc

SEQ ID NO: 112571 - DNA, 25 bp, Saccharomyces pastorianus
gtaaggttcatcctgtttcagatag

SEQ ID NO: 112572 - DNA, 25 bp, Saccharomyces pastorianus
gcgccgtatgcaaagtcaatgaaag

SEQ ID NO: 112573 - DNA, 25 bp, Saccharomyces pastorianus
tctttgggtttacgtgggttcagca

SEQ ID NO: 112574 - DNA, 25 bp, Saccharomyces pastorianus
aatacagtattatggccctgccgat

SEQ ID NO: 112575 - DNA, 25 bp, Saccharomyces pastorianus
cgaggattgcagaatttctttgggt

SEQ ID NO: 112576 - DNA, 25 bp, Saccharomyces pastorianus
tattatggccctgccgatgttttgc

SEQ ID NO: 112577 - DNA, 25 bp, Saccharomyces pastorianus
agtgattttgatctatcttgcgccg

SEQ ID NO: 112578 - DNA, 25 bp, Saccharomyces pastorianus
aaccaacgtttctttgtcatcggat

SEQ ID NO: 112579 - DNA, 25 bp, Saccharomyces pastorianus
gtaaccggccaaattccaacagaag

SEQ ID NO: 112580 - DNA, 25 bp, Saccharomyces pastorianus
gagcagttaaatccggtgtcaaata

SEQ ID NO: 112581 - DNA, 25 bp, Saccharomyces pastorianus
gcaggtcaacaatctagaatccatt

SEQ ID NO: 112582 - DNA, 25 bp, Saccharomyces pastorianus
acggttgccaccattgctattaaat

SEQ ID NO: 112583 - DNA, 25 bp, Saccharomyces pastorianus
caaggttgtattttcagctgccgat

SEQ ID NO: 112584 - DNA, 25 bp, Saccharomyces pastorianus
gacaacaccctagagttttggagat

SEQ ID NO: 112585 - DNA, 25 bp, Saccharomyces pastorianus
gtcatcggatgcatttttcccattc

SEQ ID NO: 112586 - DNA, 25 bp, Saccharomyces pastorianus
gctatcgatttattcgtaaccggcc

SEQ ID NO: 112587 - DNA, 25 bp, Saccharomyces pastorianus
atacattgccgctccatctggttct

SEQ ID NO: 112588 - DNA, 25 bp, Saccharomyces pastorianus
aatctaattccgtatgttatgctag

SEQ ID NO: 112589 - DNA, 25 bp, Saccharomyces pastorianus
gagactaggctacaaagccaagcaa

SEQ ID NO: 112590 - DNA, 25 bp, Saccharomyces pastorianus
gaagttatattggttgatcctcaac

SEQ ID NO: 112591 - DNA, 25 bp, Saccharomyces pastorianus
ggtacaactggatctgcaatcccgt

SEQ ID NO: 112592 - DNA, 25 bp, Saccharomyces pastorianus
acttcgaagttatattggttgatcc

SEQ ID NO: 112593 - DNA, 25 bp, Saccharomyces pastorianus
gacaaggctaggagactaggctaca

SEQ ID NO: 112594 - DNA, 25 bp, Saccharomyces pastorianus
gctcggtacaactggatctgcaatc

SEQ ID NO: 112595 - DNA, 25 bp, Saccharomyces pastorianus
ccgtccataagcatcgtgaagctag

SEQ ID NO: 112596 - DNA, 25 bp, Saccharomyces pastorianus
taagcatcgtgaagctagaggcttg

SEQ ID NO: 112597 - DNA, 25 bp, Saccharomyces pastorianus
attggttgatcctcaacacaaggct

SEQ ID NO: 112598 - DNA, 25 bp, Saccharomyces pastorianus
aactggatctgcaatcccgtccata

SEQ ID NO: 112599 - DNA, 25 bp, Saccharomyces pastorianus
aatcccgtccataagcatcgtgaag

SEQ ID NO: 112600 - DNA, 25 bp, Saccharomyces pastorianus
acattctggccaacgtgtattcgac

SEQ ID NO: 112601 - DNA, 25 bp, Saccharomyces pastorianus
aatttgcatcattacggtggctcgc

SEQ ID NO: 112602 - DNA, 25 bp, Saccharomyces pastorianus
tttcgcaatcttcgcgttccagaac

SEQ ID NO: 112603 - DNA, 25 bp, Saccharomyces pastorianus
tgggcgtactggtttgtggcaaaaa

SEQ ID NO: 112604 - DNA, 25 bp, Saccharomyces pastorianus
acgcgttgttatttgcgcagcacaa

SEQ ID NO: 112605 - DNA, 25 bp, Saccharomyces pastorianus
gatgcgcaactttccttagtaggga

SEQ ID NO: 112606 - DNA, 25 bp, Saccharomyces pastorianus
aagcgctgctttactgcaatttgca

SEQ ID NO: 112607 - DNA, 25 bp, Saccharomyces pastorianus
ttatttgccagccaaccgcatattc

SEQ ID NO: 112608 - DNA, 25 bp, Saccharomyces pastorianus
aaatgtttcctattggatgcgcaac

SEQ ID NO: 112609 - DNA, 25 bp, Saccharomyces pastorianus
atgctatgtcagttcggaggcgtgt

SEQ ID NO: 112610 - DNA, 25 bp, Saccharomyces pastorianus
atttcggctggaggctaagcgctgc

SEQ ID NO: 112611 - DNA, 25 bp, Saccharomyces pastorianus
tgctccaggcatggttgcaaaccct

SEQ ID NO: 112612 - DNA, 25 bp, Saccharomyces pastorianus
ctgctagttccagtgccgctaagaa

SEQ ID NO: 112613 - DNA, 25 bp, Saccharomyces pastorianus
gtctctgctacttctactgctagtt

SEQ ID NO: 112614 - DNA, 25 bp, Saccharomyces pastorianus
aacagtgccttagtttccaacaatg

SEQ ID NO: 112615 - DNA, 25 bp, Saccharomyces pastorianus
gttcaaagaacgctgctccaggcat

SEQ ID NO: 112616 - DNA, 25 bp, Saccharomyces pastorianus
ttgcaaaccctgtttcctcgaagta

SEQ ID NO: 112617 - DNA, 25 bp, Saccharomyces pastorianus
agtttccaacaatgtcgttgccgcc

SEQ ID NO: 112618 - DNA, 25 bp, Saccharomyces pastorianus
acggtatcatcatggccgcatttgc

SEQ ID NO: 112619 - DNA, 25 bp, Saccharomyces pastorianus
gccgctaagaacactacttccagtt

SEQ ID NO: 112620 - DNA, 25 bp, Saccharomyces pastorianus
gtttcctcgaagtacggtatcatca

SEQ ID NO: 112621 - DNA, 25 bp, Saccharomyces pastorianus
tcctccatcaaaactaacagtgcct

SEQ ID NO: 112622 - DNA, 25 bp, Saccharomyces pastorianus
tcacttttactatggattacggtta

SEQ ID NO: 112623 - DNA, 25 bp, Saccharomyces pastorianus
tgctcttttctgtatatcactttta

SEQ ID NO: 112624 - DNA, 25 bp, Saccharomyces pastorianus
aaaggacgacagtgccatcaaggaa

SEQ ID NO: 112625 - DNA, 25 bp, Saccharomyces pastorianus
gaaatccactagtactgccagacgg

SEQ ID NO: 112626 - DNA, 25 bp, Saccharomyces pastorianus
acgggaatatccacttctatgctct

SEQ ID NO: 112627 - DNA, 25 bp, Saccharomyces pastorianus
atcgccacacacgtatcttttgttg

SEQ ID NO: 112628 - DNA, 25 bp, Saccharomyces pastorianus
gctcatctatgccacaaacgggaat

SEQ ID NO: 112629 - DNA, 25 bp, Saccharomyces pastorianus
ccacttctatgctcttttctgtata

SEQ ID NO: 112630 - DNA, 25 bp, Saccharomyces pastorianus
tcttttgttgcactactactgaccc

SEQ ID NO: 112631 - DNA, 25 bp, Saccharomyces pastorianus
gaaagtgtatttgaaccagggacct

SEQ ID NO: 112632 - DNA, 25 bp, Saccharomyces pastorianus
tactgaccctcatctggctcatcta

SEQ ID NO: 112633 - DNA, 25 bp, Saccharomyces pastorianus
aatctagaagatacgtttgccgacg

SEQ ID NO: 112634 - DNA, 25 bp, Saccharomyces pastorianus
aagagacacttcatttgcaaattta

SEQ ID NO: 112635 - DNA, 25 bp, Saccharomyces pastorianus
caggtgtagatctgactaattctga

SEQ ID NO: 112636 - DNA, 25 bp, Saccharomyces pastorianus
gggaaggacgttactagagaccagt

SEQ ID NO: 112637 - DNA, 25 bp, Saccharomyces pastorianus
acggattctgattgtaacgcccttc

SEQ ID NO: 112638 - DNA, 25 bp, Saccharomyces pastorianus
cgcaaggcatgtttcatcaggtgta

SEQ ID NO: 112639 - DNA, 25 bp, Saccharomyces pastorianus
gaacatcctttggatacggattctg

SEQ ID NO: 112640 - DNA, 25 bp, Saccharomyces pastorianus
gccgacgtggtgaactcacaatttg

SEQ ID NO: 112641 - DNA, 25 bp, Saccharomyces pastorianus
tgtaacgcccttcgtctcaaacttt

SEQ ID NO: 112642 - DNA, 25 bp, Saccharomyces pastorianus
aagttttgtctctatttcggtgaag

SEQ ID NO: 112643 - DNA, 25 bp, Saccharomyces pastorianus
tagcataagtactgtcgcaaggcat

SEQ ID NO: 112644 - DNA, 25 bp, Saccharomyces pastorianus
gatgttattttgaccttgaagcact

SEQ ID NO: 112645 - DNA, 25 bp, Saccharomyces pastorianus
ggaggatctttccatcgtgactgga

SEQ ID NO: 112646 - DNA, 25 bp, Saccharomyces pastorianus
caaagccgatgggattcttttcgaa

SEQ ID NO: 112647 - DNA, 25 bp, Saccharomyces pastorianus
gttatcaccttttggactaatcggg

SEQ ID NO: 112648 - DNA, 25 bp, Saccharomyces pastorianus
atcaacgacgcggattaggcctttt

SEQ ID NO: 112649 - DNA, 25 bp, Saccharomyces pastorianus
ggtgacctcgcccattatgataaag

SEQ ID NO: 112650 - DNA, 25 bp, Saccharomyces pastorianus
acagatactctgttggcaccttatt

SEQ ID NO: 112651 - DNA, 25 bp, Saccharomyces pastorianus
ggccttttacttatcgagttttcat

SEQ ID NO: 112652 - DNA, 25 bp, Saccharomyces pastorianus
aagtgaccctggaggatctttccat

SEQ ID NO: 112653 - DNA, 25 bp, Saccharomyces pastorianus
atgtctttgtcttttcactaagcta

SEQ ID NO: 112654 - DNA, 25 bp, Saccharomyces pastorianus
gggccagaagtaccgttatcacctt

SEQ ID NO: 112655 - DNA, 25 bp, Saccharomyces pastorianus
aatgccacccaaatacatgctctat

SEQ ID NO: 112656 - DNA, 25 bp, Saccharomyces pastorianus
gaaagggtcttcttttgacatacag

SEQ ID NO: 112657 - DNA, 25 bp, Saccharomyces pastorianus
acggtattgttatgtggttcctaga

SEQ ID NO: 112658 - DNA, 25 bp, Saccharomyces pastorianus
ggttcctagatttggatccacagtt

SEQ ID NO: 112659 - DNA, 25 bp, Saccharomyces pastorianus
tgctttgtctatatccatccgactt

SEQ ID NO: 112660 - DNA, 25 bp, Saccharomyces pastorianus
gtaaacctctgactggtcaaggctt

SEQ ID NO: 112661 - DNA, 25 bp, Saccharomyces pastorianus
gtttatcaccagaaagggcttccag

SEQ ID NO: 112662 - DNA, 25 bp, Saccharomyces pastorianus
atgatttgcgctggttttgtcgacc

SEQ ID NO: 112663 - DNA, 25 bp, Saccharomyces pastorianus
ctattattccttgcaccttggtgga

SEQ ID NO: 112664 - DNA, 25 bp, Saccharomyces pastorianus
gagcagatgttttatttccagatga

SEQ ID NO: 112665 - DNA, 25 bp, Saccharomyces pastorianus
ttatattcctgttttggccacgaga

SEQ ID NO: 112666 - DNA, 25 bp, Saccharomyces pastorianus
ttaggaacgtcttcgcaccaaacga

SEQ ID NO: 112667 - DNA, 25 bp, Saccharomyces pastorianus
ttccggtcacgtttatttatcatat

SEQ ID NO: 112668 - DNA, 25 bp, Saccharomyces pastorianus
ttgggaagccagtactaagcaaact

SEQ ID NO: 112669 - DNA, 25 bp, Saccharomyces pastorianus
atgcgggacgaatacaagctgtcaa

SEQ ID NO: 112670 - DNA, 25 bp, Saccharomyces pastorianus
gagggcttcgattcgtattttgttt

SEQ ID NO: 112671 - DNA, 25 bp, Saccharomyces pastorianus
gtgaggaaattctacagcattgctt

SEQ ID NO: 112672 - DNA, 25 bp, Saccharomyces pastorianus
atttgagacattttccggtcacgtt

SEQ ID NO: 112673 - DNA, 25 bp, Saccharomyces pastorianus
taatgcggtttgagggcttcgattc

SEQ ID NO: 112674 - DNA, 25 bp, Saccharomyces pastorianus
acagcattgctttcacatcggagat

SEQ ID NO: 112675 - DNA, 25 bp, Saccharomyces pastorianus
aagctgccggttggactggtatact

SEQ ID NO: 112676 - DNA, 25 bp, Saccharomyces pastorianus
atgagcttaatctcgccaaacctga

SEQ ID NO: 112677 - DNA, 25 bp, Saccharomyces pastorianus
aactatgtttggtttcacgcggata

SEQ ID NO: 112678 - DNA, 25 bp, Saccharomyces pastorianus
gatatgtgactgtctgcagctatgt

SEQ ID NO: 112679 - DNA, 25 bp, Saccharomyces pastorianus
aacaggtatatgaatcccggtgaag

SEQ ID NO: 112680 - DNA, 25 bp, Saccharomyces pastorianus
tgagtattcaacaccttaccaaatt

SEQ ID NO: 112681 - DNA, 25 bp, Saccharomyces pastorianus
aatcgatgacataccgcaagaagtg

SEQ ID NO: 112682 - DNA, 25 bp, Saccharomyces pastorianus
gtactcaagtggtcatgtttattta

SEQ ID NO: 112683 - DNA, 25 bp, Saccharomyces pastorianus
aaacagactggccaagacaagggta

SEQ ID NO: 112684 - DNA, 25 bp, Saccharomyces pastorianus
tgataacaccatggcataacttgag

SEQ ID NO: 112685 - DNA, 25 bp, Saccharomyces pastorianus
atgccacaatgcaccatcttgataa

SEQ ID NO: 112686 - DNA, 25 bp, Saccharomyces pastorianus
gtttcacgcggataagtactcaagt

SEQ ID NO: 112687 - DNA, 25 bp, Saccharomyces pastorianus
ggtgaagtatcatttaagtctctaa

SEQ ID NO: 112688 - DNA, 25 bp, Saccharomyces pastorianus
caaacttctgaattgctttcctctt

SEQ ID NO: 112689 - DNA, 25 bp, Saccharomyces pastorianus
gcggcgacaacttttcataacttag

SEQ ID NO: 112690 - DNA, 25 bp, Saccharomyces pastorianus
gttggtgcgaaaatcagcttcatca

SEQ ID NO: 112691 - DNA, 25 bp, Saccharomyces pastorianus
aattacgcagaacttcacggtgtat

SEQ ID NO: 112692 - DNA, 25 bp, Saccharomyces pastorianus
gttggcataggttcagcggcgacaa

SEQ ID NO: 112693 - DNA, 25 bp, Saccharomyces pastorianus
attcggcggacagcggcagcattaa

SEQ ID NO: 112694 - DNA, 25 bp, Saccharomyces pastorianus
ataactcacatttcgtctgaccaac

SEQ ID NO: 112695 - DNA, 25 bp, Saccharomyces pastorianus
aggtcacggctgctgctaattcagt

SEQ ID NO: 112696 - DNA, 25 bp, Saccharomyces pastorianus
cagcattaagctgcccaaatcgtta

SEQ ID NO: 112697 - DNA, 25 bp, Saccharomyces pastorianus
ttttccccttgtcagattcggcgga

SEQ ID NO: 112698 - DNA, 25 bp, Saccharomyces pastorianus
tactcttccgaatttccctatgaac

SEQ ID NO: 112699 - DNA, 25 bp, Saccharomyces pastorianus
tcatcatctcccttcaattcaataa

SEQ ID NO: 112700 - DNA, 25 bp, Saccharomyces pastorianus
gtgctgctgcagtttcaacgacaac

SEQ ID NO: 112701 - DNA, 25 bp, Saccharomyces pastorianus
ttaaccacttctaacctcaacacga

SEQ ID NO: 112702 - DNA, 25 bp, Saccharomyces pastorianus
gggaccatatggcacaagaactttg

SEQ ID NO: 112703 - DNA, 25 bp, Saccharomyces pastorianus
ataattccaatcctggtgctgctgc

SEQ ID NO: 112704 - DNA, 25 bp, Saccharomyces pastorianus
cactacgttatctccaatggtgcaa

SEQ ID NO: 112705 - DNA, 25 bp, Saccharomyces pastorianus
gttacaggttccaagacaagacgat

SEQ ID NO: 112706 - DNA, 25 bp, Saccharomyces pastorianus
gttccgtgcctcttcaaaagttaca

SEQ ID NO: 112707 - DNA, 25 bp, Saccharomyces pastorianus
agagctattcagagacaacccacgc

SEQ ID NO: 112708 - DNA, 25 bp, Saccharomyces pastorianus
aactcccgccgctaatagcgatgaa

SEQ ID NO: 112709 - DNA, 25 bp, Saccharomyces pastorianus
ccacttccagccatttcatcaataa

SEQ ID NO: 112710 - DNA, 25 bp, Saccharomyces pastorianus
ttaacgtaccatattctgaacacag

SEQ ID NO: 112711 - DNA, 25 bp, Saccharomyces pastorianus
tacctaccgggtggagtcacaattt

SEQ ID NO: 112712 - DNA, 25 bp, Saccharomyces pastorianus
gaatcatccgtacatttggtaccta

SEQ ID NO: 112713 - DNA, 25 bp, Saccharomyces pastorianus
attatttgttatgccgaattccgtt

SEQ ID NO: 112714 - DNA, 25 bp, Saccharomyces pastorianus
gaagtcattcccacagtgaatctaa

SEQ ID NO: 112715 - DNA, 25 bp, Saccharomyces pastorianus
gcttactcaccagcaatttacatga

SEQ ID NO: 112716 - DNA, 25 bp, Saccharomyces pastorianus
gatgttgtcgggtttatacctaccg

SEQ ID NO: 112717 - DNA, 25 bp, Saccharomyces pastorianus
gacatgtgggacgaaagcttactca

SEQ ID NO: 112718 - DNA, 25 bp, Saccharomyces pastorianus
gaatgggtttgaaatctcgagtata

SEQ ID NO: 112719 - DNA, 25 bp, Saccharomyces pastorianus
gccgaattccgttaaattttcaatg

SEQ ID NO: 112720 - DNA, 25 bp, Saccharomyces pastorianus
gaagtgttctgaagtcattcccaca

SEQ ID NO: 112721 - DNA, 25 bp, Saccharomyces pastorianus
tagagctcgtcaaatgtagtggcat

SEQ ID NO: 112722 - DNA, 25 bp, Saccharomyces pastorianus
gaaattcgctgtctgattctaggac

SEQ ID NO: 112723 - DNA, 25 bp, Saccharomyces pastorianus
gatgtgagcctttcaatgcggtttg

SEQ ID NO: 112724 - DNA, 25 bp, Saccharomyces pastorianus
gagtgtgctgttatcgttgtgttga

SEQ ID NO: 112725 - DNA, 25 bp, Saccharomyces pastorianus
tgtgacaatatctctatgggacatt

SEQ ID NO: 112726 - DNA, 25 bp, Saccharomyces pastorianus
aacgcacattaaggccattttggga

SEQ ID NO: 112727 - DNA, 25 bp, Saccharomyces pastorianus
gcttcatcggaggtgtttactggta

SEQ ID NO: 112728 - DNA, 25 bp, Saccharomyces pastorianus
aatgcctactgtgggttttcaaata

SEQ ID NO: 112729 - DNA, 25 bp, Saccharomyces pastorianus
gccggacatccgaatagagctcgtc

SEQ ID NO: 112730 - DNA, 25 bp, Saccharomyces pastorianus
aggtattgatgacctgcgtgaccgt

SEQ ID NO: 112731 - DNA, 25 bp, Saccharomyces pastorianus
gtggaggacaagtccgagcttcatc

SEQ ID NO: 112732 - DNA, 25 bp, Saccharomyces pastorianus
gattaagagagctgaccctcacttc

SEQ ID NO: 112733 - DNA, 25 bp, Saccharomyces pastorianus
caagtcacagtataacccctattca

SEQ ID NO: 112734 - DNA, 25 bp, Saccharomyces pastorianus
ggttgatcgatccaagccatagcac

SEQ ID NO: 112735 - DNA, 25 bp, Saccharomyces pastorianus
tcagccattacttcggataccattc

SEQ ID NO: 112736 - DNA, 25 bp, Saccharomyces pastorianus
gccagccgactcatacgtgtataag

SEQ ID NO: 112737 - DNA, 25 bp, Saccharomyces pastorianus
aagtacgtcagcttcaagatctcct

SEQ ID NO: 112738 - DNA, 25 bp, Saccharomyces pastorianus
gataccattcgtcctgattgggaga

SEQ ID NO: 112739 - DNA, 25 bp, Saccharomyces pastorianus
cagcctatttgtaccgagtgttttg

SEQ ID NO: 112740 - DNA, 25 bp, Saccharomyces pastorianus
taaggacgccgccatatcaagagct

SEQ ID NO: 112741 - DNA, 25 bp, Saccharomyces pastorianus
gcggtcagccaaacatatcagccat

SEQ ID NO: 112742 - DNA, 25 bp, Saccharomyces pastorianus
aaatcttcttacctctgagccagca

SEQ ID NO: 112743 - DNA, 25 bp, Saccharomyces pastorianus
ttcgaacacgccaaaaagtcattgt

SEQ ID NO: 112744 - DNA, 25 bp, Saccharomyces pastorianus
tttcagcactagcaattacctcaaa

SEQ ID NO: 112745 - DNA, 25 bp, Saccharomyces pastorianus
ttcagtcggatttctgtgtttcttc

SEQ ID NO: 112746 - DNA, 25 bp, Saccharomyces pastorianus
tgtttcttcctttcagcactagcaa

SEQ ID NO: 112747 - DNA, 25 bp, Saccharomyces pastorianus
aaagtcattgttcagtcggatttct

SEQ ID NO: 112748 - DNA, 25 bp, Saccharomyces pastorianus
gagtttgaatatatacctatgcgta

SEQ ID NO: 112749 - DNA, 25 bp, Saccharomyces pastorianus
gcatttgatttcttcgaacacgcca

SEQ ID NO: 112750 - DNA, 25 bp, Saccharomyces pastorianus
atacctatgcgtacgtttatatata

SEQ ID NO: 112751 - DNA, 25 bp, Saccharomyces pastorianus
aatgacacattgatggtatcgccca

SEQ ID NO: 112752 - DNA, 25 bp, Saccharomyces pastorianus
tggtatcgcccaaaactgaaaaatt

SEQ ID NO: 112753 - DNA, 25 bp, Saccharomyces pastorianus
atgtcacgcactgacacaagtgaga

SEQ ID NO: 112754 - DNA, 25 bp, Saccharomyces pastorianus
tgatcttgatttttgcaacgtttca

SEQ ID NO: 112755 - DNA, 25 bp, Saccharomyces pastorianus
tattccacggttcctactgttaatt

SEQ ID NO: 112756 - DNA, 25 bp, Saccharomyces pastorianus
gcaacgtttcaaagacagcgggatc

SEQ ID NO: 112757 - DNA, 25 bp, Saccharomyces pastorianus
ctctaaatatctcaaggcatccttt

SEQ ID NO: 112758 - DNA, 25 bp, Saccharomyces pastorianus
aaggcatccttttagtgcaacccgc

SEQ ID NO: 112759 - DNA, 25 bp, Saccharomyces pastorianus
cagcgggatctaattattccacggt

SEQ ID NO: 112760 - DNA, 25 bp, Saccharomyces pastorianus
gattcttttgatcttgatttttgca

SEQ ID NO: 112761 - DNA, 25 bp, Saccharomyces pastorianus
ggtcaaagtgccaattatctcaaag

SEQ ID NO: 112762 - DNA, 25 bp, Saccharomyces pastorianus
gtgcaacccgcctatttataaactg

SEQ ID NO: 112763 - DNA, 25 bp, Saccharomyces pastorianus
acaatttacattgcctcgccatgct

SEQ ID NO: 112764 - DNA, 25 bp, Saccharomyces pastorianus
tcgccatgctgattcctctaaatat

SEQ ID NO: 112765 - DNA, 25 bp, Saccharomyces pastorianus
gtcgatgtatcgactctacaagttc

SEQ ID NO: 112766 - DNA, 25 bp, Saccharomyces pastorianus
gtgacatgcaattttctcctgattt

SEQ ID NO: 112767 - DNA, 25 bp, Saccharomyces pastorianus
acacagttgccattagcccacaggg

SEQ ID NO: 112768 - DNA, 25 bp, Saccharomyces pastorianus
ccaccgtggctggatggtcgactaa

SEQ ID NO: 112769 - DNA, 25 bp, Saccharomyces pastorianus
aagtttgaagctaggttctaccaca

SEQ ID NO: 112770 - DNA, 25 bp, Saccharomyces pastorianus
gatactaactcgttcttggtcgatg

SEQ ID NO: 112771 - DNA, 25 bp, Saccharomyces pastorianus
ctcatgaaggtttagacgctgccac

SEQ ID NO: 112772 - DNA, 25 bp, Saccharomyces pastorianus
attttggtcccttgaacacagttgc

SEQ ID NO: 112773 - DNA, 25 bp, Saccharomyces pastorianus
gaaacagactgtcctctaaacaccg

SEQ ID NO: 112774 - DNA, 25 bp, Saccharomyces pastorianus
gggcacaagttatgcctccggtggt

SEQ ID NO: 112775 - DNA, 25 bp, Saccharomyces pastorianus
ggtctccgaagagccaatccataaa

SEQ ID NO: 112776 - DNA, 25 bp, Saccharomyces pastorianus
atgcgacgtatgtgctcgttgcaga

SEQ ID NO: 112777 - DNA, 25 bp, Saccharomyces pastorianus
gcaaacaggttttctacaacttcag

SEQ ID NO: 112778 - DNA, 25 bp, Saccharomyces pastorianus
ttttggtaacgagtgccgctcaaga

SEQ ID NO: 112779 - DNA, 25 bp, Saccharomyces pastorianus
aggtatgtctgtcgtagcttctcgc

SEQ ID NO: 112780 - DNA, 25 bp, Saccharomyces pastorianus
tttgtccgcctattttcaatccttc

SEQ ID NO: 112781 - DNA, 25 bp, Saccharomyces pastorianus
ggctgaagttcaaaagctgctccta

SEQ ID NO: 112782 - DNA, 25 bp, Saccharomyces pastorianus
aagaatcgcgtcactatcctattaa

SEQ ID NO: 112783 - DNA, 25 bp, Saccharomyces pastorianus
cgcgccataacgaaattgcccaatt

SEQ ID NO: 112784 - DNA, 25 bp, Saccharomyces pastorianus
aaccacgagaatcctataccagcga

SEQ ID NO: 112785 - DNA, 25 bp, Saccharomyces pastorianus
ttaaactactggttccccaatgtgg

SEQ ID NO: 112786 - DNA, 25 bp, Saccharomyces pastorianus
agctatgccttcacaagtgctgcaa

SEQ ID NO: 112787 - DNA, 25 bp, Saccharomyces pastorianus
tacaggaaccacaggagccactttc

SEQ ID NO: 112788 - DNA, 25 bp, Saccharomyces pastorianus
ggtttcttctcctcattattcataa

SEQ ID NO: 112789 - DNA, 25 bp, Saccharomyces pastorianus
gccattgcccgttcattagagacta

SEQ ID NO: 112790 - DNA, 25 bp, Saccharomyces pastorianus
aagtcctcgacaaaatggccctaca

SEQ ID NO: 112791 - DNA, 25 bp, Saccharomyces pastorianus
attggcgtggtatcatttggcttct

SEQ ID NO: 112792 - DNA, 25 bp, Saccharomyces pastorianus
atggcccaactcatttatgtccgag

SEQ ID NO: 112793 - DNA, 25 bp, Saccharomyces pastorianus
atccaactattccaagcccattaag

SEQ ID NO: 112794 - DNA, 25 bp, Saccharomyces pastorianus
ccgagctgacgccttcttgaaaaaa

SEQ ID NO: 112795 - DNA, 25 bp, Saccharomyces pastorianus
tcgaacctgttagtgctcaaagcgc

SEQ ID NO: 112796 - DNA, 25 bp, Saccharomyces pastorianus
gccactttccacattaaggccagta

SEQ ID NO: 112797 - DNA, 25 bp, Saccharomyces pastorianus
atttcctttgtgtttgccattggcg

SEQ ID NO: 112798 - DNA, 25 bp, Saccharomyces pastorianus
gctgctttgttgcaagaggcttcca

SEQ ID NO: 112799 - DNA, 25 bp, Saccharomyces pastorianus
gagagttgccaaaccaattgctgtg

SEQ ID NO: 112800 - DNA, 25 bp, Saccharomyces pastorianus
gaggcttccagatcaccggaactaa

SEQ ID NO: 112801 - DNA, 25 bp, Saccharomyces pastorianus
tatttcctaggattcatcgccacga

SEQ ID NO: 112802 - DNA, 25 bp, Saccharomyces pastorianus
tccaggcttactgacatctaccaag

SEQ ID NO: 112803 - DNA, 25 bp, Saccharomyces pastorianus
ggtgtcactgctgtatatttcctag

SEQ ID NO: 112804 - DNA, 25 bp, Saccharomyces pastorianus
gttatcttcgctaggtactacttgg

SEQ ID NO: 112805 - DNA, 25 bp, Saccharomyces pastorianus
atttcatgccgagccaaagagagtt

SEQ ID NO: 112806 - DNA, 25 bp, Saccharomyces pastorianus
aaggccactttgattctagcgtcat

SEQ ID NO: 112807 - DNA, 25 bp, Saccharomyces pastorianus
gggaaattctgcaactcaacctgaa

SEQ ID NO: 112808 - DNA, 25 bp, Saccharomyces pastorianus
tggttgaattcttgtgccgccgcat

SEQ ID NO: 112809 - DNA, 25 bp, Saccharomyces pastorianus
cttctgggacggttcgatacgcaat

SEQ ID NO: 112810 - DNA, 25 bp, Saccharomyces pastorianus
aattaggtcattatgcttcttgcat

SEQ ID NO: 112811 - DNA, 25 bp, Saccharomyces pastorianus
ggtaaccggagataatttgtcacat

SEQ ID NO: 112812 - DNA, 25 bp, Saccharomyces pastorianus
tagcactgaaacctactgaccctaa

SEQ ID NO: 112813 - DNA, 25 bp, Saccharomyces pastorianus
ggtacacttcccatctggtcaaaaa

SEQ ID NO: 112814 - DNA, 25 bp, Saccharomyces pastorianus
ttatgtcggcgatgtgcttgttgat

SEQ ID NO: 112815 - DNA, 25 bp, Saccharomyces pastorianus
caattttgacaagcccttctgggac

SEQ ID NO: 112816 - DNA, 25 bp, Saccharomyces pastorianus
ttgccaacactgtcagcgaccaatg

SEQ ID NO: 112817 - DNA, 25 bp, Saccharomyces pastorianus
ttacgggtatgcctggtgatctcgt

SEQ ID NO: 112818 - DNA, 25 bp, Saccharomyces pastorianus
ggtacctatattaaagtccctgaag

SEQ ID NO: 112819 - DNA, 25 bp, Saccharomyces pastorianus
gtgctcgtggatcccagtacgatag

SEQ ID NO: 112820 - DNA, 25 bp, Saccharomyces pastorianus
taatttatcaactgggctcacgaca

SEQ ID NO: 112821 - DNA, 25 bp, Saccharomyces pastorianus
actcttcttttcctttgtactgtcg

SEQ ID NO: 112822 - DNA, 25 bp, Saccharomyces pastorianus
tgattcactgtcttattggtccgtt

SEQ ID NO: 112823 - DNA, 25 bp, Saccharomyces pastorianus
tgggctcacgacacaagatcaacag

SEQ ID NO: 112824 - DNA, 25 bp, Saccharomyces pastorianus
tttgctgtgcggttcaaaccaacag

SEQ ID NO: 112825 - DNA, 25 bp, Saccharomyces pastorianus
aacgacctactgtgtaatttatgca

SEQ ID NO: 112826 - DNA, 25 bp, Saccharomyces pastorianus
gtcatccctggtattgtacactgtt

SEQ ID NO: 112827 - DNA, 25 bp, Saccharomyces pastorianus
ttggtccgtttttgtttgcaataat

SEQ ID NO: 112828 - DNA, 25 bp, Saccharomyces pastorianus
gtgaatttaacaccctactcttaat

SEQ ID NO: 112829 - DNA, 25 bp, Saccharomyces pastorianus
gaaggaatgctttttccccagaaat

SEQ ID NO: 112830 - DNA, 25 bp, Saccharomyces pastorianus
ggaagtgtaccaaccgtcatccctg

SEQ ID NO: 112831 - DNA, 25 bp, Saccharomyces pastorianus
ttgacttacaaatccgaactttcca

SEQ ID NO: 112832 - DNA, 25 bp, Saccharomyces pastorianus
gtttccaagaattctacttccttca

SEQ ID NO: 112833 - DNA, 25 bp, Saccharomyces pastorianus
agatccacagtggtgtcctgagctc

SEQ ID NO: 112834 - DNA, 25 bp, Saccharomyces pastorianus
aaaagtccgtcattgactgctcaaa

SEQ ID NO: 112835 - DNA, 25 bp, Saccharomyces pastorianus
gttacttcaatagtgcgcaatgcag

SEQ ID NO: 112836 - DNA, 25 bp, Saccharomyces pastorianus
gaactttccaaatctcgtgctttac

SEQ ID NO: 112837 - DNA, 25 bp, Saccharomyces pastorianus
agtccggctgctctcaaacaattag

SEQ ID NO: 112838 - DNA, 25 bp, Saccharomyces pastorianus
atactccattttgctaatttcggtg

SEQ ID NO: 112839 - DNA, 25 bp, Saccharomyces pastorianus
tcctgagctcgatcgagtctgactt

SEQ ID NO: 112840 - DNA, 25 bp, Saccharomyces pastorianus
aattggctgtgtttcgtatagtccg

SEQ ID NO: 112841 - DNA, 25 bp, Saccharomyces pastorianus
tccttcaaaaatccacgcaggcttg

SEQ ID NO: 112842 - DNA, 25 bp, Saccharomyces pastorianus
gagctcaggacaccactgtggatct

SEQ ID NO: 112843 - DNA, 25 bp, Saccharomyces pastorianus
ggtttttcattacaaatcattccat

SEQ ID NO: 112844 - DNA, 25 bp, Saccharomyces pastorianus
tgcattgcgcactattgaagtaact

SEQ ID NO: 112845 - DNA, 25 bp, Saccharomyces pastorianus
taaccaacttttcttactcttgctc

SEQ ID NO: 112846 - DNA, 25 bp, Saccharomyces pastorianus
ttgttcccttttcttcaagtcagac

SEQ ID NO: 112847 - DNA, 25 bp, Saccharomyces pastorianus
gaacgaccatcctttatttcaagcc

SEQ ID NO: 112848 - DNA, 25 bp, Saccharomyces pastorianus
aagtcagactcgatcgagctcagga

SEQ ID NO: 112849 - DNA, 25 bp, Saccharomyces pastorianus
tatttcaagcctgcgtggatttttg

SEQ ID NO: 112850 - DNA, 25 bp, Saccharomyces pastorianus
aaaccttgaattctgcattgcgcac

SEQ ID NO: 112851 - DNA, 25 bp, Saccharomyces pastorianus
ggaatcgcaccaaagcactacattt

SEQ ID NO: 112852 - DNA, 25 bp, Saccharomyces pastorianus
gatcttccctctgtttctcaaaaat

SEQ ID NO: 112853 - DNA, 25 bp, Saccharomyces pastorianus
cattgtcgcaacaggttccattgga

SEQ ID NO: 112854 - DNA, 25 bp, Saccharomyces pastorianus
agcctgaatcagctctctgtgttta

SEQ ID NO: 112855 - DNA, 25 bp, Saccharomyces pastorianus
gaagtgtacctatttccagttgttt

SEQ ID NO: 112856 - DNA, 25 bp, Saccharomyces pastorianus
gtgtagtacccgtggaatcatcagc

SEQ ID NO: 112857 - DNA, 25 bp, Saccharomyces pastorianus
gtttgataaccactatcagcccggg

SEQ ID NO: 112858 - DNA, 25 bp, Saccharomyces pastorianus
ggtacttatccatatcattgtcgca

SEQ ID NO: 112859 - DNA, 25 bp, Saccharomyces pastorianus
aattcagatgactttgccaaccaaa

SEQ ID NO: 112860 - DNA, 25 bp, Saccharomyces pastorianus
tgattgtttgctcaacttacggccc

SEQ ID NO: 112861 - DNA, 25 bp, Saccharomyces pastorianus
gatctggaagtctctcgtattaaca

SEQ ID NO: 112862 - DNA, 25 bp, Saccharomyces pastorianus
atttgaattacttgcctcgatacgg

SEQ ID NO: 112863 - DNA, 25 bp, Saccharomyces pastorianus
gggcatcgttatacctgatctggaa

SEQ ID NO: 112864 - DNA, 25 bp, Saccharomyces pastorianus
gtctcttctttcattttgcggcaga

SEQ ID NO: 112865 - DNA, 25 bp, Saccharomyces pastorianus
ttgtgccgcttttaatcttttgttc

SEQ ID NO: 112866 - DNA, 25 bp, Saccharomyces pastorianus
ttctactccacccttaaatcaatta

SEQ ID NO: 112867 - DNA, 25 bp, Saccharomyces pastorianus
ctttcccctccatagtagcagatag

SEQ ID NO: 112868 - DNA, 25 bp, Saccharomyces pastorianus
agcgatcttcggttattcttttggc

SEQ ID NO: 112869 - DNA, 25 bp, Saccharomyces pastorianus
attacaagtaactctcctgtctctt

SEQ ID NO: 112870 - DNA, 25 bp, Saccharomyces pastorianus
gggagtgctttgctacagctatact

SEQ ID NO: 112871 - DNA, 25 bp, Saccharomyces pastorianus
gaagatccttctttaagagcctcca

SEQ ID NO: 112872 - DNA, 25 bp, Saccharomyces pastorianus
atagcatcgcttttggtatttcttg

SEQ ID NO: 112873 - DNA, 25 bp, Saccharomyces pastorianus
atatcccatgacttcagcagcattg

SEQ ID NO: 112874 - DNA, 25 bp, Saccharomyces pastorianus
atggtacaagcccaggtttctactc

SEQ ID NO: 112875 - DNA, 25 bp, Saccharomyces pastorianus
aaagcgcatacagggtttcagaaca

SEQ ID NO: 112876 - DNA, 25 bp, Saccharomyces pastorianus
ggttatggctatatgcagcacctaa

SEQ ID NO: 112877 - DNA, 25 bp, Saccharomyces pastorianus
aaacgtttatgcctttgatctggac

SEQ ID NO: 112878 - DNA, 25 bp, Saccharomyces pastorianus
acgttatcacacaggttatggctat

SEQ ID NO: 112879 - DNA, 25 bp, Saccharomyces pastorianus
cacggccgtcatagtcatattttct

SEQ ID NO: 112880 - DNA, 25 bp, Saccharomyces pastorianus
atccaccctggattacctgtgtaat

SEQ ID NO: 112881 - DNA, 25 bp, Saccharomyces pastorianus
tcattgataatgatcccacggccgt

SEQ ID NO: 112882 - DNA, 25 bp, Saccharomyces pastorianus
ttttaactccaagaaatccaccctg

SEQ ID NO: 112883 - DNA, 25 bp, Saccharomyces pastorianus
tattattgcggtgacgccgctggga

SEQ ID NO: 112884 - DNA, 25 bp, Saccharomyces pastorianus
gaacaaatttctcccatcaagttga

SEQ ID NO: 112885 - DNA, 25 bp, Saccharomyces pastorianus
aaggtggtgtcatcaccgtcccaag

SEQ ID NO: 112886 - DNA, 25 bp, Saccharomyces pastorianus
aaacttgcgaatacgtgtgctcatt

SEQ ID NO: 112887 - DNA, 25 bp, Saccharomyces pastorianus
gaaactatgctctggcgtaactatt

SEQ ID NO: 112888 - DNA, 25 bp, Saccharomyces pastorianus
agataacaaacctgtcctcagcagc

SEQ ID NO: 112889 - DNA, 25 bp, Saccharomyces pastorianus
attcaagaatacacctgccaatgga

SEQ ID NO: 112890 - DNA, 25 bp, Saccharomyces pastorianus
caagggttcttatcgtctttacaga

SEQ ID NO: 112891 - DNA, 25 bp, Saccharomyces pastorianus
gtgtgctcatttacagaactgctcg

SEQ ID NO: 112892 - DNA, 25 bp, Saccharomyces pastorianus
cgatcccatatacgaaattgcagct

SEQ ID NO: 112893 - DNA, 25 bp, Saccharomyces pastorianus
actgattctagttcgagctcataat

SEQ ID NO: 112894 - DNA, 25 bp, Saccharomyces pastorianus
gcagctacagtttgcgtataacctt

SEQ ID NO: 112895 - DNA, 25 bp, Saccharomyces pastorianus
tagagttgccttaacatcgatccca

SEQ ID NO: 112896 - DNA, 25 bp, Saccharomyces pastorianus
aagggatcgactatgggaccagaca

SEQ ID NO: 112897 - DNA, 25 bp, Saccharomyces pastorianus
ttgctccttacttttcagttccttt

SEQ ID NO: 112898 - DNA, 25 bp, Saccharomyces pastorianus
cagttccttttgtagtattgccagt

SEQ ID NO: 112899 - DNA, 25 bp, Saccharomyces pastorianus
tagccatctcgcaactagctgggaa

SEQ ID NO: 112900 - DNA, 25 bp, Saccharomyces pastorianus
gaatgttcttttttcagatccgaga

SEQ ID NO: 112901 - DNA, 25 bp, Saccharomyces pastorianus
tttctctgtcttttttagccatctc

SEQ ID NO: 112902 - DNA, 25 bp, Saccharomyces pastorianus
gtcattcaacctttccgtattctta

SEQ ID NO: 112903 - DNA, 25 bp, Saccharomyces pastorianus
tgcatcatttcgttccatctatttc

SEQ ID NO: 112904 - DNA, 25 bp, Saccharomyces pastorianus
acgcaataacttctttcaatcttcg

SEQ ID NO: 112905 - DNA, 25 bp, Saccharomyces pastorianus
ggttccactaatcaattcgtcattc

SEQ ID NO: 112906 - DNA, 25 bp, Saccharomyces pastorianus
caatcttcgtatttcttgctcctta

SEQ ID NO: 112907 - DNA, 25 bp, Saccharomyces pastorianus
atctatttcgctgttcatggcttct

SEQ ID NO: 112908 - DNA, 25 bp, Saccharomyces pastorianus
tacaacaaaaactctcggatctgaa

SEQ ID NO: 112909 - DNA, 25 bp, Saccharomyces pastorianus
gaggcccatttaaatgagttgtttc

SEQ ID NO: 112910 - DNA, 25 bp, Saccharomyces pastorianus
gtttcaagataatagtggcgccatt

SEQ ID NO: 112911 - DNA, 25 bp, Saccharomyces pastorianus
gatcgaaacgacaaggaggcccatt

SEQ ID NO: 112912 - DNA, 25 bp, Saccharomyces pastorianus
gaacattcccagctagttgcgagat

SEQ ID NO: 112913 - DNA, 25 bp, Saccharomyces pastorianus
gatgctttattgaatacactggcaa

SEQ ID NO: 112914 - DNA, 25 bp, Saccharomyces pastorianus
tgacgaattgattagtggaaccatt

SEQ ID NO: 112915 - DNA, 25 bp, Saccharomyces pastorianus
cgccattggtggcaacattgtcagc

SEQ ID NO: 112916 - DNA, 25 bp, Saccharomyces pastorianus
gaagcaatccacaaacggatagcat

SEQ ID NO: 112917 - DNA, 25 bp, Saccharomyces pastorianus
acattgtcagccatgacgatgcttt

SEQ ID NO: 112918 - DNA, 25 bp, Saccharomyces pastorianus
ggatgatttgttaattcgtagacta

SEQ ID NO: 112919 - DNA, 25 bp, Saccharomyces pastorianus
ttacgtttaaacatcgacctcgaca

SEQ ID NO: 112920 - DNA, 25 bp, Saccharomyces pastorianus
agggacaccgtggaagctttgagaa

SEQ ID NO: 112921 - DNA, 25 bp, Saccharomyces pastorianus
cctcgacactcctacaagcatattg

SEQ ID NO: 112922 - DNA, 25 bp, Saccharomyces pastorianus
atagtaccacgagtacttctggccc

SEQ ID NO: 112923 - DNA, 25 bp, Saccharomyces pastorianus
gttgaggctctccatctcattaaac

SEQ ID NO: 112924 - DNA, 25 bp, Saccharomyces pastorianus
ttaccgcagcgagagataccacatg

SEQ ID NO: 112925 - DNA, 25 bp, Saccharomyces pastorianus
gagataccacatgcgttgaggctct

SEQ ID NO: 112926 - DNA, 25 bp, Saccharomyces pastorianus
gaaagtctcggttcatcatcggaat

SEQ ID NO: 112927 - DNA, 25 bp, Saccharomyces pastorianus
aactgcttcttggatagtaccacga

SEQ ID NO: 112928 - DNA, 25 bp, Saccharomyces pastorianus
cttctggccctgtttttcagaggga

SEQ ID NO: 112929 - DNA, 25 bp, Saccharomyces pastorianus
aacacctacgtgatatcctgagcgt

SEQ ID NO: 112930 - DNA, 25 bp, Saccharomyces pastorianus
tggtggctcaccgttcatgcgtcaa

SEQ ID NO: 112931 - DNA, 25 bp, Saccharomyces pastorianus
gctcgttcttttcatcatctttatt

SEQ ID NO: 112932 - DNA, 25 bp, Saccharomyces pastorianus
ctttttgttcaacgcaggcggcagc

SEQ ID NO: 112933 - DNA, 25 bp, Saccharomyces pastorianus
aaatgccatccagaggtgctgcttc

SEQ ID NO: 112934 - DNA, 25 bp, Saccharomyces pastorianus
aaaagcgcagtatttatgacaggat

SEQ ID NO: 112935 - DNA, 25 bp, Saccharomyces pastorianus
aggtagggatcctgacgatagacaa

SEQ ID NO: 112936 - DNA, 25 bp, Saccharomyces pastorianus
attcggcgcttcaccatttgggcct

SEQ ID NO: 112937 - DNA, 25 bp, Saccharomyces pastorianus
tgctgcttcagggttccgaggaagt

SEQ ID NO: 112938 - DNA, 25 bp, Saccharomyces pastorianus
tgcttccactttttcattcggaggc

SEQ ID NO: 112939 - DNA, 25 bp, Saccharomyces pastorianus
gaccaccagaggacatattcgactt

SEQ ID NO: 112940 - DNA, 25 bp, Saccharomyces pastorianus
ataaaaactctcatccaaaagcggg

SEQ ID NO: 112941 - DNA, 25 bp, Saccharomyces pastorianus
gattctgatatttttgctgagctgg

SEQ ID NO: 112942 - DNA, 25 bp, Saccharomyces pastorianus
tgtgcccttcctattttaaataata

SEQ ID NO: 112943 - DNA, 25 bp, Saccharomyces pastorianus
aagatcccagtactttcacaaggta

SEQ ID NO: 112944 - DNA, 25 bp, Saccharomyces pastorianus
tagcttggtgttggcactgttacct

SEQ ID NO: 112945 - DNA, 25 bp, Saccharomyces pastorianus
ggccaagaactaattcacgtgcaag

SEQ ID NO: 112946 - DNA, 25 bp, Saccharomyces pastorianus
atgatatggccatcagattctgata

SEQ ID NO: 112947 - DNA, 25 bp, Saccharomyces pastorianus
gaggtattacctagtggcaagttaa

SEQ ID NO: 112948 - DNA, 25 bp, Saccharomyces pastorianus
ggcactgttacctatcactttggat

SEQ ID NO: 112949 - DNA, 25 bp, Saccharomyces pastorianus
aactgaagcttccatcgaggaatgt

SEQ ID NO: 112950 - DNA, 25 bp, Saccharomyces pastorianus
ggcaagttaatcaagcgaccatcct

SEQ ID NO: 112951 - DNA, 25 bp, Saccharomyces pastorianus
agacaaagttctttcaaggccaaga

SEQ ID NO: 112952 - DNA, 25 bp, Saccharomyces pastorianus
tttccatctggatatcctcaaaggc

SEQ ID NO: 112953 - DNA, 25 bp, Saccharomyces pastorianus
atgactcttttgaaaacgacaccga

SEQ ID NO: 112954 - DNA, 25 bp, Saccharomyces pastorianus
ggaggagctcattactttctggaaa

SEQ ID NO: 112955 - DNA, 25 bp, Saccharomyces pastorianus
agagacgatgcctttcttgagagca

SEQ ID NO: 112956 - DNA, 25 bp, Saccharomyces pastorianus
tcaaaggcagaaagtcaccccgttc

SEQ ID NO: 112957 - DNA, 25 bp, Saccharomyces pastorianus
ccgttcttcgtcagtacaaggtctt

SEQ ID NO: 112958 - DNA, 25 bp, Saccharomyces pastorianus
atgttctgccggttcacgccaaaat

SEQ ID NO: 112959 - DNA, 25 bp, Saccharomyces pastorianus
aatcaccgcgtagattttatcggaa

SEQ ID NO: 112960 - DNA, 25 bp, Saccharomyces pastorianus
gttgctgaatcggtgaatgactctt

SEQ ID NO: 112961 - DNA, 25 bp, Saccharomyces pastorianus
tcaggcttccatgtccgtaaagttt

SEQ ID NO: 112962 - DNA, 25 bp, Saccharomyces pastorianus
agagcaggcctctcagcaaatgcaa

SEQ ID NO: 112963 - DNA, 25 bp, Saccharomyces pastorianus
aaatggctctttttctatggataca

SEQ ID NO: 112964 - DNA, 25 bp, Saccharomyces pastorianus
tgaggcagactaatccatccggaca

SEQ ID NO: 112965 - DNA, 25 bp, Saccharomyces pastorianus
agctccagcacaactcctaatataa

SEQ ID NO: 112966 - DNA, 25 bp, Saccharomyces pastorianus
aagttgctgccgctcagaaagttat

SEQ ID NO: 112967 - DNA, 25 bp, Saccharomyces pastorianus
atcaaaacgtacttctagctccagc

SEQ ID NO: 112968 - DNA, 25 bp, Saccharomyces pastorianus
gattcagctgctacaaacttcatca

SEQ ID NO: 112969 - DNA, 25 bp, Saccharomyces pastorianus
gtttcttctgcaatgcatgcgttcg

SEQ ID NO: 112970 - DNA, 25 bp, Saccharomyces pastorianus
acaaaatgattctacctccgtcttt

SEQ ID NO: 112971 - DNA, 25 bp, Saccharomyces pastorianus
atccatccggacaaaaccctatgat

SEQ ID NO: 112972 - DNA, 25 bp, Saccharomyces pastorianus
accctatgatcaatatgcagccctt

SEQ ID NO: 112973 - DNA, 25 bp, Saccharomyces pastorianus
caacaacaatttcatctaccacaac

SEQ ID NO: 112974 - DNA, 25 bp, Saccharomyces pastorianus
gtttatgttccatcagaggtcctaa

SEQ ID NO: 112975 - DNA, 25 bp, Saccharomyces pastorianus
gttgcttctgtatcaaatgacccta

SEQ ID NO: 112976 - DNA, 25 bp, Saccharomyces pastorianus
gaagggtttcgctcattattttttg

SEQ ID NO: 112977 - DNA, 25 bp, Saccharomyces pastorianus
tcggacggtctaccaatctgaaggt

SEQ ID NO: 112978 - DNA, 25 bp, Saccharomyces pastorianus
gttggccctagattcctctggacaa

SEQ ID NO: 112979 - DNA, 25 bp, Saccharomyces pastorianus
aactcgatttcgctcagccttcgga

SEQ ID NO: 112980 - DNA, 25 bp, Saccharomyces pastorianus
ggactggcgggaatcattaccacac

SEQ ID NO: 112981 - DNA, 25 bp, Saccharomyces pastorianus
atgaaatattgactggcgcctgtgc

SEQ ID NO: 112982 - DNA, 25 bp, Saccharomyces pastorianus
atcctttctttcaatctggctataa

SEQ ID NO: 112983 - DNA, 25 bp, Saccharomyces pastorianus
taacaaacggcagaccggctgcact

SEQ ID NO: 112984 - DNA, 25 bp, Saccharomyces pastorianus
aaagccactttagccagagatttgc

SEQ ID NO: 112985 - DNA, 25 bp, Saccharomyces pastorianus
aggtgattcgttttaccatcctgtt

SEQ ID NO: 112986 - DNA, 25 bp, Saccharomyces pastorianus
atttttgtggaatcggctgctgtca

SEQ ID NO: 112987 - DNA, 25 bp, Saccharomyces pastorianus
aaggtacagcttctagattcaggtg

SEQ ID NO: 112988 - DNA, 25 bp, Saccharomyces pastorianus
tgaacttactgcaaatctgcccaca

SEQ ID NO: 112989 - DNA, 25 bp, Saccharomyces pastorianus
gataccgcagattcactactaaagg

SEQ ID NO: 112990 - DNA, 25 bp, Saccharomyces pastorianus
ggtgatgcaaaccattacgcgcgtg

SEQ ID NO: 112991 - DNA, 25 bp, Saccharomyces pastorianus
tagtttacttgaccgaaaggctcag

SEQ ID NO: 112992 - DNA, 25 bp, Saccharomyces pastorianus
gtttttcaacagacatccgatggtg

SEQ ID NO: 112993 - DNA, 25 bp, Saccharomyces pastorianus
tctctttcatctccttttaccaaat

SEQ ID NO: 112994 - DNA, 25 bp, Saccharomyces pastorianus
aatctgcccacaatattcggttcaa

SEQ ID NO: 112995 - DNA, 25 bp, Saccharomyces pastorianus
tttctctcataaaaggactcgggtc

SEQ ID NO: 112996 - DNA, 25 bp, Saccharomyces pastorianus
gcgtgatgaaatatttggcccggtt

SEQ ID NO: 112997 - DNA, 25 bp, Saccharomyces pastorianus
agagaatcaggcgacaccggcgttg

SEQ ID NO: 112998 - DNA, 25 bp, Saccharomyces pastorianus
atcttcactgatgtaccagaaacat

SEQ ID NO: 112999 - DNA, 25 bp, Saccharomyces pastorianus
gaagctaaagttccttttggcggat

SEQ ID NO: 113000 - DNA, 25 bp, Saccharomyces pastorianus
acctctgaatttcctgttagcggag

SEQ ID NO: 113001 - DNA, 25 bp, Saccharomyces pastorianus
gcgacaccggcgttgataactattt

SEQ ID NO: 113002 - DNA, 25 bp, Saccharomyces pastorianus
tggatcaatcaaaccaatcaagaag

SEQ ID NO: 113003 - DNA, 25 bp, Saccharomyces pastorianus
tcctgttagcggagctaaaggctac

SEQ ID NO: 113004 - DNA, 25 bp, Saccharomyces pastorianus
ttggcggatttaagatgagcggtat

SEQ ID NO: 113005 - DNA, 25 bp, Saccharomyces pastorianus
gaaacatctaagttgctgcgtgatg

SEQ ID NO: 113006 - DNA, 25 bp, Saccharomyces pastorianus
tcgggacaaatctgcactgcaaact

SEQ ID NO: 113007 - DNA, 25 bp, Saccharomyces pastorianus
ggacagaattgtaccgcaaactcaa

SEQ ID NO: 113008 - DNA, 25 bp, Saccharomyces pastorianus
atcttcactgatgtcccgcaaacat

SEQ ID NO: 113009 - DNA, 25 bp, Saccharomyces pastorianus
acaggatgagatatttggcccggtt

SEQ ID NO: 113010 - DNA, 25 bp, Saccharomyces pastorianus
acctctgaatttcctattggtggag

SEQ ID NO: 113011 - DNA, 25 bp, Saccharomyces pastorianus
gcaaacatcgaaactgttacaggat

SEQ ID NO: 113012 - DNA, 25 bp, Saccharomyces pastorianus
atgtcccgcaaacatcgaaactgtt

SEQ ID NO: 113013 - DNA, 25 bp, Saccharomyces pastorianus
tcaggacagaattgtaccgcaaact

SEQ ID NO: 113014 - DNA, 25 bp, Saccharomyces pastorianus
tcctattggtggagctaaaggctac

SEQ ID NO: 113015 - DNA, 25 bp, Saccharomyces pastorianus
cgatgaagatgttaccgttcctttt

SEQ ID NO: 113016 - DNA, 25 bp, Saccharomyces pastorianus
ctgaatttcctattggtggagctaa

SEQ ID NO: 113017 - DNA, 25 bp, Saccharomyces pastorianus
agaattgtaccgcaaactcaagagt

SEQ ID NO: 113018 - DNA, 25 bp, Saccharomyces pastorianus
ggagctaaaggctacttcattcccc

SEQ ID NO: 113019 - DNA, 25 bp, Saccharomyces pastorianus
gcaggaaaatttgatccgtttgatg

SEQ ID NO: 113020 - DNA, 25 bp, Saccharomyces pastorianus
gagaaatgcatcgttggtccagtta

SEQ ID NO: 113021 - DNA, 25 bp, Saccharomyces pastorianus
tgatgacgctctgaagctggctaat

SEQ ID NO: 113022 - DNA, 25 bp, Saccharomyces pastorianus
gaaagcgcacatgtttgctcgcgat

SEQ ID NO: 113023 - DNA, 25 bp, Saccharomyces pastorianus
ggtccagttatatcaagtacacagt

SEQ ID NO: 113024 - DNA, 25 bp, Saccharomyces pastorianus
ttggcccggttgtggttgttagcaa

SEQ ID NO: 113025 - DNA, 25 bp, Saccharomyces pastorianus
aagtacacagtatgatcgcatcaaa

SEQ ID NO: 113026 - DNA, 25 bp, Saccharomyces pastorianus
gttggacatgttccagacctctgaa

SEQ ID NO: 113027 - DNA, 25 bp, Saccharomyces pastorianus
ttatgttcaaagttcgatctacgac

SEQ ID NO: 113028 - DNA, 25 bp, Saccharomyces pastorianus
taatgatacttgctacgggctcgcc

SEQ ID NO: 113029 - DNA, 25 bp, Saccharomyces pastorianus
gaatttcggcacttatggctttgtt

SEQ ID NO: 113030 - DNA, 25 bp, Saccharomyces pastorianus
tatgctaccaccaagttactcggac

SEQ ID NO: 113031 - DNA, 25 bp, Saccharomyces pastorianus
gagagatcccgaacaattttcagaa

SEQ ID NO: 113032 - DNA, 25 bp, Saccharomyces pastorianus
gaaatattaccgacaccacctggat

SEQ ID NO: 113033 - DNA, 25 bp, Saccharomyces pastorianus
ttggtggtcatatccgcggctggaa

SEQ ID NO: 113034 - DNA, 25 bp, Saccharomyces pastorianus
gaaattccaatacctatacccgatc

SEQ ID NO: 113035 - DNA, 25 bp, Saccharomyces pastorianus
gatttgaattcactatgtcccctcc

SEQ ID NO: 113036 - DNA, 25 bp, Saccharomyces pastorianus
aatattgcggctggtagtactacaa

SEQ ID NO: 113037 - DNA, 25 bp, Saccharomyces pastorianus
gatcattggctccaacgtaccttgt

SEQ ID NO: 113038 - DNA, 25 bp, Saccharomyces pastorianus
tgtcccctcccactggaaagaagat

SEQ ID NO: 113039 - DNA, 25 bp, Saccharomyces pastorianus
tctagattccttacctatgctacca

SEQ ID NO: 113040 - DNA, 25 bp, Saccharomyces pastorianus
cgactcttacggttcctctaataga

SEQ ID NO: 113041 - DNA, 25 bp, Saccharomyces pastorianus
aacaatgacttttacggctccagca

SEQ ID NO: 113042 - DNA, 25 bp, Saccharomyces pastorianus
tacggttccaacaaagacgactctt

SEQ ID NO: 113043 - DNA, 25 bp, Saccharomyces pastorianus
tacggttccaacaatgacgactctt

SEQ ID NO: 113044 - DNA, 25 bp, Saccharomyces pastorianus
tatgggtcttccaactacggttcat

SEQ ID NO: 113045 - DNA, 25 bp, Saccharomyces pastorianus
cgatgattcttacggatcttccaat

SEQ ID NO: 113046 - DNA, 25 bp, Saccharomyces pastorianus
aacgatgattcctacggttcttcca

SEQ ID NO: 113047 - DNA, 25 bp, Saccharomyces pastorianus
aacaacaatgactcttacggctcca

SEQ ID NO: 113048 - DNA, 25 bp, Saccharomyces pastorianus
atggttccagcaacaacgattcgta

SEQ ID NO: 113049 - DNA, 25 bp, Saccharomyces pastorianus
acgatgattcatacggctccagcaa

SEQ ID NO: 113050 - DNA, 25 bp, Saccharomyces pastorianus
agaagagctcttatggttccaacaa

SEQ ID NO: 113051 - DNA, 25 bp, Saccharomyces pastorianus
acggcaagactaccgatgctgatga

SEQ ID NO: 113052 - DNA, 25 bp, Saccharomyces pastorianus
ggacggcaagactaccgatgctgat

SEQ ID NO: 113053 - DNA, 25 bp, Saccharomyces pastorianus
caagactaccgatgctgatgaaagt

SEQ ID NO: 113054 - DNA, 25 bp, Saccharomyces pastorianus
ggtagtgagtgacgcttttaagaaa

SEQ ID NO: 113055 - DNA, 25 bp, Saccharomyces pastorianus
caactatcaagagcaatacaacaag

SEQ ID NO: 113056 - DNA, 25 bp, Saccharomyces pastorianus
aattgcagggcgatgcaaaggtagt

SEQ ID NO: 113057 - DNA, 25 bp, Saccharomyces pastorianus
cgcttttaagaaaatggctagtcaa

SEQ ID NO: 113058 - DNA, 25 bp, Saccharomyces pastorianus
cgatgcaaaggtagtgagtgacgct

SEQ ID NO: 113059 - DNA, 25 bp, Saccharomyces pastorianus
gaaaaacacaactatcaagagcaat

SEQ ID NO: 113060 - DNA, 25 bp, Saccharomyces pastorianus
ctaccgatgctgatgaaagtgaaaa

SEQ ID NO: 113061 - DNA, 25 bp, Saccharomyces pastorianus
tggctagtcaagacaaggacggcaa

SEQ ID NO: 113062 - DNA, 25 bp, Saccharomyces pastorianus
gaagatgggccatgatcaatctgga

SEQ ID NO: 113063 - DNA, 25 bp, Saccharomyces pastorianus
taagttcgctgaaaaattacaaggt

SEQ ID NO: 113064 - DNA, 25 bp, Saccharomyces pastorianus
gaacgccaaatcctccaacaaggaa

SEQ ID NO: 113065 - DNA, 25 bp, Saccharomyces pastorianus
gaacatggacatgggtatgggtcat

SEQ ID NO: 113066 - DNA, 25 bp, Saccharomyces pastorianus
gaacgctggcagaggaattgcgaac

SEQ ID NO: 113067 - DNA, 25 bp, Saccharomyces pastorianus
ttacaaggtaacgatgattcccatc

SEQ ID NO: 113068 - DNA, 25 bp, Saccharomyces pastorianus
gaaagaacgccaaatcctccaacaa

SEQ ID NO: 113069 - DNA, 25 bp, Saccharomyces pastorianus
gggtatgggtcatgatcagtccgaa

SEQ ID NO: 113070 - DNA, 25 bp, Saccharomyces pastorianus
tggaacaaagatgaacgctggcaga

SEQ ID NO: 113071 - DNA, 25 bp, Saccharomyces pastorianus
tatgggtcatgatcagtccgaaggg

SEQ ID NO: 113072 - DNA, 25 bp, Saccharomyces pastorianus
tgggccatgatcaatctggaacaaa

SEQ ID NO: 113073 - DNA, 25 bp, Saccharomyces pastorianus
aagggtcacaatgcggctttactaa

SEQ ID NO: 113074 - DNA, 25 bp, Saccharomyces pastorianus
gaaagtagttctaagcgccaaacga

SEQ ID NO: 113075 - DNA, 25 bp, Saccharomyces pastorianus
gagtgggttccacctgatgatccaa

SEQ ID NO: 113076 - DNA, 25 bp, Saccharomyces pastorianus
gctttactaatctgacggatccctt

SEQ ID NO: 113077 - DNA, 25 bp, Saccharomyces pastorianus
gagatactgccgtcgatttttagat

SEQ ID NO: 113078 - DNA, 25 bp, Saccharomyces pastorianus
gtaaatcaattgtcctctacgcaca

SEQ ID NO: 113079 - DNA, 25 bp, Saccharomyces pastorianus
gtgacttttgagcttgacgacttga

SEQ ID NO: 113080 - DNA, 25 bp, Saccharomyces pastorianus
ccctgtatggccgttgacaatatcg

SEQ ID NO: 113081 - DNA, 25 bp, Saccharomyces pastorianus
aaacgttttatttgtctgctcgata

SEQ ID NO: 113082 - DNA, 25 bp, Saccharomyces pastorianus
tcgatatgtacaccaccctgtatgg

SEQ ID NO: 113083 - DNA, 25 bp, Saccharomyces pastorianus
gacgtttttgcgtttgctttgaact

SEQ ID NO: 113084 - DNA, 25 bp, Saccharomyces pastorianus
cacgattggtggtttaattgtttct

SEQ ID NO: 113085 - DNA, 25 bp, Saccharomyces pastorianus
agaactgacgttactgtcctcagga

SEQ ID NO: 113086 - DNA, 25 bp, Saccharomyces pastorianus
atttacgtaatgtgctaaccaatga

SEQ ID NO: 113087 - DNA, 25 bp, Saccharomyces pastorianus
cagtcagtttctcgtgatgatccac

SEQ ID NO: 113088 - DNA, 25 bp, Saccharomyces pastorianus
gatgatccacgctacctagagatag

SEQ ID NO: 113089 - DNA, 25 bp, Saccharomyces pastorianus
ggcgagggtatgtgcatcgcaataa

SEQ ID NO: 113090 - DNA, 25 bp, Saccharomyces pastorianus
gtcctcaggaccgaatttacgcgga

SEQ ID NO: 113091 - DNA, 25 bp, Saccharomyces pastorianus
gctctggttgcaatcagtactggtt

SEQ ID NO: 113092 - DNA, 25 bp, Saccharomyces pastorianus
tacgcggacatttaaccttggaagt

SEQ ID NO: 113093 - DNA, 25 bp, Saccharomyces pastorianus
taattctcagaaaccctatggattg

SEQ ID NO: 113094 - DNA, 25 bp, Saccharomyces pastorianus
ggagttaatcgatcagtcagtttct

SEQ ID NO: 113095 - DNA, 25 bp, Saccharomyces pastorianus
ggtatccctcaactatttgcaagga

SEQ ID NO: 113096 - DNA, 25 bp, Saccharomyces pastorianus
atcagtacaggtggaatcggcccca

SEQ ID NO: 113097 - DNA, 25 bp, Saccharomyces pastorianus
atgtatatactacccggtatccctc

SEQ ID NO: 113098 - DNA, 25 bp, Saccharomyces pastorianus
gaacacacctaactgagtctcaaat

SEQ ID NO: 113099 - DNA, 25 bp, Saccharomyces pastorianus
gcaaggcttgatgcagatgctctaa

SEQ ID NO: 113100 - DNA, 25 bp, Saccharomyces pastorianus
aggatgctgaaagcgttcactccca

SEQ ID NO: 113101 - DNA, 25 bp, Saccharomyces pastorianus
gtgtgatgacttgtgggtacctatt

SEQ ID NO: 113102 - DNA, 25 bp, Saccharomyces pastorianus
ggcataaatctgaccctgaagcaag

SEQ ID NO: 113103 - DNA, 25 bp, Saccharomyces pastorianus
ggcgcattaccaaatggcaaccatg

SEQ ID NO: 113104 - DNA, 25 bp, Saccharomyces pastorianus
ggtacctatttgttctatatctcac

SEQ ID NO: 113105 - DNA, 25 bp, Saccharomyces pastorianus
aaataggctcatacccacattttgg

SEQ ID NO: 113106 - DNA, 25 bp, Saccharomyces pastorianus
aataccgtcttcaccatgtgggatg

SEQ ID NO: 113107 - DNA, 25 bp, Saccharomyces pastorianus
tttattctcaacattcgtccattcc

SEQ ID NO: 113108 - DNA, 25 bp, Saccharomyces pastorianus
gggcttataaatttctctactccag

SEQ ID NO: 113109 - DNA, 25 bp, Saccharomyces pastorianus
gaacttacacattcaagctcgacaa

SEQ ID NO: 113110 - DNA, 25 bp, Saccharomyces pastorianus
atacaaaacctcaggcagggcttat

SEQ ID NO: 113111 - DNA, 25 bp, Saccharomyces pastorianus
gctgaccagccagcttctgataata

SEQ ID NO: 113112 - DNA, 25 bp, Saccharomyces pastorianus
atatctttgcctagcgatgttgaca

SEQ ID NO: 113113 - DNA, 25 bp, Saccharomyces pastorianus
gatagtaataatgccaccccatgtg

SEQ ID NO: 113114 - DNA, 25 bp, Saccharomyces pastorianus
tgttgacaaaacctccccaatagac

SEQ ID NO: 113115 - DNA, 25 bp, Saccharomyces pastorianus
gcaaggacacaatatcggcgatgat

SEQ ID NO: 113116 - DNA, 25 bp, Saccharomyces pastorianus
gactcgttgtctatacctttaattg

SEQ ID NO: 113117 - DNA, 25 bp, Saccharomyces pastorianus
gaatccaagtaaatgtgccccaaga

SEQ ID NO: 113118 - DNA, 25 bp, Saccharomyces pastorianus
gaaggaactcccatcaatacacgtc

SEQ ID NO: 113119 - DNA, 25 bp, Saccharomyces pastorianus
cgttccacctacacctttaatgata

SEQ ID NO: 113120 - DNA, 25 bp, Saccharomyces pastorianus
tttctcattcgctatcctcaaagtt

SEQ ID NO: 113121 - DNA, 25 bp, Saccharomyces pastorianus
atatgtgctcgtttttgaatgccag

SEQ ID NO: 113122 - DNA, 25 bp, Saccharomyces pastorianus
aaggtcactaccacgcgaaggaact

SEQ ID NO: 113123 - DNA, 25 bp, Saccharomyces pastorianus
gagcaaatgttctcgagtttccagg

SEQ ID NO: 113124 - DNA, 25 bp, Saccharomyces pastorianus
gaatgccagcgaccttatacgtgag

SEQ ID NO: 113125 - DNA, 25 bp, Saccharomyces pastorianus
aaacttctgccgctttcaggaatgg

SEQ ID NO: 113126 - DNA, 25 bp, Saccharomyces pastorianus
gtgtctaacgttcctgagcaaatgt

SEQ ID NO: 113127 - DNA, 25 bp, Saccharomyces pastorianus
agaaatggccgcttagtgtctaacg

SEQ ID NO: 113128 - DNA, 25 bp, Saccharomyces pastorianus
ggaacaagcactattgacccagtta

SEQ ID NO: 113129 - DNA, 25 bp, Saccharomyces pastorianus
tgccaacaacagtagggtgagttct

SEQ ID NO: 113130 - DNA, 25 bp, Saccharomyces pastorianus
attgtccaagaagtttgctcacccc

SEQ ID NO: 113131 - DNA, 25 bp, Saccharomyces pastorianus
aataactcgggcattttcagctata

SEQ ID NO: 113132 - DNA, 25 bp, Saccharomyces pastorianus
aacgtattcctccactcctaaagag

SEQ ID NO: 113133 - DNA, 25 bp, Saccharomyces pastorianus
ttgacccagttacaaatctcccaaa

SEQ ID NO: 113134 - DNA, 25 bp, Saccharomyces pastorianus
aagcctctaccttacggaaagcatc

SEQ ID NO: 113135 - DNA, 25 bp, Saccharomyces pastorianus
agccctcagtcattctattcttctc

SEQ ID NO: 113136 - DNA, 25 bp, Saccharomyces pastorianus
agttaagttcaatccctacacttcg

SEQ ID NO: 113137 - DNA, 25 bp, Saccharomyces pastorianus
actccacttttgcaggcggaagcaa

SEQ ID NO: 113138 - DNA, 25 bp, Saccharomyces pastorianus
gtttgctcaccccagaagaacaagt

SEQ ID NO: 113139 - DNA, 25 bp, Saccharomyces pastorianus
tagagctccctccagatagcagtga

SEQ ID NO: 113140 - DNA, 25 bp, Saccharomyces pastorianus
aaatagcactgcgaacgaccctaac

SEQ ID NO: 113141 - DNA, 25 bp, Saccharomyces pastorianus
atatggaattgttgtccagcccgcg

SEQ ID NO: 113142 - DNA, 25 bp, Saccharomyces pastorianus
tgttccatacaatctgcccatatca

SEQ ID NO: 113143 - DNA, 25 bp, Saccharomyces pastorianus
cagcatcgccgtctaaggtgcaaag

SEQ ID NO: 113144 - DNA, 25 bp, Saccharomyces pastorianus
gatagcagtgacactccagcatcgc

SEQ ID NO: 113145 - DNA, 25 bp, Saccharomyces pastorianus
gactgcagcagtccgcaaatagcac

SEQ ID NO: 113146 - DNA, 25 bp, Saccharomyces pastorianus
gctatatgcaaccactcttcctgaa

SEQ ID NO: 113147 - DNA, 25 bp, Saccharomyces pastorianus
atcttctgttcactcggacgttgat

SEQ ID NO: 113148 - DNA, 25 bp, Saccharomyces pastorianus
aaacactatatctctttacgcacca

SEQ ID NO: 113149 - DNA, 25 bp, Saccharomyces pastorianus
agaatgttcccgcaattacgcccat

SEQ ID NO: 113150 - DNA, 25 bp, Saccharomyces pastorianus
gtgacatgatatttcttcccctcgt

SEQ ID NO: 113151 - DNA, 25 bp, Saccharomyces pastorianus
atgtgacatgatatttcttcccctc

SEQ ID NO: 113152 - DNA, 25 bp, Saccharomyces pastorianus
gcatgtgacatgatatttcttcccc

SEQ ID NO: 113153 - DNA, 25 bp, Saccharomyces pastorianus
gtgcgtttcatgcatgtgacatgat

SEQ ID NO: 113154 - DNA, 25 bp, Saccharomyces pastorianus
aaccgagtgcgtttcatgcatgtga

SEQ ID NO: 113155 - DNA, 25 bp, Saccharomyces pastorianus
tgacatgatatttcttcccctcgtt

SEQ ID NO: 113156 - DNA, 25 bp, Saccharomyces pastorianus
tgtgacatgatatttcttcccctcg

SEQ ID NO: 113157 - DNA, 25 bp, Saccharomyces pastorianus
cgagtgcgtttcatgcatgtgacat

SEQ ID NO: 113158 - DNA, 25 bp, Saccharomyces pastorianus
gagaaaaccgagtgcgtttcatgca

SEQ ID NO: 113159 - DNA, 25 bp, Saccharomyces pastorianus
accgagtgcgtttcatgcatgtgac

SEQ ID NO: 113160 - DNA, 25 bp, Saccharomyces pastorianus
aaaaccgagtgcgtttcatgcatgt

SEQ ID NO: 113161 - DNA, 25 bp, Saccharomyces pastorianus
atgtgctagcggcagacttgccaca

SEQ ID NO: 113162 - DNA, 25 bp, Saccharomyces pastorianus
gtgcctggttataacgactgtccga

SEQ ID NO: 113163 - DNA, 25 bp, Saccharomyces pastorianus
gaagaggccatctgtaactgctgct

SEQ ID NO: 113164 - DNA, 25 bp, Saccharomyces pastorianus
aatctgcctgtgaaggtgtgctcgt

SEQ ID NO: 113165 - DNA, 25 bp, Saccharomyces pastorianus
tacgccgccaccagttttgaagagg

SEQ ID NO: 113166 - DNA, 25 bp, Saccharomyces pastorianus
gtgactaagatcaacgacctctgtg

SEQ ID NO: 113167 - DNA, 25 bp, Saccharomyces pastorianus
gaccaaggcgatagacagctccagc

SEQ ID NO: 113168 - DNA, 25 bp, Saccharomyces pastorianus
cagctccagccgatattatgcagta

SEQ ID NO: 113169 - DNA, 25 bp, Saccharomyces pastorianus
actgtccgacagttttgttttctat

SEQ ID NO: 113170 - DNA, 25 bp, Saccharomyces pastorianus
ctgctgctcaacaagaatctgcctg

SEQ ID NO: 113171 - DNA, 25 bp, Saccharomyces pastorianus
gacctctgtgtgtgtggctcgaagc

SEQ ID NO: 113172 - DNA, 25 bp, Saccharomyces pastorianus
tattaagcattcctttaacctcctc

SEQ ID NO: 113173 - DNA, 25 bp, Saccharomyces pastorianus
gaattgctccccttcggaatttaga

SEQ ID NO: 113174 - DNA, 25 bp, Saccharomyces pastorianus
ggtactgctgctataggctggtcaa

SEQ ID NO: 113175 - DNA, 25 bp, Saccharomyces pastorianus
gtactctaacttggctacattttgc

SEQ ID NO: 113176 - DNA, 25 bp, Saccharomyces pastorianus
aaattgaatggacgccgaattgctc

SEQ ID NO: 113177 - DNA, 25 bp, Saccharomyces pastorianus
caacatttctaacgtcagtgctaat

SEQ ID NO: 113178 - DNA, 25 bp, Saccharomyces pastorianus
actctagtaatagcgttccagctga

SEQ ID NO: 113179 - DNA, 25 bp, Saccharomyces pastorianus
ggaggtcttctattggatgcttttc

SEQ ID NO: 113180 - DNA, 25 bp, Saccharomyces pastorianus
gtcaagtctgaagctctatgccagt

SEQ ID NO: 113181 - DNA, 25 bp, Saccharomyces pastorianus
ctctttaagtgggtgtatctcagta

SEQ ID NO: 113182 - DNA, 25 bp, Saccharomyces pastorianus
cctttaacctcctcgatcataatat

SEQ ID NO: 113183 - DNA, 25 bp, Saccharomyces pastorianus
aaggtacggcattcaagatttttca

SEQ ID NO: 113184 - DNA, 25 bp, Saccharomyces pastorianus
gaaacagtgaggcaacttttacagt

SEQ ID NO: 113185 - DNA, 25 bp, Saccharomyces pastorianus
aaacgcgattatccgaattgttgtc

SEQ ID NO: 113186 - DNA, 25 bp, Saccharomyces pastorianus
ttttacgtgatattaggaccatcca

SEQ ID NO: 113187 - DNA, 25 bp, Saccharomyces pastorianus
gtctcattgatcgtattcaaacgcg

SEQ ID NO: 113188 - DNA, 25 bp, Saccharomyces pastorianus
ggtgttgaggatcctttgaccttga

SEQ ID NO: 113189 - DNA, 25 bp, Saccharomyces pastorianus
ggaccatccaagatgctttatctag

SEQ ID NO: 113190 - DNA, 25 bp, Saccharomyces pastorianus
tcagaagctcagttaagcgttgcaa

SEQ ID NO: 113191 - DNA, 25 bp, Saccharomyces pastorianus
gaggaagttttttgccattgcagaa

SEQ ID NO: 113192 - DNA, 25 bp, Saccharomyces pastorianus
tttatctagcgggtcaacgccgaaa

SEQ ID NO: 113193 - DNA, 25 bp, Saccharomyces pastorianus
cgacgaggccgctttcaaagaggaa

SEQ ID NO: 113194 - DNA, 25 bp, Saccharomyces pastorianus
gagcgctttttcacctattttatca

SEQ ID NO: 113195 - DNA, 25 bp, Saccharomyces pastorianus
ttctccgtacctttgtcatttttag

SEQ ID NO: 113196 - DNA, 25 bp, Saccharomyces pastorianus
ggtcttttgttaatgagccctcgtt

SEQ ID NO: 113197 - DNA, 25 bp, Saccharomyces pastorianus
agaatgcgtctaatgttacctctaa

SEQ ID NO: 113198 - DNA, 25 bp, Saccharomyces pastorianus
acgtctcccgatatcagtctagaag

SEQ ID NO: 113199 - DNA, 25 bp, Saccharomyces pastorianus
aacagaatcacgtccaaccagttgc

SEQ ID NO: 113200 - DNA, 25 bp, Saccharomyces pastorianus
gttaatgggacattctccgtacctt

SEQ ID NO: 113201 - DNA, 25 bp, Saccharomyces pastorianus
gttatttacgcagatacgtctcccg

SEQ ID NO: 113202 - DNA, 25 bp, Saccharomyces pastorianus
tttttagatccttctttgttagcgg

SEQ ID NO: 113203 - DNA, 25 bp, Saccharomyces pastorianus
aggtctgaatattgctacgggtgtt

SEQ ID NO: 113204 - DNA, 25 bp, Saccharomyces pastorianus
ggatcattgccgataacttttcatc

SEQ ID NO: 113205 - DNA, 25 bp, Saccharomyces pastorianus
aggtgtatatgtgcccaatgattta

SEQ ID NO: 113206 - DNA, 25 bp, Saccharomyces pastorianus
ggtgacactcttctctcaaatgaat

SEQ ID NO: 113207 - DNA, 25 bp, Saccharomyces pastorianus
atcggcttaatatcgagtctgtatt

SEQ ID NO: 113208 - DNA, 25 bp, Saccharomyces pastorianus
aattgcaggataggatttcagaact

SEQ ID NO: 113209 - DNA, 25 bp, Saccharomyces pastorianus
gaggaaattcacagattggacaatg

SEQ ID NO: 113210 - DNA, 25 bp, Saccharomyces pastorianus
aatggtacgttattcgaatattcta

SEQ ID NO: 113211 - DNA, 25 bp, Saccharomyces pastorianus
ggataaattactacaagactctatg

SEQ ID NO: 113212 - DNA, 25 bp, Saccharomyces pastorianus
gcatgtgacaattgcgaacgagtta

SEQ ID NO: 113213 - DNA, 25 bp, Saccharomyces pastorianus
aatgatggtacacgcggtgacactc

SEQ ID NO: 113214 - DNA, 25 bp, Saccharomyces pastorianus
gatgaaagtagcaataaccccaaag

SEQ ID NO: 113215 - DNA, 25 bp, Saccharomyces pastorianus
gaaaacgactacacatctttaaata

SEQ ID NO: 113216 - DNA, 25 bp, Saccharomyces pastorianus
agtatcaaaatgaccgctaaagttt

SEQ ID NO: 113217 - DNA, 25 bp, Saccharomyces pastorianus
ggccgaccggatggaagcttcgtta

SEQ ID NO: 113218 - DNA, 25 bp, Saccharomyces pastorianus
gagttatttgccgacgttccagtca

SEQ ID NO: 113219 - DNA, 25 bp, Saccharomyces pastorianus
tctctggagtgagactctgaacaga

SEQ ID NO: 113220 - DNA, 25 bp, Saccharomyces pastorianus
cagtagggaaggacctgaaccacaa

SEQ ID NO: 113221 - DNA, 25 bp, Saccharomyces pastorianus
gtggatctttcgttcagtttggtaa

SEQ ID NO: 113222 - DNA, 25 bp, Saccharomyces pastorianus
gacgttccagtcaaggatatcctag

SEQ ID NO: 113223 - DNA, 25 bp, Saccharomyces pastorianus
ggatgcacctatcatagaaatggct

SEQ ID NO: 113224 - DNA, 25 bp, Saccharomyces pastorianus
tgttgtcaaaaaaggtctctggagt

SEQ ID NO: 113225 - DNA, 25 bp, Saccharomyces pastorianus
aagtggttgccaaatgttgtcaaaa

SEQ ID NO: 113226 - DNA, 25 bp, Saccharomyces pastorianus
tgaaatagtaaacggctcaccaaga

SEQ ID NO: 113227 - DNA, 25 bp, Saccharomyces pastorianus
tggcgacttttgcacgtgaacgacg

SEQ ID NO: 113228 - DNA, 25 bp, Saccharomyces pastorianus
tgttgcccgtcgctaatatttggcg

SEQ ID NO: 113229 - DNA, 25 bp, Saccharomyces pastorianus
acgtcatccgttagcgagactttta

SEQ ID NO: 113230 - DNA, 25 bp, Saccharomyces pastorianus
gagagacagaatattactgttcttt

SEQ ID NO: 113231 - DNA, 25 bp, Saccharomyces pastorianus
atatttggcgacttttgcacgtgaa

SEQ ID NO: 113232 - DNA, 25 bp, Saccharomyces pastorianus
taaatttcgcaaggagcgggcgtgc

SEQ ID NO: 113233 - DNA, 25 bp, Saccharomyces pastorianus
ttttgcacgtgaacgacgtccccac

SEQ ID NO: 113234 - DNA, 25 bp, Saccharomyces pastorianus
acggatattacttttcacccatggg

SEQ ID NO: 113235 - DNA, 25 bp, Saccharomyces pastorianus
gacgtccccacaataaatttcgcaa

SEQ ID NO: 113236 - DNA, 25 bp, Saccharomyces pastorianus
gcgtgcgttgttaacgtcatccgtt

SEQ ID NO: 113237 - DNA, 25 bp, Saccharomyces pastorianus
agcgggcgtgcgttgttaacgtcat

SEQ ID NO: 113238 - DNA, 25 bp, Saccharomyces pastorianus
ttgaccgatctttatgccaatgccg

SEQ ID NO: 113239 - DNA, 25 bp, Saccharomyces pastorianus
tcaatttaccgagcatgtgtcactt

SEQ ID NO: 113240 - DNA, 25 bp, Saccharomyces pastorianus
aaactatgccactcctttagacgat

SEQ ID NO: 113241 - DNA, 25 bp, Saccharomyces pastorianus
gaatggtcctttcgtggtaccgaga

SEQ ID NO: 113242 - DNA, 25 bp, Saccharomyces pastorianus
gccaaaactacccagtcgtgtgata

SEQ ID NO: 113243 - DNA, 25 bp, Saccharomyces pastorianus
tgaacacaagttctgcctcggacga

SEQ ID NO: 113244 - DNA, 25 bp, Saccharomyces pastorianus
gtttcccttatcttttgccaattat

SEQ ID NO: 113245 - DNA, 25 bp, Saccharomyces pastorianus
gagcattattcactcaatacttcgg

SEQ ID NO: 113246 - DNA, 25 bp, Saccharomyces pastorianus
gactgtgttctcgttagataaccct

SEQ ID NO: 113247 - DNA, 25 bp, Saccharomyces pastorianus
atgtccaggattgtcgcatgaccgt

SEQ ID NO: 113248 - DNA, 25 bp, Saccharomyces pastorianus
tagacgatgaggtgtttcccttatc

SEQ ID NO: 113249 - DNA, 25 bp, Saccharomyces pastorianus
gggttgacaccacaaagcagcaatt

SEQ ID NO: 113250 - DNA, 25 bp, Saccharomyces pastorianus
tgtgtaagactacctcgtacgccaa

SEQ ID NO: 113251 - DNA, 25 bp, Saccharomyces pastorianus
tggcaacgaccgcttcaacagagag

SEQ ID NO: 113252 - DNA, 25 bp, Saccharomyces pastorianus
aagagggcttggtgcttcacaccaa

SEQ ID NO: 113253 - DNA, 25 bp, Saccharomyces pastorianus
gatcactctaagtttctgtcttctg

SEQ ID NO: 113254 - DNA, 25 bp, Saccharomyces pastorianus
ggagcgcgccattcattatggtgat

SEQ ID NO: 113255 - DNA, 25 bp, Saccharomyces pastorianus
aagatcatctgtggcaacgaccgct

SEQ ID NO: 113256 - DNA, 25 bp, Saccharomyces pastorianus
ggtacctgaagatcgtcacaacttt

SEQ ID NO: 113257 - DNA, 25 bp, Saccharomyces pastorianus
gtattcacgaaactgtggtacctga

SEQ ID NO: 113258 - DNA, 25 bp, Saccharomyces pastorianus
agagctctgagcaaggtcccaaaat

SEQ ID NO: 113259 - DNA, 25 bp, Saccharomyces pastorianus
tgaggctatagacccaatggacccg

SEQ ID NO: 113260 - DNA, 25 bp, Saccharomyces pastorianus
gactttttggagatcttaacgcatc

SEQ ID NO: 113261 - DNA, 25 bp, Saccharomyces pastorianus
agctatgccattatcgcagtcctta

SEQ ID NO: 113262 - DNA, 25 bp, Saccharomyces pastorianus
agacagaccttgtttcaagcggatt

SEQ ID NO: 113263 - DNA, 25 bp, Saccharomyces pastorianus
cataggcgatgcctcagaacgtgct

SEQ ID NO: 113264 - DNA, 25 bp, Saccharomyces pastorianus
ccaaagcgagcttagcagaggcccc

SEQ ID NO: 113265 - DNA, 25 bp, Saccharomyces pastorianus
ctcaggcgatcgtgatagacttttt

SEQ ID NO: 113266 - DNA, 25 bp, Saccharomyces pastorianus
aacgtgctacgtacaaggcgaagtt

SEQ ID NO: 113267 - DNA, 25 bp, Saccharomyces pastorianus
atatcaaacgaccactgcaatcctt

SEQ ID NO: 113268 - DNA, 25 bp, Saccharomyces pastorianus
gagcaaccatgcaatcttacagaaa

SEQ ID NO: 113269 - DNA, 25 bp, Saccharomyces pastorianus
gcaatccttagtagactcaggcgat

SEQ ID NO: 113270 - DNA, 25 bp, Saccharomyces pastorianus
agatgagttgtttgacctgctagat

SEQ ID NO: 113271 - DNA, 25 bp, Saccharomyces pastorianus
gagagcttgatgatgctccctcagt

SEQ ID NO: 113272 - DNA, 25 bp, Saccharomyces pastorianus
agcaacccacagcaccaatgaaaaa

SEQ ID NO: 113273 - DNA, 25 bp, Saccharomyces pastorianus
aacgaatgcattccgttcctggaaa

SEQ ID NO: 113274 - DNA, 25 bp, Saccharomyces pastorianus
aactatgtggatcggtgcatttgcg

SEQ ID NO: 113275 - DNA, 25 bp, Saccharomyces pastorianus
atcggtagtatgtccacggtacagc

SEQ ID NO: 113276 - DNA, 25 bp, Saccharomyces pastorianus
gtcctttcgcatattctcactaaaa

SEQ ID NO: 113277 - DNA, 25 bp, Saccharomyces pastorianus
gacaaatgcctgatgaattccatat

SEQ ID NO: 113278 - DNA, 25 bp, Saccharomyces pastorianus
cagcattatagtggtttcgcagcaa

SEQ ID NO: 113279 - DNA, 25 bp, Saccharomyces pastorianus
aggctctagccttagcgggaaagct

SEQ ID NO: 113280 - DNA, 25 bp, Saccharomyces pastorianus
acattttgcatcttgacggaagtat

SEQ ID NO: 113281 - DNA, 25 bp, Saccharomyces pastorianus
aaagcagtgctttgtcttcaagatt

SEQ ID NO: 113282 - DNA, 25 bp, Saccharomyces pastorianus
aaatgcctcttcatcatcagtttct

SEQ ID NO: 113283 - DNA, 25 bp, Saccharomyces pastorianus
actgcaactggcctctacaatagac

SEQ ID NO: 113284 - DNA, 25 bp, Saccharomyces pastorianus
gaaagtgcttgtgacagtgccataa

SEQ ID NO: 113285 - DNA, 25 bp, Saccharomyces pastorianus
aagcgtaagcagtctacctaatcaa

SEQ ID NO: 113286 - DNA, 25 bp, Saccharomyces pastorianus
atcaatggcatagtcaattctcccc

SEQ ID NO: 113287 - DNA, 25 bp, Saccharomyces pastorianus
acccctcacatgtacacttttaatc

SEQ ID NO: 113288 - DNA, 25 bp, Saccharomyces pastorianus
gaatagaattcccaactcatcatcc

SEQ ID NO: 113289 - DNA, 25 bp, Saccharomyces pastorianus
tttcagtactaccaacatcgaccat

SEQ ID NO: 113290 - DNA, 25 bp, Saccharomyces pastorianus
aagcacatattcttcgggaaccaat

SEQ ID NO: 113291 - DNA, 25 bp, Saccharomyces pastorianus
tagagcgtcttcgatatcgctatcg

SEQ ID NO: 113292 - DNA, 25 bp, Saccharomyces pastorianus
atcagtttcttctccaagcacatat

SEQ ID NO: 113293 - DNA, 25 bp, Saccharomyces pastorianus
accatggtatttacaccttgcaatt

SEQ ID NO: 113294 - DNA, 25 bp, Saccharomyces pastorianus
gtagacaactattcagcgacccatg

SEQ ID NO: 113295 - DNA, 25 bp, Saccharomyces pastorianus
gacggagtttcgacttattctagat

SEQ ID NO: 113296 - DNA, 25 bp, Saccharomyces pastorianus
aaactttgaacccaacatcgtcagc

SEQ ID NO: 113297 - DNA, 25 bp, Saccharomyces pastorianus
atagaccaccaatgatgcttccaac

SEQ ID NO: 113298 - DNA, 25 bp, Saccharomyces pastorianus
cactgacgacacatcctctaataag

SEQ ID NO: 113299 - DNA, 25 bp, Saccharomyces pastorianus
ccccatggcttcgttgatttatcag

SEQ ID NO: 113300 - DNA, 25 bp, Saccharomyces pastorianus
gcgacccatgcaatgatgacggagt

SEQ ID NO: 113301 - DNA, 25 bp, Saccharomyces pastorianus
attgatagaaccttcattgcccggg

SEQ ID NO: 113302 - DNA, 25 bp, Saccharomyces pastorianus
gtaagtggcaatcctcgtaacccaa

SEQ ID NO: 113303 - DNA, 25 bp, Saccharomyces pastorianus
cgggcttagctattcgttcactgaa

SEQ ID NO: 113304 - DNA, 25 bp, Saccharomyces pastorianus
atgaggaatggcaacgtcgtgaaga

SEQ ID NO: 113305 - DNA, 25 bp, Saccharomyces pastorianus
aaggcgccgaaatgtattgaatgtc

SEQ ID NO: 113306 - DNA, 25 bp, Saccharomyces pastorianus
aaacagtgttctaaggagcatccag

SEQ ID NO: 113307 - DNA, 25 bp, Saccharomyces pastorianus
tgtacgaaaatgcacctcctccaga

SEQ ID NO: 113308 - DNA, 25 bp, Saccharomyces pastorianus
ccagagcatatttcaaaggcgccga

SEQ ID NO: 113309 - DNA, 25 bp, Saccharomyces pastorianus
tagactagaaaagccgaaccctcat

SEQ ID NO: 113310 - DNA, 25 bp, Saccharomyces pastorianus
tgaggatctctttcatagactagaa

SEQ ID NO: 113311 - DNA, 25 bp, Saccharomyces pastorianus
aacagaccccgaattgaatgatgag

SEQ ID NO: 113312 - DNA, 25 bp, Saccharomyces pastorianus
tgggaaagcccatattcatcatttt

SEQ ID NO: 113313 - DNA, 25 bp, Saccharomyces pastorianus
ggatcctgtgctacatgatgtgttc

SEQ ID NO: 113314 - DNA, 25 bp, Saccharomyces pastorianus
aagtggaagcctttgcgttcaagaa

SEQ ID NO: 113315 - DNA, 25 bp, Saccharomyces pastorianus
gtttatccactgaagacctgttaca

SEQ ID NO: 113316 - DNA, 25 bp, Saccharomyces pastorianus
gtattgttcactacctggttgccaa

SEQ ID NO: 113317 - DNA, 25 bp, Saccharomyces pastorianus
aggtgttcactttgctgacgactat

SEQ ID NO: 113318 - DNA, 25 bp, Saccharomyces pastorianus
attgccatatgccactgaagccgaa

SEQ ID NO: 113319 - DNA, 25 bp, Saccharomyces pastorianus
aatacagcatgccaggtggttcctt

SEQ ID NO: 113320 - DNA, 25 bp, Saccharomyces pastorianus
gacgactattttaccatcttacatg

SEQ ID NO: 113321 - DNA, 25 bp, Saccharomyces pastorianus
ttcctttgcccttgaattggctcaa

SEQ ID NO: 113322 - DNA, 25 bp, Saccharomyces pastorianus
tattcggaaccgctgttggtactga

SEQ ID NO: 113323 - DNA, 25 bp, Saccharomyces pastorianus
gaagccgaagtttacactcctggta

SEQ ID NO: 113324 - DNA, 25 bp, Saccharomyces pastorianus
gttgccattcgggtttttggacact

SEQ ID NO: 113325 - DNA, 25 bp, Saccharomyces pastorianus
acgcttccgtatccgagtacttaat

SEQ ID NO: 113326 - DNA, 25 bp, Saccharomyces pastorianus
gaatattccaatagcagccccaagt

SEQ ID NO: 113327 - DNA, 25 bp, Saccharomyces pastorianus
gatatcgaacacttgctctaatcta

SEQ ID NO: 113328 - DNA, 25 bp, Saccharomyces pastorianus
aaatgcaagctttctctatccgagg

SEQ ID NO: 113329 - DNA, 25 bp, Saccharomyces pastorianus
aaccgctcctgtactgaatattcca

SEQ ID NO: 113330 - DNA, 25 bp, Saccharomyces pastorianus
gatgccgtgtcaatctccataaatg

SEQ ID NO: 113331 - DNA, 25 bp, Saccharomyces pastorianus
tgatgacgaccttaattacttgctg

SEQ ID NO: 113332 - DNA, 25 bp, Saccharomyces pastorianus
agcagccccaagtattcattcgaaa

SEQ ID NO: 113333 - DNA, 25 bp, Saccharomyces pastorianus
gataaattcaaactgccgcctactt

SEQ ID NO: 113334 - DNA, 25 bp, Saccharomyces pastorianus
acagataatagcttctccgtgatat

SEQ ID NO: 113335 - DNA, 25 bp, Saccharomyces pastorianus
agttcatacccttttatcgactctc

SEQ ID NO: 113336 - DNA, 25 bp, Saccharomyces pastorianus
aaatgctatcagacgaaccgctcct

SEQ ID NO: 113337 - DNA, 25 bp, Saccharomyces pastorianus
cattgctgaagctcgtgctgccgaa

SEQ ID NO: 113338 - DNA, 25 bp, Saccharomyces pastorianus
ggttcacatgtcgtttacaactcca

SEQ ID NO: 113339 - DNA, 25 bp, Saccharomyces pastorianus
aagaccatttctgacactgctgctg

SEQ ID NO: 113340 - DNA, 25 bp, Saccharomyces pastorianus
gcagatttgacgctaagccagctta

SEQ ID NO: 113341 - DNA, 25 bp, Saccharomyces pastorianus
actgctgctgtcgttggtgttaagg

SEQ ID NO: 113342 - DNA, 25 bp, Saccharomyces pastorianus
ggtaactcaggctatttggccactt

SEQ ID NO: 113343 - DNA, 25 bp, Saccharomyces pastorianus
agacaaccaagctgccattgctgaa

SEQ ID NO: 113344 - DNA, 25 bp, Saccharomyces pastorianus
agccagcttatccaggtcatgtaca

SEQ ID NO: 113345 - DNA, 25 bp, Saccharomyces pastorianus
gtagagccttcgttgtcgattgtca

SEQ ID NO: 113346 - DNA, 25 bp, Saccharomyces pastorianus
acaacaaggtggtttgccatctcca

SEQ ID NO: 113347 - DNA, 25 bp, Saccharomyces pastorianus
tgttggtgctcaagtctcttatgtc

SEQ ID NO: 113348 - DNA, 25 bp, Saccharomyces pastorianus
agtgtgtacataacctgtcgcctag

SEQ ID NO: 113349 - DNA, 25 bp, Saccharomyces pastorianus
taaaattgcaactctcgtcacccaa

SEQ ID NO: 113350 - DNA, 25 bp, Saccharomyces pastorianus
actgcactgtctgcggctgaatcga

SEQ ID NO: 113351 - DNA, 25 bp, Saccharomyces pastorianus
atgttcatccgtttccatctcagat

SEQ ID NO: 113352 - DNA, 25 bp, Saccharomyces pastorianus
ctttgtacagcccacgaaggacatt

SEQ ID NO: 113353 - DNA, 25 bp, Saccharomyces pastorianus
tccccagtaaccagccattagatat

SEQ ID NO: 113354 - DNA, 25 bp, Saccharomyces pastorianus
tagatatttctagtccttgtgcaag

SEQ ID NO: 113355 - DNA, 25 bp, Saccharomyces pastorianus
gtacgctgcggattcggaccagaga

SEQ ID NO: 113356 - DNA, 25 bp, Saccharomyces pastorianus
aaggttcagtggttctcatattccc

SEQ ID NO: 113357 - DNA, 25 bp, Saccharomyces pastorianus
aaaggatcgcctcgtacgctgcgga

SEQ ID NO: 113358 - DNA, 25 bp, Saccharomyces pastorianus
ggctgtaccaagaaagctccctgac

SEQ ID NO: 113359 - DNA, 25 bp, Saccharomyces pastorianus
gcgttcgtgtgttggtcaccgagaa

SEQ ID NO: 113360 - DNA, 25 bp, Saccharomyces pastorianus
gatgccatgggtgaatgtgccctac

SEQ ID NO: 113361 - DNA, 25 bp, Saccharomyces pastorianus
ctcaatcggtgtttctcatcctgga

SEQ ID NO: 113362 - DNA, 25 bp, Saccharomyces pastorianus
gccattccaatgatcctaacctata

SEQ ID NO: 113363 - DNA, 25 bp, Saccharomyces pastorianus
attggctccacaaaacttaccggtg

SEQ ID NO: 113364 - DNA, 25 bp, Saccharomyces pastorianus
aaaagatcttgttgctcgcgttcgt

SEQ ID NO: 113365 - DNA, 25 bp, Saccharomyces pastorianus
tcatggactgcttgtctcaatcggt

SEQ ID NO: 113366 - DNA, 25 bp, Saccharomyces pastorianus
gactggctgctgtttgttaagcgca

SEQ ID NO: 113367 - DNA, 25 bp, Saccharomyces pastorianus
tgtgccctacaaggcttagagatca

SEQ ID NO: 113368 - DNA, 25 bp, Saccharomyces pastorianus
taaaggcaccgatgacgaggctgta

SEQ ID NO: 113369 - DNA, 25 bp, Saccharomyces pastorianus
ggttgctctttgactttgttacgaa

SEQ ID NO: 113370 - DNA, 25 bp, Saccharomyces pastorianus
gcattgggtcaatgtaggtccatta

SEQ ID NO: 113371 - DNA, 25 bp, Saccharomyces pastorianus
gctggtgtgggtggcctatcccata

SEQ ID NO: 113372 - DNA, 25 bp, Saccharomyces pastorianus
acgatattctcccatttccaaagac

SEQ ID NO: 113373 - DNA, 25 bp, Saccharomyces pastorianus
aagatacgtccttttgtacaacaat

SEQ ID NO: 113374 - DNA, 25 bp, Saccharomyces pastorianus
accgcagtaatctggacccactatg

SEQ ID NO: 113375 - DNA, 25 bp, Saccharomyces pastorianus
gaaaattcttatcgtgaccccaggg

SEQ ID NO: 113376 - DNA, 25 bp, Saccharomyces pastorianus
agtcggctgcgtaaaattcgcgggt

SEQ ID NO: 113377 - DNA, 25 bp, Saccharomyces pastorianus
ttgagcaaagttggccaccgcagta

SEQ ID NO: 113378 - DNA, 25 bp, Saccharomyces pastorianus
atatgtaacctatttgcactcgaat

SEQ ID NO: 113379 - DNA, 25 bp, Saccharomyces pastorianus
gtggactccatcgaattatcagcct

SEQ ID NO: 113380 - DNA, 25 bp, Saccharomyces pastorianus
gtatggcaccaaacccttggtccaa

SEQ ID NO: 113381 - DNA, 25 bp, Saccharomyces pastorianus
ggtggtacgcagaacccttatgcag

SEQ ID NO: 113382 - DNA, 25 bp, Saccharomyces pastorianus
gaaaccatctctctactctggaaga

SEQ ID NO: 113383 - DNA, 25 bp, Saccharomyces pastorianus
cacgattttattcacctgctttggg

SEQ ID NO: 113384 - DNA, 25 bp, Saccharomyces pastorianus
aaatgttcaactcccagatcctaat

SEQ ID NO: 113385 - DNA, 25 bp, Saccharomyces pastorianus
gataacttgttgacaggcccaatgt

SEQ ID NO: 113386 - DNA, 25 bp, Saccharomyces pastorianus
gctttgcatgctcaggatgacccaa

SEQ ID NO: 113387 - DNA, 25 bp, Saccharomyces pastorianus
ggaggtgatcttcctatagaccaaa

SEQ ID NO: 113388 - DNA, 25 bp, Saccharomyces pastorianus
tgggtcacaacttactacgcatggt

SEQ ID NO: 113389 - DNA, 25 bp, Saccharomyces pastorianus
atccaatccatacactttgcttcta

SEQ ID NO: 113390 - DNA, 25 bp, Saccharomyces pastorianus
gaatacccgggatcagaactccttt

SEQ ID NO: 113391 - DNA, 25 bp, Saccharomyces pastorianus
gaactccttttatagctttgcatgc

SEQ ID NO: 113392 - DNA, 25 bp, Saccharomyces pastorianus
tgttctcgagtacttcctttcaaga

SEQ ID NO: 113393 - DNA, 25 bp, Saccharomyces pastorianus
acatcattccgaacctgattcacgg

SEQ ID NO: 113394 - DNA, 25 bp, Saccharomyces pastorianus
aatgaactttccgattacgcctcag

SEQ ID NO: 113395 - DNA, 25 bp, Saccharomyces pastorianus
ggattatctaacaactgccattacc

SEQ ID NO: 113396 - DNA, 25 bp, Saccharomyces pastorianus
gtgacaccgattactcattctgttc

SEQ ID NO: 113397 - DNA, 25 bp, Saccharomyces pastorianus
tcgtcgcgaaatatggtcactggca

SEQ ID NO: 113398 - DNA, 25 bp, Saccharomyces pastorianus
aagaatccgatctttacttcccatt

SEQ ID NO: 113399 - DNA, 25 bp, Saccharomyces pastorianus
gtatgctgctcctggactaactaat

SEQ ID NO: 113400 - DNA, 25 bp, Saccharomyces pastorianus
attaccttaggatattcgtcgcgaa

SEQ ID NO: 113401 - DNA, 25 bp, Saccharomyces pastorianus
gccacaaaccaaattctactcacat

SEQ ID NO: 113402 - DNA, 25 bp, Saccharomyces pastorianus
cactggcatggttatcggtgacacc

SEQ ID NO: 113403 - DNA, 25 bp, Saccharomyces pastorianus
ataacaacgattttgcggccaagca

SEQ ID NO: 113404 - DNA, 25 bp, Saccharomyces pastorianus
tagtctttctgatcgcagtagcatt

SEQ ID NO: 113405 - DNA, 25 bp, Saccharomyces pastorianus
ggcttggataaaatcgacgttgcta

SEQ ID NO: 113406 - DNA, 25 bp, Saccharomyces pastorianus
gaaaactttttcagatgacgcgaat

SEQ ID NO: 113407 - DNA, 25 bp, Saccharomyces pastorianus
tctataggtttgttgctgaggacgc

SEQ ID NO: 113408 - DNA, 25 bp, Saccharomyces pastorianus
tgagagccaccgcaccaaaagttag

SEQ ID NO: 113409 - DNA, 25 bp, Saccharomyces pastorianus
tgctagatcaaattctctgcgactt

SEQ ID NO: 113410 - DNA, 25 bp, Saccharomyces pastorianus
ggttctcaatcagtgaaatctcgtg

SEQ ID NO: 113411 - DNA, 25 bp, Saccharomyces pastorianus
aagttcgtactacacctctggagta

SEQ ID NO: 113412 - DNA, 25 bp, Saccharomyces pastorianus
cttgcaccaatatctagtctttctg

SEQ ID NO: 113413 - DNA, 25 bp, Saccharomyces pastorianus
gaatgtccctaatgctattttttca

SEQ ID NO: 113414 - DNA, 25 bp, Saccharomyces pastorianus
ccaagggcgcacttccatgaaaata

SEQ ID NO: 113415 - DNA, 25 bp, Saccharomyces pastorianus
ggacaacttcatagaaccaccatct

SEQ ID NO: 113416 - DNA, 25 bp, Saccharomyces pastorianus
ataacgagatgtgcagtaccctctg

SEQ ID NO: 113417 - DNA, 25 bp, Saccharomyces pastorianus
tgattactacgcctaccgacaagag

SEQ ID NO: 113418 - DNA, 25 bp, Saccharomyces pastorianus
acagcctgcccgctttgattgaagg

SEQ ID NO: 113419 - DNA, 25 bp, Saccharomyces pastorianus
ggtggagtcgcgtatgcagcatata

SEQ ID NO: 113420 - DNA, 25 bp, Saccharomyces pastorianus
attcaaaaacaatccgcagtccgcg

SEQ ID NO: 113421 - DNA, 25 bp, Saccharomyces pastorianus
agtacaacttgctagtcgcgaacgc

SEQ ID NO: 113422 - DNA, 25 bp, Saccharomyces pastorianus
gagatacgatcgcttgagggtcata

SEQ ID NO: 113423 - DNA, 25 bp, Saccharomyces pastorianus
gtctcattagtagccgttccattag

SEQ ID NO: 113424 - DNA, 25 bp, Saccharomyces pastorianus
gggcaacgcaagtactacgctgatt

SEQ ID NO: 113425 - DNA, 25 bp, Saccharomyces pastorianus
cgctcatgtagttgtctccaatggc

SEQ ID NO: 113426 - DNA, 25 bp, Saccharomyces pastorianus
catggtagtggctctgcagatggta

SEQ ID NO: 113427 - DNA, 25 bp, Saccharomyces pastorianus
agaacaagttcttccacgttgacgt

SEQ ID NO: 113428 - DNA, 25 bp, Saccharomyces pastorianus
caatgtcccgattgtcaaggtcgtg

SEQ ID NO: 113429 - DNA, 25 bp, Saccharomyces pastorianus
agatggtaagctggcccaatgtccc

SEQ ID NO: 113430 - DNA, 25 bp, Saccharomyces pastorianus
taagttatctagacccgctcatgta

SEQ ID NO: 113431 - DNA, 25 bp, Saccharomyces pastorianus
aaagggcctgactttgacgccggtg

SEQ ID NO: 113432 - DNA, 25 bp, Saccharomyces pastorianus
gttataatacaagtgctgcgcatgg

SEQ ID NO: 113433 - DNA, 25 bp, Saccharomyces pastorianus
actacgtcgttgtcatgccaaagac

SEQ ID NO: 113434 - DNA, 25 bp, Saccharomyces pastorianus
gacgccggtgacttggtcatagaat

SEQ ID NO: 113435 - DNA, 25 bp, Saccharomyces pastorianus
agaagttctttctgctgcggaagcg

SEQ ID NO: 113436 - DNA, 25 bp, Saccharomyces pastorianus
gttaatggcaccaacaccggtaaga

SEQ ID NO: 113437 - DNA, 25 bp, Saccharomyces pastorianus
gaacaatttcactttgccttctcaa

SEQ ID NO: 113438 - DNA, 25 bp, Saccharomyces pastorianus
ttcaagcactggctcatcttcaagc

SEQ ID NO: 113439 - DNA, 25 bp, Saccharomyces pastorianus
gactgattatgctgttccaactact

SEQ ID NO: 113440 - DNA, 25 bp, Saccharomyces pastorianus
ttaacttcaagcaccagtccatctt

SEQ ID NO: 113441 - DNA, 25 bp, Saccharomyces pastorianus
tagtcagtctggataccttgcatta

SEQ ID NO: 113442 - DNA, 25 bp, Saccharomyces pastorianus
gttaatgtttcctttagtcagtctg

SEQ ID NO: 113443 - DNA, 25 bp, Saccharomyces pastorianus
ggttcatcttcagcttcaagcagct

SEQ ID NO: 113444 - DNA, 25 bp, Saccharomyces pastorianus
gtgcgataacagtgccatcaccaat

SEQ ID NO: 113445 - DNA, 25 bp, Saccharomyces pastorianus
gcgaaatatcttctgactctatcta

SEQ ID NO: 113446 - DNA, 25 bp, Saccharomyces pastorianus
acaacggtcgcaaagtcagcttcca

SEQ ID NO: 113447 - DNA, 25 bp, Saccharomyces pastorianus
gggagtggttccgatatccccggat

SEQ ID NO: 113448 - DNA, 25 bp, Saccharomyces pastorianus
gatatatggtctactgcttgtctaa

SEQ ID NO: 113449 - DNA, 25 bp, Saccharomyces pastorianus
aagagattcgggtacctgatagaga

SEQ ID NO: 113450 - DNA, 25 bp, Saccharomyces pastorianus
gggagaattaccatcataccttttg

SEQ ID NO: 113451 - DNA, 25 bp, Saccharomyces pastorianus
gaaccggacgaaggtcattcctaca

SEQ ID NO: 113452 - DNA, 25 bp, Saccharomyces pastorianus
tgattaccggagattttcttttcga

SEQ ID NO: 113453 - DNA, 25 bp, Saccharomyces pastorianus
tcaccagaggtgttactaggcgccc

SEQ ID NO: 113454 - DNA, 25 bp, Saccharomyces pastorianus
atgcaggtggcttggttaaccatcc

SEQ ID NO: 113455 - DNA, 25 bp, Saccharomyces pastorianus
taccgatatcaactccccagaaaat

SEQ ID NO: 113456 - DNA, 25 bp, Saccharomyces pastorianus
atctgattttttgtcgcctatgtta

SEQ ID NO: 113457 - DNA, 25 bp, Saccharomyces pastorianus
ggatgatgaccatattgcacaaatc

SEQ ID NO: 113458 - DNA, 25 bp, Saccharomyces pastorianus
gaaagtcgcctcaagaattgtcaat

SEQ ID NO: 113459 - DNA, 25 bp, Saccharomyces pastorianus
gaaggccggcttatacaaccaaatt

SEQ ID NO: 113460 - DNA, 25 bp, Saccharomyces pastorianus
ggtactctttatccagatgtcatcg

SEQ ID NO: 113461 - DNA, 25 bp, Saccharomyces pastorianus
tgcctgtttgttgcccgttaaatcc

SEQ ID NO: 113462 - DNA, 25 bp, Saccharomyces pastorianus
aatttcccaagcctttgcctgtttg

SEQ ID NO: 113463 - DNA, 25 bp, Saccharomyces pastorianus
aggaatccctcatgatctagtctgg

SEQ ID NO: 113464 - DNA, 25 bp, Saccharomyces pastorianus
gacgaagtcaggcatctaggtgaat

SEQ ID NO: 113465 - DNA, 25 bp, Saccharomyces pastorianus
gtcatcgaatccatttctttcaaag

SEQ ID NO: 113466 - DNA, 25 bp, Saccharomyces pastorianus
gatttcatgactgctgactggttcc

SEQ ID NO: 113467 - DNA, 25 bp, Saccharomyces pastorianus
gactggttcccattcgaacacagtt

SEQ ID NO: 113468 - DNA, 25 bp, Saccharomyces pastorianus
gggttgctagggtcacttacgatat

SEQ ID NO: 113469 - DNA, 25 bp, Saccharomyces pastorianus
atagctaccataggcaatcctcttt

SEQ ID NO: 113470 - DNA, 25 bp, Saccharomyces pastorianus
ggctacttaaattttccgcgtgttg

SEQ ID NO: 113471 - DNA, 25 bp, Saccharomyces pastorianus
gtttgaagtccatttgattccttta

SEQ ID NO: 113472 - DNA, 25 bp, Saccharomyces pastorianus
gagccaatggaaactagccacgatg

SEQ ID NO: 113473 - DNA, 25 bp, Saccharomyces pastorianus
gccacgatgcgctacacgatactat

SEQ ID NO: 113474 - DNA, 25 bp, Saccharomyces pastorianus
taactgttccggtacaactaccagg

SEQ ID NO: 113475 - DNA, 25 bp, Saccharomyces pastorianus
gcaatcctctttcctatactgtaat

SEQ ID NO: 113476 - DNA, 25 bp, Saccharomyces pastorianus
ctatgcattgaaaaagcggtccttg

SEQ ID NO: 113477 - DNA, 25 bp, Saccharomyces pastorianus
attctttcatgtacaattcgagcca

SEQ ID NO: 113478 - DNA, 25 bp, Saccharomyces pastorianus
gtcgaagatacgtaacctatgcatt

SEQ ID NO: 113479 - DNA, 25 bp, Saccharomyces pastorianus
ttcatggccagaaacgttgcgcaat

SEQ ID NO: 113480 - DNA, 25 bp, Saccharomyces pastorianus
gttgccacaattagacgttccttta

SEQ ID NO: 113481 - DNA, 25 bp, Saccharomyces pastorianus
agatcgcttacacgagactcatgac

SEQ ID NO: 113482 - DNA, 25 bp, Saccharomyces pastorianus
ggagttcttacttgcttaatacctg

SEQ ID NO: 113483 - DNA, 25 bp, Saccharomyces pastorianus
taccttcgggattaactttatggat

SEQ ID NO: 113484 - DNA, 25 bp, Saccharomyces pastorianus
gactgtacctgtcaaaagtatcctg

SEQ ID NO: 113485 - DNA, 25 bp, Saccharomyces pastorianus
tgatcttagggctcaaaccgctaat

SEQ ID NO: 113486 - DNA, 25 bp, Saccharomyces pastorianus
tggctggatgtaactcaggctgact

SEQ ID NO: 113487 - DNA, 25 bp, Saccharomyces pastorianus
atgacgccattgcagtgattactaa

SEQ ID NO: 113488 - DNA, 25 bp, Saccharomyces pastorianus
gaatctggtgccgatatcgaacctc

SEQ ID NO: 113489 - DNA, 25 bp, Saccharomyces pastorianus
gactcatgacgattacagcgatcag

SEQ ID NO: 113490 - DNA, 25 bp, Saccharomyces pastorianus
gatatcgaacctcccgtacaaacta

SEQ ID NO: 113491 - DNA, 25 bp, Saccharomyces pastorianus
atttattgggctgctcttggaccat

SEQ ID NO: 113492 - DNA, 25 bp, Saccharomyces pastorianus
aatcctcacagtcgttttttcacta

SEQ ID NO: 113493 - DNA, 25 bp, Saccharomyces pastorianus
ccgctataggtgtttttggcttgat

SEQ ID NO: 113494 - DNA, 25 bp, Saccharomyces pastorianus
gggttattgtcctgcatttgtggta

SEQ ID NO: 113495 - DNA, 25 bp, Saccharomyces pastorianus
aaccttacactggtaatcctcacag

SEQ ID NO: 113496 - DNA, 25 bp, Saccharomyces pastorianus
gcgcttgttgccatgctgaggataa

SEQ ID NO: 113497 - DNA, 25 bp, Saccharomyces pastorianus
gattttgcccaagcccgtgaatgaa

SEQ ID NO: 113498 - DNA, 25 bp, Saccharomyces pastorianus
atacagatactttgtccactctcac

SEQ ID NO: 113499 - DNA, 25 bp, Saccharomyces pastorianus
gcggtgctgtttccataccatttat

SEQ ID NO: 113500 - DNA, 25 bp, Saccharomyces pastorianus
tgatatgttacttccacttggcggt

SEQ ID NO: 113501 - DNA, 25 bp, Saccharomyces pastorianus
acaatattgttcaccacttctaccg

SEQ ID NO: 113502 - DNA, 25 bp, Saccharomyces pastorianus
acagccgccgctagaatttttcatg

SEQ ID NO: 113503 - DNA, 25 bp, Saccharomyces pastorianus
ttgtacggaagactctcgcacttta

SEQ ID NO: 113504 - DNA, 25 bp, Saccharomyces pastorianus
ggtgactactttgcctctaagacaa

SEQ ID NO: 113505 - DNA, 25 bp, Saccharomyces pastorianus
gggccactttgtgccgaactcaaga

SEQ ID NO: 113506 - DNA, 25 bp, Saccharomyces pastorianus
agctgatgttcctgatttcttgggt

SEQ ID NO: 113507 - DNA, 25 bp, Saccharomyces pastorianus
gaacagtacgacctgcatccaatat

SEQ ID NO: 113508 - DNA, 25 bp, Saccharomyces pastorianus
gcggtcagtggtttcaggttccaac

SEQ ID NO: 113509 - DNA, 25 bp, Saccharomyces pastorianus
tgcgtggctagagaatgacccttcc

SEQ ID NO: 113510 - DNA, 25 bp, Saccharomyces pastorianus
gtggctatttcataccgcagacgac

SEQ ID NO: 113511 - DNA, 25 bp, Saccharomyces pastorianus
gaataccggtgtgcttgcgtggcta

SEQ ID NO: 113512 - DNA, 25 bp, Saccharomyces pastorianus
ggtcccatctctacatgttcaagga

SEQ ID NO: 113513 - DNA, 25 bp, Saccharomyces pastorianus
ggcatacacaaattaccatcggttt

SEQ ID NO: 113514 - DNA, 25 bp, Saccharomyces pastorianus
gtgcatactgtgtttgagggctcct

SEQ ID NO: 113515 - DNA, 25 bp, Saccharomyces pastorianus
ttcttggacctttctctggatatca

SEQ ID NO: 113516 - DNA, 25 bp, Saccharomyces pastorianus
attcaatgattccatggtctcctct

SEQ ID NO: 113517 - DNA, 25 bp, Saccharomyces pastorianus
taatcggtattgtttcccacaaggg

SEQ ID NO: 113518 - DNA, 25 bp, Saccharomyces pastorianus
gacaaccattgatccattcttggac

SEQ ID NO: 113519 - DNA, 25 bp, Saccharomyces pastorianus
agttctattgtgtgtccaggctgtc

SEQ ID NO: 113520 - DNA, 25 bp, Saccharomyces pastorianus
gcaaggttccagacattatttacga

SEQ ID NO: 113521 - DNA, 25 bp, Saccharomyces pastorianus
aagattcgaacacctacttaatgga

SEQ ID NO: 113522 - DNA, 25 bp, Saccharomyces pastorianus
tggtctcctctatatctcaagcaga

SEQ ID NO: 113523 - DNA, 25 bp, Saccharomyces pastorianus
gagggctccttggaaagttctattg

SEQ ID NO: 113524 - DNA, 25 bp, Saccharomyces pastorianus
tgctaacagtgttaggccgactccc

SEQ ID NO: 113525 - DNA, 25 bp, Saccharomyces pastorianus
aaacccaaacgagtgcgaactgcaa

SEQ ID NO: 113526 - DNA, 25 bp, Saccharomyces pastorianus
gattccttccggtctagcaatagag

SEQ ID NO: 113527 - DNA, 25 bp, Saccharomyces pastorianus
tgcgagcacaaaaaccgcttccaga

SEQ ID NO: 113528 - DNA, 25 bp, Saccharomyces pastorianus
aaagactcgttctgctgcgagcaca

SEQ ID NO: 113529 - DNA, 25 bp, Saccharomyces pastorianus
aaaattcctgctttttcagactcaa

SEQ ID NO: 113530 - DNA, 25 bp, Saccharomyces pastorianus
gactcaactgtcatatccgatgcag

SEQ ID NO: 113531 - DNA, 25 bp, Saccharomyces pastorianus
gaggacgctagttatggtttactta

SEQ ID NO: 113532 - DNA, 25 bp, Saccharomyces pastorianus
ggatcttcagacattacccaatcac

SEQ ID NO: 113533 - DNA, 25 bp, Saccharomyces pastorianus
gagcatcaaggacgccaaagacgga

SEQ ID NO: 113534 - DNA, 25 bp, Saccharomyces pastorianus
tggtaatgggctagattccttccgg

SEQ ID NO: 113535 - DNA, 25 bp, Saccharomyces pastorianus
ggttctatctattgtgcctctaagt

SEQ ID NO: 113536 - DNA, 25 bp, Saccharomyces pastorianus
gatctgatcgtctatgcaacttcca

SEQ ID NO: 113537 - DNA, 25 bp, Saccharomyces pastorianus
gagacgcatacccaacaggttctat

SEQ ID NO: 113538 - DNA, 25 bp, Saccharomyces pastorianus
ccaacgtcacggctttaatcaatat

SEQ ID NO: 113539 - DNA, 25 bp, Saccharomyces pastorianus
ggctgatgacgtggctgatctgatc

SEQ ID NO: 113540 - DNA, 25 bp, Saccharomyces pastorianus
gagtcattctaattgcaccagggct

SEQ ID NO: 113541 - DNA, 25 bp, Saccharomyces pastorianus
tactgcccatattccaagccaagaa

SEQ ID NO: 113542 - DNA, 25 bp, Saccharomyces pastorianus
atttgggttcaatcgctggcagaga

SEQ ID NO: 113543 - DNA, 25 bp, Saccharomyces pastorianus
gcaaaagttcatgtggcccagctgg

SEQ ID NO: 113544 - DNA, 25 bp, Saccharomyces pastorianus
ggatactaccccattgatggctgat

SEQ ID NO: 113545 - DNA, 25 bp, Saccharomyces pastorianus
atatcacacaagctgtactgcccat

SEQ ID NO: 113546 - DNA, 25 bp, Saccharomyces pastorianus
gaaactgcaaataacgtcgaggaag

SEQ ID NO: 113547 - DNA, 25 bp, Saccharomyces pastorianus
acatcaacatcgctctgacgcagaa

SEQ ID NO: 113548 - DNA, 25 bp, Saccharomyces pastorianus
aacaaaccgaagattctgtccagaa

SEQ ID NO: 113549 - DNA, 25 bp, Saccharomyces pastorianus
gtaaagccacgaatcctcttttgaa

SEQ ID NO: 113550 - DNA, 25 bp, Saccharomyces pastorianus
gacgacggtgacattgaagctgctg

SEQ ID NO: 113551 - DNA, 25 bp, Saccharomyces pastorianus
gaaacactcgaccagaacgatctcg

SEQ ID NO: 113552 - DNA, 25 bp, Saccharomyces pastorianus
tggcccataccaagcataaattaag

SEQ ID NO: 113553 - DNA, 25 bp, Saccharomyces pastorianus
aagagaacaaggtggtgcgcgaact

SEQ ID NO: 113554 - DNA, 25 bp, Saccharomyces pastorianus
cacactgaattacttgcggacgaat

SEQ ID NO: 113555 - DNA, 25 bp, Saccharomyces pastorianus
tggtgcgcgaacttgatgaagcccc

SEQ ID NO: 113556 - DNA, 25 bp, Saccharomyces pastorianus
gtgcatgaacgggaacacatacaag

SEQ ID NO: 113557 - DNA, 25 bp, Saccharomyces pastorianus
actaaactcattgccatatcagacg

SEQ ID NO: 113558 - DNA, 25 bp, Saccharomyces pastorianus
aaattattcatggagtggcctttca

SEQ ID NO: 113559 - DNA, 25 bp, Saccharomyces pastorianus
atggatgccaagcacaacagctaga

SEQ ID NO: 113560 - DNA, 25 bp, Saccharomyces pastorianus
gggatcccattttatttagtgctgc

SEQ ID NO: 113561 - DNA, 25 bp, Saccharomyces pastorianus
atgcagtggctgtcctgtattggaa

SEQ ID NO: 113562 - DNA, 25 bp, Saccharomyces pastorianus
agtgctgcggaaatatggcctacaa

SEQ ID NO: 113563 - DNA, 25 bp, Saccharomyces pastorianus
gaacacccttgaatactgtcatgga

SEQ ID NO: 113564 - DNA, 25 bp, Saccharomyces pastorianus
gaaaacttctagctaggccaggcat

SEQ ID NO: 113565 - DNA, 25 bp, Saccharomyces pastorianus
gaaatggacccaattgacttcgatt

SEQ ID NO: 113566 - DNA, 25 bp, Saccharomyces pastorianus
ctcgctgggacatggtggccaacaa

SEQ ID NO: 113567 - DNA, 25 bp, Saccharomyces pastorianus
gccaggcatgcattctagatccaaa

SEQ ID NO: 113568 - DNA, 25 bp, Saccharomyces pastorianus
gttgtgcattttagattgtcgtcgt

SEQ ID NO: 113569 - DNA, 25 bp, Saccharomyces pastorianus
gacatgttttgtgcatgctctttag

SEQ ID NO: 113570 - DNA, 25 bp, Saccharomyces pastorianus
gctctttagtattgttgtgcatttt

SEQ ID NO: 113571 - DNA, 25 bp, Saccharomyces pastorianus
gtgcatgctctttagtattgttgtg

SEQ ID NO: 113572 - DNA, 25 bp, Saccharomyces pastorianus
tacggattatgtgtaactgtattaa

SEQ ID NO: 113573 - DNA, 25 bp, Saccharomyces pastorianus
tttcaggatgtgttacgatgcagac

SEQ ID NO: 113574 - DNA, 25 bp, Saccharomyces pastorianus
cacaatgtaatctattttttcagga

SEQ ID NO: 113575 - DNA, 25 bp, Saccharomyces pastorianus
atgtggtgtacggattatgtgtaac

SEQ ID NO: 113576 - DNA, 25 bp, Saccharomyces pastorianus
attgtcgtcgtttgtttctgtatgt

SEQ ID NO: 113577 - DNA, 25 bp, Saccharomyces pastorianus
gtgttacgatgcagacatgttttgt

SEQ ID NO: 113578 - DNA, 25 bp, Saccharomyces pastorianus
gtcgtttgtttctgtatgtggtgta

SEQ ID NO: 113579 - DNA, 25 bp, Saccharomyces pastorianus
ggtctttattactttgatccacgat

SEQ ID NO: 113580 - DNA, 25 bp, Saccharomyces pastorianus
tttccctggagaccctagtggaagc

SEQ ID NO: 113581 - DNA, 25 bp, Saccharomyces pastorianus
gaacgcccttctggtgcattttttg

SEQ ID NO: 113582 - DNA, 25 bp, Saccharomyces pastorianus
atcgaccatgtgttcttcgtacata

SEQ ID NO: 113583 - DNA, 25 bp, Saccharomyces pastorianus
aaactcacagagctcgaaacagatg

SEQ ID NO: 113584 - DNA, 25 bp, Saccharomyces pastorianus
aaggtgatcgagtgcgaacgccctt

SEQ ID NO: 113585 - DNA, 25 bp, Saccharomyces pastorianus
gcattttttgcgcacgataacttaa

SEQ ID NO: 113586 - DNA, 25 bp, Saccharomyces pastorianus
gcatttccaaaacctgcaaaaccag

SEQ ID NO: 113587 - DNA, 25 bp, Saccharomyces pastorianus
gaaaagattggcctttccctggaga

SEQ ID NO: 113588 - DNA, 25 bp, Saccharomyces pastorianus
ttaatgactctatagctaccggcca

SEQ ID NO: 113589 - DNA, 25 bp, Saccharomyces pastorianus
atcatagcccattgtactaccgtta

SEQ ID NO: 113590 - DNA, 25 bp, Saccharomyces pastorianus
tagtcgggatcaagaactatctttg

SEQ ID NO: 113591 - DNA, 25 bp, Saccharomyces pastorianus
gagcatgatcttcaaaacccaaaag

SEQ ID NO: 113592 - DNA, 25 bp, Saccharomyces pastorianus
attcttgagaggttcggcgatatac

SEQ ID NO: 113593 - DNA, 25 bp, Saccharomyces pastorianus
gacccttgaggtctacgaggaaaag

SEQ ID NO: 113594 - DNA, 25 bp, Saccharomyces pastorianus
gaactgccacgaacgcaagtagtga

SEQ ID NO: 113595 - DNA, 25 bp, Saccharomyces pastorianus
aattccgaagaacgacctcattagt

SEQ ID NO: 113596 - DNA, 25 bp, Saccharomyces pastorianus
atttccgtccgcaaagttctgttgt

SEQ ID NO: 113597 - DNA, 25 bp, Saccharomyces pastorianus
ggatctgaagaactgccacgaacgc

SEQ ID NO: 113598 - DNA, 25 bp, Saccharomyces pastorianus
gatagtcctgattccaacagcattt

SEQ ID NO: 113599 - DNA, 25 bp, Saccharomyces pastorianus
gttctgttgtcagctcctttacaaa

SEQ ID NO: 113600 - DNA, 25 bp, Saccharomyces pastorianus
gaggaaagccctgcaaattctctat

SEQ ID NO: 113601 - DNA, 25 bp, Saccharomyces pastorianus
ggcacctaaggagctcatgttacag

SEQ ID NO: 113602 - DNA, 25 bp, Saccharomyces pastorianus
agatgtccgtcttttgcatctgctc

SEQ ID NO: 113603 - DNA, 25 bp, Saccharomyces pastorianus
gtatcagaagttggtccggactcaa

SEQ ID NO: 113604 - DNA, 25 bp, Saccharomyces pastorianus
gtccttaaggatgcgttggtttaca

SEQ ID NO: 113605 - DNA, 25 bp, Saccharomyces pastorianus
gtttacaacgactacgctggcagtg

SEQ ID NO: 113606 - DNA, 25 bp, Saccharomyces pastorianus
aactcagtgggctcagtatcagaag

SEQ ID NO: 113607 - DNA, 25 bp, Saccharomyces pastorianus
ctcgcatcacagtcgattcatcaat

SEQ ID NO: 113608 - DNA, 25 bp, Saccharomyces pastorianus
atacggcttgccattgcagcgagaa

SEQ ID NO: 113609 - DNA, 25 bp, Saccharomyces pastorianus
ttctgccggcagtggattaggagta

SEQ ID NO: 113610 - DNA, 25 bp, Saccharomyces pastorianus
gaggaccaagtaccgctacaattga

SEQ ID NO: 113611 - DNA, 25 bp, Saccharomyces pastorianus
aggaaacgccacgagatgtccgtct

SEQ ID NO: 113612 - DNA, 25 bp, Saccharomyces pastorianus
taagaaaggtgatcgcgctggtgcc

SEQ ID NO: 113613 - DNA, 25 bp, Saccharomyces pastorianus
tggtcttacaagtgtcatggctccc

SEQ ID NO: 113614 - DNA, 25 bp, Saccharomyces pastorianus
gaactcatcgaccactaacgtgcta

SEQ ID NO: 113615 - DNA, 25 bp, Saccharomyces pastorianus
acgcgaatgccggtatgaactcatc

SEQ ID NO: 113616 - DNA, 25 bp, Saccharomyces pastorianus
ttcatgacaggccagctccatataa

SEQ ID NO: 113617 - DNA, 25 bp, Saccharomyces pastorianus
gaggccgctgcaaaatcatgtaatg

SEQ ID NO: 113618 - DNA, 25 bp, Saccharomyces pastorianus
tatcgtgcttggtggtcttgcatac

SEQ ID NO: 113619 - DNA, 25 bp, Saccharomyces pastorianus
gctatcatcacagcagtcatactga

SEQ ID NO: 113620 - DNA, 25 bp, Saccharomyces pastorianus
aaacaagtgctgaggccgctgcaaa

SEQ ID NO: 113621 - DNA, 25 bp, Saccharomyces pastorianus
atggacttataatcacggtatcgtg

SEQ ID NO: 113622 - DNA, 25 bp, Saccharomyces pastorianus
atggctccctttactagggacacaa

SEQ ID NO: 113623 - DNA, 25 bp, Saccharomyces pastorianus
gaaagcttgccaaacctgtcattga

SEQ ID NO: 113624 - DNA, 25 bp, Saccharomyces pastorianus
aaacccactgcagttgatcctaatt

SEQ ID NO: 113625 - DNA, 25 bp, Saccharomyces pastorianus
ctgtatgcagatgtgttcgaagctt

SEQ ID NO: 113626 - DNA, 25 bp, Saccharomyces pastorianus
gctacccgtaatcaagttgccttgg

SEQ ID NO: 113627 - DNA, 25 bp, Saccharomyces pastorianus
aaagagctgccattcctaggagtga

SEQ ID NO: 113628 - DNA, 25 bp, Saccharomyces pastorianus
ttcgaagcttacattggcggcttga

SEQ ID NO: 113629 - DNA, 25 bp, Saccharomyces pastorianus
gatcctaattccatagttgagtgca

SEQ ID NO: 113630 - DNA, 25 bp, Saccharomyces pastorianus
tcaaaattgcgggtattagggctgc

SEQ ID NO: 113631 - DNA, 25 bp, Saccharomyces pastorianus
gaatctgtgttaaaagatccctcac

SEQ ID NO: 113632 - DNA, 25 bp, Saccharomyces pastorianus
tagggctgcagaaaatgctcttcgt

SEQ ID NO: 113633 - DNA, 25 bp, Saccharomyces pastorianus
tgtcattgaggaggctacccgtaat

SEQ ID NO: 113634 - DNA, 25 bp, Saccharomyces pastorianus
cctgatctgaaaattgccggcttga

SEQ ID NO: 113635 - DNA, 25 bp, Saccharomyces pastorianus
aatgggcgccttggatttggattac

SEQ ID NO: 113636 - DNA, 25 bp, Saccharomyces pastorianus
ttagccaagagcttcgtgccataat

SEQ ID NO: 113637 - DNA, 25 bp, Saccharomyces pastorianus
actattttggcgcattgatctcatt

SEQ ID NO: 113638 - DNA, 25 bp, Saccharomyces pastorianus
tatgcttcggtgacgtctattatga

SEQ ID NO: 113639 - DNA, 25 bp, Saccharomyces pastorianus
aacctgaccatttgttatgcttcgg

SEQ ID NO: 113640 - DNA, 25 bp, Saccharomyces pastorianus
gaaggtcaactaccaccatggtgta

SEQ ID NO: 113641 - DNA, 25 bp, Saccharomyces pastorianus
ttacctacgggatatcctgatctga

SEQ ID NO: 113642 - DNA, 25 bp, Saccharomyces pastorianus
gatctcatttgaaacccctgaattt

SEQ ID NO: 113643 - DNA, 25 bp, Saccharomyces pastorianus
ggagccaactggaaacctgaccatt

SEQ ID NO: 113644 - DNA, 25 bp, Saccharomyces pastorianus
aatccctaatcaccattcaaggtcc

SEQ ID NO: 113645 - DNA, 25 bp, Saccharomyces pastorianus
gacgacaagttgaatccgttcgaga

SEQ ID NO: 113646 - DNA, 25 bp, Saccharomyces pastorianus
gttctcgttttggtttgtccagact

SEQ ID NO: 113647 - DNA, 25 bp, Saccharomyces pastorianus
gtggtgtcaccccaagaattggttt

SEQ ID NO: 113648 - DNA, 25 bp, Saccharomyces pastorianus
aattggtgccagtgctttaggtggt

SEQ ID NO: 113649 - DNA, 25 bp, Saccharomyces pastorianus
gggttctgtacctgtatgaaaacgg

SEQ ID NO: 113650 - DNA, 25 bp, Saccharomyces pastorianus
taagggtgttaatgctgttgctatt

SEQ ID NO: 113651 - DNA, 25 bp, Saccharomyces pastorianus
tcactcaagcctacttaaccatggg

SEQ ID NO: 113652 - DNA, 25 bp, Saccharomyces pastorianus
aatccgttcgagaaaattggtgcca

SEQ ID NO: 113653 - DNA, 25 bp, Saccharomyces pastorianus
acaagacataaatctgcctccgcag

SEQ ID NO: 113654 - DNA, 25 bp, Saccharomyces pastorianus
gggttgaacaactttgcctcaggta

SEQ ID NO: 113655 - DNA, 25 bp, Saccharomyces pastorianus
tggcaaactgtcttcatggttggtt

SEQ ID NO: 113656 - DNA, 25 bp, Saccharomyces pastorianus
ccttgttattttatcagtggctcac

SEQ ID NO: 113657 - DNA, 25 bp, Saccharomyces pastorianus
tgttattttatcagtggctcacttt

SEQ ID NO: 113658 - DNA, 25 bp, Saccharomyces pastorianus
agttattggccgtcgtttgccaact

SEQ ID NO: 113659 - DNA, 25 bp, Saccharomyces pastorianus
gaaaatccttgttattttatcagtg

SEQ ID NO: 113660 - DNA, 25 bp, Saccharomyces pastorianus
ataccaagttattggccgtcgtttg

SEQ ID NO: 113661 - DNA, 25 bp, Saccharomyces pastorianus
ccgtcgtttgccaactgaatctgtt

SEQ ID NO: 113662 - DNA, 25 bp, Saccharomyces pastorianus
tattggccgtcgtttgccaactgaa

SEQ ID NO: 113663 - DNA, 25 bp, Saccharomyces pastorianus
ggctcactttaaagaataccaagtt

SEQ ID NO: 113664 - DNA, 25 bp, Saccharomyces pastorianus
taccaagttattggccgtcgtttgc

SEQ ID NO: 113665 - DNA, 25 bp, Saccharomyces pastorianus
ttatcagtggctcactttaaagaat

SEQ ID NO: 113666 - DNA, 25 bp, Saccharomyces pastorianus
tggccgtcgtttgccaactgaatct

SEQ ID NO: 113667 - DNA, 25 bp, Saccharomyces pastorianus
taccttgccacggtcagattttggt

SEQ ID NO: 113668 - DNA, 25 bp, Saccharomyces pastorianus
gccacggtcagattttggtacagga

SEQ ID NO: 113669 - DNA, 25 bp, Saccharomyces pastorianus
ttggcgataccttgccacggtcaga

SEQ ID NO: 113670 - DNA, 25 bp, Saccharomyces pastorianus
cttgccacggtcagattttggtaca

SEQ ID NO: 113671 - DNA, 25 bp, Saccharomyces pastorianus
atttggcgataccttgccacggtca

SEQ ID NO: 113672 - DNA, 25 bp, Saccharomyces pastorianus
aaaatgaaatttggcgataccttgc

SEQ ID NO: 113673 - DNA, 25 bp, Saccharomyces pastorianus
gataccttgccacggtcagattttg

SEQ ID NO: 113674 - DNA, 25 bp, Saccharomyces pastorianus
cacggtcagattttggtacaggagg

SEQ ID NO: 113675 - DNA, 25 bp, Saccharomyces pastorianus
aaatttggcgataccttgccacggt

SEQ ID NO: 113676 - DNA, 25 bp, Saccharomyces pastorianus
gcgataccttgccacggtcagattt

SEQ ID NO: 113677 - DNA, 25 bp, Saccharomyces pastorianus
gtcagattttggtacaggagggaac

SEQ ID NO: 113678 - DNA, 25 bp, Saccharomyces pastorianus
atagcaggtggttcaccatcttcgt

SEQ ID NO: 113679 - DNA, 25 bp, Saccharomyces pastorianus
acggtattcattctgcaactgttca

SEQ ID NO: 113680 - DNA, 25 bp, Saccharomyces pastorianus
actccttctacaatttctgctgatc

SEQ ID NO: 113681 - DNA, 25 bp, Saccharomyces pastorianus
agaattttactacaggctactcctt

SEQ ID NO: 113682 - DNA, 25 bp, Saccharomyces pastorianus
aagaagcctttgacagccatggaaa

SEQ ID NO: 113683 - DNA, 25 bp, Saccharomyces pastorianus
attgcagctgctttgtttatttgga

SEQ ID NO: 113684 - DNA, 25 bp, Saccharomyces pastorianus
tactcggatccaatcgtttctttaa

SEQ ID NO: 113685 - DNA, 25 bp, Saccharomyces pastorianus
agattttggcagtacctggcgtgat

SEQ ID NO: 113686 - DNA, 25 bp, Saccharomyces pastorianus
gtgatagcggtccatgacttccacg

SEQ ID NO: 113687 - DNA, 25 bp, Saccharomyces pastorianus
gataaattcatgagctccgccaagc

SEQ ID NO: 113688 - DNA, 25 bp, Saccharomyces pastorianus
aaaaaagcgttcacctactgcctat

SEQ ID NO: 113689 - DNA, 25 bp, Saccharomyces pastorianus
aatgtgaaggcctaccatgctccat

SEQ ID NO: 113690 - DNA, 25 bp, Saccharomyces pastorianus
aaccttagtcggctctgggtcaaag

SEQ ID NO: 113691 - DNA, 25 bp, Saccharomyces pastorianus
gaacgttaagccttcattcggtatt

SEQ ID NO: 113692 - DNA, 25 bp, Saccharomyces pastorianus
gaaacttttgtgttgtcaccgccag

SEQ ID NO: 113693 - DNA, 25 bp, Saccharomyces pastorianus
gtgacgttgcattttgccagaccgt

SEQ ID NO: 113694 - DNA, 25 bp, Saccharomyces pastorianus
gaatccgctagacgttattaccaca

SEQ ID NO: 113695 - DNA, 25 bp, Saccharomyces pastorianus
gaagctatgctgatcccaaccttag

SEQ ID NO: 113696 - DNA, 25 bp, Saccharomyces pastorianus
acctggaatcttcatgtccgttcaa

SEQ ID NO: 113697 - DNA, 25 bp, Saccharomyces pastorianus
attactacgtaaatgctcccggtgt

SEQ ID NO: 113698 - DNA, 25 bp, Saccharomyces pastorianus
gtagcggctcatcttctaaaggcaa

SEQ ID NO: 113699 - DNA, 25 bp, Saccharomyces pastorianus
aactgggccccatttgtagctggtt

SEQ ID NO: 113700 - DNA, 25 bp, Saccharomyces pastorianus
agagtataaagtcgcactgcaaggt

SEQ ID NO: 113701 - DNA, 25 bp, Saccharomyces pastorianus
agacatcttggacgcaatggacccc

SEQ ID NO: 113702 - DNA, 25 bp, Saccharomyces pastorianus
ggacgcattcttccagtgtttggac

SEQ ID NO: 113703 - DNA, 25 bp, Saccharomyces pastorianus
gcgcccatagctggatcaagtactt

SEQ ID NO: 113704 - DNA, 25 bp, Saccharomyces pastorianus
atttgaggagaattgcgcccatagc

SEQ ID NO: 113705 - DNA, 25 bp, Saccharomyces pastorianus
ttcaaggagaagagggtcatcgact

SEQ ID NO: 113706 - DNA, 25 bp, Saccharomyces pastorianus
gagaggagaccatcaagagaatcga

SEQ ID NO: 113707 - DNA, 25 bp, Saccharomyces pastorianus
ggcttattttcatttgatggtggca

SEQ ID NO: 113708 - DNA, 25 bp, Saccharomyces pastorianus
aatggaccccaagaatagcaagagt

SEQ ID NO: 113709 - DNA, 25 bp, Saccharomyces pastorianus
cagagaaagttgtgctgggagtcca

SEQ ID NO: 113710 - DNA, 25 bp, Saccharomyces pastorianus
cctaatacccgttcacagagaaagt

SEQ ID NO: 113711 - DNA, 25 bp, Saccharomyces pastorianus
agcccggttttgttggatttgctca

SEQ ID NO: 113712 - DNA, 25 bp, Saccharomyces pastorianus
gtctcctctctcttaaagtcgatga

SEQ ID NO: 113713 - DNA, 25 bp, Saccharomyces pastorianus
gggttgtgattcctttttgccacca

SEQ ID NO: 113714 - DNA, 25 bp, Saccharomyces pastorianus
gggtccattgcgtccaagatgtctg

SEQ ID NO: 113715 - DNA, 25 bp, Saccharomyces pastorianus
ggcgcaattctcctcaaatttttca

SEQ ID NO: 113716 - DNA, 25 bp, Saccharomyces pastorianus
gtacttgatccagctatgggcgcaa

SEQ ID NO: 113717 - DNA, 25 bp, Saccharomyces pastorianus
aagatgtctgccttgtccaaacact

SEQ ID NO: 113718 - DNA, 25 bp, Saccharomyces pastorianus
ttcagctcagctacaatcgtcaatc

SEQ ID NO: 113719 - DNA, 25 bp, Saccharomyces pastorianus
gtgcgactttatactcttgctattc

SEQ ID NO: 113720 - DNA, 25 bp, Saccharomyces pastorianus
atgtccgtctcttttgttcagctca

SEQ ID NO: 113721 - DNA, 25 bp, Saccharomyces pastorianus
attcgtgtatctatgttcctgcaca

SEQ ID NO: 113722 - DNA, 25 bp, Saccharomyces pastorianus
gtccaaaacatctgtgtctacgctg

SEQ ID NO: 113723 - DNA, 25 bp, Saccharomyces pastorianus
gacgcttgtctaagctggctatcga

SEQ ID NO: 113724 - DNA, 25 bp, Saccharomyces pastorianus
taccgatgatggctggttccgtacc

SEQ ID NO: 113725 - DNA, 25 bp, Saccharomyces pastorianus
aaatggccttgttacatccgcccaa

SEQ ID NO: 113726 - DNA, 25 bp, Saccharomyces pastorianus
agaagctacaggatgccgtttgcaa

SEQ ID NO: 113727 - DNA, 25 bp, Saccharomyces pastorianus
gttccgtaccggtgatatcgctgaa

SEQ ID NO: 113728 - DNA, 25 bp, Saccharomyces pastorianus
aagcctgtcggtattgtggtcccta

SEQ ID NO: 113729 - DNA, 25 bp, Saccharomyces pastorianus
gaagaaactgctgcggcctttaccg

SEQ ID NO: 113730 - DNA, 25 bp, Saccharomyces pastorianus
atgctgtcaactgccaaatctcaag

SEQ ID NO: 113731 - DNA, 25 bp, Saccharomyces pastorianus
gtgcacccatctgttctgaatacta

SEQ ID NO: 113732 - DNA, 25 bp, Saccharomyces pastorianus
gtggtccctaacttaggacgcttgt

SEQ ID NO: 113733 - DNA, 25 bp, Saccharomyces pastorianus
acaatgactcgccatctgtgttcgg

SEQ ID NO: 113734 - DNA, 25 bp, Saccharomyces pastorianus
cttcttcgcacagcttcgataagga

SEQ ID NO: 113735 - DNA, 25 bp, Saccharomyces pastorianus
ctgagtattggcatggacgagcaca

SEQ ID NO: 113736 - DNA, 25 bp, Saccharomyces pastorianus
tgggttcaaacctttaagcacgata

SEQ ID NO: 113737 - DNA, 25 bp, Saccharomyces pastorianus
agttctaagaccaatgtttcgctga

SEQ ID NO: 113738 - DNA, 25 bp, Saccharomyces pastorianus
gaaatcgggtagtaggttcagtcac

SEQ ID NO: 113739 - DNA, 25 bp, Saccharomyces pastorianus
caggcaccaatacccaagttctaag

SEQ ID NO: 113740 - DNA, 25 bp, Saccharomyces pastorianus
aagcacgatatacacgcctgtttct

SEQ ID NO: 113741 - DNA, 25 bp, Saccharomyces pastorianus
aaatggcacgaactgaatatgtccc

SEQ ID NO: 113742 - DNA, 25 bp, Saccharomyces pastorianus
gataaggaggcatgtttccccttta

SEQ ID NO: 113743 - DNA, 25 bp, Saccharomyces pastorianus
agagtttattcagcgttttgtcaaa

SEQ ID NO: 113744 - DNA, 25 bp, Saccharomyces pastorianus
gagttgcgtctacatcattattcgt

SEQ ID NO: 113745 - DNA, 25 bp, Saccharomyces pastorianus
tttggaactcccgaattgaccgact

SEQ ID NO: 113746 - DNA, 25 bp, Saccharomyces pastorianus
gttttctgggacgttgcactgtaca

SEQ ID NO: 113747 - DNA, 25 bp, Saccharomyces pastorianus
ggctttatcttccagctgctattaa

SEQ ID NO: 113748 - DNA, 25 bp, Saccharomyces pastorianus
gatcacagcgatagtgtccttcatt

SEQ ID NO: 113749 - DNA, 25 bp, Saccharomyces pastorianus
gagttatttttctttgatcacagcg

SEQ ID NO: 113750 - DNA, 25 bp, Saccharomyces pastorianus
gattaacactatcccttcaatgaaa

SEQ ID NO: 113751 - DNA, 25 bp, Saccharomyces pastorianus
taatctaggtgtgtccggctttatc

SEQ ID NO: 113752 - DNA, 25 bp, Saccharomyces pastorianus
ccgactcttcctctcaaatagtaga

SEQ ID NO: 113753 - DNA, 25 bp, Saccharomyces pastorianus
gataatcatcataagtgccacgttg

SEQ ID NO: 113754 - DNA, 25 bp, Saccharomyces pastorianus
atcgagattgattgccactttggtt

SEQ ID NO: 113755 - DNA, 25 bp, Saccharomyces pastorianus
acaagtgttgatggattttctgaac

SEQ ID NO: 113756 - DNA, 25 bp, Saccharomyces pastorianus
aacagagatatctcctccaccagtt

SEQ ID NO: 113757 - DNA, 25 bp, Saccharomyces pastorianus
atatcgcctgtaagtgaatcattgg

SEQ ID NO: 113758 - DNA, 25 bp, Saccharomyces pastorianus
catatgggccgatgcccctgacgaa

SEQ ID NO: 113759 - DNA, 25 bp, Saccharomyces pastorianus
gcagaaaccaagtcacaagcggagt

SEQ ID NO: 113760 - DNA, 25 bp, Saccharomyces pastorianus
ggagctccaactgggttgacgatga

SEQ ID NO: 113761 - DNA, 25 bp, Saccharomyces pastorianus
ttctgaacgatgaagggagctccaa

SEQ ID NO: 113762 - DNA, 25 bp, Saccharomyces pastorianus
atccaaacaggataccgcttctaag

SEQ ID NO: 113763 - DNA, 25 bp, Saccharomyces pastorianus
gaagccgcctcatagtcagggcaaa

SEQ ID NO: 113764 - DNA, 25 bp, Saccharomyces pastorianus
tccaccagtttcacctagcaagatg

SEQ ID NO: 113765 - DNA, 25 bp, Saccharomyces pastorianus
tggcgataaatcctttctcccaaaa

SEQ ID NO: 113766 - DNA, 25 bp, Saccharomyces pastorianus
tatgctatttttgcggtagccgtcg

SEQ ID NO: 113767 - DNA, 25 bp, Saccharomyces pastorianus
gtggagacatccaaggtcagcttta

SEQ ID NO: 113768 - DNA, 25 bp, Saccharomyces pastorianus
ttatacctgtatccattttatgcta

SEQ ID NO: 113769 - DNA, 25 bp, Saccharomyces pastorianus
tttgcggtagccgtcgttacaccac

SEQ ID NO: 113770 - DNA, 25 bp, Saccharomyces pastorianus
gtcgttacaccacttctatacattc

SEQ ID NO: 113771 - DNA, 25 bp, Saccharomyces pastorianus
ggctaataaagttattcaactacag

SEQ ID NO: 113772 - DNA, 25 bp, Saccharomyces pastorianus
gaaaatcttccaatcttccactaaa

SEQ ID NO: 113773 - DNA, 25 bp, Saccharomyces pastorianus
aatcttccactaaacctctatggtg

SEQ ID NO: 113774 - DNA, 25 bp, Saccharomyces pastorianus
cgttacaccacttctatacattcca

SEQ ID NO: 113775 - DNA, 25 bp, Saccharomyces pastorianus
ggtcagctttatacctgtatccatt

SEQ ID NO: 113776 - DNA, 25 bp, Saccharomyces pastorianus
tatttttgcggtagccgtcgttaca

SEQ ID NO: 113777 - DNA, 25 bp, Saccharomyces pastorianus
attgcagtccatcacctcatatgaa

SEQ ID NO: 113778 - DNA, 25 bp, Saccharomyces pastorianus
ttaagcatacgacatgacccacctt

SEQ ID NO: 113779 - DNA, 25 bp, Saccharomyces pastorianus
tggatttgctacagtatgcccctga

SEQ ID NO: 113780 - DNA, 25 bp, Saccharomyces pastorianus
gatgggaacttgcttcgccgtaaaa

SEQ ID NO: 113781 - DNA, 25 bp, Saccharomyces pastorianus
aagatattgccaaaccttcgccaaa

SEQ ID NO: 113782 - DNA, 25 bp, Saccharomyces pastorianus
ttcgaccccggatgcaagatacttg

SEQ ID NO: 113783 - DNA, 25 bp, Saccharomyces pastorianus
tgacgaatcctcatttgagccctta

SEQ ID NO: 113784 - DNA, 25 bp, Saccharomyces pastorianus
atgtgcgttctgctccaaatactta

SEQ ID NO: 113785 - DNA, 25 bp, Saccharomyces pastorianus
tgagcccttagccactattatatcg

SEQ ID NO: 113786 - DNA, 25 bp, Saccharomyces pastorianus
atgcccctgaggatacgacgtggaa

SEQ ID NO: 113787 - DNA, 25 bp, Saccharomyces pastorianus
tgtgaccttttgtggaacggctgca

SEQ ID NO: 113788 - DNA, 25 bp, Saccharomyces pastorianus
gtgaacttcctgaaaacgccaaaat

SEQ ID NO: 113789 - DNA, 25 bp, Saccharomyces pastorianus
cggtccaaagcgtgaacttatttat

SEQ ID NO: 113790 - DNA, 25 bp, Saccharomyces pastorianus
cttaagagatttccaagatgaccaa

SEQ ID NO: 113791 - DNA, 25 bp, Saccharomyces pastorianus
tgtttccttaagagatttccaagat

SEQ ID NO: 113792 - DNA, 25 bp, Saccharomyces pastorianus
tggcttcgaatctgatgaagacgtt

SEQ ID NO: 113793 - DNA, 25 bp, Saccharomyces pastorianus
caactttggcttcgaatctgatgaa

SEQ ID NO: 113794 - DNA, 25 bp, Saccharomyces pastorianus
tggtaataagagaatggcccatatt

SEQ ID NO: 113795 - DNA, 25 bp, Saccharomyces pastorianus
gacaactttggcttcgaatctgatg

SEQ ID NO: 113796 - DNA, 25 bp, Saccharomyces pastorianus
cgaagccagttgctttgatggtaat

SEQ ID NO: 113797 - DNA, 25 bp, Saccharomyces pastorianus
gaaacagacaactttggcttcgaat

SEQ ID NO: 113798 - DNA, 25 bp, Saccharomyces pastorianus
gatgaagccagaacactgaaaaacc

SEQ ID NO: 113799 - DNA, 25 bp, Saccharomyces pastorianus
caggtagatttcgtttgcgtttccg

SEQ ID NO: 113800 - DNA, 25 bp, Saccharomyces pastorianus
cgccgctgagtttttgatgaaattt

SEQ ID NO: 113801 - DNA, 25 bp, Saccharomyces pastorianus
cagggatattcacgcttatgtgcat

SEQ ID NO: 113802 - DNA, 25 bp, Saccharomyces pastorianus
ggttacaccattctttacggtagct

SEQ ID NO: 113803 - DNA, 25 bp, Saccharomyces pastorianus
ggtagctcaagatccacttatgcca

SEQ ID NO: 113804 - DNA, 25 bp, Saccharomyces pastorianus
gatcaagatcgagtcccaactgtta

SEQ ID NO: 113805 - DNA, 25 bp, Saccharomyces pastorianus
ttttacaacagtggcgtcagtccta

SEQ ID NO: 113806 - DNA, 25 bp, Saccharomyces pastorianus
tttccggttcgacatcacctattat

SEQ ID NO: 113807 - DNA, 25 bp, Saccharomyces pastorianus
tcctcttcgatgtccgtcggtaata

SEQ ID NO: 113808 - DNA, 25 bp, Saccharomyces pastorianus
gggaagccattacgcacataaacac

SEQ ID NO: 113809 - DNA, 25 bp, Saccharomyces pastorianus
aagtcgagagattacctggttcata

SEQ ID NO: 113810 - DNA, 25 bp, Saccharomyces pastorianus
aaaggcccttacagagcagctgcag

SEQ ID NO: 113811 - DNA, 25 bp, Saccharomyces pastorianus
attcaggcgattttgccgactggca

SEQ ID NO: 113812 - DNA, 25 bp, Saccharomyces pastorianus
aagcaagcccatctctatacacgat

SEQ ID NO: 113813 - DNA, 25 bp, Saccharomyces pastorianus
ggacgagacactggatgcctcacaa

SEQ ID NO: 113814 - DNA, 25 bp, Saccharomyces pastorianus
gccctcaacttgcatacttactgaa

SEQ ID NO: 113815 - DNA, 25 bp, Saccharomyces pastorianus
caaggaaacgcttctgggccaatgg

SEQ ID NO: 113816 - DNA, 25 bp, Saccharomyces pastorianus
agagctcttgacgtatcactctgtc

SEQ ID NO: 113817 - DNA, 25 bp, Saccharomyces pastorianus
tttacattcgtacacaggctccaag

SEQ ID NO: 113818 - DNA, 25 bp, Saccharomyces pastorianus
agatccgtcataccaaaaggccctt

SEQ ID NO: 113819 - DNA, 25 bp, Saccharomyces pastorianus
agctcttcagacttcctgcaaatgg

SEQ ID NO: 113820 - DNA, 25 bp, Saccharomyces pastorianus
aaatcggtcttgataagctcttcag

SEQ ID NO: 113821 - DNA, 25 bp, Saccharomyces pastorianus
tagagtcaatggaggtcaccccgtg

SEQ ID NO: 113822 - DNA, 25 bp, Saccharomyces pastorianus
aacgcttatccgctacaggtgtaaa

SEQ ID NO: 113823 - DNA, 25 bp, Saccharomyces pastorianus
cccctaacttacatcctgagcaaat

SEQ ID NO: 113824 - DNA, 25 bp, Saccharomyces pastorianus
gtttggaaaacacaggctcagtcga

SEQ ID NO: 113825 - DNA, 25 bp, Saccharomyces pastorianus
gggccaatgcggctgttgataataa

SEQ ID NO: 113826 - DNA, 25 bp, Saccharomyces pastorianus
gatttgcgctgagaatctactcgat

SEQ ID NO: 113827 - DNA, 25 bp, Saccharomyces pastorianus
tgatgaattcagctttccacctggg

SEQ ID NO: 113828 - DNA, 25 bp, Saccharomyces pastorianus
aaggtacttgcgtggtgatgaattc

SEQ ID NO: 113829 - DNA, 25 bp, Saccharomyces pastorianus
acagtgcaaaatctagcccctaact

SEQ ID NO: 113830 - DNA, 25 bp, Saccharomyces pastorianus
ggctccacgcagaatgccttgagaa

SEQ ID NO: 113831 - DNA, 25 bp, Saccharomyces pastorianus
aggtgtaaacgcacacggacgtcct

SEQ ID NO: 113832 - DNA, 25 bp, Saccharomyces pastorianus
gaaaataatccatttgcggacccaa

SEQ ID NO: 113833 - DNA, 25 bp, Saccharomyces pastorianus
tgaaacctcacatttactactccta

SEQ ID NO: 113834 - DNA, 25 bp, Saccharomyces pastorianus
aatgccccgaattgtggattcctcg

SEQ ID NO: 113835 - DNA, 25 bp, Saccharomyces pastorianus
gcagactgccagaaatatacggttt

SEQ ID NO: 113836 - DNA, 25 bp, Saccharomyces pastorianus
agaattcactctgcgtgacgtacca

SEQ ID NO: 113837 - DNA, 25 bp, Saccharomyces pastorianus
tacaatgaaaattcctccggctcca

SEQ ID NO: 113838 - DNA, 25 bp, Saccharomyces pastorianus
gatttcgatatctctcatgcttacg

SEQ ID NO: 113839 - DNA, 25 bp, Saccharomyces pastorianus
gattcctcgcgatccttatggattt

SEQ ID NO: 113840 - DNA, 25 bp, Saccharomyces pastorianus
atgcttacgattatccagctgttag

SEQ ID NO: 113841 - DNA, 25 bp, Saccharomyces pastorianus
agctgttagtgcacaatgccccgaa

SEQ ID NO: 113842 - DNA, 25 bp, Saccharomyces pastorianus
gcgtgacgtaccaccatcatataat

SEQ ID NO: 113843 - DNA, 25 bp, Saccharomyces pastorianus
aatggcaagcttaggttcgtgaaca

SEQ ID NO: 113844 - DNA, 25 bp, Saccharomyces pastorianus
gagaagtatgacaacctgcctaata

SEQ ID NO: 113845 - DNA, 25 bp, Saccharomyces pastorianus
gggaagaccccacaattgagcataa

SEQ ID NO: 113846 - DNA, 25 bp, Saccharomyces pastorianus
actttcctgggattctagatacgac

SEQ ID NO: 113847 - DNA, 25 bp, Saccharomyces pastorianus
gacgtaaatgatcctttatcctcta

SEQ ID NO: 113848 - DNA, 25 bp, Saccharomyces pastorianus
aaggtattaggatcactcgctttaa

SEQ ID NO: 113849 - DNA, 25 bp, Saccharomyces pastorianus
aatagtttcgcctttcatgaacagt

SEQ ID NO: 113850 - DNA, 25 bp, Saccharomyces pastorianus
aaacctcatttcaggatcactccag

SEQ ID NO: 113851 - DNA, 25 bp, Saccharomyces pastorianus
tatggtgctattcctcaaacatggg

SEQ ID NO: 113852 - DNA, 25 bp, Saccharomyces pastorianus
aaagggctggtaatggtgtcacact

SEQ ID NO: 113853 - DNA, 25 bp, Saccharomyces pastorianus
aatatttttccctatcacggctata

SEQ ID NO: 113854 - DNA, 25 bp, Saccharomyces pastorianus
gaaatttccgtttccttggctgata

SEQ ID NO: 113855 - DNA, 25 bp, Saccharomyces pastorianus
gaaaggtgatacgttcaggtactat

SEQ ID NO: 113856 - DNA, 25 bp, Saccharomyces pastorianus
agattctgctgaaagggcacttcaa

SEQ ID NO: 113857 - DNA, 25 bp, Saccharomyces pastorianus
ggtgtcaccaagcttaatctgccaa

SEQ ID NO: 113858 - DNA, 25 bp, Saccharomyces pastorianus
aaaatcaacatacctgctggacaga

SEQ ID NO: 113859 - DNA, 25 bp, Saccharomyces pastorianus
ttagcgacttcaatggcgccattat

SEQ ID NO: 113860 - DNA, 25 bp, Saccharomyces pastorianus
gcttaatctgccaatttcttcagga

SEQ ID NO: 113861 - DNA, 25 bp, Saccharomyces pastorianus
tcaaaagacttctcgcatcgcgtaa

SEQ ID NO: 113862 - DNA, 25 bp, Saccharomyces pastorianus
atatgcttatttccactttcagata

SEQ ID NO: 113863 - DNA, 25 bp, Saccharomyces pastorianus
gaaacacgtcaaacctagttgtata

SEQ ID NO: 113864 - DNA, 25 bp, Saccharomyces pastorianus
ggaaaatacttctcgttagcgactt

SEQ ID NO: 113865 - DNA, 25 bp, Saccharomyces pastorianus
ggacagcttattcgaagggttgcat

SEQ ID NO: 113866 - DNA, 25 bp, Saccharomyces pastorianus
aagagaagatttcatacctgtggaa

SEQ ID NO: 113867 - DNA, 25 bp, Saccharomyces pastorianus
gtatcaccagccaaaaaagaccagt

SEQ ID NO: 113868 - DNA, 25 bp, Saccharomyces pastorianus
gatctctgattacgagttggacgac

SEQ ID NO: 113869 - DNA, 25 bp, Saccharomyces pastorianus
tatcccggaatatcttagttaaact

SEQ ID NO: 113870 - DNA, 25 bp, Saccharomyces pastorianus
gaacattccaaacgaaatatcccgg

SEQ ID NO: 113871 - DNA, 25 bp, Saccharomyces pastorianus
attcagactgcccaaacaaattcta

SEQ ID NO: 113872 - DNA, 25 bp, Saccharomyces pastorianus
gagctatataacgatatcccagaaa

SEQ ID NO: 113873 - DNA, 25 bp, Saccharomyces pastorianus
gccttggaccatgatgtaactctag

SEQ ID NO: 113874 - DNA, 25 bp, Saccharomyces pastorianus
acacatatcatgacttggtttcaag

SEQ ID NO: 113875 - DNA, 25 bp, Saccharomyces pastorianus
gaccagttcatacttaaaggagcta

SEQ ID NO: 113876 - DNA, 25 bp, Saccharomyces pastorianus
gtattattgttggagcatcgcttga

SEQ ID NO: 113877 - DNA, 25 bp, Saccharomyces pastorianus
ctgaattcaggcaggcagtcgccat

SEQ ID NO: 113878 - DNA, 25 bp, Saccharomyces pastorianus
accgcgtatgcaactgctatcattc

SEQ ID NO: 113879 - DNA, 25 bp, Saccharomyces pastorianus
attatcgacgatgtcatgactgcag

SEQ ID NO: 113880 - DNA, 25 bp, Saccharomyces pastorianus
gttattttcggacctgcttacaaag

SEQ ID NO: 113881 - DNA, 25 bp, Saccharomyces pastorianus
gagatacaacgttcctgtgctaagt

SEQ ID NO: 113882 - DNA, 25 bp, Saccharomyces pastorianus
ctggaaagctgttggcaaaccttgc

SEQ ID NO: 113883 - DNA, 25 bp, Saccharomyces pastorianus
caagtgctacccaatctgtttcaaa

SEQ ID NO: 113884 - DNA, 25 bp, Saccharomyces pastorianus
gcagtcgccatattttttcaatctt

SEQ ID NO: 113885 - DNA, 25 bp, Saccharomyces pastorianus
aaagggatccctttggctgctattg

SEQ ID NO: 113886 - DNA, 25 bp, Saccharomyces pastorianus
ggctgctattgtatgcgttaaacta

SEQ ID NO: 113887 - DNA, 25 bp, Saccharomyces pastorianus
ctttccctgttgtcctgggaaatat

SEQ ID NO: 113888 - DNA, 25 bp, Saccharomyces pastorianus
tggtgtttgtccaactttccctgtt

SEQ ID NO: 113889 - DNA, 25 bp, Saccharomyces pastorianus
gttgtcctgggaaatattctgtggg

SEQ ID NO: 113890 - DNA, 25 bp, Saccharomyces pastorianus
tccaactttccctgttgtcctggga

SEQ ID NO: 113891 - DNA, 25 bp, Saccharomyces pastorianus
tgtttgtccaactttccctgttgtc

SEQ ID NO: 113892 - DNA, 25 bp, Saccharomyces pastorianus
ctgttgtcctgggaaatattctgtg

SEQ ID NO: 113893 - DNA, 25 bp, Saccharomyces pastorianus
ttgtccaactttccctgttgtcctg

SEQ ID NO: 113894 - DNA, 25 bp, Saccharomyces pastorianus
tttggtgtttgtccaactttccctg

SEQ ID NO: 113895 - DNA, 25 bp, Saccharomyces pastorianus
tccctgttgtcctgggaaatattct

SEQ ID NO: 113896 - DNA, 25 bp, Saccharomyces pastorianus
attctgtggggaacgtagctttgtg

SEQ ID NO: 113897 - DNA, 25 bp, Saccharomyces pastorianus
gtgtttgtccaactttccctgttgt

SEQ ID NO: 113898 - DNA, 25 bp, Saccharomyces pastorianus
aagggccatataccggctgagtcac

SEQ ID NO: 113899 - DNA, 25 bp, Saccharomyces pastorianus
gaagcttcagctcaaactcaggctc

SEQ ID NO: 113900 - DNA, 25 bp, Saccharomyces pastorianus
tctacggttatcatgttcgaccacc

SEQ ID NO: 113901 - DNA, 25 bp, Saccharomyces pastorianus
gaacttggttaatcacactctgtac

SEQ ID NO: 113902 - DNA, 25 bp, Saccharomyces pastorianus
gaaagcttacatttgcagacgtcaa

SEQ ID NO: 113903 - DNA, 25 bp, Saccharomyces pastorianus
acatggagcaggtagcccacgacaa

SEQ ID NO: 113904 - DNA, 25 bp, Saccharomyces pastorianus
tccccggttcaattcacagacagtg

SEQ ID NO: 113905 - DNA, 25 bp, Saccharomyces pastorianus
acagacagtgcctttgggttcccac

SEQ ID NO: 113906 - DNA, 25 bp, Saccharomyces pastorianus
gcctttgctgacagtgtctacggtt

SEQ ID NO: 113907 - DNA, 25 bp, Saccharomyces pastorianus
cagccggccgttagtgtaagtagta

SEQ ID NO: 113908 - DNA, 25 bp, Saccharomyces pastorianus
gaacaagtccaaacttcagtcccag

SEQ ID NO: 113909 - DNA, 25 bp, Saccharomyces pastorianus
gtctcttctgaaccctgcattaaac

SEQ ID NO: 113910 - DNA, 25 bp, Saccharomyces pastorianus
tgcattaaacccctttgctaacgcg

SEQ ID NO: 113911 - DNA, 25 bp, Saccharomyces pastorianus
aatgatggaccctaatgccggtatg

SEQ ID NO: 113912 - DNA, 25 bp, Saccharomyces pastorianus
tgcattgctagcgtctatgttccaa

SEQ ID NO: 113913 - DNA, 25 bp, Saccharomyces pastorianus
agaagacaccagaccaccggaagaa

SEQ ID NO: 113914 - DNA, 25 bp, Saccharomyces pastorianus
gacagatgctcaccaatcctgatat

SEQ ID NO: 113915 - DNA, 25 bp, Saccharomyces pastorianus
gaggaaggctccaacacgaacacta

SEQ ID NO: 113916 - DNA, 25 bp, Saccharomyces pastorianus
gagtaaccctcagatgttggacttt

SEQ ID NO: 113917 - DNA, 25 bp, Saccharomyces pastorianus
gacaactaaacgacatgggcttctt

SEQ ID NO: 113918 - DNA, 25 bp, Saccharomyces pastorianus
taatgcaggtaccaacgcaggcgct

SEQ ID NO: 113919 - DNA, 25 bp, Saccharomyces pastorianus
gctaacacagctgcaaacccatttg

SEQ ID NO: 113920 - DNA, 25 bp, Saccharomyces pastorianus
agatgacgaccacgacgacgaaagt

SEQ ID NO: 113921 - DNA, 25 bp, Saccharomyces pastorianus
ggacgagtacatttggtgccacttc

SEQ ID NO: 113922 - DNA, 25 bp, Saccharomyces pastorianus
gatatagattacctgacgacacatt

SEQ ID NO: 113923 - DNA, 25 bp, Saccharomyces pastorianus
aatcaccaagaaccctagcacttat

SEQ ID NO: 113924 - DNA, 25 bp, Saccharomyces pastorianus
agcacttataaagcgcgtctagcga

SEQ ID NO: 113925 - DNA, 25 bp, Saccharomyces pastorianus
acgttaatcgtggacagccccatct

SEQ ID NO: 113926 - DNA, 25 bp, Saccharomyces pastorianus
gatattccggacacagctagcgacg

SEQ ID NO: 113927 - DNA, 25 bp, Saccharomyces pastorianus
ttcgctgctggtacttcatggttaa

SEQ ID NO: 113928 - DNA, 25 bp, Saccharomyces pastorianus
gccacttccactccagatatagatt

SEQ ID NO: 113929 - DNA, 25 bp, Saccharomyces pastorianus
ggagacccaggaacaacagcatatg

SEQ ID NO: 113930 - DNA, 25 bp, Saccharomyces pastorianus
aaggcggaaccttctcaagatcgtc

SEQ ID NO: 113931 - DNA, 25 bp, Saccharomyces pastorianus
gcgtcatatccttcatctattggtg

SEQ ID NO: 113932 - DNA, 25 bp, Saccharomyces pastorianus
agaccacaatttggacccgctaaat

SEQ ID NO: 113933 - DNA, 25 bp, Saccharomyces pastorianus
gaatgagcatatccgcttcactatt

SEQ ID NO: 113934 - DNA, 25 bp, Saccharomyces pastorianus
ggctattacgttccttttggattcg

SEQ ID NO: 113935 - DNA, 25 bp, Saccharomyces pastorianus
tgtcttcttgcaagcctactgtaag

SEQ ID NO: 113936 - DNA, 25 bp, Saccharomyces pastorianus
ggctattatgtcgttccaaatccaa

SEQ ID NO: 113937 - DNA, 25 bp, Saccharomyces pastorianus
cactattcgcgggtccggaacagaa

SEQ ID NO: 113938 - DNA, 25 bp, Saccharomyces pastorianus
gaatgtctacactcctgagggcgcg

SEQ ID NO: 113939 - DNA, 25 bp, Saccharomyces pastorianus
tatcagtgcatccattgtcttcttg

SEQ ID NO: 113940 - DNA, 25 bp, Saccharomyces pastorianus
caaagagcctctttcttggcgaaat

SEQ ID NO: 113941 - DNA, 25 bp, Saccharomyces pastorianus
ccgtcgatcctacatcacaaatgat

SEQ ID NO: 113942 - DNA, 25 bp, Saccharomyces pastorianus
gcgctattttggagaaggctgtttc

SEQ ID NO: 113943 - DNA, 25 bp, Saccharomyces pastorianus
cggacgtgaaattggatgcgctatt

SEQ ID NO: 113944 - DNA, 25 bp, Saccharomyces pastorianus
gcagtggtatgcatctaagcggcta

SEQ ID NO: 113945 - DNA, 25 bp, Saccharomyces pastorianus
gaaagccacttctgttgttagatgt

SEQ ID NO: 113946 - DNA, 25 bp, Saccharomyces pastorianus
gcggctagatagtttcgatgacgat

SEQ ID NO: 113947 - DNA, 25 bp, Saccharomyces pastorianus
aatgaccacgatcttcacagaggcc

SEQ ID NO: 113948 - DNA, 25 bp, Saccharomyces pastorianus
ggctgtttcagctaagtcattttgc

SEQ ID NO: 113949 - DNA, 25 bp, Saccharomyces pastorianus
aagtcattttgcttggacaccagca

SEQ ID NO: 113950 - DNA, 25 bp, Saccharomyces pastorianus
cattcataaagcactatccggacgt

SEQ ID NO: 113951 - DNA, 25 bp, Saccharomyces pastorianus
agcggctaaggccttcagttgatta

SEQ ID NO: 113952 - DNA, 25 bp, Saccharomyces pastorianus
gaaaacaggcaatttcccgcttgga

SEQ ID NO: 113953 - DNA, 25 bp, Saccharomyces pastorianus
aaaagctttacgatccacattccct

SEQ ID NO: 113954 - DNA, 25 bp, Saccharomyces pastorianus
ggacgcaacgttaacccttcaagag

SEQ ID NO: 113955 - DNA, 25 bp, Saccharomyces pastorianus
tgatttcccacttgaaaggacgcaa

SEQ ID NO: 113956 - DNA, 25 bp, Saccharomyces pastorianus
gatccacattccctagaatccatgg

SEQ ID NO: 113957 - DNA, 25 bp, Saccharomyces pastorianus
ggtactgatatgtcaatcggtgtca

SEQ ID NO: 113958 - DNA, 25 bp, Saccharomyces pastorianus
tacgtcggagttaccggacatcagt

SEQ ID NO: 113959 - DNA, 25 bp, Saccharomyces pastorianus
tacatcatggatttggctgctgcaa

SEQ ID NO: 113960 - DNA, 25 bp, Saccharomyces pastorianus
tcggtgtcatcttaagtatcctttg

SEQ ID NO: 113961 - DNA, 25 bp, Saccharomyces pastorianus
gcaagttattcagacgaccagttac

SEQ ID NO: 113962 - DNA, 25 bp, Saccharomyces pastorianus
gggacagatccgtttatttcaatat

SEQ ID NO: 113963 - DNA, 25 bp, Saccharomyces pastorianus
gtgagttcaggcttaaccatcaata

SEQ ID NO: 113964 - DNA, 25 bp, Saccharomyces pastorianus
agttttacatgattacctgttgcaa

SEQ ID NO: 113965 - DNA, 25 bp, Saccharomyces pastorianus
gttcgataagaaccttggcttcttt

SEQ ID NO: 113966 - DNA, 25 bp, Saccharomyces pastorianus
ccatccgatttcaaaaacccactat

SEQ ID NO: 113967 - DNA, 25 bp, Saccharomyces pastorianus
ttcacatccttcactatatacgtta

SEQ ID NO: 113968 - DNA, 25 bp, Saccharomyces pastorianus
acagggttccattcctagacgaaat

SEQ ID NO: 113969 - DNA, 25 bp, Saccharomyces pastorianus
gaagtcagaagatccaatcatccaa

SEQ ID NO: 113970 - DNA, 25 bp, Saccharomyces pastorianus
gattttatctctacagggttccatt

SEQ ID NO: 113971 - DNA, 25 bp, Saccharomyces pastorianus
gaaggactacaacgaaggattttat

SEQ ID NO: 113972 - DNA, 25 bp, Saccharomyces pastorianus
tactatcctatgatgatggctctga

SEQ ID NO: 113973 - DNA, 25 bp, Saccharomyces pastorianus
tgcgtgaggacgattctttaaggaa

SEQ ID NO: 113974 - DNA, 25 bp, Saccharomyces pastorianus
atatacgttatcaccctcaagcgtg

SEQ ID NO: 113975 - DNA, 25 bp, Saccharomyces pastorianus
agttttccaaggtccgtgatggcga

SEQ ID NO: 113976 - DNA, 25 bp, Saccharomyces pastorianus
acacttggcgtggtttattagacta

SEQ ID NO: 113977 - DNA, 25 bp, Saccharomyces pastorianus
gagccccgttccagaaaaatttcat

SEQ ID NO: 113978 - DNA, 25 bp, Saccharomyces pastorianus
gaagtggaaacccttggcgattttg

SEQ ID NO: 113979 - DNA, 25 bp, Saccharomyces pastorianus
gaggttttttgagaatgccgcccgg

SEQ ID NO: 113980 - DNA, 25 bp, Saccharomyces pastorianus
agccgttcgacacaccatatttatc

SEQ ID NO: 113981 - DNA, 25 bp, Saccharomyces pastorianus
gtgattttaattcccagccgttcga

SEQ ID NO: 113982 - DNA, 25 bp, Saccharomyces pastorianus
atgccgcccggtaatgaaatgacaa

SEQ ID NO: 113983 - DNA, 25 bp, Saccharomyces pastorianus
gggctatttcactatactctgttgg

SEQ ID NO: 113984 - DNA, 25 bp, Saccharomyces pastorianus
gacatccaaaccagtgcactataga

SEQ ID NO: 113985 - DNA, 25 bp, Saccharomyces pastorianus
aagaccgtcattgggtgcagcactt

SEQ ID NO: 113986 - DNA, 25 bp, Saccharomyces pastorianus
tgtgccacacacaacgaagagcatt

SEQ ID NO: 113987 - DNA, 25 bp, Saccharomyces pastorianus
ggtaaaagagggtccatagtctaca

SEQ ID NO: 113988 - DNA, 25 bp, Saccharomyces pastorianus
acaccatcgcagcaacgagagttga

SEQ ID NO: 113989 - DNA, 25 bp, Saccharomyces pastorianus
agtcacgttgagtaggtcgcttatc

SEQ ID NO: 113990 - DNA, 25 bp, Saccharomyces pastorianus
gaagagcattgtcaaaagtttgggt

SEQ ID NO: 113991 - DNA, 25 bp, Saccharomyces pastorianus
taggtcgcttatcggtgtgccacac

SEQ ID NO: 113992 - DNA, 25 bp, Saccharomyces pastorianus
tgaattaacaccatcgcagcaacga

SEQ ID NO: 113993 - DNA, 25 bp, Saccharomyces pastorianus
agctggctccctagctaaagtgaaa

SEQ ID NO: 113994 - DNA, 25 bp, Saccharomyces pastorianus
gtgttttacaaagtcacgttgagta

SEQ ID NO: 113995 - DNA, 25 bp, Saccharomyces pastorianus
agagggtccatagtctacaaaaaag

SEQ ID NO: 113996 - DNA, 25 bp, Saccharomyces pastorianus
agtaaacccggccatagctggctcc

SEQ ID NO: 113997 - DNA, 25 bp, Saccharomyces pastorianus
tttttccagacttatcgttcgctag

SEQ ID NO: 113998 - DNA, 25 bp, Saccharomyces pastorianus
attcgtcgacgtactggacactgaa

SEQ ID NO: 113999 - DNA, 25 bp, Saccharomyces pastorianus
ttaccactgggcgaagtagcacaac

SEQ ID NO: 114000 - DNA, 25 bp, Saccharomyces pastorianus
atcgacagtttgatctggccaattc

SEQ ID NO: 114001 - DNA, 25 bp, Saccharomyces pastorianus
aaattcaccgtcatttgcagaaaaa

SEQ ID NO: 114002 - DNA, 25 bp, Saccharomyces pastorianus
aagctttcttcattgttgaactcga

SEQ ID NO: 114003 - DNA, 25 bp, Saccharomyces pastorianus
aagggctagccgtaattcgtcgacg

SEQ ID NO: 114004 - DNA, 25 bp, Saccharomyces pastorianus
tatttgacagtaacatcccctcttc

SEQ ID NO: 114005 - DNA, 25 bp, Saccharomyces pastorianus
tacaggtcgaccttttagacatgaa

SEQ ID NO: 114006 - DNA, 25 bp, Saccharomyces pastorianus
tccaagttctatgcattatccgatg

SEQ ID NO: 114007 - DNA, 25 bp, Saccharomyces pastorianus
tcttcgtcgttttccagacttgata

SEQ ID NO: 114008 - DNA, 25 bp, Saccharomyces pastorianus
tagttcatcgtcagacagcgtcgaa

SEQ ID NO: 114009 - DNA, 25 bp, Saccharomyces pastorianus
aaacggtgttctcaaggccatgtca

SEQ ID NO: 114010 - DNA, 25 bp, Saccharomyces pastorianus
ttggccctggactattcatgaacta

SEQ ID NO: 114011 - DNA, 25 bp, Saccharomyces pastorianus
agaagatgcactcaccgatagggat

SEQ ID NO: 114012 - DNA, 25 bp, Saccharomyces pastorianus
gcgtcgaacgtaataacccacttag

SEQ ID NO: 114013 - DNA, 25 bp, Saccharomyces pastorianus
tgaaacttcaccacatgctattatg

SEQ ID NO: 114014 - DNA, 25 bp, Saccharomyces pastorianus
gtacgtaatgtaccaggacgccatg

SEQ ID NO: 114015 - DNA, 25 bp, Saccharomyces pastorianus
aagtgtgtggtccttacaacgtgct

SEQ ID NO: 114016 - DNA, 25 bp, Saccharomyces pastorianus
gggcaggattgttccatccagcgaa

SEQ ID NO: 114017 - DNA, 25 bp, Saccharomyces pastorianus
ggaggcactgagtcaagctcttggc

SEQ ID NO: 114018 - DNA, 25 bp, Saccharomyces pastorianus
tatgcacggctgttgctatcggtat

SEQ ID NO: 114019 - DNA, 25 bp, Saccharomyces pastorianus
gtcattatttattgcggctcggcct

SEQ ID NO: 114020 - DNA, 25 bp, Saccharomyces pastorianus
gaagttttgcttttcaatggcgtca

SEQ ID NO: 114021 - DNA, 25 bp, Saccharomyces pastorianus
aaatgcgggtacttgtctctaagac

SEQ ID NO: 114022 - DNA, 25 bp, Saccharomyces pastorianus
gaggttcagaacctacttcttctgt

SEQ ID NO: 114023 - DNA, 25 bp, Saccharomyces pastorianus
acgcatcagctttcaccagttttaa

SEQ ID NO: 114024 - DNA, 25 bp, Saccharomyces pastorianus
caatgcctatggagcctatcctaaa

SEQ ID NO: 114025 - DNA, 25 bp, Saccharomyces pastorianus
attttccaacaaatctggcctgctg

SEQ ID NO: 114026 - DNA, 25 bp, Saccharomyces pastorianus
taggaagccttaccgttggcaacga

SEQ ID NO: 114027 - DNA, 25 bp, Saccharomyces pastorianus
gagagttcgcatgcaaactgctata

SEQ ID NO: 114028 - DNA, 25 bp, Saccharomyces pastorianus
acttcttctgtctcgcaatgcgaaa

SEQ ID NO: 114029 - DNA, 25 bp, Saccharomyces pastorianus
tcaagagatcattacgctagggcga

SEQ ID NO: 114030 - DNA, 25 bp, Saccharomyces pastorianus
gatttgtacagatgtcgcagctaga

SEQ ID NO: 114031 - DNA, 25 bp, Saccharomyces pastorianus
actggatttagccaaagtagcaaag

SEQ ID NO: 114032 - DNA, 25 bp, Saccharomyces pastorianus
ttccagtccctccaaaggttaacat

SEQ ID NO: 114033 - DNA, 25 bp, Saccharomyces pastorianus
cagccaaggatggttatagatctta

SEQ ID NO: 114034 - DNA, 25 bp, Saccharomyces pastorianus
tatttacaagcgtacgcttcccact

SEQ ID NO: 114035 - DNA, 25 bp, Saccharomyces pastorianus
tagcaaagtcttacggttttccagt

SEQ ID NO: 114036 - DNA, 25 bp, Saccharomyces pastorianus
cattcaattcgaccctcctgatgat

SEQ ID NO: 114037 - DNA, 25 bp, Saccharomyces pastorianus
ctatattgatttgccagtcctcgaa

SEQ ID NO: 114038 - DNA, 25 bp, Saccharomyces pastorianus
gctgtggattggatcattcaattcg

SEQ ID NO: 114039 - DNA, 25 bp, Saccharomyces pastorianus
ttgccagtcctcgaattacacggta

SEQ ID NO: 114040 - DNA, 25 bp, Saccharomyces pastorianus
gcttcccactctttgaaaactgtct

SEQ ID NO: 114041 - DNA, 25 bp, Saccharomyces pastorianus
gcaaggttcctctactagcgtgaag

SEQ ID NO: 114042 - DNA, 25 bp, Saccharomyces pastorianus
gaattctacttttgtcttggaccct

SEQ ID NO: 114043 - DNA, 25 bp, Saccharomyces pastorianus
acagcgtccatgcacacattgaggt

SEQ ID NO: 114044 - DNA, 25 bp, Saccharomyces pastorianus
tgaggtctccttccaaatcaagaaa

SEQ ID NO: 114045 - DNA, 25 bp, Saccharomyces pastorianus
acgtacggcctcgatgagcagcaat

SEQ ID NO: 114046 - DNA, 25 bp, Saccharomyces pastorianus
atgacatctcttaagcctgcaggca

SEQ ID NO: 114047 - DNA, 25 bp, Saccharomyces pastorianus
atcatccaagtcaggcctcgtgaaa

SEQ ID NO: 114048 - DNA, 25 bp, Saccharomyces pastorianus
attcgactatcttcacgctaacaaa

SEQ ID NO: 114049 - DNA, 25 bp, Saccharomyces pastorianus
tatggatggcgggtcctctgaaact

SEQ ID NO: 114050 - DNA, 25 bp, Saccharomyces pastorianus
acggtacttctttatcatcatccaa

SEQ ID NO: 114051 - DNA, 25 bp, Saccharomyces pastorianus
gatgaacggttgtttcagcaccact

SEQ ID NO: 114052 - DNA, 25 bp, Saccharomyces pastorianus
gagaagaccccgattggcttacagg

SEQ ID NO: 114053 - DNA, 25 bp, Saccharomyces pastorianus
gtccaagcttcctggatccataagg

SEQ ID NO: 114054 - DNA, 25 bp, Saccharomyces pastorianus
gatatactgatagttcccacatcgt

SEQ ID NO: 114055 - DNA, 25 bp, Saccharomyces pastorianus
gtattttattcgcacctaccaggtc

SEQ ID NO: 114056 - DNA, 25 bp, Saccharomyces pastorianus
caaatctccggctaactcgtatata

SEQ ID NO: 114057 - DNA, 25 bp, Saccharomyces pastorianus
tgacgggatcttcagatttccaaat

SEQ ID NO: 114058 - DNA, 25 bp, Saccharomyces pastorianus
gaagcggcttccaatttatcaaggt

SEQ ID NO: 114059 - DNA, 25 bp, Saccharomyces pastorianus
ttattatacgctatcacccgctgaa

SEQ ID NO: 114060 - DNA, 25 bp, Saccharomyces pastorianus
aaacgatgtctttactgtcccaatg

SEQ ID NO: 114061 - DNA, 25 bp, Saccharomyces pastorianus
agggaaatccagacggcctagatat

SEQ ID NO: 114062 - DNA, 25 bp, Saccharomyces pastorianus
ggcttgaaatataccctgtgtccat

SEQ ID NO: 114063 - DNA, 25 bp, Saccharomyces pastorianus
ataccgttcgcatcgtaagtcacag

SEQ ID NO: 114064 - DNA, 25 bp, Saccharomyces pastorianus
acttgctgtggcataccgttcgcat

SEQ ID NO: 114065 - DNA, 25 bp, Saccharomyces pastorianus
atttgactggaagcaccacccactt

SEQ ID NO: 114066 - DNA, 25 bp, Saccharomyces pastorianus
gaaatcaggccttacgcggaacccg

SEQ ID NO: 114067 - DNA, 25 bp, Saccharomyces pastorianus
gcttgttcaccatacatttgactgg

SEQ ID NO: 114068 - DNA, 25 bp, Saccharomyces pastorianus
gtcacagcagcaccaaacacaggga

SEQ ID NO: 114069 - DNA, 25 bp, Saccharomyces pastorianus
ttcttcattctaccaaacaatccct

SEQ ID NO: 114070 - DNA, 25 bp, Saccharomyces pastorianus
tggctgatacactgcttgttcacca

SEQ ID NO: 114071 - DNA, 25 bp, Saccharomyces pastorianus
aaagggtatcaagcgcttatttctt

SEQ ID NO: 114072 - DNA, 25 bp, Saccharomyces pastorianus
ttcttttgcttttcctcagtctgta

SEQ ID NO: 114073 - DNA, 25 bp, Saccharomyces pastorianus
tcagtctgtacgtgttgttgtggct

SEQ ID NO: 114074 - DNA, 25 bp, Saccharomyces pastorianus
ttggtgctgctgtgacttacgatgc

SEQ ID NO: 114075 - DNA, 25 bp, Saccharomyces pastorianus
tgtgtgatgttttcggtcaacccat

SEQ ID NO: 114076 - DNA, 25 bp, Saccharomyces pastorianus
gaaccgtgcctcagatgtcaagatt

SEQ ID NO: 114077 - DNA, 25 bp, Saccharomyces pastorianus
caagtgggtggtgcttccagtcaaa

SEQ ID NO: 114078 - DNA, 25 bp, Saccharomyces pastorianus
gaagcccaaccttttgaacaagctg

SEQ ID NO: 114079 - DNA, 25 bp, Saccharomyces pastorianus
ttctagacgctgtgcaggaagccca

SEQ ID NO: 114080 - DNA, 25 bp, Saccharomyces pastorianus
tggagactccaacttacgggttccg

SEQ ID NO: 114081 - DNA, 25 bp, Saccharomyces pastorianus
ttacgatgcgaacggtatgccacag

SEQ ID NO: 114082 - DNA, 25 bp, Saccharomyces pastorianus
tgaagatgcgtactgcttccgttgc

SEQ ID NO: 114083 - DNA, 25 bp, Saccharomyces pastorianus
cttccgttgctgatcctattctaga

SEQ ID NO: 114084 - DNA, 25 bp, Saccharomyces pastorianus
aaggcctgatttccctgtgtttggt

SEQ ID NO: 114085 - DNA, 25 bp, Saccharomyces pastorianus
attcgaaaccatgtcagctttgcaa

SEQ ID NO: 114086 - DNA, 25 bp, Saccharomyces pastorianus
ataggtctcgcaagttcggatacac

SEQ ID NO: 114087 - DNA, 25 bp, Saccharomyces pastorianus
agtgtctgctgtcctacatctgcaa

SEQ ID NO: 114088 - DNA, 25 bp, Saccharomyces pastorianus
cacatccgtctccaaagtcttgaaa

SEQ ID NO: 114089 - DNA, 25 bp, Saccharomyces pastorianus
gactccttgcgttcatacgtaatcg

SEQ ID NO: 114090 - DNA, 25 bp, Saccharomyces pastorianus
catattgtttttctgcctgtttgcc

SEQ ID NO: 114091 - DNA, 25 bp, Saccharomyces pastorianus
taccaatcgtccctagcttgaaaat

SEQ ID NO: 114092 - DNA, 25 bp, Saccharomyces pastorianus
gcatgattcctttgcatctgacgac

SEQ ID NO: 114093 - DNA, 25 bp, Saccharomyces pastorianus
tcggatacacctgcgaacagctatt

SEQ ID NO: 114094 - DNA, 25 bp, Saccharomyces pastorianus
gtttgcaccagcgtattggttccaa

SEQ ID NO: 114095 - DNA, 25 bp, Saccharomyces pastorianus
aactgactcccgcatataggtctcg

SEQ ID NO: 114096 - DNA, 25 bp, Saccharomyces pastorianus
gaggttgaccactacgaatcctgta

SEQ ID NO: 114097 - DNA, 25 bp, Saccharomyces pastorianus
agtcgtgctatgactcgcaatccgt

SEQ ID NO: 114098 - DNA, 25 bp, Saccharomyces pastorianus
tgtaataacgcccaattggttcctt

SEQ ID NO: 114099 - DNA, 25 bp, Saccharomyces pastorianus
ctgtgttccagctaccatttattgt

SEQ ID NO: 114100 - DNA, 25 bp, Saccharomyces pastorianus
ttgtttgggcttgatcgagtcgtgc

SEQ ID NO: 114101 - DNA, 25 bp, Saccharomyces pastorianus
gtgctacccaacgttacaagatatc

SEQ ID NO: 114102 - DNA, 25 bp, Saccharomyces pastorianus
ttgaatcaagacctacccattctgg

SEQ ID NO: 114103 - DNA, 25 bp, Saccharomyces pastorianus
tgagagtcttcaatggtggccacat

SEQ ID NO: 114104 - DNA, 25 bp, Saccharomyces pastorianus
aatcctacaagcacttcacctattt

SEQ ID NO: 114105 - DNA, 25 bp, Saccharomyces pastorianus
aaggcgtggacggatgtcttgccat

SEQ ID NO: 114106 - DNA, 25 bp, Saccharomyces pastorianus
tatcgacgactacttaaaccaggac

SEQ ID NO: 114107 - DNA, 25 bp, Saccharomyces pastorianus
tttcattattgctgattgctgcggt

SEQ ID NO: 114108 - DNA, 25 bp, Saccharomyces pastorianus
aacatctctcgttctgtatcatcga

SEQ ID NO: 114109 - DNA, 25 bp, Saccharomyces pastorianus
tccgcgtttgcttcatttcattatt

SEQ ID NO: 114110 - DNA, 25 bp, Saccharomyces pastorianus
agaatgataatgttccacccgtcca

SEQ ID NO: 114111 - DNA, 25 bp, Saccharomyces pastorianus
agtaatcaagctttgggcacgtggt

SEQ ID NO: 114112 - DNA, 25 bp, Saccharomyces pastorianus
atggttccattgtaccccaatcaaa

SEQ ID NO: 114113 - DNA, 25 bp, Saccharomyces pastorianus
gtccactacccaattcacgaagata

SEQ ID NO: 114114 - DNA, 25 bp, Saccharomyces pastorianus
ctgattgctgcggttgaatacttca

SEQ ID NO: 114115 - DNA, 25 bp, Saccharomyces pastorianus
ctacgtagcttatgtcgggtacgac

SEQ ID NO: 114116 - DNA, 25 bp, Saccharomyces pastorianus
tcgggtacgacacagactctgagct

SEQ ID NO: 114117 - DNA, 25 bp, Saccharomyces pastorianus
aaagaaccccagtctggctcagtaa

SEQ ID NO: 114118 - DNA, 25 bp, Saccharomyces pastorianus
agagcaacactttttggcccgatat

SEQ ID NO: 114119 - DNA, 25 bp, Saccharomyces pastorianus
gttcgctggctcatattattagatt

SEQ ID NO: 114120 - DNA, 25 bp, Saccharomyces pastorianus
agctcactattctatatatgcgaag

SEQ ID NO: 114121 - DNA, 25 bp, Saccharomyces pastorianus
gtggctgaatgaactatcctacgca

SEQ ID NO: 114122 - DNA, 25 bp, Saccharomyces pastorianus
tgaattttctgtatggtgcttaaac

SEQ ID NO: 114123 - DNA, 25 bp, Saccharomyces pastorianus
aggcttaaataccaagagcttctaa

SEQ ID NO: 114124 - DNA, 25 bp, Saccharomyces pastorianus
tggacactgaacgaccaaaagttgt

SEQ ID NO: 114125 - DNA, 25 bp, Saccharomyces pastorianus
ggcccgatatatggactttatacca

SEQ ID NO: 114126 - DNA, 25 bp, Saccharomyces pastorianus
aacaacctctggtatcgaccttgat

SEQ ID NO: 114127 - DNA, 25 bp, Saccharomyces pastorianus
gggtgcgattctattggattgataa

SEQ ID NO: 114128 - DNA, 25 bp, Saccharomyces pastorianus
gaaacactacagtatggcagtcagt

SEQ ID NO: 114129 - DNA, 25 bp, Saccharomyces pastorianus
gattctattgtcagaggtactactt

SEQ ID NO: 114130 - DNA, 25 bp, Saccharomyces pastorianus
ggacatttatcatgccaaaccagag

SEQ ID NO: 114131 - DNA, 25 bp, Saccharomyces pastorianus
aaacagatacgtgggcaggacattt

SEQ ID NO: 114132 - DNA, 25 bp, Saccharomyces pastorianus
cccagccattcgttacaaccatatt

SEQ ID NO: 114133 - DNA, 25 bp, Saccharomyces pastorianus
ttaacatggccaaggaatccggtgc

SEQ ID NO: 114134 - DNA, 25 bp, Saccharomyces pastorianus
cttgattgcttataacagaaccgat

SEQ ID NO: 114135 - DNA, 25 bp, Saccharomyces pastorianus
ccggaaattatgtcactggtgttga

SEQ ID NO: 114136 - DNA, 25 bp, Saccharomyces pastorianus
gaatccggtgcaacaaaggtttact

SEQ ID NO: 114137 - DNA, 25 bp, Saccharomyces pastorianus
gcttaaccctatggagtctgaattt

SEQ ID NO: 114138 - DNA, 25 bp, Saccharomyces pastorianus
gaaagagtcatttaccaatcattgg

SEQ ID NO: 114139 - DNA, 25 bp, Saccharomyces pastorianus
aaaggtttacttcgcttcagctgcc

SEQ ID NO: 114140 - DNA, 25 bp, Saccharomyces pastorianus
aagcgccttggacacacacacagaa

SEQ ID NO: 114141 - DNA, 25 bp, Saccharomyces pastorianus
aggacacaccacttttcaatgacac

SEQ ID NO: 114142 - DNA, 25 bp, Saccharomyces pastorianus
gagtgtatacatcgcacatagactg

SEQ ID NO: 114143 - DNA, 25 bp, Saccharomyces pastorianus
tgttttttgacgaggccacaagcgc

SEQ ID NO: 114144 - DNA, 25 bp, Saccharomyces pastorianus
gaacaagctctcttacgaaccatta

SEQ ID NO: 114145 - DNA, 25 bp, Saccharomyces pastorianus
ttggctatgccagggtcattgtacc

SEQ ID NO: 114146 - DNA, 25 bp, Saccharomyces pastorianus
acaaggttttgacaccatcgtcggg

SEQ ID NO: 114147 - DNA, 25 bp, Saccharomyces pastorianus
attgtaccgcgaactttggaccata

SEQ ID NO: 114148 - DNA, 25 bp, Saccharomyces pastorianus
gttgaaaaagcccagctagcaccct

SEQ ID NO: 114149 - DNA, 25 bp, Saccharomyces pastorianus
taaagttcggtcgtattgacgcaac

SEQ ID NO: 114150 - DNA, 25 bp, Saccharomyces pastorianus
gagataactttacttcgggttcgag

SEQ ID NO: 114151 - DNA, 25 bp, Saccharomyces pastorianus
aattattgagttcccatccagtgct

SEQ ID NO: 114152 - DNA, 25 bp, Saccharomyces pastorianus
gagcctaccgaagcgctagacaaga

SEQ ID NO: 114153 - DNA, 25 bp, Saccharomyces pastorianus
gtcaaatcaggagaagagcctaccg

SEQ ID NO: 114154 - DNA, 25 bp, Saccharomyces pastorianus
cccaagcttgggaactgatcgaatt

SEQ ID NO: 114155 - DNA, 25 bp, Saccharomyces pastorianus
aatatgccattattcaaggcggctc

SEQ ID NO: 114156 - DNA, 25 bp, Saccharomyces pastorianus
ttccacgaagttgttaatatgccat

SEQ ID NO: 114157 - DNA, 25 bp, Saccharomyces pastorianus
atggtacaaagagtgcccaagcttg

SEQ ID NO: 114158 - DNA, 25 bp, Saccharomyces pastorianus
caatgggttaatcactgtgtccagg

SEQ ID NO: 114159 - DNA, 25 bp, Saccharomyces pastorianus
aggcggctccagaaacagggatcat

SEQ ID NO: 114160 - DNA, 25 bp, Saccharomyces pastorianus
tgacgcttccttagaaccattgggc

SEQ ID NO: 114161 - DNA, 25 bp, Saccharomyces pastorianus
atccagtgcttccattccacgaagt

SEQ ID NO: 114162 - DNA, 25 bp, Saccharomyces pastorianus
agttggcttatccagtttaccagaa

SEQ ID NO: 114163 - DNA, 25 bp, Saccharomyces pastorianus
ttgtcaagtctatctccattgtcgg

SEQ ID NO: 114164 - DNA, 25 bp, Saccharomyces pastorianus
gtattcatcgacttcaccaaagaga

SEQ ID NO: 114165 - DNA, 25 bp, Saccharomyces pastorianus
acattgttagcgcagtcgttaaggc

SEQ ID NO: 114166 - DNA, 25 bp, Saccharomyces pastorianus
cctcgctcggtggtgaagtattcat

SEQ ID NO: 114167 - DNA, 25 bp, Saccharomyces pastorianus
aaagtgctcctctgatgtcttcaac

SEQ ID NO: 114168 - DNA, 25 bp, Saccharomyces pastorianus
ggctttgaagtctgccaacttgaga

SEQ ID NO: 114169 - DNA, 25 bp, Saccharomyces pastorianus
gtagggcgaacggtactgttgtctt

SEQ ID NO: 114170 - DNA, 25 bp, Saccharomyces pastorianus
aagtcgcgccaatcttgtgtgctgg

SEQ ID NO: 114171 - DNA, 25 bp, Saccharomyces pastorianus
ggaagaattgtttacctcgctcggt

SEQ ID NO: 114172 - DNA, 25 bp, Saccharomyces pastorianus
aggtctagtcaagtctccaataaag

SEQ ID NO: 114173 - DNA, 25 bp, Saccharomyces pastorianus
aagtattggttactccactgaagaa

SEQ ID NO: 114174 - DNA, 25 bp, Saccharomyces pastorianus
ggatagattgagatcgcattcttcc

SEQ ID NO: 114175 - DNA, 25 bp, Saccharomyces pastorianus
tttcagggcttattatcggaccaaa

SEQ ID NO: 114176 - DNA, 25 bp, Saccharomyces pastorianus
ttacccgaggagtctaaattgttca

SEQ ID NO: 114177 - DNA, 25 bp, Saccharomyces pastorianus
gacacggaatatccttcttatttaa

SEQ ID NO: 114178 - DNA, 25 bp, Saccharomyces pastorianus
acacaaatttccagtttcagggctt

SEQ ID NO: 114179 - DNA, 25 bp, Saccharomyces pastorianus
tcggaccaaaacaccttcaaagatg

SEQ ID NO: 114180 - DNA, 25 bp, Saccharomyces pastorianus
gatgaaaacgcgactgacagaccaa

SEQ ID NO: 114181 - DNA, 25 bp, Saccharomyces pastorianus
gatcgtcttcatgcaaaatttggtc

SEQ ID NO: 114182 - DNA, 25 bp, Saccharomyces pastorianus
gaacatcttactctggaccaacaca

SEQ ID NO: 114183 - DNA, 25 bp, Saccharomyces pastorianus
aagggcgtatagtggttgttcaaca

SEQ ID NO: 114184 - DNA, 25 bp, Saccharomyces pastorianus
gctctcctattcttatcacgttatt

SEQ ID NO: 114185 - DNA, 25 bp, Saccharomyces pastorianus
tatattctatactcatttgtgaaag

SEQ ID NO: 114186 - DNA, 25 bp, Saccharomyces pastorianus
gtgattaaaccactgaaacttcatt

SEQ ID NO: 114187 - DNA, 25 bp, Saccharomyces pastorianus
tgtcttccttttagctacgggtcct

SEQ ID NO: 114188 - DNA, 25 bp, Saccharomyces pastorianus
tacgggtcctcgctgctctatagtt

SEQ ID NO: 114189 - DNA, 25 bp, Saccharomyces pastorianus
catatttgctctcctattcttatca

SEQ ID NO: 114190 - DNA, 25 bp, Saccharomyces pastorianus
tactttatgatcattctttttccct

SEQ ID NO: 114191 - DNA, 25 bp, Saccharomyces pastorianus
cttatcacgttattgtttacttatg

SEQ ID NO: 114192 - DNA, 25 bp, Saccharomyces pastorianus
gctgctctatagtttgtgttctaac

SEQ ID NO: 114193 - DNA, 25 bp, Saccharomyces pastorianus
tcaatttgtcttccttttagctacg

SEQ ID NO: 114194 - DNA, 25 bp, Saccharomyces pastorianus
gaataagccctttcccatatttgct

SEQ ID NO: 114195 - DNA, 25 bp, Saccharomyces pastorianus
gatacttacggcgaagctgtcccat

SEQ ID NO: 114196 - DNA, 25 bp, Saccharomyces pastorianus
aagccgccatttcttctatcaaaag

SEQ ID NO: 114197 - DNA, 25 bp, Saccharomyces pastorianus
attcaccgccttcaatgatctatgg

SEQ ID NO: 114198 - DNA, 25 bp, Saccharomyces pastorianus
gatgatattaccactgtttctgtcg

SEQ ID NO: 114199 - DNA, 25 bp, Saccharomyces pastorianus
agtcgtttccgttgataccttcatt

SEQ ID NO: 114200 - DNA, 25 bp, Saccharomyces pastorianus
aagtcagctttaacctctgctggtt

SEQ ID NO: 114201 - DNA, 25 bp, Saccharomyces pastorianus
ggttatacaggctcagtcgtttccg

SEQ ID NO: 114202 - DNA, 25 bp, Saccharomyces pastorianus
aacgcccatgcatacttcgatgaaa

SEQ ID NO: 114203 - DNA, 25 bp, Saccharomyces pastorianus
tgcggctcttcagcttacttattca

SEQ ID NO: 114204 - DNA, 25 bp, Saccharomyces pastorianus
aaccctgacctgtgtaattattctg

SEQ ID NO: 114205 - DNA, 25 bp, Saccharomyces pastorianus
ggtgaatacgtttccacggccaagt

SEQ ID NO: 114206 - DNA, 25 bp, Saccharomyces pastorianus
gatactggtccaaatgctccatcga

SEQ ID NO: 114207 - DNA, 25 bp, Saccharomyces pastorianus
acaatacgggcatgggctggtctat

SEQ ID NO: 114208 - DNA, 25 bp, Saccharomyces pastorianus
atcgcgccattctttgctggtgatt

SEQ ID NO: 114209 - DNA, 25 bp, Saccharomyces pastorianus
cagatttctttcttggtcacttcct

SEQ ID NO: 114210 - DNA, 25 bp, Saccharomyces pastorianus
ggtgatttcgtatctagtccgcaag

SEQ ID NO: 114211 - DNA, 25 bp, Saccharomyces pastorianus
attgctggaaggcacccttttcgaa

SEQ ID NO: 114212 - DNA, 25 bp, Saccharomyces pastorianus
gttggaactttacccgtacattgat

SEQ ID NO: 114213 - DNA, 25 bp, Saccharomyces pastorianus
ggtctatcattttacagcccatacg

SEQ ID NO: 114214 - DNA, 25 bp, Saccharomyces pastorianus
ggtcacttcctcttatttatacaaa

SEQ ID NO: 114215 - DNA, 25 bp, Saccharomyces pastorianus
atgcatctgattcttttcaaggtct

SEQ ID NO: 114216 - DNA, 25 bp, Saccharomyces pastorianus
taggtgtgctcctttttatgctcat

SEQ ID NO: 114217 - DNA, 25 bp, Saccharomyces pastorianus
tagcacaagtggtctttacctccat

SEQ ID NO: 114218 - DNA, 25 bp, Saccharomyces pastorianus
ttacctccattatttccttatccat

SEQ ID NO: 114219 - DNA, 25 bp, Saccharomyces pastorianus
gttgctcctccgctttgaaagagat

SEQ ID NO: 114220 - DNA, 25 bp, Saccharomyces pastorianus
gtatgggtaccaactctgcatcagg

SEQ ID NO: 114221 - DNA, 25 bp, Saccharomyces pastorianus
actggtaagtactggtccgctgcaa

SEQ ID NO: 114222 - DNA, 25 bp, Saccharomyces pastorianus
tagtgttgatctgggttccggaact

SEQ ID NO: 114223 - DNA, 25 bp, Saccharomyces pastorianus
ggaactgaatccagtactgcctctt

SEQ ID NO: 114224 - DNA, 25 bp, Saccharomyces pastorianus
aagaatgctgccaccaacgttaaag

SEQ ID NO: 114225 - DNA, 25 bp, Saccharomyces pastorianus
gtatttcagcaaacggtaccgccgg

SEQ ID NO: 114226 - DNA, 25 bp, Saccharomyces pastorianus
atctgactgtagcttcagcggttct

SEQ ID NO: 114227 - DNA, 25 bp, Saccharomyces pastorianus
gtatggtgcttactctttctgtaca

SEQ ID NO: 114228 - DNA, 25 bp, Saccharomyces pastorianus
agtctcttcgaagtacatgtatacg

SEQ ID NO: 114229 - DNA, 25 bp, Saccharomyces pastorianus
agaaccgtacaaggcttcaacctca

SEQ ID NO: 114230 - DNA, 25 bp, Saccharomyces pastorianus
ggcttcaacctcagtaaatagtctt

SEQ ID NO: 114231 - DNA, 25 bp, Saccharomyces pastorianus
atgctaactaaaccgtatttgttag

SEQ ID NO: 114232 - DNA, 25 bp, Saccharomyces pastorianus
atagtcttggtgttacttcgttaca

SEQ ID NO: 114233 - DNA, 25 bp, Saccharomyces pastorianus
tgtatacgataccaccagaccagac

SEQ ID NO: 114234 - DNA, 25 bp, Saccharomyces pastorianus
gacatctgtcatattagaaccgtac

SEQ ID NO: 114235 - DNA, 25 bp, Saccharomyces pastorianus
gataccaccagaccagacatctgtc

SEQ ID NO: 114236 - DNA, 25 bp, Saccharomyces pastorianus
acttcgttacaaccgtattcagaga

SEQ ID NO: 114237 - DNA, 25 bp, Saccharomyces pastorianus
tggtgttacttcgttacaaccgtat

SEQ ID NO: 114238 - DNA, 25 bp, Saccharomyces pastorianus
atttgttagtctcttcgaagtacat

SEQ ID NO: 114239 - DNA, 25 bp, Saccharomyces pastorianus
taattcgccaattgtgtgtgctcaa

SEQ ID NO: 114240 - DNA, 25 bp, Saccharomyces pastorianus
ggatttttgccttctagtgatgcta

SEQ ID NO: 114241 - DNA, 25 bp, Saccharomyces pastorianus
gtattcgccaagctgcttcttatat

SEQ ID NO: 114242 - DNA, 25 bp, Saccharomyces pastorianus
agattgtcgattttccaggctccaa

SEQ ID NO: 114243 - DNA, 25 bp, Saccharomyces pastorianus
atacgctccatctacatatgctgac

SEQ ID NO: 114244 - DNA, 25 bp, Saccharomyces pastorianus
taatcggtgtttgtgcccaatacgc

SEQ ID NO: 114245 - DNA, 25 bp, Saccharomyces pastorianus
tgctcaatctaatatctccgctgta

SEQ ID NO: 114246 - DNA, 25 bp, Saccharomyces pastorianus
acacgtacacggctaattggttcaa

SEQ ID NO: 114247 - DNA, 25 bp, Saccharomyces pastorianus
gctgacgtttgcataccgactttag

SEQ ID NO: 114248 - DNA, 25 bp, Saccharomyces pastorianus
ttaccgagtgcttgatttctcctga

SEQ ID NO: 114249 - DNA, 25 bp, Saccharomyces pastorianus
gaagctgcctcattcaactatcaat

SEQ ID NO: 114250 - DNA, 25 bp, Saccharomyces pastorianus
gtcgtcttcttaacatgttccttat

SEQ ID NO: 114251 - DNA, 25 bp, Saccharomyces pastorianus
gagattatgtcttgtttgctgccaa

SEQ ID NO: 114252 - DNA, 25 bp, Saccharomyces pastorianus
aatccattcgtcgttccttagaaca

SEQ ID NO: 114253 - DNA, 25 bp, Saccharomyces pastorianus
gaagttttgcaatctgttatcgcag

SEQ ID NO: 114254 - DNA, 25 bp, Saccharomyces pastorianus
gagaagaccatctttgttgtcgaaa

SEQ ID NO: 114255 - DNA, 25 bp, Saccharomyces pastorianus
atgactgccttctattccggtatta

SEQ ID NO: 114256 - DNA, 25 bp, Saccharomyces pastorianus
gtttgccatatcaccaacacatcaa

SEQ ID NO: 114257 - DNA, 25 bp, Saccharomyces pastorianus
gatttaatcgatgtcgtcttcttaa

SEQ ID NO: 114258 - DNA, 25 bp, Saccharomyces pastorianus
gaggttctattcaagtttttctgtt

SEQ ID NO: 114259 - DNA, 25 bp, Saccharomyces pastorianus
aattccttactctccaaaatccatt

SEQ ID NO: 114260 - DNA, 25 bp, Saccharomyces pastorianus
agccgaattatttgatcttccagaa

SEQ ID NO: 114261 - DNA, 25 bp, Saccharomyces pastorianus
gtatatgttcccttaaccacgagag

SEQ ID NO: 114262 - DNA, 25 bp, Saccharomyces pastorianus
gagagacacctctattcccgagtta

SEQ ID NO: 114263 - DNA, 25 bp, Saccharomyces pastorianus
gtgatttcaccggattggactcgca

SEQ ID NO: 114264 - DNA, 25 bp, Saccharomyces pastorianus
atctcctcaggaagcttacggtgat

SEQ ID NO: 114265 - DNA, 25 bp, Saccharomyces pastorianus
agaaggcctcactatcaagatgcag

SEQ ID NO: 114266 - DNA, 25 bp, Saccharomyces pastorianus
tggtattctcaacgtgggacactct

SEQ ID NO: 114267 - DNA, 25 bp, Saccharomyces pastorianus
gattggactcgcagtatggctacta

SEQ ID NO: 114268 - DNA, 25 bp, Saccharomyces pastorianus
gagttctttgatgctcagctaccat

SEQ ID NO: 114269 - DNA, 25 bp, Saccharomyces pastorianus
tagcgtcatcgttcacagacttgtt

SEQ ID NO: 114270 - DNA, 25 bp, Saccharomyces pastorianus
ggacactcttgctcgagcattcaaa

SEQ ID NO: 114271 - DNA, 25 bp, Saccharomyces pastorianus
aaagtcagctggtgccgataaacgc

SEQ ID NO: 114272 - DNA, 25 bp, Saccharomyces pastorianus
caaccggattttgagaccaacgacg

SEQ ID NO: 114273 - DNA, 25 bp, Saccharomyces pastorianus
ggacacactgtcactgaaacatgag

SEQ ID NO: 114274 - DNA, 25 bp, Saccharomyces pastorianus
caaaaagtcccgtgaagcgctaaag

SEQ ID NO: 114275 - DNA, 25 bp, Saccharomyces pastorianus
gaagactcaccggaggctagacata

SEQ ID NO: 114276 - DNA, 25 bp, Saccharomyces pastorianus
taccaaggtgctgtggaccctcacg

SEQ ID NO: 114277 - DNA, 25 bp, Saccharomyces pastorianus
ggaacatcgagtaccttccttccaa

SEQ ID NO: 114278 - DNA, 25 bp, Saccharomyces pastorianus
acatcgacgatttgtccctgggcga

SEQ ID NO: 114279 - DNA, 25 bp, Saccharomyces pastorianus
tgccaggtggcaaacgatgacatcg

SEQ ID NO: 114280 - DNA, 25 bp, Saccharomyces pastorianus
gatattcacatagacgagcccaaga

SEQ ID NO: 114281 - DNA, 25 bp, Saccharomyces pastorianus
tgtccctgggcgaaccggaatttga

SEQ ID NO: 114282 - DNA, 25 bp, Saccharomyces pastorianus
gacatgttggccaagatgacaccag

SEQ ID NO: 114283 - DNA, 25 bp, Saccharomyces pastorianus
gaatcctctgaagaccggttttgca

SEQ ID NO: 114284 - DNA, 25 bp, Saccharomyces pastorianus
taagttcatcacacctcttttgagg

SEQ ID NO: 114285 - DNA, 25 bp, Saccharomyces pastorianus
ttcctgtccgacttcatcgttaata

SEQ ID NO: 114286 - DNA, 25 bp, Saccharomyces pastorianus
tagtaagcggcctaacttgttcaga

SEQ ID NO: 114287 - DNA, 25 bp, Saccharomyces pastorianus
cgatgcttctgttaattcctcgaat

SEQ ID NO: 114288 - DNA, 25 bp, Saccharomyces pastorianus
agtccttgcgtcgtttatccacgaa

SEQ ID NO: 114289 - DNA, 25 bp, Saccharomyces pastorianus
aagtgacgtactcgcaaagttctcc

SEQ ID NO: 114290 - DNA, 25 bp, Saccharomyces pastorianus
aaagttctccgctgctatacaaaat

SEQ ID NO: 114291 - DNA, 25 bp, Saccharomyces pastorianus
aatgttttagacttcctgtccgact

SEQ ID NO: 114292 - DNA, 25 bp, Saccharomyces pastorianus
aaacacaagcctacacgtcgttgaa

SEQ ID NO: 114293 - DNA, 25 bp, Saccharomyces pastorianus
gtaaccggctcattgcacgtttgca

SEQ ID NO: 114294 - DNA, 25 bp, Saccharomyces pastorianus
gaactgtcgaggatcttgagccaga

SEQ ID NO: 114295 - DNA, 25 bp, Saccharomyces pastorianus
gaccatacttggcaccattggtggt

SEQ ID NO: 114296 - DNA, 25 bp, Saccharomyces pastorianus
gttcggcagtcaacgattcagcaga

SEQ ID NO: 114297 - DNA, 25 bp, Saccharomyces pastorianus
aaatatgcctcctataaacgcgaat

SEQ ID NO: 114298 - DNA, 25 bp, Saccharomyces pastorianus
gaaaagactcccagatcagctacgg

SEQ ID NO: 114299 - DNA, 25 bp, Saccharomyces pastorianus
actgagatggaaccgctggcgttta

SEQ ID NO: 114300 - DNA, 25 bp, Saccharomyces pastorianus
atggcccgcactagctttaattaag

SEQ ID NO: 114301 - DNA, 25 bp, Saccharomyces pastorianus
tgaacgaagtacatggcccgcacta

SEQ ID NO: 114302 - DNA, 25 bp, Saccharomyces pastorianus
tgagccagaacctttaatgagccct

SEQ ID NO: 114303 - DNA, 25 bp, Saccharomyces pastorianus
aatttaggcctgttgtgctcattaa

SEQ ID NO: 114304 - DNA, 25 bp, Saccharomyces pastorianus
ccagaattgggcataccgcagttga

SEQ ID NO: 114305 - DNA, 25 bp, Saccharomyces pastorianus
atatggtacagctattggcgcaaga

SEQ ID NO: 114306 - DNA, 25 bp, Saccharomyces pastorianus
gggttacgttcgaacactcatgctg

SEQ ID NO: 114307 - DNA, 25 bp, Saccharomyces pastorianus
agccgggttggctccagatgctaga

SEQ ID NO: 114308 - DNA, 25 bp, Saccharomyces pastorianus
gggacgaatccttgacggtagacaa

SEQ ID NO: 114309 - DNA, 25 bp, Saccharomyces pastorianus
gagcaggtcatttgctttgcgataa

SEQ ID NO: 114310 - DNA, 25 bp, Saccharomyces pastorianus
gagcggtgctcatcttttagaattc

SEQ ID NO: 114311 - DNA, 25 bp, Saccharomyces pastorianus
agacaatctttcaatcgccatcgtg

SEQ ID NO: 114312 - DNA, 25 bp, Saccharomyces pastorianus
atcaaagctggcgtcgaggctatca

SEQ ID NO: 114313 - DNA, 25 bp, Saccharomyces pastorianus
gtttttaacagaaagcttgccgtcg

SEQ ID NO: 114314 - DNA, 25 bp, Saccharomyces pastorianus
ccctacggtgttggtttgttgatca

SEQ ID NO: 114315 - DNA, 25 bp, Saccharomyces pastorianus
aggctatcagccagtctctaaggga

SEQ ID NO: 114316 - DNA, 25 bp, Saccharomyces pastorianus
gatattgtctttgctactgtccagt

SEQ ID NO: 114317 - DNA, 25 bp, Saccharomyces pastorianus
gaactgcatttcaccatttggcttg

SEQ ID NO: 114318 - DNA, 25 bp, Saccharomyces pastorianus
tctaccggtccatttgttactcaaa

SEQ ID NO: 114319 - DNA, 25 bp, Saccharomyces pastorianus
tcgttatttccctactcggtgaatt

SEQ ID NO: 114320 - DNA, 25 bp, Saccharomyces pastorianus
ggtctgcctttggtgctaccgaaaa

SEQ ID NO: 114321 - DNA, 25 bp, Saccharomyces pastorianus
gtagtagcattcacccacaattcta

SEQ ID NO: 114322 - DNA, 25 bp, Saccharomyces pastorianus
acaggtgcgtgaacgttccggtgca

SEQ ID NO: 114323 - DNA, 25 bp, Saccharomyces pastorianus
gtaccgttaccgttgacttatcaga

SEQ ID NO: 114324 - DNA, 25 bp, Saccharomyces pastorianus
gcacattggcggatttctatctgat

SEQ ID NO: 114325 - DNA, 25 bp, Saccharomyces pastorianus
ttggcttgtgtggacgcgtttttaa

SEQ ID NO: 114326 - DNA, 25 bp, Saccharomyces pastorianus
tgtccaccaattagctctcgttatt

SEQ ID NO: 114327 - DNA, 25 bp, Saccharomyces pastorianus
acatctctttttaggtgggtcgctc

SEQ ID NO: 114328 - DNA, 25 bp, Saccharomyces pastorianus
gtaacttacagcttcgtagggacta

SEQ ID NO: 114329 - DNA, 25 bp, Saccharomyces pastorianus
gggtcgctcaagagggccacttaat

SEQ ID NO: 114330 - DNA, 25 bp, Saccharomyces pastorianus
tacggagcccaacttactagcaatg

SEQ ID NO: 114331 - DNA, 25 bp, Saccharomyces pastorianus
tcaggtggcatgtcacttattcgcc

SEQ ID NO: 114332 - DNA, 25 bp, Saccharomyces pastorianus
aagaactcgggtgtcagagcctgct

SEQ ID NO: 114333 - DNA, 25 bp, Saccharomyces pastorianus
ggttcgtggcagctcattatactag

SEQ ID NO: 114334 - DNA, 25 bp, Saccharomyces pastorianus
ttattcgcccgtagttaccaacgat

SEQ ID NO: 114335 - DNA, 25 bp, Saccharomyces pastorianus
tagggactacgtctacggagcccaa

SEQ ID NO: 114336 - DNA, 25 bp, Saccharomyces pastorianus
agagcctgctcatacattacataga

SEQ ID NO: 114337 - DNA, 25 bp, Saccharomyces pastorianus
aaagtgcctctttacgacatatata

SEQ ID NO: 114338 - DNA, 25 bp, Saccharomyces pastorianus
taggcgtagttgtactggtcgtgct

SEQ ID NO: 114339 - DNA, 25 bp, Saccharomyces pastorianus
gtagtggctgtggtcgattttgaac

SEQ ID NO: 114340 - DNA, 25 bp, Saccharomyces pastorianus
accagatgaacccattttgatacgg

SEQ ID NO: 114341 - DNA, 25 bp, Saccharomyces pastorianus
tagtcgtgctactatgcgatgtggt

SEQ ID NO: 114342 - DNA, 25 bp, Saccharomyces pastorianus
gtcgattttgaaccagatgaaccca

SEQ ID NO: 114343 - DNA, 25 bp, Saccharomyces pastorianus
aactttagtgcttgtcgtgcttgtc

SEQ ID NO: 114344 - DNA, 25 bp, Saccharomyces pastorianus
gaaactaatgtgctagaactactga

SEQ ID NO: 114345 - DNA, 25 bp, Saccharomyces pastorianus
gtactggtcgtgctactagtagtag

SEQ ID NO: 114346 - DNA, 25 bp, Saccharomyces pastorianus
taatttctgggctagttgtaacttt

SEQ ID NO: 114347 - DNA, 25 bp, Saccharomyces pastorianus
aactactgacaataatttctgggct

SEQ ID NO: 114348 - DNA, 25 bp, Saccharomyces pastorianus
gctagaagtaaactcgggtacaaca

SEQ ID NO: 114349 - DNA, 25 bp, Saccharomyces pastorianus
atcacatttggctgctccactatta

SEQ ID NO: 114350 - DNA, 25 bp, Saccharomyces pastorianus
aaagtactttgacaccttcgacctg

SEQ ID NO: 114351 - DNA, 25 bp, Saccharomyces pastorianus
aagatgggcgccgatcactacattg

SEQ ID NO: 114352 - DNA, 25 bp, Saccharomyces pastorianus
ttggtcttggtggtatcggcagtat

SEQ ID NO: 114353 - DNA, 25 bp, Saccharomyces pastorianus
gtggtggtttgactgtgtactctcc

SEQ ID NO: 114354 - DNA, 25 bp, Saccharomyces pastorianus
gaattgtctcaatctctataccaga

SEQ ID NO: 114355 - DNA, 25 bp, Saccharomyces pastorianus
gtactctccattggttcgtaacggt

SEQ ID NO: 114356 - DNA, 25 bp, Saccharomyces pastorianus
aaaggctgtctccatttcttacagt

SEQ ID NO: 114357 - DNA, 25 bp, Saccharomyces pastorianus
tgattgtaatctgtgcttcctccct

SEQ ID NO: 114358 - DNA, 25 bp, Saccharomyces pastorianus
cttacagtgctttaggttccatcaa

SEQ ID NO: 114359 - DNA, 25 bp, Saccharomyces pastorianus
attacctgttggtgaagccggcgtc

SEQ ID NO: 114360 - DNA, 25 bp, Saccharomyces pastorianus
aggttaccgctttgtacgcacgtag

SEQ ID NO: 114361 - DNA, 25 bp, Saccharomyces pastorianus
agtgttcttgtatccgtcatcatca

SEQ ID NO: 114362 - DNA, 25 bp, Saccharomyces pastorianus
tgtggcagtgttcgctacatggatt

SEQ ID NO: 114363 - DNA, 25 bp, Saccharomyces pastorianus
tattggtgtcctgatcggtgtggca

SEQ ID NO: 114364 - DNA, 25 bp, Saccharomyces pastorianus
ttgctaacacgccaactatgattat

SEQ ID NO: 114365 - DNA, 25 bp, Saccharomyces pastorianus
agaagtgtacttccgaatcgttcaa

SEQ ID NO: 114366 - DNA, 25 bp, Saccharomyces pastorianus
acatggattggtattggttcgccaa

SEQ ID NO: 114367 - DNA, 25 bp, Saccharomyces pastorianus
taggatctgctcaactccatggagt

SEQ ID NO: 114368 - DNA, 25 bp, Saccharomyces pastorianus
aatttgtattgcttccggtttgcgt

SEQ ID NO: 114369 - DNA, 25 bp, Saccharomyces pastorianus
gtaggcgcatacttctatcatacgt

SEQ ID NO: 114370 - DNA, 25 bp, Saccharomyces pastorianus
aagcacataattgggccgatcgtca

SEQ ID NO: 114371 - DNA, 25 bp, Saccharomyces pastorianus
ttgccttcatgtaaacttgatccag

SEQ ID NO: 114372 - DNA, 25 bp, Saccharomyces pastorianus
aaacccattgagttattgcaccttc

SEQ ID NO: 114373 - DNA, 25 bp, Saccharomyces pastorianus
gaaaatatccaagggcacctgcttc

SEQ ID NO: 114374 - DNA, 25 bp, Saccharomyces pastorianus
ataagttgtcatatatttctcgaaa

SEQ ID NO: 114375 - DNA, 25 bp, Saccharomyces pastorianus
gagttattgcaccttcaagagttaa

SEQ ID NO: 114376 - DNA, 25 bp, Saccharomyces pastorianus
tcacatgaaatttcggccaggcctc

SEQ ID NO: 114377 - DNA, 25 bp, Saccharomyces pastorianus
tggaaagccatgtattgtttcacat

SEQ ID NO: 114378 - DNA, 25 bp, Saccharomyces pastorianus
acctgcttctatcagctgcgacaat

SEQ ID NO: 114379 - DNA, 25 bp, Saccharomyces pastorianus
ggcctcacatattacagccttgtaa

SEQ ID NO: 114380 - DNA, 25 bp, Saccharomyces pastorianus
gagttaatactttacacttttatga

SEQ ID NO: 114381 - DNA, 25 bp, Saccharomyces pastorianus
tgcgacaatagagccacggagccaa

SEQ ID NO: 114382 - DNA, 25 bp, Saccharomyces pastorianus
ggattcttttcatgttggtacaagg

SEQ ID NO: 114383 - DNA, 25 bp, Saccharomyces pastorianus
tatctcgggtggattcttttcatgt

SEQ ID NO: 114384 - DNA, 25 bp, Saccharomyces pastorianus
attccttaattttttgtgctgcata

SEQ ID NO: 114385 - DNA, 25 bp, Saccharomyces pastorianus
gggaatgtgccttctattacgcacc

SEQ ID NO: 114386 - DNA, 25 bp, Saccharomyces pastorianus
aagaggatttccaatatttttatgt

SEQ ID NO: 114387 - DNA, 25 bp, Saccharomyces pastorianus
atttttatgttgataccattcctta

SEQ ID NO: 114388 - DNA, 25 bp, Saccharomyces pastorianus
gataccattccttaattttttgtgc

SEQ ID NO: 114389 - DNA, 25 bp, Saccharomyces pastorianus
cgggtggattcttttcatgttggta

SEQ ID NO: 114390 - DNA, 25 bp, Saccharomyces pastorianus
gaatgtgccttctattacgcacctt

SEQ ID NO: 114391 - DNA, 25 bp, Saccharomyces pastorianus
ttgtgctgcatatatgtgtcacggg

SEQ ID NO: 114392 - DNA, 25 bp, Saccharomyces pastorianus
gtggattcttttcatgttggtacaa

SEQ ID NO: 114393 - DNA, 25 bp, Saccharomyces pastorianus
tcttgcgacatcatttcatccggaa

SEQ ID NO: 114394 - DNA, 25 bp, Saccharomyces pastorianus
gcattcgtacacaacccaagcaagg

SEQ ID NO: 114395 - DNA, 25 bp, Saccharomyces pastorianus
ggattttacgacgatctctacgcat

SEQ ID NO: 114396 - DNA, 25 bp, Saccharomyces pastorianus
aactggtcaagacgctgaatttact

SEQ ID NO: 114397 - DNA, 25 bp, Saccharomyces pastorianus
ggatttgcgacttttcaaactttat

SEQ ID NO: 114398 - DNA, 25 bp, Saccharomyces pastorianus
gagagtcgactgcaatgtcccttat

SEQ ID NO: 114399 - DNA, 25 bp, Saccharomyces pastorianus
gttcattgaacatgtgcgacacgta

SEQ ID NO: 114400 - DNA, 25 bp, Saccharomyces pastorianus
tatacggtttcacgactggttcatc

SEQ ID NO: 114401 - DNA, 25 bp, Saccharomyces pastorianus
catttgggagacaagctcagtcttc

SEQ ID NO: 114402 - DNA, 25 bp, Saccharomyces pastorianus
actgcaatgattttcctgctacttt

SEQ ID NO: 114403 - DNA, 25 bp, Saccharomyces pastorianus
aggtgctggatcctgaacatgtgca

SEQ ID NO: 114404 - DNA, 25 bp, Saccharomyces pastorianus
ttgaagccacgactcactacgataa

SEQ ID NO: 114405 - DNA, 25 bp, Saccharomyces pastorianus
accgaatccgattttgcagctaagg

SEQ ID NO: 114406 - DNA, 25 bp, Saccharomyces pastorianus
gctaaggccacagaattacgcgtcc

SEQ ID NO: 114407 - DNA, 25 bp, Saccharomyces pastorianus
agcaggtaccggtgacgtttccgag

SEQ ID NO: 114408 - DNA, 25 bp, Saccharomyces pastorianus
acttcaaggtgccatttgtttgcgg

SEQ ID NO: 114409 - DNA, 25 bp, Saccharomyces pastorianus
agtgaggttttgactccagctgatt

SEQ ID NO: 114410 - DNA, 25 bp, Saccharomyces pastorianus
ttgtgaaggtgttttcgtcggctca

SEQ ID NO: 114411 - DNA, 25 bp, Saccharomyces pastorianus
tttgctgctggtggagttgctactc

SEQ ID NO: 114412 - DNA, 25 bp, Saccharomyces pastorianus
gctacctgtagtcaattttgctgct

SEQ ID NO: 114413 - DNA, 25 bp, Saccharomyces pastorianus
agcagacgctgctctattgatgcaa

SEQ ID NO: 114414 - DNA, 25 bp, Saccharomyces pastorianus
aggtgctgcaatgatccgtaccaaa

SEQ ID NO: 114415 - DNA, 25 bp, Saccharomyces pastorianus
tgatgttggctttcccaaaagttta

SEQ ID NO: 114416 - DNA, 25 bp, Saccharomyces pastorianus
tccttttgatgttggctttcccaaa

SEQ ID NO: 114417 - DNA, 25 bp, Saccharomyces pastorianus
gtaaccaagaagctttcacccctca

SEQ ID NO: 114418 - DNA, 25 bp, Saccharomyces pastorianus
ttaataggagatgacccagcggtaa

SEQ ID NO: 114419 - DNA, 25 bp, Saccharomyces pastorianus
cctatatttaggagtatctgataca

SEQ ID NO: 114420 - DNA, 25 bp, Saccharomyces pastorianus
tgggtggccccgaacaaacagaatt

SEQ ID NO: 114421 - DNA, 25 bp, Saccharomyces pastorianus
agaatacctggaaagtattgttcct

SEQ ID NO: 114422 - DNA, 25 bp, Saccharomyces pastorianus
cattgactaaaattgctgaggaaca

SEQ ID NO: 114423 - DNA, 25 bp, Saccharomyces pastorianus
gcagggcaaggtcctatatttagga

SEQ ID NO: 114424 - DNA, 25 bp, Saccharomyces pastorianus
gacccagcggtaaccaagaagcttt

SEQ ID NO: 114425 - DNA, 25 bp, Saccharomyces pastorianus
gtctgcgtacttttgtgggtggccc

SEQ ID NO: 114426 - DNA, 25 bp, Saccharomyces pastorianus
gtatcaaccttctgctgtcgtgtta

SEQ ID NO: 114427 - DNA, 25 bp, Saccharomyces pastorianus
aactacgcggtcaatgtgccattaa

SEQ ID NO: 114428 - DNA, 25 bp, Saccharomyces pastorianus
gaaggccatgctaattgtgtaaact

SEQ ID NO: 114429 - DNA, 25 bp, Saccharomyces pastorianus
gtatgcccctagtgttcagttgaat

SEQ ID NO: 114430 - DNA, 25 bp, Saccharomyces pastorianus
tgaagaagattctgccgaggctaaa

SEQ ID NO: 114431 - DNA, 25 bp, Saccharomyces pastorianus
atggtgctttgaaacaggtctacta

SEQ ID NO: 114432 - DNA, 25 bp, Saccharomyces pastorianus
cacacacctagggatgccgaagatt

SEQ ID NO: 114433 - DNA, 25 bp, Saccharomyces pastorianus
cagatctgtgtttgaacctgtgata

SEQ ID NO: 114434 - DNA, 25 bp, Saccharomyces pastorianus
gacgatgctacgtacagatctgtgt

SEQ ID NO: 114435 - DNA, 25 bp, Saccharomyces pastorianus
ttgctttaatctttccatggaaggc

SEQ ID NO: 114436 - DNA, 25 bp, Saccharomyces pastorianus
aatactcccgaatatcttgacaagg

SEQ ID NO: 114437 - DNA, 25 bp, Saccharomyces pastorianus
ccgacgctgacggtgtattcgttat

SEQ ID NO: 114438 - DNA, 25 bp, Saccharomyces pastorianus
gaggctaaaccttgtgtcatatttt

SEQ ID NO: 114439 - DNA, 25 bp, Saccharomyces pastorianus
gtgtcgcgggctgaactgaatcatt

SEQ ID NO: 114440 - DNA, 25 bp, Saccharomyces pastorianus
gagaatatttctacacgtcgctggt

SEQ ID NO: 114441 - DNA, 25 bp, Saccharomyces pastorianus
gctatgtccatttaattacaccggg

SEQ ID NO: 114442 - DNA, 25 bp, Saccharomyces pastorianus
gatgcaatgcttaacgccatgtcaa

SEQ ID NO: 114443 - DNA, 25 bp, Saccharomyces pastorianus
gaagcactactaagaccaggacgat

SEQ ID NO: 114444 - DNA, 25 bp, Saccharomyces pastorianus
ggatcgtatcgtttcacagttacta

SEQ ID NO: 114445 - DNA, 25 bp, Saccharomyces pastorianus
agaggctctgactcgcaaattcgtg

SEQ ID NO: 114446 - DNA, 25 bp, Saccharomyces pastorianus
aaattcgtgctcgacaacgacgtaa

SEQ ID NO: 114447 - DNA, 25 bp, Saccharomyces pastorianus
atcgattcagtagcacccaaacgtg

SEQ ID NO: 114448 - DNA, 25 bp, Saccharomyces pastorianus
gggaggctttgcaccgcgaatgaca

SEQ ID NO: 114449 - DNA, 25 bp, Saccharomyces pastorianus
gcgaatgacagagcccgaagccttg

SEQ ID NO: 114450 - DNA, 25 bp, Saccharomyces pastorianus
aaaccagtaccagggaggctttgca

SEQ ID NO: 114451 - DNA, 25 bp, Saccharomyces pastorianus
gtcaggtctggtctcaatgcatgga

SEQ ID NO: 114452 - DNA, 25 bp, Saccharomyces pastorianus
gcacaggaaggctatggttcgtaac

SEQ ID NO: 114453 - DNA, 25 bp, Saccharomyces pastorianus
ttgggcgtgacaatggttgctctaa

SEQ ID NO: 114454 - DNA, 25 bp, Saccharomyces pastorianus
tgtcccctttaactattgcaaaact

SEQ ID NO: 114455 - DNA, 25 bp, Saccharomyces pastorianus
gggctaccgcgatgcacttaagttc

SEQ ID NO: 114456 - DNA, 25 bp, Saccharomyces pastorianus
gagggagtccctacatggcggccaa

SEQ ID NO: 114457 - DNA, 25 bp, Saccharomyces pastorianus
gttgctctaagtgtcaggtctggtc

SEQ ID NO: 114458 - DNA, 25 bp, Saccharomyces pastorianus
ggttcgtaaccacccagacagagga

SEQ ID NO: 114459 - DNA, 25 bp, Saccharomyces pastorianus
gtatgcttccaatttctacgctgga

SEQ ID NO: 114460 - DNA, 25 bp, Saccharomyces pastorianus
ggtagtctgattccaatttccacac

SEQ ID NO: 114461 - DNA, 25 bp, Saccharomyces pastorianus
aattacctggtattcctcatctact

SEQ ID NO: 114462 - DNA, 25 bp, Saccharomyces pastorianus
gtaccacagtagattctgcccaata

SEQ ID NO: 114463 - DNA, 25 bp, Saccharomyces pastorianus
tccttcaatttctacatactcgggc

SEQ ID NO: 114464 - DNA, 25 bp, Saccharomyces pastorianus
ttccagcacatctctatctacaata

SEQ ID NO: 114465 - DNA, 25 bp, Saccharomyces pastorianus
ttcccctcattctgcaactttagat

SEQ ID NO: 114466 - DNA, 25 bp, Saccharomyces pastorianus
acatgtactgagtctgggcaagcta

SEQ ID NO: 114467 - DNA, 25 bp, Saccharomyces pastorianus
aggtactactatttcattgccaaca

SEQ ID NO: 114468 - DNA, 25 bp, Saccharomyces pastorianus
gtttagtcccagtatctaccatcaa

SEQ ID NO: 114469 - DNA, 25 bp, Saccharomyces pastorianus
gaggtttgtgtcacatgtaccgccc

SEQ ID NO: 114470 - DNA, 25 bp, Saccharomyces pastorianus
tgtttcagcatttatcaggtttgta

SEQ ID NO: 114471 - DNA, 25 bp, Saccharomyces pastorianus
agagtaacaccaagaccctcattag

SEQ ID NO: 114472 - DNA, 25 bp, Saccharomyces pastorianus
aaactactatcgaggtacacggaat

SEQ ID NO: 114473 - DNA, 25 bp, Saccharomyces pastorianus
attggcggttgctgttttcatttct

SEQ ID NO: 114474 - DNA, 25 bp, Saccharomyces pastorianus
gaatgcactggttttaggaatcaaa

SEQ ID NO: 114475 - DNA, 25 bp, Saccharomyces pastorianus
gttttagcatttacctgtttcagca

SEQ ID NO: 114476 - DNA, 25 bp, Saccharomyces pastorianus
acattatacgcgttcttagtcctaa

SEQ ID NO: 114477 - DNA, 25 bp, Saccharomyces pastorianus
ttgctatgagcttgggacgtggttt

SEQ ID NO: 114478 - DNA, 25 bp, Saccharomyces pastorianus
gtggatacttcctattgagaccttc

SEQ ID NO: 114479 - DNA, 25 bp, Saccharomyces pastorianus
gacctcaagtacaagaccgactgct

SEQ ID NO: 114480 - DNA, 25 bp, Saccharomyces pastorianus
gggttcttcaatggccaactggcaa

SEQ ID NO: 114481 - DNA, 25 bp, Saccharomyces pastorianus
aagacaaggctatgtcgccgttcac

SEQ ID NO: 114482 - DNA, 25 bp, Saccharomyces pastorianus
gaaaaagtcctcaatgtcgatgatt

SEQ ID NO: 114483 - DNA, 25 bp, Saccharomyces pastorianus
gatatcataatgctttgtccaaaca

SEQ ID NO: 114484 - DNA, 25 bp, Saccharomyces pastorianus
gctcctgatcatgtgtctgttgacg

SEQ ID NO: 114485 - DNA, 25 bp, Saccharomyces pastorianus
gtcgatgattataaacctgctcttg

SEQ ID NO: 114486 - DNA, 25 bp, Saccharomyces pastorianus
gaagcacttcttattgctcctgatc

SEQ ID NO: 114487 - DNA, 25 bp, Saccharomyces pastorianus
gacaatttgcagctttacagggatt

SEQ ID NO: 114488 - DNA, 25 bp, Saccharomyces pastorianus
gtcgccgttcacttctaggaagcaa

SEQ ID NO: 114489 - DNA, 25 bp, Saccharomyces pastorianus
gttatacacattaagcccgacaatt

SEQ ID NO: 114490 - DNA, 25 bp, Saccharomyces pastorianus
gatgactattctgctgttatacaca

SEQ ID NO: 114491 - DNA, 25 bp, Saccharomyces pastorianus
aacctgctcttgatgactattctgc

SEQ ID NO: 114492 - DNA, 25 bp, Saccharomyces pastorianus
tccaacacagttaattctccacggg

SEQ ID NO: 114493 - DNA, 25 bp, Saccharomyces pastorianus
gaagacattatcctccaacacagtt

SEQ ID NO: 114494 - DNA, 25 bp, Saccharomyces pastorianus
gttgcttcttctaaacttgctagta

SEQ ID NO: 114495 - DNA, 25 bp, Saccharomyces pastorianus
tccaccaagggtatgctccattgca

SEQ ID NO: 114496 - DNA, 25 bp, Saccharomyces pastorianus
attgcatcattgttcatccttgtcc

SEQ ID NO: 114497 - DNA, 25 bp, Saccharomyces pastorianus
tcctgtttcttttttgctttgcgtt

SEQ ID NO: 114498 - DNA, 25 bp, Saccharomyces pastorianus
gatgtggtaagtatacctccaccaa

SEQ ID NO: 114499 - DNA, 25 bp, Saccharomyces pastorianus
tgtagaccatcttcagttgcttctt

SEQ ID NO: 114500 - DNA, 25 bp, Saccharomyces pastorianus
atacattcgatctttggtttcgtat

SEQ ID NO: 114501 - DNA, 25 bp, Saccharomyces pastorianus
ttctctgcttagacccagatgtggt

SEQ ID NO: 114502 - DNA, 25 bp, Saccharomyces pastorianus
gaccgtatcctgtaattttcttatg

SEQ ID NO: 114503 - DNA, 25 bp, Saccharomyces pastorianus
ggatatcggtctgcattggccagta

SEQ ID NO: 114504 - DNA, 25 bp, Saccharomyces pastorianus
atccatgtggcctaattgcgaactc

SEQ ID NO: 114505 - DNA, 25 bp, Saccharomyces pastorianus
gatagcacctccaccatattgggaa

SEQ ID NO: 114506 - DNA, 25 bp, Saccharomyces pastorianus
aaaacgatactttgccagcgggtga

SEQ ID NO: 114507 - DNA, 25 bp, Saccharomyces pastorianus
gggaatctacttgactcacggttct

SEQ ID NO: 114508 - DNA, 25 bp, Saccharomyces pastorianus
atgaggccaggtgcttttgataaaa

SEQ ID NO: 114509 - DNA, 25 bp, Saccharomyces pastorianus
ggctgtatttgtgctgccatggcat

SEQ ID NO: 114510 - DNA, 25 bp, Saccharomyces pastorianus
gggatacgtctaacaactattcatt

SEQ ID NO: 114511 - DNA, 25 bp, Saccharomyces pastorianus
aactcaatgttcaacgacacgttcc

SEQ ID NO: 114512 - DNA, 25 bp, Saccharomyces pastorianus
aagccactatctaagaacgccgatg

SEQ ID NO: 114513 - DNA, 25 bp, Saccharomyces pastorianus
ttattaacgttttggctcttcggcg

SEQ ID NO: 114514 - DNA, 25 bp, Saccharomyces pastorianus
gattgtgtcatatcgcatttgtcaa

SEQ ID NO: 114515 - DNA, 25 bp, Saccharomyces pastorianus
gtacgaaacatgtcctagttccaac

SEQ ID NO: 114516 - DNA, 25 bp, Saccharomyces pastorianus
aaacgctttacgcttttatgtcacg

SEQ ID NO: 114517 - DNA, 25 bp, Saccharomyces pastorianus
gacattttctatcgtcagtttggaa

SEQ ID NO: 114518 - DNA, 25 bp, Saccharomyces pastorianus
atctctaggtggtgctaatgctctt

SEQ ID NO: 114519 - DNA, 25 bp, Saccharomyces pastorianus
gttcagagacgccattcttgttttt

SEQ ID NO: 114520 - DNA, 25 bp, Saccharomyces pastorianus
gggatctatgcgatggcgttatact

SEQ ID NO: 114521 - DNA, 25 bp, Saccharomyces pastorianus
gtaactcagaaggttcacccagcga

SEQ ID NO: 114522 - DNA, 25 bp, Saccharomyces pastorianus
gatcttatgtcccaatgccggtaat

SEQ ID NO: 114523 - DNA, 25 bp, Saccharomyces pastorianus
aagatgaaatcgttccacccttcca

SEQ ID NO: 114524 - DNA, 25 bp, Saccharomyces pastorianus
gattttcgaatttccacttggttca

SEQ ID NO: 114525 - DNA, 25 bp, Saccharomyces pastorianus
tgtaatatctactccggttcaaata

SEQ ID NO: 114526 - DNA, 25 bp, Saccharomyces pastorianus
gggcccaatgttattgcaaaccaaa

SEQ ID NO: 114527 - DNA, 25 bp, Saccharomyces pastorianus
tctttttcctcgtttcaggtactag

SEQ ID NO: 114528 - DNA, 25 bp, Saccharomyces pastorianus
aattttggatacaatcatcggtgtt

SEQ ID NO: 114529 - DNA, 25 bp, Saccharomyces pastorianus
aaactgcactttgctacttcttcta

SEQ ID NO: 114530 - DNA, 25 bp, Saccharomyces pastorianus
gcaagcagcaaatatgtatcctagt

SEQ ID NO: 114531 - DNA, 25 bp, Saccharomyces pastorianus
gtacaaatgtaactgggcccaatgt

SEQ ID NO: 114532 - DNA, 25 bp, Saccharomyces pastorianus
tgagaagtccgtttctcttccaaat

SEQ ID NO: 114533 - DNA, 25 bp, Saccharomyces pastorianus
gggaacaattcggacactagtacaa

SEQ ID NO: 114534 - DNA, 25 bp, Saccharomyces pastorianus
attgatctcttgctcattctttttc

SEQ ID NO: 114535 - DNA, 25 bp, Saccharomyces pastorianus
attgatatggccctcgttcttagag

SEQ ID NO: 114536 - DNA, 25 bp, Saccharomyces pastorianus
ggatccttatattacttcaatcata

SEQ ID NO: 114537 - DNA, 25 bp, Saccharomyces pastorianus
gttacatttgtactagtgtccgaat

SEQ ID NO: 114538 - DNA, 25 bp, Saccharomyces pastorianus
acatttcaacagctgtccggaataa

SEQ ID NO: 114539 - DNA, 25 bp, Saccharomyces pastorianus
gctgcttgcctattagcgttgataa

SEQ ID NO: 114540 - DNA, 25 bp, Saccharomyces pastorianus
ggatgctcaatttcttaatatcact

SEQ ID NO: 114541 - DNA, 25 bp, Saccharomyces pastorianus
gtgtccgaattgttccctctaagaa

SEQ ID NO: 114542 - DNA, 25 bp, Saccharomyces pastorianus
ggatacatatttgctgcttgcctat

SEQ ID NO: 114543 - DNA, 25 bp, Saccharomyces pastorianus
aacaccgatgattgtatccaaaatt

SEQ ID NO: 114544 - DNA, 25 bp, Saccharomyces pastorianus
agtgttaacttcctttctacgatat

SEQ ID NO: 114545 - DNA, 25 bp, Saccharomyces pastorianus
gggccgcaagacatgtttattatat

SEQ ID NO: 114546 - DNA, 25 bp, Saccharomyces pastorianus
ttctgttttcaaaggtgtcgggatt

SEQ ID NO: 114547 - DNA, 25 bp, Saccharomyces pastorianus
ttatatgacactagaatggcaccca

SEQ ID NO: 114548 - DNA, 25 bp, Saccharomyces pastorianus
agaagagtgaattcggtgcggcccc

SEQ ID NO: 114549 - DNA, 25 bp, Saccharomyces pastorianus
aaccgcgtcaagaaatcccaggcat

SEQ ID NO: 114550 - DNA, 25 bp, Saccharomyces pastorianus
acttgaaccacatgcgttaccaaac

SEQ ID NO: 114551 - DNA, 25 bp, Saccharomyces pastorianus
tggcgtgctatgacggctcgctaaa

SEQ ID NO: 114552 - DNA, 25 bp, Saccharomyces pastorianus
ggacatatatttgccacagcagcta

SEQ ID NO: 114553 - DNA, 25 bp, Saccharomyces pastorianus
tgaagacgcgatttcaacccaccaa

SEQ ID NO: 114554 - DNA, 25 bp, Saccharomyces pastorianus
gagcgaggccaattgatcctaatgc

SEQ ID NO: 114555 - DNA, 25 bp, Saccharomyces pastorianus
ggattcatcaacaagaaaccgcgtc

SEQ ID NO: 114556 - DNA, 25 bp, Saccharomyces pastorianus
attttgactattccatacgcccatg

SEQ ID NO: 114557 - DNA, 25 bp, Saccharomyces pastorianus
atcccaggcatcgattcaaacatca

SEQ ID NO: 114558 - DNA, 25 bp, Saccharomyces pastorianus
taaccctatattcgtgttgccactt

SEQ ID NO: 114559 - DNA, 25 bp, Saccharomyces pastorianus
aagagatttctctaaggcctctccg

SEQ ID NO: 114560 - DNA, 25 bp, Saccharomyces pastorianus
caatggcagtttgtcggaccccaaa

SEQ ID NO: 114561 - DNA, 25 bp, Saccharomyces pastorianus
aggccacatactactttgcagttcc

SEQ ID NO: 114562 - DNA, 25 bp, Saccharomyces pastorianus
gatgacttcccttgcagaatacaaa

SEQ ID NO: 114563 - DNA, 25 bp, Saccharomyces pastorianus
tgattcctgtctccgtttatgataa

SEQ ID NO: 114564 - DNA, 25 bp, Saccharomyces pastorianus
gaatggccatgttgaaccggataca

SEQ ID NO: 114565 - DNA, 25 bp, Saccharomyces pastorianus
tgcagttccattctgatttggtcaa

SEQ ID NO: 114566 - DNA, 25 bp, Saccharomyces pastorianus
gtgttgccacttcctagacaagttc

SEQ ID NO: 114567 - DNA, 25 bp, Saccharomyces pastorianus
acattatgcgccgtgattcctgtct

SEQ ID NO: 114568 - DNA, 25 bp, Saccharomyces pastorianus
gatccaagtgctcctaaagttccct

SEQ ID NO: 114569 - DNA, 25 bp, Saccharomyces pastorianus
gagcaatcgtggtcggactctaata

SEQ ID NO: 114570 - DNA, 25 bp, Saccharomyces pastorianus
taacgattggaattccgcctactct

SEQ ID NO: 114571 - DNA, 25 bp, Saccharomyces pastorianus
gattatcttcacaacgaactcgagg

SEQ ID NO: 114572 - DNA, 25 bp, Saccharomyces pastorianus
gctgcccctggattcaataacgatt

SEQ ID NO: 114573 - DNA, 25 bp, Saccharomyces pastorianus
atgggagcactcttggacgaagcac

SEQ ID NO: 114574 - DNA, 25 bp, Saccharomyces pastorianus
aggttcagcgagacagtactgcctc

SEQ ID NO: 114575 - DNA, 25 bp, Saccharomyces pastorianus
acacaatccccatgattctgtctaa

SEQ ID NO: 114576 - DNA, 25 bp, Saccharomyces pastorianus
gaaggacctcttcagcgcagatcga

SEQ ID NO: 114577 - DNA, 25 bp, Saccharomyces pastorianus
taattgaggctctcctttcacagat

SEQ ID NO: 114578 - DNA, 25 bp, Saccharomyces pastorianus
gaataaccacagctccgacgatgag

SEQ ID NO: 114579 - DNA, 25 bp, Saccharomyces pastorianus
attatcatccgctgaacatccgaat

SEQ ID NO: 114580 - DNA, 25 bp, Saccharomyces pastorianus
gggccgccctagaatgccacgagaa

SEQ ID NO: 114581 - DNA, 25 bp, Saccharomyces pastorianus
ggagccgcagcaattatcttatttt

SEQ ID NO: 114582 - DNA, 25 bp, Saccharomyces pastorianus
gcttgtgaagatttggtggctgcct

SEQ ID NO: 114583 - DNA, 25 bp, Saccharomyces pastorianus
atctggcgaaggttccatcgactta

SEQ ID NO: 114584 - DNA, 25 bp, Saccharomyces pastorianus
ggtggctgcctatgaatcacttggt

SEQ ID NO: 114585 - DNA, 25 bp, Saccharomyces pastorianus
gcagatgggatgactctcctggttg

SEQ ID NO: 114586 - DNA, 25 bp, Saccharomyces pastorianus
gcttatagggccatttctcacaatc

SEQ ID NO: 114587 - DNA, 25 bp, Saccharomyces pastorianus
agccatttcatgtgacgctcaaaag

SEQ ID NO: 114588 - DNA, 25 bp, Saccharomyces pastorianus
gggaggatgtcttaactgcatgtaa

SEQ ID NO: 114589 - DNA, 25 bp, Saccharomyces pastorianus
atgggccaggcagtctggtttgcaa

SEQ ID NO: 114590 - DNA, 25 bp, Saccharomyces pastorianus
gcgactggtcgcaagagtagaactt

SEQ ID NO: 114591 - DNA, 25 bp, Saccharomyces pastorianus
gtacagtaatgagccctgaatcaga

SEQ ID NO: 114592 - DNA, 25 bp, Saccharomyces pastorianus
aatcaatatcccctttaccaatgtg

SEQ ID NO: 114593 - DNA, 25 bp, Saccharomyces pastorianus
gatgttggcgacgagaacgatcaag

SEQ ID NO: 114594 - DNA, 25 bp, Saccharomyces pastorianus
gtactgcgtgtaaatgttcccattg

SEQ ID NO: 114595 - DNA, 25 bp, Saccharomyces pastorianus
taacctctggtgtttcctgagaaat

SEQ ID NO: 114596 - DNA, 25 bp, Saccharomyces pastorianus
tcagacattcaccacacttactatt

SEQ ID NO: 114597 - DNA, 25 bp, Saccharomyces pastorianus
gaacaactctgtaaggcgttgccta

SEQ ID NO: 114598 - DNA, 25 bp, Saccharomyces pastorianus
tcattatgtacacctagaaccagat

SEQ ID NO: 114599 - DNA, 25 bp, Saccharomyces pastorianus
taccaatgtgtatcctttatcccct

SEQ ID NO: 114600 - DNA, 25 bp, Saccharomyces pastorianus
ttattgaagcccgtactgcgtgtaa

SEQ ID NO: 114601 - DNA, 25 bp, Saccharomyces pastorianus
tatcccctctatcgttttgggaaca

SEQ ID NO: 114602 - DNA, 25 bp, Saccharomyces pastorianus
gtttgaagacatcccagattcgcta

SEQ ID NO: 114603 - DNA, 25 bp, Saccharomyces pastorianus
tcagcgatactaaagcagcaccggt

SEQ ID NO: 114604 - DNA, 25 bp, Saccharomyces pastorianus
acgctacaacgtgtgccgtactcta

SEQ ID NO: 114605 - DNA, 25 bp, Saccharomyces pastorianus
gtactttgccagatgttgggcgcct

SEQ ID NO: 114606 - DNA, 25 bp, Saccharomyces pastorianus
agcaccggtgcaactggaatatcaa

SEQ ID NO: 114607 - DNA, 25 bp, Saccharomyces pastorianus
acacaatgtccaagcaggcgtacga

SEQ ID NO: 114608 - DNA, 25 bp, Saccharomyces pastorianus
atctcttgtccgcactgcaaagtga

SEQ ID NO: 114609 - DNA, 25 bp, Saccharomyces pastorianus
aaggtactgtcttgatctcttgtcc

SEQ ID NO: 114610 - DNA, 25 bp, Saccharomyces pastorianus
catgatcatcatgttaccgtggaac

SEQ ID NO: 114611 - DNA, 25 bp, Saccharomyces pastorianus
aaagagcgtcatgttggcttcaggg

SEQ ID NO: 114612 - DNA, 25 bp, Saccharomyces pastorianus
gcagcgttgcataccaatatcatcg

SEQ ID NO: 114613 - DNA, 25 bp, Saccharomyces pastorianus
atgggtgacttctatgcagacgccg

SEQ ID NO: 114614 - DNA, 25 bp, Saccharomyces pastorianus
gaaatttgcaccttatcgttccaag

SEQ ID NO: 114615 - DNA, 25 bp, Saccharomyces pastorianus
tttcgccgccgatgatactgattta

SEQ ID NO: 114616 - DNA, 25 bp, Saccharomyces pastorianus
gaggacaccatactgatacctgtag

SEQ ID NO: 114617 - DNA, 25 bp, Saccharomyces pastorianus
ttagctccagtcgaagcagaggcag

SEQ ID NO: 114618 - DNA, 25 bp, Saccharomyces pastorianus
gaccgcaagagagattttcgccgcc

SEQ ID NO: 114619 - DNA, 25 bp, Saccharomyces pastorianus
gatttgaagtttcgttaccgtgaag

SEQ ID NO: 114620 - DNA, 25 bp, Saccharomyces pastorianus
aaatgggttagctccagtcgaagca

SEQ ID NO: 114621 - DNA, 25 bp, Saccharomyces pastorianus
ttctcctgagagttttggtttgacc

SEQ ID NO: 114622 - DNA, 25 bp, Saccharomyces pastorianus
atgcagacgccgatggtgatgacca

SEQ ID NO: 114623 - DNA, 25 bp, Saccharomyces pastorianus
gaaagcctctaaaagcaaacacaag

SEQ ID NO: 114624 - DNA, 25 bp, Saccharomyces pastorianus
aatctgcgattttgggtctgccaaa

SEQ ID NO: 114625 - DNA, 25 bp, Saccharomyces pastorianus
tcattttcttttcgaatccggccta

SEQ ID NO: 114626 - DNA, 25 bp, Saccharomyces pastorianus
tcaagaaccccttctacagctaagg

SEQ ID NO: 114627 - DNA, 25 bp, Saccharomyces pastorianus
aatccttgcccatcagttctttaat

SEQ ID NO: 114628 - DNA, 25 bp, Saccharomyces pastorianus
atgatgacactttcttaccaagagg

SEQ ID NO: 114629 - DNA, 25 bp, Saccharomyces pastorianus
ttgttaggtcctcccgataaaagat

SEQ ID NO: 114630 - DNA, 25 bp, Saccharomyces pastorianus
gttgtacccaatataccacccagat

SEQ ID NO: 114631 - DNA, 25 bp, Saccharomyces pastorianus
accatccaatgttcttgtagacccg

SEQ ID NO: 114632 - DNA, 25 bp, Saccharomyces pastorianus
catgggcgagatgcttatcggcaaa

SEQ ID NO: 114633 - DNA, 25 bp, Saccharomyces pastorianus
aagtattttggccattccggtccag

SEQ ID NO: 114634 - DNA, 25 bp, Saccharomyces pastorianus
tacgatggccctctattttccaaac

SEQ ID NO: 114635 - DNA, 25 bp, Saccharomyces pastorianus
ggctgccgatggacacagtttgtca

SEQ ID NO: 114636 - DNA, 25 bp, Saccharomyces pastorianus
gctgtactatttgaacttaccccag

SEQ ID NO: 114637 - DNA, 25 bp, Saccharomyces pastorianus
agccgcttttatttctgctcttgtt

SEQ ID NO: 114638 - DNA, 25 bp, Saccharomyces pastorianus
gtcctctgacccagttttgacaaag

SEQ ID NO: 114639 - DNA, 25 bp, Saccharomyces pastorianus
gaatatctcgtatccttcgtcctct

SEQ ID NO: 114640 - DNA, 25 bp, Saccharomyces pastorianus
gaagatggaattctaccggcacgaa

SEQ ID NO: 114641 - DNA, 25 bp, Saccharomyces pastorianus
gatttcgctatctacaggttgttta

SEQ ID NO: 114642 - DNA, 25 bp, Saccharomyces pastorianus
cgcatttgacgttttcaagcgttgt

SEQ ID NO: 114643 - DNA, 25 bp, Saccharomyces pastorianus
gaagatcagcgatgccaccaaattg

SEQ ID NO: 114644 - DNA, 25 bp, Saccharomyces pastorianus
ccggcacgaatagaggagttccttt

SEQ ID NO: 114645 - DNA, 25 bp, Saccharomyces pastorianus
gaagctgcatttcaaaccagtggta

SEQ ID NO: 114646 - DNA, 25 bp, Saccharomyces pastorianus
atcgctagtatcgtgcatttggctg

SEQ ID NO: 114647 - DNA, 25 bp, Saccharomyces pastorianus
tttccttgaccgcactatcagagag

SEQ ID NO: 114648 - DNA, 25 bp, Saccharomyces pastorianus
atttggctggcagtaagtcctcgtc

SEQ ID NO: 114649 - DNA, 25 bp, Saccharomyces pastorianus
gtgccattttatttaccgcgtatct

SEQ ID NO: 114650 - DNA, 25 bp, Saccharomyces pastorianus
tagatgcgccatgatgctttacctg

SEQ ID NO: 114651 - DNA, 25 bp, Saccharomyces pastorianus
agtttaatctgctttacggctggct

SEQ ID NO: 114652 - DNA, 25 bp, Saccharomyces pastorianus
tactgtctgtcgctggtaaccttag

SEQ ID NO: 114653 - DNA, 25 bp, Saccharomyces pastorianus
gaatacccactcttccaagtttaat

SEQ ID NO: 114654 - DNA, 25 bp, Saccharomyces pastorianus
acatctgcatggtggtatcgctagt

SEQ ID NO: 114655 - DNA, 25 bp, Saccharomyces pastorianus
agactacgaggccagtgttcccgaa

SEQ ID NO: 114656 - DNA, 25 bp, Saccharomyces pastorianus
gatacagtactttcggctctgctga

SEQ ID NO: 114657 - DNA, 25 bp, Saccharomyces pastorianus
tcgcaggcagccattgtccaatacg

SEQ ID NO: 114658 - DNA, 25 bp, Saccharomyces pastorianus
ttatttactaccacttattcttcaa

SEQ ID NO: 114659 - DNA, 25 bp, Saccharomyces pastorianus
atctatttattttggtttcggctat

SEQ ID NO: 114660 - DNA, 25 bp, Saccharomyces pastorianus
aatttgttgcgtttagtcttcgaca

SEQ ID NO: 114661 - DNA, 25 bp, Saccharomyces pastorianus
gacgcattatacaatcctacaattt

SEQ ID NO: 114662 - DNA, 25 bp, Saccharomyces pastorianus
gtccaatacgccaatgtcattatat

SEQ ID NO: 114663 - DNA, 25 bp, Saccharomyces pastorianus
tattcttcaatggtgtttttaacgt

SEQ ID NO: 114664 - DNA, 25 bp, Saccharomyces pastorianus
ttcagatcgcaatccatggtttgac

SEQ ID NO: 114665 - DNA, 25 bp, Saccharomyces pastorianus
atggtttgacacattctatcttaaa

SEQ ID NO: 114666 - DNA, 25 bp, Saccharomyces pastorianus
aaagttgccatttttattcagatcg

SEQ ID NO: 114667 - DNA, 25 bp, Saccharomyces pastorianus
atacaacaagattcgcaggcagcca

SEQ ID NO: 114668 - DNA, 25 bp, Saccharomyces pastorianus
ggcgctgccgttaaaggctccgttg

SEQ ID NO: 114669 - DNA, 25 bp, Saccharomyces pastorianus
gcagattccacctctgatggtgtca

SEQ ID NO: 114670 - DNA, 25 bp, Saccharomyces pastorianus
tacatctatggtctccaccgtgaaa

SEQ ID NO: 114671 - DNA, 25 bp, Saccharomyces pastorianus
gatggtgtcacttacgtagatgtta

SEQ ID NO: 114672 - DNA, 25 bp, Saccharomyces pastorianus
ttgccactctatccactaaatctat

SEQ ID NO: 114673 - DNA, 25 bp, Saccharomyces pastorianus
atgagatcagcacatacgtcggcgc

SEQ ID NO: 114674 - DNA, 25 bp, Saccharomyces pastorianus
attgccgcatttgcttccgcagatt

SEQ ID NO: 114675 - DNA, 25 bp, Saccharomyces pastorianus
ctccgttgcgggtatgggtgccatc

SEQ ID NO: 114676 - DNA, 25 bp, Saccharomyces pastorianus
tctatcagcagccaagctaacacca

SEQ ID NO: 114677 - DNA, 25 bp, Saccharomyces pastorianus
ttacgtagatgttaccaccacccca

SEQ ID NO: 114678 - DNA, 25 bp, Saccharomyces pastorianus
gtgaaaactacttccactccataca

SEQ ID NO: 114679 - DNA, 25 bp, Saccharomyces pastorianus
gggtcgtcattttagcattccttga

SEQ ID NO: 114680 - DNA, 25 bp, Saccharomyces pastorianus
gaatttcttcttttcgattcggaag

SEQ ID NO: 114681 - DNA, 25 bp, Saccharomyces pastorianus
gatggaacggttgacagtccctgta

SEQ ID NO: 114682 - DNA, 25 bp, Saccharomyces pastorianus
agacagccggcttcgaggaatagat

SEQ ID NO: 114683 - DNA, 25 bp, Saccharomyces pastorianus
gtctttctagctcctcaaaactatg

SEQ ID NO: 114684 - DNA, 25 bp, Saccharomyces pastorianus
tccaaaatttcagacagccggcttc

SEQ ID NO: 114685 - DNA, 25 bp, Saccharomyces pastorianus
gcattgcattgccagggtcgtcatt

SEQ ID NO: 114686 - DNA, 25 bp, Saccharomyces pastorianus
tgtactcttttcaatatctcaatgg

SEQ ID NO: 114687 - DNA, 25 bp, Saccharomyces pastorianus
gcattccttgattggcaagccaaca

SEQ ID NO: 114688 - DNA, 25 bp, Saccharomyces pastorianus
tgacagtccctgtaggcattgcatt

SEQ ID NO: 114689 - DNA, 25 bp, Saccharomyces pastorianus
gtgcgaaatccggatgtctttctag

SEQ ID NO: 114690 - DNA, 25 bp, Saccharomyces pastorianus
tgtagtgccgatagagaccacgctt

SEQ ID NO: 114691 - DNA, 25 bp, Saccharomyces pastorianus
tcaaagtttcgttggctgtcttaaa

SEQ ID NO: 114692 - DNA, 25 bp, Saccharomyces pastorianus
tgagttgctttgtcggtgtagtgcc

SEQ ID NO: 114693 - DNA, 25 bp, Saccharomyces pastorianus
tttgtgcacggcgagctggttcatg

SEQ ID NO: 114694 - DNA, 25 bp, Saccharomyces pastorianus
atgggattgtctgttttacgaggaa

SEQ ID NO: 114695 - DNA, 25 bp, Saccharomyces pastorianus
attcaacatcagaggcagatttgcc

SEQ ID NO: 114696 - DNA, 25 bp, Saccharomyces pastorianus
tcatacagacattccctaagacatt

SEQ ID NO: 114697 - DNA, 25 bp, Saccharomyces pastorianus
gtcgaaaatttgttgccgctcagcg

SEQ ID NO: 114698 - DNA, 25 bp, Saccharomyces pastorianus
gccgctcagcgtctcaaatttaaga

SEQ ID NO: 114699 - DNA, 25 bp, Saccharomyces pastorianus
gaggaatcacattttctattcaaag

SEQ ID NO: 114700 - DNA, 25 bp, Saccharomyces pastorianus
aattgagcgagcatgacctttcgaa

SEQ ID NO: 114701 - DNA, 25 bp, Saccharomyces pastorianus
ggtccttagtgagcgacatcggtaa

SEQ ID NO: 114702 - DNA, 25 bp, Saccharomyces pastorianus
tagtttcgagtgatcaacctggtga

SEQ ID NO: 114703 - DNA, 25 bp, Saccharomyces pastorianus
gaagaaccatttccgctgagtgaac

SEQ ID NO: 114704 - DNA, 25 bp, Saccharomyces pastorianus
atagggctccaaaattgcacttcaa

SEQ ID NO: 114705 - DNA, 25 bp, Saccharomyces pastorianus
aacctggtgatgaggctacagctga

SEQ ID NO: 114706 - DNA, 25 bp, Saccharomyces pastorianus
acgtttgcaacagcaggactggtct

SEQ ID NO: 114707 - DNA, 25 bp, Saccharomyces pastorianus
acggccttgattctgaggtggcaaa

SEQ ID NO: 114708 - DNA, 25 bp, Saccharomyces pastorianus
ttgaggcccactacagaagaagctg

SEQ ID NO: 114709 - DNA, 25 bp, Saccharomyces pastorianus
caaagctaatgtgtcttctggaaca

SEQ ID NO: 114710 - DNA, 25 bp, Saccharomyces pastorianus
gaatatacagagaagcacggccttg

SEQ ID NO: 114711 - DNA, 25 bp, Saccharomyces pastorianus
atgactatcccttattgaggcccac

SEQ ID NO: 114712 - DNA, 25 bp, Saccharomyces pastorianus
aagggtctcgcgttgatcgacctaa

SEQ ID NO: 114713 - DNA, 25 bp, Saccharomyces pastorianus
cagattcagggcagcgcggtcattg

SEQ ID NO: 114714 - DNA, 25 bp, Saccharomyces pastorianus
agctgaagttgtctccgaatgcgga

SEQ ID NO: 114715 - DNA, 25 bp, Saccharomyces pastorianus
agagtactcgatatccaagggtggc

SEQ ID NO: 114716 - DNA, 25 bp, Saccharomyces pastorianus
tacgcggttctgtgtattggccaat

SEQ ID NO: 114717 - DNA, 25 bp, Saccharomyces pastorianus
taaggtacgcagtgccaagggtctc

SEQ ID NO: 114718 - DNA, 25 bp, Saccharomyces pastorianus
gcatttgcttaccaaactggccgat

SEQ ID NO: 114719 - DNA, 25 bp, Saccharomyces pastorianus
gcgcataaacttacacctgcgttat

SEQ ID NO: 114720 - DNA, 25 bp, Saccharomyces pastorianus
aggccattgagcgtcggatagccaa

SEQ ID NO: 114721 - DNA, 25 bp, Saccharomyces pastorianus
acgagattcagatttcagcccttgc

SEQ ID NO: 114722 - DNA, 25 bp, Saccharomyces pastorianus
aagctactttagacaatcccgacga

SEQ ID NO: 114723 - DNA, 25 bp, Saccharomyces pastorianus
caccgctgcgtgctatttgaacaaa

SEQ ID NO: 114724 - DNA, 25 bp, Saccharomyces pastorianus
aagcactgggctaggtacaccgatg

SEQ ID NO: 114725 - DNA, 25 bp, Saccharomyces pastorianus
gctggcacgagtcctatcagatcaa

SEQ ID NO: 114726 - DNA, 25 bp, Saccharomyces pastorianus
tacaccgatggtctctttacactag

SEQ ID NO: 114727 - DNA, 25 bp, Saccharomyces pastorianus
gttctgctactctagtcgacagttg

SEQ ID NO: 114728 - DNA, 25 bp, Saccharomyces pastorianus
tttcacaatgactcttctcctttaa

SEQ ID NO: 114729 - DNA, 25 bp, Saccharomyces pastorianus
aattaaagcgtattctgcccaggga

SEQ ID NO: 114730 - DNA, 25 bp, Saccharomyces pastorianus
aagacttggcaagatccagcgacca

SEQ ID NO: 114731 - DNA, 25 bp, Saccharomyces pastorianus
ttgatcctagatctgcagcctctat

SEQ ID NO: 114732 - DNA, 25 bp, Saccharomyces pastorianus
gaaacgtgtcgatagcatccgattt

SEQ ID NO: 114733 - DNA, 25 bp, Saccharomyces pastorianus
gttacagctgttgaactgggacctc

SEQ ID NO: 114734 - DNA, 25 bp, Saccharomyces pastorianus
gatatcgtgccgttatgcctaagga

SEQ ID NO: 114735 - DNA, 25 bp, Saccharomyces pastorianus
acatctctttttacaggcccatatt

SEQ ID NO: 114736 - DNA, 25 bp, Saccharomyces pastorianus
gacgatctcgaagcacgcaggctat

SEQ ID NO: 114737 - DNA, 25 bp, Saccharomyces pastorianus
tacatctgtgccaccttggaaaggt

SEQ ID NO: 114738 - DNA, 25 bp, Saccharomyces pastorianus
tacagtgtgttgcatctcacccaga

SEQ ID NO: 114739 - DNA, 25 bp, Saccharomyces pastorianus
aacgctctagttcttctacagtgtg

SEQ ID NO: 114740 - DNA, 25 bp, Saccharomyces pastorianus
ggttgagcacttgaccgtgagcaca

SEQ ID NO: 114741 - DNA, 25 bp, Saccharomyces pastorianus
ggaatcttcttctgagctttccaag

SEQ ID NO: 114742 - DNA, 25 bp, Saccharomyces pastorianus
gacagtcgccattttcattttacag

SEQ ID NO: 114743 - DNA, 25 bp, Saccharomyces pastorianus
gttctacgccgtaactaatgtctta

SEQ ID NO: 114744 - DNA, 25 bp, Saccharomyces pastorianus
atagtcttacctgccaaactgagag

SEQ ID NO: 114745 - DNA, 25 bp, Saccharomyces pastorianus
agttgcttgctttcatttctggaga

SEQ ID NO: 114746 - DNA, 25 bp, Saccharomyces pastorianus
atcagggtcgaaagagcccaatttc

SEQ ID NO: 114747 - DNA, 25 bp, Saccharomyces pastorianus
tgttgcaaaatcatgaccggacgtt

SEQ ID NO: 114748 - DNA, 25 bp, Saccharomyces pastorianus
agcgacggtcgtctttaagaacaat

SEQ ID NO: 114749 - DNA, 25 bp, Saccharomyces pastorianus
gatcgaacggtgatatttgccaacg

SEQ ID NO: 114750 - DNA, 25 bp, Saccharomyces pastorianus
gggaacccctttgcaagctatatgt

SEQ ID NO: 114751 - DNA, 25 bp, Saccharomyces pastorianus
gggatgctttgatcacttattccaa

SEQ ID NO: 114752 - DNA, 25 bp, Saccharomyces pastorianus
gaacgagtcgatcttcctgggaaaa

SEQ ID NO: 114753 - DNA, 25 bp, Saccharomyces pastorianus
gaccggacgttattttgatgggcaa

SEQ ID NO: 114754 - DNA, 25 bp, Saccharomyces pastorianus
gagttcaacggacctgagcctccaa

SEQ ID NO: 114755 - DNA, 25 bp, Saccharomyces pastorianus
gtatatctgtatctcccaataaggg

SEQ ID NO: 114756 - DNA, 25 bp, Saccharomyces pastorianus
accgttgggtctaagggcacatctc

SEQ ID NO: 114757 - DNA, 25 bp, Saccharomyces pastorianus
gctaaggctattgcggctattgaaa

SEQ ID NO: 114758 - DNA, 25 bp, Saccharomyces pastorianus
gaaagttccactacaatctaccgat

SEQ ID NO: 114759 - DNA, 25 bp, Saccharomyces pastorianus
aagcttggtctggtaactggtccca

SEQ ID NO: 114760 - DNA, 25 bp, Saccharomyces pastorianus
agagtaccactacaggctagaccca

SEQ ID NO: 114761 - DNA, 25 bp, Saccharomyces pastorianus
agtttacagctcgttactacacacc

SEQ ID NO: 114762 - DNA, 25 bp, Saccharomyces pastorianus
ggaggcttctagagcatccgctaag

SEQ ID NO: 114763 - DNA, 25 bp, Saccharomyces pastorianus
ttgggtgccagttgtgtctaattct

SEQ ID NO: 114764 - DNA, 25 bp, Saccharomyces pastorianus
tctaccgattgctttggaggcttct

SEQ ID NO: 114765 - DNA, 25 bp, Saccharomyces pastorianus
ggctacatttgcaaccaggcgaggt

SEQ ID NO: 114766 - DNA, 25 bp, Saccharomyces pastorianus
tggatttaccaacgttggcgccaaa

SEQ ID NO: 114767 - DNA, 25 bp, Saccharomyces pastorianus
atctgcttcagtttccctggttaaa

SEQ ID NO: 114768 - DNA, 25 bp, Saccharomyces pastorianus
aatgctatcaagtatcggcccacat

SEQ ID NO: 114769 - DNA, 25 bp, Saccharomyces pastorianus
ggcccacatctgtcaagctgttgaa

SEQ ID NO: 114770 - DNA, 25 bp, Saccharomyces pastorianus
attgtgcagtatttgagcggcgctc

SEQ ID NO: 114771 - DNA, 25 bp, Saccharomyces pastorianus
actacccttgggagctgtatacaga

SEQ ID NO: 114772 - DNA, 25 bp, Saccharomyces pastorianus
ataaggaccctgatgtaccgcttgt

SEQ ID NO: 114773 - DNA, 25 bp, Saccharomyces pastorianus
ataagcccgtgctagacaatccgtt

SEQ ID NO: 114774 - DNA, 25 bp, Saccharomyces pastorianus
gctgctgcaatcctctatcataaat

SEQ ID NO: 114775 - DNA, 25 bp, Saccharomyces pastorianus
atatggcgcccatgacggttaaact

SEQ ID NO: 114776 - DNA, 25 bp, Saccharomyces pastorianus
gagtgccatggataccttcaagtcg

SEQ ID NO: 114777 - DNA, 25 bp, Saccharomyces pastorianus
gcgcgtgcatgatcagccattgatt

SEQ ID NO: 114778 - DNA, 25 bp, Saccharomyces pastorianus
agccgatttgctactttgacttaca

SEQ ID NO: 114779 - DNA, 25 bp, Saccharomyces pastorianus
acttacagttgtcgatgaacgtcaa

SEQ ID NO: 114780 - DNA, 25 bp, Saccharomyces pastorianus
ttaacgagtttgtccactgtttcct

SEQ ID NO: 114781 - DNA, 25 bp, Saccharomyces pastorianus
aattccagagtttatgcatgacgag

SEQ ID NO: 114782 - DNA, 25 bp, Saccharomyces pastorianus
gcatgacgagtctgatattccgatt

SEQ ID NO: 114783 - DNA, 25 bp, Saccharomyces pastorianus
ggtgactccaacgtatctcaaagga

SEQ ID NO: 114784 - DNA, 25 bp, Saccharomyces pastorianus
gtccactgtttcctctgatgggaag

SEQ ID NO: 114785 - DNA, 25 bp, Saccharomyces pastorianus
gagttaacccaggtgagtagcatca

SEQ ID NO: 114786 - DNA, 25 bp, Saccharomyces pastorianus
gatattccgattttgtcgcaagggt

SEQ ID NO: 114787 - DNA, 25 bp, Saccharomyces pastorianus
gtcgcaagggtttgatgcttttgat

SEQ ID NO: 114788 - DNA, 25 bp, Saccharomyces pastorianus
ggcatacttgcggacgggaaactag

SEQ ID NO: 114789 - DNA, 25 bp, Saccharomyces pastorianus
tactttggcgattggctgatttcat

SEQ ID NO: 114790 - DNA, 25 bp, Saccharomyces pastorianus
gatgagcacaagtgccgcctgaaat

SEQ ID NO: 114791 - DNA, 25 bp, Saccharomyces pastorianus
tattactactcgttgtacttcgcca

SEQ ID NO: 114792 - DNA, 25 bp, Saccharomyces pastorianus
catgctagcgtttggtgacttaagt

SEQ ID NO: 114793 - DNA, 25 bp, Saccharomyces pastorianus
tgtctgcatcaccattacctgaaga

SEQ ID NO: 114794 - DNA, 25 bp, Saccharomyces pastorianus
gatgggtttggtttcatgctagcgt

SEQ ID NO: 114795 - DNA, 25 bp, Saccharomyces pastorianus
ttacttgagtgtttcccctgtggaa

SEQ ID NO: 114796 - DNA, 25 bp, Saccharomyces pastorianus
gtacttcgccacgttgttattacac

SEQ ID NO: 114797 - DNA, 25 bp, Saccharomyces pastorianus
cattggtcttggttaatttcttgca

SEQ ID NO: 114798 - DNA, 25 bp, Saccharomyces pastorianus
tacctactcattacaagcgcgttac

SEQ ID NO: 114799 - DNA, 25 bp, Saccharomyces pastorianus
actcccttgacatattactactcgt

SEQ ID NO: 114800 - DNA, 25 bp, Saccharomyces pastorianus
gcagactactcataatcacgtgata

SEQ ID NO: 114801 - DNA, 25 bp, Saccharomyces pastorianus
cacttgcctattatggacagccagt

SEQ ID NO: 114802 - DNA, 25 bp, Saccharomyces pastorianus
tgatatttcttttcactctcttcat

SEQ ID NO: 114803 - DNA, 25 bp, Saccharomyces pastorianus
aaatcgcagactactcataatcacg

SEQ ID NO: 114804 - DNA, 25 bp, Saccharomyces pastorianus
atgacacttgcctattatggacagc

SEQ ID NO: 114805 - DNA, 25 bp, Saccharomyces pastorianus
ctttacgctctctgccagtattagt

SEQ ID NO: 114806 - DNA, 25 bp, Saccharomyces pastorianus
tgtgccatatattgccccctttacg

SEQ ID NO: 114807 - DNA, 25 bp, Saccharomyces pastorianus
gacagccagtaaagatgtgccatat

SEQ ID NO: 114808 - DNA, 25 bp, Saccharomyces pastorianus
aatcacgtgatatttcttttcactc

SEQ ID NO: 114809 - DNA, 25 bp, Saccharomyces pastorianus
tacgctctctgccagtattagtgga

SEQ ID NO: 114810 - DNA, 25 bp, Saccharomyces pastorianus
atttcttttcactctcttcataaag

SEQ ID NO: 114811 - DNA, 25 bp, Saccharomyces pastorianus
gtttgcttatattttcccgactgaa

SEQ ID NO: 114812 - DNA, 25 bp, Saccharomyces pastorianus
ttgattcctcaagcaccattacaca

SEQ ID NO: 114813 - DNA, 25 bp, Saccharomyces pastorianus
ttacgatttcgcactattgggactt

SEQ ID NO: 114814 - DNA, 25 bp, Saccharomyces pastorianus
atcggctttcccttagtattgcttt

SEQ ID NO: 114815 - DNA, 25 bp, Saccharomyces pastorianus
attgggacttaccacttgcatcagc

SEQ ID NO: 114816 - DNA, 25 bp, Saccharomyces pastorianus
tcacaaatactatagcggccatcgg

SEQ ID NO: 114817 - DNA, 25 bp, Saccharomyces pastorianus
gatatttctttcctttagcctgacg

SEQ ID NO: 114818 - DNA, 25 bp, Saccharomyces pastorianus
aggagaaatccctcaggcagtactt

SEQ ID NO: 114819 - DNA, 25 bp, Saccharomyces pastorianus
ggcgcccaatggtttgattcctcaa

SEQ ID NO: 114820 - DNA, 25 bp, Saccharomyces pastorianus
gttagtttctttctcgtttgcttat

SEQ ID NO: 114821 - DNA, 25 bp, Saccharomyces pastorianus
ttacaaatacgtttcagggcctgat

SEQ ID NO: 114822 - DNA, 25 bp, Saccharomyces pastorianus
aagagcgacgcttttgactttgaaa

SEQ ID NO: 114823 - DNA, 25 bp, Saccharomyces pastorianus
aatcctcttcagatgggtcatccac

SEQ ID NO: 114824 - DNA, 25 bp, Saccharomyces pastorianus
ttgacgataggcgacaaaacccaag

SEQ ID NO: 114825 - DNA, 25 bp, Saccharomyces pastorianus
gtcatccacagataattcaaccgca

SEQ ID NO: 114826 - DNA, 25 bp, Saccharomyces pastorianus
gaaagcgcaattgttcagactgaat

SEQ ID NO: 114827 - DNA, 25 bp, Saccharomyces pastorianus
agtagcggattgcatgcgtcttcaa

SEQ ID NO: 114828 - DNA, 25 bp, Saccharomyces pastorianus
aaaggctcctcaacgcaagatacaa

SEQ ID NO: 114829 - DNA, 25 bp, Saccharomyces pastorianus
tcttctctagcagattctactacaa

SEQ ID NO: 114830 - DNA, 25 bp, Saccharomyces pastorianus
gtagcgcggattctagttcaccaga

SEQ ID NO: 114831 - DNA, 25 bp, Saccharomyces pastorianus
attcaaccgcagatagttcatcaga

SEQ ID NO: 114832 - DNA, 25 bp, Saccharomyces pastorianus
gggcatcttctggagacgagaactc

SEQ ID NO: 114833 - DNA, 25 bp, Saccharomyces pastorianus
cagacagggtgttccatatctcggt

SEQ ID NO: 114834 - DNA, 25 bp, Saccharomyces pastorianus
atatctcggtgttgtttgcactgct

SEQ ID NO: 114835 - DNA, 25 bp, Saccharomyces pastorianus
tacatctccttgattcttttagccg

SEQ ID NO: 114836 - DNA, 25 bp, Saccharomyces pastorianus
cgtgttctttactctttagctagga

SEQ ID NO: 114837 - DNA, 25 bp, Saccharomyces pastorianus
gattactgttgtatctgccgctaat

SEQ ID NO: 114838 - DNA, 25 bp, Saccharomyces pastorianus
attgatgccttatggtgcctactac

SEQ ID NO: 114839 - DNA, 25 bp, Saccharomyces pastorianus
cgttatgttcatcggttgccagata

SEQ ID NO: 114840 - DNA, 25 bp, Saccharomyces pastorianus
attcatccaagggttccaagcgttc

SEQ ID NO: 114841 - DNA, 25 bp, Saccharomyces pastorianus
caagcgttctgtccgttcaaagttt

SEQ ID NO: 114842 - DNA, 25 bp, Saccharomyces pastorianus
ctggttattcatctctttggcacat

SEQ ID NO: 114843 - DNA, 25 bp, Saccharomyces pastorianus
gcagccttttttgtcaccgtgatca

SEQ ID NO: 114844 - DNA, 25 bp, Saccharomyces pastorianus
tacaaactgtcttctactctggcgt

SEQ ID NO: 114845 - DNA, 25 bp, Saccharomyces pastorianus
tcatcctagttccttttcttaacgg

SEQ ID NO: 114846 - DNA, 25 bp, Saccharomyces pastorianus
tgaccaacgtgaccatgccatttaa

SEQ ID NO: 114847 - DNA, 25 bp, Saccharomyces pastorianus
gaattatggactctggcaacttttt

SEQ ID NO: 114848 - DNA, 25 bp, Saccharomyces pastorianus
cattcaaccccgaagacttgtacta

SEQ ID NO: 114849 - DNA, 25 bp, Saccharomyces pastorianus
gaagcttggcttgtatcttttgatc

SEQ ID NO: 114850 - DNA, 25 bp, Saccharomyces pastorianus
gcaattacttcctattcgtctatgg

SEQ ID NO: 114851 - DNA, 25 bp, Saccharomyces pastorianus
gtattttcaagtcagcacccgttat

SEQ ID NO: 114852 - DNA, 25 bp, Saccharomyces pastorianus
gaactgttgtgctatgtcggctaca

SEQ ID NO: 114853 - DNA, 25 bp, Saccharomyces pastorianus
tttccatcagcaaatcgaccgtcaa

SEQ ID NO: 114854 - DNA, 25 bp, Saccharomyces pastorianus
agttcaatttactaagccgctccgg

SEQ ID NO: 114855 - DNA, 25 bp, Saccharomyces pastorianus
ttccctatctgcacttcgtgaggaa

SEQ ID NO: 114856 - DNA, 25 bp, Saccharomyces pastorianus
acgatgcgagtattttctctaggaa

SEQ ID NO: 114857 - DNA, 25 bp, Saccharomyces pastorianus
gacttttggctattttccaagctat

SEQ ID NO: 114858 - DNA, 25 bp, Saccharomyces pastorianus
taaggcggagagtggttccctatct

SEQ ID NO: 114859 - DNA, 25 bp, Saccharomyces pastorianus
tacagccttctttatttgctattga

SEQ ID NO: 114860 - DNA, 25 bp, Saccharomyces pastorianus
gttaaccctagatatttacagcctt

SEQ ID NO: 114861 - DNA, 25 bp, Saccharomyces pastorianus
gctcatagcctcatatatttgttca

SEQ ID NO: 114862 - DNA, 25 bp, Saccharomyces pastorianus
aaatcgtgatgaccttgagaacagt

SEQ ID NO: 114863 - DNA, 25 bp, Saccharomyces pastorianus
atttcgaagtatctgctcatagcct

SEQ ID NO: 114864 - DNA, 25 bp, Saccharomyces pastorianus
tccaagctatattccctattcaagg

SEQ ID NO: 114865 - DNA, 25 bp, Saccharomyces pastorianus
tgaaccactggctctttacaaaagt

SEQ ID NO: 114866 - DNA, 25 bp, Saccharomyces pastorianus
tgctcgggatgttctggtgcagtca

SEQ ID NO: 114867 - DNA, 25 bp, Saccharomyces pastorianus
gaaccagacgtttccaaaatagata

SEQ ID NO: 114868 - DNA, 25 bp, Saccharomyces pastorianus
gatatatcccttgaaaagcaattag

SEQ ID NO: 114869 - DNA, 25 bp, Saccharomyces pastorianus
gtcatgacctgctcgggatgttctg

SEQ ID NO: 114870 - DNA, 25 bp, Saccharomyces pastorianus
ttgacgaaattagaaccagacgttt

SEQ ID NO: 114871 - DNA, 25 bp, Saccharomyces pastorianus
gacctgctcgggatgttctggtgca

SEQ ID NO: 114872 - DNA, 25 bp, Saccharomyces pastorianus
gttctggtgcagtcaataaagtttt

SEQ ID NO: 114873 - DNA, 25 bp, Saccharomyces pastorianus
tatactacacttccttacgatttta

SEQ ID NO: 114874 - DNA, 25 bp, Saccharomyces pastorianus
gatgtatatactacacttccttacg

SEQ ID NO: 114875 - DNA, 25 bp, Saccharomyces pastorianus
gacgtttccaaaatagatatatccc

SEQ ID NO: 114876 - DNA, 25 bp, Saccharomyces pastorianus
cgggatgttctggtgcagtcaataa

SEQ ID NO: 114877 - DNA, 25 bp, Saccharomyces pastorianus
gaaattgttcgtccactgcagaaaa

SEQ ID NO: 114878 - DNA, 25 bp, Saccharomyces pastorianus
gagaaatccatcgtgggacgccacc

SEQ ID NO: 114879 - DNA, 25 bp, Saccharomyces pastorianus
gggatttttatctttttgcgacaga

SEQ ID NO: 114880 - DNA, 25 bp, Saccharomyces pastorianus
ggacgccaccattgagaaactgcta

SEQ ID NO: 114881 - DNA, 25 bp, Saccharomyces pastorianus
agagttattgtttgccgacactccc

SEQ ID NO: 114882 - DNA, 25 bp, Saccharomyces pastorianus
actcccctgcgaaggaatgccattg

SEQ ID NO: 114883 - DNA, 25 bp, Saccharomyces pastorianus
gaaactgctaccttatatcttgaag

SEQ ID NO: 114884 - DNA, 25 bp, Saccharomyces pastorianus
gaaatatcgtattgtctgtcaacta

SEQ ID NO: 114885 - DNA, 25 bp, Saccharomyces pastorianus
ggcatcaattgaccgaatttcgtga

SEQ ID NO: 114886 - DNA, 25 bp, Saccharomyces pastorianus
aatttgggtgagctcgtatctttat

SEQ ID NO: 114887 - DNA, 25 bp, Saccharomyces pastorianus
gaacctgctggaaactaaactgaac

SEQ ID NO: 114888 - DNA, 25 bp, Saccharomyces pastorianus
gaccctggacttggttttgctaaga

SEQ ID NO: 114889 - DNA, 25 bp, Saccharomyces pastorianus
taataccgacattcagcagctagac

SEQ ID NO: 114890 - DNA, 25 bp, Saccharomyces pastorianus
agactttgctactggagcggtggta

SEQ ID NO: 114891 - DNA, 25 bp, Saccharomyces pastorianus
ttcggcagcgacatggttagggtcc

SEQ ID NO: 114892 - DNA, 25 bp, Saccharomyces pastorianus
agcgtcgtgtattggtttcggcagc

SEQ ID NO: 114893 - DNA, 25 bp, Saccharomyces pastorianus
attcgcaagtgtatgttaacctcag

SEQ ID NO: 114894 - DNA, 25 bp, Saccharomyces pastorianus
gttaacctcagaaatatgcccgttt

SEQ ID NO: 114895 - DNA, 25 bp, Saccharomyces pastorianus
ggcaaattctaatcgaccctggact

SEQ ID NO: 114896 - DNA, 25 bp, Saccharomyces pastorianus
taggctggcgcattacgaaaatttt

SEQ ID NO: 114897 - DNA, 25 bp, Saccharomyces pastorianus
gtttgccgtaattgcagagaaccca

SEQ ID NO: 114898 - DNA, 25 bp, Saccharomyces pastorianus
gttttattgggtccatcgcgcaaaa

SEQ ID NO: 114899 - DNA, 25 bp, Saccharomyces pastorianus
gatatcgtctgcatactattttgaa

SEQ ID NO: 114900 - DNA, 25 bp, Saccharomyces pastorianus
aaaggcttacttgtccgtagatgag

SEQ ID NO: 114901 - DNA, 25 bp, Saccharomyces pastorianus
tagtagccgactctgatccaattga

SEQ ID NO: 114902 - DNA, 25 bp, Saccharomyces pastorianus
gcctatgacttactcgaggatacag

SEQ ID NO: 114903 - DNA, 25 bp, Saccharomyces pastorianus
tgtaactacgttttggctccagaaa

SEQ ID NO: 114904 - DNA, 25 bp, Saccharomyces pastorianus
agaacccttcatgcccattgtaatg

SEQ ID NO: 114905 - DNA, 25 bp, Saccharomyces pastorianus
taaaagggcactcacgcacaatcag

SEQ ID NO: 114906 - DNA, 25 bp, Saccharomyces pastorianus
tactgctggattttacggcctgaaa

SEQ ID NO: 114907 - DNA, 25 bp, Saccharomyces pastorianus
aaatcttgctcgtcgaagacaccga

SEQ ID NO: 114908 - DNA, 25 bp, Saccharomyces pastorianus
taccacccatgttgttttcggatga

SEQ ID NO: 114909 - DNA, 25 bp, Saccharomyces pastorianus
gaccgtctgcgggaactgaaactcg

SEQ ID NO: 114910 - DNA, 25 bp, Saccharomyces pastorianus
aaattaaagcacatactggtcctat

SEQ ID NO: 114911 - DNA, 25 bp, Saccharomyces pastorianus
ttagccaattacaaaaccgatcccg

SEQ ID NO: 114912 - DNA, 25 bp, Saccharomyces pastorianus
acgatttgaactctgcggtaacaac

SEQ ID NO: 114913 - DNA, 25 bp, Saccharomyces pastorianus
ggtaacaacactagacgtctgtcat

SEQ ID NO: 114914 - DNA, 25 bp, Saccharomyces pastorianus
atcgatgggaattgctacgtatgga

SEQ ID NO: 114915 - DNA, 25 bp, Saccharomyces pastorianus
gatcccgttttgaagttttatcctg

SEQ ID NO: 114916 - DNA, 25 bp, Saccharomyces pastorianus
acatggcatattggaggtttgtacc

SEQ ID NO: 114917 - DNA, 25 bp, Saccharomyces pastorianus
atggtatatcatgtcaggcaagaat

SEQ ID NO: 114918 - DNA, 25 bp, Saccharomyces pastorianus
gaagaagcttcattactgggagtat

SEQ ID NO: 114919 - DNA, 25 bp, Saccharomyces pastorianus
gtggtaatttactccactctaaatc

SEQ ID NO: 114920 - DNA, 25 bp, Saccharomyces pastorianus
atactggtcctataaccgggatcaa

SEQ ID NO: 114921 - DNA, 25 bp, Saccharomyces pastorianus
tggtcaacctctcgttaccggtatt

SEQ ID NO: 114922 - DNA, 25 bp, Saccharomyces pastorianus
aagatgcctactgattctggcagaa

SEQ ID NO: 114923 - DNA, 25 bp, Saccharomyces pastorianus
aacaaatctggtagcatatcgtcga

SEQ ID NO: 114924 - DNA, 25 bp, Saccharomyces pastorianus
agatggagccctgccattgagaact

SEQ ID NO: 114925 - DNA, 25 bp, Saccharomyces pastorianus
atttgaccccactgctcaattgaat

SEQ ID NO: 114926 - DNA, 25 bp, Saccharomyces pastorianus
ttgtgactatcaacacggttacagt

SEQ ID NO: 114927 - DNA, 25 bp, Saccharomyces pastorianus
atatcgtcgatatctccagtaccct

SEQ ID NO: 114928 - DNA, 25 bp, Saccharomyces pastorianus
caaccaaccattaccttctcaggga

SEQ ID NO: 114929 - DNA, 25 bp, Saccharomyces pastorianus
agtaccctacggcaatgcaccattg

SEQ ID NO: 114930 - DNA, 25 bp, Saccharomyces pastorianus
tattattcctatgcacaggctcacg

SEQ ID NO: 114931 - DNA, 25 bp, Saccharomyces pastorianus
gcaacctatgatgcagcaaccgtat

SEQ ID NO: 114932 - DNA, 25 bp, Saccharomyces pastorianus
gggttgaattacagacaagatcctt

SEQ ID NO: 114933 - DNA, 25 bp, Saccharomyces pastorianus
gaatttccagctaatcgtgatcact

SEQ ID NO: 114934 - DNA, 25 bp, Saccharomyces pastorianus
gtaattgcactagacgaacctacca

SEQ ID NO: 114935 - DNA, 25 bp, Saccharomyces pastorianus
caagatcctttgttactgacgacat

SEQ ID NO: 114936 - DNA, 25 bp, Saccharomyces pastorianus
agctctatctgaaacatttggcgca

SEQ ID NO: 114937 - DNA, 25 bp, Saccharomyces pastorianus
gcgggtcaaaaagttcttgcatcga

SEQ ID NO: 114938 - DNA, 25 bp, Saccharomyces pastorianus
tcgattattatcaggctagctctat

SEQ ID NO: 114939 - DNA, 25 bp, Saccharomyces pastorianus
agaggacgatgttccgcgggtcaaa

SEQ ID NO: 114940 - DNA, 25 bp, Saccharomyces pastorianus
catttggcgcaaattgtggcgtaat

SEQ ID NO: 114941 - DNA, 25 bp, Saccharomyces pastorianus
gggaaaatcatacaactatcgtgtt

SEQ ID NO: 114942 - DNA, 25 bp, Saccharomyces pastorianus
agcggcatttactgatcacttcttc

SEQ ID NO: 114943 - DNA, 25 bp, Saccharomyces pastorianus
gggtgaccaaagagcaaaggtttgc

SEQ ID NO: 114944 - DNA, 25 bp, Saccharomyces pastorianus
aaaaaggactttgcatgtaatggta

SEQ ID NO: 114945 - DNA, 25 bp, Saccharomyces pastorianus
ctacggtgcaaggtgtcccagagga

SEQ ID NO: 114946 - DNA, 25 bp, Saccharomyces pastorianus
aggtttgcgaatttatgatctccca

SEQ ID NO: 114947 - DNA, 25 bp, Saccharomyces pastorianus
gattattcaattgcagggtgaccaa

SEQ ID NO: 114948 - DNA, 25 bp, Saccharomyces pastorianus
ggtaacattgtcaaggatccagaaa

SEQ ID NO: 114949 - DNA, 25 bp, Saccharomyces pastorianus
ggactttgcatgtaatggtaacatt

SEQ ID NO: 114950 - DNA, 25 bp, Saccharomyces pastorianus
tttaactacggtgcaaggtgtccca

SEQ ID NO: 114951 - DNA, 25 bp, Saccharomyces pastorianus
ggtgtcccagaggagtatgatttaa

SEQ ID NO: 114952 - DNA, 25 bp, Saccharomyces pastorianus
gcgaatttatgatctcccaactggg

SEQ ID NO: 114953 - DNA, 25 bp, Saccharomyces pastorianus
gaatttatgatctcccaactgggat

SEQ ID NO: 114954 - DNA, 25 bp, Saccharomyces pastorianus
gaagcacatagagcgtccggacggt

SEQ ID NO: 114955 - DNA, 25 bp, Saccharomyces pastorianus
tactgggtgaccattccaactttgt

SEQ ID NO: 114956 - DNA, 25 bp, Saccharomyces pastorianus
aagacccctggtctgtcaaatgcta

SEQ ID NO: 114957 - DNA, 25 bp, Saccharomyces pastorianus
aactggtcatcagagtgcagcccga

SEQ ID NO: 114958 - DNA, 25 bp, Saccharomyces pastorianus
gatgccgctgtgtacctaaagttta

SEQ ID NO: 114959 - DNA, 25 bp, Saccharomyces pastorianus
gaaatttacccctacggatcaagag

SEQ ID NO: 114960 - DNA, 25 bp, Saccharomyces pastorianus
aatgctacccaagtcacagatctga

SEQ ID NO: 114961 - DNA, 25 bp, Saccharomyces pastorianus
taagcccgcctacgtggatgatgac

SEQ ID NO: 114962 - DNA, 25 bp, Saccharomyces pastorianus
aaagcggtcgcatcgggtgtcttca

SEQ ID NO: 114963 - DNA, 25 bp, Saccharomyces pastorianus
catcatgatgcgtgccggtaaggct

SEQ ID NO: 114964 - DNA, 25 bp, Saccharomyces pastorianus
gttgataagagacgccctactgggt

SEQ ID NO: 114965 - DNA, 25 bp, Saccharomyces pastorianus
gcatgaacggtggtggcctactcaa

SEQ ID NO: 114966 - DNA, 25 bp, Saccharomyces pastorianus
gatgatcgcataatagccgccgcca

SEQ ID NO: 114967 - DNA, 25 bp, Saccharomyces pastorianus
aatggtagatcctctaaccctggga

SEQ ID NO: 114968 - DNA, 25 bp, Saccharomyces pastorianus
aagaggaacatcaccgctctgcgga

SEQ ID NO: 114969 - DNA, 25 bp, Saccharomyces pastorianus
tgtcgagtaccgattgctgcacgat

SEQ ID NO: 114970 - DNA, 25 bp, Saccharomyces pastorianus
gccagcgagctttccgggtttagaa

SEQ ID NO: 114971 - DNA, 25 bp, Saccharomyces pastorianus
acgcgtgtccgggtgcatgcatgaa

SEQ ID NO: 114972 - DNA, 25 bp, Saccharomyces pastorianus
aatctggtgcgtaaactgacctcgg

SEQ ID NO: 114973 - DNA, 25 bp, Saccharomyces pastorianus
ggtggctatgcctaccagtacgtaa

SEQ ID NO: 114974 - DNA, 25 bp, Saccharomyces pastorianus
agtccactgggcgtcgaatctggga

SEQ ID NO: 114975 - DNA, 25 bp, Saccharomyces pastorianus
gtacgtaacggctgtccaacgacta

SEQ ID NO: 114976 - DNA, 25 bp, Saccharomyces pastorianus
attccccaaacgactactgcgagta

SEQ ID NO: 114977 - DNA, 25 bp, Saccharomyces pastorianus
ctgattctgatccaaacactcctaa

SEQ ID NO: 114978 - DNA, 25 bp, Saccharomyces pastorianus
agttcaacttctatttccatcagcg

SEQ ID NO: 114979 - DNA, 25 bp, Saccharomyces pastorianus
gattggcgccacatttttggtgtta

SEQ ID NO: 114980 - DNA, 25 bp, Saccharomyces pastorianus
atcagcgctacttctacatcttcta

SEQ ID NO: 114981 - DNA, 25 bp, Saccharomyces pastorianus
ggaggttgaaccagctgctacagaa

SEQ ID NO: 114982 - DNA, 25 bp, Saccharomyces pastorianus
gtaccgtatcacaatattctgccag

SEQ ID NO: 114983 - DNA, 25 bp, Saccharomyces pastorianus
catcttctatctcaattggtgtgga

SEQ ID NO: 114984 - DNA, 25 bp, Saccharomyces pastorianus
tgcgagtaccgatcctgattctgat

SEQ ID NO: 114985 - DNA, 25 bp, Saccharomyces pastorianus
aagttcccaaatgacgccaacgcag

SEQ ID NO: 114986 - DNA, 25 bp, Saccharomyces pastorianus
catcttgcaagtttgtcttcatcag

SEQ ID NO: 114987 - DNA, 25 bp, Saccharomyces pastorianus
ggaggcgaccatagtgcgtacgttc

SEQ ID NO: 114988 - DNA, 25 bp, Saccharomyces pastorianus
tgagcacgcccagcacttgataatt

SEQ ID NO: 114989 - DNA, 25 bp, Saccharomyces pastorianus
ttattttcaccggatgggccatgtc

SEQ ID NO: 114990 - DNA, 25 bp, Saccharomyces pastorianus
caggtctcctatttatgggcgcaaa

SEQ ID NO: 114991 - DNA, 25 bp, Saccharomyces pastorianus
gaatactcgggattttcctttccag

SEQ ID NO: 114992 - DNA, 25 bp, Saccharomyces pastorianus
gattgcatgtttggaattctaccta

SEQ ID NO: 114993 - DNA, 25 bp, Saccharomyces pastorianus
atcaggcgcatttttggtctacttc

SEQ ID NO: 114994 - DNA, 25 bp, Saccharomyces pastorianus
aggattccttccgaaatcatacgaa

SEQ ID NO: 114995 - DNA, 25 bp, Saccharomyces pastorianus
accttgctcccttttgtttagtatg

SEQ ID NO: 114996 - DNA, 25 bp, Saccharomyces pastorianus
ggtctacttctggatgattgcatgt

SEQ ID NO: 114997 - DNA, 25 bp, Saccharomyces pastorianus
tatctggtggactggtggaatactc

SEQ ID NO: 114998 - DNA, 25 bp, Saccharomyces pastorianus
tggccaaccatgtatacaagactgt

SEQ ID NO: 114999 - DNA, 25 bp, Saccharomyces pastorianus
gcagtgatttcccatgcgaatgcgg

SEQ ID NO: 115000 - DNA, 25 bp, Saccharomyces pastorianus
gaaactagtcttatctgaatcacca

SEQ ID NO: 115001 - DNA, 25 bp, Saccharomyces pastorianus
agatgcagtaggtgcggttccgtca

SEQ ID NO: 115002 - DNA, 25 bp, Saccharomyces pastorianus
atgcgaacaacagccatcacaggaa

SEQ ID NO: 115003 - DNA, 25 bp, Saccharomyces pastorianus
atgcgaatgcggctgcggtatattt

SEQ ID NO: 115004 - DNA, 25 bp, Saccharomyces pastorianus
gtacgacgatgtaacctgtgacaaa

SEQ ID NO: 115005 - DNA, 25 bp, Saccharomyces pastorianus
tgcggttccgtcacaagagcaggaa

SEQ ID NO: 115006 - DNA, 25 bp, Saccharomyces pastorianus
gagatttcctcctgcagtatgctaa

SEQ ID NO: 115007 - DNA, 25 bp, Saccharomyces pastorianus
acaacaaatttatcgcgctatgcga

SEQ ID NO: 115008 - DNA, 25 bp, Saccharomyces pastorianus
aagactattgtacccactagcatcc

SEQ ID NO: 115009 - DNA, 25 bp, Saccharomyces pastorianus
gtatgattactgcagggaaggaccc

SEQ ID NO: 115010 - DNA, 25 bp, Saccharomyces pastorianus
gatcttttctcacactggaactcaa

SEQ ID NO: 115011 - DNA, 25 bp, Saccharomyces pastorianus
gacaggtttggatcttttctcacac

SEQ ID NO: 115012 - DNA, 25 bp, Saccharomyces pastorianus
aaaacgccattccagaattctcggc

SEQ ID NO: 115013 - DNA, 25 bp, Saccharomyces pastorianus
gtagcagtaccgtcgtggaaagtaa

SEQ ID NO: 115014 - DNA, 25 bp, Saccharomyces pastorianus
tctcggcatcaaaaccgttggtttc

SEQ ID NO: 115015 - DNA, 25 bp, Saccharomyces pastorianus
aaaagcgaccgtgaatcgacgcctc

SEQ ID NO: 115016 - DNA, 25 bp, Saccharomyces pastorianus
gggacaactttactcatatttggca

SEQ ID NO: 115017 - DNA, 25 bp, Saccharomyces pastorianus
tatgactacattgcaggacaggttt

SEQ ID NO: 115018 - DNA, 25 bp, Saccharomyces pastorianus
tttttccattcccaaacttgcgatg

SEQ ID NO: 115019 - DNA, 25 bp, Saccharomyces pastorianus
aatctcaccaaagggctctggaagt

SEQ ID NO: 115020 - DNA, 25 bp, Saccharomyces pastorianus
gaaacccctgaacctgttggaaatg

SEQ ID NO: 115021 - DNA, 25 bp, Saccharomyces pastorianus
gaaactcaatcttattccgctgctg

SEQ ID NO: 115022 - DNA, 25 bp, Saccharomyces pastorianus
cgctgctggagctactacatacgga

SEQ ID NO: 115023 - DNA, 25 bp, Saccharomyces pastorianus
gacctgtttcaatgtcctttaaagg

SEQ ID NO: 115024 - DNA, 25 bp, Saccharomyces pastorianus
ttttattgactccatgacgcctgat

SEQ ID NO: 115025 - DNA, 25 bp, Saccharomyces pastorianus
taatgaccagggtgtccggttttcg

SEQ ID NO: 115026 - DNA, 25 bp, Saccharomyces pastorianus
tccggttttcgtcccagataatact

SEQ ID NO: 115027 - DNA, 25 bp, Saccharomyces pastorianus
gaaatttccacttgtaaccagctta

SEQ ID NO: 115028 - DNA, 25 bp, Saccharomyces pastorianus
aatcgctctggtacttttgatacac

SEQ ID NO: 115029 - DNA, 25 bp, Saccharomyces pastorianus
gaattcgaacccaatagacctgttt

SEQ ID NO: 115030 - DNA, 25 bp, Saccharomyces pastorianus
atgacgcctgattctcccgtaaaat

SEQ ID NO: 115031 - DNA, 25 bp, Saccharomyces pastorianus
ggaaccaactactatttgaccactg

SEQ ID NO: 115032 - DNA, 25 bp, Saccharomyces pastorianus
tcaggtctcaggatgtacggtctac

SEQ ID NO: 115033 - DNA, 25 bp, Saccharomyces pastorianus
tttcgttgcaacgagccagtgtcga

SEQ ID NO: 115034 - DNA, 25 bp, Saccharomyces pastorianus
atgacttcaccggttacaggcgcta

SEQ ID NO: 115035 - DNA, 25 bp, Saccharomyces pastorianus
gttagggcgcaagttttatcattag

SEQ ID NO: 115036 - DNA, 25 bp, Saccharomyces pastorianus
ttctggagcagctacgttctctgtt

SEQ ID NO: 115037 - DNA, 25 bp, Saccharomyces pastorianus
ggtcgtgttcgccagagctgctaat

SEQ ID NO: 115038 - DNA, 25 bp, Saccharomyces pastorianus
ggtttcagtgcttcctgggacagaa

SEQ ID NO: 115039 - DNA, 25 bp, Saccharomyces pastorianus
tgattttgccaataacctaccgaag

SEQ ID NO: 115040 - DNA, 25 bp, Saccharomyces pastorianus
tgaccagggtgacaaggctttcgtt

SEQ ID NO: 115041 - DNA, 25 bp, Saccharomyces pastorianus
gttctctgtttctcaagcatcatca

SEQ ID NO: 115042 - DNA, 25 bp, Saccharomyces pastorianus
gtgctgcatattctacaaactcatt

SEQ ID NO: 115043 - DNA, 25 bp, Saccharomyces pastorianus
tattgacccactgacccgtgaaaag

SEQ ID NO: 115044 - DNA, 25 bp, Saccharomyces pastorianus
aagattaccctgatgttcctaaagt

SEQ ID NO: 115045 - DNA, 25 bp, Saccharomyces pastorianus
gttatcgattttatgccagctggtc

SEQ ID NO: 115046 - DNA, 25 bp, Saccharomyces pastorianus
taattcacccttttattgacccact

SEQ ID NO: 115047 - DNA, 25 bp, Saccharomyces pastorianus
acaggtacagcacttggtcttcatg

SEQ ID NO: 115048 - DNA, 25 bp, Saccharomyces pastorianus
ccttggttagcatggactttcttga

SEQ ID NO: 115049 - DNA, 25 bp, Saccharomyces pastorianus
tggtcaagactctctagctttgcta

SEQ ID NO: 115050 - DNA, 25 bp, Saccharomyces pastorianus
agaggtttcaaagcttcggtggtat

SEQ ID NO: 115051 - DNA, 25 bp, Saccharomyces pastorianus
catgatgtttattggccagctctgg

SEQ ID NO: 115052 - DNA, 25 bp, Saccharomyces pastorianus
gctctggtggaaaccgcgcgtgaaa

SEQ ID NO: 115053 - DNA, 25 bp, Saccharomyces pastorianus
ggagatagttttccgcacgtgaccg

SEQ ID NO: 115054 - DNA, 25 bp, Saccharomyces pastorianus
ttgtccatcaaaccggagcctgtta

SEQ ID NO: 115055 - DNA, 25 bp, Saccharomyces pastorianus
ttttcgtacgaaatgccggatctga

SEQ ID NO: 115056 - DNA, 25 bp, Saccharomyces pastorianus
ccaagaaaggcccattgtccatcaa

SEQ ID NO: 115057 - DNA, 25 bp, Saccharomyces pastorianus
tattcaggcctactccgaagacaaa

SEQ ID NO: 115058 - DNA, 25 bp, Saccharomyces pastorianus
gcatgcgcaacgtgtggcctttggt

SEQ ID NO: 115059 - DNA, 25 bp, Saccharomyces pastorianus
caccgtcaatctttctcaatcgtaa

SEQ ID NO: 115060 - DNA, 25 bp, Saccharomyces pastorianus
aagacaaacgctgcaggttctcgac

SEQ ID NO: 115061 - DNA, 25 bp, Saccharomyces pastorianus
aaagatgttacgcagcccatcacgc

SEQ ID NO: 115062 - DNA, 25 bp, Saccharomyces pastorianus
gagaagatccgaatcaccgtcaatc

SEQ ID NO: 115063 - DNA, 25 bp, Saccharomyces pastorianus
gtcaccgcaaatcccgtaacaaagg

SEQ ID NO: 115064 - DNA, 25 bp, Saccharomyces pastorianus
gagattatccaacccaagcgttatg

SEQ ID NO: 115065 - DNA, 25 bp, Saccharomyces pastorianus
gagattgtcatcttcactttcgtct

SEQ ID NO: 115066 - DNA, 25 bp, Saccharomyces pastorianus
gcgagttcagcttgcaatgcttgca

SEQ ID NO: 115067 - DNA, 25 bp, Saccharomyces pastorianus
ttttcatccgaactgacgtcttcta

SEQ ID NO: 115068 - DNA, 25 bp, Saccharomyces pastorianus
tcttctacctctatatccatttcta

SEQ ID NO: 115069 - DNA, 25 bp, Saccharomyces pastorianus
agtagaccaatcttcatcgtcatcc

SEQ ID NO: 115070 - DNA, 25 bp, Saccharomyces pastorianus
agattcctctgtttctgtgtcaacc

SEQ ID NO: 115071 - DNA, 25 bp, Saccharomyces pastorianus
caactcattactccgtttgtcttta

SEQ ID NO: 115072 - DNA, 25 bp, Saccharomyces pastorianus
gattctgccagttttctttcaattt

SEQ ID NO: 115073 - DNA, 25 bp, Saccharomyces pastorianus
gcccttgtctcctagtgatgctaaa

SEQ ID NO: 115074 - DNA, 25 bp, Saccharomyces pastorianus
atcgtcatccgtttgtaagcccttg

SEQ ID NO: 115075 - DNA, 25 bp, Saccharomyces pastorianus
atagtagcaggtcttcatccgttat

SEQ ID NO: 115076 - DNA, 25 bp, Saccharomyces pastorianus
ggctggtcagacttttactatgtaa

SEQ ID NO: 115077 - DNA, 25 bp, Saccharomyces pastorianus
cattatctgggtttttatctgggtg

SEQ ID NO: 115078 - DNA, 25 bp, Saccharomyces pastorianus
gatattaactcttggctggtcagac

SEQ ID NO: 115079 - DNA, 25 bp, Saccharomyces pastorianus
gtggcttcttcaacattatctgggt

SEQ ID NO: 115080 - DNA, 25 bp, Saccharomyces pastorianus
gacagtacttcataagcggctcgaa

SEQ ID NO: 115081 - DNA, 25 bp, Saccharomyces pastorianus
aagagctactttgcgatgacttcaa

SEQ ID NO: 115082 - DNA, 25 bp, Saccharomyces pastorianus
gatcagaagcatgcgtttcgacccc

SEQ ID NO: 115083 - DNA, 25 bp, Saccharomyces pastorianus
gcggctcgaatcacagcaaattttt

SEQ ID NO: 115084 - DNA, 25 bp, Saccharomyces pastorianus
aaatgttggccgcttaagccctcca

SEQ ID NO: 115085 - DNA, 25 bp, Saccharomyces pastorianus
gtttcgacccctaaaagctcatagt

SEQ ID NO: 115086 - DNA, 25 bp, Saccharomyces pastorianus
gtcaaggcccgatatttcggcagaa

SEQ ID NO: 115087 - DNA, 25 bp, Saccharomyces pastorianus
aattttgctcaacgtctgcatagac

SEQ ID NO: 115088 - DNA, 25 bp, Saccharomyces pastorianus
aaatatcttacagtcaaggcccgat

SEQ ID NO: 115089 - DNA, 25 bp, Saccharomyces pastorianus
gttttggctgttggtattccttatc

SEQ ID NO: 115090 - DNA, 25 bp, Saccharomyces pastorianus
aacatcatgctgtccaattttgctc

SEQ ID NO: 115091 - DNA, 25 bp, Saccharomyces pastorianus
gaaatttacggatcaagcatactat

SEQ ID NO: 115092 - DNA, 25 bp, Saccharomyces pastorianus
aggatggattccatagatcaccatt

SEQ ID NO: 115093 - DNA, 25 bp, Saccharomyces pastorianus
tatgtcaacgcgcaggatggattcc

SEQ ID NO: 115094 - DNA, 25 bp, Saccharomyces pastorianus
tgaggtcgcgatttggaaacttaga

SEQ ID NO: 115095 - DNA, 25 bp, Saccharomyces pastorianus
gaaagattccgttgctggctatcaa

SEQ ID NO: 115096 - DNA, 25 bp, Saccharomyces pastorianus
gaactggataatttgaggtcgcgat

SEQ ID NO: 115097 - DNA, 25 bp, Saccharomyces pastorianus
agaaatacccatatggtctccatat

SEQ ID NO: 115098 - DNA, 25 bp, Saccharomyces pastorianus
tgggaaagcaaatcatacgtcggtt

SEQ ID NO: 115099 - DNA, 25 bp, Saccharomyces pastorianus
gtcttctccgaattatagtctcatt

SEQ ID NO: 115100 - DNA, 25 bp, Saccharomyces pastorianus
gaaaacgaaatggtcttctccgaat

SEQ ID NO: 115101 - DNA, 25 bp, Saccharomyces pastorianus
gaggcagaggccagtattcatgaga

SEQ ID NO: 115102 - DNA, 25 bp, Saccharomyces pastorianus
tttgagtcctttttgtctaggaaca

SEQ ID NO: 115103 - DNA, 25 bp, Saccharomyces pastorianus
tagactgactttccctccattagat

SEQ ID NO: 115104 - DNA, 25 bp, Saccharomyces pastorianus
ttgttggtcaaaacgctccagagat

SEQ ID NO: 115105 - DNA, 25 bp, Saccharomyces pastorianus
acaatgatagactgactttccctcc

SEQ ID NO: 115106 - DNA, 25 bp, Saccharomyces pastorianus
gaccgagggaggaacaagctgcttt

SEQ ID NO: 115107 - DNA, 25 bp, Saccharomyces pastorianus
ttgaccaattgatgaggcagaggcc

SEQ ID NO: 115108 - DNA, 25 bp, Saccharomyces pastorianus
catattcctcaaccggcagtagaag

SEQ ID NO: 115109 - DNA, 25 bp, Saccharomyces pastorianus
ttacatttcgatcctcatattcctc

SEQ ID NO: 115110 - DNA, 25 bp, Saccharomyces pastorianus
aacacagtcagtaggcattgccggc

SEQ ID NO: 115111 - DNA, 25 bp, Saccharomyces pastorianus
aatctgctattatcaatgttcttgc

SEQ ID NO: 115112 - DNA, 25 bp, Saccharomyces pastorianus
gagactacgtagatattggtgcaat

SEQ ID NO: 115113 - DNA, 25 bp, Saccharomyces pastorianus
gatccctcgatgctcattggtattt

SEQ ID NO: 115114 - DNA, 25 bp, Saccharomyces pastorianus
gattcatttgtagagtcgtgccata

SEQ ID NO: 115115 - DNA, 25 bp, Saccharomyces pastorianus
gagtcgtgccataccagtaaatttg

SEQ ID NO: 115116 - DNA, 25 bp, Saccharomyces pastorianus
caactatcggaaatggatccctcga

SEQ ID NO: 115117 - DNA, 25 bp, Saccharomyces pastorianus
tgcaatattcccacacacaacaaat

SEQ ID NO: 115118 - DNA, 25 bp, Saccharomyces pastorianus
taggccgtcttcatcgttgtatttt

SEQ ID NO: 115119 - DNA, 25 bp, Saccharomyces pastorianus
ggtttattgcaaatgctggatcgta

SEQ ID NO: 115120 - DNA, 25 bp, Saccharomyces pastorianus
ggaattagctgatatgctcaatgat

SEQ ID NO: 115121 - DNA, 25 bp, Saccharomyces pastorianus
gctggatcgtaatagaagactcaaa

SEQ ID NO: 115122 - DNA, 25 bp, Saccharomyces pastorianus
tagtcatcgcaattcaaacttgaag

SEQ ID NO: 115123 - DNA, 25 bp, Saccharomyces pastorianus
gttacaagtcgaacggtttattgca

SEQ ID NO: 115124 - DNA, 25 bp, Saccharomyces pastorianus
gagtggcaaagctcacattctcaac

SEQ ID NO: 115125 - DNA, 25 bp, Saccharomyces pastorianus
atcacaatcagcagaccgttacaag

SEQ ID NO: 115126 - DNA, 25 bp, Saccharomyces pastorianus
tcttcgacttcgttttcacttgtga

SEQ ID NO: 115127 - DNA, 25 bp, Saccharomyces pastorianus
gataagcctaatgtgtactcatttg

SEQ ID NO: 115128 - DNA, 25 bp, Saccharomyces pastorianus
gatgacattccctttgaagattgta

SEQ ID NO: 115129 - DNA, 25 bp, Saccharomyces pastorianus
gcctggtctatcgatagataagcct

SEQ ID NO: 115130 - DNA, 25 bp, Saccharomyces pastorianus
gaccaaggctatgtcgttgtcgatt

SEQ ID NO: 115131 - DNA, 25 bp, Saccharomyces pastorianus
agcggcacctaccacttaaattgtg

SEQ ID NO: 115132 - DNA, 25 bp, Saccharomyces pastorianus
aagaccgggcaatttaacgctcagg

SEQ ID NO: 115133 - DNA, 25 bp, Saccharomyces pastorianus
atttcgcactcctgatagcattagc

SEQ ID NO: 115134 - DNA, 25 bp, Saccharomyces pastorianus
atcttgcacactactcgaacgaggt

SEQ ID NO: 115135 - DNA, 25 bp, Saccharomyces pastorianus
ttatagatcatcatgcggccatccg

SEQ ID NO: 115136 - DNA, 25 bp, Saccharomyces pastorianus
acatccttcccatgttgtatcattg

SEQ ID NO: 115137 - DNA, 25 bp, Saccharomyces pastorianus
gtatcattgctgtatcttgcacact

SEQ ID NO: 115138 - DNA, 25 bp, Saccharomyces pastorianus
gtcaatagttcttcattctccctta

SEQ ID NO: 115139 - DNA, 25 bp, Saccharomyces pastorianus
attggttttattaccagcggcacct

SEQ ID NO: 115140 - DNA, 25 bp, Saccharomyces pastorianus
gaaaattccacttccagaggtacat

SEQ ID NO: 115141 - DNA, 25 bp, Saccharomyces pastorianus
gaaaaactgcagaccattggtgctg

SEQ ID NO: 115142 - DNA, 25 bp, Saccharomyces pastorianus
tgtcctcaccggtttaggtattcct

SEQ ID NO: 115143 - DNA, 25 bp, Saccharomyces pastorianus
tgaatgggttggtaccggccccgca

SEQ ID NO: 115144 - DNA, 25 bp, Saccharomyces pastorianus
tagagttggtgaaggtcctttccca

SEQ ID NO: 115145 - DNA, 25 bp, Saccharomyces pastorianus
caaagttttgccaggttgggatcaa

SEQ ID NO: 115146 - DNA, 25 bp, Saccharomyces pastorianus
gaagctagatttgttccctgaagac

SEQ ID NO: 115147 - DNA, 25 bp, Saccharomyces pastorianus
ggtgctgaatttggtgtcactactg

SEQ ID NO: 115148 - DNA, 25 bp, Saccharomyces pastorianus
agcgtcgttgcggttggctagactt

SEQ ID NO: 115149 - DNA, 25 bp, Saccharomyces pastorianus
atcccagtgggtatttcatattcta

SEQ ID NO: 115150 - DNA, 25 bp, Saccharomyces pastorianus
tatgtgacttcttccaatactggta

SEQ ID NO: 115151 - DNA, 25 bp, Saccharomyces pastorianus
ttagacgtcctcgatactttcaaag

SEQ ID NO: 115152 - DNA, 25 bp, Saccharomyces pastorianus
actgacttaaagttcctggacggca

SEQ ID NO: 115153 - DNA, 25 bp, Saccharomyces pastorianus
agaagtgctcgagaaatgtccaaat

SEQ ID NO: 115154 - DNA, 25 bp, Saccharomyces pastorianus
ttgtgttgctttggctagggcacca

SEQ ID NO: 115155 - DNA, 25 bp, Saccharomyces pastorianus
tttgccagaggcagaccttgcactg

SEQ ID NO: 115156 - DNA, 25 bp, Saccharomyces pastorianus
aggctacaagtacaatcccgattat

SEQ ID NO: 115157 - DNA, 25 bp, Saccharomyces pastorianus
tgcactggcgcaatgttgtgttgct

SEQ ID NO: 115158 - DNA, 25 bp, Saccharomyces pastorianus
gtccaacaagactactttcccaaag

SEQ ID NO: 115159 - DNA, 25 bp, Saccharomyces pastorianus
gaggacccattgtatgttgcccgaa

SEQ ID NO: 115160 - DNA, 25 bp, Saccharomyces pastorianus
gatacaatctctgcgtttcataaat

SEQ ID NO: 115161 - DNA, 25 bp, Saccharomyces pastorianus
cgaaaacgcctcactgtactattta

SEQ ID NO: 115162 - DNA, 25 bp, Saccharomyces pastorianus
gtcgccgcacatgacgcagtaatga

SEQ ID NO: 115163 - DNA, 25 bp, Saccharomyces pastorianus
gatcctgataccataagctttccac

SEQ ID NO: 115164 - DNA, 25 bp, Saccharomyces pastorianus
atcttttcctgccattgttctttca

SEQ ID NO: 115165 - DNA, 25 bp, Saccharomyces pastorianus
caacgttcctggtatttggacacat

SEQ ID NO: 115166 - DNA, 25 bp, Saccharomyces pastorianus
aaggacaatgttaatcctcctccca

SEQ ID NO: 115167 - DNA, 25 bp, Saccharomyces pastorianus
gagcatattgacgtgtttatccggg

SEQ ID NO: 115168 - DNA, 25 bp, Saccharomyces pastorianus
tttgagtatccacacgagattgcgg

SEQ ID NO: 115169 - DNA, 25 bp, Saccharomyces pastorianus
gggatctgatggtctttcctcgcta

SEQ ID NO: 115170 - DNA, 25 bp, Saccharomyces pastorianus
aaactggtacaggatctttgcgatg

SEQ ID NO: 115171 - DNA, 25 bp, Saccharomyces pastorianus
ggacacatgatgacgacgaatcgct

SEQ ID NO: 115172 - DNA, 25 bp, Saccharomyces pastorianus
tgttctttcattttggcagtacgag

SEQ ID NO: 115173 - DNA, 25 bp, Saccharomyces pastorianus
tttcctcgctatttcttgaacatgt

SEQ ID NO: 115174 - DNA, 25 bp, Saccharomyces pastorianus
gcaggacacaatcaataagcttttg

SEQ ID NO: 115175 - DNA, 25 bp, Saccharomyces pastorianus
ggccggtaagtctaggagccactta

SEQ ID NO: 115176 - DNA, 25 bp, Saccharomyces pastorianus
gacgaattggtctctgtggtaaacg

SEQ ID NO: 115177 - DNA, 25 bp, Saccharomyces pastorianus
gcaggccttacaatagcgagggtat

SEQ ID NO: 115178 - DNA, 25 bp, Saccharomyces pastorianus
agaaatccagctgcgaagagccgaa

SEQ ID NO: 115179 - DNA, 25 bp, Saccharomyces pastorianus
tcttacgacgcccaaaacgatgttg

SEQ ID NO: 115180 - DNA, 25 bp, Saccharomyces pastorianus
ggagccacttaccaaatgatgatga

SEQ ID NO: 115181 - DNA, 25 bp, Saccharomyces pastorianus
agtgaagaatcttacgacgcccaaa

SEQ ID NO: 115182 - DNA, 25 bp, Saccharomyces pastorianus
tactacgactcgaagcaagatgctg

SEQ ID NO: 115183 - DNA, 25 bp, Saccharomyces pastorianus
agtttcgtgaaaccacgcaggcctt

SEQ ID NO: 115184 - DNA, 25 bp, Saccharomyces pastorianus
aatgatggctcttcaagtttcgtga

SEQ ID NO: 115185 - DNA, 25 bp, Saccharomyces pastorianus
aatccaacggtgaatgccatcaagg

SEQ ID NO: 115186 - DNA, 25 bp, Saccharomyces pastorianus
ataggtcccgagctttctcaaataa

SEQ ID NO: 115187 - DNA, 25 bp, Saccharomyces pastorianus
attgctatgtttgttgaaccaacgc

SEQ ID NO: 115188 - DNA, 25 bp, Saccharomyces pastorianus
tggagaggtccactcaaacttcaga

SEQ ID NO: 115189 - DNA, 25 bp, Saccharomyces pastorianus
acatcgattaacagttttcccagga

SEQ ID NO: 115190 - DNA, 25 bp, Saccharomyces pastorianus
gtattttaacagatcctcaggccaa

SEQ ID NO: 115191 - DNA, 25 bp, Saccharomyces pastorianus
atattgactggccttccaacatagg

SEQ ID NO: 115192 - DNA, 25 bp, Saccharomyces pastorianus
tggtgatgaccccagtatcctcgtt

SEQ ID NO: 115193 - DNA, 25 bp, Saccharomyces pastorianus
ttccttgtttgttttgttgcgtttg

SEQ ID NO: 115194 - DNA, 25 bp, Saccharomyces pastorianus
tgagttaacagataggtcccgagct

SEQ ID NO: 115195 - DNA, 25 bp, Saccharomyces pastorianus
tagcgcaattgcaaaaacgactggt

SEQ ID NO: 115196 - DNA, 25 bp, Saccharomyces pastorianus
gtccaactggaagcgtactgatgag

SEQ ID NO: 115197 - DNA, 25 bp, Saccharomyces pastorianus
tcaagcctaacaacagtacacctgg

SEQ ID NO: 115198 - DNA, 25 bp, Saccharomyces pastorianus
tgcagaccggttcaaaatttctccc

SEQ ID NO: 115199 - DNA, 25 bp, Saccharomyces pastorianus
gaggatgccgattttgtatccaatc

SEQ ID NO: 115200 - DNA, 25 bp, Saccharomyces pastorianus
ttcaactttcctgaactgacagcat

SEQ ID NO: 115201 - DNA, 25 bp, Saccharomyces pastorianus
tgcgctgcggtccattactcaatga

SEQ ID NO: 115202 - DNA, 25 bp, Saccharomyces pastorianus
gacagcatctgatcttgcagaccgg

SEQ ID NO: 115203 - DNA, 25 bp, Saccharomyces pastorianus
ggtccaactcaaattcacctgaatt

SEQ ID NO: 115204 - DNA, 25 bp, Saccharomyces pastorianus
aatttctcccgaggctgttcgaaga

SEQ ID NO: 115205 - DNA, 25 bp, Saccharomyces pastorianus
tgttcgcacttttaaacctttcaag

SEQ ID NO: 115206 - DNA, 25 bp, Saccharomyces pastorianus
gaaagattatacttgggtccaactc

SEQ ID NO: 115207 - DNA, 25 bp, Saccharomyces pastorianus
gaatggttttactacaagttactga

SEQ ID NO: 115208 - DNA, 25 bp, Saccharomyces pastorianus
aatgagatctacttttgggttcaga

SEQ ID NO: 115209 - DNA, 25 bp, Saccharomyces pastorianus
atgcctccaagaagtatagaagaat

SEQ ID NO: 115210 - DNA, 25 bp, Saccharomyces pastorianus
ccaggtttccatagatttgtacgca

SEQ ID NO: 115211 - DNA, 25 bp, Saccharomyces pastorianus
tacaagttactgagtagtccaggtt

SEQ ID NO: 115212 - DNA, 25 bp, Saccharomyces pastorianus
ccatagatttgtacgcaaggtatat

SEQ ID NO: 115213 - DNA, 25 bp, Saccharomyces pastorianus
ttcactgaccaatcaactgcttttc

SEQ ID NO: 115214 - DNA, 25 bp, Saccharomyces pastorianus
gaagatcctttcactgaccaatcaa

SEQ ID NO: 115215 - DNA, 25 bp, Saccharomyces pastorianus
atctttataagccaactccacgaca

SEQ ID NO: 115216 - DNA, 25 bp, Saccharomyces pastorianus
ctccacgacagaaatttaaggcttt

SEQ ID NO: 115217 - DNA, 25 bp, Saccharomyces pastorianus
caactgcttttcaatatctttataa

SEQ ID NO: 115218 - DNA, 25 bp, Saccharomyces pastorianus
taaccgcctacgtattctccaagaa

SEQ ID NO: 115219 - DNA, 25 bp, Saccharomyces pastorianus
aaggaaccaccctgaatctgttcaa

SEQ ID NO: 115220 - DNA, 25 bp, Saccharomyces pastorianus
gcctgttggaggtggatctcctcaa

SEQ ID NO: 115221 - DNA, 25 bp, Saccharomyces pastorianus
actaaggcttctgtactatgtttta

SEQ ID NO: 115222 - DNA, 25 bp, Saccharomyces pastorianus
tcaattgcattagccgtcaccagta

SEQ ID NO: 115223 - DNA, 25 bp, Saccharomyces pastorianus
gatctcctcaatctggtatttaccg

SEQ ID NO: 115224 - DNA, 25 bp, Saccharomyces pastorianus
acacaaatcactttcctcattggag

SEQ ID NO: 115225 - DNA, 25 bp, Saccharomyces pastorianus
cggcacgatttcatagtcactctag

SEQ ID NO: 115226 - DNA, 25 bp, Saccharomyces pastorianus
gtacagacaaatgggccgcaacggc

SEQ ID NO: 115227 - DNA, 25 bp, Saccharomyces pastorianus
atatgtttgcccaggtttgtttcaa

SEQ ID NO: 115228 - DNA, 25 bp, Saccharomyces pastorianus
tcgggtgacttatactcaattgcat

SEQ ID NO: 115229 - DNA, 25 bp, Saccharomyces pastorianus
gacaaagactagaatcctacgtcgc

SEQ ID NO: 115230 - DNA, 25 bp, Saccharomyces pastorianus
aaagactagaatcctacgtcgcttc

SEQ ID NO: 115231 - DNA, 25 bp, Saccharomyces pastorianus
acaactgtcagtgacaaccaaacca

SEQ ID NO: 115232 - DNA, 25 bp, Saccharomyces pastorianus
gaagaaccttcacaactgtcagtga

SEQ ID NO: 115233 - DNA, 25 bp, Saccharomyces pastorianus
gagaagaaccttcacaactgtcagt

SEQ ID NO: 115234 - DNA, 25 bp, Saccharomyces pastorianus
agaatcctacgtcgcttccatcgaa

SEQ ID NO: 115235 - DNA, 25 bp, Saccharomyces pastorianus
tagaatcctacgtcgcttccatcga

SEQ ID NO: 115236 - DNA, 25 bp, Saccharomyces pastorianus
gaaccttcacaactgtcagtgacaa

SEQ ID NO: 115237 - DNA, 25 bp, Saccharomyces pastorianus
aagactagaatcctacgtcgcttcc

SEQ ID NO: 115238 - DNA, 25 bp, Saccharomyces pastorianus
gactagaatcctacgtcgcttccat

SEQ ID NO: 115239 - DNA, 25 bp, Saccharomyces pastorianus
ttcacaactgtcagtgacaaccaaa

SEQ ID NO: 115240 - DNA, 25 bp, Saccharomyces pastorianus
atcgaagctgctttgtccgatgctt

SEQ ID NO: 115241 - DNA, 25 bp, Saccharomyces pastorianus
gatgctttggctgctttgcaaatcg

SEQ ID NO: 115242 - DNA, 25 bp, Saccharomyces pastorianus
aaagactagaatcctacgtcgcttc

SEQ ID NO: 115243 - DNA, 25 bp, Saccharomyces pastorianus
acaactgtcagtgacaaccaaacca

SEQ ID NO: 115244 - DNA, 25 bp, Saccharomyces pastorianus
gaagaaccttcacaactgtcagtga

SEQ ID NO: 115245 - DNA, 25 bp, Saccharomyces pastorianus
ttgcaaatcgaagacccatccgctg

SEQ ID NO: 115246 - DNA, 25 bp, Saccharomyces pastorianus
gagaagaaccttcacaactgtcagt

SEQ ID NO: 115247 - DNA, 25 bp, Saccharomyces pastorianus
agaatcctacgtcgcttccatcgaa

SEQ ID NO: 115248 - DNA, 25 bp, Saccharomyces pastorianus
atccgctgatgagttgagaaaggca

SEQ ID NO: 115249 - DNA, 25 bp, Saccharomyces pastorianus
gaaccttcacaactgtcagtgacaa

SEQ ID NO: 115250 - DNA, 25 bp, Saccharomyces pastorianus
gactagaatcctacgtcgcttccat

SEQ ID NO: 115251 - DNA, 25 bp, Saccharomyces pastorianus
gactgtattcgtcgtttcttcaaaa

SEQ ID NO: 115252 - DNA, 25 bp, Saccharomyces pastorianus
gacactgaaggttttggcgatggtt

SEQ ID NO: 115253 - DNA, 25 bp, Saccharomyces pastorianus
cctgattcatcaatgctcgacactg

SEQ ID NO: 115254 - DNA, 25 bp, Saccharomyces pastorianus
gtagttatcgattttccacaatgta

SEQ ID NO: 115255 - DNA, 25 bp, Saccharomyces pastorianus
atgaattggtgcaggcttccggatt

SEQ ID NO: 115256 - DNA, 25 bp, Saccharomyces pastorianus
gggtgaatactatgactccgaactt

SEQ ID NO: 115257 - DNA, 25 bp, Saccharomyces pastorianus
agacgccgactattatttccaaagg

SEQ ID NO: 115258 - DNA, 25 bp, Saccharomyces pastorianus
atatgtctaatgacgaggccgaaga

SEQ ID NO: 115259 - DNA, 25 bp, Saccharomyces pastorianus
aaatagcgggcttatccattgtgat

SEQ ID NO: 115260 - DNA, 25 bp, Saccharomyces pastorianus
gggcctggaaactgccgttgaaagc

SEQ ID NO: 115261 - DNA, 25 bp, Saccharomyces pastorianus
gaggcgctttccagtggtgttgaaa

SEQ ID NO: 115262 - DNA, 25 bp, Saccharomyces pastorianus
gacgcttctgacatcgagtctataa

SEQ ID NO: 115263 - DNA, 25 bp, Saccharomyces pastorianus
gatcagccatctattctacaggaag

SEQ ID NO: 115264 - DNA, 25 bp, Saccharomyces pastorianus
cccattttgttattcgacgcttctg

SEQ ID NO: 115265 - DNA, 25 bp, Saccharomyces pastorianus
gagtctataacctattcgtctatta

SEQ ID NO: 115266 - DNA, 25 bp, Saccharomyces pastorianus
gtggccaagaatcctcagacggtgc

SEQ ID NO: 115267 - DNA, 25 bp, Saccharomyces pastorianus
ccaagcaactgatggcacagccgat

SEQ ID NO: 115268 - DNA, 25 bp, Saccharomyces pastorianus
aaaggcaggtatgttttcagacgat

SEQ ID NO: 115269 - DNA, 25 bp, Saccharomyces pastorianus
tttcgaagctgagagcgacctttcc

SEQ ID NO: 115270 - DNA, 25 bp, Saccharomyces pastorianus
atacgagttttccatgatagaccaa

SEQ ID NO: 115271 - DNA, 25 bp, Saccharomyces pastorianus
cgacctttccgatgggagtggccaa

SEQ ID NO: 115272 - DNA, 25 bp, Saccharomyces pastorianus
aggaagctacccgtcaaatgcaaga

SEQ ID NO: 115273 - DNA, 25 bp, Saccharomyces pastorianus
gggattcaataatttccagcagtat

SEQ ID NO: 115274 - DNA, 25 bp, Saccharomyces pastorianus
gtatacaaacggtgcgacgagccaa

SEQ ID NO: 115275 - DNA, 25 bp, Saccharomyces pastorianus
ggtgttaggctctgacaattttcaa

SEQ ID NO: 115276 - DNA, 25 bp, Saccharomyces pastorianus
tgggtgttgctttcagatgcattat

SEQ ID NO: 115277 - DNA, 25 bp, Saccharomyces pastorianus
ggctggccaatgaagtgcgcagtaa

SEQ ID NO: 115278 - DNA, 25 bp, Saccharomyces pastorianus
atgaccccataggaaccatttctag

SEQ ID NO: 115279 - DNA, 25 bp, Saccharomyces pastorianus
ttcccgcttgtttgagttccgaaag

SEQ ID NO: 115280 - DNA, 25 bp, Saccharomyces pastorianus
agactgcgaaagatttcccgcttgt

SEQ ID NO: 115281 - DNA, 25 bp, Saccharomyces pastorianus
cgttacaagtgctacgagtacgtta

SEQ ID NO: 115282 - DNA, 25 bp, Saccharomyces pastorianus
gcagaacgggattccattgcgtgaa

SEQ ID NO: 115283 - DNA, 25 bp, Saccharomyces pastorianus
gggcggaatttgtactacctgagaa

SEQ ID NO: 115284 - DNA, 25 bp, Saccharomyces pastorianus
gagaggttcgcaaaatcgcacacaa

SEQ ID NO: 115285 - DNA, 25 bp, Saccharomyces pastorianus
atttgccgtccaaagtgtttgctgt

SEQ ID NO: 115286 - DNA, 25 bp, Saccharomyces pastorianus
agaaccctcagtaacgaatttgccg

SEQ ID NO: 115287 - DNA, 25 bp, Saccharomyces pastorianus
tacgacctcccaaactctaaaagtg

SEQ ID NO: 115288 - DNA, 25 bp, Saccharomyces pastorianus
tagccaagactgcatctttgtcctt

SEQ ID NO: 115289 - DNA, 25 bp, Saccharomyces pastorianus
tgacaaatgccactttacccttaaa

SEQ ID NO: 115290 - DNA, 25 bp, Saccharomyces pastorianus
gaagaaccaaggcttctgtctgcac

SEQ ID NO: 115291 - DNA, 25 bp, Saccharomyces pastorianus
aaaatttccagcagcaccggcaatg

SEQ ID NO: 115292 - DNA, 25 bp, Saccharomyces pastorianus
aactgcgaaataccttttgctgcct

SEQ ID NO: 115293 - DNA, 25 bp, Saccharomyces pastorianus
ttttaactccttcaagcatgccttg

SEQ ID NO: 115294 - DNA, 25 bp, Saccharomyces pastorianus
tctttgtcctttgctaactgcgaaa

SEQ ID NO: 115295 - DNA, 25 bp, Saccharomyces pastorianus
ttatggtgtgccgtttcaaggacat

SEQ ID NO: 115296 - DNA, 25 bp, Saccharomyces pastorianus
tgctccaggtgctatcgataatacg

SEQ ID NO: 115297 - DNA, 25 bp, Saccharomyces pastorianus
tcaaggacatgtgggcgctgctaaa

SEQ ID NO: 115298 - DNA, 25 bp, Saccharomyces pastorianus
tagggacctattttggacatgagtt

SEQ ID NO: 115299 - DNA, 25 bp, Saccharomyces pastorianus
ttgtgtgcgattttgcgaacctctc

SEQ ID NO: 115300 - DNA, 25 bp, Saccharomyces pastorianus
gggcctctgggtatacgttcgaatt

SEQ ID NO: 115301 - DNA, 25 bp, Saccharomyces pastorianus
ggaagttttaataccgccaaggcat

SEQ ID NO: 115302 - DNA, 25 bp, Saccharomyces pastorianus
atgtcaccggtactgtcttagttgt

SEQ ID NO: 115303 - DNA, 25 bp, Saccharomyces pastorianus
gtcattgccggtgctgctggaaatt

SEQ ID NO: 115304 - DNA, 25 bp, Saccharomyces pastorianus
gggatatagccgaatctactgttta

SEQ ID NO: 115305 - DNA, 25 bp, Saccharomyces pastorianus
tatacgttcgaattgcattgctcca

SEQ ID NO: 115306 - DNA, 25 bp, Saccharomyces pastorianus
gcattcaagattttttccgcattat

SEQ ID NO: 115307 - DNA, 25 bp, Saccharomyces pastorianus
gattgaacactttgaaaatgacccc

SEQ ID NO: 115308 - DNA, 25 bp, Saccharomyces pastorianus
aaaaaccttatgtgtctcgatgata

SEQ ID NO: 115309 - DNA, 25 bp, Saccharomyces pastorianus
atccctttcatccaggatatgctag

SEQ ID NO: 115310 - DNA, 25 bp, Saccharomyces pastorianus
aaccaatggttcttatgatggcaac

SEQ ID NO: 115311 - DNA, 25 bp, Saccharomyces pastorianus
aaaccaacccgatcattctagcttt

SEQ ID NO: 115312 - DNA, 25 bp, Saccharomyces pastorianus
gcgccagtttttaaactcttccagg

SEQ ID NO: 115313 - DNA, 25 bp, Saccharomyces pastorianus
gtcaacagatggatttgcttcgaat

SEQ ID NO: 115314 - DNA, 25 bp, Saccharomyces pastorianus
ccccattattctggtgatcagttag

SEQ ID NO: 115315 - DNA, 25 bp, Saccharomyces pastorianus
aaagctactgatatccctttcatcc

SEQ ID NO: 115316 - DNA, 25 bp, Saccharomyces pastorianus
gatggcaacggtaatgacgtcaaaa

SEQ ID NO: 115317 - DNA, 25 bp, Saccharomyces pastorianus
gtatgtcgccagtttccactgagag

SEQ ID NO: 115318 - DNA, 25 bp, Saccharomyces pastorianus
ttttagtttcaagcctcccatgaga

SEQ ID NO: 115319 - DNA, 25 bp, Saccharomyces pastorianus
gatggtctcgtgtgcgcaagacatt

SEQ ID NO: 115320 - DNA, 25 bp, Saccharomyces pastorianus
gttgacaaaggtccgatctcgcagc

SEQ ID NO: 115321 - DNA, 25 bp, Saccharomyces pastorianus
gattgtttcggtggacgtccccaca

SEQ ID NO: 115322 - DNA, 25 bp, Saccharomyces pastorianus
gatttcgccaataaattcggctttg

SEQ ID NO: 115323 - DNA, 25 bp, Saccharomyces pastorianus
aaagttcctgtcctgtctcaagatg

SEQ ID NO: 115324 - DNA, 25 bp, Saccharomyces pastorianus
acatgtatttgttattgctgggcca

SEQ ID NO: 115325 - DNA, 25 bp, Saccharomyces pastorianus
ctgttgttttctaccccaagagaag

SEQ ID NO: 115326 - DNA, 25 bp, Saccharomyces pastorianus
aagccatgcagctctcacataaggg

SEQ ID NO: 115327 - DNA, 25 bp, Saccharomyces pastorianus
attaatcctgctgttcttgtatctc

SEQ ID NO: 115328 - DNA, 25 bp, Saccharomyces pastorianus
ccttcaaacagcatgggacctatag

SEQ ID NO: 115329 - DNA, 25 bp, Saccharomyces pastorianus
gctttttgatccatcattgtctcaa

SEQ ID NO: 115330 - DNA, 25 bp, Saccharomyces pastorianus
acaagatgtcaattctcgttcgttg

SEQ ID NO: 115331 - DNA, 25 bp, Saccharomyces pastorianus
aaacgactgcaaacgctatcacaag

SEQ ID NO: 115332 - DNA, 25 bp, Saccharomyces pastorianus
gaaggtcactgggatcgttagatgt

SEQ ID NO: 115333 - DNA, 25 bp, Saccharomyces pastorianus
aggccgatgacaactgcagcagagg

SEQ ID NO: 115334 - DNA, 25 bp, Saccharomyces pastorianus
gagtcatgcagatctgaaccccaat

SEQ ID NO: 115335 - DNA, 25 bp, Saccharomyces pastorianus
cagcgccaagagacgcagtggttaa

SEQ ID NO: 115336 - DNA, 25 bp, Saccharomyces pastorianus
tgaaccccaatgcttccagtaatac

SEQ ID NO: 115337 - DNA, 25 bp, Saccharomyces pastorianus
tggtccggacactaatttaaacgcg

SEQ ID NO: 115338 - DNA, 25 bp, Saccharomyces pastorianus
agaagccgtgatacgcccattgaaa

SEQ ID NO: 115339 - DNA, 25 bp, Saccharomyces pastorianus
cgggtaataacgtcatatttcttat

SEQ ID NO: 115340 - DNA, 25 bp, Saccharomyces pastorianus
acttctgcgatagttgtccgttaga

SEQ ID NO: 115341 - DNA, 25 bp, Saccharomyces pastorianus
ttgactttcttcacattcttacgcc

SEQ ID NO: 115342 - DNA, 25 bp, Saccharomyces pastorianus
ggaacctgagaacacaaagagtatt

SEQ ID NO: 115343 - DNA, 25 bp, Saccharomyces pastorianus
atccataaggtgcttgcggtctgta

SEQ ID NO: 115344 - DNA, 25 bp, Saccharomyces pastorianus
ttaatggaacctcaatacgggtaat

SEQ ID NO: 115345 - DNA, 25 bp, Saccharomyces pastorianus
ttcaagtaccgcgacttctgcgata

SEQ ID NO: 115346 - DNA, 25 bp, Saccharomyces pastorianus
tttcacgacttttctccttcaagta

SEQ ID NO: 115347 - DNA, 25 bp, Saccharomyces pastorianus
taatcattaacgcatccataaggtg

SEQ ID NO: 115348 - DNA, 25 bp, Saccharomyces pastorianus
gcttgcggtctgtatttgactttct

SEQ ID NO: 115349 - DNA, 25 bp, Saccharomyces pastorianus
ttcttacgcctagactgaatgggaa

SEQ ID NO: 115350 - DNA, 25 bp, Saccharomyces pastorianus
aagatagtcagtttgtccttcaaga

SEQ ID NO: 115351 - DNA, 25 bp, Saccharomyces pastorianus
tagtcctcttaatgtccaactcacg

SEQ ID NO: 115352 - DNA, 25 bp, Saccharomyces pastorianus
aacgtcctcgacgtctcgaaagata

SEQ ID NO: 115353 - DNA, 25 bp, Saccharomyces pastorianus
ggctattcaaacatctagtcctctt

SEQ ID NO: 115354 - DNA, 25 bp, Saccharomyces pastorianus
agacatggagttcacctcctgggaa

SEQ ID NO: 115355 - DNA, 25 bp, Saccharomyces pastorianus
ataaccatgcaacaagcgtcgcgct

SEQ ID NO: 115356 - DNA, 25 bp, Saccharomyces pastorianus
tcctgggaacgacgctggtcaaact

SEQ ID NO: 115357 - DNA, 25 bp, Saccharomyces pastorianus
gatgaaaaaccagtcccagatgcag

SEQ ID NO: 115358 - DNA, 25 bp, Saccharomyces pastorianus
aaaatgtcaccatcgggcttgaaag

SEQ ID NO: 115359 - DNA, 25 bp, Saccharomyces pastorianus
ataacctccttcaattcagtagcgc

SEQ ID NO: 115360 - DNA, 25 bp, Saccharomyces pastorianus
gtaatgcgactacggtctcatcagt

SEQ ID NO: 115361 - DNA, 25 bp, Saccharomyces pastorianus
gtaaacgccatttgctgtactatca

SEQ ID NO: 115362 - DNA, 25 bp, Saccharomyces pastorianus
ggtgcctgtaactgaggtccaacaa

SEQ ID NO: 115363 - DNA, 25 bp, Saccharomyces pastorianus
agctggatcacgcttttcttcataa

SEQ ID NO: 115364 - DNA, 25 bp, Saccharomyces pastorianus
atcacgttagtttcggttattgcca

SEQ ID NO: 115365 - DNA, 25 bp, Saccharomyces pastorianus
atctcaatcccaccagaatcatagg

SEQ ID NO: 115366 - DNA, 25 bp, Saccharomyces pastorianus
ctatccgcttgtctgtacacaggat

SEQ ID NO: 115367 - DNA, 25 bp, Saccharomyces pastorianus
tgtactatcatggtggctactcata

SEQ ID NO: 115368 - DNA, 25 bp, Saccharomyces pastorianus
tgggcaatgcttctaatcgggcttt

SEQ ID NO: 115369 - DNA, 25 bp, Saccharomyces pastorianus
gcagtttcgcttctaccaagacagt

SEQ ID NO: 115370 - DNA, 25 bp, Saccharomyces pastorianus
ggcagtaaaggcgtttcaccatgag

SEQ ID NO: 115371 - DNA, 25 bp, Saccharomyces pastorianus
agatacaatagacgtaccgccgctc

SEQ ID NO: 115372 - DNA, 25 bp, Saccharomyces pastorianus
ctcctttaccgatctgcttgatgaa

SEQ ID NO: 115373 - DNA, 25 bp, Saccharomyces pastorianus
aatgctgtcgctatctcatcaaaac

SEQ ID NO: 115374 - DNA, 25 bp, Saccharomyces pastorianus
gaggatgacggtacttctgcttcgc

SEQ ID NO: 115375 - DNA, 25 bp, Saccharomyces pastorianus
gcctaccgcaatgacgttcgatatg

SEQ ID NO: 115376 - DNA, 25 bp, Saccharomyces pastorianus
gaccaaagttcttacagaggctaga

SEQ ID NO: 115377 - DNA, 25 bp, Saccharomyces pastorianus
gatgtcttagtaaattcctccgata

SEQ ID NO: 115378 - DNA, 25 bp, Saccharomyces pastorianus
gactacttttcttacagaggctgga

SEQ ID NO: 115379 - DNA, 25 bp, Saccharomyces pastorianus
gaaactctctgggttattgaccaaa

SEQ ID NO: 115380 - DNA, 25 bp, Saccharomyces pastorianus
aagattttgttctgcaaaccgcctc

SEQ ID NO: 115381 - DNA, 25 bp, Saccharomyces pastorianus
gatgcatcttggaaactctctgggt

SEQ ID NO: 115382 - DNA, 25 bp, Saccharomyces pastorianus
aacgctaacgtttttctgaataatg

SEQ ID NO: 115383 - DNA, 25 bp, Saccharomyces pastorianus
ttttgctgtaactgacggatccacc

SEQ ID NO: 115384 - DNA, 25 bp, Saccharomyces pastorianus
ggacgaggcagcatctttgcatttc

SEQ ID NO: 115385 - DNA, 25 bp, Saccharomyces pastorianus
acggcgatttcggtaatgttgcact

SEQ ID NO: 115386 - DNA, 25 bp, Saccharomyces pastorianus
gatccaccgttgttgtttccaggta

SEQ ID NO: 115387 - DNA, 25 bp, Saccharomyces pastorianus
actccgagtgcgcatttgcattatt

SEQ ID NO: 115388 - DNA, 25 bp, Saccharomyces pastorianus
gaagttcaaccctcgcagaaagcaa

SEQ ID NO: 115389 - DNA, 25 bp, Saccharomyces pastorianus
gtgattggactgcagtacccaccaa

SEQ ID NO: 115390 - DNA, 25 bp, Saccharomyces pastorianus
tgcatttcagttgtggttccagctt

SEQ ID NO: 115391 - DNA, 25 bp, Saccharomyces pastorianus
gcacatgtggaaccatctctcttaa

SEQ ID NO: 115392 - DNA, 25 bp, Saccharomyces pastorianus
gggctcatgggttctataccactag

SEQ ID NO: 115393 - DNA, 25 bp, Saccharomyces pastorianus
gcatcggaacctttgactttcgaaa

SEQ ID NO: 115394 - DNA, 25 bp, Saccharomyces pastorianus
tatggtcctggtgaaaaggcccgta

SEQ ID NO: 115395 - DNA, 25 bp, Saccharomyces pastorianus
atgacactaccacttatggtcctgg

SEQ ID NO: 115396 - DNA, 25 bp, Saccharomyces pastorianus
tagtttaactactaccacctctact

SEQ ID NO: 115397 - DNA, 25 bp, Saccharomyces pastorianus
ggtccatctaatttcaactccataa

SEQ ID NO: 115398 - DNA, 25 bp, Saccharomyces pastorianus
aagttctcttctgttactgctatta

SEQ ID NO: 115399 - DNA, 25 bp, Saccharomyces pastorianus
gaacatgatttcactaccactttaa

SEQ ID NO: 115400 - DNA, 25 bp, Saccharomyces pastorianus
tgccaccgttgccactgctaagaag

SEQ ID NO: 115401 - DNA, 25 bp, Saccharomyces pastorianus
aagtccaagactccaaaccataccg

SEQ ID NO: 115402 - DNA, 25 bp, Saccharomyces pastorianus
accactttaactttgtcatcggacg

SEQ ID NO: 115403 - DNA, 25 bp, Saccharomyces pastorianus
aaattgtttggtgtcaccgctggta

SEQ ID NO: 115404 - DNA, 25 bp, Saccharomyces pastorianus
tactgctattactctagccaccgtt

SEQ ID NO: 115405 - DNA, 25 bp, Saccharomyces pastorianus
gaactgatgtttctagctctgagca

SEQ ID NO: 115406 - DNA, 25 bp, Saccharomyces pastorianus
agctctgagcaggacaattctttca

SEQ ID NO: 115407 - DNA, 25 bp, Saccharomyces pastorianus
agttccaagcgcaacgagatccatt

SEQ ID NO: 115408 - DNA, 25 bp, Saccharomyces pastorianus
ggcatagacttctctttcatgacaa

SEQ ID NO: 115409 - DNA, 25 bp, Saccharomyces pastorianus
gaatgcctccacgaggaactgatgt

SEQ ID NO: 115410 - DNA, 25 bp, Saccharomyces pastorianus
gtctgagatcgaaatgcatactaag

SEQ ID NO: 115411 - DNA, 25 bp, Saccharomyces pastorianus
aaaatcgtatgtttctttggagcaa

SEQ ID NO: 115412 - DNA, 25 bp, Saccharomyces pastorianus
gcagcgcctgaacaaatggtcaaca

SEQ ID NO: 115413 - DNA, 25 bp, Saccharomyces pastorianus
gatccattacaaatactacagtctg

SEQ ID NO: 115414 - DNA, 25 bp, Saccharomyces pastorianus
ccttaccaaatctctctgctataaa

SEQ ID NO: 115415 - DNA, 25 bp, Saccharomyces pastorianus
gtaactaatgacaacgcagcgcctg

SEQ ID NO: 115416 - DNA, 25 bp, Saccharomyces pastorianus
gagctacctgtcaaataccaactat

SEQ ID NO: 115417 - DNA, 25 bp, Saccharomyces pastorianus
gaggctaactccaaaatcggttcca

SEQ ID NO: 115418 - DNA, 25 bp, Saccharomyces pastorianus
aatcggttccattgccattggcgaa

SEQ ID NO: 115419 - DNA, 25 bp, Saccharomyces pastorianus
attcagattcaatggcacgtcctca

SEQ ID NO: 115420 - DNA, 25 bp, Saccharomyces pastorianus
agggctcctgaaactttacttgtgc

SEQ ID NO: 115421 - DNA, 25 bp, Saccharomyces pastorianus
taacgaaccaaataaccgcccattg

SEQ ID NO: 115422 - DNA, 25 bp, Saccharomyces pastorianus
tttcttcaggtcactacattgccca

SEQ ID NO: 115423 - DNA, 25 bp, Saccharomyces pastorianus
tagctgggccacttacgacgacgag

SEQ ID NO: 115424 - DNA, 25 bp, Saccharomyces pastorianus
gaagcaagctgtttcttatcctatg

SEQ ID NO: 115425 - DNA, 25 bp, Saccharomyces pastorianus
gaaatctgccatggccactggtaat

SEQ ID NO: 115426 - DNA, 25 bp, Saccharomyces pastorianus
gaacccaacgcatattatctcctat

SEQ ID NO: 115427 - DNA, 25 bp, Saccharomyces pastorianus
atcagcaaactatcagccaggtgta

SEQ ID NO: 115428 - DNA, 25 bp, Saccharomyces pastorianus
gggaccaacccgtgctttaggagag

SEQ ID NO: 115429 - DNA, 25 bp, Saccharomyces pastorianus
gccaggtgtaccagttccagtatta

SEQ ID NO: 115430 - DNA, 25 bp, Saccharomyces pastorianus
gggacaatgttaggcagtgcacctg

SEQ ID NO: 115431 - DNA, 25 bp, Saccharomyces pastorianus
acccgtgctttaggagagttatcgc

SEQ ID NO: 115432 - DNA, 25 bp, Saccharomyces pastorianus
ggacaagggacatggacaaccgaat

SEQ ID NO: 115433 - DNA, 25 bp, Saccharomyces pastorianus
ccaccaaccggatatttgctgctaa

SEQ ID NO: 115434 - DNA, 25 bp, Saccharomyces pastorianus
ggcagtgcacctgcgaagggaccaa

SEQ ID NO: 115435 - DNA, 25 bp, Saccharomyces pastorianus
gtaccagttccagtattaatcacaa

SEQ ID NO: 115436 - DNA, 25 bp, Saccharomyces pastorianus
gagttatcgctgaagcacgtttacg

SEQ ID NO: 115437 - DNA, 25 bp, Saccharomyces pastorianus
gaaatctccaccaaccggatatttg

SEQ ID NO: 115438 - DNA, 25 bp, Saccharomyces pastorianus
gagaagaccatcatcacacacaagt

SEQ ID NO: 115439 - DNA, 25 bp, Saccharomyces pastorianus
agatccttggatccgtagcattgat

SEQ ID NO: 115440 - DNA, 25 bp, Saccharomyces pastorianus
tatttgcgaagtatgacccacgtcc

SEQ ID NO: 115441 - DNA, 25 bp, Saccharomyces pastorianus
tgatccaccttcctacgatgaatcg

SEQ ID NO: 115442 - DNA, 25 bp, Saccharomyces pastorianus
agattgttgcactcattaccagaag

SEQ ID NO: 115443 - DNA, 25 bp, Saccharomyces pastorianus
gatatttggtcttctgcaatcattt

SEQ ID NO: 115444 - DNA, 25 bp, Saccharomyces pastorianus
gagactcagcatattgttggacgca

SEQ ID NO: 115445 - DNA, 25 bp, Saccharomyces pastorianus
gacgcatgattgatttggcacccgc

SEQ ID NO: 115446 - DNA, 25 bp, Saccharomyces pastorianus
tttggcacccgcatgcagaggaaat

SEQ ID NO: 115447 - DNA, 25 bp, Saccharomyces pastorianus
ttgcgactccttaagtagcttggtt

SEQ ID NO: 115448 - DNA, 25 bp, Saccharomyces pastorianus
ttttgttccggacgtgattgcgact

SEQ ID NO: 115449 - DNA, 25 bp, Saccharomyces pastorianus
taaaatcgacgccacttcatcttta

SEQ ID NO: 115450 - DNA, 25 bp, Saccharomyces pastorianus
gcctacaaggagttacgtgacatgc

SEQ ID NO: 115451 - DNA, 25 bp, Saccharomyces pastorianus
agagacagatcctaacctcgcatta

SEQ ID NO: 115452 - DNA, 25 bp, Saccharomyces pastorianus
gaagtgaccaatctcttaaccaacc

SEQ ID NO: 115453 - DNA, 25 bp, Saccharomyces pastorianus
agaactatccagactttaactacat

SEQ ID NO: 115454 - DNA, 25 bp, Saccharomyces pastorianus
actacatcacaggattcagttggag

SEQ ID NO: 115455 - DNA, 25 bp, Saccharomyces pastorianus
taatgcctatttggagcaggtcaaa

SEQ ID NO: 115456 - DNA, 25 bp, Saccharomyces pastorianus
ccttacaggctcgaacgtggaaatt

SEQ ID NO: 115457 - DNA, 25 bp, Saccharomyces pastorianus
aacaaaggccatttacacgatattt

SEQ ID NO: 115458 - DNA, 25 bp, Saccharomyces pastorianus
ttcatctttagacagcaatgccgct

SEQ ID NO: 115459 - DNA, 25 bp, Saccharomyces pastorianus
tcgcattaccacttaacgactttaa

SEQ ID NO: 115460 - DNA, 25 bp, Saccharomyces pastorianus
gaagatccgttgtggcaaaatgcca

SEQ ID NO: 115461 - DNA, 25 bp, Saccharomyces pastorianus
agaataattcttgccacctgctggt

SEQ ID NO: 115462 - DNA, 25 bp, Saccharomyces pastorianus
taccccatattgtggctgtttatca

SEQ ID NO: 115463 - DNA, 25 bp, Saccharomyces pastorianus
gctgtttatcaagagtggtcgtcgt

SEQ ID NO: 115464 - DNA, 25 bp, Saccharomyces pastorianus
ttgccacctgctggttacaagttgt

SEQ ID NO: 115465 - DNA, 25 bp, Saccharomyces pastorianus
aagcgccttgaagtttttcgcaagc

SEQ ID NO: 115466 - DNA, 25 bp, Saccharomyces pastorianus
tgagatcaaatagcctacgccgcgt

SEQ ID NO: 115467 - DNA, 25 bp, Saccharomyces pastorianus
gtacgctttaatgacaccggaattg

SEQ ID NO: 115468 - DNA, 25 bp, Saccharomyces pastorianus
cctacgccgcgtcattagtaatggt

SEQ ID NO: 115469 - DNA, 25 bp, Saccharomyces pastorianus
tactgtattctgttgtaccccatat

SEQ ID NO: 115470 - DNA, 25 bp, Saccharomyces pastorianus
ggtgatcaaagtttcttgtacgctt

SEQ ID NO: 115471 - DNA, 25 bp, Saccharomyces pastorianus
tgtcgtttccggtaaactaagagct

SEQ ID NO: 115472 - DNA, 25 bp, Saccharomyces pastorianus
gttaagatcatgagagacccagcta

SEQ ID NO: 115473 - DNA, 25 bp, Saccharomyces pastorianus
tgttgaagtccgtgtcactccaacc

SEQ ID NO: 115474 - DNA, 25 bp, Saccharomyces pastorianus
aaaggctttgccagatgctgtcacc

SEQ ID NO: 115475 - DNA, 25 bp, Saccharomyces pastorianus
caacgacttcattgacactgctact

SEQ ID NO: 115476 - DNA, 25 bp, Saccharomyces pastorianus
aagaaccaattcttgctccatctgt

SEQ ID NO: 115477 - DNA, 25 bp, Saccharomyces pastorianus
aaggctatgaaatttgctgacggtt

SEQ ID NO: 115478 - DNA, 25 bp, Saccharomyces pastorianus
atgctgtcaccatcattgaaccaaa

SEQ ID NO: 115479 - DNA, 25 bp, Saccharomyces pastorianus
gacactgctactagacacgtcttga

SEQ ID NO: 115480 - DNA, 25 bp, Saccharomyces pastorianus
agagcagaactggtccaaaggcttt

SEQ ID NO: 115481 - DNA, 25 bp, Saccharomyces pastorianus
gtcactccaaccaagaccgaagtta

SEQ ID NO: 115482 - DNA, 25 bp, Saccharomyces pastorianus
acaaaggatacgatcgtgcgggaca

SEQ ID NO: 115483 - DNA, 25 bp, Saccharomyces pastorianus
caccgtcaaggattctatttgtcgg

SEQ ID NO: 115484 - DNA, 25 bp, Saccharomyces pastorianus
gctatgtccaaaaatccaccgtcaa

SEQ ID NO: 115485 - DNA, 25 bp, Saccharomyces pastorianus
aaattgccggaaggccattgcgaat

SEQ ID NO: 115486 - DNA, 25 bp, Saccharomyces pastorianus
gaaaatccgcatggcaacattcgaa

SEQ ID NO: 115487 - DNA, 25 bp, Saccharomyces pastorianus
tgctcagagaggttctgcagctatt

SEQ ID NO: 115488 - DNA, 25 bp, Saccharomyces pastorianus
tgtagctttagccactgctcagaga

SEQ ID NO: 115489 - DNA, 25 bp, Saccharomyces pastorianus
ggattcgcatttatcgacttcaaga

SEQ ID NO: 115490 - DNA, 25 bp, Saccharomyces pastorianus
gaatacaagcggtccaacgccaaca

SEQ ID NO: 115491 - DNA, 25 bp, Saccharomyces pastorianus
caggtaggccagacaaggacgattt

SEQ ID NO: 115492 - DNA, 25 bp, Saccharomyces pastorianus
cagacgtccacctgtagattccaat

SEQ ID NO: 115493 - DNA, 25 bp, Saccharomyces pastorianus
gggcatctttctcagaagcaccaga

SEQ ID NO: 115494 - DNA, 25 bp, Saccharomyces pastorianus
tgttgcttgtagattcttcaccctg

SEQ ID NO: 115495 - DNA, 25 bp, Saccharomyces pastorianus
tttcagcatcttctttgtattcctc

SEQ ID NO: 115496 - DNA, 25 bp, Saccharomyces pastorianus
tcatcctcgttgtcttttgttttag

SEQ ID NO: 115497 - DNA, 25 bp, Saccharomyces pastorianus
ttatgtcttgttcggtgactctgct

SEQ ID NO: 115498 - DNA, 25 bp, Saccharomyces pastorianus
gtaaagccttcttgacttgttcctc

SEQ ID NO: 115499 - DNA, 25 bp, Saccharomyces pastorianus
aacagcatcttctttcgacagttct

SEQ ID NO: 115500 - DNA, 25 bp, Saccharomyces pastorianus
gagtaactttgcctcttctcaagag

SEQ ID NO: 115501 - DNA, 25 bp, Saccharomyces pastorianus
ttcgcgttcaactcctctagagtaa

SEQ ID NO: 115502 - DNA, 25 bp, Saccharomyces pastorianus
ttttttacaacctcgccagattcat

SEQ ID NO: 115503 - DNA, 25 bp, Saccharomyces pastorianus
tactaaatcgtcctttgtggtgtcg

SEQ ID NO: 115504 - DNA, 25 bp, Saccharomyces pastorianus
gagtatcgagttctaccattgtcaa

SEQ ID NO: 115505 - DNA, 25 bp, Saccharomyces pastorianus
ggtccaaagcttttgtaccacaatt

SEQ ID NO: 115506 - DNA, 25 bp, Saccharomyces pastorianus
accacaattcgagttggcaatccaa

SEQ ID NO: 115507 - DNA, 25 bp, Saccharomyces pastorianus
tacacaaagattacaccttacccca

SEQ ID NO: 115508 - DNA, 25 bp, Saccharomyces pastorianus
ggcaatccaaaatatctccactgtt

SEQ ID NO: 115509 - DNA, 25 bp, Saccharomyces pastorianus
atacccaaactttcaaccagttgcg

SEQ ID NO: 115510 - DNA, 25 bp, Saccharomyces pastorianus
gcattattcatcatgtggtccaaag

SEQ ID NO: 115511 - DNA, 25 bp, Saccharomyces pastorianus
gattctgaatctgttaatgctgtat

SEQ ID NO: 115512 - DNA, 25 bp, Saccharomyces pastorianus
taaagctagtcttaggtacccaaat

SEQ ID NO: 115513 - DNA, 25 bp, Saccharomyces pastorianus
gtattatttcctgcactcaaaagag

SEQ ID NO: 115514 - DNA, 25 bp, Saccharomyces pastorianus
gtcatgtacccctttcataaaccaa

SEQ ID NO: 115515 - DNA, 25 bp, Saccharomyces pastorianus
aaccaaaggcatccctcccaatatt

SEQ ID NO: 115516 - DNA, 25 bp, Saccharomyces pastorianus
aattatgcctaatttctgtcccatc

SEQ ID NO: 115517 - DNA, 25 bp, Saccharomyces pastorianus
ttcttcacccttaaccaaaggcatc

SEQ ID NO: 115518 - DNA, 25 bp, Saccharomyces pastorianus
gtttacatctaacaagtccaatctg

SEQ ID NO: 115519 - DNA, 25 bp, Saccharomyces pastorianus
aatttctgtcccatcttaaccttat

SEQ ID NO: 115520 - DNA, 25 bp, Saccharomyces pastorianus
taaattcggtgggagcttcaaaaca

SEQ ID NO: 115521 - DNA, 25 bp, Saccharomyces pastorianus
gacatggctaaaattcttcagacga

SEQ ID NO: 115522 - DNA, 25 bp, Saccharomyces pastorianus
gtacaacagtgctacccaattcaaa

SEQ ID NO: 115523 - DNA, 25 bp, Saccharomyces pastorianus
tatcaccaaccctaacatcgaattt

SEQ ID NO: 115524 - DNA, 25 bp, Saccharomyces pastorianus
aaatcattctttccaattatgccta

SEQ ID NO: 115525 - DNA, 25 bp, Saccharomyces pastorianus
ttcttcagacgaacatctttaatct

SEQ ID NO: 115526 - DNA, 25 bp, Saccharomyces pastorianus
ttggaaccacatacctgctaccagg

SEQ ID NO: 115527 - DNA, 25 bp, Saccharomyces pastorianus
tctaatgggttttcgtgctctgagc

SEQ ID NO: 115528 - DNA, 25 bp, Saccharomyces pastorianus
gtgatttattctccgtggcacctta

SEQ ID NO: 115529 - DNA, 25 bp, Saccharomyces pastorianus
aagagttcaaaccaagtgtgtccaa

SEQ ID NO: 115530 - DNA, 25 bp, Saccharomyces pastorianus
tggcaccttatttccagcgtaactt

SEQ ID NO: 115531 - DNA, 25 bp, Saccharomyces pastorianus
gagggcgatcaatctgttcaagagt

SEQ ID NO: 115532 - DNA, 25 bp, Saccharomyces pastorianus
tcatttatttggctcccggtgatta

SEQ ID NO: 115533 - DNA, 25 bp, Saccharomyces pastorianus
ctgggtttgtaaggttcgccgccat

SEQ ID NO: 115534 - DNA, 25 bp, Saccharomyces pastorianus
gattttttagcatgactcctgttgg

SEQ ID NO: 115535 - DNA, 25 bp, Saccharomyces pastorianus
tactttgttttgaagctcccaccga

SEQ ID NO: 115536 - DNA, 25 bp, Saccharomyces pastorianus
gatacggaacttttctttgccgtca

SEQ ID NO: 115537 - DNA, 25 bp, Saccharomyces pastorianus
gagtcaagtgctctgttaacggaca

SEQ ID NO: 115538 - DNA, 25 bp, Saccharomyces pastorianus
aaagcctggtgaccatgttcactgt

SEQ ID NO: 115539 - DNA, 25 bp, Saccharomyces pastorianus
gagaagttctcatcctacaaatcaa

SEQ ID NO: 115540 - DNA, 25 bp, Saccharomyces pastorianus
gttgcacccactccataaaatactg

SEQ ID NO: 115541 - DNA, 25 bp, Saccharomyces pastorianus
ttcatgccaatctctgctatagtct

SEQ ID NO: 115542 - DNA, 25 bp, Saccharomyces pastorianus
catttttatcccacgcggtgtgaag

SEQ ID NO: 115543 - DNA, 25 bp, Saccharomyces pastorianus
catgatatctctggaaccgggtgat

SEQ ID NO: 115544 - DNA, 25 bp, Saccharomyces pastorianus
tggtactaacctcatgttgcaccca

SEQ ID NO: 115545 - DNA, 25 bp, Saccharomyces pastorianus
tagacctgcaaactcgactttcaat

SEQ ID NO: 115546 - DNA, 25 bp, Saccharomyces pastorianus
atatcattttgactggtacgcctgc

SEQ ID NO: 115547 - DNA, 25 bp, Saccharomyces pastorianus
aagggttttgacaccttcatgccaa

SEQ ID NO: 115548 - DNA, 25 bp, Saccharomyces pastorianus
gaatttcgagacacgacgccctaca

SEQ ID NO: 115549 - DNA, 25 bp, Saccharomyces pastorianus
cgccctacaaatccgttcagagtta

SEQ ID NO: 115550 - DNA, 25 bp, Saccharomyces pastorianus
aatgcacagggttctttatctatgg

SEQ ID NO: 115551 - DNA, 25 bp, Saccharomyces pastorianus
tctcctatcacatcagcgtctgagc

SEQ ID NO: 115552 - DNA, 25 bp, Saccharomyces pastorianus
tacatagagccgtagtgaagcttca

SEQ ID NO: 115553 - DNA, 25 bp, Saccharomyces pastorianus
ttcagagttatctcggtgagcagca

SEQ ID NO: 115554 - DNA, 25 bp, Saccharomyces pastorianus
gatggtaccaatataagtcacttta

SEQ ID NO: 115555 - DNA, 25 bp, Saccharomyces pastorianus
ataagtatgattcgccagtctcctc

SEQ ID NO: 115556 - DNA, 25 bp, Saccharomyces pastorianus
agcgtctgagctgggcagtattgcc

SEQ ID NO: 115557 - DNA, 25 bp, Saccharomyces pastorianus
acggaagtcgtaagtcttcactata

SEQ ID NO: 115558 - DNA, 25 bp, Saccharomyces pastorianus
ggtgagcagcaattccaattcaaga

SEQ ID NO: 115559 - DNA, 25 bp, Saccharomyces pastorianus
gagagtagctaccttgtacttacaa

SEQ ID NO: 115560 - DNA, 25 bp, Saccharomyces pastorianus
aagccataatttttcgagcagggta

SEQ ID NO: 115561 - DNA, 25 bp, Saccharomyces pastorianus
aaggagaaacgccacaccgcatggg

SEQ ID NO: 115562 - DNA, 25 bp, Saccharomyces pastorianus
gtcagatacttacttgcatgtgcat

SEQ ID NO: 115563 - DNA, 25 bp, Saccharomyces pastorianus
agtttagcttcaccttttggctcaa

SEQ ID NO: 115564 - DNA, 25 bp, Saccharomyces pastorianus
aagaccgctgggttatctcccagta

SEQ ID NO: 115565 - DNA, 25 bp, Saccharomyces pastorianus
gaacctgatgttcatatccccatga

SEQ ID NO: 115566 - DNA, 25 bp, Saccharomyces pastorianus
tagcatcaacctacttgtactcgat

SEQ ID NO: 115567 - DNA, 25 bp, Saccharomyces pastorianus
gagtttgattcttacagccgttccc

SEQ ID NO: 115568 - DNA, 25 bp, Saccharomyces pastorianus
gattcgtttgatgatggctctagtt

SEQ ID NO: 115569 - DNA, 25 bp, Saccharomyces pastorianus
atgtgccgtgggatagtcagatact

SEQ ID NO: 115570 - DNA, 25 bp, Saccharomyces pastorianus
gggtcccaaccacagaagaagaatt

SEQ ID NO: 115571 - DNA, 25 bp, Saccharomyces pastorianus
gtgtatgccgttattctacagaggc

SEQ ID NO: 115572 - DNA, 25 bp, Saccharomyces pastorianus
aaacctctgtcgatgtacttggaaa

SEQ ID NO: 115573 - DNA, 25 bp, Saccharomyces pastorianus
ggacgctatacatgaggccttttta

SEQ ID NO: 115574 - DNA, 25 bp, Saccharomyces pastorianus
aggacctctggcaaatgagcccgta

SEQ ID NO: 115575 - DNA, 25 bp, Saccharomyces pastorianus
atctattgaagatccgcgctaccaa

SEQ ID NO: 115576 - DNA, 25 bp, Saccharomyces pastorianus
ttagatccattttgggtcccaacca

SEQ ID NO: 115577 - DNA, 25 bp, Saccharomyces pastorianus
tgaggcctttttagactggtcccca

SEQ ID NO: 115578 - DNA, 25 bp, Saccharomyces pastorianus
gcacatgtgcccgttgtggaagcat

SEQ ID NO: 115579 - DNA, 25 bp, Saccharomyces pastorianus
caattggtattttccggattcgagt

SEQ ID NO: 115580 - DNA, 25 bp, Saccharomyces pastorianus
gcccgtacagggaatgtgtgttctt

SEQ ID NO: 115581 - DNA, 25 bp, Saccharomyces pastorianus
ctaacgtatgtagacgataatgacg

SEQ ID NO: 115582 - DNA, 25 bp, Saccharomyces pastorianus
ttagtctgcggctacccattcaatc

SEQ ID NO: 115583 - DNA, 25 bp, Saccharomyces pastorianus
aatatgtcccagcttagtctgcggc

SEQ ID NO: 115584 - DNA, 25 bp, Saccharomyces pastorianus
gcggctacccattcaatcaaagaga

SEQ ID NO: 115585 - DNA, 25 bp, Saccharomyces pastorianus
tccagattgcaatgaaagacttcaa

SEQ ID NO: 115586 - DNA, 25 bp, Saccharomyces pastorianus
ccaagtattttgtccagattgcaat

SEQ ID NO: 115587 - DNA, 25 bp, Saccharomyces pastorianus
gccattataatatgtcccagcttag

SEQ ID NO: 115588 - DNA, 25 bp, Saccharomyces pastorianus
tgataagcccgactcccaagtattt

SEQ ID NO: 115589 - DNA, 25 bp, Saccharomyces pastorianus
acgataatgacgtcttaaaagttgc

SEQ ID NO: 115590 - DNA, 25 bp, Saccharomyces pastorianus
ccgactcccaagtattttgtccaga

SEQ ID NO: 115591 - DNA, 25 bp, Saccharomyces pastorianus
gaagtactcgaaaatctaacgtatg

SEQ ID NO: 115592 - DNA, 25 bp, Saccharomyces pastorianus
ttgttgtttcttctggttctaccaa

SEQ ID NO: 115593 - DNA, 25 bp, Saccharomyces pastorianus
ttgttgtcactgaagatcccgctta

SEQ ID NO: 115594 - DNA, 25 bp, Saccharomyces pastorianus
ctactgcttgttcttacggtgctgg

SEQ ID NO: 115595 - DNA, 25 bp, Saccharomyces pastorianus
agccaactttaatctcttctgactc

SEQ ID NO: 115596 - DNA, 25 bp, Saccharomyces pastorianus
aaacgtggtgtcttgtccgtcactt

SEQ ID NO: 115597 - DNA, 25 bp, Saccharomyces pastorianus
aattagtgtactccggtgtcttcac

SEQ ID NO: 115598 - DNA, 25 bp, Saccharomyces pastorianus
tatgacggtggttactcttccagtt

SEQ ID NO: 115599 - DNA, 25 bp, Saccharomyces pastorianus
cttatgccattccagtcgctaataa

SEQ ID NO: 115600 - DNA, 25 bp, Saccharomyces pastorianus
taacttcactactccttatggtcta

SEQ ID NO: 115601 - DNA, 25 bp, Saccharomyces pastorianus
gaaatcccagtcgtatatgctcaag

SEQ ID NO: 115602 - DNA, 25 bp, Saccharomyces pastorianus
aacgctgtgggtgctggttacctat

SEQ ID NO: 115603 - DNA, 25 bp, Saccharomyces pastorianus
gatatttggttctggtggcacgaca

SEQ ID NO: 115604 - DNA, 25 bp, Saccharomyces pastorianus
atggcgtgagtggtaccgtttacat

SEQ ID NO: 115605 - DNA, 25 bp, Saccharomyces pastorianus
gagcgggttcaattcaatgaccttt

SEQ ID NO: 115606 - DNA, 25 bp, Saccharomyces pastorianus
gatggcaatgaacccaacttaaatt

SEQ ID NO: 115607 - DNA, 25 bp, Saccharomyces pastorianus
gggtttttcttcgtattgtgtctat

SEQ ID NO: 115608 - DNA, 25 bp, Saccharomyces pastorianus
gattccccattcacagcaaggcagc

SEQ ID NO: 115609 - DNA, 25 bp, Saccharomyces pastorianus
aatgttcgctaaagctttcgagcta

SEQ ID NO: 115610 - DNA, 25 bp, Saccharomyces pastorianus
tataagagccaccaacgccaatacg

SEQ ID NO: 115611 - DNA, 25 bp, Saccharomyces pastorianus
aagtctctaccattctgatctattt

SEQ ID NO: 115612 - DNA, 25 bp, Saccharomyces pastorianus
gagccctctcagaacttttcttaga

SEQ ID NO: 115613 - DNA, 25 bp, Saccharomyces pastorianus
tacatggttactgctgggtttttct

SEQ ID NO: 115614 - DNA, 25 bp, Saccharomyces pastorianus
tggcggacttacagcgagacgaaac

SEQ ID NO: 115615 - DNA, 25 bp, Saccharomyces pastorianus
actatcacaataccacgtttcactg

SEQ ID NO: 115616 - DNA, 25 bp, Saccharomyces pastorianus
tatcgaggccaataccactgacttg

SEQ ID NO: 115617 - DNA, 25 bp, Saccharomyces pastorianus
tatccccgtggatatttacccaaca

SEQ ID NO: 115618 - DNA, 25 bp, Saccharomyces pastorianus
tttcatcggatttgtacacgctaat

SEQ ID NO: 115619 - DNA, 25 bp, Saccharomyces pastorianus
gttcactggtttatcgctacaattg

SEQ ID NO: 115620 - DNA, 25 bp, Saccharomyces pastorianus
attaatcaccactcggctaggtatc

SEQ ID NO: 115621 - DNA, 25 bp, Saccharomyces pastorianus
gtctgactcgtatcctagtgagcat

SEQ ID NO: 115622 - DNA, 25 bp, Saccharomyces pastorianus
tagtgactttccaggtcttgtctga

SEQ ID NO: 115623 - DNA, 25 bp, Saccharomyces pastorianus
atggtccggcctcagaatgttcact

SEQ ID NO: 115624 - DNA, 25 bp, Saccharomyces pastorianus
gagcatgccatggttccaatacaag

SEQ ID NO: 115625 - DNA, 25 bp, Saccharomyces pastorianus
agttgggaaccacagctcttcgtcg

SEQ ID NO: 115626 - DNA, 25 bp, Saccharomyces pastorianus
ggataagcacttgtccgtcaactgc

SEQ ID NO: 115627 - DNA, 25 bp, Saccharomyces pastorianus
ataccagcaaattctcgcccaacga

SEQ ID NO: 115628 - DNA, 25 bp, Saccharomyces pastorianus
ggtagtacaagttcaacgccagttg

SEQ ID NO: 115629 - DNA, 25 bp, Saccharomyces pastorianus
gaataacctgccattgacaaatccc

SEQ ID NO: 115630 - DNA, 25 bp, Saccharomyces pastorianus
gcctcaaccgctggtgtagtagata

SEQ ID NO: 115631 - DNA, 25 bp, Saccharomyces pastorianus
accaccatcgtctaataacggtact

SEQ ID NO: 115632 - DNA, 25 bp, Saccharomyces pastorianus
gacaaatcccagcaaactacgagaa

SEQ ID NO: 115633 - DNA, 25 bp, Saccharomyces pastorianus
gatatttttaagcatgccatgcaga

SEQ ID NO: 115634 - DNA, 25 bp, Saccharomyces pastorianus
aaatgtacggaaagctgccatcaaa

SEQ ID NO: 115635 - DNA, 25 bp, Saccharomyces pastorianus
gaaagcggaactattgataccagca

SEQ ID NO: 115636 - DNA, 25 bp, Saccharomyces pastorianus
gagaccccttctactgggtgtcaaa

SEQ ID NO: 115637 - DNA, 25 bp, Saccharomyces pastorianus
gtcaaactttgtaactggctatcca

SEQ ID NO: 115638 - DNA, 25 bp, Saccharomyces pastorianus
gagcggtttcgcatatcatgaactg

SEQ ID NO: 115639 - DNA, 25 bp, Saccharomyces pastorianus
gttgttaagagctctgtccaccatg

SEQ ID NO: 115640 - DNA, 25 bp, Saccharomyces pastorianus
acagtggaactcctctttgcaggcg

SEQ ID NO: 115641 - DNA, 25 bp, Saccharomyces pastorianus
atccagattttgcatcgagacccct

SEQ ID NO: 115642 - DNA, 25 bp, Saccharomyces pastorianus
atttccttggttctctaatgtttgg

SEQ ID NO: 115643 - DNA, 25 bp, Saccharomyces pastorianus
gtgggttgttgtatctcttgctaca

SEQ ID NO: 115644 - DNA, 25 bp, Saccharomyces pastorianus
aatatccttcattacctgcaagctg

SEQ ID NO: 115645 - DNA, 25 bp, Saccharomyces pastorianus
aagatattatcgacggttcccaatt

SEQ ID NO: 115646 - DNA, 25 bp, Saccharomyces pastorianus
gtccaccatgacagtttgacctctg

SEQ ID NO: 115647 - DNA, 25 bp, Saccharomyces pastorianus
ggcaatgttttctccatgtcatcta

SEQ ID NO: 115648 - DNA, 25 bp, Saccharomyces pastorianus
tgtccaattattcaagttcgcgcaa

SEQ ID NO: 115649 - DNA, 25 bp, Saccharomyces pastorianus
tagagtctcccacaactataaccaa

SEQ ID NO: 115650 - DNA, 25 bp, Saccharomyces pastorianus
ttcagcatccatgggtacaacgtct

SEQ ID NO: 115651 - DNA, 25 bp, Saccharomyces pastorianus
atccatcaggcctgaattctccaaa

SEQ ID NO: 115652 - DNA, 25 bp, Saccharomyces pastorianus
ttttacctccaactttttcagcatc

SEQ ID NO: 115653 - DNA, 25 bp, Saccharomyces pastorianus
ttacctcctataccgaccagagatg

SEQ ID NO: 115654 - DNA, 25 bp, Saccharomyces pastorianus
aagagatagaccctcacgcctagat

SEQ ID NO: 115655 - DNA, 25 bp, Saccharomyces pastorianus
agttcgcgcaatacgccgttagtaa

SEQ ID NO: 115656 - DNA, 25 bp, Saccharomyces pastorianus
aggctattggtgtaacttcgttgtc

SEQ ID NO: 115657 - DNA, 25 bp, Saccharomyces pastorianus
aaatgacgcattttattcttccagc

SEQ ID NO: 115658 - DNA, 25 bp, Saccharomyces pastorianus
gaaagactgttaaagatggcccatt

SEQ ID NO: 115659 - DNA, 25 bp, Saccharomyces pastorianus
cagaagatgtggatgatgcgtcgac

SEQ ID NO: 115660 - DNA, 25 bp, Saccharomyces pastorianus
atgccgatgatgtttttactggtac

SEQ ID NO: 115661 - DNA, 25 bp, Saccharomyces pastorianus
caatctccaagtttaataatgccga

SEQ ID NO: 115662 - DNA, 25 bp, Saccharomyces pastorianus
aggtatttctattgatgatcatccg

SEQ ID NO: 115663 - DNA, 25 bp, Saccharomyces pastorianus
ttgaacctctttcccaatgaattgt

SEQ ID NO: 115664 - DNA, 25 bp, Saccharomyces pastorianus
gcaaacccaacataatcctagacga

SEQ ID NO: 115665 - DNA, 25 bp, Saccharomyces pastorianus
aacatcggactatccatgctggcaa

SEQ ID NO: 115666 - DNA, 25 bp, Saccharomyces pastorianus
gatcatccgtataatttgaacctct

SEQ ID NO: 115667 - DNA, 25 bp, Saccharomyces pastorianus
taaagatggcccattttataccgga

SEQ ID NO: 115668 - DNA, 25 bp, Saccharomyces pastorianus
gagcggtaaacgcaaacccaacata

SEQ ID NO: 115669 - DNA, 25 bp, Saccharomyces pastorianus
gtttgtccttttccacttgggcagc

SEQ ID NO: 115670 - DNA, 25 bp, Saccharomyces pastorianus
agaggaacccatacatacacagaga

SEQ ID NO: 115671 - DNA, 25 bp, Saccharomyces pastorianus
aagcgttttcaaacaactcctgttg

SEQ ID NO: 115672 - DNA, 25 bp, Saccharomyces pastorianus
gttgcagcatcatctggcttgtcga

SEQ ID NO: 115673 - DNA, 25 bp, Saccharomyces pastorianus
aagaagttgtttctgctgttgcagc

SEQ ID NO: 115674 - DNA, 25 bp, Saccharomyces pastorianus
agtagttcctcaatatcagcatcac

SEQ ID NO: 115675 - DNA, 25 bp, Saccharomyces pastorianus
gtcttttgatctcttttcctctttg

SEQ ID NO: 115676 - DNA, 25 bp, Saccharomyces pastorianus
actcctgttgtcttttaactcttct

SEQ ID NO: 115677 - DNA, 25 bp, Saccharomyces pastorianus
gagagcctattcttccagtagttcc

SEQ ID NO: 115678 - DNA, 25 bp, Saccharomyces pastorianus
ctggcttgtcgatcaggtcttttga

SEQ ID NO: 115679 - DNA, 25 bp, Saccharomyces pastorianus
atcagcatcactatctgggtccaac

SEQ ID NO: 115680 - DNA, 25 bp, Saccharomyces pastorianus
aagaaatatcgcatccagggaattg

SEQ ID NO: 115681 - DNA, 25 bp, Saccharomyces pastorianus
tgtaggtggttatttactcttaaga

SEQ ID NO: 115682 - DNA, 25 bp, Saccharomyces pastorianus
gtcaactatgactacaagcacttta

SEQ ID NO: 115683 - DNA, 25 bp, Saccharomyces pastorianus
acaggagttgtttgaaaacgctttg

SEQ ID NO: 115684 - DNA, 25 bp, Saccharomyces pastorianus
gaaaccaagggttggacccagatag

SEQ ID NO: 115685 - DNA, 25 bp, Saccharomyces pastorianus
gcaacagcagaaacaacttctttcg

SEQ ID NO: 115686 - DNA, 25 bp, Saccharomyces pastorianus
ggatacctggatggcaaaactagtc

SEQ ID NO: 115687 - DNA, 25 bp, Saccharomyces pastorianus
aagccagatgatgctgcaacagcag

SEQ ID NO: 115688 - DNA, 25 bp, Saccharomyces pastorianus
gtagcggaaacatgggtggatacct

SEQ ID NO: 115689 - DNA, 25 bp, Saccharomyces pastorianus
gaagcagttggctgcccaagtggaa

SEQ ID NO: 115690 - DNA, 25 bp, Saccharomyces pastorianus
aaagacctgatcgacaagccagatg

SEQ ID NO: 115691 - DNA, 25 bp, Saccharomyces pastorianus
aatccgccgaggtggaagacgtcca

SEQ ID NO: 115692 - DNA, 25 bp, Saccharomyces pastorianus
gaattcccggaagccgcaggcaaaa

SEQ ID NO: 115693 - DNA, 25 bp, Saccharomyces pastorianus
aagcggaaggaatcccctcaatgga

SEQ ID NO: 115694 - DNA, 25 bp, Saccharomyces pastorianus
gtaacactgtttgggcctgtggcgc

SEQ ID NO: 115695 - DNA, 25 bp, Saccharomyces pastorianus
gtccgcgggctgtggaaattctatc

SEQ ID NO: 115696 - DNA, 25 bp, Saccharomyces pastorianus
gacgaagcatatgcccgagagcaat

SEQ ID NO: 115697 - DNA, 25 bp, Saccharomyces pastorianus
taatgcccaatcaatctctaaccag

SEQ ID NO: 115698 - DNA, 25 bp, Saccharomyces pastorianus
ggttgttacagactctaatgcccaa

SEQ ID NO: 115699 - DNA, 25 bp, Saccharomyces pastorianus
gagcgctccacgtgaggccatttta

SEQ ID NO: 115700 - DNA, 25 bp, Saccharomyces pastorianus
atggctcacggctatggtaggttta

SEQ ID NO: 115701 - DNA, 25 bp, Saccharomyces pastorianus
gtaggaccactaccgttggacgtga

SEQ ID NO: 115702 - DNA, 25 bp, Saccharomyces pastorianus
ggacaaaactatgtagcgcatacta

SEQ ID NO: 115703 - DNA, 25 bp, Saccharomyces pastorianus
ctcattctctggctttagacttcaa

SEQ ID NO: 115704 - DNA, 25 bp, Saccharomyces pastorianus
ggctttagacttcaaatcgcggtgt

SEQ ID NO: 115705 - DNA, 25 bp, Saccharomyces pastorianus
gtagcgcatactatgtcagtcaggt

SEQ ID NO: 115706 - DNA, 25 bp, Saccharomyces pastorianus
tctcagtttgtttcgtttttcctca

SEQ ID NO: 115707 - DNA, 25 bp, Saccharomyces pastorianus
tactatgtcagtcaggtattgagaa

SEQ ID NO: 115708 - DNA, 25 bp, Saccharomyces pastorianus
tagacttcaaatcgcggtgtaaaaa

SEQ ID NO: 115709 - DNA, 25 bp, Saccharomyces pastorianus
tttttcctcattctctggctttaga

SEQ ID NO: 115710 - DNA, 25 bp, Saccharomyces pastorianus
ttgtttcgtttttcctcattctctg

SEQ ID NO: 115711 - DNA, 25 bp, Saccharomyces pastorianus
gtaaagaaatgccataccgtgattt

SEQ ID NO: 115712 - DNA, 25 bp, Saccharomyces pastorianus
gccataccgtgatttgattttgttt

SEQ ID NO: 115713 - DNA, 25 bp, Saccharomyces pastorianus
ggccctcatctattttctcggaaaa

SEQ ID NO: 115714 - DNA, 25 bp, Saccharomyces pastorianus
gaactactgccacgattttacaaaa

SEQ ID NO: 115715 - DNA, 25 bp, Saccharomyces pastorianus
aataacaggccctcatctattttct

SEQ ID NO: 115716 - DNA, 25 bp, Saccharomyces pastorianus
gaaactcagtgtccttcaaaatgac

SEQ ID NO: 115717 - DNA, 25 bp, Saccharomyces pastorianus
gatatttcgaaactcagtgtccttc

SEQ ID NO: 115718 - DNA, 25 bp, Saccharomyces pastorianus
catttcaagaactactgccacgatt

SEQ ID NO: 115719 - DNA, 25 bp, Saccharomyces pastorianus
gagcaatactaagcataccacttct

SEQ ID NO: 115720 - DNA, 25 bp, Saccharomyces pastorianus
taccacttctcatcacatggaactc

SEQ ID NO: 115721 - DNA, 25 bp, Saccharomyces pastorianus
ggtcgataagaccagactgtttatt

SEQ ID NO: 115722 - DNA, 25 bp, Saccharomyces pastorianus
ggatcattatccttacacttttatt

SEQ ID NO: 115723 - DNA, 25 bp, Saccharomyces pastorianus
ttctcggaaaacttggtggattttg

SEQ ID NO: 115724 - DNA, 25 bp, Saccharomyces pastorianus
caagccactcagaaggataaatcct

SEQ ID NO: 115725 - DNA, 25 bp, Saccharomyces pastorianus
actgcttctacacaagccactcaga

SEQ ID NO: 115726 - DNA, 25 bp, Saccharomyces pastorianus
cactcagaaggataaatcctctgaa

SEQ ID NO: 115727 - DNA, 25 bp, Saccharomyces pastorianus
tctacacaagccactcagaaggata

SEQ ID NO: 115728 - DNA, 25 bp, Saccharomyces pastorianus
gcttctacacaagccactcagaagg

SEQ ID NO: 115729 - DNA, 25 bp, Saccharomyces pastorianus
atgcaaccgatcaccactgcttcta

SEQ ID NO: 115730 - DNA, 25 bp, Saccharomyces pastorianus
agccactcagaaggataaatcctct

SEQ ID NO: 115731 - DNA, 25 bp, Saccharomyces pastorianus
ttctacacaagccactcagaaggat

SEQ ID NO: 115732 - DNA, 25 bp, Saccharomyces pastorianus
aggataaatcctctgaaaagaaaga

SEQ ID NO: 115733 - DNA, 25 bp, Saccharomyces pastorianus
ctgcttctacacaagccactcagaa

SEQ ID NO: 115734 - DNA, 25 bp, Saccharomyces pastorianus
tacacaagccactcagaaggataaa

SEQ ID NO: 115735 - DNA, 25 bp, Saccharomyces pastorianus
gcaccggcgacacaactagtttcaa

SEQ ID NO: 115736 - DNA, 25 bp, Saccharomyces pastorianus
gattattttcaaaccggcactgcca

SEQ ID NO: 115737 - DNA, 25 bp, Saccharomyces pastorianus
gatagtacggacttgatgcacgtga

SEQ ID NO: 115738 - DNA, 25 bp, Saccharomyces pastorianus
gtaacgattcgaagtgggcaccggc

SEQ ID NO: 115739 - DNA, 25 bp, Saccharomyces pastorianus
aatgcggacgttgagtacggtacaa

SEQ ID NO: 115740 - DNA, 25 bp, Saccharomyces pastorianus
acatagtgggatcctgcgggttttt

SEQ ID NO: 115741 - DNA, 25 bp, Saccharomyces pastorianus
ttaacggaagaccacccatgggtag

SEQ ID NO: 115742 - DNA, 25 bp, Saccharomyces pastorianus
actgccaccagcattcgaaacgaat

SEQ ID NO: 115743 - DNA, 25 bp, Saccharomyces pastorianus
aagatgcatcaaaccgttaacggaa

SEQ ID NO: 115744 - DNA, 25 bp, Saccharomyces pastorianus
tatttcgaattctgctgagcgtacg

SEQ ID NO: 115745 - DNA, 25 bp, Saccharomyces pastorianus
cgaaaagcttttccgtgactggttg

SEQ ID NO: 115746 - DNA, 25 bp, Saccharomyces pastorianus
atgagtctttgatatatcttttcct

SEQ ID NO: 115747 - DNA, 25 bp, Saccharomyces pastorianus
tatcttttccttgaaactagttgtg

SEQ ID NO: 115748 - DNA, 25 bp, Saccharomyces pastorianus
ctttgatatatcttttccttgaaac

SEQ ID NO: 115749 - DNA, 25 bp, Saccharomyces pastorianus
agtctttgatatatcttttccttga

SEQ ID NO: 115750 - DNA, 25 bp, Saccharomyces pastorianus
gtctttgatatatcttttccttgaa

SEQ ID NO: 115751 - DNA, 25 bp, Saccharomyces pastorianus
gcatcttaatgagtctttgatatat

SEQ ID NO: 115752 - DNA, 25 bp, Saccharomyces pastorianus
gatatatcttttccttgaaactagt

SEQ ID NO: 115753 - DNA, 25 bp, Saccharomyces pastorianus
tgatatatcttttccttgaaactag

SEQ ID NO: 115754 - DNA, 25 bp, Saccharomyces pastorianus
tcttttccttgaaactagttgtgtc

SEQ ID NO: 115755 - DNA, 25 bp, Saccharomyces pastorianus
gagtctttgatatatcttttccttg

SEQ ID NO: 115756 - DNA, 25 bp, Saccharomyces pastorianus
atgcatcttaatgagtctttgatat

SEQ ID NO: 115757 - DNA, 25 bp, Saccharomyces pastorianus
attggataggttgtcgcgcgaccag

SEQ ID NO: 115758 - DNA, 25 bp, Saccharomyces pastorianus
caatccgtttcagagttaccactac

SEQ ID NO: 115759 - DNA, 25 bp, Saccharomyces pastorianus
aatccgtctcggatgctttagactt

SEQ ID NO: 115760 - DNA, 25 bp, Saccharomyces pastorianus
gcaggtgaagaaggccccgctcaat

SEQ ID NO: 115761 - DNA, 25 bp, Saccharomyces pastorianus
gatggtactatctctgccttaggat

SEQ ID NO: 115762 - DNA, 25 bp, Saccharomyces pastorianus
aatgttacggaaaggccgcctcatt

SEQ ID NO: 115763 - DNA, 25 bp, Saccharomyces pastorianus
cccgcctattttggtggttatatct

SEQ ID NO: 115764 - DNA, 25 bp, Saccharomyces pastorianus
atcgaagaagctaccccatttatta

SEQ ID NO: 115765 - DNA, 25 bp, Saccharomyces pastorianus
gcgaccagaccatgctaactatttg

SEQ ID NO: 115766 - DNA, 25 bp, Saccharomyces pastorianus
tttaaattctgatgaccccgcctat

SEQ ID NO: 115767 - DNA, 25 bp, Saccharomyces pastorianus
tatttgtcctctctccaacgtgaag

SEQ ID NO: 115768 - DNA, 25 bp, Saccharomyces pastorianus
gtcagaactaccaactagacctagt

SEQ ID NO: 115769 - DNA, 25 bp, Saccharomyces pastorianus
aagcaatgatcgttctgcacccaaa

SEQ ID NO: 115770 - DNA, 25 bp, Saccharomyces pastorianus
gcgcgactcgccttcagaaaatgaa

SEQ ID NO: 115771 - DNA, 25 bp, Saccharomyces pastorianus
ggtgctgcccatagagccaatgaaa

SEQ ID NO: 115772 - DNA, 25 bp, Saccharomyces pastorianus
agcttcatcttacaagcgcgactcg

SEQ ID NO: 115773 - DNA, 25 bp, Saccharomyces pastorianus
aaagagcaatactcaggcgcttccg

SEQ ID NO: 115774 - DNA, 25 bp, Saccharomyces pastorianus
gaagtagggcacttagacccacagg

SEQ ID NO: 115775 - DNA, 25 bp, Saccharomyces pastorianus
aggcgcttccgcaaggtcccaaggg

SEQ ID NO: 115776 - DNA, 25 bp, Saccharomyces pastorianus
agggataaccgcttacgtgaagagt

SEQ ID NO: 115777 - DNA, 25 bp, Saccharomyces pastorianus
atacacgagatagcggtgctgccca

SEQ ID NO: 115778 - DNA, 25 bp, Saccharomyces pastorianus
caacgttcacaattacggtttcctg

SEQ ID NO: 115779 - DNA, 25 bp, Saccharomyces pastorianus
aaattgataaacttgccgtggcaga

SEQ ID NO: 115780 - DNA, 25 bp, Saccharomyces pastorianus
caccatttgatgttcctgttcatga

SEQ ID NO: 115781 - DNA, 25 bp, Saccharomyces pastorianus
tttcgccattttacctcatcatttg

SEQ ID NO: 115782 - DNA, 25 bp, Saccharomyces pastorianus
gagccaaatccgctttaagatctgg

SEQ ID NO: 115783 - DNA, 25 bp, Saccharomyces pastorianus
atcatttctaaatgtcagcctgacg

SEQ ID NO: 115784 - DNA, 25 bp, Saccharomyces pastorianus
catttttatcgcctttcgccatttt

SEQ ID NO: 115785 - DNA, 25 bp, Saccharomyces pastorianus
gacatgccacgctgtatacctaagg

SEQ ID NO: 115786 - DNA, 25 bp, Saccharomyces pastorianus
atacctaagggatcccgtcgctcga

SEQ ID NO: 115787 - DNA, 25 bp, Saccharomyces pastorianus
cgaccaggccaatccgaagtaattt

SEQ ID NO: 115788 - DNA, 25 bp, Saccharomyces pastorianus
tgatggttcactaacgttcgacccc

SEQ ID NO: 115789 - DNA, 25 bp, Saccharomyces pastorianus
gacgagttgatttcactggctacag

SEQ ID NO: 115790 - DNA, 25 bp, Saccharomyces pastorianus
taggttaaccatccctggcccatat

SEQ ID NO: 115791 - DNA, 25 bp, Saccharomyces pastorianus
tttccccaggtgatggtgccacctt

SEQ ID NO: 115792 - DNA, 25 bp, Saccharomyces pastorianus
gaatttccccaggtgatggtgccac

SEQ ID NO: 115793 - DNA, 25 bp, Saccharomyces pastorianus
cattacaccggtaccttggagaacg

SEQ ID NO: 115794 - DNA, 25 bp, Saccharomyces pastorianus
aagacaggtgacttggttaccattc

SEQ ID NO: 115795 - DNA, 25 bp, Saccharomyces pastorianus
aattgacagaatttccccaggtgat

SEQ ID NO: 115796 - DNA, 25 bp, Saccharomyces pastorianus
gtctgttggtgaaaaagctaggtta

SEQ ID NO: 115797 - DNA, 25 bp, Saccharomyces pastorianus
gctctccattccaatgtaacatcgg

SEQ ID NO: 115798 - DNA, 25 bp, Saccharomyces pastorianus
gggctctccattccaatgtaacatc

SEQ ID NO: 115799 - DNA, 25 bp, Saccharomyces pastorianus
gttaccattcattacaccggtacct

SEQ ID NO: 115800 - DNA, 25 bp, Saccharomyces pastorianus
gaaaaagctaggttaaccatccctg

SEQ ID NO: 115801 - DNA, 25 bp, Saccharomyces pastorianus
gctgttggccagatgcttattcaat

SEQ ID NO: 115802 - DNA, 25 bp, Saccharomyces pastorianus
ttactttgccagcagaccctgaata

SEQ ID NO: 115803 - DNA, 25 bp, Saccharomyces pastorianus
acaacattccttacttggtggactg

SEQ ID NO: 115804 - DNA, 25 bp, Saccharomyces pastorianus
aatccaccacatcccagtgaaagtt

SEQ ID NO: 115805 - DNA, 25 bp, Saccharomyces pastorianus
tagacgctacggtcgttcaattgaa

SEQ ID NO: 115806 - DNA, 25 bp, Saccharomyces pastorianus
tgtgccgctgatgacttagacgcta

SEQ ID NO: 115807 - DNA, 25 bp, Saccharomyces pastorianus
ggaggtaacgacgtcccatttggca

SEQ ID NO: 115808 - DNA, 25 bp, Saccharomyces pastorianus
atcgtcgttgcttctcgtaaacatg

SEQ ID NO: 115809 - DNA, 25 bp, Saccharomyces pastorianus
gaactttttgactaccacgatgctg

SEQ ID NO: 115810 - DNA, 25 bp, Saccharomyces pastorianus
ggtttcagcaagatcatcgtcgttg

SEQ ID NO: 115811 - DNA, 25 bp, Saccharomyces pastorianus
gatgatatcccacagttacttgatg

SEQ ID NO: 115812 - DNA, 25 bp, Saccharomyces pastorianus
agaggcccagaggatacgagagcaa

SEQ ID NO: 115813 - DNA, 25 bp, Saccharomyces pastorianus
ggaagtccctgcgagatcagcttag

SEQ ID NO: 115814 - DNA, 25 bp, Saccharomyces pastorianus
gaggacctggaattttaccagaaga

SEQ ID NO: 115815 - DNA, 25 bp, Saccharomyces pastorianus
aactacttagacgtcaaggcaatca

SEQ ID NO: 115816 - DNA, 25 bp, Saccharomyces pastorianus
gaccggcactagtttgggcagtaaa

SEQ ID NO: 115817 - DNA, 25 bp, Saccharomyces pastorianus
gatcagcttaggtctaatgctatta

SEQ ID NO: 115818 - DNA, 25 bp, Saccharomyces pastorianus
gtgagagaccgtgaaagttttacta

SEQ ID NO: 115819 - DNA, 25 bp, Saccharomyces pastorianus
aaaccactgaaattcgtgtcagaag

SEQ ID NO: 115820 - DNA, 25 bp, Saccharomyces pastorianus
gtaaagacatccagccctaaaccaa

SEQ ID NO: 115821 - DNA, 25 bp, Saccharomyces pastorianus
aaatatttagagaccggcactagtt

SEQ ID NO: 115822 - DNA, 25 bp, Saccharomyces pastorianus
agaacgattctaccactaatacaga

SEQ ID NO: 115823 - DNA, 25 bp, Saccharomyces pastorianus
tccagagtgctatcctgttggctat

SEQ ID NO: 115824 - DNA, 25 bp, Saccharomyces pastorianus
taaaactatcaagcgtccagagtgc

SEQ ID NO: 115825 - DNA, 25 bp, Saccharomyces pastorianus
aaacatcgacactattgccaaggaa

SEQ ID NO: 115826 - DNA, 25 bp, Saccharomyces pastorianus
gtacttccgtcagctgttaagccaa

SEQ ID NO: 115827 - DNA, 25 bp, Saccharomyces pastorianus
aacgctgcagaagcactggaccaaa

SEQ ID NO: 115828 - DNA, 25 bp, Saccharomyces pastorianus
ttgctcttttgtacttcggcgataa

SEQ ID NO: 115829 - DNA, 25 bp, Saccharomyces pastorianus
gccaaggccaaaggcgtcgtcagtt

SEQ ID NO: 115830 - DNA, 25 bp, Saccharomyces pastorianus
gagctaatcaactccttgaacttag

SEQ ID NO: 115831 - DNA, 25 bp, Saccharomyces pastorianus
aaaatgtctcagtacttccgtcagc

SEQ ID NO: 115832 - DNA, 25 bp, Saccharomyces pastorianus
atatgatacccatgcttgctctttt

SEQ ID NO: 115833 - DNA, 25 bp, Saccharomyces pastorianus
aagaagccggttctgaagccgttca

SEQ ID NO: 115834 - DNA, 25 bp, Saccharomyces pastorianus
cattgttggacagaatcgttgcttt

SEQ ID NO: 115835 - DNA, 25 bp, Saccharomyces pastorianus
tgctttgttactcggtgtgccacta

SEQ ID NO: 115836 - DNA, 25 bp, Saccharomyces pastorianus
tctatacttgccgaacaacagctaa

SEQ ID NO: 115837 - DNA, 25 bp, Saccharomyces pastorianus
attttccagaaatcaggccatcgtg

SEQ ID NO: 115838 - DNA, 25 bp, Saccharomyces pastorianus
cacaaaatccggaaaccttgcttgg

SEQ ID NO: 115839 - DNA, 25 bp, Saccharomyces pastorianus
ttggttttactagctcttttgtgag

SEQ ID NO: 115840 - DNA, 25 bp, Saccharomyces pastorianus
gactttgaccaccactgctttgtta

SEQ ID NO: 115841 - DNA, 25 bp, Saccharomyces pastorianus
tgtgccactatccttatctatactt

SEQ ID NO: 115842 - DNA, 25 bp, Saccharomyces pastorianus
gacgatgtcgttcaattagacgaac

SEQ ID NO: 115843 - DNA, 25 bp, Saccharomyces pastorianus
aggcttctgcaacaaacaacgacgt

SEQ ID NO: 115844 - DNA, 25 bp, Saccharomyces pastorianus
gtgatgctaataacatattggccca

SEQ ID NO: 115845 - DNA, 25 bp, Saccharomyces pastorianus
ttctgtttcaaatgagtcaacggca

SEQ ID NO: 115846 - DNA, 25 bp, Saccharomyces pastorianus
ggttttgtttctcagaccaactgcc

SEQ ID NO: 115847 - DNA, 25 bp, Saccharomyces pastorianus
cgttcaatgcaaatcttcgagtatt

SEQ ID NO: 115848 - DNA, 25 bp, Saccharomyces pastorianus
cctgcgtgtattgtttttctgtttc

SEQ ID NO: 115849 - DNA, 25 bp, Saccharomyces pastorianus
gagtcaacggcaacgatcgttcaat

SEQ ID NO: 115850 - DNA, 25 bp, Saccharomyces pastorianus
ggcaacgatcgttcaatgcaaatct

SEQ ID NO: 115851 - DNA, 25 bp, Saccharomyces pastorianus
tttgtttctcagaccaactgccgtt

SEQ ID NO: 115852 - DNA, 25 bp, Saccharomyces pastorianus
ttctcagaccaactgccgttccttt

SEQ ID NO: 115853 - DNA, 25 bp, Saccharomyces pastorianus
gcgtgtattgtttttctgtttcaaa

SEQ ID NO: 115854 - DNA, 25 bp, Saccharomyces pastorianus
ctttcctgcgtgtattgtttttctg

SEQ ID NO: 115855 - DNA, 25 bp, Saccharomyces pastorianus
tgccgttcctttcctgcgtgtattg

SEQ ID NO: 115856 - DNA, 25 bp, Saccharomyces pastorianus
gtgtatgaatcttatcgtgcaaatc

SEQ ID NO: 115857 - DNA, 25 bp, Saccharomyces pastorianus
aatagccaccaaacttatacacaat

SEQ ID NO: 115858 - DNA, 25 bp, Saccharomyces pastorianus
gatgatccctttacaaagttccaca

SEQ ID NO: 115859 - DNA, 25 bp, Saccharomyces pastorianus
gagggcttccagaaaaggataccag

SEQ ID NO: 115860 - DNA, 25 bp, Saccharomyces pastorianus
gtatgactctattaatgacgacaaa

SEQ ID NO: 115861 - DNA, 25 bp, Saccharomyces pastorianus
gactttggattctttctgggtggat

SEQ ID NO: 115862 - DNA, 25 bp, Saccharomyces pastorianus
tgcgtgctccctatgaagtactaaa

SEQ ID NO: 115863 - DNA, 25 bp, Saccharomyces pastorianus
tcgtgcaaatcatgcgcagttattt

SEQ ID NO: 115864 - DNA, 25 bp, Saccharomyces pastorianus
ttgggattcgccagaagctcttgat

SEQ ID NO: 115865 - DNA, 25 bp, Saccharomyces pastorianus
gatgacactccaattgcgaaacctt

SEQ ID NO: 115866 - DNA, 25 bp, Saccharomyces pastorianus
gaagatattagtgcgtgctccctat

SEQ ID NO: 115867 - DNA, 25 bp, Saccharomyces pastorianus
gatgatagaaatgccctcctaaccc

SEQ ID NO: 115868 - DNA, 25 bp, Saccharomyces pastorianus
tataccttgagactttgatgcacat

SEQ ID NO: 115869 - DNA, 25 bp, Saccharomyces pastorianus
acgattcttcgccagattactttca

SEQ ID NO: 115870 - DNA, 25 bp, Saccharomyces pastorianus
ggagctcagcactcacggcttgaaa

SEQ ID NO: 115871 - DNA, 25 bp, Saccharomyces pastorianus
tcacttccgagtctgctattgtaac

SEQ ID NO: 115872 - DNA, 25 bp, Saccharomyces pastorianus
aatatcttggacttcatgcgccagc

SEQ ID NO: 115873 - DNA, 25 bp, Saccharomyces pastorianus
gcccatcaagcttaatcacttccga

SEQ ID NO: 115874 - DNA, 25 bp, Saccharomyces pastorianus
ttcatgcgccagctgttggctgaat

SEQ ID NO: 115875 - DNA, 25 bp, Saccharomyces pastorianus
gagacgaaatgcttgggacaaccat

SEQ ID NO: 115876 - DNA, 25 bp, Saccharomyces pastorianus
gtcaccataccctctcaattaagat

SEQ ID NO: 115877 - DNA, 25 bp, Saccharomyces pastorianus
gtccaaagccgccagtagcataata

SEQ ID NO: 115878 - DNA, 25 bp, Saccharomyces pastorianus
accagaagagtttttgcccgcttgg

SEQ ID NO: 115879 - DNA, 25 bp, Saccharomyces pastorianus
atgaccttcttttaggtccgggcat

SEQ ID NO: 115880 - DNA, 25 bp, Saccharomyces pastorianus
cggttgctgctttattgctgcatta

SEQ ID NO: 115881 - DNA, 25 bp, Saccharomyces pastorianus
gtgcgcctttcttattggtttgtga

SEQ ID NO: 115882 - DNA, 25 bp, Saccharomyces pastorianus
actgccattttgaacggctcgcaat

SEQ ID NO: 115883 - DNA, 25 bp, Saccharomyces pastorianus
atatatgtttgcgttctggatcccc

SEQ ID NO: 115884 - DNA, 25 bp, Saccharomyces pastorianus
cccgctcatacgtttgttcaactga

SEQ ID NO: 115885 - DNA, 25 bp, Saccharomyces pastorianus
ttggtgtcgccaacgtcatgaatac

SEQ ID NO: 115886 - DNA, 25 bp, Saccharomyces pastorianus
gaataccgttctgattgccgatatg

SEQ ID NO: 115887 - DNA, 25 bp, Saccharomyces pastorianus
ttcgtcaactactgtggtgcgcctt

SEQ ID NO: 115888 - DNA, 25 bp, Saccharomyces pastorianus
aattctagttggctcatgcgttggt

SEQ ID NO: 115889 - DNA, 25 bp, Saccharomyces pastorianus
aactggtaccgccattgggcatgag

SEQ ID NO: 115890 - DNA, 25 bp, Saccharomyces pastorianus
caattctccaacactgttccatatg

SEQ ID NO: 115891 - DNA, 25 bp, Saccharomyces pastorianus
agtgctacctctaaccggaatggct

SEQ ID NO: 115892 - DNA, 25 bp, Saccharomyces pastorianus
tggcgtacctcccatgaatcaaatg

SEQ ID NO: 115893 - DNA, 25 bp, Saccharomyces pastorianus
aatatgtcgccaccaacacagcagt

SEQ ID NO: 115894 - DNA, 25 bp, Saccharomyces pastorianus
cagtcgttcatgtcaatggcccaaa

SEQ ID NO: 115895 - DNA, 25 bp, Saccharomyces pastorianus
tcaagcacctcctcagggaaatggt

SEQ ID NO: 115896 - DNA, 25 bp, Saccharomyces pastorianus
aatgcgccgatgcaacatgggtaca

SEQ ID NO: 115897 - DNA, 25 bp, Saccharomyces pastorianus
tgcaaataattatcccttccctcaa

SEQ ID NO: 115898 - DNA, 25 bp, Saccharomyces pastorianus
caaacggtatgccttatccaccata

SEQ ID NO: 115899 - DNA, 25 bp, Saccharomyces pastorianus
tcaagcgtgaatccagtgctacctc

SEQ ID NO: 115900 - DNA, 25 bp, Saccharomyces pastorianus
taagctcagctgatggtattttgcc

SEQ ID NO: 115901 - DNA, 25 bp, Saccharomyces pastorianus
agccgcatcatgctgttttgcaagc

SEQ ID NO: 115902 - DNA, 25 bp, Saccharomyces pastorianus
tgtgcccttcgctatttcactgaaa

SEQ ID NO: 115903 - DNA, 25 bp, Saccharomyces pastorianus
gacgtcattttatctgtgaacggaa

SEQ ID NO: 115904 - DNA, 25 bp, Saccharomyces pastorianus
accgaccgttttgtaatatttgcag

SEQ ID NO: 115905 - DNA, 25 bp, Saccharomyces pastorianus
gaattatcattacttccctactgca

SEQ ID NO: 115906 - DNA, 25 bp, Saccharomyces pastorianus
gaagagggacaacatcacgcacaaa

SEQ ID NO: 115907 - DNA, 25 bp, Saccharomyces pastorianus
attcatttagagaccggtgacgtca

SEQ ID NO: 115908 - DNA, 25 bp, Saccharomyces pastorianus
aatgactttcgacaatgtgcccttc

SEQ ID NO: 115909 - DNA, 25 bp, Saccharomyces pastorianus
gtacggtatatctgccacaaacttc

SEQ ID NO: 115910 - DNA, 25 bp, Saccharomyces pastorianus
gtattttgccatcagccatgttaga

SEQ ID NO: 115911 - DNA, 25 bp, Saccharomyces pastorianus
gaccaaaaccaaaacatgtctgttt

SEQ ID NO: 115912 - DNA, 25 bp, Saccharomyces pastorianus
agctcaacggctttctattcaataa

SEQ ID NO: 115913 - DNA, 25 bp, Saccharomyces pastorianus
tcacaaacggcaaagaggagaccaa

SEQ ID NO: 115914 - DNA, 25 bp, Saccharomyces pastorianus
atgtactcaaaccactacttaaagg

SEQ ID NO: 115915 - DNA, 25 bp, Saccharomyces pastorianus
aatattagcttgcatcacaaacggc

SEQ ID NO: 115916 - DNA, 25 bp, Saccharomyces pastorianus
acatgtctgttttcaatgtactcaa

SEQ ID NO: 115917 - DNA, 25 bp, Saccharomyces pastorianus
tagatcattaaaagccttaaccgga

SEQ ID NO: 115918 - DNA, 25 bp, Saccharomyces pastorianus
ggctttctattcaataacgtttcta

SEQ ID NO: 115919 - DNA, 25 bp, Saccharomyces pastorianus
ggaaggaaaattgcccatccagctt

SEQ ID NO: 115920 - DNA, 25 bp, Saccharomyces pastorianus
aattgcccatccagcttattcaaag

SEQ ID NO: 115921 - DNA, 25 bp, Saccharomyces pastorianus
agtttcaaagtgaagctcaacggct

SEQ ID NO: 115922 - DNA, 25 bp, Saccharomyces pastorianus
ggtcggtaaagccactttgttgaca

SEQ ID NO: 115923 - DNA, 25 bp, Saccharomyces pastorianus
attaggtctgatccagtattggcta

SEQ ID NO: 115924 - DNA, 25 bp, Saccharomyces pastorianus
tggaattgcgcctttggtcggtaaa

SEQ ID NO: 115925 - DNA, 25 bp, Saccharomyces pastorianus
gtctagcgtaccgtgaaaacaagtt

SEQ ID NO: 115926 - DNA, 25 bp, Saccharomyces pastorianus
aagcgtccaaactagacccaagaag

SEQ ID NO: 115927 - DNA, 25 bp, Saccharomyces pastorianus
gctgaagccgctaaagttcaccaaa

SEQ ID NO: 115928 - DNA, 25 bp, Saccharomyces pastorianus
gaatccgctgatttggctagaacta

SEQ ID NO: 115929 - DNA, 25 bp, Saccharomyces pastorianus
aattagcatgtctagcgtaccgtga

SEQ ID NO: 115930 - DNA, 25 bp, Saccharomyces pastorianus
ggtatttatgttggaattgcgcctt

SEQ ID NO: 115931 - DNA, 25 bp, Saccharomyces pastorianus
attacattattcgaagaatccgctg

SEQ ID NO: 115932 - DNA, 25 bp, Saccharomyces pastorianus
aacgattttgacaaggctttgaagc

SEQ ID NO: 115933 - DNA, 25 bp, Saccharomyces pastorianus
gcctgtacgattattgtgttgctta

SEQ ID NO: 115934 - DNA, 25 bp, Saccharomyces pastorianus
tgagtacatcgacggtaaagcctgt

SEQ ID NO: 115935 - DNA, 25 bp, Saccharomyces pastorianus
catccttcatcatttgtttcctttg

SEQ ID NO: 115936 - DNA, 25 bp, Saccharomyces pastorianus
caactgtcgctggatttctggcaga

SEQ ID NO: 115937 - DNA, 25 bp, Saccharomyces pastorianus
aacttttcctttctagactcaactg

SEQ ID NO: 115938 - DNA, 25 bp, Saccharomyces pastorianus
gaaacattttcctcggtgaataccg

SEQ ID NO: 115939 - DNA, 25 bp, Saccharomyces pastorianus
caaggattccatacgttctttgata

SEQ ID NO: 115940 - DNA, 25 bp, Saccharomyces pastorianus
gtttgttccaatagcaagtcgtgca

SEQ ID NO: 115941 - DNA, 25 bp, Saccharomyces pastorianus
gcaagtcgtgcacaatatctaacat

SEQ ID NO: 115942 - DNA, 25 bp, Saccharomyces pastorianus
gagacggatccttctttttcaaatg

SEQ ID NO: 115943 - DNA, 25 bp, Saccharomyces pastorianus
agttgatacttctgatgcattgttg

SEQ ID NO: 115944 - DNA, 25 bp, Saccharomyces pastorianus
actgccgtcacttggtcaacaaaaa

SEQ ID NO: 115945 - DNA, 25 bp, Saccharomyces pastorianus
ttcgccttatcctgtggagaccact

SEQ ID NO: 115946 - DNA, 25 bp, Saccharomyces pastorianus
gaagcctaattgcttgatcgccaga

SEQ ID NO: 115947 - DNA, 25 bp, Saccharomyces pastorianus
gggtgccagtaatagcctcgatgtt

SEQ ID NO: 115948 - DNA, 25 bp, Saccharomyces pastorianus
ttagggcaatctcacacacattatg

SEQ ID NO: 115949 - DNA, 25 bp, Saccharomyces pastorianus
gatcgccagaaaatcactgccgtca

SEQ ID NO: 115950 - DNA, 25 bp, Saccharomyces pastorianus
aggatcacagttacttcgccttatc

SEQ ID NO: 115951 - DNA, 25 bp, Saccharomyces pastorianus
gtcgataccatggatattacggcaa

SEQ ID NO: 115952 - DNA, 25 bp, Saccharomyces pastorianus
atggctaagccgtcacaatgtcaaa

SEQ ID NO: 115953 - DNA, 25 bp, Saccharomyces pastorianus
aatctggcacagttcctcattaacg

SEQ ID NO: 115954 - DNA, 25 bp, Saccharomyces pastorianus
gcctcgatgttgaagacggtgatgt

SEQ ID NO: 115955 - DNA, 25 bp, Saccharomyces pastorianus
tcagaggctctggatgtgtgcccat

SEQ ID NO: 115956 - DNA, 25 bp, Saccharomyces pastorianus
tcattcctgaaaacgttgtaacggc

SEQ ID NO: 115957 - DNA, 25 bp, Saccharomyces pastorianus
cttggatatcgggttgcagtacatg

SEQ ID NO: 115958 - DNA, 25 bp, Saccharomyces pastorianus
tatcaaagacgacccggcagccaat

SEQ ID NO: 115959 - DNA, 25 bp, Saccharomyces pastorianus
gcactggcccctatttgtaatgaag

SEQ ID NO: 115960 - DNA, 25 bp, Saccharomyces pastorianus
tgcagtacatggaagcttggctcag

SEQ ID NO: 115961 - DNA, 25 bp, Saccharomyces pastorianus
gtaacggctgctaatctgctggaaa

SEQ ID NO: 115962 - DNA, 25 bp, Saccharomyces pastorianus
actgtctaaggcaagtccattgggt

SEQ ID NO: 115963 - DNA, 25 bp, Saccharomyces pastorianus
gtgagattactaccgagggaattgt

SEQ ID NO: 115964 - DNA, 25 bp, Saccharomyces pastorianus
gttgtacgacgaaattgtgtccact

SEQ ID NO: 115965 - DNA, 25 bp, Saccharomyces pastorianus
gggtgacaagaacaaattcgcgctg

SEQ ID NO: 115966 - DNA, 25 bp, Saccharomyces pastorianus
acccgcttcctctttatcgaaagat

SEQ ID NO: 115967 - DNA, 25 bp, Saccharomyces pastorianus
gttgactctcaaggtaactggtata

SEQ ID NO: 115968 - DNA, 25 bp, Saccharomyces pastorianus
caagttgtgatttggaggcctcctt

SEQ ID NO: 115969 - DNA, 25 bp, Saccharomyces pastorianus
gaagattgttcgatttgcctatgta

SEQ ID NO: 115970 - DNA, 25 bp, Saccharomyces pastorianus
aagattggtcatgctctcatatccg

SEQ ID NO: 115971 - DNA, 25 bp, Saccharomyces pastorianus
gatacccctcttcgtgatggtgata

SEQ ID NO: 115972 - DNA, 25 bp, Saccharomyces pastorianus
gatcaaaccgtgtcaagcaattttc

SEQ ID NO: 115973 - DNA, 25 bp, Saccharomyces pastorianus
tcttaaatcaccaaaggctctcacc

SEQ ID NO: 115974 - DNA, 25 bp, Saccharomyces pastorianus
actggtggatcaacttagcgtctta

SEQ ID NO: 115975 - DNA, 25 bp, Saccharomyces pastorianus
agaagctttacagcgtttgcagaat

SEQ ID NO: 115976 - DNA, 25 bp, Saccharomyces pastorianus
aattttcatatcaccatgcgcacat

SEQ ID NO: 115977 - DNA, 25 bp, Saccharomyces pastorianus
ccaactttggattgatggcctttcc

SEQ ID NO: 115978 - DNA, 25 bp, Saccharomyces pastorianus
tggttcttgtggtgttacctctgta

SEQ ID NO: 115979 - DNA, 25 bp, Saccharomyces pastorianus
ccatcttcagatgttgcctgtgtga

SEQ ID NO: 115980 - DNA, 25 bp, Saccharomyces pastorianus
catatcaacatcctgttcttcttct

SEQ ID NO: 115981 - DNA, 25 bp, Saccharomyces pastorianus
gttcgatgtcttcagtcatttgcct

SEQ ID NO: 115982 - DNA, 25 bp, Saccharomyces pastorianus
ttcttcatcgccagtcatatcaaca

SEQ ID NO: 115983 - DNA, 25 bp, Saccharomyces pastorianus
tcttcttggatgtgctttggttctt

SEQ ID NO: 115984 - DNA, 25 bp, Saccharomyces pastorianus
agaggcactagttccatcttcagat

SEQ ID NO: 115985 - DNA, 25 bp, Saccharomyces pastorianus
gtgtgatcctcctctacaatttgaa

SEQ ID NO: 115986 - DNA, 25 bp, Saccharomyces pastorianus
aagggcatttccaagcgtgtgatcc

SEQ ID NO: 115987 - DNA, 25 bp, Saccharomyces pastorianus
aattctacgtctggatttttcatta

SEQ ID NO: 115988 - DNA, 25 bp, Saccharomyces pastorianus
ttttgtggttactcgatacctcatc

SEQ ID NO: 115989 - DNA, 25 bp, Saccharomyces pastorianus
tggaaatgcccttcgttacgttata

SEQ ID NO: 115990 - DNA, 25 bp, Saccharomyces pastorianus
taagtttctcacacaggcaacatct

SEQ ID NO: 115991 - DNA, 25 bp, Saccharomyces pastorianus
taacaccacaagaaccaaagcacat

SEQ ID NO: 115992 - DNA, 25 bp, Saccharomyces pastorianus
aaccgcggtggatgctcttcaaaaa

SEQ ID NO: 115993 - DNA, 25 bp, Saccharomyces pastorianus
agaccgctacagaggtaacaccaca

SEQ ID NO: 115994 - DNA, 25 bp, Saccharomyces pastorianus
ggatcacacgcttggaaatgccctt

SEQ ID NO: 115995 - DNA, 25 bp, Saccharomyces pastorianus
gatggaactagtgcctcttttcaaa

SEQ ID NO: 115996 - DNA, 25 bp, Saccharomyces pastorianus
cttgatggatttatgtgacgttgta

SEQ ID NO: 115997 - DNA, 25 bp, Saccharomyces pastorianus
attgtagaggaggatcacacgcttg

SEQ ID NO: 115998 - DNA, 25 bp, Saccharomyces pastorianus
aatatcagaattcaaacctacggtg

SEQ ID NO: 115999 - DNA, 25 bp, Saccharomyces pastorianus
cagaaagctttgtcgatatcggtca

SEQ ID NO: 116000 - DNA, 25 bp, Saccharomyces pastorianus
ggtatctacctctgaaaaccaaagt

SEQ ID NO: 116001 - DNA, 25 bp, Saccharomyces pastorianus
aaatttctggattatcatcgatgac

SEQ ID NO: 116002 - DNA, 25 bp, Saccharomyces pastorianus
gatatcggtcattctgacgaagcat

SEQ ID NO: 116003 - DNA, 25 bp, Saccharomyces pastorianus
gacgaagcattgagactactgaaag

SEQ ID NO: 116004 - DNA, 25 bp, Saccharomyces pastorianus
tgacgttgacaagaccagtgagcgc

SEQ ID NO: 116005 - DNA, 25 bp, Saccharomyces pastorianus
gtttctgtggaaaaggtatctacct

SEQ ID NO: 116006 - DNA, 25 bp, Saccharomyces pastorianus
accagtgagcgcgtttctgtggaaa

SEQ ID NO: 116007 - DNA, 25 bp, Saccharomyces pastorianus
gtacattggttgttatattggccat

SEQ ID NO: 116008 - DNA, 25 bp, Saccharomyces pastorianus
ttgggtggtcaagatgctacagaaa

SEQ ID NO: 116009 - DNA, 25 bp, Saccharomyces pastorianus
gaagttgccgaacacaatggcccag

SEQ ID NO: 116010 - DNA, 25 bp, Saccharomyces pastorianus
agagttggctctagaaacatcgtct

SEQ ID NO: 116011 - DNA, 25 bp, Saccharomyces pastorianus
gagaaaggtatcaccaaaccagtaa

SEQ ID NO: 116012 - DNA, 25 bp, Saccharomyces pastorianus
aattccagacattatggcttcttag

SEQ ID NO: 116013 - DNA, 25 bp, Saccharomyces pastorianus
gatgatgagcagagcggtacgcaca

SEQ ID NO: 116014 - DNA, 25 bp, Saccharomyces pastorianus
gagtagactgccacatgggttccac

SEQ ID NO: 116015 - DNA, 25 bp, Saccharomyces pastorianus
gtgcgtgtattaccaaaaggagcta

SEQ ID NO: 116016 - DNA, 25 bp, Saccharomyces pastorianus
gaggatgcaatgatcgcccaagaat

SEQ ID NO: 116017 - DNA, 25 bp, Saccharomyces pastorianus
agaaacatcgtctagcagttcagat

SEQ ID NO: 116018 - DNA, 25 bp, Saccharomyces pastorianus
tgggtcatctactacaagtgcgtgt

SEQ ID NO: 116019 - DNA, 25 bp, Saccharomyces pastorianus
gacacttgaagagtattctgggatt

SEQ ID NO: 116020 - DNA, 25 bp, Saccharomyces pastorianus
aaggtttagccgcttctgatgatga

SEQ ID NO: 116021 - DNA, 25 bp, Saccharomyces pastorianus
ttttctctccactctgtcaataaag

SEQ ID NO: 116022 - DNA, 25 bp, Saccharomyces pastorianus
ggcacctctcaaaaatatcttcttc

SEQ ID NO: 116023 - DNA, 25 bp, Saccharomyces pastorianus
ggaggtgttgccattcattgtaagt

SEQ ID NO: 116024 - DNA, 25 bp, Saccharomyces pastorianus
ggccagaatttatggcacctctcaa

SEQ ID NO: 116025 - DNA, 25 bp, Saccharomyces pastorianus
gactcactttagttttcactccatt

SEQ ID NO: 116026 - DNA, 25 bp, Saccharomyces pastorianus
aataatactaggttcccagtctgga

SEQ ID NO: 116027 - DNA, 25 bp, Saccharomyces pastorianus
gtggctgcgtgggtaactatcataa

SEQ ID NO: 116028 - DNA, 25 bp, Saccharomyces pastorianus
tcttctgtttcacccttattactag

SEQ ID NO: 116029 - DNA, 25 bp, Saccharomyces pastorianus
agctgctcttctcgctttgatatca

SEQ ID NO: 116030 - DNA, 25 bp, Saccharomyces pastorianus
tccatttttagttttccgctctcag

SEQ ID NO: 116031 - DNA, 25 bp, Saccharomyces pastorianus
ggtgcctttgttatcaatgggctct

SEQ ID NO: 116032 - DNA, 25 bp, Saccharomyces pastorianus
ctccagactgggaacctagtattat

SEQ ID NO: 116033 - DNA, 25 bp, Saccharomyces pastorianus
gattccattatatgtcgatcgtggt

SEQ ID NO: 116034 - DNA, 25 bp, Saccharomyces pastorianus
ggcaacacctcctttttaactaatg

SEQ ID NO: 116035 - DNA, 25 bp, Saccharomyces pastorianus
gttttttccaagcatgatctctcca

SEQ ID NO: 116036 - DNA, 25 bp, Saccharomyces pastorianus
taaattctggcctgtctttattgac

SEQ ID NO: 116037 - DNA, 25 bp, Saccharomyces pastorianus
ctttgaggctggttcagacgctgat

SEQ ID NO: 116038 - DNA, 25 bp, Saccharomyces pastorianus
attatgatagttacccacgcagcca

SEQ ID NO: 116039 - DNA, 25 bp, Saccharomyces pastorianus
cagtgccaaagagcccattgataac

SEQ ID NO: 116040 - DNA, 25 bp, Saccharomyces pastorianus
aatccgctcttggtatgaacttgtt

SEQ ID NO: 116041 - DNA, 25 bp, Saccharomyces pastorianus
aacccacagtggaggctttaaagat

SEQ ID NO: 116042 - DNA, 25 bp, Saccharomyces pastorianus
cggagcctgctactcatgaagttat

SEQ ID NO: 116043 - DNA, 25 bp, Saccharomyces pastorianus
gctcctgccgaacatactcatttat

SEQ ID NO: 116044 - DNA, 25 bp, Saccharomyces pastorianus
gacttcatccttatgctaatcctgt

SEQ ID NO: 116045 - DNA, 25 bp, Saccharomyces pastorianus
tgagatccatagaagcgcctccgtt

SEQ ID NO: 116046 - DNA, 25 bp, Saccharomyces pastorianus
atgctaatcctgtaccgaattccga

SEQ ID NO: 116047 - DNA, 25 bp, Saccharomyces pastorianus
aaaactgatgattgtgtatactcca

SEQ ID NO: 116048 - DNA, 25 bp, Saccharomyces pastorianus
gagcagaatacaacagaccataata

SEQ ID NO: 116049 - DNA, 25 bp, Saccharomyces pastorianus
tcctgtaccgaattccgacaatgga

SEQ ID NO: 116050 - DNA, 25 bp, Saccharomyces pastorianus
tacccaaaccctgtgagatccatag

SEQ ID NO: 116051 - DNA, 25 bp, Saccharomyces pastorianus
aagttagttctgtgtattttgatga

SEQ ID NO: 116052 - DNA, 25 bp, Saccharomyces pastorianus
tgtgtatactccaagcaattagaac

SEQ ID NO: 116053 - DNA, 25 bp, Saccharomyces pastorianus
taaaccaccaaatgctcctgccgaa

SEQ ID NO: 116054 - DNA, 25 bp, Saccharomyces pastorianus
aaggccttcaatttctatgagacca

SEQ ID NO: 116055 - DNA, 25 bp, Saccharomyces pastorianus
gagttcttactgtttatcggcctaa

SEQ ID NO: 116056 - DNA, 25 bp, Saccharomyces pastorianus
tttgtttttgattctgctgcctttg

SEQ ID NO: 116057 - DNA, 25 bp, Saccharomyces pastorianus
tagtcttctgaaaccattaccattt

SEQ ID NO: 116058 - DNA, 25 bp, Saccharomyces pastorianus
ttatcggcctaaataccagtccatg

SEQ ID NO: 116059 - DNA, 25 bp, Saccharomyces pastorianus
ctatctttctagtttgctgtttcga

SEQ ID NO: 116060 - DNA, 25 bp, Saccharomyces pastorianus
attaccatttaattcagctttcgga

SEQ ID NO: 116061 - DNA, 25 bp, Saccharomyces pastorianus
ttttgtttgggatcggctgggccac

SEQ ID NO: 116062 - DNA, 25 bp, Saccharomyces pastorianus
tgggccaccttagatttacctgtta

SEQ ID NO: 116063 - DNA, 25 bp, Saccharomyces pastorianus
ggaaccaattccacagcacatgtag

SEQ ID NO: 116064 - DNA, 25 bp, Saccharomyces pastorianus
accagtccatgtgtttctgaaacta

SEQ ID NO: 116065 - DNA, 25 bp, Saccharomyces pastorianus
tgagagccatctttgccaccattaa

SEQ ID NO: 116066 - DNA, 25 bp, Saccharomyces pastorianus
atggtccaatctcttctttggtcga

SEQ ID NO: 116067 - DNA, 25 bp, Saccharomyces pastorianus
cattccatctttggccgaggtcgaa

SEQ ID NO: 116068 - DNA, 25 bp, Saccharomyces pastorianus
atcgaattttctagcgccgttcaag

SEQ ID NO: 116069 - DNA, 25 bp, Saccharomyces pastorianus
gtcgacgccctatcaaacttgttga

SEQ ID NO: 116070 - DNA, 25 bp, Saccharomyces pastorianus
agagtcaactctcagtctggtaaag

SEQ ID NO: 116071 - DNA, 25 bp, Saccharomyces pastorianus
aagctgcttcttacatccatctatc

SEQ ID NO: 116072 - DNA, 25 bp, Saccharomyces pastorianus
taggttctggttcttctacgcaagc

SEQ ID NO: 116073 - DNA, 25 bp, Saccharomyces pastorianus
cattctggtgatgtgtccattccat

SEQ ID NO: 116074 - DNA, 25 bp, Saccharomyces pastorianus
aagaccatgctgactccttgggtag

SEQ ID NO: 116075 - DNA, 25 bp, Saccharomyces pastorianus
gtcggtgattcttcagtgagagcca

SEQ ID NO: 116076 - DNA, 25 bp, Saccharomyces pastorianus
aataatactctgtttaaccatgatt

SEQ ID NO: 116077 - DNA, 25 bp, Saccharomyces pastorianus
gtttaaccatgattgttccttgtct

SEQ ID NO: 116078 - DNA, 25 bp, Saccharomyces pastorianus
aaccatgattgttccttgtcttttt

SEQ ID NO: 116079 - DNA, 25 bp, Saccharomyces pastorianus
gctcagcaagagcaataatactctg

SEQ ID NO: 116080 - DNA, 25 bp, Saccharomyces pastorianus
gcaataatactctgtttaaccatga

SEQ ID NO: 116081 - DNA, 25 bp, Saccharomyces pastorianus
ttaaccatgattgttccttgtcttt

SEQ ID NO: 116082 - DNA, 25 bp, Saccharomyces pastorianus
gagcaataatactctgtttaaccat

SEQ ID NO: 116083 - DNA, 25 bp, Saccharomyces pastorianus
tttaaccatgattgttccttgtctt

SEQ ID NO: 116084 - DNA, 25 bp, Saccharomyces pastorianus
accatgattgttccttgtctttttg

SEQ ID NO: 116085 - DNA, 25 bp, Saccharomyces pastorianus
taaccatgattgttccttgtctttt

SEQ ID NO: 116086 - DNA, 25 bp, Saccharomyces pastorianus
ccatgattgttccttgtctttttgt

SEQ ID NO: 116087 - DNA, 25 bp, Saccharomyces pastorianus
acctttgcagttgtttccagctatt

SEQ ID NO: 116088 - DNA, 25 bp, Saccharomyces pastorianus
ttttcttcggtattgcaagcatgct

SEQ ID NO: 116089 - DNA, 25 bp, Saccharomyces pastorianus
tacttgctttggtgattctaacggc

SEQ ID NO: 116090 - DNA, 25 bp, Saccharomyces pastorianus
aattgcttactttgggtctgataat

SEQ ID NO: 116091 - DNA, 25 bp, Saccharomyces pastorianus
taacggcaaccatacttttcatttc

SEQ ID NO: 116092 - DNA, 25 bp, Saccharomyces pastorianus
aacaagagtcgaattacgtcctaat

SEQ ID NO: 116093 - DNA, 25 bp, Saccharomyces pastorianus
attgggatatttggcatacggctca

SEQ ID NO: 116094 - DNA, 25 bp, Saccharomyces pastorianus
gggcaatagccttccagagactaaa

SEQ ID NO: 116095 - DNA, 25 bp, Saccharomyces pastorianus
aattatgttgtccacacctttgcag

SEQ ID NO: 116096 - DNA, 25 bp, Saccharomyces pastorianus
tcgtttcagttataggatccctcgc

SEQ ID NO: 116097 - DNA, 25 bp, Saccharomyces pastorianus
ttaatccagctgttctattccatcg

SEQ ID NO: 116098 - DNA, 25 bp, Saccharomyces pastorianus
cagtcagaactatacctaccgggaa

SEQ ID NO: 116099 - DNA, 25 bp, Saccharomyces pastorianus
atgtacgtcattgccatctaggata

SEQ ID NO: 116100 - DNA, 25 bp, Saccharomyces pastorianus
tttactgccagctgatttcgtcaag

SEQ ID NO: 116101 - DNA, 25 bp, Saccharomyces pastorianus
gaaatcattgagtcagtgcacctga

SEQ ID NO: 116102 - DNA, 25 bp, Saccharomyces pastorianus
ttaggctccaggtccaacatgttat

SEQ ID NO: 116103 - DNA, 25 bp, Saccharomyces pastorianus
ggtattggcagcagctacattcaag

SEQ ID NO: 116104 - DNA, 25 bp, Saccharomyces pastorianus
tggtcacaaatctagtatcctcgag

SEQ ID NO: 116105 - DNA, 25 bp, Saccharomyces pastorianus
gcgttaggtgccttttttgctggaa

SEQ ID NO: 116106 - DNA, 25 bp, Saccharomyces pastorianus
aaacgcacttgccagtcaactagat

SEQ ID NO: 116107 - DNA, 25 bp, Saccharomyces pastorianus
gggctccacagacatcacagaattt

SEQ ID NO: 116108 - DNA, 25 bp, Saccharomyces pastorianus
tacattcaagtattgggctccacag

SEQ ID NO: 116109 - DNA, 25 bp, Saccharomyces pastorianus
gtactacaaacgatcgtcactcaag

SEQ ID NO: 116110 - DNA, 25 bp, Saccharomyces pastorianus
tatagatctggtcagccttcacctg

SEQ ID NO: 116111 - DNA, 25 bp, Saccharomyces pastorianus
ggacggtctcactgaacattctata

SEQ ID NO: 116112 - DNA, 25 bp, Saccharomyces pastorianus
tatcccttgctagtgtgctgtggta

SEQ ID NO: 116113 - DNA, 25 bp, Saccharomyces pastorianus
gaagaacctcaagataccctcctag

SEQ ID NO: 116114 - DNA, 25 bp, Saccharomyces pastorianus
gtatcgttccacctttgaatttctg

SEQ ID NO: 116115 - DNA, 25 bp, Saccharomyces pastorianus
ctgtcccgttgaaagatacctctat

SEQ ID NO: 116116 - DNA, 25 bp, Saccharomyces pastorianus
aaaggtcttggtatcacatgcccca

SEQ ID NO: 116117 - DNA, 25 bp, Saccharomyces pastorianus
taaacttacaattcgcagccatcaa

SEQ ID NO: 116118 - DNA, 25 bp, Saccharomyces pastorianus
acatgccccacaagaacgtatcgtt

SEQ ID NO: 116119 - DNA, 25 bp, Saccharomyces pastorianus
ggaacttagccagtgtatccgaaga

SEQ ID NO: 116120 - DNA, 25 bp, Saccharomyces pastorianus
agctggtcaggccaacgctcaaagc

SEQ ID NO: 116121 - DNA, 25 bp, Saccharomyces pastorianus
gttggcaggcaaccaggcgacaaat

SEQ ID NO: 116122 - DNA, 25 bp, Saccharomyces pastorianus
gctcctttcttggagacatctgcta

SEQ ID NO: 116123 - DNA, 25 bp, Saccharomyces pastorianus
ggtgccaactctgtgcctagaaata

SEQ ID NO: 116124 - DNA, 25 bp, Saccharomyces pastorianus
tagtaaggccggtcaagtttcaaat

SEQ ID NO: 116125 - DNA, 25 bp, Saccharomyces pastorianus
gacacaaactgatcgcaccaatata

SEQ ID NO: 116126 - DNA, 25 bp, Saccharomyces pastorianus
atagacaattccacgggccaagctg

SEQ ID NO: 116127 - DNA, 25 bp, Saccharomyces pastorianus
gtagcacaactgtcgtgaatgccag

SEQ ID NO: 116128 - DNA, 25 bp, Saccharomyces pastorianus
gtaacaccagtgaagcctccaagag

SEQ ID NO: 116129 - DNA, 25 bp, Saccharomyces pastorianus
gaggcgttttacactctagcacgtt

SEQ ID NO: 116130 - DNA, 25 bp, Saccharomyces pastorianus
acaggtctcttaccaggacgggttg

SEQ ID NO: 116131 - DNA, 25 bp, Saccharomyces pastorianus
cacatcagcaaacatttctaccgaa

SEQ ID NO: 116132 - DNA, 25 bp, Saccharomyces pastorianus
aaggttcacatcagcaaacatttct

SEQ ID NO: 116133 - DNA, 25 bp, Saccharomyces pastorianus
cgggaaacaaggttcacatcagcaa

SEQ ID NO: 116134 - DNA, 25 bp, Saccharomyces pastorianus
aacaaggttcacatcagcaaacatt

SEQ ID NO: 116135 - DNA, 25 bp, Saccharomyces pastorianus
agacgaaacaaagctggaataaggg

SEQ ID NO: 116136 - DNA, 25 bp, Saccharomyces pastorianus
ggttcacatcagcaaacatttctac

SEQ ID NO: 116137 - DNA, 25 bp, Saccharomyces pastorianus
gcaaacatttctaccgaaaatctgg

SEQ ID NO: 116138 - DNA, 25 bp, Saccharomyces pastorianus
ttcacatcagcaaacatttctaccg

SEQ ID NO: 116139 - DNA, 25 bp, Saccharomyces pastorianus
ggaaacaaggttcacatcagcaaac

SEQ ID NO: 116140 - DNA, 25 bp, Saccharomyces pastorianus
gcaaagacgaaacaaagctggaata

SEQ ID NO: 116141 - DNA, 25 bp, Saccharomyces pastorianus
catcagcaaacatttctaccgaaaa

SEQ ID NO: 116142 - DNA, 25 bp, Saccharomyces pastorianus
cacatcagcaaacatttctaccgaa

SEQ ID NO: 116143 - DNA, 25 bp, Saccharomyces pastorianus
aaggttcacatcagcaaacatttct

SEQ ID NO: 116144 - DNA, 25 bp, Saccharomyces pastorianus
cgggaaacaaggttcacatcagcaa

SEQ ID NO: 116145 - DNA, 25 bp, Saccharomyces pastorianus
aacaaggttcacatcagcaaacatt

SEQ ID NO: 116146 - DNA, 25 bp, Saccharomyces pastorianus
agacgaaacaaagctggaataaggg

SEQ ID NO: 116147 - DNA, 25 bp, Saccharomyces pastorianus
ggttcacatcagcaaacatttctac

SEQ ID NO: 116148 - DNA, 25 bp, Saccharomyces pastorianus
gcaaacatttctaccgaaaatctgg

SEQ ID NO: 116149 - DNA, 25 bp, Saccharomyces pastorianus
ttcacatcagcaaacatttctaccg

SEQ ID NO: 116150 - DNA, 25 bp, Saccharomyces pastorianus
ggaaacaaggttcacatcagcaaac

SEQ ID NO: 116151 - DNA, 25 bp, Saccharomyces pastorianus
gcaaagacgaaacaaagctggaata

SEQ ID NO: 116152 - DNA, 25 bp, Saccharomyces pastorianus
catcagcaaacatttctaccgaaaa

SEQ ID NO: 116153 - DNA, 25 bp, Saccharomyces pastorianus
catttccccgtatgccacttggtta

SEQ ID NO: 116154 - DNA, 25 bp, Saccharomyces pastorianus
cagtagagcggttcgccgtagtcgt

SEQ ID NO: 116155 - DNA, 25 bp, Saccharomyces pastorianus
aaatggaaccattctagctcacagt

SEQ ID NO: 116156 - DNA, 25 bp, Saccharomyces pastorianus
gccacttggttacagtagcagtaga

SEQ ID NO: 116157 - DNA, 25 bp, Saccharomyces pastorianus
attctagctcacagtctgcgccatc

SEQ ID NO: 116158 - DNA, 25 bp, Saccharomyces pastorianus
gaaccattctagctcacagtctgcg

SEQ ID NO: 116159 - DNA, 25 bp, Saccharomyces pastorianus
atggaaccattctagctcacagtct

SEQ ID NO: 116160 - DNA, 25 bp, Saccharomyces pastorianus
tatgccacttggttacagtagcagt

SEQ ID NO: 116161 - DNA, 25 bp, Saccharomyces pastorianus
agcagtagagcggttcgccgtagtc

SEQ ID NO: 116162 - DNA, 25 bp, Saccharomyces pastorianus
ccccgtatgccacttggttacagta

SEQ ID NO: 116163 - DNA, 25 bp, Saccharomyces pastorianus
cagtagcagtagagcggttcgccgt

SEQ ID NO: 116164 - DNA, 25 bp, Saccharomyces pastorianus
gtcgggaagtcctcaatagtcctca

SEQ ID NO: 116165 - DNA, 25 bp, Saccharomyces pastorianus
aagaacctactattggtgccgcatt

SEQ ID NO: 116166 - DNA, 25 bp, Saccharomyces pastorianus
ggcgaaaaagtaccatgtcctgaac

SEQ ID NO: 116167 - DNA, 25 bp, Saccharomyces pastorianus
gggctatggaagcaccagctgtaca

SEQ ID NO: 116168 - DNA, 25 bp, Saccharomyces pastorianus
gagaacctcttatatttcgaagcaa

SEQ ID NO: 116169 - DNA, 25 bp, Saccharomyces pastorianus
gctcaagctgctttggtagtttttg

SEQ ID NO: 116170 - DNA, 25 bp, Saccharomyces pastorianus
tactcggagaatctgctgtcgggaa

SEQ ID NO: 116171 - DNA, 25 bp, Saccharomyces pastorianus
atcgatctcgaatcaacgactgtag

SEQ ID NO: 116172 - DNA, 25 bp, Saccharomyces pastorianus
aaagctctactcatgatcgcacaat

SEQ ID NO: 116173 - DNA, 25 bp, Saccharomyces pastorianus
agagatttgctcctttagcgcctat

SEQ ID NO: 116174 - DNA, 25 bp, Saccharomyces pastorianus
gacatgatatcgttattgccttggt

SEQ ID NO: 116175 - DNA, 25 bp, Saccharomyces pastorianus
ccactgatgggtttagagctttcta

SEQ ID NO: 116176 - DNA, 25 bp, Saccharomyces pastorianus
aatttcggcccattgctttatcatt

SEQ ID NO: 116177 - DNA, 25 bp, Saccharomyces pastorianus
gtccatgtcgatatgtgctggctcg

SEQ ID NO: 116178 - DNA, 25 bp, Saccharomyces pastorianus
gggtccagaaagttgcgccatgcct

SEQ ID NO: 116179 - DNA, 25 bp, Saccharomyces pastorianus
gatactattggccacgtcttgaagc

SEQ ID NO: 116180 - DNA, 25 bp, Saccharomyces pastorianus
atgcctggatacatgtgccactatt

SEQ ID NO: 116181 - DNA, 25 bp, Saccharomyces pastorianus
gcattgccacaaatcatctggactt

SEQ ID NO: 116182 - DNA, 25 bp, Saccharomyces pastorianus
agttgtctcccattaaggtgccgga

SEQ ID NO: 116183 - DNA, 25 bp, Saccharomyces pastorianus
tacactgtttctcccactggaaaaa

SEQ ID NO: 116184 - DNA, 25 bp, Saccharomyces pastorianus
gtcacattatacattttcgcgaagg

SEQ ID NO: 116185 - DNA, 25 bp, Saccharomyces pastorianus
aatactttgtgggtatggccgctac

SEQ ID NO: 116186 - DNA, 25 bp, Saccharomyces pastorianus
catggaatgtagtgcactgactggt

SEQ ID NO: 116187 - DNA, 25 bp, Saccharomyces pastorianus
aacgctctgggatacagcgggacaa

SEQ ID NO: 116188 - DNA, 25 bp, Saccharomyces pastorianus
gcttgtggcaagacctctttactat

SEQ ID NO: 116189 - DNA, 25 bp, Saccharomyces pastorianus
atggttcccattgaagatgcgaaac

SEQ ID NO: 116190 - DNA, 25 bp, Saccharomyces pastorianus
caatatcatccgacagtgttcgaga

SEQ ID NO: 116191 - DNA, 25 bp, Saccharomyces pastorianus
gcattacgatattgtcctgacgcac

SEQ ID NO: 116192 - DNA, 25 bp, Saccharomyces pastorianus
aacgtttacgtccattctcatattc

SEQ ID NO: 116193 - DNA, 25 bp, Saccharomyces pastorianus
aatgctaccgatgaaatggttccca

SEQ ID NO: 116194 - DNA, 25 bp, Saccharomyces pastorianus
gcgaaacaagttgcaagggccattg

SEQ ID NO: 116195 - DNA, 25 bp, Saccharomyces pastorianus
tcactgattgcagagttgacggaat

SEQ ID NO: 116196 - DNA, 25 bp, Saccharomyces pastorianus
gcaccaatcgttcttgtaggcttga

SEQ ID NO: 116197 - DNA, 25 bp, Saccharomyces pastorianus
gcttcggaaggttcgcgataaactt

SEQ ID NO: 116198 - DNA, 25 bp, Saccharomyces pastorianus
tacgcgagtcgcaagcactactcat

SEQ ID NO: 116199 - DNA, 25 bp, Saccharomyces pastorianus
gatcaatgaattacgcgagtcgcaa

SEQ ID NO: 116200 - DNA, 25 bp, Saccharomyces pastorianus
atgacccagaaccattcaaaccaac

SEQ ID NO: 116201 - DNA, 25 bp, Saccharomyces pastorianus
gacggactgtatcaatcgatcaatg

SEQ ID NO: 116202 - DNA, 25 bp, Saccharomyces pastorianus
ccagttgaactgtcggtgtattcag

SEQ ID NO: 116203 - DNA, 25 bp, Saccharomyces pastorianus
ggcactggcgtccatccagttgaac

SEQ ID NO: 116204 - DNA, 25 bp, Saccharomyces pastorianus
tccaccgatttagacggactgtatc

SEQ ID NO: 116205 - DNA, 25 bp, Saccharomyces pastorianus
actactcatccttatgcttcggaag

SEQ ID NO: 116206 - DNA, 25 bp, Saccharomyces pastorianus
tagtataagcgctgacggcactggc

SEQ ID NO: 116207 - DNA, 25 bp, Saccharomyces pastorianus
tgtattcagtattgtccaccgattt

SEQ ID NO: 116208 - DNA, 25 bp, Saccharomyces pastorianus
gcttcggaaggttcgcgataaactt

SEQ ID NO: 116209 - DNA, 25 bp, Saccharomyces pastorianus
tacgcgagtcgcaagcactactcat

SEQ ID NO: 116210 - DNA, 25 bp, Saccharomyces pastorianus
gatcaatgaattacgcgagtcgcaa

SEQ ID NO: 116211 - DNA, 25 bp, Saccharomyces pastorianus
atgacccagaaccattcaaaccaac

SEQ ID NO: 116212 - DNA, 25 bp, Saccharomyces pastorianus
gacggactgtatcaatcgatcaatg

SEQ ID NO: 116213 - DNA, 25 bp, Saccharomyces pastorianus
ccagttgaactgtcggtgtattcag

SEQ ID NO: 116214 - DNA, 25 bp, Saccharomyces pastorianus
ggcactggcgtccatccagttgaac

SEQ ID NO: 116215 - DNA, 25 bp, Saccharomyces pastorianus
tccaccgatttagacggactgtatc

SEQ ID NO: 116216 - DNA, 25 bp, Saccharomyces pastorianus
actactcatccttatgcttcggaag

SEQ ID NO: 116217 - DNA, 25 bp, Saccharomyces pastorianus
tagtataagcgctgacggcactggc

SEQ ID NO: 116218 - DNA, 25 bp, Saccharomyces pastorianus
tgtattcagtattgtccaccgattt

SEQ ID NO: 116219 - DNA, 25 bp, Saccharomyces pastorianus
agccatcaaattaccacggaccaat

SEQ ID NO: 116220 - DNA, 25 bp, Saccharomyces pastorianus
gtacgtcttattgattacgcgtgta

SEQ ID NO: 116221 - DNA, 25 bp, Saccharomyces pastorianus
gatgcattgtctttagttgctactg

SEQ ID NO: 116222 - DNA, 25 bp, Saccharomyces pastorianus
acgcgtgtattaactttattccaag

SEQ ID NO: 116223 - DNA, 25 bp, Saccharomyces pastorianus
ttcaacacttacaaatccacaccaa

SEQ ID NO: 116224 - DNA, 25 bp, Saccharomyces pastorianus
tgatctcatctttaacttctggcga

SEQ ID NO: 116225 - DNA, 25 bp, Saccharomyces pastorianus
tgacgaagaagttcaaccaccggct

SEQ ID NO: 116226 - DNA, 25 bp, Saccharomyces pastorianus
agccactcttcgttcatatcctgaa

SEQ ID NO: 116227 - DNA, 25 bp, Saccharomyces pastorianus
tttgaagccgttttgatctcatctt

SEQ ID NO: 116228 - DNA, 25 bp, Saccharomyces pastorianus
gtcgaatcccatagatttcttcttg

SEQ ID NO: 116229 - DNA, 25 bp, Saccharomyces pastorianus
atcacttgataactttggttgggca

SEQ ID NO: 116230 - DNA, 25 bp, Saccharomyces pastorianus
ctgtgcaaaactaaccgatggtact

SEQ ID NO: 116231 - DNA, 25 bp, Saccharomyces pastorianus
gaggctcaaaactttctaagcggat

SEQ ID NO: 116232 - DNA, 25 bp, Saccharomyces pastorianus
ctcgagttccgatagcagtggcagt

SEQ ID NO: 116233 - DNA, 25 bp, Saccharomyces pastorianus
gtgacaatgggcagaactcgagttc

SEQ ID NO: 116234 - DNA, 25 bp, Saccharomyces pastorianus
cgaagtggacaatctgcgtgacaat

SEQ ID NO: 116235 - DNA, 25 bp, Saccharomyces pastorianus
gcagtggcagtaacgtgctttcaaa

SEQ ID NO: 116236 - DNA, 25 bp, Saccharomyces pastorianus
gagctatgatttacggtcttctcaa

SEQ ID NO: 116237 - DNA, 25 bp, Saccharomyces pastorianus
aattctctggcggaggtgtgcaata

SEQ ID NO: 116238 - DNA, 25 bp, Saccharomyces pastorianus
gagatcctactttttattttattca

SEQ ID NO: 116239 - DNA, 25 bp, Saccharomyces pastorianus
gcaaaaatatgcttctctgacagat

SEQ ID NO: 116240 - DNA, 25 bp, Saccharomyces pastorianus
gtcttctcaacctcctacaaagaga

SEQ ID NO: 116241 - DNA, 25 bp, Saccharomyces pastorianus
gcactggcctctaaattttacggca

SEQ ID NO: 116242 - DNA, 25 bp, Saccharomyces pastorianus
caacgcgaaaactgcaaggaagctt

SEQ ID NO: 116243 - DNA, 25 bp, Saccharomyces pastorianus
gaggatgcaccaactatcagaaccc

SEQ ID NO: 116244 - DNA, 25 bp, Saccharomyces pastorianus
gtatagctagtgaactgtcgacaat

SEQ ID NO: 116245 - DNA, 25 bp, Saccharomyces pastorianus
ggttattaaaatcgcactggcctct

SEQ ID NO: 116246 - DNA, 25 bp, Saccharomyces pastorianus
gaaccccaaatcatgagtatagcta

SEQ ID NO: 116247 - DNA, 25 bp, Saccharomyces pastorianus
tatgctcgaagttagggttctaccc

SEQ ID NO: 116248 - DNA, 25 bp, Saccharomyces pastorianus
gacgtggaattcacacattttctca

SEQ ID NO: 116249 - DNA, 25 bp, Saccharomyces pastorianus
gaaggagacgctagagcaatcgtaa

SEQ ID NO: 116250 - DNA, 25 bp, Saccharomyces pastorianus
ggttctacccttggatgaggatgca

SEQ ID NO: 116251 - DNA, 25 bp, Saccharomyces pastorianus
gagacatacattgcatctgccagtt

SEQ ID NO: 116252 - DNA, 25 bp, Saccharomyces pastorianus
ctccggaactcgactattttttgca

SEQ ID NO: 116253 - DNA, 25 bp, Saccharomyces pastorianus
tactgcgaaacctgttcatccaaag

SEQ ID NO: 116254 - DNA, 25 bp, Saccharomyces pastorianus
gatggcggattgtttcctgttaaca

SEQ ID NO: 116255 - DNA, 25 bp, Saccharomyces pastorianus
atcgtcaagtactctactgtggccg

SEQ ID NO: 116256 - DNA, 25 bp, Saccharomyces pastorianus
agtagatgttccttccaacgacagt

SEQ ID NO: 116257 - DNA, 25 bp, Saccharomyces pastorianus
ggcaaagttatcttacctcggatct

SEQ ID NO: 116258 - DNA, 25 bp, Saccharomyces pastorianus
ggactagctagttttatcaccatgt

SEQ ID NO: 116259 - DNA, 25 bp, Saccharomyces pastorianus
aatcacggttctttgtgtcgtccct

SEQ ID NO: 116260 - DNA, 25 bp, Saccharomyces pastorianus
gaactccttcttttgtcgtctttgt

SEQ ID NO: 116261 - DNA, 25 bp, Saccharomyces pastorianus
atcattgtcaccttagaactccttc

SEQ ID NO: 116262 - DNA, 25 bp, Saccharomyces pastorianus
acgacagtctctccgataacagtga

SEQ ID NO: 116263 - DNA, 25 bp, Saccharomyces pastorianus
agtagtcgtccaccgtatctaagga

SEQ ID NO: 116264 - DNA, 25 bp, Saccharomyces pastorianus
cttcaagtctcttccagatggcagg

SEQ ID NO: 116265 - DNA, 25 bp, Saccharomyces pastorianus
atgaaagctctgtctgctcttctaa

SEQ ID NO: 116266 - DNA, 25 bp, Saccharomyces pastorianus
atacttcccctagtgtgttgtacca

SEQ ID NO: 116267 - DNA, 25 bp, Saccharomyces pastorianus
ctctccgggttcagcatcgaatgaa

SEQ ID NO: 116268 - DNA, 25 bp, Saccharomyces pastorianus
tgcggtaactcctatcccattttta

SEQ ID NO: 116269 - DNA, 25 bp, Saccharomyces pastorianus
agaaatctcactagcagggaccctg

SEQ ID NO: 116270 - DNA, 25 bp, Saccharomyces pastorianus
agcgacttagacatgtccctcttat

SEQ ID NO: 116271 - DNA, 25 bp, Saccharomyces pastorianus
taaggaaccgctccatacgtaggaa

SEQ ID NO: 116272 - DNA, 25 bp, Saccharomyces pastorianus
gaagccagatgtatgccaccagtag

SEQ ID NO: 116273 - DNA, 25 bp, Saccharomyces pastorianus
gatattgcaaatgtcctggcttcgc

SEQ ID NO: 116274 - DNA, 25 bp, Saccharomyces pastorianus
gttaagtagctttgaggcccctaat

SEQ ID NO: 116275 - DNA, 25 bp, Saccharomyces pastorianus
gagcggtttcggtcatctatatgtc

SEQ ID NO: 116276 - DNA, 25 bp, Saccharomyces pastorianus
gggatgcccaagtttatcaacggtg

SEQ ID NO: 116277 - DNA, 25 bp, Saccharomyces pastorianus
attgaagacgacgaccttggtgatt

SEQ ID NO: 116278 - DNA, 25 bp, Saccharomyces pastorianus
tatcaacggtgttcggagcggtttc

SEQ ID NO: 116279 - DNA, 25 bp, Saccharomyces pastorianus
gatccgaatttccaggttatcaatt

SEQ ID NO: 116280 - DNA, 25 bp, Saccharomyces pastorianus
gtgcaaaatcgacttcatgaccagt

SEQ ID NO: 116281 - DNA, 25 bp, Saccharomyces pastorianus
gaagcctggttgtttcaagactgtt

SEQ ID NO: 116282 - DNA, 25 bp, Saccharomyces pastorianus
attatacctggcgagatactgaagc

SEQ ID NO: 116283 - DNA, 25 bp, Saccharomyces pastorianus
taaagcagaacgttccaccatggaa

SEQ ID NO: 116284 - DNA, 25 bp, Saccharomyces pastorianus
aagggcaccctagcggtaagttgat

SEQ ID NO: 116285 - DNA, 25 bp, Saccharomyces pastorianus
aacgtgacagctctggcatcgctat

SEQ ID NO: 116286 - DNA, 25 bp, Saccharomyces pastorianus
tgaatctaatgctccgctaactgct

SEQ ID NO: 116287 - DNA, 25 bp, Saccharomyces pastorianus
tatcacggcttgacaatacgagtat

SEQ ID NO: 116288 - DNA, 25 bp, Saccharomyces pastorianus
ggatatcccatccaagaacaggaat

SEQ ID NO: 116289 - DNA, 25 bp, Saccharomyces pastorianus
gcaaccatccaacaatgggcggtta

SEQ ID NO: 116290 - DNA, 25 bp, Saccharomyces pastorianus
gcgacatcgtttttcgaggcggcag

SEQ ID NO: 116291 - DNA, 25 bp, Saccharomyces pastorianus
ggtaatgatgacacctctaatcaga

SEQ ID NO: 116292 - DNA, 25 bp, Saccharomyces pastorianus
taactgctcaaactatactgcccac

SEQ ID NO: 116293 - DNA, 25 bp, Saccharomyces pastorianus
gatggtacgtacaatatcacggctt

SEQ ID NO: 116294 - DNA, 25 bp, Saccharomyces pastorianus
gattgccactggtagtaatacgcga

SEQ ID NO: 116295 - DNA, 25 bp, Saccharomyces pastorianus
aggcggcagtcgatggatatcccat

SEQ ID NO: 116296 - DNA, 25 bp, Saccharomyces pastorianus
tgataactttactaccgctttaggg

SEQ ID NO: 116297 - DNA, 25 bp, Saccharomyces pastorianus
gtacagattgccgaaattggtccta

SEQ ID NO: 116298 - DNA, 25 bp, Saccharomyces pastorianus
catatcacattttccacatggaccc

SEQ ID NO: 116299 - DNA, 25 bp, Saccharomyces pastorianus
actcgtctctcgcaatttgccaaag

SEQ ID NO: 116300 - DNA, 25 bp, Saccharomyces pastorianus
agaggtgttccaacttctttgacca

SEQ ID NO: 116301 - DNA, 25 bp, Saccharomyces pastorianus
gctatttccaaatgctgtcaggctg

SEQ ID NO: 116302 - DNA, 25 bp, Saccharomyces pastorianus
gggtgatttcattagcgttagacag

SEQ ID NO: 116303 - DNA, 25 bp, Saccharomyces pastorianus
gaggtaattacgtgatgccaaatct

SEQ ID NO: 116304 - DNA, 25 bp, Saccharomyces pastorianus
atccggtactacagatttggtggta

SEQ ID NO: 116305 - DNA, 25 bp, Saccharomyces pastorianus
aacatctcgtgacccaagcactcgt

SEQ ID NO: 116306 - DNA, 25 bp, Saccharomyces pastorianus
tggacccaccgcacagtttagttta

SEQ ID NO: 116307 - DNA, 25 bp, Saccharomyces pastorianus
agtaggtggctttggccttggcata

SEQ ID NO: 116308 - DNA, 25 bp, Saccharomyces pastorianus
tcgagcagcgccattgtcaatcaac

SEQ ID NO: 116309 - DNA, 25 bp, Saccharomyces pastorianus
cggtaatataccatcagcctgcgat

SEQ ID NO: 116310 - DNA, 25 bp, Saccharomyces pastorianus
gggcaattatcttcgctgcaaatcc

SEQ ID NO: 116311 - DNA, 25 bp, Saccharomyces pastorianus
gattgtgcatgctattttgcgacaa

SEQ ID NO: 116312 - DNA, 25 bp, Saccharomyces pastorianus
aaactatcggacgtgttcctcgagc

SEQ ID NO: 116313 - DNA, 25 bp, Saccharomyces pastorianus
gtcaatcaaccttgcctacggtaat

SEQ ID NO: 116314 - DNA, 25 bp, Saccharomyces pastorianus
gaaatacggtatgcctccagtaggt

SEQ ID NO: 116315 - DNA, 25 bp, Saccharomyces pastorianus
gaattcctgcccactttgaacaaag

SEQ ID NO: 116316 - DNA, 25 bp, Saccharomyces pastorianus
gaccttatcgcctgttattgactac

SEQ ID NO: 116317 - DNA, 25 bp, Saccharomyces pastorianus
gatattatcgcccttagccaagacg

SEQ ID NO: 116318 - DNA, 25 bp, Saccharomyces pastorianus
gcatcactccgttggatatctctag

SEQ ID NO: 116319 - DNA, 25 bp, Saccharomyces pastorianus
gagcaacgatttcctggtgtcaagt

SEQ ID NO: 116320 - DNA, 25 bp, Saccharomyces pastorianus
ggtgtcaagtttacggtcgccaaga

SEQ ID NO: 116321 - DNA, 25 bp, Saccharomyces pastorianus
atgagcaggcgcacgatgtcacaat

SEQ ID NO: 116322 - DNA, 25 bp, Saccharomyces pastorianus
gtcgcatggctgaagcgcaaccaga

SEQ ID NO: 116323 - DNA, 25 bp, Saccharomyces pastorianus
gaatgagcaagttcccaccgacgag

SEQ ID NO: 116324 - DNA, 25 bp, Saccharomyces pastorianus
tgccagactctgttagatgacgcca

SEQ ID NO: 116325 - DNA, 25 bp, Saccharomyces pastorianus
gctggcccgccaacatggtaagatt

SEQ ID NO: 116326 - DNA, 25 bp, Saccharomyces pastorianus
agacaagtcttatgggctggcccgc

SEQ ID NO: 116327 - DNA, 25 bp, Saccharomyces pastorianus
aattgcagctccagatggtcgctaa

SEQ ID NO: 116328 - DNA, 25 bp, Saccharomyces pastorianus
tggatactgttggaccaccagcgtc

SEQ ID NO: 116329 - DNA, 25 bp, Saccharomyces pastorianus
acagtctacaatcttggccatcgct

SEQ ID NO: 116330 - DNA, 25 bp, Saccharomyces pastorianus
aaggaactagtcaagcgtgccagaa

SEQ ID NO: 116331 - DNA, 25 bp, Saccharomyces pastorianus
ggccatcgctactgttgaaagggtc

SEQ ID NO: 116332 - DNA, 25 bp, Saccharomyces pastorianus
cgctgctgaaaacggattctccttt

SEQ ID NO: 116333 - DNA, 25 bp, Saccharomyces pastorianus
ggcattccatcatacatcgtttcct

SEQ ID NO: 116334 - DNA, 25 bp, Saccharomyces pastorianus
tttcctccaagatatcagtctccaa

SEQ ID NO: 116335 - DNA, 25 bp, Saccharomyces pastorianus
gagggtgccagatgccaatgcctat

SEQ ID NO: 116336 - DNA, 25 bp, Saccharomyces pastorianus
agaatgtcgatgtctcagtcgctgt

SEQ ID NO: 116337 - DNA, 25 bp, Saccharomyces pastorianus
gagacagtccttgaacgctacagca

SEQ ID NO: 116338 - DNA, 25 bp, Saccharomyces pastorianus
aaagccatcactgttgcggctaaga

SEQ ID NO: 116339 - DNA, 25 bp, Saccharomyces pastorianus
ggtgggaccatttgcatatccaata

SEQ ID NO: 116340 - DNA, 25 bp, Saccharomyces pastorianus
tttgttttgtatttgggctgggcac

SEQ ID NO: 116341 - DNA, 25 bp, Saccharomyces pastorianus
cctaccatcttttatcttaagcgat

SEQ ID NO: 116342 - DNA, 25 bp, Saccharomyces pastorianus
atgagtttcctaccatcttttatct

SEQ ID NO: 116343 - DNA, 25 bp, Saccharomyces pastorianus
gggcacacacttctaatagaccaaa

SEQ ID NO: 116344 - DNA, 25 bp, Saccharomyces pastorianus
gagtttcctaccatcttttatctta

SEQ ID NO: 116345 - DNA, 25 bp, Saccharomyces pastorianus
ggctgggcacacacttctaatagac

SEQ ID NO: 116346 - DNA, 25 bp, Saccharomyces pastorianus
ttgtatttgggctgggcacacactt

SEQ ID NO: 116347 - DNA, 25 bp, Saccharomyces pastorianus
tttgggctgggcacacacttctaat

SEQ ID NO: 116348 - DNA, 25 bp, Saccharomyces pastorianus
atcttttatcttaagcgatgaatct

SEQ ID NO: 116349 - DNA, 25 bp, Saccharomyces pastorianus
tgggctgggcacacacttctaatag

SEQ ID NO: 116350 - DNA, 25 bp, Saccharomyces pastorianus
gtttcctaccatcttttatcttaag

SEQ ID NO: 116351 - DNA, 25 bp, Saccharomyces pastorianus
aggcatttcatattactgcgatgga

SEQ ID NO: 116352 - DNA, 25 bp, Saccharomyces pastorianus
acgctattacgatctcctactaagg

SEQ ID NO: 116353 - DNA, 25 bp, Saccharomyces pastorianus
ttagctcaacaaacaacactcctgc

SEQ ID NO: 116354 - DNA, 25 bp, Saccharomyces pastorianus
aaggtggtagcaccgccaatgccaa

SEQ ID NO: 116355 - DNA, 25 bp, Saccharomyces pastorianus
gtctacgcctttctcaaccatatga

SEQ ID NO: 116356 - DNA, 25 bp, Saccharomyces pastorianus
agattcggactctaactcaaatgat

SEQ ID NO: 116357 - DNA, 25 bp, Saccharomyces pastorianus
tagacggctgacaccatcaacaagt

SEQ ID NO: 116358 - DNA, 25 bp, Saccharomyces pastorianus
attggcagcgaacagtctacgcctt

SEQ ID NO: 116359 - DNA, 25 bp, Saccharomyces pastorianus
gaagcgctaatagggctaggtcacc

SEQ ID NO: 116360 - DNA, 25 bp, Saccharomyces pastorianus
gaacaacaacttcctcattggcagc

SEQ ID NO: 116361 - DNA, 25 bp, Saccharomyces pastorianus
ggctaggtcacctcttcatagtaat

SEQ ID NO: 116362 - DNA, 25 bp, Saccharomyces pastorianus
ttgaaatcccagaaggtgttaccgt

SEQ ID NO: 116363 - DNA, 25 bp, Saccharomyces pastorianus
ttaccgtcagcattaagtccagaat

SEQ ID NO: 116364 - DNA, 25 bp, Saccharomyces pastorianus
gccgctttgagaaccgttaaatctt

SEQ ID NO: 116365 - DNA, 25 bp, Saccharomyces pastorianus
cttatctggtaactctgttgaagac

SEQ ID NO: 116366 - DNA, 25 bp, Saccharomyces pastorianus
cgtcttatctggtaactctgttgaa

SEQ ID NO: 116367 - DNA, 25 bp, Saccharomyces pastorianus
atcccagaaggtgttaccgtcagca

SEQ ID NO: 116368 - DNA, 25 bp, Saccharomyces pastorianus
gttgccgctttgagaaccgttaaat

SEQ ID NO: 116369 - DNA, 25 bp, Saccharomyces pastorianus
aatcgtcttatctggtaactctgtt

SEQ ID NO: 116370 - DNA, 25 bp, Saccharomyces pastorianus
ttactatcgaattctctactaacgt

SEQ ID NO: 116371 - DNA, 25 bp, Saccharomyces pastorianus
ggtgttaccgtcagcattaagtcca

SEQ ID NO: 116372 - DNA, 25 bp, Saccharomyces pastorianus
gaattctctactaacgtaaaggacg

SEQ ID NO: 116373 - DNA, 25 bp, Saccharomyces pastorianus
aggcgtcggtaattgggctccattg

SEQ ID NO: 116374 - DNA, 25 bp, Saccharomyces pastorianus
aaattgtcgccgctgatgactcttc

SEQ ID NO: 116375 - DNA, 25 bp, Saccharomyces pastorianus
aaaacggtagcttcagcggtggctc

SEQ ID NO: 116376 - DNA, 25 bp, Saccharomyces pastorianus
tgtccaagacacagtggccttctga

SEQ ID NO: 116377 - DNA, 25 bp, Saccharomyces pastorianus
aggacacctactacacttggcaagg

SEQ ID NO: 116378 - DNA, 25 bp, Saccharomyces pastorianus
aagcaggtgactctttacccttgac

SEQ ID NO: 116379 - DNA, 25 bp, Saccharomyces pastorianus
aacaatgccggtatttctgtcgaag

SEQ ID NO: 116380 - DNA, 25 bp, Saccharomyces pastorianus
tggttcttctgatggtgtcgcctac

SEQ ID NO: 116381 - DNA, 25 bp, Saccharomyces pastorianus
gttcttcaagttcaggcgtcggtaa

SEQ ID NO: 116382 - DNA, 25 bp, Saccharomyces pastorianus
gacggctacctgtaccgttcaaata

SEQ ID NO: 116383 - DNA, 25 bp, Saccharomyces pastorianus
gttgctatctgcaggaccgattacc

SEQ ID NO: 116384 - DNA, 25 bp, Saccharomyces pastorianus
atgtggtgtcacagagtcatccctg

SEQ ID NO: 116385 - DNA, 25 bp, Saccharomyces pastorianus
atgacggtcttgtaatggctactac

SEQ ID NO: 116386 - DNA, 25 bp, Saccharomyces pastorianus
gagcatgtacacaccatttctctat

SEQ ID NO: 116387 - DNA, 25 bp, Saccharomyces pastorianus
tacctaaagaagaagcccgtgcatt

SEQ ID NO: 116388 - DNA, 25 bp, Saccharomyces pastorianus
cagacctcaggtttttagcaccatc

SEQ ID NO: 116389 - DNA, 25 bp, Saccharomyces pastorianus
caaggccgattgtatgctatggtca

SEQ ID NO: 116390 - DNA, 25 bp, Saccharomyces pastorianus
ctgctcctgaacctgtatcggaaaa

SEQ ID NO: 116391 - DNA, 25 bp, Saccharomyces pastorianus
ttgaaccgcctacactgcaagagat

SEQ ID NO: 116392 - DNA, 25 bp, Saccharomyces pastorianus
gctacaccctctgatgaccatgaaa

SEQ ID NO: 116393 - DNA, 25 bp, Saccharomyces pastorianus
gaaaacgcgactgcagctgactcca

SEQ ID NO: 116394 - DNA, 25 bp, Saccharomyces pastorianus
gctactacactacatttaccaacac

SEQ ID NO: 116395 - DNA, 25 bp, Saccharomyces pastorianus
gtctcgtaccgagaaggacttcatt

SEQ ID NO: 116396 - DNA, 25 bp, Saccharomyces pastorianus
ggttctttgtcgctcaattccaaaa

SEQ ID NO: 116397 - DNA, 25 bp, Saccharomyces pastorianus
gcgaggaggtactatccacatacgt

SEQ ID NO: 116398 - DNA, 25 bp, Saccharomyces pastorianus
tgacttcgcaaccttcgaggacgaa

SEQ ID NO: 116399 - DNA, 25 bp, Saccharomyces pastorianus
cagaattttactggatgccccatgt

SEQ ID NO: 116400 - DNA, 25 bp, Saccharomyces pastorianus
tacgtacaacgtcgatgggttcttt

SEQ ID NO: 116401 - DNA, 25 bp, Saccharomyces pastorianus
gatcaatctgtcaaggtgtctcgta

SEQ ID NO: 116402 - DNA, 25 bp, Saccharomyces pastorianus
aaggtatcattcactctgacttcgc

SEQ ID NO: 116403 - DNA, 25 bp, Saccharomyces pastorianus
gaagcgtttactagttacagaggca

SEQ ID NO: 116404 - DNA, 25 bp, Saccharomyces pastorianus
agatcggtccatcttcgtttgatga

SEQ ID NO: 116405 - DNA, 25 bp, Saccharomyces pastorianus
gattgcaactcgaaacatggtggtg

SEQ ID NO: 116406 - DNA, 25 bp, Saccharomyces pastorianus
agagaaaccaatcctccttgggcct

SEQ ID NO: 116407 - DNA, 25 bp, Saccharomyces pastorianus
gggacaccacaagcatagttcttct

SEQ ID NO: 116408 - DNA, 25 bp, Saccharomyces pastorianus
gatccatctttatacgtaggtacct

SEQ ID NO: 116409 - DNA, 25 bp, Saccharomyces pastorianus
tcgcttctgctacctcaaatactag

SEQ ID NO: 116410 - DNA, 25 bp, Saccharomyces pastorianus
aagacaggcgccatcgatgtttttg

SEQ ID NO: 116411 - DNA, 25 bp, Saccharomyces pastorianus
gtcatagccgccatcaatcaaaaga

SEQ ID NO: 116412 - DNA, 25 bp, Saccharomyces pastorianus
attcaacccaattcaggatccgttc

SEQ ID NO: 116413 - DNA, 25 bp, Saccharomyces pastorianus
gaccacaaagagcagcgtcacctga

SEQ ID NO: 116414 - DNA, 25 bp, Saccharomyces pastorianus
tagtgtccagttatttgtctcgtcg

SEQ ID NO: 116415 - DNA, 25 bp, Saccharomyces pastorianus
atttgtctcgtcgtttcacaatgac

SEQ ID NO: 116416 - DNA, 25 bp, Saccharomyces pastorianus
ttcaggatccgttcacagacaacag

SEQ ID NO: 116417 - DNA, 25 bp, Saccharomyces pastorianus
ttgacagggcggttgaactagttgt

SEQ ID NO: 116418 - DNA, 25 bp, Saccharomyces pastorianus
ttctgaccagcgatacagacgggat

SEQ ID NO: 116419 - DNA, 25 bp, Saccharomyces pastorianus
taggaaggtctcttctgaccagcga

SEQ ID NO: 116420 - DNA, 25 bp, Saccharomyces pastorianus
gttccatttggtttatcagcagcat

SEQ ID NO: 116421 - DNA, 25 bp, Saccharomyces pastorianus
aactcgtttcggacactacacttga

SEQ ID NO: 116422 - DNA, 25 bp, Saccharomyces pastorianus
aataaatgggtttcctgctgtagat

SEQ ID NO: 116423 - DNA, 25 bp, Saccharomyces pastorianus
aggatgttgctccactggaagttga

SEQ ID NO: 116424 - DNA, 25 bp, Saccharomyces pastorianus
actacacttgacgtgggctttgaca

SEQ ID NO: 116425 - DNA, 25 bp, Saccharomyces pastorianus
ggacttggaactcgtttcggacact

SEQ ID NO: 116426 - DNA, 25 bp, Saccharomyces pastorianus
gggtgttatacttgcgacaattagt

SEQ ID NO: 116427 - DNA, 25 bp, Saccharomyces pastorianus
tatgacagcacccacagcaatgtat

SEQ ID NO: 116428 - DNA, 25 bp, Saccharomyces pastorianus
atatttatggattcaagccgcgatg

SEQ ID NO: 116429 - DNA, 25 bp, Saccharomyces pastorianus
caataagggcaagcaccgtgttggt

SEQ ID NO: 116430 - DNA, 25 bp, Saccharomyces pastorianus
tgaaccaggtcttgcacttggtgct

SEQ ID NO: 116431 - DNA, 25 bp, Saccharomyces pastorianus
ctggctttgctaaacactgcttgta

SEQ ID NO: 116432 - DNA, 25 bp, Saccharomyces pastorianus
gaaactatcccatcttagtgcattc

SEQ ID NO: 116433 - DNA, 25 bp, Saccharomyces pastorianus
gggatacccgatgccgttaaattat

SEQ ID NO: 116434 - DNA, 25 bp, Saccharomyces pastorianus
agggatggtccactgcaggtatata

SEQ ID NO: 116435 - DNA, 25 bp, Saccharomyces pastorianus
taccgagaaacgttatccctggctt

SEQ ID NO: 116436 - DNA, 25 bp, Saccharomyces pastorianus
gaatatcaaagcttcctggagtcag

SEQ ID NO: 116437 - DNA, 25 bp, Saccharomyces pastorianus
tagtttcatcaagcatcagttacac

SEQ ID NO: 116438 - DNA, 25 bp, Saccharomyces pastorianus
atttttcgccagtggtgagcacgga

SEQ ID NO: 116439 - DNA, 25 bp, Saccharomyces pastorianus
gcctgatgcatcttcccaagttaag

SEQ ID NO: 116440 - DNA, 25 bp, Saccharomyces pastorianus
ttacaggtcggtgctaaggctacaa

SEQ ID NO: 116441 - DNA, 25 bp, Saccharomyces pastorianus
tttggttacgatatcagcgccggtt

SEQ ID NO: 116442 - DNA, 25 bp, Saccharomyces pastorianus
agaggtgcctttgacttgtgtttga

SEQ ID NO: 116443 - DNA, 25 bp, Saccharomyces pastorianus
attcgccactagatatttgcctgat

SEQ ID NO: 116444 - DNA, 25 bp, Saccharomyces pastorianus
tgatcacttctttgactccaggcgt

SEQ ID NO: 116445 - DNA, 25 bp, Saccharomyces pastorianus
tggtgacttaactatggcccacgaa

SEQ ID NO: 116446 - DNA, 25 bp, Saccharomyces pastorianus
attgttaagacctggcgtcactctg

SEQ ID NO: 116447 - DNA, 25 bp, Saccharomyces pastorianus
taaggctaaggtgtccgattccggt

SEQ ID NO: 116448 - DNA, 25 bp, Saccharomyces pastorianus
catttctcgttatgccatggcttta

SEQ ID NO: 116449 - DNA, 25 bp, Saccharomyces pastorianus
attccggtattgtcactttggctta

SEQ ID NO: 116450 - DNA, 25 bp, Saccharomyces pastorianus
gagagactgttcacatgcctgagga

SEQ ID NO: 116451 - DNA, 25 bp, Saccharomyces pastorianus
aaaaactcctgctacgttgactgga

SEQ ID NO: 116452 - DNA, 25 bp, Saccharomyces pastorianus
ttatacataccgctcattcgcaagg

SEQ ID NO: 116453 - DNA, 25 bp, Saccharomyces pastorianus
gacttatcccgattgacacgcatta

SEQ ID NO: 116454 - DNA, 25 bp, Saccharomyces pastorianus
tgggtctcatcttccaacttatgga

SEQ ID NO: 116455 - DNA, 25 bp, Saccharomyces pastorianus
gaagtttcctcgactacgaagtcct

SEQ ID NO: 116456 - DNA, 25 bp, Saccharomyces pastorianus
gaatctatcatcgtcgccgaatgac

SEQ ID NO: 116457 - DNA, 25 bp, Saccharomyces pastorianus
gttgtccaagaactcaccgggcgaa

SEQ ID NO: 116458 - DNA, 25 bp, Saccharomyces pastorianus
aaaagtttgtctcaacccgcagatt

SEQ ID NO: 116459 - DNA, 25 bp, Saccharomyces pastorianus
gacagttctgtcaattcttcggaag

SEQ ID NO: 116460 - DNA, 25 bp, Saccharomyces pastorianus
cggcgtcattgattgtggcgtatat

SEQ ID NO: 116461 - DNA, 25 bp, Saccharomyces pastorianus
gggtgattccagttttattgccaaa

SEQ ID NO: 116462 - DNA, 25 bp, Saccharomyces pastorianus
gcaggcctactattttcagtgggac

SEQ ID NO: 116463 - DNA, 25 bp, Saccharomyces pastorianus
atgccctccactgagcagcaggata

SEQ ID NO: 116464 - DNA, 25 bp, Saccharomyces pastorianus
agctgtgtggtacatttcttacgga

SEQ ID NO: 116465 - DNA, 25 bp, Saccharomyces pastorianus
tgggcacagcttactgagcctgaaa

SEQ ID NO: 116466 - DNA, 25 bp, Saccharomyces pastorianus
aaaggtgttgctgcaggcctactat

SEQ ID NO: 116467 - DNA, 25 bp, Saccharomyces pastorianus
aacgctgctgtaatggatctgcaat

SEQ ID NO: 116468 - DNA, 25 bp, Saccharomyces pastorianus
gagctggtggactatcacgtattac

SEQ ID NO: 116469 - DNA, 25 bp, Saccharomyces pastorianus
gtattacatccgtaagattcgctca

SEQ ID NO: 116470 - DNA, 25 bp, Saccharomyces pastorianus
agattcgctcaaacacatgctcttt

SEQ ID NO: 116471 - DNA, 25 bp, Saccharomyces pastorianus
tcagtgggactttttgctgtcgtca

SEQ ID NO: 116472 - DNA, 25 bp, Saccharomyces pastorianus
gaaataatatctcagctggcctact

SEQ ID NO: 116473 - DNA, 25 bp, Saccharomyces pastorianus
ggatgtttcctgatgcgttcaatga

SEQ ID NO: 116474 - DNA, 25 bp, Saccharomyces pastorianus
ggagcaaagtttcatctgccttcaa

SEQ ID NO: 116475 - DNA, 25 bp, Saccharomyces pastorianus
aattcctcgagatctattgctgcta

SEQ ID NO: 116476 - DNA, 25 bp, Saccharomyces pastorianus
ttgctgctaataaatcacgccttgg

SEQ ID NO: 116477 - DNA, 25 bp, Saccharomyces pastorianus
gccctgtgggcaagtcgctgttaaa

SEQ ID NO: 116478 - DNA, 25 bp, Saccharomyces pastorianus
tggcctactccttatatctactttc

SEQ ID NO: 116479 - DNA, 25 bp, Saccharomyces pastorianus
acggataatgttacgaattcctcga

SEQ ID NO: 116480 - DNA, 25 bp, Saccharomyces pastorianus
gttacaatgagctcacaaatcctat

SEQ ID NO: 116481 - DNA, 25 bp, Saccharomyces pastorianus
aagcaggttctggtacaccgagaga

SEQ ID NO: 116482 - DNA, 25 bp, Saccharomyces pastorianus
tcacgccttggcaatcttttatcag

SEQ ID NO: 116483 - DNA, 25 bp, Saccharomyces pastorianus
aatgccactatatctcttttcgaaa

SEQ ID NO: 116484 - DNA, 25 bp, Saccharomyces pastorianus
gtcggtctacctgactttgaaggaa

SEQ ID NO: 116485 - DNA, 25 bp, Saccharomyces pastorianus
caagcgattaccgtgcaagtgcgtt

SEQ ID NO: 116486 - DNA, 25 bp, Saccharomyces pastorianus
agtaaacatatagccctcagaccgg

SEQ ID NO: 116487 - DNA, 25 bp, Saccharomyces pastorianus
gagatgctgttcctgagttactgat

SEQ ID NO: 116488 - DNA, 25 bp, Saccharomyces pastorianus
atgggccttaagtactcttgtcgaa

SEQ ID NO: 116489 - DNA, 25 bp, Saccharomyces pastorianus
gagcatttaccctacagtttactcc

SEQ ID NO: 116490 - DNA, 25 bp, Saccharomyces pastorianus
agtgaactgcctcttttgaacgatt

SEQ ID NO: 116491 - DNA, 25 bp, Saccharomyces pastorianus
gaccgggcgttgttccaagcgatta

SEQ ID NO: 116492 - DNA, 25 bp, Saccharomyces pastorianus
gaggaccatctattaacgagcccgc

SEQ ID NO: 116493 - DNA, 25 bp, Saccharomyces pastorianus
aaacggagcctcttcattatttgat

SEQ ID NO: 116494 - DNA, 25 bp, Saccharomyces pastorianus
aaggcctttggttgttgtgctcgcg

SEQ ID NO: 116495 - DNA, 25 bp, Saccharomyces pastorianus
ttatgtacaacagctcaccgtcagt

SEQ ID NO: 116496 - DNA, 25 bp, Saccharomyces pastorianus
aaggacatcatcatccagtcatcag

SEQ ID NO: 116497 - DNA, 25 bp, Saccharomyces pastorianus
tgtgctcgcgatctcaattgtattt

SEQ ID NO: 116498 - DNA, 25 bp, Saccharomyces pastorianus
gtattttttggctgtctcctggtcc

SEQ ID NO: 116499 - DNA, 25 bp, Saccharomyces pastorianus
taaccaactgcggaagctgctgcat

SEQ ID NO: 116500 - DNA, 25 bp, Saccharomyces pastorianus
ccagtacagaattccgggtgatttt

SEQ ID NO: 116501 - DNA, 25 bp, Saccharomyces pastorianus
taacgccatctacgcatcatatcaa

SEQ ID NO: 116502 - DNA, 25 bp, Saccharomyces pastorianus
agtgccggttgaatcccagtacaga

SEQ ID NO: 116503 - DNA, 25 bp, Saccharomyces pastorianus
gaaatgcggaaccactaaccaactg

SEQ ID NO: 116504 - DNA, 25 bp, Saccharomyces pastorianus
gctatgacatcaacacaaggccttt

SEQ ID NO: 116505 - DNA, 25 bp, Saccharomyces pastorianus
gtccggtgtatagttggttggtctt

SEQ ID NO: 116506 - DNA, 25 bp, Saccharomyces pastorianus
aaatggagttacgagctcctcaccc

SEQ ID NO: 116507 - DNA, 25 bp, Saccharomyces pastorianus
atacagtttcgatgggtttttccat

SEQ ID NO: 116508 - DNA, 25 bp, Saccharomyces pastorianus
aataccagctacgactagaacaata

SEQ ID NO: 116509 - DNA, 25 bp, Saccharomyces pastorianus
gtttataccaacaataccagctacg

SEQ ID NO: 116510 - DNA, 25 bp, Saccharomyces pastorianus
atgactccttttcccaacacttgta

SEQ ID NO: 116511 - DNA, 25 bp, Saccharomyces pastorianus
tgtaggagtgttcaaacagtttctt

SEQ ID NO: 116512 - DNA, 25 bp, Saccharomyces pastorianus
agcaacacaaaccagtccggtgtat

SEQ ID NO: 116513 - DNA, 25 bp, Saccharomyces pastorianus
gctcctcaccctttagtttgtttat

SEQ ID NO: 116514 - DNA, 25 bp, Saccharomyces pastorianus
aatgatgcatgtccgaaaacgctga

SEQ ID NO: 116515 - DNA, 25 bp, Saccharomyces pastorianus
gaaacctattggcacagcaacacaa

SEQ ID NO: 116516 - DNA, 25 bp, Saccharomyces pastorianus
tcaatcaacctaacctctcatgctt

SEQ ID NO: 116517 - DNA, 25 bp, Saccharomyces pastorianus
ctctcatgcttctccaagctgaaag

SEQ ID NO: 116518 - DNA, 25 bp, Saccharomyces pastorianus
tcttttttcaccgtcagggcggaat

SEQ ID NO: 116519 - DNA, 25 bp, Saccharomyces pastorianus
ttagcatcaatcaacctaacctctc

SEQ ID NO: 116520 - DNA, 25 bp, Saccharomyces pastorianus
atgcttctccaagctgaaagaagta

SEQ ID NO: 116521 - DNA, 25 bp, Saccharomyces pastorianus
tctgccaaaagaatgaaagtaggtt

SEQ ID NO: 116522 - DNA, 25 bp, Saccharomyces pastorianus
gttatcttttttcaccgtcagggcg

SEQ ID NO: 116523 - DNA, 25 bp, Saccharomyces pastorianus
gtgttgcaacatatatctgccaaaa

SEQ ID NO: 116524 - DNA, 25 bp, Saccharomyces pastorianus
gtacgtgttgcaacatatatctgcc

SEQ ID NO: 116525 - DNA, 25 bp, Saccharomyces pastorianus
aactcactctatgtacgtgttgcaa

SEQ ID NO: 116526 - DNA, 25 bp, Saccharomyces pastorianus
agaagtaaactcactctatgtacgt

SEQ ID NO: 116527 - DNA, 25 bp, Saccharomyces pastorianus
gcgaattccctctggtacaaaatct

SEQ ID NO: 116528 - DNA, 25 bp, Saccharomyces pastorianus
aatagagaccaacagcagccgctat

SEQ ID NO: 116529 - DNA, 25 bp, Saccharomyces pastorianus
aagatgtggctaggcgaattccctc

SEQ ID NO: 116530 - DNA, 25 bp, Saccharomyces pastorianus
gtagcacttacctcacatgacaaac

SEQ ID NO: 116531 - DNA, 25 bp, Saccharomyces pastorianus
aagtacagagatcaccatcccctat

SEQ ID NO: 116532 - DNA, 25 bp, Saccharomyces pastorianus
agatccacatcctcctttggagtga

SEQ ID NO: 116533 - DNA, 25 bp, Saccharomyces pastorianus
cattctaacgtgtccgtagcactta

SEQ ID NO: 116534 - DNA, 25 bp, Saccharomyces pastorianus
agttcaccaatcctaatattccttc

SEQ ID NO: 116535 - DNA, 25 bp, Saccharomyces pastorianus
aaatatgctgcaatcggttcgtgaa

SEQ ID NO: 116536 - DNA, 25 bp, Saccharomyces pastorianus
agccgtaacttgtcacttccaatag

SEQ ID NO: 116537 - DNA, 25 bp, Saccharomyces pastorianus
gatctccacacgcacaatttacata

SEQ ID NO: 116538 - DNA, 25 bp, Saccharomyces pastorianus
aatctagacttcaaccttttgaggg

SEQ ID NO: 116539 - DNA, 25 bp, Saccharomyces pastorianus
gcaaacatcttttcctttggcgaaa

SEQ ID NO: 116540 - DNA, 25 bp, Saccharomyces pastorianus
gttgaactattatctacctcaggcg

SEQ ID NO: 116541 - DNA, 25 bp, Saccharomyces pastorianus
ttaacgtcaccaatgatagctgatg

SEQ ID NO: 116542 - DNA, 25 bp, Saccharomyces pastorianus
tcaatatgatttttcctgtggactc

SEQ ID NO: 116543 - DNA, 25 bp, Saccharomyces pastorianus
tacctcaggcgttaacagatgttca

SEQ ID NO: 116544 - DNA, 25 bp, Saccharomyces pastorianus
gaaactgttgattcatttgtatccg

SEQ ID NO: 116545 - DNA, 25 bp, Saccharomyces pastorianus
agccggaaaatcaccatctgggttt

SEQ ID NO: 116546 - DNA, 25 bp, Saccharomyces pastorianus
aggtttagacctttacagcaatttg

SEQ ID NO: 116547 - DNA, 25 bp, Saccharomyces pastorianus
gatatgtacttagccctgagggata

SEQ ID NO: 116548 - DNA, 25 bp, Saccharomyces pastorianus
aaccttttgagggattgtttgcaca

SEQ ID NO: 116549 - DNA, 25 bp, Saccharomyces pastorianus
agttgatgaaaacccttttgccaat

SEQ ID NO: 116550 - DNA, 25 bp, Saccharomyces pastorianus
aaggccaaattcgttaatgaggaga

SEQ ID NO: 116551 - DNA, 25 bp, Saccharomyces pastorianus
ctaagctaccgcctaattttgatga

SEQ ID NO: 116552 - DNA, 25 bp, Saccharomyces pastorianus
aaagggatctggtggtattatgaca

SEQ ID NO: 116553 - DNA, 25 bp, Saccharomyces pastorianus
ggtacagtagcagacttcaacgaga

SEQ ID NO: 116554 - DNA, 25 bp, Saccharomyces pastorianus
aggaggaagaccaaactgcacaaag

SEQ ID NO: 116555 - DNA, 25 bp, Saccharomyces pastorianus
gccaatctttataattacgggtcgt

SEQ ID NO: 116556 - DNA, 25 bp, Saccharomyces pastorianus
ttgatctcacaactatacccttata

SEQ ID NO: 116557 - DNA, 25 bp, Saccharomyces pastorianus
gggttcatacacagatccgtggact

SEQ ID NO: 116558 - DNA, 25 bp, Saccharomyces pastorianus
tgaattggcccttcgatctaagcta

SEQ ID NO: 116559 - DNA, 25 bp, Saccharomyces pastorianus
taaagttctacagggcgctttctat

SEQ ID NO: 116560 - DNA, 25 bp, Saccharomyces pastorianus
aatgggattgtttgccttaggtaca

SEQ ID NO: 116561 - DNA, 25 bp, Saccharomyces pastorianus
gtaaatcgtctacgcttaagctatt

SEQ ID NO: 116562 - DNA, 25 bp, Saccharomyces pastorianus
ttgcagcaattgtacgtaaatcgtc

SEQ ID NO: 116563 - DNA, 25 bp, Saccharomyces pastorianus
gagtgatattctaccttgcagcaat

SEQ ID NO: 116564 - DNA, 25 bp, Saccharomyces pastorianus
aacttttgaagtgacaatcgcgcga

SEQ ID NO: 116565 - DNA, 25 bp, Saccharomyces pastorianus
gggacctagtgtggaaactgtaaca

SEQ ID NO: 116566 - DNA, 25 bp, Saccharomyces pastorianus
gcctaagatcaagatttctcgaaca

SEQ ID NO: 116567 - DNA, 25 bp, Saccharomyces pastorianus
ttacctgtatctaaccgaaagttca

SEQ ID NO: 116568 - DNA, 25 bp, Saccharomyces pastorianus
gggtatggttatatttcctcaacaa

SEQ ID NO: 116569 - DNA, 25 bp, Saccharomyces pastorianus
aatcgcgcgaagtttccagatctta

SEQ ID NO: 116570 - DNA, 25 bp, Saccharomyces pastorianus
actacagctgtccagagtgaagggt

SEQ ID NO: 116571 - DNA, 25 bp, Saccharomyces pastorianus
gaatccgtccctggtgtagtggaat

SEQ ID NO: 116572 - DNA, 25 bp, Saccharomyces pastorianus
gagatattggtggttcctcttctac

SEQ ID NO: 116573 - DNA, 25 bp, Saccharomyces pastorianus
tgacgtatcgtccatcattgtcgac

SEQ ID NO: 116574 - DNA, 25 bp, Saccharomyces pastorianus
atgatcctttcctctacgttaatgt

SEQ ID NO: 116575 - DNA, 25 bp, Saccharomyces pastorianus
gatttgcctttgacttcgccaagaa

SEQ ID NO: 116576 - DNA, 25 bp, Saccharomyces pastorianus
agggactatgctgtcttcgaaccag

SEQ ID NO: 116577 - DNA, 25 bp, Saccharomyces pastorianus
gtacgggaccatcttaggcaacatt

SEQ ID NO: 116578 - DNA, 25 bp, Saccharomyces pastorianus
aacattggcgctgctttgatcggtg

SEQ ID NO: 116579 - DNA, 25 bp, Saccharomyces pastorianus
attgtcgacaatgcctccatgcagg

SEQ ID NO: 116580 - DNA, 25 bp, Saccharomyces pastorianus
caatttgatgtcctagttacccctt

SEQ ID NO: 116581 - DNA, 25 bp, Saccharomyces pastorianus
cggtggccaaacctcatcaatttga

SEQ ID NO: 116582 - DNA, 25 bp, Saccharomyces pastorianus
agagtttgccattatttgtctgaaa

SEQ ID NO: 116583 - DNA, 25 bp, Saccharomyces pastorianus
ttgcccggcgaagtgttcacttgga

SEQ ID NO: 116584 - DNA, 25 bp, Saccharomyces pastorianus
atgggcctcccagatgaacaacata

SEQ ID NO: 116585 - DNA, 25 bp, Saccharomyces pastorianus
actgttctcatctgtacaagtactt

SEQ ID NO: 116586 - DNA, 25 bp, Saccharomyces pastorianus
gatcacaatgcgaagggccagtccc

SEQ ID NO: 116587 - DNA, 25 bp, Saccharomyces pastorianus
gaaatcacattacctgtcgcactgt

SEQ ID NO: 116588 - DNA, 25 bp, Saccharomyces pastorianus
gacgatattgacaccatgtaccatg

SEQ ID NO: 116589 - DNA, 25 bp, Saccharomyces pastorianus
gttgctaacatatgtcactcagagg

SEQ ID NO: 116590 - DNA, 25 bp, Saccharomyces pastorianus
aactgtttaggtgtcttgcccggcg

SEQ ID NO: 116591 - DNA, 25 bp, Saccharomyces pastorianus
aaccaactttgttcccagatcacaa

SEQ ID NO: 116592 - DNA, 25 bp, Saccharomyces pastorianus
gctgctccgattcgcgttacaacga

SEQ ID NO: 116593 - DNA, 25 bp, Saccharomyces pastorianus
gagatataccgtagcagtttcccac

SEQ ID NO: 116594 - DNA, 25 bp, Saccharomyces pastorianus
aagagaacttttcgtttttgcatga

SEQ ID NO: 116595 - DNA, 25 bp, Saccharomyces pastorianus
atttccgaaggccagggcgcttgat

SEQ ID NO: 116596 - DNA, 25 bp, Saccharomyces pastorianus
gtagcagtttcccacgacaagagaa

SEQ ID NO: 116597 - DNA, 25 bp, Saccharomyces pastorianus
gagtacagacgtttcgcatttccga

SEQ ID NO: 116598 - DNA, 25 bp, Saccharomyces pastorianus
gaatcctgcgaatcaaccgatactg

SEQ ID NO: 116599 - DNA, 25 bp, Saccharomyces pastorianus
ggtcgctaacgatgatttttgatga

SEQ ID NO: 116600 - DNA, 25 bp, Saccharomyces pastorianus
ggcgcttgatcagcagttcatcgag

SEQ ID NO: 116601 - DNA, 25 bp, Saccharomyces pastorianus
ataccgtctcatctactgacaaagg

SEQ ID NO: 116602 - DNA, 25 bp, Saccharomyces pastorianus
ggagccatttgttaatataccgtct

SEQ ID NO: 116603 - DNA, 25 bp, Saccharomyces pastorianus
tccatcttggtactaattccggaag

SEQ ID NO: 116604 - DNA, 25 bp, Saccharomyces pastorianus
ctggctgctattcacgctaagcgtg

SEQ ID NO: 116605 - DNA, 25 bp, Saccharomyces pastorianus
gtttgaagacactaatctggctgct

SEQ ID NO: 116606 - DNA, 25 bp, Saccharomyces pastorianus
gaagacactaatctggctgctattc

SEQ ID NO: 116607 - DNA, 25 bp, Saccharomyces pastorianus
agacactaatctggctgctattcac

SEQ ID NO: 116608 - DNA, 25 bp, Saccharomyces pastorianus
tattcacgctaagcgtgttactatc

SEQ ID NO: 116609 - DNA, 25 bp, Saccharomyces pastorianus
acactaatctggctgctattcacgc

SEQ ID NO: 116610 - DNA, 25 bp, Saccharomyces pastorianus
ggctgctattcacgctaagcgtgtt

SEQ ID NO: 116611 - DNA, 25 bp, Saccharomyces pastorianus
actaatctggctgctattcacgcta

SEQ ID NO: 116612 - DNA, 25 bp, Saccharomyces pastorianus
ttgaagacactaatctggctgctat

SEQ ID NO: 116613 - DNA, 25 bp, Saccharomyces pastorianus
atctggctgctattcacgctaagcg

SEQ ID NO: 116614 - DNA, 25 bp, Saccharomyces pastorianus
taatctggctgctattcacgctaag

SEQ ID NO: 116615 - DNA, 25 bp, Saccharomyces pastorianus
tggtgtcaagcgtatttctggtttg

SEQ ID NO: 116616 - DNA, 25 bp, Saccharomyces pastorianus
gtgtcaagcgtatttctggtttgat

SEQ ID NO: 116617 - DNA, 25 bp, Saccharomyces pastorianus
agcgtatttctggtttgatctacga

SEQ ID NO: 116618 - DNA, 25 bp, Saccharomyces pastorianus
aagcgtatttctggtttgatctacg

SEQ ID NO: 116619 - DNA, 25 bp, Saccharomyces pastorianus
caagcgtatttctggtttgatctac

SEQ ID NO: 116620 - DNA, 25 bp, Saccharomyces pastorianus
tcaagcgtatttctggtttgatcta

SEQ ID NO: 116621 - DNA, 25 bp, Saccharomyces pastorianus
gtcaagcgtatttctggtttgatct

SEQ ID NO: 116622 - DNA, 25 bp, Saccharomyces pastorianus
gcgtatttctggtttgatctacgaa

SEQ ID NO: 116623 - DNA, 25 bp, Saccharomyces pastorianus
ggtgtcaagcgtatttctggtttga

SEQ ID NO: 116624 - DNA, 25 bp, Saccharomyces pastorianus
tgtcaagcgtatttctggtttgatc

SEQ ID NO: 116625 - DNA, 25 bp, Saccharomyces pastorianus
ggatatagacactccacaatacagc

SEQ ID NO: 116626 - DNA, 25 bp, Saccharomyces pastorianus
ggctcgctctagaaagcatatcgta

SEQ ID NO: 116627 - DNA, 25 bp, Saccharomyces pastorianus
ggctaagcgtgttcgacaatgacat

SEQ ID NO: 116628 - DNA, 25 bp, Saccharomyces pastorianus
gctcctgttcactctattggattgt

SEQ ID NO: 116629 - DNA, 25 bp, Saccharomyces pastorianus
attggattgtcgctaactctggatt

SEQ ID NO: 116630 - DNA, 25 bp, Saccharomyces pastorianus
atttgatacataaggctcgctctag

SEQ ID NO: 116631 - DNA, 25 bp, Saccharomyces pastorianus
caatctatgccatttctggagtaat

SEQ ID NO: 116632 - DNA, 25 bp, Saccharomyces pastorianus
aggaattctcctacttagccagtga

SEQ ID NO: 116633 - DNA, 25 bp, Saccharomyces pastorianus
aggattccatgggtttctgcgtaaa

SEQ ID NO: 116634 - DNA, 25 bp, Saccharomyces pastorianus
agcattgtccacataatgccatggg

SEQ ID NO: 116635 - DNA, 25 bp, Saccharomyces pastorianus
actctggatttggacgatgtacact

SEQ ID NO: 116636 - DNA, 25 bp, Saccharomyces pastorianus
ggatacatcccagaaatgcatttat

SEQ ID NO: 116637 - DNA, 25 bp, Saccharomyces pastorianus
ttttcaattttcttggcatcatcca

SEQ ID NO: 116638 - DNA, 25 bp, Saccharomyces pastorianus
cgtcgccgtaagattgcaatggata

SEQ ID NO: 116639 - DNA, 25 bp, Saccharomyces pastorianus
agcactcatatctactacttcgcat

SEQ ID NO: 116640 - DNA, 25 bp, Saccharomyces pastorianus
tgaagaccctttctcgaatgtctgc

SEQ ID NO: 116641 - DNA, 25 bp, Saccharomyces pastorianus
atgcatttatcgtccttcttattag

SEQ ID NO: 116642 - DNA, 25 bp, Saccharomyces pastorianus
gatgacacctccattgaacaagact

SEQ ID NO: 116643 - DNA, 25 bp, Saccharomyces pastorianus
gactatttgtgcacggaagcactca

SEQ ID NO: 116644 - DNA, 25 bp, Saccharomyces pastorianus
tctgctaccttatgacgatgtgccg

SEQ ID NO: 116645 - DNA, 25 bp, Saccharomyces pastorianus
gcaatcaggatgcacgtcgccgtaa

SEQ ID NO: 116646 - DNA, 25 bp, Saccharomyces pastorianus
gaatgtctgcccaaatttttcaatt

SEQ ID NO: 116647 - DNA, 25 bp, Saccharomyces pastorianus
aaagaacctatcctcacaacaatcc

SEQ ID NO: 116648 - DNA, 25 bp, Saccharomyces pastorianus
ttagcgtattttctcgattgccctg

SEQ ID NO: 116649 - DNA, 25 bp, Saccharomyces pastorianus
tgcctattaccgctcacgaaaatga

SEQ ID NO: 116650 - DNA, 25 bp, Saccharomyces pastorianus
gcacccaatggcaagattcgagcta

SEQ ID NO: 116651 - DNA, 25 bp, Saccharomyces pastorianus
ttgtctcctatggtcttagcgtatt

SEQ ID NO: 116652 - DNA, 25 bp, Saccharomyces pastorianus
aggtggtgatgcttttgtctcctat

SEQ ID NO: 116653 - DNA, 25 bp, Saccharomyces pastorianus
gatcatattatgtgccctactaagg

SEQ ID NO: 116654 - DNA, 25 bp, Saccharomyces pastorianus
tggtcttgtactaaggcacccaatg

SEQ ID NO: 116655 - DNA, 25 bp, Saccharomyces pastorianus
gaacactccacatccacaggtattg

SEQ ID NO: 116656 - DNA, 25 bp, Saccharomyces pastorianus
gagctaaactttactttgcctatta

SEQ ID NO: 116657 - DNA, 25 bp, Saccharomyces pastorianus
ataagtttcagagtggtgggcccag

SEQ ID NO: 116658 - DNA, 25 bp, Saccharomyces pastorianus
aaaattctagttctcctgttcaaat

SEQ ID NO: 116659 - DNA, 25 bp, Saccharomyces pastorianus
ttatggcccgaatttattcctcctg

SEQ ID NO: 116660 - DNA, 25 bp, Saccharomyces pastorianus
atgatgttcatttgctttaccctcc

SEQ ID NO: 116661 - DNA, 25 bp, Saccharomyces pastorianus
tttaccctcctcatattatcgctgt

SEQ ID NO: 116662 - DNA, 25 bp, Saccharomyces pastorianus
aagtcttaaagcaaccgccatttca

SEQ ID NO: 116663 - DNA, 25 bp, Saccharomyces pastorianus
taagtgaagcccgtaccttatggcc

SEQ ID NO: 116664 - DNA, 25 bp, Saccharomyces pastorianus
attcattacgatttccattcatggg

SEQ ID NO: 116665 - DNA, 25 bp, Saccharomyces pastorianus
ttatcgctgttgcatgtttattcat

SEQ ID NO: 116666 - DNA, 25 bp, Saccharomyces pastorianus
ccacccttatcaatccttaaagcaa

SEQ ID NO: 116667 - DNA, 25 bp, Saccharomyces pastorianus
gaatgcccgcaatatatcagaactt

SEQ ID NO: 116668 - DNA, 25 bp, Saccharomyces pastorianus
aaggatcatcgttagcatctgcggc

SEQ ID NO: 116669 - DNA, 25 bp, Saccharomyces pastorianus
cgtgttggtgaaagggccagtccat

SEQ ID NO: 116670 - DNA, 25 bp, Saccharomyces pastorianus
tcgttcccttctgcaagtgatattg

SEQ ID NO: 116671 - DNA, 25 bp, Saccharomyces pastorianus
ccgtctctcctagatcgttacaaaa

SEQ ID NO: 116672 - DNA, 25 bp, Saccharomyces pastorianus
gatcgttacaaaaatcatgaggttt

SEQ ID NO: 116673 - DNA, 25 bp, Saccharomyces pastorianus
aaagggccagtccatatgttagttt

SEQ ID NO: 116674 - DNA, 25 bp, Saccharomyces pastorianus
gttgctgatttgttcatgttcttat

SEQ ID NO: 116675 - DNA, 25 bp, Saccharomyces pastorianus
ggccagtccatatgttagtttagca

SEQ ID NO: 116676 - DNA, 25 bp, Saccharomyces pastorianus
aagtgatattgttgctgatttgttc

SEQ ID NO: 116677 - DNA, 25 bp, Saccharomyces pastorianus
tatttaattttcgttcccttctgca

SEQ ID NO: 116678 - DNA, 25 bp, Saccharomyces pastorianus
tgggcagtggccgtctctcctagat

SEQ ID NO: 116679 - DNA, 25 bp, Saccharomyces pastorianus
tgttcttatgttcatgggcagtggc

SEQ ID NO: 116680 - DNA, 25 bp, Saccharomyces pastorianus
acgttgatctagttttggcagctga

SEQ ID NO: 116681 - DNA, 25 bp, Saccharomyces pastorianus
gtatctcgaggaagcttttccatta

SEQ ID NO: 116682 - DNA, 25 bp, Saccharomyces pastorianus
ggacattgacaagttgataccacta

SEQ ID NO: 116683 - DNA, 25 bp, Saccharomyces pastorianus
aaaacacattccacgatggcactaa

SEQ ID NO: 116684 - DNA, 25 bp, Saccharomyces pastorianus
gcataaacccacctgtaatcttgat

SEQ ID NO: 116685 - DNA, 25 bp, Saccharomyces pastorianus
aaaacactacttgatctcactcact

SEQ ID NO: 116686 - DNA, 25 bp, Saccharomyces pastorianus
gctgtcggcagaattttcacctcaa

SEQ ID NO: 116687 - DNA, 25 bp, Saccharomyces pastorianus
cggtaaagtctggatcgctggcgaa

SEQ ID NO: 116688 - DNA, 25 bp, Saccharomyces pastorianus
ggcagctgattgtgtgtatctcgag

SEQ ID NO: 116689 - DNA, 25 bp, Saccharomyces pastorianus
gaaatcagttgaccatctgctaagt

SEQ ID NO: 116690 - DNA, 25 bp, Saccharomyces pastorianus
gctggcgaactgttgtgcgagtaca

SEQ ID NO: 116691 - DNA, 25 bp, Saccharomyces pastorianus
aagaatttcatcgtcactttgaaaa

SEQ ID NO: 116692 - DNA, 25 bp, Saccharomyces pastorianus
aggaaaagcacaatgatgtcatcga

SEQ ID NO: 116693 - DNA, 25 bp, Saccharomyces pastorianus
ggctctattgtacacgaattcgaca

SEQ ID NO: 116694 - DNA, 25 bp, Saccharomyces pastorianus
aagggtacaccatccaggtaccaga

SEQ ID NO: 116695 - DNA, 25 bp, Saccharomyces pastorianus
aggtaccagatgttctccacttgaa

SEQ ID NO: 116696 - DNA, 25 bp, Saccharomyces pastorianus
ggattcagttcatcacgcaggtggc

SEQ ID NO: 116697 - DNA, 25 bp, Saccharomyces pastorianus
agttcatcacgcaggtggctctatt

SEQ ID NO: 116698 - DNA, 25 bp, Saccharomyces pastorianus
tcgacatcattaaagggtacaccat

SEQ ID NO: 116699 - DNA, 25 bp, Saccharomyces pastorianus
acgcaggtggctctattgtacacga

SEQ ID NO: 116700 - DNA, 25 bp, Saccharomyces pastorianus
agaacactccagatgtggaagctaa

SEQ ID NO: 116701 - DNA, 25 bp, Saccharomyces pastorianus
gaagttcttggattcagttcatcac

SEQ ID NO: 116702 - DNA, 25 bp, Saccharomyces pastorianus
aagcaaactctcttctgcagaattg

SEQ ID NO: 116703 - DNA, 25 bp, Saccharomyces pastorianus
agagattgaattacattgcgccatg

SEQ ID NO: 116704 - DNA, 25 bp, Saccharomyces pastorianus
gttaaattggtactcgctgcctgca

SEQ ID NO: 116705 - DNA, 25 bp, Saccharomyces pastorianus
gggcgaattgattgaatcccattct

SEQ ID NO: 116706 - DNA, 25 bp, Saccharomyces pastorianus
tctgactgacgaagtttgggcggtt

SEQ ID NO: 116707 - DNA, 25 bp, Saccharomyces pastorianus
aaaatgacaccctctggccataatt

SEQ ID NO: 116708 - DNA, 25 bp, Saccharomyces pastorianus
gttgcaggacaaggtgctggcccaa

SEQ ID NO: 116709 - DNA, 25 bp, Saccharomyces pastorianus
tgcacgtggcaaagaccccatttga

SEQ ID NO: 116710 - DNA, 25 bp, Saccharomyces pastorianus
gtgtcattattattacgcattcggc

SEQ ID NO: 116711 - DNA, 25 bp, Saccharomyces pastorianus
tgaacctacgaattacttggacaga

SEQ ID NO: 116712 - DNA, 25 bp, Saccharomyces pastorianus
gcttctggtcaattcagggctttaa

SEQ ID NO: 116713 - DNA, 25 bp, Saccharomyces pastorianus
tagcatcaaatttatcaccctcttc

SEQ ID NO: 116714 - DNA, 25 bp, Saccharomyces pastorianus
ttttttcttcccactattaatcttg

SEQ ID NO: 116715 - DNA, 25 bp, Saccharomyces pastorianus
attaatcttgttacccatagcatca

SEQ ID NO: 116716 - DNA, 25 bp, Saccharomyces pastorianus
gtcctgcaacccaattatggccaga

SEQ ID NO: 116717 - DNA, 25 bp, Saccharomyces pastorianus
tttctcaattcttgggccagcacct

SEQ ID NO: 116718 - DNA, 25 bp, Saccharomyces pastorianus
agagggtgtcattttcccatcctta

SEQ ID NO: 116719 - DNA, 25 bp, Saccharomyces pastorianus
aagaaacgtattcatcacccatctc

SEQ ID NO: 116720 - DNA, 25 bp, Saccharomyces pastorianus
tcttcattctctccttctttttctt

SEQ ID NO: 116721 - DNA, 25 bp, Saccharomyces pastorianus
tttttctttctcaattctgcagaag

SEQ ID NO: 116722 - DNA, 25 bp, Saccharomyces pastorianus
agagatgtactcgacttcaaattaa

SEQ ID NO: 116723 - DNA, 25 bp, Saccharomyces pastorianus
gcccaaacttcgtcagtcagattct

SEQ ID NO: 116724 - DNA, 25 bp, Saccharomyces pastorianus
caccagatcgcgtcttcggataaga

SEQ ID NO: 116725 - DNA, 25 bp, Saccharomyces pastorianus
gtattagatgccaccagatcgcgtc

SEQ ID NO: 116726 - DNA, 25 bp, Saccharomyces pastorianus
aatagcaggctataggcaatctaag

SEQ ID NO: 116727 - DNA, 25 bp, Saccharomyces pastorianus
gaggagtatgccaatcctatctata

SEQ ID NO: 116728 - DNA, 25 bp, Saccharomyces pastorianus
acctgctccggtacataggatattg

SEQ ID NO: 116729 - DNA, 25 bp, Saccharomyces pastorianus
ggcaatctaagggtgtccattcaga

SEQ ID NO: 116730 - DNA, 25 bp, Saccharomyces pastorianus
ggtgaaaaaagctgacatggtcgtt

SEQ ID NO: 116731 - DNA, 25 bp, Saccharomyces pastorianus
aaactcccagttgcattttgacaag

SEQ ID NO: 116732 - DNA, 25 bp, Saccharomyces pastorianus
tgaatcacagaatctacctgctccg

SEQ ID NO: 116733 - DNA, 25 bp, Saccharomyces pastorianus
tgacaagtttactcccaatccttat

SEQ ID NO: 116734 - DNA, 25 bp, Saccharomyces pastorianus
gacggtttacactacgttcaaatga

SEQ ID NO: 116735 - DNA, 25 bp, Saccharomyces pastorianus
actttgcagtttgtcatccaggaaa

SEQ ID NO: 116736 - DNA, 25 bp, Saccharomyces pastorianus
aacgggccgtagaaagactttgcag

SEQ ID NO: 116737 - DNA, 25 bp, Saccharomyces pastorianus
tggcagaaccttacctttgtcgaga

SEQ ID NO: 116738 - DNA, 25 bp, Saccharomyces pastorianus
gattacaatcctcaaacgggccgta

SEQ ID NO: 116739 - DNA, 25 bp, Saccharomyces pastorianus
tttgtcgagagtacagcctgtccaa

SEQ ID NO: 116740 - DNA, 25 bp, Saccharomyces pastorianus
tttagatcagcatcaagctctccca

SEQ ID NO: 116741 - DNA, 25 bp, Saccharomyces pastorianus
gatgacctaatttacactctgccac

SEQ ID NO: 116742 - DNA, 25 bp, Saccharomyces pastorianus
tatgcctggcggctttagatcagca

SEQ ID NO: 116743 - DNA, 25 bp, Saccharomyces pastorianus
tcacaaacttctacttatcctggtc

SEQ ID NO: 116744 - DNA, 25 bp, Saccharomyces pastorianus
tcctggtcaaggtatgccaactcca

SEQ ID NO: 116745 - DNA, 25 bp, Saccharomyces pastorianus
agctctcccacgtatccagaggaag

SEQ ID NO: 116746 - DNA, 25 bp, Saccharomyces pastorianus
taaagtgtgggatgtgcgctctccg

SEQ ID NO: 116747 - DNA, 25 bp, Saccharomyces pastorianus
cactgctcgtgtgtggtcgattgat

SEQ ID NO: 116748 - DNA, 25 bp, Saccharomyces pastorianus
gatggttcgatgttagcggcagcaa

SEQ ID NO: 116749 - DNA, 25 bp, Saccharomyces pastorianus
aagtcgtaattcatcctaaccaagg

SEQ ID NO: 116750 - DNA, 25 bp, Saccharomyces pastorianus
ggcatcgtccgatcattacgtgaga

SEQ ID NO: 116751 - DNA, 25 bp, Saccharomyces pastorianus
ggcaacatgttcagcggatcacact

SEQ ID NO: 116752 - DNA, 25 bp, Saccharomyces pastorianus
tgggattgcgcatttagtgccgaca

SEQ ID NO: 116753 - DNA, 25 bp, Saccharomyces pastorianus
gacgcatcccatctaaaaccggtaa

SEQ ID NO: 116754 - DNA, 25 bp, Saccharomyces pastorianus
atacctctctccagtctttatctat

SEQ ID NO: 116755 - DNA, 25 bp, Saccharomyces pastorianus
aattcagagcgcactccacatatat

SEQ ID NO: 116756 - DNA, 25 bp, Saccharomyces pastorianus
agtgccgacagtgcgtatctagtaa

SEQ ID NO: 116757 - DNA, 25 bp, Saccharomyces pastorianus
acatcgaattggcaacgtcatactt

SEQ ID NO: 116758 - DNA, 25 bp, Saccharomyces pastorianus
gagctacaccagtatatttcggaac

SEQ ID NO: 116759 - DNA, 25 bp, Saccharomyces pastorianus
ggtcttccccgaaacagatagtacg

SEQ ID NO: 116760 - DNA, 25 bp, Saccharomyces pastorianus
gtgtagtgatcttttgaactcatat

SEQ ID NO: 116761 - DNA, 25 bp, Saccharomyces pastorianus
gaaattgtcggagagtctatccaag

SEQ ID NO: 116762 - DNA, 25 bp, Saccharomyces pastorianus
gacgcttgtaattttttgactttat

SEQ ID NO: 116763 - DNA, 25 bp, Saccharomyces pastorianus
caagttgagtaaggttcttcgggat

SEQ ID NO: 116764 - DNA, 25 bp, Saccharomyces pastorianus
atggataccccatagaagatgcaag

SEQ ID NO: 116765 - DNA, 25 bp, Saccharomyces pastorianus
ttaattcgtgtaagggcttccctga

SEQ ID NO: 116766 - DNA, 25 bp, Saccharomyces pastorianus
tgtctagacgttttgattacaccaa

SEQ ID NO: 116767 - DNA, 25 bp, Saccharomyces pastorianus
aaggcgcttttcaaggacgcttgta

SEQ ID NO: 116768 - DNA, 25 bp, Saccharomyces pastorianus
tggtgctatcttcctaggcatgtat

SEQ ID NO: 116769 - DNA, 25 bp, Saccharomyces pastorianus
atttgtgcttgtcttgttcgagttc

SEQ ID NO: 116770 - DNA, 25 bp, Saccharomyces pastorianus
aaggacgcaagttcactctaccaat

SEQ ID NO: 116771 - DNA, 25 bp, Saccharomyces pastorianus
gagttcccgcagaagtcgttaagca

SEQ ID NO: 116772 - DNA, 25 bp, Saccharomyces pastorianus
atgctttcctcttccattggtgaaa

SEQ ID NO: 116773 - DNA, 25 bp, Saccharomyces pastorianus
gattgatacgacaacgcacatgctt

SEQ ID NO: 116774 - DNA, 25 bp, Saccharomyces pastorianus
tatatcagcaaactttactcacggg

SEQ ID NO: 116775 - DNA, 25 bp, Saccharomyces pastorianus
gtgggatcgcagcagctacaacgac

SEQ ID NO: 116776 - DNA, 25 bp, Saccharomyces pastorianus
aaccgcctcacttggaagcgttatt

SEQ ID NO: 116777 - DNA, 25 bp, Saccharomyces pastorianus
gctatctgcggttctattgcgggtg

SEQ ID NO: 116778 - DNA, 25 bp, Saccharomyces pastorianus
acagtttcctttatacgagtatcta

SEQ ID NO: 116779 - DNA, 25 bp, Saccharomyces pastorianus
tcattgtcagagtaagaggtccgct

SEQ ID NO: 116780 - DNA, 25 bp, Saccharomyces pastorianus
ggctgaatcaagaactcgtcaattt

SEQ ID NO: 116781 - DNA, 25 bp, Saccharomyces pastorianus
ggtgagtctttttctgtttgtaact

SEQ ID NO: 116782 - DNA, 25 bp, Saccharomyces pastorianus
gactacttacgatggcaaacctgct

SEQ ID NO: 116783 - DNA, 25 bp, Saccharomyces pastorianus
tcttctatccgttccttgattcaaa

SEQ ID NO: 116784 - DNA, 25 bp, Saccharomyces pastorianus
gagattgccactatgggtgagtctt

SEQ ID NO: 116785 - DNA, 25 bp, Saccharomyces pastorianus
aactctgtcgacttggaggagactg

SEQ ID NO: 116786 - DNA, 25 bp, Saccharomyces pastorianus
gtaacttcttcttacaaccattcaa

SEQ ID NO: 116787 - DNA, 25 bp, Saccharomyces pastorianus
attggcaagccttctttatcttcta

SEQ ID NO: 116788 - DNA, 25 bp, Saccharomyces pastorianus
ggttattgcgccatacgtagtgatt

SEQ ID NO: 116789 - DNA, 25 bp, Saccharomyces pastorianus
gaggtccgcttgctgtaaatattcc

SEQ ID NO: 116790 - DNA, 25 bp, Saccharomyces pastorianus
gaggcttcgttctacactgtattgt

SEQ ID NO: 116791 - DNA, 25 bp, Saccharomyces pastorianus
tacggctcaacgtgaattcgcattg

SEQ ID NO: 116792 - DNA, 25 bp, Saccharomyces pastorianus
aaaggccaaaatcattctccaccga

SEQ ID NO: 116793 - DNA, 25 bp, Saccharomyces pastorianus
tactatggtctaactgaggcttcgt

SEQ ID NO: 116794 - DNA, 25 bp, Saccharomyces pastorianus
ttagtgggttctgccttatcttcgc

SEQ ID NO: 116795 - DNA, 25 bp, Saccharomyces pastorianus
catacttatctttggccgctggttt

SEQ ID NO: 116796 - DNA, 25 bp, Saccharomyces pastorianus
atgttgattcacattccggtgtttt

SEQ ID NO: 116797 - DNA, 25 bp, Saccharomyces pastorianus
ccaccatttatgaagttgccccagg

SEQ ID NO: 116798 - DNA, 25 bp, Saccharomyces pastorianus
gagttgttcctggttatggccatgc

SEQ ID NO: 116799 - DNA, 25 bp, Saccharomyces pastorianus
tttagctggcccattacatggtcgt

SEQ ID NO: 116800 - DNA, 25 bp, Saccharomyces pastorianus
ggtgtgttaccccaattaatcatcg

SEQ ID NO: 116801 - DNA, 25 bp, Saccharomyces pastorianus
gatggatatcaattgacattttcaa

SEQ ID NO: 116802 - DNA, 25 bp, Saccharomyces pastorianus
tcaattgacattttcaaacaacaag

SEQ ID NO: 116803 - DNA, 25 bp, Saccharomyces pastorianus
gtctagcgggggtcatacttttcat

SEQ ID NO: 116804 - DNA, 25 bp, Saccharomyces pastorianus
aagtcgatagtatcggaaaagctcc

SEQ ID NO: 116805 - DNA, 25 bp, Saccharomyces pastorianus
atacttttcatttccgggcggctgc

SEQ ID NO: 116806 - DNA, 25 bp, Saccharomyces pastorianus
acgtgacgccttttagcacaaaaat

SEQ ID NO: 116807 - DNA, 25 bp, Saccharomyces pastorianus
gtgacgccttttagcacaaaaatgc

SEQ ID NO: 116808 - DNA, 25 bp, Saccharomyces pastorianus
gacgccttttagcacaaaaatgcaa

SEQ ID NO: 116809 - DNA, 25 bp, Saccharomyces pastorianus
ttttcatttccgggcggctgcggcg

SEQ ID NO: 116810 - DNA, 25 bp, Saccharomyces pastorianus
tacttttcatttccgggcggctgcg

SEQ ID NO: 116811 - DNA, 25 bp, Saccharomyces pastorianus
gctgcggcggaaaaaaacgtgacgc

SEQ ID NO: 116812 - DNA, 25 bp, Saccharomyces pastorianus
aaggcatcactatccctaatgttgt

SEQ ID NO: 116813 - DNA, 25 bp, Saccharomyces pastorianus
aactcgtacattatggtccatccat

SEQ ID NO: 116814 - DNA, 25 bp, Saccharomyces pastorianus
ataaattcgcaaatcctgctccact

SEQ ID NO: 116815 - DNA, 25 bp, Saccharomyces pastorianus
ttcggtgctatatacatcccttggt

SEQ ID NO: 116816 - DNA, 25 bp, Saccharomyces pastorianus
ggtgtgatagtagccttcattgcct

SEQ ID NO: 116817 - DNA, 25 bp, Saccharomyces pastorianus
actacgtttgtcctatccatgttca

SEQ ID NO: 116818 - DNA, 25 bp, Saccharomyces pastorianus
agaacactttcggtggtacagccct

SEQ ID NO: 116819 - DNA, 25 bp, Saccharomyces pastorianus
gaatccgaccttggaaatgcgctag

SEQ ID NO: 116820 - DNA, 25 bp, Saccharomyces pastorianus
aacgcttacgcaggtattgccacaa

SEQ ID NO: 116821 - DNA, 25 bp, Saccharomyces pastorianus
cttcttacttctatccattgcaaac

SEQ ID NO: 116822 - DNA, 25 bp, Saccharomyces pastorianus
ttattcttcctcttagcagtgacct

SEQ ID NO: 116823 - DNA, 25 bp, Saccharomyces pastorianus
cacaggaggtccatggttcacagat

SEQ ID NO: 116824 - DNA, 25 bp, Saccharomyces pastorianus
agaaccaatctccatcagcatgtag

SEQ ID NO: 116825 - DNA, 25 bp, Saccharomyces pastorianus
tgtacagcttacaaccctctgtgga

SEQ ID NO: 116826 - DNA, 25 bp, Saccharomyces pastorianus
gttaaccccttcaaatatcagatct

SEQ ID NO: 116827 - DNA, 25 bp, Saccharomyces pastorianus
catatcagagaacaccttccctaat

SEQ ID NO: 116828 - DNA, 25 bp, Saccharomyces pastorianus
gaagtcttagtgtacgacgacaagc

SEQ ID NO: 116829 - DNA, 25 bp, Saccharomyces pastorianus
gcatgactgctatagagtgacctta

SEQ ID NO: 116830 - DNA, 25 bp, Saccharomyces pastorianus
agtggccaatgtcgagttaacccct

SEQ ID NO: 116831 - DNA, 25 bp, Saccharomyces pastorianus
tattacagcggcacaagtggccaat

SEQ ID NO: 116832 - DNA, 25 bp, Saccharomyces pastorianus
tacttcaagatgtttccggcttcaa

SEQ ID NO: 116833 - DNA, 25 bp, Saccharomyces pastorianus
caccttccctaatggcttcaagaat

SEQ ID NO: 116834 - DNA, 25 bp, Saccharomyces pastorianus
ttcatcctccaaagccttattacct

SEQ ID NO: 116835 - DNA, 25 bp, Saccharomyces pastorianus
tcttcatcctccaaagccttattac

SEQ ID NO: 116836 - DNA, 25 bp, Saccharomyces pastorianus
cggctcgccctcaccttggttcatt

SEQ ID NO: 116837 - DNA, 25 bp, Saccharomyces pastorianus
aattcttcttcatcctccaaagcct

SEQ ID NO: 116838 - DNA, 25 bp, Saccharomyces pastorianus
ttcttcatcctccaaagccttatta

SEQ ID NO: 116839 - DNA, 25 bp, Saccharomyces pastorianus
aaaattcttcttcatcctccaaagc

SEQ ID NO: 116840 - DNA, 25 bp, Saccharomyces pastorianus
ttcttcttcatcctccaaagcctta

SEQ ID NO: 116841 - DNA, 25 bp, Saccharomyces pastorianus
tcttcttcatcctccaaagccttat

SEQ ID NO: 116842 - DNA, 25 bp, Saccharomyces pastorianus
aaagccttattacctgcctccggct

SEQ ID NO: 116843 - DNA, 25 bp, Saccharomyces pastorianus
attcttcttcatcctccaaagcctt

SEQ ID NO: 116844 - DNA, 25 bp, Saccharomyces pastorianus
aaattcttcttcatcctccaaagcc

SEQ ID NO: 116845 - DNA, 25 bp, Saccharomyces pastorianus
gatttatacaattactctaacttag

SEQ ID NO: 116846 - DNA, 25 bp, Saccharomyces pastorianus
aattccgaaggaatactccgcagta

SEQ ID NO: 116847 - DNA, 25 bp, Saccharomyces pastorianus
ggacttgaatcgaattccgaaggaa

SEQ ID NO: 116848 - DNA, 25 bp, Saccharomyces pastorianus
gaatactccgcagtattggagccat

SEQ ID NO: 116849 - DNA, 25 bp, Saccharomyces pastorianus
aaaagttgaaggatcctccgcctgc

SEQ ID NO: 116850 - DNA, 25 bp, Saccharomyces pastorianus
aagaaggtgcgaagacagtcaatcc

SEQ ID NO: 116851 - DNA, 25 bp, Saccharomyces pastorianus
gtattggagccatattttcagaata

SEQ ID NO: 116852 - DNA, 25 bp, Saccharomyces pastorianus
aacctgtggtatgttttgaagggca

SEQ ID NO: 116853 - DNA, 25 bp, Saccharomyces pastorianus
agagctctaaaaatttgtcgttcta

SEQ ID NO: 116854 - DNA, 25 bp, Saccharomyces pastorianus
gcacatttaaagtctagagctctaa

SEQ ID NO: 116855 - DNA, 25 bp, Saccharomyces pastorianus
gcgaagacagtcaatccggaaatta

SEQ ID NO: 116856 - DNA, 25 bp, Saccharomyces pastorianus
aaggtcaccgttgggaatgctctca

SEQ ID NO: 116857 - DNA, 25 bp, Saccharomyces pastorianus
taatgcgtctaactcacttggcgtg

SEQ ID NO: 116858 - DNA, 25 bp, Saccharomyces pastorianus
gaatgctctcactagtggcttgttc

SEQ ID NO: 116859 - DNA, 25 bp, Saccharomyces pastorianus
gaatccttttctttatacaacgcat

SEQ ID NO: 116860 - DNA, 25 bp, Saccharomyces pastorianus
tgggatttacccttctagatcttaa

SEQ ID NO: 116861 - DNA, 25 bp, Saccharomyces pastorianus
gtggcttgttctattaatgcgtcta

SEQ ID NO: 116862 - DNA, 25 bp, Saccharomyces pastorianus
atggtctttaccagctcagaaagtt

SEQ ID NO: 116863 - DNA, 25 bp, Saccharomyces pastorianus
tatcggccgtattgagaatcctttt

SEQ ID NO: 116864 - DNA, 25 bp, Saccharomyces pastorianus
ggcgtgctaacggacatactgttct

SEQ ID NO: 116865 - DNA, 25 bp, Saccharomyces pastorianus
ttcttcgttgctatcttctcttaaa

SEQ ID NO: 116866 - DNA, 25 bp, Saccharomyces pastorianus
ggcgttccaccattttttacacata

SEQ ID NO: 116867 - DNA, 25 bp, Saccharomyces pastorianus
aagtcccttctgatccgtacaatta

SEQ ID NO: 116868 - DNA, 25 bp, Saccharomyces pastorianus
acttcctgcaagttcctctgaaatt

SEQ ID NO: 116869 - DNA, 25 bp, Saccharomyces pastorianus
tttgtctcagcaatacacacttcca

SEQ ID NO: 116870 - DNA, 25 bp, Saccharomyces pastorianus
ggcctcaaggcattacacgttacga

SEQ ID NO: 116871 - DNA, 25 bp, Saccharomyces pastorianus
ttacgattttccaactgttcctgca

SEQ ID NO: 116872 - DNA, 25 bp, Saccharomyces pastorianus
aaagcaaattcatcacctaccacta

SEQ ID NO: 116873 - DNA, 25 bp, Saccharomyces pastorianus
aatcgcacgttgaacttgcaccttc

SEQ ID NO: 116874 - DNA, 25 bp, Saccharomyces pastorianus
gatgtctcacgccaacaatcggtaa

SEQ ID NO: 116875 - DNA, 25 bp, Saccharomyces pastorianus
acagcaaaagcctcaatcgcacgtt

SEQ ID NO: 116876 - DNA, 25 bp, Saccharomyces pastorianus
gaatcccgcgaaaggccgtatccag

SEQ ID NO: 116877 - DNA, 25 bp, Saccharomyces pastorianus
aaattcgtccaaccggagtcaactg

SEQ ID NO: 116878 - DNA, 25 bp, Saccharomyces pastorianus
taggatctgaaactgaacatgtgca

SEQ ID NO: 116879 - DNA, 25 bp, Saccharomyces pastorianus
tgatgattcgttacgggtagaccaa

SEQ ID NO: 116880 - DNA, 25 bp, Saccharomyces pastorianus
gtactcgacatcttatagggtccct

SEQ ID NO: 116881 - DNA, 25 bp, Saccharomyces pastorianus
taatgctaaaggtggcctagccaaa

SEQ ID NO: 116882 - DNA, 25 bp, Saccharomyces pastorianus
gacagccaccattgaaaagctacct

SEQ ID NO: 116883 - DNA, 25 bp, Saccharomyces pastorianus
agccctgagcagatgttcgaagata

SEQ ID NO: 116884 - DNA, 25 bp, Saccharomyces pastorianus
gggaccaaggactcatctatcgatg

SEQ ID NO: 116885 - DNA, 25 bp, Saccharomyces pastorianus
aacatgtgcaaagtacgcctgcggg

SEQ ID NO: 116886 - DNA, 25 bp, Saccharomyces pastorianus
attgctagataaggttcgtgtggtt

SEQ ID NO: 116887 - DNA, 25 bp, Saccharomyces pastorianus
taatggttcaccactaagccctgag

SEQ ID NO: 116888 - DNA, 25 bp, Saccharomyces pastorianus
gaattcagtgttatctgtttccatt

SEQ ID NO: 116889 - DNA, 25 bp, Saccharomyces pastorianus
aaaactccatcttcgatttgctctc

SEQ ID NO: 116890 - DNA, 25 bp, Saccharomyces pastorianus
gcatagcattacgaggccttccaaa

SEQ ID NO: 116891 - DNA, 25 bp, Saccharomyces pastorianus
atggcttgtgccagtaagtcctcat

SEQ ID NO: 116892 - DNA, 25 bp, Saccharomyces pastorianus
agtcttcctgttcccctaatgagga

SEQ ID NO: 116893 - DNA, 25 bp, Saccharomyces pastorianus
gcaaattcgtttacagttcgcctat

SEQ ID NO: 116894 - DNA, 25 bp, Saccharomyces pastorianus
atatgaacgtcgcagataccaccac

SEQ ID NO: 116895 - DNA, 25 bp, Saccharomyces pastorianus
ttccgcggtgtcagcgaaagctcga

SEQ ID NO: 116896 - DNA, 25 bp, Saccharomyces pastorianus
gctcgagcactaccgcagatatgaa

SEQ ID NO: 116897 - DNA, 25 bp, Saccharomyces pastorianus
gtgtcttccctctatcaagagtttg

SEQ ID NO: 116898 - DNA, 25 bp, Saccharomyces pastorianus
aatacatcttcctttacatctttcc

SEQ ID NO: 116899 - DNA, 25 bp, Saccharomyces pastorianus
aaacccctgctaggtctaagatcaa

SEQ ID NO: 116900 - DNA, 25 bp, Saccharomyces pastorianus
catcctaccagtatacttttcgtta

SEQ ID NO: 116901 - DNA, 25 bp, Saccharomyces pastorianus
caccggctatcaaaccatgggtagg

SEQ ID NO: 116902 - DNA, 25 bp, Saccharomyces pastorianus
gaacgaccaagccaggatgaagata

SEQ ID NO: 116903 - DNA, 25 bp, Saccharomyces pastorianus
tcaacaattgatgctaacgtcgaag

SEQ ID NO: 116904 - DNA, 25 bp, Saccharomyces pastorianus
gcgggtttccgataaatattgtaca

SEQ ID NO: 116905 - DNA, 25 bp, Saccharomyces pastorianus
aacgttagtgttcatcctaccagta

SEQ ID NO: 116906 - DNA, 25 bp, Saccharomyces pastorianus
atattgtacaattaggccccaccgg

SEQ ID NO: 116907 - DNA, 25 bp, Saccharomyces pastorianus
gaccatagtttcgatgctacatgaa

SEQ ID NO: 116908 - DNA, 25 bp, Saccharomyces pastorianus
aggtcatcaggtgggctgaacgtta

SEQ ID NO: 116909 - DNA, 25 bp, Saccharomyces pastorianus
cgatgtttcatcagcgggtttccga

SEQ ID NO: 116910 - DNA, 25 bp, Saccharomyces pastorianus
agataggcaatatagcgggctacat

SEQ ID NO: 116911 - DNA, 25 bp, Saccharomyces pastorianus
agacccgtcttgtccttgcaacaga

SEQ ID NO: 116912 - DNA, 25 bp, Saccharomyces pastorianus
gtgaccaacaggagccgcaaacatc

SEQ ID NO: 116913 - DNA, 25 bp, Saccharomyces pastorianus
ttccactacaagtcgatcgcggaca

SEQ ID NO: 116914 - DNA, 25 bp, Saccharomyces pastorianus
gtacgcccagcatagcatgatgttc

SEQ ID NO: 116915 - DNA, 25 bp, Saccharomyces pastorianus
atgatgttccccatcagtgaccaac

SEQ ID NO: 116916 - DNA, 25 bp, Saccharomyces pastorianus
gaagaaactcggtcgccgtcaagtt

SEQ ID NO: 116917 - DNA, 25 bp, Saccharomyces pastorianus
tacgcggccctcattgttcaagagt

SEQ ID NO: 116918 - DNA, 25 bp, Saccharomyces pastorianus
aggcgcaactctgtattgccggcaa

SEQ ID NO: 116919 - DNA, 25 bp, Saccharomyces pastorianus
atatcaagccttgtgccgtgaacat

SEQ ID NO: 116920 - DNA, 25 bp, Saccharomyces pastorianus
taccgcctgctttatcaactgacaa

SEQ ID NO: 116921 - DNA, 25 bp, Saccharomyces pastorianus
agactgtacttaatgtttccgctcc

SEQ ID NO: 116922 - DNA, 25 bp, Saccharomyces pastorianus
ttgatcacacttctaagccttcaga

SEQ ID NO: 116923 - DNA, 25 bp, Saccharomyces pastorianus
cgaccgctctcattttcatgattta

SEQ ID NO: 116924 - DNA, 25 bp, Saccharomyces pastorianus
atgttaagcagaattgtccccggaa

SEQ ID NO: 116925 - DNA, 25 bp, Saccharomyces pastorianus
gccacgggcatcacaaatcttacag

SEQ ID NO: 116926 - DNA, 25 bp, Saccharomyces pastorianus
gttgcttgtcgcgagtttattcagt

SEQ ID NO: 116927 - DNA, 25 bp, Saccharomyces pastorianus
gatggaagcgctcaaacagatcctt

SEQ ID NO: 116928 - DNA, 25 bp, Saccharomyces pastorianus
aagacggtccatcttgggtcgttgc

SEQ ID NO: 116929 - DNA, 25 bp, Saccharomyces pastorianus
cagagtgtgctgaacgggaccctac

SEQ ID NO: 116930 - DNA, 25 bp, Saccharomyces pastorianus
ttttttcagtactttgcccgttgca

SEQ ID NO: 116931 - DNA, 25 bp, Saccharomyces pastorianus
gagcagcccatcacagattacattg

SEQ ID NO: 116932 - DNA, 25 bp, Saccharomyces pastorianus
gggaccctacagtttttgatcacac

SEQ ID NO: 116933 - DNA, 25 bp, Saccharomyces pastorianus
gggattctcgcgttgagctacaata

SEQ ID NO: 116934 - DNA, 25 bp, Saccharomyces pastorianus
ttgcaattgaacaccgtcctgaatc

SEQ ID NO: 116935 - DNA, 25 bp, Saccharomyces pastorianus
cgggcgctttgttcaagtcttcaaa

SEQ ID NO: 116936 - DNA, 25 bp, Saccharomyces pastorianus
atgacctatgttacggtaccggtgc

SEQ ID NO: 116937 - DNA, 25 bp, Saccharomyces pastorianus
tagaaggctcacagggtctgatccc

SEQ ID NO: 116938 - DNA, 25 bp, Saccharomyces pastorianus
agaggcaaacatgacaccgcgggct

SEQ ID NO: 116939 - DNA, 25 bp, Saccharomyces pastorianus
gagaggtcccttcttaggtaataat

SEQ ID NO: 116940 - DNA, 25 bp, Saccharomyces pastorianus
aacccatgggttattcctcggcaat

SEQ ID NO: 116941 - DNA, 25 bp, Saccharomyces pastorianus
gtctgcagaatattccgcccaatag

SEQ ID NO: 116942 - DNA, 25 bp, Saccharomyces pastorianus
tggaatgcatgtcgacaccgctagg

SEQ ID NO: 116943 - DNA, 25 bp, Saccharomyces pastorianus
tgcatcctttggctggtctagacaa

SEQ ID NO: 116944 - DNA, 25 bp, Saccharomyces pastorianus
acgctacaatgtacggatccggttc

SEQ ID NO: 116945 - DNA, 25 bp, Saccharomyces pastorianus
gtacccaaaattcaagccttcgact

SEQ ID NO: 116946 - DNA, 25 bp, Saccharomyces pastorianus
gccttcgactctaacatggtccata

SEQ ID NO: 116947 - DNA, 25 bp, Saccharomyces pastorianus
cggtcttgactgctatatgtgcgga

SEQ ID NO: 116948 - DNA, 25 bp, Saccharomyces pastorianus
ggcctccgttggtttgagcatgtac

SEQ ID NO: 116949 - DNA, 25 bp, Saccharomyces pastorianus
ttcctcctcggaagacgcactagat

SEQ ID NO: 116950 - DNA, 25 bp, Saccharomyces pastorianus
ggtattgaaggtgcccttgccggat

SEQ ID NO: 116951 - DNA, 25 bp, Saccharomyces pastorianus
aaaacgcactgagggtcgccgaaga

SEQ ID NO: 116952 - DNA, 25 bp, Saccharomyces pastorianus
tgccggatttgcaatctctgctata

SEQ ID NO: 116953 - DNA, 25 bp, Saccharomyces pastorianus
ataagatcatcaccggtgcctgggc

SEQ ID NO: 116954 - DNA, 25 bp, Saccharomyces pastorianus
gtacgctcaattcattaccgtcggg

SEQ ID NO: 116955 - DNA, 25 bp, Saccharomyces pastorianus
aaaggctatcattcgttgcgctgtt

SEQ ID NO: 116956 - DNA, 25 bp, Saccharomyces pastorianus
tgcgctgttccccaaaatgagaatg

SEQ ID NO: 116957 - DNA, 25 bp, Saccharomyces pastorianus
gaaatctacgatgggttcactcaag

SEQ ID NO: 116958 - DNA, 25 bp, Saccharomyces pastorianus
tgtcccaagctggtaatcttttgaa

SEQ ID NO: 116959 - DNA, 25 bp, Saccharomyces pastorianus
atttcctgtctattgcacacactag

SEQ ID NO: 116960 - DNA, 25 bp, Saccharomyces pastorianus
ataacttcgtctacatgtccgatgt

SEQ ID NO: 116961 - DNA, 25 bp, Saccharomyces pastorianus
agccctatgaggttttgtcccaagc

SEQ ID NO: 116962 - DNA, 25 bp, Saccharomyces pastorianus
gatttagtccaacagtctccaaact

SEQ ID NO: 116963 - DNA, 25 bp, Saccharomyces pastorianus
atgtttcattactccaagccctatg

SEQ ID NO: 116964 - DNA, 25 bp, Saccharomyces pastorianus
aagaactaccaacttgcgtcagcaa

SEQ ID NO: 116965 - DNA, 25 bp, Saccharomyces pastorianus
acgtcaattgaaggcctctggtcaa

SEQ ID NO: 116966 - DNA, 25 bp, Saccharomyces pastorianus
ggatttcccgcgatttcaattatat

SEQ ID NO: 116967 - DNA, 25 bp, Saccharomyces pastorianus
gaggaagaccatcaacagctctcta

SEQ ID NO: 116968 - DNA, 25 bp, Saccharomyces pastorianus
aagtcctgaaggatttcccgcgatt

SEQ ID NO: 116969 - DNA, 25 bp, Saccharomyces pastorianus
aacagctctctaaacgccatgaaac

SEQ ID NO: 116970 - DNA, 25 bp, Saccharomyces pastorianus
aaagaatctgtttttggccacaaga

SEQ ID NO: 116971 - DNA, 25 bp, Saccharomyces pastorianus
ctacattgcacccaggtgtgtctga

SEQ ID NO: 116972 - DNA, 25 bp, Saccharomyces pastorianus
ggtgcaaaatacatactcagcgaag

SEQ ID NO: 116973 - DNA, 25 bp, Saccharomyces pastorianus
aggtgtgtctgagcgctctgacaaa

SEQ ID NO: 116974 - DNA, 25 bp, Saccharomyces pastorianus
cccacagggtcaaggttcaagtcct

SEQ ID NO: 116975 - DNA, 25 bp, Saccharomyces pastorianus
attggattctgggattactatcgaa

SEQ ID NO: 116976 - DNA, 25 bp, Saccharomyces pastorianus
agttgcaaatgtcaaaccatcttta

SEQ ID NO: 116977 - DNA, 25 bp, Saccharomyces pastorianus
cagcctccagtcaagtttctattgt

SEQ ID NO: 116978 - DNA, 25 bp, Saccharomyces pastorianus
gtacgcgttgataaagcttccactt

SEQ ID NO: 116979 - DNA, 25 bp, Saccharomyces pastorianus
gctcccattacagccgattgaaatt

SEQ ID NO: 116980 - DNA, 25 bp, Saccharomyces pastorianus
tgaatgcattgcttctacctcgaat

SEQ ID NO: 116981 - DNA, 25 bp, Saccharomyces pastorianus
ttattaatagtactcacctgctccc

SEQ ID NO: 116982 - DNA, 25 bp, Saccharomyces pastorianus
aataacgtccgttctctcgaatcta

SEQ ID NO: 116983 - DNA, 25 bp, Saccharomyces pastorianus
ttagacactcagcttattaccttat

SEQ ID NO: 116984 - DNA, 25 bp, Saccharomyces pastorianus
gaagtacctgatgtcaacgctctaa

SEQ ID NO: 116985 - DNA, 25 bp, Saccharomyces pastorianus
cggatttactgtcccttattaatag

SEQ ID NO: 116986 - DNA, 25 bp, Saccharomyces pastorianus
attaccttattacccagcagtctta

SEQ ID NO: 116987 - DNA, 25 bp, Saccharomyces pastorianus
gtaagatgcttgatgcagcctccag

SEQ ID NO: 116988 - DNA, 25 bp, Saccharomyces pastorianus
taaactctttggtctggatgactca

SEQ ID NO: 116989 - DNA, 25 bp, Saccharomyces pastorianus
ggatgactcagcgtgggacctcaat

SEQ ID NO: 116990 - DNA, 25 bp, Saccharomyces pastorianus
aatacgccgtctaatatcaactcag

SEQ ID NO: 116991 - DNA, 25 bp, Saccharomyces pastorianus
gagagttccaactccaatacgccgt

SEQ ID NO: 116992 - DNA, 25 bp, Saccharomyces pastorianus
tctccaacgttggttacagtgaact

SEQ ID NO: 116993 - DNA, 25 bp, Saccharomyces pastorianus
atcaactcagatgtggaacctatag

SEQ ID NO: 116994 - DNA, 25 bp, Saccharomyces pastorianus
gtgggacctcaatagctacaaagat

SEQ ID NO: 116995 - DNA, 25 bp, Saccharomyces pastorianus
gtgaactgcgaaaacctgagggtgt

SEQ ID NO: 116996 - DNA, 25 bp, Saccharomyces pastorianus
agaagcgacccaatctcataatctc

SEQ ID NO: 116997 - DNA, 25 bp, Saccharomyces pastorianus
aaacctttggcgataattctgatga

SEQ ID NO: 116998 - DNA, 25 bp, Saccharomyces pastorianus
aatggtgtcactggcaaactctcta

SEQ ID NO: 116999 - DNA, 25 bp, Saccharomyces pastorianus
tcttcctggaaccactatcatcaga

SEQ ID NO: 117000 - DNA, 25 bp, Saccharomyces pastorianus
tatcgccaaaggtttttctcccact

SEQ ID NO: 117001 - DNA, 25 bp, Saccharomyces pastorianus
atctaggtcatattcatcctctcca

SEQ ID NO: 117002 - DNA, 25 bp, Saccharomyces pastorianus
tcatcaaactttctcttcctggaac

SEQ ID NO: 117003 - DNA, 25 bp, Saccharomyces pastorianus
cattgtctgcgctacttttttgaat

SEQ ID NO: 117004 - DNA, 25 bp, Saccharomyces pastorianus
aaattccttatccttagcatccctt

SEQ ID NO: 117005 - DNA, 25 bp, Saccharomyces pastorianus
cttcattttgttcgccttcatcaaa

SEQ ID NO: 117006 - DNA, 25 bp, Saccharomyces pastorianus
gaatacgtacttctgctggtgcatt

SEQ ID NO: 117007 - DNA, 25 bp, Saccharomyces pastorianus
atcccttttctcgtcttcattttgt

SEQ ID NO: 117008 - DNA, 25 bp, Saccharomyces pastorianus
ctttttctttttgatgctatcctta

SEQ ID NO: 117009 - DNA, 25 bp, Saccharomyces pastorianus
gtcttggctccctgtaaattcctta

SEQ ID NO: 117010 - DNA, 25 bp, Saccharomyces pastorianus
agatcattttcgacaagacccctac

SEQ ID NO: 117011 - DNA, 25 bp, Saccharomyces pastorianus
tacagttcatatcagcatacctcct

SEQ ID NO: 117012 - DNA, 25 bp, Saccharomyces pastorianus
atgaattatccaggcggcgaggctt

SEQ ID NO: 117013 - DNA, 25 bp, Saccharomyces pastorianus
taaaagcgatgtcttcttcacctat

SEQ ID NO: 117014 - DNA, 25 bp, Saccharomyces pastorianus
cccttatctataatgacctcctttt

SEQ ID NO: 117015 - DNA, 25 bp, Saccharomyces pastorianus
atacctccttgcatgacaggtgtca

SEQ ID NO: 117016 - DNA, 25 bp, Saccharomyces pastorianus
ggcgaggctttaacttcttttaatg

SEQ ID NO: 117017 - DNA, 25 bp, Saccharomyces pastorianus
tttgatttcttgatcacccacgagc

SEQ ID NO: 117018 - DNA, 25 bp, Saccharomyces pastorianus
ggatttgacccaacctacattaaga

SEQ ID NO: 117019 - DNA, 25 bp, Saccharomyces pastorianus
aaatgtggccctcctttgatttctt

SEQ ID NO: 117020 - DNA, 25 bp, Saccharomyces pastorianus
gtgaatgttttgtctctactcaaac

SEQ ID NO: 117021 - DNA, 25 bp, Saccharomyces pastorianus
gatttcaaaaaagtattgtccttgc

SEQ ID NO: 117022 - DNA, 25 bp, Saccharomyces pastorianus
atctctctggaagattatgaggtac

SEQ ID NO: 117023 - DNA, 25 bp, Saccharomyces pastorianus
aaagaccatatctctctggaagatt

SEQ ID NO: 117024 - DNA, 25 bp, Saccharomyces pastorianus
tgcagaagggtggaagtgttttaaa

SEQ ID NO: 117025 - DNA, 25 bp, Saccharomyces pastorianus
accgattaggcaaaaaagtcagagt

SEQ ID NO: 117026 - DNA, 25 bp, Saccharomyces pastorianus
cttggtgaagatagtgtaggtgatt

SEQ ID NO: 117027 - DNA, 25 bp, Saccharomyces pastorianus
gttttaaaagaccatatctctctgg

SEQ ID NO: 117028 - DNA, 25 bp, Saccharomyces pastorianus
ttggcacccaaccaaacaaaattgt

SEQ ID NO: 117029 - DNA, 25 bp, Saccharomyces pastorianus
gtagttgtgaatgaccgattaggca

SEQ ID NO: 117030 - DNA, 25 bp, Saccharomyces pastorianus
ttgtccttgcaaattggcacccaac

SEQ ID NO: 117031 - DNA, 25 bp, Saccharomyces pastorianus
caaaattgtgttgcagaagggtgga

SEQ ID NO: 117032 - DNA, 25 bp, Saccharomyces pastorianus
ataggatttcactgaccatcccagt

SEQ ID NO: 117033 - DNA, 25 bp, Saccharomyces pastorianus
catcccagtgatttgtcactctcat

SEQ ID NO: 117034 - DNA, 25 bp, Saccharomyces pastorianus
aagactagtgccctttagctccagt

SEQ ID NO: 117035 - DNA, 25 bp, Saccharomyces pastorianus
agtattgtcaatgagggcgccgccg

SEQ ID NO: 117036 - DNA, 25 bp, Saccharomyces pastorianus
cacctttgttgtagagggcgccaca

SEQ ID NO: 117037 - DNA, 25 bp, Saccharomyces pastorianus
tcgttattccccaattttcaagaga

SEQ ID NO: 117038 - DNA, 25 bp, Saccharomyces pastorianus
gattaacgaccctcaagagtgtgca

SEQ ID NO: 117039 - DNA, 25 bp, Saccharomyces pastorianus
agggcgccacaaaggcacctgtaat

SEQ ID NO: 117040 - DNA, 25 bp, Saccharomyces pastorianus
gtagaaaatgcacccagcggacctt

SEQ ID NO: 117041 - DNA, 25 bp, Saccharomyces pastorianus
atgtttgatctgtttctgcttggct

SEQ ID NO: 117042 - DNA, 25 bp, Saccharomyces pastorianus
tgacggtcacatagcctcgttattc

SEQ ID NO: 117043 - DNA, 25 bp, Saccharomyces pastorianus
gtaaacaggatttcttcgaggtcga

SEQ ID NO: 117044 - DNA, 25 bp, Saccharomyces pastorianus
aactggatcagtgtccccagcggaa

SEQ ID NO: 117045 - DNA, 25 bp, Saccharomyces pastorianus
aacacatggtgtacgcccttgagac

SEQ ID NO: 117046 - DNA, 25 bp, Saccharomyces pastorianus
ttttcctccactacgacaatgcaag

SEQ ID NO: 117047 - DNA, 25 bp, Saccharomyces pastorianus
tcaggacttgcctggtgtgaagtac

SEQ ID NO: 117048 - DNA, 25 bp, Saccharomyces pastorianus
ccagcggaagggtgtcgtattacgt

SEQ ID NO: 117049 - DNA, 25 bp, Saccharomyces pastorianus
acgggaacgtggtatctgcatatat

SEQ ID NO: 117050 - DNA, 25 bp, Saccharomyces pastorianus
gagggccacgatgctcaagagcatt

SEQ ID NO: 117051 - DNA, 25 bp, Saccharomyces pastorianus
aggcgtgcagggtccgtttgactaa

SEQ ID NO: 117052 - DNA, 25 bp, Saccharomyces pastorianus
ttgtcgaggtttatgtccaacacat

SEQ ID NO: 117053 - DNA, 25 bp, Saccharomyces pastorianus
atatataccgggtgagggccacgat

SEQ ID NO: 117054 - DNA, 25 bp, Saccharomyces pastorianus
gggcgagttcgcacctaccaggaag

SEQ ID NO: 117055 - DNA, 25 bp, Saccharomyces pastorianus
tatcgcggtccgtatggaagggccc

SEQ ID NO: 117056 - DNA, 25 bp, Saccharomyces pastorianus
acatcgtgccattacccataaggga

SEQ ID NO: 117057 - DNA, 25 bp, Saccharomyces pastorianus
atatggtgggtcacaaactgggcga

SEQ ID NO: 117058 - DNA, 25 bp, Saccharomyces pastorianus
atccttcctcagttcgtgggactga

SEQ ID NO: 117059 - DNA, 25 bp, Saccharomyces pastorianus
ggccatgactaagggcactccaata

SEQ ID NO: 117060 - DNA, 25 bp, Saccharomyces pastorianus
gaagggccccaacatcgtgccatta

SEQ ID NO: 117061 - DNA, 25 bp, Saccharomyces pastorianus
ggagtacgtacctattgaaatatca

SEQ ID NO: 117062 - DNA, 25 bp, Saccharomyces pastorianus
caaccggcagctagacttttatcgc

SEQ ID NO: 117063 - DNA, 25 bp, Saccharomyces pastorianus
ttacccataagggaggccatgacta

SEQ ID NO: 117064 - DNA, 25 bp, Saccharomyces pastorianus
agctagacttttatcgcggtccgta

SEQ ID NO: 117065 - DNA, 25 bp, Saccharomyces pastorianus
accgatatcatgtcccgtggtagag

SEQ ID NO: 117066 - DNA, 25 bp, Saccharomyces pastorianus
gtcttctcaacaatatgtccatcgt

SEQ ID NO: 117067 - DNA, 25 bp, Saccharomyces pastorianus
acaacttatctgtgaatctcgctca

SEQ ID NO: 117068 - DNA, 25 bp, Saccharomyces pastorianus
aacttctcgcatcactcggaaagcg

SEQ ID NO: 117069 - DNA, 25 bp, Saccharomyces pastorianus
aaactatgacccaccaatgtcttct

SEQ ID NO: 117070 - DNA, 25 bp, Saccharomyces pastorianus
gagacggtaaatctgtccagccatt

SEQ ID NO: 117071 - DNA, 25 bp, Saccharomyces pastorianus
gaactcgattttaccctattggaat

SEQ ID NO: 117072 - DNA, 25 bp, Saccharomyces pastorianus
ctgtccagccattagaactcgattt

SEQ ID NO: 117073 - DNA, 25 bp, Saccharomyces pastorianus
gagctaacgaacttggttccgctta

SEQ ID NO: 117074 - DNA, 25 bp, Saccharomyces pastorianus
ggttccgcttataacttactagtag

SEQ ID NO: 117075 - DNA, 25 bp, Saccharomyces pastorianus
ggaaagcgcaggcattaccatctta

SEQ ID NO: 117076 - DNA, 25 bp, Saccharomyces pastorianus
aaggaggctccgacgatgacgaatt

SEQ ID NO: 117077 - DNA, 25 bp, Saccharomyces pastorianus
gcatacctattcatttatcccttac

SEQ ID NO: 117078 - DNA, 25 bp, Saccharomyces pastorianus
ggctgactatagcacggtggacctc

SEQ ID NO: 117079 - DNA, 25 bp, Saccharomyces pastorianus
taattctatggcatgggctgactat

SEQ ID NO: 117080 - DNA, 25 bp, Saccharomyces pastorianus
cacatctttatccaattcagcgtta

SEQ ID NO: 117081 - DNA, 25 bp, Saccharomyces pastorianus
taatgacagcactgatacgaccgcc

SEQ ID NO: 117082 - DNA, 25 bp, Saccharomyces pastorianus
gaagaacccgattattaccatcact

SEQ ID NO: 117083 - DNA, 25 bp, Saccharomyces pastorianus
ggtggacctcgacagtgttactaat

SEQ ID NO: 117084 - DNA, 25 bp, Saccharomyces pastorianus
tatatccgatcaccttgctactttg

SEQ ID NO: 117085 - DNA, 25 bp, Saccharomyces pastorianus
agatcaatgagctcactacctatag

SEQ ID NO: 117086 - DNA, 25 bp, Saccharomyces pastorianus
aatgggattttccaccacatcttta

SEQ ID NO: 117087 - DNA, 25 bp, Saccharomyces pastorianus
tgcaaaacttttgggcctgtggctt

SEQ ID NO: 117088 - DNA, 25 bp, Saccharomyces pastorianus
aggatcttggactgctttttcaaca

SEQ ID NO: 117089 - DNA, 25 bp, Saccharomyces pastorianus
aaatgaaatatctgccaccgctcaa

SEQ ID NO: 117090 - DNA, 25 bp, Saccharomyces pastorianus
gaagaccagtttctatcacgaggga

SEQ ID NO: 117091 - DNA, 25 bp, Saccharomyces pastorianus
taaggccacctttgttttcttcaca

SEQ ID NO: 117092 - DNA, 25 bp, Saccharomyces pastorianus
gactcgacgcacttacttgttagga

SEQ ID NO: 117093 - DNA, 25 bp, Saccharomyces pastorianus
taactcagatcctttcacatacgtc

SEQ ID NO: 117094 - DNA, 25 bp, Saccharomyces pastorianus
aacacagcccgtggttcaagtgcaa

SEQ ID NO: 117095 - DNA, 25 bp, Saccharomyces pastorianus
tacggtgccacggtgtcaattgact

SEQ ID NO: 117096 - DNA, 25 bp, Saccharomyces pastorianus
actgctctagctgtagtgtttctca

SEQ ID NO: 117097 - DNA, 25 bp, Saccharomyces pastorianus
gtgtttctcacatatggcgctgcat

SEQ ID NO: 117098 - DNA, 25 bp, Saccharomyces pastorianus
aaatcgcactgttagctgtcgccgg

SEQ ID NO: 117099 - DNA, 25 bp, Saccharomyces pastorianus
gatacctttgtacctgagcagttac

SEQ ID NO: 117100 - DNA, 25 bp, Saccharomyces pastorianus
tggaatcaagtctaccgctttggct

SEQ ID NO: 117101 - DNA, 25 bp, Saccharomyces pastorianus
taagcggtttacgtactatcctcaa

SEQ ID NO: 117102 - DNA, 25 bp, Saccharomyces pastorianus
attgtgttcacataccctttgttta

SEQ ID NO: 117103 - DNA, 25 bp, Saccharomyces pastorianus
atgaaggccatgtccgcgtctcaaa

SEQ ID NO: 117104 - DNA, 25 bp, Saccharomyces pastorianus
gagctggcctacaatgatacctttg

SEQ ID NO: 117105 - DNA, 25 bp, Saccharomyces pastorianus
ggccttgcatcgttacctattgtgt

SEQ ID NO: 117106 - DNA, 25 bp, Saccharomyces pastorianus
gaatgggcgttctatctttgcttcc

SEQ ID NO: 117107 - DNA, 25 bp, Saccharomyces pastorianus
tttactttacgtacgccttggcagt

SEQ ID NO: 117108 - DNA, 25 bp, Saccharomyces pastorianus
ggagcgttacttgggtttcctgcca

SEQ ID NO: 117109 - DNA, 25 bp, Saccharomyces pastorianus
tgattccagcaacggtaactcggcc

SEQ ID NO: 117110 - DNA, 25 bp, Saccharomyces pastorianus
aatctttcctttcttgcaacttcca

SEQ ID NO: 117111 - DNA, 25 bp, Saccharomyces pastorianus
acacaggtgctgattctttcgagga

SEQ ID NO: 117112 - DNA, 25 bp, Saccharomyces pastorianus
agctgttgcgctcaatgtagcacct

SEQ ID NO: 117113 - DNA, 25 bp, Saccharomyces pastorianus
ttaccaatgcacctacaccgaaaat

SEQ ID NO: 117114 - DNA, 25 bp, Saccharomyces pastorianus
aactctttcgacgtaaacacaggtg

SEQ ID NO: 117115 - DNA, 25 bp, Saccharomyces pastorianus
ttactgctgcttccaatgattccag

SEQ ID NO: 117116 - DNA, 25 bp, Saccharomyces pastorianus
agacgtatatctcttactgctgctt

SEQ ID NO: 117117 - DNA, 25 bp, Saccharomyces pastorianus
ggtatccatttcttaggcagccgag

SEQ ID NO: 117118 - DNA, 25 bp, Saccharomyces pastorianus
tgcccagaattgacctccctagtaa

SEQ ID NO: 117119 - DNA, 25 bp, Saccharomyces pastorianus
aatgtagcaccttgcatcatggctc

SEQ ID NO: 117120 - DNA, 25 bp, Saccharomyces pastorianus
aaagatttcgccacctttgcaaagg

SEQ ID NO: 117121 - DNA, 25 bp, Saccharomyces pastorianus
cttgtgtcctagttgtcagcgatat

SEQ ID NO: 117122 - DNA, 25 bp, Saccharomyces pastorianus
cgacacttccaagcgtatcatcagt

SEQ ID NO: 117123 - DNA, 25 bp, Saccharomyces pastorianus
taaattgtttggctctgttcctgga

SEQ ID NO: 117124 - DNA, 25 bp, Saccharomyces pastorianus
ggcctcagatgaaagcttgtgtcct

SEQ ID NO: 117125 - DNA, 25 bp, Saccharomyces pastorianus
tttaactcaagtcggttcaggccca

SEQ ID NO: 117126 - DNA, 25 bp, Saccharomyces pastorianus
ggtgccacaccattaatcagtttta

SEQ ID NO: 117127 - DNA, 25 bp, Saccharomyces pastorianus
gtggcaacctccgaactatttaaag

SEQ ID NO: 117128 - DNA, 25 bp, Saccharomyces pastorianus
gaatcttctaactttactgcacgtg

SEQ ID NO: 117129 - DNA, 25 bp, Saccharomyces pastorianus
tctttccctccaatattctacatga

SEQ ID NO: 117130 - DNA, 25 bp, Saccharomyces pastorianus
agcagcttgaggctttcaaccatca

SEQ ID NO: 117131 - DNA, 25 bp, Saccharomyces pastorianus
agggccaaccgtcagaatcctactg

SEQ ID NO: 117132 - DNA, 25 bp, Saccharomyces pastorianus
gatgtagaccgctctcaaatacttg

SEQ ID NO: 117133 - DNA, 25 bp, Saccharomyces pastorianus
aaaatagggacgtggttgcgctgct

SEQ ID NO: 117134 - DNA, 25 bp, Saccharomyces pastorianus
gtaaattctccatctgtcaacaagc

SEQ ID NO: 117135 - DNA, 25 bp, Saccharomyces pastorianus
tacttggtaccatttcgcaggcaga

SEQ ID NO: 117136 - DNA, 25 bp, Saccharomyces pastorianus
atgaatccctacaacgaacgtactc

SEQ ID NO: 117137 - DNA, 25 bp, Saccharomyces pastorianus
ggaaacatacacacgactactcaag

SEQ ID NO: 117138 - DNA, 25 bp, Saccharomyces pastorianus
gggtgagttcaagcaattctatgga

SEQ ID NO: 117139 - DNA, 25 bp, Saccharomyces pastorianus
gaagaaacacgcagggccaaccgtc

SEQ ID NO: 117140 - DNA, 25 bp, Saccharomyces pastorianus
aactgttgggtctttggctgtacga

SEQ ID NO: 117141 - DNA, 25 bp, Saccharomyces pastorianus
gtcaacaagccagtaccgagcatat

SEQ ID NO: 117142 - DNA, 25 bp, Saccharomyces pastorianus
acggttgctgccgaattgggaaaca

SEQ ID NO: 117143 - DNA, 25 bp, Saccharomyces pastorianus
gacatggccatccttaatgacttgc

SEQ ID NO: 117144 - DNA, 25 bp, Saccharomyces pastorianus
gctacagacgtccattgccgaaggt

SEQ ID NO: 117145 - DNA, 25 bp, Saccharomyces pastorianus
aggagctcaccgatgacgacatggc

SEQ ID NO: 117146 - DNA, 25 bp, Saccharomyces pastorianus
ggaactgcggacatatctattacat

SEQ ID NO: 117147 - DNA, 25 bp, Saccharomyces pastorianus
attccttctgaacatagtcgaccgc

SEQ ID NO: 117148 - DNA, 25 bp, Saccharomyces pastorianus
aaagtgctccgttaaagcctgtgac

SEQ ID NO: 117149 - DNA, 25 bp, Saccharomyces pastorianus
tagactggcctgcagtgctcacggt

SEQ ID NO: 117150 - DNA, 25 bp, Saccharomyces pastorianus
gacttgcatactttactgctacaga

SEQ ID NO: 117151 - DNA, 25 bp, Saccharomyces pastorianus
tcgagttcaatccagaattccttct

SEQ ID NO: 117152 - DNA, 25 bp, Saccharomyces pastorianus
taaccaccaacttcctaaagtgctc

SEQ ID NO: 117153 - DNA, 25 bp, Saccharomyces pastorianus
aatgaggtcagttttcccaataaca

SEQ ID NO: 117154 - DNA, 25 bp, Saccharomyces pastorianus
actgggttgcaaaatgggcgctgcc

SEQ ID NO: 117155 - DNA, 25 bp, Saccharomyces pastorianus
agaaccgcctctgataccagtgtta

SEQ ID NO: 117156 - DNA, 25 bp, Saccharomyces pastorianus
ataagaggtaatggccacaccgctg

SEQ ID NO: 117157 - DNA, 25 bp, Saccharomyces pastorianus
gatccattccatgacttcaattcaa

SEQ ID NO: 117158 - DNA, 25 bp, Saccharomyces pastorianus
acaccgctgcggtcgattggtggac

SEQ ID NO: 117159 - DNA, 25 bp, Saccharomyces pastorianus
gacagccataaacatctcgatgagc

SEQ ID NO: 117160 - DNA, 25 bp, Saccharomyces pastorianus
gaaatgttatttggtttcactccat

SEQ ID NO: 117161 - DNA, 25 bp, Saccharomyces pastorianus
ggtttcactccattcaaaggcgata

SEQ ID NO: 117162 - DNA, 25 bp, Saccharomyces pastorianus
gagacagactagtcaagacagccat

SEQ ID NO: 117163 - DNA, 25 bp, Saccharomyces pastorianus
aagtccaatggtctttgctgagaaa

SEQ ID NO: 117164 - DNA, 25 bp, Saccharomyces pastorianus
aaaggcattgcgtgggacaccgaca

SEQ ID NO: 117165 - DNA, 25 bp, Saccharomyces pastorianus
agcgataccccattcgatgagagta

SEQ ID NO: 117166 - DNA, 25 bp, Saccharomyces pastorianus
tcttttcgccatactattcctgata

SEQ ID NO: 117167 - DNA, 25 bp, Saccharomyces pastorianus
aaataagaccatattcccctgtggg

SEQ ID NO: 117168 - DNA, 25 bp, Saccharomyces pastorianus
gtgggacaccgacagccatagatat

SEQ ID NO: 117169 - DNA, 25 bp, Saccharomyces pastorianus
atttcccaatggctacactgacgat

SEQ ID NO: 117170 - DNA, 25 bp, Saccharomyces pastorianus
ttcccctgtgggttgatagcaaatt

SEQ ID NO: 117171 - DNA, 25 bp, Saccharomyces pastorianus
tgggattgcaactcttttcgccata

SEQ ID NO: 117172 - DNA, 25 bp, Saccharomyces pastorianus
gatacattcggcacaacgcttactg

SEQ ID NO: 117173 - DNA, 25 bp, Saccharomyces pastorianus
aatgcatccgatattgtaccgcccc

SEQ ID NO: 117174 - DNA, 25 bp, Saccharomyces pastorianus
tgctgcattgcccaacttctataag

SEQ ID NO: 117175 - DNA, 25 bp, Saccharomyces pastorianus
tctagcgcgacaccgagaagagctt

SEQ ID NO: 117176 - DNA, 25 bp, Saccharomyces pastorianus
tgagtcaagtatcgcattcccaaga

SEQ ID NO: 117177 - DNA, 25 bp, Saccharomyces pastorianus
tctcgccatccttttctaacagaag

SEQ ID NO: 117178 - DNA, 25 bp, Saccharomyces pastorianus
acacgcctgcgagtaaatcgtttca

SEQ ID NO: 117179 - DNA, 25 bp, Saccharomyces pastorianus
ataatcatacaagctcctctagcgc

SEQ ID NO: 117180 - DNA, 25 bp, Saccharomyces pastorianus
atgaaaatcagcatcctttccaggg

SEQ ID NO: 117181 - DNA, 25 bp, Saccharomyces pastorianus
gggaacacaccggagtacacgcctg

SEQ ID NO: 117182 - DNA, 25 bp, Saccharomyces pastorianus
agaagagcttcatcacggccgacta

SEQ ID NO: 117183 - DNA, 25 bp, Saccharomyces pastorianus
gaattcagggcaagtctcggtcgaa

SEQ ID NO: 117184 - DNA, 25 bp, Saccharomyces pastorianus
aagatcctatgggtacaccttcttc

SEQ ID NO: 117185 - DNA, 25 bp, Saccharomyces pastorianus
gactagaccttcagcaggccaagaa

SEQ ID NO: 117186 - DNA, 25 bp, Saccharomyces pastorianus
atcaagggaccaggcttactagcgc

SEQ ID NO: 117187 - DNA, 25 bp, Saccharomyces pastorianus
atggccgctactgttggttatccag

SEQ ID NO: 117188 - DNA, 25 bp, Saccharomyces pastorianus
ttactagcgccatactcaccagaga

SEQ ID NO: 117189 - DNA, 25 bp, Saccharomyces pastorianus
gctttagacactctatgtgcacgtt

SEQ ID NO: 117190 - DNA, 25 bp, Saccharomyces pastorianus
agaacatccactttagttgactatg

SEQ ID NO: 117191 - DNA, 25 bp, Saccharomyces pastorianus
aatcttcagcaagccaattgcctgg

SEQ ID NO: 117192 - DNA, 25 bp, Saccharomyces pastorianus
gagatatcaaggtttcccagaattt

SEQ ID NO: 117193 - DNA, 25 bp, Saccharomyces pastorianus
ttaggtgccaagtctacttctaaag

SEQ ID NO: 117194 - DNA, 25 bp, Saccharomyces pastorianus
tgattgcttccattgactcaaaggc

SEQ ID NO: 117195 - DNA, 25 bp, Saccharomyces pastorianus
ggtggttacagttcgatggccgcta

SEQ ID NO: 117196 - DNA, 25 bp, Saccharomyces pastorianus
taggcttgttctctgacgcaaagat

SEQ ID NO: 117197 - DNA, 25 bp, Saccharomyces pastorianus
cgagcaataatcctcctggcatatt

SEQ ID NO: 117198 - DNA, 25 bp, Saccharomyces pastorianus
gccgtcgtcgactttgaaactcaaa

SEQ ID NO: 117199 - DNA, 25 bp, Saccharomyces pastorianus
ggacggcttttatccaatctacatt

SEQ ID NO: 117200 - DNA, 25 bp, Saccharomyces pastorianus
agctgcagacaattttgccgtcgtc

SEQ ID NO: 117201 - DNA, 25 bp, Saccharomyces pastorianus
accagtattcagcaccgttaacaag

SEQ ID NO: 117202 - DNA, 25 bp, Saccharomyces pastorianus
ggcaataacgcttcaacaccttcat

SEQ ID NO: 117203 - DNA, 25 bp, Saccharomyces pastorianus
gatgacatgggcctcaaagttgatg

SEQ ID NO: 117204 - DNA, 25 bp, Saccharomyces pastorianus
atcggagggacaacgctagtgctaa

SEQ ID NO: 117205 - DNA, 25 bp, Saccharomyces pastorianus
aatagagccacaggtttccgacgcc

SEQ ID NO: 117206 - DNA, 25 bp, Saccharomyces pastorianus
atcagacctgaaacactacccaaga

SEQ ID NO: 117207 - DNA, 25 bp, Saccharomyces pastorianus
agcccgttgcgaatccaccaaagat

SEQ ID NO: 117208 - DNA, 25 bp, Saccharomyces pastorianus
ttgactgaacagattgcccgcgaga

SEQ ID NO: 117209 - DNA, 25 bp, Saccharomyces pastorianus
attccaccttacatgaaacctgcaa

SEQ ID NO: 117210 - DNA, 25 bp, Saccharomyces pastorianus
agaactctaggaagcgcgccggaaa

SEQ ID NO: 117211 - DNA, 25 bp, Saccharomyces pastorianus
gggtggtatacttctccagtattcc

SEQ ID NO: 117212 - DNA, 25 bp, Saccharomyces pastorianus
ggaaatctcgcaggccaacaaactg

SEQ ID NO: 117213 - DNA, 25 bp, Saccharomyces pastorianus
aatgctccctctgatatcaagcagc

SEQ ID NO: 117214 - DNA, 25 bp, Saccharomyces pastorianus
gtcgtgtggaaacaagccgtgccaa

SEQ ID NO: 117215 - DNA, 25 bp, Saccharomyces pastorianus
aggagagtctgcagattctcaccct

SEQ ID NO: 117216 - DNA, 25 bp, Saccharomyces pastorianus
tgcccgcgagaacgatatcagacag

SEQ ID NO: 117217 - DNA, 25 bp, Saccharomyces pastorianus
gattctcaccctcacagggaattta

SEQ ID NO: 117218 - DNA, 25 bp, Saccharomyces pastorianus
aagcagcaatcctctgggtccaaag

SEQ ID NO: 117219 - DNA, 25 bp, Saccharomyces pastorianus
gggattactgcatttgctttaccaa

SEQ ID NO: 117220 - DNA, 25 bp, Saccharomyces pastorianus
tactttgttctttggatggctcgtc

SEQ ID NO: 117221 - DNA, 25 bp, Saccharomyces pastorianus
gatatcttgcattttcacctttacc

SEQ ID NO: 117222 - DNA, 25 bp, Saccharomyces pastorianus
gctttagctgtcatcaactttggga

SEQ ID NO: 117223 - DNA, 25 bp, Saccharomyces pastorianus
tacctgttctgattggctagctgca

SEQ ID NO: 117224 - DNA, 25 bp, Saccharomyces pastorianus
gaatgttcccacacttattggagca

SEQ ID NO: 117225 - DNA, 25 bp, Saccharomyces pastorianus
gtgctggcattgttagtgactactt

SEQ ID NO: 117226 - DNA, 25 bp, Saccharomyces pastorianus
aatggatcgttaccccgatatggtt

SEQ ID NO: 117227 - DNA, 25 bp, Saccharomyces pastorianus
cttggcaagctatatacgtcgggtt

SEQ ID NO: 117228 - DNA, 25 bp, Saccharomyces pastorianus
tatacttctctatcgcaactgcaat

SEQ ID NO: 117229 - DNA, 25 bp, Saccharomyces pastorianus
tgatcggttgtatctgtgctggcat

SEQ ID NO: 117230 - DNA, 25 bp, Saccharomyces pastorianus
aaattgtgtcagcaggcctaaccgt

SEQ ID NO: 117231 - DNA, 25 bp, Saccharomyces pastorianus
tattctatggaccttgttctgcctg

SEQ ID NO: 117232 - DNA, 25 bp, Saccharomyces pastorianus
aaccgtcgtcgtatgtctatgattc

SEQ ID NO: 117233 - DNA, 25 bp, Saccharomyces pastorianus
taatgtcgtacgcagttccttcttt

SEQ ID NO: 117234 - DNA, 25 bp, Saccharomyces pastorianus
gcctggtgtttttatctttcccata

SEQ ID NO: 117235 - DNA, 25 bp, Saccharomyces pastorianus
atgcatcaccctgttactaatgtcg

SEQ ID NO: 117236 - DNA, 25 bp, Saccharomyces pastorianus
gtttaagtctccattatatgcccat

SEQ ID NO: 117237 - DNA, 25 bp, Saccharomyces pastorianus
atacactaccggttactgcaggaaa

SEQ ID NO: 117238 - DNA, 25 bp, Saccharomyces pastorianus
gctagcagttttgacacctgggttt

SEQ ID NO: 117239 - DNA, 25 bp, Saccharomyces pastorianus
tatgggatctagtaccgctttcaac

SEQ ID NO: 117240 - DNA, 25 bp, Saccharomyces pastorianus
gaatctcagtgtcttcctgcaatgt

SEQ ID NO: 117241 - DNA, 25 bp, Saccharomyces pastorianus
tactggtggctgcttcatgcatggc

SEQ ID NO: 117242 - DNA, 25 bp, Saccharomyces pastorianus
gacagatcccgagtggttccagaaa

SEQ ID NO: 117243 - DNA, 25 bp, Saccharomyces pastorianus
agaatctcttctccaaatagcccta

SEQ ID NO: 117244 - DNA, 25 bp, Saccharomyces pastorianus
gacaaagttgcttccagaatctctt

SEQ ID NO: 117245 - DNA, 25 bp, Saccharomyces pastorianus
atgggctcattggaactgttgttaa

SEQ ID NO: 117246 - DNA, 25 bp, Saccharomyces pastorianus
atcagtccttccgatcagatcaaag

SEQ ID NO: 117247 - DNA, 25 bp, Saccharomyces pastorianus
ctatggatatactactgcgtggcga

SEQ ID NO: 117248 - DNA, 25 bp, Saccharomyces pastorianus
gggagtacatatccgacctttcaac

SEQ ID NO: 117249 - DNA, 25 bp, Saccharomyces pastorianus
gttgttcctgacatattgtgcgttg

SEQ ID NO: 117250 - DNA, 25 bp, Saccharomyces pastorianus
caatgccctggcatgcagtgtggca

SEQ ID NO: 117251 - DNA, 25 bp, Saccharomyces pastorianus
gattttcgcattcaagcactgtcaa

SEQ ID NO: 117252 - DNA, 25 bp, Saccharomyces pastorianus
acagcggcttagtgatattcgataa

SEQ ID NO: 117253 - DNA, 25 bp, Saccharomyces pastorianus
atcacctgtgaaactcgaagctgtc

SEQ ID NO: 117254 - DNA, 25 bp, Saccharomyces pastorianus
actttttctgtctaccaatcgcaat

SEQ ID NO: 117255 - DNA, 25 bp, Saccharomyces pastorianus
cacacggacgtgtacggtaatcttt

SEQ ID NO: 117256 - DNA, 25 bp, Saccharomyces pastorianus
agcgaatgcgttatgtacagctatt

SEQ ID NO: 117257 - DNA, 25 bp, Saccharomyces pastorianus
ataatgctgcaattttcgcctatcc

SEQ ID NO: 117258 - DNA, 25 bp, Saccharomyces pastorianus
agtacaatctgttctacccagctat

SEQ ID NO: 117259 - DNA, 25 bp, Saccharomyces pastorianus
aaacattacatggacagcggcttag

SEQ ID NO: 117260 - DNA, 25 bp, Saccharomyces pastorianus
ataatacccgatgtcagcaagtccc

SEQ ID NO: 117261 - DNA, 25 bp, Saccharomyces pastorianus
tcgcctatccaagagtttttccatg

SEQ ID NO: 117262 - DNA, 25 bp, Saccharomyces pastorianus
acggaattactatcaatcacctgtg

SEQ ID NO: 117263 - DNA, 25 bp, Saccharomyces pastorianus
aggactagacatgctcaacgcgtgt

SEQ ID NO: 117264 - DNA, 25 bp, Saccharomyces pastorianus
agaactacctctttccctgaatgac

SEQ ID NO: 117265 - DNA, 25 bp, Saccharomyces pastorianus
attctggttcacttgccgtcgtatg

SEQ ID NO: 117266 - DNA, 25 bp, Saccharomyces pastorianus
ctattttcgtcgacaccgctagaaa

SEQ ID NO: 117267 - DNA, 25 bp, Saccharomyces pastorianus
tctccgatttagaatttgccacttt

SEQ ID NO: 117268 - DNA, 25 bp, Saccharomyces pastorianus
gaatgacacgtctatctccgattta

SEQ ID NO: 117269 - DNA, 25 bp, Saccharomyces pastorianus
tatgttgcggaccacctattttcgt

SEQ ID NO: 117270 - DNA, 25 bp, Saccharomyces pastorianus
aaggccccatctagtctaagcaatt

SEQ ID NO: 117271 - DNA, 25 bp, Saccharomyces pastorianus
gaaacgacagcagagaaggccccat

SEQ ID NO: 117272 - DNA, 25 bp, Saccharomyces pastorianus
ggtccaatttctcatgcccttgaat

SEQ ID NO: 117273 - DNA, 25 bp, Saccharomyces pastorianus
agattagctatcgaaggcccttatg

SEQ ID NO: 117274 - DNA, 25 bp, Saccharomyces pastorianus
gcttgcgtaactctagcttcaaaat

SEQ ID NO: 117275 - DNA, 25 bp, Saccharomyces pastorianus
cgctaccacatatgcttcttatatc

SEQ ID NO: 117276 - DNA, 25 bp, Saccharomyces pastorianus
tatcacagtcctatctcaagctaag

SEQ ID NO: 117277 - DNA, 25 bp, Saccharomyces pastorianus
aatttggttctatgtcctgctcaag

SEQ ID NO: 117278 - DNA, 25 bp, Saccharomyces pastorianus
gtcctgtggtttaccgcttgcgtaa

SEQ ID NO: 117279 - DNA, 25 bp, Saccharomyces pastorianus
tattcatactatttctcgctaccac

SEQ ID NO: 117280 - DNA, 25 bp, Saccharomyces pastorianus
ttccaacttggcttatctgtaacta

SEQ ID NO: 117281 - DNA, 25 bp, Saccharomyces pastorianus
tgatatcgtggaccgcttggagact

SEQ ID NO: 117282 - DNA, 25 bp, Saccharomyces pastorianus
gagatttttgcctgttctgttaata

SEQ ID NO: 117283 - DNA, 25 bp, Saccharomyces pastorianus
atgtcctgctcaagtatgccacggg

SEQ ID NO: 117284 - DNA, 25 bp, Saccharomyces pastorianus
gaaattgttcagaccgtcctgtggt

SEQ ID NO: 117285 - DNA, 25 bp, Saccharomyces pastorianus
taagcaggtggtgcagttccttaaa

SEQ ID NO: 117286 - DNA, 25 bp, Saccharomyces pastorianus
tgaggaggtttcactccagattacc

SEQ ID NO: 117287 - DNA, 25 bp, Saccharomyces pastorianus
aatatccgatcagtccagtacagct

SEQ ID NO: 117288 - DNA, 25 bp, Saccharomyces pastorianus
gcaagatttagttcaggtacttcct

SEQ ID NO: 117289 - DNA, 25 bp, Saccharomyces pastorianus
ttatcctttaagaacagcgtcactg

SEQ ID NO: 117290 - DNA, 25 bp, Saccharomyces pastorianus
gaagaacatcttttttacaggagca

SEQ ID NO: 117291 - DNA, 25 bp, Saccharomyces pastorianus
cagaatcaagctagccactctacaa

SEQ ID NO: 117292 - DNA, 25 bp, Saccharomyces pastorianus
ggctatatacttccagcaccgcaaa

SEQ ID NO: 117293 - DNA, 25 bp, Saccharomyces pastorianus
agcaccgcaaacgaggtaccattcg

SEQ ID NO: 117294 - DNA, 25 bp, Saccharomyces pastorianus
tatatcgtccgtatctgatcactgg

SEQ ID NO: 117295 - DNA, 25 bp, Saccharomyces pastorianus
agagctcaagcttcttttctattat

SEQ ID NO: 117296 - DNA, 25 bp, Saccharomyces pastorianus
atactggccattttgcgcttgaaac

SEQ ID NO: 117297 - DNA, 25 bp, Saccharomyces pastorianus
gatccagctaatgtcatatgccagt

SEQ ID NO: 117298 - DNA, 25 bp, Saccharomyces pastorianus
gtaccggccagaccgatattcaatt

SEQ ID NO: 117299 - DNA, 25 bp, Saccharomyces pastorianus
ccgccgcttatacgcttgatattgc

SEQ ID NO: 117300 - DNA, 25 bp, Saccharomyces pastorianus
tgatactatttttagcgttgccggg

SEQ ID NO: 117301 - DNA, 25 bp, Saccharomyces pastorianus
gagattcaaagattcctgtgctagt

SEQ ID NO: 117302 - DNA, 25 bp, Saccharomyces pastorianus
tattgcgctaattcagcgtaccggc

SEQ ID NO: 117303 - DNA, 25 bp, Saccharomyces pastorianus
tataaagttgtacccagcctttcaa

SEQ ID NO: 117304 - DNA, 25 bp, Saccharomyces pastorianus
ttagccttgaagtttccctccagaa

SEQ ID NO: 117305 - DNA, 25 bp, Saccharomyces pastorianus
ttatcccgtaccttgaagatccagc

SEQ ID NO: 117306 - DNA, 25 bp, Saccharomyces pastorianus
cagctatcgaatctgttgatcccgc

SEQ ID NO: 117307 - DNA, 25 bp, Saccharomyces pastorianus
atgcagattcattcccttgtgatat

SEQ ID NO: 117308 - DNA, 25 bp, Saccharomyces pastorianus
ataattggctcgtttcatccttcct

SEQ ID NO: 117309 - DNA, 25 bp, Saccharomyces pastorianus
atccttcctttgactactctcataa

SEQ ID NO: 117310 - DNA, 25 bp, Saccharomyces pastorianus
gctcaagtacggcacgtccatatgt

SEQ ID NO: 117311 - DNA, 25 bp, Saccharomyces pastorianus
ggacaataaatcctcactttggtta

SEQ ID NO: 117312 - DNA, 25 bp, Saccharomyces pastorianus
aaatcacatataatcgtttcgacac

SEQ ID NO: 117313 - DNA, 25 bp, Saccharomyces pastorianus
agaataatcattcctatatctacga

SEQ ID NO: 117314 - DNA, 25 bp, Saccharomyces pastorianus
aatgtcacccatggacatctggata

SEQ ID NO: 117315 - DNA, 25 bp, Saccharomyces pastorianus
caaccagctccctcagaaattttaa

SEQ ID NO: 117316 - DNA, 25 bp, Saccharomyces pastorianus
aaaaggcacgtctacctgctcaagt

SEQ ID NO: 117317 - DNA, 25 bp, Saccharomyces pastorianus
atattgcttctcctcatttcttaga

SEQ ID NO: 117318 - DNA, 25 bp, Saccharomyces pastorianus
gaaccaaccgttcatttgtacaccg

SEQ ID NO: 117319 - DNA, 25 bp, Saccharomyces pastorianus
caaggtctggatttgccgttcagca

SEQ ID NO: 117320 - DNA, 25 bp, Saccharomyces pastorianus
gttcgtggtgatgctactccaatta

SEQ ID NO: 117321 - DNA, 25 bp, Saccharomyces pastorianus
aggtctgctcgaacaaatcgcttga

SEQ ID NO: 117322 - DNA, 25 bp, Saccharomyces pastorianus
aagcccaccgttttgcatgaagata

SEQ ID NO: 117323 - DNA, 25 bp, Saccharomyces pastorianus
tcatcccgaatctcacatcaaattt

SEQ ID NO: 117324 - DNA, 25 bp, Saccharomyces pastorianus
tgttcttctgaagcgcggcgaggta

SEQ ID NO: 117325 - DNA, 25 bp, Saccharomyces pastorianus
gtttttaaggcctatcatcccgaat

SEQ ID NO: 117326 - DNA, 25 bp, Saccharomyces pastorianus
ttttgattcaactaagcccaccgtt

SEQ ID NO: 117327 - DNA, 25 bp, Saccharomyces pastorianus
gatactccggtctttgattgcactt

SEQ ID NO: 117328 - DNA, 25 bp, Saccharomyces pastorianus
gggcattgcttccaactggtaagat

SEQ ID NO: 117329 - DNA, 25 bp, Saccharomyces pastorianus
aaaaatctgcgtcgcctagatcatt

SEQ ID NO: 117330 - DNA, 25 bp, Saccharomyces pastorianus
tgagattttggtcccttacaccgaa

SEQ ID NO: 117331 - DNA, 25 bp, Saccharomyces pastorianus
aaacgagcagggtgctagccctgaa

SEQ ID NO: 117332 - DNA, 25 bp, Saccharomyces pastorianus
atgtctgacttctttatttgtgcaa

SEQ ID NO: 117333 - DNA, 25 bp, Saccharomyces pastorianus
acttccttcctgatatgtctgactt

SEQ ID NO: 117334 - DNA, 25 bp, Saccharomyces pastorianus
ctaaggaaacctatcgctgcaagct

SEQ ID NO: 117335 - DNA, 25 bp, Saccharomyces pastorianus
tgcaaatttatcaccagcatgcttg

SEQ ID NO: 117336 - DNA, 25 bp, Saccharomyces pastorianus
tgaacggaactttagtagccttttg

SEQ ID NO: 117337 - DNA, 25 bp, Saccharomyces pastorianus
ccgaagacgcggtgcaggtttattt

SEQ ID NO: 117338 - DNA, 25 bp, Saccharomyces pastorianus
atgggactgattgtcaggcattctt

SEQ ID NO: 117339 - DNA, 25 bp, Saccharomyces pastorianus
gaatcaggatttctttctctccact

SEQ ID NO: 117340 - DNA, 25 bp, Saccharomyces pastorianus
cagattaaagccagccatctccagt

SEQ ID NO: 117341 - DNA, 25 bp, Saccharomyces pastorianus
ctacccggttgaagttgctgaagcc

SEQ ID NO: 117342 - DNA, 25 bp, Saccharomyces pastorianus
tgaaacctacccggttgaagttgct

SEQ ID NO: 117343 - DNA, 25 bp, Saccharomyces pastorianus
ttccgcaaccaccactatagctcaa

SEQ ID NO: 117344 - DNA, 25 bp, Saccharomyces pastorianus
aaagccagccatctccagtgctcta

SEQ ID NO: 117345 - DNA, 25 bp, Saccharomyces pastorianus
ccggttgaagttgctgaagccgttt

SEQ ID NO: 117346 - DNA, 25 bp, Saccharomyces pastorianus
ggttgaagttgctgaagccgttttc

SEQ ID NO: 117347 - DNA, 25 bp, Saccharomyces pastorianus
cccggttgaagttgctgaagccgtt

SEQ ID NO: 117348 - DNA, 25 bp, Saccharomyces pastorianus
acccggttgaagttgctgaagccgt

SEQ ID NO: 117349 - DNA, 25 bp, Saccharomyces pastorianus
gaaacctacccggttgaagttgctg

SEQ ID NO: 117350 - DNA, 25 bp, Saccharomyces pastorianus
tacccggttgaagttgctgaagccg

SEQ ID NO: 117351 - DNA, 25 bp, Saccharomyces pastorianus
aaaacatggtcacgatattaatgag

SEQ ID NO: 117352 - DNA, 25 bp, Saccharomyces pastorianus
gaagagaatttctccgactttgtct

SEQ ID NO: 117353 - DNA, 25 bp, Saccharomyces pastorianus
tatcaccaaaaggacactagaaaat

SEQ ID NO: 117354 - DNA, 25 bp, Saccharomyces pastorianus
ggacactagaaaataagagattact

SEQ ID NO: 117355 - DNA, 25 bp, Saccharomyces pastorianus
agaatttctccgactttgtctttat

SEQ ID NO: 117356 - DNA, 25 bp, Saccharomyces pastorianus
gaatttctccgactttgtctttata

SEQ ID NO: 117357 - DNA, 25 bp, Saccharomyces pastorianus
gagaatttctccgactttgtcttta

SEQ ID NO: 117358 - DNA, 25 bp, Saccharomyces pastorianus
tctccgactttgtctttataaagtt

SEQ ID NO: 117359 - DNA, 25 bp, Saccharomyces pastorianus
aagagaatttctccgactttgtctt

SEQ ID NO: 117360 - DNA, 25 bp, Saccharomyces pastorianus
gaattcaaaaaacatggtcacgata

SEQ ID NO: 117361 - DNA, 25 bp, Saccharomyces pastorianus
tttctccgactttgtctttataaag

SEQ ID NO: 117362 - DNA, 25 bp, Saccharomyces pastorianus
aaaacatggtcacgatattaatgag

SEQ ID NO: 117363 - DNA, 25 bp, Saccharomyces pastorianus
tgtgaactcgatttatcagggcagt

SEQ ID NO: 117364 - DNA, 25 bp, Saccharomyces pastorianus
gaagagaatttctccgactttgtct

SEQ ID NO: 117365 - DNA, 25 bp, Saccharomyces pastorianus
tatcaccaaaaggacactagaaaat

SEQ ID NO: 117366 - DNA, 25 bp, Saccharomyces pastorianus
ggacactagaaaataagagattact

SEQ ID NO: 117367 - DNA, 25 bp, Saccharomyces pastorianus
gaatttctccgactttgtctttata

SEQ ID NO: 117368 - DNA, 25 bp, Saccharomyces pastorianus
tctccgactttgtctttataaagtt

SEQ ID NO: 117369 - DNA, 25 bp, Saccharomyces pastorianus
gagaatttctccgactttgtcttta

SEQ ID NO: 117370 - DNA, 25 bp, Saccharomyces pastorianus
gaattcaaaaaacatggtcacgata

SEQ ID NO: 117371 - DNA, 25 bp, Saccharomyces pastorianus
aatgagcttgttggcgacggtataa

SEQ ID NO: 117372 - DNA, 25 bp, Saccharomyces pastorianus
tttctccgactttgtctttataaag

SEQ ID NO: 117373 - DNA, 25 bp, Saccharomyces pastorianus
gagtacagtaacctagatctatcga

SEQ ID NO: 117374 - DNA, 25 bp, Saccharomyces pastorianus
tcaacaaatgcttgcgctcatccaa

SEQ ID NO: 117375 - DNA, 25 bp, Saccharomyces pastorianus
gaacccggcgatcagcaatctttga

SEQ ID NO: 117376 - DNA, 25 bp, Saccharomyces pastorianus
gctccgcatatgttgatatcaccag

SEQ ID NO: 117377 - DNA, 25 bp, Saccharomyces pastorianus
gctggctattccaagcatcttacta

SEQ ID NO: 117378 - DNA, 25 bp, Saccharomyces pastorianus
tatcaccagcggttaccaagtattt

SEQ ID NO: 117379 - DNA, 25 bp, Saccharomyces pastorianus
caactcctcctacgttaaacaatct

SEQ ID NO: 117380 - DNA, 25 bp, Saccharomyces pastorianus
gacattatgttcatccagttgcgaa

SEQ ID NO: 117381 - DNA, 25 bp, Saccharomyces pastorianus
aattgtactcattatgctccgcata

SEQ ID NO: 117382 - DNA, 25 bp, Saccharomyces pastorianus
gatctatcgacttataacggacctg

SEQ ID NO: 117383 - DNA, 25 bp, Saccharomyces pastorianus
acggacctgagccatataattctga

SEQ ID NO: 117384 - DNA, 25 bp, Saccharomyces pastorianus
aggtgcttccatcgctggtgctata

SEQ ID NO: 117385 - DNA, 25 bp, Saccharomyces pastorianus
cagcgactcggctctagtttaggga

SEQ ID NO: 117386 - DNA, 25 bp, Saccharomyces pastorianus
gttgtcggcattatgctgcatttct

SEQ ID NO: 117387 - DNA, 25 bp, Saccharomyces pastorianus
tgtcgatttcgtttgcggctttcaa

SEQ ID NO: 117388 - DNA, 25 bp, Saccharomyces pastorianus
ttctatcctcatccgaaagtctttg

SEQ ID NO: 117389 - DNA, 25 bp, Saccharomyces pastorianus
gtcactgggttactaatgtccgttt

SEQ ID NO: 117390 - DNA, 25 bp, Saccharomyces pastorianus
gtcgcttcttggtgtcctcggaatg

SEQ ID NO: 117391 - DNA, 25 bp, Saccharomyces pastorianus
ttctctgttttttcttgcgtggttt

SEQ ID NO: 117392 - DNA, 25 bp, Saccharomyces pastorianus
tggtgctatatggactcagcgtctg

SEQ ID NO: 117393 - DNA, 25 bp, Saccharomyces pastorianus
aaagtctttgtagtcgctgggtcgc

SEQ ID NO: 117394 - DNA, 25 bp, Saccharomyces pastorianus
gaagcaaagtctttccgcagaagaa

SEQ ID NO: 117395 - DNA, 25 bp, Saccharomyces pastorianus
acgagcatatttctgcgtcttctca

SEQ ID NO: 117396 - DNA, 25 bp, Saccharomyces pastorianus
gtgtcaccaacttcgggacatgttt

SEQ ID NO: 117397 - DNA, 25 bp, Saccharomyces pastorianus
cggtttgttgctagtgtgtttccat

SEQ ID NO: 117398 - DNA, 25 bp, Saccharomyces pastorianus
gagaagatgctagagcctgctccag

SEQ ID NO: 117399 - DNA, 25 bp, Saccharomyces pastorianus
taacgcattgccagggttgactagt

SEQ ID NO: 117400 - DNA, 25 bp, Saccharomyces pastorianus
gtcacaggtggtttgttctctggaa

SEQ ID NO: 117401 - DNA, 25 bp, Saccharomyces pastorianus
tgagaaccattcactccgttaacga

SEQ ID NO: 117402 - DNA, 25 bp, Saccharomyces pastorianus
gatgccgaggtttacgtcacaggtg

SEQ ID NO: 117403 - DNA, 25 bp, Saccharomyces pastorianus
agagtttgctagttctcgtcgtgac

SEQ ID NO: 117404 - DNA, 25 bp, Saccharomyces pastorianus
tcttctcacatgtcagcgattgctt

SEQ ID NO: 117405 - DNA, 25 bp, Saccharomyces pastorianus
aacatggctacggtttggcttacca

SEQ ID NO: 117406 - DNA, 25 bp, Saccharomyces pastorianus
gcaccctgacattcgtgacctaata

SEQ ID NO: 117407 - DNA, 25 bp, Saccharomyces pastorianus
gacggaatttgctgtatcgcaccct

SEQ ID NO: 117408 - DNA, 25 bp, Saccharomyces pastorianus
gtatcgccaacttcaggacatgtct

SEQ ID NO: 117409 - DNA, 25 bp, Saccharomyces pastorianus
tacgggtggcttgttttctggtaat

SEQ ID NO: 117410 - DNA, 25 bp, Saccharomyces pastorianus
gatgcagatgtctacgttacgggtg

SEQ ID NO: 117411 - DNA, 25 bp, Saccharomyces pastorianus
gcattgccaggattgaccagcttta

SEQ ID NO: 117412 - DNA, 25 bp, Saccharomyces pastorianus
tatttcagcatcttcacacgtttca

SEQ ID NO: 117413 - DNA, 25 bp, Saccharomyces pastorianus
gacgaggttatcatcccggaaacaa

SEQ ID NO: 117414 - DNA, 25 bp, Saccharomyces pastorianus
ttagaaccagcaccagtatcgccaa

SEQ ID NO: 117415 - DNA, 25 bp, Saccharomyces pastorianus
gatttgttgcaggtatctttccatt

SEQ ID NO: 117416 - DNA, 25 bp, Saccharomyces pastorianus
aaaacttggccacatttctttagca

SEQ ID NO: 117417 - DNA, 25 bp, Saccharomyces pastorianus
aatacccgagttttatggtggctat

SEQ ID NO: 117418 - DNA, 25 bp, Saccharomyces pastorianus
gatgttctgaacgatgacttccccg

SEQ ID NO: 117419 - DNA, 25 bp, Saccharomyces pastorianus
gaaggtcgctgtacaatgcaagata

SEQ ID NO: 117420 - DNA, 25 bp, Saccharomyces pastorianus
ggctcacttagtggcttttcaaaag

SEQ ID NO: 117421 - DNA, 25 bp, Saccharomyces pastorianus
gaagagtcttggaatcctgcaactt

SEQ ID NO: 117422 - DNA, 25 bp, Saccharomyces pastorianus
cacatcctgtgagttcgtcaacaac

SEQ ID NO: 117423 - DNA, 25 bp, Saccharomyces pastorianus
atgccgtcaatgcttactgtggttc

SEQ ID NO: 117424 - DNA, 25 bp, Saccharomyces pastorianus
aatccagtttatgtctttggtccgc

SEQ ID NO: 117425 - DNA, 25 bp, Saccharomyces pastorianus
gactggcgctacttataacactctt

SEQ ID NO: 117426 - DNA, 25 bp, Saccharomyces pastorianus
agaattgccaagttgatgccgtcaa

SEQ ID NO: 117427 - DNA, 25 bp, Saccharomyces pastorianus
ggtgccactctcgacaataccaaaa

SEQ ID NO: 117428 - DNA, 25 bp, Saccharomyces pastorianus
aaacacggatcttctaccagtttcg

SEQ ID NO: 117429 - DNA, 25 bp, Saccharomyces pastorianus
ttctaccagtttcgccccaagaaat

SEQ ID NO: 117430 - DNA, 25 bp, Saccharomyces pastorianus
gcaatagcagtaacagtgggaacgg

SEQ ID NO: 117431 - DNA, 25 bp, Saccharomyces pastorianus
gtttcgccccaagaaatggacattt

SEQ ID NO: 117432 - DNA, 25 bp, Saccharomyces pastorianus
tatcctataactgcggtaagacctt

SEQ ID NO: 117433 - DNA, 25 bp, Saccharomyces pastorianus
gcagtaataacattccaacaagcaa

SEQ ID NO: 117434 - DNA, 25 bp, Saccharomyces pastorianus
gagtatcaaggtgttctagcaatat

SEQ ID NO: 117435 - DNA, 25 bp, Saccharomyces pastorianus
agaaatggacatttttgattcacaa

SEQ ID NO: 117436 - DNA, 25 bp, Saccharomyces pastorianus
gctctaaatttcaacgtcattggga

SEQ ID NO: 117437 - DNA, 25 bp, Saccharomyces pastorianus
gtaagaccttaagcgggaaagacat

SEQ ID NO: 117438 - DNA, 25 bp, Saccharomyces pastorianus
aagggatatttcacaaaacacggat

SEQ ID NO: 117439 - DNA, 25 bp, Saccharomyces pastorianus
tcacacaccacatgcgtcactgtat

SEQ ID NO: 117440 - DNA, 25 bp, Saccharomyces pastorianus
gaatatcaaggtgttttggccatat

SEQ ID NO: 117441 - DNA, 25 bp, Saccharomyces pastorianus
agagacgtctcgcaaaatacaaatc

SEQ ID NO: 117442 - DNA, 25 bp, Saccharomyces pastorianus
ccgtctccccacaagaagtagatat

SEQ ID NO: 117443 - DNA, 25 bp, Saccharomyces pastorianus
aatcctgacaatttttctatgggca

SEQ ID NO: 117444 - DNA, 25 bp, Saccharomyces pastorianus
aacaatggttctgacaatagcaaca

SEQ ID NO: 117445 - DNA, 25 bp, Saccharomyces pastorianus
taattgcggcaaaactttaagtgga

SEQ ID NO: 117446 - DNA, 25 bp, Saccharomyces pastorianus
caaaatacaaatcttctacccgtct

SEQ ID NO: 117447 - DNA, 25 bp, Saccharomyces pastorianus
gaggatacacttaacccactagagt

SEQ ID NO: 117448 - DNA, 25 bp, Saccharomyces pastorianus
gggcattgttcccaatagtgtcgta

SEQ ID NO: 117449 - DNA, 25 bp, Saccharomyces pastorianus
agcagtggaaatgggaactcttata

SEQ ID NO: 117450 - DNA, 25 bp, Saccharomyces pastorianus
aatagtctcgctaatggcaaccaag

SEQ ID NO: 117451 - DNA, 25 bp, Saccharomyces pastorianus
aactcaacgtttgcagtgtcactaa

SEQ ID NO: 117452 - DNA, 25 bp, Saccharomyces pastorianus
attgcgacctccaattctaacggaa

SEQ ID NO: 117453 - DNA, 25 bp, Saccharomyces pastorianus
gatcctctatgggtaacgacaacaa

SEQ ID NO: 117454 - DNA, 25 bp, Saccharomyces pastorianus
gatatcaatgacagcaccactaact

SEQ ID NO: 117455 - DNA, 25 bp, Saccharomyces pastorianus
gcagcaagcattaagcgcggatatt

SEQ ID NO: 117456 - DNA, 25 bp, Saccharomyces pastorianus
ggatattaatccaactcctttcaat

SEQ ID NO: 117457 - DNA, 25 bp, Saccharomyces pastorianus
agctgccgcagtaggatcctctatg

SEQ ID NO: 117458 - DNA, 25 bp, Saccharomyces pastorianus
gcgtggaatttcgtcatctatttcg

SEQ ID NO: 117459 - DNA, 25 bp, Saccharomyces pastorianus
taacggaatgcgtggaatttcgtca

SEQ ID NO: 117460 - DNA, 25 bp, Saccharomyces pastorianus
ccaagtagctttggcggcagcggca

SEQ ID NO: 117461 - DNA, 25 bp, Saccharomyces pastorianus
atgctgcagattcgttcatcgtcct

SEQ ID NO: 117462 - DNA, 25 bp, Saccharomyces pastorianus
gaaaatacctcgctggtccaattgg

SEQ ID NO: 117463 - DNA, 25 bp, Saccharomyces pastorianus
gtggtctggctatggatcttcgtaa

SEQ ID NO: 117464 - DNA, 25 bp, Saccharomyces pastorianus
gaaaaacatcttctttgccgcatat

SEQ ID NO: 117465 - DNA, 25 bp, Saccharomyces pastorianus
caggcagctgctaaattctacgata

SEQ ID NO: 117466 - DNA, 25 bp, Saccharomyces pastorianus
atgcccagattgctgcgtttgtcaa

SEQ ID NO: 117467 - DNA, 25 bp, Saccharomyces pastorianus
cgaagagtatgttgcgctatccggt

SEQ ID NO: 117468 - DNA, 25 bp, Saccharomyces pastorianus
agttggccagcgacaacgtcgttag

SEQ ID NO: 117469 - DNA, 25 bp, Saccharomyces pastorianus
atccggtgttgtcacatctatcctt

SEQ ID NO: 117470 - DNA, 25 bp, Saccharomyces pastorianus
gaactcatctcttttggccaggcaa

SEQ ID NO: 117471 - DNA, 25 bp, Saccharomyces pastorianus
gaaagtgattcctgtaaccgttctt

SEQ ID NO: 117472 - DNA, 25 bp, Saccharomyces pastorianus
aattcgcatttcttcagtctagcca

SEQ ID NO: 117473 - DNA, 25 bp, Saccharomyces pastorianus
gatattcctggtcttggttatttgg

SEQ ID NO: 117474 - DNA, 25 bp, Saccharomyces pastorianus
gaactcctgccaccagatatgtttt

SEQ ID NO: 117475 - DNA, 25 bp, Saccharomyces pastorianus
aatccttgcaattgtgggtggtgac

SEQ ID NO: 117476 - DNA, 25 bp, Saccharomyces pastorianus
acctgtaccttttgtggaactcctg

SEQ ID NO: 117477 - DNA, 25 bp, Saccharomyces pastorianus
tggccaatgtcgttagtgagctact

SEQ ID NO: 117478 - DNA, 25 bp, Saccharomyces pastorianus
agctacttttgcaacgtgctcaaga

SEQ ID NO: 117479 - DNA, 25 bp, Saccharomyces pastorianus
gaacgctataaagaccgatccggtg

SEQ ID NO: 117480 - DNA, 25 bp, Saccharomyces pastorianus
acactaaactaaacctgccactatg

SEQ ID NO: 117481 - DNA, 25 bp, Saccharomyces pastorianus
gatgggacagagtttccttgtaaat

SEQ ID NO: 117482 - DNA, 25 bp, Saccharomyces pastorianus
tgatctcaatgcagactcgaccgga

SEQ ID NO: 117483 - DNA, 25 bp, Saccharomyces pastorianus
agaaatcttcgcatgtgaaaggtaa

SEQ ID NO: 117484 - DNA, 25 bp, Saccharomyces pastorianus
caagagcgtgaagcaatggccgtaa

SEQ ID NO: 117485 - DNA, 25 bp, Saccharomyces pastorianus
gatgaagcacgtaagactctagaag

SEQ ID NO: 117486 - DNA, 25 bp, Saccharomyces pastorianus
aaaaggttgtttctgatagcgacga

SEQ ID NO: 117487 - DNA, 25 bp, Saccharomyces pastorianus
ggcacaaaaactaatccaagagcgt

SEQ ID NO: 117488 - DNA, 25 bp, Saccharomyces pastorianus
aagagacttcaggatgaggcacaaa

SEQ ID NO: 117489 - DNA, 25 bp, Saccharomyces pastorianus
gtgattcagatctctccgacaaaga

SEQ ID NO: 117490 - DNA, 25 bp, Saccharomyces pastorianus
tggccgtaagcgaacatgatgtcaa

SEQ ID NO: 117491 - DNA, 25 bp, Saccharomyces pastorianus
ggatgaccgtgattcagatctctcc

SEQ ID NO: 117492 - DNA, 25 bp, Saccharomyces pastorianus
gtgaaaccaccatgaaaagtgcgtt

SEQ ID NO: 117493 - DNA, 25 bp, Saccharomyces pastorianus
gaagcacagatgagtgggtccgaaa

SEQ ID NO: 117494 - DNA, 25 bp, Saccharomyces pastorianus
gaaagatgcactgaagcaccgtaag

SEQ ID NO: 117495 - DNA, 25 bp, Saccharomyces pastorianus
gaggcagaacctgtatcacaattca

SEQ ID NO: 117496 - DNA, 25 bp, Saccharomyces pastorianus
tgcaatcgccatttttagtaggaca

SEQ ID NO: 117497 - DNA, 25 bp, Saccharomyces pastorianus
aagacgaaggaccagagcaccctac

SEQ ID NO: 117498 - DNA, 25 bp, Saccharomyces pastorianus
gctcccgtaccacatgtatctagag

SEQ ID NO: 117499 - DNA, 25 bp, Saccharomyces pastorianus
atttcttgtttttccctcatttgca

SEQ ID NO: 117500 - DNA, 25 bp, Saccharomyces pastorianus
gaagtaaacgctcccgaatacgaga

SEQ ID NO: 117501 - DNA, 25 bp, Saccharomyces pastorianus
ctaggtttgacatcggctcccgtac

SEQ ID NO: 117502 - DNA, 25 bp, Saccharomyces pastorianus
aagtaaatctgacaccctaggtttg

SEQ ID NO: 117503 - DNA, 25 bp, Saccharomyces pastorianus
attggacccgtgatatgaggcgcaa

SEQ ID NO: 117504 - DNA, 25 bp, Saccharomyces pastorianus
gaatttattccgactttcaccaagg

SEQ ID NO: 117505 - DNA, 25 bp, Saccharomyces pastorianus
gtaattcctattggtgtacttatca

SEQ ID NO: 117506 - DNA, 25 bp, Saccharomyces pastorianus
tcgatgaagcgcactccatgcacaa

SEQ ID NO: 117507 - DNA, 25 bp, Saccharomyces pastorianus
atgcccgttggaaccgtgtcattat

SEQ ID NO: 117508 - DNA, 25 bp, Saccharomyces pastorianus
aaagaatggcttcccttggtgtcga

SEQ ID NO: 117509 - DNA, 25 bp, Saccharomyces pastorianus
gaaactgttcctggatcctatgaat

SEQ ID NO: 117510 - DNA, 25 bp, Saccharomyces pastorianus
atgcccgtcatttttggcctcttaa

SEQ ID NO: 117511 - DNA, 25 bp, Saccharomyces pastorianus
catgactgaagaacaagccctggcc

SEQ ID NO: 117512 - DNA, 25 bp, Saccharomyces pastorianus
tggcctcttaacttgcatgactgaa

SEQ ID NO: 117513 - DNA, 25 bp, Saccharomyces pastorianus
aatcagggtcggtatcattcatgcc

SEQ ID NO: 117514 - DNA, 25 bp, Saccharomyces pastorianus
aatacatttcagattccaccactca

SEQ ID NO: 117515 - DNA, 25 bp, Saccharomyces pastorianus
aaagccgctagatgttgtaattcct

SEQ ID NO: 117516 - DNA, 25 bp, Saccharomyces pastorianus
ttttgactcaactacaggacgcgat

SEQ ID NO: 117517 - DNA, 25 bp, Saccharomyces pastorianus
gcttttcaataatgacttcccgtta

SEQ ID NO: 117518 - DNA, 25 bp, Saccharomyces pastorianus
aagtcgccgttggtctcaatgggaa

SEQ ID NO: 117519 - DNA, 25 bp, Saccharomyces pastorianus
gtgttggctgcacataccaagtttg

SEQ ID NO: 117520 - DNA, 25 bp, Saccharomyces pastorianus
aaacgacacggcagcgttcaaggat

SEQ ID NO: 117521 - DNA, 25 bp, Saccharomyces pastorianus
caggtgttttgcatgtttccgctaa

SEQ ID NO: 117522 - DNA, 25 bp, Saccharomyces pastorianus
gacgcgatgctggtttcgggatatt

SEQ ID NO: 117523 - DNA, 25 bp, Saccharomyces pastorianus
gagtggtgttcagaccgcatatata

SEQ ID NO: 117524 - DNA, 25 bp, Saccharomyces pastorianus
cagtgtttcactatcgtatatggct

SEQ ID NO: 117525 - DNA, 25 bp, Saccharomyces pastorianus
gttgcaaaatttctcctccagtgtt

SEQ ID NO: 117526 - DNA, 25 bp, Saccharomyces pastorianus
gtatatggcttttcccaatgcttca

SEQ ID NO: 117527 - DNA, 25 bp, Saccharomyces pastorianus
aattcaatgcggtttgggccgttca

SEQ ID NO: 117528 - DNA, 25 bp, Saccharomyces pastorianus
atacttggtgctgagttcgtcgaac

SEQ ID NO: 117529 - DNA, 25 bp, Saccharomyces pastorianus
attgggaaatggcttccccatcgct

SEQ ID NO: 117530 - DNA, 25 bp, Saccharomyces pastorianus
ttacttaccaagtgaggctcatccg

SEQ ID NO: 117531 - DNA, 25 bp, Saccharomyces pastorianus
gctggcctgttctgtaagcaactat

SEQ ID NO: 117532 - DNA, 25 bp, Saccharomyces pastorianus
ttgggacttttgatcattaccgctg

SEQ ID NO: 117533 - DNA, 25 bp, Saccharomyces pastorianus
gaggctcatccggatatttttacat

SEQ ID NO: 117534 - DNA, 25 bp, Saccharomyces pastorianus
cgctgccaccatcgtcaatgaaaaa

SEQ ID NO: 117535 - DNA, 25 bp, Saccharomyces pastorianus
atatcttacaaaagcgcttgcgcga

SEQ ID NO: 117536 - DNA, 25 bp, Saccharomyces pastorianus
aactatgggctcatgcttacttacc

SEQ ID NO: 117537 - DNA, 25 bp, Saccharomyces pastorianus
acgtatggtggtaatccgctggcct

SEQ ID NO: 117538 - DNA, 25 bp, Saccharomyces pastorianus
aagccagccgtcgataaatctgagt

SEQ ID NO: 117539 - DNA, 25 bp, Saccharomyces pastorianus
gatgaattatggctaagaactttac

SEQ ID NO: 117540 - DNA, 25 bp, Saccharomyces pastorianus
tggtctgatctattacgtcccgtca

SEQ ID NO: 117541 - DNA, 25 bp, Saccharomyces pastorianus
gaacaccaaatggactttatggtac

SEQ ID NO: 117542 - DNA, 25 bp, Saccharomyces pastorianus
tgatctattacgtcccgtcacttca

SEQ ID NO: 117543 - DNA, 25 bp, Saccharomyces pastorianus
ccgtcacttcattccaaactgttga

SEQ ID NO: 117544 - DNA, 25 bp, Saccharomyces pastorianus
ttgggctatcattcaaaatattcct

SEQ ID NO: 117545 - DNA, 25 bp, Saccharomyces pastorianus
aacgtttcagtcgatgataccacag

SEQ ID NO: 117546 - DNA, 25 bp, Saccharomyces pastorianus
tcaaaatattcctgagccacacgaa

SEQ ID NO: 117547 - DNA, 25 bp, Saccharomyces pastorianus
aaatctgagtcgtggtctgatctat

SEQ ID NO: 117548 - DNA, 25 bp, Saccharomyces pastorianus
tgaaacaattgatgaagacgactcc

SEQ ID NO: 117549 - DNA, 25 bp, Saccharomyces pastorianus
gacacgaaggtcacttccagtgcat

SEQ ID NO: 117550 - DNA, 25 bp, Saccharomyces pastorianus
agggaacaactgtcttcttcattga

SEQ ID NO: 117551 - DNA, 25 bp, Saccharomyces pastorianus
ggttctgagggtgaccaatcttcca

SEQ ID NO: 117552 - DNA, 25 bp, Saccharomyces pastorianus
ttgcgaacgctgtggtgagttaatc

SEQ ID NO: 117553 - DNA, 25 bp, Saccharomyces pastorianus
acgcaatcgctcacttcttgttatt

SEQ ID NO: 117554 - DNA, 25 bp, Saccharomyces pastorianus
caatcttccattcggttgttttgcg

SEQ ID NO: 117555 - DNA, 25 bp, Saccharomyces pastorianus
agcggaagctcagcagacgggcaat

SEQ ID NO: 117556 - DNA, 25 bp, Saccharomyces pastorianus
agaaaattatcgctgacccaccctg

SEQ ID NO: 117557 - DNA, 25 bp, Saccharomyces pastorianus
tggatactggtattgtgactcttgt

SEQ ID NO: 117558 - DNA, 25 bp, Saccharomyces pastorianus
cgtcttaaaatactgcccattcgaa

SEQ ID NO: 117559 - DNA, 25 bp, Saccharomyces pastorianus
atcgatacgaactcttcggcatcgc

SEQ ID NO: 117560 - DNA, 25 bp, Saccharomyces pastorianus
ccttatttgtgcttgttgggttgat

SEQ ID NO: 117561 - DNA, 25 bp, Saccharomyces pastorianus
tagcggcatcgttttggacaggttt

SEQ ID NO: 117562 - DNA, 25 bp, Saccharomyces pastorianus
tacaactggttcatggttctttagt

SEQ ID NO: 117563 - DNA, 25 bp, Saccharomyces pastorianus
ggtggtgcagccattccatatttgg

SEQ ID NO: 117564 - DNA, 25 bp, Saccharomyces pastorianus
agcgtacgcttttttaactctatct

SEQ ID NO: 117565 - DNA, 25 bp, Saccharomyces pastorianus
gaccattattcccaaacgcaagtat

SEQ ID NO: 117566 - DNA, 25 bp, Saccharomyces pastorianus
atttggctggagttattgcacacac

SEQ ID NO: 117567 - DNA, 25 bp, Saccharomyces pastorianus
atcctgctattttcttgtactcatt

SEQ ID NO: 117568 - DNA, 25 bp, Saccharomyces pastorianus
agctcagttttgtatttcgtcgtgt

SEQ ID NO: 117569 - DNA, 25 bp, Saccharomyces pastorianus
gcgagcccaggattttttgaacttt

SEQ ID NO: 117570 - DNA, 25 bp, Saccharomyces pastorianus
gttgtggtacgtttatcggaccatt

SEQ ID NO: 117571 - DNA, 25 bp, Saccharomyces pastorianus
gacgccacaaattcgaccatcgaaa

SEQ ID NO: 117572 - DNA, 25 bp, Saccharomyces pastorianus
acctttctcccttgatgagttcaat

SEQ ID NO: 117573 - DNA, 25 bp, Saccharomyces pastorianus
ttggtgcccataatcttacaggtgt

SEQ ID NO: 117574 - DNA, 25 bp, Saccharomyces pastorianus
gaggaggtttgttcgttcaatacag

SEQ ID NO: 117575 - DNA, 25 bp, Saccharomyces pastorianus
aaagtcattacccttcgacctgtgg

SEQ ID NO: 117576 - DNA, 25 bp, Saccharomyces pastorianus
gcgtcgttgagccacattctttaaa

SEQ ID NO: 117577 - DNA, 25 bp, Saccharomyces pastorianus
gatacgagcttatttttcttcaatg

SEQ ID NO: 117578 - DNA, 25 bp, Saccharomyces pastorianus
gctttctagtttcaatttggtgccc

SEQ ID NO: 117579 - DNA, 25 bp, Saccharomyces pastorianus
gacgtgggaatcttcgacgccacaa

SEQ ID NO: 117580 - DNA, 25 bp, Saccharomyces pastorianus
tcaatgttatcaatgcgggcgtcgt

SEQ ID NO: 117581 - DNA, 25 bp, Saccharomyces pastorianus
actattcgcagtttacacctttctc

SEQ ID NO: 117582 - DNA, 25 bp, Saccharomyces pastorianus
gaccaactgcccgatttagagagca

SEQ ID NO: 117583 - DNA, 25 bp, Saccharomyces pastorianus
attacttggaactcatcggcgtatt

SEQ ID NO: 117584 - DNA, 25 bp, Saccharomyces pastorianus
attacatgtgcgctagattacctaa

SEQ ID NO: 117585 - DNA, 25 bp, Saccharomyces pastorianus
gagagcatgggactcacccaacttt

SEQ ID NO: 117586 - DNA, 25 bp, Saccharomyces pastorianus
gaagtttttcacacagtccaatctg

SEQ ID NO: 117587 - DNA, 25 bp, Saccharomyces pastorianus
tcccgagagtcccttattatgctat

SEQ ID NO: 117588 - DNA, 25 bp, Saccharomyces pastorianus
attcttgtcaatattcaccacctac

SEQ ID NO: 117589 - DNA, 25 bp, Saccharomyces pastorianus
aaatccctcctgctaaattacttgg

SEQ ID NO: 117590 - DNA, 25 bp, Saccharomyces pastorianus
taatgagtacagaccccatcagtcc

SEQ ID NO: 117591 - DNA, 25 bp, Saccharomyces pastorianus
gcaagtacgaagcagacggctccaa

SEQ ID NO: 117592 - DNA, 25 bp, Saccharomyces pastorianus
ggtacacgacaaactcaccagcata

SEQ ID NO: 117593 - DNA, 25 bp, Saccharomyces pastorianus
tcaagacaagagacgcatgcccatt

SEQ ID NO: 117594 - DNA, 25 bp, Saccharomyces pastorianus
gcattgaatgccagccaaaggccat

SEQ ID NO: 117595 - DNA, 25 bp, Saccharomyces pastorianus
caagagacgcatgcccattagataa

SEQ ID NO: 117596 - DNA, 25 bp, Saccharomyces pastorianus
caaaggccatgacggacactgataa

SEQ ID NO: 117597 - DNA, 25 bp, Saccharomyces pastorianus
cacgctttccatttgcactgtatta

SEQ ID NO: 117598 - DNA, 25 bp, Saccharomyces pastorianus
aaagctcaaatcaaagtgcgccagt

SEQ ID NO: 117599 - DNA, 25 bp, Saccharomyces pastorianus
ttaagaaatggaccgcagtggcgtt

SEQ ID NO: 117600 - DNA, 25 bp, Saccharomyces pastorianus
caaagtgcgccagtggaaaccaaaa

SEQ ID NO: 117601 - DNA, 25 bp, Saccharomyces pastorianus
ctgtgctatttgcaggaaccatata

SEQ ID NO: 117602 - DNA, 25 bp, Saccharomyces pastorianus
cagtggcgttttggtcatgggatat

SEQ ID NO: 117603 - DNA, 25 bp, Saccharomyces pastorianus
gataatgaatgtgtagcagcctggg

SEQ ID NO: 117604 - DNA, 25 bp, Saccharomyces pastorianus
gatgattcagtacagctcttagcag

SEQ ID NO: 117605 - DNA, 25 bp, Saccharomyces pastorianus
aaaacaccggaattctgcctctatt

SEQ ID NO: 117606 - DNA, 25 bp, Saccharomyces pastorianus
aaagcctgacattggcagacctgga

SEQ ID NO: 117607 - DNA, 25 bp, Saccharomyces pastorianus
attgccaaggcaattccaggaaata

SEQ ID NO: 117608 - DNA, 25 bp, Saccharomyces pastorianus
acgattttagacaagcatggtgaca

SEQ ID NO: 117609 - DNA, 25 bp, Saccharomyces pastorianus
gctgtccaccaatgtcacgatttta

SEQ ID NO: 117610 - DNA, 25 bp, Saccharomyces pastorianus
tattctgtggaggtctggtttacga

SEQ ID NO: 117611 - DNA, 25 bp, Saccharomyces pastorianus
gagaagcttaaatcgcactaccaaa

SEQ ID NO: 117612 - DNA, 25 bp, Saccharomyces pastorianus
gacgccatcatgtgcggaagattat

SEQ ID NO: 117613 - DNA, 25 bp, Saccharomyces pastorianus
tattcacgaggatcagctgtccacc

SEQ ID NO: 117614 - DNA, 25 bp, Saccharomyces pastorianus
ggcccattgttacctcttgggttgt

SEQ ID NO: 117615 - DNA, 25 bp, Saccharomyces pastorianus
cgaagtccaagataaggttttgcaa

SEQ ID NO: 117616 - DNA, 25 bp, Saccharomyces pastorianus
taagatagcacaagacgaagtccaa

SEQ ID NO: 117617 - DNA, 25 bp, Saccharomyces pastorianus
ggttcaacctcagtaaagttgccaa

SEQ ID NO: 117618 - DNA, 25 bp, Saccharomyces pastorianus
tttagccctgacctggaggaagaac

SEQ ID NO: 117619 - DNA, 25 bp, Saccharomyces pastorianus
gtatggaacttaaggttcaacctca

SEQ ID NO: 117620 - DNA, 25 bp, Saccharomyces pastorianus
gaactagcacattctgtatggaact

SEQ ID NO: 117621 - DNA, 25 bp, Saccharomyces pastorianus
caaggctttaaatgtttggattcac

SEQ ID NO: 117622 - DNA, 25 bp, Saccharomyces pastorianus
gtgtagaatatttagccctgacctg

SEQ ID NO: 117623 - DNA, 25 bp, Saccharomyces pastorianus
ggaagaacatgtgcccttgattcaa

SEQ ID NO: 117624 - DNA, 25 bp, Saccharomyces pastorianus
aatgacgcgcaatcacagttagagc

SEQ ID NO: 117625 - DNA, 25 bp, Saccharomyces pastorianus
agttgccaaacggattcgcatggaa

SEQ ID NO: 117626 - DNA, 25 bp, Saccharomyces pastorianus
ttggttcttggccagctattggatt

SEQ ID NO: 117627 - DNA, 25 bp, Saccharomyces pastorianus
attgggtgtgctgcttttgctggcc

SEQ ID NO: 117628 - DNA, 25 bp, Saccharomyces pastorianus
ggtcccatacaaactacttagctca

SEQ ID NO: 117629 - DNA, 25 bp, Saccharomyces pastorianus
ttgctggccgtccttggttggttct

SEQ ID NO: 117630 - DNA, 25 bp, Saccharomyces pastorianus
taccaaataattatgcgcccaccac

SEQ ID NO: 117631 - DNA, 25 bp, Saccharomyces pastorianus
gagccggtccttcaaacaaatcagt

SEQ ID NO: 117632 - DNA, 25 bp, Saccharomyces pastorianus
gatatcgccctatacttgggtgata

SEQ ID NO: 117633 - DNA, 25 bp, Saccharomyces pastorianus
gcaacacttaacgaggccgctgaaa

SEQ ID NO: 117634 - DNA, 25 bp, Saccharomyces pastorianus
gaattccagtatcgcgtggtggttt

SEQ ID NO: 117635 - DNA, 25 bp, Saccharomyces pastorianus
aaagaatagaccctcctgcaacact

SEQ ID NO: 117636 - DNA, 25 bp, Saccharomyces pastorianus
cggttatttcgagcttcttgccaaa

SEQ ID NO: 117637 - DNA, 25 bp, Saccharomyces pastorianus
gggtctatctttcaggtgctctcta

SEQ ID NO: 117638 - DNA, 25 bp, Saccharomyces pastorianus
gttacgttcattgactggattcctt

SEQ ID NO: 117639 - DNA, 25 bp, Saccharomyces pastorianus
agattcccacctttcgtggtataag

SEQ ID NO: 117640 - DNA, 25 bp, Saccharomyces pastorianus
ggattccttttctttgcagcacact

SEQ ID NO: 117641 - DNA, 25 bp, Saccharomyces pastorianus
tctctatgctctaggcttttggata

SEQ ID NO: 117642 - DNA, 25 bp, Saccharomyces pastorianus
ggatatttctagacgcagtgctcta

SEQ ID NO: 117643 - DNA, 25 bp, Saccharomyces pastorianus
aggctccattgtcgtgttgatcatc

SEQ ID NO: 117644 - DNA, 25 bp, Saccharomyces pastorianus
ggcatggcaagctcgaaccgtttta

SEQ ID NO: 117645 - DNA, 25 bp, Saccharomyces pastorianus
ttatcgtcagatggtggtgccttcg

SEQ ID NO: 117646 - DNA, 25 bp, Saccharomyces pastorianus
atgttagcttatttcgcttcccctt

SEQ ID NO: 117647 - DNA, 25 bp, Saccharomyces pastorianus
ttattgcagggagctttatcgtcag

SEQ ID NO: 117648 - DNA, 25 bp, Saccharomyces pastorianus
taaactttgttcatgggctacctgc

SEQ ID NO: 117649 - DNA, 25 bp, Saccharomyces pastorianus
gtgcatctcaaaacacctttgtggt

SEQ ID NO: 117650 - DNA, 25 bp, Saccharomyces pastorianus
cgactatgtcaatcgcagttacgtt

SEQ ID NO: 117651 - DNA, 25 bp, Saccharomyces pastorianus
ggctccatcttgacatacgaaacct

SEQ ID NO: 117652 - DNA, 25 bp, Saccharomyces pastorianus
gggctgagccatatacaataaccat

SEQ ID NO: 117653 - DNA, 25 bp, Saccharomyces pastorianus
taacaacggatgcaaccccaaactg

SEQ ID NO: 117654 - DNA, 25 bp, Saccharomyces pastorianus
cagctcaattttacatggcgacgat

SEQ ID NO: 117655 - DNA, 25 bp, Saccharomyces pastorianus
gcagttacgttacatcacttgttga

SEQ ID NO: 117656 - DNA, 25 bp, Saccharomyces pastorianus
tagctgccccagcatcaaaaggata

SEQ ID NO: 117657 - DNA, 25 bp, Saccharomyces pastorianus
gcatgtctgtgactacggcgactat

SEQ ID NO: 117658 - DNA, 25 bp, Saccharomyces pastorianus
aagtatagggcccatggctccatct

SEQ ID NO: 117659 - DNA, 25 bp, Saccharomyces pastorianus
agctggtgggcattttggttcttta

SEQ ID NO: 117660 - DNA, 25 bp, Saccharomyces pastorianus
tgaaactattgtcccaatgcacgaa

SEQ ID NO: 117661 - DNA, 25 bp, Saccharomyces pastorianus
ctcgacgtgttgaccatggacttta

SEQ ID NO: 117662 - DNA, 25 bp, Saccharomyces pastorianus
tggcgagagttctcaattcctcgac

SEQ ID NO: 117663 - DNA, 25 bp, Saccharomyces pastorianus
gatactattttgtgtgatcctccat

SEQ ID NO: 117664 - DNA, 25 bp, Saccharomyces pastorianus
gtgatcctccatatggtatcagaga

SEQ ID NO: 117665 - DNA, 25 bp, Saccharomyces pastorianus
aaaccgtatgctctagattcattac

SEQ ID NO: 117666 - DNA, 25 bp, Saccharomyces pastorianus
tgcgtcgcgattatattccaaccaa

SEQ ID NO: 117667 - DNA, 25 bp, Saccharomyces pastorianus
tgatcttttacaatactcttccgaa

SEQ ID NO: 117668 - DNA, 25 bp, Saccharomyces pastorianus
gggtagcactttcaatggaccaagt

SEQ ID NO: 117669 - DNA, 25 bp, Saccharomyces pastorianus
tcttccgaaagattaccgattggcg

SEQ ID NO: 117670 - DNA, 25 bp, Saccharomyces pastorianus
gtaatgagctatattgaccgcacga

SEQ ID NO: 117671 - DNA, 25 bp, Saccharomyces pastorianus
atgtacatgtcatcccattttttgg

SEQ ID NO: 117672 - DNA, 25 bp, Saccharomyces pastorianus
acctccagcgggtagtcaatttact

SEQ ID NO: 117673 - DNA, 25 bp, Saccharomyces pastorianus
tgtaccattgggaggccactcatat

SEQ ID NO: 117674 - DNA, 25 bp, Saccharomyces pastorianus
gaagcaattccgtacagccaaaaac

SEQ ID NO: 117675 - DNA, 25 bp, Saccharomyces pastorianus
ttgaccgcacgaaaacactaataag

SEQ ID NO: 117676 - DNA, 25 bp, Saccharomyces pastorianus
gataagaccttcttctatacgaagc

SEQ ID NO: 117677 - DNA, 25 bp, Saccharomyces pastorianus
gaggccactcatattaacgttgacc

SEQ ID NO: 117678 - DNA, 25 bp, Saccharomyces pastorianus
tttctttcatctgtaccattgggag

SEQ ID NO: 117679 - DNA, 25 bp, Saccharomyces pastorianus
aacgttgaccactatatatgtacat

SEQ ID NO: 117680 - DNA, 25 bp, Saccharomyces pastorianus
gattggatgcaagaaccagtacata

SEQ ID NO: 117681 - DNA, 25 bp, Saccharomyces pastorianus
agatatttactatctggcgcagaca

SEQ ID NO: 117682 - DNA, 25 bp, Saccharomyces pastorianus
gagaataaagtcatgctaccgagat

SEQ ID NO: 117683 - DNA, 25 bp, Saccharomyces pastorianus
gcaagtatatctcttattcctgaat

SEQ ID NO: 117684 - DNA, 25 bp, Saccharomyces pastorianus
gaagttttccaacaagtacctcgag

SEQ ID NO: 117685 - DNA, 25 bp, Saccharomyces pastorianus
attcctgaattgtccgtagtactaa

SEQ ID NO: 117686 - DNA, 25 bp, Saccharomyces pastorianus
atactcctgtatctccataagtgac

SEQ ID NO: 117687 - DNA, 25 bp, Saccharomyces pastorianus
gatacttttctaccatcgtacatga

SEQ ID NO: 117688 - DNA, 25 bp, Saccharomyces pastorianus
aaaattgcacgattatactcctgta

SEQ ID NO: 117689 - DNA, 25 bp, Saccharomyces pastorianus
aggtgcttcgcacaactggaactaa

SEQ ID NO: 117690 - DNA, 25 bp, Saccharomyces pastorianus
aatttcgtcttatgatctctcccaa

SEQ ID NO: 117691 - DNA, 25 bp, Saccharomyces pastorianus
gagtacgttaacgatgtcgcgattt

SEQ ID NO: 117692 - DNA, 25 bp, Saccharomyces pastorianus
gtgttaacgggcagccttccataag

SEQ ID NO: 117693 - DNA, 25 bp, Saccharomyces pastorianus
ataatagcaccaacccttcagtgga

SEQ ID NO: 117694 - DNA, 25 bp, Saccharomyces pastorianus
ggaagctctttatcaaacggcatgg

SEQ ID NO: 117695 - DNA, 25 bp, Saccharomyces pastorianus
ggcagtctcctaatctccagaaagt

SEQ ID NO: 117696 - DNA, 25 bp, Saccharomyces pastorianus
aattccaatttagtcccatccttgg

SEQ ID NO: 117697 - DNA, 25 bp, Saccharomyces pastorianus
gagtattcagcaaatccacctaaca

SEQ ID NO: 117698 - DNA, 25 bp, Saccharomyces pastorianus
ataagcagcaactcttctcaatcac

SEQ ID NO: 117699 - DNA, 25 bp, Saccharomyces pastorianus
aactggccttaatcgtgggtattca

SEQ ID NO: 117700 - DNA, 25 bp, Saccharomyces pastorianus
gtctgcacaagacccttcgaattta

SEQ ID NO: 117701 - DNA, 25 bp, Saccharomyces pastorianus
gaatttatcaagtcaccacactctg

SEQ ID NO: 117702 - DNA, 25 bp, Saccharomyces pastorianus
tcagtggacactcggttcaacaagc

SEQ ID NO: 117703 - DNA, 25 bp, Saccharomyces pastorianus
gaacccacctgctaagaaggctaaa

SEQ ID NO: 117704 - DNA, 25 bp, Saccharomyces pastorianus
aacctgaaagtgaaccggccaagag

SEQ ID NO: 117705 - DNA, 25 bp, Saccharomyces pastorianus
atgaaataacgaacccacctgctaa

SEQ ID NO: 117706 - DNA, 25 bp, Saccharomyces pastorianus
ggatggttatccagtatactttcca

SEQ ID NO: 117707 - DNA, 25 bp, Saccharomyces pastorianus
aatccattttcattggccattcaag

SEQ ID NO: 117708 - DNA, 25 bp, Saccharomyces pastorianus
gttgcactgggatcatcggatggtt

SEQ ID NO: 117709 - DNA, 25 bp, Saccharomyces pastorianus
gccgaagatacagttacctccacag

SEQ ID NO: 117710 - DNA, 25 bp, Saccharomyces pastorianus
aaataacatcagtcgagggtccttt

SEQ ID NO: 117711 - DNA, 25 bp, Saccharomyces pastorianus
agggtcctttaacattcgagatatt

SEQ ID NO: 117712 - DNA, 25 bp, Saccharomyces pastorianus
caccgctaccacaacagatgatgat

SEQ ID NO: 117713 - DNA, 25 bp, Saccharomyces pastorianus
tatatcactgtctctagcgaagatg

SEQ ID NO: 117714 - DNA, 25 bp, Saccharomyces pastorianus
cgggcttgcccttagatcaatttat

SEQ ID NO: 117715 - DNA, 25 bp, Saccharomyces pastorianus
acgttacgatagagccagcgggcca

SEQ ID NO: 117716 - DNA, 25 bp, Saccharomyces pastorianus
cggcaaacgtgccaatttcctaatg

SEQ ID NO: 117717 - DNA, 25 bp, Saccharomyces pastorianus
ccctctgtttgtacttcaaccaatg

SEQ ID NO: 117718 - DNA, 25 bp, Saccharomyces pastorianus
aagggcagcgattctatagtaattc

SEQ ID NO: 117719 - DNA, 25 bp, Saccharomyces pastorianus
gtactttgacactttctggtttatc

SEQ ID NO: 117720 - DNA, 25 bp, Saccharomyces pastorianus
cggcaggtttcgatactacgctaag

SEQ ID NO: 117721 - DNA, 25 bp, Saccharomyces pastorianus
tcaaactgtgcttggattcctcagg

SEQ ID NO: 117722 - DNA, 25 bp, Saccharomyces pastorianus
tttcctaatgacaccactgctgaga

SEQ ID NO: 117723 - DNA, 25 bp, Saccharomyces pastorianus
gagcacttaacgtaacgggcttgcc

SEQ ID NO: 117724 - DNA, 25 bp, Saccharomyces pastorianus
agaaatctgacttcgtccaggcaag

SEQ ID NO: 117725 - DNA, 25 bp, Saccharomyces pastorianus
gataatatccttctgaattcccaag

SEQ ID NO: 117726 - DNA, 25 bp, Saccharomyces pastorianus
attgcgtcatccagagtcagtgtgc

SEQ ID NO: 117727 - DNA, 25 bp, Saccharomyces pastorianus
atgtcgaatcaagagcatccgtgag

SEQ ID NO: 117728 - DNA, 25 bp, Saccharomyces pastorianus
gaaggcgctgtatctgatagctaac

SEQ ID NO: 117729 - DNA, 25 bp, Saccharomyces pastorianus
ggtgaaccgccttacctaaatgagg

SEQ ID NO: 117730 - DNA, 25 bp, Saccharomyces pastorianus
ggagcaataccggtgagcactcatt

SEQ ID NO: 117731 - DNA, 25 bp, Saccharomyces pastorianus
gcgtgccacaatggtaggtactcca

SEQ ID NO: 117732 - DNA, 25 bp, Saccharomyces pastorianus
aagtcgacgtttggtctctagggat

SEQ ID NO: 117733 - DNA, 25 bp, Saccharomyces pastorianus
tacagacttcggtttttgtgtggaa

SEQ ID NO: 117734 - DNA, 25 bp, Saccharomyces pastorianus
gtgagcactcattgccgttaaacga

SEQ ID NO: 117735 - DNA, 25 bp, Saccharomyces pastorianus
aatttttgtcaatggcatgcagccc

SEQ ID NO: 117736 - DNA, 25 bp, Saccharomyces pastorianus
aaacattgctgatggtgtcgaacaa

SEQ ID NO: 117737 - DNA, 25 bp, Saccharomyces pastorianus
agctgaagcttctatcgacaaccta

SEQ ID NO: 117738 - DNA, 25 bp, Saccharomyces pastorianus
gcttccgccgccgtcagtgagaaga

SEQ ID NO: 117739 - DNA, 25 bp, Saccharomyces pastorianus
gccgcccaagatgtccaacaaaagt

SEQ ID NO: 117740 - DNA, 25 bp, Saccharomyces pastorianus
gaagcttctatcgacaacctaaaaa

SEQ ID NO: 117741 - DNA, 25 bp, Saccharomyces pastorianus
taaaaaatgaagctcctccagaagg

SEQ ID NO: 117742 - DNA, 25 bp, Saccharomyces pastorianus
aaagctgaaactgccgcccaagatg

SEQ ID NO: 117743 - DNA, 25 bp, Saccharomyces pastorianus
aaaagaagaccgaagctgccaacaa

SEQ ID NO: 117744 - DNA, 25 bp, Saccharomyces pastorianus
aactaagaagcaagcttccgccgcc

SEQ ID NO: 117745 - DNA, 25 bp, Saccharomyces pastorianus
gaatctttgcaaaacaagggccaag

SEQ ID NO: 117746 - DNA, 25 bp, Saccharomyces pastorianus
aagctcctccagaaggtgaacaggt

SEQ ID NO: 117747 - DNA, 25 bp, Saccharomyces pastorianus
catatacctgaaaagcttgagttac

SEQ ID NO: 117748 - DNA, 25 bp, Saccharomyces pastorianus
atgaggcaaaaaccggcagcagcag

SEQ ID NO: 117749 - DNA, 25 bp, Saccharomyces pastorianus
aagagctatatttgacgaactggta

SEQ ID NO: 117750 - DNA, 25 bp, Saccharomyces pastorianus
tacaaccgggattgtccgagattaa

SEQ ID NO: 117751 - DNA, 25 bp, Saccharomyces pastorianus
agcagtagtacctgacctgcaaccc

SEQ ID NO: 117752 - DNA, 25 bp, Saccharomyces pastorianus
tgcaaccccaggaaagtcggtcaga

SEQ ID NO: 117753 - DNA, 25 bp, Saccharomyces pastorianus
gcagcgatcccgtacaagaacaaaa

SEQ ID NO: 117754 - DNA, 25 bp, Saccharomyces pastorianus
gagatacaaacaatacaaccgggat

SEQ ID NO: 117755 - DNA, 25 bp, Saccharomyces pastorianus
atacgtataaatcatgtttcatctg

SEQ ID NO: 117756 - DNA, 25 bp, Saccharomyces pastorianus
gtcggtcagaactaatcatatacct

SEQ ID NO: 117757 - DNA, 25 bp, Saccharomyces pastorianus
aaggaaacgcaggtctaagaagatt

SEQ ID NO: 117758 - DNA, 25 bp, Saccharomyces pastorianus
tgccagttggtcgtacttgaggttt

SEQ ID NO: 117759 - DNA, 25 bp, Saccharomyces pastorianus
gctcaattgttctccatttgggtta

SEQ ID NO: 117760 - DNA, 25 bp, Saccharomyces pastorianus
tggtttcatcattttgctcaattgt

SEQ ID NO: 117761 - DNA, 25 bp, Saccharomyces pastorianus
attggtcggcgatgcatctgatact

SEQ ID NO: 117762 - DNA, 25 bp, Saccharomyces pastorianus
taatcggtttccctatcatttatag

SEQ ID NO: 117763 - DNA, 25 bp, Saccharomyces pastorianus
cttgaattgtccctctttgccaaca

SEQ ID NO: 117764 - DNA, 25 bp, Saccharomyces pastorianus
gaagacacctcaatttttggccaaa

SEQ ID NO: 117765 - DNA, 25 bp, Saccharomyces pastorianus
agccgattttgaggccgattttcaa

SEQ ID NO: 117766 - DNA, 25 bp, Saccharomyces pastorianus
tttttccagaaacttgcacccttga

SEQ ID NO: 117767 - DNA, 25 bp, Saccharomyces pastorianus
gatttacttctttcctgatctaatt

SEQ ID NO: 117768 - DNA, 25 bp, Saccharomyces pastorianus
aaggctggatattcccttagacggg

SEQ ID NO: 117769 - DNA, 25 bp, Saccharomyces pastorianus
gtagtcctagttcaaacaccagtgg

SEQ ID NO: 117770 - DNA, 25 bp, Saccharomyces pastorianus
gaaccttccatcgacagtttttgaa

SEQ ID NO: 117771 - DNA, 25 bp, Saccharomyces pastorianus
ttcgacttcgaagcagcgtctgagt

SEQ ID NO: 117772 - DNA, 25 bp, Saccharomyces pastorianus
ctggcttacaagatgctacggttca

SEQ ID NO: 117773 - DNA, 25 bp, Saccharomyces pastorianus
ggtggagccattgccggtattgtta

SEQ ID NO: 117774 - DNA, 25 bp, Saccharomyces pastorianus
attatcagccctattcgttcggtga

SEQ ID NO: 117775 - DNA, 25 bp, Saccharomyces pastorianus
actgctgccgcctcaaataatagat

SEQ ID NO: 117776 - DNA, 25 bp, Saccharomyces pastorianus
gaaatcgcacgaccaattagacttg

SEQ ID NO: 117777 - DNA, 25 bp, Saccharomyces pastorianus
aagtggtaaaccctgataatcctga

SEQ ID NO: 117778 - DNA, 25 bp, Saccharomyces pastorianus
gccaattctttacccgacatgatga

SEQ ID NO: 117779 - DNA, 25 bp, Saccharomyces pastorianus
aacgatcttctgaggtagctactgc

SEQ ID NO: 117780 - DNA, 25 bp, Saccharomyces pastorianus
acattttactgattgggctacctgg

SEQ ID NO: 117781 - DNA, 25 bp, Saccharomyces pastorianus
aatcggccgtaggtacattttactg

SEQ ID NO: 117782 - DNA, 25 bp, Saccharomyces pastorianus
ggtgctgcccatcataaactcaaat

SEQ ID NO: 117783 - DNA, 25 bp, Saccharomyces pastorianus
gccggtgtagcatgtttatcaacaa

SEQ ID NO: 117784 - DNA, 25 bp, Saccharomyces pastorianus
tgtggcgctggttatatgtgctata

SEQ ID NO: 117785 - DNA, 25 bp, Saccharomyces pastorianus
ggctacctggtatgactgtggcgct

SEQ ID NO: 117786 - DNA, 25 bp, Saccharomyces pastorianus
aggttctttagtcattgcgtctacg

SEQ ID NO: 117787 - DNA, 25 bp, Saccharomyces pastorianus
cattgcgtctacgtttctgactatg

SEQ ID NO: 117788 - DNA, 25 bp, Saccharomyces pastorianus
aggtacattttcattctttgccggt

SEQ ID NO: 117789 - DNA, 25 bp, Saccharomyces pastorianus
gctatagcgttccatttcctaggta

SEQ ID NO: 117790 - DNA, 25 bp, Saccharomyces pastorianus
tatgcagccttttatgccctcggta

SEQ ID NO: 117791 - DNA, 25 bp, Saccharomyces pastorianus
gaacatcatcatccggaagagccat

SEQ ID NO: 117792 - DNA, 25 bp, Saccharomyces pastorianus
gctccagtaccgttaaccagtaaat

SEQ ID NO: 117793 - DNA, 25 bp, Saccharomyces pastorianus
acaagtcatttcttttgagcactga

SEQ ID NO: 117794 - DNA, 25 bp, Saccharomyces pastorianus
gaagatttctagtatttgccaagag

SEQ ID NO: 117795 - DNA, 25 bp, Saccharomyces pastorianus
gtgattcagacaccttacaagtcat

SEQ ID NO: 117796 - DNA, 25 bp, Saccharomyces pastorianus
catagccaatctccatcaatttcaa

SEQ ID NO: 117797 - DNA, 25 bp, Saccharomyces pastorianus
aaaaaacacgctgctccagtaccgt

SEQ ID NO: 117798 - DNA, 25 bp, Saccharomyces pastorianus
gaggcagccaaatccagttacaaat

SEQ ID NO: 117799 - DNA, 25 bp, Saccharomyces pastorianus
ttcgccaaaacctaggacgcatagc

SEQ ID NO: 117800 - DNA, 25 bp, Saccharomyces pastorianus
aaagatcttccaacttccaagtctc

SEQ ID NO: 117801 - DNA, 25 bp, Saccharomyces pastorianus
aagcacaattcgttttctgaatcga

SEQ ID NO: 117802 - DNA, 25 bp, Saccharomyces pastorianus
atggctcttccggatgatgatgttc

SEQ ID NO: 117803 - DNA, 25 bp, Saccharomyces pastorianus
gctatgcgtcctaggttttggcgaa

SEQ ID NO: 117804 - DNA, 25 bp, Saccharomyces pastorianus
gatgttctcctttcaattacctttt

SEQ ID NO: 117805 - DNA, 25 bp, Saccharomyces pastorianus
gaattttgttccttggcattgataa

SEQ ID NO: 117806 - DNA, 25 bp, Saccharomyces pastorianus
aacggtactggagcagcgtgttttt

SEQ ID NO: 117807 - DNA, 25 bp, Saccharomyces pastorianus
gaaatttgttcctgtgtttagacct

SEQ ID NO: 117808 - DNA, 25 bp, Saccharomyces pastorianus
ttaccttttggtttctttgcaacag

SEQ ID NO: 117809 - DNA, 25 bp, Saccharomyces pastorianus
taattacgacctcttcgattttgca

SEQ ID NO: 117810 - DNA, 25 bp, Saccharomyces pastorianus
gtaacttgtctttttggcaatccgt

SEQ ID NO: 117811 - DNA, 25 bp, Saccharomyces pastorianus
aattctgcttgatctgttgctctta

SEQ ID NO: 117812 - DNA, 25 bp, Saccharomyces pastorianus
gcaacagttctttctctattttatt

SEQ ID NO: 117813 - DNA, 25 bp, Saccharomyces pastorianus
taccgcggcgctgatattattaaat

SEQ ID NO: 117814 - DNA, 25 bp, Saccharomyces pastorianus
aataacgtctatcccatttaacttg

SEQ ID NO: 117815 - DNA, 25 bp, Saccharomyces pastorianus
gttaatccaaggtgccatcagtagt

SEQ ID NO: 117816 - DNA, 25 bp, Saccharomyces pastorianus
gattggcctatggtgccagcatgtt

SEQ ID NO: 117817 - DNA, 25 bp, Saccharomyces pastorianus
aaagcgttgcctttgtgagctgtca

SEQ ID NO: 117818 - DNA, 25 bp, Saccharomyces pastorianus
ggattcaatatttaccgcggcgctg

SEQ ID NO: 117819 - DNA, 25 bp, Saccharomyces pastorianus
gtctcattggcttccgaatatctag

SEQ ID NO: 117820 - DNA, 25 bp, Saccharomyces pastorianus
gaatacgctattgtctcattggctt

SEQ ID NO: 117821 - DNA, 25 bp, Saccharomyces pastorianus
aggctggctactatcgaatgcggat

SEQ ID NO: 117822 - DNA, 25 bp, Saccharomyces pastorianus
tgcggatactttgaaacagccctgt

SEQ ID NO: 117823 - DNA, 25 bp, Saccharomyces pastorianus
acagccctgtccaaatatgttgatg

SEQ ID NO: 117824 - DNA, 25 bp, Saccharomyces pastorianus
ttgaagtactccaaacctgctttgc

SEQ ID NO: 117825 - DNA, 25 bp, Saccharomyces pastorianus
cgcattcccaagttcatttcctaat

SEQ ID NO: 117826 - DNA, 25 bp, Saccharomyces pastorianus
ttgattccatgtgctattgacctag

SEQ ID NO: 117827 - DNA, 25 bp, Saccharomyces pastorianus
tttgcttcattccagattctttcca

SEQ ID NO: 117828 - DNA, 25 bp, Saccharomyces pastorianus
acgcattcagcggtggtcaagtgtc

SEQ ID NO: 117829 - DNA, 25 bp, Saccharomyces pastorianus
gcaagaattcgttaaggcgttccag

SEQ ID NO: 117830 - DNA, 25 bp, Saccharomyces pastorianus
gaaactgtgtatcgagactctgcaa

SEQ ID NO: 117831 - DNA, 25 bp, Saccharomyces pastorianus
aacgcagagctcaggtggacgaaga

SEQ ID NO: 117832 - DNA, 25 bp, Saccharomyces pastorianus
tttgcctccattcaaattgctaccg

SEQ ID NO: 117833 - DNA, 25 bp, Saccharomyces pastorianus
tgtccgccgacctacatagagaatt

SEQ ID NO: 117834 - DNA, 25 bp, Saccharomyces pastorianus
attcatggtcccacataagttggtt

SEQ ID NO: 117835 - DNA, 25 bp, Saccharomyces pastorianus
gagcacgattgttccgatgtcggta

SEQ ID NO: 117836 - DNA, 25 bp, Saccharomyces pastorianus
attttgagtgaatcgctcgcgagac

SEQ ID NO: 117837 - DNA, 25 bp, Saccharomyces pastorianus
gactcgcgattgtatcatggtagca

SEQ ID NO: 117838 - DNA, 25 bp, Saccharomyces pastorianus
gattgtcccaaagggtactcatcat

SEQ ID NO: 117839 - DNA, 25 bp, Saccharomyces pastorianus
gcattgttggtcgaggttaaatccc

SEQ ID NO: 117840 - DNA, 25 bp, Saccharomyces pastorianus
ggaaatccttgcctggttcaatgac

SEQ ID NO: 117841 - DNA, 25 bp, Saccharomyces pastorianus
aaggctctggaggatgttactggac

SEQ ID NO: 117842 - DNA, 25 bp, Saccharomyces pastorianus
ttcaagggatcgatctgactcgcga

SEQ ID NO: 117843 - DNA, 25 bp, Saccharomyces pastorianus
gaccatgtacctcccatatcaaggg

SEQ ID NO: 117844 - DNA, 25 bp, Saccharomyces pastorianus
agatctcatctcatggtttactaca

SEQ ID NO: 117845 - DNA, 25 bp, Saccharomyces pastorianus
actacagtggccaatttcgcttgtt

SEQ ID NO: 117846 - DNA, 25 bp, Saccharomyces pastorianus
tgtgcagcgatacaatcagttacgt

SEQ ID NO: 117847 - DNA, 25 bp, Saccharomyces pastorianus
aaacgatggtctttcaccagtctca

SEQ ID NO: 117848 - DNA, 25 bp, Saccharomyces pastorianus
ccatccattctgcaaagggtttaga

SEQ ID NO: 117849 - DNA, 25 bp, Saccharomyces pastorianus
caggcattacaaactaccggtccgg

SEQ ID NO: 117850 - DNA, 25 bp, Saccharomyces pastorianus
gagactggtcagtaaatcatcacca

SEQ ID NO: 117851 - DNA, 25 bp, Saccharomyces pastorianus
taaaactatctaccatccattctgc

SEQ ID NO: 117852 - DNA, 25 bp, Saccharomyces pastorianus
ggagcatgtccaatttcccaatgga

SEQ ID NO: 117853 - DNA, 25 bp, Saccharomyces pastorianus
tcaccagtctcagcaggcattacaa

SEQ ID NO: 117854 - DNA, 25 bp, Saccharomyces pastorianus
acctacttccaatccttaagtgatg

SEQ ID NO: 117855 - DNA, 25 bp, Saccharomyces pastorianus
tgaaccgatctgtatgtgacgttaa

SEQ ID NO: 117856 - DNA, 25 bp, Saccharomyces pastorianus
tttcccaatggatacaaacgccctt

SEQ ID NO: 117857 - DNA, 25 bp, Saccharomyces pastorianus
gttggaacgtacttgcaattggcta

SEQ ID NO: 117858 - DNA, 25 bp, Saccharomyces pastorianus
gaagcaatcatttttacagcggagg

SEQ ID NO: 117859 - DNA, 25 bp, Saccharomyces pastorianus
agtacagtagcaggacacggtttag

SEQ ID NO: 117860 - DNA, 25 bp, Saccharomyces pastorianus
aggaccatggagctatattcgaact

SEQ ID NO: 117861 - DNA, 25 bp, Saccharomyces pastorianus
atgttactagcctccaacctagaag

SEQ ID NO: 117862 - DNA, 25 bp, Saccharomyces pastorianus
atcggtttgacccatatgagaattc

SEQ ID NO: 117863 - DNA, 25 bp, Saccharomyces pastorianus
aggcggattccatgactgctggtgc

SEQ ID NO: 117864 - DNA, 25 bp, Saccharomyces pastorianus
caaaattgttgattctcctcaccct

SEQ ID NO: 117865 - DNA, 25 bp, Saccharomyces pastorianus
aacaagatcattgagccgctgcaaa

SEQ ID NO: 117866 - DNA, 25 bp, Saccharomyces pastorianus
ttccgcgttaccaagaacttagcac

SEQ ID NO: 117867 - DNA, 25 bp, Saccharomyces pastorianus
atcgtcacaacatctttccgcgtta

SEQ ID NO: 117868 - DNA, 25 bp, Saccharomyces pastorianus
tgcgatacattgttggcggcattgt

SEQ ID NO: 117869 - DNA, 25 bp, Saccharomyces pastorianus
attcctacgcgaagattgcccattg

SEQ ID NO: 117870 - DNA, 25 bp, Saccharomyces pastorianus
aacgcacgtcgtgcaactcatgctg

SEQ ID NO: 117871 - DNA, 25 bp, Saccharomyces pastorianus
gtaagcttgtctaaccaggtcacca

SEQ ID NO: 117872 - DNA, 25 bp, Saccharomyces pastorianus
gaagggcgaaccattttgcagaaat

SEQ ID NO: 117873 - DNA, 25 bp, Saccharomyces pastorianus
accagggcatactccgcgaatagaa

SEQ ID NO: 117874 - DNA, 25 bp, Saccharomyces pastorianus
agcgttttaccacccagaaagctgg

SEQ ID NO: 117875 - DNA, 25 bp, Saccharomyces pastorianus
aaaagatgggcattcctacgcgaag

SEQ ID NO: 117876 - DNA, 25 bp, Saccharomyces pastorianus
aaaggtggcctcattcgacaaaaga

SEQ ID NO: 117877 - DNA, 25 bp, Saccharomyces pastorianus
gctagaacccgggatgcgatacatt

SEQ ID NO: 117878 - DNA, 25 bp, Saccharomyces pastorianus
gattgcccattgacgagtacatcaa

SEQ ID NO: 117879 - DNA, 25 bp, Saccharomyces pastorianus
atgcatgttgttgcacatatcgaga

SEQ ID NO: 117880 - DNA, 25 bp, Saccharomyces pastorianus
attactgaagaagcttcccagcata

SEQ ID NO: 117881 - DNA, 25 bp, Saccharomyces pastorianus
ggagggtttacatgacccaagcaaa

SEQ ID NO: 117882 - DNA, 25 bp, Saccharomyces pastorianus
tctagcttgggcaattgctgaacat

SEQ ID NO: 117883 - DNA, 25 bp, Saccharomyces pastorianus
atgatggttttggtctagcttgggc

SEQ ID NO: 117884 - DNA, 25 bp, Saccharomyces pastorianus
aaaagctaagctatcattacaggaa

SEQ ID NO: 117885 - DNA, 25 bp, Saccharomyces pastorianus
ggatgtttcgctttgtttgcaactc

SEQ ID NO: 117886 - DNA, 25 bp, Saccharomyces pastorianus
gtttgcaactcactttcatgaattg

SEQ ID NO: 117887 - DNA, 25 bp, Saccharomyces pastorianus
gatgaggacatcacgttgttataca

SEQ ID NO: 117888 - DNA, 25 bp, Saccharomyces pastorianus
atcagtcttttggtattcatgttgc

SEQ ID NO: 117889 - DNA, 25 bp, Saccharomyces pastorianus
actagggcgtggtactagtacttat

SEQ ID NO: 117890 - DNA, 25 bp, Saccharomyces pastorianus
gagacctatcgccatcttcgaatag

SEQ ID NO: 117891 - DNA, 25 bp, Saccharomyces pastorianus
gcttttagagccttattgcctttag

SEQ ID NO: 117892 - DNA, 25 bp, Saccharomyces pastorianus
gaacgattccacgtcaatatttgat

SEQ ID NO: 117893 - DNA, 25 bp, Saccharomyces pastorianus
catatggttctctccattctttaca

SEQ ID NO: 117894 - DNA, 25 bp, Saccharomyces pastorianus
atcccatccatagttctgataccgg

SEQ ID NO: 117895 - DNA, 25 bp, Saccharomyces pastorianus
tttccagtgatctagagacccctga

SEQ ID NO: 117896 - DNA, 25 bp, Saccharomyces pastorianus
aattcgttcggacctaacatctctt

SEQ ID NO: 117897 - DNA, 25 bp, Saccharomyces pastorianus
gataccggagatactctttccagtg

SEQ ID NO: 117898 - DNA, 25 bp, Saccharomyces pastorianus
aacgaagccgatctcgccgatgatg

SEQ ID NO: 117899 - DNA, 25 bp, Saccharomyces pastorianus
gatgactcatctttgtacccaattc

SEQ ID NO: 117900 - DNA, 25 bp, Saccharomyces pastorianus
taacatctcttgtttatcccatcca

SEQ ID NO: 117901 - DNA, 25 bp, Saccharomyces pastorianus
aactgtgaattcttcgggccaactt

SEQ ID NO: 117902 - DNA, 25 bp, Saccharomyces pastorianus
gaactggtcaaacctcgtactaagc

SEQ ID NO: 117903 - DNA, 25 bp, Saccharomyces pastorianus
ttacgttctcaacagcttctgtgta

SEQ ID NO: 117904 - DNA, 25 bp, Saccharomyces pastorianus
gtaccaactggatacgtctagggtt

SEQ ID NO: 117905 - DNA, 25 bp, Saccharomyces pastorianus
taccgacttgcctggatttccaata

SEQ ID NO: 117906 - DNA, 25 bp, Saccharomyces pastorianus
tactaagcccttagttcttccgaag

SEQ ID NO: 117907 - DNA, 25 bp, Saccharomyces pastorianus
agacgtggttcaacaatcctaagta

SEQ ID NO: 117908 - DNA, 25 bp, Saccharomyces pastorianus
cattcgtctacaattgagcctatta

SEQ ID NO: 117909 - DNA, 25 bp, Saccharomyces pastorianus
gggccaactttatgtaccgacttgc

SEQ ID NO: 117910 - DNA, 25 bp, Saccharomyces pastorianus
ttccgaagctcgattggtcgtctat

SEQ ID NO: 117911 - DNA, 25 bp, Saccharomyces pastorianus
agatgataccccaattaacttcctt

SEQ ID NO: 117912 - DNA, 25 bp, Saccharomyces pastorianus
gtcaataagagcgacctcatgctat

SEQ ID NO: 117913 - DNA, 25 bp, Saccharomyces pastorianus
gagattcatcaactcattgctggag

SEQ ID NO: 117914 - DNA, 25 bp, Saccharomyces pastorianus
gatccgtgtggaagaacgattacaa

SEQ ID NO: 117915 - DNA, 25 bp, Saccharomyces pastorianus
gcgatttgcaggcatttgctcggca

SEQ ID NO: 117916 - DNA, 25 bp, Saccharomyces pastorianus
agcgacctcatgctatacctgagaa

SEQ ID NO: 117917 - DNA, 25 bp, Saccharomyces pastorianus
gctggagttagcatatctacaattg

SEQ ID NO: 117918 - DNA, 25 bp, Saccharomyces pastorianus
aactgaaggctaggctgtggatccg

SEQ ID NO: 117919 - DNA, 25 bp, Saccharomyces pastorianus
acaacaggtgttgtcctctgaggac

SEQ ID NO: 117920 - DNA, 25 bp, Saccharomyces pastorianus
catttgctcggcatgccggtagaga

SEQ ID NO: 117921 - DNA, 25 bp, Saccharomyces pastorianus
atgccggtagagatgtggtcaataa

SEQ ID NO: 117922 - DNA, 25 bp, Saccharomyces pastorianus
gacgatgaagatagagcccaactga

SEQ ID NO: 117923 - DNA, 25 bp, Saccharomyces pastorianus
agtctccaatcaaggttgtcggctt

SEQ ID NO: 117924 - DNA, 25 bp, Saccharomyces pastorianus
attgtcggtgctgttctaaaggcca

SEQ ID NO: 117925 - DNA, 25 bp, Saccharomyces pastorianus
atggtggtgctcacggtgtcatcaa

SEQ ID NO: 117926 - DNA, 25 bp, Saccharomyces pastorianus
agtctgctaacttgatggccggtca

SEQ ID NO: 117927 - DNA, 25 bp, Saccharomyces pastorianus
atccatcggtggtgaagtcttcatt

SEQ ID NO: 117928 - DNA, 25 bp, Saccharomyces pastorianus
gaagcttccaccagatacgttagag

SEQ ID NO: 117929 - DNA, 25 bp, Saccharomyces pastorianus
tctattgttggttcttacgtcggta

SEQ ID NO: 117930 - DNA, 25 bp, Saccharomyces pastorianus
aagtcgtcaagtccatctctattgt

SEQ ID NO: 117931 - DNA, 25 bp, Saccharomyces pastorianus
agctggtgccaagtgttgttctgat

SEQ ID NO: 117932 - DNA, 25 bp, Saccharomyces pastorianus
tgaagtcgccccagttttgtgtgct

SEQ ID NO: 117933 - DNA, 25 bp, Saccharomyces pastorianus
ggcttgtctaccttgccagaaattt

SEQ ID NO: 117934 - DNA, 25 bp, Saccharomyces pastorianus
aatgacaccagttgtcgtggtcgtc

SEQ ID NO: 117935 - DNA, 25 bp, Saccharomyces pastorianus
ggctcattcttctagtatactcatg

SEQ ID NO: 117936 - DNA, 25 bp, Saccharomyces pastorianus
tattgttcgcactaccggcaaactc

SEQ ID NO: 117937 - DNA, 25 bp, Saccharomyces pastorianus
atgcgcgtctcaccttcaaggtcat

SEQ ID NO: 117938 - DNA, 25 bp, Saccharomyces pastorianus
caaactcgcgtctcgcaagtcttgg

SEQ ID NO: 117939 - DNA, 25 bp, Saccharomyces pastorianus
atggtcgctctattgttcgcactac

SEQ ID NO: 117940 - DNA, 25 bp, Saccharomyces pastorianus
cactcaggttctttcggcaacttaa

SEQ ID NO: 117941 - DNA, 25 bp, Saccharomyces pastorianus
tcaaggtcatggtcgctctattgtt

SEQ ID NO: 117942 - DNA, 25 bp, Saccharomyces pastorianus
ttgtcgtggtcgtcatcatcgcaac

SEQ ID NO: 117943 - DNA, 25 bp, Saccharomyces pastorianus
tgttgcaaatgcactcaggttcttt

SEQ ID NO: 117944 - DNA, 25 bp, Saccharomyces pastorianus
caagtcttggctcattcttctagta

SEQ ID NO: 117945 - DNA, 25 bp, Saccharomyces pastorianus
tttttgcgcctgcattttccaaggt

SEQ ID NO: 117946 - DNA, 25 bp, Saccharomyces pastorianus
gacgaccacgacaactggtgtcatt

SEQ ID NO: 117947 - DNA, 25 bp, Saccharomyces pastorianus
gttgcgatgatgacgaccacgacaa

SEQ ID NO: 117948 - DNA, 25 bp, Saccharomyces pastorianus
aattgcacaatcatgctgactctgt

SEQ ID NO: 117949 - DNA, 25 bp, Saccharomyces pastorianus
tttccaaggtttaccctgcgctaag

SEQ ID NO: 117950 - DNA, 25 bp, Saccharomyces pastorianus
tggagaagccataagaatgccggtt

SEQ ID NO: 117951 - DNA, 25 bp, Saccharomyces pastorianus
gtatttggctttgcggcgccgaaaa

SEQ ID NO: 117952 - DNA, 25 bp, Saccharomyces pastorianus
aatcatgctgactctgtggcggacc

SEQ ID NO: 117953 - DNA, 25 bp, Saccharomyces pastorianus
aaaacgagtttacgcaattgcacaa

SEQ ID NO: 117954 - DNA, 25 bp, Saccharomyces pastorianus
atatgatgtatttggctttgcggcg

SEQ ID NO: 117955 - DNA, 25 bp, Saccharomyces pastorianus
ctgtgcccggcggagttttttgcgc

SEQ ID NO: 117956 - DNA, 25 bp, Saccharomyces pastorianus
taaaatctccactagcctcattttc

SEQ ID NO: 117957 - DNA, 25 bp, Saccharomyces pastorianus
gaatcaagcatcatgagcactccct

SEQ ID NO: 117958 - DNA, 25 bp, Saccharomyces pastorianus
agtttccagacaggcagtttccaca

SEQ ID NO: 117959 - DNA, 25 bp, Saccharomyces pastorianus
aaacacgccaatgtcaggtgccgaa

SEQ ID NO: 117960 - DNA, 25 bp, Saccharomyces pastorianus
ctcattttcgacaggcagtttccag

SEQ ID NO: 117961 - DNA, 25 bp, Saccharomyces pastorianus
agcactccctttctaggcgagacag

SEQ ID NO: 117962 - DNA, 25 bp, Saccharomyces pastorianus
ttttctagccaaatctccgaggtat

SEQ ID NO: 117963 - DNA, 25 bp, Saccharomyces pastorianus
ggataactcgctgcactttatattg

SEQ ID NO: 117964 - DNA, 25 bp, Saccharomyces pastorianus
gtttccacactttgcaagatcctac

SEQ ID NO: 117965 - DNA, 25 bp, Saccharomyces pastorianus
gatcctactaatgttttccgggcag

SEQ ID NO: 117966 - DNA, 25 bp, Saccharomyces pastorianus
ggtaaatgtgctgactccaatgaaa

SEQ ID NO: 117967 - DNA, 25 bp, Saccharomyces pastorianus
aatacctcggagatttggctagaaa

SEQ ID NO: 117968 - DNA, 25 bp, Saccharomyces pastorianus
tgatactgaatacctcggagatttg

SEQ ID NO: 117969 - DNA, 25 bp, Saccharomyces pastorianus
tttgatactgaatacctcggagatt

SEQ ID NO: 117970 - DNA, 25 bp, Saccharomyces pastorianus
acctcggagatttggctagaaaatt

SEQ ID NO: 117971 - DNA, 25 bp, Saccharomyces pastorianus
aattcaaatgtacaatttcctggaa

SEQ ID NO: 117972 - DNA, 25 bp, Saccharomyces pastorianus
caaatgtacaatttcctggaattat

SEQ ID NO: 117973 - DNA, 25 bp, Saccharomyces pastorianus
aatttcctggaattatgatattcgt

SEQ ID NO: 117974 - DNA, 25 bp, Saccharomyces pastorianus
gtcccattttgatactgaatacctc

SEQ ID NO: 117975 - DNA, 25 bp, Saccharomyces pastorianus
cattttgatactgaatacctcggag

SEQ ID NO: 117976 - DNA, 25 bp, Saccharomyces pastorianus
tattgtacaatataaagtgcagcga

SEQ ID NO: 117977 - DNA, 25 bp, Saccharomyces pastorianus
tatgatattcgttttattgtacaat

SEQ ID NO: 117978 - DNA, 25 bp, Saccharomyces pastorianus
gccggctccactatcgagattgaaa

SEQ ID NO: 117979 - DNA, 25 bp, Saccharomyces pastorianus
gtacatccatttcactctcttatga

SEQ ID NO: 117980 - DNA, 25 bp, Saccharomyces pastorianus
gcagaaagtttacaggcatcccaag

SEQ ID NO: 117981 - DNA, 25 bp, Saccharomyces pastorianus
ggcgataagccaaccacgcaaatta

SEQ ID NO: 117982 - DNA, 25 bp, Saccharomyces pastorianus
tgaagtttactgacgctggcgataa

SEQ ID NO: 117983 - DNA, 25 bp, Saccharomyces pastorianus
gaataccgatactttccatacgcgc

SEQ ID NO: 117984 - DNA, 25 bp, Saccharomyces pastorianus
ggaaatcgcctctgaccatttgaaa

SEQ ID NO: 117985 - DNA, 25 bp, Saccharomyces pastorianus
aggccaccttcaagattatctgcag

SEQ ID NO: 117986 - DNA, 25 bp, Saccharomyces pastorianus
gagccattttactcctttcaaattg

SEQ ID NO: 117987 - DNA, 25 bp, Saccharomyces pastorianus
tacgcgcttgatttagaggccggct

SEQ ID NO: 117988 - DNA, 25 bp, Saccharomyces pastorianus
gcaagtatggctcttctccaatgat

SEQ ID NO: 117989 - DNA, 25 bp, Saccharomyces pastorianus
acacctcccattcaggaagttgtat

SEQ ID NO: 117990 - DNA, 25 bp, Saccharomyces pastorianus
gtcgtcttcgatgaatttgttaagc

SEQ ID NO: 117991 - DNA, 25 bp, Saccharomyces pastorianus
ggcacgctttaaagcatgatctcga

SEQ ID NO: 117992 - DNA, 25 bp, Saccharomyces pastorianus
gagtctgcgttagctagaatatcaa

SEQ ID NO: 117993 - DNA, 25 bp, Saccharomyces pastorianus
gtagaattcttgtagggcacgcttt

SEQ ID NO: 117994 - DNA, 25 bp, Saccharomyces pastorianus
tcactactcagggacacttcaagac

SEQ ID NO: 117995 - DNA, 25 bp, Saccharomyces pastorianus
agtcgaagatgctcgtgccaccatg

SEQ ID NO: 117996 - DNA, 25 bp, Saccharomyces pastorianus
tgtgaatttgtaggcgttggtcccg

SEQ ID NO: 117997 - DNA, 25 bp, Saccharomyces pastorianus
gaagcattgatgttatcccacccaa

SEQ ID NO: 117998 - DNA, 25 bp, Saccharomyces pastorianus
aaggtgagcattcttcagtcgaaga

SEQ ID NO: 117999 - DNA, 25 bp, Saccharomyces pastorianus
gtcccgagggtaaagagtctgcgtt

SEQ ID NO: 118000 - DNA, 25 bp, Saccharomyces pastorianus
actgctaggtttattggttgttcca

SEQ ID NO: 118001 - DNA, 25 bp, Saccharomyces pastorianus
gggacattaggactgctaggtttat

SEQ ID NO: 118002 - DNA, 25 bp, Saccharomyces pastorianus
gggaaagctattcctccacaccaac

SEQ ID NO: 118003 - DNA, 25 bp, Saccharomyces pastorianus
caaaacagacaacaaagacgaggaa

SEQ ID NO: 118004 - DNA, 25 bp, Saccharomyces pastorianus
aaagcgcaaagccaaaaacagtcga

SEQ ID NO: 118005 - DNA, 25 bp, Saccharomyces pastorianus
gcaaagccaaaaacagtcgacatca

SEQ ID NO: 118006 - DNA, 25 bp, Saccharomyces pastorianus
aacagtcgacatcaaaacagacaac

SEQ ID NO: 118007 - DNA, 25 bp, Saccharomyces pastorianus
gccattgggacattaggactgctag

SEQ ID NO: 118008 - DNA, 25 bp, Saccharomyces pastorianus
tccacaccaactagccattgggaca

SEQ ID NO: 118009 - DNA, 25 bp, Saccharomyces pastorianus
tgctgcttatcatttcatggggaaa

SEQ ID NO: 118010 - DNA, 25 bp, Saccharomyces pastorianus
ggactgctaggtttattggttgttc

SEQ ID NO: 118011 - DNA, 25 bp, Saccharomyces pastorianus
atcacgtcatgtccttcagtattgt

SEQ ID NO: 118012 - DNA, 25 bp, Saccharomyces pastorianus
tttgatcaacgtttcgaatcctccc

SEQ ID NO: 118013 - DNA, 25 bp, Saccharomyces pastorianus
tatggttatccaagccgccaaatgg

SEQ ID NO: 118014 - DNA, 25 bp, Saccharomyces pastorianus
aagccatttattgatcacgtcatgt

SEQ ID NO: 118015 - DNA, 25 bp, Saccharomyces pastorianus
cgtccggtattgtcgtttgatcaac

SEQ ID NO: 118016 - DNA, 25 bp, Saccharomyces pastorianus
ggccctaggtttgttatgactgtca

SEQ ID NO: 118017 - DNA, 25 bp, Saccharomyces pastorianus
gctagtgcataattttggtgtacca

SEQ ID NO: 118018 - DNA, 25 bp, Saccharomyces pastorianus
aacaacaagctgctgcggaggcaaa

SEQ ID NO: 118019 - DNA, 25 bp, Saccharomyces pastorianus
atatgagatctcacacagtactaag

SEQ ID NO: 118020 - DNA, 25 bp, Saccharomyces pastorianus
ataatgttctattctttgaggccag

SEQ ID NO: 118021 - DNA, 25 bp, Saccharomyces pastorianus
gtttcgccaaacgtcgtaagagctc

SEQ ID NO: 118022 - DNA, 25 bp, Saccharomyces pastorianus
cgatgaacctgcaagaccactggga

SEQ ID NO: 118023 - DNA, 25 bp, Saccharomyces pastorianus
aaatacctctaacgctggtgatgac

SEQ ID NO: 118024 - DNA, 25 bp, Saccharomyces pastorianus
tatagcggccaatgcggccacgaat

SEQ ID NO: 118025 - DNA, 25 bp, Saccharomyces pastorianus
cgtttgtatcctatttcatctctca

SEQ ID NO: 118026 - DNA, 25 bp, Saccharomyces pastorianus
gataagggcctgttaccgggattag

SEQ ID NO: 118027 - DNA, 25 bp, Saccharomyces pastorianus
ggttcactgcccattgttttaagct

SEQ ID NO: 118028 - DNA, 25 bp, Saccharomyces pastorianus
aagcctaccgcttcgtggttcaagc

SEQ ID NO: 118029 - DNA, 25 bp, Saccharomyces pastorianus
aaatgggttaattctcctgcttata

SEQ ID NO: 118030 - DNA, 25 bp, Saccharomyces pastorianus
aatacaggcaactctgggcctacaa

SEQ ID NO: 118031 - DNA, 25 bp, Saccharomyces pastorianus
acccacgagggctaacgttgctata

SEQ ID NO: 118032 - DNA, 25 bp, Saccharomyces pastorianus
gatgacgagcctggtgccgatgaac

SEQ ID NO: 118033 - DNA, 25 bp, Saccharomyces pastorianus
gcacaatatgtttccagcactcaca

SEQ ID NO: 118034 - DNA, 25 bp, Saccharomyces pastorianus
gggacatatactattgggccacaaa

SEQ ID NO: 118035 - DNA, 25 bp, Saccharomyces pastorianus
atcttggagacggacttgctgctat

SEQ ID NO: 118036 - DNA, 25 bp, Saccharomyces pastorianus
tgggttcgctgccaaatatttgaag

SEQ ID NO: 118037 - DNA, 25 bp, Saccharomyces pastorianus
gaaaagagctcggttgatacatcaa

SEQ ID NO: 118038 - DNA, 25 bp, Saccharomyces pastorianus
ttatcaactctcaaacagggtccgc

SEQ ID NO: 118039 - DNA, 25 bp, Saccharomyces pastorianus
agagaactaacgagccattggacaa

SEQ ID NO: 118040 - DNA, 25 bp, Saccharomyces pastorianus
aacagggtccgctgcatggtcgtgc

SEQ ID NO: 118041 - DNA, 25 bp, Saccharomyces pastorianus
tgtttccagcactcacaaagacact

SEQ ID NO: 118042 - DNA, 25 bp, Saccharomyces pastorianus
aaagacactgtcgttgcaaggctac

SEQ ID NO: 118043 - DNA, 25 bp, Saccharomyces pastorianus
gacttgctgctatctgggttcgctg

SEQ ID NO: 118044 - DNA, 25 bp, Saccharomyces pastorianus
ttacttgacaagaccattgcccagc

SEQ ID NO: 118045 - DNA, 25 bp, Saccharomyces pastorianus
aatcgggtctgaatttgcgcaactg

SEQ ID NO: 118046 - DNA, 25 bp, Saccharomyces pastorianus
agactctttgtccaggttaacagca

SEQ ID NO: 118047 - DNA, 25 bp, Saccharomyces pastorianus
ctcatctcagatttccacagttagt

SEQ ID NO: 118048 - DNA, 25 bp, Saccharomyces pastorianus
gatcctttgatatcgacacactaaa

SEQ ID NO: 118049 - DNA, 25 bp, Saccharomyces pastorianus
aaatcatacctctacttcgacaaac

SEQ ID NO: 118050 - DNA, 25 bp, Saccharomyces pastorianus
ttgcccagcacacccaatgaggata

SEQ ID NO: 118051 - DNA, 25 bp, Saccharomyces pastorianus
aatcttactattctgcggcaacgag

SEQ ID NO: 118052 - DNA, 25 bp, Saccharomyces pastorianus
gaaacgtgccctggagagactagta

SEQ ID NO: 118053 - DNA, 25 bp, Saccharomyces pastorianus
ggtggccactataagaactcatctc

SEQ ID NO: 118054 - DNA, 25 bp, Saccharomyces pastorianus
agcagacatggttcttgatccggac

SEQ ID NO: 118055 - DNA, 25 bp, Saccharomyces pastorianus
tgccatcgcgatttcataagaccat

SEQ ID NO: 118056 - DNA, 25 bp, Saccharomyces pastorianus
ttgaactaccattatgtccctactg

SEQ ID NO: 118057 - DNA, 25 bp, Saccharomyces pastorianus
ggttacacatgcagagtttgactta

SEQ ID NO: 118058 - DNA, 25 bp, Saccharomyces pastorianus
cacatgttccgcagattttgatcaa

SEQ ID NO: 118059 - DNA, 25 bp, Saccharomyces pastorianus
aagtggctcctgtgtctgaaattgt

SEQ ID NO: 118060 - DNA, 25 bp, Saccharomyces pastorianus
acattttttggcgaggccctgccat

SEQ ID NO: 118061 - DNA, 25 bp, Saccharomyces pastorianus
gacgtggccagtctcgtagctaaaa

SEQ ID NO: 118062 - DNA, 25 bp, Saccharomyces pastorianus
tatggtaccttcacatgttccgcag

SEQ ID NO: 118063 - DNA, 25 bp, Saccharomyces pastorianus
aaacctgttgggattctgtgatgac

SEQ ID NO: 118064 - DNA, 25 bp, Saccharomyces pastorianus
agtgcaatgtcacggttcattcgcc

SEQ ID NO: 118065 - DNA, 25 bp, Saccharomyces pastorianus
actgcatcttgtgtgacttgccatt

SEQ ID NO: 118066 - DNA, 25 bp, Saccharomyces pastorianus
gcagacaggcaccattgtcaacgat

SEQ ID NO: 118067 - DNA, 25 bp, Saccharomyces pastorianus
gcaattctggtagcaatgacacgtt

SEQ ID NO: 118068 - DNA, 25 bp, Saccharomyces pastorianus
gagtatcattcccaaagacttcttt

SEQ ID NO: 118069 - DNA, 25 bp, Saccharomyces pastorianus
attccagctggcactgatcctgggt

SEQ ID NO: 118070 - DNA, 25 bp, Saccharomyces pastorianus
acgttaagtgaatccactcccggtg

SEQ ID NO: 118071 - DNA, 25 bp, Saccharomyces pastorianus
aacaagggccaaattctcacacagg

SEQ ID NO: 118072 - DNA, 25 bp, Saccharomyces pastorianus
aagaggttgagctccttcgagtacg

SEQ ID NO: 118073 - DNA, 25 bp, Saccharomyces pastorianus
gaccgctggccgcaacaaatgatga

SEQ ID NO: 118074 - DNA, 25 bp, Saccharomyces pastorianus
atttcaagaatgaccgcaagcgcag

SEQ ID NO: 118075 - DNA, 25 bp, Saccharomyces pastorianus
ctgggtcctgcggtgctaatttcaa

SEQ ID NO: 118076 - DNA, 25 bp, Saccharomyces pastorianus
gcttgggttgtccagcaaggccaaa

SEQ ID NO: 118077 - DNA, 25 bp, Saccharomyces pastorianus
aagaatcccgtcgtggtgcgatagg

SEQ ID NO: 118078 - DNA, 25 bp, Saccharomyces pastorianus
agtgccgttatccttacatatcgaa

SEQ ID NO: 118079 - DNA, 25 bp, Saccharomyces pastorianus
ggtactgcggttggctagttactaa

SEQ ID NO: 118080 - DNA, 25 bp, Saccharomyces pastorianus
gtccctaggtccaatgctctattat

SEQ ID NO: 118081 - DNA, 25 bp, Saccharomyces pastorianus
tggagctctggcctgattggacaaa

SEQ ID NO: 118082 - DNA, 25 bp, Saccharomyces pastorianus
gtctacagggatgccagtgccgtta

SEQ ID NO: 118083 - DNA, 25 bp, Saccharomyces pastorianus
aagctatgcagtgccaactttcgca

SEQ ID NO: 118084 - DNA, 25 bp, Saccharomyces pastorianus
agataacatttccaccgacttacaa

SEQ ID NO: 118085 - DNA, 25 bp, Saccharomyces pastorianus
tcatcaacccgttaatcttaccgta

SEQ ID NO: 118086 - DNA, 25 bp, Saccharomyces pastorianus
gaccactttttctttctaggcgatt

SEQ ID NO: 118087 - DNA, 25 bp, Saccharomyces pastorianus
gattattcgtccaccacaacgttaa

SEQ ID NO: 118088 - DNA, 25 bp, Saccharomyces pastorianus
atctctcattaaaacagcgggacat

SEQ ID NO: 118089 - DNA, 25 bp, Saccharomyces pastorianus
acgctggatatctacaaatggcccg

SEQ ID NO: 118090 - DNA, 25 bp, Saccharomyces pastorianus
ggcgtctttaagagacatcgtctta

SEQ ID NO: 118091 - DNA, 25 bp, Saccharomyces pastorianus
attcttgatattttcggtttccatg

SEQ ID NO: 118092 - DNA, 25 bp, Saccharomyces pastorianus
tgcgggtctcctagctttagagtac

SEQ ID NO: 118093 - DNA, 25 bp, Saccharomyces pastorianus
gaatgtcgtgcggaagtaattgcca

SEQ ID NO: 118094 - DNA, 25 bp, Saccharomyces pastorianus
attgatagatcaacggtgacaccgg

SEQ ID NO: 118095 - DNA, 25 bp, Saccharomyces pastorianus
tggacagttagctggcccatttgaa

SEQ ID NO: 118096 - DNA, 25 bp, Saccharomyces pastorianus
gtgacaccggatttggcgtctttaa

SEQ ID NO: 118097 - DNA, 25 bp, Saccharomyces pastorianus
atatgatgaaactccacagggtatg

SEQ ID NO: 118098 - DNA, 25 bp, Saccharomyces pastorianus
ggtttccatgatgtcgaatctcaag

SEQ ID NO: 118099 - DNA, 25 bp, Saccharomyces pastorianus
atagttgggcatggcagctctgtaa

SEQ ID NO: 118100 - DNA, 25 bp, Saccharomyces pastorianus
agtatgcctgtgttgcaaacctgga

SEQ ID NO: 118101 - DNA, 25 bp, Saccharomyces pastorianus
tgttgatattcccaacggcattccg

SEQ ID NO: 118102 - DNA, 25 bp, Saccharomyces pastorianus
gcgtctgccagagagtgagtctctt

SEQ ID NO: 118103 - DNA, 25 bp, Saccharomyces pastorianus
aataatgttgttctgtctaccgcca

SEQ ID NO: 118104 - DNA, 25 bp, Saccharomyces pastorianus
gctctgtaagatctctgctgaaagt

SEQ ID NO: 118105 - DNA, 25 bp, Saccharomyces pastorianus
gaagctgcaggacacaagatttgaa

SEQ ID NO: 118106 - DNA, 25 bp, Saccharomyces pastorianus
aacctggaggttaaatgagcgtcat

SEQ ID NO: 118107 - DNA, 25 bp, Saccharomyces pastorianus
tgagcgtcattacggcgcatggcaa

SEQ ID NO: 118108 - DNA, 25 bp, Saccharomyces pastorianus
gtctaccgccaacaaaatcagtcaa

SEQ ID NO: 118109 - DNA, 25 bp, Saccharomyces pastorianus
agaaggctaatgagcgtctgccaga

SEQ ID NO: 118110 - DNA, 25 bp, Saccharomyces pastorianus
gtaaagtcaccgcacctgaagggtc

SEQ ID NO: 118111 - DNA, 25 bp, Saccharomyces pastorianus
taccctccagagcaacttgacactt

SEQ ID NO: 118112 - DNA, 25 bp, Saccharomyces pastorianus
tgaagggtccgtttaccacgaatgg

SEQ ID NO: 118113 - DNA, 25 bp, Saccharomyces pastorianus
gagaggacctgcattaagagcttac

SEQ ID NO: 118114 - DNA, 25 bp, Saccharomyces pastorianus
gaaacttacgcatcttcatggtatc

SEQ ID NO: 118115 - DNA, 25 bp, Saccharomyces pastorianus
aagccacactgggattcctatatta

SEQ ID NO: 118116 - DNA, 25 bp, Saccharomyces pastorianus
gagctagtcattgttggaggtgttc

SEQ ID NO: 118117 - DNA, 25 bp, Saccharomyces pastorianus
aagaattggttgcatcccttactcc

SEQ ID NO: 118118 - DNA, 25 bp, Saccharomyces pastorianus
ggtgttcgtactgaaatgggtcaac

SEQ ID NO: 118119 - DNA, 25 bp, Saccharomyces pastorianus
agagcttactctcgttactttaacg

SEQ ID NO: 118120 - DNA, 25 bp, Saccharomyces pastorianus
atcccttactccttgtttgatgggt

SEQ ID NO: 118121 - DNA, 25 bp, Saccharomyces pastorianus
ttgggccaggtcacataatcgtagt

SEQ ID NO: 118122 - DNA, 25 bp, Saccharomyces pastorianus
gagaggatcgatttgcgtctaccaa

SEQ ID NO: 118123 - DNA, 25 bp, Saccharomyces pastorianus
ggagcaacggcgacatgctacagaa

SEQ ID NO: 118124 - DNA, 25 bp, Saccharomyces pastorianus
aacatatcccactaggccgttgggc

SEQ ID NO: 118125 - DNA, 25 bp, Saccharomyces pastorianus
cgtattccggctccagcgatgtcaa

SEQ ID NO: 118126 - DNA, 25 bp, Saccharomyces pastorianus
gcgatagtgacttttacgagcataa

SEQ ID NO: 118127 - DNA, 25 bp, Saccharomyces pastorianus
agaggagcccatgcgagaacatatc

SEQ ID NO: 118128 - DNA, 25 bp, Saccharomyces pastorianus
cgagttctgattccgaagatcgttc

SEQ ID NO: 118129 - DNA, 25 bp, Saccharomyces pastorianus
aggaatttggtattgtctgcactca

SEQ ID NO: 118130 - DNA, 25 bp, Saccharomyces pastorianus
aagatcgttcactttcgtattccgg

SEQ ID NO: 118131 - DNA, 25 bp, Saccharomyces pastorianus
gcgtctaccaatccgtttgctaata

SEQ ID NO: 118132 - DNA, 25 bp, Saccharomyces pastorianus
cactgcccgactacatcaagttaga

SEQ ID NO: 118133 - DNA, 25 bp, Saccharomyces pastorianus
ctagtaagtttgtttgcgggcctga

SEQ ID NO: 118134 - DNA, 25 bp, Saccharomyces pastorianus
taagcatcaacgagtcactgcccga

SEQ ID NO: 118135 - DNA, 25 bp, Saccharomyces pastorianus
gctggacccagaatgcgctagtaag

SEQ ID NO: 118136 - DNA, 25 bp, Saccharomyces pastorianus
aaatactattacaccctgcacgtga

SEQ ID NO: 118137 - DNA, 25 bp, Saccharomyces pastorianus
gagttctcgatgaccttttttacca

SEQ ID NO: 118138 - DNA, 25 bp, Saccharomyces pastorianus
atacccgtatttgacatttcccaag

SEQ ID NO: 118139 - DNA, 25 bp, Saccharomyces pastorianus
gacaacttggacgttcttctacata

SEQ ID NO: 118140 - DNA, 25 bp, Saccharomyces pastorianus
gaaatatatgtcaactcggcccaag

SEQ ID NO: 118141 - DNA, 25 bp, Saccharomyces pastorianus
agactccgatttatcatttcaccac

SEQ ID NO: 118142 - DNA, 25 bp, Saccharomyces pastorianus
attcacgccatgtggatactcatcc

SEQ ID NO: 118143 - DNA, 25 bp, Saccharomyces pastorianus
gtttttcactagttgtggctcctga

SEQ ID NO: 118144 - DNA, 25 bp, Saccharomyces pastorianus
atcttgcgggcttatttctaatacg

SEQ ID NO: 118145 - DNA, 25 bp, Saccharomyces pastorianus
ggagcttcatttgttacttcttgtt

SEQ ID NO: 118146 - DNA, 25 bp, Saccharomyces pastorianus
tctttttcttgggttgccgacatcc

SEQ ID NO: 118147 - DNA, 25 bp, Saccharomyces pastorianus
gtggctcctgattttgtcatgaatg

SEQ ID NO: 118148 - DNA, 25 bp, Saccharomyces pastorianus
agtagcacttgtccaattattccaa

SEQ ID NO: 118149 - DNA, 25 bp, Saccharomyces pastorianus
tgaattgttctgaactagtcccaga

SEQ ID NO: 118150 - DNA, 25 bp, Saccharomyces pastorianus
gaggctatcgaatcttgcgggctta

SEQ ID NO: 118151 - DNA, 25 bp, Saccharomyces pastorianus
cttatttctaatacgctggcttttc

SEQ ID NO: 118152 - DNA, 25 bp, Saccharomyces pastorianus
atctggtgatagcaccgaggctatc

SEQ ID NO: 118153 - DNA, 25 bp, Saccharomyces pastorianus
gtccaattattccaatcccatacat

SEQ ID NO: 118154 - DNA, 25 bp, Saccharomyces pastorianus
ggttgcgttctatttaacgacgagc

SEQ ID NO: 118155 - DNA, 25 bp, Saccharomyces pastorianus
ggtaaatacatctccgatgctgaga

SEQ ID NO: 118156 - DNA, 25 bp, Saccharomyces pastorianus
tacgtgttaaaaccacagcgggaag

SEQ ID NO: 118157 - DNA, 25 bp, Saccharomyces pastorianus
aagtttcgcaataaaggccccagat

SEQ ID NO: 118158 - DNA, 25 bp, Saccharomyces pastorianus
aaaggccccagatttactcactcaa

SEQ ID NO: 118159 - DNA, 25 bp, Saccharomyces pastorianus
tcttacaacgaaccaatcatcagtg

SEQ ID NO: 118160 - DNA, 25 bp, Saccharomyces pastorianus
agtgagccctctaaatacgtgttaa

SEQ ID NO: 118161 - DNA, 25 bp, Saccharomyces pastorianus
gggtacacaaccactgattacacgt

SEQ ID NO: 118162 - DNA, 25 bp, Saccharomyces pastorianus
cgtcactgggatgcatatattctca

SEQ ID NO: 118163 - DNA, 25 bp, Saccharomyces pastorianus
gaggctggcattaagtgagccctct

SEQ ID NO: 118164 - DNA, 25 bp, Saccharomyces pastorianus
atcccttggatgatacgaagcttgg

SEQ ID NO: 118165 - DNA, 25 bp, Saccharomyces pastorianus
tactgtcgctaattcctattgtagg

SEQ ID NO: 118166 - DNA, 25 bp, Saccharomyces pastorianus
agcaacactgttggtgcagctaaat

SEQ ID NO: 118167 - DNA, 25 bp, Saccharomyces pastorianus
aacaggccaaagattttcagtacga

SEQ ID NO: 118168 - DNA, 25 bp, Saccharomyces pastorianus
tgtccgccggtctactagagttaat

SEQ ID NO: 118169 - DNA, 25 bp, Saccharomyces pastorianus
aaagaacctttacctatttgcagag

SEQ ID NO: 118170 - DNA, 25 bp, Saccharomyces pastorianus
tcagtacgagcattacgcaagtttc

SEQ ID NO: 118171 - DNA, 25 bp, Saccharomyces pastorianus
cctattgtaggaccaatcttggcaa

SEQ ID NO: 118172 - DNA, 25 bp, Saccharomyces pastorianus
gagttaatacccttcttcacaatag

SEQ ID NO: 118173 - DNA, 25 bp, Saccharomyces pastorianus
tcatatgtttcggtatgtccgccgg

SEQ ID NO: 118174 - DNA, 25 bp, Saccharomyces pastorianus
ttacttcactaacattactgtcgct

SEQ ID NO: 118175 - DNA, 25 bp, Saccharomyces pastorianus
gtcaccatatctagcaacactgttg

SEQ ID NO: 118176 - DNA, 25 bp, Saccharomyces pastorianus
tacgggtgcttttttcttcaactca

SEQ ID NO: 118177 - DNA, 25 bp, Saccharomyces pastorianus
ttttctaactcggacttggctggat

SEQ ID NO: 118178 - DNA, 25 bp, Saccharomyces pastorianus
atgcatgcggcgactcattaggtac

SEQ ID NO: 118179 - DNA, 25 bp, Saccharomyces pastorianus
ggtccgaacgatcatcatcactgaa

SEQ ID NO: 118180 - DNA, 25 bp, Saccharomyces pastorianus
aggagcggctgcactaaccgggtat

SEQ ID NO: 118181 - DNA, 25 bp, Saccharomyces pastorianus
gtatcacgggtctactagcaggaga

SEQ ID NO: 118182 - DNA, 25 bp, Saccharomyces pastorianus
ggcagtctctgttaagtttcttgtg

SEQ ID NO: 118183 - DNA, 25 bp, Saccharomyces pastorianus
ttaaggacgttgctctctgtatcac

SEQ ID NO: 118184 - DNA, 25 bp, Saccharomyces pastorianus
agacccatttaacggatctcgcgat

SEQ ID NO: 118185 - DNA, 25 bp, Saccharomyces pastorianus
taagatggtcaaccttactcccagt

SEQ ID NO: 118186 - DNA, 25 bp, Saccharomyces pastorianus
gaggtttagagagccctaccaacgg

SEQ ID NO: 118187 - DNA, 25 bp, Saccharomyces pastorianus
gaccattcgatgtttttgtgggaac

SEQ ID NO: 118188 - DNA, 25 bp, Saccharomyces pastorianus
ggtgtttaaacaggtagtcgctagt

SEQ ID NO: 118189 - DNA, 25 bp, Saccharomyces pastorianus
gatccaaattatggcgaccttgaat

SEQ ID NO: 118190 - DNA, 25 bp, Saccharomyces pastorianus
ggttcggctgcctatatcaagagtg

SEQ ID NO: 118191 - DNA, 25 bp, Saccharomyces pastorianus
tgttgattctcatggctttgtaaaa

SEQ ID NO: 118192 - DNA, 25 bp, Saccharomyces pastorianus
acaccggtccatggagaaactggta

SEQ ID NO: 118193 - DNA, 25 bp, Saccharomyces pastorianus
gggctcttggtgtgctactttatac

SEQ ID NO: 118194 - DNA, 25 bp, Saccharomyces pastorianus
gaacaatggactatgctgcacctga

SEQ ID NO: 118195 - DNA, 25 bp, Saccharomyces pastorianus
ttattacattgaaacaccggtccat

SEQ ID NO: 118196 - DNA, 25 bp, Saccharomyces pastorianus
attaatcgatttcggttcggctgcc

SEQ ID NO: 118197 - DNA, 25 bp, Saccharomyces pastorianus
tgaagtccttggtggttcctcttac

SEQ ID NO: 118198 - DNA, 25 bp, Saccharomyces pastorianus
aaacgatgtctgcaatgctcgcaat

SEQ ID NO: 118199 - DNA, 25 bp, Saccharomyces pastorianus
gagggaattctctcgttacctggag

SEQ ID NO: 118200 - DNA, 25 bp, Saccharomyces pastorianus
ttaagtgtaagactgccgagcatac

SEQ ID NO: 118201 - DNA, 25 bp, Saccharomyces pastorianus
gagttacaggtttggctacctcact

SEQ ID NO: 118202 - DNA, 25 bp, Saccharomyces pastorianus
cgatgcgttagcttctataccagaa

SEQ ID NO: 118203 - DNA, 25 bp, Saccharomyces pastorianus
gtattacgctagatggactgcttaa

SEQ ID NO: 118204 - DNA, 25 bp, Saccharomyces pastorianus
tctcgttacctggagttggacctaa

SEQ ID NO: 118205 - DNA, 25 bp, Saccharomyces pastorianus
attcgcattggttggacacggttac

SEQ ID NO: 118206 - DNA, 25 bp, Saccharomyces pastorianus
tgattgccggcatatgcgtcgatgt

SEQ ID NO: 118207 - DNA, 25 bp, Saccharomyces pastorianus
ctacctcactcactgtggtacgaaa

SEQ ID NO: 118208 - DNA, 25 bp, Saccharomyces pastorianus
gcgtcgatgttcatgtccataggct

SEQ ID NO: 118209 - DNA, 25 bp, Saccharomyces pastorianus
gcgtctaatcagttgggtttaccca

SEQ ID NO: 118210 - DNA, 25 bp, Saccharomyces pastorianus
gttagccatggagaccttaatctta

SEQ ID NO: 118211 - DNA, 25 bp, Saccharomyces pastorianus
gatcattaagcagctcttaccggga

SEQ ID NO: 118212 - DNA, 25 bp, Saccharomyces pastorianus
ggattattttgtacatacgtgctat

SEQ ID NO: 118213 - DNA, 25 bp, Saccharomyces pastorianus
ggtatgcttattcgtatctctaaga

SEQ ID NO: 118214 - DNA, 25 bp, Saccharomyces pastorianus
gattcgctagttgttaattttctgc

SEQ ID NO: 118215 - DNA, 25 bp, Saccharomyces pastorianus
tgcaaggtcagatagttagccatgg

SEQ ID NO: 118216 - DNA, 25 bp, Saccharomyces pastorianus
aaccgatggtgcttccaatgttatt

SEQ ID NO: 118217 - DNA, 25 bp, Saccharomyces pastorianus
gggcatctttgattacgtatggtac

SEQ ID NO: 118218 - DNA, 25 bp, Saccharomyces pastorianus
ggccgtatttggatcgttgtgtcta

SEQ ID NO: 118219 - DNA, 25 bp, Saccharomyces pastorianus
ctaactaagatcctaaccggtaatg

SEQ ID NO: 118220 - DNA, 25 bp, Saccharomyces pastorianus
gaaaggcgagggttccacccatcta

SEQ ID NO: 118221 - DNA, 25 bp, Saccharomyces pastorianus
gaagcgttcaatctttgtaggtaac

SEQ ID NO: 118222 - DNA, 25 bp, Saccharomyces pastorianus
gatccgctacaggtagggttaccaa

SEQ ID NO: 118223 - DNA, 25 bp, Saccharomyces pastorianus
gctcatccagctccgcatgataaga

SEQ ID NO: 118224 - DNA, 25 bp, Saccharomyces pastorianus
gaaacattttgaaccatgtggcgat

SEQ ID NO: 118225 - DNA, 25 bp, Saccharomyces pastorianus
actactattgggaccggcttggata

SEQ ID NO: 118226 - DNA, 25 bp, Saccharomyces pastorianus
gagttgattcagttgctcatccagc

SEQ ID NO: 118227 - DNA, 25 bp, Saccharomyces pastorianus
gctgtcgttttccaagatcatcact

SEQ ID NO: 118228 - DNA, 25 bp, Saccharomyces pastorianus
gggttaccaaaagatcgatagcatt

SEQ ID NO: 118229 - DNA, 25 bp, Saccharomyces pastorianus
ggctgatagagccactttgggccaa

SEQ ID NO: 118230 - DNA, 25 bp, Saccharomyces pastorianus
tctgctcgaatttgaatgctgtcgt

SEQ ID NO: 118231 - DNA, 25 bp, Saccharomyces pastorianus
aaatgaaaagccagctccagtcaga

SEQ ID NO: 118232 - DNA, 25 bp, Saccharomyces pastorianus
tcaagctgttaatgccaagaagaga

SEQ ID NO: 118233 - DNA, 25 bp, Saccharomyces pastorianus
agctccagtcagaacccacatgaga

SEQ ID NO: 118234 - DNA, 25 bp, Saccharomyces pastorianus
aaaagccagctccagtcagaaccca

SEQ ID NO: 118235 - DNA, 25 bp, Saccharomyces pastorianus
tgaaaagccagctccagtcagaacc

SEQ ID NO: 118236 - DNA, 25 bp, Saccharomyces pastorianus
atgtctcaagctgttaatgccaaga

SEQ ID NO: 118237 - DNA, 25 bp, Saccharomyces pastorianus
ctccagtcagaacccacatgagaaa

SEQ ID NO: 118238 - DNA, 25 bp, Saccharomyces pastorianus
gtctcaagctgttaatgccaagaag

SEQ ID NO: 118239 - DNA, 25 bp, Saccharomyces pastorianus
tgccaagttggctgccccagaaaat

SEQ ID NO: 118240 - DNA, 25 bp, Saccharomyces pastorianus
tgttaatgccaagaagagagttttt

SEQ ID NO: 118241 - DNA, 25 bp, Saccharomyces pastorianus
tgccccagaaaatgaaaagccagct

SEQ ID NO: 118242 - DNA, 25 bp, Saccharomyces pastorianus
cgtcgtcggtatctacaacggtaag

SEQ ID NO: 118243 - DNA, 25 bp, Saccharomyces pastorianus
ccaagccagccggtttcatgaagaa

SEQ ID NO: 118244 - DNA, 25 bp, Saccharomyces pastorianus
gaaacatgatcattgttccagaaat

SEQ ID NO: 118245 - DNA, 25 bp, Saccharomyces pastorianus
gttccgtcgtcggtatctacaacgg

SEQ ID NO: 118246 - DNA, 25 bp, Saccharomyces pastorianus
ccactgaagatttcgtcaagttggc

SEQ ID NO: 118247 - DNA, 25 bp, Saccharomyces pastorianus
gttagaagaagatttgcccgtggta

SEQ ID NO: 118248 - DNA, 25 bp, Saccharomyces pastorianus
gtggtatgacttccaagccagccgg

SEQ ID NO: 118249 - DNA, 25 bp, Saccharomyces pastorianus
atcagaccagaaatgttgggtcact

SEQ ID NO: 118250 - DNA, 25 bp, Saccharomyces pastorianus
atttgcccgtggtatgacttccaag

SEQ ID NO: 118251 - DNA, 25 bp, Saccharomyces pastorianus
aagatttgcccgtggtatgacttcc

SEQ ID NO: 118252 - DNA, 25 bp, Saccharomyces pastorianus
aaatgtccactgaagatttcgtcaa

SEQ ID NO: 118253 - DNA, 25 bp, Saccharomyces pastorianus
cgctttggaaggtaagtctgttgac

SEQ ID NO: 118254 - DNA, 25 bp, Saccharomyces pastorianus
aaagttggctgctgttccagctgct

SEQ ID NO: 118255 - DNA, 25 bp, Saccharomyces pastorianus
tagctgcttacctattattgaacgc

SEQ ID NO: 118256 - DNA, 25 bp, Saccharomyces pastorianus
gctgcttacctattattgaacgctg

SEQ ID NO: 118257 - DNA, 25 bp, Saccharomyces pastorianus
gtaacgaaaagttggctgctgttcc

SEQ ID NO: 118258 - DNA, 25 bp, Saccharomyces pastorianus
cttacctattattgaacgctgctgg

SEQ ID NO: 118259 - DNA, 25 bp, Saccharomyces pastorianus
gaaaagttggctgctgttccagctg

SEQ ID NO: 118260 - DNA, 25 bp, Saccharomyces pastorianus
ggaaggtaagtctgttgacgaatta

SEQ ID NO: 118261 - DNA, 25 bp, Saccharomyces pastorianus
agttggctgctgttccagctgctgg

SEQ ID NO: 118262 - DNA, 25 bp, Saccharomyces pastorianus
tgcttacctattattgaacgctgct

SEQ ID NO: 118263 - DNA, 25 bp, Saccharomyces pastorianus
tgtccgctttggaaggtaagtctgt

SEQ ID NO: 118264 - DNA, 25 bp, Saccharomyces pastorianus
tcctccgttttgtccgctttggaag

SEQ ID NO: 118265 - DNA, 25 bp, Saccharomyces pastorianus
agctgctggtccagcttctgctggc

SEQ ID NO: 118266 - DNA, 25 bp, Saccharomyces pastorianus
attaaggctattttggaatccgtcg

SEQ ID NO: 118267 - DNA, 25 bp, Saccharomyces pastorianus
tggtccagcttctgctggcggtgct

SEQ ID NO: 118268 - DNA, 25 bp, Saccharomyces pastorianus
ggaatccgtcggtatcgaaatcgaa

SEQ ID NO: 118269 - DNA, 25 bp, Saccharomyces pastorianus
agatgccaccaagattaaggctatt

SEQ ID NO: 118270 - DNA, 25 bp, Saccharomyces pastorianus
tgccaccaagattaaggctattttg

SEQ ID NO: 118271 - DNA, 25 bp, Saccharomyces pastorianus
ttattgaacgctgctggtaacaccc

SEQ ID NO: 118272 - DNA, 25 bp, Saccharomyces pastorianus
ccagcttctgctggcggtgctgctg

SEQ ID NO: 118273 - DNA, 25 bp, Saccharomyces pastorianus
tgctggtccagcttctgctggcggt

SEQ ID NO: 118274 - DNA, 25 bp, Saccharomyces pastorianus
aaaagttggctgctgttccagctgc

SEQ ID NO: 118275 - DNA, 25 bp, Saccharomyces pastorianus
aatcactgttgttaagccggactca

SEQ ID NO: 118276 - DNA, 25 bp, Saccharomyces pastorianus
gtggaggcccaaagtcacagactaa

SEQ ID NO: 118277 - DNA, 25 bp, Saccharomyces pastorianus
accatttggtgtgtcgacgctgatt

SEQ ID NO: 118278 - DNA, 25 bp, Saccharomyces pastorianus
acgttatgtcgctggtgtgcaacaa

SEQ ID NO: 118279 - DNA, 25 bp, Saccharomyces pastorianus
ttaaccagtacgtcacccaaatcga

SEQ ID NO: 118280 - DNA, 25 bp, Saccharomyces pastorianus
ggagtatctcacacgttatgtcgct

SEQ ID NO: 118281 - DNA, 25 bp, Saccharomyces pastorianus
gacactagaattacgccttccaaag

SEQ ID NO: 118282 - DNA, 25 bp, Saccharomyces pastorianus
ctcgcatgtggtgttgtcattttct

SEQ ID NO: 118283 - DNA, 25 bp, Saccharomyces pastorianus
tgattgccggcttcgacccgagaga

SEQ ID NO: 118284 - DNA, 25 bp, Saccharomyces pastorianus
tgaacccaagctttaccagaccgag

SEQ ID NO: 118285 - DNA, 25 bp, Saccharomyces pastorianus
tatatactcttcgtggtccgctcag

SEQ ID NO: 118286 - DNA, 25 bp, Saccharomyces pastorianus
ggacgtagaggagatcctccccaaa

SEQ ID NO: 118287 - DNA, 25 bp, Saccharomyces pastorianus
atgtccaagttatcgcgcaaatcaa

SEQ ID NO: 118288 - DNA, 25 bp, Saccharomyces pastorianus
gatgaacgatccacttgggtgagtt

SEQ ID NO: 118289 - DNA, 25 bp, Saccharomyces pastorianus
gagatcctccccaaaacacgaggag

SEQ ID NO: 118290 - DNA, 25 bp, Saccharomyces pastorianus
ctgttgttgagctcgatgttggtgt

SEQ ID NO: 118291 - DNA, 25 bp, Saccharomyces pastorianus
tggtgttccatgacaaacttttgtg

SEQ ID NO: 118292 - DNA, 25 bp, Saccharomyces pastorianus
ggtagtaccgttatacacagtgact

SEQ ID NO: 118293 - DNA, 25 bp, Saccharomyces pastorianus
ggtgagttcgtcatcgtttgtttcc

SEQ ID NO: 118294 - DNA, 25 bp, Saccharomyces pastorianus
agagttcctgaatctaggtggcgaa

SEQ ID NO: 118295 - DNA, 25 bp, Saccharomyces pastorianus
gtttcctcctccttaatattttgca

SEQ ID NO: 118296 - DNA, 25 bp, Saccharomyces pastorianus
ggtggcgaactatcttggtgttcca

SEQ ID NO: 118297 - DNA, 25 bp, Saccharomyces pastorianus
aaacgcaatctaccatcggactatg

SEQ ID NO: 118298 - DNA, 25 bp, Saccharomyces pastorianus
ttttcctctttatcaaccgtgggag

SEQ ID NO: 118299 - DNA, 25 bp, Saccharomyces pastorianus
acatctctccactacgcgaagaagg

SEQ ID NO: 118300 - DNA, 25 bp, Saccharomyces pastorianus
ggaggacatccgacaacgccagtct

SEQ ID NO: 118301 - DNA, 25 bp, Saccharomyces pastorianus
tggaaatcctggctcagcagcaacg

SEQ ID NO: 118302 - DNA, 25 bp, Saccharomyces pastorianus
caaaattttgttcccgtactctctg

SEQ ID NO: 118303 - DNA, 25 bp, Saccharomyces pastorianus
gaaggtactcatcgcatcaatcgct

SEQ ID NO: 118304 - DNA, 25 bp, Saccharomyces pastorianus
atcaatcgctcgtcgttacaaacgc

SEQ ID NO: 118305 - DNA, 25 bp, Saccharomyces pastorianus
aatcatcaacagacgacatctctcc

SEQ ID NO: 118306 - DNA, 25 bp, Saccharomyces pastorianus
aatcgagcatcaacatctcttccac

SEQ ID NO: 118307 - DNA, 25 bp, Saccharomyces pastorianus
ggcctacagaattgtcgttttcctc

SEQ ID NO: 118308 - DNA, 25 bp, Saccharomyces pastorianus
ttatcactgcaccatctacaagacg

SEQ ID NO: 118309 - DNA, 25 bp, Saccharomyces pastorianus
tatagccaagacctttttccttcat

SEQ ID NO: 118310 - DNA, 25 bp, Saccharomyces pastorianus
tgctgagccaggatttccacgtatt

SEQ ID NO: 118311 - DNA, 25 bp, Saccharomyces pastorianus
gcgtgtttaccaccatatatacgtg

SEQ ID NO: 118312 - DNA, 25 bp, Saccharomyces pastorianus
tttcaaatactgcaggtccttatca

SEQ ID NO: 118313 - DNA, 25 bp, Saccharomyces pastorianus
aaaacagcatacctttcatcttcct

SEQ ID NO: 118314 - DNA, 25 bp, Saccharomyces pastorianus
gtatacttatattttgtctgccgtt

SEQ ID NO: 118315 - DNA, 25 bp, Saccharomyces pastorianus
ttcatcttccttgcgttgctgctga

SEQ ID NO: 118316 - DNA, 25 bp, Saccharomyces pastorianus
ttgtctgccgttatatatagccaag

SEQ ID NO: 118317 - DNA, 25 bp, Saccharomyces pastorianus
tgttcaactttccacggtaaaatcg

SEQ ID NO: 118318 - DNA, 25 bp, Saccharomyces pastorianus
tttttccttcatgggttgttcaact

SEQ ID NO: 118319 - DNA, 25 bp, Saccharomyces pastorianus
gggcaccgatgctcaagaagtcgaa

SEQ ID NO: 118320 - DNA, 25 bp, Saccharomyces pastorianus
aacacatctaccataagccgtgaga

SEQ ID NO: 118321 - DNA, 25 bp, Saccharomyces pastorianus
cattgagggagcttgtcgacgacat

SEQ ID NO: 118322 - DNA, 25 bp, Saccharomyces pastorianus
tggacagtttcaagagggcaccgat

SEQ ID NO: 118323 - DNA, 25 bp, Saccharomyces pastorianus
actgtggtggttctctatcaaggat

SEQ ID NO: 118324 - DNA, 25 bp, Saccharomyces pastorianus
gtcgacgacattatgccttctttag

SEQ ID NO: 118325 - DNA, 25 bp, Saccharomyces pastorianus
aagcaagaacgaaagccgccacatt

SEQ ID NO: 118326 - DNA, 25 bp, Saccharomyces pastorianus
cgggatgtcacccaggtgccaaaat

SEQ ID NO: 118327 - DNA, 25 bp, Saccharomyces pastorianus
ggatacttaatccttctacattgag

SEQ ID NO: 118328 - DNA, 25 bp, Saccharomyces pastorianus
ccgccacattgctcacttattgaag

SEQ ID NO: 118329 - DNA, 25 bp, Saccharomyces pastorianus
gagatttgctcttgcgggatgtcac

SEQ ID NO: 118330 - DNA, 25 bp, Saccharomyces pastorianus
aagccaggcaatctaacttggacaa

SEQ ID NO: 118331 - DNA, 25 bp, Saccharomyces pastorianus
gtgacatcacgatcaacaaagggtt

SEQ ID NO: 118332 - DNA, 25 bp, Saccharomyces pastorianus
agacacttgatctttggcaacccca

SEQ ID NO: 118333 - DNA, 25 bp, Saccharomyces pastorianus
gatcttcctatatactctacggttg

SEQ ID NO: 118334 - DNA, 25 bp, Saccharomyces pastorianus
gaattggtcgtcaaatctgcaagag

SEQ ID NO: 118335 - DNA, 25 bp, Saccharomyces pastorianus
ttacctgtcacatccgaagatcttc

SEQ ID NO: 118336 - DNA, 25 bp, Saccharomyces pastorianus
gaatgattctaaccacagatcctct

SEQ ID NO: 118337 - DNA, 25 bp, Saccharomyces pastorianus
aacgagttccaagagatggtccaga

SEQ ID NO: 118338 - DNA, 25 bp, Saccharomyces pastorianus
aaacttatcgacagcagacacttga

SEQ ID NO: 118339 - DNA, 25 bp, Saccharomyces pastorianus
catggccgctctgtcaaatttgaat

SEQ ID NO: 118340 - DNA, 25 bp, Saccharomyces pastorianus
aaagtcctggagttgatcagcaaaa

SEQ ID NO: 118341 - DNA, 25 bp, Saccharomyces pastorianus
tcatcctcggcttcaaaggcatctt

SEQ ID NO: 118342 - DNA, 25 bp, Saccharomyces pastorianus
tgaggttcctttgatattccgtgct

SEQ ID NO: 118343 - DNA, 25 bp, Saccharomyces pastorianus
ttctgcttcttcatcttctgaatcc

SEQ ID NO: 118344 - DNA, 25 bp, Saccharomyces pastorianus
taataacactttgcctgctatgcca

SEQ ID NO: 118345 - DNA, 25 bp, Saccharomyces pastorianus
gcttctgcttacttcacatctggag

SEQ ID NO: 118346 - DNA, 25 bp, Saccharomyces pastorianus
ttacgggctcgttcaaattgatggt

SEQ ID NO: 118347 - DNA, 25 bp, Saccharomyces pastorianus
atgtcttctgtattctccggtgggc

SEQ ID NO: 118348 - DNA, 25 bp, Saccharomyces pastorianus
ttctcctatgggaaccggaatcgcc

SEQ ID NO: 118349 - DNA, 25 bp, Saccharomyces pastorianus
agcttgctaaaatctgccgcatctg

SEQ ID NO: 118350 - DNA, 25 bp, Saccharomyces pastorianus
ggaatcgccacccaacaaagttgtg

SEQ ID NO: 118351 - DNA, 25 bp, Saccharomyces pastorianus
ctccggtgggctagtctacgaatat

SEQ ID NO: 118352 - DNA, 25 bp, Saccharomyces pastorianus
gagaacccgccagacaatcctattt

SEQ ID NO: 118353 - DNA, 25 bp, Saccharomyces pastorianus
aatactccatttcaacagcagccag

SEQ ID NO: 118354 - DNA, 25 bp, Saccharomyces pastorianus
gtgagtacatcaggaccgtcagcta

SEQ ID NO: 118355 - DNA, 25 bp, Saccharomyces pastorianus
gaaaacggtgtcgatagcgtggaaa

SEQ ID NO: 118356 - DNA, 25 bp, Saccharomyces pastorianus
gaccgtcagctattaagttatccaa

SEQ ID NO: 118357 - DNA, 25 bp, Saccharomyces pastorianus
gagatgctacacaatttggtcgatg

SEQ ID NO: 118358 - DNA, 25 bp, Saccharomyces pastorianus
gaatctgagttttccgatacaaagg

SEQ ID NO: 118359 - DNA, 25 bp, Saccharomyces pastorianus
acttcaaaccaatcggcgctgtcag

SEQ ID NO: 118360 - DNA, 25 bp, Saccharomyces pastorianus
gaattgggagttaccacagcgccta

SEQ ID NO: 118361 - DNA, 25 bp, Saccharomyces pastorianus
aagccttgcctttgattgttaatac

SEQ ID NO: 118362 - DNA, 25 bp, Saccharomyces pastorianus
ggccgcaaaccgaaatccaagcgcg

SEQ ID NO: 118363 - DNA, 25 bp, Saccharomyces pastorianus
gtatcctttgtaggctcgtgctcca

SEQ ID NO: 118364 - DNA, 25 bp, Saccharomyces pastorianus
tgctggagattcaattggtttaacc

SEQ ID NO: 118365 - DNA, 25 bp, Saccharomyces pastorianus
gcttcggcgagctatttgctcacga

SEQ ID NO: 118366 - DNA, 25 bp, Saccharomyces pastorianus
ataaggtgtacccagagtcgcgcaa

SEQ ID NO: 118367 - DNA, 25 bp, Saccharomyces pastorianus
tttgctcacgagctctgctggagat

SEQ ID NO: 118368 - DNA, 25 bp, Saccharomyces pastorianus
gagtcgcgcaaaatagcagcattga

SEQ ID NO: 118369 - DNA, 25 bp, Saccharomyces pastorianus
gatgagagcccacttgtgcagagcc

SEQ ID NO: 118370 - DNA, 25 bp, Saccharomyces pastorianus
tgtgcagagccttgtatcctttgta

SEQ ID NO: 118371 - DNA, 25 bp, Saccharomyces pastorianus
tcgtgctccatcaacctacttttgc

SEQ ID NO: 118372 - DNA, 25 bp, Saccharomyces pastorianus
tacttttgcctttcctcaacggcat

SEQ ID NO: 118373 - DNA, 25 bp, Saccharomyces pastorianus
ggtgcagaacacagtgagtgccgat

SEQ ID NO: 118374 - DNA, 25 bp, Saccharomyces pastorianus
gagacagcagctttggatgaacccc

SEQ ID NO: 118375 - DNA, 25 bp, Saccharomyces pastorianus
agcagctttggatgaacccctactt

SEQ ID NO: 118376 - DNA, 25 bp, Saccharomyces pastorianus
cttcctttccacaaaaatcaagcct

SEQ ID NO: 118377 - DNA, 25 bp, Saccharomyces pastorianus
aagcagagctacagtcatcttcctt

SEQ ID NO: 118378 - DNA, 25 bp, Saccharomyces pastorianus
gacagcagctttggatgaaccccta

SEQ ID NO: 118379 - DNA, 25 bp, Saccharomyces pastorianus
gtcatcttcctttccacaaaaatca

SEQ ID NO: 118380 - DNA, 25 bp, Saccharomyces pastorianus
tacagtcatcttcctttccacaaaa

SEQ ID NO: 118381 - DNA, 25 bp, Saccharomyces pastorianus
gaacccctacttacagtaaaagcag

SEQ ID NO: 118382 - DNA, 25 bp, Saccharomyces pastorianus
ttggatgaacccctacttacagtaa

SEQ ID NO: 118383 - DNA, 25 bp, Saccharomyces pastorianus
agagctacagtcatcttcctttcca

SEQ ID NO: 118384 - DNA, 25 bp, Saccharomyces pastorianus
agctttggatgaacccctacttaca

SEQ ID NO: 118385 - DNA, 25 bp, Saccharomyces pastorianus
gttgacgttcgtgaaacctttgact

SEQ ID NO: 118386 - DNA, 25 bp, Saccharomyces pastorianus
gaatttgccgagtgaggtgatcaac

SEQ ID NO: 118387 - DNA, 25 bp, Saccharomyces pastorianus
gaagacgtcactgaaacactaactg

SEQ ID NO: 118388 - DNA, 25 bp, Saccharomyces pastorianus
ggtgatcaacaatcgtgctggcatc

SEQ ID NO: 118389 - DNA, 25 bp, Saccharomyces pastorianus
tcagaaagcatttcctctctaggaa

SEQ ID NO: 118390 - DNA, 25 bp, Saccharomyces pastorianus
gagagtggattcgagggtttcaaac

SEQ ID NO: 118391 - DNA, 25 bp, Saccharomyces pastorianus
aaaagatcgtttcaactgttgacgt

SEQ ID NO: 118392 - DNA, 25 bp, Saccharomyces pastorianus
ctggctcagcagaagcggtttcaga

SEQ ID NO: 118393 - DNA, 25 bp, Saccharomyces pastorianus
aatgttatctcttcttctgttggta

SEQ ID NO: 118394 - DNA, 25 bp, Saccharomyces pastorianus
ggagagtacaattctatgcttcaat

SEQ ID NO: 118395 - DNA, 25 bp, Saccharomyces pastorianus
tcaaatgtgatgtctctggctcagc

SEQ ID NO: 118396 - DNA, 25 bp, Saccharomyces pastorianus
aaggaatctgctaccgtttctgcaa

SEQ ID NO: 118397 - DNA, 25 bp, Saccharomyces pastorianus
ggaaaacctttgctatatgccgaaa

SEQ ID NO: 118398 - DNA, 25 bp, Saccharomyces pastorianus
gtattacgttatgacttaggcggaa

SEQ ID NO: 118399 - DNA, 25 bp, Saccharomyces pastorianus
gttacaacccgcttcaagtattacg

SEQ ID NO: 118400 - DNA, 25 bp, Saccharomyces pastorianus
ataaaaagccagctcatctgcagct

SEQ ID NO: 118401 - DNA, 25 bp, Saccharomyces pastorianus
gggtaccattcttgttttcactgat

SEQ ID NO: 118402 - DNA, 25 bp, Saccharomyces pastorianus
gggctacaacccatcgagccaaaga

SEQ ID NO: 118403 - DNA, 25 bp, Saccharomyces pastorianus
gatccgatcaaattggacccgagga

SEQ ID NO: 118404 - DNA, 25 bp, Saccharomyces pastorianus
gaagtagtgtctgtcgataacggca

SEQ ID NO: 118405 - DNA, 25 bp, Saccharomyces pastorianus
taagcactgtgccaagaccgggcta

SEQ ID NO: 118406 - DNA, 25 bp, Saccharomyces pastorianus
tttcttgatgacgacacattccaaa

SEQ ID NO: 118407 - DNA, 25 bp, Saccharomyces pastorianus
aaaatgtacctagattcccgtccat

SEQ ID NO: 118408 - DNA, 25 bp, Saccharomyces pastorianus
tttggattactagcatttctggtca

SEQ ID NO: 118409 - DNA, 25 bp, Saccharomyces pastorianus
tctattgttcactatggcccattgg

SEQ ID NO: 118410 - DNA, 25 bp, Saccharomyces pastorianus
ctggctcgatgtctgaagttttcaa

SEQ ID NO: 118411 - DNA, 25 bp, Saccharomyces pastorianus
gcgtattccgctttaatcaactgtc

SEQ ID NO: 118412 - DNA, 25 bp, Saccharomyces pastorianus
gaaggctcaagggaagtctctggat

SEQ ID NO: 118413 - DNA, 25 bp, Saccharomyces pastorianus
tctggtcaaatctggctcgatgtct

SEQ ID NO: 118414 - DNA, 25 bp, Saccharomyces pastorianus
ttatatcgaccgtgctggtaggcca

SEQ ID NO: 118415 - DNA, 25 bp, Saccharomyces pastorianus
ttatctgtgtgccttaatcatgtta

SEQ ID NO: 118416 - DNA, 25 bp, Saccharomyces pastorianus
gttgagcatcaacctgtcacatatc

SEQ ID NO: 118417 - DNA, 25 bp, Saccharomyces pastorianus
gccacgtgcattgtctggttgagca

SEQ ID NO: 118418 - DNA, 25 bp, Saccharomyces pastorianus
attcgcgtcgcgtgggcgccgaaaa

SEQ ID NO: 118419 - DNA, 25 bp, Saccharomyces pastorianus
aaagggcttatcacggcacatctga

SEQ ID NO: 118420 - DNA, 25 bp, Saccharomyces pastorianus
acctttgttgcagtcgaattctcgt

SEQ ID NO: 118421 - DNA, 25 bp, Saccharomyces pastorianus
agtcgaattctcgtggctgtacgca

SEQ ID NO: 118422 - DNA, 25 bp, Saccharomyces pastorianus
gtgggcgccgaaaagggcttatcac

SEQ ID NO: 118423 - DNA, 25 bp, Saccharomyces pastorianus
gtggctgtacgcaatttctcttatc

SEQ ID NO: 118424 - DNA, 25 bp, Saccharomyces pastorianus
aatttctcttatcctaccgtgtgaa

SEQ ID NO: 118425 - DNA, 25 bp, Saccharomyces pastorianus
tctcttatcctaccgtgtgaaacaa

SEQ ID NO: 118426 - DNA, 25 bp, Saccharomyces pastorianus
ggcttatcacggcacatctgaagaa

SEQ ID NO: 118427 - DNA, 25 bp, Saccharomyces pastorianus
gtgtgaaacaattcgcgtcgcgtgg

SEQ ID NO: 118428 - DNA, 25 bp, Saccharomyces pastorianus
tctaacacctttgttgcagtcgaat

SEQ ID NO: 118429 - DNA, 25 bp, Saccharomyces pastorianus
gcgtcctcagactactctcaaagag

SEQ ID NO: 118430 - DNA, 25 bp, Saccharomyces pastorianus
gatagccacatcaacagcatgtcct

SEQ ID NO: 118431 - DNA, 25 bp, Saccharomyces pastorianus
agcatgtcctcctacaacgataaag

SEQ ID NO: 118432 - DNA, 25 bp, Saccharomyces pastorianus
taccaggcgtcggttttgctccgaa

SEQ ID NO: 118433 - DNA, 25 bp, Saccharomyces pastorianus
aaagaactactcctgctggtccaga

SEQ ID NO: 118434 - DNA, 25 bp, Saccharomyces pastorianus
gtgccacagcacagaaatccggtac

SEQ ID NO: 118435 - DNA, 25 bp, Saccharomyces pastorianus
ttagtgtatccccaacaacgactac

SEQ ID NO: 118436 - DNA, 25 bp, Saccharomyces pastorianus
gtcataccgcacagaaatccttcga

SEQ ID NO: 118437 - DNA, 25 bp, Saccharomyces pastorianus
acagccgctggtcctgcaaatataa

SEQ ID NO: 118438 - DNA, 25 bp, Saccharomyces pastorianus
aatataaggccgtacgctggtcagc

SEQ ID NO: 118439 - DNA, 25 bp, Saccharomyces pastorianus
atcatccagtgcatcattagcgtcc

SEQ ID NO: 118440 - DNA, 25 bp, Saccharomyces pastorianus
gggtctcgatattgaagattactca

SEQ ID NO: 118441 - DNA, 25 bp, Saccharomyces pastorianus
ttgtgcgtaatagcgctctttttct

SEQ ID NO: 118442 - DNA, 25 bp, Saccharomyces pastorianus
aacttgccgagtatcgttgaggtaa

SEQ ID NO: 118443 - DNA, 25 bp, Saccharomyces pastorianus
tgacggcagtaatacccatattaat

SEQ ID NO: 118444 - DNA, 25 bp, Saccharomyces pastorianus
gttatgctgaaaccacatggcggtg

SEQ ID NO: 118445 - DNA, 25 bp, Saccharomyces pastorianus
aatgacgaagagagcaacttgccga

SEQ ID NO: 118446 - DNA, 25 bp, Saccharomyces pastorianus
acagcttcatgacacttctgcagaa

SEQ ID NO: 118447 - DNA, 25 bp, Saccharomyces pastorianus
aaggccagtgccgagaacacgctat

SEQ ID NO: 118448 - DNA, 25 bp, Saccharomyces pastorianus
gaataaagcaacacactaccagaag

SEQ ID NO: 118449 - DNA, 25 bp, Saccharomyces pastorianus
gaagtgagcactattttcagggaaa

SEQ ID NO: 118450 - DNA, 25 bp, Saccharomyces pastorianus
gaaacctatccgcaataaggccagt

SEQ ID NO: 118451 - DNA, 25 bp, Saccharomyces pastorianus
acggcgtcacacattcgttggatga

SEQ ID NO: 118452 - DNA, 25 bp, Saccharomyces pastorianus
ggatgcctttgttcaaatcgtcaaa

SEQ ID NO: 118453 - DNA, 25 bp, Saccharomyces pastorianus
gagattgaatccagctgacagacca

SEQ ID NO: 118454 - DNA, 25 bp, Saccharomyces pastorianus
atactttactgtgcggttattctcc

SEQ ID NO: 118455 - DNA, 25 bp, Saccharomyces pastorianus
gaccaactgctacggaattgctgga

SEQ ID NO: 118456 - DNA, 25 bp, Saccharomyces pastorianus
atgtacagcttcgagatacccggta

SEQ ID NO: 118457 - DNA, 25 bp, Saccharomyces pastorianus
atgaaagtcttctggacggcgtcac

SEQ ID NO: 118458 - DNA, 25 bp, Saccharomyces pastorianus
ggatgatttacgtctgcaatctcag

SEQ ID NO: 118459 - DNA, 25 bp, Saccharomyces pastorianus
gatgccaagcgtttcatcttgaagg

SEQ ID NO: 118460 - DNA, 25 bp, Saccharomyces pastorianus
gttattctccttttattgccgaaag

SEQ ID NO: 118461 - DNA, 25 bp, Saccharomyces pastorianus
ggtaaccttccatatgccatattgg

SEQ ID NO: 118462 - DNA, 25 bp, Saccharomyces pastorianus
gtccagaattttgacccctaatttg

SEQ ID NO: 118463 - DNA, 25 bp, Saccharomyces pastorianus
aaattgggtctgctcaaacccagct

SEQ ID NO: 118464 - DNA, 25 bp, Saccharomyces pastorianus
gaacacctcattttaccgaacaaat

SEQ ID NO: 118465 - DNA, 25 bp, Saccharomyces pastorianus
gttgcagaagcgctcagagctgcca

SEQ ID NO: 118466 - DNA, 25 bp, Saccharomyces pastorianus
agtagccccttctcaatcgaattga

SEQ ID NO: 118467 - DNA, 25 bp, Saccharomyces pastorianus
agcttcaccaaattctacctttagt

SEQ ID NO: 118468 - DNA, 25 bp, Saccharomyces pastorianus
atattatccagtccatctagcttca

SEQ ID NO: 118469 - DNA, 25 bp, Saccharomyces pastorianus
atgcaacagtaatttccagcgacga

SEQ ID NO: 118470 - DNA, 25 bp, Saccharomyces pastorianus
aacgtataactcctgctattgcaaa

SEQ ID NO: 118471 - DNA, 25 bp, Saccharomyces pastorianus
ggaaccttcaacgtggtccagaatt

SEQ ID NO: 118472 - DNA, 25 bp, Saccharomyces pastorianus
gacatcatgtcctaggctgagcgtt

SEQ ID NO: 118473 - DNA, 25 bp, Saccharomyces pastorianus
gataatgtttacttcttcttccatt

SEQ ID NO: 118474 - DNA, 25 bp, Saccharomyces pastorianus
atcttaggaattctgcttcctttat

SEQ ID NO: 118475 - DNA, 25 bp, Saccharomyces pastorianus
ggaattcacaaaaggagagtcgata

SEQ ID NO: 118476 - DNA, 25 bp, Saccharomyces pastorianus
gcattatcaatcttaggaattctgc

SEQ ID NO: 118477 - DNA, 25 bp, Saccharomyces pastorianus
ggagagtcgatatatctacatatta

SEQ ID NO: 118478 - DNA, 25 bp, Saccharomyces pastorianus
cttcctttatatgtgattgctgttc

SEQ ID NO: 118479 - DNA, 25 bp, Saccharomyces pastorianus
ggaagttcttcttgagtatatagga

SEQ ID NO: 118480 - DNA, 25 bp, Saccharomyces pastorianus
attgctgttccttaatcattatgtc

SEQ ID NO: 118481 - DNA, 25 bp, Saccharomyces pastorianus
acaaaatatgctggaagttcttctt

SEQ ID NO: 118482 - DNA, 25 bp, Saccharomyces pastorianus
ggaatttcatcgttgttacaggtta

SEQ ID NO: 118483 - DNA, 25 bp, Saccharomyces pastorianus
cttaatcattatgtcaccttcctat

SEQ ID NO: 118484 - DNA, 25 bp, Saccharomyces pastorianus
tgttgggtcaagtcgatcagcctac

SEQ ID NO: 118485 - DNA, 25 bp, Saccharomyces pastorianus
atgagaacaacgtcaacctctacac

SEQ ID NO: 118486 - DNA, 25 bp, Saccharomyces pastorianus
agtagatctacttcccacaagaaca

SEQ ID NO: 118487 - DNA, 25 bp, Saccharomyces pastorianus
gtgatatcacgacacagaccaccgt

SEQ ID NO: 118488 - DNA, 25 bp, Saccharomyces pastorianus
tacaccatctcctacgtggtatacg

SEQ ID NO: 118489 - DNA, 25 bp, Saccharomyces pastorianus
cagcctacgaatttttgatcacaaa

SEQ ID NO: 118490 - DNA, 25 bp, Saccharomyces pastorianus
cacaagaacaacttcccctgatata

SEQ ID NO: 118491 - DNA, 25 bp, Saccharomyces pastorianus
gttgtgcaaacgactttcacttcca

SEQ ID NO: 118492 - DNA, 25 bp, Saccharomyces pastorianus
gaacgttctcagacttgtcctattt

SEQ ID NO: 118493 - DNA, 25 bp, Saccharomyces pastorianus
tacattctccaaaccagcagacgtg

SEQ ID NO: 118494 - DNA, 25 bp, Saccharomyces pastorianus
gtggccacatacttcatttgtcgtg

SEQ ID NO: 118495 - DNA, 25 bp, Saccharomyces pastorianus
aagggctggcttgcagtttcctgtc

SEQ ID NO: 118496 - DNA, 25 bp, Saccharomyces pastorianus
gaaaagctcatggatttacaggtaa

SEQ ID NO: 118497 - DNA, 25 bp, Saccharomyces pastorianus
atcagggctacaattgcttcaggtg

SEQ ID NO: 118498 - DNA, 25 bp, Saccharomyces pastorianus
ttacaggtaaatccggcgctaaaga

SEQ ID NO: 118499 - DNA, 25 bp, Saccharomyces pastorianus
gttacctgaaaaggcacgctaccgg

SEQ ID NO: 118500 - DNA, 25 bp, Saccharomyces pastorianus
accggccgaacaagagtaggatcca

SEQ ID NO: 118501 - DNA, 25 bp, Saccharomyces pastorianus
tgcagtttcctgtcggtaggattaa

SEQ ID NO: 118502 - DNA, 25 bp, Saccharomyces pastorianus
aattgcttcaggtggtgttttgcct

SEQ ID NO: 118503 - DNA, 25 bp, Saccharomyces pastorianus
gttagattctttgatcagggctaca

SEQ ID NO: 118504 - DNA, 25 bp, Saccharomyces pastorianus
ccggcgctaaagacagtggttcatt

SEQ ID NO: 118505 - DNA, 25 bp, Saccharomyces pastorianus
taagatctcaatcttcttcagcaag

SEQ ID NO: 118506 - DNA, 25 bp, Saccharomyces pastorianus
tcgtcttcggaaattccttcggcta

SEQ ID NO: 118507 - DNA, 25 bp, Saccharomyces pastorianus
attccacctctagttgtttatctgc

SEQ ID NO: 118508 - DNA, 25 bp, Saccharomyces pastorianus
gcgcgttcaagctatcatattccga

SEQ ID NO: 118509 - DNA, 25 bp, Saccharomyces pastorianus
ttattgctggaatggtaccctggat

SEQ ID NO: 118510 - DNA, 25 bp, Saccharomyces pastorianus
gcctccggaatgtgaaacctgtttt

SEQ ID NO: 118511 - DNA, 25 bp, Saccharomyces pastorianus
agaaagtctttacgccggatcttca

SEQ ID NO: 118512 - DNA, 25 bp, Saccharomyces pastorianus
tttgaatattactttgcctccggaa

SEQ ID NO: 118513 - DNA, 25 bp, Saccharomyces pastorianus
ggcagctactaattctggatcacat

SEQ ID NO: 118514 - DNA, 25 bp, Saccharomyces pastorianus
ttcggctactgcaacccttgagaaa

SEQ ID NO: 118515 - DNA, 25 bp, Saccharomyces pastorianus
aaccttcttcggttgcgatgctaat

SEQ ID NO: 118516 - DNA, 25 bp, Saccharomyces pastorianus
tcctgaattcatgggctgcgtcggc

SEQ ID NO: 118517 - DNA, 25 bp, Saccharomyces pastorianus
gggtattactttggttgctcagtcc

SEQ ID NO: 118518 - DNA, 25 bp, Saccharomyces pastorianus
atcgattaccggtgtagcatactct

SEQ ID NO: 118519 - DNA, 25 bp, Saccharomyces pastorianus
gaaagattcataatcctcttgagag

SEQ ID NO: 118520 - DNA, 25 bp, Saccharomyces pastorianus
tatcggtgatgcaggttctatacct

SEQ ID NO: 118521 - DNA, 25 bp, Saccharomyces pastorianus
gattctttgattgcgcaacctataa

SEQ ID NO: 118522 - DNA, 25 bp, Saccharomyces pastorianus
gataggcccataatttcatcgatta

SEQ ID NO: 118523 - DNA, 25 bp, Saccharomyces pastorianus
gtgcatttggttgttgattctttga

SEQ ID NO: 118524 - DNA, 25 bp, Saccharomyces pastorianus
gcaattgtttacatggtcatcggga

SEQ ID NO: 118525 - DNA, 25 bp, Saccharomyces pastorianus
accagagtaagtccgtcgcttgtga

SEQ ID NO: 118526 - DNA, 25 bp, Saccharomyces pastorianus
ggtagaaaccagcttccattagcaa

SEQ ID NO: 118527 - DNA, 25 bp, Saccharomyces pastorianus
tttaaaaccagttgacgaggcggat

SEQ ID NO: 118528 - DNA, 25 bp, Saccharomyces pastorianus
gaccttgtgctgaattatcccgtag

SEQ ID NO: 118529 - DNA, 25 bp, Saccharomyces pastorianus
ttttgaggcgcctgtggtgatgcca

SEQ ID NO: 118530 - DNA, 25 bp, Saccharomyces pastorianus
gtgatcctgcactggatgacaacca

SEQ ID NO: 118531 - DNA, 25 bp, Saccharomyces pastorianus
gcaactgtttcttagctttctgtgt

SEQ ID NO: 118532 - DNA, 25 bp, Saccharomyces pastorianus
ggcagctactaagccattggagcga

SEQ ID NO: 118533 - DNA, 25 bp, Saccharomyces pastorianus
tctccattccctttgcattgttgca

SEQ ID NO: 118534 - DNA, 25 bp, Saccharomyces pastorianus
ctatcagtgatatcggtctccattc

SEQ ID NO: 118535 - DNA, 25 bp, Saccharomyces pastorianus
gaacatgtttgtcctgatcgtacta

SEQ ID NO: 118536 - DNA, 25 bp, Saccharomyces pastorianus
gttacgattggtgccgaccttgtgc

SEQ ID NO: 118537 - DNA, 25 bp, Saccharomyces pastorianus
caagggtgacttactcgttacgatt

SEQ ID NO: 118538 - DNA, 25 bp, Saccharomyces pastorianus
atatcagggacagggctcagtatta

SEQ ID NO: 118539 - DNA, 25 bp, Saccharomyces pastorianus
aacagtgtctctctaatatttgcga

SEQ ID NO: 118540 - DNA, 25 bp, Saccharomyces pastorianus
ggaccataatgcctcacccaaatag

SEQ ID NO: 118541 - DNA, 25 bp, Saccharomyces pastorianus
agcgatatgttttgcgcaaggccat

SEQ ID NO: 118542 - DNA, 25 bp, Saccharomyces pastorianus
gctgcagtgtcagaagttgcccaat

SEQ ID NO: 118543 - DNA, 25 bp, Saccharomyces pastorianus
aagcacagtctacgctgcagtgtca

SEQ ID NO: 118544 - DNA, 25 bp, Saccharomyces pastorianus
aaagcgatgctcaagccaattggga

SEQ ID NO: 118545 - DNA, 25 bp, Saccharomyces pastorianus
gagcggtaccaatcacactattagg

SEQ ID NO: 118546 - DNA, 25 bp, Saccharomyces pastorianus
tgtggataacaagcctctcattgcg

SEQ ID NO: 118547 - DNA, 25 bp, Saccharomyces pastorianus
gggcttcgagttggtttcaaacaat

SEQ ID NO: 118548 - DNA, 25 bp, Saccharomyces pastorianus
gatcatacgtataccgttgttgcag

SEQ ID NO: 118549 - DNA, 25 bp, Saccharomyces pastorianus
aatgcggccatggtagaacttctat

SEQ ID NO: 118550 - DNA, 25 bp, Saccharomyces pastorianus
tgcaattctactatcactgacgggt

SEQ ID NO: 118551 - DNA, 25 bp, Saccharomyces pastorianus
gcaatctgatgccaacaactctaat

SEQ ID NO: 118552 - DNA, 25 bp, Saccharomyces pastorianus
ttaagtcctgactctgaagaccgct

SEQ ID NO: 118553 - DNA, 25 bp, Saccharomyces pastorianus
gaacctggtgctacccaaatactgg

SEQ ID NO: 118554 - DNA, 25 bp, Saccharomyces pastorianus
gtgaaacatcttcccattctgacga

SEQ ID NO: 118555 - DNA, 25 bp, Saccharomyces pastorianus
tatatgattccttgtccagtactcc

SEQ ID NO: 118556 - DNA, 25 bp, Saccharomyces pastorianus
gatcctttctacttccaaacaaaca

SEQ ID NO: 118557 - DNA, 25 bp, Saccharomyces pastorianus
actctaggatccacttctgttttga

SEQ ID NO: 118558 - DNA, 25 bp, Saccharomyces pastorianus
ggtactgtgttcattgcatttgctg

SEQ ID NO: 118559 - DNA, 25 bp, Saccharomyces pastorianus
taaagaagtaccgtcctcccagtgt

SEQ ID NO: 118560 - DNA, 25 bp, Saccharomyces pastorianus
atctatgtttatttcacccaccgaa

SEQ ID NO: 118561 - DNA, 25 bp, Saccharomyces pastorianus
tagaccctagactttctgtggtatt

SEQ ID NO: 118562 - DNA, 25 bp, Saccharomyces pastorianus
aaactcccaggtttcactgggcact

SEQ ID NO: 118563 - DNA, 25 bp, Saccharomyces pastorianus
aatcaagttggaattcagtcgaaaa

SEQ ID NO: 118564 - DNA, 25 bp, Saccharomyces pastorianus
gattcgttgcaagagggccatttta

SEQ ID NO: 118565 - DNA, 25 bp, Saccharomyces pastorianus
tttgcaaaaagtatgatgttccgat

SEQ ID NO: 118566 - DNA, 25 bp, Saccharomyces pastorianus
agggccattttacaattggataagg

SEQ ID NO: 118567 - DNA, 25 bp, Saccharomyces pastorianus
gaaattagaacagcgtatccaaact

SEQ ID NO: 118568 - DNA, 25 bp, Saccharomyces pastorianus
gtttcactgggcacttccaaaatca

SEQ ID NO: 118569 - DNA, 25 bp, Saccharomyces pastorianus
gcgtatccaaactagttccattcag

SEQ ID NO: 118570 - DNA, 25 bp, Saccharomyces pastorianus
gaagatgaagccaccattcacaaga

SEQ ID NO: 118571 - DNA, 25 bp, Saccharomyces pastorianus
aggaagaattattgccggaaagtca

SEQ ID NO: 118572 - DNA, 25 bp, Saccharomyces pastorianus
atcattaacaagcttggcgccctga

SEQ ID NO: 118573 - DNA, 25 bp, Saccharomyces pastorianus
acgcctgtaacagcatcattaacaa

SEQ ID NO: 118574 - DNA, 25 bp, Saccharomyces pastorianus
agaaaagtgctgtttgccgcttaca

SEQ ID NO: 118575 - DNA, 25 bp, Saccharomyces pastorianus
ccacacgttgggaaacctgattcgt

SEQ ID NO: 118576 - DNA, 25 bp, Saccharomyces pastorianus
gtttgccgcttacaaggttgagcat

SEQ ID NO: 118577 - DNA, 25 bp, Saccharomyces pastorianus
ggcgccctgaagacaaatttcgaaa

SEQ ID NO: 118578 - DNA, 25 bp, Saccharomyces pastorianus
ctttgctcgtttcaagctgagaata

SEQ ID NO: 118579 - DNA, 25 bp, Saccharomyces pastorianus
acctgattcgtgcagaacttctgaa

SEQ ID NO: 118580 - DNA, 25 bp, Saccharomyces pastorianus
aaggttgagcatcccttctttgctc

SEQ ID NO: 118581 - DNA, 25 bp, Saccharomyces pastorianus
gctaaagattgaccccgacaccaaa

SEQ ID NO: 118582 - DNA, 25 bp, Saccharomyces pastorianus
attcgaactgttccttctgggtgaa

SEQ ID NO: 118583 - DNA, 25 bp, Saccharomyces pastorianus
tggctcccaaactactcaactaaag

SEQ ID NO: 118584 - DNA, 25 bp, Saccharomyces pastorianus
tttttattaacagccaccacagtcg

SEQ ID NO: 118585 - DNA, 25 bp, Saccharomyces pastorianus
tccgcgggatcataacattacgtta

SEQ ID NO: 118586 - DNA, 25 bp, Saccharomyces pastorianus
aggttgattatgttctcccgtcaaa

SEQ ID NO: 118587 - DNA, 25 bp, Saccharomyces pastorianus
actgtgtatcctgattttacgctta

SEQ ID NO: 118588 - DNA, 25 bp, Saccharomyces pastorianus
aaggcttatgtgattcgttctcaac

SEQ ID NO: 118589 - DNA, 25 bp, Saccharomyces pastorianus
taattcgttgactgcccataggttt

SEQ ID NO: 118590 - DNA, 25 bp, Saccharomyces pastorianus
atagttcagctggtgggttccttta

SEQ ID NO: 118591 - DNA, 25 bp, Saccharomyces pastorianus
gttctcaacaaacgcccattatgca

SEQ ID NO: 118592 - DNA, 25 bp, Saccharomyces pastorianus
aacgcattagggtctctcgatttgg

SEQ ID NO: 118593 - DNA, 25 bp, Saccharomyces pastorianus
gttcctttaacgcttcacctgataa

SEQ ID NO: 118594 - DNA, 25 bp, Saccharomyces pastorianus
gggccttctatcagcagcatcaata

SEQ ID NO: 118595 - DNA, 25 bp, Saccharomyces pastorianus
ctttgtttacgctatggcctttgtt

SEQ ID NO: 118596 - DNA, 25 bp, Saccharomyces pastorianus
tcgcatgttcgatgtccttttttct

SEQ ID NO: 118597 - DNA, 25 bp, Saccharomyces pastorianus
atgagaaaactatcctcgtcccact

SEQ ID NO: 118598 - DNA, 25 bp, Saccharomyces pastorianus
ctactctactcctctactgattgga

SEQ ID NO: 118599 - DNA, 25 bp, Saccharomyces pastorianus
gattgccaccgtgattggtttctta

SEQ ID NO: 118600 - DNA, 25 bp, Saccharomyces pastorianus
atcaatttgtagcacctccatcgaa

SEQ ID NO: 118601 - DNA, 25 bp, Saccharomyces pastorianus
aatctttaactcctgggccttctat

SEQ ID NO: 118602 - DNA, 25 bp, Saccharomyces pastorianus
acttttgcctattacactactctac

SEQ ID NO: 118603 - DNA, 25 bp, Saccharomyces pastorianus
aactgtgctgttgggttcatttgct

SEQ ID NO: 118604 - DNA, 25 bp, Saccharomyces pastorianus
aaagcatcttctcccatacgtgtta

SEQ ID NO: 118605 - DNA, 25 bp, Saccharomyces pastorianus
aacccacaattgatgcaggctgcgc

SEQ ID NO: 118606 - DNA, 25 bp, Saccharomyces pastorianus
gtggattgccagatcttggttcttt

SEQ ID NO: 118607 - DNA, 25 bp, Saccharomyces pastorianus
gagcggctgctcattcatccctgaa

SEQ ID NO: 118608 - DNA, 25 bp, Saccharomyces pastorianus
gatgtcgatgcaagtcagggtgcta

SEQ ID NO: 118609 - DNA, 25 bp, Saccharomyces pastorianus
aacatggcaggcaatctttttggtg

SEQ ID NO: 118610 - DNA, 25 bp, Saccharomyces pastorianus
aggctactctagattgggttttgct

SEQ ID NO: 118611 - DNA, 25 bp, Saccharomyces pastorianus
gaataacccagcactcagaaacatg

SEQ ID NO: 118612 - DNA, 25 bp, Saccharomyces pastorianus
aggctttgcttcaggcggaggaact

SEQ ID NO: 118613 - DNA, 25 bp, Saccharomyces pastorianus
gagcaatccaggtgcaatgcagaat

SEQ ID NO: 118614 - DNA, 25 bp, Saccharomyces pastorianus
ttattacgccaatagagcggctgct

SEQ ID NO: 118615 - DNA, 25 bp, Saccharomyces pastorianus
tggtggagcaggtgcccaatctaca

SEQ ID NO: 118616 - DNA, 25 bp, Saccharomyces pastorianus
gaagtacttttcaacaatagcttac

SEQ ID NO: 118617 - DNA, 25 bp, Saccharomyces pastorianus
gactaacgaagtacttttcaacaat

SEQ ID NO: 118618 - DNA, 25 bp, Saccharomyces pastorianus
acttttcaacaatagcttacactga

SEQ ID NO: 118619 - DNA, 25 bp, Saccharomyces pastorianus
aatagcttacactgaaactcgcgga

SEQ ID NO: 118620 - DNA, 25 bp, Saccharomyces pastorianus
caacaatagcttacactgaaactcg

SEQ ID NO: 118621 - DNA, 25 bp, Saccharomyces pastorianus
tacttttcaacaatagcttacactg

SEQ ID NO: 118622 - DNA, 25 bp, Saccharomyces pastorianus
agtacttttcaacaatagcttacac

SEQ ID NO: 118623 - DNA, 25 bp, Saccharomyces pastorianus
acgaagtacttttcaacaatagctt

SEQ ID NO: 118624 - DNA, 25 bp, Saccharomyces pastorianus
acaatagcttacactgaaactcgcg

SEQ ID NO: 118625 - DNA, 25 bp, Saccharomyces pastorianus
taacgaagtacttttcaacaatagc

SEQ ID NO: 118626 - DNA, 25 bp, Saccharomyces pastorianus
caatagcttacactgaaactcgcgg

SEQ ID NO: 118627 - DNA, 25 bp, Saccharomyces pastorianus
tagacatcggtttagctttggcttc

SEQ ID NO: 118628 - DNA, 25 bp, Saccharomyces pastorianus
gttccatggtattcttccaggcttc

SEQ ID NO: 118629 - DNA, 25 bp, Saccharomyces pastorianus
gaagattcttcatctggattttcct

SEQ ID NO: 118630 - DNA, 25 bp, Saccharomyces pastorianus
tcttcttctgcaactacttcttctg

SEQ ID NO: 118631 - DNA, 25 bp, Saccharomyces pastorianus
gccatctggtgttttagacatcggt

SEQ ID NO: 118632 - DNA, 25 bp, Saccharomyces pastorianus
agtgaaactacttcttctgccgtcg

SEQ ID NO: 118633 - DNA, 25 bp, Saccharomyces pastorianus
gctgttgcttcctccagtgaaacta

SEQ ID NO: 118634 - DNA, 25 bp, Saccharomyces pastorianus
tcttccagtgaagcttcttcttctg

SEQ ID NO: 118635 - DNA, 25 bp, Saccharomyces pastorianus
aagttcaagccactagcactgtttc

SEQ ID NO: 118636 - DNA, 25 bp, Saccharomyces pastorianus
tcttccaggcttctaccagaattgg

SEQ ID NO: 118637 - DNA, 25 bp, Saccharomyces pastorianus
tactgaagcttcttctgctgctact

SEQ ID NO: 118638 - DNA, 25 bp, Saccharomyces pastorianus
gagaatatgagttacgaccacgttt

SEQ ID NO: 118639 - DNA, 25 bp, Saccharomyces pastorianus
gctcctaatctacaaactgctgctg

SEQ ID NO: 118640 - DNA, 25 bp, Saccharomyces pastorianus
actgctgctgtttttgttgcgttta

SEQ ID NO: 118641 - DNA, 25 bp, Saccharomyces pastorianus
cagggtttcgccatacacatatttt

SEQ ID NO: 118642 - DNA, 25 bp, Saccharomyces pastorianus
caaccatactctttgtttccaactt

SEQ ID NO: 118643 - DNA, 25 bp, Saccharomyces pastorianus
actcgactcttggtttatggctgat

SEQ ID NO: 118644 - DNA, 25 bp, Saccharomyces pastorianus
atatgcttttcgctgcttattactc

SEQ ID NO: 118645 - DNA, 25 bp, Saccharomyces pastorianus
tttaacaacgctggctggagtgccg

SEQ ID NO: 118646 - DNA, 25 bp, Saccharomyces pastorianus
gaatacggtggctatctacataata

SEQ ID NO: 118647 - DNA, 25 bp, Saccharomyces pastorianus
gagatggttcctggtcaacctctga

SEQ ID NO: 118648 - DNA, 25 bp, Saccharomyces pastorianus
aagaacactttcacagtctgcgctt

SEQ ID NO: 118649 - DNA, 25 bp, Saccharomyces pastorianus
actgctctcttgaagttcttgggaa

SEQ ID NO: 118650 - DNA, 25 bp, Saccharomyces pastorianus
cttgaagttcttgggaagagccgaa

SEQ ID NO: 118651 - DNA, 25 bp, Saccharomyces pastorianus
ggacatttcaatattggtgcttata

SEQ ID NO: 118652 - DNA, 25 bp, Saccharomyces pastorianus
gaagagccgaaaaaattggacattt

SEQ ID NO: 118653 - DNA, 25 bp, Saccharomyces pastorianus
aatactttcttccatactactgctc

SEQ ID NO: 118654 - DNA, 25 bp, Saccharomyces pastorianus
attggtgcttatacattactactaa

SEQ ID NO: 118655 - DNA, 25 bp, Saccharomyces pastorianus
gtgcttatacattactactaacaag

SEQ ID NO: 118656 - DNA, 25 bp, Saccharomyces pastorianus
actactgctctcttgaagttcttgg

SEQ ID NO: 118657 - DNA, 25 bp, Saccharomyces pastorianus
tcacaatactttcttccatactact

SEQ ID NO: 118658 - DNA, 25 bp, Saccharomyces pastorianus
gtatcattcacaatactttcttcca

SEQ ID NO: 118659 - DNA, 25 bp, Saccharomyces pastorianus
tttaaaccgttttgtgtatcattca

SEQ ID NO: 118660 - DNA, 25 bp, Saccharomyces pastorianus
ggcattcgaaaagtcatacgcaaat

SEQ ID NO: 118661 - DNA, 25 bp, Saccharomyces pastorianus
agaatcctctttggcggtaaacttg

SEQ ID NO: 118662 - DNA, 25 bp, Saccharomyces pastorianus
gttcttccatatcccaatcactgaa

SEQ ID NO: 118663 - DNA, 25 bp, Saccharomyces pastorianus
aatgaagaatcctctttggcggtaa

SEQ ID NO: 118664 - DNA, 25 bp, Saccharomyces pastorianus
aaaaagttcttccatatcccaatca

SEQ ID NO: 118665 - DNA, 25 bp, Saccharomyces pastorianus
tgatacattactacacgacgtgcta

SEQ ID NO: 118666 - DNA, 25 bp, Saccharomyces pastorianus
catacgcaaatgactacttgatgaa

SEQ ID NO: 118667 - DNA, 25 bp, Saccharomyces pastorianus
gtagcatcatcgatcaatgaagaat

SEQ ID NO: 118668 - DNA, 25 bp, Saccharomyces pastorianus
tttggcggtaaacttgacaagcgat

SEQ ID NO: 118669 - DNA, 25 bp, Saccharomyces pastorianus
tagagaaggcttcgaaaactttgtt

SEQ ID NO: 118670 - DNA, 25 bp, Saccharomyces pastorianus
acttgacaagcgatgtagagaaggc

SEQ ID NO: 118671 - DNA, 25 bp, Saccharomyces pastorianus
gaggctatttcggagcacgcaagat

SEQ ID NO: 118672 - DNA, 25 bp, Saccharomyces pastorianus
ggaaaagatcctagccatcccgaat

SEQ ID NO: 118673 - DNA, 25 bp, Saccharomyces pastorianus
agacaaggccaattgcgcccttgct

SEQ ID NO: 118674 - DNA, 25 bp, Saccharomyces pastorianus
tcaaaacctatttggtgtttcagtt

SEQ ID NO: 118675 - DNA, 25 bp, Saccharomyces pastorianus
gccatcccgaatttagaggttcagt

SEQ ID NO: 118676 - DNA, 25 bp, Saccharomyces pastorianus
gaggttcagtcagaaaaatactcga

SEQ ID NO: 118677 - DNA, 25 bp, Saccharomyces pastorianus
aaaccaaagcagacaaggccaattg

SEQ ID NO: 118678 - DNA, 25 bp, Saccharomyces pastorianus
ggttcacggcctacttgatgctcta

SEQ ID NO: 118679 - DNA, 25 bp, Saccharomyces pastorianus
ccttgctctcgaggctatttcggag

SEQ ID NO: 118680 - DNA, 25 bp, Saccharomyces pastorianus
gagcacgcaagatctgtgtacgaat

SEQ ID NO: 118681 - DNA, 25 bp, Saccharomyces pastorianus
tccaaaggagaacccgatccgcagg

SEQ ID NO: 118682 - DNA, 25 bp, Saccharomyces pastorianus
atcctacccattatatttcctgcat

SEQ ID NO: 118683 - DNA, 25 bp, Saccharomyces pastorianus
atttttgaagtgatcgaaccgctgg

SEQ ID NO: 118684 - DNA, 25 bp, Saccharomyces pastorianus
agaaactcaacagcgtaaggtgcaa

SEQ ID NO: 118685 - DNA, 25 bp, Saccharomyces pastorianus
caattctggttcgtggaatagggca

SEQ ID NO: 118686 - DNA, 25 bp, Saccharomyces pastorianus
tcgaaccgctggaatttattaaagt

SEQ ID NO: 118687 - DNA, 25 bp, Saccharomyces pastorianus
agatccttacatgcttgttgagcaa

SEQ ID NO: 118688 - DNA, 25 bp, Saccharomyces pastorianus
taacttctcagttagagctagatac

SEQ ID NO: 118689 - DNA, 25 bp, Saccharomyces pastorianus
gagcaagcaatcaattctggttcgt

SEQ ID NO: 118690 - DNA, 25 bp, Saccharomyces pastorianus
aattcatgctatggcattcaaggca

SEQ ID NO: 118691 - DNA, 25 bp, Saccharomyces pastorianus
gaaaatgccgaagtcatcctaccca

SEQ ID NO: 118692 - DNA, 25 bp, Saccharomyces pastorianus
gaaacagtttcaacacagcaagtga

SEQ ID NO: 118693 - DNA, 25 bp, Saccharomyces pastorianus
gaaattgtttcttcccatgaaagca

SEQ ID NO: 118694 - DNA, 25 bp, Saccharomyces pastorianus
ggcatatctttacctgcttttacca

SEQ ID NO: 118695 - DNA, 25 bp, Saccharomyces pastorianus
gcatggctctcattactaattatgg

SEQ ID NO: 118696 - DNA, 25 bp, Saccharomyces pastorianus
gaagcattctgattttctactgaag

SEQ ID NO: 118697 - DNA, 25 bp, Saccharomyces pastorianus
taataactacggcacttccccaaag

SEQ ID NO: 118698 - DNA, 25 bp, Saccharomyces pastorianus
aaagatgtccttgtggtcagttacc

SEQ ID NO: 118699 - DNA, 25 bp, Saccharomyces pastorianus
cgagatagacttcgatattaccgcc

SEQ ID NO: 118700 - DNA, 25 bp, Saccharomyces pastorianus
tgttaacacatgcattctcctctaa

SEQ ID NO: 118701 - DNA, 25 bp, Saccharomyces pastorianus
gtacactgtgagttctactgagtca

SEQ ID NO: 118702 - DNA, 25 bp, Saccharomyces pastorianus
attctcctctaattatgctcctgta

SEQ ID NO: 118703 - DNA, 25 bp, Saccharomyces pastorianus
gatggctctgttatcgtcactgaaa

SEQ ID NO: 118704 - DNA, 25 bp, Saccharomyces pastorianus
aagtaatcacacgtcaggaacctga

SEQ ID NO: 118705 - DNA, 25 bp, Saccharomyces pastorianus
gaatcaaatcactacaagcccgcaa

SEQ ID NO: 118706 - DNA, 25 bp, Saccharomyces pastorianus
tctcgacaccgaatcccgtaaatat

SEQ ID NO: 118707 - DNA, 25 bp, Saccharomyces pastorianus
aagcccgcaatgatcaccgcgataa

SEQ ID NO: 118708 - DNA, 25 bp, Saccharomyces pastorianus
ggaggtgaactctacttttacagat

SEQ ID NO: 118709 - DNA, 25 bp, Saccharomyces pastorianus
gaacacctgaattccttagttggat

SEQ ID NO: 118710 - DNA, 25 bp, Saccharomyces pastorianus
actaaacctccgctcatataacgaa

SEQ ID NO: 118711 - DNA, 25 bp, Saccharomyces pastorianus
tacacagactccaaactttttccac

SEQ ID NO: 118712 - DNA, 25 bp, Saccharomyces pastorianus
gatattctaattttggccctacccg

SEQ ID NO: 118713 - DNA, 25 bp, Saccharomyces pastorianus
gactgcaaactaaactgcgcgcata

SEQ ID NO: 118714 - DNA, 25 bp, Saccharomyces pastorianus
atcatcctaatactacacatctacc

SEQ ID NO: 118715 - DNA, 25 bp, Saccharomyces pastorianus
cacaagcaaagacagcatccgggtt

SEQ ID NO: 118716 - DNA, 25 bp, Saccharomyces pastorianus
ccgtgtccttgtccaaagaatcaag

SEQ ID NO: 118717 - DNA, 25 bp, Saccharomyces pastorianus
aggcccgggctttactgatgctaat

SEQ ID NO: 118718 - DNA, 25 bp, Saccharomyces pastorianus
gattccacagtttggtggttctacc

SEQ ID NO: 118719 - DNA, 25 bp, Saccharomyces pastorianus
gcatccgggttgtatttacctgaaa

SEQ ID NO: 118720 - DNA, 25 bp, Saccharomyces pastorianus
gtctgctaaatctatcgttccattg

SEQ ID NO: 118721 - DNA, 25 bp, Saccharomyces pastorianus
gttgttcctcaagttaaagttggtg

SEQ ID NO: 118722 - DNA, 25 bp, Saccharomyces pastorianus
gaagttaaaccaagctgaagttgtt

SEQ ID NO: 118723 - DNA, 25 bp, Saccharomyces pastorianus
aatggtaataaggttgttcctcaag

SEQ ID NO: 118724 - DNA, 25 bp, Saccharomyces pastorianus
tggtggttctaccattaaattgggt

SEQ ID NO: 118725 - DNA, 25 bp, Saccharomyces pastorianus
atcgttccattgatggaccgtgtcc

SEQ ID NO: 118726 - DNA, 25 bp, Saccharomyces pastorianus
attggctatatctacgtttatcgct

SEQ ID NO: 118727 - DNA, 25 bp, Saccharomyces pastorianus
acgtttatcgctactgctgcagtgg

SEQ ID NO: 118728 - DNA, 25 bp, Saccharomyces pastorianus
gaatagttctgccttgagccaacaa

SEQ ID NO: 118729 - DNA, 25 bp, Saccharomyces pastorianus
gctgcagtggcatcttactttacca

SEQ ID NO: 118730 - DNA, 25 bp, Saccharomyces pastorianus
ggtgctgcatacaaagtatttggga

SEQ ID NO: 118731 - DNA, 25 bp, Saccharomyces pastorianus
atatctacgtttatcgctactgctg

SEQ ID NO: 118732 - DNA, 25 bp, Saccharomyces pastorianus
ggttcaacctcacgtattggctata

SEQ ID NO: 118733 - DNA, 25 bp, Saccharomyces pastorianus
aagttcaaactcagatgctatggga

SEQ ID NO: 118734 - DNA, 25 bp, Saccharomyces pastorianus
gggaagacggttcaacctcacgtat

SEQ ID NO: 118735 - DNA, 25 bp, Saccharomyces pastorianus
gccttgagccaacaaaaaagcggtg

SEQ ID NO: 118736 - DNA, 25 bp, Saccharomyces pastorianus
tggcatcttactttaccacgaaacc

SEQ ID NO: 118737 - DNA, 25 bp, Saccharomyces pastorianus
aaatgactacggatactgccataag

SEQ ID NO: 118738 - DNA, 25 bp, Saccharomyces pastorianus
tacaatcgatttacagccggaggat

SEQ ID NO: 118739 - DNA, 25 bp, Saccharomyces pastorianus
gtggcatattgggtgatcatcctcc

SEQ ID NO: 118740 - DNA, 25 bp, Saccharomyces pastorianus
gtaccacggaaaaggacatccctca

SEQ ID NO: 118741 - DNA, 25 bp, Saccharomyces pastorianus
ggaccctagggctacaatcgattta

SEQ ID NO: 118742 - DNA, 25 bp, Saccharomyces pastorianus
gactgcctatccgaatcttttaatt

SEQ ID NO: 118743 - DNA, 25 bp, Saccharomyces pastorianus
gaaggtaaacctattttgcctgaag

SEQ ID NO: 118744 - DNA, 25 bp, Saccharomyces pastorianus
ggcagagtctgtctattggacccta

SEQ ID NO: 118745 - DNA, 25 bp, Saccharomyces pastorianus
gattttatcatcgttaccagagagt

SEQ ID NO: 118746 - DNA, 25 bp, Saccharomyces pastorianus
tgaggccacggaaatgccatttaga

SEQ ID NO: 118747 - DNA, 25 bp, Saccharomyces pastorianus
gccggaggatgctacgaaattcgac

SEQ ID NO: 118748 - DNA, 25 bp, Saccharomyces pastorianus
ggaatcttccaaatctgatgacgaa

SEQ ID NO: 118749 - DNA, 25 bp, Saccharomyces pastorianus
aaagactatctaccctctgacattg

SEQ ID NO: 118750 - DNA, 25 bp, Saccharomyces pastorianus
gctatcctcctccttacaaagaaaa

SEQ ID NO: 118751 - DNA, 25 bp, Saccharomyces pastorianus
gatgacgaagcttcttacgtcccat

SEQ ID NO: 118752 - DNA, 25 bp, Saccharomyces pastorianus
ttgaatatctctactcccatggaag

SEQ ID NO: 118753 - DNA, 25 bp, Saccharomyces pastorianus
atacgcgggctccaaagactgtcaa

SEQ ID NO: 118754 - DNA, 25 bp, Saccharomyces pastorianus
agactgtcaagaacactcctcattt

SEQ ID NO: 118755 - DNA, 25 bp, Saccharomyces pastorianus
ggttgagagcaaatcccactgacaa

SEQ ID NO: 118756 - DNA, 25 bp, Saccharomyces pastorianus
gcggcccttttgactaatgaacttg

SEQ ID NO: 118757 - DNA, 25 bp, Saccharomyces pastorianus
ggctacaacaacaacgactacggac

SEQ ID NO: 118758 - DNA, 25 bp, Saccharomyces pastorianus
tgagggtcctgatcctgcagcaaaa

SEQ ID NO: 118759 - DNA, 25 bp, Saccharomyces pastorianus
gtcataagttcctatacacggctgg

SEQ ID NO: 118760 - DNA, 25 bp, Saccharomyces pastorianus
atgtagcagcattgacgggcgagtt

SEQ ID NO: 118761 - DNA, 25 bp, Saccharomyces pastorianus
taaatggtttcgcatgccactctgt

SEQ ID NO: 118762 - DNA, 25 bp, Saccharomyces pastorianus
aactcctctcgattgatcgttggta

SEQ ID NO: 118763 - DNA, 25 bp, Saccharomyces pastorianus
tttcatgctggaacctacaaacccg

SEQ ID NO: 118764 - DNA, 25 bp, Saccharomyces pastorianus
aaacgccgcaattgaccgaactatt

SEQ ID NO: 118765 - DNA, 25 bp, Saccharomyces pastorianus
gttgctgtggagttcttcgatgatc

SEQ ID NO: 118766 - DNA, 25 bp, Saccharomyces pastorianus
gtggttaagattgcctgttctgaca

SEQ ID NO: 118767 - DNA, 25 bp, Saccharomyces pastorianus
acacggctggctctgatggcataat

SEQ ID NO: 118768 - DNA, 25 bp, Saccharomyces pastorianus
ttctatgtctggcaacttctgatga

SEQ ID NO: 118769 - DNA, 25 bp, Saccharomyces pastorianus
agagatgtcgctcttttaccgaaag

SEQ ID NO: 118770 - DNA, 25 bp, Saccharomyces pastorianus
aacagaatcccgctgctttacaaga

SEQ ID NO: 118771 - DNA, 25 bp, Saccharomyces pastorianus
aagtattttgcagcaggcccaacag

SEQ ID NO: 118772 - DNA, 25 bp, Saccharomyces pastorianus
tatgcttccgctttggaaacactag

SEQ ID NO: 118773 - DNA, 25 bp, Saccharomyces pastorianus
gagcttatatcaggaaggccaccgc

SEQ ID NO: 118774 - DNA, 25 bp, Saccharomyces pastorianus
atagagctgctgcactagcgaagtt

SEQ ID NO: 118775 - DNA, 25 bp, Saccharomyces pastorianus
agcgaagttaatgtctttccctgaa

SEQ ID NO: 118776 - DNA, 25 bp, Saccharomyces pastorianus
gaaacactagatgcggccagaacca

SEQ ID NO: 118777 - DNA, 25 bp, Saccharomyces pastorianus
tttccctgaagctatcgcagattgt

SEQ ID NO: 118778 - DNA, 25 bp, Saccharomyces pastorianus
caaagattccaacctggtaccagta

SEQ ID NO: 118779 - DNA, 25 bp, Saccharomyces pastorianus
aggccaccgcacaaattgctgttaa

SEQ ID NO: 118780 - DNA, 25 bp, Saccharomyces pastorianus
ggcggaggcgtatgttaaccctgaa

SEQ ID NO: 118781 - DNA, 25 bp, Saccharomyces pastorianus
ggtatccttatcaaatcactctctc

SEQ ID NO: 118782 - DNA, 25 bp, Saccharomyces pastorianus
gcagacatcaactagttctcgagtg

SEQ ID NO: 118783 - DNA, 25 bp, Saccharomyces pastorianus
ctaccctcatcctcatagatttagt

SEQ ID NO: 118784 - DNA, 25 bp, Saccharomyces pastorianus
gcgccgtggtatttccgctcgggaa

SEQ ID NO: 118785 - DNA, 25 bp, Saccharomyces pastorianus
tcccgcattgcatcaaagcttatcg

SEQ ID NO: 118786 - DNA, 25 bp, Saccharomyces pastorianus
atcactctctccctagtgttggaag

SEQ ID NO: 118787 - DNA, 25 bp, Saccharomyces pastorianus
ataagtgacgcaactccggttccga

SEQ ID NO: 118788 - DNA, 25 bp, Saccharomyces pastorianus
gccttctgctcctggttacaatttt

SEQ ID NO: 118789 - DNA, 25 bp, Saccharomyces pastorianus
ttctttgcatgtcatcattgggata

SEQ ID NO: 118790 - DNA, 25 bp, Saccharomyces pastorianus
gtgttggaagggtttcactcgcctt

SEQ ID NO: 118791 - DNA, 25 bp, Saccharomyces pastorianus
caatttttgcctagtactccttcct

SEQ ID NO: 118792 - DNA, 25 bp, Saccharomyces pastorianus
tagctacagacatcagtgacaacga

SEQ ID NO: 118793 - DNA, 25 bp, Saccharomyces pastorianus
gcaagcatttaagcgccataacgtt

SEQ ID NO: 118794 - DNA, 25 bp, Saccharomyces pastorianus
ggacaaatttttcgccaatccaaca

SEQ ID NO: 118795 - DNA, 25 bp, Saccharomyces pastorianus
tcaagtttagtaggatccccttcac

SEQ ID NO: 118796 - DNA, 25 bp, Saccharomyces pastorianus
gagattccaattatctagctacaga

SEQ ID NO: 118797 - DNA, 25 bp, Saccharomyces pastorianus
gaccaggagccgacaaacatattag

SEQ ID NO: 118798 - DNA, 25 bp, Saccharomyces pastorianus
gaagcctaggcgaaaaaccaattca

SEQ ID NO: 118799 - DNA, 25 bp, Saccharomyces pastorianus
acccacctggaaatctccaatcgaa

SEQ ID NO: 118800 - DNA, 25 bp, Saccharomyces pastorianus
gacattatccaaatatcgacagcta

SEQ ID NO: 118801 - DNA, 25 bp, Saccharomyces pastorianus
agtaacactacttcccacgattcat

SEQ ID NO: 118802 - DNA, 25 bp, Saccharomyces pastorianus
agaaggctcaactgttagaccagga

SEQ ID NO: 118803 - DNA, 25 bp, Saccharomyces pastorianus
gccctcaatgtaagagttgtggtga

SEQ ID NO: 118804 - DNA, 25 bp, Saccharomyces pastorianus
aaatgtgatcacagcaccggaagcc

SEQ ID NO: 118805 - DNA, 25 bp, Saccharomyces pastorianus
cttccaagctgttctggcggtgaaa

SEQ ID NO: 118806 - DNA, 25 bp, Saccharomyces pastorianus
gcaaatgcgaaaccacgtgcacttg

SEQ ID NO: 118807 - DNA, 25 bp, Saccharomyces pastorianus
ggcgaatgttgtaaggactcttgtc

SEQ ID NO: 118808 - DNA, 25 bp, Saccharomyces pastorianus
atgcgaaaccacgtgcacttgtgaa

SEQ ID NO: 118809 - DNA, 25 bp, Saccharomyces pastorianus
atatgtgactgtgaaggcgaatgtt

SEQ ID NO: 118810 - DNA, 25 bp, Saccharomyces pastorianus
attgtgggagcacctgccttccaag

SEQ ID NO: 118811 - DNA, 25 bp, Saccharomyces pastorianus
gactcttgtcattgtgggagcacct

SEQ ID NO: 118812 - DNA, 25 bp, Saccharomyces pastorianus
gcaccggaagccctcaatgtaagag

SEQ ID NO: 118813 - DNA, 25 bp, Saccharomyces pastorianus
ctgttctggcggtgaaaagtgcaaa

SEQ ID NO: 118814 - DNA, 25 bp, Saccharomyces pastorianus
tcttcccattacatctagagaccta

SEQ ID NO: 118815 - DNA, 25 bp, Saccharomyces pastorianus
gagacctagcagacttagatggcct

SEQ ID NO: 118816 - DNA, 25 bp, Saccharomyces pastorianus
gcagcggcagccacgacaacaacaa

SEQ ID NO: 118817 - DNA, 25 bp, Saccharomyces pastorianus
ggattctttcgtccatcttaccgag

SEQ ID NO: 118818 - DNA, 25 bp, Saccharomyces pastorianus
aagtgcctacagctaagcttggcta

SEQ ID NO: 118819 - DNA, 25 bp, Saccharomyces pastorianus
tattccacatcaaaacggcctcatg

SEQ ID NO: 118820 - DNA, 25 bp, Saccharomyces pastorianus
aagcaaaccagaagctgccaacgcc

SEQ ID NO: 118821 - DNA, 25 bp, Saccharomyces pastorianus
agaactgtcccaacgctacgagtag

SEQ ID NO: 118822 - DNA, 25 bp, Saccharomyces pastorianus
atgacacacgggattctttcgtcca

SEQ ID NO: 118823 - DNA, 25 bp, Saccharomyces pastorianus
ggacaggaagggtatcacacaatat

SEQ ID NO: 118824 - DNA, 25 bp, Saccharomyces pastorianus
catgagcggcaccaacaattcacat

SEQ ID NO: 118825 - DNA, 25 bp, Saccharomyces pastorianus
atacaatggctttttcccaaagtag

SEQ ID NO: 118826 - DNA, 25 bp, Saccharomyces pastorianus
tttaatcttttcttggtctaataca

SEQ ID NO: 118827 - DNA, 25 bp, Saccharomyces pastorianus
gacacatctacttttaatcttttct

SEQ ID NO: 118828 - DNA, 25 bp, Saccharomyces pastorianus
tggcttaatttgacacatctacttt

SEQ ID NO: 118829 - DNA, 25 bp, Saccharomyces pastorianus
gtaccctgtcctactttactgggca

SEQ ID NO: 118830 - DNA, 25 bp, Saccharomyces pastorianus
gtagaaggcttcttactccaaccgt

SEQ ID NO: 118831 - DNA, 25 bp, Saccharomyces pastorianus
tggtctaatacaatggctttttccc

SEQ ID NO: 118832 - DNA, 25 bp, Saccharomyces pastorianus
cggggcaaacatacttgtggcttaa

SEQ ID NO: 118833 - DNA, 25 bp, Saccharomyces pastorianus
gggcattgattttttaattcttgtc

SEQ ID NO: 118834 - DNA, 25 bp, Saccharomyces pastorianus
gtcctactttactgggcattgattt

SEQ ID NO: 118835 - DNA, 25 bp, Saccharomyces pastorianus
tggctttttcccaaagtagaaggct

SEQ ID NO: 118836 - DNA, 25 bp, Saccharomyces pastorianus
tagacgaaaacgttcctttgcaaag

SEQ ID NO: 118837 - DNA, 25 bp, Saccharomyces pastorianus
gaacttggcatcatcggagacctct

SEQ ID NO: 118838 - DNA, 25 bp, Saccharomyces pastorianus
gagtctcaacgagcagtggctgcta

SEQ ID NO: 118839 - DNA, 25 bp, Saccharomyces pastorianus
attgccaccacgattccattgatag

SEQ ID NO: 118840 - DNA, 25 bp, Saccharomyces pastorianus
aacttcttcagttatccgacgttga

SEQ ID NO: 118841 - DNA, 25 bp, Saccharomyces pastorianus
aatgctattcaggtatttgcggatc

SEQ ID NO: 118842 - DNA, 25 bp, Saccharomyces pastorianus
taacgaggtgtatccgttgctgcaa

SEQ ID NO: 118843 - DNA, 25 bp, Saccharomyces pastorianus
acgattgctgctaagttctttaact

SEQ ID NO: 118844 - DNA, 25 bp, Saccharomyces pastorianus
gtggctgctatctttgctaacattg

SEQ ID NO: 118845 - DNA, 25 bp, Saccharomyces pastorianus
aggcactattagctctgacgaactt

SEQ ID NO: 118846 - DNA, 25 bp, Saccharomyces pastorianus
ttcaggaccagagttttcagcggca

SEQ ID NO: 118847 - DNA, 25 bp, Saccharomyces pastorianus
ataatgatgttcaccgctggtaccg

SEQ ID NO: 118848 - DNA, 25 bp, Saccharomyces pastorianus
ttggcattggtatgcggccccgaaa

SEQ ID NO: 118849 - DNA, 25 bp, Saccharomyces pastorianus
atggttacaccatcttcccaaggga

SEQ ID NO: 118850 - DNA, 25 bp, Saccharomyces pastorianus
cttcaagcttcaaacagggtccagt

SEQ ID NO: 118851 - DNA, 25 bp, Saccharomyces pastorianus
atgcggccccgaaagttatattaat

SEQ ID NO: 118852 - DNA, 25 bp, Saccharomyces pastorianus
agatctcgcgattgtttatacatgg

SEQ ID NO: 118853 - DNA, 25 bp, Saccharomyces pastorianus
gtaccggaatagttactgcgttgca

SEQ ID NO: 118854 - DNA, 25 bp, Saccharomyces pastorianus
gaagccctacccatacaaaggtctg

SEQ ID NO: 118855 - DNA, 25 bp, Saccharomyces pastorianus
taaacaactgggacccttgtatcct

SEQ ID NO: 118856 - DNA, 25 bp, Saccharomyces pastorianus
tcccaatttatttaccagccttatg

SEQ ID NO: 118857 - DNA, 25 bp, Saccharomyces pastorianus
actgcgttgcaactacttttgactg

SEQ ID NO: 118858 - DNA, 25 bp, Saccharomyces pastorianus
aaatcatcgagacatagttccattg

SEQ ID NO: 118859 - DNA, 25 bp, Saccharomyces pastorianus
ctcatccatgcacgctacattataa

SEQ ID NO: 118860 - DNA, 25 bp, Saccharomyces pastorianus
gaatatttctgtgatgtcgatcctg

SEQ ID NO: 118861 - DNA, 25 bp, Saccharomyces pastorianus
gatatggtacccaaacacccaacta

SEQ ID NO: 118862 - DNA, 25 bp, Saccharomyces pastorianus
acattcctggtatagattgtgtcaa

SEQ ID NO: 118863 - DNA, 25 bp, Saccharomyces pastorianus
aagatgtccccgtgtgtattgtaat

SEQ ID NO: 118864 - DNA, 25 bp, Saccharomyces pastorianus
tgtcgatcctgagtacatcactgat

SEQ ID NO: 118865 - DNA, 25 bp, Saccharomyces pastorianus
aacatgacacatgcccgtttagaac

SEQ ID NO: 118866 - DNA, 25 bp, Saccharomyces pastorianus
attcccggaagctgtatggtctcat

SEQ ID NO: 118867 - DNA, 25 bp, Saccharomyces pastorianus
aagctcaactgacaaggtggcaaga

SEQ ID NO: 118868 - DNA, 25 bp, Saccharomyces pastorianus
ttaccggttggtttgcatgacattc

SEQ ID NO: 118869 - DNA, 25 bp, Saccharomyces pastorianus
ctcagacttccttctggcaggtaag

SEQ ID NO: 118870 - DNA, 25 bp, Saccharomyces pastorianus
ggaaaagcatccttcaattcttgca

SEQ ID NO: 118871 - DNA, 25 bp, Saccharomyces pastorianus
tcttttgcatcctcagcgggtgtca

SEQ ID NO: 118872 - DNA, 25 bp, Saccharomyces pastorianus
catccgtcgtctttgaaatatcctc

SEQ ID NO: 118873 - DNA, 25 bp, Saccharomyces pastorianus
ggaatttaggtccacatccgtcgtc

SEQ ID NO: 118874 - DNA, 25 bp, Saccharomyces pastorianus
ataccttccttttcttccatgattt

SEQ ID NO: 118875 - DNA, 25 bp, Saccharomyces pastorianus
tggattctctttagatggctcctcc

SEQ ID NO: 118876 - DNA, 25 bp, Saccharomyces pastorianus
aagtgtcattatcctttttcccatc

SEQ ID NO: 118877 - DNA, 25 bp, Saccharomyces pastorianus
gaggacttgttcaccttttcttcaa

SEQ ID NO: 118878 - DNA, 25 bp, Saccharomyces pastorianus
gattccggaacattactcttttcaa

SEQ ID NO: 118879 - DNA, 25 bp, Saccharomyces pastorianus
aaccttaggtgtaccatccttggca

SEQ ID NO: 118880 - DNA, 25 bp, Saccharomyces pastorianus
gaacccctggatactacaccaacta

SEQ ID NO: 118881 - DNA, 25 bp, Saccharomyces pastorianus
gtcggtgatgactctttagaaagcc

SEQ ID NO: 118882 - DNA, 25 bp, Saccharomyces pastorianus
aaaggacctgccagagcttacggac

SEQ ID NO: 118883 - DNA, 25 bp, Saccharomyces pastorianus
cttacggacagagctggtcggtcat

SEQ ID NO: 118884 - DNA, 25 bp, Saccharomyces pastorianus
attcgtttggcgttcaagtcggtga

SEQ ID NO: 118885 - DNA, 25 bp, Saccharomyces pastorianus
gcttaccggagaaactttgcgtcag

SEQ ID NO: 118886 - DNA, 25 bp, Saccharomyces pastorianus
ggtcggtcattacaggacacagcaa

SEQ ID NO: 118887 - DNA, 25 bp, Saccharomyces pastorianus
gaagatgtgccacctcagttaccaa

SEQ ID NO: 118888 - DNA, 25 bp, Saccharomyces pastorianus
gaaaaattcaagaccccagcaacct

SEQ ID NO: 118889 - DNA, 25 bp, Saccharomyces pastorianus
acaaaatctggtgagtcggctggaa

SEQ ID NO: 118890 - DNA, 25 bp, Saccharomyces pastorianus
agaagattcgtggtcgcaatttgta

SEQ ID NO: 118891 - DNA, 25 bp, Saccharomyces pastorianus
gggaggcagagcacaaaccttctca

SEQ ID NO: 118892 - DNA, 25 bp, Saccharomyces pastorianus
acctccggagttgcccaaattgtat

SEQ ID NO: 118893 - DNA, 25 bp, Saccharomyces pastorianus
taacagtaccatttctacagcaagg

SEQ ID NO: 118894 - DNA, 25 bp, Saccharomyces pastorianus
aagcggaagtacagcacctgctaca

SEQ ID NO: 118895 - DNA, 25 bp, Saccharomyces pastorianus
actcttcctcgagacatagttcgca

SEQ ID NO: 118896 - DNA, 25 bp, Saccharomyces pastorianus
ttgccgattggctaacgagacaact

SEQ ID NO: 118897 - DNA, 25 bp, Saccharomyces pastorianus
gcagaccagaagtaaacctccggag

SEQ ID NO: 118898 - DNA, 25 bp, Saccharomyces pastorianus
aaccttctcaagacaacttcatcac

SEQ ID NO: 118899 - DNA, 25 bp, Saccharomyces pastorianus
gcagataacgttcgttcgcactctt

SEQ ID NO: 118900 - DNA, 25 bp, Saccharomyces pastorianus
cataaaatcattgtacccgtccgat

SEQ ID NO: 118901 - DNA, 25 bp, Saccharomyces pastorianus
ataagttcactgtctctttgccgat

SEQ ID NO: 118902 - DNA, 25 bp, Saccharomyces pastorianus
ttgctaataccattcttaggcctgt

SEQ ID NO: 118903 - DNA, 25 bp, Saccharomyces pastorianus
aaatagttctattgctcgttataca

SEQ ID NO: 118904 - DNA, 25 bp, Saccharomyces pastorianus
ataataggccgcatagtcccaggct

SEQ ID NO: 118905 - DNA, 25 bp, Saccharomyces pastorianus
ttaggcctgtatgcattcgatctct

SEQ ID NO: 118906 - DNA, 25 bp, Saccharomyces pastorianus
gtcgcacatgcatagcttttttgct

SEQ ID NO: 118907 - DNA, 25 bp, Saccharomyces pastorianus
attcgatctcttcctatacgtttat

SEQ ID NO: 118908 - DNA, 25 bp, Saccharomyces pastorianus
ttaactctgctattgacgcgaatga

SEQ ID NO: 118909 - DNA, 25 bp, Saccharomyces pastorianus
gattgcatggataccttaattggcc

SEQ ID NO: 118910 - DNA, 25 bp, Saccharomyces pastorianus
acgatccacagccactctaaaagat

SEQ ID NO: 118911 - DNA, 25 bp, Saccharomyces pastorianus
cacttcaatatatctgtcgcacatg

SEQ ID NO: 118912 - DNA, 25 bp, Saccharomyces pastorianus
gagtatttttgttatccacgatcca

SEQ ID NO: 118913 - DNA, 25 bp, Saccharomyces pastorianus
tccaagctttcaaggaatctccact

SEQ ID NO: 118914 - DNA, 25 bp, Saccharomyces pastorianus
aagctttcaaggaatctccactata

SEQ ID NO: 118915 - DNA, 25 bp, Saccharomyces pastorianus
aggcgcagctgcaggtgcggcctcc

SEQ ID NO: 118916 - DNA, 25 bp, Saccharomyces pastorianus
aaacggtgccttcttcgttgcaggt

SEQ ID NO: 118917 - DNA, 25 bp, Saccharomyces pastorianus
tgcaggtgttgcgtttattcaatct

SEQ ID NO: 118918 - DNA, 25 bp, Saccharomyces pastorianus
aatctccactatacacaattgcact

SEQ ID NO: 118919 - DNA, 25 bp, Saccharomyces pastorianus
gtgccttcttcgttgcaggtgttgc

SEQ ID NO: 118920 - DNA, 25 bp, Saccharomyces pastorianus
aggaatctccactatacacaattgc

SEQ ID NO: 118921 - DNA, 25 bp, Saccharomyces pastorianus
gtttgctatgccaggcgcagctgca

SEQ ID NO: 118922 - DNA, 25 bp, Saccharomyces pastorianus
ttcttcgttgcaggtgttgcgttta

SEQ ID NO: 118923 - DNA, 25 bp, Saccharomyces pastorianus
gcactaaacggtgccttcttcgttg

SEQ ID NO: 118924 - DNA, 25 bp, Saccharomyces pastorianus
gccgatgcagttaggcagtacgcaa

SEQ ID NO: 118925 - DNA, 25 bp, Saccharomyces pastorianus
gctaacggacaagcagatccagcta

SEQ ID NO: 118926 - DNA, 25 bp, Saccharomyces pastorianus
gatccagctacttacattcacagaa

SEQ ID NO: 118927 - DNA, 25 bp, Saccharomyces pastorianus
attcctactgtctcaatggttgtca

SEQ ID NO: 118928 - DNA, 25 bp, Saccharomyces pastorianus
agaagatcgttccaaatgctaatac

SEQ ID NO: 118929 - DNA, 25 bp, Saccharomyces pastorianus
aaatgactcgtgttccaacggatga

SEQ ID NO: 118930 - DNA, 25 bp, Saccharomyces pastorianus
tgattactactaatgtcctggcccg

SEQ ID NO: 118931 - DNA, 25 bp, Saccharomyces pastorianus
gacgacttcagagagggtagatcca

SEQ ID NO: 118932 - DNA, 25 bp, Saccharomyces pastorianus
tactaatgtcctggcccgtggtatt

SEQ ID NO: 118933 - DNA, 25 bp, Saccharomyces pastorianus
gtagaaccggtagattcggcagaaa

SEQ ID NO: 118934 - DNA, 25 bp, Saccharomyces pastorianus
tatcttgcatggtgatttacagaca

SEQ ID NO: 118935 - DNA, 25 bp, Saccharomyces pastorianus
ttaaatgttgccgtcgaggcccaat

SEQ ID NO: 118936 - DNA, 25 bp, Saccharomyces pastorianus
ttgaaaaggcctgtcatgccgcctc

SEQ ID NO: 118937 - DNA, 25 bp, Saccharomyces pastorianus
ccaagcctcataccgcatggtttta

SEQ ID NO: 118938 - DNA, 25 bp, Saccharomyces pastorianus
gacattggttaactcagacttatac

SEQ ID NO: 118939 - DNA, 25 bp, Saccharomyces pastorianus
aatacatgactgcactaactctggt

SEQ ID NO: 118940 - DNA, 25 bp, Saccharomyces pastorianus
gctgccatctggtttcaatgccaaa

SEQ ID NO: 118941 - DNA, 25 bp, Saccharomyces pastorianus
aattacttcctctaagttccagtga

SEQ ID NO: 118942 - DNA, 25 bp, Saccharomyces pastorianus
gaggcccaatgcagatatgacttta

SEQ ID NO: 118943 - DNA, 25 bp, Saccharomyces pastorianus
aaacttaccgcaattcagactacaa

SEQ ID NO: 118944 - DNA, 25 bp, Saccharomyces pastorianus
ggaacccattatgcgtctatcaaag

SEQ ID NO: 118945 - DNA, 25 bp, Saccharomyces pastorianus
acttcagaggagagggctgccatct

SEQ ID NO: 118946 - DNA, 25 bp, Saccharomyces pastorianus
gtcctgggtgctataccgttgaatt

SEQ ID NO: 118947 - DNA, 25 bp, Saccharomyces pastorianus
acaagttactcccaaagatcccatg

SEQ ID NO: 118948 - DNA, 25 bp, Saccharomyces pastorianus
atacctgttcaagtgcggcttcgaa

SEQ ID NO: 118949 - DNA, 25 bp, Saccharomyces pastorianus
aaggtcacttttgctcgaaacacag

SEQ ID NO: 118950 - DNA, 25 bp, Saccharomyces pastorianus
gcttgttatttcgatacctgttcaa

SEQ ID NO: 118951 - DNA, 25 bp, Saccharomyces pastorianus
gcggcttcgaaattcatcggtgact

SEQ ID NO: 118952 - DNA, 25 bp, Saccharomyces pastorianus
gcttgtaatggcttaacgagctgca

SEQ ID NO: 118953 - DNA, 25 bp, Saccharomyces pastorianus
agaaatcagattccgggaccgtcct

SEQ ID NO: 118954 - DNA, 25 bp, Saccharomyces pastorianus
aaggtcttctagtaactctagcgtg

SEQ ID NO: 118955 - DNA, 25 bp, Saccharomyces pastorianus
ggataaaagcacataccacgctaag

SEQ ID NO: 118956 - DNA, 25 bp, Saccharomyces pastorianus
aactctagcgtgacatcgacgggtc

SEQ ID NO: 118957 - DNA, 25 bp, Saccharomyces pastorianus
taagatcgctgtagccctcctttat

SEQ ID NO: 118958 - DNA, 25 bp, Saccharomyces pastorianus
tcttcatctttaccaccagtatcgt

SEQ ID NO: 118959 - DNA, 25 bp, Saccharomyces pastorianus
atcatcctcctcatcgttatcttca

SEQ ID NO: 118960 - DNA, 25 bp, Saccharomyces pastorianus
ttaccaccagtatcgttcttcttat

SEQ ID NO: 118961 - DNA, 25 bp, Saccharomyces pastorianus
aattagtcctatttaagatcgctgt

SEQ ID NO: 118962 - DNA, 25 bp, Saccharomyces pastorianus
ttttccttcatcgtcgtcgtcgtcg

SEQ ID NO: 118963 - DNA, 25 bp, Saccharomyces pastorianus
gtatcgttcttcttattatcatcct

SEQ ID NO: 118964 - DNA, 25 bp, Saccharomyces pastorianus
ccaccagtatcgttcttcttattat

SEQ ID NO: 118965 - DNA, 25 bp, Saccharomyces pastorianus
tatttaagatcgctgtagccctcct

SEQ ID NO: 118966 - DNA, 25 bp, Saccharomyces pastorianus
gtagccctcctttatcttctttctt

SEQ ID NO: 118967 - DNA, 25 bp, Saccharomyces pastorianus
ttcttttttccttcatcgtcgtcgt

SEQ ID NO: 118968 - DNA, 25 bp, Saccharomyces pastorianus
gaagttccgctagcattcatgattg

SEQ ID NO: 118969 - DNA, 25 bp, Saccharomyces pastorianus
ggagtttgctccacatctgatctga

SEQ ID NO: 118970 - DNA, 25 bp, Saccharomyces pastorianus
gttgctttcttttcgctggactgtc

SEQ ID NO: 118971 - DNA, 25 bp, Saccharomyces pastorianus
aaccctggctctggtgtattactta

SEQ ID NO: 118972 - DNA, 25 bp, Saccharomyces pastorianus
gcctgctcagctccagagagagtat

SEQ ID NO: 118973 - DNA, 25 bp, Saccharomyces pastorianus
gatgaacctatattggcctgctcag

SEQ ID NO: 118974 - DNA, 25 bp, Saccharomyces pastorianus
atttgtttgtcattgcgtctctgca

SEQ ID NO: 118975 - DNA, 25 bp, Saccharomyces pastorianus
agaatttgtgtcaggcattgccgat

SEQ ID NO: 118976 - DNA, 25 bp, Saccharomyces pastorianus
gatctgagactacccaactttggat

SEQ ID NO: 118977 - DNA, 25 bp, Saccharomyces pastorianus
gtattacttacaactgccccagaag

SEQ ID NO: 118978 - DNA, 25 bp, Saccharomyces pastorianus
gagagtattcgaagcaacccctttc

SEQ ID NO: 118979 - DNA, 25 bp, Saccharomyces pastorianus
acttctgtgcctcatgcggtggaca

SEQ ID NO: 118980 - DNA, 25 bp, Saccharomyces pastorianus
agagaatcaggtggcattggcgact

SEQ ID NO: 118981 - DNA, 25 bp, Saccharomyces pastorianus
agaggatcgccatgtcgcattgaat

SEQ ID NO: 118982 - DNA, 25 bp, Saccharomyces pastorianus
gataactatatttctccatttgcaa

SEQ ID NO: 118983 - DNA, 25 bp, Saccharomyces pastorianus
gacggcaagccaaagcacttctgtg

SEQ ID NO: 118984 - DNA, 25 bp, Saccharomyces pastorianus
taagatgcgcagtttccgttgactc

SEQ ID NO: 118985 - DNA, 25 bp, Saccharomyces pastorianus
agatattctgtagccagccccttat

SEQ ID NO: 118986 - DNA, 25 bp, Saccharomyces pastorianus
gttgaagcagcataacgtccgcatt

SEQ ID NO: 118987 - DNA, 25 bp, Saccharomyces pastorianus
ggtggcggttctgcggataactata

SEQ ID NO: 118988 - DNA, 25 bp, Saccharomyces pastorianus
atatttcctctaccaaaagacggca

SEQ ID NO: 118989 - DNA, 25 bp, Saccharomyces pastorianus
gactggcgattttgccgtccaaaat

SEQ ID NO: 118990 - DNA, 25 bp, Saccharomyces pastorianus
ggtggatccaaaagcagtgtcatta

SEQ ID NO: 118991 - DNA, 25 bp, Saccharomyces pastorianus
cggatccagataccaaaagggctat

SEQ ID NO: 118992 - DNA, 25 bp, Saccharomyces pastorianus
agaagaactttatcgatatcgtacc

SEQ ID NO: 118993 - DNA, 25 bp, Saccharomyces pastorianus
attggtatcaatccagcacctctgt

SEQ ID NO: 118994 - DNA, 25 bp, Saccharomyces pastorianus
gagagattgtcttatccatcgtcct

SEQ ID NO: 118995 - DNA, 25 bp, Saccharomyces pastorianus
cgggatcggctgatagtttctttca

SEQ ID NO: 118996 - DNA, 25 bp, Saccharomyces pastorianus
ttcaaaagctttacgctggagcgga

SEQ ID NO: 118997 - DNA, 25 bp, Saccharomyces pastorianus
gcaacccgcttattatcagcagaaa

SEQ ID NO: 118998 - DNA, 25 bp, Saccharomyces pastorianus
aaaattctgattctgcaacccgctt

SEQ ID NO: 118999 - DNA, 25 bp, Saccharomyces pastorianus
taagctttcgcatgaggtggatcca

SEQ ID NO: 119000 - DNA, 25 bp, Saccharomyces pastorianus
ttactgttaatcttcctgagtctaa

SEQ ID NO: 119001 - DNA, 25 bp, Saccharomyces pastorianus
aacgaagttatctagtccgaacaga

SEQ ID NO: 119002 - DNA, 25 bp, Saccharomyces pastorianus
taaaaggtcgactggcaccacgggt

SEQ ID NO: 119003 - DNA, 25 bp, Saccharomyces pastorianus
agaatgtacgaagcccggaacgcaa

SEQ ID NO: 119004 - DNA, 25 bp, Saccharomyces pastorianus
gaactcgcttgctcgtcatatgcaa

SEQ ID NO: 119005 - DNA, 25 bp, Saccharomyces pastorianus
gatctttcatcatcgcctaggataa

SEQ ID NO: 119006 - DNA, 25 bp, Saccharomyces pastorianus
aattgtttcctatcccgctgaacaa

SEQ ID NO: 119007 - DNA, 25 bp, Saccharomyces pastorianus
gggtagtcatatccctcaattaact

SEQ ID NO: 119008 - DNA, 25 bp, Saccharomyces pastorianus
tgatctatcccaagagaactcgctt

SEQ ID NO: 119009 - DNA, 25 bp, Saccharomyces pastorianus
aaactttccatgtcgccagaaggta

SEQ ID NO: 119010 - DNA, 25 bp, Saccharomyces pastorianus
gcaacaagattactagcacccacag

SEQ ID NO: 119011 - DNA, 25 bp, Saccharomyces pastorianus
catgcagtaaaaccacgccaattgt

SEQ ID NO: 119012 - DNA, 25 bp, Saccharomyces pastorianus
gggtccgctccacaaatatgaatac

SEQ ID NO: 119013 - DNA, 25 bp, Saccharomyces pastorianus
accgcacaggcttacttcaaatcaa

SEQ ID NO: 119014 - DNA, 25 bp, Saccharomyces pastorianus
aagacaagggcctccgtatcaaagg

SEQ ID NO: 119015 - DNA, 25 bp, Saccharomyces pastorianus
gcaaaactgcctttgtgggtccgct

SEQ ID NO: 119016 - DNA, 25 bp, Saccharomyces pastorianus
caagctaattttgggtggcctccga

SEQ ID NO: 119017 - DNA, 25 bp, Saccharomyces pastorianus
gatcgcaggagccagcatacttgat

SEQ ID NO: 119018 - DNA, 25 bp, Saccharomyces pastorianus
gcatgagtttgatggccaggtcacc

SEQ ID NO: 119019 - DNA, 25 bp, Saccharomyces pastorianus
aacgcgaatcgtggcattgtcattg

SEQ ID NO: 119020 - DNA, 25 bp, Saccharomyces pastorianus
ggcctccgacttcgaggtatttcta

SEQ ID NO: 119021 - DNA, 25 bp, Saccharomyces pastorianus
gttatagtaccagtgcaaccgcaca

SEQ ID NO: 119022 - DNA, 25 bp, Saccharomyces pastorianus
aacgcatttcgatgggatctggtga

SEQ ID NO: 119023 - DNA, 25 bp, Saccharomyces pastorianus
tatgactactccctagacttatggt

SEQ ID NO: 119024 - DNA, 25 bp, Saccharomyces pastorianus
agattacaacgttcgtgtcgcttcg

SEQ ID NO: 119025 - DNA, 25 bp, Saccharomyces pastorianus
gacatccagtattatttcacgcaat

SEQ ID NO: 119026 - DNA, 25 bp, Saccharomyces pastorianus
ctgtcactccatgggcataatgcac

SEQ ID NO: 119027 - DNA, 25 bp, Saccharomyces pastorianus
gtacgggttgcacttaccatctgaa

SEQ ID NO: 119028 - DNA, 25 bp, Saccharomyces pastorianus
gattgcgttagactactgtcactcc

SEQ ID NO: 119029 - DNA, 25 bp, Saccharomyces pastorianus
gagaccaaattagctgttcctgaag

SEQ ID NO: 119030 - DNA, 25 bp, Saccharomyces pastorianus
ggcggagttctaccatccaggtgta

SEQ ID NO: 119031 - DNA, 25 bp, Saccharomyces pastorianus
atgctagcagctattgtcttcaaaa

SEQ ID NO: 119032 - DNA, 25 bp, Saccharomyces pastorianus
gtggacacactttataacctctgag

SEQ ID NO: 119033 - DNA, 25 bp, Saccharomyces pastorianus
aagggtcgtctaatccagatcaact

SEQ ID NO: 119034 - DNA, 25 bp, Saccharomyces pastorianus
gttactgttctttacggacctgatc

SEQ ID NO: 119035 - DNA, 25 bp, Saccharomyces pastorianus
aatggcgacgaaactcctcggaaca

SEQ ID NO: 119036 - DNA, 25 bp, Saccharomyces pastorianus
ggaggtggtccataaagcacttcaa

SEQ ID NO: 119037 - DNA, 25 bp, Saccharomyces pastorianus
aggcacttccagacacgtacgatta

SEQ ID NO: 119038 - DNA, 25 bp, Saccharomyces pastorianus
gaaagagcgcaacctactccaacgg

SEQ ID NO: 119039 - DNA, 25 bp, Saccharomyces pastorianus
aactattccattgtctgggacgaga

SEQ ID NO: 119040 - DNA, 25 bp, Saccharomyces pastorianus
gagagtagacatcgctaccgtcggc

SEQ ID NO: 119041 - DNA, 25 bp, Saccharomyces pastorianus
ttacccagttgctcttctgaaaatg

SEQ ID NO: 119042 - DNA, 25 bp, Saccharomyces pastorianus
aaatggctctctcagcgttcaatat

SEQ ID NO: 119043 - DNA, 25 bp, Saccharomyces pastorianus
attacgagcatctctatcccaatgg

SEQ ID NO: 119044 - DNA, 25 bp, Saccharomyces pastorianus
ggaacacgcctcacgacagtataat

SEQ ID NO: 119045 - DNA, 25 bp, Saccharomyces pastorianus
gaggttaccattccagaacctccat

SEQ ID NO: 119046 - DNA, 25 bp, Saccharomyces pastorianus
cctccattaaccacaagatttacag

SEQ ID NO: 119047 - DNA, 25 bp, Saccharomyces pastorianus
gttaccattccagaacctccattaa

SEQ ID NO: 119048 - DNA, 25 bp, Saccharomyces pastorianus
ccagaacctccattaaccacaagat

SEQ ID NO: 119049 - DNA, 25 bp, Saccharomyces pastorianus
attccagaacctccattaaccacaa

SEQ ID NO: 119050 - DNA, 25 bp, Saccharomyces pastorianus
taagaacgactttatcatggttaaa

SEQ ID NO: 119051 - DNA, 25 bp, Saccharomyces pastorianus
taagaaattgccaagaaagactcac

SEQ ID NO: 119052 - DNA, 25 bp, Saccharomyces pastorianus
cactacggtgaaattaagaacgact

SEQ ID NO: 119053 - DNA, 25 bp, Saccharomyces pastorianus
ttatcatggttaaaggttgtatccc

SEQ ID NO: 119054 - DNA, 25 bp, Saccharomyces pastorianus
gaacctccattaaccacaagattta

SEQ ID NO: 119055 - DNA, 25 bp, Saccharomyces pastorianus
ggctttggaagaagtcagcttgaag

SEQ ID NO: 119056 - DNA, 25 bp, Saccharomyces pastorianus
tgtcaccaagggtcacggtttcgaa

SEQ ID NO: 119057 - DNA, 25 bp, Saccharomyces pastorianus
ggttgtatcccaggtaacagaaaga

SEQ ID NO: 119058 - DNA, 25 bp, Saccharomyces pastorianus
tggcatccagcccacgttatgtgga

SEQ ID NO: 119059 - DNA, 25 bp, Saccharomyces pastorianus
gattgacactgcttctaagttcggt

SEQ ID NO: 119060 - DNA, 25 bp, Saccharomyces pastorianus
gtggtttcgtccactacggtgaaat

SEQ ID NO: 119061 - DNA, 25 bp, Saccharomyces pastorianus
tgccagagctggtcaaagaggttac

SEQ ID NO: 119062 - DNA, 25 bp, Saccharomyces pastorianus
ggttgactgggctcgtgaacatttc

SEQ ID NO: 119063 - DNA, 25 bp, Saccharomyces pastorianus
ttgtacaccaacacttctagaaagg

SEQ ID NO: 119064 - DNA, 25 bp, Saccharomyces pastorianus
tccaattgaacggtggttccatctc

SEQ ID NO: 119065 - DNA, 25 bp, Saccharomyces pastorianus
tcgaaaagactgttgctgtcgacag

SEQ ID NO: 119066 - DNA, 25 bp, Saccharomyces pastorianus
ggtttcgaaggtgttacccacagat

SEQ ID NO: 119067 - DNA, 25 bp, Saccharomyces pastorianus
gtgtggctttaccatcaggttctaa

SEQ ID NO: 119068 - DNA, 25 bp, Saccharomyces pastorianus
gcctgccattctcttgacagagttg

SEQ ID NO: 119069 - DNA, 25 bp, Saccharomyces pastorianus
aactggtgtgccgaacccgaacatg

SEQ ID NO: 119070 - DNA, 25 bp, Saccharomyces pastorianus
gccacctgatctatctttgatcgtg

SEQ ID NO: 119071 - DNA, 25 bp, Saccharomyces pastorianus
tttgtatttgctatctatctgggtg

SEQ ID NO: 119072 - DNA, 25 bp, Saccharomyces pastorianus
tacttcccaggtggttccattgcaa

SEQ ID NO: 119073 - DNA, 25 bp, Saccharomyces pastorianus
taatcaaggtgccttgccacctgat

SEQ ID NO: 119074 - DNA, 25 bp, Saccharomyces pastorianus
taagttgtccgattacatccctggc

SEQ ID NO: 119075 - DNA, 25 bp, Saccharomyces pastorianus
gactacattttctctttgttgaccg

SEQ ID NO: 119076 - DNA, 25 bp, Saccharomyces pastorianus
atgaacctcctgctggtgtggcttt

SEQ ID NO: 119077 - DNA, 25 bp, Saccharomyces pastorianus
ttgttgaccggttatcctgatgaac

SEQ ID NO: 119078 - DNA, 25 bp, Saccharomyces pastorianus
gatagcggcaacgtccatagacaat

SEQ ID NO: 119079 - DNA, 25 bp, Saccharomyces pastorianus
ggtacttccatttcgaacagtgcaa

SEQ ID NO: 119080 - DNA, 25 bp, Saccharomyces pastorianus
aagtgcaatcgcaatccaattctcc

SEQ ID NO: 119081 - DNA, 25 bp, Saccharomyces pastorianus
gaatgcactccattaatccagcaaa

SEQ ID NO: 119082 - DNA, 25 bp, Saccharomyces pastorianus
ccatcaatctatgtctcgggtgtca

SEQ ID NO: 119083 - DNA, 25 bp, Saccharomyces pastorianus
ccctctagctttgacgattcactaa

SEQ ID NO: 119084 - DNA, 25 bp, Saccharomyces pastorianus
ttacccactttgattgaatgcactc

SEQ ID NO: 119085 - DNA, 25 bp, Saccharomyces pastorianus
aagcgaaaacttacagccgccggcg

SEQ ID NO: 119086 - DNA, 25 bp, Saccharomyces pastorianus
gtgcaactcctaatttacacgggtt

SEQ ID NO: 119087 - DNA, 25 bp, Saccharomyces pastorianus
ggcgaatttatttaccgctgcccat

SEQ ID NO: 119088 - DNA, 25 bp, Saccharomyces pastorianus
tcgggtgtcatctatttacttcaac

SEQ ID NO: 119089 - DNA, 25 bp, Saccharomyces pastorianus
gaattgtcatgctcctctagttgcg

SEQ ID NO: 119090 - DNA, 25 bp, Saccharomyces pastorianus
ccaccggattctcttgttgcaataa

SEQ ID NO: 119091 - DNA, 25 bp, Saccharomyces pastorianus
tagttgcggattaccagccaccgac

SEQ ID NO: 119092 - DNA, 25 bp, Saccharomyces pastorianus
tccagtgaacaatgcgccaccggat

SEQ ID NO: 119093 - DNA, 25 bp, Saccharomyces pastorianus
gtccgcaaatgaagctgtggtctct

SEQ ID NO: 119094 - DNA, 25 bp, Saccharomyces pastorianus
tggcgcactatccaagtctatcttg

SEQ ID NO: 119095 - DNA, 25 bp, Saccharomyces pastorianus
gttagcatcgtatatcgtatcgtca

SEQ ID NO: 119096 - DNA, 25 bp, Saccharomyces pastorianus
gacaaaccagggtctttccattctg

SEQ ID NO: 119097 - DNA, 25 bp, Saccharomyces pastorianus
atcagcaatcggatcctgttcaggg

SEQ ID NO: 119098 - DNA, 25 bp, Saccharomyces pastorianus
agatcgtcagctttggaattgtcat

SEQ ID NO: 119099 - DNA, 25 bp, Saccharomyces pastorianus
ggagagttggcgtttccagtgaaca

SEQ ID NO: 119100 - DNA, 25 bp, Saccharomyces pastorianus
tctgagcgaagcctttatttggcaa

SEQ ID NO: 119101 - DNA, 25 bp, Saccharomyces pastorianus
cttcttcttattctatgtcgtccaa

SEQ ID NO: 119102 - DNA, 25 bp, Saccharomyces pastorianus
ccaccacagctctttctaatatgac

SEQ ID NO: 119103 - DNA, 25 bp, Saccharomyces pastorianus
gaaacttcacaagaggtcacttctt

SEQ ID NO: 119104 - DNA, 25 bp, Saccharomyces pastorianus
atgtgtttgtttgtgctgcattcct

SEQ ID NO: 119105 - DNA, 25 bp, Saccharomyces pastorianus
ctatattcacggacaaccaggcata

SEQ ID NO: 119106 - DNA, 25 bp, Saccharomyces pastorianus
ggagtttatacagtttgcattcaga

SEQ ID NO: 119107 - DNA, 25 bp, Saccharomyces pastorianus
gagtggcaagttttgttacaccaac

SEQ ID NO: 119108 - DNA, 25 bp, Saccharomyces pastorianus
gacagtcttcgttgaatgagtttca

SEQ ID NO: 119109 - DNA, 25 bp, Saccharomyces pastorianus
tttcttacagaaccctcctacaaag

SEQ ID NO: 119110 - DNA, 25 bp, Saccharomyces pastorianus
atgacattaaacctcctgttactcc

SEQ ID NO: 119111 - DNA, 25 bp, Saccharomyces pastorianus
acaaacctgagagttctgataacga

SEQ ID NO: 119112 - DNA, 25 bp, Saccharomyces pastorianus
taacgtatttgaaatcgttcaccaa

SEQ ID NO: 119113 - DNA, 25 bp, Saccharomyces pastorianus
gttaggcgaatgctacacaactgga

SEQ ID NO: 119114 - DNA, 25 bp, Saccharomyces pastorianus
gagagttctgataacgaatcacctg

SEQ ID NO: 119115 - DNA, 25 bp, Saccharomyces pastorianus
gaatcacctgaattgatcaaaacta

SEQ ID NO: 119116 - DNA, 25 bp, Saccharomyces pastorianus
gttctgataacgaatcacctgaatt

SEQ ID NO: 119117 - DNA, 25 bp, Saccharomyces pastorianus
agctcagaaaacactaacgtatttg

SEQ ID NO: 119118 - DNA, 25 bp, Saccharomyces pastorianus
ttgaaatcgttcaccaaaaggatga

SEQ ID NO: 119119 - DNA, 25 bp, Saccharomyces pastorianus
acacgttaggcgaatgctacacaac

SEQ ID NO: 119120 - DNA, 25 bp, Saccharomyces pastorianus
gaattgatcaaaactagctcagaaa

SEQ ID NO: 119121 - DNA, 25 bp, Saccharomyces pastorianus
gctatgtgtcttcttcccattcaaa

SEQ ID NO: 119122 - DNA, 25 bp, Saccharomyces pastorianus
tgacgcctactccataactattata

SEQ ID NO: 119123 - DNA, 25 bp, Saccharomyces pastorianus
tgctgacgaaagttgtgttcctctt

SEQ ID NO: 119124 - DNA, 25 bp, Saccharomyces pastorianus
agtagtggccactgttgttcgtaac

SEQ ID NO: 119125 - DNA, 25 bp, Saccharomyces pastorianus
aaccacgctacattggcacactata

SEQ ID NO: 119126 - DNA, 25 bp, Saccharomyces pastorianus
aattctgtcgtttattctcttcctt

SEQ ID NO: 119127 - DNA, 25 bp, Saccharomyces pastorianus
attggcacactatatcctgacgctc

SEQ ID NO: 119128 - DNA, 25 bp, Saccharomyces pastorianus
tgacgcctgcgctatatattctgac

SEQ ID NO: 119129 - DNA, 25 bp, Saccharomyces pastorianus
tccttcttccagttccattacttaa

SEQ ID NO: 119130 - DNA, 25 bp, Saccharomyces pastorianus
aaagctagctgcatgcaaccacgct

SEQ ID NO: 119131 - DNA, 25 bp, Saccharomyces pastorianus
ggtgttcgctccgagcacgaaaatt

SEQ ID NO: 119132 - DNA, 25 bp, Saccharomyces pastorianus
ttttggagcaggtctgactcaacta

SEQ ID NO: 119133 - DNA, 25 bp, Saccharomyces pastorianus
tcttgcgaaccgaccggtcgctgcg

SEQ ID NO: 119134 - DNA, 25 bp, Saccharomyces pastorianus
gacgactacagcaagacattactct

SEQ ID NO: 119135 - DNA, 25 bp, Saccharomyces pastorianus
ggccagatcatatgatgaaacggaa

SEQ ID NO: 119136 - DNA, 25 bp, Saccharomyces pastorianus
tattgccaaccgtcttgcgaaccga

SEQ ID NO: 119137 - DNA, 25 bp, Saccharomyces pastorianus
gcaggaaactcctattgccaaccgt

SEQ ID NO: 119138 - DNA, 25 bp, Saccharomyces pastorianus
acattactctggtcatttacgcctg

SEQ ID NO: 119139 - DNA, 25 bp, Saccharomyces pastorianus
gatcatgcgtccacgcgcttctgtg

SEQ ID NO: 119140 - DNA, 25 bp, Saccharomyces pastorianus
gcctggcgcccagaatgtacaagcg

SEQ ID NO: 119141 - DNA, 25 bp, Saccharomyces pastorianus
aaggcggtcagcaggaaactcctat

SEQ ID NO: 119142 - DNA, 25 bp, Saccharomyces pastorianus
gcttctgtggcgacggacgactaca

SEQ ID NO: 119143 - DNA, 25 bp, Saccharomyces pastorianus
gtacaagcgcagacggccagatcat

SEQ ID NO: 119144 - DNA, 25 bp, Saccharomyces pastorianus
atttcctattggtcgggtaacagat

SEQ ID NO: 119145 - DNA, 25 bp, Saccharomyces pastorianus
gattatttatttcctattggtcggg

SEQ ID NO: 119146 - DNA, 25 bp, Saccharomyces pastorianus
gctcgccccttttatttttgattat

SEQ ID NO: 119147 - DNA, 25 bp, Saccharomyces pastorianus
ttcctattggtcgggtaacagattt

SEQ ID NO: 119148 - DNA, 25 bp, Saccharomyces pastorianus
tgattatttatttcctattggtcgg

SEQ ID NO: 119149 - DNA, 25 bp, Saccharomyces pastorianus
tttgattatttatttcctattggtc

SEQ ID NO: 119150 - DNA, 25 bp, Saccharomyces pastorianus
tttcctattggtcgggtaacagatt

SEQ ID NO: 119151 - DNA, 25 bp, Saccharomyces pastorianus
tatttcctattggtcgggtaacaga

SEQ ID NO: 119152 - DNA, 25 bp, Saccharomyces pastorianus
ttgattatttatttcctattggtcg

SEQ ID NO: 119153 - DNA, 25 bp, Saccharomyces pastorianus
tcctattggtcgggtaacagatttt

SEQ ID NO: 119154 - DNA, 25 bp, Saccharomyces pastorianus
cagctcgccccttttatttttgatt

SEQ ID NO: 119155 - DNA, 25 bp, Saccharomyces pastorianus
gaagtcgtcgtctcaaaagattatg

SEQ ID NO: 119156 - DNA, 25 bp, Saccharomyces pastorianus
atgaaaattctactacgcgaccctc

SEQ ID NO: 119157 - DNA, 25 bp, Saccharomyces pastorianus
ttatcccaagattcaatacccgacg

SEQ ID NO: 119158 - DNA, 25 bp, Saccharomyces pastorianus
gcgaccctccaagtcgtcaaaggga

SEQ ID NO: 119159 - DNA, 25 bp, Saccharomyces pastorianus
tgaaatacacgaggataccgcttat

SEQ ID NO: 119160 - DNA, 25 bp, Saccharomyces pastorianus
tatacatgatctacaggtttccaag

SEQ ID NO: 119161 - DNA, 25 bp, Saccharomyces pastorianus
gataccgcttatctaatggccactt

SEQ ID NO: 119162 - DNA, 25 bp, Saccharomyces pastorianus
accgcaattgagagaagtcgtcgtc

SEQ ID NO: 119163 - DNA, 25 bp, Saccharomyces pastorianus
aaatcgtcacctttacttgacatta

SEQ ID NO: 119164 - DNA, 25 bp, Saccharomyces pastorianus
gaaggccttcagaaaaacttgtgga

SEQ ID NO: 119165 - DNA, 25 bp, Saccharomyces pastorianus
acttgtggatgctactactgtgatt

SEQ ID NO: 119166 - DNA, 25 bp, Saccharomyces pastorianus
ctggaacccagctgattttgacaaa

SEQ ID NO: 119167 - DNA, 25 bp, Saccharomyces pastorianus
gcttattgtaccaacgttcttgtga

SEQ ID NO: 119168 - DNA, 25 bp, Saccharomyces pastorianus
catggagccaggtgagttcattcat

SEQ ID NO: 119169 - DNA, 25 bp, Saccharomyces pastorianus
aatcattatgagtgcctggaaccca

SEQ ID NO: 119170 - DNA, 25 bp, Saccharomyces pastorianus
gagaaggatccggtaagccccgcct

SEQ ID NO: 119171 - DNA, 25 bp, Saccharomyces pastorianus
gccatgccatattttttcacagttc

SEQ ID NO: 119172 - DNA, 25 bp, Saccharomyces pastorianus
gggagtaccatttaacattgcatca

SEQ ID NO: 119173 - DNA, 25 bp, Saccharomyces pastorianus
acaaaatggctttgccgccatgcca

SEQ ID NO: 119174 - DNA, 25 bp, Saccharomyces pastorianus
gggcccgtttatggatttcaatgga

SEQ ID NO: 119175 - DNA, 25 bp, Saccharomyces pastorianus
ccgcctttcatgcttattgtaccaa

SEQ ID NO: 119176 - DNA, 25 bp, Saccharomyces pastorianus
gtgcgatgacgactatactggacaa

SEQ ID NO: 119177 - DNA, 25 bp, Saccharomyces pastorianus
gggaaggtatcatcacgtaaactaa

SEQ ID NO: 119178 - DNA, 25 bp, Saccharomyces pastorianus
aagaccttcttggtcgttagtagtg

SEQ ID NO: 119179 - DNA, 25 bp, Saccharomyces pastorianus
tttgttttttccgtccatagtcatc

SEQ ID NO: 119180 - DNA, 25 bp, Saccharomyces pastorianus
tcacgtaaactaaaacgcagctggg

SEQ ID NO: 119181 - DNA, 25 bp, Saccharomyces pastorianus
gatacctctagtaaagaccttcttg

SEQ ID NO: 119182 - DNA, 25 bp, Saccharomyces pastorianus
aatgattcttttgcatagatcaaga

SEQ ID NO: 119183 - DNA, 25 bp, Saccharomyces pastorianus
agtgcctgttctatctggcctaaat

SEQ ID NO: 119184 - DNA, 25 bp, Saccharomyces pastorianus
gggtggtgcaaaaagactcaacgta

SEQ ID NO: 119185 - DNA, 25 bp, Saccharomyces pastorianus
ttcaccttcatcaatgattcttttg

SEQ ID NO: 119186 - DNA, 25 bp, Saccharomyces pastorianus
aagactcaacgtaccagtgcctgtt

SEQ ID NO: 119187 - DNA, 25 bp, Saccharomyces pastorianus
tatctggcctaaattcaccttcatc

SEQ ID NO: 119188 - DNA, 25 bp, Saccharomyces pastorianus
gagacgatatccaaattaacccggg

SEQ ID NO: 119189 - DNA, 25 bp, Saccharomyces pastorianus
agtgtcacaatctgctcccgtagaa

SEQ ID NO: 119190 - DNA, 25 bp, Saccharomyces pastorianus
aacgagctgctggaagaactgctaa

SEQ ID NO: 119191 - DNA, 25 bp, Saccharomyces pastorianus
gcctatgcctactttatccaacaat

SEQ ID NO: 119192 - DNA, 25 bp, Saccharomyces pastorianus
aatcatttaacggtgcaatctcaaa

SEQ ID NO: 119193 - DNA, 25 bp, Saccharomyces pastorianus
gtttcatccaaattcactaccatac

SEQ ID NO: 119194 - DNA, 25 bp, Saccharomyces pastorianus
gcggatgatttctctgcagatgcaa

SEQ ID NO: 119195 - DNA, 25 bp, Saccharomyces pastorianus
ttaacccgggagcaactacaagtgt

SEQ ID NO: 119196 - DNA, 25 bp, Saccharomyces pastorianus
gaatttcaattcaacgcctatgcct

SEQ ID NO: 119197 - DNA, 25 bp, Saccharomyces pastorianus
gcatgtgatacatccgcaagacatt

SEQ ID NO: 119198 - DNA, 25 bp, Saccharomyces pastorianus
attaggtgtcctacggtgtttgaat

SEQ ID NO: 119199 - DNA, 25 bp, Saccharomyces pastorianus
gggttctgaattgcttctttaccat

SEQ ID NO: 119200 - DNA, 25 bp, Saccharomyces pastorianus
gacgaatacactatcaccgaattta

SEQ ID NO: 119201 - DNA, 25 bp, Saccharomyces pastorianus
tcggtttgaaccctgacattttaga

SEQ ID NO: 119202 - DNA, 25 bp, Saccharomyces pastorianus
aatttgacgcacaacgcggtgaaat

SEQ ID NO: 119203 - DNA, 25 bp, Saccharomyces pastorianus
gaaccagactttgctcttaatgtga

SEQ ID NO: 119204 - DNA, 25 bp, Saccharomyces pastorianus
cactaaagttgttagccttgcgttt

SEQ ID NO: 119205 - DNA, 25 bp, Saccharomyces pastorianus
taagtgatcccgttgacttgggttc

SEQ ID NO: 119206 - DNA, 25 bp, Saccharomyces pastorianus
gatatattcaatcaggccagacaat

SEQ ID NO: 119207 - DNA, 25 bp, Saccharomyces pastorianus
attatcaatacaaacgcacgcgcta

SEQ ID NO: 119208 - DNA, 25 bp, Saccharomyces pastorianus
gattcttggaactaacgacatctca

SEQ ID NO: 119209 - DNA, 25 bp, Saccharomyces pastorianus
attacgtgtcactcaaagtcttgat

SEQ ID NO: 119210 - DNA, 25 bp, Saccharomyces pastorianus
gacgctaggcgctacaatatccagt

SEQ ID NO: 119211 - DNA, 25 bp, Saccharomyces pastorianus
tgttcaagtcaccttccacgggaat

SEQ ID NO: 119212 - DNA, 25 bp, Saccharomyces pastorianus
tctacagttattgaagcagcggcac

SEQ ID NO: 119213 - DNA, 25 bp, Saccharomyces pastorianus
aaggtcctttgcttatcaggatcca

SEQ ID NO: 119214 - DNA, 25 bp, Saccharomyces pastorianus
gcaagaagtcatagccgccgagctt

SEQ ID NO: 119215 - DNA, 25 bp, Saccharomyces pastorianus
tttgacgcagtttgtccggtaccta

SEQ ID NO: 119216 - DNA, 25 bp, Saccharomyces pastorianus
ctcatctttatcatcaccttctgaa

SEQ ID NO: 119217 - DNA, 25 bp, Saccharomyces pastorianus
tatgaatgccaccatgcatcgttct

SEQ ID NO: 119218 - DNA, 25 bp, Saccharomyces pastorianus
catctgagaacgttgaaggtccttt

SEQ ID NO: 119219 - DNA, 25 bp, Saccharomyces pastorianus
aaagacaactcaatcgtgctaagcg

SEQ ID NO: 119220 - DNA, 25 bp, Saccharomyces pastorianus
gggatagcactctgaaacgtgttca

SEQ ID NO: 119221 - DNA, 25 bp, Saccharomyces pastorianus
gaatcatccatcatacgttcaaaag

SEQ ID NO: 119222 - DNA, 25 bp, Saccharomyces pastorianus
gaggctataaggctggaacaatcac

SEQ ID NO: 119223 - DNA, 25 bp, Saccharomyces pastorianus
gaacaatcacaattgcggtccaaga

SEQ ID NO: 119224 - DNA, 25 bp, Saccharomyces pastorianus
gagttcaattgttatccaccacaca

SEQ ID NO: 119225 - DNA, 25 bp, Saccharomyces pastorianus
gatgccgatgaaagtccagccagcg

SEQ ID NO: 119226 - DNA, 25 bp, Saccharomyces pastorianus
aagaagggcttcactctgggaaaag

SEQ ID NO: 119227 - DNA, 25 bp, Saccharomyces pastorianus
gtacgcagtactcatcttcaagaca

SEQ ID NO: 119228 - DNA, 25 bp, Saccharomyces pastorianus
aagtaattgcggagcttcctgagga

SEQ ID NO: 119229 - DNA, 25 bp, Saccharomyces pastorianus
agccagcgcaagtgctgtcacagat

SEQ ID NO: 119230 - DNA, 25 bp, Saccharomyces pastorianus
gaatcacagatcactcaaagggagg

SEQ ID NO: 119231 - DNA, 25 bp, Saccharomyces pastorianus
gcttcctgaggagttgctaaaaaat

SEQ ID NO: 119232 - DNA, 25 bp, Saccharomyces pastorianus
atgcagttttgaagagactctccaa

SEQ ID NO: 119233 - DNA, 25 bp, Saccharomyces pastorianus
gataagtggttctgcgttgactaga

SEQ ID NO: 119234 - DNA, 25 bp, Saccharomyces pastorianus
gatcagcctgttacgaatgacaacg

SEQ ID NO: 119235 - DNA, 25 bp, Saccharomyces pastorianus
aatgacaacgaggtgccatccatgc

SEQ ID NO: 119236 - DNA, 25 bp, Saccharomyces pastorianus
gatccgagcgcagaacttagttact

SEQ ID NO: 119237 - DNA, 25 bp, Saccharomyces pastorianus
ggtgccatccatgctattttacaag

SEQ ID NO: 119238 - DNA, 25 bp, Saccharomyces pastorianus
tgggaattgccccaacatccagttc

SEQ ID NO: 119239 - DNA, 25 bp, Saccharomyces pastorianus
aaatttatcgcatctcagctccttg

SEQ ID NO: 119240 - DNA, 25 bp, Saccharomyces pastorianus
agttcccaaataatcacgctcatgc

SEQ ID NO: 119241 - DNA, 25 bp, Saccharomyces pastorianus
aagcgggaggtcaaccactggcata

SEQ ID NO: 119242 - DNA, 25 bp, Saccharomyces pastorianus
acggatgttcccaagtgtctcatat

SEQ ID NO: 119243 - DNA, 25 bp, Saccharomyces pastorianus
aattctaccaacctcgattcagtga

SEQ ID NO: 119244 - DNA, 25 bp, Saccharomyces pastorianus
ttctacatctccacaacgttcaaaa

SEQ ID NO: 119245 - DNA, 25 bp, Saccharomyces pastorianus
atggacgctatgtcggctgccacaa

SEQ ID NO: 119246 - DNA, 25 bp, Saccharomyces pastorianus
ttattcaatccaagcaggttcccca

SEQ ID NO: 119247 - DNA, 25 bp, Saccharomyces pastorianus
catcggtgcatctagtttacggcta

SEQ ID NO: 119248 - DNA, 25 bp, Saccharomyces pastorianus
gggaagatttcctcttcagccattg

SEQ ID NO: 119249 - DNA, 25 bp, Saccharomyces pastorianus
taatggatgctgacttgccgggagt

SEQ ID NO: 119250 - DNA, 25 bp, Saccharomyces pastorianus
tgaaggttccatcacgacctcaatt

SEQ ID NO: 119251 - DNA, 25 bp, Saccharomyces pastorianus
tggatatgttatcgccttctccatc

SEQ ID NO: 119252 - DNA, 25 bp, Saccharomyces pastorianus
aaatcttcattcacgcagcagggta

SEQ ID NO: 119253 - DNA, 25 bp, Saccharomyces pastorianus
agattttcccataccggctattgaa

SEQ ID NO: 119254 - DNA, 25 bp, Saccharomyces pastorianus
gttctgctcttgaagttttcgcttc

SEQ ID NO: 119255 - DNA, 25 bp, Saccharomyces pastorianus
ttccctttagcaccagaagtcatga

SEQ ID NO: 119256 - DNA, 25 bp, Saccharomyces pastorianus
ttctgcacctgctcttgttcttgtt

SEQ ID NO: 119257 - DNA, 25 bp, Saccharomyces pastorianus
atgtctctactatttttcgttgcta

SEQ ID NO: 119258 - DNA, 25 bp, Saccharomyces pastorianus
ttcttccatcaggttctttgccttg

SEQ ID NO: 119259 - DNA, 25 bp, Saccharomyces pastorianus
ttgccttgttttgcctttgttttgt

SEQ ID NO: 119260 - DNA, 25 bp, Saccharomyces pastorianus
acatgtgtatctgggttctgcacct

SEQ ID NO: 119261 - DNA, 25 bp, Saccharomyces pastorianus
aatatctggttgtgctttcttccat

SEQ ID NO: 119262 - DNA, 25 bp, Saccharomyces pastorianus
tcttcggcgttctcaaactcatatt

SEQ ID NO: 119263 - DNA, 25 bp, Saccharomyces pastorianus
ttcttgttcttgttcatcgctagtc

SEQ ID NO: 119264 - DNA, 25 bp, Saccharomyces pastorianus
aactcatattgttcaatgtctctac

SEQ ID NO: 119265 - DNA, 25 bp, Saccharomyces pastorianus
gcaccaggcttaattacgcgttagt

SEQ ID NO: 119266 - DNA, 25 bp, Saccharomyces pastorianus
agatagtgcagacgcgggtacttcc

SEQ ID NO: 119267 - DNA, 25 bp, Saccharomyces pastorianus
aatatcacatactttgcgcaccagg

SEQ ID NO: 119268 - DNA, 25 bp, Saccharomyces pastorianus
gtatatgaccataacgacgacggac

SEQ ID NO: 119269 - DNA, 25 bp, Saccharomyces pastorianus
aataagcgtcgtgtcggcataaccg

SEQ ID NO: 119270 - DNA, 25 bp, Saccharomyces pastorianus
gttagtatgcctttgttgccaccga

SEQ ID NO: 119271 - DNA, 25 bp, Saccharomyces pastorianus
aacactgatgctattgtcgtcgcct

SEQ ID NO: 119272 - DNA, 25 bp, Saccharomyces pastorianus
gtcgtcgcctaccaagaagcaacag

SEQ ID NO: 119273 - DNA, 25 bp, Saccharomyces pastorianus
aggccacggctgtcgaaacactgat

SEQ ID NO: 119274 - DNA, 25 bp, Saccharomyces pastorianus
gtgccggcgacatctgctggagaac

SEQ ID NO: 119275 - DNA, 25 bp, Saccharomyces pastorianus
ggacaagacacttcccgaactggag

SEQ ID NO: 119276 - DNA, 25 bp, Saccharomyces pastorianus
cgggctttcgactcgttcaagaatg

SEQ ID NO: 119277 - DNA, 25 bp, Saccharomyces pastorianus
gaagcggaccatccacattgtgggc

SEQ ID NO: 119278 - DNA, 25 bp, Saccharomyces pastorianus
gaacatgcagacttttgcgcctttc

SEQ ID NO: 119279 - DNA, 25 bp, Saccharomyces pastorianus
ttttttaccaatgcgcacagccaaa

SEQ ID NO: 119280 - DNA, 25 bp, Saccharomyces pastorianus
gtgtcctccgcaaaatcagctgttt

SEQ ID NO: 119281 - DNA, 25 bp, Saccharomyces pastorianus
aaatctcctctgctacatgaacatg

SEQ ID NO: 119282 - DNA, 25 bp, Saccharomyces pastorianus
attaatcaccacatccacgagtttg

SEQ ID NO: 119283 - DNA, 25 bp, Saccharomyces pastorianus
acattccgcaattgacccttgaaga

SEQ ID NO: 119284 - DNA, 25 bp, Saccharomyces pastorianus
gcgcctttcctgatcagcaatgtga

SEQ ID NO: 119285 - DNA, 25 bp, Saccharomyces pastorianus
atggtggacccgttcgcacgaagat

SEQ ID NO: 119286 - DNA, 25 bp, Saccharomyces pastorianus
acttggtcaacgttgaggctccgga

SEQ ID NO: 119287 - DNA, 25 bp, Saccharomyces pastorianus
tacacttacctatggactggactcc

SEQ ID NO: 119288 - DNA, 25 bp, Saccharomyces pastorianus
gcgaggttatgtatttcttgcccaa

SEQ ID NO: 119289 - DNA, 25 bp, Saccharomyces pastorianus
aataattaccttcatcaccgtctta

SEQ ID NO: 119290 - DNA, 25 bp, Saccharomyces pastorianus
gatcagtgcctatatgttcaaccaa

SEQ ID NO: 119291 - DNA, 25 bp, Saccharomyces pastorianus
tttgctgctttgacaaccgtgttca

SEQ ID NO: 119292 - DNA, 25 bp, Saccharomyces pastorianus
atgttctccatcatatcttccagga

SEQ ID NO: 119293 - DNA, 25 bp, Saccharomyces pastorianus
atctgggcaaccttgtcaacttttt

SEQ ID NO: 119294 - DNA, 25 bp, Saccharomyces pastorianus
gtatttccactgatactggctcaga

SEQ ID NO: 119295 - DNA, 25 bp, Saccharomyces pastorianus
gaccacagcgtgatcagtatttcca

SEQ ID NO: 119296 - DNA, 25 bp, Saccharomyces pastorianus
aacattggccgcgttggttgtcgta

SEQ ID NO: 119297 - DNA, 25 bp, Saccharomyces pastorianus
aattcttgcggtctcatttgtatcc

SEQ ID NO: 119298 - DNA, 25 bp, Saccharomyces pastorianus
gttaaaaaatgcagtccctccttcg

SEQ ID NO: 119299 - DNA, 25 bp, Saccharomyces pastorianus
gacagctgtaattaccgatctactc

SEQ ID NO: 119300 - DNA, 25 bp, Saccharomyces pastorianus
gaagatgtctatgtttctccattga

SEQ ID NO: 119301 - DNA, 25 bp, Saccharomyces pastorianus
atgacacctatctttcgtattcttc

SEQ ID NO: 119302 - DNA, 25 bp, Saccharomyces pastorianus
tattcttccaccgaagcgtgctaaa

SEQ ID NO: 119303 - DNA, 25 bp, Saccharomyces pastorianus
gacagatggctacttggatgatgat

SEQ ID NO: 119304 - DNA, 25 bp, Saccharomyces pastorianus
ggcatgagagccacccagttaaaga

SEQ ID NO: 119305 - DNA, 25 bp, Saccharomyces pastorianus
gcccatttttgttgcttatttctgt

SEQ ID NO: 119306 - DNA, 25 bp, Saccharomyces pastorianus
agtccctccttcgaacagtatgata

SEQ ID NO: 119307 - DNA, 25 bp, Saccharomyces pastorianus
gaagatgtccattttaaagtcccta

SEQ ID NO: 119308 - DNA, 25 bp, Saccharomyces pastorianus
agaattcacgttcgctaaaactgca

SEQ ID NO: 119309 - DNA, 25 bp, Saccharomyces pastorianus
agaccaccaccgacaaagtatgcaa

SEQ ID NO: 119310 - DNA, 25 bp, Saccharomyces pastorianus
atccgcatgggatcttactgaattc

SEQ ID NO: 119311 - DNA, 25 bp, Saccharomyces pastorianus
gagggctttgtgctgaaaaccaacg

SEQ ID NO: 119312 - DNA, 25 bp, Saccharomyces pastorianus
agacgacggcggcatcaaggactac

SEQ ID NO: 119313 - DNA, 25 bp, Saccharomyces pastorianus
gggagtcgctcgagaaacagccaaa

SEQ ID NO: 119314 - DNA, 25 bp, Saccharomyces pastorianus
ggatctgtcctaacggaggtgacaa

SEQ ID NO: 119315 - DNA, 25 bp, Saccharomyces pastorianus
tgagacggacaacgccgacatgcca

SEQ ID NO: 119316 - DNA, 25 bp, Saccharomyces pastorianus
gaaggaccacgtcatcgcaaagatt

SEQ ID NO: 119317 - DNA, 25 bp, Saccharomyces pastorianus
aatacttcatcgaggccgtggaaaa

SEQ ID NO: 119318 - DNA, 25 bp, Saccharomyces pastorianus
ctaacaccaataacaatcgccaact

SEQ ID NO: 119319 - DNA, 25 bp, Saccharomyces pastorianus
aagttatcctgtcgaagcacggtaa

SEQ ID NO: 119320 - DNA, 25 bp, Saccharomyces pastorianus
acaataggtagtgggcctggcagta

SEQ ID NO: 119321 - DNA, 25 bp, Saccharomyces pastorianus
gacgagggcgtaggttcttataatt

SEQ ID NO: 119322 - DNA, 25 bp, Saccharomyces pastorianus
gatagcacgagctcacttagaaagc

SEQ ID NO: 119323 - DNA, 25 bp, Saccharomyces pastorianus
ggcagtattgtgctggatttcccat

SEQ ID NO: 119324 - DNA, 25 bp, Saccharomyces pastorianus
aaacggcaactgttccaatggagaa

SEQ ID NO: 119325 - DNA, 25 bp, Saccharomyces pastorianus
gcgtaggcttatctaactccaacag

SEQ ID NO: 119326 - DNA, 25 bp, Saccharomyces pastorianus
taacggtccatcaagcgtaggctta

SEQ ID NO: 119327 - DNA, 25 bp, Saccharomyces pastorianus
gctggatttcccatcatttttggta

SEQ ID NO: 119328 - DNA, 25 bp, Saccharomyces pastorianus
cattgtcttcgttatcggagttgca

SEQ ID NO: 119329 - DNA, 25 bp, Saccharomyces pastorianus
atcatttttggtagggtgcgtattc

SEQ ID NO: 119330 - DNA, 25 bp, Saccharomyces pastorianus
ttagaaagccacctaacggtccatc

SEQ ID NO: 119331 - DNA, 25 bp, Saccharomyces pastorianus
ggcagaatatgctttccgccacaaa

SEQ ID NO: 119332 - DNA, 25 bp, Saccharomyces pastorianus
atgtggctagctgttttccccatag

SEQ ID NO: 119333 - DNA, 25 bp, Saccharomyces pastorianus
ttactaagatctttcccagccaatg

SEQ ID NO: 119334 - DNA, 25 bp, Saccharomyces pastorianus
ggctcagctctatattttgcatcat

SEQ ID NO: 119335 - DNA, 25 bp, Saccharomyces pastorianus
atcttgaacgtgtgtcttgctggtg

SEQ ID NO: 119336 - DNA, 25 bp, Saccharomyces pastorianus
ggttgtcctgcaaacatcttctaag

SEQ ID NO: 119337 - DNA, 25 bp, Saccharomyces pastorianus
ggcaacctcgtcaagatgcgggcaa

SEQ ID NO: 119338 - DNA, 25 bp, Saccharomyces pastorianus
agcgctattcctaccactttagtga

SEQ ID NO: 119339 - DNA, 25 bp, Saccharomyces pastorianus
actttagtgactgcgccaacggaaa

SEQ ID NO: 119340 - DNA, 25 bp, Saccharomyces pastorianus
ggctctttcattcaggcggctaaaa

SEQ ID NO: 119341 - DNA, 25 bp, Saccharomyces pastorianus
agacaaaattgcaggcttcctccac

SEQ ID NO: 119342 - DNA, 25 bp, Saccharomyces pastorianus
ataggacgaattgtcccacacaaat

SEQ ID NO: 119343 - DNA, 25 bp, Saccharomyces pastorianus
tgcctggaaagctattacacaattg

SEQ ID NO: 119344 - DNA, 25 bp, Saccharomyces pastorianus
ttgtaaccacaaactcatcaatagg

SEQ ID NO: 119345 - DNA, 25 bp, Saccharomyces pastorianus
ccacacaaataatgaatcccgctaa

SEQ ID NO: 119346 - DNA, 25 bp, Saccharomyces pastorianus
gccggcaaacccttcctcaatttat

SEQ ID NO: 119347 - DNA, 25 bp, Saccharomyces pastorianus
gaatgtacactggattacccctaat

SEQ ID NO: 119348 - DNA, 25 bp, Saccharomyces pastorianus
gaatcccgctaaaaacgcattgaat

SEQ ID NO: 119349 - DNA, 25 bp, Saccharomyces pastorianus
gctctgtttttagaaatgcctggaa

SEQ ID NO: 119350 - DNA, 25 bp, Saccharomyces pastorianus
aatgtatcaattagcttcagtttag

SEQ ID NO: 119351 - DNA, 25 bp, Saccharomyces pastorianus
gcttcagtttaggatatttttcaat

SEQ ID NO: 119352 - DNA, 25 bp, Saccharomyces pastorianus
ataaactcggcaaaagctctgtttt

SEQ ID NO: 119353 - DNA, 25 bp, Saccharomyces pastorianus
gtgtaatagctttccaggcatttct

SEQ ID NO: 119354 - DNA, 25 bp, Saccharomyces pastorianus
attcaatgcgtttttagcgggattc

SEQ ID NO: 119355 - DNA, 25 bp, Saccharomyces pastorianus
gtacattcattatcttgatccgtga

SEQ ID NO: 119356 - DNA, 25 bp, Saccharomyces pastorianus
tgatacattctgtttctttttggta

SEQ ID NO: 119357 - DNA, 25 bp, Saccharomyces pastorianus
aagtaaccagcacgtcatctgcagt

SEQ ID NO: 119358 - DNA, 25 bp, Saccharomyces pastorianus
gatccgtgataattttccattcaat

SEQ ID NO: 119359 - DNA, 25 bp, Saccharomyces pastorianus
gggacaattcgtcctattgatgagt

SEQ ID NO: 119360 - DNA, 25 bp, Saccharomyces pastorianus
gggtaatccagtgtacattcattat

SEQ ID NO: 119361 - DNA, 25 bp, Saccharomyces pastorianus
agacttctaagagggcatattttgc

SEQ ID NO: 119362 - DNA, 25 bp, Saccharomyces pastorianus
cgggattcattatttgtgtgggaca

SEQ ID NO: 119363 - DNA, 25 bp, Saccharomyces pastorianus
aacagagcttttgccgagtttattg

SEQ ID NO: 119364 - DNA, 25 bp, Saccharomyces pastorianus
ttgttggtgttgtcgttgttctaat

SEQ ID NO: 119365 - DNA, 25 bp, Saccharomyces pastorianus
ataggtcagttcatttgttggtgtt

SEQ ID NO: 119366 - DNA, 25 bp, Saccharomyces pastorianus
tagagttaatatgggcgtggctcct

SEQ ID NO: 119367 - DNA, 25 bp, Saccharomyces pastorianus
aagaaggacgcagccctagtagggt

SEQ ID NO: 119368 - DNA, 25 bp, Saccharomyces pastorianus
ggctcctccttctactgtgatttat

SEQ ID NO: 119369 - DNA, 25 bp, Saccharomyces pastorianus
gaatgatacattttacgacgaagtc

SEQ ID NO: 119370 - DNA, 25 bp, Saccharomyces pastorianus
gtggcccctctagtgtatgaagaag

SEQ ID NO: 119371 - DNA, 25 bp, Saccharomyces pastorianus
aatggaaacaatacaatgccggtaa

SEQ ID NO: 119372 - DNA, 25 bp, Saccharomyces pastorianus
gatttatcaacctattcaacaacct

SEQ ID NO: 119373 - DNA, 25 bp, Saccharomyces pastorianus
tagggtggcccctctagtgtatgaa

SEQ ID NO: 119374 - DNA, 25 bp, Saccharomyces pastorianus
tacaatgccggtaaatgagggtttt

SEQ ID NO: 119375 - DNA, 25 bp, Saccharomyces pastorianus
gctcatgttacttcacaatctccaa

SEQ ID NO: 119376 - DNA, 25 bp, Saccharomyces pastorianus
ggaaacagttacaatactccctcct

SEQ ID NO: 119377 - DNA, 25 bp, Saccharomyces pastorianus
actggtagcaacaacgctcatgtta

SEQ ID NO: 119378 - DNA, 25 bp, Saccharomyces pastorianus
atcagcgattatggcgagaactact

SEQ ID NO: 119379 - DNA, 25 bp, Saccharomyces pastorianus
aaatgcggccaatactggtagcaac

SEQ ID NO: 119380 - DNA, 25 bp, Saccharomyces pastorianus
aatttcgaaggtagcagccctcagc

SEQ ID NO: 119381 - DNA, 25 bp, Saccharomyces pastorianus
aattcgtttatccaaaatgcggcca

SEQ ID NO: 119382 - DNA, 25 bp, Saccharomyces pastorianus
tagaagtccatatccaaccgaaaat

SEQ ID NO: 119383 - DNA, 25 bp, Saccharomyces pastorianus
atactccctcctctaatcatagaag

SEQ ID NO: 119384 - DNA, 25 bp, Saccharomyces pastorianus
agccctcagccgcaatatgatgcta

SEQ ID NO: 119385 - DNA, 25 bp, Saccharomyces pastorianus
atctccaatttttgacatcagcgat

SEQ ID NO: 119386 - DNA, 25 bp, Saccharomyces pastorianus
gcagaccagcatcagagggaccgta

SEQ ID NO: 119387 - DNA, 25 bp, Saccharomyces pastorianus
taggacacattcatacggcggtaca

SEQ ID NO: 119388 - DNA, 25 bp, Saccharomyces pastorianus
gagagcaacatcctcattcaccaaa

SEQ ID NO: 119389 - DNA, 25 bp, Saccharomyces pastorianus
ggacaacaccaattacagctgcaag

SEQ ID NO: 119390 - DNA, 25 bp, Saccharomyces pastorianus
gctattttccatcagcttggttcat

SEQ ID NO: 119391 - DNA, 25 bp, Saccharomyces pastorianus
ggaagagtctgttccctctaaaagc

SEQ ID NO: 119392 - DNA, 25 bp, Saccharomyces pastorianus
cagagtcctttactgcataacgaag

SEQ ID NO: 119393 - DNA, 25 bp, Saccharomyces pastorianus
aaagagatccatccgcgaactgaag

SEQ ID NO: 119394 - DNA, 25 bp, Saccharomyces pastorianus
aaagcgcctatttcaccaggaacat

SEQ ID NO: 119395 - DNA, 25 bp, Saccharomyces pastorianus
aatgcggtaaggtcaccctaatcat

SEQ ID NO: 119396 - DNA, 25 bp, Saccharomyces pastorianus
gaagccgtgcgacaagatccagagt

SEQ ID NO: 119397 - DNA, 25 bp, Saccharomyces pastorianus
cagtgtcttcggagacaccaacacc

SEQ ID NO: 119398 - DNA, 25 bp, Saccharomyces pastorianus
ataccgccttaatagatgcatcccc

SEQ ID NO: 119399 - DNA, 25 bp, Saccharomyces pastorianus
atgattattgttgtcctttatgtag

SEQ ID NO: 119400 - DNA, 25 bp, Saccharomyces pastorianus
actggtagcatgattattgttgtcc

SEQ ID NO: 119401 - DNA, 25 bp, Saccharomyces pastorianus
aagatgccgcttgggttgcggaacc

SEQ ID NO: 119402 - DNA, 25 bp, Saccharomyces pastorianus
taatagatgcatccccagtgtcttc

SEQ ID NO: 119403 - DNA, 25 bp, Saccharomyces pastorianus
tattgacagtagcaaataccgcctt

SEQ ID NO: 119404 - DNA, 25 bp, Saccharomyces pastorianus
gttgcggaaccagaacccaaggaat

SEQ ID NO: 119405 - DNA, 25 bp, Saccharomyces pastorianus
caacaccccacatattactggtagc

SEQ ID NO: 119406 - DNA, 25 bp, Saccharomyces pastorianus
gatgcatccccagtgtcttcggaga

SEQ ID NO: 119407 - DNA, 25 bp, Saccharomyces pastorianus
gatttatgaaagatgccgcttgggt

SEQ ID NO: 119408 - DNA, 25 bp, Saccharomyces pastorianus
tacagcagcggatcacaatacaaat

SEQ ID NO: 119409 - DNA, 25 bp, Saccharomyces pastorianus
aagtgagtcctatcttacagcagcg

SEQ ID NO: 119410 - DNA, 25 bp, Saccharomyces pastorianus
gaaattcccataccagcaatgagtg

SEQ ID NO: 119411 - DNA, 25 bp, Saccharomyces pastorianus
ccccggaaacgattagtggcattga

SEQ ID NO: 119412 - DNA, 25 bp, Saccharomyces pastorianus
gtaaaagtgttccacgaccctctat

SEQ ID NO: 119413 - DNA, 25 bp, Saccharomyces pastorianus
gctccttggagcgtaaagatcgtaa

SEQ ID NO: 119414 - DNA, 25 bp, Saccharomyces pastorianus
gcaacacacccctcggtaaaatcaa

SEQ ID NO: 119415 - DNA, 25 bp, Saccharomyces pastorianus
ggatttcccgttcagagaacactgc

SEQ ID NO: 119416 - DNA, 25 bp, Saccharomyces pastorianus
aaatttgactctcattgcagctcct

SEQ ID NO: 119417 - DNA, 25 bp, Saccharomyces pastorianus
gcatccttttgccagtcaatggata

SEQ ID NO: 119418 - DNA, 25 bp, Saccharomyces pastorianus
aaatcattcccatgaggctcaaaat

SEQ ID NO: 119419 - DNA, 25 bp, Saccharomyces pastorianus
gtgtcgcttacttttgacagcacat

SEQ ID NO: 119420 - DNA, 25 bp, Saccharomyces pastorianus
ggaaaattccccttatgaattgcat

SEQ ID NO: 119421 - DNA, 25 bp, Saccharomyces pastorianus
gaaatactggttacggaggttcatt

SEQ ID NO: 119422 - DNA, 25 bp, Saccharomyces pastorianus
ggaaaactactttcgctgtgtacat

SEQ ID NO: 119423 - DNA, 25 bp, Saccharomyces pastorianus
aaaggcacgatctatttcaatacaa

SEQ ID NO: 119424 - DNA, 25 bp, Saccharomyces pastorianus
gctgtgtacatagacgatccgtgga

SEQ ID NO: 119425 - DNA, 25 bp, Saccharomyces pastorianus
ggaggttcattagaccctggtttat

SEQ ID NO: 119426 - DNA, 25 bp, Saccharomyces pastorianus
aatagaaatatcacccaggcaggat

SEQ ID NO: 119427 - DNA, 25 bp, Saccharomyces pastorianus
gaccctggtttattgtcgatggaaa

SEQ ID NO: 119428 - DNA, 25 bp, Saccharomyces pastorianus
gaatccaagataccgccattttctt

SEQ ID NO: 119429 - DNA, 25 bp, Saccharomyces pastorianus
tacataccagggaacgtgtcgctta

SEQ ID NO: 119430 - DNA, 25 bp, Saccharomyces pastorianus
aatattagcgccttggttgcataca

SEQ ID NO: 119431 - DNA, 25 bp, Saccharomyces pastorianus
gaaatattcagatcgctgcatttag

SEQ ID NO: 119432 - DNA, 25 bp, Saccharomyces pastorianus
atttgataacgctgaccacgaatgt

SEQ ID NO: 119433 - DNA, 25 bp, Saccharomyces pastorianus
aacgcaattttgctgcttctgagca

SEQ ID NO: 119434 - DNA, 25 bp, Saccharomyces pastorianus
gaccacgaatgtagttctggcacag

SEQ ID NO: 119435 - DNA, 25 bp, Saccharomyces pastorianus
gctgcatttagttagatcattgggt

SEQ ID NO: 119436 - DNA, 25 bp, Saccharomyces pastorianus
gaaaagcttgattgcccatgataat

SEQ ID NO: 119437 - DNA, 25 bp, Saccharomyces pastorianus
gttctggcacagaggaattctcaga

SEQ ID NO: 119438 - DNA, 25 bp, Saccharomyces pastorianus
agggcgagtactatgacgatgatga

SEQ ID NO: 119439 - DNA, 25 bp, Saccharomyces pastorianus
agaagacggctcaagcggatctgaa

SEQ ID NO: 119440 - DNA, 25 bp, Saccharomyces pastorianus
gcatacattgctagtaatctaccaa

SEQ ID NO: 119441 - DNA, 25 bp, Saccharomyces pastorianus
taggtagtaccgatgctccactatt

SEQ ID NO: 119442 - DNA, 25 bp, Saccharomyces pastorianus
tgccagattagatccagcctacatc

SEQ ID NO: 119443 - DNA, 25 bp, Saccharomyces pastorianus
gccagctgctaaccaagtcgaaata

SEQ ID NO: 119444 - DNA, 25 bp, Saccharomyces pastorianus
gaagacatcttgagtgtgccaacaa

SEQ ID NO: 119445 - DNA, 25 bp, Saccharomyces pastorianus
acatccattactacctcaagacgaa

SEQ ID NO: 119446 - DNA, 25 bp, Saccharomyces pastorianus
tatttgatgcattggcctgccagat

SEQ ID NO: 119447 - DNA, 25 bp, Saccharomyces pastorianus
gtcttgccaaaatctgtgaatcccg

SEQ ID NO: 119448 - DNA, 25 bp, Saccharomyces pastorianus
aacccggacacgttgttattagctg

SEQ ID NO: 119449 - DNA, 25 bp, Saccharomyces pastorianus
ggtaataagcttacgccagctgcta

SEQ ID NO: 119450 - DNA, 25 bp, Saccharomyces pastorianus
aggatggttctcgtgcagtggatat

SEQ ID NO: 119451 - DNA, 25 bp, Saccharomyces pastorianus
ggttgaagcgtattctccgttaggt

SEQ ID NO: 119452 - DNA, 25 bp, Saccharomyces pastorianus
gattttggcaagacaacataacctc

SEQ ID NO: 119453 - DNA, 25 bp, Saccharomyces pastorianus
tttccttcgatatgttattgatagc

SEQ ID NO: 119454 - DNA, 25 bp, Saccharomyces pastorianus
gatcgggattcacagattttggcaa

SEQ ID NO: 119455 - DNA, 25 bp, Saccharomyces pastorianus
cagctaataacaacgtgtccgggtt

SEQ ID NO: 119456 - DNA, 25 bp, Saccharomyces pastorianus
gaatacttcgaaaggagaccaattt

SEQ ID NO: 119457 - DNA, 25 bp, Saccharomyces pastorianus
ctgttcgttttgattcgatcgggat

SEQ ID NO: 119458 - DNA, 25 bp, Saccharomyces pastorianus
tgatagcttcaaagtcctcagtaga

SEQ ID NO: 119459 - DNA, 25 bp, Saccharomyces pastorianus
acctctttggacgtgccagctaata

SEQ ID NO: 119460 - DNA, 25 bp, Saccharomyces pastorianus
gaccaatttggatgtacaacccttt

SEQ ID NO: 119461 - DNA, 25 bp, Saccharomyces pastorianus
aacataacctctttggacgtgccag

SEQ ID NO: 119462 - DNA, 25 bp, Saccharomyces pastorianus
gacaaagtaaatattttcctgttcg

SEQ ID NO: 119463 - DNA, 25 bp, Saccharomyces pastorianus
gagagcttttgagtcgtgatgattc

SEQ ID NO: 119464 - DNA, 25 bp, Saccharomyces pastorianus
tttcaatgagggtaacactgcaact

SEQ ID NO: 119465 - DNA, 25 bp, Saccharomyces pastorianus
gaaaccatcagtgaggtccaggaag

SEQ ID NO: 119466 - DNA, 25 bp, Saccharomyces pastorianus
agtcgtgatgattcagggcttacaa

SEQ ID NO: 119467 - DNA, 25 bp, Saccharomyces pastorianus
atatggttactcactgttttcggtt

SEQ ID NO: 119468 - DNA, 25 bp, Saccharomyces pastorianus
cactgcaactccatatttcctagta

SEQ ID NO: 119469 - DNA, 25 bp, Saccharomyces pastorianus
gtttaaatccattgagcccttacca

SEQ ID NO: 119470 - DNA, 25 bp, Saccharomyces pastorianus
agaggaggtcttcaatttcaatgag

SEQ ID NO: 119471 - DNA, 25 bp, Saccharomyces pastorianus
cggtttttattcatcgcggcgaggc

SEQ ID NO: 119472 - DNA, 25 bp, Saccharomyces pastorianus
gatacgcggatacagagaacccttt

SEQ ID NO: 119473 - DNA, 25 bp, Saccharomyces pastorianus
cagagaaccctttattgttggcaaa

SEQ ID NO: 119474 - DNA, 25 bp, Saccharomyces pastorianus
acttcgtgttggctcataggtaccc

SEQ ID NO: 119475 - DNA, 25 bp, Saccharomyces pastorianus
ggaccgtgttattcgtgtagatcaa

SEQ ID NO: 119476 - DNA, 25 bp, Saccharomyces pastorianus
tagagcatctagacaccgctatcaa

SEQ ID NO: 119477 - DNA, 25 bp, Saccharomyces pastorianus
aatccttaacttctactatccaaca

SEQ ID NO: 119478 - DNA, 25 bp, Saccharomyces pastorianus
caggctgcatttttggaccgtgtta

SEQ ID NO: 119479 - DNA, 25 bp, Saccharomyces pastorianus
ataggtaccctcacttgaagcctgt

SEQ ID NO: 119480 - DNA, 25 bp, Saccharomyces pastorianus
gagcatgctcccaagtgtcagaatt

SEQ ID NO: 119481 - DNA, 25 bp, Saccharomyces pastorianus
gcatgattcgtatatggcagttcca

SEQ ID NO: 119482 - DNA, 25 bp, Saccharomyces pastorianus
gcgaaacttggccaatcaattcaat

SEQ ID NO: 119483 - DNA, 25 bp, Saccharomyces pastorianus
gaatttatcagatgctcaggctgca

SEQ ID NO: 119484 - DNA, 25 bp, Saccharomyces pastorianus
agggcactacaatggccaattgcga

SEQ ID NO: 119485 - DNA, 25 bp, Saccharomyces pastorianus
gaaggtcattgagacattctacccc

SEQ ID NO: 119486 - DNA, 25 bp, Saccharomyces pastorianus
cttggagccgcattagtcaacgaat

SEQ ID NO: 119487 - DNA, 25 bp, Saccharomyces pastorianus
acagatggactgcacttttccggaa

SEQ ID NO: 119488 - DNA, 25 bp, Saccharomyces pastorianus
ggtgatgcttggcaacaactgctaa

SEQ ID NO: 119489 - DNA, 25 bp, Saccharomyces pastorianus
atgctcagcaggtccccaaagtgtc

SEQ ID NO: 119490 - DNA, 25 bp, Saccharomyces pastorianus
tcggatacttccgtaccaacgagaa

SEQ ID NO: 119491 - DNA, 25 bp, Saccharomyces pastorianus
tgggtgctaacgatgcatgctcagc

SEQ ID NO: 119492 - DNA, 25 bp, Saccharomyces pastorianus
aagggtacacttctagatgggcgtt

SEQ ID NO: 119493 - DNA, 25 bp, Saccharomyces pastorianus
aaatgttcccttcgtggctttgaat

SEQ ID NO: 119494 - DNA, 25 bp, Saccharomyces pastorianus
atgaagtcttaccatatccgtccta

SEQ ID NO: 119495 - DNA, 25 bp, Saccharomyces pastorianus
gccatttattccgatgccttagcaa

SEQ ID NO: 119496 - DNA, 25 bp, Saccharomyces pastorianus
tactggtgtgttgaagcgatactta

SEQ ID NO: 119497 - DNA, 25 bp, Saccharomyces pastorianus
ttaacggaacaagatctcaacgctg

SEQ ID NO: 119498 - DNA, 25 bp, Saccharomyces pastorianus
aaattcggacacttatatgtcgagc

SEQ ID NO: 119499 - DNA, 25 bp, Saccharomyces pastorianus
aatcaggttcccagctagtcataga

SEQ ID NO: 119500 - DNA, 25 bp, Saccharomyces pastorianus
gcgatacttaagaaagctccccaac

SEQ ID NO: 119501 - DNA, 25 bp, Saccharomyces pastorianus
aaggttacacggtacagtcactgga

SEQ ID NO: 119502 - DNA, 25 bp, Saccharomyces pastorianus
gaatgacgctttataatttggcttt

SEQ ID NO: 119503 - DNA, 25 bp, Saccharomyces pastorianus
gctttagtttttgctccaggtttga

SEQ ID NO: 119504 - DNA, 25 bp, Saccharomyces pastorianus
ggaagaccttccaagggaacattat

SEQ ID NO: 119505 - DNA, 25 bp, Saccharomyces pastorianus
atatgtcgagcaagagcgctttaaa

SEQ ID NO: 119506 - DNA, 25 bp, Saccharomyces pastorianus
gatctcaacgctgttactggtgtgt

SEQ ID NO: 119507 - DNA, 25 bp, Saccharomyces pastorianus
gtcagcatatgctatttccgcaagc

SEQ ID NO: 119508 - DNA, 25 bp, Saccharomyces pastorianus
aatgtctgccgcatgtgcggtttta

SEQ ID NO: 119509 - DNA, 25 bp, Saccharomyces pastorianus
gttccagtagctaccgtcgctatta

SEQ ID NO: 119510 - DNA, 25 bp, Saccharomyces pastorianus
gctgtcagactgcttggcgcttatg

SEQ ID NO: 119511 - DNA, 25 bp, Saccharomyces pastorianus
tattattgcctccagtatggcggaa

SEQ ID NO: 119512 - DNA, 25 bp, Saccharomyces pastorianus
aaatctctgtcgctcaaaagttgga

SEQ ID NO: 119513 - DNA, 25 bp, Saccharomyces pastorianus
atcagactctgacttgccggtaatg

SEQ ID NO: 119514 - DNA, 25 bp, Saccharomyces pastorianus
ggctgctcacttgccaggtatggtg

SEQ ID NO: 119515 - DNA, 25 bp, Saccharomyces pastorianus
gtgacaatagtctctgctcatagaa

SEQ ID NO: 119516 - DNA, 25 bp, Saccharomyces pastorianus
gaacgctgcgctgttggctgtcaga

SEQ ID NO: 119517 - DNA, 25 bp, Saccharomyces pastorianus
gtgtgcccgtaaaaggttcttgtct

SEQ ID NO: 119518 - DNA, 25 bp, Saccharomyces pastorianus
ttttagggcagtaccagcaaacgct

SEQ ID NO: 119519 - DNA, 25 bp, Saccharomyces pastorianus
aacgccagtatttttcctgcggata

SEQ ID NO: 119520 - DNA, 25 bp, Saccharomyces pastorianus
ttatcgaggactgggtataaccctt

SEQ ID NO: 119521 - DNA, 25 bp, Saccharomyces pastorianus
gctagtttagttttgacacccgtgg

SEQ ID NO: 119522 - DNA, 25 bp, Saccharomyces pastorianus
ttgcctggtttgcaacctacgaaat

SEQ ID NO: 119523 - DNA, 25 bp, Saccharomyces pastorianus
aggaagcgctggattggcattcaac

SEQ ID NO: 119524 - DNA, 25 bp, Saccharomyces pastorianus
ggcaaatcctgatctctggtggagt

SEQ ID NO: 119525 - DNA, 25 bp, Saccharomyces pastorianus
aaagcttcggtggtgttgcctggtt

SEQ ID NO: 119526 - DNA, 25 bp, Saccharomyces pastorianus
gtggcaagggcaatcgggcactttt

SEQ ID NO: 119527 - DNA, 25 bp, Saccharomyces pastorianus
gtcgttgaaagataggcactccctt

SEQ ID NO: 119528 - DNA, 25 bp, Saccharomyces pastorianus
gcactcccttgatgacccaaaaaga

SEQ ID NO: 119529 - DNA, 25 bp, Saccharomyces pastorianus
tggatggcacattatgcctacccca

SEQ ID NO: 119530 - DNA, 25 bp, Saccharomyces pastorianus
attgcacatcgcctcgaagctaaat

SEQ ID NO: 119531 - DNA, 25 bp, Saccharomyces pastorianus
gtgaatggacatttactgctcgaac

SEQ ID NO: 119532 - DNA, 25 bp, Saccharomyces pastorianus
atttcattgatacattgcccacaga

SEQ ID NO: 119533 - DNA, 25 bp, Saccharomyces pastorianus
tccgagctttcgaggtttgactata

SEQ ID NO: 119534 - DNA, 25 bp, Saccharomyces pastorianus
gatctgctggatgtttcacggtatt

SEQ ID NO: 119535 - DNA, 25 bp, Saccharomyces pastorianus
cgcagcctggtctggttgacataat

SEQ ID NO: 119536 - DNA, 25 bp, Saccharomyces pastorianus
gaaggagatgcaaccgcagcctggt

SEQ ID NO: 119537 - DNA, 25 bp, Saccharomyces pastorianus
gtactagaaatgtcggagccccggt

SEQ ID NO: 119538 - DNA, 25 bp, Saccharomyces pastorianus
agatttattccatccgagctttcga

SEQ ID NO: 119539 - DNA, 25 bp, Saccharomyces pastorianus
tcggagccccggtagagacttttgt

SEQ ID NO: 119540 - DNA, 25 bp, Saccharomyces pastorianus
aagattttgtgcacccttcaataga

SEQ ID NO: 119541 - DNA, 25 bp, Saccharomyces pastorianus
tcacttttgtctcatcccaaggatg

SEQ ID NO: 119542 - DNA, 25 bp, Saccharomyces pastorianus
atatgcttccaaggtcacgtgcact

SEQ ID NO: 119543 - DNA, 25 bp, Saccharomyces pastorianus
gaggcttccagaactgtcatcgaat

SEQ ID NO: 119544 - DNA, 25 bp, Saccharomyces pastorianus
aacattgagtgcagagtccctttct

SEQ ID NO: 119545 - DNA, 25 bp, Saccharomyces pastorianus
gtcatcgaattcctcatactacacg

SEQ ID NO: 119546 - DNA, 25 bp, Saccharomyces pastorianus
gaataaggacaccatgccgcatgca

SEQ ID NO: 119547 - DNA, 25 bp, Saccharomyces pastorianus
aatgggctttctgtaccgagatcct

SEQ ID NO: 119548 - DNA, 25 bp, Saccharomyces pastorianus
atgcactgtttcctagcccaataga

SEQ ID NO: 119549 - DNA, 25 bp, Saccharomyces pastorianus
aatttagcggccatcgtacaaccct

SEQ ID NO: 119550 - DNA, 25 bp, Saccharomyces pastorianus
tccctttctcccagacttagtaaat

SEQ ID NO: 119551 - DNA, 25 bp, Saccharomyces pastorianus
tttacagtagccaaaaacctcctcg

SEQ ID NO: 119552 - DNA, 25 bp, Saccharomyces pastorianus
cttccgattgaaggttgctttacag

SEQ ID NO: 119553 - DNA, 25 bp, Saccharomyces pastorianus
atcaccttcaatgaacgagaccgtg

SEQ ID NO: 119554 - DNA, 25 bp, Saccharomyces pastorianus
gttcccgatctgtatcctattatct

SEQ ID NO: 119555 - DNA, 25 bp, Saccharomyces pastorianus
tggaaatttcaggtccgataccatc

SEQ ID NO: 119556 - DNA, 25 bp, Saccharomyces pastorianus
gggacgtttgctgcactaaagattt

SEQ ID NO: 119557 - DNA, 25 bp, Saccharomyces pastorianus
taggtttcccggtatatcttccgat

SEQ ID NO: 119558 - DNA, 25 bp, Saccharomyces pastorianus
ttataattgttgttcgttcccgatc

SEQ ID NO: 119559 - DNA, 25 bp, Saccharomyces pastorianus
ggctaacatcacaagattcccattc

SEQ ID NO: 119560 - DNA, 25 bp, Saccharomyces pastorianus
gaacgagaccgtgtatttgccggta

SEQ ID NO: 119561 - DNA, 25 bp, Saccharomyces pastorianus
atggtcgttaatccgttgacaaaga

SEQ ID NO: 119562 - DNA, 25 bp, Saccharomyces pastorianus
aatccaactgccctacttttatctt

SEQ ID NO: 119563 - DNA, 25 bp, Saccharomyces pastorianus
gcccctgatattgccggtcaagata

SEQ ID NO: 119564 - DNA, 25 bp, Saccharomyces pastorianus
aagagatgcctctgagcgagtcatt

SEQ ID NO: 119565 - DNA, 25 bp, Saccharomyces pastorianus
acgctgtttctgtttgtccaaatct

SEQ ID NO: 119566 - DNA, 25 bp, Saccharomyces pastorianus
tttaggtttaactccatctgccaat

SEQ ID NO: 119567 - DNA, 25 bp, Saccharomyces pastorianus
tatcttgtccgacttgaactctggt

SEQ ID NO: 119568 - DNA, 25 bp, Saccharomyces pastorianus
gagtatcctgaccttactttagaaa

SEQ ID NO: 119569 - DNA, 25 bp, Saccharomyces pastorianus
gtttgccctggcgttgttcaatcta

SEQ ID NO: 119570 - DNA, 25 bp, Saccharomyces pastorianus
aacaggtgacttggctggtactgct

SEQ ID NO: 119571 - DNA, 25 bp, Saccharomyces pastorianus
gatctttgaagctgtccatggctct

SEQ ID NO: 119572 - DNA, 25 bp, Saccharomyces pastorianus
gagccatcggcagaccaagagttat

SEQ ID NO: 119573 - DNA, 25 bp, Saccharomyces pastorianus
gggagatcctgaacaagccaccaac

SEQ ID NO: 119574 - DNA, 25 bp, Saccharomyces pastorianus
attctagagtcgacgctggcgtatc

SEQ ID NO: 119575 - DNA, 25 bp, Saccharomyces pastorianus
tacatcctcacaatggcagcactat

SEQ ID NO: 119576 - DNA, 25 bp, Saccharomyces pastorianus
gtacgcaagtgaaactccgctgatg

SEQ ID NO: 119577 - DNA, 25 bp, Saccharomyces pastorianus
gcagcaaagcagatcgcatcgttga

SEQ ID NO: 119578 - DNA, 25 bp, Saccharomyces pastorianus
attgcgttcgcaatttttcgatggt

SEQ ID NO: 119579 - DNA, 25 bp, Saccharomyces pastorianus
aaaaaatgttcgtcgccttctgtcg

SEQ ID NO: 119580 - DNA, 25 bp, Saccharomyces pastorianus
ggaacctttcacatccagagacaca

SEQ ID NO: 119581 - DNA, 25 bp, Saccharomyces pastorianus
cagcactatcgccatattcatactt

SEQ ID NO: 119582 - DNA, 25 bp, Saccharomyces pastorianus
ggcgtatctacaaacaattcctgac

SEQ ID NO: 119583 - DNA, 25 bp, Saccharomyces pastorianus
gactgatcgaaaatccctacatcct

SEQ ID NO: 119584 - DNA, 25 bp, Saccharomyces pastorianus
gttcaactgtcttacaaagctcgta

SEQ ID NO: 119585 - DNA, 25 bp, Saccharomyces pastorianus
gccttcagcaccagcattagctatt

SEQ ID NO: 119586 - DNA, 25 bp, Saccharomyces pastorianus
tgtagccaaagccttactaaaccgt

SEQ ID NO: 119587 - DNA, 25 bp, Saccharomyces pastorianus
cgattcgtcctccagaatctggtat

SEQ ID NO: 119588 - DNA, 25 bp, Saccharomyces pastorianus
gaatatcgcattttgtggcggcctg

SEQ ID NO: 119589 - DNA, 25 bp, Saccharomyces pastorianus
tgtttcttaacatcctcggcaccgt

SEQ ID NO: 119590 - DNA, 25 bp, Saccharomyces pastorianus
accagcattagctattccagctgct

SEQ ID NO: 119591 - DNA, 25 bp, Saccharomyces pastorianus
gcatcttcgacccatgtttcttaac

SEQ ID NO: 119592 - DNA, 25 bp, Saccharomyces pastorianus
gggctgagaccgtttcctcttcact

SEQ ID NO: 119593 - DNA, 25 bp, Saccharomyces pastorianus
ttccacgggcttaatcatgaaggat

SEQ ID NO: 119594 - DNA, 25 bp, Saccharomyces pastorianus
catatcaagtcgtgtagcgattcgt

SEQ ID NO: 119595 - DNA, 25 bp, Saccharomyces pastorianus
ttatcccaccaccacgtgatatgaa

SEQ ID NO: 119596 - DNA, 25 bp, Saccharomyces pastorianus
gcatcgttcccgcaattttacaaaa

SEQ ID NO: 119597 - DNA, 25 bp, Saccharomyces pastorianus
atcgcaaatgcatccataacagctg

SEQ ID NO: 119598 - DNA, 25 bp, Saccharomyces pastorianus
aggtgcgagcgttttggcgcaaatt

SEQ ID NO: 119599 - DNA, 25 bp, Saccharomyces pastorianus
tttttccagtgagcattatcccacc

SEQ ID NO: 119600 - DNA, 25 bp, Saccharomyces pastorianus
atattcttatcgttggtggcagttc

SEQ ID NO: 119601 - DNA, 25 bp, Saccharomyces pastorianus
gaatcaacatttggaggccctcttt

SEQ ID NO: 119602 - DNA, 25 bp, Saccharomyces pastorianus
aaggctatcgttcaaagtatcgcaa

SEQ ID NO: 119603 - DNA, 25 bp, Saccharomyces pastorianus
acgtgatatgaatcccgctctaata

SEQ ID NO: 119604 - DNA, 25 bp, Saccharomyces pastorianus
ctctttgttgagttcggcatcgttc

SEQ ID NO: 119605 - DNA, 25 bp, Saccharomyces pastorianus
gtaaatgcccctgacaagactgaag

SEQ ID NO: 119606 - DNA, 25 bp, Saccharomyces pastorianus
ccggttgcatctttcatcgcaggaa

SEQ ID NO: 119607 - DNA, 25 bp, Saccharomyces pastorianus
ttgccgtcgttgaatctccaggtta

SEQ ID NO: 119608 - DNA, 25 bp, Saccharomyces pastorianus
gtactgattttattgacgccttgaa

SEQ ID NO: 119609 - DNA, 25 bp, Saccharomyces pastorianus
atcgcaggaactgttgctggtcaaa

SEQ ID NO: 119610 - DNA, 25 bp, Saccharomyces pastorianus
aggagtaagccgatgccggttgcat

SEQ ID NO: 119611 - DNA, 25 bp, Saccharomyces pastorianus
tccagatcgggaactttgacatacg

SEQ ID NO: 119612 - DNA, 25 bp, Saccharomyces pastorianus
aggccgaaatcgaagctgctcaatt

SEQ ID NO: 119613 - DNA, 25 bp, Saccharomyces pastorianus
tagttgggcccaactgccctggtat

SEQ ID NO: 119614 - DNA, 25 bp, Saccharomyces pastorianus
ctgaccttggtcaatcactggttat

SEQ ID NO: 119615 - DNA, 25 bp, Saccharomyces pastorianus
tagaatgggtcactccggtgcaatt

SEQ ID NO: 119616 - DNA, 25 bp, Saccharomyces pastorianus
tggtgatgcttttcccggtactgat

SEQ ID NO: 119617 - DNA, 25 bp, Saccharomyces pastorianus
cgattctatcgcactattgaggcta

SEQ ID NO: 119618 - DNA, 25 bp, Saccharomyces pastorianus
tcaagactctaacaggtgaccattt

SEQ ID NO: 119619 - DNA, 25 bp, Saccharomyces pastorianus
ttaccttagggtttgatcttgacga

SEQ ID NO: 119620 - DNA, 25 bp, Saccharomyces pastorianus
gtgaccatttgtcgagagccatcgg

SEQ ID NO: 119621 - DNA, 25 bp, Saccharomyces pastorianus
accacacagaatgacacccttgagg

SEQ ID NO: 119622 - DNA, 25 bp, Saccharomyces pastorianus
gccgattttatcaaagcctttacct

SEQ ID NO: 119623 - DNA, 25 bp, Saccharomyces pastorianus
gagccatcggtcgtattgccggtaa

SEQ ID NO: 119624 - DNA, 25 bp, Saccharomyces pastorianus
tttggtcgagcacttgaagctgcaa

SEQ ID NO: 119625 - DNA, 25 bp, Saccharomyces pastorianus
ggaaacctcgcttcacttcagctag

SEQ ID NO: 119626 - DNA, 25 bp, Saccharomyces pastorianus
gaaagatcatggttccaccacacag

SEQ ID NO: 119627 - DNA, 25 bp, Saccharomyces pastorianus
aaatttatcctcctttggtcgagca

SEQ ID NO: 119628 - DNA, 25 bp, Saccharomyces pastorianus
tggtcatcaaccactacggtcttag

SEQ ID NO: 119629 - DNA, 25 bp, Saccharomyces pastorianus
gaatcatctaacagaacgtcgtcat

SEQ ID NO: 119630 - DNA, 25 bp, Saccharomyces pastorianus
gaagtgaagcgaggtttcccctggt

SEQ ID NO: 119631 - DNA, 25 bp, Saccharomyces pastorianus
atcgtcctcatcgatgctttcggta

SEQ ID NO: 119632 - DNA, 25 bp, Saccharomyces pastorianus
tattttgttaccctgcgttttgcta

SEQ ID NO: 119633 - DNA, 25 bp, Saccharomyces pastorianus
gctgtgttattgtcggaatcatcta

SEQ ID NO: 119634 - DNA, 25 bp, Saccharomyces pastorianus
ccctgcgttttgctagctgaagtga

SEQ ID NO: 119635 - DNA, 25 bp, Saccharomyces pastorianus
tctacctcttcttttgctgtgttat

SEQ ID NO: 119636 - DNA, 25 bp, Saccharomyces pastorianus
acttacaggtgtcacagtagccttt

SEQ ID NO: 119637 - DNA, 25 bp, Saccharomyces pastorianus
ccatcttgtccacttacaggtgtca

SEQ ID NO: 119638 - DNA, 25 bp, Saccharomyces pastorianus
ttagattcgtgcattttccggctac

SEQ ID NO: 119639 - DNA, 25 bp, Saccharomyces pastorianus
ggcggctgcgtttaaacgggtccat

SEQ ID NO: 119640 - DNA, 25 bp, Saccharomyces pastorianus
gagattacttccactttcgtaccga

SEQ ID NO: 119641 - DNA, 25 bp, Saccharomyces pastorianus
ggcgttcatcatgggaatttcgcat

SEQ ID NO: 119642 - DNA, 25 bp, Saccharomyces pastorianus
taactcccaattccatgacatcaga

SEQ ID NO: 119643 - DNA, 25 bp, Saccharomyces pastorianus
tcaccacccacctggatgtatatga

SEQ ID NO: 119644 - DNA, 25 bp, Saccharomyces pastorianus
aaccgtttcttctcttatcaataca

SEQ ID NO: 119645 - DNA, 25 bp, Saccharomyces pastorianus
gacaaacttaaactggacacctctg

SEQ ID NO: 119646 - DNA, 25 bp, Saccharomyces pastorianus
gggtccataactccactaactttag

SEQ ID NO: 119647 - DNA, 25 bp, Saccharomyces pastorianus
acacctctgagttccacgttagtaa

SEQ ID NO: 119648 - DNA, 25 bp, Saccharomyces pastorianus
ttaagattccttgtaccgctagttc

SEQ ID NO: 119649 - DNA, 25 bp, Saccharomyces pastorianus
gctagttccactactcgtgacaaac

SEQ ID NO: 119650 - DNA, 25 bp, Saccharomyces pastorianus
ccccagttgtcatcaccatttataa

SEQ ID NO: 119651 - DNA, 25 bp, Saccharomyces pastorianus
gacttcattgcctttatggaatctc

SEQ ID NO: 119652 - DNA, 25 bp, Saccharomyces pastorianus
gcaaaagtttctgatttcctacaaa

SEQ ID NO: 119653 - DNA, 25 bp, Saccharomyces pastorianus
atactcctattgatgcctttctgaa

SEQ ID NO: 119654 - DNA, 25 bp, Saccharomyces pastorianus
ttaccagcactgagttcccgaatga

SEQ ID NO: 119655 - DNA, 25 bp, Saccharomyces pastorianus
aacgagattgagaccctttgtaacg

SEQ ID NO: 119656 - DNA, 25 bp, Saccharomyces pastorianus
aacggtgaccgtgaatctacaaaga

SEQ ID NO: 119657 - DNA, 25 bp, Saccharomyces pastorianus
tctcaaaacaagcttaccggattcc

SEQ ID NO: 119658 - DNA, 25 bp, Saccharomyces pastorianus
tttgtaacggagcaaccccaaggcg

SEQ ID NO: 119659 - DNA, 25 bp, Saccharomyces pastorianus
aaatcgccatcaaaacggtgaccgt

SEQ ID NO: 119660 - DNA, 25 bp, Saccharomyces pastorianus
ggagtctttacgagttcatacattt

SEQ ID NO: 119661 - DNA, 25 bp, Saccharomyces pastorianus
actttggactttgccgagagaactc

SEQ ID NO: 119662 - DNA, 25 bp, Saccharomyces pastorianus
aatgaaggcttggtccctcgaggac

SEQ ID NO: 119663 - DNA, 25 bp, Saccharomyces pastorianus
gatagcatcccctcaagaaacagtg

SEQ ID NO: 119664 - DNA, 25 bp, Saccharomyces pastorianus
agactaaacctaccttcagagattt

SEQ ID NO: 119665 - DNA, 25 bp, Saccharomyces pastorianus
ggtatcgtcccaggcgaacggtacg

SEQ ID NO: 119666 - DNA, 25 bp, Saccharomyces pastorianus
gctggatgtaccctctggatagcat

SEQ ID NO: 119667 - DNA, 25 bp, Saccharomyces pastorianus
acgtaggcgatcagtttgcaccggt

SEQ ID NO: 119668 - DNA, 25 bp, Saccharomyces pastorianus
ttataaccctgaatctcctatccaa

SEQ ID NO: 119669 - DNA, 25 bp, Saccharomyces pastorianus
aacactttagagtcttttgccccat

SEQ ID NO: 119670 - DNA, 25 bp, Saccharomyces pastorianus
caaccctctgaaaccttacacgtag

SEQ ID NO: 119671 - DNA, 25 bp, Saccharomyces pastorianus
ggaaagatcttggtgttcgttcatt

SEQ ID NO: 119672 - DNA, 25 bp, Saccharomyces pastorianus
aagcagcacctatttaagtaccaag

SEQ ID NO: 119673 - DNA, 25 bp, Saccharomyces pastorianus
aggatctggttctctagcggcaatg

SEQ ID NO: 119674 - DNA, 25 bp, Saccharomyces pastorianus
aagttggcctctgatgcaatccagg

SEQ ID NO: 119675 - DNA, 25 bp, Saccharomyces pastorianus
gctactacctttctctaggatctgg

SEQ ID NO: 119676 - DNA, 25 bp, Saccharomyces pastorianus
ttacattccttatatacctcgagag

SEQ ID NO: 119677 - DNA, 25 bp, Saccharomyces pastorianus
atggttctactgacgtgggctacta

SEQ ID NO: 119678 - DNA, 25 bp, Saccharomyces pastorianus
agaccctacgggatctcatttgttc

SEQ ID NO: 119679 - DNA, 25 bp, Saccharomyces pastorianus
aagagtggtctcagctttacaaatg

SEQ ID NO: 119680 - DNA, 25 bp, Saccharomyces pastorianus
catttgttctccattcatgcgcatg

SEQ ID NO: 119681 - DNA, 25 bp, Saccharomyces pastorianus
gattgttgcaggtgtagaccctacg

SEQ ID NO: 119682 - DNA, 25 bp, Saccharomyces pastorianus
cagttacgcagttgatcgggtctaa

SEQ ID NO: 119683 - DNA, 25 bp, Saccharomyces pastorianus
aacagcaaacaccagtaacgatatg

SEQ ID NO: 119684 - DNA, 25 bp, Saccharomyces pastorianus
aaccaaggccatggtgccaccaata

SEQ ID NO: 119685 - DNA, 25 bp, Saccharomyces pastorianus
gcatatttaacttcttacaacagca

SEQ ID NO: 119686 - DNA, 25 bp, Saccharomyces pastorianus
gcaaatcggcataaggatcaagggt

SEQ ID NO: 119687 - DNA, 25 bp, Saccharomyces pastorianus
aattcctgtgaatagtgccgatggt

SEQ ID NO: 119688 - DNA, 25 bp, Saccharomyces pastorianus
tcgatgaagccgtggaaattcctgt

SEQ ID NO: 119689 - DNA, 25 bp, Saccharomyces pastorianus
aacgatatggttattcgagcaaatc

SEQ ID NO: 119690 - DNA, 25 bp, Saccharomyces pastorianus
ggtgccaccaataaattgcatattt

SEQ ID NO: 119691 - DNA, 25 bp, Saccharomyces pastorianus
gagttcatgaatgttgtcatcgatg

SEQ ID NO: 119692 - DNA, 25 bp, Saccharomyces pastorianus
aagatgtggagaagggcacgccctt

SEQ ID NO: 119693 - DNA, 25 bp, Saccharomyces pastorianus
gaacaaagttaaaaccaaggccatg

SEQ ID NO: 119694 - DNA, 25 bp, Saccharomyces pastorianus
attccttggtcagactttgacatat

SEQ ID NO: 119695 - DNA, 25 bp, Saccharomyces pastorianus
ccttggcattccttggtcagacttt

SEQ ID NO: 119696 - DNA, 25 bp, Saccharomyces pastorianus
ggcattccttggtcagactttgaca

SEQ ID NO: 119697 - DNA, 25 bp, Saccharomyces pastorianus
gggccaccttggcattccttggtca

SEQ ID NO: 119698 - DNA, 25 bp, Saccharomyces pastorianus
tggcattccttggtcagactttgac

SEQ ID NO: 119699 - DNA, 25 bp, Saccharomyces pastorianus
ttggcattccttggtcagactttga

SEQ ID NO: 119700 - DNA, 25 bp, Saccharomyces pastorianus
gccaccttggcattccttggtcaga

SEQ ID NO: 119701 - DNA, 25 bp, Saccharomyces pastorianus
accttggcattccttggtcagactt

SEQ ID NO: 119702 - DNA, 25 bp, Saccharomyces pastorianus
aaatgcgggccaccttggcattcct

SEQ ID NO: 119703 - DNA, 25 bp, Saccharomyces pastorianus
gcattccttggtcagactttgacat

SEQ ID NO: 119704 - DNA, 25 bp, Saccharomyces pastorianus
atgcgggccaccttggcattccttg

SEQ ID NO: 119705 - DNA, 25 bp, Saccharomyces pastorianus
gcagtcccaagagaagccactaggt

SEQ ID NO: 119706 - DNA, 25 bp, Saccharomyces pastorianus
actaggttgatgaccataccgcaat

SEQ ID NO: 119707 - DNA, 25 bp, Saccharomyces pastorianus
gcacacgaaaactagcaggatggca

SEQ ID NO: 119708 - DNA, 25 bp, Saccharomyces pastorianus
gacatgtacatgatggcagtcccaa

SEQ ID NO: 119709 - DNA, 25 bp, Saccharomyces pastorianus
gtgaggcccaaaacggagaatacca

SEQ ID NO: 119710 - DNA, 25 bp, Saccharomyces pastorianus
aaaaacacaatacctgcagaccagt

SEQ ID NO: 119711 - DNA, 25 bp, Saccharomyces pastorianus
atggcagcattggtgttcagcgtac

SEQ ID NO: 119712 - DNA, 25 bp, Saccharomyces pastorianus
gaataccagggcaataatgcacacg

SEQ ID NO: 119713 - DNA, 25 bp, Saccharomyces pastorianus
gcagaccagtacctcaaagacatgt

SEQ ID NO: 119714 - DNA, 25 bp, Saccharomyces pastorianus
aattcgacaaagtgtgaggcccaaa

SEQ ID NO: 119715 - DNA, 25 bp, Saccharomyces pastorianus
gttcagcgtaccagtattcacacca

SEQ ID NO: 119716 - DNA, 25 bp, Saccharomyces pastorianus
agattttggcaagcccactgttttt

SEQ ID NO: 119717 - DNA, 25 bp, Saccharomyces pastorianus
atgtcttacacacgagtagatcatc

SEQ ID NO: 119718 - DNA, 25 bp, Saccharomyces pastorianus
aatggcttgtcatctgaggcagatt

SEQ ID NO: 119719 - DNA, 25 bp, Saccharomyces pastorianus
gcccactgtttttcgcaaattatgt

SEQ ID NO: 119720 - DNA, 25 bp, Saccharomyces pastorianus
acacgagtagatcatcccattggaa

SEQ ID NO: 119721 - DNA, 25 bp, Saccharomyces pastorianus
tgtactacatgcagccattcactac

SEQ ID NO: 119722 - DNA, 25 bp, Saccharomyces pastorianus
gaggcagattttggcaagcccactg

SEQ ID NO: 119723 - DNA, 25 bp, Saccharomyces pastorianus
gatcatcccattggaaaaatggctt

SEQ ID NO: 119724 - DNA, 25 bp, Saccharomyces pastorianus
caagcccactgtttttcgcaaatta

SEQ ID NO: 119725 - DNA, 25 bp, Saccharomyces pastorianus
gtttttcgcaaattatgtactacat

SEQ ID NO: 119726 - DNA, 25 bp, Saccharomyces pastorianus
aaaaatggcttgtcatctgaggcag

SEQ ID NO: 119727 - DNA, 25 bp, Saccharomyces pastorianus
aaaccgcggataatcatggtccagt

SEQ ID NO: 119728 - DNA, 25 bp, Saccharomyces pastorianus
gcctgaattgttggaggcccttaat

SEQ ID NO: 119729 - DNA, 25 bp, Saccharomyces pastorianus
tgctggctgcatatgtttaacaccc

SEQ ID NO: 119730 - DNA, 25 bp, Saccharomyces pastorianus
ggattgtccccaaaggtggcgttga

SEQ ID NO: 119731 - DNA, 25 bp, Saccharomyces pastorianus
ttacgagacgactgcccaacgagaa

SEQ ID NO: 119732 - DNA, 25 bp, Saccharomyces pastorianus
ggtccagtacgttctgagacagcac

SEQ ID NO: 119733 - DNA, 25 bp, Saccharomyces pastorianus
gtttaacacccgacaagaagcaagt

SEQ ID NO: 119734 - DNA, 25 bp, Saccharomyces pastorianus
gaagtagcaaaacacccgccaagaa

SEQ ID NO: 119735 - DNA, 25 bp, Saccharomyces pastorianus
agacgagcctaattacgagacgact

SEQ ID NO: 119736 - DNA, 25 bp, Saccharomyces pastorianus
gtttactcacccgttacaggtgcaa

SEQ ID NO: 119737 - DNA, 25 bp, Saccharomyces pastorianus
tctcatgattacttcttctgcacac

SEQ ID NO: 119738 - DNA, 25 bp, Saccharomyces pastorianus
gcgagcccaatctaaaggacgttat

SEQ ID NO: 119739 - DNA, 25 bp, Saccharomyces pastorianus
gccgaattggatcctagcgagccca

SEQ ID NO: 119740 - DNA, 25 bp, Saccharomyces pastorianus
atttggagatccttacttgcacaac

SEQ ID NO: 119741 - DNA, 25 bp, Saccharomyces pastorianus
attgttgctaattacctgtcagact

SEQ ID NO: 119742 - DNA, 25 bp, Saccharomyces pastorianus
gagttcttcagcagattggttttca

SEQ ID NO: 119743 - DNA, 25 bp, Saccharomyces pastorianus
tgagttagaatttttgggccaggaa

SEQ ID NO: 119744 - DNA, 25 bp, Saccharomyces pastorianus
tactggtatgaacaattggtctatc

SEQ ID NO: 119745 - DNA, 25 bp, Saccharomyces pastorianus
actatgggactggttatgccaagtt

SEQ ID NO: 119746 - DNA, 25 bp, Saccharomyces pastorianus
tcaactatttattcatctccaacat

SEQ ID NO: 119747 - DNA, 25 bp, Saccharomyces pastorianus
ccttacttgcacaacaccattggta

SEQ ID NO: 119748 - DNA, 25 bp, Saccharomyces pastorianus
atagcacggtggctgagttcttcag

SEQ ID NO: 119749 - DNA, 25 bp, Saccharomyces pastorianus
ttctttgctattgaccacactttaa

SEQ ID NO: 119750 - DNA, 25 bp, Saccharomyces pastorianus
cagaatgtcacatcatatgctcata

SEQ ID NO: 119751 - DNA, 25 bp, Saccharomyces pastorianus
aacgcttcgaattacatttatttgt

SEQ ID NO: 119752 - DNA, 25 bp, Saccharomyces pastorianus
ttcggaacttttcacttgttcaaag

SEQ ID NO: 119753 - DNA, 25 bp, Saccharomyces pastorianus
tggattcatagattacaacccagat

SEQ ID NO: 119754 - DNA, 25 bp, Saccharomyces pastorianus
tcatatgctcatattcctggaatag

SEQ ID NO: 119755 - DNA, 25 bp, Saccharomyces pastorianus
ttaactaccatagaaaacgcttcga

SEQ ID NO: 119756 - DNA, 25 bp, Saccharomyces pastorianus
tgggagactgtattgcattttttat

SEQ ID NO: 119757 - DNA, 25 bp, Saccharomyces pastorianus
ttgggtgtctgtattttcggaactt

SEQ ID NO: 119758 - DNA, 25 bp, Saccharomyces pastorianus
ggaagagcttaccaacagttttgaa

SEQ ID NO: 119759 - DNA, 25 bp, Saccharomyces pastorianus
gatttgctaatctgcgtgactctac

SEQ ID NO: 119760 - DNA, 25 bp, Saccharomyces pastorianus
caaaaccccagtcactttagccaag

SEQ ID NO: 119761 - DNA, 25 bp, Saccharomyces pastorianus
cccagtcactttagccaaggtcatc

SEQ ID NO: 119762 - DNA, 25 bp, Saccharomyces pastorianus
tggtgtcacccaagtccgtgtcgaa

SEQ ID NO: 119763 - DNA, 25 bp, Saccharomyces pastorianus
ccccagtcactttagccaaggtcat

SEQ ID NO: 119764 - DNA, 25 bp, Saccharomyces pastorianus
gtggtgtcacccaagtccgtgtcga

SEQ ID NO: 119765 - DNA, 25 bp, Saccharomyces pastorianus
ggtgtcacccaagtccgtgtcgaat

SEQ ID NO: 119766 - DNA, 25 bp, Saccharomyces pastorianus
gataacaaaaccccagtcactttag

SEQ ID NO: 119767 - DNA, 25 bp, Saccharomyces pastorianus
accccagtcactttagccaaggtca

SEQ ID NO: 119768 - DNA, 25 bp, Saccharomyces pastorianus
gtgtcacccaagtccgtgtcgaatt

SEQ ID NO: 119769 - DNA, 25 bp, Saccharomyces pastorianus
tcttctcatcctgaaggcttcttga

SEQ ID NO: 119770 - DNA, 25 bp, Saccharomyces pastorianus
agtaggttatttcactctggataaa

SEQ ID NO: 119771 - DNA, 25 bp, Saccharomyces pastorianus
gggacgttgtcaagaacagtccatg

SEQ ID NO: 119772 - DNA, 25 bp, Saccharomyces pastorianus
aaatccatcttctcatcctgaaggc

SEQ ID NO: 119773 - DNA, 25 bp, Saccharomyces pastorianus
gaaaggtcagatttctcagaaaacg

SEQ ID NO: 119774 - DNA, 25 bp, Saccharomyces pastorianus
atctgtcatggaacataacttcggg

SEQ ID NO: 119775 - DNA, 25 bp, Saccharomyces pastorianus
gagagtacgacttctaaggttattt

SEQ ID NO: 119776 - DNA, 25 bp, Saccharomyces pastorianus
atcaacccagaaagtgaagtcgttt

SEQ ID NO: 119777 - DNA, 25 bp, Saccharomyces pastorianus
ggcttcttgaaggacatcaacccag

SEQ ID NO: 119778 - DNA, 25 bp, Saccharomyces pastorianus
agtctcacacacagtttctttcaaa

SEQ ID NO: 119779 - DNA, 25 bp, Saccharomyces pastorianus
caatgggttcctatctcttcaaaat

SEQ ID NO: 119780 - DNA, 25 bp, Saccharomyces pastorianus
gtatcgatatatctaccattcctta

SEQ ID NO: 119781 - DNA, 25 bp, Saccharomyces pastorianus
cgccttttcttttcgatgtagtatt

SEQ ID NO: 119782 - DNA, 25 bp, Saccharomyces pastorianus
ggaatataaaccatactccgatgat

SEQ ID NO: 119783 - DNA, 25 bp, Saccharomyces pastorianus
atggattcaaactctgtatcgatat

SEQ ID NO: 119784 - DNA, 25 bp, Saccharomyces pastorianus
aggaaacttttcaccatccactgaa

SEQ ID NO: 119785 - DNA, 25 bp, Saccharomyces pastorianus
gcaacgtcttgcataacatgggcat

SEQ ID NO: 119786 - DNA, 25 bp, Saccharomyces pastorianus
acatgggcattatttccacttgcaa

SEQ ID NO: 119787 - DNA, 25 bp, Saccharomyces pastorianus
ataacgttaatctacatggattcaa

SEQ ID NO: 119788 - DNA, 25 bp, Saccharomyces pastorianus
taccattccttagcaacgtcttgca

SEQ ID NO: 119789 - DNA, 25 bp, Saccharomyces pastorianus
acattatatcgccttttcttttcga

SEQ ID NO: 119790 - DNA, 25 bp, Saccharomyces pastorianus
atttccacttgcaagggttccaaag

SEQ ID NO: 119791 - DNA, 25 bp, Saccharomyces pastorianus
ggctcgctcttatacatttgttatc

SEQ ID NO: 119792 - DNA, 25 bp, Saccharomyces pastorianus
gaagggctattatctatcatccaac

SEQ ID NO: 119793 - DNA, 25 bp, Saccharomyces pastorianus
actggcttttgtgcgtttttgtatc

SEQ ID NO: 119794 - DNA, 25 bp, Saccharomyces pastorianus
gtcaaccttgaatatcccgttggat

SEQ ID NO: 119795 - DNA, 25 bp, Saccharomyces pastorianus
ttgttatcaacatcgccctggaaag

SEQ ID NO: 119796 - DNA, 25 bp, Saccharomyces pastorianus
atactccaatcgatcccagtttaag

SEQ ID NO: 119797 - DNA, 25 bp, Saccharomyces pastorianus
gtccattggcgggaaattctccagg

SEQ ID NO: 119798 - DNA, 25 bp, Saccharomyces pastorianus
tttggacggcgtacaaccttggctg

SEQ ID NO: 119799 - DNA, 25 bp, Saccharomyces pastorianus
gtcctattcgctcactgacaatgta

SEQ ID NO: 119800 - DNA, 25 bp, Saccharomyces pastorianus
gtcacagattgggatttgtcaacct

SEQ ID NO: 119801 - DNA, 25 bp, Saccharomyces pastorianus
aattgaatgggtcctattcgctcac

SEQ ID NO: 119802 - DNA, 25 bp, Saccharomyces pastorianus
atggattcgtcatcttgcccgatat

SEQ ID NO: 119803 - DNA, 25 bp, Saccharomyces pastorianus
gttatacctggtcgcgatcgtgtac

SEQ ID NO: 119804 - DNA, 25 bp, Saccharomyces pastorianus
gtacagggacgacatcaaatctttg

SEQ ID NO: 119805 - DNA, 25 bp, Saccharomyces pastorianus
atgactataatgtaaacccggacga

SEQ ID NO: 119806 - DNA, 25 bp, Saccharomyces pastorianus
tatccaagagatgtgtaccagcgaa

SEQ ID NO: 119807 - DNA, 25 bp, Saccharomyces pastorianus
gcgttgggtttcttaggtcctgaag

SEQ ID NO: 119808 - DNA, 25 bp, Saccharomyces pastorianus
gaggctccggaatgacagtactgtt

SEQ ID NO: 119809 - DNA, 25 bp, Saccharomyces pastorianus
gaagacgcttacttatgtcattggt

SEQ ID NO: 119810 - DNA, 25 bp, Saccharomyces pastorianus
tgatggtatcgcaaccagtcctgaa

SEQ ID NO: 119811 - DNA, 25 bp, Saccharomyces pastorianus
acccggacgagctaagagttttcat

SEQ ID NO: 119812 - DNA, 25 bp, Saccharomyces pastorianus
atagttgtgccctttatccaagaga

SEQ ID NO: 119813 - DNA, 25 bp, Saccharomyces pastorianus
accgtaccgccatctcaaagtgaag

SEQ ID NO: 119814 - DNA, 25 bp, Saccharomyces pastorianus
ttatgccaccaaactctccaagttt

SEQ ID NO: 119815 - DNA, 25 bp, Saccharomyces pastorianus
atgacaatatctaccgcaacttaca

SEQ ID NO: 119816 - DNA, 25 bp, Saccharomyces pastorianus
agagctaactagaatacccggtgaa

SEQ ID NO: 119817 - DNA, 25 bp, Saccharomyces pastorianus
gcccgcagaggatgccctacgaaga

SEQ ID NO: 119818 - DNA, 25 bp, Saccharomyces pastorianus
ggtacaccaaagacagactcgttta

SEQ ID NO: 119819 - DNA, 25 bp, Saccharomyces pastorianus
caacaattttatatggcccgcagag

SEQ ID NO: 119820 - DNA, 25 bp, Saccharomyces pastorianus
gggagctgtgggacccaacaatttt

SEQ ID NO: 119821 - DNA, 25 bp, Saccharomyces pastorianus
gacagagttgttggattatgccacc

SEQ ID NO: 119822 - DNA, 25 bp, Saccharomyces pastorianus
caccaacgttcgacaagggagctgt

SEQ ID NO: 119823 - DNA, 25 bp, Saccharomyces pastorianus
actgatgaggccttgtttgaaaacg

SEQ ID NO: 119824 - DNA, 25 bp, Saccharomyces pastorianus
catttttcctattcagaggaccata

SEQ ID NO: 119825 - DNA, 25 bp, Saccharomyces pastorianus
ggtgcaaccatttattatccttgat

SEQ ID NO: 119826 - DNA, 25 bp, Saccharomyces pastorianus
agatatttctgcaagctctccaaac

SEQ ID NO: 119827 - DNA, 25 bp, Saccharomyces pastorianus
taggtattccaccaattgagttaga

SEQ ID NO: 119828 - DNA, 25 bp, Saccharomyces pastorianus
gcaagctctccaaacttgggtggta

SEQ ID NO: 119829 - DNA, 25 bp, Saccharomyces pastorianus
ttattgttgctttctcatttttcct

SEQ ID NO: 119830 - DNA, 25 bp, Saccharomyces pastorianus
ggaccatatgctaaacaagttactg

SEQ ID NO: 119831 - DNA, 25 bp, Saccharomyces pastorianus
ctagcatttggttacatggtgcaac

SEQ ID NO: 119832 - DNA, 25 bp, Saccharomyces pastorianus
aggaattttctaacgctgcaagtgg

SEQ ID NO: 119833 - DNA, 25 bp, Saccharomyces pastorianus
tgtcactcctttgccttctaaaaaa

SEQ ID NO: 119834 - DNA, 25 bp, Saccharomyces pastorianus
ttgcgagaagatggtgtcactcctt

SEQ ID NO: 119835 - DNA, 25 bp, Saccharomyces pastorianus
ctgcgagcagcgtttcaattgagtg

SEQ ID NO: 119836 - DNA, 25 bp, Saccharomyces pastorianus
attgtccaaacgttcggttgcatag

SEQ ID NO: 119837 - DNA, 25 bp, Saccharomyces pastorianus
gattgattgtaattcgaacccacta

SEQ ID NO: 119838 - DNA, 25 bp, Saccharomyces pastorianus
ggtagcgtcaccataggcaagagta

SEQ ID NO: 119839 - DNA, 25 bp, Saccharomyces pastorianus
gatttctccaccatgaagctgattg

SEQ ID NO: 119840 - DNA, 25 bp, Saccharomyces pastorianus
gcgacaagaacgtgctatctgaatc

SEQ ID NO: 119841 - DNA, 25 bp, Saccharomyces pastorianus
aatgatcatcggtttgtgtgcaagc

SEQ ID NO: 119842 - DNA, 25 bp, Saccharomyces pastorianus
tgatttgtaccttcatattgtccaa

SEQ ID NO: 119843 - DNA, 25 bp, Saccharomyces pastorianus
tggagacagttttagcatcgatgaa

SEQ ID NO: 119844 - DNA, 25 bp, Saccharomyces pastorianus
actgttaatgctgggtgacgtcgaa

SEQ ID NO: 119845 - DNA, 25 bp, Saccharomyces pastorianus
agtaaagccacgatcgatttctcca

SEQ ID NO: 119846 - DNA, 25 bp, Saccharomyces pastorianus
ggacctccggcttctttagcagatg

SEQ ID NO: 119847 - DNA, 25 bp, Saccharomyces pastorianus
aataccctgacaccacaaatgactg

SEQ ID NO: 119848 - DNA, 25 bp, Saccharomyces pastorianus
aggcggttcattcgctgaaactact

SEQ ID NO: 119849 - DNA, 25 bp, Saccharomyces pastorianus
ggtcgtgatgcacttttagcttcaa

SEQ ID NO: 119850 - DNA, 25 bp, Saccharomyces pastorianus
ttaggccagtcgcagatacctcagt

SEQ ID NO: 119851 - DNA, 25 bp, Saccharomyces pastorianus
acctccttcggcatttttaggccag

SEQ ID NO: 119852 - DNA, 25 bp, Saccharomyces pastorianus
agaatactcaagcaccttcgcaagc

SEQ ID NO: 119853 - DNA, 25 bp, Saccharomyces pastorianus
gttaccatcgacgacgagtgctgca

SEQ ID NO: 119854 - DNA, 25 bp, Saccharomyces pastorianus
agctacatcaacatccggaggcggt

SEQ ID NO: 119855 - DNA, 25 bp, Saccharomyces pastorianus
gctagataagccctcagttttactg

SEQ ID NO: 119856 - DNA, 25 bp, Saccharomyces pastorianus
agcagatgcgttggcagcagcttta

SEQ ID NO: 119857 - DNA, 25 bp, Saccharomyces pastorianus
agtgactctttctaagcatcgcgaa

SEQ ID NO: 119858 - DNA, 25 bp, Saccharomyces pastorianus
gcatcgcgaattaatgactactttt

SEQ ID NO: 119859 - DNA, 25 bp, Saccharomyces pastorianus
gaggcatcttaactgcagccacaat

SEQ ID NO: 119860 - DNA, 25 bp, Saccharomyces pastorianus
tgtacgcccaaaagtagtgactctt

SEQ ID NO: 119861 - DNA, 25 bp, Saccharomyces pastorianus
tcacccttgccctaagcagaagacg

SEQ ID NO: 119862 - DNA, 25 bp, Saccharomyces pastorianus
attaatttacctgacgccggccgag

SEQ ID NO: 119863 - DNA, 25 bp, Saccharomyces pastorianus
caggaaacccggatgacggcattaa

SEQ ID NO: 119864 - DNA, 25 bp, Saccharomyces pastorianus
tattcttaccttgtacgcccaaaag

SEQ ID NO: 119865 - DNA, 25 bp, Saccharomyces pastorianus
gtcacgagcttaccattcaaattat

SEQ ID NO: 119866 - DNA, 25 bp, Saccharomyces pastorianus
agatgagaaactcggtcacccttgc

SEQ ID NO: 119867 - DNA, 25 bp, Saccharomyces pastorianus
atatgtacggatgtatggtcccaaa

SEQ ID NO: 119868 - DNA, 25 bp, Saccharomyces pastorianus
agctgctcgtcatttaaccggtttg

SEQ ID NO: 119869 - DNA, 25 bp, Saccharomyces pastorianus
tcagttggtgggttcagagcctcca

SEQ ID NO: 119870 - DNA, 25 bp, Saccharomyces pastorianus
tatggtgtcatcatggcaggcgccc

SEQ ID NO: 119871 - DNA, 25 bp, Saccharomyces pastorianus
cagatttttacaacgttccagtgga

SEQ ID NO: 119872 - DNA, 25 bp, Saccharomyces pastorianus
atttctggcgcttctgatgaaacat

SEQ ID NO: 119873 - DNA, 25 bp, Saccharomyces pastorianus
ggtggtgaagaacaactcagcctat

SEQ ID NO: 119874 - DNA, 25 bp, Saccharomyces pastorianus
gacttatccagcgacattttgtctc

SEQ ID NO: 119875 - DNA, 25 bp, Saccharomyces pastorianus
gacggccttgatgaccagtttctaa

SEQ ID NO: 119876 - DNA, 25 bp, Saccharomyces pastorianus
ttgggagtaccaatcacccctattg

SEQ ID NO: 119877 - DNA, 25 bp, Saccharomyces pastorianus
agagcctccatctataacgcgcttt

SEQ ID NO: 119878 - DNA, 25 bp, Saccharomyces pastorianus
aggcttaaccctatacattatcaag

SEQ ID NO: 119879 - DNA, 25 bp, Saccharomyces pastorianus
gaatcacttacaagaacgtccctaa

SEQ ID NO: 119880 - DNA, 25 bp, Saccharomyces pastorianus
acatctgaccggtgaatttgaaaaa

SEQ ID NO: 119881 - DNA, 25 bp, Saccharomyces pastorianus
attggagtttgttgcgtctcctgca

SEQ ID NO: 119882 - DNA, 25 bp, Saccharomyces pastorianus
tggttggctagaaaacttgccggta

SEQ ID NO: 119883 - DNA, 25 bp, Saccharomyces pastorianus
tggccccacctgaggtgcaagttga

SEQ ID NO: 119884 - DNA, 25 bp, Saccharomyces pastorianus
gttgacgagcaactaatgcaccaat

SEQ ID NO: 119885 - DNA, 25 bp, Saccharomyces pastorianus
agaacgtccctaattggcatagaga

SEQ ID NO: 119886 - DNA, 25 bp, Saccharomyces pastorianus
gaagttcatcctctatctttttata

SEQ ID NO: 119887 - DNA, 25 bp, Saccharomyces pastorianus
agtccgtgtgtgtgaaaatattccc

SEQ ID NO: 119888 - DNA, 25 bp, Saccharomyces pastorianus
taagttcgatgtctgggataccgca

SEQ ID NO: 119889 - DNA, 25 bp, Saccharomyces pastorianus
gactacctttgtgaagagacatctg

SEQ ID NO: 119890 - DNA, 25 bp, Saccharomyces pastorianus
aagccacggaagttgtgccatccag

SEQ ID NO: 119891 - DNA, 25 bp, Saccharomyces pastorianus
gcttgtgctaacatcgcgatatcct

SEQ ID NO: 119892 - DNA, 25 bp, Saccharomyces pastorianus
tactactttgtatcacgcttgtgct

SEQ ID NO: 119893 - DNA, 25 bp, Saccharomyces pastorianus
atgactttggcttttacgaccttcg

SEQ ID NO: 119894 - DNA, 25 bp, Saccharomyces pastorianus
ggttcatatttggtctcttcatcgc

SEQ ID NO: 119895 - DNA, 25 bp, Saccharomyces pastorianus
ggcgcagcatccatattccaagata

SEQ ID NO: 119896 - DNA, 25 bp, Saccharomyces pastorianus
ggttactttaagtccgccatacgag

SEQ ID NO: 119897 - DNA, 25 bp, Saccharomyces pastorianus
ctgtatggctttttcctggttcata

SEQ ID NO: 119898 - DNA, 25 bp, Saccharomyces pastorianus
acgagccttcggcaacagcattaag

SEQ ID NO: 119899 - DNA, 25 bp, Saccharomyces pastorianus
gaactcaggttgcagctggtctgta

SEQ ID NO: 119900 - DNA, 25 bp, Saccharomyces pastorianus
acgaccttcgctatttccaagataa

SEQ ID NO: 119901 - DNA, 25 bp, Saccharomyces pastorianus
gaagagaccaaatatgaaccaggaa

SEQ ID NO: 119902 - DNA, 25 bp, Saccharomyces pastorianus
aggatatcgcgatgttagcacaagc

SEQ ID NO: 119903 - DNA, 25 bp, Saccharomyces pastorianus
ttttctccaggatatcgcgatgtta

SEQ ID NO: 119904 - DNA, 25 bp, Saccharomyces pastorianus
gataattgcttttcttcgtcgtcaa

SEQ ID NO: 119905 - DNA, 25 bp, Saccharomyces pastorianus
ttcttcgtcgtcaatattactggat

SEQ ID NO: 119906 - DNA, 25 bp, Saccharomyces pastorianus
gttttcattttctccaggatatcgc

SEQ ID NO: 119907 - DNA, 25 bp, Saccharomyces pastorianus
gtaagcaagcgatgaagagaccaaa

SEQ ID NO: 119908 - DNA, 25 bp, Saccharomyces pastorianus
ggaaaaagccatacagaccagctgc

SEQ ID NO: 119909 - DNA, 25 bp, Saccharomyces pastorianus
cacaacttccgtggctttgttttca

SEQ ID NO: 119910 - DNA, 25 bp, Saccharomyces pastorianus
attactggatggcacaacttccgtg

SEQ ID NO: 119911 - DNA, 25 bp, Saccharomyces pastorianus
agcacaagcgtgatacaaagtagta

SEQ ID NO: 119912 - DNA, 25 bp, Saccharomyces pastorianus
gttatgccaggtgacaatgttgaaa

SEQ ID NO: 119913 - DNA, 25 bp, Saccharomyces pastorianus
gaatgtgatttgatccatcctaccc

SEQ ID NO: 119914 - DNA, 25 bp, Saccharomyces pastorianus
aaggaattggactctgctatggcag

SEQ ID NO: 119915 - DNA, 25 bp, Saccharomyces pastorianus
gatcattctatgcaagttatgccag

SEQ ID NO: 119916 - DNA, 25 bp, Saccharomyces pastorianus
tggtcttagctaagccaggtaccgt

SEQ ID NO: 119917 - DNA, 25 bp, Saccharomyces pastorianus
gccaggtaccgttaaagcccataca

SEQ ID NO: 119918 - DNA, 25 bp, Saccharomyces pastorianus
gattctagcctctttgtacatttta

SEQ ID NO: 119919 - DNA, 25 bp, Saccharomyces pastorianus
tagacattctgggtttggtgaaaac

SEQ ID NO: 119920 - DNA, 25 bp, Saccharomyces pastorianus
aattgttggtcacaactctacccca

SEQ ID NO: 119921 - DNA, 25 bp, Saccharomyces pastorianus
gacaatgccggtgttttacttagag

SEQ ID NO: 119922 - DNA, 25 bp, Saccharomyces pastorianus
tgatccatcctaccccattagaagt

SEQ ID NO: 119923 - DNA, 25 bp, Saccharomyces pastorianus
aataatccgccgcaaatggtaccaa

SEQ ID NO: 119924 - DNA, 25 bp, Saccharomyces pastorianus
tgctaacaggcgtagttttccccaa

SEQ ID NO: 119925 - DNA, 25 bp, Saccharomyces pastorianus
agctcaggagccgatacgttacaca

SEQ ID NO: 119926 - DNA, 25 bp, Saccharomyces pastorianus
gatgtcccatatggtaccagctcag

SEQ ID NO: 119927 - DNA, 25 bp, Saccharomyces pastorianus
aacctgtcgtacctgcggaatacta

SEQ ID NO: 119928 - DNA, 25 bp, Saccharomyces pastorianus
gaattttacctaccagaagctcctc

SEQ ID NO: 119929 - DNA, 25 bp, Saccharomyces pastorianus
aatcttccatctaacgttccattat

SEQ ID NO: 119930 - DNA, 25 bp, Saccharomyces pastorianus
gccgggcaggcaatgctcatatgtt

SEQ ID NO: 119931 - DNA, 25 bp, Saccharomyces pastorianus
ttttccccaaggcatgcagcagaat

SEQ ID NO: 119932 - DNA, 25 bp, Saccharomyces pastorianus
aaaacaaggtgtgcccaatcttcca

SEQ ID NO: 119933 - DNA, 25 bp, Saccharomyces pastorianus
atcaacgggcagatgcttcacctat

SEQ ID NO: 119934 - DNA, 25 bp, Saccharomyces pastorianus
agcgttttatcagaatcgcaagaac

SEQ ID NO: 119935 - DNA, 25 bp, Saccharomyces pastorianus
gcaagaacaactagccaataaccct

SEQ ID NO: 119936 - DNA, 25 bp, Saccharomyces pastorianus
gaaccagcagatgaggatcctgaag

SEQ ID NO: 119937 - DNA, 25 bp, Saccharomyces pastorianus
atagcaaacctgtacttccgtggga

SEQ ID NO: 119938 - DNA, 25 bp, Saccharomyces pastorianus
atagagatcaagagcttcagtggtt

SEQ ID NO: 119939 - DNA, 25 bp, Saccharomyces pastorianus
gcgagtttactgcatctgacgttaa

SEQ ID NO: 119940 - DNA, 25 bp, Saccharomyces pastorianus
aatagaggatacaagccctccctct

SEQ ID NO: 119941 - DNA, 25 bp, Saccharomyces pastorianus
aggtaaatttcaccggctggataag

SEQ ID NO: 119942 - DNA, 25 bp, Saccharomyces pastorianus
atgtcccaagaaagtagcgttttat

SEQ ID NO: 119943 - DNA, 25 bp, Saccharomyces pastorianus
acctgtacttccgtgggattacaag

SEQ ID NO: 119944 - DNA, 25 bp, Saccharomyces pastorianus
ctccctctgccaattcgagagataa

SEQ ID NO: 119945 - DNA, 25 bp, Saccharomyces pastorianus
cgtaagcgagaagcattggtccgta

SEQ ID NO: 119946 - DNA, 25 bp, Saccharomyces pastorianus
ttggtccgtagcaggcgaattttca

SEQ ID NO: 119947 - DNA, 25 bp, Saccharomyces pastorianus
atcgaggctcaattagatgcttttg

SEQ ID NO: 119948 - DNA, 25 bp, Saccharomyces pastorianus
tttcagcggccttaacagattgtac

SEQ ID NO: 119949 - DNA, 25 bp, Saccharomyces pastorianus
aacacaacatttttccgcaacctat

SEQ ID NO: 119950 - DNA, 25 bp, Saccharomyces pastorianus
aatgaacgtatcaaaatcgcctgcc

SEQ ID NO: 119951 - DNA, 25 bp, Saccharomyces pastorianus
attatcaggtgttctcgcaggtgga

SEQ ID NO: 119952 - DNA, 25 bp, Saccharomyces pastorianus
gatgcttttcaaccttaccattatt

SEQ ID NO: 119953 - DNA, 25 bp, Saccharomyces pastorianus
gaagccggcttatgactatttgaga

SEQ ID NO: 119954 - DNA, 25 bp, Saccharomyces pastorianus
gagaatattgccttgtggcccgaag

SEQ ID NO: 119955 - DNA, 25 bp, Saccharomyces pastorianus
ggttggtctaggtgccagatatgat

SEQ ID NO: 119956 - DNA, 25 bp, Saccharomyces pastorianus
gattctgccatggacccaggcaaga

SEQ ID NO: 119957 - DNA, 25 bp, Saccharomyces pastorianus
gactctgttgaggatcgtatttctg

SEQ ID NO: 119958 - DNA, 25 bp, Saccharomyces pastorianus
gaacaagctcaagaccgttgctata

SEQ ID NO: 119959 - DNA, 25 bp, Saccharomyces pastorianus
aagtccaggtgcataaattgtttat

SEQ ID NO: 119960 - DNA, 25 bp, Saccharomyces pastorianus
gaatccttacgtcgaagaacaagct

SEQ ID NO: 119961 - DNA, 25 bp, Saccharomyces pastorianus
cgaattttatcgtgaccctgagaaa

SEQ ID NO: 119962 - DNA, 25 bp, Saccharomyces pastorianus
attggatcaatgaacgctcagagaa

SEQ ID NO: 119963 - DNA, 25 bp, Saccharomyces pastorianus
agttgatccattttggaatccttac

SEQ ID NO: 119964 - DNA, 25 bp, Saccharomyces pastorianus
ggatacttctgatttccatgaaagc

SEQ ID NO: 119965 - DNA, 25 bp, Saccharomyces pastorianus
aagccggtaactcaggactaacatt

SEQ ID NO: 119966 - DNA, 25 bp, Saccharomyces pastorianus
gactaacattgacatgtgcgaacca

SEQ ID NO: 119967 - DNA, 25 bp, Saccharomyces pastorianus
caaaagatttcgctggttgagagaa

SEQ ID NO: 119968 - DNA, 25 bp, Saccharomyces pastorianus
tacaaactacctaccaatgacaaag

SEQ ID NO: 119969 - DNA, 25 bp, Saccharomyces pastorianus
aacattgaacagtggcgacagctaa

SEQ ID NO: 119970 - DNA, 25 bp, Saccharomyces pastorianus
gaactccttaagctatggaaccaag

SEQ ID NO: 119971 - DNA, 25 bp, Saccharomyces pastorianus
ataactcagagctagcttacgaaat

SEQ ID NO: 119972 - DNA, 25 bp, Saccharomyces pastorianus
gagttgatactgttccataagctac

SEQ ID NO: 119973 - DNA, 25 bp, Saccharomyces pastorianus
ttccggtttttcgacattattgaag

SEQ ID NO: 119974 - DNA, 25 bp, Saccharomyces pastorianus
gaaataatttcagtaggttccggtg

SEQ ID NO: 119975 - DNA, 25 bp, Saccharomyces pastorianus
ttccggtgttactgaactccttaag

SEQ ID NO: 119976 - DNA, 25 bp, Saccharomyces pastorianus
ttcggaaactttgcgatcaatttat

SEQ ID NO: 119977 - DNA, 25 bp, Saccharomyces pastorianus
gacattcgtcaaagaacagcactat

SEQ ID NO: 119978 - DNA, 25 bp, Saccharomyces pastorianus
aatgccaatataactaccgtcgaaa

SEQ ID NO: 119979 - DNA, 25 bp, Saccharomyces pastorianus
gatgactatctaatttcggagggtg

SEQ ID NO: 119980 - DNA, 25 bp, Saccharomyces pastorianus
atacggatgaggtcggttcagaact

SEQ ID NO: 119981 - DNA, 25 bp, Saccharomyces pastorianus
aacaacataccccactctggagaga

SEQ ID NO: 119982 - DNA, 25 bp, Saccharomyces pastorianus
tgaaggtctaattttgccaaatatc

SEQ ID NO: 119983 - DNA, 25 bp, Saccharomyces pastorianus
aatgcggacgtaactagccagccta

SEQ ID NO: 119984 - DNA, 25 bp, Saccharomyces pastorianus
gttcagaactagatgattccgacga

SEQ ID NO: 119985 - DNA, 25 bp, Saccharomyces pastorianus
gagaacttaatgctgtgcttatatg

SEQ ID NO: 119986 - DNA, 25 bp, Saccharomyces pastorianus
caactaataattcaggtgctacctt

SEQ ID NO: 119987 - DNA, 25 bp, Saccharomyces pastorianus
gtgctaccttgaacacaaatactag

SEQ ID NO: 119988 - DNA, 25 bp, Saccharomyces pastorianus
cccagcgtaaattctagcgagttca

SEQ ID NO: 119989 - DNA, 25 bp, Saccharomyces pastorianus
atagcgttactttaagcaatgatca

SEQ ID NO: 119990 - DNA, 25 bp, Saccharomyces pastorianus
agcagaagatttgtatatccagtat

SEQ ID NO: 119991 - DNA, 25 bp, Saccharomyces pastorianus
caagcagctgtcttcagaaagagaa

SEQ ID NO: 119992 - DNA, 25 bp, Saccharomyces pastorianus
aaactctgtcagaagaaatcgagca

SEQ ID NO: 119993 - DNA, 25 bp, Saccharomyces pastorianus
gagcaattgaacaagcagctgtctt

SEQ ID NO: 119994 - DNA, 25 bp, Saccharomyces pastorianus
atatccagtattcatccaaacacga

SEQ ID NO: 119995 - DNA, 25 bp, Saccharomyces pastorianus
aaaaatagtaacattcaggctgaac

SEQ ID NO: 119996 - DNA, 25 bp, Saccharomyces pastorianus
gaaaaccttatttctcttcaaaatg

SEQ ID NO: 119997 - DNA, 25 bp, Saccharomyces pastorianus
cattcaggctgaacacatcaaagaa

SEQ ID NO: 119998 - DNA, 25 bp, Saccharomyces pastorianus
atccgacaggataacaacattaaca

SEQ ID NO: 119999 - DNA, 25 bp, Saccharomyces pastorianus
gaattgaagatttcatccgacagga

SEQ ID NO: 120000 - DNA, 25 bp, Saccharomyces pastorianus
atggtggtgctaatcacctggccga

SEQ ID NO: 120001 - DNA, 25 bp, Saccharomyces pastorianus
aatactgccgaagctatcaaaagat

SEQ ID NO: 120002 - DNA, 25 bp, Saccharomyces pastorianus
gaaggcaccaaatactcttgtagag

SEQ ID NO: 120003 - DNA, 25 bp, Saccharomyces pastorianus
gtgggcttgatgtttacgcacataa

SEQ ID NO: 120004 - DNA, 25 bp, Saccharomyces pastorianus
tgtagagactctttctggtgatttc

SEQ ID NO: 120005 - DNA, 25 bp, Saccharomyces pastorianus
ctacggttccgtcactgattactaa

SEQ ID NO: 120006 - DNA, 25 bp, Saccharomyces pastorianus
ggacctctagtaagatcttcatata

SEQ ID NO: 120007 - DNA, 25 bp, Saccharomyces pastorianus
acctggccgagacggttcgcaaaat

SEQ ID NO: 120008 - DNA, 25 bp, Saccharomyces pastorianus
acatcaataatgctgggtctaggag

SEQ ID NO: 120009 - DNA, 25 bp, Saccharomyces pastorianus
ttgtattgtgcatctggacctctag

SEQ ID NO: 120010 - DNA, 25 bp, Saccharomyces pastorianus
gaatcactaacaccacatgtcagag

SEQ ID NO: 120011 - DNA, 25 bp, Saccharomyces pastorianus
atgccacaggaaacagggctgcttt

SEQ ID NO: 120012 - DNA, 25 bp, Saccharomyces pastorianus
tcccacgccttcatcaaggttatga

SEQ ID NO: 120013 - DNA, 25 bp, Saccharomyces pastorianus
atggcctgcaagctgctatttcata

SEQ ID NO: 120014 - DNA, 25 bp, Saccharomyces pastorianus
tcgggtacagtgttggatcttccat

SEQ ID NO: 120015 - DNA, 25 bp, Saccharomyces pastorianus
tcgatttcgaaactcaagggccaat

SEQ ID NO: 120016 - DNA, 25 bp, Saccharomyces pastorianus
accaaacttctgcagatgctgtcga

SEQ ID NO: 120017 - DNA, 25 bp, Saccharomyces pastorianus
gacagatcaaattctcagcagcaga

SEQ ID NO: 120018 - DNA, 25 bp, Saccharomyces pastorianus
ttgactcttgtcattcgggtacagt

SEQ ID NO: 120019 - DNA, 25 bp, Saccharomyces pastorianus
cagggctgctttgattggttcttta

SEQ ID NO: 120020 - DNA, 25 bp, Saccharomyces pastorianus
ggatcttccatatacctattctact

SEQ ID NO: 120021 - DNA, 25 bp, Saccharomyces pastorianus
aaatacaggtgcaatgtcccacgcc

SEQ ID NO: 120022 - DNA, 25 bp, Saccharomyces pastorianus
gatgatttggttttggtcactccaa

SEQ ID NO: 120023 - DNA, 25 bp, Saccharomyces pastorianus
gcttgtcctggacccaacttatgtg

SEQ ID NO: 120024 - DNA, 25 bp, Saccharomyces pastorianus
gaaatcggtgccattgagaattctt

SEQ ID NO: 120025 - DNA, 25 bp, Saccharomyces pastorianus
agcaacctgcttctattttcaacaa

SEQ ID NO: 120026 - DNA, 25 bp, Saccharomyces pastorianus
aatgctttggagaccaagcctgcca

SEQ ID NO: 120027 - DNA, 25 bp, Saccharomyces pastorianus
gagaattctttgcttgtcctggacc

SEQ ID NO: 120028 - DNA, 25 bp, Saccharomyces pastorianus
tagacgtaactgtcccaatcaacag

SEQ ID NO: 120029 - DNA, 25 bp, Saccharomyces pastorianus
aaaacatcctgcctgacttgagtag

SEQ ID NO: 120030 - DNA, 25 bp, Saccharomyces pastorianus
acactaattgctactttggccgaat

SEQ ID NO: 120031 - DNA, 25 bp, Saccharomyces pastorianus
tgactcatgccaagattccagcctt

SEQ ID NO: 120032 - DNA, 25 bp, Saccharomyces pastorianus
aagattccagccttcacttatgaaa

SEQ ID NO: 120033 - DNA, 25 bp, Saccharomyces pastorianus
aacagtgtatttttctgacgtggca

SEQ ID NO: 120034 - DNA, 25 bp, Saccharomyces pastorianus
caatccgttcaaatcgtgcatgcta

SEQ ID NO: 120035 - DNA, 25 bp, Saccharomyces pastorianus
tcgacgaagaagtcactcctcatct

SEQ ID NO: 120036 - DNA, 25 bp, Saccharomyces pastorianus
ctcatcttcaaattcgttcttacgc

SEQ ID NO: 120037 - DNA, 25 bp, Saccharomyces pastorianus
gtgcatgctaatagtttttccaaca

SEQ ID NO: 120038 - DNA, 25 bp, Saccharomyces pastorianus
ttgtaataaacgtccagccacccat

SEQ ID NO: 120039 - DNA, 25 bp, Saccharomyces pastorianus
gattgcctttctcaatgccaccaaa

SEQ ID NO: 120040 - DNA, 25 bp, Saccharomyces pastorianus
ctgacgtggcattagctaagtggct

SEQ ID NO: 120041 - DNA, 25 bp, Saccharomyces pastorianus
aatgccaccaaagggaatttcgacg

SEQ ID NO: 120042 - DNA, 25 bp, Saccharomyces pastorianus
gaacaacaggcagctcgttacacaa

SEQ ID NO: 120043 - DNA, 25 bp, Saccharomyces pastorianus
aatgcagtagccacgcttacgttta

SEQ ID NO: 120044 - DNA, 25 bp, Saccharomyces pastorianus
tggacaccagttcagcagcattaag

SEQ ID NO: 120045 - DNA, 25 bp, Saccharomyces pastorianus
gacgctaagaagtttcctctcgggt

SEQ ID NO: 120046 - DNA, 25 bp, Saccharomyces pastorianus
taacgagctgcctgttgttctagtg

SEQ ID NO: 120047 - DNA, 25 bp, Saccharomyces pastorianus
agaagaaactgctctcctttgacgc

SEQ ID NO: 120048 - DNA, 25 bp, Saccharomyces pastorianus
agcattcacgagctgggcttcaata

SEQ ID NO: 120049 - DNA, 25 bp, Saccharomyces pastorianus
atatacctcatgaactgccttatgg

SEQ ID NO: 120050 - DNA, 25 bp, Saccharomyces pastorianus
gaacttctgcccatattttacgttg

SEQ ID NO: 120051 - DNA, 25 bp, Saccharomyces pastorianus
ggacgtttattacaagccacttagc

SEQ ID NO: 120052 - DNA, 25 bp, Saccharomyces pastorianus
ccagaacccattgttgactcactaa

SEQ ID NO: 120053 - DNA, 25 bp, Saccharomyces pastorianus
taactgaccctcacaatatcggtgc

SEQ ID NO: 120054 - DNA, 25 bp, Saccharomyces pastorianus
gccacttagctaatgccacgtcaga

SEQ ID NO: 120055 - DNA, 25 bp, Saccharomyces pastorianus
ttcaaggctcttgcggttgccataa

SEQ ID NO: 120056 - DNA, 25 bp, Saccharomyces pastorianus
gctggtcgctaatcgttgagtgcat

SEQ ID NO: 120057 - DNA, 25 bp, Saccharomyces pastorianus
aggcactttccagagcggtggtaga

SEQ ID NO: 120058 - DNA, 25 bp, Saccharomyces pastorianus
ggattgctctcggtcaagcttttaa

SEQ ID NO: 120059 - DNA, 25 bp, Saccharomyces pastorianus
tgatacattctctggccaagcattc

SEQ ID NO: 120060 - DNA, 25 bp, Saccharomyces pastorianus
gaacaggccgtacgcagttgtcgaa

SEQ ID NO: 120061 - DNA, 25 bp, Saccharomyces pastorianus
acgtccacacaggtatagggtttct

SEQ ID NO: 120062 - DNA, 25 bp, Saccharomyces pastorianus
tcacaccactgaagactgcgggatt

SEQ ID NO: 120063 - DNA, 25 bp, Saccharomyces pastorianus
gtggtagatctttcgaacaggccgt

SEQ ID NO: 120064 - DNA, 25 bp, Saccharomyces pastorianus
taagagaagctacctcgcccaatgg

SEQ ID NO: 120065 - DNA, 25 bp, Saccharomyces pastorianus
agaattaccctccacgttgattgtc

SEQ ID NO: 120066 - DNA, 25 bp, Saccharomyces pastorianus
gtagtgcatcattctatacgtgtca

SEQ ID NO: 120067 - DNA, 25 bp, Saccharomyces pastorianus
aagctgcagcatacgatatatatac

SEQ ID NO: 120068 - DNA, 25 bp, Saccharomyces pastorianus
gatgaccaggtagtgcatcattcta

SEQ ID NO: 120069 - DNA, 25 bp, Saccharomyces pastorianus
gacaccgattatttaaagctgcagc

SEQ ID NO: 120070 - DNA, 25 bp, Saccharomyces pastorianus
gtgttcttatgtagtgacaccgatt

SEQ ID NO: 120071 - DNA, 25 bp, Saccharomyces pastorianus
gcatcattctatacgtgtcattctg

SEQ ID NO: 120072 - DNA, 25 bp, Saccharomyces pastorianus
tatatgtatacctatgaatgtcagt

SEQ ID NO: 120073 - DNA, 25 bp, Saccharomyces pastorianus
ataggtggcaagtggtattccgtaa

SEQ ID NO: 120074 - DNA, 25 bp, Saccharomyces pastorianus
cattctgaacgaggcgcgctttcct

SEQ ID NO: 120075 - DNA, 25 bp, Saccharomyces pastorianus
gaatgtcagtaagtatgtatacgaa

SEQ ID NO: 120076 - DNA, 25 bp, Saccharomyces pastorianus
gtgtcattctgaacgaggcgcgctt

SEQ ID NO: 120077 - DNA, 25 bp, Saccharomyces pastorianus
ctggtgcctccgaaaggatccataa

SEQ ID NO: 120078 - DNA, 25 bp, Saccharomyces pastorianus
ggctaccggcgttacattgaaacaa

SEQ ID NO: 120079 - DNA, 25 bp, Saccharomyces pastorianus
atggccccggatgaagctgatactt

SEQ ID NO: 120080 - DNA, 25 bp, Saccharomyces pastorianus
tagaccgatcatcagttccctgtat

SEQ ID NO: 120081 - DNA, 25 bp, Saccharomyces pastorianus
aacttgattgagtctggctaccggc

SEQ ID NO: 120082 - DNA, 25 bp, Saccharomyces pastorianus
agttccctgtatgagatggccccgg

SEQ ID NO: 120083 - DNA, 25 bp, Saccharomyces pastorianus
ggcacacatccgttatcacggtatt

SEQ ID NO: 120084 - DNA, 25 bp, Saccharomyces pastorianus
gtaaagagtcaagctgtcccagaga

SEQ ID NO: 120085 - DNA, 25 bp, Saccharomyces pastorianus
tgggagggattttctacctggtgcc

SEQ ID NO: 120086 - DNA, 25 bp, Saccharomyces pastorianus
ggtacgcaatacctccatttattgg

SEQ ID NO: 120087 - DNA, 25 bp, Saccharomyces pastorianus
tcaactcgtgcaattcatcatctgg

SEQ ID NO: 120088 - DNA, 25 bp, Saccharomyces pastorianus
gttattatctctttacgccgttaca

SEQ ID NO: 120089 - DNA, 25 bp, Saccharomyces pastorianus
aacagtttgtggacttattgggcga

SEQ ID NO: 120090 - DNA, 25 bp, Saccharomyces pastorianus
aaagagccctaacttggctgctttc

SEQ ID NO: 120091 - DNA, 25 bp, Saccharomyces pastorianus
ttacgccgttacatcaagacttcaa

SEQ ID NO: 120092 - DNA, 25 bp, Saccharomyces pastorianus
ggcgattattttgctctgtactgta

SEQ ID NO: 120093 - DNA, 25 bp, Saccharomyces pastorianus
aatgtacgcaagcttatctgaatac

SEQ ID NO: 120094 - DNA, 25 bp, Saccharomyces pastorianus
tttcactaaggcacccaaaaagagc

SEQ ID NO: 120095 - DNA, 25 bp, Saccharomyces pastorianus
catttcctgaacttgtaacaccggt

SEQ ID NO: 120096 - DNA, 25 bp, Saccharomyces pastorianus
ggctgctttcgattttgagcacaac

SEQ ID NO: 120097 - DNA, 25 bp, Saccharomyces pastorianus
aaccaaaacagcactttcatccaag

SEQ ID NO: 120098 - DNA, 25 bp, Saccharomyces pastorianus
cacctttaggttcttatgttgcagt

SEQ ID NO: 120099 - DNA, 25 bp, Saccharomyces pastorianus
atggtgcttcacaattgctgttaga

SEQ ID NO: 120100 - DNA, 25 bp, Saccharomyces pastorianus
atgcatgcaagagctcgtggtccaa

SEQ ID NO: 120101 - DNA, 25 bp, Saccharomyces pastorianus
tggtgtactacctgcaaaagtgctg

SEQ ID NO: 120102 - DNA, 25 bp, Saccharomyces pastorianus
gtgtaatcgcgtatggtgcttcaca

SEQ ID NO: 120103 - DNA, 25 bp, Saccharomyces pastorianus
acaggtgagtgtttacaggcttaca

SEQ ID NO: 120104 - DNA, 25 bp, Saccharomyces pastorianus
gtccaagggctgttttgacacgtca

SEQ ID NO: 120105 - DNA, 25 bp, Saccharomyces pastorianus
ttggccccatttactatcaaaagtt

SEQ ID NO: 120106 - DNA, 25 bp, Saccharomyces pastorianus
tacaggcttacatcttttttggccc

SEQ ID NO: 120107 - DNA, 25 bp, Saccharomyces pastorianus
ttgacacgtcaaccaactgagggta

SEQ ID NO: 120108 - DNA, 25 bp, Saccharomyces pastorianus
gatcaaggtttcaactattccggta

SEQ ID NO: 120109 - DNA, 25 bp, Saccharomyces pastorianus
gcagcaaaactgttattccaggaat

SEQ ID NO: 120110 - DNA, 25 bp, Saccharomyces pastorianus
tcgtaagaagtcagaaccccaggtt

SEQ ID NO: 120111 - DNA, 25 bp, Saccharomyces pastorianus
ccatgacgtgttgaaattgcctaaa

SEQ ID NO: 120112 - DNA, 25 bp, Saccharomyces pastorianus
atatggagtcaagccaatcggtact

SEQ ID NO: 120113 - DNA, 25 bp, Saccharomyces pastorianus
agtgggttatgggagtcgcttctat

SEQ ID NO: 120114 - DNA, 25 bp, Saccharomyces pastorianus
atatgggagatcctgccactgtgaa

SEQ ID NO: 120115 - DNA, 25 bp, Saccharomyces pastorianus
ataacttactcccatgcagctaaag

SEQ ID NO: 120116 - DNA, 25 bp, Saccharomyces pastorianus
tttaaaatcattccgtccaccatat

SEQ ID NO: 120117 - DNA, 25 bp, Saccharomyces pastorianus
tattctgatgcttacgtcggtgtta

SEQ ID NO: 120118 - DNA, 25 bp, Saccharomyces pastorianus
aaaagatttcccaccattaccatga

SEQ ID NO: 120119 - DNA, 25 bp, Saccharomyces pastorianus
attctggagaccctgttgagtatac

SEQ ID NO: 120120 - DNA, 25 bp, Saccharomyces pastorianus
gttattccgattctttgaacgtcga

SEQ ID NO: 120121 - DNA, 25 bp, Saccharomyces pastorianus
taggtctaaaaagatactgctgtag

SEQ ID NO: 120122 - DNA, 25 bp, Saccharomyces pastorianus
cagtcagatgtttctcatgcggtaa

SEQ ID NO: 120123 - DNA, 25 bp, Saccharomyces pastorianus
tgtagaagaatgattctaacccacg

SEQ ID NO: 120124 - DNA, 25 bp, Saccharomyces pastorianus
tcccagtcagatgtttctcatgcgg

SEQ ID NO: 120125 - DNA, 25 bp, Saccharomyces pastorianus
ctgcattgtcaagattaggtctaaa

SEQ ID NO: 120126 - DNA, 25 bp, Saccharomyces pastorianus
cagatgtttctcatgcggtaaagtt

SEQ ID NO: 120127 - DNA, 25 bp, Saccharomyces pastorianus
ggtgacaagtgggaaagctacttaa

SEQ ID NO: 120128 - DNA, 25 bp, Saccharomyces pastorianus
gacaagtgggaaagctacttaaact

SEQ ID NO: 120129 - DNA, 25 bp, Saccharomyces pastorianus
ggtactgcattgtcaagattaggtc

SEQ ID NO: 120130 - DNA, 25 bp, Saccharomyces pastorianus
gatactgctgtagaagaatgattct

SEQ ID NO: 120131 - DNA, 25 bp, Saccharomyces pastorianus
tgtcccagtcagatgtttctcatgc

SEQ ID NO: 120132 - DNA, 25 bp, Saccharomyces pastorianus
acagctgttttattccttaacgttg

SEQ ID NO: 120133 - DNA, 25 bp, Saccharomyces pastorianus
acactcggcatgtccaaattactat

SEQ ID NO: 120134 - DNA, 25 bp, Saccharomyces pastorianus
agaaggatcgttgtccagaggtatt

SEQ ID NO: 120135 - DNA, 25 bp, Saccharomyces pastorianus
gataaattgacctccacagctgttt

SEQ ID NO: 120136 - DNA, 25 bp, Saccharomyces pastorianus
gtcttgctcgtcaacattccattaa

SEQ ID NO: 120137 - DNA, 25 bp, Saccharomyces pastorianus
gagactggagtcttgctcgtcaaca

SEQ ID NO: 120138 - DNA, 25 bp, Saccharomyces pastorianus
gtaactcaaggtaccaggcaatcaa

SEQ ID NO: 120139 - DNA, 25 bp, Saccharomyces pastorianus
agaggtatttctatctgcagttagt

SEQ ID NO: 120140 - DNA, 25 bp, Saccharomyces pastorianus
gagaactgtatcaaacccttcaagt

SEQ ID NO: 120141 - DNA, 25 bp, Saccharomyces pastorianus
ggtgcaaagtgttatcgttcagatt

SEQ ID NO: 120142 - DNA, 25 bp, Saccharomyces pastorianus
ggaagatccgaagatttcaaggcat

SEQ ID NO: 120143 - DNA, 25 bp, Saccharomyces pastorianus
gttttggcattagctattcctgaag

SEQ ID NO: 120144 - DNA, 25 bp, Saccharomyces pastorianus
gtatgtacaggttcatgggactcaa

SEQ ID NO: 120145 - DNA, 25 bp, Saccharomyces pastorianus
agagtcactggtgtgcgctcgagtc

SEQ ID NO: 120146 - DNA, 25 bp, Saccharomyces pastorianus
aagctatctagacaaccaaggcgtt

SEQ ID NO: 120147 - DNA, 25 bp, Saccharomyces pastorianus
atggagtacaataccgcgcaatcgc

SEQ ID NO: 120148 - DNA, 25 bp, Saccharomyces pastorianus
tgtgcgctcgagtccagatgggtta

SEQ ID NO: 120149 - DNA, 25 bp, Saccharomyces pastorianus
gaacacattcgctagctgtggatca

SEQ ID NO: 120150 - DNA, 25 bp, Saccharomyces pastorianus
aaggtcggactgttctattgctact

SEQ ID NO: 120151 - DNA, 25 bp, Saccharomyces pastorianus
cgcgcaatcgccacaaactttaaaa

SEQ ID NO: 120152 - DNA, 25 bp, Saccharomyces pastorianus
tatgggatagcagatctccgtccgc

SEQ ID NO: 120153 - DNA, 25 bp, Saccharomyces pastorianus
tccgtccgctgtacaaagcttttac

SEQ ID NO: 120154 - DNA, 25 bp, Saccharomyces pastorianus
atcaattaggccacttgtttcaaat

SEQ ID NO: 120155 - DNA, 25 bp, Saccharomyces pastorianus
aagagcgctgatgagtactccctgt

SEQ ID NO: 120156 - DNA, 25 bp, Saccharomyces pastorianus
caagagggacgatctggtggccaaa

SEQ ID NO: 120157 - DNA, 25 bp, Saccharomyces pastorianus
gagtactccctgtacgacatgtact

SEQ ID NO: 120158 - DNA, 25 bp, Saccharomyces pastorianus
gccagtgtcttcagagcttgatatt

SEQ ID NO: 120159 - DNA, 25 bp, Saccharomyces pastorianus
tcgactggaagtcattgccaacaga

SEQ ID NO: 120160 - DNA, 25 bp, Saccharomyces pastorianus
gatcaatgagttccttgctaacaag

SEQ ID NO: 120161 - DNA, 25 bp, Saccharomyces pastorianus
gaagacatctccaactgccatcaaa

SEQ ID NO: 120162 - DNA, 25 bp, Saccharomyces pastorianus
tatggaccaattgccagtgtcttca

SEQ ID NO: 120163 - DNA, 25 bp, Saccharomyces pastorianus
gaagaaattactggacgccctcaaa

SEQ ID NO: 120164 - DNA, 25 bp, Saccharomyces pastorianus
gttataacagttctccagcctacac

SEQ ID NO: 120165 - DNA, 25 bp, Saccharomyces pastorianus
attcaagcgctgtatcgagaacgga

SEQ ID NO: 120166 - DNA, 25 bp, Saccharomyces pastorianus
ggcactggccatgttgaagaaatca

SEQ ID NO: 120167 - DNA, 25 bp, Saccharomyces pastorianus
attgagacaggctttggaatcccat

SEQ ID NO: 120168 - DNA, 25 bp, Saccharomyces pastorianus
attgatatctttcgtgtccataccc

SEQ ID NO: 120169 - DNA, 25 bp, Saccharomyces pastorianus
gaagtcaaagctttacgatcccaac

SEQ ID NO: 120170 - DNA, 25 bp, Saccharomyces pastorianus
gagcatttaacaaaggcactggcca

SEQ ID NO: 120171 - DNA, 25 bp, Saccharomyces pastorianus
tacgatcccaacttgacacggagat

SEQ ID NO: 120172 - DNA, 25 bp, Saccharomyces pastorianus
ggaaagctttgtatcgctttggacc

SEQ ID NO: 120173 - DNA, 25 bp, Saccharomyces pastorianus
aagcagcacatcttacagatcggaa

SEQ ID NO: 120174 - DNA, 25 bp, Saccharomyces pastorianus
aactacgtcacgaagccattatact

SEQ ID NO: 120175 - DNA, 25 bp, Saccharomyces pastorianus
acaggccggcttgatctcgaataat

SEQ ID NO: 120176 - DNA, 25 bp, Saccharomyces pastorianus
tgcaattgcatctgtcatagaggta

SEQ ID NO: 120177 - DNA, 25 bp, Saccharomyces pastorianus
agcatcaaaagttgccggccatatg

SEQ ID NO: 120178 - DNA, 25 bp, Saccharomyces pastorianus
ccccgatttcgaagatgtcgttgat

SEQ ID NO: 120179 - DNA, 25 bp, Saccharomyces pastorianus
gaggaagactgccaccagtaaacct

SEQ ID NO: 120180 - DNA, 25 bp, Saccharomyces pastorianus
aacagtatgacacatccagtcgcaa

SEQ ID NO: 120181 - DNA, 25 bp, Saccharomyces pastorianus
caatttcacagcttggttgggccaa

SEQ ID NO: 120182 - DNA, 25 bp, Saccharomyces pastorianus
agatgacaatccagttcccgcagat

SEQ ID NO: 120183 - DNA, 25 bp, Saccharomyces pastorianus
gtaggtcctgatgtgaccacagcaa

SEQ ID NO: 120184 - DNA, 25 bp, Saccharomyces pastorianus
tatggagtttttcgtaggtcctgat

SEQ ID NO: 120185 - DNA, 25 bp, Saccharomyces pastorianus
tccagtcgcaatttacagaacaggt

SEQ ID NO: 120186 - DNA, 25 bp, Saccharomyces pastorianus
ggctggattacctaccaacttttag

SEQ ID NO: 120187 - DNA, 25 bp, Saccharomyces pastorianus
agtaatgctgcatcgtgtaccgaaa

SEQ ID NO: 120188 - DNA, 25 bp, Saccharomyces pastorianus
gaggctcttcattatctccggataa

SEQ ID NO: 120189 - DNA, 25 bp, Saccharomyces pastorianus
agtagacagttcatccctcaataag

SEQ ID NO: 120190 - DNA, 25 bp, Saccharomyces pastorianus
gcaacaaaccgctcttatctattaa

SEQ ID NO: 120191 - DNA, 25 bp, Saccharomyces pastorianus
aataatcaacatccgcgatctcgtt

SEQ ID NO: 120192 - DNA, 25 bp, Saccharomyces pastorianus
gttccacggatgatgctgtttcgtt

SEQ ID NO: 120193 - DNA, 25 bp, Saccharomyces pastorianus
aaagctttctaggtcgtcttcttca

SEQ ID NO: 120194 - DNA, 25 bp, Saccharomyces pastorianus
gaatcgcccacaatgttgaagcttt

SEQ ID NO: 120195 - DNA, 25 bp, Saccharomyces pastorianus
tgatgtaaacgctactgcctcaaat

SEQ ID NO: 120196 - DNA, 25 bp, Saccharomyces pastorianus
acagacatcattaccttcacaacta

SEQ ID NO: 120197 - DNA, 25 bp, Saccharomyces pastorianus
aacttggcacttttggaggatcatc

SEQ ID NO: 120198 - DNA, 25 bp, Saccharomyces pastorianus
aagatctccattgcggctggtgcat

SEQ ID NO: 120199 - DNA, 25 bp, Saccharomyces pastorianus
tacggtcgggaccatgcttaacact

SEQ ID NO: 120200 - DNA, 25 bp, Saccharomyces pastorianus
gtatgtagactagcacccggtggtt

SEQ ID NO: 120201 - DNA, 25 bp, Saccharomyces pastorianus
gcctaccttcgctattggtcatata

SEQ ID NO: 120202 - DNA, 25 bp, Saccharomyces pastorianus
aaaatacaactggtgcctaccttcg

SEQ ID NO: 120203 - DNA, 25 bp, Saccharomyces pastorianus
agaaacgctctttggaatggtggct

SEQ ID NO: 120204 - DNA, 25 bp, Saccharomyces pastorianus
gcttaacactccctttgacgtggta

SEQ ID NO: 120205 - DNA, 25 bp, Saccharomyces pastorianus
gcaagacgtcaagtccagctatctt

SEQ ID NO: 120206 - DNA, 25 bp, Saccharomyces pastorianus
aatggtggctacttcggtgttatct

SEQ ID NO: 120207 - DNA, 25 bp, Saccharomyces pastorianus
gtgagaaattccatgcccgtagcaa

SEQ ID NO: 120208 - DNA, 25 bp, Saccharomyces pastorianus
aagctgcagttattgttccatttga

SEQ ID NO: 120209 - DNA, 25 bp, Saccharomyces pastorianus
caagaaatcgaactgctgaggcaac

SEQ ID NO: 120210 - DNA, 25 bp, Saccharomyces pastorianus
gtttgataggctacgatccgtggga

SEQ ID NO: 120211 - DNA, 25 bp, Saccharomyces pastorianus
gattgctgaggaactgacgcattac

SEQ ID NO: 120212 - DNA, 25 bp, Saccharomyces pastorianus
tccaatgactccatgaccacgcagg

SEQ ID NO: 120213 - DNA, 25 bp, Saccharomyces pastorianus
gatgagggccatgacattagacagt

SEQ ID NO: 120214 - DNA, 25 bp, Saccharomyces pastorianus
gatccgtgggatttactgagcaaga

SEQ ID NO: 120215 - DNA, 25 bp, Saccharomyces pastorianus
ataactctaacgtcgcaacaggcac

SEQ ID NO: 120216 - DNA, 25 bp, Saccharomyces pastorianus
gaggcaacagtttcgggccacgtat

SEQ ID NO: 120217 - DNA, 25 bp, Saccharomyces pastorianus
gacgatgcaactccgtccaatgact

SEQ ID NO: 120218 - DNA, 25 bp, Saccharomyces pastorianus
gacgcattacttcgatactgctaat

SEQ ID NO: 120219 - DNA, 25 bp, Saccharomyces pastorianus
gcgtggcaccagagcagaacaacta

SEQ ID NO: 120220 - DNA, 25 bp, Saccharomyces pastorianus
ataacaaagtctgccgtatcgaagc

SEQ ID NO: 120221 - DNA, 25 bp, Saccharomyces pastorianus
gtcgccgcacaagattctttgacag

SEQ ID NO: 120222 - DNA, 25 bp, Saccharomyces pastorianus
ggtgacagatcccttgcagatgatt

SEQ ID NO: 120223 - DNA, 25 bp, Saccharomyces pastorianus
agctaacgactcttctgcgacaaga

SEQ ID NO: 120224 - DNA, 25 bp, Saccharomyces pastorianus
tgcgacaagaagctggagacctcca

SEQ ID NO: 120225 - DNA, 25 bp, Saccharomyces pastorianus
atctaccactcaggaccaatgcaaa

SEQ ID NO: 120226 - DNA, 25 bp, Saccharomyces pastorianus
gattacgtcatgtatggtaccgctt

SEQ ID NO: 120227 - DNA, 25 bp, Saccharomyces pastorianus
gagacctccacaggctggtgacaga

SEQ ID NO: 120228 - DNA, 25 bp, Saccharomyces pastorianus
ctcggaagttgatcccggtcgttat

SEQ ID NO: 120229 - DNA, 25 bp, Saccharomyces pastorianus
aatgttgaattgtttcccgtcgccg

SEQ ID NO: 120230 - DNA, 25 bp, Saccharomyces pastorianus
tttgacagtgactattgcatcctct

SEQ ID NO: 120231 - DNA, 25 bp, Saccharomyces pastorianus
attagaccacacttaatggccaccg

SEQ ID NO: 120232 - DNA, 25 bp, Saccharomyces pastorianus
gcagaggccccttgttgaagatgaa

SEQ ID NO: 120233 - DNA, 25 bp, Saccharomyces pastorianus
agtcctctcgcacatctggtacaag

SEQ ID NO: 120234 - DNA, 25 bp, Saccharomyces pastorianus
accagatagcagtgtcgccggagga

SEQ ID NO: 120235 - DNA, 25 bp, Saccharomyces pastorianus
agagttcgtctaatacctcactggc

SEQ ID NO: 120236 - DNA, 25 bp, Saccharomyces pastorianus
gtgaccactggtaaagctcttcttt

SEQ ID NO: 120237 - DNA, 25 bp, Saccharomyces pastorianus
cttcatccgccaattcttcgagaat

SEQ ID NO: 120238 - DNA, 25 bp, Saccharomyces pastorianus
ggacgaatcatcgatgtgaccactg

SEQ ID NO: 120239 - DNA, 25 bp, Saccharomyces pastorianus
caaagatacctaccggtgccgaatt

SEQ ID NO: 120240 - DNA, 25 bp, Saccharomyces pastorianus
aagacataactctgggcttccttca

SEQ ID NO: 120241 - DNA, 25 bp, Saccharomyces pastorianus
gatgaattgaactctagaagcccga

SEQ ID NO: 120242 - DNA, 25 bp, Saccharomyces pastorianus
cccgtcctgatataccacttattaa

SEQ ID NO: 120243 - DNA, 25 bp, Saccharomyces pastorianus
gttgggttcgtttctctgattagat

SEQ ID NO: 120244 - DNA, 25 bp, Saccharomyces pastorianus
agctattctcctcgagtcaggtgta

SEQ ID NO: 120245 - DNA, 25 bp, Saccharomyces pastorianus
ggtggatttcgcctctataaagcaa

SEQ ID NO: 120246 - DNA, 25 bp, Saccharomyces pastorianus
tggtgtcttgctccgaatcgtgaac

SEQ ID NO: 120247 - DNA, 25 bp, Saccharomyces pastorianus
aatctattgacactcgttgggttcg

SEQ ID NO: 120248 - DNA, 25 bp, Saccharomyces pastorianus
gattttaccgtccataactaccaag

SEQ ID NO: 120249 - DNA, 25 bp, Saccharomyces pastorianus
tgccgaattccatctctactgaggt

SEQ ID NO: 120250 - DNA, 25 bp, Saccharomyces pastorianus
gtattactcttcatgtttctgctgg

SEQ ID NO: 120251 - DNA, 25 bp, Saccharomyces pastorianus
ggtcccaaccaattcgaaggcattt

SEQ ID NO: 120252 - DNA, 25 bp, Saccharomyces pastorianus
gattgtataagaccttccgcattcc

SEQ ID NO: 120253 - DNA, 25 bp, Saccharomyces pastorianus
aaattgacctcgtttgattgctctc

SEQ ID NO: 120254 - DNA, 25 bp, Saccharomyces pastorianus
aaacttggttggtactgtcgatgac

SEQ ID NO: 120255 - DNA, 25 bp, Saccharomyces pastorianus
tgattgctctcaggtttccaacaac

SEQ ID NO: 120256 - DNA, 25 bp, Saccharomyces pastorianus
ggaagaagaaacaccgccgcttggc

SEQ ID NO: 120257 - DNA, 25 bp, Saccharomyces pastorianus
attttctgccacttcaagctctgaa

SEQ ID NO: 120258 - DNA, 25 bp, Saccharomyces pastorianus
ctgaattctttactgtgggcggcac

SEQ ID NO: 120259 - DNA, 25 bp, Saccharomyces pastorianus
caatattctgaggttctgggacact

SEQ ID NO: 120260 - DNA, 25 bp, Saccharomyces pastorianus
aatcgctaatttctatcatgccggc

SEQ ID NO: 120261 - DNA, 25 bp, Saccharomyces pastorianus
gttgtcgacgtccaattttctgcca

SEQ ID NO: 120262 - DNA, 25 bp, Saccharomyces pastorianus
gaacttccgacaagcctatatgggt

SEQ ID NO: 120263 - DNA, 25 bp, Saccharomyces pastorianus
gccgcttggcatccagttattgaaa

SEQ ID NO: 120264 - DNA, 25 bp, Saccharomyces pastorianus
aagatagtcgtgaacggccatctcc

SEQ ID NO: 120265 - DNA, 25 bp, Saccharomyces pastorianus
ggagaagccgttaactcgctagcca

SEQ ID NO: 120266 - DNA, 25 bp, Saccharomyces pastorianus
cagccaatatagctccctttgaatt

SEQ ID NO: 120267 - DNA, 25 bp, Saccharomyces pastorianus
caaatcctttatcgactactgtctg

SEQ ID NO: 120268 - DNA, 25 bp, Saccharomyces pastorianus
caaggtcaaccatacagtgtcacat

SEQ ID NO: 120269 - DNA, 25 bp, Saccharomyces pastorianus
ggacgtcattctatatggctccaga

SEQ ID NO: 120270 - DNA, 25 bp, Saccharomyces pastorianus
gaaatttccatgctcttccgagaag

SEQ ID NO: 120271 - DNA, 25 bp, Saccharomyces pastorianus
gaacggccatctccaagacaaatga

SEQ ID NO: 120272 - DNA, 25 bp, Saccharomyces pastorianus
ggattttaacatttactcctgaatt

SEQ ID NO: 120273 - DNA, 25 bp, Saccharomyces pastorianus
gtgggcgatcgttggatgctattta

SEQ ID NO: 120274 - DNA, 25 bp, Saccharomyces pastorianus
gtatggtcacttggattaacgattt

SEQ ID NO: 120275 - DNA, 25 bp, Saccharomyces pastorianus
tccatttttcaatttacacttggaa

SEQ ID NO: 120276 - DNA, 25 bp, Saccharomyces pastorianus
agcgaatatttttgatccatttttc

SEQ ID NO: 120277 - DNA, 25 bp, Saccharomyces pastorianus
ggctccttctcctagaatgcctaat

SEQ ID NO: 120278 - DNA, 25 bp, Saccharomyces pastorianus
tttccaaccattttcatccaattga

SEQ ID NO: 120279 - DNA, 25 bp, Saccharomyces pastorianus
aaatttgcatatttccaaccatttt

SEQ ID NO: 120280 - DNA, 25 bp, Saccharomyces pastorianus
gaatgcctaatgtctcgatcctatc

SEQ ID NO: 120281 - DNA, 25 bp, Saccharomyces pastorianus
tgatcaacatctcgtacactgttta

SEQ ID NO: 120282 - DNA, 25 bp, Saccharomyces pastorianus
cgatcctatcttttaaatttgcata

SEQ ID NO: 120283 - DNA, 25 bp, Saccharomyces pastorianus
acacttggaaacagagccaccggct

SEQ ID NO: 120284 - DNA, 25 bp, Saccharomyces pastorianus
ttcatccaattgatcaacatctcgt

SEQ ID NO: 120285 - DNA, 25 bp, Saccharomyces pastorianus
taatgtctcgatcctatcttttaaa

SEQ ID NO: 120286 - DNA, 25 bp, Saccharomyces pastorianus
gtacgggcttctgttatggtgtcaa

SEQ ID NO: 120287 - DNA, 25 bp, Saccharomyces pastorianus
gaaaatggttttcctcgagagagca

SEQ ID NO: 120288 - DNA, 25 bp, Saccharomyces pastorianus
aatgttggccactcttctaataaat

SEQ ID NO: 120289 - DNA, 25 bp, Saccharomyces pastorianus
gagacaacgcacctagctatgctga

SEQ ID NO: 120290 - DNA, 25 bp, Saccharomyces pastorianus
aaaagggaatgcacctcctgtttca

SEQ ID NO: 120291 - DNA, 25 bp, Saccharomyces pastorianus
atgtcgaggcacagacttcaacagc

SEQ ID NO: 120292 - DNA, 25 bp, Saccharomyces pastorianus
aaggttcagcttcatgtcgttgtac

SEQ ID NO: 120293 - DNA, 25 bp, Saccharomyces pastorianus
gagagagcatcgacccagagagtac

SEQ ID NO: 120294 - DNA, 25 bp, Saccharomyces pastorianus
taacctttccgacagagttccaaat

SEQ ID NO: 120295 - DNA, 25 bp, Saccharomyces pastorianus
gatccactgttgaatctcgtacctc

SEQ ID NO: 120296 - DNA, 25 bp, Saccharomyces pastorianus
gtcgttgtactcatccttaaatggt

SEQ ID NO: 120297 - DNA, 25 bp, Saccharomyces pastorianus
tatagtcaaatcttctccattacag

SEQ ID NO: 120298 - DNA, 25 bp, Saccharomyces pastorianus
atgggaatccataccgcccaagttt

SEQ ID NO: 120299 - DNA, 25 bp, Saccharomyces pastorianus
tgtggcatgtttacagccggagatg

SEQ ID NO: 120300 - DNA, 25 bp, Saccharomyces pastorianus
gtgatcaacgctactcgctggaaga

SEQ ID NO: 120301 - DNA, 25 bp, Saccharomyces pastorianus
cagatcattggctcatcacgaaaat

SEQ ID NO: 120302 - DNA, 25 bp, Saccharomyces pastorianus
gagttgcccgaaacagactgtgatc

SEQ ID NO: 120303 - DNA, 25 bp, Saccharomyces pastorianus
aaacgcaactcctgcaatggacact

SEQ ID NO: 120304 - DNA, 25 bp, Saccharomyces pastorianus
taggatttcgtggaggtctaccatg

SEQ ID NO: 120305 - DNA, 25 bp, Saccharomyces pastorianus
tcgcccactgcccaatagaatgaat

SEQ ID NO: 120306 - DNA, 25 bp, Saccharomyces pastorianus
tggacactttccttgatgcgaagaa

SEQ ID NO: 120307 - DNA, 25 bp, Saccharomyces pastorianus
gtctaccatggaggttgcccagtga

SEQ ID NO: 120308 - DNA, 25 bp, Saccharomyces pastorianus
ttaacagaactgcaccgtacgctca

SEQ ID NO: 120309 - DNA, 25 bp, Saccharomyces pastorianus
gttctatggtggttcaatcactact

SEQ ID NO: 120310 - DNA, 25 bp, Saccharomyces pastorianus
aatcactactgaagagttctcgctg

SEQ ID NO: 120311 - DNA, 25 bp, Saccharomyces pastorianus
aacgagctgcgtcttttattaaaag

SEQ ID NO: 120312 - DNA, 25 bp, Saccharomyces pastorianus
aatgcactaagcttattttcttcag

SEQ ID NO: 120313 - DNA, 25 bp, Saccharomyces pastorianus
gattcatcagctgtcatgccaaggc

SEQ ID NO: 120314 - DNA, 25 bp, Saccharomyces pastorianus
tgccaaggccattgattacccacaa

SEQ ID NO: 120315 - DNA, 25 bp, Saccharomyces pastorianus
gcaccgtacgctcagaatattttct

SEQ ID NO: 120316 - DNA, 25 bp, Saccharomyces pastorianus
aaagatctcgcaacccatttaacag

SEQ ID NO: 120317 - DNA, 25 bp, Saccharomyces pastorianus
gttctcgctggactcatttgataat

SEQ ID NO: 120318 - DNA, 25 bp, Saccharomyces pastorianus
atagggtttgcgtttaagatgccaa

SEQ ID NO: 120319 - DNA, 25 bp, Saccharomyces pastorianus
actggttcattacatcttgttggcg

SEQ ID NO: 120320 - DNA, 25 bp, Saccharomyces pastorianus
tttggtacattgatggtgctcacac

SEQ ID NO: 120321 - DNA, 25 bp, Saccharomyces pastorianus
aacgctatacgatgaacctgctgat

SEQ ID NO: 120322 - DNA, 25 bp, Saccharomyces pastorianus
acagcgctgacctcgtttccatgaa

SEQ ID NO: 120323 - DNA, 25 bp, Saccharomyces pastorianus
gttatgctggcttctgagatcttgc

SEQ ID NO: 120324 - DNA, 25 bp, Saccharomyces pastorianus
gagatcttgcatacgtccaatatat

SEQ ID NO: 120325 - DNA, 25 bp, Saccharomyces pastorianus
agatcttgctcttcaatcaacaaag

SEQ ID NO: 120326 - DNA, 25 bp, Saccharomyces pastorianus
gagatgccaacgctcttgtgaataa

SEQ ID NO: 120327 - DNA, 25 bp, Saccharomyces pastorianus
ctgtactcatctgtttcgccagaaa

SEQ ID NO: 120328 - DNA, 25 bp, Saccharomyces pastorianus
tggaaatcaggctcatacagcgctg

SEQ ID NO: 120329 - DNA, 25 bp, Saccharomyces pastorianus
atggtagctgcatcaacatggttca

SEQ ID NO: 120330 - DNA, 25 bp, Saccharomyces pastorianus
attaaacgatataccgcgcggcaca

SEQ ID NO: 120331 - DNA, 25 bp, Saccharomyces pastorianus
ttacgagggagctcaatcttttatg

SEQ ID NO: 120332 - DNA, 25 bp, Saccharomyces pastorianus
tacgcggaggttccttagaaagaat

SEQ ID NO: 120333 - DNA, 25 bp, Saccharomyces pastorianus
atggatattcctcgagagcacatat

SEQ ID NO: 120334 - DNA, 25 bp, Saccharomyces pastorianus
gatcttttcttcttaaattacgagg

SEQ ID NO: 120335 - DNA, 25 bp, Saccharomyces pastorianus
attgtctataggtacgatactccgg

SEQ ID NO: 120336 - DNA, 25 bp, Saccharomyces pastorianus
ttgtctcaagtacgcggaggttcct

SEQ ID NO: 120337 - DNA, 25 bp, Saccharomyces pastorianus
taggtacgatactccggaacgttct

SEQ ID NO: 120338 - DNA, 25 bp, Saccharomyces pastorianus
aaagctcgacaacagcaatgcctaa

SEQ ID NO: 120339 - DNA, 25 bp, Saccharomyces pastorianus
ggcatctctagtgtattgtctcaag

SEQ ID NO: 120340 - DNA, 25 bp, Saccharomyces pastorianus
gcggcacaggcatctctagtgtatt

SEQ ID NO: 120341 - DNA, 25 bp, Saccharomyces pastorianus
gacttggtgtcgaaacttgtgttta

SEQ ID NO: 120342 - DNA, 25 bp, Saccharomyces pastorianus
ttctcccgagaaacctttgtctgat

SEQ ID NO: 120343 - DNA, 25 bp, Saccharomyces pastorianus
caaagacactgaatatcctgcgata

SEQ ID NO: 120344 - DNA, 25 bp, Saccharomyces pastorianus
gtctgatttgggtctcttatcctat

SEQ ID NO: 120345 - DNA, 25 bp, Saccharomyces pastorianus
taagctccatgacttcgatgaccac

SEQ ID NO: 120346 - DNA, 25 bp, Saccharomyces pastorianus
tcaccatctggtgggatatttttcc

SEQ ID NO: 120347 - DNA, 25 bp, Saccharomyces pastorianus
tatagagcctattggtcggacactc

SEQ ID NO: 120348 - DNA, 25 bp, Saccharomyces pastorianus
ataggtacaatcgacttaaagccaa

SEQ ID NO: 120349 - DNA, 25 bp, Saccharomyces pastorianus
tcggacactctcataacgctattag

SEQ ID NO: 120350 - DNA, 25 bp, Saccharomyces pastorianus
atccgcggatggttacaatgttgca

SEQ ID NO: 120351 - DNA, 25 bp, Saccharomyces pastorianus
tactttccaaacttttcctagatca

SEQ ID NO: 120352 - DNA, 25 bp, Saccharomyces pastorianus
gagattattgcctttactgcgccat

SEQ ID NO: 120353 - DNA, 25 bp, Saccharomyces pastorianus
tatggcggtgcccttagaaatgacg

SEQ ID NO: 120354 - DNA, 25 bp, Saccharomyces pastorianus
gaacaaggttcactagcttctttga

SEQ ID NO: 120355 - DNA, 25 bp, Saccharomyces pastorianus
atcgacttggatctggaccgttcat

SEQ ID NO: 120356 - DNA, 25 bp, Saccharomyces pastorianus
ttggacaaggttacccatcgtcggt

SEQ ID NO: 120357 - DNA, 25 bp, Saccharomyces pastorianus
aaccgcgctaatccaatgcacgaag

SEQ ID NO: 120358 - DNA, 25 bp, Saccharomyces pastorianus
attgtcgtggcaggatcatttccct

SEQ ID NO: 120359 - DNA, 25 bp, Saccharomyces pastorianus
atgttggccatcaaataccctgacg

SEQ ID NO: 120360 - DNA, 25 bp, Saccharomyces pastorianus
gcacttcctcttcacgatgagatta

SEQ ID NO: 120361 - DNA, 25 bp, Saccharomyces pastorianus
gtgtgcattggacccgaatttatct

SEQ ID NO: 120362 - DNA, 25 bp, Saccharomyces pastorianus
atcgtcggtattttcttttggctgt

SEQ ID NO: 120363 - DNA, 25 bp, Saccharomyces pastorianus
gacgacaccactaccttttttgtca

SEQ ID NO: 120364 - DNA, 25 bp, Saccharomyces pastorianus
ggcctctggatctgtaaccccagaa

SEQ ID NO: 120365 - DNA, 25 bp, Saccharomyces pastorianus
actatcacgtccactttgctgctaa

SEQ ID NO: 120366 - DNA, 25 bp, Saccharomyces pastorianus
ttttcgctcttttaaccttcgcaag

SEQ ID NO: 120367 - DNA, 25 bp, Saccharomyces pastorianus
taaccttcgcaagttctgtgtcagc

SEQ ID NO: 120368 - DNA, 25 bp, Saccharomyces pastorianus
gtttctacaactaccactttagcgc

SEQ ID NO: 120369 - DNA, 25 bp, Saccharomyces pastorianus
aagagactaccatatcgtacgccga

SEQ ID NO: 120370 - DNA, 25 bp, Saccharomyces pastorianus
ttttttgtcacctcaacggtctact

SEQ ID NO: 120371 - DNA, 25 bp, Saccharomyces pastorianus
atgcttcaatccgttgtctttttcg

SEQ ID NO: 120372 - DNA, 25 bp, Saccharomyces pastorianus
acgagctggttcacctcaacttcag

SEQ ID NO: 120373 - DNA, 25 bp, Saccharomyces pastorianus
agaatccacccatgaaattacctcc

SEQ ID NO: 120374 - DNA, 25 bp, Saccharomyces pastorianus
ggttgcgtcccaatcacaaagtttg

SEQ ID NO: 120375 - DNA, 25 bp, Saccharomyces pastorianus
ttgtctccatcatctactgcagcaa

SEQ ID NO: 120376 - DNA, 25 bp, Saccharomyces pastorianus
tcaccccaaatacgactactcaata

SEQ ID NO: 120377 - DNA, 25 bp, Saccharomyces pastorianus
tactgcagcaagtgtcagtgacgaa

SEQ ID NO: 120378 - DNA, 25 bp, Saccharomyces pastorianus
gaacaggcttcaacttccaatggtt

SEQ ID NO: 120379 - DNA, 25 bp, Saccharomyces pastorianus
gtacgttacagtcaccccaaatacg

SEQ ID NO: 120380 - DNA, 25 bp, Saccharomyces pastorianus
aatacgttactgtcaccggtgcacc

SEQ ID NO: 120381 - DNA, 25 bp, Saccharomyces pastorianus
accggtgcaccttctgttaccacta

SEQ ID NO: 120382 - DNA, 25 bp, Saccharomyces pastorianus
atgactccactactttgtctccatc

SEQ ID NO: 120383 - DNA, 25 bp, Saccharomyces pastorianus
ttaccactacctctccaggtaaagt

SEQ ID NO: 120384 - DNA, 25 bp, Saccharomyces pastorianus
agtttgtcactgtcaccaatgagcc

SEQ ID NO: 120385 - DNA, 25 bp, Saccharomyces pastorianus
gttctgaaacggatcctctttggga

SEQ ID NO: 120386 - DNA, 25 bp, Saccharomyces pastorianus
atggtgtatccgcagttgatgatgt

SEQ ID NO: 120387 - DNA, 25 bp, Saccharomyces pastorianus
agggtgcattgtcgatacgccatca

SEQ ID NO: 120388 - DNA, 25 bp, Saccharomyces pastorianus
tcttgatacagccttaagtccttat

SEQ ID NO: 120389 - DNA, 25 bp, Saccharomyces pastorianus
tcaagtcaggagatcagggtgcatt

SEQ ID NO: 120390 - DNA, 25 bp, Saccharomyces pastorianus
ccaagtaacctacagcacgctatta

SEQ ID NO: 120391 - DNA, 25 bp, Saccharomyces pastorianus
tccccgtcactataactccaagtaa

SEQ ID NO: 120392 - DNA, 25 bp, Saccharomyces pastorianus
aagtccttatgctattggtgttgat

SEQ ID NO: 120393 - DNA, 25 bp, Saccharomyces pastorianus
gtacttttacggctctcttgataca

SEQ ID NO: 120394 - DNA, 25 bp, Saccharomyces pastorianus
attatagccataacgttcgcagaaa

SEQ ID NO: 120395 - DNA, 25 bp, Saccharomyces pastorianus
ttggctgaactgcaccatatcattg

SEQ ID NO: 120396 - DNA, 25 bp, Saccharomyces pastorianus
gatcgtgttggtaactttagctccc

SEQ ID NO: 120397 - DNA, 25 bp, Saccharomyces pastorianus
ttagctcccctagatgtgcttggac

SEQ ID NO: 120398 - DNA, 25 bp, Saccharomyces pastorianus
tatttgctcttgtggaactggcgtt

SEQ ID NO: 120399 - DNA, 25 bp, Saccharomyces pastorianus
gaagtttacttgatccggagaccaa

SEQ ID NO: 120400 - DNA, 25 bp, Saccharomyces pastorianus
gttttcaccctatccaaagagtcat

SEQ ID NO: 120401 - DNA, 25 bp, Saccharomyces pastorianus
attcctctaaggtggcagcgttttc

SEQ ID NO: 120402 - DNA, 25 bp, Saccharomyces pastorianus
ctggcgtttcaggagtcattatcaa

SEQ ID NO: 120403 - DNA, 25 bp, Saccharomyces pastorianus
agattttcattgcactttggaccca

SEQ ID NO: 120404 - DNA, 25 bp, Saccharomyces pastorianus
tttaagtaccctctagattcctcta

SEQ ID NO: 120405 - DNA, 25 bp, Saccharomyces pastorianus
ttcgatgcaaggtcgctcggtagat

SEQ ID NO: 120406 - DNA, 25 bp, Saccharomyces pastorianus
ggagctagcaggagttcccaatgtt

SEQ ID NO: 120407 - DNA, 25 bp, Saccharomyces pastorianus
attcgctgaggatagcttagctgca

SEQ ID NO: 120408 - DNA, 25 bp, Saccharomyces pastorianus
aatcgaatttttgggcgtgttgcct

SEQ ID NO: 120409 - DNA, 25 bp, Saccharomyces pastorianus
tagctcatggcttcgaacaagtggg

SEQ ID NO: 120410 - DNA, 25 bp, Saccharomyces pastorianus
taggcacaaatcaatcggttcaaaa

SEQ ID NO: 120411 - DNA, 25 bp, Saccharomyces pastorianus
aacgtgtttgtctatttaccagcag

SEQ ID NO: 120412 - DNA, 25 bp, Saccharomyces pastorianus
aaacgaactatctctcaagggcatt

SEQ ID NO: 120413 - DNA, 25 bp, Saccharomyces pastorianus
gtttacgctaacaatttgggcatgc

SEQ ID NO: 120414 - DNA, 25 bp, Saccharomyces pastorianus
gatgtacatttcacacagatggctt

SEQ ID NO: 120415 - DNA, 25 bp, Saccharomyces pastorianus
gccttcttcagtgcattattcgctg

SEQ ID NO: 120416 - DNA, 25 bp, Saccharomyces pastorianus
gggcatgctaaccaaactagctcat

SEQ ID NO: 120417 - DNA, 25 bp, Saccharomyces pastorianus
aactagctcatgtgacagtaccaaa

SEQ ID NO: 120418 - DNA, 25 bp, Saccharomyces pastorianus
gatgagtaaacagccactcgtccca

SEQ ID NO: 120419 - DNA, 25 bp, Saccharomyces pastorianus
gattcgcctgcagtggaacaagtag

SEQ ID NO: 120420 - DNA, 25 bp, Saccharomyces pastorianus
aatccacagattatttcactacaga

SEQ ID NO: 120421 - DNA, 25 bp, Saccharomyces pastorianus
gttcgttctgctaaacagccattga

SEQ ID NO: 120422 - DNA, 25 bp, Saccharomyces pastorianus
ttgcaccatttttccctacaaagag

SEQ ID NO: 120423 - DNA, 25 bp, Saccharomyces pastorianus
tgaaagttcgtgattcgcctgcagt

SEQ ID NO: 120424 - DNA, 25 bp, Saccharomyces pastorianus
gataccaactagcttaattcctgaa

SEQ ID NO: 120425 - DNA, 25 bp, Saccharomyces pastorianus
taaaaattccattaggtcagcctgc

SEQ ID NO: 120426 - DNA, 25 bp, Saccharomyces pastorianus
gtcccatattcctttgcaccatttt

SEQ ID NO: 120427 - DNA, 25 bp, Saccharomyces pastorianus
gaatactctactgatgacgacgaaa

SEQ ID NO: 120428 - DNA, 25 bp, Saccharomyces pastorianus
tcagcctgcacctgaaactgttggt

SEQ ID NO: 120429 - DNA, 25 bp, Saccharomyces pastorianus
gacgaccattccctgagagttaaag

SEQ ID NO: 120430 - DNA, 25 bp, Saccharomyces pastorianus
ggaaacatcgcgtcaaaacaaaggt

SEQ ID NO: 120431 - DNA, 25 bp, Saccharomyces pastorianus
gattatcactctttgcacaggcatt

SEQ ID NO: 120432 - DNA, 25 bp, Saccharomyces pastorianus
tatgccctaaggttctatcacaatg

SEQ ID NO: 120433 - DNA, 25 bp, Saccharomyces pastorianus
gactaggcctagtgttcttgaagag

SEQ ID NO: 120434 - DNA, 25 bp, Saccharomyces pastorianus
actactgattgcaaggtttcccaag

SEQ ID NO: 120435 - DNA, 25 bp, Saccharomyces pastorianus
aggaagtctcttcggtatatatcag

SEQ ID NO: 120436 - DNA, 25 bp, Saccharomyces pastorianus
acggaagcatccacaaagttgaaca

SEQ ID NO: 120437 - DNA, 25 bp, Saccharomyces pastorianus
agattttgtgacgaccattccctga

SEQ ID NO: 120438 - DNA, 25 bp, Saccharomyces pastorianus
atcaccaagggtatatgtactgcaa

SEQ ID NO: 120439 - DNA, 25 bp, Saccharomyces pastorianus
gtttcccaagggttgccaagaatca

SEQ ID NO: 120440 - DNA, 25 bp, Saccharomyces pastorianus
tgacccgctacttcattttgacata

SEQ ID NO: 120441 - DNA, 25 bp, Saccharomyces pastorianus
aaagtactccatcagtctgctgcat

SEQ ID NO: 120442 - DNA, 25 bp, Saccharomyces pastorianus
gatgcgatttacgatgatgactgga

SEQ ID NO: 120443 - DNA, 25 bp, Saccharomyces pastorianus
ggaattgattgatgacccgctactt

SEQ ID NO: 120444 - DNA, 25 bp, Saccharomyces pastorianus
gttagagcaagcataccctgaaaaa

SEQ ID NO: 120445 - DNA, 25 bp, Saccharomyces pastorianus
tagaagaacatgctctccggcgggt

SEQ ID NO: 120446 - DNA, 25 bp, Saccharomyces pastorianus
gggatggtatagagccctccttact

SEQ ID NO: 120447 - DNA, 25 bp, Saccharomyces pastorianus
tccggcgggtctacctaatagatca

SEQ ID NO: 120448 - DNA, 25 bp, Saccharomyces pastorianus
gaacgttttgttcggaccaacattg

SEQ ID NO: 120449 - DNA, 25 bp, Saccharomyces pastorianus
gagccctccttactttcaattaata

SEQ ID NO: 120450 - DNA, 25 bp, Saccharomyces pastorianus
tagcgaatgggcgtcatggactcaa

SEQ ID NO: 120451 - DNA, 25 bp, Saccharomyces pastorianus
gaattaggagaaactttgacggatg

SEQ ID NO: 120452 - DNA, 25 bp, Saccharomyces pastorianus
atcgctacagtctggtccacttaat

SEQ ID NO: 120453 - DNA, 25 bp, Saccharomyces pastorianus
ttaaaaacttgaggcgtgtagctaa

SEQ ID NO: 120454 - DNA, 25 bp, Saccharomyces pastorianus
aatgatgggttcctcgattaccacg

SEQ ID NO: 120455 - DNA, 25 bp, Saccharomyces pastorianus
gaaggccctgggatttgagctaccc

SEQ ID NO: 120456 - DNA, 25 bp, Saccharomyces pastorianus
gggatttgagctacccaagagagaa

SEQ ID NO: 120457 - DNA, 25 bp, Saccharomyces pastorianus
gtctggtccacttaatagcgagtta

SEQ ID NO: 120458 - DNA, 25 bp, Saccharomyces pastorianus
agctgagagcgatgattgaagagtt

SEQ ID NO: 120459 - DNA, 25 bp, Saccharomyces pastorianus
gtaagaacaggtcatcgctacagtc

SEQ ID NO: 120460 - DNA, 25 bp, Saccharomyces pastorianus
aaaaagggcattccaattatttgat

SEQ ID NO: 120461 - DNA, 25 bp, Saccharomyces pastorianus
gggttcctcgattaccacgagttga

SEQ ID NO: 120462 - DNA, 25 bp, Saccharomyces pastorianus
tttactttgctgctattgtcagcga

SEQ ID NO: 120463 - DNA, 25 bp, Saccharomyces pastorianus
tatgcagctgagtagaagtcatcct

SEQ ID NO: 120464 - DNA, 25 bp, Saccharomyces pastorianus
gatgatgacaaagacccctgctggg

SEQ ID NO: 120465 - DNA, 25 bp, Saccharomyces pastorianus
acccctgctgggatgacatattaaa

SEQ ID NO: 120466 - DNA, 25 bp, Saccharomyces pastorianus
gcgattgaccacatctttaggcatt

SEQ ID NO: 120467 - DNA, 25 bp, Saccharomyces pastorianus
ttgggatacacagcgtgccttcgat

SEQ ID NO: 120468 - DNA, 25 bp, Saccharomyces pastorianus
gccttcgatggccaacttacatata

SEQ ID NO: 120469 - DNA, 25 bp, Saccharomyces pastorianus
gagtgccatttattgattctaccac

SEQ ID NO: 120470 - DNA, 25 bp, Saccharomyces pastorianus
gattctaccacgaactatgcagctg

SEQ ID NO: 120471 - DNA, 25 bp, Saccharomyces pastorianus
tcgtttcctaaatcagagtgccatt

SEQ ID NO: 120472 - DNA, 25 bp, Saccharomyces pastorianus
atacgttaattctgcgattgaccac

SEQ ID NO: 120473 - DNA, 25 bp, Saccharomyces pastorianus
gaaggtacttcagcagaccgtgaaa

SEQ ID NO: 120474 - DNA, 25 bp, Saccharomyces pastorianus
attggagccaacttcattttctctc

SEQ ID NO: 120475 - DNA, 25 bp, Saccharomyces pastorianus
gcagttgctgctacgattggagcca

SEQ ID NO: 120476 - DNA, 25 bp, Saccharomyces pastorianus
agaccagatactttagatcctgctt

SEQ ID NO: 120477 - DNA, 25 bp, Saccharomyces pastorianus
gaggccggcagattagaaattttca

SEQ ID NO: 120478 - DNA, 25 bp, Saccharomyces pastorianus
acgaaccttgcatcatttttatgga

SEQ ID NO: 120479 - DNA, 25 bp, Saccharomyces pastorianus
gaatttgacttcgaggctgctgtaa

SEQ ID NO: 120480 - DNA, 25 bp, Saccharomyces pastorianus
tctctccagcgtctggtattgtgga

SEQ ID NO: 120481 - DNA, 25 bp, Saccharomyces pastorianus
gatcctgctttgttgaggcccggta

SEQ ID NO: 120482 - DNA, 25 bp, Saccharomyces pastorianus
aactgaagcaggttttttcgccata

SEQ ID NO: 120483 - DNA, 25 bp, Saccharomyces pastorianus
aattccattgccaaatgaggccggc

SEQ ID NO: 120484 - DNA, 25 bp, Saccharomyces pastorianus
gatgccatagtagatcccaaatgcc

SEQ ID NO: 120485 - DNA, 25 bp, Saccharomyces pastorianus
aacgaaaccttgttcatcagagcca

SEQ ID NO: 120486 - DNA, 25 bp, Saccharomyces pastorianus
ccaaatgccaaatctctgctcatag

SEQ ID NO: 120487 - DNA, 25 bp, Saccharomyces pastorianus
tcaagatgtctgttctcggtactca

SEQ ID NO: 120488 - DNA, 25 bp, Saccharomyces pastorianus
tcctggagtccatcttggtgacgaa

SEQ ID NO: 120489 - DNA, 25 bp, Saccharomyces pastorianus
aacttgaatgcttacatggacgcta

SEQ ID NO: 120490 - DNA, 25 bp, Saccharomyces pastorianus
atctgccgctattggtgctgatgcc

SEQ ID NO: 120491 - DNA, 25 bp, Saccharomyces pastorianus
agggtctctcttatttcctggagtc

SEQ ID NO: 120492 - DNA, 25 bp, Saccharomyces pastorianus
ggccattatgttgtggagcctaaaa

SEQ ID NO: 120493 - DNA, 25 bp, Saccharomyces pastorianus
aggtgaaacactggccaacgtttat

SEQ ID NO: 120494 - DNA, 25 bp, Saccharomyces pastorianus
attggttccagatgtcgtgttgcag

SEQ ID NO: 120495 - DNA, 25 bp, Saccharomyces pastorianus
aaaggaaggctctagtgtactggga

SEQ ID NO: 120496 - DNA, 25 bp, Saccharomyces pastorianus
gattttgttacttgcattgaggtct

SEQ ID NO: 120497 - DNA, 25 bp, Saccharomyces pastorianus
catccgaagttggtggtgataccgt

SEQ ID NO: 120498 - DNA, 25 bp, Saccharomyces pastorianus
ctgaggcttcgcgagaaggtgcatt

SEQ ID NO: 120499 - DNA, 25 bp, Saccharomyces pastorianus
gacatccccttcacaatatatttcg

SEQ ID NO: 120500 - DNA, 25 bp, Saccharomyces pastorianus
gagctagtctcagatttcaacttag

SEQ ID NO: 120501 - DNA, 25 bp, Saccharomyces pastorianus
gatctccctcacataaacgtttttt

SEQ ID NO: 120502 - DNA, 25 bp, Saccharomyces pastorianus
ctatgttaatgatggatctccctca

SEQ ID NO: 120503 - DNA, 25 bp, Saccharomyces pastorianus
aatggctacatattcggcgcatccg

SEQ ID NO: 120504 - DNA, 25 bp, Saccharomyces pastorianus
aatcatacggagaattaccctttag

SEQ ID NO: 120505 - DNA, 25 bp, Saccharomyces pastorianus
atcatttgaggttttgtccgtggat

SEQ ID NO: 120506 - DNA, 25 bp, Saccharomyces pastorianus
ctaaccgtttcttcagtttcagtgt

SEQ ID NO: 120507 - DNA, 25 bp, Saccharomyces pastorianus
ctatcctgccctcacaattataaat

SEQ ID NO: 120508 - DNA, 25 bp, Saccharomyces pastorianus
attctggaacagactctaaccgttt

SEQ ID NO: 120509 - DNA, 25 bp, Saccharomyces pastorianus
tcacctcaagttgggagcgtggcct

SEQ ID NO: 120510 - DNA, 25 bp, Saccharomyces pastorianus
tatacttcaagtcatcagctgttaa

SEQ ID NO: 120511 - DNA, 25 bp, Saccharomyces pastorianus
gttagcgaagatggtctgactgcat

SEQ ID NO: 120512 - DNA, 25 bp, Saccharomyces pastorianus
gacaacctgttaccaacgttgctgg

SEQ ID NO: 120513 - DNA, 25 bp, Saccharomyces pastorianus
agcgtggcctcttcttgaaatcatg

SEQ ID NO: 120514 - DNA, 25 bp, Saccharomyces pastorianus
gactgcatcaacattcttttcaatt

SEQ ID NO: 120515 - DNA, 25 bp, Saccharomyces pastorianus
attttttctctctaatcacctcaag

SEQ ID NO: 120516 - DNA, 25 bp, Saccharomyces pastorianus
aaaaccttatcatcttcatcttcaa

SEQ ID NO: 120517 - DNA, 25 bp, Saccharomyces pastorianus
aaacgatgtcatttctagcccagaa

SEQ ID NO: 120518 - DNA, 25 bp, Saccharomyces pastorianus
acatcatcgtgcaatacgcttttga

SEQ ID NO: 120519 - DNA, 25 bp, Saccharomyces pastorianus
aagtaattctcgatccgcctaaaat

SEQ ID NO: 120520 - DNA, 25 bp, Saccharomyces pastorianus
gagactttgccctcaacagtatcag

SEQ ID NO: 120521 - DNA, 25 bp, Saccharomyces pastorianus
aggtaccatatgtcgtctgccctga

SEQ ID NO: 120522 - DNA, 25 bp, Saccharomyces pastorianus
gaatacaccacgtctggatgcagta

SEQ ID NO: 120523 - DNA, 25 bp, Saccharomyces pastorianus
gactttgttttcgtcaacaacacca

SEQ ID NO: 120524 - DNA, 25 bp, Saccharomyces pastorianus
gagatcatccattgtgtctgaaagc

SEQ ID NO: 120525 - DNA, 25 bp, Saccharomyces pastorianus
ggatgcagtacatactctgaccaat

SEQ ID NO: 120526 - DNA, 25 bp, Saccharomyces pastorianus
aaggctattgcactgctgcggagac

SEQ ID NO: 120527 - DNA, 25 bp, Saccharomyces pastorianus
tgccctgacgacacagagactttgt

SEQ ID NO: 120528 - DNA, 25 bp, Saccharomyces pastorianus
gtcaaggccttgaagaggctgacta

SEQ ID NO: 120529 - DNA, 25 bp, Saccharomyces pastorianus
gctgactaaggaggaagggtactac

SEQ ID NO: 120530 - DNA, 25 bp, Saccharomyces pastorianus
ggaggaggtccttgatgacacaaaa

SEQ ID NO: 120531 - DNA, 25 bp, Saccharomyces pastorianus
gaagacaagtcagttgacccatatg

SEQ ID NO: 120532 - DNA, 25 bp, Saccharomyces pastorianus
aagattattacctactttatatgag

SEQ ID NO: 120533 - DNA, 25 bp, Saccharomyces pastorianus
aaagatcaggaagcacatgtggcaa

SEQ ID NO: 120534 - DNA, 25 bp, Saccharomyces pastorianus
cagttgacccatatgacttgaagaa

SEQ ID NO: 120535 - DNA, 25 bp, Saccharomyces pastorianus
tgtcagtgatgcaagatccgctatt

SEQ ID NO: 120536 - DNA, 25 bp, Saccharomyces pastorianus
ttggatataaaagtcaaggccttga

SEQ ID NO: 120537 - DNA, 25 bp, Saccharomyces pastorianus
gcacatgtggcaaaacttaaagaag

SEQ ID NO: 120538 - DNA, 25 bp, Saccharomyces pastorianus
ggtaccgaagatgtcagtgatgcaa

SEQ ID NO: 120539 - DNA, 25 bp, Saccharomyces pastorianus
aaactttatcacatgggcgatgact

SEQ ID NO: 120540 - DNA, 25 bp, Saccharomyces pastorianus
acgtgtctgtccgtacaattgttta

SEQ ID NO: 120541 - DNA, 25 bp, Saccharomyces pastorianus
aacaggcacacaaggtaactacggt

SEQ ID NO: 120542 - DNA, 25 bp, Saccharomyces pastorianus
agaagctttccaactcatatatcaa

SEQ ID NO: 120543 - DNA, 25 bp, Saccharomyces pastorianus
gcagagtatactcaacactgatgtt

SEQ ID NO: 120544 - DNA, 25 bp, Saccharomyces pastorianus
tgatctttaccttttttccacgtgt

SEQ ID NO: 120545 - DNA, 25 bp, Saccharomyces pastorianus
acaattgtttaactcctggtggata

SEQ ID NO: 120546 - DNA, 25 bp, Saccharomyces pastorianus
agccaccatatgcagttcctattga

SEQ ID NO: 120547 - DNA, 25 bp, Saccharomyces pastorianus
taactacggtctgggtcccttagag

SEQ ID NO: 120548 - DNA, 25 bp, Saccharomyces pastorianus
tctgacaagctttcctcaaagtatg

SEQ ID NO: 120549 - DNA, 25 bp, Saccharomyces pastorianus
ttatcgatgactggttgctgttgca

SEQ ID NO: 120550 - DNA, 25 bp, Saccharomyces pastorianus
aaagcccatagtatcgcttccgata

SEQ ID NO: 120551 - DNA, 25 bp, Saccharomyces pastorianus
ttgataccaacgtcaacactgctgc

SEQ ID NO: 120552 - DNA, 25 bp, Saccharomyces pastorianus
atcatgtcccgtatactgcaagtag

SEQ ID NO: 120553 - DNA, 25 bp, Saccharomyces pastorianus
cctggccatcaccatacattggtta

SEQ ID NO: 120554 - DNA, 25 bp, Saccharomyces pastorianus
aaagttattagagcgcctggccatc

SEQ ID NO: 120555 - DNA, 25 bp, Saccharomyces pastorianus
ttgcgatgctaatggtgactctaac

SEQ ID NO: 120556 - DNA, 25 bp, Saccharomyces pastorianus
gctaaccctgatatggttccccaaa

SEQ ID NO: 120557 - DNA, 25 bp, Saccharomyces pastorianus
gtctattacgtctactaccacatgc

SEQ ID NO: 120558 - DNA, 25 bp, Saccharomyces pastorianus
attgctgcctgtaccatggattcaa

SEQ ID NO: 120559 - DNA, 25 bp, Saccharomyces pastorianus
gatgccgacgctgattgcgatgcta

SEQ ID NO: 120560 - DNA, 25 bp, Saccharomyces pastorianus
aaagtagatgccgatgccgacgctg

SEQ ID NO: 120561 - DNA, 25 bp, Saccharomyces pastorianus
gctaccgtctcgttgatccatgaat

SEQ ID NO: 120562 - DNA, 25 bp, Saccharomyces pastorianus
atgtactacgcggagccagaattaa

SEQ ID NO: 120563 - DNA, 25 bp, Saccharomyces pastorianus
agggtcttttgctatctcgcagtag

SEQ ID NO: 120564 - DNA, 25 bp, Saccharomyces pastorianus
gcatgtatgcgtatgttttcttttt

SEQ ID NO: 120565 - DNA, 25 bp, Saccharomyces pastorianus
cgttggtgcttattcgctaccgtct

SEQ ID NO: 120566 - DNA, 25 bp, Saccharomyces pastorianus
tatggtttttccagttttctagaag

SEQ ID NO: 120567 - DNA, 25 bp, Saccharomyces pastorianus
tgtgacgccggatccccgcgtataa

SEQ ID NO: 120568 - DNA, 25 bp, Saccharomyces pastorianus
tttatcttgtacgtgcatgtatgcg

SEQ ID NO: 120569 - DNA, 25 bp, Saccharomyces pastorianus
gtgtgcctggttatcccaatactac

SEQ ID NO: 120570 - DNA, 25 bp, Saccharomyces pastorianus
tatctcgcagtagcgtgtgcctggt

SEQ ID NO: 120571 - DNA, 25 bp, Saccharomyces pastorianus
gtataatccgtgtcacgctaaagga

SEQ ID NO: 120572 - DNA, 25 bp, Saccharomyces pastorianus
gaggccaatacttgttttcttgtgc

SEQ ID NO: 120573 - DNA, 25 bp, Saccharomyces pastorianus
tcgattctaacgttaccccaaggca

SEQ ID NO: 120574 - DNA, 25 bp, Saccharomyces pastorianus
ttggcacgggtcatgaatttcccat

SEQ ID NO: 120575 - DNA, 25 bp, Saccharomyces pastorianus
gttaatggcccatagagcacccata

SEQ ID NO: 120576 - DNA, 25 bp, Saccharomyces pastorianus
atttcatcgaagactctccggagat

SEQ ID NO: 120577 - DNA, 25 bp, Saccharomyces pastorianus
ggagatacctctacctacgttaatg

SEQ ID NO: 120578 - DNA, 25 bp, Saccharomyces pastorianus
gatgcaatattgtgtctcagcgtca

SEQ ID NO: 120579 - DNA, 25 bp, Saccharomyces pastorianus
aggcgattacatcatctctggttca

SEQ ID NO: 120580 - DNA, 25 bp, Saccharomyces pastorianus
catctctggttcacatgacactaca

SEQ ID NO: 120581 - DNA, 25 bp, Saccharomyces pastorianus
gacctggatgtggatttcgattcta

SEQ ID NO: 120582 - DNA, 25 bp, Saccharomyces pastorianus
aggttaacacattggccatcaggta

SEQ ID NO: 120583 - DNA, 25 bp, Saccharomyces pastorianus
gcaacaattaatttccgcgatggac

SEQ ID NO: 120584 - DNA, 25 bp, Saccharomyces pastorianus
ggttctggatctcatggtgaagact

SEQ ID NO: 120585 - DNA, 25 bp, Saccharomyces pastorianus
ggtttaccatacgaaccattcgcat

SEQ ID NO: 120586 - DNA, 25 bp, Saccharomyces pastorianus
gttgatggccttggtttgtattcct

SEQ ID NO: 120587 - DNA, 25 bp, Saccharomyces pastorianus
tttgccatgtggttcgcactaacat

SEQ ID NO: 120588 - DNA, 25 bp, Saccharomyces pastorianus
tatgacggttgcactttttgccatg

SEQ ID NO: 120589 - DNA, 25 bp, Saccharomyces pastorianus
gcacactgcatcctatttacgttta

SEQ ID NO: 120590 - DNA, 25 bp, Saccharomyces pastorianus
ttgaattgtgtttcgcacactgcat

SEQ ID NO: 120591 - DNA, 25 bp, Saccharomyces pastorianus
gatggacgccgatgacgctgaagaa

SEQ ID NO: 120592 - DNA, 25 bp, Saccharomyces pastorianus
ggcacatgctcaattgtctagtgtt

SEQ ID NO: 120593 - DNA, 25 bp, Saccharomyces pastorianus
gaaccactaccatcgactgaagcag

SEQ ID NO: 120594 - DNA, 25 bp, Saccharomyces pastorianus
gtcatcccacctttgattttggtta

SEQ ID NO: 120595 - DNA, 25 bp, Saccharomyces pastorianus
agctttgccatttgcactcggtatc

SEQ ID NO: 120596 - DNA, 25 bp, Saccharomyces pastorianus
tgattaacgccactccaactatggt

SEQ ID NO: 120597 - DNA, 25 bp, Saccharomyces pastorianus
agtcacaatgttctcagctttgcca

SEQ ID NO: 120598 - DNA, 25 bp, Saccharomyces pastorianus
tacaacgcggtgtcctcaaaggtaa

SEQ ID NO: 120599 - DNA, 25 bp, Saccharomyces pastorianus
aatcaatcgctaaacgtcgccgtta

SEQ ID NO: 120600 - DNA, 25 bp, Saccharomyces pastorianus
aaacaaatctcatcctatgtccacg

SEQ ID NO: 120601 - DNA, 25 bp, Saccharomyces pastorianus
aaggtaagtctctcggtgtgcaaac

SEQ ID NO: 120602 - DNA, 25 bp, Saccharomyces pastorianus
aactgcgtcgtgtggtgttgcgtta

SEQ ID NO: 120603 - DNA, 25 bp, Saccharomyces pastorianus
aaagttgatcttgggccgtttggtg

SEQ ID NO: 120604 - DNA, 25 bp, Saccharomyces pastorianus
agggtatttctgtgtttgactctaa

SEQ ID NO: 120605 - DNA, 25 bp, Saccharomyces pastorianus
atcacattgcatgacccacgtgtgg

SEQ ID NO: 120606 - DNA, 25 bp, Saccharomyces pastorianus
aagtgggtattatcagcgctggtca

SEQ ID NO: 120607 - DNA, 25 bp, Saccharomyces pastorianus
tacttctccgatgtacaccataaca

SEQ ID NO: 120608 - DNA, 25 bp, Saccharomyces pastorianus
cgtgtgggagcgtcttctaaagtta

SEQ ID NO: 120609 - DNA, 25 bp, Saccharomyces pastorianus
ttatgctcgggttctcacgatggta

SEQ ID NO: 120610 - DNA, 25 bp, Saccharomyces pastorianus
ataagaacttcgtttcctctctgga

SEQ ID NO: 120611 - DNA, 25 bp, Saccharomyces pastorianus
gagcaagtgatcttcgattctacag

SEQ ID NO: 120612 - DNA, 25 bp, Saccharomyces pastorianus
acaacatcgtactcgttgctttcca

SEQ ID NO: 120613 - DNA, 25 bp, Saccharomyces pastorianus
gtatgggacgtcaggtctacttctc

SEQ ID NO: 120614 - DNA, 25 bp, Saccharomyces pastorianus
ttagaatcccatacagctcctgttg

SEQ ID NO: 120615 - DNA, 25 bp, Saccharomyces pastorianus
acttgttagcatgtgggtccagcgc

SEQ ID NO: 120616 - DNA, 25 bp, Saccharomyces pastorianus
aaggatgaccacgttaaggaccatg

SEQ ID NO: 120617 - DNA, 25 bp, Saccharomyces pastorianus
gtttggctgccaataatctattaag

SEQ ID NO: 120618 - DNA, 25 bp, Saccharomyces pastorianus
attagtttgcgttgtgatgattcca

SEQ ID NO: 120619 - DNA, 25 bp, Saccharomyces pastorianus
gatgattccaattccatgggttttt

SEQ ID NO: 120620 - DNA, 25 bp, Saccharomyces pastorianus
tcagcgttttaatgtacttctctac

SEQ ID NO: 120621 - DNA, 25 bp, Saccharomyces pastorianus
gtttgatcgcgaggacgggcaacat

SEQ ID NO: 120622 - DNA, 25 bp, Saccharomyces pastorianus
gagtagtgtattcccattgtttacc

SEQ ID NO: 120623 - DNA, 25 bp, Saccharomyces pastorianus
gtcacaattcggttatgccgccatg

SEQ ID NO: 120624 - DNA, 25 bp, Saccharomyces pastorianus
ttaactatggcatcctgtttggctg

SEQ ID NO: 120625 - DNA, 25 bp, Saccharomyces pastorianus
gtgaaaggctatctctgcgcaggac

SEQ ID NO: 120626 - DNA, 25 bp, Saccharomyces pastorianus
tctacatgctatccgccattaacta

SEQ ID NO: 120627 - DNA, 25 bp, Saccharomyces pastorianus
tcatttcggtcgtagaagatcttcc

SEQ ID NO: 120628 - DNA, 25 bp, Saccharomyces pastorianus
aagcctaaggttacaaccgattcag

SEQ ID NO: 120629 - DNA, 25 bp, Saccharomyces pastorianus
actatcgatgagctttttcaactga

SEQ ID NO: 120630 - DNA, 25 bp, Saccharomyces pastorianus
catcatgttggtcatttcggtcgta

SEQ ID NO: 120631 - DNA, 25 bp, Saccharomyces pastorianus
ggaagagtttaacagtcatcatgtt

SEQ ID NO: 120632 - DNA, 25 bp, Saccharomyces pastorianus
aacagaaaccacaccaacttctact

SEQ ID NO: 120633 - DNA, 25 bp, Saccharomyces pastorianus
tcaactgaagccaagtgtaactttg

SEQ ID NO: 120634 - DNA, 25 bp, Saccharomyces pastorianus
gttgctaccattgcccaagaaactt

SEQ ID NO: 120635 - DNA, 25 bp, Saccharomyces pastorianus
aaccgattcagatggttggtgcaca

SEQ ID NO: 120636 - DNA, 25 bp, Saccharomyces pastorianus
aacttctactgtgccagttgctacc

SEQ ID NO: 120637 - DNA, 25 bp, Saccharomyces pastorianus
aatatttcttccaacagacctgctg

SEQ ID NO: 120638 - DNA, 25 bp, Saccharomyces pastorianus
tggtttctgtttcttcttcatcatc

SEQ ID NO: 120639 - DNA, 25 bp, Saccharomyces pastorianus
atgacttatgcttcgtcgtcttcgt

SEQ ID NO: 120640 - DNA, 25 bp, Saccharomyces pastorianus
tatctctggtatcagcaggtctgtt

SEQ ID NO: 120641 - DNA, 25 bp, Saccharomyces pastorianus
tcgtcttcactttccaaagcagcaa

SEQ ID NO: 120642 - DNA, 25 bp, Saccharomyces pastorianus
gacttttaaagtttcttgggcaatg

SEQ ID NO: 120643 - DNA, 25 bp, Saccharomyces pastorianus
gcaatggtagcaactggcacagtag

SEQ ID NO: 120644 - DNA, 25 bp, Saccharomyces pastorianus
aatgtgcaccaaccatctgaatcgg

SEQ ID NO: 120645 - DNA, 25 bp, Saccharomyces pastorianus
gcttgtccgcaacaatatctctggt

SEQ ID NO: 120646 - DNA, 25 bp, Saccharomyces pastorianus
agcagcaaatgcgttgaaaccaaga

SEQ ID NO: 120647 - DNA, 25 bp, Saccharomyces pastorianus
gaagttggtgtggtttctgtttctt

SEQ ID NO: 120648 - DNA, 25 bp, Saccharomyces pastorianus
tacccttcttcttggcttcaaatgt

SEQ ID NO: 120649 - DNA, 25 bp, Saccharomyces pastorianus
ggtaatggttcaatccttgctgata

SEQ ID NO: 120650 - DNA, 25 bp, Saccharomyces pastorianus
gtaacctctgatgtggtcagtccaa

SEQ ID NO: 120651 - DNA, 25 bp, Saccharomyces pastorianus
tttgggtgacagtaaccgcctacca

SEQ ID NO: 120652 - DNA, 25 bp, Saccharomyces pastorianus
ggcatgcccaccaagtgaactatta

SEQ ID NO: 120653 - DNA, 25 bp, Saccharomyces pastorianus
tgggtggtagttttcagtccccagg

SEQ ID NO: 120654 - DNA, 25 bp, Saccharomyces pastorianus
catctacgggttgcgtccatcggac

SEQ ID NO: 120655 - DNA, 25 bp, Saccharomyces pastorianus
agtacggatattaaggcatgcccac

SEQ ID NO: 120656 - DNA, 25 bp, Saccharomyces pastorianus
atactgtaggccctgctactgctaa

SEQ ID NO: 120657 - DNA, 25 bp, Saccharomyces pastorianus
atgaagcgatcattcccacattgac

SEQ ID NO: 120658 - DNA, 25 bp, Saccharomyces pastorianus
aagtattctcggactgggtggtagt

SEQ ID NO: 120659 - DNA, 25 bp, Saccharomyces pastorianus
accggaccccaagtcgctattagat

SEQ ID NO: 120660 - DNA, 25 bp, Saccharomyces pastorianus
tggatttagccaaggtgcaggtctt

SEQ ID NO: 120661 - DNA, 25 bp, Saccharomyces pastorianus
aagagcataatacccaacctgaagt

SEQ ID NO: 120662 - DNA, 25 bp, Saccharomyces pastorianus
tttgtcccaaactcgaaaccattcg

SEQ ID NO: 120663 - DNA, 25 bp, Saccharomyces pastorianus
ccaggtaccctctctacatgtaagg

SEQ ID NO: 120664 - DNA, 25 bp, Saccharomyces pastorianus
actgatgaacaacagcccgctttga

SEQ ID NO: 120665 - DNA, 25 bp, Saccharomyces pastorianus
gacattgttggttcatcctggagcc

SEQ ID NO: 120666 - DNA, 25 bp, Saccharomyces pastorianus
gcattgtacgagtcatggcccgata

SEQ ID NO: 120667 - DNA, 25 bp, Saccharomyces pastorianus
atcctggagcccattttgtcccaaa

SEQ ID NO: 120668 - DNA, 25 bp, Saccharomyces pastorianus
atcccgaatctttcaattcctttca

SEQ ID NO: 120669 - DNA, 25 bp, Saccharomyces pastorianus
ggaattcaacacttcagcgactagt

SEQ ID NO: 120670 - DNA, 25 bp, Saccharomyces pastorianus
aaccattcgtatcccaagtttgcaa

SEQ ID NO: 120671 - DNA, 25 bp, Saccharomyces pastorianus
gttactttggccagtcagggaaaga

SEQ ID NO: 120672 - DNA, 25 bp, Saccharomyces pastorianus
ggtggtgtctacgtattcgttcatc

SEQ ID NO: 120673 - DNA, 25 bp, Saccharomyces pastorianus
ccgaatccaattgcccgacattaat

SEQ ID NO: 120674 - DNA, 25 bp, Saccharomyces pastorianus
tcgttcatctctcgcttcaaagtaa

SEQ ID NO: 120675 - DNA, 25 bp, Saccharomyces pastorianus
tatggtaaaagttggcgctgttgcg

SEQ ID NO: 120676 - DNA, 25 bp, Saccharomyces pastorianus
cagactgataatgaaccgagacgat

SEQ ID NO: 120677 - DNA, 25 bp, Saccharomyces pastorianus
atcttttccaatctgctgcatgcaa

SEQ ID NO: 120678 - DNA, 25 bp, Saccharomyces pastorianus
ataacactactagaactgggtggta

SEQ ID NO: 120679 - DNA, 25 bp, Saccharomyces pastorianus
agagccattgaaaactatcccgaat

SEQ ID NO: 120680 - DNA, 25 bp, Saccharomyces pastorianus
agaaatacctgccaatagagccatt

SEQ ID NO: 120681 - DNA, 25 bp, Saccharomyces pastorianus
agagttctgtctcatcttttccaat

SEQ ID NO: 120682 - DNA, 25 bp, Saccharomyces pastorianus
ttcctctagcgggatttcctctttt

SEQ ID NO: 120683 - DNA, 25 bp, Saccharomyces pastorianus
actgcagatttcttcaggtcgatca

SEQ ID NO: 120684 - DNA, 25 bp, Saccharomyces pastorianus
gcgaaggtgcacgttctggtattac

SEQ ID NO: 120685 - DNA, 25 bp, Saccharomyces pastorianus
cttcttctaactttgcagtgggcga

SEQ ID NO: 120686 - DNA, 25 bp, Saccharomyces pastorianus
gtcgatcatataaccttttcttttt

SEQ ID NO: 120687 - DNA, 25 bp, Saccharomyces pastorianus
atgtctgctgaatatgcctttcttc

SEQ ID NO: 120688 - DNA, 25 bp, Saccharomyces pastorianus
gtattacacccttcgctcttaaaat

SEQ ID NO: 120689 - DNA, 25 bp, Saccharomyces pastorianus
ggttcattctgcattatgtctgctg

SEQ ID NO: 120690 - DNA, 25 bp, Saccharomyces pastorianus
cgaaggcgttatcttgtactgcaga

SEQ ID NO: 120691 - DNA, 25 bp, Saccharomyces pastorianus
tatgcctttcttctcagtgatgttt

SEQ ID NO: 120692 - DNA, 25 bp, Saccharomyces pastorianus
aaatatcgttccattcactgtcttc

SEQ ID NO: 120693 - DNA, 25 bp, Saccharomyces pastorianus
ggacgttcagcagattgaatccatt

SEQ ID NO: 120694 - DNA, 25 bp, Saccharomyces pastorianus
ttgaatccattcttgccgacttgca

SEQ ID NO: 120695 - DNA, 25 bp, Saccharomyces pastorianus
ttgcagaagtactacgacgcgtttc

SEQ ID NO: 120696 - DNA, 25 bp, Saccharomyces pastorianus
aatgtaagaggtccactcaccagcc

SEQ ID NO: 120697 - DNA, 25 bp, Saccharomyces pastorianus
caatgggccaacacgtttgcataaa

SEQ ID NO: 120698 - DNA, 25 bp, Saccharomyces pastorianus
atccccaatgaatagccacacatca

SEQ ID NO: 120699 - DNA, 25 bp, Saccharomyces pastorianus
gaggattttactttggacgttcagc

SEQ ID NO: 120700 - DNA, 25 bp, Saccharomyces pastorianus
tgggcaaacaagtgtccagttctaa

SEQ ID NO: 120701 - DNA, 25 bp, Saccharomyces pastorianus
gacgcgtttctacaacttttacaga

SEQ ID NO: 120702 - DNA, 25 bp, Saccharomyces pastorianus
gtatatcaatgtctcaatgggccaa

SEQ ID NO: 120703 - DNA, 25 bp, Saccharomyces pastorianus
tggcgcatagacaagatgttccgaa

SEQ ID NO: 120704 - DNA, 25 bp, Saccharomyces pastorianus
gaaggccgtgatgaatgcttggaat

SEQ ID NO: 120705 - DNA, 25 bp, Saccharomyces pastorianus
aaacctgacagtgccaaggagctaa

SEQ ID NO: 120706 - DNA, 25 bp, Saccharomyces pastorianus
attggcatcccaaaacctgacagtg

SEQ ID NO: 120707 - DNA, 25 bp, Saccharomyces pastorianus
actcgattgttcatattcctgcttc

SEQ ID NO: 120708 - DNA, 25 bp, Saccharomyces pastorianus
agaagctcaaaaagtcgcctcctca

SEQ ID NO: 120709 - DNA, 25 bp, Saccharomyces pastorianus
tcactatatcctggctctatgaatg

SEQ ID NO: 120710 - DNA, 25 bp, Saccharomyces pastorianus
ttattgtgcttctggcaaacgcggg

SEQ ID NO: 120711 - DNA, 25 bp, Saccharomyces pastorianus
tcgcctcctcacatggatattcaaa

SEQ ID NO: 120712 - DNA, 25 bp, Saccharomyces pastorianus
cctgcttccatcaatgtgccatata

SEQ ID NO: 120713 - DNA, 25 bp, Saccharomyces pastorianus
acgcgtttgccttagatcctttaga

SEQ ID NO: 120714 - DNA, 25 bp, Saccharomyces pastorianus
tattcaaacacctcactatatcctg

SEQ ID NO: 120715 - DNA, 25 bp, Saccharomyces pastorianus
ggacagtttctgcaagatcgcctac

SEQ ID NO: 120716 - DNA, 25 bp, Saccharomyces pastorianus
aggattaccagatgccaactacaat

SEQ ID NO: 120717 - DNA, 25 bp, Saccharomyces pastorianus
acactggtatctatcctggttctat

SEQ ID NO: 120718 - DNA, 25 bp, Saccharomyces pastorianus
gaacctagtcgaacaccccaatgat

SEQ ID NO: 120719 - DNA, 25 bp, Saccharomyces pastorianus
agatcgcctacattggtcctgagaa

SEQ ID NO: 120720 - DNA, 25 bp, Saccharomyces pastorianus
agaacatttacaacgaaggctccaa

SEQ ID NO: 120721 - DNA, 25 bp, Saccharomyces pastorianus
aatttgctaaaccacctcacgataa

SEQ ID NO: 120722 - DNA, 25 bp, Saccharomyces pastorianus
agatctatacttttgaccaggtcag

SEQ ID NO: 120723 - DNA, 25 bp, Saccharomyces pastorianus
agagttggctcgatcttatgggtac

SEQ ID NO: 120724 - DNA, 25 bp, Saccharomyces pastorianus
tattccggtgaatagtgcccctggc

SEQ ID NO: 120725 - DNA, 25 bp, Saccharomyces pastorianus
tagtacaggtattctctcgaggaca

SEQ ID NO: 120726 - DNA, 25 bp, Saccharomyces pastorianus
cagtgaggaccaatcagacgaggat

SEQ ID NO: 120727 - DNA, 25 bp, Saccharomyces pastorianus
tccaccggtaaagcccttgatagtt

SEQ ID NO: 120728 - DNA, 25 bp, Saccharomyces pastorianus
tgatcacatgaaggccaagcaacgt

SEQ ID NO: 120729 - DNA, 25 bp, Saccharomyces pastorianus
ggatgaaactcatcatggtcagaaa

SEQ ID NO: 120730 - DNA, 25 bp, Saccharomyces pastorianus
atcagatttgataagtccaccggta

SEQ ID NO: 120731 - DNA, 25 bp, Saccharomyces pastorianus
agatctcgagcgtgaaattctcaag

SEQ ID NO: 120732 - DNA, 25 bp, Saccharomyces pastorianus
gtctaacctctatcaggacatcaga

SEQ ID NO: 120733 - DNA, 25 bp, Saccharomyces pastorianus
gacgaggatgctggattctttgaag

SEQ ID NO: 120734 - DNA, 25 bp, Saccharomyces pastorianus
atatccctgggctggaaataccgag

SEQ ID NO: 120735 - DNA, 25 bp, Saccharomyces pastorianus
acacgctccagtagaacaatcatcc

SEQ ID NO: 120736 - DNA, 25 bp, Saccharomyces pastorianus
ggtaccacgagtccgaaatatccct

SEQ ID NO: 120737 - DNA, 25 bp, Saccharomyces pastorianus
gacgctctgaatatattgcttactt

SEQ ID NO: 120738 - DNA, 25 bp, Saccharomyces pastorianus
gaaggtcattcctgaacagcgacag

SEQ ID NO: 120739 - DNA, 25 bp, Saccharomyces pastorianus
gtaagcttgtcgtttttgatgcaga

SEQ ID NO: 120740 - DNA, 25 bp, Saccharomyces pastorianus
agggtccttttagtagacgctctga

SEQ ID NO: 120741 - DNA, 25 bp, Saccharomyces pastorianus
aactctcgcgcctattgttgatttt

SEQ ID NO: 120742 - DNA, 25 bp, Saccharomyces pastorianus
aaagtttcagcgctcatgccaatga

SEQ ID NO: 120743 - DNA, 25 bp, Saccharomyces pastorianus
gatacacttggctctttacttagaa

SEQ ID NO: 120744 - DNA, 25 bp, Saccharomyces pastorianus
gtgtactcaggtgcaagaactctcg

SEQ ID NO: 120745 - DNA, 25 bp, Saccharomyces pastorianus
aaaagcattgcccttgattggttag

SEQ ID NO: 120746 - DNA, 25 bp, Saccharomyces pastorianus
tgacatttccaaatttctgcgggac

SEQ ID NO: 120747 - DNA, 25 bp, Saccharomyces pastorianus
tctgcgggacacttttagtattacc

SEQ ID NO: 120748 - DNA, 25 bp, Saccharomyces pastorianus
aggagattttctccgatccagaaaa

SEQ ID NO: 120749 - DNA, 25 bp, Saccharomyces pastorianus
tcgagcagcctttctttagaagata

SEQ ID NO: 120750 - DNA, 25 bp, Saccharomyces pastorianus
tgaactgtattttaagcatcccaaa

SEQ ID NO: 120751 - DNA, 25 bp, Saccharomyces pastorianus
aaatgcagttgcaacatcttaggca

SEQ ID NO: 120752 - DNA, 25 bp, Saccharomyces pastorianus
gatacctttgccaatttaatcgaga

SEQ ID NO: 120753 - DNA, 25 bp, Saccharomyces pastorianus
gaaaacttcgttgttcataacttgg

SEQ ID NO: 120754 - DNA, 25 bp, Saccharomyces pastorianus
gtacatttgctaagatgccgattgc

SEQ ID NO: 120755 - DNA, 25 bp, Saccharomyces pastorianus
tttacctgatgttatgcctgagcaa

SEQ ID NO: 120756 - DNA, 25 bp, Saccharomyces pastorianus
aaaacaggcaccacatgtagcgcaa

SEQ ID NO: 120757 - DNA, 25 bp, Saccharomyces pastorianus
tagaagaaggctataccccgacttt

SEQ ID NO: 120758 - DNA, 25 bp, Saccharomyces pastorianus
atgtagcgcaacctttttacctgat

SEQ ID NO: 120759 - DNA, 25 bp, Saccharomyces pastorianus
agcaccttttagctcttcagttgga

SEQ ID NO: 120760 - DNA, 25 bp, Saccharomyces pastorianus
gcctagagatttccaagcacctttt

SEQ ID NO: 120761 - DNA, 25 bp, Saccharomyces pastorianus
agcctgcttttattcatatcacgtg

SEQ ID NO: 120762 - DNA, 25 bp, Saccharomyces pastorianus
acgcttggctgtaactatctggtgt

SEQ ID NO: 120763 - DNA, 25 bp, Saccharomyces pastorianus
tcggaacatagctcctacacggata

SEQ ID NO: 120764 - DNA, 25 bp, Saccharomyces pastorianus
tattcgccaatctctctctattgtt

SEQ ID NO: 120765 - DNA, 25 bp, Saccharomyces pastorianus
gtggaccctataccgcaaatactta

SEQ ID NO: 120766 - DNA, 25 bp, Saccharomyces pastorianus
ataacgacgactatcctgaacttga

SEQ ID NO: 120767 - DNA, 25 bp, Saccharomyces pastorianus
acggacacatttgacttcttcaggt

SEQ ID NO: 120768 - DNA, 25 bp, Saccharomyces pastorianus
aaagggttctttcggatcagctcct

SEQ ID NO: 120769 - DNA, 25 bp, Saccharomyces pastorianus
aggccattagctactttcaaaacgg

SEQ ID NO: 120770 - DNA, 25 bp, Saccharomyces pastorianus
aaagcctatcccagtggtatacgat

SEQ ID NO: 120771 - DNA, 25 bp, Saccharomyces pastorianus
caagaacttaccagtcaccgttgaa

SEQ ID NO: 120772 - DNA, 25 bp, Saccharomyces pastorianus
accctaccactgacttaccaagaga

SEQ ID NO: 120773 - DNA, 25 bp, Saccharomyces pastorianus
gcaccggcggtcaaagttccgtgat

SEQ ID NO: 120774 - DNA, 25 bp, Saccharomyces pastorianus
agattcttcgaatgctaggcgtgaa

SEQ ID NO: 120775 - DNA, 25 bp, Saccharomyces pastorianus
agagtcttactcgtgataatgttca

SEQ ID NO: 120776 - DNA, 25 bp, Saccharomyces pastorianus
gaggcatccggtgaatgggttccaa

SEQ ID NO: 120777 - DNA, 25 bp, Saccharomyces pastorianus
gatgaccttgttgcagcttcctgac

SEQ ID NO: 120778 - DNA, 25 bp, Saccharomyces pastorianus
taacttggcagcattcgatagtaat

SEQ ID NO: 120779 - DNA, 25 bp, Saccharomyces pastorianus
aacaacggagtctgtaggtggcacc

SEQ ID NO: 120780 - DNA, 25 bp, Saccharomyces pastorianus
agttccgtgatgaccttgttgcagc

SEQ ID NO: 120781 - DNA, 25 bp, Saccharomyces pastorianus
aagcctgttcttaatgcttccactg

SEQ ID NO: 120782 - DNA, 25 bp, Saccharomyces pastorianus
aaatcctgtacgagctgtttttcca

SEQ ID NO: 120783 - DNA, 25 bp, Saccharomyces pastorianus
atgaatcctttactcgatgcgtctt

SEQ ID NO: 120784 - DNA, 25 bp, Saccharomyces pastorianus
tttccaggattagtactttcaacca

SEQ ID NO: 120785 - DNA, 25 bp, Saccharomyces pastorianus
ctattgtttcctggcttgaagcctg

SEQ ID NO: 120786 - DNA, 25 bp, Saccharomyces pastorianus
agaggcatcctcttcagtgcagatg

SEQ ID NO: 120787 - DNA, 25 bp, Saccharomyces pastorianus
gatgcgtctttatcgtccatttttt

SEQ ID NO: 120788 - DNA, 25 bp, Saccharomyces pastorianus
gttgtccctgtacggtatctacgaa

SEQ ID NO: 120789 - DNA, 25 bp, Saccharomyces pastorianus
tcgccctttattgcctctatggagg

SEQ ID NO: 120790 - DNA, 25 bp, Saccharomyces pastorianus
aagatggcataagctcgccctttat

SEQ ID NO: 120791 - DNA, 25 bp, Saccharomyces pastorianus
gcttccactgtcattgtaaatcctg

SEQ ID NO: 120792 - DNA, 25 bp, Saccharomyces pastorianus
aaactttaccactttgatggctgct

SEQ ID NO: 120793 - DNA, 25 bp, Saccharomyces pastorianus
gacgccgcccatgatcgtagataat

SEQ ID NO: 120794 - DNA, 25 bp, Saccharomyces pastorianus
aaagaggcccgatacctgtttcaca

SEQ ID NO: 120795 - DNA, 25 bp, Saccharomyces pastorianus
aaggaccccattgtcgtgatggtaa

SEQ ID NO: 120796 - DNA, 25 bp, Saccharomyces pastorianus
aggtatccgataagacgacgccgcc

SEQ ID NO: 120797 - DNA, 25 bp, Saccharomyces pastorianus
agagcaaatatctccgacaatcttt

SEQ ID NO: 120798 - DNA, 25 bp, Saccharomyces pastorianus
agcccaaggtggtacgaatcaatcc

SEQ ID NO: 120799 - DNA, 25 bp, Saccharomyces pastorianus
aagaaatcagcagcggcaagcccaa

SEQ ID NO: 120800 - DNA, 25 bp, Saccharomyces pastorianus
gatggctgctttttcatcaattaaa

SEQ ID NO: 120801 - DNA, 25 bp, Saccharomyces pastorianus
atggagtcttccaaggtatccgata

SEQ ID NO: 120802 - DNA, 25 bp, Saccharomyces pastorianus
gggcatgatcataccaacggagatt

SEQ ID NO: 120803 - DNA, 25 bp, Saccharomyces pastorianus
gtgtcaaactcttgggtcactttaa

SEQ ID NO: 120804 - DNA, 25 bp, Saccharomyces pastorianus
aacgttgtgtcaaactcttgggtca

SEQ ID NO: 120805 - DNA, 25 bp, Saccharomyces pastorianus
gcccgccgccattcgaggaaaaata

SEQ ID NO: 120806 - DNA, 25 bp, Saccharomyces pastorianus
tggttatgtaacttcgccgcccgcc

SEQ ID NO: 120807 - DNA, 25 bp, Saccharomyces pastorianus
aaaattggcgatacgcttcaacgtt

SEQ ID NO: 120808 - DNA, 25 bp, Saccharomyces pastorianus
gcgatacgcttcaacgttgtgtcaa

SEQ ID NO: 120809 - DNA, 25 bp, Saccharomyces pastorianus
gtcactttaaagaaaacccagcata

SEQ ID NO: 120810 - DNA, 25 bp, Saccharomyces pastorianus
gaaaacccagcatacattaatatag

SEQ ID NO: 120811 - DNA, 25 bp, Saccharomyces pastorianus
tgctacgatgcataaatacgataaa

SEQ ID NO: 120812 - DNA, 25 bp, Saccharomyces pastorianus
atgctggttatgtaacttcgccgcc

SEQ ID NO: 120813 - DNA, 25 bp, Saccharomyces pastorianus
tagagcaatgctggttatgtaactt

SEQ ID NO: 120814 - DNA, 25 bp, Saccharomyces pastorianus
atttactcggcagcttctacgtaag

SEQ ID NO: 120815 - DNA, 25 bp, Saccharomyces pastorianus
ctaggcatcggcttttggatcggat

SEQ ID NO: 120816 - DNA, 25 bp, Saccharomyces pastorianus
atgatacttgcggtgttcggcggca

SEQ ID NO: 120817 - DNA, 25 bp, Saccharomyces pastorianus
tatagtcgcgcaatccgtgtcgtta

SEQ ID NO: 120818 - DNA, 25 bp, Saccharomyces pastorianus
cattgtgtattcctggtttggcgtc

SEQ ID NO: 120819 - DNA, 25 bp, Saccharomyces pastorianus
tcgtgccattcacactgggatgcta

SEQ ID NO: 120820 - DNA, 25 bp, Saccharomyces pastorianus
gagatgcttctagtggtaccgatca

SEQ ID NO: 120821 - DNA, 25 bp, Saccharomyces pastorianus
ttcccaaaatttctaagccgcgtcg

SEQ ID NO: 120822 - DNA, 25 bp, Saccharomyces pastorianus
tatgttctaatcttcctggcgtata

SEQ ID NO: 120823 - DNA, 25 bp, Saccharomyces pastorianus
aaaagcaatcgctctcgaggccaga

SEQ ID NO: 120824 - DNA, 25 bp, Saccharomyces pastorianus
agtcgtattggctttggtttgctct

SEQ ID NO: 120825 - DNA, 25 bp, Saccharomyces pastorianus
tgtttagcttatcgaactctcaata

SEQ ID NO: 120826 - DNA, 25 bp, Saccharomyces pastorianus
gtttagcttatcgaactctcaatac

SEQ ID NO: 120827 - DNA, 25 bp, Saccharomyces pastorianus
tatcgaactctcaatacacctgcca

SEQ ID NO: 120828 - DNA, 25 bp, Saccharomyces pastorianus
cttatcgaactctcaatacacctgc

SEQ ID NO: 120829 - DNA, 25 bp, Saccharomyces pastorianus
tctcaatacacctgccaagactaca

SEQ ID NO: 120830 - DNA, 25 bp, Saccharomyces pastorianus
gaactctcaatacacctgccaagac

SEQ ID NO: 120831 - DNA, 25 bp, Saccharomyces pastorianus
atgtttagcttatcgaactctcaat

SEQ ID NO: 120832 - DNA, 25 bp, Saccharomyces pastorianus
tcgaactctcaatacacctgccaag

SEQ ID NO: 120833 - DNA, 25 bp, Saccharomyces pastorianus
ttagcttatcgaactctcaatacac

SEQ ID NO: 120834 - DNA, 25 bp, Saccharomyces pastorianus
gcttatcgaactctcaatacacctg

SEQ ID NO: 120835 - DNA, 25 bp, Saccharomyces pastorianus
ttatcgaactctcaatacacctgcc

SEQ ID NO: 120836 - DNA, 25 bp, Saccharomyces pastorianus
ggtcctttagacacagctattcttt

SEQ ID NO: 120837 - DNA, 25 bp, Saccharomyces pastorianus
agttgatcctgagaccctaccaaag

SEQ ID NO: 120838 - DNA, 25 bp, Saccharomyces pastorianus
gtaatagggctcacaacatccctgc

SEQ ID NO: 120839 - DNA, 25 bp, Saccharomyces pastorianus
tacccaatttcacccagaggcaaaa

SEQ ID NO: 120840 - DNA, 25 bp, Saccharomyces pastorianus
gccagtgccacattacatctcaaaa

SEQ ID NO: 120841 - DNA, 25 bp, Saccharomyces pastorianus
tgccatggatttgactaccggccag

SEQ ID NO: 120842 - DNA, 25 bp, Saccharomyces pastorianus
atgccaagctacaatttccaacgtc

SEQ ID NO: 120843 - DNA, 25 bp, Saccharomyces pastorianus
aatggaccaggcaacccagaactat

SEQ ID NO: 120844 - DNA, 25 bp, Saccharomyces pastorianus
gtgccaatgtaactgttttccccta

SEQ ID NO: 120845 - DNA, 25 bp, Saccharomyces pastorianus
gggatttgtctaggccatcaactct

SEQ ID NO: 120846 - DNA, 25 bp, Saccharomyces pastorianus
aaccctgtttatgactgtatcccta

SEQ ID NO: 120847 - DNA, 25 bp, Saccharomyces pastorianus
atattgtaaccgtgtttgacctggc

SEQ ID NO: 120848 - DNA, 25 bp, Saccharomyces pastorianus
cactaaaggatgttcagaggcaaat

SEQ ID NO: 120849 - DNA, 25 bp, Saccharomyces pastorianus
ggctcccttggccaatacatctgag

SEQ ID NO: 120850 - DNA, 25 bp, Saccharomyces pastorianus
gatgagttttcacgcagtatacaag

SEQ ID NO: 120851 - DNA, 25 bp, Saccharomyces pastorianus
ggccaatacatctgagactaactca

SEQ ID NO: 120852 - DNA, 25 bp, Saccharomyces pastorianus
gaagcttcggaggaaccacaggctc

SEQ ID NO: 120853 - DNA, 25 bp, Saccharomyces pastorianus
ccgtgtttgacctggcaaatgaaat

SEQ ID NO: 120854 - DNA, 25 bp, Saccharomyces pastorianus
aactggaagcttcggaggaaccaca

SEQ ID NO: 120855 - DNA, 25 bp, Saccharomyces pastorianus
tgagttttcacgcagtatacaagca

SEQ ID NO: 120856 - DNA, 25 bp, Saccharomyces pastorianus
ttcggaggaaccacaggctcccttg

SEQ ID NO: 120857 - DNA, 25 bp, Saccharomyces pastorianus
gtaaccgtgtttgacctggcaaatg

SEQ ID NO: 120858 - DNA, 25 bp, Saccharomyces pastorianus
atcgaccatacttttgaaccattga

SEQ ID NO: 120859 - DNA, 25 bp, Saccharomyces pastorianus
agactgacgggcactttgacttaat

SEQ ID NO: 120860 - DNA, 25 bp, Saccharomyces pastorianus
cgagaattcatacgcctctacgtta

SEQ ID NO: 120861 - DNA, 25 bp, Saccharomyces pastorianus
ggaaattttcatcgttaatgcccaa

SEQ ID NO: 120862 - DNA, 25 bp, Saccharomyces pastorianus
gcccatgatggtggcgtagacataa

SEQ ID NO: 120863 - DNA, 25 bp, Saccharomyces pastorianus
gaactcgcaaaatggcttcgtattg

SEQ ID NO: 120864 - DNA, 25 bp, Saccharomyces pastorianus
ggaacattcacctcactagtatcac

SEQ ID NO: 120865 - DNA, 25 bp, Saccharomyces pastorianus
tgagaaaaaccggtggcgcccatga

SEQ ID NO: 120866 - DNA, 25 bp, Saccharomyces pastorianus
ttatcaataacatcacgcttcctct

SEQ ID NO: 120867 - DNA, 25 bp, Saccharomyces pastorianus
agtatgcattatgtgttcccctcat

SEQ ID NO: 120868 - DNA, 25 bp, Saccharomyces pastorianus
gcttcctctgatatatttacgtgtt

SEQ ID NO: 120869 - DNA, 25 bp, Saccharomyces pastorianus
tcgctttcggtactttagtcggcat

SEQ ID NO: 120870 - DNA, 25 bp, Saccharomyces pastorianus
acggccgattaccaacactatatta

SEQ ID NO: 120871 - DNA, 25 bp, Saccharomyces pastorianus
gttctggaagcgttttctccttact

SEQ ID NO: 120872 - DNA, 25 bp, Saccharomyces pastorianus
ttacttcctgtttgctgtggccaga

SEQ ID NO: 120873 - DNA, 25 bp, Saccharomyces pastorianus
atatcttttttgtgtcctgggaacg

SEQ ID NO: 120874 - DNA, 25 bp, Saccharomyces pastorianus
actctactcactctatttatcgtca

SEQ ID NO: 120875 - DNA, 25 bp, Saccharomyces pastorianus
aacaggtgccattatctctaacaag

SEQ ID NO: 120876 - DNA, 25 bp, Saccharomyces pastorianus
aaatgtctgcggcatacccgggaga

SEQ ID NO: 120877 - DNA, 25 bp, Saccharomyces pastorianus
atgggttcctggctatttgagcgat

SEQ ID NO: 120878 - DNA, 25 bp, Saccharomyces pastorianus
aacgtcgcaattgcaactctactca

SEQ ID NO: 120879 - DNA, 25 bp, Saccharomyces pastorianus
gaatttctgctaatgacgcctacac

SEQ ID NO: 120880 - DNA, 25 bp, Saccharomyces pastorianus
ggagacgtcgatttgaaaccaggaa

SEQ ID NO: 120881 - DNA, 25 bp, Saccharomyces pastorianus
atactttggataccagtctctccga

SEQ ID NO: 120882 - DNA, 25 bp, Saccharomyces pastorianus
atctaatgactcttccaatgcaaat

SEQ ID NO: 120883 - DNA, 25 bp, Saccharomyces pastorianus
gagcatacgggcactggcacttata

SEQ ID NO: 120884 - DNA, 25 bp, Saccharomyces pastorianus
gtgttttcaccacaggagacgtcga

SEQ ID NO: 120885 - DNA, 25 bp, Saccharomyces pastorianus
gtctctccgaacgaagtgctactga

SEQ ID NO: 120886 - DNA, 25 bp, Saccharomyces pastorianus
tcaacactaggatatcttcggaaaa

SEQ ID NO: 120887 - DNA, 25 bp, Saccharomyces pastorianus
ttttctggtcttgcatcaacactag

SEQ ID NO: 120888 - DNA, 25 bp, Saccharomyces pastorianus
ggactggaacaattcacatctaatg

SEQ ID NO: 120889 - DNA, 25 bp, Saccharomyces pastorianus
gtgaatcacttcgaagggatgtccg

SEQ ID NO: 120890 - DNA, 25 bp, Saccharomyces pastorianus
aatcgactgactactaaggaggcat

SEQ ID NO: 120891 - DNA, 25 bp, Saccharomyces pastorianus
ttctgattctgaatccgattctgat

SEQ ID NO: 120892 - DNA, 25 bp, Saccharomyces pastorianus
gaaataaggatgcattttacatttt

SEQ ID NO: 120893 - DNA, 25 bp, Saccharomyces pastorianus
gattccaaggattctaaaaaagcta

SEQ ID NO: 120894 - DNA, 25 bp, Saccharomyces pastorianus
cgatgatgaagattccaaggattct

SEQ ID NO: 120895 - DNA, 25 bp, Saccharomyces pastorianus
tttaataattggtgacccctcgcgt

SEQ ID NO: 120896 - DNA, 25 bp, Saccharomyces pastorianus
cattttaataattggtgacccctcg

SEQ ID NO: 120897 - DNA, 25 bp, Saccharomyces pastorianus
ctgattctgaatccgattctgatga

SEQ ID NO: 120898 - DNA, 25 bp, Saccharomyces pastorianus
taataattggtgacccctcgcgttc

SEQ ID NO: 120899 - DNA, 25 bp, Saccharomyces pastorianus
aaggatgcattttacattttaataa

SEQ ID NO: 120900 - DNA, 25 bp, Saccharomyces pastorianus
ataattatccaatgcttaacctatt

SEQ ID NO: 120901 - DNA, 25 bp, Saccharomyces pastorianus
aattatccaatgcttaacctatttc

SEQ ID NO: 120902 - DNA, 25 bp, Saccharomyces pastorianus
ttctgattctgaatccgattctgat

SEQ ID NO: 120903 - DNA, 25 bp, Saccharomyces pastorianus
gattccaaggattctaaaaaagcta

SEQ ID NO: 120904 - DNA, 25 bp, Saccharomyces pastorianus
gcaaaggctgcttctgattctgaat

SEQ ID NO: 120905 - DNA, 25 bp, Saccharomyces pastorianus
atgctgataccgcaaaggctgcttc

SEQ ID NO: 120906 - DNA, 25 bp, Saccharomyces pastorianus
taaggatgcattttacattttaata

SEQ ID NO: 120907 - DNA, 25 bp, Saccharomyces pastorianus
cgatgatgaagattccaaggattct

SEQ ID NO: 120908 - DNA, 25 bp, Saccharomyces pastorianus
tttaataattggtgacccctcgcgt

SEQ ID NO: 120909 - DNA, 25 bp, Saccharomyces pastorianus
ctgattctgaatccgattctgatga

SEQ ID NO: 120910 - DNA, 25 bp, Saccharomyces pastorianus
cattttaataattggtgacccctcg

SEQ ID NO: 120911 - DNA, 25 bp, Saccharomyces pastorianus
taataattggtgacccctcgcgttc

SEQ ID NO: 120912 - DNA, 25 bp, Saccharomyces pastorianus
aattatccaatgcttaacctatttc

SEQ ID NO: 120913 - DNA, 25 bp, Saccharomyces pastorianus
agcagtttctgcagttagtcatcaa

SEQ ID NO: 120914 - DNA, 25 bp, Saccharomyces pastorianus
gaacgcgaaatttgggcctctgtca

SEQ ID NO: 120915 - DNA, 25 bp, Saccharomyces pastorianus
tggagacaactatgtttaccaacct

SEQ ID NO: 120916 - DNA, 25 bp, Saccharomyces pastorianus
gcgcgttgtcccttctttgaaaaca

SEQ ID NO: 120917 - DNA, 25 bp, Saccharomyces pastorianus
agttgttggtattgcaaagcttccc

SEQ ID NO: 120918 - DNA, 25 bp, Saccharomyces pastorianus
aagcagctcagggatacgacagcaa

SEQ ID NO: 120919 - DNA, 25 bp, Saccharomyces pastorianus
gggcctctgtcaccgatagaagttt

SEQ ID NO: 120920 - DNA, 25 bp, Saccharomyces pastorianus
gaaattgcacttccgtatactttgt

SEQ ID NO: 120921 - DNA, 25 bp, Saccharomyces pastorianus
aaatgattccttttcttgtgagttt

SEQ ID NO: 120922 - DNA, 25 bp, Saccharomyces pastorianus
aaagcttcccattgcctatggatat

SEQ ID NO: 120923 - DNA, 25 bp, Saccharomyces pastorianus
gcaacttgaccctgttttgttacca

SEQ ID NO: 120924 - DNA, 25 bp, Saccharomyces pastorianus
gacgctgctgcaggaaccaacaaaa

SEQ ID NO: 120925 - DNA, 25 bp, Saccharomyces pastorianus
ataggcagcgagaccggcgtttttt

SEQ ID NO: 120926 - DNA, 25 bp, Saccharomyces pastorianus
tgctcttttcttttcgttacttcgg

SEQ ID NO: 120927 - DNA, 25 bp, Saccharomyces pastorianus
ggcgcgcgtcaatcggcgataatca

SEQ ID NO: 120928 - DNA, 25 bp, Saccharomyces pastorianus
gacttattttactgcttcttctccg

SEQ ID NO: 120929 - DNA, 25 bp, Saccharomyces pastorianus
atgatacgtttttgtggcgcgcgtc

SEQ ID NO: 120930 - DNA, 25 bp, Saccharomyces pastorianus
gaccgcatagacgaacaccgttgca

SEQ ID NO: 120931 - DNA, 25 bp, Saccharomyces pastorianus
aagtccagttatcttcattacgaag

SEQ ID NO: 120932 - DNA, 25 bp, Saccharomyces pastorianus
gataatcagcaacgcgtctgacgct

SEQ ID NO: 120933 - DNA, 25 bp, Saccharomyces pastorianus
gagtccttgtgtcttaacgaccgca

SEQ ID NO: 120934 - DNA, 25 bp, Saccharomyces pastorianus
gatactaaaccctcttgagtccttg

SEQ ID NO: 120935 - DNA, 25 bp, Saccharomyces pastorianus
atgcatgcccatttcgataggaaaa

SEQ ID NO: 120936 - DNA, 25 bp, Saccharomyces pastorianus
ttaagcccgttaccgtaaatgtcat

SEQ ID NO: 120937 - DNA, 25 bp, Saccharomyces pastorianus
cccgttaccgtaaatgtcattcgat

SEQ ID NO: 120938 - DNA, 25 bp, Saccharomyces pastorianus
gcatgcccatttcgataggaaaatc

SEQ ID NO: 120939 - DNA, 25 bp, Saccharomyces pastorianus
atgtcattcgatactgtttacagtt

SEQ ID NO: 120940 - DNA, 25 bp, Saccharomyces pastorianus
gcccgttaccgtaaatgtcattcga

SEQ ID NO: 120941 - DNA, 25 bp, Saccharomyces pastorianus
gttaccgtaaatgtcattcgatact

SEQ ID NO: 120942 - DNA, 25 bp, Saccharomyces pastorianus
gcccatttcgataggaaaatcttga

SEQ ID NO: 120943 - DNA, 25 bp, Saccharomyces pastorianus
taagcccgttaccgtaaatgtcatt

SEQ ID NO: 120944 - DNA, 25 bp, Saccharomyces pastorianus
agcccgttaccgtaaatgtcattcg

SEQ ID NO: 120945 - DNA, 25 bp, Saccharomyces pastorianus
aaatgtcattcgatactgtttacag

SEQ ID NO: 120946 - DNA, 25 bp, Saccharomyces pastorianus
ccttttggcgttgattcttttgtct

SEQ ID NO: 120947 - DNA, 25 bp, Saccharomyces pastorianus
gatgagcccactggaatccaacagt

SEQ ID NO: 120948 - DNA, 25 bp, Saccharomyces pastorianus
attcattcttcgtttccgatgagcc

SEQ ID NO: 120949 - DNA, 25 bp, Saccharomyces pastorianus
taaacagatcgaccttcaagccaac

SEQ ID NO: 120950 - DNA, 25 bp, Saccharomyces pastorianus
ttgggagaagctcacaattccagta

SEQ ID NO: 120951 - DNA, 25 bp, Saccharomyces pastorianus
gaatctcatagtcagttcgtcgcga

SEQ ID NO: 120952 - DNA, 25 bp, Saccharomyces pastorianus
tggagctccaccgaatgattcattc

SEQ ID NO: 120953 - DNA, 25 bp, Saccharomyces pastorianus
tgtctggaactgtaagccgcttgtt

SEQ ID NO: 120954 - DNA, 25 bp, Saccharomyces pastorianus
gctaccatctttgccactgaaataa

SEQ ID NO: 120955 - DNA, 25 bp, Saccharomyces pastorianus
cagttcgtcgcgaggctcattaaat

SEQ ID NO: 120956 - DNA, 25 bp, Saccharomyces pastorianus
tgatgtgccacttttattgcctaaa

SEQ ID NO: 120957 - DNA, 25 bp, Saccharomyces pastorianus
gctcacccgtttccagtagtgaatt

SEQ ID NO: 120958 - DNA, 25 bp, Saccharomyces pastorianus
cccgtttccagtagtgaattttcat

SEQ ID NO: 120959 - DNA, 25 bp, Saccharomyces pastorianus
tttctgtacgaaggcaatataagct

SEQ ID NO: 120960 - DNA, 25 bp, Saccharomyces pastorianus
atgctggttcccatgcataactcac

SEQ ID NO: 120961 - DNA, 25 bp, Saccharomyces pastorianus
aacggccgcttatcacttactgtcg

SEQ ID NO: 120962 - DNA, 25 bp, Saccharomyces pastorianus
gccagctccggtcttagaaagggta

SEQ ID NO: 120963 - DNA, 25 bp, Saccharomyces pastorianus
aaaccgggtgtatactatacactca

SEQ ID NO: 120964 - DNA, 25 bp, Saccharomyces pastorianus
tactatacactcatacatccgctca

SEQ ID NO: 120965 - DNA, 25 bp, Saccharomyces pastorianus
tcgccagctccggtcttagaaaggg

SEQ ID NO: 120966 - DNA, 25 bp, Saccharomyces pastorianus
gcttatcacttactgtcgccagctc

SEQ ID NO: 120967 - DNA, 25 bp, Saccharomyces pastorianus
tagtgaattttcattttctgtacga

SEQ ID NO: 120968 - DNA, 25 bp, Saccharomyces pastorianus
gctccattaacgaagcttgctaaaa

SEQ ID NO: 120969 - DNA, 25 bp, Saccharomyces pastorianus
ggaagaaacttctcaagctttaaca

SEQ ID NO: 120970 - DNA, 25 bp, Saccharomyces pastorianus
gttggcattgaattactagcaggca

SEQ ID NO: 120971 - DNA, 25 bp, Saccharomyces pastorianus
caggcatagtgttctttgacggcga

SEQ ID NO: 120972 - DNA, 25 bp, Saccharomyces pastorianus
tattgtaccaaatcatgctccatta

SEQ ID NO: 120973 - DNA, 25 bp, Saccharomyces pastorianus
gctttaacaagcgatggttggttca

SEQ ID NO: 120974 - DNA, 25 bp, Saccharomyces pastorianus
gaacggtgaatatatcgcactcgag

SEQ ID NO: 120975 - DNA, 25 bp, Saccharomyces pastorianus
aagctgtttattctgatcttttgaa

SEQ ID NO: 120976 - DNA, 25 bp, Saccharomyces pastorianus
agaaattagagtccgtttacagatc

SEQ ID NO: 120977 - DNA, 25 bp, Saccharomyces pastorianus
gtgtttatgccgaccaatctaagac

SEQ ID NO: 120978 - DNA, 25 bp, Saccharomyces pastorianus
ggttttgttacgtccgctcagaaat

SEQ ID NO: 120979 - DNA, 25 bp, Saccharomyces pastorianus
ggacatgattctacctattgctaag

SEQ ID NO: 120980 - DNA, 25 bp, Saccharomyces pastorianus
gaattactgttgattatgccttcaa

SEQ ID NO: 120981 - DNA, 25 bp, Saccharomyces pastorianus
ttcgtcaagtaaccaattctacagg

SEQ ID NO: 120982 - DNA, 25 bp, Saccharomyces pastorianus
tggtaagctcataagggaacccgaa

SEQ ID NO: 120983 - DNA, 25 bp, Saccharomyces pastorianus
ccaaggctacgcattcatcgaattt

SEQ ID NO: 120984 - DNA, 25 bp, Saccharomyces pastorianus
aaaccttgcagattcgatagatagc

SEQ ID NO: 120985 - DNA, 25 bp, Saccharomyces pastorianus
gtgatgacgttgacaggctgttgaa

SEQ ID NO: 120986 - DNA, 25 bp, Saccharomyces pastorianus
gaactcttcattcagatcaaccctg

SEQ ID NO: 120987 - DNA, 25 bp, Saccharomyces pastorianus
gaacaatcagttagtcgccaacaac

SEQ ID NO: 120988 - DNA, 25 bp, Saccharomyces pastorianus
cgaccgactgataaaggttcgtcaa

SEQ ID NO: 120989 - DNA, 25 bp, Saccharomyces pastorianus
gttctacaagcttaccaaggctacg

SEQ ID NO: 120990 - DNA, 25 bp, Saccharomyces pastorianus
ttcggattatccattggccaagccc

SEQ ID NO: 120991 - DNA, 25 bp, Saccharomyces pastorianus
gtgaacgttatgctgcccaagattt

SEQ ID NO: 120992 - DNA, 25 bp, Saccharomyces pastorianus
tgacctttggaactcggtgtacgct

SEQ ID NO: 120993 - DNA, 25 bp, Saccharomyces pastorianus
aatgatggcaacgatattccggtag

SEQ ID NO: 120994 - DNA, 25 bp, Saccharomyces pastorianus
aggtacggcttactgacgggttcat

SEQ ID NO: 120995 - DNA, 25 bp, Saccharomyces pastorianus
tagagcaccaagcttgtgacctttg

SEQ ID NO: 120996 - DNA, 25 bp, Saccharomyces pastorianus
gaaacccacggcactattctataat

SEQ ID NO: 120997 - DNA, 25 bp, Saccharomyces pastorianus
ttggccaagccctggaattatccat

SEQ ID NO: 120998 - DNA, 25 bp, Saccharomyces pastorianus
agttctacatcatctttatcgccgt

SEQ ID NO: 120999 - DNA, 25 bp, Saccharomyces pastorianus
acgacagtgtcgcatattctaagta

SEQ ID NO: 121000 - DNA, 25 bp, Saccharomyces pastorianus
ttatcgccgttatttgatttccaaa

SEQ ID NO: 121001 - DNA, 25 bp, Saccharomyces pastorianus
gggtagtgtaccttttcgtggacat

SEQ ID NO: 121002 - DNA, 25 bp, Saccharomyces pastorianus
tttaccaagatgtcgagttgctctc

SEQ ID NO: 121003 - DNA, 25 bp, Saccharomyces pastorianus
gccaccatgttacgagctctctata

SEQ ID NO: 121004 - DNA, 25 bp, Saccharomyces pastorianus
atagtgagtgttcccactggtgcag

SEQ ID NO: 121005 - DNA, 25 bp, Saccharomyces pastorianus
agtacagtcaccaccactggaaagt

SEQ ID NO: 121006 - DNA, 25 bp, Saccharomyces pastorianus
ggcatctaacggtgctagtagctct

SEQ ID NO: 121007 - DNA, 25 bp, Saccharomyces pastorianus
gtgttgacaccacatagcacaagag

SEQ ID NO: 121008 - DNA, 25 bp, Saccharomyces pastorianus
gaagaagttcctcccatttaccaag

SEQ ID NO: 121009 - DNA, 25 bp, Saccharomyces pastorianus
gctcgaacctggtcctaacgtacag

SEQ ID NO: 121010 - DNA, 25 bp, Saccharomyces pastorianus
aaagatcccttaccacagtacagtc

SEQ ID NO: 121011 - DNA, 25 bp, Saccharomyces pastorianus
gggcctgaagatataacaccggtga

SEQ ID NO: 121012 - DNA, 25 bp, Saccharomyces pastorianus
tacctctaagattcacgcccgtggt

SEQ ID NO: 121013 - DNA, 25 bp, Saccharomyces pastorianus
gcttggacggtctggtgagttatca

SEQ ID NO: 121014 - DNA, 25 bp, Saccharomyces pastorianus
tgacggccaggttgctagtgactac

SEQ ID NO: 121015 - DNA, 25 bp, Saccharomyces pastorianus
ggctgccaagtttgttacatctaca

SEQ ID NO: 121016 - DNA, 25 bp, Saccharomyces pastorianus
gctgaagtgggtatttctacctcta

SEQ ID NO: 121017 - DNA, 25 bp, Saccharomyces pastorianus
ttatgaagggtgtcgactcctctgg

SEQ ID NO: 121018 - DNA, 25 bp, Saccharomyces pastorianus
cgactcctctggtgtttactggaat

SEQ ID NO: 121019 - DNA, 25 bp, Saccharomyces pastorianus
ttttatccttggatttggctgccaa

SEQ ID NO: 121020 - DNA, 25 bp, Saccharomyces pastorianus
gagacataccgacgctattgtaacg

SEQ ID NO: 121021 - DNA, 25 bp, Saccharomyces pastorianus
tgcaaagactaactacccagctggt

SEQ ID NO: 121022 - DNA, 25 bp, Saccharomyces pastorianus
gaaggcggagtgactatccacgcta

SEQ ID NO: 121023 - DNA, 25 bp, Saccharomyces pastorianus
accttgcgaaccacggtgattgatc

SEQ ID NO: 121024 - DNA, 25 bp, Saccharomyces pastorianus
acctgtataggtatttcatcattga

SEQ ID NO: 121025 - DNA, 25 bp, Saccharomyces pastorianus
gatcttctatcaggagagttaaccc

SEQ ID NO: 121026 - DNA, 25 bp, Saccharomyces pastorianus
aatcagactttgacgaggatgacaa

SEQ ID NO: 121027 - DNA, 25 bp, Saccharomyces pastorianus
actcctgattctagctcaaactcta

SEQ ID NO: 121028 - DNA, 25 bp, Saccharomyces pastorianus
gaacaataataatggctccgcagcc

SEQ ID NO: 121029 - DNA, 25 bp, Saccharomyces pastorianus
gaacaacacgaaatccatctacctg

SEQ ID NO: 121030 - DNA, 25 bp, Saccharomyces pastorianus
ttagacgaaatgaccaccttgcgaa

SEQ ID NO: 121031 - DNA, 25 bp, Saccharomyces pastorianus
tgggcggctttatcgtttacgtcaa

SEQ ID NO: 121032 - DNA, 25 bp, Saccharomyces pastorianus
taaacataagtcctctctaagggaa

SEQ ID NO: 121033 - DNA, 25 bp, Saccharomyces pastorianus
ttgcatttcttttgatgggcggctt

SEQ ID NO: 121034 - DNA, 25 bp, Saccharomyces pastorianus
ttgggaccaccggattatcattcac

SEQ ID NO: 121035 - DNA, 25 bp, Saccharomyces pastorianus
ttagcttgtagaggttccggctgcg

SEQ ID NO: 121036 - DNA, 25 bp, Saccharomyces pastorianus
agggtacagttcctcgatccgggat

SEQ ID NO: 121037 - DNA, 25 bp, Saccharomyces pastorianus
acaggtaagctagtcatttccaatg

SEQ ID NO: 121038 - DNA, 25 bp, Saccharomyces pastorianus
aatgaacgttgtcgtaccccatgtg

SEQ ID NO: 121039 - DNA, 25 bp, Saccharomyces pastorianus
gtgccctattctttgtcacatataa

SEQ ID NO: 121040 - DNA, 25 bp, Saccharomyces pastorianus
gttttggtcgatcccaggacaggta

SEQ ID NO: 121041 - DNA, 25 bp, Saccharomyces pastorianus
ttacttcagtgcttggtcttgggac

SEQ ID NO: 121042 - DNA, 25 bp, Saccharomyces pastorianus
ttcttcccttacaaaagcctcttgg

SEQ ID NO: 121043 - DNA, 25 bp, Saccharomyces pastorianus
gaccggattcttttatcttcactgc

SEQ ID NO: 121044 - DNA, 25 bp, Saccharomyces pastorianus
aaatgtctcctatcatgcagcgcag

SEQ ID NO: 121045 - DNA, 25 bp, Saccharomyces pastorianus
gaatttgttattcgctgacacctgc

SEQ ID NO: 121046 - DNA, 25 bp, Saccharomyces pastorianus
gttccatgctgtagtcacaacctta

SEQ ID NO: 121047 - DNA, 25 bp, Saccharomyces pastorianus
gactatgagtctccaattccacagg

SEQ ID NO: 121048 - DNA, 25 bp, Saccharomyces pastorianus
atttgattcagaccgctaagctact

SEQ ID NO: 121049 - DNA, 25 bp, Saccharomyces pastorianus
gctgcgttatcttcatcaggtaatg

SEQ ID NO: 121050 - DNA, 25 bp, Saccharomyces pastorianus
tttatcactccagaaacaggtccat

SEQ ID NO: 121051 - DNA, 25 bp, Saccharomyces pastorianus
gacgcatggcttgacagatggtact

SEQ ID NO: 121052 - DNA, 25 bp, Saccharomyces pastorianus
atataccagcgtggttatccttgcc

SEQ ID NO: 121053 - DNA, 25 bp, Saccharomyces pastorianus
gatggtactgagtgcctacaacatt

SEQ ID NO: 121054 - DNA, 25 bp, Saccharomyces pastorianus
gggtcacgagcatagcagcagtata

SEQ ID NO: 121055 - DNA, 25 bp, Saccharomyces pastorianus
gttatccttgccctcaactaagaga

SEQ ID NO: 121056 - DNA, 25 bp, Saccharomyces pastorianus
aattcccaaaacaagactgctgctt

SEQ ID NO: 121057 - DNA, 25 bp, Saccharomyces pastorianus
catccattgaggacaaagctgataa

SEQ ID NO: 121058 - DNA, 25 bp, Saccharomyces pastorianus
ttgctgaacgtggtgaaaggctaac

SEQ ID NO: 121059 - DNA, 25 bp, Saccharomyces pastorianus
atccatatgtgcctccagaggagag

SEQ ID NO: 121060 - DNA, 25 bp, Saccharomyces pastorianus
gactgctgctttgagacaagagatt

SEQ ID NO: 121061 - DNA, 25 bp, Saccharomyces pastorianus
ataacttggctatctccgcacaagg

SEQ ID NO: 121062 - DNA, 25 bp, Saccharomyces pastorianus
aagagattgatgacacggtgggaat

SEQ ID NO: 121063 - DNA, 25 bp, Saccharomyces pastorianus
gagagtaactcaggcgcaaacccaa

SEQ ID NO: 121064 - DNA, 25 bp, Saccharomyces pastorianus
agctgataacttggctatctccgca

SEQ ID NO: 121065 - DNA, 25 bp, Saccharomyces pastorianus
gaatgtgtctattcttagttgttat

SEQ ID NO: 121066 - DNA, 25 bp, Saccharomyces pastorianus
tgaaaggctaacatccattgaggac

SEQ ID NO: 121067 - DNA, 25 bp, Saccharomyces pastorianus
atggtggccaactttctcaaatgca

SEQ ID NO: 121068 - DNA, 25 bp, Saccharomyces pastorianus
gaacaatactcaatctcatcagacg

SEQ ID NO: 121069 - DNA, 25 bp, Saccharomyces pastorianus
ttcaatctttactttcttcttcacc

SEQ ID NO: 121070 - DNA, 25 bp, Saccharomyces pastorianus
ggtaacttgcagtcattgcagcagc

SEQ ID NO: 121071 - DNA, 25 bp, Saccharomyces pastorianus
gtgccacctcaacatatgtactcta

SEQ ID NO: 121072 - DNA, 25 bp, Saccharomyces pastorianus
gctagggcagcaagttcatcaacag

SEQ ID NO: 121073 - DNA, 25 bp, Saccharomyces pastorianus
agcagaataacttggtgccgaccca

SEQ ID NO: 121074 - DNA, 25 bp, Saccharomyces pastorianus
gccatcaaatgcgtctactgttaat

SEQ ID NO: 121075 - DNA, 25 bp, Saccharomyces pastorianus
atcagacgtatattcagcagcaaca

SEQ ID NO: 121076 - DNA, 25 bp, Saccharomyces pastorianus
ttttgtcacctcagaatgctgctaa

SEQ ID NO: 121077 - DNA, 25 bp, Saccharomyces pastorianus
acagcagcagcaatttccattcact

SEQ ID NO: 121078 - DNA, 25 bp, Saccharomyces pastorianus
tagctaacgagaagatgcagataat

SEQ ID NO: 121079 - DNA, 25 bp, Saccharomyces pastorianus
gagcctgcaatgatctataaaatct

SEQ ID NO: 121080 - DNA, 25 bp, Saccharomyces pastorianus
catgtaaaatttatcgagcctgcaa

SEQ ID NO: 121081 - DNA, 25 bp, Saccharomyces pastorianus
gatgcagataatttgggttttgaat

SEQ ID NO: 121082 - DNA, 25 bp, Saccharomyces pastorianus
tcgagcctgcaatgatctataaaat

SEQ ID NO: 121083 - DNA, 25 bp, Saccharomyces pastorianus
gatctataaaatcttagctaacgag

SEQ ID NO: 121084 - DNA, 25 bp, Saccharomyces pastorianus
aatttatcgagcctgcaatgatcta

SEQ ID NO: 121085 - DNA, 25 bp, Saccharomyces pastorianus
gttaccatgtaaaatttatcgagcc

SEQ ID NO: 121086 - DNA, 25 bp, Saccharomyces pastorianus
gtaaaatttatcgagcctgcaatga

SEQ ID NO: 121087 - DNA, 25 bp, Saccharomyces pastorianus
ttatcgagcctgcaatgatctataa

SEQ ID NO: 121088 - DNA, 25 bp, Saccharomyces pastorianus
ttcctattttgaattctaccttttg

SEQ ID NO: 121089 - DNA, 25 bp, Saccharomyces pastorianus
tagctaacgagaagatgcagataat

SEQ ID NO: 121090 - DNA, 25 bp, Saccharomyces pastorianus
tgggttttgaattcctattttgaat

SEQ ID NO: 121091 - DNA, 25 bp, Saccharomyces pastorianus
gatgcagataatttgggttttgaat

SEQ ID NO: 121092 - DNA, 25 bp, Saccharomyces pastorianus
atttatcgagcctgcaatgatctat

SEQ ID NO: 121093 - DNA, 25 bp, Saccharomyces pastorianus
tcctattttgaattctaccttttgt

SEQ ID NO: 121094 - DNA, 25 bp, Saccharomyces pastorianus
tcgagcctgcaatgatctataaaat

SEQ ID NO: 121095 - DNA, 25 bp, Saccharomyces pastorianus
taatgttaactctttttctaatagg

SEQ ID NO: 121096 - DNA, 25 bp, Saccharomyces pastorianus
gatctataaaatcttagctaacgag

SEQ ID NO: 121097 - DNA, 25 bp, Saccharomyces pastorianus
gtaaaatttatcgagcctgcaatga

SEQ ID NO: 121098 - DNA, 25 bp, Saccharomyces pastorianus
gttaccatgtaaaatttatcgagcc

SEQ ID NO: 121099 - DNA, 25 bp, Saccharomyces pastorianus
gggcaacttacttttgttttctcat

SEQ ID NO: 121100 - DNA, 25 bp, Saccharomyces pastorianus
aatacgctagagatgggaacactgc

SEQ ID NO: 121101 - DNA, 25 bp, Saccharomyces pastorianus
gagtacagcctcctagactatataa

SEQ ID NO: 121102 - DNA, 25 bp, Saccharomyces pastorianus
ggaacactgcagagtacagcctcct

SEQ ID NO: 121103 - DNA, 25 bp, Saccharomyces pastorianus
gctaacgattcagcaatcccagaaa

SEQ ID NO: 121104 - DNA, 25 bp, Saccharomyces pastorianus
ttgccggcaaggaagtcaagcacta

SEQ ID NO: 121105 - DNA, 25 bp, Saccharomyces pastorianus
agaataccacgcctatggaaaggaa

SEQ ID NO: 121106 - DNA, 25 bp, Saccharomyces pastorianus
aaatgccaaagctgatcaacgaatc

SEQ ID NO: 121107 - DNA, 25 bp, Saccharomyces pastorianus
gatggagtgattgacgacgttctga

SEQ ID NO: 121108 - DNA, 25 bp, Saccharomyces pastorianus
aatcagattacctgtcaatatgcca

SEQ ID NO: 121109 - DNA, 25 bp, Saccharomyces pastorianus
gaacggcatcatcatcgccaataag

SEQ ID NO: 121110 - DNA, 25 bp, Saccharomyces pastorianus
aatatgccagattatcccacacttc

SEQ ID NO: 121111 - DNA, 25 bp, Saccharomyces pastorianus
gaggttgaaggttctttctgctcgt

SEQ ID NO: 121112 - DNA, 25 bp, Saccharomyces pastorianus
cccagcgcgcaccattggaagagat

SEQ ID NO: 121113 - DNA, 25 bp, Saccharomyces pastorianus
acctaaggcgattgtcaaggctctt

SEQ ID NO: 121114 - DNA, 25 bp, Saccharomyces pastorianus
ttctgctcgtgaacagtcgctagac

SEQ ID NO: 121115 - DNA, 25 bp, Saccharomyces pastorianus
gcccgccatcagattggaattgtat

SEQ ID NO: 121116 - DNA, 25 bp, Saccharomyces pastorianus
gaaggccatgctttcgcaacagatt

SEQ ID NO: 121117 - DNA, 25 bp, Saccharomyces pastorianus
gtggtctccaatgcatcagacaaga

SEQ ID NO: 121118 - DNA, 25 bp, Saccharomyces pastorianus
ggaattgccaacaaccgggacgagt

SEQ ID NO: 121119 - DNA, 25 bp, Saccharomyces pastorianus
tttccggcggtgttgtggtctccaa

SEQ ID NO: 121120 - DNA, 25 bp, Saccharomyces pastorianus
ggacgagtacaagcccattttgcaa

SEQ ID NO: 121121 - DNA, 25 bp, Saccharomyces pastorianus
ggctcttttgaagttgttggaacct

SEQ ID NO: 121122 - DNA, 25 bp, Saccharomyces pastorianus
gaccatttaggaaacttctcggaca

SEQ ID NO: 121123 - DNA, 25 bp, Saccharomyces pastorianus
ggtcttccaaaagttattctcgaca

SEQ ID NO: 121124 - DNA, 25 bp, Saccharomyces pastorianus
gacgccgattcatgagatgcttgat

SEQ ID NO: 121125 - DNA, 25 bp, Saccharomyces pastorianus
gacattgagataatatttcccttag

SEQ ID NO: 121126 - DNA, 25 bp, Saccharomyces pastorianus
gaaatggcgtgtttggtcttccaaa

SEQ ID NO: 121127 - DNA, 25 bp, Saccharomyces pastorianus
acagtttggcttacacatgatggtt

SEQ ID NO: 121128 - DNA, 25 bp, Saccharomyces pastorianus
ggatgtgtcagcatactttctaaga

SEQ ID NO: 121129 - DNA, 25 bp, Saccharomyces pastorianus
tagaacgtaccaggagacgccgatt

SEQ ID NO: 121130 - DNA, 25 bp, Saccharomyces pastorianus
aatgggcttcaacgatagtaactgt

SEQ ID NO: 121131 - DNA, 25 bp, Saccharomyces pastorianus
agttatctattttcctcaggtctct

SEQ ID NO: 121132 - DNA, 25 bp, Saccharomyces pastorianus
aactgtttccgcaatatggtgctgt

SEQ ID NO: 121133 - DNA, 25 bp, Saccharomyces pastorianus
ttcacagtagcatctgttctgccgg

SEQ ID NO: 121134 - DNA, 25 bp, Saccharomyces pastorianus
aacatcagcgtctattgccttgaca

SEQ ID NO: 121135 - DNA, 25 bp, Saccharomyces pastorianus
gtgtctgccctttatatcaccaaga

SEQ ID NO: 121136 - DNA, 25 bp, Saccharomyces pastorianus
gctactttatggcagcagctacact

SEQ ID NO: 121137 - DNA, 25 bp, Saccharomyces pastorianus
gcaaactccagtgtgtatcctaaaa

SEQ ID NO: 121138 - DNA, 25 bp, Saccharomyces pastorianus
gatgaccatgtatccaaactcaccc

SEQ ID NO: 121139 - DNA, 25 bp, Saccharomyces pastorianus
gagacgtactacacccaatgtgatg

SEQ ID NO: 121140 - DNA, 25 bp, Saccharomyces pastorianus
gtggtattttctattgtgtctgccc

SEQ ID NO: 121141 - DNA, 25 bp, Saccharomyces pastorianus
gcagcggttgggagtgctactttat

SEQ ID NO: 121142 - DNA, 25 bp, Saccharomyces pastorianus
gttctgccggcattctatggtatga

SEQ ID NO: 121143 - DNA, 25 bp, Saccharomyces pastorianus
gttaccatctacacgttgggattca

SEQ ID NO: 121144 - DNA, 25 bp, Saccharomyces pastorianus
gaaaaatgtcttcacttcatcaaga

SEQ ID NO: 121145 - DNA, 25 bp, Saccharomyces pastorianus
aaatgtcttcacttcatcaagagtt

SEQ ID NO: 121146 - DNA, 25 bp, Saccharomyces pastorianus
agcattctcattggtttcgaaaaat

SEQ ID NO: 121147 - DNA, 25 bp, Saccharomyces pastorianus
gagcattctcattggtttcgaaaaa

SEQ ID NO: 121148 - DNA, 25 bp, Saccharomyces pastorianus
aaaaatgtcttcacttcatcaagag

SEQ ID NO: 121149 - DNA, 25 bp, Saccharomyces pastorianus
attctcattggtttcgaaaaatgtc

SEQ ID NO: 121150 - DNA, 25 bp, Saccharomyces pastorianus
aatgtcttcacttcatcaagagttt

SEQ ID NO: 121151 - DNA, 25 bp, Saccharomyces pastorianus
gcattctcattggtttcgaaaaatg

SEQ ID NO: 121152 - DNA, 25 bp, Saccharomyces pastorianus
cgaaaaatgtcttcacttcatcaag

SEQ ID NO: 121153 - DNA, 25 bp, Saccharomyces pastorianus
tctcattggtttcgaaaaatgtctt

SEQ ID NO: 121154 - DNA, 25 bp, Saccharomyces pastorianus
aaaatgtcttcacttcatcaagagt

SEQ ID NO: 121155 - DNA, 25 bp, Saccharomyces pastorianus
gtattgctactacatagtgcggctc

SEQ ID NO: 121156 - DNA, 25 bp, Saccharomyces pastorianus
atagtgcggctcacctttaacaagc

SEQ ID NO: 121157 - DNA, 25 bp, Saccharomyces pastorianus
tttcaatcacatcttctacacacaa

SEQ ID NO: 121158 - DNA, 25 bp, Saccharomyces pastorianus
ttcactctcccacgaaattgacgat

SEQ ID NO: 121159 - DNA, 25 bp, Saccharomyces pastorianus
aaactacacgcacgatttttcactc

SEQ ID NO: 121160 - DNA, 25 bp, Saccharomyces pastorianus
ggagacaatctctaccggaattttt

SEQ ID NO: 121161 - DNA, 25 bp, Saccharomyces pastorianus
agaccccactatatcttacttctgg

SEQ ID NO: 121162 - DNA, 25 bp, Saccharomyces pastorianus
gaaacctttaccaactttactcatg

SEQ ID NO: 121163 - DNA, 25 bp, Saccharomyces pastorianus
tttactcatgcctgttggccatcaa

SEQ ID NO: 121164 - DNA, 25 bp, Saccharomyces pastorianus
tacacacaactatatcccgcatatg

SEQ ID NO: 121165 - DNA, 25 bp, Saccharomyces pastorianus
gatacgttccagtgagcaagactca

SEQ ID NO: 121166 - DNA, 25 bp, Saccharomyces pastorianus
attacaggccctaaagacacaccgt

SEQ ID NO: 121167 - DNA, 25 bp, Saccharomyces pastorianus
gtattagtgcgtttcccgtagacga

SEQ ID NO: 121168 - DNA, 25 bp, Saccharomyces pastorianus
gtggttgcgtgacgaaacgtttaca

SEQ ID NO: 121169 - DNA, 25 bp, Saccharomyces pastorianus
cgctgtggcagcagaactttgggat

SEQ ID NO: 121170 - DNA, 25 bp, Saccharomyces pastorianus
aattctattgtcattgcagtcatta

SEQ ID NO: 121171 - DNA, 25 bp, Saccharomyces pastorianus
tgcagtcattacttggcgaaccaaa

SEQ ID NO: 121172 - DNA, 25 bp, Saccharomyces pastorianus
agctgctacagctacttagttctac

SEQ ID NO: 121173 - DNA, 25 bp, Saccharomyces pastorianus
aataacagatctccgctgaacgctg

SEQ ID NO: 121174 - DNA, 25 bp, Saccharomyces pastorianus
tatcctttccatccgccaatgatta

SEQ ID NO: 121175 - DNA, 25 bp, Saccharomyces pastorianus
ggcaacatttgtttggacatcctga

SEQ ID NO: 121176 - DNA, 25 bp, Saccharomyces pastorianus
gacacaccgtatagtggacttaaat

SEQ ID NO: 121177 - DNA, 25 bp, Saccharomyces pastorianus
ggacctttgtccataacgacgtgga

SEQ ID NO: 121178 - DNA, 25 bp, Saccharomyces pastorianus
atctttgggccactgggtagattct

SEQ ID NO: 121179 - DNA, 25 bp, Saccharomyces pastorianus
tcctttggaaacagatctttgggcc

SEQ ID NO: 121180 - DNA, 25 bp, Saccharomyces pastorianus
ggtcttttgattcatgatgcgttta

SEQ ID NO: 121181 - DNA, 25 bp, Saccharomyces pastorianus
ggcaatggctataacagctcccgtt

SEQ ID NO: 121182 - DNA, 25 bp, Saccharomyces pastorianus
aatggttcagagatcgtatacgagg

SEQ ID NO: 121183 - DNA, 25 bp, Saccharomyces pastorianus
tatccctgtggattggacctttgtc

SEQ ID NO: 121184 - DNA, 25 bp, Saccharomyces pastorianus
cgcctcacacattggtcttttgatt

SEQ ID NO: 121185 - DNA, 25 bp, Saccharomyces pastorianus
gagagccacaaggaactagacttac

SEQ ID NO: 121186 - DNA, 25 bp, Saccharomyces pastorianus
gtacattaataagtgacgccgacga

SEQ ID NO: 121187 - DNA, 25 bp, Saccharomyces pastorianus
gatgcgtttaatgctagtatcaaaa

SEQ ID NO: 121188 - DNA, 25 bp, Saccharomyces pastorianus
acagtccttccgctagaattgtggt

SEQ ID NO: 121189 - DNA, 25 bp, Saccharomyces pastorianus
aattcttgaccaaggctgttctaga

SEQ ID NO: 121190 - DNA, 25 bp, Saccharomyces pastorianus
gagcgtgaacaattggacagtcctt

SEQ ID NO: 121191 - DNA, 25 bp, Saccharomyces pastorianus
gatgttgctgctgtgttgaaaacgt

SEQ ID NO: 121192 - DNA, 25 bp, Saccharomyces pastorianus
gtcttctctcgttatgctatttctg

SEQ ID NO: 121193 - DNA, 25 bp, Saccharomyces pastorianus
tacttacttagcctttaacagacag

SEQ ID NO: 121194 - DNA, 25 bp, Saccharomyces pastorianus
tattgaccgttgtgttcatccagaa

SEQ ID NO: 121195 - DNA, 25 bp, Saccharomyces pastorianus
acggaaaacgtgtccttgtcacaga

SEQ ID NO: 121196 - DNA, 25 bp, Saccharomyces pastorianus
gacagattcctcatattgaccgttg

SEQ ID NO: 121197 - DNA, 25 bp, Saccharomyces pastorianus
gaccttattgctgacatgatgacca

SEQ ID NO: 121198 - DNA, 25 bp, Saccharomyces pastorianus
ggaaacatccacttcatctttcatg

SEQ ID NO: 121199 - DNA, 25 bp, Saccharomyces pastorianus
gtgacgaccagaatatcatgcgatc

SEQ ID NO: 121200 - DNA, 25 bp, Saccharomyces pastorianus
cctttgcgtccccaatatcgaaagt

SEQ ID NO: 121201 - DNA, 25 bp, Saccharomyces pastorianus
gaaatgcgtatgttcaattcgacca

SEQ ID NO: 121202 - DNA, 25 bp, Saccharomyces pastorianus
gttctctcagaaaacggcagcaccg

SEQ ID NO: 121203 - DNA, 25 bp, Saccharomyces pastorianus
aatcacggcgaaccattaactccac

SEQ ID NO: 121204 - DNA, 25 bp, Saccharomyces pastorianus
tcaaatactctatcgctcaaggcgg

SEQ ID NO: 121205 - DNA, 25 bp, Saccharomyces pastorianus
atgggccacaggatttatcaactat

SEQ ID NO: 121206 - DNA, 25 bp, Saccharomyces pastorianus
gaagtttcaagtcttcaacgaccta

SEQ ID NO: 121207 - DNA, 25 bp, Saccharomyces pastorianus
gcctaggttcgcaaaagggtcgcaa

SEQ ID NO: 121208 - DNA, 25 bp, Saccharomyces pastorianus
aggccctccaattcgttaagtctat

SEQ ID NO: 121209 - DNA, 25 bp, Saccharomyces pastorianus
aattcgaccatccaagtgactcagt

SEQ ID NO: 121210 - DNA, 25 bp, Saccharomyces pastorianus
aagacggcgcagaaactgccgctac

SEQ ID NO: 121211 - DNA, 25 bp, Saccharomyces pastorianus
agtaatccttcctcatactcgcatt

SEQ ID NO: 121212 - DNA, 25 bp, Saccharomyces pastorianus
tggcagattttgaaccggcttcttt

SEQ ID NO: 121213 - DNA, 25 bp, Saccharomyces pastorianus
gaaccggcttctttgcaattaatgc

SEQ ID NO: 121214 - DNA, 25 bp, Saccharomyces pastorianus
gactgcagcagattatcccatgggt

SEQ ID NO: 121215 - DNA, 25 bp, Saccharomyces pastorianus
atgacgataataccccacttaagaa

SEQ ID NO: 121216 - DNA, 25 bp, Saccharomyces pastorianus
atctgccgctgctacaagcacgaag

SEQ ID NO: 121217 - DNA, 25 bp, Saccharomyces pastorianus
ttctcccgaggttagcagctcgata

SEQ ID NO: 121218 - DNA, 25 bp, Saccharomyces pastorianus
gaggaatctgctctttttccaacag

SEQ ID NO: 121219 - DNA, 25 bp, Saccharomyces pastorianus
aacagatcagtttttcagtaatcct

SEQ ID NO: 121220 - DNA, 25 bp, Saccharomyces pastorianus
gacaatgccctttcgttggcagatt

SEQ ID NO: 121221 - DNA, 25 bp, Saccharomyces pastorianus
gatcattcaggcttccaaacgtggg

SEQ ID NO: 121222 - DNA, 25 bp, Saccharomyces pastorianus
agtccatttagctcttcatttatca

SEQ ID NO: 121223 - DNA, 25 bp, Saccharomyces pastorianus
aaattccaaaatctgacacggttca

SEQ ID NO: 121224 - DNA, 25 bp, Saccharomyces pastorianus
aatgatttgcccagtactatggaag

SEQ ID NO: 121225 - DNA, 25 bp, Saccharomyces pastorianus
aaaggatttgccatttccagattag

SEQ ID NO: 121226 - DNA, 25 bp, Saccharomyces pastorianus
agggaattaaatctctgcacctttt

SEQ ID NO: 121227 - DNA, 25 bp, Saccharomyces pastorianus
gccaacccaagttcgagcagaagta

SEQ ID NO: 121228 - DNA, 25 bp, Saccharomyces pastorianus
atattccagccgatcaaattccaaa

SEQ ID NO: 121229 - DNA, 25 bp, Saccharomyces pastorianus
gtttatgaatgaactgccaacccaa

SEQ ID NO: 121230 - DNA, 25 bp, Saccharomyces pastorianus
aactttaggtgatggagggccgcat

SEQ ID NO: 121231 - DNA, 25 bp, Saccharomyces pastorianus
gaatccgggttgacttcaaactcat

SEQ ID NO: 121232 - DNA, 25 bp, Saccharomyces pastorianus
cagataacagatgacgtcggcgaat

SEQ ID NO: 121233 - DNA, 25 bp, Saccharomyces pastorianus
gtctgcaaaaactactctgattctg

SEQ ID NO: 121234 - DNA, 25 bp, Saccharomyces pastorianus
ttctctcgatgttgaaagtctgcaa

SEQ ID NO: 121235 - DNA, 25 bp, Saccharomyces pastorianus
taccaaacttactctactggcattg

SEQ ID NO: 121236 - DNA, 25 bp, Saccharomyces pastorianus
gaaatcggctatcaatttacctccc

SEQ ID NO: 121237 - DNA, 25 bp, Saccharomyces pastorianus
atggcgcctctcaagatatttctac

SEQ ID NO: 121238 - DNA, 25 bp, Saccharomyces pastorianus
agttttcgtggaggttgccaataca

SEQ ID NO: 121239 - DNA, 25 bp, Saccharomyces pastorianus
ggaatgaagctttatttaccgcaaa

SEQ ID NO: 121240 - DNA, 25 bp, Saccharomyces pastorianus
atttctgaatggctatccagcttag

SEQ ID NO: 121241 - DNA, 25 bp, Saccharomyces pastorianus
acttttcattgcctctttcatggcg

SEQ ID NO: 121242 - DNA, 25 bp, Saccharomyces pastorianus
tttgctgcggatgtatcctatgcaa

SEQ ID NO: 121243 - DNA, 25 bp, Saccharomyces pastorianus
tgtgcaataacgaaggccctaaact

SEQ ID NO: 121244 - DNA, 25 bp, Saccharomyces pastorianus
gttaacagggatctcgcctttttat

SEQ ID NO: 121245 - DNA, 25 bp, Saccharomyces pastorianus
gaatgcatactgtcgtaggcactcc

SEQ ID NO: 121246 - DNA, 25 bp, Saccharomyces pastorianus
gaatcgtcttggcagactttggtat

SEQ ID NO: 121247 - DNA, 25 bp, Saccharomyces pastorianus
tactgcgctccagaagttggattca

SEQ ID NO: 121248 - DNA, 25 bp, Saccharomyces pastorianus
atctttggtctttgggtgtcattac

SEQ ID NO: 121249 - DNA, 25 bp, Saccharomyces pastorianus
gtaggcactccggaatactgcgctc

SEQ ID NO: 121250 - DNA, 25 bp, Saccharomyces pastorianus
ggaagttacccaaaagcgttatcat

SEQ ID NO: 121251 - DNA, 25 bp, Saccharomyces pastorianus
gaaccgtgcactagaatcgtcttgg

SEQ ID NO: 121252 - DNA, 25 bp, Saccharomyces pastorianus
tgttatgtacgccagaaccgtgcac

SEQ ID NO: 121253 - DNA, 25 bp, Saccharomyces pastorianus
aagaccttttgcaaactgacgtagt

SEQ ID NO: 121254 - DNA, 25 bp, Saccharomyces pastorianus
tattgcccatgttccaaactcagac

SEQ ID NO: 121255 - DNA, 25 bp, Saccharomyces pastorianus
gacttcgtttggtattctattgccc

SEQ ID NO: 121256 - DNA, 25 bp, Saccharomyces pastorianus
aatccaaattcatctcttacgttga

SEQ ID NO: 121257 - DNA, 25 bp, Saccharomyces pastorianus
aagtccctaaaacgtcttcagccag

SEQ ID NO: 121258 - DNA, 25 bp, Saccharomyces pastorianus
aaacggctatgccagtcttactccg

SEQ ID NO: 121259 - DNA, 25 bp, Saccharomyces pastorianus
ggaatcccagggtatccatggttac

SEQ ID NO: 121260 - DNA, 25 bp, Saccharomyces pastorianus
attgccgacgatctcatcgattacg

SEQ ID NO: 121261 - DNA, 25 bp, Saccharomyces pastorianus
tagttattttggtcaagggtcctat

SEQ ID NO: 121262 - DNA, 25 bp, Saccharomyces pastorianus
actcttcttcatccttgacaggata

SEQ ID NO: 121263 - DNA, 25 bp, Saccharomyces pastorianus
cttactccgctgctgcaggatttaa

SEQ ID NO: 121264 - DNA, 25 bp, Saccharomyces pastorianus
agagacattgcccagattcccgaaa

SEQ ID NO: 121265 - DNA, 25 bp, Saccharomyces pastorianus
gtggtgccgcgaacagtagtgctaa

SEQ ID NO: 121266 - DNA, 25 bp, Saccharomyces pastorianus
aaattttgacggactcgctagcacc

SEQ ID NO: 121267 - DNA, 25 bp, Saccharomyces pastorianus
atgttaatataaccccaccaccgat

SEQ ID NO: 121268 - DNA, 25 bp, Saccharomyces pastorianus
gacgtgcctaatttgaatgagctga

SEQ ID NO: 121269 - DNA, 25 bp, Saccharomyces pastorianus
gtatctgacatctttggagaagctg

SEQ ID NO: 121270 - DNA, 25 bp, Saccharomyces pastorianus
tgagacctaacctagccaacttggc

SEQ ID NO: 121271 - DNA, 25 bp, Saccharomyces pastorianus
gatgtcactgtgatattggacttga

SEQ ID NO: 121272 - DNA, 25 bp, Saccharomyces pastorianus
atcgtaatgagcgacgtgcctaatt

SEQ ID NO: 121273 - DNA, 25 bp, Saccharomyces pastorianus
ggcgcatgaacctaaacagcatccg

SEQ ID NO: 121274 - DNA, 25 bp, Saccharomyces pastorianus
acagcatccggttatgacttcttca

SEQ ID NO: 121275 - DNA, 25 bp, Saccharomyces pastorianus
gtatcaaacgttgtccacagtagtt

SEQ ID NO: 121276 - DNA, 25 bp, Saccharomyces pastorianus
acgcccacaattcgatctattgcaa

SEQ ID NO: 121277 - DNA, 25 bp, Saccharomyces pastorianus
aaagcctttatttcagtgtgcccca

SEQ ID NO: 121278 - DNA, 25 bp, Saccharomyces pastorianus
aacttggccacatttgcacgcaata

SEQ ID NO: 121279 - DNA, 25 bp, Saccharomyces pastorianus
gagtacgttccctacatcgaaaagt

SEQ ID NO: 121280 - DNA, 25 bp, Saccharomyces pastorianus
ttcgtcccaaccctaaggatattca

SEQ ID NO: 121281 - DNA, 25 bp, Saccharomyces pastorianus
cgagccgattcgtcaactttacaaa

SEQ ID NO: 121282 - DNA, 25 bp, Saccharomyces pastorianus
aagtgtttccattaatcccaccgat

SEQ ID NO: 121283 - DNA, 25 bp, Saccharomyces pastorianus
gaaacgtggataatatgcctctaaa

SEQ ID NO: 121284 - DNA, 25 bp, Saccharomyces pastorianus
tgcagactttatttccgcagagttt

SEQ ID NO: 121285 - DNA, 25 bp, Saccharomyces pastorianus
taataagcctgacggcacagtggcg

SEQ ID NO: 121286 - DNA, 25 bp, Saccharomyces pastorianus
gcactaatgagggttttcgtcccaa

SEQ ID NO: 121287 - DNA, 25 bp, Saccharomyces pastorianus
aaatacttatgttactgccgctgcc

SEQ ID NO: 121288 - DNA, 25 bp, Saccharomyces pastorianus
attcacgtagctcttctgaactggc

SEQ ID NO: 121289 - DNA, 25 bp, Saccharomyces pastorianus
gagaatcaaacccaagttcccaaga

SEQ ID NO: 121290 - DNA, 25 bp, Saccharomyces pastorianus
tcttctgctgaatctttatccgaca

SEQ ID NO: 121291 - DNA, 25 bp, Saccharomyces pastorianus
gcatctctttctacatttgcaagct

SEQ ID NO: 121292 - DNA, 25 bp, Saccharomyces pastorianus
caaggctttctaagcttttgccgaa

SEQ ID NO: 121293 - DNA, 25 bp, Saccharomyces pastorianus
gttaatagtgcagctgcttcttctg

SEQ ID NO: 121294 - DNA, 25 bp, Saccharomyces pastorianus
ttatccgacatcaattccagtcagg

SEQ ID NO: 121295 - DNA, 25 bp, Saccharomyces pastorianus
agattcttctctgtcgcataatgca

SEQ ID NO: 121296 - DNA, 25 bp, Saccharomyces pastorianus
aaaaagggttcctctgcatctcttt

SEQ ID NO: 121297 - DNA, 25 bp, Saccharomyces pastorianus
atctttatcagttttatccacccca

SEQ ID NO: 121298 - DNA, 25 bp, Saccharomyces pastorianus
gtctagaaccggaacctaccatgat

SEQ ID NO: 121299 - DNA, 25 bp, Saccharomyces pastorianus
attgtatccattgcaagacctgtga

SEQ ID NO: 121300 - DNA, 25 bp, Saccharomyces pastorianus
agaccgtccttcagcgggaaacttg

SEQ ID NO: 121301 - DNA, 25 bp, Saccharomyces pastorianus
gtgcgtaatattagaccgtccttca

SEQ ID NO: 121302 - DNA, 25 bp, Saccharomyces pastorianus
agaataccccaagcctgatggtgtg

SEQ ID NO: 121303 - DNA, 25 bp, Saccharomyces pastorianus
tgttgaatcgaggttctgcccagca

SEQ ID NO: 121304 - DNA, 25 bp, Saccharomyces pastorianus
atcgcctgtgggtacgagactgcaa

SEQ ID NO: 121305 - DNA, 25 bp, Saccharomyces pastorianus
gaacctgcttccaagtacaaaccga

SEQ ID NO: 121306 - DNA, 25 bp, Saccharomyces pastorianus
gacctgtgatattaaggcgcccaga

SEQ ID NO: 121307 - DNA, 25 bp, Saccharomyces pastorianus
gcccagcaggtgtctacgaattcgt

SEQ ID NO: 121308 - DNA, 25 bp, Saccharomyces pastorianus
gatatattgacctccgtgtctagaa

SEQ ID NO: 121309 - DNA, 25 bp, Saccharomyces pastorianus
gggcacccgcttttacaatctggtt

SEQ ID NO: 121310 - DNA, 25 bp, Saccharomyces pastorianus
ggtgcacaaccctaaaactcatata

SEQ ID NO: 121311 - DNA, 25 bp, Saccharomyces pastorianus
gatgcaatcggtagccgggcacccg

SEQ ID NO: 121312 - DNA, 25 bp, Saccharomyces pastorianus
ccaagttttcacaagagggtatcga

SEQ ID NO: 121313 - DNA, 25 bp, Saccharomyces pastorianus
gtcatggtacctcatttaccgggta

SEQ ID NO: 121314 - DNA, 25 bp, Saccharomyces pastorianus
aatttctatgcttaatcacccaaaa

SEQ ID NO: 121315 - DNA, 25 bp, Saccharomyces pastorianus
acatggagagcctagttacagcgaa

SEQ ID NO: 121316 - DNA, 25 bp, Saccharomyces pastorianus
ttgggtctacagaaaagtctttgct

SEQ ID NO: 121317 - DNA, 25 bp, Saccharomyces pastorianus
gagaattcaaatcctttgggtctac

SEQ ID NO: 121318 - DNA, 25 bp, Saccharomyces pastorianus
tacgctgagcctgagaactttttag

SEQ ID NO: 121319 - DNA, 25 bp, Saccharomyces pastorianus
acaatctggttctaaagttctcgtg

SEQ ID NO: 121320 - DNA, 25 bp, Saccharomyces pastorianus
cattttcgccaaagcctgtgagatc

SEQ ID NO: 121321 - DNA, 25 bp, Saccharomyces pastorianus
tgaccaagctaatctaccgccaagt

SEQ ID NO: 121322 - DNA, 25 bp, Saccharomyces pastorianus
ttggtgggccactacaaggagataa

SEQ ID NO: 121323 - DNA, 25 bp, Saccharomyces pastorianus
atcacattccttaccatttgcgaga

SEQ ID NO: 121324 - DNA, 25 bp, Saccharomyces pastorianus
aacctggttccgagcatcaagatga

SEQ ID NO: 121325 - DNA, 25 bp, Saccharomyces pastorianus
gagtctacgaatgaacctggttccg

SEQ ID NO: 121326 - DNA, 25 bp, Saccharomyces pastorianus
aggcgggccatgaccaagctaatct

SEQ ID NO: 121327 - DNA, 25 bp, Saccharomyces pastorianus
agttgcaagctatccaggcgggcca

SEQ ID NO: 121328 - DNA, 25 bp, Saccharomyces pastorianus
atacgaggctacctgtttctgagga

SEQ ID NO: 121329 - DNA, 25 bp, Saccharomyces pastorianus
accgccaagtggtcgaggatcgctt

SEQ ID NO: 121330 - DNA, 25 bp, Saccharomyces pastorianus
gcgagaatccgcaaggtcatgaaga

SEQ ID NO: 121331 - DNA, 25 bp, Saccharomyces pastorianus
gcggaaccccgtggatcgaattgat

SEQ ID NO: 121332 - DNA, 25 bp, Saccharomyces pastorianus
gagtacaattctcatcaccatcatt

SEQ ID NO: 121333 - DNA, 25 bp, Saccharomyces pastorianus
gagaatcccaactatctttctcact

SEQ ID NO: 121334 - DNA, 25 bp, Saccharomyces pastorianus
attcagatgccttaagcggaacccc

SEQ ID NO: 121335 - DNA, 25 bp, Saccharomyces pastorianus
attacgcatcctaatgctggtccta

SEQ ID NO: 121336 - DNA, 25 bp, Saccharomyces pastorianus
agtgccacatcgacatctacatcat

SEQ ID NO: 121337 - DNA, 25 bp, Saccharomyces pastorianus
gagtttgacagaccccaagctacta

SEQ ID NO: 121338 - DNA, 25 bp, Saccharomyces pastorianus
aatgctggtcctacaagtgccacat

SEQ ID NO: 121339 - DNA, 25 bp, Saccharomyces pastorianus
aaaggcgttcttgccttgggtgcaa

SEQ ID NO: 121340 - DNA, 25 bp, Saccharomyces pastorianus
taattcaagcccaaatctcattcct

SEQ ID NO: 121341 - DNA, 25 bp, Saccharomyces pastorianus
tctcaagttcccattcttttttcca

SEQ ID NO: 121342 - DNA, 25 bp, Saccharomyces pastorianus
tatttccgaggctattctggctaca

SEQ ID NO: 121343 - DNA, 25 bp, Saccharomyces pastorianus
aaacatttcataaagctcaccgccc

SEQ ID NO: 121344 - DNA, 25 bp, Saccharomyces pastorianus
tgctatcagagcattggcctcaatt

SEQ ID NO: 121345 - DNA, 25 bp, Saccharomyces pastorianus
gactgttttggcgattcatacaaga

SEQ ID NO: 121346 - DNA, 25 bp, Saccharomyces pastorianus
gagaaccttgtcaatatcagcacgt

SEQ ID NO: 121347 - DNA, 25 bp, Saccharomyces pastorianus
tctggctacagatatggcattgcat

SEQ ID NO: 121348 - DNA, 25 bp, Saccharomyces pastorianus
gcctcaattgctatctatctccaaa

SEQ ID NO: 121349 - DNA, 25 bp, Saccharomyces pastorianus
gcatacctcattactctcgaattta

SEQ ID NO: 121350 - DNA, 25 bp, Saccharomyces pastorianus
tcaccgcccagaacaagactgtttt

SEQ ID NO: 121351 - DNA, 25 bp, Saccharomyces pastorianus
tatcaaagaccatccgcatattcca

SEQ ID NO: 121352 - DNA, 25 bp, Saccharomyces pastorianus
gattgcgctcttttggaaacatttc

SEQ ID NO: 121353 - DNA, 25 bp, Saccharomyces pastorianus
agaacggctttcttcatttcgtgca

SEQ ID NO: 121354 - DNA, 25 bp, Saccharomyces pastorianus
gggaccgattcgtaaaccgcatcat

SEQ ID NO: 121355 - DNA, 25 bp, Saccharomyces pastorianus
gatctgcggcttttgaatactgttg

SEQ ID NO: 121356 - DNA, 25 bp, Saccharomyces pastorianus
atttcgtgcagttccgggaccgatt

SEQ ID NO: 121357 - DNA, 25 bp, Saccharomyces pastorianus
gtaaaccgcatcatcatccatttca

SEQ ID NO: 121358 - DNA, 25 bp, Saccharomyces pastorianus
atactgttgcattcaagaacggctt

SEQ ID NO: 121359 - DNA, 25 bp, Saccharomyces pastorianus
gcaggaaggcaaaccctaccggacg

SEQ ID NO: 121360 - DNA, 25 bp, Saccharomyces pastorianus
ctaccggacgtattagtcacgattt

SEQ ID NO: 121361 - DNA, 25 bp, Saccharomyces pastorianus
ggtttgtatcttgtatcagggtgtt

SEQ ID NO: 121362 - DNA, 25 bp, Saccharomyces pastorianus
gtgtttgtagtatattgccatcgta

SEQ ID NO: 121363 - DNA, 25 bp, Saccharomyces pastorianus
gtcaatcttattgatctgcggcttt

SEQ ID NO: 121364 - DNA, 25 bp, Saccharomyces pastorianus
gtaattgaggtttgcatgctagaaa

SEQ ID NO: 121365 - DNA, 25 bp, Saccharomyces pastorianus
agacgatgtcattatcactgatact

SEQ ID NO: 121366 - DNA, 25 bp, Saccharomyces pastorianus
gtatttgacggagattccacaacag

SEQ ID NO: 121367 - DNA, 25 bp, Saccharomyces pastorianus
gttacccagtaacagatccatacta

SEQ ID NO: 121368 - DNA, 25 bp, Saccharomyces pastorianus
gaccaggtagtattcgccaactgca

SEQ ID NO: 121369 - DNA, 25 bp, Saccharomyces pastorianus
aattgggttcttcgatttcacctcg

SEQ ID NO: 121370 - DNA, 25 bp, Saccharomyces pastorianus
gaatccatagatgaggcagcacaga

SEQ ID NO: 121371 - DNA, 25 bp, Saccharomyces pastorianus
ttgcaagcaaagtccttttcaggat

SEQ ID NO: 121372 - DNA, 25 bp, Saccharomyces pastorianus
tgcagctacccaaggattatcccgg

SEQ ID NO: 121373 - DNA, 25 bp, Saccharomyces pastorianus
agatggttttgctgtaattgggttc

SEQ ID NO: 121374 - DNA, 25 bp, Saccharomyces pastorianus
cttcgatttcacctcgtttgataaa

SEQ ID NO: 121375 - DNA, 25 bp, Saccharomyces pastorianus
ttcacgatggtctagctagaggttt

SEQ ID NO: 121376 - DNA, 25 bp, Saccharomyces pastorianus
agatcgaccgtgaaggtaacgccag

SEQ ID NO: 121377 - DNA, 25 bp, Saccharomyces pastorianus
ctggtttgggtaagatcgaccgtga

SEQ ID NO: 121378 - DNA, 25 bp, Saccharomyces pastorianus
aaccgctttggttcacgatggtcta

SEQ ID NO: 121379 - DNA, 25 bp, Saccharomyces pastorianus
tggttcacgatggtctagctagagg

SEQ ID NO: 121380 - DNA, 25 bp, Saccharomyces pastorianus
tgttgttgaacaaactgccgaagtt

SEQ ID NO: 121381 - DNA, 25 bp, Saccharomyces pastorianus
cgatggtctagctagaggtttgaga

SEQ ID NO: 121382 - DNA, 25 bp, Saccharomyces pastorianus
gttgaacaaactgccgaagttacta

SEQ ID NO: 121383 - DNA, 25 bp, Saccharomyces pastorianus
ctttggttcacgatggtctagctag

SEQ ID NO: 121384 - DNA, 25 bp, Saccharomyces pastorianus
tcgaccgtgaaggtaacgccagaaa

SEQ ID NO: 121385 - DNA, 25 bp, Saccharomyces pastorianus
acaaactgccgaagttactatcgaa

SEQ ID NO: 121386 - DNA, 25 bp, Saccharomyces pastorianus
ggcgtcatatatacaaccatgcctt

SEQ ID NO: 121387 - DNA, 25 bp, Saccharomyces pastorianus
gaagctatggaaatggccctgctaa

SEQ ID NO: 121388 - DNA, 25 bp, Saccharomyces pastorianus
tttattctcggtgctggcagcggaa

SEQ ID NO: 121389 - DNA, 25 bp, Saccharomyces pastorianus
gttaactcctccttctttgatgtaa

SEQ ID NO: 121390 - DNA, 25 bp, Saccharomyces pastorianus
gtagtcaccgcagccaaagttttat

SEQ ID NO: 121391 - DNA, 25 bp, Saccharomyces pastorianus
tgaaatacaggctagcggcgttgct

SEQ ID NO: 121392 - DNA, 25 bp, Saccharomyces pastorianus
aatggacattgatgccgctctagaa

SEQ ID NO: 121393 - DNA, 25 bp, Saccharomyces pastorianus
tattatacccaatacacatccacgc

SEQ ID NO: 121394 - DNA, 25 bp, Saccharomyces pastorianus
gccctgctaagggaatcgtcttcag

SEQ ID NO: 121395 - DNA, 25 bp, Saccharomyces pastorianus
gtatatttccggtgcgagtgataat

SEQ ID NO: 121396 - DNA, 25 bp, Saccharomyces pastorianus
atcgaccacagaacaaggcccacgt

SEQ ID NO: 121397 - DNA, 25 bp, Saccharomyces pastorianus
attatggatcctcatgtcggcacac

SEQ ID NO: 121398 - DNA, 25 bp, Saccharomyces pastorianus
gtagtagccggtcgcgaagacattt

SEQ ID NO: 121399 - DNA, 25 bp, Saccharomyces pastorianus
tattggccgtcgcaggtactataga

SEQ ID NO: 121400 - DNA, 25 bp, Saccharomyces pastorianus
aagcatacaccaccattgaatccat

SEQ ID NO: 121401 - DNA, 25 bp, Saccharomyces pastorianus
gacatttcgagcctttacttgagag

SEQ ID NO: 121402 - DNA, 25 bp, Saccharomyces pastorianus
taccgggacgaaactcttcctgaag

SEQ ID NO: 121403 - DNA, 25 bp, Saccharomyces pastorianus
gatggtttggtacctatcaacttat

SEQ ID NO: 121404 - DNA, 25 bp, Saccharomyces pastorianus
aactattgcgttccacggaggttca

SEQ ID NO: 121405 - DNA, 25 bp, Saccharomyces pastorianus
gtaatatcgggtgttccactcggaa

SEQ ID NO: 121406 - DNA, 25 bp, Saccharomyces pastorianus
gatggctatgacgtttgcagcgata

SEQ ID NO: 121407 - DNA, 25 bp, Saccharomyces pastorianus
gacttcgattccgaaacctggacta

SEQ ID NO: 121408 - DNA, 25 bp, Saccharomyces pastorianus
gtaattctttgcatagtacaaccac

SEQ ID NO: 121409 - DNA, 25 bp, Saccharomyces pastorianus
tctgccttacaaattcctgagctac

SEQ ID NO: 121410 - DNA, 25 bp, Saccharomyces pastorianus
ttcaccgactaccatccaattaaat

SEQ ID NO: 121411 - DNA, 25 bp, Saccharomyces pastorianus
tggataactctagaattcccttgtt

SEQ ID NO: 121412 - DNA, 25 bp, Saccharomyces pastorianus
aagattacctttatcaccaacacca

SEQ ID NO: 121413 - DNA, 25 bp, Saccharomyces pastorianus
agtctttactttctgattccggatc

SEQ ID NO: 121414 - DNA, 25 bp, Saccharomyces pastorianus
tacaaccacaggtacatctgcctta

SEQ ID NO: 121415 - DNA, 25 bp, Saccharomyces pastorianus
aacaggacatatacggctcttcacc

SEQ ID NO: 121416 - DNA, 25 bp, Saccharomyces pastorianus
attcccttgttagcttcgagatcag

SEQ ID NO: 121417 - DNA, 25 bp, Saccharomyces pastorianus
taaccaggatacatcatcgtcatct

SEQ ID NO: 121418 - DNA, 25 bp, Saccharomyces pastorianus
atcgtcatctttatcatcatcattg

SEQ ID NO: 121419 - DNA, 25 bp, Saccharomyces pastorianus
gaaggtgctactttgattaccggtg

SEQ ID NO: 121420 - DNA, 25 bp, Saccharomyces pastorianus
gcgggtacggtctggataaacactt

SEQ ID NO: 121421 - DNA, 25 bp, Saccharomyces pastorianus
ttaataccgccttaaaagtggctga

SEQ ID NO: 121422 - DNA, 25 bp, Saccharomyces pastorianus
agcaagggttacttcattaagccaa

SEQ ID NO: 121423 - DNA, 25 bp, Saccharomyces pastorianus
tcaaagccgcttctgaatccatcaa

SEQ ID NO: 121424 - DNA, 25 bp, Saccharomyces pastorianus
ggcgacccattcgatgaatctactt

SEQ ID NO: 121425 - DNA, 25 bp, Saccharomyces pastorianus
acgggttggctgctggtattcacac

SEQ ID NO: 121426 - DNA, 25 bp, Saccharomyces pastorianus
gttcaatgcatctggtttgggcagg

SEQ ID NO: 121427 - DNA, 25 bp, Saccharomyces pastorianus
atctactttccaaggtgcacaaacc

SEQ ID NO: 121428 - DNA, 25 bp, Saccharomyces pastorianus
gaatccatcaaggtgggcgacccat

SEQ ID NO: 121429 - DNA, 25 bp, Saccharomyces pastorianus
ttaagccaactgtctttggtgacgt

SEQ ID NO: 121430 - DNA, 25 bp, Saccharomyces pastorianus
atctctgaaactggtatcacctccg

SEQ ID NO: 121431 - DNA, 25 bp, Saccharomyces pastorianus
agccaaggccttggttgctcaaggt

SEQ ID NO: 121432 - DNA, 25 bp, Saccharomyces pastorianus
aagcgaagctgtttggtacggtcca

SEQ ID NO: 121433 - DNA, 25 bp, Saccharomyces pastorianus
aatacattgctggtgctcgtccatg

SEQ ID NO: 121434 - DNA, 25 bp, Saccharomyces pastorianus
actccagaagctattgccgtctttg

SEQ ID NO: 121435 - DNA, 25 bp, Saccharomyces pastorianus
atcacctccgaacaagtcgctgata

SEQ ID NO: 121436 - DNA, 25 bp, Saccharomyces pastorianus
gtctttgaaactgctcgttccaccg

SEQ ID NO: 121437 - DNA, 25 bp, Saccharomyces pastorianus
tatcgcaagtttcatcaaggtctct

SEQ ID NO: 121438 - DNA, 25 bp, Saccharomyces pastorianus
caacgaatactctactttctccgaa

SEQ ID NO: 121439 - DNA, 25 bp, Saccharomyces pastorianus
atttccagtgctaaggtcaacttca

SEQ ID NO: 121440 - DNA, 25 bp, Saccharomyces pastorianus
tttgccatgtgccacccaaaatgaa

SEQ ID NO: 121441 - DNA, 25 bp, Saccharomyces pastorianus
aattttccaatcttctcttacttag

SEQ ID NO: 121442 - DNA, 25 bp, Saccharomyces pastorianus
tttattgccccaccgcactgaaaat

SEQ ID NO: 121443 - DNA, 25 bp, Saccharomyces pastorianus
gaatatcgaggccatccaatcagat

SEQ ID NO: 121444 - DNA, 25 bp, Saccharomyces pastorianus
gttattaagatcaggcccgtttcca

SEQ ID NO: 121445 - DNA, 25 bp, Saccharomyces pastorianus
ttccggcgcattggttctgcgataa

SEQ ID NO: 121446 - DNA, 25 bp, Saccharomyces pastorianus
agctgataacagcttctctctgctg

SEQ ID NO: 121447 - DNA, 25 bp, Saccharomyces pastorianus
ttgctgctacttcttacgctttctt

SEQ ID NO: 121448 - DNA, 25 bp, Saccharomyces pastorianus
aagaagccggcctttgctgctactt

SEQ ID NO: 121449 - DNA, 25 bp, Saccharomyces pastorianus
tttcttcttccgcaatttttcagtg

SEQ ID NO: 121450 - DNA, 25 bp, Saccharomyces pastorianus
gcttctctctgctgattggacgtgg

SEQ ID NO: 121451 - DNA, 25 bp, Saccharomyces pastorianus
ctgaaaatgcatgggccggttccgg

SEQ ID NO: 121452 - DNA, 25 bp, Saccharomyces pastorianus
atgacattccatcttgggtggacaa

SEQ ID NO: 121453 - DNA, 25 bp, Saccharomyces pastorianus
ttcaagacgagatgcataagtattc

SEQ ID NO: 121454 - DNA, 25 bp, Saccharomyces pastorianus
gggcgacagtatttcaagacgagat

SEQ ID NO: 121455 - DNA, 25 bp, Saccharomyces pastorianus
attccatcttgggtggacaatttta

SEQ ID NO: 121456 - DNA, 25 bp, Saccharomyces pastorianus
gacagtatttcaagacgagatgcat

SEQ ID NO: 121457 - DNA, 25 bp, Saccharomyces pastorianus
gggtggacaattttatggtataatc

SEQ ID NO: 121458 - DNA, 25 bp, Saccharomyces pastorianus
tatggtataatcaagcgtatttaga

SEQ ID NO: 121459 - DNA, 25 bp, Saccharomyces pastorianus
agtttgggcgacagtatttcaagac

SEQ ID NO: 121460 - DNA, 25 bp, Saccharomyces pastorianus
ttcatcctcaatcccgcgatgctaa

SEQ ID NO: 121461 - DNA, 25 bp, Saccharomyces pastorianus
ataagtattctcttcatcctcaatc

SEQ ID NO: 121462 - DNA, 25 bp, Saccharomyces pastorianus
agcgtatttagaagtttgggcgaca

SEQ ID NO: 121463 - DNA, 25 bp, Saccharomyces pastorianus
gatactgcttttgtactcagctgca

SEQ ID NO: 121464 - DNA, 25 bp, Saccharomyces pastorianus
aatgacggaggtgccaagcctttga

SEQ ID NO: 121465 - DNA, 25 bp, Saccharomyces pastorianus
gacaggtttccttctaagccataca

SEQ ID NO: 121466 - DNA, 25 bp, Saccharomyces pastorianus
ttccggccgctacaataatgcttag

SEQ ID NO: 121467 - DNA, 25 bp, Saccharomyces pastorianus
gaactatattgattgctacggcccc

SEQ ID NO: 121468 - DNA, 25 bp, Saccharomyces pastorianus
atgcttagtgactcgatgccacacg

SEQ ID NO: 121469 - DNA, 25 bp, Saccharomyces pastorianus
ggacttggcatttttgtcgcagcaa

SEQ ID NO: 121470 - DNA, 25 bp, Saccharomyces pastorianus
tcgttgttcgtggtacatgggcatc

SEQ ID NO: 121471 - DNA, 25 bp, Saccharomyces pastorianus
gatgacagctttcacagtcggaact

SEQ ID NO: 121472 - DNA, 25 bp, Saccharomyces pastorianus
ggtcttgcagcctctttggttaata

SEQ ID NO: 121473 - DNA, 25 bp, Saccharomyces pastorianus
ggattttgtgcagccgtgacgacag

SEQ ID NO: 121474 - DNA, 25 bp, Saccharomyces pastorianus
tatcctttcaaaggcttggcacctc

SEQ ID NO: 121475 - DNA, 25 bp, Saccharomyces pastorianus
tcgatatcgaatagtttaccaccgt

SEQ ID NO: 121476 - DNA, 25 bp, Saccharomyces pastorianus
aagaccttggtgttcgtgtggcatc

SEQ ID NO: 121477 - DNA, 25 bp, Saccharomyces pastorianus
taagcattattgtagcggccggaaa

SEQ ID NO: 121478 - DNA, 25 bp, Saccharomyces pastorianus
atgcccatgtaccacgaacaacgat

SEQ ID NO: 121479 - DNA, 25 bp, Saccharomyces pastorianus
ctgcaatacccaaacctatcgatat

SEQ ID NO: 121480 - DNA, 25 bp, Saccharomyces pastorianus
gtgtggcatcgagtcactaagcatt

SEQ ID NO: 121481 - DNA, 25 bp, Saccharomyces pastorianus
aaatgctgcttttcggagatccttt

SEQ ID NO: 121482 - DNA, 25 bp, Saccharomyces pastorianus
cctccgtcatttactctagattcaa

SEQ ID NO: 121483 - DNA, 25 bp, Saccharomyces pastorianus
gacaaaaatgccaagtccgctcaac

SEQ ID NO: 121484 - DNA, 25 bp, Saccharomyces pastorianus
aaagtgctccatgcatacgttgctg

SEQ ID NO: 121485 - DNA, 25 bp, Saccharomyces pastorianus
tggcggccgttcatgaatcaccaaa

SEQ ID NO: 121486 - DNA, 25 bp, Saccharomyces pastorianus
gatatcggcaacactgcgctatcag

SEQ ID NO: 121487 - DNA, 25 bp, Saccharomyces pastorianus
aaactgcttcttgaggattccatga

SEQ ID NO: 121488 - DNA, 25 bp, Saccharomyces pastorianus
tgaaactactcacctactcgatatt

SEQ ID NO: 121489 - DNA, 25 bp, Saccharomyces pastorianus
atttagtcgcgttagcacacctgat

SEQ ID NO: 121490 - DNA, 25 bp, Saccharomyces pastorianus
gctatcagcagcatacgctcttgta

SEQ ID NO: 121491 - DNA, 25 bp, Saccharomyces pastorianus
aagtctttcacatgttgctactgcc

SEQ ID NO: 121492 - DNA, 25 bp, Saccharomyces pastorianus
ggtgatatatgcctctctttgtata

SEQ ID NO: 121493 - DNA, 25 bp, Saccharomyces pastorianus
tgattccccaagacagcgtgaacgc

SEQ ID NO: 121494 - DNA, 25 bp, Saccharomyces pastorianus
attctcggtacacatattgcttttg

SEQ ID NO: 121495 - DNA, 25 bp, Saccharomyces pastorianus
cacatccgtttttgtcgttgaccaa

SEQ ID NO: 121496 - DNA, 25 bp, Saccharomyces pastorianus
tacagcttcacatctacaacacaat

SEQ ID NO: 121497 - DNA, 25 bp, Saccharomyces pastorianus
agtggctcattatctgtggtttgct

SEQ ID NO: 121498 - DNA, 25 bp, Saccharomyces pastorianus
tggaagtcccatcattaacccctag

SEQ ID NO: 121499 - DNA, 25 bp, Saccharomyces pastorianus
aagtctgccaatccacttggttttg

SEQ ID NO: 121500 - DNA, 25 bp, Saccharomyces pastorianus
ttatctgtggtttgctgtggacctc

SEQ ID NO: 121501 - DNA, 25 bp, Saccharomyces pastorianus
aagcggctgaattgagtggctcatt

SEQ ID NO: 121502 - DNA, 25 bp, Saccharomyces pastorianus
gtggacctcctatttttgttgacaa

SEQ ID NO: 121503 - DNA, 25 bp, Saccharomyces pastorianus
ggcggccaaatgttaaggaacttct

SEQ ID NO: 121504 - DNA, 25 bp, Saccharomyces pastorianus
ggaacttctacatgaagcggctgaa

SEQ ID NO: 121505 - DNA, 25 bp, Saccharomyces pastorianus
ttgttttccattgcgggcggccaaa

SEQ ID NO: 121506 - DNA, 25 bp, Saccharomyces pastorianus
aaggcactgttgtggcaactacttt

SEQ ID NO: 121507 - DNA, 25 bp, Saccharomyces pastorianus
atttctttcctgttaagcttatatc

SEQ ID NO: 121508 - DNA, 25 bp, Saccharomyces pastorianus
taagcttatatcagcactaacaaac

SEQ ID NO: 121509 - DNA, 25 bp, Saccharomyces pastorianus
gtctttattcatttctttcctgtta

SEQ ID NO: 121510 - DNA, 25 bp, Saccharomyces pastorianus
atgccttcgagaatatgtctttatt

SEQ ID NO: 121511 - DNA, 25 bp, Saccharomyces pastorianus
atatgccttcgagaatatgtcttta

SEQ ID NO: 121512 - DNA, 25 bp, Saccharomyces pastorianus
aactatatgccttcgagaatatgtc

SEQ ID NO: 121513 - DNA, 25 bp, Saccharomyces pastorianus
gagatacttcaactatatgccttcg

SEQ ID NO: 121514 - DNA, 25 bp, Saccharomyces pastorianus
atgtctttattcatttctttcctgt

SEQ ID NO: 121515 - DNA, 25 bp, Saccharomyces pastorianus
acttcaactatatgccttcgagaat

SEQ ID NO: 121516 - DNA, 25 bp, Saccharomyces pastorianus
attcatttctttcctgttaagctta

SEQ ID NO: 121517 - DNA, 25 bp, Saccharomyces pastorianus
gatacttcaactatatgccttcgag

SEQ ID NO: 121518 - DNA, 25 bp, Saccharomyces pastorianus
gacatggtgctctatttgactatcc

SEQ ID NO: 121519 - DNA, 25 bp, Saccharomyces pastorianus
ggctgggatgaacattacttgccaa

SEQ ID NO: 121520 - DNA, 25 bp, Saccharomyces pastorianus
agtggacttcgtttctgagactggt

SEQ ID NO: 121521 - DNA, 25 bp, Saccharomyces pastorianus
gaccgctccttttcgatggattaat

SEQ ID NO: 121522 - DNA, 25 bp, Saccharomyces pastorianus
aaatgaagtcaacgccagcgactat

SEQ ID NO: 121523 - DNA, 25 bp, Saccharomyces pastorianus
gggtgttaacgcaaattcttcctat

SEQ ID NO: 121524 - DNA, 25 bp, Saccharomyces pastorianus
aaagcatggtttcgaagtggacttc

SEQ ID NO: 121525 - DNA, 25 bp, Saccharomyces pastorianus
gccctgggagttgacgacatcttga

SEQ ID NO: 121526 - DNA, 25 bp, Saccharomyces pastorianus
taaggcgttagcgaggatcaagacc

SEQ ID NO: 121527 - DNA, 25 bp, Saccharomyces pastorianus
atccctgggatgactactctattac

SEQ ID NO: 121528 - DNA, 25 bp, Saccharomyces pastorianus
tctttgcatctgctggacatggtgc

SEQ ID NO: 121529 - DNA, 25 bp, Saccharomyces pastorianus
ggcactttgagtaccattagcacgt

SEQ ID NO: 121530 - DNA, 25 bp, Saccharomyces pastorianus
tggtgataactctcggatcctatgc

SEQ ID NO: 121531 - DNA, 25 bp, Saccharomyces pastorianus
ggcaaacgttttcgccactttattg

SEQ ID NO: 121532 - DNA, 25 bp, Saccharomyces pastorianus
gaattttcgctggtttcctaagata

SEQ ID NO: 121533 - DNA, 25 bp, Saccharomyces pastorianus
gattggcatatttaccatggtgcaa

SEQ ID NO: 121534 - DNA, 25 bp, Saccharomyces pastorianus
tattttgtttgtggtgctgtgtgcg

SEQ ID NO: 121535 - DNA, 25 bp, Saccharomyces pastorianus
gggcaagtggacactaccatgtcta

SEQ ID NO: 121536 - DNA, 25 bp, Saccharomyces pastorianus
tttccattgggtactttcttggcaa

SEQ ID NO: 121537 - DNA, 25 bp, Saccharomyces pastorianus
attgtttctgcgttaatatccggat

SEQ ID NO: 121538 - DNA, 25 bp, Saccharomyces pastorianus
atatccggattttgcggcactttga

SEQ ID NO: 121539 - DNA, 25 bp, Saccharomyces pastorianus
cacttttctacggacgttccaattg

SEQ ID NO: 121540 - DNA, 25 bp, Saccharomyces pastorianus
aagaatgtcgaaacggctcgctcca

SEQ ID NO: 121541 - DNA, 25 bp, Saccharomyces pastorianus
ggattgaactaaattaccgttgtga

SEQ ID NO: 121542 - DNA, 25 bp, Saccharomyces pastorianus
gctcgctccactatcgatggtttaa

SEQ ID NO: 121543 - DNA, 25 bp, Saccharomyces pastorianus
gggcccatctccaatgggtatgact

SEQ ID NO: 121544 - DNA, 25 bp, Saccharomyces pastorianus
tggaacccactttgatgaatctcga

SEQ ID NO: 121545 - DNA, 25 bp, Saccharomyces pastorianus
gataacacaacttccagcgacttaa

SEQ ID NO: 121546 - DNA, 25 bp, Saccharomyces pastorianus
tgaagtttgttacactccttcctgg

SEQ ID NO: 121547 - DNA, 25 bp, Saccharomyces pastorianus
gaaccaggttcccacaatgagggat

SEQ ID NO: 121548 - DNA, 25 bp, Saccharomyces pastorianus
ggtttaattgaatctctagggtgga

SEQ ID NO: 121549 - DNA, 25 bp, Saccharomyces pastorianus
atgggtatgactgaaccaggttccc

SEQ ID NO: 121550 - DNA, 25 bp, Saccharomyces pastorianus
ctcgacaaaggttggttattaacag

SEQ ID NO: 121551 - DNA, 25 bp, Saccharomyces pastorianus
aaggttggcctctggatgaaaatgg

SEQ ID NO: 121552 - DNA, 25 bp, Saccharomyces pastorianus
taggtacctagtgagcgggataaac

SEQ ID NO: 121553 - DNA, 25 bp, Saccharomyces pastorianus
gaatccatatcgactataggtacct

SEQ ID NO: 121554 - DNA, 25 bp, Saccharomyces pastorianus
gggataaacaggacttacattgctc

SEQ ID NO: 121555 - DNA, 25 bp, Saccharomyces pastorianus
ggaagtcggatttgatgccacgcaa

SEQ ID NO: 121556 - DNA, 25 bp, Saccharomyces pastorianus
taaccagtacctaggcttaccagca

SEQ ID NO: 121557 - DNA, 25 bp, Saccharomyces pastorianus
ttacattgctcctgatcctaacaac

SEQ ID NO: 121558 - DNA, 25 bp, Saccharomyces pastorianus
gcttgtccttaaatttgctccatta

SEQ ID NO: 121559 - DNA, 25 bp, Saccharomyces pastorianus
agcatttgatgagcttgtccttaaa

SEQ ID NO: 121560 - DNA, 25 bp, Saccharomyces pastorianus
ggaaacctagttgaagatcagctaa

SEQ ID NO: 121561 - DNA, 25 bp, Saccharomyces pastorianus
aatatgtgagcccataccaggcctt

SEQ ID NO: 121562 - DNA, 25 bp, Saccharomyces pastorianus
ggattgcagaagctcctaacctgaa

SEQ ID NO: 121563 - DNA, 25 bp, Saccharomyces pastorianus
ttctaacgtcgtttctgtcgcagag

SEQ ID NO: 121564 - DNA, 25 bp, Saccharomyces pastorianus
tggcgtcggttcagaccatgtcgat

SEQ ID NO: 121565 - DNA, 25 bp, Saccharomyces pastorianus
tgagccaacctcaacggtagacagg

SEQ ID NO: 121566 - DNA, 25 bp, Saccharomyces pastorianus
aacctgaagctctgtgtaaccgctg

SEQ ID NO: 121567 - DNA, 25 bp, Saccharomyces pastorianus
gttttgctggttctttacgaaggtg

SEQ ID NO: 121568 - DNA, 25 bp, Saccharomyces pastorianus
tcacggtcaccgaagttactggttc

SEQ ID NO: 121569 - DNA, 25 bp, Saccharomyces pastorianus
gaaattgtcattactacgccctttt

SEQ ID NO: 121570 - DNA, 25 bp, Saccharomyces pastorianus
cagggatacgagttggttactacca

SEQ ID NO: 121571 - DNA, 25 bp, Saccharomyces pastorianus
gcagagcacgttatggccacaattt

SEQ ID NO: 121572 - DNA, 25 bp, Saccharomyces pastorianus
gttactaccattgacaaggaccctg

SEQ ID NO: 121573 - DNA, 25 bp, Saccharomyces pastorianus
ttaccatcaactgtccattgcacaa

SEQ ID NO: 121574 - DNA, 25 bp, Saccharomyces pastorianus
agtctggtaaattggctggctatgg

SEQ ID NO: 121575 - DNA, 25 bp, Saccharomyces pastorianus
agtggcacatctctggatgctcaaa

SEQ ID NO: 121576 - DNA, 25 bp, Saccharomyces pastorianus
aaaagaccatccctggaggactatg

SEQ ID NO: 121577 - DNA, 25 bp, Saccharomyces pastorianus
gttactgtactacgactaccaggaa

SEQ ID NO: 121578 - DNA, 25 bp, Saccharomyces pastorianus
gttgctcagtcagatgttgttacca

SEQ ID NO: 121579 - DNA, 25 bp, Saccharomyces pastorianus
gttgccgaggcagtcaagtctggta

SEQ ID NO: 121580 - DNA, 25 bp, Saccharomyces pastorianus
gaacgaggccagcaagcttttcaat

SEQ ID NO: 121581 - DNA, 25 bp, Saccharomyces pastorianus
aaagtttgattaccgtccacaggat

SEQ ID NO: 121582 - DNA, 25 bp, Saccharomyces pastorianus
taccgctagaggtgctatttgtgtc

SEQ ID NO: 121583 - DNA, 25 bp, Saccharomyces pastorianus
ggtgcatacttggtgaataccgcta

SEQ ID NO: 121584 - DNA, 25 bp, Saccharomyces pastorianus
aacttccttcggtatgttcctacat

SEQ ID NO: 121585 - DNA, 25 bp, Saccharomyces pastorianus
tcttttaggttttcttgtggcctcg

SEQ ID NO: 121586 - DNA, 25 bp, Saccharomyces pastorianus
ggtgaaatatacgtatcggccgccc

SEQ ID NO: 121587 - DNA, 25 bp, Saccharomyces pastorianus
ttcgccctttgttccatttcatcat

SEQ ID NO: 121588 - DNA, 25 bp, Saccharomyces pastorianus
tagctccgctaaagccttctttgaa

SEQ ID NO: 121589 - DNA, 25 bp, Saccharomyces pastorianus
atcgatctggatactgggtgttccg

SEQ ID NO: 121590 - DNA, 25 bp, Saccharomyces pastorianus
aagctttaggtgcatctggccaact

SEQ ID NO: 121591 - DNA, 25 bp, Saccharomyces pastorianus
atttcatcattcttcacctggttct

SEQ ID NO: 121592 - DNA, 25 bp, Saccharomyces pastorianus
gaggacgaggtcttcacttggcttt

SEQ ID NO: 121593 - DNA, 25 bp, Saccharomyces pastorianus
gaaacaactcattgcttctaagcca

SEQ ID NO: 121594 - DNA, 25 bp, Saccharomyces pastorianus
acctggttctgtatttgtatgtcac

SEQ ID NO: 121595 - DNA, 25 bp, Saccharomyces pastorianus
atgagagtatcctgtctagaccctt

SEQ ID NO: 121596 - DNA, 25 bp, Saccharomyces pastorianus
aactgaaggctatcttatcttggga

SEQ ID NO: 121597 - DNA, 25 bp, Saccharomyces pastorianus
gggtgctcatatttgtcgtgagttt

SEQ ID NO: 121598 - DNA, 25 bp, Saccharomyces pastorianus
tatcgggttgtctgtgcatgagcac

SEQ ID NO: 121599 - DNA, 25 bp, Saccharomyces pastorianus
gagacggcactaccatggaagaaat

SEQ ID NO: 121600 - DNA, 25 bp, Saccharomyces pastorianus
ttcaagcctcagttggagaatttca

SEQ ID NO: 121601 - DNA, 25 bp, Saccharomyces pastorianus
gatttctaccaatacttcaagcctc

SEQ ID NO: 121602 - DNA, 25 bp, Saccharomyces pastorianus
gcacggtgtcttgagagacggcact

SEQ ID NO: 121603 - DNA, 25 bp, Saccharomyces pastorianus
tacaggcgactatggtgctgagcca

SEQ ID NO: 121604 - DNA, 25 bp, Saccharomyces pastorianus
gtctagacccttctatatcgggttg

SEQ ID NO: 121605 - DNA, 25 bp, Saccharomyces pastorianus
tgggtttgaaaccattcctaacatc

SEQ ID NO: 121606 - DNA, 25 bp, Saccharomyces pastorianus
aagggtcgaatgtccactttctcta

SEQ ID NO: 121607 - DNA, 25 bp, Saccharomyces pastorianus
gataaatcgccccacattaatgtct

SEQ ID NO: 121608 - DNA, 25 bp, Saccharomyces pastorianus
gagatgggcctgaatatctgtattc

SEQ ID NO: 121609 - DNA, 25 bp, Saccharomyces pastorianus
ctgtattcactaccctgattcgtat

SEQ ID NO: 121610 - DNA, 25 bp, Saccharomyces pastorianus
ctcgttaaggatttcagcggtacaa

SEQ ID NO: 121611 - DNA, 25 bp, Saccharomyces pastorianus
tgtctctttcctatacatactgtga

SEQ ID NO: 121612 - DNA, 25 bp, Saccharomyces pastorianus
tgggtcattgggtctcttcttcaaa

SEQ ID NO: 121613 - DNA, 25 bp, Saccharomyces pastorianus
atgacgacgatttccatatccaaaa

SEQ ID NO: 121614 - DNA, 25 bp, Saccharomyces pastorianus
gatgtttccgacatatcgctatcga

SEQ ID NO: 121615 - DNA, 25 bp, Saccharomyces pastorianus
attgatgacgaactttccgccaacg

SEQ ID NO: 121616 - DNA, 25 bp, Saccharomyces pastorianus
caaagcacgttagcggttttattat

SEQ ID NO: 121617 - DNA, 25 bp, Saccharomyces pastorianus
gctgcatatttgaatgtggccgctc

SEQ ID NO: 121618 - DNA, 25 bp, Saccharomyces pastorianus
tgaaaactgaattacaaaccgctag

SEQ ID NO: 121619 - DNA, 25 bp, Saccharomyces pastorianus
gttcttagcagatcgcaaacagatg

SEQ ID NO: 121620 - DNA, 25 bp, Saccharomyces pastorianus
ggctatccgttcttcattgaaaact

SEQ ID NO: 121621 - DNA, 25 bp, Saccharomyces pastorianus
gcaaacagatgctttttatacccaa

SEQ ID NO: 121622 - DNA, 25 bp, Saccharomyces pastorianus
gctggtatatcatatgctgcatatt

SEQ ID NO: 121623 - DNA, 25 bp, Saccharomyces pastorianus
atatttgaatgtggccgctcaggct

SEQ ID NO: 121624 - DNA, 25 bp, Saccharomyces pastorianus
gaatgtggccgctcaggctatccgt

SEQ ID NO: 121625 - DNA, 25 bp, Saccharomyces pastorianus
aaaccgctagtgttcttagcagatc

SEQ ID NO: 121626 - DNA, 25 bp, Saccharomyces pastorianus
tcaggctatccgttcttcattgaaa

SEQ ID NO: 121627 - DNA, 25 bp, Saccharomyces pastorianus
tctgcctggaggaaagctggtatat

SEQ ID NO: 121628 - DNA, 25 bp, Saccharomyces pastorianus
gaaaaatctgtcgaacatctcctga

SEQ ID NO: 121629 - DNA, 25 bp, Saccharomyces pastorianus
cgcgcacaggctaagtacgatcaga

SEQ ID NO: 121630 - DNA, 25 bp, Saccharomyces pastorianus
acagcaataaccagtctccagagac

SEQ ID NO: 121631 - DNA, 25 bp, Saccharomyces pastorianus
gactattgttagcatcgcgcacagg

SEQ ID NO: 121632 - DNA, 25 bp, Saccharomyces pastorianus
gaatgttattgtccttggccatgat

SEQ ID NO: 121633 - DNA, 25 bp, Saccharomyces pastorianus
atgcgaatccaacaagtgctttatc

SEQ ID NO: 121634 - DNA, 25 bp, Saccharomyces pastorianus
gaacatctcctgaaagacgcggcaa

SEQ ID NO: 121635 - DNA, 25 bp, Saccharomyces pastorianus
ggccatctgaccaacaactgcaaat

SEQ ID NO: 121636 - DNA, 25 bp, Saccharomyces pastorianus
tcctcacggcaccttactaagtgga

SEQ ID NO: 121637 - DNA, 25 bp, Saccharomyces pastorianus
agaaagcggctcctgggccatctga

SEQ ID NO: 121638 - DNA, 25 bp, Saccharomyces pastorianus
gatacggtaattggtcctcacggca

SEQ ID NO: 121639 - DNA, 25 bp, Saccharomyces pastorianus
taatagtcaagtttgggtcccttcg

SEQ ID NO: 121640 - DNA, 25 bp, Saccharomyces pastorianus
tgccctctaggatccctatatacaa

SEQ ID NO: 121641 - DNA, 25 bp, Saccharomyces pastorianus
ccattttttgatccggagtcgccaa

SEQ ID NO: 121642 - DNA, 25 bp, Saccharomyces pastorianus
gtcaccgtagaaaacacaccgatag

SEQ ID NO: 121643 - DNA, 25 bp, Saccharomyces pastorianus
tcccttaccttatgacgaaaccgat

SEQ ID NO: 121644 - DNA, 25 bp, Saccharomyces pastorianus
gatagtaaaggttttccagactccg

SEQ ID NO: 121645 - DNA, 25 bp, Saccharomyces pastorianus
gatttccaggagagagtcgccatta

SEQ ID NO: 121646 - DNA, 25 bp, Saccharomyces pastorianus
agactccttcattacatctcggcat

SEQ ID NO: 121647 - DNA, 25 bp, Saccharomyces pastorianus
agaagaacccgattgaggcctccca

SEQ ID NO: 121648 - DNA, 25 bp, Saccharomyces pastorianus
gatactaagtagtgttcctccctta

SEQ ID NO: 121649 - DNA, 25 bp, Saccharomyces pastorianus
aatggaatcattaccggtccttgcc

SEQ ID NO: 121650 - DNA, 25 bp, Saccharomyces pastorianus
gcatctgtttgccttaagctgaact

SEQ ID NO: 121651 - DNA, 25 bp, Saccharomyces pastorianus
gattgaatgatacatcgccaagcag

SEQ ID NO: 121652 - DNA, 25 bp, Saccharomyces pastorianus
tggtggctacgaattggcaaactaa

SEQ ID NO: 121653 - DNA, 25 bp, Saccharomyces pastorianus
gatatcgtcacattccgttgtttaa

SEQ ID NO: 121654 - DNA, 25 bp, Saccharomyces pastorianus
gggtacaaggatttctgccactgaa

SEQ ID NO: 121655 - DNA, 25 bp, Saccharomyces pastorianus
ttcataccgatgacgagccgacaat

SEQ ID NO: 121656 - DNA, 25 bp, Saccharomyces pastorianus
tgccactgaagcatccactaagagt

SEQ ID NO: 121657 - DNA, 25 bp, Saccharomyces pastorianus
aatggtagtgatcctgttactgtta

SEQ ID NO: 121658 - DNA, 25 bp, Saccharomyces pastorianus
tacacagttattgcccagattgaat

SEQ ID NO: 121659 - DNA, 25 bp, Saccharomyces pastorianus
gacagcaacttaatctggcaatgtt

SEQ ID NO: 121660 - DNA, 25 bp, Saccharomyces pastorianus
gacaatgcccatctcaatcgataag

SEQ ID NO: 121661 - DNA, 25 bp, Saccharomyces pastorianus
cactgacgttgccactgggtgataa

SEQ ID NO: 121662 - DNA, 25 bp, Saccharomyces pastorianus
gaaacatagctatccacagacataa

SEQ ID NO: 121663 - DNA, 25 bp, Saccharomyces pastorianus
gatgagactataccactgacgttgc

SEQ ID NO: 121664 - DNA, 25 bp, Saccharomyces pastorianus
ggcaatgaacttcgttcaccatcaa

SEQ ID NO: 121665 - DNA, 25 bp, Saccharomyces pastorianus
gcaatgagaataatccttcccaagt

SEQ ID NO: 121666 - DNA, 25 bp, Saccharomyces pastorianus
aggatcctctcaccgatgagactat

SEQ ID NO: 121667 - DNA, 25 bp, Saccharomyces pastorianus
cacccgctaaaatttgccctgatga

SEQ ID NO: 121668 - DNA, 25 bp, Saccharomyces pastorianus
aggttacatacaggatcctctcacc

SEQ ID NO: 121669 - DNA, 25 bp, Saccharomyces pastorianus
tacccagttttataacgccgccaag

SEQ ID NO: 121670 - DNA, 25 bp, Saccharomyces pastorianus
gacacagactatgcactaaggcgaa

SEQ ID NO: 121671 - DNA, 25 bp, Saccharomyces pastorianus
aatcagcctacccagttttataacg

SEQ ID NO: 121672 - DNA, 25 bp, Saccharomyces pastorianus
atcgaccaccgtgatggacattctg

SEQ ID NO: 121673 - DNA, 25 bp, Saccharomyces pastorianus
atttcagctggcttcaaatcgacca

SEQ ID NO: 121674 - DNA, 25 bp, Saccharomyces pastorianus
agaataactttagaccgccaccaca

SEQ ID NO: 121675 - DNA, 25 bp, Saccharomyces pastorianus
gtggaatccagcgttgttagactag

SEQ ID NO: 121676 - DNA, 25 bp, Saccharomyces pastorianus
gattatccgccaatgtacaaatgtg

SEQ ID NO: 121677 - DNA, 25 bp, Saccharomyces pastorianus
catcgcctctggttttcaaattaat

SEQ ID NO: 121678 - DNA, 25 bp, Saccharomyces pastorianus
gaaggagaccgacttaggcgacaaa

SEQ ID NO: 121679 - DNA, 25 bp, Saccharomyces pastorianus
attaaccaaccaagaccaccaagag

SEQ ID NO: 121680 - DNA, 25 bp, Saccharomyces pastorianus
aagggttctatgcacgatgtcgtca

SEQ ID NO: 121681 - DNA, 25 bp, Saccharomyces pastorianus
gcaagaccaggtgactcattatact

SEQ ID NO: 121682 - DNA, 25 bp, Saccharomyces pastorianus
tagtaacactccttaccagatctca

SEQ ID NO: 121683 - DNA, 25 bp, Saccharomyces pastorianus
ctcctggacaacgttatggtgctta

SEQ ID NO: 121684 - DNA, 25 bp, Saccharomyces pastorianus
aacttcactgttttcctaggtcata

SEQ ID NO: 121685 - DNA, 25 bp, Saccharomyces pastorianus
ttcatcaccgggtatattggcctgc

SEQ ID NO: 121686 - DNA, 25 bp, Saccharomyces pastorianus
aaaatttgcttatgtcgctcctgga

SEQ ID NO: 121687 - DNA, 25 bp, Saccharomyces pastorianus
atattggcctgcctgtctatatcat

SEQ ID NO: 121688 - DNA, 25 bp, Saccharomyces pastorianus
ctgttttgtggcttggcgtacatga

SEQ ID NO: 121689 - DNA, 25 bp, Saccharomyces pastorianus
aatgctttaatactctccgtgctgt

SEQ ID NO: 121690 - DNA, 25 bp, Saccharomyces pastorianus
gtctatatcatttcttgggcaggtt

SEQ ID NO: 121691 - DNA, 25 bp, Saccharomyces pastorianus
aagcctgccgtgctcaagggattga

SEQ ID NO: 121692 - DNA, 25 bp, Saccharomyces pastorianus
gaacgtgtcttcaggatcagcaaag

SEQ ID NO: 121693 - DNA, 25 bp, Saccharomyces pastorianus
aagtctaccgacgtggatttgtaca

SEQ ID NO: 121694 - DNA, 25 bp, Saccharomyces pastorianus
aaacgttgtggctactgccgagcta

SEQ ID NO: 121695 - DNA, 25 bp, Saccharomyces pastorianus
gtgtcagttatttctcgttggttac

SEQ ID NO: 121696 - DNA, 25 bp, Saccharomyces pastorianus
tctaattccctcgatgtctttacaa

SEQ ID NO: 121697 - DNA, 25 bp, Saccharomyces pastorianus
tggttactactgttgtggcagccct

SEQ ID NO: 121698 - DNA, 25 bp, Saccharomyces pastorianus
gagagcctccaaacaaaacgttgtg

SEQ ID NO: 121699 - DNA, 25 bp, Saccharomyces pastorianus
ggtgagcagacccaaggccagcaat

SEQ ID NO: 121700 - DNA, 25 bp, Saccharomyces pastorianus
gcggtatggcagttatcgttagttc

SEQ ID NO: 121701 - DNA, 25 bp, Saccharomyces pastorianus
tacaactgccccattcgtggaagca

SEQ ID NO: 121702 - DNA, 25 bp, Saccharomyces pastorianus
gccagcaatctccacaagacgatat

SEQ ID NO: 121703 - DNA, 25 bp, Saccharomyces pastorianus
gggtatttctggattcattcaccaa

SEQ ID NO: 121704 - DNA, 25 bp, Saccharomyces pastorianus
tttctgggatgtcgtgctctttcac

SEQ ID NO: 121705 - DNA, 25 bp, Saccharomyces pastorianus
ttacctcacccaagatttaacgcag

SEQ ID NO: 121706 - DNA, 25 bp, Saccharomyces pastorianus
aagagatcaggtgacccttgaggaa

SEQ ID NO: 121707 - DNA, 25 bp, Saccharomyces pastorianus
ggaagacctatctgccatcgaagaa

SEQ ID NO: 121708 - DNA, 25 bp, Saccharomyces pastorianus
caagatgcaggaccccttgaaggtg

SEQ ID NO: 121709 - DNA, 25 bp, Saccharomyces pastorianus
tcatttacagtggtgtctgggaact

SEQ ID NO: 121710 - DNA, 25 bp, Saccharomyces pastorianus
gaaactttaagagcgttctacttga

SEQ ID NO: 121711 - DNA, 25 bp, Saccharomyces pastorianus
cagcaacttgtgtagtgggcgactc

SEQ ID NO: 121712 - DNA, 25 bp, Saccharomyces pastorianus
agacgaaaggtcttggctaccacac

SEQ ID NO: 121713 - DNA, 25 bp, Saccharomyces pastorianus
tgggcgactcgttgttcatttacag

SEQ ID NO: 121714 - DNA, 25 bp, Saccharomyces pastorianus
gtgcaaatttcttaacctggtctat

SEQ ID NO: 121715 - DNA, 25 bp, Saccharomyces pastorianus
atctcaaatcaattacctcacccaa

SEQ ID NO: 121716 - DNA, 25 bp, Saccharomyces pastorianus
ttgccggctctcaaggtcaattcga

SEQ ID NO: 121717 - DNA, 25 bp, Saccharomyces pastorianus
agatcggttatgatgccgcttccaa

SEQ ID NO: 121718 - DNA, 25 bp, Saccharomyces pastorianus
cacgttgcggctaccatgaactaat

SEQ ID NO: 121719 - DNA, 25 bp, Saccharomyces pastorianus
tagtcaccgctttgaaccctaagat

SEQ ID NO: 121720 - DNA, 25 bp, Saccharomyces pastorianus
tataagatacttagggtccgggcca

SEQ ID NO: 121721 - DNA, 25 bp, Saccharomyces pastorianus
ttcaagccagtcatgatcgccaatc

SEQ ID NO: 121722 - DNA, 25 bp, Saccharomyces pastorianus
taaacacccttgcttgttctctttt

SEQ ID NO: 121723 - DNA, 25 bp, Saccharomyces pastorianus
taagttcgaggctttggctgctcac

SEQ ID NO: 121724 - DNA, 25 bp, Saccharomyces pastorianus
ttccaaggtcgccaagaatgctcat

SEQ ID NO: 121725 - DNA, 25 bp, Saccharomyces pastorianus
ggttcctcaatcatgcctggtaaag

SEQ ID NO: 121726 - DNA, 25 bp, Saccharomyces pastorianus
tcaaaccgcccctaataagttcgag

SEQ ID NO: 121727 - DNA, 25 bp, Saccharomyces pastorianus
ctcttctaatacaatttcagcgttt

SEQ ID NO: 121728 - DNA, 25 bp, Saccharomyces pastorianus
tcccctttccgtgatgcgggtaata

SEQ ID NO: 121729 - DNA, 25 bp, Saccharomyces pastorianus
ggtgtactctcttattcgttatcat

SEQ ID NO: 121730 - DNA, 25 bp, Saccharomyces pastorianus
gatgcgggtaatactaggtccctta

SEQ ID NO: 121731 - DNA, 25 bp, Saccharomyces pastorianus
atttgctgctaaacttcttaaagag

SEQ ID NO: 121732 - DNA, 25 bp, Saccharomyces pastorianus
gtttttaaaccgatatttgctgcta

SEQ ID NO: 121733 - DNA, 25 bp, Saccharomyces pastorianus
agacagttattctcttctaatacaa

SEQ ID NO: 121734 - DNA, 25 bp, Saccharomyces pastorianus
tcatttctgaaaattcccctttccg

SEQ ID NO: 121735 - DNA, 25 bp, Saccharomyces pastorianus
agtcctcgaagatttagtagttctt

SEQ ID NO: 121736 - DNA, 25 bp, Saccharomyces pastorianus
tagtagttcttttcctttgcttttg

SEQ ID NO: 121737 - DNA, 25 bp, Saccharomyces pastorianus
gagatttgctcttctggtgtactct

SEQ ID NO: 121738 - DNA, 25 bp, Saccharomyces pastorianus
ggtaagtttccaacaaaatctcagg

SEQ ID NO: 121739 - DNA, 25 bp, Saccharomyces pastorianus
agcgttgcagccaattcacaatcaa

SEQ ID NO: 121740 - DNA, 25 bp, Saccharomyces pastorianus
ggtatattctatgactctgatggca

SEQ ID NO: 121741 - DNA, 25 bp, Saccharomyces pastorianus
agaacccgtatctgaagcgttgcag

SEQ ID NO: 121742 - DNA, 25 bp, Saccharomyces pastorianus
gggcaatcaatacttttatacctgt

SEQ ID NO: 121743 - DNA, 25 bp, Saccharomyces pastorianus
aattggcttcattggacaacctgag

SEQ ID NO: 121744 - DNA, 25 bp, Saccharomyces pastorianus
tacagttcgtcgttgcctattagaa

SEQ ID NO: 121745 - DNA, 25 bp, Saccharomyces pastorianus
tacctgttgcgtagatgttatgcca

SEQ ID NO: 121746 - DNA, 25 bp, Saccharomyces pastorianus
gaatcaggcatagactcgaacacaa

SEQ ID NO: 121747 - DNA, 25 bp, Saccharomyces pastorianus
gagcacagaactctacttcaagtga

SEQ ID NO: 121748 - DNA, 25 bp, Saccharomyces pastorianus
gagagttgtacccttatcaaatgaa

SEQ ID NO: 121749 - DNA, 25 bp, Saccharomyces pastorianus
atattgataccggtcccggacgacg

SEQ ID NO: 121750 - DNA, 25 bp, Saccharomyces pastorianus
gacgacgcggatacaccgactttta

SEQ ID NO: 121751 - DNA, 25 bp, Saccharomyces pastorianus
aagagtactcaatgtctgccgaatt

SEQ ID NO: 121752 - DNA, 25 bp, Saccharomyces pastorianus
tgccgaattgggactgccttcaata

SEQ ID NO: 121753 - DNA, 25 bp, Saccharomyces pastorianus
ggtctctaaagtatgtccctgaaaa

SEQ ID NO: 121754 - DNA, 25 bp, Saccharomyces pastorianus
ttaaatattcacacgggtctctaaa

SEQ ID NO: 121755 - DNA, 25 bp, Saccharomyces pastorianus
gaaatttcatcaatgtgtccgatta

SEQ ID NO: 121756 - DNA, 25 bp, Saccharomyces pastorianus
gaaattcactgtaaggccaaggccc

SEQ ID NO: 121757 - DNA, 25 bp, Saccharomyces pastorianus
taacgtttatacctcctgatggaaa

SEQ ID NO: 121758 - DNA, 25 bp, Saccharomyces pastorianus
caaataccctactttactacttcag

SEQ ID NO: 121759 - DNA, 25 bp, Saccharomyces pastorianus
aaggacctgtccaaatcaaatttca

SEQ ID NO: 121760 - DNA, 25 bp, Saccharomyces pastorianus
agggcttactgtcgttactttaatg

SEQ ID NO: 121761 - DNA, 25 bp, Saccharomyces pastorianus
aatgggctatgttcacgctttgacc

SEQ ID NO: 121762 - DNA, 25 bp, Saccharomyces pastorianus
aatgcgttcgtaatgggctttgcca

SEQ ID NO: 121763 - DNA, 25 bp, Saccharomyces pastorianus
agaaggctccgtttaccgtgaatgg

SEQ ID NO: 121764 - DNA, 25 bp, Saccharomyces pastorianus
gatttcctgcatcgcgggtagtaaa

SEQ ID NO: 121765 - DNA, 25 bp, Saccharomyces pastorianus
aagaggtcctgcattaagggcttac

SEQ ID NO: 121766 - DNA, 25 bp, Saccharomyces pastorianus
gtagcagacggttccttagagccta

SEQ ID NO: 121767 - DNA, 25 bp, Saccharomyces pastorianus
taaatccccgtgtcttgaagacctg

SEQ ID NO: 121768 - DNA, 25 bp, Saccharomyces pastorianus
gggactcctatgtgaaccatgattt

SEQ ID NO: 121769 - DNA, 25 bp, Saccharomyces pastorianus
catggtgccacgaagctatgcttga

SEQ ID NO: 121770 - DNA, 25 bp, Saccharomyces pastorianus
aaacttactcatcgtcatggtgcca

SEQ ID NO: 121771 - DNA, 25 bp, Saccharomyces pastorianus
atagttacctttatgtatgcggcgt

SEQ ID NO: 121772 - DNA, 25 bp, Saccharomyces pastorianus
gcatatgcggttttgacagtttcaa

SEQ ID NO: 121773 - DNA, 25 bp, Saccharomyces pastorianus
tagatatcgccattgcattgatcaa

SEQ ID NO: 121774 - DNA, 25 bp, Saccharomyces pastorianus
attagcgatgtatcccctagtgctg

SEQ ID NO: 121775 - DNA, 25 bp, Saccharomyces pastorianus
atcttgcacacaaagctgcgatcga

SEQ ID NO: 121776 - DNA, 25 bp, Saccharomyces pastorianus
ggtatttttccttgcatatgcggtt

SEQ ID NO: 121777 - DNA, 25 bp, Saccharomyces pastorianus
tgaatcaacctccaatgtgctcgaa

SEQ ID NO: 121778 - DNA, 25 bp, Saccharomyces pastorianus
gccgagttcttttcactattgcaat

SEQ ID NO: 121779 - DNA, 25 bp, Saccharomyces pastorianus
tatgcggcgtttgtttccattggat

SEQ ID NO: 121780 - DNA, 25 bp, Saccharomyces pastorianus
aaaagttcatttactccagagcata

SEQ ID NO: 121781 - DNA, 25 bp, Saccharomyces pastorianus
gaagtatgacaagctctgccgagtt

SEQ ID NO: 121782 - DNA, 25 bp, Saccharomyces pastorianus
accccatcatgctctttcgaaaatt

SEQ ID NO: 121783 - DNA, 25 bp, Saccharomyces pastorianus
gagaaagcttaccatatcaacccca

SEQ ID NO: 121784 - DNA, 25 bp, Saccharomyces pastorianus
ctagcagtgcctcatctttaatttc

SEQ ID NO: 121785 - DNA, 25 bp, Saccharomyces pastorianus
atcacgggtcctaacagcaataacg

SEQ ID NO: 121786 - DNA, 25 bp, Saccharomyces pastorianus
taccaatttggtcagcagcagtcaa

SEQ ID NO: 121787 - DNA, 25 bp, Saccharomyces pastorianus
cgcaacggcgcattacctcaatggg

SEQ ID NO: 121788 - DNA, 25 bp, Saccharomyces pastorianus
ttcaaatagcacatccattccttcg

SEQ ID NO: 121789 - DNA, 25 bp, Saccharomyces pastorianus
gataacagcgttttcagccggaata

SEQ ID NO: 121790 - DNA, 25 bp, Saccharomyces pastorianus
attaaccatggaatgttcccctcgc

SEQ ID NO: 121791 - DNA, 25 bp, Saccharomyces pastorianus
tggtgttctacccttcattaatcaa

SEQ ID NO: 121792 - DNA, 25 bp, Saccharomyces pastorianus
gagctcactctctgataacagcgtt

SEQ ID NO: 121793 - DNA, 25 bp, Saccharomyces pastorianus
acgcacgttgcgtagagcttatatc

SEQ ID NO: 121794 - DNA, 25 bp, Saccharomyces pastorianus
aaagccgactttcacgcctttggat

SEQ ID NO: 121795 - DNA, 25 bp, Saccharomyces pastorianus
gagtgggctttataaatccgtatca

SEQ ID NO: 121796 - DNA, 25 bp, Saccharomyces pastorianus
aaccttcaggttcatactatgcgtt

SEQ ID NO: 121797 - DNA, 25 bp, Saccharomyces pastorianus
aaatggctgctgataaacgcgatgc

SEQ ID NO: 121798 - DNA, 25 bp, Saccharomyces pastorianus
gatgactgtgccgatgaagccaaaa

SEQ ID NO: 121799 - DNA, 25 bp, Saccharomyces pastorianus
gagcttatatcattggccctagatc

SEQ ID NO: 121800 - DNA, 25 bp, Saccharomyces pastorianus
acgacttgccggacttcttaaatga

SEQ ID NO: 121801 - DNA, 25 bp, Saccharomyces pastorianus
caatattgacgacttgccggacttc

SEQ ID NO: 121802 - DNA, 25 bp, Saccharomyces pastorianus
ttagtcggcacagtggacgcacgtt

SEQ ID NO: 121803 - DNA, 25 bp, Saccharomyces pastorianus
ttggcgacatatcaatgagcagcat

SEQ ID NO: 121804 - DNA, 25 bp, Saccharomyces pastorianus
accactccacatggctcattgagag

SEQ ID NO: 121805 - DNA, 25 bp, Saccharomyces pastorianus
acactcaatttctttggattccaaa

SEQ ID NO: 121806 - DNA, 25 bp, Saccharomyces pastorianus
aagcgatggcaacaatgaccccgta

SEQ ID NO: 121807 - DNA, 25 bp, Saccharomyces pastorianus
gacccctattgcacttgttctgaaa

SEQ ID NO: 121808 - DNA, 25 bp, Saccharomyces pastorianus
aaggaatcatgcgagacccctattg

SEQ ID NO: 121809 - DNA, 25 bp, Saccharomyces pastorianus
ttaatatctctaagcaccactccac

SEQ ID NO: 121810 - DNA, 25 bp, Saccharomyces pastorianus
gaacacccaaatttacctcattctg

SEQ ID NO: 121811 - DNA, 25 bp, Saccharomyces pastorianus
gacgaattttctcaggacatgctct

SEQ ID NO: 121812 - DNA, 25 bp, Saccharomyces pastorianus
gacatgctcttggattattcccaca

SEQ ID NO: 121813 - DNA, 25 bp, Saccharomyces pastorianus
aatggactcgaagatttgcccttaa

SEQ ID NO: 121814 - DNA, 25 bp, Saccharomyces pastorianus
gtgcagttttttcctcgagattcaa

SEQ ID NO: 121815 - DNA, 25 bp, Saccharomyces pastorianus
gaatttaacggcaacgccgccagtg

SEQ ID NO: 121816 - DNA, 25 bp, Saccharomyces pastorianus
aaggaatctaactctgcctctgggt

SEQ ID NO: 121817 - DNA, 25 bp, Saccharomyces pastorianus
aattgctaacttttccgctatcgta

SEQ ID NO: 121818 - DNA, 25 bp, Saccharomyces pastorianus
gcatagcccggacagatcgacttat

SEQ ID NO: 121819 - DNA, 25 bp, Saccharomyces pastorianus
gcctctgggtttgcctttgcaagta

SEQ ID NO: 121820 - DNA, 25 bp, Saccharomyces pastorianus
tacccgattgtcgatgagtcagaat

SEQ ID NO: 121821 - DNA, 25 bp, Saccharomyces pastorianus
taacgatgcctttgccaatgtcgca

SEQ ID NO: 121822 - DNA, 25 bp, Saccharomyces pastorianus
tcgttttcaaacgttgctttcgagc

SEQ ID NO: 121823 - DNA, 25 bp, Saccharomyces pastorianus
gccagtgcagttgctgctgctagta

SEQ ID NO: 121824 - DNA, 25 bp, Saccharomyces pastorianus
cgacttatgccgatgacttttctca

SEQ ID NO: 121825 - DNA, 25 bp, Saccharomyces pastorianus
gaagacgaggtcttccctctttcgt

SEQ ID NO: 121826 - DNA, 25 bp, Saccharomyces pastorianus
gggctggagtcatttgggtgacttt

SEQ ID NO: 121827 - DNA, 25 bp, Saccharomyces pastorianus
ctcttttcaccggagtttctgatca

SEQ ID NO: 121828 - DNA, 25 bp, Saccharomyces pastorianus
caccggagtttctgatcaaatcgat

SEQ ID NO: 121829 - DNA, 25 bp, Saccharomyces pastorianus
ttctgatcaaatcgatcaatcttct

SEQ ID NO: 121830 - DNA, 25 bp, Saccharomyces pastorianus
ttcaccggagtttctgatcaaatcg

SEQ ID NO: 121831 - DNA, 25 bp, Saccharomyces pastorianus
cacccttcttgtaggagatctttgg

SEQ ID NO: 121832 - DNA, 25 bp, Saccharomyces pastorianus
ggagtttctgatcaaatcgatcaat

SEQ ID NO: 121833 - DNA, 25 bp, Saccharomyces pastorianus
accggagtttctgatcaaatcgatc

SEQ ID NO: 121834 - DNA, 25 bp, Saccharomyces pastorianus
cttttcaccggagtttctgatcaaa

SEQ ID NO: 121835 - DNA, 25 bp, Saccharomyces pastorianus
acccttcttgtaggagatctttggg

SEQ ID NO: 121836 - DNA, 25 bp, Saccharomyces pastorianus
agcacccttcttgtaggagatcttt

SEQ ID NO: 121837 - DNA, 25 bp, Saccharomyces pastorianus
gggctggagtcatttgggtgacttt

SEQ ID NO: 121838 - DNA, 25 bp, Saccharomyces pastorianus
gtttctgatcaaatcgatcaatctt

SEQ ID NO: 121839 - DNA, 25 bp, Saccharomyces pastorianus
atcgatcaatcttctttcatatggg

SEQ ID NO: 121840 - DNA, 25 bp, Saccharomyces pastorianus
ctcttttcaccggagtttctgatca

SEQ ID NO: 121841 - DNA, 25 bp, Saccharomyces pastorianus
cgagaggcagcaatgatgttgttca

SEQ ID NO: 121842 - DNA, 25 bp, Saccharomyces pastorianus
ttcaccggagtttctgatcaaatcg

SEQ ID NO: 121843 - DNA, 25 bp, Saccharomyces pastorianus
cacccttcttgtaggagatctttgg

SEQ ID NO: 121844 - DNA, 25 bp, Saccharomyces pastorianus
accggagtttctgatcaaatcgatc

SEQ ID NO: 121845 - DNA, 25 bp, Saccharomyces pastorianus
cttttcaccggagtttctgatcaaa

SEQ ID NO: 121846 - DNA, 25 bp, Saccharomyces pastorianus
agcacccttcttgtaggagatcttt

SEQ ID NO: 121847 - DNA, 25 bp, Saccharomyces pastorianus
aacttggttctgttggaggcagcac

SEQ ID NO: 121848 - DNA, 25 bp, Saccharomyces pastorianus
aaagaggaccactacgaatcgctaa

SEQ ID NO: 121849 - DNA, 25 bp, Saccharomyces pastorianus
ggacgcgtcactaccaaaggcagat

SEQ ID NO: 121850 - DNA, 25 bp, Saccharomyces pastorianus
gtcgatcttttcgttcatgatgcaa

SEQ ID NO: 121851 - DNA, 25 bp, Saccharomyces pastorianus
agaatcactgaactgcaagcggaaa

SEQ ID NO: 121852 - DNA, 25 bp, Saccharomyces pastorianus
gcgccgctaacgagctgattcagaa

SEQ ID NO: 121853 - DNA, 25 bp, Saccharomyces pastorianus
gaggcgcagaagctagaacacgact

SEQ ID NO: 121854 - DNA, 25 bp, Saccharomyces pastorianus
ggaaaggaccatatccaggaacaat

SEQ ID NO: 121855 - DNA, 25 bp, Saccharomyces pastorianus
acaaagagaatatcagcgccgctaa

SEQ ID NO: 121856 - DNA, 25 bp, Saccharomyces pastorianus
ggcactttttcctacaatgtcgatc

SEQ ID NO: 121857 - DNA, 25 bp, Saccharomyces pastorianus
ggagcaagtgtccacggcatcgtta

SEQ ID NO: 121858 - DNA, 25 bp, Saccharomyces pastorianus
agggcaatgatgacggcactttttc

SEQ ID NO: 121859 - DNA, 25 bp, Saccharomyces pastorianus
gatcgcttgcgcacagtacaattat

SEQ ID NO: 121860 - DNA, 25 bp, Saccharomyces pastorianus
tggccacttttgcagctgactcgaa

SEQ ID NO: 121861 - DNA, 25 bp, Saccharomyces pastorianus
gtacaattatttacgagcctccctc

SEQ ID NO: 121862 - DNA, 25 bp, Saccharomyces pastorianus
aaacaacattgcatggaggccccag

SEQ ID NO: 121863 - DNA, 25 bp, Saccharomyces pastorianus
atggaacttccttggaggaccctga

SEQ ID NO: 121864 - DNA, 25 bp, Saccharomyces pastorianus
gtctggagccactgcggatactata

SEQ ID NO: 121865 - DNA, 25 bp, Saccharomyces pastorianus
tgaggctggagccatcaccgtatga

SEQ ID NO: 121866 - DNA, 25 bp, Saccharomyces pastorianus
atgactgccaggtgctctattggga

SEQ ID NO: 121867 - DNA, 25 bp, Saccharomyces pastorianus
tggtggcgctggatccggtttaaac

SEQ ID NO: 121868 - DNA, 25 bp, Saccharomyces pastorianus
gcaatgttttgctctcgtgcggaga

SEQ ID NO: 121869 - DNA, 25 bp, Saccharomyces pastorianus
atggcatcccacaaagcgcaatgtt

SEQ ID NO: 121870 - DNA, 25 bp, Saccharomyces pastorianus
aaggatctttcgcacagactactca

SEQ ID NO: 121871 - DNA, 25 bp, Saccharomyces pastorianus
atgtgtcggttacgccataggctac

SEQ ID NO: 121872 - DNA, 25 bp, Saccharomyces pastorianus
agcaggctatcgctttatcctttaa

SEQ ID NO: 121873 - DNA, 25 bp, Saccharomyces pastorianus
tgttcaatgtgctagccatctgggc

SEQ ID NO: 121874 - DNA, 25 bp, Saccharomyces pastorianus
taattcacctatcattgcctcattt

SEQ ID NO: 121875 - DNA, 25 bp, Saccharomyces pastorianus
ggtgtttcaccttattcgcatacta

SEQ ID NO: 121876 - DNA, 25 bp, Saccharomyces pastorianus
agtactattagtcgcaattgccgtc

SEQ ID NO: 121877 - DNA, 25 bp, Saccharomyces pastorianus
ggcacccttgaatctcttcgaagaa

SEQ ID NO: 121878 - DNA, 25 bp, Saccharomyces pastorianus
acctgagtgctctatttgccggaat

SEQ ID NO: 121879 - DNA, 25 bp, Saccharomyces pastorianus
ttgccggaattctgtactgtttgtt

SEQ ID NO: 121880 - DNA, 25 bp, Saccharomyces pastorianus
aattccgacattatatacaccccta

SEQ ID NO: 121881 - DNA, 25 bp, Saccharomyces pastorianus
gctgtatgacgatagggccggtttc

SEQ ID NO: 121882 - DNA, 25 bp, Saccharomyces pastorianus
gatgctatctacttacgattttccc

SEQ ID NO: 121883 - DNA, 25 bp, Saccharomyces pastorianus
cgttccattgggtatgatgcggcta

SEQ ID NO: 121884 - DNA, 25 bp, Saccharomyces pastorianus
gattttccctatcgcttggacggaa

SEQ ID NO: 121885 - DNA, 25 bp, Saccharomyces pastorianus
atactccacgtgaagtgacgccttg

SEQ ID NO: 121886 - DNA, 25 bp, Saccharomyces pastorianus
gtgtcgcaggtaaaatcccaccaat

SEQ ID NO: 121887 - DNA, 25 bp, Saccharomyces pastorianus
attgtggcgccatgtacgaggcaat

SEQ ID NO: 121888 - DNA, 25 bp, Saccharomyces pastorianus
aaagttcgctgggatcgctatactc

SEQ ID NO: 121889 - DNA, 25 bp, Saccharomyces pastorianus
attaatgtcctcttaactcgtggcg

SEQ ID NO: 121890 - DNA, 25 bp, Saccharomyces pastorianus
aactcgtggcgtgcgtggtctgtat

SEQ ID NO: 121891 - DNA, 25 bp, Saccharomyces pastorianus
gctggtgtaattttgggccgttcca

SEQ ID NO: 121892 - DNA, 25 bp, Saccharomyces pastorianus
gtttctgtattgacgatggacccac

SEQ ID NO: 121893 - DNA, 25 bp, Saccharomyces pastorianus
atgctttattcgttctgtggcgcta

SEQ ID NO: 121894 - DNA, 25 bp, Saccharomyces pastorianus
aactttgataacaggtgcacacttg

SEQ ID NO: 121895 - DNA, 25 bp, Saccharomyces pastorianus
gtctcggtgtcactattttcactat

SEQ ID NO: 121896 - DNA, 25 bp, Saccharomyces pastorianus
gtggcgctatgggacaatgctttat

SEQ ID NO: 121897 - DNA, 25 bp, Saccharomyces pastorianus
aagagtgtacgtttccagcaatggg

SEQ ID NO: 121898 - DNA, 25 bp, Saccharomyces pastorianus
ttgatggattgaccaacgccaccca

SEQ ID NO: 121899 - DNA, 25 bp, Saccharomyces pastorianus
tgatgtttacactgaacctcttcgt

SEQ ID NO: 121900 - DNA, 25 bp, Saccharomyces pastorianus
gaacctcttcgtgatattgtggaat

SEQ ID NO: 121901 - DNA, 25 bp, Saccharomyces pastorianus
caatgggataatgccgtttctgtat

SEQ ID NO: 121902 - DNA, 25 bp, Saccharomyces pastorianus
gtagctctcttggtaagtctcggtg

SEQ ID NO: 121903 - DNA, 25 bp, Saccharomyces pastorianus
gtcattgaattctgtccgaagctta

SEQ ID NO: 121904 - DNA, 25 bp, Saccharomyces pastorianus
ttatttctgaatacgggctgcctga

SEQ ID NO: 121905 - DNA, 25 bp, Saccharomyces pastorianus
acgggctgcctgagtgttttatatc

SEQ ID NO: 121906 - DNA, 25 bp, Saccharomyces pastorianus
agacttatgcaagctgtatttccag

SEQ ID NO: 121907 - DNA, 25 bp, Saccharomyces pastorianus
ggagctacctggtgtgtattcagat

SEQ ID NO: 121908 - DNA, 25 bp, Saccharomyces pastorianus
tcagatgacgagctgctaagccaat

SEQ ID NO: 121909 - DNA, 25 bp, Saccharomyces pastorianus
gatttggccttcaactacataacat

SEQ ID NO: 121910 - DNA, 25 bp, Saccharomyces pastorianus
atgctgcccattcctagtaaaccaa

SEQ ID NO: 121911 - DNA, 25 bp, Saccharomyces pastorianus
gctctatatgtggacgcttaccgaa

SEQ ID NO: 121912 - DNA, 25 bp, Saccharomyces pastorianus
ctagacgaaatcttgcttccagcaa

SEQ ID NO: 121913 - DNA, 25 bp, Saccharomyces pastorianus
gagccctcagcttctcaagtgaaag

SEQ ID NO: 121914 - DNA, 25 bp, Saccharomyces pastorianus
gaaaaactagctgaactgactgtaa

SEQ ID NO: 121915 - DNA, 25 bp, Saccharomyces pastorianus
gagcggtcctaaattcccagatata

SEQ ID NO: 121916 - DNA, 25 bp, Saccharomyces pastorianus
gtctttggttcgagcggtcctaaat

SEQ ID NO: 121917 - DNA, 25 bp, Saccharomyces pastorianus
ggatgatgtcgattctttctcattt

SEQ ID NO: 121918 - DNA, 25 bp, Saccharomyces pastorianus
agggcccgataaacgatactcggat

SEQ ID NO: 121919 - DNA, 25 bp, Saccharomyces pastorianus
ggatggttctagattcggtattcaa

SEQ ID NO: 121920 - DNA, 25 bp, Saccharomyces pastorianus
agaggagtgcttaaaaccatcaggg

SEQ ID NO: 121921 - DNA, 25 bp, Saccharomyces pastorianus
ttcggaaatgaaccacagcttagat

SEQ ID NO: 121922 - DNA, 25 bp, Saccharomyces pastorianus
gatttttcgccggtgcacaaaagta

SEQ ID NO: 121923 - DNA, 25 bp, Saccharomyces pastorianus
tatgccattgattatgtaacccagg

SEQ ID NO: 121924 - DNA, 25 bp, Saccharomyces pastorianus
aattattccattccaacgttgttgt

SEQ ID NO: 121925 - DNA, 25 bp, Saccharomyces pastorianus
ttggatgccccagctgctatcagaa

SEQ ID NO: 121926 - DNA, 25 bp, Saccharomyces pastorianus
caaggacttgactaagttattatat

SEQ ID NO: 121927 - DNA, 25 bp, Saccharomyces pastorianus
ggatgccccagctgctatcagaact

SEQ ID NO: 121928 - DNA, 25 bp, Saccharomyces pastorianus
cggcttcagtttggacgaaccaact

SEQ ID NO: 121929 - DNA, 25 bp, Saccharomyces pastorianus
tccggcttcagtttggacgaaccaa

SEQ ID NO: 121930 - DNA, 25 bp, Saccharomyces pastorianus
tgctttgttgacttccggcttcagt

SEQ ID NO: 121931 - DNA, 25 bp, Saccharomyces pastorianus
tacaaattgttggatgccccagctg

SEQ ID NO: 121932 - DNA, 25 bp, Saccharomyces pastorianus
aaactgctttgttgacttccggctt

SEQ ID NO: 121933 - DNA, 25 bp, Saccharomyces pastorianus
tgaaactgctttgttgacttccggc

SEQ ID NO: 121934 - DNA, 25 bp, Saccharomyces pastorianus
gacttccggcttcagtttggacgaa

SEQ ID NO: 121935 - DNA, 25 bp, Saccharomyces pastorianus
agacaagactgtcaaggacttgact

SEQ ID NO: 121936 - DNA, 25 bp, Saccharomyces pastorianus
tggagtaccttctttgctttcagca

SEQ ID NO: 121937 - DNA, 25 bp, Saccharomyces pastorianus
gcatccacattatctagaccagctt

SEQ ID NO: 121938 - DNA, 25 bp, Saccharomyces pastorianus
ttcagcttcagcatcggcagaaacg

SEQ ID NO: 121939 - DNA, 25 bp, Saccharomyces pastorianus
tagttctttctcaaacgcgtctaca

SEQ ID NO: 121940 - DNA, 25 bp, Saccharomyces pastorianus
aaggatagttcacccaaggcttctg

SEQ ID NO: 121941 - DNA, 25 bp, Saccharomyces pastorianus
tacactgctgtcctttgtctttttc

SEQ ID NO: 121942 - DNA, 25 bp, Saccharomyces pastorianus
ttctgctatgtcgtcagtaggctct

SEQ ID NO: 121943 - DNA, 25 bp, Saccharomyces pastorianus
tgtagggtcgaatcctaactcagca

SEQ ID NO: 121944 - DNA, 25 bp, Saccharomyces pastorianus
aatcatctgggatcaccttcttagt

SEQ ID NO: 121945 - DNA, 25 bp, Saccharomyces pastorianus
agtaggctctttttcagcttcagca

SEQ ID NO: 121946 - DNA, 25 bp, Saccharomyces pastorianus
ggcagaaacgctcttggacttcttc

SEQ ID NO: 121947 - DNA, 25 bp, Saccharomyces pastorianus
ggcctaccttattcagagttattat

SEQ ID NO: 121948 - DNA, 25 bp, Saccharomyces pastorianus
gaactagctaaagctggtctagata

SEQ ID NO: 121949 - DNA, 25 bp, Saccharomyces pastorianus
gaagttggcctaccttattcagagt

SEQ ID NO: 121950 - DNA, 25 bp, Saccharomyces pastorianus
accagatccgtctcttctattaaaa

SEQ ID NO: 121951 - DNA, 25 bp, Saccharomyces pastorianus
gctaattccagcattcaacaagaag

SEQ ID NO: 121952 - DNA, 25 bp, Saccharomyces pastorianus
tgctgaaagcaaagaaggtactcca

SEQ ID NO: 121953 - DNA, 25 bp, Saccharomyces pastorianus
gacagcagtgtagacgcgtttgaga

SEQ ID NO: 121954 - DNA, 25 bp, Saccharomyces pastorianus
gtcaaacagactgttctttatggtc

SEQ ID NO: 121955 - DNA, 25 bp, Saccharomyces pastorianus
ggtctagataatgtggatgctgaaa

SEQ ID NO: 121956 - DNA, 25 bp, Saccharomyces pastorianus
cttcgcagaattaggtacgtccggt

SEQ ID NO: 121957 - DNA, 25 bp, Saccharomyces pastorianus
aggtactccaagtgctaattccagc

SEQ ID NO: 121958 - DNA, 25 bp, Saccharomyces pastorianus
agtaattggtgacctcggctcctgc

SEQ ID NO: 121959 - DNA, 25 bp, Saccharomyces pastorianus
acaggcatcaactcagcgaactaca

SEQ ID NO: 121960 - DNA, 25 bp, Saccharomyces pastorianus
gacaagataacgctacttccagagt

SEQ ID NO: 121961 - DNA, 25 bp, Saccharomyces pastorianus
acggcgatgctcctagaagacactc

SEQ ID NO: 121962 - DNA, 25 bp, Saccharomyces pastorianus
tcctccaactcagcaggttcaatag

SEQ ID NO: 121963 - DNA, 25 bp, Saccharomyces pastorianus
attgtacgttgccatatactccacc

SEQ ID NO: 121964 - DNA, 25 bp, Saccharomyces pastorianus
gtaaatgtcgatgcggtttctatga

SEQ ID NO: 121965 - DNA, 25 bp, Saccharomyces pastorianus
gtttacatgatcctgcgtcaagaca

SEQ ID NO: 121966 - DNA, 25 bp, Saccharomyces pastorianus
gagcttctttaacctacgccataaa

SEQ ID NO: 121967 - DNA, 25 bp, Saccharomyces pastorianus
gttctcttcagacggtttaccagta

SEQ ID NO: 121968 - DNA, 25 bp, Saccharomyces pastorianus
ggctcctgctctcaagctgatataa

SEQ ID NO: 121969 - DNA, 25 bp, Saccharomyces pastorianus
ggataggtcgattattattacaact

SEQ ID NO: 121970 - DNA, 25 bp, Saccharomyces pastorianus
ttatcgacgaagtccacatgttgga

SEQ ID NO: 121971 - DNA, 25 bp, Saccharomyces pastorianus
tgccccaatcgtcatgatggccaca

SEQ ID NO: 121972 - DNA, 25 bp, Saccharomyces pastorianus
gaagttgaactgtcatccgatgcct

SEQ ID NO: 121973 - DNA, 25 bp, Saccharomyces pastorianus
aatctccgttgctcagcaaattgca

SEQ ID NO: 121974 - DNA, 25 bp, Saccharomyces pastorianus
ggttacctctcgatcttttggatag

SEQ ID NO: 121975 - DNA, 25 bp, Saccharomyces pastorianus
gttcctggtgtattatttatcgacg

SEQ ID NO: 121976 - DNA, 25 bp, Saccharomyces pastorianus
gatggccacaaatagaggagtttcc

SEQ ID NO: 121977 - DNA, 25 bp, Saccharomyces pastorianus
tcagggcaacgttcaaatatccatt

SEQ ID NO: 121978 - DNA, 25 bp, Saccharomyces pastorianus
gcgctagatctgttaagtatgttca

SEQ ID NO: 121979 - DNA, 25 bp, Saccharomyces pastorianus
tccgatgccttagatctattgacca

SEQ ID NO: 121980 - DNA, 25 bp, Saccharomyces pastorianus
gatgatagtactgacgatgccgatg

SEQ ID NO: 121981 - DNA, 25 bp, Saccharomyces pastorianus
tagaagttgtcaacgccgacacagt

SEQ ID NO: 121982 - DNA, 25 bp, Saccharomyces pastorianus
aaaactgatttgcatctaccgaaga

SEQ ID NO: 121983 - DNA, 25 bp, Saccharomyces pastorianus
gattacgttgcctcactcaatgaat

SEQ ID NO: 121984 - DNA, 25 bp, Saccharomyces pastorianus
gatcacatcaactgggagcacatca

SEQ ID NO: 121985 - DNA, 25 bp, Saccharomyces pastorianus
gaatttcttttgagcgccatgacga

SEQ ID NO: 121986 - DNA, 25 bp, Saccharomyces pastorianus
accctttgaccttgacctgaatgag

SEQ ID NO: 121987 - DNA, 25 bp, Saccharomyces pastorianus
gacgatggcttcgaagtcactagaa

SEQ ID NO: 121988 - DNA, 25 bp, Saccharomyces pastorianus
gaagtacatggaaccctttgacctt

SEQ ID NO: 121989 - DNA, 25 bp, Saccharomyces pastorianus
aacaatctgccgaccatgatgatag

SEQ ID NO: 121990 - DNA, 25 bp, Saccharomyces pastorianus
gagaatcggcgttcttcaagctaga

SEQ ID NO: 121991 - DNA, 25 bp, Saccharomyces pastorianus
taacaatcttgattcattctccccg

SEQ ID NO: 121992 - DNA, 25 bp, Saccharomyces pastorianus
gtcttcctcgaagaatggcggcaaa

SEQ ID NO: 121993 - DNA, 25 bp, Saccharomyces pastorianus
gcatcaacaggctccctattatttt

SEQ ID NO: 121994 - DNA, 25 bp, Saccharomyces pastorianus
aggtaatcatatcgtcctttcctcc

SEQ ID NO: 121995 - DNA, 25 bp, Saccharomyces pastorianus
atagttactaccagtatcctcttcc

SEQ ID NO: 121996 - DNA, 25 bp, Saccharomyces pastorianus
gattctgctgactttcaagcacgga

SEQ ID NO: 121997 - DNA, 25 bp, Saccharomyces pastorianus
agtatcctttgaatgtgagcccctc

SEQ ID NO: 121998 - DNA, 25 bp, Saccharomyces pastorianus
gagtctgatatttcggtcaacacca

SEQ ID NO: 121999 - DNA, 25 bp, Saccharomyces pastorianus
gttttctccgtcaacgacagttgct

SEQ ID NO: 122000 - DNA, 25 bp, Saccharomyces pastorianus
ttttaccacagtatcagcaggcatt

SEQ ID NO: 122001 - DNA, 25 bp, Saccharomyces pastorianus
cgagatccatgccaagtacttcctt

SEQ ID NO: 122002 - DNA, 25 bp, Saccharomyces pastorianus
agatatagaccactcctccataata

SEQ ID NO: 122003 - DNA, 25 bp, Saccharomyces pastorianus
gtccaagatctttactttctctcga

SEQ ID NO: 122004 - DNA, 25 bp, Saccharomyces pastorianus
gtatcatcagaacacgcaatccagt

SEQ ID NO: 122005 - DNA, 25 bp, Saccharomyces pastorianus
ggtattattccagatgcgctcagtt

SEQ ID NO: 122006 - DNA, 25 bp, Saccharomyces pastorianus
aaatcgcactgcgtcatcgttacag

SEQ ID NO: 122007 - DNA, 25 bp, Saccharomyces pastorianus
gatgcgctcagtttccagaatttca

SEQ ID NO: 122008 - DNA, 25 bp, Saccharomyces pastorianus
tactctttagcagatcgtctcagca

SEQ ID NO: 122009 - DNA, 25 bp, Saccharomyces pastorianus
cgtctcagcattatgttgtcccaga

SEQ ID NO: 122010 - DNA, 25 bp, Saccharomyces pastorianus
agcagcaacccctttggtattattc

SEQ ID NO: 122011 - DNA, 25 bp, Saccharomyces pastorianus
taatcctggttctatgtcttcttca

SEQ ID NO: 122012 - DNA, 25 bp, Saccharomyces pastorianus
gggccggtgccagcgaaaactcaaa

SEQ ID NO: 122013 - DNA, 25 bp, Saccharomyces pastorianus
tttactacttgttttgtcgtgagac

SEQ ID NO: 122014 - DNA, 25 bp, Saccharomyces pastorianus
tcgagaaacaattcgctgttgttgc

SEQ ID NO: 122015 - DNA, 25 bp, Saccharomyces pastorianus
gaattttatggagagattcccagaa

SEQ ID NO: 122016 - DNA, 25 bp, Saccharomyces pastorianus
gtctacttttaatgcagaaaccgct

SEQ ID NO: 122017 - DNA, 25 bp, Saccharomyces pastorianus
gtcgtgagactacaattttacgctt

SEQ ID NO: 122018 - DNA, 25 bp, Saccharomyces pastorianus
agattcccagaatacaaagatgttg

SEQ ID NO: 122019 - DNA, 25 bp, Saccharomyces pastorianus
acgcttctgccgagtatggtcaatt

SEQ ID NO: 122020 - DNA, 25 bp, Saccharomyces pastorianus
agaaaccgctgataacttggaagat

SEQ ID NO: 122021 - DNA, 25 bp, Saccharomyces pastorianus
tccaagttacgtttgactaagtttg

SEQ ID NO: 122022 - DNA, 25 bp, Saccharomyces pastorianus
gactataactttggtactttgttga

SEQ ID NO: 122023 - DNA, 25 bp, Saccharomyces pastorianus
actttgttgaggacagacgcttctg

SEQ ID NO: 122024 - DNA, 25 bp, Saccharomyces pastorianus
atgacttcttgacttcgggccaaca

SEQ ID NO: 122025 - DNA, 25 bp, Saccharomyces pastorianus
ggcggtaacgacttccagcaacaaa

SEQ ID NO: 122026 - DNA, 25 bp, Saccharomyces pastorianus
aagggaatttccctcaacgccagca

SEQ ID NO: 122027 - DNA, 25 bp, Saccharomyces pastorianus
caatcctctaatatcggcagcggta

SEQ ID NO: 122028 - DNA, 25 bp, Saccharomyces pastorianus
gccagcagccacagtctaatctagg

SEQ ID NO: 122029 - DNA, 25 bp, Saccharomyces pastorianus
ggtggtggcacttatacccaaactt

SEQ ID NO: 122030 - DNA, 25 bp, Saccharomyces pastorianus
agacgcgatctgtctgggtcaggaa

SEQ ID NO: 122031 - DNA, 25 bp, Saccharomyces pastorianus
caaggtcgtacaagaggtgctcaaa

SEQ ID NO: 122032 - DNA, 25 bp, Saccharomyces pastorianus
aacaaactactgactacactgccgg

SEQ ID NO: 122033 - DNA, 25 bp, Saccharomyces pastorianus
gtgctcaaagtaaccgctaccaatc

SEQ ID NO: 122034 - DNA, 25 bp, Saccharomyces pastorianus
gttgcacggcaacgatcatgatgaa

SEQ ID NO: 122035 - DNA, 25 bp, Saccharomyces pastorianus
acggcgaattgcgtttgctcaacga

SEQ ID NO: 122036 - DNA, 25 bp, Saccharomyces pastorianus
attggacccaagactatttgacctt

SEQ ID NO: 122037 - DNA, 25 bp, Saccharomyces pastorianus
atggcctacaagatcccagttcgga

SEQ ID NO: 122038 - DNA, 25 bp, Saccharomyces pastorianus
agaaggtctttgacgctaacggcga

SEQ ID NO: 122039 - DNA, 25 bp, Saccharomyces pastorianus
gttcggagctagatacatctgcgtt

SEQ ID NO: 122040 - DNA, 25 bp, Saccharomyces pastorianus
attctgcaggccacaaaagtcgact

SEQ ID NO: 122041 - DNA, 25 bp, Saccharomyces pastorianus
ggaaactgctgcaagagcgtcgctt

SEQ ID NO: 122042 - DNA, 25 bp, Saccharomyces pastorianus
gaaatgggatgtcactctgcggcca

SEQ ID NO: 122043 - DNA, 25 bp, Saccharomyces pastorianus
gggtatgttcttcaactccaagcaa

SEQ ID NO: 122044 - DNA, 25 bp, Saccharomyces pastorianus
gacaccgcaacactttttggagcat

SEQ ID NO: 122045 - DNA, 25 bp, Saccharomyces pastorianus
tgccaagaaagccaacccgttgttt

SEQ ID NO: 122046 - DNA, 25 bp, Saccharomyces pastorianus
ggtgggaccaaggtcaaatagtctt

SEQ ID NO: 122047 - DNA, 25 bp, Saccharomyces pastorianus
agatgtatctagctccgaactggga

SEQ ID NO: 122048 - DNA, 25 bp, Saccharomyces pastorianus
acaacgggttggctttcttggcaag

SEQ ID NO: 122049 - DNA, 25 bp, Saccharomyces pastorianus
aagcgacgctcttgcagcagtttcc

SEQ ID NO: 122050 - DNA, 25 bp, Saccharomyces pastorianus
cagcagtttccgtgggtgggaccaa

SEQ ID NO: 122051 - DNA, 25 bp, Saccharomyces pastorianus
ggtttacgctcattaggtatagctt

SEQ ID NO: 122052 - DNA, 25 bp, Saccharomyces pastorianus
ggtatagcttcttcaacgcagatgt

SEQ ID NO: 122053 - DNA, 25 bp, Saccharomyces pastorianus
gccatccctttgactgtacattaaa

SEQ ID NO: 122054 - DNA, 25 bp, Saccharomyces pastorianus
gttggctttcttggcaagcgacgct

SEQ ID NO: 122055 - DNA, 25 bp, Saccharomyces pastorianus
ttaaatcgtcgactacttcctccag

SEQ ID NO: 122056 - DNA, 25 bp, Saccharomyces pastorianus
tccgaactgggatcttgtaggccat

SEQ ID NO: 122057 - DNA, 25 bp, Saccharomyces pastorianus
ttgacgctatgtccgtcgatgactt

SEQ ID NO: 122058 - DNA, 25 bp, Saccharomyces pastorianus
tgaaatggaagaagacgttttggtt

SEQ ID NO: 122059 - DNA, 25 bp, Saccharomyces pastorianus
tgacagagctaagtcttgcggtgtt

SEQ ID NO: 122060 - DNA, 25 bp, Saccharomyces pastorianus
cgttttggttaaccaaatcttgatg

SEQ ID NO: 122061 - DNA, 25 bp, Saccharomyces pastorianus
ctaagtcttgcggtgttgacgctat

SEQ ID NO: 122062 - DNA, 25 bp, Saccharomyces pastorianus
acatgtccatctgtatcttcggtga

SEQ ID NO: 122063 - DNA, 25 bp, Saccharomyces pastorianus
aagaccaaacatgtccatctgtatc

SEQ ID NO: 122064 - DNA, 25 bp, Saccharomyces pastorianus
catgtccatctgtatcttcggtgat

SEQ ID NO: 122065 - DNA, 25 bp, Saccharomyces pastorianus
agtcttgcggtgttgacgctatgtc

SEQ ID NO: 122066 - DNA, 25 bp, Saccharomyces pastorianus
ccaaacatgtccatctgtatcttcg

SEQ ID NO: 122067 - DNA, 25 bp, Saccharomyces pastorianus
gtgttgacgctatgtccgtcgatga

SEQ ID NO: 122068 - DNA, 25 bp, Saccharomyces pastorianus
ggacggtcccataaagttgaaggct

SEQ ID NO: 122069 - DNA, 25 bp, Saccharomyces pastorianus
tgatgaagaacccaccttccttatc

SEQ ID NO: 122070 - DNA, 25 bp, Saccharomyces pastorianus
gaccaagcccataggatcatcatat

SEQ ID NO: 122071 - DNA, 25 bp, Saccharomyces pastorianus
gaaatttctttcatggcgagtgtta

SEQ ID NO: 122072 - DNA, 25 bp, Saccharomyces pastorianus
agccacctatctacttcaacttgtg

SEQ ID NO: 122073 - DNA, 25 bp, Saccharomyces pastorianus
atgcatgtttggtgccgtagtctat

SEQ ID NO: 122074 - DNA, 25 bp, Saccharomyces pastorianus
gaagcactatctaagttccgtgaga

SEQ ID NO: 122075 - DNA, 25 bp, Saccharomyces pastorianus
cgtagtctatcttggagccacctat

SEQ ID NO: 122076 - DNA, 25 bp, Saccharomyces pastorianus
aattgccaccaagctattagaagac

SEQ ID NO: 122077 - DNA, 25 bp, Saccharomyces pastorianus
tcaacttgtgtttcttacgagagac

SEQ ID NO: 122078 - DNA, 25 bp, Saccharomyces pastorianus
tgcgaacactttagcgatttcctcc

SEQ ID NO: 122079 - DNA, 25 bp, Saccharomyces pastorianus
aagggcgtcgactctagcagcggca

SEQ ID NO: 122080 - DNA, 25 bp, Saccharomyces pastorianus
tcacttacggccaatttgcttgtat

SEQ ID NO: 122081 - DNA, 25 bp, Saccharomyces pastorianus
gttctacaattgcttcctttatcgg

SEQ ID NO: 122082 - DNA, 25 bp, Saccharomyces pastorianus
gtggttggtgctgtcctattataca

SEQ ID NO: 122083 - DNA, 25 bp, Saccharomyces pastorianus
gtgaaatactgtctctagccaagtt

SEQ ID NO: 122084 - DNA, 25 bp, Saccharomyces pastorianus
gaagtggttcattccatgtcgaatt

SEQ ID NO: 122085 - DNA, 25 bp, Saccharomyces pastorianus
gaagatggcccaattcctatcatgg

SEQ ID NO: 122086 - DNA, 25 bp, Saccharomyces pastorianus
atcagctggtaagttggcttccacc

SEQ ID NO: 122087 - DNA, 25 bp, Saccharomyces pastorianus
aaacaacactttgctcacttacggc

SEQ ID NO: 122088 - DNA, 25 bp, Saccharomyces pastorianus
caggactgttgctgtttgcacgggt

SEQ ID NO: 122089 - DNA, 25 bp, Saccharomyces pastorianus
aacatcgacacacttgtgcgcgcta

SEQ ID NO: 122090 - DNA, 25 bp, Saccharomyces pastorianus
gaagcgctctttgacactgaatgat

SEQ ID NO: 122091 - DNA, 25 bp, Saccharomyces pastorianus
tctgtctttagatatcgcctcgcaa

SEQ ID NO: 122092 - DNA, 25 bp, Saccharomyces pastorianus
catggtgctatcacggatgatccga

SEQ ID NO: 122093 - DNA, 25 bp, Saccharomyces pastorianus
gattgagattactacctgtgcttat

SEQ ID NO: 122094 - DNA, 25 bp, Saccharomyces pastorianus
tggtatcagtgttcattttgtctcc

SEQ ID NO: 122095 - DNA, 25 bp, Saccharomyces pastorianus
gtctcctcgtggacaagccaattta

SEQ ID NO: 122096 - DNA, 25 bp, Saccharomyces pastorianus
tatgcgatggtcataccgtggcgaa

SEQ ID NO: 122097 - DNA, 25 bp, Saccharomyces pastorianus
gatcaagacctttgctatcatgtta

SEQ ID NO: 122098 - DNA, 25 bp, Saccharomyces pastorianus
tgcacgcttctatattccaaatggg

SEQ ID NO: 122099 - DNA, 25 bp, Saccharomyces pastorianus
atatctgtgcgaattgcctatccat

SEQ ID NO: 122100 - DNA, 25 bp, Saccharomyces pastorianus
gtttataacatcctttgcacgcttc

SEQ ID NO: 122101 - DNA, 25 bp, Saccharomyces pastorianus
gaagcaaagggacctcctcatcgaa

SEQ ID NO: 122102 - DNA, 25 bp, Saccharomyces pastorianus
ccatgaagaaattccccacccattt

SEQ ID NO: 122103 - DNA, 25 bp, Saccharomyces pastorianus
taataatgcagcctcttctttacca

SEQ ID NO: 122104 - DNA, 25 bp, Saccharomyces pastorianus
acagcagcaagttccgatggctaca

SEQ ID NO: 122105 - DNA, 25 bp, Saccharomyces pastorianus
tcctgaaccgttactacagcagcaa

SEQ ID NO: 122106 - DNA, 25 bp, Saccharomyces pastorianus
gcaggtccaaagttcgcagccacaa

SEQ ID NO: 122107 - DNA, 25 bp, Saccharomyces pastorianus
aacttgagacaacagcagccgcagc

SEQ ID NO: 122108 - DNA, 25 bp, Saccharomyces pastorianus
taatcaagcatctgtacctccacaa

SEQ ID NO: 122109 - DNA, 25 bp, Saccharomyces pastorianus
atgagatctaatccacaacagccgc

SEQ ID NO: 122110 - DNA, 25 bp, Saccharomyces pastorianus
gcagccgcagcagcaggtccaaagt

SEQ ID NO: 122111 - DNA, 25 bp, Saccharomyces pastorianus
tggctacaaccagggctactcagta

SEQ ID NO: 122112 - DNA, 25 bp, Saccharomyces pastorianus
ttcgtcctcttcttgtatacttcct

SEQ ID NO: 122113 - DNA, 25 bp, Saccharomyces pastorianus
gttttgcaacgacaatttcatccaa

SEQ ID NO: 122114 - DNA, 25 bp, Saccharomyces pastorianus
gaacttttgacagaacctacaccag

SEQ ID NO: 122115 - DNA, 25 bp, Saccharomyces pastorianus
tggaaacagacgctccttatggaga

SEQ ID NO: 122116 - DNA, 25 bp, Saccharomyces pastorianus
aacgaggcccttgtcacaaagcaaa

SEQ ID NO: 122117 - DNA, 25 bp, Saccharomyces pastorianus
gcaacgcaccaactgctgatacaga

SEQ ID NO: 122118 - DNA, 25 bp, Saccharomyces pastorianus
aaccaaggcctgatggaacttttga

SEQ ID NO: 122119 - DNA, 25 bp, Saccharomyces pastorianus
tatacttccttcaacaccaacgagg

SEQ ID NO: 122120 - DNA, 25 bp, Saccharomyces pastorianus
gcggatctacatgataccggatttt

SEQ ID NO: 122121 - DNA, 25 bp, Saccharomyces pastorianus
ggataattcgaaacctaggccaagg

SEQ ID NO: 122122 - DNA, 25 bp, Saccharomyces pastorianus
aaaatggatatagccctgtcagaat

SEQ ID NO: 122123 - DNA, 25 bp, Saccharomyces pastorianus
tagcccagtgctgacaattcttact

SEQ ID NO: 122124 - DNA, 25 bp, Saccharomyces pastorianus
gagcaacatctctacggaacagcgt

SEQ ID NO: 122125 - DNA, 25 bp, Saccharomyces pastorianus
taggatcggatgcttccacgctaaa

SEQ ID NO: 122126 - DNA, 25 bp, Saccharomyces pastorianus
aaacggtggctgttcgtgggctact

SEQ ID NO: 122127 - DNA, 25 bp, Saccharomyces pastorianus
acccgtctcagacagcgaggtttat

SEQ ID NO: 122128 - DNA, 25 bp, Saccharomyces pastorianus
gatctctttgttggtaactgtccct

SEQ ID NO: 122129 - DNA, 25 bp, Saccharomyces pastorianus
tgtagatctacgcacgaccacaaat

SEQ ID NO: 122130 - DNA, 25 bp, Saccharomyces pastorianus
tgggctactcagacattagggccaa

SEQ ID NO: 122131 - DNA, 25 bp, Saccharomyces pastorianus
gagatatctgtccattccaacaaga

SEQ ID NO: 122132 - DNA, 25 bp, Saccharomyces pastorianus
gaacttcatgtccatgcttcaggaa

SEQ ID NO: 122133 - DNA, 25 bp, Saccharomyces pastorianus
taactgtccctctgtaaatagccca

SEQ ID NO: 122134 - DNA, 25 bp, Saccharomyces pastorianus
gattgcctttttggaaagccagtta

SEQ ID NO: 122135 - DNA, 25 bp, Saccharomyces pastorianus
tcctgcaatgggaactcctttttat

SEQ ID NO: 122136 - DNA, 25 bp, Saccharomyces pastorianus
ggaaacctttccaagcctggtagat

SEQ ID NO: 122137 - DNA, 25 bp, Saccharomyces pastorianus
aatgattattttctcctgcaatggg

SEQ ID NO: 122138 - DNA, 25 bp, Saccharomyces pastorianus
gttcacaccttaaattcgtcatcgc

SEQ ID NO: 122139 - DNA, 25 bp, Saccharomyces pastorianus
aagccagttattttgcacaacgcaa

SEQ ID NO: 122140 - DNA, 25 bp, Saccharomyces pastorianus
ttgtccaaccaattggcgacctgga

SEQ ID NO: 122141 - DNA, 25 bp, Saccharomyces pastorianus
ttcgtcatcgcggaactaaattcat

SEQ ID NO: 122142 - DNA, 25 bp, Saccharomyces pastorianus
gaaggtaacatcaacgttgtccaac

SEQ ID NO: 122143 - DNA, 25 bp, Saccharomyces pastorianus
tttgagcgatgaggtgtgttcacac

SEQ ID NO: 122144 - DNA, 25 bp, Saccharomyces pastorianus
agaccacagctatcatcatttccta

SEQ ID NO: 122145 - DNA, 25 bp, Saccharomyces pastorianus
gagaccaactcagccatgaatcgca

SEQ ID NO: 122146 - DNA, 25 bp, Saccharomyces pastorianus
ggacaacctcaaggtcaagcccaga

SEQ ID NO: 122147 - DNA, 25 bp, Saccharomyces pastorianus
taaaagaggccctatttattctcca

SEQ ID NO: 122148 - DNA, 25 bp, Saccharomyces pastorianus
gtatagcgaaactcaaaccgtcaat

SEQ ID NO: 122149 - DNA, 25 bp, Saccharomyces pastorianus
atgcacaaccacatcctcaatataa

SEQ ID NO: 122150 - DNA, 25 bp, Saccharomyces pastorianus
gtaaggcacaactgaaaaccgctga

SEQ ID NO: 122151 - DNA, 25 bp, Saccharomyces pastorianus
gaacaatgctgattcttccagtaat

SEQ ID NO: 122152 - DNA, 25 bp, Saccharomyces pastorianus
aaatgcagatggatggccccgcagt

SEQ ID NO: 122153 - DNA, 25 bp, Saccharomyces pastorianus
aatcgcaaaccgcttatcaacaagg

SEQ ID NO: 122154 - DNA, 25 bp, Saccharomyces pastorianus
tcaggagtcttggtgcttgagttgc

SEQ ID NO: 122155 - DNA, 25 bp, Saccharomyces pastorianus
ccgtcaattgaggagttctgtgcta

SEQ ID NO: 122156 - DNA, 25 bp, Saccharomyces pastorianus
ggtcttcattacactccctgtatag

SEQ ID NO: 122157 - DNA, 25 bp, Saccharomyces pastorianus
gccttgagcaacatgggtcttcatt

SEQ ID NO: 122158 - DNA, 25 bp, Saccharomyces pastorianus
aaacggaatctttggagcttacagc

SEQ ID NO: 122159 - DNA, 25 bp, Saccharomyces pastorianus
ggttttcaggttatccttacactgg

SEQ ID NO: 122160 - DNA, 25 bp, Saccharomyces pastorianus
gttgtacaccgaatggaaccttcta

SEQ ID NO: 122161 - DNA, 25 bp, Saccharomyces pastorianus
gacggcctactccatggtgtttcaa

SEQ ID NO: 122162 - DNA, 25 bp, Saccharomyces pastorianus
tggctacttgccctcaactaaaaat

SEQ ID NO: 122163 - DNA, 25 bp, Saccharomyces pastorianus
tggtgtttcaaacccttgtcaaaca

SEQ ID NO: 122164 - DNA, 25 bp, Saccharomyces pastorianus
ggaaccttctatatagccttgagca

SEQ ID NO: 122165 - DNA, 25 bp, Saccharomyces pastorianus
gcaacgaagcttttcatcctaacga

SEQ ID NO: 122166 - DNA, 25 bp, Saccharomyces pastorianus
ggtcttttatgcgatgacggcctac

SEQ ID NO: 122167 - DNA, 25 bp, Saccharomyces pastorianus
taagaaggctgtgtcgcctggtaga

SEQ ID NO: 122168 - DNA, 25 bp, Saccharomyces pastorianus
ggtgctgctgtaactactgttttaa

SEQ ID NO: 122169 - DNA, 25 bp, Saccharomyces pastorianus
aacatcttccacaaaatcgcgaacg

SEQ ID NO: 122170 - DNA, 25 bp, Saccharomyces pastorianus
gacaacgctgcattgattacactga

SEQ ID NO: 122171 - DNA, 25 bp, Saccharomyces pastorianus
gcacaaaacgacaacatcttccaca

SEQ ID NO: 122172 - DNA, 25 bp, Saccharomyces pastorianus
ttcggttcgttccttggtgctgctg

SEQ ID NO: 122173 - DNA, 25 bp, Saccharomyces pastorianus
taccaaggtgccattttcggttcgt

SEQ ID NO: 122174 - DNA, 25 bp, Saccharomyces pastorianus
aaactctgctgatggcttcgttata

SEQ ID NO: 122175 - DNA, 25 bp, Saccharomyces pastorianus
agggttcattttaccaaggtgccat

SEQ ID NO: 122176 - DNA, 25 bp, Saccharomyces pastorianus
gcaagttcaaactctgctgatggct

SEQ ID NO: 122177 - DNA, 25 bp, Saccharomyces pastorianus
ggtggtccgcttaataaaaagtcat

SEQ ID NO: 122178 - DNA, 25 bp, Saccharomyces pastorianus
agaagcagccttctcaatgcaaaag

SEQ ID NO: 122179 - DNA, 25 bp, Saccharomyces pastorianus
tgaccatttttctacattgttcaaa

SEQ ID NO: 122180 - DNA, 25 bp, Saccharomyces pastorianus
ttgtatggcaatccctagattcggt

SEQ ID NO: 122181 - DNA, 25 bp, Saccharomyces pastorianus
tagattcggtggacggctcctgcga

SEQ ID NO: 122182 - DNA, 25 bp, Saccharomyces pastorianus
cgcctttggactcctacgattgaga

SEQ ID NO: 122183 - DNA, 25 bp, Saccharomyces pastorianus
tttgccggtaactttagtgcagcag

SEQ ID NO: 122184 - DNA, 25 bp, Saccharomyces pastorianus
agctgctacacaacaaattctcgat

SEQ ID NO: 122185 - DNA, 25 bp, Saccharomyces pastorianus
tacacattggttacggactttggtt

SEQ ID NO: 122186 - DNA, 25 bp, Saccharomyces pastorianus
gaacgaatcaccgactcagttgacc

SEQ ID NO: 122187 - DNA, 25 bp, Saccharomyces pastorianus
catgcatttgggtctgtttttgaac

SEQ ID NO: 122188 - DNA, 25 bp, Saccharomyces pastorianus
gaagttttacgtgatgccatgcatt

SEQ ID NO: 122189 - DNA, 25 bp, Saccharomyces pastorianus
ctacatttctcattgcattcgcatc

SEQ ID NO: 122190 - DNA, 25 bp, Saccharomyces pastorianus
ttctgattcaccagctgtacagcaa

SEQ ID NO: 122191 - DNA, 25 bp, Saccharomyces pastorianus
gtcaataacctatacttttctacat

SEQ ID NO: 122192 - DNA, 25 bp, Saccharomyces pastorianus
atcagtggccatcggttctgtgctg

SEQ ID NO: 122193 - DNA, 25 bp, Saccharomyces pastorianus
gccatgtccagcacattcagtggat

SEQ ID NO: 122194 - DNA, 25 bp, Saccharomyces pastorianus
agctgtacagcaacacaagcttcag

SEQ ID NO: 122195 - DNA, 25 bp, Saccharomyces pastorianus
gtggattctgattcaccagctgtac

SEQ ID NO: 122196 - DNA, 25 bp, Saccharomyces pastorianus
tctcattgcattcgcatcagtggcc

SEQ ID NO: 122197 - DNA, 25 bp, Saccharomyces pastorianus
aagcttcagcttgctcatgagcagg

SEQ ID NO: 122198 - DNA, 25 bp, Saccharomyces pastorianus
atgagagcagtcactagaaacaaaa

SEQ ID NO: 122199 - DNA, 25 bp, Saccharomyces pastorianus
atcggttctgtgctgccatgtccag

SEQ ID NO: 122200 - DNA, 25 bp, Saccharomyces pastorianus
agatggtgttgcattggccactcca

SEQ ID NO: 122201 - DNA, 25 bp, Saccharomyces pastorianus
ccccattagtccctgctattttaat

SEQ ID NO: 122202 - DNA, 25 bp, Saccharomyces pastorianus
taatgacaccaatttgtcctcgctc

SEQ ID NO: 122203 - DNA, 25 bp, Saccharomyces pastorianus
agcatattcattatcagcaggtgga

SEQ ID NO: 122204 - DNA, 25 bp, Saccharomyces pastorianus
aactttctgttgatggtattcctca

SEQ ID NO: 122205 - DNA, 25 bp, Saccharomyces pastorianus
ttgtcattccgaccactgattttgc

SEQ ID NO: 122206 - DNA, 25 bp, Saccharomyces pastorianus
ggtcagggatttattgtgtcgccaa

SEQ ID NO: 122207 - DNA, 25 bp, Saccharomyces pastorianus
ctcatctcactaacctggacatttt

SEQ ID NO: 122208 - DNA, 25 bp, Saccharomyces pastorianus
acatagatggtactcagcttccgac

SEQ ID NO: 122209 - DNA, 25 bp, Saccharomyces pastorianus
gtggatctattgtttccccattagt

SEQ ID NO: 122210 - DNA, 25 bp, Saccharomyces pastorianus
gcaactcatctattgtgacccatgc

SEQ ID NO: 122211 - DNA, 25 bp, Saccharomyces pastorianus
gaaggcgatgccaatactgaagatt

SEQ ID NO: 122212 - DNA, 25 bp, Saccharomyces pastorianus
gatacagacgtcaccgacacgcaag

SEQ ID NO: 122213 - DNA, 25 bp, Saccharomyces pastorianus
gctctctccaaacttttctcaggaa

SEQ ID NO: 122214 - DNA, 25 bp, Saccharomyces pastorianus
gacgagggcgacaaaactgcacaca

SEQ ID NO: 122215 - DNA, 25 bp, Saccharomyces pastorianus
gagttgtactatgagggccctgaga

SEQ ID NO: 122216 - DNA, 25 bp, Saccharomyces pastorianus
taaacccgccgatcaaaacgctaag

SEQ ID NO: 122217 - DNA, 25 bp, Saccharomyces pastorianus
cttcccctaaaacagctatttcgca

SEQ ID NO: 122218 - DNA, 25 bp, Saccharomyces pastorianus
ttttggctcatggttttcttggttg

SEQ ID NO: 122219 - DNA, 25 bp, Saccharomyces pastorianus
gcgttaggacgcttttttggctcat

SEQ ID NO: 122220 - DNA, 25 bp, Saccharomyces pastorianus
atttcgcaagatggttctgcttttg

SEQ ID NO: 122221 - DNA, 25 bp, Saccharomyces pastorianus
gtatgaacatgctccattgaacgaa

SEQ ID NO: 122222 - DNA, 25 bp, Saccharomyces pastorianus
tgcaattgctacatctgcgggcggc

SEQ ID NO: 122223 - DNA, 25 bp, Saccharomyces pastorianus
aggactgtttacctgggcagcttgc

SEQ ID NO: 122224 - DNA, 25 bp, Saccharomyces pastorianus
gatgaacgtgtcttcaccgaaagca

SEQ ID NO: 122225 - DNA, 25 bp, Saccharomyces pastorianus
gggcagcttgcctaaggatgttaaa

SEQ ID NO: 122226 - DNA, 25 bp, Saccharomyces pastorianus
gattttgtcggcgattccctaagag

SEQ ID NO: 122227 - DNA, 25 bp, Saccharomyces pastorianus
ttgttacaacagtctgctgctgctg

SEQ ID NO: 122228 - DNA, 25 bp, Saccharomyces pastorianus
aaatgcgctcgccttggcagtcagt

SEQ ID NO: 122229 - DNA, 25 bp, Saccharomyces pastorianus
cagtcagtaatggtgcctcaagaaa

SEQ ID NO: 122230 - DNA, 25 bp, Saccharomyces pastorianus
gatcgatacgtctgttttgtaacat

SEQ ID NO: 122231 - DNA, 25 bp, Saccharomyces pastorianus
taagtctaacccctatttcaaagat

SEQ ID NO: 122232 - DNA, 25 bp, Saccharomyces pastorianus
tgcagttcgtggaggtttattacaa

SEQ ID NO: 122233 - DNA, 25 bp, Saccharomyces pastorianus
aagagtatacatttattgcaagtcg

SEQ ID NO: 122234 - DNA, 25 bp, Saccharomyces pastorianus
gaggtttcaaggtcagaacatctgt

SEQ ID NO: 122235 - DNA, 25 bp, Saccharomyces pastorianus
cataacgataacaagggcctgcaca

SEQ ID NO: 122236 - DNA, 25 bp, Saccharomyces pastorianus
gttctgcagtgattgctatttggta

SEQ ID NO: 122237 - DNA, 25 bp, Saccharomyces pastorianus
gttgcagctaacagacctttggttt

SEQ ID NO: 122238 - DNA, 25 bp, Saccharomyces pastorianus
tatctgttgcagctccgcaaccagc

SEQ ID NO: 122239 - DNA, 25 bp, Saccharomyces pastorianus
tttttacagactctccgcctaacta

SEQ ID NO: 122240 - DNA, 25 bp, Saccharomyces pastorianus
aacatctgtcaaaaagttctgcagt

SEQ ID NO: 122241 - DNA, 25 bp, Saccharomyces pastorianus
aaccagctcttgttgcagctaacag

SEQ ID NO: 122242 - DNA, 25 bp, Saccharomyces pastorianus
tgtttttgcacatgaaaccgtcccc

SEQ ID NO: 122243 - DNA, 25 bp, Saccharomyces pastorianus
ccgcctaactatgccaaggatgttt

SEQ ID NO: 122244 - DNA, 25 bp, Saccharomyces pastorianus
aatcgccgccgttgttgtcgctgtt

SEQ ID NO: 122245 - DNA, 25 bp, Saccharomyces pastorianus
tattgctgtcgattccattactctt

SEQ ID NO: 122246 - DNA, 25 bp, Saccharomyces pastorianus
aggaacatcttcttgttttacactt

SEQ ID NO: 122247 - DNA, 25 bp, Saccharomyces pastorianus
aatgacttccgctttctccatatct

SEQ ID NO: 122248 - DNA, 25 bp, Saccharomyces pastorianus
gttttacactttcttcctgtacact

SEQ ID NO: 122249 - DNA, 25 bp, Saccharomyces pastorianus
tatcgagctctccacagatacagcg

SEQ ID NO: 122250 - DNA, 25 bp, Saccharomyces pastorianus
ctgtggacccactagcaatgacttc

SEQ ID NO: 122251 - DNA, 25 bp, Saccharomyces pastorianus
attactcttctctttactcctatat

SEQ ID NO: 122252 - DNA, 25 bp, Saccharomyces pastorianus
ccggagtcatctggagtatcgagct

SEQ ID NO: 122253 - DNA, 25 bp, Saccharomyces pastorianus
agatacagcgagtttcgccttcctc

SEQ ID NO: 122254 - DNA, 25 bp, Saccharomyces pastorianus
agggcctttaggcactattgctgtc

SEQ ID NO: 122255 - DNA, 25 bp, Saccharomyces pastorianus
gattcgtggaaaaccagcatttcgt

SEQ ID NO: 122256 - DNA, 25 bp, Saccharomyces pastorianus
ccctaacctcaatatcttcttctga

SEQ ID NO: 122257 - DNA, 25 bp, Saccharomyces pastorianus
aatcttctacgggttcggcgcaaga

SEQ ID NO: 122258 - DNA, 25 bp, Saccharomyces pastorianus
gatggacgacctgactagagagtta

SEQ ID NO: 122259 - DNA, 25 bp, Saccharomyces pastorianus
gggtatctgctattttggagttcat

SEQ ID NO: 122260 - DNA, 25 bp, Saccharomyces pastorianus
ccgacaaaccagtaaagcccagatt

SEQ ID NO: 122261 - DNA, 25 bp, Saccharomyces pastorianus
agggcaacagaactcgtcgaagcaa

SEQ ID NO: 122262 - DNA, 25 bp, Saccharomyces pastorianus
accggactcggtaacaaatgatgat

SEQ ID NO: 122263 - DNA, 25 bp, Saccharomyces pastorianus
aaggagtgctgatataggtaccgac

SEQ ID NO: 122264 - DNA, 25 bp, Saccharomyces pastorianus
gaaaactgatgaacccatcctaccc

SEQ ID NO: 122265 - DNA, 25 bp, Saccharomyces pastorianus
tgaaagaaagcctacgaccatcgaa

SEQ ID NO: 122266 - DNA, 25 bp, Saccharomyces pastorianus
gttcatggaggtatatcgcccgatt

SEQ ID NO: 122267 - DNA, 25 bp, Saccharomyces pastorianus
aagcgggctggttacagacttactg

SEQ ID NO: 122268 - DNA, 25 bp, Saccharomyces pastorianus
gacccagaccctcaagtaactgatt

SEQ ID NO: 122269 - DNA, 25 bp, Saccharomyces pastorianus
tttgaactgttaaagccgcgtgcat

SEQ ID NO: 122270 - DNA, 25 bp, Saccharomyces pastorianus
gtttgtcacaatcttttcagcacca

SEQ ID NO: 122271 - DNA, 25 bp, Saccharomyces pastorianus
aacggatattcctgaaagcgggctg

SEQ ID NO: 122272 - DNA, 25 bp, Saccharomyces pastorianus
ggaacgttcttgatttttgtgctaa

SEQ ID NO: 122273 - DNA, 25 bp, Saccharomyces pastorianus
tatcgcccgatttacatgacatgaa

SEQ ID NO: 122274 - DNA, 25 bp, Saccharomyces pastorianus
gacttactgtggagtgacccagacc

SEQ ID NO: 122275 - DNA, 25 bp, Saccharomyces pastorianus
aacgggtatgatgtgtagctttgaa

SEQ ID NO: 122276 - DNA, 25 bp, Saccharomyces pastorianus
gataagatcttttgcgttcatggag

SEQ ID NO: 122277 - DNA, 25 bp, Saccharomyces pastorianus
ggaccgttttaagttcacgccatgt

SEQ ID NO: 122278 - DNA, 25 bp, Saccharomyces pastorianus
acgccatgtggcttctgttttatta

SEQ ID NO: 122279 - DNA, 25 bp, Saccharomyces pastorianus
gtacctgctgcgcaaggctagaaga

SEQ ID NO: 122280 - DNA, 25 bp, Saccharomyces pastorianus
gaggttcgattttgatgcatccaga

SEQ ID NO: 122281 - DNA, 25 bp, Saccharomyces pastorianus
gcgtaccacattccagatttgataa

SEQ ID NO: 122282 - DNA, 25 bp, Saccharomyces pastorianus
gatacaccatcaaggtacctgctgc

SEQ ID NO: 122283 - DNA, 25 bp, Saccharomyces pastorianus
tggcttcgccattccatttgcagag

SEQ ID NO: 122284 - DNA, 25 bp, Saccharomyces pastorianus
gggtactttcagaccaggtttcgat

SEQ ID NO: 122285 - DNA, 25 bp, Saccharomyces pastorianus
ggaaatctttccttttatacatcag

SEQ ID NO: 122286 - DNA, 25 bp, Saccharomyces pastorianus
tgcagagcgtgtcggcgtaccacat

SEQ ID NO: 122287 - DNA, 25 bp, Saccharomyces pastorianus
gaataattatatccctcctcctgat

SEQ ID NO: 122288 - DNA, 25 bp, Saccharomyces pastorianus
atggttcctactatgatgcagacta

SEQ ID NO: 122289 - DNA, 25 bp, Saccharomyces pastorianus
aagtattcgctatcctcattctaag

SEQ ID NO: 122290 - DNA, 25 bp, Saccharomyces pastorianus
gattccgtagtgagaaaccctattc

SEQ ID NO: 122291 - DNA, 25 bp, Saccharomyces pastorianus
ggctaccgatcctgtatttgctaga

SEQ ID NO: 122292 - DNA, 25 bp, Saccharomyces pastorianus
gggtcaaccagacttgatcattcca

SEQ ID NO: 122293 - DNA, 25 bp, Saccharomyces pastorianus
ggcttgaaggccaaacatctcacat

SEQ ID NO: 122294 - DNA, 25 bp, Saccharomyces pastorianus
caaacattttgggtcgattccgtag

SEQ ID NO: 122295 - DNA, 25 bp, Saccharomyces pastorianus
gggatgtttccttcaatggttccta

SEQ ID NO: 122296 - DNA, 25 bp, Saccharomyces pastorianus
gaatgggcccacaaagactgttcca

SEQ ID NO: 122297 - DNA, 25 bp, Saccharomyces pastorianus
gtgcaaacgaacttggctaccgatc

SEQ ID NO: 122298 - DNA, 25 bp, Saccharomyces pastorianus
tagtagcacctgagatgcccctaac

SEQ ID NO: 122299 - DNA, 25 bp, Saccharomyces pastorianus
gttccctttatgtttcggattgtct

SEQ ID NO: 122300 - DNA, 25 bp, Saccharomyces pastorianus
acatccgggatcttggtgccttgct

SEQ ID NO: 122301 - DNA, 25 bp, Saccharomyces pastorianus
ggaatggtacctcctctaatgggat

SEQ ID NO: 122302 - DNA, 25 bp, Saccharomyces pastorianus
gactgcatggaaaaatccgctccta

SEQ ID NO: 122303 - DNA, 25 bp, Saccharomyces pastorianus
gagatactctatcctaatgttccct

SEQ ID NO: 122304 - DNA, 25 bp, Saccharomyces pastorianus
taaacgcccgtgtgtcgttgagata

SEQ ID NO: 122305 - DNA, 25 bp, Saccharomyces pastorianus
ttcttggtgcttcaaatatcgcgtt

SEQ ID NO: 122306 - DNA, 25 bp, Saccharomyces pastorianus
ggcaattcccacactttaatacgtt

SEQ ID NO: 122307 - DNA, 25 bp, Saccharomyces pastorianus
ctggctaacgttctgggctttcaaa

SEQ ID NO: 122308 - DNA, 25 bp, Saccharomyces pastorianus
atggctagtgtattgcacctaccgg

SEQ ID NO: 122309 - DNA, 25 bp, Saccharomyces pastorianus
gcacctaccggcaattttaatccta

SEQ ID NO: 122310 - DNA, 25 bp, Saccharomyces pastorianus
aagcgggccatacactaactttgca

SEQ ID NO: 122311 - DNA, 25 bp, Saccharomyces pastorianus
tctttcctaggacgctttccaaatt

SEQ ID NO: 122312 - DNA, 25 bp, Saccharomyces pastorianus
ttccaaatttaacggccacgacgat

SEQ ID NO: 122313 - DNA, 25 bp, Saccharomyces pastorianus
atcagcctatcgatcccttggatga

SEQ ID NO: 122314 - DNA, 25 bp, Saccharomyces pastorianus
tccttcgatctggacgttattaaag

SEQ ID NO: 122315 - DNA, 25 bp, Saccharomyces pastorianus
aacaagtgaggatccaaccgggctc

SEQ ID NO: 122316 - DNA, 25 bp, Saccharomyces pastorianus
gcagttttacggtccaagcgggcca

SEQ ID NO: 122317 - DNA, 25 bp, Saccharomyces pastorianus
gggcctcaaacacaaacgattctaa

SEQ ID NO: 122318 - DNA, 25 bp, Saccharomyces pastorianus
aggccatgatgcgtcgcgtggtctt

SEQ ID NO: 122319 - DNA, 25 bp, Saccharomyces pastorianus
gtggtcttgcattgaactccttcga

SEQ ID NO: 122320 - DNA, 25 bp, Saccharomyces pastorianus
tagtagcgggtaatttctttcctag

SEQ ID NO: 122321 - DNA, 25 bp, Saccharomyces pastorianus
gatatgaccctgtcaaacaactttg

SEQ ID NO: 122322 - DNA, 25 bp, Saccharomyces pastorianus
ggaacccaatcgcttatggaaacgt

SEQ ID NO: 122323 - DNA, 25 bp, Saccharomyces pastorianus
gctggcctccttttttgcatattat

SEQ ID NO: 122324 - DNA, 25 bp, Saccharomyces pastorianus
agattccttatttcactctcagcat

SEQ ID NO: 122325 - DNA, 25 bp, Saccharomyces pastorianus
gttattaatgcatctgggtccccac

SEQ ID NO: 122326 - DNA, 25 bp, Saccharomyces pastorianus
gaagattcctcaaaagtctttcact

SEQ ID NO: 122327 - DNA, 25 bp, Saccharomyces pastorianus
atagtacccttatcagctggaaata

SEQ ID NO: 122328 - DNA, 25 bp, Saccharomyces pastorianus
gggtccccaccagatagagttttga

SEQ ID NO: 122329 - DNA, 25 bp, Saccharomyces pastorianus
caaagtagcaatccactcttagagg

SEQ ID NO: 122330 - DNA, 25 bp, Saccharomyces pastorianus
tccttctccgaaatagtacccttat

SEQ ID NO: 122331 - DNA, 25 bp, Saccharomyces pastorianus
atcaattttacggacttatttggcg

SEQ ID NO: 122332 - DNA, 25 bp, Saccharomyces pastorianus
gaagttctgcgtgtttctaatacta

SEQ ID NO: 122333 - DNA, 25 bp, Saccharomyces pastorianus
ggatactactgttgggattcccatt

SEQ ID NO: 122334 - DNA, 25 bp, Saccharomyces pastorianus
agaaaacccttattctctgccttcg

SEQ ID NO: 122335 - DNA, 25 bp, Saccharomyces pastorianus
tgccttcgtgaaacagctgcttata

SEQ ID NO: 122336 - DNA, 25 bp, Saccharomyces pastorianus
gtattttcttaacttactcctggat

SEQ ID NO: 122337 - DNA, 25 bp, Saccharomyces pastorianus
tatattcattgttgggctgggcgtg

SEQ ID NO: 122338 - DNA, 25 bp, Saccharomyces pastorianus
agacttggcatactggttcgccgat

SEQ ID NO: 122339 - DNA, 25 bp, Saccharomyces pastorianus
gtcactcttcgcaatcactgcaaaa

SEQ ID NO: 122340 - DNA, 25 bp, Saccharomyces pastorianus
gcttccagtacttttgtgtcgacaa

SEQ ID NO: 122341 - DNA, 25 bp, Saccharomyces pastorianus
gattcccattctttggttgtgctta

SEQ ID NO: 122342 - DNA, 25 bp, Saccharomyces pastorianus
atgtttgtctttcctatcttactga

SEQ ID NO: 122343 - DNA, 25 bp, Saccharomyces pastorianus
acctcttcaccctatttcagattat

SEQ ID NO: 122344 - DNA, 25 bp, Saccharomyces pastorianus
gtattgcgatggataagctgcttgt

SEQ ID NO: 122345 - DNA, 25 bp, Saccharomyces pastorianus
atgggattcgatcttcaaattccaa

SEQ ID NO: 122346 - DNA, 25 bp, Saccharomyces pastorianus
ttgtgtccaagaaagcccttcctaa

SEQ ID NO: 122347 - DNA, 25 bp, Saccharomyces pastorianus
taacggtgcttccaagttcaaaaat

SEQ ID NO: 122348 - DNA, 25 bp, Saccharomyces pastorianus
gttaaccctgatattagagaccata

SEQ ID NO: 122349 - DNA, 25 bp, Saccharomyces pastorianus
gaacgttaacgtcctgtattgcgat

SEQ ID NO: 122350 - DNA, 25 bp, Saccharomyces pastorianus
gtggctagatatcaaggacctcttc

SEQ ID NO: 122351 - DNA, 25 bp, Saccharomyces pastorianus
agaagctattacatccctatgggat

SEQ ID NO: 122352 - DNA, 25 bp, Saccharomyces pastorianus
acagctgacgtgaatccgattgaaa

SEQ ID NO: 122353 - DNA, 25 bp, Saccharomyces pastorianus
cgaaatgcttaacgccagaggaaca

SEQ ID NO: 122354 - DNA, 25 bp, Saccharomyces pastorianus
attcatcaatcccaatgacccgaag

SEQ ID NO: 122355 - DNA, 25 bp, Saccharomyces pastorianus
aaaaaggcagcgtaccatcgtcaac

SEQ ID NO: 122356 - DNA, 25 bp, Saccharomyces pastorianus
ttctggatatagacccttattcatc

SEQ ID NO: 122357 - DNA, 25 bp, Saccharomyces pastorianus
atttgaagccttttcatccacctaa

SEQ ID NO: 122358 - DNA, 25 bp, Saccharomyces pastorianus
ggaacacgaacatactgcaccactt

SEQ ID NO: 122359 - DNA, 25 bp, Saccharomyces pastorianus
aatgaacctctatcaccatggattt

SEQ ID NO: 122360 - DNA, 25 bp, Saccharomyces pastorianus
accatggatttcctctgccactgga

SEQ ID NO: 122361 - DNA, 25 bp, Saccharomyces pastorianus
aaaacaagtgagacgcttcagcgga

SEQ ID NO: 122362 - DNA, 25 bp, Saccharomyces pastorianus
gacaccggaagtacgttatacgaat

SEQ ID NO: 122363 - DNA, 25 bp, Saccharomyces pastorianus
agtaccatccacctcacatttaaag

SEQ ID NO: 122364 - DNA, 25 bp, Saccharomyces pastorianus
gggagaatatacctagtgaactact

SEQ ID NO: 122365 - DNA, 25 bp, Saccharomyces pastorianus
gatcttgtcgattctctattaactg

SEQ ID NO: 122366 - DNA, 25 bp, Saccharomyces pastorianus
atgaggctgatggtagctcctccca

SEQ ID NO: 122367 - DNA, 25 bp, Saccharomyces pastorianus
tatgctcagggtacaaattgctcgt

SEQ ID NO: 122368 - DNA, 25 bp, Saccharomyces pastorianus
acgttaagatctccatttgctatgc

SEQ ID NO: 122369 - DNA, 25 bp, Saccharomyces pastorianus
gcattatatcgctaccaacaggtgt

SEQ ID NO: 122370 - DNA, 25 bp, Saccharomyces pastorianus
tcaactatctacgaagatcttgtcg

SEQ ID NO: 122371 - DNA, 25 bp, Saccharomyces pastorianus
tatgcggatgcaatggagacaacgg

SEQ ID NO: 122372 - DNA, 25 bp, Saccharomyces pastorianus
attgctcaaagaattatgctcaggg

SEQ ID NO: 122373 - DNA, 25 bp, Saccharomyces pastorianus
tgatggcgtttcagtaagggtcgac

SEQ ID NO: 122374 - DNA, 25 bp, Saccharomyces pastorianus
gctatgctaaattctgcctactcaa

SEQ ID NO: 122375 - DNA, 25 bp, Saccharomyces pastorianus
ggtagctcctcccaaatatttgatg

SEQ ID NO: 122376 - DNA, 25 bp, Saccharomyces pastorianus
gaaagtactaggtccatttgccaaa

SEQ ID NO: 122377 - DNA, 25 bp, Saccharomyces pastorianus
gctagtctctaagcagaaactttcc

SEQ ID NO: 122378 - DNA, 25 bp, Saccharomyces pastorianus
atttgaaccagctttctcgagctac

SEQ ID NO: 122379 - DNA, 25 bp, Saccharomyces pastorianus
tacgactgtgtatttggatcacccc

SEQ ID NO: 122380 - DNA, 25 bp, Saccharomyces pastorianus
gtttttgccaaggaactctgatttg

SEQ ID NO: 122381 - DNA, 25 bp, Saccharomyces pastorianus
tccttacgtctatggagtggactac

SEQ ID NO: 122382 - DNA, 25 bp, Saccharomyces pastorianus
gcatgaatccacaacaacgaccaaa

SEQ ID NO: 122383 - DNA, 25 bp, Saccharomyces pastorianus
gcgggaacaccatacaatttgccat

SEQ ID NO: 122384 - DNA, 25 bp, Saccharomyces pastorianus
atttgccatgcaatttccttacgtc

SEQ ID NO: 122385 - DNA, 25 bp, Saccharomyces pastorianus
ggaatgcttttttaactatgaacca

SEQ ID NO: 122386 - DNA, 25 bp, Saccharomyces pastorianus
gaaaaacgcccaaagctacggtgtg

SEQ ID NO: 122387 - DNA, 25 bp, Saccharomyces pastorianus
agaacctctccagcggtattattca

SEQ ID NO: 122388 - DNA, 25 bp, Saccharomyces pastorianus
atcatcacaagcagactccattttc

SEQ ID NO: 122389 - DNA, 25 bp, Saccharomyces pastorianus
gaatccattcagtcgccttatttat

SEQ ID NO: 122390 - DNA, 25 bp, Saccharomyces pastorianus
gaggttgaagtcgacatcccagaac

SEQ ID NO: 122391 - DNA, 25 bp, Saccharomyces pastorianus
atatcgatactagtgctgccttgga

SEQ ID NO: 122392 - DNA, 25 bp, Saccharomyces pastorianus
aagggattgctactacctcttctaa

SEQ ID NO: 122393 - DNA, 25 bp, Saccharomyces pastorianus
agtctgaagcgcgtggcaacttgct

SEQ ID NO: 122394 - DNA, 25 bp, Saccharomyces pastorianus
acaacaacactacatccacggtcat

SEQ ID NO: 122395 - DNA, 25 bp, Saccharomyces pastorianus
gtcatcttctctggccttgcagaaa

SEQ ID NO: 122396 - DNA, 25 bp, Saccharomyces pastorianus
ttttcttcaagatcgttccaaactg

SEQ ID NO: 122397 - DNA, 25 bp, Saccharomyces pastorianus
agatttcacccgaattggccactgt

SEQ ID NO: 122398 - DNA, 25 bp, Saccharomyces pastorianus
aattggagagccatggtgccgccat

SEQ ID NO: 122399 - DNA, 25 bp, Saccharomyces pastorianus
gtacttctttgattaccttgccatc

SEQ ID NO: 122400 - DNA, 25 bp, Saccharomyces pastorianus
ttacctgttcgtcgtaaggcttact

SEQ ID NO: 122401 - DNA, 25 bp, Saccharomyces pastorianus
gggcgatatcacttggttacctgtt

SEQ ID NO: 122402 - DNA, 25 bp, Saccharomyces pastorianus
ggttacgataccatttctgttgata

SEQ ID NO: 122403 - DNA, 25 bp, Saccharomyces pastorianus
ggctacaacttcactattgggccat

SEQ ID NO: 122404 - DNA, 25 bp, Saccharomyces pastorianus
acacgcttgaagtttcaggctcctg

SEQ ID NO: 122405 - DNA, 25 bp, Saccharomyces pastorianus
attgggccatacgattacacgcttg

SEQ ID NO: 122406 - DNA, 25 bp, Saccharomyces pastorianus
gttggaccggtcaatatactctaga

SEQ ID NO: 122407 - DNA, 25 bp, Saccharomyces pastorianus
tgataaggtggtccctccattttac

SEQ ID NO: 122408 - DNA, 25 bp, Saccharomyces pastorianus
aggctcctgtatctctgcaattaca

SEQ ID NO: 122409 - DNA, 25 bp, Saccharomyces pastorianus
gctgaaatctcatctaataaaggaa

SEQ ID NO: 122410 - DNA, 25 bp, Saccharomyces pastorianus
cacctcacgctgaaatctcatctaa

SEQ ID NO: 122411 - DNA, 25 bp, Saccharomyces pastorianus
ggaagaattactttggcatgcttta

SEQ ID NO: 122412 - DNA, 25 bp, Saccharomyces pastorianus
acctcacgctgaaatctcatctaat

SEQ ID NO: 122413 - DNA, 25 bp, Saccharomyces pastorianus
ctcacgctgaaatctcatctaataa

SEQ ID NO: 122414 - DNA, 25 bp, Saccharomyces pastorianus
ttcacctcacgctgaaatctcatct

SEQ ID NO: 122415 - DNA, 25 bp, Saccharomyces pastorianus
aagaattactttggcatgctttatc

SEQ ID NO: 122416 - DNA, 25 bp, Saccharomyces pastorianus
gaattactttggcatgctttatctc

SEQ ID NO: 122417 - DNA, 25 bp, Saccharomyces pastorianus
atggttcacctcacgctgaaatctc

SEQ ID NO: 122418 - DNA, 25 bp, Saccharomyces pastorianus
attactttggcatgctttatctccg

SEQ ID NO: 122419 - DNA, 25 bp, Saccharomyces pastorianus
tggttcacctcacgctgaaatctca

SEQ ID NO: 122420 - DNA, 25 bp, Saccharomyces pastorianus
gcaagaatgctaggcgttcgtctaa

SEQ ID NO: 122421 - DNA, 25 bp, Saccharomyces pastorianus
gagaattttctatcaaaccgcagtt

SEQ ID NO: 122422 - DNA, 25 bp, Saccharomyces pastorianus
gagtatgcaattcacactgacggag

SEQ ID NO: 122423 - DNA, 25 bp, Saccharomyces pastorianus
gtgaccactgataataggcgcaata

SEQ ID NO: 122424 - DNA, 25 bp, Saccharomyces pastorianus
actgcgtcgagcacctctgaaagaa

SEQ ID NO: 122425 - DNA, 25 bp, Saccharomyces pastorianus
gatatcactacagctacaccagttg

SEQ ID NO: 122426 - DNA, 25 bp, Saccharomyces pastorianus
gggtcttccaacaccagttttgcaa

SEQ ID NO: 122427 - DNA, 25 bp, Saccharomyces pastorianus
aaccgcagttttccgatgacgttat

SEQ ID NO: 122428 - DNA, 25 bp, Saccharomyces pastorianus
aacagaatcatttgcccagcgtgaa

SEQ ID NO: 122429 - DNA, 25 bp, Saccharomyces pastorianus
tataccacgtcctgccatggcaaga

SEQ ID NO: 122430 - DNA, 25 bp, Saccharomyces pastorianus
ttaagcattgtatcgactgcgtcga

SEQ ID NO: 122431 - DNA, 25 bp, Saccharomyces pastorianus
ttttgtttgactgcctagccggaaa

SEQ ID NO: 122432 - DNA, 25 bp, Saccharomyces pastorianus
atgctcctgtatgatttgtattcta

SEQ ID NO: 122433 - DNA, 25 bp, Saccharomyces pastorianus
gttatgggcgattcgttgccaccaa

SEQ ID NO: 122434 - DNA, 25 bp, Saccharomyces pastorianus
gacatataccgctcatcattcaaac

SEQ ID NO: 122435 - DNA, 25 bp, Saccharomyces pastorianus
gactggagtcaatcctacgttgaag

SEQ ID NO: 122436 - DNA, 25 bp, Saccharomyces pastorianus
gcttcatactgaatggttcctcaaa

SEQ ID NO: 122437 - DNA, 25 bp, Saccharomyces pastorianus
gaaattccttggcatatgctcctgt

SEQ ID NO: 122438 - DNA, 25 bp, Saccharomyces pastorianus
gatggctttttgtacataactcttg

SEQ ID NO: 122439 - DNA, 25 bp, Saccharomyces pastorianus
gctattatgtctttatcggtcaacg

SEQ ID NO: 122440 - DNA, 25 bp, Saccharomyces pastorianus
tttaccacctcttttgagaaccagg

SEQ ID NO: 122441 - DNA, 25 bp, Saccharomyces pastorianus
gataagttcatcaagaccgcgacat

SEQ ID NO: 122442 - DNA, 25 bp, Saccharomyces pastorianus
ctgcccaagtactgtacgctggaat

SEQ ID NO: 122443 - DNA, 25 bp, Saccharomyces pastorianus
agaaaactgcttaactccacgattg

SEQ ID NO: 122444 - DNA, 25 bp, Saccharomyces pastorianus
gattctctcttttccactcatgagt

SEQ ID NO: 122445 - DNA, 25 bp, Saccharomyces pastorianus
tagagaaatattccccattcgaccc

SEQ ID NO: 122446 - DNA, 25 bp, Saccharomyces pastorianus
gtgttccaaagcatgatctacctcc

SEQ ID NO: 122447 - DNA, 25 bp, Saccharomyces pastorianus
gtatccaaagtatcaacagctctcg

SEQ ID NO: 122448 - DNA, 25 bp, Saccharomyces pastorianus
ttcatttcagtaatcttctcatcga

SEQ ID NO: 122449 - DNA, 25 bp, Saccharomyces pastorianus
ggagttgacattgtatacttgccaa

SEQ ID NO: 122450 - DNA, 25 bp, Saccharomyces pastorianus
atgtggccgttctaccttgaataaa

SEQ ID NO: 122451 - DNA, 25 bp, Saccharomyces pastorianus
gagtttttagtttcgctatcccatg

SEQ ID NO: 122452 - DNA, 25 bp, Saccharomyces pastorianus
aaagcgttgtgttgctgtgttccaa

SEQ ID NO: 122453 - DNA, 25 bp, Saccharomyces pastorianus
gcaacatcgcgaaagctacagcaca

SEQ ID NO: 122454 - DNA, 25 bp, Saccharomyces pastorianus
gcaacaggtcctccataatggtatc

SEQ ID NO: 122455 - DNA, 25 bp, Saccharomyces pastorianus
gaattgaggccaccagaatctcctt

SEQ ID NO: 122456 - DNA, 25 bp, Saccharomyces pastorianus
atctcatgcgatacggtcaccgaag

SEQ ID NO: 122457 - DNA, 25 bp, Saccharomyces pastorianus
aaaacctgcctgcaccaacgatggt

SEQ ID NO: 122458 - DNA, 25 bp, Saccharomyces pastorianus
atctgaggtcaacaaggcaagcgta

SEQ ID NO: 122459 - DNA, 25 bp, Saccharomyces pastorianus
tatagcggcatattcagtgacatct

SEQ ID NO: 122460 - DNA, 25 bp, Saccharomyces pastorianus
taaagcagcccaaagtccagaacat

SEQ ID NO: 122461 - DNA, 25 bp, Saccharomyces pastorianus
aaagcggtccgaagcaacaggtcct

SEQ ID NO: 122462 - DNA, 25 bp, Saccharomyces pastorianus
tgcaaacatcccatcaagtctcaaa

SEQ ID NO: 122463 - DNA, 25 bp, Saccharomyces pastorianus
gatttagctttctttccttgtactc

SEQ ID NO: 122464 - DNA, 25 bp, Saccharomyces pastorianus
tttgatctgcaacctcatcacatca

SEQ ID NO: 122465 - DNA, 25 bp, Saccharomyces pastorianus
taacgccagtagagtcgttgacttt

SEQ ID NO: 122466 - DNA, 25 bp, Saccharomyces pastorianus
agaccagtgccgactttgggcaatt

SEQ ID NO: 122467 - DNA, 25 bp, Saccharomyces pastorianus
atggcggagccacatcctaaagtct

SEQ ID NO: 122468 - DNA, 25 bp, Saccharomyces pastorianus
gtcgttgactttgatctgcaacctc

SEQ ID NO: 122469 - DNA, 25 bp, Saccharomyces pastorianus
acccactagaccagtgccgactttg

SEQ ID NO: 122470 - DNA, 25 bp, Saccharomyces pastorianus
ggagccacatcctaaagtcttgaat

SEQ ID NO: 122471 - DNA, 25 bp, Saccharomyces pastorianus
gacatcttcaataacgccagtagag

SEQ ID NO: 122472 - DNA, 25 bp, Saccharomyces pastorianus
ttgactttgatctgcaacctcatca

SEQ ID NO: 122473 - DNA, 25 bp, Saccharomyces pastorianus
cagtgccgactttgggcaatttttt

SEQ ID NO: 122474 - DNA, 25 bp, Saccharomyces pastorianus
taaagtcttgaatttgacatcttca

SEQ ID NO: 122475 - DNA, 25 bp, Saccharomyces pastorianus
cactgtcgggtgcttgttgaataca

SEQ ID NO: 122476 - DNA, 25 bp, Saccharomyces pastorianus
catatacagtggtgcgtccgctggc

SEQ ID NO: 122477 - DNA, 25 bp, Saccharomyces pastorianus
gaattcacagttcaagacacccatt

SEQ ID NO: 122478 - DNA, 25 bp, Saccharomyces pastorianus
ccttcagtgctgttagtttaccgtg

SEQ ID NO: 122479 - DNA, 25 bp, Saccharomyces pastorianus
ttcggaagcttttgccggcggctaa

SEQ ID NO: 122480 - DNA, 25 bp, Saccharomyces pastorianus
tcgtcgcgccttttgaactagtgaa

SEQ ID NO: 122481 - DNA, 25 bp, Saccharomyces pastorianus
gatccaaagaagttccgggccgctg

SEQ ID NO: 122482 - DNA, 25 bp, Saccharomyces pastorianus
ggtgttttgtcacttttcaatgggt

SEQ ID NO: 122483 - DNA, 25 bp, Saccharomyces pastorianus
gttggtagttttcacgaacgtcatg

SEQ ID NO: 122484 - DNA, 25 bp, Saccharomyces pastorianus
ggaagccactatctggagacacgtt

SEQ ID NO: 122485 - DNA, 25 bp, Saccharomyces pastorianus
atttgcgccaaaggtcatgagactt

SEQ ID NO: 122486 - DNA, 25 bp, Saccharomyces pastorianus
atgccagcgtgcttgtgtaggcgta

SEQ ID NO: 122487 - DNA, 25 bp, Saccharomyces pastorianus
gttttcacctctatgagcatgccag

SEQ ID NO: 122488 - DNA, 25 bp, Saccharomyces pastorianus
tagaccggcgtttagaaccattgcg

SEQ ID NO: 122489 - DNA, 25 bp, Saccharomyces pastorianus
acggccatgctgttttagtttcact

SEQ ID NO: 122490 - DNA, 25 bp, Saccharomyces pastorianus
agagtttgcttcactggttgactgc

SEQ ID NO: 122491 - DNA, 25 bp, Saccharomyces pastorianus
taacagcggcggatccgtcaacaga

SEQ ID NO: 122492 - DNA, 25 bp, Saccharomyces pastorianus
gactgcacagtcgatgatttacgcg

SEQ ID NO: 122493 - DNA, 25 bp, Saccharomyces pastorianus
gaaagcttgcgatctacgagttgat

SEQ ID NO: 122494 - DNA, 25 bp, Saccharomyces pastorianus
gatggaatccgcaaacggccatgct

SEQ ID NO: 122495 - DNA, 25 bp, Saccharomyces pastorianus
aaccattgcgcgttcattgaaggat

SEQ ID NO: 122496 - DNA, 25 bp, Saccharomyces pastorianus
attctgaaaccactatccaccatta

SEQ ID NO: 122497 - DNA, 25 bp, Saccharomyces pastorianus
gaattcgtatctcattcaccagtga

SEQ ID NO: 122498 - DNA, 25 bp, Saccharomyces pastorianus
ttttgctagcgatccagcgatgcga

SEQ ID NO: 122499 - DNA, 25 bp, Saccharomyces pastorianus
ttttcttgggtttggcatatgcagc

SEQ ID NO: 122500 - DNA, 25 bp, Saccharomyces pastorianus
atgcctgtcttcttttttatcgatc

SEQ ID NO: 122501 - DNA, 25 bp, Saccharomyces pastorianus
agccatttgtgctcgtactggtttt

SEQ ID NO: 122502 - DNA, 25 bp, Saccharomyces pastorianus
tacttatagcatagcgcctggtgaa

SEQ ID NO: 122503 - DNA, 25 bp, Saccharomyces pastorianus
tatgcagcggtaccactctatagag

SEQ ID NO: 122504 - DNA, 25 bp, Saccharomyces pastorianus
gaggtttacgttctgcctggtgaaa

SEQ ID NO: 122505 - DNA, 25 bp, Saccharomyces pastorianus
taatgctgctattttatccccagaa

SEQ ID NO: 122506 - DNA, 25 bp, Saccharomyces pastorianus
accgacgataaactcattcctgtag

SEQ ID NO: 122507 - DNA, 25 bp, Saccharomyces pastorianus
gtgaaacagccctcgctttttataa

SEQ ID NO: 122508 - DNA, 25 bp, Saccharomyces pastorianus
tacaacagtggctcttgcggtactt

SEQ ID NO: 122509 - DNA, 25 bp, Saccharomyces pastorianus
atttatgacttcaatgcccaagctg

SEQ ID NO: 122510 - DNA, 25 bp, Saccharomyces pastorianus
gatttaccggacactcttgagttta

SEQ ID NO: 122511 - DNA, 25 bp, Saccharomyces pastorianus
tgcttcttctacaccttattcgaat

SEQ ID NO: 122512 - DNA, 25 bp, Saccharomyces pastorianus
gactctggaacagttggcaagcaca

SEQ ID NO: 122513 - DNA, 25 bp, Saccharomyces pastorianus
ttttgactcctacaacagtggctct

SEQ ID NO: 122514 - DNA, 25 bp, Saccharomyces pastorianus
aatgcgggcaactttttgactccta

SEQ ID NO: 122515 - DNA, 25 bp, Saccharomyces pastorianus
gaatcaacgactactactcggcctt

SEQ ID NO: 122516 - DNA, 25 bp, Saccharomyces pastorianus
gttcttactgatttaccggacactc

SEQ ID NO: 122517 - DNA, 25 bp, Saccharomyces pastorianus
gttctactgtttttggcgagcgaag

SEQ ID NO: 122518 - DNA, 25 bp, Saccharomyces pastorianus
aatgtaggcctttccactgaagagc

SEQ ID NO: 122519 - DNA, 25 bp, Saccharomyces pastorianus
ctcattcctctcataacaacagcag

SEQ ID NO: 122520 - DNA, 25 bp, Saccharomyces pastorianus
gctgcatctgctactgaagacactc

SEQ ID NO: 122521 - DNA, 25 bp, Saccharomyces pastorianus
acagatgtgtcttccaaaaaccccg

SEQ ID NO: 122522 - DNA, 25 bp, Saccharomyces pastorianus
gatgagcaacagcagctctggtcct

SEQ ID NO: 122523 - DNA, 25 bp, Saccharomyces pastorianus
aatatgccatctaacggactttttg

SEQ ID NO: 122524 - DNA, 25 bp, Saccharomyces pastorianus
tggcccatcgtggtctaagattcta

SEQ ID NO: 122525 - DNA, 25 bp, Saccharomyces pastorianus
gcaaaccattgcctgactatttgat

SEQ ID NO: 122526 - DNA, 25 bp, Saccharomyces pastorianus
atccattgtggatgccgctgttgcg

SEQ ID NO: 122527 - DNA, 25 bp, Saccharomyces pastorianus
tagatttatatggtcccggtggtaa

SEQ ID NO: 122528 - DNA, 25 bp, Saccharomyces pastorianus
aaaacttatctcagcatccttcatc

SEQ ID NO: 122529 - DNA, 25 bp, Saccharomyces pastorianus
ttctctcaatctccaaattcgtcaa

SEQ ID NO: 122530 - DNA, 25 bp, Saccharomyces pastorianus
ggaaccactgtgaatactcaactat

SEQ ID NO: 122531 - DNA, 25 bp, Saccharomyces pastorianus
acaacttcggcttccaatagcgata

SEQ ID NO: 122532 - DNA, 25 bp, Saccharomyces pastorianus
attggatggcctggtaagtaacacc

SEQ ID NO: 122533 - DNA, 25 bp, Saccharomyces pastorianus
tagttttgacttatatccgtttgtt

SEQ ID NO: 122534 - DNA, 25 bp, Saccharomyces pastorianus
caattgcataaactgtcgtctaggg

SEQ ID NO: 122535 - DNA, 25 bp, Saccharomyces pastorianus
atagttttacgagcatgtttgacaa

SEQ ID NO: 122536 - DNA, 25 bp, Saccharomyces pastorianus
ggcaacattgccctggttataaatc

SEQ ID NO: 122537 - DNA, 25 bp, Saccharomyces pastorianus
ggataggcttattacttgtgacgaa

SEQ ID NO: 122538 - DNA, 25 bp, Saccharomyces pastorianus
cgacggcgtaccaactatcaattac

SEQ ID NO: 122539 - DNA, 25 bp, Saccharomyces pastorianus
aacactaggtgttgtcggaaccact

SEQ ID NO: 122540 - DNA, 25 bp, Saccharomyces pastorianus
acaactaactgatctcgacggcgta

SEQ ID NO: 122541 - DNA, 25 bp, Saccharomyces pastorianus
agttgattaaatctccctatgggaa

SEQ ID NO: 122542 - DNA, 25 bp, Saccharomyces pastorianus
catggactcacttgccattcgaaca

SEQ ID NO: 122543 - DNA, 25 bp, Saccharomyces pastorianus
ggcggtgacacctatccaaggagaa

SEQ ID NO: 122544 - DNA, 25 bp, Saccharomyces pastorianus
ggagtcgttcgtctatcaaatatta

SEQ ID NO: 122545 - DNA, 25 bp, Saccharomyces pastorianus
ggatgagtcaaggtacaccagcgaa

SEQ ID NO: 122546 - DNA, 25 bp, Saccharomyces pastorianus
ggagatcagatgcaaggctttctaa

SEQ ID NO: 122547 - DNA, 25 bp, Saccharomyces pastorianus
taaggatgcaggtcaattcgatttt

SEQ ID NO: 122548 - DNA, 25 bp, Saccharomyces pastorianus
tacaccagcgaattacgagttgatt

SEQ ID NO: 122549 - DNA, 25 bp, Saccharomyces pastorianus
ttatgtcccacctttcaggaggaga

SEQ ID NO: 122550 - DNA, 25 bp, Saccharomyces pastorianus
cgaaatgtttgtgcccatggactca

SEQ ID NO: 122551 - DNA, 25 bp, Saccharomyces pastorianus
atcaaagccccattttctctgtaga

SEQ ID NO: 122552 - DNA, 25 bp, Saccharomyces pastorianus
attgaccaatggtatcactgccgac

SEQ ID NO: 122553 - DNA, 25 bp, Saccharomyces pastorianus
aaggttccttatattctgattttga

SEQ ID NO: 122554 - DNA, 25 bp, Saccharomyces pastorianus
tatcactgccgaccaaatcattgcc

SEQ ID NO: 122555 - DNA, 25 bp, Saccharomyces pastorianus
agtacgctcaagatatcggtgtttt

SEQ ID NO: 122556 - DNA, 25 bp, Saccharomyces pastorianus
aatcattgcctatctggagacacat

SEQ ID NO: 122557 - DNA, 25 bp, Saccharomyces pastorianus
tggagacacatgcacatcctcaaat

SEQ ID NO: 122558 - DNA, 25 bp, Saccharomyces pastorianus
ttgcctcctaccgtcgtagatcaaa

SEQ ID NO: 122559 - DNA, 25 bp, Saccharomyces pastorianus
tggaccccaactgtaaggagccttt

SEQ ID NO: 122560 - DNA, 25 bp, Saccharomyces pastorianus
gatatacccgatggctcattgattg

SEQ ID NO: 122561 - DNA, 25 bp, Saccharomyces pastorianus
taattcacctctgcaaattgctgtt

SEQ ID NO: 122562 - DNA, 25 bp, Saccharomyces pastorianus
gaagacggcgccaacgggaaatcca

SEQ ID NO: 122563 - DNA, 25 bp, Saccharomyces pastorianus
agtcaattaccttaagccctacagt

SEQ ID NO: 122564 - DNA, 25 bp, Saccharomyces pastorianus
aaatcactcggcagctttctacgat

SEQ ID NO: 122565 - DNA, 25 bp, Saccharomyces pastorianus
gcagcactgggccaattgattcttt

SEQ ID NO: 122566 - DNA, 25 bp, Saccharomyces pastorianus
tattcatctcaaacactcgcaacaa

SEQ ID NO: 122567 - DNA, 25 bp, Saccharomyces pastorianus
gatagcgtcatcatattcatctcaa

SEQ ID NO: 122568 - DNA, 25 bp, Saccharomyces pastorianus
attgattcttttgctggctaccata

SEQ ID NO: 122569 - DNA, 25 bp, Saccharomyces pastorianus
attctcgagctaccctatatcatga

SEQ ID NO: 122570 - DNA, 25 bp, Saccharomyces pastorianus
gattctgcctgtctactatgatgag

SEQ ID NO: 122571 - DNA, 25 bp, Saccharomyces pastorianus
aatagtacttccattctcgagctac

SEQ ID NO: 122572 - DNA, 25 bp, Saccharomyces pastorianus
aattgcatggtagcagtcccaacct

SEQ ID NO: 122573 - DNA, 25 bp, Saccharomyces pastorianus
cgaacgctcccggtgattggttgat

SEQ ID NO: 122574 - DNA, 25 bp, Saccharomyces pastorianus
ggttctgtttcgatgcacgctagat

SEQ ID NO: 122575 - DNA, 25 bp, Saccharomyces pastorianus
ggattatcatacagcttgccaggaa

SEQ ID NO: 122576 - DNA, 25 bp, Saccharomyces pastorianus
gcacgctagattactcgaaccacaa

SEQ ID NO: 122577 - DNA, 25 bp, Saccharomyces pastorianus
gtacccggtagagtcttgaacgttg

SEQ ID NO: 122578 - DNA, 25 bp, Saccharomyces pastorianus
attgacctctagaagggcacgtcga

SEQ ID NO: 122579 - DNA, 25 bp, Saccharomyces pastorianus
gtggctggtggaaaatcatccggat

SEQ ID NO: 122580 - DNA, 25 bp, Saccharomyces pastorianus
ctagttcctttaactccatgggaga

SEQ ID NO: 122581 - DNA, 25 bp, Saccharomyces pastorianus
aaacgttcttgttcgagatcttgga

SEQ ID NO: 122582 - DNA, 25 bp, Saccharomyces pastorianus
tttgtggccgatgtggtatttttcc

SEQ ID NO: 122583 - DNA, 25 bp, Saccharomyces pastorianus
ttcaaaggactgtagtacccggtag

SEQ ID NO: 122584 - DNA, 25 bp, Saccharomyces pastorianus
gtatttttccaatcaccacctagtt

SEQ ID NO: 122585 - DNA, 25 bp, Saccharomyces pastorianus
taatgctattggtgccggtaccaag

SEQ ID NO: 122586 - DNA, 25 bp, Saccharomyces pastorianus
gggagcaattagatgacctttctga

SEQ ID NO: 122587 - DNA, 25 bp, Saccharomyces pastorianus
agggtttactacatcgtgcattctc

SEQ ID NO: 122588 - DNA, 25 bp, Saccharomyces pastorianus
gaaaactatgtttgctgacccaagt

SEQ ID NO: 122589 - DNA, 25 bp, Saccharomyces pastorianus
ttacttattcaactggtgggagcaa

SEQ ID NO: 122590 - DNA, 25 bp, Saccharomyces pastorianus
tgacccaagttacaagtttacgcct

SEQ ID NO: 122591 - DNA, 25 bp, Saccharomyces pastorianus
tacatggcaccaagcaatgaaccgt

SEQ ID NO: 122592 - DNA, 25 bp, Saccharomyces pastorianus
gtgcattctccgtctttattttcaa

SEQ ID NO: 122593 - DNA, 25 bp, Saccharomyces pastorianus
ttaagggcgctattactgcggcggt

SEQ ID NO: 122594 - DNA, 25 bp, Saccharomyces pastorianus
actgcggcggtgagaaaactagatc

SEQ ID NO: 122595 - DNA, 25 bp, Saccharomyces pastorianus
taactttccctgatctttggactaa

SEQ ID NO: 122596 - DNA, 25 bp, Saccharomyces pastorianus
gaccattcatcactgactttgcgtg

SEQ ID NO: 122597 - DNA, 25 bp, Saccharomyces pastorianus
gaggcatctccaagtctttacattg

SEQ ID NO: 122598 - DNA, 25 bp, Saccharomyces pastorianus
tagtatgcttcgaccattcatcact

SEQ ID NO: 122599 - DNA, 25 bp, Saccharomyces pastorianus
taccgagtgtagtttatcgttgctt

SEQ ID NO: 122600 - DNA, 25 bp, Saccharomyces pastorianus
aagcgggtccagtacagttatcaaa

SEQ ID NO: 122601 - DNA, 25 bp, Saccharomyces pastorianus
tcgtgttttccccaactctaaatat

SEQ ID NO: 122602 - DNA, 25 bp, Saccharomyces pastorianus
aatttatgcatcgtgttttccccaa

SEQ ID NO: 122603 - DNA, 25 bp, Saccharomyces pastorianus
acttgagaaagttgccccatttatt

SEQ ID NO: 122604 - DNA, 25 bp, Saccharomyces pastorianus
tatgctctttttgaactgctggtaa

SEQ ID NO: 122605 - DNA, 25 bp, Saccharomyces pastorianus
attgaatctggtctagttcctcacg

SEQ ID NO: 122606 - DNA, 25 bp, Saccharomyces pastorianus
ttcctcacgctaacctatcgttgat

SEQ ID NO: 122607 - DNA, 25 bp, Saccharomyces pastorianus
gtctgctttatgaccatgtcggcaa

SEQ ID NO: 122608 - DNA, 25 bp, Saccharomyces pastorianus
tacaccaggccaaacttttacgatt

SEQ ID NO: 122609 - DNA, 25 bp, Saccharomyces pastorianus
tctcccaacgttaactatcctgaca

SEQ ID NO: 122610 - DNA, 25 bp, Saccharomyces pastorianus
agcttgccacttttccagattcaag

SEQ ID NO: 122611 - DNA, 25 bp, Saccharomyces pastorianus
atcaaatccgcattcttccaagtat

SEQ ID NO: 122612 - DNA, 25 bp, Saccharomyces pastorianus
taaacacatcgagaccacagcttgc

SEQ ID NO: 122613 - DNA, 25 bp, Saccharomyces pastorianus
gagcgtctagtagcacatcttcatc

SEQ ID NO: 122614 - DNA, 25 bp, Saccharomyces pastorianus
aaagctgtaacatcccatctgcgaa

SEQ ID NO: 122615 - DNA, 25 bp, Saccharomyces pastorianus
gaagtaactcttgcttaacgcgtgt

SEQ ID NO: 122616 - DNA, 25 bp, Saccharomyces pastorianus
gcttaacgcgtgtttcctcattttt

SEQ ID NO: 122617 - DNA, 25 bp, Saccharomyces pastorianus
aatatgtcctgcacattctcgagtg

SEQ ID NO: 122618 - DNA, 25 bp, Saccharomyces pastorianus
aacgtatgccgttctgtctctggga

SEQ ID NO: 122619 - DNA, 25 bp, Saccharomyces pastorianus
actgatgcatcaggcccataaagac

SEQ ID NO: 122620 - DNA, 25 bp, Saccharomyces pastorianus
ggcaatacgacattcttttaagctt

SEQ ID NO: 122621 - DNA, 25 bp, Saccharomyces pastorianus
agacgatggctcacaatcgccaatt

SEQ ID NO: 122622 - DNA, 25 bp, Saccharomyces pastorianus
aagagtctcttgcatggcaatacga

SEQ ID NO: 122623 - DNA, 25 bp, Saccharomyces pastorianus
aataacgcgttactactctcaccca

SEQ ID NO: 122624 - DNA, 25 bp, Saccharomyces pastorianus
ggacttgtattatggtatctttgat

SEQ ID NO: 122625 - DNA, 25 bp, Saccharomyces pastorianus
tgaaggaccattggctcaacctgca

SEQ ID NO: 122626 - DNA, 25 bp, Saccharomyces pastorianus
tactctcacccatactgatgcatca

SEQ ID NO: 122627 - DNA, 25 bp, Saccharomyces pastorianus
ggctcaacctgcaaagcttacagaa

SEQ ID NO: 122628 - DNA, 25 bp, Saccharomyces pastorianus
ctgtctctgggatccggcttaactg

SEQ ID NO: 122629 - DNA, 25 bp, Saccharomyces pastorianus
gacaggtgcttagtggtttctgcca

SEQ ID NO: 122630 - DNA, 25 bp, Saccharomyces pastorianus
gagtatacgcagcaattgcagcact

SEQ ID NO: 122631 - DNA, 25 bp, Saccharomyces pastorianus
tagaacaaggccctgtgcggacaaa

SEQ ID NO: 122632 - DNA, 25 bp, Saccharomyces pastorianus
gcaattgcagcactacttcgaagta

SEQ ID NO: 122633 - DNA, 25 bp, Saccharomyces pastorianus
gatatctccaataagcatcagcgac

SEQ ID NO: 122634 - DNA, 25 bp, Saccharomyces pastorianus
tggatctcagcacctattttctggg

SEQ ID NO: 122635 - DNA, 25 bp, Saccharomyces pastorianus
cagtgaccaagccaatctcgttaga

SEQ ID NO: 122636 - DNA, 25 bp, Saccharomyces pastorianus
ggtagatcccttggttgagatccga

SEQ ID NO: 122637 - DNA, 25 bp, Saccharomyces pastorianus
aaggagtgtctggatctcagcacct

SEQ ID NO: 122638 - DNA, 25 bp, Saccharomyces pastorianus
gtttctgccatcgtttattttacca

SEQ ID NO: 122639 - DNA, 25 bp, Saccharomyces pastorianus
gaaggcaagtacgatatctccaata

SEQ ID NO: 122640 - DNA, 25 bp, Saccharomyces pastorianus
gaccactgtttttggaggacgctta

SEQ ID NO: 122641 - DNA, 25 bp, Saccharomyces pastorianus
gggtgaaccaccaagatccacaagt

SEQ ID NO: 122642 - DNA, 25 bp, Saccharomyces pastorianus
aagactggaatccacctttgggatt

SEQ ID NO: 122643 - DNA, 25 bp, Saccharomyces pastorianus
aggtgtccaagtgcctgcaaaacca

SEQ ID NO: 122644 - DNA, 25 bp, Saccharomyces pastorianus
gttgcgttaactgtgtctgggagat

SEQ ID NO: 122645 - DNA, 25 bp, Saccharomyces pastorianus
acaagaacccgataactgttgcatg

SEQ ID NO: 122646 - DNA, 25 bp, Saccharomyces pastorianus
tctgctatcagaagtttgttcccta

SEQ ID NO: 122647 - DNA, 25 bp, Saccharomyces pastorianus
aaatgtccctgttgagttacgtgaa

SEQ ID NO: 122648 - DNA, 25 bp, Saccharomyces pastorianus
gggcctctgcccaagagtgtattgg

SEQ ID NO: 122649 - DNA, 25 bp, Saccharomyces pastorianus
tcctgtctacgttaaagcctttgca

SEQ ID NO: 122650 - DNA, 25 bp, Saccharomyces pastorianus
gaacaacctcatgatttatctgcta

SEQ ID NO: 122651 - DNA, 25 bp, Saccharomyces pastorianus
gcacctcatctctaaactatttagc

SEQ ID NO: 122652 - DNA, 25 bp, Saccharomyces pastorianus
tacatgcgatatttaagagccgaat

SEQ ID NO: 122653 - DNA, 25 bp, Saccharomyces pastorianus
gctacctctatcgttcagtatttca

SEQ ID NO: 122654 - DNA, 25 bp, Saccharomyces pastorianus
atttagcctcatcgacagtttcata

SEQ ID NO: 122655 - DNA, 25 bp, Saccharomyces pastorianus
tatacaacgttgttctctgcacctc

SEQ ID NO: 122656 - DNA, 25 bp, Saccharomyces pastorianus
gttcagtatttcacctcttttacga

SEQ ID NO: 122657 - DNA, 25 bp, Saccharomyces pastorianus
gctttacccggtctggcgtcaaaag

SEQ ID NO: 122658 - DNA, 25 bp, Saccharomyces pastorianus
cagtttcatatgtcgtttttgttat

SEQ ID NO: 122659 - DNA, 25 bp, Saccharomyces pastorianus
gacctcttaacagtggacctcttag

SEQ ID NO: 122660 - DNA, 25 bp, Saccharomyces pastorianus
gaagttcgtggaggacctcttaaca

SEQ ID NO: 122661 - DNA, 25 bp, Saccharomyces pastorianus
tagagttcattccatgcgctttacc

SEQ ID NO: 122662 - DNA, 25 bp, Saccharomyces pastorianus
ttaccagttttcacggaccgtggag

SEQ ID NO: 122663 - DNA, 25 bp, Saccharomyces pastorianus
tcacactcgcactcggatgaaatct

SEQ ID NO: 122664 - DNA, 25 bp, Saccharomyces pastorianus
atatccatagacattatcactcccc

SEQ ID NO: 122665 - DNA, 25 bp, Saccharomyces pastorianus
gggcatacccgtggatgatgctgaa

SEQ ID NO: 122666 - DNA, 25 bp, Saccharomyces pastorianus
ggttgtactgtttgcttccatatcc

SEQ ID NO: 122667 - DNA, 25 bp, Saccharomyces pastorianus
aactcaacctatctccactattttg

SEQ ID NO: 122668 - DNA, 25 bp, Saccharomyces pastorianus
gctcccatagcatctgaactgacat

SEQ ID NO: 122669 - DNA, 25 bp, Saccharomyces pastorianus
tgaaggttcagctgcctcggaacag

SEQ ID NO: 122670 - DNA, 25 bp, Saccharomyces pastorianus
tgaactgacatttatcgccccaact

SEQ ID NO: 122671 - DNA, 25 bp, Saccharomyces pastorianus
gaattgttattccttctcttctaca

SEQ ID NO: 122672 - DNA, 25 bp, Saccharomyces pastorianus
aagattcaacatgggctagtccaca

SEQ ID NO: 122673 - DNA, 25 bp, Saccharomyces pastorianus
actgcttcacttctcgtggtggaaa

SEQ ID NO: 122674 - DNA, 25 bp, Saccharomyces pastorianus
tccccaaccaacaacgaagagctgt

SEQ ID NO: 122675 - DNA, 25 bp, Saccharomyces pastorianus
gacttggctaatttggattctttgg

SEQ ID NO: 122676 - DNA, 25 bp, Saccharomyces pastorianus
gaggtagaaatcctggaacaccaat

SEQ ID NO: 122677 - DNA, 25 bp, Saccharomyces pastorianus
aagagctgtttcaacgtcaccgaag

SEQ ID NO: 122678 - DNA, 25 bp, Saccharomyces pastorianus
gagtagaactaaattctttcccata

SEQ ID NO: 122679 - DNA, 25 bp, Saccharomyces pastorianus
aacagacgctctaatgctctcatta

SEQ ID NO: 122680 - DNA, 25 bp, Saccharomyces pastorianus
ggatcttccgtttatttactgcttc

SEQ ID NO: 122681 - DNA, 25 bp, Saccharomyces pastorianus
ataacaaccgttgcctattaccaca

SEQ ID NO: 122682 - DNA, 25 bp, Saccharomyces pastorianus
gttcattctaatgggatcttccgtt

SEQ ID NO: 122683 - DNA, 25 bp, Saccharomyces pastorianus
gatactgaactgatacgcgatttga

SEQ ID NO: 122684 - DNA, 25 bp, Saccharomyces pastorianus
atgatgggtactaccgtcggtgtct

SEQ ID NO: 122685 - DNA, 25 bp, Saccharomyces pastorianus
tacattgctggttcagcgggtacct

SEQ ID NO: 122686 - DNA, 25 bp, Saccharomyces pastorianus
gtctgcacaggcatcctatttggtg

SEQ ID NO: 122687 - DNA, 25 bp, Saccharomyces pastorianus
acagcagccttcgaattgggacaaa

SEQ ID NO: 122688 - DNA, 25 bp, Saccharomyces pastorianus
gtgaaagtagtccaatgtcccatcc

SEQ ID NO: 122689 - DNA, 25 bp, Saccharomyces pastorianus
gcgggtacctttgggctatttatgt

SEQ ID NO: 122690 - DNA, 25 bp, Saccharomyces pastorianus
aattatgcgcaacagcagccttcga

SEQ ID NO: 122691 - DNA, 25 bp, Saccharomyces pastorianus
aatgtcccatcctaacctgaaccta

SEQ ID NO: 122692 - DNA, 25 bp, Saccharomyces pastorianus
ctcctcttccacaaaattatgcgca

SEQ ID NO: 122693 - DNA, 25 bp, Saccharomyces pastorianus
tttgccatcgcaactcaaggcccag

SEQ ID NO: 122694 - DNA, 25 bp, Saccharomyces pastorianus
ggcccaggtcctgatggtgtagtta

SEQ ID NO: 122695 - DNA, 25 bp, Saccharomyces pastorianus
ggttacgtaacaatgactctttcct

SEQ ID NO: 122696 - DNA, 25 bp, Saccharomyces pastorianus
gtcttgctacattttactggttacg

SEQ ID NO: 122697 - DNA, 25 bp, Saccharomyces pastorianus
ttacttactcggtactcctaattag

SEQ ID NO: 122698 - DNA, 25 bp, Saccharomyces pastorianus
ctttcctgcactactggtgtgtatt

SEQ ID NO: 122699 - DNA, 25 bp, Saccharomyces pastorianus
ggtactcctaattagtcttgctaca

SEQ ID NO: 122700 - DNA, 25 bp, Saccharomyces pastorianus
tattactgctatgccctgcgactct

SEQ ID NO: 122701 - DNA, 25 bp, Saccharomyces pastorianus
gtaacaatgactctttcctgcacta

SEQ ID NO: 122702 - DNA, 25 bp, Saccharomyces pastorianus
tggtgtgtattactgctatgccctg

SEQ ID NO: 122703 - DNA, 25 bp, Saccharomyces pastorianus
ggccctcatagcctggtgtgacagt

SEQ ID NO: 122704 - DNA, 25 bp, Saccharomyces pastorianus
agaccacgtgaccaaggctttttgg

SEQ ID NO: 122705 - DNA, 25 bp, Saccharomyces pastorianus
gactctctggctgtgggccctcata

SEQ ID NO: 122706 - DNA, 25 bp, Saccharomyces pastorianus
gttagatgttcgctacgtctggaat

SEQ ID NO: 122707 - DNA, 25 bp, Saccharomyces pastorianus
gtgagcaatcattcgaccaaccata

SEQ ID NO: 122708 - DNA, 25 bp, Saccharomyces pastorianus
atgagttactgtattgcgttcggta

SEQ ID NO: 122709 - DNA, 25 bp, Saccharomyces pastorianus
gttcatgtcgactcctgtgagcaat

SEQ ID NO: 122710 - DNA, 25 bp, Saccharomyces pastorianus
aaatccgaaagcgtcagtgccgctt

SEQ ID NO: 122711 - DNA, 25 bp, Saccharomyces pastorianus
agtgccgcttcgaaatcatctaatc

SEQ ID NO: 122712 - DNA, 25 bp, Saccharomyces pastorianus
tgacgagatataccaacttgcatgt

SEQ ID NO: 122713 - DNA, 25 bp, Saccharomyces pastorianus
gaataggtgggttcatgtcgactcc

SEQ ID NO: 122714 - DNA, 25 bp, Saccharomyces pastorianus
gttagtaaacgctatatcctccaaa

SEQ ID NO: 122715 - DNA, 25 bp, Saccharomyces pastorianus
tatcctccaaaacgagctgtccaga

SEQ ID NO: 122716 - DNA, 25 bp, Saccharomyces pastorianus
atcactagatttcctcgttataacg

SEQ ID NO: 122717 - DNA, 25 bp, Saccharomyces pastorianus
gaagaccagcttaagtcacgtgaaa

SEQ ID NO: 122718 - DNA, 25 bp, Saccharomyces pastorianus
ttcggcatcttagcaggcttctttg

SEQ ID NO: 122719 - DNA, 25 bp, Saccharomyces pastorianus
gtgtccatcatattggcgctcgtat

SEQ ID NO: 122720 - DNA, 25 bp, Saccharomyces pastorianus
atgttggtgggttctggatctttcc

SEQ ID NO: 122721 - DNA, 25 bp, Saccharomyces pastorianus
ttgaagccaagcaaggactttccgc

SEQ ID NO: 122722 - DNA, 25 bp, Saccharomyces pastorianus
gactttccgcacttgattgtttcga

SEQ ID NO: 122723 - DNA, 25 bp, Saccharomyces pastorianus
taagccactttacggttttggtgag

SEQ ID NO: 122724 - DNA, 25 bp, Saccharomyces pastorianus
ggaactataaccctagaacctacat

SEQ ID NO: 122725 - DNA, 25 bp, Saccharomyces pastorianus
ttgctgtcgctatcctgagattgat

SEQ ID NO: 122726 - DNA, 25 bp, Saccharomyces pastorianus
gaacctacatggattacttgatcgt

SEQ ID NO: 122727 - DNA, 25 bp, Saccharomyces pastorianus
atgagacgcggctcctattatgtgt

SEQ ID NO: 122728 - DNA, 25 bp, Saccharomyces pastorianus
gcttccactgaaaacggtgtcaagt

SEQ ID NO: 122729 - DNA, 25 bp, Saccharomyces pastorianus
aagctatcatgccacgttctaaact

SEQ ID NO: 122730 - DNA, 25 bp, Saccharomyces pastorianus
ttggaccctgaaatcgctgctaaac

SEQ ID NO: 122731 - DNA, 25 bp, Saccharomyces pastorianus
atccaaggccgacaggatggccaag

SEQ ID NO: 122732 - DNA, 25 bp, Saccharomyces pastorianus
gggttctacaattctgacgatgagg

SEQ ID NO: 122733 - DNA, 25 bp, Saccharomyces pastorianus
tagacatgccaagcaaggtgaatct

SEQ ID NO: 122734 - DNA, 25 bp, Saccharomyces pastorianus
ttttggcgaccaagatgctttgaca

SEQ ID NO: 122735 - DNA, 25 bp, Saccharomyces pastorianus
gttctgatgttgtttttggcgacca

SEQ ID NO: 122736 - DNA, 25 bp, Saccharomyces pastorianus
gctgtttccttatcaaagcatttat

SEQ ID NO: 122737 - DNA, 25 bp, Saccharomyces pastorianus
aaacagaaccgtgctgctcgtaaga

SEQ ID NO: 122738 - DNA, 25 bp, Saccharomyces pastorianus
tgctaaactgcaggctcttgaagaa

SEQ ID NO: 122739 - DNA, 25 bp, Saccharomyces pastorianus
gacagtttctccgtataacagcatt

SEQ ID NO: 122740 - DNA, 25 bp, Saccharomyces pastorianus
gttggtcaattctatgccttttatg

SEQ ID NO: 122741 - DNA, 25 bp, Saccharomyces pastorianus
gtcgtttcaatcctgtcgtactaca

SEQ ID NO: 122742 - DNA, 25 bp, Saccharomyces pastorianus
gcagtataaccagtacgttccctta

SEQ ID NO: 122743 - DNA, 25 bp, Saccharomyces pastorianus
ttcaccgtgatttctgtcgtttcaa

SEQ ID NO: 122744 - DNA, 25 bp, Saccharomyces pastorianus
gactattgcagttccatggtgtttc

SEQ ID NO: 122745 - DNA, 25 bp, Saccharomyces pastorianus
ctatggcattgctcgctatgggcta

SEQ ID NO: 122746 - DNA, 25 bp, Saccharomyces pastorianus
gctatgggctattttttcaccgtga

SEQ ID NO: 122747 - DNA, 25 bp, Saccharomyces pastorianus
ctaggcatggtttctgctatggcat

SEQ ID NO: 122748 - DNA, 25 bp, Saccharomyces pastorianus
aaagatgctgcatgctgcccgtaaa

SEQ ID NO: 122749 - DNA, 25 bp, Saccharomyces pastorianus
ttattcctgcttttgggcccgatgg

SEQ ID NO: 122750 - DNA, 25 bp, Saccharomyces pastorianus
gagtgatccaactttcaagtcgtta

SEQ ID NO: 122751 - DNA, 25 bp, Saccharomyces pastorianus
gatgttgttgaagcgggccacgtta

SEQ ID NO: 122752 - DNA, 25 bp, Saccharomyces pastorianus
gattgccgcactacaagtaactcta

SEQ ID NO: 122753 - DNA, 25 bp, Saccharomyces pastorianus
agaactgcagttcacagccgataaa

SEQ ID NO: 122754 - DNA, 25 bp, Saccharomyces pastorianus
gatctccattgcatgggttttgcat

SEQ ID NO: 122755 - DNA, 25 bp, Saccharomyces pastorianus
tactacaatttgctctatcgtgaag

SEQ ID NO: 122756 - DNA, 25 bp, Saccharomyces pastorianus
tgttgactcgtcctctgaaccaaag

SEQ ID NO: 122757 - DNA, 25 bp, Saccharomyces pastorianus
aaaagtctcgatggctatgatctcc

SEQ ID NO: 122758 - DNA, 25 bp, Saccharomyces pastorianus
gtctcctaacgcacgaggcatgttg

SEQ ID NO: 122759 - DNA, 25 bp, Saccharomyces pastorianus
ttggtttacttccatggtctcctaa

SEQ ID NO: 122760 - DNA, 25 bp, Saccharomyces pastorianus
gactgggcacatatatagacctttt

SEQ ID NO: 122761 - DNA, 25 bp, Saccharomyces pastorianus
ggccctgccattaggtgttctattg

SEQ ID NO: 122762 - DNA, 25 bp, Saccharomyces pastorianus
aaaagccagcaattttccaagtcct

SEQ ID NO: 122763 - DNA, 25 bp, Saccharomyces pastorianus
tattgacgcttctagttgtggttct

SEQ ID NO: 122764 - DNA, 25 bp, Saccharomyces pastorianus
cggagaacatatttggccctgccat

SEQ ID NO: 122765 - DNA, 25 bp, Saccharomyces pastorianus
gtactggtgtctatatcttcgtcgt

SEQ ID NO: 122766 - DNA, 25 bp, Saccharomyces pastorianus
ttgtggttctttctggctggctgac

SEQ ID NO: 122767 - DNA, 25 bp, Saccharomyces pastorianus
gattggtacttcttattcactggag

SEQ ID NO: 122768 - DNA, 25 bp, Saccharomyces pastorianus
gctggcaactagatattcacctgtg

SEQ ID NO: 122769 - DNA, 25 bp, Saccharomyces pastorianus
ggctgacctactatcacgttcatga

SEQ ID NO: 122770 - DNA, 25 bp, Saccharomyces pastorianus
gttatgggcatgattccttttgtca

SEQ ID NO: 122771 - DNA, 25 bp, Saccharomyces pastorianus
tttacgttgtcgtccaaaagccagc

SEQ ID NO: 122772 - DNA, 25 bp, Saccharomyces pastorianus
ctcccagaggacttctattgttaga

SEQ ID NO: 122773 - DNA, 25 bp, Saccharomyces pastorianus
gagatcctcgtaaattccagcatca

SEQ ID NO: 122774 - DNA, 25 bp, Saccharomyces pastorianus
agagacattccaatgcccttggtta

SEQ ID NO: 122775 - DNA, 25 bp, Saccharomyces pastorianus
cagcatcaagggtttggtactctat

SEQ ID NO: 122776 - DNA, 25 bp, Saccharomyces pastorianus
cttagttgctagaatcttggcccta

SEQ ID NO: 122777 - DNA, 25 bp, Saccharomyces pastorianus
gtgccaacgccttagtggacttagt

SEQ ID NO: 122778 - DNA, 25 bp, Saccharomyces pastorianus
agaaaagaattcacctcccagagga

SEQ ID NO: 122779 - DNA, 25 bp, Saccharomyces pastorianus
aaccagatcaggtcgagcttatcag

SEQ ID NO: 122780 - DNA, 25 bp, Saccharomyces pastorianus
tccacttcattcaagagatcctcgt

SEQ ID NO: 122781 - DNA, 25 bp, Saccharomyces pastorianus
cccttggttacctcaggtgttgaca

SEQ ID NO: 122782 - DNA, 25 bp, Saccharomyces pastorianus
aagaatctaccgtgtccaaagagac

SEQ ID NO: 122783 - DNA, 25 bp, Saccharomyces pastorianus
gtatggaaaccccattctaatttca

SEQ ID NO: 122784 - DNA, 25 bp, Saccharomyces pastorianus
ggagacaaactcctacgttgaagat

SEQ ID NO: 122785 - DNA, 25 bp, Saccharomyces pastorianus
taaataggcttgttcgttccgtggc

SEQ ID NO: 122786 - DNA, 25 bp, Saccharomyces pastorianus
gaggagcgcgaaatctcaaactgaa

SEQ ID NO: 122787 - DNA, 25 bp, Saccharomyces pastorianus
ggtcttcctgatttccaagttttcg

SEQ ID NO: 122788 - DNA, 25 bp, Saccharomyces pastorianus
atgacgatcttcagcattttcctac

SEQ ID NO: 122789 - DNA, 25 bp, Saccharomyces pastorianus
ttttcctacctataaagagctgcga

SEQ ID NO: 122790 - DNA, 25 bp, Saccharomyces pastorianus
gataatggccttatttcgtttgtaa

SEQ ID NO: 122791 - DNA, 25 bp, Saccharomyces pastorianus
gaagagaaaggcgtacccacctcac

SEQ ID NO: 122792 - DNA, 25 bp, Saccharomyces pastorianus
ttcgttccgtggctgtaccaaagaa

SEQ ID NO: 122793 - DNA, 25 bp, Saccharomyces pastorianus
tgcgatctatgttttcctcacttga

SEQ ID NO: 122794 - DNA, 25 bp, Saccharomyces pastorianus
tattgcgcgctcaagcggccctata

SEQ ID NO: 122795 - DNA, 25 bp, Saccharomyces pastorianus
agtgtacaatcaagctcacccgagc

SEQ ID NO: 122796 - DNA, 25 bp, Saccharomyces pastorianus
cagcctatcttttgcgtttactttc

SEQ ID NO: 122797 - DNA, 25 bp, Saccharomyces pastorianus
ggtgacaaatatgtcgcctcacctc

SEQ ID NO: 122798 - DNA, 25 bp, Saccharomyces pastorianus
ctctctaccatctcggtaacttgaa

SEQ ID NO: 122799 - DNA, 25 bp, Saccharomyces pastorianus
gaatgaaggcagtcagcctatcttt

SEQ ID NO: 122800 - DNA, 25 bp, Saccharomyces pastorianus
tcactcaccgatattgcgcgctcaa

SEQ ID NO: 122801 - DNA, 25 bp, Saccharomyces pastorianus
aagcatcgttgctgcagtgtacaat

SEQ ID NO: 122802 - DNA, 25 bp, Saccharomyces pastorianus
gcctcacctcctagtcgaatgaagg

SEQ ID NO: 122803 - DNA, 25 bp, Saccharomyces pastorianus
atggatggatcttacctcactcacc

SEQ ID NO: 122804 - DNA, 25 bp, Saccharomyces pastorianus
atactgcacacctattacttcttga

SEQ ID NO: 122805 - DNA, 25 bp, Saccharomyces pastorianus
ggcaactagcaaaatctgtcatctc

SEQ ID NO: 122806 - DNA, 25 bp, Saccharomyces pastorianus
ggcaaagtatttggcgccagcatat

SEQ ID NO: 122807 - DNA, 25 bp, Saccharomyces pastorianus
ccgctgtcatttatgccatttccaa

SEQ ID NO: 122808 - DNA, 25 bp, Saccharomyces pastorianus
gcaaaggctaactctatcatcaatg

SEQ ID NO: 122809 - DNA, 25 bp, Saccharomyces pastorianus
attgctgacttttttgggtttcact

SEQ ID NO: 122810 - DNA, 25 bp, Saccharomyces pastorianus
aaggcagtcttggattcgtgggtta

SEQ ID NO: 122811 - DNA, 25 bp, Saccharomyces pastorianus
tagaatcgactctgtctctcaacta

SEQ ID NO: 122812 - DNA, 25 bp, Saccharomyces pastorianus
gtctccgacgttttaaatgcctcga

SEQ ID NO: 122813 - DNA, 25 bp, Saccharomyces pastorianus
gtcatctccagagttcagtcagaat

SEQ ID NO: 122814 - DNA, 25 bp, Saccharomyces pastorianus
gatatgaagcttccttgcgtcaatt

SEQ ID NO: 122815 - DNA, 25 bp, Saccharomyces pastorianus
catcaatgccattccaggtaataat

SEQ ID NO: 122816 - DNA, 25 bp, Saccharomyces pastorianus
atttgcaatgttgactctctctcca

SEQ ID NO: 122817 - DNA, 25 bp, Saccharomyces pastorianus
tctttttggctgaccctatggtaca

SEQ ID NO: 122818 - DNA, 25 bp, Saccharomyces pastorianus
accaatatacttgtcgcccttgttg

SEQ ID NO: 122819 - DNA, 25 bp, Saccharomyces pastorianus
tattccgccaactattttcctttca

SEQ ID NO: 122820 - DNA, 25 bp, Saccharomyces pastorianus
tatcattctacccacttatttatcg

SEQ ID NO: 122821 - DNA, 25 bp, Saccharomyces pastorianus
gaggctttcgaccacaatcgacgta

SEQ ID NO: 122822 - DNA, 25 bp, Saccharomyces pastorianus
gtaaagtcttcgctgattatcacat

SEQ ID NO: 122823 - DNA, 25 bp, Saccharomyces pastorianus
gttgctgtcctatcatcgaggcttt

SEQ ID NO: 122824 - DNA, 25 bp, Saccharomyces pastorianus
aaggacgaaagtcgaccctctattg

SEQ ID NO: 122825 - DNA, 25 bp, Saccharomyces pastorianus
tattatggcttcgatcctattccgc

SEQ ID NO: 122826 - DNA, 25 bp, Saccharomyces pastorianus
aacaactgcatctgattccatatgg

SEQ ID NO: 122827 - DNA, 25 bp, Saccharomyces pastorianus
tgtcaccctcaattattttcataga

SEQ ID NO: 122828 - DNA, 25 bp, Saccharomyces pastorianus
agcaacgaatttgccatgggcgatt

SEQ ID NO: 122829 - DNA, 25 bp, Saccharomyces pastorianus
gaccgaaataatacgcttgacagca

SEQ ID NO: 122830 - DNA, 25 bp, Saccharomyces pastorianus
gtgctactgcacaatcggaagaccg

SEQ ID NO: 122831 - DNA, 25 bp, Saccharomyces pastorianus
ggttttctggttctgatcttacgtc

SEQ ID NO: 122832 - DNA, 25 bp, Saccharomyces pastorianus
gaaactatacattcctttaccagat

SEQ ID NO: 122833 - DNA, 25 bp, Saccharomyces pastorianus
gaacttcttattcagtggtcctccc

SEQ ID NO: 122834 - DNA, 25 bp, Saccharomyces pastorianus
gactctatgttaacagctcgctctg

SEQ ID NO: 122835 - DNA, 25 bp, Saccharomyces pastorianus
gcagagtacttgtcttaggagcaac

SEQ ID NO: 122836 - DNA, 25 bp, Saccharomyces pastorianus
gagcgtgtcgtcagaatctctacaa

SEQ ID NO: 122837 - DNA, 25 bp, Saccharomyces pastorianus
tggtcctccctatctagtgctactg

SEQ ID NO: 122838 - DNA, 25 bp, Saccharomyces pastorianus
ttccagccaggccttgcaaagatga

SEQ ID NO: 122839 - DNA, 25 bp, Saccharomyces pastorianus
cacttaggctgggtgcaatggcata

SEQ ID NO: 122840 - DNA, 25 bp, Saccharomyces pastorianus
acaaatcgaggtattccagccaggc

SEQ ID NO: 122841 - DNA, 25 bp, Saccharomyces pastorianus
cgagttttcaagtcgactatgcctt

SEQ ID NO: 122842 - DNA, 25 bp, Saccharomyces pastorianus
gattgtcgccttttgcattatttga

SEQ ID NO: 122843 - DNA, 25 bp, Saccharomyces pastorianus
gttatgaagcaatcattcccacgat

SEQ ID NO: 122844 - DNA, 25 bp, Saccharomyces pastorianus
gtacttcccaatactctgcttagaa

SEQ ID NO: 122845 - DNA, 25 bp, Saccharomyces pastorianus
gaatccccaaagactagcgcactta

SEQ ID NO: 122846 - DNA, 25 bp, Saccharomyces pastorianus
gaccgttcttatccgtttcaaatat

SEQ ID NO: 122847 - DNA, 25 bp, Saccharomyces pastorianus
aattaagcccactgtcgtgtacttc

SEQ ID NO: 122848 - DNA, 25 bp, Saccharomyces pastorianus
tgacgtcttacgatcttttacagat

SEQ ID NO: 122849 - DNA, 25 bp, Saccharomyces pastorianus
gaaatcattctccagacccaatagg

SEQ ID NO: 122850 - DNA, 25 bp, Saccharomyces pastorianus
tatctaagctggtggaagtggttcc

SEQ ID NO: 122851 - DNA, 25 bp, Saccharomyces pastorianus
acgcggcgacaatgacttgttttat

SEQ ID NO: 122852 - DNA, 25 bp, Saccharomyces pastorianus
aagagatcatcaagtgttccacaag

SEQ ID NO: 122853 - DNA, 25 bp, Saccharomyces pastorianus
gtgttccacaagtaaacgcggcgac

SEQ ID NO: 122854 - DNA, 25 bp, Saccharomyces pastorianus
cgctattgatgataaggtcctgaaa

SEQ ID NO: 122855 - DNA, 25 bp, Saccharomyces pastorianus
aagggcccaagaacggacatgcaga

SEQ ID NO: 122856 - DNA, 25 bp, Saccharomyces pastorianus
gtggttccataatcaaatgacttcg

SEQ ID NO: 122857 - DNA, 25 bp, Saccharomyces pastorianus
tagtattcacagacgctattgatga

SEQ ID NO: 122858 - DNA, 25 bp, Saccharomyces pastorianus
gacttcgaaatacacttatgatgga

SEQ ID NO: 122859 - DNA, 25 bp, Saccharomyces pastorianus
aatggcaatcccaaccacattagga

SEQ ID NO: 122860 - DNA, 25 bp, Saccharomyces pastorianus
tactctatatgctgtgcgtgccaac

SEQ ID NO: 122861 - DNA, 25 bp, Saccharomyces pastorianus
atgcatttttgcaggcacagccgct

SEQ ID NO: 122862 - DNA, 25 bp, Saccharomyces pastorianus
acgggaacgctattccgcggaacag

SEQ ID NO: 122863 - DNA, 25 bp, Saccharomyces pastorianus
agtacattccccagataaggccgtg

SEQ ID NO: 122864 - DNA, 25 bp, Saccharomyces pastorianus
ttgtacaccttgttctctggtccaa

SEQ ID NO: 122865 - DNA, 25 bp, Saccharomyces pastorianus
ggaactacaaagtgttgcccggatt

SEQ ID NO: 122866 - DNA, 25 bp, Saccharomyces pastorianus
taggctggtcgctagacgaaccgca

SEQ ID NO: 122867 - DNA, 25 bp, Saccharomyces pastorianus
atgctgccgcgaaggcttttagttc

SEQ ID NO: 122868 - DNA, 25 bp, Saccharomyces pastorianus
taacttcgagcctggtgttgtacac

SEQ ID NO: 122869 - DNA, 25 bp, Saccharomyces pastorianus
aaaaggactgctggcctggacatga

SEQ ID NO: 122870 - DNA, 25 bp, Saccharomyces pastorianus
gtgccaacgatttcccgtataactt

SEQ ID NO: 122871 - DNA, 25 bp, Saccharomyces pastorianus
gaaagcctacctaaaagactccata

SEQ ID NO: 122872 - DNA, 25 bp, Saccharomyces pastorianus
gcagaacatgcgatatccactacca

SEQ ID NO: 122873 - DNA, 25 bp, Saccharomyces pastorianus
gatgacacccaatacaccaatactg

SEQ ID NO: 122874 - DNA, 25 bp, Saccharomyces pastorianus
gttcaaggtctacctgaattctcag

SEQ ID NO: 122875 - DNA, 25 bp, Saccharomyces pastorianus
acatcggctccctttggtgataata

SEQ ID NO: 122876 - DNA, 25 bp, Saccharomyces pastorianus
gagaacttctgtttgatctggaact

SEQ ID NO: 122877 - DNA, 25 bp, Saccharomyces pastorianus
gggcataccaattacagcagaacat

SEQ ID NO: 122878 - DNA, 25 bp, Saccharomyces pastorianus
gaagcgttctgcgatacatacaaca

SEQ ID NO: 122879 - DNA, 25 bp, Saccharomyces pastorianus
atacgtcgctgaggccactggtaat

SEQ ID NO: 122880 - DNA, 25 bp, Saccharomyces pastorianus
catacaacatcactgcttcaaacgc

SEQ ID NO: 122881 - DNA, 25 bp, Saccharomyces pastorianus
atcccttattggctgaactgctaat

SEQ ID NO: 122882 - DNA, 25 bp, Saccharomyces pastorianus
acgattcatgtatcctgcagttttg

SEQ ID NO: 122883 - DNA, 25 bp, Saccharomyces pastorianus
cattctttgaggacatctttggatc

SEQ ID NO: 122884 - DNA, 25 bp, Saccharomyces pastorianus
gagattaccataccattctttgagg

SEQ ID NO: 122885 - DNA, 25 bp, Saccharomyces pastorianus
ttgggcggcgaaattgaagcttcct

SEQ ID NO: 122886 - DNA, 25 bp, Saccharomyces pastorianus
tctttagacagatcttgggcggcga

SEQ ID NO: 122887 - DNA, 25 bp, Saccharomyces pastorianus
aagcttcctcccgtgacaataatgt

SEQ ID NO: 122888 - DNA, 25 bp, Saccharomyces pastorianus
gaatgattctcccagcatggatcaa

SEQ ID NO: 122889 - DNA, 25 bp, Saccharomyces pastorianus
ggtgatgttcaaaagcttaagccaa

SEQ ID NO: 122890 - DNA, 25 bp, Saccharomyces pastorianus
ctggcggattctaagcacgtactga

SEQ ID NO: 122891 - DNA, 25 bp, Saccharomyces pastorianus
gacacattcttagatcagccacaag

SEQ ID NO: 122892 - DNA, 25 bp, Saccharomyces pastorianus
tggtttataactgtgctggcggatt

SEQ ID NO: 122893 - DNA, 25 bp, Saccharomyces pastorianus
tgtacttaaccgacaaaaaggctgg

SEQ ID NO: 122894 - DNA, 25 bp, Saccharomyces pastorianus
tctactgtttggctctatgcgaagg

SEQ ID NO: 122895 - DNA, 25 bp, Saccharomyces pastorianus
gcgaaagcgccatatctgacgtgaa

SEQ ID NO: 122896 - DNA, 25 bp, Saccharomyces pastorianus
tcctgggttctatctatggtatgaa

SEQ ID NO: 122897 - DNA, 25 bp, Saccharomyces pastorianus
gcgaagggaatcagacatttgcata

SEQ ID NO: 122898 - DNA, 25 bp, Saccharomyces pastorianus
gcgtatttaactgtcaccattttgg

SEQ ID NO: 122899 - DNA, 25 bp, Saccharomyces pastorianus
tgctgttagggataagatacgccat

SEQ ID NO: 122900 - DNA, 25 bp, Saccharomyces pastorianus
aaggtgttgctaaccatatgcaagg

SEQ ID NO: 122901 - DNA, 25 bp, Saccharomyces pastorianus
gatacgccataggaatgctttcgtt

SEQ ID NO: 122902 - DNA, 25 bp, Saccharomyces pastorianus
gaggcgctctattcctgggttctat

SEQ ID NO: 122903 - DNA, 25 bp, Saccharomyces pastorianus
gctttcgttgggaggcgctctattc

SEQ ID NO: 122904 - DNA, 25 bp, Saccharomyces pastorianus
gaagagctattgaagatgccatcga

SEQ ID NO: 122905 - DNA, 25 bp, Saccharomyces pastorianus
gatgccatcgaatcggctccagtgg

SEQ ID NO: 122906 - DNA, 25 bp, Saccharomyces pastorianus
ttcaatcccataaggtcattttccc

SEQ ID NO: 122907 - DNA, 25 bp, Saccharomyces pastorianus
tactcctgaatttcccaaatgtgga

SEQ ID NO: 122908 - DNA, 25 bp, Saccharomyces pastorianus
gctaagactcttcttcgttaccaaa

SEQ ID NO: 122909 - DNA, 25 bp, Saccharomyces pastorianus
agaggaggcacaggcattggtacct

SEQ ID NO: 122910 - DNA, 25 bp, Saccharomyces pastorianus
ggctccagtggttcttttcatgaaa

SEQ ID NO: 122911 - DNA, 25 bp, Saccharomyces pastorianus
tgacccggccaaatttgcggcttat

SEQ ID NO: 122912 - DNA, 25 bp, Saccharomyces pastorianus
ggaaatcaaggcgttgacccggcca

SEQ ID NO: 122913 - DNA, 25 bp, Saccharomyces pastorianus
cagaatggccaactattccacagtt

SEQ ID NO: 122914 - DNA, 25 bp, Saccharomyces pastorianus
cacgctctggtgaattggccgattt

SEQ ID NO: 122915 - DNA, 25 bp, Saccharomyces pastorianus
gagaagtcttgttgaactcgaccga

SEQ ID NO: 122916 - DNA, 25 bp, Saccharomyces pastorianus
gaactcgaccgatttagctacggat

SEQ ID NO: 122917 - DNA, 25 bp, Saccharomyces pastorianus
gtatttcatactgtatcttccccta

SEQ ID NO: 122918 - DNA, 25 bp, Saccharomyces pastorianus
tggttacttgcccttttagagctaa

SEQ ID NO: 122919 - DNA, 25 bp, Saccharomyces pastorianus
gtatcttcccctatttacgcaggaa

SEQ ID NO: 122920 - DNA, 25 bp, Saccharomyces pastorianus
gaagtctgttgctaagctgttgaaa

SEQ ID NO: 122921 - DNA, 25 bp, Saccharomyces pastorianus
tagagctaacttccaacctgaacca

SEQ ID NO: 122922 - DNA, 25 bp, Saccharomyces pastorianus
gttcatgataaccacagtacctata

SEQ ID NO: 122923 - DNA, 25 bp, Saccharomyces pastorianus
gctacggattctatttctcatttat

SEQ ID NO: 122924 - DNA, 25 bp, Saccharomyces pastorianus
taactgggtcggtgggaaactgatt

SEQ ID NO: 122925 - DNA, 25 bp, Saccharomyces pastorianus
aactaggctcgcagtatttcatact

SEQ ID NO: 122926 - DNA, 25 bp, Saccharomyces pastorianus
taggtctagacaatgcaggcaaaac

SEQ ID NO: 122927 - DNA, 25 bp, Saccharomyces pastorianus
ggtggtcaagaatcactgagatcaa

SEQ ID NO: 122928 - DNA, 25 bp, Saccharomyces pastorianus
aataagcgcattgactggagaaggt

SEQ ID NO: 122929 - DNA, 25 bp, Saccharomyces pastorianus
ccacgaccctacagtcagttgtaat

SEQ ID NO: 122930 - DNA, 25 bp, Saccharomyces pastorianus
attagacgaatgttccacgacccta

SEQ ID NO: 122931 - DNA, 25 bp, Saccharomyces pastorianus
gtggcgacaatacccgttgacagta

SEQ ID NO: 122932 - DNA, 25 bp, Saccharomyces pastorianus
acccatcttgatgctggccaataaa

SEQ ID NO: 122933 - DNA, 25 bp, Saccharomyces pastorianus
aaaggaatactctctggcgttcaaa

SEQ ID NO: 122934 - DNA, 25 bp, Saccharomyces pastorianus
ggaaaagatacagcctacggtagga

SEQ ID NO: 122935 - DNA, 25 bp, Saccharomyces pastorianus
attgaaggtgtacccatcttgatgc

SEQ ID NO: 122936 - DNA, 25 bp, Saccharomyces pastorianus
gcaaaacgacgttcttggagacatt

SEQ ID NO: 122937 - DNA, 25 bp, Saccharomyces pastorianus
gaagcaaccatcaatcagaccatac

SEQ ID NO: 122938 - DNA, 25 bp, Saccharomyces pastorianus
aattactattctccaccataggacc

SEQ ID NO: 122939 - DNA, 25 bp, Saccharomyces pastorianus
aatagcctctcagatgggtgatgac

SEQ ID NO: 122940 - DNA, 25 bp, Saccharomyces pastorianus
cagagacggtgccatgttccctaat

SEQ ID NO: 122941 - DNA, 25 bp, Saccharomyces pastorianus
tggtggaggctgtactttggtcaaa

SEQ ID NO: 122942 - DNA, 25 bp, Saccharomyces pastorianus
gtgacaccggtttagaaatagcctc

SEQ ID NO: 122943 - DNA, 25 bp, Saccharomyces pastorianus
acacttcttgggtgctgtggctaga

SEQ ID NO: 122944 - DNA, 25 bp, Saccharomyces pastorianus
aactacgatgtatttggcttaccaa

SEQ ID NO: 122945 - DNA, 25 bp, Saccharomyces pastorianus
gcagcaatggctttggcgcacaatg

SEQ ID NO: 122946 - DNA, 25 bp, Saccharomyces pastorianus
ataggacctcacacttcttgggtgc

SEQ ID NO: 122947 - DNA, 25 bp, Saccharomyces pastorianus
taatggctcatttctacgatgctaa

SEQ ID NO: 122948 - DNA, 25 bp, Saccharomyces pastorianus
tccgcaaacagactagcagctcatt

SEQ ID NO: 122949 - DNA, 25 bp, Saccharomyces pastorianus
acagaagcaacaagagtcctctcag

SEQ ID NO: 122950 - DNA, 25 bp, Saccharomyces pastorianus
gatatccggatcttcgcagttatta

SEQ ID NO: 122951 - DNA, 25 bp, Saccharomyces pastorianus
gacctgaacggatctctcgatatta

SEQ ID NO: 122952 - DNA, 25 bp, Saccharomyces pastorianus
gttaaccacattgatccaggacatt

SEQ ID NO: 122953 - DNA, 25 bp, Saccharomyces pastorianus
aattgtggcagggatgtgtccgcaa

SEQ ID NO: 122954 - DNA, 25 bp, Saccharomyces pastorianus
tgggatactgaataacctgttaacc

SEQ ID NO: 122955 - DNA, 25 bp, Saccharomyces pastorianus
gagtcctctcagtatattcactgtg

SEQ ID NO: 122956 - DNA, 25 bp, Saccharomyces pastorianus
ggacattgtagctcgggaaaccact

SEQ ID NO: 122957 - DNA, 25 bp, Saccharomyces pastorianus
gcagttattatttcgacctgaacgg

SEQ ID NO: 122958 - DNA, 25 bp, Saccharomyces pastorianus
gatctctcgatattaatggactaca

SEQ ID NO: 122959 - DNA, 25 bp, Saccharomyces pastorianus
agcagtttgactcgcatattctaga

SEQ ID NO: 122960 - DNA, 25 bp, Saccharomyces pastorianus
gatttcaccgacgttaaaagctatg

SEQ ID NO: 122961 - DNA, 25 bp, Saccharomyces pastorianus
gacgatgatgagattccagagtttg

SEQ ID NO: 122962 - DNA, 25 bp, Saccharomyces pastorianus
aaagctatgattgagggacccttca

SEQ ID NO: 122963 - DNA, 25 bp, Saccharomyces pastorianus
gctgcgatgatttcaccgacgttaa

SEQ ID NO: 122964 - DNA, 25 bp, Saccharomyces pastorianus
aaaggccgaatagagctcaagcagt

SEQ ID NO: 122965 - DNA, 25 bp, Saccharomyces pastorianus
gactcgcatattctagaaaaggctg

SEQ ID NO: 122966 - DNA, 25 bp, Saccharomyces pastorianus
gagatatcacgatctgctgcgatga

SEQ ID NO: 122967 - DNA, 25 bp, Saccharomyces pastorianus
atgtctcaagatttcgttacgttag

SEQ ID NO: 122968 - DNA, 25 bp, Saccharomyces pastorianus
gagctcaagcagtttgactcgcata

SEQ ID NO: 122969 - DNA, 25 bp, Saccharomyces pastorianus
taatttgaagtacagcggcgttagc

SEQ ID NO: 122970 - DNA, 25 bp, Saccharomyces pastorianus
acgacggtaccatatctgccaaaga

SEQ ID NO: 122971 - DNA, 25 bp, Saccharomyces pastorianus
aaagaaatctgccagctgctcatct

SEQ ID NO: 122972 - DNA, 25 bp, Saccharomyces pastorianus
atgactcaggtgtgctcttttcaac

SEQ ID NO: 122973 - DNA, 25 bp, Saccharomyces pastorianus
tggcccgttattttctcagatgact

SEQ ID NO: 122974 - DNA, 25 bp, Saccharomyces pastorianus
aaatttggtctttctggccttagct

SEQ ID NO: 122975 - DNA, 25 bp, Saccharomyces pastorianus
tattcgtgtccttaacaactaccgc

SEQ ID NO: 122976 - DNA, 25 bp, Saccharomyces pastorianus
tagctagggcttcttttgtgtcatc

SEQ ID NO: 122977 - DNA, 25 bp, Saccharomyces pastorianus
aaagtcttcatatctaggccgtcgt

SEQ ID NO: 122978 - DNA, 25 bp, Saccharomyces pastorianus
gtctaccctcaagatatgtccgtta

SEQ ID NO: 122979 - DNA, 25 bp, Saccharomyces pastorianus
aggccgtcgtcattttgttttgaga

SEQ ID NO: 122980 - DNA, 25 bp, Saccharomyces pastorianus
tcatcttcattgttctggcccgtta

SEQ ID NO: 122981 - DNA, 25 bp, Saccharomyces pastorianus
aaaggcgttagctcgtaaagctgtc

SEQ ID NO: 122982 - DNA, 25 bp, Saccharomyces pastorianus
tgacttaggcaaaggaagacgtctt

SEQ ID NO: 122983 - DNA, 25 bp, Saccharomyces pastorianus
agacgtctttgtgttgaatttgcga

SEQ ID NO: 122984 - DNA, 25 bp, Saccharomyces pastorianus
atgccgttacctccgatgaaatttt

SEQ ID NO: 122985 - DNA, 25 bp, Saccharomyces pastorianus
cataaaaacgctttgatgggcttaa

SEQ ID NO: 122986 - DNA, 25 bp, Saccharomyces pastorianus
taaagctgtcgtggaatttgctaca

SEQ ID NO: 122987 - DNA, 25 bp, Saccharomyces pastorianus
agaagaagcaacgacgcccaccaat

SEQ ID NO: 122988 - DNA, 25 bp, Saccharomyces pastorianus
gcgattgagaactctaacgtcgtaa

SEQ ID NO: 122989 - DNA, 25 bp, Saccharomyces pastorianus
aaaatacaagttcatgggtccagat

SEQ ID NO: 122990 - DNA, 25 bp, Saccharomyces pastorianus
aaagtggtgttgtcaagcaagcaaa

SEQ ID NO: 122991 - DNA, 25 bp, Saccharomyces pastorianus
gttgaattgtcatgccgttacctcc

SEQ ID NO: 122992 - DNA, 25 bp, Saccharomyces pastorianus
tttaagcttgctttaccacttgtta

SEQ ID NO: 122993 - DNA, 25 bp, Saccharomyces pastorianus
gtctaacttacaaatacccggcaag

SEQ ID NO: 122994 - DNA, 25 bp, Saccharomyces pastorianus
aagcttcaggaatcaccgcaggtgc

SEQ ID NO: 122995 - DNA, 25 bp, Saccharomyces pastorianus
ccgctgctgcggtgtcaggaaacaa

SEQ ID NO: 122996 - DNA, 25 bp, Saccharomyces pastorianus
tgctacatggtatcattccgcggga

SEQ ID NO: 122997 - DNA, 25 bp, Saccharomyces pastorianus
gcaggtgccgctgcaaatgcgttag

SEQ ID NO: 122998 - DNA, 25 bp, Saccharomyces pastorianus
ttgatttatggtccgttggctgcat

SEQ ID NO: 122999 - DNA, 25 bp, Saccharomyces pastorianus
attttggaagttcttggcactcccg

SEQ ID NO: 123000 - DNA, 25 bp, Saccharomyces pastorianus
gaactgataggattacagcccatat

SEQ ID NO: 123001 - DNA, 25 bp, Saccharomyces pastorianus
gttcttggcactcccgatcaaaaaa

SEQ ID NO: 123002 - DNA, 25 bp, Saccharomyces pastorianus
taaccgtagaattctggccgcggca

SEQ ID NO: 123003 - DNA, 25 bp, Saccharomyces pastorianus
gttgttctattgtgaggcctgtact

SEQ ID NO: 123004 - DNA, 25 bp, Saccharomyces pastorianus
gatgaccgcgacaggattaccacga

SEQ ID NO: 123005 - DNA, 25 bp, Saccharomyces pastorianus
acaaactacgtttatcccagacaca

SEQ ID NO: 123006 - DNA, 25 bp, Saccharomyces pastorianus
gcaggcaaatgttatctcggcgtga

SEQ ID NO: 123007 - DNA, 25 bp, Saccharomyces pastorianus
tgaaacctatcatctctattcccag

SEQ ID NO: 123008 - DNA, 25 bp, Saccharomyces pastorianus
gctgctttcatcttaagtgtgccaa

SEQ ID NO: 123009 - DNA, 25 bp, Saccharomyces pastorianus
gaacccacccaagtaagtgactctg

SEQ ID NO: 123010 - DNA, 25 bp, Saccharomyces pastorianus
tatcaccttttttctctaccaatag

SEQ ID NO: 123011 - DNA, 25 bp, Saccharomyces pastorianus
agggcatactcgcttcatagtcatt

SEQ ID NO: 123012 - DNA, 25 bp, Saccharomyces pastorianus
gtgaacaacattcgtacttcctcag

SEQ ID NO: 123013 - DNA, 25 bp, Saccharomyces pastorianus
tattcccagataacaggcttgccac

SEQ ID NO: 123014 - DNA, 25 bp, Saccharomyces pastorianus
ggaccccataatacgagagctactc

SEQ ID NO: 123015 - DNA, 25 bp, Saccharomyces pastorianus
gagagctactccacagaattcgaca

SEQ ID NO: 123016 - DNA, 25 bp, Saccharomyces pastorianus
acattctaacacactgacctgtcaa

SEQ ID NO: 123017 - DNA, 25 bp, Saccharomyces pastorianus
gaaaaggtacactcactcgtgctgc

SEQ ID NO: 123018 - DNA, 25 bp, Saccharomyces pastorianus
tgctgccgcatatttgctcaaactg

SEQ ID NO: 123019 - DNA, 25 bp, Saccharomyces pastorianus
aatccagcccattgagcgcagttat

SEQ ID NO: 123020 - DNA, 25 bp, Saccharomyces pastorianus
tagcggtaatctcatcaagtcccac

SEQ ID NO: 123021 - DNA, 25 bp, Saccharomyces pastorianus
aaggaaggcgcacagctctacagct

SEQ ID NO: 123022 - DNA, 25 bp, Saccharomyces pastorianus
agcgcagttataccagcaccagaaa

SEQ ID NO: 123023 - DNA, 25 bp, Saccharomyces pastorianus
gaattcgacaatccagcccattgag

SEQ ID NO: 123024 - DNA, 25 bp, Saccharomyces pastorianus
ggtttgccaggaaggatgctctaaa

SEQ ID NO: 123025 - DNA, 25 bp, Saccharomyces pastorianus
atccaagccttgtctcaattggctg

SEQ ID NO: 123026 - DNA, 25 bp, Saccharomyces pastorianus
agccttgtctcaattggctgcccaa

SEQ ID NO: 123027 - DNA, 25 bp, Saccharomyces pastorianus
ttgtctgctaacaacaaagttggtg

SEQ ID NO: 123028 - DNA, 25 bp, Saccharomyces pastorianus
gctgctcaacacaacacttctgtat

SEQ ID NO: 123029 - DNA, 25 bp, Saccharomyces pastorianus
tgtcaccattgacaacgtcgccgaa

SEQ ID NO: 123030 - DNA, 25 bp, Saccharomyces pastorianus
aaggcaggctcttctgccggtgcca

SEQ ID NO: 123031 - DNA, 25 bp, Saccharomyces pastorianus
gatttgttcccaggtattatctctc

SEQ ID NO: 123032 - DNA, 25 bp, Saccharomyces pastorianus
aagcttaacaagaaggcaggctctt

SEQ ID NO: 123033 - DNA, 25 bp, Saccharomyces pastorianus
gtcaattagctaagttgcacgctgt

SEQ ID NO: 123034 - DNA, 25 bp, Saccharomyces pastorianus
ggatgaagctattccagagttagtt

SEQ ID NO: 123035 - DNA, 25 bp, Saccharomyces pastorianus
taagttgcacgctgtcaccattgac

SEQ ID NO: 123036 - DNA, 25 bp, Saccharomyces pastorianus
gaataaagtctctgtctacccattg

SEQ ID NO: 123037 - DNA, 25 bp, Saccharomyces pastorianus
gggcaatagcctgtttgaactgata

SEQ ID NO: 123038 - DNA, 25 bp, Saccharomyces pastorianus
tagccattttaaatccaccgtcttt

SEQ ID NO: 123039 - DNA, 25 bp, Saccharomyces pastorianus
aatttatcgactttctctggcgtca

SEQ ID NO: 123040 - DNA, 25 bp, Saccharomyces pastorianus
gcttgcatgtggtttgccattctaa

SEQ ID NO: 123041 - DNA, 25 bp, Saccharomyces pastorianus
tcgagtggtcattcctatcttacat

SEQ ID NO: 123042 - DNA, 25 bp, Saccharomyces pastorianus
ccattgtctcttcttgttaccatta

SEQ ID NO: 123043 - DNA, 25 bp, Saccharomyces pastorianus
gaactgatatttttgctttcacttt

SEQ ID NO: 123044 - DNA, 25 bp, Saccharomyces pastorianus
ttctctggcgtcaagtttatcactg

SEQ ID NO: 123045 - DNA, 25 bp, Saccharomyces pastorianus
agtttatcactggatgcttgcatgt

SEQ ID NO: 123046 - DNA, 25 bp, Saccharomyces pastorianus
tgaatctactgtttttcgagtggtc

SEQ ID NO: 123047 - DNA, 25 bp, Saccharomyces pastorianus
tgctctcataacttttctggccaga

SEQ ID NO: 123048 - DNA, 25 bp, Saccharomyces pastorianus
ggagatttttcccagtcaaggtgac

SEQ ID NO: 123049 - DNA, 25 bp, Saccharomyces pastorianus
atggttataccttgttgctctcata

SEQ ID NO: 123050 - DNA, 25 bp, Saccharomyces pastorianus
tgagttgacttgctggatcccatta

SEQ ID NO: 123051 - DNA, 25 bp, Saccharomyces pastorianus
atatatttcatctcgtgtaggctgg

SEQ ID NO: 123052 - DNA, 25 bp, Saccharomyces pastorianus
aaatctccgcaggtcaatacagcag

SEQ ID NO: 123053 - DNA, 25 bp, Saccharomyces pastorianus
gagcacctactctggtttggttgat

SEQ ID NO: 123054 - DNA, 25 bp, Saccharomyces pastorianus
cagagttcccaccagatacttttat

SEQ ID NO: 123055 - DNA, 25 bp, Saccharomyces pastorianus
taagaccccatcctgctttgaaaag

SEQ ID NO: 123056 - DNA, 25 bp, Saccharomyces pastorianus
ggaaacgttcgcctaggtcaaatga

SEQ ID NO: 123057 - DNA, 25 bp, Saccharomyces pastorianus
aaagcattttccaacgcaagcggtg

SEQ ID NO: 123058 - DNA, 25 bp, Saccharomyces pastorianus
tgaaaggtcttttactaacgcggca

SEQ ID NO: 123059 - DNA, 25 bp, Saccharomyces pastorianus
aagtcacaggcaagcaatgtccaat

SEQ ID NO: 123060 - DNA, 25 bp, Saccharomyces pastorianus
gaggaagttccatttaggccctggt

SEQ ID NO: 123061 - DNA, 25 bp, Saccharomyces pastorianus
tgctgtattttgttacttgcccgac

SEQ ID NO: 123062 - DNA, 25 bp, Saccharomyces pastorianus
gccacctgtcccagaatcattattt

SEQ ID NO: 123063 - DNA, 25 bp, Saccharomyces pastorianus
agacagtcaatctggtatcagcgaa

SEQ ID NO: 123064 - DNA, 25 bp, Saccharomyces pastorianus
agattcaatctcttactaccctgat

SEQ ID NO: 123065 - DNA, 25 bp, Saccharomyces pastorianus
taggccctggtattttgcaatgcga

SEQ ID NO: 123066 - DNA, 25 bp, Saccharomyces pastorianus
tgcccgaccttgtgctatattataa

SEQ ID NO: 123067 - DNA, 25 bp, Saccharomyces pastorianus
gagggtgttaccttattgccacctg

SEQ ID NO: 123068 - DNA, 25 bp, Saccharomyces pastorianus
gaaactctgctttgaaaacttctag

SEQ ID NO: 123069 - DNA, 25 bp, Saccharomyces pastorianus
tttgctatcaactcgactccaatat

SEQ ID NO: 123070 - DNA, 25 bp, Saccharomyces pastorianus
gcggacaacaactgcgccaaggaaa

SEQ ID NO: 123071 - DNA, 25 bp, Saccharomyces pastorianus
cttggttggctggtactgcttcgaa

SEQ ID NO: 123072 - DNA, 25 bp, Saccharomyces pastorianus
aataatagcagtgccgccaagaata

SEQ ID NO: 123073 - DNA, 25 bp, Saccharomyces pastorianus
gagaatatcaccaaatccaagctaa

SEQ ID NO: 123074 - DNA, 25 bp, Saccharomyces pastorianus
gctcttgcatgctgggttctaaaat

SEQ ID NO: 123075 - DNA, 25 bp, Saccharomyces pastorianus
ggtactgcttcgaatcttatcttag

SEQ ID NO: 123076 - DNA, 25 bp, Saccharomyces pastorianus
agaactgttgttccaggtgttgatg

SEQ ID NO: 123077 - DNA, 25 bp, Saccharomyces pastorianus
aatatcttggagctcttgcatgctg

SEQ ID NO: 123078 - DNA, 25 bp, Saccharomyces pastorianus
ggatagactacgatcaggcgcgcaa

SEQ ID NO: 123079 - DNA, 25 bp, Saccharomyces pastorianus
tgatactgccgggaactgtgttcaa

SEQ ID NO: 123080 - DNA, 25 bp, Saccharomyces pastorianus
aaatggttctgttcattgccgctaa

SEQ ID NO: 123081 - DNA, 25 bp, Saccharomyces pastorianus
tacgatcgcaacaatccactgagga

SEQ ID NO: 123082 - DNA, 25 bp, Saccharomyces pastorianus
tgccgctaatcccaattattgctgt

SEQ ID NO: 123083 - DNA, 25 bp, Saccharomyces pastorianus
aatagtgcgctgagtccaaaattga

SEQ ID NO: 123084 - DNA, 25 bp, Saccharomyces pastorianus
tgcgccacttgtggtgacacctgga

SEQ ID NO: 123085 - DNA, 25 bp, Saccharomyces pastorianus
gaaattccacttcgatcgttttgta

SEQ ID NO: 123086 - DNA, 25 bp, Saccharomyces pastorianus
gtatcccgaaatctggtgtcacgcc

SEQ ID NO: 123087 - DNA, 25 bp, Saccharomyces pastorianus
aaagtcgtcttggtgggcctttgca

SEQ ID NO: 123088 - DNA, 25 bp, Saccharomyces pastorianus
tgctgttcagtagccagtatcccga

SEQ ID NO: 123089 - DNA, 25 bp, Saccharomyces pastorianus
ggtcaaccaaaagagtgcgccactt

SEQ ID NO: 123090 - DNA, 25 bp, Saccharomyces pastorianus
ggcgctagtagctctggtcgtagaa

SEQ ID NO: 123091 - DNA, 25 bp, Saccharomyces pastorianus
gggcgttgtacctattaaagacgtg

SEQ ID NO: 123092 - DNA, 25 bp, Saccharomyces pastorianus
tacccagcccagtgaccaagagaga

SEQ ID NO: 123093 - DNA, 25 bp, Saccharomyces pastorianus
aaatattggattggtgtgggagcac

SEQ ID NO: 123094 - DNA, 25 bp, Saccharomyces pastorianus
attaaatgatgcatgggccactagt

SEQ ID NO: 123095 - DNA, 25 bp, Saccharomyces pastorianus
gggatgctaaaccaatcgaggtact

SEQ ID NO: 123096 - DNA, 25 bp, Saccharomyces pastorianus
tgggagcacaacctagcgaaacagt

SEQ ID NO: 123097 - DNA, 25 bp, Saccharomyces pastorianus
gacgtgaagcttgattttgatagaa

SEQ ID NO: 123098 - DNA, 25 bp, Saccharomyces pastorianus
ggctaattcccgtaaggcgagggat

SEQ ID NO: 123099 - DNA, 25 bp, Saccharomyces pastorianus
gggccactagtaagaacagcaatgt

SEQ ID NO: 123100 - DNA, 25 bp, Saccharomyces pastorianus
gtacgaataaggttagccagatttg

SEQ ID NO: 123101 - DNA, 25 bp, Saccharomyces pastorianus
taggaacctacgtgccggtacccag

SEQ ID NO: 123102 - DNA, 25 bp, Saccharomyces pastorianus
gattttcagcaatcagaggagcttt

SEQ ID NO: 123103 - DNA, 25 bp, Saccharomyces pastorianus
aactataccgtaagactcataagca

SEQ ID NO: 123104 - DNA, 25 bp, Saccharomyces pastorianus
ttggataagggtttcttaggcgcgt

SEQ ID NO: 123105 - DNA, 25 bp, Saccharomyces pastorianus
ggacaccaattgctcttcaattcgg

SEQ ID NO: 123106 - DNA, 25 bp, Saccharomyces pastorianus
gaacgaaccccaaatggcattagat

SEQ ID NO: 123107 - DNA, 25 bp, Saccharomyces pastorianus
ttgttcttcagcaaggattttcagc

SEQ ID NO: 123108 - DNA, 25 bp, Saccharomyces pastorianus
aggagctttggatttgattttgaac

SEQ ID NO: 123109 - DNA, 25 bp, Saccharomyces pastorianus
gtgttatcctcgaaactgactctaa

SEQ ID NO: 123110 - DNA, 25 bp, Saccharomyces pastorianus
tgactctaacactattgcatccaga

SEQ ID NO: 123111 - DNA, 25 bp, Saccharomyces pastorianus
aatcttcgaggatcatttagtcctt

SEQ ID NO: 123112 - DNA, 25 bp, Saccharomyces pastorianus
atagatctgatgaaggacaccaatt

SEQ ID NO: 123113 - DNA, 25 bp, Saccharomyces pastorianus
aaataaaggccacggatcctgtctt

SEQ ID NO: 123114 - DNA, 25 bp, Saccharomyces pastorianus
ggatcctgtctttatgaggctataa

SEQ ID NO: 123115 - DNA, 25 bp, Saccharomyces pastorianus
gattggtttcgtcactacttacaag

SEQ ID NO: 123116 - DNA, 25 bp, Saccharomyces pastorianus
aagtattggcactaccttggagcaa

SEQ ID NO: 123117 - DNA, 25 bp, Saccharomyces pastorianus
aaacttggttatgatgctgtctttc

SEQ ID NO: 123118 - DNA, 25 bp, Saccharomyces pastorianus
gagactgacccgagttggcaaatct

SEQ ID NO: 123119 - DNA, 25 bp, Saccharomyces pastorianus
aagcatttgacgatcttcgcgacag

SEQ ID NO: 123120 - DNA, 25 bp, Saccharomyces pastorianus
gatgctgtctttcagaagcactccg

SEQ ID NO: 123121 - DNA, 25 bp, Saccharomyces pastorianus
atcgtcttgtggaaatgcttcttct

SEQ ID NO: 123122 - DNA, 25 bp, Saccharomyces pastorianus
gaggctataatccaatctttgctag

SEQ ID NO: 123123 - DNA, 25 bp, Saccharomyces pastorianus
aagcactccgacctttctgatgagt

SEQ ID NO: 123124 - DNA, 25 bp, Saccharomyces pastorianus
agatatcatttcctgccgaattcca

SEQ ID NO: 123125 - DNA, 25 bp, Saccharomyces pastorianus
gtatccagtacatgatcgcggttcc

SEQ ID NO: 123126 - DNA, 25 bp, Saccharomyces pastorianus
gagagccctgataaagtcgacctta

SEQ ID NO: 123127 - DNA, 25 bp, Saccharomyces pastorianus
gaattccatgcgcaaactgcagtag

SEQ ID NO: 123128 - DNA, 25 bp, Saccharomyces pastorianus
ggtcctctgtataattatgccgata

SEQ ID NO: 123129 - DNA, 25 bp, Saccharomyces pastorianus
tcgcggttccgctgattactggtaa

SEQ ID NO: 123130 - DNA, 25 bp, Saccharomyces pastorianus
tactggtaatctcacagctactgat

SEQ ID NO: 123131 - DNA, 25 bp, Saccharomyces pastorianus
gtatcgaagatactcatctcactca

SEQ ID NO: 123132 - DNA, 25 bp, Saccharomyces pastorianus
aggcatctgcgcgaacattttgtag

SEQ ID NO: 123133 - DNA, 25 bp, Saccharomyces pastorianus
ggtcgataggaaacgctcttctcat

SEQ ID NO: 123134 - DNA, 25 bp, Saccharomyces pastorianus
tagataaatccggtcctctgtataa

SEQ ID NO: 123135 - DNA, 25 bp, Saccharomyces pastorianus
gcttttccaccaattgcagagggta

SEQ ID NO: 123136 - DNA, 25 bp, Saccharomyces pastorianus
tattatcgccgctagcagatgtttt

SEQ ID NO: 123137 - DNA, 25 bp, Saccharomyces pastorianus
cagatgttttgcacgctgctatagg

SEQ ID NO: 123138 - DNA, 25 bp, Saccharomyces pastorianus
aatgtcgctgactatgggttgcaag

SEQ ID NO: 123139 - DNA, 25 bp, Saccharomyces pastorianus
tattagggcatcagcttttccacca

SEQ ID NO: 123140 - DNA, 25 bp, Saccharomyces pastorianus
tgccacaagagcttctgttgataat

SEQ ID NO: 123141 - DNA, 25 bp, Saccharomyces pastorianus
atagccattggcgtttctggtgcag

SEQ ID NO: 123142 - DNA, 25 bp, Saccharomyces pastorianus
gtgcagttcagcatttagcgggaat

SEQ ID NO: 123143 - DNA, 25 bp, Saccharomyces pastorianus
ttaacaatgatcctgatgcccctat

SEQ ID NO: 123144 - DNA, 25 bp, Saccharomyces pastorianus
aactgatattcctccttgtgactta

SEQ ID NO: 123145 - DNA, 25 bp, Saccharomyces pastorianus
gatgcccctatatttaatgtcgctg

SEQ ID NO: 123146 - DNA, 25 bp, Saccharomyces pastorianus
gagagatgccctttcaatggtcaaa

SEQ ID NO: 123147 - DNA, 25 bp, Saccharomyces pastorianus
tggtaagttccgtcatcgaaacaaa

SEQ ID NO: 123148 - DNA, 25 bp, Saccharomyces pastorianus
aaatgaggttcacatctcgggcacc

SEQ ID NO: 123149 - DNA, 25 bp, Saccharomyces pastorianus
tcgggcacctcttcagaagcaggaa

SEQ ID NO: 123150 - DNA, 25 bp, Saccharomyces pastorianus
gcatacgccgggattggcatctatt

SEQ ID NO: 123151 - DNA, 25 bp, Saccharomyces pastorianus
tgttaaaacgcctatccctaagagt

SEQ ID NO: 123152 - DNA, 25 bp, Saccharomyces pastorianus
aggccacagagttccaacatttcag

SEQ ID NO: 123153 - DNA, 25 bp, Saccharomyces pastorianus
aagagtggcctttctccaattgaga

SEQ ID NO: 123154 - DNA, 25 bp, Saccharomyces pastorianus
ttaaatgctactcaccaagaccact

SEQ ID NO: 123155 - DNA, 25 bp, Saccharomyces pastorianus
atcagtatcgtgaatccatcctcaa

SEQ ID NO: 123156 - DNA, 25 bp, Saccharomyces pastorianus
gaaagtccccaacgtgatttcaata

SEQ ID NO: 123157 - DNA, 25 bp, Saccharomyces pastorianus
ttgccggtctgcattcagatggagt

SEQ ID NO: 123158 - DNA, 25 bp, Saccharomyces pastorianus
aaaactcctgacctggagcaggcac

SEQ ID NO: 123159 - DNA, 25 bp, Saccharomyces pastorianus
gagcgctcacggctttgatgataag

SEQ ID NO: 123160 - DNA, 25 bp, Saccharomyces pastorianus
agcaggcacgctcattttcaagaaa

SEQ ID NO: 123161 - DNA, 25 bp, Saccharomyces pastorianus
ataaacaacttccagctaccaagct

SEQ ID NO: 123162 - DNA, 25 bp, Saccharomyces pastorianus
agttgtccaaaacggtgcttcatcc

SEQ ID NO: 123163 - DNA, 25 bp, Saccharomyces pastorianus
gaaggcttcacgttgcaactggttt

SEQ ID NO: 123164 - DNA, 25 bp, Saccharomyces pastorianus
gatatcatgacacaccagctatggt

SEQ ID NO: 123165 - DNA, 25 bp, Saccharomyces pastorianus
aatccttcgtatgggacttggcaaa

SEQ ID NO: 123166 - DNA, 25 bp, Saccharomyces pastorianus
ttgactgggatgctccgaggaccaa

SEQ ID NO: 123167 - DNA, 25 bp, Saccharomyces pastorianus
gaagatctttggtgtttgccccata

SEQ ID NO: 123168 - DNA, 25 bp, Saccharomyces pastorianus
gatgctcagccttcctggaaaagta

SEQ ID NO: 123169 - DNA, 25 bp, Saccharomyces pastorianus
gggttgcgcaaacaatcacttatcc

SEQ ID NO: 123170 - DNA, 25 bp, Saccharomyces pastorianus
cccaaagactattcagcggtgcatt

SEQ ID NO: 123171 - DNA, 25 bp, Saccharomyces pastorianus
ttacagactcgaaggcggtctcagg

SEQ ID NO: 123172 - DNA, 25 bp, Saccharomyces pastorianus
agaattcggtgtcaattcctccgat

SEQ ID NO: 123173 - DNA, 25 bp, Saccharomyces pastorianus
ggtgttgttccatatgtagcactaa

SEQ ID NO: 123174 - DNA, 25 bp, Saccharomyces pastorianus
ggctacttacccgttggacttgatc

SEQ ID NO: 123175 - DNA, 25 bp, Saccharomyces pastorianus
gggatctggcaattactaagcgaaa

SEQ ID NO: 123176 - DNA, 25 bp, Saccharomyces pastorianus
gatttcaagttctcgcaatgggcgg

SEQ ID NO: 123177 - DNA, 25 bp, Saccharomyces pastorianus
atggccaacgagtcttggtgttgtt

SEQ ID NO: 123178 - DNA, 25 bp, Saccharomyces pastorianus
tcacttatccctttgatctgctaag

SEQ ID NO: 123179 - DNA, 25 bp, Saccharomyces pastorianus
ggagggttgcacaaaatccttcaat

SEQ ID NO: 123180 - DNA, 25 bp, Saccharomyces pastorianus
ttcgaggccctcaacgctgaagaca

SEQ ID NO: 123181 - DNA, 25 bp, Saccharomyces pastorianus
gaaccaatagcaattgcctccgaac

SEQ ID NO: 123182 - DNA, 25 bp, Saccharomyces pastorianus
gttaatgagatctacaccccaattt

SEQ ID NO: 123183 - DNA, 25 bp, Saccharomyces pastorianus
aagcgaacctggtgccgtgttgaac

SEQ ID NO: 123184 - DNA, 25 bp, Saccharomyces pastorianus
tgacgcccgaatatcatccacaaag

SEQ ID NO: 123185 - DNA, 25 bp, Saccharomyces pastorianus
tggcgtacttccaaccatgcaggaa

SEQ ID NO: 123186 - DNA, 25 bp, Saccharomyces pastorianus
gagtcacccaaacgctgccttagag

SEQ ID NO: 123187 - DNA, 25 bp, Saccharomyces pastorianus
agtcccacctgggtatggcgtactt

SEQ ID NO: 123188 - DNA, 25 bp, Saccharomyces pastorianus
tccgaacctaacttcactgcaatat

SEQ ID NO: 123189 - DNA, 25 bp, Saccharomyces pastorianus
tgatgatgccagtcatggtcccaac

SEQ ID NO: 123190 - DNA, 25 bp, Saccharomyces pastorianus
ttgttcgtcgattatgcacgctcca

SEQ ID NO: 123191 - DNA, 25 bp, Saccharomyces pastorianus
tactccctcccgaatgtgcatatag

SEQ ID NO: 123192 - DNA, 25 bp, Saccharomyces pastorianus
tattcaacggcagcttcctcttata

SEQ ID NO: 123193 - DNA, 25 bp, Saccharomyces pastorianus
acgctccacttactcctgaaataaa

SEQ ID NO: 123194 - DNA, 25 bp, Saccharomyces pastorianus
aacgtcaatcttgttgccctattta

SEQ ID NO: 123195 - DNA, 25 bp, Saccharomyces pastorianus
actctattatcttttcgccggttat

SEQ ID NO: 123196 - DNA, 25 bp, Saccharomyces pastorianus
ctgcatcagacagaggatcccgtat

SEQ ID NO: 123197 - DNA, 25 bp, Saccharomyces pastorianus
tgtacctccatcaatgcagcatttt

SEQ ID NO: 123198 - DNA, 25 bp, Saccharomyces pastorianus
ggtttgttcgagaccttcaacactg

SEQ ID NO: 123199 - DNA, 25 bp, Saccharomyces pastorianus
gcaactgcgcgctgtggtaaagcta

SEQ ID NO: 123200 - DNA, 25 bp, Saccharomyces pastorianus
atggagatcaagtcccaactctatt

SEQ ID NO: 123201 - DNA, 25 bp, Saccharomyces pastorianus
tacaggtctggatactacagcccca

SEQ ID NO: 123202 - DNA, 25 bp, Saccharomyces pastorianus
gttaaccgtggtagttcagttgtcg

SEQ ID NO: 123203 - DNA, 25 bp, Saccharomyces pastorianus
gtcctccttattacaagttcctttg

SEQ ID NO: 123204 - DNA, 25 bp, Saccharomyces pastorianus
gattacgttgctttagtgcatccag

SEQ ID NO: 123205 - DNA, 25 bp, Saccharomyces pastorianus
tgccggattccgttaagattcaaag

SEQ ID NO: 123206 - DNA, 25 bp, Saccharomyces pastorianus
taggcgttgaggtcttccgtcaaac

SEQ ID NO: 123207 - DNA, 25 bp, Saccharomyces pastorianus
gttccaacccaaactactgatcaag

SEQ ID NO: 123208 - DNA, 25 bp, Saccharomyces pastorianus
ggagatgctattcccatcgttcata

SEQ ID NO: 123209 - DNA, 25 bp, Saccharomyces pastorianus
accgtagaggtctgctagttccaac

SEQ ID NO: 123210 - DNA, 25 bp, Saccharomyces pastorianus
ataccactattgctggtacgcgtat

SEQ ID NO: 123211 - DNA, 25 bp, Saccharomyces pastorianus
agtattttccgcttgcaagatgccc

SEQ ID NO: 123212 - DNA, 25 bp, Saccharomyces pastorianus
gaggcttcttttaattatgcaatat

SEQ ID NO: 123213 - DNA, 25 bp, Saccharomyces pastorianus
gaatattgcttcacatacagtaaaa

SEQ ID NO: 123214 - DNA, 25 bp, Saccharomyces pastorianus
ctcttgttccaaatactctgtcgta

SEQ ID NO: 123215 - DNA, 25 bp, Saccharomyces pastorianus
tactctgtcgtattgcttcttgtaa

SEQ ID NO: 123216 - DNA, 25 bp, Saccharomyces pastorianus
ctgtcgtattgcttcttgtaattat

SEQ ID NO: 123217 - DNA, 25 bp, Saccharomyces pastorianus
atgctcttgttccaaatactctgtc

SEQ ID NO: 123218 - DNA, 25 bp, Saccharomyces pastorianus
aattatactataagaccaacgaggg

SEQ ID NO: 123219 - DNA, 25 bp, Saccharomyces pastorianus
gggtaatgctcatccatcgggattt

SEQ ID NO: 123220 - DNA, 25 bp, Saccharomyces pastorianus
gaccaacgagggatgaggcttcttt

SEQ ID NO: 123221 - DNA, 25 bp, Saccharomyces pastorianus
aaaacgggtaatgctcatccatcgg

SEQ ID NO: 123222 - DNA, 25 bp, Saccharomyces pastorianus
cgagggatgaggcttcttttaatta

SEQ ID NO: 123223 - DNA, 25 bp, Saccharomyces pastorianus
gctgtcatagtgcagttattacgat

SEQ ID NO: 123224 - DNA, 25 bp, Saccharomyces pastorianus
aagagttttgcatctactaagcttg

SEQ ID NO: 123225 - DNA, 25 bp, Saccharomyces pastorianus
aaagaactatgcgagatgctacccc

SEQ ID NO: 123226 - DNA, 25 bp, Saccharomyces pastorianus
aacttcttggtcgtccctgatgttt

SEQ ID NO: 123227 - DNA, 25 bp, Saccharomyces pastorianus
cctgatgtttgggactttgataatg

SEQ ID NO: 123228 - DNA, 25 bp, Saccharomyces pastorianus
acgtgttcctttgagggctgtcata

SEQ ID NO: 123229 - DNA, 25 bp, Saccharomyces pastorianus
gcgctgattgtgataaaggtcctat

SEQ ID NO: 123230 - DNA, 25 bp, Saccharomyces pastorianus
aggtcctatcggaataatatgtcag

SEQ ID NO: 123231 - DNA, 25 bp, Saccharomyces pastorianus
agcaggtgcacagcgaattcaagtt

SEQ ID NO: 123232 - DNA, 25 bp, Saccharomyces pastorianus
cagcgagagcaacttcttggtcgtc

SEQ ID NO: 123233 - DNA, 25 bp, Saccharomyces pastorianus
ataaacttaccagagcaggtgcaca

SEQ ID NO: 123234 - DNA, 25 bp, Saccharomyces pastorianus
agagcacatacacccaataatcacc

SEQ ID NO: 123235 - DNA, 25 bp, Saccharomyces pastorianus
gtcattgtccttggcgagggtgtaa

SEQ ID NO: 123236 - DNA, 25 bp, Saccharomyces pastorianus
agagttgagtcttctgatatccagg

SEQ ID NO: 123237 - DNA, 25 bp, Saccharomyces pastorianus
gataagcccgaacatatttctcaag

SEQ ID NO: 123238 - DNA, 25 bp, Saccharomyces pastorianus
aataatcaccgaggccgctaagact

SEQ ID NO: 123239 - DNA, 25 bp, Saccharomyces pastorianus
aagacgacgtgctaccagttgaatt

SEQ ID NO: 123240 - DNA, 25 bp, Saccharomyces pastorianus
gactgagcttgttcgtgcttatgta

SEQ ID NO: 123241 - DNA, 25 bp, Saccharomyces pastorianus
attatgcaacagaccctaaaaccgg

SEQ ID NO: 123242 - DNA, 25 bp, Saccharomyces pastorianus
gatatccaggaagccttgtcaagat

SEQ ID NO: 123243 - DNA, 25 bp, Saccharomyces pastorianus
tatgattcgtttggctgaggcgcac

SEQ ID NO: 123244 - DNA, 25 bp, Saccharomyces pastorianus
gatgggtgacgattcgagatccgat

SEQ ID NO: 123245 - DNA, 25 bp, Saccharomyces pastorianus
gcctacagaagttttatcgtgttta

SEQ ID NO: 123246 - DNA, 25 bp, Saccharomyces pastorianus
agcctaaactttgctctaaagccta

SEQ ID NO: 123247 - DNA, 25 bp, Saccharomyces pastorianus
taccagtgggttagtttctaaagca

SEQ ID NO: 123248 - DNA, 25 bp, Saccharomyces pastorianus
tatggcgcatatggtattcagttga

SEQ ID NO: 123249 - DNA, 25 bp, Saccharomyces pastorianus
aagagggtcttcaaccaccaactgt

SEQ ID NO: 123250 - DNA, 25 bp, Saccharomyces pastorianus
gatagggttttattctgtcggtgaa

SEQ ID NO: 123251 - DNA, 25 bp, Saccharomyces pastorianus
atcagtgtattcgaacctttataag

SEQ ID NO: 123252 - DNA, 25 bp, Saccharomyces pastorianus
tgttgcccagttcaaatcagtgtat

SEQ ID NO: 123253 - DNA, 25 bp, Saccharomyces pastorianus
aatcttttgtcatcaaaggctttat

SEQ ID NO: 123254 - DNA, 25 bp, Saccharomyces pastorianus
aagcaggatccaaaattataccagt

SEQ ID NO: 123255 - DNA, 25 bp, Saccharomyces pastorianus
gaacctttataagcagagcctaaac

SEQ ID NO: 123256 - DNA, 25 bp, Saccharomyces pastorianus
gtgtcctaagaagttctccccaatt

SEQ ID NO: 123257 - DNA, 25 bp, Saccharomyces pastorianus
tggtatgccagctgccttcttgact

SEQ ID NO: 123258 - DNA, 25 bp, Saccharomyces pastorianus
tctaggtttgactcttcagtttata

SEQ ID NO: 123259 - DNA, 25 bp, Saccharomyces pastorianus
ttttgtatcgacgacgacgcaggca

SEQ ID NO: 123260 - DNA, 25 bp, Saccharomyces pastorianus
atgggagcttttaactgccggtgcc

SEQ ID NO: 123261 - DNA, 25 bp, Saccharomyces pastorianus
gtaacggtgaactcccacagcaaaa

SEQ ID NO: 123262 - DNA, 25 bp, Saccharomyces pastorianus
ctctggccgcctatgaattattcaa

SEQ ID NO: 123263 - DNA, 25 bp, Saccharomyces pastorianus
ggtatatttcatgctatccgaacta

SEQ ID NO: 123264 - DNA, 25 bp, Saccharomyces pastorianus
caaaggtggtggagcccgtgtccta

SEQ ID NO: 123265 - DNA, 25 bp, Saccharomyces pastorianus
cttcttgactactccttttgatgtt

SEQ ID NO: 123266 - DNA, 25 bp, Saccharomyces pastorianus
aatttgggttcactctggccgccta

SEQ ID NO: 123267 - DNA, 25 bp, Saccharomyces pastorianus
gggtgtagctgtagtctatgccttc

SEQ ID NO: 123268 - DNA, 25 bp, Saccharomyces pastorianus
ttcactcctaatttggtcttgtaat

SEQ ID NO: 123269 - DNA, 25 bp, Saccharomyces pastorianus
atttctaatacccactttctatgcg

SEQ ID NO: 123270 - DNA, 25 bp, Saccharomyces pastorianus
gatcctgtgattactagaccctatg

SEQ ID NO: 123271 - DNA, 25 bp, Saccharomyces pastorianus
ttactagaccctatgcgattgcatt

SEQ ID NO: 123272 - DNA, 25 bp, Saccharomyces pastorianus
ggatagctcactcgatgtagttagt

SEQ ID NO: 123273 - DNA, 25 bp, Saccharomyces pastorianus
tggtggaaacattcttggcaatact

SEQ ID NO: 123274 - DNA, 25 bp, Saccharomyces pastorianus
gcgattgcattaacttcactcctaa

SEQ ID NO: 123275 - DNA, 25 bp, Saccharomyces pastorianus
tccaaccgtggtgaagagctacaat

SEQ ID NO: 123276 - DNA, 25 bp, Saccharomyces pastorianus
agtctatgccttccagttcttattt

SEQ ID NO: 123277 - DNA, 25 bp, Saccharomyces pastorianus
atgaatgctttcaaccagatgacag

SEQ ID NO: 123278 - DNA, 25 bp, Saccharomyces pastorianus
tagactccgcgaagttactaaccat

SEQ ID NO: 123279 - DNA, 25 bp, Saccharomyces pastorianus
ccgcttcatgggtttttcttagata

SEQ ID NO: 123280 - DNA, 25 bp, Saccharomyces pastorianus
atttcccagcagagaaggtagccag

SEQ ID NO: 123281 - DNA, 25 bp, Saccharomyces pastorianus
attttcactgttgaaccatcatcct

SEQ ID NO: 123282 - DNA, 25 bp, Saccharomyces pastorianus
gtaagaagagaataactgccgcatt

SEQ ID NO: 123283 - DNA, 25 bp, Saccharomyces pastorianus
gaagattgtaaacctccgagtactg

SEQ ID NO: 123284 - DNA, 25 bp, Saccharomyces pastorianus
gaagaatattcgatagactccgcga

SEQ ID NO: 123285 - DNA, 25 bp, Saccharomyces pastorianus
gtagccaggaatcagtaccgggaaa

SEQ ID NO: 123286 - DNA, 25 bp, Saccharomyces pastorianus
gttactaaccataatacgcgagtgt

SEQ ID NO: 123287 - DNA, 25 bp, Saccharomyces pastorianus
atgtcgtatatttctacactccacc

SEQ ID NO: 123288 - DNA, 25 bp, Saccharomyces pastorianus
gccgcattattaaccgatgtcgtat

SEQ ID NO: 123289 - DNA, 25 bp, Saccharomyces pastorianus
ggtccttaaccgaggaacaagtgca

SEQ ID NO: 123290 - DNA, 25 bp, Saccharomyces pastorianus
gattttgccaatgatcagctcgaag

SEQ ID NO: 123291 - DNA, 25 bp, Saccharomyces pastorianus
aagaccatggagtggcccggtgatt

SEQ ID NO: 123292 - DNA, 25 bp, Saccharomyces pastorianus
gctcgaagacttgtaccggctcaaa

SEQ ID NO: 123293 - DNA, 25 bp, Saccharomyces pastorianus
tacccggtgcatcaagaatactcca

SEQ ID NO: 123294 - DNA, 25 bp, Saccharomyces pastorianus
ttggaaactctacccggtgcatcaa

SEQ ID NO: 123295 - DNA, 25 bp, Saccharomyces pastorianus
aaacagcttgtccagatcccgaaag

SEQ ID NO: 123296 - DNA, 25 bp, Saccharomyces pastorianus
aatctgaacaattcaaggctcttga

SEQ ID NO: 123297 - DNA, 25 bp, Saccharomyces pastorianus
gaatactccaaactgtctcatcaaa

SEQ ID NO: 123298 - DNA, 25 bp, Saccharomyces pastorianus
gatatagttaaatcgccccaaaaat

SEQ ID NO: 123299 - DNA, 25 bp, Saccharomyces pastorianus
gaagttgctatccagagattttata

SEQ ID NO: 123300 - DNA, 25 bp, Saccharomyces pastorianus
tgtcaatcaggttcccgcaatacaa

SEQ ID NO: 123301 - DNA, 25 bp, Saccharomyces pastorianus
aaaatccagggatggctgggcgccc

SEQ ID NO: 123302 - DNA, 25 bp, Saccharomyces pastorianus
aggccggcgctagtataaattcaat

SEQ ID NO: 123303 - DNA, 25 bp, Saccharomyces pastorianus
tggccaatctgccatcatggagctt

SEQ ID NO: 123304 - DNA, 25 bp, Saccharomyces pastorianus
agcaacttcagtacacggcgttaac

SEQ ID NO: 123305 - DNA, 25 bp, Saccharomyces pastorianus
ggactgggaccgctaatggcaaaat

SEQ ID NO: 123306 - DNA, 25 bp, Saccharomyces pastorianus
gacaacttttgccaaccaagtcatg

SEQ ID NO: 123307 - DNA, 25 bp, Saccharomyces pastorianus
gagtgctaccaattcgcagagtatc

SEQ ID NO: 123308 - DNA, 25 bp, Saccharomyces pastorianus
ttgacgaacgtcatcatcacaggat

SEQ ID NO: 123309 - DNA, 25 bp, Saccharomyces pastorianus
tgggcgcccttacaatggccaatct

SEQ ID NO: 123310 - DNA, 25 bp, Saccharomyces pastorianus
aggatctacctctctgatcgaaggt

SEQ ID NO: 123311 - DNA, 25 bp, Saccharomyces pastorianus
gaagttatccaagagacacgctgaa

SEQ ID NO: 123312 - DNA, 25 bp, Saccharomyces pastorianus
gagacatgatcgaagctcactacag

SEQ ID NO: 123313 - DNA, 25 bp, Saccharomyces pastorianus
gggaattccaagtcggtccatgtac

SEQ ID NO: 123314 - DNA, 25 bp, Saccharomyces pastorianus
gtgccggtaaggtttatgccagaga

SEQ ID NO: 123315 - DNA, 25 bp, Saccharomyces pastorianus
ggatggccagatactttttgcacag

SEQ ID NO: 123316 - DNA, 25 bp, Saccharomyces pastorianus
tgaaaccgcttccatgactgccttt

SEQ ID NO: 123317 - DNA, 25 bp, Saccharomyces pastorianus
aactgtttgcggtgctattgacaat

SEQ ID NO: 123318 - DNA, 25 bp, Saccharomyces pastorianus
gaggtagctcaattagaatcccaag

SEQ ID NO: 123319 - DNA, 25 bp, Saccharomyces pastorianus
acagagcttgtttgtatgccggatt

SEQ ID NO: 123320 - DNA, 25 bp, Saccharomyces pastorianus
atcaagatctcattccatccaaagc

SEQ ID NO: 123321 - DNA, 25 bp, Saccharomyces pastorianus
aacatcgacccatacttggttacag

SEQ ID NO: 123322 - DNA, 25 bp, Saccharomyces pastorianus
ttctaccagagagcatcgacgttct

SEQ ID NO: 123323 - DNA, 25 bp, Saccharomyces pastorianus
aagatcattatccaagtcgccttga

SEQ ID NO: 123324 - DNA, 25 bp, Saccharomyces pastorianus
gcgtcaagacatcagcaacctcaag

SEQ ID NO: 123325 - DNA, 25 bp, Saccharomyces pastorianus
aagtgtccagattgtgcatatccat

SEQ ID NO: 123326 - DNA, 25 bp, Saccharomyces pastorianus
gcccaccgtgcagagcttgagcgaa

SEQ ID NO: 123327 - DNA, 25 bp, Saccharomyces pastorianus
cttgaacgacatcactcacgtggtc

SEQ ID NO: 123328 - DNA, 25 bp, Saccharomyces pastorianus
gcatatccatcatcctgcaatgttg

SEQ ID NO: 123329 - DNA, 25 bp, Saccharomyces pastorianus
tcacgtggtcgagcttctaccagag

SEQ ID NO: 123330 - DNA, 25 bp, Saccharomyces pastorianus
aattggactccaagttgctgtgctg

SEQ ID NO: 123331 - DNA, 25 bp, Saccharomyces pastorianus
agaattgacctccttcgatgaatac

SEQ ID NO: 123332 - DNA, 25 bp, Saccharomyces pastorianus
gtcgacaacggtttctggtccgata

SEQ ID NO: 123333 - DNA, 25 bp, Saccharomyces pastorianus
aacgtcgatgacctgaatctggcta

SEQ ID NO: 123334 - DNA, 25 bp, Saccharomyces pastorianus
ttttggatgcctctgcttcaagccg

SEQ ID NO: 123335 - DNA, 25 bp, Saccharomyces pastorianus
gtcgcctttttagaactaacttctg

SEQ ID NO: 123336 - DNA, 25 bp, Saccharomyces pastorianus
cagtctctcagccaagctcaagaaa

SEQ ID NO: 123337 - DNA, 25 bp, Saccharomyces pastorianus
ttgccaatgccgctcttttggatgc

SEQ ID NO: 123338 - DNA, 25 bp, Saccharomyces pastorianus
ttgtcatcccatctctttcgccagt

SEQ ID NO: 123339 - DNA, 25 bp, Saccharomyces pastorianus
aagaaagaactctgacgcaaacgtc

SEQ ID NO: 123340 - DNA, 25 bp, Saccharomyces pastorianus
taacttctgacgtttctcaaccttt

SEQ ID NO: 123341 - DNA, 25 bp, Saccharomyces pastorianus
tgacgcaaacgtcgatgacctgaat

SEQ ID NO: 123342 - DNA, 25 bp, Saccharomyces pastorianus
gtttctcaaccttttgtcatcccat

SEQ ID NO: 123343 - DNA, 25 bp, Saccharomyces pastorianus
atgacctgaatctggctattgccaa

SEQ ID NO: 123344 - DNA, 25 bp, Saccharomyces pastorianus
gacctaacggcagctttagacacaa

SEQ ID NO: 123345 - DNA, 25 bp, Saccharomyces pastorianus
gcaccccatatacatgacctaacgg

SEQ ID NO: 123346 - DNA, 25 bp, Saccharomyces pastorianus
tttagacacaacagctccccagaaa

SEQ ID NO: 123347 - DNA, 25 bp, Saccharomyces pastorianus
tatacatgacctaacggcagcttta

SEQ ID NO: 123348 - DNA, 25 bp, Saccharomyces pastorianus
aaatgcatcaccatacttacgcacc

SEQ ID NO: 123349 - DNA, 25 bp, Saccharomyces pastorianus
cagctccccagaaaaaatgtccaaa

SEQ ID NO: 123350 - DNA, 25 bp, Saccharomyces pastorianus
gacacaacagctccccagaaaaaat

SEQ ID NO: 123351 - DNA, 25 bp, Saccharomyces pastorianus
ttctcttccatcttgtaatatataa

SEQ ID NO: 123352 - DNA, 25 bp, Saccharomyces pastorianus
ggtggttaacctttctcttccatct

SEQ ID NO: 123353 - DNA, 25 bp, Saccharomyces pastorianus
catacttacgcaccccatatacatg

SEQ ID NO: 123354 - DNA, 25 bp, Saccharomyces pastorianus
aacctttctcttccatcttgtaata

SEQ ID NO: 123355 - DNA, 25 bp, Saccharomyces pastorianus
gggtagcacagaacacgccgatgat

SEQ ID NO: 123356 - DNA, 25 bp, Saccharomyces pastorianus
ggatgtacttgctaagcaccggcta

SEQ ID NO: 123357 - DNA, 25 bp, Saccharomyces pastorianus
aggtattcgtgttgcgtactccaaa

SEQ ID NO: 123358 - DNA, 25 bp, Saccharomyces pastorianus
ggtgcgcaacggttcactaacgaat

SEQ ID NO: 123359 - DNA, 25 bp, Saccharomyces pastorianus
gagctcacctgagtcgaaattccga

SEQ ID NO: 123360 - DNA, 25 bp, Saccharomyces pastorianus
aaaggttactgctgctgagccggtt

SEQ ID NO: 123361 - DNA, 25 bp, Saccharomyces pastorianus
gactggacctacactacgcggtata

SEQ ID NO: 123362 - DNA, 25 bp, Saccharomyces pastorianus
ggataacgatcaaaagctgcccctt

SEQ ID NO: 123363 - DNA, 25 bp, Saccharomyces pastorianus
gtgagggtctacgacaccaggattt

SEQ ID NO: 123364 - DNA, 25 bp, Saccharomyces pastorianus
atggcatatcaatccttaacgtcaa

SEQ ID NO: 123365 - DNA, 25 bp, Saccharomyces pastorianus
tcacgacccaaaagctgccttgaga

SEQ ID NO: 123366 - DNA, 25 bp, Saccharomyces pastorianus
ggtcttcttacaacaggaacaagtc

SEQ ID NO: 123367 - DNA, 25 bp, Saccharomyces pastorianus
acggtcttcttacaacaggaacaag

SEQ ID NO: 123368 - DNA, 25 bp, Saccharomyces pastorianus
agcgacggtcttcttacaacaggaa

SEQ ID NO: 123369 - DNA, 25 bp, Saccharomyces pastorianus
tcttcttacaacaggaacaagtcca

SEQ ID NO: 123370 - DNA, 25 bp, Saccharomyces pastorianus
tccaaataccagcagcacctctctt

SEQ ID NO: 123371 - DNA, 25 bp, Saccharomyces pastorianus
gacggtcttcttacaacaggaacaa

SEQ ID NO: 123372 - DNA, 25 bp, Saccharomyces pastorianus
aggaacaagtccaaataccagcagc

SEQ ID NO: 123373 - DNA, 25 bp, Saccharomyces pastorianus
gcgacggtcttcttacaacaggaac

SEQ ID NO: 123374 - DNA, 25 bp, Saccharomyces pastorianus
cagcgacggtcttcttacaacagga

SEQ ID NO: 123375 - DNA, 25 bp, Saccharomyces pastorianus
cggtcttcttacaacaggaacaagt

SEQ ID NO: 123376 - DNA, 25 bp, Saccharomyces pastorianus
cgacggtcttcttacaacaggaaca

SEQ ID NO: 123377 - DNA, 25 bp, Saccharomyces pastorianus
cagcagcagtggagacagtgtaagc

SEQ ID NO: 123378 - DNA, 25 bp, Saccharomyces pastorianus
agtgataccaaccttcttagttctt

SEQ ID NO: 123379 - DNA, 25 bp, Saccharomyces pastorianus
tcttgacggtcttcttaccacagaa

SEQ ID NO: 123380 - DNA, 25 bp, Saccharomyces pastorianus
ctctcaatcttctgatggtagatct

SEQ ID NO: 123381 - DNA, 25 bp, Saccharomyces pastorianus
gacggtcttcttaccacagaaagaa

SEQ ID NO: 123382 - DNA, 25 bp, Saccharomyces pastorianus
gaaagaacaatcgtatctagcgtgt

SEQ ID NO: 123383 - DNA, 25 bp, Saccharomyces pastorianus
taacggacaccgtacttaccagtga

SEQ ID NO: 123384 - DNA, 25 bp, Saccharomyces pastorianus
gtacttaccagtgataccaaccttc

SEQ ID NO: 123385 - DNA, 25 bp, Saccharomyces pastorianus
tatctagcgtgttgttggatttcca

SEQ ID NO: 123386 - DNA, 25 bp, Saccharomyces pastorianus
gagacagtgtaagcaccaccagcga

SEQ ID NO: 123387 - DNA, 25 bp, Saccharomyces pastorianus
aaccatttctctcaatcttctgatg

SEQ ID NO: 123388 - DNA, 25 bp, Saccharomyces pastorianus
tagacgatggctcttcggaaatctt

SEQ ID NO: 123389 - DNA, 25 bp, Saccharomyces pastorianus
tggcgttattcgaaaaccctacaat

SEQ ID NO: 123390 - DNA, 25 bp, Saccharomyces pastorianus
ggaaatcttggaggacgaacatgtc

SEQ ID NO: 123391 - DNA, 25 bp, Saccharomyces pastorianus
tattgccttggagaacggagatctt

SEQ ID NO: 123392 - DNA, 25 bp, Saccharomyces pastorianus
gatgttaaccgaagactatccgtcg

SEQ ID NO: 123393 - DNA, 25 bp, Saccharomyces pastorianus
acgcatgcacgtattgccttggaga

SEQ ID NO: 123394 - DNA, 25 bp, Saccharomyces pastorianus
atgctattctgttttgtattcgatg

SEQ ID NO: 123395 - DNA, 25 bp, Saccharomyces pastorianus
gactatccgtcgatttctcatttaa

SEQ ID NO: 123396 - DNA, 25 bp, Saccharomyces pastorianus
aaagtgtaccaaacgcatgcacgta

SEQ ID NO: 123397 - DNA, 25 bp, Saccharomyces pastorianus
gagcaaaacttgacggagttcatat

SEQ ID NO: 123398 - DNA, 25 bp, Saccharomyces pastorianus
actagtcggcaattatcactacttc

SEQ ID NO: 123399 - DNA, 25 bp, Saccharomyces pastorianus
gatgattgctttacagatacactcc

SEQ ID NO: 123400 - DNA, 25 bp, Saccharomyces pastorianus
aatcaagagcagaacgcgacgaatt

SEQ ID NO: 123401 - DNA, 25 bp, Saccharomyces pastorianus
gactgctcttcttattagactgttg

SEQ ID NO: 123402 - DNA, 25 bp, Saccharomyces pastorianus
caatcgttaggtgctcaatcttcat

SEQ ID NO: 123403 - DNA, 25 bp, Saccharomyces pastorianus
gaagacacaatcatgcggtaatatt

SEQ ID NO: 123404 - DNA, 25 bp, Saccharomyces pastorianus
tgagttatcgtcgaagtttcccaaa

SEQ ID NO: 123405 - DNA, 25 bp, Saccharomyces pastorianus
tataccgccagacgacagtgatact

SEQ ID NO: 123406 - DNA, 25 bp, Saccharomyces pastorianus
ttgatcacgttggacaggttgtact

SEQ ID NO: 123407 - DNA, 25 bp, Saccharomyces pastorianus
aacagcgcctcttggaaattagaca

SEQ ID NO: 123408 - DNA, 25 bp, Saccharomyces pastorianus
tattaagccatactcaacagcgcct

SEQ ID NO: 123409 - DNA, 25 bp, Saccharomyces pastorianus
ggactatgagctcttgcaatcgtta

SEQ ID NO: 123410 - DNA, 25 bp, Saccharomyces pastorianus
ctagcattcctatatatcctctcag

SEQ ID NO: 123411 - DNA, 25 bp, Saccharomyces pastorianus
tatgcgggtccatcttacacactat

SEQ ID NO: 123412 - DNA, 25 bp, Saccharomyces pastorianus
tcagtctcacgtttctatgcgggtc

SEQ ID NO: 123413 - DNA, 25 bp, Saccharomyces pastorianus
gttccactcttgttgtcaacggcaa

SEQ ID NO: 123414 - DNA, 25 bp, Saccharomyces pastorianus
ggcaatgtacgttaactcgggccat

SEQ ID NO: 123415 - DNA, 25 bp, Saccharomyces pastorianus
actagtttctttgctatgccatgcc

SEQ ID NO: 123416 - DNA, 25 bp, Saccharomyces pastorianus
atgggtatgttaggcgttccactct

SEQ ID NO: 123417 - DNA, 25 bp, Saccharomyces pastorianus
tacggctctgatagatccgcatcta

SEQ ID NO: 123418 - DNA, 25 bp, Saccharomyces pastorianus
atgatctcatcgcaatgttcccttt

SEQ ID NO: 123419 - DNA, 25 bp, Saccharomyces pastorianus
aattttccacctctgtttctaacat

SEQ ID NO: 123420 - DNA, 25 bp, Saccharomyces pastorianus
tatgtggactctacggctagcattc

SEQ ID NO: 123421 - DNA, 25 bp, Saccharomyces pastorianus
aattcggcggctctaaacttatatg

SEQ ID NO: 123422 - DNA, 25 bp, Saccharomyces pastorianus
tgaaaggagctgcactcggtctacg

SEQ ID NO: 123423 - DNA, 25 bp, Saccharomyces pastorianus
gcccgagttaacgtacattgccgtt

SEQ ID NO: 123424 - DNA, 25 bp, Saccharomyces pastorianus
gtatttcttgaaccaatggcccgag

SEQ ID NO: 123425 - DNA, 25 bp, Saccharomyces pastorianus
ggatctatcagagccgtactcgata

SEQ ID NO: 123426 - DNA, 25 bp, Saccharomyces pastorianus
cataccgcgggcatggcatagcaaa

SEQ ID NO: 123427 - DNA, 25 bp, Saccharomyces pastorianus
taaactgatattgccgttgactgaa

SEQ ID NO: 123428 - DNA, 25 bp, Saccharomyces pastorianus
gaatgctagccgtagagtccacata

SEQ ID NO: 123429 - DNA, 25 bp, Saccharomyces pastorianus
gaacgcctaacatacccattggttg

SEQ ID NO: 123430 - DNA, 25 bp, Saccharomyces pastorianus
ggatgttccgctactacttgaatga

SEQ ID NO: 123431 - DNA, 25 bp, Saccharomyces pastorianus
ggacccgcatagaaacgtgagactg

SEQ ID NO: 123432 - DNA, 25 bp, Saccharomyces pastorianus
aaagcagccttacgaggccaaggcc

SEQ ID NO: 123433 - DNA, 25 bp, Saccharomyces pastorianus
ggaaggctctaacgccagaggaaaa

SEQ ID NO: 123434 - DNA, 25 bp, Saccharomyces pastorianus
gtggaaggctctaacgccagaggaa

SEQ ID NO: 123435 - DNA, 25 bp, Saccharomyces pastorianus
agcagccttacgaggccaaggccca

SEQ ID NO: 123436 - DNA, 25 bp, Saccharomyces pastorianus
aacgccagaggaaaagcagccttac

SEQ ID NO: 123437 - DNA, 25 bp, Saccharomyces pastorianus
ttacgaggccaaggcccaggccgat

SEQ ID NO: 123438 - DNA, 25 bp, Saccharomyces pastorianus
ggcccaggccgataagaagagatat

SEQ ID NO: 123439 - DNA, 25 bp, Saccharomyces pastorianus
gccagaggaaaagcagccttacgag

SEQ ID NO: 123440 - DNA, 25 bp, Saccharomyces pastorianus
agaagtggaaggctctaacgccaga

SEQ ID NO: 123441 - DNA, 25 bp, Saccharomyces pastorianus
ctaacgccagaggaaaagcagcctt

SEQ ID NO: 123442 - DNA, 25 bp, Saccharomyces pastorianus
ggccgataagaagagatatgaatcc

SEQ ID NO: 123443 - DNA, 25 bp, Saccharomyces pastorianus
gtttttgctcaattgactaccctat

SEQ ID NO: 123444 - DNA, 25 bp, Saccharomyces pastorianus
gatgtatcgcacgacgttaaatact

SEQ ID NO: 123445 - DNA, 25 bp, Saccharomyces pastorianus
gctcaattgactaccctatacatag

SEQ ID NO: 123446 - DNA, 25 bp, Saccharomyces pastorianus
attagtggcgccgaattctaccctc

SEQ ID NO: 123447 - DNA, 25 bp, Saccharomyces pastorianus
agtaaagcacagtcgcaatggccac

SEQ ID NO: 123448 - DNA, 25 bp, Saccharomyces pastorianus
taaagaaggactgttttgggacgtg

SEQ ID NO: 123449 - DNA, 25 bp, Saccharomyces pastorianus
gatacttttcgaatcacccgccttt

SEQ ID NO: 123450 - DNA, 25 bp, Saccharomyces pastorianus
gtatttattactggtaccgactgtt

SEQ ID NO: 123451 - DNA, 25 bp, Saccharomyces pastorianus
gttaaatactgttcaagtgtcacaa

SEQ ID NO: 123452 - DNA, 25 bp, Saccharomyces pastorianus
gtcgcgcgcgatacttttcgaatca

SEQ ID NO: 123453 - DNA, 25 bp, Saccharomyces pastorianus
gtaccgactgttaaagaaggactgt

SEQ ID NO: 123454 - DNA, 25 bp, Saccharomyces pastorianus
attcatgccggatttttcaagtgtc

SEQ ID NO: 123455 - DNA, 25 bp, Saccharomyces pastorianus
agacgacgagcctgtttgccttcaa

SEQ ID NO: 123456 - DNA, 25 bp, Saccharomyces pastorianus
gcttctttccaaccaaccgtatagt

SEQ ID NO: 123457 - DNA, 25 bp, Saccharomyces pastorianus
acatccgttcctaaacgaggtgcgg

SEQ ID NO: 123458 - DNA, 25 bp, Saccharomyces pastorianus
gcgtgactccatgcaccagatattt

SEQ ID NO: 123459 - DNA, 25 bp, Saccharomyces pastorianus
gatctgcgattttggtctcgctagg

SEQ ID NO: 123460 - DNA, 25 bp, Saccharomyces pastorianus
atgctcgaaagcctgttttcatggg

SEQ ID NO: 123461 - DNA, 25 bp, Saccharomyces pastorianus
tgctacaagatggtacagggcgcct

SEQ ID NO: 123462 - DNA, 25 bp, Saccharomyces pastorianus
atgggctgtagggtgcattcttgca

SEQ ID NO: 123463 - DNA, 25 bp, Saccharomyces pastorianus
ttcaagtgtcattccactgtgcagc

SEQ ID NO: 123464 - DNA, 25 bp, Saccharomyces pastorianus
ggtcctttcgacttcacctatgaat

SEQ ID NO: 123465 - DNA, 25 bp, Saccharomyces pastorianus
atgtgtcttatcaatcataccgccc

SEQ ID NO: 123466 - DNA, 25 bp, Saccharomyces pastorianus
tgttgccgttggattcatctgttca

SEQ ID NO: 123467 - DNA, 25 bp, Saccharomyces pastorianus
atgaactgtattttttccgcaacaa

SEQ ID NO: 123468 - DNA, 25 bp, Saccharomyces pastorianus
tcagctgggctgacttatgtaaaca

SEQ ID NO: 123469 - DNA, 25 bp, Saccharomyces pastorianus
atctgttcagtttgcctatgtgtct

SEQ ID NO: 123470 - DNA, 25 bp, Saccharomyces pastorianus
agccaaaccatggatctgtagattt

SEQ ID NO: 123471 - DNA, 25 bp, Saccharomyces pastorianus
aggctacttgttcttacgtgcggga

SEQ ID NO: 123472 - DNA, 25 bp, Saccharomyces pastorianus
tagcaggtgccatgtcagctgggct

SEQ ID NO: 123473 - DNA, 25 bp, Saccharomyces pastorianus
gcaatgtttattgatccgtcgttaa

SEQ ID NO: 123474 - DNA, 25 bp, Saccharomyces pastorianus
aggacatcatgctatttaacaggga

SEQ ID NO: 123475 - DNA, 25 bp, Saccharomyces pastorianus
aaatgtcctgcttgtgattctcaat

SEQ ID NO: 123476 - DNA, 25 bp, Saccharomyces pastorianus
tccctccattggcatataaagtctt

SEQ ID NO: 123477 - DNA, 25 bp, Saccharomyces pastorianus
gcaggaatgtcctttctctctagtc

SEQ ID NO: 123478 - DNA, 25 bp, Saccharomyces pastorianus
gcagctcttagcatggtaggaccaa

SEQ ID NO: 123479 - DNA, 25 bp, Saccharomyces pastorianus
aaaagtggcaccattggcgggagca

SEQ ID NO: 123480 - DNA, 25 bp, Saccharomyces pastorianus
aacccaataacctcatcgctaattc

SEQ ID NO: 123481 - DNA, 25 bp, Saccharomyces pastorianus
aaggcagtgccagacaatgctccaa

SEQ ID NO: 123482 - DNA, 25 bp, Saccharomyces pastorianus
taaagtcttggctacactggaaata

SEQ ID NO: 123483 - DNA, 25 bp, Saccharomyces pastorianus
tgaaaaaagcgcctatccctccatt

SEQ ID NO: 123484 - DNA, 25 bp, Saccharomyces pastorianus
ttatccgtttgcatgacagacttga

SEQ ID NO: 123485 - DNA, 25 bp, Saccharomyces pastorianus
ctagtccacgtcttttgttcatttg

SEQ ID NO: 123486 - DNA, 25 bp, Saccharomyces pastorianus
tgttcatttggttagcaatcaacgc

SEQ ID NO: 123487 - DNA, 25 bp, Saccharomyces pastorianus
gctgaagccaagttccaatcggata

SEQ ID NO: 123488 - DNA, 25 bp, Saccharomyces pastorianus
atctttcttggattgggctctttca

SEQ ID NO: 123489 - DNA, 25 bp, Saccharomyces pastorianus
aactcccttctttcctgacaagatt

SEQ ID NO: 123490 - DNA, 25 bp, Saccharomyces pastorianus
attcttaccgagcattaactaccca

SEQ ID NO: 123491 - DNA, 25 bp, Saccharomyces pastorianus
ggatatcccgctatacacaaagctg

SEQ ID NO: 123492 - DNA, 25 bp, Saccharomyces pastorianus
cgccttatgccccagaagttaatta

SEQ ID NO: 123493 - DNA, 25 bp, Saccharomyces pastorianus
tgaagtctatggtgtggaccctacc

SEQ ID NO: 123494 - DNA, 25 bp, Saccharomyces pastorianus
ggaccctaccaacgagtcaggtgaa

SEQ ID NO: 123495 - DNA, 25 bp, Saccharomyces pastorianus
gaaattgcgcattctcgcatcagaa

SEQ ID NO: 123496 - DNA, 25 bp, Saccharomyces pastorianus
aataacttcggttctgttgccacta

SEQ ID NO: 123497 - DNA, 25 bp, Saccharomyces pastorianus
gtaggagaatccactttggcaagtt

SEQ ID NO: 123498 - DNA, 25 bp, Saccharomyces pastorianus
gatttcaaaagggatccgccacact

SEQ ID NO: 123499 - DNA, 25 bp, Saccharomyces pastorianus
gacgctgtctccatgcgacatgtgt

SEQ ID NO: 123500 - DNA, 25 bp, Saccharomyces pastorianus
taccactttgtatacgacgctgtct

SEQ ID NO: 123501 - DNA, 25 bp, Saccharomyces pastorianus
gatccgccacactacatggtgagat

SEQ ID NO: 123502 - DNA, 25 bp, Saccharomyces pastorianus
cacgaggttgttgttgttgacgatg

SEQ ID NO: 123503 - DNA, 25 bp, Saccharomyces pastorianus
ttggcggatgtcttatcaataacaa

SEQ ID NO: 123504 - DNA, 25 bp, Saccharomyces pastorianus
cattgcctatgaggaggcggcctta

SEQ ID NO: 123505 - DNA, 25 bp, Saccharomyces pastorianus
ccacgctgtgttgtcggtgagaacg

SEQ ID NO: 123506 - DNA, 25 bp, Saccharomyces pastorianus
gaagtgttctcggtcgtggtcacaa

SEQ ID NO: 123507 - DNA, 25 bp, Saccharomyces pastorianus
tccatgcgacatgtgtacaggtgcc

SEQ ID NO: 123508 - DNA, 25 bp, Saccharomyces pastorianus
gtcgtggtcacaacatgagatttca

SEQ ID NO: 123509 - DNA, 25 bp, Saccharomyces pastorianus
tttcctgctacttacgctaggagct

SEQ ID NO: 123510 - DNA, 25 bp, Saccharomyces pastorianus
ctaccgggaattactatgcaaaaca

SEQ ID NO: 123511 - DNA, 25 bp, Saccharomyces pastorianus
agaaaagggcctcttgttgctgcct

SEQ ID NO: 123512 - DNA, 25 bp, Saccharomyces pastorianus
caacccaggtgcaggcgtactttaa

SEQ ID NO: 123513 - DNA, 25 bp, Saccharomyces pastorianus
gtgatcttcggctcggccgacaaat

SEQ ID NO: 123514 - DNA, 25 bp, Saccharomyces pastorianus
tcttttgttgttcttcctcgtattg

SEQ ID NO: 123515 - DNA, 25 bp, Saccharomyces pastorianus
agtgtgcggttatcggaaccggctc

SEQ ID NO: 123516 - DNA, 25 bp, Saccharomyces pastorianus
tatcggccgcgtggaactaccggga

SEQ ID NO: 123517 - DNA, 25 bp, Saccharomyces pastorianus
aaatcccctggatatcattggcctg

SEQ ID NO: 123518 - DNA, 25 bp, Saccharomyces pastorianus
atcattggcctgtcgaggtatcggc

SEQ ID NO: 123519 - DNA, 25 bp, Saccharomyces pastorianus
ttgttcccgtttagagcaacccagg

SEQ ID NO: 123520 - DNA, 25 bp, Saccharomyces pastorianus
aattgccctttatttcatccattat

SEQ ID NO: 123521 - DNA, 25 bp, Saccharomyces pastorianus
agtggactacctttgacgcatgata

SEQ ID NO: 123522 - DNA, 25 bp, Saccharomyces pastorianus
aggttgcctattccttctgttaata

SEQ ID NO: 123523 - DNA, 25 bp, Saccharomyces pastorianus
gacggcaagagacctaccacagctg

SEQ ID NO: 123524 - DNA, 25 bp, Saccharomyces pastorianus
atcatcacattcctcatataccaaa

SEQ ID NO: 123525 - DNA, 25 bp, Saccharomyces pastorianus
atattgtcaaaccactgtctcacac

SEQ ID NO: 123526 - DNA, 25 bp, Saccharomyces pastorianus
acgacccttcaacgagacatcatta

SEQ ID NO: 123527 - DNA, 25 bp, Saccharomyces pastorianus
aactgcgacatcttctcctgggaaa

SEQ ID NO: 123528 - DNA, 25 bp, Saccharomyces pastorianus
cctctattaccttctctgcaagatt

SEQ ID NO: 123529 - DNA, 25 bp, Saccharomyces pastorianus
gagacatcattacctcaacgtcgct

SEQ ID NO: 123530 - DNA, 25 bp, Saccharomyces pastorianus
accacagctgtcatctcaactaaat

SEQ ID NO: 123531 - DNA, 25 bp, Saccharomyces pastorianus
atgagactctcgtgaagcttacctt

SEQ ID NO: 123532 - DNA, 25 bp, Saccharomyces pastorianus
gaagtgctgcgaaagggctgcccaa

SEQ ID NO: 123533 - DNA, 25 bp, Saccharomyces pastorianus
gaacctcgtcgcttcatcaatgaga

SEQ ID NO: 123534 - DNA, 25 bp, Saccharomyces pastorianus
gtgccaatgtgtacaatcgccaaca

SEQ ID NO: 123535 - DNA, 25 bp, Saccharomyces pastorianus
aagacttccagttcataatctcggg

SEQ ID NO: 123536 - DNA, 25 bp, Saccharomyces pastorianus
agggctgcccaatttagcatctcaa

SEQ ID NO: 123537 - DNA, 25 bp, Saccharomyces pastorianus
tacagtttcaagttcgagcggttac

SEQ ID NO: 123538 - DNA, 25 bp, Saccharomyces pastorianus
agtctacggcggatgtggaatttct

SEQ ID NO: 123539 - DNA, 25 bp, Saccharomyces pastorianus
aacaatcctcgctgcattgagcatg

SEQ ID NO: 123540 - DNA, 25 bp, Saccharomyces pastorianus
gtgaagcttaccttggagtccaatt

SEQ ID NO: 123541 - DNA, 25 bp, Saccharomyces pastorianus
tgaaatttgcatcccgttcatagat

SEQ ID NO: 123542 - DNA, 25 bp, Saccharomyces pastorianus
ggatgtcacggtttccagtacaatc

SEQ ID NO: 123543 - DNA, 25 bp, Saccharomyces pastorianus
ggatctggtcactaaggagccgttg

SEQ ID NO: 123544 - DNA, 25 bp, Saccharomyces pastorianus
gagttgatcggttcttcgttcaaaa

SEQ ID NO: 123545 - DNA, 25 bp, Saccharomyces pastorianus
ttacgccagtttcccctaacatgtt

SEQ ID NO: 123546 - DNA, 25 bp, Saccharomyces pastorianus
agagggcttccaacagactagctga

SEQ ID NO: 123547 - DNA, 25 bp, Saccharomyces pastorianus
ggagccgttgatcacaccgaaaaga

SEQ ID NO: 123548 - DNA, 25 bp, Saccharomyces pastorianus
gacgcctgggttaaacttatctatt

SEQ ID NO: 123549 - DNA, 25 bp, Saccharomyces pastorianus
tagaacccgctaccaagccagatat

SEQ ID NO: 123550 - DNA, 25 bp, Saccharomyces pastorianus
gactagctgagatctaccgcaatag

SEQ ID NO: 123551 - DNA, 25 bp, Saccharomyces pastorianus
ggagttttcagacgaccttgacgat

SEQ ID NO: 123552 - DNA, 25 bp, Saccharomyces pastorianus
aagcattttactcggatctggtcac

SEQ ID NO: 123553 - DNA, 25 bp, Saccharomyces pastorianus
ccccatttagccttttgacatttga

SEQ ID NO: 123554 - DNA, 25 bp, Saccharomyces pastorianus
ttaatccattacatgacggctcatt

SEQ ID NO: 123555 - DNA, 25 bp, Saccharomyces pastorianus
atatgctctcgctgcaatacaagaa

SEQ ID NO: 123556 - DNA, 25 bp, Saccharomyces pastorianus
attatttacataacggcccactaga

SEQ ID NO: 123557 - DNA, 25 bp, Saccharomyces pastorianus
agcatattcagcgatcgtttctatt

SEQ ID NO: 123558 - DNA, 25 bp, Saccharomyces pastorianus
attattcagcgcttatcatgtcaac

SEQ ID NO: 123559 - DNA, 25 bp, Saccharomyces pastorianus
atgtgggctggttcatagcatattc

SEQ ID NO: 123560 - DNA, 25 bp, Saccharomyces pastorianus
tagccgtcaggcttactatgaaagt

SEQ ID NO: 123561 - DNA, 25 bp, Saccharomyces pastorianus
aatgatgatgtattgccgccgttag

SEQ ID NO: 123562 - DNA, 25 bp, Saccharomyces pastorianus
gcaatattcctgctcgtagtaatga

SEQ ID NO: 123563 - DNA, 25 bp, Saccharomyces pastorianus
gagtcgtcagggtataagcgttcct

SEQ ID NO: 123564 - DNA, 25 bp, Saccharomyces pastorianus
gcaatcaaaactacgctcgagctct

SEQ ID NO: 123565 - DNA, 25 bp, Saccharomyces pastorianus
agaagttcagcatctaccactcgta

SEQ ID NO: 123566 - DNA, 25 bp, Saccharomyces pastorianus
tgcctacattcctggtgtgacaagc

SEQ ID NO: 123567 - DNA, 25 bp, Saccharomyces pastorianus
atattttgcctattgcctacattcc

SEQ ID NO: 123568 - DNA, 25 bp, Saccharomyces pastorianus
aactctcaacgtgccgggaaacaga

SEQ ID NO: 123569 - DNA, 25 bp, Saccharomyces pastorianus
ataaccttaggttcttccatcttgg

SEQ ID NO: 123570 - DNA, 25 bp, Saccharomyces pastorianus
aacctcataactgctattcgtgcta

SEQ ID NO: 123571 - DNA, 25 bp, Saccharomyces pastorianus
gtcacactctgttcaatacgtcact

SEQ ID NO: 123572 - DNA, 25 bp, Saccharomyces pastorianus
gaatcgatacgcgagagcacccagg

SEQ ID NO: 123573 - DNA, 25 bp, Saccharomyces pastorianus
ctaccactcgtacaagggcttctaa

SEQ ID NO: 123574 - DNA, 25 bp, Saccharomyces pastorianus
ggcggatgatctttcacacatggca

SEQ ID NO: 123575 - DNA, 25 bp, Saccharomyces pastorianus
aaggcaataagcatcgcaccaccta

SEQ ID NO: 123576 - DNA, 25 bp, Saccharomyces pastorianus
gtggatgggcacttgtcacatgtta

SEQ ID NO: 123577 - DNA, 25 bp, Saccharomyces pastorianus
cagggcatgatgcagttgaatcgca

SEQ ID NO: 123578 - DNA, 25 bp, Saccharomyces pastorianus
aatcaacgaggttttctcatttgaa

SEQ ID NO: 123579 - DNA, 25 bp, Saccharomyces pastorianus
acggtgaaccccacaatcaacgagg

SEQ ID NO: 123580 - DNA, 25 bp, Saccharomyces pastorianus
tgaatcgcaaacaacacatccgtcg

SEQ ID NO: 123581 - DNA, 25 bp, Saccharomyces pastorianus
aacacaatattctcctgaagcgcaa

SEQ ID NO: 123582 - DNA, 25 bp, Saccharomyces pastorianus
agaagccttggaggagctcgacatt

SEQ ID NO: 123583 - DNA, 25 bp, Saccharomyces pastorianus
gtcgctgcctctagttgcagaagtt

SEQ ID NO: 123584 - DNA, 25 bp, Saccharomyces pastorianus
gaatcggactgtttcgcacagtatg

SEQ ID NO: 123585 - DNA, 25 bp, Saccharomyces pastorianus
aaactactcagttgtgaatcggact

SEQ ID NO: 123586 - DNA, 25 bp, Saccharomyces pastorianus
taacagcggtggtatgttccgtatt

SEQ ID NO: 123587 - DNA, 25 bp, Saccharomyces pastorianus
aagggccaaccttgtaaagatgaag

SEQ ID NO: 123588 - DNA, 25 bp, Saccharomyces pastorianus
tttgtgcccgaaccaggtgatcagc

SEQ ID NO: 123589 - DNA, 25 bp, Saccharomyces pastorianus
gtcaggacttctcttgatatgctcg

SEQ ID NO: 123590 - DNA, 25 bp, Saccharomyces pastorianus
tctcttgatatgctcggctctgaaa

SEQ ID NO: 123591 - DNA, 25 bp, Saccharomyces pastorianus
gttccgtattttccataagagtgct

SEQ ID NO: 123592 - DNA, 25 bp, Saccharomyces pastorianus
taagagtgctaattttggcgacaaa

SEQ ID NO: 123593 - DNA, 25 bp, Saccharomyces pastorianus
acgtgccacgagtgtgggacacact

SEQ ID NO: 123594 - DNA, 25 bp, Saccharomyces pastorianus
taaactctgttttgtgcccgaacca

SEQ ID NO: 123595 - DNA, 25 bp, Saccharomyces pastorianus
ccttaccatcatctgatccgggaaa

SEQ ID NO: 123596 - DNA, 25 bp, Saccharomyces pastorianus
gatgaagacgccgttaccgttccct

SEQ ID NO: 123597 - DNA, 25 bp, Saccharomyces pastorianus
gttaccgagactaaacgacttgttg

SEQ ID NO: 123598 - DNA, 25 bp, Saccharomyces pastorianus
gctagtgttttgttgcctcaattgc

SEQ ID NO: 123599 - DNA, 25 bp, Saccharomyces pastorianus
tgttgcctcaattgcgtacgggatg

SEQ ID NO: 123600 - DNA, 25 bp, Saccharomyces pastorianus
gacggatcccatgacagtaatgttt

SEQ ID NO: 123601 - DNA, 25 bp, Saccharomyces pastorianus
gagttgttatcttcgattgctgaaa

SEQ ID NO: 123602 - DNA, 25 bp, Saccharomyces pastorianus
atggcatgtggatcaggctattgtt

SEQ ID NO: 123603 - DNA, 25 bp, Saccharomyces pastorianus
gacagtaatgtttttctaccagaat

SEQ ID NO: 123604 - DNA, 25 bp, Saccharomyces pastorianus
agatgtacgagctgacggatcccat

SEQ ID NO: 123605 - DNA, 25 bp, Saccharomyces pastorianus
gttgtcattcgttttggtcgcaaaa

SEQ ID NO: 123606 - DNA, 25 bp, Saccharomyces pastorianus
gatcaggctattgttaccgagacta

SEQ ID NO: 123607 - DNA, 25 bp, Saccharomyces pastorianus
gaacaaagggctggtggtctctcca

SEQ ID NO: 123608 - DNA, 25 bp, Saccharomyces pastorianus
gcgccatcacaatcaagttctcgta

SEQ ID NO: 123609 - DNA, 25 bp, Saccharomyces pastorianus
ttggaatcacaatcgcaaacgctga

SEQ ID NO: 123610 - DNA, 25 bp, Saccharomyces pastorianus
gttgacacatgatttgactcctatt

SEQ ID NO: 123611 - DNA, 25 bp, Saccharomyces pastorianus
atgagtacattaccactgtctcctt

SEQ ID NO: 123612 - DNA, 25 bp, Saccharomyces pastorianus
ggcctcaacggcacaaaacttattc

SEQ ID NO: 123613 - DNA, 25 bp, Saccharomyces pastorianus
aaaactccacattagcatcaccgtc

SEQ ID NO: 123614 - DNA, 25 bp, Saccharomyces pastorianus
gtggtggtccggtatcgaaatctta

SEQ ID NO: 123615 - DNA, 25 bp, Saccharomyces pastorianus
ggttgaaccaatcgcgatctggcct

SEQ ID NO: 123616 - DNA, 25 bp, Saccharomyces pastorianus
aagaaggttatcctcttccacgtca

SEQ ID NO: 123617 - DNA, 25 bp, Saccharomyces pastorianus
gatgtcatcgtcctttatatccacg

SEQ ID NO: 123618 - DNA, 25 bp, Saccharomyces pastorianus
acttcctagcttattaactgccttc

SEQ ID NO: 123619 - DNA, 25 bp, Saccharomyces pastorianus
acaacctggtcgtgagtgatagctc

SEQ ID NO: 123620 - DNA, 25 bp, Saccharomyces pastorianus
agacctaacaaacggtagcggctca

SEQ ID NO: 123621 - DNA, 25 bp, Saccharomyces pastorianus
gaactggtccatgtttctaacgatc

SEQ ID NO: 123622 - DNA, 25 bp, Saccharomyces pastorianus
gatcattatccgaatccaatacttg

SEQ ID NO: 123623 - DNA, 25 bp, Saccharomyces pastorianus
gtgatagctctatgggagacctaac

SEQ ID NO: 123624 - DNA, 25 bp, Saccharomyces pastorianus
ggccttcaaagggacattgcagaac

SEQ ID NO: 123625 - DNA, 25 bp, Saccharomyces pastorianus
ttagacgtattaaagcgctggcgaa

SEQ ID NO: 123626 - DNA, 25 bp, Saccharomyces pastorianus
taaaatgcccaagctcactgagagt

SEQ ID NO: 123627 - DNA, 25 bp, Saccharomyces pastorianus
ataccttagagatgatgcgcttttg

SEQ ID NO: 123628 - DNA, 25 bp, Saccharomyces pastorianus
gaatccagctcgaaatcccataact

SEQ ID NO: 123629 - DNA, 25 bp, Saccharomyces pastorianus
gcgctggcgaaatgtaactggtgtt

SEQ ID NO: 123630 - DNA, 25 bp, Saccharomyces pastorianus
atctatctaaacatcctgctctttc

SEQ ID NO: 123631 - DNA, 25 bp, Saccharomyces pastorianus
gtaaatcccctattactatcgctgt

SEQ ID NO: 123632 - DNA, 25 bp, Saccharomyces pastorianus
tgggcttaccgatgcaagtcactac

SEQ ID NO: 123633 - DNA, 25 bp, Saccharomyces pastorianus
gtggatccgcagcttattgctaatg

SEQ ID NO: 123634 - DNA, 25 bp, Saccharomyces pastorianus
agatccctattaccgcagcgaaagt

SEQ ID NO: 123635 - DNA, 25 bp, Saccharomyces pastorianus
aatggctgcatccatactgattggt

SEQ ID NO: 123636 - DNA, 25 bp, Saccharomyces pastorianus
gcaagtcactacttctgctgaatat

SEQ ID NO: 123637 - DNA, 25 bp, Saccharomyces pastorianus
atcgctgttgtttccatctatctaa

SEQ ID NO: 123638 - DNA, 25 bp, Saccharomyces pastorianus
atatacccaggttttgttcgcatct

SEQ ID NO: 123639 - DNA, 25 bp, Saccharomyces pastorianus
gagtggtgcacagaacctaacttat

SEQ ID NO: 123640 - DNA, 25 bp, Saccharomyces pastorianus
gtgggccaaaccttgcaagttactg

SEQ ID NO: 123641 - DNA, 25 bp, Saccharomyces pastorianus
gacgctaagttcaacaggcttcagt

SEQ ID NO: 123642 - DNA, 25 bp, Saccharomyces pastorianus
tagactttcagggtaaaaggcacca

SEQ ID NO: 123643 - DNA, 25 bp, Saccharomyces pastorianus
gtaagcattaaaaacccaaggccat

SEQ ID NO: 123644 - DNA, 25 bp, Saccharomyces pastorianus
atactacctgctcattagactttca

SEQ ID NO: 123645 - DNA, 25 bp, Saccharomyces pastorianus
agaagctgcttctcttatactacct

SEQ ID NO: 123646 - DNA, 25 bp, Saccharomyces pastorianus
aacaggcttcagtataatctatatt

SEQ ID NO: 123647 - DNA, 25 bp, Saccharomyces pastorianus
tctcgcaccacaaggccggtttatt

SEQ ID NO: 123648 - DNA, 25 bp, Saccharomyces pastorianus
tcgtcctttttcttgtattaggcgt

SEQ ID NO: 123649 - DNA, 25 bp, Saccharomyces pastorianus
tatattacaagcctctctcgcacca

SEQ ID NO: 123650 - DNA, 25 bp, Saccharomyces pastorianus
gccggtttattgtacaaagacctct

SEQ ID NO: 123651 - DNA, 25 bp, Saccharomyces pastorianus
aaagacctcttcttcagaagctgct

SEQ ID NO: 123652 - DNA, 25 bp, Saccharomyces pastorianus
aagaccctccccagttacagaattg

SEQ ID NO: 123653 - DNA, 25 bp, Saccharomyces pastorianus
acttcctcatcacttcaaactgtat

SEQ ID NO: 123654 - DNA, 25 bp, Saccharomyces pastorianus
gtgtattctgccctcaacaaaggat

SEQ ID NO: 123655 - DNA, 25 bp, Saccharomyces pastorianus
ataactttttcacgcccatttgtgt

SEQ ID NO: 123656 - DNA, 25 bp, Saccharomyces pastorianus
ggccccatttatctaatctctttga

SEQ ID NO: 123657 - DNA, 25 bp, Saccharomyces pastorianus
tcgtgcaatagctttcacaaccatt

SEQ ID NO: 123658 - DNA, 25 bp, Saccharomyces pastorianus
aaaggatgtccagacttcctcatca

SEQ ID NO: 123659 - DNA, 25 bp, Saccharomyces pastorianus
ggaaacacgaatgctccaactccat

SEQ ID NO: 123660 - DNA, 25 bp, Saccharomyces pastorianus
atgtctccatcagaatccttcaata

SEQ ID NO: 123661 - DNA, 25 bp, Saccharomyces pastorianus
aactgtatccatgggaactcctggc

SEQ ID NO: 123662 - DNA, 25 bp, Saccharomyces pastorianus
agtcaaaaatttcctcatgccttcc

SEQ ID NO: 123663 - DNA, 25 bp, Saccharomyces pastorianus
tgcacgaaattccataggtcgtaat

SEQ ID NO: 123664 - DNA, 25 bp, Saccharomyces pastorianus
ggacatcctttgttgagggcagaat

SEQ ID NO: 123665 - DNA, 25 bp, Saccharomyces pastorianus
gattactttgcaattctgtaactgg

SEQ ID NO: 123666 - DNA, 25 bp, Saccharomyces pastorianus
gattctgatggagacattttacgca

SEQ ID NO: 123667 - DNA, 25 bp, Saccharomyces pastorianus
ggagacattttacgcagaagaacaa

SEQ ID NO: 123668 - DNA, 25 bp, Saccharomyces pastorianus
ggaagtctggacatcctttgttgag

SEQ ID NO: 123669 - DNA, 25 bp, Saccharomyces pastorianus
atggagttggagcattcgtgtttcc

SEQ ID NO: 123670 - DNA, 25 bp, Saccharomyces pastorianus
gcattcgtgtttccatgcagaaaga

SEQ ID NO: 123671 - DNA, 25 bp, Saccharomyces pastorianus
tgagggcagaatacacaaatgggcg

SEQ ID NO: 123672 - DNA, 25 bp, Saccharomyces pastorianus
gtgagaaacttgaacattgacaatg

SEQ ID NO: 123673 - DNA, 25 bp, Saccharomyces pastorianus
cgtggaaagcttgaacagtagtgtg

SEQ ID NO: 123674 - DNA, 25 bp, Saccharomyces pastorianus
gacggccttagctttgtagataaag

SEQ ID NO: 123675 - DNA, 25 bp, Saccharomyces pastorianus
aatacccgaggattgatacttccag

SEQ ID NO: 123676 - DNA, 25 bp, Saccharomyces pastorianus
gatacataccgaacgagttttccga

SEQ ID NO: 123677 - DNA, 25 bp, Saccharomyces pastorianus
aaaagagagcctgttcatcccgaaa

SEQ ID NO: 123678 - DNA, 25 bp, Saccharomyces pastorianus
tggatacacttctaccgcaaacggt

SEQ ID NO: 123679 - DNA, 25 bp, Saccharomyces pastorianus
ggcgaacaccggattttaatgacga

SEQ ID NO: 123680 - DNA, 25 bp, Saccharomyces pastorianus
gggccgataatagtgtttctacgct

SEQ ID NO: 123681 - DNA, 25 bp, Saccharomyces pastorianus
gtgtttctacgcttacaaatgcatt

SEQ ID NO: 123682 - DNA, 25 bp, Saccharomyces pastorianus
gttcatcccgaaatacgaggtatac

SEQ ID NO: 123683 - DNA, 25 bp, Saccharomyces pastorianus
gagttttccgaagttagcttgttag

SEQ ID NO: 123684 - DNA, 25 bp, Saccharomyces pastorianus
atgcattgtacaccgaatacttgaa

SEQ ID NO: 123685 - DNA, 25 bp, Saccharomyces pastorianus
ttctgcgttggttcaggtcaaacat

SEQ ID NO: 123686 - DNA, 25 bp, Saccharomyces pastorianus
gggccggtttatcaatgggtactat

SEQ ID NO: 123687 - DNA, 25 bp, Saccharomyces pastorianus
gctaggttctcagtgtaggctgcac

SEQ ID NO: 123688 - DNA, 25 bp, Saccharomyces pastorianus
cttactctggtggttctgtaaattt

SEQ ID NO: 123689 - DNA, 25 bp, Saccharomyces pastorianus
tattacgtcgactcagacggtacaa

SEQ ID NO: 123690 - DNA, 25 bp, Saccharomyces pastorianus
cactaggaaggagggcccaaccatt

SEQ ID NO: 123691 - DNA, 25 bp, Saccharomyces pastorianus
agtagattctcgtgccactgccggc

SEQ ID NO: 123692 - DNA, 25 bp, Saccharomyces pastorianus
gctgctgcccatagagatgcttact

SEQ ID NO: 123693 - DNA, 25 bp, Saccharomyces pastorianus
gcaattgggttgcttctcaaactgt

SEQ ID NO: 123694 - DNA, 25 bp, Saccharomyces pastorianus
ttgcatatggtgttctagactctaa

SEQ ID NO: 123695 - DNA, 25 bp, Saccharomyces pastorianus
aggaacgtatatctgtcgcagccgc

SEQ ID NO: 123696 - DNA, 25 bp, Saccharomyces pastorianus
cgattattctgcaggttcgaaccaa

SEQ ID NO: 123697 - DNA, 25 bp, Saccharomyces pastorianus
gtttttgttaattcagcctcatcaa

SEQ ID NO: 123698 - DNA, 25 bp, Saccharomyces pastorianus
ggatgacttcaatggtactttcgat

SEQ ID NO: 123699 - DNA, 25 bp, Saccharomyces pastorianus
ggaaccaattgattatcccttacaa

SEQ ID NO: 123700 - DNA, 25 bp, Saccharomyces pastorianus
gaactgagccttttcatcggcaata

SEQ ID NO: 123701 - DNA, 25 bp, Saccharomyces pastorianus
cggcaatatgtgtggcttgaactat

SEQ ID NO: 123702 - DNA, 25 bp, Saccharomyces pastorianus
gagttgctatctgtcatagtcgact

SEQ ID NO: 123703 - DNA, 25 bp, Saccharomyces pastorianus
atcaaattcctcaacgtccaatcaa

SEQ ID NO: 123704 - DNA, 25 bp, Saccharomyces pastorianus
gggctgtcaaatacttgttccaaaa

SEQ ID NO: 123705 - DNA, 25 bp, Saccharomyces pastorianus
acaaatcgtgttgcttctcggttta

SEQ ID NO: 123706 - DNA, 25 bp, Saccharomyces pastorianus
aatgtgtctcgcgattattctgcag

SEQ ID NO: 123707 - DNA, 25 bp, Saccharomyces pastorianus
gagaaggccctaaatcatgtccgag

SEQ ID NO: 123708 - DNA, 25 bp, Saccharomyces pastorianus
cgatcctgacagacctatttgtgaa

SEQ ID NO: 123709 - DNA, 25 bp, Saccharomyces pastorianus
gcatgtgttaccaatatttcagaat

SEQ ID NO: 123710 - DNA, 25 bp, Saccharomyces pastorianus
aaaatgcctgaatgtgtcttcttca

SEQ ID NO: 123711 - DNA, 25 bp, Saccharomyces pastorianus
taattcaccccgatacagcaaaata

SEQ ID NO: 123712 - DNA, 25 bp, Saccharomyces pastorianus
acgaaatgggattctgtcctctggg

SEQ ID NO: 123713 - DNA, 25 bp, Saccharomyces pastorianus
acatgaccggattttgtcctttagg

SEQ ID NO: 123714 - DNA, 25 bp, Saccharomyces pastorianus
ggagttcttgtcctagacggcatat

SEQ ID NO: 123715 - DNA, 25 bp, Saccharomyces pastorianus
tctacacatagatcccgctagcaag

SEQ ID NO: 123716 - DNA, 25 bp, Saccharomyces pastorianus
aaatttgaacctttcctcaggcaag

SEQ ID NO: 123717 - DNA, 25 bp, Saccharomyces pastorianus
gacattggcttcgagggttgtgcaa

SEQ ID NO: 123718 - DNA, 25 bp, Saccharomyces pastorianus
ttgtcccatcttggaggatacccta

SEQ ID NO: 123719 - DNA, 25 bp, Saccharomyces pastorianus
atcttggaggataccctacagtgta

SEQ ID NO: 123720 - DNA, 25 bp, Saccharomyces pastorianus
tacagtgtaaaagcctccttagctt

SEQ ID NO: 123721 - DNA, 25 bp, Saccharomyces pastorianus
acattaagagaagtcggctgcaaat

SEQ ID NO: 123722 - DNA, 25 bp, Saccharomyces pastorianus
taccctacagtgtaaaagcctcctt

SEQ ID NO: 123723 - DNA, 25 bp, Saccharomyces pastorianus
gacactttgtcccatcttggaggat

SEQ ID NO: 123724 - DNA, 25 bp, Saccharomyces pastorianus
gagaagtcggctgcaaatttccatg

SEQ ID NO: 123725 - DNA, 25 bp, Saccharomyces pastorianus
ctccatgatagtttaagtgttacag

SEQ ID NO: 123726 - DNA, 25 bp, Saccharomyces pastorianus
aaatttccatgcagacactttgtcc

SEQ ID NO: 123727 - DNA, 25 bp, Saccharomyces pastorianus
gaagtcggctgcaaatttccatgca

SEQ ID NO: 123728 - DNA, 25 bp, Saccharomyces pastorianus
atgcagacactttgtcccatcttgg

SEQ ID NO: 123729 - DNA, 25 bp, Saccharomyces pastorianus
gggttgcaacacttccaggcggaag

SEQ ID NO: 123730 - DNA, 25 bp, Saccharomyces pastorianus
cagatgatcggagaacggctaccaa

SEQ ID NO: 123731 - DNA, 25 bp, Saccharomyces pastorianus
atagtgatggctacgatggctctgt

SEQ ID NO: 123732 - DNA, 25 bp, Saccharomyces pastorianus
tgaacccctgagtggtagcgagcca

SEQ ID NO: 123733 - DNA, 25 bp, Saccharomyces pastorianus
gatgataccgctattgtgtccatga

SEQ ID NO: 123734 - DNA, 25 bp, Saccharomyces pastorianus
gaagatctatcaggtttcccggaat

SEQ ID NO: 123735 - DNA, 25 bp, Saccharomyces pastorianus
ctcacccttttccaattcagatggt

SEQ ID NO: 123736 - DNA, 25 bp, Saccharomyces pastorianus
gacgatggccctaagaatactccct

SEQ ID NO: 123737 - DNA, 25 bp, Saccharomyces pastorianus
agagcaacttttccggcaatcttgg

SEQ ID NO: 123738 - DNA, 25 bp, Saccharomyces pastorianus
gatggctctgtaatagttgcacgaa

SEQ ID NO: 123739 - DNA, 25 bp, Saccharomyces pastorianus
gaggtgggctttttctacagatgat

SEQ ID NO: 123740 - DNA, 25 bp, Saccharomyces pastorianus
gtgaggaaccactttattttcaacg

SEQ ID NO: 123741 - DNA, 25 bp, Saccharomyces pastorianus
agtttccaccgcttcttatagatta

SEQ ID NO: 123742 - DNA, 25 bp, Saccharomyces pastorianus
cgcccgtgatttgaagtttgaacca

SEQ ID NO: 123743 - DNA, 25 bp, Saccharomyces pastorianus
taaattttcaccagtttccaccgct

SEQ ID NO: 123744 - DNA, 25 bp, Saccharomyces pastorianus
agatgctccaaagggatctactgat

SEQ ID NO: 123745 - DNA, 25 bp, Saccharomyces pastorianus
ttttgctgattgtccggttgttcca

SEQ ID NO: 123746 - DNA, 25 bp, Saccharomyces pastorianus
aatgcccatgtctacgcccgtgatt

SEQ ID NO: 123747 - DNA, 25 bp, Saccharomyces pastorianus
ggcacattgcattttaggtatcggt

SEQ ID NO: 123748 - DNA, 25 bp, Saccharomyces pastorianus
aacgtagaaagctctggtgccatga

SEQ ID NO: 123749 - DNA, 25 bp, Saccharomyces pastorianus
agggcagacaatctaccacttttgc

SEQ ID NO: 123750 - DNA, 25 bp, Saccharomyces pastorianus
ggttgttccagctgatcctgatatt

SEQ ID NO: 123751 - DNA, 25 bp, Saccharomyces pastorianus
aagaaggccccgtactgaggataga

SEQ ID NO: 123752 - DNA, 25 bp, Saccharomyces pastorianus
tctgccgttgattccaagcttgttg

SEQ ID NO: 123753 - DNA, 25 bp, Saccharomyces pastorianus
aatggttgatgactctgccgttgat

SEQ ID NO: 123754 - DNA, 25 bp, Saccharomyces pastorianus
gattaatagctgaccccatcaacag

SEQ ID NO: 123755 - DNA, 25 bp, Saccharomyces pastorianus
aacaagttctccaccatttattcct

SEQ ID NO: 123756 - DNA, 25 bp, Saccharomyces pastorianus
ttatatggccctagaagttctggaa

SEQ ID NO: 123757 - DNA, 25 bp, Saccharomyces pastorianus
tacgatcttttgagcaagttcgcaa

SEQ ID NO: 123758 - DNA, 25 bp, Saccharomyces pastorianus
gcaggttatttcgatgacttcacaa

SEQ ID NO: 123759 - DNA, 25 bp, Saccharomyces pastorianus
tacgctaattctatggtcggttcgc

SEQ ID NO: 123760 - DNA, 25 bp, Saccharomyces pastorianus
gtcattgggctgtatgctttttgaa

SEQ ID NO: 123761 - DNA, 25 bp, Saccharomyces pastorianus
tacaccttttagtggttcttctact

SEQ ID NO: 123762 - DNA, 25 bp, Saccharomyces pastorianus
gaagttatcccatagacaagcatct

SEQ ID NO: 123763 - DNA, 25 bp, Saccharomyces pastorianus
ttcactggttttgttgttgcccaag

SEQ ID NO: 123764 - DNA, 25 bp, Saccharomyces pastorianus
ggtgtccatttactgggccgcagat

SEQ ID NO: 123765 - DNA, 25 bp, Saccharomyces pastorianus
gataggttcaaggttttcactggtt

SEQ ID NO: 123766 - DNA, 25 bp, Saccharomyces pastorianus
ctgggccgcagattggtaatgcaat

SEQ ID NO: 123767 - DNA, 25 bp, Saccharomyces pastorianus
gacaagcatctcagagcggtaatac

SEQ ID NO: 123768 - DNA, 25 bp, Saccharomyces pastorianus
gaatcttccatttgaagctactagg

SEQ ID NO: 123769 - DNA, 25 bp, Saccharomyces pastorianus
ccactaatgagatggctgccttaag

SEQ ID NO: 123770 - DNA, 25 bp, Saccharomyces pastorianus
ggatcagttgcacggtgtccattta

SEQ ID NO: 123771 - DNA, 25 bp, Saccharomyces pastorianus
ctaatgccgtgatagctgcaatgga

SEQ ID NO: 123772 - DNA, 25 bp, Saccharomyces pastorianus
gggacggtaatcgacggccataaga

SEQ ID NO: 123773 - DNA, 25 bp, Saccharomyces pastorianus
gaacctggtttcttagtctttgaca

SEQ ID NO: 123774 - DNA, 25 bp, Saccharomyces pastorianus
ctatgttacgacttttaccaggtgc

SEQ ID NO: 123775 - DNA, 25 bp, Saccharomyces pastorianus
gaataatctccaccgtcgtgttttg

SEQ ID NO: 123776 - DNA, 25 bp, Saccharomyces pastorianus
tgatgttcgaactttccaatccctc

SEQ ID NO: 123777 - DNA, 25 bp, Saccharomyces pastorianus
aatattacgccccagtgttcttgat

SEQ ID NO: 123778 - DNA, 25 bp, Saccharomyces pastorianus
ttttctaccatggtgtctgtggctg

SEQ ID NO: 123779 - DNA, 25 bp, Saccharomyces pastorianus
atggtcgtcttctttgccgctagaa

SEQ ID NO: 123780 - DNA, 25 bp, Saccharomyces pastorianus
acaccattgttatccttgcaggcaa

SEQ ID NO: 123781 - DNA, 25 bp, Saccharomyces pastorianus
gctctctactgctgctgttgaacaa

SEQ ID NO: 123782 - DNA, 25 bp, Saccharomyces pastorianus
atttccaccatgtattctactttcc

SEQ ID NO: 123783 - DNA, 25 bp, Saccharomyces pastorianus
caatccctccttgaactttagatgg

SEQ ID NO: 123784 - DNA, 25 bp, Saccharomyces pastorianus
gtctggaatccagccttcgacatta

SEQ ID NO: 123785 - DNA, 25 bp, Saccharomyces pastorianus
gtggaagaacgtaaccctgaggaat

SEQ ID NO: 123786 - DNA, 25 bp, Saccharomyces pastorianus
gtccaattccaatcaaagcagcatt

SEQ ID NO: 123787 - DNA, 25 bp, Saccharomyces pastorianus
aaggattcacttgctaaaaccgaca

SEQ ID NO: 123788 - DNA, 25 bp, Saccharomyces pastorianus
gccaatcactggaaaggtcggtatt

SEQ ID NO: 123789 - DNA, 25 bp, Saccharomyces pastorianus
ttactgatagttccatcgcgtatag

SEQ ID NO: 123790 - DNA, 25 bp, Saccharomyces pastorianus
tcggtattgcccctcttgaaatcaa

SEQ ID NO: 123791 - DNA, 25 bp, Saccharomyces pastorianus
atgggccatgtcttcccactggaaa

SEQ ID NO: 123792 - DNA, 25 bp, Saccharomyces pastorianus
gtaaccgaaactggcgatgacatta

SEQ ID NO: 123793 - DNA, 25 bp, Saccharomyces pastorianus
ggcagactcgggattggacaatgaa

SEQ ID NO: 123794 - DNA, 25 bp, Saccharomyces pastorianus
cttcgacattactccacatgagctt

SEQ ID NO: 123795 - DNA, 25 bp, Saccharomyces pastorianus
atttgcccaaactagctgaatacgc

SEQ ID NO: 123796 - DNA, 25 bp, Saccharomyces pastorianus
accaaggtatggctctgtttatttc

SEQ ID NO: 123797 - DNA, 25 bp, Saccharomyces pastorianus
tacgcttatatcactgacggcgcgg

SEQ ID NO: 123798 - DNA, 25 bp, Saccharomyces pastorianus
agtcaaagacatcgctagttccaaa

SEQ ID NO: 123799 - DNA, 25 bp, Saccharomyces pastorianus
ttattggcagttacctcacttttca

SEQ ID NO: 123800 - DNA, 25 bp, Saccharomyces pastorianus
tttagagtatgcctactgctgccac

SEQ ID NO: 123801 - DNA, 25 bp, Saccharomyces pastorianus
aaatgttcatgctcacttccttaga

SEQ ID NO: 123802 - DNA, 25 bp, Saccharomyces pastorianus
cagtctctctgcattgatctagtca

SEQ ID NO: 123803 - DNA, 25 bp, Saccharomyces pastorianus
gatgaagcgtttcagtctctctgca

SEQ ID NO: 123804 - DNA, 25 bp, Saccharomyces pastorianus
gacggcgcggcttctaaaaacgaca

SEQ ID NO: 123805 - DNA, 25 bp, Saccharomyces pastorianus
aattcattcatttacctccatctac

SEQ ID NO: 123806 - DNA, 25 bp, Saccharomyces pastorianus
gggcctactgtcgttacctaattga

SEQ ID NO: 123807 - DNA, 25 bp, Saccharomyces pastorianus
aggaccttgttattgctgattgcgc

SEQ ID NO: 123808 - DNA, 25 bp, Saccharomyces pastorianus
ctgattgcgcccgtaatgaactaaa

SEQ ID NO: 123809 - DNA, 25 bp, Saccharomyces pastorianus
tggtgtgatacttgcacgtcttcat

SEQ ID NO: 123810 - DNA, 25 bp, Saccharomyces pastorianus
ggcagacggcacattggaacgcaaa

SEQ ID NO: 123811 - DNA, 25 bp, Saccharomyces pastorianus
acgtcttcattttgctaccaagctg

SEQ ID NO: 123812 - DNA, 25 bp, Saccharomyces pastorianus
agccgcattgggatgcctacgtgaa

SEQ ID NO: 123813 - DNA, 25 bp, Saccharomyces pastorianus
gagaggtcccgcattaagggcctac

SEQ ID NO: 123814 - DNA, 25 bp, Saccharomyces pastorianus
gagtttgctgcgtcacaggtagtaa

SEQ ID NO: 123815 - DNA, 25 bp, Saccharomyces pastorianus
gaaatagttgtagccctcaaccctt

SEQ ID NO: 123816 - DNA, 25 bp, Saccharomyces pastorianus
gattctttggtgacgatctttgcaa

SEQ ID NO: 123817 - DNA, 25 bp, Saccharomyces pastorianus
aactgggttacttctctttgatggc

SEQ ID NO: 123818 - DNA, 25 bp, Saccharomyces pastorianus
ggcttctccgataggcttggtgtca

SEQ ID NO: 123819 - DNA, 25 bp, Saccharomyces pastorianus
ctatgttcttgtcttggtcgtccaa

SEQ ID NO: 123820 - DNA, 25 bp, Saccharomyces pastorianus
ttcttgctccctcaattgtttcaat

SEQ ID NO: 123821 - DNA, 25 bp, Saccharomyces pastorianus
tatcgtgcggtttaatgggccaggt

SEQ ID NO: 123822 - DNA, 25 bp, Saccharomyces pastorianus
tgctcttcttccttcataatttctt

SEQ ID NO: 123823 - DNA, 25 bp, Saccharomyces pastorianus
tggagcagccgcatctatgttcttg

SEQ ID NO: 123824 - DNA, 25 bp, Saccharomyces pastorianus
aatttttgcttagcggatgcctcat

SEQ ID NO: 123825 - DNA, 25 bp, Saccharomyces pastorianus
atgcggttttacgtctggagcagcc

SEQ ID NO: 123826 - DNA, 25 bp, Saccharomyces pastorianus
aactcatccttgacgctcacaatgg

SEQ ID NO: 123827 - DNA, 25 bp, Saccharomyces pastorianus
tcacaatggcgttctcttcttgctg

SEQ ID NO: 123828 - DNA, 25 bp, Saccharomyces pastorianus
gaaatagtcgacaagcgcccacaaa

SEQ ID NO: 123829 - DNA, 25 bp, Saccharomyces pastorianus
agtggcgccaaatttatcccaattc

SEQ ID NO: 123830 - DNA, 25 bp, Saccharomyces pastorianus
gtggctcttctatttccaaggttaa

SEQ ID NO: 123831 - DNA, 25 bp, Saccharomyces pastorianus
ggaaagtttttgacctgcgttgaag

SEQ ID NO: 123832 - DNA, 25 bp, Saccharomyces pastorianus
gaccttggtcaggttcctgcaggaa

SEQ ID NO: 123833 - DNA, 25 bp, Saccharomyces pastorianus
attactcttgcacaactggctttgg

SEQ ID NO: 123834 - DNA, 25 bp, Saccharomyces pastorianus
gatgatctccgaaggcgttattggc

SEQ ID NO: 123835 - DNA, 25 bp, Saccharomyces pastorianus
gaatcgttcgaagcgcttgctgaga

SEQ ID NO: 123836 - DNA, 25 bp, Saccharomyces pastorianus
tgaagtccaacgctgatatccctga

SEQ ID NO: 123837 - DNA, 25 bp, Saccharomyces pastorianus
aggagaggtctacccctacgaatcg

SEQ ID NO: 123838 - DNA, 25 bp, Saccharomyces pastorianus
gaagttccggaatacagtggcgcca

SEQ ID NO: 123839 - DNA, 25 bp, Saccharomyces pastorianus
gaggcggccaacgtggaaactacca

SEQ ID NO: 123840 - DNA, 25 bp, Saccharomyces pastorianus
ttgacacctttggacaagcttctgc

SEQ ID NO: 123841 - DNA, 25 bp, Saccharomyces pastorianus
aagatttcactctagaggccgcggt

SEQ ID NO: 123842 - DNA, 25 bp, Saccharomyces pastorianus
agagcactcctcaagacaccaatgt

SEQ ID NO: 123843 - DNA, 25 bp, Saccharomyces pastorianus
gacagaaaccgctactgctagtatg

SEQ ID NO: 123844 - DNA, 25 bp, Saccharomyces pastorianus
aatagatcaagtaatcgccctcctc

SEQ ID NO: 123845 - DNA, 25 bp, Saccharomyces pastorianus
aaaacgactcgtacagcagaccagc

SEQ ID NO: 123846 - DNA, 25 bp, Saccharomyces pastorianus
aatagtggcgcctatcagaaccaaa

SEQ ID NO: 123847 - DNA, 25 bp, Saccharomyces pastorianus
ccatctccacttctactgaaactaa

SEQ ID NO: 123848 - DNA, 25 bp, Saccharomyces pastorianus
aaatcgtcttttttcgacaccatct

SEQ ID NO: 123849 - DNA, 25 bp, Saccharomyces pastorianus
aatccaaccgcaatttcaaagtcga

SEQ ID NO: 123850 - DNA, 25 bp, Saccharomyces pastorianus
aaactggttggctggtctgctgtac

SEQ ID NO: 123851 - DNA, 25 bp, Saccharomyces pastorianus
aacattttttcttcttgccatctca

SEQ ID NO: 123852 - DNA, 25 bp, Saccharomyces pastorianus
gtgaaatcttggtctggcagaagct

SEQ ID NO: 123853 - DNA, 25 bp, Saccharomyces pastorianus
gttttggttctgataggcgccacta

SEQ ID NO: 123854 - DNA, 25 bp, Saccharomyces pastorianus
ggtgtcaacgttcaacattttttct

SEQ ID NO: 123855 - DNA, 25 bp, Saccharomyces pastorianus
gaccgcggcctctagagtgaaatct

SEQ ID NO: 123856 - DNA, 25 bp, Saccharomyces pastorianus
aggcgccactattattttggtagtt

SEQ ID NO: 123857 - DNA, 25 bp, Saccharomyces pastorianus
tctgctgtacgagtcgttttggttc

SEQ ID NO: 123858 - DNA, 25 bp, Saccharomyces pastorianus
tctgtttcccctataatttccacgc

SEQ ID NO: 123859 - DNA, 25 bp, Saccharomyces pastorianus
ttggtagtttccacgttggccgcct

SEQ ID NO: 123860 - DNA, 25 bp, Saccharomyces pastorianus
gaagcttgtccaaaggtgtcaacgt

SEQ ID NO: 123861 - DNA, 25 bp, Saccharomyces pastorianus
atgggtctctgccatcttttgagat

SEQ ID NO: 123862 - DNA, 25 bp, Saccharomyces pastorianus
agtccaagcgtgtcgaagctcaact

SEQ ID NO: 123863 - DNA, 25 bp, Saccharomyces pastorianus
agacctattattggtgcttcagata

SEQ ID NO: 123864 - DNA, 25 bp, Saccharomyces pastorianus
aagtctggtgaagatcctacctctc

SEQ ID NO: 123865 - DNA, 25 bp, Saccharomyces pastorianus
aacttggcagacaccattttggata

SEQ ID NO: 123866 - DNA, 25 bp, Saccharomyces pastorianus
tacctctcgtggttcttcggtacaa

SEQ ID NO: 123867 - DNA, 25 bp, Saccharomyces pastorianus
gtaaccttagcgcagtacctacaaa

SEQ ID NO: 123868 - DNA, 25 bp, Saccharomyces pastorianus
gttggaacccttacctgatgggtct

SEQ ID NO: 123869 - DNA, 25 bp, Saccharomyces pastorianus
gcagctttaaacgatctaccagtga

SEQ ID NO: 123870 - DNA, 25 bp, Saccharomyces pastorianus
agtatgcccctgtgagtaaccttag

SEQ ID NO: 123871 - DNA, 25 bp, Saccharomyces pastorianus
agtcactctttgcagctttaaacga

SEQ ID NO: 123872 - DNA, 25 bp, Saccharomyces pastorianus
aaacaggccgcttatgtggctgcgt

SEQ ID NO: 123873 - DNA, 25 bp, Saccharomyces pastorianus
aaccttgaaacaggccgcttatgtg

SEQ ID NO: 123874 - DNA, 25 bp, Saccharomyces pastorianus
atgtggctgcgtttctttgggtttc

SEQ ID NO: 123875 - DNA, 25 bp, Saccharomyces pastorianus
tcaacaggaagtctccgaagaggag

SEQ ID NO: 123876 - DNA, 25 bp, Saccharomyces pastorianus
gaaaaccttgaaacaggccgcttat

SEQ ID NO: 123877 - DNA, 25 bp, Saccharomyces pastorianus
gtttggtctacctcaacaggaagtc

SEQ ID NO: 123878 - DNA, 25 bp, Saccharomyces pastorianus
gagaaaaccttgaaacaggccgctt

SEQ ID NO: 123879 - DNA, 25 bp, Saccharomyces pastorianus
aggccgcttatgtggctgcgtttct

SEQ ID NO: 123880 - DNA, 25 bp, Saccharomyces pastorianus
acctcaacaggaagtctccgaagag

SEQ ID NO: 123881 - DNA, 25 bp, Saccharomyces pastorianus
atgtttggtctacctcaacaggaag

SEQ ID NO: 123882 - DNA, 25 bp, Saccharomyces pastorianus
tgcgtttctttgggtttccccaatg

SEQ ID NO: 123883 - DNA, 25 bp, Saccharomyces pastorianus
aagcctccttcttttatcggctgga

SEQ ID NO: 123884 - DNA, 25 bp, Saccharomyces pastorianus
attagcttcgcttttcaggttctcc

SEQ ID NO: 123885 - DNA, 25 bp, Saccharomyces pastorianus
ttcttcagattccaatgcgtcttct

SEQ ID NO: 123886 - DNA, 25 bp, Saccharomyces pastorianus
aatatctgaagactcggccttgctg

SEQ ID NO: 123887 - DNA, 25 bp, Saccharomyces pastorianus
tggatctgtgatttcttcgtctact

SEQ ID NO: 123888 - DNA, 25 bp, Saccharomyces pastorianus
tactcgtcgattgttctttccttga

SEQ ID NO: 123889 - DNA, 25 bp, Saccharomyces pastorianus
gacggattaacttctcctttggatc

SEQ ID NO: 123890 - DNA, 25 bp, Saccharomyces pastorianus
aggttctccagatattgctttgcaa

SEQ ID NO: 123891 - DNA, 25 bp, Saccharomyces pastorianus
aaatctttttcttcagcgttcctat

SEQ ID NO: 123892 - DNA, 25 bp, Saccharomyces pastorianus
gctgttcagcaacgtcttcttttaa

SEQ ID NO: 123893 - DNA, 25 bp, Saccharomyces pastorianus
acttctagttgttcatcttcgtttg

SEQ ID NO: 123894 - DNA, 25 bp, Saccharomyces pastorianus
gttgctaggtgaattatctggcgct

SEQ ID NO: 123895 - DNA, 25 bp, Saccharomyces pastorianus
cagactcggtagatggattgcaaat

SEQ ID NO: 123896 - DNA, 25 bp, Saccharomyces pastorianus
gagccctctttcaatgacatttcgg

SEQ ID NO: 123897 - DNA, 25 bp, Saccharomyces pastorianus
ttggatcacatctctttacgctatt

SEQ ID NO: 123898 - DNA, 25 bp, Saccharomyces pastorianus
ttgccaaagaacacagactcggtag

SEQ ID NO: 123899 - DNA, 25 bp, Saccharomyces pastorianus
agaggcacctttgtttttctgcgag

SEQ ID NO: 123900 - DNA, 25 bp, Saccharomyces pastorianus
gattctcactttataacaggctccg

SEQ ID NO: 123901 - DNA, 25 bp, Saccharomyces pastorianus
atctggcgctaaaggtgtagttacc

SEQ ID NO: 123902 - DNA, 25 bp, Saccharomyces pastorianus
gaaattgctacaaccattttggatc

SEQ ID NO: 123903 - DNA, 25 bp, Saccharomyces pastorianus
taacaggctccgataatggtaatat

SEQ ID NO: 123904 - DNA, 25 bp, Saccharomyces pastorianus
atggtattttacctgagccctcttt

SEQ ID NO: 123905 - DNA, 25 bp, Saccharomyces pastorianus
attccgggtgtccatctaagagtca

SEQ ID NO: 123906 - DNA, 25 bp, Saccharomyces pastorianus
tattgtgctgtggtcacggccatca

SEQ ID NO: 123907 - DNA, 25 bp, Saccharomyces pastorianus
tattagctgaacacggtatcgccgg

SEQ ID NO: 123908 - DNA, 25 bp, Saccharomyces pastorianus
gcaatggcgctaattctgcgtctga

SEQ ID NO: 123909 - DNA, 25 bp, Saccharomyces pastorianus
gggattgatttttaacgctctattt

SEQ ID NO: 123910 - DNA, 25 bp, Saccharomyces pastorianus
gcctagctcgggttgtattactcta

SEQ ID NO: 123911 - DNA, 25 bp, Saccharomyces pastorianus
cggccatcatttgcttcgtattagg

SEQ ID NO: 123912 - DNA, 25 bp, Saccharomyces pastorianus
aaaactcctcattgtcatcagctac

SEQ ID NO: 123913 - DNA, 25 bp, Saccharomyces pastorianus
gtattactctatatggctctttgat

SEQ ID NO: 123914 - DNA, 25 bp, Saccharomyces pastorianus
aaattgcctatatcggtgcctctgc

SEQ ID NO: 123915 - DNA, 25 bp, Saccharomyces pastorianus
tgcgtctgagacaaatcctactgag

SEQ ID NO: 123916 - DNA, 25 bp, Saccharomyces pastorianus
gagaattcatcaacttcatcctcgc

SEQ ID NO: 123917 - DNA, 25 bp, Saccharomyces pastorianus
attttatgtttgctgagggtacctc

SEQ ID NO: 123918 - DNA, 25 bp, Saccharomyces pastorianus
tgaaccccgcaatggccaaaactaa

SEQ ID NO: 123919 - DNA, 25 bp, Saccharomyces pastorianus
catcctcgctggtgggttagatata

SEQ ID NO: 123920 - DNA, 25 bp, Saccharomyces pastorianus
cctgttacgttgttggtgccatcca

SEQ ID NO: 123921 - DNA, 25 bp, Saccharomyces pastorianus
gtacctcacctttagatgctttttc

SEQ ID NO: 123922 - DNA, 25 bp, Saccharomyces pastorianus
aggaattcatagacccttcaataac

SEQ ID NO: 123923 - DNA, 25 bp, Saccharomyces pastorianus
cagagctatctcaattgggcaatac

SEQ ID NO: 123924 - DNA, 25 bp, Saccharomyces pastorianus
gagccacaagtactctcggataatt

SEQ ID NO: 123925 - DNA, 25 bp, Saccharomyces pastorianus
ttttcagtggtgttattagctcagg

SEQ ID NO: 123926 - DNA, 25 bp, Saccharomyces pastorianus
tatggccacgaggtagcagagctat

SEQ ID NO: 123927 - DNA, 25 bp, Saccharomyces pastorianus
gattagccgctgaactgagagccca

SEQ ID NO: 123928 - DNA, 25 bp, Saccharomyces pastorianus
gtaccaatatttgctacagggtttg

SEQ ID NO: 123929 - DNA, 25 bp, Saccharomyces pastorianus
aaagccgcccattgtagtaccaata

SEQ ID NO: 123930 - DNA, 25 bp, Saccharomyces pastorianus
gaaggtaaatcggacccagatgtta

SEQ ID NO: 123931 - DNA, 25 bp, Saccharomyces pastorianus
taccacgcgaagaccctaggttcaa

SEQ ID NO: 123932 - DNA, 25 bp, Saccharomyces pastorianus
aaatgaagttcgcaaattaccacgc

SEQ ID NO: 123933 - DNA, 25 bp, Saccharomyces pastorianus
tccccgcccataataaggtcgaagc

SEQ ID NO: 123934 - DNA, 25 bp, Saccharomyces pastorianus
gggtattaccagaatgatcctagaa

SEQ ID NO: 123935 - DNA, 25 bp, Saccharomyces pastorianus
gaagcggttcaacaccacggaaggt

SEQ ID NO: 123936 - DNA, 25 bp, Saccharomyces pastorianus
aactgagagcccatgttgctgaaat

SEQ ID NO: 123937 - DNA, 25 bp, Saccharomyces pastorianus
atatccgccttttgaaaattcgatg

SEQ ID NO: 123938 - DNA, 25 bp, Saccharomyces pastorianus
tgtaaacatttcaccaagctcctct

SEQ ID NO: 123939 - DNA, 25 bp, Saccharomyces pastorianus
aatcttgttgatttggccggttccg

SEQ ID NO: 123940 - DNA, 25 bp, Saccharomyces pastorianus
aagacatataccgttcaggaactca

SEQ ID NO: 123941 - DNA, 25 bp, Saccharomyces pastorianus
agcatcaaatgagcattcctcccgt

SEQ ID NO: 123942 - DNA, 25 bp, Saccharomyces pastorianus
caccaagctcctctcatattaatga

SEQ ID NO: 123943 - DNA, 25 bp, Saccharomyces pastorianus
aaattaagatccaccgctagcacag

SEQ ID NO: 123944 - DNA, 25 bp, Saccharomyces pastorianus
acctactgcaatattcactcactgg

SEQ ID NO: 123945 - DNA, 25 bp, Saccharomyces pastorianus
taagttgcttaggtgacgttattca

SEQ ID NO: 123946 - DNA, 25 bp, Saccharomyces pastorianus
attcatgctttaggtcagccggata

SEQ ID NO: 123947 - DNA, 25 bp, Saccharomyces pastorianus
ctcccgttcacacagtattttcata

SEQ ID NO: 123948 - DNA, 25 bp, Saccharomyces pastorianus
ggagcacactcgtatggcacactaa

SEQ ID NO: 123949 - DNA, 25 bp, Saccharomyces pastorianus
tatgtactgattttccttcggcttc

SEQ ID NO: 123950 - DNA, 25 bp, Saccharomyces pastorianus
ttatccttagtgtctactctgtgct

SEQ ID NO: 123951 - DNA, 25 bp, Saccharomyces pastorianus
ttcttcagcatcactttgttcgtta

SEQ ID NO: 123952 - DNA, 25 bp, Saccharomyces pastorianus
gcatctgtttattacctttccttat

SEQ ID NO: 123953 - DNA, 25 bp, Saccharomyces pastorianus
ccggctcattacttaactcttggtt

SEQ ID NO: 123954 - DNA, 25 bp, Saccharomyces pastorianus
gcttcatcaccttccattattgtat

SEQ ID NO: 123955 - DNA, 25 bp, Saccharomyces pastorianus
cggcttctctatcactttattcata

SEQ ID NO: 123956 - DNA, 25 bp, Saccharomyces pastorianus
ttattgtatctttttccggctcatt

SEQ ID NO: 123957 - DNA, 25 bp, Saccharomyces pastorianus
ttggttgccactattccttttttca

SEQ ID NO: 123958 - DNA, 25 bp, Saccharomyces pastorianus
aattctgcattctttctggttcttt

SEQ ID NO: 123959 - DNA, 25 bp, Saccharomyces pastorianus
ttttttcacgcccaaattctgcatt

SEQ ID NO: 123960 - DNA, 25 bp, Saccharomyces pastorianus
gatagctcaaaaaggtgccgtgaaa

SEQ ID NO: 123961 - DNA, 25 bp, Saccharomyces pastorianus
ttctgctgcagtaaatgctatttta

SEQ ID NO: 123962 - DNA, 25 bp, Saccharomyces pastorianus
gaaagcatacgacaggaaggacccc

SEQ ID NO: 123963 - DNA, 25 bp, Saccharomyces pastorianus
gatattattccaattgcttccggag

SEQ ID NO: 123964 - DNA, 25 bp, Saccharomyces pastorianus
gacagcgctcagaaagatagctcaa

SEQ ID NO: 123965 - DNA, 25 bp, Saccharomyces pastorianus
aatagctctagcgatgaatcatcta

SEQ ID NO: 123966 - DNA, 25 bp, Saccharomyces pastorianus
ttaacgccattttagcaactcaagt

SEQ ID NO: 123967 - DNA, 25 bp, Saccharomyces pastorianus
gtccttgagaaggagacagcgctca

SEQ ID NO: 123968 - DNA, 25 bp, Saccharomyces pastorianus
ggaaggaccccatcatggctagaaa

SEQ ID NO: 123969 - DNA, 25 bp, Saccharomyces pastorianus
atggttctactggattttctgctgc

SEQ ID NO: 123970 - DNA, 25 bp, Saccharomyces pastorianus
gaagaggacgacgacttcccaagaa

SEQ ID NO: 123971 - DNA, 25 bp, Saccharomyces pastorianus
gtagatcccttcgatgttcatgaat

SEQ ID NO: 123972 - DNA, 25 bp, Saccharomyces pastorianus
agacacctgaccaagtggcgaactt

SEQ ID NO: 123973 - DNA, 25 bp, Saccharomyces pastorianus
atcatcctaatgtagccacgttggc

SEQ ID NO: 123974 - DNA, 25 bp, Saccharomyces pastorianus
atcaacacatttatccgcccattta

SEQ ID NO: 123975 - DNA, 25 bp, Saccharomyces pastorianus
cgcccatttagtagcatctttcatc

SEQ ID NO: 123976 - DNA, 25 bp, Saccharomyces pastorianus
gttaactcatgcactggattcctct

SEQ ID NO: 123977 - DNA, 25 bp, Saccharomyces pastorianus
gattcctctctgtgggagctggcgt

SEQ ID NO: 123978 - DNA, 25 bp, Saccharomyces pastorianus
ggaactatgattctttgctcaatgc

SEQ ID NO: 123979 - DNA, 25 bp, Saccharomyces pastorianus
gagctggcgtcattgatggaacatt

SEQ ID NO: 123980 - DNA, 25 bp, Saccharomyces pastorianus
tgaatcggaccctgagttaactcat

SEQ ID NO: 123981 - DNA, 25 bp, Saccharomyces pastorianus
ccgtgattcccttcatctataattt

SEQ ID NO: 123982 - DNA, 25 bp, Saccharomyces pastorianus
tggttatcaggcagtactatctaca

SEQ ID NO: 123983 - DNA, 25 bp, Saccharomyces pastorianus
ggcagtttgttcgtcaatctctagg

SEQ ID NO: 123984 - DNA, 25 bp, Saccharomyces pastorianus
ttccaccattggctcatgtagtatc

SEQ ID NO: 123985 - DNA, 25 bp, Saccharomyces pastorianus
aatgacagcggcacttcgttatatt

SEQ ID NO: 123986 - DNA, 25 bp, Saccharomyces pastorianus
ggtctcgttacaccaactgtgatgg

SEQ ID NO: 123987 - DNA, 25 bp, Saccharomyces pastorianus
tgatggacattcacacctcggagat

SEQ ID NO: 123988 - DNA, 25 bp, Saccharomyces pastorianus
gaccagatcacatttgtcggattat

SEQ ID NO: 123989 - DNA, 25 bp, Saccharomyces pastorianus
gaacttctatttggtttctcttcag

SEQ ID NO: 123990 - DNA, 25 bp, Saccharomyces pastorianus
ttctcttcagtagcaacgaccattg

SEQ ID NO: 123991 - DNA, 25 bp, Saccharomyces pastorianus
taacaaattggttggctccgtacaa

SEQ ID NO: 123992 - DNA, 25 bp, Saccharomyces pastorianus
aatctctaggattagctgcccagga

SEQ ID NO: 123993 - DNA, 25 bp, Saccharomyces pastorianus
tagccctagctgataacattctacg

SEQ ID NO: 123994 - DNA, 25 bp, Saccharomyces pastorianus
ggttatttccatcggtttaatcagt

SEQ ID NO: 123995 - DNA, 25 bp, Saccharomyces pastorianus
caacataggcacagctccagagtaa

SEQ ID NO: 123996 - DNA, 25 bp, Saccharomyces pastorianus
atgtagacaagctcaagccgctgtt

SEQ ID NO: 123997 - DNA, 25 bp, Saccharomyces pastorianus
tggcatggccactagttttgttcac

SEQ ID NO: 123998 - DNA, 25 bp, Saccharomyces pastorianus
cagtgttggccgttggtatcagagc

SEQ ID NO: 123999 - DNA, 25 bp, Saccharomyces pastorianus
tgccatctttttggctaagaccctg

SEQ ID NO: 124000 - DNA, 25 bp, Saccharomyces pastorianus
gttttgttcacactggactttttga

SEQ ID NO: 124001 - DNA, 25 bp, Saccharomyces pastorianus
gaactttgtgttcactttcactgcc

SEQ ID NO: 124002 - DNA, 25 bp, Saccharomyces pastorianus
gattactcaaggttccggtaccaga

SEQ ID NO: 124003 - DNA, 25 bp, Saccharomyces pastorianus
actactgtatgtttgcttgtgcata

SEQ ID NO: 124004 - DNA, 25 bp, Saccharomyces pastorianus
aagagattttctgcgattgcctacg

SEQ ID NO: 124005 - DNA, 25 bp, Saccharomyces pastorianus
gattgcctacgggatcacgaacgag

SEQ ID NO: 124006 - DNA, 25 bp, Saccharomyces pastorianus
atcgaccgatggcaaacacttctga

SEQ ID NO: 124007 - DNA, 25 bp, Saccharomyces pastorianus
gaggtcgggccatcaagccggttta

SEQ ID NO: 124008 - DNA, 25 bp, Saccharomyces pastorianus
tggtgacggaaccacgctactacgt

SEQ ID NO: 124009 - DNA, 25 bp, Saccharomyces pastorianus
agcacccgcggacagtagtagtata

SEQ ID NO: 124010 - DNA, 25 bp, Saccharomyces pastorianus
agacaaattcgtttcccaactgctg

SEQ ID NO: 124011 - DNA, 25 bp, Saccharomyces pastorianus
cagtcgaatcgctgcgtcaggacaa

SEQ ID NO: 124012 - DNA, 25 bp, Saccharomyces pastorianus
gtggcaatgccaccgctgaagaaag

SEQ ID NO: 124013 - DNA, 25 bp, Saccharomyces pastorianus
agcacaggtgttgtgtcagcccaat

SEQ ID NO: 124014 - DNA, 25 bp, Saccharomyces pastorianus
ctactacgtcgtgggcattctggag

SEQ ID NO: 124015 - DNA, 25 bp, Saccharomyces pastorianus
ttcaaggcttgacgactggtacagt

SEQ ID NO: 124016 - DNA, 25 bp, Saccharomyces pastorianus
gcggtagtccaaatccttttcgatg

SEQ ID NO: 124017 - DNA, 25 bp, Saccharomyces pastorianus
gtgcattttacgttactgctggtgt

SEQ ID NO: 124018 - DNA, 25 bp, Saccharomyces pastorianus
ttcgctgtactggactttgatcttt

SEQ ID NO: 124019 - DNA, 25 bp, Saccharomyces pastorianus
ctggcccatcaacaactcgaagtat

SEQ ID NO: 124020 - DNA, 25 bp, Saccharomyces pastorianus
atggatattcgtcatgtacgtctta

SEQ ID NO: 124021 - DNA, 25 bp, Saccharomyces pastorianus
ttccctgtgctcagatcattcgtaa

SEQ ID NO: 124022 - DNA, 25 bp, Saccharomyces pastorianus
ggtgtgtatgctagcttgacccata

SEQ ID NO: 124023 - DNA, 25 bp, Saccharomyces pastorianus
gatatgtaacgccaaaattcccctc

SEQ ID NO: 124024 - DNA, 25 bp, Saccharomyces pastorianus
gtacgtcttatacggaggcgttcaa

SEQ ID NO: 124025 - DNA, 25 bp, Saccharomyces pastorianus
tttctatgtctacatgggtcccact

SEQ ID NO: 124026 - DNA, 25 bp, Saccharomyces pastorianus
ttttgatcccgcgttcaagaaagaa

SEQ ID NO: 124027 - DNA, 25 bp, Saccharomyces pastorianus
agaccctattctattgagtactaaa

SEQ ID NO: 124028 - DNA, 25 bp, Saccharomyces pastorianus
gcggacgccgatgaggaacacttaa

SEQ ID NO: 124029 - DNA, 25 bp, Saccharomyces pastorianus
tgtcaaactaggcaatgtctggtct

SEQ ID NO: 124030 - DNA, 25 bp, Saccharomyces pastorianus
gagttgtagcattatctccggcttt

SEQ ID NO: 124031 - DNA, 25 bp, Saccharomyces pastorianus
acgggtggattagtcaggtctttat

SEQ ID NO: 124032 - DNA, 25 bp, Saccharomyces pastorianus
ttgactccggagctcatataaatgt

SEQ ID NO: 124033 - DNA, 25 bp, Saccharomyces pastorianus
ggtggataccaatcttgactccgga

SEQ ID NO: 124034 - DNA, 25 bp, Saccharomyces pastorianus
attctaaacaaggtgcggacgccga

SEQ ID NO: 124035 - DNA, 25 bp, Saccharomyces pastorianus
gaaacacaactacatcatccgataa

SEQ ID NO: 124036 - DNA, 25 bp, Saccharomyces pastorianus
tagtgattcgacgtctaacagcccc

SEQ ID NO: 124037 - DNA, 25 bp, Saccharomyces pastorianus
gcttacagaatgatagcgccgttaa

SEQ ID NO: 124038 - DNA, 25 bp, Saccharomyces pastorianus
accagtcttacataatttctctcca

SEQ ID NO: 124039 - DNA, 25 bp, Saccharomyces pastorianus
tagggtttcaacatctcacaatcag

SEQ ID NO: 124040 - DNA, 25 bp, Saccharomyces pastorianus
gtggaacaagcatgtctgcagacag

SEQ ID NO: 124041 - DNA, 25 bp, Saccharomyces pastorianus
cagggaattctccttcaataacata

SEQ ID NO: 124042 - DNA, 25 bp, Saccharomyces pastorianus
agtacctttcaatggcaatggctta

SEQ ID NO: 124043 - DNA, 25 bp, Saccharomyces pastorianus
attattcgacgactatcacctagaa

SEQ ID NO: 124044 - DNA, 25 bp, Saccharomyces pastorianus
gccaatgatcacttttacagggaat

SEQ ID NO: 124045 - DNA, 25 bp, Saccharomyces pastorianus
tgccaaccacacttttctgtacgaa

SEQ ID NO: 124046 - DNA, 25 bp, Saccharomyces pastorianus
ggagaaactggaccccaacaatatt

SEQ ID NO: 124047 - DNA, 25 bp, Saccharomyces pastorianus
gaattatcacgcttgacaaacggta

SEQ ID NO: 124048 - DNA, 25 bp, Saccharomyces pastorianus
cggtgagtacggtggctactttcaa

SEQ ID NO: 124049 - DNA, 25 bp, Saccharomyces pastorianus
ggtgatactccaacttatactattc

SEQ ID NO: 124050 - DNA, 25 bp, Saccharomyces pastorianus
tatagcctctcaatccttgcaaatt

SEQ ID NO: 124051 - DNA, 25 bp, Saccharomyces pastorianus
tgatatctggtacatgcctgactat

SEQ ID NO: 124052 - DNA, 25 bp, Saccharomyces pastorianus
ggcggtccatttcaacaagccgtgt

SEQ ID NO: 124053 - DNA, 25 bp, Saccharomyces pastorianus
aaccaagtaatgctatatccgtgac

SEQ ID NO: 124054 - DNA, 25 bp, Saccharomyces pastorianus
gtgtctgctgtctcaactttgaacg

SEQ ID NO: 124055 - DNA, 25 bp, Saccharomyces pastorianus
tccgtgacatgcgatccaagtgact

SEQ ID NO: 124056 - DNA, 25 bp, Saccharomyces pastorianus
tgctaaagccttacatcctgatggt

SEQ ID NO: 124057 - DNA, 25 bp, Saccharomyces pastorianus
tgaacacttatactggcggtccatt

SEQ ID NO: 124058 - DNA, 25 bp, Saccharomyces pastorianus
ctacttgggaagatgctggttacac

SEQ ID NO: 124059 - DNA, 25 bp, Saccharomyces pastorianus
atgagtatggtatctttgctcaaaa

SEQ ID NO: 124060 - DNA, 25 bp, Saccharomyces pastorianus
ggtatctttgctcaaaagattattg

SEQ ID NO: 124061 - DNA, 25 bp, Saccharomyces pastorianus
acgttatgagtatggtatctttgct

SEQ ID NO: 124062 - DNA, 25 bp, Saccharomyces pastorianus
gtctacgttatgagtatggtatctt

SEQ ID NO: 124063 - DNA, 25 bp, Saccharomyces pastorianus
ggtctacgttatgagtatggtatct

SEQ ID NO: 124064 - DNA, 25 bp, Saccharomyces pastorianus
gttatgagtatggtatctttgctca

SEQ ID NO: 124065 - DNA, 25 bp, Saccharomyces pastorianus
atggtatctttgctcaaaagattat

SEQ ID NO: 124066 - DNA, 25 bp, Saccharomyces pastorianus
atggtctacgttatgagtatggtat

SEQ ID NO: 124067 - DNA, 25 bp, Saccharomyces pastorianus
tatgagtatggtatctttgctcaaa

SEQ ID NO: 124068 - DNA, 25 bp, Saccharomyces pastorianus
gagtatggtatctttgctcaaaaga

SEQ ID NO: 124069 - DNA, 25 bp, Saccharomyces pastorianus
gtatggtatctttgctcaaaagatt

SEQ ID NO: 124070 - DNA, 25 bp, Saccharomyces pastorianus
taaggtttatcggtgactccgttgc

SEQ ID NO: 124071 - DNA, 25 bp, Saccharomyces pastorianus
gaatctgtttccagcccaattgaac

SEQ ID NO: 124072 - DNA, 25 bp, Saccharomyces pastorianus
tttgcctgcaggtaagtcattggtg

SEQ ID NO: 124073 - DNA, 25 bp, Saccharomyces pastorianus
ttgccgccattggtatcccggtaaa

SEQ ID NO: 124074 - DNA, 25 bp, Saccharomyces pastorianus
tgataaattcactgacggcggcctg

SEQ ID NO: 124075 - DNA, 25 bp, Saccharomyces pastorianus
aagacagcgccgtggtatcttccaa

SEQ ID NO: 124076 - DNA, 25 bp, Saccharomyces pastorianus
ggcggcctgtttactctgtttgtaa

SEQ ID NO: 124077 - DNA, 25 bp, Saccharomyces pastorianus
gcaaggacttatcccctgcaataaa

SEQ ID NO: 124078 - DNA, 25 bp, Saccharomyces pastorianus
aaagcctccctagctcaatatgaag

SEQ ID NO: 124079 - DNA, 25 bp, Saccharomyces pastorianus
gagtcactgttaagcactttgcctg

SEQ ID NO: 124080 - DNA, 25 bp, Saccharomyces pastorianus
ggcttagtcagctcggctaaacttg

SEQ ID NO: 124081 - DNA, 25 bp, Saccharomyces pastorianus
atccaatttgtctacgacgaagctg

SEQ ID NO: 124082 - DNA, 25 bp, Saccharomyces pastorianus
ttatgaagtctcttttcccgatgac

SEQ ID NO: 124083 - DNA, 25 bp, Saccharomyces pastorianus
gcagccgtagctgtggaaagttcga

SEQ ID NO: 124084 - DNA, 25 bp, Saccharomyces pastorianus
gaagctgataaactgggcacaccaa

SEQ ID NO: 124085 - DNA, 25 bp, Saccharomyces pastorianus
aatttcggcagattcctagatccta

SEQ ID NO: 124086 - DNA, 25 bp, Saccharomyces pastorianus
agctcagctgctatacgtcaaggtc

SEQ ID NO: 124087 - DNA, 25 bp, Saccharomyces pastorianus
atacgtcaaggtcggctataaagcc

SEQ ID NO: 124088 - DNA, 25 bp, Saccharomyces pastorianus
tcccgatgacttggacgatttcaat

SEQ ID NO: 124089 - DNA, 25 bp, Saccharomyces pastorianus
accatatgactacttgggatttcaa

SEQ ID NO: 124090 - DNA, 25 bp, Saccharomyces pastorianus
cgcgggcggcaaactaatccaattt

SEQ ID NO: 124091 - DNA, 25 bp, Saccharomyces pastorianus
agtcaaaccatagagctcagctgct

SEQ ID NO: 124092 - DNA, 25 bp, Saccharomyces pastorianus
attatcattttctttgctgtccaat

SEQ ID NO: 124093 - DNA, 25 bp, Saccharomyces pastorianus
gttgataggcgcatgcattggcata

SEQ ID NO: 124094 - DNA, 25 bp, Saccharomyces pastorianus
aaagacttttgcacacctcatcaaa

SEQ ID NO: 124095 - DNA, 25 bp, Saccharomyces pastorianus
atggcgttggctatcctctaaagaa

SEQ ID NO: 124096 - DNA, 25 bp, Saccharomyces pastorianus
gagccctccatataacctgatgtat

SEQ ID NO: 124097 - DNA, 25 bp, Saccharomyces pastorianus
aatacagttccgtatgctggtgccg

SEQ ID NO: 124098 - DNA, 25 bp, Saccharomyces pastorianus
aacgcaaaattcacctgtcctgatg

SEQ ID NO: 124099 - DNA, 25 bp, Saccharomyces pastorianus
tgtcctgatgctgtgacctactata

SEQ ID NO: 124100 - DNA, 25 bp, Saccharomyces pastorianus
caacgggcttggttttatcagctat

SEQ ID NO: 124101 - DNA, 25 bp, Saccharomyces pastorianus
ctactataatgcttccgttgtctgg

SEQ ID NO: 124102 - DNA, 25 bp, Saccharomyces pastorianus
tttatcggcaggcttttcaacgggc

SEQ ID NO: 124103 - DNA, 25 bp, Saccharomyces pastorianus
attgccattggaatagggcctcaag

SEQ ID NO: 124104 - DNA, 25 bp, Saccharomyces pastorianus
aagctagcaggagtgtgccgtacca

SEQ ID NO: 124105 - DNA, 25 bp, Saccharomyces pastorianus
gaggcagcagcacttaacgtctgat

SEQ ID NO: 124106 - DNA, 25 bp, Saccharomyces pastorianus
actcgggccttgcaatacaatcatc

SEQ ID NO: 124107 - DNA, 25 bp, Saccharomyces pastorianus
ttctctcatccctcttttagtggaa

SEQ ID NO: 124108 - DNA, 25 bp, Saccharomyces pastorianus
gtgacggcacggtaacaacttttcg

SEQ ID NO: 124109 - DNA, 25 bp, Saccharomyces pastorianus
caacaaaagcgtcattggtgggttt

SEQ ID NO: 124110 - DNA, 25 bp, Saccharomyces pastorianus
aacttttcgtacgtggcatacgcaa

SEQ ID NO: 124111 - DNA, 25 bp, Saccharomyces pastorianus
gaaagcagcatctcaattgccattg

SEQ ID NO: 124112 - DNA, 25 bp, Saccharomyces pastorianus
gtgccgtaccacattctttgcaggg

SEQ ID NO: 124113 - DNA, 25 bp, Saccharomyces pastorianus
aggtaatgagacaaccggcggcgca

SEQ ID NO: 124114 - DNA, 25 bp, Saccharomyces pastorianus
atttgcctatctctagaccactgcg

SEQ ID NO: 124115 - DNA, 25 bp, Saccharomyces pastorianus
ctctagaccactgcgcctaaatgat

SEQ ID NO: 124116 - DNA, 25 bp, Saccharomyces pastorianus
tatctaagttcgttttctccctgaa

SEQ ID NO: 124117 - DNA, 25 bp, Saccharomyces pastorianus
ggcttggaatattttgtgcgatgta

SEQ ID NO: 124118 - DNA, 25 bp, Saccharomyces pastorianus
cagagtgctctaatcgatttgccta

SEQ ID NO: 124119 - DNA, 25 bp, Saccharomyces pastorianus
gatgtatctaagttcgttttctccc

SEQ ID NO: 124120 - DNA, 25 bp, Saccharomyces pastorianus
aaaggttttcaactaaatgtcagag

SEQ ID NO: 124121 - DNA, 25 bp, Saccharomyces pastorianus
gtgctctaatcgatttgcctatctc

SEQ ID NO: 124122 - DNA, 25 bp, Saccharomyces pastorianus
aatcgatttgcctatctctagacca

SEQ ID NO: 124123 - DNA, 25 bp, Saccharomyces pastorianus
ttcaactaaatgtcagagtgctcta

SEQ ID NO: 124124 - DNA, 25 bp, Saccharomyces pastorianus
ggaatattttgtgcgatgtatctaa

SEQ ID NO: 124125 - DNA, 25 bp, Saccharomyces pastorianus
aatacttttacgatgccttagctac

SEQ ID NO: 124126 - DNA, 25 bp, Saccharomyces pastorianus
gttcctgggaaatacttttacgatg

SEQ ID NO: 124127 - DNA, 25 bp, Saccharomyces pastorianus
ggttcctatactgaagactctctaa

SEQ ID NO: 124128 - DNA, 25 bp, Saccharomyces pastorianus
cttttacgatgccttagctaccaac

SEQ ID NO: 124129 - DNA, 25 bp, Saccharomyces pastorianus
ccaacagtgttaatggttcctatac

SEQ ID NO: 124130 - DNA, 25 bp, Saccharomyces pastorianus
gtaactgattccagactttctttgg

SEQ ID NO: 124131 - DNA, 25 bp, Saccharomyces pastorianus
gatgccttagctaccaacagtgtta

SEQ ID NO: 124132 - DNA, 25 bp, Saccharomyces pastorianus
ctttggatagttttcttgaggtgat

SEQ ID NO: 124133 - DNA, 25 bp, Saccharomyces pastorianus
gattccagactttctttggatagtt

SEQ ID NO: 124134 - DNA, 25 bp, Saccharomyces pastorianus
aagtattcactgttcctgggaaata

SEQ ID NO: 124135 - DNA, 25 bp, Saccharomyces pastorianus
gattaaagtattcactgttcctggg

SEQ ID NO: 124136 - DNA, 25 bp, Saccharomyces pastorianus
gatggtaatgtggttctttcctcca

SEQ ID NO: 124137 - DNA, 25 bp, Saccharomyces pastorianus
gaaggaattgtacagtgccgtcacc

SEQ ID NO: 124138 - DNA, 25 bp, Saccharomyces pastorianus
tatcccataggctgtacgaatctct

SEQ ID NO: 124139 - DNA, 25 bp, Saccharomyces pastorianus
tgccgtcaccgttgaattcctttga

SEQ ID NO: 124140 - DNA, 25 bp, Saccharomyces pastorianus
gcagggtttccatccaagacagtat

SEQ ID NO: 124141 - DNA, 25 bp, Saccharomyces pastorianus
gcctacatgtaacaccctcgatggt

SEQ ID NO: 124142 - DNA, 25 bp, Saccharomyces pastorianus
aactgctctcagtgtgtgttggaag

SEQ ID NO: 124143 - DNA, 25 bp, Saccharomyces pastorianus
gaattcctttgatcggtccttctat

SEQ ID NO: 124144 - DNA, 25 bp, Saccharomyces pastorianus
gacataccaggctattcttttgtaa

SEQ ID NO: 124145 - DNA, 25 bp, Saccharomyces pastorianus
tttcctccacatataattcccttga

SEQ ID NO: 124146 - DNA, 25 bp, Saccharomyces pastorianus
aacagcggcagcgagcatggtgatt

SEQ ID NO: 124147 - DNA, 25 bp, Saccharomyces pastorianus
ggtttatcggatactttctcaagtt

SEQ ID NO: 124148 - DNA, 25 bp, Saccharomyces pastorianus
gtctaggcaactcaagggcctaatt

SEQ ID NO: 124149 - DNA, 25 bp, Saccharomyces pastorianus
gatttccaagttgttgatcttcgaa

SEQ ID NO: 124150 - DNA, 25 bp, Saccharomyces pastorianus
ctcaagggcctaattgaaaatcaga

SEQ ID NO: 124151 - DNA, 25 bp, Saccharomyces pastorianus
ttatcggatactttctcaagttctc

SEQ ID NO: 124152 - DNA, 25 bp, Saccharomyces pastorianus
tcataacgtctaggcaactcaaggg

SEQ ID NO: 124153 - DNA, 25 bp, Saccharomyces pastorianus
gtaagtttcataacgtctaggcaac

SEQ ID NO: 124154 - DNA, 25 bp, Saccharomyces pastorianus
tcgaagagaagattttgcacgtgat

SEQ ID NO: 124155 - DNA, 25 bp, Saccharomyces pastorianus
aggaaggatttccaagttgttgatc

SEQ ID NO: 124156 - DNA, 25 bp, Saccharomyces pastorianus
ccaagttgttgatcttcgaagagaa

SEQ ID NO: 124157 - DNA, 25 bp, Saccharomyces pastorianus
gattttgcacgtgatcatattacaa

SEQ ID NO: 124158 - DNA, 25 bp, Saccharomyces pastorianus
tttctcatgaccacctgaatacttc

SEQ ID NO: 124159 - DNA, 25 bp, Saccharomyces pastorianus
ctgcaatattgtgctttgtcccatt

SEQ ID NO: 124160 - DNA, 25 bp, Saccharomyces pastorianus
gcatggtttttgaccttcgcattaa

SEQ ID NO: 124161 - DNA, 25 bp, Saccharomyces pastorianus
tttggcaatagtcgcgaggatcctt

SEQ ID NO: 124162 - DNA, 25 bp, Saccharomyces pastorianus
gtcccattggtgctttacttcttta

SEQ ID NO: 124163 - DNA, 25 bp, Saccharomyces pastorianus
tgaactatccctggcaattgctatt

SEQ ID NO: 124164 - DNA, 25 bp, Saccharomyces pastorianus
aagtctgtcggagtttttctcggca

SEQ ID NO: 124165 - DNA, 25 bp, Saccharomyces pastorianus
agatttatttctccatgggcaatga

SEQ ID NO: 124166 - DNA, 25 bp, Saccharomyces pastorianus
gacgcaatgtttcactatggcttca

SEQ ID NO: 124167 - DNA, 25 bp, Saccharomyces pastorianus
gggccgttgctagaagttccaattt

SEQ ID NO: 124168 - DNA, 25 bp, Saccharomyces pastorianus
ttttctcggcataccactgggaatt

SEQ ID NO: 124169 - DNA, 25 bp, Saccharomyces pastorianus
ggtgcggagttatctcaatttgctt

SEQ ID NO: 124170 - DNA, 25 bp, Saccharomyces pastorianus
gcccggtcgactctttgatttcgat

SEQ ID NO: 124171 - DNA, 25 bp, Saccharomyces pastorianus
tttggacttatgctgtagcggcttg

SEQ ID NO: 124172 - DNA, 25 bp, Saccharomyces pastorianus
aacggcatcatggtagtttcggagc

SEQ ID NO: 124173 - DNA, 25 bp, Saccharomyces pastorianus
cttcttcttgtctcagcgtgttata

SEQ ID NO: 124174 - DNA, 25 bp, Saccharomyces pastorianus
atctcaatttgcttctgattttaga

SEQ ID NO: 124175 - DNA, 25 bp, Saccharomyces pastorianus
tagtttcggagccagattcgccatt

SEQ ID NO: 124176 - DNA, 25 bp, Saccharomyces pastorianus
agattcgccattttccaactctaat

SEQ ID NO: 124177 - DNA, 25 bp, Saccharomyces pastorianus
tagaagctattctatgcccggtcga

SEQ ID NO: 124178 - DNA, 25 bp, Saccharomyces pastorianus
tctcagcgtgttatatttggactta

SEQ ID NO: 124179 - DNA, 25 bp, Saccharomyces pastorianus
gatttcgatcccaaacggcatcatg

SEQ ID NO: 124180 - DNA, 25 bp, Saccharomyces pastorianus
aataccaatatgtccgatccggctt

SEQ ID NO: 124181 - DNA, 25 bp, Saccharomyces pastorianus
gttcactttccggatcaagggcatt

SEQ ID NO: 124182 - DNA, 25 bp, Saccharomyces pastorianus
aaccttatcgttacactcatcatct

SEQ ID NO: 124183 - DNA, 25 bp, Saccharomyces pastorianus
aagggcggtatcatcagcaagcata

SEQ ID NO: 124184 - DNA, 25 bp, Saccharomyces pastorianus
tttggttcaacatctctatgctcca

SEQ ID NO: 124185 - DNA, 25 bp, Saccharomyces pastorianus
gaaagcagcagtattccatcatcta

SEQ ID NO: 124186 - DNA, 25 bp, Saccharomyces pastorianus
atcaccatccactccaatagttgaa

SEQ ID NO: 124187 - DNA, 25 bp, Saccharomyces pastorianus
ttttcaccgtcgtcgtcagaatgga

SEQ ID NO: 124188 - DNA, 25 bp, Saccharomyces pastorianus
aaaagtatttgaagcgcctcgtacg

SEQ ID NO: 124189 - DNA, 25 bp, Saccharomyces pastorianus
aatcagactctcaaaattccctttc

SEQ ID NO: 124190 - DNA, 25 bp, Saccharomyces pastorianus
ggcttcgaagcccaattctttggtt

SEQ ID NO: 124191 - DNA, 25 bp, Saccharomyces pastorianus
gcaggttaagttctctggtcgttct

SEQ ID NO: 124192 - DNA, 25 bp, Saccharomyces pastorianus
ttgaggcgacataagttgttagcac

SEQ ID NO: 124193 - DNA, 25 bp, Saccharomyces pastorianus
aggttaagttctctggtcgttctgg

SEQ ID NO: 124194 - DNA, 25 bp, Saccharomyces pastorianus
gacataagttgttagcacagcgaac

SEQ ID NO: 124195 - DNA, 25 bp, Saccharomyces pastorianus
gttagcacagcgaacatggttgcag

SEQ ID NO: 124196 - DNA, 25 bp, Saccharomyces pastorianus
cacagcgaacatggttgcaggttaa

SEQ ID NO: 124197 - DNA, 25 bp, Saccharomyces pastorianus
aaatggtattgaggcgacataagtt

SEQ ID NO: 124198 - DNA, 25 bp, Saccharomyces pastorianus
aacatggttgcaggttaagttctct

SEQ ID NO: 124199 - DNA, 25 bp, Saccharomyces pastorianus
gttgcaggttaagttctctggtcgt

SEQ ID NO: 124200 - DNA, 25 bp, Saccharomyces pastorianus
aggcgacataagttgttagcacagc

SEQ ID NO: 124201 - DNA, 25 bp, Saccharomyces pastorianus
agttgttagcacagcgaacatggtt

SEQ ID NO: 124202 - DNA, 25 bp, Saccharomyces pastorianus
aatcatgccgttttgtgtgctacat

SEQ ID NO: 124203 - DNA, 25 bp, Saccharomyces pastorianus
atatcttgccaatacttcacttgag

SEQ ID NO: 124204 - DNA, 25 bp, Saccharomyces pastorianus
ttctccttcctttcaaataattgca

SEQ ID NO: 124205 - DNA, 25 bp, Saccharomyces pastorianus
tcgttctgggagagtatttacgtta

SEQ ID NO: 124206 - DNA, 25 bp, Saccharomyces pastorianus
aagtcacgttagaatgcaatttatc

SEQ ID NO: 124207 - DNA, 25 bp, Saccharomyces pastorianus
ggattggtaaatccctttgctagca

SEQ ID NO: 124208 - DNA, 25 bp, Saccharomyces pastorianus
tgtgctacatatctgtttcccacta

SEQ ID NO: 124209 - DNA, 25 bp, Saccharomyces pastorianus
ggaatcaattaagcataatcatgcc

SEQ ID NO: 124210 - DNA, 25 bp, Saccharomyces pastorianus
aataattgcaccaatatcttgccaa

SEQ ID NO: 124211 - DNA, 25 bp, Saccharomyces pastorianus
tttgctagcaaggtactgtcagaat

SEQ ID NO: 124212 - DNA, 25 bp, Saccharomyces pastorianus
gtttcccactatataaagtcacgtt

SEQ ID NO: 124213 - DNA, 25 bp, Saccharomyces pastorianus
gttttctccaaattcagaaccggtg

SEQ ID NO: 124214 - DNA, 25 bp, Saccharomyces pastorianus
ataacgtcctatgtcatgggctggc

SEQ ID NO: 124215 - DNA, 25 bp, Saccharomyces pastorianus
gtttccaatggccaagttttctcca

SEQ ID NO: 124216 - DNA, 25 bp, Saccharomyces pastorianus
tataactccattgacgctgaagcga

SEQ ID NO: 124217 - DNA, 25 bp, Saccharomyces pastorianus
attacggcagtatcgaatccataaa

SEQ ID NO: 124218 - DNA, 25 bp, Saccharomyces pastorianus
aaggtttcatcccaggttacggcat

SEQ ID NO: 124219 - DNA, 25 bp, Saccharomyces pastorianus
ggcatctccctactgaaggcaattc

SEQ ID NO: 124220 - DNA, 25 bp, Saccharomyces pastorianus
atccttcctccaaaatacggtcact

SEQ ID NO: 124221 - DNA, 25 bp, Saccharomyces pastorianus
ttatcagcagttattctcccatcag

SEQ ID NO: 124222 - DNA, 25 bp, Saccharomyces pastorianus
attctcccatcagaagtggcgttta

SEQ ID NO: 124223 - DNA, 25 bp, Saccharomyces pastorianus
atggattcttgtttagccggtgtag

SEQ ID NO: 124224 - DNA, 25 bp, Saccharomyces pastorianus
gggagcgcaggtgctattatagatc

SEQ ID NO: 124225 - DNA, 25 bp, Saccharomyces pastorianus
tctgctcaatgaaatgccaaaggtg

SEQ ID NO: 124226 - DNA, 25 bp, Saccharomyces pastorianus
gaactatcctgatgtcagggccttt

SEQ ID NO: 124227 - DNA, 25 bp, Saccharomyces pastorianus
ggtatgaacctttattgcgagaata

SEQ ID NO: 124228 - DNA, 25 bp, Saccharomyces pastorianus
taattaatccgcagtacttggtaaa

SEQ ID NO: 124229 - DNA, 25 bp, Saccharomyces pastorianus
tacagttattcgcagaggtgtcacg

SEQ ID NO: 124230 - DNA, 25 bp, Saccharomyces pastorianus
gattgtcttaagactaccgtactta

SEQ ID NO: 124231 - DNA, 25 bp, Saccharomyces pastorianus
gccaaaggtgatgggcagcttgata

SEQ ID NO: 124232 - DNA, 25 bp, Saccharomyces pastorianus
cagggccttttctacaaattgtctt

SEQ ID NO: 124233 - DNA, 25 bp, Saccharomyces pastorianus
gactgtacattataggaattctgcc

SEQ ID NO: 124234 - DNA, 25 bp, Saccharomyces pastorianus
ttttcacgtcagtggctacagcatt

SEQ ID NO: 124235 - DNA, 25 bp, Saccharomyces pastorianus
gtctctaacttatcctgggacgcat

SEQ ID NO: 124236 - DNA, 25 bp, Saccharomyces pastorianus
gaattccagccggtggtattgccac

SEQ ID NO: 124237 - DNA, 25 bp, Saccharomyces pastorianus
aagttgattgctcactctgtggcca

SEQ ID NO: 124238 - DNA, 25 bp, Saccharomyces pastorianus
aggctctaacttctacgcttataac

SEQ ID NO: 124239 - DNA, 25 bp, Saccharomyces pastorianus
ctttggtcccatttgacggtagatc

SEQ ID NO: 124240 - DNA, 25 bp, Saccharomyces pastorianus
gtagactactacaaggctcatcact

SEQ ID NO: 124241 - DNA, 25 bp, Saccharomyces pastorianus
atcacttgaactacactttggtccc

SEQ ID NO: 124242 - DNA, 25 bp, Saccharomyces pastorianus
acctatgctgactctttcgagggtt

SEQ ID NO: 124243 - DNA, 25 bp, Saccharomyces pastorianus
gatggttccggtactatttccctat

SEQ ID NO: 124244 - DNA, 25 bp, Saccharomyces pastorianus
gacgcattcattaccaacaccaagt

SEQ ID NO: 124245 - DNA, 25 bp, Saccharomyces pastorianus
atttccctattgaacgtcgctaagc

SEQ ID NO: 124246 - DNA, 25 bp, Saccharomyces pastorianus
atgtttcttgtcattacctctctta

SEQ ID NO: 124247 - DNA, 25 bp, Saccharomyces pastorianus
agctctcagcaccattgtcaatagt

SEQ ID NO: 124248 - DNA, 25 bp, Saccharomyces pastorianus
attcctcctctagctttactttgga

SEQ ID NO: 124249 - DNA, 25 bp, Saccharomyces pastorianus
agcgccggttactcttttattcttg

SEQ ID NO: 124250 - DNA, 25 bp, Saccharomyces pastorianus
attatcatcgtcttctgcctcatta

SEQ ID NO: 124251 - DNA, 25 bp, Saccharomyces pastorianus
gcctcgaattcttttcccatattga

SEQ ID NO: 124252 - DNA, 25 bp, Saccharomyces pastorianus
agtttctaggcccttttgcacaaga

SEQ ID NO: 124253 - DNA, 25 bp, Saccharomyces pastorianus
acccgcttccttctgatttgatgaa

SEQ ID NO: 124254 - DNA, 25 bp, Saccharomyces pastorianus
tatgagattgcgtgcctcgaattct

SEQ ID NO: 124255 - DNA, 25 bp, Saccharomyces pastorianus
ggactttcttgcaactgcttttggt

SEQ ID NO: 124256 - DNA, 25 bp, Saccharomyces pastorianus
agatttggacgctacaccttcatta

SEQ ID NO: 124257 - DNA, 25 bp, Saccharomyces pastorianus
acactaggtatttcgcaggctcttt

SEQ ID NO: 124258 - DNA, 25 bp, Saccharomyces pastorianus
accaaggttactctgtggacaggtt

SEQ ID NO: 124259 - DNA, 25 bp, Saccharomyces pastorianus
gtagatacgccaactccagaattcc

SEQ ID NO: 124260 - DNA, 25 bp, Saccharomyces pastorianus
taccaccaagggatgttccacaggc

SEQ ID NO: 124261 - DNA, 25 bp, Saccharomyces pastorianus
gtgacggtgctttccaattgacagt

SEQ ID NO: 124262 - DNA, 25 bp, Saccharomyces pastorianus
gcgagtatttggttgcacgaactac

SEQ ID NO: 124263 - DNA, 25 bp, Saccharomyces pastorianus
tgatcagtgacccaaactttgcgac

SEQ ID NO: 124264 - DNA, 25 bp, Saccharomyces pastorianus
cacaggctctgcttgacaggtgggt

SEQ ID NO: 124265 - DNA, 25 bp, Saccharomyces pastorianus
caaccttggaactacttgggattat

SEQ ID NO: 124266 - DNA, 25 bp, Saccharomyces pastorianus
acaggtttttgcatcacaggtcaga

SEQ ID NO: 124267 - DNA, 25 bp, Saccharomyces pastorianus
aaattccccgcaactaaacatagag

SEQ ID NO: 124268 - DNA, 25 bp, Saccharomyces pastorianus
cttccacttttacgagattgctcac

SEQ ID NO: 124269 - DNA, 25 bp, Saccharomyces pastorianus
aagttgttatccacatacgcgctat

SEQ ID NO: 124270 - DNA, 25 bp, Saccharomyces pastorianus
gcccctcgagatgtttattgccaat

SEQ ID NO: 124271 - DNA, 25 bp, Saccharomyces pastorianus
gacttttcactgtttatccgacgct

SEQ ID NO: 124272 - DNA, 25 bp, Saccharomyces pastorianus
agtccaattagatgcgccaacctta

SEQ ID NO: 124273 - DNA, 25 bp, Saccharomyces pastorianus
gagatctgcgaaatccgtcctgtat

SEQ ID NO: 124274 - DNA, 25 bp, Saccharomyces pastorianus
cgctcattcgggactgtttacggta

SEQ ID NO: 124275 - DNA, 25 bp, Saccharomyces pastorianus
atgggatcactgactaacctgctag

SEQ ID NO: 124276 - DNA, 25 bp, Saccharomyces pastorianus
caattttgttatcacttgggcccct

SEQ ID NO: 124277 - DNA, 25 bp, Saccharomyces pastorianus
gatcctgttgactttcctttcatta

SEQ ID NO: 124278 - DNA, 25 bp, Saccharomyces pastorianus
agtatcgcattcgttgtatccgctg

SEQ ID NO: 124279 - DNA, 25 bp, Saccharomyces pastorianus
agggaatatgctgctatgccgactt

SEQ ID NO: 124280 - DNA, 25 bp, Saccharomyces pastorianus
taaaagcacctgttcatatagcaag

SEQ ID NO: 124281 - DNA, 25 bp, Saccharomyces pastorianus
aacagcccatagcatcggttgatga

SEQ ID NO: 124282 - DNA, 25 bp, Saccharomyces pastorianus
gaaggtgggactccaacagcccata

SEQ ID NO: 124283 - DNA, 25 bp, Saccharomyces pastorianus
atatggctgcaggatcttccaggga

SEQ ID NO: 124284 - DNA, 25 bp, Saccharomyces pastorianus
tatgccgacttctaccacgaataag

SEQ ID NO: 124285 - DNA, 25 bp, Saccharomyces pastorianus
ctagacttgtctccgattataatat

SEQ ID NO: 124286 - DNA, 25 bp, Saccharomyces pastorianus
ggtgaccggtagaggaactgttcca

SEQ ID NO: 124287 - DNA, 25 bp, Saccharomyces pastorianus
aatgcgaacttcttgacggtagaga

SEQ ID NO: 124288 - DNA, 25 bp, Saccharomyces pastorianus
gatgatagtttgtcggccattaaaa

SEQ ID NO: 124289 - DNA, 25 bp, Saccharomyces pastorianus
gaatactccctcatactagacttgt

SEQ ID NO: 124290 - DNA, 25 bp, Saccharomyces pastorianus
gaatgatattatctacatgcattag

SEQ ID NO: 124291 - DNA, 25 bp, Saccharomyces pastorianus
caggacttaaggaaatgtgcggaat

SEQ ID NO: 124292 - DNA, 25 bp, Saccharomyces pastorianus
ccccaggagtttctgcaatatcata

SEQ ID NO: 124293 - DNA, 25 bp, Saccharomyces pastorianus
cattagagaaaaagtgcccagtgtg

SEQ ID NO: 124294 - DNA, 25 bp, Saccharomyces pastorianus
aatgcattcgtgataatatgggtac

SEQ ID NO: 124295 - DNA, 25 bp, Saccharomyces pastorianus
tatgggtacaagaactattaacgaa

SEQ ID NO: 124296 - DNA, 25 bp, Saccharomyces pastorianus
aaatgtgcggaattgcaggttaaaa

SEQ ID NO: 124297 - DNA, 25 bp, Saccharomyces pastorianus
gaaaactgtctaggattcttacagg

SEQ ID NO: 124298 - DNA, 25 bp, Saccharomyces pastorianus
gtctgatattttggatgagattgtc

SEQ ID NO: 124299 - DNA, 25 bp, Saccharomyces pastorianus
gtctaggattcttacaggacttaag

SEQ ID NO: 124300 - DNA, 25 bp, Saccharomyces pastorianus
tgaagaaatatgaccaatgcattcg

SEQ ID NO: 124301 - DNA, 25 bp, Saccharomyces pastorianus
tctgccagggtttgatcggactaaa

SEQ ID NO: 124302 - DNA, 25 bp, Saccharomyces pastorianus
aagctacaatgttatacgggcactg

SEQ ID NO: 124303 - DNA, 25 bp, Saccharomyces pastorianus
atctacctgtgatgattcccaatag

SEQ ID NO: 124304 - DNA, 25 bp, Saccharomyces pastorianus
ggttaatcgtctagtctgccagggt

SEQ ID NO: 124305 - DNA, 25 bp, Saccharomyces pastorianus
gagatttctaattctgacctttaca

SEQ ID NO: 124306 - DNA, 25 bp, Saccharomyces pastorianus
acgggcactgtgcaattaagtcatg

SEQ ID NO: 124307 - DNA, 25 bp, Saccharomyces pastorianus
actagcttagcatcgtttttgtttc

SEQ ID NO: 124308 - DNA, 25 bp, Saccharomyces pastorianus
gaagcgtttcgagacctggttaatc

SEQ ID NO: 124309 - DNA, 25 bp, Saccharomyces pastorianus
cgaacggcatcgttgatgttttcaa

SEQ ID NO: 124310 - DNA, 25 bp, Saccharomyces pastorianus
atatcaaagcgctaatctacctgtg

SEQ ID NO: 124311 - DNA, 25 bp, Saccharomyces pastorianus
ggaaaagctacatttgccgtacata

SEQ ID NO: 124312 - DNA, 25 bp, Saccharomyces pastorianus
acacattatgggacattggcatcaa

SEQ ID NO: 124313 - DNA, 25 bp, Saccharomyces pastorianus
catcgagtgatggttttgcaattgc

SEQ ID NO: 124314 - DNA, 25 bp, Saccharomyces pastorianus
ggcatcaagtttcaagcaccatcct

SEQ ID NO: 124315 - DNA, 25 bp, Saccharomyces pastorianus
aaagtctgggcttttttgccacaca

SEQ ID NO: 124316 - DNA, 25 bp, Saccharomyces pastorianus
gccaggtggcttacaaagtgatttc

SEQ ID NO: 124317 - DNA, 25 bp, Saccharomyces pastorianus
aagtgtgctacatcatgtcgcgaca

SEQ ID NO: 124318 - DNA, 25 bp, Saccharomyces pastorianus
gaagcgactaggaacgttacatttt

SEQ ID NO: 124319 - DNA, 25 bp, Saccharomyces pastorianus
tgaagttgtctctgtgccaggtggc

SEQ ID NO: 124320 - DNA, 25 bp, Saccharomyces pastorianus
gctcttttggtatgcatgttgcgtc

SEQ ID NO: 124321 - DNA, 25 bp, Saccharomyces pastorianus
taacgcgcagattgccgctgataat

SEQ ID NO: 124322 - DNA, 25 bp, Saccharomyces pastorianus
gacatggctaccaataggtcattat

SEQ ID NO: 124323 - DNA, 25 bp, Saccharomyces pastorianus
catctcaatcttctctttccaatat

SEQ ID NO: 124324 - DNA, 25 bp, Saccharomyces pastorianus
gaaatcatctccatctcaatcttct

SEQ ID NO: 124325 - DNA, 25 bp, Saccharomyces pastorianus
ggaggagtccagtcatgtgcagcaa

SEQ ID NO: 124326 - DNA, 25 bp, Saccharomyces pastorianus
tgcagcaactacaaccagggtctca

SEQ ID NO: 124327 - DNA, 25 bp, Saccharomyces pastorianus
ttctaacattaattctgctccaagg

SEQ ID NO: 124328 - DNA, 25 bp, Saccharomyces pastorianus
attcatcgcgagctcaaagtccaat

SEQ ID NO: 124329 - DNA, 25 bp, Saccharomyces pastorianus
acattggtcctgagatggcccttaa

SEQ ID NO: 124330 - DNA, 25 bp, Saccharomyces pastorianus
gctaaagcagcaccagattcaacag

SEQ ID NO: 124331 - DNA, 25 bp, Saccharomyces pastorianus
aagtcagcaggcacattcatcgcga

SEQ ID NO: 124332 - DNA, 25 bp, Saccharomyces pastorianus
agaaatgggcaagcgtcggctccaa

SEQ ID NO: 124333 - DNA, 25 bp, Saccharomyces pastorianus
gtcggctccaagaccaaaccagaaa

SEQ ID NO: 124334 - DNA, 25 bp, Saccharomyces pastorianus
aaatggtttgacgaagagcgaaaat

SEQ ID NO: 124335 - DNA, 25 bp, Saccharomyces pastorianus
aaagtctgtggaacctaagccaaag

SEQ ID NO: 124336 - DNA, 25 bp, Saccharomyces pastorianus
atcacatccggaagaagaacacgcg

SEQ ID NO: 124337 - DNA, 25 bp, Saccharomyces pastorianus
tctgaatctgatatggacgatgcca

SEQ ID NO: 124338 - DNA, 25 bp, Saccharomyces pastorianus
gaaggaacctagcacagactctaaa

SEQ ID NO: 124339 - DNA, 25 bp, Saccharomyces pastorianus
atacctctaatatcatcacatccgg

SEQ ID NO: 124340 - DNA, 25 bp, Saccharomyces pastorianus
acgattatgacgctgaagtagcaaa

SEQ ID NO: 124341 - DNA, 25 bp, Saccharomyces pastorianus
tgatatggacgatgccaagttagac

SEQ ID NO: 124342 - DNA, 25 bp, Saccharomyces pastorianus
atggtactgttgaagattctgaatc

SEQ ID NO: 124343 - DNA, 25 bp, Saccharomyces pastorianus
gtcataataaatccgaaaagtctgt

SEQ ID NO: 124344 - DNA, 25 bp, Saccharomyces pastorianus
gaacacgcggcaaagtaattgacta

SEQ ID NO: 124345 - DNA, 25 bp, Saccharomyces pastorianus
agtaatgctcaacccaagtagccat

SEQ ID NO: 124346 - DNA, 25 bp, Saccharomyces pastorianus
gaagagctcatttgtacatatccat

SEQ ID NO: 124347 - DNA, 25 bp, Saccharomyces pastorianus
acagtatcctctgcctttgcggctt

SEQ ID NO: 124348 - DNA, 25 bp, Saccharomyces pastorianus
tttgcggcttccagtagttctactg

SEQ ID NO: 124349 - DNA, 25 bp, Saccharomyces pastorianus
gatcttctgcaagtcctagggtcaa

SEQ ID NO: 124350 - DNA, 25 bp, Saccharomyces pastorianus
ggattttcccacaggatcttctgca

SEQ ID NO: 124351 - DNA, 25 bp, Saccharomyces pastorianus
tattcttgttcttttgtcccagcaa

SEQ ID NO: 124352 - DNA, 25 bp, Saccharomyces pastorianus
aatcttttcatgttcctattcttgt

SEQ ID NO: 124353 - DNA, 25 bp, Saccharomyces pastorianus
ttataagagcaaccatctcatcccc

SEQ ID NO: 124354 - DNA, 25 bp, Saccharomyces pastorianus
aactgagaccatccacgttgtgggc

SEQ ID NO: 124355 - DNA, 25 bp, Saccharomyces pastorianus
ttgtgggcaccaccactcacagtat

SEQ ID NO: 124356 - DNA, 25 bp, Saccharomyces pastorianus
ataacttttcgtctttcggcattgg

SEQ ID NO: 124357 - DNA, 25 bp, Saccharomyces pastorianus
ttctgccttagacgagctgctgaaa

SEQ ID NO: 124358 - DNA, 25 bp, Saccharomyces pastorianus
attatcttcaatttcgtcaggcgac

SEQ ID NO: 124359 - DNA, 25 bp, Saccharomyces pastorianus
ggatttcctcgaactactgcgcaag

SEQ ID NO: 124360 - DNA, 25 bp, Saccharomyces pastorianus
agtgggatttttggtaccgtctctg

SEQ ID NO: 124361 - DNA, 25 bp, Saccharomyces pastorianus
atgtacccgaatccaccatattaga

SEQ ID NO: 124362 - DNA, 25 bp, Saccharomyces pastorianus
agaggctactacctacattgctcaa

SEQ ID NO: 124363 - DNA, 25 bp, Saccharomyces pastorianus
ggatgatctcataacgcgtctgata

SEQ ID NO: 124364 - DNA, 25 bp, Saccharomyces pastorianus
aaatctgaatctaccctaggccgag

SEQ ID NO: 124365 - DNA, 25 bp, Saccharomyces pastorianus
atgtggttgctcgatggatttcctc

SEQ ID NO: 124366 - DNA, 25 bp, Saccharomyces pastorianus
gcatgacgccagcttgaatctagtg

SEQ ID NO: 124367 - DNA, 25 bp, Saccharomyces pastorianus
aaaatctcaatttaccatcccatcc

SEQ ID NO: 124368 - DNA, 25 bp, Saccharomyces pastorianus
ttgcctgcgagctatgggttggtac

SEQ ID NO: 124369 - DNA, 25 bp, Saccharomyces pastorianus
ttctctaaaccacctgatacttcta

SEQ ID NO: 124370 - DNA, 25 bp, Saccharomyces pastorianus
gatagactcatgacccagctagaat

SEQ ID NO: 124371 - DNA, 25 bp, Saccharomyces pastorianus
tttcatttaaatcagctcccatacc

SEQ ID NO: 124372 - DNA, 25 bp, Saccharomyces pastorianus
atccggcactgcataatgtttcacc

SEQ ID NO: 124373 - DNA, 25 bp, Saccharomyces pastorianus
tagagattatttaccgccagcttct

SEQ ID NO: 124374 - DNA, 25 bp, Saccharomyces pastorianus
taccagatctccaaccttttttcaa

SEQ ID NO: 124375 - DNA, 25 bp, Saccharomyces pastorianus
gaatgtgcaaattcacccagacttg

SEQ ID NO: 124376 - DNA, 25 bp, Saccharomyces pastorianus
gaatctccatgttcatcaacagcta

SEQ ID NO: 124377 - DNA, 25 bp, Saccharomyces pastorianus
aggagcctattctttcaccaaattc

SEQ ID NO: 124378 - DNA, 25 bp, Saccharomyces pastorianus
gtacatcgtatatgaatatgccatt

SEQ ID NO: 124379 - DNA, 25 bp, Saccharomyces pastorianus
gtcagaacaggcttttctgtccctt

SEQ ID NO: 124380 - DNA, 25 bp, Saccharomyces pastorianus
gtatgtttggctttttcttttcctg

SEQ ID NO: 124381 - DNA, 25 bp, Saccharomyces pastorianus
tcttttcctggattccggctgtcaa

SEQ ID NO: 124382 - DNA, 25 bp, Saccharomyces pastorianus
tattgtttcctttgctctgtccgtg

SEQ ID NO: 124383 - DNA, 25 bp, Saccharomyces pastorianus
tttctgtcccttcctcctattgttt

SEQ ID NO: 124384 - DNA, 25 bp, Saccharomyces pastorianus
ggattccggctgtcaaatactacta

SEQ ID NO: 124385 - DNA, 25 bp, Saccharomyces pastorianus
atatggttgtatgtttggctttttc

SEQ ID NO: 124386 - DNA, 25 bp, Saccharomyces pastorianus
gctactctcatctttttctattcta

SEQ ID NO: 124387 - DNA, 25 bp, Saccharomyces pastorianus
tttgctctgtccgtggctactctca

SEQ ID NO: 124388 - DNA, 25 bp, Saccharomyces pastorianus
ctacgaatagagtcagaacaggctt

SEQ ID NO: 124389 - DNA, 25 bp, Saccharomyces pastorianus
atgttcttgcaaatttccttgactg

SEQ ID NO: 124390 - DNA, 25 bp, Saccharomyces pastorianus
tgatattgttactgtcgtccgtgtc

SEQ ID NO: 124391 - DNA, 25 bp, Saccharomyces pastorianus
ttttcgctgatgttgctactttggc

SEQ ID NO: 124392 - DNA, 25 bp, Saccharomyces pastorianus
aaaacttcggtgctatgaacggtat

SEQ ID NO: 124393 - DNA, 25 bp, Saccharomyces pastorianus
ggattaccttgactactatgttctt

SEQ ID NO: 124394 - DNA, 25 bp, Saccharomyces pastorianus
gattgttttcatcgctattttcgct

SEQ ID NO: 124395 - DNA, 25 bp, Saccharomyces pastorianus
ggttgattttcattaccagagctgc

SEQ ID NO: 124396 - DNA, 25 bp, Saccharomyces pastorianus
gctactttggctattgcttacgata

SEQ ID NO: 124397 - DNA, 25 bp, Saccharomyces pastorianus
ttttggcagtcggttcatggattac

SEQ ID NO: 124398 - DNA, 25 bp, Saccharomyces pastorianus
tgcttacgataatgctccttactct

SEQ ID NO: 124399 - DNA, 25 bp, Saccharomyces pastorianus
acgaaatgtccacttctgaagcctt

SEQ ID NO: 124400 - DNA, 25 bp, Saccharomyces pastorianus
aaggccagagattgcttaacaacga

SEQ ID NO: 124401 - DNA, 25 bp, Saccharomyces pastorianus
atcaccagttgggaaacttaccact

SEQ ID NO: 124402 - DNA, 25 bp, Saccharomyces pastorianus
aacggtcatggataaggtggccaca

SEQ ID NO: 124403 - DNA, 25 bp, Saccharomyces pastorianus
gtactgtgacttcaaaatcttgcaa

SEQ ID NO: 124404 - DNA, 25 bp, Saccharomyces pastorianus
gaccagagaattttaacccagagat

SEQ ID NO: 124405 - DNA, 25 bp, Saccharomyces pastorianus
aaaattcaacgagctgtccaacaga

SEQ ID NO: 124406 - DNA, 25 bp, Saccharomyces pastorianus
acttaccactggaatgtccggactt

SEQ ID NO: 124407 - DNA, 25 bp, Saccharomyces pastorianus
gagattggaccattgaatcaccagt

SEQ ID NO: 124408 - DNA, 25 bp, Saccharomyces pastorianus
ggtggccacagaatgggatcctgaa

SEQ ID NO: 124409 - DNA, 25 bp, Saccharomyces pastorianus
aagagcctattcatgggaccagaga

SEQ ID NO: 124410 - DNA, 25 bp, Saccharomyces pastorianus
ttcccacaaccattccacagatagt

SEQ ID NO: 124411 - DNA, 25 bp, Saccharomyces pastorianus
tattcccagattccatcaggtcgta

SEQ ID NO: 124412 - DNA, 25 bp, Saccharomyces pastorianus
gaccaattgcctgtgttgactgaag

SEQ ID NO: 124413 - DNA, 25 bp, Saccharomyces pastorianus
ggatcttcacttgaaaccggttgtt

SEQ ID NO: 124414 - DNA, 25 bp, Saccharomyces pastorianus
acgctgatgtgtttggtaacgctac

SEQ ID NO: 124415 - DNA, 25 bp, Saccharomyces pastorianus
aactcatctgccgttatcactgatg

SEQ ID NO: 124416 - DNA, 25 bp, Saccharomyces pastorianus
gtcgtacctaaccaaattcgtcgat

SEQ ID NO: 124417 - DNA, 25 bp, Saccharomyces pastorianus
tgttggcccgttttgactcttcaaa

SEQ ID NO: 124418 - DNA, 25 bp, Saccharomyces pastorianus
aaccgctaaggtcactgatgttatc

SEQ ID NO: 124419 - DNA, 25 bp, Saccharomyces pastorianus
agttactctctctgagcttctaaga

SEQ ID NO: 124420 - DNA, 25 bp, Saccharomyces pastorianus
tgaagaccaccctgaactgactgaa

SEQ ID NO: 124421 - DNA, 25 bp, Saccharomyces pastorianus
gatgtcattgttgccatattcccag

SEQ ID NO: 124422 - DNA, 25 bp, Saccharomyces pastorianus
tctccttaatcatcttcccatttat

SEQ ID NO: 124423 - DNA, 25 bp, Saccharomyces pastorianus
tttgctccaatatgtcagggtatgc

SEQ ID NO: 124424 - DNA, 25 bp, Saccharomyces pastorianus
ggatgacacattatctgccttttgc

SEQ ID NO: 124425 - DNA, 25 bp, Saccharomyces pastorianus
tctaactaattttgccatggcctcc

SEQ ID NO: 124426 - DNA, 25 bp, Saccharomyces pastorianus
tcatgggcgggatatatcactcgat

SEQ ID NO: 124427 - DNA, 25 bp, Saccharomyces pastorianus
gtattttccctttcatttcctggat

SEQ ID NO: 124428 - DNA, 25 bp, Saccharomyces pastorianus
atgggaatggccaaccttacataaa

SEQ ID NO: 124429 - DNA, 25 bp, Saccharomyces pastorianus
catggatttctactgtctccttaat

SEQ ID NO: 124430 - DNA, 25 bp, Saccharomyces pastorianus
atggcctcctctaataacgcgttag

SEQ ID NO: 124431 - DNA, 25 bp, Saccharomyces pastorianus
caatgcttgttttcggatttgtgct

SEQ ID NO: 124432 - DNA, 25 bp, Saccharomyces pastorianus
atgggatctcccttcaatacatgga

SEQ ID NO: 124433 - DNA, 25 bp, Saccharomyces pastorianus
ccaaaccttccttgttgctacagaa

SEQ ID NO: 124434 - DNA, 25 bp, Saccharomyces pastorianus
agaatccctttacactggtcagttt

SEQ ID NO: 124435 - DNA, 25 bp, Saccharomyces pastorianus
aagggcacggtgacgcagctgtatt

SEQ ID NO: 124436 - DNA, 25 bp, Saccharomyces pastorianus
tggaccgcactatttcatgctttgg

SEQ ID NO: 124437 - DNA, 25 bp, Saccharomyces pastorianus
aattccattgcatagagctgcgtcg

SEQ ID NO: 124438 - DNA, 25 bp, Saccharomyces pastorianus
agatgattctggatggacacctttc

SEQ ID NO: 124439 - DNA, 25 bp, Saccharomyces pastorianus
ggtcagtttctttccaagcacatga

SEQ ID NO: 124440 - DNA, 25 bp, Saccharomyces pastorianus
gacacctttccatattgcttgttca

SEQ ID NO: 124441 - DNA, 25 bp, Saccharomyces pastorianus
acgacagacctctaaagcctgatct

SEQ ID NO: 124442 - DNA, 25 bp, Saccharomyces pastorianus
agctgcgtcggtgggttctttgaaa

SEQ ID NO: 124443 - DNA, 25 bp, Saccharomyces pastorianus
acatgcttgcacttggcggttggta

SEQ ID NO: 124444 - DNA, 25 bp, Saccharomyces pastorianus
agtcaaagttgctgaagccgttttc

SEQ ID NO: 124445 - DNA, 25 bp, Saccharomyces pastorianus
cagattaaagccagccatctctagt

SEQ ID NO: 124446 - DNA, 25 bp, Saccharomyces pastorianus
cctacccagtcaaagttgctgaagc

SEQ ID NO: 124447 - DNA, 25 bp, Saccharomyces pastorianus
cggtattgccccagaccaagtgacc

SEQ ID NO: 124448 - DNA, 25 bp, Saccharomyces pastorianus
aaacctacccagtcaaagttgctga

SEQ ID NO: 124449 - DNA, 25 bp, Saccharomyces pastorianus
acccagtcaaagttgctgaagccgt

SEQ ID NO: 124450 - DNA, 25 bp, Saccharomyces pastorianus
ccagtcaaagttgctgaagccgttt

SEQ ID NO: 124451 - DNA, 25 bp, Saccharomyces pastorianus
aacctacccagtcaaagttgctgaa

SEQ ID NO: 124452 - DNA, 25 bp, Saccharomyces pastorianus
cccagtcaaagttgctgaagccgtt

SEQ ID NO: 124453 - DNA, 25 bp, Saccharomyces pastorianus
ctgaaacctacccagtcaaagttgc

SEQ ID NO: 124454 - DNA, 25 bp, Saccharomyces pastorianus
cagtcaaagttgctgaagccgtttt

SEQ ID NO: 124455 - DNA, 25 bp, Saccharomyces pastorianus
ttgcataccaagtgcctttctctat

SEQ ID NO: 124456 - DNA, 25 bp, Saccharomyces pastorianus
ggatacgccgtttttcatggtgaca

SEQ ID NO: 124457 - DNA, 25 bp, Saccharomyces pastorianus
ttgggcgctcagtcgattgtggcta

SEQ ID NO: 124458 - DNA, 25 bp, Saccharomyces pastorianus
tccttattgttgtcctttgtgtgct

SEQ ID NO: 124459 - DNA, 25 bp, Saccharomyces pastorianus
tacgattgcgtctcttgcataccaa

SEQ ID NO: 124460 - DNA, 25 bp, Saccharomyces pastorianus
agtgttgacagttttcgcttcccat

SEQ ID NO: 124461 - DNA, 25 bp, Saccharomyces pastorianus
gtctattttctactgagagcgctgt

SEQ ID NO: 124462 - DNA, 25 bp, Saccharomyces pastorianus
tattcgatgcctttaatgcgtccac

SEQ ID NO: 124463 - DNA, 25 bp, Saccharomyces pastorianus
agatggtcgtggacacactacctct

SEQ ID NO: 124464 - DNA, 25 bp, Saccharomyces pastorianus
gtagccaattttatcggcgcgtcgc

SEQ ID NO: 124465 - DNA, 25 bp, Saccharomyces pastorianus
gaacatgttcgttatctgccgttat

SEQ ID NO: 124466 - DNA, 25 bp, Saccharomyces pastorianus
gcaattgaaagtttcgttaccacca

SEQ ID NO: 124467 - DNA, 25 bp, Saccharomyces pastorianus
tacagaatcccggttaaaagtagct

SEQ ID NO: 124468 - DNA, 25 bp, Saccharomyces pastorianus
agcagtcatcgctaaaagactcatt

SEQ ID NO: 124469 - DNA, 25 bp, Saccharomyces pastorianus
aaaactgcataaggattacgtgaac

SEQ ID NO: 124470 - DNA, 25 bp, Saccharomyces pastorianus
gatgatgccgttcgaaaagctgaga

SEQ ID NO: 124471 - DNA, 25 bp, Saccharomyces pastorianus
tcgttaccaccaccaactacagaat

SEQ ID NO: 124472 - DNA, 25 bp, Saccharomyces pastorianus
gcttgctacgaacctgaatttaact

SEQ ID NO: 124473 - DNA, 25 bp, Saccharomyces pastorianus
gggtcccaaataacgatttgcaatt

SEQ ID NO: 124474 - DNA, 25 bp, Saccharomyces pastorianus
ggaactatcagaggcagtattctaa

SEQ ID NO: 124475 - DNA, 25 bp, Saccharomyces pastorianus
ttacgtgaacaagcttcatgaccaa

SEQ ID NO: 124476 - DNA, 25 bp, Saccharomyces pastorianus
cgaacctgaatttaactcctgaaag

SEQ ID NO: 124477 - DNA, 25 bp, Saccharomyces pastorianus
ggcacagaacatggatactacagat

SEQ ID NO: 124478 - DNA, 25 bp, Saccharomyces pastorianus
gacaatcgcagacaagtttcacagg

SEQ ID NO: 124479 - DNA, 25 bp, Saccharomyces pastorianus
ggttgtattcccttaatagcccaat

SEQ ID NO: 124480 - DNA, 25 bp, Saccharomyces pastorianus
agtactgtccgttccttcttcattg

SEQ ID NO: 124481 - DNA, 25 bp, Saccharomyces pastorianus
acagtacctgagacttattgagcta

SEQ ID NO: 124482 - DNA, 25 bp, Saccharomyces pastorianus
ccaaggtagttgtcgaaatcgtcaa

SEQ ID NO: 124483 - DNA, 25 bp, Saccharomyces pastorianus
tgtttggtggagtactgtccgttcc

SEQ ID NO: 124484 - DNA, 25 bp, Saccharomyces pastorianus
aagactatgacccaattttgatgtt

SEQ ID NO: 124485 - DNA, 25 bp, Saccharomyces pastorianus
gattccaccttagagcagttgcaga

SEQ ID NO: 124486 - DNA, 25 bp, Saccharomyces pastorianus
gctactctcaaactatgattccacc

SEQ ID NO: 124487 - DNA, 25 bp, Saccharomyces pastorianus
gatggctacatccaattgagcagat

SEQ ID NO: 124488 - DNA, 25 bp, Saccharomyces pastorianus
tgctcaagcttgtaactggatctgg

SEQ ID NO: 124489 - DNA, 25 bp, Saccharomyces pastorianus
tgttttcgcttctgttggtgttaca

SEQ ID NO: 124490 - DNA, 25 bp, Saccharomyces pastorianus
gttttgccatggaaatcaccttctt

SEQ ID NO: 124491 - DNA, 25 bp, Saccharomyces pastorianus
aagaacgggtcttctaagggtgctg

SEQ ID NO: 124492 - DNA, 25 bp, Saccharomyces pastorianus
caggtgctattgatttctactacgg

SEQ ID NO: 124493 - DNA, 25 bp, Saccharomyces pastorianus
tgggttccaccaaacaagagaggta

SEQ ID NO: 124494 - DNA, 25 bp, Saccharomyces pastorianus
gctgtttggtcttttcttacttcta

SEQ ID NO: 124495 - DNA, 25 bp, Saccharomyces pastorianus
tggtgttacaagattgtggccaaat

SEQ ID NO: 124496 - DNA, 25 bp, Saccharomyces pastorianus
gtttctttactccatttatttcagg

SEQ ID NO: 124497 - DNA, 25 bp, Saccharomyces pastorianus
gtcttttcttacttctacgtcttct

SEQ ID NO: 124498 - DNA, 25 bp, Saccharomyces pastorianus
gaaatcaccttcttgggttccacca

SEQ ID NO: 124499 - DNA, 25 bp, Saccharomyces pastorianus
cagattatgtctcgcgttggatcgc

SEQ ID NO: 124500 - DNA, 25 bp, Saccharomyces pastorianus
gattcttcactaacattccagcagg

SEQ ID NO: 124501 - DNA, 25 bp, Saccharomyces pastorianus
gtaccagtgccagtgccgataacaa

SEQ ID NO: 124502 - DNA, 25 bp, Saccharomyces pastorianus
tacagatgtcgactatggctcctta

SEQ ID NO: 124503 - DNA, 25 bp, Saccharomyces pastorianus
ggataaccctcgttgcatttattgc

SEQ ID NO: 124504 - DNA, 25 bp, Saccharomyces pastorianus
gttggatcgccactcatgtagtaat

SEQ ID NO: 124505 - DNA, 25 bp, Saccharomyces pastorianus
tgtagtaatctctccattgaacgct

SEQ ID NO: 124506 - DNA, 25 bp, Saccharomyces pastorianus
atagttccctccctgatgttgatct

SEQ ID NO: 124507 - DNA, 25 bp, Saccharomyces pastorianus
gccgggtacagttggcactactagg

SEQ ID NO: 124508 - DNA, 25 bp, Saccharomyces pastorianus
tagctgctacctcgatcaacaatag

SEQ ID NO: 124509 - DNA, 25 bp, Saccharomyces pastorianus
tggtggaatagactctccctcaatc

SEQ ID NO: 124510 - DNA, 25 bp, Saccharomyces pastorianus
gttaacaccacacaatctgtttcta

SEQ ID NO: 124511 - DNA, 25 bp, Saccharomyces pastorianus
gtccatggttgcactttgccagcaa

SEQ ID NO: 124512 - DNA, 25 bp, Saccharomyces pastorianus
tagtaatgccggtccatggttgcac

SEQ ID NO: 124513 - DNA, 25 bp, Saccharomyces pastorianus
aaagccaattcgttcagcgtagatt

SEQ ID NO: 124514 - DNA, 25 bp, Saccharomyces pastorianus
gtgtcttttcagacttatctctttg

SEQ ID NO: 124515 - DNA, 25 bp, Saccharomyces pastorianus
gaacattagtaatgccggtccatgg

SEQ ID NO: 124516 - DNA, 25 bp, Saccharomyces pastorianus
aactccactttgacgaaagccaatt

SEQ ID NO: 124517 - DNA, 25 bp, Saccharomyces pastorianus
caatctgtttctaaaagtgtctttt

SEQ ID NO: 124518 - DNA, 25 bp, Saccharomyces pastorianus
tgccagcaactccactttgacgaaa

SEQ ID NO: 124519 - DNA, 25 bp, Saccharomyces pastorianus
taccggcacattagagtttgagttg

SEQ ID NO: 124520 - DNA, 25 bp, Saccharomyces pastorianus
gatttgagtaattctaccggcacat

SEQ ID NO: 124521 - DNA, 25 bp, Saccharomyces pastorianus
tgagcaactcgactggtaccctaga

SEQ ID NO: 124522 - DNA, 25 bp, Saccharomyces pastorianus
ctggtctcgttttgctactaacaca

SEQ ID NO: 124523 - DNA, 25 bp, Saccharomyces pastorianus
taacacaactctaactaaggccaat

SEQ ID NO: 124524 - DNA, 25 bp, Saccharomyces pastorianus
cttacaatgtcgatttgagcaactc

SEQ ID NO: 124525 - DNA, 25 bp, Saccharomyces pastorianus
aaggccaattcttacaatgtcgatt

SEQ ID NO: 124526 - DNA, 25 bp, Saccharomyces pastorianus
aacattagtaatgctggcccctggt

SEQ ID NO: 124527 - DNA, 25 bp, Saccharomyces pastorianus
tatcactttggttcaagggtttaga

SEQ ID NO: 124528 - DNA, 25 bp, Saccharomyces pastorianus
ttaacaccacacaaaccatatccaa

SEQ ID NO: 124529 - DNA, 25 bp, Saccharomyces pastorianus
acaaaccatatccaaatccgtcttc

SEQ ID NO: 124530 - DNA, 25 bp, Saccharomyces pastorianus
tcttccccgacttatcactttggtt

SEQ ID NO: 124531 - DNA, 25 bp, Saccharomyces pastorianus
gactggtaccctagagtttgagttg

SEQ ID NO: 124532 - DNA, 25 bp, Saccharomyces pastorianus
gcactgcatatatcaatgtccccgt

SEQ ID NO: 124533 - DNA, 25 bp, Saccharomyces pastorianus
gggattccaattgctgtgggcgtaa

SEQ ID NO: 124534 - DNA, 25 bp, Saccharomyces pastorianus
ggtcagagatccttcctatagtttt

SEQ ID NO: 124535 - DNA, 25 bp, Saccharomyces pastorianus
gtccccgtcattttcagcggcgaaa

SEQ ID NO: 124536 - DNA, 25 bp, Saccharomyces pastorianus
caggatcttaaaccctgccaagaaa

SEQ ID NO: 124537 - DNA, 25 bp, Saccharomyces pastorianus
acagctcaagtgaagcttccacgat

SEQ ID NO: 124538 - DNA, 25 bp, Saccharomyces pastorianus
tttatgtatccactgacgctatcgc

SEQ ID NO: 124539 - DNA, 25 bp, Saccharomyces pastorianus
gtcaaacttatcatcgagcacagaa

SEQ ID NO: 124540 - DNA, 25 bp, Saccharomyces pastorianus
aatagccctgatattttggtgtaaa

SEQ ID NO: 124541 - DNA, 25 bp, Saccharomyces pastorianus
gagatcagcttctacgtcaaactta

SEQ ID NO: 124542 - DNA, 25 bp, Saccharomyces pastorianus
ggcagggtacacaccagcatacaga

SEQ ID NO: 124543 - DNA, 25 bp, Saccharomyces pastorianus
tattggcctgcacgttggatatacc

SEQ ID NO: 124544 - DNA, 25 bp, Saccharomyces pastorianus
tataccgagggtggcgaacgacaga

SEQ ID NO: 124545 - DNA, 25 bp, Saccharomyces pastorianus
ataccacacaattccacgctaggga

SEQ ID NO: 124546 - DNA, 25 bp, Saccharomyces pastorianus
ggtacctatcgctatcttcgtgaaa

SEQ ID NO: 124547 - DNA, 25 bp, Saccharomyces pastorianus
gacagatagcaacgataccacacaa

SEQ ID NO: 124548 - DNA, 25 bp, Saccharomyces pastorianus
tcaagcaataatcgcggttttaggt

SEQ ID NO: 124549 - DNA, 25 bp, Saccharomyces pastorianus
agtttgtccgtaacaatcctgatac

SEQ ID NO: 124550 - DNA, 25 bp, Saccharomyces pastorianus
gaatttctccacagtttttcaagca

SEQ ID NO: 124551 - DNA, 25 bp, Saccharomyces pastorianus
aactacagtcacagctttagcagaa

SEQ ID NO: 124552 - DNA, 25 bp, Saccharomyces pastorianus
acgctagggacttcactacgtgagt

SEQ ID NO: 124553 - DNA, 25 bp, Saccharomyces pastorianus
gacctccgcacctacaatgagtgag

SEQ ID NO: 124554 - DNA, 25 bp, Saccharomyces pastorianus
tttgtttcttgcgaatgcggaaccg

SEQ ID NO: 124555 - DNA, 25 bp, Saccharomyces pastorianus
gcgagacatcctggccattatttat

SEQ ID NO: 124556 - DNA, 25 bp, Saccharomyces pastorianus
gttctgcagcttattcatgttctca

SEQ ID NO: 124557 - DNA, 25 bp, Saccharomyces pastorianus
cgctcttgcttaatcttatccagtt

SEQ ID NO: 124558 - DNA, 25 bp, Saccharomyces pastorianus
atacccttcctgcttgcaatgtcaa

SEQ ID NO: 124559 - DNA, 25 bp, Saccharomyces pastorianus
gcaatgatagcaagcgcgagcccag

SEQ ID NO: 124560 - DNA, 25 bp, Saccharomyces pastorianus
agcccagctctgaatcgcttgatat

SEQ ID NO: 124561 - DNA, 25 bp, Saccharomyces pastorianus
atcaggttctgtagatgttccgaaa

SEQ ID NO: 124562 - DNA, 25 bp, Saccharomyces pastorianus
ttcctcttcttttacaacaactgct

SEQ ID NO: 124563 - DNA, 25 bp, Saccharomyces pastorianus
gcggagcttcttaaactgcgagaca

SEQ ID NO: 124564 - DNA, 25 bp, Saccharomyces pastorianus
caatgtttgttgatttcttttccca

SEQ ID NO: 124565 - DNA, 25 bp, Saccharomyces pastorianus
gccgtttttaacttctgtagcgaca

SEQ ID NO: 124566 - DNA, 25 bp, Saccharomyces pastorianus
gccctacgctggtttttccaagaat

SEQ ID NO: 124567 - DNA, 25 bp, Saccharomyces pastorianus
agcgacagcacggagttttcagttc

SEQ ID NO: 124568 - DNA, 25 bp, Saccharomyces pastorianus
tggagtggtgaaaagccctacgctg

SEQ ID NO: 124569 - DNA, 25 bp, Saccharomyces pastorianus
gttggctactcttattatttccttg

SEQ ID NO: 124570 - DNA, 25 bp, Saccharomyces pastorianus
aaaagttttacgaggcattggcatt

SEQ ID NO: 124571 - DNA, 25 bp, Saccharomyces pastorianus
taaggcttcttacgacatgtttttc

SEQ ID NO: 124572 - DNA, 25 bp, Saccharomyces pastorianus
gagaactccattcccttggagtggt

SEQ ID NO: 124573 - DNA, 25 bp, Saccharomyces pastorianus
ttcggtaactatgcaaactctgatg

SEQ ID NO: 124574 - DNA, 25 bp, Saccharomyces pastorianus
atttccttgactggtactgtattca

SEQ ID NO: 124575 - DNA, 25 bp, Saccharomyces pastorianus
ggtaccggtacttatggtgccatca

SEQ ID NO: 124576 - DNA, 25 bp, Saccharomyces pastorianus
atcctggagagactacatgctgtaa

SEQ ID NO: 124577 - DNA, 25 bp, Saccharomyces pastorianus
agcgagtttgtcgttgcatctccaa

SEQ ID NO: 124578 - DNA, 25 bp, Saccharomyces pastorianus
acacttcaggcgagttaaattctac

SEQ ID NO: 124579 - DNA, 25 bp, Saccharomyces pastorianus
gagagagcaatcgtagatcacagat

SEQ ID NO: 124580 - DNA, 25 bp, Saccharomyces pastorianus
acacctataggtgatatcctggaga

SEQ ID NO: 124581 - DNA, 25 bp, Saccharomyces pastorianus
ggcttaaaatcattcccagatccaa

SEQ ID NO: 124582 - DNA, 25 bp, Saccharomyces pastorianus
caactcctttatttgctagtgcggg

SEQ ID NO: 124583 - DNA, 25 bp, Saccharomyces pastorianus
gggcttctacgggatacacttcagg

SEQ ID NO: 124584 - DNA, 25 bp, Saccharomyces pastorianus
tcaaatgtcagaataccctaggtaa

SEQ ID NO: 124585 - DNA, 25 bp, Saccharomyces pastorianus
ataggtatcctgatggttcggtgga

SEQ ID NO: 124586 - DNA, 25 bp, Saccharomyces pastorianus
gattcaggcgcatggatcttgacca

SEQ ID NO: 124587 - DNA, 25 bp, Saccharomyces pastorianus
ggaagctcaccctgcagaggaatct

SEQ ID NO: 124588 - DNA, 25 bp, Saccharomyces pastorianus
gtacgatctttcacgcagacatgcg

SEQ ID NO: 124589 - DNA, 25 bp, Saccharomyces pastorianus
gaccatgaccatcgaatgagctatt

SEQ ID NO: 124590 - DNA, 25 bp, Saccharomyces pastorianus
gagtagtgaacgttcgtacgatctt

SEQ ID NO: 124591 - DNA, 25 bp, Saccharomyces pastorianus
gaggccggtgccgatgtgcctttat

SEQ ID NO: 124592 - DNA, 25 bp, Saccharomyces pastorianus
tacttctcttcctactgttattctt

SEQ ID NO: 124593 - DNA, 25 bp, Saccharomyces pastorianus
tgttattcttcccagcaatcattca

SEQ ID NO: 124594 - DNA, 25 bp, Saccharomyces pastorianus
cactattgaacgtacttctcttcct

SEQ ID NO: 124595 - DNA, 25 bp, Saccharomyces pastorianus
gcacagcctccagcatatgatgaag

SEQ ID NO: 124596 - DNA, 25 bp, Saccharomyces pastorianus
aatcattcacgcttgctacgttgta

SEQ ID NO: 124597 - DNA, 25 bp, Saccharomyces pastorianus
ccgtagaccgtgacctggaagctca

SEQ ID NO: 124598 - DNA, 25 bp, Saccharomyces pastorianus
gcacccggtaattctcttgatatag

SEQ ID NO: 124599 - DNA, 25 bp, Saccharomyces pastorianus
tgccatgacaaacgcacccggtaat

SEQ ID NO: 124600 - DNA, 25 bp, Saccharomyces pastorianus
tctcgatattgttgggcggtgtctc

SEQ ID NO: 124601 - DNA, 25 bp, Saccharomyces pastorianus
acctccaacactaatcatgttgttg

SEQ ID NO: 124602 - DNA, 25 bp, Saccharomyces pastorianus
ctttattaacatatggttcaccaac

SEQ ID NO: 124603 - DNA, 25 bp, Saccharomyces pastorianus
gaaagaacctacctgtcttggttgt

SEQ ID NO: 124604 - DNA, 25 bp, Saccharomyces pastorianus
gtcttggttgtccatctcgatattg

SEQ ID NO: 124605 - DNA, 25 bp, Saccharomyces pastorianus
tgccccaccgggaaagacgatatgt

SEQ ID NO: 124606 - DNA, 25 bp, Saccharomyces pastorianus
gggaaagacgatatgtgtgccagtt

SEQ ID NO: 124607 - DNA, 25 bp, Saccharomyces pastorianus
gcggtgtctccactactttattaac

SEQ ID NO: 124608 - DNA, 25 bp, Saccharomyces pastorianus
ttttgatactcaaattcgtgcccca

SEQ ID NO: 124609 - DNA, 25 bp, Saccharomyces pastorianus
atgatgacagtctagctcctataga

SEQ ID NO: 124610 - DNA, 25 bp, Saccharomyces pastorianus
gctcttgttggcctcatagatgcag

SEQ ID NO: 124611 - DNA, 25 bp, Saccharomyces pastorianus
aaagttgacggcgaatgcctcatag

SEQ ID NO: 124612 - DNA, 25 bp, Saccharomyces pastorianus
aaggaattcatctgcaaggcacagt

SEQ ID NO: 124613 - DNA, 25 bp, Saccharomyces pastorianus
gcgaatgcctcatagcaagcctaaa

SEQ ID NO: 124614 - DNA, 25 bp, Saccharomyces pastorianus
aaggcacagttacttcgaggcagcg

SEQ ID NO: 124615 - DNA, 25 bp, Saccharomyces pastorianus
taaccaatgttttcaaccgcataag

SEQ ID NO: 124616 - DNA, 25 bp, Saccharomyces pastorianus
accatgtcagccaccttgaaagact

SEQ ID NO: 124617 - DNA, 25 bp, Saccharomyces pastorianus
agaacacactatcgtgcaccatgtc

SEQ ID NO: 124618 - DNA, 25 bp, Saccharomyces pastorianus
agctgcatacagtacaccatacaag

SEQ ID NO: 124619 - DNA, 25 bp, Saccharomyces pastorianus
tcgaggcagcgagattgctcttgtt

SEQ ID NO: 124620 - DNA, 25 bp, Saccharomyces pastorianus
ttccgcctcagcagacttggagatc

SEQ ID NO: 124621 - DNA, 25 bp, Saccharomyces pastorianus
gcagacttggagatcggcgaacaaa

SEQ ID NO: 124622 - DNA, 25 bp, Saccharomyces pastorianus
cgcacatcctaacctctattttgaa

SEQ ID NO: 124623 - DNA, 25 bp, Saccharomyces pastorianus
gaaataacacacaattccgcctcag

SEQ ID NO: 124624 - DNA, 25 bp, Saccharomyces pastorianus
ttggagatcggcgaacaaactcata

SEQ ID NO: 124625 - DNA, 25 bp, Saccharomyces pastorianus
tcagcagacttggagatcggcgaac

SEQ ID NO: 124626 - DNA, 25 bp, Saccharomyces pastorianus
aattccgcctcagcagacttggaga

SEQ ID NO: 124627 - DNA, 25 bp, Saccharomyces pastorianus
ttttgaaaggtcaaggcaactgcaa

SEQ ID NO: 124628 - DNA, 25 bp, Saccharomyces pastorianus
atatcgcacatcctaacctctattt

SEQ ID NO: 124629 - DNA, 25 bp, Saccharomyces pastorianus
gaacaaactcatatcgcacatccta

SEQ ID NO: 124630 - DNA, 25 bp, Saccharomyces pastorianus
acatcctaacctctattttgaaagg

SEQ ID NO: 124631 - DNA, 25 bp, Saccharomyces pastorianus
accaaatgcattcgttttaccaggg

SEQ ID NO: 124632 - DNA, 25 bp, Saccharomyces pastorianus
taagtacacatccagcaagcactcg

SEQ ID NO: 124633 - DNA, 25 bp, Saccharomyces pastorianus
gaaggctcctatatattctcttttg

SEQ ID NO: 124634 - DNA, 25 bp, Saccharomyces pastorianus
gaagctgcttataaggaccctagtg

SEQ ID NO: 124635 - DNA, 25 bp, Saccharomyces pastorianus
atactgttactggagctcatgctat

SEQ ID NO: 124636 - DNA, 25 bp, Saccharomyces pastorianus
ccgaagctgattacattggcctgat

SEQ ID NO: 124637 - DNA, 25 bp, Saccharomyces pastorianus
ggcatgttttcaaccacaggagtca

SEQ ID NO: 124638 - DNA, 25 bp, Saccharomyces pastorianus
aatgatccaactgcttcaccaaatg

SEQ ID NO: 124639 - DNA, 25 bp, Saccharomyces pastorianus
gacaactcactactggacgggatca

SEQ ID NO: 124640 - DNA, 25 bp, Saccharomyces pastorianus
ggattgccactgttttagcacacga

SEQ ID NO: 124641 - DNA, 25 bp, Saccharomyces pastorianus
gggtaaggtctttatattcagctct

SEQ ID NO: 124642 - DNA, 25 bp, Saccharomyces pastorianus
tatccagaatggttcgcagggtcaa

SEQ ID NO: 124643 - DNA, 25 bp, Saccharomyces pastorianus
tgaaaggcggatttgacccgaaaat

SEQ ID NO: 124644 - DNA, 25 bp, Saccharomyces pastorianus
tattgaggcaccacaactacccatt

SEQ ID NO: 124645 - DNA, 25 bp, Saccharomyces pastorianus
gagctggtgttaatgtcggtatcca

SEQ ID NO: 124646 - DNA, 25 bp, Saccharomyces pastorianus
attcctggtcaaactaatggctctg

SEQ ID NO: 124647 - DNA, 25 bp, Saccharomyces pastorianus
actttatattttacagccggtgcat

SEQ ID NO: 124648 - DNA, 25 bp, Saccharomyces pastorianus
gaccggaatggacctttattttgat

SEQ ID NO: 124649 - DNA, 25 bp, Saccharomyces pastorianus
ggttctccatttttggccactaaga

SEQ ID NO: 124650 - DNA, 25 bp, Saccharomyces pastorianus
catcctgacaaaggtggttctccat

SEQ ID NO: 124651 - DNA, 25 bp, Saccharomyces pastorianus
atggctctgcgaacgttactgttga

SEQ ID NO: 124652 - DNA, 25 bp, Saccharomyces pastorianus
aaaatccactactgccttcttgaaa

SEQ ID NO: 124653 - DNA, 25 bp, Saccharomyces pastorianus
aataatctttgctttcgggtacgag

SEQ ID NO: 124654 - DNA, 25 bp, Saccharomyces pastorianus
ggtttctgatgttctagatgccttt

SEQ ID NO: 124655 - DNA, 25 bp, Saccharomyces pastorianus
acacatcagtgccagtaactcctat

SEQ ID NO: 124656 - DNA, 25 bp, Saccharomyces pastorianus
ttaagaactttatcgcaggacactg

SEQ ID NO: 124657 - DNA, 25 bp, Saccharomyces pastorianus
ttctggacctttctgcacggataaa

SEQ ID NO: 124658 - DNA, 25 bp, Saccharomyces pastorianus
tcgactttcatggtactaaggtttc

SEQ ID NO: 124659 - DNA, 25 bp, Saccharomyces pastorianus
tttcgggtacgagagtccatcaaaa

SEQ ID NO: 124660 - DNA, 25 bp, Saccharomyces pastorianus
acttcttatcccaatatcgactttc

SEQ ID NO: 124661 - DNA, 25 bp, Saccharomyces pastorianus
atccaaggaggcgagctagctgcta

SEQ ID NO: 124662 - DNA, 25 bp, Saccharomyces pastorianus
gtaactcctattatgccggtcttaa

SEQ ID NO: 124663 - DNA, 25 bp, Saccharomyces pastorianus
ggacactgacaacgaattgcttttt

SEQ ID NO: 124664 - DNA, 25 bp, Saccharomyces pastorianus
tgccttctaatctcctatacaacga

SEQ ID NO: 124665 - DNA, 25 bp, Saccharomyces pastorianus
ccttgtcatatccttctactgatgt

SEQ ID NO: 124666 - DNA, 25 bp, Saccharomyces pastorianus
cgatcgattgagacccttgtcatat

SEQ ID NO: 124667 - DNA, 25 bp, Saccharomyces pastorianus
ggtttgtttgatacggccggtcaag

SEQ ID NO: 124668 - DNA, 25 bp, Saccharomyces pastorianus
gtcgtcggtacgcagattgatctaa

SEQ ID NO: 124669 - DNA, 25 bp, Saccharomyces pastorianus
catgcctggtcgtcggtacgcagat

SEQ ID NO: 124670 - DNA, 25 bp, Saccharomyces pastorianus
gtgctgttgggaaaacgtgccttct

SEQ ID NO: 124671 - DNA, 25 bp, Saccharomyces pastorianus
gctaaagtgtgttgttgtcggtgat

SEQ ID NO: 124672 - DNA, 25 bp, Saccharomyces pastorianus
aactatgcggtgactgtgatgattg

SEQ ID NO: 124673 - DNA, 25 bp, Saccharomyces pastorianus
attgtccaggtgtaccatgcctggt

SEQ ID NO: 124674 - DNA, 25 bp, Saccharomyces pastorianus
atgaagctatcgtggccgccttgga

SEQ ID NO: 124675 - DNA, 25 bp, Saccharomyces pastorianus
gacaatcatattgcatacccattaa

SEQ ID NO: 124676 - DNA, 25 bp, Saccharomyces pastorianus
aaaggctctttgtgctacttcataa

SEQ ID NO: 124677 - DNA, 25 bp, Saccharomyces pastorianus
aatacaggcaattttctccacatat

SEQ ID NO: 124678 - DNA, 25 bp, Saccharomyces pastorianus
ggaaaatactacgtcgacttcgaca

SEQ ID NO: 124679 - DNA, 25 bp, Saccharomyces pastorianus
gacctaatgggctggagacgataca

SEQ ID NO: 124680 - DNA, 25 bp, Saccharomyces pastorianus
aaggtatttcgatcattcttgccaa

SEQ ID NO: 124681 - DNA, 25 bp, Saccharomyces pastorianus
tcgggatccagattgcagttgcgca

SEQ ID NO: 124682 - DNA, 25 bp, Saccharomyces pastorianus
gaagctgttgtacggcaatatcgat

SEQ ID NO: 124683 - DNA, 25 bp, Saccharomyces pastorianus
gttgcgcaagcttcgtttcaagtca

SEQ ID NO: 124684 - DNA, 25 bp, Saccharomyces pastorianus
gaaacgccgctggaaaaggctcttt

SEQ ID NO: 124685 - DNA, 25 bp, Saccharomyces pastorianus
aagtcagtgggctccttcaggaaaa

SEQ ID NO: 124686 - DNA, 25 bp, Saccharomyces pastorianus
gagtgaggaatctagctctgctaat

SEQ ID NO: 124687 - DNA, 25 bp, Saccharomyces pastorianus
aagcgccaataatgacggagttact

SEQ ID NO: 124688 - DNA, 25 bp, Saccharomyces pastorianus
gccgtcgtagcctccaagggtatag

SEQ ID NO: 124689 - DNA, 25 bp, Saccharomyces pastorianus
gctctgctaataacacgaccacaac

SEQ ID NO: 124690 - DNA, 25 bp, Saccharomyces pastorianus
agaggctctgtttactgtgtctcag

SEQ ID NO: 124691 - DNA, 25 bp, Saccharomyces pastorianus
aaggcgccgttttgtaacgctgaga

SEQ ID NO: 124692 - DNA, 25 bp, Saccharomyces pastorianus
gcctcgcatactctatcgaattcga

SEQ ID NO: 124693 - DNA, 25 bp, Saccharomyces pastorianus
gagattttccaagctatacctcagg

SEQ ID NO: 124694 - DNA, 25 bp, Saccharomyces pastorianus
atagtggtgcttctatgtcgcaggt

SEQ ID NO: 124695 - DNA, 25 bp, Saccharomyces pastorianus
gagagagcctctaaatctggaagat

SEQ ID NO: 124696 - DNA, 25 bp, Saccharomyces pastorianus
ctggacacaacccactgagcaaagt

SEQ ID NO: 124697 - DNA, 25 bp, Saccharomyces pastorianus
ctgaaacatacatcgctgctggaga

SEQ ID NO: 124698 - DNA, 25 bp, Saccharomyces pastorianus
gtaagactgaactcaccaggctctg

SEQ ID NO: 124699 - DNA, 25 bp, Saccharomyces pastorianus
gatggcttcactgcagtactaacaa

SEQ ID NO: 124700 - DNA, 25 bp, Saccharomyces pastorianus
agttgccactggttctttagacacc

SEQ ID NO: 124701 - DNA, 25 bp, Saccharomyces pastorianus
gcgcaaaaccctcgtacatatcaat

SEQ ID NO: 124702 - DNA, 25 bp, Saccharomyces pastorianus
gggaaacaccatctaccttggtcag

SEQ ID NO: 124703 - DNA, 25 bp, Saccharomyces pastorianus
gatttaaaaacacctcttcgcgcaa

SEQ ID NO: 124704 - DNA, 25 bp, Saccharomyces pastorianus
accttggtcagttctggtgcggacg

SEQ ID NO: 124705 - DNA, 25 bp, Saccharomyces pastorianus
taaggcgttgaatgctcacaaggac

SEQ ID NO: 124706 - DNA, 25 bp, Saccharomyces pastorianus
ctctgccgttagcttgagccaaaat

SEQ ID NO: 124707 - DNA, 25 bp, Saccharomyces pastorianus
ttcaagatgggctttccacaccagt

SEQ ID NO: 124708 - DNA, 25 bp, Saccharomyces pastorianus
gaaagattatgtaccatcgccaaca

SEQ ID NO: 124709 - DNA, 25 bp, Saccharomyces pastorianus
tattccacacgaatccactaggaga

SEQ ID NO: 124710 - DNA, 25 bp, Saccharomyces pastorianus
aattgaagccgtcctaacattttgg

SEQ ID NO: 124711 - DNA, 25 bp, Saccharomyces pastorianus
accctcagacaggtttcttagtagc

SEQ ID NO: 124712 - DNA, 25 bp, Saccharomyces pastorianus
tatgcaggtttacttacttccagaa

SEQ ID NO: 124713 - DNA, 25 bp, Saccharomyces pastorianus
acattgataacgctattccacacga

SEQ ID NO: 124714 - DNA, 25 bp, Saccharomyces pastorianus
aacattttggaacgccaaccctcag

SEQ ID NO: 124715 - DNA, 25 bp, Saccharomyces pastorianus
gcagacaaattcattgccaacattg

SEQ ID NO: 124716 - DNA, 25 bp, Saccharomyces pastorianus
atcgccaacagtactatagacttac

SEQ ID NO: 124717 - DNA, 25 bp, Saccharomyces pastorianus
gctacagcaattgaagcggtcttta

SEQ ID NO: 124718 - DNA, 25 bp, Saccharomyces pastorianus
acgaatatcgtgagttagcagacaa

SEQ ID NO: 124719 - DNA, 25 bp, Saccharomyces pastorianus
aggagtaccaatccaagattatcgt

SEQ ID NO: 124720 - DNA, 25 bp, Saccharomyces pastorianus
tgctccaagaccattggatttgttg

SEQ ID NO: 124721 - DNA, 25 bp, Saccharomyces pastorianus
gtaccaatccaagattatcgttttc

SEQ ID NO: 124722 - DNA, 25 bp, Saccharomyces pastorianus
ggagtaccaatccaagattatcgtt

SEQ ID NO: 124723 - DNA, 25 bp, Saccharomyces pastorianus
gattatcgttttcccaagagacggt

SEQ ID NO: 124724 - DNA, 25 bp, Saccharomyces pastorianus
gaagaaccacttcagaaagcactgg

SEQ ID NO: 124725 - DNA, 25 bp, Saccharomyces pastorianus
aaggagtaccaatccaagattatcg

SEQ ID NO: 124726 - DNA, 25 bp, Saccharomyces pastorianus
attggatttgttgagacctgttgtc

SEQ ID NO: 124727 - DNA, 25 bp, Saccharomyces pastorianus
gagtaccaatccaagattatcgttt

SEQ ID NO: 124728 - DNA, 25 bp, Saccharomyces pastorianus
agtaccaatccaagattatcgtttt

SEQ ID NO: 124729 - DNA, 25 bp, Saccharomyces pastorianus
aaaggagtaccaatccaagattatc

SEQ ID NO: 124730 - DNA, 25 bp, Saccharomyces pastorianus
agttgctactgctgtatcgaaaagt

SEQ ID NO: 124731 - DNA, 25 bp, Saccharomyces pastorianus
tactcaaaatgaggcagttgctact

SEQ ID NO: 124732 - DNA, 25 bp, Saccharomyces pastorianus
tgaaaggaaccattactaatcttgg

SEQ ID NO: 124733 - DNA, 25 bp, Saccharomyces pastorianus
aagactagtaacgacagtgagagta

SEQ ID NO: 124734 - DNA, 25 bp, Saccharomyces pastorianus
actgctgtatcgaaaagtagctcac

SEQ ID NO: 124735 - DNA, 25 bp, Saccharomyces pastorianus
agaaggcgtgatgaagatgataaca

SEQ ID NO: 124736 - DNA, 25 bp, Saccharomyces pastorianus
gcatagcagcgatgaaggtgataaa

SEQ ID NO: 124737 - DNA, 25 bp, Saccharomyces pastorianus
gccagctttgttgtatctagtgcaa

SEQ ID NO: 124738 - DNA, 25 bp, Saccharomyces pastorianus
tgtatctagtgcaagttcgagtaaa

SEQ ID NO: 124739 - DNA, 25 bp, Saccharomyces pastorianus
ggaagccagctttgttgtatctagt

SEQ ID NO: 124740 - DNA, 25 bp, Saccharomyces pastorianus
ctcacctctatacaggtggtttgta

SEQ ID NO: 124741 - DNA, 25 bp, Saccharomyces pastorianus
ttaataggcccgtgattcccaacga

SEQ ID NO: 124742 - DNA, 25 bp, Saccharomyces pastorianus
cattcgaggattttgcttggctgac

SEQ ID NO: 124743 - DNA, 25 bp, Saccharomyces pastorianus
aaattccctaacttcgatctttctg

SEQ ID NO: 124744 - DNA, 25 bp, Saccharomyces pastorianus
gaacacaaatttctatccctgcaga

SEQ ID NO: 124745 - DNA, 25 bp, Saccharomyces pastorianus
tacgcccataggtgttttgcaggac

SEQ ID NO: 124746 - DNA, 25 bp, Saccharomyces pastorianus
aaatggcatttggtttcctagaggc

SEQ ID NO: 124747 - DNA, 25 bp, Saccharomyces pastorianus
aagccgttacacgtacacgcagaga

SEQ ID NO: 124748 - DNA, 25 bp, Saccharomyces pastorianus
gagcaggaccttatatcttttggtt

SEQ ID NO: 124749 - DNA, 25 bp, Saccharomyces pastorianus
gtgaagtcacacattttggctggaa

SEQ ID NO: 124750 - DNA, 25 bp, Saccharomyces pastorianus
gtttcctagaggcataccggacatt

SEQ ID NO: 124751 - DNA, 25 bp, Saccharomyces pastorianus
atacacttggtctgtttctgctacg

SEQ ID NO: 124752 - DNA, 25 bp, Saccharomyces pastorianus
gcatcactaggagacaagggcttac

SEQ ID NO: 124753 - DNA, 25 bp, Saccharomyces pastorianus
tccgcgatcgaggtgtgcactacat

SEQ ID NO: 124754 - DNA, 25 bp, Saccharomyces pastorianus
gtgtgcactacatgcggagaatcat

SEQ ID NO: 124755 - DNA, 25 bp, Saccharomyces pastorianus
accacgtgaagatagcagggcatgc

SEQ ID NO: 124756 - DNA, 25 bp, Saccharomyces pastorianus
cgaaataagctattcaaccacgtga

SEQ ID NO: 124757 - DNA, 25 bp, Saccharomyces pastorianus
aaaactggcagaatcgtcttctgaa

SEQ ID NO: 124758 - DNA, 25 bp, Saccharomyces pastorianus
ggttggataatctctccgatctcga

SEQ ID NO: 124759 - DNA, 25 bp, Saccharomyces pastorianus
caagggcttacaaacggatgacgat

SEQ ID NO: 124760 - DNA, 25 bp, Saccharomyces pastorianus
agcattgcaagctgaactcgctgaa

SEQ ID NO: 124761 - DNA, 25 bp, Saccharomyces pastorianus
ggatgatcttttagcatcactagga

SEQ ID NO: 124762 - DNA, 25 bp, Saccharomyces pastorianus
taaatccacaaaaagcactccgtcc

SEQ ID NO: 124763 - DNA, 25 bp, Saccharomyces pastorianus
acaacggtcaatatggtgccgacaa

SEQ ID NO: 124764 - DNA, 25 bp, Saccharomyces pastorianus
ttctactcaagtggccaacaaggtc

SEQ ID NO: 124765 - DNA, 25 bp, Saccharomyces pastorianus
caacaaccatcaccgtcaggacaat

SEQ ID NO: 124766 - DNA, 25 bp, Saccharomyces pastorianus
aataacggtggatttggcggtccag

SEQ ID NO: 124767 - DNA, 25 bp, Saccharomyces pastorianus
aggtgtcgaacaaccattctaagtt

SEQ ID NO: 124768 - DNA, 25 bp, Saccharomyces pastorianus
gaactggtgctccaaacaacggtca

SEQ ID NO: 124769 - DNA, 25 bp, Saccharomyces pastorianus
gtgcgtacgctggatctaaggtgtc

SEQ ID NO: 124770 - DNA, 25 bp, Saccharomyces pastorianus
atacggcaactcaaacttcggaggt

SEQ ID NO: 124771 - DNA, 25 bp, Saccharomyces pastorianus
gaggtgctcctcaaggtggacacaa

SEQ ID NO: 124772 - DNA, 25 bp, Saccharomyces pastorianus
tggtgccgacaatggtaaccccaac

SEQ ID NO: 124773 - DNA, 25 bp, Saccharomyces pastorianus
taggtggtgcattccttgccaacaa

SEQ ID NO: 124774 - DNA, 25 bp, Saccharomyces pastorianus
tggactcgaaactctacctaagggc

SEQ ID NO: 124775 - DNA, 25 bp, Saccharomyces pastorianus
cagactgtgagctagaatggttcca

SEQ ID NO: 124776 - DNA, 25 bp, Saccharomyces pastorianus
agcaaatcgtcgcaggcactgaaga

SEQ ID NO: 124777 - DNA, 25 bp, Saccharomyces pastorianus
ggtgtggacaaccatccagcaatgc

SEQ ID NO: 124778 - DNA, 25 bp, Saccharomyces pastorianus
gtttcaccaagcactatcagcacgg

SEQ ID NO: 124779 - DNA, 25 bp, Saccharomyces pastorianus
gctctactgctactgtaaccaagtg

SEQ ID NO: 124780 - DNA, 25 bp, Saccharomyces pastorianus
acgagagccaagaccacactggtaa

SEQ ID NO: 124781 - DNA, 25 bp, Saccharomyces pastorianus
gataggtacatctacagcgtccagg

SEQ ID NO: 124782 - DNA, 25 bp, Saccharomyces pastorianus
caatgcacctccatcatgaactaat

SEQ ID NO: 124783 - DNA, 25 bp, Saccharomyces pastorianus
acaacgccgatccagagaccaaaaa

SEQ ID NO: 124784 - DNA, 25 bp, Saccharomyces pastorianus
aagaggagagttgccaccacagccg

SEQ ID NO: 124785 - DNA, 25 bp, Saccharomyces pastorianus
attgctcgtgtaatccaaggcgtcc

SEQ ID NO: 124786 - DNA, 25 bp, Saccharomyces pastorianus
ttttggagccatgtcagtgctggga

SEQ ID NO: 124787 - DNA, 25 bp, Saccharomyces pastorianus
ctagccatggctgatcgaattataa

SEQ ID NO: 124788 - DNA, 25 bp, Saccharomyces pastorianus
ctacgatgtctttccaggcaaatat

SEQ ID NO: 124789 - DNA, 25 bp, Saccharomyces pastorianus
gcaccgatgttcttcaccaagtata

SEQ ID NO: 124790 - DNA, 25 bp, Saccharomyces pastorianus
tagcggaaacggtaccattcatgat

SEQ ID NO: 124791 - DNA, 25 bp, Saccharomyces pastorianus
gaatttgactatcgcacacttccaa

SEQ ID NO: 124792 - DNA, 25 bp, Saccharomyces pastorianus
ggaaataaattctatcgcaccgatg

SEQ ID NO: 124793 - DNA, 25 bp, Saccharomyces pastorianus
ggagagaatcccattgctcgtgtaa

SEQ ID NO: 124794 - DNA, 25 bp, Saccharomyces pastorianus
agtatagtgataccccgattcaaaa

SEQ ID NO: 124795 - DNA, 25 bp, Saccharomyces pastorianus
gcatcgccgagatgacggccgtgat

SEQ ID NO: 124796 - DNA, 25 bp, Saccharomyces pastorianus
aaccggcacctgtcgaagcagaaat

SEQ ID NO: 124797 - DNA, 25 bp, Saccharomyces pastorianus
gagttaccataatcttcgagactat

SEQ ID NO: 124798 - DNA, 25 bp, Saccharomyces pastorianus
gaaactacttccattatcacataaa

SEQ ID NO: 124799 - DNA, 25 bp, Saccharomyces pastorianus
tatactcacatgaaccaccattgga

SEQ ID NO: 124800 - DNA, 25 bp, Saccharomyces pastorianus
aagagactatatcaaccacctaaag

SEQ ID NO: 124801 - DNA, 25 bp, Saccharomyces pastorianus
gagaaaccgtcaaatccaatccgct

SEQ ID NO: 124802 - DNA, 25 bp, Saccharomyces pastorianus
ctctaaagcctacatgcactccaga

SEQ ID NO: 124803 - DNA, 25 bp, Saccharomyces pastorianus
aatccgctccacaagttttatactc

SEQ ID NO: 124804 - DNA, 25 bp, Saccharomyces pastorianus
gagaacatcttcatcaaaccttcca

SEQ ID NO: 124805 - DNA, 25 bp, Saccharomyces pastorianus
attgaactaagccagcagcaaccgg

SEQ ID NO: 124806 - DNA, 25 bp, Saccharomyces pastorianus
ttttcccacgtcatttccagacaaa

SEQ ID NO: 124807 - DNA, 25 bp, Saccharomyces pastorianus
ttgctgcgtatttgtcactggacca

SEQ ID NO: 124808 - DNA, 25 bp, Saccharomyces pastorianus
gaaaaacgtcttctttgctgcgtat

SEQ ID NO: 124809 - DNA, 25 bp, Saccharomyces pastorianus
actgcattcgtaagtgccaaatcgc

SEQ ID NO: 124810 - DNA, 25 bp, Saccharomyces pastorianus
acttggcaaggtttttagctgtaca

SEQ ID NO: 124811 - DNA, 25 bp, Saccharomyces pastorianus
tctaactggtgttggttgttcggcc

SEQ ID NO: 124812 - DNA, 25 bp, Saccharomyces pastorianus
aagtgatcccggtgaccatccttac

SEQ ID NO: 124813 - DNA, 25 bp, Saccharomyces pastorianus
aacctttgaaccacttgcaagctgc

SEQ ID NO: 124814 - DNA, 25 bp, Saccharomyces pastorianus
gtgggttggttatggatcttcgcaa

SEQ ID NO: 124815 - DNA, 25 bp, Saccharomyces pastorianus
acgttgcattgtctggtgtggtcac

SEQ ID NO: 124816 - DNA, 25 bp, Saccharomyces pastorianus
gaactcgtcagtgttggccagacta

SEQ ID NO: 124817 - DNA, 25 bp, Saccharomyces pastorianus
gggacgctgcagactcgttcatagt

SEQ ID NO: 124818 - DNA, 25 bp, Saccharomyces pastorianus
cggaccaactctataatcagccttg

SEQ ID NO: 124819 - DNA, 25 bp, Saccharomyces pastorianus
agatcactcactaatgcttgctgga

SEQ ID NO: 124820 - DNA, 25 bp, Saccharomyces pastorianus
ggtctagaatttgatccggtttcca

SEQ ID NO: 124821 - DNA, 25 bp, Saccharomyces pastorianus
gaacaagtccttccgggctatttga

SEQ ID NO: 124822 - DNA, 25 bp, Saccharomyces pastorianus
gccttgatccgctgagtgagatgct

SEQ ID NO: 124823 - DNA, 25 bp, Saccharomyces pastorianus
attcgccagtatcagcgggtctaga

SEQ ID NO: 124824 - DNA, 25 bp, Saccharomyces pastorianus
gcaccccttatttcaacgttatgga

SEQ ID NO: 124825 - DNA, 25 bp, Saccharomyces pastorianus
tagtttggtgtccacttctatgggc

SEQ ID NO: 124826 - DNA, 25 bp, Saccharomyces pastorianus
gaaggacctgtcatgctgctataca

SEQ ID NO: 124827 - DNA, 25 bp, Saccharomyces pastorianus
gatggaaacgtcctgatccttggtg

SEQ ID NO: 124828 - DNA, 25 bp, Saccharomyces pastorianus
ttgctacggctttggatcagtgact

SEQ ID NO: 124829 - DNA, 25 bp, Saccharomyces pastorianus
ggcccatgccggttataagtgtgtt

SEQ ID NO: 124830 - DNA, 25 bp, Saccharomyces pastorianus
acgaagggtgtttcctatgtggatt

SEQ ID NO: 124831 - DNA, 25 bp, Saccharomyces pastorianus
gatccatggaacctactatgtgcca

SEQ ID NO: 124832 - DNA, 25 bp, Saccharomyces pastorianus
gggcagatcaattgttgcctctggt

SEQ ID NO: 124833 - DNA, 25 bp, Saccharomyces pastorianus
tagtgctaccttatcgatggcccat

SEQ ID NO: 124834 - DNA, 25 bp, Saccharomyces pastorianus
gggtaacattgagcagatccatgga

SEQ ID NO: 124835 - DNA, 25 bp, Saccharomyces pastorianus
aggatgaacgacatggaacgcaacc

SEQ ID NO: 124836 - DNA, 25 bp, Saccharomyces pastorianus
caatttgcgtctcccagttaaagaa

SEQ ID NO: 124837 - DNA, 25 bp, Saccharomyces pastorianus
aaatgttgccaatttgcgtctccca

SEQ ID NO: 124838 - DNA, 25 bp, Saccharomyces pastorianus
gtgcagactactttgccataccatt

SEQ ID NO: 124839 - DNA, 25 bp, Saccharomyces pastorianus
tgcctctggtggacggtgcagacta

SEQ ID NO: 124840 - DNA, 25 bp, Saccharomyces pastorianus
tgcccatcgaaacgaccctgagaat

SEQ ID NO: 124841 - DNA, 25 bp, Saccharomyces pastorianus
atggcaatggcagcactgaccagat

SEQ ID NO: 124842 - DNA, 25 bp, Saccharomyces pastorianus
accttcggtggtagtaatgactctg

SEQ ID NO: 124843 - DNA, 25 bp, Saccharomyces pastorianus
tgaccagatatcagggccagcatcg

SEQ ID NO: 124844 - DNA, 25 bp, Saccharomyces pastorianus
ttttgtgggcgtggtgcccatcgaa

SEQ ID NO: 124845 - DNA, 25 bp, Saccharomyces pastorianus
tagacagtactcttcgtacaccttc

SEQ ID NO: 124846 - DNA, 25 bp, Saccharomyces pastorianus
atggtcacacattgagtcatcgtat

SEQ ID NO: 124847 - DNA, 25 bp, Saccharomyces pastorianus
tacgctgacgctgtgtacggcaagt

SEQ ID NO: 124848 - DNA, 25 bp, Saccharomyces pastorianus
ggttgcgttgaatggtattacccag

SEQ ID NO: 124849 - DNA, 25 bp, Saccharomyces pastorianus
atatttacccgagatatggtcacac

SEQ ID NO: 124850 - DNA, 25 bp, Saccharomyces pastorianus
gaagagtatctctgcaggctgccta

SEQ ID NO: 124851 - DNA, 25 bp, Saccharomyces pastorianus
ggtttattgcatccgtctgagtgaa

SEQ ID NO: 124852 - DNA, 25 bp, Saccharomyces pastorianus
tggtgggcctatggttcgcagtact

SEQ ID NO: 124853 - DNA, 25 bp, Saccharomyces pastorianus
ggttcgcagtactgggacactacta

SEQ ID NO: 124854 - DNA, 25 bp, Saccharomyces pastorianus
gggacactactaatactactgggtt

SEQ ID NO: 124855 - DNA, 25 bp, Saccharomyces pastorianus
gtatcattaactttttggaacgcaa

SEQ ID NO: 124856 - DNA, 25 bp, Saccharomyces pastorianus
atatgatgatctccccatcagtggt

SEQ ID NO: 124857 - DNA, 25 bp, Saccharomyces pastorianus
gtaccgggtcagcatttgccgataa

SEQ ID NO: 124858 - DNA, 25 bp, Saccharomyces pastorianus
atactaattgcctgcggtgatatca

SEQ ID NO: 124859 - DNA, 25 bp, Saccharomyces pastorianus
atcgtaactttgtctcacctggaaa

SEQ ID NO: 124860 - DNA, 25 bp, Saccharomyces pastorianus
aataccgactcttttaatggcagtg

SEQ ID NO: 124861 - DNA, 25 bp, Saccharomyces pastorianus
tactgggttgtcttctagcaaagca

SEQ ID NO: 124862 - DNA, 25 bp, Saccharomyces pastorianus
agagagcataactagccccacaatt

SEQ ID NO: 124863 - DNA, 25 bp, Saccharomyces pastorianus
gatctgttgctggtagcgacttata

SEQ ID NO: 124864 - DNA, 25 bp, Saccharomyces pastorianus
gttccattatggttgcgtaggcctg

SEQ ID NO: 124865 - DNA, 25 bp, Saccharomyces pastorianus
ttcggatatcaggtacagtttcctt

SEQ ID NO: 124866 - DNA, 25 bp, Saccharomyces pastorianus
ttgtcccttcgagtggttccattat

SEQ ID NO: 124867 - DNA, 25 bp, Saccharomyces pastorianus
tggcttgtgataatccggcttgtcc

SEQ ID NO: 124868 - DNA, 25 bp, Saccharomyces pastorianus
cgtaggcctgaaacaagctcccaag

SEQ ID NO: 124869 - DNA, 25 bp, Saccharomyces pastorianus
aaagggcctgtagggatctgttgct

SEQ ID NO: 124870 - DNA, 25 bp, Saccharomyces pastorianus
aagatctcttcgactgatgcaaaca

SEQ ID NO: 124871 - DNA, 25 bp, Saccharomyces pastorianus
aggaatgtatcttatgggccaatgg

SEQ ID NO: 124872 - DNA, 25 bp, Saccharomyces pastorianus
agtttccttagcactttggatcatt

SEQ ID NO: 124873 - DNA, 25 bp, Saccharomyces pastorianus
aatgccgtcgatgggaatcttatct

SEQ ID NO: 124874 - DNA, 25 bp, Saccharomyces pastorianus
taaaaactcattaccaccagctctg

SEQ ID NO: 124875 - DNA, 25 bp, Saccharomyces pastorianus
caagtttagctttatccacgggtgt

SEQ ID NO: 124876 - DNA, 25 bp, Saccharomyces pastorianus
aacgagcaccattccttatttatct

SEQ ID NO: 124877 - DNA, 25 bp, Saccharomyces pastorianus
gttaccagcgttgagattttcccaa

SEQ ID NO: 124878 - DNA, 25 bp, Saccharomyces pastorianus
ggacaaaatgaacctggccctttag

SEQ ID NO: 124879 - DNA, 25 bp, Saccharomyces pastorianus
ggtccttgcttccaaatctgttata

SEQ ID NO: 124880 - DNA, 25 bp, Saccharomyces pastorianus
agccgcgagctgttgattctcaaga

SEQ ID NO: 124881 - DNA, 25 bp, Saccharomyces pastorianus
tggccctttagttttccatttgaat

SEQ ID NO: 124882 - DNA, 25 bp, Saccharomyces pastorianus
aaaattcatcatcctccttaatgcc

SEQ ID NO: 124883 - DNA, 25 bp, Saccharomyces pastorianus
gattttctgttggaacatcctctaa

SEQ ID NO: 124884 - DNA, 25 bp, Saccharomyces pastorianus
gttgatcggtttactatcttccatt

SEQ ID NO: 124885 - DNA, 25 bp, Saccharomyces pastorianus
tgctcctgcattgggttttctttaa

SEQ ID NO: 124886 - DNA, 25 bp, Saccharomyces pastorianus
taatgcatggcggtagcgttatcaa

SEQ ID NO: 124887 - DNA, 25 bp, Saccharomyces pastorianus
ttaccatattgttctactgctcctg

SEQ ID NO: 124888 - DNA, 25 bp, Saccharomyces pastorianus
gactacttgctggtcaacacatggc

SEQ ID NO: 124889 - DNA, 25 bp, Saccharomyces pastorianus
ggtgttatcttgacaattgccggat

SEQ ID NO: 124890 - DNA, 25 bp, Saccharomyces pastorianus
gattgtcgttatatccgtggcactc

SEQ ID NO: 124891 - DNA, 25 bp, Saccharomyces pastorianus
tcttctacggatgacgtcacgtcga

SEQ ID NO: 124892 - DNA, 25 bp, Saccharomyces pastorianus
gcggatcttcattaatcgggttgct

SEQ ID NO: 124893 - DNA, 25 bp, Saccharomyces pastorianus
gtagcccttgtagcgattcatggaa

SEQ ID NO: 124894 - DNA, 25 bp, Saccharomyces pastorianus
aggtaggaatactgccgtcttcttc

SEQ ID NO: 124895 - DNA, 25 bp, Saccharomyces pastorianus
aagcccactgaccacggaaagacag

SEQ ID NO: 124896 - DNA, 25 bp, Saccharomyces pastorianus
gatgacgatttatcttcgagcttaa

SEQ ID NO: 124897 - DNA, 25 bp, Saccharomyces pastorianus
ggatcctcccaaatttgagtggaat

SEQ ID NO: 124898 - DNA, 25 bp, Saccharomyces pastorianus
aaaggagcgacagctttggacaatg

SEQ ID NO: 124899 - DNA, 25 bp, Saccharomyces pastorianus
tattaaatgtatccgcaagcccact

SEQ ID NO: 124900 - DNA, 25 bp, Saccharomyces pastorianus
gaacacttagagcttttacaactac

SEQ ID NO: 124901 - DNA, 25 bp, Saccharomyces pastorianus
aagtgttagtaaatctgcgttggaa

SEQ ID NO: 124902 - DNA, 25 bp, Saccharomyces pastorianus
acagggattcttggatcctcccaaa

SEQ ID NO: 124903 - DNA, 25 bp, Saccharomyces pastorianus
aaatgaggcgttacaacatttgcaa

SEQ ID NO: 124904 - DNA, 25 bp, Saccharomyces pastorianus
atatacccctactttacaaaatgat

SEQ ID NO: 124905 - DNA, 25 bp, Saccharomyces pastorianus
aatggagtgcggtagttcagatgac

SEQ ID NO: 124906 - DNA, 25 bp, Saccharomyces pastorianus
gacacatggccacaataatatctga

SEQ ID NO: 124907 - DNA, 25 bp, Saccharomyces pastorianus
tactacgccattcccttaatgaggg

SEQ ID NO: 124908 - DNA, 25 bp, Saccharomyces pastorianus
gaattcatcttcatccttatcatgt

SEQ ID NO: 124909 - DNA, 25 bp, Saccharomyces pastorianus
aagaggcctcgctgaattcatcttc

SEQ ID NO: 124910 - DNA, 25 bp, Saccharomyces pastorianus
tattgctactctacctgcagacgat

SEQ ID NO: 124911 - DNA, 25 bp, Saccharomyces pastorianus
aatctggatttctacagccgacgct

SEQ ID NO: 124912 - DNA, 25 bp, Saccharomyces pastorianus
gtggtcatcgctgcctagtgaagat

SEQ ID NO: 124913 - DNA, 25 bp, Saccharomyces pastorianus
gaccggattcgtgatatggctagac

SEQ ID NO: 124914 - DNA, 25 bp, Saccharomyces pastorianus
gaagatccctctatgctagtagcaa

SEQ ID NO: 124915 - DNA, 25 bp, Saccharomyces pastorianus
gccgacgctggatgttattgctact

SEQ ID NO: 124916 - DNA, 25 bp, Saccharomyces pastorianus
aaaggttcaataggccgtgttatgt

SEQ ID NO: 124917 - DNA, 25 bp, Saccharomyces pastorianus
atcagttcaaacaggctattgccca

SEQ ID NO: 124918 - DNA, 25 bp, Saccharomyces pastorianus
gcatccagtgataaacttgacgcca

SEQ ID NO: 124919 - DNA, 25 bp, Saccharomyces pastorianus
gcatacagagtggttcaatgtgcct

SEQ ID NO: 124920 - DNA, 25 bp, Saccharomyces pastorianus
ggagctaccatcagtactaagactt

SEQ ID NO: 124921 - DNA, 25 bp, Saccharomyces pastorianus
ttccagatcctaaggtgccaaccct

SEQ ID NO: 124922 - DNA, 25 bp, Saccharomyces pastorianus
tgcccatttcattatcaagcttaca

SEQ ID NO: 124923 - DNA, 25 bp, Saccharomyces pastorianus
gccaacccttcgcacttataaagat

SEQ ID NO: 124924 - DNA, 25 bp, Saccharomyces pastorianus
aatgtgcctgtattggagctaccat

SEQ ID NO: 124925 - DNA, 25 bp, Saccharomyces pastorianus
aactaccagatatcgaaagcgctat

SEQ ID NO: 124926 - DNA, 25 bp, Saccharomyces pastorianus
gataaaagtcactcacacaagcctt

SEQ ID NO: 124927 - DNA, 25 bp, Saccharomyces pastorianus
gaatggcaaaccacatgcaagcatc

SEQ ID NO: 124928 - DNA, 25 bp, Saccharomyces pastorianus
tatttccaccaattcggtagttcat

SEQ ID NO: 124929 - DNA, 25 bp, Saccharomyces pastorianus
ggcaatttagctccagtaccatgat

SEQ ID NO: 124930 - DNA, 25 bp, Saccharomyces pastorianus
tatggcttcgcctagtaccgataat

SEQ ID NO: 124931 - DNA, 25 bp, Saccharomyces pastorianus
aactcgcttaaattccatgccaacg

SEQ ID NO: 124932 - DNA, 25 bp, Saccharomyces pastorianus
gagtgattttggcagaccaccgaac

SEQ ID NO: 124933 - DNA, 25 bp, Saccharomyces pastorianus
aactgaatatgccacatgccaccaa

SEQ ID NO: 124934 - DNA, 25 bp, Saccharomyces pastorianus
gtttaaacaatcacgttcccacaca

SEQ ID NO: 124935 - DNA, 25 bp, Saccharomyces pastorianus
acgttcccacacaaaggcaatttag

SEQ ID NO: 124936 - DNA, 25 bp, Saccharomyces pastorianus
agtccctgctcctagtttaaacaat

SEQ ID NO: 124937 - DNA, 25 bp, Saccharomyces pastorianus
tgccaccaacccaaacaatactttt

SEQ ID NO: 124938 - DNA, 25 bp, Saccharomyces pastorianus
ggtacaagtacaaccttttcactca

SEQ ID NO: 124939 - DNA, 25 bp, Saccharomyces pastorianus
ttggcacttctaattatcatgtggg

SEQ ID NO: 124940 - DNA, 25 bp, Saccharomyces pastorianus
aatatcggtcgcattcatttgtttg

SEQ ID NO: 124941 - DNA, 25 bp, Saccharomyces pastorianus
ggcactgtgcagaccattattgaag

SEQ ID NO: 124942 - DNA, 25 bp, Saccharomyces pastorianus
acttctgtagatcaccaatggcgga

SEQ ID NO: 124943 - DNA, 25 bp, Saccharomyces pastorianus
tgtaagcaacatggcgtcaagatta

SEQ ID NO: 124944 - DNA, 25 bp, Saccharomyces pastorianus
gctaaagtttgccttttaggtgatg

SEQ ID NO: 124945 - DNA, 25 bp, Saccharomyces pastorianus
gaacactaatgatggcactgtgcag

SEQ ID NO: 124946 - DNA, 25 bp, Saccharomyces pastorianus
caacctgaaggttctaaagctaaag

SEQ ID NO: 124947 - DNA, 25 bp, Saccharomyces pastorianus
gattgattcatttggcacttctaat

SEQ ID NO: 124948 - DNA, 25 bp, Saccharomyces pastorianus
gtcgcattcatttgtttgggtaact

SEQ ID NO: 124949 - DNA, 25 bp, Saccharomyces pastorianus
ggatgaatccaacattaatagccta

SEQ ID NO: 124950 - DNA, 25 bp, Saccharomyces pastorianus
ttcatctgatattcgtaagctggct

SEQ ID NO: 124951 - DNA, 25 bp, Saccharomyces pastorianus
agaagtgcatgattctcctttcctt

SEQ ID NO: 124952 - DNA, 25 bp, Saccharomyces pastorianus
aattagacttggtactggcttcatc

SEQ ID NO: 124953 - DNA, 25 bp, Saccharomyces pastorianus
aagacggccaatacggaccaaatat

SEQ ID NO: 124954 - DNA, 25 bp, Saccharomyces pastorianus
gctgagaggccggtacgttacgtta

SEQ ID NO: 124955 - DNA, 25 bp, Saccharomyces pastorianus
cacacatattcttctctaccaatga

SEQ ID NO: 124956 - DNA, 25 bp, Saccharomyces pastorianus
aattcactttgaaccgtcgctgtac

SEQ ID NO: 124957 - DNA, 25 bp, Saccharomyces pastorianus
atgactagtgtccaaacgaacgaag

SEQ ID NO: 124958 - DNA, 25 bp, Saccharomyces pastorianus
tgaacattctacaccatcaatcggg

SEQ ID NO: 124959 - DNA, 25 bp, Saccharomyces pastorianus
gacagcacccttttgtttgctgaga

SEQ ID NO: 124960 - DNA, 25 bp, Saccharomyces pastorianus
tgaggaacccactctaaccacgatg

SEQ ID NO: 124961 - DNA, 25 bp, Saccharomyces pastorianus
ttgtctctccatttggacttttgtt

SEQ ID NO: 124962 - DNA, 25 bp, Saccharomyces pastorianus
gggttcagtttcactgcatgctctg

SEQ ID NO: 124963 - DNA, 25 bp, Saccharomyces pastorianus
gtactctacttctataaacgtgatg

SEQ ID NO: 124964 - DNA, 25 bp, Saccharomyces pastorianus
atgctctgctttttgtctctccatt

SEQ ID NO: 124965 - DNA, 25 bp, Saccharomyces pastorianus
gttatccatgattactccgggttta

SEQ ID NO: 124966 - DNA, 25 bp, Saccharomyces pastorianus
gggcatacctactatggttgaaatc

SEQ ID NO: 124967 - DNA, 25 bp, Saccharomyces pastorianus
ttataactctaaacacggtgtggaa

SEQ ID NO: 124968 - DNA, 25 bp, Saccharomyces pastorianus
tcctaagctcaatcagttatccatg

SEQ ID NO: 124969 - DNA, 25 bp, Saccharomyces pastorianus
ggacttttgttgtactctacttcta

SEQ ID NO: 124970 - DNA, 25 bp, Saccharomyces pastorianus
aaagatactctattcctaagctcaa

SEQ ID NO: 124971 - DNA, 25 bp, Saccharomyces pastorianus
gaacggtattgtgctttataactct

SEQ ID NO: 124972 - DNA, 25 bp, Saccharomyces pastorianus
cagtatccagagtcatgaaacagct

SEQ ID NO: 124973 - DNA, 25 bp, Saccharomyces pastorianus
gacctgccagatgacttaaattcaa

SEQ ID NO: 124974 - DNA, 25 bp, Saccharomyces pastorianus
tttattccagtaaagcggcatgtgg

SEQ ID NO: 124975 - DNA, 25 bp, Saccharomyces pastorianus
gatgaacaagagtatcggatcaatg

SEQ ID NO: 124976 - DNA, 25 bp, Saccharomyces pastorianus
agacaatgtgaaccttactagaagt

SEQ ID NO: 124977 - DNA, 25 bp, Saccharomyces pastorianus
ttcactatctccaacagtatccaga

SEQ ID NO: 124978 - DNA, 25 bp, Saccharomyces pastorianus
agaagttttcactatctccaacagt

SEQ ID NO: 124979 - DNA, 25 bp, Saccharomyces pastorianus
gcggcatgtggaagacctgccagat

SEQ ID NO: 124980 - DNA, 25 bp, Saccharomyces pastorianus
gccatggtggagatttttcgatgaa

SEQ ID NO: 124981 - DNA, 25 bp, Saccharomyces pastorianus
gagattattgtagatccttacaaaa

SEQ ID NO: 124982 - DNA, 25 bp, Saccharomyces pastorianus
agccgataggccatggtggagattt

SEQ ID NO: 124983 - DNA, 25 bp, Saccharomyces pastorianus
agtaacttggactgccgagcgggtc

SEQ ID NO: 124984 - DNA, 25 bp, Saccharomyces pastorianus
cagtatccggtctggaaatggctca

SEQ ID NO: 124985 - DNA, 25 bp, Saccharomyces pastorianus
gatgcagtttggtttgggccaccaa

SEQ ID NO: 124986 - DNA, 25 bp, Saccharomyces pastorianus
gtggcatctggcgttaagttcgttg

SEQ ID NO: 124987 - DNA, 25 bp, Saccharomyces pastorianus
tgttttcgaaacagcgcgtagcact

SEQ ID NO: 124988 - DNA, 25 bp, Saccharomyces pastorianus
gaagccaaggccctagtggcatctg

SEQ ID NO: 124989 - DNA, 25 bp, Saccharomyces pastorianus
atacaggccgcacaagagtactcta

SEQ ID NO: 124990 - DNA, 25 bp, Saccharomyces pastorianus
gttcgttgccgaaggtgctaacatg

SEQ ID NO: 124991 - DNA, 25 bp, Saccharomyces pastorianus
caaaggcagctaacctgggcggcgt

SEQ ID NO: 124992 - DNA, 25 bp, Saccharomyces pastorianus
caaacaccttgccatcattggtcaa

SEQ ID NO: 124993 - DNA, 25 bp, Saccharomyces pastorianus
tacacccgaggctatttctgttttc

SEQ ID NO: 124994 - DNA, 25 bp, Saccharomyces pastorianus
ggttcggcctagtttactatacgca

SEQ ID NO: 124995 - DNA, 25 bp, Saccharomyces pastorianus
gtgcatcatctgtgagacgggcatt

SEQ ID NO: 124996 - DNA, 25 bp, Saccharomyces pastorianus
tgtggtgtctttatccgattcgaag

SEQ ID NO: 124997 - DNA, 25 bp, Saccharomyces pastorianus
gtgaaattggctacctattcggcgc

SEQ ID NO: 124998 - DNA, 25 bp, Saccharomyces pastorianus
gacgggcattacttctgagcaaatt

SEQ ID NO: 124999 - DNA, 25 bp, Saccharomyces pastorianus
aaacgtgtgacaatctccggaagtg

SEQ ID NO: 125000 - DNA, 25 bp, Saccharomyces pastorianus
aagtacgttgcaggagcacgcccat

SEQ ID NO: 125001 - DNA, 25 bp, Saccharomyces pastorianus
aaattcacgatatcgcttccgccaa

SEQ ID NO: 125002 - DNA, 25 bp, Saccharomyces pastorianus
ttccgccaagatccgtttcaagtcg

SEQ ID NO: 125003 - DNA, 25 bp, Saccharomyces pastorianus
gtggctcacttatcaggccggaggc

SEQ ID NO: 125004 - DNA, 25 bp, Saccharomyces pastorianus
taaggacacagacgtgcccgcagga

SEQ ID NO: 125005 - DNA, 25 bp, Saccharomyces pastorianus
tcaagagctgctagacaatcggatg

SEQ ID NO: 125006 - DNA, 25 bp, Saccharomyces pastorianus
aacacagtgcagaagactcctacaa

SEQ ID NO: 125007 - DNA, 25 bp, Saccharomyces pastorianus
aagagctggcttttttgaacggagg

SEQ ID NO: 125008 - DNA, 25 bp, Saccharomyces pastorianus
gacaaactggccaactctatttcat

SEQ ID NO: 125009 - DNA, 25 bp, Saccharomyces pastorianus
agacaatcggatgctcttgagccag

SEQ ID NO: 125010 - DNA, 25 bp, Saccharomyces pastorianus
actctatttcatccatggacaggga

SEQ ID NO: 125011 - DNA, 25 bp, Saccharomyces pastorianus
atcgtctggacggtaaaattgccaa

SEQ ID NO: 125012 - DNA, 25 bp, Saccharomyces pastorianus
ggccttgaattttaccaatcgtctg

SEQ ID NO: 125013 - DNA, 25 bp, Saccharomyces pastorianus
gggatcgtttagtgaaggccttgaa

SEQ ID NO: 125014 - DNA, 25 bp, Saccharomyces pastorianus
tctcgtgccaagtacattcaaaata

SEQ ID NO: 125015 - DNA, 25 bp, Saccharomyces pastorianus
ggagatcccagaagtttttgactct

SEQ ID NO: 125016 - DNA, 25 bp, Saccharomyces pastorianus
aatttgtgcttactgcggccgtcgt

SEQ ID NO: 125017 - DNA, 25 bp, Saccharomyces pastorianus
aacgaaagagaatcccctaatccat

SEQ ID NO: 125018 - DNA, 25 bp, Saccharomyces pastorianus
agatcgcatcttagagcaacctctg

SEQ ID NO: 125019 - DNA, 25 bp, Saccharomyces pastorianus
tgaaatttgtgcttactgcggccgt

SEQ ID NO: 125020 - DNA, 25 bp, Saccharomyces pastorianus
ccctaatccatttgaccgcattata

SEQ ID NO: 125021 - DNA, 25 bp, Saccharomyces pastorianus
gggctgataaataatgccaagcaca

SEQ ID NO: 125022 - DNA, 25 bp, Saccharomyces pastorianus
agataccagggctgataaataatgc

SEQ ID NO: 125023 - DNA, 25 bp, Saccharomyces pastorianus
gagcaacctctgaaatttgtgctta

SEQ ID NO: 125024 - DNA, 25 bp, Saccharomyces pastorianus
ttactgcggccgtcgtgctcttgac

SEQ ID NO: 125025 - DNA, 25 bp, Saccharomyces pastorianus
aagagaatcccctaatccatttgac

SEQ ID NO: 125026 - DNA, 25 bp, Saccharomyces pastorianus
ttgaccgcattatagatcgcatctt

SEQ ID NO: 125027 - DNA, 25 bp, Saccharomyces pastorianus
acgagacccattgatgattccacat

SEQ ID NO: 125028 - DNA, 25 bp, Saccharomyces pastorianus
gaaaccgcatgattgggatgatcgc

SEQ ID NO: 125029 - DNA, 25 bp, Saccharomyces pastorianus
gggctgataaagaattccaagtaca

SEQ ID NO: 125030 - DNA, 25 bp, Saccharomyces pastorianus
gagacccattgatgattccacatcc

SEQ ID NO: 125031 - DNA, 25 bp, Saccharomyces pastorianus
gcgaaaccgcatgattgggatgatc

SEQ ID NO: 125032 - DNA, 25 bp, Saccharomyces pastorianus
aaccgcatgattgggatgatcgcat

SEQ ID NO: 125033 - DNA, 25 bp, Saccharomyces pastorianus
gcagggctgataaagaattccaagt

SEQ ID NO: 125034 - DNA, 25 bp, Saccharomyces pastorianus
agacccattgatgattccacatcca

SEQ ID NO: 125035 - DNA, 25 bp, Saccharomyces pastorianus
gaattccaagtacaaaggtccaggc

SEQ ID NO: 125036 - DNA, 25 bp, Saccharomyces pastorianus
gaacgagacccattgatgattccac

SEQ ID NO: 125037 - DNA, 25 bp, Saccharomyces pastorianus
atagcagggctgataaagaattcca

SEQ ID NO: 125038 - DNA, 25 bp, Saccharomyces pastorianus
gtgaagctcagtgatcgggatgaac

SEQ ID NO: 125039 - DNA, 25 bp, Saccharomyces pastorianus
acgagacccattgatgattccacat

SEQ ID NO: 125040 - DNA, 25 bp, Saccharomyces pastorianus
ggatgatcgcatccgaatcccagat

SEQ ID NO: 125041 - DNA, 25 bp, Saccharomyces pastorianus
gcgaaaccgcatgattgggatgatc

SEQ ID NO: 125042 - DNA, 25 bp, Saccharomyces pastorianus
aaccgcatgattgggatgatcgcat

SEQ ID NO: 125043 - DNA, 25 bp, Saccharomyces pastorianus
atcgggatgaacgagacccattgat

SEQ ID NO: 125044 - DNA, 25 bp, Saccharomyces pastorianus
gcagggctgataaagaattccaagt

SEQ ID NO: 125045 - DNA, 25 bp, Saccharomyces pastorianus
agacccattgatgattccacatcca

SEQ ID NO: 125046 - DNA, 25 bp, Saccharomyces pastorianus
gaattccaagtacaaaggtccaggc

SEQ ID NO: 125047 - DNA, 25 bp, Saccharomyces pastorianus
gaacgagacccattgatgattccac

SEQ ID NO: 125048 - DNA, 25 bp, Saccharomyces pastorianus
gaatcccagatcctgaggcggtgaa

SEQ ID NO: 125049 - DNA, 25 bp, Saccharomyces pastorianus
cagccaagtcttattcccaataatt

SEQ ID NO: 125050 - DNA, 25 bp, Saccharomyces pastorianus
gtctctcatcagccaagtcttattc

SEQ ID NO: 125051 - DNA, 25 bp, Saccharomyces pastorianus
cggtctctcatcagccaagtcttat

SEQ ID NO: 125052 - DNA, 25 bp, Saccharomyces pastorianus
catcagccaagtcttattcccaata

SEQ ID NO: 125053 - DNA, 25 bp, Saccharomyces pastorianus
tcatcagccaagtcttattcccaat

SEQ ID NO: 125054 - DNA, 25 bp, Saccharomyces pastorianus
ggtctctcatcagccaagtcttatt

SEQ ID NO: 125055 - DNA, 25 bp, Saccharomyces pastorianus
atcagccaagtcttattcccaataa

SEQ ID NO: 125056 - DNA, 25 bp, Saccharomyces pastorianus
tcagccaagtcttattcccaataat

SEQ ID NO: 125057 - DNA, 25 bp, Saccharomyces pastorianus
tctcatcagccaagtcttattccca

SEQ ID NO: 125058 - DNA, 25 bp, Saccharomyces pastorianus
tctctcatcagccaagtcttattcc

SEQ ID NO: 125059 - DNA, 25 bp, Saccharomyces pastorianus
agacatcactcttcaacatcgacga

SEQ ID NO: 125060 - DNA, 25 bp, Saccharomyces pastorianus
cagccgccagacacacgatagtatg

SEQ ID NO: 125061 - DNA, 25 bp, Saccharomyces pastorianus
atgtcacccaccacaactatgaata

SEQ ID NO: 125062 - DNA, 25 bp, Saccharomyces pastorianus
tttcggatgtcctgcctaaacggag

SEQ ID NO: 125063 - DNA, 25 bp, Saccharomyces pastorianus
aaacggaggaccacttcatcaagtt

SEQ ID NO: 125064 - DNA, 25 bp, Saccharomyces pastorianus
acgacttcatcgacagccaaatcat

SEQ ID NO: 125065 - DNA, 25 bp, Saccharomyces pastorianus
gtagcgagatcttcacacttttggt

SEQ ID NO: 125066 - DNA, 25 bp, Saccharomyces pastorianus
tccagaatcatccatactcttcagg

SEQ ID NO: 125067 - DNA, 25 bp, Saccharomyces pastorianus
aacaacatttcaccaatcaccaaga

SEQ ID NO: 125068 - DNA, 25 bp, Saccharomyces pastorianus
aatacaccgaatcatcacaacagcc

SEQ ID NO: 125069 - DNA, 25 bp, Saccharomyces pastorianus
agtatggcttctttctcaagttctc

SEQ ID NO: 125070 - DNA, 25 bp, Saccharomyces pastorianus
tcaactctgtgaagccgcaatttaa

SEQ ID NO: 125071 - DNA, 25 bp, Saccharomyces pastorianus
atggaggacactttactgactttta

SEQ ID NO: 125072 - DNA, 25 bp, Saccharomyces pastorianus
agctgtttcaacaaggtgcgcccct

SEQ ID NO: 125073 - DNA, 25 bp, Saccharomyces pastorianus
gagttgtacatgttgttccctaatt

SEQ ID NO: 125074 - DNA, 25 bp, Saccharomyces pastorianus
atcagcctcagcagtcttcgaagaa

SEQ ID NO: 125075 - DNA, 25 bp, Saccharomyces pastorianus
ccctctgtatacttttcaactctgt

SEQ ID NO: 125076 - DNA, 25 bp, Saccharomyces pastorianus
catggattgcgaccctgtgacacaa

SEQ ID NO: 125077 - DNA, 25 bp, Saccharomyces pastorianus
acttcccagctggtcaaagtgctag

SEQ ID NO: 125078 - DNA, 25 bp, Saccharomyces pastorianus
atatccgacgtttttgccaactcca

SEQ ID NO: 125079 - DNA, 25 bp, Saccharomyces pastorianus
gctaatgaattccagccctactatt

SEQ ID NO: 125080 - DNA, 25 bp, Saccharomyces pastorianus
gagcttttcactatatccgacgttt

SEQ ID NO: 125081 - DNA, 25 bp, Saccharomyces pastorianus
tgtgcagtccacacttttctaatga

SEQ ID NO: 125082 - DNA, 25 bp, Saccharomyces pastorianus
tcttggatttctacggagggcccga

SEQ ID NO: 125083 - DNA, 25 bp, Saccharomyces pastorianus
attgcgaacggcgaatcccggagat

SEQ ID NO: 125084 - DNA, 25 bp, Saccharomyces pastorianus
tgtttccgtcccattttagccaaga

SEQ ID NO: 125085 - DNA, 25 bp, Saccharomyces pastorianus
gattgtactccgaggcgagcgcaaa

SEQ ID NO: 125086 - DNA, 25 bp, Saccharomyces pastorianus
gaatgcctactttccacgtggatgt

SEQ ID NO: 125087 - DNA, 25 bp, Saccharomyces pastorianus
gatgaaagccacgtgcagcctaagt

SEQ ID NO: 125088 - DNA, 25 bp, Saccharomyces pastorianus
gcagtgagtccatgtgcagtccaca

SEQ ID NO: 125089 - DNA, 25 bp, Saccharomyces pastorianus
aagaactaccattcgacaggcacga

SEQ ID NO: 125090 - DNA, 25 bp, Saccharomyces pastorianus
aaaccgggcgtattgagccctcgtg

SEQ ID NO: 125091 - DNA, 25 bp, Saccharomyces pastorianus
tccgtcctgccctagatagtctaga

SEQ ID NO: 125092 - DNA, 25 bp, Saccharomyces pastorianus
aaccatcaacctgtccaagaagtaa

SEQ ID NO: 125093 - DNA, 25 bp, Saccharomyces pastorianus
tactctacgtgtgggaactcctatt

SEQ ID NO: 125094 - DNA, 25 bp, Saccharomyces pastorianus
gttgctagatccgattggctgctat

SEQ ID NO: 125095 - DNA, 25 bp, Saccharomyces pastorianus
gcagacgtcatctatcatttatttg

SEQ ID NO: 125096 - DNA, 25 bp, Saccharomyces pastorianus
tgtgaaaaccgaccctactacaaag

SEQ ID NO: 125097 - DNA, 25 bp, Saccharomyces pastorianus
tctagaagatccctccggtcaacaa

SEQ ID NO: 125098 - DNA, 25 bp, Saccharomyces pastorianus
gctccagagtatgccgtgatgttat

SEQ ID NO: 125099 - DNA, 25 bp, Saccharomyces pastorianus
gatacattatactccttggtttcaa

SEQ ID NO: 125100 - DNA, 25 bp, Saccharomyces pastorianus
ggaactcctatttgcgctgtgaaaa

SEQ ID NO: 125101 - DNA, 25 bp, Saccharomyces pastorianus
tggtgttgccgtccgtctagaagat

SEQ ID NO: 125102 - DNA, 25 bp, Saccharomyces pastorianus
aagaagggccaaaccgctgctggtg

SEQ ID NO: 125103 - DNA, 25 bp, Saccharomyces pastorianus
aacgcctccgaagccattaaatctg

SEQ ID NO: 125104 - DNA, 25 bp, Saccharomyces pastorianus
gctttattgtcttccggtaacgtca

SEQ ID NO: 125105 - DNA, 25 bp, Saccharomyces pastorianus
gaaagactcggaagttgtacctgat

SEQ ID NO: 125106 - DNA, 25 bp, Saccharomyces pastorianus
gaacaactcaggaaaacgcctccga

SEQ ID NO: 125107 - DNA, 25 bp, Saccharomyces pastorianus
atttggctcttggtgatgatgacga

SEQ ID NO: 125108 - DNA, 25 bp, Saccharomyces pastorianus
gaagaaacgcaagaatccaccgcaa

SEQ ID NO: 125109 - DNA, 25 bp, Saccharomyces pastorianus
agttgccggtctggccaagaaggat

SEQ ID NO: 125110 - DNA, 25 bp, Saccharomyces pastorianus
gttgtacctgatgacgaactcaaag

SEQ ID NO: 125111 - DNA, 25 bp, Saccharomyces pastorianus
gtaacgtcaaagttgccggtctggc

SEQ ID NO: 125112 - DNA, 25 bp, Saccharomyces pastorianus
gaatccaccgcaagccatgaaaatg

SEQ ID NO: 125113 - DNA, 25 bp, Saccharomyces pastorianus
gaaagaagacgtgccgctttattgt

SEQ ID NO: 125114 - DNA, 25 bp, Saccharomyces pastorianus
agatgacacttccagagaagcaagt

SEQ ID NO: 125115 - DNA, 25 bp, Saccharomyces pastorianus
cagagaagcaagtgcaagtgctgaa

SEQ ID NO: 125116 - DNA, 25 bp, Saccharomyces pastorianus
cttccagagaagcaagtgcaagtgc

SEQ ID NO: 125117 - DNA, 25 bp, Saccharomyces pastorianus
atgacacttccagagaagcaagtgc

SEQ ID NO: 125118 - DNA, 25 bp, Saccharomyces pastorianus
aagcaagtgcaagtgctgaaggtgc

SEQ ID NO: 125119 - DNA, 25 bp, Saccharomyces pastorianus
agtgcaagtgctgaaggtgctgagg

SEQ ID NO: 125120 - DNA, 25 bp, Saccharomyces pastorianus
cagatgacacttccagagaagcaag

SEQ ID NO: 125121 - DNA, 25 bp, Saccharomyces pastorianus
acttccagagaagcaagtgcaagtg

SEQ ID NO: 125122 - DNA, 25 bp, Saccharomyces pastorianus
ttccagagaagcaagtgcaagtgct

SEQ ID NO: 125123 - DNA, 25 bp, Saccharomyces pastorianus
agcaagtgcaagtgctgaaggtgct

SEQ ID NO: 125124 - DNA, 25 bp, Saccharomyces pastorianus
gacacttccagagaagcaagtgcaa

SEQ ID NO: 125125 - DNA, 25 bp, Saccharomyces pastorianus
aaagcctgtaggatcgacgttaata

SEQ ID NO: 125126 - DNA, 25 bp, Saccharomyces pastorianus
cccgttagcatctccgaatttgaat

SEQ ID NO: 125127 - DNA, 25 bp, Saccharomyces pastorianus
aacattgcatccattgaggcgattc

SEQ ID NO: 125128 - DNA, 25 bp, Saccharomyces pastorianus
tgaggaacgagctgcaccctgctga

SEQ ID NO: 125129 - DNA, 25 bp, Saccharomyces pastorianus
tccacatcgcgccaagaagttctca

SEQ ID NO: 125130 - DNA, 25 bp, Saccharomyces pastorianus
gttctcgctcaaactctaaggttac

SEQ ID NO: 125131 - DNA, 25 bp, Saccharomyces pastorianus
ggaccgacgcccaaaaagcctgtag

SEQ ID NO: 125132 - DNA, 25 bp, Saccharomyces pastorianus
aggcgattcatgatgctcctcaata

SEQ ID NO: 125133 - DNA, 25 bp, Saccharomyces pastorianus
aagactattccaagctttcgagaag

SEQ ID NO: 125134 - DNA, 25 bp, Saccharomyces pastorianus
ttatctacgcttcctacagacagta

SEQ ID NO: 125135 - DNA, 25 bp, Saccharomyces pastorianus
ggaaacaggctctctacaataacaa

SEQ ID NO: 125136 - DNA, 25 bp, Saccharomyces pastorianus
catcatattgcttgttgtaatcatc

SEQ ID NO: 125137 - DNA, 25 bp, Saccharomyces pastorianus
gtgaaagattaacgtccattgaaga

SEQ ID NO: 125138 - DNA, 25 bp, Saccharomyces pastorianus
aaagccgataacctagcggtctctg

SEQ ID NO: 125139 - DNA, 25 bp, Saccharomyces pastorianus
gtaatcatcatattgcttgttgtaa

SEQ ID NO: 125140 - DNA, 25 bp, Saccharomyces pastorianus
gtgccaatagggtcagaaaagccat

SEQ ID NO: 125141 - DNA, 25 bp, Saccharomyces pastorianus
aatgaagatgtgtctggctttagta

SEQ ID NO: 125142 - DNA, 25 bp, Saccharomyces pastorianus
tagggtcagaaaagccatgtggtac

SEQ ID NO: 125143 - DNA, 25 bp, Saccharomyces pastorianus
ataacctagcggtctctgcccaagg

SEQ ID NO: 125144 - DNA, 25 bp, Saccharomyces pastorianus
ggtctctgcccaaggctttaagagg

SEQ ID NO: 125145 - DNA, 25 bp, Saccharomyces pastorianus
gtgtctggctttagtaatcatcata

SEQ ID NO: 125146 - DNA, 25 bp, Saccharomyces pastorianus
aagccatgtggtacaaggatctaaa

SEQ ID NO: 125147 - DNA, 25 bp, Saccharomyces pastorianus
aagtcaaggactgcggaactacaag

SEQ ID NO: 125148 - DNA, 25 bp, Saccharomyces pastorianus
gaacgaccccagaatgtacagtcta

SEQ ID NO: 125149 - DNA, 25 bp, Saccharomyces pastorianus
gtctaagtcaaggactgcggaacta

SEQ ID NO: 125150 - DNA, 25 bp, Saccharomyces pastorianus
gactgcggaactacaagctgtaagt

SEQ ID NO: 125151 - DNA, 25 bp, Saccharomyces pastorianus
caaggactgcggaactacaagctgt

SEQ ID NO: 125152 - DNA, 25 bp, Saccharomyces pastorianus
aggactgcggaactacaagctgtaa

SEQ ID NO: 125153 - DNA, 25 bp, Saccharomyces pastorianus
gaccccagaatgtacagtctaagtc

SEQ ID NO: 125154 - DNA, 25 bp, Saccharomyces pastorianus
cagaatgtacagtctaagtcaagga

SEQ ID NO: 125155 - DNA, 25 bp, Saccharomyces pastorianus
acgaccccagaatgtacagtctaag

SEQ ID NO: 125156 - DNA, 25 bp, Saccharomyces pastorianus
agctgtaagtacagaaagccacaga

SEQ ID NO: 125157 - DNA, 25 bp, Saccharomyces pastorianus
gcggaactacaagctgtaagtacag

SEQ ID NO: 125158 - DNA, 25 bp, Saccharomyces pastorianus
atttgccttttcacaggctgaagag

SEQ ID NO: 125159 - DNA, 25 bp, Saccharomyces pastorianus
ggccgcacgttcagcaatttcaaaa

SEQ ID NO: 125160 - DNA, 25 bp, Saccharomyces pastorianus
gaaaggctgctttggtaactaatca

SEQ ID NO: 125161 - DNA, 25 bp, Saccharomyces pastorianus
ggttaaacacacgtatggatctggt

SEQ ID NO: 125162 - DNA, 25 bp, Saccharomyces pastorianus
ggctaactttgatcgttttaccaat

SEQ ID NO: 125163 - DNA, 25 bp, Saccharomyces pastorianus
ggatctggtgtattttggctaactt

SEQ ID NO: 125164 - DNA, 25 bp, Saccharomyces pastorianus
ttcttcccaatttatgcttctatat

SEQ ID NO: 125165 - DNA, 25 bp, Saccharomyces pastorianus
aattcaccttaattgccattcctgg

SEQ ID NO: 125166 - DNA, 25 bp, Saccharomyces pastorianus
ccattcctggttccctcttattttg

SEQ ID NO: 125167 - DNA, 25 bp, Saccharomyces pastorianus
gcttctatatttcctcatgctaaca

SEQ ID NO: 125168 - DNA, 25 bp, Saccharomyces pastorianus
acaatatcagcgactctaggccgca

SEQ ID NO: 125169 - DNA, 25 bp, Saccharomyces pastorianus
gttccagaaactatccacacattac

SEQ ID NO: 125170 - DNA, 25 bp, Saccharomyces pastorianus
aagattatttgctaactgtggcgaa

SEQ ID NO: 125171 - DNA, 25 bp, Saccharomyces pastorianus
acattggtatgagttgccgtttatt

SEQ ID NO: 125172 - DNA, 25 bp, Saccharomyces pastorianus
taggctttgccttggaaccagaatt

SEQ ID NO: 125173 - DNA, 25 bp, Saccharomyces pastorianus
gaagctagacgaagccgcaaatcta

SEQ ID NO: 125174 - DNA, 25 bp, Saccharomyces pastorianus
tgatatgaataccttagcgctcgtc

SEQ ID NO: 125175 - DNA, 25 bp, Saccharomyces pastorianus
tatatgttgccgtgtatctccacta

SEQ ID NO: 125176 - DNA, 25 bp, Saccharomyces pastorianus
tagcgctcgtcattgatgggaagtc

SEQ ID NO: 125177 - DNA, 25 bp, Saccharomyces pastorianus
aaacgagcatcaattgtcaacacat

SEQ ID NO: 125178 - DNA, 25 bp, Saccharomyces pastorianus
atgcatctgagggtttgcggacgtt

SEQ ID NO: 125179 - DNA, 25 bp, Saccharomyces pastorianus
atgggaagtcattaggctttgcctt

SEQ ID NO: 125180 - DNA, 25 bp, Saccharomyces pastorianus
atcattctagccttaagttcttcag

SEQ ID NO: 125181 - DNA, 25 bp, Saccharomyces pastorianus
aagaagattccctcgctagacagga

SEQ ID NO: 125182 - DNA, 25 bp, Saccharomyces pastorianus
gaacgagaccttatctggcattgat

SEQ ID NO: 125183 - DNA, 25 bp, Saccharomyces pastorianus
gtttatacacgttgcagaccactgc

SEQ ID NO: 125184 - DNA, 25 bp, Saccharomyces pastorianus
gtcgtatatctttcggacctatcag

SEQ ID NO: 125185 - DNA, 25 bp, Saccharomyces pastorianus
aactctgtgaatccactggtgggtt

SEQ ID NO: 125186 - DNA, 25 bp, Saccharomyces pastorianus
ttgcgtccctttcatcgtcgtatat

SEQ ID NO: 125187 - DNA, 25 bp, Saccharomyces pastorianus
gcagaccactgcaggacatttcaga

SEQ ID NO: 125188 - DNA, 25 bp, Saccharomyces pastorianus
tggcgtctgattgaaccaggcgact

SEQ ID NO: 125189 - DNA, 25 bp, Saccharomyces pastorianus
accaggcgacttactgacttgggaa

SEQ ID NO: 125190 - DNA, 25 bp, Saccharomyces pastorianus
aaattcactgatgcatggcgtctga

SEQ ID NO: 125191 - DNA, 25 bp, Saccharomyces pastorianus
aaaataatgcctccaacaccggcta

SEQ ID NO: 125192 - DNA, 25 bp, Saccharomyces pastorianus
acatcgcagcgctattggtctttta

SEQ ID NO: 125193 - DNA, 25 bp, Saccharomyces pastorianus
ctacccgtcatcatatgcagtcgat

SEQ ID NO: 125194 - DNA, 25 bp, Saccharomyces pastorianus
gaaaggcgtagactacccgtcatca

SEQ ID NO: 125195 - DNA, 25 bp, Saccharomyces pastorianus
gaacgcttcaaggtacatcgacgac

SEQ ID NO: 125196 - DNA, 25 bp, Saccharomyces pastorianus
gatcagccacttgtcaaaagtcact

SEQ ID NO: 125197 - DNA, 25 bp, Saccharomyces pastorianus
aaagtcactctagtatccacactaa

SEQ ID NO: 125198 - DNA, 25 bp, Saccharomyces pastorianus
ccttctatgcttttatttcccgata

SEQ ID NO: 125199 - DNA, 25 bp, Saccharomyces pastorianus
tgccagtcctgattttcgtaaccaa

SEQ ID NO: 125200 - DNA, 25 bp, Saccharomyces pastorianus
gtacatcgacgacatcatctctaga

SEQ ID NO: 125201 - DNA, 25 bp, Saccharomyces pastorianus
gatgtatttagactgccggagaagc

SEQ ID NO: 125202 - DNA, 25 bp, Saccharomyces pastorianus
actattatatcgaaactcccgtaca

SEQ ID NO: 125203 - DNA, 25 bp, Saccharomyces pastorianus
gattttggatctgctgcgtatgtca

SEQ ID NO: 125204 - DNA, 25 bp, Saccharomyces pastorianus
gctgcgtatgtcaaaagcggaccat

SEQ ID NO: 125205 - DNA, 25 bp, Saccharomyces pastorianus
tattttgaaccgttgcgtaccgaag

SEQ ID NO: 125206 - DNA, 25 bp, Saccharomyces pastorianus
gatccaaattatggccacgttgaac

SEQ ID NO: 125207 - DNA, 25 bp, Saccharomyces pastorianus
aaacatctacacgaccagggtattg

SEQ ID NO: 125208 - DNA, 25 bp, Saccharomyces pastorianus
ggacaatagattatgctgcccctga

SEQ ID NO: 125209 - DNA, 25 bp, Saccharomyces pastorianus
tatgagggccaaccacaggatattt

SEQ ID NO: 125210 - DNA, 25 bp, Saccharomyces pastorianus
atgctgcccctgaagtcttaggagg

SEQ ID NO: 125211 - DNA, 25 bp, Saccharomyces pastorianus
tactcaagcaggttgtagcgggaat

SEQ ID NO: 125212 - DNA, 25 bp, Saccharomyces pastorianus
agcggaccatttgatgtttttgttg

SEQ ID NO: 125213 - DNA, 25 bp, Saccharomyces pastorianus
ttggttatcattttgctgagctggt

SEQ ID NO: 125214 - DNA, 25 bp, Saccharomyces pastorianus
gtatttgatcccgatgacgaccttt

SEQ ID NO: 125215 - DNA, 25 bp, Saccharomyces pastorianus
gagtataagccaatcgttagccaaa

SEQ ID NO: 125216 - DNA, 25 bp, Saccharomyces pastorianus
gcgcggtttcctccactgtgttgga

SEQ ID NO: 125217 - DNA, 25 bp, Saccharomyces pastorianus
tcctgcgttggatatcacactccat

SEQ ID NO: 125218 - DNA, 25 bp, Saccharomyces pastorianus
gattcacagtttaccttaccaggcg

SEQ ID NO: 125219 - DNA, 25 bp, Saccharomyces pastorianus
tacgtcggtgggtattgatggcctt

SEQ ID NO: 125220 - DNA, 25 bp, Saccharomyces pastorianus
gaccttttgcctatgcccatcaaag

SEQ ID NO: 125221 - DNA, 25 bp, Saccharomyces pastorianus
cgggtttgtttattgtggattcgca

SEQ ID NO: 125222 - DNA, 25 bp, Saccharomyces pastorianus
gcccatcaaagtttgcaaccacatt

SEQ ID NO: 125223 - DNA, 25 bp, Saccharomyces pastorianus
ttataatatcccatgcgcggtttcc

SEQ ID NO: 125224 - DNA, 25 bp, Saccharomyces pastorianus
gaagaacgacataccaagcattgtt

SEQ ID NO: 125225 - DNA, 25 bp, Saccharomyces pastorianus
taagaagaacgacataccaagcatt

SEQ ID NO: 125226 - DNA, 25 bp, Saccharomyces pastorianus
aaactaccaactcattactgaagaa

SEQ ID NO: 125227 - DNA, 25 bp, Saccharomyces pastorianus
acgacataccaagcattgtttctac

SEQ ID NO: 125228 - DNA, 25 bp, Saccharomyces pastorianus
gacataccaagcattgtttctactg

SEQ ID NO: 125229 - DNA, 25 bp, Saccharomyces pastorianus
cataccaagcattgtttctactgga

SEQ ID NO: 125230 - DNA, 25 bp, Saccharomyces pastorianus
gagaaaactaccaactcattactga

SEQ ID NO: 125231 - DNA, 25 bp, Saccharomyces pastorianus
ctaccaactcattactgaagaaagt

SEQ ID NO: 125232 - DNA, 25 bp, Saccharomyces pastorianus
ttgtttctactggatatttttttgc

SEQ ID NO: 125233 - DNA, 25 bp, Saccharomyces pastorianus
gaaaactaccaactcattactgaag

SEQ ID NO: 125234 - DNA, 25 bp, Saccharomyces pastorianus
gaacgacataccaagcattgtttct

SEQ ID NO: 125235 - DNA, 25 bp, Saccharomyces pastorianus
gaatctctgtcggtattgaagacac

SEQ ID NO: 125236 - DNA, 25 bp, Saccharomyces pastorianus
aagggtggtgctgaagctgcttcca

SEQ ID NO: 125237 - DNA, 25 bp, Saccharomyces pastorianus
agggtggtgctgaagctgcttccaa

SEQ ID NO: 125238 - DNA, 25 bp, Saccharomyces pastorianus
ggttagaatctctgtcggtattgaa

SEQ ID NO: 125239 - DNA, 25 bp, Saccharomyces pastorianus
acttggttagaatctctgtcggtat

SEQ ID NO: 125240 - DNA, 25 bp, Saccharomyces pastorianus
cggtattgaagacactgacgatctt

SEQ ID NO: 125241 - DNA, 25 bp, Saccharomyces pastorianus
ggaggccagagaggcctctggtgtt

SEQ ID NO: 125242 - DNA, 25 bp, Saccharomyces pastorianus
cctctggtgtttttgacgacttggt

SEQ ID NO: 125243 - DNA, 25 bp, Saccharomyces pastorianus
cagaatcaagggtggtgctgaagct

SEQ ID NO: 125244 - DNA, 25 bp, Saccharomyces pastorianus
ttgacgacttggttagaatctctgt

SEQ ID NO: 125245 - DNA, 25 bp, Saccharomyces pastorianus
tctctgtcggtattgaagacactga

SEQ ID NO: 125246 - DNA, 25 bp, Saccharomyces pastorianus
gaatctctgtcggtattgaagacac

SEQ ID NO: 125247 - DNA, 25 bp, Saccharomyces pastorianus
agggtggtgctgaagctgcttccaa

SEQ ID NO: 125248 - DNA, 25 bp, Saccharomyces pastorianus
ggttagaatctctgtcggtattgaa

SEQ ID NO: 125249 - DNA, 25 bp, Saccharomyces pastorianus
tgaagctgcttccaagttcgcctcc

SEQ ID NO: 125250 - DNA, 25 bp, Saccharomyces pastorianus
acttggttagaatctctgtcggtat

SEQ ID NO: 125251 - DNA, 25 bp, Saccharomyces pastorianus
gaatcccttggtggtatcgaatctc

SEQ ID NO: 125252 - DNA, 25 bp, Saccharomyces pastorianus
gaatctctattggaagtgcccgctg

SEQ ID NO: 125253 - DNA, 25 bp, Saccharomyces pastorianus
cggtattgaagacactgacgatctt

SEQ ID NO: 125254 - DNA, 25 bp, Saccharomyces pastorianus
cctctggtgtttttgacgacttggt

SEQ ID NO: 125255 - DNA, 25 bp, Saccharomyces pastorianus
ttgacgacttggttagaatctctgt

SEQ ID NO: 125256 - DNA, 25 bp, Saccharomyces pastorianus
aatcaagggtggtgctgaagctgct

SEQ ID NO: 125257 - DNA, 25 bp, Saccharomyces pastorianus
atgcggtctctatcggtgatgtgta

SEQ ID NO: 125258 - DNA, 25 bp, Saccharomyces pastorianus
gaaacctccttcactaacgatttgt

SEQ ID NO: 125259 - DNA, 25 bp, Saccharomyces pastorianus
gactttgcatctacgtgtcagacaa

SEQ ID NO: 125260 - DNA, 25 bp, Saccharomyces pastorianus
ctttcgatgcttggttgactcacag

SEQ ID NO: 125261 - DNA, 25 bp, Saccharomyces pastorianus
aacggtcactcagacgttgtgctcg

SEQ ID NO: 125262 - DNA, 25 bp, Saccharomyces pastorianus
gaacttcggtgcagacatcgttgtc

SEQ ID NO: 125263 - DNA, 25 bp, Saccharomyces pastorianus
acaaaacgccattggtgctatccca

SEQ ID NO: 125264 - DNA, 25 bp, Saccharomyces pastorianus
tacgagcgtctgcagttcttacaaa

SEQ ID NO: 125265 - DNA, 25 bp, Saccharomyces pastorianus
cggtgtcctggccactaataacaag

SEQ ID NO: 125266 - DNA, 25 bp, Saccharomyces pastorianus
gtcgccaacgctcacggtgtggaaa

SEQ ID NO: 125267 - DNA, 25 bp, Saccharomyces pastorianus
gacgtgatcttggttgtcgacaaca

SEQ ID NO: 125268 - DNA, 25 bp, Saccharomyces pastorianus
gttcgaactaaatgagtgggagcac

SEQ ID NO: 125269 - DNA, 25 bp, Saccharomyces pastorianus
tctgtggtaccaattggatggatac

SEQ ID NO: 125270 - DNA, 25 bp, Saccharomyces pastorianus
tggatacgatgatgaagctttgagc

SEQ ID NO: 125271 - DNA, 25 bp, Saccharomyces pastorianus
attgtctggctataatctgtggtac

SEQ ID NO: 125272 - DNA, 25 bp, Saccharomyces pastorianus
gatttaaccaaatcatccgaaatag

SEQ ID NO: 125273 - DNA, 25 bp, Saccharomyces pastorianus
agctttgagcgaaagtttgcggttc

SEQ ID NO: 125274 - DNA, 25 bp, Saccharomyces pastorianus
gaaatagcgtttctccaatggaaga

SEQ ID NO: 125275 - DNA, 25 bp, Saccharomyces pastorianus
aatcatccgaaatagcgtttctcca

SEQ ID NO: 125276 - DNA, 25 bp, Saccharomyces pastorianus
gaaaaaattctgcaaattggtacta

SEQ ID NO: 125277 - DNA, 25 bp, Saccharomyces pastorianus
gaaagtttgcggttcgaactaaatg

SEQ ID NO: 125278 - DNA, 25 bp, Saccharomyces pastorianus
aattggtactagattgtctggctat

SEQ ID NO: 125279 - DNA, 25 bp, Saccharomyces pastorianus
gctgccacggaacctgaaccaaaaa

SEQ ID NO: 125280 - DNA, 25 bp, Saccharomyces pastorianus
gtcgcaaagggtcttgccaataata

SEQ ID NO: 125281 - DNA, 25 bp, Saccharomyces pastorianus
atgcatgacccaagaatgataatga

SEQ ID NO: 125282 - DNA, 25 bp, Saccharomyces pastorianus
taataagcgtccatctgtcacaaca

SEQ ID NO: 125283 - DNA, 25 bp, Saccharomyces pastorianus
gaagatcaccggttaaactcgataa

SEQ ID NO: 125284 - DNA, 25 bp, Saccharomyces pastorianus
tgcacctccctctaaagctaaagac

SEQ ID NO: 125285 - DNA, 25 bp, Saccharomyces pastorianus
ctgccgaatcgactcaagtagatgt

SEQ ID NO: 125286 - DNA, 25 bp, Saccharomyces pastorianus
aagacgtagccgaagatcaccggtt

SEQ ID NO: 125287 - DNA, 25 bp, Saccharomyces pastorianus
gggtcttgccaataatagtcaactg

SEQ ID NO: 125288 - DNA, 25 bp, Saccharomyces pastorianus
atctgtcacaacaacgcgacctgca

SEQ ID NO: 125289 - DNA, 25 bp, Saccharomyces pastorianus
aagacaactgccgaatcgactcaag

SEQ ID NO: 125290 - DNA, 25 bp, Saccharomyces pastorianus
aacttatgcattctcgtcgtcatta

SEQ ID NO: 125291 - DNA, 25 bp, Saccharomyces pastorianus
aattagaaccaatctccgacgaatt

SEQ ID NO: 125292 - DNA, 25 bp, Saccharomyces pastorianus
cggcaatataccagttttcccgaca

SEQ ID NO: 125293 - DNA, 25 bp, Saccharomyces pastorianus
atagttccatttttaccagtgtttg

SEQ ID NO: 125294 - DNA, 25 bp, Saccharomyces pastorianus
tatctgccgggacagagctggtatt

SEQ ID NO: 125295 - DNA, 25 bp, Saccharomyces pastorianus
gttaacgatattccttctacactag

SEQ ID NO: 125296 - DNA, 25 bp, Saccharomyces pastorianus
ttggaaattaagcacgtcattacgt

SEQ ID NO: 125297 - DNA, 25 bp, Saccharomyces pastorianus
aaatgtaccggatctgaattcagct

SEQ ID NO: 125298 - DNA, 25 bp, Saccharomyces pastorianus
gctggtattcactagaggctttcaa

SEQ ID NO: 125299 - DNA, 25 bp, Saccharomyces pastorianus
gacaaattctactttttgcgcgaag

SEQ ID NO: 125300 - DNA, 25 bp, Saccharomyces pastorianus
agagcgactaaactactgcacgaaa

SEQ ID NO: 125301 - DNA, 25 bp, Saccharomyces pastorianus
atatcaccttggacctctgggtcat

SEQ ID NO: 125302 - DNA, 25 bp, Saccharomyces pastorianus
caccttggacctctgggtcattgaa

SEQ ID NO: 125303 - DNA, 25 bp, Saccharomyces pastorianus
agtgttagctgggttcatagcagct

SEQ ID NO: 125304 - DNA, 25 bp, Saccharomyces pastorianus
ttcatatcaccttggacctctgggt

SEQ ID NO: 125305 - DNA, 25 bp, Saccharomyces pastorianus
gtatcagtgaaaccaacgaaagatg

SEQ ID NO: 125306 - DNA, 25 bp, Saccharomyces pastorianus
gtgcttcatatcaccttggacctct

SEQ ID NO: 125307 - DNA, 25 bp, Saccharomyces pastorianus
cttagcgtcgaaaacagtgttagct

SEQ ID NO: 125308 - DNA, 25 bp, Saccharomyces pastorianus
aatctttcagtatcagtgaaaccaa

SEQ ID NO: 125309 - DNA, 25 bp, Saccharomyces pastorianus
aaacagtgttagctgggttcatagc

SEQ ID NO: 125310 - DNA, 25 bp, Saccharomyces pastorianus
ggacctctgggtcattgaagtttct

SEQ ID NO: 125311 - DNA, 25 bp, Saccharomyces pastorianus
gtcgaaaacagtgttagctgggttc

SEQ ID NO: 125312 - DNA, 25 bp, Saccharomyces pastorianus
ggacgacttgcaacaaagcattgaa

SEQ ID NO: 125313 - DNA, 25 bp, Saccharomyces pastorianus
aggtttccttggacgacttgcaaca

SEQ ID NO: 125314 - DNA, 25 bp, Saccharomyces pastorianus
ttgctaacgtcaaggccatcgaaat

SEQ ID NO: 125315 - DNA, 25 bp, Saccharomyces pastorianus
gtttccttggacgacttgcaacaaa

SEQ ID NO: 125316 - DNA, 25 bp, Saccharomyces pastorianus
tgctaacgtcaaggccatcgaaatg

SEQ ID NO: 125317 - DNA, 25 bp, Saccharomyces pastorianus
gtcaaggccatcgaaatggaaggtt

SEQ ID NO: 125318 - DNA, 25 bp, Saccharomyces pastorianus
cttggacgacttgcaacaaagcatt

SEQ ID NO: 125319 - DNA, 25 bp, Saccharomyces pastorianus
taacgtcaaggccatcgaaatggaa

SEQ ID NO: 125320 - DNA, 25 bp, Saccharomyces pastorianus
ggccatcgaaatggaaggtttgacc

SEQ ID NO: 125321 - DNA, 25 bp, Saccharomyces pastorianus
ttccttggacgacttgcaacaaagc

SEQ ID NO: 125322 - DNA, 25 bp, Saccharomyces pastorianus
gacttgcaacaaagcattgaagaag

SEQ ID NO: 125323 - DNA, 25 bp, Saccharomyces pastorianus
gggtgctcaccaatttatcccaatt

SEQ ID NO: 125324 - DNA, 25 bp, Saccharomyces pastorianus
ggacgacttgcaacaaagcattgaa

SEQ ID NO: 125325 - DNA, 25 bp, Saccharomyces pastorianus
aggtttccttggacgacttgcaaca

SEQ ID NO: 125326 - DNA, 25 bp, Saccharomyces pastorianus
ttgctaacgtcaaggccatcgaaat

SEQ ID NO: 125327 - DNA, 25 bp, Saccharomyces pastorianus
tatcccaattggtttcggtatcaag

SEQ ID NO: 125328 - DNA, 25 bp, Saccharomyces pastorianus
gtttccttggacgacttgcaacaaa

SEQ ID NO: 125329 - DNA, 25 bp, Saccharomyces pastorianus
cttggacgacttgcaacaaagcatt

SEQ ID NO: 125330 - DNA, 25 bp, Saccharomyces pastorianus
taacgtcaaggccatcgaaatggaa

SEQ ID NO: 125331 - DNA, 25 bp, Saccharomyces pastorianus
ggccatcgaaatggaaggtttgacc

SEQ ID NO: 125332 - DNA, 25 bp, Saccharomyces pastorianus
ttccttggacgacttgcaacaaagc

SEQ ID NO: 125333 - DNA, 25 bp, Saccharomyces pastorianus
gacttgcaacaaagcattgaagaag

SEQ ID NO: 125334 - DNA, 25 bp, Saccharomyces pastorianus
caattaaacgcttctttggctgaca

SEQ ID NO: 125335 - DNA, 25 bp, Saccharomyces pastorianus
aattaaacgcttctttggctgacaa

SEQ ID NO: 125336 - DNA, 25 bp, Saccharomyces pastorianus
gaaacaattaaacgcttctttggct

SEQ ID NO: 125337 - DNA, 25 bp, Saccharomyces pastorianus
ttgaaacaattaaacgcttctttgg

SEQ ID NO: 125338 - DNA, 25 bp, Saccharomyces pastorianus
tgaaacaattaaacgcttctttggc

SEQ ID NO: 125339 - DNA, 25 bp, Saccharomyces pastorianus
attaaacgcttctttggctgacaag

SEQ ID NO: 125340 - DNA, 25 bp, Saccharomyces pastorianus
aacaattaaacgcttctttggctga

SEQ ID NO: 125341 - DNA, 25 bp, Saccharomyces pastorianus
acaattaaacgcttctttggctgac

SEQ ID NO: 125342 - DNA, 25 bp, Saccharomyces pastorianus
tttgaaacaattaaacgcttctttg

SEQ ID NO: 125343 - DNA, 25 bp, Saccharomyces pastorianus
aaacaattaaacgcttctttggctg

SEQ ID NO: 125344 - DNA, 25 bp, Saccharomyces pastorianus
tgaaactttgaaacaattaaacgct

SEQ ID NO: 125345 - DNA, 25 bp, Saccharomyces pastorianus
cgacgactgcgaaatctgcgggaaa

SEQ ID NO: 125346 - DNA, 25 bp, Saccharomyces pastorianus
tacattcctgatcactctatatggg

SEQ ID NO: 125347 - DNA, 25 bp, Saccharomyces pastorianus
gaggattcttcgcaagatcttgttc

SEQ ID NO: 125348 - DNA, 25 bp, Saccharomyces pastorianus
agacttgcctcgaaaacttggccca

SEQ ID NO: 125349 - DNA, 25 bp, Saccharomyces pastorianus
aatgtcttctgttcttgagcaccaa

SEQ ID NO: 125350 - DNA, 25 bp, Saccharomyces pastorianus
ggaaaatgtacagcgccaccaagat

SEQ ID NO: 125351 - DNA, 25 bp, Saccharomyces pastorianus
gttaggtccaagagttcctctcaga

SEQ ID NO: 125352 - DNA, 25 bp, Saccharomyces pastorianus
aaatgtcaccatggctttcaccaga

SEQ ID NO: 125353 - DNA, 25 bp, Saccharomyces pastorianus
agtgtagatctcaaaactccccttg

SEQ ID NO: 125354 - DNA, 25 bp, Saccharomyces pastorianus
cttggcccagaaacccgatgaatat

SEQ ID NO: 125355 - DNA, 25 bp, Saccharomyces pastorianus
gggtggtctatacacaccgacgact

SEQ ID NO: 125356 - DNA, 25 bp, Saccharomyces pastorianus
gaagcgtccttgtttaacgatgaca

SEQ ID NO: 125357 - DNA, 25 bp, Saccharomyces pastorianus
aataccatatgctcctctagggttc

SEQ ID NO: 125358 - DNA, 25 bp, Saccharomyces pastorianus
aatccgagtaggttcttagcaatgc

SEQ ID NO: 125359 - DNA, 25 bp, Saccharomyces pastorianus
aagccctcgactgcgttgttaatac

SEQ ID NO: 125360 - DNA, 25 bp, Saccharomyces pastorianus
gcatttatttttagtggcttctcca

SEQ ID NO: 125361 - DNA, 25 bp, Saccharomyces pastorianus
ggcttctccataaaatggccgtcga

SEQ ID NO: 125362 - DNA, 25 bp, Saccharomyces pastorianus
gtcgcttttaccctattatcattca

SEQ ID NO: 125363 - DNA, 25 bp, Saccharomyces pastorianus
ttaaagtgtctaaccaagccctcga

SEQ ID NO: 125364 - DNA, 25 bp, Saccharomyces pastorianus
agaagagccagcatttccttacttt

SEQ ID NO: 125365 - DNA, 25 bp, Saccharomyces pastorianus
aatagctctggagtcgcttttaccc

SEQ ID NO: 125366 - DNA, 25 bp, Saccharomyces pastorianus
ggccgtcgaacagcaatcataaact

SEQ ID NO: 125367 - DNA, 25 bp, Saccharomyces pastorianus
gatggtactcatgtagctgcctcat

SEQ ID NO: 125368 - DNA, 25 bp, Saccharomyces pastorianus
aatcctagtgccgaccttatctgag

SEQ ID NO: 125369 - DNA, 25 bp, Saccharomyces pastorianus
aacacacgtatattccatcctgggt

SEQ ID NO: 125370 - DNA, 25 bp, Saccharomyces pastorianus
tagctgcctcatacgagaccggaaa

SEQ ID NO: 125371 - DNA, 25 bp, Saccharomyces pastorianus
tatggagggcccacgtgcttgtatc

SEQ ID NO: 125372 - DNA, 25 bp, Saccharomyces pastorianus
aaggctccgaatccgtagtctcatg

SEQ ID NO: 125373 - DNA, 25 bp, Saccharomyces pastorianus
ggtagcttctgcagtgtcacaaggc

SEQ ID NO: 125374 - DNA, 25 bp, Saccharomyces pastorianus
aggacccttctattcactcaataag

SEQ ID NO: 125375 - DNA, 25 bp, Saccharomyces pastorianus
gtatccgacagccacgtattttttg

SEQ ID NO: 125376 - DNA, 25 bp, Saccharomyces pastorianus
ggcatctagttcttcatatacggca

SEQ ID NO: 125377 - DNA, 25 bp, Saccharomyces pastorianus
aatggccttgaccacgacagcagat

SEQ ID NO: 125378 - DNA, 25 bp, Saccharomyces pastorianus
ataggcggtgttgcggaagagacaa

SEQ ID NO: 125379 - DNA, 25 bp, Saccharomyces pastorianus
gcaagactaggaacgactgtgaaaa

SEQ ID NO: 125380 - DNA, 25 bp, Saccharomyces pastorianus
gtggtgcaagactaggaacgactgt

SEQ ID NO: 125381 - DNA, 25 bp, Saccharomyces pastorianus
ggaagagacaaaggaaactcatttc

SEQ ID NO: 125382 - DNA, 25 bp, Saccharomyces pastorianus
actttgggttataggcggtgttgcg

SEQ ID NO: 125383 - DNA, 25 bp, Saccharomyces pastorianus
gactaggaacgactgtgaaaaaact

SEQ ID NO: 125384 - DNA, 25 bp, Saccharomyces pastorianus
taagtggtgcaagactaggaacgac

SEQ ID NO: 125385 - DNA, 25 bp, Saccharomyces pastorianus
tggtgcaagactaggaacgactgtg

SEQ ID NO: 125386 - DNA, 25 bp, Saccharomyces pastorianus
gtgcaagactaggaacgactgtgaa

SEQ ID NO: 125387 - DNA, 25 bp, Saccharomyces pastorianus
taggaacgactgtgaaaaaactttg

SEQ ID NO: 125388 - DNA, 25 bp, Saccharomyces pastorianus
ggtgcaagactaggaacgactgtga

SEQ ID NO: 125389 - DNA, 25 bp, Saccharomyces pastorianus
agctaattgaatcttctttgttcat

SEQ ID NO: 125390 - DNA, 25 bp, Saccharomyces pastorianus
agaatcaatgataaaaccacagctg

SEQ ID NO: 125391 - DNA, 25 bp, Saccharomyces pastorianus
ggaggtttttatgccgccgctagta

SEQ ID NO: 125392 - DNA, 25 bp, Saccharomyces pastorianus
gcaacggcttgataaatctagcaat

SEQ ID NO: 125393 - DNA, 25 bp, Saccharomyces pastorianus
aacaatcttgccgatgtgaaattaa

SEQ ID NO: 125394 - DNA, 25 bp, Saccharomyces pastorianus
gtcaacgatcgtttgaacaagtcat

SEQ ID NO: 125395 - DNA, 25 bp, Saccharomyces pastorianus
tcttctttgttcattgacattgcta

SEQ ID NO: 125396 - DNA, 25 bp, Saccharomyces pastorianus
ctgcatttgaacaatcttgccgatg

SEQ ID NO: 125397 - DNA, 25 bp, Saccharomyces pastorianus
gggcgccaaactatctaaaattgtc

SEQ ID NO: 125398 - DNA, 25 bp, Saccharomyces pastorianus
cgaggaggtttttatgccgccgcta

SEQ ID NO: 125399 - DNA, 25 bp, Saccharomyces pastorianus
accacagctgaagaattgcaacggc

SEQ ID NO: 125400 - DNA, 25 bp, Saccharomyces pastorianus
aagtttcaagcgtcactgcagcaat

SEQ ID NO: 125401 - DNA, 25 bp, Saccharomyces pastorianus
gggactcagttttgatctgtcagct

SEQ ID NO: 125402 - DNA, 25 bp, Saccharomyces pastorianus
tgacctgttttatgcattgaatgac

SEQ ID NO: 125403 - DNA, 25 bp, Saccharomyces pastorianus
gttttcaaacttcgtgccattttag

SEQ ID NO: 125404 - DNA, 25 bp, Saccharomyces pastorianus
tatatgactacacaggacagccgga

SEQ ID NO: 125405 - DNA, 25 bp, Saccharomyces pastorianus
agcgtagtaatttgcgatcctccaa

SEQ ID NO: 125406 - DNA, 25 bp, Saccharomyces pastorianus
gtcagctatgtgaggatatccgttc

SEQ ID NO: 125407 - DNA, 25 bp, Saccharomyces pastorianus
aatcgtcgtaataaggccactgttt

SEQ ID NO: 125408 - DNA, 25 bp, Saccharomyces pastorianus
gacgatgacgttaacctcagtaaac

SEQ ID NO: 125409 - DNA, 25 bp, Saccharomyces pastorianus
gaagatatgctcattgcccggtttt

SEQ ID NO: 125410 - DNA, 25 bp, Saccharomyces pastorianus
gacgctgctattgaattaccgattg

SEQ ID NO: 125411 - DNA, 25 bp, Saccharomyces pastorianus
agccgaccagttactcaagcatgtg

SEQ ID NO: 125412 - DNA, 25 bp, Saccharomyces pastorianus
tagctctttctctgagccactaaag

SEQ ID NO: 125413 - DNA, 25 bp, Saccharomyces pastorianus
aaggaggactttaccgacgctgatt

SEQ ID NO: 125414 - DNA, 25 bp, Saccharomyces pastorianus
aattatcgagtgtctgtcgcgcaca

SEQ ID NO: 125415 - DNA, 25 bp, Saccharomyces pastorianus
gtctctaggtgccactgtagttgaa

SEQ ID NO: 125416 - DNA, 25 bp, Saccharomyces pastorianus
tacgctcagcgacatttggtctcta

SEQ ID NO: 125417 - DNA, 25 bp, Saccharomyces pastorianus
gagttcatctaagcctttgacggac

SEQ ID NO: 125418 - DNA, 25 bp, Saccharomyces pastorianus
tctaaattcagtcttgcagcggctc

SEQ ID NO: 125419 - DNA, 25 bp, Saccharomyces pastorianus
gcatgtgtggatcaactctaccgaa

SEQ ID NO: 125420 - DNA, 25 bp, Saccharomyces pastorianus
tgaaaatgatacctactacccacct

SEQ ID NO: 125421 - DNA, 25 bp, Saccharomyces pastorianus
gtctgtcgcgcacaactgttgataa

SEQ ID NO: 125422 - DNA, 25 bp, Saccharomyces pastorianus
atccggatatgtttaggtggctcta

SEQ ID NO: 125423 - DNA, 25 bp, Saccharomyces pastorianus
gacgattttggcgactttaacagac

SEQ ID NO: 125424 - DNA, 25 bp, Saccharomyces pastorianus
acatttggttttctggtgttctctc

SEQ ID NO: 125425 - DNA, 25 bp, Saccharomyces pastorianus
tgaaagtcctttaatcccagctgat

SEQ ID NO: 125426 - DNA, 25 bp, Saccharomyces pastorianus
agctgatatcgtccttccagaggat

SEQ ID NO: 125427 - DNA, 25 bp, Saccharomyces pastorianus
ggctctatggtagtccttcagatat

SEQ ID NO: 125428 - DNA, 25 bp, Saccharomyces pastorianus
ggacgatcctaaagcaaccccattg

SEQ ID NO: 125429 - DNA, 25 bp, Saccharomyces pastorianus
atttcctcctttttgtcgtgacgat

SEQ ID NO: 125430 - DNA, 25 bp, Saccharomyces pastorianus
aaacactcatgtcacggacgatcct

SEQ ID NO: 125431 - DNA, 25 bp, Saccharomyces pastorianus
gagtttgcatcataccagagttatt

SEQ ID NO: 125432 - DNA, 25 bp, Saccharomyces pastorianus
aaggatctcctgacaaccctgaaag

SEQ ID NO: 125433 - DNA, 25 bp, Saccharomyces pastorianus
gaccaagctgccacttttgaagact

SEQ ID NO: 125434 - DNA, 25 bp, Saccharomyces pastorianus
tgatgaggattctgacgccgacgaa

SEQ ID NO: 125435 - DNA, 25 bp, Saccharomyces pastorianus
atgagccaacatccttactacagag

SEQ ID NO: 125436 - DNA, 25 bp, Saccharomyces pastorianus
taactctaccggtatcgttcaatga

SEQ ID NO: 125437 - DNA, 25 bp, Saccharomyces pastorianus
gagtattctcatattcttgaccaag

SEQ ID NO: 125438 - DNA, 25 bp, Saccharomyces pastorianus
gtgatcagttctccacaggtggaaa

SEQ ID NO: 125439 - DNA, 25 bp, Saccharomyces pastorianus
gacgagagccttattgtgatcagtt

SEQ ID NO: 125440 - DNA, 25 bp, Saccharomyces pastorianus
acgccgacgaatttttcgacgcaga

SEQ ID NO: 125441 - DNA, 25 bp, Saccharomyces pastorianus
ggagactccagctaatgcgaaacca

SEQ ID NO: 125442 - DNA, 25 bp, Saccharomyces pastorianus
ggtctctggtctgttttaaagtcta

SEQ ID NO: 125443 - DNA, 25 bp, Saccharomyces pastorianus
aatcgtcccaagattggtctctggt

SEQ ID NO: 125444 - DNA, 25 bp, Saccharomyces pastorianus
tcacatgacgttacatccaagcggt

SEQ ID NO: 125445 - DNA, 25 bp, Saccharomyces pastorianus
cactcggtatgttatctattggcgg

SEQ ID NO: 125446 - DNA, 25 bp, Saccharomyces pastorianus
aacacgtatcttgaaattcttagaa

SEQ ID NO: 125447 - DNA, 25 bp, Saccharomyces pastorianus
gaatctctgacactcggtatgttat

SEQ ID NO: 125448 - DNA, 25 bp, Saccharomyces pastorianus
gatatctcgtattctagagctttag

SEQ ID NO: 125449 - DNA, 25 bp, Saccharomyces pastorianus
attcttagaatctctgacactcggt

SEQ ID NO: 125450 - DNA, 25 bp, Saccharomyces pastorianus
gggctggaaagcaaacacgtatctt

SEQ ID NO: 125451 - DNA, 25 bp, Saccharomyces pastorianus
tacatccaagcggtttttattaagg

SEQ ID NO: 125452 - DNA, 25 bp, Saccharomyces pastorianus
tatctttcagatccgatatctcgta

SEQ ID NO: 125453 - DNA, 25 bp, Saccharomyces pastorianus
agctagatgctctctttagtattat

SEQ ID NO: 125454 - DNA, 25 bp, Saccharomyces pastorianus
atgttatctattggcggttacaagc

SEQ ID NO: 125455 - DNA, 25 bp, Saccharomyces pastorianus
agatgagcacttttgggcggataat

SEQ ID NO: 125456 - DNA, 25 bp, Saccharomyces pastorianus
gtggagcgctcgataatccgtttga

SEQ ID NO: 125457 - DNA, 25 bp, Saccharomyces pastorianus
tgttgacttcaaccaagctttcgaa

SEQ ID NO: 125458 - DNA, 25 bp, Saccharomyces pastorianus
aagatcataagttccccattcgaga

SEQ ID NO: 125459 - DNA, 25 bp, Saccharomyces pastorianus
taacgacattcctactattgcagat

SEQ ID NO: 125460 - DNA, 25 bp, Saccharomyces pastorianus
ggagctcaagttttctgatatcatt

SEQ ID NO: 125461 - DNA, 25 bp, Saccharomyces pastorianus
gaagcataccagaggcgacgttagt

SEQ ID NO: 125462 - DNA, 25 bp, Saccharomyces pastorianus
gagtctgttcagtcataggaagcat

SEQ ID NO: 125463 - DNA, 25 bp, Saccharomyces pastorianus
atgacatggacggtgttgacttcaa

SEQ ID NO: 125464 - DNA, 25 bp, Saccharomyces pastorianus
agctctaatgacagtgaaacccaca

SEQ ID NO: 125465 - DNA, 25 bp, Saccharomyces pastorianus
aaaaagcacagtttctgccaaccat

SEQ ID NO: 125466 - DNA, 25 bp, Saccharomyces pastorianus
atgctggtgtcatcgctaatcctaa

SEQ ID NO: 125467 - DNA, 25 bp, Saccharomyces pastorianus
tggtgtcatcgctaatcctaagggt

SEQ ID NO: 125468 - DNA, 25 bp, Saccharomyces pastorianus
tcatcgctaatcctaagggtgaaat

SEQ ID NO: 125469 - DNA, 25 bp, Saccharomyces pastorianus
acaatgctggtgtcatcgctaatcc

SEQ ID NO: 125470 - DNA, 25 bp, Saccharomyces pastorianus
ctggtgtcatcgctaatcctaaggg

SEQ ID NO: 125471 - DNA, 25 bp, Saccharomyces pastorianus
tgctggtgtcatcgctaatcctaag

SEQ ID NO: 125472 - DNA, 25 bp, Saccharomyces pastorianus
ggtgtcatcgctaatcctaagggtg

SEQ ID NO: 125473 - DNA, 25 bp, Saccharomyces pastorianus
tcgctaatcctaagggtgaaatgaa

SEQ ID NO: 125474 - DNA, 25 bp, Saccharomyces pastorianus
gtgtcatcgctaatcctaagggtga

SEQ ID NO: 125475 - DNA, 25 bp, Saccharomyces pastorianus
tgtcatcgctaatcctaagggtgaa

SEQ ID NO: 125476 - DNA, 25 bp, Saccharomyces pastorianus
aatgctggtgtcatcgctaatccta

SEQ ID NO: 125477 - DNA, 25 bp, Saccharomyces pastorianus
ctaggtgatatggttatggccaccg

SEQ ID NO: 125478 - DNA, 25 bp, Saccharomyces pastorianus
cattatcgccgtcaaaggctctggt

SEQ ID NO: 125479 - DNA, 25 bp, Saccharomyces pastorianus
tggtgtcatcgctaatcctaagggt

SEQ ID NO: 125480 - DNA, 25 bp, Saccharomyces pastorianus
cttgtacattatcgccgtcaaaggc

SEQ ID NO: 125481 - DNA, 25 bp, Saccharomyces pastorianus
atcgccgtcaaaggctctggttcca

SEQ ID NO: 125482 - DNA, 25 bp, Saccharomyces pastorianus
aatgctggtgtcatcgctaatccta

SEQ ID NO: 125483 - DNA, 25 bp, Saccharomyces pastorianus
agacaatgctggtgtcatcgctaat

SEQ ID NO: 125484 - DNA, 25 bp, Saccharomyces pastorianus
acattatcgccgtcaaaggctctgg

SEQ ID NO: 125485 - DNA, 25 bp, Saccharomyces pastorianus
attatcgccgtcaaaggctctggtt

SEQ ID NO: 125486 - DNA, 25 bp, Saccharomyces pastorianus
gtcatcgctaatcctaagggtgaaa

SEQ ID NO: 125487 - DNA, 25 bp, Saccharomyces pastorianus
tacattatcgccgtcaaaggctctg

SEQ ID NO: 125488 - DNA, 25 bp, Saccharomyces pastorianus
cccattgtctgtaattttttctacg

SEQ ID NO: 125489 - DNA, 25 bp, Saccharomyces pastorianus
gagacatcagattccgataattccg

SEQ ID NO: 125490 - DNA, 25 bp, Saccharomyces pastorianus
aatgacctggttaattcacgaatgg

SEQ ID NO: 125491 - DNA, 25 bp, Saccharomyces pastorianus
aagaacatattgtatcagggtcgat

SEQ ID NO: 125492 - DNA, 25 bp, Saccharomyces pastorianus
taacagcgggtgtttctttcaacaa

SEQ ID NO: 125493 - DNA, 25 bp, Saccharomyces pastorianus
ggacattatttcctacaacgatatc

SEQ ID NO: 125494 - DNA, 25 bp, Saccharomyces pastorianus
cagggtcgatagtttctatattcat

SEQ ID NO: 125495 - DNA, 25 bp, Saccharomyces pastorianus
attttcgaactctttcccattgtct

SEQ ID NO: 125496 - DNA, 25 bp, Saccharomyces pastorianus
atcaacttactgtctaatgtactga

SEQ ID NO: 125497 - DNA, 25 bp, Saccharomyces pastorianus
ggattctgaattcattttccccatt

SEQ ID NO: 125498 - DNA, 25 bp, Saccharomyces pastorianus
gggatgagctattccaatctttgag

SEQ ID NO: 125499 - DNA, 25 bp, Saccharomyces pastorianus
ttcacgcgccaatggtttttgcaac

SEQ ID NO: 125500 - DNA, 25 bp, Saccharomyces pastorianus
ttagctagtaggatccaagatgcat

SEQ ID NO: 125501 - DNA, 25 bp, Saccharomyces pastorianus
gaattgagtttctttcacgcgccaa

SEQ ID NO: 125502 - DNA, 25 bp, Saccharomyces pastorianus
gtatgattggcttgtgtctcagaac

SEQ ID NO: 125503 - DNA, 25 bp, Saccharomyces pastorianus
gattattccactatcatatgtatga

SEQ ID NO: 125504 - DNA, 25 bp, Saccharomyces pastorianus
aacgtatcttagtttatgacctagt

SEQ ID NO: 125505 - DNA, 25 bp, Saccharomyces pastorianus
aactagcttgtcaatatgtggcaaa

SEQ ID NO: 125506 - DNA, 25 bp, Saccharomyces pastorianus
tttaccgtttagctacatcgaattt

SEQ ID NO: 125507 - DNA, 25 bp, Saccharomyces pastorianus
gaatctgctgaaattctttaccgtt

SEQ ID NO: 125508 - DNA, 25 bp, Saccharomyces pastorianus
atatactctgggtctattattcaag

SEQ ID NO: 125509 - DNA, 25 bp, Saccharomyces pastorianus
acagtgtgtcaccattaagccagaa

SEQ ID NO: 125510 - DNA, 25 bp, Saccharomyces pastorianus
gaggtcgctggtattgaactggtta

SEQ ID NO: 125511 - DNA, 25 bp, Saccharomyces pastorianus
tgacggctcaaagatagacccaatt

SEQ ID NO: 125512 - DNA, 25 bp, Saccharomyces pastorianus
ttaaagatgccctaccatcagtcac

SEQ ID NO: 125513 - DNA, 25 bp, Saccharomyces pastorianus
gaacgctattagaggcttgccagaa

SEQ ID NO: 125514 - DNA, 25 bp, Saccharomyces pastorianus
gtttggaagccaccgacgatgtttt

SEQ ID NO: 125515 - DNA, 25 bp, Saccharomyces pastorianus
aaagcagttgctgattggcctgtat

SEQ ID NO: 125516 - DNA, 25 bp, Saccharomyces pastorianus
gaatctgctgttcaagctggacaag

SEQ ID NO: 125517 - DNA, 25 bp, Saccharomyces pastorianus
agacctgtagatccgacattgccaa

SEQ ID NO: 125518 - DNA, 25 bp, Saccharomyces pastorianus
gatactatcgactttgaagccattg

SEQ ID NO: 125519 - DNA, 25 bp, Saccharomyces pastorianus
gaaccgaccaagacgtgttaatcat

SEQ ID NO: 125520 - DNA, 25 bp, Saccharomyces pastorianus
gatgttgttatcacctccgatgagg

SEQ ID NO: 125521 - DNA, 25 bp, Saccharomyces pastorianus
aaaagttctatctctttgggatgaa

SEQ ID NO: 125522 - DNA, 25 bp, Saccharomyces pastorianus
ttacggtcatattctagcttccact

SEQ ID NO: 125523 - DNA, 25 bp, Saccharomyces pastorianus
gtcaagtttaccgtggattcaaagt

SEQ ID NO: 125524 - DNA, 25 bp, Saccharomyces pastorianus
ggagttttccttcttcgatgggcct

SEQ ID NO: 125525 - DNA, 25 bp, Saccharomyces pastorianus
tattgttccaagatacgctaccatg

SEQ ID NO: 125526 - DNA, 25 bp, Saccharomyces pastorianus
aatgacccagctgtgaccattggtt

SEQ ID NO: 125527 - DNA, 25 bp, Saccharomyces pastorianus
gattcggttgggatacacacggtgt

SEQ ID NO: 125528 - DNA, 25 bp, Saccharomyces pastorianus
tatgccttattctactgggctaacc

SEQ ID NO: 125529 - DNA, 25 bp, Saccharomyces pastorianus
gtatccatcctttatggagtccaca

SEQ ID NO: 125530 - DNA, 25 bp, Saccharomyces pastorianus
accatgacaggccaccacgtggaaa

SEQ ID NO: 125531 - DNA, 25 bp, Saccharomyces pastorianus
agatgcctttcatacttcattagaa

SEQ ID NO: 125532 - DNA, 25 bp, Saccharomyces pastorianus
tataaagcgatgtattcaaacgctg

SEQ ID NO: 125533 - DNA, 25 bp, Saccharomyces pastorianus
gatgtattcaaacgctgttgaaaag

SEQ ID NO: 125534 - DNA, 25 bp, Saccharomyces pastorianus
aagcgatgtattcaaacgctgttga

SEQ ID NO: 125535 - DNA, 25 bp, Saccharomyces pastorianus
agcgatgtattcaaacgctgttgaa

SEQ ID NO: 125536 - DNA, 25 bp, Saccharomyces pastorianus
ataaagcgatgtattcaaacgctgt

SEQ ID NO: 125537 - DNA, 25 bp, Saccharomyces pastorianus
aaagcgatgtattcaaacgctgttg

SEQ ID NO: 125538 - DNA, 25 bp, Saccharomyces pastorianus
cgatgtattcaaacgctgttgaaaa

SEQ ID NO: 125539 - DNA, 25 bp, Saccharomyces pastorianus
tgtattcaaacgctgttgaaaagaa

SEQ ID NO: 125540 - DNA, 25 bp, Saccharomyces pastorianus
gcgatgtattcaaacgctgttgaaa

SEQ ID NO: 125541 - DNA, 25 bp, Saccharomyces pastorianus
ttttataaagcgatgtattcaaacg

SEQ ID NO: 125542 - DNA, 25 bp, Saccharomyces pastorianus
taaagcgatgtattcaaacgctgtt

SEQ ID NO: 125543 - DNA, 25 bp, Saccharomyces pastorianus
tattgtgacgaatgttgcggtttac

SEQ ID NO: 125544 - DNA, 25 bp, Saccharomyces pastorianus
ggatgagccatttttggatttcccc

SEQ ID NO: 125545 - DNA, 25 bp, Saccharomyces pastorianus
gtctgacgtgcgataacattacatc

SEQ ID NO: 125546 - DNA, 25 bp, Saccharomyces pastorianus
ttcatatgggcggtgggccacaaca

SEQ ID NO: 125547 - DNA, 25 bp, Saccharomyces pastorianus
agcaattgcctgatactttaacatt

SEQ ID NO: 125548 - DNA, 25 bp, Saccharomyces pastorianus
gacttgtttcaaggcactttaacga

SEQ ID NO: 125549 - DNA, 25 bp, Saccharomyces pastorianus
aataacattcactatcctctgacgc

SEQ ID NO: 125550 - DNA, 25 bp, Saccharomyces pastorianus
ctctgacgctaaatgtttgctcttc

SEQ ID NO: 125551 - DNA, 25 bp, Saccharomyces pastorianus
atcaacagcgatagcgaaccgagta

SEQ ID NO: 125552 - DNA, 25 bp, Saccharomyces pastorianus
cggccattatgtttccctatgtaaa

SEQ ID NO: 125553 - DNA, 25 bp, Saccharomyces pastorianus
aattggctgggattgtcgttcatat

SEQ ID NO: 125554 - DNA, 25 bp, Saccharomyces pastorianus
ttggtatgggcatcacagggacatg

SEQ ID NO: 125555 - DNA, 25 bp, Saccharomyces pastorianus
gggatgtttcatcatttcaggaact

SEQ ID NO: 125556 - DNA, 25 bp, Saccharomyces pastorianus
tgttggagctgggatgtttcatcat

SEQ ID NO: 125557 - DNA, 25 bp, Saccharomyces pastorianus
aaggcgtgccaacaacgaatttgta

SEQ ID NO: 125558 - DNA, 25 bp, Saccharomyces pastorianus
gccaacaacgaatttgtagtgacaa

SEQ ID NO: 125559 - DNA, 25 bp, Saccharomyces pastorianus
agcaacgtctggaaaggcgtgccaa

SEQ ID NO: 125560 - DNA, 25 bp, Saccharomyces pastorianus
ggtatatttggtatgggcatcacag

SEQ ID NO: 125561 - DNA, 25 bp, Saccharomyces pastorianus
aacatgcctctggataaaagaagcc

SEQ ID NO: 125562 - DNA, 25 bp, Saccharomyces pastorianus
catttcaggaactaaagcaacgtct

SEQ ID NO: 125563 - DNA, 25 bp, Saccharomyces pastorianus
gccagcaagtagtggacagcttagt

SEQ ID NO: 125564 - DNA, 25 bp, Saccharomyces pastorianus
gtagtgacaaacatgcctctggata

SEQ ID NO: 125565 - DNA, 25 bp, Saccharomyces pastorianus
acaagcccaaaattagcagtgagga

SEQ ID NO: 125566 - DNA, 25 bp, Saccharomyces pastorianus
ttcttcggaatcactatttttacac

SEQ ID NO: 125567 - DNA, 25 bp, Saccharomyces pastorianus
aactcagatgacacgattcttcgga

SEQ ID NO: 125568 - DNA, 25 bp, Saccharomyces pastorianus
attcgaaataaaggactggccaaca

SEQ ID NO: 125569 - DNA, 25 bp, Saccharomyces pastorianus
aggactggccaacaataatgttagt

SEQ ID NO: 125570 - DNA, 25 bp, Saccharomyces pastorianus
gattttttaataggtctttctctat

SEQ ID NO: 125571 - DNA, 25 bp, Saccharomyces pastorianus
gtcacacattttatagacgactata

SEQ ID NO: 125572 - DNA, 25 bp, Saccharomyces pastorianus
gcagtgaggaagtcacacattttat

SEQ ID NO: 125573 - DNA, 25 bp, Saccharomyces pastorianus
tagtgaacagaaacgacaagcccaa

SEQ ID NO: 125574 - DNA, 25 bp, Saccharomyces pastorianus
taggtctttctctattaatgtaata

SEQ ID NO: 125575 - DNA, 25 bp, Saccharomyces pastorianus
cacttataacatgtagaattgccat

SEQ ID NO: 125576 - DNA, 25 bp, Saccharomyces pastorianus
gtttcttcgaattacaccatagctt

SEQ ID NO: 125577 - DNA, 25 bp, Saccharomyces pastorianus
tttatgggctactttcaccgcaatc

SEQ ID NO: 125578 - DNA, 25 bp, Saccharomyces pastorianus
atctcctttgccgtgggttaccagt

SEQ ID NO: 125579 - DNA, 25 bp, Saccharomyces pastorianus
agattgctgcgggaagtgccaccgt

SEQ ID NO: 125580 - DNA, 25 bp, Saccharomyces pastorianus
gtacgtcgaacgcatcatcaactaa

SEQ ID NO: 125581 - DNA, 25 bp, Saccharomyces pastorianus
taccagttgggtacgtcgaacgcat

SEQ ID NO: 125582 - DNA, 25 bp, Saccharomyces pastorianus
atagcggcacaatgctgtcacgcag

SEQ ID NO: 125583 - DNA, 25 bp, Saccharomyces pastorianus
gtattgggtttaggacctgctccaa

SEQ ID NO: 125584 - DNA, 25 bp, Saccharomyces pastorianus
cgcgtgcttcatacaacccaattat

SEQ ID NO: 125585 - DNA, 25 bp, Saccharomyces pastorianus
ctcagctactttactgcgttctaaa

SEQ ID NO: 125586 - DNA, 25 bp, Saccharomyces pastorianus
tagacatattgctacaaaccccgcg

SEQ ID NO: 125587 - DNA, 25 bp, Saccharomyces pastorianus
ttgtccgcacacaatttgaatagtg

SEQ ID NO: 125588 - DNA, 25 bp, Saccharomyces pastorianus
atgatggcttggaacagggcttgaa

SEQ ID NO: 125589 - DNA, 25 bp, Saccharomyces pastorianus
gatctataaatctttgagtcactct

SEQ ID NO: 125590 - DNA, 25 bp, Saccharomyces pastorianus
aacagggcttgaatcgttctttaag

SEQ ID NO: 125591 - DNA, 25 bp, Saccharomyces pastorianus
atcgttctttaagcggactggattt

SEQ ID NO: 125592 - DNA, 25 bp, Saccharomyces pastorianus
gaatcgttctttaagcggactggat

SEQ ID NO: 125593 - DNA, 25 bp, Saccharomyces pastorianus
tggcttggaacagggcttgaatcgt

SEQ ID NO: 125594 - DNA, 25 bp, Saccharomyces pastorianus
gtcactctggactagatgatggctt

SEQ ID NO: 125595 - DNA, 25 bp, Saccharomyces pastorianus
gtgccgacttgatctataaatcttt

SEQ ID NO: 125596 - DNA, 25 bp, Saccharomyces pastorianus
caatttgaatagtgccgacttgatc

SEQ ID NO: 125597 - DNA, 25 bp, Saccharomyces pastorianus
aaatctttgagtcactctggactag

SEQ ID NO: 125598 - DNA, 25 bp, Saccharomyces pastorianus
ggcggctccatgaataggtcacaat

SEQ ID NO: 125599 - DNA, 25 bp, Saccharomyces pastorianus
aattctcaatacaattccgcggacc

SEQ ID NO: 125600 - DNA, 25 bp, Saccharomyces pastorianus
cagggacaattctccatgcaaccaa

SEQ ID NO: 125601 - DNA, 25 bp, Saccharomyces pastorianus
tgttttgtgctcgtacttagggcta

SEQ ID NO: 125602 - DNA, 25 bp, Saccharomyces pastorianus
aagtttgttacaggcccatgcagca

SEQ ID NO: 125603 - DNA, 25 bp, Saccharomyces pastorianus
tcaggccgttaacaattcttccaac

SEQ ID NO: 125604 - DNA, 25 bp, Saccharomyces pastorianus
aaatgacatctgctcatcctttgca

SEQ ID NO: 125605 - DNA, 25 bp, Saccharomyces pastorianus
tagcgccagctcaacaccaaaaatt

SEQ ID NO: 125606 - DNA, 25 bp, Saccharomyces pastorianus
aaatgttcagtcagctgcgcaacaa

SEQ ID NO: 125607 - DNA, 25 bp, Saccharomyces pastorianus
aagctactttaacaccatcctcaag

SEQ ID NO: 125608 - DNA, 25 bp, Saccharomyces pastorianus
gaattccatccggttattctgccaa

SEQ ID NO: 125609 - DNA, 25 bp, Saccharomyces pastorianus
ggaaactctgtgaacgccgtggatt

SEQ ID NO: 125610 - DNA, 25 bp, Saccharomyces pastorianus
cagtcgctgctgcaagaactttaca

SEQ ID NO: 125611 - DNA, 25 bp, Saccharomyces pastorianus
atagattgttatgagctcgctggtg

SEQ ID NO: 125612 - DNA, 25 bp, Saccharomyces pastorianus
gttgatcaagagcagcatgggcaat

SEQ ID NO: 125613 - DNA, 25 bp, Saccharomyces pastorianus
gtatgcccaagaccagtcggtagca

SEQ ID NO: 125614 - DNA, 25 bp, Saccharomyces pastorianus
gctagctgctactgatgcagtcgct

SEQ ID NO: 125615 - DNA, 25 bp, Saccharomyces pastorianus
tagcgagcagctaagcgaacactgt

SEQ ID NO: 125616 - DNA, 25 bp, Saccharomyces pastorianus
aaagggctttgtcagctagctgcta

SEQ ID NO: 125617 - DNA, 25 bp, Saccharomyces pastorianus
gctcgctggtgagtggtatgcccaa

SEQ ID NO: 125618 - DNA, 25 bp, Saccharomyces pastorianus
agttccggagaggtgctaatttcaa

SEQ ID NO: 125619 - DNA, 25 bp, Saccharomyces pastorianus
gatctaaaggctcttgacggtcaat

SEQ ID NO: 125620 - DNA, 25 bp, Saccharomyces pastorianus
aatgatcctatcgttgatgctagct

SEQ ID NO: 125621 - DNA, 25 bp, Saccharomyces pastorianus
aaccaaagtagctaccccaagcatt

SEQ ID NO: 125622 - DNA, 25 bp, Saccharomyces pastorianus
ggttgcaactactccaaagtctcta

SEQ ID NO: 125623 - DNA, 25 bp, Saccharomyces pastorianus
aagtctctagccgtcgaggagttaa

SEQ ID NO: 125624 - DNA, 25 bp, Saccharomyces pastorianus
aggcacttctccttcacataatgaa

SEQ ID NO: 125625 - DNA, 25 bp, Saccharomyces pastorianus
acaaatgaacgcttttacagggacg

SEQ ID NO: 125626 - DNA, 25 bp, Saccharomyces pastorianus
aaccagtgaccctgctcaagtaagc

SEQ ID NO: 125627 - DNA, 25 bp, Saccharomyces pastorianus
gtaactccaaagctgaaccaaccaa

SEQ ID NO: 125628 - DNA, 25 bp, Saccharomyces pastorianus
gatgctagcttgtcaaaaggtccaa

SEQ ID NO: 125629 - DNA, 25 bp, Saccharomyces pastorianus
aagcaccaattccattttgcctgtt

SEQ ID NO: 125630 - DNA, 25 bp, Saccharomyces pastorianus
gaagaagcgcacaatgccttgaaaa

SEQ ID NO: 125631 - DNA, 25 bp, Saccharomyces pastorianus
tggtatcacgtaccgcgagaatatc

SEQ ID NO: 125632 - DNA, 25 bp, Saccharomyces pastorianus
tgctggtatcacgtaccgcgagaat

SEQ ID NO: 125633 - DNA, 25 bp, Saccharomyces pastorianus
attgctggtatcacgtaccgcgaga

SEQ ID NO: 125634 - DNA, 25 bp, Saccharomyces pastorianus
ctggtatcacgtaccgcgagaatat

SEQ ID NO: 125635 - DNA, 25 bp, Saccharomyces pastorianus
gctggtatcacgtaccgcgagaata

SEQ ID NO: 125636 - DNA, 25 bp, Saccharomyces pastorianus
cgattgctggtatcacgtaccgcga

SEQ ID NO: 125637 - DNA, 25 bp, Saccharomyces pastorianus
gcgattgctggtatcacgtaccgcg

SEQ ID NO: 125638 - DNA, 25 bp, Saccharomyces pastorianus
gattgctggtatcacgtaccgcgag

SEQ ID NO: 125639 - DNA, 25 bp, Saccharomyces pastorianus
gttcctcgcaagaggataagatgat

SEQ ID NO: 125640 - DNA, 25 bp, Saccharomyces pastorianus
tgcgattgctggtatcacgtaccgc

SEQ ID NO: 125641 - DNA, 25 bp, Saccharomyces pastorianus
ttgctggtatcacgtaccgcgagaa

SEQ ID NO: 125642 - DNA, 25 bp, Saccharomyces pastorianus
aatcaagggctccaaactgtctctg

SEQ ID NO: 125643 - DNA, 25 bp, Saccharomyces pastorianus
ttgctattgctggtacaggccaaat

SEQ ID NO: 125644 - DNA, 25 bp, Saccharomyces pastorianus
tatgggaccaagatattgctattgc

SEQ ID NO: 125645 - DNA, 25 bp, Saccharomyces pastorianus
atgacgctaacttgttaggcgcaga

SEQ ID NO: 125646 - DNA, 25 bp, Saccharomyces pastorianus
atgattgacgacctcatccatttca

SEQ ID NO: 125647 - DNA, 25 bp, Saccharomyces pastorianus
gaatctggtaatcccgtcaatgacg

SEQ ID NO: 125648 - DNA, 25 bp, Saccharomyces pastorianus
ggcgcagaagtcctaatcaagggct

SEQ ID NO: 125649 - DNA, 25 bp, Saccharomyces pastorianus
aactgtctctgggtgaggctttcaa

SEQ ID NO: 125650 - DNA, 25 bp, Saccharomyces pastorianus
gaacgtgccaaatcgctgttgaaat

SEQ ID NO: 125651 - DNA, 25 bp, Saccharomyces pastorianus
gaccatttctgtcactgatactgaa

SEQ ID NO: 125652 - DNA, 25 bp, Saccharomyces pastorianus
gacctcatccatttcactttgaaac

SEQ ID NO: 125653 - DNA, 25 bp, Saccharomyces pastorianus
aaagaaaactctgctgttgccgcca

SEQ ID NO: 125654 - DNA, 25 bp, Saccharomyces pastorianus
tacattgtatcttctttgccaggtt

SEQ ID NO: 125655 - DNA, 25 bp, Saccharomyces pastorianus
agagacttccaatcttacattgtat

SEQ ID NO: 125656 - DNA, 25 bp, Saccharomyces pastorianus
cttctttgccaggttctaccgataa

SEQ ID NO: 125657 - DNA, 25 bp, Saccharomyces pastorianus
gtagccactgagcataatccttccg

SEQ ID NO: 125658 - DNA, 25 bp, Saccharomyces pastorianus
acacagcctctgtcggtgttgtctt

SEQ ID NO: 125659 - DNA, 25 bp, Saccharomyces pastorianus
ctaacggtatagttgtagccactga

SEQ ID NO: 125660 - DNA, 25 bp, Saccharomyces pastorianus
ggcattgtcttccaatatctccaga

SEQ ID NO: 125661 - DNA, 25 bp, Saccharomyces pastorianus
aaggccgaagtaacgcaattatcta

SEQ ID NO: 125662 - DNA, 25 bp, Saccharomyces pastorianus
caagaggtctttggctacagctgta

SEQ ID NO: 125663 - DNA, 25 bp, Saccharomyces pastorianus
gtgctgccaacgaaaacccttataa

SEQ ID NO: 125664 - DNA, 25 bp, Saccharomyces pastorianus
acgacctgatgcatttcactctgaa

SEQ ID NO: 125665 - DNA, 25 bp, Saccharomyces pastorianus
agaagtgcttgctaagggctccaaa

SEQ ID NO: 125666 - DNA, 25 bp, Saccharomyces pastorianus
atcgccatcgctggtactggtcaaa

SEQ ID NO: 125667 - DNA, 25 bp, Saccharomyces pastorianus
ttatttcgtcgccaaattagccgct

SEQ ID NO: 125668 - DNA, 25 bp, Saccharomyces pastorianus
aaatctttggctcctacaacgcttt

SEQ ID NO: 125669 - DNA, 25 bp, Saccharomyces pastorianus
gaaattgcacttgggacagctatac

SEQ ID NO: 125670 - DNA, 25 bp, Saccharomyces pastorianus
tgccaacgacgctaacctgttaggt

SEQ ID NO: 125671 - DNA, 25 bp, Saccharomyces pastorianus
agatcgatgccgtaaccgttaaaga

SEQ ID NO: 125672 - DNA, 25 bp, Saccharomyces pastorianus
aagagacgacactttgcccaaggct

SEQ ID NO: 125673 - DNA, 25 bp, Saccharomyces pastorianus
agattgaccatttccgtgactgaca

SEQ ID NO: 125674 - DNA, 25 bp, Saccharomyces pastorianus
tgactctttcaaccatttttcgcta

SEQ ID NO: 125675 - DNA, 25 bp, Saccharomyces pastorianus
tgataatacgtcgtggaacttcacc

SEQ ID NO: 125676 - DNA, 25 bp, Saccharomyces pastorianus
agctcgttgtttgagagtcctccaa

SEQ ID NO: 125677 - DNA, 25 bp, Saccharomyces pastorianus
gagattatccaaacaatgagctatt

SEQ ID NO: 125678 - DNA, 25 bp, Saccharomyces pastorianus
aatctcctaccatttgccaacaatt

SEQ ID NO: 125679 - DNA, 25 bp, Saccharomyces pastorianus
aaattcagcctgacactgctggtgt

SEQ ID NO: 125680 - DNA, 25 bp, Saccharomyces pastorianus
cgattgtttgcctaagaatgtcttt

SEQ ID NO: 125681 - DNA, 25 bp, Saccharomyces pastorianus
ggaagatgctgcaatctcctaccat

SEQ ID NO: 125682 - DNA, 25 bp, Saccharomyces pastorianus
gtcctccaaactactccagattata

SEQ ID NO: 125683 - DNA, 25 bp, Saccharomyces pastorianus
aacgattattcgattgtttgcctaa

SEQ ID NO: 125684 - DNA, 25 bp, Saccharomyces pastorianus
gagaccttatggaagatgctgcaat

SEQ ID NO: 125685 - DNA, 25 bp, Saccharomyces pastorianus
cagtgccgtggtattagctcgttgt

SEQ ID NO: 125686 - DNA, 25 bp, Saccharomyces pastorianus
gaaatctactgatgacacgccttca

SEQ ID NO: 125687 - DNA, 25 bp, Saccharomyces pastorianus
ggaacagatccttttaatgcttaat

SEQ ID NO: 125688 - DNA, 25 bp, Saccharomyces pastorianus
ctcgttcattgtcttttggtttgga

SEQ ID NO: 125689 - DNA, 25 bp, Saccharomyces pastorianus
gaactactggatgttgctattatgc

SEQ ID NO: 125690 - DNA, 25 bp, Saccharomyces pastorianus
gtaagtccataattctcgttcattg

SEQ ID NO: 125691 - DNA, 25 bp, Saccharomyces pastorianus
gaatgccgacgatgatggcgtttcg

SEQ ID NO: 125692 - DNA, 25 bp, Saccharomyces pastorianus
gatgcatttgcctatcatggataat

SEQ ID NO: 125693 - DNA, 25 bp, Saccharomyces pastorianus
aagggattccttgactgtatatgaa

SEQ ID NO: 125694 - DNA, 25 bp, Saccharomyces pastorianus
tgacacgccttcaattccatcaaaa

SEQ ID NO: 125695 - DNA, 25 bp, Saccharomyces pastorianus
gatcgaacccttgattacttgtttt

SEQ ID NO: 125696 - DNA, 25 bp, Saccharomyces pastorianus
tataaattacctgatcgaacccttg

SEQ ID NO: 125697 - DNA, 25 bp, Saccharomyces pastorianus
aaaattaagctctggttgcgccttt

SEQ ID NO: 125698 - DNA, 25 bp, Saccharomyces pastorianus
aagaaacgactgaatctcccgcaga

SEQ ID NO: 125699 - DNA, 25 bp, Saccharomyces pastorianus
gaatctttccctaactttgacgaca

SEQ ID NO: 125700 - DNA, 25 bp, Saccharomyces pastorianus
tctcccgcagaaactactaccggaa

SEQ ID NO: 125701 - DNA, 25 bp, Saccharomyces pastorianus
ggttgcgcctttattgatgtgtcaa

SEQ ID NO: 125702 - DNA, 25 bp, Saccharomyces pastorianus
gtgtcaagaaatgaccctgccaaag

SEQ ID NO: 125703 - DNA, 25 bp, Saccharomyces pastorianus
acacttgttaatcgaatctttccct

SEQ ID NO: 125704 - DNA, 25 bp, Saccharomyces pastorianus
aaacttattcttgcctgtgtggaaa

SEQ ID NO: 125705 - DNA, 25 bp, Saccharomyces pastorianus
aaggctactccaagcgctgaagaaa

SEQ ID NO: 125706 - DNA, 25 bp, Saccharomyces pastorianus
tattgatgcgaatgccaaggctact

SEQ ID NO: 125707 - DNA, 25 bp, Saccharomyces pastorianus
gacgacattcgttcgaagaacatcg

SEQ ID NO: 125708 - DNA, 25 bp, Saccharomyces pastorianus
aggtcttggtttgcatgctgttcag

SEQ ID NO: 125709 - DNA, 25 bp, Saccharomyces pastorianus
gagtctgaaggacctcaaaccaaga

SEQ ID NO: 125710 - DNA, 25 bp, Saccharomyces pastorianus
gggtgtatccaaatggcctgtctat

SEQ ID NO: 125711 - DNA, 25 bp, Saccharomyces pastorianus
aagactaccacgtgacgcgaacgaa

SEQ ID NO: 125712 - DNA, 25 bp, Saccharomyces pastorianus
gtgatgataagcttcctggcctaat

SEQ ID NO: 125713 - DNA, 25 bp, Saccharomyces pastorianus
gatagtttctttccaccatctgaag

SEQ ID NO: 125714 - DNA, 25 bp, Saccharomyces pastorianus
gaggcggctacagagaaactatctt

SEQ ID NO: 125715 - DNA, 25 bp, Saccharomyces pastorianus
gaaactatcttctgaaaccccagct

SEQ ID NO: 125716 - DNA, 25 bp, Saccharomyces pastorianus
aaacacaggcggatttttcattact

SEQ ID NO: 125717 - DNA, 25 bp, Saccharomyces pastorianus
gattggtttactcaacctgttcttt

SEQ ID NO: 125718 - DNA, 25 bp, Saccharomyces pastorianus
gaaaccccagctctagagtctgaag

SEQ ID NO: 125719 - DNA, 25 bp, Saccharomyces pastorianus
gtttccaatcactgttcgtcattta

SEQ ID NO: 125720 - DNA, 25 bp, Saccharomyces pastorianus
tataccctaaattgcatcagatgga

SEQ ID NO: 125721 - DNA, 25 bp, Saccharomyces pastorianus
ccaaaaagtcagtgttcgccgccaa

SEQ ID NO: 125722 - DNA, 25 bp, Saccharomyces pastorianus
aagagatctcgcctattccacagga

SEQ ID NO: 125723 - DNA, 25 bp, Saccharomyces pastorianus
agaatgtcagtttgaccgagcctat

SEQ ID NO: 125724 - DNA, 25 bp, Saccharomyces pastorianus
gtcgattctcatgtaagatcccatc

SEQ ID NO: 125725 - DNA, 25 bp, Saccharomyces pastorianus
gaccgagcctattctttctagattt

SEQ ID NO: 125726 - DNA, 25 bp, Saccharomyces pastorianus
gattggctacatttgttgtcgattc

SEQ ID NO: 125727 - DNA, 25 bp, Saccharomyces pastorianus
gattcctttgttgatgcccaaaaag

SEQ ID NO: 125728 - DNA, 25 bp, Saccharomyces pastorianus
tcaaccttgcctttagctcagaatg

SEQ ID NO: 125729 - DNA, 25 bp, Saccharomyces pastorianus
gtatttctacaggttcgtttccaat

SEQ ID NO: 125730 - DNA, 25 bp, Saccharomyces pastorianus
gaagttaccggcatctacaaaaata

SEQ ID NO: 125731 - DNA, 25 bp, Saccharomyces pastorianus
gggcaatacagctaacgaaggcgaa

SEQ ID NO: 125732 - DNA, 25 bp, Saccharomyces pastorianus
atagagcggtcttggcaactggtca

SEQ ID NO: 125733 - DNA, 25 bp, Saccharomyces pastorianus
gattccccgtttttgcaacaattat

SEQ ID NO: 125734 - DNA, 25 bp, Saccharomyces pastorianus
aattatcaaagggttacgctccagg

SEQ ID NO: 125735 - DNA, 25 bp, Saccharomyces pastorianus
aattatatcatcgatggcaccgtct

SEQ ID NO: 125736 - DNA, 25 bp, Saccharomyces pastorianus
ttaaaactgcagtcgcgtgctcatt

SEQ ID NO: 125737 - DNA, 25 bp, Saccharomyces pastorianus
ggcaccgtctatctacggtcataga

SEQ ID NO: 125738 - DNA, 25 bp, Saccharomyces pastorianus
tccaggccgtctaccaagacataga

SEQ ID NO: 125739 - DNA, 25 bp, Saccharomyces pastorianus
gttacgctccaggaagctcccggaa

SEQ ID NO: 125740 - DNA, 25 bp, Saccharomyces pastorianus
aaaacattctattcgtggtgatatc

SEQ ID NO: 125741 - DNA, 25 bp, Saccharomyces pastorianus
aacctttacacaactgcaagcatcc

SEQ ID NO: 125742 - DNA, 25 bp, Saccharomyces pastorianus
ggtgccaagactattattttcccta

SEQ ID NO: 125743 - DNA, 25 bp, Saccharomyces pastorianus
gcattgtcctgaaggtgctacacct

SEQ ID NO: 125744 - DNA, 25 bp, Saccharomyces pastorianus
gggaggttgctcactttatgtagaa

SEQ ID NO: 125745 - DNA, 25 bp, Saccharomyces pastorianus
gacccaacagttgcgatgaccggtg

SEQ ID NO: 125746 - DNA, 25 bp, Saccharomyces pastorianus
caagacttgcttattcattcgccaa

SEQ ID NO: 125747 - DNA, 25 bp, Saccharomyces pastorianus
ccttcctttccctagcattgaataa

SEQ ID NO: 125748 - DNA, 25 bp, Saccharomyces pastorianus
tgaaaaggcgtctatccacttgcat

SEQ ID NO: 125749 - DNA, 25 bp, Saccharomyces pastorianus
gggttggaacctttagctgctgatt

SEQ ID NO: 125750 - DNA, 25 bp, Saccharomyces pastorianus
gtggtccatctgcaggtgtcactat

SEQ ID NO: 125751 - DNA, 25 bp, Saccharomyces pastorianus
ctgtggccgctaaaagatctggtgc

SEQ ID NO: 125752 - DNA, 25 bp, Saccharomyces pastorianus
gacgatgaccgcctttggctgaaaa

SEQ ID NO: 125753 - DNA, 25 bp, Saccharomyces pastorianus
gagacttctggaggtcactgacgat

SEQ ID NO: 125754 - DNA, 25 bp, Saccharomyces pastorianus
gaactcgtcggttcaccattaacag

SEQ ID NO: 125755 - DNA, 25 bp, Saccharomyces pastorianus
gataagctggcttacatcagagtaa

SEQ ID NO: 125756 - DNA, 25 bp, Saccharomyces pastorianus
gcatgttgacgataagctggcttac

SEQ ID NO: 125757 - DNA, 25 bp, Saccharomyces pastorianus
gatacattttcttcgtccatcagta

SEQ ID NO: 125758 - DNA, 25 bp, Saccharomyces pastorianus
gtcggttcaccattaacagtgtcaa

SEQ ID NO: 125759 - DNA, 25 bp, Saccharomyces pastorianus
atatctactgatgaactcgtcggtt

SEQ ID NO: 125760 - DNA, 25 bp, Saccharomyces pastorianus
tcttcgtccatcagtacatacatat

SEQ ID NO: 125761 - DNA, 25 bp, Saccharomyces pastorianus
agaatcttccagtttgagacttctg

SEQ ID NO: 125762 - DNA, 25 bp, Saccharomyces pastorianus
gaatattcattcctgcatgttgacg

SEQ ID NO: 125763 - DNA, 25 bp, Saccharomyces pastorianus
aagtactcagtaagtgccggtccct

SEQ ID NO: 125764 - DNA, 25 bp, Saccharomyces pastorianus
agatgacctgcttgctggccacgat

SEQ ID NO: 125765 - DNA, 25 bp, Saccharomyces pastorianus
ccggtccctttgcatttattttcat

SEQ ID NO: 125766 - DNA, 25 bp, Saccharomyces pastorianus
aacagaacaggtccaagctactcat

SEQ ID NO: 125767 - DNA, 25 bp, Saccharomyces pastorianus
atcaccacatgcttgcccaggaaaa

SEQ ID NO: 125768 - DNA, 25 bp, Saccharomyces pastorianus
tagcgcatgctatttccaaaattag

SEQ ID NO: 125769 - DNA, 25 bp, Saccharomyces pastorianus
acgttttctcaaatatcgggtctct

SEQ ID NO: 125770 - DNA, 25 bp, Saccharomyces pastorianus
atatacagatcaacctacgaccacc

SEQ ID NO: 125771 - DNA, 25 bp, Saccharomyces pastorianus
gaccaccgatgttccagatgcatta

SEQ ID NO: 125772 - DNA, 25 bp, Saccharomyces pastorianus
gaagacgccaatgacttatccagtt

SEQ ID NO: 125773 - DNA, 25 bp, Saccharomyces pastorianus
tcgggtctcttttacagcacacaaa

SEQ ID NO: 125774 - DNA, 25 bp, Saccharomyces pastorianus
aaacttggaccgaatatcagctaga

SEQ ID NO: 125775 - DNA, 25 bp, Saccharomyces pastorianus
agacgacgatcctcaatccgaattt

SEQ ID NO: 125776 - DNA, 25 bp, Saccharomyces pastorianus
aattatttgagactgcttgtgacca

SEQ ID NO: 125777 - DNA, 25 bp, Saccharomyces pastorianus
ccaaccgccggaattctaatgacaa

SEQ ID NO: 125778 - DNA, 25 bp, Saccharomyces pastorianus
gttggcgatggtagtgtcttcgact

SEQ ID NO: 125779 - DNA, 25 bp, Saccharomyces pastorianus
acgcccgacggatctggagctaaat

SEQ ID NO: 125780 - DNA, 25 bp, Saccharomyces pastorianus
gaaactcgcctttgattttccttgt

SEQ ID NO: 125781 - DNA, 25 bp, Saccharomyces pastorianus
tgggtttactttggcgcatatggat

SEQ ID NO: 125782 - DNA, 25 bp, Saccharomyces pastorianus
agtaatgaatacaacgcccgacgga

SEQ ID NO: 125783 - DNA, 25 bp, Saccharomyces pastorianus
aacaggacgctcagtgcttggtgaa

SEQ ID NO: 125784 - DNA, 25 bp, Saccharomyces pastorianus
tgtgaccagtgtaccgaggctgatt

SEQ ID NO: 125785 - DNA, 25 bp, Saccharomyces pastorianus
caatccattgactttttggttggta

SEQ ID NO: 125786 - DNA, 25 bp, Saccharomyces pastorianus
gaagaaacaacagcgagacctccta

SEQ ID NO: 125787 - DNA, 25 bp, Saccharomyces pastorianus
aacagcgagacctcctaaaggataa

SEQ ID NO: 125788 - DNA, 25 bp, Saccharomyces pastorianus
ttgacaggacatacccaaagactac

SEQ ID NO: 125789 - DNA, 25 bp, Saccharomyces pastorianus
ataccgcgattgcttatggcagatt

SEQ ID NO: 125790 - DNA, 25 bp, Saccharomyces pastorianus
gcttatggcagattttactagtatg

SEQ ID NO: 125791 - DNA, 25 bp, Saccharomyces pastorianus
ctttacgccaataccacgatacatt

SEQ ID NO: 125792 - DNA, 25 bp, Saccharomyces pastorianus
tgaagaatctttacgccaataccac

SEQ ID NO: 125793 - DNA, 25 bp, Saccharomyces pastorianus
gactacagcgagacgaaattgcatt

SEQ ID NO: 125794 - DNA, 25 bp, Saccharomyces pastorianus
cacgatacattgtgtcaatccattg

SEQ ID NO: 125795 - DNA, 25 bp, Saccharomyces pastorianus
gagcaagagcagcatataccgcgat

SEQ ID NO: 125796 - DNA, 25 bp, Saccharomyces pastorianus
acgacgtcttccgaatctgtagtag

SEQ ID NO: 125797 - DNA, 25 bp, Saccharomyces pastorianus
ataatggctctgagggtgttggtac

SEQ ID NO: 125798 - DNA, 25 bp, Saccharomyces pastorianus
aatgacctctataaccagaattcta

SEQ ID NO: 125799 - DNA, 25 bp, Saccharomyces pastorianus
gatcctgtgttacagccattcatat

SEQ ID NO: 125800 - DNA, 25 bp, Saccharomyces pastorianus
gggaatttttcagatgcctcagttg

SEQ ID NO: 125801 - DNA, 25 bp, Saccharomyces pastorianus
gaatgactgtttcaagctgagtaaa

SEQ ID NO: 125802 - DNA, 25 bp, Saccharomyces pastorianus
gaacaactcgtacaattagatcctg

SEQ ID NO: 125803 - DNA, 25 bp, Saccharomyces pastorianus
gatgcctcagttgaaaatgacctct

SEQ ID NO: 125804 - DNA, 25 bp, Saccharomyces pastorianus
cagaattctactttaacgacgtctt

SEQ ID NO: 125805 - DNA, 25 bp, Saccharomyces pastorianus
gaacctgtcacaaatgcattagatg

SEQ ID NO: 125806 - DNA, 25 bp, Saccharomyces pastorianus
cgcagaaacttgctccacattttga

SEQ ID NO: 125807 - DNA, 25 bp, Saccharomyces pastorianus
aagcattgtctattttctggcagtg

SEQ ID NO: 125808 - DNA, 25 bp, Saccharomyces pastorianus
ataccagggaactcctctatcaagg

SEQ ID NO: 125809 - DNA, 25 bp, Saccharomyces pastorianus
gagaagaatgctgcctcagccaata

SEQ ID NO: 125810 - DNA, 25 bp, Saccharomyces pastorianus
agtcagcggcgctttgaaccgggaa

SEQ ID NO: 125811 - DNA, 25 bp, Saccharomyces pastorianus
gatcctgctcgaaaacattccaaaa

SEQ ID NO: 125812 - DNA, 25 bp, Saccharomyces pastorianus
catcattatttctttgaaggccggg

SEQ ID NO: 125813 - DNA, 25 bp, Saccharomyces pastorianus
gagttgacgcacttactcgatcctg

SEQ ID NO: 125814 - DNA, 25 bp, Saccharomyces pastorianus
gaagtgctgtcgtttcttgaatata

SEQ ID NO: 125815 - DNA, 25 bp, Saccharomyces pastorianus
atatcacctaagtagcagcctgcta

SEQ ID NO: 125816 - DNA, 25 bp, Saccharomyces pastorianus
ggtgctctaacattgattactctca

SEQ ID NO: 125817 - DNA, 25 bp, Saccharomyces pastorianus
caagcttatgttgtgccctcaaatc

SEQ ID NO: 125818 - DNA, 25 bp, Saccharomyces pastorianus
agcgatgatgccgacagctcattaa

SEQ ID NO: 125819 - DNA, 25 bp, Saccharomyces pastorianus
agctgctctctccatctaaaaggtt

SEQ ID NO: 125820 - DNA, 25 bp, Saccharomyces pastorianus
atcacttcgcacaagggttcagcag

SEQ ID NO: 125821 - DNA, 25 bp, Saccharomyces pastorianus
tttcgtacacccttgagacctattt

SEQ ID NO: 125822 - DNA, 25 bp, Saccharomyces pastorianus
gatcacttaagtttcggagcggtag

SEQ ID NO: 125823 - DNA, 25 bp, Saccharomyces pastorianus
gtcaatccttttttacttcttcaga

SEQ ID NO: 125824 - DNA, 25 bp, Saccharomyces pastorianus
gagacctatttcaaaccaatcgact

SEQ ID NO: 125825 - DNA, 25 bp, Saccharomyces pastorianus
aaaatgtatctcagtcggcgctatc

SEQ ID NO: 125826 - DNA, 25 bp, Saccharomyces pastorianus
aattcttcatccatgggaagccccg

SEQ ID NO: 125827 - DNA, 25 bp, Saccharomyces pastorianus
ggtgactaactccaagtttcgtaca

SEQ ID NO: 125828 - DNA, 25 bp, Saccharomyces pastorianus
atcttctacaggttcatcgctcaaa

SEQ ID NO: 125829 - DNA, 25 bp, Saccharomyces pastorianus
agagccgacaacacgatgccttctg

SEQ ID NO: 125830 - DNA, 25 bp, Saccharomyces pastorianus
atgccttctgcagtctgatgtcata

SEQ ID NO: 125831 - DNA, 25 bp, Saccharomyces pastorianus
gaacggtcagccaattcatggaaac

SEQ ID NO: 125832 - DNA, 25 bp, Saccharomyces pastorianus
gcaaatacctccttgttctaactga

SEQ ID NO: 125833 - DNA, 25 bp, Saccharomyces pastorianus
tgtaagtgctggtgcctagcttcag

SEQ ID NO: 125834 - DNA, 25 bp, Saccharomyces pastorianus
gaaccatcgagacctttattccaga

SEQ ID NO: 125835 - DNA, 25 bp, Saccharomyces pastorianus
ctagcttcagctaatggctctattt

SEQ ID NO: 125836 - DNA, 25 bp, Saccharomyces pastorianus
catgggacttgctggatttaaaatt

SEQ ID NO: 125837 - DNA, 25 bp, Saccharomyces pastorianus
aatgctttcgtttggatggttctag

SEQ ID NO: 125838 - DNA, 25 bp, Saccharomyces pastorianus
gaggtttattttttgcatgggactt

SEQ ID NO: 125839 - DNA, 25 bp, Saccharomyces pastorianus
tttgaacgccaagctaacccaggag

SEQ ID NO: 125840 - DNA, 25 bp, Saccharomyces pastorianus
gtgaaaaccacccaacacttgcaac

SEQ ID NO: 125841 - DNA, 25 bp, Saccharomyces pastorianus
gtatcaaccaactgttactcgaaga

SEQ ID NO: 125842 - DNA, 25 bp, Saccharomyces pastorianus
aaggactcattagatttccctgaaa

SEQ ID NO: 125843 - DNA, 25 bp, Saccharomyces pastorianus
ttgatatcgacttcatcatcttctc

SEQ ID NO: 125844 - DNA, 25 bp, Saccharomyces pastorianus
gtaaaatcatccaccaagaccatta

SEQ ID NO: 125845 - DNA, 25 bp, Saccharomyces pastorianus
tagactcttcaatcaccttgtttaa

SEQ ID NO: 125846 - DNA, 25 bp, Saccharomyces pastorianus
cattgctaaatgtgccagaaggcgt

SEQ ID NO: 125847 - DNA, 25 bp, Saccharomyces pastorianus
ataggtacggtgttgacaaggactc

SEQ ID NO: 125848 - DNA, 25 bp, Saccharomyces pastorianus
acaatgatgcttctgtctctagaag

SEQ ID NO: 125849 - DNA, 25 bp, Saccharomyces pastorianus
aagcgtgtggcaccgacattgatat

SEQ ID NO: 125850 - DNA, 25 bp, Saccharomyces pastorianus
atcatcttctcccttttctaatgga

SEQ ID NO: 125851 - DNA, 25 bp, Saccharomyces pastorianus
atacatttaatactggaggcgccat

SEQ ID NO: 125852 - DNA, 25 bp, Saccharomyces pastorianus
acgtccttcaatgctttaccacaag

SEQ ID NO: 125853 - DNA, 25 bp, Saccharomyces pastorianus
gactactttcaatactggtggtgct

SEQ ID NO: 125854 - DNA, 25 bp, Saccharomyces pastorianus
acatccttcaatgctgtaccacaga

SEQ ID NO: 125855 - DNA, 25 bp, Saccharomyces pastorianus
acttcgttcagctctcaagctcaaa

SEQ ID NO: 125856 - DNA, 25 bp, Saccharomyces pastorianus
gagaactggtggtgctttgaataca

SEQ ID NO: 125857 - DNA, 25 bp, Saccharomyces pastorianus
accagttcactggtggagccatgaa

SEQ ID NO: 125858 - DNA, 25 bp, Saccharomyces pastorianus
cgcaatcccaattcggtttgacttt

SEQ ID NO: 125859 - DNA, 25 bp, Saccharomyces pastorianus
aagctcaaaacactggcggattccg

SEQ ID NO: 125860 - DNA, 25 bp, Saccharomyces pastorianus
ggtggtgttatgcaacagccccaaa

SEQ ID NO: 125861 - DNA, 25 bp, Saccharomyces pastorianus
gagcaatgatgcctcaaacgtcctt

SEQ ID NO: 125862 - DNA, 25 bp, Saccharomyces pastorianus
gtatcactcttggaacgttaccgaa

SEQ ID NO: 125863 - DNA, 25 bp, Saccharomyces pastorianus
gtttattgagcctgttcgtgacaaa

SEQ ID NO: 125864 - DNA, 25 bp, Saccharomyces pastorianus
cttcccgtgatcctgggttgagaga

SEQ ID NO: 125865 - DNA, 25 bp, Saccharomyces pastorianus
gtggatgtgccaactggttgattca

SEQ ID NO: 125866 - DNA, 25 bp, Saccharomyces pastorianus
aagcggtatcatcaagtctatcaag

SEQ ID NO: 125867 - DNA, 25 bp, Saccharomyces pastorianus
agaagccttgaattacacactggta

SEQ ID NO: 125868 - DNA, 25 bp, Saccharomyces pastorianus
aaaacttcaccaaatctccatctag

SEQ ID NO: 125869 - DNA, 25 bp, Saccharomyces pastorianus
tgacttcatggctgaatcacaggac

SEQ ID NO: 125870 - DNA, 25 bp, Saccharomyces pastorianus
tgattcagggaaaagcggtctcgtt

SEQ ID NO: 125871 - DNA, 25 bp, Saccharomyces pastorianus
gtctcgttcctgcacagtttattga

SEQ ID NO: 125872 - DNA, 25 bp, Saccharomyces pastorianus
aatataaaggtgcttcccgtgatcc

SEQ ID NO: 125873 - DNA, 25 bp, Saccharomyces pastorianus
gatgtttttcttgccggcgcaggac

SEQ ID NO: 125874 - DNA, 25 bp, Saccharomyces pastorianus
acacgatgtttttcttgccggcgca

SEQ ID NO: 125875 - DNA, 25 bp, Saccharomyces pastorianus
ttcttgccggcgcaggacaattgtc

SEQ ID NO: 125876 - DNA, 25 bp, Saccharomyces pastorianus
ccggcgcaggacaattgtctctacc

SEQ ID NO: 125877 - DNA, 25 bp, Saccharomyces pastorianus
gagacacacgatgtttttcttgccg

SEQ ID NO: 125878 - DNA, 25 bp, Saccharomyces pastorianus
gctgctctagagacacacgatgttt

SEQ ID NO: 125879 - DNA, 25 bp, Saccharomyces pastorianus
atgcaaagctgctctagagacacac

SEQ ID NO: 125880 - DNA, 25 bp, Saccharomyces pastorianus
gacacacgatgtttttcttgccggc

SEQ ID NO: 125881 - DNA, 25 bp, Saccharomyces pastorianus
ttgccggcgcaggacaattgtctct

SEQ ID NO: 125882 - DNA, 25 bp, Saccharomyces pastorianus
acgatgtttttcttgccggcgcagg

SEQ ID NO: 125883 - DNA, 25 bp, Saccharomyces pastorianus
aaagctgctctagagacacacgatg

SEQ ID NO: 125884 - DNA, 25 bp, Saccharomyces pastorianus
atttccaccgcacgttagaatgcaa

SEQ ID NO: 125885 - DNA, 25 bp, Saccharomyces pastorianus
tgaagtaggccattcactgctgggc

SEQ ID NO: 125886 - DNA, 25 bp, Saccharomyces pastorianus
atgcaaacggtgtcaatcacgattt

SEQ ID NO: 125887 - DNA, 25 bp, Saccharomyces pastorianus
tatgtgccacgccagcagttggaag

SEQ ID NO: 125888 - DNA, 25 bp, Saccharomyces pastorianus
acgatttataggtccccataggcgg

SEQ ID NO: 125889 - DNA, 25 bp, Saccharomyces pastorianus
aagtgtcgacttttcgcaccatttc

SEQ ID NO: 125890 - DNA, 25 bp, Saccharomyces pastorianus
agttggaagccctgtcaagtgtcga

SEQ ID NO: 125891 - DNA, 25 bp, Saccharomyces pastorianus
gagagccccaggaatagcgaggcta

SEQ ID NO: 125892 - DNA, 25 bp, Saccharomyces pastorianus
actgctgggcagttatgtgccacgc

SEQ ID NO: 125893 - DNA, 25 bp, Saccharomyces pastorianus
gtacatggttacctaggcggtaaag

SEQ ID NO: 125894 - DNA, 25 bp, Saccharomyces pastorianus
aggcggtaaagtgtcgctcgccgat

SEQ ID NO: 125895 - DNA, 25 bp, Saccharomyces pastorianus
gcgtgtattcagttattggccttat

SEQ ID NO: 125896 - DNA, 25 bp, Saccharomyces pastorianus
attattgccgctatatggttattta

SEQ ID NO: 125897 - DNA, 25 bp, Saccharomyces pastorianus
aacgcacgccgttcataatggatgt

SEQ ID NO: 125898 - DNA, 25 bp, Saccharomyces pastorianus
ggagaatcttgcgaacgtctcaata

SEQ ID NO: 125899 - DNA, 25 bp, Saccharomyces pastorianus
gaggatctaaaatatactaccgcca

SEQ ID NO: 125900 - DNA, 25 bp, Saccharomyces pastorianus
tatggaaggagcaacgcacgccgtt

SEQ ID NO: 125901 - DNA, 25 bp, Saccharomyces pastorianus
aattggtggtattatcaggtcggat

SEQ ID NO: 125902 - DNA, 25 bp, Saccharomyces pastorianus
ggccttattagttcaagttctggac

SEQ ID NO: 125903 - DNA, 25 bp, Saccharomyces pastorianus
aaagggcaattctggctgttaacgc

SEQ ID NO: 125904 - DNA, 25 bp, Saccharomyces pastorianus
taggtgcgccttctattccggagaa

SEQ ID NO: 125905 - DNA, 25 bp, Saccharomyces pastorianus
tcggatgaacatcgtatggattctt

SEQ ID NO: 125906 - DNA, 25 bp, Saccharomyces pastorianus
tatgacgaggaaaccaatggggacc

SEQ ID NO: 125907 - DNA, 25 bp, Saccharomyces pastorianus
cagattagaggaaggtgattatgac

SEQ ID NO: 125908 - DNA, 25 bp, Saccharomyces pastorianus
aggaaggtgattatgacgaggaaac

SEQ ID NO: 125909 - DNA, 25 bp, Saccharomyces pastorianus
gtgattatgacgaggaaaccaatgg

SEQ ID NO: 125910 - DNA, 25 bp, Saccharomyces pastorianus
gattagaggaaggtgattatgacga

SEQ ID NO: 125911 - DNA, 25 bp, Saccharomyces pastorianus
agtacagattagaggaaggtgatta

SEQ ID NO: 125912 - DNA, 25 bp, Saccharomyces pastorianus
ggtgattatgacgaggaaaccaatg

SEQ ID NO: 125913 - DNA, 25 bp, Saccharomyces pastorianus
aggtgattatgacgaggaaaccaat

SEQ ID NO: 125914 - DNA, 25 bp, Saccharomyces pastorianus
gtacagattagaggaaggtgattat

SEQ ID NO: 125915 - DNA, 25 bp, Saccharomyces pastorianus
gaaggtgattatgacgaggaaacca

SEQ ID NO: 125916 - DNA, 25 bp, Saccharomyces pastorianus
tgattatgacgaggaaaccaatggg

SEQ ID NO: 125917 - DNA, 25 bp, Saccharomyces pastorianus
tcggcgatctctctttgttggataa

SEQ ID NO: 125918 - DNA, 25 bp, Saccharomyces pastorianus
atgttcgggttgctgtggaaactac

SEQ ID NO: 125919 - DNA, 25 bp, Saccharomyces pastorianus
gcaggattcgatacggctaccgtgt

SEQ ID NO: 125920 - DNA, 25 bp, Saccharomyces pastorianus
gtggcgtttccagattaagtgactt

SEQ ID NO: 125921 - DNA, 25 bp, Saccharomyces pastorianus
ggcgtacgcatcgaattgctggatt

SEQ ID NO: 125922 - DNA, 25 bp, Saccharomyces pastorianus
atcactgatgactttagcgcgcgaa

SEQ ID NO: 125923 - DNA, 25 bp, Saccharomyces pastorianus
agggccacgttaaatatctgctttc

SEQ ID NO: 125924 - DNA, 25 bp, Saccharomyces pastorianus
taccgtgtttgccttttcaattgaa

SEQ ID NO: 125925 - DNA, 25 bp, Saccharomyces pastorianus
ttcaacataagaagggcgccgctat

SEQ ID NO: 125926 - DNA, 25 bp, Saccharomyces pastorianus
ggagctcacgggaagttgaatcact

SEQ ID NO: 125927 - DNA, 25 bp, Saccharomyces pastorianus
aacgtggagagctggcctgtaagta

SEQ ID NO: 125928 - DNA, 25 bp, Saccharomyces pastorianus
gtattttggctgatagattggttaa

SEQ ID NO: 125929 - DNA, 25 bp, Saccharomyces pastorianus
tgcccatgtccaaattctgaatcgt

SEQ ID NO: 125930 - DNA, 25 bp, Saccharomyces pastorianus
attctgaatcgtatagcctcctttt

SEQ ID NO: 125931 - DNA, 25 bp, Saccharomyces pastorianus
cttgcacctttggtattttggctga

SEQ ID NO: 125932 - DNA, 25 bp, Saccharomyces pastorianus
gattggttaaaacttctgatccaaa

SEQ ID NO: 125933 - DNA, 25 bp, Saccharomyces pastorianus
gcactggtcgtcatagtatgctttt

SEQ ID NO: 125934 - DNA, 25 bp, Saccharomyces pastorianus
atagtatgcttttttgcccatgtcc

SEQ ID NO: 125935 - DNA, 25 bp, Saccharomyces pastorianus
tttttagcccttgcacctttggtat

SEQ ID NO: 125936 - DNA, 25 bp, Saccharomyces pastorianus
gatcaccagagcactggtcgtcata

SEQ ID NO: 125937 - DNA, 25 bp, Saccharomyces pastorianus
gaatcgtatagcctcctttttagcc

SEQ ID NO: 125938 - DNA, 25 bp, Saccharomyces pastorianus
tatagcctcctttttagcccttgca

SEQ ID NO: 125939 - DNA, 25 bp, Saccharomyces pastorianus
actttttgtttgctgtcccaaatat

SEQ ID NO: 125940 - DNA, 25 bp, Saccharomyces pastorianus
cagcatgacttgctttaccttagca

SEQ ID NO: 125941 - DNA, 25 bp, Saccharomyces pastorianus
gatattggtttccttactcctttat

SEQ ID NO: 125942 - DNA, 25 bp, Saccharomyces pastorianus
ttatccctcctataacttgaaggct

SEQ ID NO: 125943 - DNA, 25 bp, Saccharomyces pastorianus
aacttctctatattcctacattcag

SEQ ID NO: 125944 - DNA, 25 bp, Saccharomyces pastorianus
atttcagcaaaatttatccctccta

SEQ ID NO: 125945 - DNA, 25 bp, Saccharomyces pastorianus
ggatcattaatgttttctgctctac

SEQ ID NO: 125946 - DNA, 25 bp, Saccharomyces pastorianus
taccttagcatccttgaatcgttca

SEQ ID NO: 125947 - DNA, 25 bp, Saccharomyces pastorianus
aatatgtttcccactattatcagga

SEQ ID NO: 125948 - DNA, 25 bp, Saccharomyces pastorianus
ttgaaggctctcgtatggatcacca

SEQ ID NO: 125949 - DNA, 25 bp, Saccharomyces pastorianus
tccttactcctttatcagcatgact

SEQ ID NO: 125950 - DNA, 25 bp, Saccharomyces pastorianus
gttccctcaacagctattgtttcca

SEQ ID NO: 125951 - DNA, 25 bp, Saccharomyces pastorianus
tattttgtcacacgttccctcaaca

SEQ ID NO: 125952 - DNA, 25 bp, Saccharomyces pastorianus
gtgtccaatcttttcttttgatact

SEQ ID NO: 125953 - DNA, 25 bp, Saccharomyces pastorianus
ggtttagcagcatatgtcttttcta

SEQ ID NO: 125954 - DNA, 25 bp, Saccharomyces pastorianus
gagaaggttcgctatatggtattga

SEQ ID NO: 125955 - DNA, 25 bp, Saccharomyces pastorianus
gtcaacactttatacactgtgtctg

SEQ ID NO: 125956 - DNA, 25 bp, Saccharomyces pastorianus
aagttgtcggatatgctaatgatac

SEQ ID NO: 125957 - DNA, 25 bp, Saccharomyces pastorianus
acactgtgtctgaagctttggaaac

SEQ ID NO: 125958 - DNA, 25 bp, Saccharomyces pastorianus
ttgtgcttgaaggtggacgtttaac

SEQ ID NO: 125959 - DNA, 25 bp, Saccharomyces pastorianus
caggtgttttttcggattgttctat

SEQ ID NO: 125960 - DNA, 25 bp, Saccharomyces pastorianus
ggagacttttggtccattgtgtcca

SEQ ID NO: 125961 - DNA, 25 bp, Saccharomyces pastorianus
gaaccctcacaacagagtattcaca

SEQ ID NO: 125962 - DNA, 25 bp, Saccharomyces pastorianus
catgatcacgagaaaggccgccgct

SEQ ID NO: 125963 - DNA, 25 bp, Saccharomyces pastorianus
ttccgagcgccatgatcacgagaaa

SEQ ID NO: 125964 - DNA, 25 bp, Saccharomyces pastorianus
ttgaaccctcacaacagagtattca

SEQ ID NO: 125965 - DNA, 25 bp, Saccharomyces pastorianus
aacagagtattcacaattaggcaac

SEQ ID NO: 125966 - DNA, 25 bp, Saccharomyces pastorianus
agagtattcacaattaggcaacctg

SEQ ID NO: 125967 - DNA, 25 bp, Saccharomyces pastorianus
agtattcacaattaggcaacctgtt

SEQ ID NO: 125968 - DNA, 25 bp, Saccharomyces pastorianus
cccttgaaccctcacaacagagtat

SEQ ID NO: 125969 - DNA, 25 bp, Saccharomyces pastorianus
ccgagcgccatgatcacgagaaagg

SEQ ID NO: 125970 - DNA, 25 bp, Saccharomyces pastorianus
ttttccgagcgccatgatcacgaga

SEQ ID NO: 125971 - DNA, 25 bp, Saccharomyces pastorianus
tttccgagcgccatgatcacgagaa

SEQ ID NO: 125972 - DNA, 25 bp, Saccharomyces pastorianus
tgaaaaggcaggctttcccaagggt

SEQ ID NO: 125973 - DNA, 25 bp, Saccharomyces pastorianus
gtgggctgcacagtagtcatcaagc

SEQ ID NO: 125974 - DNA, 25 bp, Saccharomyces pastorianus
catgccaacacaccaaagcttggta

SEQ ID NO: 125975 - DNA, 25 bp, Saccharomyces pastorianus
gcccctttcatagtctttgaggatg

SEQ ID NO: 125976 - DNA, 25 bp, Saccharomyces pastorianus
tagactttacgttcactcatccata

SEQ ID NO: 125977 - DNA, 25 bp, Saccharomyces pastorianus
atgtgtgtgcgcaaatagactttac

SEQ ID NO: 125978 - DNA, 25 bp, Saccharomyces pastorianus
gatcaagccttggaacaagccatgg

SEQ ID NO: 125979 - DNA, 25 bp, Saccharomyces pastorianus
gaggatgccgatttggatcaagcct

SEQ ID NO: 125980 - DNA, 25 bp, Saccharomyces pastorianus
agtagtcatcaagccagactctcaa

SEQ ID NO: 125981 - DNA, 25 bp, Saccharomyces pastorianus
gccgctgctttagctgtgggctgca

SEQ ID NO: 125982 - DNA, 25 bp, Saccharomyces pastorianus
tctcaaacgccgctatctgctttag

SEQ ID NO: 125983 - DNA, 25 bp, Saccharomyces pastorianus
tactttataagtatgggccgtcatt

SEQ ID NO: 125984 - DNA, 25 bp, Saccharomyces pastorianus
tttatactttataagtatgggccgt

SEQ ID NO: 125985 - DNA, 25 bp, Saccharomyces pastorianus
tattatcccgtttatactttataag

SEQ ID NO: 125986 - DNA, 25 bp, Saccharomyces pastorianus
ttatactttataagtatgggccgtc

SEQ ID NO: 125987 - DNA, 25 bp, Saccharomyces pastorianus
atcccgtttatactttataagtatg

SEQ ID NO: 125988 - DNA, 25 bp, Saccharomyces pastorianus
tcccgtttatactttataagtatgg

SEQ ID NO: 125989 - DNA, 25 bp, Saccharomyces pastorianus
gtttatactttataagtatgggccg

SEQ ID NO: 125990 - DNA, 25 bp, Saccharomyces pastorianus
actttataagtatgggccgtcatta

SEQ ID NO: 125991 - DNA, 25 bp, Saccharomyces pastorianus
gctattatcccgtttatactttata

SEQ ID NO: 125992 - DNA, 25 bp, Saccharomyces pastorianus
tatactttataagtatgggccgtca

SEQ ID NO: 125993 - DNA, 25 bp, Saccharomyces pastorianus
tatcccgtttatactttataagtat

SEQ ID NO: 125994 - DNA, 25 bp, Saccharomyces pastorianus
caatggtcctagtcgggcttcgttt

SEQ ID NO: 125995 - DNA, 25 bp, Saccharomyces pastorianus
gcctctgtctttgttcttatttggt

SEQ ID NO: 125996 - DNA, 25 bp, Saccharomyces pastorianus
atgtcgcatccgtttttgcaggcaa

SEQ ID NO: 125997 - DNA, 25 bp, Saccharomyces pastorianus
ggtatataccacttcagcttagttg

SEQ ID NO: 125998 - DNA, 25 bp, Saccharomyces pastorianus
tttggttggactgctcgagtgcatt

SEQ ID NO: 125999 - DNA, 25 bp, Saccharomyces pastorianus
tagggtgcgtacttgcttatggctt

SEQ ID NO: 126000 - DNA, 25 bp, Saccharomyces pastorianus
ttgccagttatctcggaagtttctt

SEQ ID NO: 126001 - DNA, 25 bp, Saccharomyces pastorianus
cggaagcttttttaatcgtggcaat

SEQ ID NO: 126002 - DNA, 25 bp, Saccharomyces pastorianus
ctttcgtcctagctgtctttaacat

SEQ ID NO: 126003 - DNA, 25 bp, Saccharomyces pastorianus
cgctgttgcttatggttgtttctac

SEQ ID NO: 126004 - DNA, 25 bp, Saccharomyces pastorianus
atttggctacatgctacccaacgta

SEQ ID NO: 126005 - DNA, 25 bp, Saccharomyces pastorianus
gaaaacacggtgttatcggcagtag

SEQ ID NO: 126006 - DNA, 25 bp, Saccharomyces pastorianus
aacacggtgttatcggcagtaggtg

SEQ ID NO: 126007 - DNA, 25 bp, Saccharomyces pastorianus
tgtaatttcggccacttattattgc

SEQ ID NO: 126008 - DNA, 25 bp, Saccharomyces pastorianus
tgtgaggcttcaacgaagtggaaat

SEQ ID NO: 126009 - DNA, 25 bp, Saccharomyces pastorianus
aatttcggccacttattattgcatc

SEQ ID NO: 126010 - DNA, 25 bp, Saccharomyces pastorianus
tttcggccacttattattgcatcag

SEQ ID NO: 126011 - DNA, 25 bp, Saccharomyces pastorianus
ttcggccacttattattgcatcagt

SEQ ID NO: 126012 - DNA, 25 bp, Saccharomyces pastorianus
tcaacgaagtggaaatgggccatat

SEQ ID NO: 126013 - DNA, 25 bp, Saccharomyces pastorianus
gaaattatctcaagattgctctttt

SEQ ID NO: 126014 - DNA, 25 bp, Saccharomyces pastorianus
ggccacttattattgcatcagtgat

SEQ ID NO: 126015 - DNA, 25 bp, Saccharomyces pastorianus
gcatcagtgatgacagatattatga

SEQ ID NO: 126016 - DNA, 25 bp, Saccharomyces pastorianus
aacacggtgttatcggcagtaggtg

SEQ ID NO: 126017 - DNA, 25 bp, Saccharomyces pastorianus
gaaaacacggtgttatcggcagtag

SEQ ID NO: 126018 - DNA, 25 bp, Saccharomyces pastorianus
tgtgaggcttcaacgaagtggaaat

SEQ ID NO: 126019 - DNA, 25 bp, Saccharomyces pastorianus
tttcggccacttattattgcatcag

SEQ ID NO: 126020 - DNA, 25 bp, Saccharomyces pastorianus
tcaacgaagtggaaatgggccatat

SEQ ID NO: 126021 - DNA, 25 bp, Saccharomyces pastorianus
gaaattatctcaagattgctctttt

SEQ ID NO: 126022 - DNA, 25 bp, Saccharomyces pastorianus
gatattatgaaactgcagcgatgtg

SEQ ID NO: 126023 - DNA, 25 bp, Saccharomyces pastorianus
ggccacttattattgcatcagtgat

SEQ ID NO: 126024 - DNA, 25 bp, Saccharomyces pastorianus
gtaatttcggccacttattattgca

SEQ ID NO: 126025 - DNA, 25 bp, Saccharomyces pastorianus
atatctgggatatgccttgcggaga

SEQ ID NO: 126026 - DNA, 25 bp, Saccharomyces pastorianus
gcatcagtgatgacagatattatga

SEQ ID NO: 126027 - DNA, 25 bp, Saccharomyces pastorianus
gaacagtcccaaacgttatcatcgg

SEQ ID NO: 126028 - DNA, 25 bp, Saccharomyces pastorianus
acgttatcatcggtggtacttccag

SEQ ID NO: 126029 - DNA, 25 bp, Saccharomyces pastorianus
tttctccatcttaccacgttgtaga

SEQ ID NO: 126030 - DNA, 25 bp, Saccharomyces pastorianus
gaacagtcacccatgattgtattta

SEQ ID NO: 126031 - DNA, 25 bp, Saccharomyces pastorianus
gaaagctttgttgactaattcgtac

SEQ ID NO: 126032 - DNA, 25 bp, Saccharomyces pastorianus
aattcgtacacgttttctccatctt

SEQ ID NO: 126033 - DNA, 25 bp, Saccharomyces pastorianus
gtacttccagaggtggttatactga

SEQ ID NO: 126034 - DNA, 25 bp, Saccharomyces pastorianus
gatgaacttctagattctttcaaaa

SEQ ID NO: 126035 - DNA, 25 bp, Saccharomyces pastorianus
gaattggataggcacgaacacacaa

SEQ ID NO: 126036 - DNA, 25 bp, Saccharomyces pastorianus
gtatttagcaagactggctgcccat

SEQ ID NO: 126037 - DNA, 25 bp, Saccharomyces pastorianus
agactggctgcccatatagcaaaaa

SEQ ID NO: 126038 - DNA, 25 bp, Saccharomyces pastorianus
gaacaagctgctgaaaaactaagaa

SEQ ID NO: 126039 - DNA, 25 bp, Saccharomyces pastorianus
acctcgcctcgattttaaagcaact

SEQ ID NO: 126040 - DNA, 25 bp, Saccharomyces pastorianus
gagtaatagttggtttcacatgcat

SEQ ID NO: 126041 - DNA, 25 bp, Saccharomyces pastorianus
gtgaaggaggacctcgcctcgattt

SEQ ID NO: 126042 - DNA, 25 bp, Saccharomyces pastorianus
atttctacccacctttactgagatc

SEQ ID NO: 126043 - DNA, 25 bp, Saccharomyces pastorianus
ggctcctttgaatgcgactggtgat

SEQ ID NO: 126044 - DNA, 25 bp, Saccharomyces pastorianus
gatttaacttcggaacaagctgctg

SEQ ID NO: 126045 - DNA, 25 bp, Saccharomyces pastorianus
aatgggtatccatcaggctcctttg

SEQ ID NO: 126046 - DNA, 25 bp, Saccharomyces pastorianus
acccacctttactgagatcagctac

SEQ ID NO: 126047 - DNA, 25 bp, Saccharomyces pastorianus
atgcgactggtgatgaattgagtaa

SEQ ID NO: 126048 - DNA, 25 bp, Saccharomyces pastorianus
tagttggtttcacatgcatttctac

SEQ ID NO: 126049 - DNA, 25 bp, Saccharomyces pastorianus
gcttggtgcttagaatccatcccta

SEQ ID NO: 126050 - DNA, 25 bp, Saccharomyces pastorianus
aagcccacagctccattgtatgatc

SEQ ID NO: 126051 - DNA, 25 bp, Saccharomyces pastorianus
gtttcgtcatatgttttagccccaa

SEQ ID NO: 126052 - DNA, 25 bp, Saccharomyces pastorianus
atccatccctagtgaagtttcgcaa

SEQ ID NO: 126053 - DNA, 25 bp, Saccharomyces pastorianus
attatgctgccgttaggctcgatca

SEQ ID NO: 126054 - DNA, 25 bp, Saccharomyces pastorianus
tactgatttgtttgccgattacgtc

SEQ ID NO: 126055 - DNA, 25 bp, Saccharomyces pastorianus
aagcattgactgacgatctctccag

SEQ ID NO: 126056 - DNA, 25 bp, Saccharomyces pastorianus
gaatcaacgtatattttccccaatg

SEQ ID NO: 126057 - DNA, 25 bp, Saccharomyces pastorianus
gtacagccatgggttgttccaactt

SEQ ID NO: 126058 - DNA, 25 bp, Saccharomyces pastorianus
gctcgatcaacctattttaccacag

SEQ ID NO: 126059 - DNA, 25 bp, Saccharomyces pastorianus
aaaatgctatctatgtcctggtaac

SEQ ID NO: 126060 - DNA, 25 bp, Saccharomyces pastorianus
agcctggtagatacattgatgctat

SEQ ID NO: 126061 - DNA, 25 bp, Saccharomyces pastorianus
actggaaagattgtgtaaccttgaa

SEQ ID NO: 126062 - DNA, 25 bp, Saccharomyces pastorianus
gatgctatcaatcaagagaactgga

SEQ ID NO: 126063 - DNA, 25 bp, Saccharomyces pastorianus
ggttttgcaattgagcctggtagat

SEQ ID NO: 126064 - DNA, 25 bp, Saccharomyces pastorianus
gatttcttgtctgctggttacgaag

SEQ ID NO: 126065 - DNA, 25 bp, Saccharomyces pastorianus
gtacagagccaacttatcaatttta

SEQ ID NO: 126066 - DNA, 25 bp, Saccharomyces pastorianus
aatgctaagccaagtcaaatcaata

SEQ ID NO: 126067 - DNA, 25 bp, Saccharomyces pastorianus
tggttacgaagcaagacaaggtttt

SEQ ID NO: 126068 - DNA, 25 bp, Saccharomyces pastorianus
aaggcttttcatcccgattccaata

SEQ ID NO: 126069 - DNA, 25 bp, Saccharomyces pastorianus
gacgcttattgtcaaggcttttcat

SEQ ID NO: 126070 - DNA, 25 bp, Saccharomyces pastorianus
ttataccggtgatttcttgtctgct

SEQ ID NO: 126071 - DNA, 25 bp, Saccharomyces pastorianus
aagccatatggagacactattgagt

SEQ ID NO: 126072 - DNA, 25 bp, Saccharomyces pastorianus
gagaaattgctacctttaactctac

SEQ ID NO: 126073 - DNA, 25 bp, Saccharomyces pastorianus
gccaacggtcttaggctccaaaaat

SEQ ID NO: 126074 - DNA, 25 bp, Saccharomyces pastorianus
tttcaatctgaacaagccatatgga

SEQ ID NO: 126075 - DNA, 25 bp, Saccharomyces pastorianus
gactgctggtgaagcgacgccaata

SEQ ID NO: 126076 - DNA, 25 bp, Saccharomyces pastorianus
cagtatactgtgaacgttgcccaaa

SEQ ID NO: 126077 - DNA, 25 bp, Saccharomyces pastorianus
gtcgacaaaaacatgattcctacgg

SEQ ID NO: 126078 - DNA, 25 bp, Saccharomyces pastorianus
gattcctacgggtaatatcgtcgat

SEQ ID NO: 126079 - DNA, 25 bp, Saccharomyces pastorianus
tttaactctacaaagccaacggtct

SEQ ID NO: 126080 - DNA, 25 bp, Saccharomyces pastorianus
ccaggtgatctattggtaaccatac

SEQ ID NO: 126081 - DNA, 25 bp, Saccharomyces pastorianus
cggagattatggtgcgttcaaaaaa

SEQ ID NO: 126082 - DNA, 25 bp, Saccharomyces pastorianus
atgcattctgcaaagcttctggtat

SEQ ID NO: 126083 - DNA, 25 bp, Saccharomyces pastorianus
attccagagatggtaccccgatcag

SEQ ID NO: 126084 - DNA, 25 bp, Saccharomyces pastorianus
gactactgagaatccttttggttac

SEQ ID NO: 126085 - DNA, 25 bp, Saccharomyces pastorianus
cagatttcaagccacgtttgccaat

SEQ ID NO: 126086 - DNA, 25 bp, Saccharomyces pastorianus
gacaatcagttgttcttggctatga

SEQ ID NO: 126087 - DNA, 25 bp, Saccharomyces pastorianus
gggcgccagcattgttgacctgaaa

SEQ ID NO: 126088 - DNA, 25 bp, Saccharomyces pastorianus
tataggcgccacgatcggcaggtat

SEQ ID NO: 126089 - DNA, 25 bp, Saccharomyces pastorianus
aaaaggtcatattgcagccctgcaa

SEQ ID NO: 126090 - DNA, 25 bp, Saccharomyces pastorianus
tgtcgaggccagattttccgctgaa

SEQ ID NO: 126091 - DNA, 25 bp, Saccharomyces pastorianus
gatagggccaaacgcgaactgaaat

SEQ ID NO: 126092 - DNA, 25 bp, Saccharomyces pastorianus
ttttgaacttgacggctaaaccaga

SEQ ID NO: 126093 - DNA, 25 bp, Saccharomyces pastorianus
gtgctttgcctatttggaatttcgt

SEQ ID NO: 126094 - DNA, 25 bp, Saccharomyces pastorianus
ggtactatggtactgccgttagcca

SEQ ID NO: 126095 - DNA, 25 bp, Saccharomyces pastorianus
gtctgcccggcttaattgttgttat

SEQ ID NO: 126096 - DNA, 25 bp, Saccharomyces pastorianus
aagtcttactttcccagcgtcgaag

SEQ ID NO: 126097 - DNA, 25 bp, Saccharomyces pastorianus
tggcaattattcttggtctgcccgg

SEQ ID NO: 126098 - DNA, 25 bp, Saccharomyces pastorianus
gcttgtaaaactattgcccctgata

SEQ ID NO: 126099 - DNA, 25 bp, Saccharomyces pastorianus
gccgttagccatttgctttactatt

SEQ ID NO: 126100 - DNA, 25 bp, Saccharomyces pastorianus
ggcactttctgtttttccatgcaat

SEQ ID NO: 126101 - DNA, 25 bp, Saccharomyces pastorianus
gtatcaaaacctacacccgtaatca

SEQ ID NO: 126102 - DNA, 25 bp, Saccharomyces pastorianus
gaatttcgtactaccttcatatgcg

SEQ ID NO: 126103 - DNA, 25 bp, Saccharomyces pastorianus
atcagagacttatgtggcactttct

SEQ ID NO: 126104 - DNA, 25 bp, Saccharomyces pastorianus
ggttgctttaatttctgtcatcttg

SEQ ID NO: 126105 - DNA, 25 bp, Saccharomyces pastorianus
agcatggtattttccttgtaagtta

SEQ ID NO: 126106 - DNA, 25 bp, Saccharomyces pastorianus
gctttcctgacttttggtttcacta

SEQ ID NO: 126107 - DNA, 25 bp, Saccharomyces pastorianus
ttatgggccctggtcagatgctggt

SEQ ID NO: 126108 - DNA, 25 bp, Saccharomyces pastorianus
aagagtaattcttccattccccatg

SEQ ID NO: 126109 - DNA, 25 bp, Saccharomyces pastorianus
ctcgcgttccggtatacaagacgtt

SEQ ID NO: 126110 - DNA, 25 bp, Saccharomyces pastorianus
gtagattcagacaccctttatgggc

SEQ ID NO: 126111 - DNA, 25 bp, Saccharomyces pastorianus
atgaattggatacttcctcgcgttc

SEQ ID NO: 126112 - DNA, 25 bp, Saccharomyces pastorianus
acattggtgcgattgtggctttcct

SEQ ID NO: 126113 - DNA, 25 bp, Saccharomyces pastorianus
aattcttgctttctgcgggatgcca

SEQ ID NO: 126114 - DNA, 25 bp, Saccharomyces pastorianus
agatgcttcgttcttgtttcaaaat

SEQ ID NO: 126115 - DNA, 25 bp, Saccharomyces pastorianus
taaaagagtggttctcctccaaggg

SEQ ID NO: 126116 - DNA, 25 bp, Saccharomyces pastorianus
cttaaaagagtggttctcctccaag

SEQ ID NO: 126117 - DNA, 25 bp, Saccharomyces pastorianus
gagtggttctcctccaagggacgca

SEQ ID NO: 126118 - DNA, 25 bp, Saccharomyces pastorianus
gttctcctccaagggacgcacgagt

SEQ ID NO: 126119 - DNA, 25 bp, Saccharomyces pastorianus
ggacgcacgagtggtgtacccaggg

SEQ ID NO: 126120 - DNA, 25 bp, Saccharomyces pastorianus
agtggttctcctccaagggacgcac

SEQ ID NO: 126121 - DNA, 25 bp, Saccharomyces pastorianus
tctcctccaagggacgcacgagtgg

SEQ ID NO: 126122 - DNA, 25 bp, Saccharomyces pastorianus
tggttctcctccaagggacgcacga

SEQ ID NO: 126123 - DNA, 25 bp, Saccharomyces pastorianus
aagagtggttctcctccaagggacg

SEQ ID NO: 126124 - DNA, 25 bp, Saccharomyces pastorianus
tccaagggacgcacgagtggtgtac

SEQ ID NO: 126125 - DNA, 25 bp, Saccharomyces pastorianus
aagggacgcacgagtggtgtaccca

SEQ ID NO: 126126 - DNA, 25 bp, Saccharomyces pastorianus
atcattattggaccccgccggtgct

SEQ ID NO: 126127 - DNA, 25 bp, Saccharomyces pastorianus
ggataatacttctggaccaatcggt

SEQ ID NO: 126128 - DNA, 25 bp, Saccharomyces pastorianus
aatacttctggaccaatcggtgata

SEQ ID NO: 126129 - DNA, 25 bp, Saccharomyces pastorianus
actgtatggataatacttctggacc

SEQ ID NO: 126130 - DNA, 25 bp, Saccharomyces pastorianus
ggtgataccatcttccttatttatg

SEQ ID NO: 126131 - DNA, 25 bp, Saccharomyces pastorianus
tcggtgataccatcttccttattta

SEQ ID NO: 126132 - DNA, 25 bp, Saccharomyces pastorianus
cttccttatttatggtattattatc

SEQ ID NO: 126133 - DNA, 25 bp, Saccharomyces pastorianus
attatcattattggaccccgccggt

SEQ ID NO: 126134 - DNA, 25 bp, Saccharomyces pastorianus
ggaccaatcggtgataccatcttcc

SEQ ID NO: 126135 - DNA, 25 bp, Saccharomyces pastorianus
ttattatcattattggaccccgccg

SEQ ID NO: 126136 - DNA, 25 bp, Saccharomyces pastorianus
cttctggaccaatcggtgataccat

SEQ ID NO: 126137 - DNA, 25 bp, Saccharomyces pastorianus
gaccaatcggtgataccatcttcct

SEQ ID NO: 126138 - DNA, 25 bp, Saccharomyces pastorianus
ctggaccaatcggtgataccatctt

SEQ ID NO: 126139 - DNA, 25 bp, Saccharomyces pastorianus
ggataatacttctggaccaatcggt

SEQ ID NO: 126140 - DNA, 25 bp, Saccharomyces pastorianus
aatacttctggaccaatcggtgata

SEQ ID NO: 126141 - DNA, 25 bp, Saccharomyces pastorianus
gataccatcttccttatttatggta

SEQ ID NO: 126142 - DNA, 25 bp, Saccharomyces pastorianus
actgtatggataatacttctggacc

SEQ ID NO: 126143 - DNA, 25 bp, Saccharomyces pastorianus
ggtgataccatcttccttatttatg

SEQ ID NO: 126144 - DNA, 25 bp, Saccharomyces pastorianus
tcggtgataccatcttccttattta

SEQ ID NO: 126145 - DNA, 25 bp, Saccharomyces pastorianus
cttccttatttatggtattattatc

SEQ ID NO: 126146 - DNA, 25 bp, Saccharomyces pastorianus
cttctggaccaatcggtgataccat

SEQ ID NO: 126147 - DNA, 25 bp, Saccharomyces pastorianus
caatcggtgataccatcttccttat

SEQ ID NO: 126148 - DNA, 25 bp, Saccharomyces pastorianus
agcaagtcttgttgagattgaaccc

SEQ ID NO: 126149 - DNA, 25 bp, Saccharomyces pastorianus
tacgccaaggtctttgctgctgaaa

SEQ ID NO: 126150 - DNA, 25 bp, Saccharomyces pastorianus
aagtcttgttgagattgaaccctta

SEQ ID NO: 126151 - DNA, 25 bp, Saccharomyces pastorianus
aagaaggctgaaaagactggtacca

SEQ ID NO: 126152 - DNA, 25 bp, Saccharomyces pastorianus
caagcaagtcttgttgagattgaac

SEQ ID NO: 126153 - DNA, 25 bp, Saccharomyces pastorianus
aagcaagtcttgttgagattgaacc

SEQ ID NO: 126154 - DNA, 25 bp, Saccharomyces pastorianus
caagtcttgttgagattgaaccctt

SEQ ID NO: 126155 - DNA, 25 bp, Saccharomyces pastorianus
gcaagtcttgttgagattgaaccct

SEQ ID NO: 126156 - DNA, 25 bp, Saccharomyces pastorianus
agtcttgttgagattgaacccttac

SEQ ID NO: 126157 - DNA, 25 bp, Saccharomyces pastorianus
cttgttgagattgaacccttacgcc

SEQ ID NO: 126158 - DNA, 25 bp, Saccharomyces pastorianus
ttccaagaaggctgaaaagactggt

SEQ ID NO: 126159 - DNA, 25 bp, Saccharomyces pastorianus
taaccgcactatttaataccctaga

SEQ ID NO: 126160 - DNA, 25 bp, Saccharomyces pastorianus
caaacgttgcgccatcggaggaaga

SEQ ID NO: 126161 - DNA, 25 bp, Saccharomyces pastorianus
tgatttggattcaaagccccttccg

SEQ ID NO: 126162 - DNA, 25 bp, Saccharomyces pastorianus
gtgctacaagtagtaccggatgcta

SEQ ID NO: 126163 - DNA, 25 bp, Saccharomyces pastorianus
cgaacgcctattttgctcaggacag

SEQ ID NO: 126164 - DNA, 25 bp, Saccharomyces pastorianus
gacgttgtcaactgcgctgaacgaa

SEQ ID NO: 126165 - DNA, 25 bp, Saccharomyces pastorianus
aatgtgcagctagtaacgcctcaaa

SEQ ID NO: 126166 - DNA, 25 bp, Saccharomyces pastorianus
actgtttctattttcatgctgccaa

SEQ ID NO: 126167 - DNA, 25 bp, Saccharomyces pastorianus
gtattacgtcaaatcttgccagtga

SEQ ID NO: 126168 - DNA, 25 bp, Saccharomyces pastorianus
ggacccatacctaccacattaataa

SEQ ID NO: 126169 - DNA, 25 bp, Saccharomyces pastorianus
acatgaccgtgctaagcgttactat

SEQ ID NO: 126170 - DNA, 25 bp, Saccharomyces pastorianus
taacgttcgtcgtcagggttcacaa

SEQ ID NO: 126171 - DNA, 25 bp, Saccharomyces pastorianus
gttccattgaaacgtggtcctgcaa

SEQ ID NO: 126172 - DNA, 25 bp, Saccharomyces pastorianus
aagggccagtgtagcatccaatgaa

SEQ ID NO: 126173 - DNA, 25 bp, Saccharomyces pastorianus
tgttccctcaataactgctcaatcg

SEQ ID NO: 126174 - DNA, 25 bp, Saccharomyces pastorianus
aagcgtaggagctctctggcaacat

SEQ ID NO: 126175 - DNA, 25 bp, Saccharomyces pastorianus
cataagcagtctatttgttccctca

SEQ ID NO: 126176 - DNA, 25 bp, Saccharomyces pastorianus
aaaaccaatgcatgcttactcccaa

SEQ ID NO: 126177 - DNA, 25 bp, Saccharomyces pastorianus
attcagctcggataatgaccctctt

SEQ ID NO: 126178 - DNA, 25 bp, Saccharomyces pastorianus
atgggcgcatgttcatctaacgttc

SEQ ID NO: 126179 - DNA, 25 bp, Saccharomyces pastorianus
ggctaagcagcctttcctatacaag

SEQ ID NO: 126180 - DNA, 25 bp, Saccharomyces pastorianus
gaaataactacttaccatcactcgc

SEQ ID NO: 126181 - DNA, 25 bp, Saccharomyces pastorianus
ggatgggttactttctactatacga

SEQ ID NO: 126182 - DNA, 25 bp, Saccharomyces pastorianus
aatggtatagtcacctggttcgaca

SEQ ID NO: 126183 - DNA, 25 bp, Saccharomyces pastorianus
gggtttgattattcgccatttgttc

SEQ ID NO: 126184 - DNA, 25 bp, Saccharomyces pastorianus
tgatctttcccgacaagtgctccat

SEQ ID NO: 126185 - DNA, 25 bp, Saccharomyces pastorianus
ggtagaaggcggtctgatctttccc

SEQ ID NO: 126186 - DNA, 25 bp, Saccharomyces pastorianus
agagacctgttgagttctccactgg

SEQ ID NO: 126187 - DNA, 25 bp, Saccharomyces pastorianus
atttgttccgttggtcttacacgag

SEQ ID NO: 126188 - DNA, 25 bp, Saccharomyces pastorianus
acggattcagcgacaagatcacctt

SEQ ID NO: 126189 - DNA, 25 bp, Saccharomyces pastorianus
ctggttcgacattgttttccctgca

SEQ ID NO: 126190 - DNA, 25 bp, Saccharomyces pastorianus
tggacaccgttctttacgctagaga

SEQ ID NO: 126191 - DNA, 25 bp, Saccharomyces pastorianus
aagtgctccattcatttggccggtt

SEQ ID NO: 126192 - DNA, 25 bp, Saccharomyces pastorianus
tattggtgcgatgtggactcatgta

SEQ ID NO: 126193 - DNA, 25 bp, Saccharomyces pastorianus
atgtcttgatggcaactgtaatcct

SEQ ID NO: 126194 - DNA, 25 bp, Saccharomyces pastorianus
tgactacattctcctattcaatttg

SEQ ID NO: 126195 - DNA, 25 bp, Saccharomyces pastorianus
ttaagctcggttcccttatacagag

SEQ ID NO: 126196 - DNA, 25 bp, Saccharomyces pastorianus
atggcttggtttagctttgcattcc

SEQ ID NO: 126197 - DNA, 25 bp, Saccharomyces pastorianus
gttacagattggttccatcatcaag

SEQ ID NO: 126198 - DNA, 25 bp, Saccharomyces pastorianus
tattctgtatgtaactgtccctaag

SEQ ID NO: 126199 - DNA, 25 bp, Saccharomyces pastorianus
aaatattgcatcttccagctccaaa

SEQ ID NO: 126200 - DNA, 25 bp, Saccharomyces pastorianus
attgataatgttccatgtgcccaaa

SEQ ID NO: 126201 - DNA, 25 bp, Saccharomyces pastorianus
gctccaaaacccaatcaagcgttgt

SEQ ID NO: 126202 - DNA, 25 bp, Saccharomyces pastorianus
tttgcattcctccttttagacagtg

SEQ ID NO: 126203 - DNA, 25 bp, Saccharomyces pastorianus
ttcattgccgggaaagggtgccacc

SEQ ID NO: 126204 - DNA, 25 bp, Saccharomyces pastorianus
gcctttatcgtcttgggtgctagta

SEQ ID NO: 126205 - DNA, 25 bp, Saccharomyces pastorianus
gtcaccacacccatgttaaacggta

SEQ ID NO: 126206 - DNA, 25 bp, Saccharomyces pastorianus
aaggcaaatcttggctgcaaccgca

SEQ ID NO: 126207 - DNA, 25 bp, Saccharomyces pastorianus
gatgacaattggtgctaccctttcc

SEQ ID NO: 126208 - DNA, 25 bp, Saccharomyces pastorianus
tgcaaccgcagtttttgtcaccaca

SEQ ID NO: 126209 - DNA, 25 bp, Saccharomyces pastorianus
ttccccattgcgctattgatatttg

SEQ ID NO: 126210 - DNA, 25 bp, Saccharomyces pastorianus
aaatgccactgggtaacgccactaa

SEQ ID NO: 126211 - DNA, 25 bp, Saccharomyces pastorianus
gctaccctttcctatttagtcgatt

SEQ ID NO: 126212 - DNA, 25 bp, Saccharomyces pastorianus
aactgggtgggctttcacaatgctg

SEQ ID NO: 126213 - DNA, 25 bp, Saccharomyces pastorianus
ggaacagccctctttggatatgcag

SEQ ID NO: 126214 - DNA, 25 bp, Saccharomyces pastorianus
tttttcaaacagcaacctcacatct

SEQ ID NO: 126215 - DNA, 25 bp, Saccharomyces pastorianus
agatggtataagaatgccggtttgg

SEQ ID NO: 126216 - DNA, 25 bp, Saccharomyces pastorianus
tccaccaagatgcaccgtaccattg

SEQ ID NO: 126217 - DNA, 25 bp, Saccharomyces pastorianus
ggtcaagacttccaagagaaccaag

SEQ ID NO: 126218 - DNA, 25 bp, Saccharomyces pastorianus
gaatgccggtttgggattcaagacc

SEQ ID NO: 126219 - DNA, 25 bp, Saccharomyces pastorianus
gtaccgtcgtctccaccaagatgca

SEQ ID NO: 126220 - DNA, 25 bp, Saccharomyces pastorianus
gtcgtctccaccaagatgcaccgta

SEQ ID NO: 126221 - DNA, 25 bp, Saccharomyces pastorianus
atccaaaggtcaagacttccaagag

SEQ ID NO: 126222 - DNA, 25 bp, Saccharomyces pastorianus
tcaacaatccaaaggtcaagacttc

SEQ ID NO: 126223 - DNA, 25 bp, Saccharomyces pastorianus
tatttttcaaacagcaacctcacat

SEQ ID NO: 126224 - DNA, 25 bp, Saccharomyces pastorianus
caccaagatgcaccgtaccattgtc

SEQ ID NO: 126225 - DNA, 25 bp, Saccharomyces pastorianus
agatggtataagaatgccggtttgg

SEQ ID NO: 126226 - DNA, 25 bp, Saccharomyces pastorianus
ggtcaagacttccaagagaaccaag

SEQ ID NO: 126227 - DNA, 25 bp, Saccharomyces pastorianus
gaatgccggtttgggattcaagacc

SEQ ID NO: 126228 - DNA, 25 bp, Saccharomyces pastorianus
gtaagatcttgaccggtaccgtcgt

SEQ ID NO: 126229 - DNA, 25 bp, Saccharomyces pastorianus
gtaccgtcgtctccaccaagatgca

SEQ ID NO: 126230 - DNA, 25 bp, Saccharomyces pastorianus
gtcgtctccaccaagatgcaccgta

SEQ ID NO: 126231 - DNA, 25 bp, Saccharomyces pastorianus
acagcaacctcacatcttcaacaat

SEQ ID NO: 126232 - DNA, 25 bp, Saccharomyces pastorianus
atccaaaggtcaagacttccaagag

SEQ ID NO: 126233 - DNA, 25 bp, Saccharomyces pastorianus
tcaacaatccaaaggtcaagacttc

SEQ ID NO: 126234 - DNA, 25 bp, Saccharomyces pastorianus
tatttttcaaacagcaacctcacat

SEQ ID NO: 126235 - DNA, 25 bp, Saccharomyces pastorianus
caccaagatgcaccgtaccattgtc

SEQ ID NO: 126236 - DNA, 25 bp, Saccharomyces pastorianus
tgatgacgatgctattgccgctgct

SEQ ID NO: 126237 - DNA, 25 bp, Saccharomyces pastorianus
gaagacaaaccccacgattcattag

SEQ ID NO: 126238 - DNA, 25 bp, Saccharomyces pastorianus
cttgcagctttgaagcctggcatga

SEQ ID NO: 126239 - DNA, 25 bp, Saccharomyces pastorianus
gattcattaggtatacagctcgatg

SEQ ID NO: 126240 - DNA, 25 bp, Saccharomyces pastorianus
acagctcgatgataattcccagaac

SEQ ID NO: 126241 - DNA, 25 bp, Saccharomyces pastorianus
gctgcttcttcatccctgggagaca

SEQ ID NO: 126242 - DNA, 25 bp, Saccharomyces pastorianus
agaactcaatggtacctgctccatc

SEQ ID NO: 126243 - DNA, 25 bp, Saccharomyces pastorianus
aaagacatcattaactggaccattg

SEQ ID NO: 126244 - DNA, 25 bp, Saccharomyces pastorianus
gctccatcagcaacaagcacacatt

SEQ ID NO: 126245 - DNA, 25 bp, Saccharomyces pastorianus
gggcggtacgagatcacgtattcaa

SEQ ID NO: 126246 - DNA, 25 bp, Saccharomyces pastorianus
gtagattgggatgaacttgcagctt

SEQ ID NO: 126247 - DNA, 25 bp, Saccharomyces pastorianus
gtctagatcaccagaaccatgaccc

SEQ ID NO: 126248 - DNA, 25 bp, Saccharomyces pastorianus
ggtatttaaggcaaacagcgcataa

SEQ ID NO: 126249 - DNA, 25 bp, Saccharomyces pastorianus
tttctcaatctgacatagtcgtgga

SEQ ID NO: 126250 - DNA, 25 bp, Saccharomyces pastorianus
atgccttcaggtcataacgataaaa

SEQ ID NO: 126251 - DNA, 25 bp, Saccharomyces pastorianus
gaatcatcttcgaatgtggatcatg

SEQ ID NO: 126252 - DNA, 25 bp, Saccharomyces pastorianus
gtgttggtgtggacgatgatcatca

SEQ ID NO: 126253 - DNA, 25 bp, Saccharomyces pastorianus
tgtcggcgtaggtctagatcaccag

SEQ ID NO: 126254 - DNA, 25 bp, Saccharomyces pastorianus
gtggatcatgccaactccaatgaac

SEQ ID NO: 126255 - DNA, 25 bp, Saccharomyces pastorianus
accatgaccctcaattgcatacgaa

SEQ ID NO: 126256 - DNA, 25 bp, Saccharomyces pastorianus
tcaatctatggcgatggctgccgtc

SEQ ID NO: 126257 - DNA, 25 bp, Saccharomyces pastorianus
ggatctggaaaacaaacactcgaaa

SEQ ID NO: 126258 - DNA, 25 bp, Saccharomyces pastorianus
ggatcttggatattcgaccgctaaa

SEQ ID NO: 126259 - DNA, 25 bp, Saccharomyces pastorianus
gcctcctaatgtccccaagaaagat

SEQ ID NO: 126260 - DNA, 25 bp, Saccharomyces pastorianus
aagggaaattctgtccattctggtc

SEQ ID NO: 126261 - DNA, 25 bp, Saccharomyces pastorianus
tgagaaactagttgctgccgacagc

SEQ ID NO: 126262 - DNA, 25 bp, Saccharomyces pastorianus
gacttcaatgttatccatgggacta

SEQ ID NO: 126263 - DNA, 25 bp, Saccharomyces pastorianus
ggaacatttcccgaacctgaagtgc

SEQ ID NO: 126264 - DNA, 25 bp, Saccharomyces pastorianus
ttttattcgtaaactagtggcagac

SEQ ID NO: 126265 - DNA, 25 bp, Saccharomyces pastorianus
atgtcgtaaagccttgatactcaac

SEQ ID NO: 126266 - DNA, 25 bp, Saccharomyces pastorianus
gtccattctggtcactatgttgttt

SEQ ID NO: 126267 - DNA, 25 bp, Saccharomyces pastorianus
gggactaaatcccaacttatgtcgt

SEQ ID NO: 126268 - DNA, 25 bp, Saccharomyces pastorianus
cgctaaaccgtacgctttaactgca

SEQ ID NO: 126269 - DNA, 25 bp, Saccharomyces pastorianus
ttaacaccggaaaccaagacgctga

SEQ ID NO: 126270 - DNA, 25 bp, Saccharomyces pastorianus
tttaacaccggaaaccaagacgctg

SEQ ID NO: 126271 - DNA, 25 bp, Saccharomyces pastorianus
ccaagacgctgagagcgctatgaat

SEQ ID NO: 126272 - DNA, 25 bp, Saccharomyces pastorianus
tgcgcgccctatttaacaccggaaa

SEQ ID NO: 126273 - DNA, 25 bp, Saccharomyces pastorianus
aacaccggaaaccaagacgctgaga

SEQ ID NO: 126274 - DNA, 25 bp, Saccharomyces pastorianus
gaaaccaagacgctgagagcgctat

SEQ ID NO: 126275 - DNA, 25 bp, Saccharomyces pastorianus
gtgcgcgccctatttaacaccggaa

SEQ ID NO: 126276 - DNA, 25 bp, Saccharomyces pastorianus
aaccaagacgctgagagcgctatga

SEQ ID NO: 126277 - DNA, 25 bp, Saccharomyces pastorianus
ccggaaaccaagacgctgagagcgc

SEQ ID NO: 126278 - DNA, 25 bp, Saccharomyces pastorianus
acaccggaaaccaagacgctgagag

SEQ ID NO: 126279 - DNA, 25 bp, Saccharomyces pastorianus
accggaaaccaagacgctgagagcg

SEQ ID NO: 126280 - DNA, 25 bp, Saccharomyces pastorianus
tttaacaccggaaaccaagacgctg

SEQ ID NO: 126281 - DNA, 25 bp, Saccharomyces pastorianus
tgcgcgccctatttaacaccggaaa

SEQ ID NO: 126282 - DNA, 25 bp, Saccharomyces pastorianus
aacaccggaaaccaagacgctgaga

SEQ ID NO: 126283 - DNA, 25 bp, Saccharomyces pastorianus
gaatggcgtattccagcatatggat

SEQ ID NO: 126284 - DNA, 25 bp, Saccharomyces pastorianus
gtgcgcgccctatttaacaccggaa

SEQ ID NO: 126285 - DNA, 25 bp, Saccharomyces pastorianus
gcgctatgaatggcgtattccagca

SEQ ID NO: 126286 - DNA, 25 bp, Saccharomyces pastorianus
atgaatggcgtattccagcatatgg

SEQ ID NO: 126287 - DNA, 25 bp, Saccharomyces pastorianus
tatgaatggcgtattccagcatatg

SEQ ID NO: 126288 - DNA, 25 bp, Saccharomyces pastorianus
agagcgctatgaatggcgtattcca

SEQ ID NO: 126289 - DNA, 25 bp, Saccharomyces pastorianus
gagagcgctatgaatggcgtattcc

SEQ ID NO: 126290 - DNA, 25 bp, Saccharomyces pastorianus
cggaaaccaagacgctgagagcgct

SEQ ID NO: 126291 - DNA, 25 bp, Saccharomyces pastorianus
gacttagagtgtttgtctgtctggc

SEQ ID NO: 126292 - DNA, 25 bp, Saccharomyces pastorianus
gcaggctgtcctgatacttttgcag

SEQ ID NO: 126293 - DNA, 25 bp, Saccharomyces pastorianus
aactgctccatttgttacactaatt

SEQ ID NO: 126294 - DNA, 25 bp, Saccharomyces pastorianus
gttgaattacctcattgccatcata

SEQ ID NO: 126295 - DNA, 25 bp, Saccharomyces pastorianus
gtctgtctggctatctcgaagtaca

SEQ ID NO: 126296 - DNA, 25 bp, Saccharomyces pastorianus
tgttatgggccaccgaatcattaat

SEQ ID NO: 126297 - DNA, 25 bp, Saccharomyces pastorianus
tgatacttttgcagcctctttacca

SEQ ID NO: 126298 - DNA, 25 bp, Saccharomyces pastorianus
gaagtacaacatgtccattatgcag

SEQ ID NO: 126299 - DNA, 25 bp, Saccharomyces pastorianus
gatgagtaccccttagtagttgaat

SEQ ID NO: 126300 - DNA, 25 bp, Saccharomyces pastorianus
taaaggcaagagtgcaggctgtcct

SEQ ID NO: 126301 - DNA, 25 bp, Saccharomyces pastorianus
gcaactgacaactgctccatttgtt

SEQ ID NO: 126302 - DNA, 25 bp, Saccharomyces pastorianus
tatctgtccgcatgagggctgtgga

SEQ ID NO: 126303 - DNA, 25 bp, Saccharomyces pastorianus
aaaaatcatatctgtccgcatgagg

SEQ ID NO: 126304 - DNA, 25 bp, Saccharomyces pastorianus
tctgtccgcatgagggctgtggaca

SEQ ID NO: 126305 - DNA, 25 bp, Saccharomyces pastorianus
gtagacatgataactgtaatcagca

SEQ ID NO: 126306 - DNA, 25 bp, Saccharomyces pastorianus
aatcatatctgtccgcatgagggct

SEQ ID NO: 126307 - DNA, 25 bp, Saccharomyces pastorianus
atcagcattatcgaactcatgcaaa

SEQ ID NO: 126308 - DNA, 25 bp, Saccharomyces pastorianus
catatctgtccgcatgagggctgtg

SEQ ID NO: 126309 - DNA, 25 bp, Saccharomyces pastorianus
tggacagaggtttagtagacatgat

SEQ ID NO: 126310 - DNA, 25 bp, Saccharomyces pastorianus
tgtaatcagcattatcgaactcatg

SEQ ID NO: 126311 - DNA, 25 bp, Saccharomyces pastorianus
gctgtggacagaggtttagtagaca

SEQ ID NO: 126312 - DNA, 25 bp, Saccharomyces pastorianus
tatcgaactcatgcaaacaagaaga

SEQ ID NO: 126313 - DNA, 25 bp, Saccharomyces pastorianus
ttttctccggaaaacaagcgaacag

SEQ ID NO: 126314 - DNA, 25 bp, Saccharomyces pastorianus
ctcccagataactcttatgcctgaa

SEQ ID NO: 126315 - DNA, 25 bp, Saccharomyces pastorianus
taccaaaccctgatacccttgatga

SEQ ID NO: 126316 - DNA, 25 bp, Saccharomyces pastorianus
tatgcctgaaatgttctcttttaac

SEQ ID NO: 126317 - DNA, 25 bp, Saccharomyces pastorianus
aaaaacgtcaccgatactgccattg

SEQ ID NO: 126318 - DNA, 25 bp, Saccharomyces pastorianus
aagtgcgctttcgattttttctccg

SEQ ID NO: 126319 - DNA, 25 bp, Saccharomyces pastorianus
gtgaatttcccatcaatttcgaatg

SEQ ID NO: 126320 - DNA, 25 bp, Saccharomyces pastorianus
cggtaaatcagatccatatggctca

SEQ ID NO: 126321 - DNA, 25 bp, Saccharomyces pastorianus
aacttgatgtcaactattctagcta

SEQ ID NO: 126322 - DNA, 25 bp, Saccharomyces pastorianus
aatttcgaatgttcgccctcccaga

SEQ ID NO: 126323 - DNA, 25 bp, Saccharomyces pastorianus
acgagtgacgggactatttcaagat

SEQ ID NO: 126324 - DNA, 25 bp, Saccharomyces pastorianus
atgcgatgcggaatccttctttcaa

SEQ ID NO: 126325 - DNA, 25 bp, Saccharomyces pastorianus
ataatgttgtcccatctgcgattca

SEQ ID NO: 126326 - DNA, 25 bp, Saccharomyces pastorianus
tatggttggccttttacttcggata

SEQ ID NO: 126327 - DNA, 25 bp, Saccharomyces pastorianus
tttacgctattaaatcccctcgaca

SEQ ID NO: 126328 - DNA, 25 bp, Saccharomyces pastorianus
aagattgaccttgacttccacagac

SEQ ID NO: 126329 - DNA, 25 bp, Saccharomyces pastorianus
tcttattgtgtgttgcgttttcggc

SEQ ID NO: 126330 - DNA, 25 bp, Saccharomyces pastorianus
aagactgatttgctctttggcccaa

SEQ ID NO: 126331 - DNA, 25 bp, Saccharomyces pastorianus
agggcaggcccttgagagctcttat

SEQ ID NO: 126332 - DNA, 25 bp, Saccharomyces pastorianus
tggttagcagctatcgcaggcttga

SEQ ID NO: 126333 - DNA, 25 bp, Saccharomyces pastorianus
tttcggcgtcattgcttttgttgca

SEQ ID NO: 126334 - DNA, 25 bp, Saccharomyces pastorianus
gacgcatttatgatccagagctaat

SEQ ID NO: 126335 - DNA, 25 bp, Saccharomyces pastorianus
tggcgttgaatctatcacgtcggat

SEQ ID NO: 126336 - DNA, 25 bp, Saccharomyces pastorianus
aaggtctacattacggtggtcctgc

SEQ ID NO: 126337 - DNA, 25 bp, Saccharomyces pastorianus
aataaccgcgtctatgactattcaa

SEQ ID NO: 126338 - DNA, 25 bp, Saccharomyces pastorianus
tactcctccatattcatttccaaat

SEQ ID NO: 126339 - DNA, 25 bp, Saccharomyces pastorianus
gtattcattcatttcttcggtgtaa

SEQ ID NO: 126340 - DNA, 25 bp, Saccharomyces pastorianus
gtcctgctgcgctagtaattggtta

SEQ ID NO: 126341 - DNA, 25 bp, Saccharomyces pastorianus
ttgggactggtcttttggtagctaa

SEQ ID NO: 126342 - DNA, 25 bp, Saccharomyces pastorianus
acatcttggtttctttcgtgacgta

SEQ ID NO: 126343 - DNA, 25 bp, Saccharomyces pastorianus
gatggcggtaacctatccgacttta

SEQ ID NO: 126344 - DNA, 25 bp, Saccharomyces pastorianus
gtgacgtacttcatgatccaagctg

SEQ ID NO: 126345 - DNA, 25 bp, Saccharomyces pastorianus
atgaagtcgcgccatgttgtcatga

SEQ ID NO: 126346 - DNA, 25 bp, Saccharomyces pastorianus
ggttatcacagattcgttcaccgac

SEQ ID NO: 126347 - DNA, 25 bp, Saccharomyces pastorianus
aggacctgttttctgtccatacaga

SEQ ID NO: 126348 - DNA, 25 bp, Saccharomyces pastorianus
gatttgcaagcgatgtcacgaattc

SEQ ID NO: 126349 - DNA, 25 bp, Saccharomyces pastorianus
ggcaatgtctcgttcattataagca

SEQ ID NO: 126350 - DNA, 25 bp, Saccharomyces pastorianus
taagcatatcgatccagcaagacaa

SEQ ID NO: 126351 - DNA, 25 bp, Saccharomyces pastorianus
tacgacatggactagtgcgctggat

SEQ ID NO: 126352 - DNA, 25 bp, Saccharomyces pastorianus
atgacttaatttgttcttgcgatgg

SEQ ID NO: 126353 - DNA, 25 bp, Saccharomyces pastorianus
gacttgtcacaactgggtgtatcga

SEQ ID NO: 126354 - DNA, 25 bp, Saccharomyces pastorianus
atgaatgaagcagccaccaacgatg

SEQ ID NO: 126355 - DNA, 25 bp, Saccharomyces pastorianus
agccgtgcttcatatatagacttgt

SEQ ID NO: 126356 - DNA, 25 bp, Saccharomyces pastorianus
ggtgcttcgcgacttattttatttg

SEQ ID NO: 126357 - DNA, 25 bp, Saccharomyces pastorianus
agagagatctccttacgaaccaata

SEQ ID NO: 126358 - DNA, 25 bp, Saccharomyces pastorianus
gaaacttaccatatcggagtccagt

SEQ ID NO: 126359 - DNA, 25 bp, Saccharomyces pastorianus
ggttgtaaatggtaccgctgttagg

SEQ ID NO: 126360 - DNA, 25 bp, Saccharomyces pastorianus
aaattcggccccacagaaagctaat

SEQ ID NO: 126361 - DNA, 25 bp, Saccharomyces pastorianus
acagggcttgcactttaacttttga

SEQ ID NO: 126362 - DNA, 25 bp, Saccharomyces pastorianus
tcggagtccagtggtttccaaaact

SEQ ID NO: 126363 - DNA, 25 bp, Saccharomyces pastorianus
gataaattacgcacctctaagtttt

SEQ ID NO: 126364 - DNA, 25 bp, Saccharomyces pastorianus
aggcgaagtcacctgtcagagaaat

SEQ ID NO: 126365 - DNA, 25 bp, Saccharomyces pastorianus
gacgaactgtctgtttctattagct

SEQ ID NO: 126366 - DNA, 25 bp, Saccharomyces pastorianus
gtctgcttctggcataaacgaactg

SEQ ID NO: 126367 - DNA, 25 bp, Saccharomyces pastorianus
catcagcagtatggtcaaggttcat

SEQ ID NO: 126368 - DNA, 25 bp, Saccharomyces pastorianus
gttccaatcctttgacgttctcaag

SEQ ID NO: 126369 - DNA, 25 bp, Saccharomyces pastorianus
aatcctttgacgttctcaaggaact

SEQ ID NO: 126370 - DNA, 25 bp, Saccharomyces pastorianus
aaggaactacttttggcctatctcg

SEQ ID NO: 126371 - DNA, 25 bp, Saccharomyces pastorianus
tttgacgttctcaaggaactacttt

SEQ ID NO: 126372 - DNA, 25 bp, Saccharomyces pastorianus
ataattcgttccaatcctttgacgt

SEQ ID NO: 126373 - DNA, 25 bp, Saccharomyces pastorianus
aaagcttttctctaacgacataatt

SEQ ID NO: 126374 - DNA, 25 bp, Saccharomyces pastorianus
gacataattcgttccaatcctttga

SEQ ID NO: 126375 - DNA, 25 bp, Saccharomyces pastorianus
agcttttctctaacgacataattcg

SEQ ID NO: 126376 - DNA, 25 bp, Saccharomyces pastorianus
attcgttccaatcctttgacgttct

SEQ ID NO: 126377 - DNA, 25 bp, Saccharomyces pastorianus
tccaatcctttgacgttctcaagga

SEQ ID NO: 126378 - DNA, 25 bp, Saccharomyces pastorianus
gttctcaaggaactacttttggcct

SEQ ID NO: 126379 - DNA, 25 bp, Saccharomyces pastorianus
tccaatgctcaagctaacgtttcag

SEQ ID NO: 126380 - DNA, 25 bp, Saccharomyces pastorianus
ctcaagctaacgtttcagcttccgc

SEQ ID NO: 126381 - DNA, 25 bp, Saccharomyces pastorianus
caatgctcaagctaacgtttcagct

SEQ ID NO: 126382 - DNA, 25 bp, Saccharomyces pastorianus
gctcaagctaacgtttcagcttccg

SEQ ID NO: 126383 - DNA, 25 bp, Saccharomyces pastorianus
ccaatgctcaagctaacgtttcagc

SEQ ID NO: 126384 - DNA, 25 bp, Saccharomyces pastorianus
ctcttcttctaagaagtctaagggt

SEQ ID NO: 126385 - DNA, 25 bp, Saccharomyces pastorianus
tttcagcttccgctagctcttcttc

SEQ ID NO: 126386 - DNA, 25 bp, Saccharomyces pastorianus
tcttcctcttcttctaagaagtcta

SEQ ID NO: 126387 - DNA, 25 bp, Saccharomyces pastorianus
atgctcaagctaacgtttcagcttc

SEQ ID NO: 126388 - DNA, 25 bp, Saccharomyces pastorianus
cctccaatgctcaagctaacgtttc

SEQ ID NO: 126389 - DNA, 25 bp, Saccharomyces pastorianus
aatgctcaagctaacgtttcagctt

SEQ ID NO: 126390 - DNA, 25 bp, Saccharomyces pastorianus
gtcaatctttgtctatcgtctccaa

SEQ ID NO: 126391 - DNA, 25 bp, Saccharomyces pastorianus
acgatgaattatccaaggccgcttt

SEQ ID NO: 126392 - DNA, 25 bp, Saccharomyces pastorianus
atcttccgcttcttctagtggtgat

SEQ ID NO: 126393 - DNA, 25 bp, Saccharomyces pastorianus
gttactggtaacttctcaaccttag

SEQ ID NO: 126394 - DNA, 25 bp, Saccharomyces pastorianus
gcaaactgttaacgcttccttaggt

SEQ ID NO: 126395 - DNA, 25 bp, Saccharomyces pastorianus
gttaagctatcctctacttctactg

SEQ ID NO: 126396 - DNA, 25 bp, Saccharomyces pastorianus
tagtggtgatgcctccaatgctcaa

SEQ ID NO: 126397 - DNA, 25 bp, Saccharomyces pastorianus
aggccgctttcagtaacttgactac

SEQ ID NO: 126398 - DNA, 25 bp, Saccharomyces pastorianus
aggtggtgctaacttcgactcttct

SEQ ID NO: 126399 - DNA, 25 bp, Saccharomyces pastorianus
gactcttcttctagtaacttctcct

SEQ ID NO: 126400 - DNA, 25 bp, Saccharomyces pastorianus
actgaatcatccaagagctctgcta

SEQ ID NO: 126401 - DNA, 25 bp, Saccharomyces pastorianus
aagaccattctttcgctttactaga

SEQ ID NO: 126402 - DNA, 25 bp, Saccharomyces pastorianus
attctggaatactctacttccccta

SEQ ID NO: 126403 - DNA, 25 bp, Saccharomyces pastorianus
ttttgcgaacgcctcaacctttaga

SEQ ID NO: 126404 - DNA, 25 bp, Saccharomyces pastorianus
gcctcaacctttagatcctttggat

SEQ ID NO: 126405 - DNA, 25 bp, Saccharomyces pastorianus
aaaagaaaccgatcgcaagcgcgtt

SEQ ID NO: 126406 - DNA, 25 bp, Saccharomyces pastorianus
ggagattcttccttatttttgcgaa

SEQ ID NO: 126407 - DNA, 25 bp, Saccharomyces pastorianus
gattatgaacgttccaaggcctata

SEQ ID NO: 126408 - DNA, 25 bp, Saccharomyces pastorianus
gcaagcgcgtttatacttccagaag

SEQ ID NO: 126409 - DNA, 25 bp, Saccharomyces pastorianus
gctggatgctggttcattctggaat

SEQ ID NO: 126410 - DNA, 25 bp, Saccharomyces pastorianus
gaaggcaagattacctcctactggt

SEQ ID NO: 126411 - DNA, 25 bp, Saccharomyces pastorianus
taaagcctcaatcacttccacagaa

SEQ ID NO: 126412 - DNA, 25 bp, Saccharomyces pastorianus
gaacaagcgccccaaacaaaataat

SEQ ID NO: 126413 - DNA, 25 bp, Saccharomyces pastorianus
attcagatccttcacattttttgag

SEQ ID NO: 126414 - DNA, 25 bp, Saccharomyces pastorianus
gaagcagctaccgatgaacaagatc

SEQ ID NO: 126415 - DNA, 25 bp, Saccharomyces pastorianus
aaaattgcccactcctgaaggttca

SEQ ID NO: 126416 - DNA, 25 bp, Saccharomyces pastorianus
gtctatggacctgaatactgtttta

SEQ ID NO: 126417 - DNA, 25 bp, Saccharomyces pastorianus
gcgatactgggaacaagcgccccaa

SEQ ID NO: 126418 - DNA, 25 bp, Saccharomyces pastorianus
ggaacttagaaactacactgagcat

SEQ ID NO: 126419 - DNA, 25 bp, Saccharomyces pastorianus
actgagcattctacaccatttctga

SEQ ID NO: 126420 - DNA, 25 bp, Saccharomyces pastorianus
gtttgacctataattcagatccttc

SEQ ID NO: 126421 - DNA, 25 bp, Saccharomyces pastorianus
aaggttcaacattcagcgatactgg

SEQ ID NO: 126422 - DNA, 25 bp, Saccharomyces pastorianus
taaagcaccttctatcatctatcca

SEQ ID NO: 126423 - DNA, 25 bp, Saccharomyces pastorianus
aatagtgattcagaggcgtttttga

SEQ ID NO: 126424 - DNA, 25 bp, Saccharomyces pastorianus
gtcgactcccaatcttatttacttg

SEQ ID NO: 126425 - DNA, 25 bp, Saccharomyces pastorianus
gtagtaagactgaggatgcatcaaa

SEQ ID NO: 126426 - DNA, 25 bp, Saccharomyces pastorianus
aaggatacggaagacggactacaag

SEQ ID NO: 126427 - DNA, 25 bp, Saccharomyces pastorianus
gacggactacaagataaaactgcag

SEQ ID NO: 126428 - DNA, 25 bp, Saccharomyces pastorianus
gagacgatttggaaatatccgtgtg

SEQ ID NO: 126429 - DNA, 25 bp, Saccharomyces pastorianus
gaaagctttagaatcatatcgtcaa

SEQ ID NO: 126430 - DNA, 25 bp, Saccharomyces pastorianus
aggttcgaccagctttttcttgaat

SEQ ID NO: 126431 - DNA, 25 bp, Saccharomyces pastorianus
tatccgtgtggaaaactgtaactgc

SEQ ID NO: 126432 - DNA, 25 bp, Saccharomyces pastorianus
gacgaagacatggtcgactcccaat

SEQ ID NO: 126433 - DNA, 25 bp, Saccharomyces pastorianus
aaagatgctgatgctgccaaaaagg

SEQ ID NO: 126434 - DNA, 25 bp, Saccharomyces pastorianus
agaatgttacagagccctttatcgg

SEQ ID NO: 126435 - DNA, 25 bp, Saccharomyces pastorianus
agaagcaatcccaacgctttcctta

SEQ ID NO: 126436 - DNA, 25 bp, Saccharomyces pastorianus
cgctttccttaacaaccacatttat

SEQ ID NO: 126437 - DNA, 25 bp, Saccharomyces pastorianus
gcagatttctggctaacaaggattt

SEQ ID NO: 126438 - DNA, 25 bp, Saccharomyces pastorianus
agatgataccagattcctacaggaa

SEQ ID NO: 126439 - DNA, 25 bp, Saccharomyces pastorianus
tatgccataaaatatccctgatcag

SEQ ID NO: 126440 - DNA, 25 bp, Saccharomyces pastorianus
cactattattgatgactcactcgat

SEQ ID NO: 126441 - DNA, 25 bp, Saccharomyces pastorianus
ggaccgcatgcttcaaaatggtatc

SEQ ID NO: 126442 - DNA, 25 bp, Saccharomyces pastorianus
tggaagacgcttccgtggaccgcat

SEQ ID NO: 126443 - DNA, 25 bp, Saccharomyces pastorianus
cctttatcggctcaaaactccagaa

SEQ ID NO: 126444 - DNA, 25 bp, Saccharomyces pastorianus
gtaacgccattcctgacatagtata

SEQ ID NO: 126445 - DNA, 25 bp, Saccharomyces pastorianus
gacgatctattgtcctatgtagaat

SEQ ID NO: 126446 - DNA, 25 bp, Saccharomyces pastorianus
tgcccatccatcagcaataaacatg

SEQ ID NO: 126447 - DNA, 25 bp, Saccharomyces pastorianus
gtggaaatgatgcagacaacactgt

SEQ ID NO: 126448 - DNA, 25 bp, Saccharomyces pastorianus
gcttcatcatgaaactaactcctta

SEQ ID NO: 126449 - DNA, 25 bp, Saccharomyces pastorianus
gactttgaagcttcatcatgaaact

SEQ ID NO: 126450 - DNA, 25 bp, Saccharomyces pastorianus
aaacatgcttactgaaatcgccggg

SEQ ID NO: 126451 - DNA, 25 bp, Saccharomyces pastorianus
taacggtatgaacaggccagacgat

SEQ ID NO: 126452 - DNA, 25 bp, Saccharomyces pastorianus
gacaacactgttggataacggtatg

SEQ ID NO: 126453 - DNA, 25 bp, Saccharomyces pastorianus
agggttagaaactgcccatccatca

SEQ ID NO: 126454 - DNA, 25 bp, Saccharomyces pastorianus
aggccagacgatctattgtcctatg

SEQ ID NO: 126455 - DNA, 25 bp, Saccharomyces pastorianus
gggataaccaatctaatctgataaa

SEQ ID NO: 126456 - DNA, 25 bp, Saccharomyces pastorianus
atgccaatggtaacatctgtctgga

SEQ ID NO: 126457 - DNA, 25 bp, Saccharomyces pastorianus
gctctaactctatcgaaggtcctat

SEQ ID NO: 126458 - DNA, 25 bp, Saccharomyces pastorianus
tcctttagtaccagaaatcgctcat

SEQ ID NO: 126459 - DNA, 25 bp, Saccharomyces pastorianus
taaaggatcaatggtctcccgctct

SEQ ID NO: 126460 - DNA, 25 bp, Saccharomyces pastorianus
agacgctaatcctgacgatccttta

SEQ ID NO: 126461 - DNA, 25 bp, Saccharomyces pastorianus
taatcctgacgatcctttagtacca

SEQ ID NO: 126462 - DNA, 25 bp, Saccharomyces pastorianus
aggtcctattatccatctgttcttt

SEQ ID NO: 126463 - DNA, 25 bp, Saccharomyces pastorianus
tctacaagactgacagacccaagta

SEQ ID NO: 126464 - DNA, 25 bp, Saccharomyces pastorianus
aatcgctcatatctacaagactgac

SEQ ID NO: 126465 - DNA, 25 bp, Saccharomyces pastorianus
tgttctttgttaacagacgctaatc

SEQ ID NO: 126466 - DNA, 25 bp, Saccharomyces pastorianus
atgggacctgccgattccccatatg

SEQ ID NO: 126467 - DNA, 25 bp, Saccharomyces pastorianus
gggatatccgtttcaacgtgctgat

SEQ ID NO: 126468 - DNA, 25 bp, Saccharomyces pastorianus
aacgcactaagcactatctcagtat

SEQ ID NO: 126469 - DNA, 25 bp, Saccharomyces pastorianus
agtccttcaagattcagtgacgttt

SEQ ID NO: 126470 - DNA, 25 bp, Saccharomyces pastorianus
gcctaaatgagctttcttcttctaa

SEQ ID NO: 126471 - DNA, 25 bp, Saccharomyces pastorianus
atcacgcatgtggaggtttgtcagt

SEQ ID NO: 126472 - DNA, 25 bp, Saccharomyces pastorianus
tgacgtttttattcctacacaagtt

SEQ ID NO: 126473 - DNA, 25 bp, Saccharomyces pastorianus
agttccattgttatgtttagcctaa

SEQ ID NO: 126474 - DNA, 25 bp, Saccharomyces pastorianus
agacacctttgctggttgcttgtga

SEQ ID NO: 126475 - DNA, 25 bp, Saccharomyces pastorianus
agccatctatggagcactttttacc

SEQ ID NO: 126476 - DNA, 25 bp, Saccharomyces pastorianus
gaaacgtactagcactcattcagta

SEQ ID NO: 126477 - DNA, 25 bp, Saccharomyces pastorianus
ggaatcaggtctttaaacgcactaa

SEQ ID NO: 126478 - DNA, 25 bp, Saccharomyces pastorianus
agaagaacctgttatctagccccgg

SEQ ID NO: 126479 - DNA, 25 bp, Saccharomyces pastorianus
tcgagacaaatagagccggctacat

SEQ ID NO: 126480 - DNA, 25 bp, Saccharomyces pastorianus
aagacccatcttcaacttatcacag

SEQ ID NO: 126481 - DNA, 25 bp, Saccharomyces pastorianus
ggaacttggttctagacatgattca

SEQ ID NO: 126482 - DNA, 25 bp, Saccharomyces pastorianus
aaacagggaatttctcatggaggaa

SEQ ID NO: 126483 - DNA, 25 bp, Saccharomyces pastorianus
aaacccgtatatttgcctgaagata

SEQ ID NO: 126484 - DNA, 25 bp, Saccharomyces pastorianus
cggctacatgatacggcagcactta

SEQ ID NO: 126485 - DNA, 25 bp, Saccharomyces pastorianus
gattgagtttgagaccttacttaca

SEQ ID NO: 126486 - DNA, 25 bp, Saccharomyces pastorianus
tatctagccccggagaggtttaact

SEQ ID NO: 126487 - DNA, 25 bp, Saccharomyces pastorianus
attgctttccagttgttaaatgcat

SEQ ID NO: 126488 - DNA, 25 bp, Saccharomyces pastorianus
tttttattctacttcgacacctcga

SEQ ID NO: 126489 - DNA, 25 bp, Saccharomyces pastorianus
gcctataccccagttttcaatcatt

SEQ ID NO: 126490 - DNA, 25 bp, Saccharomyces pastorianus
ggagtttattaattctctgccgaac

SEQ ID NO: 126491 - DNA, 25 bp, Saccharomyces pastorianus
gactgcaatcagacaacgaaggtaa

SEQ ID NO: 126492 - DNA, 25 bp, Saccharomyces pastorianus
ctctgccgaacctagtgtcattaat

SEQ ID NO: 126493 - DNA, 25 bp, Saccharomyces pastorianus
tccgctcaggatagtacagaaacgc

SEQ ID NO: 126494 - DNA, 25 bp, Saccharomyces pastorianus
gaaaacagcgcatggatcccgcaat

SEQ ID NO: 126495 - DNA, 25 bp, Saccharomyces pastorianus
catttgaatgtaaaatccgctcagg

SEQ ID NO: 126496 - DNA, 25 bp, Saccharomyces pastorianus
gaaaacctttcatcagatagggaga

SEQ ID NO: 126497 - DNA, 25 bp, Saccharomyces pastorianus
aataatgtcgtgagcctatacccca

SEQ ID NO: 126498 - DNA, 25 bp, Saccharomyces pastorianus
ggatcccgcaattcggtatatgaaa

SEQ ID NO: 126499 - DNA, 25 bp, Saccharomyces pastorianus
gcaacgattgcgcttcattgataga

SEQ ID NO: 126500 - DNA, 25 bp, Saccharomyces pastorianus
agagcctattgctgttgactgcgaa

SEQ ID NO: 126501 - DNA, 25 bp, Saccharomyces pastorianus
attccatcatagattcgtctctcag

SEQ ID NO: 126502 - DNA, 25 bp, Saccharomyces pastorianus
aaagggcacatgtaagctctgcaga

SEQ ID NO: 126503 - DNA, 25 bp, Saccharomyces pastorianus
aagctctgcagagatgattccatca

SEQ ID NO: 126504 - DNA, 25 bp, Saccharomyces pastorianus
gaatggtcagctgatcttgagtcga

SEQ ID NO: 126505 - DNA, 25 bp, Saccharomyces pastorianus
gattccatcatcaccgcaaagaaaa

SEQ ID NO: 126506 - DNA, 25 bp, Saccharomyces pastorianus
gatcatcgatggaccctcaaatgtt

SEQ ID NO: 126507 - DNA, 25 bp, Saccharomyces pastorianus
tcgattttccactgtctccagtaaa

SEQ ID NO: 126508 - DNA, 25 bp, Saccharomyces pastorianus
tgcgccgttcttccaagatatcagt

SEQ ID NO: 126509 - DNA, 25 bp, Saccharomyces pastorianus
gaaattatcgctctctcggaatcaa

SEQ ID NO: 126510 - DNA, 25 bp, Saccharomyces pastorianus
gatatactgttcgattttccactgt

SEQ ID NO: 126511 - DNA, 25 bp, Saccharomyces pastorianus
ggaatacgcctctggttcaaagact

SEQ ID NO: 126512 - DNA, 25 bp, Saccharomyces pastorianus
gctttgttgattctagtcctctcaa

SEQ ID NO: 126513 - DNA, 25 bp, Saccharomyces pastorianus
ttggctttgttgattctagtcctct

SEQ ID NO: 126514 - DNA, 25 bp, Saccharomyces pastorianus
gacgttgtcgtatttggctttgttg

SEQ ID NO: 126515 - DNA, 25 bp, Saccharomyces pastorianus
ctagtcctctcaattgaactcctga

SEQ ID NO: 126516 - DNA, 25 bp, Saccharomyces pastorianus
attctagtcctctcaattgaactcc

SEQ ID NO: 126517 - DNA, 25 bp, Saccharomyces pastorianus
ctctggttcaaagactagtgacgtt

SEQ ID NO: 126518 - DNA, 25 bp, Saccharomyces pastorianus
gtaacgggaatacgcctctggttca

SEQ ID NO: 126519 - DNA, 25 bp, Saccharomyces pastorianus
actagtgacgttgtcgtatttggct

SEQ ID NO: 126520 - DNA, 25 bp, Saccharomyces pastorianus
tacgcctctggttcaaagactagtg

SEQ ID NO: 126521 - DNA, 25 bp, Saccharomyces pastorianus
gtcgtatttggctttgttgattcta

SEQ ID NO: 126522 - DNA, 25 bp, Saccharomyces pastorianus
tttagacccatggtggaaccctagt

SEQ ID NO: 126523 - DNA, 25 bp, Saccharomyces pastorianus
gatgaagctgccatcagcagactaa

SEQ ID NO: 126524 - DNA, 25 bp, Saccharomyces pastorianus
agcaaagtattgttagccgtctaaa

SEQ ID NO: 126525 - DNA, 25 bp, Saccharomyces pastorianus
gtgttttcccagtttaccagtatgc

SEQ ID NO: 126526 - DNA, 25 bp, Saccharomyces pastorianus
agtggaccttgattccttcaaaaag

SEQ ID NO: 126527 - DNA, 25 bp, Saccharomyces pastorianus
gattaaatccattgtgttttcccag

SEQ ID NO: 126528 - DNA, 25 bp, Saccharomyces pastorianus
gcgggtggtgttgctttgaatcttt

SEQ ID NO: 126529 - DNA, 25 bp, Saccharomyces pastorianus
aatgcgaggttttcttggtcagttt

SEQ ID NO: 126530 - DNA, 25 bp, Saccharomyces pastorianus
tcaacctgctttggaagtggacctt

SEQ ID NO: 126531 - DNA, 25 bp, Saccharomyces pastorianus
gtggcaagtggcaatcatcaacgaa

SEQ ID NO: 126532 - DNA, 25 bp, Saccharomyces pastorianus
cagggtagtatgtcaccgacgcaaa

SEQ ID NO: 126533 - DNA, 25 bp, Saccharomyces pastorianus
ggtgcttccagaaccacggatatca

SEQ ID NO: 126534 - DNA, 25 bp, Saccharomyces pastorianus
aatatacatttatcacggtgcttcc

SEQ ID NO: 126535 - DNA, 25 bp, Saccharomyces pastorianus
atatgagcatcatcctgaactaagg

SEQ ID NO: 126536 - DNA, 25 bp, Saccharomyces pastorianus
aagtcaccgaaggtaaccccatatg

SEQ ID NO: 126537 - DNA, 25 bp, Saccharomyces pastorianus
gatttgaaaaatgcacctccctatg

SEQ ID NO: 126538 - DNA, 25 bp, Saccharomyces pastorianus
catcaaactgctacctttccagtta

SEQ ID NO: 126539 - DNA, 25 bp, Saccharomyces pastorianus
gaaggtcttcattggctaatatctc

SEQ ID NO: 126540 - DNA, 25 bp, Saccharomyces pastorianus
ccaagcagccggatggtatgaccat

SEQ ID NO: 126541 - DNA, 25 bp, Saccharomyces pastorianus
ggaccgccaccgatgagaatactca

SEQ ID NO: 126542 - DNA, 25 bp, Saccharomyces pastorianus
gtaagaccatccaaactattgccct

SEQ ID NO: 126543 - DNA, 25 bp, Saccharomyces pastorianus
taagtctccgtctttagttgttgcc

SEQ ID NO: 126544 - DNA, 25 bp, Saccharomyces pastorianus
gtggctatgtgatccatgacgtgga

SEQ ID NO: 126545 - DNA, 25 bp, Saccharomyces pastorianus
gctttatcacgacagaatcttcctc

SEQ ID NO: 126546 - DNA, 25 bp, Saccharomyces pastorianus
ggtaacgaaacttctgctgcgtatt

SEQ ID NO: 126547 - DNA, 25 bp, Saccharomyces pastorianus
gtgaggatggtccaacgcaccaacc

SEQ ID NO: 126548 - DNA, 25 bp, Saccharomyces pastorianus
gaaactctggctcacttgagggcta

SEQ ID NO: 126549 - DNA, 25 bp, Saccharomyces pastorianus
gagggctattccaaacatgcatgta

SEQ ID NO: 126550 - DNA, 25 bp, Saccharomyces pastorianus
gaagtctccatttctatagatgcag

SEQ ID NO: 126551 - DNA, 25 bp, Saccharomyces pastorianus
ggtcgaacaccatctgttgtggctt

SEQ ID NO: 126552 - DNA, 25 bp, Saccharomyces pastorianus
gaatcctgatattatcctggtgtca

SEQ ID NO: 126553 - DNA, 25 bp, Saccharomyces pastorianus
atcttcctcaattggagcattcctc

SEQ ID NO: 126554 - DNA, 25 bp, Saccharomyces pastorianus
tgctgcgtattattctgctatcaaa

SEQ ID NO: 126555 - DNA, 25 bp, Saccharomyces pastorianus
tcatgggtccgctttgaaggcagat

SEQ ID NO: 126556 - DNA, 25 bp, Saccharomyces pastorianus
acaacagggtactgctggtgttcat

SEQ ID NO: 126557 - DNA, 25 bp, Saccharomyces pastorianus
gaagactgttgtggaacccggtcaa

SEQ ID NO: 126558 - DNA, 25 bp, Saccharomyces pastorianus
gctaggccagggtatctcaaatgct

SEQ ID NO: 126559 - DNA, 25 bp, Saccharomyces pastorianus
ggagacctcttccttagcgggacat

SEQ ID NO: 126560 - DNA, 25 bp, Saccharomyces pastorianus
tgacggaaagacctcgtactcgttc

SEQ ID NO: 126561 - DNA, 25 bp, Saccharomyces pastorianus
aactttgccgccacttataacgagg

SEQ ID NO: 126562 - DNA, 25 bp, Saccharomyces pastorianus
tatggaatccatttctagcgctttg

SEQ ID NO: 126563 - DNA, 25 bp, Saccharomyces pastorianus
ggctttcccatttccgattcatata

SEQ ID NO: 126564 - DNA, 25 bp, Saccharomyces pastorianus
caagagggtgtttcttcggagacct

SEQ ID NO: 126565 - DNA, 25 bp, Saccharomyces pastorianus
tggaaatcacttccggtccgctagg

SEQ ID NO: 126566 - DNA, 25 bp, Saccharomyces pastorianus
agaccattgctgatgctacgaaaat

SEQ ID NO: 126567 - DNA, 25 bp, Saccharomyces pastorianus
gttcgtaacctagctttcgtggaat

SEQ ID NO: 126568 - DNA, 25 bp, Saccharomyces pastorianus
gcagaaacctcttaagcggactaag

SEQ ID NO: 126569 - DNA, 25 bp, Saccharomyces pastorianus
ataagacgcctgaagcataagctga

SEQ ID NO: 126570 - DNA, 25 bp, Saccharomyces pastorianus
caccgaacaaagtccttcttataca

SEQ ID NO: 126571 - DNA, 25 bp, Saccharomyces pastorianus
caagcggcactactgagcaactatt

SEQ ID NO: 126572 - DNA, 25 bp, Saccharomyces pastorianus
cgtggaatacgagaccattgctgat

SEQ ID NO: 126573 - DNA, 25 bp, Saccharomyces pastorianus
aaatcagattagttagcgttcgtaa

SEQ ID NO: 126574 - DNA, 25 bp, Saccharomyces pastorianus
gtcgcaaatacttggcaatgaggct

SEQ ID NO: 126575 - DNA, 25 bp, Saccharomyces pastorianus
gaatcagttaggctccacttacaag

SEQ ID NO: 126576 - DNA, 25 bp, Saccharomyces pastorianus
atgacgaaacgtacaaccttgatat

SEQ ID NO: 126577 - DNA, 25 bp, Saccharomyces pastorianus
gataagctctataaacctgcaggaa

SEQ ID NO: 126578 - DNA, 25 bp, Saccharomyces pastorianus
gaaactattacgatattggcgataa

SEQ ID NO: 126579 - DNA, 25 bp, Saccharomyces pastorianus
ggcgataagctctataaacctgcag

SEQ ID NO: 126580 - DNA, 25 bp, Saccharomyces pastorianus
taaacctgcaggaaatccccaatat

SEQ ID NO: 126581 - DNA, 25 bp, Saccharomyces pastorianus
taataaatgccgttgacggtaagaa

SEQ ID NO: 126582 - DNA, 25 bp, Saccharomyces pastorianus
attggcgataagctctataaacctg

SEQ ID NO: 126583 - DNA, 25 bp, Saccharomyces pastorianus
atccccaatattatcaacggttaat

SEQ ID NO: 126584 - DNA, 25 bp, Saccharomyces pastorianus
tattatcaacggttaataaatgccg

SEQ ID NO: 126585 - DNA, 25 bp, Saccharomyces pastorianus
taagctctataaacctgcaggaaat

SEQ ID NO: 126586 - DNA, 25 bp, Saccharomyces pastorianus
ggaaatccccaatattatcaacggt

SEQ ID NO: 126587 - DNA, 25 bp, Saccharomyces pastorianus
tacgatattggcgataagctctata

SEQ ID NO: 126588 - DNA, 25 bp, Saccharomyces pastorianus
ttcagggatgtacaaatagcaagat

SEQ ID NO: 126589 - DNA, 25 bp, Saccharomyces pastorianus
acaccacttggtctcattcagggat

SEQ ID NO: 126590 - DNA, 25 bp, Saccharomyces pastorianus
atagcaagatttagacgtgtagcgg

SEQ ID NO: 126591 - DNA, 25 bp, Saccharomyces pastorianus
gcgggtctgccaaatgtagatgaca

SEQ ID NO: 126592 - DNA, 25 bp, Saccharomyces pastorianus
tggtctcattcagggatgtacaaat

SEQ ID NO: 126593 - DNA, 25 bp, Saccharomyces pastorianus
cacttggtctcattcagggatgtac

SEQ ID NO: 126594 - DNA, 25 bp, Saccharomyces pastorianus
aaggatcgtatacaccacttggtct

SEQ ID NO: 126595 - DNA, 25 bp, Saccharomyces pastorianus
aggtcgtcagggattctgccaaaaa

SEQ ID NO: 126596 - DNA, 25 bp, Saccharomyces pastorianus
gtatacaccacttggtctcattcag

SEQ ID NO: 126597 - DNA, 25 bp, Saccharomyces pastorianus
acgtgtagcgggtctgccaaatgta

SEQ ID NO: 126598 - DNA, 25 bp, Saccharomyces pastorianus
atttagacgtgtagcgggtctgcca

SEQ ID NO: 126599 - DNA, 25 bp, Saccharomyces pastorianus
ataatccgctgtggaatcctagcag

SEQ ID NO: 126600 - DNA, 25 bp, Saccharomyces pastorianus
aaaaagcgttcggtatggatgacta

SEQ ID NO: 126601 - DNA, 25 bp, Saccharomyces pastorianus
gggaagtcacgaccggctatttatc

SEQ ID NO: 126602 - DNA, 25 bp, Saccharomyces pastorianus
aagtgtagttatccggagatcccaa

SEQ ID NO: 126603 - DNA, 25 bp, Saccharomyces pastorianus
gcgaagcgatttgcttccacagggt

SEQ ID NO: 126604 - DNA, 25 bp, Saccharomyces pastorianus
aacgaccccaaattcaagctctgaa

SEQ ID NO: 126605 - DNA, 25 bp, Saccharomyces pastorianus
gttttctgtcgattcaacgacccca

SEQ ID NO: 126606 - DNA, 25 bp, Saccharomyces pastorianus
cgttgtggacgctaattctggtggt

SEQ ID NO: 126607 - DNA, 25 bp, Saccharomyces pastorianus
gatgacctagtcgttgtggacgcta

SEQ ID NO: 126608 - DNA, 25 bp, Saccharomyces pastorianus
ggctatttatcaccaattcaatgtc

SEQ ID NO: 126609 - DNA, 25 bp, Saccharomyces pastorianus
ggatgactatctatctctgttagac

SEQ ID NO: 126610 - DNA, 25 bp, Saccharomyces pastorianus
gattttgatgataatggcgccataa

SEQ ID NO: 126611 - DNA, 25 bp, Saccharomyces pastorianus
gctaaactagatcctaaaaccgcgg

SEQ ID NO: 126612 - DNA, 25 bp, Saccharomyces pastorianus
ggtgcctgcaagtatagacgatgac

SEQ ID NO: 126613 - DNA, 25 bp, Saccharomyces pastorianus
gaatccatggtacccgaaaacaaga

SEQ ID NO: 126614 - DNA, 25 bp, Saccharomyces pastorianus
gcagaagtttttcacaacgtcgaat

SEQ ID NO: 126615 - DNA, 25 bp, Saccharomyces pastorianus
ggtagtcaaatgtcctcaaatgcca

SEQ ID NO: 126616 - DNA, 25 bp, Saccharomyces pastorianus
tggtgagccaaacattgcagaagtt

SEQ ID NO: 126617 - DNA, 25 bp, Saccharomyces pastorianus
taagggtatcgctgctggtgatgat

SEQ ID NO: 126618 - DNA, 25 bp, Saccharomyces pastorianus
aacagcgagcttccaagatatcata

SEQ ID NO: 126619 - DNA, 25 bp, Saccharomyces pastorianus
agagccagacgacgctgctttggaa

SEQ ID NO: 126620 - DNA, 25 bp, Saccharomyces pastorianus
gatcagaacttgaaggtgcctgcaa

SEQ ID NO: 126621 - DNA, 25 bp, Saccharomyces pastorianus
gttcccttcagagatgagtcggtca

SEQ ID NO: 126622 - DNA, 25 bp, Saccharomyces pastorianus
aatgagcatcctgtaattggtaaaa

SEQ ID NO: 126623 - DNA, 25 bp, Saccharomyces pastorianus
gtagctttggctctctggaatggaa

SEQ ID NO: 126624 - DNA, 25 bp, Saccharomyces pastorianus
atggacctatcgaatctcagcacgg

SEQ ID NO: 126625 - DNA, 25 bp, Saccharomyces pastorianus
gccacctcctaagttatcaatggtt

SEQ ID NO: 126626 - DNA, 25 bp, Saccharomyces pastorianus
ctcagcacggattacaactgtactt

SEQ ID NO: 126627 - DNA, 25 bp, Saccharomyces pastorianus
tttgatcttagaccgtagcgttaaa

SEQ ID NO: 126628 - DNA, 25 bp, Saccharomyces pastorianus
gatgatactgatagcgacggatcca

SEQ ID NO: 126629 - DNA, 25 bp, Saccharomyces pastorianus
gagtacagatttccaactgccgcca

SEQ ID NO: 126630 - DNA, 25 bp, Saccharomyces pastorianus
ggataatgtcccctctgcaagagag

SEQ ID NO: 126631 - DNA, 25 bp, Saccharomyces pastorianus
gcgacggatccaagagctattttaa

SEQ ID NO: 126632 - DNA, 25 bp, Saccharomyces pastorianus
tgtagtgctaaaccggaaaggcgaa

SEQ ID NO: 126633 - DNA, 25 bp, Saccharomyces pastorianus
ggcgaaacattgcaagactggttta

SEQ ID NO: 126634 - DNA, 25 bp, Saccharomyces pastorianus
actgccatcattgtagtgctaaacc

SEQ ID NO: 126635 - DNA, 25 bp, Saccharomyces pastorianus
aaccggaaaggcgaaacattgcaag

SEQ ID NO: 126636 - DNA, 25 bp, Saccharomyces pastorianus
aaaggcgaaacattgcaagactggt

SEQ ID NO: 126637 - DNA, 25 bp, Saccharomyces pastorianus
cattgtagtgctaaaccggaaaggc

SEQ ID NO: 126638 - DNA, 25 bp, Saccharomyces pastorianus
gccatcattgtagtgctaaaccgga

SEQ ID NO: 126639 - DNA, 25 bp, Saccharomyces pastorianus
gtgctaaaccggaaaggcgaaacat

SEQ ID NO: 126640 - DNA, 25 bp, Saccharomyces pastorianus
catcattgtagtgctaaaccggaaa

SEQ ID NO: 126641 - DNA, 25 bp, Saccharomyces pastorianus
aacattgcaagactggtttaataaa

SEQ ID NO: 126642 - DNA, 25 bp, Saccharomyces pastorianus
tgccatcattgtagtgctaaaccgg

SEQ ID NO: 126643 - DNA, 25 bp, Saccharomyces pastorianus
gaaaccctgtcattgaacgtcttcg

SEQ ID NO: 126644 - DNA, 25 bp, Saccharomyces pastorianus
taatggtgaacccaacgctggcctg

SEQ ID NO: 126645 - DNA, 25 bp, Saccharomyces pastorianus
gacgatgtctttcgatcataagcca

SEQ ID NO: 126646 - DNA, 25 bp, Saccharomyces pastorianus
gtggctaactgtggtgattcgcgat

SEQ ID NO: 126647 - DNA, 25 bp, Saccharomyces pastorianus
aacgtcttcgcagtattcgatggtc

SEQ ID NO: 126648 - DNA, 25 bp, Saccharomyces pastorianus
attcgcgatgtattctttcctccaa

SEQ ID NO: 126649 - DNA, 25 bp, Saccharomyces pastorianus
ttcgaaatttctaagcggcggccgc

SEQ ID NO: 126650 - DNA, 25 bp, Saccharomyces pastorianus
caacagttcgtgtggatctacagca

SEQ ID NO: 126651 - DNA, 25 bp, Saccharomyces pastorianus
gtttcgaaaaccaccattacacatc

SEQ ID NO: 126652 - DNA, 25 bp, Saccharomyces pastorianus
actggctctcagtagggcatttagt

SEQ ID NO: 126653 - DNA, 25 bp, Saccharomyces pastorianus
taatggtggtactgtctctcttgga

SEQ ID NO: 126654 - DNA, 25 bp, Saccharomyces pastorianus
tagatccgcaggatggcctggtatt

SEQ ID NO: 126655 - DNA, 25 bp, Saccharomyces pastorianus
gttcccttcagactaacaccaaatt

SEQ ID NO: 126656 - DNA, 25 bp, Saccharomyces pastorianus
gtcccagaaattgttcccttcagac

SEQ ID NO: 126657 - DNA, 25 bp, Saccharomyces pastorianus
gttcttcatgtagacttcgactgtt

SEQ ID NO: 126658 - DNA, 25 bp, Saccharomyces pastorianus
gatcttacgccgtcatggcaatggt

SEQ ID NO: 126659 - DNA, 25 bp, Saccharomyces pastorianus
aatttcctccaatcttgtaccaatg

SEQ ID NO: 126660 - DNA, 25 bp, Saccharomyces pastorianus
gttggccatatattaggtctaggtg

SEQ ID NO: 126661 - DNA, 25 bp, Saccharomyces pastorianus
ggcagcacaccgcagcagatggaaa

SEQ ID NO: 126662 - DNA, 25 bp, Saccharomyces pastorianus
gcaaaaggttacctgtcccagaaat

SEQ ID NO: 126663 - DNA, 25 bp, Saccharomyces pastorianus
gccaggaatacgtacgccagatctt

SEQ ID NO: 126664 - DNA, 25 bp, Saccharomyces pastorianus
tagaaaactttcctgatccaatcaa

SEQ ID NO: 126665 - DNA, 25 bp, Saccharomyces pastorianus
caccttgaagggtctatacattctt

SEQ ID NO: 126666 - DNA, 25 bp, Saccharomyces pastorianus
gatttcctcaacatatccgttctga

SEQ ID NO: 126667 - DNA, 25 bp, Saccharomyces pastorianus
acaaccccttcttgcttgttatgaa

SEQ ID NO: 126668 - DNA, 25 bp, Saccharomyces pastorianus
gaatctttacgaacaggccttgact

SEQ ID NO: 126669 - DNA, 25 bp, Saccharomyces pastorianus
ggatccatcttcttctcaggagtac

SEQ ID NO: 126670 - DNA, 25 bp, Saccharomyces pastorianus
gcagctggtgcaaagcatgtgtcga

SEQ ID NO: 126671 - DNA, 25 bp, Saccharomyces pastorianus
gcccttgccttattgttggagtaca

SEQ ID NO: 126672 - DNA, 25 bp, Saccharomyces pastorianus
tcttttatactggttcacttcggag

SEQ ID NO: 126673 - DNA, 25 bp, Saccharomyces pastorianus
aacctgctaagtttcagcttactgc

SEQ ID NO: 126674 - DNA, 25 bp, Saccharomyces pastorianus
ttactgcacattttgagaacaccat

SEQ ID NO: 126675 - DNA, 25 bp, Saccharomyces pastorianus
gttgggcaagactgagcttctcaaa

SEQ ID NO: 126676 - DNA, 25 bp, Saccharomyces pastorianus
ttcaaactttctatctcacccaaat

SEQ ID NO: 126677 - DNA, 25 bp, Saccharomyces pastorianus
catcatggactgtaattctcggacg

SEQ ID NO: 126678 - DNA, 25 bp, Saccharomyces pastorianus
gtggcatcttattttctctacatag

SEQ ID NO: 126679 - DNA, 25 bp, Saccharomyces pastorianus
ataccgtgtgaaccagctaagtcct

SEQ ID NO: 126680 - DNA, 25 bp, Saccharomyces pastorianus
ggcactctgccaaattccacaaagg

SEQ ID NO: 126681 - DNA, 25 bp, Saccharomyces pastorianus
gaggaactttgctcaaataccgtgt

SEQ ID NO: 126682 - DNA, 25 bp, Saccharomyces pastorianus
gcgaatctttgttaagtggcatctt

SEQ ID NO: 126683 - DNA, 25 bp, Saccharomyces pastorianus
atattttctcactttcaacctccaa

SEQ ID NO: 126684 - DNA, 25 bp, Saccharomyces pastorianus
aattctcggacgtctagcctgtcta

SEQ ID NO: 126685 - DNA, 25 bp, Saccharomyces pastorianus
actggcaaccctttcgtgcgaataa

SEQ ID NO: 126686 - DNA, 25 bp, Saccharomyces pastorianus
gaatcagagaagttttccggcactc

SEQ ID NO: 126687 - DNA, 25 bp, Saccharomyces pastorianus
gaaaattcctcggttaatgctcgcg

SEQ ID NO: 126688 - DNA, 25 bp, Saccharomyces pastorianus
atttgcccaaagttatcacgttttg

SEQ ID NO: 126689 - DNA, 25 bp, Saccharomyces pastorianus
cgtgccgccgtgctattaaagttta

SEQ ID NO: 126690 - DNA, 25 bp, Saccharomyces pastorianus
atagcctccgaatcattaatgcatt

SEQ ID NO: 126691 - DNA, 25 bp, Saccharomyces pastorianus
gttttggctagatattgcggccgca

SEQ ID NO: 126692 - DNA, 25 bp, Saccharomyces pastorianus
atggtcgttttgagtacagggcaat

SEQ ID NO: 126693 - DNA, 25 bp, Saccharomyces pastorianus
atggttagacctttcgaacaattca

SEQ ID NO: 126694 - DNA, 25 bp, Saccharomyces pastorianus
gttgcctcaggcagagttggagttt

SEQ ID NO: 126695 - DNA, 25 bp, Saccharomyces pastorianus
tgcggccgcatcaatttctgaagct

SEQ ID NO: 126696 - DNA, 25 bp, Saccharomyces pastorianus
gaacaattcagcgtccgaacaaatt

SEQ ID NO: 126697 - DNA, 25 bp, Saccharomyces pastorianus
aacattcttcactttagcccaattg

SEQ ID NO: 126698 - DNA, 25 bp, Saccharomyces pastorianus
gtatttgctcaaagtcaaccctatt

SEQ ID NO: 126699 - DNA, 25 bp, Saccharomyces pastorianus
agtcctgaacaactttctaccttgt

SEQ ID NO: 126700 - DNA, 25 bp, Saccharomyces pastorianus
tgattgggatgcttgttacacacag

SEQ ID NO: 126701 - DNA, 25 bp, Saccharomyces pastorianus
actccatttggtcttaagtcctgaa

SEQ ID NO: 126702 - DNA, 25 bp, Saccharomyces pastorianus
gtaaattccgttttgctctattgat

SEQ ID NO: 126703 - DNA, 25 bp, Saccharomyces pastorianus
gaacaatcatctgaagcggttgctg

SEQ ID NO: 126704 - DNA, 25 bp, Saccharomyces pastorianus
ttgttaccttttcttactccatttg

SEQ ID NO: 126705 - DNA, 25 bp, Saccharomyces pastorianus
gcggttgctgtctcttttgaattga

SEQ ID NO: 126706 - DNA, 25 bp, Saccharomyces pastorianus
accttgttacttgaagtcggcttcg

SEQ ID NO: 126707 - DNA, 25 bp, Saccharomyces pastorianus
agtgccacttactttgatcaactgg

SEQ ID NO: 126708 - DNA, 25 bp, Saccharomyces pastorianus
gtgaagcccctggatatttttgatc

SEQ ID NO: 126709 - DNA, 25 bp, Saccharomyces pastorianus
aaatcttttctaccttctctagcag

SEQ ID NO: 126710 - DNA, 25 bp, Saccharomyces pastorianus
gacagcttaccttcaacagatttgg

SEQ ID NO: 126711 - DNA, 25 bp, Saccharomyces pastorianus
aaacgacgtgattcctcaagaacat

SEQ ID NO: 126712 - DNA, 25 bp, Saccharomyces pastorianus
gaccagaggcgatttcacgtataat

SEQ ID NO: 126713 - DNA, 25 bp, Saccharomyces pastorianus
ggatggtcgtctcacgaacgtgata

SEQ ID NO: 126714 - DNA, 25 bp, Saccharomyces pastorianus
gtctgttcattgtcatactgggtac

SEQ ID NO: 126715 - DNA, 25 bp, Saccharomyces pastorianus
catattcctacggttgtctgttcat

SEQ ID NO: 126716 - DNA, 25 bp, Saccharomyces pastorianus
tagcttaatcaggttgacggtcaaa

SEQ ID NO: 126717 - DNA, 25 bp, Saccharomyces pastorianus
gatttggtttttactggcattggat

SEQ ID NO: 126718 - DNA, 25 bp, Saccharomyces pastorianus
tagcagttgaggcttccgcacacag

SEQ ID NO: 126719 - DNA, 25 bp, Saccharomyces pastorianus
gcacacagttggtctgagcttacta

SEQ ID NO: 126720 - DNA, 25 bp, Saccharomyces pastorianus
cacaggcgtttcctcggaatttacg

SEQ ID NO: 126721 - DNA, 25 bp, Saccharomyces pastorianus
tttcagtcgatgtctctaacaccac

SEQ ID NO: 126722 - DNA, 25 bp, Saccharomyces pastorianus
ttttgtcccgtgtccttgaagatag

SEQ ID NO: 126723 - DNA, 25 bp, Saccharomyces pastorianus
atggaccaatggacctcatcatata

SEQ ID NO: 126724 - DNA, 25 bp, Saccharomyces pastorianus
gtagaaaatccgtacttggtcacta

SEQ ID NO: 126725 - DNA, 25 bp, Saccharomyces pastorianus
ttccgcagttgtacaaggttaccgt

SEQ ID NO: 126726 - DNA, 25 bp, Saccharomyces pastorianus
attttgcagtccgaagtacctagaa

SEQ ID NO: 126727 - DNA, 25 bp, Saccharomyces pastorianus
gggatgttattacttcaacgtcaac

SEQ ID NO: 126728 - DNA, 25 bp, Saccharomyces pastorianus
atttcattttcaacatcctcttcag

SEQ ID NO: 126729 - DNA, 25 bp, Saccharomyces pastorianus
tggtcactacaattccccattgttt

SEQ ID NO: 126730 - DNA, 25 bp, Saccharomyces pastorianus
caagttttacatgagattccgcagt

SEQ ID NO: 126731 - DNA, 25 bp, Saccharomyces pastorianus
aatacgcatatattgccgttgggtc

SEQ ID NO: 126732 - DNA, 25 bp, Saccharomyces pastorianus
acgggccgcaagatcagacgatatt

SEQ ID NO: 126733 - DNA, 25 bp, Saccharomyces pastorianus
ggtggattcttaaacgcctttgaca

SEQ ID NO: 126734 - DNA, 25 bp, Saccharomyces pastorianus
gtaaccaactatccagttaaccctg

SEQ ID NO: 126735 - DNA, 25 bp, Saccharomyces pastorianus
tttcggaagtttagcgtgttctcct

SEQ ID NO: 126736 - DNA, 25 bp, Saccharomyces pastorianus
atatccttgttactgagctccttaa

SEQ ID NO: 126737 - DNA, 25 bp, Saccharomyces pastorianus
gtgttctcctgctgatgttgattta

SEQ ID NO: 126738 - DNA, 25 bp, Saccharomyces pastorianus
tgctagctatagacgacttcctgaa

SEQ ID NO: 126739 - DNA, 25 bp, Saccharomyces pastorianus
aagggctttgtcactttacactaga

SEQ ID NO: 126740 - DNA, 25 bp, Saccharomyces pastorianus
gaaatgcgtctcatatccttgttac

SEQ ID NO: 126741 - DNA, 25 bp, Saccharomyces pastorianus
ctttgagacccgttttgcaagggat

SEQ ID NO: 126742 - DNA, 25 bp, Saccharomyces pastorianus
atcaatcttaccaaccttatcgaac

SEQ ID NO: 126743 - DNA, 25 bp, Saccharomyces pastorianus
cgctgcgcgaacactttctaatgat

SEQ ID NO: 126744 - DNA, 25 bp, Saccharomyces pastorianus
acattttgactaatccgttggaggc

SEQ ID NO: 126745 - DNA, 25 bp, Saccharomyces pastorianus
aagagatacgcttcaccgaacgact

SEQ ID NO: 126746 - DNA, 25 bp, Saccharomyces pastorianus
gaaagcaacgccttattttgacgat

SEQ ID NO: 126747 - DNA, 25 bp, Saccharomyces pastorianus
tcaatcacatagaccttcccaaaat

SEQ ID NO: 126748 - DNA, 25 bp, Saccharomyces pastorianus
atacgcgcacctgggatattcaatc

SEQ ID NO: 126749 - DNA, 25 bp, Saccharomyces pastorianus
tttgatgctgccacaagcgtttaca

SEQ ID NO: 126750 - DNA, 25 bp, Saccharomyces pastorianus
tagatcaatttgacgctgcgcgaac

SEQ ID NO: 126751 - DNA, 25 bp, Saccharomyces pastorianus
gcgtttacactgagccaaccgaaat

SEQ ID NO: 126752 - DNA, 25 bp, Saccharomyces pastorianus
aactcatcggatgcctcgttagtct

SEQ ID NO: 126753 - DNA, 25 bp, Saccharomyces pastorianus
gatgctacaagataaggataactat

SEQ ID NO: 126754 - DNA, 25 bp, Saccharomyces pastorianus
aaaattgtttcgaagactcctcatt

SEQ ID NO: 126755 - DNA, 25 bp, Saccharomyces pastorianus
aggttctacgagagatctgccaatt

SEQ ID NO: 126756 - DNA, 25 bp, Saccharomyces pastorianus
gtttcgaagactcctcatttcgttt

SEQ ID NO: 126757 - DNA, 25 bp, Saccharomyces pastorianus
aattgggccctctgttcgcaaacat

SEQ ID NO: 126758 - DNA, 25 bp, Saccharomyces pastorianus
aagactcctcatttcgtttacaaga

SEQ ID NO: 126759 - DNA, 25 bp, Saccharomyces pastorianus
tcgtttacaagaaaacagcttcaag

SEQ ID NO: 126760 - DNA, 25 bp, Saccharomyces pastorianus
ggataactatatcaaaacactgatg

SEQ ID NO: 126761 - DNA, 25 bp, Saccharomyces pastorianus
cctctgttcgcaaacatcaacttct

SEQ ID NO: 126762 - DNA, 25 bp, Saccharomyces pastorianus
aggtgggttaagaatgatgctacaa

SEQ ID NO: 126763 - DNA, 25 bp, Saccharomyces pastorianus
agcttcaagaggcaattgggccctc

SEQ ID NO: 126764 - DNA, 25 bp, Saccharomyces pastorianus
gacgatgaattttctcctgctactc

SEQ ID NO: 126765 - DNA, 25 bp, Saccharomyces pastorianus
gggtcctggcattttagaactgaac

SEQ ID NO: 126766 - DNA, 25 bp, Saccharomyces pastorianus
aatccaatatgggtcctggcatttt

SEQ ID NO: 126767 - DNA, 25 bp, Saccharomyces pastorianus
aacacatttacatctcagcctaata

SEQ ID NO: 126768 - DNA, 25 bp, Saccharomyces pastorianus
gtattactaaccacatttcaaaggg

SEQ ID NO: 126769 - DNA, 25 bp, Saccharomyces pastorianus
gaccaattgagcgaccacgttatag

SEQ ID NO: 126770 - DNA, 25 bp, Saccharomyces pastorianus
gagacatgtgattgactatctgaac

SEQ ID NO: 126771 - DNA, 25 bp, Saccharomyces pastorianus
tcaaagggtagaatgcacgcacaag

SEQ ID NO: 126772 - DNA, 25 bp, Saccharomyces pastorianus
tcctgctactccaccggagaatgtt

SEQ ID NO: 126773 - DNA, 25 bp, Saccharomyces pastorianus
gcaagaaaatctcctacataagcag

SEQ ID NO: 126774 - DNA, 25 bp, Saccharomyces pastorianus
gagaatgttcttgaaggtccttaca

SEQ ID NO: 126775 - DNA, 25 bp, Saccharomyces pastorianus
aagttggtctaactctttggctggg

SEQ ID NO: 126776 - DNA, 25 bp, Saccharomyces pastorianus
atatttggtcactagctcgatgtct

SEQ ID NO: 126777 - DNA, 25 bp, Saccharomyces pastorianus
gagacctttggcgtttactctaaga

SEQ ID NO: 126778 - DNA, 25 bp, Saccharomyces pastorianus
atgaccccttactgggcgcacgcag

SEQ ID NO: 126779 - DNA, 25 bp, Saccharomyces pastorianus
aacgatcccaaatccacaacagttt

SEQ ID NO: 126780 - DNA, 25 bp, Saccharomyces pastorianus
gcgcacgcagtgtatcaatttgtaa

SEQ ID NO: 126781 - DNA, 25 bp, Saccharomyces pastorianus
agtggctcgaaatcattcttacaaa

SEQ ID NO: 126782 - DNA, 25 bp, Saccharomyces pastorianus
agacgctgcggctctcaagaaagat

SEQ ID NO: 126783 - DNA, 25 bp, Saccharomyces pastorianus
gaaagatacgctactatgacccctt

SEQ ID NO: 126784 - DNA, 25 bp, Saccharomyces pastorianus
gctcatttggtggtctgattcccac

SEQ ID NO: 126785 - DNA, 25 bp, Saccharomyces pastorianus
cttttggctacatacagtggctcga

SEQ ID NO: 126786 - DNA, 25 bp, Saccharomyces pastorianus
gaatccaactatgagtccattaagg

SEQ ID NO: 126787 - DNA, 25 bp, Saccharomyces pastorianus
atgacttttatgcaacagcttcaag

SEQ ID NO: 126788 - DNA, 25 bp, Saccharomyces pastorianus
gcgaaacgtggcttcaacttggtat

SEQ ID NO: 126789 - DNA, 25 bp, Saccharomyces pastorianus
taatgttggccaatcacactccatt

SEQ ID NO: 126790 - DNA, 25 bp, Saccharomyces pastorianus
gtccattaaggaattgtgtgcgcag

SEQ ID NO: 126791 - DNA, 25 bp, Saccharomyces pastorianus
tttttactaccagcagtcaatttcg

SEQ ID NO: 126792 - DNA, 25 bp, Saccharomyces pastorianus
ttctagccattgacattgcggagga

SEQ ID NO: 126793 - DNA, 25 bp, Saccharomyces pastorianus
aatactgtgttatcactggtgcaag

SEQ ID NO: 126794 - DNA, 25 bp, Saccharomyces pastorianus
gtgtgcgcagttaccaatcaccgtt

SEQ ID NO: 126795 - DNA, 25 bp, Saccharomyces pastorianus
catgtcgttgtaaagattctagcca

SEQ ID NO: 126796 - DNA, 25 bp, Saccharomyces pastorianus
gtcaatttcgacaagtatggtgcta

SEQ ID NO: 126797 - DNA, 25 bp, Saccharomyces pastorianus
gaccatttgtttaatttcactctct

SEQ ID NO: 126798 - DNA, 25 bp, Saccharomyces pastorianus
gttaagtctacaacaccatacgtta

SEQ ID NO: 126799 - DNA, 25 bp, Saccharomyces pastorianus
aagagctacttaactattcagaaat

SEQ ID NO: 126800 - DNA, 25 bp, Saccharomyces pastorianus
tttttcctgcgattgtttgaccatt

SEQ ID NO: 126801 - DNA, 25 bp, Saccharomyces pastorianus
tcatcctatgttgcggttttgggta

SEQ ID NO: 126802 - DNA, 25 bp, Saccharomyces pastorianus
cgttcataagcacggatcatcctat

SEQ ID NO: 126803 - DNA, 25 bp, Saccharomyces pastorianus
gagtaacgaaacacccatctttgaa

SEQ ID NO: 126804 - DNA, 25 bp, Saccharomyces pastorianus
atacccacaacaaatctaccaaacg

SEQ ID NO: 126805 - DNA, 25 bp, Saccharomyces pastorianus
ctgcacccaggatggcactcaaaaa

SEQ ID NO: 126806 - DNA, 25 bp, Saccharomyces pastorianus
aagagaactctgcacccaggatggc

SEQ ID NO: 126807 - DNA, 25 bp, Saccharomyces pastorianus
aagtttctcgatagcgttcataagc

SEQ ID NO: 126808 - DNA, 25 bp, Saccharomyces pastorianus
tcttgtttcacttgattgtgagctc

SEQ ID NO: 126809 - DNA, 25 bp, Saccharomyces pastorianus
gagctccaaaagcttgctcttaagc

SEQ ID NO: 126810 - DNA, 25 bp, Saccharomyces pastorianus
cacttgattgtgagctccaaaagct

SEQ ID NO: 126811 - DNA, 25 bp, Saccharomyces pastorianus
ttgtgagctccaaaagcttgctctt

SEQ ID NO: 126812 - DNA, 25 bp, Saccharomyces pastorianus
tgattgtgagctccaaaagcttgct

SEQ ID NO: 126813 - DNA, 25 bp, Saccharomyces pastorianus
aaagcttgctcttaagctgtcaaag

SEQ ID NO: 126814 - DNA, 25 bp, Saccharomyces pastorianus
ttgtttcacttgattgtgagctcca

SEQ ID NO: 126815 - DNA, 25 bp, Saccharomyces pastorianus
caaaagcttgctcttaagctgtcaa

SEQ ID NO: 126816 - DNA, 25 bp, Saccharomyces pastorianus
gtttcacttgattgtgagctccaaa

SEQ ID NO: 126817 - DNA, 25 bp, Saccharomyces pastorianus
gtgagctccaaaagcttgctcttaa

SEQ ID NO: 126818 - DNA, 25 bp, Saccharomyces pastorianus
gctccaaaagcttgctcttaagctg

SEQ ID NO: 126819 - DNA, 25 bp, Saccharomyces pastorianus
gttataggaaaaccaatctgtcaga

SEQ ID NO: 126820 - DNA, 25 bp, Saccharomyces pastorianus
attgtgctgcaaagatcgttatagg

SEQ ID NO: 126821 - DNA, 25 bp, Saccharomyces pastorianus
ttatgtacaaggtagtatcagctat

SEQ ID NO: 126822 - DNA, 25 bp, Saccharomyces pastorianus
gtatcagctataacaggactattct

SEQ ID NO: 126823 - DNA, 25 bp, Saccharomyces pastorianus
aacaggactattcttaccggcttat

SEQ ID NO: 126824 - DNA, 25 bp, Saccharomyces pastorianus
cattgttctatgacgattcaacgga

SEQ ID NO: 126825 - DNA, 25 bp, Saccharomyces pastorianus
ggactattcttaccggcttatggaa

SEQ ID NO: 126826 - DNA, 25 bp, Saccharomyces pastorianus
caatctgtcagaaacattgttctat

SEQ ID NO: 126827 - DNA, 25 bp, Saccharomyces pastorianus
taccggcttatggaaattatttcac

SEQ ID NO: 126828 - DNA, 25 bp, Saccharomyces pastorianus
attatttcacagattgtgctgcaaa

SEQ ID NO: 126829 - DNA, 25 bp, Saccharomyces pastorianus
gttctatgacgattcaacggaaaga

SEQ ID NO: 126830 - DNA, 25 bp, Saccharomyces pastorianus
gaattggtcccaaatccccaatgaa

SEQ ID NO: 126831 - DNA, 25 bp, Saccharomyces pastorianus
atagcggagttttcttcagcaattt

SEQ ID NO: 126832 - DNA, 25 bp, Saccharomyces pastorianus
gacttaatagtcacctctgaaaatt

SEQ ID NO: 126833 - DNA, 25 bp, Saccharomyces pastorianus
tacctaatgcgatacgtcttcctta

SEQ ID NO: 126834 - DNA, 25 bp, Saccharomyces pastorianus
gcaaatattgcttctacactcagtt

SEQ ID NO: 126835 - DNA, 25 bp, Saccharomyces pastorianus
ctcagttttctaccccatcatgaaa

SEQ ID NO: 126836 - DNA, 25 bp, Saccharomyces pastorianus
aaccgtatacacatcctttattctc

SEQ ID NO: 126837 - DNA, 25 bp, Saccharomyces pastorianus
cgatacgtcttccttactgtaagca

SEQ ID NO: 126838 - DNA, 25 bp, Saccharomyces pastorianus
agattcgtctctattggcagcagta

SEQ ID NO: 126839 - DNA, 25 bp, Saccharomyces pastorianus
tttattctctatccaaacgttgtcg

SEQ ID NO: 126840 - DNA, 25 bp, Saccharomyces pastorianus
ggcaatctgccccattacaaaagac

SEQ ID NO: 126841 - DNA, 25 bp, Saccharomyces pastorianus
ccggacatttcctgtagacgacgat

SEQ ID NO: 126842 - DNA, 25 bp, Saccharomyces pastorianus
gacgacgatgagtttgttctggcat

SEQ ID NO: 126843 - DNA, 25 bp, Saccharomyces pastorianus
acgatgagtttgttctggcattagc

SEQ ID NO: 126844 - DNA, 25 bp, Saccharomyces pastorianus
gatgagtttgttctggcattagcta

SEQ ID NO: 126845 - DNA, 25 bp, Saccharomyces pastorianus
cctgtagacgacgatgagtttgttc

SEQ ID NO: 126846 - DNA, 25 bp, Saccharomyces pastorianus
ggacatttcctgtagacgacgatga

SEQ ID NO: 126847 - DNA, 25 bp, Saccharomyces pastorianus
tgagtttgttctggcattagctatg

SEQ ID NO: 126848 - DNA, 25 bp, Saccharomyces pastorianus
cgacgatgagtttgttctggcatta

SEQ ID NO: 126849 - DNA, 25 bp, Saccharomyces pastorianus
gacatttcctgtagacgacgatgag

SEQ ID NO: 126850 - DNA, 25 bp, Saccharomyces pastorianus
tttcctgtagacgacgatgagtttg

SEQ ID NO: 126851 - DNA, 25 bp, Saccharomyces pastorianus
catttcctgtagacgacgatgagtt

SEQ ID NO: 126852 - DNA, 25 bp, Saccharomyces pastorianus
ccggacatttcctgtagacgacgat

SEQ ID NO: 126853 - DNA, 25 bp, Saccharomyces pastorianus
gacgacgatgagtttgttctggcat

SEQ ID NO: 126854 - DNA, 25 bp, Saccharomyces pastorianus
acgatgagtttgttctggcattagc

SEQ ID NO: 126855 - DNA, 25 bp, Saccharomyces pastorianus
gatgagtttgttctggcattagcta

SEQ ID NO: 126856 - DNA, 25 bp, Saccharomyces pastorianus
ggacatttcctgtagacgacgatga

SEQ ID NO: 126857 - DNA, 25 bp, Saccharomyces pastorianus
atgtgtctgtctgaatacttccgga

SEQ ID NO: 126858 - DNA, 25 bp, Saccharomyces pastorianus
tgagtttgttctggcattagctatg

SEQ ID NO: 126859 - DNA, 25 bp, Saccharomyces pastorianus
cgacgatgagtttgttctggcatta

SEQ ID NO: 126860 - DNA, 25 bp, Saccharomyces pastorianus
gacatttcctgtagacgacgatgag

SEQ ID NO: 126861 - DNA, 25 bp, Saccharomyces pastorianus
ttcctgtagacgacgatgagtttgt

SEQ ID NO: 126862 - DNA, 25 bp, Saccharomyces pastorianus
catttcctgtagacgacgatgagtt

SEQ ID NO: 126863 - DNA, 25 bp, Saccharomyces pastorianus
taactttttagcattagccacgtct

SEQ ID NO: 126864 - DNA, 25 bp, Saccharomyces pastorianus
tgaggcgggaattttcagacggttc

SEQ ID NO: 126865 - DNA, 25 bp, Saccharomyces pastorianus
gagggatctttatatgccttttgat

SEQ ID NO: 126866 - DNA, 25 bp, Saccharomyces pastorianus
aaattactccttgtccatggtcctc

SEQ ID NO: 126867 - DNA, 25 bp, Saccharomyces pastorianus
aaatccaacagctgagggcatcctc

SEQ ID NO: 126868 - DNA, 25 bp, Saccharomyces pastorianus
tgtgaacactttacttacgcaactt

SEQ ID NO: 126869 - DNA, 25 bp, Saccharomyces pastorianus
gtccatggtcctccgggaacaggta

SEQ ID NO: 126870 - DNA, 25 bp, Saccharomyces pastorianus
gaattgtcttgtgcacgcatctttt

SEQ ID NO: 126871 - DNA, 25 bp, Saccharomyces pastorianus
gacggttccgataccattgatacta

SEQ ID NO: 126872 - DNA, 25 bp, Saccharomyces pastorianus
ggtataattctttttcacgcaacat

SEQ ID NO: 126873 - DNA, 25 bp, Saccharomyces pastorianus
gggcatcctccacattctaaaggtt

SEQ ID NO: 126874 - DNA, 25 bp, Saccharomyces pastorianus
aagcacattgacttcgctccaactt

SEQ ID NO: 126875 - DNA, 25 bp, Saccharomyces pastorianus
ggactctgaaaagcacattgacttc

SEQ ID NO: 126876 - DNA, 25 bp, Saccharomyces pastorianus
actctgaaaagcacattgacttcgc

SEQ ID NO: 126877 - DNA, 25 bp, Saccharomyces pastorianus
gctagaaaggctgaagcttccggtg

SEQ ID NO: 126878 - DNA, 25 bp, Saccharomyces pastorianus
ttgacttcgctccaacttctccatt

SEQ ID NO: 126879 - DNA, 25 bp, Saccharomyces pastorianus
aaaagcacattgacttcgctccaac

SEQ ID NO: 126880 - DNA, 25 bp, Saccharomyces pastorianus
aaagcacattgacttcgctccaact

SEQ ID NO: 126881 - DNA, 25 bp, Saccharomyces pastorianus
tagaaaggctgaagcttccggtgaa

SEQ ID NO: 126882 - DNA, 25 bp, Saccharomyces pastorianus
agaaacgctgctagaaaggctgaag

SEQ ID NO: 126883 - DNA, 25 bp, Saccharomyces pastorianus
gaaaagcacattgacttcgctccaa

SEQ ID NO: 126884 - DNA, 25 bp, Saccharomyces pastorianus
gcacattgacttcgctccaacttct

SEQ ID NO: 126885 - DNA, 25 bp, Saccharomyces pastorianus
gcctttttcccagccgttagaacat

SEQ ID NO: 126886 - DNA, 25 bp, Saccharomyces pastorianus
aaacctcctttgatgtgttggccca

SEQ ID NO: 126887 - DNA, 25 bp, Saccharomyces pastorianus
aaccgaggaaaagcaccgctgccaa

SEQ ID NO: 126888 - DNA, 25 bp, Saccharomyces pastorianus
caccttttttactggaggcaaggat

SEQ ID NO: 126889 - DNA, 25 bp, Saccharomyces pastorianus
gttagaacatgctcagaaccgagga

SEQ ID NO: 126890 - DNA, 25 bp, Saccharomyces pastorianus
ttttacacctgtacatctccaccat

SEQ ID NO: 126891 - DNA, 25 bp, Saccharomyces pastorianus
ggatgcgtttgaatatcgccttttt

SEQ ID NO: 126892 - DNA, 25 bp, Saccharomyces pastorianus
tgttagtctgacagttttacacctg

SEQ ID NO: 126893 - DNA, 25 bp, Saccharomyces pastorianus
tggtatatatctcttgacctcaata

SEQ ID NO: 126894 - DNA, 25 bp, Saccharomyces pastorianus
catcttgcattcactttggtatata

SEQ ID NO: 126895 - DNA, 25 bp, Saccharomyces pastorianus
accgctactagtggccgtgctggaa

SEQ ID NO: 126896 - DNA, 25 bp, Saccharomyces pastorianus
atggtgccgtccatctttctactta

SEQ ID NO: 126897 - DNA, 25 bp, Saccharomyces pastorianus
cgtccatctttctacttacttgaag

SEQ ID NO: 126898 - DNA, 25 bp, Saccharomyces pastorianus
ggtgccgtccatctttctacttact

SEQ ID NO: 126899 - DNA, 25 bp, Saccharomyces pastorianus
tggtgccgtccatctttctacttac

SEQ ID NO: 126900 - DNA, 25 bp, Saccharomyces pastorianus
agcatggtgccgtccatctttctac

SEQ ID NO: 126901 - DNA, 25 bp, Saccharomyces pastorianus
gcatggtgccgtccatctttctact

SEQ ID NO: 126902 - DNA, 25 bp, Saccharomyces pastorianus
ccgtccatctttctacttacttgaa

SEQ ID NO: 126903 - DNA, 25 bp, Saccharomyces pastorianus
gccgtccatctttctacttacttga

SEQ ID NO: 126904 - DNA, 25 bp, Saccharomyces pastorianus
aagcatggtgccgtccatctttcta

SEQ ID NO: 126905 - DNA, 25 bp, Saccharomyces pastorianus
tgccgtccatctttctacttacttg

SEQ ID NO: 126906 - DNA, 25 bp, Saccharomyces pastorianus
gtgccgtccatctttctacttactt

SEQ ID NO: 126907 - DNA, 25 bp, Saccharomyces pastorianus
gtccagcagattcagataggtgtaa

SEQ ID NO: 126908 - DNA, 25 bp, Saccharomyces pastorianus
tggcacttgctttatttgcggataa

SEQ ID NO: 126909 - DNA, 25 bp, Saccharomyces pastorianus
ataggttatcaccatactccgtaca

SEQ ID NO: 126910 - DNA, 25 bp, Saccharomyces pastorianus
actccttggagtgatctagacaacc

SEQ ID NO: 126911 - DNA, 25 bp, Saccharomyces pastorianus
tccgtacacgaactgtccaacttgt

SEQ ID NO: 126912 - DNA, 25 bp, Saccharomyces pastorianus
gtgtaccaggcaaattcactccttg

SEQ ID NO: 126913 - DNA, 25 bp, Saccharomyces pastorianus
ccaggcaacctggataagacactct

SEQ ID NO: 126914 - DNA, 25 bp, Saccharomyces pastorianus
gacaaccaaaattgccaggcaacct

SEQ ID NO: 126915 - DNA, 25 bp, Saccharomyces pastorianus
aagcatccattggttcagggatata

SEQ ID NO: 126916 - DNA, 25 bp, Saccharomyces pastorianus
gataagtcaagcatccattggttca

SEQ ID NO: 126917 - DNA, 25 bp, Saccharomyces pastorianus
gtccaacttgtccagcagattcaga

SEQ ID NO: 126918 - DNA, 25 bp, Saccharomyces pastorianus
gagccaaacgtgaatttctattgca

SEQ ID NO: 126919 - DNA, 25 bp, Saccharomyces pastorianus
gttttgaacctctatgatagtccga

SEQ ID NO: 126920 - DNA, 25 bp, Saccharomyces pastorianus
agaattttaccatcatcctctgcta

SEQ ID NO: 126921 - DNA, 25 bp, Saccharomyces pastorianus
ctatggattttgtcgaggaacaccc

SEQ ID NO: 126922 - DNA, 25 bp, Saccharomyces pastorianus
gaatttggcaccattgatccagata

SEQ ID NO: 126923 - DNA, 25 bp, Saccharomyces pastorianus
ccatcatcctctgctatctaaatat

SEQ ID NO: 126924 - DNA, 25 bp, Saccharomyces pastorianus
aactatgacgttttccaatttatgg

SEQ ID NO: 126925 - DNA, 25 bp, Saccharomyces pastorianus
gaaacgctatggacttcaactatgg

SEQ ID NO: 126926 - DNA, 25 bp, Saccharomyces pastorianus
gtattcttcctaaggaccgtgtagt

SEQ ID NO: 126927 - DNA, 25 bp, Saccharomyces pastorianus
ttggatatccctataccttccttaa

SEQ ID NO: 126928 - DNA, 25 bp, Saccharomyces pastorianus
ggtggaatcctatcataacatgtgt

SEQ ID NO: 126929 - DNA, 25 bp, Saccharomyces pastorianus
gcggcgtaaatgatgaggcgaaata

SEQ ID NO: 126930 - DNA, 25 bp, Saccharomyces pastorianus
agccaaagatgcgtgccgttgcagt

SEQ ID NO: 126931 - DNA, 25 bp, Saccharomyces pastorianus
agttagctagcaacctggcgttcgg

SEQ ID NO: 126932 - DNA, 25 bp, Saccharomyces pastorianus
gatcgccataagagatctgccaatt

SEQ ID NO: 126933 - DNA, 25 bp, Saccharomyces pastorianus
ctggcgttcggcgatcgccataaga

SEQ ID NO: 126934 - DNA, 25 bp, Saccharomyces pastorianus
aatacagccaaagatgcgtgccgtt

SEQ ID NO: 126935 - DNA, 25 bp, Saccharomyces pastorianus
agctagcaacctggcgttcggcgat

SEQ ID NO: 126936 - DNA, 25 bp, Saccharomyces pastorianus
ttcggcgatcgccataagagatctg

SEQ ID NO: 126937 - DNA, 25 bp, Saccharomyces pastorianus
aagatgcgtgccgttgcagttagct

SEQ ID NO: 126938 - DNA, 25 bp, Saccharomyces pastorianus
tgcagttagctagcaacctggcgtt

SEQ ID NO: 126939 - DNA, 25 bp, Saccharomyces pastorianus
gcgtgccgttgcagttagctagcaa

SEQ ID NO: 126940 - DNA, 25 bp, Saccharomyces pastorianus
accgctcaatcgtctgctaatggtg

SEQ ID NO: 126941 - DNA, 25 bp, Saccharomyces pastorianus
ggcgtcatccacaaatttaacagct

SEQ ID NO: 126942 - DNA, 25 bp, Saccharomyces pastorianus
gttgatcggtgtggtctcattgaca

SEQ ID NO: 126943 - DNA, 25 bp, Saccharomyces pastorianus
gctaatggtgcgactccaatgtcaa

SEQ ID NO: 126944 - DNA, 25 bp, Saccharomyces pastorianus
aaacatgtcacaagaacctcccaat

SEQ ID NO: 126945 - DNA, 25 bp, Saccharomyces pastorianus
catttttcacgtataccccagtagt

SEQ ID NO: 126946 - DNA, 25 bp, Saccharomyces pastorianus
tatggatcgtacaaccgccggagtc

SEQ ID NO: 126947 - DNA, 25 bp, Saccharomyces pastorianus
agacatgtcgccatttcatttctgt

SEQ ID NO: 126948 - DNA, 25 bp, Saccharomyces pastorianus
agtagttcactagcaaggactcttg

SEQ ID NO: 126949 - DNA, 25 bp, Saccharomyces pastorianus
tgtcaaagtcatcctcttcaacatc

SEQ ID NO: 126950 - DNA, 25 bp, Saccharomyces pastorianus
gactcttgccaagttagttgctaca

SEQ ID NO: 126951 - DNA, 25 bp, Saccharomyces pastorianus
gggacaacgctagatcttttacaag

SEQ ID NO: 126952 - DNA, 25 bp, Saccharomyces pastorianus
atcggtgttctcaatattcaatcta

SEQ ID NO: 126953 - DNA, 25 bp, Saccharomyces pastorianus
tattttgtcccaacgtcgtttgata

SEQ ID NO: 126954 - DNA, 25 bp, Saccharomyces pastorianus
aagatttgcacatcggtgttctcaa

SEQ ID NO: 126955 - DNA, 25 bp, Saccharomyces pastorianus
aaactcctcattacaagatttgcac

SEQ ID NO: 126956 - DNA, 25 bp, Saccharomyces pastorianus
agcccttatcatgggcctttataaa

SEQ ID NO: 126957 - DNA, 25 bp, Saccharomyces pastorianus
gaacctctattaaactcctcattac

SEQ ID NO: 126958 - DNA, 25 bp, Saccharomyces pastorianus
atcccgtgttatctctattcaaggc

SEQ ID NO: 126959 - DNA, 25 bp, Saccharomyces pastorianus
taaagtatctttgggacaacgctag

SEQ ID NO: 126960 - DNA, 25 bp, Saccharomyces pastorianus
gatcttttacaagcttagaacctct

SEQ ID NO: 126961 - DNA, 25 bp, Saccharomyces pastorianus
attcaaggcgaggagcccttatcat

SEQ ID NO: 126962 - DNA, 25 bp, Saccharomyces pastorianus
gtctgtcatgtgtgcacgcccaaaa

SEQ ID NO: 126963 - DNA, 25 bp, Saccharomyces pastorianus
aacttctagacatgcatccattgtg

SEQ ID NO: 126964 - DNA, 25 bp, Saccharomyces pastorianus
gcctggtccaggtagtgctgctaca

SEQ ID NO: 126965 - DNA, 25 bp, Saccharomyces pastorianus
aacacataccgttgtcgcaattgat

SEQ ID NO: 126966 - DNA, 25 bp, Saccharomyces pastorianus
attgctgccccacgttcaagtgaac

SEQ ID NO: 126967 - DNA, 25 bp, Saccharomyces pastorianus
taattcgtaccttttgctggttttg

SEQ ID NO: 126968 - DNA, 25 bp, Saccharomyces pastorianus
tatcatctaaactctattcccgtgg

SEQ ID NO: 126969 - DNA, 25 bp, Saccharomyces pastorianus
agacgccatcgcagtgtctgtcatg

SEQ ID NO: 126970 - DNA, 25 bp, Saccharomyces pastorianus
atccattgtggagatgctgtctact

SEQ ID NO: 126971 - DNA, 25 bp, Saccharomyces pastorianus
aaactatcagctgttcctatgaccc

SEQ ID NO: 126972 - DNA, 25 bp, Saccharomyces pastorianus
ttccccggcgacatgaactgtttta

SEQ ID NO: 126973 - DNA, 25 bp, Saccharomyces pastorianus
cgctggctgctttagaactttgtat

SEQ ID NO: 126974 - DNA, 25 bp, Saccharomyces pastorianus
acatgttaaggaggcaactaccaga

SEQ ID NO: 126975 - DNA, 25 bp, Saccharomyces pastorianus
ggcttacatatccatcctacaaaac

SEQ ID NO: 126976 - DNA, 25 bp, Saccharomyces pastorianus
aacacttaacgaggacattcaagga

SEQ ID NO: 126977 - DNA, 25 bp, Saccharomyces pastorianus
taccagatagtagttgtcctccaaa

SEQ ID NO: 126978 - DNA, 25 bp, Saccharomyces pastorianus
gaccctaccactcttttcaaaagat

SEQ ID NO: 126979 - DNA, 25 bp, Saccharomyces pastorianus
gtagttgtcctccaaaggataccga

SEQ ID NO: 126980 - DNA, 25 bp, Saccharomyces pastorianus
tcaagtcctcggtcctaagtttgaa

SEQ ID NO: 126981 - DNA, 25 bp, Saccharomyces pastorianus
ggtttacaggcatcaagtcctcggt

SEQ ID NO: 126982 - DNA, 25 bp, Saccharomyces pastorianus
aaatcgatgacaacgctggctgctt

SEQ ID NO: 126983 - DNA, 25 bp, Saccharomyces pastorianus
gtgacttcaaaacagatatgggctt

SEQ ID NO: 126984 - DNA, 25 bp, Saccharomyces pastorianus
tcaagacgatcatctgactccgctg

SEQ ID NO: 126985 - DNA, 25 bp, Saccharomyces pastorianus
gtatccaaactgaagtccgctcagc

SEQ ID NO: 126986 - DNA, 25 bp, Saccharomyces pastorianus
gtggtctacacggtgcaacttcgaa

SEQ ID NO: 126987 - DNA, 25 bp, Saccharomyces pastorianus
acggtcgtacattgatttcctaaca

SEQ ID NO: 126988 - DNA, 25 bp, Saccharomyces pastorianus
tgcaccgcgattcattgtatccaat

SEQ ID NO: 126989 - DNA, 25 bp, Saccharomyces pastorianus
gggactggaacactttaccggcatc

SEQ ID NO: 126990 - DNA, 25 bp, Saccharomyces pastorianus
ttctatctttcaacatggactcctc

SEQ ID NO: 126991 - DNA, 25 bp, Saccharomyces pastorianus
actcctcgccagaagactctttaat

SEQ ID NO: 126992 - DNA, 25 bp, Saccharomyces pastorianus
gaaagctaattactcaccagaccct

SEQ ID NO: 126993 - DNA, 25 bp, Saccharomyces pastorianus
gtccgctcagctttccaaaataggt

SEQ ID NO: 126994 - DNA, 25 bp, Saccharomyces pastorianus
tttaccggcatcagattcttctctt

SEQ ID NO: 126995 - DNA, 25 bp, Saccharomyces pastorianus
aaatattggctaaagtgtttcaaat

SEQ ID NO: 126996 - DNA, 25 bp, Saccharomyces pastorianus
tacaaagtactatgccatgggaagt

SEQ ID NO: 126997 - DNA, 25 bp, Saccharomyces pastorianus
ggagactactccttatcataatgct

SEQ ID NO: 126998 - DNA, 25 bp, Saccharomyces pastorianus
gtgtttcaaattggttctacgatac

SEQ ID NO: 126999 - DNA, 25 bp, Saccharomyces pastorianus
caaattggttctacgatactgggag

SEQ ID NO: 127000 - DNA, 25 bp, Saccharomyces pastorianus
gttctacgatactgggagactactc

SEQ ID NO: 127001 - DNA, 25 bp, Saccharomyces pastorianus
gaacaaataatcttcctacaaagta

SEQ ID NO: 127002 - DNA, 25 bp, Saccharomyces pastorianus
gactactccttatcataatgctttt

SEQ ID NO: 127003 - DNA, 25 bp, Saccharomyces pastorianus
atcataatgctttttgtcaagtagt

SEQ ID NO: 127004 - DNA, 25 bp, Saccharomyces pastorianus
gatactgggagactactccttatca

SEQ ID NO: 127005 - DNA, 25 bp, Saccharomyces pastorianus
tcttcctacaaagtactatgccatg

SEQ ID NO: 127006 - DNA, 25 bp, Saccharomyces pastorianus
gctagcccaaattctgactctgaag

SEQ ID NO: 127007 - DNA, 25 bp, Saccharomyces pastorianus
agaacttcagaatcccgttgtcttg

SEQ ID NO: 127008 - DNA, 25 bp, Saccharomyces pastorianus
ctgggtcttttgacgctggacggta

SEQ ID NO: 127009 - DNA, 25 bp, Saccharomyces pastorianus
gctacctccaagcttttgtcagtaa

SEQ ID NO: 127010 - DNA, 25 bp, Saccharomyces pastorianus
ggtcaacttgttgctgcattcttca

SEQ ID NO: 127011 - DNA, 25 bp, Saccharomyces pastorianus
ggaatgcgctatcgaatatctgaag

SEQ ID NO: 127012 - DNA, 25 bp, Saccharomyces pastorianus
tgaagacggtcaccaccacaacaat

SEQ ID NO: 127013 - DNA, 25 bp, Saccharomyces pastorianus
gggaaacctaactctacagtcttag

SEQ ID NO: 127014 - DNA, 25 bp, Saccharomyces pastorianus
aaacacgacagtaacgctagcccaa

SEQ ID NO: 127015 - DNA, 25 bp, Saccharomyces pastorianus
aatagtgcatcagcagtcgcttgcg

SEQ ID NO: 127016 - DNA, 25 bp, Saccharomyces pastorianus
gaaccacaacgccagattcttgaag

SEQ ID NO: 127017 - DNA, 25 bp, Saccharomyces pastorianus
aggacacctgtagagctagccagaa

SEQ ID NO: 127018 - DNA, 25 bp, Saccharomyces pastorianus
ggattgtattggatgacgccactaa

SEQ ID NO: 127019 - DNA, 25 bp, Saccharomyces pastorianus
agaagatcgttttatccttctcatg

SEQ ID NO: 127020 - DNA, 25 bp, Saccharomyces pastorianus
aatgcaacaagaggctttacgtcgg

SEQ ID NO: 127021 - DNA, 25 bp, Saccharomyces pastorianus
atccttctcatgttattcaagtatg

SEQ ID NO: 127022 - DNA, 25 bp, Saccharomyces pastorianus
gaaattaaaacatcctccttcttct

SEQ ID NO: 127023 - DNA, 25 bp, Saccharomyces pastorianus
gctttacgtcggaagttgtctgagt

SEQ ID NO: 127024 - DNA, 25 bp, Saccharomyces pastorianus
aaggccttctggtctaacattgaaa

SEQ ID NO: 127025 - DNA, 25 bp, Saccharomyces pastorianus
gaatttgcagatcagaccgctaatg

SEQ ID NO: 127026 - DNA, 25 bp, Saccharomyces pastorianus
agttcgcgcatatgctaaggccttc

SEQ ID NO: 127027 - DNA, 25 bp, Saccharomyces pastorianus
gagattgtcccctattcgaattaga

SEQ ID NO: 127028 - DNA, 25 bp, Saccharomyces pastorianus
gagacagaatatccgggccccaatg

SEQ ID NO: 127029 - DNA, 25 bp, Saccharomyces pastorianus
gcagtctatgcagccgaaaaatact

SEQ ID NO: 127030 - DNA, 25 bp, Saccharomyces pastorianus
gccggtgtacccgaacatttcgaag

SEQ ID NO: 127031 - DNA, 25 bp, Saccharomyces pastorianus
gtatcgatcggtacggatgcagtct

SEQ ID NO: 127032 - DNA, 25 bp, Saccharomyces pastorianus
aaagacccgcgcagatgcttgcttg

SEQ ID NO: 127033 - DNA, 25 bp, Saccharomyces pastorianus
tgcttgggtgcaggtatgttccaca

SEQ ID NO: 127034 - DNA, 25 bp, Saccharomyces pastorianus
attgcatccagtggcgccggtgtac

SEQ ID NO: 127035 - DNA, 25 bp, Saccharomyces pastorianus
gaagaggccttcctaaagacccgcg

SEQ ID NO: 127036 - DNA, 25 bp, Saccharomyces pastorianus
tgcggtcaagattcccgtcattgca

SEQ ID NO: 127037 - DNA, 25 bp, Saccharomyces pastorianus
cagttgttatttctgtcgaccctaa

SEQ ID NO: 127038 - DNA, 25 bp, Saccharomyces pastorianus
gacaatctcgaaagcatacggtgct

SEQ ID NO: 127039 - DNA, 25 bp, Saccharomyces pastorianus
cggtcgttcacgtgattgacgttga

SEQ ID NO: 127040 - DNA, 25 bp, Saccharomyces pastorianus
gttacgaagtacaactggtgaaatc

SEQ ID NO: 127041 - DNA, 25 bp, Saccharomyces pastorianus
taacatatcaggcacgtcgagattg

SEQ ID NO: 127042 - DNA, 25 bp, Saccharomyces pastorianus
ttgacgttgaaagtggtaacctaca

SEQ ID NO: 127043 - DNA, 25 bp, Saccharomyces pastorianus
tggtgaaatcaccaaaggattttaa

SEQ ID NO: 127044 - DNA, 25 bp, Saccharomyces pastorianus
ttttaacatatcaggcacgtcgaga

SEQ ID NO: 127045 - DNA, 25 bp, Saccharomyces pastorianus
gagcatttaggttacgaagtacaac

SEQ ID NO: 127046 - DNA, 25 bp, Saccharomyces pastorianus
tgcaattgagcatttaggttacgaa

SEQ ID NO: 127047 - DNA, 25 bp, Saccharomyces pastorianus
aggattttaacatatcaggcacgtc

SEQ ID NO: 127048 - DNA, 25 bp, Saccharomyces pastorianus
atgccggtcgttcacgtgattgacg

SEQ ID NO: 127049 - DNA, 25 bp, Saccharomyces pastorianus
tgaaagtggtaacctacagtcacta

SEQ ID NO: 127050 - DNA, 25 bp, Saccharomyces pastorianus
gcaaaagctaagtacggttcagaat

SEQ ID NO: 127051 - DNA, 25 bp, Saccharomyces pastorianus
aattgcaaaagctaagtacggttca

SEQ ID NO: 127052 - DNA, 25 bp, Saccharomyces pastorianus
ttttgctgcattctgaattcagaaa

SEQ ID NO: 127053 - DNA, 25 bp, Saccharomyces pastorianus
gaaaatgacggttggaaaattgcaa

SEQ ID NO: 127054 - DNA, 25 bp, Saccharomyces pastorianus
acggttcagaatttattgcggcagt

SEQ ID NO: 127055 - DNA, 25 bp, Saccharomyces pastorianus
aagctaagtacggttcagaatttat

SEQ ID NO: 127056 - DNA, 25 bp, Saccharomyces pastorianus
tattgcggcagtcaacaagaataat

SEQ ID NO: 127057 - DNA, 25 bp, Saccharomyces pastorianus
tttattgcggcagtcaacaagaata

SEQ ID NO: 127058 - DNA, 25 bp, Saccharomyces pastorianus
tcagaatttattgcggcagtcaaca

SEQ ID NO: 127059 - DNA, 25 bp, Saccharomyces pastorianus
ggttcagaatttattgcggcagtca

SEQ ID NO: 127060 - DNA, 25 bp, Saccharomyces pastorianus
gtacggttcagaatttattgcggca

SEQ ID NO: 127061 - DNA, 25 bp, Saccharomyces pastorianus
agctgctgagagaggcctttttctg

SEQ ID NO: 127062 - DNA, 25 bp, Saccharomyces pastorianus
aagattatggatgaagctgctgaga

SEQ ID NO: 127063 - DNA, 25 bp, Saccharomyces pastorianus
gacaaattattatcgtgaggaacag

SEQ ID NO: 127064 - DNA, 25 bp, Saccharomyces pastorianus
gcaattgctcaagttccagacaaat

SEQ ID NO: 127065 - DNA, 25 bp, Saccharomyces pastorianus
taagcaattgctcaagttccagaca

SEQ ID NO: 127066 - DNA, 25 bp, Saccharomyces pastorianus
gctcaagttccagacaaattattat

SEQ ID NO: 127067 - DNA, 25 bp, Saccharomyces pastorianus
tgctgtcttcagagctgataagcaa

SEQ ID NO: 127068 - DNA, 25 bp, Saccharomyces pastorianus
gaagctgctgagagaggcctttttc

SEQ ID NO: 127069 - DNA, 25 bp, Saccharomyces pastorianus
gttccagacaaattattatcgtgag

SEQ ID NO: 127070 - DNA, 25 bp, Saccharomyces pastorianus
tgagagaggcctttttctggaggat

SEQ ID NO: 127071 - DNA, 25 bp, Saccharomyces pastorianus
tcttcagagctgataagcaattgct

SEQ ID NO: 127072 - DNA, 25 bp, Saccharomyces pastorianus
aaagccacattctgattcggatatt

SEQ ID NO: 127073 - DNA, 25 bp, Saccharomyces pastorianus
gggtccaactattgcgcctgcaaat

SEQ ID NO: 127074 - DNA, 25 bp, Saccharomyces pastorianus
aaaggccctatcatcggaaatcaag

SEQ ID NO: 127075 - DNA, 25 bp, Saccharomyces pastorianus
ttcggtgtaccgctagaatcactta

SEQ ID NO: 127076 - DNA, 25 bp, Saccharomyces pastorianus
ggactaatatataacctccccgacg

SEQ ID NO: 127077 - DNA, 25 bp, Saccharomyces pastorianus
gcgccaatgcatatacgttatcgat

SEQ ID NO: 127078 - DNA, 25 bp, Saccharomyces pastorianus
aagacatggtccctgcgatagtgcg

SEQ ID NO: 127079 - DNA, 25 bp, Saccharomyces pastorianus
agtgttttaccaaaggccctatcat

SEQ ID NO: 127080 - DNA, 25 bp, Saccharomyces pastorianus
aggatcctgcaaacatttccatgat

SEQ ID NO: 127081 - DNA, 25 bp, Saccharomyces pastorianus
gtcgctgcctgatagtgttttacca

SEQ ID NO: 127082 - DNA, 25 bp, Saccharomyces pastorianus
gacgttaagggctcttgtctttcat

SEQ ID NO: 127083 - DNA, 25 bp, Saccharomyces pastorianus
cgaagtcgtcgcacgatggtggcac

SEQ ID NO: 127084 - DNA, 25 bp, Saccharomyces pastorianus
gtccaggagctctccaagcaatata

SEQ ID NO: 127085 - DNA, 25 bp, Saccharomyces pastorianus
atggtggcaccgacgatttggcgca

SEQ ID NO: 127086 - DNA, 25 bp, Saccharomyces pastorianus
tcagggttccacaaattcatcctta

SEQ ID NO: 127087 - DNA, 25 bp, Saccharomyces pastorianus
gtgccacagtaagtgcgaagtcgtc

SEQ ID NO: 127088 - DNA, 25 bp, Saccharomyces pastorianus
gacgatttggcgcacctttttagca

SEQ ID NO: 127089 - DNA, 25 bp, Saccharomyces pastorianus
cacctttttagcacgccagagatca

SEQ ID NO: 127090 - DNA, 25 bp, Saccharomyces pastorianus
agcactttttcaacattcagggttc

SEQ ID NO: 127091 - DNA, 25 bp, Saccharomyces pastorianus
gattcgatggcaagatggctcaagt

SEQ ID NO: 127092 - DNA, 25 bp, Saccharomyces pastorianus
cttgcagaaaatgtactccgagatt

SEQ ID NO: 127093 - DNA, 25 bp, Saccharomyces pastorianus
gaagaaaccagctagtgccacagta

SEQ ID NO: 127094 - DNA, 25 bp, Saccharomyces pastorianus
gaagagttttctcaagtcgcaaagt

SEQ ID NO: 127095 - DNA, 25 bp, Saccharomyces pastorianus
gttattgacttatccggtactcagg

SEQ ID NO: 127096 - DNA, 25 bp, Saccharomyces pastorianus
aacttctcagttttcccaggacatc

SEQ ID NO: 127097 - DNA, 25 bp, Saccharomyces pastorianus
gtactcaggtagacggtgcccgtgt

SEQ ID NO: 127098 - DNA, 25 bp, Saccharomyces pastorianus
gctttgtctggcgagatttccaagt

SEQ ID NO: 127099 - DNA, 25 bp, Saccharomyces pastorianus
aaggtggtcctcacaaccatactat

SEQ ID NO: 127100 - DNA, 25 bp, Saccharomyces pastorianus
gattctgccgttaagctcgctgaaa

SEQ ID NO: 127101 - DNA, 25 bp, Saccharomyces pastorianus
acggtgcccgtgtggagacaatttt

SEQ ID NO: 127102 - DNA, 25 bp, Saccharomyces pastorianus
ctatcggtgcaatggcagtggcatt

SEQ ID NO: 127103 - DNA, 25 bp, Saccharomyces pastorianus
aatctagtgaagtcgctgctttgtc

SEQ ID NO: 127104 - DNA, 25 bp, Saccharomyces pastorianus
aaagcaagcgatgtctccagaattc

SEQ ID NO: 127105 - DNA, 25 bp, Saccharomyces pastorianus
tccgttatctgctggttcttagtcc

SEQ ID NO: 127106 - DNA, 25 bp, Saccharomyces pastorianus
cgttatctgctggttcttagtccac

SEQ ID NO: 127107 - DNA, 25 bp, Saccharomyces pastorianus
gttcttagtccactgtctgttctgt

SEQ ID NO: 127108 - DNA, 25 bp, Saccharomyces pastorianus
ctgctggttcttagtccactgtctg

SEQ ID NO: 127109 - DNA, 25 bp, Saccharomyces pastorianus
ccccttctgtccaagagatagaata

SEQ ID NO: 127110 - DNA, 25 bp, Saccharomyces pastorianus
ttatctgctggttcttagtccactg

SEQ ID NO: 127111 - DNA, 25 bp, Saccharomyces pastorianus
gctggttcttagtccactgtctgtt

SEQ ID NO: 127112 - DNA, 25 bp, Saccharomyces pastorianus
ccttctgtccaagagatagaatata

SEQ ID NO: 127113 - DNA, 25 bp, Saccharomyces pastorianus
atctgctggttcttagtccactgtc

SEQ ID NO: 127114 - DNA, 25 bp, Saccharomyces pastorianus
tcttagtccactgtctgttctgtcc

SEQ ID NO: 127115 - DNA, 25 bp, Saccharomyces pastorianus
tggttcttagtccactgtctgttct

SEQ ID NO: 127116 - DNA, 25 bp, Saccharomyces pastorianus
atcacatttgaatcacggtctggat

SEQ ID NO: 127117 - DNA, 25 bp, Saccharomyces pastorianus
attttacacacatctcacgcagcaa

SEQ ID NO: 127118 - DNA, 25 bp, Saccharomyces pastorianus
caatgattcccaatgatgttacttc

SEQ ID NO: 127119 - DNA, 25 bp, Saccharomyces pastorianus
ttgtggcatttcttgggctatttat

SEQ ID NO: 127120 - DNA, 25 bp, Saccharomyces pastorianus
gtgtctttagcaatttaagcgcaaa

SEQ ID NO: 127121 - DNA, 25 bp, Saccharomyces pastorianus
agcacgagttttcagttcattggat

SEQ ID NO: 127122 - DNA, 25 bp, Saccharomyces pastorianus
acgcagcaaagcaaggttcaaggtt

SEQ ID NO: 127123 - DNA, 25 bp, Saccharomyces pastorianus
ccatggttggctgtttttgtggcat

SEQ ID NO: 127124 - DNA, 25 bp, Saccharomyces pastorianus
ataccacctacatacgacgaagctg

SEQ ID NO: 127125 - DNA, 25 bp, Saccharomyces pastorianus
ggctatttatcaccctgaagagtat

SEQ ID NO: 127126 - DNA, 25 bp, Saccharomyces pastorianus
gacgaagctgctgctgatatggccc

SEQ ID NO: 127127 - DNA, 25 bp, Saccharomyces pastorianus
tggcttggaagctagtgtttcagat

SEQ ID NO: 127128 - DNA, 25 bp, Saccharomyces pastorianus
ggtcttatggctatgtggacatttc

SEQ ID NO: 127129 - DNA, 25 bp, Saccharomyces pastorianus
caaacgccaataatgctcacatatt

SEQ ID NO: 127130 - DNA, 25 bp, Saccharomyces pastorianus
gtggacatttcattttctcgacatt

SEQ ID NO: 127131 - DNA, 25 bp, Saccharomyces pastorianus
ggtcctggaataccaatgaaatcat

SEQ ID NO: 127132 - DNA, 25 bp, Saccharomyces pastorianus
taccaagtttttctcaaacgccaat

SEQ ID NO: 127133 - DNA, 25 bp, Saccharomyces pastorianus
gctcacatattggtcgaaattgcta

SEQ ID NO: 127134 - DNA, 25 bp, Saccharomyces pastorianus
tgtttcagatgaatggtaccaagtt

SEQ ID NO: 127135 - DNA, 25 bp, Saccharomyces pastorianus
ttctcgacattggattagggcgctg

SEQ ID NO: 127136 - DNA, 25 bp, Saccharomyces pastorianus
agagccatggtcttatggctatgtg

SEQ ID NO: 127137 - DNA, 25 bp, Saccharomyces pastorianus
cgacattggattagggcgctggctt

SEQ ID NO: 127138 - DNA, 25 bp, Saccharomyces pastorianus
gagaaaattaatagcaccaaagagg

SEQ ID NO: 127139 - DNA, 25 bp, Saccharomyces pastorianus
aaactgaagggagccaccgctacca

SEQ ID NO: 127140 - DNA, 25 bp, Saccharomyces pastorianus
taccaccatgaccatcataataaaa

SEQ ID NO: 127141 - DNA, 25 bp, Saccharomyces pastorianus
aacgagaaaattaatagcaccaaag

SEQ ID NO: 127142 - DNA, 25 bp, Saccharomyces pastorianus
aggaaaactgaagggagccaccgct

SEQ ID NO: 127143 - DNA, 25 bp, Saccharomyces pastorianus
gaaaactgaagggagccaccgctac

SEQ ID NO: 127144 - DNA, 25 bp, Saccharomyces pastorianus
tgaagggagccaccgctaccaccat

SEQ ID NO: 127145 - DNA, 25 bp, Saccharomyces pastorianus
accaccatgaccatcataataaaaa

SEQ ID NO: 127146 - DNA, 25 bp, Saccharomyces pastorianus
ctaccaccatgaccatcataataaa

SEQ ID NO: 127147 - DNA, 25 bp, Saccharomyces pastorianus
gaggaaaactgaagggagccaccgc

SEQ ID NO: 127148 - DNA, 25 bp, Saccharomyces pastorianus
gctaccaccatgaccatcataataa

SEQ ID NO: 127149 - DNA, 25 bp, Saccharomyces pastorianus
ggcacatcagttagcattgggtcag

SEQ ID NO: 127150 - DNA, 25 bp, Saccharomyces pastorianus
cgtgacaccgaaaatttgccagatt

SEQ ID NO: 127151 - DNA, 25 bp, Saccharomyces pastorianus
ggcgggcttgattaacgatgattca

SEQ ID NO: 127152 - DNA, 25 bp, Saccharomyces pastorianus
aatagatacaccttccgtgacaccg

SEQ ID NO: 127153 - DNA, 25 bp, Saccharomyces pastorianus
taaaggcaatgaacgcccgtcctat

SEQ ID NO: 127154 - DNA, 25 bp, Saccharomyces pastorianus
gaaaagcattccagagacattgata

SEQ ID NO: 127155 - DNA, 25 bp, Saccharomyces pastorianus
actaaggaggcagcgatggcaatta

SEQ ID NO: 127156 - DNA, 25 bp, Saccharomyces pastorianus
ttgccagattggtttttagaagatg

SEQ ID NO: 127157 - DNA, 25 bp, Saccharomyces pastorianus
atgcgtgccgtagctcggttagaaa

SEQ ID NO: 127158 - DNA, 25 bp, Saccharomyces pastorianus
gagacattgatattgctactgttga

SEQ ID NO: 127159 - DNA, 25 bp, Saccharomyces pastorianus
tgaacgcccgtcctattaagaaggt

SEQ ID NO: 127160 - DNA, 25 bp, Saccharomyces pastorianus
aaacctcaattttggattttgtcag

SEQ ID NO: 127161 - DNA, 25 bp, Saccharomyces pastorianus
gattttgtcaggacggaagacccaa

SEQ ID NO: 127162 - DNA, 25 bp, Saccharomyces pastorianus
gacggaagacccaataagcatgctt

SEQ ID NO: 127163 - DNA, 25 bp, Saccharomyces pastorianus
ggctggacccaagattactggatcc

SEQ ID NO: 127164 - DNA, 25 bp, Saccharomyces pastorianus
aaggcaccaaagaggctggacccaa

SEQ ID NO: 127165 - DNA, 25 bp, Saccharomyces pastorianus
ggagtccaagatttataatcccgaa

SEQ ID NO: 127166 - DNA, 25 bp, Saccharomyces pastorianus
gtgtgtaaaggtttcaaggcaccaa

SEQ ID NO: 127167 - DNA, 25 bp, Saccharomyces pastorianus
ttgggttttccaacaattgtttgag

SEQ ID NO: 127168 - DNA, 25 bp, Saccharomyces pastorianus
gggcaacaaaatatggagtccaaga

SEQ ID NO: 127169 - DNA, 25 bp, Saccharomyces pastorianus
agttgaagccacaaaaccacccgca

SEQ ID NO: 127170 - DNA, 25 bp, Saccharomyces pastorianus
aatttactgtatcatgaaacctcaa

SEQ ID NO: 127171 - DNA, 25 bp, Saccharomyces pastorianus
gccgatgcccaatgttataactttt

SEQ ID NO: 127172 - DNA, 25 bp, Saccharomyces pastorianus
ttgcatccaaactctgtcctgtcaa

SEQ ID NO: 127173 - DNA, 25 bp, Saccharomyces pastorianus
aatgaagccgatgcccaatgttata

SEQ ID NO: 127174 - DNA, 25 bp, Saccharomyces pastorianus
tcgttcatcctttaagattattcag

SEQ ID NO: 127175 - DNA, 25 bp, Saccharomyces pastorianus
ctgtcctgtcaactccttaattatt

SEQ ID NO: 127176 - DNA, 25 bp, Saccharomyces pastorianus
atggccacttcttagaaaaatcgaa

SEQ ID NO: 127177 - DNA, 25 bp, Saccharomyces pastorianus
atacagtgttgcatgatggtgctcc

SEQ ID NO: 127178 - DNA, 25 bp, Saccharomyces pastorianus
actccttaattattggtgttgatat

SEQ ID NO: 127179 - DNA, 25 bp, Saccharomyces pastorianus
gaaaagtatggccacttcttagaaa

SEQ ID NO: 127180 - DNA, 25 bp, Saccharomyces pastorianus
aagacttggaaagctgatacagtgt

SEQ ID NO: 127181 - DNA, 25 bp, Saccharomyces pastorianus
gaaggttgttattgatctgtgtgct

SEQ ID NO: 127182 - DNA, 25 bp, Saccharomyces pastorianus
gttcttgttttgtactatgccccat

SEQ ID NO: 127183 - DNA, 25 bp, Saccharomyces pastorianus
gaaaacggtcacttcgacgtcgacg

SEQ ID NO: 127184 - DNA, 25 bp, Saccharomyces pastorianus
gccacatccgacgttttgattgcta

SEQ ID NO: 127185 - DNA, 25 bp, Saccharomyces pastorianus
aagattcctctgtcttccaattggt

SEQ ID NO: 127186 - DNA, 25 bp, Saccharomyces pastorianus
gaagtccgaatctgttgtgtaccaa

SEQ ID NO: 127187 - DNA, 25 bp, Saccharomyces pastorianus
tatttgccatccacgacatgactga

SEQ ID NO: 127188 - DNA, 25 bp, Saccharomyces pastorianus
gatccttggactctttattcgactt

SEQ ID NO: 127189 - DNA, 25 bp, Saccharomyces pastorianus
tccccaatcgtgaagtcccaagaga

SEQ ID NO: 127190 - DNA, 25 bp, Saccharomyces pastorianus
aagaactagctgatacctacgccaa

SEQ ID NO: 127191 - DNA, 25 bp, Saccharomyces pastorianus
aacaatcgtcttatacccaggtggt

SEQ ID NO: 127192 - DNA, 25 bp, Saccharomyces pastorianus
tcttgaaaggtgatgcctccccaat

SEQ ID NO: 127193 - DNA, 25 bp, Saccharomyces pastorianus
gcgcccatataaatatccgctatca

SEQ ID NO: 127194 - DNA, 25 bp, Saccharomyces pastorianus
atacaactctatcatacacaagatg

SEQ ID NO: 127195 - DNA, 25 bp, Saccharomyces pastorianus
aaatatccgctatcaacagaacccc

SEQ ID NO: 127196 - DNA, 25 bp, Saccharomyces pastorianus
atcatacacaagatgtcattcgacg

SEQ ID NO: 127197 - DNA, 25 bp, Saccharomyces pastorianus
aacaccaccactaatacaactctat

SEQ ID NO: 127198 - DNA, 25 bp, Saccharomyces pastorianus
accaccactaatacaactctatcat

SEQ ID NO: 127199 - DNA, 25 bp, Saccharomyces pastorianus
aactcagcttccgtaaaccacaaca

SEQ ID NO: 127200 - DNA, 25 bp, Saccharomyces pastorianus
catacacaagatgtcattcgacgac

SEQ ID NO: 127201 - DNA, 25 bp, Saccharomyces pastorianus
gtaaaccacaacaccaccactaata

SEQ ID NO: 127202 - DNA, 25 bp, Saccharomyces pastorianus
atcagtgcccaactcagcttccgta

SEQ ID NO: 127203 - DNA, 25 bp, Saccharomyces pastorianus
agtgcccaactcagcttccgtaaac

SEQ ID NO: 127204 - DNA, 25 bp, Saccharomyces pastorianus
caccccgcattataagtggtgtgcc

SEQ ID NO: 127205 - DNA, 25 bp, Saccharomyces pastorianus
gcaccccgcattataagtggtgtgc

SEQ ID NO: 127206 - DNA, 25 bp, Saccharomyces pastorianus
aattttagacgcggcgcttgcaccc

SEQ ID NO: 127207 - DNA, 25 bp, Saccharomyces pastorianus
tgcaccccgcattataagtggtgtg

SEQ ID NO: 127208 - DNA, 25 bp, Saccharomyces pastorianus
cttgcaccccgcattataagtggtg

SEQ ID NO: 127209 - DNA, 25 bp, Saccharomyces pastorianus
gcttgcaccccgcattataagtggt

SEQ ID NO: 127210 - DNA, 25 bp, Saccharomyces pastorianus
ttgcaccccgcattataagtggtgt

SEQ ID NO: 127211 - DNA, 25 bp, Saccharomyces pastorianus
aaaattttagacgcggcgcttgcac

SEQ ID NO: 127212 - DNA, 25 bp, Saccharomyces pastorianus
accccgcattataagtggtgtgccg

SEQ ID NO: 127213 - DNA, 25 bp, Saccharomyces pastorianus
aaaaattttagacgcggcgcttgca

SEQ ID NO: 127214 - DNA, 25 bp, Saccharomyces pastorianus
gcggcgcttgcaccccgcattataa

SEQ ID NO: 127215 - DNA, 25 bp, Saccharomyces pastorianus
aatgagctcaagcacttgcctacta

SEQ ID NO: 127216 - DNA, 25 bp, Saccharomyces pastorianus
gccgcttgccgcgatattgatcaag

SEQ ID NO: 127217 - DNA, 25 bp, Saccharomyces pastorianus
agatctatgctgagacacgccttag

SEQ ID NO: 127218 - DNA, 25 bp, Saccharomyces pastorianus
gagatctgcgtatttagccgccgtg

SEQ ID NO: 127219 - DNA, 25 bp, Saccharomyces pastorianus
ggtgcgcgcgatttctaggagatct

SEQ ID NO: 127220 - DNA, 25 bp, Saccharomyces pastorianus
tacacctttccagttgtcatccgaa

SEQ ID NO: 127221 - DNA, 25 bp, Saccharomyces pastorianus
ttgcttttgcaacagtacaggtcca

SEQ ID NO: 127222 - DNA, 25 bp, Saccharomyces pastorianus
acgtgtctcagggatgttcttgggt

SEQ ID NO: 127223 - DNA, 25 bp, Saccharomyces pastorianus
aatactaccccggtttcagatctat

SEQ ID NO: 127224 - DNA, 25 bp, Saccharomyces pastorianus
ttgacgactcgacaggtctacgtga

SEQ ID NO: 127225 - DNA, 25 bp, Saccharomyces pastorianus
gtcatccgaagtgctgtcgcatatt

SEQ ID NO: 127226 - DNA, 25 bp, Saccharomyces pastorianus
acatctgacgacctgtttgggtttc

SEQ ID NO: 127227 - DNA, 25 bp, Saccharomyces pastorianus
atttccgtatatgctctgttaactt

SEQ ID NO: 127228 - DNA, 25 bp, Saccharomyces pastorianus
agatcatactttctccatggagcaa

SEQ ID NO: 127229 - DNA, 25 bp, Saccharomyces pastorianus
gacggagcgcggtgttttactagcc

SEQ ID NO: 127230 - DNA, 25 bp, Saccharomyces pastorianus
gaagtccaagattcccgatgatttg

SEQ ID NO: 127231 - DNA, 25 bp, Saccharomyces pastorianus
aaaggtcttcctatgattccggcgt

SEQ ID NO: 127232 - DNA, 25 bp, Saccharomyces pastorianus
tttgggtttctagcacgtcgtacac

SEQ ID NO: 127233 - DNA, 25 bp, Saccharomyces pastorianus
agtatcacccggacgagttggccaa

SEQ ID NO: 127234 - DNA, 25 bp, Saccharomyces pastorianus
acgtcgtacactggcctttatgaag

SEQ ID NO: 127235 - DNA, 25 bp, Saccharomyces pastorianus
ggttcactttctcataccctgtaga

SEQ ID NO: 127236 - DNA, 25 bp, Saccharomyces pastorianus
aaaggtctagctccaccaaaggaag

SEQ ID NO: 127237 - DNA, 25 bp, Saccharomyces pastorianus
ttccttgttggactgcttaccgata

SEQ ID NO: 127238 - DNA, 25 bp, Saccharomyces pastorianus
tttcagtttgattgtacctccagga

SEQ ID NO: 127239 - DNA, 25 bp, Saccharomyces pastorianus
catcctgggacccttccttgttgga

SEQ ID NO: 127240 - DNA, 25 bp, Saccharomyces pastorianus
gactgcttaccgataaaacgcataa

SEQ ID NO: 127241 - DNA, 25 bp, Saccharomyces pastorianus
aatccacgttttttagtatgttcag

SEQ ID NO: 127242 - DNA, 25 bp, Saccharomyces pastorianus
gcggtttcaagatcagttttcagtt

SEQ ID NO: 127243 - DNA, 25 bp, Saccharomyces pastorianus
ggattatcactaggtggcctgtccg

SEQ ID NO: 127244 - DNA, 25 bp, Saccharomyces pastorianus
tgatgctatcattgcctgtgctaaa

SEQ ID NO: 127245 - DNA, 25 bp, Saccharomyces pastorianus
ggcctgtccgcggtttcaagatcag

SEQ ID NO: 127246 - DNA, 25 bp, Saccharomyces pastorianus
tcttctttttgcttttgatgctatc

SEQ ID NO: 127247 - DNA, 25 bp, Saccharomyces pastorianus
attgcctgtgctaaactgtttggat

SEQ ID NO: 127248 - DNA, 25 bp, Saccharomyces pastorianus
gtcggcgatgcattggaccaattca

SEQ ID NO: 127249 - DNA, 25 bp, Saccharomyces pastorianus
agtacttcgttcgttccaagagctg

SEQ ID NO: 127250 - DNA, 25 bp, Saccharomyces pastorianus
gaggaatcatccactgaactcgctt

SEQ ID NO: 127251 - DNA, 25 bp, Saccharomyces pastorianus
aagccgctaccgtcaatgttgcaga

SEQ ID NO: 127252 - DNA, 25 bp, Saccharomyces pastorianus
aattcatgatatccctaccacctgt

SEQ ID NO: 127253 - DNA, 25 bp, Saccharomyces pastorianus
taacctgattttagccgcattgaga

SEQ ID NO: 127254 - DNA, 25 bp, Saccharomyces pastorianus
gaaattgtcgctaacgaagccgcta

SEQ ID NO: 127255 - DNA, 25 bp, Saccharomyces pastorianus
gtgataacgttaccggtgaagccaa

SEQ ID NO: 127256 - DNA, 25 bp, Saccharomyces pastorianus
tgtccttcggaggtgacactaacct

SEQ ID NO: 127257 - DNA, 25 bp, Saccharomyces pastorianus
taccacctgttcctcaacaagaaga

SEQ ID NO: 127258 - DNA, 25 bp, Saccharomyces pastorianus
tgcagaaggtactttggccgccaag

SEQ ID NO: 127259 - DNA, 25 bp, Saccharomyces pastorianus
aaagacgctacctctcaagaaaatg

SEQ ID NO: 127260 - DNA, 25 bp, Saccharomyces pastorianus
gaaagatggctttgaatcggcagta

SEQ ID NO: 127261 - DNA, 25 bp, Saccharomyces pastorianus
ataacagcaatggtcctcaaaggag

SEQ ID NO: 127262 - DNA, 25 bp, Saccharomyces pastorianus
ttaccaaggacgcaacgctcgtaat

SEQ ID NO: 127263 - DNA, 25 bp, Saccharomyces pastorianus
gtaataacgccggtatgcctcagaa

SEQ ID NO: 127264 - DNA, 25 bp, Saccharomyces pastorianus
taatcatcaccacagtcatcaccat

SEQ ID NO: 127265 - DNA, 25 bp, Saccharomyces pastorianus
taaggtccaaactctccaaggatgg

SEQ ID NO: 127266 - DNA, 25 bp, Saccharomyces pastorianus
ttatccagtccaaccagtgttaatg

SEQ ID NO: 127267 - DNA, 25 bp, Saccharomyces pastorianus
aaaagatccggttccaagaatggtg

SEQ ID NO: 127268 - DNA, 25 bp, Saccharomyces pastorianus
aaaactgcagcatcgtcgacatcgt

SEQ ID NO: 127269 - DNA, 25 bp, Saccharomyces pastorianus
cttgaccgtcgacaattacttaagg

SEQ ID NO: 127270 - DNA, 25 bp, Saccharomyces pastorianus
tggtggacacttgggacatgtgttt

SEQ ID NO: 127271 - DNA, 25 bp, Saccharomyces pastorianus
atgttgtgcaaggtgtggtggacac

SEQ ID NO: 127272 - DNA, 25 bp, Saccharomyces pastorianus
gaaggctggaaacagttgctaaact

SEQ ID NO: 127273 - DNA, 25 bp, Saccharomyces pastorianus
cacttgggacatgtgtttgaaggtg

SEQ ID NO: 127274 - DNA, 25 bp, Saccharomyces pastorianus
gcgagggtggagatatgttgtgcaa

SEQ ID NO: 127275 - DNA, 25 bp, Saccharomyces pastorianus
acagttgctaaacttgcccaaggac

SEQ ID NO: 127276 - DNA, 25 bp, Saccharomyces pastorianus
tttgaaggtgaaggctggaaacagt

SEQ ID NO: 127277 - DNA, 25 bp, Saccharomyces pastorianus
taaacttgcccaaggacaccagaca

SEQ ID NO: 127278 - DNA, 25 bp, Saccharomyces pastorianus
gttgctaaacttgcccaaggacacc

SEQ ID NO: 127279 - DNA, 25 bp, Saccharomyces pastorianus
gaaacagttgctaaacttgcccaag

SEQ ID NO: 127280 - DNA, 25 bp, Saccharomyces pastorianus
gctaaacttgcccaaggacaccaga

SEQ ID NO: 127281 - DNA, 25 bp, Saccharomyces pastorianus
ggagcaggctgtacgctataactgt

SEQ ID NO: 127282 - DNA, 25 bp, Saccharomyces pastorianus
gaagaaacattgtactgacgcagta

SEQ ID NO: 127283 - DNA, 25 bp, Saccharomyces pastorianus
gaagtggaacgatgccctgacacca

SEQ ID NO: 127284 - DNA, 25 bp, Saccharomyces pastorianus
ttcgacgctcgtagtggatggcccg

SEQ ID NO: 127285 - DNA, 25 bp, Saccharomyces pastorianus
gaaaggcccaacaccggtgcgtatt

SEQ ID NO: 127286 - DNA, 25 bp, Saccharomyces pastorianus
gtatttacacaccaacgagtccggt

SEQ ID NO: 127287 - DNA, 25 bp, Saccharomyces pastorianus
ttcgagcaaggccaagttcgacgct

SEQ ID NO: 127288 - DNA, 25 bp, Saccharomyces pastorianus
actgtacgcaggacttttccaggga

SEQ ID NO: 127289 - DNA, 25 bp, Saccharomyces pastorianus
aactgcgacagaccgttgtattcga

SEQ ID NO: 127290 - DNA, 25 bp, Saccharomyces pastorianus
gatggcccgcattctacgaagaggt

SEQ ID NO: 127291 - DNA, 25 bp, Saccharomyces pastorianus
tgccctgacaccattgcagctgatg

SEQ ID NO: 127292 - DNA, 25 bp, Saccharomyces pastorianus
ggacagcacgaatccttcaattttt

SEQ ID NO: 127293 - DNA, 25 bp, Saccharomyces pastorianus
actccagttcattctcagctttggc

SEQ ID NO: 127294 - DNA, 25 bp, Saccharomyces pastorianus
tggcaagttcctacctgggcaataa

SEQ ID NO: 127295 - DNA, 25 bp, Saccharomyces pastorianus
ggtggttcctcctttggagcactgg

SEQ ID NO: 127296 - DNA, 25 bp, Saccharomyces pastorianus
cagctttggcttccatggcaagttc

SEQ ID NO: 127297 - DNA, 25 bp, Saccharomyces pastorianus
ggagcactggcttctatggcaagct

SEQ ID NO: 127298 - DNA, 25 bp, Saccharomyces pastorianus
agggacaatctggtggtgctttttc

SEQ ID NO: 127299 - DNA, 25 bp, Saccharomyces pastorianus
tatggcaagctcttttatgcattcc

SEQ ID NO: 127300 - DNA, 25 bp, Saccharomyces pastorianus
atttttctggcaacttttctcaaca

SEQ ID NO: 127301 - DNA, 25 bp, Saccharomyces pastorianus
tacggcggaaaccagaactccaatg

SEQ ID NO: 127302 - DNA, 25 bp, Saccharomyces pastorianus
atggctcaatcttacttaggtggtg

SEQ ID NO: 127303 - DNA, 25 bp, Saccharomyces pastorianus
cactcataccgatggatggtgtctg

SEQ ID NO: 127304 - DNA, 25 bp, Saccharomyces pastorianus
taaaattctggccactcataccgat

SEQ ID NO: 127305 - DNA, 25 bp, Saccharomyces pastorianus
agtgtaatacacaaaagggttctat

SEQ ID NO: 127306 - DNA, 25 bp, Saccharomyces pastorianus
ccgatggatggtgtctggtagaaaa

SEQ ID NO: 127307 - DNA, 25 bp, Saccharomyces pastorianus
gcaggtcgagcctagattgacagac

SEQ ID NO: 127308 - DNA, 25 bp, Saccharomyces pastorianus
tgcctgcaggtcgagcctagattga

SEQ ID NO: 127309 - DNA, 25 bp, Saccharomyces pastorianus
gaatctcgctgggtgaaaaagttaa

SEQ ID NO: 127310 - DNA, 25 bp, Saccharomyces pastorianus
aaagggttctattcacgtcagtgtt

SEQ ID NO: 127311 - DNA, 25 bp, Saccharomyces pastorianus
cgagcctagattgacagacgaaata

SEQ ID NO: 127312 - DNA, 25 bp, Saccharomyces pastorianus
gaaataagaatctcgctgggtgaaa

SEQ ID NO: 127313 - DNA, 25 bp, Saccharomyces pastorianus
ttctggccactcataccgatggatg

SEQ ID NO: 127314 - DNA, 25 bp, Saccharomyces pastorianus
gcttgctacagaaatccaaattatt

SEQ ID NO: 127315 - DNA, 25 bp, Saccharomyces pastorianus
gaccaagcttgctacagaaatccaa

SEQ ID NO: 127316 - DNA, 25 bp, Saccharomyces pastorianus
caaatggagacggtagaagtttaat

SEQ ID NO: 127317 - DNA, 25 bp, Saccharomyces pastorianus
ttttacgatctacgctttttgaaat

SEQ ID NO: 127318 - DNA, 25 bp, Saccharomyces pastorianus
tatggttttaccaaatggagacggt

SEQ ID NO: 127319 - DNA, 25 bp, Saccharomyces pastorianus
aggatctactaaaacgctgaccaag

SEQ ID NO: 127320 - DNA, 25 bp, Saccharomyces pastorianus
aaaacgctgaccaagcttgctacag

SEQ ID NO: 127321 - DNA, 25 bp, Saccharomyces pastorianus
acgctgaccaagcttgctacagaaa

SEQ ID NO: 127322 - DNA, 25 bp, Saccharomyces pastorianus
caggaaaattggtgaatgacagtat

SEQ ID NO: 127323 - DNA, 25 bp, Saccharomyces pastorianus
gatctacgctttttgaaattatggt

SEQ ID NO: 127324 - DNA, 25 bp, Saccharomyces pastorianus
gtattttatttttacgatctacgct

SEQ ID NO: 127325 - DNA, 25 bp, Saccharomyces pastorianus
gaagagtctcccatagtttcaacca

SEQ ID NO: 127326 - DNA, 25 bp, Saccharomyces pastorianus
gaagatcctgatttgcctccacaag

SEQ ID NO: 127327 - DNA, 25 bp, Saccharomyces pastorianus
gagtgactttcctcaaggcgttggc

SEQ ID NO: 127328 - DNA, 25 bp, Saccharomyces pastorianus
aagcgcagagcccacactggtagtg

SEQ ID NO: 127329 - DNA, 25 bp, Saccharomyces pastorianus
tccgtctttgagttctttccaaggg

SEQ ID NO: 127330 - DNA, 25 bp, Saccharomyces pastorianus
ggaaccccgtaggatatccgatgtg

SEQ ID NO: 127331 - DNA, 25 bp, Saccharomyces pastorianus
aggcgttggcatatcacaggaatac

SEQ ID NO: 127332 - DNA, 25 bp, Saccharomyces pastorianus
actggtagtgaaacttccgtctttg

SEQ ID NO: 127333 - DNA, 25 bp, Saccharomyces pastorianus
ttactactgctaataatcggcgctc

SEQ ID NO: 127334 - DNA, 25 bp, Saccharomyces pastorianus
ggcgctcagtcttatctttgtatgc

SEQ ID NO: 127335 - DNA, 25 bp, Saccharomyces pastorianus
acgccagtgggttgggcctatacca

SEQ ID NO: 127336 - DNA, 25 bp, Saccharomyces pastorianus
gttattacttgtaaggctcggtaag

SEQ ID NO: 127337 - DNA, 25 bp, Saccharomyces pastorianus
tttcactaccagtgtgggctctgcg

SEQ ID NO: 127338 - DNA, 25 bp, Saccharomyces pastorianus
ttcccttggaaagaactcaaagacg

SEQ ID NO: 127339 - DNA, 25 bp, Saccharomyces pastorianus
ggagattggtttggatttttatcct

SEQ ID NO: 127340 - DNA, 25 bp, Saccharomyces pastorianus
aagacggaagtttcactaccagtgt

SEQ ID NO: 127341 - DNA, 25 bp, Saccharomyces pastorianus
aaggctctctttggtataggcccaa

SEQ ID NO: 127342 - DNA, 25 bp, Saccharomyces pastorianus
atgttttctccgacgctgctgttat

SEQ ID NO: 127343 - DNA, 25 bp, Saccharomyces pastorianus
ccgacgctgctgttattacttgtaa

SEQ ID NO: 127344 - DNA, 25 bp, Saccharomyces pastorianus
gtaaggttaccttagaaggctctct

SEQ ID NO: 127345 - DNA, 25 bp, Saccharomyces pastorianus
gtataggcccaacccactggcgttt

SEQ ID NO: 127346 - DNA, 25 bp, Saccharomyces pastorianus
gggctctgcgctttttgatattgga

SEQ ID NO: 127347 - DNA, 25 bp, Saccharomyces pastorianus
gtgatgttaaacaccaggtttttca

SEQ ID NO: 127348 - DNA, 25 bp, Saccharomyces pastorianus
atgtaggccctcgtatagtctcttt

SEQ ID NO: 127349 - DNA, 25 bp, Saccharomyces pastorianus
tagtagtttatgtaggccctcgtat

SEQ ID NO: 127350 - DNA, 25 bp, Saccharomyces pastorianus
attgcttccagccttctagtagttt

SEQ ID NO: 127351 - DNA, 25 bp, Saccharomyces pastorianus
taggccctcgtatagtctcttttca

SEQ ID NO: 127352 - DNA, 25 bp, Saccharomyces pastorianus
tgatcatattggtgatgttaaacac

SEQ ID NO: 127353 - DNA, 25 bp, Saccharomyces pastorianus
tccagccttctagtagtttatgtag

SEQ ID NO: 127354 - DNA, 25 bp, Saccharomyces pastorianus
gcttccagccttctagtagtttatg

SEQ ID NO: 127355 - DNA, 25 bp, Saccharomyces pastorianus
ttatgtaggccctcgtatagtctct

SEQ ID NO: 127356 - DNA, 25 bp, Saccharomyces pastorianus
gtttttcaacccgtattgcttccag

SEQ ID NO: 127357 - DNA, 25 bp, Saccharomyces pastorianus
gccctcgtatagtctcttttcaggt

SEQ ID NO: 127358 - DNA, 25 bp, Saccharomyces pastorianus
tactgaagaggaggtcgactacgtc

SEQ ID NO: 127359 - DNA, 25 bp, Saccharomyces pastorianus
ttctcacaagatttacggtccaaag

SEQ ID NO: 127360 - DNA, 25 bp, Saccharomyces pastorianus
tagtcaaaggtctattatccgctga

SEQ ID NO: 127361 - DNA, 25 bp, Saccharomyces pastorianus
ttagaacctttactatccggtggtg

SEQ ID NO: 127362 - DNA, 25 bp, Saccharomyces pastorianus
tatccagggtgtgttaacgtttctt

SEQ ID NO: 127363 - DNA, 25 bp, Saccharomyces pastorianus
tagcccattcttccatcagatttgg

SEQ ID NO: 127364 - DNA, 25 bp, Saccharomyces pastorianus
taccacgttgaacggatctccagat

SEQ ID NO: 127365 - DNA, 25 bp, Saccharomyces pastorianus
attatccgctgaacataccacgttg

SEQ ID NO: 127366 - DNA, 25 bp, Saccharomyces pastorianus
gtttctttcgcctacgtggaaggag

SEQ ID NO: 127367 - DNA, 25 bp, Saccharomyces pastorianus
gaaccttcttatgttttacatgcgc

SEQ ID NO: 127368 - DNA, 25 bp, Saccharomyces pastorianus
aggatgatgcattagcccattcttc

SEQ ID NO: 127369 - DNA, 25 bp, Saccharomyces pastorianus
ttctctctggaaacgcataccgata

SEQ ID NO: 127370 - DNA, 25 bp, Saccharomyces pastorianus
gcataccgatattcaggctgctgca

SEQ ID NO: 127371 - DNA, 25 bp, Saccharomyces pastorianus
gttagacgacaacttctctctggaa

SEQ ID NO: 127372 - DNA, 25 bp, Saccharomyces pastorianus
cctcctgcagcaggcgtgaagttag

SEQ ID NO: 127373 - DNA, 25 bp, Saccharomyces pastorianus
agtgcccgtgcgagtgcatccggta

SEQ ID NO: 127374 - DNA, 25 bp, Saccharomyces pastorianus
gtagtagcttctggtagcactgcaa

SEQ ID NO: 127375 - DNA, 25 bp, Saccharomyces pastorianus
gcactgcaatgagccatgcttatca

SEQ ID NO: 127376 - DNA, 25 bp, Saccharomyces pastorianus
tccagcggccacatatagggcttgt

SEQ ID NO: 127377 - DNA, 25 bp, Saccharomyces pastorianus
gtaagcaggagattctattcccctc

SEQ ID NO: 127378 - DNA, 25 bp, Saccharomyces pastorianus
ggtaccaccccagatgctgtagtag

SEQ ID NO: 127379 - DNA, 25 bp, Saccharomyces pastorianus
tcaagtttacaacgttccagcggcc

SEQ ID NO: 127380 - DNA, 25 bp, Saccharomyces pastorianus
taaagatgcttcgtacgcgtactta

SEQ ID NO: 127381 - DNA, 25 bp, Saccharomyces pastorianus
aactaaagcattgacgccagagcgt

SEQ ID NO: 127382 - DNA, 25 bp, Saccharomyces pastorianus
aaaccgtgttaggaaatgctcagaa

SEQ ID NO: 127383 - DNA, 25 bp, Saccharomyces pastorianus
aacccactgctgaatttccggtgga

SEQ ID NO: 127384 - DNA, 25 bp, Saccharomyces pastorianus
ggaaatacctccatgagtactgaca

SEQ ID NO: 127385 - DNA, 25 bp, Saccharomyces pastorianus
gaagaacttccaaatactccgcgaa

SEQ ID NO: 127386 - DNA, 25 bp, Saccharomyces pastorianus
gttcaagagtctcctagtggaccat

SEQ ID NO: 127387 - DNA, 25 bp, Saccharomyces pastorianus
aatctatgttttgcctcagagtagc

SEQ ID NO: 127388 - DNA, 25 bp, Saccharomyces pastorianus
tgggtttcccctagcaaaattgact

SEQ ID NO: 127389 - DNA, 25 bp, Saccharomyces pastorianus
aaaacctaccgaactgttagatgat

SEQ ID NO: 127390 - DNA, 25 bp, Saccharomyces pastorianus
cgccagagcgtaatactgtgtcttt

SEQ ID NO: 127391 - DNA, 25 bp, Saccharomyces pastorianus
acgagaagggcgtattcattagatt

SEQ ID NO: 127392 - DNA, 25 bp, Saccharomyces pastorianus
acgccaaaggtattcggctatccgc

SEQ ID NO: 127393 - DNA, 25 bp, Saccharomyces pastorianus
ggagaccctttatcacggttatagg

SEQ ID NO: 127394 - DNA, 25 bp, Saccharomyces pastorianus
tagaagactttcaatcagacccaga

SEQ ID NO: 127395 - DNA, 25 bp, Saccharomyces pastorianus
tatcacggttataggatcttcaaac

SEQ ID NO: 127396 - DNA, 25 bp, Saccharomyces pastorianus
tcaatcagacccagaaagacatgtt

SEQ ID NO: 127397 - DNA, 25 bp, Saccharomyces pastorianus
gatgctaacaattggagacccttta

SEQ ID NO: 127398 - DNA, 25 bp, Saccharomyces pastorianus
ttcggctatccgctcgtgataaaaa

SEQ ID NO: 127399 - DNA, 25 bp, Saccharomyces pastorianus
gaaagacatgttggcactggtgtaa

SEQ ID NO: 127400 - DNA, 25 bp, Saccharomyces pastorianus
caaaacctgtaactctagaagactt

SEQ ID NO: 127401 - DNA, 25 bp, Saccharomyces pastorianus
tccgctcgtgataaaaatgatgcta

SEQ ID NO: 127402 - DNA, 25 bp, Saccharomyces pastorianus
attcactccactttttcccaaatat

SEQ ID NO: 127403 - DNA, 25 bp, Saccharomyces pastorianus
aagcaaaactgctggcaacgccggt

SEQ ID NO: 127404 - DNA, 25 bp, Saccharomyces pastorianus
atctggccagattcgaatcctactg

SEQ ID NO: 127405 - DNA, 25 bp, Saccharomyces pastorianus
ctggtgcttacttgtacctgtcaaa

SEQ ID NO: 127406 - DNA, 25 bp, Saccharomyces pastorianus
gaatcctactgttgaaccgacgaaa

SEQ ID NO: 127407 - DNA, 25 bp, Saccharomyces pastorianus
cgattactgccgtgggtcaattctc

SEQ ID NO: 127408 - DNA, 25 bp, Saccharomyces pastorianus
gcaacgccggttgctgaggcaaatg

SEQ ID NO: 127409 - DNA, 25 bp, Saccharomyces pastorianus
catttcttggacgttcactgcagga

SEQ ID NO: 127410 - DNA, 25 bp, Saccharomyces pastorianus
gggtcaattctccacattagtttac

SEQ ID NO: 127411 - DNA, 25 bp, Saccharomyces pastorianus
tattgtcattgctttccactataac

SEQ ID NO: 127412 - DNA, 25 bp, Saccharomyces pastorianus
ggtagcatcaacatcatctggccag

SEQ ID NO: 127413 - DNA, 25 bp, Saccharomyces pastorianus
tacctagacctaatagagaatagtg

SEQ ID NO: 127414 - DNA, 25 bp, Saccharomyces pastorianus
gaatagtggaaagaacaatggcaaa

SEQ ID NO: 127415 - DNA, 25 bp, Saccharomyces pastorianus
attcgtactcattacttcaaaaatc

SEQ ID NO: 127416 - DNA, 25 bp, Saccharomyces pastorianus
gagctgcaaaattagatgcaataga

SEQ ID NO: 127417 - DNA, 25 bp, Saccharomyces pastorianus
aacaatggcaaaatattcgtactca

SEQ ID NO: 127418 - DNA, 25 bp, Saccharomyces pastorianus
aaatattcgtactcattacttcaaa

SEQ ID NO: 127419 - DNA, 25 bp, Saccharomyces pastorianus
aacgtgaaatatacctagacctaat

SEQ ID NO: 127420 - DNA, 25 bp, Saccharomyces pastorianus
gcaatagaaacactacttattacag

SEQ ID NO: 127421 - DNA, 25 bp, Saccharomyces pastorianus
gaaatatacctagacctaatagaga

SEQ ID NO: 127422 - DNA, 25 bp, Saccharomyces pastorianus
actacttattacagatagtgtacta

SEQ ID NO: 127423 - DNA, 25 bp, Saccharomyces pastorianus
tggcaaaatattcgtactcattact

SEQ ID NO: 127424 - DNA, 25 bp, Saccharomyces pastorianus
agtgcccatcatgcggccattataa

SEQ ID NO: 127425 - DNA, 25 bp, Saccharomyces pastorianus
agaagaaattaagccgagacaagag

SEQ ID NO: 127426 - DNA, 25 bp, Saccharomyces pastorianus
tagaccaaagagtcctatatcctgg

SEQ ID NO: 127427 - DNA, 25 bp, Saccharomyces pastorianus
agagataccaaatacaccaaggatt

SEQ ID NO: 127428 - DNA, 25 bp, Saccharomyces pastorianus
tcatatatggaaaacgcataccgct

SEQ ID NO: 127429 - DNA, 25 bp, Saccharomyces pastorianus
gagtcctatatcctggtagaagaga

SEQ ID NO: 127430 - DNA, 25 bp, Saccharomyces pastorianus
gattcaccatttgaataagtgccca

SEQ ID NO: 127431 - DNA, 25 bp, Saccharomyces pastorianus
gacaagaggaggaactttccgaact

SEQ ID NO: 127432 - DNA, 25 bp, Saccharomyces pastorianus
gagagccaatacactgtgtatgtat

SEQ ID NO: 127433 - DNA, 25 bp, Saccharomyces pastorianus
ggaaaacgcataccgctaaagaaga

SEQ ID NO: 127434 - DNA, 25 bp, Saccharomyces pastorianus
gaataagtgcccatcatgcggccat

SEQ ID NO: 127435 - DNA, 25 bp, Saccharomyces pastorianus
gctaggaaatccttcactgcaggtt

SEQ ID NO: 127436 - DNA, 25 bp, Saccharomyces pastorianus
tccaccgttggttgagagaaaagct

SEQ ID NO: 127437 - DNA, 25 bp, Saccharomyces pastorianus
gctacaacaagatcataaggacact

SEQ ID NO: 127438 - DNA, 25 bp, Saccharomyces pastorianus
acaaaattgtgcctaccactgcaat

SEQ ID NO: 127439 - DNA, 25 bp, Saccharomyces pastorianus
ggtaaacaattagcatttcacaaaa

SEQ ID NO: 127440 - DNA, 25 bp, Saccharomyces pastorianus
ttgtgcctaccactgcaattgggtg

SEQ ID NO: 127441 - DNA, 25 bp, Saccharomyces pastorianus
aaacaactgggatctatccaccgtt

SEQ ID NO: 127442 - DNA, 25 bp, Saccharomyces pastorianus
ttcactgcaggttccaggccaaaaa

SEQ ID NO: 127443 - DNA, 25 bp, Saccharomyces pastorianus
gggatctatccaccgttggttgaga

SEQ ID NO: 127444 - DNA, 25 bp, Saccharomyces pastorianus
atggtattctactagcagttcctaa

SEQ ID NO: 127445 - DNA, 25 bp, Saccharomyces pastorianus
tggttggtaccgctaggaaatcctt

SEQ ID NO: 127446 - DNA, 25 bp, Saccharomyces pastorianus
atctgtcccttgcatcaggtttgaa

SEQ ID NO: 127447 - DNA, 25 bp, Saccharomyces pastorianus
ggccaaagtcctattctactgagaa

SEQ ID NO: 127448 - DNA, 25 bp, Saccharomyces pastorianus
atgtagatgctcactctggtgtctt

SEQ ID NO: 127449 - DNA, 25 bp, Saccharomyces pastorianus
agggcatttggtattcttgctcaat

SEQ ID NO: 127450 - DNA, 25 bp, Saccharomyces pastorianus
gatcctcgttatatggctcagcgta

SEQ ID NO: 127451 - DNA, 25 bp, Saccharomyces pastorianus
attgatcactgatagggccatcggt

SEQ ID NO: 127452 - DNA, 25 bp, Saccharomyces pastorianus
gtagcacctggcgtattgactgaac

SEQ ID NO: 127453 - DNA, 25 bp, Saccharomyces pastorianus
tcagcgtaagtttgccatggaccat

SEQ ID NO: 127454 - DNA, 25 bp, Saccharomyces pastorianus
agtcattcccggttatggtcatgct

SEQ ID NO: 127455 - DNA, 25 bp, Saccharomyces pastorianus
ggccatcggtgcttccattgaaagg

SEQ ID NO: 127456 - DNA, 25 bp, Saccharomyces pastorianus
atcttgtgggctcagcactatcatc

SEQ ID NO: 127457 - DNA, 25 bp, Saccharomyces pastorianus
atcgccccagaggaatatatcaaag

SEQ ID NO: 127458 - DNA, 25 bp, Saccharomyces pastorianus
tggcaatgagaactggtagacaatt

SEQ ID NO: 127459 - DNA, 25 bp, Saccharomyces pastorianus
aaatattcaccttagtggaggcgtt

SEQ ID NO: 127460 - DNA, 25 bp, Saccharomyces pastorianus
gttagatcccgttccgtacagaaga

SEQ ID NO: 127461 - DNA, 25 bp, Saccharomyces pastorianus
ttagtggaggcgtttgcggttcatc

SEQ ID NO: 127462 - DNA, 25 bp, Saccharomyces pastorianus
gtttgcggttcatcgccgtacatcg

SEQ ID NO: 127463 - DNA, 25 bp, Saccharomyces pastorianus
actgcttacgcacgatggtgtgcta

SEQ ID NO: 127464 - DNA, 25 bp, Saccharomyces pastorianus
tacagactttggtaacagcgaatgt

SEQ ID NO: 127465 - DNA, 25 bp, Saccharomyces pastorianus
gatcccgttccgtacagaagaatta

SEQ ID NO: 127466 - DNA, 25 bp, Saccharomyces pastorianus
gcctgagaacttactgcttacgcac

SEQ ID NO: 127467 - DNA, 25 bp, Saccharomyces pastorianus
gagtttgatccaagacccgtagata

SEQ ID NO: 127468 - DNA, 25 bp, Saccharomyces pastorianus
agtatggtcgctgtcaagaagtcct

SEQ ID NO: 127469 - DNA, 25 bp, Saccharomyces pastorianus
actctttttgcaggcttcatgaagc

SEQ ID NO: 127470 - DNA, 25 bp, Saccharomyces pastorianus
tgcatttcttcttcattacaccata

SEQ ID NO: 127471 - DNA, 25 bp, Saccharomyces pastorianus
ttgccgccggaaaactagaatatat

SEQ ID NO: 127472 - DNA, 25 bp, Saccharomyces pastorianus
aagcgtagaacatccgaatcagcag

SEQ ID NO: 127473 - DNA, 25 bp, Saccharomyces pastorianus
tattgtgcaggtggcgatctattca

SEQ ID NO: 127474 - DNA, 25 bp, Saccharomyces pastorianus
ataaatatccagaaggcgctcccac

SEQ ID NO: 127475 - DNA, 25 bp, Saccharomyces pastorianus
aacaagaatcctcctactctttttg

SEQ ID NO: 127476 - DNA, 25 bp, Saccharomyces pastorianus
gatctattcactttggtcgttgccg

SEQ ID NO: 127477 - DNA, 25 bp, Saccharomyces pastorianus
gcagattgtttcttcaagcagctta

SEQ ID NO: 127478 - DNA, 25 bp, Saccharomyces pastorianus
agtggcgctttaaatggtcctgaaa

SEQ ID NO: 127479 - DNA, 25 bp, Saccharomyces pastorianus
gacgagccatcagagtctggtgttg

SEQ ID NO: 127480 - DNA, 25 bp, Saccharomyces pastorianus
ggtgagagcaaatcctctaccaaaa

SEQ ID NO: 127481 - DNA, 25 bp, Saccharomyces pastorianus
caaagtctgagagcaagtttcccac

SEQ ID NO: 127482 - DNA, 25 bp, Saccharomyces pastorianus
gaaaattacggcgactccctgatca

SEQ ID NO: 127483 - DNA, 25 bp, Saccharomyces pastorianus
gaggataaggctagcgaaccaatta

SEQ ID NO: 127484 - DNA, 25 bp, Saccharomyces pastorianus
ggacgaaatcccctcagtatataat

SEQ ID NO: 127485 - DNA, 25 bp, Saccharomyces pastorianus
gactccctgatcaaagacgagccat

SEQ ID NO: 127486 - DNA, 25 bp, Saccharomyces pastorianus
taagcattttttcaacttggacgaa

SEQ ID NO: 127487 - DNA, 25 bp, Saccharomyces pastorianus
gtttcccaccggaatcctagaattg

SEQ ID NO: 127488 - DNA, 25 bp, Saccharomyces pastorianus
tgcttttatatttcagggacttaca

SEQ ID NO: 127489 - DNA, 25 bp, Saccharomyces pastorianus
aagcgtgtgtcgaaaccagggacga

SEQ ID NO: 127490 - DNA, 25 bp, Saccharomyces pastorianus
gatccaggtgaaggcaactacaata

SEQ ID NO: 127491 - DNA, 25 bp, Saccharomyces pastorianus
gtaagttccaagttttgagtgagca

SEQ ID NO: 127492 - DNA, 25 bp, Saccharomyces pastorianus
atggctaagctcatgggcaatacga

SEQ ID NO: 127493 - DNA, 25 bp, Saccharomyces pastorianus
cgactcgcccagctattttattaag

SEQ ID NO: 127494 - DNA, 25 bp, Saccharomyces pastorianus
agagcactcggattctatgtatgaa

SEQ ID NO: 127495 - DNA, 25 bp, Saccharomyces pastorianus
agttacttagttgttgatccaggtg

SEQ ID NO: 127496 - DNA, 25 bp, Saccharomyces pastorianus
tgaaacatccggaatgcacgacatt

SEQ ID NO: 127497 - DNA, 25 bp, Saccharomyces pastorianus
cggtcatatgagtgaaccggaatat

SEQ ID NO: 127498 - DNA, 25 bp, Saccharomyces pastorianus
taaccgatacggagctacaagttgg

SEQ ID NO: 127499 - DNA, 25 bp, Saccharomyces pastorianus
gcacgacattgatccttctgacgat

SEQ ID NO: 127500 - DNA, 25 bp, Saccharomyces pastorianus
atacgtacgttagtgaaacatccgg

SEQ ID NO: 127501 - DNA, 25 bp, Saccharomyces pastorianus
gccttatcatccagattctcagttg

SEQ ID NO: 127502 - DNA, 25 bp, Saccharomyces pastorianus
atgtcctatcattctccgtttatat

SEQ ID NO: 127503 - DNA, 25 bp, Saccharomyces pastorianus
tggccctactatcactaacagctag

SEQ ID NO: 127504 - DNA, 25 bp, Saccharomyces pastorianus
gttgcatacgcatttgttccaatgg

SEQ ID NO: 127505 - DNA, 25 bp, Saccharomyces pastorianus
gccttttcttccacatttatcatta

SEQ ID NO: 127506 - DNA, 25 bp, Saccharomyces pastorianus
gcccatgtttgggtcgttgcatacg

SEQ ID NO: 127507 - DNA, 25 bp, Saccharomyces pastorianus
tacaggaattcctcagccttatcat

SEQ ID NO: 127508 - DNA, 25 bp, Saccharomyces pastorianus
gtatgcagatttcggaccaggtcca

SEQ ID NO: 127509 - DNA, 25 bp, Saccharomyces pastorianus
tcgtatttttctgcattaggccaag

SEQ ID NO: 127510 - DNA, 25 bp, Saccharomyces pastorianus
agattgagacggttcttgccttttc

SEQ ID NO: 127511 - DNA, 25 bp, Saccharomyces pastorianus
tatattatctttgtccttgcccatg

SEQ ID NO: 127512 - DNA, 25 bp, Saccharomyces pastorianus
ttgcgctagtaatcttgatacatga

SEQ ID NO: 127513 - DNA, 25 bp, Saccharomyces pastorianus
ggaatatactaggagttctcttcaa

SEQ ID NO: 127514 - DNA, 25 bp, Saccharomyces pastorianus
gcgctagtaatcttgatacatgatt

SEQ ID NO: 127515 - DNA, 25 bp, Saccharomyces pastorianus
gatacatgattcgagaaaagcaaca

SEQ ID NO: 127516 - DNA, 25 bp, Saccharomyces pastorianus
acttgcgctagtaatcttgatacat

SEQ ID NO: 127517 - DNA, 25 bp, Saccharomyces pastorianus
aggagttctcttcaaggatagagga

SEQ ID NO: 127518 - DNA, 25 bp, Saccharomyces pastorianus
gattcgagaaaagcaacaatattat

SEQ ID NO: 127519 - DNA, 25 bp, Saccharomyces pastorianus
tactaggagttctcttcaaggatag

SEQ ID NO: 127520 - DNA, 25 bp, Saccharomyces pastorianus
gtaatcttgatacatgattcgagaa

SEQ ID NO: 127521 - DNA, 25 bp, Saccharomyces pastorianus
cggaatatactaggagttctcttca

SEQ ID NO: 127522 - DNA, 25 bp, Saccharomyces pastorianus
ccacttgcgctagtaatcttgatac

SEQ ID NO: 127523 - DNA, 25 bp, Saccharomyces pastorianus
agtcgctatcgaaaatataatatct

SEQ ID NO: 127524 - DNA, 25 bp, Saccharomyces pastorianus
tatctatgcttatctatattgagaa

SEQ ID NO: 127525 - DNA, 25 bp, Saccharomyces pastorianus
gcttatctatattgagaaatggatg

SEQ ID NO: 127526 - DNA, 25 bp, Saccharomyces pastorianus
atctatgcttatctatattgagaaa

SEQ ID NO: 127527 - DNA, 25 bp, Saccharomyces pastorianus
atatctatgcttatctatattgaga

SEQ ID NO: 127528 - DNA, 25 bp, Saccharomyces pastorianus
cctaataataaagtcgctatcgaaa

SEQ ID NO: 127529 - DNA, 25 bp, Saccharomyces pastorianus
tctatgcttatctatattgagaaat

SEQ ID NO: 127530 - DNA, 25 bp, Saccharomyces pastorianus
atgcttatctatattgagaaatgga

SEQ ID NO: 127531 - DNA, 25 bp, Saccharomyces pastorianus
ctatgcttatctatattgagaaatg

SEQ ID NO: 127532 - DNA, 25 bp, Saccharomyces pastorianus
gtcgctatcgaaaatataatatcta

SEQ ID NO: 127533 - DNA, 25 bp, Saccharomyces pastorianus
gctatcgaaaatataatatctatgc

SEQ ID NO: 127534 - DNA, 25 bp, Saccharomyces pastorianus
gtctaggaatccccataatggaatc

SEQ ID NO: 127535 - DNA, 25 bp, Saccharomyces pastorianus
tatgagaaatgggtgaatgttgaga

SEQ ID NO: 127536 - DNA, 25 bp, Saccharomyces pastorianus
agggtctaggaatccccataatgga

SEQ ID NO: 127537 - DNA, 25 bp, Saccharomyces pastorianus
atgagaaatgggtgaatgttgagat

SEQ ID NO: 127538 - DNA, 25 bp, Saccharomyces pastorianus
tcctcgagggtctaggaatccccat

SEQ ID NO: 127539 - DNA, 25 bp, Saccharomyces pastorianus
cctcgagggtctaggaatccccata

SEQ ID NO: 127540 - DNA, 25 bp, Saccharomyces pastorianus
ggtctaggaatccccataatggaat

SEQ ID NO: 127541 - DNA, 25 bp, Saccharomyces pastorianus
ctaggaatccccataatggaatcta

SEQ ID NO: 127542 - DNA, 25 bp, Saccharomyces pastorianus
ctcgagggtctaggaatccccataa

SEQ ID NO: 127543 - DNA, 25 bp, Saccharomyces pastorianus
gggtctaggaatccccataatggaa

SEQ ID NO: 127544 - DNA, 25 bp, Saccharomyces pastorianus
gagggtctaggaatccccataatgg

SEQ ID NO: 127545 - DNA, 25 bp, Saccharomyces pastorianus
gtgaatgttgagataattgttggga

SEQ ID NO: 127546 - DNA, 25 bp, Saccharomyces pastorianus
gggtgaatgttgagataattgttgg

SEQ ID NO: 127547 - DNA, 25 bp, Saccharomyces pastorianus
agaaatgggtgaatgttgagataat

SEQ ID NO: 127548 - DNA, 25 bp, Saccharomyces pastorianus
tcctcaaggatataggaatcctcaa

SEQ ID NO: 127549 - DNA, 25 bp, Saccharomyces pastorianus
aatgggtgaatgttgagataattgt

SEQ ID NO: 127550 - DNA, 25 bp, Saccharomyces pastorianus
caaaatggaatatatatttctacat

SEQ ID NO: 127551 - DNA, 25 bp, Saccharomyces pastorianus
tgggtgaatgttgagataattgttg

SEQ ID NO: 127552 - DNA, 25 bp, Saccharomyces pastorianus
atgggtgaatgttgagataattgtt

SEQ ID NO: 127553 - DNA, 25 bp, Saccharomyces pastorianus
gaaatgggtgaatgttgagataatt

SEQ ID NO: 127554 - DNA, 25 bp, Saccharomyces pastorianus
aaatgggtgaatgttgagataattg

SEQ ID NO: 127555 - DNA, 25 bp, Saccharomyces pastorianus
gagaaatgggtgaatgttgagataa

SEQ ID NO: 127556 - DNA, 25 bp, Saccharomyces pastorianus
ggaaactcgttccttggcggctttg

SEQ ID NO: 127557 - DNA, 25 bp, Saccharomyces pastorianus
taaagtactagatcctactggcggg

SEQ ID NO: 127558 - DNA, 25 bp, Saccharomyces pastorianus
ggctttgcagtttcttatgccctaa

SEQ ID NO: 127559 - DNA, 25 bp, Saccharomyces pastorianus
tatgtgggaacattgctgcaggcgc

SEQ ID NO: 127560 - DNA, 25 bp, Saccharomyces pastorianus
ttcacagtccggtcttcaatatgat

SEQ ID NO: 127561 - DNA, 25 bp, Saccharomyces pastorianus
atgtgtattctacgatgcggtgccc

SEQ ID NO: 127562 - DNA, 25 bp, Saccharomyces pastorianus
cattcccagatctttgcgactttga

SEQ ID NO: 127563 - DNA, 25 bp, Saccharomyces pastorianus
tgtctagcattagcgcatcgtttcg

SEQ ID NO: 127564 - DNA, 25 bp, Saccharomyces pastorianus
accgaggtacgatccaattgctaaa

SEQ ID NO: 127565 - DNA, 25 bp, Saccharomyces pastorianus
gaacggacgaacctatgaccatttc

SEQ ID NO: 127566 - DNA, 25 bp, Saccharomyces pastorianus
ggtgccctcggaagcatatcggtaa

SEQ ID NO: 127567 - DNA, 25 bp, Saccharomyces pastorianus
ataatgattgataagcctgttctgc

SEQ ID NO: 127568 - DNA, 25 bp, Saccharomyces pastorianus
tagtcagcgtccctaggcgttccgt

SEQ ID NO: 127569 - DNA, 25 bp, Saccharomyces pastorianus
gttgaggaacgtatgggctccagta

SEQ ID NO: 127570 - DNA, 25 bp, Saccharomyces pastorianus
gaacgtatgggctccagtagtagaa

SEQ ID NO: 127571 - DNA, 25 bp, Saccharomyces pastorianus
aagcctgttctgcaggagcttactg

SEQ ID NO: 127572 - DNA, 25 bp, Saccharomyces pastorianus
ggcgttccgttaagactataatgat

SEQ ID NO: 127573 - DNA, 25 bp, Saccharomyces pastorianus
tgatgggcctagtcagcgtccctag

SEQ ID NO: 127574 - DNA, 25 bp, Saccharomyces pastorianus
tccctaggcgttccgttaagactat

SEQ ID NO: 127575 - DNA, 25 bp, Saccharomyces pastorianus
ttgctattagatcatgttgaggaac

SEQ ID NO: 127576 - DNA, 25 bp, Saccharomyces pastorianus
agaatgatgggcctagtcagcgtcc

SEQ ID NO: 127577 - DNA, 25 bp, Saccharomyces pastorianus
tatgggctccagtagtagaatgatg

SEQ ID NO: 127578 - DNA, 25 bp, Saccharomyces pastorianus
ctagagggttcaatgcacttatgct

SEQ ID NO: 127579 - DNA, 25 bp, Saccharomyces pastorianus
aattgccaaggctatctttgacagg

SEQ ID NO: 127580 - DNA, 25 bp, Saccharomyces pastorianus
gacaggaggattctctcatcaccat

SEQ ID NO: 127581 - DNA, 25 bp, Saccharomyces pastorianus
gaagctgttccagagagcccaagag

SEQ ID NO: 127582 - DNA, 25 bp, Saccharomyces pastorianus
cttgctaattgcagtcagccgtgat

SEQ ID NO: 127583 - DNA, 25 bp, Saccharomyces pastorianus
tcaaccagacggtgaggctatcttt

SEQ ID NO: 127584 - DNA, 25 bp, Saccharomyces pastorianus
gaagatgcggctcctgaaacaaaag

SEQ ID NO: 127585 - DNA, 25 bp, Saccharomyces pastorianus
acttatgctgtgtacctgcatggta

SEQ ID NO: 127586 - DNA, 25 bp, Saccharomyces pastorianus
acccaaggtgtgatatgccaacgtc

SEQ ID NO: 127587 - DNA, 25 bp, Saccharomyces pastorianus
gagagactgcaatccacgaacccga

SEQ ID NO: 127588 - DNA, 25 bp, Saccharomyces pastorianus
atcaccatgctacggacgatgtgga

SEQ ID NO: 127589 - DNA, 25 bp, Saccharomyces pastorianus
gaacaagggctccagattgactaga

SEQ ID NO: 127590 - DNA, 25 bp, Saccharomyces pastorianus
accacatggcctggatatgcacatt

SEQ ID NO: 127591 - DNA, 25 bp, Saccharomyces pastorianus
attgtgatgttcttcattgcggaga

SEQ ID NO: 127592 - DNA, 25 bp, Saccharomyces pastorianus
gaatttttcgctttcttcacttatg

SEQ ID NO: 127593 - DNA, 25 bp, Saccharomyces pastorianus
ccacgtccaggttagcaagtctatc

SEQ ID NO: 127594 - DNA, 25 bp, Saccharomyces pastorianus
gaacgatacgctatcaagcttttta

SEQ ID NO: 127595 - DNA, 25 bp, Saccharomyces pastorianus
gcagtgtttgcagtctttggcttta

SEQ ID NO: 127596 - DNA, 25 bp, Saccharomyces pastorianus
aggctttagggcttaatccaccaca

SEQ ID NO: 127597 - DNA, 25 bp, Saccharomyces pastorianus
cttatgcttctgatgtaggttggac

SEQ ID NO: 127598 - DNA, 25 bp, Saccharomyces pastorianus
ttcaagctgaatttaaccacgtcca

SEQ ID NO: 127599 - DNA, 25 bp, Saccharomyces pastorianus
actagatatgccttagctcctgtat

SEQ ID NO: 127600 - DNA, 25 bp, Saccharomyces pastorianus
gccacatcctgcatgtttattcgaa

SEQ ID NO: 127601 - DNA, 25 bp, Saccharomyces pastorianus
gtttattcgaataccaaattagctc

SEQ ID NO: 127602 - DNA, 25 bp, Saccharomyces pastorianus
aaattagctcatcttcgttatttca

SEQ ID NO: 127603 - DNA, 25 bp, Saccharomyces pastorianus
cctgcatgtttattcgaataccaaa

SEQ ID NO: 127604 - DNA, 25 bp, Saccharomyces pastorianus
ttcgaataccaaattagctcatctt

SEQ ID NO: 127605 - DNA, 25 bp, Saccharomyces pastorianus
gatcccgactcttattccgatccct

SEQ ID NO: 127606 - DNA, 25 bp, Saccharomyces pastorianus
aataccaaattagctcatcttcgtt

SEQ ID NO: 127607 - DNA, 25 bp, Saccharomyces pastorianus
accaaattagctcatcttcgttatt

SEQ ID NO: 127608 - DNA, 25 bp, Saccharomyces pastorianus
acatcctgcatgtttattcgaatac

SEQ ID NO: 127609 - DNA, 25 bp, Saccharomyces pastorianus
ttccgccacatcctgcatgtttatt

SEQ ID NO: 127610 - DNA, 25 bp, Saccharomyces pastorianus
atcctgcatgtttattcgaatacca

SEQ ID NO: 127611 - DNA, 25 bp, Saccharomyces pastorianus
gccacatcctgcatgtttattcgaa

SEQ ID NO: 127612 - DNA, 25 bp, Saccharomyces pastorianus
gtttattcgaataccaaattagctc

SEQ ID NO: 127613 - DNA, 25 bp, Saccharomyces pastorianus
agctcatcttcgttatttcatcatc

SEQ ID NO: 127614 - DNA, 25 bp, Saccharomyces pastorianus
agtaagcaaagccatatcccgatcc

SEQ ID NO: 127615 - DNA, 25 bp, Saccharomyces pastorianus
catcctgcatgtttattcgaatacc

SEQ ID NO: 127616 - DNA, 25 bp, Saccharomyces pastorianus
cctgcatgtttattcgaataccaaa

SEQ ID NO: 127617 - DNA, 25 bp, Saccharomyces pastorianus
aaattagctcatcttcgttatttca

SEQ ID NO: 127618 - DNA, 25 bp, Saccharomyces pastorianus
gatcccgactcttattccgatccct

SEQ ID NO: 127619 - DNA, 25 bp, Saccharomyces pastorianus
gaataccaaattagctcatcttcgt

SEQ ID NO: 127620 - DNA, 25 bp, Saccharomyces pastorianus
accaaattagctcatcttcgttatt

SEQ ID NO: 127621 - DNA, 25 bp, Saccharomyces pastorianus
ttccgccacatcctgcatgtttatt

SEQ ID NO: 127622 - DNA, 25 bp, Saccharomyces pastorianus
aaaaccgctgcagcaacccttgtta

SEQ ID NO: 127623 - DNA, 25 bp, Saccharomyces pastorianus
ttgcgtctccctgcgcgatttgctg

SEQ ID NO: 127624 - DNA, 25 bp, Saccharomyces pastorianus
atggaaaaccgctgcagcaaccctt

SEQ ID NO: 127625 - DNA, 25 bp, Saccharomyces pastorianus
ggatccatctgacttactttccttg

SEQ ID NO: 127626 - DNA, 25 bp, Saccharomyces pastorianus
ttgttacatacagtcggatccatct

SEQ ID NO: 127627 - DNA, 25 bp, Saccharomyces pastorianus
gcaacccttgttacatacagtcgga

SEQ ID NO: 127628 - DNA, 25 bp, Saccharomyces pastorianus
gctgcagcaacccttgttacataca

SEQ ID NO: 127629 - DNA, 25 bp, Saccharomyces pastorianus
agtcggatccatctgacttactttc

SEQ ID NO: 127630 - DNA, 25 bp, Saccharomyces pastorianus
tctccctgcgcgatttgctggccat

SEQ ID NO: 127631 - DNA, 25 bp, Saccharomyces pastorianus
atctgacttactttccttgcgtctc

SEQ ID NO: 127632 - DNA, 25 bp, Saccharomyces pastorianus
gcagcaacccttgttacatacagtc

SEQ ID NO: 127633 - DNA, 25 bp, Saccharomyces pastorianus
cagggatacattgagccgttccaaa

SEQ ID NO: 127634 - DNA, 25 bp, Saccharomyces pastorianus
gggcgaaacatcaccatcatcaaga

SEQ ID NO: 127635 - DNA, 25 bp, Saccharomyces pastorianus
aactgagactctaccgggcgaaaca

SEQ ID NO: 127636 - DNA, 25 bp, Saccharomyces pastorianus
gatgcttatgaaccaactccgcgaa

SEQ ID NO: 127637 - DNA, 25 bp, Saccharomyces pastorianus
tgagccgttccaaaataccgaaatt

SEQ ID NO: 127638 - DNA, 25 bp, Saccharomyces pastorianus
gcgaaccccagagcagcgaagaagt

SEQ ID NO: 127639 - DNA, 25 bp, Saccharomyces pastorianus
agcagcatacaagctagcgctactg

SEQ ID NO: 127640 - DNA, 25 bp, Saccharomyces pastorianus
acaaccttttgtgtgatatttgcgg

SEQ ID NO: 127641 - DNA, 25 bp, Saccharomyces pastorianus
gggccatattttccacagggataca

SEQ ID NO: 127642 - DNA, 25 bp, Saccharomyces pastorianus
gaaatagccgctatgccatcttcgt

SEQ ID NO: 127643 - DNA, 25 bp, Saccharomyces pastorianus
caatgatgggactgggatgcttatg

SEQ ID NO: 127644 - DNA, 25 bp, Saccharomyces pastorianus
gtctctaacgtattttgggatcctg

SEQ ID NO: 127645 - DNA, 25 bp, Saccharomyces pastorianus
ccaggtgtattggaccctcgaatat

SEQ ID NO: 127646 - DNA, 25 bp, Saccharomyces pastorianus
tggacaatacccaatacaccacggt

SEQ ID NO: 127647 - DNA, 25 bp, Saccharomyces pastorianus
aaagctgctacccatatgtggccag

SEQ ID NO: 127648 - DNA, 25 bp, Saccharomyces pastorianus
gttatgtaccgaacgtagatgcctt

SEQ ID NO: 127649 - DNA, 25 bp, Saccharomyces pastorianus
gagaactccattttacttcgacgaa

SEQ ID NO: 127650 - DNA, 25 bp, Saccharomyces pastorianus
tacggagacctttcccaaccattgg

SEQ ID NO: 127651 - DNA, 25 bp, Saccharomyces pastorianus
ggtgatataccattcaaagctgcta

SEQ ID NO: 127652 - DNA, 25 bp, Saccharomyces pastorianus
aactgttcagtctgcatttgacggt

SEQ ID NO: 127653 - DNA, 25 bp, Saccharomyces pastorianus
gaccacagttaattctcggttatgt

SEQ ID NO: 127654 - DNA, 25 bp, Saccharomyces pastorianus
atgaggaattccatccaggtgtatt

SEQ ID NO: 127655 - DNA, 25 bp, Saccharomyces pastorianus
gccctcttggctacggcaatatcaa

SEQ ID NO: 127656 - DNA, 25 bp, Saccharomyces pastorianus
gtcgtcatacgctcactacagataa

SEQ ID NO: 127657 - DNA, 25 bp, Saccharomyces pastorianus
aagcggaattgtctcggtcgtcata

SEQ ID NO: 127658 - DNA, 25 bp, Saccharomyces pastorianus
tagatgctaatgacatgcccggaga

SEQ ID NO: 127659 - DNA, 25 bp, Saccharomyces pastorianus
gcattggcatgtttctgttttcata

SEQ ID NO: 127660 - DNA, 25 bp, Saccharomyces pastorianus
gcacagtatcttggaggcgtagcat

SEQ ID NO: 127661 - DNA, 25 bp, Saccharomyces pastorianus
gctatcgttcttgcttccatgaata

SEQ ID NO: 127662 - DNA, 25 bp, Saccharomyces pastorianus
tttgcttcagatatggtgcccaagt

SEQ ID NO: 127663 - DNA, 25 bp, Saccharomyces pastorianus
ggtactaatacgtgcagacccacta

SEQ ID NO: 127664 - DNA, 25 bp, Saccharomyces pastorianus
ggccgttaacgcatggtggtctata

SEQ ID NO: 127665 - DNA, 25 bp, Saccharomyces pastorianus
aaagtcgtcttttctgcacagtatc

SEQ ID NO: 127666 - DNA, 25 bp, Saccharomyces pastorianus
accgtgtcggtttcaccaatgcata

SEQ ID NO: 127667 - DNA, 25 bp, Saccharomyces pastorianus
gatttttgtatcacattacccattg

SEQ ID NO: 127668 - DNA, 25 bp, Saccharomyces pastorianus
gtgctatcatttgtttgcttgcaat

SEQ ID NO: 127669 - DNA, 25 bp, Saccharomyces pastorianus
gagagttgcacattttcaggaacac

SEQ ID NO: 127670 - DNA, 25 bp, Saccharomyces pastorianus
gtgtgttccacctaggatatggcta

SEQ ID NO: 127671 - DNA, 25 bp, Saccharomyces pastorianus
gacgaattgcccattagaagtgcta

SEQ ID NO: 127672 - DNA, 25 bp, Saccharomyces pastorianus
ggattaattatgtcgaccgtgtcgg

SEQ ID NO: 127673 - DNA, 25 bp, Saccharomyces pastorianus
cggtttggtgggatctatgttcagt

SEQ ID NO: 127674 - DNA, 25 bp, Saccharomyces pastorianus
gtcggaaacgatttgaccgtgtcta

SEQ ID NO: 127675 - DNA, 25 bp, Saccharomyces pastorianus
gcgcaattagattctttcaagcctt

SEQ ID NO: 127676 - DNA, 25 bp, Saccharomyces pastorianus
gttacattgtaggtatggtccccaa

SEQ ID NO: 127677 - DNA, 25 bp, Saccharomyces pastorianus
tactaacatttcctttccataattt

SEQ ID NO: 127678 - DNA, 25 bp, Saccharomyces pastorianus
tcttcgagagagacgacggttctaa

SEQ ID NO: 127679 - DNA, 25 bp, Saccharomyces pastorianus
gggtactactttgagcttagttcaa

SEQ ID NO: 127680 - DNA, 25 bp, Saccharomyces pastorianus
ttattcagcgctttggtatatgttg

SEQ ID NO: 127681 - DNA, 25 bp, Saccharomyces pastorianus
gagcttagttcaaaaggacattaat

SEQ ID NO: 127682 - DNA, 25 bp, Saccharomyces pastorianus
tttccataatttattcagcgctttg

SEQ ID NO: 127683 - DNA, 25 bp, Saccharomyces pastorianus
gggtatgttatttattcttcaattt

SEQ ID NO: 127684 - DNA, 25 bp, Saccharomyces pastorianus
gatgctgctaactatgtcttcgaga

SEQ ID NO: 127685 - DNA, 25 bp, Saccharomyces pastorianus
gagagacgacggttctaagggtact

SEQ ID NO: 127686 - DNA, 25 bp, Saccharomyces pastorianus
gtatatgttgaagcagatgctgcta

SEQ ID NO: 127687 - DNA, 25 bp, Saccharomyces pastorianus
tacttactttacaattacgcgttat

SEQ ID NO: 127688 - DNA, 25 bp, Saccharomyces pastorianus
ttctcgaaaatgtccatcgtcggcc

SEQ ID NO: 127689 - DNA, 25 bp, Saccharomyces pastorianus
gaattcactgaacatacttctgcta

SEQ ID NO: 127690 - DNA, 25 bp, Saccharomyces pastorianus
atacttctgctaataacaatcgtta

SEQ ID NO: 127691 - DNA, 25 bp, Saccharomyces pastorianus
actcaagctcgtttcttccatgcta

SEQ ID NO: 127692 - DNA, 25 bp, Saccharomyces pastorianus
gagatggccaaaccactgggtataa

SEQ ID NO: 127693 - DNA, 25 bp, Saccharomyces pastorianus
aaatgtccatcgtcggccgcattgg

SEQ ID NO: 127694 - DNA, 25 bp, Saccharomyces pastorianus
gtttcttccatgctactaccaagaa

SEQ ID NO: 127695 - DNA, 25 bp, Saccharomyces pastorianus
tatagtatcgcttcgcaaccaagaa

SEQ ID NO: 127696 - DNA, 25 bp, Saccharomyces pastorianus
cactgggtataatatcaccgttttc

SEQ ID NO: 127697 - DNA, 25 bp, Saccharomyces pastorianus
gccgcattggctctgaattcactga

SEQ ID NO: 127698 - DNA, 25 bp, Saccharomyces pastorianus
atgtttttacgtactcaagctcgtt

SEQ ID NO: 127699 - DNA, 25 bp, Saccharomyces pastorianus
ggtatcactgccgttcacgttaaga

SEQ ID NO: 127700 - DNA, 25 bp, Saccharomyces pastorianus
tgccgttcacgttaagatcagagct

SEQ ID NO: 127701 - DNA, 25 bp, Saccharomyces pastorianus
ctgcccaagatgttgccgctaagtg

SEQ ID NO: 127702 - DNA, 25 bp, Saccharomyces pastorianus
gcccaagatgttgccgctaagtgta

SEQ ID NO: 127703 - DNA, 25 bp, Saccharomyces pastorianus
tcactgccgttcacgttaagatcag

SEQ ID NO: 127704 - DNA, 25 bp, Saccharomyces pastorianus
agtcggtatcactgccgttcacgtt

SEQ ID NO: 127705 - DNA, 25 bp, Saccharomyces pastorianus
gtatcactgccgttcacgttaagat

SEQ ID NO: 127706 - DNA, 25 bp, Saccharomyces pastorianus
ccgttcacgttaagatcagagctac

SEQ ID NO: 127707 - DNA, 25 bp, Saccharomyces pastorianus
aagatgttgccgctaagtgtaagga

SEQ ID NO: 127708 - DNA, 25 bp, Saccharomyces pastorianus
cgctaagtgtaaggaagtcggtatc

SEQ ID NO: 127709 - DNA, 25 bp, Saccharomyces pastorianus
gttgccgctaagtgtaaggaagtcg

SEQ ID NO: 127710 - DNA, 25 bp, Saccharomyces pastorianus
aagataagcattcggtttcaggtaa

SEQ ID NO: 127711 - DNA, 25 bp, Saccharomyces pastorianus
ttcactaagttagacgcaggttaca

SEQ ID NO: 127712 - DNA, 25 bp, Saccharomyces pastorianus
ggagatgcgctgttatcacgactac

SEQ ID NO: 127713 - DNA, 25 bp, Saccharomyces pastorianus
gcaaaaggtcgcaatatctcaacat

SEQ ID NO: 127714 - DNA, 25 bp, Saccharomyces pastorianus
ggatacagcagagcctcatgagata

SEQ ID NO: 127715 - DNA, 25 bp, Saccharomyces pastorianus
ataacgccatttcgatcttcaatct

SEQ ID NO: 127716 - DNA, 25 bp, Saccharomyces pastorianus
taaccttagacatcagcggcttagt

SEQ ID NO: 127717 - DNA, 25 bp, Saccharomyces pastorianus
tcacgactacaatacgcttttaacc

SEQ ID NO: 127718 - DNA, 25 bp, Saccharomyces pastorianus
gctactgaagcagctctgtaccgaa

SEQ ID NO: 127719 - DNA, 25 bp, Saccharomyces pastorianus
ggaagacatacctgtcccagaaaag

SEQ ID NO: 127720 - DNA, 25 bp, Saccharomyces pastorianus
atgtttgggcacctatgcgagctaa

SEQ ID NO: 127721 - DNA, 25 bp, Saccharomyces pastorianus
actagtccaataagtcgtgcgcctc

SEQ ID NO: 127722 - DNA, 25 bp, Saccharomyces pastorianus
gatcgagttctatttctgcattact

SEQ ID NO: 127723 - DNA, 25 bp, Saccharomyces pastorianus
ttgcctccgcgccagatgcaatgag

SEQ ID NO: 127724 - DNA, 25 bp, Saccharomyces pastorianus
aacccagatggaaggccgttgctgc

SEQ ID NO: 127725 - DNA, 25 bp, Saccharomyces pastorianus
gttgctgccatttcagcatgctatt

SEQ ID NO: 127726 - DNA, 25 bp, Saccharomyces pastorianus
gacacgaagcacagctcgaagacac

SEQ ID NO: 127727 - DNA, 25 bp, Saccharomyces pastorianus
gaagacactcccagcatgaacaata

SEQ ID NO: 127728 - DNA, 25 bp, Saccharomyces pastorianus
atgctatttctcaaggcactcctac

SEQ ID NO: 127729 - DNA, 25 bp, Saccharomyces pastorianus
tattactacgccaagatcgagttct

SEQ ID NO: 127730 - DNA, 25 bp, Saccharomyces pastorianus
gaatgatccgttggcagctttggct

SEQ ID NO: 127731 - DNA, 25 bp, Saccharomyces pastorianus
gaaatcttctttccaaagcgcttca

SEQ ID NO: 127732 - DNA, 25 bp, Saccharomyces pastorianus
aaagcaggacgaaatttggacgaca

SEQ ID NO: 127733 - DNA, 25 bp, Saccharomyces pastorianus
aaggaactaacacgctctgttgaaa

SEQ ID NO: 127734 - DNA, 25 bp, Saccharomyces pastorianus
gacgacagcaaaaacagtggccaat

SEQ ID NO: 127735 - DNA, 25 bp, Saccharomyces pastorianus
ggaacatcctactcctgtaaaaatg

SEQ ID NO: 127736 - DNA, 25 bp, Saccharomyces pastorianus
aaacttatacatcagcaggctaccg

SEQ ID NO: 127737 - DNA, 25 bp, Saccharomyces pastorianus
atgatgaactagaagctcgcgctaa

SEQ ID NO: 127738 - DNA, 25 bp, Saccharomyces pastorianus
aggctaccggacttatcttgacgaa

SEQ ID NO: 127739 - DNA, 25 bp, Saccharomyces pastorianus
agagcatacgatccgaaagccctga

SEQ ID NO: 127740 - DNA, 25 bp, Saccharomyces pastorianus
gaatatcctttttacgcacagaaca

SEQ ID NO: 127741 - DNA, 25 bp, Saccharomyces pastorianus
agtggccaatgcagtcgaagtttcc

SEQ ID NO: 127742 - DNA, 25 bp, Saccharomyces pastorianus
gtgtattttcccattaccaaaagca

SEQ ID NO: 127743 - DNA, 25 bp, Saccharomyces pastorianus
atgcctatagtaatattcctcctca

SEQ ID NO: 127744 - DNA, 25 bp, Saccharomyces pastorianus
gttggccaaccaactcatgggcata

SEQ ID NO: 127745 - DNA, 25 bp, Saccharomyces pastorianus
ctatttcatctatcgatggctctat

SEQ ID NO: 127746 - DNA, 25 bp, Saccharomyces pastorianus
gctctataagaccatttgggcctga

SEQ ID NO: 127747 - DNA, 25 bp, Saccharomyces pastorianus
agtttggctctcaatggtctctcat

SEQ ID NO: 127748 - DNA, 25 bp, Saccharomyces pastorianus
atgcagctcgcaatggatggaaatt

SEQ ID NO: 127749 - DNA, 25 bp, Saccharomyces pastorianus
aatattcctcctcaacaaagaccgg

SEQ ID NO: 127750 - DNA, 25 bp, Saccharomyces pastorianus
gaacgaccaaacatcaatgcctata

SEQ ID NO: 127751 - DNA, 25 bp, Saccharomyces pastorianus
gggcctgattttcatcgtgatacct

SEQ ID NO: 127752 - DNA, 25 bp, Saccharomyces pastorianus
tgttcgtgaatctcaactctttcca

SEQ ID NO: 127753 - DNA, 25 bp, Saccharomyces pastorianus
tagtgctcctttaaccactttacca

SEQ ID NO: 127754 - DNA, 25 bp, Saccharomyces pastorianus
atcgagaacccatatctagatacca

SEQ ID NO: 127755 - DNA, 25 bp, Saccharomyces pastorianus
gaaaatgtccgaatactagaaagtt

SEQ ID NO: 127756 - DNA, 25 bp, Saccharomyces pastorianus
tttgcaaagaacatcgagaacccat

SEQ ID NO: 127757 - DNA, 25 bp, Saccharomyces pastorianus
tactaaaccttacagaggacaccgg

SEQ ID NO: 127758 - DNA, 25 bp, Saccharomyces pastorianus
gcattcaaatcaaaaactgggtttc

SEQ ID NO: 127759 - DNA, 25 bp, Saccharomyces pastorianus
gaagaataccagtttatctcgcatt

SEQ ID NO: 127760 - DNA, 25 bp, Saccharomyces pastorianus
aaaaacaataacaatcgctccagaa

SEQ ID NO: 127761 - DNA, 25 bp, Saccharomyces pastorianus
gataccaagggcctagagaatctaa

SEQ ID NO: 127762 - DNA, 25 bp, Saccharomyces pastorianus
atcggcggatgggttggtatttaat

SEQ ID NO: 127763 - DNA, 25 bp, Saccharomyces pastorianus
taccagtttatctcgcattcaaatc

SEQ ID NO: 127764 - DNA, 25 bp, Saccharomyces pastorianus
atcgctccagaattagcggacctct

SEQ ID NO: 127765 - DNA, 25 bp, Saccharomyces pastorianus
gagggctactgctgtggaactactg

SEQ ID NO: 127766 - DNA, 25 bp, Saccharomyces pastorianus
tgactgcagcgggaagagccttctt

SEQ ID NO: 127767 - DNA, 25 bp, Saccharomyces pastorianus
gagactatttcaagctcggcagtta

SEQ ID NO: 127768 - DNA, 25 bp, Saccharomyces pastorianus
ggaactactgatagacccttggatg

SEQ ID NO: 127769 - DNA, 25 bp, Saccharomyces pastorianus
gacaccgatgtatatggctccagag

SEQ ID NO: 127770 - DNA, 25 bp, Saccharomyces pastorianus
tcgaataccgcaactacccaataga

SEQ ID NO: 127771 - DNA, 25 bp, Saccharomyces pastorianus
gacgaccttggtctaacttggataa

SEQ ID NO: 127772 - DNA, 25 bp, Saccharomyces pastorianus
ggtgtttggttcaagaccccactat

SEQ ID NO: 127773 - DNA, 25 bp, Saccharomyces pastorianus
aatctggcgtggtgcatcgcgacat

SEQ ID NO: 127774 - DNA, 25 bp, Saccharomyces pastorianus
tggcatatttgcaccaatctggcgt

SEQ ID NO: 127775 - DNA, 25 bp, Saccharomyces pastorianus
atgtaccacgttgctgcaggtcgaa

SEQ ID NO: 127776 - DNA, 25 bp, Saccharomyces pastorianus
ggtatactccggtaacacttttgag

SEQ ID NO: 127777 - DNA, 25 bp, Saccharomyces pastorianus
gtgtatatatgtttgctgctcctga

SEQ ID NO: 127778 - DNA, 25 bp, Saccharomyces pastorianus
gcaatattctagtcaaggcgttcca

SEQ ID NO: 127779 - DNA, 25 bp, Saccharomyces pastorianus
cgcttttattcgactttctgtgcaa

SEQ ID NO: 127780 - DNA, 25 bp, Saccharomyces pastorianus
atattgctccaatttgccgttcgat

SEQ ID NO: 127781 - DNA, 25 bp, Saccharomyces pastorianus
ggtgcagaaaccgtgattccaaatg

SEQ ID NO: 127782 - DNA, 25 bp, Saccharomyces pastorianus
tgtggattttgacccgacgttcgaa

SEQ ID NO: 127783 - DNA, 25 bp, Saccharomyces pastorianus
caccaacatttgctaacgcttcaga

SEQ ID NO: 127784 - DNA, 25 bp, Saccharomyces pastorianus
gctcactattttttggtatactccg

SEQ ID NO: 127785 - DNA, 25 bp, Saccharomyces pastorianus
aggcgttccaaaattctgctgttta

SEQ ID NO: 127786 - DNA, 25 bp, Saccharomyces pastorianus
aaagcacccgatctactcttgaaat

SEQ ID NO: 127787 - DNA, 25 bp, Saccharomyces pastorianus
cttttcggtattcttcttgggcaca

SEQ ID NO: 127788 - DNA, 25 bp, Saccharomyces pastorianus
ttgggcacagtatcattgcacacct

SEQ ID NO: 127789 - DNA, 25 bp, Saccharomyces pastorianus
gggcacagtatcattgcacacctca

SEQ ID NO: 127790 - DNA, 25 bp, Saccharomyces pastorianus
ttcttcttgggcacagtatcattgc

SEQ ID NO: 127791 - DNA, 25 bp, Saccharomyces pastorianus
gtatcattgcacacctcacagttga

SEQ ID NO: 127792 - DNA, 25 bp, Saccharomyces pastorianus
tcggtattcttcttgggcacagtat

SEQ ID NO: 127793 - DNA, 25 bp, Saccharomyces pastorianus
atcattgcacacctcacagttgaac

SEQ ID NO: 127794 - DNA, 25 bp, Saccharomyces pastorianus
acagtatcattgcacacctcacagt

SEQ ID NO: 127795 - DNA, 25 bp, Saccharomyces pastorianus
ggtattcttcttgggcacagtatca

SEQ ID NO: 127796 - DNA, 25 bp, Saccharomyces pastorianus
tttcggtattcttcttgggcacagt

SEQ ID NO: 127797 - DNA, 25 bp, Saccharomyces pastorianus
cattgcacacctcacagttgaacgt

SEQ ID NO: 127798 - DNA, 25 bp, Saccharomyces pastorianus
ttgatcacaggcttctccactttct

SEQ ID NO: 127799 - DNA, 25 bp, Saccharomyces pastorianus
ttgcccctttatccttcatggtttt

SEQ ID NO: 127800 - DNA, 25 bp, Saccharomyces pastorianus
ttcgaggtcttttccactttctctg

SEQ ID NO: 127801 - DNA, 25 bp, Saccharomyces pastorianus
actttctttgcaggagttgccactg

SEQ ID NO: 127802 - DNA, 25 bp, Saccharomyces pastorianus
aattttgtacaacgacttgcccttg

SEQ ID NO: 127803 - DNA, 25 bp, Saccharomyces pastorianus
tgcatacctgatttgcccctcagaa

SEQ ID NO: 127804 - DNA, 25 bp, Saccharomyces pastorianus
actttctctgccttcttgatcacag

SEQ ID NO: 127805 - DNA, 25 bp, Saccharomyces pastorianus
attccgattattcctttgcatacct

SEQ ID NO: 127806 - DNA, 25 bp, Saccharomyces pastorianus
gacttgcccttgtgaagctcgattc

SEQ ID NO: 127807 - DNA, 25 bp, Saccharomyces pastorianus
gaatccacaaccagacttttcaaga

SEQ ID NO: 127808 - DNA, 25 bp, Saccharomyces pastorianus
aagctcgattccgttcgaggtcttt

SEQ ID NO: 127809 - DNA, 25 bp, Saccharomyces pastorianus
gccaccgaattcgtcaagttcatca

SEQ ID NO: 127810 - DNA, 25 bp, Saccharomyces pastorianus
aggagagctgccaccgaattcgtca

SEQ ID NO: 127811 - DNA, 25 bp, Saccharomyces pastorianus
gaacgggctttacgatgttcctcgt

SEQ ID NO: 127812 - DNA, 25 bp, Saccharomyces pastorianus
cgaattcgtcaagttcatcaatcca

SEQ ID NO: 127813 - DNA, 25 bp, Saccharomyces pastorianus
acgatgttcctcgtatcctggaaga

SEQ ID NO: 127814 - DNA, 25 bp, Saccharomyces pastorianus
accatttggtggcattactttccct

SEQ ID NO: 127815 - DNA, 25 bp, Saccharomyces pastorianus
attactttccctgctgacccagaag

SEQ ID NO: 127816 - DNA, 25 bp, Saccharomyces pastorianus
ttggtggcattactttccctgctga

SEQ ID NO: 127817 - DNA, 25 bp, Saccharomyces pastorianus
gacccagaagccaggagagctgcca

SEQ ID NO: 127818 - DNA, 25 bp, Saccharomyces pastorianus
gttcctcgtatcctggaagacatta

SEQ ID NO: 127819 - DNA, 25 bp, Saccharomyces pastorianus
gtgatgggcaaattcaccatattcc

SEQ ID NO: 127820 - DNA, 25 bp, Saccharomyces pastorianus
gacgtcctcattctcttacattgag

SEQ ID NO: 127821 - DNA, 25 bp, Saccharomyces pastorianus
caatcgcaatttactggaggcactt

SEQ ID NO: 127822 - DNA, 25 bp, Saccharomyces pastorianus
ggaggcacttttgtcatttttgcat

SEQ ID NO: 127823 - DNA, 25 bp, Saccharomyces pastorianus
aatttatcagagagcttccccaacc

SEQ ID NO: 127824 - DNA, 25 bp, Saccharomyces pastorianus
gttgattacctgattactcacaatg

SEQ ID NO: 127825 - DNA, 25 bp, Saccharomyces pastorianus
caggtttagttgattcattcgctca

SEQ ID NO: 127826 - DNA, 25 bp, Saccharomyces pastorianus
tattccttattacccacttacaatc

SEQ ID NO: 127827 - DNA, 25 bp, Saccharomyces pastorianus
ttccccaaccgattttatcgacaga

SEQ ID NO: 127828 - DNA, 25 bp, Saccharomyces pastorianus
attttatttccaccgttatgcaaag

SEQ ID NO: 127829 - DNA, 25 bp, Saccharomyces pastorianus
atttttgcattggacgtcctcattc

SEQ ID NO: 127830 - DNA, 25 bp, Saccharomyces pastorianus
atttccaatgataacgtccctgacg

SEQ ID NO: 127831 - DNA, 25 bp, Saccharomyces pastorianus
gagacagatttaaatgacccgacaa

SEQ ID NO: 127832 - DNA, 25 bp, Saccharomyces pastorianus
tgacccatcatcgagccaacaagtg

SEQ ID NO: 127833 - DNA, 25 bp, Saccharomyces pastorianus
agtcacaggtagcttttggaacaga

SEQ ID NO: 127834 - DNA, 25 bp, Saccharomyces pastorianus
gaaagtgttcgggttactcataaca

SEQ ID NO: 127835 - DNA, 25 bp, Saccharomyces pastorianus
gaaacttcgaatattgttcccaaga

SEQ ID NO: 127836 - DNA, 25 bp, Saccharomyces pastorianus
tgatatttcacgtattgttgccgct

SEQ ID NO: 127837 - DNA, 25 bp, Saccharomyces pastorianus
tggaactctcgatgataagggctat

SEQ ID NO: 127838 - DNA, 25 bp, Saccharomyces pastorianus
agcttagtctcaatggtcttctcga

SEQ ID NO: 127839 - DNA, 25 bp, Saccharomyces pastorianus
gactgatcctaactatactagctta

SEQ ID NO: 127840 - DNA, 25 bp, Saccharomyces pastorianus
taagacctaacgcttttgcacactt

SEQ ID NO: 127841 - DNA, 25 bp, Saccharomyces pastorianus
cagtttgtcactgctagctggtaaa

SEQ ID NO: 127842 - DNA, 25 bp, Saccharomyces pastorianus
atgtgataccccattgcgtgggtta

SEQ ID NO: 127843 - DNA, 25 bp, Saccharomyces pastorianus
aaccgaagtacttcccatatcaagt

SEQ ID NO: 127844 - DNA, 25 bp, Saccharomyces pastorianus
gcgtgggttatattataccgcattc

SEQ ID NO: 127845 - DNA, 25 bp, Saccharomyces pastorianus
gaaagttgttttacctgccaagact

SEQ ID NO: 127846 - DNA, 25 bp, Saccharomyces pastorianus
ttgtacccgatagccaacgaactaa

SEQ ID NO: 127847 - DNA, 25 bp, Saccharomyces pastorianus
gttatgtcttgtatgtgatacccca

SEQ ID NO: 127848 - DNA, 25 bp, Saccharomyces pastorianus
gatacgacgaagagcatttttcttg

SEQ ID NO: 127849 - DNA, 25 bp, Saccharomyces pastorianus
aagtgaacctatattgttatgccaa

SEQ ID NO: 127850 - DNA, 25 bp, Saccharomyces pastorianus
tacaatatgtgctactccttgtggg

SEQ ID NO: 127851 - DNA, 25 bp, Saccharomyces pastorianus
ctgccaagactgtcagaaaccttta

SEQ ID NO: 127852 - DNA, 25 bp, Saccharomyces pastorianus
aaggctctcggtaaatattatcatg

SEQ ID NO: 127853 - DNA, 25 bp, Saccharomyces pastorianus
acatgataatggttcgttttacgag

SEQ ID NO: 127854 - DNA, 25 bp, Saccharomyces pastorianus
aagcaatttgcaactttctcaagat

SEQ ID NO: 127855 - DNA, 25 bp, Saccharomyces pastorianus
tttgccaagctttatccggattttc

SEQ ID NO: 127856 - DNA, 25 bp, Saccharomyces pastorianus
tgttcaggaccggtttcgcaaagaa

SEQ ID NO: 127857 - DNA, 25 bp, Saccharomyces pastorianus
ggccattccccttcgatgtttcaaa

SEQ ID NO: 127858 - DNA, 25 bp, Saccharomyces pastorianus
gaatgaagtgactagtgccaaaact

SEQ ID NO: 127859 - DNA, 25 bp, Saccharomyces pastorianus
gaaatgaaatgtggccattcccctt

SEQ ID NO: 127860 - DNA, 25 bp, Saccharomyces pastorianus
gctgcatcaaaaaggctcaacattg

SEQ ID NO: 127861 - DNA, 25 bp, Saccharomyces pastorianus
gctcaacattgttcaggaccggttt

SEQ ID NO: 127862 - DNA, 25 bp, Saccharomyces pastorianus
aaacaaatcctaaacttgcagcaag

SEQ ID NO: 127863 - DNA, 25 bp, Saccharomyces pastorianus
agtttcggaactatacaggaagcaa

SEQ ID NO: 127864 - DNA, 25 bp, Saccharomyces pastorianus
agccggtcattcttgtagcatactc

SEQ ID NO: 127865 - DNA, 25 bp, Saccharomyces pastorianus
aacccaccgctgcttactaatgaag

SEQ ID NO: 127866 - DNA, 25 bp, Saccharomyces pastorianus
atgctcccggctcaaacgtggatat

SEQ ID NO: 127867 - DNA, 25 bp, Saccharomyces pastorianus
gaaggcaggcctttgcagtttcaag

SEQ ID NO: 127868 - DNA, 25 bp, Saccharomyces pastorianus
gtatatctcattgtcccatttccaa

SEQ ID NO: 127869 - DNA, 25 bp, Saccharomyces pastorianus
aaatgatcgataccaatgctcccgg

SEQ ID NO: 127870 - DNA, 25 bp, Saccharomyces pastorianus
aaaactttcagtctccgagtgccta

SEQ ID NO: 127871 - DNA, 25 bp, Saccharomyces pastorianus
taaaggttggtctaggcaccgacgt

SEQ ID NO: 127872 - DNA, 25 bp, Saccharomyces pastorianus
cgagtgcctatttcttgctacaatg

SEQ ID NO: 127873 - DNA, 25 bp, Saccharomyces pastorianus
acagcgtcgctgtggtatatctcat

SEQ ID NO: 127874 - DNA, 25 bp, Saccharomyces pastorianus
acagatgccgaagcgcgtgtgatta

SEQ ID NO: 127875 - DNA, 25 bp, Saccharomyces pastorianus
ttctgatcattggaaagtatcgcta

SEQ ID NO: 127876 - DNA, 25 bp, Saccharomyces pastorianus
attattcatgacttgggttccgatt

SEQ ID NO: 127877 - DNA, 25 bp, Saccharomyces pastorianus
tcatgacttgggttccgatttactt

SEQ ID NO: 127878 - DNA, 25 bp, Saccharomyces pastorianus
aagcataattgatggtgctcatgca

SEQ ID NO: 127879 - DNA, 25 bp, Saccharomyces pastorianus
acctggtggaaactatttctcgcca

SEQ ID NO: 127880 - DNA, 25 bp, Saccharomyces pastorianus
aacctggccagctaacctggtggaa

SEQ ID NO: 127881 - DNA, 25 bp, Saccharomyces pastorianus
ggtgctcatgcattgaaacttaaaa

SEQ ID NO: 127882 - DNA, 25 bp, Saccharomyces pastorianus
gagatcagttgtgctaaaagcataa

SEQ ID NO: 127883 - DNA, 25 bp, Saccharomyces pastorianus
ggtcgtatggattcgaatgagatca

SEQ ID NO: 127884 - DNA, 25 bp, Saccharomyces pastorianus
tggaaactatttctcgccaaattat

SEQ ID NO: 127885 - DNA, 25 bp, Saccharomyces pastorianus
gatggtgctcatgcattgaaactta

SEQ ID NO: 127886 - DNA, 25 bp, Saccharomyces pastorianus
tgaagaaggatgaaattatccggag

SEQ ID NO: 127887 - DNA, 25 bp, Saccharomyces pastorianus
gatgaaattatccggagacccgttt

SEQ ID NO: 127888 - DNA, 25 bp, Saccharomyces pastorianus
agaaggatgaaattatccggagacc

SEQ ID NO: 127889 - DNA, 25 bp, Saccharomyces pastorianus
aaggatgaaattatccggagacccg

SEQ ID NO: 127890 - DNA, 25 bp, Saccharomyces pastorianus
tatgaagaaggatgaaattatccgg

SEQ ID NO: 127891 - DNA, 25 bp, Saccharomyces pastorianus
gaagaaggatgaaattatccggaga

SEQ ID NO: 127892 - DNA, 25 bp, Saccharomyces pastorianus
aagaaggatgaaattatccggagac

SEQ ID NO: 127893 - DNA, 25 bp, Saccharomyces pastorianus
atgaagaaggatgaaattatccgga

SEQ ID NO: 127894 - DNA, 25 bp, Saccharomyces pastorianus
gaaggatgaaattatccggagaccc

SEQ ID NO: 127895 - DNA, 25 bp, Saccharomyces pastorianus
aggatgaaattatccggagacccgt

SEQ ID NO: 127896 - DNA, 25 bp, Saccharomyces pastorianus
ggatgaaattatccggagacccgtt

SEQ ID NO: 127897 - DNA, 25 bp, Saccharomyces pastorianus
ttgccaagattcagactccgatcgc

SEQ ID NO: 127898 - DNA, 25 bp, Saccharomyces pastorianus
tattgctgtctgtgctttgttttcc

SEQ ID NO: 127899 - DNA, 25 bp, Saccharomyces pastorianus
aaggtctggcctatggtgctagtag

SEQ ID NO: 127900 - DNA, 25 bp, Saccharomyces pastorianus
ttaccagtagactctgctatcgcaa

SEQ ID NO: 127901 - DNA, 25 bp, Saccharomyces pastorianus
atcttacgtcgtgccagttcaaaaa

SEQ ID NO: 127902 - DNA, 25 bp, Saccharomyces pastorianus
tgccagttcactcccataatgacta

SEQ ID NO: 127903 - DNA, 25 bp, Saccharomyces pastorianus
ttgaccggtcaacatcttttagaat

SEQ ID NO: 127904 - DNA, 25 bp, Saccharomyces pastorianus
attagacaagctatacactggcccc

SEQ ID NO: 127905 - DNA, 25 bp, Saccharomyces pastorianus
gactactggaggaaacttccgcttt

SEQ ID NO: 127906 - DNA, 25 bp, Saccharomyces pastorianus
aatgaagcgtatttggacccagttg

SEQ ID NO: 127907 - DNA, 25 bp, Saccharomyces pastorianus
agatcctcgctgtgggtcataatga

SEQ ID NO: 127908 - DNA, 25 bp, Saccharomyces pastorianus
agagaccagagtggcatccatgaac

SEQ ID NO: 127909 - DNA, 25 bp, Saccharomyces pastorianus
aatgctacccgaattgagcgaacat

SEQ ID NO: 127910 - DNA, 25 bp, Saccharomyces pastorianus
attcttcatgttggccattctacag

SEQ ID NO: 127911 - DNA, 25 bp, Saccharomyces pastorianus
gctttcgaatgcttctagtatggtt

SEQ ID NO: 127912 - DNA, 25 bp, Saccharomyces pastorianus
gttaactctcgtggaattggtacaa

SEQ ID NO: 127913 - DNA, 25 bp, Saccharomyces pastorianus
aaacttgttcttttgctttcgaatg

SEQ ID NO: 127914 - DNA, 25 bp, Saccharomyces pastorianus
ttatcgcctatttatgtcatcatga

SEQ ID NO: 127915 - DNA, 25 bp, Saccharomyces pastorianus
cggcgtattgccttgtcagagcgag

SEQ ID NO: 127916 - DNA, 25 bp, Saccharomyces pastorianus
gaatttctggactttctactacagt

SEQ ID NO: 127917 - DNA, 25 bp, Saccharomyces pastorianus
agaggttgaccctgcttctttctaa

SEQ ID NO: 127918 - DNA, 25 bp, Saccharomyces pastorianus
ggtgttttacgcacttcatggacat

SEQ ID NO: 127919 - DNA, 25 bp, Saccharomyces pastorianus
taatgctacgaatgttcctccgaat

SEQ ID NO: 127920 - DNA, 25 bp, Saccharomyces pastorianus
tgaccgccctaagtgcgtacattga

SEQ ID NO: 127921 - DNA, 25 bp, Saccharomyces pastorianus
aaacgtctctgtgtttggcactcaa

SEQ ID NO: 127922 - DNA, 25 bp, Saccharomyces pastorianus
tttgaggccatcactcagctgagat

SEQ ID NO: 127923 - DNA, 25 bp, Saccharomyces pastorianus
gaatgcagtggaacggcttttgagt

SEQ ID NO: 127924 - DNA, 25 bp, Saccharomyces pastorianus
aagaacattgatagtcccgtgaccg

SEQ ID NO: 127925 - DNA, 25 bp, Saccharomyces pastorianus
gagagtcatgcaaataagtaccgtt

SEQ ID NO: 127926 - DNA, 25 bp, Saccharomyces pastorianus
tctatgcatagttttgtccctgata

SEQ ID NO: 127927 - DNA, 25 bp, Saccharomyces pastorianus
gaagcgagcccttgcacgcaaagag

SEQ ID NO: 127928 - DNA, 25 bp, Saccharomyces pastorianus
gggccaaacggcaactccaatacaa

SEQ ID NO: 127929 - DNA, 25 bp, Saccharomyces pastorianus
gaggcgacgcaacagcggtatctct

SEQ ID NO: 127930 - DNA, 25 bp, Saccharomyces pastorianus
gaaggcatcaagttcagggcagcaa

SEQ ID NO: 127931 - DNA, 25 bp, Saccharomyces pastorianus
gaaggaccaatcacattcgaattta

SEQ ID NO: 127932 - DNA, 25 bp, Saccharomyces pastorianus
gaagccttgttccaggtagagagtt

SEQ ID NO: 127933 - DNA, 25 bp, Saccharomyces pastorianus
tcacggcattgcatttgcgagagct

SEQ ID NO: 127934 - DNA, 25 bp, Saccharomyces pastorianus
ttgcgagagcttttacggatatttc

SEQ ID NO: 127935 - DNA, 25 bp, Saccharomyces pastorianus
tacccttgcattcagtggcgaacag

SEQ ID NO: 127936 - DNA, 25 bp, Saccharomyces pastorianus
gatatttctgaagccttgttccagg

SEQ ID NO: 127937 - DNA, 25 bp, Saccharomyces pastorianus
gtggcgaacagctctgaaatagaca

SEQ ID NO: 127938 - DNA, 25 bp, Saccharomyces pastorianus
ggcagcaacaattacccttgcattc

SEQ ID NO: 127939 - DNA, 25 bp, Saccharomyces pastorianus
aattcaggaggcaattctatggaga

SEQ ID NO: 127940 - DNA, 25 bp, Saccharomyces pastorianus
aatgcattggacagaggttcacggc

SEQ ID NO: 127941 - DNA, 25 bp, Saccharomyces pastorianus
ttggtttcgattcccatcaactgga

SEQ ID NO: 127942 - DNA, 25 bp, Saccharomyces pastorianus
caggcttggcacttattatcggtat

SEQ ID NO: 127943 - DNA, 25 bp, Saccharomyces pastorianus
atcgtggtcccatttagcatcaact

SEQ ID NO: 127944 - DNA, 25 bp, Saccharomyces pastorianus
aatctacgtgggttacaggcttggc

SEQ ID NO: 127945 - DNA, 25 bp, Saccharomyces pastorianus
atcaactggatagtgtggcccttta

SEQ ID NO: 127946 - DNA, 25 bp, Saccharomyces pastorianus
ggctgccaaccaatcgagacatttt

SEQ ID NO: 127947 - DNA, 25 bp, Saccharomyces pastorianus
aaacaccaaatcgagcttcactgca

SEQ ID NO: 127948 - DNA, 25 bp, Saccharomyces pastorianus
agaaagcccgtcatgagccaatcat

SEQ ID NO: 127949 - DNA, 25 bp, Saccharomyces pastorianus
gtcatcattactggcacacttgggc

SEQ ID NO: 127950 - DNA, 25 bp, Saccharomyces pastorianus
tgatttaactttcgcattttcccac

SEQ ID NO: 127951 - DNA, 25 bp, Saccharomyces pastorianus
gacgacgcacctactgatttaactt

SEQ ID NO: 127952 - DNA, 25 bp, Saccharomyces pastorianus
acgttgcctccatcgaacaaactgt

SEQ ID NO: 127953 - DNA, 25 bp, Saccharomyces pastorianus
gttgcctccatcgaacaaactgtca

SEQ ID NO: 127954 - DNA, 25 bp, Saccharomyces pastorianus
ctttactacatgtgctgacaaccaa

SEQ ID NO: 127955 - DNA, 25 bp, Saccharomyces pastorianus
gctgacaaccaaaacaccgttcaat

SEQ ID NO: 127956 - DNA, 25 bp, Saccharomyces pastorianus
gaagaacctttactacatgtgctga

SEQ ID NO: 127957 - DNA, 25 bp, Saccharomyces pastorianus
tactacatgtgctgacaaccaaaac

SEQ ID NO: 127958 - DNA, 25 bp, Saccharomyces pastorianus
aacctttactacatgtgctgacaac

SEQ ID NO: 127959 - DNA, 25 bp, Saccharomyces pastorianus
gagaagaacctttactacatgtgct

SEQ ID NO: 127960 - DNA, 25 bp, Saccharomyces pastorianus
agaacctttactacatgtgctgaca

SEQ ID NO: 127961 - DNA, 25 bp, Saccharomyces pastorianus
tgcctccatcgaacaaactgtcact

SEQ ID NO: 127962 - DNA, 25 bp, Saccharomyces pastorianus
gtgctgacaaccaaaacaccgttca

SEQ ID NO: 127963 - DNA, 25 bp, Saccharomyces pastorianus
acgttgcctccatcgaacaaactgt

SEQ ID NO: 127964 - DNA, 25 bp, Saccharomyces pastorianus
acatcactatctctaacgctgttgg

SEQ ID NO: 127965 - DNA, 25 bp, Saccharomyces pastorianus
gttgcctccatcgaacaaactgtca

SEQ ID NO: 127966 - DNA, 25 bp, Saccharomyces pastorianus
ctttactacatgtgctgacaaccaa

SEQ ID NO: 127967 - DNA, 25 bp, Saccharomyces pastorianus
gcaaatcgaagacccatctgctgat

SEQ ID NO: 127968 - DNA, 25 bp, Saccharomyces pastorianus
gctgacaaccaaaacaccgttcaat

SEQ ID NO: 127969 - DNA, 25 bp, Saccharomyces pastorianus
gaagaacctttactacatgtgctga

SEQ ID NO: 127970 - DNA, 25 bp, Saccharomyces pastorianus
gagaagaacctttactacatgtgct

SEQ ID NO: 127971 - DNA, 25 bp, Saccharomyces pastorianus
gaacctttactacatgtgctgacaa

SEQ ID NO: 127972 - DNA, 25 bp, Saccharomyces pastorianus
tgcctccatcgaacaaactgtcact

SEQ ID NO: 127973 - DNA, 25 bp, Saccharomyces pastorianus
gtgctgacaaccaaaacaccgttca

SEQ ID NO: 127974 - DNA, 25 bp, Saccharomyces pastorianus
gctttcactccagaagaaagattga

SEQ ID NO: 127975 - DNA, 25 bp, Saccharomyces pastorianus
atctttcgttgctttcactccagaa

SEQ ID NO: 127976 - DNA, 25 bp, Saccharomyces pastorianus
ttcgttgctttcactccagaagaaa

SEQ ID NO: 127977 - DNA, 25 bp, Saccharomyces pastorianus
agagtcaccccatctttcgttgctt

SEQ ID NO: 127978 - DNA, 25 bp, Saccharomyces pastorianus
tcgttgctttcactccagaagaaag

SEQ ID NO: 127979 - DNA, 25 bp, Saccharomyces pastorianus
gagtcaccccatctttcgttgcttt

SEQ ID NO: 127980 - DNA, 25 bp, Saccharomyces pastorianus
ctttcgttgctttcactccagaaga

SEQ ID NO: 127981 - DNA, 25 bp, Saccharomyces pastorianus
gttgctttcactccagaagaaagat

SEQ ID NO: 127982 - DNA, 25 bp, Saccharomyces pastorianus
tttcgttgctttcactccagaagaa

SEQ ID NO: 127983 - DNA, 25 bp, Saccharomyces pastorianus
tctttcgttgctttcactccagaag

SEQ ID NO: 127984 - DNA, 25 bp, Saccharomyces pastorianus
gtcaccccatctttcgttgctttca

SEQ ID NO: 127985 - DNA, 25 bp, Saccharomyces pastorianus
ggacttaccagagcgtaccaagtta

SEQ ID NO: 127986 - DNA, 25 bp, Saccharomyces pastorianus
attcttgaactctcaggacttacca

SEQ ID NO: 127987 - DNA, 25 bp, Saccharomyces pastorianus
gttggaggcccagtcagctaaagaa

SEQ ID NO: 127988 - DNA, 25 bp, Saccharomyces pastorianus
ttgcctctttgataagcactggtca

SEQ ID NO: 127989 - DNA, 25 bp, Saccharomyces pastorianus
gaaaccgttccatatgtcttgagac

SEQ ID NO: 127990 - DNA, 25 bp, Saccharomyces pastorianus
aagcaactttgcctctttgataagc

SEQ ID NO: 127991 - DNA, 25 bp, Saccharomyces pastorianus
gcaaacaatttgagagcggacacac

SEQ ID NO: 127992 - DNA, 25 bp, Saccharomyces pastorianus
gcactggtcaattcaattcttctca

SEQ ID NO: 127993 - DNA, 25 bp, Saccharomyces pastorianus
gacaatggcgaacatgattcagcag

SEQ ID NO: 127994 - DNA, 25 bp, Saccharomyces pastorianus
gtctcccgtgagacagttgggtaga

SEQ ID NO: 127995 - DNA, 25 bp, Saccharomyces pastorianus
gaaattggtcctaattctacaaaga

SEQ ID NO: 127996 - DNA, 25 bp, Saccharomyces pastorianus
aaagaacataaacgtgggatcacat

SEQ ID NO: 127997 - DNA, 25 bp, Saccharomyces pastorianus
ttcaacaccgccaattaacttattt

SEQ ID NO: 127998 - DNA, 25 bp, Saccharomyces pastorianus
agaacataaacgtgggatcacatac

SEQ ID NO: 127999 - DNA, 25 bp, Saccharomyces pastorianus
caacaccgccaattaacttatttcg

SEQ ID NO: 128000 - DNA, 25 bp, Saccharomyces pastorianus
caccgccaattaacttatttcgtag

SEQ ID NO: 128001 - DNA, 25 bp, Saccharomyces pastorianus
tcaacaccgccaattaacttatttc

SEQ ID NO: 128002 - DNA, 25 bp, Saccharomyces pastorianus
atgagcactgcttcaacaccgccaa

SEQ ID NO: 128003 - DNA, 25 bp, Saccharomyces pastorianus
gaaagaacataaacgtgggatcaca

SEQ ID NO: 128004 - DNA, 25 bp, Saccharomyces pastorianus
agcactgcttcaacaccgccaatta

SEQ ID NO: 128005 - DNA, 25 bp, Saccharomyces pastorianus
taaacgtgggatcacatacacaatg

SEQ ID NO: 128006 - DNA, 25 bp, Saccharomyces pastorianus
gccaattaacttatttcgtagaaag

SEQ ID NO: 128007 - DNA, 25 bp, Saccharomyces pastorianus
ggaggtatcaggttgagcttctcta

SEQ ID NO: 128008 - DNA, 25 bp, Saccharomyces pastorianus
ttaggcgttagaggctcaaacagta

SEQ ID NO: 128009 - DNA, 25 bp, Saccharomyces pastorianus
gttgagcttctctaaaaatccatta

SEQ ID NO: 128010 - DNA, 25 bp, Saccharomyces pastorianus
tgaactctcacggtcatggcaacgg

SEQ ID NO: 128011 - DNA, 25 bp, Saccharomyces pastorianus
atatggtagtcaactacctcacccc

SEQ ID NO: 128012 - DNA, 25 bp, Saccharomyces pastorianus
cactagagcattggcagaattatat

SEQ ID NO: 128013 - DNA, 25 bp, Saccharomyces pastorianus
ctctcacggtcatggcaacggtcat

SEQ ID NO: 128014 - DNA, 25 bp, Saccharomyces pastorianus
gaggctcaaacagtaggagtaaatc

SEQ ID NO: 128015 - DNA, 25 bp, Saccharomyces pastorianus
tgaggatgttagctttgccactaga

SEQ ID NO: 128016 - DNA, 25 bp, Saccharomyces pastorianus
aatccattaggcgttagaggctcaa

SEQ ID NO: 128017 - DNA, 25 bp, Saccharomyces pastorianus
gttagctttgccactagagcattgg

SEQ ID NO: 128018 - DNA, 25 bp, Saccharomyces pastorianus
ggacgctggcaagtcacttttgcta

SEQ ID NO: 128019 - DNA, 25 bp, Saccharomyces pastorianus
gctcctaacgggtcttcaatattca

SEQ ID NO: 128020 - DNA, 25 bp, Saccharomyces pastorianus
ggagtaatacattccgcgacttctc

SEQ ID NO: 128021 - DNA, 25 bp, Saccharomyces pastorianus
agagcgtttcgaatgttccttccaa

SEQ ID NO: 128022 - DNA, 25 bp, Saccharomyces pastorianus
acttctctaccgcattatcacttat

SEQ ID NO: 128023 - DNA, 25 bp, Saccharomyces pastorianus
ggaatgcttcctcaactgctaatat

SEQ ID NO: 128024 - DNA, 25 bp, Saccharomyces pastorianus
gaatgccacctcagaaggacgctgg

SEQ ID NO: 128025 - DNA, 25 bp, Saccharomyces pastorianus
aactgctaatattcctctttttcaa

SEQ ID NO: 128026 - DNA, 25 bp, Saccharomyces pastorianus
ggtaattcttcatttggtgcatctt

SEQ ID NO: 128027 - DNA, 25 bp, Saccharomyces pastorianus
ttacaagagcctccgatgtcatcta

SEQ ID NO: 128028 - DNA, 25 bp, Saccharomyces pastorianus
tcatcagtctaatctgttgcctcca

SEQ ID NO: 128029 - DNA, 25 bp, Saccharomyces pastorianus
aacgcttatgctgccgaagttggta

SEQ ID NO: 128030 - DNA, 25 bp, Saccharomyces pastorianus
ggttctggcggcaattcccaaaatc

SEQ ID NO: 128031 - DNA, 25 bp, Saccharomyces pastorianus
aatcatcaccgtcacagcagacaga

SEQ ID NO: 128032 - DNA, 25 bp, Saccharomyces pastorianus
tagaggaagacgcaccgggctacaa

SEQ ID NO: 128033 - DNA, 25 bp, Saccharomyces pastorianus
taattctactcattcagccgagcac

SEQ ID NO: 128034 - DNA, 25 bp, Saccharomyces pastorianus
gcaagattaccatgacgacgagcaa

SEQ ID NO: 128035 - DNA, 25 bp, Saccharomyces pastorianus
agaaccaaccttggtggtgccgacg

SEQ ID NO: 128036 - DNA, 25 bp, Saccharomyces pastorianus
ccagaaaccacttcctattcaattc

SEQ ID NO: 128037 - DNA, 25 bp, Saccharomyces pastorianus
aagacatcatcagtacggttccgat

SEQ ID NO: 128038 - DNA, 25 bp, Saccharomyces pastorianus
atttccctagtttgattgacccaca

SEQ ID NO: 128039 - DNA, 25 bp, Saccharomyces pastorianus
taaagacaccaacacctctagttct

SEQ ID NO: 128040 - DNA, 25 bp, Saccharomyces pastorianus
gaatatgaacgagtccatttccaaa

SEQ ID NO: 128041 - DNA, 25 bp, Saccharomyces pastorianus
cttaccaaaagaacagcccgaatca

SEQ ID NO: 128042 - DNA, 25 bp, Saccharomyces pastorianus
tcagtactacaaagccgaccgaata

SEQ ID NO: 128043 - DNA, 25 bp, Saccharomyces pastorianus
aattcagattctgctcaacgcaaaa

SEQ ID NO: 128044 - DNA, 25 bp, Saccharomyces pastorianus
gaacgagtccatttccaaagatggt

SEQ ID NO: 128045 - DNA, 25 bp, Saccharomyces pastorianus
ggaaaccaaggctaaaaacattctg

SEQ ID NO: 128046 - DNA, 25 bp, Saccharomyces pastorianus
tgctcaacgcaaaaagtctttcagt

SEQ ID NO: 128047 - DNA, 25 bp, Saccharomyces pastorianus
gtggtaagcccggttcctatgattc

SEQ ID NO: 128048 - DNA, 25 bp, Saccharomyces pastorianus
aaacattctgttaccttggaggaag

SEQ ID NO: 128049 - DNA, 25 bp, Saccharomyces pastorianus
agcccgaatcaacgtccaagaattt

SEQ ID NO: 128050 - DNA, 25 bp, Saccharomyces pastorianus
ggttcctatgattccaattcagatt

SEQ ID NO: 128051 - DNA, 25 bp, Saccharomyces pastorianus
tgtgaaaaccacatctcctaccaat

SEQ ID NO: 128052 - DNA, 25 bp, Saccharomyces pastorianus
gttagccatggtcactctggttcaa

SEQ ID NO: 128053 - DNA, 25 bp, Saccharomyces pastorianus
gctgctgcacaggatcattccagta

SEQ ID NO: 128054 - DNA, 25 bp, Saccharomyces pastorianus
atggtcattccagtgctaccacttc

SEQ ID NO: 128055 - DNA, 25 bp, Saccharomyces pastorianus
ctgttactcacacgcatggtcattc

SEQ ID NO: 128056 - DNA, 25 bp, Saccharomyces pastorianus
ctgtcactcacacacatggtcatgc

SEQ ID NO: 128057 - DNA, 25 bp, Saccharomyces pastorianus
aagcgaatactggtccatcagccac

SEQ ID NO: 128058 - DNA, 25 bp, Saccharomyces pastorianus
tctggttcaagcactggtcctaaat

SEQ ID NO: 128059 - DNA, 25 bp, Saccharomyces pastorianus
atcagccactgcaactacacatgga

SEQ ID NO: 128060 - DNA, 25 bp, Saccharomyces pastorianus
tcataaccacagcacttccaaagct

SEQ ID NO: 128061 - DNA, 25 bp, Saccharomyces pastorianus
acatggtcatgccagtgtgaaaacc

SEQ ID NO: 128062 - DNA, 25 bp, Saccharomyces pastorianus
taatgctaccgtcaatcctctgaga

SEQ ID NO: 128063 - DNA, 25 bp, Saccharomyces pastorianus
tatcacgaatgagctcccactttta

SEQ ID NO: 128064 - DNA, 25 bp, Saccharomyces pastorianus
ggcacaatttctcggccattcattt

SEQ ID NO: 128065 - DNA, 25 bp, Saccharomyces pastorianus
ggaattgcaacaacagctggcccat

SEQ ID NO: 128066 - DNA, 25 bp, Saccharomyces pastorianus
cttacagcgtcagcctcttgaggaa

SEQ ID NO: 128067 - DNA, 25 bp, Saccharomyces pastorianus
tgatctctgcttccatatcacgaat

SEQ ID NO: 128068 - DNA, 25 bp, Saccharomyces pastorianus
actccagatctggtgcccaattgaa

SEQ ID NO: 128069 - DNA, 25 bp, Saccharomyces pastorianus
agttcacagatatatcctctctcct

SEQ ID NO: 128070 - DNA, 25 bp, Saccharomyces pastorianus
taaattcaatataacctcctcgctc

SEQ ID NO: 128071 - DNA, 25 bp, Saccharomyces pastorianus
ggccccggagcgagtgttgcaacta

SEQ ID NO: 128072 - DNA, 25 bp, Saccharomyces pastorianus
agacgtgtcctccttcgatgtaaag

SEQ ID NO: 128073 - DNA, 25 bp, Saccharomyces pastorianus
acgggaactatactctattcttaga

SEQ ID NO: 128074 - DNA, 25 bp, Saccharomyces pastorianus
tttagattctgactcaggcgcatcc

SEQ ID NO: 128075 - DNA, 25 bp, Saccharomyces pastorianus
tactttgatattgaactgccagatt

SEQ ID NO: 128076 - DNA, 25 bp, Saccharomyces pastorianus
caaaatgtttgctaggcttttctaa

SEQ ID NO: 128077 - DNA, 25 bp, Saccharomyces pastorianus
agagcctgagtgtcctccatataaa

SEQ ID NO: 128078 - DNA, 25 bp, Saccharomyces pastorianus
atcactatttccttactttgccaat

SEQ ID NO: 128079 - DNA, 25 bp, Saccharomyces pastorianus
attcgtggcgcttttaacctcaata

SEQ ID NO: 128080 - DNA, 25 bp, Saccharomyces pastorianus
aatagttcccgtgcaattcgtggcg

SEQ ID NO: 128081 - DNA, 25 bp, Saccharomyces pastorianus
aaagactttgaaggctatcctagca

SEQ ID NO: 128082 - DNA, 25 bp, Saccharomyces pastorianus
ggcgcatccccaacagtaatactga

SEQ ID NO: 128083 - DNA, 25 bp, Saccharomyces pastorianus
gaggttagcccggatcactatttcc

SEQ ID NO: 128084 - DNA, 25 bp, Saccharomyces pastorianus
tcggcgcaatgatgagttgctcttt

SEQ ID NO: 128085 - DNA, 25 bp, Saccharomyces pastorianus
cattgatgattctatggcggagata

SEQ ID NO: 128086 - DNA, 25 bp, Saccharomyces pastorianus
gggtcatatagctaaagaactttat

SEQ ID NO: 128087 - DNA, 25 bp, Saccharomyces pastorianus
gaatcttcgaagatgaatccagaaa

SEQ ID NO: 128088 - DNA, 25 bp, Saccharomyces pastorianus
gaggccaatggtgaaattctatccg

SEQ ID NO: 128089 - DNA, 25 bp, Saccharomyces pastorianus
ttgctctttaactaatgaagggccc

SEQ ID NO: 128090 - DNA, 25 bp, Saccharomyces pastorianus
taaaggatggtgaattcggcgcaat

SEQ ID NO: 128091 - DNA, 25 bp, Saccharomyces pastorianus
ccatttggcccaaaagggtcatata

SEQ ID NO: 128092 - DNA, 25 bp, Saccharomyces pastorianus
aagttcttagtttgagaatcttcga

SEQ ID NO: 128093 - DNA, 25 bp, Saccharomyces pastorianus
gtctcaattcactttgatggcaaaa

SEQ ID NO: 128094 - DNA, 25 bp, Saccharomyces pastorianus
aattctatccgtgtctcaattcact

SEQ ID NO: 128095 - DNA, 25 bp, Saccharomyces pastorianus
ggcctttgctttgtactgtttttga

SEQ ID NO: 128096 - DNA, 25 bp, Saccharomyces pastorianus
aatggcgacgcacgctatgcaacta

SEQ ID NO: 128097 - DNA, 25 bp, Saccharomyces pastorianus
agcagctttcgttgttcttgccaaa

SEQ ID NO: 128098 - DNA, 25 bp, Saccharomyces pastorianus
gaagcggcgcttctatgggtacaaa

SEQ ID NO: 128099 - DNA, 25 bp, Saccharomyces pastorianus
attaacgtcttaacacctatcagga

SEQ ID NO: 128100 - DNA, 25 bp, Saccharomyces pastorianus
tgctgcttacacatctgaaccgaat

SEQ ID NO: 128101 - DNA, 25 bp, Saccharomyces pastorianus
agtggccaatatactgctgacagtc

SEQ ID NO: 128102 - DNA, 25 bp, Saccharomyces pastorianus
tatgcaactaatgaccccaatgggc

SEQ ID NO: 128103 - DNA, 25 bp, Saccharomyces pastorianus
ttaggtattttgtgtctggccctac

SEQ ID NO: 128104 - DNA, 25 bp, Saccharomyces pastorianus
atgtacttctgtgccgaattgatcg

SEQ ID NO: 128105 - DNA, 25 bp, Saccharomyces pastorianus
attgatcgtttgtatgctatggcta

SEQ ID NO: 128106 - DNA, 25 bp, Saccharomyces pastorianus
cgcctatggaaatagaggtaataag

SEQ ID NO: 128107 - DNA, 25 bp, Saccharomyces pastorianus
tccacgcctatggaaatagaggtaa

SEQ ID NO: 128108 - DNA, 25 bp, Saccharomyces pastorianus
cctatggaaatagaggtaataagaa

SEQ ID NO: 128109 - DNA, 25 bp, Saccharomyces pastorianus
acgcctatggaaatagaggtaataa

SEQ ID NO: 128110 - DNA, 25 bp, Saccharomyces pastorianus
taataagaaaaccaacttcacattg

SEQ ID NO: 128111 - DNA, 25 bp, Saccharomyces pastorianus
gtaataagaaaaccaacttcacatt

SEQ ID NO: 128112 - DNA, 25 bp, Saccharomyces pastorianus
ggtaataagaaaaccaacttcacat

SEQ ID NO: 128113 - DNA, 25 bp, Saccharomyces pastorianus
ccacgcctatggaaatagaggtaat

SEQ ID NO: 128114 - DNA, 25 bp, Saccharomyces pastorianus
cacgcctatggaaatagaggtaata

SEQ ID NO: 128115 - DNA, 25 bp, Saccharomyces pastorianus
aataagaaaaccaacttcacattgg

SEQ ID NO: 128116 - DNA, 25 bp, Saccharomyces pastorianus
gatagaaaccttaccgagttcgaca

SEQ ID NO: 128117 - DNA, 25 bp, Saccharomyces pastorianus
gagcattcatgtaaatcgcgtggaa

SEQ ID NO: 128118 - DNA, 25 bp, Saccharomyces pastorianus
ttaccgagttcgacagtactgacac

SEQ ID NO: 128119 - DNA, 25 bp, Saccharomyces pastorianus
cagtactgacactagtctgtgcata

SEQ ID NO: 128120 - DNA, 25 bp, Saccharomyces pastorianus
aggtctaccgacaattttcacaatt

SEQ ID NO: 128121 - DNA, 25 bp, Saccharomyces pastorianus
aacggcgaaccgagcattcatgtaa

SEQ ID NO: 128122 - DNA, 25 bp, Saccharomyces pastorianus
tggagacagattatgcaagagcaaa

SEQ ID NO: 128123 - DNA, 25 bp, Saccharomyces pastorianus
gaaagaagcagcaggtctaccgaca

SEQ ID NO: 128124 - DNA, 25 bp, Saccharomyces pastorianus
tagtctgtgcataaacggcgaaccg

SEQ ID NO: 128125 - DNA, 25 bp, Saccharomyces pastorianus
aaaacgcatgaacagcaatcaggaa

SEQ ID NO: 128126 - DNA, 25 bp, Saccharomyces pastorianus
aaaatcgaatacttgcgtcaaagat

SEQ ID NO: 128127 - DNA, 25 bp, Saccharomyces pastorianus
gttcaacaaggtctcagttctgcct

SEQ ID NO: 128128 - DNA, 25 bp, Saccharomyces pastorianus
attcacatcctggttacgactgttg

SEQ ID NO: 128129 - DNA, 25 bp, Saccharomyces pastorianus
ttggctactaccagtgaacgtgtta

SEQ ID NO: 128130 - DNA, 25 bp, Saccharomyces pastorianus
aatagtgccacttcatactatgaac

SEQ ID NO: 128131 - DNA, 25 bp, Saccharomyces pastorianus
gcgagattacaagggcgctaaactg

SEQ ID NO: 128132 - DNA, 25 bp, Saccharomyces pastorianus
tcagttctgcctcaatacgcaaagg

SEQ ID NO: 128133 - DNA, 25 bp, Saccharomyces pastorianus
gtggtcgatcccttgaaaagtctgg

SEQ ID NO: 128134 - DNA, 25 bp, Saccharomyces pastorianus
tatccaaacccaggatttgaaccag

SEQ ID NO: 128135 - DNA, 25 bp, Saccharomyces pastorianus
tatgtcgcaattgtggtcgatccct

SEQ ID NO: 128136 - DNA, 25 bp, Saccharomyces pastorianus
gaattgaaccgagcgctatttgaaa

SEQ ID NO: 128137 - DNA, 25 bp, Saccharomyces pastorianus
aactgaatgttgttggctggttcca

SEQ ID NO: 128138 - DNA, 25 bp, Saccharomyces pastorianus
tgggtcctaatttcattctgcacag

SEQ ID NO: 128139 - DNA, 25 bp, Saccharomyces pastorianus
gtcacccgaagtcttttatttcaat

SEQ ID NO: 128140 - DNA, 25 bp, Saccharomyces pastorianus
aagagcacttgacgtttggtccgtg

SEQ ID NO: 128141 - DNA, 25 bp, Saccharomyces pastorianus
ggaattgttggtagcgacccctact

SEQ ID NO: 128142 - DNA, 25 bp, Saccharomyces pastorianus
ggcgtatactggaagtttcatcttt

SEQ ID NO: 128143 - DNA, 25 bp, Saccharomyces pastorianus
aattgattgattttggcgcttccag

SEQ ID NO: 128144 - DNA, 25 bp, Saccharomyces pastorianus
gcccaaatgaggcatcgcttcgaat

SEQ ID NO: 128145 - DNA, 25 bp, Saccharomyces pastorianus
aaagatcttgtgacacggcctgcta

SEQ ID NO: 128146 - DNA, 25 bp, Saccharomyces pastorianus
ggcctgctaccgatgacagcaataa

SEQ ID NO: 128147 - DNA, 25 bp, Saccharomyces pastorianus
ttgttccggaagaggtgtgtcatct

SEQ ID NO: 128148 - DNA, 25 bp, Saccharomyces pastorianus
ttccactatccattgtcttcacaga

SEQ ID NO: 128149 - DNA, 25 bp, Saccharomyces pastorianus
gagaggatgttcactactcgtgtat

SEQ ID NO: 128150 - DNA, 25 bp, Saccharomyces pastorianus
aaaacactcctttactacgtcattg

SEQ ID NO: 128151 - DNA, 25 bp, Saccharomyces pastorianus
gatgagattgcatgcacctccacag

SEQ ID NO: 128152 - DNA, 25 bp, Saccharomyces pastorianus
aggacactgaaagcacggcccatat

SEQ ID NO: 128153 - DNA, 25 bp, Saccharomyces pastorianus
agaagattcggtctcttcactgtcc

SEQ ID NO: 128154 - DNA, 25 bp, Saccharomyces pastorianus
ggaaacaacttcttcgccagtctca

SEQ ID NO: 128155 - DNA, 25 bp, Saccharomyces pastorianus
acgaatcctctcgatgacacgtatt

SEQ ID NO: 128156 - DNA, 25 bp, Saccharomyces pastorianus
agatctcgacgttgttctcggcgaa

SEQ ID NO: 128157 - DNA, 25 bp, Saccharomyces pastorianus
tatcggtcacaatattccagtcacg

SEQ ID NO: 128158 - DNA, 25 bp, Saccharomyces pastorianus
aagcatccactgacttggtttccag

SEQ ID NO: 128159 - DNA, 25 bp, Saccharomyces pastorianus
tcaactggatcattctctctcatga

SEQ ID NO: 128160 - DNA, 25 bp, Saccharomyces pastorianus
cattttgtcatactcggttcgtggt

SEQ ID NO: 128161 - DNA, 25 bp, Saccharomyces pastorianus
agaatttatcaccaccacgagtcat

SEQ ID NO: 128162 - DNA, 25 bp, Saccharomyces pastorianus
gcgggatcttatcattatttgccat

SEQ ID NO: 128163 - DNA, 25 bp, Saccharomyces pastorianus
attgccaaagccgtagtacatcagg

SEQ ID NO: 128164 - DNA, 25 bp, Saccharomyces pastorianus
tgcccctttgtgataggattcacgt

SEQ ID NO: 128165 - DNA, 25 bp, Saccharomyces pastorianus
tgccgtacagtttcttcaggcgtat

SEQ ID NO: 128166 - DNA, 25 bp, Saccharomyces pastorianus
gcattatcgtggcatattttggcta

SEQ ID NO: 128167 - DNA, 25 bp, Saccharomyces pastorianus
ggaactgacctccagaatggctgaa

SEQ ID NO: 128168 - DNA, 25 bp, Saccharomyces pastorianus
gttagtccaattcccagagttacag

SEQ ID NO: 128169 - DNA, 25 bp, Saccharomyces pastorianus
ctgcccctagggaaattgactttat

SEQ ID NO: 128170 - DNA, 25 bp, Saccharomyces pastorianus
gggaaccaagcctctaaattgctaa

SEQ ID NO: 128171 - DNA, 25 bp, Saccharomyces pastorianus
gccttgcgcgatttgaaccttcaat

SEQ ID NO: 128172 - DNA, 25 bp, Saccharomyces pastorianus
gttaccttcattcacgaaagttggc

SEQ ID NO: 128173 - DNA, 25 bp, Saccharomyces pastorianus
acagcacccttactcgaggcaatag

SEQ ID NO: 128174 - DNA, 25 bp, Saccharomyces pastorianus
attaatgagcccatcgtagccgcgt

SEQ ID NO: 128175 - DNA, 25 bp, Saccharomyces pastorianus
gagagcatcgcattcgtcattgcta

SEQ ID NO: 128176 - DNA, 25 bp, Saccharomyces pastorianus
gatcctgttctagaaaacgccttgc

SEQ ID NO: 128177 - DNA, 25 bp, Saccharomyces pastorianus
tacaacatcttctacgtcatcgcaa

SEQ ID NO: 128178 - DNA, 25 bp, Saccharomyces pastorianus
attcaaccaatatgccactaccgag

SEQ ID NO: 128179 - DNA, 25 bp, Saccharomyces pastorianus
tgagccgagcccagcaataaagtta

SEQ ID NO: 128180 - DNA, 25 bp, Saccharomyces pastorianus
tagccgcgtcatcgataatagtacc

SEQ ID NO: 128181 - DNA, 25 bp, Saccharomyces pastorianus
atcgaaactgatccccattaatgag

SEQ ID NO: 128182 - DNA, 25 bp, Saccharomyces pastorianus
taccatgcagttggacaaggcgccc

SEQ ID NO: 128183 - DNA, 25 bp, Saccharomyces pastorianus
ccattgtagttgacgttgaaggcac

SEQ ID NO: 128184 - DNA, 25 bp, Saccharomyces pastorianus
gattgtgggaacctcatccgtgaga

SEQ ID NO: 128185 - DNA, 25 bp, Saccharomyces pastorianus
ttgttccgttcctattggtgtggaa

SEQ ID NO: 128186 - DNA, 25 bp, Saccharomyces pastorianus
gcttataagtctctggatgaccttc

SEQ ID NO: 128187 - DNA, 25 bp, Saccharomyces pastorianus
aatgcatcatcttggcgtctgctgg

SEQ ID NO: 128188 - DNA, 25 bp, Saccharomyces pastorianus
atccgtgagaagatctgctcagcta

SEQ ID NO: 128189 - DNA, 25 bp, Saccharomyces pastorianus
aaaatctccgtaccaatgcatcatc

SEQ ID NO: 128190 - DNA, 25 bp, Saccharomyces pastorianus
actatatgttgcctttcggagcgtg

SEQ ID NO: 128191 - DNA, 25 bp, Saccharomyces pastorianus
attacgcagcgattccattcggata

SEQ ID NO: 128192 - DNA, 25 bp, Saccharomyces pastorianus
tcggagcgtgctttgatgagaactt

SEQ ID NO: 128193 - DNA, 25 bp, Saccharomyces pastorianus
gtatccggactacgactgcaaggtt

SEQ ID NO: 128194 - DNA, 25 bp, Saccharomyces pastorianus
aaaagtatccggactacgactgcaa

SEQ ID NO: 128195 - DNA, 25 bp, Saccharomyces pastorianus
gggccctgaaactctacatattggt

SEQ ID NO: 128196 - DNA, 25 bp, Saccharomyces pastorianus
gaaaatcgaaattggcggtaataca

SEQ ID NO: 128197 - DNA, 25 bp, Saccharomyces pastorianus
gaccagattcaattcaaacctttgt

SEQ ID NO: 128198 - DNA, 25 bp, Saccharomyces pastorianus
gccctgaaactctacatattggtgg

SEQ ID NO: 128199 - DNA, 25 bp, Saccharomyces pastorianus
tttgcaaactcttggtgaccagatt

SEQ ID NO: 128200 - DNA, 25 bp, Saccharomyces pastorianus
gcaaactcttggtgaccagattcaa

SEQ ID NO: 128201 - DNA, 25 bp, Saccharomyces pastorianus
ggtgaccagattcaattcaaacctt

SEQ ID NO: 128202 - DNA, 25 bp, Saccharomyces pastorianus
atgggccctgaaactctacatattg

SEQ ID NO: 128203 - DNA, 25 bp, Saccharomyces pastorianus
ctgatcgaagaaaagtatccggact

SEQ ID NO: 128204 - DNA, 25 bp, Saccharomyces pastorianus
aattgatttggatctagccaaacga

SEQ ID NO: 128205 - DNA, 25 bp, Saccharomyces pastorianus
ggatctagccaaacgatattatcag

SEQ ID NO: 128206 - DNA, 25 bp, Saccharomyces pastorianus
atctagccaaacgatattatcagag

SEQ ID NO: 128207 - DNA, 25 bp, Saccharomyces pastorianus
aaaaggtgtcggttgtgaaattgat

SEQ ID NO: 128208 - DNA, 25 bp, Saccharomyces pastorianus
gggctgcaagaatgggttttaggaa

SEQ ID NO: 128209 - DNA, 25 bp, Saccharomyces pastorianus
aaacgatattatcagagggctgcaa

SEQ ID NO: 128210 - DNA, 25 bp, Saccharomyces pastorianus
gatttggatctagccaaacgatatt

SEQ ID NO: 128211 - DNA, 25 bp, Saccharomyces pastorianus
tattacgaaaaaggtgtcggttgtg

SEQ ID NO: 128212 - DNA, 25 bp, Saccharomyces pastorianus
cgatattatcagagggctgcaagaa

SEQ ID NO: 128213 - DNA, 25 bp, Saccharomyces pastorianus
gtgtcggttgtgaaattgatttgga

SEQ ID NO: 128214 - DNA, 25 bp, Saccharomyces pastorianus
cagagggctgcaagaatgggtttta

SEQ ID NO: 128215 - DNA, 25 bp, Saccharomyces pastorianus
atgaattcagtgttttgccgccaga

SEQ ID NO: 128216 - DNA, 25 bp, Saccharomyces pastorianus
tggccacctgccatgtatttaatgg

SEQ ID NO: 128217 - DNA, 25 bp, Saccharomyces pastorianus
ttgccgccagaaatccagaacctat

SEQ ID NO: 128218 - DNA, 25 bp, Saccharomyces pastorianus
aagggtgactctccacaaacattat

SEQ ID NO: 128219 - DNA, 25 bp, Saccharomyces pastorianus
cagaacctattatttgcgaacggca

SEQ ID NO: 128220 - DNA, 25 bp, Saccharomyces pastorianus
catgctaccgtgcaggtgtatgctt

SEQ ID NO: 128221 - DNA, 25 bp, Saccharomyces pastorianus
ggatccatcaccgaccaaagaacaa

SEQ ID NO: 128222 - DNA, 25 bp, Saccharomyces pastorianus
gatgagccatttatacggtctgaac

SEQ ID NO: 128223 - DNA, 25 bp, Saccharomyces pastorianus
aaagggccttccaatactaccagca

SEQ ID NO: 128224 - DNA, 25 bp, Saccharomyces pastorianus
gagtactctttagcgcaatggaaat

SEQ ID NO: 128225 - DNA, 25 bp, Saccharomyces pastorianus
accagcatggcgcagaagtttgttc

SEQ ID NO: 128226 - DNA, 25 bp, Saccharomyces pastorianus
attccagctgatcaacaacccattg

SEQ ID NO: 128227 - DNA, 25 bp, Saccharomyces pastorianus
acaacccattgtcgacttcttgaaa

SEQ ID NO: 128228 - DNA, 25 bp, Saccharomyces pastorianus
gattgtttacatgacctcgtcgcat

SEQ ID NO: 128229 - DNA, 25 bp, Saccharomyces pastorianus
gccaactttggcttctcaggttaat

SEQ ID NO: 128230 - DNA, 25 bp, Saccharomyces pastorianus
ggtcatccatgctaatatcgctaca

SEQ ID NO: 128231 - DNA, 25 bp, Saccharomyces pastorianus
tcaagagggtggtaactggctgaca

SEQ ID NO: 128232 - DNA, 25 bp, Saccharomyces pastorianus
gaatgtcagccatgaaattccagct

SEQ ID NO: 128233 - DNA, 25 bp, Saccharomyces pastorianus
aggttaatacctccgctgagaatgt

SEQ ID NO: 128234 - DNA, 25 bp, Saccharomyces pastorianus
gaagaactggctcgcgtaacaccat

SEQ ID NO: 128235 - DNA, 25 bp, Saccharomyces pastorianus
tctcaaggtgctacttatcctccaa

SEQ ID NO: 128236 - DNA, 25 bp, Saccharomyces pastorianus
gtaacaccattgaccccaaaggagt

SEQ ID NO: 128237 - DNA, 25 bp, Saccharomyces pastorianus
gtgacagcgacgaccagcaaagcca

SEQ ID NO: 128238 - DNA, 25 bp, Saccharomyces pastorianus
ccagattgaattcttttgctcctcc

SEQ ID NO: 128239 - DNA, 25 bp, Saccharomyces pastorianus
tttatggtatgacaccaggcgcctc

SEQ ID NO: 128240 - DNA, 25 bp, Saccharomyces pastorianus
gcttttgctcctatacaacctggta

SEQ ID NO: 128241 - DNA, 25 bp, Saccharomyces pastorianus
aaggcacgtgtcttgattgcttccg

SEQ ID NO: 128242 - DNA, 25 bp, Saccharomyces pastorianus
tcaatctagctctattccttcacaa

SEQ ID NO: 128243 - DNA, 25 bp, Saccharomyces pastorianus
atgggcgactataatgctcaatcta

SEQ ID NO: 128244 - DNA, 25 bp, Saccharomyces pastorianus
taacccatatgccactgcaacagtt

SEQ ID NO: 128245 - DNA, 25 bp, Saccharomyces pastorianus
aatcattaccggcacaaaatcctgt

SEQ ID NO: 128246 - DNA, 25 bp, Saccharomyces pastorianus
gatggcgtcaccttttgttaacaaa

SEQ ID NO: 128247 - DNA, 25 bp, Saccharomyces pastorianus
taagaacgttcctgtactaccaact

SEQ ID NO: 128248 - DNA, 25 bp, Saccharomyces pastorianus
gtttgctggactgtttcagctggta

SEQ ID NO: 128249 - DNA, 25 bp, Saccharomyces pastorianus
gctcatgttccaaactacgctgtta

SEQ ID NO: 128250 - DNA, 25 bp, Saccharomyces pastorianus
gatttactgttatacttcgggcctt

SEQ ID NO: 128251 - DNA, 25 bp, Saccharomyces pastorianus
atatattcggttttcatccgcggcc

SEQ ID NO: 128252 - DNA, 25 bp, Saccharomyces pastorianus
gagtgtttctgacatcacaatggat

SEQ ID NO: 128253 - DNA, 25 bp, Saccharomyces pastorianus
atattttgggccagctcatgttcca

SEQ ID NO: 128254 - DNA, 25 bp, Saccharomyces pastorianus
gttggacccgaaccagatttactgt

SEQ ID NO: 128255 - DNA, 25 bp, Saccharomyces pastorianus
ggaaattcattccaacctggccaaa

SEQ ID NO: 128256 - DNA, 25 bp, Saccharomyces pastorianus
ctatggctgagttatgtgcggttaa

SEQ ID NO: 128257 - DNA, 25 bp, Saccharomyces pastorianus
tatacttcgggccttcgttggattt

SEQ ID NO: 128258 - DNA, 25 bp, Saccharomyces pastorianus
gaaacgattgtcgatctgaccaaaa

SEQ ID NO: 128259 - DNA, 25 bp, Saccharomyces pastorianus
gacgccgatgagaaccctcagaaga

SEQ ID NO: 128260 - DNA, 25 bp, Saccharomyces pastorianus
atgtcccagaatcttccaatcacat

SEQ ID NO: 128261 - DNA, 25 bp, Saccharomyces pastorianus
tcaaaaaccagagctttaaaggccg

SEQ ID NO: 128262 - DNA, 25 bp, Saccharomyces pastorianus
aaggatgataaagcaatggagcccc

SEQ ID NO: 128263 - DNA, 25 bp, Saccharomyces pastorianus
acaagtatcattgcagacgccgatg

SEQ ID NO: 128264 - DNA, 25 bp, Saccharomyces pastorianus
gaacaatgagacgaatggagtccaa

SEQ ID NO: 128265 - DNA, 25 bp, Saccharomyces pastorianus
agatcgaaagagatgatgtcccaga

SEQ ID NO: 128266 - DNA, 25 bp, Saccharomyces pastorianus
ggagccccctaatgaaaaaccgcat

SEQ ID NO: 128267 - DNA, 25 bp, Saccharomyces pastorianus
acatcccacctccagaatctggtgt

SEQ ID NO: 128268 - DNA, 25 bp, Saccharomyces pastorianus
gaatctggtgtcttaaagggcggta

SEQ ID NO: 128269 - DNA, 25 bp, Saccharomyces pastorianus
ttaaaggccgttacaagtatcattg

SEQ ID NO: 128270 - DNA, 25 bp, Saccharomyces pastorianus
cgcttggttggtgttcgctaacaag

SEQ ID NO: 128271 - DNA, 25 bp, Saccharomyces pastorianus
tggtttatccaagccacgtgtgcta

SEQ ID NO: 128272 - DNA, 25 bp, Saccharomyces pastorianus
acgccgcttggttggtgttcgctaa

SEQ ID NO: 128273 - DNA, 25 bp, Saccharomyces pastorianus
aaacgccgcttggttggtgttcgct

SEQ ID NO: 128274 - DNA, 25 bp, Saccharomyces pastorianus
catggtttatccaagccacgtgtgc

SEQ ID NO: 128275 - DNA, 25 bp, Saccharomyces pastorianus
gtttatccaagccacgtgtgctacc

SEQ ID NO: 128276 - DNA, 25 bp, Saccharomyces pastorianus
ttatccaagccacgtgtgctacctc

SEQ ID NO: 128277 - DNA, 25 bp, Saccharomyces pastorianus
ttggttggtgttcgctaacaagcaa

SEQ ID NO: 128278 - DNA, 25 bp, Saccharomyces pastorianus
aaggtgttatctttgttgtcgattc

SEQ ID NO: 128279 - DNA, 25 bp, Saccharomyces pastorianus
tccatggtttatccaagccacgtgt

SEQ ID NO: 128280 - DNA, 25 bp, Saccharomyces pastorianus
gtgttatctttgttgtcgattctaa

SEQ ID NO: 128281 - DNA, 25 bp, Saccharomyces pastorianus
ttaaaactagaggatgtaacaccta

SEQ ID NO: 128282 - DNA, 25 bp, Saccharomyces pastorianus
aactagaggatgtaacacctaatga

SEQ ID NO: 128283 - DNA, 25 bp, Saccharomyces pastorianus
atgtaacacctaatgaagagttaag

SEQ ID NO: 128284 - DNA, 25 bp, Saccharomyces pastorianus
ggatgtaacacctaatgaagagtta

SEQ ID NO: 128285 - DNA, 25 bp, Saccharomyces pastorianus
ctagaggatgtaacacctaatgaag

SEQ ID NO: 128286 - DNA, 25 bp, Saccharomyces pastorianus
taaggcaaaagattctttgtttcaa

SEQ ID NO: 128287 - DNA, 25 bp, Saccharomyces pastorianus
gagttaaggcaaaagattctttgtt

SEQ ID NO: 128288 - DNA, 25 bp, Saccharomyces pastorianus
aaactagaggatgtaacacctaatg

SEQ ID NO: 128289 - DNA, 25 bp, Saccharomyces pastorianus
gaggatgtaacacctaatgaagagt

SEQ ID NO: 128290 - DNA, 25 bp, Saccharomyces pastorianus
aaaactagaggatgtaacacctaat

SEQ ID NO: 128291 - DNA, 25 bp, Saccharomyces pastorianus
actagaggatgtaacacctaatgaa

SEQ ID NO: 128292 - DNA, 25 bp, Saccharomyces pastorianus
aatgacttgactttcctgttggatg

SEQ ID NO: 128293 - DNA, 25 bp, Saccharomyces pastorianus
gtttatatcaatctttccgagcaat

SEQ ID NO: 128294 - DNA, 25 bp, Saccharomyces pastorianus
agtcctcgtgtggattggccgataa

SEQ ID NO: 128295 - DNA, 25 bp, Saccharomyces pastorianus
aatgctgacttttttgtgaggttcg

SEQ ID NO: 128296 - DNA, 25 bp, Saccharomyces pastorianus
cggctgcatttgtcacaccagaaat

SEQ ID NO: 128297 - DNA, 25 bp, Saccharomyces pastorianus
ttccaggcaagctaagtcctcgtgt

SEQ ID NO: 128298 - DNA, 25 bp, Saccharomyces pastorianus
aagattggcgtctgcttccaggcaa

SEQ ID NO: 128299 - DNA, 25 bp, Saccharomyces pastorianus
tattcgaaggatataccggctgcat

SEQ ID NO: 128300 - DNA, 25 bp, Saccharomyces pastorianus
ttagagtcacttgtcggtcccaaat

SEQ ID NO: 128301 - DNA, 25 bp, Saccharomyces pastorianus
gaggttcgttgctcgtatgttgaat

SEQ ID NO: 128302 - DNA, 25 bp, Saccharomyces pastorianus
cagagttcatcagtgctgtcgctaa

SEQ ID NO: 128303 - DNA, 25 bp, Saccharomyces pastorianus
aaatcggccttgtctgatagtgata

SEQ ID NO: 128304 - DNA, 25 bp, Saccharomyces pastorianus
agatcctgttaccactgctacattg

SEQ ID NO: 128305 - DNA, 25 bp, Saccharomyces pastorianus
aacacatctgtttcttactccaaat

SEQ ID NO: 128306 - DNA, 25 bp, Saccharomyces pastorianus
ggatgttgccactttaatcaaggaa

SEQ ID NO: 128307 - DNA, 25 bp, Saccharomyces pastorianus
aaggaagtccatggcgaattcgaaa

SEQ ID NO: 128308 - DNA, 25 bp, Saccharomyces pastorianus
agttttatgattccaattaccctga

SEQ ID NO: 128309 - DNA, 25 bp, Saccharomyces pastorianus
tagctgactctactggtgacgttaa

SEQ ID NO: 128310 - DNA, 25 bp, Saccharomyces pastorianus
cacttatgatgctttctgtccaatt

SEQ ID NO: 128311 - DNA, 25 bp, Saccharomyces pastorianus
gacgttaagcatgccgtttcttcat

SEQ ID NO: 128312 - DNA, 25 bp, Saccharomyces pastorianus
agagccttcatctcgtatcatgacg

SEQ ID NO: 128313 - DNA, 25 bp, Saccharomyces pastorianus
taccctgaatttcctgttttaagag

SEQ ID NO: 128314 - DNA, 25 bp, Saccharomyces pastorianus
gattctgatggctacgttactgatg

SEQ ID NO: 128315 - DNA, 25 bp, Saccharomyces pastorianus
cgtcgctacttttgtacgtgagtgc

SEQ ID NO: 128316 - DNA, 25 bp, Saccharomyces pastorianus
aacgttctttctaagtgtgccggct

SEQ ID NO: 128317 - DNA, 25 bp, Saccharomyces pastorianus
gaaacattccttgctggtctaattg

SEQ ID NO: 128318 - DNA, 25 bp, Saccharomyces pastorianus
gtctgacagggcaactttttcggtt

SEQ ID NO: 128319 - DNA, 25 bp, Saccharomyces pastorianus
aaagttgaatttgtgcgccgagtat

SEQ ID NO: 128320 - DNA, 25 bp, Saccharomyces pastorianus
ttagtggcctctgtcaacgcagaac

SEQ ID NO: 128321 - DNA, 25 bp, Saccharomyces pastorianus
ttgctcgttctttaggcttagtggc

SEQ ID NO: 128322 - DNA, 25 bp, Saccharomyces pastorianus
tttttcggttgattccagggatact

SEQ ID NO: 128323 - DNA, 25 bp, Saccharomyces pastorianus
gaatattccttctttcttgtctacg

SEQ ID NO: 128324 - DNA, 25 bp, Saccharomyces pastorianus
tattggtacccgtgaaacattcctt

SEQ ID NO: 128325 - DNA, 25 bp, Saccharomyces pastorianus
acttcctcatcaacacttcgatata

SEQ ID NO: 128326 - DNA, 25 bp, Saccharomyces pastorianus
gagtaccaacatccactgagtgcta

SEQ ID NO: 128327 - DNA, 25 bp, Saccharomyces pastorianus
atgtatttcgtctatgttcgcggcc

SEQ ID NO: 128328 - DNA, 25 bp, Saccharomyces pastorianus
gactccgctttactaagattctgca

SEQ ID NO: 128329 - DNA, 25 bp, Saccharomyces pastorianus
gtggtaaactacttcggctcaagaa

SEQ ID NO: 128330 - DNA, 25 bp, Saccharomyces pastorianus
taccagttggtcaccggtttattgt

SEQ ID NO: 128331 - DNA, 25 bp, Saccharomyces pastorianus
ttcatatctctaaacttcctcatca

SEQ ID NO: 128332 - DNA, 25 bp, Saccharomyces pastorianus
gtaataaatagcagcccgggtcact

SEQ ID NO: 128333 - DNA, 25 bp, Saccharomyces pastorianus
gatgatatgaccaacgactccgctt

SEQ ID NO: 128334 - DNA, 25 bp, Saccharomyces pastorianus
gtcacttcgggatgaattcaggcca

SEQ ID NO: 128335 - DNA, 25 bp, Saccharomyces pastorianus
aatggtttcttggagtcttcttgtt

SEQ ID NO: 128336 - DNA, 25 bp, Saccharomyces pastorianus
gctccacaaggcctcacatagtgat

SEQ ID NO: 128337 - DNA, 25 bp, Saccharomyces pastorianus
tcactattctatgcgtcgtccgaat

SEQ ID NO: 128338 - DNA, 25 bp, Saccharomyces pastorianus
tctgcgctgttagtatttcactgtt

SEQ ID NO: 128339 - DNA, 25 bp, Saccharomyces pastorianus
catagtgatactttctgcgctgtta

SEQ ID NO: 128340 - DNA, 25 bp, Saccharomyces pastorianus
ctttctgcgctgttagtatttcact

SEQ ID NO: 128341 - DNA, 25 bp, Saccharomyces pastorianus
gttttcactattctatgcgtcgtcc

SEQ ID NO: 128342 - DNA, 25 bp, Saccharomyces pastorianus
agtgatactttctgcgctgttagta

SEQ ID NO: 128343 - DNA, 25 bp, Saccharomyces pastorianus
attttatgcctattttctgctccac

SEQ ID NO: 128344 - DNA, 25 bp, Saccharomyces pastorianus
tatgcctattttctgctccacaagg

SEQ ID NO: 128345 - DNA, 25 bp, Saccharomyces pastorianus
gtatttcactgttttcactattcta

SEQ ID NO: 128346 - DNA, 25 bp, Saccharomyces pastorianus
atcatgcagcatcatattttatgcc

SEQ ID NO: 128347 - DNA, 25 bp, Saccharomyces pastorianus
atgaaggatttgaaggttcattatg

SEQ ID NO: 128348 - DNA, 25 bp, Saccharomyces pastorianus
aggatttgaaggttcattatgatcc

SEQ ID NO: 128349 - DNA, 25 bp, Saccharomyces pastorianus
ggatttgaaggttcattatgatcct

SEQ ID NO: 128350 - DNA, 25 bp, Saccharomyces pastorianus
tgatgaaggatttgaaggttcatta

SEQ ID NO: 128351 - DNA, 25 bp, Saccharomyces pastorianus
gaaggatttgaaggttcattatgat

SEQ ID NO: 128352 - DNA, 25 bp, Saccharomyces pastorianus
tgaaggatttgaaggttcattatga

SEQ ID NO: 128353 - DNA, 25 bp, Saccharomyces pastorianus
gatgaaggatttgaaggttcattat

SEQ ID NO: 128354 - DNA, 25 bp, Saccharomyces pastorianus
aaggatttgaaggttcattatgatc

SEQ ID NO: 128355 - DNA, 25 bp, Saccharomyces pastorianus
atgatgaaggatttgaaggttcatt

SEQ ID NO: 128356 - DNA, 25 bp, Saccharomyces pastorianus
atgacggtttaaatgcacaaaaaag

SEQ ID NO: 128357 - DNA, 25 bp, Saccharomyces pastorianus
aacttgctctaatcgattatgacgg

SEQ ID NO: 128358 - DNA, 25 bp, Saccharomyces pastorianus
tttgtcgacaaacttgctctaatcg

SEQ ID NO: 128359 - DNA, 25 bp, Saccharomyces pastorianus
cttgctctaatcgattatgacggtt

SEQ ID NO: 128360 - DNA, 25 bp, Saccharomyces pastorianus
gattatgacggtttaaatgcacaaa

SEQ ID NO: 128361 - DNA, 25 bp, Saccharomyces pastorianus
gacaaacttgctctaatcgattatg

SEQ ID NO: 128362 - DNA, 25 bp, Saccharomyces pastorianus
tgcacaaaaaagaaggttagattac

SEQ ID NO: 128363 - DNA, 25 bp, Saccharomyces pastorianus
gtcgacaaacttgctctaatcgatt

SEQ ID NO: 128364 - DNA, 25 bp, Saccharomyces pastorianus
agattacgatgaaaaggacctttat

SEQ ID NO: 128365 - DNA, 25 bp, Saccharomyces pastorianus
gctctaatcgattatgacggtttaa

SEQ ID NO: 128366 - DNA, 25 bp, Saccharomyces pastorianus
gttagattacgatgaaaaggacctt

SEQ ID NO: 128367 - DNA, 25 bp, Saccharomyces pastorianus
aatgatatagacgtaggcacagaca

SEQ ID NO: 128368 - DNA, 25 bp, Saccharomyces pastorianus
gagacagctcaattcaagcaggcat

SEQ ID NO: 128369 - DNA, 25 bp, Saccharomyces pastorianus
ctattcggataataccgcatgattt

SEQ ID NO: 128370 - DNA, 25 bp, Saccharomyces pastorianus
gtgtgcatcgatcatttcgtcacgt

SEQ ID NO: 128371 - DNA, 25 bp, Saccharomyces pastorianus
atgctggatgattctttatgcttta

SEQ ID NO: 128372 - DNA, 25 bp, Saccharomyces pastorianus
ggaattccaaggatactattcggat

SEQ ID NO: 128373 - DNA, 25 bp, Saccharomyces pastorianus
ctttatgctttatattggacacaca

SEQ ID NO: 128374 - DNA, 25 bp, Saccharomyces pastorianus
attccgacctcggtactatgatgaa

SEQ ID NO: 128375 - DNA, 25 bp, Saccharomyces pastorianus
ttcgtcacgttgagtgcattccgac

SEQ ID NO: 128376 - DNA, 25 bp, Saccharomyces pastorianus
aggcacagacaatgtttgcgccctt

SEQ ID NO: 128377 - DNA, 25 bp, Saccharomyces pastorianus
ggacacacatggagttttgttgata

SEQ ID NO: 128378 - DNA, 25 bp, Saccharomyces pastorianus
ataacagcatttccaactcttccaa

SEQ ID NO: 128379 - DNA, 25 bp, Saccharomyces pastorianus
aaacgatcactctcatagtggcaga

SEQ ID NO: 128380 - DNA, 25 bp, Saccharomyces pastorianus
aacgtagagcatcgaacttccatcc

SEQ ID NO: 128381 - DNA, 25 bp, Saccharomyces pastorianus
gggcgagacgctgtcactcaataat

SEQ ID NO: 128382 - DNA, 25 bp, Saccharomyces pastorianus
gtctaatgtcattcaaccaactata

SEQ ID NO: 128383 - DNA, 25 bp, Saccharomyces pastorianus
taccgagaccttcccataaaagaca

SEQ ID NO: 128384 - DNA, 25 bp, Saccharomyces pastorianus
gatataacccttctacttatgttga

SEQ ID NO: 128385 - DNA, 25 bp, Saccharomyces pastorianus
tacgatgaggatccactaccgagac

SEQ ID NO: 128386 - DNA, 25 bp, Saccharomyces pastorianus
tgtatggctccagatataacccttc

SEQ ID NO: 128387 - DNA, 25 bp, Saccharomyces pastorianus
catcctcctccttatcaaaagtcta

SEQ ID NO: 128388 - DNA, 25 bp, Saccharomyces pastorianus
agtaaacgtctcgtcgatatcggag

SEQ ID NO: 128389 - DNA, 25 bp, Saccharomyces pastorianus
gccacctcttccaatagcaaatttt

SEQ ID NO: 128390 - DNA, 25 bp, Saccharomyces pastorianus
gatagccgccaaagcattgccattg

SEQ ID NO: 128391 - DNA, 25 bp, Saccharomyces pastorianus
gttgtcctcgtttgcattgatagta

SEQ ID NO: 128392 - DNA, 25 bp, Saccharomyces pastorianus
tatttttaggcttcttgaacgtgga

SEQ ID NO: 128393 - DNA, 25 bp, Saccharomyces pastorianus
tgaagaaaatgtttcctgccccacc

SEQ ID NO: 128394 - DNA, 25 bp, Saccharomyces pastorianus
tagcaaatttttccggtgcgctttt

SEQ ID NO: 128395 - DNA, 25 bp, Saccharomyces pastorianus
gcttttgcccttgagcttattttta

SEQ ID NO: 128396 - DNA, 25 bp, Saccharomyces pastorianus
gatagtatcctcatcctcgatattg

SEQ ID NO: 128397 - DNA, 25 bp, Saccharomyces pastorianus
gaacgtggacttgatagccgccaaa

SEQ ID NO: 128398 - DNA, 25 bp, Saccharomyces pastorianus
agtcaccacaaacaggttgtcctcg

SEQ ID NO: 128399 - DNA, 25 bp, Saccharomyces pastorianus
aattatgtttccagcgccacctctt

SEQ ID NO: 128400 - DNA, 25 bp, Saccharomyces pastorianus
atgtcaccaccgttatcgatggcaa

SEQ ID NO: 128401 - DNA, 25 bp, Saccharomyces pastorianus
atgggaatggtagctcgtttaacga

SEQ ID NO: 128402 - DNA, 25 bp, Saccharomyces pastorianus
agatgggaatggtagctcgtttaac

SEQ ID NO: 128403 - DNA, 25 bp, Saccharomyces pastorianus
ggaatttatgtcaccaccgttatcg

SEQ ID NO: 128404 - DNA, 25 bp, Saccharomyces pastorianus
accaccgttatcgatggcaacaaag

SEQ ID NO: 128405 - DNA, 25 bp, Saccharomyces pastorianus
caatgttggtgataatagcgctttc

SEQ ID NO: 128406 - DNA, 25 bp, Saccharomyces pastorianus
ttccaatgttggtgataatagcgct

SEQ ID NO: 128407 - DNA, 25 bp, Saccharomyces pastorianus
ttcaaaagtgacaaagctaacgtta

SEQ ID NO: 128408 - DNA, 25 bp, Saccharomyces pastorianus
tggtagctcgtttaacgagttcaaa

SEQ ID NO: 128409 - DNA, 25 bp, Saccharomyces pastorianus
gctaacgttaatttttccaatgttg

SEQ ID NO: 128410 - DNA, 25 bp, Saccharomyces pastorianus
atttatgtcaccaccgttatcgatg

SEQ ID NO: 128411 - DNA, 25 bp, Saccharomyces pastorianus
ttcttccaccggagtactcgataag

SEQ ID NO: 128412 - DNA, 25 bp, Saccharomyces pastorianus
gcaattacgccattgtcgcgacaaa

SEQ ID NO: 128413 - DNA, 25 bp, Saccharomyces pastorianus
aattatagcggatcatttctcggga

SEQ ID NO: 128414 - DNA, 25 bp, Saccharomyces pastorianus
accatcgaacagtgggtcgccgata

SEQ ID NO: 128415 - DNA, 25 bp, Saccharomyces pastorianus
gaacatgtccttgagcttcaacctt

SEQ ID NO: 128416 - DNA, 25 bp, Saccharomyces pastorianus
gtatctcaggatttgttgtcttcca

SEQ ID NO: 128417 - DNA, 25 bp, Saccharomyces pastorianus
ttttagatgttcttttccggcacca

SEQ ID NO: 128418 - DNA, 25 bp, Saccharomyces pastorianus
atggtgcccctgagttcaacatgat

SEQ ID NO: 128419 - DNA, 25 bp, Saccharomyces pastorianus
gatcaatcctatctaatctggcaaa

SEQ ID NO: 128420 - DNA, 25 bp, Saccharomyces pastorianus
aatcgcgtgaactcgggatcttcaa

SEQ ID NO: 128421 - DNA, 25 bp, Saccharomyces pastorianus
agagctcattttcctgcaattacgc

SEQ ID NO: 128422 - DNA, 25 bp, Saccharomyces pastorianus
gacattaacggagaacgtggcgata

SEQ ID NO: 128423 - DNA, 25 bp, Saccharomyces pastorianus
gcaatctcacaaggacattaacgga

SEQ ID NO: 128424 - DNA, 25 bp, Saccharomyces pastorianus
gaagtagtaccaatgatacagaaat

SEQ ID NO: 128425 - DNA, 25 bp, Saccharomyces pastorianus
taaaagtcccttagagttatcgcat

SEQ ID NO: 128426 - DNA, 25 bp, Saccharomyces pastorianus
ttgccgatgaagtagtaccaatgat

SEQ ID NO: 128427 - DNA, 25 bp, Saccharomyces pastorianus
tgaaaattgccgatgaagtagtacc

SEQ ID NO: 128428 - DNA, 25 bp, Saccharomyces pastorianus
ggcggtgctgcggtccttgcaatct

SEQ ID NO: 128429 - DNA, 25 bp, Saccharomyces pastorianus
aatcctcagccaaaatgaaggtggt

SEQ ID NO: 128430 - DNA, 25 bp, Saccharomyces pastorianus
tgcggtccttgcaatctcacaagga

SEQ ID NO: 128431 - DNA, 25 bp, Saccharomyces pastorianus
agagttatcgcatcaagatttagag

SEQ ID NO: 128432 - DNA, 25 bp, Saccharomyces pastorianus
aagtcccttagagttatcgcatcaa

SEQ ID NO: 128433 - DNA, 25 bp, Saccharomyces pastorianus
ttcttttctaacttggcacggtcca

SEQ ID NO: 128434 - DNA, 25 bp, Saccharomyces pastorianus
gttcctaactaatgttatcgcatgc

SEQ ID NO: 128435 - DNA, 25 bp, Saccharomyces pastorianus
atcgcatgcattcaatgggttgatc

SEQ ID NO: 128436 - DNA, 25 bp, Saccharomyces pastorianus
cacggtccaaggcttctcttttaat

SEQ ID NO: 128437 - DNA, 25 bp, Saccharomyces pastorianus
atgggttgatctttccgattgtttc

SEQ ID NO: 128438 - DNA, 25 bp, Saccharomyces pastorianus
atgttatcgcatgcattcaatgggt

SEQ ID NO: 128439 - DNA, 25 bp, Saccharomyces pastorianus
tttaattctcttgtcttcctttatt

SEQ ID NO: 128440 - DNA, 25 bp, Saccharomyces pastorianus
aaaagtgcaatatgttcctaactaa

SEQ ID NO: 128441 - DNA, 25 bp, Saccharomyces pastorianus
ggcttctcttttaattctcttgtct

SEQ ID NO: 128442 - DNA, 25 bp, Saccharomyces pastorianus
ttatttttctacaccaatgtctaaa

SEQ ID NO: 128443 - DNA, 25 bp, Saccharomyces pastorianus
gatctttccgattgtttcttttcta

SEQ ID NO: 128444 - DNA, 25 bp, Saccharomyces pastorianus
aactctccagttaccagctcgatga

SEQ ID NO: 128445 - DNA, 25 bp, Saccharomyces pastorianus
actctccagttaccagctcgatgat

SEQ ID NO: 128446 - DNA, 25 bp, Saccharomyces pastorianus
gggaaactctccagttaccagctcg

SEQ ID NO: 128447 - DNA, 25 bp, Saccharomyces pastorianus
tccagttaccagctcgatgatcatt

SEQ ID NO: 128448 - DNA, 25 bp, Saccharomyces pastorianus
tctccagttaccagctcgatgatca

SEQ ID NO: 128449 - DNA, 25 bp, Saccharomyces pastorianus
ccagttaccagctcgatgatcatta

SEQ ID NO: 128450 - DNA, 25 bp, Saccharomyces pastorianus
agttaccagctcgatgatcattaag

SEQ ID NO: 128451 - DNA, 25 bp, Saccharomyces pastorianus
gaaactctccagttaccagctcgat

SEQ ID NO: 128452 - DNA, 25 bp, Saccharomyces pastorianus
cagttaccagctcgatgatcattaa

SEQ ID NO: 128453 - DNA, 25 bp, Saccharomyces pastorianus
aaactctccagttaccagctcgatg

SEQ ID NO: 128454 - DNA, 25 bp, Saccharomyces pastorianus
taccagctcgatgatcattaagccc

SEQ ID NO: 128455 - DNA, 25 bp, Saccharomyces pastorianus
actctccagttaccagctcgatgat

SEQ ID NO: 128456 - DNA, 25 bp, Saccharomyces pastorianus
gggaaactctccagttaccagctcg

SEQ ID NO: 128457 - DNA, 25 bp, Saccharomyces pastorianus
tccagttaccagctcgatgatcatt

SEQ ID NO: 128458 - DNA, 25 bp, Saccharomyces pastorianus
tctccagttaccagctcgatgatca

SEQ ID NO: 128459 - DNA, 25 bp, Saccharomyces pastorianus
ccagttaccagctcgatgatcatta

SEQ ID NO: 128460 - DNA, 25 bp, Saccharomyces pastorianus
agttaccagctcgatgatcattaag

SEQ ID NO: 128461 - DNA, 25 bp, Saccharomyces pastorianus
ggtgtatcgttatgcccacctaggg

SEQ ID NO: 128462 - DNA, 25 bp, Saccharomyces pastorianus
gaaactctccagttaccagctcgat

SEQ ID NO: 128463 - DNA, 25 bp, Saccharomyces pastorianus
ccatcaggtgtatcgttatgcccac

SEQ ID NO: 128464 - DNA, 25 bp, Saccharomyces pastorianus
taccagctcgatgatcattaagccc

SEQ ID NO: 128465 - DNA, 25 bp, Saccharomyces pastorianus
aactctccagttaccagctcgatga

SEQ ID NO: 128466 - DNA, 25 bp, Saccharomyces pastorianus
tgatgcatcctcagcggaacttcta

SEQ ID NO: 128467 - DNA, 25 bp, Saccharomyces pastorianus
gtatcgctgatgatgcatcctcagc

SEQ ID NO: 128468 - DNA, 25 bp, Saccharomyces pastorianus
gatgcatcctcagcggaacttctag

SEQ ID NO: 128469 - DNA, 25 bp, Saccharomyces pastorianus
gatgatgcatcctcagcggaacttc

SEQ ID NO: 128470 - DNA, 25 bp, Saccharomyces pastorianus
agcggaacttctaggccgtgtggac

SEQ ID NO: 128471 - DNA, 25 bp, Saccharomyces pastorianus
aagatgttatagcattaagtatcgc

SEQ ID NO: 128472 - DNA, 25 bp, Saccharomyces pastorianus
ttaagtatcgctgatgatgcatcct

SEQ ID NO: 128473 - DNA, 25 bp, Saccharomyces pastorianus
tcctcagcggaacttctaggccgtg

SEQ ID NO: 128474 - DNA, 25 bp, Saccharomyces pastorianus
aagtatcgctgatgatgcatcctca

SEQ ID NO: 128475 - DNA, 25 bp, Saccharomyces pastorianus
ctcagcggaacttctaggccgtgtg

SEQ ID NO: 128476 - DNA, 25 bp, Saccharomyces pastorianus
tgatgatgcatcctcagcggaactt

SEQ ID NO: 128477 - DNA, 25 bp, Saccharomyces pastorianus
gtgccgaaaccacatttttacaaga

SEQ ID NO: 128478 - DNA, 25 bp, Saccharomyces pastorianus
gatgcatcctcagcggaacttctag

SEQ ID NO: 128479 - DNA, 25 bp, Saccharomyces pastorianus
agcggaacttctaggccgtgtggac

SEQ ID NO: 128480 - DNA, 25 bp, Saccharomyces pastorianus
aagatgttatagcattaagtatcgc

SEQ ID NO: 128481 - DNA, 25 bp, Saccharomyces pastorianus
atgatgcatcctcagcggaacttct

SEQ ID NO: 128482 - DNA, 25 bp, Saccharomyces pastorianus
agtatcgctgatgatgcatcctcag

SEQ ID NO: 128483 - DNA, 25 bp, Saccharomyces pastorianus
ttaagtatcgctgatgatgcatcct

SEQ ID NO: 128484 - DNA, 25 bp, Saccharomyces pastorianus
tcctcagcggaacttctaggccgtg

SEQ ID NO: 128485 - DNA, 25 bp, Saccharomyces pastorianus
ctcagcggaacttctaggccgtgtg

SEQ ID NO: 128486 - DNA, 25 bp, Saccharomyces pastorianus
tgatgatgcatcctcagcggaactt

SEQ ID NO: 128487 - DNA, 25 bp, Saccharomyces pastorianus
ggcaaaggtgccgaaaccacatttt

SEQ ID NO: 128488 - DNA, 25 bp, Saccharomyces pastorianus
gaacatattccgttggctttacaga

SEQ ID NO: 128489 - DNA, 25 bp, Saccharomyces pastorianus
agatggctcatattgttaacactat

SEQ ID NO: 128490 - DNA, 25 bp, Saccharomyces pastorianus
tacctacgcatgctcctaaatacga

SEQ ID NO: 128491 - DNA, 25 bp, Saccharomyces pastorianus
acatccggttgatcaatgtgtctcc

SEQ ID NO: 128492 - DNA, 25 bp, Saccharomyces pastorianus
ggaagagcttacctgctttcaatga

SEQ ID NO: 128493 - DNA, 25 bp, Saccharomyces pastorianus
aggagagcagcgactaccatgcaaa

SEQ ID NO: 128494 - DNA, 25 bp, Saccharomyces pastorianus
aattattttaccgattcagcagtta

SEQ ID NO: 128495 - DNA, 25 bp, Saccharomyces pastorianus
gatgcaactatctctactgtgtgga

SEQ ID NO: 128496 - DNA, 25 bp, Saccharomyces pastorianus
aatggataccgaggcacatccggtt

SEQ ID NO: 128497 - DNA, 25 bp, Saccharomyces pastorianus
atgtgtctccgttttactaaatgtt

SEQ ID NO: 128498 - DNA, 25 bp, Saccharomyces pastorianus
gctttacagaaccacaaacccgtat

SEQ ID NO: 128499 - DNA, 25 bp, Saccharomyces pastorianus
aagggtcatcgagcacaatttaaga

SEQ ID NO: 128500 - DNA, 25 bp, Saccharomyces pastorianus
gttcaaaaaacctatgagcccgtct

SEQ ID NO: 128501 - DNA, 25 bp, Saccharomyces pastorianus
atatacgctaaagttaatcgcccag

SEQ ID NO: 128502 - DNA, 25 bp, Saccharomyces pastorianus
aatcgcccagccaaaatcgtgaatt

SEQ ID NO: 128503 - DNA, 25 bp, Saccharomyces pastorianus
gtaaaccagggcatcatatacgcta

SEQ ID NO: 128504 - DNA, 25 bp, Saccharomyces pastorianus
tgagcccgtcttaaatgaggatgat

SEQ ID NO: 128505 - DNA, 25 bp, Saccharomyces pastorianus
gcacattgtatatttcttagtcctt

SEQ ID NO: 128506 - DNA, 25 bp, Saccharomyces pastorianus
gagccagacggaaacatacatcagt

SEQ ID NO: 128507 - DNA, 25 bp, Saccharomyces pastorianus
ggaaacctgttttatcgcacattgt

SEQ ID NO: 128508 - DNA, 25 bp, Saccharomyces pastorianus
ttagtcctttcaccttacggcaatt

SEQ ID NO: 128509 - DNA, 25 bp, Saccharomyces pastorianus
aattgctggacctaacggagagcca

SEQ ID NO: 128510 - DNA, 25 bp, Saccharomyces pastorianus
ttggttagagacaccttcaacgcct

SEQ ID NO: 128511 - DNA, 25 bp, Saccharomyces pastorianus
gactactctccgatgaatttctttt

SEQ ID NO: 128512 - DNA, 25 bp, Saccharomyces pastorianus
gggacgcccgacaatcaaaatatct

SEQ ID NO: 128513 - DNA, 25 bp, Saccharomyces pastorianus
ttcaacgccttcagatggaggttca

SEQ ID NO: 128514 - DNA, 25 bp, Saccharomyces pastorianus
gagcatcaagttacagtggccttat

SEQ ID NO: 128515 - DNA, 25 bp, Saccharomyces pastorianus
tcggaccctccgttacaaattatga

SEQ ID NO: 128516 - DNA, 25 bp, Saccharomyces pastorianus
ggaggttcatcggtctctagtaata

SEQ ID NO: 128517 - DNA, 25 bp, Saccharomyces pastorianus
ctaagggttctgattccgctattaa

SEQ ID NO: 128518 - DNA, 25 bp, Saccharomyces pastorianus
atatgcgttgacagtccagcgttgc

SEQ ID NO: 128519 - DNA, 25 bp, Saccharomyces pastorianus
agtccagcgttgcacgagcatcaag

SEQ ID NO: 128520 - DNA, 25 bp, Saccharomyces pastorianus
ggccttatctcggaagtgtcttcaa

SEQ ID NO: 128521 - DNA, 25 bp, Saccharomyces pastorianus
tctaccggatgtcgctaatactgtt

SEQ ID NO: 128522 - DNA, 25 bp, Saccharomyces pastorianus
tgtttacattcttctctgtgaggcg

SEQ ID NO: 128523 - DNA, 25 bp, Saccharomyces pastorianus
atgttaactcaagcctggttgccta

SEQ ID NO: 128524 - DNA, 25 bp, Saccharomyces pastorianus
gtgtactccttagaaatcatgctca

SEQ ID NO: 128525 - DNA, 25 bp, Saccharomyces pastorianus
gtttgctactgattcctataaggtt

SEQ ID NO: 128526 - DNA, 25 bp, Saccharomyces pastorianus
taatactgatcgtgacctctaccgg

SEQ ID NO: 128527 - DNA, 25 bp, Saccharomyces pastorianus
ttgcctaagtaagttgcagtcgtta

SEQ ID NO: 128528 - DNA, 25 bp, Saccharomyces pastorianus
atcatgctcaagttccaaggattta

SEQ ID NO: 128529 - DNA, 25 bp, Saccharomyces pastorianus
atactgttagaatcgtccttatttg

SEQ ID NO: 128530 - DNA, 25 bp, Saccharomyces pastorianus
tcgttactcaacatagacctactgg

SEQ ID NO: 128531 - DNA, 25 bp, Saccharomyces pastorianus
tggttgcctacctgaagtttgctac

SEQ ID NO: 128532 - DNA, 25 bp, Saccharomyces pastorianus
atactgtacgcatgcttgagctagc

SEQ ID NO: 128533 - DNA, 25 bp, Saccharomyces pastorianus
tgaagatacaccttccgtttctgac

SEQ ID NO: 128534 - DNA, 25 bp, Saccharomyces pastorianus
aagccgactcaatggccagtgacgc

SEQ ID NO: 128535 - DNA, 25 bp, Saccharomyces pastorianus
gagctagctgcatactttacaaagg

SEQ ID NO: 128536 - DNA, 25 bp, Saccharomyces pastorianus
aaggcaaaactatccccaattcatc

SEQ ID NO: 128537 - DNA, 25 bp, Saccharomyces pastorianus
cattgaattggaacgccgctcatta

SEQ ID NO: 128538 - DNA, 25 bp, Saccharomyces pastorianus
aaattcgatatttgtgcagccacct

SEQ ID NO: 128539 - DNA, 25 bp, Saccharomyces pastorianus
ttccgtttctgacccattaacaggt

SEQ ID NO: 128540 - DNA, 25 bp, Saccharomyces pastorianus
caggcctcatattttgccggtgaat

SEQ ID NO: 128541 - DNA, 25 bp, Saccharomyces pastorianus
gactttgatccttatgctaaattcg

SEQ ID NO: 128542 - DNA, 25 bp, Saccharomyces pastorianus
acaagtggctatgtcccaacatttc

SEQ ID NO: 128543 - DNA, 25 bp, Saccharomyces pastorianus
gtgaacttcctgctcaattaggtta

SEQ ID NO: 128544 - DNA, 25 bp, Saccharomyces pastorianus
aagaattctaaactgcctgctgtcc

SEQ ID NO: 128545 - DNA, 25 bp, Saccharomyces pastorianus
agaccagtgatctcaaagccacttg

SEQ ID NO: 128546 - DNA, 25 bp, Saccharomyces pastorianus
gagcaaggcgaaattacctctccag

SEQ ID NO: 128547 - DNA, 25 bp, Saccharomyces pastorianus
ttgatgccgctgttcaagccttgag

SEQ ID NO: 128548 - DNA, 25 bp, Saccharomyces pastorianus
ctatagacgatgaaactccagcagt

SEQ ID NO: 128549 - DNA, 25 bp, Saccharomyces pastorianus
atacattcctagtacgccctgtgaa

SEQ ID NO: 128550 - DNA, 25 bp, Saccharomyces pastorianus
ggctgcttctgctttcttggagcaa

SEQ ID NO: 128551 - DNA, 25 bp, Saccharomyces pastorianus
taccagaccagatggatgcctccaa

SEQ ID NO: 128552 - DNA, 25 bp, Saccharomyces pastorianus
tagttgccgctggtgcctttgatgc

SEQ ID NO: 128553 - DNA, 25 bp, Saccharomyces pastorianus
ttacctctccagcacaggaagttga

SEQ ID NO: 128554 - DNA, 25 bp, Saccharomyces pastorianus
tacaggaaacgtttataatttacag

SEQ ID NO: 128555 - DNA, 25 bp, Saccharomyces pastorianus
ccggacggtaacacttttgatatct

SEQ ID NO: 128556 - DNA, 25 bp, Saccharomyces pastorianus
acagccggacggtaacacttttgat

SEQ ID NO: 128557 - DNA, 25 bp, Saccharomyces pastorianus
gacggtaacacttttgatatcttca

SEQ ID NO: 128558 - DNA, 25 bp, Saccharomyces pastorianus
gttccactcaatttacaggaaacgt

SEQ ID NO: 128559 - DNA, 25 bp, Saccharomyces pastorianus
cggtaacacttttgatatcttcaag

SEQ ID NO: 128560 - DNA, 25 bp, Saccharomyces pastorianus
gtatcacggaagactacggtttact

SEQ ID NO: 128561 - DNA, 25 bp, Saccharomyces pastorianus
cggtttactgattgcaaaagaattg

SEQ ID NO: 128562 - DNA, 25 bp, Saccharomyces pastorianus
cacggaagactacggtttactgatt

SEQ ID NO: 128563 - DNA, 25 bp, Saccharomyces pastorianus
cactcaatttacaggaaacgtttat

SEQ ID NO: 128564 - DNA, 25 bp, Saccharomyces pastorianus
agccggacggtaacacttttgatat

SEQ ID NO: 128565 - DNA, 25 bp, Saccharomyces pastorianus
gtaaggcgatactttcgtacgctcc

SEQ ID NO: 128566 - DNA, 25 bp, Saccharomyces pastorianus
aaggtgtttgcgcatcaacggccgt

SEQ ID NO: 128567 - DNA, 25 bp, Saccharomyces pastorianus
ttgagccccacctactataagtgta

SEQ ID NO: 128568 - DNA, 25 bp, Saccharomyces pastorianus
gagcccgcttatcttaagatctctg

SEQ ID NO: 128569 - DNA, 25 bp, Saccharomyces pastorianus
gttgcccttaggtgatatcgagccc

SEQ ID NO: 128570 - DNA, 25 bp, Saccharomyces pastorianus
tcgtacgctcctggattttcagata

SEQ ID NO: 128571 - DNA, 25 bp, Saccharomyces pastorianus
aatggcccaatgacctttatgcttt

SEQ ID NO: 128572 - DNA, 25 bp, Saccharomyces pastorianus
attacaccttgatttattgccagca

SEQ ID NO: 128573 - DNA, 25 bp, Saccharomyces pastorianus
gcttcaatcgcctgtgactaatcga

SEQ ID NO: 128574 - DNA, 25 bp, Saccharomyces pastorianus
tattgtgtgctacttggctgtggta

SEQ ID NO: 128575 - DNA, 25 bp, Saccharomyces pastorianus
ggttaacaccggttttgagcataca

SEQ ID NO: 128576 - DNA, 25 bp, Saccharomyces pastorianus
tacagcccaacgtcaccaagttaca

SEQ ID NO: 128577 - DNA, 25 bp, Saccharomyces pastorianus
gtctccagcctattccccaacatca

SEQ ID NO: 128578 - DNA, 25 bp, Saccharomyces pastorianus
tcctattccccaacatcaccttctt

SEQ ID NO: 128579 - DNA, 25 bp, Saccharomyces pastorianus
atcaccatcctattccccaacatca

SEQ ID NO: 128580 - DNA, 25 bp, Saccharomyces pastorianus
cacctctccaaactatagccctact

SEQ ID NO: 128581 - DNA, 25 bp, Saccharomyces pastorianus
atcgccttcatactctccaacatca

SEQ ID NO: 128582 - DNA, 25 bp, Saccharomyces pastorianus
tacatcgccttcatactctccaaca

SEQ ID NO: 128583 - DNA, 25 bp, Saccharomyces pastorianus
aagcgacagccctacgtgtccttct

SEQ ID NO: 128584 - DNA, 25 bp, Saccharomyces pastorianus
acagcccaacgtcaccaagttacag

SEQ ID NO: 128585 - DNA, 25 bp, Saccharomyces pastorianus
tacgtgtccttcttattctcctaca

SEQ ID NO: 128586 - DNA, 25 bp, Saccharomyces pastorianus
ttacagcccaacgtctccagcctat

SEQ ID NO: 128587 - DNA, 25 bp, Saccharomyces pastorianus
aggatctcctgcatattctccaaag

SEQ ID NO: 128588 - DNA, 25 bp, Saccharomyces pastorianus
gatctcctgcatattctccaaagca

SEQ ID NO: 128589 - DNA, 25 bp, Saccharomyces pastorianus
aggctacagcccaggatctcctgca

SEQ ID NO: 128590 - DNA, 25 bp, Saccharomyces pastorianus
aactatagccctacttcaccttctt

SEQ ID NO: 128591 - DNA, 25 bp, Saccharomyces pastorianus
caggatctcctgcatattctccaaa

SEQ ID NO: 128592 - DNA, 25 bp, Saccharomyces pastorianus
tctcctgcatattctccaaagcaag

SEQ ID NO: 128593 - DNA, 25 bp, Saccharomyces pastorianus
actatagccctacttcaccttctta

SEQ ID NO: 128594 - DNA, 25 bp, Saccharomyces pastorianus
tacagcccaggatctcctgcatatt

SEQ ID NO: 128595 - DNA, 25 bp, Saccharomyces pastorianus
tgcatattctccaaagcaagacgaa

SEQ ID NO: 128596 - DNA, 25 bp, Saccharomyces pastorianus
atctccaggctacagcccaggatct

SEQ ID NO: 128597 - DNA, 25 bp, Saccharomyces pastorianus
aacatctccaggctacagcccagga

SEQ ID NO: 128598 - DNA, 25 bp, Saccharomyces pastorianus
cacgtctccatttggtgcttatggt

SEQ ID NO: 128599 - DNA, 25 bp, Saccharomyces pastorianus
tacagcgtacggtggtgctgattat

SEQ ID NO: 128600 - DNA, 25 bp, Saccharomyces pastorianus
gtggcgtcacaccatacagtaacga

SEQ ID NO: 128601 - DNA, 25 bp, Saccharomyces pastorianus
agcacctacatctcccggatttgga

SEQ ID NO: 128602 - DNA, 25 bp, Saccharomyces pastorianus
atcggtaccggtgcatttgatgtga

SEQ ID NO: 128603 - DNA, 25 bp, Saccharomyces pastorianus
atgacgctatggctggaggatttac

SEQ ID NO: 128604 - DNA, 25 bp, Saccharomyces pastorianus
ttcgggttcaaatgacgctatggct

SEQ ID NO: 128605 - DNA, 25 bp, Saccharomyces pastorianus
aagtggtttggtcaatgcagatctt

SEQ ID NO: 128606 - DNA, 25 bp, Saccharomyces pastorianus
tcacctctggttgattcgggttcaa

SEQ ID NO: 128607 - DNA, 25 bp, Saccharomyces pastorianus
ggatttggagtctcctcaccaggct

SEQ ID NO: 128608 - DNA, 25 bp, Saccharomyces pastorianus
gattatggtgaagccacgtctccat

SEQ ID NO: 128609 - DNA, 25 bp, Saccharomyces pastorianus
taacgccgtggcgattgcgtatatt

SEQ ID NO: 128610 - DNA, 25 bp, Saccharomyces pastorianus
gagtgggtttgcacttctattcgca

SEQ ID NO: 128611 - DNA, 25 bp, Saccharomyces pastorianus
gctaatctagcgctggcatttaata

SEQ ID NO: 128612 - DNA, 25 bp, Saccharomyces pastorianus
gctggcatttaatactcgtttcgac

SEQ ID NO: 128613 - DNA, 25 bp, Saccharomyces pastorianus
gtgggtaatcactttctcgatcagt

SEQ ID NO: 128614 - DNA, 25 bp, Saccharomyces pastorianus
cactttctcgatcagtattgttaga

SEQ ID NO: 128615 - DNA, 25 bp, Saccharomyces pastorianus
aggaagctttatccgcttttctgtt

SEQ ID NO: 128616 - DNA, 25 bp, Saccharomyces pastorianus
atattatttacattgcacacgatga

SEQ ID NO: 128617 - DNA, 25 bp, Saccharomyces pastorianus
gaggaatccgttaagcaaactgaaa

SEQ ID NO: 128618 - DNA, 25 bp, Saccharomyces pastorianus
acacgatgaatttgctggtaaacct

SEQ ID NO: 128619 - DNA, 25 bp, Saccharomyces pastorianus
atggccatctgcgttaacgccgtgg

SEQ ID NO: 128620 - DNA, 25 bp, Saccharomyces pastorianus
atcggctgtcattctgcatacacta

SEQ ID NO: 128621 - DNA, 25 bp, Saccharomyces pastorianus
cacagtgccgccttatgttttagag

SEQ ID NO: 128622 - DNA, 25 bp, Saccharomyces pastorianus
agtttgcatctaccatcggctgtca

SEQ ID NO: 128623 - DNA, 25 bp, Saccharomyces pastorianus
aagacttcaggataagggcaccgtt

SEQ ID NO: 128624 - DNA, 25 bp, Saccharomyces pastorianus
ttacacgtttgtgcctaccacagtg

SEQ ID NO: 128625 - DNA, 25 bp, Saccharomyces pastorianus
gggcaccgttgatggaaatgttaca

SEQ ID NO: 128626 - DNA, 25 bp, Saccharomyces pastorianus
cttatgttttagaggcgcagtttga

SEQ ID NO: 128627 - DNA, 25 bp, Saccharomyces pastorianus
gttcaccactagactatccaaaatt

SEQ ID NO: 128628 - DNA, 25 bp, Saccharomyces pastorianus
gaggcgcagtttgataaattaagac

SEQ ID NO: 128629 - DNA, 25 bp, Saccharomyces pastorianus
aatacttacacgtttgtgcctacca

SEQ ID NO: 128630 - DNA, 25 bp, Saccharomyces pastorianus
gtcattctgcatacactagagacca

SEQ ID NO: 128631 - DNA, 25 bp, Saccharomyces pastorianus
tgcagcagagcatgtcacttcagtc

SEQ ID NO: 128632 - DNA, 25 bp, Saccharomyces pastorianus
tatgagcaccatttccaggaatcca

SEQ ID NO: 128633 - DNA, 25 bp, Saccharomyces pastorianus
tatttccagctagggagccatcacg

SEQ ID NO: 128634 - DNA, 25 bp, Saccharomyces pastorianus
gatgatcgatgttccaatgacgcta

SEQ ID NO: 128635 - DNA, 25 bp, Saccharomyces pastorianus
ctgtgatcatctctttttgtgcgga

SEQ ID NO: 128636 - DNA, 25 bp, Saccharomyces pastorianus
gtcacttcagtcttggtggccatga

SEQ ID NO: 128637 - DNA, 25 bp, Saccharomyces pastorianus
aacgttgttgaatctaccgggctat

SEQ ID NO: 128638 - DNA, 25 bp, Saccharomyces pastorianus
gtgcggattttctagtcggtacgat

SEQ ID NO: 128639 - DNA, 25 bp, Saccharomyces pastorianus
tggagggtgtcatgtctctagctat

SEQ ID NO: 128640 - DNA, 25 bp, Saccharomyces pastorianus
caggaatccacatcactctttgagt

SEQ ID NO: 128641 - DNA, 25 bp, Saccharomyces pastorianus
atcggttcctctttacaaattgcct

SEQ ID NO: 128642 - DNA, 25 bp, Saccharomyces pastorianus
tttcttggcaattataccgttggca

SEQ ID NO: 128643 - DNA, 25 bp, Saccharomyces pastorianus
ctaccccactattaactgttgcgaa

SEQ ID NO: 128644 - DNA, 25 bp, Saccharomyces pastorianus
gcgtcacccctgaattttctattag

SEQ ID NO: 128645 - DNA, 25 bp, Saccharomyces pastorianus
gcaatccaaagcacactgcatggag

SEQ ID NO: 128646 - DNA, 25 bp, Saccharomyces pastorianus
accgttggcagctatcttggctaat

SEQ ID NO: 128647 - DNA, 25 bp, Saccharomyces pastorianus
actatctcacacactgacatttctt

SEQ ID NO: 128648 - DNA, 25 bp, Saccharomyces pastorianus
taactgttgcgaacagtcatcccgc

SEQ ID NO: 128649 - DNA, 25 bp, Saccharomyces pastorianus
tggagagcagctgtgtatgatttac

SEQ ID NO: 128650 - DNA, 25 bp, Saccharomyces pastorianus
atggatgcaactaccccactattaa

SEQ ID NO: 128651 - DNA, 25 bp, Saccharomyces pastorianus
tattagtatttgttcctttaggtct

SEQ ID NO: 128652 - DNA, 25 bp, Saccharomyces pastorianus
gtatattttgaaagcgtcacccctg

SEQ ID NO: 128653 - DNA, 25 bp, Saccharomyces pastorianus
tttgattgcaatggcatttttctat

SEQ ID NO: 128654 - DNA, 25 bp, Saccharomyces pastorianus
attttgattgcaatggcatttttct

SEQ ID NO: 128655 - DNA, 25 bp, Saccharomyces pastorianus
gattgcaatggcatttttctattat

SEQ ID NO: 128656 - DNA, 25 bp, Saccharomyces pastorianus
ttttgattgcaatggcatttttcta

SEQ ID NO: 128657 - DNA, 25 bp, Saccharomyces pastorianus
tgcaatggcatttttctattatcca

SEQ ID NO: 128658 - DNA, 25 bp, Saccharomyces pastorianus
tgattgcaatggcatttttctatta

SEQ ID NO: 128659 - DNA, 25 bp, Saccharomyces pastorianus
tatattttgattgcaatggcatttt

SEQ ID NO: 128660 - DNA, 25 bp, Saccharomyces pastorianus
tattttgattgcaatggcatttttc

SEQ ID NO: 128661 - DNA, 25 bp, Saccharomyces pastorianus
ttgcaatggcatttttctattatcc

SEQ ID NO: 128662 - DNA, 25 bp, Saccharomyces pastorianus
gtatattttgattgcaatggcattt

SEQ ID NO: 128663 - DNA, 25 bp, Saccharomyces pastorianus
attgcaatggcatttttctattatc

SEQ ID NO: 128664 - DNA, 25 bp, Saccharomyces pastorianus
tggagcaggtgctgcatttggttct

SEQ ID NO: 128665 - DNA, 25 bp, Saccharomyces pastorianus
agaccgctaaacgttctgtttcaga

SEQ ID NO: 128666 - DNA, 25 bp, Saccharomyces pastorianus
accagaagtagatcctgttccatat

SEQ ID NO: 128667 - DNA, 25 bp, Saccharomyces pastorianus
gttagagttgactgcgatcgccaaa

SEQ ID NO: 128668 - DNA, 25 bp, Saccharomyces pastorianus
aagacctggcagattggatcaatta

SEQ ID NO: 128669 - DNA, 25 bp, Saccharomyces pastorianus
ggagcatttcgcagaagctatgaag

SEQ ID NO: 128670 - DNA, 25 bp, Saccharomyces pastorianus
gtttctctggtgctgatttactcta

SEQ ID NO: 128671 - DNA, 25 bp, Saccharomyces pastorianus
gatcgccaaagccactcaaggtttc

SEQ ID NO: 128672 - DNA, 25 bp, Saccharomyces pastorianus
tgtgttcgtgattggtgccaccaat

SEQ ID NO: 128673 - DNA, 25 bp, Saccharomyces pastorianus
ggtactacggctacggacaatgcta

SEQ ID NO: 128674 - DNA, 25 bp, Saccharomyces pastorianus
ttcagatgctgaattgcgtcgttat

SEQ ID NO: 128675 - DNA, 25 bp, Saccharomyces pastorianus
gtgttaccaattgctgattcgatcg

SEQ ID NO: 128676 - DNA, 25 bp, Saccharomyces pastorianus
aattagaagacggagcatgcaggat

SEQ ID NO: 128677 - DNA, 25 bp, Saccharomyces pastorianus
gctattaattctaacaccatggaca

SEQ ID NO: 128678 - DNA, 25 bp, Saccharomyces pastorianus
aggctgggtgatttagttacaattc

SEQ ID NO: 128679 - DNA, 25 bp, Saccharomyces pastorianus
gctactagaatttctgtgttaccaa

SEQ ID NO: 128680 - DNA, 25 bp, Saccharomyces pastorianus
ttacaattcatccttgccccgatat

SEQ ID NO: 128681 - DNA, 25 bp, Saccharomyces pastorianus
gcaggataaaccgtgtagttcgtaa

SEQ ID NO: 128682 - DNA, 25 bp, Saccharomyces pastorianus
acaatttacgtattaggctgggtga

SEQ ID NO: 128683 - DNA, 25 bp, Saccharomyces pastorianus
ctgtcttaattgtgttgatcgatga

SEQ ID NO: 128684 - DNA, 25 bp, Saccharomyces pastorianus
cctcgggtgtcgaccctcgtgagga

SEQ ID NO: 128685 - DNA, 25 bp, Saccharomyces pastorianus
gccccgatatcaaatacgctactag

SEQ ID NO: 128686 - DNA, 25 bp, Saccharomyces pastorianus
gtccacttccatttgattcctaaga

SEQ ID NO: 128687 - DNA, 25 bp, Saccharomyces pastorianus
cttcgataagttgggcagctacaca

SEQ ID NO: 128688 - DNA, 25 bp, Saccharomyces pastorianus
atcaagaagtcgaccacgtccactt

SEQ ID NO: 128689 - DNA, 25 bp, Saccharomyces pastorianus
ggacacttataatgtgttgcagaat

SEQ ID NO: 128690 - DNA, 25 bp, Saccharomyces pastorianus
ggtggccagcccaagaaacggactt

SEQ ID NO: 128691 - DNA, 25 bp, Saccharomyces pastorianus
ggcaatgaagttggacacttataat

SEQ ID NO: 128692 - DNA, 25 bp, Saccharomyces pastorianus
gccagcccaagaaacggacttcgat

SEQ ID NO: 128693 - DNA, 25 bp, Saccharomyces pastorianus
gaataatggtaaaattgcgcatcaa

SEQ ID NO: 128694 - DNA, 25 bp, Saccharomyces pastorianus
ttgcgcatcaagaagtcgaccacgt

SEQ ID NO: 128695 - DNA, 25 bp, Saccharomyces pastorianus
tttgattgtagggtggccagcccaa

SEQ ID NO: 128696 - DNA, 25 bp, Saccharomyces pastorianus
aacggacttcgataagttgggcagc

SEQ ID NO: 128697 - DNA, 25 bp, Saccharomyces pastorianus
aaaaatgtctgctcctgctaggctt

SEQ ID NO: 128698 - DNA, 25 bp, Saccharomyces pastorianus
gctaggcttgatgttgcctgtattt

SEQ ID NO: 128699 - DNA, 25 bp, Saccharomyces pastorianus
tcctgctaggcttgatgttgcctgt

SEQ ID NO: 128700 - DNA, 25 bp, Saccharomyces pastorianus
ctgctcctgctaggcttgatgttgc

SEQ ID NO: 128701 - DNA, 25 bp, Saccharomyces pastorianus
caacaaaaatgtctgctcctgctag

SEQ ID NO: 128702 - DNA, 25 bp, Saccharomyces pastorianus
gtctgctcctgctaggcttgatgtt

SEQ ID NO: 128703 - DNA, 25 bp, Saccharomyces pastorianus
aaatgtctgctcctgctaggcttga

SEQ ID NO: 128704 - DNA, 25 bp, Saccharomyces pastorianus
tcggcaccgtacctaacaacaacaa

SEQ ID NO: 128705 - DNA, 25 bp, Saccharomyces pastorianus
atgtctgctcctgctaggcttgatg

SEQ ID NO: 128706 - DNA, 25 bp, Saccharomyces pastorianus
acaaaaatgtctgctcctgctaggc

SEQ ID NO: 128707 - DNA, 25 bp, Saccharomyces pastorianus
gcttgatgttgcctgtattttttgc

SEQ ID NO: 128708 - DNA, 25 bp, Saccharomyces pastorianus
gacatattcattgcgctctgtcatt

SEQ ID NO: 128709 - DNA, 25 bp, Saccharomyces pastorianus
gacaatgtgagccttgacgaaccaa

SEQ ID NO: 128710 - DNA, 25 bp, Saccharomyces pastorianus
caacacccggtgtatttatgttatt

SEQ ID NO: 128711 - DNA, 25 bp, Saccharomyces pastorianus
gttcactacggtacccataattatg

SEQ ID NO: 128712 - DNA, 25 bp, Saccharomyces pastorianus
agctccacctatcaattatgctagg

SEQ ID NO: 128713 - DNA, 25 bp, Saccharomyces pastorianus
gctctgtcattgttcactacggtac

SEQ ID NO: 128714 - DNA, 25 bp, Saccharomyces pastorianus
atgagactgtgtacgttgtggacga

SEQ ID NO: 128715 - DNA, 25 bp, Saccharomyces pastorianus
aagatgttataccagctccacctat

SEQ ID NO: 128716 - DNA, 25 bp, Saccharomyces pastorianus
gaaaccgatgctttagggaatacaa

SEQ ID NO: 128717 - DNA, 25 bp, Saccharomyces pastorianus
gttccagccactccattgacatatt

SEQ ID NO: 128718 - DNA, 25 bp, Saccharomyces pastorianus
tgaagtcctttcaacacccggtgta

SEQ ID NO: 128719 - DNA, 25 bp, Saccharomyces pastorianus
tggcactgtttacattccaactgaa

SEQ ID NO: 128720 - DNA, 25 bp, Saccharomyces pastorianus
actagataccactccagttgcgaaa

SEQ ID NO: 128721 - DNA, 25 bp, Saccharomyces pastorianus
aactgaacagattgatcctaactct

SEQ ID NO: 128722 - DNA, 25 bp, Saccharomyces pastorianus
gtaggtcaacttaaccttggtgaag

SEQ ID NO: 128723 - DNA, 25 bp, Saccharomyces pastorianus
gttgcgaaatcagaattacccgatg

SEQ ID NO: 128724 - DNA, 25 bp, Saccharomyces pastorianus
acccgatgatgctttagtaggtcaa

SEQ ID NO: 128725 - DNA, 25 bp, Saccharomyces pastorianus
aaaatattcttcttggctacgacca

SEQ ID NO: 128726 - DNA, 25 bp, Saccharomyces pastorianus
ttcttccagaacatactagccgagt

SEQ ID NO: 128727 - DNA, 25 bp, Saccharomyces pastorianus
aaccttggtgaagttggcactgttt

SEQ ID NO: 128728 - DNA, 25 bp, Saccharomyces pastorianus
gaggacgcgcaagaattcttccaga

SEQ ID NO: 128729 - DNA, 25 bp, Saccharomyces pastorianus
tggctacgaccaagaggacgcgcaa

SEQ ID NO: 128730 - DNA, 25 bp, Saccharomyces pastorianus
ggaagctttatgtggacgctgtcca

SEQ ID NO: 128731 - DNA, 25 bp, Saccharomyces pastorianus
aaccctgaatcgaacattcctactt

SEQ ID NO: 128732 - DNA, 25 bp, Saccharomyces pastorianus
aatggccgcgtaaaggctctcgaac

SEQ ID NO: 128733 - DNA, 25 bp, Saccharomyces pastorianus
tcctgtatgagattagagccctata

SEQ ID NO: 128734 - DNA, 25 bp, Saccharomyces pastorianus
aatttcgcggattcggcagattatg

SEQ ID NO: 128735 - DNA, 25 bp, Saccharomyces pastorianus
tccgttagcttgttaaaccctgaat

SEQ ID NO: 128736 - DNA, 25 bp, Saccharomyces pastorianus
gtccactctatcattgccttatcga

SEQ ID NO: 128737 - DNA, 25 bp, Saccharomyces pastorianus
gatttaacttcctctaatttcgcgg

SEQ ID NO: 128738 - DNA, 25 bp, Saccharomyces pastorianus
agccctatatactccatttctactg

SEQ ID NO: 128739 - DNA, 25 bp, Saccharomyces pastorianus
aaatttatttcggaagccctggcat

SEQ ID NO: 128740 - DNA, 25 bp, Saccharomyces pastorianus
aagccctggcatttacctcattggt

SEQ ID NO: 128741 - DNA, 25 bp, Saccharomyces pastorianus
atgccccatattatgtgaacctggt

SEQ ID NO: 128742 - DNA, 25 bp, Saccharomyces pastorianus
gcatctcttaaaacatttcagtgga

SEQ ID NO: 128743 - DNA, 25 bp, Saccharomyces pastorianus
tttcaaaactttgagttggccatat

SEQ ID NO: 128744 - DNA, 25 bp, Saccharomyces pastorianus
aacatttcagtggaatggaccatgt

SEQ ID NO: 128745 - DNA, 25 bp, Saccharomyces pastorianus
gagttggccatataggcatctctta

SEQ ID NO: 128746 - DNA, 25 bp, Saccharomyces pastorianus
ggaatggaccatgtaacgtcaacca

SEQ ID NO: 128747 - DNA, 25 bp, Saccharomyces pastorianus
ggccatataggcatctcttaaaaca

SEQ ID NO: 128748 - DNA, 25 bp, Saccharomyces pastorianus
taggcatctcttaaaacatttcagt

SEQ ID NO: 128749 - DNA, 25 bp, Saccharomyces pastorianus
ccccatattatgtgaacctggttcc

SEQ ID NO: 128750 - DNA, 25 bp, Saccharomyces pastorianus
aatggaccatgtaacgtcaaccagc

SEQ ID NO: 128751 - DNA, 25 bp, Saccharomyces pastorianus
aaactttgagttggccatataggca

SEQ ID NO: 128752 - DNA, 25 bp, Saccharomyces pastorianus
gaagtttgcccacggaatgtaataa

SEQ ID NO: 128753 - DNA, 25 bp, Saccharomyces pastorianus
tgtccctacaccatctaagttattg

SEQ ID NO: 128754 - DNA, 25 bp, Saccharomyces pastorianus
cactactggtgtgcccgggaaaaat

SEQ ID NO: 128755 - DNA, 25 bp, Saccharomyces pastorianus
tggcactagcgataatctctgcgat

SEQ ID NO: 128756 - DNA, 25 bp, Saccharomyces pastorianus
tcacaagtgtatgagcaggcatttc

SEQ ID NO: 128757 - DNA, 25 bp, Saccharomyces pastorianus
agttattggctcctgacatcatacc

SEQ ID NO: 128758 - DNA, 25 bp, Saccharomyces pastorianus
atatgtttattgatgtccctacacc

SEQ ID NO: 128759 - DNA, 25 bp, Saccharomyces pastorianus
gcgataatctctgcgatggagcata

SEQ ID NO: 128760 - DNA, 25 bp, Saccharomyces pastorianus
taaaaacactactggtgtgcccggg

SEQ ID NO: 128761 - DNA, 25 bp, Saccharomyces pastorianus
ggagcataatcatctgcaaacacta

SEQ ID NO: 128762 - DNA, 25 bp, Saccharomyces pastorianus
gcatttcagaagtttgcccacggaa

SEQ ID NO: 128763 - DNA, 25 bp, Saccharomyces pastorianus
tgcttcagtcctcggagaactgact

SEQ ID NO: 128764 - DNA, 25 bp, Saccharomyces pastorianus
ggtgcttaccgaatcatcagtacat

SEQ ID NO: 128765 - DNA, 25 bp, Saccharomyces pastorianus
tcgtatggtgcatcaaaaggagcaa

SEQ ID NO: 128766 - DNA, 25 bp, Saccharomyces pastorianus
atcatttcctacttttgctcaggta

SEQ ID NO: 128767 - DNA, 25 bp, Saccharomyces pastorianus
gaatcatcagtacatttgcagaaga

SEQ ID NO: 128768 - DNA, 25 bp, Saccharomyces pastorianus
gtggcagatattcaatcatttccta

SEQ ID NO: 128769 - DNA, 25 bp, Saccharomyces pastorianus
aattaacattgcttcagtcctcgga

SEQ ID NO: 128770 - DNA, 25 bp, Saccharomyces pastorianus
cataaacttaataggtgcttaccga

SEQ ID NO: 128771 - DNA, 25 bp, Saccharomyces pastorianus
ataatgctggtgttgctcacatcaa

SEQ ID NO: 128772 - DNA, 25 bp, Saccharomyces pastorianus
ggaggtagaacaattgatcgacata

SEQ ID NO: 128773 - DNA, 25 bp, Saccharomyces pastorianus
agaactgactcctgcaaggctgaca

SEQ ID NO: 128774 - DNA, 25 bp, Saccharomyces pastorianus
tggagcttgggaaaccgttctggat

SEQ ID NO: 128775 - DNA, 25 bp, Saccharomyces pastorianus
atcattgatcttgctaggaaccgaa

SEQ ID NO: 128776 - DNA, 25 bp, Saccharomyces pastorianus
gaaaccgttctggatctggacaata

SEQ ID NO: 128777 - DNA, 25 bp, Saccharomyces pastorianus
ttaggtgtgggactgcttactgtac

SEQ ID NO: 128778 - DNA, 25 bp, Saccharomyces pastorianus
gaatgatgtcgttacacgttctgaa

SEQ ID NO: 128779 - DNA, 25 bp, Saccharomyces pastorianus
gctagacaacaatttccaattccct

SEQ ID NO: 128780 - DNA, 25 bp, Saccharomyces pastorianus
atgaatattcaaacggcaaccgcag

SEQ ID NO: 128781 - DNA, 25 bp, Saccharomyces pastorianus
ataagccgccaaacctgggaggtat

SEQ ID NO: 128782 - DNA, 25 bp, Saccharomyces pastorianus
atgcccatggaggaagttgccctag

SEQ ID NO: 128783 - DNA, 25 bp, Saccharomyces pastorianus
tgacacttctccactgctaacaaaa

SEQ ID NO: 128784 - DNA, 25 bp, Saccharomyces pastorianus
atcttcattagtcgataagccgcca

SEQ ID NO: 128785 - DNA, 25 bp, Saccharomyces pastorianus
acatgattgcccgtacatttctgag

SEQ ID NO: 128786 - DNA, 25 bp, Saccharomyces pastorianus
attcaaagcctacctatcggatcac

SEQ ID NO: 128787 - DNA, 25 bp, Saccharomyces pastorianus
ggttcatttcctcaaaggttgttga

SEQ ID NO: 128788 - DNA, 25 bp, Saccharomyces pastorianus
agattcatttgcacgttagttccta

SEQ ID NO: 128789 - DNA, 25 bp, Saccharomyces pastorianus
aatattcggtcaatatcgtgccggg

SEQ ID NO: 128790 - DNA, 25 bp, Saccharomyces pastorianus
gttagttcctaacgcagcttcaaac

SEQ ID NO: 128791 - DNA, 25 bp, Saccharomyces pastorianus
accggtgtttgtagttagcgcagaa

SEQ ID NO: 128792 - DNA, 25 bp, Saccharomyces pastorianus
ggaggatcatagcaaaccggtgttt

SEQ ID NO: 128793 - DNA, 25 bp, Saccharomyces pastorianus
aggattatctcttctcattgctgga

SEQ ID NO: 128794 - DNA, 25 bp, Saccharomyces pastorianus
gtacatttctgagtctgttgtcgaa

SEQ ID NO: 128795 - DNA, 25 bp, Saccharomyces pastorianus
ggtaaggcatttttctaattctcta

SEQ ID NO: 128796 - DNA, 25 bp, Saccharomyces pastorianus
gtggaccgctgttcagtgtttagaa

SEQ ID NO: 128797 - DNA, 25 bp, Saccharomyces pastorianus
gaagtttcttcctttatgacgtata

SEQ ID NO: 128798 - DNA, 25 bp, Saccharomyces pastorianus
agagattggcccgaagtttcttcct

SEQ ID NO: 128799 - DNA, 25 bp, Saccharomyces pastorianus
ggaaaaggttcattgctgctagcga

SEQ ID NO: 128800 - DNA, 25 bp, Saccharomyces pastorianus
cacatcggctattgatatctggtca

SEQ ID NO: 128801 - DNA, 25 bp, Saccharomyces pastorianus
ttattattttcacctgatggccaga

SEQ ID NO: 128802 - DNA, 25 bp, Saccharomyces pastorianus
gtaccattgccacagaaatttcatt

SEQ ID NO: 128803 - DNA, 25 bp, Saccharomyces pastorianus
tatctggtcagtaggcgttatattc

SEQ ID NO: 128804 - DNA, 25 bp, Saccharomyces pastorianus
aaatttcattttgcacagggatctg

SEQ ID NO: 128805 - DNA, 25 bp, Saccharomyces pastorianus
aacattcagggccttagggacacct

SEQ ID NO: 128806 - DNA, 25 bp, Saccharomyces pastorianus
ataccggccccacatgagatactga

SEQ ID NO: 128807 - DNA, 25 bp, Saccharomyces pastorianus
caatgataaatgtctttcttgaaag

SEQ ID NO: 128808 - DNA, 25 bp, Saccharomyces pastorianus
gtttctctggatttttcgattgctg

SEQ ID NO: 128809 - DNA, 25 bp, Saccharomyces pastorianus
gagcccatgaaagccaaagccttgc

SEQ ID NO: 128810 - DNA, 25 bp, Saccharomyces pastorianus
ctggatttttcgattgctgtgtgaa

SEQ ID NO: 128811 - DNA, 25 bp, Saccharomyces pastorianus
taaaggtgcacgagattgcctagaa

SEQ ID NO: 128812 - DNA, 25 bp, Saccharomyces pastorianus
aacgggtatggaaataatggacttg

SEQ ID NO: 128813 - DNA, 25 bp, Saccharomyces pastorianus
gcacgagattgcctagaaagcgtaa

SEQ ID NO: 128814 - DNA, 25 bp, Saccharomyces pastorianus
aagccttgctagaaaattgtgcatc

SEQ ID NO: 128815 - DNA, 25 bp, Saccharomyces pastorianus
gagttcagagcccatgaaagccaaa

SEQ ID NO: 128816 - DNA, 25 bp, Saccharomyces pastorianus
aatggacttggaatgtttctctgga

SEQ ID NO: 128817 - DNA, 25 bp, Saccharomyces pastorianus
gaaagaatggttcaaaacgggtatg

SEQ ID NO: 128818 - DNA, 25 bp, Saccharomyces pastorianus
gatgcgaaacgtcttgataactcta

SEQ ID NO: 128819 - DNA, 25 bp, Saccharomyces pastorianus
aatacccctatataaggagttcaga

SEQ ID NO: 128820 - DNA, 25 bp, Saccharomyces pastorianus
gcagaggtttgtcagtaagtttgtt

SEQ ID NO: 128821 - DNA, 25 bp, Saccharomyces pastorianus
tcaagagattttcccgaagaaacgt

SEQ ID NO: 128822 - DNA, 25 bp, Saccharomyces pastorianus
aaatgtacccgatatttctgcaggt

SEQ ID NO: 128823 - DNA, 25 bp, Saccharomyces pastorianus
cgcagaacaaattcgtccacaaaga

SEQ ID NO: 128824 - DNA, 25 bp, Saccharomyces pastorianus
gatacaaggcttacataccatgaaa

SEQ ID NO: 128825 - DNA, 25 bp, Saccharomyces pastorianus
atcccatggaggaagaaatacccct

SEQ ID NO: 128826 - DNA, 25 bp, Saccharomyces pastorianus
gtcttgataactctaaggacgcaga

SEQ ID NO: 128827 - DNA, 25 bp, Saccharomyces pastorianus
taagtttgtttccacaccaccagta

SEQ ID NO: 128828 - DNA, 25 bp, Saccharomyces pastorianus
tattccagttagatacaaggcttac

SEQ ID NO: 128829 - DNA, 25 bp, Saccharomyces pastorianus
gtggactatgtcattatcggtggta

SEQ ID NO: 128830 - DNA, 25 bp, Saccharomyces pastorianus
aaattacacaaatccacagccgcac

SEQ ID NO: 128831 - DNA, 25 bp, Saccharomyces pastorianus
acaatattcaagtggattcgcgcta

SEQ ID NO: 128832 - DNA, 25 bp, Saccharomyces pastorianus
gtgaaggccctctttgttcaaactg

SEQ ID NO: 128833 - DNA, 25 bp, Saccharomyces pastorianus
tatcaaagacgttagccccaaatta

SEQ ID NO: 128834 - DNA, 25 bp, Saccharomyces pastorianus
ttggtgacaaacaggcgaacggtat

SEQ ID NO: 128835 - DNA, 25 bp, Saccharomyces pastorianus
gagcagaagatccattatttgtact

SEQ ID NO: 128836 - DNA, 25 bp, Saccharomyces pastorianus
gtggattcgcgctattatttaacta

SEQ ID NO: 128837 - DNA, 25 bp, Saccharomyces pastorianus
gccaaaggtgcgctggtaacttaca

SEQ ID NO: 128838 - DNA, 25 bp, Saccharomyces pastorianus
gttcaaactgtctagcaaggtctgg

SEQ ID NO: 128839 - DNA, 25 bp, Saccharomyces pastorianus
gcacgccgttttggctgaacgtatg

SEQ ID NO: 128840 - DNA, 25 bp, Saccharomyces pastorianus
gacgaggatactccccaattggaaa

SEQ ID NO: 128841 - DNA, 25 bp, Saccharomyces pastorianus
gatcgatgacgaggatactccccaa

SEQ ID NO: 128842 - DNA, 25 bp, Saccharomyces pastorianus
agagattattccgagtgattctttt

SEQ ID NO: 128843 - DNA, 25 bp, Saccharomyces pastorianus
atggtgttggaagtgaacctgtttc

SEQ ID NO: 128844 - DNA, 25 bp, Saccharomyces pastorianus
acggcaatcaatagatcatggtgtt

SEQ ID NO: 128845 - DNA, 25 bp, Saccharomyces pastorianus
tcccatggttgatgtgaagatcgat

SEQ ID NO: 128846 - DNA, 25 bp, Saccharomyces pastorianus
gcttcaaagcaaaggatacagattt

SEQ ID NO: 128847 - DNA, 25 bp, Saccharomyces pastorianus
gatcccttcccatggttgatgtgaa

SEQ ID NO: 128848 - DNA, 25 bp, Saccharomyces pastorianus
gtgaaaaaagatcccttcccatggt

SEQ ID NO: 128849 - DNA, 25 bp, Saccharomyces pastorianus
tataatagtcaaggcttcaaagcaa

SEQ ID NO: 128850 - DNA, 25 bp, Saccharomyces pastorianus
gtgaacctgtttcaacaatagagat

SEQ ID NO: 128851 - DNA, 25 bp, Saccharomyces pastorianus
ggtttattctggactaatcctgaca

SEQ ID NO: 128852 - DNA, 25 bp, Saccharomyces pastorianus
gggtaaattgccatgcttagccatt

SEQ ID NO: 128853 - DNA, 25 bp, Saccharomyces pastorianus
gatttcagctaactctgtctatggt

SEQ ID NO: 128854 - DNA, 25 bp, Saccharomyces pastorianus
gcatacttcccttaccttttgataa

SEQ ID NO: 128855 - DNA, 25 bp, Saccharomyces pastorianus
gaagctgccaaatatgtctccactc

SEQ ID NO: 128856 - DNA, 25 bp, Saccharomyces pastorianus
tagccatttcttcatctgttactgc

SEQ ID NO: 128857 - DNA, 25 bp, Saccharomyces pastorianus
aagcacgatgccgttgtggtttacg

SEQ ID NO: 128858 - DNA, 25 bp, Saccharomyces pastorianus
ctgttactgcttatggtcgtaccat

SEQ ID NO: 128859 - DNA, 25 bp, Saccharomyces pastorianus
ggtgacactgattccgttatggtaa

SEQ ID NO: 128860 - DNA, 25 bp, Saccharomyces pastorianus
tatggatcttggtacggaagctgcc

SEQ ID NO: 128861 - DNA, 25 bp, Saccharomyces pastorianus
tctccactctattcaaacatccgat

SEQ ID NO: 128862 - DNA, 25 bp, Saccharomyces pastorianus
ggttttcctccattcagtgatcaat

SEQ ID NO: 128863 - DNA, 25 bp, Saccharomyces pastorianus
aagtatgcgttttactctccgtact

SEQ ID NO: 128864 - DNA, 25 bp, Saccharomyces pastorianus
gatgaagctttgaaccacccttggt

SEQ ID NO: 128865 - DNA, 25 bp, Saccharomyces pastorianus
atgtctgtttatgtggttttcctcc

SEQ ID NO: 128866 - DNA, 25 bp, Saccharomyces pastorianus
gcgcccgaagtcctcacaaagaaag

SEQ ID NO: 128867 - DNA, 25 bp, Saccharomyces pastorianus
ggcgcgaaaatccaagtcaagtcca

SEQ ID NO: 128868 - DNA, 25 bp, Saccharomyces pastorianus
acacactttgtggtacaccttctta

SEQ ID NO: 128869 - DNA, 25 bp, Saccharomyces pastorianus
tcttttggtcctaaatcctgatgaa

SEQ ID NO: 128870 - DNA, 25 bp, Saccharomyces pastorianus
tacaccttcttatgtagcgcccgaa

SEQ ID NO: 128871 - DNA, 25 bp, Saccharomyces pastorianus
gtcaagtccaactaggcccatggga

SEQ ID NO: 128872 - DNA, 25 bp, Saccharomyces pastorianus
agcaacaaagctcggtctcattaga

SEQ ID NO: 128873 - DNA, 25 bp, Saccharomyces pastorianus
actgagtgagcctgacatctcgact

SEQ ID NO: 128874 - DNA, 25 bp, Saccharomyces pastorianus
gcaacgaagtaataagcccagctca

SEQ ID NO: 128875 - DNA, 25 bp, Saccharomyces pastorianus
aagcccagctcagaatacacttgtc

SEQ ID NO: 128876 - DNA, 25 bp, Saccharomyces pastorianus
gatgtaactgactcttcattcaaaa

SEQ ID NO: 128877 - DNA, 25 bp, Saccharomyces pastorianus
gtcgtgcgacgttatactgagtgag

SEQ ID NO: 128878 - DNA, 25 bp, Saccharomyces pastorianus
agaatacacttgtctgggccatctg

SEQ ID NO: 128879 - DNA, 25 bp, Saccharomyces pastorianus
tctggtgaacttaatacccggaaag

SEQ ID NO: 128880 - DNA, 25 bp, Saccharomyces pastorianus
gtctgggccatctggtgaacttaat

SEQ ID NO: 128881 - DNA, 25 bp, Saccharomyces pastorianus
aatcggtagaagtaggtcgtgcgac

SEQ ID NO: 128882 - DNA, 25 bp, Saccharomyces pastorianus
agcactctggtgatgtaactgactc

SEQ ID NO: 128883 - DNA, 25 bp, Saccharomyces pastorianus
atagaaacgttactacaatcggtag

SEQ ID NO: 128884 - DNA, 25 bp, Saccharomyces pastorianus
gaaactccgaatcaggatgccacat

SEQ ID NO: 128885 - DNA, 25 bp, Saccharomyces pastorianus
ttgatgccatgaaagctgtcgctga

SEQ ID NO: 128886 - DNA, 25 bp, Saccharomyces pastorianus
gcttttagacttcaacacggcgcta

SEQ ID NO: 128887 - DNA, 25 bp, Saccharomyces pastorianus
gaggcttataacaacagatcgcttt

SEQ ID NO: 128888 - DNA, 25 bp, Saccharomyces pastorianus
atgctgaaccttattgatgacgtaa

SEQ ID NO: 128889 - DNA, 25 bp, Saccharomyces pastorianus
aaacgtaccagtcccgaggcattga

SEQ ID NO: 128890 - DNA, 25 bp, Saccharomyces pastorianus
taatcggtctggatactcaacaagt

SEQ ID NO: 128891 - DNA, 25 bp, Saccharomyces pastorianus
atttgactacgcataattcctacga

SEQ ID NO: 128892 - DNA, 25 bp, Saccharomyces pastorianus
taatggttggctctacgtttacgaa

SEQ ID NO: 128893 - DNA, 25 bp, Saccharomyces pastorianus
gatgccacatacgactctgcattag

SEQ ID NO: 128894 - DNA, 25 bp, Saccharomyces pastorianus
aaaactgcattttcgtatttcttcg

SEQ ID NO: 128895 - DNA, 25 bp, Saccharomyces pastorianus
tcagcgaacattctccactgattta

SEQ ID NO: 128896 - DNA, 25 bp, Saccharomyces pastorianus
gtatgtttctatttcttcagcgaac

SEQ ID NO: 128897 - DNA, 25 bp, Saccharomyces pastorianus
ggatggtcgagtaacctgtgtaaga

SEQ ID NO: 128898 - DNA, 25 bp, Saccharomyces pastorianus
tccaagtggttaggaagctgggact

SEQ ID NO: 128899 - DNA, 25 bp, Saccharomyces pastorianus
gttgtatgtttctatttcttcagcg

SEQ ID NO: 128900 - DNA, 25 bp, Saccharomyces pastorianus
cactgatttatgctactggatggtc

SEQ ID NO: 128901 - DNA, 25 bp, Saccharomyces pastorianus
ttgcaattcactattactatccgat

SEQ ID NO: 128902 - DNA, 25 bp, Saccharomyces pastorianus
agctgggacttttattgcaattcac

SEQ ID NO: 128903 - DNA, 25 bp, Saccharomyces pastorianus
cctgtgtaagaggtccaagtggtta

SEQ ID NO: 128904 - DNA, 25 bp, Saccharomyces pastorianus
tatttcttcagcgaacattctccac

SEQ ID NO: 128905 - DNA, 25 bp, Saccharomyces pastorianus
gctactggatggtcgagtaacctgt

SEQ ID NO: 128906 - DNA, 25 bp, Saccharomyces pastorianus
aacttactgatgtcaaccctgtcta

SEQ ID NO: 128907 - DNA, 25 bp, Saccharomyces pastorianus
cccactcagacttttaccatacaaa

SEQ ID NO: 128908 - DNA, 25 bp, Saccharomyces pastorianus
tgctcttcgggactacatattgtac

SEQ ID NO: 128909 - DNA, 25 bp, Saccharomyces pastorianus
gaatggtctagtgctcgtcaattgc

SEQ ID NO: 128910 - DNA, 25 bp, Saccharomyces pastorianus
tcggctgccattcttgaagcttttg

SEQ ID NO: 128911 - DNA, 25 bp, Saccharomyces pastorianus
agttgcactcctaatgattctccac

SEQ ID NO: 128912 - DNA, 25 bp, Saccharomyces pastorianus
gcttcaacaaacatgctcttcggga

SEQ ID NO: 128913 - DNA, 25 bp, Saccharomyces pastorianus
cctattaggactggctgttgcggaa

SEQ ID NO: 128914 - DNA, 25 bp, Saccharomyces pastorianus
agaccgcctaattggatcatcgaaa

SEQ ID NO: 128915 - DNA, 25 bp, Saccharomyces pastorianus
gaaagttcatacagttgcactccta

SEQ ID NO: 128916 - DNA, 25 bp, Saccharomyces pastorianus
tattaagtgtactccagaccgccta

SEQ ID NO: 128917 - DNA, 25 bp, Saccharomyces pastorianus
gatactctatcatctgcaatgggta

SEQ ID NO: 128918 - DNA, 25 bp, Saccharomyces pastorianus
gaggcatttctcaattatccgacaa

SEQ ID NO: 128919 - DNA, 25 bp, Saccharomyces pastorianus
cactcactccctatgtggcgaagaa

SEQ ID NO: 128920 - DNA, 25 bp, Saccharomyces pastorianus
gaaagtgtgccaggatcccgtgaaa

SEQ ID NO: 128921 - DNA, 25 bp, Saccharomyces pastorianus
tgatattaattccattcttcgctct

SEQ ID NO: 128922 - DNA, 25 bp, Saccharomyces pastorianus
aatcaacgtcatcccattggttttc

SEQ ID NO: 128923 - DNA, 25 bp, Saccharomyces pastorianus
gaaaagggcggagctttcctgccga

SEQ ID NO: 128924 - DNA, 25 bp, Saccharomyces pastorianus
aaacgcctttaagcgcacgacagaa

SEQ ID NO: 128925 - DNA, 25 bp, Saccharomyces pastorianus
tcgaaatccctgagcccattaagaa

SEQ ID NO: 128926 - DNA, 25 bp, Saccharomyces pastorianus
gcgtggacgacgacttgattttatc

SEQ ID NO: 128927 - DNA, 25 bp, Saccharomyces pastorianus
attctcctagaatgtccccatatta

SEQ ID NO: 128928 - DNA, 25 bp, Saccharomyces pastorianus
aagcatatgacgactcggaagtagt

SEQ ID NO: 128929 - DNA, 25 bp, Saccharomyces pastorianus
aaatgaagcatatgacgactcggaa

SEQ ID NO: 128930 - DNA, 25 bp, Saccharomyces pastorianus
taaatgaagcatatgacgactcgga

SEQ ID NO: 128931 - DNA, 25 bp, Saccharomyces pastorianus
atgacgactcggaagtagttggtga

SEQ ID NO: 128932 - DNA, 25 bp, Saccharomyces pastorianus
aagagcatcacaatctgcatggatg

SEQ ID NO: 128933 - DNA, 25 bp, Saccharomyces pastorianus
aaagagcatcacaatctgcatggat

SEQ ID NO: 128934 - DNA, 25 bp, Saccharomyces pastorianus
ggaaagagcatcacaatctgcatgg

SEQ ID NO: 128935 - DNA, 25 bp, Saccharomyces pastorianus
aagtagttggtgaggaaagagcatc

SEQ ID NO: 128936 - DNA, 25 bp, Saccharomyces pastorianus
gaggaaagagcatcacaatctgcat

SEQ ID NO: 128937 - DNA, 25 bp, Saccharomyces pastorianus
gaaagagcatcacaatctgcatgga

SEQ ID NO: 128938 - DNA, 25 bp, Saccharomyces pastorianus
aatgaagcatatgacgactcggaag

SEQ ID NO: 128939 - DNA, 25 bp, Saccharomyces pastorianus
atttcacggttctttgattggttgc

SEQ ID NO: 128940 - DNA, 25 bp, Saccharomyces pastorianus
tgccggtcatgctggtaatccaaca

SEQ ID NO: 128941 - DNA, 25 bp, Saccharomyces pastorianus
attcctaatctgttgcgaaacctag

SEQ ID NO: 128942 - DNA, 25 bp, Saccharomyces pastorianus
gggtcaaactcacttataattctcc

SEQ ID NO: 128943 - DNA, 25 bp, Saccharomyces pastorianus
ataattctccatcttctgctttgag

SEQ ID NO: 128944 - DNA, 25 bp, Saccharomyces pastorianus
gattggttgcatcccatattcaaaa

SEQ ID NO: 128945 - DNA, 25 bp, Saccharomyces pastorianus
aagacgataatactcctgccggtca

SEQ ID NO: 128946 - DNA, 25 bp, Saccharomyces pastorianus
gaacctgctggttttacgcacaaac

SEQ ID NO: 128947 - DNA, 25 bp, Saccharomyces pastorianus
ataactgatggcactcttctgaggg

SEQ ID NO: 128948 - DNA, 25 bp, Saccharomyces pastorianus
atcgtcgacatctaatacaccatcc

SEQ ID NO: 128949 - DNA, 25 bp, Saccharomyces pastorianus
tgtatcaaaattcctccacatcgtc

SEQ ID NO: 128950 - DNA, 25 bp, Saccharomyces pastorianus
aatcacagttgcagccacaaccgca

SEQ ID NO: 128951 - DNA, 25 bp, Saccharomyces pastorianus
aacccagatgtttcaatcgcaatca

SEQ ID NO: 128952 - DNA, 25 bp, Saccharomyces pastorianus
gacaacccagatgtttcaatcgcaa

SEQ ID NO: 128953 - DNA, 25 bp, Saccharomyces pastorianus
atcgcaatcacagttgcagccacaa

SEQ ID NO: 128954 - DNA, 25 bp, Saccharomyces pastorianus
tttactaacctcacgtcgcaagcac

SEQ ID NO: 128955 - DNA, 25 bp, Saccharomyces pastorianus
gtttcaatcgcaatcacagttgcag

SEQ ID NO: 128956 - DNA, 25 bp, Saccharomyces pastorianus
cagatgtttcaatcgcaatcacagt

SEQ ID NO: 128957 - DNA, 25 bp, Saccharomyces pastorianus
ggatttactaacctcacgtcgcaag

SEQ ID NO: 128958 - DNA, 25 bp, Saccharomyces pastorianus
atttactaacctcacgtcgcaagca

SEQ ID NO: 128959 - DNA, 25 bp, Saccharomyces pastorianus
caccacagacaacccagatgtttca

SEQ ID NO: 128960 - DNA, 25 bp, Saccharomyces pastorianus
aagcaccacagacaacccagatgtt

SEQ ID NO: 128961 - DNA, 25 bp, Saccharomyces pastorianus
gcaggccgccgcagatgctagaaga

SEQ ID NO: 128962 - DNA, 25 bp, Saccharomyces pastorianus
gagacaaaagcaggccgccgcagat

SEQ ID NO: 128963 - DNA, 25 bp, Saccharomyces pastorianus
tcagacgccgaactcttgagacaaa

SEQ ID NO: 128964 - DNA, 25 bp, Saccharomyces pastorianus
cagacgccgaactcttgagacaaaa

SEQ ID NO: 128965 - DNA, 25 bp, Saccharomyces pastorianus
cgccgaactcttgagacaaaagcag

SEQ ID NO: 128966 - DNA, 25 bp, Saccharomyces pastorianus
gacgccgaactcttgagacaaaagc

SEQ ID NO: 128967 - DNA, 25 bp, Saccharomyces pastorianus
tgagacaaaagcaggccgccgcaga

SEQ ID NO: 128968 - DNA, 25 bp, Saccharomyces pastorianus
ttgagacaaaagcaggccgccgcag

SEQ ID NO: 128969 - DNA, 25 bp, Saccharomyces pastorianus
gaactcttgagacaaaagcaggccg

SEQ ID NO: 128970 - DNA, 25 bp, Saccharomyces pastorianus
actcttgagacaaaagcaggccgcc

SEQ ID NO: 128971 - DNA, 25 bp, Saccharomyces pastorianus
tcttgagacaaaagcaggccgccgc

SEQ ID NO: 128972 - DNA, 25 bp, Saccharomyces pastorianus
aagcccttgttctctggtgaaagcg

SEQ ID NO: 128973 - DNA, 25 bp, Saccharomyces pastorianus
gatcccgatactcttgacttgttaa

SEQ ID NO: 128974 - DNA, 25 bp, Saccharomyces pastorianus
tgaagaccatgttttccccaatatc

SEQ ID NO: 128975 - DNA, 25 bp, Saccharomyces pastorianus
aactctgaagtatcacccttgcgaa

SEQ ID NO: 128976 - DNA, 25 bp, Saccharomyces pastorianus
caggtcgacgtgtggtcaagcgctt

SEQ ID NO: 128977 - DNA, 25 bp, Saccharomyces pastorianus
accggatcagcctaatgtgtcttac

SEQ ID NO: 128978 - DNA, 25 bp, Saccharomyces pastorianus
ccgaactcatgtttggtgccactaa

SEQ ID NO: 128979 - DNA, 25 bp, Saccharomyces pastorianus
agttgggccatgttccacttgtgga

SEQ ID NO: 128980 - DNA, 25 bp, Saccharomyces pastorianus
cgcttgtgtcattgctgagttgctt

SEQ ID NO: 128981 - DNA, 25 bp, Saccharomyces pastorianus
gtggatccgacaactttttctttca

SEQ ID NO: 128982 - DNA, 25 bp, Saccharomyces pastorianus
gttcaaggtactatagggctcccga

SEQ ID NO: 128983 - DNA, 25 bp, Saccharomyces pastorianus
acagattcgatttcctggttcacca

SEQ ID NO: 128984 - DNA, 25 bp, Saccharomyces pastorianus
tccaggttgagcttgtggccaccac

SEQ ID NO: 128985 - DNA, 25 bp, Saccharomyces pastorianus
aagcggcgacaagttactgtaacga

SEQ ID NO: 128986 - DNA, 25 bp, Saccharomyces pastorianus
gttagtctccatatacgattccaat

SEQ ID NO: 128987 - DNA, 25 bp, Saccharomyces pastorianus
gaacgcatgtcatcgtatggagtct

SEQ ID NO: 128988 - DNA, 25 bp, Saccharomyces pastorianus
aacgacgtgtaccaaagtgatccga

SEQ ID NO: 128989 - DNA, 25 bp, Saccharomyces pastorianus
gtggccaccacatacaaactcaatg

SEQ ID NO: 128990 - DNA, 25 bp, Saccharomyces pastorianus
gaaggcagaaatatcatcacccatt

SEQ ID NO: 128991 - DNA, 25 bp, Saccharomyces pastorianus
ggaactccaagctgattctgaattt

SEQ ID NO: 128992 - DNA, 25 bp, Saccharomyces pastorianus
tagaaaaggcactcctccaggttga

SEQ ID NO: 128993 - DNA, 25 bp, Saccharomyces pastorianus
gaagagcttctattgtacttgtaca

SEQ ID NO: 128994 - DNA, 25 bp, Saccharomyces pastorianus
gtccaggaagtcgagcatgtcaagc

SEQ ID NO: 128995 - DNA, 25 bp, Saccharomyces pastorianus
catgcaatatttgtcgtccaacctc

SEQ ID NO: 128996 - DNA, 25 bp, Saccharomyces pastorianus
gaattggacggcaatgacgctaccc

SEQ ID NO: 128997 - DNA, 25 bp, Saccharomyces pastorianus
gagttatgtgtttcggacaatccag

SEQ ID NO: 128998 - DNA, 25 bp, Saccharomyces pastorianus
gacgaagtacagttattctcttatc

SEQ ID NO: 128999 - DNA, 25 bp, Saccharomyces pastorianus
agttcttcattgattctcctcattc

SEQ ID NO: 129000 - DNA, 25 bp, Saccharomyces pastorianus
gtcaaaaatctctcgggaacctact

SEQ ID NO: 129001 - DNA, 25 bp, Saccharomyces pastorianus
gaggaaccatttttgatcgccactg

SEQ ID NO: 129002 - DNA, 25 bp, Saccharomyces pastorianus
gcaatgacgctaccccaatgataat

SEQ ID NO: 129003 - DNA, 25 bp, Saccharomyces pastorianus
tcgtccaacctcctgatgttatata

SEQ ID NO: 129004 - DNA, 25 bp, Saccharomyces pastorianus
actgaccatgctacattttccgaat

SEQ ID NO: 129005 - DNA, 25 bp, Saccharomyces pastorianus
ttctcctacgttgaacctgtcttag

SEQ ID NO: 129006 - DNA, 25 bp, Saccharomyces pastorianus
tcctacgttgaacctgtcttagttg

SEQ ID NO: 129007 - DNA, 25 bp, Saccharomyces pastorianus
gtcttagttgcttctgccaagggtc

SEQ ID NO: 129008 - DNA, 25 bp, Saccharomyces pastorianus
ggtactgatgatgtccgtctagctc

SEQ ID NO: 129009 - DNA, 25 bp, Saccharomyces pastorianus
ccattgttctcctacgttgaacctg

SEQ ID NO: 129010 - DNA, 25 bp, Saccharomyces pastorianus
gctccagaattgaaccaagctatct

SEQ ID NO: 129011 - DNA, 25 bp, Saccharomyces pastorianus
attgttctcctacgttgaacctgtc

SEQ ID NO: 129012 - DNA, 25 bp, Saccharomyces pastorianus
tcttagttgcttctgccaagggtct

SEQ ID NO: 129013 - DNA, 25 bp, Saccharomyces pastorianus
cttagttgcttctgccaagggtcta

SEQ ID NO: 129014 - DNA, 25 bp, Saccharomyces pastorianus
atgatgtccgtctagctccagaatt

SEQ ID NO: 129015 - DNA, 25 bp, Saccharomyces pastorianus
agctatctggaagagaggtgtcaag

SEQ ID NO: 129016 - DNA, 25 bp, Saccharomyces pastorianus
actcgactgcgccaactaacaagaa

SEQ ID NO: 129017 - DNA, 25 bp, Saccharomyces pastorianus
ttaaaaattcattacccgcagatga

SEQ ID NO: 129018 - DNA, 25 bp, Saccharomyces pastorianus
gcatctaggtaaaacgcttttgcgt

SEQ ID NO: 129019 - DNA, 25 bp, Saccharomyces pastorianus
gaatgggatgattcgtatcattaaa

SEQ ID NO: 129020 - DNA, 25 bp, Saccharomyces pastorianus
aaactaagtggcaactactcgactg

SEQ ID NO: 129021 - DNA, 25 bp, Saccharomyces pastorianus
agatgaagcgactattgcaataatt

SEQ ID NO: 129022 - DNA, 25 bp, Saccharomyces pastorianus
aactaatccggctattcaatatttg

SEQ ID NO: 129023 - DNA, 25 bp, Saccharomyces pastorianus
aagaggataactattcttcttcata

SEQ ID NO: 129024 - DNA, 25 bp, Saccharomyces pastorianus
gcaatgaagcatacagttgacgatt

SEQ ID NO: 129025 - DNA, 25 bp, Saccharomyces pastorianus
aacgcttttgcgtaggaaggcaatg

SEQ ID NO: 129026 - DNA, 25 bp, Saccharomyces pastorianus
ttacccgcagatgaaatactaactt

SEQ ID NO: 129027 - DNA, 25 bp, Saccharomyces pastorianus
gtaatgatccgaacttggggaacct

SEQ ID NO: 129028 - DNA, 25 bp, Saccharomyces pastorianus
tgatccgaacttggggaaccttgat

SEQ ID NO: 129029 - DNA, 25 bp, Saccharomyces pastorianus
attgatggtaatgatccgaacttgg

SEQ ID NO: 129030 - DNA, 25 bp, Saccharomyces pastorianus
ggaaattgatggtaatgatccgaac

SEQ ID NO: 129031 - DNA, 25 bp, Saccharomyces pastorianus
aattgatggtaatgatccgaacttg

SEQ ID NO: 129032 - DNA, 25 bp, Saccharomyces pastorianus
ttgatggtaatgatccgaacttggg

SEQ ID NO: 129033 - DNA, 25 bp, Saccharomyces pastorianus
atgatccgaacttggggaaccttga

SEQ ID NO: 129034 - DNA, 25 bp, Saccharomyces pastorianus
gaaattgatggtaatgatccgaact

SEQ ID NO: 129035 - DNA, 25 bp, Saccharomyces pastorianus
taatgatccgaacttggggaacctt

SEQ ID NO: 129036 - DNA, 25 bp, Saccharomyces pastorianus
tccgaacttggggaaccttgataag

SEQ ID NO: 129037 - DNA, 25 bp, Saccharomyces pastorianus
aaattgatggtaatgatccgaactt

SEQ ID NO: 129038 - DNA, 25 bp, Saccharomyces pastorianus
aacacagttgaatgttcgccctgaa

SEQ ID NO: 129039 - DNA, 25 bp, Saccharomyces pastorianus
gtctctatctctaacagagctctct

SEQ ID NO: 129040 - DNA, 25 bp, Saccharomyces pastorianus
tacgttggatagtttcattcactac

SEQ ID NO: 129041 - DNA, 25 bp, Saccharomyces pastorianus
atttgggcgcttctgaaactcatct

SEQ ID NO: 129042 - DNA, 25 bp, Saccharomyces pastorianus
agaatgggctgtatttgggcgcttc

SEQ ID NO: 129043 - DNA, 25 bp, Saccharomyces pastorianus
ggagagttgttaaccaccttatgga

SEQ ID NO: 129044 - DNA, 25 bp, Saccharomyces pastorianus
gtcatgattgctttactacgttgga

SEQ ID NO: 129045 - DNA, 25 bp, Saccharomyces pastorianus
gggatgcctcttacgactataatga

SEQ ID NO: 129046 - DNA, 25 bp, Saccharomyces pastorianus
gaaattgggcagttcttcatacaaa

SEQ ID NO: 129047 - DNA, 25 bp, Saccharomyces pastorianus
gttatgttacacagttggacagcca

SEQ ID NO: 129048 - DNA, 25 bp, Saccharomyces pastorianus
aaactcatctttcctgatggagcgt

SEQ ID NO: 129049 - DNA, 25 bp, Saccharomyces pastorianus
catagttgtggagtcgttcggctta

SEQ ID NO: 129050 - DNA, 25 bp, Saccharomyces pastorianus
actccagccgctattgcagaatttg

SEQ ID NO: 129051 - DNA, 25 bp, Saccharomyces pastorianus
gcagcagaacagcaaccgcagctaa

SEQ ID NO: 129052 - DNA, 25 bp, Saccharomyces pastorianus
ggttgttattcgattttgccgataa

SEQ ID NO: 129053 - DNA, 25 bp, Saccharomyces pastorianus
aaatccactacgcaaagctgggtca

SEQ ID NO: 129054 - DNA, 25 bp, Saccharomyces pastorianus
acttactgtcgttagtggtggctct

SEQ ID NO: 129055 - DNA, 25 bp, Saccharomyces pastorianus
gttgaatcgttatccgctttgcaag

SEQ ID NO: 129056 - DNA, 25 bp, Saccharomyces pastorianus
gtcaatctacctttggagatctgat

SEQ ID NO: 129057 - DNA, 25 bp, Saccharomyces pastorianus
gttccatcagtgttctttgtgagga

SEQ ID NO: 129058 - DNA, 25 bp, Saccharomyces pastorianus
gatcaagagcatcttcgtctcgatt

SEQ ID NO: 129059 - DNA, 25 bp, Saccharomyces pastorianus
gaagtattgctttgagttccatcag

SEQ ID NO: 129060 - DNA, 25 bp, Saccharomyces pastorianus
gatagttcgctggatgtaatactac

SEQ ID NO: 129061 - DNA, 25 bp, Saccharomyces pastorianus
aagtagatagttcgctggatgtaat

SEQ ID NO: 129062 - DNA, 25 bp, Saccharomyces pastorianus
tgaagaagtagatagttcgctggat

SEQ ID NO: 129063 - DNA, 25 bp, Saccharomyces pastorianus
gggaaggtacggaaatgaatattga

SEQ ID NO: 129064 - DNA, 25 bp, Saccharomyces pastorianus
taataaaaataagggcgcagaacag

SEQ ID NO: 129065 - DNA, 25 bp, Saccharomyces pastorianus
agaagtagatagttcgctggatgta

SEQ ID NO: 129066 - DNA, 25 bp, Saccharomyces pastorianus
ggattatcagggaaggtacggaaat

SEQ ID NO: 129067 - DNA, 25 bp, Saccharomyces pastorianus
tagatagttcgctggatgtaatact

SEQ ID NO: 129068 - DNA, 25 bp, Saccharomyces pastorianus
gaaaaacaaattgagttccttggtg

SEQ ID NO: 129069 - DNA, 25 bp, Saccharomyces pastorianus
gtagatagttcgctggatgtaatac

SEQ ID NO: 129070 - DNA, 25 bp, Saccharomyces pastorianus
gagttccttggtgaagaaatttgaa

SEQ ID NO: 129071 - DNA, 25 bp, Saccharomyces pastorianus
gatagttcgctggatgtaatactac

SEQ ID NO: 129072 - DNA, 25 bp, Saccharomyces pastorianus
aagtagatagttcgctggatgtaat

SEQ ID NO: 129073 - DNA, 25 bp, Saccharomyces pastorianus
tgaagaagtagatagttcgctggat

SEQ ID NO: 129074 - DNA, 25 bp, Saccharomyces pastorianus
taataaaaataagggcgcagaacag

SEQ ID NO: 129075 - DNA, 25 bp, Saccharomyces pastorianus
gggaaggtacggaaatgaatattga

SEQ ID NO: 129076 - DNA, 25 bp, Saccharomyces pastorianus
atactacagacattgatagccaaca

SEQ ID NO: 129077 - DNA, 25 bp, Saccharomyces pastorianus
ggattatcagggaaggtacggaaat

SEQ ID NO: 129078 - DNA, 25 bp, Saccharomyces pastorianus
gaagacaatgccaagattcataaat

SEQ ID NO: 129079 - DNA, 25 bp, Saccharomyces pastorianus
gaaaaacaaattgagttccttggtg

SEQ ID NO: 129080 - DNA, 25 bp, Saccharomyces pastorianus
gtagatagttcgctggatgtaatac

SEQ ID NO: 129081 - DNA, 25 bp, Saccharomyces pastorianus
gagttccttggtgaagaaatttgaa

SEQ ID NO: 129082 - DNA, 25 bp, Saccharomyces pastorianus
atcccctacattgggtattctggaa

SEQ ID NO: 129083 - DNA, 25 bp, Saccharomyces pastorianus
taccggtggtggaacatctcctatt

SEQ ID NO: 129084 - DNA, 25 bp, Saccharomyces pastorianus
gttatcctgtaacttcaaggcctca

SEQ ID NO: 129085 - DNA, 25 bp, Saccharomyces pastorianus
agcgctccctatatagatgctccaa

SEQ ID NO: 129086 - DNA, 25 bp, Saccharomyces pastorianus
gtcaccgggcgattttgccgatagt

SEQ ID NO: 129087 - DNA, 25 bp, Saccharomyces pastorianus
aacagaatcaatggccacgtccgta

SEQ ID NO: 129088 - DNA, 25 bp, Saccharomyces pastorianus
tattatttccatgatcccgcgttat

SEQ ID NO: 129089 - DNA, 25 bp, Saccharomyces pastorianus
ataagtccctaccacaagtgttatt

SEQ ID NO: 129090 - DNA, 25 bp, Saccharomyces pastorianus
gatgctccaatcgatccagaattac

SEQ ID NO: 129091 - DNA, 25 bp, Saccharomyces pastorianus
aaggcacgattctcgacagcagcag

SEQ ID NO: 129092 - DNA, 25 bp, Saccharomyces pastorianus
agaattacatactgccttccattgg

SEQ ID NO: 129093 - DNA, 25 bp, Saccharomyces pastorianus
gctactgcacgagaccgtatttgat

SEQ ID NO: 129094 - DNA, 25 bp, Saccharomyces pastorianus
caaaaatggcgataccgcacttcat

SEQ ID NO: 129095 - DNA, 25 bp, Saccharomyces pastorianus
ttcatacactagaagaactttccct

SEQ ID NO: 129096 - DNA, 25 bp, Saccharomyces pastorianus
cgattcgcaatcacaaacagtaatt

SEQ ID NO: 129097 - DNA, 25 bp, Saccharomyces pastorianus
aagatcaaggatttttccccacagt

SEQ ID NO: 129098 - DNA, 25 bp, Saccharomyces pastorianus
gaactttccctaggattttccagct

SEQ ID NO: 129099 - DNA, 25 bp, Saccharomyces pastorianus
gagaagttccttattccacaattca

SEQ ID NO: 129100 - DNA, 25 bp, Saccharomyces pastorianus
ggatttttccccacagtatagaatt

SEQ ID NO: 129101 - DNA, 25 bp, Saccharomyces pastorianus
aatcaacaacaccttctgcagttta

SEQ ID NO: 129102 - DNA, 25 bp, Saccharomyces pastorianus
aggattttccagctactgcacgaga

SEQ ID NO: 129103 - DNA, 25 bp, Saccharomyces pastorianus
gtatttgatatcgattcgcaatcac

SEQ ID NO: 129104 - DNA, 25 bp, Saccharomyces pastorianus
tacaacgatcttcatgaacagcatg

SEQ ID NO: 129105 - DNA, 25 bp, Saccharomyces pastorianus
gcctgtttctccttcggattacata

SEQ ID NO: 129106 - DNA, 25 bp, Saccharomyces pastorianus
agctcagactaatgatgacttcgaa

SEQ ID NO: 129107 - DNA, 25 bp, Saccharomyces pastorianus
ggtacgaatcaacatgtcaattctt

SEQ ID NO: 129108 - DNA, 25 bp, Saccharomyces pastorianus
tgtcaattcttcaaacacggacttg

SEQ ID NO: 129109 - DNA, 25 bp, Saccharomyces pastorianus
gatgaaaacggcgaagctcagacta

SEQ ID NO: 129110 - DNA, 25 bp, Saccharomyces pastorianus
aacacggacttgaatatccacgtta

SEQ ID NO: 129111 - DNA, 25 bp, Saccharomyces pastorianus
ggctagcatatacaacgatcttcat

SEQ ID NO: 129112 - DNA, 25 bp, Saccharomyces pastorianus
aatggtaatcatgtcgcctgtttct

SEQ ID NO: 129113 - DNA, 25 bp, Saccharomyces pastorianus
gacttcgaaattttatctcgtctac

SEQ ID NO: 129114 - DNA, 25 bp, Saccharomyces pastorianus
taacctatccatctcaaattgccac

SEQ ID NO: 129115 - DNA, 25 bp, Saccharomyces pastorianus
agagcattcgcgaagatatcttaga

SEQ ID NO: 129116 - DNA, 25 bp, Saccharomyces pastorianus
aagtagcgccagtgtctgaaatcgt

SEQ ID NO: 129117 - DNA, 25 bp, Saccharomyces pastorianus
ggaaaggcctccatatatccttaac

SEQ ID NO: 129118 - DNA, 25 bp, Saccharomyces pastorianus
gatatcacattctttggcgaagcac

SEQ ID NO: 129119 - DNA, 25 bp, Saccharomyces pastorianus
aaatgtggctggacgattccgcata

SEQ ID NO: 129120 - DNA, 25 bp, Saccharomyces pastorianus
gttccccaagtcctgattaatcgtg

SEQ ID NO: 129121 - DNA, 25 bp, Saccharomyces pastorianus
ggcgttctcaaaccagatatcacat

SEQ ID NO: 129122 - DNA, 25 bp, Saccharomyces pastorianus
atcgtaaacatggttccttcccacg

SEQ ID NO: 129123 - DNA, 25 bp, Saccharomyces pastorianus
atccttaactcatatggcgttctca

SEQ ID NO: 129124 - DNA, 25 bp, Saccharomyces pastorianus
gattaatcgtgatcccgtcaagcac

SEQ ID NO: 129125 - DNA, 25 bp, Saccharomyces pastorianus
gcacgcagaatttgatttatctctt

SEQ ID NO: 129126 - DNA, 25 bp, Saccharomyces pastorianus
agtattgtccatatcaactcgcaag

SEQ ID NO: 129127 - DNA, 25 bp, Saccharomyces pastorianus
aaagatcaagcgcttatcggcacca

SEQ ID NO: 129128 - DNA, 25 bp, Saccharomyces pastorianus
tatcttatcaagttgctaggctttg

SEQ ID NO: 129129 - DNA, 25 bp, Saccharomyces pastorianus
gatgatccccaagacgttttcaatt

SEQ ID NO: 129130 - DNA, 25 bp, Saccharomyces pastorianus
gtttcaacttcattagggatcccgg

SEQ ID NO: 129131 - DNA, 25 bp, Saccharomyces pastorianus
tttagacacttacctccccgaggat

SEQ ID NO: 129132 - DNA, 25 bp, Saccharomyces pastorianus
gatcccggacttcagatcttctgag

SEQ ID NO: 129133 - DNA, 25 bp, Saccharomyces pastorianus
acgacccctctgttttctataatat

SEQ ID NO: 129134 - DNA, 25 bp, Saccharomyces pastorianus
ttatcggcaccatcaacagtattgt

SEQ ID NO: 129135 - DNA, 25 bp, Saccharomyces pastorianus
aaacatttattctccattgcatagt

SEQ ID NO: 129136 - DNA, 25 bp, Saccharomyces pastorianus
tatatttatacacgacccctctgtt

SEQ ID NO: 129137 - DNA, 25 bp, Saccharomyces pastorianus
gctttccaaaatactggtgccttga

SEQ ID NO: 129138 - DNA, 25 bp, Saccharomyces pastorianus
aaaacaacgtgccataactcctggg

SEQ ID NO: 129139 - DNA, 25 bp, Saccharomyces pastorianus
tacctaaccagttcaccgggtgata

SEQ ID NO: 129140 - DNA, 25 bp, Saccharomyces pastorianus
gtgcaaactgaatcgctctgccgac

SEQ ID NO: 129141 - DNA, 25 bp, Saccharomyces pastorianus
gtgatatcattaccgttgacccaca

SEQ ID NO: 129142 - DNA, 25 bp, Saccharomyces pastorianus
ggtgccttgacattacaattccggt

SEQ ID NO: 129143 - DNA, 25 bp, Saccharomyces pastorianus
tgcaggtcccagtccaaattaaatc

SEQ ID NO: 129144 - DNA, 25 bp, Saccharomyces pastorianus
gttgacccacaatccggtgccaaaa

SEQ ID NO: 129145 - DNA, 25 bp, Saccharomyces pastorianus
taatccggcgctatacagtgacact

SEQ ID NO: 129146 - DNA, 25 bp, Saccharomyces pastorianus
tagagtccttgggagtgggcccatt

SEQ ID NO: 129147 - DNA, 25 bp, Saccharomyces pastorianus
aactcctgggcaatcgtgctgtcta

SEQ ID NO: 129148 - DNA, 25 bp, Saccharomyces pastorianus
gagaagcatttataggcccaaggat

SEQ ID NO: 129149 - DNA, 25 bp, Saccharomyces pastorianus
attggcttgttactggtcattacgc

SEQ ID NO: 129150 - DNA, 25 bp, Saccharomyces pastorianus
gaggagtgcttcaccgtacagacca

SEQ ID NO: 129151 - DNA, 25 bp, Saccharomyces pastorianus
gaagggtcgacacccaatccagata

SEQ ID NO: 129152 - DNA, 25 bp, Saccharomyces pastorianus
ggtagattcctctgtggcggcagca

SEQ ID NO: 129153 - DNA, 25 bp, Saccharomyces pastorianus
gtcattacgcccgagttatgcagga

SEQ ID NO: 129154 - DNA, 25 bp, Saccharomyces pastorianus
atgtgaaccgtgtcgctaagcattt

SEQ ID NO: 129155 - DNA, 25 bp, Saccharomyces pastorianus
aagttcgtcaagttcggcaagctga

SEQ ID NO: 129156 - DNA, 25 bp, Saccharomyces pastorianus
agcggctaccggcaaagtttgacaa

SEQ ID NO: 129157 - DNA, 25 bp, Saccharomyces pastorianus
gaatcacaatctttggacgaccctg

SEQ ID NO: 129158 - DNA, 25 bp, Saccharomyces pastorianus
gagaatttccaaatacccgaggagt

SEQ ID NO: 129159 - DNA, 25 bp, Saccharomyces pastorianus
gcataccatctaacttgctcgaaga

SEQ ID NO: 129160 - DNA, 25 bp, Saccharomyces pastorianus
aaccgtccgtgggaaattcaagcat

SEQ ID NO: 129161 - DNA, 25 bp, Saccharomyces pastorianus
atgatgctgctcaagcggcttacga

SEQ ID NO: 129162 - DNA, 25 bp, Saccharomyces pastorianus
ttttaagtcactatgcgccagctgg

SEQ ID NO: 129163 - DNA, 25 bp, Saccharomyces pastorianus
aaatcgcggcaagcttcaggtctgg

SEQ ID NO: 129164 - DNA, 25 bp, Saccharomyces pastorianus
gtcctgctgcaaatggtagaaccgt

SEQ ID NO: 129165 - DNA, 25 bp, Saccharomyces pastorianus
gtctgcgaagcgaattgaagtccac

SEQ ID NO: 129166 - DNA, 25 bp, Saccharomyces pastorianus
aatgggttcgctaatgatgctgctc

SEQ ID NO: 129167 - DNA, 25 bp, Saccharomyces pastorianus
tataataacgctccgggtctgcgaa

SEQ ID NO: 129168 - DNA, 25 bp, Saccharomyces pastorianus
gaagacccttcacaaggtcctgctg

SEQ ID NO: 129169 - DNA, 25 bp, Saccharomyces pastorianus
ggctctacaaagtggaatttccgtc

SEQ ID NO: 129170 - DNA, 25 bp, Saccharomyces pastorianus
gaatgaattacttgcatctttgcct

SEQ ID NO: 129171 - DNA, 25 bp, Saccharomyces pastorianus
agacgttattattgcaacacctggt

SEQ ID NO: 129172 - DNA, 25 bp, Saccharomyces pastorianus
gatgatgaccaacccagacgttatt

SEQ ID NO: 129173 - DNA, 25 bp, Saccharomyces pastorianus
aaagattccgttagccactagtgaa

SEQ ID NO: 129174 - DNA, 25 bp, Saccharomyces pastorianus
gaagcgtcctcttgactggtggtga

SEQ ID NO: 129175 - DNA, 25 bp, Saccharomyces pastorianus
gaaatgctttttctatccagtaaaa

SEQ ID NO: 129176 - DNA, 25 bp, Saccharomyces pastorianus
tgttaaggctggtttggttaatcca

SEQ ID NO: 129177 - DNA, 25 bp, Saccharomyces pastorianus
gagtacgttgttttcgatgaagctg

SEQ ID NO: 129178 - DNA, 25 bp, Saccharomyces pastorianus
aacgttttcaaggattttgccagag

SEQ ID NO: 129179 - DNA, 25 bp, Saccharomyces pastorianus
gcaacacctggtagatttttacatc

SEQ ID NO: 129180 - DNA, 25 bp, Saccharomyces pastorianus
tgttgttttctgctactctacctaa

SEQ ID NO: 129181 - DNA, 25 bp, Saccharomyces pastorianus
gccattgttctttcaggtggttcaa

SEQ ID NO: 129182 - DNA, 25 bp, Saccharomyces pastorianus
aacaaccgcccttgtggaatcgtat

SEQ ID NO: 129183 - DNA, 25 bp, Saccharomyces pastorianus
caggactgccttccagattagagaa

SEQ ID NO: 129184 - DNA, 25 bp, Saccharomyces pastorianus
acaacctggcgtgggcgagctgtta

SEQ ID NO: 129185 - DNA, 25 bp, Saccharomyces pastorianus
ctttctcgtcgtggttatgcattta

SEQ ID NO: 129186 - DNA, 25 bp, Saccharomyces pastorianus
gagacgttactaggcatttgattga

SEQ ID NO: 129187 - DNA, 25 bp, Saccharomyces pastorianus
aatactgtgcaatcggctgatgttg

SEQ ID NO: 129188 - DNA, 25 bp, Saccharomyces pastorianus
gaagttccctgtataaggccattgt

SEQ ID NO: 129189 - DNA, 25 bp, Saccharomyces pastorianus
gttcaagtatgtacccaggactgcc

SEQ ID NO: 129190 - DNA, 25 bp, Saccharomyces pastorianus
ggtggtgccgttttagctagtatca

SEQ ID NO: 129191 - DNA, 25 bp, Saccharomyces pastorianus
gagttttacacaatgacccttcaag

SEQ ID NO: 129192 - DNA, 25 bp, Saccharomyces pastorianus
aaaagagtgttggagtccctcacca

SEQ ID NO: 129193 - DNA, 25 bp, Saccharomyces pastorianus
gaaagtgaaacctctaacagcagca

SEQ ID NO: 129194 - DNA, 25 bp, Saccharomyces pastorianus
gagtccctcaccaagaacgaactgg

SEQ ID NO: 129195 - DNA, 25 bp, Saccharomyces pastorianus
aactttcatattttccagtgttcga

SEQ ID NO: 129196 - DNA, 25 bp, Saccharomyces pastorianus
gcagcaaaacccttaacacaattat

SEQ ID NO: 129197 - DNA, 25 bp, Saccharomyces pastorianus
gttttagacgaatcctttcctgcaa

SEQ ID NO: 129198 - DNA, 25 bp, Saccharomyces pastorianus
ctactttttaggagacagcgtcgag

SEQ ID NO: 129199 - DNA, 25 bp, Saccharomyces pastorianus
gaatcctatgacttggaactcgata

SEQ ID NO: 129200 - DNA, 25 bp, Saccharomyces pastorianus
gatgggaattccaaacgagtttgcc

SEQ ID NO: 129201 - DNA, 25 bp, Saccharomyces pastorianus
tgttcaatggcggagcttattcgaa

SEQ ID NO: 129202 - DNA, 25 bp, Saccharomyces pastorianus
gcagtttctaagtttcctgcagaaa

SEQ ID NO: 129203 - DNA, 25 bp, Saccharomyces pastorianus
gagcttatgaacagcgttacgccca

SEQ ID NO: 129204 - DNA, 25 bp, Saccharomyces pastorianus
gaaaagctcgacatccaggttggtt

SEQ ID NO: 129205 - DNA, 25 bp, Saccharomyces pastorianus
tacatctcccgcaattccaaaatat

SEQ ID NO: 129206 - DNA, 25 bp, Saccharomyces pastorianus
ctaattattgttctaccactcacca

SEQ ID NO: 129207 - DNA, 25 bp, Saccharomyces pastorianus
aaagagccttccattcgtcacgacg

SEQ ID NO: 129208 - DNA, 25 bp, Saccharomyces pastorianus
actcaccaatttctatccagtctga

SEQ ID NO: 129209 - DNA, 25 bp, Saccharomyces pastorianus
gtttccagtttcgtaagctttcatg

SEQ ID NO: 129210 - DNA, 25 bp, Saccharomyces pastorianus
aaaccagtgccttcggcgattacat

SEQ ID NO: 129211 - DNA, 25 bp, Saccharomyces pastorianus
gcaagtatcttcacattcattctaa

SEQ ID NO: 129212 - DNA, 25 bp, Saccharomyces pastorianus
aagtctccccattttttatcatatt

SEQ ID NO: 129213 - DNA, 25 bp, Saccharomyces pastorianus
gcgttacgcccaatagtctcaataa

SEQ ID NO: 129214 - DNA, 25 bp, Saccharomyces pastorianus
taagcatcacttggtcactgaggag

SEQ ID NO: 129215 - DNA, 25 bp, Saccharomyces pastorianus
tgtgccacggcgttaattacctgca

SEQ ID NO: 129216 - DNA, 25 bp, Saccharomyces pastorianus
gtagtgttccaatacccttacgaag

SEQ ID NO: 129217 - DNA, 25 bp, Saccharomyces pastorianus
tgaagttgaccctacatctggcgat

SEQ ID NO: 129218 - DNA, 25 bp, Saccharomyces pastorianus
ggaatcgtgggctctgacccttatt

SEQ ID NO: 129219 - DNA, 25 bp, Saccharomyces pastorianus
tgtgtcgtcactaaagatggcatct

SEQ ID NO: 129220 - DNA, 25 bp, Saccharomyces pastorianus
aattacctgcactctatgggcttag

SEQ ID NO: 129221 - DNA, 25 bp, Saccharomyces pastorianus
gcagatgtgtggtctatcgctatta

SEQ ID NO: 129222 - DNA, 25 bp, Saccharomyces pastorianus
gaaacaaacatcctacgatccaaga

SEQ ID NO: 129223 - DNA, 25 bp, Saccharomyces pastorianus
aactgattgactttgggagcgctgt

SEQ ID NO: 129224 - DNA, 25 bp, Saccharomyces pastorianus
aggctactgccaagacattcacgga

SEQ ID NO: 129225 - DNA, 25 bp, Saccharomyces pastorianus
tcatcaacttcgctgtcttcattat

SEQ ID NO: 129226 - DNA, 25 bp, Saccharomyces pastorianus
tcatcttcatcaacttcgctgtctt

SEQ ID NO: 129227 - DNA, 25 bp, Saccharomyces pastorianus
cattatttaggccaactaagttgaa

SEQ ID NO: 129228 - DNA, 25 bp, Saccharomyces pastorianus
aaaatattcaatggagctgctcacc

SEQ ID NO: 129229 - DNA, 25 bp, Saccharomyces pastorianus
taaggaaactccattacactcatct

SEQ ID NO: 129230 - DNA, 25 bp, Saccharomyces pastorianus
ttcaatggagctgctcaccactcat

SEQ ID NO: 129231 - DNA, 25 bp, Saccharomyces pastorianus
aacttcgctgtcttcattatttagg

SEQ ID NO: 129232 - DNA, 25 bp, Saccharomyces pastorianus
gaaactccattacactcatcttcat

SEQ ID NO: 129233 - DNA, 25 bp, Saccharomyces pastorianus
agttgaagaatttatcggctaaaat

SEQ ID NO: 129234 - DNA, 25 bp, Saccharomyces pastorianus
gctgtcttcattatttaggccaact

SEQ ID NO: 129235 - DNA, 25 bp, Saccharomyces pastorianus
attacactcatcttcatcaacttcg

SEQ ID NO: 129236 - DNA, 25 bp, Saccharomyces pastorianus
gattcggtcaaatgtttttcccaga

SEQ ID NO: 129237 - DNA, 25 bp, Saccharomyces pastorianus
aacaacagttgcttaccacattcca

SEQ ID NO: 129238 - DNA, 25 bp, Saccharomyces pastorianus
caagagtctgctggtgttgctgatt

SEQ ID NO: 129239 - DNA, 25 bp, Saccharomyces pastorianus
accttacttccacgttagtgtcatc

SEQ ID NO: 129240 - DNA, 25 bp, Saccharomyces pastorianus
ggttctaaaggccttgttccacaga

SEQ ID NO: 129241 - DNA, 25 bp, Saccharomyces pastorianus
tgccttaggttgtggtttcgtcgaa

SEQ ID NO: 129242 - DNA, 25 bp, Saccharomyces pastorianus
gtatctccatctctggtgctttgaa

SEQ ID NO: 129243 - DNA, 25 bp, Saccharomyces pastorianus
aagtcgctcaagaacactggtctga

SEQ ID NO: 129244 - DNA, 25 bp, Saccharomyces pastorianus
gaaacatgtggctctgtcgaagact

SEQ ID NO: 129245 - DNA, 25 bp, Saccharomyces pastorianus
tgatttgatcaccacctgcgcaggt

SEQ ID NO: 129246 - DNA, 25 bp, Saccharomyces pastorianus
ctgctgccatccaaagagtcggttt

SEQ ID NO: 129247 - DNA, 25 bp, Saccharomyces pastorianus
gagggctatcagaagacgttttcga

SEQ ID NO: 129248 - DNA, 25 bp, Saccharomyces pastorianus
tcgagactggatgctttaacaaggc

SEQ ID NO: 129249 - DNA, 25 bp, Saccharomyces pastorianus
aagcatgaagatttgtcgttagaac

SEQ ID NO: 129250 - DNA, 25 bp, Saccharomyces pastorianus
ggtgcccaattttcaaggtcctatg

SEQ ID NO: 129251 - DNA, 25 bp, Saccharomyces pastorianus
ggaagattgtcttccgttgctcgga

SEQ ID NO: 129252 - DNA, 25 bp, Saccharomyces pastorianus
gagacaccaaaataccattcacgct

SEQ ID NO: 129253 - DNA, 25 bp, Saccharomyces pastorianus
aaaattcttggatctgagggctatc

SEQ ID NO: 129254 - DNA, 25 bp, Saccharomyces pastorianus
ggtcctatgatttaacgagacacca

SEQ ID NO: 129255 - DNA, 25 bp, Saccharomyces pastorianus
gtcttccgttgctcggagtgtataa

SEQ ID NO: 129256 - DNA, 25 bp, Saccharomyces pastorianus
aaatgaaccgtgtggtgcccaattt

SEQ ID NO: 129257 - DNA, 25 bp, Saccharomyces pastorianus
gacgttttcgagactggatgcttta

SEQ ID NO: 129258 - DNA, 25 bp, Saccharomyces pastorianus
ggacagcatttccagtgttgtatct

SEQ ID NO: 129259 - DNA, 25 bp, Saccharomyces pastorianus
gagcctttactgtcattggatgtta

SEQ ID NO: 129260 - DNA, 25 bp, Saccharomyces pastorianus
agcaaaatcatccagtaaccgtagt

SEQ ID NO: 129261 - DNA, 25 bp, Saccharomyces pastorianus
gtcacttcaagataatagcgccgca

SEQ ID NO: 129262 - DNA, 25 bp, Saccharomyces pastorianus
tcggcaaacgtaccgtctactgcta

SEQ ID NO: 129263 - DNA, 25 bp, Saccharomyces pastorianus
acgatatctctctcttgaagaacag

SEQ ID NO: 129264 - DNA, 25 bp, Saccharomyces pastorianus
gtctactgctactaccggtaaaagg

SEQ ID NO: 129265 - DNA, 25 bp, Saccharomyces pastorianus
acgttgactctaacatggacagcat

SEQ ID NO: 129266 - DNA, 25 bp, Saccharomyces pastorianus
ggatgttacaccaatctcaatgttt

SEQ ID NO: 129267 - DNA, 25 bp, Saccharomyces pastorianus
gagcaacaccaagaggagcctttac

SEQ ID NO: 129268 - DNA, 25 bp, Saccharomyces pastorianus
acgggtcgtgccaagagttctagtc

SEQ ID NO: 129269 - DNA, 25 bp, Saccharomyces pastorianus
atgacgaagctggtgatgagaaatt

SEQ ID NO: 129270 - DNA, 25 bp, Saccharomyces pastorianus
actcatcccatcacaaaagctaaat

SEQ ID NO: 129271 - DNA, 25 bp, Saccharomyces pastorianus
gatatacgggcaaatattgggttaa

SEQ ID NO: 129272 - DNA, 25 bp, Saccharomyces pastorianus
gaaaataaccttgaatatcacccac

SEQ ID NO: 129273 - DNA, 25 bp, Saccharomyces pastorianus
ctaaatattggagatatacgggcaa

SEQ ID NO: 129274 - DNA, 25 bp, Saccharomyces pastorianus
aagagcaatggaagatgggcgttat

SEQ ID NO: 129275 - DNA, 25 bp, Saccharomyces pastorianus
agcagcacgcagaaaaagggaggaa

SEQ ID NO: 129276 - DNA, 25 bp, Saccharomyces pastorianus
ggatactcatcccatcacaaaagct

SEQ ID NO: 129277 - DNA, 25 bp, Saccharomyces pastorianus
aatggttcgtcagggatactcatcc

SEQ ID NO: 129278 - DNA, 25 bp, Saccharomyces pastorianus
atatcacccacaatggttcgtcagg

SEQ ID NO: 129279 - DNA, 25 bp, Saccharomyces pastorianus
gtttgagaccagatcaaagagcaat

SEQ ID NO: 129280 - DNA, 25 bp, Saccharomyces pastorianus
gatagcatcttcagttatcggtgaa

SEQ ID NO: 129281 - DNA, 25 bp, Saccharomyces pastorianus
attgctggaatcacatgccactgcc

SEQ ID NO: 129282 - DNA, 25 bp, Saccharomyces pastorianus
actgccggcaacaaggaatccttag

SEQ ID NO: 129283 - DNA, 25 bp, Saccharomyces pastorianus
gaggctcatcctgaaatttcgaccg

SEQ ID NO: 129284 - DNA, 25 bp, Saccharomyces pastorianus
atgagttttatgatgccgcggaatt

SEQ ID NO: 129285 - DNA, 25 bp, Saccharomyces pastorianus
gcgaaatttatcagcgctacaaagg

SEQ ID NO: 129286 - DNA, 25 bp, Saccharomyces pastorianus
tacggcaagtactctcggtcaaatt

SEQ ID NO: 129287 - DNA, 25 bp, Saccharomyces pastorianus
aacagaacgtctagcatctattgat

SEQ ID NO: 129288 - DNA, 25 bp, Saccharomyces pastorianus
acgacagccagtatgtccaggacga

SEQ ID NO: 129289 - DNA, 25 bp, Saccharomyces pastorianus
aagaccatagttgctgtcactacag

SEQ ID NO: 129290 - DNA, 25 bp, Saccharomyces pastorianus
acaggaatcagatactacggcaagt

SEQ ID NO: 129291 - DNA, 25 bp, Saccharomyces pastorianus
atatctgcaacatggactgagtcac

SEQ ID NO: 129292 - DNA, 25 bp, Saccharomyces pastorianus
agagttgcgaaacccttcaacccat

SEQ ID NO: 129293 - DNA, 25 bp, Saccharomyces pastorianus
gtattccgaactattagaccaggct

SEQ ID NO: 129294 - DNA, 25 bp, Saccharomyces pastorianus
gtacagatttttcaccgagcaggtt

SEQ ID NO: 129295 - DNA, 25 bp, Saccharomyces pastorianus
gaccaggctgcaacgtttgaagatt

SEQ ID NO: 129296 - DNA, 25 bp, Saccharomyces pastorianus
gagaactctatatgttgcggcattt

SEQ ID NO: 129297 - DNA, 25 bp, Saccharomyces pastorianus
ccgttctgaaatcgatggtgggcaa

SEQ ID NO: 129298 - DNA, 25 bp, Saccharomyces pastorianus
gacgttaccagttactttcaatgag

SEQ ID NO: 129299 - DNA, 25 bp, Saccharomyces pastorianus
caatgagcctacatctcttttacaa

SEQ ID NO: 129300 - DNA, 25 bp, Saccharomyces pastorianus
catcttcatacgcatctactacaaa

SEQ ID NO: 129301 - DNA, 25 bp, Saccharomyces pastorianus
agattagtctttgggccgttctgaa

SEQ ID NO: 129302 - DNA, 25 bp, Saccharomyces pastorianus
ggcacattaagttgcgtccaaatga

SEQ ID NO: 129303 - DNA, 25 bp, Saccharomyces pastorianus
atgggcctacggatgacggaacgaa

SEQ ID NO: 129304 - DNA, 25 bp, Saccharomyces pastorianus
gaacgttgtcaatcacacaaccggt

SEQ ID NO: 129305 - DNA, 25 bp, Saccharomyces pastorianus
acacaaccggtgatcattgcaagtt

SEQ ID NO: 129306 - DNA, 25 bp, Saccharomyces pastorianus
aagcacttaggattatggcacatta

SEQ ID NO: 129307 - DNA, 25 bp, Saccharomyces pastorianus
gctgcatcagcagggaatgggccta

SEQ ID NO: 129308 - DNA, 25 bp, Saccharomyces pastorianus
taacgccttttgctatcacgctgaa

SEQ ID NO: 129309 - DNA, 25 bp, Saccharomyces pastorianus
gtggatcctaggtggacactggaat

SEQ ID NO: 129310 - DNA, 25 bp, Saccharomyces pastorianus
gagaaaactagaaccgctgcatcag

SEQ ID NO: 129311 - DNA, 25 bp, Saccharomyces pastorianus
aagatggcgatctctcgttggagaa

SEQ ID NO: 129312 - DNA, 25 bp, Saccharomyces pastorianus
taggtattctcattggtaatccaca

SEQ ID NO: 129313 - DNA, 25 bp, Saccharomyces pastorianus
aatttggtccgatcattattggtgc

SEQ ID NO: 129314 - DNA, 25 bp, Saccharomyces pastorianus
gatgctgttgatgcctatgagttga

SEQ ID NO: 129315 - DNA, 25 bp, Saccharomyces pastorianus
ggctccgtaggtgttattcttctaa

SEQ ID NO: 129316 - DNA, 25 bp, Saccharomyces pastorianus
acgatgatgcggattctttgctaga

SEQ ID NO: 129317 - DNA, 25 bp, Saccharomyces pastorianus
gtaccataggtacgttccctgagta

SEQ ID NO: 129318 - DNA, 25 bp, Saccharomyces pastorianus
gatgacgttgtcagctcaagcgagg

SEQ ID NO: 129319 - DNA, 25 bp, Saccharomyces pastorianus
gggtttcgaagctagtgggctcatt

SEQ ID NO: 129320 - DNA, 25 bp, Saccharomyces pastorianus
tcaattacctgaccccaagacaaat

SEQ ID NO: 129321 - DNA, 25 bp, Saccharomyces pastorianus
cgcagcgttgcatggattgggtttc

SEQ ID NO: 129322 - DNA, 25 bp, Saccharomyces pastorianus
gaattcagtaaatgcgcagcgttgc

SEQ ID NO: 129323 - DNA, 25 bp, Saccharomyces pastorianus
gggcagaagatttccaatgttccaa

SEQ ID NO: 129324 - DNA, 25 bp, Saccharomyces pastorianus
gttacctcgtcaccgcaaagaattt

SEQ ID NO: 129325 - DNA, 25 bp, Saccharomyces pastorianus
ataaccaaacacctcctatggtcgc

SEQ ID NO: 129326 - DNA, 25 bp, Saccharomyces pastorianus
gagtagcccctctatgtgatgcaaa

SEQ ID NO: 129327 - DNA, 25 bp, Saccharomyces pastorianus
gaaaatatacgttacctcgtcaccg

SEQ ID NO: 129328 - DNA, 25 bp, Saccharomyces pastorianus
gagctcaacctgctgtacataatga

SEQ ID NO: 129329 - DNA, 25 bp, Saccharomyces pastorianus
ggagttccgaactttctacagggat

SEQ ID NO: 129330 - DNA, 25 bp, Saccharomyces pastorianus
gacgggatcttcgagagtagcccct

SEQ ID NO: 129331 - DNA, 25 bp, Saccharomyces pastorianus
tttaccgtactatccccacgaggag

SEQ ID NO: 129332 - DNA, 25 bp, Saccharomyces pastorianus
tacagggatctaccaatcaagggaa

SEQ ID NO: 129333 - DNA, 25 bp, Saccharomyces pastorianus
gaacaattttgtccatgcattatgc

SEQ ID NO: 129334 - DNA, 25 bp, Saccharomyces pastorianus
ttgattttggtctagccgaggctca

SEQ ID NO: 129335 - DNA, 25 bp, Saccharomyces pastorianus
gctagctccgactataatccatttt

SEQ ID NO: 129336 - DNA, 25 bp, Saccharomyces pastorianus
gttgctcccaactatacttttgaag

SEQ ID NO: 129337 - DNA, 25 bp, Saccharomyces pastorianus
ttattatctatctaccattcccaca

SEQ ID NO: 129338 - DNA, 25 bp, Saccharomyces pastorianus
ttcaatctttttgttgctcccaact

SEQ ID NO: 129339 - DNA, 25 bp, Saccharomyces pastorianus
tattgccacattaaattgcgcctat

SEQ ID NO: 129340 - DNA, 25 bp, Saccharomyces pastorianus
cattcggttactttggctacggctt

SEQ ID NO: 129341 - DNA, 25 bp, Saccharomyces pastorianus
gttcaccaattctctttagctacta

SEQ ID NO: 129342 - DNA, 25 bp, Saccharomyces pastorianus
gctactatgccaattttcaacctgt

SEQ ID NO: 129343 - DNA, 25 bp, Saccharomyces pastorianus
attggtcttttcgtgctttcagaac

SEQ ID NO: 129344 - DNA, 25 bp, Saccharomyces pastorianus
taagcggtctcatttcattcggtta

SEQ ID NO: 129345 - DNA, 25 bp, Saccharomyces pastorianus
ctaagatccgtgtcccattgaatca

SEQ ID NO: 129346 - DNA, 25 bp, Saccharomyces pastorianus
tcgtgtggtcatgcattttgtggta

SEQ ID NO: 129347 - DNA, 25 bp, Saccharomyces pastorianus
aattatgtcccgcagattcttgtaa

SEQ ID NO: 129348 - DNA, 25 bp, Saccharomyces pastorianus
ctcaactaaagggttcggctcatcc

SEQ ID NO: 129349 - DNA, 25 bp, Saccharomyces pastorianus
atgtcccgcagattcttgtaagaag

SEQ ID NO: 129350 - DNA, 25 bp, Saccharomyces pastorianus
tgcccaaaaagaaactagctcaact

SEQ ID NO: 129351 - DNA, 25 bp, Saccharomyces pastorianus
gaacgtttattgcatcgtgtggtca

SEQ ID NO: 129352 - DNA, 25 bp, Saccharomyces pastorianus
taggtgtttcgccaggattgacaat

SEQ ID NO: 129353 - DNA, 25 bp, Saccharomyces pastorianus
attatggccccaaattatgtcccgc

SEQ ID NO: 129354 - DNA, 25 bp, Saccharomyces pastorianus
aaagggttcggctcatccggataat

SEQ ID NO: 129355 - DNA, 25 bp, Saccharomyces pastorianus
gctcatccggataattatggcccca

SEQ ID NO: 129356 - DNA, 25 bp, Saccharomyces pastorianus
gcattttgtggtaggtgtttcgcca

SEQ ID NO: 129357 - DNA, 25 bp, Saccharomyces pastorianus
aactgctgcagaattgggccattga

SEQ ID NO: 129358 - DNA, 25 bp, Saccharomyces pastorianus
ggaagagttttccatcgtggcacat

SEQ ID NO: 129359 - DNA, 25 bp, Saccharomyces pastorianus
agaggccttgagacttcaccgagaa

SEQ ID NO: 129360 - DNA, 25 bp, Saccharomyces pastorianus
aatggcactcttcactgagttcaga

SEQ ID NO: 129361 - DNA, 25 bp, Saccharomyces pastorianus
tacccgaaggttatagcgcgtcatt

SEQ ID NO: 129362 - DNA, 25 bp, Saccharomyces pastorianus
tattcctgtttgttgcttgtgtggc

SEQ ID NO: 129363 - DNA, 25 bp, Saccharomyces pastorianus
cgatgctgatgaggaacgacacact

SEQ ID NO: 129364 - DNA, 25 bp, Saccharomyces pastorianus
cttaagtcgtttgtggagtggccca

SEQ ID NO: 129365 - DNA, 25 bp, Saccharomyces pastorianus
gcgcgtcatttgatactacgccaaa

SEQ ID NO: 129366 - DNA, 25 bp, Saccharomyces pastorianus
aattcgaagctagggcagccagcct

SEQ ID NO: 129367 - DNA, 25 bp, Saccharomyces pastorianus
tggcccagcgttgagcgatgctgat

SEQ ID NO: 129368 - DNA, 25 bp, Saccharomyces pastorianus
ctttacttgatttgctcgcgtctaa

SEQ ID NO: 129369 - DNA, 25 bp, Saccharomyces pastorianus
acatgactctttctgattgcgtcct

SEQ ID NO: 129370 - DNA, 25 bp, Saccharomyces pastorianus
gagcctggctatctttggaatctta

SEQ ID NO: 129371 - DNA, 25 bp, Saccharomyces pastorianus
atttttcatcggttgagccaacaga

SEQ ID NO: 129372 - DNA, 25 bp, Saccharomyces pastorianus
gcgaagtggaagatgccttggcaaa

SEQ ID NO: 129373 - DNA, 25 bp, Saccharomyces pastorianus
ttatctgattgctatcctcaacgct

SEQ ID NO: 129374 - DNA, 25 bp, Saccharomyces pastorianus
aagagtggcttacctttacttgatt

SEQ ID NO: 129375 - DNA, 25 bp, Saccharomyces pastorianus
taaacgaaccgtcaagccgcaaaat

SEQ ID NO: 129376 - DNA, 25 bp, Saccharomyces pastorianus
gcgtcctttttcaatattcaccttt

SEQ ID NO: 129377 - DNA, 25 bp, Saccharomyces pastorianus
aacaccttatattctcttggtagac

SEQ ID NO: 129378 - DNA, 25 bp, Saccharomyces pastorianus
aacgcttcttatcctgaccatgatt

SEQ ID NO: 129379 - DNA, 25 bp, Saccharomyces pastorianus
gtttatcgccacttatatgcattaa

SEQ ID NO: 129380 - DNA, 25 bp, Saccharomyces pastorianus
tactggcaatgcgattgcatccaga

SEQ ID NO: 129381 - DNA, 25 bp, Saccharomyces pastorianus
attcggtcctcattatatcgaaatg

SEQ ID NO: 129382 - DNA, 25 bp, Saccharomyces pastorianus
gccacttatatgcattaatcaacct

SEQ ID NO: 129383 - DNA, 25 bp, Saccharomyces pastorianus
caacagagctggaggagttcgagaa

SEQ ID NO: 129384 - DNA, 25 bp, Saccharomyces pastorianus
gagaatgtttatcgccacttatatg

SEQ ID NO: 129385 - DNA, 25 bp, Saccharomyces pastorianus
tgcatccagaggtttattcgcagca

SEQ ID NO: 129386 - DNA, 25 bp, Saccharomyces pastorianus
atcaaccttcattggtccgtattcg

SEQ ID NO: 129387 - DNA, 25 bp, Saccharomyces pastorianus
gagttcgagaatgtttatcgccact

SEQ ID NO: 129388 - DNA, 25 bp, Saccharomyces pastorianus
aatgcgattgcatccagaggtttat

SEQ ID NO: 129389 - DNA, 25 bp, Saccharomyces pastorianus
tccgtattcggtcctcattatatcg

SEQ ID NO: 129390 - DNA, 25 bp, Saccharomyces pastorianus
tggactgacgccagaaaatgttggt

SEQ ID NO: 129391 - DNA, 25 bp, Saccharomyces pastorianus
ttagctggtggactgacgccagaaa

SEQ ID NO: 129392 - DNA, 25 bp, Saccharomyces pastorianus
tggtgatgcgcttagattaaatggc

SEQ ID NO: 129393 - DNA, 25 bp, Saccharomyces pastorianus
gactgacgccagaaaatgttggtga

SEQ ID NO: 129394 - DNA, 25 bp, Saccharomyces pastorianus
agctggtggactgacgccagaaaat

SEQ ID NO: 129395 - DNA, 25 bp, Saccharomyces pastorianus
gacaaatggtgtaaaagactctaac

SEQ ID NO: 129396 - DNA, 25 bp, Saccharomyces pastorianus
aatgttggtgatgcgcttagattaa

SEQ ID NO: 129397 - DNA, 25 bp, Saccharomyces pastorianus
atgtaagcggaggtgtggagacaaa

SEQ ID NO: 129398 - DNA, 25 bp, Saccharomyces pastorianus
gatgcgcttagattaaatggcgtta

SEQ ID NO: 129399 - DNA, 25 bp, Saccharomyces pastorianus
atggtgtaaaagactctaacaaaat

SEQ ID NO: 129400 - DNA, 25 bp, Saccharomyces pastorianus
aaatggcgttattggtgttgatgta

SEQ ID NO: 129401 - DNA, 25 bp, Saccharomyces pastorianus
taatttcacaggtagttctggtcca

SEQ ID NO: 129402 - DNA, 25 bp, Saccharomyces pastorianus
ctgggtattatatgtgtgcccaata

SEQ ID NO: 129403 - DNA, 25 bp, Saccharomyces pastorianus
atgtgctctagattccgatgctgac

SEQ ID NO: 129404 - DNA, 25 bp, Saccharomyces pastorianus
attccgatgctgacttgctgggtat

SEQ ID NO: 129405 - DNA, 25 bp, Saccharomyces pastorianus
aagtttgcggcttgcagagcacaga

SEQ ID NO: 129406 - DNA, 25 bp, Saccharomyces pastorianus
tatatgtgtgcccaatagaaagaga

SEQ ID NO: 129407 - DNA, 25 bp, Saccharomyces pastorianus
gaggccgcagaatgtgctctagatt

SEQ ID NO: 129408 - DNA, 25 bp, Saccharomyces pastorianus
gatgctgacttgctgggtattatat

SEQ ID NO: 129409 - DNA, 25 bp, Saccharomyces pastorianus
gcagagcacagaggccgcagaatgt

SEQ ID NO: 129410 - DNA, 25 bp, Saccharomyces pastorianus
tcacaggtagttctggtccattggt

SEQ ID NO: 129411 - DNA, 25 bp, Saccharomyces pastorianus
ggtccattggtgaaagtttgcggct

SEQ ID NO: 129412 - DNA, 25 bp, Saccharomyces pastorianus
tcccaggcctcttgtgataaacttt

SEQ ID NO: 129413 - DNA, 25 bp, Saccharomyces pastorianus
tagcaaatggttctttcggctcccg

SEQ ID NO: 129414 - DNA, 25 bp, Saccharomyces pastorianus
aagtgccacttttcacacggacgaa

SEQ ID NO: 129415 - DNA, 25 bp, Saccharomyces pastorianus
tccgcttccaagtcctgaaactata

SEQ ID NO: 129416 - DNA, 25 bp, Saccharomyces pastorianus
ttctttacagattttggccgactaa

SEQ ID NO: 129417 - DNA, 25 bp, Saccharomyces pastorianus
accttgttcctagtggcgctaatgg

SEQ ID NO: 129418 - DNA, 25 bp, Saccharomyces pastorianus
gctaaacacgtttactccgaatcct

SEQ ID NO: 129419 - DNA, 25 bp, Saccharomyces pastorianus
aaatatgctcgattgccctagcaaa

SEQ ID NO: 129420 - DNA, 25 bp, Saccharomyces pastorianus
cggcgctaaactgttcacgtgagga

SEQ ID NO: 129421 - DNA, 25 bp, Saccharomyces pastorianus
agagattacctgacaacttttcccg

SEQ ID NO: 129422 - DNA, 25 bp, Saccharomyces pastorianus
tagatgaagcctctacggcgctaaa

SEQ ID NO: 129423 - DNA, 25 bp, Saccharomyces pastorianus
gcggactacatgtggcacattcata

SEQ ID NO: 129424 - DNA, 25 bp, Saccharomyces pastorianus
tcgaattactttaaatgcggactac

SEQ ID NO: 129425 - DNA, 25 bp, Saccharomyces pastorianus
gtctgtgtcggaatggtcgaattac

SEQ ID NO: 129426 - DNA, 25 bp, Saccharomyces pastorianus
atccgtctgtgtcggaatggtcgaa

SEQ ID NO: 129427 - DNA, 25 bp, Saccharomyces pastorianus
gtggcacattcatacttgaaaataa

SEQ ID NO: 129428 - DNA, 25 bp, Saccharomyces pastorianus
aaatgcggactacatgtggcacatt

SEQ ID NO: 129429 - DNA, 25 bp, Saccharomyces pastorianus
actttaaatgcggactacatgtggc

SEQ ID NO: 129430 - DNA, 25 bp, Saccharomyces pastorianus
atgcggactacatgtggcacattca

SEQ ID NO: 129431 - DNA, 25 bp, Saccharomyces pastorianus
acatgtggcacattcatacttgaaa

SEQ ID NO: 129432 - DNA, 25 bp, Saccharomyces pastorianus
gccatagatccgtctgtgtcggaat

SEQ ID NO: 129433 - DNA, 25 bp, Saccharomyces pastorianus
tagatccgtctgtgtcggaatggtc

SEQ ID NO: 129434 - DNA, 25 bp, Saccharomyces pastorianus
gattattgcgatttttcagttttgc

SEQ ID NO: 129435 - DNA, 25 bp, Saccharomyces pastorianus
atcgctaggtctcctggcagagtaa

SEQ ID NO: 129436 - DNA, 25 bp, Saccharomyces pastorianus
ttagcggttgtagatgcatttttcc

SEQ ID NO: 129437 - DNA, 25 bp, Saccharomyces pastorianus
gcatttttccaaacataccatgtca

SEQ ID NO: 129438 - DNA, 25 bp, Saccharomyces pastorianus
atgtcaaacctgattttatcgctag

SEQ ID NO: 129439 - DNA, 25 bp, Saccharomyces pastorianus
cattaccttaacaaatgcggaccct

SEQ ID NO: 129440 - DNA, 25 bp, Saccharomyces pastorianus
gtggatatgctttgcgcagttaaaa

SEQ ID NO: 129441 - DNA, 25 bp, Saccharomyces pastorianus
agttctccggtcagagatttaccaa

SEQ ID NO: 129442 - DNA, 25 bp, Saccharomyces pastorianus
gagatttaccaaggtctttcgaaca

SEQ ID NO: 129443 - DNA, 25 bp, Saccharomyces pastorianus
gttccaatattcagttctccggtca

SEQ ID NO: 129444 - DNA, 25 bp, Saccharomyces pastorianus
gcggaccctaaatttgctcagcgaa

SEQ ID NO: 129445 - DNA, 25 bp, Saccharomyces pastorianus
gaatctggtcggaattatgctgcac

SEQ ID NO: 129446 - DNA, 25 bp, Saccharomyces pastorianus
tatactatgttggtcttggcttaat

SEQ ID NO: 129447 - DNA, 25 bp, Saccharomyces pastorianus
gtaagacaatcttccttcctaagcc

SEQ ID NO: 129448 - DNA, 25 bp, Saccharomyces pastorianus
ctgtggtgttacacaacctgtctca

SEQ ID NO: 129449 - DNA, 25 bp, Saccharomyces pastorianus
atcctatatatgtcaccgaaccttc

SEQ ID NO: 129450 - DNA, 25 bp, Saccharomyces pastorianus
gtcatttatgctttctttctgtggt

SEQ ID NO: 129451 - DNA, 25 bp, Saccharomyces pastorianus
gcgtcaagatctgcggtgtactttt

SEQ ID NO: 129452 - DNA, 25 bp, Saccharomyces pastorianus
ctaagccccgtatctatactcaata

SEQ ID NO: 129453 - DNA, 25 bp, Saccharomyces pastorianus
ccttccatccgctaatgttatctta

SEQ ID NO: 129454 - DNA, 25 bp, Saccharomyces pastorianus
gacattcatgtggaaggcttcccca

SEQ ID NO: 129455 - DNA, 25 bp, Saccharomyces pastorianus
gtgtgtattacctcttccatgtaag

SEQ ID NO: 129456 - DNA, 25 bp, Saccharomyces pastorianus
ctccacttctgatgtcaccagaatt

SEQ ID NO: 129457 - DNA, 25 bp, Saccharomyces pastorianus
ccaagctactcaaaagcgtactcac

SEQ ID NO: 129458 - DNA, 25 bp, Saccharomyces pastorianus
atctgctatcagaccagctggccaa

SEQ ID NO: 129459 - DNA, 25 bp, Saccharomyces pastorianus
tgctatcagaccagctggccaagct

SEQ ID NO: 129460 - DNA, 25 bp, Saccharomyces pastorianus
tgatgtcaccagaattatcaactct

SEQ ID NO: 129461 - DNA, 25 bp, Saccharomyces pastorianus
ccaatctgctatcagaccagctggc

SEQ ID NO: 129462 - DNA, 25 bp, Saccharomyces pastorianus
tggccaagctactcaaaagcgtact

SEQ ID NO: 129463 - DNA, 25 bp, Saccharomyces pastorianus
atcatctccacttctgatgtcacca

SEQ ID NO: 129464 - DNA, 25 bp, Saccharomyces pastorianus
tatcagaccagctggccaagctact

SEQ ID NO: 129465 - DNA, 25 bp, Saccharomyces pastorianus
acatcatctccacttctgatgtcac

SEQ ID NO: 129466 - DNA, 25 bp, Saccharomyces pastorianus
atctccacttctgatgtcaccagaa

SEQ ID NO: 129467 - DNA, 25 bp, Saccharomyces pastorianus
aagctgctttcacaagttggaccaa

SEQ ID NO: 129468 - DNA, 25 bp, Saccharomyces pastorianus
caagaaattgagagccggtaagggt

SEQ ID NO: 129469 - DNA, 25 bp, Saccharomyces pastorianus
gtcaaggccttgagaaatgttccag

SEQ ID NO: 129470 - DNA, 25 bp, Saccharomyces pastorianus
ggtgctcacttaggtagatctgtta

SEQ ID NO: 129471 - DNA, 25 bp, Saccharomyces pastorianus
actgctaacgttgcttctttgaact

SEQ ID NO: 129472 - DNA, 25 bp, Saccharomyces pastorianus
agaccaaggaagctgttgctgcttt

SEQ ID NO: 129473 - DNA, 25 bp, Saccharomyces pastorianus
agaaatcccattggttgtctccact

SEQ ID NO: 129474 - DNA, 25 bp, Saccharomyces pastorianus
ttccaggtgttgaaactgctaacgt

SEQ ID NO: 129475 - DNA, 25 bp, Saccharomyces pastorianus
tctgttatctggaccgaagctgctt

SEQ ID NO: 129476 - DNA, 25 bp, Saccharomyces pastorianus
gttgtctccactgacttggaatcta

SEQ ID NO: 129477 - DNA, 25 bp, Saccharomyces pastorianus
ggtaccggtcgtgccgtcgctcgta

SEQ ID NO: 129478 - DNA, 25 bp, Saccharomyces pastorianus
ctgacttctgatatgccgttaattt

SEQ ID NO: 129479 - DNA, 25 bp, Saccharomyces pastorianus
tgtatggataaatttcgtatacccc

SEQ ID NO: 129480 - DNA, 25 bp, Saccharomyces pastorianus
gccaccggttcgaaaatcaacttca

SEQ ID NO: 129481 - DNA, 25 bp, Saccharomyces pastorianus
gtgaagagcttgaggttttatctgt

SEQ ID NO: 129482 - DNA, 25 bp, Saccharomyces pastorianus
gtcaacttgatcgattttgcacgtt

SEQ ID NO: 129483 - DNA, 25 bp, Saccharomyces pastorianus
tatgccgttaattttcgatgaagta

SEQ ID NO: 129484 - DNA, 25 bp, Saccharomyces pastorianus
aaaagctgctaatgttaaagtcaac

SEQ ID NO: 129485 - DNA, 25 bp, Saccharomyces pastorianus
tcgattttgcacgttgtgttactaa

SEQ ID NO: 129486 - DNA, 25 bp, Saccharomyces pastorianus
taaagggttcttacgaggtgtgaag

SEQ ID NO: 129487 - DNA, 25 bp, Saccharomyces pastorianus
aatacgagcttattttcgacgctga

SEQ ID NO: 129488 - DNA, 25 bp, Saccharomyces pastorianus
agattcgaatagtttcacctccgcc

SEQ ID NO: 129489 - DNA, 25 bp, Saccharomyces pastorianus
catttgcgccaaaaagagtcggaag

SEQ ID NO: 129490 - DNA, 25 bp, Saccharomyces pastorianus
gaaagatcttaatgtacctgagacg

SEQ ID NO: 129491 - DNA, 25 bp, Saccharomyces pastorianus
ggatacctctcacgaaattcatgat

SEQ ID NO: 129492 - DNA, 25 bp, Saccharomyces pastorianus
ggcagaaaggcgagtacatatttaa

SEQ ID NO: 129493 - DNA, 25 bp, Saccharomyces pastorianus
aaactttcttccgtcttacatggca

SEQ ID NO: 129494 - DNA, 25 bp, Saccharomyces pastorianus
gggtgcataacaacattgaaagatc

SEQ ID NO: 129495 - DNA, 25 bp, Saccharomyces pastorianus
gaaattcatgataaaatacccgata

SEQ ID NO: 129496 - DNA, 25 bp, Saccharomyces pastorianus
acattaagagagcagcagcagcatt

SEQ ID NO: 129497 - DNA, 25 bp, Saccharomyces pastorianus
gagtcggaagggtgcataacaacat

SEQ ID NO: 129498 - DNA, 25 bp, Saccharomyces pastorianus
atacccgatacattaagagagcagc

SEQ ID NO: 129499 - DNA, 25 bp, Saccharomyces pastorianus
tcttccgtcttacatggcagaaagg

SEQ ID NO: 129500 - DNA, 25 bp, Saccharomyces pastorianus
ataaattgtgcctctggtatagcga

SEQ ID NO: 129501 - DNA, 25 bp, Saccharomyces pastorianus
actttatcacaatccctaaggcaag

SEQ ID NO: 129502 - DNA, 25 bp, Saccharomyces pastorianus
tattcagcctgccaccataaattgt

SEQ ID NO: 129503 - DNA, 25 bp, Saccharomyces pastorianus
ggtatagcgacacttcctagttcat

SEQ ID NO: 129504 - DNA, 25 bp, Saccharomyces pastorianus
gggaatatcccctagcagttgaact

SEQ ID NO: 129505 - DNA, 25 bp, Saccharomyces pastorianus
tgtcgcctaagtccacttatcagga

SEQ ID NO: 129506 - DNA, 25 bp, Saccharomyces pastorianus
aacgttaaagcctgtttcttctgca

SEQ ID NO: 129507 - DNA, 25 bp, Saccharomyces pastorianus
gatattgatactattcagcctgcca

SEQ ID NO: 129508 - DNA, 25 bp, Saccharomyces pastorianus
gttcatataaccgacatactttcaa

SEQ ID NO: 129509 - DNA, 25 bp, Saccharomyces pastorianus
acctcaacagtttgtgccacatagc

SEQ ID NO: 129510 - DNA, 25 bp, Saccharomyces pastorianus
tttcttctgcaacatactatcctca

SEQ ID NO: 129511 - DNA, 25 bp, Saccharomyces pastorianus
aaactctttctgcaactctttatca

SEQ ID NO: 129512 - DNA, 25 bp, Saccharomyces pastorianus
gttccagtccatcttttttaacaca

SEQ ID NO: 129513 - DNA, 25 bp, Saccharomyces pastorianus
ccccgaattatatcagcaacgcaca

SEQ ID NO: 129514 - DNA, 25 bp, Saccharomyces pastorianus
gaatttgcaggatcctttcttgaaa

SEQ ID NO: 129515 - DNA, 25 bp, Saccharomyces pastorianus
gtcccatgatgcatcgaatacgtct

SEQ ID NO: 129516 - DNA, 25 bp, Saccharomyces pastorianus
cataatgcgcgtttgggttccagtc

SEQ ID NO: 129517 - DNA, 25 bp, Saccharomyces pastorianus
attctcactgcaaccaattctaggg

SEQ ID NO: 129518 - DNA, 25 bp, Saccharomyces pastorianus
ggctgccatcttgactctggtaaaa

SEQ ID NO: 129519 - DNA, 25 bp, Saccharomyces pastorianus
aaaatcaagagcctcgtcccatgat

SEQ ID NO: 129520 - DNA, 25 bp, Saccharomyces pastorianus
gactcttggtgattcatcgtcacaa

SEQ ID NO: 129521 - DNA, 25 bp, Saccharomyces pastorianus
gctttggatggctcgcattcagtaa

SEQ ID NO: 129522 - DNA, 25 bp, Saccharomyces pastorianus
ccaagttgttgttgtcagcgcaaca

SEQ ID NO: 129523 - DNA, 25 bp, Saccharomyces pastorianus
aacaggtcattctcgtgtactgata

SEQ ID NO: 129524 - DNA, 25 bp, Saccharomyces pastorianus
gcggctaatccaatcaaactttgct

SEQ ID NO: 129525 - DNA, 25 bp, Saccharomyces pastorianus
ggcgcgcggtattgatgtccaacaa

SEQ ID NO: 129526 - DNA, 25 bp, Saccharomyces pastorianus
tcattaactatgacctaccagaaat

SEQ ID NO: 129527 - DNA, 25 bp, Saccharomyces pastorianus
ctgatatcgacggatgtttgggcgc

SEQ ID NO: 129528 - DNA, 25 bp, Saccharomyces pastorianus
gtagattggttatctcagcggctaa

SEQ ID NO: 129529 - DNA, 25 bp, Saccharomyces pastorianus
aactttgctgtagtctccatgcatg

SEQ ID NO: 129530 - DNA, 25 bp, Saccharomyces pastorianus
agtggaaattcgatactctgtgtga

SEQ ID NO: 129531 - DNA, 25 bp, Saccharomyces pastorianus
aaattacatccatcgtatcggtaga

SEQ ID NO: 129532 - DNA, 25 bp, Saccharomyces pastorianus
atacgattctttgaccattacacaa

SEQ ID NO: 129533 - DNA, 25 bp, Saccharomyces pastorianus
taagtctttgaaattaccataccgt

SEQ ID NO: 129534 - DNA, 25 bp, Saccharomyces pastorianus
agaagccggttctcacggtaaggat

SEQ ID NO: 129535 - DNA, 25 bp, Saccharomyces pastorianus
gcaattgccaattcactatgtcggt

SEQ ID NO: 129536 - DNA, 25 bp, Saccharomyces pastorianus
aatgctgccgctaaaaagtacgatt

SEQ ID NO: 129537 - DNA, 25 bp, Saccharomyces pastorianus
gtacactgtttgaattccactttgg

SEQ ID NO: 129538 - DNA, 25 bp, Saccharomyces pastorianus
ggtgaaccagaatttttaccattcg

SEQ ID NO: 129539 - DNA, 25 bp, Saccharomyces pastorianus
agctttgtgctgtatcttggagaac

SEQ ID NO: 129540 - DNA, 25 bp, Saccharomyces pastorianus
gtctcttgctccaattgtactgatt

SEQ ID NO: 129541 - DNA, 25 bp, Saccharomyces pastorianus
actatgtcggttactcctcttgttt

SEQ ID NO: 129542 - DNA, 25 bp, Saccharomyces pastorianus
gaacaattcgtcatcactgaacctg

SEQ ID NO: 129543 - DNA, 25 bp, Saccharomyces pastorianus
atcgttggtatcgtttccggtgaat

SEQ ID NO: 129544 - DNA, 25 bp, Saccharomyces pastorianus
gacatcgttaccgtcggccaatgta

SEQ ID NO: 129545 - DNA, 25 bp, Saccharomyces pastorianus
cgtaccattgtcatcagaagggctt

SEQ ID NO: 129546 - DNA, 25 bp, Saccharomyces pastorianus
aagggcttacttgcattacattcca

SEQ ID NO: 129547 - DNA, 25 bp, Saccharomyces pastorianus
gttggtgacatcgttaccgtcggcc

SEQ ID NO: 129548 - DNA, 25 bp, Saccharomyces pastorianus
ctccaagactgttagattcaacgtt

SEQ ID NO: 129549 - DNA, 25 bp, Saccharomyces pastorianus
acacaagaacgttccagttcacgtt

SEQ ID NO: 129550 - DNA, 25 bp, Saccharomyces pastorianus
catcgttaccgtcggccaatgtaga

SEQ ID NO: 129551 - DNA, 25 bp, Saccharomyces pastorianus
ttccagttcacgtttccccagcttt

SEQ ID NO: 129552 - DNA, 25 bp, Saccharomyces pastorianus
cagctttccgtgtccaagttggtga

SEQ ID NO: 129553 - DNA, 25 bp, Saccharomyces pastorianus
tggtgacatcgttaccgtcggccaa

SEQ ID NO: 129554 - DNA, 25 bp, Saccharomyces pastorianus
ttggtgacatcgttaccgtcggcca

SEQ ID NO: 129555 - DNA, 25 bp, Saccharomyces pastorianus
gtatagctacctacaagcccggata

SEQ ID NO: 129556 - DNA, 25 bp, Saccharomyces pastorianus
gtatgttgagcattcctgtttctga

SEQ ID NO: 129557 - DNA, 25 bp, Saccharomyces pastorianus
aagtgtggttcaaagcgaggttcta

SEQ ID NO: 129558 - DNA, 25 bp, Saccharomyces pastorianus
gcatgagcggaactagatcccgtat

SEQ ID NO: 129559 - DNA, 25 bp, Saccharomyces pastorianus
gatcccgtatacagtgccgctataa

SEQ ID NO: 129560 - DNA, 25 bp, Saccharomyces pastorianus
aagaggcacaccaatatcaagggat

SEQ ID NO: 129561 - DNA, 25 bp, Saccharomyces pastorianus
gatatcctcgaactggtcttgaact

SEQ ID NO: 129562 - DNA, 25 bp, Saccharomyces pastorianus
gagaattagcgataatcctaccttc

SEQ ID NO: 129563 - DNA, 25 bp, Saccharomyces pastorianus
attggactgtcgtcagtgaacgcat

SEQ ID NO: 129564 - DNA, 25 bp, Saccharomyces pastorianus
aagtggctgctagaacgattgaaac

SEQ ID NO: 129565 - DNA, 25 bp, Saccharomyces pastorianus
acagctacctaaaacgtcctattca

SEQ ID NO: 129566 - DNA, 25 bp, Saccharomyces pastorianus
acttttgtggccagtagttctctgc

SEQ ID NO: 129567 - DNA, 25 bp, Saccharomyces pastorianus
aaggctttccaactctaacagggat

SEQ ID NO: 129568 - DNA, 25 bp, Saccharomyces pastorianus
gcaattccaggcctcatcgaataaa

SEQ ID NO: 129569 - DNA, 25 bp, Saccharomyces pastorianus
gattttgagccattcgatgcgagtc

SEQ ID NO: 129570 - DNA, 25 bp, Saccharomyces pastorianus
gagtcattggactgtctcgcagaat

SEQ ID NO: 129571 - DNA, 25 bp, Saccharomyces pastorianus
gctatgacgcactacaatactacaa

SEQ ID NO: 129572 - DNA, 25 bp, Saccharomyces pastorianus
ggagctaatggttctttccataaac

SEQ ID NO: 129573 - DNA, 25 bp, Saccharomyces pastorianus
actacaacagtagcgccatggcatc

SEQ ID NO: 129574 - DNA, 25 bp, Saccharomyces pastorianus
gatgcgagtcattatacaaccctgt

SEQ ID NO: 129575 - DNA, 25 bp, Saccharomyces pastorianus
tctgctcgctaccattgaggttatt

SEQ ID NO: 129576 - DNA, 25 bp, Saccharomyces pastorianus
taaaccttccctcgatatacttatc

SEQ ID NO: 129577 - DNA, 25 bp, Saccharomyces pastorianus
aagcaagtacttgcactcttggaaa

SEQ ID NO: 129578 - DNA, 25 bp, Saccharomyces pastorianus
aagatgcacaactggctgtcaggcc

SEQ ID NO: 129579 - DNA, 25 bp, Saccharomyces pastorianus
gtcaggccgtatccgttgaagcgca

SEQ ID NO: 129580 - DNA, 25 bp, Saccharomyces pastorianus
gcgtccgatagttcacaaagcttta

SEQ ID NO: 129581 - DNA, 25 bp, Saccharomyces pastorianus
tagagggttatttctctcctagaaa

SEQ ID NO: 129582 - DNA, 25 bp, Saccharomyces pastorianus
ttacccgctaacagtcagctggtta

SEQ ID NO: 129583 - DNA, 25 bp, Saccharomyces pastorianus
gatggaccatcaagatcactcagaa

SEQ ID NO: 129584 - DNA, 25 bp, Saccharomyces pastorianus
ttgaagcgcaattcctcttcaggga

SEQ ID NO: 129585 - DNA, 25 bp, Saccharomyces pastorianus
atctatcaagtctgttgtttccggg

SEQ ID NO: 129586 - DNA, 25 bp, Saccharomyces pastorianus
gaggaacaaagaccattacccgcta

SEQ ID NO: 129587 - DNA, 25 bp, Saccharomyces pastorianus
ggcagtgtgacaccagcaaacatat

SEQ ID NO: 129588 - DNA, 25 bp, Saccharomyces pastorianus
aagacatgttgactatctgtcacat

SEQ ID NO: 129589 - DNA, 25 bp, Saccharomyces pastorianus
caccgccggcggataatgatagcta

SEQ ID NO: 129590 - DNA, 25 bp, Saccharomyces pastorianus
gatgttgatctagtaaatgctgcta

SEQ ID NO: 129591 - DNA, 25 bp, Saccharomyces pastorianus
taattcttcaagcaattcttcagat

SEQ ID NO: 129592 - DNA, 25 bp, Saccharomyces pastorianus
aaattgctaggaaggtcagacgacc

SEQ ID NO: 129593 - DNA, 25 bp, Saccharomyces pastorianus
gctgctaggttagaaaatgcctcat

SEQ ID NO: 129594 - DNA, 25 bp, Saccharomyces pastorianus
gatcaatgggccttcttgatgaata

SEQ ID NO: 129595 - DNA, 25 bp, Saccharomyces pastorianus
gatgaatatattgaccctaccaaga

SEQ ID NO: 129596 - DNA, 25 bp, Saccharomyces pastorianus
gatagctacttaattccacaagatg

SEQ ID NO: 129597 - DNA, 25 bp, Saccharomyces pastorianus
tatcaggaacactcaacctccgttt

SEQ ID NO: 129598 - DNA, 25 bp, Saccharomyces pastorianus
gggccttcagtatcgatggctgttc

SEQ ID NO: 129599 - DNA, 25 bp, Saccharomyces pastorianus
gttcagagctatgttcagtcggcat

SEQ ID NO: 129600 - DNA, 25 bp, Saccharomyces pastorianus
tgggaacacaagacctgagccgtat

SEQ ID NO: 129601 - DNA, 25 bp, Saccharomyces pastorianus
ggccatttacggaaattctgcaacc

SEQ ID NO: 129602 - DNA, 25 bp, Saccharomyces pastorianus
ggaacaagctcgaatacccaatggt

SEQ ID NO: 129603 - DNA, 25 bp, Saccharomyces pastorianus
gtcagtttagttccatgattgtgca

SEQ ID NO: 129604 - DNA, 25 bp, Saccharomyces pastorianus
ttcagttggcctcaaattgttcttt

SEQ ID NO: 129605 - DNA, 25 bp, Saccharomyces pastorianus
ctctaaccaatcaaaagcccatctg

SEQ ID NO: 129606 - DNA, 25 bp, Saccharomyces pastorianus
aggtctagctagttattcccagttg

SEQ ID NO: 129607 - DNA, 25 bp, Saccharomyces pastorianus
atcaggcttcgcattgtcagtttag

SEQ ID NO: 129608 - DNA, 25 bp, Saccharomyces pastorianus
gcgatgtctatttcagctctaacca

SEQ ID NO: 129609 - DNA, 25 bp, Saccharomyces pastorianus
atctcgaaggttgctttggtttgac

SEQ ID NO: 129610 - DNA, 25 bp, Saccharomyces pastorianus
caacactatgagactggtgcacagt

SEQ ID NO: 129611 - DNA, 25 bp, Saccharomyces pastorianus
gatccttgaagatcccctatcaaat

SEQ ID NO: 129612 - DNA, 25 bp, Saccharomyces pastorianus
gctgcagttcccgttcaaagatcaa

SEQ ID NO: 129613 - DNA, 25 bp, Saccharomyces pastorianus
gacagcctcaccaatcagatgatga

SEQ ID NO: 129614 - DNA, 25 bp, Saccharomyces pastorianus
aaactatatcaagcgacagcctcac

SEQ ID NO: 129615 - DNA, 25 bp, Saccharomyces pastorianus
tagacagtctagtgctgcagttccc

SEQ ID NO: 129616 - DNA, 25 bp, Saccharomyces pastorianus
gtttagatgaatcattgcaccgcaa

SEQ ID NO: 129617 - DNA, 25 bp, Saccharomyces pastorianus
ggagatgatgggtcactttccattt

SEQ ID NO: 129618 - DNA, 25 bp, Saccharomyces pastorianus
gagcctgctcaaataatgggttata

SEQ ID NO: 129619 - DNA, 25 bp, Saccharomyces pastorianus
aaccaatatcgaatgtctagacagt

SEQ ID NO: 129620 - DNA, 25 bp, Saccharomyces pastorianus
tggtgcacagttttcaaacacagag

SEQ ID NO: 129621 - DNA, 25 bp, Saccharomyces pastorianus
cttggaattacaagtacacgaaatt

SEQ ID NO: 129622 - DNA, 25 bp, Saccharomyces pastorianus
actctttgtctactttggctcatca

SEQ ID NO: 129623 - DNA, 25 bp, Saccharomyces pastorianus
aactctttgtctactttggctcatc

SEQ ID NO: 129624 - DNA, 25 bp, Saccharomyces pastorianus
tgttttcgctgaattgaccaatatg

SEQ ID NO: 129625 - DNA, 25 bp, Saccharomyces pastorianus
tgcgggtaccattgcaggcagtgac

SEQ ID NO: 129626 - DNA, 25 bp, Saccharomyces pastorianus
tgaccaatatggatgaagttcacgg

SEQ ID NO: 129627 - DNA, 25 bp, Saccharomyces pastorianus
gaagttcacggtggttcaccatggg

SEQ ID NO: 129628 - DNA, 25 bp, Saccharomyces pastorianus
ttcgctgaattgaccaatatggatg

SEQ ID NO: 129629 - DNA, 25 bp, Saccharomyces pastorianus
acaagtacacgaaattcaaggcaag

SEQ ID NO: 129630 - DNA, 25 bp, Saccharomyces pastorianus
gaatgttttcgctgaattgaccaat

SEQ ID NO: 129631 - DNA, 25 bp, Saccharomyces pastorianus
ctctttgtctactttggctcatcac

SEQ ID NO: 129632 - DNA, 25 bp, Saccharomyces pastorianus
cttggaattacaagtacacgaaatt

SEQ ID NO: 129633 - DNA, 25 bp, Saccharomyces pastorianus
aactctttgtctactttggctcatc

SEQ ID NO: 129634 - DNA, 25 bp, Saccharomyces pastorianus
tgttttcgctgaattgaccaatatg

SEQ ID NO: 129635 - DNA, 25 bp, Saccharomyces pastorianus
tgcgggtaccattgcaggcagtgac

SEQ ID NO: 129636 - DNA, 25 bp, Saccharomyces pastorianus
aggcagtgacggttcaagatctcct

SEQ ID NO: 129637 - DNA, 25 bp, Saccharomyces pastorianus
tgaccaatatggatgaagttcacgg

SEQ ID NO: 129638 - DNA, 25 bp, Saccharomyces pastorianus
gaagttcacggtggttcaccatggg

SEQ ID NO: 129639 - DNA, 25 bp, Saccharomyces pastorianus
acaagtacacgaaattcaaggcaag

SEQ ID NO: 129640 - DNA, 25 bp, Saccharomyces pastorianus
acggtatcatttttgtcccattggg

SEQ ID NO: 129641 - DNA, 25 bp, Saccharomyces pastorianus
gaatgttttcgctgaattgaccaat

SEQ ID NO: 129642 - DNA, 25 bp, Saccharomyces pastorianus
ctctttgtctactttggctcatcac

SEQ ID NO: 129643 - DNA, 25 bp, Saccharomyces pastorianus
atatggtcacgttgctgccaccgca

SEQ ID NO: 129644 - DNA, 25 bp, Saccharomyces pastorianus
tcacgttgctgccaccgcagaggca

SEQ ID NO: 129645 - DNA, 25 bp, Saccharomyces pastorianus
cgcagaggcagaaaagaagggaatt

SEQ ID NO: 129646 - DNA, 25 bp, Saccharomyces pastorianus
aaagaagggaattgaagccgctgga

SEQ ID NO: 129647 - DNA, 25 bp, Saccharomyces pastorianus
actatatggtcacgttgctgccacc

SEQ ID NO: 129648 - DNA, 25 bp, Saccharomyces pastorianus
ttgctgccaccgcagaggcagaaaa

SEQ ID NO: 129649 - DNA, 25 bp, Saccharomyces pastorianus
ctatcatcatttacacactatatgg

SEQ ID NO: 129650 - DNA, 25 bp, Saccharomyces pastorianus
tttacacactatatggtcacgttgc

SEQ ID NO: 129651 - DNA, 25 bp, Saccharomyces pastorianus
atggtcacgttgctgccaccgcaga

SEQ ID NO: 129652 - DNA, 25 bp, Saccharomyces pastorianus
acactatatggtcacgttgctgcca

SEQ ID NO: 129653 - DNA, 25 bp, Saccharomyces pastorianus
acacactatatggtcacgttgctgc

SEQ ID NO: 129654 - DNA, 25 bp, Saccharomyces pastorianus
gagcgaagcagtaaacacgatccat

SEQ ID NO: 129655 - DNA, 25 bp, Saccharomyces pastorianus
gtatagcacatccacaacccttcaa

SEQ ID NO: 129656 - DNA, 25 bp, Saccharomyces pastorianus
acgatttggagcgaagcagtaaaca

SEQ ID NO: 129657 - DNA, 25 bp, Saccharomyces pastorianus
ctcagagagctcacaattcggaaaa

SEQ ID NO: 129658 - DNA, 25 bp, Saccharomyces pastorianus
gctcacaattcggaaaacgatttgg

SEQ ID NO: 129659 - DNA, 25 bp, Saccharomyces pastorianus
gcagtaaacacgatccatttgaaac

SEQ ID NO: 129660 - DNA, 25 bp, Saccharomyces pastorianus
gagagctcacaattcggaaaacgat

SEQ ID NO: 129661 - DNA, 25 bp, Saccharomyces pastorianus
gaaacgtatagcacatccacaaccc

SEQ ID NO: 129662 - DNA, 25 bp, Saccharomyces pastorianus
gaagcagtaaacacgatccatttga

SEQ ID NO: 129663 - DNA, 25 bp, Saccharomyces pastorianus
aaaactcagagagctcacaattcgg

SEQ ID NO: 129664 - DNA, 25 bp, Saccharomyces pastorianus
gatccatttgaaacgtatagcacat

SEQ ID NO: 129665 - DNA, 25 bp, Saccharomyces pastorianus
aattggtgctgaatggggtctcgcc

SEQ ID NO: 129666 - DNA, 25 bp, Saccharomyces pastorianus
acaagtgtggaaagaggcgctattt

SEQ ID NO: 129667 - DNA, 25 bp, Saccharomyces pastorianus
taggtgctgaactttacaagtgtgg

SEQ ID NO: 129668 - DNA, 25 bp, Saccharomyces pastorianus
atcatttttggatttgtgtcagcct

SEQ ID NO: 129669 - DNA, 25 bp, Saccharomyces pastorianus
cgtcgtctatattccggttattaat

SEQ ID NO: 129670 - DNA, 25 bp, Saccharomyces pastorianus
gataaagtgtttttgcataaaccaa

SEQ ID NO: 129671 - DNA, 25 bp, Saccharomyces pastorianus
gtctatattccggttattaatgata

SEQ ID NO: 129672 - DNA, 25 bp, Saccharomyces pastorianus
agcccagtcaaggaatttttcagaa

SEQ ID NO: 129673 - DNA, 25 bp, Saccharomyces pastorianus
ttggatttgtgtcagccttccccgt

SEQ ID NO: 129674 - DNA, 25 bp, Saccharomyces pastorianus
tccccgtcgtctatattccggttat

SEQ ID NO: 129675 - DNA, 25 bp, Saccharomyces pastorianus
gccattgcattcacaattgcattct

SEQ ID NO: 129676 - DNA, 25 bp, Saccharomyces pastorianus
agtgtgatgctcaggcattcttcga

SEQ ID NO: 129677 - DNA, 25 bp, Saccharomyces pastorianus
gtgaacttttcacatggtcaggcat

SEQ ID NO: 129678 - DNA, 25 bp, Saccharomyces pastorianus
aatatgcttgtctttatggcccaat

SEQ ID NO: 129679 - DNA, 25 bp, Saccharomyces pastorianus
tggttggcagccattgcaggtttga

SEQ ID NO: 129680 - DNA, 25 bp, Saccharomyces pastorianus
ttaagggccttggtagtgtgctctc

SEQ ID NO: 129681 - DNA, 25 bp, Saccharomyces pastorianus
ctgccccgctatggatattcatgta

SEQ ID NO: 129682 - DNA, 25 bp, Saccharomyces pastorianus
ggcattatgctttcacacattcgat

SEQ ID NO: 129683 - DNA, 25 bp, Saccharomyces pastorianus
tgggtcgcactatctccaataggaa

SEQ ID NO: 129684 - DNA, 25 bp, Saccharomyces pastorianus
aaacccactggacaagatcgacttg

SEQ ID NO: 129685 - DNA, 25 bp, Saccharomyces pastorianus
ttcttcgagagttatctggctgccc

SEQ ID NO: 129686 - DNA, 25 bp, Saccharomyces pastorianus
agattaatgtgttccttggctcaac

SEQ ID NO: 129687 - DNA, 25 bp, Saccharomyces pastorianus
acagatgattgaggcttttggaggt

SEQ ID NO: 129688 - DNA, 25 bp, Saccharomyces pastorianus
tttggaggtgggaagtcccgctaca

SEQ ID NO: 129689 - DNA, 25 bp, Saccharomyces pastorianus
tacattgttaatttcggtcacggta

SEQ ID NO: 129690 - DNA, 25 bp, Saccharomyces pastorianus
ggaagtcccgctacattgttaattt

SEQ ID NO: 129691 - DNA, 25 bp, Saccharomyces pastorianus
tcacggtacccaccctttcatggat

SEQ ID NO: 129692 - DNA, 25 bp, Saccharomyces pastorianus
gctacattgttaatttcggtcacgg

SEQ ID NO: 129693 - DNA, 25 bp, Saccharomyces pastorianus
gtacccaccctttcatggatccaga

SEQ ID NO: 129694 - DNA, 25 bp, Saccharomyces pastorianus
tgggaagtcccgctacattgttaat

SEQ ID NO: 129695 - DNA, 25 bp, Saccharomyces pastorianus
gttaaacagatgattgaggcttttg

SEQ ID NO: 129696 - DNA, 25 bp, Saccharomyces pastorianus
aagtcccgctacattgttaatttcg

SEQ ID NO: 129697 - DNA, 25 bp, Saccharomyces pastorianus
tggttctatagaggtaatatcaaag

SEQ ID NO: 129698 - DNA, 25 bp, Saccharomyces pastorianus
aaggtagctaccaaatcagtctccg

SEQ ID NO: 129699 - DNA, 25 bp, Saccharomyces pastorianus
gaaatcaacttccacaaacgtcacc

SEQ ID NO: 129700 - DNA, 25 bp, Saccharomyces pastorianus
gacgggcaaagatagtgctgtacac

SEQ ID NO: 129701 - DNA, 25 bp, Saccharomyces pastorianus
ttatacagccactatagcaactgct

SEQ ID NO: 129702 - DNA, 25 bp, Saccharomyces pastorianus
gaagcatttgtctttcgctgaaaac

SEQ ID NO: 129703 - DNA, 25 bp, Saccharomyces pastorianus
gccccagaatttccctaaggtagct

SEQ ID NO: 129704 - DNA, 25 bp, Saccharomyces pastorianus
gcaactgctgctgaaacatcaaagg

SEQ ID NO: 129705 - DNA, 25 bp, Saccharomyces pastorianus
agacagcacagacagcacagccggt

SEQ ID NO: 129706 - DNA, 25 bp, Saccharomyces pastorianus
gtcaccttacattttaacgcacaga

SEQ ID NO: 129707 - DNA, 25 bp, Saccharomyces pastorianus
tctccgcagactccaaagttcataa

SEQ ID NO: 129708 - DNA, 25 bp, Saccharomyces pastorianus
cacagaatctccaacagcatcgaag

SEQ ID NO: 129709 - DNA, 25 bp, Saccharomyces pastorianus
ttcatacctcacacatgcaacgatt

SEQ ID NO: 129710 - DNA, 25 bp, Saccharomyces pastorianus
gcagacaccttactgaatacgtcat

SEQ ID NO: 129711 - DNA, 25 bp, Saccharomyces pastorianus
ttagacgaactaccttacccaatat

SEQ ID NO: 129712 - DNA, 25 bp, Saccharomyces pastorianus
taaatctgcttctttagctacgccc

SEQ ID NO: 129713 - DNA, 25 bp, Saccharomyces pastorianus
ggttcattcggaagatgccctttta

SEQ ID NO: 129714 - DNA, 25 bp, Saccharomyces pastorianus
gcaacgattctaccaagagcttcaa

SEQ ID NO: 129715 - DNA, 25 bp, Saccharomyces pastorianus
ggaccaacggatagagaccccagaa

SEQ ID NO: 129716 - DNA, 25 bp, Saccharomyces pastorianus
gatagcgcagttcaagatgttcgta

SEQ ID NO: 129717 - DNA, 25 bp, Saccharomyces pastorianus
gcaacttcgtgctctatttcaatat

SEQ ID NO: 129718 - DNA, 25 bp, Saccharomyces pastorianus
gtatacctttatgacctatggcaaa

SEQ ID NO: 129719 - DNA, 25 bp, Saccharomyces pastorianus
taatgaacatgctgaccaaaccgat

SEQ ID NO: 129720 - DNA, 25 bp, Saccharomyces pastorianus
tgactcatgtgtttggttggcggaa

SEQ ID NO: 129721 - DNA, 25 bp, Saccharomyces pastorianus
aatgagctattcttgaggatttcta

SEQ ID NO: 129722 - DNA, 25 bp, Saccharomyces pastorianus
gaaagcactagtcatacaaccagag

SEQ ID NO: 129723 - DNA, 25 bp, Saccharomyces pastorianus
aaacgaaatcgtaagtccacatgaa

SEQ ID NO: 129724 - DNA, 25 bp, Saccharomyces pastorianus
catggtgagtcaactgaacttggtc

SEQ ID NO: 129725 - DNA, 25 bp, Saccharomyces pastorianus
tcggtttcaaaccactttatcgttg

SEQ ID NO: 129726 - DNA, 25 bp, Saccharomyces pastorianus
tttgaactggcgttgatggacaagt

SEQ ID NO: 129727 - DNA, 25 bp, Saccharomyces pastorianus
agcgggatcacaaacgacagggaat

SEQ ID NO: 129728 - DNA, 25 bp, Saccharomyces pastorianus
gaacttggtcaaataacccactcaa

SEQ ID NO: 129729 - DNA, 25 bp, Saccharomyces pastorianus
ggaaacttcctatcatacaaaattg

SEQ ID NO: 129730 - DNA, 25 bp, Saccharomyces pastorianus
gtatcgttacctaatggacatattc

SEQ ID NO: 129731 - DNA, 25 bp, Saccharomyces pastorianus
ggatcatcactattagcacctatag

SEQ ID NO: 129732 - DNA, 25 bp, Saccharomyces pastorianus
gtatcgaataagtacctcatatctt

SEQ ID NO: 129733 - DNA, 25 bp, Saccharomyces pastorianus
gaggaccccatagtatcgaataagt

SEQ ID NO: 129734 - DNA, 25 bp, Saccharomyces pastorianus
ttacatcgatgaggacgactggagt

SEQ ID NO: 129735 - DNA, 25 bp, Saccharomyces pastorianus
ctaaaattatatatgctctgagcgc

SEQ ID NO: 129736 - DNA, 25 bp, Saccharomyces pastorianus
ttagcacctatagaggaccccatag

SEQ ID NO: 129737 - DNA, 25 bp, Saccharomyces pastorianus
aagtacctcatatcttacatcgatg

SEQ ID NO: 129738 - DNA, 25 bp, Saccharomyces pastorianus
gcaatttctgcgttgattccgttag

SEQ ID NO: 129739 - DNA, 25 bp, Saccharomyces pastorianus
gattccgttaggatcatcactatta

SEQ ID NO: 129740 - DNA, 25 bp, Saccharomyces pastorianus
atgctctgagcgcaatttctgcgtt

SEQ ID NO: 129741 - DNA, 25 bp, Saccharomyces pastorianus
tctgcgttgattccgttaggatcat

SEQ ID NO: 129742 - DNA, 25 bp, Saccharomyces pastorianus
atatggatgctcctttgtgcctaag

SEQ ID NO: 129743 - DNA, 25 bp, Saccharomyces pastorianus
gtgcctaagtggtacaatgtctttt

SEQ ID NO: 129744 - DNA, 25 bp, Saccharomyces pastorianus
ttttttcataccactactgtcggag

SEQ ID NO: 129745 - DNA, 25 bp, Saccharomyces pastorianus
caatgtcttttgtacgccctggaaa

SEQ ID NO: 129746 - DNA, 25 bp, Saccharomyces pastorianus
gacatggatcatctggacgtcatca

SEQ ID NO: 129747 - DNA, 25 bp, Saccharomyces pastorianus
gaaatacttcaatttggttacgcca

SEQ ID NO: 129748 - DNA, 25 bp, Saccharomyces pastorianus
gagggtcagaaatggccgattacgt

SEQ ID NO: 129749 - DNA, 25 bp, Saccharomyces pastorianus
gccgattacgtagtcgacctttttg

SEQ ID NO: 129750 - DNA, 25 bp, Saccharomyces pastorianus
atatgtttctaccaactcacgactg

SEQ ID NO: 129751 - DNA, 25 bp, Saccharomyces pastorianus
taaaggttgccccaacgatggcctt

SEQ ID NO: 129752 - DNA, 25 bp, Saccharomyces pastorianus
tgagcctaaccactatttcaactcc

SEQ ID NO: 129753 - DNA, 25 bp, Saccharomyces pastorianus
aatttcttcaatctaagggatgtac

SEQ ID NO: 129754 - DNA, 25 bp, Saccharomyces pastorianus
ccaggttttggtagcatcgaggaaa

SEQ ID NO: 129755 - DNA, 25 bp, Saccharomyces pastorianus
caaagttcctgattcgtacaagccc

SEQ ID NO: 129756 - DNA, 25 bp, Saccharomyces pastorianus
agggatgtactgttatcaccactaa

SEQ ID NO: 129757 - DNA, 25 bp, Saccharomyces pastorianus
aatagactccgtcaaagttcctgat

SEQ ID NO: 129758 - DNA, 25 bp, Saccharomyces pastorianus
tcccttctgtattccatctgacaaa

SEQ ID NO: 129759 - DNA, 25 bp, Saccharomyces pastorianus
atcaccactaaggtaccaggttttg

SEQ ID NO: 129760 - DNA, 25 bp, Saccharomyces pastorianus
aattctaatcccttctgtattccat

SEQ ID NO: 129761 - DNA, 25 bp, Saccharomyces pastorianus
gccatggtttatcaggatttgacaa

SEQ ID NO: 129762 - DNA, 25 bp, Saccharomyces pastorianus
taatttccaattcaatagtacgtaa

SEQ ID NO: 129763 - DNA, 25 bp, Saccharomyces pastorianus
ttccatctgacaaacctaatttcca

SEQ ID NO: 129764 - DNA, 25 bp, Saccharomyces pastorianus
agactcaccctacgctggtggcgtt

SEQ ID NO: 129765 - DNA, 25 bp, Saccharomyces pastorianus
ttcactttccaactgattatccatt

SEQ ID NO: 129766 - DNA, 25 bp, Saccharomyces pastorianus
ttgttgtctatttgctctcttttaa

SEQ ID NO: 129767 - DNA, 25 bp, Saccharomyces pastorianus
atcctttggtccctgaaattgctca

SEQ ID NO: 129768 - DNA, 25 bp, Saccharomyces pastorianus
aaagttttgttgtctatttgctctc

SEQ ID NO: 129769 - DNA, 25 bp, Saccharomyces pastorianus
ttttgtctattcactttccaactga

SEQ ID NO: 129770 - DNA, 25 bp, Saccharomyces pastorianus
ggtccctgaaattgctcaaatctac

SEQ ID NO: 129771 - DNA, 25 bp, Saccharomyces pastorianus
tttaacagatgctaatcccgacgat

SEQ ID NO: 129772 - DNA, 25 bp, Saccharomyces pastorianus
attatccattcaagccaccgaaggt

SEQ ID NO: 129773 - DNA, 25 bp, Saccharomyces pastorianus
atgctaatcccgacgatcctttggt

SEQ ID NO: 129774 - DNA, 25 bp, Saccharomyces pastorianus
attcgagtggtaatatctgccttga

SEQ ID NO: 129775 - DNA, 25 bp, Saccharomyces pastorianus
gcctcgatgaggatattttttacag

SEQ ID NO: 129776 - DNA, 25 bp, Saccharomyces pastorianus
aacgttccttcgctgaaagtagtga

SEQ ID NO: 129777 - DNA, 25 bp, Saccharomyces pastorianus
aagcgatcaagaagaaggcctcgat

SEQ ID NO: 129778 - DNA, 25 bp, Saccharomyces pastorianus
tgatattatgcatgaccagggtccc

SEQ ID NO: 129779 - DNA, 25 bp, Saccharomyces pastorianus
ttcactaccaagaaaaccgctgatg

SEQ ID NO: 129780 - DNA, 25 bp, Saccharomyces pastorianus
gtgaacactgaagactggctaacta

SEQ ID NO: 129781 - DNA, 25 bp, Saccharomyces pastorianus
gacagtgaacttgacttcgctgaag

SEQ ID NO: 129782 - DNA, 25 bp, Saccharomyces pastorianus
gactctgtcttagttaaggcatctg

SEQ ID NO: 129783 - DNA, 25 bp, Saccharomyces pastorianus
gatttcagcgattcaactagtgacg

SEQ ID NO: 129784 - DNA, 25 bp, Saccharomyces pastorianus
gaccagggtcccgtgaacactgaag

SEQ ID NO: 129785 - DNA, 25 bp, Saccharomyces pastorianus
gacgatgaacctaagctggacgcaa

SEQ ID NO: 129786 - DNA, 25 bp, Saccharomyces pastorianus
cttcgaaggcgtcatatttactact

SEQ ID NO: 129787 - DNA, 25 bp, Saccharomyces pastorianus
aagtcttggaagtgctttcccacga

SEQ ID NO: 129788 - DNA, 25 bp, Saccharomyces pastorianus
cctggcttatctatgatgctaaaca

SEQ ID NO: 129789 - DNA, 25 bp, Saccharomyces pastorianus
atcataccacttactattctgttat

SEQ ID NO: 129790 - DNA, 25 bp, Saccharomyces pastorianus
cagaagactctgttgctaataaatt

SEQ ID NO: 129791 - DNA, 25 bp, Saccharomyces pastorianus
gaactcttgcaattttctatttcga

SEQ ID NO: 129792 - DNA, 25 bp, Saccharomyces pastorianus
gatgctatcgttgatatcgcattga

SEQ ID NO: 129793 - DNA, 25 bp, Saccharomyces pastorianus
ttattgaccaaccaaccagagcagg

SEQ ID NO: 129794 - DNA, 25 bp, Saccharomyces pastorianus
gaagttggaacaagctcatccgaat

SEQ ID NO: 129795 - DNA, 25 bp, Saccharomyces pastorianus
ttcccacgatccgattattcacgtt

SEQ ID NO: 129796 - DNA, 25 bp, Saccharomyces pastorianus
gaccgaatgcggattatcataccac

SEQ ID NO: 129797 - DNA, 25 bp, Saccharomyces pastorianus
gggtttgactccatctcaaattggt

SEQ ID NO: 129798 - DNA, 25 bp, Saccharomyces pastorianus
atgagaatcttgaagtccaacggtt

SEQ ID NO: 129799 - DNA, 25 bp, Saccharomyces pastorianus
ttggctagatactacagaactgttg

SEQ ID NO: 129800 - DNA, 25 bp, Saccharomyces pastorianus
agaactgttgctgtcttaccaccaa

SEQ ID NO: 129801 - DNA, 25 bp, Saccharomyces pastorianus
gctcgtgtcatcactggtaacaaga

SEQ ID NO: 129802 - DNA, 25 bp, Saccharomyces pastorianus
ggtgttacccaagctcgtgtcatca

SEQ ID NO: 129803 - DNA, 25 bp, Saccharomyces pastorianus
gttgctgtcttaccaccaaactgga

SEQ ID NO: 129804 - DNA, 25 bp, Saccharomyces pastorianus
gtacgccagaaagggtttgactcca

SEQ ID NO: 129805 - DNA, 25 bp, Saccharomyces pastorianus
aggacaaagacgctaagttcagatt

SEQ ID NO: 129806 - DNA, 25 bp, Saccharomyces pastorianus
gagagatgctcacggtgttacccaa

SEQ ID NO: 129807 - DNA, 25 bp, Saccharomyces pastorianus
attggtgtcttgttgagagatgctc

SEQ ID NO: 129808 - DNA, 25 bp, Saccharomyces pastorianus
tgcaatgacaagtttcatcatcata

SEQ ID NO: 129809 - DNA, 25 bp, Saccharomyces pastorianus
tatctggaccaccattatagatttg

SEQ ID NO: 129810 - DNA, 25 bp, Saccharomyces pastorianus
cgttggtgttttatatgcaatgaca

SEQ ID NO: 129811 - DNA, 25 bp, Saccharomyces pastorianus
gctcgcacttttggcatgagagtat

SEQ ID NO: 129812 - DNA, 25 bp, Saccharomyces pastorianus
cgaagctcgcacttttggcatgaga

SEQ ID NO: 129813 - DNA, 25 bp, Saccharomyces pastorianus
aaacgaagctcgcacttttggcatg

SEQ ID NO: 129814 - DNA, 25 bp, Saccharomyces pastorianus
tttcatcatcataaactggtttgtt

SEQ ID NO: 129815 - DNA, 25 bp, Saccharomyces pastorianus
gaccaccattatagatttgaccttt

SEQ ID NO: 129816 - DNA, 25 bp, Saccharomyces pastorianus
ggattcatataaggttaggcgacaa

SEQ ID NO: 129817 - DNA, 25 bp, Saccharomyces pastorianus
tgaccttttcgttggtgttttatat

SEQ ID NO: 129818 - DNA, 25 bp, Saccharomyces pastorianus
gcatgagagtattttgtggcaccaa

SEQ ID NO: 129819 - DNA, 25 bp, Saccharomyces pastorianus
tgaccagaggtatgtccgatgatct

SEQ ID NO: 129820 - DNA, 25 bp, Saccharomyces pastorianus
aagcattgtctttgattattgacga

SEQ ID NO: 129821 - DNA, 25 bp, Saccharomyces pastorianus
tgaatacgaccgacaaagccttctg

SEQ ID NO: 129822 - DNA, 25 bp, Saccharomyces pastorianus
gatgaaaccagcgaaatttacctaa

SEQ ID NO: 129823 - DNA, 25 bp, Saccharomyces pastorianus
gagagtgccatcgaagtctgttcat

SEQ ID NO: 129824 - DNA, 25 bp, Saccharomyces pastorianus
aaaaacccgcaattagctatagatt

SEQ ID NO: 129825 - DNA, 25 bp, Saccharomyces pastorianus
aaaatttgccaatgaattcctgaaa

SEQ ID NO: 129826 - DNA, 25 bp, Saccharomyces pastorianus
gtatgtccgatgatctgcaaattga

SEQ ID NO: 129827 - DNA, 25 bp, Saccharomyces pastorianus
gcaaattgacaacctgcaggatatt

SEQ ID NO: 129828 - DNA, 25 bp, Saccharomyces pastorianus
gtctgttcatcgaaacttggtttat

SEQ ID NO: 129829 - DNA, 25 bp, Saccharomyces pastorianus
aagccttctgccttttctgcaaaag

SEQ ID NO: 129830 - DNA, 25 bp, Saccharomyces pastorianus
gccatcagggttcaagagttatcat

SEQ ID NO: 129831 - DNA, 25 bp, Saccharomyces pastorianus
gatcagttattatgcctaggttttg

SEQ ID NO: 129832 - DNA, 25 bp, Saccharomyces pastorianus
ggcttgaaattcctcaactctttag

SEQ ID NO: 129833 - DNA, 25 bp, Saccharomyces pastorianus
ggattccaactcatatgatgtcact

SEQ ID NO: 129834 - DNA, 25 bp, Saccharomyces pastorianus
gatgtcactcaaaacgtgctgaaag

SEQ ID NO: 129835 - DNA, 25 bp, Saccharomyces pastorianus
gtctataaatgattatcacctcggt

SEQ ID NO: 129836 - DNA, 25 bp, Saccharomyces pastorianus
gaaggatcatttcgattggtttatg

SEQ ID NO: 129837 - DNA, 25 bp, Saccharomyces pastorianus
cttattagccaaagggaatgctcca

SEQ ID NO: 129838 - DNA, 25 bp, Saccharomyces pastorianus
aagaattttagcaagcggccagaaa

SEQ ID NO: 129839 - DNA, 25 bp, Saccharomyces pastorianus
ataagttccaacgatgccatcaggg

SEQ ID NO: 129840 - DNA, 25 bp, Saccharomyces pastorianus
gcaagcggccagaaaacttattagc

SEQ ID NO: 129841 - DNA, 25 bp, Saccharomyces pastorianus
gttcaaacctcccagactctaataa

SEQ ID NO: 129842 - DNA, 25 bp, Saccharomyces pastorianus
gaaggtgctgtttccggtatgtcac

SEQ ID NO: 129843 - DNA, 25 bp, Saccharomyces pastorianus
aatgggttgctgagcgacacatcaa

SEQ ID NO: 129844 - DNA, 25 bp, Saccharomyces pastorianus
aagcggacattctgttaattcctca

SEQ ID NO: 129845 - DNA, 25 bp, Saccharomyces pastorianus
ggcaataaactcaacaggcgctcca

SEQ ID NO: 129846 - DNA, 25 bp, Saccharomyces pastorianus
tttcaacataattcggcgtccgtcg

SEQ ID NO: 129847 - DNA, 25 bp, Saccharomyces pastorianus
tgcgtcatcgccatcagctttagaa

SEQ ID NO: 129848 - DNA, 25 bp, Saccharomyces pastorianus
aggcgctccagcgagatctattata

SEQ ID NO: 129849 - DNA, 25 bp, Saccharomyces pastorianus
attacaccatctcctgtggcaataa

SEQ ID NO: 129850 - DNA, 25 bp, Saccharomyces pastorianus
tagactcaaattcctctgcgtcatc

SEQ ID NO: 129851 - DNA, 25 bp, Saccharomyces pastorianus
tggaccttccgactggtggttcaaa

SEQ ID NO: 129852 - DNA, 25 bp, Saccharomyces pastorianus
caacctaccgttggattatgctcaa

SEQ ID NO: 129853 - DNA, 25 bp, Saccharomyces pastorianus
gaaccgaatgatcctgtgtcacaat

SEQ ID NO: 129854 - DNA, 25 bp, Saccharomyces pastorianus
tggatgattcttgctgtcatcgaat

SEQ ID NO: 129855 - DNA, 25 bp, Saccharomyces pastorianus
gaattatttccccaatgaaccgaat

SEQ ID NO: 129856 - DNA, 25 bp, Saccharomyces pastorianus
gcttatttctccaaaattcctccaa

SEQ ID NO: 129857 - DNA, 25 bp, Saccharomyces pastorianus
aacgagcaatcttttccacaactgg

SEQ ID NO: 129858 - DNA, 25 bp, Saccharomyces pastorianus
ttaaaacctgttgtcgtgggcaaat

SEQ ID NO: 129859 - DNA, 25 bp, Saccharomyces pastorianus
taaatcttgtatacacttcctcaaa

SEQ ID NO: 129860 - DNA, 25 bp, Saccharomyces pastorianus
tagatgaagcgtttctctcctacaa

SEQ ID NO: 129861 - DNA, 25 bp, Saccharomyces pastorianus
ggcgtatagaggtggcaactgtcat

SEQ ID NO: 129862 - DNA, 25 bp, Saccharomyces pastorianus
aactgtcatgctgtgctccaattta

SEQ ID NO: 129863 - DNA, 25 bp, Saccharomyces pastorianus
tcttccttctgttccgggctttgaa

SEQ ID NO: 129864 - DNA, 25 bp, Saccharomyces pastorianus
gacaatctgacggtcaagatactaa

SEQ ID NO: 129865 - DNA, 25 bp, Saccharomyces pastorianus
tgttccgggctttgaaaatctttca

SEQ ID NO: 129866 - DNA, 25 bp, Saccharomyces pastorianus
gtgtctgaccgcctggaacacgtat

SEQ ID NO: 129867 - DNA, 25 bp, Saccharomyces pastorianus
cagtagtggacaatctgacggtcaa

SEQ ID NO: 129868 - DNA, 25 bp, Saccharomyces pastorianus
gaccgcctggaacacgtatggattt

SEQ ID NO: 129869 - DNA, 25 bp, Saccharomyces pastorianus
gatactaataattggttcgctcttc

SEQ ID NO: 129870 - DNA, 25 bp, Saccharomyces pastorianus
ttgttgcgatagatgggagcccagt

SEQ ID NO: 129871 - DNA, 25 bp, Saccharomyces pastorianus
taataattggttcgctcttccttct

SEQ ID NO: 129872 - DNA, 25 bp, Saccharomyces pastorianus
cacgtatggatttcgttgttgcgat

SEQ ID NO: 129873 - DNA, 25 bp, Saccharomyces pastorianus
atgggagcccagtagtggacaatct

SEQ ID NO: 129874 - DNA, 25 bp, Saccharomyces pastorianus
aattctccgcctgattatgggttta

SEQ ID NO: 129875 - DNA, 25 bp, Saccharomyces pastorianus
ttcccttattttgatctgtgcgtgc

SEQ ID NO: 129876 - DNA, 25 bp, Saccharomyces pastorianus
ggttgcttcacaatgtttttctcag

SEQ ID NO: 129877 - DNA, 25 bp, Saccharomyces pastorianus
gttctgttgcgtcatttggttcaca

SEQ ID NO: 129878 - DNA, 25 bp, Saccharomyces pastorianus
gcgtgcctgttgttgttatttagtc

SEQ ID NO: 129879 - DNA, 25 bp, Saccharomyces pastorianus
atttagtcggttcactttggcgcca

SEQ ID NO: 129880 - DNA, 25 bp, Saccharomyces pastorianus
gaggactcacaatctatctacgaat

SEQ ID NO: 129881 - DNA, 25 bp, Saccharomyces pastorianus
ttttatacttgtctgcactgctaac

SEQ ID NO: 129882 - DNA, 25 bp, Saccharomyces pastorianus
ctaagcatccgcattgttcatcaac

SEQ ID NO: 129883 - DNA, 25 bp, Saccharomyces pastorianus
ggttcacaatcaacttcagcgtcat

SEQ ID NO: 129884 - DNA, 25 bp, Saccharomyces pastorianus
gaatcgttttatccttgtttcgcgg

SEQ ID NO: 129885 - DNA, 25 bp, Saccharomyces pastorianus
aatccaaatgattcgggcatggaga

SEQ ID NO: 129886 - DNA, 25 bp, Saccharomyces pastorianus
gattatgacaatccaaatgattcgg

SEQ ID NO: 129887 - DNA, 25 bp, Saccharomyces pastorianus
tgagaagttaaaagtagccataaaa

SEQ ID NO: 129888 - DNA, 25 bp, Saccharomyces pastorianus
aagtaacggcttatgattatgacaa

SEQ ID NO: 129889 - DNA, 25 bp, Saccharomyces pastorianus
aaaagtaacggcttatgattatgac

SEQ ID NO: 129890 - DNA, 25 bp, Saccharomyces pastorianus
atccctgaatggaaattctacaata

SEQ ID NO: 129891 - DNA, 25 bp, Saccharomyces pastorianus
actatgagaagttaaaagtagccat

SEQ ID NO: 129892 - DNA, 25 bp, Saccharomyces pastorianus
gacaatccaaatgattcgggcatgg

SEQ ID NO: 129893 - DNA, 25 bp, Saccharomyces pastorianus
atgacaatccaaatgattcgggcat

SEQ ID NO: 129894 - DNA, 25 bp, Saccharomyces pastorianus
tcgggcatggagaagttgttgaatc

SEQ ID NO: 129895 - DNA, 25 bp, Saccharomyces pastorianus
atgattcgggcatggagaagttgtt

SEQ ID NO: 129896 - DNA, 25 bp, Saccharomyces pastorianus
gtgcttggctatctatcatcagtgt

SEQ ID NO: 129897 - DNA, 25 bp, Saccharomyces pastorianus
caactttgccttcttattcatcgat

SEQ ID NO: 129898 - DNA, 25 bp, Saccharomyces pastorianus
tcatcgattcattaggtgcttggct

SEQ ID NO: 129899 - DNA, 25 bp, Saccharomyces pastorianus
aaatggcccgatctgatttttggta

SEQ ID NO: 129900 - DNA, 25 bp, Saccharomyces pastorianus
ggataactgttcaatccccgacgat

SEQ ID NO: 129901 - DNA, 25 bp, Saccharomyces pastorianus
agagcccaaacattgcatgctgtcc

SEQ ID NO: 129902 - DNA, 25 bp, Saccharomyces pastorianus
tgcttccaccttactttgaactagc

SEQ ID NO: 129903 - DNA, 25 bp, Saccharomyces pastorianus
gacgatgcttcgagctttgcagacg

SEQ ID NO: 129904 - DNA, 25 bp, Saccharomyces pastorianus
gcatctgttttgttagctgtcggac

SEQ ID NO: 129905 - DNA, 25 bp, Saccharomyces pastorianus
aggaattttcgcgtctcatttcata

SEQ ID NO: 129906 - DNA, 25 bp, Saccharomyces pastorianus
atattatggctgaggcccctttacg

SEQ ID NO: 129907 - DNA, 25 bp, Saccharomyces pastorianus
tgggtatcccagcagacatatactt

SEQ ID NO: 129908 - DNA, 25 bp, Saccharomyces pastorianus
ctgcctacttagattccgaacaacg

SEQ ID NO: 129909 - DNA, 25 bp, Saccharomyces pastorianus
gattgatgagccatctgcctactta

SEQ ID NO: 129910 - DNA, 25 bp, Saccharomyces pastorianus
acgcaagagcccctgaatctttgtt

SEQ ID NO: 129911 - DNA, 25 bp, Saccharomyces pastorianus
attccttccaagaatgctcacgcaa

SEQ ID NO: 129912 - DNA, 25 bp, Saccharomyces pastorianus
aattgcaccaaagttcccaggtact

SEQ ID NO: 129913 - DNA, 25 bp, Saccharomyces pastorianus
gttcccaggtactgtcagacaattg

SEQ ID NO: 129914 - DNA, 25 bp, Saccharomyces pastorianus
aactgcgtttattgtcgagcacgat

SEQ ID NO: 129915 - DNA, 25 bp, Saccharomyces pastorianus
atcgtcttggcattgggtatcccag

SEQ ID NO: 129916 - DNA, 25 bp, Saccharomyces pastorianus
ggatccaaactccttcagaccaaga

SEQ ID NO: 129917 - DNA, 25 bp, Saccharomyces pastorianus
gacaattcctaaatccacagtttca

SEQ ID NO: 129918 - DNA, 25 bp, Saccharomyces pastorianus
agatcagaaccgtcctgctgtccat

SEQ ID NO: 129919 - DNA, 25 bp, Saccharomyces pastorianus
aatcctaatgatccgctagctaatg

SEQ ID NO: 129920 - DNA, 25 bp, Saccharomyces pastorianus
attcaagcactgttggctagcccta

SEQ ID NO: 129921 - DNA, 25 bp, Saccharomyces pastorianus
tgctgtccattcaagcactgttggc

SEQ ID NO: 129922 - DNA, 25 bp, Saccharomyces pastorianus
gttggctagccctaatcctaatgat

SEQ ID NO: 129923 - DNA, 25 bp, Saccharomyces pastorianus
atgtcttgatgtgcttaaaactaat

SEQ ID NO: 129924 - DNA, 25 bp, Saccharomyces pastorianus
ggtgccaaagctaaggctcgcgaat

SEQ ID NO: 129925 - DNA, 25 bp, Saccharomyces pastorianus
gatccgctagctaatgacgtcgctg

SEQ ID NO: 129926 - DNA, 25 bp, Saccharomyces pastorianus
gttgggccgtatatgtcttgatgtg

SEQ ID NO: 129927 - DNA, 25 bp, Saccharomyces pastorianus
caatattgataggttgggccgtata

SEQ ID NO: 129928 - DNA, 25 bp, Saccharomyces pastorianus
aatgacgtcgctgaagattggataa

SEQ ID NO: 129929 - DNA, 25 bp, Saccharomyces pastorianus
ggttacgcggtgattttgacctcta

SEQ ID NO: 129930 - DNA, 25 bp, Saccharomyces pastorianus
aaagagcccatttcactggacactc

SEQ ID NO: 129931 - DNA, 25 bp, Saccharomyces pastorianus
gtattcgcacaacctgcctattggg

SEQ ID NO: 129932 - DNA, 25 bp, Saccharomyces pastorianus
tgccaagattcaccattgactgtat

SEQ ID NO: 129933 - DNA, 25 bp, Saccharomyces pastorianus
agtacttttcgttggcgtgctgttc

SEQ ID NO: 129934 - DNA, 25 bp, Saccharomyces pastorianus
cggaccctagcaggcccagaataaa

SEQ ID NO: 129935 - DNA, 25 bp, Saccharomyces pastorianus
tgctgttctgcctactgccaagatt

SEQ ID NO: 129936 - DNA, 25 bp, Saccharomyces pastorianus
gtcagccactcacaagagaccatag

SEQ ID NO: 129937 - DNA, 25 bp, Saccharomyces pastorianus
acactcattttgatggcgtcagcca

SEQ ID NO: 129938 - DNA, 25 bp, Saccharomyces pastorianus
aattttacaagggtgcggcgcgtgt

SEQ ID NO: 129939 - DNA, 25 bp, Saccharomyces pastorianus
atacgtccccttacagatttcaaag

SEQ ID NO: 129940 - DNA, 25 bp, Saccharomyces pastorianus
aaatctaaaggtccgtcaatcatta

SEQ ID NO: 129941 - DNA, 25 bp, Saccharomyces pastorianus
gctacgtgggtctctggattcaatt

SEQ ID NO: 129942 - DNA, 25 bp, Saccharomyces pastorianus
ggtcgtccctctttggattatgaga

SEQ ID NO: 129943 - DNA, 25 bp, Saccharomyces pastorianus
gtcacaggctaacaggtataacgat

SEQ ID NO: 129944 - DNA, 25 bp, Saccharomyces pastorianus
aactcgagaagctctgggctacgtg

SEQ ID NO: 129945 - DNA, 25 bp, Saccharomyces pastorianus
tcagatgttgatggcgcttgttatg

SEQ ID NO: 129946 - DNA, 25 bp, Saccharomyces pastorianus
tagttgatcgaacgctacagccaaa

SEQ ID NO: 129947 - DNA, 25 bp, Saccharomyces pastorianus
gcccacatgccaacttgtattctta

SEQ ID NO: 129948 - DNA, 25 bp, Saccharomyces pastorianus
tacagaatgtctgccgactttggtc

SEQ ID NO: 129949 - DNA, 25 bp, Saccharomyces pastorianus
cctgaatgtaggtttgccaaggatt

SEQ ID NO: 129950 - DNA, 25 bp, Saccharomyces pastorianus
gaaattcctgctgatatgatcttat

SEQ ID NO: 129951 - DNA, 25 bp, Saccharomyces pastorianus
ataaacgctggtgtcactccaacca

SEQ ID NO: 129952 - DNA, 25 bp, Saccharomyces pastorianus
gataccaagattatgataaacgctg

SEQ ID NO: 129953 - DNA, 25 bp, Saccharomyces pastorianus
tatgataaacgctggtgtcactcca

SEQ ID NO: 129954 - DNA, 25 bp, Saccharomyces pastorianus
aaacgctggtgtcactccaaccaaa

SEQ ID NO: 129955 - DNA, 25 bp, Saccharomyces pastorianus
gattatgataaacgctggtgtcact

SEQ ID NO: 129956 - DNA, 25 bp, Saccharomyces pastorianus
tgataaacgctggtgtcactccaac

SEQ ID NO: 129957 - DNA, 25 bp, Saccharomyces pastorianus
gataaacgctggtgtcactccaacc

SEQ ID NO: 129958 - DNA, 25 bp, Saccharomyces pastorianus
atgataaacgctggtgtcactccaa

SEQ ID NO: 129959 - DNA, 25 bp, Saccharomyces pastorianus
ttatgataaacgctggtgtcactcc

SEQ ID NO: 129960 - DNA, 25 bp, Saccharomyces pastorianus
agattatgataaacgctggtgtcac

SEQ ID NO: 129961 - DNA, 25 bp, Saccharomyces pastorianus
ataccaagattatgataaacgctgg

SEQ ID NO: 129962 - DNA, 25 bp, Saccharomyces pastorianus
ggagcccctctgaacctaaatgcgg

SEQ ID NO: 129963 - DNA, 25 bp, Saccharomyces pastorianus
aagaactcagtcaattccggatcat

SEQ ID NO: 129964 - DNA, 25 bp, Saccharomyces pastorianus
atgccgcgccggtaatgttatttat

SEQ ID NO: 129965 - DNA, 25 bp, Saccharomyces pastorianus
ttccggatcatcacaaactcatact

SEQ ID NO: 129966 - DNA, 25 bp, Saccharomyces pastorianus
gacaacttgtgggtatcttgagaga

SEQ ID NO: 129967 - DNA, 25 bp, Saccharomyces pastorianus
gtaatgagccttccaattccaacgt

SEQ ID NO: 129968 - DNA, 25 bp, Saccharomyces pastorianus
gtttcaaggcggtttagacattatc

SEQ ID NO: 129969 - DNA, 25 bp, Saccharomyces pastorianus
aatgcgggttttcgagacaacttgt

SEQ ID NO: 129970 - DNA, 25 bp, Saccharomyces pastorianus
gactaaattggtcaatgccgcgccg

SEQ ID NO: 129971 - DNA, 25 bp, Saccharomyces pastorianus
gccaactttccctcaactttatata

SEQ ID NO: 129972 - DNA, 25 bp, Saccharomyces pastorianus
aacgtctctttcttatccattgatg

SEQ ID NO: 129973 - DNA, 25 bp, Saccharomyces pastorianus
attgccacaactgaattgcctccaa

SEQ ID NO: 129974 - DNA, 25 bp, Saccharomyces pastorianus
cgcttccgaaattgccacaactgaa

SEQ ID NO: 129975 - DNA, 25 bp, Saccharomyces pastorianus
aaaactctcctgacaaggcttgcca

SEQ ID NO: 129976 - DNA, 25 bp, Saccharomyces pastorianus
tggaggcttataaaaccgcttccga

SEQ ID NO: 129977 - DNA, 25 bp, Saccharomyces pastorianus
aggtctagctttgaatttctccgtc

SEQ ID NO: 129978 - DNA, 25 bp, Saccharomyces pastorianus
aaaggcaaccaactcctctttggag

SEQ ID NO: 129979 - DNA, 25 bp, Saccharomyces pastorianus
ctgaattttccagcggagatgcaag

SEQ ID NO: 129980 - DNA, 25 bp, Saccharomyces pastorianus
gaatttctccgtcttctattacgaa

SEQ ID NO: 129981 - DNA, 25 bp, Saccharomyces pastorianus
ggacaacttgaccttatggacctct

SEQ ID NO: 129982 - DNA, 25 bp, Saccharomyces pastorianus
aaggcttgccacttggccaaacaag

SEQ ID NO: 129983 - DNA, 25 bp, Saccharomyces pastorianus
ggacctctgatatttctgaatctgg

SEQ ID NO: 129984 - DNA, 25 bp, Saccharomyces pastorianus
aagattctgtttacctagctaaatt

SEQ ID NO: 129985 - DNA, 25 bp, Saccharomyces pastorianus
gaagattctgtttacctagctaaat

SEQ ID NO: 129986 - DNA, 25 bp, Saccharomyces pastorianus
ctgtttacctagctaaattagctga

SEQ ID NO: 129987 - DNA, 25 bp, Saccharomyces pastorianus
taaattagctgaacaagccgaacgt

SEQ ID NO: 129988 - DNA, 25 bp, Saccharomyces pastorianus
aacatgaaggccgttgcttcatcag

SEQ ID NO: 129989 - DNA, 25 bp, Saccharomyces pastorianus
agctaaattagctgaacaagccgaa

SEQ ID NO: 129990 - DNA, 25 bp, Saccharomyces pastorianus
tgcttcatcaggtcaagagttatct

SEQ ID NO: 129991 - DNA, 25 bp, Saccharomyces pastorianus
ttctgtttacctagctaaattagct

SEQ ID NO: 129992 - DNA, 25 bp, Saccharomyces pastorianus
atcaggtcaagagttatctgtcgaa

SEQ ID NO: 129993 - DNA, 25 bp, Saccharomyces pastorianus
aactcgtgaagattctgtttaccta

SEQ ID NO: 129994 - DNA, 25 bp, Saccharomyces pastorianus
gattctgtttacctagctaaattag

SEQ ID NO: 129995 - DNA, 25 bp, Saccharomyces pastorianus
actctttgctacagtttcggtctaa

SEQ ID NO: 129996 - DNA, 25 bp, Saccharomyces pastorianus
gacagaaaccttctcactgagggtg

SEQ ID NO: 129997 - DNA, 25 bp, Saccharomyces pastorianus
cagccagctctgattcctaatatta

SEQ ID NO: 129998 - DNA, 25 bp, Saccharomyces pastorianus
ccagctcctggacttttgttttaga

SEQ ID NO: 129999 - DNA, 25 bp, Saccharomyces pastorianus
ggatgctgaatctacaaccactatt

SEQ ID NO: 130000 - DNA, 25 bp, Saccharomyces pastorianus
ggtgggctatttgaacgttgactac

SEQ ID NO: 130001 - DNA, 25 bp, Saccharomyces pastorianus
tgatgaactagtcgaggccagctcc

SEQ ID NO: 130002 - DNA, 25 bp, Saccharomyces pastorianus
gaaactgtcgcttcttcagtacagc

SEQ ID NO: 130003 - DNA, 25 bp, Saccharomyces pastorianus
tagttcaggattactgtcggatgct

SEQ ID NO: 130004 - DNA, 25 bp, Saccharomyces pastorianus
gattttcacttcattctgaggagga

SEQ ID NO: 130005 - DNA, 25 bp, Saccharomyces pastorianus
ggcataaccagacgcagttcattct

SEQ ID NO: 130006 - DNA, 25 bp, Saccharomyces pastorianus
gaagcttcagtactcaaatgcacct

SEQ ID NO: 130007 - DNA, 25 bp, Saccharomyces pastorianus
aactctatcttagcagacacctctg

SEQ ID NO: 130008 - DNA, 25 bp, Saccharomyces pastorianus
tttctgctgtttccaattcggtaag

SEQ ID NO: 130009 - DNA, 25 bp, Saccharomyces pastorianus
gaattccgtccggagcaaactctat

SEQ ID NO: 130010 - DNA, 25 bp, Saccharomyces pastorianus
attctgacgaaagcacaactgtaca

SEQ ID NO: 130011 - DNA, 25 bp, Saccharomyces pastorianus
aacgttgccgctgttaaggtcatat

SEQ ID NO: 130012 - DNA, 25 bp, Saccharomyces pastorianus
gaagtatttacacctattgccaact

SEQ ID NO: 130013 - DNA, 25 bp, Saccharomyces pastorianus
ggtgtttcttatttggagacgcatt

SEQ ID NO: 130014 - DNA, 25 bp, Saccharomyces pastorianus
cattgcgccgatttatcagatcttt

SEQ ID NO: 130015 - DNA, 25 bp, Saccharomyces pastorianus
gaatgactacactcgaagcttcagt

SEQ ID NO: 130016 - DNA, 25 bp, Saccharomyces pastorianus
gacacctctgtagcgttatcagcta

SEQ ID NO: 130017 - DNA, 25 bp, Saccharomyces pastorianus
ggttttattgtactgttccactgct

SEQ ID NO: 130018 - DNA, 25 bp, Saccharomyces pastorianus
gagagttcgcgatgctttacgcttt

SEQ ID NO: 130019 - DNA, 25 bp, Saccharomyces pastorianus
aagccgcacaagcattctgttttct

SEQ ID NO: 130020 - DNA, 25 bp, Saccharomyces pastorianus
attccgattgacgattgctacctat

SEQ ID NO: 130021 - DNA, 25 bp, Saccharomyces pastorianus
ttctgctccggaagctgacttgaat

SEQ ID NO: 130022 - DNA, 25 bp, Saccharomyces pastorianus
gaccttctgcagagagatcgtactt

SEQ ID NO: 130023 - DNA, 25 bp, Saccharomyces pastorianus
aataaactatggatcccacgctctc

SEQ ID NO: 130024 - DNA, 25 bp, Saccharomyces pastorianus
tccactgctttcatagatcaaccac

SEQ ID NO: 130025 - DNA, 25 bp, Saccharomyces pastorianus
ttggtttggaacaaggcgtgccctt

SEQ ID NO: 130026 - DNA, 25 bp, Saccharomyces pastorianus
taataatattgacccaccttctgct

SEQ ID NO: 130027 - DNA, 25 bp, Saccharomyces pastorianus
tgctacctatactctgggaccacaa

SEQ ID NO: 130028 - DNA, 25 bp, Saccharomyces pastorianus
acccaccattgcctatagattcgat

SEQ ID NO: 130029 - DNA, 25 bp, Saccharomyces pastorianus
gtggatgaactgtcaaacgacccaa

SEQ ID NO: 130030 - DNA, 25 bp, Saccharomyces pastorianus
gactgacaagtatggctctgcgagg

SEQ ID NO: 130031 - DNA, 25 bp, Saccharomyces pastorianus
aagcatatagagcaaacccaccatt

SEQ ID NO: 130032 - DNA, 25 bp, Saccharomyces pastorianus
acagcttacttcttcacgtgtgaga

SEQ ID NO: 130033 - DNA, 25 bp, Saccharomyces pastorianus
caaccttatcccttagacgcaaatg

SEQ ID NO: 130034 - DNA, 25 bp, Saccharomyces pastorianus
gattgatgatgtttcacggtccgta

SEQ ID NO: 130035 - DNA, 25 bp, Saccharomyces pastorianus
gatgattgacgacactagcacagaa

SEQ ID NO: 130036 - DNA, 25 bp, Saccharomyces pastorianus
aaatggactcctcttgaagctgctt

SEQ ID NO: 130037 - DNA, 25 bp, Saccharomyces pastorianus
gagatttctatgctttccattgttt

SEQ ID NO: 130038 - DNA, 25 bp, Saccharomyces pastorianus
gtttacgagcaacaaccttatccct

SEQ ID NO: 130039 - DNA, 25 bp, Saccharomyces pastorianus
tgctcctgattggtttgattattac

SEQ ID NO: 130040 - DNA, 25 bp, Saccharomyces pastorianus
gagtcacttccgatcgacttgagaa

SEQ ID NO: 130041 - DNA, 25 bp, Saccharomyces pastorianus
gatacgtccaaaatccagtttccta

SEQ ID NO: 130042 - DNA, 25 bp, Saccharomyces pastorianus
aaaaattactggcaggctggttctg

SEQ ID NO: 130043 - DNA, 25 bp, Saccharomyces pastorianus
aatcctcatattgctcctgattggt

SEQ ID NO: 130044 - DNA, 25 bp, Saccharomyces pastorianus
gatcgacttgagaaggccactgaga

SEQ ID NO: 130045 - DNA, 25 bp, Saccharomyces pastorianus
atgcgcgaaaatacttctgcactat

SEQ ID NO: 130046 - DNA, 25 bp, Saccharomyces pastorianus
aatattgtagagtcacttccgatcg

SEQ ID NO: 130047 - DNA, 25 bp, Saccharomyces pastorianus
aggctggttctgcatgcgcgaaaat

SEQ ID NO: 130048 - DNA, 25 bp, Saccharomyces pastorianus
gacgagttttataacaatcctcata

SEQ ID NO: 130049 - DNA, 25 bp, Saccharomyces pastorianus
tgtgaagtagatgaaaccccggtaa

SEQ ID NO: 130050 - DNA, 25 bp, Saccharomyces pastorianus
agaagtgctgatgcgtgtccacaag

SEQ ID NO: 130051 - DNA, 25 bp, Saccharomyces pastorianus
aagtgctgatgcgtgtccacaagaa

SEQ ID NO: 130052 - DNA, 25 bp, Saccharomyces pastorianus
ttatcgcctggaaaacaggtagtat

SEQ ID NO: 130053 - DNA, 25 bp, Saccharomyces pastorianus
gatagtttatttgggagctaacaga

SEQ ID NO: 130054 - DNA, 25 bp, Saccharomyces pastorianus
tgaacattacttccaaatttgcaac

SEQ ID NO: 130055 - DNA, 25 bp, Saccharomyces pastorianus
cacaagaaattatcgcctggaaaac

SEQ ID NO: 130056 - DNA, 25 bp, Saccharomyces pastorianus
tatttgggagctaacagaatcgaaa

SEQ ID NO: 130057 - DNA, 25 bp, Saccharomyces pastorianus
tgctgatgcgtgtccacaagaaatt

SEQ ID NO: 130058 - DNA, 25 bp, Saccharomyces pastorianus
cgtgtccacaagaaattatcgcctg

SEQ ID NO: 130059 - DNA, 25 bp, Saccharomyces pastorianus
ggagctaacagaatcgaaattggaa

SEQ ID NO: 130060 - DNA, 25 bp, Saccharomyces pastorianus
gaagaagtgctgatgcgtgtccaca

SEQ ID NO: 130061 - DNA, 25 bp, Saccharomyces pastorianus
agttgggaccttgttcacagataat

SEQ ID NO: 130062 - DNA, 25 bp, Saccharomyces pastorianus
ttctagacgagtgcaagttgggacc

SEQ ID NO: 130063 - DNA, 25 bp, Saccharomyces pastorianus
tttaaaggacgtggattctgcacca

SEQ ID NO: 130064 - DNA, 25 bp, Saccharomyces pastorianus
gcacagatcatttcacagacgagga

SEQ ID NO: 130065 - DNA, 25 bp, Saccharomyces pastorianus
taccccatacgctatccaatattta

SEQ ID NO: 130066 - DNA, 25 bp, Saccharomyces pastorianus
aagcgatacgtggacatctacccca

SEQ ID NO: 130067 - DNA, 25 bp, Saccharomyces pastorianus
ggagacaggtttcttggtgcttaaa

SEQ ID NO: 130068 - DNA, 25 bp, Saccharomyces pastorianus
aaaagacaccgaagatctccgaggt

SEQ ID NO: 130069 - DNA, 25 bp, Saccharomyces pastorianus
gacacgttgtatgattttggcatct

SEQ ID NO: 130070 - DNA, 25 bp, Saccharomyces pastorianus
gttacagagccagtgcgttcgtatg

SEQ ID NO: 130071 - DNA, 25 bp, Saccharomyces pastorianus
caagaagacgcaaggcagctttttt

SEQ ID NO: 130072 - DNA, 25 bp, Saccharomyces pastorianus
gtattgttggtttagccggtgtgca

SEQ ID NO: 130073 - DNA, 25 bp, Saccharomyces pastorianus
atttctgggaacacttggttgtata

SEQ ID NO: 130074 - DNA, 25 bp, Saccharomyces pastorianus
aaagagcccatcaaattcgaaattc

SEQ ID NO: 130075 - DNA, 25 bp, Saccharomyces pastorianus
gaacacttggttgtataaagagctg

SEQ ID NO: 130076 - DNA, 25 bp, Saccharomyces pastorianus
tgactacaacagaaaaagagcccat

SEQ ID NO: 130077 - DNA, 25 bp, Saccharomyces pastorianus
gagcccatcaaattcgaaattcata

SEQ ID NO: 130078 - DNA, 25 bp, Saccharomyces pastorianus
gaaaatttctgggaacacttggttg

SEQ ID NO: 130079 - DNA, 25 bp, Saccharomyces pastorianus
atcgtcaaggttcgtattgttggtt

SEQ ID NO: 130080 - DNA, 25 bp, Saccharomyces pastorianus
aaattcatatcgtcaaggttcgtat

SEQ ID NO: 130081 - DNA, 25 bp, Saccharomyces pastorianus
ttggtttagccggtgtgcattttaa

SEQ ID NO: 130082 - DNA, 25 bp, Saccharomyces pastorianus
tagccggtgtgcattttaagaaaat

SEQ ID NO: 130083 - DNA, 25 bp, Saccharomyces pastorianus
aacttcatcgaagcctttgccaatt

SEQ ID NO: 130084 - DNA, 25 bp, Saccharomyces pastorianus
ggcgggaagcttacgctgcacagaa

SEQ ID NO: 130085 - DNA, 25 bp, Saccharomyces pastorianus
acataaactcgccatctgtggagaa

SEQ ID NO: 130086 - DNA, 25 bp, Saccharomyces pastorianus
aaatcagttggtcatgctcgtcgtg

SEQ ID NO: 130087 - DNA, 25 bp, Saccharomyces pastorianus
ggtcgaaaactacatccaagcgcaa

SEQ ID NO: 130088 - DNA, 25 bp, Saccharomyces pastorianus
cttaccacctctcaatgttgcaaaa

SEQ ID NO: 130089 - DNA, 25 bp, Saccharomyces pastorianus
aggaagcttctagagctccagccgg

SEQ ID NO: 130090 - DNA, 25 bp, Saccharomyces pastorianus
gcgacgacgacgagaatcatccctt

SEQ ID NO: 130091 - DNA, 25 bp, Saccharomyces pastorianus
atctgcctatcctcagcaagagctt

SEQ ID NO: 130092 - DNA, 25 bp, Saccharomyces pastorianus
gaagggtttcttttctgttcagaca

SEQ ID NO: 130093 - DNA, 25 bp, Saccharomyces pastorianus
tagcgtcagcgtgcattctgtgaac

SEQ ID NO: 130094 - DNA, 25 bp, Saccharomyces pastorianus
gagtcacttccatctgaattcaaca

SEQ ID NO: 130095 - DNA, 25 bp, Saccharomyces pastorianus
gtaccagccgacaaaccattagatg

SEQ ID NO: 130096 - DNA, 25 bp, Saccharomyces pastorianus
cttgtgaaaggtgcccatgctgctt

SEQ ID NO: 130097 - DNA, 25 bp, Saccharomyces pastorianus
catgctgcttttgtaccaaccttat

SEQ ID NO: 130098 - DNA, 25 bp, Saccharomyces pastorianus
ttacgccttgcacagtttaggttgc

SEQ ID NO: 130099 - DNA, 25 bp, Saccharomyces pastorianus
cgactggttaggtatccgtaatgcc

SEQ ID NO: 130100 - DNA, 25 bp, Saccharomyces pastorianus
gttgtccctggatcacaaatgttag

SEQ ID NO: 130101 - DNA, 25 bp, Saccharomyces pastorianus
ataccgctggtttggttatcggtgc

SEQ ID NO: 130102 - DNA, 25 bp, Saccharomyces pastorianus
agtggacaggattcaaggccccttt

SEQ ID NO: 130103 - DNA, 25 bp, Saccharomyces pastorianus
agcgttactcccgttatgacaattt

SEQ ID NO: 130104 - DNA, 25 bp, Saccharomyces pastorianus
ggcgttcccgaatatgttggtcata

SEQ ID NO: 130105 - DNA, 25 bp, Saccharomyces pastorianus
attccaagcggaagatctgcctttg

SEQ ID NO: 130106 - DNA, 25 bp, Saccharomyces pastorianus
atggtgttgaattccttgacttaga

SEQ ID NO: 130107 - DNA, 25 bp, Saccharomyces pastorianus
ctatcatttttactgtgcgaaccat

SEQ ID NO: 130108 - DNA, 25 bp, Saccharomyces pastorianus
gagagctacacgatattgccttgaa

SEQ ID NO: 130109 - DNA, 25 bp, Saccharomyces pastorianus
aaagtgatccttcaagacctgccta

SEQ ID NO: 130110 - DNA, 25 bp, Saccharomyces pastorianus
agatcattggttcccatcatgactt

SEQ ID NO: 130111 - DNA, 25 bp, Saccharomyces pastorianus
agccactgacagtattcctatcatt

SEQ ID NO: 130112 - DNA, 25 bp, Saccharomyces pastorianus
gaccatttggctaattactctgctg

SEQ ID NO: 130113 - DNA, 25 bp, Saccharomyces pastorianus
attgctccgcagaagctgagttcca

SEQ ID NO: 130114 - DNA, 25 bp, Saccharomyces pastorianus
gatctgcctttgtgtgtttaacctt

SEQ ID NO: 130115 - DNA, 25 bp, Saccharomyces pastorianus
aaatttctctttctttgctcctcat

SEQ ID NO: 130116 - DNA, 25 bp, Saccharomyces pastorianus
ttcatccagcccttttcatagtaga

SEQ ID NO: 130117 - DNA, 25 bp, Saccharomyces pastorianus
accacgctaggttaaggacgcacaa

SEQ ID NO: 130118 - DNA, 25 bp, Saccharomyces pastorianus
atgttttacactcttcatgcgcgag

SEQ ID NO: 130119 - DNA, 25 bp, Saccharomyces pastorianus
ggacgcacaacactcttaatggtag

SEQ ID NO: 130120 - DNA, 25 bp, Saccharomyces pastorianus
gaagttcttatagttcccaaggcat

SEQ ID NO: 130121 - DNA, 25 bp, Saccharomyces pastorianus
gacaactcctcaataaggtccgacg

SEQ ID NO: 130122 - DNA, 25 bp, Saccharomyces pastorianus
gtccttacaatggtgtacttacgca

SEQ ID NO: 130123 - DNA, 25 bp, Saccharomyces pastorianus
gtatcagacataccaaagttccaaa

SEQ ID NO: 130124 - DNA, 25 bp, Saccharomyces pastorianus
attggtgatgagtgcccatctggat

SEQ ID NO: 130125 - DNA, 25 bp, Saccharomyces pastorianus
gtacttacgcactggatcgagaaca

SEQ ID NO: 130126 - DNA, 25 bp, Saccharomyces pastorianus
gaatgcctgacatcaaagtcgagct

SEQ ID NO: 130127 - DNA, 25 bp, Saccharomyces pastorianus
gtttatctggttaatctatgcgacg

SEQ ID NO: 130128 - DNA, 25 bp, Saccharomyces pastorianus
ttttgaaaagatatccgtgtccaca

SEQ ID NO: 130129 - DNA, 25 bp, Saccharomyces pastorianus
gagaggaagtaagcgccattggtca

SEQ ID NO: 130130 - DNA, 25 bp, Saccharomyces pastorianus
gaagacgaaactccagccaatatat

SEQ ID NO: 130131 - DNA, 25 bp, Saccharomyces pastorianus
ttacttggtccaaagactgcgattt

SEQ ID NO: 130132 - DNA, 25 bp, Saccharomyces pastorianus
tggtcacaagttcccaaaagtcgtt

SEQ ID NO: 130133 - DNA, 25 bp, Saccharomyces pastorianus
gttggaggcaataacgcagtttatc

SEQ ID NO: 130134 - DNA, 25 bp, Saccharomyces pastorianus
gtgaccgagtaattgactttctttg

SEQ ID NO: 130135 - DNA, 25 bp, Saccharomyces pastorianus
gaatagcgcaacttcacaagaggat

SEQ ID NO: 130136 - DNA, 25 bp, Saccharomyces pastorianus
cacataacatggctctcaggaatta

SEQ ID NO: 130137 - DNA, 25 bp, Saccharomyces pastorianus
aactttgtgacaacttctggattga

SEQ ID NO: 130138 - DNA, 25 bp, Saccharomyces pastorianus
aggaccaagctttatcaaacgccca

SEQ ID NO: 130139 - DNA, 25 bp, Saccharomyces pastorianus
tagtcacccctggtaacactgagga

SEQ ID NO: 130140 - DNA, 25 bp, Saccharomyces pastorianus
ggtacgcaaacgcaagattggctat

SEQ ID NO: 130141 - DNA, 25 bp, Saccharomyces pastorianus
catgaagacattatcctcaagtggt

SEQ ID NO: 130142 - DNA, 25 bp, Saccharomyces pastorianus
tgggcccaagaccaggtaactaaag

SEQ ID NO: 130143 - DNA, 25 bp, Saccharomyces pastorianus
tgtcaacaaaagaccggcctcgggt

SEQ ID NO: 130144 - DNA, 25 bp, Saccharomyces pastorianus
aagattggctatttctattgctaga

SEQ ID NO: 130145 - DNA, 25 bp, Saccharomyces pastorianus
tatgcagttgacttgggcagagcca

SEQ ID NO: 130146 - DNA, 25 bp, Saccharomyces pastorianus
aaacgcccacttcttattggatgtt

SEQ ID NO: 130147 - DNA, 25 bp, Saccharomyces pastorianus
tcgggtgcagagatatccagattca

SEQ ID NO: 130148 - DNA, 25 bp, Saccharomyces pastorianus
atgttctgaatggtatcgcgccggg

SEQ ID NO: 130149 - DNA, 25 bp, Saccharomyces pastorianus
agagagcatttgatcctgggtttga

SEQ ID NO: 130150 - DNA, 25 bp, Saccharomyces pastorianus
tccgaggacattattgaaggtagag

SEQ ID NO: 130151 - DNA, 25 bp, Saccharomyces pastorianus
gatcctgggtttgatttggcaaatt

SEQ ID NO: 130152 - DNA, 25 bp, Saccharomyces pastorianus
tttgatcctgggtttgatttggcaa

SEQ ID NO: 130153 - DNA, 25 bp, Saccharomyces pastorianus
gcatttgatcctgggtttgatttgg

SEQ ID NO: 130154 - DNA, 25 bp, Saccharomyces pastorianus
gacattattgaaggtagagagcatt

SEQ ID NO: 130155 - DNA, 25 bp, Saccharomyces pastorianus
tcctgggtttgatttggcaaattat

SEQ ID NO: 130156 - DNA, 25 bp, Saccharomyces pastorianus
gagcatttgatcctgggtttgattt

SEQ ID NO: 130157 - DNA, 25 bp, Saccharomyces pastorianus
gagagcatttgatcctgggtttgat

SEQ ID NO: 130158 - DNA, 25 bp, Saccharomyces pastorianus
cattccgaggacattattgaaggta

SEQ ID NO: 130159 - DNA, 25 bp, Saccharomyces pastorianus
tttggcaaattattaggagaggttt

SEQ ID NO: 130160 - DNA, 25 bp, Saccharomyces pastorianus
ttaaagccatagcatttaacggaac

SEQ ID NO: 130161 - DNA, 25 bp, Saccharomyces pastorianus
gatagctattaaagccatagcattt

SEQ ID NO: 130162 - DNA, 25 bp, Saccharomyces pastorianus
ctgatagctattaaagccatagcat

SEQ ID NO: 130163 - DNA, 25 bp, Saccharomyces pastorianus
ctattaaagccatagcatttaacgg

SEQ ID NO: 130164 - DNA, 25 bp, Saccharomyces pastorianus
atgctgatagctattaaagccatag

SEQ ID NO: 130165 - DNA, 25 bp, Saccharomyces pastorianus
gctattaaagccatagcatttaacg

SEQ ID NO: 130166 - DNA, 25 bp, Saccharomyces pastorianus
taaagccatagcatttaacggaact

SEQ ID NO: 130167 - DNA, 25 bp, Saccharomyces pastorianus
gctgatagctattaaagccatagca

SEQ ID NO: 130168 - DNA, 25 bp, Saccharomyces pastorianus
attaaagccatagcatttaacggaa

SEQ ID NO: 130169 - DNA, 25 bp, Saccharomyces pastorianus
tgctgatagctattaaagccatagc

SEQ ID NO: 130170 - DNA, 25 bp, Saccharomyces pastorianus
tattaaagccatagcatttaacgga

SEQ ID NO: 130171 - DNA, 25 bp, Saccharomyces pastorianus
ttagatccgataacgacgcctttac

SEQ ID NO: 130172 - DNA, 25 bp, Saccharomyces pastorianus
gataacatttctaacctcgagcaaa

SEQ ID NO: 130173 - DNA, 25 bp, Saccharomyces pastorianus
gatcgcctacaaaccagattaccgg

SEQ ID NO: 130174 - DNA, 25 bp, Saccharomyces pastorianus
gatgagtgcaagtccgtatcggtga

SEQ ID NO: 130175 - DNA, 25 bp, Saccharomyces pastorianus
tttacatgttacgttcccattccaa

SEQ ID NO: 130176 - DNA, 25 bp, Saccharomyces pastorianus
gtgacttcgttgactgtatccttag

SEQ ID NO: 130177 - DNA, 25 bp, Saccharomyces pastorianus
agtatccttatcagcacctttttat

SEQ ID NO: 130178 - DNA, 25 bp, Saccharomyces pastorianus
gattaccggacaattcaagacagat

SEQ ID NO: 130179 - DNA, 25 bp, Saccharomyces pastorianus
aaagggcatcctattccattcaaaa

SEQ ID NO: 130180 - DNA, 25 bp, Saccharomyces pastorianus
aattctaatcttctacctcagctaa

SEQ ID NO: 130181 - DNA, 25 bp, Saccharomyces pastorianus
gattgttctctcgttaagtcagatg

SEQ ID NO: 130182 - DNA, 25 bp, Saccharomyces pastorianus
tacagtcagaagtcgatccacaaac

SEQ ID NO: 130183 - DNA, 25 bp, Saccharomyces pastorianus
gatggtctcccattattacgaggca

SEQ ID NO: 130184 - DNA, 25 bp, Saccharomyces pastorianus
gaagctgctggatcttactaagggt

SEQ ID NO: 130185 - DNA, 25 bp, Saccharomyces pastorianus
gaactcattcgtcgcgctggtagat

SEQ ID NO: 130186 - DNA, 25 bp, Saccharomyces pastorianus
gatgatcttgaattaccgacaactt

SEQ ID NO: 130187 - DNA, 25 bp, Saccharomyces pastorianus
ggatttgctactcttactcaacatg

SEQ ID NO: 130188 - DNA, 25 bp, Saccharomyces pastorianus
gaaggcttcacctctacgaatgagt

SEQ ID NO: 130189 - DNA, 25 bp, Saccharomyces pastorianus
gtcccatttcaatgactactggtct

SEQ ID NO: 130190 - DNA, 25 bp, Saccharomyces pastorianus
gcattttccactatttggtgtccaa

SEQ ID NO: 130191 - DNA, 25 bp, Saccharomyces pastorianus
gacgcatatttgttgcacttttcct

SEQ ID NO: 130192 - DNA, 25 bp, Saccharomyces pastorianus
gatggtatcgccaaatgacgcatat

SEQ ID NO: 130193 - DNA, 25 bp, Saccharomyces pastorianus
tttttgctgcaaatgtcgtctaaat

SEQ ID NO: 130194 - DNA, 25 bp, Saccharomyces pastorianus
agcgtttcaaatatgggatcctcta

SEQ ID NO: 130195 - DNA, 25 bp, Saccharomyces pastorianus
aggagtgctctgattcttttggata

SEQ ID NO: 130196 - DNA, 25 bp, Saccharomyces pastorianus
tggatatcttactcgatggaactga

SEQ ID NO: 130197 - DNA, 25 bp, Saccharomyces pastorianus
aggacattgtcatatttttgctgca

SEQ ID NO: 130198 - DNA, 25 bp, Saccharomyces pastorianus
gaaggttctcagactatcacacgat

SEQ ID NO: 130199 - DNA, 25 bp, Saccharomyces pastorianus
agttttttccactgagcttacctca

SEQ ID NO: 130200 - DNA, 25 bp, Saccharomyces pastorianus
gagcccgagttaatagcagtttcct

SEQ ID NO: 130201 - DNA, 25 bp, Saccharomyces pastorianus
gatttccttgtaccagcgtttcaaa

SEQ ID NO: 130202 - DNA, 25 bp, Saccharomyces pastorianus
gcagtttccttgttagatattgtat

SEQ ID NO: 130203 - DNA, 25 bp, Saccharomyces pastorianus
atttttgatgacaatgctgcccatt

SEQ ID NO: 130204 - DNA, 25 bp, Saccharomyces pastorianus
acgatctcacataagctggtcggat

SEQ ID NO: 130205 - DNA, 25 bp, Saccharomyces pastorianus
aaaatatagctgagcgtttgccacc

SEQ ID NO: 130206 - DNA, 25 bp, Saccharomyces pastorianus
tgtttctaatccatctagcatttta

SEQ ID NO: 130207 - DNA, 25 bp, Saccharomyces pastorianus
ttgaaagtagtcatgatggccgtat

SEQ ID NO: 130208 - DNA, 25 bp, Saccharomyces pastorianus
ttactggcccttccatctaatgata

SEQ ID NO: 130209 - DNA, 25 bp, Saccharomyces pastorianus
gctattcccaggctttgtgaatcta

SEQ ID NO: 130210 - DNA, 25 bp, Saccharomyces pastorianus
aagctgcgaagaacttttggccaaa

SEQ ID NO: 130211 - DNA, 25 bp, Saccharomyces pastorianus
gttaaactatatccccgagagagcc

SEQ ID NO: 130212 - DNA, 25 bp, Saccharomyces pastorianus
gaagcttctttcaagtttatgggac

SEQ ID NO: 130213 - DNA, 25 bp, Saccharomyces pastorianus
gcatatttgaggctattcccaggct

SEQ ID NO: 130214 - DNA, 25 bp, Saccharomyces pastorianus
gcgtttgccaccctttacaacagaa

SEQ ID NO: 130215 - DNA, 25 bp, Saccharomyces pastorianus
attggccttgaaactctggctacag

SEQ ID NO: 130216 - DNA, 25 bp, Saccharomyces pastorianus
gtaaggtactatgttccttctccat

SEQ ID NO: 130217 - DNA, 25 bp, Saccharomyces pastorianus
atgttccttctccatatcaagtaag

SEQ ID NO: 130218 - DNA, 25 bp, Saccharomyces pastorianus
ataactatatccttctgttgcctca

SEQ ID NO: 130219 - DNA, 25 bp, Saccharomyces pastorianus
agaatgtaacatttggatcccggga

SEQ ID NO: 130220 - DNA, 25 bp, Saccharomyces pastorianus
atatctttgaacatattggccttga

SEQ ID NO: 130221 - DNA, 25 bp, Saccharomyces pastorianus
atgcctctatgtctgttaggtcaca

SEQ ID NO: 130222 - DNA, 25 bp, Saccharomyces pastorianus
aagattgacatcctcattatcgccg

SEQ ID NO: 130223 - DNA, 25 bp, Saccharomyces pastorianus
acctttgatgacttatgcctctatg

SEQ ID NO: 130224 - DNA, 25 bp, Saccharomyces pastorianus
gatcccgggaattttacctttgatg

SEQ ID NO: 130225 - DNA, 25 bp, Saccharomyces pastorianus
aagctggtcacctaaatttcagaat

SEQ ID NO: 130226 - DNA, 25 bp, Saccharomyces pastorianus
acagctttttcttgtagattggcaa

SEQ ID NO: 130227 - DNA, 25 bp, Saccharomyces pastorianus
taactggaggttctgctatgaatgc

SEQ ID NO: 130228 - DNA, 25 bp, Saccharomyces pastorianus
tatatctaccaaaacaccagcaccg

SEQ ID NO: 130229 - DNA, 25 bp, Saccharomyces pastorianus
gaatccctctcaaaattataaccag

SEQ ID NO: 130230 - DNA, 25 bp, Saccharomyces pastorianus
gaattactattggatcttgccgacg

SEQ ID NO: 130231 - DNA, 25 bp, Saccharomyces pastorianus
gaaattgcagagtatcacatcagat

SEQ ID NO: 130232 - DNA, 25 bp, Saccharomyces pastorianus
acaccagcaccggtagcttatagat

SEQ ID NO: 130233 - DNA, 25 bp, Saccharomyces pastorianus
taggattcctggttattccgcagac

SEQ ID NO: 130234 - DNA, 25 bp, Saccharomyces pastorianus
gcctgccatacccatatcggaaaat

SEQ ID NO: 130235 - DNA, 25 bp, Saccharomyces pastorianus
gaggcaagagacattcagttacatt

SEQ ID NO: 130236 - DNA, 25 bp, Saccharomyces pastorianus
gatcttgccgacgattttgttacta

SEQ ID NO: 130237 - DNA, 25 bp, Saccharomyces pastorianus
aatgtccctaattcatcacagcaac

SEQ ID NO: 130238 - DNA, 25 bp, Saccharomyces pastorianus
taggagaagacaacaggctgcgcaa

SEQ ID NO: 130239 - DNA, 25 bp, Saccharomyces pastorianus
aggaattgatgttccaagccgcaaa

SEQ ID NO: 130240 - DNA, 25 bp, Saccharomyces pastorianus
aaatccaaattcaagcaacccagct

SEQ ID NO: 130241 - DNA, 25 bp, Saccharomyces pastorianus
gctgcgcaagcctacaataatactt

SEQ ID NO: 130242 - DNA, 25 bp, Saccharomyces pastorianus
taatacgggcactggtaacgctgat

SEQ ID NO: 130243 - DNA, 25 bp, Saccharomyces pastorianus
gtatatgatgcccttacactgaata

SEQ ID NO: 130244 - DNA, 25 bp, Saccharomyces pastorianus
tatggtactgcaaccgagacagttg

SEQ ID NO: 130245 - DNA, 25 bp, Saccharomyces pastorianus
gaaatggccgctaagttcaggacat

SEQ ID NO: 130246 - DNA, 25 bp, Saccharomyces pastorianus
cccagcttctattcctactgaaaat

SEQ ID NO: 130247 - DNA, 25 bp, Saccharomyces pastorianus
aacgctgatgcgatcacaggagctc

SEQ ID NO: 130248 - DNA, 25 bp, Saccharomyces pastorianus
gaacgtctcgtggaaagccttgacc

SEQ ID NO: 130249 - DNA, 25 bp, Saccharomyces pastorianus
aagccttgaccgttgcgtcgttact

SEQ ID NO: 130250 - DNA, 25 bp, Saccharomyces pastorianus
gtctcgtggaaagccttgaccgttg

SEQ ID NO: 130251 - DNA, 25 bp, Saccharomyces pastorianus
acgtctcgtggaaagccttgaccgt

SEQ ID NO: 130252 - DNA, 25 bp, Saccharomyces pastorianus
ggaaagccttgaccgttgcgtcgtt

SEQ ID NO: 130253 - DNA, 25 bp, Saccharomyces pastorianus
tcgtggaaagccttgaccgttgcgt

SEQ ID NO: 130254 - DNA, 25 bp, Saccharomyces pastorianus
ttcgaacgtctcgtggaaagccttg

SEQ ID NO: 130255 - DNA, 25 bp, Saccharomyces pastorianus
aacgtctcgtggaaagccttgaccg

SEQ ID NO: 130256 - DNA, 25 bp, Saccharomyces pastorianus
ctcgtggaaagccttgaccgttgcg

SEQ ID NO: 130257 - DNA, 25 bp, Saccharomyces pastorianus
gtggaaagccttgaccgttgcgtcg

SEQ ID NO: 130258 - DNA, 25 bp, Saccharomyces pastorianus
tcgaacgtctcgtggaaagccttga

SEQ ID NO: 130259 - DNA, 25 bp, Saccharomyces pastorianus
gtaggacggcatctttacaaacttt

SEQ ID NO: 130260 - DNA, 25 bp, Saccharomyces pastorianus
ggttcatccatataccttaactttg

SEQ ID NO: 130261 - DNA, 25 bp, Saccharomyces pastorianus
gaaccaagcataatacccgcgttaa

SEQ ID NO: 130262 - DNA, 25 bp, Saccharomyces pastorianus
taactttgtactggtccgcttctaa

SEQ ID NO: 130263 - DNA, 25 bp, Saccharomyces pastorianus
aaaggtgttgccattctaggagtag

SEQ ID NO: 130264 - DNA, 25 bp, Saccharomyces pastorianus
tagcgcatcgagaaggtccgtatct

SEQ ID NO: 130265 - DNA, 25 bp, Saccharomyces pastorianus
taatcccatcctagagaatcctgcc

SEQ ID NO: 130266 - DNA, 25 bp, Saccharomyces pastorianus
gaaagattttcccattgcccggcga

SEQ ID NO: 130267 - DNA, 25 bp, Saccharomyces pastorianus
aagtattatccacgcttgggacctt

SEQ ID NO: 130268 - DNA, 25 bp, Saccharomyces pastorianus
tgggaccttttggattcgaatcacg

SEQ ID NO: 130269 - DNA, 25 bp, Saccharomyces pastorianus
gaaagattcttctgggttcatccat

SEQ ID NO: 130270 - DNA, 25 bp, Saccharomyces pastorianus
tcatgggaagctaaccggtaagcaa

SEQ ID NO: 130271 - DNA, 25 bp, Saccharomyces pastorianus
acgagtatatggaagaggatgacgc

SEQ ID NO: 130272 - DNA, 25 bp, Saccharomyces pastorianus
gctaaccggtaagcaaatgtttgaa

SEQ ID NO: 130273 - DNA, 25 bp, Saccharomyces pastorianus
tgacgcgagtgtagatgacgtagcc

SEQ ID NO: 130274 - DNA, 25 bp, Saccharomyces pastorianus
tcatcatgggaagctaaccggtaag

SEQ ID NO: 130275 - DNA, 25 bp, Saccharomyces pastorianus
gcacaggcgacgagtatatggaaga

SEQ ID NO: 130276 - DNA, 25 bp, Saccharomyces pastorianus
aaggctcatcatgggaagctaaccg

SEQ ID NO: 130277 - DNA, 25 bp, Saccharomyces pastorianus
gctcatcatgggaagctaaccggta

SEQ ID NO: 130278 - DNA, 25 bp, Saccharomyces pastorianus
taaccggtaagcaaatgtttgaaca

SEQ ID NO: 130279 - DNA, 25 bp, Saccharomyces pastorianus
atgaaggctcatcatgggaagctaa

SEQ ID NO: 130280 - DNA, 25 bp, Saccharomyces pastorianus
gaagctaaccggtaagcaaatgttt

SEQ ID NO: 130281 - DNA, 25 bp, Saccharomyces pastorianus
gttgtctttggtgaagttgttgacg

SEQ ID NO: 130282 - DNA, 25 bp, Saccharomyces pastorianus
gttgagtccttgggttctccttccg

SEQ ID NO: 130283 - DNA, 25 bp, Saccharomyces pastorianus
gaaggttgagtccttgggttctcct

SEQ ID NO: 130284 - DNA, 25 bp, Saccharomyces pastorianus
tgaagttgttgacggttacgacatc

SEQ ID NO: 130285 - DNA, 25 bp, Saccharomyces pastorianus
ggtccatactcctacggttctcaat

SEQ ID NO: 130286 - DNA, 25 bp, Saccharomyces pastorianus
gtccatactcctacggttctcaatt

SEQ ID NO: 130287 - DNA, 25 bp, Saccharomyces pastorianus
tctttggtgaagttgttgacggtta

SEQ ID NO: 130288 - DNA, 25 bp, Saccharomyces pastorianus
tggtgaagttgttgacggttacgac

SEQ ID NO: 130289 - DNA, 25 bp, Saccharomyces pastorianus
tccatactcctacggttctcaattc

SEQ ID NO: 130290 - DNA, 25 bp, Saccharomyces pastorianus
gacatcgttaagaaggttgagtcct

SEQ ID NO: 130291 - DNA, 25 bp, Saccharomyces pastorianus
tacgacatcgttaagaaggttgagt

SEQ ID NO: 130292 - DNA, 25 bp, Saccharomyces pastorianus
gaagacccattgttagatttcaaaa

SEQ ID NO: 130293 - DNA, 25 bp, Saccharomyces pastorianus
gaaaatcttggctccattagcagaa

SEQ ID NO: 130294 - DNA, 25 bp, Saccharomyces pastorianus
tcaaaatggttgtcctttcccacaa

SEQ ID NO: 130295 - DNA, 25 bp, Saccharomyces pastorianus
aaattaggctgtcattctgctccaa

SEQ ID NO: 130296 - DNA, 25 bp, Saccharomyces pastorianus
gatgggcacaccgaatgtatctctt

SEQ ID NO: 130297 - DNA, 25 bp, Saccharomyces pastorianus
tattggtgccgctggttctggtgtc

SEQ ID NO: 130298 - DNA, 25 bp, Saccharomyces pastorianus
aagaatacgtctgcgacgcctacaa

SEQ ID NO: 130299 - DNA, 25 bp, Saccharomyces pastorianus
cctttcccacaacaccattattggt

SEQ ID NO: 130300 - DNA, 25 bp, Saccharomyces pastorianus
gaatgtatctctttgaggttcaaga

SEQ ID NO: 130301 - DNA, 25 bp, Saccharomyces pastorianus
tggaacaaccagacagacctcaacc

SEQ ID NO: 130302 - DNA, 25 bp, Saccharomyces pastorianus
agagtcgctgtttccgatgggcaca

SEQ ID NO: 130303 - DNA, 25 bp, Saccharomyces pastorianus
ttggtgcctcttctagatcagctgg

SEQ ID NO: 130304 - DNA, 25 bp, Saccharomyces pastorianus
gtatttccaattgttccactgcagg

SEQ ID NO: 130305 - DNA, 25 bp, Saccharomyces pastorianus
agatgtgccattgattgttcctgtt

SEQ ID NO: 130306 - DNA, 25 bp, Saccharomyces pastorianus
ttctgttgttggcaaatcaccctca

SEQ ID NO: 130307 - DNA, 25 bp, Saccharomyces pastorianus
ggtgctactggttccgttggtcaac

SEQ ID NO: 130308 - DNA, 25 bp, Saccharomyces pastorianus
tgatgctttgaccactactactttg

SEQ ID NO: 130309 - DNA, 25 bp, Saccharomyces pastorianus
tgacatcgtcttttccggattggat

SEQ ID NO: 130310 - DNA, 25 bp, Saccharomyces pastorianus
agctggtatcgccattgtttccaat

SEQ ID NO: 130311 - DNA, 25 bp, Saccharomyces pastorianus
ggttgcaccattgaagcctttgatt

SEQ ID NO: 130312 - DNA, 25 bp, Saccharomyces pastorianus
tgttcctgttgtcaatcctgagcat

SEQ ID NO: 130313 - DNA, 25 bp, Saccharomyces pastorianus
ttggatgctgactatgctggcgcta

SEQ ID NO: 130314 - DNA, 25 bp, Saccharomyces pastorianus
aacgaatttgacagtgccatcatac

SEQ ID NO: 130315 - DNA, 25 bp, Saccharomyces pastorianus
gaattccaagtcaccctagataata

SEQ ID NO: 130316 - DNA, 25 bp, Saccharomyces pastorianus
ataaggaatcatctggtgtgcaaaa

SEQ ID NO: 130317 - DNA, 25 bp, Saccharomyces pastorianus
gggattctaacctggtgaccaagaa

SEQ ID NO: 130318 - DNA, 25 bp, Saccharomyces pastorianus
ttacccgttatacaatgtttcctcg

SEQ ID NO: 130319 - DNA, 25 bp, Saccharomyces pastorianus
tatccgcccataatgatgaattcca

SEQ ID NO: 130320 - DNA, 25 bp, Saccharomyces pastorianus
aacttttccatataatgttatctca

SEQ ID NO: 130321 - DNA, 25 bp, Saccharomyces pastorianus
atgagaatagttttgtcgtgaataa

SEQ ID NO: 130322 - DNA, 25 bp, Saccharomyces pastorianus
atgttatctcattatccgcccataa

SEQ ID NO: 130323 - DNA, 25 bp, Saccharomyces pastorianus
gacagtgccatcatacaatcagtac

SEQ ID NO: 130324 - DNA, 25 bp, Saccharomyces pastorianus
tgatgaattccaagtcaccctagat

SEQ ID NO: 130325 - DNA, 25 bp, Saccharomyces pastorianus
gactaattgtgtgcgcagattctga

SEQ ID NO: 130326 - DNA, 25 bp, Saccharomyces pastorianus
gacgataaaatcttcgcttgggatt

SEQ ID NO: 130327 - DNA, 25 bp, Saccharomyces pastorianus
aaaggttctgcttctcaaagagacc

SEQ ID NO: 130328 - DNA, 25 bp, Saccharomyces pastorianus
agattctgacaagtccctcctagtt

SEQ ID NO: 130329 - DNA, 25 bp, Saccharomyces pastorianus
atcctcggtcatgtctctatgttga

SEQ ID NO: 130330 - DNA, 25 bp, Saccharomyces pastorianus
aagactctgacggtcatcaattcat

SEQ ID NO: 130331 - DNA, 25 bp, Saccharomyces pastorianus
atggctctttggtcataagcatttt

SEQ ID NO: 130332 - DNA, 25 bp, Saccharomyces pastorianus
tccctcctagttttcgatgtcgaca

SEQ ID NO: 130333 - DNA, 25 bp, Saccharomyces pastorianus
agaacttgtctaccttcgattatag

SEQ ID NO: 130334 - DNA, 25 bp, Saccharomyces pastorianus
aatgatcagcatttagcaccaacaa

SEQ ID NO: 130335 - DNA, 25 bp, Saccharomyces pastorianus
atttcgcattatccccaatgtttca

SEQ ID NO: 130336 - DNA, 25 bp, Saccharomyces pastorianus
gaaatcgtacgaattttctcgtgac

SEQ ID NO: 130337 - DNA, 25 bp, Saccharomyces pastorianus
tcaatgcctggcgttcagtgatagt

SEQ ID NO: 130338 - DNA, 25 bp, Saccharomyces pastorianus
gctgcagttctccttgacattatgt

SEQ ID NO: 130339 - DNA, 25 bp, Saccharomyces pastorianus
aataactcgtctgatcaccatttgc

SEQ ID NO: 130340 - DNA, 25 bp, Saccharomyces pastorianus
atcaccatttgcatccaggtcgtag

SEQ ID NO: 130341 - DNA, 25 bp, Saccharomyces pastorianus
tcctgctatgtatgctctggtgatt

SEQ ID NO: 130342 - DNA, 25 bp, Saccharomyces pastorianus
atagagctgctcaacgaattattcg

SEQ ID NO: 130343 - DNA, 25 bp, Saccharomyces pastorianus
aagagcgttccaacggagttgagac

SEQ ID NO: 130344 - DNA, 25 bp, Saccharomyces pastorianus
aacaagaaacgagtgctgctgcagt

SEQ ID NO: 130345 - DNA, 25 bp, Saccharomyces pastorianus
gactttagactatactgtcctgcta

SEQ ID NO: 130346 - DNA, 25 bp, Saccharomyces pastorianus
aagattttgcccactgtatccctta

SEQ ID NO: 130347 - DNA, 25 bp, Saccharomyces pastorianus
agatcgctagacgagaccctgttag

SEQ ID NO: 130348 - DNA, 25 bp, Saccharomyces pastorianus
gtcgtaccaaatcctccaaagttca

SEQ ID NO: 130349 - DNA, 25 bp, Saccharomyces pastorianus
atgctgccgatggaataacgccgcc

SEQ ID NO: 130350 - DNA, 25 bp, Saccharomyces pastorianus
tggcgaaccagctatcgctcatcaa

SEQ ID NO: 130351 - DNA, 25 bp, Saccharomyces pastorianus
aggtctacccatacgaggaacatat

SEQ ID NO: 130352 - DNA, 25 bp, Saccharomyces pastorianus
ttggctttagattgcctgtcaaaat

SEQ ID NO: 130353 - DNA, 25 bp, Saccharomyces pastorianus
gaatttgatccgcaaaccacgaata

SEQ ID NO: 130354 - DNA, 25 bp, Saccharomyces pastorianus
cactaagggcaagctgtcgtaccaa

SEQ ID NO: 130355 - DNA, 25 bp, Saccharomyces pastorianus
agaccctgttagtgaatccacccga

SEQ ID NO: 130356 - DNA, 25 bp, Saccharomyces pastorianus
cacccgattctttagcctctaatga

SEQ ID NO: 130357 - DNA, 25 bp, Saccharomyces pastorianus
gctcatcaagatagtgttcccacca

SEQ ID NO: 130358 - DNA, 25 bp, Saccharomyces pastorianus
aaatcgcttctggataagaggcaaa

SEQ ID NO: 130359 - DNA, 25 bp, Saccharomyces pastorianus
gacaaacaaatcgaccaggcttatg

SEQ ID NO: 130360 - DNA, 25 bp, Saccharomyces pastorianus
gaaagcccaattgattccactagtg

SEQ ID NO: 130361 - DNA, 25 bp, Saccharomyces pastorianus
gtcaaacgtattcgcgtacccaaga

SEQ ID NO: 130362 - DNA, 25 bp, Saccharomyces pastorianus
agatgaccccgattgggtcaccggt

SEQ ID NO: 130363 - DNA, 25 bp, Saccharomyces pastorianus
agagaatccccaatgaaagcgtatt

SEQ ID NO: 130364 - DNA, 25 bp, Saccharomyces pastorianus
gcagcttcaaataatgtgagcacag

SEQ ID NO: 130365 - DNA, 25 bp, Saccharomyces pastorianus
agcacaggaaccacgtctcaaatag

SEQ ID NO: 130366 - DNA, 25 bp, Saccharomyces pastorianus
gacgacgaaataagcgcagagttaa

SEQ ID NO: 130367 - DNA, 25 bp, Saccharomyces pastorianus
ggattaataagattggtccattgtt

SEQ ID NO: 130368 - DNA, 25 bp, Saccharomyces pastorianus
acaaaaggctgcaaactcaagttta

SEQ ID NO: 130369 - DNA, 25 bp, Saccharomyces pastorianus
gtgggcccttattatctaggctatt

SEQ ID NO: 130370 - DNA, 25 bp, Saccharomyces pastorianus
ttatctcaggagaacgggcccagtg

SEQ ID NO: 130371 - DNA, 25 bp, Saccharomyces pastorianus
gacagtatatcgtgtgggcccttat

SEQ ID NO: 130372 - DNA, 25 bp, Saccharomyces pastorianus
acgatgcatctactatactaccaaa

SEQ ID NO: 130373 - DNA, 25 bp, Saccharomyces pastorianus
attatacccgatagcttgcaatttg

SEQ ID NO: 130374 - DNA, 25 bp, Saccharomyces pastorianus
tacgggatggcggactaccgagaac

SEQ ID NO: 130375 - DNA, 25 bp, Saccharomyces pastorianus
gggcccagtgttcaaacacctgaca

SEQ ID NO: 130376 - DNA, 25 bp, Saccharomyces pastorianus
gacaaaacttatgaccctgaggtaa

SEQ ID NO: 130377 - DNA, 25 bp, Saccharomyces pastorianus
tcaatacctttctagcatttgtgga

SEQ ID NO: 130378 - DNA, 25 bp, Saccharomyces pastorianus
taggccctttgtacacagatgtttg

SEQ ID NO: 130379 - DNA, 25 bp, Saccharomyces pastorianus
tattataccgaaactaggccctttg

SEQ ID NO: 130380 - DNA, 25 bp, Saccharomyces pastorianus
aagtgttgagacgattaggcgtcaa

SEQ ID NO: 130381 - DNA, 25 bp, Saccharomyces pastorianus
tgtcgaagtgttgagacgattaggc

SEQ ID NO: 130382 - DNA, 25 bp, Saccharomyces pastorianus
gaatctcaaggttttgaaaaggaca

SEQ ID NO: 130383 - DNA, 25 bp, Saccharomyces pastorianus
gcgtcaagtccttagaccccaatga

SEQ ID NO: 130384 - DNA, 25 bp, Saccharomyces pastorianus
aagattgtcgaagtgttgagacgat

SEQ ID NO: 130385 - DNA, 25 bp, Saccharomyces pastorianus
gtgttgagacgattaggcgtcaagt

SEQ ID NO: 130386 - DNA, 25 bp, Saccharomyces pastorianus
gttgagacgattaggcgtcaagtcc

SEQ ID NO: 130387 - DNA, 25 bp, Saccharomyces pastorianus
caagattgtcgaagtgttgagacga

SEQ ID NO: 130388 - DNA, 25 bp, Saccharomyces pastorianus
tccttagaccccaatgacaacaaca

SEQ ID NO: 130389 - DNA, 25 bp, Saccharomyces pastorianus
tcgaagtgttgagacgattaggcgt

SEQ ID NO: 130390 - DNA, 25 bp, Saccharomyces pastorianus
gattgtcgaagtgttgagacgatta

SEQ ID NO: 130391 - DNA, 25 bp, Saccharomyces pastorianus
taaagtctgcattgatttcgctaca

SEQ ID NO: 130392 - DNA, 25 bp, Saccharomyces pastorianus
gtagcacaacactatttacgggata

SEQ ID NO: 130393 - DNA, 25 bp, Saccharomyces pastorianus
gcccacctggaacaccttacgaggg

SEQ ID NO: 130394 - DNA, 25 bp, Saccharomyces pastorianus
gattataccacacaggaacttccta

SEQ ID NO: 130395 - DNA, 25 bp, Saccharomyces pastorianus
aggtgccatttgtttagatattctt

SEQ ID NO: 130396 - DNA, 25 bp, Saccharomyces pastorianus
gatttcgctacaggcgctactacaa

SEQ ID NO: 130397 - DNA, 25 bp, Saccharomyces pastorianus
gaaggatgatcctgcagctcacatt

SEQ ID NO: 130398 - DNA, 25 bp, Saccharomyces pastorianus
gggtggcaaatttgtcgtggatatc

SEQ ID NO: 130399 - DNA, 25 bp, Saccharomyces pastorianus
atcgaagtacctatggagtatccat

SEQ ID NO: 130400 - DNA, 25 bp, Saccharomyces pastorianus
gcagctcacattactcttgaatttg

SEQ ID NO: 130401 - DNA, 25 bp, Saccharomyces pastorianus
gctactacaatctccagagcctaac

SEQ ID NO: 130402 - DNA, 25 bp, Saccharomyces pastorianus
aaacttgatcatatcctcgctatca

SEQ ID NO: 130403 - DNA, 25 bp, Saccharomyces pastorianus
ggaagccattcctattctcaatatg

SEQ ID NO: 130404 - DNA, 25 bp, Saccharomyces pastorianus
gaaagcctaaatgcgatccctggtt

SEQ ID NO: 130405 - DNA, 25 bp, Saccharomyces pastorianus
gaacgcttcagcattggatctctaa

SEQ ID NO: 130406 - DNA, 25 bp, Saccharomyces pastorianus
caggcttttagcttattcaacttca

SEQ ID NO: 130407 - DNA, 25 bp, Saccharomyces pastorianus
gatccctggttgtttgtttccaatg

SEQ ID NO: 130408 - DNA, 25 bp, Saccharomyces pastorianus
taccagtgggtgatgcttttctaga

SEQ ID NO: 130409 - DNA, 25 bp, Saccharomyces pastorianus
aattaccagccctgtgacaattggc

SEQ ID NO: 130410 - DNA, 25 bp, Saccharomyces pastorianus
aggtctgacatagcggatcttatta

SEQ ID NO: 130411 - DNA, 25 bp, Saccharomyces pastorianus
acgacattctttgtttcctaatgac

SEQ ID NO: 130412 - DNA, 25 bp, Saccharomyces pastorianus
gacaattggcaacttattctcatta

SEQ ID NO: 130413 - DNA, 25 bp, Saccharomyces pastorianus
tttgggtacttatctactgcactta

SEQ ID NO: 130414 - DNA, 25 bp, Saccharomyces pastorianus
gcacgatcattttttgtctttactt

SEQ ID NO: 130415 - DNA, 25 bp, Saccharomyces pastorianus
agagaatcatgcaatcctatttaga

SEQ ID NO: 130416 - DNA, 25 bp, Saccharomyces pastorianus
cgttctctgcactaacatttcgaat

SEQ ID NO: 130417 - DNA, 25 bp, Saccharomyces pastorianus
aaaagtccattttcgttctctgcac

SEQ ID NO: 130418 - DNA, 25 bp, Saccharomyces pastorianus
gaagaacaaacaactccctgcaaag

SEQ ID NO: 130419 - DNA, 25 bp, Saccharomyces pastorianus
tatctactgcacttatacgggttaa

SEQ ID NO: 130420 - DNA, 25 bp, Saccharomyces pastorianus
ggtgtccctactcaaaaccattgat

SEQ ID NO: 130421 - DNA, 25 bp, Saccharomyces pastorianus
ttctcagtacgatttggtgtcccta

SEQ ID NO: 130422 - DNA, 25 bp, Saccharomyces pastorianus
gaatatcacatttgtttctcagtac

SEQ ID NO: 130423 - DNA, 25 bp, Saccharomyces pastorianus
gacaatgtttcatcgctatccgtat

SEQ ID NO: 130424 - DNA, 25 bp, Saccharomyces pastorianus
gaacagtattcatcaaatggcaagc

SEQ ID NO: 130425 - DNA, 25 bp, Saccharomyces pastorianus
atcagtaagttttccgcacagttgg

SEQ ID NO: 130426 - DNA, 25 bp, Saccharomyces pastorianus
taagttttccgcacagttggagaat

SEQ ID NO: 130427 - DNA, 25 bp, Saccharomyces pastorianus
gatgtgcttttattagatattgtag

SEQ ID NO: 130428 - DNA, 25 bp, Saccharomyces pastorianus
tcagtaagttttccgcacagttgga

SEQ ID NO: 130429 - DNA, 25 bp, Saccharomyces pastorianus
aagaagccggatatcagtaagtttt

SEQ ID NO: 130430 - DNA, 25 bp, Saccharomyces pastorianus
tatcagtaagttttccgcacagttg

SEQ ID NO: 130431 - DNA, 25 bp, Saccharomyces pastorianus
gtattcatcaaatggcaagcttctt

SEQ ID NO: 130432 - DNA, 25 bp, Saccharomyces pastorianus
aagttttccgcacagttggagaata

SEQ ID NO: 130433 - DNA, 25 bp, Saccharomyces pastorianus
gtaagttttccgcacagttggagaa

SEQ ID NO: 130434 - DNA, 25 bp, Saccharomyces pastorianus
atatcagtaagttttccgcacagtt

SEQ ID NO: 130435 - DNA, 25 bp, Saccharomyces pastorianus
gtacttccgtttgtagttggataca

SEQ ID NO: 130436 - DNA, 25 bp, Saccharomyces pastorianus
gaggttagagcaatctttagcccat

SEQ ID NO: 130437 - DNA, 25 bp, Saccharomyces pastorianus
ttcgctacgtaggatttagtaaact

SEQ ID NO: 130438 - DNA, 25 bp, Saccharomyces pastorianus
agttggatacaagaatggcctagaa

SEQ ID NO: 130439 - DNA, 25 bp, Saccharomyces pastorianus
atggcctagaaaaagttcgctacgt

SEQ ID NO: 130440 - DNA, 25 bp, Saccharomyces pastorianus
gcccattcaggtgttatagaagaca

SEQ ID NO: 130441 - DNA, 25 bp, Saccharomyces pastorianus
gtgaatacggaacgcttcgcttcta

SEQ ID NO: 130442 - DNA, 25 bp, Saccharomyces pastorianus
gtaaactgggaaatgaccctaatgg

SEQ ID NO: 130443 - DNA, 25 bp, Saccharomyces pastorianus
gaaagcattcatctgtgaatacgga

SEQ ID NO: 130444 - DNA, 25 bp, Saccharomyces pastorianus
atctttagcccattcaggtgttata

SEQ ID NO: 130445 - DNA, 25 bp, Saccharomyces pastorianus
aacgcttcgcttctacaaatcatga

SEQ ID NO: 130446 - DNA, 25 bp, Saccharomyces pastorianus
gagaggctaccacaaatatcagatc

SEQ ID NO: 130447 - DNA, 25 bp, Saccharomyces pastorianus
attagacgaggatcatgaatttttg

SEQ ID NO: 130448 - DNA, 25 bp, Saccharomyces pastorianus
ttatcggtcggagaggctaccacaa

SEQ ID NO: 130449 - DNA, 25 bp, Saccharomyces pastorianus
aatttttgagtgcttatcggtcgga

SEQ ID NO: 130450 - DNA, 25 bp, Saccharomyces pastorianus
acacaaatgtgctttcaaatgctga

SEQ ID NO: 130451 - DNA, 25 bp, Saccharomyces pastorianus
agatgaactacttaatgaattggat

SEQ ID NO: 130452 - DNA, 25 bp, Saccharomyces pastorianus
ggataaacacacaactgtcgatagc

SEQ ID NO: 130453 - DNA, 25 bp, Saccharomyces pastorianus
atcagatcatttaaaacaggtcaag

SEQ ID NO: 130454 - DNA, 25 bp, Saccharomyces pastorianus
tagacagatactacacaaatgtgct

SEQ ID NO: 130455 - DNA, 25 bp, Saccharomyces pastorianus
gacaaaagtagtggcgaggaaaatt

SEQ ID NO: 130456 - DNA, 25 bp, Saccharomyces pastorianus
acacaactgtcgatagcgatgacaa

SEQ ID NO: 130457 - DNA, 25 bp, Saccharomyces pastorianus
tataaaaaagccgtcaccctggatt

SEQ ID NO: 130458 - DNA, 25 bp, Saccharomyces pastorianus
ttcaagtccagaacgcctacagatg

SEQ ID NO: 130459 - DNA, 25 bp, Saccharomyces pastorianus
ggtttggcactaaacttcaagtcca

SEQ ID NO: 130460 - DNA, 25 bp, Saccharomyces pastorianus
gttaacctttttagcaccttgatga

SEQ ID NO: 130461 - DNA, 25 bp, Saccharomyces pastorianus
gtcaccctggatttatacggcgaag

SEQ ID NO: 130462 - DNA, 25 bp, Saccharomyces pastorianus
atacacaacaggcatctccattact

SEQ ID NO: 130463 - DNA, 25 bp, Saccharomyces pastorianus
ggatctatccccaaagaacgcgagg

SEQ ID NO: 130464 - DNA, 25 bp, Saccharomyces pastorianus
atagtaccgaatcacccagacaatg

SEQ ID NO: 130465 - DNA, 25 bp, Saccharomyces pastorianus
gaattcaccaattccacagcataca

SEQ ID NO: 130466 - DNA, 25 bp, Saccharomyces pastorianus
atagtgcaggctttacagatgtaac

SEQ ID NO: 130467 - DNA, 25 bp, Saccharomyces pastorianus
gtcacaggttactaaatctcgagga

SEQ ID NO: 130468 - DNA, 25 bp, Saccharomyces pastorianus
attcagatgctgttaacgaagataa

SEQ ID NO: 130469 - DNA, 25 bp, Saccharomyces pastorianus
ggattccatagttattgtcacgaat

SEQ ID NO: 130470 - DNA, 25 bp, Saccharomyces pastorianus
tcttggattccatagttattgtcac

SEQ ID NO: 130471 - DNA, 25 bp, Saccharomyces pastorianus
agcgctacatgaatattcagatgct

SEQ ID NO: 130472 - DNA, 25 bp, Saccharomyces pastorianus
gaccagagcaacacaagtttgaaaa

SEQ ID NO: 130473 - DNA, 25 bp, Saccharomyces pastorianus
ggcgacgaccagagcaacacaagtt

SEQ ID NO: 130474 - DNA, 25 bp, Saccharomyces pastorianus
agccttatctcccaggaatcaataa

SEQ ID NO: 130475 - DNA, 25 bp, Saccharomyces pastorianus
ggaatcaataaaagcgctacatgaa

SEQ ID NO: 130476 - DNA, 25 bp, Saccharomyces pastorianus
tgactttgttgtcagaccaccctct

SEQ ID NO: 130477 - DNA, 25 bp, Saccharomyces pastorianus
aaaagcactgctgactttgttgtca

SEQ ID NO: 130478 - DNA, 25 bp, Saccharomyces pastorianus
ttaacgaagataagggcgacgacca

SEQ ID NO: 130479 - DNA, 25 bp, Saccharomyces pastorianus
gatctcgcagaggaaacactgaaaa

SEQ ID NO: 130480 - DNA, 25 bp, Saccharomyces pastorianus
gatttgttcaagtgttatcttctga

SEQ ID NO: 130481 - DNA, 25 bp, Saccharomyces pastorianus
aattggccgatctcgcagaggaaac

SEQ ID NO: 130482 - DNA, 25 bp, Saccharomyces pastorianus
cttctgaaaaggacggtattctaga

SEQ ID NO: 130483 - DNA, 25 bp, Saccharomyces pastorianus
gtattctagaattggccgatctcgc

SEQ ID NO: 130484 - DNA, 25 bp, Saccharomyces pastorianus
tggccgatctcgcagaggaaacact

SEQ ID NO: 130485 - DNA, 25 bp, Saccharomyces pastorianus
gtcaacgctaatacggccaccggaa

SEQ ID NO: 130486 - DNA, 25 bp, Saccharomyces pastorianus
tcaagtgttatcttctgaaaaggac

SEQ ID NO: 130487 - DNA, 25 bp, Saccharomyces pastorianus
tagaattggccgatctcgcagagga

SEQ ID NO: 130488 - DNA, 25 bp, Saccharomyces pastorianus
gaaaatattcagagcaaacaagttt

SEQ ID NO: 130489 - DNA, 25 bp, Saccharomyces pastorianus
caagtttgaactaggccttgtccct

SEQ ID NO: 130490 - DNA, 25 bp, Saccharomyces pastorianus
tatggcggcgacaagtaatcctttt

SEQ ID NO: 130491 - DNA, 25 bp, Saccharomyces pastorianus
gccttctactacgtcagcatttgga

SEQ ID NO: 130492 - DNA, 25 bp, Saccharomyces pastorianus
atcaatgttaatccgccttctacta

SEQ ID NO: 130493 - DNA, 25 bp, Saccharomyces pastorianus
aaaccgtcagcatttggagcaccag

SEQ ID NO: 130494 - DNA, 25 bp, Saccharomyces pastorianus
caacaggttttggtgctatggcggc

SEQ ID NO: 130495 - DNA, 25 bp, Saccharomyces pastorianus
attcacgtcgggtgctaagcctaat

SEQ ID NO: 130496 - DNA, 25 bp, Saccharomyces pastorianus
ggaatgccccagtttggtaccaata

SEQ ID NO: 130497 - DNA, 25 bp, Saccharomyces pastorianus
gtggtatcaaccctttcacaaataa

SEQ ID NO: 130498 - DNA, 25 bp, Saccharomyces pastorianus
tttggagcaccgtcatttggatcaa

SEQ ID NO: 130499 - DNA, 25 bp, Saccharomyces pastorianus
tggcaatacgtcaattagcgctttt

SEQ ID NO: 130500 - DNA, 25 bp, Saccharomyces pastorianus
ggaaccaccacttcagcatttggaa

SEQ ID NO: 130501 - DNA, 25 bp, Saccharomyces pastorianus
atccgagactaaaggtggcccaata

SEQ ID NO: 130502 - DNA, 25 bp, Saccharomyces pastorianus
tttcaaccatttcaacccggacttg

SEQ ID NO: 130503 - DNA, 25 bp, Saccharomyces pastorianus
caaggaccccgttgatctatagaaa

SEQ ID NO: 130504 - DNA, 25 bp, Saccharomyces pastorianus
tggaaatacgaactcaaccccgact

SEQ ID NO: 130505 - DNA, 25 bp, Saccharomyces pastorianus
gagaacccatagaattcgacttaaa

SEQ ID NO: 130506 - DNA, 25 bp, Saccharomyces pastorianus
aggtggcccaatacattgtgaaaca

SEQ ID NO: 130507 - DNA, 25 bp, Saccharomyces pastorianus
cggacttgaataaaaggccgccaag

SEQ ID NO: 130508 - DNA, 25 bp, Saccharomyces pastorianus
aacctcttgatttgatgtttctgaa

SEQ ID NO: 130509 - DNA, 25 bp, Saccharomyces pastorianus
ttgtgaaacaaggaccccgttgatc

SEQ ID NO: 130510 - DNA, 25 bp, Saccharomyces pastorianus
caaccccgactatagcaaaggcttt

SEQ ID NO: 130511 - DNA, 25 bp, Saccharomyces pastorianus
ggccgccaagagaacccatagaatt

SEQ ID NO: 130512 - DNA, 25 bp, Saccharomyces pastorianus
gacaaaaattcttctccatcgccta

SEQ ID NO: 130513 - DNA, 25 bp, Saccharomyces pastorianus
atccacggtggcttctaatattata

SEQ ID NO: 130514 - DNA, 25 bp, Saccharomyces pastorianus
gtcttctacagaatctctacctact

SEQ ID NO: 130515 - DNA, 25 bp, Saccharomyces pastorianus
gccaagcttgggactaaacggtcaa

SEQ ID NO: 130516 - DNA, 25 bp, Saccharomyces pastorianus
tagcgactcctgcttcttcagaaga

SEQ ID NO: 130517 - DNA, 25 bp, Saccharomyces pastorianus
gcctactgcatctacctcttcaatg

SEQ ID NO: 130518 - DNA, 25 bp, Saccharomyces pastorianus
atcttcgtcaacgtcaggatcgtca

SEQ ID NO: 130519 - DNA, 25 bp, Saccharomyces pastorianus
gtggatttcaaagtcaaccccgaag

SEQ ID NO: 130520 - DNA, 25 bp, Saccharomyces pastorianus
gatgacgcagatatggccaagcttg

SEQ ID NO: 130521 - DNA, 25 bp, Saccharomyces pastorianus
atctctacctacttcttccaagaaa

SEQ ID NO: 130522 - DNA, 25 bp, Saccharomyces pastorianus
ggatcgtcaaccacaacggtagcga

SEQ ID NO: 130523 - DNA, 25 bp, Saccharomyces pastorianus
gttgctgaaaatgtacgatcctata

SEQ ID NO: 130524 - DNA, 25 bp, Saccharomyces pastorianus
aattgcctaagttttctgccgagga

SEQ ID NO: 130525 - DNA, 25 bp, Saccharomyces pastorianus
gtactggtacaaggccaacctcaaa

SEQ ID NO: 130526 - DNA, 25 bp, Saccharomyces pastorianus
tgcaaattatcttccattcaactgg

SEQ ID NO: 130527 - DNA, 25 bp, Saccharomyces pastorianus
atgagaaacaacaccactctacacc

SEQ ID NO: 130528 - DNA, 25 bp, Saccharomyces pastorianus
gatatacagctgtattctggcttaa

SEQ ID NO: 130529 - DNA, 25 bp, Saccharomyces pastorianus
aagcggctttgaatcagtttaccaa

SEQ ID NO: 130530 - DNA, 25 bp, Saccharomyces pastorianus
gcagtcatcaatttatgcgtcttgg

SEQ ID NO: 130531 - DNA, 25 bp, Saccharomyces pastorianus
gtcttggatacttccgttgctgaaa

SEQ ID NO: 130532 - DNA, 25 bp, Saccharomyces pastorianus
atcgattctttgcaagcggctttga

SEQ ID NO: 130533 - DNA, 25 bp, Saccharomyces pastorianus
gctaatgatgtctcactggacttct

SEQ ID NO: 130534 - DNA, 25 bp, Saccharomyces pastorianus
caactttgatcagtataagcgccaa

SEQ ID NO: 130535 - DNA, 25 bp, Saccharomyces pastorianus
gtatctacaagtgatccaactttga

SEQ ID NO: 130536 - DNA, 25 bp, Saccharomyces pastorianus
tctcaaagcttcgatggcgaaccat

SEQ ID NO: 130537 - DNA, 25 bp, Saccharomyces pastorianus
agtctcaaagcttcgatggcgaacc

SEQ ID NO: 130538 - DNA, 25 bp, Saccharomyces pastorianus
aattgaacagtctcaaagcttcgat

SEQ ID NO: 130539 - DNA, 25 bp, Saccharomyces pastorianus
caaagcttcgatggcgaaccatcaa

SEQ ID NO: 130540 - DNA, 25 bp, Saccharomyces pastorianus
gatggcgaaccatcaagcaaatttg

SEQ ID NO: 130541 - DNA, 25 bp, Saccharomyces pastorianus
gtctcaaagcttcgatggcgaacca

SEQ ID NO: 130542 - DNA, 25 bp, Saccharomyces pastorianus
gaacagtctcaaagcttcgatggcg

SEQ ID NO: 130543 - DNA, 25 bp, Saccharomyces pastorianus
ctcaaagcttcgatggcgaaccatc

SEQ ID NO: 130544 - DNA, 25 bp, Saccharomyces pastorianus
gcttcgatggcgaaccatcaagcaa

SEQ ID NO: 130545 - DNA, 25 bp, Saccharomyces pastorianus
aaaccagatttcaacgacgccagga

SEQ ID NO: 130546 - DNA, 25 bp, Saccharomyces pastorianus
gatccgatcgcctctttattaattg

SEQ ID NO: 130547 - DNA, 25 bp, Saccharomyces pastorianus
gaacacccgagcttggtgggctata

SEQ ID NO: 130548 - DNA, 25 bp, Saccharomyces pastorianus
gcgtgggtacaagttgagcctcaaa

SEQ ID NO: 130549 - DNA, 25 bp, Saccharomyces pastorianus
acacactggccaatttttgatccga

SEQ ID NO: 130550 - DNA, 25 bp, Saccharomyces pastorianus
aaattccacttgttggtgccgggct

SEQ ID NO: 130551 - DNA, 25 bp, Saccharomyces pastorianus
cattaggttctgttggcgttgttat

SEQ ID NO: 130552 - DNA, 25 bp, Saccharomyces pastorianus
atacaactcctagattttggcccac

SEQ ID NO: 130553 - DNA, 25 bp, Saccharomyces pastorianus
agagtcaggcagttccgggcattca

SEQ ID NO: 130554 - DNA, 25 bp, Saccharomyces pastorianus
tgccgggctacttctatgaacacaa

SEQ ID NO: 130555 - DNA, 25 bp, Saccharomyces pastorianus
tccttgattttacttagcgctctgc

SEQ ID NO: 130556 - DNA, 25 bp, Saccharomyces pastorianus
atgcaatttccttttgacgcccaaa

SEQ ID NO: 130557 - DNA, 25 bp, Saccharomyces pastorianus
acagcaaccttcatcgatgtcttca

SEQ ID NO: 130558 - DNA, 25 bp, Saccharomyces pastorianus
tccctatccttttttgaaccagcag

SEQ ID NO: 130559 - DNA, 25 bp, Saccharomyces pastorianus
gtcgtcagcatatgcgcaagcgcaa

SEQ ID NO: 130560 - DNA, 25 bp, Saccharomyces pastorianus
ggccaatgcaaggtggtctgtattc

SEQ ID NO: 130561 - DNA, 25 bp, Saccharomyces pastorianus
gatgtcttcattaaactccgcgtat

SEQ ID NO: 130562 - DNA, 25 bp, Saccharomyces pastorianus
cgccgatggcgctattacgaatata

SEQ ID NO: 130563 - DNA, 25 bp, Saccharomyces pastorianus
ggtctttccgccttataatgcacaa

SEQ ID NO: 130564 - DNA, 25 bp, Saccharomyces pastorianus
taacgcagcgatctcttcttcaaat

SEQ ID NO: 130565 - DNA, 25 bp, Saccharomyces pastorianus
aattccagcgaatgacgtctgccat

SEQ ID NO: 130566 - DNA, 25 bp, Saccharomyces pastorianus
atccaacgtggctaggtgaccagca

SEQ ID NO: 130567 - DNA, 25 bp, Saccharomyces pastorianus
tgatcattacaattggtgggttcca

SEQ ID NO: 130568 - DNA, 25 bp, Saccharomyces pastorianus
atgccaagccctgtttcaatcaaaa

SEQ ID NO: 130569 - DNA, 25 bp, Saccharomyces pastorianus
ccaagtgctggtgagacgtattcgc

SEQ ID NO: 130570 - DNA, 25 bp, Saccharomyces pastorianus
tttgggtctgtttggtcacctacca

SEQ ID NO: 130571 - DNA, 25 bp, Saccharomyces pastorianus
tcgtttagcttcgttggtgttacca

SEQ ID NO: 130572 - DNA, 25 bp, Saccharomyces pastorianus
atgcactctacgagacgatgtcagc

SEQ ID NO: 130573 - DNA, 25 bp, Saccharomyces pastorianus
gcaagcaggagcgatattccttcaa

SEQ ID NO: 130574 - DNA, 25 bp, Saccharomyces pastorianus
aaaggacccaggacacctgctaaag

SEQ ID NO: 130575 - DNA, 25 bp, Saccharomyces pastorianus
tattttctgggcctttttgggtctg

SEQ ID NO: 130576 - DNA, 25 bp, Saccharomyces pastorianus
aaaggcgttccgatgtaagtgcaaa

SEQ ID NO: 130577 - DNA, 25 bp, Saccharomyces pastorianus
atgatgacgaagatgccaagccctg

SEQ ID NO: 130578 - DNA, 25 bp, Saccharomyces pastorianus
aaccacagactcaaggacccataag

SEQ ID NO: 130579 - DNA, 25 bp, Saccharomyces pastorianus
gaagtctacgccatgataccaagtt

SEQ ID NO: 130580 - DNA, 25 bp, Saccharomyces pastorianus
aattcgagcatctgatcaattcaac

SEQ ID NO: 130581 - DNA, 25 bp, Saccharomyces pastorianus
ggactattccttgttaattggcatt

SEQ ID NO: 130582 - DNA, 25 bp, Saccharomyces pastorianus
gaagattctgtagatcctctgcccc

SEQ ID NO: 130583 - DNA, 25 bp, Saccharomyces pastorianus
gacgacttacaattggcggataccg

SEQ ID NO: 130584 - DNA, 25 bp, Saccharomyces pastorianus
aagacttttttgacacagctgaaaa

SEQ ID NO: 130585 - DNA, 25 bp, Saccharomyces pastorianus
caagttggtgagtgccatacctcca

SEQ ID NO: 130586 - DNA, 25 bp, Saccharomyces pastorianus
ggataccgcatctattgaggagcaa

SEQ ID NO: 130587 - DNA, 25 bp, Saccharomyces pastorianus
tacctccaagagactacgccaatag

SEQ ID NO: 130588 - DNA, 25 bp, Saccharomyces pastorianus
acgccaataggttttacgaattcat

SEQ ID NO: 130589 - DNA, 25 bp, Saccharomyces pastorianus
acatgctaactggtattcgtgtcgc

SEQ ID NO: 130590 - DNA, 25 bp, Saccharomyces pastorianus
atgaaacctttaactccggcagact

SEQ ID NO: 130591 - DNA, 25 bp, Saccharomyces pastorianus
ccccttcttctcagtatgcatttaa

SEQ ID NO: 130592 - DNA, 25 bp, Saccharomyces pastorianus
gggaacttcgtgcattattcggctt

SEQ ID NO: 130593 - DNA, 25 bp, Saccharomyces pastorianus
gaagcttgcctttgattatcacgga

SEQ ID NO: 130594 - DNA, 25 bp, Saccharomyces pastorianus
gcagtgtcacgttgttctggcataa

SEQ ID NO: 130595 - DNA, 25 bp, Saccharomyces pastorianus
taaggactactgtcccgaagtcttt

SEQ ID NO: 130596 - DNA, 25 bp, Saccharomyces pastorianus
ggaaatgaattgaccccttcttctc

SEQ ID NO: 130597 - DNA, 25 bp, Saccharomyces pastorianus
tattcggcttagaccctgctgatta

SEQ ID NO: 130598 - DNA, 25 bp, Saccharomyces pastorianus
aataacttatttccaccacacttag

SEQ ID NO: 130599 - DNA, 25 bp, Saccharomyces pastorianus
gtcagtgaaggccatgtcaacttta

SEQ ID NO: 130600 - DNA, 25 bp, Saccharomyces pastorianus
aacgatacctcttttttgaatatgg

SEQ ID NO: 130601 - DNA, 25 bp, Saccharomyces pastorianus
gatttcctgatgttgtatttacgca

SEQ ID NO: 130602 - DNA, 25 bp, Saccharomyces pastorianus
atgattcgcatcaaactgtttctac

SEQ ID NO: 130603 - DNA, 25 bp, Saccharomyces pastorianus
gattgtatccgcaagagttttctgg

SEQ ID NO: 130604 - DNA, 25 bp, Saccharomyces pastorianus
tcgttcagcacatttcctatcggat

SEQ ID NO: 130605 - DNA, 25 bp, Saccharomyces pastorianus
tttcctatcggataccggcctagaa

SEQ ID NO: 130606 - DNA, 25 bp, Saccharomyces pastorianus
tgtccctggtttatccgcaaatgaa

SEQ ID NO: 130607 - DNA, 25 bp, Saccharomyces pastorianus
tgccaagttatttttcaccaatgtt

SEQ ID NO: 130608 - DNA, 25 bp, Saccharomyces pastorianus
gcgaattctattttacttcccacac

SEQ ID NO: 130609 - DNA, 25 bp, Saccharomyces pastorianus
gcagtgacagacttgcctcgttcag

SEQ ID NO: 130610 - DNA, 25 bp, Saccharomyces pastorianus
gataatggtatgcttgtccctggtt

SEQ ID NO: 130611 - DNA, 25 bp, Saccharomyces pastorianus
tgccggcctccactgtgaacaacaa

SEQ ID NO: 130612 - DNA, 25 bp, Saccharomyces pastorianus
agcggcaactatactttttatgggt

SEQ ID NO: 130613 - DNA, 25 bp, Saccharomyces pastorianus
gatgttcaagccatattcagtcaat

SEQ ID NO: 130614 - DNA, 25 bp, Saccharomyces pastorianus
gtgaacaacaagcagccatcgcatt

SEQ ID NO: 130615 - DNA, 25 bp, Saccharomyces pastorianus
atgttgatttctttcggactcgatc

SEQ ID NO: 130616 - DNA, 25 bp, Saccharomyces pastorianus
aaaatatcaagagctctgccggcct

SEQ ID NO: 130617 - DNA, 25 bp, Saccharomyces pastorianus
gaagactttttatcaacgtcaaaca

SEQ ID NO: 130618 - DNA, 25 bp, Saccharomyces pastorianus
cgatcatccttccaatcgcgaagat

SEQ ID NO: 130619 - DNA, 25 bp, Saccharomyces pastorianus
agaaaagccagatagcggcaactat

SEQ ID NO: 130620 - DNA, 25 bp, Saccharomyces pastorianus
aagcagccatcgcattccatagaat

SEQ ID NO: 130621 - DNA, 25 bp, Saccharomyces pastorianus
gaagagtctaaacgatccctggaag

SEQ ID NO: 130622 - DNA, 25 bp, Saccharomyces pastorianus
agaagatggtctttcctttgtggat

SEQ ID NO: 130623 - DNA, 25 bp, Saccharomyces pastorianus
tcctttgtggatatcgttttgtcga

SEQ ID NO: 130624 - DNA, 25 bp, Saccharomyces pastorianus
gggaagcacgcatcagaaaacatct

SEQ ID NO: 130625 - DNA, 25 bp, Saccharomyces pastorianus
aacatctcactctctttctcaagac

SEQ ID NO: 130626 - DNA, 25 bp, Saccharomyces pastorianus
agggttccaatcgttgaagatcgtc

SEQ ID NO: 130627 - DNA, 25 bp, Saccharomyces pastorianus
gaaattattcggtctttgtcagatg

SEQ ID NO: 130628 - DNA, 25 bp, Saccharomyces pastorianus
ggaacacattcacaaactggtactc

SEQ ID NO: 130629 - DNA, 25 bp, Saccharomyces pastorianus
ttttgtcgaaagcagcatcggcgct

SEQ ID NO: 130630 - DNA, 25 bp, Saccharomyces pastorianus
gcatcctacggctatttttctgttg

SEQ ID NO: 130631 - DNA, 25 bp, Saccharomyces pastorianus
aggatagtgtcaccgaatgttcgaa

SEQ ID NO: 130632 - DNA, 25 bp, Saccharomyces pastorianus
aagacctgcatcctacggctatttt

SEQ ID NO: 130633 - DNA, 25 bp, Saccharomyces pastorianus
tatttccactcgacatgttatcatg

SEQ ID NO: 130634 - DNA, 25 bp, Saccharomyces pastorianus
ggaaaccgttactggcgtttatgat

SEQ ID NO: 130635 - DNA, 25 bp, Saccharomyces pastorianus
gaaacttcacaagatatggccttca

SEQ ID NO: 130636 - DNA, 25 bp, Saccharomyces pastorianus
gattatactgatccgcataccaata

SEQ ID NO: 130637 - DNA, 25 bp, Saccharomyces pastorianus
gacgaaggctctgtagacaacactt

SEQ ID NO: 130638 - DNA, 25 bp, Saccharomyces pastorianus
gatatggccttcaaatgtccaattt

SEQ ID NO: 130639 - DNA, 25 bp, Saccharomyces pastorianus
atacaggcataagcaactctaactt

SEQ ID NO: 130640 - DNA, 25 bp, Saccharomyces pastorianus
aaatctaatagtggcaaggtcggtt

SEQ ID NO: 130641 - DNA, 25 bp, Saccharomyces pastorianus
aagtgccctaaatattcacgctgat

SEQ ID NO: 130642 - DNA, 25 bp, Saccharomyces pastorianus
gagtgactctcaatgggcagccttc

SEQ ID NO: 130643 - DNA, 25 bp, Saccharomyces pastorianus
taagggatcacaaaacacagcaaat

SEQ ID NO: 130644 - DNA, 25 bp, Saccharomyces pastorianus
gtcttctcacaggaccaacaagttt

SEQ ID NO: 130645 - DNA, 25 bp, Saccharomyces pastorianus
ggatatggtcggttcttacacacaa

SEQ ID NO: 130646 - DNA, 25 bp, Saccharomyces pastorianus
ttaataaaggccagtgctctccacc

SEQ ID NO: 130647 - DNA, 25 bp, Saccharomyces pastorianus
gcaactaaggcaggtcttctcacag

SEQ ID NO: 130648 - DNA, 25 bp, Saccharomyces pastorianus
ggcctgcctctgtttgaaggctcag

SEQ ID NO: 130649 - DNA, 25 bp, Saccharomyces pastorianus
aattctttatcttcctctctttttg

SEQ ID NO: 130650 - DNA, 25 bp, Saccharomyces pastorianus
aactctaattcagcgattccattgt

SEQ ID NO: 130651 - DNA, 25 bp, Saccharomyces pastorianus
gaaaaactaactctcaatgctctga

SEQ ID NO: 130652 - DNA, 25 bp, Saccharomyces pastorianus
aacctctatgcatctcttaaggctg

SEQ ID NO: 130653 - DNA, 25 bp, Saccharomyces pastorianus
actgttcccctcctattaagagaca

SEQ ID NO: 130654 - DNA, 25 bp, Saccharomyces pastorianus
atatttctggcgttgaatcttttca

SEQ ID NO: 130655 - DNA, 25 bp, Saccharomyces pastorianus
gcagacgaccccttcagcaaaaaag

SEQ ID NO: 130656 - DNA, 25 bp, Saccharomyces pastorianus
aagcagatgggccatacgggaccat

SEQ ID NO: 130657 - DNA, 25 bp, Saccharomyces pastorianus
agccaaccttccacatcaaaaacat

SEQ ID NO: 130658 - DNA, 25 bp, Saccharomyces pastorianus
tgggaatgacgtggtgctcaatgaa

SEQ ID NO: 130659 - DNA, 25 bp, Saccharomyces pastorianus
ggaggcgggctagacgaactacttt

SEQ ID NO: 130660 - DNA, 25 bp, Saccharomyces pastorianus
aagtactcagcaaagttgccacggt

SEQ ID NO: 130661 - DNA, 25 bp, Saccharomyces pastorianus
agttgccacggtatctagggcacaa

SEQ ID NO: 130662 - DNA, 25 bp, Saccharomyces pastorianus
gaaactctgccgaggaaaccacaca

SEQ ID NO: 130663 - DNA, 25 bp, Saccharomyces pastorianus
attcattttctttaccgcctacgag

SEQ ID NO: 130664 - DNA, 25 bp, Saccharomyces pastorianus
ggtatccacaccgaatcattcacag

SEQ ID NO: 130665 - DNA, 25 bp, Saccharomyces pastorianus
actactttgtgatgcagacgacccc

SEQ ID NO: 130666 - DNA, 25 bp, Saccharomyces pastorianus
agtgtattcaaaggcccgtcgggca

SEQ ID NO: 130667 - DNA, 25 bp, Saccharomyces pastorianus
agtggctagcagtgctggctcagaa

SEQ ID NO: 130668 - DNA, 25 bp, Saccharomyces pastorianus
aaccatttacgttcatccaaagtgt

SEQ ID NO: 130669 - DNA, 25 bp, Saccharomyces pastorianus
gcataacttctggtacgagcacaat

SEQ ID NO: 130670 - DNA, 25 bp, Saccharomyces pastorianus
gcagaaattgcccattccttagaaa

SEQ ID NO: 130671 - DNA, 25 bp, Saccharomyces pastorianus
gagtgccagtgggttattctacctt

SEQ ID NO: 130672 - DNA, 25 bp, Saccharomyces pastorianus
aacgaccatctggacgacatgaacc

SEQ ID NO: 130673 - DNA, 25 bp, Saccharomyces pastorianus
gtcgggcatcgagcataacttctgg

SEQ ID NO: 130674 - DNA, 25 bp, Saccharomyces pastorianus
aggaagccctatcgacattactcag

SEQ ID NO: 130675 - DNA, 25 bp, Saccharomyces pastorianus
gtgaaagagacccaggaagccctat

SEQ ID NO: 130676 - DNA, 25 bp, Saccharomyces pastorianus
ttactcaggaactcgaatgcttatt

SEQ ID NO: 130677 - DNA, 25 bp, Saccharomyces pastorianus
tagataccaacgttgccacatcgac

SEQ ID NO: 130678 - DNA, 25 bp, Saccharomyces pastorianus
caggcgctaccgcagcaattagata

SEQ ID NO: 130679 - DNA, 25 bp, Saccharomyces pastorianus
gccaggtcacaccaacgatttatct

SEQ ID NO: 130680 - DNA, 25 bp, Saccharomyces pastorianus
ctacgtcgcagcctctaggaaattg

SEQ ID NO: 130681 - DNA, 25 bp, Saccharomyces pastorianus
gactttaccaccttcagttatggca

SEQ ID NO: 130682 - DNA, 25 bp, Saccharomyces pastorianus
ttctcatatcgtcccagtgttgatt

SEQ ID NO: 130683 - DNA, 25 bp, Saccharomyces pastorianus
tttcattttcaccacgactttacca

SEQ ID NO: 130684 - DNA, 25 bp, Saccharomyces pastorianus
agctttccatgagttgggcattcca

SEQ ID NO: 130685 - DNA, 25 bp, Saccharomyces pastorianus
tgagctacagttaccacgtgtcaga

SEQ ID NO: 130686 - DNA, 25 bp, Saccharomyces pastorianus
gggcattccagttattccaaatcct

SEQ ID NO: 130687 - DNA, 25 bp, Saccharomyces pastorianus
acaagctatcaacttccctacggtt

SEQ ID NO: 130688 - DNA, 25 bp, Saccharomyces pastorianus
tatgccaccgctactggtgctggtg

SEQ ID NO: 130689 - DNA, 25 bp, Saccharomyces pastorianus
ttctacccaggagtcgggtttcgat

SEQ ID NO: 130690 - DNA, 25 bp, Saccharomyces pastorianus
gcaccacatgcgaaaaatggctatg

SEQ ID NO: 130691 - DNA, 25 bp, Saccharomyces pastorianus
atgcaacgctccattttggcaaggt

SEQ ID NO: 130692 - DNA, 25 bp, Saccharomyces pastorianus
tgctgccaaccattctacccaggag

SEQ ID NO: 130693 - DNA, 25 bp, Saccharomyces pastorianus
tgccgctgtttccacactgaatagg

SEQ ID NO: 130694 - DNA, 25 bp, Saccharomyces pastorianus
gtcgggtttcgattacgaaggcctg

SEQ ID NO: 130695 - DNA, 25 bp, Saccharomyces pastorianus
acactgaataggctgtccacgacag

SEQ ID NO: 130696 - DNA, 25 bp, Saccharomyces pastorianus
gaaaaatggctatgccaccgctact

SEQ ID NO: 130697 - DNA, 25 bp, Saccharomyces pastorianus
tggcaaggttcggtaactcctctgc

SEQ ID NO: 130698 - DNA, 25 bp, Saccharomyces pastorianus
actgccacagcgtcatcaacaaatg

SEQ ID NO: 130699 - DNA, 25 bp, Saccharomyces pastorianus
gacacttctaggtcatatttggaca

SEQ ID NO: 130700 - DNA, 25 bp, Saccharomyces pastorianus
gaattctgtcagtcatacttcccag

SEQ ID NO: 130701 - DNA, 25 bp, Saccharomyces pastorianus
tgtcaggaaaatatggccccaaata

SEQ ID NO: 130702 - DNA, 25 bp, Saccharomyces pastorianus
gaatctggttgggaatactacctac

SEQ ID NO: 130703 - DNA, 25 bp, Saccharomyces pastorianus
gttctggaactgttattgccgttta

SEQ ID NO: 130704 - DNA, 25 bp, Saccharomyces pastorianus
tcagttcaaaacgttctgccagaat

SEQ ID NO: 130705 - DNA, 25 bp, Saccharomyces pastorianus
gcgtcttgccgtctttaacagaatt

SEQ ID NO: 130706 - DNA, 25 bp, Saccharomyces pastorianus
gccagaattctctgtattccagtcg

SEQ ID NO: 130707 - DNA, 25 bp, Saccharomyces pastorianus
gagtacgtacttttgcgagatctat

SEQ ID NO: 130708 - DNA, 25 bp, Saccharomyces pastorianus
ttgagtcctcatattccgacaatgt

SEQ ID NO: 130709 - DNA, 25 bp, Saccharomyces pastorianus
aaatttgcacagagcgtcttgccgt

SEQ ID NO: 130710 - DNA, 25 bp, Saccharomyces pastorianus
gattatatcaaaccagccactgctg

SEQ ID NO: 130711 - DNA, 25 bp, Saccharomyces pastorianus
acaaggtttggctctgtccctaggt

SEQ ID NO: 130712 - DNA, 25 bp, Saccharomyces pastorianus
gtgattcctcatggcttccacaaat

SEQ ID NO: 130713 - DNA, 25 bp, Saccharomyces pastorianus
gacacaggtgtcattttcggtaata

SEQ ID NO: 130714 - DNA, 25 bp, Saccharomyces pastorianus
gtcgtcctttggtgaagatgcccta

SEQ ID NO: 130715 - DNA, 25 bp, Saccharomyces pastorianus
gccactgctgacgatgaacatttcc

SEQ ID NO: 130716 - DNA, 25 bp, Saccharomyces pastorianus
tccctaggtgacagagtggcattga

SEQ ID NO: 130717 - DNA, 25 bp, Saccharomyces pastorianus
aaagtttcctctgctgacacaggtg

SEQ ID NO: 130718 - DNA, 25 bp, Saccharomyces pastorianus
tgtaatctgtatgcgaagtcgtcct

SEQ ID NO: 130719 - DNA, 25 bp, Saccharomyces pastorianus
gtgcaatttgcaactcttggtgatt

SEQ ID NO: 130720 - DNA, 25 bp, Saccharomyces pastorianus
atgccctagccaacttgtgtatcga

SEQ ID NO: 130721 - DNA, 25 bp, Saccharomyces pastorianus
gacttggccgtcaaggtttctgata

SEQ ID NO: 130722 - DNA, 25 bp, Saccharomyces pastorianus
ggacccctgctttgaaagcccaata

SEQ ID NO: 130723 - DNA, 25 bp, Saccharomyces pastorianus
gagaatgccttacactatttagaga

SEQ ID NO: 130724 - DNA, 25 bp, Saccharomyces pastorianus
caaatgtcttggttcctgcggttaa

SEQ ID NO: 130725 - DNA, 25 bp, Saccharomyces pastorianus
aatcctagcagttttctccattttc

SEQ ID NO: 130726 - DNA, 25 bp, Saccharomyces pastorianus
gtgttgtctgccaatccaaatgtct

SEQ ID NO: 130727 - DNA, 25 bp, Saccharomyces pastorianus
tagcgtgcttggaataccgtcatgc

SEQ ID NO: 130728 - DNA, 25 bp, Saccharomyces pastorianus
gaagtcatcttcgagaccgcattag

SEQ ID NO: 130729 - DNA, 25 bp, Saccharomyces pastorianus
gcattagccctaactgtgttgtctg

SEQ ID NO: 130730 - DNA, 25 bp, Saccharomyces pastorianus
tgatggaactgctttcgaccacgac

SEQ ID NO: 130731 - DNA, 25 bp, Saccharomyces pastorianus
aggtcagcgaacatttacttcccga

SEQ ID NO: 130732 - DNA, 25 bp, Saccharomyces pastorianus
ggtggtgagggtatcaatgaattac

SEQ ID NO: 130733 - DNA, 25 bp, Saccharomyces pastorianus
ctgacatgtaggagaaacaggacta

SEQ ID NO: 130734 - DNA, 25 bp, Saccharomyces pastorianus
aggactaaattactaactgcgggtg

SEQ ID NO: 130735 - DNA, 25 bp, Saccharomyces pastorianus
gcaatccaacatcgttcatcgtcaa

SEQ ID NO: 130736 - DNA, 25 bp, Saccharomyces pastorianus
aagtcaagcaatccaacatcgttca

SEQ ID NO: 130737 - DNA, 25 bp, Saccharomyces pastorianus
gtcggaattttcaagatcatcagat

SEQ ID NO: 130738 - DNA, 25 bp, Saccharomyces pastorianus
aatgttcgtcggaattttcaagatc

SEQ ID NO: 130739 - DNA, 25 bp, Saccharomyces pastorianus
aaattactaactgcgggtggtgagg

SEQ ID NO: 130740 - DNA, 25 bp, Saccharomyces pastorianus
catattgcctaacatttgtcctcaa

SEQ ID NO: 130741 - DNA, 25 bp, Saccharomyces pastorianus
tgtcctcaatgtggcaaaggttttg

SEQ ID NO: 130742 - DNA, 25 bp, Saccharomyces pastorianus
aaagacattatgatacactgacatg

SEQ ID NO: 130743 - DNA, 25 bp, Saccharomyces pastorianus
cagaagcaatagtggatgtatcatt

SEQ ID NO: 130744 - DNA, 25 bp, Saccharomyces pastorianus
accagcactcataccggcagaaaat

SEQ ID NO: 130745 - DNA, 25 bp, Saccharomyces pastorianus
gcattaccaaaaccaccgaagtcca

SEQ ID NO: 130746 - DNA, 25 bp, Saccharomyces pastorianus
tagtcaaggcggtaacataaaggtt

SEQ ID NO: 130747 - DNA, 25 bp, Saccharomyces pastorianus
aaaaaaccagcactcataccggcag

SEQ ID NO: 130748 - DNA, 25 bp, Saccharomyces pastorianus
aaaccaccgaagtccagcaaaagca

SEQ ID NO: 130749 - DNA, 25 bp, Saccharomyces pastorianus
tggaggatcaggatgctgcatttat

SEQ ID NO: 130750 - DNA, 25 bp, Saccharomyces pastorianus
gcaaaccccaagatcgtagaaatag

SEQ ID NO: 130751 - DNA, 25 bp, Saccharomyces pastorianus
tgcatttatcaaacaggctacagaa

SEQ ID NO: 130752 - DNA, 25 bp, Saccharomyces pastorianus
taaggaataggcaaaacaggttaca

SEQ ID NO: 130753 - DNA, 25 bp, Saccharomyces pastorianus
agcaaaagcaaaccccaagatcgta

SEQ ID NO: 130754 - DNA, 25 bp, Saccharomyces pastorianus
tttgactctcccttgtttttgatag

SEQ ID NO: 130755 - DNA, 25 bp, Saccharomyces pastorianus
tagcgcacgttgactggactacgaa

SEQ ID NO: 130756 - DNA, 25 bp, Saccharomyces pastorianus
tggcatgccatcacatcatttctaa

SEQ ID NO: 130757 - DNA, 25 bp, Saccharomyces pastorianus
ttcatctgtcccgtcttaaaggagg

SEQ ID NO: 130758 - DNA, 25 bp, Saccharomyces pastorianus
gaatgcacgtccctatttataaaag

SEQ ID NO: 130759 - DNA, 25 bp, Saccharomyces pastorianus
aaaccatcagggagttagcgcacgt

SEQ ID NO: 130760 - DNA, 25 bp, Saccharomyces pastorianus
gaacgcacccctggattgctttaga

SEQ ID NO: 130761 - DNA, 25 bp, Saccharomyces pastorianus
gatgagttgccatttgatgtcaagt

SEQ ID NO: 130762 - DNA, 25 bp, Saccharomyces pastorianus
catactgccccgtaaatacttcaat

SEQ ID NO: 130763 - DNA, 25 bp, Saccharomyces pastorianus
agaaaatcctccttattcactggca

SEQ ID NO: 130764 - DNA, 25 bp, Saccharomyces pastorianus
tcatttccatccgatcttcatctgt

SEQ ID NO: 130765 - DNA, 25 bp, Saccharomyces pastorianus
gaaactcactaacaagggaagaact

SEQ ID NO: 130766 - DNA, 25 bp, Saccharomyces pastorianus
attcctgatgaaaagctgctaacta

SEQ ID NO: 130767 - DNA, 25 bp, Saccharomyces pastorianus
gtgcgtttctatcgaaaaaccttcg

SEQ ID NO: 130768 - DNA, 25 bp, Saccharomyces pastorianus
tgcccgcgccactacaaactgtagt

SEQ ID NO: 130769 - DNA, 25 bp, Saccharomyces pastorianus
gtgaagaaaccatcgacaagaatta

SEQ ID NO: 130770 - DNA, 25 bp, Saccharomyces pastorianus
aaatagattcgctgcaagtttgtga

SEQ ID NO: 130771 - DNA, 25 bp, Saccharomyces pastorianus
gtagtgccacatggaaacgttgtat

SEQ ID NO: 130772 - DNA, 25 bp, Saccharomyces pastorianus
agatgttatggctcggagagttttg

SEQ ID NO: 130773 - DNA, 25 bp, Saccharomyces pastorianus
gccgattaccccataaaaaagtgcg

SEQ ID NO: 130774 - DNA, 25 bp, Saccharomyces pastorianus
caattgatagaaggtgcccgcgcca

SEQ ID NO: 130775 - DNA, 25 bp, Saccharomyces pastorianus
ttatgaagcgtctagccgattaccc

SEQ ID NO: 130776 - DNA, 25 bp, Saccharomyces pastorianus
gatgggcgccttactttaaagtttg

SEQ ID NO: 130777 - DNA, 25 bp, Saccharomyces pastorianus
attgagttactcctttgatttggaa

SEQ ID NO: 130778 - DNA, 25 bp, Saccharomyces pastorianus
aaaaccatcacttgtccttgaaaga

SEQ ID NO: 130779 - DNA, 25 bp, Saccharomyces pastorianus
gatgattccacttgctgatatgttg

SEQ ID NO: 130780 - DNA, 25 bp, Saccharomyces pastorianus
gtagcgacgtccttcgagtttgata

SEQ ID NO: 130781 - DNA, 25 bp, Saccharomyces pastorianus
agaacttgaaaatgagcgctacttg

SEQ ID NO: 130782 - DNA, 25 bp, Saccharomyces pastorianus
gaattttcacgtgtagcgacgtcct

SEQ ID NO: 130783 - DNA, 25 bp, Saccharomyces pastorianus
tgagcgctacttgaaatcgatgatt

SEQ ID NO: 130784 - DNA, 25 bp, Saccharomyces pastorianus
gaacgcgttaattttttgggatgat

SEQ ID NO: 130785 - DNA, 25 bp, Saccharomyces pastorianus
gcaacgctaatttaacttacgactc

SEQ ID NO: 130786 - DNA, 25 bp, Saccharomyces pastorianus
aaagaagccgatgggcgccttactt

SEQ ID NO: 130787 - DNA, 25 bp, Saccharomyces pastorianus
tggcaactttcttattaaaaggtca

SEQ ID NO: 130788 - DNA, 25 bp, Saccharomyces pastorianus
tgtcgtgctaccaaatcatgaagaa

SEQ ID NO: 130789 - DNA, 25 bp, Saccharomyces pastorianus
taaaaggtcaaattagaaatggcga

SEQ ID NO: 130790 - DNA, 25 bp, Saccharomyces pastorianus
aagatgctaagcttgtcgtgctacc

SEQ ID NO: 130791 - DNA, 25 bp, Saccharomyces pastorianus
gctaagcttgtcgtgctaccaaatc

SEQ ID NO: 130792 - DNA, 25 bp, Saccharomyces pastorianus
atgctaagcttgtcgtgctaccaaa

SEQ ID NO: 130793 - DNA, 25 bp, Saccharomyces pastorianus
agaaatggcgaaactgttagagtgg

SEQ ID NO: 130794 - DNA, 25 bp, Saccharomyces pastorianus
aagcttgtcgtgctaccaaatcatg

SEQ ID NO: 130795 - DNA, 25 bp, Saccharomyces pastorianus
gatgctaagcttgtcgtgctaccaa

SEQ ID NO: 130796 - DNA, 25 bp, Saccharomyces pastorianus
gagtggtggttaaagatgctaagct

SEQ ID NO: 130797 - DNA, 25 bp, Saccharomyces pastorianus
gcttgtcgtgctaccaaatcatgaa

SEQ ID NO: 130798 - DNA, 25 bp, Saccharomyces pastorianus
cacctccaggttacgtcttaagcga

SEQ ID NO: 130799 - DNA, 25 bp, Saccharomyces pastorianus
gtcttaagcgagtctggtggccaat

SEQ ID NO: 130800 - DNA, 25 bp, Saccharomyces pastorianus
aaggaccgcctactgtatatggaaa

SEQ ID NO: 130801 - DNA, 25 bp, Saccharomyces pastorianus
gccagctttatgttcttaggtccta

SEQ ID NO: 130802 - DNA, 25 bp, Saccharomyces pastorianus
aagacgaggccattgctgctatttc

SEQ ID NO: 130803 - DNA, 25 bp, Saccharomyces pastorianus
aagccttatgctgtcgttttatttg

SEQ ID NO: 130804 - DNA, 25 bp, Saccharomyces pastorianus
gctgtacgtcttcaaagggctggtt

SEQ ID NO: 130805 - DNA, 25 bp, Saccharomyces pastorianus
gaaggtaagctgaccgattccctag

SEQ ID NO: 130806 - DNA, 25 bp, Saccharomyces pastorianus
tcttaggtcctactggtactggtaa

SEQ ID NO: 130807 - DNA, 25 bp, Saccharomyces pastorianus
gattccctaggccatcatgttgatt

SEQ ID NO: 130808 - DNA, 25 bp, Saccharomyces pastorianus
gctgctatttctgatgctgtacgtc

SEQ ID NO: 130809 - DNA, 25 bp, Saccharomyces pastorianus
tgataacaaaaacgcatcctctatt

SEQ ID NO: 130810 - DNA, 25 bp, Saccharomyces pastorianus
gttgcaccctgtagatatggcttct

SEQ ID NO: 130811 - DNA, 25 bp, Saccharomyces pastorianus
ggagcaaccgctagtggatacgcag

SEQ ID NO: 130812 - DNA, 25 bp, Saccharomyces pastorianus
aaagcagtcacaaattcccacgctg

SEQ ID NO: 130813 - DNA, 25 bp, Saccharomyces pastorianus
gagtgttttgtcctctatcaaatca

SEQ ID NO: 130814 - DNA, 25 bp, Saccharomyces pastorianus
gaaatgtattggttccgttgttgaa

SEQ ID NO: 130815 - DNA, 25 bp, Saccharomyces pastorianus
gatacgcaggacgtgttatcggaga

SEQ ID NO: 130816 - DNA, 25 bp, Saccharomyces pastorianus
cagtaaggcgttcaagcagcaggtt

SEQ ID NO: 130817 - DNA, 25 bp, Saccharomyces pastorianus
cctctatttatatgacctcaccagc

SEQ ID NO: 130818 - DNA, 25 bp, Saccharomyces pastorianus
cagcaggttgagttcgccaattatg

SEQ ID NO: 130819 - DNA, 25 bp, Saccharomyces pastorianus
gggtgtagtcactgctatgaagatt

SEQ ID NO: 130820 - DNA, 25 bp, Saccharomyces pastorianus
gccttctctccaacctatttggaaa

SEQ ID NO: 130821 - DNA, 25 bp, Saccharomyces pastorianus
gaacttccactaatacagtcgcctt

SEQ ID NO: 130822 - DNA, 25 bp, Saccharomyces pastorianus
gttcctcttctacttctctaaataa

SEQ ID NO: 130823 - DNA, 25 bp, Saccharomyces pastorianus
tatgatccctttgcaaccaccgtaa

SEQ ID NO: 130824 - DNA, 25 bp, Saccharomyces pastorianus
agcgctggtgcagcattaggcgtta

SEQ ID NO: 130825 - DNA, 25 bp, Saccharomyces pastorianus
aaggtgcaaattccaggtctgaaca

SEQ ID NO: 130826 - DNA, 25 bp, Saccharomyces pastorianus
tgaaaagtctcaacctacctcaact

SEQ ID NO: 130827 - DNA, 25 bp, Saccharomyces pastorianus
actctgagacccgtgcaaaacatta

SEQ ID NO: 130828 - DNA, 25 bp, Saccharomyces pastorianus
gaaaagtccttcagcgtcgtatgat

SEQ ID NO: 130829 - DNA, 25 bp, Saccharomyces pastorianus
tacacctcaatcagttagttatcga

SEQ ID NO: 130830 - DNA, 25 bp, Saccharomyces pastorianus
acagaccccaaattgctgatcctaa

SEQ ID NO: 130831 - DNA, 25 bp, Saccharomyces pastorianus
ataatcagccgtttgaccactttaa

SEQ ID NO: 130832 - DNA, 25 bp, Saccharomyces pastorianus
gatctgtttaatatgtgcaacccat

SEQ ID NO: 130833 - DNA, 25 bp, Saccharomyces pastorianus
aacattcgcattacgtttgcaccgt

SEQ ID NO: 130834 - DNA, 25 bp, Saccharomyces pastorianus
ttttttgtcccctatcgaaggatga

SEQ ID NO: 130835 - DNA, 25 bp, Saccharomyces pastorianus
aattacgcaaccatcaaactaaggg

SEQ ID NO: 130836 - DNA, 25 bp, Saccharomyces pastorianus
tgtgataagatgaaccccgcttctc

SEQ ID NO: 130837 - DNA, 25 bp, Saccharomyces pastorianus
gaaggattcaaaggccaccctatgt

SEQ ID NO: 130838 - DNA, 25 bp, Saccharomyces pastorianus
gaagaggttgctaccgaaacactaa

SEQ ID NO: 130839 - DNA, 25 bp, Saccharomyces pastorianus
tgtgccttctgttccggaaaacgat

SEQ ID NO: 130840 - DNA, 25 bp, Saccharomyces pastorianus
gaagtcatgtttaccgatcgcatag

SEQ ID NO: 130841 - DNA, 25 bp, Saccharomyces pastorianus
gcatgcattcccttgtgagcttgaa

SEQ ID NO: 130842 - DNA, 25 bp, Saccharomyces pastorianus
acaggcagcggatattctactttat

SEQ ID NO: 130843 - DNA, 25 bp, Saccharomyces pastorianus
gttttgagcttaagcacgcctgaaa

SEQ ID NO: 130844 - DNA, 25 bp, Saccharomyces pastorianus
tgatccgaatcacgactctgtaatt

SEQ ID NO: 130845 - DNA, 25 bp, Saccharomyces pastorianus
acacgttcctgttggcgatgatcaa

SEQ ID NO: 130846 - DNA, 25 bp, Saccharomyces pastorianus
gaaagaccaggcgtatcgaatttaa

SEQ ID NO: 130847 - DNA, 25 bp, Saccharomyces pastorianus
gatcaatcgcagcatttggaactaa

SEQ ID NO: 130848 - DNA, 25 bp, Saccharomyces pastorianus
taaatctacacacgttcctgttggc

SEQ ID NO: 130849 - DNA, 25 bp, Saccharomyces pastorianus
gaaccaacctatttgcatagtgtcg

SEQ ID NO: 130850 - DNA, 25 bp, Saccharomyces pastorianus
aaacctgtaactatgttggcacaaa

SEQ ID NO: 130851 - DNA, 25 bp, Saccharomyces pastorianus
gataggttctactacgaccctgtag

SEQ ID NO: 130852 - DNA, 25 bp, Saccharomyces pastorianus
gactgggcttattttcgtatcctgt

SEQ ID NO: 130853 - DNA, 25 bp, Saccharomyces pastorianus
gtgccgattttaagctgaattccga

SEQ ID NO: 130854 - DNA, 25 bp, Saccharomyces pastorianus
atgtcgaataagcaggcggttctga

SEQ ID NO: 130855 - DNA, 25 bp, Saccharomyces pastorianus
gattcagccaactgggtgtttccac

SEQ ID NO: 130856 - DNA, 25 bp, Saccharomyces pastorianus
gcgcttcatagtaatgctacggtat

SEQ ID NO: 130857 - DNA, 25 bp, Saccharomyces pastorianus
gcaacgtgccgattttaagctgaat

SEQ ID NO: 130858 - DNA, 25 bp, Saccharomyces pastorianus
gtaatgctacggtatttagtatgat

SEQ ID NO: 130859 - DNA, 25 bp, Saccharomyces pastorianus
aagcaggcggttctgaagttaatca

SEQ ID NO: 130860 - DNA, 25 bp, Saccharomyces pastorianus
taaaaggtggataagcacagtgcaa

SEQ ID NO: 130861 - DNA, 25 bp, Saccharomyces pastorianus
tatgattcagccaactgggtgtttc

SEQ ID NO: 130862 - DNA, 25 bp, Saccharomyces pastorianus
cacagtgcaacgtgccgattttaag

SEQ ID NO: 130863 - DNA, 25 bp, Saccharomyces pastorianus
aagctgaattccgaagcgcttcata

SEQ ID NO: 130864 - DNA, 25 bp, Saccharomyces pastorianus
attcaatatccggtggagtccactt

SEQ ID NO: 130865 - DNA, 25 bp, Saccharomyces pastorianus
ggagtccacttcttcaacatcaatg

SEQ ID NO: 130866 - DNA, 25 bp, Saccharomyces pastorianus
gacttgaaatctgaaatcccatgtg

SEQ ID NO: 130867 - DNA, 25 bp, Saccharomyces pastorianus
tcacctgcaatagcccgcgtagaaa

SEQ ID NO: 130868 - DNA, 25 bp, Saccharomyces pastorianus
tagaacgacactggccgagctgaat

SEQ ID NO: 130869 - DNA, 25 bp, Saccharomyces pastorianus
atcccatgtgattcaatatccggtg

SEQ ID NO: 130870 - DNA, 25 bp, Saccharomyces pastorianus
gaggaagagttatgccccaaggaat

SEQ ID NO: 130871 - DNA, 25 bp, Saccharomyces pastorianus
gagctgaatgccatcgctaaaccgg

SEQ ID NO: 130872 - DNA, 25 bp, Saccharomyces pastorianus
tagcccgcgtagaaaaaagccttga

SEQ ID NO: 130873 - DNA, 25 bp, Saccharomyces pastorianus
agccttgaccaaaaattcccaatcg

SEQ ID NO: 130874 - DNA, 25 bp, Saccharomyces pastorianus
gctaaaccggcgagcattggaggaa

SEQ ID NO: 130875 - DNA, 25 bp, Saccharomyces pastorianus
gtccaaaaagctgccggagatacga

SEQ ID NO: 130876 - DNA, 25 bp, Saccharomyces pastorianus
gagattagaagatccaaaggtccaa

SEQ ID NO: 130877 - DNA, 25 bp, Saccharomyces pastorianus
cgaataattcatgggacagagctca

SEQ ID NO: 130878 - DNA, 25 bp, Saccharomyces pastorianus
ataattcatgggacagagctcaaat

SEQ ID NO: 130879 - DNA, 25 bp, Saccharomyces pastorianus
aggtccaaaaagctgccggagatac

SEQ ID NO: 130880 - DNA, 25 bp, Saccharomyces pastorianus
attcatgggacagagctcaaattat

SEQ ID NO: 130881 - DNA, 25 bp, Saccharomyces pastorianus
aaaaagctgccggagatacgaataa

SEQ ID NO: 130882 - DNA, 25 bp, Saccharomyces pastorianus
caaaggtccaaaaagctgccggaga

SEQ ID NO: 130883 - DNA, 25 bp, Saccharomyces pastorianus
gctgccggagatacgaataattcat

SEQ ID NO: 130884 - DNA, 25 bp, Saccharomyces pastorianus
aagctgccggagatacgaataattc

SEQ ID NO: 130885 - DNA, 25 bp, Saccharomyces pastorianus
ttcatgggacagagctcaaattatg

SEQ ID NO: 130886 - DNA, 25 bp, Saccharomyces pastorianus
gctgcatttttactggcgatacact

SEQ ID NO: 130887 - DNA, 25 bp, Saccharomyces pastorianus
gattacttgtattaggacgccctgc

SEQ ID NO: 130888 - DNA, 25 bp, Saccharomyces pastorianus
aggactgcccaaaggttacgataat

SEQ ID NO: 130889 - DNA, 25 bp, Saccharomyces pastorianus
gtggtgttaattactgctatctatt

SEQ ID NO: 130890 - DNA, 25 bp, Saccharomyces pastorianus
agagcctcctgaagttctgcctgag

SEQ ID NO: 130891 - DNA, 25 bp, Saccharomyces pastorianus
tctatcttagaaactgtgggcaggc

SEQ ID NO: 130892 - DNA, 25 bp, Saccharomyces pastorianus
cgatacactatttaccgctggttgc

SEQ ID NO: 130893 - DNA, 25 bp, Saccharomyces pastorianus
aatcgtggctaatcgatccagcaga

SEQ ID NO: 130894 - DNA, 25 bp, Saccharomyces pastorianus
tacacctgggtgacttagagattac

SEQ ID NO: 130895 - DNA, 25 bp, Saccharomyces pastorianus
atccaacaacagatgagcgctgcat

SEQ ID NO: 130896 - DNA, 25 bp, Saccharomyces pastorianus
gagactctatctgttattatgtgaa

SEQ ID NO: 130897 - DNA, 25 bp, Saccharomyces pastorianus
aagcgccgcaacaaatcaacaggga

SEQ ID NO: 130898 - DNA, 25 bp, Saccharomyces pastorianus
agatctgtacatggaggctaactta

SEQ ID NO: 130899 - DNA, 25 bp, Saccharomyces pastorianus
gaattcaaactaaccagcgccaaat

SEQ ID NO: 130900 - DNA, 25 bp, Saccharomyces pastorianus
gaagccgtcatgaatttgtcgaaac

SEQ ID NO: 130901 - DNA, 25 bp, Saccharomyces pastorianus
atgagaccataatcgcaacgttagt

SEQ ID NO: 130902 - DNA, 25 bp, Saccharomyces pastorianus
gcaacgttagtccattcagatctgt

SEQ ID NO: 130903 - DNA, 25 bp, Saccharomyces pastorianus
aaaggctacgatatggtcgcaatgt

SEQ ID NO: 130904 - DNA, 25 bp, Saccharomyces pastorianus
taatatgccccagtttaggttacaa

SEQ ID NO: 130905 - DNA, 25 bp, Saccharomyces pastorianus
ggtcgcaatgtcaggcacaagttta

SEQ ID NO: 130906 - DNA, 25 bp, Saccharomyces pastorianus
attaccactatattctagcgatgag

SEQ ID NO: 130907 - DNA, 25 bp, Saccharomyces pastorianus
gatgatgagatcaagcgccgcaaca

SEQ ID NO: 130908 - DNA, 25 bp, Saccharomyces pastorianus
aaggcggcattctcaagtgggctat

SEQ ID NO: 130909 - DNA, 25 bp, Saccharomyces pastorianus
gtgggctatcgagaagcaccaactt

SEQ ID NO: 130910 - DNA, 25 bp, Saccharomyces pastorianus
ataggccgcctttttctaattagag

SEQ ID NO: 130911 - DNA, 25 bp, Saccharomyces pastorianus
ggtaacaccgaggattgcatgcgaa

SEQ ID NO: 130912 - DNA, 25 bp, Saccharomyces pastorianus
tacggacgagtgtcgagccctcatc

SEQ ID NO: 130913 - DNA, 25 bp, Saccharomyces pastorianus
agccctcatctctcttttaaacgag

SEQ ID NO: 130914 - DNA, 25 bp, Saccharomyces pastorianus
tgattgctttcgaactgtgctttga

SEQ ID NO: 130915 - DNA, 25 bp, Saccharomyces pastorianus
aattgagacccctgatctttattgg

SEQ ID NO: 130916 - DNA, 25 bp, Saccharomyces pastorianus
gcaagctggactattctacggacga

SEQ ID NO: 130917 - DNA, 25 bp, Saccharomyces pastorianus
agaaatattcttcctactgctcaga

SEQ ID NO: 130918 - DNA, 25 bp, Saccharomyces pastorianus
gcaccaacttggcagtcctagaaga

SEQ ID NO: 130919 - DNA, 25 bp, Saccharomyces pastorianus
tatgttccaaacatggctacaagat

SEQ ID NO: 130920 - DNA, 25 bp, Saccharomyces pastorianus
aatctcaattacttctttggctcag

SEQ ID NO: 130921 - DNA, 25 bp, Saccharomyces pastorianus
aacgatagtctcactttgggcgata

SEQ ID NO: 130922 - DNA, 25 bp, Saccharomyces pastorianus
gactcctagaagctttgccacgagc

SEQ ID NO: 130923 - DNA, 25 bp, Saccharomyces pastorianus
gcgtatccactaaccaatcacaaga

SEQ ID NO: 130924 - DNA, 25 bp, Saccharomyces pastorianus
tgaggatgcagccagaaattcttcg

SEQ ID NO: 130925 - DNA, 25 bp, Saccharomyces pastorianus
cactttgggcgataaggctgatgaa

SEQ ID NO: 130926 - DNA, 25 bp, Saccharomyces pastorianus
tatcactgttgatgccttaagagat

SEQ ID NO: 130927 - DNA, 25 bp, Saccharomyces pastorianus
gggtcaggtaataactcgactccta

SEQ ID NO: 130928 - DNA, 25 bp, Saccharomyces pastorianus
tgatgagtttttaaccttgtaccaa

SEQ ID NO: 130929 - DNA, 25 bp, Saccharomyces pastorianus
ggtgggcaatattatactgccacaa

SEQ ID NO: 130930 - DNA, 25 bp, Saccharomyces pastorianus
ctccacttatggctacactgttttg

SEQ ID NO: 130931 - DNA, 25 bp, Saccharomyces pastorianus
ggttcttcggttgagttatctccaa

SEQ ID NO: 130932 - DNA, 25 bp, Saccharomyces pastorianus
gatatttggcaacttgacgcccgat

SEQ ID NO: 130933 - DNA, 25 bp, Saccharomyces pastorianus
ttcaataacgccaaacctcaaagat

SEQ ID NO: 130934 - DNA, 25 bp, Saccharomyces pastorianus
agcccctgagttgttgaaattcaat

SEQ ID NO: 130935 - DNA, 25 bp, Saccharomyces pastorianus
agcaacagcgcgtatttggatgatt

SEQ ID NO: 130936 - DNA, 25 bp, Saccharomyces pastorianus
ggaagcactattcccaagttagttc

SEQ ID NO: 130937 - DNA, 25 bp, Saccharomyces pastorianus
aacttagaaaccgtgatcctggtga

SEQ ID NO: 130938 - DNA, 25 bp, Saccharomyces pastorianus
ttgttcggttatacggtggagcgca

SEQ ID NO: 130939 - DNA, 25 bp, Saccharomyces pastorianus
aagttagttcactccacttatggct

SEQ ID NO: 130940 - DNA, 25 bp, Saccharomyces pastorianus
actgtaactactatccattgggaga

SEQ ID NO: 130941 - DNA, 25 bp, Saccharomyces pastorianus
ttcgtcgatgtaattttagggtcta

SEQ ID NO: 130942 - DNA, 25 bp, Saccharomyces pastorianus
ggacgattcagatgtcaccctggag

SEQ ID NO: 130943 - DNA, 25 bp, Saccharomyces pastorianus
tctaccactgttaggagctgcacta

SEQ ID NO: 130944 - DNA, 25 bp, Saccharomyces pastorianus
agctgcactaattgctctatccaga

SEQ ID NO: 130945 - DNA, 25 bp, Saccharomyces pastorianus
ataatggcacactttttctacagaa

SEQ ID NO: 130946 - DNA, 25 bp, Saccharomyces pastorianus
agattacagacatcatttcgtcgat

SEQ ID NO: 130947 - DNA, 25 bp, Saccharomyces pastorianus
aagaatcttcccacccattgatgat

SEQ ID NO: 130948 - DNA, 25 bp, Saccharomyces pastorianus
cattgatgatcctcttccgttcaaa

SEQ ID NO: 130949 - DNA, 25 bp, Saccharomyces pastorianus
aaaatggtggcctttctaccactgt

SEQ ID NO: 130950 - DNA, 25 bp, Saccharomyces pastorianus
caccctggaggaagcagtgacccat

SEQ ID NO: 130951 - DNA, 25 bp, Saccharomyces pastorianus
agtgacccatcagaggatcccggat

SEQ ID NO: 130952 - DNA, 25 bp, Saccharomyces pastorianus
gatctcactatatcgcatccttatg

SEQ ID NO: 130953 - DNA, 25 bp, Saccharomyces pastorianus
tgcgacaactgaacgtgtaaataac

SEQ ID NO: 130954 - DNA, 25 bp, Saccharomyces pastorianus
atagttttgtctgtgccatctttaa

SEQ ID NO: 130955 - DNA, 25 bp, Saccharomyces pastorianus
cagttttacattaacgatctcacta

SEQ ID NO: 130956 - DNA, 25 bp, Saccharomyces pastorianus
atctcactatatcgcatccttatgc

SEQ ID NO: 130957 - DNA, 25 bp, Saccharomyces pastorianus
agttttgtctgtgccatctttaacc

SEQ ID NO: 130958 - DNA, 25 bp, Saccharomyces pastorianus
tgaacgtgtaaataacaacatgttg

SEQ ID NO: 130959 - DNA, 25 bp, Saccharomyces pastorianus
gcatccttatgcgacaactgaacgt

SEQ ID NO: 130960 - DNA, 25 bp, Saccharomyces pastorianus
ccttatgcgacaactgaacgtgtaa

SEQ ID NO: 130961 - DNA, 25 bp, Saccharomyces pastorianus
ttttgtctgtgccatctttaaccat

SEQ ID NO: 130962 - DNA, 25 bp, Saccharomyces pastorianus
catgttgtttgtttatagttttgtc

SEQ ID NO: 130963 - DNA, 25 bp, Saccharomyces pastorianus
ctactagtagaagacgaagaccagt

SEQ ID NO: 130964 - DNA, 25 bp, Saccharomyces pastorianus
agtagaagacgaagaccagtcatta

SEQ ID NO: 130965 - DNA, 25 bp, Saccharomyces pastorianus
aaattactactagtagaagacgaag

SEQ ID NO: 130966 - DNA, 25 bp, Saccharomyces pastorianus
tcaagaaaaaaattactactagtag

SEQ ID NO: 130967 - DNA, 25 bp, Saccharomyces pastorianus
aattactactagtagaagacgaaga

SEQ ID NO: 130968 - DNA, 25 bp, Saccharomyces pastorianus
actactagtagaagacgaagaccag

SEQ ID NO: 130969 - DNA, 25 bp, Saccharomyces pastorianus
actagtagaagacgaagaccagtca

SEQ ID NO: 130970 - DNA, 25 bp, Saccharomyces pastorianus
ttactactagtagaagacgaagacc

SEQ ID NO: 130971 - DNA, 25 bp, Saccharomyces pastorianus
attactactagtagaagacgaagac

SEQ ID NO: 130972 - DNA, 25 bp, Saccharomyces pastorianus
tactactagtagaagacgaagacca

SEQ ID NO: 130973 - DNA, 25 bp, Saccharomyces pastorianus
tactagtagaagacgaagaccagtc

SEQ ID NO: 130974 - DNA, 25 bp, Saccharomyces pastorianus
tgccggttggtgtattcttgaggaa

SEQ ID NO: 130975 - DNA, 25 bp, Saccharomyces pastorianus
ttactaaatgagtccggcgcctttg

SEQ ID NO: 130976 - DNA, 25 bp, Saccharomyces pastorianus
gccggttgttggtgtggttttcaat

SEQ ID NO: 130977 - DNA, 25 bp, Saccharomyces pastorianus
gttgtacatctctaggtttagctga

SEQ ID NO: 130978 - DNA, 25 bp, Saccharomyces pastorianus
aacggccctacatttattgttgatc

SEQ ID NO: 130979 - DNA, 25 bp, Saccharomyces pastorianus
ttaaaccaactattccatgcttcca

SEQ ID NO: 130980 - DNA, 25 bp, Saccharomyces pastorianus
gcgagcggcatgcttgatgcttatt

SEQ ID NO: 130981 - DNA, 25 bp, Saccharomyces pastorianus
tcacggttacccctatagttgtaca

SEQ ID NO: 130982 - DNA, 25 bp, Saccharomyces pastorianus
gttgatcccatcgatggtactacta

SEQ ID NO: 130983 - DNA, 25 bp, Saccharomyces pastorianus
acatatgctacgtagcgagcggcat

SEQ ID NO: 130984 - DNA, 25 bp, Saccharomyces pastorianus
gtgtggttttcaatcctcacttaaa

SEQ ID NO: 130985 - DNA, 25 bp, Saccharomyces pastorianus
ggccttgaaaaggagcagactaaaa

SEQ ID NO: 130986 - DNA, 25 bp, Saccharomyces pastorianus
aggagcagactaaaagtttgcacga

SEQ ID NO: 130987 - DNA, 25 bp, Saccharomyces pastorianus
ggagcagactaaaagtttgcacgat

SEQ ID NO: 130988 - DNA, 25 bp, Saccharomyces pastorianus
gactaaaagtttgcacgatgatata

SEQ ID NO: 130989 - DNA, 25 bp, Saccharomyces pastorianus
cagactaaaagtttgcacgatgata

SEQ ID NO: 130990 - DNA, 25 bp, Saccharomyces pastorianus
agcagactaaaagtttgcacgatga

SEQ ID NO: 130991 - DNA, 25 bp, Saccharomyces pastorianus
agactaaaagtttgcacgatgatat

SEQ ID NO: 130992 - DNA, 25 bp, Saccharomyces pastorianus
gagcagactaaaagtttgcacgatg

SEQ ID NO: 130993 - DNA, 25 bp, Saccharomyces pastorianus
taaaagtttgcacgatgatataata

SEQ ID NO: 130994 - DNA, 25 bp, Saccharomyces pastorianus
aaaggagcagactaaaagtttgcac

SEQ ID NO: 130995 - DNA, 25 bp, Saccharomyces pastorianus
ctaaaagtttgcacgatgatataat

SEQ ID NO: 130996 - DNA, 25 bp, Saccharomyces pastorianus
gaacgctggcggtaatggaagcaat

SEQ ID NO: 130997 - DNA, 25 bp, Saccharomyces pastorianus
ttagccgtggccaagatcgttaaag

SEQ ID NO: 130998 - DNA, 25 bp, Saccharomyces pastorianus
aaatcaatgcctgagccactgggac

SEQ ID NO: 130999 - DNA, 25 bp, Saccharomyces pastorianus
atcttgctaaacaatgtcccgcact

SEQ ID NO: 131000 - DNA, 25 bp, Saccharomyces pastorianus
taacagaagatttagccgtggccaa

SEQ ID NO: 131001 - DNA, 25 bp, Saccharomyces pastorianus
gagcccagaaatttatcttgctaaa

SEQ ID NO: 131002 - DNA, 25 bp, Saccharomyces pastorianus
gtttgaattacaaggattgccgtca

SEQ ID NO: 131003 - DNA, 25 bp, Saccharomyces pastorianus
ctgttatacatgaagctgctcgcga

SEQ ID NO: 131004 - DNA, 25 bp, Saccharomyces pastorianus
gaggaaaacatagcaaaaccgtctt

SEQ ID NO: 131005 - DNA, 25 bp, Saccharomyces pastorianus
agattttacaaagcgctcacactta

SEQ ID NO: 131006 - DNA, 25 bp, Saccharomyces pastorianus
aatgtcccgcactcaaaaaattttg

SEQ ID NO: 131007 - DNA, 25 bp, Saccharomyces pastorianus
tgcattccaccaatagttgtatgat

SEQ ID NO: 131008 - DNA, 25 bp, Saccharomyces pastorianus
acggaggttctgtggattagctatt

SEQ ID NO: 131009 - DNA, 25 bp, Saccharomyces pastorianus
gggtcagtcttcaagatagttcctt

SEQ ID NO: 131010 - DNA, 25 bp, Saccharomyces pastorianus
tcctcaagtgccatcgtttcaaaac

SEQ ID NO: 131011 - DNA, 25 bp, Saccharomyces pastorianus
ggccaagtggatgggtcagtcttca

SEQ ID NO: 131012 - DNA, 25 bp, Saccharomyces pastorianus
ttatcagatgggtcactctatgagg

SEQ ID NO: 131013 - DNA, 25 bp, Saccharomyces pastorianus
gattggccaacgacttttatcagat

SEQ ID NO: 131014 - DNA, 25 bp, Saccharomyces pastorianus
cgaggaatttggctctcctcaagtg

SEQ ID NO: 131015 - DNA, 25 bp, Saccharomyces pastorianus
gtggtttaaaccctcgcatggaaag

SEQ ID NO: 131016 - DNA, 25 bp, Saccharomyces pastorianus
tcgtttcaaaacgttggtggccaag

SEQ ID NO: 131017 - DNA, 25 bp, Saccharomyces pastorianus
atcatcgatcgagaattacagctag

SEQ ID NO: 131018 - DNA, 25 bp, Saccharomyces pastorianus
caatttggataccttcgtccaagag

SEQ ID NO: 131019 - DNA, 25 bp, Saccharomyces pastorianus
gaaaaacactacgtcaatttggata

SEQ ID NO: 131020 - DNA, 25 bp, Saccharomyces pastorianus
gtcaatttggataccttcgtccaag

SEQ ID NO: 131021 - DNA, 25 bp, Saccharomyces pastorianus
gtccaagagcaaaaacggaggaagt

SEQ ID NO: 131022 - DNA, 25 bp, Saccharomyces pastorianus
cggaggaagtaataatgacgaaaca

SEQ ID NO: 131023 - DNA, 25 bp, Saccharomyces pastorianus
actacgtcaatttggataccttcgt

SEQ ID NO: 131024 - DNA, 25 bp, Saccharomyces pastorianus
cactacgtcaatttggataccttcg

SEQ ID NO: 131025 - DNA, 25 bp, Saccharomyces pastorianus
tacgtcaatttggataccttcgtcc

SEQ ID NO: 131026 - DNA, 25 bp, Saccharomyces pastorianus
ccttcgtccaagagcaaaaacggag

SEQ ID NO: 131027 - DNA, 25 bp, Saccharomyces pastorianus
aaacactacgtcaatttggatacct

SEQ ID NO: 131028 - DNA, 25 bp, Saccharomyces pastorianus
acgtcaatttggataccttcgtcca

SEQ ID NO: 131029 - DNA, 25 bp, Saccharomyces pastorianus
gttcttgtgccttactgttcaataa

SEQ ID NO: 131030 - DNA, 25 bp, Saccharomyces pastorianus
gtttgggcaggaaacaccaccattt

SEQ ID NO: 131031 - DNA, 25 bp, Saccharomyces pastorianus
atggatcctggaagttcttgtgcct

SEQ ID NO: 131032 - DNA, 25 bp, Saccharomyces pastorianus
atatccagcctgcagaaagtgccac

SEQ ID NO: 131033 - DNA, 25 bp, Saccharomyces pastorianus
cttttctacccttccatgtcaataa

SEQ ID NO: 131034 - DNA, 25 bp, Saccharomyces pastorianus
aaggaactgccttgggatctacaca

SEQ ID NO: 131035 - DNA, 25 bp, Saccharomyces pastorianus
actccctacacaatacgttatactc

SEQ ID NO: 131036 - DNA, 25 bp, Saccharomyces pastorianus
aagttcacggctccaagcgtggtat

SEQ ID NO: 131037 - DNA, 25 bp, Saccharomyces pastorianus
cgagtgagttgtacgaaggcgccaa

SEQ ID NO: 131038 - DNA, 25 bp, Saccharomyces pastorianus
gatagcgctcttataccaaccaaag

SEQ ID NO: 131039 - DNA, 25 bp, Saccharomyces pastorianus
gatctacacaccattgtacctgttt

SEQ ID NO: 131040 - DNA, 25 bp, Saccharomyces pastorianus
acaagctttgttcgcattgcaagaa

SEQ ID NO: 131041 - DNA, 25 bp, Saccharomyces pastorianus
gcgtgaagtgcgctttagtaagaac

SEQ ID NO: 131042 - DNA, 25 bp, Saccharomyces pastorianus
tgtagaagccttgtctttctctgta

SEQ ID NO: 131043 - DNA, 25 bp, Saccharomyces pastorianus
gaacgattgaccgtaaatgaacctc

SEQ ID NO: 131044 - DNA, 25 bp, Saccharomyces pastorianus
aacatgtggctgtttctgtagaagc

SEQ ID NO: 131045 - DNA, 25 bp, Saccharomyces pastorianus
taaaggccaaccgtacgtgcttaat

SEQ ID NO: 131046 - DNA, 25 bp, Saccharomyces pastorianus
attatatgccctttaacaatgacag

SEQ ID NO: 131047 - DNA, 25 bp, Saccharomyces pastorianus
atgacggagcaattctgtgctactt

SEQ ID NO: 131048 - DNA, 25 bp, Saccharomyces pastorianus
cttgtctttctctgtattcctttaa

SEQ ID NO: 131049 - DNA, 25 bp, Saccharomyces pastorianus
gtccgataaacatgccacagtagta

SEQ ID NO: 131050 - DNA, 25 bp, Saccharomyces pastorianus
aatgaacctcagatgtccgataaac

SEQ ID NO: 131051 - DNA, 25 bp, Saccharomyces pastorianus
aattgcaggaaccttcatcgctgtc

SEQ ID NO: 131052 - DNA, 25 bp, Saccharomyces pastorianus
aggtcaagcgcttatcgtagccttt

SEQ ID NO: 131053 - DNA, 25 bp, Saccharomyces pastorianus
cggattctagtgagtcttcgctgga

SEQ ID NO: 131054 - DNA, 25 bp, Saccharomyces pastorianus
gtcgtatctacgtcaactatggcta

SEQ ID NO: 131055 - DNA, 25 bp, Saccharomyces pastorianus
gtaaaggtatctccacgccatttga

SEQ ID NO: 131056 - DNA, 25 bp, Saccharomyces pastorianus
ttcttgcctcgttctcaaaggtcaa

SEQ ID NO: 131057 - DNA, 25 bp, Saccharomyces pastorianus
tatcgtagccttttagagaccccaa

SEQ ID NO: 131058 - DNA, 25 bp, Saccharomyces pastorianus
aagactatcagtcgcgcgttcgatc

SEQ ID NO: 131059 - DNA, 25 bp, Saccharomyces pastorianus
ttcgatctcagtaacgtcctccaat

SEQ ID NO: 131060 - DNA, 25 bp, Saccharomyces pastorianus
agcctattttagacttcttgcctcg

SEQ ID NO: 131061 - DNA, 25 bp, Saccharomyces pastorianus
ataagtcacacgctctgggtcatag

SEQ ID NO: 131062 - DNA, 25 bp, Saccharomyces pastorianus
gtagttcctaacaacgaagtcagca

SEQ ID NO: 131063 - DNA, 25 bp, Saccharomyces pastorianus
gaagccagttttgaactccattact

SEQ ID NO: 131064 - DNA, 25 bp, Saccharomyces pastorianus
gtaccgcctatttgaagccagtttt

SEQ ID NO: 131065 - DNA, 25 bp, Saccharomyces pastorianus
gacgtccttaatggtgatggtgaat

SEQ ID NO: 131066 - DNA, 25 bp, Saccharomyces pastorianus
atgttaattcagcactcggctcttt

SEQ ID NO: 131067 - DNA, 25 bp, Saccharomyces pastorianus
tgtcaaacacatgtaccgcctattt

SEQ ID NO: 131068 - DNA, 25 bp, Saccharomyces pastorianus
gaatgagctatttcaagacgtcctt

SEQ ID NO: 131069 - DNA, 25 bp, Saccharomyces pastorianus
cttttgtcgacaacacttctcaagc

SEQ ID NO: 131070 - DNA, 25 bp, Saccharomyces pastorianus
agtaccctaccaatagacctattag

SEQ ID NO: 131071 - DNA, 25 bp, Saccharomyces pastorianus
gatgcgaaaagctcggcagactcga

SEQ ID NO: 131072 - DNA, 25 bp, Saccharomyces pastorianus
ctccattactttggctactcataag

SEQ ID NO: 131073 - DNA, 25 bp, Saccharomyces pastorianus
gcaatgagcgatgatggatcttcat

SEQ ID NO: 131074 - DNA, 25 bp, Saccharomyces pastorianus
tgatggatcttcatcgagtgaagat

SEQ ID NO: 131075 - DNA, 25 bp, Saccharomyces pastorianus
atcgagtgaagatgagcattatagt

SEQ ID NO: 131076 - DNA, 25 bp, Saccharomyces pastorianus
atggtgcaatgagcgatgatggatc

SEQ ID NO: 131077 - DNA, 25 bp, Saccharomyces pastorianus
cagaagaacagggtgaaggtcaagg

SEQ ID NO: 131078 - DNA, 25 bp, Saccharomyces pastorianus
gtgcaatgagcgatgatggatcttc

SEQ ID NO: 131079 - DNA, 25 bp, Saccharomyces pastorianus
aaggtcaagggaaagatggtgcaat

SEQ ID NO: 131080 - DNA, 25 bp, Saccharomyces pastorianus
gatgagcattatagtgatgtaccag

SEQ ID NO: 131081 - DNA, 25 bp, Saccharomyces pastorianus
gcattatagtgatgtaccagaggat

SEQ ID NO: 131082 - DNA, 25 bp, Saccharomyces pastorianus
gagcattatagtgatgtaccagagg

SEQ ID NO: 131083 - DNA, 25 bp, Saccharomyces pastorianus
aagctagagcagaagaacagggtga

SEQ ID NO: 131084 - DNA, 25 bp, Saccharomyces pastorianus
gaaggctatcaaactgactgaatta

SEQ ID NO: 131085 - DNA, 25 bp, Saccharomyces pastorianus
gcaatgagcgatgatggatcttcat

SEQ ID NO: 131086 - DNA, 25 bp, Saccharomyces pastorianus
tgatggatcttcatcgagtgaagat

SEQ ID NO: 131087 - DNA, 25 bp, Saccharomyces pastorianus
atggtgcaatgagcgatgatggatc

SEQ ID NO: 131088 - DNA, 25 bp, Saccharomyces pastorianus
agaaaattcgcaaccaactccacgt

SEQ ID NO: 131089 - DNA, 25 bp, Saccharomyces pastorianus
gtgcaatgagcgatgatggatcttc

SEQ ID NO: 131090 - DNA, 25 bp, Saccharomyces pastorianus
aaggtcaagggaaagatggtgcaat

SEQ ID NO: 131091 - DNA, 25 bp, Saccharomyces pastorianus
gatgagcattatagtgatgtaccag

SEQ ID NO: 131092 - DNA, 25 bp, Saccharomyces pastorianus
gcattatagtgatgtaccagaggat

SEQ ID NO: 131093 - DNA, 25 bp, Saccharomyces pastorianus
ggaacctaagccttcagaaaattcg

SEQ ID NO: 131094 - DNA, 25 bp, Saccharomyces pastorianus
aagctagagcagaagaacagggtga

SEQ ID NO: 131095 - DNA, 25 bp, Saccharomyces pastorianus
aagatctgatgaagacgatcaggat

SEQ ID NO: 131096 - DNA, 25 bp, Saccharomyces pastorianus
ggttttccacatcgaaaagatctga

SEQ ID NO: 131097 - DNA, 25 bp, Saccharomyces pastorianus
ccatgttccagaatattttcccacc

SEQ ID NO: 131098 - DNA, 25 bp, Saccharomyces pastorianus
ttccatgttccagaatattttccca

SEQ ID NO: 131099 - DNA, 25 bp, Saccharomyces pastorianus
tgttaaatgggttttccacatcgaa

SEQ ID NO: 131100 - DNA, 25 bp, Saccharomyces pastorianus
tgggttttccacatcgaaaagatct

SEQ ID NO: 131101 - DNA, 25 bp, Saccharomyces pastorianus
tttccacatcgaaaagatctgatga

SEQ ID NO: 131102 - DNA, 25 bp, Saccharomyces pastorianus
agtgttaaatgggttttccacatcg

SEQ ID NO: 131103 - DNA, 25 bp, Saccharomyces pastorianus
taaatgggttttccacatcgaaaag

SEQ ID NO: 131104 - DNA, 25 bp, Saccharomyces pastorianus
catgttccagaatattttcccacct

SEQ ID NO: 131105 - DNA, 25 bp, Saccharomyces pastorianus
aatgggttttccacatcgaaaagat

SEQ ID NO: 131106 - DNA, 25 bp, Saccharomyces pastorianus
ttacttttcaagtattggactattc

SEQ ID NO: 131107 - DNA, 25 bp, Saccharomyces pastorianus
agtgccgaatttgcatcgaaaagaa

SEQ ID NO: 131108 - DNA, 25 bp, Saccharomyces pastorianus
gatgatgtattaaatcctccattgc

SEQ ID NO: 131109 - DNA, 25 bp, Saccharomyces pastorianus
aaagatagctagaactccacaaggt

SEQ ID NO: 131110 - DNA, 25 bp, Saccharomyces pastorianus
tagaactccacaaggtcctactgtt

SEQ ID NO: 131111 - DNA, 25 bp, Saccharomyces pastorianus
caaggtcctactgttacttttcaag

SEQ ID NO: 131112 - DNA, 25 bp, Saccharomyces pastorianus
catcttttcatgttcactcaatctg

SEQ ID NO: 131113 - DNA, 25 bp, Saccharomyces pastorianus
ttaggcgcctatacatcagaatctg

SEQ ID NO: 131114 - DNA, 25 bp, Saccharomyces pastorianus
taatctaagtaaaacagtgccgaat

SEQ ID NO: 131115 - DNA, 25 bp, Saccharomyces pastorianus
gcgccactattttattgacattcga

SEQ ID NO: 131116 - DNA, 25 bp, Saccharomyces pastorianus
gggaaatttctatgcgccactattt

SEQ ID NO: 131117 - DNA, 25 bp, Saccharomyces pastorianus
actggtttcacaaaagggcgcaaat

SEQ ID NO: 131118 - DNA, 25 bp, Saccharomyces pastorianus
gcttgtgtgttttccattataagtg

SEQ ID NO: 131119 - DNA, 25 bp, Saccharomyces pastorianus
tagtgtacaagatatcgcctaatac

SEQ ID NO: 131120 - DNA, 25 bp, Saccharomyces pastorianus
ggcgcaaatgactgcagcccagaag

SEQ ID NO: 131121 - DNA, 25 bp, Saccharomyces pastorianus
taatgcaattaaggagtgcccgatt

SEQ ID NO: 131122 - DNA, 25 bp, Saccharomyces pastorianus
aagtgtattaagaactggtttcaca

SEQ ID NO: 131123 - DNA, 25 bp, Saccharomyces pastorianus
ggaaatggacatgcttttgttaaaa

SEQ ID NO: 131124 - DNA, 25 bp, Saccharomyces pastorianus
tcgcctaatacaacagataatgcaa

SEQ ID NO: 131125 - DNA, 25 bp, Saccharomyces pastorianus
gcccagaagggaaatggacatgctt

SEQ ID NO: 131126 - DNA, 25 bp, Saccharomyces pastorianus
gttttgagaatatggaacccggtga

SEQ ID NO: 131127 - DNA, 25 bp, Saccharomyces pastorianus
gactagaatgcttgtgtgttttcca

SEQ ID NO: 131128 - DNA, 25 bp, Saccharomyces pastorianus
gatggaatctcgacttaggcgaagt

SEQ ID NO: 131129 - DNA, 25 bp, Saccharomyces pastorianus
tgaagatccggttaaggcacttaat

SEQ ID NO: 131130 - DNA, 25 bp, Saccharomyces pastorianus
tcacgcatcaactctataacattct

SEQ ID NO: 131131 - DNA, 25 bp, Saccharomyces pastorianus
ggcactacttggtgtatcgttgcga

SEQ ID NO: 131132 - DNA, 25 bp, Saccharomyces pastorianus
aaacggactcacttaggcactactt

SEQ ID NO: 131133 - DNA, 25 bp, Saccharomyces pastorianus
ataacattcttagactcttctgaaa

SEQ ID NO: 131134 - DNA, 25 bp, Saccharomyces pastorianus
aggcgtttggtttgtgttcccatga

SEQ ID NO: 131135 - DNA, 25 bp, Saccharomyces pastorianus
gaaaggtaagccctctctagagaat

SEQ ID NO: 131136 - DNA, 25 bp, Saccharomyces pastorianus
ttgtgttcccatgaagatccggtta

SEQ ID NO: 131137 - DNA, 25 bp, Saccharomyces pastorianus
cgaagtgttagatgattctgaccta

SEQ ID NO: 131138 - DNA, 25 bp, Saccharomyces pastorianus
gatactatcgtggaggcgtttggtt

SEQ ID NO: 131139 - DNA, 25 bp, Saccharomyces pastorianus
atgatcgtatttcgtcgctttccta

SEQ ID NO: 131140 - DNA, 25 bp, Saccharomyces pastorianus
gacaaccggcatccaggagtctttt

SEQ ID NO: 131141 - DNA, 25 bp, Saccharomyces pastorianus
ataacagcagccacattgatgatga

SEQ ID NO: 131142 - DNA, 25 bp, Saccharomyces pastorianus
ggcgatcattatcttttacatctta

SEQ ID NO: 131143 - DNA, 25 bp, Saccharomyces pastorianus
tgttggaatcacaaaggcgatcatt

SEQ ID NO: 131144 - DNA, 25 bp, Saccharomyces pastorianus
ttggccaaagagaggttcgaagaac

SEQ ID NO: 131145 - DNA, 25 bp, Saccharomyces pastorianus
ttttacatcacattcgacaaccggc

SEQ ID NO: 131146 - DNA, 25 bp, Saccharomyces pastorianus
cgaagaacaactgaggtcacctaat

SEQ ID NO: 131147 - DNA, 25 bp, Saccharomyces pastorianus
tttcctacgtgccttttacatcaca

SEQ ID NO: 131148 - DNA, 25 bp, Saccharomyces pastorianus
ccaggagtcttttgttggaatcaca

SEQ ID NO: 131149 - DNA, 25 bp, Saccharomyces pastorianus
atagcaatagagtcattcgtaagca

SEQ ID NO: 131150 - DNA, 25 bp, Saccharomyces pastorianus
gacgatattcatgattttagtcaaa

SEQ ID NO: 131151 - DNA, 25 bp, Saccharomyces pastorianus
ctcggttctttggatgatttggaat

SEQ ID NO: 131152 - DNA, 25 bp, Saccharomyces pastorianus
agtttcatgttcaatattggacgat

SEQ ID NO: 131153 - DNA, 25 bp, Saccharomyces pastorianus
aatgggaaattgcattgctcggttc

SEQ ID NO: 131154 - DNA, 25 bp, Saccharomyces pastorianus
aaattgcattgctcggttctttgga

SEQ ID NO: 131155 - DNA, 25 bp, Saccharomyces pastorianus
tggtttcgttttttgtgaaggatat

SEQ ID NO: 131156 - DNA, 25 bp, Saccharomyces pastorianus
ttgcattgctcggttctttggatga

SEQ ID NO: 131157 - DNA, 25 bp, Saccharomyces pastorianus
ggatattaaggtcgagttgtttgta

SEQ ID NO: 131158 - DNA, 25 bp, Saccharomyces pastorianus
attggacgatattcatgattttagt

SEQ ID NO: 131159 - DNA, 25 bp, Saccharomyces pastorianus
gcattgctcggttctttggatgatt

SEQ ID NO: 131160 - DNA, 25 bp, Saccharomyces pastorianus
tgctcggttctttggatgatttgga

SEQ ID NO: 131161 - DNA, 25 bp, Saccharomyces pastorianus
gaaaaacctcactatgtattgttga

SEQ ID NO: 131162 - DNA, 25 bp, Saccharomyces pastorianus
ggtataacatttttccctcttgtgg

SEQ ID NO: 131163 - DNA, 25 bp, Saccharomyces pastorianus
ttcagtgaacggacatcccaatttg

SEQ ID NO: 131164 - DNA, 25 bp, Saccharomyces pastorianus
atcccgagtttcattgatgtccaag

SEQ ID NO: 131165 - DNA, 25 bp, Saccharomyces pastorianus
atctcatgatgacgcctatttattt

SEQ ID NO: 131166 - DNA, 25 bp, Saccharomyces pastorianus
tcttgtggaccctattgaccttaaa

SEQ ID NO: 131167 - DNA, 25 bp, Saccharomyces pastorianus
gttcaagcatacaatcccgagtttc

SEQ ID NO: 131168 - DNA, 25 bp, Saccharomyces pastorianus
aatgctgggaatacgactggaagtc

SEQ ID NO: 131169 - DNA, 25 bp, Saccharomyces pastorianus
acagacattctaacgtcaccttcaa

SEQ ID NO: 131170 - DNA, 25 bp, Saccharomyces pastorianus
gttcagcaccaaatgtttgatcctg

SEQ ID NO: 131171 - DNA, 25 bp, Saccharomyces pastorianus
tcgaatagttggttcctgttcaagc

SEQ ID NO: 131172 - DNA, 25 bp, Saccharomyces pastorianus
gtattttttcacacgaacggcacaa

SEQ ID NO: 131173 - DNA, 25 bp, Saccharomyces pastorianus
atgagagtcctgttatccttcactg

SEQ ID NO: 131174 - DNA, 25 bp, Saccharomyces pastorianus
gtcttcaaacacatttcttcaacaa

SEQ ID NO: 131175 - DNA, 25 bp, Saccharomyces pastorianus
tatccttcactgtcttcaaacacat

SEQ ID NO: 131176 - DNA, 25 bp, Saccharomyces pastorianus
tttttcatcgagtattttttcacac

SEQ ID NO: 131177 - DNA, 25 bp, Saccharomyces pastorianus
aacggcacaagtagccttcaactgt

SEQ ID NO: 131178 - DNA, 25 bp, Saccharomyces pastorianus
gatacccttccaaaagtgcgatgag

SEQ ID NO: 131179 - DNA, 25 bp, Saccharomyces pastorianus
gtgcgatgagagtcctgttatcctt

SEQ ID NO: 131180 - DNA, 25 bp, Saccharomyces pastorianus
ttcaacaaagtcatcgtcatcatct

SEQ ID NO: 131181 - DNA, 25 bp, Saccharomyces pastorianus
gaatcgcttttcatgatacccttcc

SEQ ID NO: 131182 - DNA, 25 bp, Saccharomyces pastorianus
gtagtgatttcaactgaatcgcttt

SEQ ID NO: 131183 - DNA, 25 bp, Saccharomyces pastorianus
gatgactcattgaatagcctgaagg

SEQ ID NO: 131184 - DNA, 25 bp, Saccharomyces pastorianus
aatcctaccgttgaagtcgcttccg

SEQ ID NO: 131185 - DNA, 25 bp, Saccharomyces pastorianus
attgcactcaagaatacataccgtt

SEQ ID NO: 131186 - DNA, 25 bp, Saccharomyces pastorianus
gtggagactgccaaggattctgaaa

SEQ ID NO: 131187 - DNA, 25 bp, Saccharomyces pastorianus
tagcttccgctgcatacataaacga

SEQ ID NO: 131188 - DNA, 25 bp, Saccharomyces pastorianus
attcgatcaagatagcttccgctgc

SEQ ID NO: 131189 - DNA, 25 bp, Saccharomyces pastorianus
aagtaattgatagtctcctgcccat

SEQ ID NO: 131190 - DNA, 25 bp, Saccharomyces pastorianus
caaagctaccttattgagtccacaa

SEQ ID NO: 131191 - DNA, 25 bp, Saccharomyces pastorianus
gacagctcttaagtgtagaacctca

SEQ ID NO: 131192 - DNA, 25 bp, Saccharomyces pastorianus
attggaggagatcgtcacacttaat

SEQ ID NO: 131193 - DNA, 25 bp, Saccharomyces pastorianus
gcttccggcaattttgaacccagag

SEQ ID NO: 131194 - DNA, 25 bp, Saccharomyces pastorianus
acgctgctgatataactgatggaaa

SEQ ID NO: 131195 - DNA, 25 bp, Saccharomyces pastorianus
ttcaagacacgtcaactgtagcaaa

SEQ ID NO: 131196 - DNA, 25 bp, Saccharomyces pastorianus
atgacaccatagaacacgctgctga

SEQ ID NO: 131197 - DNA, 25 bp, Saccharomyces pastorianus
tgagaacaacactgcgaatgaccaa

SEQ ID NO: 131198 - DNA, 25 bp, Saccharomyces pastorianus
gatgtgctcaaaatatacgctcaaa

SEQ ID NO: 131199 - DNA, 25 bp, Saccharomyces pastorianus
tgtaagttttgttttacctgacgag

SEQ ID NO: 131200 - DNA, 25 bp, Saccharomyces pastorianus
tcttgagtattctgacgatattgca

SEQ ID NO: 131201 - DNA, 25 bp, Saccharomyces pastorianus
gtgcagcttacattcttgatcgatg

SEQ ID NO: 131202 - DNA, 25 bp, Saccharomyces pastorianus
gaatgaccaatactcgtctattttg

SEQ ID NO: 131203 - DNA, 25 bp, Saccharomyces pastorianus
aacgctatatttctttcttctgaac

SEQ ID NO: 131204 - DNA, 25 bp, Saccharomyces pastorianus
gaagcggagcaaattgacacatcca

SEQ ID NO: 131205 - DNA, 25 bp, Saccharomyces pastorianus
gacactttgatcacaccagcggtta

SEQ ID NO: 131206 - DNA, 25 bp, Saccharomyces pastorianus
ggaagcgtcctcagcaacaattgtt

SEQ ID NO: 131207 - DNA, 25 bp, Saccharomyces pastorianus
atcgcagaaatgagacttccgtcga

SEQ ID NO: 131208 - DNA, 25 bp, Saccharomyces pastorianus
gaaccttggtttatgttgtctcttg

SEQ ID NO: 131209 - DNA, 25 bp, Saccharomyces pastorianus
tcatccttccattctgctgtagaaa

SEQ ID NO: 131210 - DNA, 25 bp, Saccharomyces pastorianus
catcttaggtatgtgcgtttcgaaa

SEQ ID NO: 131211 - DNA, 25 bp, Saccharomyces pastorianus
aaacggcaacgtatctgagagtgac

SEQ ID NO: 131212 - DNA, 25 bp, Saccharomyces pastorianus
agacgacaatatttcatccttccat

SEQ ID NO: 131213 - DNA, 25 bp, Saccharomyces pastorianus
attgcgtcgttgatggacactttga

SEQ ID NO: 131214 - DNA, 25 bp, Saccharomyces pastorianus
ataccgcgccaaatattagggagct

SEQ ID NO: 131215 - DNA, 25 bp, Saccharomyces pastorianus
gttctctgtcttacaaggtcatcat

SEQ ID NO: 131216 - DNA, 25 bp, Saccharomyces pastorianus
gaacatccagattattactccagga

SEQ ID NO: 131217 - DNA, 25 bp, Saccharomyces pastorianus
tatttgcttgattttcttctttaga

SEQ ID NO: 131218 - DNA, 25 bp, Saccharomyces pastorianus
ttttttccgctttctcaatgttaca

SEQ ID NO: 131219 - DNA, 25 bp, Saccharomyces pastorianus
gaaatcatcaccatccactatcaag

SEQ ID NO: 131220 - DNA, 25 bp, Saccharomyces pastorianus
ggaaccgttcaaaatagtgtcttgt

SEQ ID NO: 131221 - DNA, 25 bp, Saccharomyces pastorianus
agtgtcttgtccaatcatattaagg

SEQ ID NO: 131222 - DNA, 25 bp, Saccharomyces pastorianus
aaaaatcaccgaattgcagctgcaa

SEQ ID NO: 131223 - DNA, 25 bp, Saccharomyces pastorianus
aatattataaaagatgcccgccgta

SEQ ID NO: 131224 - DNA, 25 bp, Saccharomyces pastorianus
agggtctcatatgggactggttgat

SEQ ID NO: 131225 - DNA, 25 bp, Saccharomyces pastorianus
gatgcccgccgtaaagactcgaata

SEQ ID NO: 131226 - DNA, 25 bp, Saccharomyces pastorianus
tagtcaccgatacggagggtctcat

SEQ ID NO: 131227 - DNA, 25 bp, Saccharomyces pastorianus
tgaacgaatacctggccactctgga

SEQ ID NO: 131228 - DNA, 25 bp, Saccharomyces pastorianus
caaatggcagttttcgctatgtcga

SEQ ID NO: 131229 - DNA, 25 bp, Saccharomyces pastorianus
tcgatgatctgagcgccagcgtata

SEQ ID NO: 131230 - DNA, 25 bp, Saccharomyces pastorianus
acgcttgacgcggatgctttaacaa

SEQ ID NO: 131231 - DNA, 25 bp, Saccharomyces pastorianus
ggattctgtgcagccgctcgatgat

SEQ ID NO: 131232 - DNA, 25 bp, Saccharomyces pastorianus
aatgcttcaaacaactgccgggtct

SEQ ID NO: 131233 - DNA, 25 bp, Saccharomyces pastorianus
ctcgtctcacgaacatattccggaa

SEQ ID NO: 131234 - DNA, 25 bp, Saccharomyces pastorianus
ctcacgtctattttgcttcctaaag

SEQ ID NO: 131235 - DNA, 25 bp, Saccharomyces pastorianus
gaatttgacggcatacacccaagag

SEQ ID NO: 131236 - DNA, 25 bp, Saccharomyces pastorianus
ttcccatagcggcagcgtgaacgaa

SEQ ID NO: 131237 - DNA, 25 bp, Saccharomyces pastorianus
aggagtttcttctgtcacagacgct

SEQ ID NO: 131238 - DNA, 25 bp, Saccharomyces pastorianus
gaaccggatccattcagtaccattg

SEQ ID NO: 131239 - DNA, 25 bp, Saccharomyces pastorianus
ggttttgccgattcaagattcacac

SEQ ID NO: 131240 - DNA, 25 bp, Saccharomyces pastorianus
agtttttggcctcattttcgctaga

SEQ ID NO: 131241 - DNA, 25 bp, Saccharomyces pastorianus
attgaagccagggtgcatccagaac

SEQ ID NO: 131242 - DNA, 25 bp, Saccharomyces pastorianus
gaacctcttcctaaagtggatccaa

SEQ ID NO: 131243 - DNA, 25 bp, Saccharomyces pastorianus
tagggttgttcccattccggagcaa

SEQ ID NO: 131244 - DNA, 25 bp, Saccharomyces pastorianus
aaattcgtaccggtgatggctccag

SEQ ID NO: 131245 - DNA, 25 bp, Saccharomyces pastorianus
attttcgctagatccaaaggtccct

SEQ ID NO: 131246 - DNA, 25 bp, Saccharomyces pastorianus
tgatggctccagactagttcgtaga

SEQ ID NO: 131247 - DNA, 25 bp, Saccharomyces pastorianus
gatgatttgccccatatcgcgatac

SEQ ID NO: 131248 - DNA, 25 bp, Saccharomyces pastorianus
taaacatgaccatagcggacgccgg

SEQ ID NO: 131249 - DNA, 25 bp, Saccharomyces pastorianus
tatccgtgggtgaaatttgcctcaa

SEQ ID NO: 131250 - DNA, 25 bp, Saccharomyces pastorianus
aatacgcggactatgttccaaaaag

SEQ ID NO: 131251 - DNA, 25 bp, Saccharomyces pastorianus
aatgcaataccaggcaatatctagt

SEQ ID NO: 131252 - DNA, 25 bp, Saccharomyces pastorianus
ataactcatatccatctggcaagga

SEQ ID NO: 131253 - DNA, 25 bp, Saccharomyces pastorianus
ttgccagcagtttggcacctgtcta

SEQ ID NO: 131254 - DNA, 25 bp, Saccharomyces pastorianus
atgtatcgacaattaccgtgtttta

SEQ ID NO: 131255 - DNA, 25 bp, Saccharomyces pastorianus
cttccaacttaatctttgccagcag

SEQ ID NO: 131256 - DNA, 25 bp, Saccharomyces pastorianus
ggagctgttgatgaactcacaatat

SEQ ID NO: 131257 - DNA, 25 bp, Saccharomyces pastorianus
ggagacaaacagttcctacgtcaaa

SEQ ID NO: 131258 - DNA, 25 bp, Saccharomyces pastorianus
gacgaaaggagatgcttccaactta

SEQ ID NO: 131259 - DNA, 25 bp, Saccharomyces pastorianus
tgtctacccgttgaaatcattgtta

SEQ ID NO: 131260 - DNA, 25 bp, Saccharomyces pastorianus
tcacaggagggagctggccttacaa

SEQ ID NO: 131261 - DNA, 25 bp, Saccharomyces pastorianus
tcagacgttgattagaagactccat

SEQ ID NO: 131262 - DNA, 25 bp, Saccharomyces pastorianus
acatcattctgtggctaattcttat

SEQ ID NO: 131263 - DNA, 25 bp, Saccharomyces pastorianus
tattccccgacttaaaggttcacat

SEQ ID NO: 131264 - DNA, 25 bp, Saccharomyces pastorianus
acgtgattgttgcatctgttcagac

SEQ ID NO: 131265 - DNA, 25 bp, Saccharomyces pastorianus
agcactgcagatgacttccagctgg

SEQ ID NO: 131266 - DNA, 25 bp, Saccharomyces pastorianus
gaggcaaaattcacgtcagtcaaaa

SEQ ID NO: 131267 - DNA, 25 bp, Saccharomyces pastorianus
ttaaatcgttgatcctggttcacag

SEQ ID NO: 131268 - DNA, 25 bp, Saccharomyces pastorianus
attggtgtatcattagccactggtg

SEQ ID NO: 131269 - DNA, 25 bp, Saccharomyces pastorianus
attggctttagtgcgactttcgaaa

SEQ ID NO: 131270 - DNA, 25 bp, Saccharomyces pastorianus
aaatccctgttattggctttagtgc

SEQ ID NO: 131271 - DNA, 25 bp, Saccharomyces pastorianus
ttgacgtattaccaccaatgcctac

SEQ ID NO: 131272 - DNA, 25 bp, Saccharomyces pastorianus
gaggagtcttctgtaatggctgcaa

SEQ ID NO: 131273 - DNA, 25 bp, Saccharomyces pastorianus
taacaacttgcaatcacctttcttt

SEQ ID NO: 131274 - DNA, 25 bp, Saccharomyces pastorianus
gcaattccatcatttatctggtctg

SEQ ID NO: 131275 - DNA, 25 bp, Saccharomyces pastorianus
aatgagatgagttccgcccgcaatg

SEQ ID NO: 131276 - DNA, 25 bp, Saccharomyces pastorianus
agcatcatcctttacaactgtcaga

SEQ ID NO: 131277 - DNA, 25 bp, Saccharomyces pastorianus
taaaggcatatatggcccgcttccc

SEQ ID NO: 131278 - DNA, 25 bp, Saccharomyces pastorianus
ttatccattgatggccattcggcag

SEQ ID NO: 131279 - DNA, 25 bp, Saccharomyces pastorianus
ggatttagctgtccttcaggcagaa

SEQ ID NO: 131280 - DNA, 25 bp, Saccharomyces pastorianus
ttcgccatactatctgaggagtctt

SEQ ID NO: 131281 - DNA, 25 bp, Saccharomyces pastorianus
aaactcttgggcgatcatgcgctaa

SEQ ID NO: 131282 - DNA, 25 bp, Saccharomyces pastorianus
taccgccgaggctgcaaaagacaag

SEQ ID NO: 131283 - DNA, 25 bp, Saccharomyces pastorianus
agattggcacctaatggccccggaa

SEQ ID NO: 131284 - DNA, 25 bp, Saccharomyces pastorianus
ttgattcgatgacatccacacctgt

SEQ ID NO: 131285 - DNA, 25 bp, Saccharomyces pastorianus
aaagttccccatttcatgtttgagg

SEQ ID NO: 131286 - DNA, 25 bp, Saccharomyces pastorianus
tgagctctctatgaaacttttaagt

SEQ ID NO: 131287 - DNA, 25 bp, Saccharomyces pastorianus
agtgatccgggcttcacaaagttcc

SEQ ID NO: 131288 - DNA, 25 bp, Saccharomyces pastorianus
gaaggtttcttcacggcatctgaac

SEQ ID NO: 131289 - DNA, 25 bp, Saccharomyces pastorianus
gaggaagcatctagccaaccttgga

SEQ ID NO: 131290 - DNA, 25 bp, Saccharomyces pastorianus
ggaatgcacccgcaacatttgaagt

SEQ ID NO: 131291 - DNA, 25 bp, Saccharomyces pastorianus
gacgatatatctccagagtctcttg

SEQ ID NO: 131292 - DNA, 25 bp, Saccharomyces pastorianus
gaggcattcttgcaaattttttcaa

SEQ ID NO: 131293 - DNA, 25 bp, Saccharomyces pastorianus
aatgtggaccatgcaggcgatgaga

SEQ ID NO: 131294 - DNA, 25 bp, Saccharomyces pastorianus
gagacatgctggatgatccgaacat

SEQ ID NO: 131295 - DNA, 25 bp, Saccharomyces pastorianus
ctgttgctaaatgtgctgtgtaata

SEQ ID NO: 131296 - DNA, 25 bp, Saccharomyces pastorianus
gactctgtgcaaagaatatccctct

SEQ ID NO: 131297 - DNA, 25 bp, Saccharomyces pastorianus
aggattctttccatgaggcactata

SEQ ID NO: 131298 - DNA, 25 bp, Saccharomyces pastorianus
agaatatccctctgctagagcgttc

SEQ ID NO: 131299 - DNA, 25 bp, Saccharomyces pastorianus
aaatgctgcttaacctcagtcctta

SEQ ID NO: 131300 - DNA, 25 bp, Saccharomyces pastorianus
gagcgttcctttttgagatatctaa

SEQ ID NO: 131301 - DNA, 25 bp, Saccharomyces pastorianus
gattgggttaaatccaccagtggga

SEQ ID NO: 131302 - DNA, 25 bp, Saccharomyces pastorianus
gtccttaatcaaaacaacacggtgg

SEQ ID NO: 131303 - DNA, 25 bp, Saccharomyces pastorianus
gaggcactatatgttttcactgtga

SEQ ID NO: 131304 - DNA, 25 bp, Saccharomyces pastorianus
cccgacttactactgaactctattg

SEQ ID NO: 131305 - DNA, 25 bp, Saccharomyces pastorianus
taccttttggacgaatcgcccgact

SEQ ID NO: 131306 - DNA, 25 bp, Saccharomyces pastorianus
gctatgtcagaaatggtcctcgcat

SEQ ID NO: 131307 - DNA, 25 bp, Saccharomyces pastorianus
catgcccgcatttttgcctaaatta

SEQ ID NO: 131308 - DNA, 25 bp, Saccharomyces pastorianus
gtgccatatcatcacttggtagtgt

SEQ ID NO: 131309 - DNA, 25 bp, Saccharomyces pastorianus
gactccgtaggacacatcattaggt

SEQ ID NO: 131310 - DNA, 25 bp, Saccharomyces pastorianus
ggacatgaacccagttccaactgac

SEQ ID NO: 131311 - DNA, 25 bp, Saccharomyces pastorianus
atgcaaaccttacgagacttcgccg

SEQ ID NO: 131312 - DNA, 25 bp, Saccharomyces pastorianus
agccctggcgtttcaacacatggat

SEQ ID NO: 131313 - DNA, 25 bp, Saccharomyces pastorianus
aagattttgggaggccggagcttca

SEQ ID NO: 131314 - DNA, 25 bp, Saccharomyces pastorianus
tgaaatcctggacctgctgctatgt

SEQ ID NO: 131315 - DNA, 25 bp, Saccharomyces pastorianus
aaatggctgtagaactcgcacgtaa

SEQ ID NO: 131316 - DNA, 25 bp, Saccharomyces pastorianus
aaactaggattgaatgatgcggcca

SEQ ID NO: 131317 - DNA, 25 bp, Saccharomyces pastorianus
gtccaagcagcttgcatgactgttc

SEQ ID NO: 131318 - DNA, 25 bp, Saccharomyces pastorianus
gtaaggattttgctaacaccagaaa

SEQ ID NO: 131319 - DNA, 25 bp, Saccharomyces pastorianus
gatgcggccataacggatgaattca

SEQ ID NO: 131320 - DNA, 25 bp, Saccharomyces pastorianus
gaattcaatatggacaggcgttaca

SEQ ID NO: 131321 - DNA, 25 bp, Saccharomyces pastorianus
tactggctccagtgaagtccaagca

SEQ ID NO: 131322 - DNA, 25 bp, Saccharomyces pastorianus
ggaactccgagaataaaaatgccat

SEQ ID NO: 131323 - DNA, 25 bp, Saccharomyces pastorianus
gagaggttcccaggcgatactggct

SEQ ID NO: 131324 - DNA, 25 bp, Saccharomyces pastorianus
tggcaaaccatattaaagagcatcg

SEQ ID NO: 131325 - DNA, 25 bp, Saccharomyces pastorianus
gatattagtccagcaaaggcaggca

SEQ ID NO: 131326 - DNA, 25 bp, Saccharomyces pastorianus
ctatgtcctctgtttatgggcaaaa

SEQ ID NO: 131327 - DNA, 25 bp, Saccharomyces pastorianus
aaagagcctttagttctatcgaaag

SEQ ID NO: 131328 - DNA, 25 bp, Saccharomyces pastorianus
gccattgagtctgctaagcgtgaaa

SEQ ID NO: 131329 - DNA, 25 bp, Saccharomyces pastorianus
gacaagttccttgcagccattgagt

SEQ ID NO: 131330 - DNA, 25 bp, Saccharomyces pastorianus
ggacactccctttataacacgtatt

SEQ ID NO: 131331 - DNA, 25 bp, Saccharomyces pastorianus
ggaaggaatgctattctgaatctaa

SEQ ID NO: 131332 - DNA, 25 bp, Saccharomyces pastorianus
aagccactttgaaagcgtcaaccga

SEQ ID NO: 131333 - DNA, 25 bp, Saccharomyces pastorianus
aaaagatcgtttgtatcctctccgg

SEQ ID NO: 131334 - DNA, 25 bp, Saccharomyces pastorianus
atcctctccggttagcaatagtgca

SEQ ID NO: 131335 - DNA, 25 bp, Saccharomyces pastorianus
gataaggttgatccagttctgggcc

SEQ ID NO: 131336 - DNA, 25 bp, Saccharomyces pastorianus
gaatttcactatgtcctctgtttat

SEQ ID NO: 131337 - DNA, 25 bp, Saccharomyces pastorianus
tgcccttggtgggtattgtgcaaaa

SEQ ID NO: 131338 - DNA, 25 bp, Saccharomyces pastorianus
gctgcattgctctatatgatcccat

SEQ ID NO: 131339 - DNA, 25 bp, Saccharomyces pastorianus
tattacgtattatttcccgattggg

SEQ ID NO: 131340 - DNA, 25 bp, Saccharomyces pastorianus
aatttcgactcgcttaatgccgttg

SEQ ID NO: 131341 - DNA, 25 bp, Saccharomyces pastorianus
ggacgtaatctaatcgccaacattt

SEQ ID NO: 131342 - DNA, 25 bp, Saccharomyces pastorianus
aaaagaaccgatttcgcgcacatct

SEQ ID NO: 131343 - DNA, 25 bp, Saccharomyces pastorianus
gggtcaaggcatgcaatctctagga

SEQ ID NO: 131344 - DNA, 25 bp, Saccharomyces pastorianus
tagcagctcagtcggcagtatctac

SEQ ID NO: 131345 - DNA, 25 bp, Saccharomyces pastorianus
tatctatttggaattcccctggctc

SEQ ID NO: 131346 - DNA, 25 bp, Saccharomyces pastorianus
gcacatctcttctcaagttgggttg

SEQ ID NO: 131347 - DNA, 25 bp, Saccharomyces pastorianus
tggctctcatcctaagttggttctt

SEQ ID NO: 131348 - DNA, 25 bp, Saccharomyces pastorianus
gagctttcgccacaagatgttgatt

SEQ ID NO: 131349 - DNA, 25 bp, Saccharomyces pastorianus
gatactcatcggtatgcaactctga

SEQ ID NO: 131350 - DNA, 25 bp, Saccharomyces pastorianus
ggaggatatcgctaggcttcctacc

SEQ ID NO: 131351 - DNA, 25 bp, Saccharomyces pastorianus
gtatctgtgactagccgaggctcag

SEQ ID NO: 131352 - DNA, 25 bp, Saccharomyces pastorianus
taaaggcacctcacatcacagaaga

SEQ ID NO: 131353 - DNA, 25 bp, Saccharomyces pastorianus
gaacgatttctctaccatcaagggt

SEQ ID NO: 131354 - DNA, 25 bp, Saccharomyces pastorianus
gaggcactagcagaattggctcaca

SEQ ID NO: 131355 - DNA, 25 bp, Saccharomyces pastorianus
ggaacctgacctttactatcatgat

SEQ ID NO: 131356 - DNA, 25 bp, Saccharomyces pastorianus
gctcagttcccacaatttaccaaga

SEQ ID NO: 131357 - DNA, 25 bp, Saccharomyces pastorianus
tatcagaaactcctgagctttcgcc

SEQ ID NO: 131358 - DNA, 25 bp, Saccharomyces pastorianus
cgtccatgaaccaaatccgtactta

SEQ ID NO: 131359 - DNA, 25 bp, Saccharomyces pastorianus
ggaataaaaattcgctatcgtctgt

SEQ ID NO: 131360 - DNA, 25 bp, Saccharomyces pastorianus
aaaaattcgctatcgtctgtcaact

SEQ ID NO: 131361 - DNA, 25 bp, Saccharomyces pastorianus
aaattcgctatcgtctgtcaactaa

SEQ ID NO: 131362 - DNA, 25 bp, Saccharomyces pastorianus
attcgctatcgtctgtcaactaata

SEQ ID NO: 131363 - DNA, 25 bp, Saccharomyces pastorianus
aataaaaattcgctatcgtctgtca

SEQ ID NO: 131364 - DNA, 25 bp, Saccharomyces pastorianus
ttcgctatcgtctgtcaactaatag

SEQ ID NO: 131365 - DNA, 25 bp, Saccharomyces pastorianus
aaaattcgctatcgtctgtcaacta

SEQ ID NO: 131366 - DNA, 25 bp, Saccharomyces pastorianus
aattcgctatcgtctgtcaactaat

SEQ ID NO: 131367 - DNA, 25 bp, Saccharomyces pastorianus
aaatctatattttcttgattaggaa

SEQ ID NO: 131368 - DNA, 25 bp, Saccharomyces pastorianus
ataaaaattcgctatcgtctgtcaa

SEQ ID NO: 131369 - DNA, 25 bp, Saccharomyces pastorianus
aaatcatggaaagaagtgttggaat

SEQ ID NO: 131370 - DNA, 25 bp, Saccharomyces pastorianus
gctaggccaataccccgatgttttg

SEQ ID NO: 131371 - DNA, 25 bp, Saccharomyces pastorianus
aatgcaatcaaaacccacgagccaa

SEQ ID NO: 131372 - DNA, 25 bp, Saccharomyces pastorianus
ttcaaattgactcaccaggtttctt

SEQ ID NO: 131373 - DNA, 25 bp, Saccharomyces pastorianus
agcttgtcaactttggtatggtcca

SEQ ID NO: 131374 - DNA, 25 bp, Saccharomyces pastorianus
aaggtactgttgtcttcttagataa

SEQ ID NO: 131375 - DNA, 25 bp, Saccharomyces pastorianus
actgttgattagactgctaggccaa

SEQ ID NO: 131376 - DNA, 25 bp, Saccharomyces pastorianus
gtgacactggtccataccttcaata

SEQ ID NO: 131377 - DNA, 25 bp, Saccharomyces pastorianus
gtctggctctatatggtgctgcaag

SEQ ID NO: 131378 - DNA, 25 bp, Saccharomyces pastorianus
gaacctgccgcaaaactgttgatta

SEQ ID NO: 131379 - DNA, 25 bp, Saccharomyces pastorianus
gagccaacaaccgtggtcacatatt

SEQ ID NO: 131380 - DNA, 25 bp, Saccharomyces pastorianus
gaaatgcttctggtatcacccaaga

SEQ ID NO: 131381 - DNA, 25 bp, Saccharomyces pastorianus
tgtggagggtccgttgaacaaccta

SEQ ID NO: 131382 - DNA, 25 bp, Saccharomyces pastorianus
ttgttaaaaacatcgtctctggtgt

SEQ ID NO: 131383 - DNA, 25 bp, Saccharomyces pastorianus
gttgctggtactaagccatttatat

SEQ ID NO: 131384 - DNA, 25 bp, Saccharomyces pastorianus
cattccgaaaagtatccgcggtgtt

SEQ ID NO: 131385 - DNA, 25 bp, Saccharomyces pastorianus
gatgggcgaaattccaagttttgtt

SEQ ID NO: 131386 - DNA, 25 bp, Saccharomyces pastorianus
atgctgatccaaaaagctcaacttt

SEQ ID NO: 131387 - DNA, 25 bp, Saccharomyces pastorianus
tatgccaacactaaaatttctgctg

SEQ ID NO: 131388 - DNA, 25 bp, Saccharomyces pastorianus
aacaatcttgttgagcacttaaact

SEQ ID NO: 131389 - DNA, 25 bp, Saccharomyces pastorianus
cgcggtgttgatggagttcactaca

SEQ ID NO: 131390 - DNA, 25 bp, Saccharomyces pastorianus
ggaccgaagtaacattcatttctga

SEQ ID NO: 131391 - DNA, 25 bp, Saccharomyces pastorianus
gaatgggactgaacaagctttacaa

SEQ ID NO: 131392 - DNA, 25 bp, Saccharomyces pastorianus
gacattaataatggccttccaaggc

SEQ ID NO: 131393 - DNA, 25 bp, Saccharomyces pastorianus
ggccttccaaggcatgaagcctcat

SEQ ID NO: 131394 - DNA, 25 bp, Saccharomyces pastorianus
aagaagttattccagaatctgatga

SEQ ID NO: 131395 - DNA, 25 bp, Saccharomyces pastorianus
atgaagcctcatcacgcagctaagg

SEQ ID NO: 131396 - DNA, 25 bp, Saccharomyces pastorianus
agaggaagaccctgcgatttcgaca

SEQ ID NO: 131397 - DNA, 25 bp, Saccharomyces pastorianus
agaccctgcgatttcgacattaata

SEQ ID NO: 131398 - DNA, 25 bp, Saccharomyces pastorianus
gatcgtacgattacttttaaagagg

SEQ ID NO: 131399 - DNA, 25 bp, Saccharomyces pastorianus
gaaatcacctatgaagatcgtacga

SEQ ID NO: 131400 - DNA, 25 bp, Saccharomyces pastorianus
gaagaagtcgaaatcacctatgaag

SEQ ID NO: 131401 - DNA, 25 bp, Saccharomyces pastorianus
atgaagaagaatcctcagctgatga

SEQ ID NO: 131402 - DNA, 25 bp, Saccharomyces pastorianus
atgaagagtctggtgattctgagga

SEQ ID NO: 131403 - DNA, 25 bp, Saccharomyces pastorianus
ccttcaacttctctacatctggagt

SEQ ID NO: 131404 - DNA, 25 bp, Saccharomyces pastorianus
gcaagacggcagctcgacaaacgtg

SEQ ID NO: 131405 - DNA, 25 bp, Saccharomyces pastorianus
aatacgtacaatgcgggaactccct

SEQ ID NO: 131406 - DNA, 25 bp, Saccharomyces pastorianus
gcagctctaatttcttcatttgggt

SEQ ID NO: 131407 - DNA, 25 bp, Saccharomyces pastorianus
agaggcgctacttcagacccctgat

SEQ ID NO: 131408 - DNA, 25 bp, Saccharomyces pastorianus
gacaaacgtgccatgcgcaacgaaa

SEQ ID NO: 131409 - DNA, 25 bp, Saccharomyces pastorianus
aagattctgagatgactgccaagca

SEQ ID NO: 131410 - DNA, 25 bp, Saccharomyces pastorianus
attgaccactggcaacgaacgtttg

SEQ ID NO: 131411 - DNA, 25 bp, Saccharomyces pastorianus
acgaacgtttgcaagcagctctaat

SEQ ID NO: 131412 - DNA, 25 bp, Saccharomyces pastorianus
aatcttgctatatcaggcgacgggt

SEQ ID NO: 131413 - DNA, 25 bp, Saccharomyces pastorianus
gaggtttcatatatcccgcttttag

SEQ ID NO: 131414 - DNA, 25 bp, Saccharomyces pastorianus
tttactggtgctcgcgctattagaa

SEQ ID NO: 131415 - DNA, 25 bp, Saccharomyces pastorianus
ggctgttttctactgaaggattaca

SEQ ID NO: 131416 - DNA, 25 bp, Saccharomyces pastorianus
acctgaaagaaggtgctcctctgaa

SEQ ID NO: 131417 - DNA, 25 bp, Saccharomyces pastorianus
aaagggctgttttctactgaaggat

SEQ ID NO: 131418 - DNA, 25 bp, Saccharomyces pastorianus
agtactctactaggtatgcactcga

SEQ ID NO: 131419 - DNA, 25 bp, Saccharomyces pastorianus
atgcttcgctttactggtgctcgcg

SEQ ID NO: 131420 - DNA, 25 bp, Saccharomyces pastorianus
aaggtgctcctctgaaagggctgtt

SEQ ID NO: 131421 - DNA, 25 bp, Saccharomyces pastorianus
gctcctctgaaagggctgttttcta

SEQ ID NO: 131422 - DNA, 25 bp, Saccharomyces pastorianus
tactaggtatgcactcgagcacctg

SEQ ID NO: 131423 - DNA, 25 bp, Saccharomyces pastorianus
ggtatgcactcgagcacctgaaaga

SEQ ID NO: 131424 - DNA, 25 bp, Saccharomyces pastorianus
tgctcgcgctattagaaagtactct

SEQ ID NO: 131425 - DNA, 25 bp, Saccharomyces pastorianus
ttcatgggccagttactgcgggatt

SEQ ID NO: 131426 - DNA, 25 bp, Saccharomyces pastorianus
tttcgacggccaagatgatcacaat

SEQ ID NO: 131427 - DNA, 25 bp, Saccharomyces pastorianus
tatactactgatttcgacggccaag

SEQ ID NO: 131428 - DNA, 25 bp, Saccharomyces pastorianus
agatgtttatttgggtgtgcgctac

SEQ ID NO: 131429 - DNA, 25 bp, Saccharomyces pastorianus
aaaagcccattcctatcataatcgt

SEQ ID NO: 131430 - DNA, 25 bp, Saccharomyces pastorianus
tcctcagctgccattagaaacgaca

SEQ ID NO: 131431 - DNA, 25 bp, Saccharomyces pastorianus
ctgcgggattaggttctagtacatt

SEQ ID NO: 131432 - DNA, 25 bp, Saccharomyces pastorianus
gaggatccggtgatagcaatgcccc

SEQ ID NO: 131433 - DNA, 25 bp, Saccharomyces pastorianus
gggtgtgcgctacaatgagcccaat

SEQ ID NO: 131434 - DNA, 25 bp, Saccharomyces pastorianus
tcaacgattaggtctcggaggatcc

SEQ ID NO: 131435 - DNA, 25 bp, Saccharomyces pastorianus
ataagtcactttctcaacgattagg

SEQ ID NO: 131436 - DNA, 25 bp, Saccharomyces pastorianus
aagaatcctttcctagacgatgtga

SEQ ID NO: 131437 - DNA, 25 bp, Saccharomyces pastorianus
ataacccgtttagaaatgccacagt

SEQ ID NO: 131438 - DNA, 25 bp, Saccharomyces pastorianus
gaggatgaaccccagcgaaacgcag

SEQ ID NO: 131439 - DNA, 25 bp, Saccharomyces pastorianus
cagcagggtgctttttattctggtt

SEQ ID NO: 131440 - DNA, 25 bp, Saccharomyces pastorianus
taggccattttctgttaataacccg

SEQ ID NO: 131441 - DNA, 25 bp, Saccharomyces pastorianus
aacagtagtacctctagtaggccat

SEQ ID NO: 131442 - DNA, 25 bp, Saccharomyces pastorianus
gagacctctttcctcaaagaatcct

SEQ ID NO: 131443 - DNA, 25 bp, Saccharomyces pastorianus
gacgatgtgagttctgcaaccgatt

SEQ ID NO: 131444 - DNA, 25 bp, Saccharomyces pastorianus
attatcattcccaaacattccagag

SEQ ID NO: 131445 - DNA, 25 bp, Saccharomyces pastorianus
aaaccaatctcgtaccaattcattt

SEQ ID NO: 131446 - DNA, 25 bp, Saccharomyces pastorianus
ggtagtttatcaccaccttcgagac

SEQ ID NO: 131447 - DNA, 25 bp, Saccharomyces pastorianus
gataagcatttttgtattccactgt

SEQ ID NO: 131448 - DNA, 25 bp, Saccharomyces pastorianus
aactgatcaatcttttgggactttg

SEQ ID NO: 131449 - DNA, 25 bp, Saccharomyces pastorianus
gtaattatcgttcataatggccaaa

SEQ ID NO: 131450 - DNA, 25 bp, Saccharomyces pastorianus
gtattgttaaactaccacttcggat

SEQ ID NO: 131451 - DNA, 25 bp, Saccharomyces pastorianus
aatcccagaggaattgttgcccatc

SEQ ID NO: 131452 - DNA, 25 bp, Saccharomyces pastorianus
tattccactgtatacggaggatagt

SEQ ID NO: 131453 - DNA, 25 bp, Saccharomyces pastorianus
gatacagatgacgtgcttcagtgaa

SEQ ID NO: 131454 - DNA, 25 bp, Saccharomyces pastorianus
gacttgatgctattactgcaactga

SEQ ID NO: 131455 - DNA, 25 bp, Saccharomyces pastorianus
ggtgatgagatgctattctaccatt

SEQ ID NO: 131456 - DNA, 25 bp, Saccharomyces pastorianus
gaattgttgcccatcttttacgaaa

SEQ ID NO: 131457 - DNA, 25 bp, Saccharomyces pastorianus
acatgggaaatggtcaacttgatac

SEQ ID NO: 131458 - DNA, 25 bp, Saccharomyces pastorianus
agatattttcttcatcgcactcaaa

SEQ ID NO: 131459 - DNA, 25 bp, Saccharomyces pastorianus
aataataatccacacgtacccacag

SEQ ID NO: 131460 - DNA, 25 bp, Saccharomyces pastorianus
ttccgttgtctaaatcccgatcagg

SEQ ID NO: 131461 - DNA, 25 bp, Saccharomyces pastorianus
atattggaacaagacgccctagctc

SEQ ID NO: 131462 - DNA, 25 bp, Saccharomyces pastorianus
gcattccatctcgtcaaaattcggt

SEQ ID NO: 131463 - DNA, 25 bp, Saccharomyces pastorianus
aattcggtgtcaactcctaaactct

SEQ ID NO: 131464 - DNA, 25 bp, Saccharomyces pastorianus
agtagggctgcctggatcgagcaat

SEQ ID NO: 131465 - DNA, 25 bp, Saccharomyces pastorianus
agccgaccgggatcaagactacaga

SEQ ID NO: 131466 - DNA, 25 bp, Saccharomyces pastorianus
agtagcactacaggttcgaacggaa

SEQ ID NO: 131467 - DNA, 25 bp, Saccharomyces pastorianus
gatggaggataactgcttcttcaaa

SEQ ID NO: 131468 - DNA, 25 bp, Saccharomyces pastorianus
gcaaaagttgcagccttccgttgtc

SEQ ID NO: 131469 - DNA, 25 bp, Saccharomyces pastorianus
catcgtgaatgagttgccctttata

SEQ ID NO: 131470 - DNA, 25 bp, Saccharomyces pastorianus
aaagtctacagacggcttatctccc

SEQ ID NO: 131471 - DNA, 25 bp, Saccharomyces pastorianus
ttttatcttggattggcgcttcctt

SEQ ID NO: 131472 - DNA, 25 bp, Saccharomyces pastorianus
taggcgcacgtatcccacaactaat

SEQ ID NO: 131473 - DNA, 25 bp, Saccharomyces pastorianus
aagaaggtccgccattacagcagcc

SEQ ID NO: 131474 - DNA, 25 bp, Saccharomyces pastorianus
gcatatccgctaaatgtaggctcca

SEQ ID NO: 131475 - DNA, 25 bp, Saccharomyces pastorianus
ttatctcccttcctatttgctacta

SEQ ID NO: 131476 - DNA, 25 bp, Saccharomyces pastorianus
agcagccttggctatagctcatact

SEQ ID NO: 131477 - DNA, 25 bp, Saccharomyces pastorianus
gctactacactactctgcaatatca

SEQ ID NO: 131478 - DNA, 25 bp, Saccharomyces pastorianus
ataagtacagctagcgcatatccgc

SEQ ID NO: 131479 - DNA, 25 bp, Saccharomyces pastorianus
cagccagctgggtacaattttatct

SEQ ID NO: 131480 - DNA, 25 bp, Saccharomyces pastorianus
ggcatctggcctactgtatctaatt

SEQ ID NO: 131481 - DNA, 25 bp, Saccharomyces pastorianus
atgtcgtgctcaaacggcatctggc

SEQ ID NO: 131482 - DNA, 25 bp, Saccharomyces pastorianus
acctctgttatttcattgtttccac

SEQ ID NO: 131483 - DNA, 25 bp, Saccharomyces pastorianus
tatctaatttgtgcggatcattatc

SEQ ID NO: 131484 - DNA, 25 bp, Saccharomyces pastorianus
aaatctgtcgatgggctatcgccat

SEQ ID NO: 131485 - DNA, 25 bp, Saccharomyces pastorianus
ttgtttccacaaataattgagactt

SEQ ID NO: 131486 - DNA, 25 bp, Saccharomyces pastorianus
gggcaaagctaacagggcaattgtt

SEQ ID NO: 131487 - DNA, 25 bp, Saccharomyces pastorianus
attatccttcttcacctctgttatt

SEQ ID NO: 131488 - DNA, 25 bp, Saccharomyces pastorianus
gcctactgtatctaatttgtgcgga

SEQ ID NO: 131489 - DNA, 25 bp, Saccharomyces pastorianus
tgggctatcgccatattttttgctg

SEQ ID NO: 131490 - DNA, 25 bp, Saccharomyces pastorianus
ccatattttttgctggcttggttat

SEQ ID NO: 131491 - DNA, 25 bp, Saccharomyces pastorianus
aaggtgagcacagtctaaacatttc

SEQ ID NO: 131492 - DNA, 25 bp, Saccharomyces pastorianus
gagtgaaatcacttctttacaagag

SEQ ID NO: 131493 - DNA, 25 bp, Saccharomyces pastorianus
gacccgtcgtttaagattggacaca

SEQ ID NO: 131494 - DNA, 25 bp, Saccharomyces pastorianus
tagtgcttgcttgtgtgaggatgaa

SEQ ID NO: 131495 - DNA, 25 bp, Saccharomyces pastorianus
atcatgactatgaatacccgcttag

SEQ ID NO: 131496 - DNA, 25 bp, Saccharomyces pastorianus
gaagaggtccctatttcgaacgccg

SEQ ID NO: 131497 - DNA, 25 bp, Saccharomyces pastorianus
attgctttttacaggagatcagacg

SEQ ID NO: 131498 - DNA, 25 bp, Saccharomyces pastorianus
gatcgtgattactacaatagccatg

SEQ ID NO: 131499 - DNA, 25 bp, Saccharomyces pastorianus
aaacatttcacttccagacgatgat

SEQ ID NO: 131500 - DNA, 25 bp, Saccharomyces pastorianus
ttcgaacgccgcttaagcttcaaaa

SEQ ID NO: 131501 - DNA, 25 bp, Saccharomyces pastorianus
aaacagttgcccttttagtgcttgc

SEQ ID NO: 131502 - DNA, 25 bp, Saccharomyces pastorianus
aatcaaagagactcccagttgggct

SEQ ID NO: 131503 - DNA, 25 bp, Saccharomyces pastorianus
taatggctcagctaactcaattgga

SEQ ID NO: 131504 - DNA, 25 bp, Saccharomyces pastorianus
aaacgcacagtgagtctaaaactat

SEQ ID NO: 131505 - DNA, 25 bp, Saccharomyces pastorianus
agactcccagttgggctcaagggaa

SEQ ID NO: 131506 - DNA, 25 bp, Saccharomyces pastorianus
atggttctcagtcttctgcaaaaga

SEQ ID NO: 131507 - DNA, 25 bp, Saccharomyces pastorianus
gtctgatgagatggatttacaacta

SEQ ID NO: 131508 - DNA, 25 bp, Saccharomyces pastorianus
ggatgaacggataactgatcttcaa

SEQ ID NO: 131509 - DNA, 25 bp, Saccharomyces pastorianus
tgagcttgaaaccaaattcagcgaa

SEQ ID NO: 131510 - DNA, 25 bp, Saccharomyces pastorianus
aagttagcatcattaatggctcagc

SEQ ID NO: 131511 - DNA, 25 bp, Saccharomyces pastorianus
aaaggttgcacaagagaagtactct

SEQ ID NO: 131512 - DNA, 25 bp, Saccharomyces pastorianus
attcagcgaaaatggttctcagtct

SEQ ID NO: 131513 - DNA, 25 bp, Saccharomyces pastorianus
acgagcgctggaggcaaatgttatg

SEQ ID NO: 131514 - DNA, 25 bp, Saccharomyces pastorianus
gcacggcattaatataacatgtaca

SEQ ID NO: 131515 - DNA, 25 bp, Saccharomyces pastorianus
tgcgcacggcattaatataacatgt

SEQ ID NO: 131516 - DNA, 25 bp, Saccharomyces pastorianus
tgaaacgagcgctggaggcaaatgt

SEQ ID NO: 131517 - DNA, 25 bp, Saccharomyces pastorianus
agcgctggaggcaaatgttatgcat

SEQ ID NO: 131518 - DNA, 25 bp, Saccharomyces pastorianus
gcgctggaggcaaatgttatgcatt

SEQ ID NO: 131519 - DNA, 25 bp, Saccharomyces pastorianus
ggaggcaaatgttatgcattttcta

SEQ ID NO: 131520 - DNA, 25 bp, Saccharomyces pastorianus
aaaatggaatgaaacgagcgctgga

SEQ ID NO: 131521 - DNA, 25 bp, Saccharomyces pastorianus
aaacgagcgctggaggcaaatgtta

SEQ ID NO: 131522 - DNA, 25 bp, Saccharomyces pastorianus
atgcgcacggcattaatataacatg

SEQ ID NO: 131523 - DNA, 25 bp, Saccharomyces pastorianus
gcaaatgttatgcattttctaatag

SEQ ID NO: 131524 - DNA, 25 bp, Saccharomyces pastorianus
gttcaagaattgttacaccacccca

SEQ ID NO: 131525 - DNA, 25 bp, Saccharomyces pastorianus
tcgcaaatctgcgtactttatacaa

SEQ ID NO: 131526 - DNA, 25 bp, Saccharomyces pastorianus
gattgtcttaggtatttccattcta

SEQ ID NO: 131527 - DNA, 25 bp, Saccharomyces pastorianus
ggttcaccttggaagacactgctaa

SEQ ID NO: 131528 - DNA, 25 bp, Saccharomyces pastorianus
ggtttaccacgcaatggttcacctt

SEQ ID NO: 131529 - DNA, 25 bp, Saccharomyces pastorianus
aagccaaacttgctggtattttcgc

SEQ ID NO: 131530 - DNA, 25 bp, Saccharomyces pastorianus
ttaatcgtattctcacaagggctgt

SEQ ID NO: 131531 - DNA, 25 bp, Saccharomyces pastorianus
aatcgataccatttccacttgtttt

SEQ ID NO: 131532 - DNA, 25 bp, Saccharomyces pastorianus
tttagcattgttcacgggtcatccg

SEQ ID NO: 131533 - DNA, 25 bp, Saccharomyces pastorianus
ccgctataccttgcagttgagattg

SEQ ID NO: 131534 - DNA, 25 bp, Saccharomyces pastorianus
ggtgtcattgatattcaggttctac

SEQ ID NO: 131535 - DNA, 25 bp, Saccharomyces pastorianus
agatatgtttgctttgacggagatg

SEQ ID NO: 131536 - DNA, 25 bp, Saccharomyces pastorianus
gcaactagtagatcacgtggctctt

SEQ ID NO: 131537 - DNA, 25 bp, Saccharomyces pastorianus
aataacggtgatggcgacgacgacg

SEQ ID NO: 131538 - DNA, 25 bp, Saccharomyces pastorianus
gaacttacggccaaacttgtcagaa

SEQ ID NO: 131539 - DNA, 25 bp, Saccharomyces pastorianus
ttcaggtactgcagccagcgttcaa

SEQ ID NO: 131540 - DNA, 25 bp, Saccharomyces pastorianus
ataatcgtaatctttttgtggtgaa

SEQ ID NO: 131541 - DNA, 25 bp, Saccharomyces pastorianus
ggtacgtccaaaatcaaaggcgcac

SEQ ID NO: 131542 - DNA, 25 bp, Saccharomyces pastorianus
gcagccagcgttcaaccactaaaaa

SEQ ID NO: 131543 - DNA, 25 bp, Saccharomyces pastorianus
tagacacagtagaagcgcaactagt

SEQ ID NO: 131544 - DNA, 25 bp, Saccharomyces pastorianus
gaaatgcagcctttttaatcactag

SEQ ID NO: 131545 - DNA, 25 bp, Saccharomyces pastorianus
ttctttttctcgttgttcaggtact

SEQ ID NO: 131546 - DNA, 25 bp, Saccharomyces pastorianus
aatactcttcttcccacatctaaaa

SEQ ID NO: 131547 - DNA, 25 bp, Saccharomyces pastorianus
gacacaattcaggacgatgctttct

SEQ ID NO: 131548 - DNA, 25 bp, Saccharomyces pastorianus
atttactattaatgcctcggacgtt

SEQ ID NO: 131549 - DNA, 25 bp, Saccharomyces pastorianus
aagtgaaccacgtctatcatctctc

SEQ ID NO: 131550 - DNA, 25 bp, Saccharomyces pastorianus
gaactgggtacaactcctattcgta

SEQ ID NO: 131551 - DNA, 25 bp, Saccharomyces pastorianus
attcctcctcatttgacacaattca

SEQ ID NO: 131552 - DNA, 25 bp, Saccharomyces pastorianus
tgctttctgaatatggtatctccac

SEQ ID NO: 131553 - DNA, 25 bp, Saccharomyces pastorianus
atctctcctgcggacgttcaatata

SEQ ID NO: 131554 - DNA, 25 bp, Saccharomyces pastorianus
tgaagtctggaacattcctcctcat

SEQ ID NO: 131555 - DNA, 25 bp, Saccharomyces pastorianus
gatattcccgctaatctgatgatta

SEQ ID NO: 131556 - DNA, 25 bp, Saccharomyces pastorianus
tgcccttgttagtactatacccatg

SEQ ID NO: 131557 - DNA, 25 bp, Saccharomyces pastorianus
ggatggcgtcacatcttctgaagaa

SEQ ID NO: 131558 - DNA, 25 bp, Saccharomyces pastorianus
tactggaagatattgacgcggcgtt

SEQ ID NO: 131559 - DNA, 25 bp, Saccharomyces pastorianus
gcccagttgcaaggacttttcgtta

SEQ ID NO: 131560 - DNA, 25 bp, Saccharomyces pastorianus
aagatgcaccacacgatgcgttgaa

SEQ ID NO: 131561 - DNA, 25 bp, Saccharomyces pastorianus
gaacggcaaatggtactctgacagg

SEQ ID NO: 131562 - DNA, 25 bp, Saccharomyces pastorianus
gctttatccaggctttagcgggcga

SEQ ID NO: 131563 - DNA, 25 bp, Saccharomyces pastorianus
tagcggtttactgaatgccctggat

SEQ ID NO: 131564 - DNA, 25 bp, Saccharomyces pastorianus
ttggatatcaccgtaagtaccgccc

SEQ ID NO: 131565 - DNA, 25 bp, Saccharomyces pastorianus
gaacaaggttttcattctagcgtaa

SEQ ID NO: 131566 - DNA, 25 bp, Saccharomyces pastorianus
gtaacgcaactccataccaggtaga

SEQ ID NO: 131567 - DNA, 25 bp, Saccharomyces pastorianus
tcccggatctggtaagactagcttt

SEQ ID NO: 131568 - DNA, 25 bp, Saccharomyces pastorianus
ggcggaaacgctccaagaccagtaa

SEQ ID NO: 131569 - DNA, 25 bp, Saccharomyces pastorianus
aaaagctgctatggcaaaatcccaa

SEQ ID NO: 131570 - DNA, 25 bp, Saccharomyces pastorianus
gagacttaacctaatcgttgatcca

SEQ ID NO: 131571 - DNA, 25 bp, Saccharomyces pastorianus
ccgacaggatcaaggctatgccaca

SEQ ID NO: 131572 - DNA, 25 bp, Saccharomyces pastorianus
atttaacggctctccaatcgatgga

SEQ ID NO: 131573 - DNA, 25 bp, Saccharomyces pastorianus
tgatccaaaccaacgcccagtcaaa

SEQ ID NO: 131574 - DNA, 25 bp, Saccharomyces pastorianus
gcccagtcaaaagtttagccgacag

SEQ ID NO: 131575 - DNA, 25 bp, Saccharomyces pastorianus
tccaatcgatggaggcagatcaaga

SEQ ID NO: 131576 - DNA, 25 bp, Saccharomyces pastorianus
gaaaagcctgcaaagaaaagtctag

SEQ ID NO: 131577 - DNA, 25 bp, Saccharomyces pastorianus
gctgttgaaagatttaacggctctc

SEQ ID NO: 131578 - DNA, 25 bp, Saccharomyces pastorianus
aaacggtgaattggccagaagggct

SEQ ID NO: 131579 - DNA, 25 bp, Saccharomyces pastorianus
gtagccaacgtaggagccttccaaa

SEQ ID NO: 131580 - DNA, 25 bp, Saccharomyces pastorianus
gacgaaatcattggctctaacaaag

SEQ ID NO: 131581 - DNA, 25 bp, Saccharomyces pastorianus
aaatactagggcacctccaaacgca

SEQ ID NO: 131582 - DNA, 25 bp, Saccharomyces pastorianus
ggcacctccaaacgcagtcgctaga

SEQ ID NO: 131583 - DNA, 25 bp, Saccharomyces pastorianus
actagagaggtcaaggtcaacgtcg

SEQ ID NO: 131584 - DNA, 25 bp, Saccharomyces pastorianus
gttggtagccaacgtaggagccttc

SEQ ID NO: 131585 - DNA, 25 bp, Saccharomyces pastorianus
gaagaggccctatcagaaaaaatac

SEQ ID NO: 131586 - DNA, 25 bp, Saccharomyces pastorianus
gtggtactcgtggtaacggtccaag

SEQ ID NO: 131587 - DNA, 25 bp, Saccharomyces pastorianus
aagctcttggacaccactagagagg

SEQ ID NO: 131588 - DNA, 25 bp, Saccharomyces pastorianus
aggaagtaatagagcccgtgtcggt

SEQ ID NO: 131589 - DNA, 25 bp, Saccharomyces pastorianus
gagccttccaaacagaagaggccct

SEQ ID NO: 131590 - DNA, 25 bp, Saccharomyces pastorianus
cattggtccactttaggttctgacc

SEQ ID NO: 131591 - DNA, 25 bp, Saccharomyces pastorianus
tttcgaccattggtccactttaggt

SEQ ID NO: 131592 - DNA, 25 bp, Saccharomyces pastorianus
cgaccattggtccactttaggttct

SEQ ID NO: 131593 - DNA, 25 bp, Saccharomyces pastorianus
gttttcgaccattggtccactttag

SEQ ID NO: 131594 - DNA, 25 bp, Saccharomyces pastorianus
ttggtccactttaggttctgaccca

SEQ ID NO: 131595 - DNA, 25 bp, Saccharomyces pastorianus
tccactttaggttctgacccattgg

SEQ ID NO: 131596 - DNA, 25 bp, Saccharomyces pastorianus
ccattggtccactttaggttctgac

SEQ ID NO: 131597 - DNA, 25 bp, Saccharomyces pastorianus
gtccactttaggttctgacccattg

SEQ ID NO: 131598 - DNA, 25 bp, Saccharomyces pastorianus
accattggtccactttaggttctga

SEQ ID NO: 131599 - DNA, 25 bp, Saccharomyces pastorianus
gaccattggtccactttaggttctg

SEQ ID NO: 131600 - DNA, 25 bp, Saccharomyces pastorianus
tggtccactttaggttctgacccat

SEQ ID NO: 131601 - DNA, 25 bp, Saccharomyces pastorianus
gcacctggtgcgaagaaaattacta

SEQ ID NO: 131602 - DNA, 25 bp, Saccharomyces pastorianus
ccgcgctttgggtcattttagtgta

SEQ ID NO: 131603 - DNA, 25 bp, Saccharomyces pastorianus
atgtactgggagatgcacctggtgc

SEQ ID NO: 131604 - DNA, 25 bp, Saccharomyces pastorianus
ggcatataaaacgtgctcctcggaa

SEQ ID NO: 131605 - DNA, 25 bp, Saccharomyces pastorianus
gaatgaggccctaaagaccgcgctt

SEQ ID NO: 131606 - DNA, 25 bp, Saccharomyces pastorianus
tagttatatttccaagtgaccttaa

SEQ ID NO: 131607 - DNA, 25 bp, Saccharomyces pastorianus
agagaaatctggctgtgaacacaaa

SEQ ID NO: 131608 - DNA, 25 bp, Saccharomyces pastorianus
gacggttggtgagctaactatacat

SEQ ID NO: 131609 - DNA, 25 bp, Saccharomyces pastorianus
gcgttgcatactgtaatttctcatc

SEQ ID NO: 131610 - DNA, 25 bp, Saccharomyces pastorianus
aaggcggtattgaatgctgtcataa

SEQ ID NO: 131611 - DNA, 25 bp, Saccharomyces pastorianus
aggtgcttctacagtttcgtcgaga

SEQ ID NO: 131612 - DNA, 25 bp, Saccharomyces pastorianus
cagcatatgcttctgcgatgggcag

SEQ ID NO: 131613 - DNA, 25 bp, Saccharomyces pastorianus
ttctttgcagtgtaggtttcggtca

SEQ ID NO: 131614 - DNA, 25 bp, Saccharomyces pastorianus
gtgcctggtttttcgtatatttttg

SEQ ID NO: 131615 - DNA, 25 bp, Saccharomyces pastorianus
gggcatcatgtatagcctgcacaaa

SEQ ID NO: 131616 - DNA, 25 bp, Saccharomyces pastorianus
gatgggcagcgttccatggacttgt

SEQ ID NO: 131617 - DNA, 25 bp, Saccharomyces pastorianus
atattcacttttttcgccatgtaca

SEQ ID NO: 131618 - DNA, 25 bp, Saccharomyces pastorianus
ttgtgtggaatttctccccttgaac

SEQ ID NO: 131619 - DNA, 25 bp, Saccharomyces pastorianus
catgtacaccatggactctttggga

SEQ ID NO: 131620 - DNA, 25 bp, Saccharomyces pastorianus
tgcctccaattttgattgcctcaac

SEQ ID NO: 131621 - DNA, 25 bp, Saccharomyces pastorianus
atctgagcactattaacaccattgg

SEQ ID NO: 131622 - DNA, 25 bp, Saccharomyces pastorianus
gcaaatcactggctttaatgctttt

SEQ ID NO: 131623 - DNA, 25 bp, Saccharomyces pastorianus
gattgcgtcccttatgacagagatt

SEQ ID NO: 131624 - DNA, 25 bp, Saccharomyces pastorianus
gttcaatttttatcctagctgcaat

SEQ ID NO: 131625 - DNA, 25 bp, Saccharomyces pastorianus
gtgggcttttattcggctatgatac

SEQ ID NO: 131626 - DNA, 25 bp, Saccharomyces pastorianus
gatatttgttcgcactttctgctat

SEQ ID NO: 131627 - DNA, 25 bp, Saccharomyces pastorianus
gcgtccctctatctctgagtgaaat

SEQ ID NO: 131628 - DNA, 25 bp, Saccharomyces pastorianus
tttttggctctattctggcatttcc

SEQ ID NO: 131629 - DNA, 25 bp, Saccharomyces pastorianus
tgataacttccagtacaagcgtcgg

SEQ ID NO: 131630 - DNA, 25 bp, Saccharomyces pastorianus
ggatcgctgttggagtgtctgccca

SEQ ID NO: 131631 - DNA, 25 bp, Saccharomyces pastorianus
gaagaattactctcgcaatctgctg

SEQ ID NO: 131632 - DNA, 25 bp, Saccharomyces pastorianus
caagcgtcggatcattttttggctc

SEQ ID NO: 131633 - DNA, 25 bp, Saccharomyces pastorianus
attggtttcctatgtgattgcgtcc

SEQ ID NO: 131634 - DNA, 25 bp, Saccharomyces pastorianus
gtaccaattcgtcctttaacactag

SEQ ID NO: 131635 - DNA, 25 bp, Saccharomyces pastorianus
agtctccatttagcgtacactcagg

SEQ ID NO: 131636 - DNA, 25 bp, Saccharomyces pastorianus
gacctatttcaatgatcctgaccag

SEQ ID NO: 131637 - DNA, 25 bp, Saccharomyces pastorianus
atgttgatccatacggtcagtctcc

SEQ ID NO: 131638 - DNA, 25 bp, Saccharomyces pastorianus
tcaaaatcgtttggttctactccgg

SEQ ID NO: 131639 - DNA, 25 bp, Saccharomyces pastorianus
agcattatctgccaattcctcgaat

SEQ ID NO: 131640 - DNA, 25 bp, Saccharomyces pastorianus
accggagaactcatcagacctacag

SEQ ID NO: 131641 - DNA, 25 bp, Saccharomyces pastorianus
tacactcaggttctttgcccaaaca

SEQ ID NO: 131642 - DNA, 25 bp, Saccharomyces pastorianus
gacaatggcgacttaactgctactg

SEQ ID NO: 131643 - DNA, 25 bp, Saccharomyces pastorianus
gacgttatcgccaatatctacttcg

SEQ ID NO: 131644 - DNA, 25 bp, Saccharomyces pastorianus
gttcctccggatgttattgctagta

SEQ ID NO: 131645 - DNA, 25 bp, Saccharomyces pastorianus
tgtcatcagagagtatcagtgtccc

SEQ ID NO: 131646 - DNA, 25 bp, Saccharomyces pastorianus
ttggtgtcactttagctgaatcgtt

SEQ ID NO: 131647 - DNA, 25 bp, Saccharomyces pastorianus
acgactttaaagaggcctccgctgt

SEQ ID NO: 131648 - DNA, 25 bp, Saccharomyces pastorianus
gctgtcttcgagaccatactcatat

SEQ ID NO: 131649 - DNA, 25 bp, Saccharomyces pastorianus
tcacgtcccaagtttttggaaacag

SEQ ID NO: 131650 - DNA, 25 bp, Saccharomyces pastorianus
gtagcagcaacaacactaatgcggg

SEQ ID NO: 131651 - DNA, 25 bp, Saccharomyces pastorianus
agaaatggcttcactggcagagttt

SEQ ID NO: 131652 - DNA, 25 bp, Saccharomyces pastorianus
aggtcaccaacttcactttccagaa

SEQ ID NO: 131653 - DNA, 25 bp, Saccharomyces pastorianus
catcgccccacgcagagtttaaaaa

SEQ ID NO: 131654 - DNA, 25 bp, Saccharomyces pastorianus
gaaatccttctccaaatccgcaaaa

SEQ ID NO: 131655 - DNA, 25 bp, Saccharomyces pastorianus
actttccagaagtgcccaaccaacg

SEQ ID NO: 131656 - DNA, 25 bp, Saccharomyces pastorianus
tctcttgcatccttggtaaacatca

SEQ ID NO: 131657 - DNA, 25 bp, Saccharomyces pastorianus
gccatttcggaagccatcgaggaca

SEQ ID NO: 131658 - DNA, 25 bp, Saccharomyces pastorianus
gatcattatgaattctatgccggag

SEQ ID NO: 131659 - DNA, 25 bp, Saccharomyces pastorianus
gccggagttgatgatgatttctctt

SEQ ID NO: 131660 - DNA, 25 bp, Saccharomyces pastorianus
taaacatcaaatcctggtccagtat

SEQ ID NO: 131661 - DNA, 25 bp, Saccharomyces pastorianus
tcgttgtccgccatttcggaagcca

SEQ ID NO: 131662 - DNA, 25 bp, Saccharomyces pastorianus
agccatcgaggacaggatcattatg

SEQ ID NO: 131663 - DNA, 25 bp, Saccharomyces pastorianus
aattctatgccggagttgatgatga

SEQ ID NO: 131664 - DNA, 25 bp, Saccharomyces pastorianus
ggtaaacatcaaatcctggtccagt

SEQ ID NO: 131665 - DNA, 25 bp, Saccharomyces pastorianus
gttttcttagcctcgttgtccgcca

SEQ ID NO: 131666 - DNA, 25 bp, Saccharomyces pastorianus
tgatttctcttgcatccttggtaaa

SEQ ID NO: 131667 - DNA, 25 bp, Saccharomyces pastorianus
tcagctgctggtcaactccatgaga

SEQ ID NO: 131668 - DNA, 25 bp, Saccharomyces pastorianus
atgtagtttctgtgcggtatccacc

SEQ ID NO: 131669 - DNA, 25 bp, Saccharomyces pastorianus
gagtgtcacccctaacttatatgat

SEQ ID NO: 131670 - DNA, 25 bp, Saccharomyces pastorianus
accacctgcggtgactatatggcat

SEQ ID NO: 131671 - DNA, 25 bp, Saccharomyces pastorianus
gaacaggctacttgagtgacccgtc

SEQ ID NO: 131672 - DNA, 25 bp, Saccharomyces pastorianus
gttcacgatggcattatctttctgt

SEQ ID NO: 131673 - DNA, 25 bp, Saccharomyces pastorianus
gtgttatggctacccctaaggctat

SEQ ID NO: 131674 - DNA, 25 bp, Saccharomyces pastorianus
ggttggattttatgcgaacgcctca

SEQ ID NO: 131675 - DNA, 25 bp, Saccharomyces pastorianus
ggccactttcagttctcattattac

SEQ ID NO: 131676 - DNA, 25 bp, Saccharomyces pastorianus
gccttctacgtctacattggttcga

SEQ ID NO: 131677 - DNA, 25 bp, Saccharomyces pastorianus
gttattttctattgccttctacgtc

SEQ ID NO: 131678 - DNA, 25 bp, Saccharomyces pastorianus
gctgcatctttatactaccaattta

SEQ ID NO: 131679 - DNA, 25 bp, Saccharomyces pastorianus
gctgacagaagtttacaggactaca

SEQ ID NO: 131680 - DNA, 25 bp, Saccharomyces pastorianus
gaacataaaccttttgctgcatctt

SEQ ID NO: 131681 - DNA, 25 bp, Saccharomyces pastorianus
cacttttttcaaggctgacagaagt

SEQ ID NO: 131682 - DNA, 25 bp, Saccharomyces pastorianus
gccaaactgtatatttcggcgattt

SEQ ID NO: 131683 - DNA, 25 bp, Saccharomyces pastorianus
aggagctcacaaatgtccacctgat

SEQ ID NO: 131684 - DNA, 25 bp, Saccharomyces pastorianus
tggttctcacgctacgcaagattat

SEQ ID NO: 131685 - DNA, 25 bp, Saccharomyces pastorianus
tgaagggtgcaaaactatgatcgat

SEQ ID NO: 131686 - DNA, 25 bp, Saccharomyces pastorianus
gaaaagaatttaccaggcaggtcaa

SEQ ID NO: 131687 - DNA, 25 bp, Saccharomyces pastorianus
ttagaggttgtaggtgccgctcctg

SEQ ID NO: 131688 - DNA, 25 bp, Saccharomyces pastorianus
tggttaccattcgtttgttccaaca

SEQ ID NO: 131689 - DNA, 25 bp, Saccharomyces pastorianus
acgagtttagcgtttgcatctccaa

SEQ ID NO: 131690 - DNA, 25 bp, Saccharomyces pastorianus
aacagagccgactagtacatgtaga

SEQ ID NO: 131691 - DNA, 25 bp, Saccharomyces pastorianus
gtaacaggttcggtggatttcaata

SEQ ID NO: 131692 - DNA, 25 bp, Saccharomyces pastorianus
ggtctacacgatataccccgggaga

SEQ ID NO: 131693 - DNA, 25 bp, Saccharomyces pastorianus
gtgcagctattgcttgatgagccaa

SEQ ID NO: 131694 - DNA, 25 bp, Saccharomyces pastorianus
gtttgatcacaagatggtctacacg

SEQ ID NO: 131695 - DNA, 25 bp, Saccharomyces pastorianus
tggtgtcgcgaacatatcatttcaa

SEQ ID NO: 131696 - DNA, 25 bp, Saccharomyces pastorianus
gagattattttacggagtgcagcta

SEQ ID NO: 131697 - DNA, 25 bp, Saccharomyces pastorianus
ggacatcgtgattttcgacagcaag

SEQ ID NO: 131698 - DNA, 25 bp, Saccharomyces pastorianus
tggaaattaaccacagaccaatctg

SEQ ID NO: 131699 - DNA, 25 bp, Saccharomyces pastorianus
aagaatctatccaggccgacaattt

SEQ ID NO: 131700 - DNA, 25 bp, Saccharomyces pastorianus
gatagcatggcatcctgactacagg

SEQ ID NO: 131701 - DNA, 25 bp, Saccharomyces pastorianus
aattaccaacgagtctatcacaagt

SEQ ID NO: 131702 - DNA, 25 bp, Saccharomyces pastorianus
tgctcttttggcgactccgaataag

SEQ ID NO: 131703 - DNA, 25 bp, Saccharomyces pastorianus
gcggaagtttatcgccttttgggat

SEQ ID NO: 131704 - DNA, 25 bp, Saccharomyces pastorianus
ttattgggatcccttcattctgagg

SEQ ID NO: 131705 - DNA, 25 bp, Saccharomyces pastorianus
tagtgaccccacttcaaacgaaatc

SEQ ID NO: 131706 - DNA, 25 bp, Saccharomyces pastorianus
atgatccgtctcaatctacttggtt

SEQ ID NO: 131707 - DNA, 25 bp, Saccharomyces pastorianus
gattgctgatggttgctcttttggc

SEQ ID NO: 131708 - DNA, 25 bp, Saccharomyces pastorianus
aaaatatactctactatggcggaag

SEQ ID NO: 131709 - DNA, 25 bp, Saccharomyces pastorianus
gatgttagcagccttgaaagcctag

SEQ ID NO: 131710 - DNA, 25 bp, Saccharomyces pastorianus
gataccatcatagaactcctcaaca

SEQ ID NO: 131711 - DNA, 25 bp, Saccharomyces pastorianus
ctttttgctgaggttctggtggcta

SEQ ID NO: 131712 - DNA, 25 bp, Saccharomyces pastorianus
ggttctggtggctatgggtatattt

SEQ ID NO: 131713 - DNA, 25 bp, Saccharomyces pastorianus
gcgattctctttgactttttgctga

SEQ ID NO: 131714 - DNA, 25 bp, Saccharomyces pastorianus
gcgactacatttttttccaaggcga

SEQ ID NO: 131715 - DNA, 25 bp, Saccharomyces pastorianus
tggctatgggtatatttatcgcaga

SEQ ID NO: 131716 - DNA, 25 bp, Saccharomyces pastorianus
gcagaatctgaaattagttgccgca

SEQ ID NO: 131717 - DNA, 25 bp, Saccharomyces pastorianus
agaggcatatgggtcgttttcaaat

SEQ ID NO: 131718 - DNA, 25 bp, Saccharomyces pastorianus
gtatcattcggcgattctctttgac

SEQ ID NO: 131719 - DNA, 25 bp, Saccharomyces pastorianus
tttccaaggcgaaatgcagtatttc

SEQ ID NO: 131720 - DNA, 25 bp, Saccharomyces pastorianus
gcatatgggtcgttttcaaattgga

SEQ ID NO: 131721 - DNA, 25 bp, Saccharomyces pastorianus
tagttgccgcagatagcgactacat

SEQ ID NO: 131722 - DNA, 25 bp, Saccharomyces pastorianus
gaataccgtttactgcacgaagcaa

SEQ ID NO: 131723 - DNA, 25 bp, Saccharomyces pastorianus
acagttgtaatcttcccattctttt

SEQ ID NO: 131724 - DNA, 25 bp, Saccharomyces pastorianus
tttaatctctgacacgttgacatcg

SEQ ID NO: 131725 - DNA, 25 bp, Saccharomyces pastorianus
gccactgtgttcctttttgagttca

SEQ ID NO: 131726 - DNA, 25 bp, Saccharomyces pastorianus
acattttgatctatccgtagccctt

SEQ ID NO: 131727 - DNA, 25 bp, Saccharomyces pastorianus
attattataccgttccactttgcca

SEQ ID NO: 131728 - DNA, 25 bp, Saccharomyces pastorianus
cattcttttttgcacctggagatca

SEQ ID NO: 131729 - DNA, 25 bp, Saccharomyces pastorianus
gtcattggactcgttaacctcttta

SEQ ID NO: 131730 - DNA, 25 bp, Saccharomyces pastorianus
gatgtttgttgatagaatcctcccc

SEQ ID NO: 131731 - DNA, 25 bp, Saccharomyces pastorianus
agcccttcttcctgtactggtaaga

SEQ ID NO: 131732 - DNA, 25 bp, Saccharomyces pastorianus
agacttcacattgtttacctctcta

SEQ ID NO: 131733 - DNA, 25 bp, Saccharomyces pastorianus
aagcttcttccttcatccagaaata

SEQ ID NO: 131734 - DNA, 25 bp, Saccharomyces pastorianus
tgcctatggtgcaaagcttcttcct

SEQ ID NO: 131735 - DNA, 25 bp, Saccharomyces pastorianus
gttagtgtgagcacgcacctcgaaa

SEQ ID NO: 131736 - DNA, 25 bp, Saccharomyces pastorianus
aactcgcatactcttaaccaatcaa

SEQ ID NO: 131737 - DNA, 25 bp, Saccharomyces pastorianus
aggccgaatctactttgggaccatc

SEQ ID NO: 131738 - DNA, 25 bp, Saccharomyces pastorianus
aacattaacttcgtggcggcagcaa

SEQ ID NO: 131739 - DNA, 25 bp, Saccharomyces pastorianus
ttgattcagctagcgttagccatga

SEQ ID NO: 131740 - DNA, 25 bp, Saccharomyces pastorianus
aaccaatcaacctcttcatattcga

SEQ ID NO: 131741 - DNA, 25 bp, Saccharomyces pastorianus
gaatgtgtatttccaaggccgaatc

SEQ ID NO: 131742 - DNA, 25 bp, Saccharomyces pastorianus
gttggaatccaacatgctcattgat

SEQ ID NO: 131743 - DNA, 25 bp, Saccharomyces pastorianus
gagcacgtgaaatccttgcctatgg

SEQ ID NO: 131744 - DNA, 25 bp, Saccharomyces pastorianus
ggcatatatcccgacaaatggcttt

SEQ ID NO: 131745 - DNA, 25 bp, Saccharomyces pastorianus
gatacttaaaagtggctcctcagca

SEQ ID NO: 131746 - DNA, 25 bp, Saccharomyces pastorianus
ggtgatatttggtcgtcacatattt

SEQ ID NO: 131747 - DNA, 25 bp, Saccharomyces pastorianus
ttaacgcaactggattcaactcaag

SEQ ID NO: 131748 - DNA, 25 bp, Saccharomyces pastorianus
gaatcgctggcaactcttgcattaa

SEQ ID NO: 131749 - DNA, 25 bp, Saccharomyces pastorianus
aaggcatgccttagcttcatcttta

SEQ ID NO: 131750 - DNA, 25 bp, Saccharomyces pastorianus
ggaaagtttgggatcctgtcataaa

SEQ ID NO: 131751 - DNA, 25 bp, Saccharomyces pastorianus
gtgggaagtatctacctagttcaga

SEQ ID NO: 131752 - DNA, 25 bp, Saccharomyces pastorianus
atttcaattatttggccagcctaga

SEQ ID NO: 131753 - DNA, 25 bp, Saccharomyces pastorianus
aaatggcttttgttgatcctatcac

SEQ ID NO: 131754 - DNA, 25 bp, Saccharomyces pastorianus
gttgatcctatcacttgccaaatat

SEQ ID NO: 131755 - DNA, 25 bp, Saccharomyces pastorianus
gagattctgatgacgtgcatcccca

SEQ ID NO: 131756 - DNA, 25 bp, Saccharomyces pastorianus
atttgatggccgaggtcaagcctga

SEQ ID NO: 131757 - DNA, 25 bp, Saccharomyces pastorianus
ttgcccatatacctgaattcatcct

SEQ ID NO: 131758 - DNA, 25 bp, Saccharomyces pastorianus
gtgacggctctacgatttctgtaaa

SEQ ID NO: 131759 - DNA, 25 bp, Saccharomyces pastorianus
aaggccaagtacaccgttttcagat

SEQ ID NO: 131760 - DNA, 25 bp, Saccharomyces pastorianus
cagaggcttaagtaggtccagttca

SEQ ID NO: 131761 - DNA, 25 bp, Saccharomyces pastorianus
agtagatacccagttcctgacttgc

SEQ ID NO: 131762 - DNA, 25 bp, Saccharomyces pastorianus
atgcgtgactcatttgtacgtctga

SEQ ID NO: 131763 - DNA, 25 bp, Saccharomyces pastorianus
gaacctcccagctttacacatagag

SEQ ID NO: 131764 - DNA, 25 bp, Saccharomyces pastorianus
aatcagcgtagcttgcactactaga

SEQ ID NO: 131765 - DNA, 25 bp, Saccharomyces pastorianus
tataccccacgtgaatttgaaccat

SEQ ID NO: 131766 - DNA, 25 bp, Saccharomyces pastorianus
aggtcttcatcggtgcattcagcat

SEQ ID NO: 131767 - DNA, 25 bp, Saccharomyces pastorianus
gatctggatgatctgtctactttga

SEQ ID NO: 131768 - DNA, 25 bp, Saccharomyces pastorianus
aaccacaccatgaaaggcatcgctc

SEQ ID NO: 131769 - DNA, 25 bp, Saccharomyces pastorianus
gaaaccatctatccatgcataccaa

SEQ ID NO: 131770 - DNA, 25 bp, Saccharomyces pastorianus
gacggattccattgatattcctgta

SEQ ID NO: 131771 - DNA, 25 bp, Saccharomyces pastorianus
tagaaagttcagctactgcttcccc

SEQ ID NO: 131772 - DNA, 25 bp, Saccharomyces pastorianus
aaacgcgggaggctccaacgacgat

SEQ ID NO: 131773 - DNA, 25 bp, Saccharomyces pastorianus
atcaatggccactgtcaaacgaact

SEQ ID NO: 131774 - DNA, 25 bp, Saccharomyces pastorianus
ggatatgcaacgtctttcaagggtg

SEQ ID NO: 131775 - DNA, 25 bp, Saccharomyces pastorianus
gtctactttgaattacaccatggtt

SEQ ID NO: 131776 - DNA, 25 bp, Saccharomyces pastorianus
ggcatcgctcaagcatcatagcttt

SEQ ID NO: 131777 - DNA, 25 bp, Saccharomyces pastorianus
caatggtatattgactcactcaaat

SEQ ID NO: 131778 - DNA, 25 bp, Saccharomyces pastorianus
tttgcctgcaggaatttatagactg

SEQ ID NO: 131779 - DNA, 25 bp, Saccharomyces pastorianus
aacagttaaatcctaggatccgcat

SEQ ID NO: 131780 - DNA, 25 bp, Saccharomyces pastorianus
tccgcatggtttatgatgatgtgca

SEQ ID NO: 131781 - DNA, 25 bp, Saccharomyces pastorianus
aagagagcttactttggatgagaat

SEQ ID NO: 131782 - DNA, 25 bp, Saccharomyces pastorianus
tggctgcaaccacggaagtctttat

SEQ ID NO: 131783 - DNA, 25 bp, Saccharomyces pastorianus
ggaatggtttgttccagatcttttt

SEQ ID NO: 131784 - DNA, 25 bp, Saccharomyces pastorianus
aagacgatggtaccgtggctgcaac

SEQ ID NO: 131785 - DNA, 25 bp, Saccharomyces pastorianus
ggaagtctttatagtaagcacggat

SEQ ID NO: 131786 - DNA, 25 bp, Saccharomyces pastorianus
agtaagcacggatattgcttctgct

SEQ ID NO: 131787 - DNA, 25 bp, Saccharomyces pastorianus
tagactgcaattctccatcaatggt

SEQ ID NO: 131788 - DNA, 25 bp, Saccharomyces pastorianus
gtggactatcacctgttctaaattc

SEQ ID NO: 131789 - DNA, 25 bp, Saccharomyces pastorianus
tgacacgttcaacacgctaccgtta

SEQ ID NO: 131790 - DNA, 25 bp, Saccharomyces pastorianus
ttcggctcccaactattgtggtgaa

SEQ ID NO: 131791 - DNA, 25 bp, Saccharomyces pastorianus
taggcacgttagtaggcccaccgat

SEQ ID NO: 131792 - DNA, 25 bp, Saccharomyces pastorianus
ttagtgaaggcctactctgttcttt

SEQ ID NO: 131793 - DNA, 25 bp, Saccharomyces pastorianus
ttgagttgttggacccactggacag

SEQ ID NO: 131794 - DNA, 25 bp, Saccharomyces pastorianus
cgttagcagccatcgtcacaggaaa

SEQ ID NO: 131795 - DNA, 25 bp, Saccharomyces pastorianus
tagttacagtgttttcggctcccaa

SEQ ID NO: 131796 - DNA, 25 bp, Saccharomyces pastorianus
cactggacagtaccgctttgaaaca

SEQ ID NO: 131797 - DNA, 25 bp, Saccharomyces pastorianus
gatgtacccgacttcggcttaatta

SEQ ID NO: 131798 - DNA, 25 bp, Saccharomyces pastorianus
tggtcggatcctacagattcatcga

SEQ ID NO: 131799 - DNA, 25 bp, Saccharomyces pastorianus
ggcgtcgttggcatctaatgttcaa

SEQ ID NO: 131800 - DNA, 25 bp, Saccharomyces pastorianus
gatcgtccactctgggaaacggcaa

SEQ ID NO: 131801 - DNA, 25 bp, Saccharomyces pastorianus
gagagcccctcaatggccaaggtta

SEQ ID NO: 131802 - DNA, 25 bp, Saccharomyces pastorianus
aaatcgtcaaggtcgctgaggtcgc

SEQ ID NO: 131803 - DNA, 25 bp, Saccharomyces pastorianus
tagaggctacaagcgtactccttta

SEQ ID NO: 131804 - DNA, 25 bp, Saccharomyces pastorianus
gtacaagcatgcattccactagctc

SEQ ID NO: 131805 - DNA, 25 bp, Saccharomyces pastorianus
aagactctcttcctcttcgagaagg

SEQ ID NO: 131806 - DNA, 25 bp, Saccharomyces pastorianus
tagttcttccgcagatagaggctac

SEQ ID NO: 131807 - DNA, 25 bp, Saccharomyces pastorianus
gttactcgcatcaacactagttctt

SEQ ID NO: 131808 - DNA, 25 bp, Saccharomyces pastorianus
aatcggatactacacattcgctgaa

SEQ ID NO: 131809 - DNA, 25 bp, Saccharomyces pastorianus
cactagctctttcaactcttacgaa

SEQ ID NO: 131810 - DNA, 25 bp, Saccharomyces pastorianus
atgttcgctgattttgtatggcgag

SEQ ID NO: 131811 - DNA, 25 bp, Saccharomyces pastorianus
gcgagaggcattttttacgccttgg

SEQ ID NO: 131812 - DNA, 25 bp, Saccharomyces pastorianus
gctgattttgtatggcgagaggcat

SEQ ID NO: 131813 - DNA, 25 bp, Saccharomyces pastorianus
ttgtttcattctttctagttaacca

SEQ ID NO: 131814 - DNA, 25 bp, Saccharomyces pastorianus
tcattctttctagttaaccatcggg

SEQ ID NO: 131815 - DNA, 25 bp, Saccharomyces pastorianus
cattttttacgccttggtatatcat

SEQ ID NO: 131816 - DNA, 25 bp, Saccharomyces pastorianus
tacgccttggtatatcattggtgtt

SEQ ID NO: 131817 - DNA, 25 bp, Saccharomyces pastorianus
ttgtatggcgagaggcattttttac

SEQ ID NO: 131818 - DNA, 25 bp, Saccharomyces pastorianus
accatcggggagaatctgctgttga

SEQ ID NO: 131819 - DNA, 25 bp, Saccharomyces pastorianus
agaggcattttttacgccttggtat

SEQ ID NO: 131820 - DNA, 25 bp, Saccharomyces pastorianus
gccttggtatatcattggtgttatt

SEQ ID NO: 131821 - DNA, 25 bp, Saccharomyces pastorianus
ggttgagtctgctattttgcgtctt

SEQ ID NO: 131822 - DNA, 25 bp, Saccharomyces pastorianus
tttaccttatttcttgccactagtc

SEQ ID NO: 131823 - DNA, 25 bp, Saccharomyces pastorianus
gagttcctacctttactatcttcaa

SEQ ID NO: 131824 - DNA, 25 bp, Saccharomyces pastorianus
gtgtctataccacccttttgaaata

SEQ ID NO: 131825 - DNA, 25 bp, Saccharomyces pastorianus
aattctttcatcgacatcctcattt

SEQ ID NO: 131826 - DNA, 25 bp, Saccharomyces pastorianus
gtttgctctttatttgacgccagat

SEQ ID NO: 131827 - DNA, 25 bp, Saccharomyces pastorianus
gagtgcttcctcctttttggtaggt

SEQ ID NO: 131828 - DNA, 25 bp, Saccharomyces pastorianus
taggtaacactttagcactgctggg

SEQ ID NO: 131829 - DNA, 25 bp, Saccharomyces pastorianus
gttcgtggcaaatttggcggctaac

SEQ ID NO: 131830 - DNA, 25 bp, Saccharomyces pastorianus
aacgctgctttgtcgtataccacag

SEQ ID NO: 131831 - DNA, 25 bp, Saccharomyces pastorianus
ataccacagtggcttcgtcaacaat

SEQ ID NO: 131832 - DNA, 25 bp, Saccharomyces pastorianus
acatcttgctgtggtgtgtgtggat

SEQ ID NO: 131833 - DNA, 25 bp, Saccharomyces pastorianus
ctggctgctctaaacgtgtggtacg

SEQ ID NO: 131834 - DNA, 25 bp, Saccharomyces pastorianus
acagcatcgctgtgctattaggagt

SEQ ID NO: 131835 - DNA, 25 bp, Saccharomyces pastorianus
gtcaaccttttaaactgtccacatt

SEQ ID NO: 131836 - DNA, 25 bp, Saccharomyces pastorianus
tggaatagtatttcagcacccgttc

SEQ ID NO: 131837 - DNA, 25 bp, Saccharomyces pastorianus
gggacaaattcgcagtcaacctttt

SEQ ID NO: 131838 - DNA, 25 bp, Saccharomyces pastorianus
gtacggtctctctgatggcgaagat

SEQ ID NO: 131839 - DNA, 25 bp, Saccharomyces pastorianus
agaagagtttcgcaacctggctgct

SEQ ID NO: 131840 - DNA, 25 bp, Saccharomyces pastorianus
gatgaacactcttgtgcacaccaga

SEQ ID NO: 131841 - DNA, 25 bp, Saccharomyces pastorianus
aaaaattgctaatacttccgccgct

SEQ ID NO: 131842 - DNA, 25 bp, Saccharomyces pastorianus
aagacactaggtttggaggacgcat

SEQ ID NO: 131843 - DNA, 25 bp, Saccharomyces pastorianus
acagttattttccactttcgataga

SEQ ID NO: 131844 - DNA, 25 bp, Saccharomyces pastorianus
caattttcgccctccaaatggaata

SEQ ID NO: 131845 - DNA, 25 bp, Saccharomyces pastorianus
taccggacattttcattacgcctac

SEQ ID NO: 131846 - DNA, 25 bp, Saccharomyces pastorianus
gaagatgtctgtcatttgcgccaac

SEQ ID NO: 131847 - DNA, 25 bp, Saccharomyces pastorianus
agtggtattcccgaattcacaccgg

SEQ ID NO: 131848 - DNA, 25 bp, Saccharomyces pastorianus
aacacgactctcagccatttattaa

SEQ ID NO: 131849 - DNA, 25 bp, Saccharomyces pastorianus
gcggaccccaatttatcttttgaat

SEQ ID NO: 131850 - DNA, 25 bp, Saccharomyces pastorianus
gtttctattgagacacatgccgcta

SEQ ID NO: 131851 - DNA, 25 bp, Saccharomyces pastorianus
gaagcagccgtacgtttttgtaaag

SEQ ID NO: 131852 - DNA, 25 bp, Saccharomyces pastorianus
acctcggtattccaaagatcgccta

SEQ ID NO: 131853 - DNA, 25 bp, Saccharomyces pastorianus
tgttaccagtaatccgtccgaattt

SEQ ID NO: 131854 - DNA, 25 bp, Saccharomyces pastorianus
agtatggccgctgcatttaatcttc

SEQ ID NO: 131855 - DNA, 25 bp, Saccharomyces pastorianus
gtacagctagaaccacacctttttg

SEQ ID NO: 131856 - DNA, 25 bp, Saccharomyces pastorianus
gaatctttcctttcaaagcatgcgc

SEQ ID NO: 131857 - DNA, 25 bp, Saccharomyces pastorianus
aggactccaggaagttccggcgtat

SEQ ID NO: 131858 - DNA, 25 bp, Saccharomyces pastorianus
acagaacttctcttgacgacgttaa

SEQ ID NO: 131859 - DNA, 25 bp, Saccharomyces pastorianus
tgacttaggacatctcaacggccac

SEQ ID NO: 131860 - DNA, 25 bp, Saccharomyces pastorianus
aaatgggttgctgttgttcctgact

SEQ ID NO: 131861 - DNA, 25 bp, Saccharomyces pastorianus
aataaggatgcatttggcccctgct

SEQ ID NO: 131862 - DNA, 25 bp, Saccharomyces pastorianus
aagcatgcgctttatttagcaccat

SEQ ID NO: 131863 - DNA, 25 bp, Saccharomyces pastorianus
gcttcgtatttaactcccttacttg

SEQ ID NO: 131864 - DNA, 25 bp, Saccharomyces pastorianus
gaaaattctacttccggagatccat

SEQ ID NO: 131865 - DNA, 25 bp, Saccharomyces pastorianus
gaatccaaaagggtccagttagagg

SEQ ID NO: 131866 - DNA, 25 bp, Saccharomyces pastorianus
tttggacttgtctcgttctaacggt

SEQ ID NO: 131867 - DNA, 25 bp, Saccharomyces pastorianus
tgacttggttaaatctttgggtttg

SEQ ID NO: 131868 - DNA, 25 bp, Saccharomyces pastorianus
tggacttgtctcgttctaacggtgt

SEQ ID NO: 131869 - DNA, 25 bp, Saccharomyces pastorianus
tctgacttggttaaatctttgggtt

SEQ ID NO: 131870 - DNA, 25 bp, Saccharomyces pastorianus
ccagaagtctctgctttggacttgt

SEQ ID NO: 131871 - DNA, 25 bp, Saccharomyces pastorianus
ttgtctcgttctaacggtgttttga

SEQ ID NO: 131872 - DNA, 25 bp, Saccharomyces pastorianus
ctgctttggacttgtctcgttctaa

SEQ ID NO: 131873 - DNA, 25 bp, Saccharomyces pastorianus
tccaaaagggtccagttagaggtat

SEQ ID NO: 131874 - DNA, 25 bp, Saccharomyces pastorianus
aagtctctgctttggacttgtctcg

SEQ ID NO: 131875 - DNA, 25 bp, Saccharomyces pastorianus
gacttgtctcgttctaacggtgttt

SEQ ID NO: 131876 - DNA, 25 bp, Saccharomyces pastorianus
attaaacgagttaccagaggcagac

SEQ ID NO: 131877 - DNA, 25 bp, Saccharomyces pastorianus
cgctccgtaaggatctaccagaatt

SEQ ID NO: 131878 - DNA, 25 bp, Saccharomyces pastorianus
gaattacctattcagtgagtcacta

SEQ ID NO: 131879 - DNA, 25 bp, Saccharomyces pastorianus
agaccaacccagcattacgcggtga

SEQ ID NO: 131880 - DNA, 25 bp, Saccharomyces pastorianus
ggttactatgccatctcagattcca

SEQ ID NO: 131881 - DNA, 25 bp, Saccharomyces pastorianus
gatagcacatcggtgaagtcattga

SEQ ID NO: 131882 - DNA, 25 bp, Saccharomyces pastorianus
gaggcagacatcagcgtactaggta

SEQ ID NO: 131883 - DNA, 25 bp, Saccharomyces pastorianus
aatgacatgtatgacctttcgctcc

SEQ ID NO: 131884 - DNA, 25 bp, Saccharomyces pastorianus
agagactatcttatcaatcacgtgt

SEQ ID NO: 131885 - DNA, 25 bp, Saccharomyces pastorianus
aatcacgtgttgcagttttggaaaa

SEQ ID NO: 131886 - DNA, 25 bp, Saccharomyces pastorianus
tacgcggtgacattgcattaactat

SEQ ID NO: 131887 - DNA, 25 bp, Saccharomyces pastorianus
tacaaaatcccagcttggttcttga

SEQ ID NO: 131888 - DNA, 25 bp, Saccharomyces pastorianus
caaaatcccagcttggttcttgaac

SEQ ID NO: 131889 - DNA, 25 bp, Saccharomyces pastorianus
ctcactacaaaatcccagcttggtt

SEQ ID NO: 131890 - DNA, 25 bp, Saccharomyces pastorianus
aatcccagcttggttcttgaaccgt

SEQ ID NO: 131891 - DNA, 25 bp, Saccharomyces pastorianus
acaaaatcccagcttggttcttgaa

SEQ ID NO: 131892 - DNA, 25 bp, Saccharomyces pastorianus
caactcactacaaaatcccagcttg

SEQ ID NO: 131893 - DNA, 25 bp, Saccharomyces pastorianus
actacaaaatcccagcttggttctt

SEQ ID NO: 131894 - DNA, 25 bp, Saccharomyces pastorianus
ctacaaaatcccagcttggttcttg

SEQ ID NO: 131895 - DNA, 25 bp, Saccharomyces pastorianus
aaatcccagcttggttcttgaaccg

SEQ ID NO: 131896 - DNA, 25 bp, Saccharomyces pastorianus
aactcactacaaaatcccagcttgg

SEQ ID NO: 131897 - DNA, 25 bp, Saccharomyces pastorianus
tcactacaaaatcccagcttggttc

SEQ ID NO: 131898 - DNA, 25 bp, Saccharomyces pastorianus
aagttatttggatcttgcaggcaga

SEQ ID NO: 131899 - DNA, 25 bp, Saccharomyces pastorianus
gaatatacctcagacgagaaaccat

SEQ ID NO: 131900 - DNA, 25 bp, Saccharomyces pastorianus
aatggacagcagtaatatcgaggtt

SEQ ID NO: 131901 - DNA, 25 bp, Saccharomyces pastorianus
catactcaatggattcgttaacagt

SEQ ID NO: 131902 - DNA, 25 bp, Saccharomyces pastorianus
tttcgtccaattctacgccgacttg

SEQ ID NO: 131903 - DNA, 25 bp, Saccharomyces pastorianus
ggccctgcatatgtaccgcagttat

SEQ ID NO: 131904 - DNA, 25 bp, Saccharomyces pastorianus
caaatacgaactcggccctgcatat

SEQ ID NO: 131905 - DNA, 25 bp, Saccharomyces pastorianus
tatgtaccgcagttattcactccga

SEQ ID NO: 131906 - DNA, 25 bp, Saccharomyces pastorianus
actatgccaattgagatgccagaca

SEQ ID NO: 131907 - DNA, 25 bp, Saccharomyces pastorianus
gttattcactccgacgcgtttcgtc

SEQ ID NO: 131908 - DNA, 25 bp, Saccharomyces pastorianus
tatcgaggttgggatcaaccgcgga

SEQ ID NO: 131909 - DNA, 25 bp, Saccharomyces pastorianus
gctggaaagagtggatgaaatacat

SEQ ID NO: 131910 - DNA, 25 bp, Saccharomyces pastorianus
tatgaacaccgtccgcgacacatac

SEQ ID NO: 131911 - DNA, 25 bp, Saccharomyces pastorianus
gtccgcgacacatactatcggaaag

SEQ ID NO: 131912 - DNA, 25 bp, Saccharomyces pastorianus
tcggaaagtgtggaataagctggaa

SEQ ID NO: 131913 - DNA, 25 bp, Saccharomyces pastorianus
acatactatcggaaagtgtggaata

SEQ ID NO: 131914 - DNA, 25 bp, Saccharomyces pastorianus
accgtccgcgacacatactatcgga

SEQ ID NO: 131915 - DNA, 25 bp, Saccharomyces pastorianus
agcatatatgaacaccgtccgcgac

SEQ ID NO: 131916 - DNA, 25 bp, Saccharomyces pastorianus
gaagcatatatgaacaccgtccgcg

SEQ ID NO: 131917 - DNA, 25 bp, Saccharomyces pastorianus
ccgcgacacatactatcggaaagtg

SEQ ID NO: 131918 - DNA, 25 bp, Saccharomyces pastorianus
tatatgaacaccgtccgcgacacat

SEQ ID NO: 131919 - DNA, 25 bp, Saccharomyces pastorianus
gcatatatgaacaccgtccgcgaca

SEQ ID NO: 131920 - DNA, 25 bp, Saccharomyces pastorianus
atggagcaatccactcgtgttcaac

SEQ ID NO: 131921 - DNA, 25 bp, Saccharomyces pastorianus
tcccaacggatggtaaaaaagctag

SEQ ID NO: 131922 - DNA, 25 bp, Saccharomyces pastorianus
ggatcacgctatggcggcaaaagaa

SEQ ID NO: 131923 - DNA, 25 bp, Saccharomyces pastorianus
ttctggatcacgctatggcggcaaa

SEQ ID NO: 131924 - DNA, 25 bp, Saccharomyces pastorianus
agaattctggatcacgctatggcgg

SEQ ID NO: 131925 - DNA, 25 bp, Saccharomyces pastorianus
aaatcgttattgaaagccatggagc

SEQ ID NO: 131926 - DNA, 25 bp, Saccharomyces pastorianus
accacttcatcccaacggatggtaa

SEQ ID NO: 131927 - DNA, 25 bp, Saccharomyces pastorianus
aatccactcgtgttcaacaaggaga

SEQ ID NO: 131928 - DNA, 25 bp, Saccharomyces pastorianus
gagcaatccactcgtgttcaacaag

SEQ ID NO: 131929 - DNA, 25 bp, Saccharomyces pastorianus
tcgtgttcaacaaggagaagacagt

SEQ ID NO: 131930 - DNA, 25 bp, Saccharomyces pastorianus
gaaagccatggagcaatccactcgt

SEQ ID NO: 131931 - DNA, 25 bp, Saccharomyces pastorianus
gtgtcaaatctgtcaaggctatccc

SEQ ID NO: 131932 - DNA, 25 bp, Saccharomyces pastorianus
gggcgcaattctccggtaactacta

SEQ ID NO: 131933 - DNA, 25 bp, Saccharomyces pastorianus
ggtacggagaccgaagaatccatca

SEQ ID NO: 131934 - DNA, 25 bp, Saccharomyces pastorianus
tattgctccaccatcggtcgaggat

SEQ ID NO: 131935 - DNA, 25 bp, Saccharomyces pastorianus
tactatggtagtactgtcgcttccg

SEQ ID NO: 131936 - DNA, 25 bp, Saccharomyces pastorianus
gctatcccagagttaaatgccaggt

SEQ ID NO: 131937 - DNA, 25 bp, Saccharomyces pastorianus
aatgccaggtttttgtttattgctc

SEQ ID NO: 131938 - DNA, 25 bp, Saccharomyces pastorianus
atgctgagacaggtgcccatgacaa

SEQ ID NO: 131939 - DNA, 25 bp, Saccharomyces pastorianus
cgccgctcaagctgaattggcatat

SEQ ID NO: 131940 - DNA, 25 bp, Saccharomyces pastorianus
tgtcgcttccgtcaaacaagtcagt

SEQ ID NO: 131941 - DNA, 25 bp, Saccharomyces pastorianus
caacaagaggttaagcgccgctcaa

SEQ ID NO: 131942 - DNA, 25 bp, Saccharomyces pastorianus
tctttcgggtttagtgtttcatcca

SEQ ID NO: 131943 - DNA, 25 bp, Saccharomyces pastorianus
ggtaaatctacactgttgaagaaat

SEQ ID NO: 131944 - DNA, 25 bp, Saccharomyces pastorianus
gtcctatcgtaatttctggcccaag

SEQ ID NO: 131945 - DNA, 25 bp, Saccharomyces pastorianus
atttctggcccaagtggtacaggta

SEQ ID NO: 131946 - DNA, 25 bp, Saccharomyces pastorianus
gttcgctgaatacccagattctttc

SEQ ID NO: 131947 - DNA, 25 bp, Saccharomyces pastorianus
atgtcccgtcctatcgtaatttctg

SEQ ID NO: 131948 - DNA, 25 bp, Saccharomyces pastorianus
tggcccaagtggtacaggtaaatct

SEQ ID NO: 131949 - DNA, 25 bp, Saccharomyces pastorianus
tgaatacccagattctttcgggttt

SEQ ID NO: 131950 - DNA, 25 bp, Saccharomyces pastorianus
gaagaaattgttcgctgaataccca

SEQ ID NO: 131951 - DNA, 25 bp, Saccharomyces pastorianus
ctatcgtaatttctggcccaagtgg

SEQ ID NO: 131952 - DNA, 25 bp, Saccharomyces pastorianus
ggtttagtgtttcatccactactag

SEQ ID NO: 131953 - DNA, 25 bp, Saccharomyces pastorianus
ttatgttaattacaccgcaacctgt

SEQ ID NO: 131954 - DNA, 25 bp, Saccharomyces pastorianus
cagcggtttgcctgatattgatgtc

SEQ ID NO: 131955 - DNA, 25 bp, Saccharomyces pastorianus
gttgcagtttgttaccggtactagt

SEQ ID NO: 131956 - DNA, 25 bp, Saccharomyces pastorianus
gcgtggttcactattattggcaatc

SEQ ID NO: 131957 - DNA, 25 bp, Saccharomyces pastorianus
ggcagttagatccttcgacgctgaa

SEQ ID NO: 131958 - DNA, 25 bp, Saccharomyces pastorianus
ggtttctatgcccttatatccaaag

SEQ ID NO: 131959 - DNA, 25 bp, Saccharomyces pastorianus
ggagttattaatcagcggtttgcct

SEQ ID NO: 131960 - DNA, 25 bp, Saccharomyces pastorianus
catatgagacattgcgtggttcact

SEQ ID NO: 131961 - DNA, 25 bp, Saccharomyces pastorianus
gaaagactaccatcatcacatacct

SEQ ID NO: 131962 - DNA, 25 bp, Saccharomyces pastorianus
agaacgtgccaagttgttgcagttt

SEQ ID NO: 131963 - DNA, 25 bp, Saccharomyces pastorianus
gaactaagcggtgtcaacggtgttt

SEQ ID NO: 131964 - DNA, 25 bp, Saccharomyces pastorianus
aaagagcaatcagagaatatagaat

SEQ ID NO: 131965 - DNA, 25 bp, Saccharomyces pastorianus
gaatatagaattatatcttcttgaa

SEQ ID NO: 131966 - DNA, 25 bp, Saccharomyces pastorianus
aagagcaatcagagaatatagaatt

SEQ ID NO: 131967 - DNA, 25 bp, Saccharomyces pastorianus
aatatagaattatatcttcttgaag

SEQ ID NO: 131968 - DNA, 25 bp, Saccharomyces pastorianus
agagcaatcagagaatatagaatta

SEQ ID NO: 131969 - DNA, 25 bp, Saccharomyces pastorianus
gagcaatcagagaatatagaattat

SEQ ID NO: 131970 - DNA, 25 bp, Saccharomyces pastorianus
atagaattatatcttcttgaagaaa

SEQ ID NO: 131971 - DNA, 25 bp, Saccharomyces pastorianus
gaaagagcaatcagagaatatagaa

SEQ ID NO: 131972 - DNA, 25 bp, Saccharomyces pastorianus
atatagaattatatcttcttgaaga

SEQ ID NO: 131973 - DNA, 25 bp, Saccharomyces pastorianus
tagaattatatcttcttgaagaaaa

SEQ ID NO: 131974 - DNA, 25 bp, Saccharomyces pastorianus
agcaatcagagaatatagaattata

SEQ ID NO: 131975 - DNA, 25 bp, Saccharomyces pastorianus
aattgtctcgaatgtcctgagcatg

SEQ ID NO: 131976 - DNA, 25 bp, Saccharomyces pastorianus
gatatattctctcattccagaccgt

SEQ ID NO: 131977 - DNA, 25 bp, Saccharomyces pastorianus
gtgttgcaagcttatcgaccaaatt

SEQ ID NO: 131978 - DNA, 25 bp, Saccharomyces pastorianus
ggctatgagcctaaaagttctattt

SEQ ID NO: 131979 - DNA, 25 bp, Saccharomyces pastorianus
ttgagtgtgaaccaggctatgagcc

SEQ ID NO: 131980 - DNA, 25 bp, Saccharomyces pastorianus
gggttacgttgcaatgtcatttaga

SEQ ID NO: 131981 - DNA, 25 bp, Saccharomyces pastorianus
gagcatggaatatgttcttctttta

SEQ ID NO: 131982 - DNA, 25 bp, Saccharomyces pastorianus
tatggtattattccttttccaaaat

SEQ ID NO: 131983 - DNA, 25 bp, Saccharomyces pastorianus
gttctttatttatcaccctaggcgt

SEQ ID NO: 131984 - DNA, 25 bp, Saccharomyces pastorianus
gatgatattatctggctgccattag

SEQ ID NO: 131985 - DNA, 25 bp, Saccharomyces pastorianus
ctctcattccagaccgtcatgggaa

SEQ ID NO: 131986 - DNA, 25 bp, Saccharomyces pastorianus
attgggtccctatgaagaaactctt

SEQ ID NO: 131987 - DNA, 25 bp, Saccharomyces pastorianus
tgactacaccattcaggccattgag

SEQ ID NO: 131988 - DNA, 25 bp, Saccharomyces pastorianus
gcaagccctatacatctcgatgcaa

SEQ ID NO: 131989 - DNA, 25 bp, Saccharomyces pastorianus
catgtgggtgtctatttgcgtttac

SEQ ID NO: 131990 - DNA, 25 bp, Saccharomyces pastorianus
atagactctttgtgcagtttgctgc

SEQ ID NO: 131991 - DNA, 25 bp, Saccharomyces pastorianus
gaatttcactctttctgggacaaaa

SEQ ID NO: 131992 - DNA, 25 bp, Saccharomyces pastorianus
ttaaccgcaagtttgttggcatcga

SEQ ID NO: 131993 - DNA, 25 bp, Saccharomyces pastorianus
aacgttagtgtttgccatccttgga

SEQ ID NO: 131994 - DNA, 25 bp, Saccharomyces pastorianus
ggataattcctttaggcaagcccta

SEQ ID NO: 131995 - DNA, 25 bp, Saccharomyces pastorianus
gcagtttgctgcttatttttcaaca

SEQ ID NO: 131996 - DNA, 25 bp, Saccharomyces pastorianus
aggagaatatctggccacattgcgg

SEQ ID NO: 131997 - DNA, 25 bp, Saccharomyces pastorianus
tcgaatcaggcgcaggtcatggttt

SEQ ID NO: 131998 - DNA, 25 bp, Saccharomyces pastorianus
gcaggtcatggtttagattcatctt

SEQ ID NO: 131999 - DNA, 25 bp, Saccharomyces pastorianus
aatcaggcgcaggtcatggtttaga

SEQ ID NO: 132000 - DNA, 25 bp, Saccharomyces pastorianus
agattcatcttaccgattatcgtgc

SEQ ID NO: 132001 - DNA, 25 bp, Saccharomyces pastorianus
gattatcgtgctcggtttactgtgc

SEQ ID NO: 132002 - DNA, 25 bp, Saccharomyces pastorianus
atattcgaatcaggcgcaggtcatg

SEQ ID NO: 132003 - DNA, 25 bp, Saccharomyces pastorianus
atcttaccgattatcgtgctcggtt

SEQ ID NO: 132004 - DNA, 25 bp, Saccharomyces pastorianus
ggaatattcgaatcaggcgcaggtc

SEQ ID NO: 132005 - DNA, 25 bp, Saccharomyces pastorianus
gtcatggtttagattcatcttaccg

SEQ ID NO: 132006 - DNA, 25 bp, Saccharomyces pastorianus
ttcatcttaccgattatcgtgctcg

SEQ ID NO: 132007 - DNA, 25 bp, Saccharomyces pastorianus
aggcgcaggtcatggtttagattca

SEQ ID NO: 132008 - DNA, 25 bp, Saccharomyces pastorianus
tttgaggctgccaatgcttccgaga

SEQ ID NO: 132009 - DNA, 25 bp, Saccharomyces pastorianus
tgaggctgccaatgcttccgagaag

SEQ ID NO: 132010 - DNA, 25 bp, Saccharomyces pastorianus
agccctcgtctgtttgaggctgcca

SEQ ID NO: 132011 - DNA, 25 bp, Saccharomyces pastorianus
gtctgtttgaggctgccaatgcttc

SEQ ID NO: 132012 - DNA, 25 bp, Saccharomyces pastorianus
gaggctgccaatgcttccgagaagg

SEQ ID NO: 132013 - DNA, 25 bp, Saccharomyces pastorianus
ttctacaagaactcagccctcgtct

SEQ ID NO: 132014 - DNA, 25 bp, Saccharomyces pastorianus
aagaactcagccctcgtctgtttga

SEQ ID NO: 132015 - DNA, 25 bp, Saccharomyces pastorianus
ggctgccaatgcttccgagaagggc

SEQ ID NO: 132016 - DNA, 25 bp, Saccharomyces pastorianus
gccaatgcttccgagaagggcaagc

SEQ ID NO: 132017 - DNA, 25 bp, Saccharomyces pastorianus
aactcagccctcgtctgtttgaggc

SEQ ID NO: 132018 - DNA, 25 bp, Saccharomyces pastorianus
ctcgtctgtttgaggctgccaatgc

SEQ ID NO: 132019 - DNA, 25 bp, Saccharomyces pastorianus
aaaaaaccacacagagccgttctag

SEQ ID NO: 132020 - DNA, 25 bp, Saccharomyces pastorianus
acctttggcacaaagggtcgtcacg

SEQ ID NO: 132021 - DNA, 25 bp, Saccharomyces pastorianus
agagcaagagctcactgtcaccttt

SEQ ID NO: 132022 - DNA, 25 bp, Saccharomyces pastorianus
gctggcacaaacattcaaaaaacca

SEQ ID NO: 132023 - DNA, 25 bp, Saccharomyces pastorianus
cacagagccgttctagaacaggtat

SEQ ID NO: 132024 - DNA, 25 bp, Saccharomyces pastorianus
gggaccacggtcttcatcagaaata

SEQ ID NO: 132025 - DNA, 25 bp, Saccharomyces pastorianus
aaaccacacagagccgttctagaac

SEQ ID NO: 132026 - DNA, 25 bp, Saccharomyces pastorianus
gctcactgtcacctttggcacaaag

SEQ ID NO: 132027 - DNA, 25 bp, Saccharomyces pastorianus
gaacaggtatctgggaccacggtct

SEQ ID NO: 132028 - DNA, 25 bp, Saccharomyces pastorianus
aggtatctgggaccacggtcttcat

SEQ ID NO: 132029 - DNA, 25 bp, Saccharomyces pastorianus
aagagctcactgtcacctttggcac

SEQ ID NO: 132030 - DNA, 25 bp, Saccharomyces pastorianus
ggcacaagataatccttcgttcctg

SEQ ID NO: 132031 - DNA, 25 bp, Saccharomyces pastorianus
ttcgttcctgccactcgatattgaa

SEQ ID NO: 132032 - DNA, 25 bp, Saccharomyces pastorianus
gatgaaatctcatctgccacaattt

SEQ ID NO: 132033 - DNA, 25 bp, Saccharomyces pastorianus
gtcccttctagttcatcggaatctt

SEQ ID NO: 132034 - DNA, 25 bp, Saccharomyces pastorianus
gcaacaggtttctggatcgacggta

SEQ ID NO: 132035 - DNA, 25 bp, Saccharomyces pastorianus
gaagtggcaccggatgaaatctcat

SEQ ID NO: 132036 - DNA, 25 bp, Saccharomyces pastorianus
gatcgacggtaaccacaccagaggt

SEQ ID NO: 132037 - DNA, 25 bp, Saccharomyces pastorianus
tgaagttatgttccacggcaagcaa

SEQ ID NO: 132038 - DNA, 25 bp, Saccharomyces pastorianus
gacgcaatgtcatatcccatcatat

SEQ ID NO: 132039 - DNA, 25 bp, Saccharomyces pastorianus
aaagcaaccgcgattgcacgcagta

SEQ ID NO: 132040 - DNA, 25 bp, Saccharomyces pastorianus
ttttgatactcatctactcgagccc

SEQ ID NO: 132041 - DNA, 25 bp, Saccharomyces pastorianus
atatcgatcacactatctcctgaga

SEQ ID NO: 132042 - DNA, 25 bp, Saccharomyces pastorianus
aatgtctactggtgtcgcaagcttt

SEQ ID NO: 132043 - DNA, 25 bp, Saccharomyces pastorianus
taaatggtggctgctctgtgatccc

SEQ ID NO: 132044 - DNA, 25 bp, Saccharomyces pastorianus
atacgcgttcttcagagagctcgtc

SEQ ID NO: 132045 - DNA, 25 bp, Saccharomyces pastorianus
ctactgtgacgctactttcaggatt

SEQ ID NO: 132046 - DNA, 25 bp, Saccharomyces pastorianus
gtcactactcggatcaaggccagaa

SEQ ID NO: 132047 - DNA, 25 bp, Saccharomyces pastorianus
aggcgcccctatcaaaatgtctact

SEQ ID NO: 132048 - DNA, 25 bp, Saccharomyces pastorianus
aaaggcgtatcactgtccattttta

SEQ ID NO: 132049 - DNA, 25 bp, Saccharomyces pastorianus
tttccattaagtccatcaggctcca

SEQ ID NO: 132050 - DNA, 25 bp, Saccharomyces pastorianus
gaggagttcatttgtcactactgtg

SEQ ID NO: 132051 - DNA, 25 bp, Saccharomyces pastorianus
attcgttcaaaaatgccctctacca

SEQ ID NO: 132052 - DNA, 25 bp, Saccharomyces pastorianus
aggatcgccttgaaactactgagac

SEQ ID NO: 132053 - DNA, 25 bp, Saccharomyces pastorianus
gaataaccttaacaaagcacgctgt

SEQ ID NO: 132054 - DNA, 25 bp, Saccharomyces pastorianus
acacattcgatataccatctccaga

SEQ ID NO: 132055 - DNA, 25 bp, Saccharomyces pastorianus
accgaggcagagttgagttgtctaa

SEQ ID NO: 132056 - DNA, 25 bp, Saccharomyces pastorianus
ttaccaaagctaaacgtgtccgccg

SEQ ID NO: 132057 - DNA, 25 bp, Saccharomyces pastorianus
taaaaagctttctgctgacgccact

SEQ ID NO: 132058 - DNA, 25 bp, Saccharomyces pastorianus
gaagtaagcgtagtgtagtcctaaa

SEQ ID NO: 132059 - DNA, 25 bp, Saccharomyces pastorianus
aacagcgaatccatcacttacacat

SEQ ID NO: 132060 - DNA, 25 bp, Saccharomyces pastorianus
ggactagtgcctccatcgggtagat

SEQ ID NO: 132061 - DNA, 25 bp, Saccharomyces pastorianus
acgtgtccgccgcattaaaaagctt

SEQ ID NO: 132062 - DNA, 25 bp, Saccharomyces pastorianus
atttgccaaggctagattgaccgag

SEQ ID NO: 132063 - DNA, 25 bp, Saccharomyces pastorianus
gacgatgagcaagccaaaccggaaa

SEQ ID NO: 132064 - DNA, 25 bp, Saccharomyces pastorianus
aaaaacatgagcatgctgccccgaa

SEQ ID NO: 132065 - DNA, 25 bp, Saccharomyces pastorianus
ggatggctatcctagagtctctaca

SEQ ID NO: 132066 - DNA, 25 bp, Saccharomyces pastorianus
atgctgccccgaatgataagttgag

SEQ ID NO: 132067 - DNA, 25 bp, Saccharomyces pastorianus
agcatccagatgacagccagcatat

SEQ ID NO: 132068 - DNA, 25 bp, Saccharomyces pastorianus
aatcagacggagagcccttgcggga

SEQ ID NO: 132069 - DNA, 25 bp, Saccharomyces pastorianus
gatgagctagtatctgtcgttgcaa

SEQ ID NO: 132070 - DNA, 25 bp, Saccharomyces pastorianus
tgatgacgctctcgaccaagatgat

SEQ ID NO: 132071 - DNA, 25 bp, Saccharomyces pastorianus
cgaaataccacattttgtcgacgaa

SEQ ID NO: 132072 - DNA, 25 bp, Saccharomyces pastorianus
gtgtaagcactagtcagcaccatcc

SEQ ID NO: 132073 - DNA, 25 bp, Saccharomyces pastorianus
aatgggctcatatcctacagcagga

SEQ ID NO: 132074 - DNA, 25 bp, Saccharomyces pastorianus
attccatttgcggaagtggaggtga

SEQ ID NO: 132075 - DNA, 25 bp, Saccharomyces pastorianus
tgggaattccatttgcggaagtgga

SEQ ID NO: 132076 - DNA, 25 bp, Saccharomyces pastorianus
atacttttctctcgtagttgggaat

SEQ ID NO: 132077 - DNA, 25 bp, Saccharomyces pastorianus
tctctcgtagttgggaattccattt

SEQ ID NO: 132078 - DNA, 25 bp, Saccharomyces pastorianus
gaaggagcagaatacttttctctcg

SEQ ID NO: 132079 - DNA, 25 bp, Saccharomyces pastorianus
gcagaatacttttctctcgtagttg

SEQ ID NO: 132080 - DNA, 25 bp, Saccharomyces pastorianus
ggagcagaatacttttctctcgtag

SEQ ID NO: 132081 - DNA, 25 bp, Saccharomyces pastorianus
agttgggaattccatttgcggaagt

SEQ ID NO: 132082 - DNA, 25 bp, Saccharomyces pastorianus
ttttctctcgtagttgggaattcca

SEQ ID NO: 132083 - DNA, 25 bp, Saccharomyces pastorianus
cgtagttgggaattccatttgcgga

SEQ ID NO: 132084 - DNA, 25 bp, Saccharomyces pastorianus
gaatacttttctctcgtagttggga

SEQ ID NO: 132085 - DNA, 25 bp, Saccharomyces pastorianus
gtcatctacaaccaattccatatcg

SEQ ID NO: 132086 - DNA, 25 bp, Saccharomyces pastorianus
tccttcattttagccttaggcgcgg

SEQ ID NO: 132087 - DNA, 25 bp, Saccharomyces pastorianus
tggaaaacctgttacgtcgttgtca

SEQ ID NO: 132088 - DNA, 25 bp, Saccharomyces pastorianus
cattccattagatatgtggtcccta

SEQ ID NO: 132089 - DNA, 25 bp, Saccharomyces pastorianus
tggtccctaactattcttcaatcta

SEQ ID NO: 132090 - DNA, 25 bp, Saccharomyces pastorianus
gtcgttgtcaactaaactacttgtt

SEQ ID NO: 132091 - DNA, 25 bp, Saccharomyces pastorianus
aatcagatgctggtcatggcgtaaa

SEQ ID NO: 132092 - DNA, 25 bp, Saccharomyces pastorianus
gaaaaatactctcaaaccgtcatgt

SEQ ID NO: 132093 - DNA, 25 bp, Saccharomyces pastorianus
tattacctgtggacctgataagaac

SEQ ID NO: 132094 - DNA, 25 bp, Saccharomyces pastorianus
taggcgcgggagtatttaccagtat

SEQ ID NO: 132095 - DNA, 25 bp, Saccharomyces pastorianus
actacttgttgaacgatcagcggtt

SEQ ID NO: 132096 - DNA, 25 bp, Saccharomyces pastorianus
agatcgccgaggcaaactctactgc

SEQ ID NO: 132097 - DNA, 25 bp, Saccharomyces pastorianus
tctactgcgcctattatggccgaag

SEQ ID NO: 132098 - DNA, 25 bp, Saccharomyces pastorianus
aacgatggattgtcactggagggaa

SEQ ID NO: 132099 - DNA, 25 bp, Saccharomyces pastorianus
gatcaggagggtattcgtggtctat

SEQ ID NO: 132100 - DNA, 25 bp, Saccharomyces pastorianus
tacaactttctttccctaagcatag

SEQ ID NO: 132101 - DNA, 25 bp, Saccharomyces pastorianus
gtattttcaattgctcattcaacag

SEQ ID NO: 132102 - DNA, 25 bp, Saccharomyces pastorianus
attgacgtaatcaacgccctatttg

SEQ ID NO: 132103 - DNA, 25 bp, Saccharomyces pastorianus
acagccctttgatgtagcaagacta

SEQ ID NO: 132104 - DNA, 25 bp, Saccharomyces pastorianus
tatatccttgactattgcaccacag

SEQ ID NO: 132105 - DNA, 25 bp, Saccharomyces pastorianus
accacagtccctacatacaattgac

SEQ ID NO: 132106 - DNA, 25 bp, Saccharomyces pastorianus
gcatagatacttggttcacaggatt

SEQ ID NO: 132107 - DNA, 25 bp, Saccharomyces pastorianus
ttgggaaggctatttacaagattgt

SEQ ID NO: 132108 - DNA, 25 bp, Saccharomyces pastorianus
attacgtacgctgggtcagtttgat

SEQ ID NO: 132109 - DNA, 25 bp, Saccharomyces pastorianus
aagtatgcaatgatcaggattcttt

SEQ ID NO: 132110 - DNA, 25 bp, Saccharomyces pastorianus
tcaatatcaaaaacttgggaaggct

SEQ ID NO: 132111 - DNA, 25 bp, Saccharomyces pastorianus
aaggctggtttatgaaagtatgcaa

SEQ ID NO: 132112 - DNA, 25 bp, Saccharomyces pastorianus
ggacatgcataataattcaatatca

SEQ ID NO: 132113 - DNA, 25 bp, Saccharomyces pastorianus
atgatcaggattctttattacgtac

SEQ ID NO: 132114 - DNA, 25 bp, Saccharomyces pastorianus
tttgagttgcacacttactctgggt

SEQ ID NO: 132115 - DNA, 25 bp, Saccharomyces pastorianus
agttgcacacttactctgggtatat

SEQ ID NO: 132116 - DNA, 25 bp, Saccharomyces pastorianus
gcacacttactctgggtatataaaa

SEQ ID NO: 132117 - DNA, 25 bp, Saccharomyces pastorianus
tctttattacgtacgctgggtcagt

SEQ ID NO: 132118 - DNA, 25 bp, Saccharomyces pastorianus
gtagcacatcccttacctgaaaaga

SEQ ID NO: 132119 - DNA, 25 bp, Saccharomyces pastorianus
gatgagcacccatctataagatatg

SEQ ID NO: 132120 - DNA, 25 bp, Saccharomyces pastorianus
gtatacgtgatgacggaccaggaat

SEQ ID NO: 132121 - DNA, 25 bp, Saccharomyces pastorianus
aaacataacggacccaactgcctgg

SEQ ID NO: 132122 - DNA, 25 bp, Saccharomyces pastorianus
gttgaaaagccgacagtataccatt

SEQ ID NO: 132123 - DNA, 25 bp, Saccharomyces pastorianus
atatgacatgaatggcacatcgcct

SEQ ID NO: 132124 - DNA, 25 bp, Saccharomyces pastorianus
agggtttatgccttcgtatacgtga

SEQ ID NO: 132125 - DNA, 25 bp, Saccharomyces pastorianus
accattgtaaggtgttccagttcaa

SEQ ID NO: 132126 - DNA, 25 bp, Saccharomyces pastorianus
aagaccaagtggacctcaggaagag

SEQ ID NO: 132127 - DNA, 25 bp, Saccharomyces pastorianus
atggcacatcgcctgccgaagaaaa

SEQ ID NO: 132128 - DNA, 25 bp, Saccharomyces pastorianus
agatatgtagcacatcccttacctg

SEQ ID NO: 132129 - DNA, 25 bp, Saccharomyces pastorianus
agatcacgttctccgcaaatcaagt

SEQ ID NO: 132130 - DNA, 25 bp, Saccharomyces pastorianus
aaagtcagtagctcatcttcgctca

SEQ ID NO: 132131 - DNA, 25 bp, Saccharomyces pastorianus
caagctcaggcggtggtggtttatt

SEQ ID NO: 132132 - DNA, 25 bp, Saccharomyces pastorianus
aaaccggtcgtaacttcagcacact

SEQ ID NO: 132133 - DNA, 25 bp, Saccharomyces pastorianus
tctcctactgctaccgatataaact

SEQ ID NO: 132134 - DNA, 25 bp, Saccharomyces pastorianus
aagagtaaatcgagatccccgtcac

SEQ ID NO: 132135 - DNA, 25 bp, Saccharomyces pastorianus
agtgcgagtgcgtcgagatcacgtt

SEQ ID NO: 132136 - DNA, 25 bp, Saccharomyces pastorianus
acacagatcagttgtccgttccagg

SEQ ID NO: 132137 - DNA, 25 bp, Saccharomyces pastorianus
gatggtaatgctgcactgggtgcta

SEQ ID NO: 132138 - DNA, 25 bp, Saccharomyces pastorianus
gctgtcgatccaatccaagtcagat

SEQ ID NO: 132139 - DNA, 25 bp, Saccharomyces pastorianus
aaatcaaaaccaagctctcctactg

SEQ ID NO: 132140 - DNA, 25 bp, Saccharomyces pastorianus
gatgctagcattccaactatctcaa

SEQ ID NO: 132141 - DNA, 25 bp, Saccharomyces pastorianus
aaagcctgggttcagccattctaaa

SEQ ID NO: 132142 - DNA, 25 bp, Saccharomyces pastorianus
tagattcactatgttatgccccaga

SEQ ID NO: 132143 - DNA, 25 bp, Saccharomyces pastorianus
aatgacgccgatcatgattcatcaa

SEQ ID NO: 132144 - DNA, 25 bp, Saccharomyces pastorianus
aagagtcatcacaggtggtgctcct

SEQ ID NO: 132145 - DNA, 25 bp, Saccharomyces pastorianus
aaatactagcggtccaaagcctggg

SEQ ID NO: 132146 - DNA, 25 bp, Saccharomyces pastorianus
gagcacactctatggagtcgggctt

SEQ ID NO: 132147 - DNA, 25 bp, Saccharomyces pastorianus
aataccaccgggacagaggcatttg

SEQ ID NO: 132148 - DNA, 25 bp, Saccharomyces pastorianus
tgtccgtgaaatccttaacctctaa

SEQ ID NO: 132149 - DNA, 25 bp, Saccharomyces pastorianus
atgccccagaagctaatggtgctaa

SEQ ID NO: 132150 - DNA, 25 bp, Saccharomyces pastorianus
tggtgctcctccaaggcatgtggct

SEQ ID NO: 132151 - DNA, 25 bp, Saccharomyces pastorianus
ggaagccaattctcattgggtgctt

SEQ ID NO: 132152 - DNA, 25 bp, Saccharomyces pastorianus
aatggcgcccagttggattctctga

SEQ ID NO: 132153 - DNA, 25 bp, Saccharomyces pastorianus
gacgattattctcttttctctagtt

SEQ ID NO: 132154 - DNA, 25 bp, Saccharomyces pastorianus
aatatcgacgcggatgcatcttatc

SEQ ID NO: 132155 - DNA, 25 bp, Saccharomyces pastorianus
gggagcaccgacttgttatgatctt

SEQ ID NO: 132156 - DNA, 25 bp, Saccharomyces pastorianus
aacggtactattcctaatctcaaca

SEQ ID NO: 132157 - DNA, 25 bp, Saccharomyces pastorianus
tggcggtctaactcacagtagtgat

SEQ ID NO: 132158 - DNA, 25 bp, Saccharomyces pastorianus
aactggattctggtatttcttcaaa

SEQ ID NO: 132159 - DNA, 25 bp, Saccharomyces pastorianus
ataggcaaggcgtacatggcgtgac

SEQ ID NO: 132160 - DNA, 25 bp, Saccharomyces pastorianus
gtagtgatgatgaccgcgctgatga

SEQ ID NO: 132161 - DNA, 25 bp, Saccharomyces pastorianus
ggaccaacagttgcgtgcggaaaaa

SEQ ID NO: 132162 - DNA, 25 bp, Saccharomyces pastorianus
tggtactccaactagatcaactctc

SEQ ID NO: 132163 - DNA, 25 bp, Saccharomyces pastorianus
aagagagcatatctagtggttctag

SEQ ID NO: 132164 - DNA, 25 bp, Saccharomyces pastorianus
gatcctacgcgtggtagtctgccat

SEQ ID NO: 132165 - DNA, 25 bp, Saccharomyces pastorianus
ggcatagatggaaaaagtcaggcaa

SEQ ID NO: 132166 - DNA, 25 bp, Saccharomyces pastorianus
atggactcggtgacaaattttttct

SEQ ID NO: 132167 - DNA, 25 bp, Saccharomyces pastorianus
aattttttctggaatgacacctata

SEQ ID NO: 132168 - DNA, 25 bp, Saccharomyces pastorianus
gttctagaactagtgatcctacgcg

SEQ ID NO: 132169 - DNA, 25 bp, Saccharomyces pastorianus
gcgtggtagtctgccatcttccagt

SEQ ID NO: 132170 - DNA, 25 bp, Saccharomyces pastorianus
ctccaactagatcaactctcaaggg

SEQ ID NO: 132171 - DNA, 25 bp, Saccharomyces pastorianus
gacacctataatgctggtactccaa

SEQ ID NO: 132172 - DNA, 25 bp, Saccharomyces pastorianus
gaactagtgatcctacgcgtggtag

SEQ ID NO: 132173 - DNA, 25 bp, Saccharomyces pastorianus
aatacggaagttggccagttcttag

SEQ ID NO: 132174 - DNA, 25 bp, Saccharomyces pastorianus
gggacaccaaacacacatcagattt

SEQ ID NO: 132175 - DNA, 25 bp, Saccharomyces pastorianus
ttagggcccaaattggctggaccac

SEQ ID NO: 132176 - DNA, 25 bp, Saccharomyces pastorianus
gaacaatttacaaggcaatcacgaa

SEQ ID NO: 132177 - DNA, 25 bp, Saccharomyces pastorianus
gtcaacatatatgcatacgccaata

SEQ ID NO: 132178 - DNA, 25 bp, Saccharomyces pastorianus
agcgcagtcgacgtcaacatatatg

SEQ ID NO: 132179 - DNA, 25 bp, Saccharomyces pastorianus
atggtcacagcgcagtcgacgtcaa

SEQ ID NO: 132180 - DNA, 25 bp, Saccharomyces pastorianus
aattggctggaccacgcatggtcac

SEQ ID NO: 132181 - DNA, 25 bp, Saccharomyces pastorianus
gaacctgagcgaagtcactgatttg

SEQ ID NO: 132182 - DNA, 25 bp, Saccharomyces pastorianus
atggtatcatttagggcccaaattg

SEQ ID NO: 132183 - DNA, 25 bp, Saccharomyces pastorianus
agctacatggtcatatgtcttgaac

SEQ ID NO: 132184 - DNA, 25 bp, Saccharomyces pastorianus
aaaaggcttctccatatggtcacca

SEQ ID NO: 132185 - DNA, 25 bp, Saccharomyces pastorianus
gaggctcaatctaatggctggcagt

SEQ ID NO: 132186 - DNA, 25 bp, Saccharomyces pastorianus
ttttggtctctacgtcggatcatga

SEQ ID NO: 132187 - DNA, 25 bp, Saccharomyces pastorianus
aaaacgatccagcttcgcaggtaag

SEQ ID NO: 132188 - DNA, 25 bp, Saccharomyces pastorianus
cgggtggtttagtcacttcaagaca

SEQ ID NO: 132189 - DNA, 25 bp, Saccharomyces pastorianus
gcagataacgacattccttttgaaa

SEQ ID NO: 132190 - DNA, 25 bp, Saccharomyces pastorianus
gaattgatcatgctggtcaccaaaa

SEQ ID NO: 132191 - DNA, 25 bp, Saccharomyces pastorianus
gccatttctaccctcaaggcgaaaa

SEQ ID NO: 132192 - DNA, 25 bp, Saccharomyces pastorianus
tacctttcttgggtctctttgcaga

SEQ ID NO: 132193 - DNA, 25 bp, Saccharomyces pastorianus
aggaagatcttatcgctacgcacca

SEQ ID NO: 132194 - DNA, 25 bp, Saccharomyces pastorianus
gtagacttactcatgggtggcggca

SEQ ID NO: 132195 - DNA, 25 bp, Saccharomyces pastorianus
atccaccttatgataactgcccatt

SEQ ID NO: 132196 - DNA, 25 bp, Saccharomyces pastorianus
gaatttgtggaggtcaccagcctac

SEQ ID NO: 132197 - DNA, 25 bp, Saccharomyces pastorianus
tattgctgctgctttgtttttgcca

SEQ ID NO: 132198 - DNA, 25 bp, Saccharomyces pastorianus
agacattggttaccatcatccacct

SEQ ID NO: 132199 - DNA, 25 bp, Saccharomyces pastorianus
ggtcaccagcctacagagagtattt

SEQ ID NO: 132200 - DNA, 25 bp, Saccharomyces pastorianus
gatttcactttccaaggttactctt

SEQ ID NO: 132201 - DNA, 25 bp, Saccharomyces pastorianus
gtgacgatcccaacactatggcaaa

SEQ ID NO: 132202 - DNA, 25 bp, Saccharomyces pastorianus
cggctttaccgtttctattcatgaa

SEQ ID NO: 132203 - DNA, 25 bp, Saccharomyces pastorianus
ggcaaacgtccatggatttcatcaa

SEQ ID NO: 132204 - DNA, 25 bp, Saccharomyces pastorianus
aacctgatgagttttctttcgaacg

SEQ ID NO: 132205 - DNA, 25 bp, Saccharomyces pastorianus
actgcccattggacaaggaggtcta

SEQ ID NO: 132206 - DNA, 25 bp, Saccharomyces pastorianus
aatatattccgagttccatctccgc

SEQ ID NO: 132207 - DNA, 25 bp, Saccharomyces pastorianus
gttctcctcctaacattgaattcca

SEQ ID NO: 132208 - DNA, 25 bp, Saccharomyces pastorianus
atatcactccatcttttgctaacaa

SEQ ID NO: 132209 - DNA, 25 bp, Saccharomyces pastorianus
gcaagcgaagactccgaagccatgg

SEQ ID NO: 132210 - DNA, 25 bp, Saccharomyces pastorianus
gatgccccgatcgacactaaaacaa

SEQ ID NO: 132211 - DNA, 25 bp, Saccharomyces pastorianus
aagcttgttacgtcactttggtgag

SEQ ID NO: 132212 - DNA, 25 bp, Saccharomyces pastorianus
agtcaccaaagctgtttcttccgaa

SEQ ID NO: 132213 - DNA, 25 bp, Saccharomyces pastorianus
atctccgctgcatttgattttacct

SEQ ID NO: 132214 - DNA, 25 bp, Saccharomyces pastorianus
attgcaggtgcggttattgttctcc

SEQ ID NO: 132215 - DNA, 25 bp, Saccharomyces pastorianus
gatctatatcccctgaacaacaagt

SEQ ID NO: 132216 - DNA, 25 bp, Saccharomyces pastorianus
aaggctctgaaagctgccgctgaaa

SEQ ID NO: 132217 - DNA, 25 bp, Saccharomyces pastorianus
agctctggcaaatttcccatctttt

SEQ ID NO: 132218 - DNA, 25 bp, Saccharomyces pastorianus
atcacttgatctgtcagctctggca

SEQ ID NO: 132219 - DNA, 25 bp, Saccharomyces pastorianus
ctttgatccaaggactggtgtgcct

SEQ ID NO: 132220 - DNA, 25 bp, Saccharomyces pastorianus
ttatgattttcctaatgctcctcca

SEQ ID NO: 132221 - DNA, 25 bp, Saccharomyces pastorianus
gtaccgtctcctaccgtagatatat

SEQ ID NO: 132222 - DNA, 25 bp, Saccharomyces pastorianus
gccactcagcgtccacaagatatga

SEQ ID NO: 132223 - DNA, 25 bp, Saccharomyces pastorianus
tgttttccactccattttaccatca

SEQ ID NO: 132224 - DNA, 25 bp, Saccharomyces pastorianus
caaacttatttggtggtcgatggtc

SEQ ID NO: 132225 - DNA, 25 bp, Saccharomyces pastorianus
gcggtatttaccttgatttcagtca

SEQ ID NO: 132226 - DNA, 25 bp, Saccharomyces pastorianus
acacaaatgggttatccgccactca

SEQ ID NO: 132227 - DNA, 25 bp, Saccharomyces pastorianus
aaatcaaaacacagcctccaacggg

SEQ ID NO: 132228 - DNA, 25 bp, Saccharomyces pastorianus
tcccgtcgctgttattggcgaattg

SEQ ID NO: 132229 - DNA, 25 bp, Saccharomyces pastorianus
gagattaaatgactgccaagcgttt

SEQ ID NO: 132230 - DNA, 25 bp, Saccharomyces pastorianus
aagtcccgtcgctgttattggcgaa

SEQ ID NO: 132231 - DNA, 25 bp, Saccharomyces pastorianus
gactaagtcccgtcgctgttattgg

SEQ ID NO: 132232 - DNA, 25 bp, Saccharomyces pastorianus
taagtggactaagtcccgtcgctgt

SEQ ID NO: 132233 - DNA, 25 bp, Saccharomyces pastorianus
gttttgtaagaaacatggcattcct

SEQ ID NO: 132234 - DNA, 25 bp, Saccharomyces pastorianus
tggcgaattggttaacgatgacgaa

SEQ ID NO: 132235 - DNA, 25 bp, Saccharomyces pastorianus
gatgacgaacaaggaactatgatga

SEQ ID NO: 132236 - DNA, 25 bp, Saccharomyces pastorianus
tcgatttgtgtaaactaagtggact

SEQ ID NO: 132237 - DNA, 25 bp, Saccharomyces pastorianus
aatgactgccaagcgttttgtaaga

SEQ ID NO: 132238 - DNA, 25 bp, Saccharomyces pastorianus
cggtgtcgatttgtgtaaactaagt

SEQ ID NO: 132239 - DNA, 25 bp, Saccharomyces pastorianus
aaaaccagggcacatctgtcccttg

SEQ ID NO: 132240 - DNA, 25 bp, Saccharomyces pastorianus
cagggcacatctgtcccttgagagc

SEQ ID NO: 132241 - DNA, 25 bp, Saccharomyces pastorianus
tttttaaaaccagggcacatctgtc

SEQ ID NO: 132242 - DNA, 25 bp, Saccharomyces pastorianus
aaccagggcacatctgtcccttgag

SEQ ID NO: 132243 - DNA, 25 bp, Saccharomyces pastorianus
gcagactcttcctctacgccaaaat

SEQ ID NO: 132244 - DNA, 25 bp, Saccharomyces pastorianus
aaaccagggcacatctgtcccttga

SEQ ID NO: 132245 - DNA, 25 bp, Saccharomyces pastorianus
accagggcacatctgtcccttgaga

SEQ ID NO: 132246 - DNA, 25 bp, Saccharomyces pastorianus
taaaaccagggcacatctgtccctt

SEQ ID NO: 132247 - DNA, 25 bp, Saccharomyces pastorianus
ttgcagactcttcctctacgccaaa

SEQ ID NO: 132248 - DNA, 25 bp, Saccharomyces pastorianus
ccagggcacatctgtcccttgagag

SEQ ID NO: 132249 - DNA, 25 bp, Saccharomyces pastorianus
atcatttttaaaaccagggcacatc

SEQ ID NO: 132250 - DNA, 25 bp, Saccharomyces pastorianus
cagggcacatctgtcccttgagagc

SEQ ID NO: 132251 - DNA, 25 bp, Saccharomyces pastorianus
tttttaaaaccagggcacatctgtc

SEQ ID NO: 132252 - DNA, 25 bp, Saccharomyces pastorianus
gcagactcttcctctacgccaaaat

SEQ ID NO: 132253 - DNA, 25 bp, Saccharomyces pastorianus
aaaccagggcacatctgtcccttga

SEQ ID NO: 132254 - DNA, 25 bp, Saccharomyces pastorianus
acttgtagggctcttgcagactctt

SEQ ID NO: 132255 - DNA, 25 bp, Saccharomyces pastorianus
accagggcacatctgtcccttgaga

SEQ ID NO: 132256 - DNA, 25 bp, Saccharomyces pastorianus
taaaaccagggcacatctgtccctt

SEQ ID NO: 132257 - DNA, 25 bp, Saccharomyces pastorianus
cttcctctacgccaaaatcattttt

SEQ ID NO: 132258 - DNA, 25 bp, Saccharomyces pastorianus
ttgcagactcttcctctacgccaaa

SEQ ID NO: 132259 - DNA, 25 bp, Saccharomyces pastorianus
atctgtcccttgagagccgctgatg

SEQ ID NO: 132260 - DNA, 25 bp, Saccharomyces pastorianus
atcatttttaaaaccagggcacatc

SEQ ID NO: 132261 - DNA, 25 bp, Saccharomyces pastorianus
gagtgataatggaccttccactatg

SEQ ID NO: 132262 - DNA, 25 bp, Saccharomyces pastorianus
gaatgagtgataatggaccttccac

SEQ ID NO: 132263 - DNA, 25 bp, Saccharomyces pastorianus
gtgataatggaccttccactatgag

SEQ ID NO: 132264 - DNA, 25 bp, Saccharomyces pastorianus
gataatggaccttccactatgagaa

SEQ ID NO: 132265 - DNA, 25 bp, Saccharomyces pastorianus
atgagtgataatggaccttccacta

SEQ ID NO: 132266 - DNA, 25 bp, Saccharomyces pastorianus
tgtgcctatacgaatgagtgataat

SEQ ID NO: 132267 - DNA, 25 bp, Saccharomyces pastorianus
tctgtgcctatacgaatgagtgata

SEQ ID NO: 132268 - DNA, 25 bp, Saccharomyces pastorianus
tggaccttccactatgagaacaggc

SEQ ID NO: 132269 - DNA, 25 bp, Saccharomyces pastorianus
atggaccttccactatgagaacagg

SEQ ID NO: 132270 - DNA, 25 bp, Saccharomyces pastorianus
aatggaccttccactatgagaacag

SEQ ID NO: 132271 - DNA, 25 bp, Saccharomyces pastorianus
ataatggaccttccactatgagaac

SEQ ID NO: 132272 - DNA, 25 bp, Saccharomyces pastorianus
gggtttcttccgaagaattgctgaa

SEQ ID NO: 132273 - DNA, 25 bp, Saccharomyces pastorianus
tacttggacatatcttctttgaatt

SEQ ID NO: 132274 - DNA, 25 bp, Saccharomyces pastorianus
gaaggaggaatctaatttgcggaaa

SEQ ID NO: 132275 - DNA, 25 bp, Saccharomyces pastorianus
caccttcgacgaaatttccaagatc

SEQ ID NO: 132276 - DNA, 25 bp, Saccharomyces pastorianus
acgatttcgcgtatgataagacaga

SEQ ID NO: 132277 - DNA, 25 bp, Saccharomyces pastorianus
gtatttcccgtacaaacaatatccg

SEQ ID NO: 132278 - DNA, 25 bp, Saccharomyces pastorianus
aagatcctcgaaactataccttccg

SEQ ID NO: 132279 - DNA, 25 bp, Saccharomyces pastorianus
agtcttcagtgcgaaaatttttcca

SEQ ID NO: 132280 - DNA, 25 bp, Saccharomyces pastorianus
gagcttgttatttttccccaatgaa

SEQ ID NO: 132281 - DNA, 25 bp, Saccharomyces pastorianus
cagaacttggttgcggtgatgaaac

SEQ ID NO: 132282 - DNA, 25 bp, Saccharomyces pastorianus
gagtttattaatttcaccttcgacg

SEQ ID NO: 132283 - DNA, 25 bp, Saccharomyces pastorianus
atgcctttgaggatttaccagaata

SEQ ID NO: 132284 - DNA, 25 bp, Saccharomyces pastorianus
aatgagagatcatcgacaccttgta

SEQ ID NO: 132285 - DNA, 25 bp, Saccharomyces pastorianus
gaacttggacctcagatgccatctt

SEQ ID NO: 132286 - DNA, 25 bp, Saccharomyces pastorianus
tgggacaagactccccgaacttgga

SEQ ID NO: 132287 - DNA, 25 bp, Saccharomyces pastorianus
aagaccatttcaaacaattgcgtga

SEQ ID NO: 132288 - DNA, 25 bp, Saccharomyces pastorianus
cttatccagggagcaagcgttaatg

SEQ ID NO: 132289 - DNA, 25 bp, Saccharomyces pastorianus
gatgccatcttattgaacatacttt

SEQ ID NO: 132290 - DNA, 25 bp, Saccharomyces pastorianus
ggatcaagcctcttattacgaagat

SEQ ID NO: 132291 - DNA, 25 bp, Saccharomyces pastorianus
gatagtttgcatgatctgacgataa

SEQ ID NO: 132292 - DNA, 25 bp, Saccharomyces pastorianus
aaatcattcgatctaaccacactag

SEQ ID NO: 132293 - DNA, 25 bp, Saccharomyces pastorianus
ttatgtcactatggaggtttctcgt

SEQ ID NO: 132294 - DNA, 25 bp, Saccharomyces pastorianus
atggacaattcctcagatctgaaat

SEQ ID NO: 132295 - DNA, 25 bp, Saccharomyces pastorianus
tatttagcgcagtcgaggtcgttaa

SEQ ID NO: 132296 - DNA, 25 bp, Saccharomyces pastorianus
agattatacgctcttttggaaaagg

SEQ ID NO: 132297 - DNA, 25 bp, Saccharomyces pastorianus
ggatagcgacaaattcactgcccct

SEQ ID NO: 132298 - DNA, 25 bp, Saccharomyces pastorianus
gatctgaaatccttgataagcggta

SEQ ID NO: 132299 - DNA, 25 bp, Saccharomyces pastorianus
ttaagggtactgcagtcgcatccta

SEQ ID NO: 132300 - DNA, 25 bp, Saccharomyces pastorianus
tgtggatactacaactcttcatatg

SEQ ID NO: 132301 - DNA, 25 bp, Saccharomyces pastorianus
gaccgattgcaaagtgtcccaaggg

SEQ ID NO: 132302 - DNA, 25 bp, Saccharomyces pastorianus
gcagtcgcatcctaagcaaacatat

SEQ ID NO: 132303 - DNA, 25 bp, Saccharomyces pastorianus
gtcgaagtaccatgacttttttggg

SEQ ID NO: 132304 - DNA, 25 bp, Saccharomyces pastorianus
aagctgatttatactgaccgattgc

SEQ ID NO: 132305 - DNA, 25 bp, Saccharomyces pastorianus
tagggaagtccatagtttctctact

SEQ ID NO: 132306 - DNA, 25 bp, Saccharomyces pastorianus
taataggcgctgacctgagcacaat

SEQ ID NO: 132307 - DNA, 25 bp, Saccharomyces pastorianus
tataacgccagattcgtcctcagtt

SEQ ID NO: 132308 - DNA, 25 bp, Saccharomyces pastorianus
ccctcgacaggttcatagatacttt

SEQ ID NO: 132309 - DNA, 25 bp, Saccharomyces pastorianus
gaagcttgactacatcacagagttt

SEQ ID NO: 132310 - DNA, 25 bp, Saccharomyces pastorianus
gattcgtcctcagttgcaatcgaag

SEQ ID NO: 132311 - DNA, 25 bp, Saccharomyces pastorianus
gaatttcgtcattgctaaaggagcc

SEQ ID NO: 132312 - DNA, 25 bp, Saccharomyces pastorianus
gaagcaaaacctcaatcaccacaat

SEQ ID NO: 132313 - DNA, 25 bp, Saccharomyces pastorianus
tagtttctctacttttgcgatgtaa

SEQ ID NO: 132314 - DNA, 25 bp, Saccharomyces pastorianus
taaaaagacgttgaccctcgacagg

SEQ ID NO: 132315 - DNA, 25 bp, Saccharomyces pastorianus
ggattattcccgatgagacgagttt

SEQ ID NO: 132316 - DNA, 25 bp, Saccharomyces pastorianus
tgagatatttgaagcatgtctccag

SEQ ID NO: 132317 - DNA, 25 bp, Saccharomyces pastorianus
agatatttgaagcatgtctccagaa

SEQ ID NO: 132318 - DNA, 25 bp, Saccharomyces pastorianus
tatttgaagcatgtctccagaagat

SEQ ID NO: 132319 - DNA, 25 bp, Saccharomyces pastorianus
atgagatatttgaagcatgtctcca

SEQ ID NO: 132320 - DNA, 25 bp, Saccharomyces pastorianus
gatatttgaagcatgtctccagaag

SEQ ID NO: 132321 - DNA, 25 bp, Saccharomyces pastorianus
atatttgaagcatgtctccagaaga

SEQ ID NO: 132322 - DNA, 25 bp, Saccharomyces pastorianus
atttgaagcatgtctccagaagatt

SEQ ID NO: 132323 - DNA, 25 bp, Saccharomyces pastorianus
tgtctccagaagatttaagaacggt

SEQ ID NO: 132324 - DNA, 25 bp, Saccharomyces pastorianus
gcatgtctccagaagatttaagaac

SEQ ID NO: 132325 - DNA, 25 bp, Saccharomyces pastorianus
gagatatttgaagcatgtctccaga

SEQ ID NO: 132326 - DNA, 25 bp, Saccharomyces pastorianus
gaagcatgtctccagaagatttaag

SEQ ID NO: 132327 - DNA, 25 bp, Saccharomyces pastorianus
ggcatggagccgctatcagaacgat

SEQ ID NO: 132328 - DNA, 25 bp, Saccharomyces pastorianus
aggaacctgaccttaacactgttgt

SEQ ID NO: 132329 - DNA, 25 bp, Saccharomyces pastorianus
gatggcccatttcacaaagacgtac

SEQ ID NO: 132330 - DNA, 25 bp, Saccharomyces pastorianus
gcaggaaattcttacgcggttttga

SEQ ID NO: 132331 - DNA, 25 bp, Saccharomyces pastorianus
tgttgtccatacagccgcacttgaa

SEQ ID NO: 132332 - DNA, 25 bp, Saccharomyces pastorianus
cttggcattgtctttgaggttccga

SEQ ID NO: 132333 - DNA, 25 bp, Saccharomyces pastorianus
tcagaacgatttacgtcacctggcc

SEQ ID NO: 132334 - DNA, 25 bp, Saccharomyces pastorianus
gtaatagccgtctacatcctaatca

SEQ ID NO: 132335 - DNA, 25 bp, Saccharomyces pastorianus
tgcatggccatcacttccagataat

SEQ ID NO: 132336 - DNA, 25 bp, Saccharomyces pastorianus
agctgtattatcgtaccctaccaag

SEQ ID NO: 132337 - DNA, 25 bp, Saccharomyces pastorianus
gtaatcaactcactggaccacatga

SEQ ID NO: 132338 - DNA, 25 bp, Saccharomyces pastorianus
gaaaattctcaaaatcttcggacaa

SEQ ID NO: 132339 - DNA, 25 bp, Saccharomyces pastorianus
aaaaatgctggctcgcaggcaaagg

SEQ ID NO: 132340 - DNA, 25 bp, Saccharomyces pastorianus
agaagctgttgcgtggttggactca

SEQ ID NO: 132341 - DNA, 25 bp, Saccharomyces pastorianus
gcgtggttggactcagtatggttta

SEQ ID NO: 132342 - DNA, 25 bp, Saccharomyces pastorianus
agatgagcgttgtgcagttcaagaa

SEQ ID NO: 132343 - DNA, 25 bp, Saccharomyces pastorianus
attggaaatggctccttctttagaa

SEQ ID NO: 132344 - DNA, 25 bp, Saccharomyces pastorianus
tgaccttaacgggtaaactatcgag

SEQ ID NO: 132345 - DNA, 25 bp, Saccharomyces pastorianus
tggagccaccattgaacaaatctgt

SEQ ID NO: 132346 - DNA, 25 bp, Saccharomyces pastorianus
gataatatattctcactacgttcaa

SEQ ID NO: 132347 - DNA, 25 bp, Saccharomyces pastorianus
actacgttcaacactctttgaggtt

SEQ ID NO: 132348 - DNA, 25 bp, Saccharomyces pastorianus
tataaaatcgcaccccaacaatctg

SEQ ID NO: 132349 - DNA, 25 bp, Saccharomyces pastorianus
aaaggctatctgtcctgtcgatgta

SEQ ID NO: 132350 - DNA, 25 bp, Saccharomyces pastorianus
gtcctgtcgatgtactctaccaagg

SEQ ID NO: 132351 - DNA, 25 bp, Saccharomyces pastorianus
gctcccgtctctgatggtaggttga

SEQ ID NO: 132352 - DNA, 25 bp, Saccharomyces pastorianus
gggtgaccaggcacatccaaagatt

SEQ ID NO: 132353 - DNA, 25 bp, Saccharomyces pastorianus
gataccagaatcaggctcttcttca

SEQ ID NO: 132354 - DNA, 25 bp, Saccharomyces pastorianus
agctgaactttgcagatcgttttaa

SEQ ID NO: 132355 - DNA, 25 bp, Saccharomyces pastorianus
gtacgatgtcggtgattccactatc

SEQ ID NO: 132356 - DNA, 25 bp, Saccharomyces pastorianus
ctgataacttacatcttccgatcct

SEQ ID NO: 132357 - DNA, 25 bp, Saccharomyces pastorianus
tccttcctccgcttaatggtgacaa

SEQ ID NO: 132358 - DNA, 25 bp, Saccharomyces pastorianus
tctaccaaggagtcgtttaccaact

SEQ ID NO: 132359 - DNA, 25 bp, Saccharomyces pastorianus
gacaaatccgcgttaaagctgaact

SEQ ID NO: 132360 - DNA, 25 bp, Saccharomyces pastorianus
agaagcattctttcacgacgtgcca

SEQ ID NO: 132361 - DNA, 25 bp, Saccharomyces pastorianus
tgccacctttggttctctacagaag

SEQ ID NO: 132362 - DNA, 25 bp, Saccharomyces pastorianus
gatgggtgaccaatacgtgcgaaac

SEQ ID NO: 132363 - DNA, 25 bp, Saccharomyces pastorianus
agcttcctggcaagattatctccac

SEQ ID NO: 132364 - DNA, 25 bp, Saccharomyces pastorianus
atagtcggctttttagcttcctggc

SEQ ID NO: 132365 - DNA, 25 bp, Saccharomyces pastorianus
acaagctcatatatcgttcggttag

SEQ ID NO: 132366 - DNA, 25 bp, Saccharomyces pastorianus
tttgcaacccataacagccagcttt

SEQ ID NO: 132367 - DNA, 25 bp, Saccharomyces pastorianus
gaaaccctggagaaactatcccctg

SEQ ID NO: 132368 - DNA, 25 bp, Saccharomyces pastorianus
ataagctgctacctggtccccaaag

SEQ ID NO: 132369 - DNA, 25 bp, Saccharomyces pastorianus
gatgccactttatcttcggaaaccc

SEQ ID NO: 132370 - DNA, 25 bp, Saccharomyces pastorianus
gataacccgttgcatatagtcggct

SEQ ID NO: 132371 - DNA, 25 bp, Saccharomyces pastorianus
gagtacaaaatatccgacaacgatg

SEQ ID NO: 132372 - DNA, 25 bp, Saccharomyces pastorianus
acgagttgctattcgattggagggc

SEQ ID NO: 132373 - DNA, 25 bp, Saccharomyces pastorianus
ttgatcaattgacgagttgctattc

SEQ ID NO: 132374 - DNA, 25 bp, Saccharomyces pastorianus
ggagggcaatttagaagctattaca

SEQ ID NO: 132375 - DNA, 25 bp, Saccharomyces pastorianus
ttcaagttttgtattatccacggca

SEQ ID NO: 132376 - DNA, 25 bp, Saccharomyces pastorianus
ggtataaagatcaggtttccgacaa

SEQ ID NO: 132377 - DNA, 25 bp, Saccharomyces pastorianus
tatccacggcaatgaccctgtgaaa

SEQ ID NO: 132378 - DNA, 25 bp, Saccharomyces pastorianus
ttttacatcatgtgacaagcaggtg

SEQ ID NO: 132379 - DNA, 25 bp, Saccharomyces pastorianus
aagcaggtgtccaaattcaagtttt

SEQ ID NO: 132380 - DNA, 25 bp, Saccharomyces pastorianus
tgccgagaggcatttgatcaattga

SEQ ID NO: 132381 - DNA, 25 bp, Saccharomyces pastorianus
tcaggtttccgacaataaggcattg

SEQ ID NO: 132382 - DNA, 25 bp, Saccharomyces pastorianus
ggcaccttttcttggcgtcctggga

SEQ ID NO: 132383 - DNA, 25 bp, Saccharomyces pastorianus
atcggatcttagtaatagttctgct

SEQ ID NO: 132384 - DNA, 25 bp, Saccharomyces pastorianus
gtcgaaggaaaaattggtctccatg

SEQ ID NO: 132385 - DNA, 25 bp, Saccharomyces pastorianus
aatcaagagggaggcgatggttcta

SEQ ID NO: 132386 - DNA, 25 bp, Saccharomyces pastorianus
gggccgaaatatcggatcttagtaa

SEQ ID NO: 132387 - DNA, 25 bp, Saccharomyces pastorianus
tataacagtagttggagtgtccgtt

SEQ ID NO: 132388 - DNA, 25 bp, Saccharomyces pastorianus
ggatgtggtattagcataaatcaag

SEQ ID NO: 132389 - DNA, 25 bp, Saccharomyces pastorianus
tcaagagggcaccttttcttggcgt

SEQ ID NO: 132390 - DNA, 25 bp, Saccharomyces pastorianus
tggagtgtccgttaatcaagagggc

SEQ ID NO: 132391 - DNA, 25 bp, Saccharomyces pastorianus
gcgtcctgggactttttatatgaaa

SEQ ID NO: 132392 - DNA, 25 bp, Saccharomyces pastorianus
atagttctgctattggatgtggtat

SEQ ID NO: 132393 - DNA, 25 bp, Saccharomyces pastorianus
tcatgattcctgacgtcgaccaatt

SEQ ID NO: 132394 - DNA, 25 bp, Saccharomyces pastorianus
gagactaccgccaacgttaataagg

SEQ ID NO: 132395 - DNA, 25 bp, Saccharomyces pastorianus
gcaggaaatctgcacgccgcgaaac

SEQ ID NO: 132396 - DNA, 25 bp, Saccharomyces pastorianus
cacagaattttcttccacgctaaaa

SEQ ID NO: 132397 - DNA, 25 bp, Saccharomyces pastorianus
gggtgctccgatttttacttgtcat

SEQ ID NO: 132398 - DNA, 25 bp, Saccharomyces pastorianus
gctacttcgcctactaatgttggta

SEQ ID NO: 132399 - DNA, 25 bp, Saccharomyces pastorianus
cgcctgtttaactctttgtgactat

SEQ ID NO: 132400 - DNA, 25 bp, Saccharomyces pastorianus
gaacttgtccagtagtcacttcatg

SEQ ID NO: 132401 - DNA, 25 bp, Saccharomyces pastorianus
caacgcgttttgagtctttgtacaa

SEQ ID NO: 132402 - DNA, 25 bp, Saccharomyces pastorianus
tcgattcttctgaacgtcaacgcgt

SEQ ID NO: 132403 - DNA, 25 bp, Saccharomyces pastorianus
ttgtcatcaactagtctacgcctgt

SEQ ID NO: 132404 - DNA, 25 bp, Saccharomyces pastorianus
ttctgcttctggaaaggtgcaaaat

SEQ ID NO: 132405 - DNA, 25 bp, Saccharomyces pastorianus
aattctgcttctggaaaggtgcaaa

SEQ ID NO: 132406 - DNA, 25 bp, Saccharomyces pastorianus
tataattctgcttctggaaaggtgc

SEQ ID NO: 132407 - DNA, 25 bp, Saccharomyces pastorianus
tagtatcagatccataataaaccaa

SEQ ID NO: 132408 - DNA, 25 bp, Saccharomyces pastorianus
gctggatataattctgcttctggaa

SEQ ID NO: 132409 - DNA, 25 bp, Saccharomyces pastorianus
ggatataattctgcttctggaaagg

SEQ ID NO: 132410 - DNA, 25 bp, Saccharomyces pastorianus
atgactgctggatataattctgctt

SEQ ID NO: 132411 - DNA, 25 bp, Saccharomyces pastorianus
ctgctggatataattctgcttctgg

SEQ ID NO: 132412 - DNA, 25 bp, Saccharomyces pastorianus
gactgctggatataattctgcttct

SEQ ID NO: 132413 - DNA, 25 bp, Saccharomyces pastorianus
gcttctggaaaggtgcaaaatagta

SEQ ID NO: 132414 - DNA, 25 bp, Saccharomyces pastorianus
ggtgcaaaatagtatcagatccata

SEQ ID NO: 132415 - DNA, 25 bp, Saccharomyces pastorianus
gatactattttgcacctttccagaa

SEQ ID NO: 132416 - DNA, 25 bp, Saccharomyces pastorianus
ttgcacctttccagaagcagaatta

SEQ ID NO: 132417 - DNA, 25 bp, Saccharomyces pastorianus
ttggctcttgcactatcctctggtt

SEQ ID NO: 132418 - DNA, 25 bp, Saccharomyces pastorianus
ttgcactatcctctggttggtttat

SEQ ID NO: 132419 - DNA, 25 bp, Saccharomyces pastorianus
tactattttgcacctttccagaagc

SEQ ID NO: 132420 - DNA, 25 bp, Saccharomyces pastorianus
ggttggtttattatggatctgatac

SEQ ID NO: 132421 - DNA, 25 bp, Saccharomyces pastorianus
cctctggttggtttattatggatct

SEQ ID NO: 132422 - DNA, 25 bp, Saccharomyces pastorianus
ttccagaagcagaattatatccagc

SEQ ID NO: 132423 - DNA, 25 bp, Saccharomyces pastorianus
ggatctgatactattttgcaccttt

SEQ ID NO: 132424 - DNA, 25 bp, Saccharomyces pastorianus
tattttgcacctttccagaagcaga

SEQ ID NO: 132425 - DNA, 25 bp, Saccharomyces pastorianus
gcactatcctctggttggtttatta

SEQ ID NO: 132426 - DNA, 25 bp, Saccharomyces pastorianus
tcctgcaagtatcacaactaaatgt

SEQ ID NO: 132427 - DNA, 25 bp, Saccharomyces pastorianus
ctttctaggttttttgtgccatatc

SEQ ID NO: 132428 - DNA, 25 bp, Saccharomyces pastorianus
ggttcaaaatcgcaccttgtcttca

SEQ ID NO: 132429 - DNA, 25 bp, Saccharomyces pastorianus
aaaatcgcaccttgtcttcactctc

SEQ ID NO: 132430 - DNA, 25 bp, Saccharomyces pastorianus
ttgtcttcactctcctgcaagtatc

SEQ ID NO: 132431 - DNA, 25 bp, Saccharomyces pastorianus
ttcactctcctgcaagtatcacaac

SEQ ID NO: 132432 - DNA, 25 bp, Saccharomyces pastorianus
tcacaactaaatgtttttcttttct

SEQ ID NO: 132433 - DNA, 25 bp, Saccharomyces pastorianus
tctaggttttttgtgccatatctta

SEQ ID NO: 132434 - DNA, 25 bp, Saccharomyces pastorianus
actctcctgcaagtatcacaactaa

SEQ ID NO: 132435 - DNA, 25 bp, Saccharomyces pastorianus
tttctttctaggttttttgtgccat

SEQ ID NO: 132436 - DNA, 25 bp, Saccharomyces pastorianus
ttcaaaatcgcaccttgtcttcact

SEQ ID NO: 132437 - DNA, 25 bp, Saccharomyces pastorianus
aaactagctaaactttcctctgtga

SEQ ID NO: 132438 - DNA, 25 bp, Saccharomyces pastorianus
ggcggtaaaatcgaatgcacatctg

SEQ ID NO: 132439 - DNA, 25 bp, Saccharomyces pastorianus
agcttggaactaccacttttggcaa

SEQ ID NO: 132440 - DNA, 25 bp, Saccharomyces pastorianus
gatttcttccccaagttgaggcaaa

SEQ ID NO: 132441 - DNA, 25 bp, Saccharomyces pastorianus
aagctaaacttttcgaatgtcaccg

SEQ ID NO: 132442 - DNA, 25 bp, Saccharomyces pastorianus
agagcttgccaaaattgatttcttc

SEQ ID NO: 132443 - DNA, 25 bp, Saccharomyces pastorianus
tgataaaattgacctcccagagcta

SEQ ID NO: 132444 - DNA, 25 bp, Saccharomyces pastorianus
acagtgctccgaagaacatttttat

SEQ ID NO: 132445 - DNA, 25 bp, Saccharomyces pastorianus
tttacatcaccaaaagccggtcgtt

SEQ ID NO: 132446 - DNA, 25 bp, Saccharomyces pastorianus
tttcctctgtgaacagttctctaga

SEQ ID NO: 132447 - DNA, 25 bp, Saccharomyces pastorianus
aaagccggtcgttcgatcataagag

SEQ ID NO: 132448 - DNA, 25 bp, Saccharomyces pastorianus
gaccgaatattctagatcacaacat

SEQ ID NO: 132449 - DNA, 25 bp, Saccharomyces pastorianus
ggttaacactaatgcaacgatccct

SEQ ID NO: 132450 - DNA, 25 bp, Saccharomyces pastorianus
aaatcatccgctgcagttgaaccta

SEQ ID NO: 132451 - DNA, 25 bp, Saccharomyces pastorianus
gttaattaaatcatccgctgcagtt

SEQ ID NO: 132452 - DNA, 25 bp, Saccharomyces pastorianus
gaatagcatgttgaaccagttgaac

SEQ ID NO: 132453 - DNA, 25 bp, Saccharomyces pastorianus
gaaccagttgaacacaatcttaaga

SEQ ID NO: 132454 - DNA, 25 bp, Saccharomyces pastorianus
tttattcttgtttctgcagttaatt

SEQ ID NO: 132455 - DNA, 25 bp, Saccharomyces pastorianus
gaaaacacaaacattcttcactagt

SEQ ID NO: 132456 - DNA, 25 bp, Saccharomyces pastorianus
gttgaacctaatggtggaccgaata

SEQ ID NO: 132457 - DNA, 25 bp, Saccharomyces pastorianus
cttcactagtatttctgttattcaa

SEQ ID NO: 132458 - DNA, 25 bp, Saccharomyces pastorianus
atccgctgcagttgaacctaatggt

SEQ ID NO: 132459 - DNA, 25 bp, Saccharomyces pastorianus
tctcttagtctttccttccaagatg

SEQ ID NO: 132460 - DNA, 25 bp, Saccharomyces pastorianus
gagtgccattgtcattactttcaac

SEQ ID NO: 132461 - DNA, 25 bp, Saccharomyces pastorianus
cactcattccctgcagaactttaat

SEQ ID NO: 132462 - DNA, 25 bp, Saccharomyces pastorianus
gatagattttgcctccgatagtggg

SEQ ID NO: 132463 - DNA, 25 bp, Saccharomyces pastorianus
ttttcagcatccttgccactagttt

SEQ ID NO: 132464 - DNA, 25 bp, Saccharomyces pastorianus
gagtcagatgtatctttctccacga

SEQ ID NO: 132465 - DNA, 25 bp, Saccharomyces pastorianus
tttgggctcttttttctcttagtct

SEQ ID NO: 132466 - DNA, 25 bp, Saccharomyces pastorianus
tgtactcgtttgttgcttttcagca

SEQ ID NO: 132467 - DNA, 25 bp, Saccharomyces pastorianus
ttatacagatcctcacgttcttgca

SEQ ID NO: 132468 - DNA, 25 bp, Saccharomyces pastorianus
gaaatcccgttccacagttgttggt

SEQ ID NO: 132469 - DNA, 25 bp, Saccharomyces pastorianus
gttcttgcacgatttgttcatcact

SEQ ID NO: 132470 - DNA, 25 bp, Saccharomyces pastorianus
gagtcaagcgctactatcgttaccc

SEQ ID NO: 132471 - DNA, 25 bp, Saccharomyces pastorianus
actgctactgctaaggatcttgcta

SEQ ID NO: 132472 - DNA, 25 bp, Saccharomyces pastorianus
gagagttcttctagggatgcccaat

SEQ ID NO: 132473 - DNA, 25 bp, Saccharomyces pastorianus
aattacacgggtgcggctgattcta

SEQ ID NO: 132474 - DNA, 25 bp, Saccharomyces pastorianus
ggtcatcaagttcttctgcaagcac

SEQ ID NO: 132475 - DNA, 25 bp, Saccharomyces pastorianus
tctactatcgagaccacttctgtta

SEQ ID NO: 132476 - DNA, 25 bp, Saccharomyces pastorianus
actaccgctggtattttcactaacg

SEQ ID NO: 132477 - DNA, 25 bp, Saccharomyces pastorianus
tgttaaaagcttatctcccactcag

SEQ ID NO: 132478 - DNA, 25 bp, Saccharomyces pastorianus
tagtgctgaagcttctaccgcggag

SEQ ID NO: 132479 - DNA, 25 bp, Saccharomyces pastorianus
gctgttcatggtgcttcttctacta

SEQ ID NO: 132480 - DNA, 25 bp, Saccharomyces pastorianus
aaaacctcttctgttgtgcgaactt

SEQ ID NO: 132481 - DNA, 25 bp, Saccharomyces pastorianus
gtcaccttaagtgcgtttttgcctg

SEQ ID NO: 132482 - DNA, 25 bp, Saccharomyces pastorianus
accttaagtgcgtttttgcctgtga

SEQ ID NO: 132483 - DNA, 25 bp, Saccharomyces pastorianus
aatgatggacgcatctacgtcacct

SEQ ID NO: 132484 - DNA, 25 bp, Saccharomyces pastorianus
gatggacgcatctacgtcaccttaa

SEQ ID NO: 132485 - DNA, 25 bp, Saccharomyces pastorianus
cttaagtgcgtttttgcctgtgaga

SEQ ID NO: 132486 - DNA, 25 bp, Saccharomyces pastorianus
ttggtatcgtgtttaaatgatggac

SEQ ID NO: 132487 - DNA, 25 bp, Saccharomyces pastorianus
tgcgtttttgcctgtgagattttta

SEQ ID NO: 132488 - DNA, 25 bp, Saccharomyces pastorianus
aagtgcgtttttgcctgtgagattt

SEQ ID NO: 132489 - DNA, 25 bp, Saccharomyces pastorianus
tctacgtcaccttaagtgcgttttt

SEQ ID NO: 132490 - DNA, 25 bp, Saccharomyces pastorianus
gcatctacgtcaccttaagtgcgtt

SEQ ID NO: 132491 - DNA, 25 bp, Saccharomyces pastorianus
ggacgcatctacgtcaccttaagtg

SEQ ID NO: 132492 - DNA, 25 bp, Saccharomyces pastorianus
cctttgtttcgcagtcatccagaag

SEQ ID NO: 132493 - DNA, 25 bp, Saccharomyces pastorianus
aattctggatgcctttatgccttat

SEQ ID NO: 132494 - DNA, 25 bp, Saccharomyces pastorianus
aaggtcatccttgtccattgtacac

SEQ ID NO: 132495 - DNA, 25 bp, Saccharomyces pastorianus
accttgattggttcactagtggcta

SEQ ID NO: 132496 - DNA, 25 bp, Saccharomyces pastorianus
gacaatgctattctacctgtttcga

SEQ ID NO: 132497 - DNA, 25 bp, Saccharomyces pastorianus
gaaccccggtctttgtacggatgag

SEQ ID NO: 132498 - DNA, 25 bp, Saccharomyces pastorianus
tgatgatgtcacttcttttcctttg

SEQ ID NO: 132499 - DNA, 25 bp, Saccharomyces pastorianus
ctcaggctctttggcttatcttaaa

SEQ ID NO: 132500 - DNA, 25 bp, Saccharomyces pastorianus
gatacacatctggaaggcccatttg

SEQ ID NO: 132501 - DNA, 25 bp, Saccharomyces pastorianus
ggctattgaatctggcttgccaatt

SEQ ID NO: 132502 - DNA, 25 bp, Saccharomyces pastorianus
agtcatctgggcctacgttacaaga

SEQ ID NO: 132503 - DNA, 25 bp, Saccharomyces pastorianus
gtcatctgcaccttgtaaaacacat

SEQ ID NO: 132504 - DNA, 25 bp, Saccharomyces pastorianus
gcctgccaacaccatatctatatgt

SEQ ID NO: 132505 - DNA, 25 bp, Saccharomyces pastorianus
ttcagcattttaggttgcccagccg

SEQ ID NO: 132506 - DNA, 25 bp, Saccharomyces pastorianus
gaggaaggcctatgaatcccactta

SEQ ID NO: 132507 - DNA, 25 bp, Saccharomyces pastorianus
gggctcgacccaaaaacaactatca

SEQ ID NO: 132508 - DNA, 25 bp, Saccharomyces pastorianus
aaggtgcttcgaaggatcttttcag

SEQ ID NO: 132509 - DNA, 25 bp, Saccharomyces pastorianus
gatccaaatctcgaagtaggtgcaa

SEQ ID NO: 132510 - DNA, 25 bp, Saccharomyces pastorianus
aatacatctacaaagcctgccaaca

SEQ ID NO: 132511 - DNA, 25 bp, Saccharomyces pastorianus
ttgcccagccggtttaagaagtaag

SEQ ID NO: 132512 - DNA, 25 bp, Saccharomyces pastorianus
aatcactgttcctgtgtcatctgca

SEQ ID NO: 132513 - DNA, 25 bp, Saccharomyces pastorianus
catggtagaattgcccatcatctgg

SEQ ID NO: 132514 - DNA, 25 bp, Saccharomyces pastorianus
gacccattcaccaacgacgtatcaa

SEQ ID NO: 132515 - DNA, 25 bp, Saccharomyces pastorianus
accttcacttgtatacacttatgtt

SEQ ID NO: 132516 - DNA, 25 bp, Saccharomyces pastorianus
gtatacacttatgttaatactacag

SEQ ID NO: 132517 - DNA, 25 bp, Saccharomyces pastorianus
ccgccgaataagaaaacagacccat

SEQ ID NO: 132518 - DNA, 25 bp, Saccharomyces pastorianus
agacaaacttctcccaaaatgtatt

SEQ ID NO: 132519 - DNA, 25 bp, Saccharomyces pastorianus
agaaaacagacccattcaccaacga

SEQ ID NO: 132520 - DNA, 25 bp, Saccharomyces pastorianus
acaccatgctcaccttcacttgtat

SEQ ID NO: 132521 - DNA, 25 bp, Saccharomyces pastorianus
atgctcaccttcacttgtatacact

SEQ ID NO: 132522 - DNA, 25 bp, Saccharomyces pastorianus
gacgtatcaagttacttcacccaca

SEQ ID NO: 132523 - DNA, 25 bp, Saccharomyces pastorianus
gtcagacagacaaacttctcccaaa

SEQ ID NO: 132524 - DNA, 25 bp, Saccharomyces pastorianus
gctcaccttcacttgtatacactta

SEQ ID NO: 132525 - DNA, 25 bp, Saccharomyces pastorianus
gtgcttttcagtcctgagattcgtg

SEQ ID NO: 132526 - DNA, 25 bp, Saccharomyces pastorianus
aggtgcttttcagtcctgagattcg

SEQ ID NO: 132527 - DNA, 25 bp, Saccharomyces pastorianus
tgaggtgcttttcagtcctgagatt

SEQ ID NO: 132528 - DNA, 25 bp, Saccharomyces pastorianus
tgacccactccctagaaacagttta

SEQ ID NO: 132529 - DNA, 25 bp, Saccharomyces pastorianus
gaggtgcttttcagtcctgagattc

SEQ ID NO: 132530 - DNA, 25 bp, Saccharomyces pastorianus
ggtgcttttcagtcctgagattcgt

SEQ ID NO: 132531 - DNA, 25 bp, Saccharomyces pastorianus
accttgaaggcagccgcagttaagg

SEQ ID NO: 132532 - DNA, 25 bp, Saccharomyces pastorianus
ttgacccactccctagaaacagttt

SEQ ID NO: 132533 - DNA, 25 bp, Saccharomyces pastorianus
ttgaggtgcttttcagtcctgagat

SEQ ID NO: 132534 - DNA, 25 bp, Saccharomyces pastorianus
tgcttttcagtcctgagattcgtga

SEQ ID NO: 132535 - DNA, 25 bp, Saccharomyces pastorianus
caaccttgaaggcagccgcagttaa

SEQ ID NO: 132536 - DNA, 25 bp, Saccharomyces pastorianus
gtaagaccgagaagaaggattggaa

SEQ ID NO: 132537 - DNA, 25 bp, Saccharomyces pastorianus
gccatgtcgatttcgactgcatgca

SEQ ID NO: 132538 - DNA, 25 bp, Saccharomyces pastorianus
gtcccaccttctaggagaggtattt

SEQ ID NO: 132539 - DNA, 25 bp, Saccharomyces pastorianus
catgtcgatttcgactgcatgcaac

SEQ ID NO: 132540 - DNA, 25 bp, Saccharomyces pastorianus
tatttggtgcagctgggatgatggc

SEQ ID NO: 132541 - DNA, 25 bp, Saccharomyces pastorianus
gtgcagctgggatgatggcttgtat

SEQ ID NO: 132542 - DNA, 25 bp, Saccharomyces pastorianus
atcttgggtcccaccttctaggaga

SEQ ID NO: 132543 - DNA, 25 bp, Saccharomyces pastorianus
tgggtcccaccttctaggagaggta

SEQ ID NO: 132544 - DNA, 25 bp, Saccharomyces pastorianus
caccttctaggagaggtatttcttc

SEQ ID NO: 132545 - DNA, 25 bp, Saccharomyces pastorianus
gggtcccaccttctaggagaggtat

SEQ ID NO: 132546 - DNA, 25 bp, Saccharomyces pastorianus
cttgggtcccaccttctaggagagg

SEQ ID NO: 132547 - DNA, 25 bp, Saccharomyces pastorianus
tggtaagattatctatggtcttggt

SEQ ID NO: 132548 - DNA, 25 bp, Saccharomyces pastorianus
ctttgctttttatgggctttgatta

SEQ ID NO: 132549 - DNA, 25 bp, Saccharomyces pastorianus
acttcgttggtaagattatctatgg

SEQ ID NO: 132550 - DNA, 25 bp, Saccharomyces pastorianus
ggctttgctttttatgggctttgat

SEQ ID NO: 132551 - DNA, 25 bp, Saccharomyces pastorianus
cgaagaggcccgtgtttccattgcc

SEQ ID NO: 132552 - DNA, 25 bp, Saccharomyces pastorianus
tgagagacacgaagaggcccgtgtt

SEQ ID NO: 132553 - DNA, 25 bp, Saccharomyces pastorianus
acgaagaggcccgtgtttccattgc

SEQ ID NO: 132554 - DNA, 25 bp, Saccharomyces pastorianus
gggctttgctttttatgggctttga

SEQ ID NO: 132555 - DNA, 25 bp, Saccharomyces pastorianus
caatacttcgttggtaagattatct

SEQ ID NO: 132556 - DNA, 25 bp, Saccharomyces pastorianus
atgggctttgattatcatcattggt

SEQ ID NO: 132557 - DNA, 25 bp, Saccharomyces pastorianus
ttttatgggctttgattatcatcat

SEQ ID NO: 132558 - DNA, 25 bp, Saccharomyces pastorianus
tggtaagattatctatggtcttggt

SEQ ID NO: 132559 - DNA, 25 bp, Saccharomyces pastorianus
ctttgctttttatgggctttgatta

SEQ ID NO: 132560 - DNA, 25 bp, Saccharomyces pastorianus
gcttttgtctgagatagctcccaca

SEQ ID NO: 132561 - DNA, 25 bp, Saccharomyces pastorianus
gaacttcggttcttacaagcatagc

SEQ ID NO: 132562 - DNA, 25 bp, Saccharomyces pastorianus
cgaagaggcccgtgtttccattgcc

SEQ ID NO: 132563 - DNA, 25 bp, Saccharomyces pastorianus
tgagagacacgaagaggcccgtgtt

SEQ ID NO: 132564 - DNA, 25 bp, Saccharomyces pastorianus
acgaagaggcccgtgtttccattgc

SEQ ID NO: 132565 - DNA, 25 bp, Saccharomyces pastorianus
gggctttgctttttatgggctttga

SEQ ID NO: 132566 - DNA, 25 bp, Saccharomyces pastorianus
caatacttcgttggtaagattatct

SEQ ID NO: 132567 - DNA, 25 bp, Saccharomyces pastorianus
atgggctttgattatcatcattggt

SEQ ID NO: 132568 - DNA, 25 bp, Saccharomyces pastorianus
ttttatgggctttgattatcatcat

SEQ ID NO: 132569 - DNA, 25 bp, Saccharomyces pastorianus
aacgggaactataactttctgctgg

SEQ ID NO: 132570 - DNA, 25 bp, Saccharomyces pastorianus
actttctgctggacgttccatttcc

SEQ ID NO: 132571 - DNA, 25 bp, Saccharomyces pastorianus
ataactttctgctggacgttccatt

SEQ ID NO: 132572 - DNA, 25 bp, Saccharomyces pastorianus
ggaactataactttctgctggacgt

SEQ ID NO: 132573 - DNA, 25 bp, Saccharomyces pastorianus
aactataactttctgctggacgttc

SEQ ID NO: 132574 - DNA, 25 bp, Saccharomyces pastorianus
ctataactttctgctggacgttcca

SEQ ID NO: 132575 - DNA, 25 bp, Saccharomyces pastorianus
cgggaactataactttctgctggac

SEQ ID NO: 132576 - DNA, 25 bp, Saccharomyces pastorianus
aactttctgctggacgttccatttc

SEQ ID NO: 132577 - DNA, 25 bp, Saccharomyces pastorianus
tctgctggacgttccatttccccat

SEQ ID NO: 132578 - DNA, 25 bp, Saccharomyces pastorianus
tataactttctgctggacgttccat

SEQ ID NO: 132579 - DNA, 25 bp, Saccharomyces pastorianus
ccatccccttacaacgcatagtaaa

SEQ ID NO: 132580 - DNA, 25 bp, Saccharomyces pastorianus
gccttcaccacaattcgatcgttaa

SEQ ID NO: 132581 - DNA, 25 bp, Saccharomyces pastorianus
gagtatgcaatgtaccgcctgatca

SEQ ID NO: 132582 - DNA, 25 bp, Saccharomyces pastorianus
atctattttatatgcccgttttccg

SEQ ID NO: 132583 - DNA, 25 bp, Saccharomyces pastorianus
tacgtgtacgcctgaatgtcgggat

SEQ ID NO: 132584 - DNA, 25 bp, Saccharomyces pastorianus
atcatcagctgatcgcttcagtgcg

SEQ ID NO: 132585 - DNA, 25 bp, Saccharomyces pastorianus
gtcgcaacactctccagtatattgt

SEQ ID NO: 132586 - DNA, 25 bp, Saccharomyces pastorianus
tggagtctttttcattagtctgcac

SEQ ID NO: 132587 - DNA, 25 bp, Saccharomyces pastorianus
gtttgacatgcctacgttcttcgtg

SEQ ID NO: 132588 - DNA, 25 bp, Saccharomyces pastorianus
tccgcttttaaatctcttgtcgcaa

SEQ ID NO: 132589 - DNA, 25 bp, Saccharomyces pastorianus
gaaggtttccgcctgataacgattt

SEQ ID NO: 132590 - DNA, 25 bp, Saccharomyces pastorianus
tttttccggttcttcgtttgacatg

SEQ ID NO: 132591 - DNA, 25 bp, Saccharomyces pastorianus
aaatgattgtgactccatgaataac

SEQ ID NO: 132592 - DNA, 25 bp, Saccharomyces pastorianus
tagcatggcagcgacgctatcgcaa

SEQ ID NO: 132593 - DNA, 25 bp, Saccharomyces pastorianus
aaccagcgcggttattgatcaagaa

SEQ ID NO: 132594 - DNA, 25 bp, Saccharomyces pastorianus
cagtgcaaagtgtaatatcgcccaa

SEQ ID NO: 132595 - DNA, 25 bp, Saccharomyces pastorianus
atatcgcccaaaaagcatgcaattg

SEQ ID NO: 132596 - DNA, 25 bp, Saccharomyces pastorianus
gatctgtttgaacccaagcgcgtta

SEQ ID NO: 132597 - DNA, 25 bp, Saccharomyces pastorianus
gaatgagtctatttcagtcatgaaa

SEQ ID NO: 132598 - DNA, 25 bp, Saccharomyces pastorianus
ttcgataacatcaacacactctcat

SEQ ID NO: 132599 - DNA, 25 bp, Saccharomyces pastorianus
gacgctatcgcaaatcaagagtact

SEQ ID NO: 132600 - DNA, 25 bp, Saccharomyces pastorianus
gaatctgacaactgcaaccagcgcg

SEQ ID NO: 132601 - DNA, 25 bp, Saccharomyces pastorianus
gagaacgctatatcccttttgaaga

SEQ ID NO: 132602 - DNA, 25 bp, Saccharomyces pastorianus
gatagaagctccaatagcatcagta

SEQ ID NO: 132603 - DNA, 25 bp, Saccharomyces pastorianus
atacgggtcaagatagaagctccaa

SEQ ID NO: 132604 - DNA, 25 bp, Saccharomyces pastorianus
cagtaaaaatggcaactctcaggtt

SEQ ID NO: 132605 - DNA, 25 bp, Saccharomyces pastorianus
gatgtcacactgttcctaatgagga

SEQ ID NO: 132606 - DNA, 25 bp, Saccharomyces pastorianus
aactctcaggttggatgtcacactg

SEQ ID NO: 132607 - DNA, 25 bp, Saccharomyces pastorianus
cactgtagctgtgcgatgcagagga

SEQ ID NO: 132608 - DNA, 25 bp, Saccharomyces pastorianus
atgccagcggaaaaccaaaatacgg

SEQ ID NO: 132609 - DNA, 25 bp, Saccharomyces pastorianus
aggttggatgtcacactgttcctaa

SEQ ID NO: 132610 - DNA, 25 bp, Saccharomyces pastorianus
gaggaactgaacatcactgtagctg

SEQ ID NO: 132611 - DNA, 25 bp, Saccharomyces pastorianus
aacatcactgtagctgtgcgatgca

SEQ ID NO: 132612 - DNA, 25 bp, Saccharomyces pastorianus
gaagctccaatagcatcagtaaaaa

SEQ ID NO: 132613 - DNA, 25 bp, Saccharomyces pastorianus
acaacggtgtgtgtgctgtgaagct

SEQ ID NO: 132614 - DNA, 25 bp, Saccharomyces pastorianus
gaggattttcgtacacaacggtgtg

SEQ ID NO: 132615 - DNA, 25 bp, Saccharomyces pastorianus
tcttctgcagaggattttcgtacac

SEQ ID NO: 132616 - DNA, 25 bp, Saccharomyces pastorianus
tgctgtgaagctgtctgcttcctta

SEQ ID NO: 132617 - DNA, 25 bp, Saccharomyces pastorianus
agtggcatatacactcttctgcaga

SEQ ID NO: 132618 - DNA, 25 bp, Saccharomyces pastorianus
tacactcttctgcagaggattttcg

SEQ ID NO: 132619 - DNA, 25 bp, Saccharomyces pastorianus
aagctgtctgcttccttacttggct

SEQ ID NO: 132620 - DNA, 25 bp, Saccharomyces pastorianus
tctgcagaggattttcgtacacaac

SEQ ID NO: 132621 - DNA, 25 bp, Saccharomyces pastorianus
gctgtctgcttccttacttggctgt

SEQ ID NO: 132622 - DNA, 25 bp, Saccharomyces pastorianus
tgtgtgtgctgtgaagctgtctgct

SEQ ID NO: 132623 - DNA, 25 bp, Saccharomyces pastorianus
ggcatatacactcttctgcagagga

SEQ ID NO: 132624 - DNA, 25 bp, Saccharomyces pastorianus
gcattacgtactgcggtgcggaagt

SEQ ID NO: 132625 - DNA, 25 bp, Saccharomyces pastorianus
gaagtgtggatgagtggcatataca

SEQ ID NO: 132626 - DNA, 25 bp, Saccharomyces pastorianus
acgtactgcggtgcggaagtgtgga

SEQ ID NO: 132627 - DNA, 25 bp, Saccharomyces pastorianus
ttttcgctttcacgataccgcatta

SEQ ID NO: 132628 - DNA, 25 bp, Saccharomyces pastorianus
ttcacgataccgcattacgtactgc

SEQ ID NO: 132629 - DNA, 25 bp, Saccharomyces pastorianus
ttttttcgctttcacgataccgcat

SEQ ID NO: 132630 - DNA, 25 bp, Saccharomyces pastorianus
agtgagccgcataaaatggcatgtc

SEQ ID NO: 132631 - DNA, 25 bp, Saccharomyces pastorianus
gctttcacgataccgcattacgtac

SEQ ID NO: 132632 - DNA, 25 bp, Saccharomyces pastorianus
cttttgttagaagtgagccgcataa

SEQ ID NO: 132633 - DNA, 25 bp, Saccharomyces pastorianus
gccgcataaaatggcatgtcggcac

SEQ ID NO: 132634 - DNA, 25 bp, Saccharomyces pastorianus
ttcgctttcacgataccgcattacg

SEQ ID NO: 132635 - DNA, 25 bp, Saccharomyces pastorianus
acaacggtgtgtgtgctgtgaagct

SEQ ID NO: 132636 - DNA, 25 bp, Saccharomyces pastorianus
tttgcttgcttgtgcgtcatggtca

SEQ ID NO: 132637 - DNA, 25 bp, Saccharomyces pastorianus
gaggattttcgtacacaacggtgtg

SEQ ID NO: 132638 - DNA, 25 bp, Saccharomyces pastorianus
tcttctgcagaggattttcgtacac

SEQ ID NO: 132639 - DNA, 25 bp, Saccharomyces pastorianus
ccttacttggctgtttgcttgcttg

SEQ ID NO: 132640 - DNA, 25 bp, Saccharomyces pastorianus
gtctgcttccttacttggctgtttg

SEQ ID NO: 132641 - DNA, 25 bp, Saccharomyces pastorianus
tgcttgtgcgtcatggtcacttttg

SEQ ID NO: 132642 - DNA, 25 bp, Saccharomyces pastorianus
aagctgtctgcttccttacttggct

SEQ ID NO: 132643 - DNA, 25 bp, Saccharomyces pastorianus
tctgcagaggattttcgtacacaac

SEQ ID NO: 132644 - DNA, 25 bp, Saccharomyces pastorianus
tgtgtgtgctgtgaagctgtctgct

SEQ ID NO: 132645 - DNA, 25 bp, Saccharomyces pastorianus
gtggcatatacactcttctgcagag

SEQ ID NO: 132646 - DNA, 25 bp, Saccharomyces pastorianus
cgtctatcttgttctgtctggtata

SEQ ID NO: 132647 - DNA, 25 bp, Saccharomyces pastorianus
gtccttctcgtctatcttgttctgt

SEQ ID NO: 132648 - DNA, 25 bp, Saccharomyces pastorianus
ttctcgtctatcttgttctgtctgg

SEQ ID NO: 132649 - DNA, 25 bp, Saccharomyces pastorianus
tacatacatatacgtacattgtttc

SEQ ID NO: 132650 - DNA, 25 bp, Saccharomyces pastorianus
tatcttgttctgtctggtatagagt

SEQ ID NO: 132651 - DNA, 25 bp, Saccharomyces pastorianus
ggtatagagtaatacttacatacat

SEQ ID NO: 132652 - DNA, 25 bp, Saccharomyces pastorianus
gttctgtctggtatagagtaatact

SEQ ID NO: 132653 - DNA, 25 bp, Saccharomyces pastorianus
ctcgtctatcttgttctgtctggta

SEQ ID NO: 132654 - DNA, 25 bp, Saccharomyces pastorianus
gtgtccttctcgtctatcttgttct

SEQ ID NO: 132655 - DNA, 25 bp, Saccharomyces pastorianus
tcttgttctgtctggtatagagtaa

SEQ ID NO: 132656 - DNA, 25 bp, Saccharomyces pastorianus
atgtgtccttctcgtctatcttgtt

SEQ ID NO: 132657 - DNA, 25 bp, Saccharomyces pastorianus
tcaagccctatgttccagattttaa

SEQ ID NO: 132658 - DNA, 25 bp, Saccharomyces pastorianus
gctattccagctggtaactttccaa

SEQ ID NO: 132659 - DNA, 25 bp, Saccharomyces pastorianus
aagactcgtgctttcgttcttctcg

SEQ ID NO: 132660 - DNA, 25 bp, Saccharomyces pastorianus
acgttgcttacggtgttctttctca

SEQ ID NO: 132661 - DNA, 25 bp, Saccharomyces pastorianus
aagtatcgctggaacgttgcttacg

SEQ ID NO: 132662 - DNA, 25 bp, Saccharomyces pastorianus
ggtgttctttctcacaagactcgtg

SEQ ID NO: 132663 - DNA, 25 bp, Saccharomyces pastorianus
tttccaaggaatcttcaagccctat

SEQ ID NO: 132664 - DNA, 25 bp, Saccharomyces pastorianus
tgaccgcatcttgttttgcgtgcca

SEQ ID NO: 132665 - DNA, 25 bp, Saccharomyces pastorianus
gttggcaacagggtgaccgcatctt

SEQ ID NO: 132666 - DNA, 25 bp, Saccharomyces pastorianus
cgttcaaccctaccacagtaagtat

SEQ ID NO: 132667 - DNA, 25 bp, Saccharomyces pastorianus
aatactcccagcgtagagttctacg

SEQ ID NO: 132668 - DNA, 25 bp, Saccharomyces pastorianus
tgtcatctggcacatctacgaacct

SEQ ID NO: 132669 - DNA, 25 bp, Saccharomyces pastorianus
tcctgcattctcctttgaaaagcac

SEQ ID NO: 132670 - DNA, 25 bp, Saccharomyces pastorianus
gggtctcgattctcgcgaaagctaa

SEQ ID NO: 132671 - DNA, 25 bp, Saccharomyces pastorianus
aagcacatggcttggatggctgaag

SEQ ID NO: 132672 - DNA, 25 bp, Saccharomyces pastorianus
gaattacaatgtcatcggcttgccc

SEQ ID NO: 132673 - DNA, 25 bp, Saccharomyces pastorianus
gttcagaacaggctcacactttcct

SEQ ID NO: 132674 - DNA, 25 bp, Saccharomyces pastorianus
tagactctcccgcaggatgaattac

SEQ ID NO: 132675 - DNA, 25 bp, Saccharomyces pastorianus
cggcttgccccattatgtcatctgg

SEQ ID NO: 132676 - DNA, 25 bp, Saccharomyces pastorianus
ggcatacatgagagatccaaacggt

SEQ ID NO: 132677 - DNA, 25 bp, Saccharomyces pastorianus
gacagaagcattcggtagactctcc

SEQ ID NO: 132678 - DNA, 25 bp, Saccharomyces pastorianus
ctacgaaccttccagtgacgactta

SEQ ID NO: 132679 - DNA, 25 bp, Saccharomyces pastorianus
gtttgtgccaatgactgatgacttt

SEQ ID NO: 132680 - DNA, 25 bp, Saccharomyces pastorianus
agcaaaggccacagtccggaatttt

SEQ ID NO: 132681 - DNA, 25 bp, Saccharomyces pastorianus
caagtttttcttcatggacgacaaa

SEQ ID NO: 132682 - DNA, 25 bp, Saccharomyces pastorianus
acgggtattttcatcattcagttgg

SEQ ID NO: 132683 - DNA, 25 bp, Saccharomyces pastorianus
gatctattttgtctcaatttgccgt

SEQ ID NO: 132684 - DNA, 25 bp, Saccharomyces pastorianus
gggtgtcgagcattttttcaagttt

SEQ ID NO: 132685 - DNA, 25 bp, Saccharomyces pastorianus
gttgaccctaacattattgctcgat

SEQ ID NO: 132686 - DNA, 25 bp, Saccharomyces pastorianus
ttggtgatggtcaagccactgtctc

SEQ ID NO: 132687 - DNA, 25 bp, Saccharomyces pastorianus
cactgtctccggtttgttactatcg

SEQ ID NO: 132688 - DNA, 25 bp, Saccharomyces pastorianus
aggaatttgctccatcattattgaa

SEQ ID NO: 132689 - DNA, 25 bp, Saccharomyces pastorianus
aatttgccgttcatattgccacttt

SEQ ID NO: 132690 - DNA, 25 bp, Saccharomyces pastorianus
gcattacaagtaacacctcctgaac

SEQ ID NO: 132691 - DNA, 25 bp, Saccharomyces pastorianus
gcccttgccaagttctatgtctatt

SEQ ID NO: 132692 - DNA, 25 bp, Saccharomyces pastorianus
atggaggtgccttagccatcgtcac

SEQ ID NO: 132693 - DNA, 25 bp, Saccharomyces pastorianus
ccatcgtcaccaaaactggctttga

SEQ ID NO: 132694 - DNA, 25 bp, Saccharomyces pastorianus
aaggtctagctggtatctctgcgga

SEQ ID NO: 132695 - DNA, 25 bp, Saccharomyces pastorianus
acataaatcggatatccctgctcca

SEQ ID NO: 132696 - DNA, 25 bp, Saccharomyces pastorianus
tgatttactccgctgaacgtgtttc

SEQ ID NO: 132697 - DNA, 25 bp, Saccharomyces pastorianus
atggctgtcaacagttctctggctg

SEQ ID NO: 132698 - DNA, 25 bp, Saccharomyces pastorianus
gaagcgttgatgttcattcttttct

SEQ ID NO: 132699 - DNA, 25 bp, Saccharomyces pastorianus
gattttcgctgttattgcatcctgg

SEQ ID NO: 132700 - DNA, 25 bp, Saccharomyces pastorianus
aacattcgtcacttgtacagcgctg

SEQ ID NO: 132701 - DNA, 25 bp, Saccharomyces pastorianus
aaagagcttttcgaaggtctgagaa

SEQ ID NO: 132702 - DNA, 25 bp, Saccharomyces pastorianus
taagataatctcactggcggccatc

SEQ ID NO: 132703 - DNA, 25 bp, Saccharomyces pastorianus
gaaagcggctttgatgagctagcta

SEQ ID NO: 132704 - DNA, 25 bp, Saccharomyces pastorianus
ggcgtcatacctctatttttacttt

SEQ ID NO: 132705 - DNA, 25 bp, Saccharomyces pastorianus
agtcaaaggttggagggcgtcatac

SEQ ID NO: 132706 - DNA, 25 bp, Saccharomyces pastorianus
tagatcattcaccatacaagaccat

SEQ ID NO: 132707 - DNA, 25 bp, Saccharomyces pastorianus
tttactttgcggtactgagggccaa

SEQ ID NO: 132708 - DNA, 25 bp, Saccharomyces pastorianus
ggcggccatcccagatggatttcaa

SEQ ID NO: 132709 - DNA, 25 bp, Saccharomyces pastorianus
tgagctgtggatgagaacgttgcat

SEQ ID NO: 132710 - DNA, 25 bp, Saccharomyces pastorianus
atatcggaattcattggtgagctgt

SEQ ID NO: 132711 - DNA, 25 bp, Saccharomyces pastorianus
atgccatacctcaaaattcggttac

SEQ ID NO: 132712 - DNA, 25 bp, Saccharomyces pastorianus
ttgcgaccataccattgtagtgttg

SEQ ID NO: 132713 - DNA, 25 bp, Saccharomyces pastorianus
gacgacgccacatgcacaggtaaat

SEQ ID NO: 132714 - DNA, 25 bp, Saccharomyces pastorianus
tccagctggttaaatgcctcttttg

SEQ ID NO: 132715 - DNA, 25 bp, Saccharomyces pastorianus
gtggctccgaaactggatactattt

SEQ ID NO: 132716 - DNA, 25 bp, Saccharomyces pastorianus
cgaaagattttatgccaccgatggc

SEQ ID NO: 132717 - DNA, 25 bp, Saccharomyces pastorianus
gtaccgccaatacaatcttttgccg

SEQ ID NO: 132718 - DNA, 25 bp, Saccharomyces pastorianus
atttctttattaacttccagctggt

SEQ ID NO: 132719 - DNA, 25 bp, Saccharomyces pastorianus
gacaatttactcctttgacttcaga

SEQ ID NO: 132720 - DNA, 25 bp, Saccharomyces pastorianus
cacacgtttattttctttgcctact

SEQ ID NO: 132721 - DNA, 25 bp, Saccharomyces pastorianus
gggaggatttgcttgacgacgccac

SEQ ID NO: 132722 - DNA, 25 bp, Saccharomyces pastorianus
atctacgactctaatgtggctccga

SEQ ID NO: 132723 - DNA, 25 bp, Saccharomyces pastorianus
tagcattatccaattgtacgcgaat

SEQ ID NO: 132724 - DNA, 25 bp, Saccharomyces pastorianus
ataggtcttccagcttatatgagtg

SEQ ID NO: 132725 - DNA, 25 bp, Saccharomyces pastorianus
tttacatgccgttgtgaagccactg

SEQ ID NO: 132726 - DNA, 25 bp, Saccharomyces pastorianus
tgagaacccgctttccaattaggac

SEQ ID NO: 132727 - DNA, 25 bp, Saccharomyces pastorianus
agattgtatattctcggtgttcata

SEQ ID NO: 132728 - DNA, 25 bp, Saccharomyces pastorianus
gagtaccctgaatgtccgtacttgg

SEQ ID NO: 132729 - DNA, 25 bp, Saccharomyces pastorianus
attttagaggcctattccttcccag

SEQ ID NO: 132730 - DNA, 25 bp, Saccharomyces pastorianus
ttcccagcactttcatcgattaacc

SEQ ID NO: 132731 - DNA, 25 bp, Saccharomyces pastorianus
gacgtccatagaatatccatcagag

SEQ ID NO: 132732 - DNA, 25 bp, Saccharomyces pastorianus
tcgattatcagacctttcttgtgca

SEQ ID NO: 132733 - DNA, 25 bp, Saccharomyces pastorianus
acttatcacagagacccttttatgg

SEQ ID NO: 132734 - DNA, 25 bp, Saccharomyces pastorianus
gaaattgaggctactgcgccaattg

SEQ ID NO: 132735 - DNA, 25 bp, Saccharomyces pastorianus
aacgacgttgaaattgaggctactg

SEQ ID NO: 132736 - DNA, 25 bp, Saccharomyces pastorianus
aacaaacaccagagtcaaacgacgt

SEQ ID NO: 132737 - DNA, 25 bp, Saccharomyces pastorianus
gccaattgatgacaatacagacgat

SEQ ID NO: 132738 - DNA, 25 bp, Saccharomyces pastorianus
ttgaaattgaggctactgcgccaat

SEQ ID NO: 132739 - DNA, 25 bp, Saccharomyces pastorianus
gctactgcgccaattgatgacaata

SEQ ID NO: 132740 - DNA, 25 bp, Saccharomyces pastorianus
attgaggctactgcgccaattgatg

SEQ ID NO: 132741 - DNA, 25 bp, Saccharomyces pastorianus
actgcgccaattgatgacaatacag

SEQ ID NO: 132742 - DNA, 25 bp, Saccharomyces pastorianus
aacaccagagtcaaacgacgttgaa

SEQ ID NO: 132743 - DNA, 25 bp, Saccharomyces pastorianus
gacgttgaaattgaggctactgcgc

SEQ ID NO: 132744 - DNA, 25 bp, Saccharomyces pastorianus
ggctactgcgccaattgatgacaat

SEQ ID NO: 132745 - DNA, 25 bp, Saccharomyces pastorianus
agctctggcgttgggtagacatctt

SEQ ID NO: 132746 - DNA, 25 bp, Saccharomyces pastorianus
gaattatttgttctggctggccttt

SEQ ID NO: 132747 - DNA, 25 bp, Saccharomyces pastorianus
aaatagtcatcgatgccatgcaggg

SEQ ID NO: 132748 - DNA, 25 bp, Saccharomyces pastorianus
gttccaaaactgtgatcttttcgtc

SEQ ID NO: 132749 - DNA, 25 bp, Saccharomyces pastorianus
gctggcctttgattgccatcaacaa

SEQ ID NO: 132750 - DNA, 25 bp, Saccharomyces pastorianus
agtgtatcgtcgctggaatctgcta

SEQ ID NO: 132751 - DNA, 25 bp, Saccharomyces pastorianus
ggcgcctattcacagagaacttctt

SEQ ID NO: 132752 - DNA, 25 bp, Saccharomyces pastorianus
tgactgtacattgagcgatctggcg

SEQ ID NO: 132753 - DNA, 25 bp, Saccharomyces pastorianus
agatctggtgccaaagctctggcgt

SEQ ID NO: 132754 - DNA, 25 bp, Saccharomyces pastorianus
atccggcatgccagatattttcttt

SEQ ID NO: 132755 - DNA, 25 bp, Saccharomyces pastorianus
gtaggtataccacagggcgcctatt

SEQ ID NO: 132756 - DNA, 25 bp, Saccharomyces pastorianus
tgtatatccaatagcgacgcctcaa

SEQ ID NO: 132757 - DNA, 25 bp, Saccharomyces pastorianus
ataatgagctctggtcacactttga

SEQ ID NO: 132758 - DNA, 25 bp, Saccharomyces pastorianus
gctccttatccggtgtattctatga

SEQ ID NO: 132759 - DNA, 25 bp, Saccharomyces pastorianus
tggcaagtgctcaaaatccgtctat

SEQ ID NO: 132760 - DNA, 25 bp, Saccharomyces pastorianus
aatagtgcaagctctgctacctcta

SEQ ID NO: 132761 - DNA, 25 bp, Saccharomyces pastorianus
atacgctaattctcagtacactcca

SEQ ID NO: 132762 - DNA, 25 bp, Saccharomyces pastorianus
tattacaattcttctgcttctgcat

SEQ ID NO: 132763 - DNA, 25 bp, Saccharomyces pastorianus
tacaagcactaactcaggcaccatg

SEQ ID NO: 132764 - DNA, 25 bp, Saccharomyces pastorianus
aacatcctttgcctactgtatatcc

SEQ ID NO: 132765 - DNA, 25 bp, Saccharomyces pastorianus
aggcaccatgctatcaaatcctgca

SEQ ID NO: 132766 - DNA, 25 bp, Saccharomyces pastorianus
gcagaaccttctggtgctacaagca

SEQ ID NO: 132767 - DNA, 25 bp, Saccharomyces pastorianus
tacggcgaatccaccttatatcact

SEQ ID NO: 132768 - DNA, 25 bp, Saccharomyces pastorianus
aactttgatgtatacggcgaatcca

SEQ ID NO: 132769 - DNA, 25 bp, Saccharomyces pastorianus
gctctggatacccaatcactcaatt

SEQ ID NO: 132770 - DNA, 25 bp, Saccharomyces pastorianus
aatctcctgataacactaacgctac

SEQ ID NO: 132771 - DNA, 25 bp, Saccharomyces pastorianus
tccactcccctgaatactgttattt

SEQ ID NO: 132772 - DNA, 25 bp, Saccharomyces pastorianus
aatcactcaatttgctcccgcatta

SEQ ID NO: 132773 - DNA, 25 bp, Saccharomyces pastorianus
ctaacgctactggtatgaatacaca

SEQ ID NO: 132774 - DNA, 25 bp, Saccharomyces pastorianus
tttgctcccgcattaccatcaacaa

SEQ ID NO: 132775 - DNA, 25 bp, Saccharomyces pastorianus
cactaccaacggtaatggtcctaat

SEQ ID NO: 132776 - DNA, 25 bp, Saccharomyces pastorianus
ctgaatactgttatttccacgaata

SEQ ID NO: 132777 - DNA, 25 bp, Saccharomyces pastorianus
acaataaaagcaactcttccactcc

SEQ ID NO: 132778 - DNA, 25 bp, Saccharomyces pastorianus
gccgtcattacggatggaacttctg

SEQ ID NO: 132779 - DNA, 25 bp, Saccharomyces pastorianus
tcgtcgaaaatcaagctacctcctt

SEQ ID NO: 132780 - DNA, 25 bp, Saccharomyces pastorianus
gagtggtagtactgattccgccgtc

SEQ ID NO: 132781 - DNA, 25 bp, Saccharomyces pastorianus
tgacgctttgcttattcttcaagca

SEQ ID NO: 132782 - DNA, 25 bp, Saccharomyces pastorianus
gctacctcctttgaagaatcaccag

SEQ ID NO: 132783 - DNA, 25 bp, Saccharomyces pastorianus
gagtcagagcaagacacctccattt

SEQ ID NO: 132784 - DNA, 25 bp, Saccharomyces pastorianus
ggtgcgagaaataacccttcttcgt

SEQ ID NO: 132785 - DNA, 25 bp, Saccharomyces pastorianus
accagtttgatttgccacctactat

SEQ ID NO: 132786 - DNA, 25 bp, Saccharomyces pastorianus
acgccgggtctaatgctaatgctac

SEQ ID NO: 132787 - DNA, 25 bp, Saccharomyces pastorianus
actatgggccattcaagttttgagt

SEQ ID NO: 132788 - DNA, 25 bp, Saccharomyces pastorianus
gaaagaccttatttgatcgtatcag

SEQ ID NO: 132789 - DNA, 25 bp, Saccharomyces pastorianus
aagaagagcgccactgtcaaaaaag

SEQ ID NO: 132790 - DNA, 25 bp, Saccharomyces pastorianus
caagaagagcgccactgtcaaaaaa

SEQ ID NO: 132791 - DNA, 25 bp, Saccharomyces pastorianus
cttccaagaagagcgccactgtcaa

SEQ ID NO: 132792 - DNA, 25 bp, Saccharomyces pastorianus
caaatcaaagaccttccaagaagag

SEQ ID NO: 132793 - DNA, 25 bp, Saccharomyces pastorianus
gaccttccaagaagagcgccactgt

SEQ ID NO: 132794 - DNA, 25 bp, Saccharomyces pastorianus
gagcgccactgtcaaaaaagttgat

SEQ ID NO: 132795 - DNA, 25 bp, Saccharomyces pastorianus
gaagagcgccactgtcaaaaaagtt

SEQ ID NO: 132796 - DNA, 25 bp, Saccharomyces pastorianus
aagaccttccaagaagagcgccact

SEQ ID NO: 132797 - DNA, 25 bp, Saccharomyces pastorianus
gcgccactgtcaaaaaagttgatga

SEQ ID NO: 132798 - DNA, 25 bp, Saccharomyces pastorianus
agagcgccactgtcaaaaaagttga

SEQ ID NO: 132799 - DNA, 25 bp, Saccharomyces pastorianus
gaaacaaatcaaagaccttccaaga

SEQ ID NO: 132800 - DNA, 25 bp, Saccharomyces pastorianus
atggttatcctgtggcggacattac

SEQ ID NO: 132801 - DNA, 25 bp, Saccharomyces pastorianus
gataccgctaccttagcctataatg

SEQ ID NO: 132802 - DNA, 25 bp, Saccharomyces pastorianus
gattctttccttgagttttacgcgg

SEQ ID NO: 132803 - DNA, 25 bp, Saccharomyces pastorianus
tctttctagccatcatcggaggtgt

SEQ ID NO: 132804 - DNA, 25 bp, Saccharomyces pastorianus
tattcgaaattgttagcccacctat

SEQ ID NO: 132805 - DNA, 25 bp, Saccharomyces pastorianus
tatcagttcaggtcatctttctagc

SEQ ID NO: 132806 - DNA, 25 bp, Saccharomyces pastorianus
agcttctgtgctgccatatcagcta

SEQ ID NO: 132807 - DNA, 25 bp, Saccharomyces pastorianus
ttaactgccttgagcagcttctgtg

SEQ ID NO: 132808 - DNA, 25 bp, Saccharomyces pastorianus
atcgtgagaattgcggcaccaccaa

SEQ ID NO: 132809 - DNA, 25 bp, Saccharomyces pastorianus
ggtagcgccaccttctattaatata

SEQ ID NO: 132810 - DNA, 25 bp, Saccharomyces pastorianus
ggtgcgagtattgggccttacgaaa

SEQ ID NO: 132811 - DNA, 25 bp, Saccharomyces pastorianus
catttgcctgttgatttggaagctg

SEQ ID NO: 132812 - DNA, 25 bp, Saccharomyces pastorianus
aaacttggtctccatgttaacctat

SEQ ID NO: 132813 - DNA, 25 bp, Saccharomyces pastorianus
gttttgtctttttcatcgctccaca

SEQ ID NO: 132814 - DNA, 25 bp, Saccharomyces pastorianus
gtcagttttatataaccctccaatc

SEQ ID NO: 132815 - DNA, 25 bp, Saccharomyces pastorianus
gaatgctggtgaagccatcttttta

SEQ ID NO: 132816 - DNA, 25 bp, Saccharomyces pastorianus
caggtcctctggtaacggtaagtca

SEQ ID NO: 132817 - DNA, 25 bp, Saccharomyces pastorianus
gcctttaaagttcgacaggtcctct

SEQ ID NO: 132818 - DNA, 25 bp, Saccharomyces pastorianus
gatggtccaagtatcttaatcacta

SEQ ID NO: 132819 - DNA, 25 bp, Saccharomyces pastorianus
aacagttccctgatgacgtgggttt

SEQ ID NO: 132820 - DNA, 25 bp, Saccharomyces pastorianus
ttgaaagctgaacccggttttgtct

SEQ ID NO: 132821 - DNA, 25 bp, Saccharomyces pastorianus
gtatggctgcttctgacaacgtagt

SEQ ID NO: 132822 - DNA, 25 bp, Saccharomyces pastorianus
taccacctgctcctggttacgagaa

SEQ ID NO: 132823 - DNA, 25 bp, Saccharomyces pastorianus
aacttctgcgggtgccgacctacca

SEQ ID NO: 132824 - DNA, 25 bp, Saccharomyces pastorianus
taaagagaatgcattggctattggt

SEQ ID NO: 132825 - DNA, 25 bp, Saccharomyces pastorianus
tgccctggcctaacttctgcgggtg

SEQ ID NO: 132826 - DNA, 25 bp, Saccharomyces pastorianus
taaatcagtgaacaaaggtcattcc

SEQ ID NO: 132827 - DNA, 25 bp, Saccharomyces pastorianus
tggcctaacttctgcgggtgccgac

SEQ ID NO: 132828 - DNA, 25 bp, Saccharomyces pastorianus
gtcatcaatgccgaaaataaagaga

SEQ ID NO: 132829 - DNA, 25 bp, Saccharomyces pastorianus
acgattgtagtcatcaatgccgaaa

SEQ ID NO: 132830 - DNA, 25 bp, Saccharomyces pastorianus
agaaaggtacgattgtagtcatcaa

SEQ ID NO: 132831 - DNA, 25 bp, Saccharomyces pastorianus
gaatgcattggctattggtgaattg

SEQ ID NO: 132832 - DNA, 25 bp, Saccharomyces pastorianus
ctgctcctggttacgagaaaggtac

SEQ ID NO: 132833 - DNA, 25 bp, Saccharomyces pastorianus
caatccttcaagatgggccgcatat

SEQ ID NO: 132834 - DNA, 25 bp, Saccharomyces pastorianus
ctatgcctaaactaacagcctttgt

SEQ ID NO: 132835 - DNA, 25 bp, Saccharomyces pastorianus
aaggtcaaaccgtctcactatactt

SEQ ID NO: 132836 - DNA, 25 bp, Saccharomyces pastorianus
ggaaactatttctctcctagtgaac

SEQ ID NO: 132837 - DNA, 25 bp, Saccharomyces pastorianus
agcatagctgccacacgatcgataa

SEQ ID NO: 132838 - DNA, 25 bp, Saccharomyces pastorianus
attcttttagcatacacttcccatg

SEQ ID NO: 132839 - DNA, 25 bp, Saccharomyces pastorianus
aaaaggctgcacactcatatggtaa

SEQ ID NO: 132840 - DNA, 25 bp, Saccharomyces pastorianus
acgtcctatgcgataagttgtggtc

SEQ ID NO: 132841 - DNA, 25 bp, Saccharomyces pastorianus
agaatcttatgcttcctttctactc

SEQ ID NO: 132842 - DNA, 25 bp, Saccharomyces pastorianus
aacctttcagatactgctgctttaa

SEQ ID NO: 132843 - DNA, 25 bp, Saccharomyces pastorianus
taaatgacttcggttaccaccaaga

SEQ ID NO: 132844 - DNA, 25 bp, Saccharomyces pastorianus
acgatctttcgttcgagaagggaga

SEQ ID NO: 132845 - DNA, 25 bp, Saccharomyces pastorianus
gcgatttgaatgactcgatcagttt

SEQ ID NO: 132846 - DNA, 25 bp, Saccharomyces pastorianus
gaaaccacccctactatgcaaaatg

SEQ ID NO: 132847 - DNA, 25 bp, Saccharomyces pastorianus
gctcctcacgtgtaccatgaagtat

SEQ ID NO: 132848 - DNA, 25 bp, Saccharomyces pastorianus
tattgccaaagttgagtcactcggt

SEQ ID NO: 132849 - DNA, 25 bp, Saccharomyces pastorianus
tttgaaggtgaagctcctcacgtgt

SEQ ID NO: 132850 - DNA, 25 bp, Saccharomyces pastorianus
aaacgtcaacggcaattcgaagaag

SEQ ID NO: 132851 - DNA, 25 bp, Saccharomyces pastorianus
acagctagagctcatgaccaattaa

SEQ ID NO: 132852 - DNA, 25 bp, Saccharomyces pastorianus
gacttaaacgcagttttggcggaag

SEQ ID NO: 132853 - DNA, 25 bp, Saccharomyces pastorianus
gagtcactcggtggaagcgatttga

SEQ ID NO: 132854 - DNA, 25 bp, Saccharomyces pastorianus
atggtacttacgtacccgagagaag

SEQ ID NO: 132855 - DNA, 25 bp, Saccharomyces pastorianus
gttacctatatcgaaaagtcaattg

SEQ ID NO: 132856 - DNA, 25 bp, Saccharomyces pastorianus
tcctgttcaagagactgacatttca

SEQ ID NO: 132857 - DNA, 25 bp, Saccharomyces pastorianus
gatttacttgtctctgaagatatta

SEQ ID NO: 132858 - DNA, 25 bp, Saccharomyces pastorianus
tggtattcccgccaaacaagctcaa

SEQ ID NO: 132859 - DNA, 25 bp, Saccharomyces pastorianus
gacatttcaaaattagttacctata

SEQ ID NO: 132860 - DNA, 25 bp, Saccharomyces pastorianus
tcccgccaaacaagctcaaaatgat

SEQ ID NO: 132861 - DNA, 25 bp, Saccharomyces pastorianus
aagaatggtattcccgccaaacaag

SEQ ID NO: 132862 - DNA, 25 bp, Saccharomyces pastorianus
attgaagtggatttacttgtctctg

SEQ ID NO: 132863 - DNA, 25 bp, Saccharomyces pastorianus
attcccgccaaacaagctcaaaatg

SEQ ID NO: 132864 - DNA, 25 bp, Saccharomyces pastorianus
agtggatttacttgtctctgaagat

SEQ ID NO: 132865 - DNA, 25 bp, Saccharomyces pastorianus
gatattaagaatggtattcccgcca

SEQ ID NO: 132866 - DNA, 25 bp, Saccharomyces pastorianus
ggcagcaggcaaattactcggagca

SEQ ID NO: 132867 - DNA, 25 bp, Saccharomyces pastorianus
aactttcgtgtcagggttcttcatg

SEQ ID NO: 132868 - DNA, 25 bp, Saccharomyces pastorianus
gcgaaaatcattcctttgcataaca

SEQ ID NO: 132869 - DNA, 25 bp, Saccharomyces pastorianus
taagctgtcatagtgatcctgattt

SEQ ID NO: 132870 - DNA, 25 bp, Saccharomyces pastorianus
taagcgagactcacaggtaggttat

SEQ ID NO: 132871 - DNA, 25 bp, Saccharomyces pastorianus
aactagccgggaatacatgtcgcag

SEQ ID NO: 132872 - DNA, 25 bp, Saccharomyces pastorianus
attgagccccaatggcttctcgaag

SEQ ID NO: 132873 - DNA, 25 bp, Saccharomyces pastorianus
aggcaaagtttcatcacccatacgg

SEQ ID NO: 132874 - DNA, 25 bp, Saccharomyces pastorianus
gtcgcaggtaacatccattgagccc

SEQ ID NO: 132875 - DNA, 25 bp, Saccharomyces pastorianus
tggaatacatccctcgagttcattg

SEQ ID NO: 132876 - DNA, 25 bp, Saccharomyces pastorianus
cttctcgaagtagcgcctcattttt

SEQ ID NO: 132877 - DNA, 25 bp, Saccharomyces pastorianus
gagaaacataactacttttgggtgt

SEQ ID NO: 132878 - DNA, 25 bp, Saccharomyces pastorianus
agtgagaaacataactacttttggg

SEQ ID NO: 132879 - DNA, 25 bp, Saccharomyces pastorianus
atagaaagtttagaccctagccctg

SEQ ID NO: 132880 - DNA, 25 bp, Saccharomyces pastorianus
gtccaaatttttgggacgcgaatga

SEQ ID NO: 132881 - DNA, 25 bp, Saccharomyces pastorianus
gtgagaaacataactacttttgggt

SEQ ID NO: 132882 - DNA, 25 bp, Saccharomyces pastorianus
tagaaagtttagaccctagccctgt

SEQ ID NO: 132883 - DNA, 25 bp, Saccharomyces pastorianus
cctagccctgtccttcacaaagttt

SEQ ID NO: 132884 - DNA, 25 bp, Saccharomyces pastorianus
caaatttttgggacgcgaatgaaga

SEQ ID NO: 132885 - DNA, 25 bp, Saccharomyces pastorianus
ccaaatttttgggacgcgaatgaag

SEQ ID NO: 132886 - DNA, 25 bp, Saccharomyces pastorianus
gaagaattgtgatggcttagttcat

SEQ ID NO: 132887 - DNA, 25 bp, Saccharomyces pastorianus
tttttgggacgcgaatgaagaattg

SEQ ID NO: 132888 - DNA, 25 bp, Saccharomyces pastorianus
taattgccagcggtgctgcttccat

SEQ ID NO: 132889 - DNA, 25 bp, Saccharomyces pastorianus
agaacattagatccacatgatgtgg

SEQ ID NO: 132890 - DNA, 25 bp, Saccharomyces pastorianus
gaggtaggtccaacgatgctcatac

SEQ ID NO: 132891 - DNA, 25 bp, Saccharomyces pastorianus
aattcgccaactaattgccagcggt

SEQ ID NO: 132892 - DNA, 25 bp, Saccharomyces pastorianus
aaaggcgtgctttgacttcaccaga

SEQ ID NO: 132893 - DNA, 25 bp, Saccharomyces pastorianus
atacttcctatttgaccgcgaaaag

SEQ ID NO: 132894 - DNA, 25 bp, Saccharomyces pastorianus
tgaaatacccataaatacttcctat

SEQ ID NO: 132895 - DNA, 25 bp, Saccharomyces pastorianus
gtgagacaaggccaacatatctttg

SEQ ID NO: 132896 - DNA, 25 bp, Saccharomyces pastorianus
ctgcttccatcgatgactatcctga

SEQ ID NO: 132897 - DNA, 25 bp, Saccharomyces pastorianus
gatggcttagttcatatttcagaaa

SEQ ID NO: 132898 - DNA, 25 bp, Saccharomyces pastorianus
aaaaatatcgctctccatgaaaaat

SEQ ID NO: 132899 - DNA, 25 bp, Saccharomyces pastorianus
tcctatcatcgcagtcacttttgta

SEQ ID NO: 132900 - DNA, 25 bp, Saccharomyces pastorianus
taatggttacctccctggatggcac

SEQ ID NO: 132901 - DNA, 25 bp, Saccharomyces pastorianus
agcgcatccttgactgcactaatgg

SEQ ID NO: 132902 - DNA, 25 bp, Saccharomyces pastorianus
atagtgaattcccactgaccagctt

SEQ ID NO: 132903 - DNA, 25 bp, Saccharomyces pastorianus
ttccagatccttgttactgatgccg

SEQ ID NO: 132904 - DNA, 25 bp, Saccharomyces pastorianus
ttgagcatacaacctcctatcatcg

SEQ ID NO: 132905 - DNA, 25 bp, Saccharomyces pastorianus
ggatggcactacaggaacaccgtgt

SEQ ID NO: 132906 - DNA, 25 bp, Saccharomyces pastorianus
gaacaccgtgttcattgagcataca

SEQ ID NO: 132907 - DNA, 25 bp, Saccharomyces pastorianus
atgccgaggtggttgttcagcgcat

SEQ ID NO: 132908 - DNA, 25 bp, Saccharomyces pastorianus
atcttggcagacatctatcggcgat

SEQ ID NO: 132909 - DNA, 25 bp, Saccharomyces pastorianus
acaccaagcaatttccctggattct

SEQ ID NO: 132910 - DNA, 25 bp, Saccharomyces pastorianus
attattgggtccaaggccattcaag

SEQ ID NO: 132911 - DNA, 25 bp, Saccharomyces pastorianus
gaggcttttgaaaaatatttggatc

SEQ ID NO: 132912 - DNA, 25 bp, Saccharomyces pastorianus
gggtccaaggccattcaaggaaagg

SEQ ID NO: 132913 - DNA, 25 bp, Saccharomyces pastorianus
tcaaggaaaggaacgaggcttttga

SEQ ID NO: 132914 - DNA, 25 bp, Saccharomyces pastorianus
tattgggtccaaggccattcaagga

SEQ ID NO: 132915 - DNA, 25 bp, Saccharomyces pastorianus
gtccaaggccattcaaggaaaggaa

SEQ ID NO: 132916 - DNA, 25 bp, Saccharomyces pastorianus
tttggatccaaagagcaataccgaa

SEQ ID NO: 132917 - DNA, 25 bp, Saccharomyces pastorianus
caaggccattcaaggaaaggaacga

SEQ ID NO: 132918 - DNA, 25 bp, Saccharomyces pastorianus
tgggtccaaggccattcaaggaaag

SEQ ID NO: 132919 - DNA, 25 bp, Saccharomyces pastorianus
ccattcaaggaaaggaacgaggctt

SEQ ID NO: 132920 - DNA, 25 bp, Saccharomyces pastorianus
atttggatccaaagagcaataccga

SEQ ID NO: 132921 - DNA, 25 bp, Saccharomyces pastorianus
aatgccatggttacatccctaggaa

SEQ ID NO: 132922 - DNA, 25 bp, Saccharomyces pastorianus
aagattggctacctgtcgtttgatc

SEQ ID NO: 132923 - DNA, 25 bp, Saccharomyces pastorianus
gaggctgcattaatcgctgccagac

SEQ ID NO: 132924 - DNA, 25 bp, Saccharomyces pastorianus
gacaaggtgctttaggctatgccca

SEQ ID NO: 132925 - DNA, 25 bp, Saccharomyces pastorianus
aaagactgaatctggatccccttct

SEQ ID NO: 132926 - DNA, 25 bp, Saccharomyces pastorianus
caggacatgccgtttgtggttggtt

SEQ ID NO: 132927 - DNA, 25 bp, Saccharomyces pastorianus
gagctacattttccatcggtgacta

SEQ ID NO: 132928 - DNA, 25 bp, Saccharomyces pastorianus
ggccgtgtttctgaggagctacatt

SEQ ID NO: 132929 - DNA, 25 bp, Saccharomyces pastorianus
aatgatcatggctcttggtggccgt

SEQ ID NO: 132930 - DNA, 25 bp, Saccharomyces pastorianus
aaatatgcggatccacttctgaaag

SEQ ID NO: 132931 - DNA, 25 bp, Saccharomyces pastorianus
aaattggctacgcttactccaggtt

SEQ ID NO: 132932 - DNA, 25 bp, Saccharomyces pastorianus
gaatatacctagacgtgaactcaaa

SEQ ID NO: 132933 - DNA, 25 bp, Saccharomyces pastorianus
gatcgagaataagctcaccccacgg

SEQ ID NO: 132934 - DNA, 25 bp, Saccharomyces pastorianus
gtttaatgctcgaaagtcctaacta

SEQ ID NO: 132935 - DNA, 25 bp, Saccharomyces pastorianus
ttaactgagcacaaaagccctaatc

SEQ ID NO: 132936 - DNA, 25 bp, Saccharomyces pastorianus
caccccacggactgatcaatttgaa

SEQ ID NO: 132937 - DNA, 25 bp, Saccharomyces pastorianus
tgttgtcccttgacgatgactccat

SEQ ID NO: 132938 - DNA, 25 bp, Saccharomyces pastorianus
gagatccgtgccttcgataaactat

SEQ ID NO: 132939 - DNA, 25 bp, Saccharomyces pastorianus
ggaagccaacgcagtgtcctttgac

SEQ ID NO: 132940 - DNA, 25 bp, Saccharomyces pastorianus
taatacgtcccattcttggtaaagt

SEQ ID NO: 132941 - DNA, 25 bp, Saccharomyces pastorianus
gtcctttgacacaacattttctgat

SEQ ID NO: 132942 - DNA, 25 bp, Saccharomyces pastorianus
gtgctcgatatagttcctggctcaa

SEQ ID NO: 132943 - DNA, 25 bp, Saccharomyces pastorianus
gatgatgatatcgatgctagcagct

SEQ ID NO: 132944 - DNA, 25 bp, Saccharomyces pastorianus
gagcctcagcatcctttaagacata

SEQ ID NO: 132945 - DNA, 25 bp, Saccharomyces pastorianus
ctcagcagtctgactcacttcaaaa

SEQ ID NO: 132946 - DNA, 25 bp, Saccharomyces pastorianus
aaggatgcttccatgttagatgtca

SEQ ID NO: 132947 - DNA, 25 bp, Saccharomyces pastorianus
gaggcagctagcaacactacgatta

SEQ ID NO: 132948 - DNA, 25 bp, Saccharomyces pastorianus
ttactgggtcttttacgggatggag

SEQ ID NO: 132949 - DNA, 25 bp, Saccharomyces pastorianus
atacctccatattcaaaccatgcgg

SEQ ID NO: 132950 - DNA, 25 bp, Saccharomyces pastorianus
gtttccagttgacatcacttggcaa

SEQ ID NO: 132951 - DNA, 25 bp, Saccharomyces pastorianus
tggattatcagccatctcagcagtc

SEQ ID NO: 132952 - DNA, 25 bp, Saccharomyces pastorianus
cgaaggcgatatccacgatgcagat

SEQ ID NO: 132953 - DNA, 25 bp, Saccharomyces pastorianus
aactaatgaggcttccctggcgtac

SEQ ID NO: 132954 - DNA, 25 bp, Saccharomyces pastorianus
atcatcacctacttctgttacgtat

SEQ ID NO: 132955 - DNA, 25 bp, Saccharomyces pastorianus
agtcctctgcgaagaatcatgcctt

SEQ ID NO: 132956 - DNA, 25 bp, Saccharomyces pastorianus
aagagcttttcaagaccgccaacgg

SEQ ID NO: 132957 - DNA, 25 bp, Saccharomyces pastorianus
atcacctccattgcatcagtatatc

SEQ ID NO: 132958 - DNA, 25 bp, Saccharomyces pastorianus
tgaggacagtaacgttcaccgccaa

SEQ ID NO: 132959 - DNA, 25 bp, Saccharomyces pastorianus
aagcgggtttcctgaagatcctgca

SEQ ID NO: 132960 - DNA, 25 bp, Saccharomyces pastorianus
gacagtatccgtttcgagcagttca

SEQ ID NO: 132961 - DNA, 25 bp, Saccharomyces pastorianus
gttacgtatgatgacaccgcggcta

SEQ ID NO: 132962 - DNA, 25 bp, Saccharomyces pastorianus
tagccctgggtgtattgtcttcaaa

SEQ ID NO: 132963 - DNA, 25 bp, Saccharomyces pastorianus
ggtcctgattctttgggtagttcta

SEQ ID NO: 132964 - DNA, 25 bp, Saccharomyces pastorianus
agatcctgcatctacaccgtatgta

SEQ ID NO: 132965 - DNA, 25 bp, Saccharomyces pastorianus
gcgagaagcctcaccaatgtaccgt

SEQ ID NO: 132966 - DNA, 25 bp, Saccharomyces pastorianus
agcctcaccaatgtaccgttcaggg

SEQ ID NO: 132967 - DNA, 25 bp, Saccharomyces pastorianus
tactggcgagaagcctcaccaatgt

SEQ ID NO: 132968 - DNA, 25 bp, Saccharomyces pastorianus
gaagcctcaccaatgtaccgttcag

SEQ ID NO: 132969 - DNA, 25 bp, Saccharomyces pastorianus
gagaagcctcaccaatgtaccgttc

SEQ ID NO: 132970 - DNA, 25 bp, Saccharomyces pastorianus
aggcacgtaagaacgcatactggcg

SEQ ID NO: 132971 - DNA, 25 bp, Saccharomyces pastorianus
gcatactggcgagaagcctcaccaa

SEQ ID NO: 132972 - DNA, 25 bp, Saccharomyces pastorianus
agaacgcatactggcgagaagcctc

SEQ ID NO: 132973 - DNA, 25 bp, Saccharomyces pastorianus
tggcgagaagcctcaccaatgtacc

SEQ ID NO: 132974 - DNA, 25 bp, Saccharomyces pastorianus
acgtaagaacgcatactggcgagaa

SEQ ID NO: 132975 - DNA, 25 bp, Saccharomyces pastorianus
aaaaggcacgtaagaacgcatactg

SEQ ID NO: 132976 - DNA, 25 bp, Saccharomyces pastorianus
tggtgactccagtgccaacgggaat

SEQ ID NO: 132977 - DNA, 25 bp, Saccharomyces pastorianus
tttacgtgctgtacctacggaggag

SEQ ID NO: 132978 - DNA, 25 bp, Saccharomyces pastorianus
aagcatcaaatggaccttggtgact

SEQ ID NO: 132979 - DNA, 25 bp, Saccharomyces pastorianus
ggagtccaagacttttgcacaggaa

SEQ ID NO: 132980 - DNA, 25 bp, Saccharomyces pastorianus
agctgtaggtgccttgatcgtttac

SEQ ID NO: 132981 - DNA, 25 bp, Saccharomyces pastorianus
gagtttgccaccagaactttggaaa

SEQ ID NO: 132982 - DNA, 25 bp, Saccharomyces pastorianus
gggaatgccaatggtgcgtccgctc

SEQ ID NO: 132983 - DNA, 25 bp, Saccharomyces pastorianus
gattagtctgacaccaacaccaaac

SEQ ID NO: 132984 - DNA, 25 bp, Saccharomyces pastorianus
tccgctcctaatggaccaacgatta

SEQ ID NO: 132985 - DNA, 25 bp, Saccharomyces pastorianus
gggcttatcggtaacaagtctgatt

SEQ ID NO: 132986 - DNA, 25 bp, Saccharomyces pastorianus
tctatcaaaaggtcagcaagcatca

SEQ ID NO: 132987 - DNA, 25 bp, Saccharomyces pastorianus
tgcgggccaggaacgttacagagcc

SEQ ID NO: 132988 - DNA, 25 bp, Saccharomyces pastorianus
ctgcgggccaggaacgttacagagc

SEQ ID NO: 132989 - DNA, 25 bp, Saccharomyces pastorianus
atggcaagaggatcaaggcgcagat

SEQ ID NO: 132990 - DNA, 25 bp, Saccharomyces pastorianus
actgcgggccaggaacgttacagag

SEQ ID NO: 132991 - DNA, 25 bp, Saccharomyces pastorianus
atactgcgggccaggaacgttacag

SEQ ID NO: 132992 - DNA, 25 bp, Saccharomyces pastorianus
tactgcgggccaggaacgttacaga

SEQ ID NO: 132993 - DNA, 25 bp, Saccharomyces pastorianus
gatactgcgggccaggaacgttaca

SEQ ID NO: 132994 - DNA, 25 bp, Saccharomyces pastorianus
gcgggccaggaacgttacagagcca

SEQ ID NO: 132995 - DNA, 25 bp, Saccharomyces pastorianus
ttttcttccaatactgccattacgg

SEQ ID NO: 132996 - DNA, 25 bp, Saccharomyces pastorianus
ggatacaacatctcaaccttctgtg

SEQ ID NO: 132997 - DNA, 25 bp, Saccharomyces pastorianus
aaaatttaggtcatggtcctccatc

SEQ ID NO: 132998 - DNA, 25 bp, Saccharomyces pastorianus
cgttgccttttccactgtatgatga

SEQ ID NO: 132999 - DNA, 25 bp, Saccharomyces pastorianus
aaatcaagagtacttccgccgttgc

SEQ ID NO: 133000 - DNA, 25 bp, Saccharomyces pastorianus
gtaaatcttcctacaattctgagtt

SEQ ID NO: 133001 - DNA, 25 bp, Saccharomyces pastorianus
gaacaagagtctgccatgctcaaaa

SEQ ID NO: 133002 - DNA, 25 bp, Saccharomyces pastorianus
gaagaaacgtctaagccattgcaac

SEQ ID NO: 133003 - DNA, 25 bp, Saccharomyces pastorianus
gatcccgaacaagtatcagtccagt

SEQ ID NO: 133004 - DNA, 25 bp, Saccharomyces pastorianus
gaatactccttcaaatagacacgat

SEQ ID NO: 133005 - DNA, 25 bp, Saccharomyces pastorianus
gaacaactattcgttccccaggaat

SEQ ID NO: 133006 - DNA, 25 bp, Saccharomyces pastorianus
aggacccggattctgcagtcgctaa

SEQ ID NO: 133007 - DNA, 25 bp, Saccharomyces pastorianus
tatgaggacccggtactcgaggacc

SEQ ID NO: 133008 - DNA, 25 bp, Saccharomyces pastorianus
agcccgccctgaagtcaaacgagga

SEQ ID NO: 133009 - DNA, 25 bp, Saccharomyces pastorianus
ggctgagcccgaatcattagtcgtt

SEQ ID NO: 133010 - DNA, 25 bp, Saccharomyces pastorianus
tcaatcgttggctcggacggcagaa

SEQ ID NO: 133011 - DNA, 25 bp, Saccharomyces pastorianus
attagtcgttcccattcacgtacaa

SEQ ID NO: 133012 - DNA, 25 bp, Saccharomyces pastorianus
gacggcagaatacaacatcggctat

SEQ ID NO: 133013 - DNA, 25 bp, Saccharomyces pastorianus
agacgtcctcaaaaatcggctccag

SEQ ID NO: 133014 - DNA, 25 bp, Saccharomyces pastorianus
ggcaagaagatcagtgccccttcga

SEQ ID NO: 133015 - DNA, 25 bp, Saccharomyces pastorianus
gaaaacatgccacacccagtgatag

SEQ ID NO: 133016 - DNA, 25 bp, Saccharomyces pastorianus
gacgccacagcggtcaataatgttg

SEQ ID NO: 133017 - DNA, 25 bp, Saccharomyces pastorianus
gggacggatccattttgcaatataa

SEQ ID NO: 133018 - DNA, 25 bp, Saccharomyces pastorianus
tgtcaagttgggtgtctactcgcaa

SEQ ID NO: 133019 - DNA, 25 bp, Saccharomyces pastorianus
gtcgtttcgcatgatttcagattat

SEQ ID NO: 133020 - DNA, 25 bp, Saccharomyces pastorianus
cgatatggactcacgtattgccctt

SEQ ID NO: 133021 - DNA, 25 bp, Saccharomyces pastorianus
gtccgtgacaagtactctaacatct

SEQ ID NO: 133022 - DNA, 25 bp, Saccharomyces pastorianus
ttctcgtgtcgtctttgctttatta

SEQ ID NO: 133023 - DNA, 25 bp, Saccharomyces pastorianus
atctggccgtgtttctagacatacc

SEQ ID NO: 133024 - DNA, 25 bp, Saccharomyces pastorianus
tattgcccttgtcggaccaaatggt

SEQ ID NO: 133025 - DNA, 25 bp, Saccharomyces pastorianus
aaccgttcaaatggctaccttgtca

SEQ ID NO: 133026 - DNA, 25 bp, Saccharomyces pastorianus
gagagcaacccatccgaaaacttgt

SEQ ID NO: 133027 - DNA, 25 bp, Saccharomyces pastorianus
atctgctctagaatttgtccgtgac

SEQ ID NO: 133028 - DNA, 25 bp, Saccharomyces pastorianus
ggccaagagagatgctaagaaagct

SEQ ID NO: 133029 - DNA, 25 bp, Saccharomyces pastorianus
gcgtcaaaggccaagagagatgcta

SEQ ID NO: 133030 - DNA, 25 bp, Saccharomyces pastorianus
aagccgctgccggtaaaaccatcag

SEQ ID NO: 133031 - DNA, 25 bp, Saccharomyces pastorianus
gccggtaaaaccatcagaaagctag

SEQ ID NO: 133032 - DNA, 25 bp, Saccharomyces pastorianus
aagagaggctaagaaagccgctgcc

SEQ ID NO: 133033 - DNA, 25 bp, Saccharomyces pastorianus
tgcgtcaaaggccaagagagatgct

SEQ ID NO: 133034 - DNA, 25 bp, Saccharomyces pastorianus
agccgctgccggtaaaaccatcaga

SEQ ID NO: 133035 - DNA, 25 bp, Saccharomyces pastorianus
aaaccatcagaaagctaggtagaaa

SEQ ID NO: 133036 - DNA, 25 bp, Saccharomyces pastorianus
gaggctaagaaagccgctgccggta

SEQ ID NO: 133037 - DNA, 25 bp, Saccharomyces pastorianus
ccgctgccggtaaaaccatcagaaa

SEQ ID NO: 133038 - DNA, 25 bp, Saccharomyces pastorianus
gtcaaaggccaagagagatgctaag

SEQ ID NO: 133039 - DNA, 25 bp, Saccharomyces pastorianus
gtatttcgtctgcattgttcgtttt

SEQ ID NO: 133040 - DNA, 25 bp, Saccharomyces pastorianus
gggcgatcagcaggccattgcaatc

SEQ ID NO: 133041 - DNA, 25 bp, Saccharomyces pastorianus
tccaatttctttgctgctcgtatta

SEQ ID NO: 133042 - DNA, 25 bp, Saccharomyces pastorianus
aagagcttacaataccttgccgtgc

SEQ ID NO: 133043 - DNA, 25 bp, Saccharomyces pastorianus
ataacaacgttctggcattgccttt

SEQ ID NO: 133044 - DNA, 25 bp, Saccharomyces pastorianus
atggtcctttcatctgtagtggcca

SEQ ID NO: 133045 - DNA, 25 bp, Saccharomyces pastorianus
ggcgttgctaattttcgatctttga

SEQ ID NO: 133046 - DNA, 25 bp, Saccharomyces pastorianus
gcgaggtcctcttctttggcggaaa

SEQ ID NO: 133047 - DNA, 25 bp, Saccharomyces pastorianus
ttgctgctagtcttttccttcatta

SEQ ID NO: 133048 - DNA, 25 bp, Saccharomyces pastorianus
tgacgatcattctcattgcctatgg

SEQ ID NO: 133049 - DNA, 25 bp, Saccharomyces pastorianus
gagaattcggctgactaactttaaa

SEQ ID NO: 133050 - DNA, 25 bp, Saccharomyces pastorianus
atcacatacctcattgttatcacaa

SEQ ID NO: 133051 - DNA, 25 bp, Saccharomyces pastorianus
gtttatggctgcgtctttgcaacaa

SEQ ID NO: 133052 - DNA, 25 bp, Saccharomyces pastorianus
caacaattgcagaactcggagtcga

SEQ ID NO: 133053 - DNA, 25 bp, Saccharomyces pastorianus
taactcaaatagtcctctacagcag

SEQ ID NO: 133054 - DNA, 25 bp, Saccharomyces pastorianus
agatgtcgcgcaatgcatcgtactc

SEQ ID NO: 133055 - DNA, 25 bp, Saccharomyces pastorianus
atcgtactcctcatcgtttatggct

SEQ ID NO: 133056 - DNA, 25 bp, Saccharomyces pastorianus
gagtgtctcaagaccttcttcaaga

SEQ ID NO: 133057 - DNA, 25 bp, Saccharomyces pastorianus
atcaagtgactctacttcacctata

SEQ ID NO: 133058 - DNA, 25 bp, Saccharomyces pastorianus
atatcgtccgcaaactttaactcaa

SEQ ID NO: 133059 - DNA, 25 bp, Saccharomyces pastorianus
gtcgaattcgtttatctcaaatcac

SEQ ID NO: 133060 - DNA, 25 bp, Saccharomyces pastorianus
tcctatagattcaccgagtgtctca

SEQ ID NO: 133061 - DNA, 25 bp, Saccharomyces pastorianus
aagacggtcaaggacaccacaccag

SEQ ID NO: 133062 - DNA, 25 bp, Saccharomyces pastorianus
tagtcatctggacgtgcatggtcga

SEQ ID NO: 133063 - DNA, 25 bp, Saccharomyces pastorianus
atattttacggacttcgtgtctcct

SEQ ID NO: 133064 - DNA, 25 bp, Saccharomyces pastorianus
attaaacggcggcacattcgactca

SEQ ID NO: 133065 - DNA, 25 bp, Saccharomyces pastorianus
tattgcgatgtttgattcacttgcc

SEQ ID NO: 133066 - DNA, 25 bp, Saccharomyces pastorianus
aactcgagcggttcagctactatta

SEQ ID NO: 133067 - DNA, 25 bp, Saccharomyces pastorianus
attcgactcaatgctggaggcactg

SEQ ID NO: 133068 - DNA, 25 bp, Saccharomyces pastorianus
gctactattagtgctcctaacagct

SEQ ID NO: 133069 - DNA, 25 bp, Saccharomyces pastorianus
gtggaccaattcaacatgacgccca

SEQ ID NO: 133070 - DNA, 25 bp, Saccharomyces pastorianus
agagccgagacaaactggtgacagt

SEQ ID NO: 133071 - DNA, 25 bp, Saccharomyces pastorianus
tcctaacagctttacttccgacata

SEQ ID NO: 133072 - DNA, 25 bp, Saccharomyces pastorianus
aagagctgcctcagtatcttccagt

SEQ ID NO: 133073 - DNA, 25 bp, Saccharomyces pastorianus
aaaacctctgatacaatgtttcaat

SEQ ID NO: 133074 - DNA, 25 bp, Saccharomyces pastorianus
aatatggaaccatcaggacaaaata

SEQ ID NO: 133075 - DNA, 25 bp, Saccharomyces pastorianus
gtaaaactttcaagacaccgctttg

SEQ ID NO: 133076 - DNA, 25 bp, Saccharomyces pastorianus
gtatatccaatatggaaccatcagg

SEQ ID NO: 133077 - DNA, 25 bp, Saccharomyces pastorianus
gaatactctttgcaatgcctgcggt

SEQ ID NO: 133078 - DNA, 25 bp, Saccharomyces pastorianus
gggaatactctttgcaatgcctgcg

SEQ ID NO: 133079 - DNA, 25 bp, Saccharomyces pastorianus
cctgcggtcttttccagaaattaca

SEQ ID NO: 133080 - DNA, 25 bp, Saccharomyces pastorianus
atgtcgtccacgtccctggccaatt

SEQ ID NO: 133081 - DNA, 25 bp, Saccharomyces pastorianus
aactttcaagacaccgctttggagg

SEQ ID NO: 133082 - DNA, 25 bp, Saccharomyces pastorianus
tgcctcagtatcttccagtatatcc

SEQ ID NO: 133083 - DNA, 25 bp, Saccharomyces pastorianus
aataagtctcggctaccacggaaga

SEQ ID NO: 133084 - DNA, 25 bp, Saccharomyces pastorianus
gtctggaagaaataccggctcccac

SEQ ID NO: 133085 - DNA, 25 bp, Saccharomyces pastorianus
tggtttaaaatcacgctcaagcatc

SEQ ID NO: 133086 - DNA, 25 bp, Saccharomyces pastorianus
gactgaccaccgtcgatgaacacag

SEQ ID NO: 133087 - DNA, 25 bp, Saccharomyces pastorianus
aaggtactaagatgttgcctccaaa

SEQ ID NO: 133088 - DNA, 25 bp, Saccharomyces pastorianus
acaatcaatgctcgccttcaaggta

SEQ ID NO: 133089 - DNA, 25 bp, Saccharomyces pastorianus
gaaaaatccgcctgagtctggttta

SEQ ID NO: 133090 - DNA, 25 bp, Saccharomyces pastorianus
agatacagtcgaccggtttgtagcc

SEQ ID NO: 133091 - DNA, 25 bp, Saccharomyces pastorianus
tgtccttgaccaacttttcacagac

SEQ ID NO: 133092 - DNA, 25 bp, Saccharomyces pastorianus
gaaagagaacactcctctgtccttg

SEQ ID NO: 133093 - DNA, 25 bp, Saccharomyces pastorianus
ggatcttacacaggacgaacaggtt

SEQ ID NO: 133094 - DNA, 25 bp, Saccharomyces pastorianus
gaagaagtttgatcgcctgtctctc

SEQ ID NO: 133095 - DNA, 25 bp, Saccharomyces pastorianus
gagtactattcaagctgggaacagc

SEQ ID NO: 133096 - DNA, 25 bp, Saccharomyces pastorianus
aaaggattgctagcgccatctgacc

SEQ ID NO: 133097 - DNA, 25 bp, Saccharomyces pastorianus
aataacttcccacagtcccagtaga

SEQ ID NO: 133098 - DNA, 25 bp, Saccharomyces pastorianus
atttttcagcgtgctattaggtgcc

SEQ ID NO: 133099 - DNA, 25 bp, Saccharomyces pastorianus
gcccagtgtgtttggctgcaagttt

SEQ ID NO: 133100 - DNA, 25 bp, Saccharomyces pastorianus
agaacgctactacttgtgatgatga

SEQ ID NO: 133101 - DNA, 25 bp, Saccharomyces pastorianus
tttaaacgtcgaattcttgcttgta

SEQ ID NO: 133102 - DNA, 25 bp, Saccharomyces pastorianus
cgattcagatactctcgtatttggg

SEQ ID NO: 133103 - DNA, 25 bp, Saccharomyces pastorianus
aattctacgatgattttggcccaag

SEQ ID NO: 133104 - DNA, 25 bp, Saccharomyces pastorianus
ctgagttcatcagtcttgtacggaa

SEQ ID NO: 133105 - DNA, 25 bp, Saccharomyces pastorianus
tccacaatggctggtaaggcacttg

SEQ ID NO: 133106 - DNA, 25 bp, Saccharomyces pastorianus
aatactgacgaactggaccaatatg

SEQ ID NO: 133107 - DNA, 25 bp, Saccharomyces pastorianus
attgcccacaagtttgccagtgcta

SEQ ID NO: 133108 - DNA, 25 bp, Saccharomyces pastorianus
aaagcaatgctgtttattgcccaca

SEQ ID NO: 133109 - DNA, 25 bp, Saccharomyces pastorianus
atctctaggtacttaattgctgtga

SEQ ID NO: 133110 - DNA, 25 bp, Saccharomyces pastorianus
tattgtatttattggccagggttta

SEQ ID NO: 133111 - DNA, 25 bp, Saccharomyces pastorianus
tattcactggtacacgcgacaatgc

SEQ ID NO: 133112 - DNA, 25 bp, Saccharomyces pastorianus
tgccagtgctagaaggtcaccagaa

SEQ ID NO: 133113 - DNA, 25 bp, Saccharomyces pastorianus
atgtgggctatgtcgaaatttgaac

SEQ ID NO: 133114 - DNA, 25 bp, Saccharomyces pastorianus
gagtttttgaagagctaatcctagg

SEQ ID NO: 133115 - DNA, 25 bp, Saccharomyces pastorianus
aaggcacttggtgtcatgtgggcta

SEQ ID NO: 133116 - DNA, 25 bp, Saccharomyces pastorianus
agtttcaagccgtaggcgaggccta

SEQ ID NO: 133117 - DNA, 25 bp, Saccharomyces pastorianus
ttttgggcatcaagcctgaggccac

SEQ ID NO: 133118 - DNA, 25 bp, Saccharomyces pastorianus
ggacaagcatcctgatgacccagat

SEQ ID NO: 133119 - DNA, 25 bp, Saccharomyces pastorianus
aggcgaggcctaccaagtcttaagt

SEQ ID NO: 133120 - DNA, 25 bp, Saccharomyces pastorianus
ctgatgacccagatgctcaagcaaa

SEQ ID NO: 133121 - DNA, 25 bp, Saccharomyces pastorianus
agggcttcgttccaagtatgaccag

SEQ ID NO: 133122 - DNA, 25 bp, Saccharomyces pastorianus
aaggctatggaaacacatccggaca

SEQ ID NO: 133123 - DNA, 25 bp, Saccharomyces pastorianus
gtcttaagtgatccagggcttcgtt

SEQ ID NO: 133124 - DNA, 25 bp, Saccharomyces pastorianus
tgaggccacgcccactgaaatcaaa

SEQ ID NO: 133125 - DNA, 25 bp, Saccharomyces pastorianus
tcaagcaaagtttcaagccgtaggc

SEQ ID NO: 133126 - DNA, 25 bp, Saccharomyces pastorianus
tgaaatcaaaaaggcctatcgtaga

SEQ ID NO: 133127 - DNA, 25 bp, Saccharomyces pastorianus
ctatctacgatccatttgacttctc

SEQ ID NO: 133128 - DNA, 25 bp, Saccharomyces pastorianus
ttcaagatatgtgacctccacggga

SEQ ID NO: 133129 - DNA, 25 bp, Saccharomyces pastorianus
aaacgtgctctatacaatttcggta

SEQ ID NO: 133130 - DNA, 25 bp, Saccharomyces pastorianus
tttgacttctctatgggacgaatcc

SEQ ID NO: 133131 - DNA, 25 bp, Saccharomyces pastorianus
tccaacatagggatatcacaggctt

SEQ ID NO: 133132 - DNA, 25 bp, Saccharomyces pastorianus
gacctccacgggaagaatccaacat

SEQ ID NO: 133133 - DNA, 25 bp, Saccharomyces pastorianus
gaaaatcgatcagtctttgtccaaa

SEQ ID NO: 133134 - DNA, 25 bp, Saccharomyces pastorianus
ggatatcacaggcttatcggcaaag

SEQ ID NO: 133135 - DNA, 25 bp, Saccharomyces pastorianus
aagctccacatttaaacgtgctcta

SEQ ID NO: 133136 - DNA, 25 bp, Saccharomyces pastorianus
gaacgatataatgaagtccggtgca

SEQ ID NO: 133137 - DNA, 25 bp, Saccharomyces pastorianus
gtccggtgcaaatccactagaattt

SEQ ID NO: 133138 - DNA, 25 bp, Saccharomyces pastorianus
aaaaattcaaaatggtatgcaacct

SEQ ID NO: 133139 - DNA, 25 bp, Saccharomyces pastorianus
agatgaatgccaccacaggcataaa

SEQ ID NO: 133140 - DNA, 25 bp, Saccharomyces pastorianus
caaaacttcggatgttcaagatgaa

SEQ ID NO: 133141 - DNA, 25 bp, Saccharomyces pastorianus
tacagtttctaaccaaaaaggcaag

SEQ ID NO: 133142 - DNA, 25 bp, Saccharomyces pastorianus
tacacaaaacttcggatgttcaaga

SEQ ID NO: 133143 - DNA, 25 bp, Saccharomyces pastorianus
taacagtgttacagtttctaaccaa

SEQ ID NO: 133144 - DNA, 25 bp, Saccharomyces pastorianus
gttcaagatgaatgccaccacaggc

SEQ ID NO: 133145 - DNA, 25 bp, Saccharomyces pastorianus
ggcaaggttctacacaaaacttcgg

SEQ ID NO: 133146 - DNA, 25 bp, Saccharomyces pastorianus
ggatgttcaagatgaatgccaccac

SEQ ID NO: 133147 - DNA, 25 bp, Saccharomyces pastorianus
ggttctacacaaaacttcggatgtt

SEQ ID NO: 133148 - DNA, 25 bp, Saccharomyces pastorianus
gccaccacaggcataaaaattcaaa

SEQ ID NO: 133149 - DNA, 25 bp, Saccharomyces pastorianus
gagcgcgaagagtactgggacaaca

SEQ ID NO: 133150 - DNA, 25 bp, Saccharomyces pastorianus
taatattcccaatagccacaatggt

SEQ ID NO: 133151 - DNA, 25 bp, Saccharomyces pastorianus
tgccgggcactaacatggacatttt

SEQ ID NO: 133152 - DNA, 25 bp, Saccharomyces pastorianus
gtaatgactgtaatggtgtggccaa

SEQ ID NO: 133153 - DNA, 25 bp, Saccharomyces pastorianus
acacgtaacgactatgagcgcgaag

SEQ ID NO: 133154 - DNA, 25 bp, Saccharomyces pastorianus
acagcaagaacttccccattttaag

SEQ ID NO: 133155 - DNA, 25 bp, Saccharomyces pastorianus
gatgccagcaaagtggatcctcgcg

SEQ ID NO: 133156 - DNA, 25 bp, Saccharomyces pastorianus
caagggttataacgctggctgtaca

SEQ ID NO: 133157 - DNA, 25 bp, Saccharomyces pastorianus
attacttttcaaattcctcctcatt

SEQ ID NO: 133158 - DNA, 25 bp, Saccharomyces pastorianus
tgcattcattattctacacgtaacg

SEQ ID NO: 133159 - DNA, 25 bp, Saccharomyces pastorianus
ggatcctcgcggcaagttagaattt

SEQ ID NO: 133160 - DNA, 25 bp, Saccharomyces pastorianus
ggatgaaagccctataaacgttaat

SEQ ID NO: 133161 - DNA, 25 bp, Saccharomyces pastorianus
aaattctaattccatttgcgccacc

SEQ ID NO: 133162 - DNA, 25 bp, Saccharomyces pastorianus
cagtgaatttaatggtggacccgga

SEQ ID NO: 133163 - DNA, 25 bp, Saccharomyces pastorianus
ctgccaagaatcacacttccgtaga

SEQ ID NO: 133164 - DNA, 25 bp, Saccharomyces pastorianus
gcggcacctgtaaaatattttgctg

SEQ ID NO: 133165 - DNA, 25 bp, Saccharomyces pastorianus
gaatatcccgaagctaagtcacctg

SEQ ID NO: 133166 - DNA, 25 bp, Saccharomyces pastorianus
tcaaaatcattacctacaaccccag

SEQ ID NO: 133167 - DNA, 25 bp, Saccharomyces pastorianus
gagtgttcactttgatcaggcggca

SEQ ID NO: 133168 - DNA, 25 bp, Saccharomyces pastorianus
gaagctaagtcacctggcaatgata

SEQ ID NO: 133169 - DNA, 25 bp, Saccharomyces pastorianus
gctggtcaaaaattgccgctgccaa

SEQ ID NO: 133170 - DNA, 25 bp, Saccharomyces pastorianus
aaagaattttctccgcagggaatga

SEQ ID NO: 133171 - DNA, 25 bp, Saccharomyces pastorianus
tctgcagacggttcaataaggtgtt

SEQ ID NO: 133172 - DNA, 25 bp, Saccharomyces pastorianus
catacggcgactgtaagaactgtct

SEQ ID NO: 133173 - DNA, 25 bp, Saccharomyces pastorianus
agtcagtgcttctgcagacggttca

SEQ ID NO: 133174 - DNA, 25 bp, Saccharomyces pastorianus
ttttaagaggacatacggcgactgt

SEQ ID NO: 133175 - DNA, 25 bp, Saccharomyces pastorianus
gggacgctaacacttactttctgaa

SEQ ID NO: 133176 - DNA, 25 bp, Saccharomyces pastorianus
gtctatatatcttgagtggacatac

SEQ ID NO: 133177 - DNA, 25 bp, Saccharomyces pastorianus
tgaagcactttttcgatcacacgca

SEQ ID NO: 133178 - DNA, 25 bp, Saccharomyces pastorianus
ggtcacagagccctagtcggtttat

SEQ ID NO: 133179 - DNA, 25 bp, Saccharomyces pastorianus
gagccctagtcggtttattgggatt

SEQ ID NO: 133180 - DNA, 25 bp, Saccharomyces pastorianus
actttttcgatcacacgcagttgaa

SEQ ID NO: 133181 - DNA, 25 bp, Saccharomyces pastorianus
cacgcagttgaatacaatcaccgca

SEQ ID NO: 133182 - DNA, 25 bp, Saccharomyces pastorianus
taatgtagccgtcgatggttctgtg

SEQ ID NO: 133183 - DNA, 25 bp, Saccharomyces pastorianus
gcttggtctcattattatccctgga

SEQ ID NO: 133184 - DNA, 25 bp, Saccharomyces pastorianus
tttgcggcagccaggagttcacgaa

SEQ ID NO: 133185 - DNA, 25 bp, Saccharomyces pastorianus
gtggaaacaccagcagacctgcaat

SEQ ID NO: 133186 - DNA, 25 bp, Saccharomyces pastorianus
cagcgttttgtgttacctatagcca

SEQ ID NO: 133187 - DNA, 25 bp, Saccharomyces pastorianus
gtgaatctaccctctgtagagccaa

SEQ ID NO: 133188 - DNA, 25 bp, Saccharomyces pastorianus
tgtgctgttcgtgtttcaatatcca

SEQ ID NO: 133189 - DNA, 25 bp, Saccharomyces pastorianus
acttcactcagcatattctcgtcga

SEQ ID NO: 133190 - DNA, 25 bp, Saccharomyces pastorianus
gcaatgggtagcatgggccgttcac

SEQ ID NO: 133191 - DNA, 25 bp, Saccharomyces pastorianus
taggttgtacaatagggccgtctct

SEQ ID NO: 133192 - DNA, 25 bp, Saccharomyces pastorianus
tgccgagctgagagtagttgccaat

SEQ ID NO: 133193 - DNA, 25 bp, Saccharomyces pastorianus
gaagagcccaatatgcggttattat

SEQ ID NO: 133194 - DNA, 25 bp, Saccharomyces pastorianus
cccttggattgattgcttgcttttg

SEQ ID NO: 133195 - DNA, 25 bp, Saccharomyces pastorianus
aaatgagacggtatagtatcctgag

SEQ ID NO: 133196 - DNA, 25 bp, Saccharomyces pastorianus
gatgtggtcgcattacttcagttaa

SEQ ID NO: 133197 - DNA, 25 bp, Saccharomyces pastorianus
agtatcctgaggtcatttttctccc

SEQ ID NO: 133198 - DNA, 25 bp, Saccharomyces pastorianus
ttgcctcttgtataagatgtggtcg

SEQ ID NO: 133199 - DNA, 25 bp, Saccharomyces pastorianus
aaactgttagaaagcattgcctctt

SEQ ID NO: 133200 - DNA, 25 bp, Saccharomyces pastorianus
agttacggctatgtgaagattttga

SEQ ID NO: 133201 - DNA, 25 bp, Saccharomyces pastorianus
aatagttctttcagaagagcccaat

SEQ ID NO: 133202 - DNA, 25 bp, Saccharomyces pastorianus
atgacttgaaccagtttgtttttca

SEQ ID NO: 133203 - DNA, 25 bp, Saccharomyces pastorianus
aggtcatttttctcccttggattga

SEQ ID NO: 133204 - DNA, 25 bp, Saccharomyces pastorianus
accggatcccgcagatgattcatcg

SEQ ID NO: 133205 - DNA, 25 bp, Saccharomyces pastorianus
ctggttctaccactgatgatgacaa

SEQ ID NO: 133206 - DNA, 25 bp, Saccharomyces pastorianus
gatgcggatatgttgtctcctacac

SEQ ID NO: 133207 - DNA, 25 bp, Saccharomyces pastorianus
acaagactgtcttttcatccagcag

SEQ ID NO: 133208 - DNA, 25 bp, Saccharomyces pastorianus
aaacaactttcgttctgaagccatt

SEQ ID NO: 133209 - DNA, 25 bp, Saccharomyces pastorianus
agataatgtagacccgctgcatcgt

SEQ ID NO: 133210 - DNA, 25 bp, Saccharomyces pastorianus
tgaagccattactccgagaccgaag

SEQ ID NO: 133211 - DNA, 25 bp, Saccharomyces pastorianus
gttccaacatatcctccaaagacgt

SEQ ID NO: 133212 - DNA, 25 bp, Saccharomyces pastorianus
tgaatcgcacccctaattccaaaaa

SEQ ID NO: 133213 - DNA, 25 bp, Saccharomyces pastorianus
aaagacgtttcaccggatccgatct

SEQ ID NO: 133214 - DNA, 25 bp, Saccharomyces pastorianus
cttctgatgatggttctaggtgcac

SEQ ID NO: 133215 - DNA, 25 bp, Saccharomyces pastorianus
cctcccatcccgagaatgacagtaa

SEQ ID NO: 133216 - DNA, 25 bp, Saccharomyces pastorianus
acgggaacaaagtcacctacactct

SEQ ID NO: 133217 - DNA, 25 bp, Saccharomyces pastorianus
cttggaggcgctacttggtgctaca

SEQ ID NO: 133218 - DNA, 25 bp, Saccharomyces pastorianus
cagtgatctagcatccttggaggcg

SEQ ID NO: 133219 - DNA, 25 bp, Saccharomyces pastorianus
acacggacgctgacacagatgcaga

SEQ ID NO: 133220 - DNA, 25 bp, Saccharomyces pastorianus
gaagacagacagcaacgggaacaaa

SEQ ID NO: 133221 - DNA, 25 bp, Saccharomyces pastorianus
tgcagaaaatcttgacccttccagc

SEQ ID NO: 133222 - DNA, 25 bp, Saccharomyces pastorianus
aactgctccaaaccataggccatga

SEQ ID NO: 133223 - DNA, 25 bp, Saccharomyces pastorianus
gacatagacgacacggacgctgaca

SEQ ID NO: 133224 - DNA, 25 bp, Saccharomyces pastorianus
aagagcaagacctccggccccagtg

SEQ ID NO: 133225 - DNA, 25 bp, Saccharomyces pastorianus
ccttccagccaatccaagagcaaga

SEQ ID NO: 133226 - DNA, 25 bp, Saccharomyces pastorianus
atcatcgatgtctgttgtgctccca

SEQ ID NO: 133227 - DNA, 25 bp, Saccharomyces pastorianus
aatttcttcgcggatcatcgatgtc

SEQ ID NO: 133228 - DNA, 25 bp, Saccharomyces pastorianus
ggacgagtttgtaatcttagcctgt

SEQ ID NO: 133229 - DNA, 25 bp, Saccharomyces pastorianus
ttgtgtggacttggttcatctcggc

SEQ ID NO: 133230 - DNA, 25 bp, Saccharomyces pastorianus
ggattgtttgacttcccaagattgt

SEQ ID NO: 133231 - DNA, 25 bp, Saccharomyces pastorianus
gtgacagtagaaccgtactcgccac

SEQ ID NO: 133232 - DNA, 25 bp, Saccharomyces pastorianus
agggtcaacggtaacttggcgctct

SEQ ID NO: 133233 - DNA, 25 bp, Saccharomyces pastorianus
ggacattctcgagcattctctagat

SEQ ID NO: 133234 - DNA, 25 bp, Saccharomyces pastorianus
agtatagtggttgtcgcgctgctga

SEQ ID NO: 133235 - DNA, 25 bp, Saccharomyces pastorianus
agtgacatgtgttccggacattctc

SEQ ID NO: 133236 - DNA, 25 bp, Saccharomyces pastorianus
tattgtggcagctgatggcttcgta

SEQ ID NO: 133237 - DNA, 25 bp, Saccharomyces pastorianus
gcatggacgaagaaacctccaaact

SEQ ID NO: 133238 - DNA, 25 bp, Saccharomyces pastorianus
tgggcgttccacaagccttagaaac

SEQ ID NO: 133239 - DNA, 25 bp, Saccharomyces pastorianus
ttaacgtatgtatccgccgcttcaa

SEQ ID NO: 133240 - DNA, 25 bp, Saccharomyces pastorianus
ggtacgttcagcacattgatattcg

SEQ ID NO: 133241 - DNA, 25 bp, Saccharomyces pastorianus
tcaaccgcaagagagtttgtattta

SEQ ID NO: 133242 - DNA, 25 bp, Saccharomyces pastorianus
gatattcggcttttgttgggcactt

SEQ ID NO: 133243 - DNA, 25 bp, Saccharomyces pastorianus
tatccgccgcttcaataggtacgtt

SEQ ID NO: 133244 - DNA, 25 bp, Saccharomyces pastorianus
caagccttagaaaccgacacgagca

SEQ ID NO: 133245 - DNA, 25 bp, Saccharomyces pastorianus
actagagagttcatgggcgttccac

SEQ ID NO: 133246 - DNA, 25 bp, Saccharomyces pastorianus
gaaaccgacacgagcatggacgaag

SEQ ID NO: 133247 - DNA, 25 bp, Saccharomyces pastorianus
tgggcacttgacatttcaaccgcaa

SEQ ID NO: 133248 - DNA, 25 bp, Saccharomyces pastorianus
tatctccagggccataaaagtacga

SEQ ID NO: 133249 - DNA, 25 bp, Saccharomyces pastorianus
ggtgcggccgccttcaccctgatta

SEQ ID NO: 133250 - DNA, 25 bp, Saccharomyces pastorianus
aaatggccagattttatggtgcggc

SEQ ID NO: 133251 - DNA, 25 bp, Saccharomyces pastorianus
agattttatggtgcggccgccttca

SEQ ID NO: 133252 - DNA, 25 bp, Saccharomyces pastorianus
gcagggttcttcaaatggccagatt

SEQ ID NO: 133253 - DNA, 25 bp, Saccharomyces pastorianus
ttaccatgaggcttatctccagggc

SEQ ID NO: 133254 - DNA, 25 bp, Saccharomyces pastorianus
gtatgtattttgtcctagttcagtg

SEQ ID NO: 133255 - DNA, 25 bp, Saccharomyces pastorianus
ccctgattaccatgaggcttatctc

SEQ ID NO: 133256 - DNA, 25 bp, Saccharomyces pastorianus
tccagggccataaaagtacgaaaat

SEQ ID NO: 133257 - DNA, 25 bp, Saccharomyces pastorianus
gaggcttatctccagggccataaaa

SEQ ID NO: 133258 - DNA, 25 bp, Saccharomyces pastorianus
gaaacgcagggttcttcaaatggcc

SEQ ID NO: 133259 - DNA, 25 bp, Saccharomyces pastorianus
tatgagtgcggcttgggtgtaacca

SEQ ID NO: 133260 - DNA, 25 bp, Saccharomyces pastorianus
tggataccctgatgcacagtacctt

SEQ ID NO: 133261 - DNA, 25 bp, Saccharomyces pastorianus
atcctccttcggcacagaaatatca

SEQ ID NO: 133262 - DNA, 25 bp, Saccharomyces pastorianus
acagtaccttctaggtgacgcctac

SEQ ID NO: 133263 - DNA, 25 bp, Saccharomyces pastorianus
agaactgccatttgctatgagtgcg

SEQ ID NO: 133264 - DNA, 25 bp, Saccharomyces pastorianus
ctttgtttgtggtgctccttttgaa

SEQ ID NO: 133265 - DNA, 25 bp, Saccharomyces pastorianus
gcggttaactttttgacttttgctg

SEQ ID NO: 133266 - DNA, 25 bp, Saccharomyces pastorianus
gttgcgaagggctacatctatggct

SEQ ID NO: 133267 - DNA, 25 bp, Saccharomyces pastorianus
tttgctgcaactaagaaccatcctg

SEQ ID NO: 133268 - DNA, 25 bp, Saccharomyces pastorianus
agagcatttcttttattctccgctg

SEQ ID NO: 133269 - DNA, 25 bp, Saccharomyces pastorianus
gcggcggctttagggcatactgaat

SEQ ID NO: 133270 - DNA, 25 bp, Saccharomyces pastorianus
tatggctgacacgtgtggtacgctg

SEQ ID NO: 133271 - DNA, 25 bp, Saccharomyces pastorianus
cgatactggtatcgcctgatgctgg

SEQ ID NO: 133272 - DNA, 25 bp, Saccharomyces pastorianus
ggaggttatcgctattgtcacacat

SEQ ID NO: 133273 - DNA, 25 bp, Saccharomyces pastorianus
aagggtggcttctttagcggacaag

SEQ ID NO: 133274 - DNA, 25 bp, Saccharomyces pastorianus
gaaactgcgggttgtgatcatgtta

SEQ ID NO: 133275 - DNA, 25 bp, Saccharomyces pastorianus
acacggtacctgttgatttggattt

SEQ ID NO: 133276 - DNA, 25 bp, Saccharomyces pastorianus
ggatatcagccctacgattgcagaa

SEQ ID NO: 133277 - DNA, 25 bp, Saccharomyces pastorianus
tgaagtttcgcgaatgctgcttgtc

SEQ ID NO: 133278 - DNA, 25 bp, Saccharomyces pastorianus
catggtatattttctggctcagcta

SEQ ID NO: 133279 - DNA, 25 bp, Saccharomyces pastorianus
gaattgtttgcaccaacacggtacc

SEQ ID NO: 133280 - DNA, 25 bp, Saccharomyces pastorianus
tcactgcgaagctgattgccaatct

SEQ ID NO: 133281 - DNA, 25 bp, Saccharomyces pastorianus
acagtattaagttgttagctggtaa

SEQ ID NO: 133282 - DNA, 25 bp, Saccharomyces pastorianus
gcttatttcccaaaggcttggtgta

SEQ ID NO: 133283 - DNA, 25 bp, Saccharomyces pastorianus
acatcctgggcttgctgagcttatt

SEQ ID NO: 133284 - DNA, 25 bp, Saccharomyces pastorianus
gtaactcacatcctgggcttgctga

SEQ ID NO: 133285 - DNA, 25 bp, Saccharomyces pastorianus
caaaggcttggtgtaccgttatcta

SEQ ID NO: 133286 - DNA, 25 bp, Saccharomyces pastorianus
ggcttgctgagcttatttcccaaag

SEQ ID NO: 133287 - DNA, 25 bp, Saccharomyces pastorianus
aggcttggtgtaccgttatctaaag

SEQ ID NO: 133288 - DNA, 25 bp, Saccharomyces pastorianus
gctggtaactcacatcctgggcttg

SEQ ID NO: 133289 - DNA, 25 bp, Saccharomyces pastorianus
ttagctggtaactcacatcctgggc

SEQ ID NO: 133290 - DNA, 25 bp, Saccharomyces pastorianus
gttgttagctggtaactcacatcct

SEQ ID NO: 133291 - DNA, 25 bp, Saccharomyces pastorianus
ttggtgtaccgttatctaaagtggg

SEQ ID NO: 133292 - DNA, 25 bp, Saccharomyces pastorianus
ttgatttttccggaagttgtacagg

SEQ ID NO: 133293 - DNA, 25 bp, Saccharomyces pastorianus
cctaatggtagttcttcaatggttt

SEQ ID NO: 133294 - DNA, 25 bp, Saccharomyces pastorianus
ggatgcggcaaatacaggtgatgaa

SEQ ID NO: 133295 - DNA, 25 bp, Saccharomyces pastorianus
gaccctgaagacagaatacgcgctg

SEQ ID NO: 133296 - DNA, 25 bp, Saccharomyces pastorianus
tgaagccacgacaggatcaattaca

SEQ ID NO: 133297 - DNA, 25 bp, Saccharomyces pastorianus
gttggaggaaattctagaccctgaa

SEQ ID NO: 133298 - DNA, 25 bp, Saccharomyces pastorianus
atgaccagtgatgaagccacgacag

SEQ ID NO: 133299 - DNA, 25 bp, Saccharomyces pastorianus
atacgcgctgaacaagcgttgagac

SEQ ID NO: 133300 - DNA, 25 bp, Saccharomyces pastorianus
aattacaacatcagaccatcagaag

SEQ ID NO: 133301 - DNA, 25 bp, Saccharomyces pastorianus
aggaaaaagtcatctcgttggagga

SEQ ID NO: 133302 - DNA, 25 bp, Saccharomyces pastorianus
gaagacccttttacaaaggctgcga

SEQ ID NO: 133303 - DNA, 25 bp, Saccharomyces pastorianus
gaaaaccctccaccatatattcttg

SEQ ID NO: 133304 - DNA, 25 bp, Saccharomyces pastorianus
cttgctcgccccaacgaagataata

SEQ ID NO: 133305 - DNA, 25 bp, Saccharomyces pastorianus
gggcggtcaatatcacggtacttta

SEQ ID NO: 133306 - DNA, 25 bp, Saccharomyces pastorianus
acaccgaatggacgtttcaagccca

SEQ ID NO: 133307 - DNA, 25 bp, Saccharomyces pastorianus
atggctacaaagcaggctcacaaga

SEQ ID NO: 133308 - DNA, 25 bp, Saccharomyces pastorianus
tggcactatattatcacaggacctg

SEQ ID NO: 133309 - DNA, 25 bp, Saccharomyces pastorianus
ggatactccttacaagggcggtcaa

SEQ ID NO: 133310 - DNA, 25 bp, Saccharomyces pastorianus
aggacctgcggatactccttacaag

SEQ ID NO: 133311 - DNA, 25 bp, Saccharomyces pastorianus
ttaactttcccgtctgattatccat

SEQ ID NO: 133312 - DNA, 25 bp, Saccharomyces pastorianus
gattatccatacaaaccaccggcta

SEQ ID NO: 133313 - DNA, 25 bp, Saccharomyces pastorianus
caaaccaccggctatcagaatgata

SEQ ID NO: 133314 - DNA, 25 bp, Saccharomyces pastorianus
gaaaccgaatcctctatttctaaca

SEQ ID NO: 133315 - DNA, 25 bp, Saccharomyces pastorianus
aactggctacaattgtccaggatga

SEQ ID NO: 133316 - DNA, 25 bp, Saccharomyces pastorianus
actaactcaagttcacatccagaaa

SEQ ID NO: 133317 - DNA, 25 bp, Saccharomyces pastorianus
aaactcccataaattcgatatcaga

SEQ ID NO: 133318 - DNA, 25 bp, Saccharomyces pastorianus
tcaacgtcggaaacttcttctccta

SEQ ID NO: 133319 - DNA, 25 bp, Saccharomyces pastorianus
attccgtatcaaacaaaactcccat

SEQ ID NO: 133320 - DNA, 25 bp, Saccharomyces pastorianus
gcaacggaactaactattctacagt

SEQ ID NO: 133321 - DNA, 25 bp, Saccharomyces pastorianus
gaggatgctttcgattccgtatcaa

SEQ ID NO: 133322 - DNA, 25 bp, Saccharomyces pastorianus
caaagcggacgccaaattttctaat

SEQ ID NO: 133323 - DNA, 25 bp, Saccharomyces pastorianus
agagccaattccaaagtcaacgtcg

SEQ ID NO: 133324 - DNA, 25 bp, Saccharomyces pastorianus
tcttctcctaaaaacaccaaagcgg

SEQ ID NO: 133325 - DNA, 25 bp, Saccharomyces pastorianus
agttgtgaccagctgctgtacttgg

SEQ ID NO: 133326 - DNA, 25 bp, Saccharomyces pastorianus
accagctgctgtacttgggtcgcgc

SEQ ID NO: 133327 - DNA, 25 bp, Saccharomyces pastorianus
agctgctgtacttgggtcgcgctgc

SEQ ID NO: 133328 - DNA, 25 bp, Saccharomyces pastorianus
ctagctcggtttagttgtgaccagc

SEQ ID NO: 133329 - DNA, 25 bp, Saccharomyces pastorianus
cgtccactagctcggtttagttgtg

SEQ ID NO: 133330 - DNA, 25 bp, Saccharomyces pastorianus
tgctgtacttgggtcgcgctgcctc

SEQ ID NO: 133331 - DNA, 25 bp, Saccharomyces pastorianus
tgtgaccagctgctgtacttgggtc

SEQ ID NO: 133332 - DNA, 25 bp, Saccharomyces pastorianus
cactagctcggtttagttgtgacca

SEQ ID NO: 133333 - DNA, 25 bp, Saccharomyces pastorianus
gtttagttgtgaccagctgctgtac

SEQ ID NO: 133334 - DNA, 25 bp, Saccharomyces pastorianus
tgcctcctccacacgggtctatgac

SEQ ID NO: 133335 - DNA, 25 bp, Saccharomyces pastorianus
ctcggtttagttgtgaccagctgct

SEQ ID NO: 133336 - DNA, 25 bp, Saccharomyces pastorianus
atgctggtgtcatcgctaatcctaa

SEQ ID NO: 133337 - DNA, 25 bp, Saccharomyces pastorianus
tggtgtcatcgctaatcctaagggt

SEQ ID NO: 133338 - DNA, 25 bp, Saccharomyces pastorianus
tcatcgctaatcctaagggtgaaat

SEQ ID NO: 133339 - DNA, 25 bp, Saccharomyces pastorianus
acaatgctggtgtcatcgctaatcc

SEQ ID NO: 133340 - DNA, 25 bp, Saccharomyces pastorianus
ctggtgtcatcgctaatcctaaggg

SEQ ID NO: 133341 - DNA, 25 bp, Saccharomyces pastorianus
tgctggtgtcatcgctaatcctaag

SEQ ID NO: 133342 - DNA, 25 bp, Saccharomyces pastorianus
ggtgtcatcgctaatcctaagggtg

SEQ ID NO: 133343 - DNA, 25 bp, Saccharomyces pastorianus
tcgctaatcctaagggtgaaatgaa

SEQ ID NO: 133344 - DNA, 25 bp, Saccharomyces pastorianus
gtgtcatcgctaatcctaagggtga

SEQ ID NO: 133345 - DNA, 25 bp, Saccharomyces pastorianus
tgtcatcgctaatcctaagggtgaa

SEQ ID NO: 133346 - DNA, 25 bp, Saccharomyces pastorianus
aatgctggtgtcatcgctaatccta

SEQ ID NO: 133347 - DNA, 25 bp, Saccharomyces pastorianus
aagagtaagatcaccacgcacgttt

SEQ ID NO: 133348 - DNA, 25 bp, Saccharomyces pastorianus
aaagagtaagatcaccacgcacgtt

SEQ ID NO: 133349 - DNA, 25 bp, Saccharomyces pastorianus
cgaaagagtaagatcaccacgcacg

SEQ ID NO: 133350 - DNA, 25 bp, Saccharomyces pastorianus
gaaagagtaagatcaccacgcacgt

SEQ ID NO: 133351 - DNA, 25 bp, Saccharomyces pastorianus
agagtaagatcaccacgcacgttta

SEQ ID NO: 133352 - DNA, 25 bp, Saccharomyces pastorianus
agtaagatcaccacgcacgtttagg

SEQ ID NO: 133353 - DNA, 25 bp, Saccharomyces pastorianus
gagtaagatcaccacgcacgtttag

SEQ ID NO: 133354 - DNA, 25 bp, Saccharomyces pastorianus
gtaagatcaccacgcacgtttaggg

SEQ ID NO: 133355 - DNA, 25 bp, Saccharomyces pastorianus
agggcgaaagagtaagatcaccacg

SEQ ID NO: 133356 - DNA, 25 bp, Saccharomyces pastorianus
aaaccattctattcaccttgcgaaa

SEQ ID NO: 133357 - DNA, 25 bp, Saccharomyces pastorianus
cactttgctactaaaaccattctat

SEQ ID NO: 133358 - DNA, 25 bp, Saccharomyces pastorianus
atacccttctgctacactattaaca

SEQ ID NO: 133359 - DNA, 25 bp, Saccharomyces pastorianus
gcagacatacttaggttcgcggaga

SEQ ID NO: 133360 - DNA, 25 bp, Saccharomyces pastorianus
aaaccacaccacacaataaacaatg

SEQ ID NO: 133361 - DNA, 25 bp, Saccharomyces pastorianus
tagaatacccttctgctacactatt

SEQ ID NO: 133362 - DNA, 25 bp, Saccharomyces pastorianus
agaatgtgcgtcaaaccacaccaca

SEQ ID NO: 133363 - DNA, 25 bp, Saccharomyces pastorianus
ggagacttatacaccaacacgtcag

SEQ ID NO: 133364 - DNA, 25 bp, Saccharomyces pastorianus
ctgctacactattaacacagaatgt

SEQ ID NO: 133365 - DNA, 25 bp, Saccharomyces pastorianus
gagattgtagaatacccttctgcta

SEQ ID NO: 133366 - DNA, 25 bp, Saccharomyces pastorianus
ataaacaatgcactttgctactaaa

SEQ ID NO: 133367 - DNA, 25 bp, Saccharomyces pastorianus
gggaaatttcaacagcagacatact

SEQ ID NO: 133368 - DNA, 25 bp, Saccharomyces pastorianus
gttcgcggagattgtagaataccct

SEQ ID NO: 133369 - DNA, 25 bp, Saccharomyces pastorianus
gttcttcagcaaatactgttagcga

SEQ ID NO: 133370 - DNA, 25 bp, Saccharomyces pastorianus
gaaacatctgatgatatgttctcaa

SEQ ID NO: 133371 - DNA, 25 bp, Saccharomyces pastorianus
gaccatagtatgacagaaacatctg

SEQ ID NO: 133372 - DNA, 25 bp, Saccharomyces pastorianus
gatgatatgttctcaaattctggta

SEQ ID NO: 133373 - DNA, 25 bp, Saccharomyces pastorianus
attatccaatgagagtgaccatagt

SEQ ID NO: 133374 - DNA, 25 bp, Saccharomyces pastorianus
gaggatgtcgtcttcacaaagagga

SEQ ID NO: 133375 - DNA, 25 bp, Saccharomyces pastorianus
gattgttcttcagcaaatactgtta

SEQ ID NO: 133376 - DNA, 25 bp, Saccharomyces pastorianus
ggatgtattctgtaaatgatgtgca

SEQ ID NO: 133377 - DNA, 25 bp, Saccharomyces pastorianus
actgttagcgaaggtagattgaatg

SEQ ID NO: 133378 - DNA, 25 bp, Saccharomyces pastorianus
gtcttcacaaagaggatgtattctg

SEQ ID NO: 133379 - DNA, 25 bp, Saccharomyces pastorianus
gatgaccaagaggatgtcgtcttca

SEQ ID NO: 133380 - DNA, 25 bp, Saccharomyces pastorianus
gagcaatgacactaaggccaatgga

SEQ ID NO: 133381 - DNA, 25 bp, Saccharomyces pastorianus
tggatttaactcaattagcctagat

SEQ ID NO: 133382 - DNA, 25 bp, Saccharomyces pastorianus
ggcgcgttatatagcagtgatgacc

SEQ ID NO: 133383 - DNA, 25 bp, Saccharomyces pastorianus
aaggctttgtcatttgttgggattt

SEQ ID NO: 133384 - DNA, 25 bp, Saccharomyces pastorianus
ggtataaattcttttgccgttaatg

SEQ ID NO: 133385 - DNA, 25 bp, Saccharomyces pastorianus
aatgaattccatgatcccttcttac

SEQ ID NO: 133386 - DNA, 25 bp, Saccharomyces pastorianus
ttcttactggccttagttggctcaa

SEQ ID NO: 133387 - DNA, 25 bp, Saccharomyces pastorianus
atcctgcgacggtaaaccagtttgt

SEQ ID NO: 133388 - DNA, 25 bp, Saccharomyces pastorianus
gtaatcatcacgttgcacagagctt

SEQ ID NO: 133389 - DNA, 25 bp, Saccharomyces pastorianus
ttgggacattcaatcctgcgacggt

SEQ ID NO: 133390 - DNA, 25 bp, Saccharomyces pastorianus
accaaatggcatttcgctgcttgat

SEQ ID NO: 133391 - DNA, 25 bp, Saccharomyces pastorianus
aagcctggcccattagtattaccaa

SEQ ID NO: 133392 - DNA, 25 bp, Saccharomyces pastorianus
aaggacccatgaaagatcgcgatct

SEQ ID NO: 133393 - DNA, 25 bp, Saccharomyces pastorianus
agctacgacggaaacctcaaatttg

SEQ ID NO: 133394 - DNA, 25 bp, Saccharomyces pastorianus
aaatatggatgacctgacgctgcat

SEQ ID NO: 133395 - DNA, 25 bp, Saccharomyces pastorianus
gtgaactatccaacagtccgcagaa

SEQ ID NO: 133396 - DNA, 25 bp, Saccharomyces pastorianus
ggagatccataccttcaaataaaat

SEQ ID NO: 133397 - DNA, 25 bp, Saccharomyces pastorianus
gtgagacgacgataacgccgcaaaa

SEQ ID NO: 133398 - DNA, 25 bp, Saccharomyces pastorianus
aaatgtcgggactgcaggtcatcga

SEQ ID NO: 133399 - DNA, 25 bp, Saccharomyces pastorianus
gcatcgggcactgagccgtagccaa

SEQ ID NO: 133400 - DNA, 25 bp, Saccharomyces pastorianus
gatcgcgatctttaacagtcgctga

SEQ ID NO: 133401 - DNA, 25 bp, Saccharomyces pastorianus
cgtagccaacccattagtaagcctg

SEQ ID NO: 133402 - DNA, 25 bp, Saccharomyces pastorianus
ttatttcgtggttcttgcatctcat

SEQ ID NO: 133403 - DNA, 25 bp, Saccharomyces pastorianus
gaacccatttctatttcaaagcacg

SEQ ID NO: 133404 - DNA, 25 bp, Saccharomyces pastorianus
gtcttctttttggaatgctgccttt

SEQ ID NO: 133405 - DNA, 25 bp, Saccharomyces pastorianus
attgaaaaacgctgtctccggtgtc

SEQ ID NO: 133406 - DNA, 25 bp, Saccharomyces pastorianus
gattttgaccacgtaccggagaaca

SEQ ID NO: 133407 - DNA, 25 bp, Saccharomyces pastorianus
gttccgatagtagcgaatccttaga

SEQ ID NO: 133408 - DNA, 25 bp, Saccharomyces pastorianus
gaagatgcattcaccaggtataact

SEQ ID NO: 133409 - DNA, 25 bp, Saccharomyces pastorianus
tgtgaccttgtactgtcttcttttt

SEQ ID NO: 133410 - DNA, 25 bp, Saccharomyces pastorianus
aagttactatcttctgtccttgagc

SEQ ID NO: 133411 - DNA, 25 bp, Saccharomyces pastorianus
aaaacagtgggcacgcctgcatttt

SEQ ID NO: 133412 - DNA, 25 bp, Saccharomyces pastorianus
gcctgcattttttgctcccgaaatg

SEQ ID NO: 133413 - DNA, 25 bp, Saccharomyces pastorianus
agatattcccgacgttggcttatta

SEQ ID NO: 133414 - DNA, 25 bp, Saccharomyces pastorianus
cccgacgttggcttattatgtgact

SEQ ID NO: 133415 - DNA, 25 bp, Saccharomyces pastorianus
tgttcttttcaaattttaaagccag

SEQ ID NO: 133416 - DNA, 25 bp, Saccharomyces pastorianus
gatcagaagggtgatgaggccaaca

SEQ ID NO: 133417 - DNA, 25 bp, Saccharomyces pastorianus
tagtaaaagacaattggtgacactt

SEQ ID NO: 133418 - DNA, 25 bp, Saccharomyces pastorianus
ggagttgatttgcagggcccaccaa

SEQ ID NO: 133419 - DNA, 25 bp, Saccharomyces pastorianus
ggcccaccaagttgtggaagatggt

SEQ ID NO: 133420 - DNA, 25 bp, Saccharomyces pastorianus
tgaggccaacagatattcccgacgt

SEQ ID NO: 133421 - DNA, 25 bp, Saccharomyces pastorianus
tttgcagggcccaccaagttgtgga

SEQ ID NO: 133422 - DNA, 25 bp, Saccharomyces pastorianus
gacttgttgtggtcagatccagata

SEQ ID NO: 133423 - DNA, 25 bp, Saccharomyces pastorianus
gttggcttattatgtgacttgttgt

SEQ ID NO: 133424 - DNA, 25 bp, Saccharomyces pastorianus
tgttcgaaagccagatctatattca

SEQ ID NO: 133425 - DNA, 25 bp, Saccharomyces pastorianus
gactcacaaccagttgacgttgata

SEQ ID NO: 133426 - DNA, 25 bp, Saccharomyces pastorianus
gttcgaaagccagatctatattcat

SEQ ID NO: 133427 - DNA, 25 bp, Saccharomyces pastorianus
ttatgttcgaaagccagatctatat

SEQ ID NO: 133428 - DNA, 25 bp, Saccharomyces pastorianus
aagaggatctaaacctggtcaacaa

SEQ ID NO: 133429 - DNA, 25 bp, Saccharomyces pastorianus
accagttgacgttgataatatcatc

SEQ ID NO: 133430 - DNA, 25 bp, Saccharomyces pastorianus
acttatgttcgaaagccagatctat

SEQ ID NO: 133431 - DNA, 25 bp, Saccharomyces pastorianus
aacctggtcaacaagttgatctaga

SEQ ID NO: 133432 - DNA, 25 bp, Saccharomyces pastorianus
atgttcgaaagccagatctatattc

SEQ ID NO: 133433 - DNA, 25 bp, Saccharomyces pastorianus
cttatgttcgaaagccagatctata

SEQ ID NO: 133434 - DNA, 25 bp, Saccharomyces pastorianus
ttcgaaagccagatctatattcata

SEQ ID NO: 133435 - DNA, 25 bp, Saccharomyces pastorianus
ttcattttgtcacgaggctggccac

SEQ ID NO: 133436 - DNA, 25 bp, Saccharomyces pastorianus
ggagaaattcattaacctactactg

SEQ ID NO: 133437 - DNA, 25 bp, Saccharomyces pastorianus
ggcagataaaactacgagcactatt

SEQ ID NO: 133438 - DNA, 25 bp, Saccharomyces pastorianus
gcactattcagggagtaaccagcaa

SEQ ID NO: 133439 - DNA, 25 bp, Saccharomyces pastorianus
agtgttcttgacatggtactgcgga

SEQ ID NO: 133440 - DNA, 25 bp, Saccharomyces pastorianus
aaaagacgatcaaaaatatgccctg

SEQ ID NO: 133441 - DNA, 25 bp, Saccharomyces pastorianus
ggctaagttgatcatttcaaagcaa

SEQ ID NO: 133442 - DNA, 25 bp, Saccharomyces pastorianus
gatggatcacaattacaagttgagt

SEQ ID NO: 133443 - DNA, 25 bp, Saccharomyces pastorianus
aggctggccacacaagagcacactg

SEQ ID NO: 133444 - DNA, 25 bp, Saccharomyces pastorianus
acctactactgggattgcatgaaag

SEQ ID NO: 133445 - DNA, 25 bp, Saccharomyces pastorianus
aatatgccctgataccgattaaagc

SEQ ID NO: 133446 - DNA, 25 bp, Saccharomyces pastorianus
gttggtattttttcgatgactcgct

SEQ ID NO: 133447 - DNA, 25 bp, Saccharomyces pastorianus
aaacattctctgttctttctgttcc

SEQ ID NO: 133448 - DNA, 25 bp, Saccharomyces pastorianus
aggacagtacgcatctaggctacaa

SEQ ID NO: 133449 - DNA, 25 bp, Saccharomyces pastorianus
gggacactatacttcatacgtttat

SEQ ID NO: 133450 - DNA, 25 bp, Saccharomyces pastorianus
gtttccgggaattcaccaaatgcga

SEQ ID NO: 133451 - DNA, 25 bp, Saccharomyces pastorianus
agatttttgcttaccgacttcagtg

SEQ ID NO: 133452 - DNA, 25 bp, Saccharomyces pastorianus
gtgtttgtccaatatccttacttct

SEQ ID NO: 133453 - DNA, 25 bp, Saccharomyces pastorianus
atgactcgctttatcgtcctataac

SEQ ID NO: 133454 - DNA, 25 bp, Saccharomyces pastorianus
gtgcgataattgaccttttccaagg

SEQ ID NO: 133455 - DNA, 25 bp, Saccharomyces pastorianus
gggccaagtaccaccatttagatac

SEQ ID NO: 133456 - DNA, 25 bp, Saccharomyces pastorianus
agatcttacaccatattgggcgaga

SEQ ID NO: 133457 - DNA, 25 bp, Saccharomyces pastorianus
aagtgaggttgtcgaatctgctaaa

SEQ ID NO: 133458 - DNA, 25 bp, Saccharomyces pastorianus
aacaagccttaagtgaggttgtcga

SEQ ID NO: 133459 - DNA, 25 bp, Saccharomyces pastorianus
gaatctgctaaagagcggttcggca

SEQ ID NO: 133460 - DNA, 25 bp, Saccharomyces pastorianus
acgtgccacaagagtgtctgccttt

SEQ ID NO: 133461 - DNA, 25 bp, Saccharomyces pastorianus
gcaggcttacgcatttagttcagaa

SEQ ID NO: 133462 - DNA, 25 bp, Saccharomyces pastorianus
gaatgcgcagaaatatggtctagtt

SEQ ID NO: 133463 - DNA, 25 bp, Saccharomyces pastorianus
tggacgcatgccaggatataaccat

SEQ ID NO: 133464 - DNA, 25 bp, Saccharomyces pastorianus
cggttcggcaggcttacgcatttag

SEQ ID NO: 133465 - DNA, 25 bp, Saccharomyces pastorianus
ggtctagttatgtggacgcatgcca

SEQ ID NO: 133466 - DNA, 25 bp, Saccharomyces pastorianus
agagtgtctgcctttgctccaagaa

SEQ ID NO: 133467 - DNA, 25 bp, Saccharomyces pastorianus
gcctttgctccaagaatgcgcagaa

SEQ ID NO: 133468 - DNA, 25 bp, Saccharomyces pastorianus
aaagtgctacagacgacgatgtcgg

SEQ ID NO: 133469 - DNA, 25 bp, Saccharomyces pastorianus
ttttaagtttgaacgcggcagtaca

SEQ ID NO: 133470 - DNA, 25 bp, Saccharomyces pastorianus
actttactgctaaaactgcgtattc

SEQ ID NO: 133471 - DNA, 25 bp, Saccharomyces pastorianus
gtttggttgagaatcctgtggcaat

SEQ ID NO: 133472 - DNA, 25 bp, Saccharomyces pastorianus
gaacatttgcttggtgctttggaga

SEQ ID NO: 133473 - DNA, 25 bp, Saccharomyces pastorianus
gcaaggccgtatagtgaaccttcag

SEQ ID NO: 133474 - DNA, 25 bp, Saccharomyces pastorianus
atgatacctggtaactgttgtttgg

SEQ ID NO: 133475 - DNA, 25 bp, Saccharomyces pastorianus
gtagcaagctgaactccacatatgg

SEQ ID NO: 133476 - DNA, 25 bp, Saccharomyces pastorianus
ggcagtacagttaagccagttttaa

SEQ ID NO: 133477 - DNA, 25 bp, Saccharomyces pastorianus
gaagtttttgcaccaacgatgatac

SEQ ID NO: 133478 - DNA, 25 bp, Saccharomyces pastorianus
ggtgggttcctaccgagtatagcaa

SEQ ID NO: 133479 - DNA, 25 bp, Saccharomyces pastorianus
attctatgtctgatcccggtactac

SEQ ID NO: 133480 - DNA, 25 bp, Saccharomyces pastorianus
ggtgatggtgcctctaatcaaggtc

SEQ ID NO: 133481 - DNA, 25 bp, Saccharomyces pastorianus
tacggtatgggtaccgccgcttcaa

SEQ ID NO: 133482 - DNA, 25 bp, Saccharomyces pastorianus
gcaaaggtcctctcgttctagaata

SEQ ID NO: 133483 - DNA, 25 bp, Saccharomyces pastorianus
aattatggaatttgcccgtcgtgtt

SEQ ID NO: 133484 - DNA, 25 bp, Saccharomyces pastorianus
aagatcctccgcgatgactgaatat

SEQ ID NO: 133485 - DNA, 25 bp, Saccharomyces pastorianus
taaggactggtgtctatccggcaaa

SEQ ID NO: 133486 - DNA, 25 bp, Saccharomyces pastorianus
ggtacagaaactccaaccctaagag

SEQ ID NO: 133487 - DNA, 25 bp, Saccharomyces pastorianus
aggtacggtggccattctatgtctg

SEQ ID NO: 133488 - DNA, 25 bp, Saccharomyces pastorianus
gttgaattagctgatgctgctcctc

SEQ ID NO: 133489 - DNA, 25 bp, Saccharomyces pastorianus
acggtatggatattctagctgtcta

SEQ ID NO: 133490 - DNA, 25 bp, Saccharomyces pastorianus
ggatcccgagtcatgtttggcaaac

SEQ ID NO: 133491 - DNA, 25 bp, Saccharomyces pastorianus
ggcacatgcgtcagcaacaaggatt

SEQ ID NO: 133492 - DNA, 25 bp, Saccharomyces pastorianus
tgccaagttacaagattccccagat

SEQ ID NO: 133493 - DNA, 25 bp, Saccharomyces pastorianus
ttaccacgcagcttccgagggaaat

SEQ ID NO: 133494 - DNA, 25 bp, Saccharomyces pastorianus
atcgccttatcgtggtagattctat

SEQ ID NO: 133495 - DNA, 25 bp, Saccharomyces pastorianus
ggtgcttctgcattatttgcctcgg

SEQ ID NO: 133496 - DNA, 25 bp, Saccharomyces pastorianus
gatgtctcatactttgtgtgttacc

SEQ ID NO: 133497 - DNA, 25 bp, Saccharomyces pastorianus
ttgcctcggcagatggtaggaaacc

SEQ ID NO: 133498 - DNA, 25 bp, Saccharomyces pastorianus
aaggcactttcaggcccgagaggat

SEQ ID NO: 133499 - DNA, 25 bp, Saccharomyces pastorianus
gaaggttatgaattggatcccgagt

SEQ ID NO: 133500 - DNA, 25 bp, Saccharomyces pastorianus
ttctggagattatcgccttatcgtg

SEQ ID NO: 133501 - DNA, 25 bp, Saccharomyces pastorianus
agaactatggtattaatgcctcaga

SEQ ID NO: 133502 - DNA, 25 bp, Saccharomyces pastorianus
atgtctgttacaggaactgagatcg

SEQ ID NO: 133503 - DNA, 25 bp, Saccharomyces pastorianus
gtagatgaattacagaactatggta

SEQ ID NO: 133504 - DNA, 25 bp, Saccharomyces pastorianus
tatggtattaatgcctcagatcttc

SEQ ID NO: 133505 - DNA, 25 bp, Saccharomyces pastorianus
ggtattaatgcctcagatcttcaaa

SEQ ID NO: 133506 - DNA, 25 bp, Saccharomyces pastorianus
actatggtattaatgcctcagatct

SEQ ID NO: 133507 - DNA, 25 bp, Saccharomyces pastorianus
caggaactgagatcgatagtgatac

SEQ ID NO: 133508 - DNA, 25 bp, Saccharomyces pastorianus
gtctgttacaggaactgagatcgat

SEQ ID NO: 133509 - DNA, 25 bp, Saccharomyces pastorianus
gagatcgatagtgatacagcaaaaa

SEQ ID NO: 133510 - DNA, 25 bp, Saccharomyces pastorianus
gcaaaaaatattcttagtgtagatg

SEQ ID NO: 133511 - DNA, 25 bp, Saccharomyces pastorianus
tattaatgcctcagatcttcaaaaa

SEQ ID NO: 133512 - DNA, 25 bp, Saccharomyces pastorianus
aaactgcagctacttcttgtcagaa

SEQ ID NO: 133513 - DNA, 25 bp, Saccharomyces pastorianus
tacgctaagtcggtcaggtcctata

SEQ ID NO: 133514 - DNA, 25 bp, Saccharomyces pastorianus
ctataactatggttgctgcggcgga

SEQ ID NO: 133515 - DNA, 25 bp, Saccharomyces pastorianus
taaggccaggccagatgctatgttg

SEQ ID NO: 133516 - DNA, 25 bp, Saccharomyces pastorianus
acgcactcggtgtaactggttttga

SEQ ID NO: 133517 - DNA, 25 bp, Saccharomyces pastorianus
ggcaggaccctcagaatttgaacag

SEQ ID NO: 133518 - DNA, 25 bp, Saccharomyces pastorianus
gctattatcacgctgtggcaggacc

SEQ ID NO: 133519 - DNA, 25 bp, Saccharomyces pastorianus
gatttgggcccgacgataacggcta

SEQ ID NO: 133520 - DNA, 25 bp, Saccharomyces pastorianus
atacaggttacgatcgcgtcttttt

SEQ ID NO: 133521 - DNA, 25 bp, Saccharomyces pastorianus
ggatcaggatttggccgcatcacaa

SEQ ID NO: 133522 - DNA, 25 bp, Saccharomyces pastorianus
tataggctccactcagtacgctaag

SEQ ID NO: 133523 - DNA, 25 bp, Saccharomyces pastorianus
ggatctttgacattcttgatatcac

SEQ ID NO: 133524 - DNA, 25 bp, Saccharomyces pastorianus
gggatttgccatttgcgtaacgttt

SEQ ID NO: 133525 - DNA, 25 bp, Saccharomyces pastorianus
tatggtcaagacaccaagcccatcg

SEQ ID NO: 133526 - DNA, 25 bp, Saccharomyces pastorianus
gctaattaccttgttgggtggcttt

SEQ ID NO: 133527 - DNA, 25 bp, Saccharomyces pastorianus
gtggctttcccattagtgggttgct

SEQ ID NO: 133528 - DNA, 25 bp, Saccharomyces pastorianus
gggttgctcattacaatcggcgcat

SEQ ID NO: 133529 - DNA, 25 bp, Saccharomyces pastorianus
aaaacgccggactcaaattctaatg

SEQ ID NO: 133530 - DNA, 25 bp, Saccharomyces pastorianus
tttaacgtttctatgccctgtgatg

SEQ ID NO: 133531 - DNA, 25 bp, Saccharomyces pastorianus
atatttgccatgagcctttccagta

SEQ ID NO: 133532 - DNA, 25 bp, Saccharomyces pastorianus
tttcagttttgatttggttcccaga

SEQ ID NO: 133533 - DNA, 25 bp, Saccharomyces pastorianus
taatggcggttctacaagatcctcc

SEQ ID NO: 133534 - DNA, 25 bp, Saccharomyces pastorianus
tatcactggctagtactacatggga

SEQ ID NO: 133535 - DNA, 25 bp, Saccharomyces pastorianus
tcagcacaatttagccaaaaagttt

SEQ ID NO: 133536 - DNA, 25 bp, Saccharomyces pastorianus
gaatcttatcactggctagtactac

SEQ ID NO: 133537 - DNA, 25 bp, Saccharomyces pastorianus
ggaaattcagcacaatttagccaaa

SEQ ID NO: 133538 - DNA, 25 bp, Saccharomyces pastorianus
gaagctcaggaaattcagcacaatt

SEQ ID NO: 133539 - DNA, 25 bp, Saccharomyces pastorianus
tacgctctacctgaatcttatcact

SEQ ID NO: 133540 - DNA, 25 bp, Saccharomyces pastorianus
acctgaatcttatcactggctagta

SEQ ID NO: 133541 - DNA, 25 bp, Saccharomyces pastorianus
gctctacctgaatcttatcactggc

SEQ ID NO: 133542 - DNA, 25 bp, Saccharomyces pastorianus
tacatgggaagatgagtgaagctca

SEQ ID NO: 133543 - DNA, 25 bp, Saccharomyces pastorianus
tagctacgctctacctgaatcttat

SEQ ID NO: 133544 - DNA, 25 bp, Saccharomyces pastorianus
actggctagtactacatgggaagat

SEQ ID NO: 133545 - DNA, 25 bp, Saccharomyces pastorianus
aattgaacacggtattgtcaccaac

SEQ ID NO: 133546 - DNA, 25 bp, Saccharomyces pastorianus
cacggtattgtcaccaactgggacg

SEQ ID NO: 133547 - DNA, 25 bp, Saccharomyces pastorianus
ttacccaattgaacacggtattgtc

SEQ ID NO: 133548 - DNA, 25 bp, Saccharomyces pastorianus
gaacacggtattgtcaccaactggg

SEQ ID NO: 133549 - DNA, 25 bp, Saccharomyces pastorianus
cggtattgtcaccaactgggacgat

SEQ ID NO: 133550 - DNA, 25 bp, Saccharomyces pastorianus
tcataccttctacaacgaattgaga

SEQ ID NO: 133551 - DNA, 25 bp, Saccharomyces pastorianus
aacacggtattgtcaccaactggga

SEQ ID NO: 133552 - DNA, 25 bp, Saccharomyces pastorianus
ggcatcataccttctacaacgaatt

SEQ ID NO: 133553 - DNA, 25 bp, Saccharomyces pastorianus
ttgaacacggtattgtcaccaactg

SEQ ID NO: 133554 - DNA, 25 bp, Saccharomyces pastorianus
ctggcatcataccttctacaacgaa

SEQ ID NO: 133555 - DNA, 25 bp, Saccharomyces pastorianus
gcatcataccttctacaacgaattg

SEQ ID NO: 133556 - DNA, 25 bp, Saccharomyces pastorianus
gtcgttccaatttacgctggtttct

SEQ ID NO: 133557 - DNA, 25 bp, Saccharomyces pastorianus
tccggtagaactactggtattgttt

SEQ ID NO: 133558 - DNA, 25 bp, Saccharomyces pastorianus
cttccggtagaactactggtattgt

SEQ ID NO: 133559 - DNA, 25 bp, Saccharomyces pastorianus
tactcacgtcgttccaatttacgct

SEQ ID NO: 133560 - DNA, 25 bp, Saccharomyces pastorianus
tcacgtcgttccaatttacgctggt

SEQ ID NO: 133561 - DNA, 25 bp, Saccharomyces pastorianus
cacgtcgttccaatttacgctggtt

SEQ ID NO: 133562 - DNA, 25 bp, Saccharomyces pastorianus
tccaatttacgctggtttctctcta

SEQ ID NO: 133563 - DNA, 25 bp, Saccharomyces pastorianus
aatttacgctggtttctctctacct

SEQ ID NO: 133564 - DNA, 25 bp, Saccharomyces pastorianus
cgttccaatttacgctggtttctct

SEQ ID NO: 133565 - DNA, 25 bp, Saccharomyces pastorianus
tttacgctggtttctctctacctca

SEQ ID NO: 133566 - DNA, 25 bp, Saccharomyces pastorianus
ttacgctggtttctctctacctcac

SEQ ID NO: 133567 - DNA, 25 bp, Saccharomyces pastorianus
gtactccgtctggattggtggttct

SEQ ID NO: 133568 - DNA, 25 bp, Saccharomyces pastorianus
tctgccggtattgaccaaactactt

SEQ ID NO: 133569 - DNA, 25 bp, Saccharomyces pastorianus
gaatctgccggtattgaccaaacta

SEQ ID NO: 133570 - DNA, 25 bp, Saccharomyces pastorianus
tgccggtattgaccaaactacttac

SEQ ID NO: 133571 - DNA, 25 bp, Saccharomyces pastorianus
aatctgccggtattgaccaaactac

SEQ ID NO: 133572 - DNA, 25 bp, Saccharomyces pastorianus
ctgccggtattgaccaaactactta

SEQ ID NO: 133573 - DNA, 25 bp, Saccharomyces pastorianus
aaagaaagtactccgtctggattgg

SEQ ID NO: 133574 - DNA, 25 bp, Saccharomyces pastorianus
agaaagaaagtactccgtctggatt

SEQ ID NO: 133575 - DNA, 25 bp, Saccharomyces pastorianus
atctgccggtattgaccaaactact

SEQ ID NO: 133576 - DNA, 25 bp, Saccharomyces pastorianus
ggaatctgccggtattgaccaaact

SEQ ID NO: 133577 - DNA, 25 bp, Saccharomyces pastorianus
gaaagaaagtactccgtctggattg

SEQ ID NO: 133578 - DNA, 25 bp, Saccharomyces pastorianus
cattcccgcagcaattttcgagaga

SEQ ID NO: 133579 - DNA, 25 bp, Saccharomyces pastorianus
ggaattcatttttctctcatttcat

SEQ ID NO: 133580 - DNA, 25 bp, Saccharomyces pastorianus
gattatttatggctggacgcaaaca

SEQ ID NO: 133581 - DNA, 25 bp, Saccharomyces pastorianus
gaaaggaaatggctccgctgctacc

SEQ ID NO: 133582 - DNA, 25 bp, Saccharomyces pastorianus
gctccgctgctaccgttaattgaaa

SEQ ID NO: 133583 - DNA, 25 bp, Saccharomyces pastorianus
tagacaggtttcactgccagctagt

SEQ ID NO: 133584 - DNA, 25 bp, Saccharomyces pastorianus
ctggccctcacacggattatttatg

SEQ ID NO: 133585 - DNA, 25 bp, Saccharomyces pastorianus
tagcggagtacgtaacgcctgacgc

SEQ ID NO: 133586 - DNA, 25 bp, Saccharomyces pastorianus
gtgcacttgtcattagaagctcatt

SEQ ID NO: 133587 - DNA, 25 bp, Saccharomyces pastorianus
gtacagatgttcaggatattcgcac

SEQ ID NO: 133588 - DNA, 25 bp, Saccharomyces pastorianus
gcctgacgcgtatccaacaatgaac

SEQ ID NO: 133589 - DNA, 25 bp, Saccharomyces pastorianus
ggttctatagtcactgtagtatcca

SEQ ID NO: 133590 - DNA, 25 bp, Saccharomyces pastorianus
cttagggaacgccattgaggttagt

SEQ ID NO: 133591 - DNA, 25 bp, Saccharomyces pastorianus
gaatcagctaagagactggatcaga

SEQ ID NO: 133592 - DNA, 25 bp, Saccharomyces pastorianus
gtaggaaacttagggaacgccattg

SEQ ID NO: 133593 - DNA, 25 bp, Saccharomyces pastorianus
gaacgccattgaggttagtgaagat

SEQ ID NO: 133594 - DNA, 25 bp, Saccharomyces pastorianus
tcagattcgtctccataaggcaaaa

SEQ ID NO: 133595 - DNA, 25 bp, Saccharomyces pastorianus
ttcgtctccataaggcaaaaccaat

SEQ ID NO: 133596 - DNA, 25 bp, Saccharomyces pastorianus
tgtagtatccagtgccaaattttct

SEQ ID NO: 133597 - DNA, 25 bp, Saccharomyces pastorianus
attggttttctatcaagtcactcct

SEQ ID NO: 133598 - DNA, 25 bp, Saccharomyces pastorianus
gtgccaaattttctggtaaatactt

SEQ ID NO: 133599 - DNA, 25 bp, Saccharomyces pastorianus
gaagatggttctatagtcactgtag

SEQ ID NO: 133600 - DNA, 25 bp, Saccharomyces pastorianus
aagtgctgggagaactattcttcca

SEQ ID NO: 133601 - DNA, 25 bp, Saccharomyces pastorianus
ggcattaatgcatgagttacaactt

SEQ ID NO: 133602 - DNA, 25 bp, Saccharomyces pastorianus
taaatgatgtcgatgcagcccaaaa

SEQ ID NO: 133603 - DNA, 25 bp, Saccharomyces pastorianus
gtggaatcatcaaacgacttcttgg

SEQ ID NO: 133604 - DNA, 25 bp, Saccharomyces pastorianus
ttaatccaccacaaagccctaataa

SEQ ID NO: 133605 - DNA, 25 bp, Saccharomyces pastorianus
gatgatgatttcgaccctcgaggaa

SEQ ID NO: 133606 - DNA, 25 bp, Saccharomyces pastorianus
gatatgcaagacctaccagaaaatg

SEQ ID NO: 133607 - DNA, 25 bp, Saccharomyces pastorianus
agaataaagcatgccttccaggaga

SEQ ID NO: 133608 - DNA, 25 bp, Saccharomyces pastorianus
gggagtcgcattacaaaccaccgtc

SEQ ID NO: 133609 - DNA, 25 bp, Saccharomyces pastorianus
ataacagttgggtgccgaagtggtt

SEQ ID NO: 133610 - DNA, 25 bp, Saccharomyces pastorianus
gagatgctgctcttgtcgatcatgg

SEQ ID NO: 133611 - DNA, 25 bp, Saccharomyces pastorianus
agaacaatccgcaacacctgaaaca

SEQ ID NO: 133612 - DNA, 25 bp, Saccharomyces pastorianus
acaatcaccgttatcttcggacgtt

SEQ ID NO: 133613 - DNA, 25 bp, Saccharomyces pastorianus
gacttgaatcgggactcgcagttaa

SEQ ID NO: 133614 - DNA, 25 bp, Saccharomyces pastorianus
gcacatagattacagtttacccaga

SEQ ID NO: 133615 - DNA, 25 bp, Saccharomyces pastorianus
ggctacgctgtgtctttgtattgac

SEQ ID NO: 133616 - DNA, 25 bp, Saccharomyces pastorianus
aatgtgcacgaatttggctacgctg

SEQ ID NO: 133617 - DNA, 25 bp, Saccharomyces pastorianus
gaagctttctctgcacaaaatccaa

SEQ ID NO: 133618 - DNA, 25 bp, Saccharomyces pastorianus
tatggctgcttggaaaactgtggtt

SEQ ID NO: 133619 - DNA, 25 bp, Saccharomyces pastorianus
caaaatggctcagtacaggctagta

SEQ ID NO: 133620 - DNA, 25 bp, Saccharomyces pastorianus
aaagtactcgatccggaaagacctg

SEQ ID NO: 133621 - DNA, 25 bp, Saccharomyces pastorianus
aaaactgtggttttatcacggctat

SEQ ID NO: 133622 - DNA, 25 bp, Saccharomyces pastorianus
tcgtagggactatatcaccagactg

SEQ ID NO: 133623 - DNA, 25 bp, Saccharomyces pastorianus
aaattttacaacatcgtcgaccaag

SEQ ID NO: 133624 - DNA, 25 bp, Saccharomyces pastorianus
gttttcagatgaaccggcaagactt

SEQ ID NO: 133625 - DNA, 25 bp, Saccharomyces pastorianus
ttgggtacgaagtcctacgaacaat

SEQ ID NO: 133626 - DNA, 25 bp, Saccharomyces pastorianus
tactcaggtgattagattcggaaca

SEQ ID NO: 133627 - DNA, 25 bp, Saccharomyces pastorianus
ggcaagacttaaccagatttcaaat

SEQ ID NO: 133628 - DNA, 25 bp, Saccharomyces pastorianus
taattcaaattcttcgaactcccta

SEQ ID NO: 133629 - DNA, 25 bp, Saccharomyces pastorianus
acgacgaatttgtcagactttacga

SEQ ID NO: 133630 - DNA, 25 bp, Saccharomyces pastorianus
gtcgaccaagtctgcatgttcttta

SEQ ID NO: 133631 - DNA, 25 bp, Saccharomyces pastorianus
agggaagccaccataaagtatcgta

SEQ ID NO: 133632 - DNA, 25 bp, Saccharomyces pastorianus
ggtagtaacgatactgactcgatta

SEQ ID NO: 133633 - DNA, 25 bp, Saccharomyces pastorianus
aagtagcactacatgcgggccggct

SEQ ID NO: 133634 - DNA, 25 bp, Saccharomyces pastorianus
aaatgtcgattatcacgccctaggt

SEQ ID NO: 133635 - DNA, 25 bp, Saccharomyces pastorianus
acgccctaggtggaaacttggatga

SEQ ID NO: 133636 - DNA, 25 bp, Saccharomyces pastorianus
gccggctacaggaagaggttgctat

SEQ ID NO: 133637 - DNA, 25 bp, Saccharomyces pastorianus
aagctacggcgtcgaaatggcaatc

SEQ ID NO: 133638 - DNA, 25 bp, Saccharomyces pastorianus
gtcgatggctaagacgggcgccaca

SEQ ID NO: 133639 - DNA, 25 bp, Saccharomyces pastorianus
ggagtgagccggttagaattacaaa

SEQ ID NO: 133640 - DNA, 25 bp, Saccharomyces pastorianus
tcgggaacccggtcaagacaagtcg

SEQ ID NO: 133641 - DNA, 25 bp, Saccharomyces pastorianus
gaaatggcaatcatcatcacccgcc

SEQ ID NO: 133642 - DNA, 25 bp, Saccharomyces pastorianus
gagcctattgataagttcgggaacc

SEQ ID NO: 133643 - DNA, 25 bp, Saccharomyces pastorianus
caagaggtgtctaggtcgatggcta

SEQ ID NO: 133644 - DNA, 25 bp, Saccharomyces pastorianus
gccgggagtggcacacacctatata

SEQ ID NO: 133645 - DNA, 25 bp, Saccharomyces pastorianus
actaacactatgctgcgctgcttca

SEQ ID NO: 133646 - DNA, 25 bp, Saccharomyces pastorianus
gtgctgttattattgttgctctgta

SEQ ID NO: 133647 - DNA, 25 bp, Saccharomyces pastorianus
gactctgttcgtgctcatagttatg

SEQ ID NO: 133648 - DNA, 25 bp, Saccharomyces pastorianus
caagtgtgcgactcatagtgctgtt

SEQ ID NO: 133649 - DNA, 25 bp, Saccharomyces pastorianus
tagttatgttcactaccgtgcaccg

SEQ ID NO: 133650 - DNA, 25 bp, Saccharomyces pastorianus
atcgggcaatattttctgggcgctc

SEQ ID NO: 133651 - DNA, 25 bp, Saccharomyces pastorianus
gctggttatcagtatcggtgtcatc

SEQ ID NO: 133652 - DNA, 25 bp, Saccharomyces pastorianus
atcgaggtcgttgttgcctgggcca

SEQ ID NO: 133653 - DNA, 25 bp, Saccharomyces pastorianus
tgctctgtattgtggtggctgttaa

SEQ ID NO: 133654 - DNA, 25 bp, Saccharomyces pastorianus
gagtacaggtcccagatttctttgt

SEQ ID NO: 133655 - DNA, 25 bp, Saccharomyces pastorianus
gtcatcgaaggaggacgagcaggaa

SEQ ID NO: 133656 - DNA, 25 bp, Saccharomyces pastorianus
tcgaaggaggacgagcaggaagtgt

SEQ ID NO: 133657 - DNA, 25 bp, Saccharomyces pastorianus
aggaggacgagcaggaagtgtccaa

SEQ ID NO: 133658 - DNA, 25 bp, Saccharomyces pastorianus
ggaggacgagcaggaagtgtccaag

SEQ ID NO: 133659 - DNA, 25 bp, Saccharomyces pastorianus
agtggtcatcgaaggaggacgagca

SEQ ID NO: 133660 - DNA, 25 bp, Saccharomyces pastorianus
taaagtggtcatcgaaggaggacga

SEQ ID NO: 133661 - DNA, 25 bp, Saccharomyces pastorianus
catcgaaggaggacgagcaggaagt

SEQ ID NO: 133662 - DNA, 25 bp, Saccharomyces pastorianus
ataaagtggtcatcgaaggaggacg

SEQ ID NO: 133663 - DNA, 25 bp, Saccharomyces pastorianus
gtggtcatcgaaggaggacgagcag

SEQ ID NO: 133664 - DNA, 25 bp, Saccharomyces pastorianus
aagtggtcatcgaaggaggacgagc

SEQ ID NO: 133665 - DNA, 25 bp, Saccharomyces pastorianus
tggtcatcgaaggaggacgagcagg

SEQ ID NO: 133666 - DNA, 25 bp, Saccharomyces pastorianus
tacccgctcatccaaatgcacattg

SEQ ID NO: 133667 - DNA, 25 bp, Saccharomyces pastorianus
gtcaggacgttatttcgcgctgcaa

SEQ ID NO: 133668 - DNA, 25 bp, Saccharomyces pastorianus
tgatataggacttctctctcttttt

SEQ ID NO: 133669 - DNA, 25 bp, Saccharomyces pastorianus
cttttccatagagttccacaggatg

SEQ ID NO: 133670 - DNA, 25 bp, Saccharomyces pastorianus
gctgcaagttccttacttttccata

SEQ ID NO: 133671 - DNA, 25 bp, Saccharomyces pastorianus
gcgatttgttcgttatatgcctcat

SEQ ID NO: 133672 - DNA, 25 bp, Saccharomyces pastorianus
ttttggagcgtactcccatctgtta

SEQ ID NO: 133673 - DNA, 25 bp, Saccharomyces pastorianus
ttgtgttaccctcttgttaggtatt

SEQ ID NO: 133674 - DNA, 25 bp, Saccharomyces pastorianus
atgcctcattccgtaagtgtgatca

SEQ ID NO: 133675 - DNA, 25 bp, Saccharomyces pastorianus
ggaaagcagaacatattacccttct

SEQ ID NO: 133676 - DNA, 25 bp, Saccharomyces pastorianus
tgtccaggtggagtgcgatttgttc

SEQ ID NO: 133677 - DNA, 25 bp, Saccharomyces pastorianus
atactgggctttttcacctctgtaa

SEQ ID NO: 133678 - DNA, 25 bp, Saccharomyces pastorianus
gattaacccaatatcgcgtcttttc

SEQ ID NO: 133679 - DNA, 25 bp, Saccharomyces pastorianus
acctctgtaacattggtacgctcgc

SEQ ID NO: 133680 - DNA, 25 bp, Saccharomyces pastorianus
tcgaccttgtttaccgtagctgaac

SEQ ID NO: 133681 - DNA, 25 bp, Saccharomyces pastorianus
tcttgatgcgttggttggctccgaa

SEQ ID NO: 133682 - DNA, 25 bp, Saccharomyces pastorianus
tgtggtgtgacttttttcctgttca

SEQ ID NO: 133683 - DNA, 25 bp, Saccharomyces pastorianus
ttttcaacctgtttggcacctggga

SEQ ID NO: 133684 - DNA, 25 bp, Saccharomyces pastorianus
gagaaactcctcttgtgtcttacca

SEQ ID NO: 133685 - DNA, 25 bp, Saccharomyces pastorianus
gatattagcttgtcgaccttgttta

SEQ ID NO: 133686 - DNA, 25 bp, Saccharomyces pastorianus
aaagtgatctagtctcctctacagt

SEQ ID NO: 133687 - DNA, 25 bp, Saccharomyces pastorianus
tagcagcggaggtgatttcttcttc

SEQ ID NO: 133688 - DNA, 25 bp, Saccharomyces pastorianus
aaaaccgtagctgcattagctctat

SEQ ID NO: 133689 - DNA, 25 bp, Saccharomyces pastorianus
tagtcccttcttcgtgctggacgaa

SEQ ID NO: 133690 - DNA, 25 bp, Saccharomyces pastorianus
gaattggccggtggtaacgcttctt

SEQ ID NO: 133691 - DNA, 25 bp, Saccharomyces pastorianus
agaaggcaccgtaatccagatctcc

SEQ ID NO: 133692 - DNA, 25 bp, Saccharomyces pastorianus
tggacgcagccctagacattactaa

SEQ ID NO: 133693 - DNA, 25 bp, Saccharomyces pastorianus
tgctattaattcctaccagcctagt

SEQ ID NO: 133694 - DNA, 25 bp, Saccharomyces pastorianus
taacgtccagagaattgctgcctat

SEQ ID NO: 133695 - DNA, 25 bp, Saccharomyces pastorianus
gtttgaaaaatctgacgctctcgtt

SEQ ID NO: 133696 - DNA, 25 bp, Saccharomyces pastorianus
gaatcaaatatcatgccactccgcc

SEQ ID NO: 133697 - DNA, 25 bp, Saccharomyces pastorianus
gtgagcgaccatttagacgcaatct

SEQ ID NO: 133698 - DNA, 25 bp, Saccharomyces pastorianus
gacgcaatctacagggaacttacta

SEQ ID NO: 133699 - DNA, 25 bp, Saccharomyces pastorianus
atctcattcgtactcggtgtgcgga

SEQ ID NO: 133700 - DNA, 25 bp, Saccharomyces pastorianus
cgaacccacaatccgcatacgtgaa

SEQ ID NO: 133701 - DNA, 25 bp, Saccharomyces pastorianus
tcaagtcctatagaggcgttaccaa

SEQ ID NO: 133702 - DNA, 25 bp, Saccharomyces pastorianus
taatttccagaaacggtgacactag

SEQ ID NO: 133703 - DNA, 25 bp, Saccharomyces pastorianus
ggattcggcgagtcgaatttcacaa

SEQ ID NO: 133704 - DNA, 25 bp, Saccharomyces pastorianus
attatcggtcctaacggatctggta

SEQ ID NO: 133705 - DNA, 25 bp, Saccharomyces pastorianus
aacaaactggtggagctgatgagaa

SEQ ID NO: 133706 - DNA, 25 bp, Saccharomyces pastorianus
aaattttctagtgttccagggtgat

SEQ ID NO: 133707 - DNA, 25 bp, Saccharomyces pastorianus
atggatgctatctcattcgtactcg

SEQ ID NO: 133708 - DNA, 25 bp, Saccharomyces pastorianus
ttaccaaggtaggattcggcgagtc

SEQ ID NO: 133709 - DNA, 25 bp, Saccharomyces pastorianus
gattatgataacgagggcgctgcct

SEQ ID NO: 133710 - DNA, 25 bp, Saccharomyces pastorianus
cacttggtccagttttggttgctat

SEQ ID NO: 133711 - DNA, 25 bp, Saccharomyces pastorianus
gaaatgcagcaaagtctcgtcaaga

SEQ ID NO: 133712 - DNA, 25 bp, Saccharomyces pastorianus
gcatacgtatattttggtctaacga

SEQ ID NO: 133713 - DNA, 25 bp, Saccharomyces pastorianus
attaaggccacttcaaaattatcta

SEQ ID NO: 133714 - DNA, 25 bp, Saccharomyces pastorianus
agaagcggtcaacatctagatgcac

SEQ ID NO: 133715 - DNA, 25 bp, Saccharomyces pastorianus
ggtcctattccatttatatgaaaag

SEQ ID NO: 133716 - DNA, 25 bp, Saccharomyces pastorianus
aacatctagatgcaccacttggtcc

SEQ ID NO: 133717 - DNA, 25 bp, Saccharomyces pastorianus
aagtctcgtcaagagttgcaaatac

SEQ ID NO: 133718 - DNA, 25 bp, Saccharomyces pastorianus
attctgtgctttatggtcctattcc

SEQ ID NO: 133719 - DNA, 25 bp, Saccharomyces pastorianus
ggtctaacgatattctgtgctttat

SEQ ID NO: 133720 - DNA, 25 bp, Saccharomyces pastorianus
tggttgctatagttttatttgtcac

SEQ ID NO: 133721 - DNA, 25 bp, Saccharomyces pastorianus
catcgctgatgggttttgtgtgtct

SEQ ID NO: 133722 - DNA, 25 bp, Saccharomyces pastorianus
gcgtacaatatccattcgcttttga

SEQ ID NO: 133723 - DNA, 25 bp, Saccharomyces pastorianus
taagaagccagcagtttcccatctt

SEQ ID NO: 133724 - DNA, 25 bp, Saccharomyces pastorianus
ggatgcagtccttctcaatgacaat

SEQ ID NO: 133725 - DNA, 25 bp, Saccharomyces pastorianus
gttgacccagaaatctgtcgcaata

SEQ ID NO: 133726 - DNA, 25 bp, Saccharomyces pastorianus
tctttctacacacttccaggacatt

SEQ ID NO: 133727 - DNA, 25 bp, Saccharomyces pastorianus
ttggtcgtggttcaagcatcgctga

SEQ ID NO: 133728 - DNA, 25 bp, Saccharomyces pastorianus
ggaggcaacggtatttctttctaca

SEQ ID NO: 133729 - DNA, 25 bp, Saccharomyces pastorianus
aacccggatattattgcagaagcgt

SEQ ID NO: 133730 - DNA, 25 bp, Saccharomyces pastorianus
gaacatttacttcgaacggaggcaa

SEQ ID NO: 133731 - DNA, 25 bp, Saccharomyces pastorianus
ttgtgtgtctttggcagtaactgaa

SEQ ID NO: 133732 - DNA, 25 bp, Saccharomyces pastorianus
agtgcttcaatagccaagatggact

SEQ ID NO: 133733 - DNA, 25 bp, Saccharomyces pastorianus
tatcgaaatgagactagaggcccta

SEQ ID NO: 133734 - DNA, 25 bp, Saccharomyces pastorianus
gactggcggcgattacaaagtattt

SEQ ID NO: 133735 - DNA, 25 bp, Saccharomyces pastorianus
agagggttcacggaagtgcttcaat

SEQ ID NO: 133736 - DNA, 25 bp, Saccharomyces pastorianus
ctgattccaagcagttctctagctc

SEQ ID NO: 133737 - DNA, 25 bp, Saccharomyces pastorianus
ggaagttcttggataccacgtccac

SEQ ID NO: 133738 - DNA, 25 bp, Saccharomyces pastorianus
tttaccaacctacggaaatactgat

SEQ ID NO: 133739 - DNA, 25 bp, Saccharomyces pastorianus
aaaacgtttgctctttgtgctgcat

SEQ ID NO: 133740 - DNA, 25 bp, Saccharomyces pastorianus
agttctctagctccaacagtatcaa

SEQ ID NO: 133741 - DNA, 25 bp, Saccharomyces pastorianus
gtaacacgggacagatgtatctttc

SEQ ID NO: 133742 - DNA, 25 bp, Saccharomyces pastorianus
gaacagtatactgcagccattaact

SEQ ID NO: 133743 - DNA, 25 bp, Saccharomyces pastorianus
ccgcctacctagaatgcctgagata

SEQ ID NO: 133744 - DNA, 25 bp, Saccharomyces pastorianus
ttcccagggaattggttggtcgatc

SEQ ID NO: 133745 - DNA, 25 bp, Saccharomyces pastorianus
gataacaaagtacttagccaccgaa

SEQ ID NO: 133746 - DNA, 25 bp, Saccharomyces pastorianus
tactcaaatcattccgcaacttcaa

SEQ ID NO: 133747 - DNA, 25 bp, Saccharomyces pastorianus
ttagcgtggtcagataaaacattga

SEQ ID NO: 133748 - DNA, 25 bp, Saccharomyces pastorianus
attgtatggtcttttccgcctacct

SEQ ID NO: 133749 - DNA, 25 bp, Saccharomyces pastorianus
acgaggactttagaaattggatact

SEQ ID NO: 133750 - DNA, 25 bp, Saccharomyces pastorianus
atcattccgcaacttcaatttttag

SEQ ID NO: 133751 - DNA, 25 bp, Saccharomyces pastorianus
gggcataacaacaaacttttacgag

SEQ ID NO: 133752 - DNA, 25 bp, Saccharomyces pastorianus
tcaatttttaggcttcaatctttag

SEQ ID NO: 133753 - DNA, 25 bp, Saccharomyces pastorianus
tggtcgatcccccagttaatatgga

SEQ ID NO: 133754 - DNA, 25 bp, Saccharomyces pastorianus
atcgacaattcccatgcttgctggc

SEQ ID NO: 133755 - DNA, 25 bp, Saccharomyces pastorianus
tcccatgcttgctggcaacaaggat

SEQ ID NO: 133756 - DNA, 25 bp, Saccharomyces pastorianus
gagaccatgactccagtccaagcat

SEQ ID NO: 133757 - DNA, 25 bp, Saccharomyces pastorianus
agtccaagcatcgacaattcccatg

SEQ ID NO: 133758 - DNA, 25 bp, Saccharomyces pastorianus
agtcattggaatgggataatctcgg

SEQ ID NO: 133759 - DNA, 25 bp, Saccharomyces pastorianus
gactggatgttatgggttttgagac

SEQ ID NO: 133760 - DNA, 25 bp, Saccharomyces pastorianus
ggttttgagaccatgactccagtcc

SEQ ID NO: 133761 - DNA, 25 bp, Saccharomyces pastorianus
aattcccatgcttgctggcaacaag

SEQ ID NO: 133762 - DNA, 25 bp, Saccharomyces pastorianus
atgactccagtccaagcatcgacaa

SEQ ID NO: 133763 - DNA, 25 bp, Saccharomyces pastorianus
gaatgggataatctcgggttttctt

SEQ ID NO: 133764 - DNA, 25 bp, Saccharomyces pastorianus
ttgctggcaacaaggatgtagtagt

SEQ ID NO: 133765 - DNA, 25 bp, Saccharomyces pastorianus
atgattcatatcttgaacgaaagta

SEQ ID NO: 133766 - DNA, 25 bp, Saccharomyces pastorianus
gtatcaatcgtccacaaaaggtcaa

SEQ ID NO: 133767 - DNA, 25 bp, Saccharomyces pastorianus
caaaaggtcaacaaattgattcctt

SEQ ID NO: 133768 - DNA, 25 bp, Saccharomyces pastorianus
atcaatcgtccacaaaaggtcaaca

SEQ ID NO: 133769 - DNA, 25 bp, Saccharomyces pastorianus
agtaagtatcaatcgtccacaaaag

SEQ ID NO: 133770 - DNA, 25 bp, Saccharomyces pastorianus
gtccacaaaaggtcaacaaattgat

SEQ ID NO: 133771 - DNA, 25 bp, Saccharomyces pastorianus
atcgtccacaaaaggtcaacaaatt

SEQ ID NO: 133772 - DNA, 25 bp, Saccharomyces pastorianus
gattccttaaaaaatgttgcgagac

SEQ ID NO: 133773 - DNA, 25 bp, Saccharomyces pastorianus
taagtatcaatcgtccacaaaaggt

SEQ ID NO: 133774 - DNA, 25 bp, Saccharomyces pastorianus
gaaagtaagtatcaatcgtccacaa

SEQ ID NO: 133775 - DNA, 25 bp, Saccharomyces pastorianus
ccttaaaaaatgttgcgagacaatg

SEQ ID NO: 133776 - DNA, 25 bp, Saccharomyces pastorianus
caaagaaatttgtatgctgctctta

SEQ ID NO: 133777 - DNA, 25 bp, Saccharomyces pastorianus
tcctctatcagggagctatatttca

SEQ ID NO: 133778 - DNA, 25 bp, Saccharomyces pastorianus
atgctgctcttaaatatctcctcta

SEQ ID NO: 133779 - DNA, 25 bp, Saccharomyces pastorianus
ggtatatcgagacagattcatgtta

SEQ ID NO: 133780 - DNA, 25 bp, Saccharomyces pastorianus
gaaagcacaagatttctctaattta

SEQ ID NO: 133781 - DNA, 25 bp, Saccharomyces pastorianus
atttacttcctttctcagacgagct

SEQ ID NO: 133782 - DNA, 25 bp, Saccharomyces pastorianus
gctcttaaatatctcctctatcagg

SEQ ID NO: 133783 - DNA, 25 bp, Saccharomyces pastorianus
atggagttattggatttacttcctt

SEQ ID NO: 133784 - DNA, 25 bp, Saccharomyces pastorianus
gcaagaaacactatcccaaatggag

SEQ ID NO: 133785 - DNA, 25 bp, Saccharomyces pastorianus
agacgagctatctgctagaaagaaa

SEQ ID NO: 133786 - DNA, 25 bp, Saccharomyces pastorianus
gataatgctggtatatcgagacaga

SEQ ID NO: 133787 - DNA, 25 bp, Saccharomyces pastorianus
aaacaacctccaacacaggcttatt

SEQ ID NO: 133788 - DNA, 25 bp, Saccharomyces pastorianus
tcacggtctgaataggcactactat

SEQ ID NO: 133789 - DNA, 25 bp, Saccharomyces pastorianus
tcatccagggtttggctgttggcta

SEQ ID NO: 133790 - DNA, 25 bp, Saccharomyces pastorianus
ctgttggctatcttctgttgatgtt

SEQ ID NO: 133791 - DNA, 25 bp, Saccharomyces pastorianus
tttagattgattgacacgggcgcat

SEQ ID NO: 133792 - DNA, 25 bp, Saccharomyces pastorianus
aatggtcgttggctggtaccactct

SEQ ID NO: 133793 - DNA, 25 bp, Saccharomyces pastorianus
gaacagtggcaatcaggtcttaaga

SEQ ID NO: 133794 - DNA, 25 bp, Saccharomyces pastorianus
gacacgggcgcattgataaataact

SEQ ID NO: 133795 - DNA, 25 bp, Saccharomyces pastorianus
gttgtcatcgatgcttttagattga

SEQ ID NO: 133796 - DNA, 25 bp, Saccharomyces pastorianus
agaagcacctttccgaaacagcaga

SEQ ID NO: 133797 - DNA, 25 bp, Saccharomyces pastorianus
acattcaagccttaattcacggtct

SEQ ID NO: 133798 - DNA, 25 bp, Saccharomyces pastorianus
tatggatttgaccacgtctgcagtg

SEQ ID NO: 133799 - DNA, 25 bp, Saccharomyces pastorianus
atcactggtaccctgggtctacaaa

SEQ ID NO: 133800 - DNA, 25 bp, Saccharomyces pastorianus
ggataccactggtctagacgctttg

SEQ ID NO: 133801 - DNA, 25 bp, Saccharomyces pastorianus
ataggctacttcactcaacatcatg

SEQ ID NO: 133802 - DNA, 25 bp, Saccharomyces pastorianus
gatgtccaaatccttcccaggtaaa

SEQ ID NO: 133803 - DNA, 25 bp, Saccharomyces pastorianus
gatatctctgttattgactctgttt

SEQ ID NO: 133804 - DNA, 25 bp, Saccharomyces pastorianus
gacgtcatctaggttcatttggtat

SEQ ID NO: 133805 - DNA, 25 bp, Saccharomyces pastorianus
agcattcgctgcattgtgtttaaat

SEQ ID NO: 133806 - DNA, 25 bp, Saccharomyces pastorianus
aaaaatctcgtgtagcattcgctgc

SEQ ID NO: 133807 - DNA, 25 bp, Saccharomyces pastorianus
tgcccttgtaggtgccaatggttgt

SEQ ID NO: 133808 - DNA, 25 bp, Saccharomyces pastorianus
tggattccagaattgcccttgtagg

SEQ ID NO: 133809 - DNA, 25 bp, Saccharomyces pastorianus
gctactttaaccacttgtccggaat

SEQ ID NO: 133810 - DNA, 25 bp, Saccharomyces pastorianus
agtattgaccctatcgtcacggatt

SEQ ID NO: 133811 - DNA, 25 bp, Saccharomyces pastorianus
gaccctatcgtcacggattacgcag

SEQ ID NO: 133812 - DNA, 25 bp, Saccharomyces pastorianus
ggattacgcagtgggctactttaac

SEQ ID NO: 133813 - DNA, 25 bp, Saccharomyces pastorianus
ccacttgtccggaataacttttgat

SEQ ID NO: 133814 - DNA, 25 bp, Saccharomyces pastorianus
aaaagctgcttctagtattgaccct

SEQ ID NO: 133815 - DNA, 25 bp, Saccharomyces pastorianus
ggcaagcatcggttcgcaagtgaga

SEQ ID NO: 133816 - DNA, 25 bp, Saccharomyces pastorianus
ccggaataacttttgatgctgttca

SEQ ID NO: 133817 - DNA, 25 bp, Saccharomyces pastorianus
gttcgcaagtgagaaaagctgcttc

SEQ ID NO: 133818 - DNA, 25 bp, Saccharomyces pastorianus
atcgtcacggattacgcagtgggct

SEQ ID NO: 133819 - DNA, 25 bp, Saccharomyces pastorianus
tgcttctagtattgaccctatcgtc

SEQ ID NO: 133820 - DNA, 25 bp, Saccharomyces pastorianus
cgttattggcgtgcattttctcagt

SEQ ID NO: 133821 - DNA, 25 bp, Saccharomyces pastorianus
ctcgttattggcgtgcattttctca

SEQ ID NO: 133822 - DNA, 25 bp, Saccharomyces pastorianus
tggcgtgcattttctcagttttagg

SEQ ID NO: 133823 - DNA, 25 bp, Saccharomyces pastorianus
gttattggcgtgcattttctcagtt

SEQ ID NO: 133824 - DNA, 25 bp, Saccharomyces pastorianus
tattggcgtgcattttctcagtttt

SEQ ID NO: 133825 - DNA, 25 bp, Saccharomyces pastorianus
gcgtgcattttctcagttttaggtt

SEQ ID NO: 133826 - DNA, 25 bp, Saccharomyces pastorianus
ttggcgtgcattttctcagttttag

SEQ ID NO: 133827 - DNA, 25 bp, Saccharomyces pastorianus
ggcgtgcattttctcagttttaggt

SEQ ID NO: 133828 - DNA, 25 bp, Saccharomyces pastorianus
gtgcattttctcagttttaggtttg

SEQ ID NO: 133829 - DNA, 25 bp, Saccharomyces pastorianus
attggcgtgcattttctcagtttta

SEQ ID NO: 133830 - DNA, 25 bp, Saccharomyces pastorianus
gcattttctcagttttaggtttgat

SEQ ID NO: 133831 - DNA, 25 bp, Saccharomyces pastorianus
tgattttactgttttcctctttcct

SEQ ID NO: 133832 - DNA, 25 bp, Saccharomyces pastorianus
ctggctttatgatatgttgtttaac

SEQ ID NO: 133833 - DNA, 25 bp, Saccharomyces pastorianus
tcctctttcctacaattaatctctt

SEQ ID NO: 133834 - DNA, 25 bp, Saccharomyces pastorianus
ttaatctctttttctggctttatga

SEQ ID NO: 133835 - DNA, 25 bp, Saccharomyces pastorianus
taaattgattttactgttttcctct

SEQ ID NO: 133836 - DNA, 25 bp, Saccharomyces pastorianus
tgttttcctctttcctacaattaat

SEQ ID NO: 133837 - DNA, 25 bp, Saccharomyces pastorianus
gttgtttaacttcaccaataattag

SEQ ID NO: 133838 - DNA, 25 bp, Saccharomyces pastorianus
ctctttttctggctttatgatatgt

SEQ ID NO: 133839 - DNA, 25 bp, Saccharomyces pastorianus
acaattaatctctttttctggcttt

SEQ ID NO: 133840 - DNA, 25 bp, Saccharomyces pastorianus
ttactgttttcctctttcctacaat

SEQ ID NO: 133841 - DNA, 25 bp, Saccharomyces pastorianus
gatatgttgtttaacttcaccaata

SEQ ID NO: 133842 - DNA, 25 bp, Saccharomyces pastorianus
gaccctccttggttatttggcgttg

SEQ ID NO: 133843 - DNA, 25 bp, Saccharomyces pastorianus
gaggttcctcataactctttcattc

SEQ ID NO: 133844 - DNA, 25 bp, Saccharomyces pastorianus
attcacaagataactacgaccctcc

SEQ ID NO: 133845 - DNA, 25 bp, Saccharomyces pastorianus
tttcattccttggtattcccgaaga

SEQ ID NO: 133846 - DNA, 25 bp, Saccharomyces pastorianus
atggtaacagcgaacactcccgaca

SEQ ID NO: 133847 - DNA, 25 bp, Saccharomyces pastorianus
gagggaatctcaagccattcacaag

SEQ ID NO: 133848 - DNA, 25 bp, Saccharomyces pastorianus
acccaatcagccgatcgctttaaaa

SEQ ID NO: 133849 - DNA, 25 bp, Saccharomyces pastorianus
aaaatcattgtctcacagagccccg

SEQ ID NO: 133850 - DNA, 25 bp, Saccharomyces pastorianus
gacaaacattgccacagacctacaa

SEQ ID NO: 133851 - DNA, 25 bp, Saccharomyces pastorianus
attacaatcgctactactcacagac

SEQ ID NO: 133852 - DNA, 25 bp, Saccharomyces pastorianus
atttggcgttgaggctacccaatca

SEQ ID NO: 133853 - DNA, 25 bp, Saccharomyces pastorianus
tagtttgagcacgaatggagccatc

SEQ ID NO: 133854 - DNA, 25 bp, Saccharomyces pastorianus
tgactccgggcgatttaggtaccct

SEQ ID NO: 133855 - DNA, 25 bp, Saccharomyces pastorianus
gtagggcctatccagagcagttcaa

SEQ ID NO: 133856 - DNA, 25 bp, Saccharomyces pastorianus
ggttcggtgcctacatggaagactt

SEQ ID NO: 133857 - DNA, 25 bp, Saccharomyces pastorianus
agaccgtcgtttcaagagtcctgat

SEQ ID NO: 133858 - DNA, 25 bp, Saccharomyces pastorianus
gaaattcaagattgccaggcctttg

SEQ ID NO: 133859 - DNA, 25 bp, Saccharomyces pastorianus
taggtacccttcaagatgctaataa

SEQ ID NO: 133860 - DNA, 25 bp, Saccharomyces pastorianus
atatgaacactcttgccggtggcaa

SEQ ID NO: 133861 - DNA, 25 bp, Saccharomyces pastorianus
gacagttaggtcttcgtagggccta

SEQ ID NO: 133862 - DNA, 25 bp, Saccharomyces pastorianus
tcctgatgaatctgtcgagcaatta

SEQ ID NO: 133863 - DNA, 25 bp, Saccharomyces pastorianus
gccaggcctttgagtgtacccggat

SEQ ID NO: 133864 - DNA, 25 bp, Saccharomyces pastorianus
ggcctagaatcagagttgcccacta

SEQ ID NO: 133865 - DNA, 25 bp, Saccharomyces pastorianus
gaggtcaccgcatccattgggaaga

SEQ ID NO: 133866 - DNA, 25 bp, Saccharomyces pastorianus
tagcgtttttgatcatgcctgccaa

SEQ ID NO: 133867 - DNA, 25 bp, Saccharomyces pastorianus
attccttcactgtggaggcactgaa

SEQ ID NO: 133868 - DNA, 25 bp, Saccharomyces pastorianus
gttcattgaatcattggctcgtctc

SEQ ID NO: 133869 - DNA, 25 bp, Saccharomyces pastorianus
gagataccctcataatggcctagaa

SEQ ID NO: 133870 - DNA, 25 bp, Saccharomyces pastorianus
tgatttcgtcagaggccatttccat

SEQ ID NO: 133871 - DNA, 25 bp, Saccharomyces pastorianus
cttgcccaatggtttgaacgttgtt

SEQ ID NO: 133872 - DNA, 25 bp, Saccharomyces pastorianus
aactgcctccggtagtcacgcataa

SEQ ID NO: 133873 - DNA, 25 bp, Saccharomyces pastorianus
attggcgctgagaagaccttacggg

SEQ ID NO: 133874 - DNA, 25 bp, Saccharomyces pastorianus
gaaaccggatggtatcttgcccaat

SEQ ID NO: 133875 - DNA, 25 bp, Saccharomyces pastorianus
ccgttcacctacagagatcttggca

SEQ ID NO: 133876 - DNA, 25 bp, Saccharomyces pastorianus
ataacgactagcgagatccggaagc

SEQ ID NO: 133877 - DNA, 25 bp, Saccharomyces pastorianus
aacgctctactccaatcactagatg

SEQ ID NO: 133878 - DNA, 25 bp, Saccharomyces pastorianus
atgatccccagaacaaatcgcttaa

SEQ ID NO: 133879 - DNA, 25 bp, Saccharomyces pastorianus
gaggaggtatcccagttagacttca

SEQ ID NO: 133880 - DNA, 25 bp, Saccharomyces pastorianus
aagactccacaactcaaactactga

SEQ ID NO: 133881 - DNA, 25 bp, Saccharomyces pastorianus
ggaggcggtttccatatgatcccca

SEQ ID NO: 133882 - DNA, 25 bp, Saccharomyces pastorianus
tgattccgaactaaacgctctactc

SEQ ID NO: 133883 - DNA, 25 bp, Saccharomyces pastorianus
taggagtcttccaggtgtggtcaga

SEQ ID NO: 133884 - DNA, 25 bp, Saccharomyces pastorianus
aatcgcttaagcacaatcctgacgg

SEQ ID NO: 133885 - DNA, 25 bp, Saccharomyces pastorianus
ggacacaatgacttaatcgggaact

SEQ ID NO: 133886 - DNA, 25 bp, Saccharomyces pastorianus
aactcgtaccttgacaacaacagca

SEQ ID NO: 133887 - DNA, 25 bp, Saccharomyces pastorianus
gatttccagaatactatccacaata

SEQ ID NO: 133888 - DNA, 25 bp, Saccharomyces pastorianus
agtagcggacccatggatttccaga

SEQ ID NO: 133889 - DNA, 25 bp, Saccharomyces pastorianus
attagacggcggtctaccaattata

SEQ ID NO: 133890 - DNA, 25 bp, Saccharomyces pastorianus
tggatatgggtgactccatctccca

SEQ ID NO: 133891 - DNA, 25 bp, Saccharomyces pastorianus
acctgagccacgctggcgtggatat

SEQ ID NO: 133892 - DNA, 25 bp, Saccharomyces pastorianus
gcaatacaggaccactaacgactct

SEQ ID NO: 133893 - DNA, 25 bp, Saccharomyces pastorianus
tactatccacaatatgcaatacagg

SEQ ID NO: 133894 - DNA, 25 bp, Saccharomyces pastorianus
gcactaaattccagggaacaagccc

SEQ ID NO: 133895 - DNA, 25 bp, Saccharomyces pastorianus
ggaccactaacgactctgacctgag

SEQ ID NO: 133896 - DNA, 25 bp, Saccharomyces pastorianus
cgaacgtaggagtagcggacccatg

SEQ ID NO: 133897 - DNA, 25 bp, Saccharomyces pastorianus
gaccccacggactatcgatttttag

SEQ ID NO: 133898 - DNA, 25 bp, Saccharomyces pastorianus
ggcacaccgtggatgatgacttccg

SEQ ID NO: 133899 - DNA, 25 bp, Saccharomyces pastorianus
gaagtcgcgctcaacgcaaacatct

SEQ ID NO: 133900 - DNA, 25 bp, Saccharomyces pastorianus
gaatcggcattagccgccgaagtcg

SEQ ID NO: 133901 - DNA, 25 bp, Saccharomyces pastorianus
gtattacatgcaatcccgctaccat

SEQ ID NO: 133902 - DNA, 25 bp, Saccharomyces pastorianus
gccgccggagtacccgtattacatg

SEQ ID NO: 133903 - DNA, 25 bp, Saccharomyces pastorianus
gaggatcccggcgaatcggcattag

SEQ ID NO: 133904 - DNA, 25 bp, Saccharomyces pastorianus
attcccaagtacatggcacaccgtg

SEQ ID NO: 133905 - DNA, 25 bp, Saccharomyces pastorianus
tatcgatttttagggctcgggcatt

SEQ ID NO: 133906 - DNA, 25 bp, Saccharomyces pastorianus
ggatgatgacttccggcacttagac

SEQ ID NO: 133907 - DNA, 25 bp, Saccharomyces pastorianus
tcgggcattcggtcatcggagacga

SEQ ID NO: 133908 - DNA, 25 bp, Saccharomyces pastorianus
ggattattccttagtcattggtatt

SEQ ID NO: 133909 - DNA, 25 bp, Saccharomyces pastorianus
cagtgtgatcaagcagcctaccgtt

SEQ ID NO: 133910 - DNA, 25 bp, Saccharomyces pastorianus
agcctaccgttgttacaccaagaca

SEQ ID NO: 133911 - DNA, 25 bp, Saccharomyces pastorianus
aaagctctatttcaagttctaaaag

SEQ ID NO: 133912 - DNA, 25 bp, Saccharomyces pastorianus
gaatcacctattcatgttcgcgaat

SEQ ID NO: 133913 - DNA, 25 bp, Saccharomyces pastorianus
aatgttccatgatttgcccacgact

SEQ ID NO: 133914 - DNA, 25 bp, Saccharomyces pastorianus
ttggaacgacacattatttttggcc

SEQ ID NO: 133915 - DNA, 25 bp, Saccharomyces pastorianus
atgatttgcccacgactttggctaa

SEQ ID NO: 133916 - DNA, 25 bp, Saccharomyces pastorianus
ggaatcattgatttcattcgaacgt

SEQ ID NO: 133917 - DNA, 25 bp, Saccharomyces pastorianus
aagagcttctgtttggaacgacaca

SEQ ID NO: 133918 - DNA, 25 bp, Saccharomyces pastorianus
cattcgaacgtttacatgggacaaa

SEQ ID NO: 133919 - DNA, 25 bp, Saccharomyces pastorianus
atcgcattttgcttgagtacttctg

SEQ ID NO: 133920 - DNA, 25 bp, Saccharomyces pastorianus
gcagaagctgctcctgccaaaacag

SEQ ID NO: 133921 - DNA, 25 bp, Saccharomyces pastorianus
atagtgacgttataatccgcgaaga

SEQ ID NO: 133922 - DNA, 25 bp, Saccharomyces pastorianus
caacctgtccttcggaacacatttt

SEQ ID NO: 133923 - DNA, 25 bp, Saccharomyces pastorianus
gatctgcgtatttgtggaaacccct

SEQ ID NO: 133924 - DNA, 25 bp, Saccharomyces pastorianus
ttgtttatccaacctgtccttcgga

SEQ ID NO: 133925 - DNA, 25 bp, Saccharomyces pastorianus
atcacaaacgcattcccaagcaaat

SEQ ID NO: 133926 - DNA, 25 bp, Saccharomyces pastorianus
atttctccctcagtttctacaactt

SEQ ID NO: 133927 - DNA, 25 bp, Saccharomyces pastorianus
atccgcgaagatgaaccaagttcct

SEQ ID NO: 133928 - DNA, 25 bp, Saccharomyces pastorianus
gagataggaccccacaagaatcaca

SEQ ID NO: 133929 - DNA, 25 bp, Saccharomyces pastorianus
ggatccttctgttaacatttctccc

SEQ ID NO: 133930 - DNA, 25 bp, Saccharomyces pastorianus
gtcgtttcctcggatggatacctat

SEQ ID NO: 133931 - DNA, 25 bp, Saccharomyces pastorianus
gtatccggaactcttcgaaactggc

SEQ ID NO: 133932 - DNA, 25 bp, Saccharomyces pastorianus
tgcgtctttgaaacttcccgttgaa

SEQ ID NO: 133933 - DNA, 25 bp, Saccharomyces pastorianus
aggatgatacgttactcttctcaaa

SEQ ID NO: 133934 - DNA, 25 bp, Saccharomyces pastorianus
gagcctgttatgaagatggtcccca

SEQ ID NO: 133935 - DNA, 25 bp, Saccharomyces pastorianus
agagtcctaccatgagcctgttatg

SEQ ID NO: 133936 - DNA, 25 bp, Saccharomyces pastorianus
gggtcagattttccccatcaaagtt

SEQ ID NO: 133937 - DNA, 25 bp, Saccharomyces pastorianus
ataccaccagtatcgatgcgctgag

SEQ ID NO: 133938 - DNA, 25 bp, Saccharomyces pastorianus
tacatcgttgttggaatcctcgcgc

SEQ ID NO: 133939 - DNA, 25 bp, Saccharomyces pastorianus
gcaattccgcaagtacagagtccta

SEQ ID NO: 133940 - DNA, 25 bp, Saccharomyces pastorianus
tacaactttgttatggacccggaga

SEQ ID NO: 133941 - DNA, 25 bp, Saccharomyces pastorianus
aagaatttactccatatcattcagt

SEQ ID NO: 133942 - DNA, 25 bp, Saccharomyces pastorianus
gatagccagtacttggcggttaccg

SEQ ID NO: 133943 - DNA, 25 bp, Saccharomyces pastorianus
cagtacttggcggttaccggctctt

SEQ ID NO: 133944 - DNA, 25 bp, Saccharomyces pastorianus
tagccagtacttggcggttaccggc

SEQ ID NO: 133945 - DNA, 25 bp, Saccharomyces pastorianus
atagccagtacttggcggttaccgg

SEQ ID NO: 133946 - DNA, 25 bp, Saccharomyces pastorianus
ttcagtgaagatagccagtacttgg

SEQ ID NO: 133947 - DNA, 25 bp, Saccharomyces pastorianus
tacttggcggttaccggctcttcca

SEQ ID NO: 133948 - DNA, 25 bp, Saccharomyces pastorianus
gaagatagccagtacttggcggtta

SEQ ID NO: 133949 - DNA, 25 bp, Saccharomyces pastorianus
cattcagtgaagatagccagtactt

SEQ ID NO: 133950 - DNA, 25 bp, Saccharomyces pastorianus
agatagccagtacttggcggttacc

SEQ ID NO: 133951 - DNA, 25 bp, Saccharomyces pastorianus
atcattcagtgaagatagccagtac

SEQ ID NO: 133952 - DNA, 25 bp, Saccharomyces pastorianus
tgtatttcccttggaacgtcgaaag

SEQ ID NO: 133953 - DNA, 25 bp, Saccharomyces pastorianus
actagccctcgttgggataggcgat

SEQ ID NO: 133954 - DNA, 25 bp, Saccharomyces pastorianus
gtgtatccatcaccaccaaaagtta

SEQ ID NO: 133955 - DNA, 25 bp, Saccharomyces pastorianus
tccttcggtagccaacagctattta

SEQ ID NO: 133956 - DNA, 25 bp, Saccharomyces pastorianus
actttccctacttctattctgagtg

SEQ ID NO: 133957 - DNA, 25 bp, Saccharomyces pastorianus
ttatctgtgaggtgactttccctac

SEQ ID NO: 133958 - DNA, 25 bp, Saccharomyces pastorianus
gagatgttgttctccacctcgttac

SEQ ID NO: 133959 - DNA, 25 bp, Saccharomyces pastorianus
gataggcgatcaacctgcgctttca

SEQ ID NO: 133960 - DNA, 25 bp, Saccharomyces pastorianus
aaagctcatgccaccacaacaatat

SEQ ID NO: 133961 - DNA, 25 bp, Saccharomyces pastorianus
agtctcgattggtggtacttttaca

SEQ ID NO: 133962 - DNA, 25 bp, Saccharomyces pastorianus
cttatggctatgtctccttcggtag

SEQ ID NO: 133963 - DNA, 25 bp, Saccharomyces pastorianus
caaggtttaaaggatctcagttcat

SEQ ID NO: 133964 - DNA, 25 bp, Saccharomyces pastorianus
gcaaaattggttccatgcgaaggta

SEQ ID NO: 133965 - DNA, 25 bp, Saccharomyces pastorianus
ctcagttcattgtagtctcgcttaa

SEQ ID NO: 133966 - DNA, 25 bp, Saccharomyces pastorianus
gcattgttgcaatttcgaccagcgc

SEQ ID NO: 133967 - DNA, 25 bp, Saccharomyces pastorianus
aaggtcgttgattgctttgtcattg

SEQ ID NO: 133968 - DNA, 25 bp, Saccharomyces pastorianus
gtttgattgaattgtccggtgggca

SEQ ID NO: 133969 - DNA, 25 bp, Saccharomyces pastorianus
aaagaaggtatgtttgccaatgcta

SEQ ID NO: 133970 - DNA, 25 bp, Saccharomyces pastorianus
ggatgaagttgatgctgctcttgat

SEQ ID NO: 133971 - DNA, 25 bp, Saccharomyces pastorianus
gctaatagggtcttcaggacgagat

SEQ ID NO: 133972 - DNA, 25 bp, Saccharomyces pastorianus
ttgctgaccttttaccaaattcatt

SEQ ID NO: 133973 - DNA, 25 bp, Saccharomyces pastorianus
tcgaccagcgcctatgtatattttg

SEQ ID NO: 133974 - DNA, 25 bp, Saccharomyces pastorianus
gcaggaatcggagtcagaacgtaaa

SEQ ID NO: 133975 - DNA, 25 bp, Saccharomyces pastorianus
gatacgaggtgttgaagacgacctt

SEQ ID NO: 133976 - DNA, 25 bp, Saccharomyces pastorianus
gtacgatagcgataaaggatccaag

SEQ ID NO: 133977 - DNA, 25 bp, Saccharomyces pastorianus
aactattggcgaaagagctggagga

SEQ ID NO: 133978 - DNA, 25 bp, Saccharomyces pastorianus
aaattggtccatgacttgaacaaat

SEQ ID NO: 133979 - DNA, 25 bp, Saccharomyces pastorianus
aacacgaatttcttgaggattttga

SEQ ID NO: 133980 - DNA, 25 bp, Saccharomyces pastorianus
aagacgctattgcaaaaccatttga

SEQ ID NO: 133981 - DNA, 25 bp, Saccharomyces pastorianus
cttgaggattttgatctggtgacaa

SEQ ID NO: 133982 - DNA, 25 bp, Saccharomyces pastorianus
atcgatttggatacttacagagaaa

SEQ ID NO: 133983 - DNA, 25 bp, Saccharomyces pastorianus
gacgaccttgtaacagtccagacag

SEQ ID NO: 133984 - DNA, 25 bp, Saccharomyces pastorianus
gcaattgagctcagaactagattct

SEQ ID NO: 133985 - DNA, 25 bp, Saccharomyces pastorianus
ggtggtgggtcaacttttccagata

SEQ ID NO: 133986 - DNA, 25 bp, Saccharomyces pastorianus
cgtgttaccatcatacctcttgata

SEQ ID NO: 133987 - DNA, 25 bp, Saccharomyces pastorianus
tactgctttgcaaacttgtgccgga

SEQ ID NO: 133988 - DNA, 25 bp, Saccharomyces pastorianus
taatattcgctatgctactgctttg

SEQ ID NO: 133989 - DNA, 25 bp, Saccharomyces pastorianus
tcaagattctcagacggccactcag

SEQ ID NO: 133990 - DNA, 25 bp, Saccharomyces pastorianus
gaggccaataagttcacaagtgctt

SEQ ID NO: 133991 - DNA, 25 bp, Saccharomyces pastorianus
attaccttccatccaaagatccgtg

SEQ ID NO: 133992 - DNA, 25 bp, Saccharomyces pastorianus
gaatatgggtttgatccatcacgaa

SEQ ID NO: 133993 - DNA, 25 bp, Saccharomyces pastorianus
gataaactacgagcccgactagtcg

SEQ ID NO: 133994 - DNA, 25 bp, Saccharomyces pastorianus
gatccgtgctagaagtatcaccctt

SEQ ID NO: 133995 - DNA, 25 bp, Saccharomyces pastorianus
ttacgcaagcgtgttaccatcatac

SEQ ID NO: 133996 - DNA, 25 bp, Saccharomyces pastorianus
ggcttctaccatctctagaggtgct

SEQ ID NO: 133997 - DNA, 25 bp, Saccharomyces pastorianus
cttctaccatctctagaggtgctgt

SEQ ID NO: 133998 - DNA, 25 bp, Saccharomyces pastorianus
gcttctaccatctctagaggtgctg

SEQ ID NO: 133999 - DNA, 25 bp, Saccharomyces pastorianus
ttctaccatctctagaggtgctgtt

SEQ ID NO: 134000 - DNA, 25 bp, Saccharomyces pastorianus
accatctctagaggtgctgtttctg

SEQ ID NO: 134001 - DNA, 25 bp, Saccharomyces pastorianus
taccatctctagaggtgctgtttct

SEQ ID NO: 134002 - DNA, 25 bp, Saccharomyces pastorianus
tctaccatctctagaggtgctgttt

SEQ ID NO: 134003 - DNA, 25 bp, Saccharomyces pastorianus
cggtttgattgccgccagaagaact

SEQ ID NO: 134004 - DNA, 25 bp, Saccharomyces pastorianus
gattgccgccagaagaactggtttg

SEQ ID NO: 134005 - DNA, 25 bp, Saccharomyces pastorianus
ctaccatctctagaggtgctgtttc

SEQ ID NO: 134006 - DNA, 25 bp, Saccharomyces pastorianus
catctctagaggtgctgtttctggt

SEQ ID NO: 134007 - DNA, 25 bp, Saccharomyces pastorianus
gtaaacttgctctctaatttctcca

SEQ ID NO: 134008 - DNA, 25 bp, Saccharomyces pastorianus
atctccagttgcgtttctagatcgc

SEQ ID NO: 134009 - DNA, 25 bp, Saccharomyces pastorianus
gtaccagtttcttcgacacattcaa

SEQ ID NO: 134010 - DNA, 25 bp, Saccharomyces pastorianus
taatcggtcgttcagcatcttttca

SEQ ID NO: 134011 - DNA, 25 bp, Saccharomyces pastorianus
tcgacttatcagagaccttacccaa

SEQ ID NO: 134012 - DNA, 25 bp, Saccharomyces pastorianus
atatttcagtttttccatctccagt

SEQ ID NO: 134013 - DNA, 25 bp, Saccharomyces pastorianus
ttctccactagttgtatgcccgagt

SEQ ID NO: 134014 - DNA, 25 bp, Saccharomyces pastorianus
gtctggacagcatcattcacgcatt

SEQ ID NO: 134015 - DNA, 25 bp, Saccharomyces pastorianus
ggtcagcttgactaactcttggatt

SEQ ID NO: 134016 - DNA, 25 bp, Saccharomyces pastorianus
ggattatcgcttggctttcttcaat

SEQ ID NO: 134017 - DNA, 25 bp, Saccharomyces pastorianus
atgtacttttcggagatctctctcg

SEQ ID NO: 134018 - DNA, 25 bp, Saccharomyces pastorianus
ggaagcttacattaccaaatcatct

SEQ ID NO: 134019 - DNA, 25 bp, Saccharomyces pastorianus
aactggcagaatcgattcgtcttga

SEQ ID NO: 134020 - DNA, 25 bp, Saccharomyces pastorianus
aactggctccgtttcatggaattga

SEQ ID NO: 134021 - DNA, 25 bp, Saccharomyces pastorianus
aagatacctttctgcaacgaatgaa

SEQ ID NO: 134022 - DNA, 25 bp, Saccharomyces pastorianus
atttctgagaggaaccgtctggtaa

SEQ ID NO: 134023 - DNA, 25 bp, Saccharomyces pastorianus
aacgaatgaatactgcggatacttt

SEQ ID NO: 134024 - DNA, 25 bp, Saccharomyces pastorianus
taattgtacctctaaattcgatcct

SEQ ID NO: 134025 - DNA, 25 bp, Saccharomyces pastorianus
gattcttttcttaccgaaatggcta

SEQ ID NO: 134026 - DNA, 25 bp, Saccharomyces pastorianus
agagaatcattccaactggctccgt

SEQ ID NO: 134027 - DNA, 25 bp, Saccharomyces pastorianus
ggacgtcagaggtctccatttggaa

SEQ ID NO: 134028 - DNA, 25 bp, Saccharomyces pastorianus
gatcaatacgatccagcctatatag

SEQ ID NO: 134029 - DNA, 25 bp, Saccharomyces pastorianus
gccgttttcaaagtaacgactgctt

SEQ ID NO: 134030 - DNA, 25 bp, Saccharomyces pastorianus
ggccgttttcaaagtaacgactgct

SEQ ID NO: 134031 - DNA, 25 bp, Saccharomyces pastorianus
ttcaaagtaacgactgctttgctgg

SEQ ID NO: 134032 - DNA, 25 bp, Saccharomyces pastorianus
gttttcaaagtaacgactgctttgc

SEQ ID NO: 134033 - DNA, 25 bp, Saccharomyces pastorianus
agtaacgactgctttgctggcttgc

SEQ ID NO: 134034 - DNA, 25 bp, Saccharomyces pastorianus
taacgactgctttgctggcttgcgt

SEQ ID NO: 134035 - DNA, 25 bp, Saccharomyces pastorianus
aaagtaacgactgctttgctggctt

SEQ ID NO: 134036 - DNA, 25 bp, Saccharomyces pastorianus
aacgactgctttgctggcttgcgtg

SEQ ID NO: 134037 - DNA, 25 bp, Saccharomyces pastorianus
aagtaacgactgctttgctggcttg

SEQ ID NO: 134038 - DNA, 25 bp, Saccharomyces pastorianus
caaagtaacgactgctttgctggct

SEQ ID NO: 134039 - DNA, 25 bp, Saccharomyces pastorianus
gtaacgactgctttgctggcttgcg

SEQ ID NO: 134040 - DNA, 25 bp, Saccharomyces pastorianus
ataattccttccttgttttgtctct

SEQ ID NO: 134041 - DNA, 25 bp, Saccharomyces pastorianus
tcccgattttctcccgttattagag

SEQ ID NO: 134042 - DNA, 25 bp, Saccharomyces pastorianus
tgatgtactctaaaattcttggcgg

SEQ ID NO: 134043 - DNA, 25 bp, Saccharomyces pastorianus
gcagctgcctgacaatactactgta

SEQ ID NO: 134044 - DNA, 25 bp, Saccharomyces pastorianus
gatttttcctataattccttccttg

SEQ ID NO: 134045 - DNA, 25 bp, Saccharomyces pastorianus
aagtagaactaatatctcccgatat

SEQ ID NO: 134046 - DNA, 25 bp, Saccharomyces pastorianus
atatgggccatattgtcttgattgc

SEQ ID NO: 134047 - DNA, 25 bp, Saccharomyces pastorianus
actactgtattaactccaaatggtg

SEQ ID NO: 134048 - DNA, 25 bp, Saccharomyces pastorianus
aatggtaacatcattccgcagctgc

SEQ ID NO: 134049 - DNA, 25 bp, Saccharomyces pastorianus
gaagaatggcaatactactccgaag

SEQ ID NO: 134050 - DNA, 25 bp, Saccharomyces pastorianus
gaaatccttgattcagataccggga

SEQ ID NO: 134051 - DNA, 25 bp, Saccharomyces pastorianus
gcgatgtctatgttgtagagcctga

SEQ ID NO: 134052 - DNA, 25 bp, Saccharomyces pastorianus
acctgcttcggtttggaacatgacg

SEQ ID NO: 134053 - DNA, 25 bp, Saccharomyces pastorianus
agagcctgatggaagtgaaacacta

SEQ ID NO: 134054 - DNA, 25 bp, Saccharomyces pastorianus
gataccttggataaaccttcagtaa

SEQ ID NO: 134055 - DNA, 25 bp, Saccharomyces pastorianus
tgttttggagaatacctgcttcggt

SEQ ID NO: 134056 - DNA, 25 bp, Saccharomyces pastorianus
gtttggcaaatctgttggtagcgca

SEQ ID NO: 134057 - DNA, 25 bp, Saccharomyces pastorianus
gaaaacttcatcagtcagtgtaaac

SEQ ID NO: 134058 - DNA, 25 bp, Saccharomyces pastorianus
gaagcctaagacttggttcctgctg

SEQ ID NO: 134059 - DNA, 25 bp, Saccharomyces pastorianus
gttcctgctggcctttatttggata

SEQ ID NO: 134060 - DNA, 25 bp, Saccharomyces pastorianus
tattgggcagtatatcatttctatt

SEQ ID NO: 134061 - DNA, 25 bp, Saccharomyces pastorianus
aaacactaatttcgccagatacctt

SEQ ID NO: 134062 - DNA, 25 bp, Saccharomyces pastorianus
ttacgagtgttttcatagctgcaaa

SEQ ID NO: 134063 - DNA, 25 bp, Saccharomyces pastorianus
attctagtaatacagcggcgagctc

SEQ ID NO: 134064 - DNA, 25 bp, Saccharomyces pastorianus
cgacagttcatacacttccttcaaa

SEQ ID NO: 134065 - DNA, 25 bp, Saccharomyces pastorianus
aatggccgccaagtaagatctaatg

SEQ ID NO: 134066 - DNA, 25 bp, Saccharomyces pastorianus
gcagcagttattcacccggaggcac

SEQ ID NO: 134067 - DNA, 25 bp, Saccharomyces pastorianus
aaggcggttgaatctgcagcagtta

SEQ ID NO: 134068 - DNA, 25 bp, Saccharomyces pastorianus
tacgccagccactgcttgcaaaaaa

SEQ ID NO: 134069 - DNA, 25 bp, Saccharomyces pastorianus
gccccgaaaactgccctgaaataat

SEQ ID NO: 134070 - DNA, 25 bp, Saccharomyces pastorianus
gaaaaaggaccctcctcaatcaagc

SEQ ID NO: 134071 - DNA, 25 bp, Saccharomyces pastorianus
gcacactcttcttcacattttagta

SEQ ID NO: 134072 - DNA, 25 bp, Saccharomyces pastorianus
agaagaatcgctatcctcagatgat

SEQ ID NO: 134073 - DNA, 25 bp, Saccharomyces pastorianus
gtaaatacaacgttcaacagcttta

SEQ ID NO: 134074 - DNA, 25 bp, Saccharomyces pastorianus
gttattgggccacactttcatgacc

SEQ ID NO: 134075 - DNA, 25 bp, Saccharomyces pastorianus
aatcatactgtggacttgaagaact

SEQ ID NO: 134076 - DNA, 25 bp, Saccharomyces pastorianus
gagcaatatcggaatgtgtgtagtc

SEQ ID NO: 134077 - DNA, 25 bp, Saccharomyces pastorianus
aatcaagttgtgaagctggtcaata

SEQ ID NO: 134078 - DNA, 25 bp, Saccharomyces pastorianus
gagggttctgagtttaatcatactg

SEQ ID NO: 134079 - DNA, 25 bp, Saccharomyces pastorianus
acactttcatgacccttcgaatgtt

SEQ ID NO: 134080 - DNA, 25 bp, Saccharomyces pastorianus
gacttagcggatcccaaaaatatgg

SEQ ID NO: 134081 - DNA, 25 bp, Saccharomyces pastorianus
aattaacacctattacgtactcttg

SEQ ID NO: 134082 - DNA, 25 bp, Saccharomyces pastorianus
ggccaatttggttattgggccacac

SEQ ID NO: 134083 - DNA, 25 bp, Saccharomyces pastorianus
ggagcaattaatcaagttggccaat

SEQ ID NO: 134084 - DNA, 25 bp, Saccharomyces pastorianus
gagagatacaattttacaagaacga

SEQ ID NO: 134085 - DNA, 25 bp, Saccharomyces pastorianus
gtgctatccaatttcttttctttat

SEQ ID NO: 134086 - DNA, 25 bp, Saccharomyces pastorianus
tgatgacctcagaatattacaaact

SEQ ID NO: 134087 - DNA, 25 bp, Saccharomyces pastorianus
ttgttccacggaagacgcaaagggc

SEQ ID NO: 134088 - DNA, 25 bp, Saccharomyces pastorianus
atttggaccaacattgttccacgga

SEQ ID NO: 134089 - DNA, 25 bp, Saccharomyces pastorianus
atcgcttgctcttttatttgtgcta

SEQ ID NO: 134090 - DNA, 25 bp, Saccharomyces pastorianus
gcccatctaaaagagcaatgcgttc

SEQ ID NO: 134091 - DNA, 25 bp, Saccharomyces pastorianus
aatgttttgcattatcgcttgctct

SEQ ID NO: 134092 - DNA, 25 bp, Saccharomyces pastorianus
tacgattatttaacagcccatctaa

SEQ ID NO: 134093 - DNA, 25 bp, Saccharomyces pastorianus
gacgcaaagggcaataactaaccta

SEQ ID NO: 134094 - DNA, 25 bp, Saccharomyces pastorianus
tgctcttttatttgtgctatccaat

SEQ ID NO: 134095 - DNA, 25 bp, Saccharomyces pastorianus
gagctatgctttctacattacttga

SEQ ID NO: 134096 - DNA, 25 bp, Saccharomyces pastorianus
attccacaatctttgagggataggt

SEQ ID NO: 134097 - DNA, 25 bp, Saccharomyces pastorianus
atccacttgtggaggcaccaaagga

SEQ ID NO: 134098 - DNA, 25 bp, Saccharomyces pastorianus
ggttcaaccaactcttcagatccaa

SEQ ID NO: 134099 - DNA, 25 bp, Saccharomyces pastorianus
tcgataacgaaattccagatctgtt

SEQ ID NO: 134100 - DNA, 25 bp, Saccharomyces pastorianus
ttacataaggatagcgaatgcgcat

SEQ ID NO: 134101 - DNA, 25 bp, Saccharomyces pastorianus
gagtaatgtctctgcattgttagca

SEQ ID NO: 134102 - DNA, 25 bp, Saccharomyces pastorianus
gagtataacgcgttcggttcaacca

SEQ ID NO: 134103 - DNA, 25 bp, Saccharomyces pastorianus
gtaatatcaaacactagagctatgc

SEQ ID NO: 134104 - DNA, 25 bp, Saccharomyces pastorianus
tgttagcatattccaatccacttgt

SEQ ID NO: 134105 - DNA, 25 bp, Saccharomyces pastorianus
aaactagcgaattatctggtgatga

SEQ ID NO: 134106 - DNA, 25 bp, Saccharomyces pastorianus
tcttccttttcttctcctagagtat

SEQ ID NO: 134107 - DNA, 25 bp, Saccharomyces pastorianus
tgatcagtctccaagtcttcctttt

SEQ ID NO: 134108 - DNA, 25 bp, Saccharomyces pastorianus
aaggagatggctctgacaatcacga

SEQ ID NO: 134109 - DNA, 25 bp, Saccharomyces pastorianus
tctcctagagtatcgtctggtaacg

SEQ ID NO: 134110 - DNA, 25 bp, Saccharomyces pastorianus
tggcgcttaactctaataccagcct

SEQ ID NO: 134111 - DNA, 25 bp, Saccharomyces pastorianus
gctcaggaactattagaacccgttt

SEQ ID NO: 134112 - DNA, 25 bp, Saccharomyces pastorianus
tgatgtgtccagtgcacagcagcgt

SEQ ID NO: 134113 - DNA, 25 bp, Saccharomyces pastorianus
gaacagtggtctacaatactacccc

SEQ ID NO: 134114 - DNA, 25 bp, Saccharomyces pastorianus
tttatccgaacgtgaaatggcgctt

SEQ ID NO: 134115 - DNA, 25 bp, Saccharomyces pastorianus
ggttgcggacccatggatatatcaa

SEQ ID NO: 134116 - DNA, 25 bp, Saccharomyces pastorianus
gttatgaaagcttcctcagacatga

SEQ ID NO: 134117 - DNA, 25 bp, Saccharomyces pastorianus
tgacttggctgttcccgctgagacc

SEQ ID NO: 134118 - DNA, 25 bp, Saccharomyces pastorianus
tagtcccagccctatgattgaacca

SEQ ID NO: 134119 - DNA, 25 bp, Saccharomyces pastorianus
taaagtggacgagtcccgaccttag

SEQ ID NO: 134120 - DNA, 25 bp, Saccharomyces pastorianus
aagaaggaagatgcgctcctccctt

SEQ ID NO: 134121 - DNA, 25 bp, Saccharomyces pastorianus
ggagctagaaccagaactacaccaa

SEQ ID NO: 134122 - DNA, 25 bp, Saccharomyces pastorianus
tacaccaagatcaagacgccattgc

SEQ ID NO: 134123 - DNA, 25 bp, Saccharomyces pastorianus
gctccgactacagcggttccaagaa

SEQ ID NO: 134124 - DNA, 25 bp, Saccharomyces pastorianus
acgacggcagctgacttggctgttc

SEQ ID NO: 134125 - DNA, 25 bp, Saccharomyces pastorianus
gtatgcaagataccacattcaatga

SEQ ID NO: 134126 - DNA, 25 bp, Saccharomyces pastorianus
gattgaaccacaaccggagctagaa

SEQ ID NO: 134127 - DNA, 25 bp, Saccharomyces pastorianus
tcaagacgccattgcaagtgaagtg

SEQ ID NO: 134128 - DNA, 25 bp, Saccharomyces pastorianus
agcggtagtagttaccatcgttaca

SEQ ID NO: 134129 - DNA, 25 bp, Saccharomyces pastorianus
gcagatgatctggaaagcggactcg

SEQ ID NO: 134130 - DNA, 25 bp, Saccharomyces pastorianus
gagcagttagaaggcggagcaccca

SEQ ID NO: 134131 - DNA, 25 bp, Saccharomyces pastorianus
agtggttttaggagtttatgcgtat

SEQ ID NO: 134132 - DNA, 25 bp, Saccharomyces pastorianus
aaagcgcgtcacacaattttagttg

SEQ ID NO: 134133 - DNA, 25 bp, Saccharomyces pastorianus
gtatactagccttccgaacactgaa

SEQ ID NO: 134134 - DNA, 25 bp, Saccharomyces pastorianus
tagacaacatgacagtcccaataag

SEQ ID NO: 134135 - DNA, 25 bp, Saccharomyces pastorianus
gcggagcacccataagtagcacttc

SEQ ID NO: 134136 - DNA, 25 bp, Saccharomyces pastorianus
caataagacagtttcatgggcagat

SEQ ID NO: 134137 - DNA, 25 bp, Saccharomyces pastorianus
gtagcacttctaacaaagcaggatc

SEQ ID NO: 134138 - DNA, 25 bp, Saccharomyces pastorianus
gttaccatcgttacatttttgatag

SEQ ID NO: 134139 - DNA, 25 bp, Saccharomyces pastorianus
gcaagcctattggattggcccaatt

SEQ ID NO: 134140 - DNA, 25 bp, Saccharomyces pastorianus
ctcaggtgttgtataccctccttgt

SEQ ID NO: 134141 - DNA, 25 bp, Saccharomyces pastorianus
aagtatggcgttctcaggtgttgta

SEQ ID NO: 134142 - DNA, 25 bp, Saccharomyces pastorianus
tatggcgttctcaggtgttgtatac

SEQ ID NO: 134143 - DNA, 25 bp, Saccharomyces pastorianus
gtgaatatggtggtgatgtcgcaat

SEQ ID NO: 134144 - DNA, 25 bp, Saccharomyces pastorianus
tggtgatgtcgcaatgtggttaagt

SEQ ID NO: 134145 - DNA, 25 bp, Saccharomyces pastorianus
ggattggcccaattgctgccaaatt

SEQ ID NO: 134146 - DNA, 25 bp, Saccharomyces pastorianus
gcgttctcaggtgttgtataccctc

SEQ ID NO: 134147 - DNA, 25 bp, Saccharomyces pastorianus
atggcgcaagcctattggattggcc

SEQ ID NO: 134148 - DNA, 25 bp, Saccharomyces pastorianus
attggattggcccaattgctgccaa

SEQ ID NO: 134149 - DNA, 25 bp, Saccharomyces pastorianus
caatgtggttaagtatggcgttctc

SEQ ID NO: 134150 - DNA, 25 bp, Saccharomyces pastorianus
gtttcgtcggaatcttaggtctctt

SEQ ID NO: 134151 - DNA, 25 bp, Saccharomyces pastorianus
gaacatttttgcctacctgtttcgt

SEQ ID NO: 134152 - DNA, 25 bp, Saccharomyces pastorianus
ctgttgccatgtcgtataagccttg

SEQ ID NO: 134153 - DNA, 25 bp, Saccharomyces pastorianus
ttttgtgcaaaaatccctcgctggt

SEQ ID NO: 134154 - DNA, 25 bp, Saccharomyces pastorianus
gctggttctggtctattgtttgtac

SEQ ID NO: 134155 - DNA, 25 bp, Saccharomyces pastorianus
attctccatccaactttctagtgtg

SEQ ID NO: 134156 - DNA, 25 bp, Saccharomyces pastorianus
taagccttggtcagtcgagtacgat

SEQ ID NO: 134157 - DNA, 25 bp, Saccharomyces pastorianus
atacgtattcggcagcattctccat

SEQ ID NO: 134158 - DNA, 25 bp, Saccharomyces pastorianus
gtggtctactttgggcaggttttca

SEQ ID NO: 134159 - DNA, 25 bp, Saccharomyces pastorianus
ggaccggaacttgttggatcttcaa

SEQ ID NO: 134160 - DNA, 25 bp, Saccharomyces pastorianus
taggtctcttactagcttctgttgc

SEQ ID NO: 134161 - DNA, 25 bp, Saccharomyces pastorianus
tctggagaaaactactgataacatt

SEQ ID NO: 134162 - DNA, 25 bp, Saccharomyces pastorianus
tggtgctttaaaaatcagacactgc

SEQ ID NO: 134163 - DNA, 25 bp, Saccharomyces pastorianus
gagattctcattgattatttataca

SEQ ID NO: 134164 - DNA, 25 bp, Saccharomyces pastorianus
aatcatacaatagggaggctctact

SEQ ID NO: 134165 - DNA, 25 bp, Saccharomyces pastorianus
gaagacggcgtcatttcggtggaaa

SEQ ID NO: 134166 - DNA, 25 bp, Saccharomyces pastorianus
tttacggtaggccaaaaatcataca

SEQ ID NO: 134167 - DNA, 25 bp, Saccharomyces pastorianus
gaaattctttttgaagccagaacag

SEQ ID NO: 134168 - DNA, 25 bp, Saccharomyces pastorianus
aatattaacatctactggtgcttta

SEQ ID NO: 134169 - DNA, 25 bp, Saccharomyces pastorianus
gaataaacaacagatccgcctaaaa

SEQ ID NO: 134170 - DNA, 25 bp, Saccharomyces pastorianus
acaaatgattgatgaagacggcgtc

SEQ ID NO: 134171 - DNA, 25 bp, Saccharomyces pastorianus
acaaaacgctagcaactggaaggcg

SEQ ID NO: 134172 - DNA, 25 bp, Saccharomyces pastorianus
agaaaattcactctccgcaacaaat

SEQ ID NO: 134173 - DNA, 25 bp, Saccharomyces pastorianus
ttcgacaaccgccagtttgcaaatt

SEQ ID NO: 134174 - DNA, 25 bp, Saccharomyces pastorianus
aatccattcgttctcatcatctaac

SEQ ID NO: 134175 - DNA, 25 bp, Saccharomyces pastorianus
taatggcacaccctaattctgctgc

SEQ ID NO: 134176 - DNA, 25 bp, Saccharomyces pastorianus
taatgctaatcacttctcgccatac

SEQ ID NO: 134177 - DNA, 25 bp, Saccharomyces pastorianus
gagtcatacccgtcatttttcttta

SEQ ID NO: 134178 - DNA, 25 bp, Saccharomyces pastorianus
tatgagccgcaacgctagtatttcc

SEQ ID NO: 134179 - DNA, 25 bp, Saccharomyces pastorianus
aatgaatcttttgtgcctcgtatgc

SEQ ID NO: 134180 - DNA, 25 bp, Saccharomyces pastorianus
gcagcatattggtcaaggcccatat

SEQ ID NO: 134181 - DNA, 25 bp, Saccharomyces pastorianus
gcaccttctttcaattctcaaacta

SEQ ID NO: 134182 - DNA, 25 bp, Saccharomyces pastorianus
tatgcctgccatgaataccgctaga

SEQ ID NO: 134183 - DNA, 25 bp, Saccharomyces pastorianus
atgcagattcgttgagagttataag

SEQ ID NO: 134184 - DNA, 25 bp, Saccharomyces pastorianus
gatttactcttgattctcacgcatc

SEQ ID NO: 134185 - DNA, 25 bp, Saccharomyces pastorianus
ttgtgttttgtcttcctcttttcct

SEQ ID NO: 134186 - DNA, 25 bp, Saccharomyces pastorianus
aggattttactctttatggttatag

SEQ ID NO: 134187 - DNA, 25 bp, Saccharomyces pastorianus
taaattttgtgttttgtcttcctct

SEQ ID NO: 134188 - DNA, 25 bp, Saccharomyces pastorianus
ttgccatcctctgtcgccattgaag

SEQ ID NO: 134189 - DNA, 25 bp, Saccharomyces pastorianus
ttgattctcacgcatctcaggccac

SEQ ID NO: 134190 - DNA, 25 bp, Saccharomyces pastorianus
tcaggccacctggacactgtacatg

SEQ ID NO: 134191 - DNA, 25 bp, Saccharomyces pastorianus
ttttcctgtcctctttttttgccat

SEQ ID NO: 134192 - DNA, 25 bp, Saccharomyces pastorianus
gtcgccattgaagtcgaactttata

SEQ ID NO: 134193 - DNA, 25 bp, Saccharomyces pastorianus
taggtttcattctaaaatcaagcat

SEQ ID NO: 134194 - DNA, 25 bp, Saccharomyces pastorianus
gcaagactcagtagctattaaacca

SEQ ID NO: 134195 - DNA, 25 bp, Saccharomyces pastorianus
atctgtaccgacgttttagctcgtg

SEQ ID NO: 134196 - DNA, 25 bp, Saccharomyces pastorianus
atcaattatgacgttccaggatcgt

SEQ ID NO: 134197 - DNA, 25 bp, Saccharomyces pastorianus
taacgtagatgtgattcatgcagaa

SEQ ID NO: 134198 - DNA, 25 bp, Saccharomyces pastorianus
ggcgtcaatctggtcatcaattatg

SEQ ID NO: 134199 - DNA, 25 bp, Saccharomyces pastorianus
aaagctatcacattctatactaagc

SEQ ID NO: 134200 - DNA, 25 bp, Saccharomyces pastorianus
gggcggtcaggtaaagctatcacat

SEQ ID NO: 134201 - DNA, 25 bp, Saccharomyces pastorianus
acttcaaaggcgtcaatctggtcat

SEQ ID NO: 134202 - DNA, 25 bp, Saccharomyces pastorianus
ttagctcgtggtattgacttcaaag

SEQ ID NO: 134203 - DNA, 25 bp, Saccharomyces pastorianus
gtgtttgatctgtaccgacgtttta

SEQ ID NO: 134204 - DNA, 25 bp, Saccharomyces pastorianus
agcagattactactgtgcctaagat

SEQ ID NO: 134205 - DNA, 25 bp, Saccharomyces pastorianus
aaaggcctctgcaagttgcactctt

SEQ ID NO: 134206 - DNA, 25 bp, Saccharomyces pastorianus
gtgacgatattttgagcgcctgtag

SEQ ID NO: 134207 - DNA, 25 bp, Saccharomyces pastorianus
gcattcttaattccgctggttcagc

SEQ ID NO: 134208 - DNA, 25 bp, Saccharomyces pastorianus
gagcgcctgtagagagccatcgttg

SEQ ID NO: 134209 - DNA, 25 bp, Saccharomyces pastorianus
gagacgttttggcatgtggtcccac

SEQ ID NO: 134210 - DNA, 25 bp, Saccharomyces pastorianus
gtgaatgtattcctgttgctttgaa

SEQ ID NO: 134211 - DNA, 25 bp, Saccharomyces pastorianus
gggttaatcatttcgcctacaaaag

SEQ ID NO: 134212 - DNA, 25 bp, Saccharomyces pastorianus
atgtggtcccacagggtctggtaag

SEQ ID NO: 134213 - DNA, 25 bp, Saccharomyces pastorianus
ctgagcctaccccaattcaatgtga

SEQ ID NO: 134214 - DNA, 25 bp, Saccharomyces pastorianus
gtaaagcgatgttttccgcgaccat

SEQ ID NO: 134215 - DNA, 25 bp, Saccharomyces pastorianus
aagctctcgatctctccaaagttaa

SEQ ID NO: 134216 - DNA, 25 bp, Saccharomyces pastorianus
ctagcagttcgtagattctccaatc

SEQ ID NO: 134217 - DNA, 25 bp, Saccharomyces pastorianus
cttttgccaatgaataaccgccctt

SEQ ID NO: 134218 - DNA, 25 bp, Saccharomyces pastorianus
ggaaagtccttcgaggaaacctatg

SEQ ID NO: 134219 - DNA, 25 bp, Saccharomyces pastorianus
tcaaaatttaccttccattagggat

SEQ ID NO: 134220 - DNA, 25 bp, Saccharomyces pastorianus
tccataaccggtggaacgtcctatt

SEQ ID NO: 134221 - DNA, 25 bp, Saccharomyces pastorianus
gttatgcagcaatgacaaagtcgtt

SEQ ID NO: 134222 - DNA, 25 bp, Saccharomyces pastorianus
gaattacaaaactccataaccggtg

SEQ ID NO: 134223 - DNA, 25 bp, Saccharomyces pastorianus
gattctccaatcaacctgaaagtca

SEQ ID NO: 134224 - DNA, 25 bp, Saccharomyces pastorianus
gattttagaaatccacttttgccaa

SEQ ID NO: 134225 - DNA, 25 bp, Saccharomyces pastorianus
gtcctattttttccactctaacaat

SEQ ID NO: 134226 - DNA, 25 bp, Saccharomyces pastorianus
ggaaacctatgatttcacgtccaat

SEQ ID NO: 134227 - DNA, 25 bp, Saccharomyces pastorianus
gtctctgttaggtcaaatgtgcgct

SEQ ID NO: 134228 - DNA, 25 bp, Saccharomyces pastorianus
caaagtcaatcttcgaaatcggctt

SEQ ID NO: 134229 - DNA, 25 bp, Saccharomyces pastorianus
atcagcagtagcgttttcatcgttg

SEQ ID NO: 134230 - DNA, 25 bp, Saccharomyces pastorianus
tcgaaatcggctttttcacgaacaa

SEQ ID NO: 134231 - DNA, 25 bp, Saccharomyces pastorianus
gaacaaaatgttcaactacgccgtt

SEQ ID NO: 134232 - DNA, 25 bp, Saccharomyces pastorianus
atactattgttattgctcatcagca

SEQ ID NO: 134233 - DNA, 25 bp, Saccharomyces pastorianus
catcgttgggacagtttacattttt

SEQ ID NO: 134234 - DNA, 25 bp, Saccharomyces pastorianus
accgcggcctgtatcatcgttggga

SEQ ID NO: 134235 - DNA, 25 bp, Saccharomyces pastorianus
gctttggcctgcagacataacacaa

SEQ ID NO: 134236 - DNA, 25 bp, Saccharomyces pastorianus
gatatgtttaatgctttggcctgca

SEQ ID NO: 134237 - DNA, 25 bp, Saccharomyces pastorianus
tacgccgttggactgtctctgttag

SEQ ID NO: 134238 - DNA, 25 bp, Saccharomyces pastorianus
agccctagtatatctatggaacctg

SEQ ID NO: 134239 - DNA, 25 bp, Saccharomyces pastorianus
gacatgacaaccacattgccgagtt

SEQ ID NO: 134240 - DNA, 25 bp, Saccharomyces pastorianus
gagtttgaagccacctctgcaaaac

SEQ ID NO: 134241 - DNA, 25 bp, Saccharomyces pastorianus
gatccgcttgagcaaagccctagta

SEQ ID NO: 134242 - DNA, 25 bp, Saccharomyces pastorianus
gatattgacattccattctccatca

SEQ ID NO: 134243 - DNA, 25 bp, Saccharomyces pastorianus
tcaaagggagggtcatgccacagaa

SEQ ID NO: 134244 - DNA, 25 bp, Saccharomyces pastorianus
aatggtcgctcgtcggatgtagaca

SEQ ID NO: 134245 - DNA, 25 bp, Saccharomyces pastorianus
acaatcttgatttggcttccctcga

SEQ ID NO: 134246 - DNA, 25 bp, Saccharomyces pastorianus
gttcttttgggcctaaatggtcgct

SEQ ID NO: 134247 - DNA, 25 bp, Saccharomyces pastorianus
aaggccgacagcattgacaatcttg

SEQ ID NO: 134248 - DNA, 25 bp, Saccharomyces pastorianus
gttgcagatctggacgttcttttgg

SEQ ID NO: 134249 - DNA, 25 bp, Saccharomyces pastorianus
tgttttgatctccaactatacccaa

SEQ ID NO: 134250 - DNA, 25 bp, Saccharomyces pastorianus
tgatcaacaagctttggcacgtgtt

SEQ ID NO: 134251 - DNA, 25 bp, Saccharomyces pastorianus
taggttcaacgatcctgaaggccaa

SEQ ID NO: 134252 - DNA, 25 bp, Saccharomyces pastorianus
aaagcaggtgggtgtggtatcaatt

SEQ ID NO: 134253 - DNA, 25 bp, Saccharomyces pastorianus
tacccaaaccttggacctcattgaa

SEQ ID NO: 134254 - DNA, 25 bp, Saccharomyces pastorianus
agctttggcacgtgtttggagagac

SEQ ID NO: 134255 - DNA, 25 bp, Saccharomyces pastorianus
gttcatcttcctcttaagttctaaa

SEQ ID NO: 134256 - DNA, 25 bp, Saccharomyces pastorianus
gaaggccaagagttcatcttcctct

SEQ ID NO: 134257 - DNA, 25 bp, Saccharomyces pastorianus
tgaaacacacgaaacataccttgta

SEQ ID NO: 134258 - DNA, 25 bp, Saccharomyces pastorianus
ctacagtgctgtacggttggatggt

SEQ ID NO: 134259 - DNA, 25 bp, Saccharomyces pastorianus
tgccgggttcaaaagccagggacgt

SEQ ID NO: 134260 - DNA, 25 bp, Saccharomyces pastorianus
ttacgggtacgctaacttgatctgg

SEQ ID NO: 134261 - DNA, 25 bp, Saccharomyces pastorianus
tgtcgttgcgctgcatactttattc

SEQ ID NO: 134262 - DNA, 25 bp, Saccharomyces pastorianus
caatgggcaattgtggctcttgggt

SEQ ID NO: 134263 - DNA, 25 bp, Saccharomyces pastorianus
aagcgcctgaggactgttcaagcaa

SEQ ID NO: 134264 - DNA, 25 bp, Saccharomyces pastorianus
aaattttcgctgtccatcatcgttg

SEQ ID NO: 134265 - DNA, 25 bp, Saccharomyces pastorianus
atcatcgttgtcgttgcgctgcata

SEQ ID NO: 134266 - DNA, 25 bp, Saccharomyces pastorianus
taacttgatctggatacccgtttgt

SEQ ID NO: 134267 - DNA, 25 bp, Saccharomyces pastorianus
atattggatatgtccaagcgcctga

SEQ ID NO: 134268 - DNA, 25 bp, Saccharomyces pastorianus
agagatgagcactcggagcgcaata

SEQ ID NO: 134269 - DNA, 25 bp, Saccharomyces pastorianus
agtgttcctgaattgatttccgttt

SEQ ID NO: 134270 - DNA, 25 bp, Saccharomyces pastorianus
ggcacagtcgtcttatttcttgaat

SEQ ID NO: 134271 - DNA, 25 bp, Saccharomyces pastorianus
gagacaagtcatagccccacaaaag

SEQ ID NO: 134272 - DNA, 25 bp, Saccharomyces pastorianus
gctattatatgtggtgggtctggta

SEQ ID NO: 134273 - DNA, 25 bp, Saccharomyces pastorianus
aacacagttttactctttccagcga

SEQ ID NO: 134274 - DNA, 25 bp, Saccharomyces pastorianus
tacacggcggaaacacggttagacg

SEQ ID NO: 134275 - DNA, 25 bp, Saccharomyces pastorianus
gacagcaatgacaatacgccagaga

SEQ ID NO: 134276 - DNA, 25 bp, Saccharomyces pastorianus
tgttttcatgtggtcctccctcgtt

SEQ ID NO: 134277 - DNA, 25 bp, Saccharomyces pastorianus
ccctctgtacccgaagaatgttatt

SEQ ID NO: 134278 - DNA, 25 bp, Saccharomyces pastorianus
cctccctcgttattacaattgtcta

SEQ ID NO: 134279 - DNA, 25 bp, Saccharomyces pastorianus
gaagacctttcgatttctaatttca

SEQ ID NO: 134280 - DNA, 25 bp, Saccharomyces pastorianus
tctcaaggcacgaatatagctatta

SEQ ID NO: 134281 - DNA, 25 bp, Saccharomyces pastorianus
tttgccctaccactatttaggcatt

SEQ ID NO: 134282 - DNA, 25 bp, Saccharomyces pastorianus
gagctttcggaaggagaaccccatc

SEQ ID NO: 134283 - DNA, 25 bp, Saccharomyces pastorianus
gttttttgcagtcttgattccattt

SEQ ID NO: 134284 - DNA, 25 bp, Saccharomyces pastorianus
cccaatctacggtctatctcaaaag

SEQ ID NO: 134285 - DNA, 25 bp, Saccharomyces pastorianus
tgagttacaccttgatcccgctgaa

SEQ ID NO: 134286 - DNA, 25 bp, Saccharomyces pastorianus
tggtctatctcattggattggctct

SEQ ID NO: 134287 - DNA, 25 bp, Saccharomyces pastorianus
gaatcccctctcataacgttggtta

SEQ ID NO: 134288 - DNA, 25 bp, Saccharomyces pastorianus
gattccattttattaccattactct

SEQ ID NO: 134289 - DNA, 25 bp, Saccharomyces pastorianus
gacattccgagacacattttgccaa

SEQ ID NO: 134290 - DNA, 25 bp, Saccharomyces pastorianus
atccagatcgtcgtcagcttttaaa

SEQ ID NO: 134291 - DNA, 25 bp, Saccharomyces pastorianus
attactctttgactacccaatctac

SEQ ID NO: 134292 - DNA, 25 bp, Saccharomyces pastorianus
agatcctgcaattcacttaggtata

SEQ ID NO: 134293 - DNA, 25 bp, Saccharomyces pastorianus
aaccagaatgtaccggccaaagatt

SEQ ID NO: 134294 - DNA, 25 bp, Saccharomyces pastorianus
tgcgaccggtccaagctttttagaa

SEQ ID NO: 134295 - DNA, 25 bp, Saccharomyces pastorianus
acgtgcgtgacgtttctaaagccca

SEQ ID NO: 134296 - DNA, 25 bp, Saccharomyces pastorianus
gtgaaggtttattctgctgtcaaga

SEQ ID NO: 134297 - DNA, 25 bp, Saccharomyces pastorianus
gaattttataattactgtggcccat

SEQ ID NO: 134298 - DNA, 25 bp, Saccharomyces pastorianus
gagttaattcattccaaggtaggtg

SEQ ID NO: 134299 - DNA, 25 bp, Saccharomyces pastorianus
acatggcataaatacctcctcaggt

SEQ ID NO: 134300 - DNA, 25 bp, Saccharomyces pastorianus
gacatcttgaacgaggaattccctc

SEQ ID NO: 134301 - DNA, 25 bp, Saccharomyces pastorianus
aaagcccacctagttgcaattgaaa

SEQ ID NO: 134302 - DNA, 25 bp, Saccharomyces pastorianus
aaaggattgcatagttgacaccgcg

SEQ ID NO: 134303 - DNA, 25 bp, Saccharomyces pastorianus
gggcaagatagctacaggtgaacct

SEQ ID NO: 134304 - DNA, 25 bp, Saccharomyces pastorianus
aatgccatcgaagcggagcaagctg

SEQ ID NO: 134305 - DNA, 25 bp, Saccharomyces pastorianus
tgaaacaggcgcttgtgcagacaac

SEQ ID NO: 134306 - DNA, 25 bp, Saccharomyces pastorianus
aagctcgaggtggtcaatatgcaaa

SEQ ID NO: 134307 - DNA, 25 bp, Saccharomyces pastorianus
atagatacgattccatctgcgtctg

SEQ ID NO: 134308 - DNA, 25 bp, Saccharomyces pastorianus
catatctcctaatggtatacctggc

SEQ ID NO: 134309 - DNA, 25 bp, Saccharomyces pastorianus
aaagatgacaatgctgttccagcgt

SEQ ID NO: 134310 - DNA, 25 bp, Saccharomyces pastorianus
tctgcgtctgagattcttgccaaaa

SEQ ID NO: 134311 - DNA, 25 bp, Saccharomyces pastorianus
ggaatccggtaatgcgcaggacaat

SEQ ID NO: 134312 - DNA, 25 bp, Saccharomyces pastorianus
gtgacacgattgctgaactgaaaca

SEQ ID NO: 134313 - DNA, 25 bp, Saccharomyces pastorianus
aactattgatagcaacgcctccatt

SEQ ID NO: 134314 - DNA, 25 bp, Saccharomyces pastorianus
aataccgccgccaatgagatcagtg

SEQ ID NO: 134315 - DNA, 25 bp, Saccharomyces pastorianus
gatcgtaagacattgttcgactcag

SEQ ID NO: 134316 - DNA, 25 bp, Saccharomyces pastorianus
aagacattgttcgactcagcagtat

SEQ ID NO: 134317 - DNA, 25 bp, Saccharomyces pastorianus
ttgttcgactcagcagtatcctttt

SEQ ID NO: 134318 - DNA, 25 bp, Saccharomyces pastorianus
gactcagcagtatcctttttaaagg

SEQ ID NO: 134319 - DNA, 25 bp, Saccharomyces pastorianus
gttcgactcagcagtatccttttta

SEQ ID NO: 134320 - DNA, 25 bp, Saccharomyces pastorianus
cattgttcgactcagcagtatcctt

SEQ ID NO: 134321 - DNA, 25 bp, Saccharomyces pastorianus
tcgactcagcagtatcctttttaaa

SEQ ID NO: 134322 - DNA, 25 bp, Saccharomyces pastorianus
gacattgttcgactcagcagtatcc

SEQ ID NO: 134323 - DNA, 25 bp, Saccharomyces pastorianus
gacgtggtcagtaaagatcgtaaga

SEQ ID NO: 134324 - DNA, 25 bp, Saccharomyces pastorianus
atgagtgacgtggtcagtaaagatc

SEQ ID NO: 134325 - DNA, 25 bp, Saccharomyces pastorianus
gtaagacattgttcgactcagcagt

SEQ ID NO: 134326 - DNA, 25 bp, Saccharomyces pastorianus
cgatatgctttttggcgagaatgat

SEQ ID NO: 134327 - DNA, 25 bp, Saccharomyces pastorianus
aaatgactcagctgaggtgaggcaa

SEQ ID NO: 134328 - DNA, 25 bp, Saccharomyces pastorianus
aagagacattcgtttgcggtacttc

SEQ ID NO: 134329 - DNA, 25 bp, Saccharomyces pastorianus
tcgtttgcggtacttctgcatgaaa

SEQ ID NO: 134330 - DNA, 25 bp, Saccharomyces pastorianus
gctgaagctacccaagacgatgatt

SEQ ID NO: 134331 - DNA, 25 bp, Saccharomyces pastorianus
aaaccgcggaggaagccagtcaact

SEQ ID NO: 134332 - DNA, 25 bp, Saccharomyces pastorianus
tcttctactttcttgtactatatga

SEQ ID NO: 134333 - DNA, 25 bp, Saccharomyces pastorianus
gcatgttttcgattatttcttctac

SEQ ID NO: 134334 - DNA, 25 bp, Saccharomyces pastorianus
gatacaagcactcaagcttacgaag

SEQ ID NO: 134335 - DNA, 25 bp, Saccharomyces pastorianus
tactatatgatgtgaaaaccgcgga

SEQ ID NO: 134336 - DNA, 25 bp, Saccharomyces pastorianus
gggtccctggttctgaaaataagag

SEQ ID NO: 134337 - DNA, 25 bp, Saccharomyces pastorianus
cactaaaatgtgctgagcggcaatt

SEQ ID NO: 134338 - DNA, 25 bp, Saccharomyces pastorianus
gaatcagtatacaacttagcactaa

SEQ ID NO: 134339 - DNA, 25 bp, Saccharomyces pastorianus
tgtgctgagcggcaattgacctcca

SEQ ID NO: 134340 - DNA, 25 bp, Saccharomyces pastorianus
aagttcccgtctttgattcaagagg

SEQ ID NO: 134341 - DNA, 25 bp, Saccharomyces pastorianus
ttaatgaaaagttcccgtctttgat

SEQ ID NO: 134342 - DNA, 25 bp, Saccharomyces pastorianus
gcggcaattgacctccatggaattt

SEQ ID NO: 134343 - DNA, 25 bp, Saccharomyces pastorianus
catggaattttcgaacctttacaag

SEQ ID NO: 134344 - DNA, 25 bp, Saccharomyces pastorianus
tcccgtctttgattcaagaggaaga

SEQ ID NO: 134345 - DNA, 25 bp, Saccharomyces pastorianus
gaaaagttcccgtctttgattcaag

SEQ ID NO: 134346 - DNA, 25 bp, Saccharomyces pastorianus
gacctccatggaattttcgaacctt

SEQ ID NO: 134347 - DNA, 25 bp, Saccharomyces pastorianus
tgagcggcaattgacctccatggaa

SEQ ID NO: 134348 - DNA, 25 bp, Saccharomyces pastorianus
aatatatcccaagtccactttcttc

SEQ ID NO: 134349 - DNA, 25 bp, Saccharomyces pastorianus
caccaattcttttaacttctgccag

SEQ ID NO: 134350 - DNA, 25 bp, Saccharomyces pastorianus
tttaaaactctctccttcaccaatt

SEQ ID NO: 134351 - DNA, 25 bp, Saccharomyces pastorianus
gcgattacttcttccatattccaag

SEQ ID NO: 134352 - DNA, 25 bp, Saccharomyces pastorianus
ggcaacgtcatagtaccgaatatct

SEQ ID NO: 134353 - DNA, 25 bp, Saccharomyces pastorianus
tggaccagttactcacagacttgat

SEQ ID NO: 134354 - DNA, 25 bp, Saccharomyces pastorianus
gaatttgtaggttctccttcattaa

SEQ ID NO: 134355 - DNA, 25 bp, Saccharomyces pastorianus
gggtcttttacgctactaaatcagt

SEQ ID NO: 134356 - DNA, 25 bp, Saccharomyces pastorianus
cactttcttcaacaaaacctccagg

SEQ ID NO: 134357 - DNA, 25 bp, Saccharomyces pastorianus
ggatcagtcaattctgctgccaaat

SEQ ID NO: 134358 - DNA, 25 bp, Saccharomyces pastorianus
gggaaatatcgaacccagacttcct

SEQ ID NO: 134359 - DNA, 25 bp, Saccharomyces pastorianus
atttcaaatctacctaatgtctcag

SEQ ID NO: 134360 - DNA, 25 bp, Saccharomyces pastorianus
tttcttcgccagcagcactaatgaa

SEQ ID NO: 134361 - DNA, 25 bp, Saccharomyces pastorianus
ggcttcgatatttcttacaccttta

SEQ ID NO: 134362 - DNA, 25 bp, Saccharomyces pastorianus
gatgtggcacttaagtatcctgaat

SEQ ID NO: 134363 - DNA, 25 bp, Saccharomyces pastorianus
tggcagaaatggctcaaacggtaat

SEQ ID NO: 134364 - DNA, 25 bp, Saccharomyces pastorianus
aacttttcacattcattgaccacaa

SEQ ID NO: 134365 - DNA, 25 bp, Saccharomyces pastorianus
acatatctgtggtggatgtggcact

SEQ ID NO: 134366 - DNA, 25 bp, Saccharomyces pastorianus
gatatgtgctcttttgtttttcaac

SEQ ID NO: 134367 - DNA, 25 bp, Saccharomyces pastorianus
taatgggtccataacagatcaattg

SEQ ID NO: 134368 - DNA, 25 bp, Saccharomyces pastorianus
acaattctatcattttcttcgccag

SEQ ID NO: 134369 - DNA, 25 bp, Saccharomyces pastorianus
atatctttgtcattttcttgggcaa

SEQ ID NO: 134370 - DNA, 25 bp, Saccharomyces pastorianus
agcaagttcaacaagtcgtcatgga

SEQ ID NO: 134371 - DNA, 25 bp, Saccharomyces pastorianus
gtccatgattggcagactaatccag

SEQ ID NO: 134372 - DNA, 25 bp, Saccharomyces pastorianus
aatgattccgaagtcactcgtgaag

SEQ ID NO: 134373 - DNA, 25 bp, Saccharomyces pastorianus
tgaccgcagctgacactgttatatt

SEQ ID NO: 134374 - DNA, 25 bp, Saccharomyces pastorianus
gattacttgttcgtggtaccatcga

SEQ ID NO: 134375 - DNA, 25 bp, Saccharomyces pastorianus
taggtatcaacctgaccgcagctga

SEQ ID NO: 134376 - DNA, 25 bp, Saccharomyces pastorianus
cagaaatctttgttttcctcctaag

SEQ ID NO: 134377 - DNA, 25 bp, Saccharomyces pastorianus
tattacactggatggttcctcaaag

SEQ ID NO: 134378 - DNA, 25 bp, Saccharomyces pastorianus
gccaaacgaggcaagtcacagtgta

SEQ ID NO: 134379 - DNA, 25 bp, Saccharomyces pastorianus
gaccgtcgagatttggtccatgatt

SEQ ID NO: 134380 - DNA, 25 bp, Saccharomyces pastorianus
atagggcacataggttgggccaaac

SEQ ID NO: 134381 - DNA, 25 bp, Saccharomyces pastorianus
aagttcttggttctagtcatgttac

SEQ ID NO: 134382 - DNA, 25 bp, Saccharomyces pastorianus
aataatgaactgtttgacccgttga

SEQ ID NO: 134383 - DNA, 25 bp, Saccharomyces pastorianus
aggcattatccgatattccagcaat

SEQ ID NO: 134384 - DNA, 25 bp, Saccharomyces pastorianus
ctccggtcaccattgaagttcttgg

SEQ ID NO: 134385 - DNA, 25 bp, Saccharomyces pastorianus
gacccgttgataagtcaggcattat

SEQ ID NO: 134386 - DNA, 25 bp, Saccharomyces pastorianus
caagagctactcgaggttactagaa

SEQ ID NO: 134387 - DNA, 25 bp, Saccharomyces pastorianus
caggtgaaccctcgttgaatgaatt

SEQ ID NO: 134388 - DNA, 25 bp, Saccharomyces pastorianus
ttagagtttctactacacccttact

SEQ ID NO: 134389 - DNA, 25 bp, Saccharomyces pastorianus
acatgcctatgaacgtgagtatctg

SEQ ID NO: 134390 - DNA, 25 bp, Saccharomyces pastorianus
cttccgagggcgtaatggcttcatt

SEQ ID NO: 134391 - DNA, 25 bp, Saccharomyces pastorianus
gttactagaaatgcaccttccgagg

SEQ ID NO: 134392 - DNA, 25 bp, Saccharomyces pastorianus
gatgaagaagatttcgccgcctttg

SEQ ID NO: 134393 - DNA, 25 bp, Saccharomyces pastorianus
ccgcctttgaagaacaggatgacaa

SEQ ID NO: 134394 - DNA, 25 bp, Saccharomyces pastorianus
ctgttgttactgttaatggagacga

SEQ ID NO: 134395 - DNA, 25 bp, Saccharomyces pastorianus
tggcaataacggtgaagacgaagac

SEQ ID NO: 134396 - DNA, 25 bp, Saccharomyces pastorianus
ggatgatcaaactcatgccgatact

SEQ ID NO: 134397 - DNA, 25 bp, Saccharomyces pastorianus
atgccgatactgttgttactgttaa

SEQ ID NO: 134398 - DNA, 25 bp, Saccharomyces pastorianus
tgacgatgaggactttaatcccgat

SEQ ID NO: 134399 - DNA, 25 bp, Saccharomyces pastorianus
gaggactttaatcccgatgtcgaga

SEQ ID NO: 134400 - DNA, 25 bp, Saccharomyces pastorianus
acaacgacaacgacatgaaaacaac

SEQ ID NO: 134401 - DNA, 25 bp, Saccharomyces pastorianus
ggaaatcgaggatcttgatgaagaa

SEQ ID NO: 134402 - DNA, 25 bp, Saccharomyces pastorianus
actcatgccgatactgttgttactg

SEQ ID NO: 134403 - DNA, 25 bp, Saccharomyces pastorianus
gaacctattcagagcgtaaccgaag

SEQ ID NO: 134404 - DNA, 25 bp, Saccharomyces pastorianus
agatgtccacttcaatggtgatgac

SEQ ID NO: 134405 - DNA, 25 bp, Saccharomyces pastorianus
tgacgatatcaattccacacaagtt

SEQ ID NO: 134406 - DNA, 25 bp, Saccharomyces pastorianus
gaggatgacattccacaatccgaat

SEQ ID NO: 134407 - DNA, 25 bp, Saccharomyces pastorianus
gttgctttaaaacctgatgctcaca

SEQ ID NO: 134408 - DNA, 25 bp, Saccharomyces pastorianus
gttggcccgttatcgatcatctgat

SEQ ID NO: 134409 - DNA, 25 bp, Saccharomyces pastorianus
gtgtctttgacgaaggtcctacggg

SEQ ID NO: 134410 - DNA, 25 bp, Saccharomyces pastorianus
ggtcctacgggaatgatatcaactg

SEQ ID NO: 134411 - DNA, 25 bp, Saccharomyces pastorianus
agaaagtttgccaacgcatacggtt

SEQ ID NO: 134412 - DNA, 25 bp, Saccharomyces pastorianus
atttagcgccgtaatcgacaggaga

SEQ ID NO: 134413 - DNA, 25 bp, Saccharomyces pastorianus
aagaatatactccttcaggcttttt

SEQ ID NO: 134414 - DNA, 25 bp, Saccharomyces pastorianus
tgaagtaggcaaaccgcttctctac

SEQ ID NO: 134415 - DNA, 25 bp, Saccharomyces pastorianus
aggtcactcattgggtggcctaatc

SEQ ID NO: 134416 - DNA, 25 bp, Saccharomyces pastorianus
gaatccatccgcaagatttcttttg

SEQ ID NO: 134417 - DNA, 25 bp, Saccharomyces pastorianus
gaggacagtatatgcgaacgctatt

SEQ ID NO: 134418 - DNA, 25 bp, Saccharomyces pastorianus
tggcctaatccaagctttcgcaata

SEQ ID NO: 134419 - DNA, 25 bp, Saccharomyces pastorianus
tatttaggtactcgtttggccgaat

SEQ ID NO: 134420 - DNA, 25 bp, Saccharomyces pastorianus
gtcacagataatcccgcctatatta

SEQ ID NO: 134421 - DNA, 25 bp, Saccharomyces pastorianus
ttactttagcttcaccgcttttagg

SEQ ID NO: 134422 - DNA, 25 bp, Saccharomyces pastorianus
ggaattgtcccattgtatacggcat

SEQ ID NO: 134423 - DNA, 25 bp, Saccharomyces pastorianus
tgtgtcgaccgatctagtgtatatt

SEQ ID NO: 134424 - DNA, 25 bp, Saccharomyces pastorianus
gcttctctacttgctatctggtctg

SEQ ID NO: 134425 - DNA, 25 bp, Saccharomyces pastorianus
acccttggtaatgcggatcctaatt

SEQ ID NO: 134426 - DNA, 25 bp, Saccharomyces pastorianus
ggaccccatttgatggtacttccat

SEQ ID NO: 134427 - DNA, 25 bp, Saccharomyces pastorianus
gtttttatcgcgtccactttacgag

SEQ ID NO: 134428 - DNA, 25 bp, Saccharomyces pastorianus
cactttacgaggactgggctgcaga

SEQ ID NO: 134429 - DNA, 25 bp, Saccharomyces pastorianus
taatcctatgaatacacggcgcaat

SEQ ID NO: 134430 - DNA, 25 bp, Saccharomyces pastorianus
gaacgcatctagtgctgcatcggaa

SEQ ID NO: 134431 - DNA, 25 bp, Saccharomyces pastorianus
aatccggcagcgttgaatttattac

SEQ ID NO: 134432 - DNA, 25 bp, Saccharomyces pastorianus
agagcattttccattgcttctacct

SEQ ID NO: 134433 - DNA, 25 bp, Saccharomyces pastorianus
ttaagcagacacagcacccttggta

SEQ ID NO: 134434 - DNA, 25 bp, Saccharomyces pastorianus
tgagccggaatgtccagtggcatac

SEQ ID NO: 134435 - DNA, 25 bp, Saccharomyces pastorianus
atctcaaatttctcctgattccaca

SEQ ID NO: 134436 - DNA, 25 bp, Saccharomyces pastorianus
aggagatgcccaaccactcattgac

SEQ ID NO: 134437 - DNA, 25 bp, Saccharomyces pastorianus
taccaggctcttcgagttcaggaga

SEQ ID NO: 134438 - DNA, 25 bp, Saccharomyces pastorianus
acaatcagaacaacagccggagcaa

SEQ ID NO: 134439 - DNA, 25 bp, Saccharomyces pastorianus
gtctcaaaggttttccgaagccgct

SEQ ID NO: 134440 - DNA, 25 bp, Saccharomyces pastorianus
actcattgacttagattccactcca

SEQ ID NO: 134441 - DNA, 25 bp, Saccharomyces pastorianus
aactcagaggcagttgaagccgaaa

SEQ ID NO: 134442 - DNA, 25 bp, Saccharomyces pastorianus
atcgctggcgatatacaaggcgcta

SEQ ID NO: 134443 - DNA, 25 bp, Saccharomyces pastorianus
aaggcgctaaagatcttctaatcaa

SEQ ID NO: 134444 - DNA, 25 bp, Saccharomyces pastorianus
aagccgctttccttggatcaacata

SEQ ID NO: 134445 - DNA, 25 bp, Saccharomyces pastorianus
taatgcatattggatcgctggcgat

SEQ ID NO: 134446 - DNA, 25 bp, Saccharomyces pastorianus
gaggaagctccccagcaacaacaat

SEQ ID NO: 134447 - DNA, 25 bp, Saccharomyces pastorianus
aaatttgagctagccttgaaagtcg

SEQ ID NO: 134448 - DNA, 25 bp, Saccharomyces pastorianus
aagtgaatccattacatcaggcaaa

SEQ ID NO: 134449 - DNA, 25 bp, Saccharomyces pastorianus
taacaggctgaactacttcgtaggt

SEQ ID NO: 134450 - DNA, 25 bp, Saccharomyces pastorianus
cagttgacagatgagtgcgccgaga

SEQ ID NO: 134451 - DNA, 25 bp, Saccharomyces pastorianus
actcgtgttggcgatcagttgacag

SEQ ID NO: 134452 - DNA, 25 bp, Saccharomyces pastorianus
tgatgaggcttttgacgtattgtat

SEQ ID NO: 134453 - DNA, 25 bp, Saccharomyces pastorianus
gaagcactgaatatttctcctgatc

SEQ ID NO: 134454 - DNA, 25 bp, Saccharomyces pastorianus
ggtgatgtctttatctttaccacag

SEQ ID NO: 134455 - DNA, 25 bp, Saccharomyces pastorianus
gaaagtcggccaacttactcgtgtt

SEQ ID NO: 134456 - DNA, 25 bp, Saccharomyces pastorianus
atctattgggctatctagcacgtga

SEQ ID NO: 134457 - DNA, 25 bp, Saccharomyces pastorianus
tctttagaggtgctggagttccaaa

SEQ ID NO: 134458 - DNA, 25 bp, Saccharomyces pastorianus
tttcgaaaggacttgcccacattgt

SEQ ID NO: 134459 - DNA, 25 bp, Saccharomyces pastorianus
atgtgcacagaacagctccaatttt

SEQ ID NO: 134460 - DNA, 25 bp, Saccharomyces pastorianus
gatcaggtgcccaagaactcgattt

SEQ ID NO: 134461 - DNA, 25 bp, Saccharomyces pastorianus
aagcctcaacatactctgtcataca

SEQ ID NO: 134462 - DNA, 25 bp, Saccharomyces pastorianus
gaaactcgcacgactctgctattaa

SEQ ID NO: 134463 - DNA, 25 bp, Saccharomyces pastorianus
aacagcttagactgcggcacggcga

SEQ ID NO: 134464 - DNA, 25 bp, Saccharomyces pastorianus
gacaccactctaccgtgcataaagg

SEQ ID NO: 134465 - DNA, 25 bp, Saccharomyces pastorianus
taagtgcgaatctgaccatagtcta

SEQ ID NO: 134466 - DNA, 25 bp, Saccharomyces pastorianus
agcgcatctgctaatatctctaacg

SEQ ID NO: 134467 - DNA, 25 bp, Saccharomyces pastorianus
atccattatcgtacaagcctcaaca

SEQ ID NO: 134468 - DNA, 25 bp, Saccharomyces pastorianus
gagccagctatgtttgatatcgata

SEQ ID NO: 134469 - DNA, 25 bp, Saccharomyces pastorianus
gggtatcaccgcttgaaacattgag

SEQ ID NO: 134470 - DNA, 25 bp, Saccharomyces pastorianus
aatcctccttccaatgcatgttttg

SEQ ID NO: 134471 - DNA, 25 bp, Saccharomyces pastorianus
aaatcgcctgcccatagcaaaaaga

SEQ ID NO: 134472 - DNA, 25 bp, Saccharomyces pastorianus
aaaaacttggcgctctttgcattcg

SEQ ID NO: 134473 - DNA, 25 bp, Saccharomyces pastorianus
gtgaattacgcccagtttgtgagta

SEQ ID NO: 134474 - DNA, 25 bp, Saccharomyces pastorianus
tctttaacagaatcctccttccaat

SEQ ID NO: 134475 - DNA, 25 bp, Saccharomyces pastorianus
aagactgaaagaggccttaccgtga

SEQ ID NO: 134476 - DNA, 25 bp, Saccharomyces pastorianus
gggcactcaacctatgtcgatgatt

SEQ ID NO: 134477 - DNA, 25 bp, Saccharomyces pastorianus
tacgcaattaagtgggtatcaccgc

SEQ ID NO: 134478 - DNA, 25 bp, Saccharomyces pastorianus
aatttcagagaaatcgcctgcccat

SEQ ID NO: 134479 - DNA, 25 bp, Saccharomyces pastorianus
tgcattcgttgtgctcgtatgtggc

SEQ ID NO: 134480 - DNA, 25 bp, Saccharomyces pastorianus
gttatctgtccaatccaaggtgcca

SEQ ID NO: 134481 - DNA, 25 bp, Saccharomyces pastorianus
ctttacccgtggcattgggcaagat

SEQ ID NO: 134482 - DNA, 25 bp, Saccharomyces pastorianus
agatatcactatgaaccgaagttcg

SEQ ID NO: 134483 - DNA, 25 bp, Saccharomyces pastorianus
atatccggcgttgacaggacaaaca

SEQ ID NO: 134484 - DNA, 25 bp, Saccharomyces pastorianus
caaggtgccaatcatgtttacagtg

SEQ ID NO: 134485 - DNA, 25 bp, Saccharomyces pastorianus
aactactgcatattctgcgtacaga

SEQ ID NO: 134486 - DNA, 25 bp, Saccharomyces pastorianus
gacccctatgttactagatatcact

SEQ ID NO: 134487 - DNA, 25 bp, Saccharomyces pastorianus
atattagctatatccggcgttgaca

SEQ ID NO: 134488 - DNA, 25 bp, Saccharomyces pastorianus
atattccctggatttacaaatgggt

SEQ ID NO: 134489 - DNA, 25 bp, Saccharomyces pastorianus
aagatcccagtagacccctatgtta

SEQ ID NO: 134490 - DNA, 25 bp, Saccharomyces pastorianus
gatttgttatccgtaatgacccacc

SEQ ID NO: 134491 - DNA, 25 bp, Saccharomyces pastorianus
tcccgctacattactactctgattt

SEQ ID NO: 134492 - DNA, 25 bp, Saccharomyces pastorianus
atacccacggtcaaggatatttcgc

SEQ ID NO: 134493 - DNA, 25 bp, Saccharomyces pastorianus
aatgcttcgcaacatccgtattacg

SEQ ID NO: 134494 - DNA, 25 bp, Saccharomyces pastorianus
ttcaacttgccctatggtgactgga

SEQ ID NO: 134495 - DNA, 25 bp, Saccharomyces pastorianus
gtccttgacaacttcctgcaatcaa

SEQ ID NO: 134496 - DNA, 25 bp, Saccharomyces pastorianus
atcaagtattcatcacgctacgtgc

SEQ ID NO: 134497 - DNA, 25 bp, Saccharomyces pastorianus
tttattgcaaatccaacgccacggc

SEQ ID NO: 134498 - DNA, 25 bp, Saccharomyces pastorianus
aatgcagacgtcagaccccattacg

SEQ ID NO: 134499 - DNA, 25 bp, Saccharomyces pastorianus
atactgtattcgatactcccatcac

SEQ ID NO: 134500 - DNA, 25 bp, Saccharomyces pastorianus
gaccgctggttaatcgagttcctac

SEQ ID NO: 134501 - DNA, 25 bp, Saccharomyces pastorianus
acagcgcagcacgtattccgaaact

SEQ ID NO: 134502 - DNA, 25 bp, Saccharomyces pastorianus
tgacaaaagggttttattcaagagt

SEQ ID NO: 134503 - DNA, 25 bp, Saccharomyces pastorianus
gacgcccacttttgaattgtatctg

SEQ ID NO: 134504 - DNA, 25 bp, Saccharomyces pastorianus
caagagtgcgagaaaagtagctaat

SEQ ID NO: 134505 - DNA, 25 bp, Saccharomyces pastorianus
atggcattgttgacaaaagggtttt

SEQ ID NO: 134506 - DNA, 25 bp, Saccharomyces pastorianus
gaatggcgtgggtgacgcccacttt

SEQ ID NO: 134507 - DNA, 25 bp, Saccharomyces pastorianus
gtatctgattggaaataatggcatt

SEQ ID NO: 134508 - DNA, 25 bp, Saccharomyces pastorianus
gaaaagtagctaattggtgtcaaaa

SEQ ID NO: 134509 - DNA, 25 bp, Saccharomyces pastorianus
ggtgacgcccacttttgaattgtat

SEQ ID NO: 134510 - DNA, 25 bp, Saccharomyces pastorianus
tgggtgacgcccacttttgaattgt

SEQ ID NO: 134511 - DNA, 25 bp, Saccharomyces pastorianus
gcccacttttgaattgtatctgatt

SEQ ID NO: 134512 - DNA, 25 bp, Saccharomyces pastorianus
gtgacgcccacttttgaattgtatc

SEQ ID NO: 134513 - DNA, 25 bp, Saccharomyces pastorianus
atgttctgatccatcctagtacggt

SEQ ID NO: 134514 - DNA, 25 bp, Saccharomyces pastorianus
atttgtgctcacatcgaagaactac

SEQ ID NO: 134515 - DNA, 25 bp, Saccharomyces pastorianus
tgctgataatatccgctcccaatta

SEQ ID NO: 134516 - DNA, 25 bp, Saccharomyces pastorianus
agaatatcttcgctcatccagacgg

SEQ ID NO: 134517 - DNA, 25 bp, Saccharomyces pastorianus
acataagaactgtgacctcggtcag

SEQ ID NO: 134518 - DNA, 25 bp, Saccharomyces pastorianus
taaattacaggtccctttccgctgc

SEQ ID NO: 134519 - DNA, 25 bp, Saccharomyces pastorianus
ggtatccataagtggtgccgtgacc

SEQ ID NO: 134520 - DNA, 25 bp, Saccharomyces pastorianus
ggtcaggcccgaatggctgattgaa

SEQ ID NO: 134521 - DNA, 25 bp, Saccharomyces pastorianus
gccgtgaccactacctaaattacag

SEQ ID NO: 134522 - DNA, 25 bp, Saccharomyces pastorianus
tagcgcctgcatactacgacttaag

SEQ ID NO: 134523 - DNA, 25 bp, Saccharomyces pastorianus
tagtacggttcttggccacgacgca

SEQ ID NO: 134524 - DNA, 25 bp, Saccharomyces pastorianus
agttgttatctccacgaacatcgct

SEQ ID NO: 134525 - DNA, 25 bp, Saccharomyces pastorianus
gtatggttcattaccaccgcatcaa

SEQ ID NO: 134526 - DNA, 25 bp, Saccharomyces pastorianus
tattgtctacgtcgttgacccagga

SEQ ID NO: 134527 - DNA, 25 bp, Saccharomyces pastorianus
gagcctgctccagagtcacataatg

SEQ ID NO: 134528 - DNA, 25 bp, Saccharomyces pastorianus
gttttgcaaattcatgccactgaag

SEQ ID NO: 134529 - DNA, 25 bp, Saccharomyces pastorianus
ttgagtctttactcgtttcccctat

SEQ ID NO: 134530 - DNA, 25 bp, Saccharomyces pastorianus
ttatcctccaccgttctagaactaa

SEQ ID NO: 134531 - DNA, 25 bp, Saccharomyces pastorianus
atccgtatacccactgtatggttca

SEQ ID NO: 134532 - DNA, 25 bp, Saccharomyces pastorianus
gatgacttggtccatttcgatttta

SEQ ID NO: 134533 - DNA, 25 bp, Saccharomyces pastorianus
gaacatcgctgaaacttctttaaca

SEQ ID NO: 134534 - DNA, 25 bp, Saccharomyces pastorianus
gagggatgcggacctttatccgtat

SEQ ID NO: 134535 - DNA, 25 bp, Saccharomyces pastorianus
tccctttcatgggtttaggaattca

SEQ ID NO: 134536 - DNA, 25 bp, Saccharomyces pastorianus
gaagccaatgaaactaggtatccag

SEQ ID NO: 134537 - DNA, 25 bp, Saccharomyces pastorianus
ttatactacaagtccctttcatggg

SEQ ID NO: 134538 - DNA, 25 bp, Saccharomyces pastorianus
ccttttgtgatggttttgtgtcatt

SEQ ID NO: 134539 - DNA, 25 bp, Saccharomyces pastorianus
ttatggcatatattgttggtgtacg

SEQ ID NO: 134540 - DNA, 25 bp, Saccharomyces pastorianus
actgcagcggtgaatatgccacact

SEQ ID NO: 134541 - DNA, 25 bp, Saccharomyces pastorianus
aactaggtatccagcttatactaca

SEQ ID NO: 134542 - DNA, 25 bp, Saccharomyces pastorianus
gccacactggcattatcaacaagga

SEQ ID NO: 134543 - DNA, 25 bp, Saccharomyces pastorianus
gattgggtaactatggaaggactat

SEQ ID NO: 134544 - DNA, 25 bp, Saccharomyces pastorianus
ggactatttccttttgtgatggttt

SEQ ID NO: 134545 - DNA, 25 bp, Saccharomyces pastorianus
atcaacaaggagctgttcatttaat

SEQ ID NO: 134546 - DNA, 25 bp, Saccharomyces pastorianus
agccagtctggcacatatctgcagt

SEQ ID NO: 134547 - DNA, 25 bp, Saccharomyces pastorianus
agtaacagaaaagtttcctactcat

SEQ ID NO: 134548 - DNA, 25 bp, Saccharomyces pastorianus
ctggcacatatctgcagtaacagaa

SEQ ID NO: 134549 - DNA, 25 bp, Saccharomyces pastorianus
gccagtctggcacatatctgcagta

SEQ ID NO: 134550 - DNA, 25 bp, Saccharomyces pastorianus
acctgagccagtctggcacatatct

SEQ ID NO: 134551 - DNA, 25 bp, Saccharomyces pastorianus
tgccacctgagccagtctggcacat

SEQ ID NO: 134552 - DNA, 25 bp, Saccharomyces pastorianus
ccagtctggcacatatctgcagtaa

SEQ ID NO: 134553 - DNA, 25 bp, Saccharomyces pastorianus
gtctggcacatatctgcagtaacag

SEQ ID NO: 134554 - DNA, 25 bp, Saccharomyces pastorianus
ggcacatatctgcagtaacagaaaa

SEQ ID NO: 134555 - DNA, 25 bp, Saccharomyces pastorianus
gagccagtctggcacatatctgcag

SEQ ID NO: 134556 - DNA, 25 bp, Saccharomyces pastorianus
cagtctggcacatatctgcagtaac

SEQ ID NO: 134557 - DNA, 25 bp, Saccharomyces pastorianus
tctggtttggtcaagcattttcctt

SEQ ID NO: 134558 - DNA, 25 bp, Saccharomyces pastorianus
cgactccctatatgtctctacaatt

SEQ ID NO: 134559 - DNA, 25 bp, Saccharomyces pastorianus
gccaccaaaggactctaaggccggt

SEQ ID NO: 134560 - DNA, 25 bp, Saccharomyces pastorianus
aaagttgaatttgtcgagccaccaa

SEQ ID NO: 134561 - DNA, 25 bp, Saccharomyces pastorianus
taaggccggtgacaaggtgttcttt

SEQ ID NO: 134562 - DNA, 25 bp, Saccharomyces pastorianus
gccatccgcaatagatttccgtgtt

SEQ ID NO: 134563 - DNA, 25 bp, Saccharomyces pastorianus
cggtgacgaagctccaatgaagcaa

SEQ ID NO: 134564 - DNA, 25 bp, Saccharomyces pastorianus
aaggcagctaagaaggccgccaacg

SEQ ID NO: 134565 - DNA, 25 bp, Saccharomyces pastorianus
actgctatggtattgtgtggttcta

SEQ ID NO: 134566 - DNA, 25 bp, Saccharomyces pastorianus
gagaggtattaaatccactgctatg

SEQ ID NO: 134567 - DNA, 25 bp, Saccharomyces pastorianus
attttcctttggacgctatgcaaga

SEQ ID NO: 134568 - DNA, 25 bp, Saccharomyces pastorianus
aatgttccagttatcgtcaaagcta

SEQ ID NO: 134569 - DNA, 25 bp, Saccharomyces pastorianus
ggaaactgctccagttattgacact

SEQ ID NO: 134570 - DNA, 25 bp, Saccharomyces pastorianus
gttccagttatcgtcaaagctagat

SEQ ID NO: 134571 - DNA, 25 bp, Saccharomyces pastorianus
ccaaatgttccagttatcgtcaaag

SEQ ID NO: 134572 - DNA, 25 bp, Saccharomyces pastorianus
tacctgaaatctgcttccaaggaaa

SEQ ID NO: 134573 - DNA, 25 bp, Saccharomyces pastorianus
gtcaaagctagattcgtctccaagt

SEQ ID NO: 134574 - DNA, 25 bp, Saccharomyces pastorianus
actgctccagttattgacactttgg

SEQ ID NO: 134575 - DNA, 25 bp, Saccharomyces pastorianus
tatcgtcaaagctagattcgtctcc

SEQ ID NO: 134576 - DNA, 25 bp, Saccharomyces pastorianus
ctgaaatctgcttccaaggaaactg

SEQ ID NO: 134577 - DNA, 25 bp, Saccharomyces pastorianus
aaagctagattcgtctccaagttgg

SEQ ID NO: 134578 - DNA, 25 bp, Saccharomyces pastorianus
agctagattcgtctccaagttggct

SEQ ID NO: 134579 - DNA, 25 bp, Saccharomyces pastorianus
gtgatattacacctaatgacccaat

SEQ ID NO: 134580 - DNA, 25 bp, Saccharomyces pastorianus
gtatcagaatcgcacttgttcacga

SEQ ID NO: 134581 - DNA, 25 bp, Saccharomyces pastorianus
gggaaattcttgatgactggttagc

SEQ ID NO: 134582 - DNA, 25 bp, Saccharomyces pastorianus
taccatgctgattacggacaagaat

SEQ ID NO: 134583 - DNA, 25 bp, Saccharomyces pastorianus
aaatggacacaatctttactggaag

SEQ ID NO: 134584 - DNA, 25 bp, Saccharomyces pastorianus
aaggccctgcagtgaaagcgcatct

SEQ ID NO: 134585 - DNA, 25 bp, Saccharomyces pastorianus
tgggtttaactaccatgctgattac

SEQ ID NO: 134586 - DNA, 25 bp, Saccharomyces pastorianus
gaaactgtcaagtatctctgtgaaa

SEQ ID NO: 134587 - DNA, 25 bp, Saccharomyces pastorianus
gttcacgattttgcggagtcattag

SEQ ID NO: 134588 - DNA, 25 bp, Saccharomyces pastorianus
gaaagcgcatctagggaaattcttg

SEQ ID NO: 134589 - DNA, 25 bp, Saccharomyces pastorianus
gaaagcataataaggccctgcagtg

SEQ ID NO: 134590 - DNA, 25 bp, Saccharomyces pastorianus
gtggaagacggtgcgcttgttacaa

SEQ ID NO: 134591 - DNA, 25 bp, Saccharomyces pastorianus
gtccggtggtgttaagctgtctgat

SEQ ID NO: 134592 - DNA, 25 bp, Saccharomyces pastorianus
ctagcgctacctgataacgttgtta

SEQ ID NO: 134593 - DNA, 25 bp, Saccharomyces pastorianus
ggcgaaaaccattgctttgctttaa

SEQ ID NO: 134594 - DNA, 25 bp, Saccharomyces pastorianus
agtcgcggtagctcagaatggcatt

SEQ ID NO: 134595 - DNA, 25 bp, Saccharomyces pastorianus
gtgtggaggccaattttccgtgtcc

SEQ ID NO: 134596 - DNA, 25 bp, Saccharomyces pastorianus
tgatcctatcccaagatggcgattt

SEQ ID NO: 134597 - DNA, 25 bp, Saccharomyces pastorianus
gggtctcaccattcagtcgcggtag

SEQ ID NO: 134598 - DNA, 25 bp, Saccharomyces pastorianus
ggacgacactgaagttccaaccaga

SEQ ID NO: 134599 - DNA, 25 bp, Saccharomyces pastorianus
ggattaggcccttctgaggacgaca

SEQ ID NO: 134600 - DNA, 25 bp, Saccharomyces pastorianus
ggtgaacatcactcattgatcctat

SEQ ID NO: 134601 - DNA, 25 bp, Saccharomyces pastorianus
tgaagaaagcatgtatggtcctggg

SEQ ID NO: 134602 - DNA, 25 bp, Saccharomyces pastorianus
taaacccatttttacctcgcgatga

SEQ ID NO: 134603 - DNA, 25 bp, Saccharomyces pastorianus
tgggttgggtccactagccaaaaat

SEQ ID NO: 134604 - DNA, 25 bp, Saccharomyces pastorianus
gcagagatacttccaacgccaagga

SEQ ID NO: 134605 - DNA, 25 bp, Saccharomyces pastorianus
aacgccaaggaacaactcaaggaca

SEQ ID NO: 134606 - DNA, 25 bp, Saccharomyces pastorianus
atgcacaccttagcccttgatgaag

SEQ ID NO: 134607 - DNA, 25 bp, Saccharomyces pastorianus
tgagcttgggttgggtccactagcc

SEQ ID NO: 134608 - DNA, 25 bp, Saccharomyces pastorianus
ggtgcgttgggcagagatacttcca

SEQ ID NO: 134609 - DNA, 25 bp, Saccharomyces pastorianus
caactcaaggacatggacgccgatg

SEQ ID NO: 134610 - DNA, 25 bp, Saccharomyces pastorianus
ccaaccattggatatattttgctgg

SEQ ID NO: 134611 - DNA, 25 bp, Saccharomyces pastorianus
agtcggtggtatgcacaccttagcc

SEQ ID NO: 134612 - DNA, 25 bp, Saccharomyces pastorianus
aagcactgtcgtgaagtggccgcat

SEQ ID NO: 134613 - DNA, 25 bp, Saccharomyces pastorianus
ttgtaatgttatgtcccaagagatt

SEQ ID NO: 134614 - DNA, 25 bp, Saccharomyces pastorianus
gaaggccaaattgcttgagctcccc

SEQ ID NO: 134615 - DNA, 25 bp, Saccharomyces pastorianus
gttatgtcccaagagattgtatcaa

SEQ ID NO: 134616 - DNA, 25 bp, Saccharomyces pastorianus
acaatccttcaataggcgattcgaa

SEQ ID NO: 134617 - DNA, 25 bp, Saccharomyces pastorianus
actgtcgtgaagtggccgcatgttg

SEQ ID NO: 134618 - DNA, 25 bp, Saccharomyces pastorianus
tgaagtggccgcatgttgtaatgtt

SEQ ID NO: 134619 - DNA, 25 bp, Saccharomyces pastorianus
atgatcagtataagcactgtcgtga

SEQ ID NO: 134620 - DNA, 25 bp, Saccharomyces pastorianus
taggcgattcgaaggccaaattgct

SEQ ID NO: 134621 - DNA, 25 bp, Saccharomyces pastorianus
ctagggcagccagaaaaggcatact

SEQ ID NO: 134622 - DNA, 25 bp, Saccharomyces pastorianus
ggagaaaaacaatccttcaataggc

SEQ ID NO: 134623 - DNA, 25 bp, Saccharomyces pastorianus
atgaggctacattcgcatttgccgc

SEQ ID NO: 134624 - DNA, 25 bp, Saccharomyces pastorianus
agatcccttcgcaattgatattcaa

SEQ ID NO: 134625 - DNA, 25 bp, Saccharomyces pastorianus
gaattcagttggttgtgccttttga

SEQ ID NO: 134626 - DNA, 25 bp, Saccharomyces pastorianus
gacaagttttctttaccctatgatg

SEQ ID NO: 134627 - DNA, 25 bp, Saccharomyces pastorianus
gttattttccaactatatgctgcta

SEQ ID NO: 134628 - DNA, 25 bp, Saccharomyces pastorianus
gaatttgacactgtgctacggccag

SEQ ID NO: 134629 - DNA, 25 bp, Saccharomyces pastorianus
gtacaaaatctactcctgggttcgt

SEQ ID NO: 134630 - DNA, 25 bp, Saccharomyces pastorianus
gaatctcttgtgcaatcgcatttag

SEQ ID NO: 134631 - DNA, 25 bp, Saccharomyces pastorianus
agagcctctaccaatgatcacattt

SEQ ID NO: 134632 - DNA, 25 bp, Saccharomyces pastorianus
cctgggttcgtcttatgatttggca

SEQ ID NO: 134633 - DNA, 25 bp, Saccharomyces pastorianus
aattacatggccactctctttttgt

SEQ ID NO: 134634 - DNA, 25 bp, Saccharomyces pastorianus
taatgttcctatggcggtggctgac

SEQ ID NO: 134635 - DNA, 25 bp, Saccharomyces pastorianus
agatctattacgtcttctctatcag

SEQ ID NO: 134636 - DNA, 25 bp, Saccharomyces pastorianus
attcgttttcttcctcagtttcagg

SEQ ID NO: 134637 - DNA, 25 bp, Saccharomyces pastorianus
agggccgacttgacagagctgcgta

SEQ ID NO: 134638 - DNA, 25 bp, Saccharomyces pastorianus
aaacagcaactttcctcagaatggt

SEQ ID NO: 134639 - DNA, 25 bp, Saccharomyces pastorianus
aagatgacttctttggctccaaatg

SEQ ID NO: 134640 - DNA, 25 bp, Saccharomyces pastorianus
cactcgcctcacagtcaagtttagt

SEQ ID NO: 134641 - DNA, 25 bp, Saccharomyces pastorianus
ggttcagctcccttagtagatgact

SEQ ID NO: 134642 - DNA, 25 bp, Saccharomyces pastorianus
aagccactcagaaaagcacgtcacc

SEQ ID NO: 134643 - DNA, 25 bp, Saccharomyces pastorianus
gtcagatgcggaacccaaaccaatt

SEQ ID NO: 134644 - DNA, 25 bp, Saccharomyces pastorianus
tcagtttcagggaacgctcctttac

SEQ ID NO: 134645 - DNA, 25 bp, Saccharomyces pastorianus
gaaaagagcctacaccatggaaact

SEQ ID NO: 134646 - DNA, 25 bp, Saccharomyces pastorianus
aacagaatctattccctttctatag

SEQ ID NO: 134647 - DNA, 25 bp, Saccharomyces pastorianus
ccctttctatagattgtggcccaaa

SEQ ID NO: 134648 - DNA, 25 bp, Saccharomyces pastorianus
gagcctacaccatggaaactttatt

SEQ ID NO: 134649 - DNA, 25 bp, Saccharomyces pastorianus
taaatctaccatgcgtcaatccaac

SEQ ID NO: 134650 - DNA, 25 bp, Saccharomyces pastorianus
gggatgtccaaactgacttccacac

SEQ ID NO: 134651 - DNA, 25 bp, Saccharomyces pastorianus
aggaaatggcaaccccagcgaacaa

SEQ ID NO: 134652 - DNA, 25 bp, Saccharomyces pastorianus
agggccccctcatagtaatcatgaa

SEQ ID NO: 134653 - DNA, 25 bp, Saccharomyces pastorianus
taccatgcgtcaatccaactacggg

SEQ ID NO: 134654 - DNA, 25 bp, Saccharomyces pastorianus
gacttccacaccttacgtgactgga

SEQ ID NO: 134655 - DNA, 25 bp, Saccharomyces pastorianus
atgaccaaatggaacggcactattt

SEQ ID NO: 134656 - DNA, 25 bp, Saccharomyces pastorianus
acaaactacaattcagctactacaa

SEQ ID NO: 134657 - DNA, 25 bp, Saccharomyces pastorianus
gatagaggtcaacttccgtgctttt

SEQ ID NO: 134658 - DNA, 25 bp, Saccharomyces pastorianus
tatactgcaattacgtgacggcccc

SEQ ID NO: 134659 - DNA, 25 bp, Saccharomyces pastorianus
gatgatctcatgaatctatgggtgg

SEQ ID NO: 134660 - DNA, 25 bp, Saccharomyces pastorianus
caacttccgtgctttttggcaacaa

SEQ ID NO: 134661 - DNA, 25 bp, Saccharomyces pastorianus
aaaatgtaagtgtctcgagggagtt

SEQ ID NO: 134662 - DNA, 25 bp, Saccharomyces pastorianus
gaaaacactttgaaatctaaccttg

SEQ ID NO: 134663 - DNA, 25 bp, Saccharomyces pastorianus
gtacccatttctgtttatgattcac

SEQ ID NO: 134664 - DNA, 25 bp, Saccharomyces pastorianus
aaagattttccagactaaagcaagt

SEQ ID NO: 134665 - DNA, 25 bp, Saccharomyces pastorianus
atccagcagtggaaacagtacccat

SEQ ID NO: 134666 - DNA, 25 bp, Saccharomyces pastorianus
gtgacggccccttcataaaagatca

SEQ ID NO: 134667 - DNA, 25 bp, Saccharomyces pastorianus
gaagagttcaacgagctcactgaaa

SEQ ID NO: 134668 - DNA, 25 bp, Saccharomyces pastorianus
aatcccaggacacttctactttatg

SEQ ID NO: 134669 - DNA, 25 bp, Saccharomyces pastorianus
aatgatccaagaccaagttcagtat

SEQ ID NO: 134670 - DNA, 25 bp, Saccharomyces pastorianus
gataaactcacatccaaactactcc

SEQ ID NO: 134671 - DNA, 25 bp, Saccharomyces pastorianus
agagctctcattcgctactgatgaa

SEQ ID NO: 134672 - DNA, 25 bp, Saccharomyces pastorianus
gttatcaaaggtcactagccaatgt

SEQ ID NO: 134673 - DNA, 25 bp, Saccharomyces pastorianus
gcgaacatgcaacaagccaatgaat

SEQ ID NO: 134674 - DNA, 25 bp, Saccharomyces pastorianus
gaattgcgaacaaccctccaaaaca

SEQ ID NO: 134675 - DNA, 25 bp, Saccharomyces pastorianus
aaggcagcagtatgattcgaagtta

SEQ ID NO: 134676 - DNA, 25 bp, Saccharomyces pastorianus
caagttggaagcagagagctctcat

SEQ ID NO: 134677 - DNA, 25 bp, Saccharomyces pastorianus
gtcaattacacgtactcgaaagtca

SEQ ID NO: 134678 - DNA, 25 bp, Saccharomyces pastorianus
aacagtactgctatttggtatttgc

SEQ ID NO: 134679 - DNA, 25 bp, Saccharomyces pastorianus
gtcgtccctgtatttgcagcattat

SEQ ID NO: 134680 - DNA, 25 bp, Saccharomyces pastorianus
gcagcattattcatggcgccaacaa

SEQ ID NO: 134681 - DNA, 25 bp, Saccharomyces pastorianus
atcggtcgtaaagatatcgttcggt

SEQ ID NO: 134682 - DNA, 25 bp, Saccharomyces pastorianus
gtaaagcacacctctaactctttgc

SEQ ID NO: 134683 - DNA, 25 bp, Saccharomyces pastorianus
taactctttgcctttatctaccgga

SEQ ID NO: 134684 - DNA, 25 bp, Saccharomyces pastorianus
acttgcatcggtacgatcggtcgta

SEQ ID NO: 134685 - DNA, 25 bp, Saccharomyces pastorianus
ttatctaccggaacagtactgctat

SEQ ID NO: 134686 - DNA, 25 bp, Saccharomyces pastorianus
ttccagcgctgttcgtaaagcacac

SEQ ID NO: 134687 - DNA, 25 bp, Saccharomyces pastorianus
gcgccaacaatacagctgtcttttt

SEQ ID NO: 134688 - DNA, 25 bp, Saccharomyces pastorianus
ggagcatcgctcacgtttgactcat

SEQ ID NO: 134689 - DNA, 25 bp, Saccharomyces pastorianus
gctttaatgaccacagctattccac

SEQ ID NO: 134690 - DNA, 25 bp, Saccharomyces pastorianus
gataatgacaccgagcacgcaagta

SEQ ID NO: 134691 - DNA, 25 bp, Saccharomyces pastorianus
ccttcctcacggtagatgatcacac

SEQ ID NO: 134692 - DNA, 25 bp, Saccharomyces pastorianus
gtgagtgataacctgccaagcttta

SEQ ID NO: 134693 - DNA, 25 bp, Saccharomyces pastorianus
gatgatcacacactaaacgacaata

SEQ ID NO: 134694 - DNA, 25 bp, Saccharomyces pastorianus
ggaagcagattaacgcccttcctca

SEQ ID NO: 134695 - DNA, 25 bp, Saccharomyces pastorianus
ccgatataaagttcagcgccactga

SEQ ID NO: 134696 - DNA, 25 bp, Saccharomyces pastorianus
agtacaagtgtcaatcaaggcgaaa

SEQ ID NO: 134697 - DNA, 25 bp, Saccharomyces pastorianus
acacggcgcccgagaacgctaagaa

SEQ ID NO: 134698 - DNA, 25 bp, Saccharomyces pastorianus
aatacaggacccgacagagtacaac

SEQ ID NO: 134699 - DNA, 25 bp, Saccharomyces pastorianus
taccggaaccggctatagtcgaaat

SEQ ID NO: 134700 - DNA, 25 bp, Saccharomyces pastorianus
gagtgagaatccaagcctaacgccc

SEQ ID NO: 134701 - DNA, 25 bp, Saccharomyces pastorianus
gattttaggccttttacctcgcgag

SEQ ID NO: 134702 - DNA, 25 bp, Saccharomyces pastorianus
gctgtcaacgttaatagccctggtt

SEQ ID NO: 134703 - DNA, 25 bp, Saccharomyces pastorianus
atagagccaattcctcgacatcgag

SEQ ID NO: 134704 - DNA, 25 bp, Saccharomyces pastorianus
taataccaaccttgccaacaatctc

SEQ ID NO: 134705 - DNA, 25 bp, Saccharomyces pastorianus
gatttacgatgctctctgatgatga

SEQ ID NO: 134706 - DNA, 25 bp, Saccharomyces pastorianus
cttcctcgacaaacactaattccaa

SEQ ID NO: 134707 - DNA, 25 bp, Saccharomyces pastorianus
tggctcgccaataaggccctataaa

SEQ ID NO: 134708 - DNA, 25 bp, Saccharomyces pastorianus
atggttcacatactttctcctggat

SEQ ID NO: 134709 - DNA, 25 bp, Saccharomyces pastorianus
ttacctcgcgagatcctaataacca

SEQ ID NO: 134710 - DNA, 25 bp, Saccharomyces pastorianus
agcctaacgccctttgatatcgaat

SEQ ID NO: 134711 - DNA, 25 bp, Saccharomyces pastorianus
tgtcgtattgcccactaacagtaat

SEQ ID NO: 134712 - DNA, 25 bp, Saccharomyces pastorianus
atttgcccattccaacagctacaat

SEQ ID NO: 134713 - DNA, 25 bp, Saccharomyces pastorianus
aaaggccatgcttaccctctgtaaa

SEQ ID NO: 134714 - DNA, 25 bp, Saccharomyces pastorianus
ggacaataaccattcacatcagcta

SEQ ID NO: 134715 - DNA, 25 bp, Saccharomyces pastorianus
aatgttacttcatcagcatcctctt

SEQ ID NO: 134716 - DNA, 25 bp, Saccharomyces pastorianus
gatcaaacatcctccataaagccaa

SEQ ID NO: 134717 - DNA, 25 bp, Saccharomyces pastorianus
atgccacagtaaccaatgggcctca

SEQ ID NO: 134718 - DNA, 25 bp, Saccharomyces pastorianus
atcctcttcaactgtatcgtccata

SEQ ID NO: 134719 - DNA, 25 bp, Saccharomyces pastorianus
cgtccatatcccttgattcatcgaa

SEQ ID NO: 134720 - DNA, 25 bp, Saccharomyces pastorianus
aatcccctgtgattgtggtttaaca

SEQ ID NO: 134721 - DNA, 25 bp, Saccharomyces pastorianus
aatatgcgagtccttctaatgccac

SEQ ID NO: 134722 - DNA, 25 bp, Saccharomyces pastorianus
ctgaggctgctaatcgtgacgaaac

SEQ ID NO: 134723 - DNA, 25 bp, Saccharomyces pastorianus
gaggaggttactctatctcatgccc

SEQ ID NO: 134724 - DNA, 25 bp, Saccharomyces pastorianus
gtgtaccgataatgccaactctacc

SEQ ID NO: 134725 - DNA, 25 bp, Saccharomyces pastorianus
gatgattagatctcctgaggctgct

SEQ ID NO: 134726 - DNA, 25 bp, Saccharomyces pastorianus
taatatgtttttctgccgccaagca

SEQ ID NO: 134727 - DNA, 25 bp, Saccharomyces pastorianus
gatttgggtctgttaacactcatca

SEQ ID NO: 134728 - DNA, 25 bp, Saccharomyces pastorianus
gatcgcatggcttccattcatagca

SEQ ID NO: 134729 - DNA, 25 bp, Saccharomyces pastorianus
attaccacggcctttttgcagatgt

SEQ ID NO: 134730 - DNA, 25 bp, Saccharomyces pastorianus
gttgaccgaaattactcttctgagg

SEQ ID NO: 134731 - DNA, 25 bp, Saccharomyces pastorianus
aagcacatcttttacgttcatcttt

SEQ ID NO: 134732 - DNA, 25 bp, Saccharomyces pastorianus
gaatcctgggaataccgctaatagt

SEQ ID NO: 134733 - DNA, 25 bp, Saccharomyces pastorianus
catttctggtattgttcacgacgta

SEQ ID NO: 134734 - DNA, 25 bp, Saccharomyces pastorianus
accacgaattcccaactgattacag

SEQ ID NO: 134735 - DNA, 25 bp, Saccharomyces pastorianus
agggtttggttatcatttctggtat

SEQ ID NO: 134736 - DNA, 25 bp, Saccharomyces pastorianus
aaggacgctaccaaggctttcagtg

SEQ ID NO: 134737 - DNA, 25 bp, Saccharomyces pastorianus
cgtcactcaaatgccgctcaaaatg

SEQ ID NO: 134738 - DNA, 25 bp, Saccharomyces pastorianus
acaaaccttcttggctaagtctaag

SEQ ID NO: 134739 - DNA, 25 bp, Saccharomyces pastorianus
ggtgtctaccgtcactcaaatgccg

SEQ ID NO: 134740 - DNA, 25 bp, Saccharomyces pastorianus
gttggtctagcatacgacttgaaga

SEQ ID NO: 134741 - DNA, 25 bp, Saccharomyces pastorianus
ggttatcatctatttgacttcttta

SEQ ID NO: 134742 - DNA, 25 bp, Saccharomyces pastorianus
aaactgcattaggtaaggacgctac

SEQ ID NO: 134743 - DNA, 25 bp, Saccharomyces pastorianus
gacttctttagttggtctagcatac

SEQ ID NO: 134744 - DNA, 25 bp, Saccharomyces pastorianus
agcagtggcattgtcgacgaagtcg

SEQ ID NO: 134745 - DNA, 25 bp, Saccharomyces pastorianus
tccaaaggatgactctgccagcagt

SEQ ID NO: 134746 - DNA, 25 bp, Saccharomyces pastorianus
gccaacttctggaactactattgaa

SEQ ID NO: 134747 - DNA, 25 bp, Saccharomyces pastorianus
atgccaacttctggaactactattg

SEQ ID NO: 134748 - DNA, 25 bp, Saccharomyces pastorianus
tggaactactattgaattgattgac

SEQ ID NO: 134749 - DNA, 25 bp, Saccharomyces pastorianus
gtcgacttaacggaagctaatattt

SEQ ID NO: 134750 - DNA, 25 bp, Saccharomyces pastorianus
gccagcagtggcattgtcgacgaag

SEQ ID NO: 134751 - DNA, 25 bp, Saccharomyces pastorianus
ggatgactctgccagcagtggcatt

SEQ ID NO: 134752 - DNA, 25 bp, Saccharomyces pastorianus
gacgaagtcgacttaacggaagcta

SEQ ID NO: 134753 - DNA, 25 bp, Saccharomyces pastorianus
tgaattgattgacgaccaatttcca

SEQ ID NO: 134754 - DNA, 25 bp, Saccharomyces pastorianus
ggaagctaatattttggctactggt

SEQ ID NO: 134755 - DNA, 25 bp, Saccharomyces pastorianus
aacgttgcagtttcaatctagagtt

SEQ ID NO: 134756 - DNA, 25 bp, Saccharomyces pastorianus
gataaagtcagtgtaccgtcggaag

SEQ ID NO: 134757 - DNA, 25 bp, Saccharomyces pastorianus
gatagtgacgatgttccagttccaa

SEQ ID NO: 134758 - DNA, 25 bp, Saccharomyces pastorianus
gaacgacgagatccgaacagcagca

SEQ ID NO: 134759 - DNA, 25 bp, Saccharomyces pastorianus
ggttggccccattaaatgcatatga

SEQ ID NO: 134760 - DNA, 25 bp, Saccharomyces pastorianus
gaatttaagagattggttggcccca

SEQ ID NO: 134761 - DNA, 25 bp, Saccharomyces pastorianus
gttccagttccaaagtattcgccaa

SEQ ID NO: 134762 - DNA, 25 bp, Saccharomyces pastorianus
agagtttatctgaaagtgccccttg

SEQ ID NO: 134763 - DNA, 25 bp, Saccharomyces pastorianus
ggtatgtccatagaaaccgtcatag

SEQ ID NO: 134764 - DNA, 25 bp, Saccharomyces pastorianus
ttgatgcattttcgacccttactac

SEQ ID NO: 134765 - DNA, 25 bp, Saccharomyces pastorianus
ggctcctcaaaattctccatcgaat

SEQ ID NO: 134766 - DNA, 25 bp, Saccharomyces pastorianus
aactgtgacaccaacgaagccgctt

SEQ ID NO: 134767 - DNA, 25 bp, Saccharomyces pastorianus
ggcaccagcgcccttaaagcaaaag

SEQ ID NO: 134768 - DNA, 25 bp, Saccharomyces pastorianus
agcactctacgacgttttggccaag

SEQ ID NO: 134769 - DNA, 25 bp, Saccharomyces pastorianus
gaagccgcttacaaagccaggtatc

SEQ ID NO: 134770 - DNA, 25 bp, Saccharomyces pastorianus
gcatccacctcaatctattttgcat

SEQ ID NO: 134771 - DNA, 25 bp, Saccharomyces pastorianus
gtgagtccgtgaatggtgttcaaca

SEQ ID NO: 134772 - DNA, 25 bp, Saccharomyces pastorianus
acacctgaattcttagctacatgcg

SEQ ID NO: 134773 - DNA, 25 bp, Saccharomyces pastorianus
aaggtatcttactatcaattgcaaa

SEQ ID NO: 134774 - DNA, 25 bp, Saccharomyces pastorianus
gtacgtcagcactaaaccaagaaat

SEQ ID NO: 134775 - DNA, 25 bp, Saccharomyces pastorianus
aagacaactgtaggtgagtccgtga

SEQ ID NO: 134776 - DNA, 25 bp, Saccharomyces pastorianus
ctcctcccagtcagatgccatgaaa

SEQ ID NO: 134777 - DNA, 25 bp, Saccharomyces pastorianus
aatctggcatacagttaggacctga

SEQ ID NO: 134778 - DNA, 25 bp, Saccharomyces pastorianus
aaatctggcatacagttaggacctg

SEQ ID NO: 134779 - DNA, 25 bp, Saccharomyces pastorianus
gacctgaacaactggccccgctaat

SEQ ID NO: 134780 - DNA, 25 bp, Saccharomyces pastorianus
tggcatacagttaggacctgaacaa

SEQ ID NO: 134781 - DNA, 25 bp, Saccharomyces pastorianus
ttaggacctgaacaactggccccgc

SEQ ID NO: 134782 - DNA, 25 bp, Saccharomyces pastorianus
aggacctgaacaactggccccgcta

SEQ ID NO: 134783 - DNA, 25 bp, Saccharomyces pastorianus
gttaggacctgaacaactggccccg

SEQ ID NO: 134784 - DNA, 25 bp, Saccharomyces pastorianus
ttggaattggaaaaatctggcatac

SEQ ID NO: 134785 - DNA, 25 bp, Saccharomyces pastorianus
tctggcatacagttaggacctgaac

SEQ ID NO: 134786 - DNA, 25 bp, Saccharomyces pastorianus
gaattggaaaaatctggcatacagt

SEQ ID NO: 134787 - DNA, 25 bp, Saccharomyces pastorianus
gcatacagttaggacctgaacaact

SEQ ID NO: 134788 - DNA, 25 bp, Saccharomyces pastorianus
tccagagtcactcgttcgatagaac

SEQ ID NO: 134789 - DNA, 25 bp, Saccharomyces pastorianus
aagcatagttccagagtcactcgtt

SEQ ID NO: 134790 - DNA, 25 bp, Saccharomyces pastorianus
gctttcctggatttctccgagaaga

SEQ ID NO: 134791 - DNA, 25 bp, Saccharomyces pastorianus
ggacgacagacagcctaatgacaaa

SEQ ID NO: 134792 - DNA, 25 bp, Saccharomyces pastorianus
tcacaccaggagtttaaggaggctt

SEQ ID NO: 134793 - DNA, 25 bp, Saccharomyces pastorianus
gatttctccgagaagattttacgct

SEQ ID NO: 134794 - DNA, 25 bp, Saccharomyces pastorianus
attttacgctcaatcttgggacgac

SEQ ID NO: 134795 - DNA, 25 bp, Saccharomyces pastorianus
gaactatcgaacatttctaccacta

SEQ ID NO: 134796 - DNA, 25 bp, Saccharomyces pastorianus
aaggaggctttcctggatttctccg

SEQ ID NO: 134797 - DNA, 25 bp, Saccharomyces pastorianus
tttctaccactaatcacaccaggag

SEQ ID NO: 134798 - DNA, 25 bp, Saccharomyces pastorianus
aatcttgggacgacagacagcctaa

SEQ ID NO: 134799 - DNA, 25 bp, Saccharomyces pastorianus
ggcacacaaggacctggttccatga

SEQ ID NO: 134800 - DNA, 25 bp, Saccharomyces pastorianus
tctttcataccgtccacgtcgaaaa

SEQ ID NO: 134801 - DNA, 25 bp, Saccharomyces pastorianus
gatgctatgactacggcacctacga

SEQ ID NO: 134802 - DNA, 25 bp, Saccharomyces pastorianus
aagcagcctaatttctcaggaacgt

SEQ ID NO: 134803 - DNA, 25 bp, Saccharomyces pastorianus
tacatcatcacaatcagctgcgcag

SEQ ID NO: 134804 - DNA, 25 bp, Saccharomyces pastorianus
aatttcaagggttccaccatcagta

SEQ ID NO: 134805 - DNA, 25 bp, Saccharomyces pastorianus
tacgacaccaactccatacaagaac

SEQ ID NO: 134806 - DNA, 25 bp, Saccharomyces pastorianus
caaccaccttaactagagcaaccga

SEQ ID NO: 134807 - DNA, 25 bp, Saccharomyces pastorianus
aaaactctactccatgttcttccaa

SEQ ID NO: 134808 - DNA, 25 bp, Saccharomyces pastorianus
atcgaagtacgatgcctactcgtcc

SEQ ID NO: 134809 - DNA, 25 bp, Saccharomyces pastorianus
atatgacgagacaaccaaccacctt

SEQ ID NO: 134810 - DNA, 25 bp, Saccharomyces pastorianus
gaaatcgcttttcacttttgacaag

SEQ ID NO: 134811 - DNA, 25 bp, Saccharomyces pastorianus
gaggactcaattttgccaccaattc

SEQ ID NO: 134812 - DNA, 25 bp, Saccharomyces pastorianus
ggttcctactcactgtttacattca

SEQ ID NO: 134813 - DNA, 25 bp, Saccharomyces pastorianus
gtggtggtgagaactccagcgacaa

SEQ ID NO: 134814 - DNA, 25 bp, Saccharomyces pastorianus
aattccgcctatttcgaaatcgctt

SEQ ID NO: 134815 - DNA, 25 bp, Saccharomyces pastorianus
aacatgggcagtatttcgcaattaa

SEQ ID NO: 134816 - DNA, 25 bp, Saccharomyces pastorianus
gggctctactcaaagtttagcatcc

SEQ ID NO: 134817 - DNA, 25 bp, Saccharomyces pastorianus
aatatcattcagttccttctatcga

SEQ ID NO: 134818 - DNA, 25 bp, Saccharomyces pastorianus
gactgatttgtcctttcactttcaa

SEQ ID NO: 134819 - DNA, 25 bp, Saccharomyces pastorianus
aaccttggtgaattgggctctactc

SEQ ID NO: 134820 - DNA, 25 bp, Saccharomyces pastorianus
atttaatcctggttcctactcactg

SEQ ID NO: 134821 - DNA, 25 bp, Saccharomyces pastorianus
cggtaagttattcagagtcggtgtt

SEQ ID NO: 134822 - DNA, 25 bp, Saccharomyces pastorianus
gtctactacttccaaggtggtaaca

SEQ ID NO: 134823 - DNA, 25 bp, Saccharomyces pastorianus
gtggtaacaacgaattgggtactgc

SEQ ID NO: 134824 - DNA, 25 bp, Saccharomyces pastorianus
aagactaaggtctactacttccaag

SEQ ID NO: 134825 - DNA, 25 bp, Saccharomyces pastorianus
tactacttccaaggtggtaacaacg

SEQ ID NO: 134826 - DNA, 25 bp, Saccharomyces pastorianus
ttgtccaagactaaggtctactact

SEQ ID NO: 134827 - DNA, 25 bp, Saccharomyces pastorianus
cggtgttgtctctattttggaagct

SEQ ID NO: 134828 - DNA, 25 bp, Saccharomyces pastorianus
gactaaggtctactacttccaaggt

SEQ ID NO: 134829 - DNA, 25 bp, Saccharomyces pastorianus
taaggtctactacttccaaggtggt

SEQ ID NO: 134830 - DNA, 25 bp, Saccharomyces pastorianus
tgttgtctctattttggaagctggt

SEQ ID NO: 134831 - DNA, 25 bp, Saccharomyces pastorianus
agtcggtgttgtctctattttggaa

SEQ ID NO: 134832 - DNA, 25 bp, Saccharomyces pastorianus
aattagcgagggaatctggccagaa

SEQ ID NO: 134833 - DNA, 25 bp, Saccharomyces pastorianus
ggcagacagaaccactttagtcgat

SEQ ID NO: 134834 - DNA, 25 bp, Saccharomyces pastorianus
atgatcacaccattagacgtcccac

SEQ ID NO: 134835 - DNA, 25 bp, Saccharomyces pastorianus
aagccatggcttcccctgaagagaa

SEQ ID NO: 134836 - DNA, 25 bp, Saccharomyces pastorianus
tggccaagccactgacagagtgcgt

SEQ ID NO: 134837 - DNA, 25 bp, Saccharomyces pastorianus
tactcacatcgccatcgttggtaaa

SEQ ID NO: 134838 - DNA, 25 bp, Saccharomyces pastorianus
gtgagttaaccaggtcttctacgaa

SEQ ID NO: 134839 - DNA, 25 bp, Saccharomyces pastorianus
gtcttggtcatctttggtggtctaa

SEQ ID NO: 134840 - DNA, 25 bp, Saccharomyces pastorianus
gatgcaagggcttctgagaccatga

SEQ ID NO: 134841 - DNA, 25 bp, Saccharomyces pastorianus
gaggaactcgctactttacaagatg

SEQ ID NO: 134842 - DNA, 25 bp, Saccharomyces pastorianus
aagagcgtgatttctataccgcaga

SEQ ID NO: 134843 - DNA, 25 bp, Saccharomyces pastorianus
gcaactcgcaaaaaatgacgacgaa

SEQ ID NO: 134844 - DNA, 25 bp, Saccharomyces pastorianus
gattattggtaaggatagtccctga

SEQ ID NO: 134845 - DNA, 25 bp, Saccharomyces pastorianus
gtttctcagaagaaagcaactcgca

SEQ ID NO: 134846 - DNA, 25 bp, Saccharomyces pastorianus
cgaagaagcgcttttggacgaatct

SEQ ID NO: 134847 - DNA, 25 bp, Saccharomyces pastorianus
ggatagtccctgatgaagtagcatt

SEQ ID NO: 134848 - DNA, 25 bp, Saccharomyces pastorianus
atcgatgtggataaccgctgttctt

SEQ ID NO: 134849 - DNA, 25 bp, Saccharomyces pastorianus
tgtatttggacttgagtttctcaga

SEQ ID NO: 134850 - DNA, 25 bp, Saccharomyces pastorianus
cgctgttctttgtggtatgttgtct

SEQ ID NO: 134851 - DNA, 25 bp, Saccharomyces pastorianus
agtagcattgaaagcatttccggtt

SEQ ID NO: 134852 - DNA, 25 bp, Saccharomyces pastorianus
gcatttccggttgcttatgttcaaa

SEQ ID NO: 134853 - DNA, 25 bp, Saccharomyces pastorianus
gtatgttgtctttgattatgggatt

SEQ ID NO: 134854 - DNA, 25 bp, Saccharomyces pastorianus
gaaggcaccccaataaacaatgtct

SEQ ID NO: 134855 - DNA, 25 bp, Saccharomyces pastorianus
gacgatgaggtcagccaattctgtt

SEQ ID NO: 134856 - DNA, 25 bp, Saccharomyces pastorianus
gaacggcccgctattgaatttgaga

SEQ ID NO: 134857 - DNA, 25 bp, Saccharomyces pastorianus
ggattcgacaccagtattaagcttg

SEQ ID NO: 134858 - DNA, 25 bp, Saccharomyces pastorianus
cacctttttagtttccaatgacgat

SEQ ID NO: 134859 - DNA, 25 bp, Saccharomyces pastorianus
gcagccggagcgttatttgtatctt

SEQ ID NO: 134860 - DNA, 25 bp, Saccharomyces pastorianus
atttgtatcttctggattcgacacc

SEQ ID NO: 134861 - DNA, 25 bp, Saccharomyces pastorianus
agacccagaaagtgaacggcccgct

SEQ ID NO: 134862 - DNA, 25 bp, Saccharomyces pastorianus
tattgaatttgagacgcccaccttt

SEQ ID NO: 134863 - DNA, 25 bp, Saccharomyces pastorianus
agcttgacattatttcagacccaga

SEQ ID NO: 134864 - DNA, 25 bp, Saccharomyces pastorianus
gccaattctgttacctttctgatga

SEQ ID NO: 134865 - DNA, 25 bp, Saccharomyces pastorianus
tctaagatcaccagaatgcccagtt

SEQ ID NO: 134866 - DNA, 25 bp, Saccharomyces pastorianus
atatgtgattgctggccacgtttct

SEQ ID NO: 134867 - DNA, 25 bp, Saccharomyces pastorianus
tctctgcctctttggatggtacaat

SEQ ID NO: 134868 - DNA, 25 bp, Saccharomyces pastorianus
agcaaactattcaactcccaagcaa

SEQ ID NO: 134869 - DNA, 25 bp, Saccharomyces pastorianus
gtacaatttgcctttgggagtgcgg

SEQ ID NO: 134870 - DNA, 25 bp, Saccharomyces pastorianus
cacgttaattggacacagggcgaca

SEQ ID NO: 134871 - DNA, 25 bp, Saccharomyces pastorianus
tggccacgtttctggtgttattact

SEQ ID NO: 134872 - DNA, 25 bp, Saccharomyces pastorianus
gcgacagtcacagatattgccataa

SEQ ID NO: 134873 - DNA, 25 bp, Saccharomyces pastorianus
gaaattgaccaagctcacgttagtg

SEQ ID NO: 134874 - DNA, 25 bp, Saccharomyces pastorianus
aggaaggaatgtgctctctgcctct

SEQ ID NO: 134875 - DNA, 25 bp, Saccharomyces pastorianus
ggctcaaatcctcgcacgttaattg

SEQ ID NO: 134876 - DNA, 25 bp, Saccharomyces pastorianus
gaataacaacttttcttcctgaaca

SEQ ID NO: 134877 - DNA, 25 bp, Saccharomyces pastorianus
aacaacttttcttcctgaacattct

SEQ ID NO: 134878 - DNA, 25 bp, Saccharomyces pastorianus
caacttttcttcctgaacattctaa

SEQ ID NO: 134879 - DNA, 25 bp, Saccharomyces pastorianus
catatccaaagtttattctgacaca

SEQ ID NO: 134880 - DNA, 25 bp, Saccharomyces pastorianus
cttcctgaacattctaatggtttga

SEQ ID NO: 134881 - DNA, 25 bp, Saccharomyces pastorianus
tgtctgaagtcatatccaaagttta

SEQ ID NO: 134882 - DNA, 25 bp, Saccharomyces pastorianus
gaagtcatatccaaagtttattctg

SEQ ID NO: 134883 - DNA, 25 bp, Saccharomyces pastorianus
gtctgaagtcatatccaaagtttat

SEQ ID NO: 134884 - DNA, 25 bp, Saccharomyces pastorianus
atccaaagtttattctgacacaaga

SEQ ID NO: 134885 - DNA, 25 bp, Saccharomyces pastorianus
cttttcttcctgaacattctaatgg

SEQ ID NO: 134886 - DNA, 25 bp, Saccharomyces pastorianus
ataacaacttttcttcctgaacatt

SEQ ID NO: 134887 - DNA, 25 bp, Saccharomyces pastorianus
aagagattcgagttgttagctggaa

SEQ ID NO: 134888 - DNA, 25 bp, Saccharomyces pastorianus
tgcaatagttagtgcgccatccgtc

SEQ ID NO: 134889 - DNA, 25 bp, Saccharomyces pastorianus
attccaaccgaacatatctacttgt

SEQ ID NO: 134890 - DNA, 25 bp, Saccharomyces pastorianus
gtacagcgatgacacagccgcaatt

SEQ ID NO: 134891 - DNA, 25 bp, Saccharomyces pastorianus
gccgcaattttagcagatgccatat

SEQ ID NO: 134892 - DNA, 25 bp, Saccharomyces pastorianus
ggaagattggcagctttcccagttt

SEQ ID NO: 134893 - DNA, 25 bp, Saccharomyces pastorianus
gctttcccagttttggtacagcgat

SEQ ID NO: 134894 - DNA, 25 bp, Saccharomyces pastorianus
tgccatattggaaggtgcggacgaa

SEQ ID NO: 134895 - DNA, 25 bp, Saccharomyces pastorianus
atgattacaataaaccactggactt

SEQ ID NO: 134896 - DNA, 25 bp, Saccharomyces pastorianus
atccgtctatgctgccattcaaaag

SEQ ID NO: 134897 - DNA, 25 bp, Saccharomyces pastorianus
aggtgcggacgaaaacactgtaatt

SEQ ID NO: 134898 - DNA, 25 bp, Saccharomyces pastorianus
gaaagtgccggttattgcatgccct

SEQ ID NO: 134899 - DNA, 25 bp, Saccharomyces pastorianus
gaaacggacacagtctcggctcagt

SEQ ID NO: 134900 - DNA, 25 bp, Saccharomyces pastorianus
cagtcttacaccgagcatttttaaa

SEQ ID NO: 134901 - DNA, 25 bp, Saccharomyces pastorianus
tacgctggagtgattttccttctat

SEQ ID NO: 134902 - DNA, 25 bp, Saccharomyces pastorianus
tagtgctattattcttcgtatcatg

SEQ ID NO: 134903 - DNA, 25 bp, Saccharomyces pastorianus
atttggcaaccgcaagttccgtaga

SEQ ID NO: 134904 - DNA, 25 bp, Saccharomyces pastorianus
aagtgggctcatcatctaagtgtaa

SEQ ID NO: 134905 - DNA, 25 bp, Saccharomyces pastorianus
gctaagccatcagcaattacttgaa

SEQ ID NO: 134906 - DNA, 25 bp, Saccharomyces pastorianus
gaactaactcatattcccatagatg

SEQ ID NO: 134907 - DNA, 25 bp, Saccharomyces pastorianus
gccctctaccatctcagaaatcaga

SEQ ID NO: 134908 - DNA, 25 bp, Saccharomyces pastorianus
gtcaatgtcgacaatacccagatgt

SEQ ID NO: 134909 - DNA, 25 bp, Saccharomyces pastorianus
ttgattttggttctgttcgtcttaa

SEQ ID NO: 134910 - DNA, 25 bp, Saccharomyces pastorianus
gcgattacttggtcttcggaaattg

SEQ ID NO: 134911 - DNA, 25 bp, Saccharomyces pastorianus
attaatcggactcctaactgagaag

SEQ ID NO: 134912 - DNA, 25 bp, Saccharomyces pastorianus
ttattgaagatctaacgcacgaagc

SEQ ID NO: 134913 - DNA, 25 bp, Saccharomyces pastorianus
gcaatacttggcgatgttttctcaa

SEQ ID NO: 134914 - DNA, 25 bp, Saccharomyces pastorianus
gtagagctatatcgcagtcaacact

SEQ ID NO: 134915 - DNA, 25 bp, Saccharomyces pastorianus
tatcgcgttactgtcattgaatcta

SEQ ID NO: 134916 - DNA, 25 bp, Saccharomyces pastorianus
tgagtatctttctacctacgtggac

SEQ ID NO: 134917 - DNA, 25 bp, Saccharomyces pastorianus
gctagactcctcttttctaaatgtg

SEQ ID NO: 134918 - DNA, 25 bp, Saccharomyces pastorianus
cgcagtcaacactcgtttttggaaa

SEQ ID NO: 134919 - DNA, 25 bp, Saccharomyces pastorianus
gaaggagcattaccatctgagtatc

SEQ ID NO: 134920 - DNA, 25 bp, Saccharomyces pastorianus
gtcaagaaattatcaagaacccaga

SEQ ID NO: 134921 - DNA, 25 bp, Saccharomyces pastorianus
aaatttccagtatcagttcaagtga

SEQ ID NO: 134922 - DNA, 25 bp, Saccharomyces pastorianus
gaacccagaaatttccagtatcagt

SEQ ID NO: 134923 - DNA, 25 bp, Saccharomyces pastorianus
gagaatgagcgttcaagaatccata

SEQ ID NO: 134924 - DNA, 25 bp, Saccharomyces pastorianus
tcacgggttgacaaataatgactca

SEQ ID NO: 134925 - DNA, 25 bp, Saccharomyces pastorianus
tccaaccaggcacaatacatcgagt

SEQ ID NO: 134926 - DNA, 25 bp, Saccharomyces pastorianus
aataatgactcaactccaaccaggc

SEQ ID NO: 134927 - DNA, 25 bp, Saccharomyces pastorianus
aagaaggcggattcaaagtcaagaa

SEQ ID NO: 134928 - DNA, 25 bp, Saccharomyces pastorianus
cgagttccataccaaaaatttcaag

SEQ ID NO: 134929 - DNA, 25 bp, Saccharomyces pastorianus
ggcacaatacatcgagttccatacc

SEQ ID NO: 134930 - DNA, 25 bp, Saccharomyces pastorianus
gaatccataacacaatctatgcgaa

SEQ ID NO: 134931 - DNA, 25 bp, Saccharomyces pastorianus
ctaacgggcctcttacacgatagta

SEQ ID NO: 134932 - DNA, 25 bp, Saccharomyces pastorianus
ttgattcctcaataccgctaacggg

SEQ ID NO: 134933 - DNA, 25 bp, Saccharomyces pastorianus
gtgccattacaggatgactcactaa

SEQ ID NO: 134934 - DNA, 25 bp, Saccharomyces pastorianus
cggtgtgtcttcatcttccggaaat

SEQ ID NO: 134935 - DNA, 25 bp, Saccharomyces pastorianus
aaatctaactccaacgtatccactt

SEQ ID NO: 134936 - DNA, 25 bp, Saccharomyces pastorianus
aactctggcggatcttcggacggat

SEQ ID NO: 134937 - DNA, 25 bp, Saccharomyces pastorianus
atgactttgccccatgcaattgcag

SEQ ID NO: 134938 - DNA, 25 bp, Saccharomyces pastorianus
aatcatcggctcaaatcttcggata

SEQ ID NO: 134939 - DNA, 25 bp, Saccharomyces pastorianus
ggatacttgcctgaagctctgaaca

SEQ ID NO: 134940 - DNA, 25 bp, Saccharomyces pastorianus
gatctaattcgaactccggtgtgtc

SEQ ID NO: 134941 - DNA, 25 bp, Saccharomyces pastorianus
attaccaactcttcaagcgcttttt

SEQ ID NO: 134942 - DNA, 25 bp, Saccharomyces pastorianus
acgctcgagaactacagaaactgac

SEQ ID NO: 134943 - DNA, 25 bp, Saccharomyces pastorianus
aaacgctcgagaactacagaaactg

SEQ ID NO: 134944 - DNA, 25 bp, Saccharomyces pastorianus
aactacagaaactgaccacagcgct

SEQ ID NO: 134945 - DNA, 25 bp, Saccharomyces pastorianus
aacgctcgagaactacagaaactga

SEQ ID NO: 134946 - DNA, 25 bp, Saccharomyces pastorianus
cgctcgagaactacagaaactgacc

SEQ ID NO: 134947 - DNA, 25 bp, Saccharomyces pastorianus
tacagaaactgaccacagcgctcga

SEQ ID NO: 134948 - DNA, 25 bp, Saccharomyces pastorianus
gaactacagaaactgaccacagcgc

SEQ ID NO: 134949 - DNA, 25 bp, Saccharomyces pastorianus
acagaaactgaccacagcgctcgag

SEQ ID NO: 134950 - DNA, 25 bp, Saccharomyces pastorianus
gagaactacagaaactgaccacagc

SEQ ID NO: 134951 - DNA, 25 bp, Saccharomyces pastorianus
gaaacgctcgagaactacagaaact

SEQ ID NO: 134952 - DNA, 25 bp, Saccharomyces pastorianus
gagaaacgctcgagaactacagaaa

SEQ ID NO: 134953 - DNA, 25 bp, Saccharomyces pastorianus
gacggtaaaattgtcactgcttatc

SEQ ID NO: 134954 - DNA, 25 bp, Saccharomyces pastorianus
aatatggtatttcttgctgggtaaa

SEQ ID NO: 134955 - DNA, 25 bp, Saccharomyces pastorianus
tacacccctaaacacgctaatgttg

SEQ ID NO: 134956 - DNA, 25 bp, Saccharomyces pastorianus
gcttatcgtagtaacattttcacca

SEQ ID NO: 134957 - DNA, 25 bp, Saccharomyces pastorianus
gacagcgaagctagcatcgacgaga

SEQ ID NO: 134958 - DNA, 25 bp, Saccharomyces pastorianus
gacgacgctaatgatgaaaacctat

SEQ ID NO: 134959 - DNA, 25 bp, Saccharomyces pastorianus
gaaaacctatcatccaacttccata

SEQ ID NO: 134960 - DNA, 25 bp, Saccharomyces pastorianus
agtcaagattacaacgacgctgatg

SEQ ID NO: 134961 - DNA, 25 bp, Saccharomyces pastorianus
cagaaagattcagctcagattcccc

SEQ ID NO: 134962 - DNA, 25 bp, Saccharomyces pastorianus
aacggatttcattgactctgacggt

SEQ ID NO: 134963 - DNA, 25 bp, Saccharomyces pastorianus
actcacctactaaatctgcatcata

SEQ ID NO: 134964 - DNA, 25 bp, Saccharomyces pastorianus
atttcaacatccgtttcgacttctt

SEQ ID NO: 134965 - DNA, 25 bp, Saccharomyces pastorianus
tcgtcatcatcatcaatatctcctt

SEQ ID NO: 134966 - DNA, 25 bp, Saccharomyces pastorianus
tgtggcatcaacatcttcgacagtt

SEQ ID NO: 134967 - DNA, 25 bp, Saccharomyces pastorianus
tatcaacgccgagtatagcttcaat

SEQ ID NO: 134968 - DNA, 25 bp, Saccharomyces pastorianus
acatcgtcgtcttcttcggaggtta

SEQ ID NO: 134969 - DNA, 25 bp, Saccharomyces pastorianus
gaattgacatcatcctcgtactcat

SEQ ID NO: 134970 - DNA, 25 bp, Saccharomyces pastorianus
atgcaagtttcgtcgtcttcaacat

SEQ ID NO: 134971 - DNA, 25 bp, Saccharomyces pastorianus
actgcttactctttcgtcaacatta

SEQ ID NO: 134972 - DNA, 25 bp, Saccharomyces pastorianus
attatcttcagaactttcctcttcg

SEQ ID NO: 134973 - DNA, 25 bp, Saccharomyces pastorianus
tcggaggttacgtcatcatcgtcat

SEQ ID NO: 134974 - DNA, 25 bp, Saccharomyces pastorianus
ctagctcatcgttggttatctctac

SEQ ID NO: 134975 - DNA, 25 bp, Saccharomyces pastorianus
gaacatacaggaaggttgaccctcc

SEQ ID NO: 134976 - DNA, 25 bp, Saccharomyces pastorianus
tgaccctcctgacgtagagcaacta

SEQ ID NO: 134977 - DNA, 25 bp, Saccharomyces pastorianus
gaggtggatgtgtgaagcccacaat

SEQ ID NO: 134978 - DNA, 25 bp, Saccharomyces pastorianus
gagaaaatgcaccacaagttgagtc

SEQ ID NO: 134979 - DNA, 25 bp, Saccharomyces pastorianus
tgctcaacctacagaccaacagaag

SEQ ID NO: 134980 - DNA, 25 bp, Saccharomyces pastorianus
acagttcttgaatatcttctcacat

SEQ ID NO: 134981 - DNA, 25 bp, Saccharomyces pastorianus
tcatggacgctgttacactctgtag

SEQ ID NO: 134982 - DNA, 25 bp, Saccharomyces pastorianus
tgttacactctgtagctgccagcta

SEQ ID NO: 134983 - DNA, 25 bp, Saccharomyces pastorianus
tgtagctgccagctatcctgctcaa

SEQ ID NO: 134984 - DNA, 25 bp, Saccharomyces pastorianus
gaggaagcccaaatttgactgtaat

SEQ ID NO: 134985 - DNA, 25 bp, Saccharomyces pastorianus
aactaggtagatcttcatggacgct

SEQ ID NO: 134986 - DNA, 25 bp, Saccharomyces pastorianus
accgtatgttggattacgcaaagca

SEQ ID NO: 134987 - DNA, 25 bp, Saccharomyces pastorianus
gaagatggcaaaccgtatgttggat

SEQ ID NO: 134988 - DNA, 25 bp, Saccharomyces pastorianus
cgaagatggcaaaccgtatgttgga

SEQ ID NO: 134989 - DNA, 25 bp, Saccharomyces pastorianus
gcaaaccgtatgttggattacgcaa

SEQ ID NO: 134990 - DNA, 25 bp, Saccharomyces pastorianus
taatatatgacgaagatggcaaacc

SEQ ID NO: 134991 - DNA, 25 bp, Saccharomyces pastorianus
tgacgaagatggcaaaccgtatgtt

SEQ ID NO: 134992 - DNA, 25 bp, Saccharomyces pastorianus
aaccgtatgttggattacgcaaagc

SEQ ID NO: 134993 - DNA, 25 bp, Saccharomyces pastorianus
gtatgttggattacgcaaagcaatt

SEQ ID NO: 134994 - DNA, 25 bp, Saccharomyces pastorianus
tggcaaaccgtatgttggattacgc

SEQ ID NO: 134995 - DNA, 25 bp, Saccharomyces pastorianus
gatggcaaaccgtatgttggattac

SEQ ID NO: 134996 - DNA, 25 bp, Saccharomyces pastorianus
atatgacgaagatggcaaaccgtat

SEQ ID NO: 134997 - DNA, 25 bp, Saccharomyces pastorianus
tataccaacgacgaagctgcttctt

SEQ ID NO: 134998 - DNA, 25 bp, Saccharomyces pastorianus
tttttcctgccatttatttgtagtt

SEQ ID NO: 134999 - DNA, 25 bp, Saccharomyces pastorianus
agatcaaccgaaactataccaacga

SEQ ID NO: 135000 - DNA, 25 bp, Saccharomyces pastorianus
acgaagctgcttcttagtaaatata

SEQ ID NO: 135001 - DNA, 25 bp, Saccharomyces pastorianus
gttatatttatatctagatcaaccg

SEQ ID NO: 135002 - DNA, 25 bp, Saccharomyces pastorianus
ttttctactgtgtcaacgcattgga

SEQ ID NO: 135003 - DNA, 25 bp, Saccharomyces pastorianus
atgtcctgtgtcatttgcttcaatt

SEQ ID NO: 135004 - DNA, 25 bp, Saccharomyces pastorianus
atatattttctactgtgtcaacgca

SEQ ID NO: 135005 - DNA, 25 bp, Saccharomyces pastorianus
ctactgtgtcaacgcattggaactg

SEQ ID NO: 135006 - DNA, 25 bp, Saccharomyces pastorianus
cctgccatttatttgtagttatatt

SEQ ID NO: 135007 - DNA, 25 bp, Saccharomyces pastorianus
catttgcttcaatttttcctgccat

SEQ ID NO: 135008 - DNA, 25 bp, Saccharomyces pastorianus
ggtgggctttaccagcaaaaaagtg

SEQ ID NO: 135009 - DNA, 25 bp, Saccharomyces pastorianus
tactggataagaaaatccgaacttt

SEQ ID NO: 135010 - DNA, 25 bp, Saccharomyces pastorianus
tgtcacagattacatcaaaaggtcg

SEQ ID NO: 135011 - DNA, 25 bp, Saccharomyces pastorianus
cagcaaaaaagtggccgggcatgta

SEQ ID NO: 135012 - DNA, 25 bp, Saccharomyces pastorianus
aaggtcggcgtatactggataagaa

SEQ ID NO: 135013 - DNA, 25 bp, Saccharomyces pastorianus
acagattacatcaaaaggtcggcgt

SEQ ID NO: 135014 - DNA, 25 bp, Saccharomyces pastorianus
ttaccagcaaaaaagtggccgggca

SEQ ID NO: 135015 - DNA, 25 bp, Saccharomyces pastorianus
caaaaggtcggcgtatactggataa

SEQ ID NO: 135016 - DNA, 25 bp, Saccharomyces pastorianus
tacatcaaaaggtcggcgtatactg

SEQ ID NO: 135017 - DNA, 25 bp, Saccharomyces pastorianus
gtcggcgtatactggataagaaaat

SEQ ID NO: 135018 - DNA, 25 bp, Saccharomyces pastorianus
gattacatcaaaaggtcggcgtata

SEQ ID NO: 135019 - DNA, 25 bp, Saccharomyces pastorianus
atgaatacgtataggaagggaagtt

SEQ ID NO: 135020 - DNA, 25 bp, Saccharomyces pastorianus
tgaatacgtataggaagggaagttt

SEQ ID NO: 135021 - DNA, 25 bp, Saccharomyces pastorianus
gaatacgtataggaagggaagtttg

SEQ ID NO: 135022 - DNA, 25 bp, Saccharomyces pastorianus
tataggaagggaagtttgggacaga

SEQ ID NO: 135023 - DNA, 25 bp, Saccharomyces pastorianus
gaagggaagtttgggacagagacag

SEQ ID NO: 135024 - DNA, 25 bp, Saccharomyces pastorianus
agggaagtttgggacagagacagag

SEQ ID NO: 135025 - DNA, 25 bp, Saccharomyces pastorianus
taggaagggaagtttgggacagaga

SEQ ID NO: 135026 - DNA, 25 bp, Saccharomyces pastorianus
gggaagtttgggacagagacagaga

SEQ ID NO: 135027 - DNA, 25 bp, Saccharomyces pastorianus
ggaagtttgggacagagacagagac

SEQ ID NO: 135028 - DNA, 25 bp, Saccharomyces pastorianus
ggaagggaagtttgggacagagaca

SEQ ID NO: 135029 - DNA, 25 bp, Saccharomyces pastorianus
gtataggaagggaagtttgggacag

SEQ ID NO: 135030 - DNA, 25 bp, Saccharomyces pastorianus
gatatccagggtaaactcaagtaca

SEQ ID NO: 135031 - DNA, 25 bp, Saccharomyces pastorianus
gcttgttattagattgctacctcca

SEQ ID NO: 135032 - DNA, 25 bp, Saccharomyces pastorianus
agatatgaaactgtcgccctacgta

SEQ ID NO: 135033 - DNA, 25 bp, Saccharomyces pastorianus
aaactcgacatattctcggtgcaat

SEQ ID NO: 135034 - DNA, 25 bp, Saccharomyces pastorianus
gtcgccctacgtaaagaaattcact

SEQ ID NO: 135035 - DNA, 25 bp, Saccharomyces pastorianus
cggtgcaatttcttgttcgacaact

SEQ ID NO: 135036 - DNA, 25 bp, Saccharomyces pastorianus
gctacctccaaatttgactgcagat

SEQ ID NO: 135037 - DNA, 25 bp, Saccharomyces pastorianus
gttcgacaacttatcagacttggaa

SEQ ID NO: 135038 - DNA, 25 bp, Saccharomyces pastorianus
aaggatgccgcgctagtaggaacaa

SEQ ID NO: 135039 - DNA, 25 bp, Saccharomyces pastorianus
gacgagtactcattccaagatttta

SEQ ID NO: 135040 - DNA, 25 bp, Saccharomyces pastorianus
aacagagctggttggaactggtgat

SEQ ID NO: 135041 - DNA, 25 bp, Saccharomyces pastorianus
ttatattcggccatctatccacaca

SEQ ID NO: 135042 - DNA, 25 bp, Saccharomyces pastorianus
tatcccgcatactcgtctatttaaa

SEQ ID NO: 135043 - DNA, 25 bp, Saccharomyces pastorianus
ctagccatcgactggtggtacacaa

SEQ ID NO: 135044 - DNA, 25 bp, Saccharomyces pastorianus
aatcctcatcatttgatcggctggt

SEQ ID NO: 135045 - DNA, 25 bp, Saccharomyces pastorianus
tactatgggtgtcgcattcgtttgc

SEQ ID NO: 135046 - DNA, 25 bp, Saccharomyces pastorianus
ggttgaacatctgtctccagctaat

SEQ ID NO: 135047 - DNA, 25 bp, Saccharomyces pastorianus
tatagactcttcttattcctcacag

SEQ ID NO: 135048 - DNA, 25 bp, Saccharomyces pastorianus
gaacctttactgcatttcgatgtat

SEQ ID NO: 135049 - DNA, 25 bp, Saccharomyces pastorianus
acaacttccctcactacataattat

SEQ ID NO: 135050 - DNA, 25 bp, Saccharomyces pastorianus
ggtttcgagtctagaatcctcccta

SEQ ID NO: 135051 - DNA, 25 bp, Saccharomyces pastorianus
ggactctttgcacgagacgtatatc

SEQ ID NO: 135052 - DNA, 25 bp, Saccharomyces pastorianus
ctcagccagccgatttattgggaat

SEQ ID NO: 135053 - DNA, 25 bp, Saccharomyces pastorianus
accaaagatctattcctgaagccat

SEQ ID NO: 135054 - DNA, 25 bp, Saccharomyces pastorianus
tataaggcactgactgtataccctc

SEQ ID NO: 135055 - DNA, 25 bp, Saccharomyces pastorianus
ggaagcagcctctaagttttataag

SEQ ID NO: 135056 - DNA, 25 bp, Saccharomyces pastorianus
aaggcactgactgtataccctcagc

SEQ ID NO: 135057 - DNA, 25 bp, Saccharomyces pastorianus
gagttgttggaagcaaggccgaatc

SEQ ID NO: 135058 - DNA, 25 bp, Saccharomyces pastorianus
gtaaggaactggaagcagcctctaa

SEQ ID NO: 135059 - DNA, 25 bp, Saccharomyces pastorianus
cagccgatttattgggaatttacca

SEQ ID NO: 135060 - DNA, 25 bp, Saccharomyces pastorianus
tgttggaagcaaggccgaatctgat

SEQ ID NO: 135061 - DNA, 25 bp, Saccharomyces pastorianus
tataccctcagccagccgatttatt

SEQ ID NO: 135062 - DNA, 25 bp, Saccharomyces pastorianus
atttaccaaagatctattcctgaag

SEQ ID NO: 135063 - DNA, 25 bp, Saccharomyces pastorianus
aaaagctgattcatgggcctcacgc

SEQ ID NO: 135064 - DNA, 25 bp, Saccharomyces pastorianus
taaggacgcctacggtatctcgcag

SEQ ID NO: 135065 - DNA, 25 bp, Saccharomyces pastorianus
gcccgtctttgatgctccggaaagt

SEQ ID NO: 135066 - DNA, 25 bp, Saccharomyces pastorianus
gggtctttgcagttaaccgtccaag

SEQ ID NO: 135067 - DNA, 25 bp, Saccharomyces pastorianus
tgctagcacgcccttgaaacaagag

SEQ ID NO: 135068 - DNA, 25 bp, Saccharomyces pastorianus
gatgttatcatttccgagaccggca

SEQ ID NO: 135069 - DNA, 25 bp, Saccharomyces pastorianus
gagcaactttaggtgctgcctttgc

SEQ ID NO: 135070 - DNA, 25 bp, Saccharomyces pastorianus
gggatgccttaaccactgattcaga

SEQ ID NO: 135071 - DNA, 25 bp, Saccharomyces pastorianus
aattgaactgaaactgcccgtcttt

SEQ ID NO: 135072 - DNA, 25 bp, Saccharomyces pastorianus
ctgttgcccgcatttggtgcgaaaa

SEQ ID NO: 135073 - DNA, 25 bp, Saccharomyces pastorianus
ttgccgctgaggagattgaccccaa

SEQ ID NO: 135074 - DNA, 25 bp, Saccharomyces pastorianus
agaacgatccaagcggtattcttta

SEQ ID NO: 135075 - DNA, 25 bp, Saccharomyces pastorianus
ggtttgaaatcatcctgtggtatac

SEQ ID NO: 135076 - DNA, 25 bp, Saccharomyces pastorianus
agtagccgtgaatcttttacagaca

SEQ ID NO: 135077 - DNA, 25 bp, Saccharomyces pastorianus
ggatccaacataccagttagtgaag

SEQ ID NO: 135078 - DNA, 25 bp, Saccharomyces pastorianus
atcaatcttttattcacgcctggat

SEQ ID NO: 135079 - DNA, 25 bp, Saccharomyces pastorianus
attctttattcatcaggtatcccac

SEQ ID NO: 135080 - DNA, 25 bp, Saccharomyces pastorianus
agccccatcgaactttccagagaat

SEQ ID NO: 135081 - DNA, 25 bp, Saccharomyces pastorianus
taaagccactcttcaagggagccca

SEQ ID NO: 135082 - DNA, 25 bp, Saccharomyces pastorianus
gatcccaacggtacacatttgcaat

SEQ ID NO: 135083 - DNA, 25 bp, Saccharomyces pastorianus
actacccattgctacaaggcttaca

SEQ ID NO: 135084 - DNA, 25 bp, Saccharomyces pastorianus
ggtatactttcagccacagagttca

SEQ ID NO: 135085 - DNA, 25 bp, Saccharomyces pastorianus
gaatttactatcttgatggcagcgt

SEQ ID NO: 135086 - DNA, 25 bp, Saccharomyces pastorianus
ctttagctgctacatttgggtcaat

SEQ ID NO: 135087 - DNA, 25 bp, Saccharomyces pastorianus
tctaatccagagaattcctccagtt

SEQ ID NO: 135088 - DNA, 25 bp, Saccharomyces pastorianus
tatgtcgcattctggttcattgggt

SEQ ID NO: 135089 - DNA, 25 bp, Saccharomyces pastorianus
gatgagggtttccaaactccaacct

SEQ ID NO: 135090 - DNA, 25 bp, Saccharomyces pastorianus
attacttcacgggttttcatcatac

SEQ ID NO: 135091 - DNA, 25 bp, Saccharomyces pastorianus
actatggatttgtgccacgacggcc

SEQ ID NO: 135092 - DNA, 25 bp, Saccharomyces pastorianus
gggttttcatccaatatgtcgcatt

SEQ ID NO: 135093 - DNA, 25 bp, Saccharomyces pastorianus
atggctgcagcaacgtgggttttca

SEQ ID NO: 135094 - DNA, 25 bp, Saccharomyces pastorianus
gacggccatttacaatttcattcta

SEQ ID NO: 135095 - DNA, 25 bp, Saccharomyces pastorianus
ctccagttcaccagcttctaaatat

SEQ ID NO: 135096 - DNA, 25 bp, Saccharomyces pastorianus
ggctgacatggccaaatatgctgat

SEQ ID NO: 135097 - DNA, 25 bp, Saccharomyces pastorianus
tgacttcaccagtgaggctgacatg

SEQ ID NO: 135098 - DNA, 25 bp, Saccharomyces pastorianus
catcaaaacttgttgggttcacttt

SEQ ID NO: 135099 - DNA, 25 bp, Saccharomyces pastorianus
gacagcgaaactgatgccggttatt

SEQ ID NO: 135100 - DNA, 25 bp, Saccharomyces pastorianus
ggtaaacagggttccagtggcatct

SEQ ID NO: 135101 - DNA, 25 bp, Saccharomyces pastorianus
gttgggttcactttccgacatagaa

SEQ ID NO: 135102 - DNA, 25 bp, Saccharomyces pastorianus
tgactcggcagtatcatcaaaactt

SEQ ID NO: 135103 - DNA, 25 bp, Saccharomyces pastorianus
ttaacggctatggtagatgactcgg

SEQ ID NO: 135104 - DNA, 25 bp, Saccharomyces pastorianus
gtggcatcttattcaacggactgga

SEQ ID NO: 135105 - DNA, 25 bp, Saccharomyces pastorianus
gccggttattttgatgacttcacca

SEQ ID NO: 135106 - DNA, 25 bp, Saccharomyces pastorianus
ttttacaccccaactagacagcgaa

SEQ ID NO: 135107 - DNA, 25 bp, Saccharomyces pastorianus
actggtcgttgggttgtatgctgtt

SEQ ID NO: 135108 - DNA, 25 bp, Saccharomyces pastorianus
acaccatttagtggatcatcgacta

SEQ ID NO: 135109 - DNA, 25 bp, Saccharomyces pastorianus
tatgcgaactccatggttgggtctc

SEQ ID NO: 135110 - DNA, 25 bp, Saccharomyces pastorianus
ctggaatttccagcgtttacagaga

SEQ ID NO: 135111 - DNA, 25 bp, Saccharomyces pastorianus
taccaggcggtgattttcgtacatt

SEQ ID NO: 135112 - DNA, 25 bp, Saccharomyces pastorianus
ttgggtctccggattatatggcttt

SEQ ID NO: 135113 - DNA, 25 bp, Saccharomyces pastorianus
atgcgttacatgatttaggctatac

SEQ ID NO: 135114 - DNA, 25 bp, Saccharomyces pastorianus
agattttggtttggctgctggtacg

SEQ ID NO: 135115 - DNA, 25 bp, Saccharomyces pastorianus
aagtggccatgcgagattttacatc

SEQ ID NO: 135116 - DNA, 25 bp, Saccharomyces pastorianus
acttcttaatcgatgccaagggaca

SEQ ID NO: 135117 - DNA, 25 bp, Saccharomyces pastorianus
actttactgtggattactggtcgtt

SEQ ID NO: 135118 - DNA, 25 bp, Saccharomyces pastorianus
actattgtttaagctcaacgagaca

SEQ ID NO: 135119 - DNA, 25 bp, Saccharomyces pastorianus
tcccaagaagcttccaccaaagttt

SEQ ID NO: 135120 - DNA, 25 bp, Saccharomyces pastorianus
tgcaacagcaaagccaacttccgaa

SEQ ID NO: 135121 - DNA, 25 bp, Saccharomyces pastorianus
gacatagacgaagtatctcaacctg

SEQ ID NO: 135122 - DNA, 25 bp, Saccharomyces pastorianus
cacagagagttgttagtgtttgcaa

SEQ ID NO: 135123 - DNA, 25 bp, Saccharomyces pastorianus
aagttctagaatacctgcaacagca

SEQ ID NO: 135124 - DNA, 25 bp, Saccharomyces pastorianus
gacaacgcacgaagcaagttctaga

SEQ ID NO: 135125 - DNA, 25 bp, Saccharomyces pastorianus
ggatgtctcgaactctcccaagaag

SEQ ID NO: 135126 - DNA, 25 bp, Saccharomyces pastorianus
ccaacttccgaattctgaccagatt

SEQ ID NO: 135127 - DNA, 25 bp, Saccharomyces pastorianus
agagtggtcctcttacttacaaagg

SEQ ID NO: 135128 - DNA, 25 bp, Saccharomyces pastorianus
tctcaacctgatatggatgtctcga

SEQ ID NO: 135129 - DNA, 25 bp, Saccharomyces pastorianus
gagcaatttgagtttcgatgggcat

SEQ ID NO: 135130 - DNA, 25 bp, Saccharomyces pastorianus
gggcactggactgtttcctaaccaa

SEQ ID NO: 135131 - DNA, 25 bp, Saccharomyces pastorianus
aaggcctgtgggtatcaatgattca

SEQ ID NO: 135132 - DNA, 25 bp, Saccharomyces pastorianus
tcaatgattcaccttcgccggtaaa

SEQ ID NO: 135133 - DNA, 25 bp, Saccharomyces pastorianus
ctcttggcaggcaatatgagcaatt

SEQ ID NO: 135134 - DNA, 25 bp, Saccharomyces pastorianus
tggactgtttcctaaccaaaatata

SEQ ID NO: 135135 - DNA, 25 bp, Saccharomyces pastorianus
gggtatcaatgattcaccttcgccg

SEQ ID NO: 135136 - DNA, 25 bp, Saccharomyces pastorianus
tttgagtttcgatgggcatgggact

SEQ ID NO: 135137 - DNA, 25 bp, Saccharomyces pastorianus
gaggacaaggcctgtgggtatcaat

SEQ ID NO: 135138 - DNA, 25 bp, Saccharomyces pastorianus
atgattcaccttcgccggtaaacca

SEQ ID NO: 135139 - DNA, 25 bp, Saccharomyces pastorianus
tttcgatgggcatgggactcctggg

SEQ ID NO: 135140 - DNA, 25 bp, Saccharomyces pastorianus
gagactcctgaagcggacccaaaga

SEQ ID NO: 135141 - DNA, 25 bp, Saccharomyces pastorianus
cattgcctcattattcccattgaac

SEQ ID NO: 135142 - DNA, 25 bp, Saccharomyces pastorianus
aatacctcgttctaaagttctgcag

SEQ ID NO: 135143 - DNA, 25 bp, Saccharomyces pastorianus
gacgacgtgtactagcctttttact

SEQ ID NO: 135144 - DNA, 25 bp, Saccharomyces pastorianus
tttttacttaacttgccacgcaggg

SEQ ID NO: 135145 - DNA, 25 bp, Saccharomyces pastorianus
atggaattcttcaacctgtttacaa

SEQ ID NO: 135146 - DNA, 25 bp, Saccharomyces pastorianus
aatttaccgtctacgagactcctga

SEQ ID NO: 135147 - DNA, 25 bp, Saccharomyces pastorianus
gaacgttctattcatttccacaaac

SEQ ID NO: 135148 - DNA, 25 bp, Saccharomyces pastorianus
atgttacgattcacactcttccaaa

SEQ ID NO: 135149 - DNA, 25 bp, Saccharomyces pastorianus
tatggatatctcaggccattgcctc

SEQ ID NO: 135150 - DNA, 25 bp, Saccharomyces pastorianus
tagatctgcagtttggacgacgtgt

SEQ ID NO: 135151 - DNA, 25 bp, Saccharomyces pastorianus
tagaggcgcgcttacatagtcttgt

SEQ ID NO: 135152 - DNA, 25 bp, Saccharomyces pastorianus
atctggaaaagttctcccgtcattc

SEQ ID NO: 135153 - DNA, 25 bp, Saccharomyces pastorianus
atagtcttgttgtcggagcctttgc

SEQ ID NO: 135154 - DNA, 25 bp, Saccharomyces pastorianus
gcataaccagttccatcgtttccta

SEQ ID NO: 135155 - DNA, 25 bp, Saccharomyces pastorianus
tacggacccgactagttgccaacaa

SEQ ID NO: 135156 - DNA, 25 bp, Saccharomyces pastorianus
cgatccgtaggcgaatgcagttcat

SEQ ID NO: 135157 - DNA, 25 bp, Saccharomyces pastorianus
gtcattcgtctgtatacggttctta

SEQ ID NO: 135158 - DNA, 25 bp, Saccharomyces pastorianus
agaggtattctggtggccctttcca

SEQ ID NO: 135159 - DNA, 25 bp, Saccharomyces pastorianus
taaatcacagcgctggtaccattgg

SEQ ID NO: 135160 - DNA, 25 bp, Saccharomyces pastorianus
tggaaactagaaggtctccccggat

SEQ ID NO: 135161 - DNA, 25 bp, Saccharomyces pastorianus
ggcggcgtcattgctaagatcatta

SEQ ID NO: 135162 - DNA, 25 bp, Saccharomyces pastorianus
acgctcccgttgtacctaaggtgat

SEQ ID NO: 135163 - DNA, 25 bp, Saccharomyces pastorianus
caatgttccttgtttgactgctgaa

SEQ ID NO: 135164 - DNA, 25 bp, Saccharomyces pastorianus
tgcgcaccctgctttctataaacgg

SEQ ID NO: 135165 - DNA, 25 bp, Saccharomyces pastorianus
gcgaatcaccataccaaaccttaaa

SEQ ID NO: 135166 - DNA, 25 bp, Saccharomyces pastorianus
gctgaaaagactcatgcgcaccctg

SEQ ID NO: 135167 - DNA, 25 bp, Saccharomyces pastorianus
ggtgcaccctatccgaaaacacaag

SEQ ID NO: 135168 - DNA, 25 bp, Saccharomyces pastorianus
gaattcgtccgtcacaacgatcaac

SEQ ID NO: 135169 - DNA, 25 bp, Saccharomyces pastorianus
gcgcccaaaatttgactacctctag

SEQ ID NO: 135170 - DNA, 25 bp, Saccharomyces pastorianus
gagaaactctgaaggctctagccca

SEQ ID NO: 135171 - DNA, 25 bp, Saccharomyces pastorianus
aaaactgttgctgccgatcagtctg

SEQ ID NO: 135172 - DNA, 25 bp, Saccharomyces pastorianus
agttcaacagcttctagggtgcacc

SEQ ID NO: 135173 - DNA, 25 bp, Saccharomyces pastorianus
ttcccatacaccttgtttaacagat

SEQ ID NO: 135174 - DNA, 25 bp, Saccharomyces pastorianus
gtgaacataggttcccatacacctt

SEQ ID NO: 135175 - DNA, 25 bp, Saccharomyces pastorianus
cagcgtgaacataggttcccataca

SEQ ID NO: 135176 - DNA, 25 bp, Saccharomyces pastorianus
cataggttcccatacaccttgttta

SEQ ID NO: 135177 - DNA, 25 bp, Saccharomyces pastorianus
ttgtttaacagatagcacattcacc

SEQ ID NO: 135178 - DNA, 25 bp, Saccharomyces pastorianus
aacataggttcccatacaccttgtt

SEQ ID NO: 135179 - DNA, 25 bp, Saccharomyces pastorianus
gaaacagcgtgaacataggttccca

SEQ ID NO: 135180 - DNA, 25 bp, Saccharomyces pastorianus
atacaccttgtttaacagatagcac

SEQ ID NO: 135181 - DNA, 25 bp, Saccharomyces pastorianus
ggttcccatacaccttgtttaacag

SEQ ID NO: 135182 - DNA, 25 bp, Saccharomyces pastorianus
catatgtcaagaaacagcgtgaaca

SEQ ID NO: 135183 - DNA, 25 bp, Saccharomyces pastorianus
aacagcgtgaacataggttcccata

SEQ ID NO: 135184 - DNA, 25 bp, Saccharomyces pastorianus
taacaatcatcatcgccaggctagt

SEQ ID NO: 135185 - DNA, 25 bp, Saccharomyces pastorianus
acaactggtggtacagctggtgcaa

SEQ ID NO: 135186 - DNA, 25 bp, Saccharomyces pastorianus
ttccgtttccattgcagacacttat

SEQ ID NO: 135187 - DNA, 25 bp, Saccharomyces pastorianus
gatgcatcttccaccaaatttgttc

SEQ ID NO: 135188 - DNA, 25 bp, Saccharomyces pastorianus
gcacttatttatctggctcttcaca

SEQ ID NO: 135189 - DNA, 25 bp, Saccharomyces pastorianus
tggaccaattttacgctgcagctca

SEQ ID NO: 135190 - DNA, 25 bp, Saccharomyces pastorianus
ggcaccgattatgagtattccgcta

SEQ ID NO: 135191 - DNA, 25 bp, Saccharomyces pastorianus
tttcaaaagccccattccacaagtt

SEQ ID NO: 135192 - DNA, 25 bp, Saccharomyces pastorianus
gcaaatggtattcgcggtattcgca

SEQ ID NO: 135193 - DNA, 25 bp, Saccharomyces pastorianus
aagtcttcagcttattcttcttccg

SEQ ID NO: 135194 - DNA, 25 bp, Saccharomyces pastorianus
atagtatctccagagccttctgaag

SEQ ID NO: 135195 - DNA, 25 bp, Saccharomyces pastorianus
tacgttacttgaacggcgcagctcc

SEQ ID NO: 135196 - DNA, 25 bp, Saccharomyces pastorianus
gaggtgtatgccatctacgttactt

SEQ ID NO: 135197 - DNA, 25 bp, Saccharomyces pastorianus
atagcctatctgtttcatatgccgt

SEQ ID NO: 135198 - DNA, 25 bp, Saccharomyces pastorianus
gaggatgccctatggtactaggtaa

SEQ ID NO: 135199 - DNA, 25 bp, Saccharomyces pastorianus
atgggatttcgctgtaatactgacg

SEQ ID NO: 135200 - DNA, 25 bp, Saccharomyces pastorianus
tttcatatgccgtctctaaatctag

SEQ ID NO: 135201 - DNA, 25 bp, Saccharomyces pastorianus
atacttatttgctgggaggatgccc

SEQ ID NO: 135202 - DNA, 25 bp, Saccharomyces pastorianus
attcgtttatatagggcatggcgga

SEQ ID NO: 135203 - DNA, 25 bp, Saccharomyces pastorianus
ttatcgcgtttccattaccaactac

SEQ ID NO: 135204 - DNA, 25 bp, Saccharomyces pastorianus
gcaaaaccttcctctcaattagtga

SEQ ID NO: 135205 - DNA, 25 bp, Saccharomyces pastorianus
tttttactgggctgctcttcagcag

SEQ ID NO: 135206 - DNA, 25 bp, Saccharomyces pastorianus
aaacatctcatcgtactatactgaa

SEQ ID NO: 135207 - DNA, 25 bp, Saccharomyces pastorianus
cattccttccgaaaattggtcacaa

SEQ ID NO: 135208 - DNA, 25 bp, Saccharomyces pastorianus
agtgtccttttcaatgcttctgttt

SEQ ID NO: 135209 - DNA, 25 bp, Saccharomyces pastorianus
gggtatctttgatttggatccttta

SEQ ID NO: 135210 - DNA, 25 bp, Saccharomyces pastorianus
gatacgctatcatttgtttttgact

SEQ ID NO: 135211 - DNA, 25 bp, Saccharomyces pastorianus
attcattcattgctttacacgccta

SEQ ID NO: 135212 - DNA, 25 bp, Saccharomyces pastorianus
taaagagcctaaacgactgtcaaat

SEQ ID NO: 135213 - DNA, 25 bp, Saccharomyces pastorianus
gcagaatgatattttgctcactgag

SEQ ID NO: 135214 - DNA, 25 bp, Saccharomyces pastorianus
gaaatcttttcctgtttgttcaatg

SEQ ID NO: 135215 - DNA, 25 bp, Saccharomyces pastorianus
tatccgaacttctgggagttttatc

SEQ ID NO: 135216 - DNA, 25 bp, Saccharomyces pastorianus
atatctagtgctcagagtgcccaga

SEQ ID NO: 135217 - DNA, 25 bp, Saccharomyces pastorianus
ttcacgtcagagcatcaacccgaga

SEQ ID NO: 135218 - DNA, 25 bp, Saccharomyces pastorianus
aaggtcttttgagcctttgtcggca

SEQ ID NO: 135219 - DNA, 25 bp, Saccharomyces pastorianus
ctttgtcggcaaattcctcggaaga

SEQ ID NO: 135220 - DNA, 25 bp, Saccharomyces pastorianus
cgtcgtgtcgattcggtggcaacta

SEQ ID NO: 135221 - DNA, 25 bp, Saccharomyces pastorianus
aacagccgctgcaagttcaataact

SEQ ID NO: 135222 - DNA, 25 bp, Saccharomyces pastorianus
tacgagcttttcttttctaatactt

SEQ ID NO: 135223 - DNA, 25 bp, Saccharomyces pastorianus
attgcttctgtagagagtacgccaa

SEQ ID NO: 135224 - DNA, 25 bp, Saccharomyces pastorianus
ctaaagcagttgatctcgcggagga

SEQ ID NO: 135225 - DNA, 25 bp, Saccharomyces pastorianus
aaagttcctggtttgagatcgacga

SEQ ID NO: 135226 - DNA, 25 bp, Saccharomyces pastorianus
agttgctgagcaagttcgtcgtcgt

SEQ ID NO: 135227 - DNA, 25 bp, Saccharomyces pastorianus
acgatcatctgttcacgtcgacgaa

SEQ ID NO: 135228 - DNA, 25 bp, Saccharomyces pastorianus
aagagtttagtgtcatcagcgagga

SEQ ID NO: 135229 - DNA, 25 bp, Saccharomyces pastorianus
aagtgctacagttgtcggaagggct

SEQ ID NO: 135230 - DNA, 25 bp, Saccharomyces pastorianus
acctgtccagtgatgacttgtccaa

SEQ ID NO: 135231 - DNA, 25 bp, Saccharomyces pastorianus
ggaagggctgctactgctagacctg

SEQ ID NO: 135232 - DNA, 25 bp, Saccharomyces pastorianus
agagctgttagttacggctttcaaa

SEQ ID NO: 135233 - DNA, 25 bp, Saccharomyces pastorianus
ggacaaagatccagctttccggaaa

SEQ ID NO: 135234 - DNA, 25 bp, Saccharomyces pastorianus
ctgtgactcctgtagaccgtgtgaa

SEQ ID NO: 135235 - DNA, 25 bp, Saccharomyces pastorianus
tgccaaaaactttcaacctgtccag

SEQ ID NO: 135236 - DNA, 25 bp, Saccharomyces pastorianus
gaacgatgtggtaacaggcttggat

SEQ ID NO: 135237 - DNA, 25 bp, Saccharomyces pastorianus
acgcaactgcgccatatgccaaaaa

SEQ ID NO: 135238 - DNA, 25 bp, Saccharomyces pastorianus
gattctgctcatatcggcgagttga

SEQ ID NO: 135239 - DNA, 25 bp, Saccharomyces pastorianus
tcagccacagtggatatttgattgt

SEQ ID NO: 135240 - DNA, 25 bp, Saccharomyces pastorianus
aaggcgaattggtacctgccaacaa

SEQ ID NO: 135241 - DNA, 25 bp, Saccharomyces pastorianus
tgttgacaggccagttttgaaaaac

SEQ ID NO: 135242 - DNA, 25 bp, Saccharomyces pastorianus
gggaggctcttccacctcacttaag

SEQ ID NO: 135243 - DNA, 25 bp, Saccharomyces pastorianus
aaacaaggtagctggcagaacgtat

SEQ ID NO: 135244 - DNA, 25 bp, Saccharomyces pastorianus
acctgccaacaaatatcttccaggg

SEQ ID NO: 135245 - DNA, 25 bp, Saccharomyces pastorianus
gaaggatattgacatgtccaaggtc

SEQ ID NO: 135246 - DNA, 25 bp, Saccharomyces pastorianus
gacgatgacgaagagctacaagctc

SEQ ID NO: 135247 - DNA, 25 bp, Saccharomyces pastorianus
ggtatcaaatattccgaaacttcag

SEQ ID NO: 135248 - DNA, 25 bp, Saccharomyces pastorianus
gtccaaggtcactcatcaaattgtt

SEQ ID NO: 135249 - DNA, 25 bp, Saccharomyces pastorianus
gaacgtatattcagccacagtggat

SEQ ID NO: 135250 - DNA, 25 bp, Saccharomyces pastorianus
gaacgcttggttcgtaaagtgtttg

SEQ ID NO: 135251 - DNA, 25 bp, Saccharomyces pastorianus
gcaaacaagggctctactgcaccaa

SEQ ID NO: 135252 - DNA, 25 bp, Saccharomyces pastorianus
tctactgcaccaactactttttact

SEQ ID NO: 135253 - DNA, 25 bp, Saccharomyces pastorianus
gaccatattatcaaggagcgttatc

SEQ ID NO: 135254 - DNA, 25 bp, Saccharomyces pastorianus
gagcgttatccaagtttcccagatg

SEQ ID NO: 135255 - DNA, 25 bp, Saccharomyces pastorianus
agaagtctcttctgctaaaaggtta

SEQ ID NO: 135256 - DNA, 25 bp, Saccharomyces pastorianus
aaggtatctatcctagagagccaag

SEQ ID NO: 135257 - DNA, 25 bp, Saccharomyces pastorianus
gagaacacaagacttttgctaggaa

SEQ ID NO: 135258 - DNA, 25 bp, Saccharomyces pastorianus
atctaatgcatgagcccgttttggc

SEQ ID NO: 135259 - DNA, 25 bp, Saccharomyces pastorianus
aatggttagcctatgttgccaagga

SEQ ID NO: 135260 - DNA, 25 bp, Saccharomyces pastorianus
taatttgccctctaccaaccaggtt

SEQ ID NO: 135261 - DNA, 25 bp, Saccharomyces pastorianus
atgttccccttggtcattgcaaatt

SEQ ID NO: 135262 - DNA, 25 bp, Saccharomyces pastorianus
gcaaatttcagatattcctgctgca

SEQ ID NO: 135263 - DNA, 25 bp, Saccharomyces pastorianus
ccttcaaacgaatcatgttcccctt

SEQ ID NO: 135264 - DNA, 25 bp, Saccharomyces pastorianus
atgtcgacatggatgcaagtcccgc

SEQ ID NO: 135265 - DNA, 25 bp, Saccharomyces pastorianus
tgcacaacacagttccgcaagttac

SEQ ID NO: 135266 - DNA, 25 bp, Saccharomyces pastorianus
gtatcctcgctcatgaacggattgg

SEQ ID NO: 135267 - DNA, 25 bp, Saccharomyces pastorianus
taagtgtacccgatagacagtcaat

SEQ ID NO: 135268 - DNA, 25 bp, Saccharomyces pastorianus
atcccgcttaactatgctataacac

SEQ ID NO: 135269 - DNA, 25 bp, Saccharomyces pastorianus
gactatcatattatcttcagctggc

SEQ ID NO: 135270 - DNA, 25 bp, Saccharomyces pastorianus
ggcaaaaactcttcagtatcctcgc

SEQ ID NO: 135271 - DNA, 25 bp, Saccharomyces pastorianus
taacacggaatatcttgcacaacac

SEQ ID NO: 135272 - DNA, 25 bp, Saccharomyces pastorianus
gacggtgcatgctctgtggaagata

SEQ ID NO: 135273 - DNA, 25 bp, Saccharomyces pastorianus
gccggaaactctatatttggccata

SEQ ID NO: 135274 - DNA, 25 bp, Saccharomyces pastorianus
actatatcccgtttgccaattactg

SEQ ID NO: 135275 - DNA, 25 bp, Saccharomyces pastorianus
tattaccgtcattatgtgcctcagc

SEQ ID NO: 135276 - DNA, 25 bp, Saccharomyces pastorianus
gggcacctgggatggcaacttaatc

SEQ ID NO: 135277 - DNA, 25 bp, Saccharomyces pastorianus
tcagcggcaatgttcctttcgagaa

SEQ ID NO: 135278 - DNA, 25 bp, Saccharomyces pastorianus
taagtttggccttctgccggaaact

SEQ ID NO: 135279 - DNA, 25 bp, Saccharomyces pastorianus
gtggacttcaagttcatcgggatat

SEQ ID NO: 135280 - DNA, 25 bp, Saccharomyces pastorianus
aggaaatatactcccctagcataaa

SEQ ID NO: 135281 - DNA, 25 bp, Saccharomyces pastorianus
ggttggtacatcatgcctgttcatc

SEQ ID NO: 135282 - DNA, 25 bp, Saccharomyces pastorianus
gttggatctactattcacgacgagt

SEQ ID NO: 135283 - DNA, 25 bp, Saccharomyces pastorianus
gtcccaaggaccattctcggtaatg

SEQ ID NO: 135284 - DNA, 25 bp, Saccharomyces pastorianus
gactgccttgagctgtaatcggttg

SEQ ID NO: 135285 - DNA, 25 bp, Saccharomyces pastorianus
gcagcagtgctcaaatgatgactct

SEQ ID NO: 135286 - DNA, 25 bp, Saccharomyces pastorianus
aaaggatgaggtttcgagagccgat

SEQ ID NO: 135287 - DNA, 25 bp, Saccharomyces pastorianus
gtttcgagagccgatgacttcacct

SEQ ID NO: 135288 - DNA, 25 bp, Saccharomyces pastorianus
gaacaagtctatttccactcaaatg

SEQ ID NO: 135289 - DNA, 25 bp, Saccharomyces pastorianus
taatcggttgatatactctgagaac

SEQ ID NO: 135290 - DNA, 25 bp, Saccharomyces pastorianus
tatcctgcaagagatttctatgaac

SEQ ID NO: 135291 - DNA, 25 bp, Saccharomyces pastorianus
gatgactcttttcatacgaattcga

SEQ ID NO: 135292 - DNA, 25 bp, Saccharomyces pastorianus
acttcacctcctcttttaatgacag

SEQ ID NO: 135293 - DNA, 25 bp, Saccharomyces pastorianus
atacgaattcgactgccttgagctg

SEQ ID NO: 135294 - DNA, 25 bp, Saccharomyces pastorianus
gtaacgtcatcattgttcctcattc

SEQ ID NO: 135295 - DNA, 25 bp, Saccharomyces pastorianus
agcgtggttcaggtgaatacttatt

SEQ ID NO: 135296 - DNA, 25 bp, Saccharomyces pastorianus
gggcatcacttgtacctggataact

SEQ ID NO: 135297 - DNA, 25 bp, Saccharomyces pastorianus
aagctttgctttgaaatgtggtggt

SEQ ID NO: 135298 - DNA, 25 bp, Saccharomyces pastorianus
gagcagcagctattcgatggcaaaa

SEQ ID NO: 135299 - DNA, 25 bp, Saccharomyces pastorianus
atgtggtggtgaaccaagactttca

SEQ ID NO: 135300 - DNA, 25 bp, Saccharomyces pastorianus
gctttggctttatggcgatgacgat

SEQ ID NO: 135301 - DNA, 25 bp, Saccharomyces pastorianus
aagactttcattggagcagcagcta

SEQ ID NO: 135302 - DNA, 25 bp, Saccharomyces pastorianus
gtggacttagagtatcaagattctt

SEQ ID NO: 135303 - DNA, 25 bp, Saccharomyces pastorianus
attgttcctcattcagggcatcact

SEQ ID NO: 135304 - DNA, 25 bp, Saccharomyces pastorianus
gtaattgtgactggctttggcttta

SEQ ID NO: 135305 - DNA, 25 bp, Saccharomyces pastorianus
gaaagtccatcttacatacaatcag

SEQ ID NO: 135306 - DNA, 25 bp, Saccharomyces pastorianus
ggcgctgatttacccatcgaaaacg

SEQ ID NO: 135307 - DNA, 25 bp, Saccharomyces pastorianus
gtgactaaaaccacgcgtttgaata

SEQ ID NO: 135308 - DNA, 25 bp, Saccharomyces pastorianus
ggtcacgtgactaaaaccacgcgtt

SEQ ID NO: 135309 - DNA, 25 bp, Saccharomyces pastorianus
agaaatagcattgcttccggcgctg

SEQ ID NO: 135310 - DNA, 25 bp, Saccharomyces pastorianus
atagcattgcttccggcgctgattt

SEQ ID NO: 135311 - DNA, 25 bp, Saccharomyces pastorianus
gtccatcttacatacaatcagaaat

SEQ ID NO: 135312 - DNA, 25 bp, Saccharomyces pastorianus
ttacccatcgaaaacgacaatgttg

SEQ ID NO: 135313 - DNA, 25 bp, Saccharomyces pastorianus
aaatcatctcaaggtcacgtgacta

SEQ ID NO: 135314 - DNA, 25 bp, Saccharomyces pastorianus
accacgcgtttgaataataatacca

SEQ ID NO: 135315 - DNA, 25 bp, Saccharomyces pastorianus
tccaaatcatctcaaggtcacgtga

SEQ ID NO: 135316 - DNA, 25 bp, Saccharomyces pastorianus
gagaatgccatacaacagcttctgt

SEQ ID NO: 135317 - DNA, 25 bp, Saccharomyces pastorianus
gaatatcgtttgtccattggtagcg

SEQ ID NO: 135318 - DNA, 25 bp, Saccharomyces pastorianus
gaactgagcgattcaatcattactt

SEQ ID NO: 135319 - DNA, 25 bp, Saccharomyces pastorianus
gaatcctcgtccctgacaaaatttg

SEQ ID NO: 135320 - DNA, 25 bp, Saccharomyces pastorianus
gaccacaaggtctgccacggaatat

SEQ ID NO: 135321 - DNA, 25 bp, Saccharomyces pastorianus
attggtagcgctccgacttcaagaa

SEQ ID NO: 135322 - DNA, 25 bp, Saccharomyces pastorianus
tactttagattccaatttcacgcac

SEQ ID NO: 135323 - DNA, 25 bp, Saccharomyces pastorianus
ggactaacaagttccgttggcgaat

SEQ ID NO: 135324 - DNA, 25 bp, Saccharomyces pastorianus
cacgcacttgaattttatccacgag

SEQ ID NO: 135325 - DNA, 25 bp, Saccharomyces pastorianus
ggtcgtctatgggtgaatcctcgtc

SEQ ID NO: 135326 - DNA, 25 bp, Saccharomyces pastorianus
aacagcttctgttgcctaaaataag

SEQ ID NO: 135327 - DNA, 25 bp, Saccharomyces pastorianus
tatctttcttcctccttttgcttta

SEQ ID NO: 135328 - DNA, 25 bp, Saccharomyces pastorianus
tgttcgcttgggttattcttcaaag

SEQ ID NO: 135329 - DNA, 25 bp, Saccharomyces pastorianus
aggcaattaatgacctgttcgcttg

SEQ ID NO: 135330 - DNA, 25 bp, Saccharomyces pastorianus
attaatgacctgttcgcttgggtta

SEQ ID NO: 135331 - DNA, 25 bp, Saccharomyces pastorianus
atcaatatctttcttcctccttttg

SEQ ID NO: 135332 - DNA, 25 bp, Saccharomyces pastorianus
aaatcaatatctttcttcctccttt

SEQ ID NO: 135333 - DNA, 25 bp, Saccharomyces pastorianus
gggttattcttcaaagcacaaatca

SEQ ID NO: 135334 - DNA, 25 bp, Saccharomyces pastorianus
aatatctttcttcctccttttgctt

SEQ ID NO: 135335 - DNA, 25 bp, Saccharomyces pastorianus
acctgttcgcttgggttattcttca

SEQ ID NO: 135336 - DNA, 25 bp, Saccharomyces pastorianus
atgacctgttcgcttgggttattct

SEQ ID NO: 135337 - DNA, 25 bp, Saccharomyces pastorianus
cttgggttattcttcaaagcacaaa

SEQ ID NO: 135338 - DNA, 25 bp, Saccharomyces pastorianus
tttcttcctcgtccctagggaccag

SEQ ID NO: 135339 - DNA, 25 bp, Saccharomyces pastorianus
tttactatttcttcctcgtccctag

SEQ ID NO: 135340 - DNA, 25 bp, Saccharomyces pastorianus
ttcatcaatatcttcgtcttcctca

SEQ ID NO: 135341 - DNA, 25 bp, Saccharomyces pastorianus
gttgtcatttactatttcttcctcg

SEQ ID NO: 135342 - DNA, 25 bp, Saccharomyces pastorianus
aagacatcttctccttcttcttcat

SEQ ID NO: 135343 - DNA, 25 bp, Saccharomyces pastorianus
gagtcaaagacatcttctccttctt

SEQ ID NO: 135344 - DNA, 25 bp, Saccharomyces pastorianus
tgtcatttactatttcttcctcgtc

SEQ ID NO: 135345 - DNA, 25 bp, Saccharomyces pastorianus
ttcgtcttcctcagaggagtcaaag

SEQ ID NO: 135346 - DNA, 25 bp, Saccharomyces pastorianus
tcgtcttcatcaatatcttcgtctt

SEQ ID NO: 135347 - DNA, 25 bp, Saccharomyces pastorianus
aatatcttcgtcttcctcagaggag

SEQ ID NO: 135348 - DNA, 25 bp, Saccharomyces pastorianus
atcttcgtcttcatcaatatcttcg

SEQ ID NO: 135349 - DNA, 25 bp, Saccharomyces pastorianus
ttactatttccctttcaacggcaga

SEQ ID NO: 135350 - DNA, 25 bp, Saccharomyces pastorianus
ggtaaagtcttgattgtcgacaatc

SEQ ID NO: 135351 - DNA, 25 bp, Saccharomyces pastorianus
atccaagtgttatccagctttgtaa

SEQ ID NO: 135352 - DNA, 25 bp, Saccharomyces pastorianus
gcagacaggctgaggattacttaag

SEQ ID NO: 135353 - DNA, 25 bp, Saccharomyces pastorianus
taaccctggctggttttacttaatg

SEQ ID NO: 135354 - DNA, 25 bp, Saccharomyces pastorianus
tggttatttcctggtaaactacaat

SEQ ID NO: 135355 - DNA, 25 bp, Saccharomyces pastorianus
gaattcgtgatcagacagtctagcc

SEQ ID NO: 135356 - DNA, 25 bp, Saccharomyces pastorianus
agtctagccgaggtgatgaccactt

SEQ ID NO: 135357 - DNA, 25 bp, Saccharomyces pastorianus
gatttggaccagatcattgtagaat

SEQ ID NO: 135358 - DNA, 25 bp, Saccharomyces pastorianus
aaatctgtgtactatttcagtttga

SEQ ID NO: 135359 - DNA, 25 bp, Saccharomyces pastorianus
atgaccacttggttatcacctggaa

SEQ ID NO: 135360 - DNA, 25 bp, Saccharomyces pastorianus
gatgtctttgactcctctgaggaag

SEQ ID NO: 135361 - DNA, 25 bp, Saccharomyces pastorianus
aaagcgagctcctcttcaggaaaat

SEQ ID NO: 135362 - DNA, 25 bp, Saccharomyces pastorianus
ttcgaagctggtccctagggacgag

SEQ ID NO: 135363 - DNA, 25 bp, Saccharomyces pastorianus
gcgagctcctcttcaggaaaattta

SEQ ID NO: 135364 - DNA, 25 bp, Saccharomyces pastorianus
gagaagatgtctttgactcctctga

SEQ ID NO: 135365 - DNA, 25 bp, Saccharomyces pastorianus
gatgatcgactatccgaagatgatt

SEQ ID NO: 135366 - DNA, 25 bp, Saccharomyces pastorianus
tggagaatgctggtgttgaacgtac

SEQ ID NO: 135367 - DNA, 25 bp, Saccharomyces pastorianus
gagaagaagatgatcgactatccga

SEQ ID NO: 135368 - DNA, 25 bp, Saccharomyces pastorianus
ccgaagatgatttggatttgttaat

SEQ ID NO: 135369 - DNA, 25 bp, Saccharomyces pastorianus
gttgaacgtaccaaagcgagctcct

SEQ ID NO: 135370 - DNA, 25 bp, Saccharomyces pastorianus
aatgaagacccaggaacaagtattt

SEQ ID NO: 135371 - DNA, 25 bp, Saccharomyces pastorianus
gcattaaagcagtaccgacccgata

SEQ ID NO: 135372 - DNA, 25 bp, Saccharomyces pastorianus
gattttttcaaatggcacatgcttc

SEQ ID NO: 135373 - DNA, 25 bp, Saccharomyces pastorianus
gaaggcaacatatgaactaccacaa

SEQ ID NO: 135374 - DNA, 25 bp, Saccharomyces pastorianus
aagatgatgaacctgtcctgcctat

SEQ ID NO: 135375 - DNA, 25 bp, Saccharomyces pastorianus
attgcgccagggaatgctatgccta

SEQ ID NO: 135376 - DNA, 25 bp, Saccharomyces pastorianus
gagaaacttaatgtcactaccaacc

SEQ ID NO: 135377 - DNA, 25 bp, Saccharomyces pastorianus
tatagactctagctcgttgaacaaa

SEQ ID NO: 135378 - DNA, 25 bp, Saccharomyces pastorianus
acctgtcctgcctatattgttattt

SEQ ID NO: 135379 - DNA, 25 bp, Saccharomyces pastorianus
accaggcgcagattagcaagtcaat

SEQ ID NO: 135380 - DNA, 25 bp, Saccharomyces pastorianus
tgcttcggaaaaatcattgcgccag

SEQ ID NO: 135381 - DNA, 25 bp, Saccharomyces pastorianus
caaccaatactcctcgtaattacca

SEQ ID NO: 135382 - DNA, 25 bp, Saccharomyces pastorianus
acaggtgtcgttttctatgcattgg

SEQ ID NO: 135383 - DNA, 25 bp, Saccharomyces pastorianus
tgcgatcattccaacattatccttg

SEQ ID NO: 135384 - DNA, 25 bp, Saccharomyces pastorianus
attatccttggatgctttgagacaa

SEQ ID NO: 135385 - DNA, 25 bp, Saccharomyces pastorianus
gactgtagttttaatcggcactcaa

SEQ ID NO: 135386 - DNA, 25 bp, Saccharomyces pastorianus
ttttcagggctgtttacggattatg

SEQ ID NO: 135387 - DNA, 25 bp, Saccharomyces pastorianus
gggattttttccacgacacatattg

SEQ ID NO: 135388 - DNA, 25 bp, Saccharomyces pastorianus
taagaactcactcgttttgccaagt

SEQ ID NO: 135389 - DNA, 25 bp, Saccharomyces pastorianus
ggatttttcctattgccaactcaga

SEQ ID NO: 135390 - DNA, 25 bp, Saccharomyces pastorianus
cggcactcaacgctactttaagaac

SEQ ID NO: 135391 - DNA, 25 bp, Saccharomyces pastorianus
gaaattactccgttttatcatacaa

SEQ ID NO: 135392 - DNA, 25 bp, Saccharomyces pastorianus
gataagttcgatgctcacaggtgtc

SEQ ID NO: 135393 - DNA, 25 bp, Saccharomyces pastorianus
atatgtctgaacatccttaaaccag

SEQ ID NO: 135394 - DNA, 25 bp, Saccharomyces pastorianus
gaagctataatttctgggccgtcag

SEQ ID NO: 135395 - DNA, 25 bp, Saccharomyces pastorianus
gagtggactcctgtatgggatttgt

SEQ ID NO: 135396 - DNA, 25 bp, Saccharomyces pastorianus
ggaacccgtttgtgattctccactt

SEQ ID NO: 135397 - DNA, 25 bp, Saccharomyces pastorianus
gggccgtcagacacaccttatgaaa

SEQ ID NO: 135398 - DNA, 25 bp, Saccharomyces pastorianus
tggtaatatcatccgctgtggcgat

SEQ ID NO: 135399 - DNA, 25 bp, Saccharomyces pastorianus
gattctccacttgacgtagacattg

SEQ ID NO: 135400 - DNA, 25 bp, Saccharomyces pastorianus
gtgttcatgctgtttggagactcct

SEQ ID NO: 135401 - DNA, 25 bp, Saccharomyces pastorianus
gctgtggcgatatgagtgcctatca

SEQ ID NO: 135402 - DNA, 25 bp, Saccharomyces pastorianus
ctaccccatgaatccaccaaagata

SEQ ID NO: 135403 - DNA, 25 bp, Saccharomyces pastorianus
atgggatttgttacactgtgttcat

SEQ ID NO: 135404 - DNA, 25 bp, Saccharomyces pastorianus
tcgtgaaggagtacaaagtcatact

SEQ ID NO: 135405 - DNA, 25 bp, Saccharomyces pastorianus
aaagtcatactgaaaacattggcca

SEQ ID NO: 135406 - DNA, 25 bp, Saccharomyces pastorianus
gtcgaggatcgtgaaggagtacaaa

SEQ ID NO: 135407 - DNA, 25 bp, Saccharomyces pastorianus
gaaggagtacaaagtcatactgaaa

SEQ ID NO: 135408 - DNA, 25 bp, Saccharomyces pastorianus
aggagtacaaagtcatactgaaaac

SEQ ID NO: 135409 - DNA, 25 bp, Saccharomyces pastorianus
aagtcatactgaaaacattggccag

SEQ ID NO: 135410 - DNA, 25 bp, Saccharomyces pastorianus
atcgtgaaggagtacaaagtcatac

SEQ ID NO: 135411 - DNA, 25 bp, Saccharomyces pastorianus
gaggatcgtgaaggagtacaaagtc

SEQ ID NO: 135412 - DNA, 25 bp, Saccharomyces pastorianus
agtcatactgaaaacattggccagt

SEQ ID NO: 135413 - DNA, 25 bp, Saccharomyces pastorianus
atgtcgaggatcgtgaaggagtaca

SEQ ID NO: 135414 - DNA, 25 bp, Saccharomyces pastorianus
ggatcgtgaaggagtacaaagtcat

SEQ ID NO: 135415 - DNA, 25 bp, Saccharomyces pastorianus
gggtgctaccgcttataaacatatt

SEQ ID NO: 135416 - DNA, 25 bp, Saccharomyces pastorianus
atcggtgctctttgggcgttagcca

SEQ ID NO: 135417 - DNA, 25 bp, Saccharomyces pastorianus
gcgtaaacctactcctgaagatcgt

SEQ ID NO: 135418 - DNA, 25 bp, Saccharomyces pastorianus
gctaggtgctaagatcggtgctcca

SEQ ID NO: 135419 - DNA, 25 bp, Saccharomyces pastorianus
cagtgctctggctacaaaggttttc

SEQ ID NO: 135420 - DNA, 25 bp, Saccharomyces pastorianus
ggcgttagccacaactttctactgt

SEQ ID NO: 135421 - DNA, 25 bp, Saccharomyces pastorianus
ttatttgggttggtccagcttcagc

SEQ ID NO: 135422 - DNA, 25 bp, Saccharomyces pastorianus
gttttcttaagatccgccggtggtg

SEQ ID NO: 135423 - DNA, 25 bp, Saccharomyces pastorianus
attttcggtgaactatatggctaca

SEQ ID NO: 135424 - DNA, 25 bp, Saccharomyces pastorianus
ggtgctccatttgctgcaattgctc

SEQ ID NO: 135425 - DNA, 25 bp, Saccharomyces pastorianus
aattgctctatggatcctgggtgct

SEQ ID NO: 135426 - DNA, 25 bp, Saccharomyces pastorianus
aacacttccatggtggaggttgagg

SEQ ID NO: 135427 - DNA, 25 bp, Saccharomyces pastorianus
tccatggtggaggttgagggccaac

SEQ ID NO: 135428 - DNA, 25 bp, Saccharomyces pastorianus
aactcacaaaacacttccatggtgg

SEQ ID NO: 135429 - DNA, 25 bp, Saccharomyces pastorianus
aaaacacttccatggtggaggttga

SEQ ID NO: 135430 - DNA, 25 bp, Saccharomyces pastorianus
acaaaacacttccatggtggaggtt

SEQ ID NO: 135431 - DNA, 25 bp, Saccharomyces pastorianus
ttcaactcacaaaacacttccatgg

SEQ ID NO: 135432 - DNA, 25 bp, Saccharomyces pastorianus
catggtggaggttgagggccaacaa

SEQ ID NO: 135433 - DNA, 25 bp, Saccharomyces pastorianus
cattcaactcacaaaacacttccat

SEQ ID NO: 135434 - DNA, 25 bp, Saccharomyces pastorianus
tcacaaaacacttccatggtggagg

SEQ ID NO: 135435 - DNA, 25 bp, Saccharomyces pastorianus
cttccatggtggaggttgagggcca

SEQ ID NO: 135436 - DNA, 25 bp, Saccharomyces pastorianus
tcaactcacaaaacacttccatggt

SEQ ID NO: 135437 - DNA, 25 bp, Saccharomyces pastorianus
tcttcttgatgtcttcaggaaaaaa

SEQ ID NO: 135438 - DNA, 25 bp, Saccharomyces pastorianus
tttgttttcttatttcttcttgatg

SEQ ID NO: 135439 - DNA, 25 bp, Saccharomyces pastorianus
tcttatttcttcttgatgtcttcag

SEQ ID NO: 135440 - DNA, 25 bp, Saccharomyces pastorianus
cctcaaaagggtgtatgcgcaatgt

SEQ ID NO: 135441 - DNA, 25 bp, Saccharomyces pastorianus
gtacgaaacctcaaaagggtgtatg

SEQ ID NO: 135442 - DNA, 25 bp, Saccharomyces pastorianus
cattacagtgcatgcggatggcagt

SEQ ID NO: 135443 - DNA, 25 bp, Saccharomyces pastorianus
gggtgtatgcgcaatgtatatatat

SEQ ID NO: 135444 - DNA, 25 bp, Saccharomyces pastorianus
tatttcttcttgatgtcttcaggaa

SEQ ID NO: 135445 - DNA, 25 bp, Saccharomyces pastorianus
gtgcatgcggatggcagtgttcttc

SEQ ID NO: 135446 - DNA, 25 bp, Saccharomyces pastorianus
aaaataaacagtggcattacagtgc

SEQ ID NO: 135447 - DNA, 25 bp, Saccharomyces pastorianus
acagtggcattacagtgcatgcgga

SEQ ID NO: 135448 - DNA, 25 bp, Saccharomyces pastorianus
agagaaccctactttcacactatat

SEQ ID NO: 135449 - DNA, 25 bp, Saccharomyces pastorianus
tgaggactacccgacatatgattat

SEQ ID NO: 135450 - DNA, 25 bp, Saccharomyces pastorianus
agctgtctcagcaatatccacttta

SEQ ID NO: 135451 - DNA, 25 bp, Saccharomyces pastorianus
agggttctacgtccattacttgtga

SEQ ID NO: 135452 - DNA, 25 bp, Saccharomyces pastorianus
atgctacttctttacatcctagtgg

SEQ ID NO: 135453 - DNA, 25 bp, Saccharomyces pastorianus
ggtacatgcccgattatgacttcat

SEQ ID NO: 135454 - DNA, 25 bp, Saccharomyces pastorianus
ctgggcctatatcgactggcaatat

SEQ ID NO: 135455 - DNA, 25 bp, Saccharomyces pastorianus
tggtgttgcgtcacaatctctacaa

SEQ ID NO: 135456 - DNA, 25 bp, Saccharomyces pastorianus
gattacgtccgattataccagccga

SEQ ID NO: 135457 - DNA, 25 bp, Saccharomyces pastorianus
tgaatacttacgctggtgggccttt

SEQ ID NO: 135458 - DNA, 25 bp, Saccharomyces pastorianus
tgggccttttcaacaagctgtctca

SEQ ID NO: 135459 - DNA, 25 bp, Saccharomyces pastorianus
gaatattccagttcttcatccataa

SEQ ID NO: 135460 - DNA, 25 bp, Saccharomyces pastorianus
tcacccagtggagacgatgagcggc

SEQ ID NO: 135461 - DNA, 25 bp, Saccharomyces pastorianus
cagaacgttagggtgagcggtaatc

SEQ ID NO: 135462 - DNA, 25 bp, Saccharomyces pastorianus
gaagattataattcacccagtggag

SEQ ID NO: 135463 - DNA, 25 bp, Saccharomyces pastorianus
gagcggtaatcctttccttggaagt

SEQ ID NO: 135464 - DNA, 25 bp, Saccharomyces pastorianus
aataatcgtcattccaacagcgaaa

SEQ ID NO: 135465 - DNA, 25 bp, Saccharomyces pastorianus
agaacctgcagatggtcagaacgtt

SEQ ID NO: 135466 - DNA, 25 bp, Saccharomyces pastorianus
cagcgaaaatagtgtttccggaagc

SEQ ID NO: 135467 - DNA, 25 bp, Saccharomyces pastorianus
aaactccttttattcctcgaatgag

SEQ ID NO: 135468 - DNA, 25 bp, Saccharomyces pastorianus
atgtctgtgcgaaacctcaccaata

SEQ ID NO: 135469 - DNA, 25 bp, Saccharomyces pastorianus
aaagctcatcattagaacctgcaga

SEQ ID NO: 135470 - DNA, 25 bp, Saccharomyces pastorianus
aatccaggcgtcatgataattcatc

SEQ ID NO: 135471 - DNA, 25 bp, Saccharomyces pastorianus
gcagaacttacttttattcctcaaa

SEQ ID NO: 135472 - DNA, 25 bp, Saccharomyces pastorianus
aacgaaatgaaagccggcacttcca

SEQ ID NO: 135473 - DNA, 25 bp, Saccharomyces pastorianus
ggcacttccacgagtacgcaaagag

SEQ ID NO: 135474 - DNA, 25 bp, Saccharomyces pastorianus
aaagtgctcacgttacatttggcga

SEQ ID NO: 135475 - DNA, 25 bp, Saccharomyces pastorianus
atgaatccattttacgtcgtaacca

SEQ ID NO: 135476 - DNA, 25 bp, Saccharomyces pastorianus
aactgctgccgaagagtccgacgaa

SEQ ID NO: 135477 - DNA, 25 bp, Saccharomyces pastorianus
acgtcgtaaccaacgcggtgaagca

SEQ ID NO: 135478 - DNA, 25 bp, Saccharomyces pastorianus
aaggatggcagaggtcactatgact

SEQ ID NO: 135479 - DNA, 25 bp, Saccharomyces pastorianus
gtattagggcgctaactgctgccga

SEQ ID NO: 135480 - DNA, 25 bp, Saccharomyces pastorianus
gacaatggtaggtcgaagcccagat

SEQ ID NO: 135481 - DNA, 25 bp, Saccharomyces pastorianus
tctacttccgcaaatgatgtttcag

SEQ ID NO: 135482 - DNA, 25 bp, Saccharomyces pastorianus
gtctacgattttgctaatttgtcac

SEQ ID NO: 135483 - DNA, 25 bp, Saccharomyces pastorianus
ggcaatattgcatggctaccggtac

SEQ ID NO: 135484 - DNA, 25 bp, Saccharomyces pastorianus
gatttatatgttggtgcgagcggta

SEQ ID NO: 135485 - DNA, 25 bp, Saccharomyces pastorianus
ggctaccggtacatacaaacctcag

SEQ ID NO: 135486 - DNA, 25 bp, Saccharomyces pastorianus
tggatttcactattctctctgacga

SEQ ID NO: 135487 - DNA, 25 bp, Saccharomyces pastorianus
gaatttagcgaagcctccaataaga

SEQ ID NO: 135488 - DNA, 25 bp, Saccharomyces pastorianus
gtttcaagatcacttccagactgga

SEQ ID NO: 135489 - DNA, 25 bp, Saccharomyces pastorianus
gaagttcgatagacacacagatgct

SEQ ID NO: 135490 - DNA, 25 bp, Saccharomyces pastorianus
caaacctcagatccatgtctacgat

SEQ ID NO: 135491 - DNA, 25 bp, Saccharomyces pastorianus
tcaggtttctggtacaaacgtttca

SEQ ID NO: 135492 - DNA, 25 bp, Saccharomyces pastorianus
aatggagctacctactatatcgacc

SEQ ID NO: 135493 - DNA, 25 bp, Saccharomyces pastorianus
actattcactatgctgttgtgtggc

SEQ ID NO: 135494 - DNA, 25 bp, Saccharomyces pastorianus
ggacatccctttattatttggtttg

SEQ ID NO: 135495 - DNA, 25 bp, Saccharomyces pastorianus
tgaggtcaccttggccgatgataat

SEQ ID NO: 135496 - DNA, 25 bp, Saccharomyces pastorianus
tagctgcggccctatttttaactat

SEQ ID NO: 135497 - DNA, 25 bp, Saccharomyces pastorianus
atagtatttctatgggcgtctcata

SEQ ID NO: 135498 - DNA, 25 bp, Saccharomyces pastorianus
agtcatatctgatgcctccgtgaat

SEQ ID NO: 135499 - DNA, 25 bp, Saccharomyces pastorianus
gttacagcctgattctgatgcagtc

SEQ ID NO: 135500 - DNA, 25 bp, Saccharomyces pastorianus
gttgtgtggcatatggattcgttac

SEQ ID NO: 135501 - DNA, 25 bp, Saccharomyces pastorianus
ttcgttacaaattagctgcggccct

SEQ ID NO: 135502 - DNA, 25 bp, Saccharomyces pastorianus
tatatcgaccactacgggaagaatt

SEQ ID NO: 135503 - DNA, 25 bp, Saccharomyces pastorianus
ctttcttgcagttagaggacttcaa

SEQ ID NO: 135504 - DNA, 25 bp, Saccharomyces pastorianus
aagcattttaccctttcacactgtt

SEQ ID NO: 135505 - DNA, 25 bp, Saccharomyces pastorianus
cagaatggtttcatgtttactatac

SEQ ID NO: 135506 - DNA, 25 bp, Saccharomyces pastorianus
acatcacctgaatagaagtcgctct

SEQ ID NO: 135507 - DNA, 25 bp, Saccharomyces pastorianus
atcggatttttgatgggcagatttc

SEQ ID NO: 135508 - DNA, 25 bp, Saccharomyces pastorianus
gaagtcgctctttcttgcagttaga

SEQ ID NO: 135509 - DNA, 25 bp, Saccharomyces pastorianus
agaagacgtaaaccccatcatgaac

SEQ ID NO: 135510 - DNA, 25 bp, Saccharomyces pastorianus
gggcagatttccagaatggtttcat

SEQ ID NO: 135511 - DNA, 25 bp, Saccharomyces pastorianus
tttttcaaaaacagctcaaggttgg

SEQ ID NO: 135512 - DNA, 25 bp, Saccharomyces pastorianus
tgatagtcatcatccacatcacctg

SEQ ID NO: 135513 - DNA, 25 bp, Saccharomyces pastorianus
ctagataaacccttggattccattt

SEQ ID NO: 135514 - DNA, 25 bp, Saccharomyces pastorianus
aagtgacattcgacacgtctttgct

SEQ ID NO: 135515 - DNA, 25 bp, Saccharomyces pastorianus
tggtgacgctcacgttatttcgcat

SEQ ID NO: 135516 - DNA, 25 bp, Saccharomyces pastorianus
ttaggtatcattctggtaactccca

SEQ ID NO: 135517 - DNA, 25 bp, Saccharomyces pastorianus
taccacgacgcctgaactgtttgag

SEQ ID NO: 135518 - DNA, 25 bp, Saccharomyces pastorianus
gtggtcattggagtgcgacttctaa

SEQ ID NO: 135519 - DNA, 25 bp, Saccharomyces pastorianus
gacacgtctttgctttattttgaaa

SEQ ID NO: 135520 - DNA, 25 bp, Saccharomyces pastorianus
atttgaaatttcattgccggtacta

SEQ ID NO: 135521 - DNA, 25 bp, Saccharomyces pastorianus
aattggcgtcgaactttcgtctgag

SEQ ID NO: 135522 - DNA, 25 bp, Saccharomyces pastorianus
gaaaccaattttgtcttgcctactc

SEQ ID NO: 135523 - DNA, 25 bp, Saccharomyces pastorianus
aatgcccattgaactttataacgga

SEQ ID NO: 135524 - DNA, 25 bp, Saccharomyces pastorianus
gtcttgcctactccagtaactttga

SEQ ID NO: 135525 - DNA, 25 bp, Saccharomyces pastorianus
tggtattaacctacacacttatgat

SEQ ID NO: 135526 - DNA, 25 bp, Saccharomyces pastorianus
ggttacacacaagtttattcctatg

SEQ ID NO: 135527 - DNA, 25 bp, Saccharomyces pastorianus
tgaaagcaagaactcctatggtggg

SEQ ID NO: 135528 - DNA, 25 bp, Saccharomyces pastorianus
tcatacagggcttcaaatttggagt

SEQ ID NO: 135529 - DNA, 25 bp, Saccharomyces pastorianus
gtttattcctatgagcaatggcaat

SEQ ID NO: 135530 - DNA, 25 bp, Saccharomyces pastorianus
gactagcaatctctgattttggttg

SEQ ID NO: 135531 - DNA, 25 bp, Saccharomyces pastorianus
aagctgacttcccaaggtatctaca

SEQ ID NO: 135532 - DNA, 25 bp, Saccharomyces pastorianus
ttggtttaattcttgtggctttaca

SEQ ID NO: 135533 - DNA, 25 bp, Saccharomyces pastorianus
actaggcttgaaacctctaagacaa

SEQ ID NO: 135534 - DNA, 25 bp, Saccharomyces pastorianus
cccagaagcggtattaggcgttgtt

SEQ ID NO: 135535 - DNA, 25 bp, Saccharomyces pastorianus
tatcttggctgttttatggacattg

SEQ ID NO: 135536 - DNA, 25 bp, Saccharomyces pastorianus
acgctcctcctgcatcaaaagatag

SEQ ID NO: 135537 - DNA, 25 bp, Saccharomyces pastorianus
ggctcctcctccaaaggaagaacca

SEQ ID NO: 135538 - DNA, 25 bp, Saccharomyces pastorianus
gctcgatagtttgttcggtatttta

SEQ ID NO: 135539 - DNA, 25 bp, Saccharomyces pastorianus
caccaacttctaccgcaacaaatat

SEQ ID NO: 135540 - DNA, 25 bp, Saccharomyces pastorianus
ttggagggttcgcaattgctcgata

SEQ ID NO: 135541 - DNA, 25 bp, Saccharomyces pastorianus
ggtcctaagaccattcaacagattc

SEQ ID NO: 135542 - DNA, 25 bp, Saccharomyces pastorianus
gtttcagaacgggtcaagcaacatt

SEQ ID NO: 135543 - DNA, 25 bp, Saccharomyces pastorianus
gtttcctataccgtctgaatctgtt

SEQ ID NO: 135544 - DNA, 25 bp, Saccharomyces pastorianus
gacactctttcagaagggacgctcc

SEQ ID NO: 135545 - DNA, 25 bp, Saccharomyces pastorianus
ggatttgacggattctccatctgaa

SEQ ID NO: 135546 - DNA, 25 bp, Saccharomyces pastorianus
aagacgtacgaacaactccagtaat

SEQ ID NO: 135547 - DNA, 25 bp, Saccharomyces pastorianus
gattctggcagattcggcaataatt

SEQ ID NO: 135548 - DNA, 25 bp, Saccharomyces pastorianus
ctaaacgtcaaagcggacgccgaat

SEQ ID NO: 135549 - DNA, 25 bp, Saccharomyces pastorianus
gaagaagttgctccacttgttccaa

SEQ ID NO: 135550 - DNA, 25 bp, Saccharomyces pastorianus
agaagctagcccctgacggaaagac

SEQ ID NO: 135551 - DNA, 25 bp, Saccharomyces pastorianus
ggtgggtgccaaaattcaagtctaa

SEQ ID NO: 135552 - DNA, 25 bp, Saccharomyces pastorianus
gcaataattctagtcgtggccatga

SEQ ID NO: 135553 - DNA, 25 bp, Saccharomyces pastorianus
agagaccgcgagagaggctcctaca

SEQ ID NO: 135554 - DNA, 25 bp, Saccharomyces pastorianus
gcactgcttctaaaattgtcattcc

SEQ ID NO: 135555 - DNA, 25 bp, Saccharomyces pastorianus
gtggccatgactttagaaatacctc

SEQ ID NO: 135556 - DNA, 25 bp, Saccharomyces pastorianus
cgaatgggtccaaagcactgcttct

SEQ ID NO: 135557 - DNA, 25 bp, Saccharomyces pastorianus
gaaatgttcgatgctatttcatctg

SEQ ID NO: 135558 - DNA, 25 bp, Saccharomyces pastorianus
gctgagaaagctatacaaaagattt

SEQ ID NO: 135559 - DNA, 25 bp, Saccharomyces pastorianus
taccaaccttagctaacattactat

SEQ ID NO: 135560 - DNA, 25 bp, Saccharomyces pastorianus
tttgtcgatcgagaatcattgtttc

SEQ ID NO: 135561 - DNA, 25 bp, Saccharomyces pastorianus
ctaacattactataacgaagctgag

SEQ ID NO: 135562 - DNA, 25 bp, Saccharomyces pastorianus
attactataacgaagctgagaaagc

SEQ ID NO: 135563 - DNA, 25 bp, Saccharomyces pastorianus
taacaagtacataccaaccttagct

SEQ ID NO: 135564 - DNA, 25 bp, Saccharomyces pastorianus
gtacataccaaccttagctaacatt

SEQ ID NO: 135565 - DNA, 25 bp, Saccharomyces pastorianus
ttgttggaagctttctattattaac

SEQ ID NO: 135566 - DNA, 25 bp, Saccharomyces pastorianus
cgatcgagaatcattgtttcttatt

SEQ ID NO: 135567 - DNA, 25 bp, Saccharomyces pastorianus
actgtttgttggaagctttctatta

SEQ ID NO: 135568 - DNA, 25 bp, Saccharomyces pastorianus
acaaaagatttgtcgatcgagaatc

SEQ ID NO: 135569 - DNA, 25 bp, Saccharomyces pastorianus
aagcctacagtacagaggtgccaaa

SEQ ID NO: 135570 - DNA, 25 bp, Saccharomyces pastorianus
gtagagccaatgaccaaaccaagaa

SEQ ID NO: 135571 - DNA, 25 bp, Saccharomyces pastorianus
gaaagcctacagtacagaggtgcca

SEQ ID NO: 135572 - DNA, 25 bp, Saccharomyces pastorianus
cagtacagaggtgccaaagtttttt

SEQ ID NO: 135573 - DNA, 25 bp, Saccharomyces pastorianus
tagtagagccaatgaccaaaccaag

SEQ ID NO: 135574 - DNA, 25 bp, Saccharomyces pastorianus
tgaccaaaccaagaaagcctacagt

SEQ ID NO: 135575 - DNA, 25 bp, Saccharomyces pastorianus
gcctacagtacagaggtgccaaagt

SEQ ID NO: 135576 - DNA, 25 bp, Saccharomyces pastorianus
aaccaagaaagcctacagtacagag

SEQ ID NO: 135577 - DNA, 25 bp, Saccharomyces pastorianus
gagccaatgaccaaaccaagaaagc

SEQ ID NO: 135578 - DNA, 25 bp, Saccharomyces pastorianus
tacagtacagaggtgccaaagtttt

SEQ ID NO: 135579 - DNA, 25 bp, Saccharomyces pastorianus
tgatagtagagccaatgaccaaacc

SEQ ID NO: 135580 - DNA, 25 bp, Saccharomyces pastorianus
caattcgcccttgacactggaaaat

SEQ ID NO: 135581 - DNA, 25 bp, Saccharomyces pastorianus
tgtccggatattatggcaccctctc

SEQ ID NO: 135582 - DNA, 25 bp, Saccharomyces pastorianus
ggaaaatcagtaccaactgcataat

SEQ ID NO: 135583 - DNA, 25 bp, Saccharomyces pastorianus
ttatccaacgattacaaaattccag

SEQ ID NO: 135584 - DNA, 25 bp, Saccharomyces pastorianus
gtacctccgagagaaacatacttcg

SEQ ID NO: 135585 - DNA, 25 bp, Saccharomyces pastorianus
gggattatactattatccaacgatt

SEQ ID NO: 135586 - DNA, 25 bp, Saccharomyces pastorianus
aaaattccagttgtacctccgagag

SEQ ID NO: 135587 - DNA, 25 bp, Saccharomyces pastorianus
cgtggacttacgatttattggtatt

SEQ ID NO: 135588 - DNA, 25 bp, Saccharomyces pastorianus
ataatgggactatccccaattcgcc

SEQ ID NO: 135589 - DNA, 25 bp, Saccharomyces pastorianus
caccctctccggacttaaggtattg

SEQ ID NO: 135590 - DNA, 25 bp, Saccharomyces pastorianus
gagaaacatacttcgtggacttacg

SEQ ID NO: 135591 - DNA, 25 bp, Saccharomyces pastorianus
ctggttctgttacccaaatcaactc

SEQ ID NO: 135592 - DNA, 25 bp, Saccharomyces pastorianus
aaagtgccactcactgcattttcat

SEQ ID NO: 135593 - DNA, 25 bp, Saccharomyces pastorianus
agcgctacttttaaactggttctgt

SEQ ID NO: 135594 - DNA, 25 bp, Saccharomyces pastorianus
gggtttcctcctcaagatttagtct

SEQ ID NO: 135595 - DNA, 25 bp, Saccharomyces pastorianus
gaactagatccaatctgtcctttga

SEQ ID NO: 135596 - DNA, 25 bp, Saccharomyces pastorianus
tggtgcggccaacaacgttaattct

SEQ ID NO: 135597 - DNA, 25 bp, Saccharomyces pastorianus
gatttagtcttgcagctgcttcgac

SEQ ID NO: 135598 - DNA, 25 bp, Saccharomyces pastorianus
aattctggtggtttggccaatctaa

SEQ ID NO: 135599 - DNA, 25 bp, Saccharomyces pastorianus
atcaccttagcgtacgaactcgagc

SEQ ID NO: 135600 - DNA, 25 bp, Saccharomyces pastorianus
gagctgcatcccaatctgaagttac

SEQ ID NO: 135601 - DNA, 25 bp, Saccharomyces pastorianus
tgaagcgttctatgccaatttcctc

SEQ ID NO: 135602 - DNA, 25 bp, Saccharomyces pastorianus
gtggacaggagctgggctattttaa

SEQ ID NO: 135603 - DNA, 25 bp, Saccharomyces pastorianus
cacaagattatcaccggtttcactc

SEQ ID NO: 135604 - DNA, 25 bp, Saccharomyces pastorianus
aactactgtacatacctattggtgc

SEQ ID NO: 135605 - DNA, 25 bp, Saccharomyces pastorianus
accggtttcactcaccatgtaatgg

SEQ ID NO: 135606 - DNA, 25 bp, Saccharomyces pastorianus
aatccaatggccgttcgtagtgagt

SEQ ID NO: 135607 - DNA, 25 bp, Saccharomyces pastorianus
aataatcattatcccgcacaacaac

SEQ ID NO: 135608 - DNA, 25 bp, Saccharomyces pastorianus
atatcagagttattatccccatcga

SEQ ID NO: 135609 - DNA, 25 bp, Saccharomyces pastorianus
catgtttgattctgaccttgtgaaa

SEQ ID NO: 135610 - DNA, 25 bp, Saccharomyces pastorianus
gttggatccatactattgacctgca

SEQ ID NO: 135611 - DNA, 25 bp, Saccharomyces pastorianus
atcccgcacaacaacttcatgtttg

SEQ ID NO: 135612 - DNA, 25 bp, Saccharomyces pastorianus
catcgattctcctcaatttggcaaa

SEQ ID NO: 135613 - DNA, 25 bp, Saccharomyces pastorianus
atgcgttcatgcaaaccaactagaa

SEQ ID NO: 135614 - DNA, 25 bp, Saccharomyces pastorianus
taagcgcacacgtaaagttgggaat

SEQ ID NO: 135615 - DNA, 25 bp, Saccharomyces pastorianus
actttaaagccgtcgtacgtctcat

SEQ ID NO: 135616 - DNA, 25 bp, Saccharomyces pastorianus
tgttttcaccagcagattcaagatg

SEQ ID NO: 135617 - DNA, 25 bp, Saccharomyces pastorianus
aagccggctgcctgaaagtaataat

SEQ ID NO: 135618 - DNA, 25 bp, Saccharomyces pastorianus
agatccctcttgaagactttatcaa

SEQ ID NO: 135619 - DNA, 25 bp, Saccharomyces pastorianus
tagacctttcacaatgccgagataa

SEQ ID NO: 135620 - DNA, 25 bp, Saccharomyces pastorianus
agatgcacagtgttcccaactatac

SEQ ID NO: 135621 - DNA, 25 bp, Saccharomyces pastorianus
acgtctcatctgcatttgcatccaa

SEQ ID NO: 135622 - DNA, 25 bp, Saccharomyces pastorianus
gacttgataacccattttgccatat

SEQ ID NO: 135623 - DNA, 25 bp, Saccharomyces pastorianus
aagtttcactcactagacctttcac

SEQ ID NO: 135624 - DNA, 25 bp, Saccharomyces pastorianus
gtgtgttatcggtgacgctctaaat

SEQ ID NO: 135625 - DNA, 25 bp, Saccharomyces pastorianus
gtcagtggctttgtattctttgttc

SEQ ID NO: 135626 - DNA, 25 bp, Saccharomyces pastorianus
gccaaagcctttgcaattgaccagg

SEQ ID NO: 135627 - DNA, 25 bp, Saccharomyces pastorianus
tgctgtcgctttttacaccatttac

SEQ ID NO: 135628 - DNA, 25 bp, Saccharomyces pastorianus
gtattctttgttcgctgctgacagc

SEQ ID NO: 135629 - DNA, 25 bp, Saccharomyces pastorianus
atttctgtctggtgtcttgccaaag

SEQ ID NO: 135630 - DNA, 25 bp, Saccharomyces pastorianus
attgaccagggttttctttgctgtc

SEQ ID NO: 135631 - DNA, 25 bp, Saccharomyces pastorianus
aattggtgacctagacttcagcgac

SEQ ID NO: 135632 - DNA, 25 bp, Saccharomyces pastorianus
cgttattaacgttttgtcagtggct

SEQ ID NO: 135633 - DNA, 25 bp, Saccharomyces pastorianus
acaaacccgttgaatttctgtctgg

SEQ ID NO: 135634 - DNA, 25 bp, Saccharomyces pastorianus
gtggcgattgtgttaacaaacccgt

SEQ ID NO: 135635 - DNA, 25 bp, Saccharomyces pastorianus
aagtctgggtatgattcaatctatc

SEQ ID NO: 135636 - DNA, 25 bp, Saccharomyces pastorianus
gttgatattccatacccttacaagg

SEQ ID NO: 135637 - DNA, 25 bp, Saccharomyces pastorianus
accaggtggtgttagagcattgaga

SEQ ID NO: 135638 - DNA, 25 bp, Saccharomyces pastorianus
tagaacgtgactgggctatgcctga

SEQ ID NO: 135639 - DNA, 25 bp, Saccharomyces pastorianus
gagaaacattactgctcaagagcca

SEQ ID NO: 135640 - DNA, 25 bp, Saccharomyces pastorianus
atcggtccatgtgttgctacaggtc

SEQ ID NO: 135641 - DNA, 25 bp, Saccharomyces pastorianus
tacaaggccgatatccctaaagttg

SEQ ID NO: 135642 - DNA, 25 bp, Saccharomyces pastorianus
cgaagcatatcctgttaccggttat

SEQ ID NO: 135643 - DNA, 25 bp, Saccharomyces pastorianus
agagccaaatgttactagagtgcaa

SEQ ID NO: 135644 - DNA, 25 bp, Saccharomyces pastorianus
gacaacacaattacctacgatgcga

SEQ ID NO: 135645 - DNA, 25 bp, Saccharomyces pastorianus
tgttggtgccaggttgacattgatg

SEQ ID NO: 135646 - DNA, 25 bp, Saccharomyces pastorianus
aacttgcagcactatactcatcgga

SEQ ID NO: 135647 - DNA, 25 bp, Saccharomyces pastorianus
gtgccttcgccaatcaaacaagagg

SEQ ID NO: 135648 - DNA, 25 bp, Saccharomyces pastorianus
aatactgaaaagcttcccagaggga

SEQ ID NO: 135649 - DNA, 25 bp, Saccharomyces pastorianus
atgcatcgaatacagtgccttcgcc

SEQ ID NO: 135650 - DNA, 25 bp, Saccharomyces pastorianus
aaggcttgaattctacagtggcaga

SEQ ID NO: 135651 - DNA, 25 bp, Saccharomyces pastorianus
caaagagaatgaatcgcccgttaaa

SEQ ID NO: 135652 - DNA, 25 bp, Saccharomyces pastorianus
ggaagaaactccagcgcctacaata

SEQ ID NO: 135653 - DNA, 25 bp, Saccharomyces pastorianus
gaagattcggacactctatccaaat

SEQ ID NO: 135654 - DNA, 25 bp, Saccharomyces pastorianus
gagatcaacccatacttatctgaat

SEQ ID NO: 135655 - DNA, 25 bp, Saccharomyces pastorianus
atggaatccacagacgacaaaagct

SEQ ID NO: 135656 - DNA, 25 bp, Saccharomyces pastorianus
gcgcatgtgcataaagagccaactt

SEQ ID NO: 135657 - DNA, 25 bp, Saccharomyces pastorianus
gggtaagaatatctcccctgctttc

SEQ ID NO: 135658 - DNA, 25 bp, Saccharomyces pastorianus
ccctgctttcggattcaaacgcaag

SEQ ID NO: 135659 - DNA, 25 bp, Saccharomyces pastorianus
gagaggtggccaagttcaaagacaa

SEQ ID NO: 135660 - DNA, 25 bp, Saccharomyces pastorianus
atcaagctgtgctagatgactcaga

SEQ ID NO: 135661 - DNA, 25 bp, Saccharomyces pastorianus
gtttgctcaagtcattggtgctaca

SEQ ID NO: 135662 - DNA, 25 bp, Saccharomyces pastorianus
tccgctgcgggactacctaaataaa

SEQ ID NO: 135663 - DNA, 25 bp, Saccharomyces pastorianus
gaatgacaattttccatggcatgta

SEQ ID NO: 135664 - DNA, 25 bp, Saccharomyces pastorianus
attacgatgaatctccgctgcggga

SEQ ID NO: 135665 - DNA, 25 bp, Saccharomyces pastorianus
gtggtcattgttatacgactctaat

SEQ ID NO: 135666 - DNA, 25 bp, Saccharomyces pastorianus
catgtgcccttggtggttgttataa

SEQ ID NO: 135667 - DNA, 25 bp, Saccharomyces pastorianus
gagatcgttcctagcgtaaaagcca

SEQ ID NO: 135668 - DNA, 25 bp, Saccharomyces pastorianus
gaaacagttctgtactacgatgaga

SEQ ID NO: 135669 - DNA, 25 bp, Saccharomyces pastorianus
gattcgctgaattaattttccctga

SEQ ID NO: 135670 - DNA, 25 bp, Saccharomyces pastorianus
ggtatttgtccctcatttacgagaa

SEQ ID NO: 135671 - DNA, 25 bp, Saccharomyces pastorianus
ttttccctgaagagctaggcgtcga

SEQ ID NO: 135672 - DNA, 25 bp, Saccharomyces pastorianus
tgatgaggatgccaaggccgccatc

SEQ ID NO: 135673 - DNA, 25 bp, Saccharomyces pastorianus
agatgccttggtcggattcgctgaa

SEQ ID NO: 135674 - DNA, 25 bp, Saccharomyces pastorianus
cacagataggtcagcagcgtatgca

SEQ ID NO: 135675 - DNA, 25 bp, Saccharomyces pastorianus
aaagaagcctccaatgtcgaaagta

SEQ ID NO: 135676 - DNA, 25 bp, Saccharomyces pastorianus
gaggcttactattccccagaagttt

SEQ ID NO: 135677 - DNA, 25 bp, Saccharomyces pastorianus
gcgttattatactctcagccttgat

SEQ ID NO: 135678 - DNA, 25 bp, Saccharomyces pastorianus
gaagtttggtggtatttgtccctca

SEQ ID NO: 135679 - DNA, 25 bp, Saccharomyces pastorianus
gcaccagatgtgtatacccaggaaa

SEQ ID NO: 135680 - DNA, 25 bp, Saccharomyces pastorianus
gaaatttttggcactttagaggcac

SEQ ID NO: 135681 - DNA, 25 bp, Saccharomyces pastorianus
tgaattgaacagcatgggtcccaaa

SEQ ID NO: 135682 - DNA, 25 bp, Saccharomyces pastorianus
aaatgcgtggtcaacattgtacgaa

SEQ ID NO: 135683 - DNA, 25 bp, Saccharomyces pastorianus
attagctctttgtaggtctgtgcaa

SEQ ID NO: 135684 - DNA, 25 bp, Saccharomyces pastorianus
gtaatgcaatgatgctgtccacaaa

SEQ ID NO: 135685 - DNA, 25 bp, Saccharomyces pastorianus
gaaactgcaatcaagactctagaat

SEQ ID NO: 135686 - DNA, 25 bp, Saccharomyces pastorianus
gacacttccagaggtctttgaatta

SEQ ID NO: 135687 - DNA, 25 bp, Saccharomyces pastorianus
tacgcaacattatttccagattcac

SEQ ID NO: 135688 - DNA, 25 bp, Saccharomyces pastorianus
gatagtttgctctgttctagaagct

SEQ ID NO: 135689 - DNA, 25 bp, Saccharomyces pastorianus
actttagaggcactggagacacttc

SEQ ID NO: 135690 - DNA, 25 bp, Saccharomyces pastorianus
ttttgtcaccgcgtccagggataaa

SEQ ID NO: 135691 - DNA, 25 bp, Saccharomyces pastorianus
ggatataacaccagcagacaaaatt

SEQ ID NO: 135692 - DNA, 25 bp, Saccharomyces pastorianus
aggagccagctgatgactacgttct

SEQ ID NO: 135693 - DNA, 25 bp, Saccharomyces pastorianus
gctatttccgtacatgacagcatga

SEQ ID NO: 135694 - DNA, 25 bp, Saccharomyces pastorianus
aaagctgtcactgctatttccgtac

SEQ ID NO: 135695 - DNA, 25 bp, Saccharomyces pastorianus
aaataaagcctgcattaccgttcca

SEQ ID NO: 135696 - DNA, 25 bp, Saccharomyces pastorianus
tatgggatgcagactgggcaccatt

SEQ ID NO: 135697 - DNA, 25 bp, Saccharomyces pastorianus
aactgtcaaagtatggaggcaccaa

SEQ ID NO: 135698 - DNA, 25 bp, Saccharomyces pastorianus
gatatcggtgggtcttgaaaacggt

SEQ ID NO: 135699 - DNA, 25 bp, Saccharomyces pastorianus
cattaccgttccacagtctaacgat

SEQ ID NO: 135700 - DNA, 25 bp, Saccharomyces pastorianus
gactacgttctggaagcatcaatta

SEQ ID NO: 135701 - DNA, 25 bp, Saccharomyces pastorianus
aggttccattgctacattgacgtta

SEQ ID NO: 135702 - DNA, 25 bp, Saccharomyces pastorianus
gggatagtattcaccaccgataaca

SEQ ID NO: 135703 - DNA, 25 bp, Saccharomyces pastorianus
atttgaacgactttgtccggagtga

SEQ ID NO: 135704 - DNA, 25 bp, Saccharomyces pastorianus
tgacgttaggaatcgactccaacag

SEQ ID NO: 135705 - DNA, 25 bp, Saccharomyces pastorianus
gttgatgtcaatgccaagctcttct

SEQ ID NO: 135706 - DNA, 25 bp, Saccharomyces pastorianus
gaccgacgaacaattgcatgctttt

SEQ ID NO: 135707 - DNA, 25 bp, Saccharomyces pastorianus
aacaatgtttatggctggagactac

SEQ ID NO: 135708 - DNA, 25 bp, Saccharomyces pastorianus
atgccaagctcttcttctatagcga

SEQ ID NO: 135709 - DNA, 25 bp, Saccharomyces pastorianus
gatacatgccctcctataaacttta

SEQ ID NO: 135710 - DNA, 25 bp, Saccharomyces pastorianus
ttgtggatagatacatgccctccta

SEQ ID NO: 135711 - DNA, 25 bp, Saccharomyces pastorianus
ctatagcgacttgttgtggcgcaac

SEQ ID NO: 135712 - DNA, 25 bp, Saccharomyces pastorianus
aagactaagtcacctggtgtgaaat

SEQ ID NO: 135713 - DNA, 25 bp, Saccharomyces pastorianus
tcacctggtgtgaaattgaattctg

SEQ ID NO: 135714 - DNA, 25 bp, Saccharomyces pastorianus
caaagactaagtcacctggtgtgaa

SEQ ID NO: 135715 - DNA, 25 bp, Saccharomyces pastorianus
attgaattctgtggatgaattgatt

SEQ ID NO: 135716 - DNA, 25 bp, Saccharomyces pastorianus
gccaaagactaagtcacctggtgtg

SEQ ID NO: 135717 - DNA, 25 bp, Saccharomyces pastorianus
agccaaagactaagtcacctggtgt

SEQ ID NO: 135718 - DNA, 25 bp, Saccharomyces pastorianus
agagccaaagactaagtcacctggt

SEQ ID NO: 135719 - DNA, 25 bp, Saccharomyces pastorianus
gaagagccaaagactaagtcacctg

SEQ ID NO: 135720 - DNA, 25 bp, Saccharomyces pastorianus
agtcacctggtgtgaaattgaattc

SEQ ID NO: 135721 - DNA, 25 bp, Saccharomyces pastorianus
acctggtgtgaaattgaattctgtg

SEQ ID NO: 135722 - DNA, 25 bp, Saccharomyces pastorianus
gactaagtcacctggtgtgaaattg

SEQ ID NO: 135723 - DNA, 25 bp, Saccharomyces pastorianus
aagtcgctgaagaagccgccaccga

SEQ ID NO: 135724 - DNA, 25 bp, Saccharomyces pastorianus
agttgaacaagtcgctgaagaagcc

SEQ ID NO: 135725 - DNA, 25 bp, Saccharomyces pastorianus
ttactgaagaacaagctgaggccac

SEQ ID NO: 135726 - DNA, 25 bp, Saccharomyces pastorianus
agtcgctgaagaagccgccaccgaa

SEQ ID NO: 135727 - DNA, 25 bp, Saccharomyces pastorianus
cgctgaagaagccgccaccgaagaa

SEQ ID NO: 135728 - DNA, 25 bp, Saccharomyces pastorianus
aacaagtcgctgaagaagccgccac

SEQ ID NO: 135729 - DNA, 25 bp, Saccharomyces pastorianus
gaagaacaagctgaggccactgaat

SEQ ID NO: 135730 - DNA, 25 bp, Saccharomyces pastorianus
gaacaagtcgctgaagaagccgcca

SEQ ID NO: 135731 - DNA, 25 bp, Saccharomyces pastorianus
agaacaagctgaggccactgaatgg

SEQ ID NO: 135732 - DNA, 25 bp, Saccharomyces pastorianus
gtcgctgaagaagccgccaccgaag

SEQ ID NO: 135733 - DNA, 25 bp, Saccharomyces pastorianus
actgaagaacaagctgaggccactg

SEQ ID NO: 135734 - DNA, 25 bp, Saccharomyces pastorianus
atgtccttaccagctacttttgact

SEQ ID NO: 135735 - DNA, 25 bp, Saccharomyces pastorianus
gactccagaagatgcccaacttttg

SEQ ID NO: 135736 - DNA, 25 bp, Saccharomyces pastorianus
gaagatgcccaacttttgttggctg

SEQ ID NO: 135737 - DNA, 25 bp, Saccharomyces pastorianus
ttgactccagaagatgcccaacttt

SEQ ID NO: 135738 - DNA, 25 bp, Saccharomyces pastorianus
actccagaagatgcccaacttttgt

SEQ ID NO: 135739 - DNA, 25 bp, Saccharomyces pastorianus
ccttaccagctacttttgacttgac

SEQ ID NO: 135740 - DNA, 25 bp, Saccharomyces pastorianus
cagctacttttgacttgactccaga

SEQ ID NO: 135741 - DNA, 25 bp, Saccharomyces pastorianus
gacttgactccagaagatgcccaac

SEQ ID NO: 135742 - DNA, 25 bp, Saccharomyces pastorianus
tacttttgacttgactccagaagat

SEQ ID NO: 135743 - DNA, 25 bp, Saccharomyces pastorianus
gatgcccaacttttgttggctgcta

SEQ ID NO: 135744 - DNA, 25 bp, Saccharomyces pastorianus
tgcccaacttttgttggctgctaac

SEQ ID NO: 135745 - DNA, 25 bp, Saccharomyces pastorianus
atacctctctatacagcttattctg

SEQ ID NO: 135746 - DNA, 25 bp, Saccharomyces pastorianus
ttgcgacacctagaatggactacgg

SEQ ID NO: 135747 - DNA, 25 bp, Saccharomyces pastorianus
taaacgtaaatctggaacctgctcc

SEQ ID NO: 135748 - DNA, 25 bp, Saccharomyces pastorianus
ggttaacccagatgatccatatgac

SEQ ID NO: 135749 - DNA, 25 bp, Saccharomyces pastorianus
gaaagagaacctattgcgacaccta

SEQ ID NO: 135750 - DNA, 25 bp, Saccharomyces pastorianus
caattttatgtggtctccgagaatg

SEQ ID NO: 135751 - DNA, 25 bp, Saccharomyces pastorianus
tagacctgatcggactgaacaaaga

SEQ ID NO: 135752 - DNA, 25 bp, Saccharomyces pastorianus
gtccatcatctatatatcctgggta

SEQ ID NO: 135753 - DNA, 25 bp, Saccharomyces pastorianus
gatgaaacgtaccattgaacccgaa

SEQ ID NO: 135754 - DNA, 25 bp, Saccharomyces pastorianus
aatcaagactctacgatggagcccc

SEQ ID NO: 135755 - DNA, 25 bp, Saccharomyces pastorianus
taaagatcccacagtatcgtctcac

SEQ ID NO: 135756 - DNA, 25 bp, Saccharomyces pastorianus
ctacagattgcattagacctagtga

SEQ ID NO: 135757 - DNA, 25 bp, Saccharomyces pastorianus
gacttagtggtcttcaaaggcactt

SEQ ID NO: 135758 - DNA, 25 bp, Saccharomyces pastorianus
tgataacaagatttcggtaccatta

SEQ ID NO: 135759 - DNA, 25 bp, Saccharomyces pastorianus
ctccggctgcctttaaattgtttgt

SEQ ID NO: 135760 - DNA, 25 bp, Saccharomyces pastorianus
gacgctatttgttgggcgttcaaac

SEQ ID NO: 135761 - DNA, 25 bp, Saccharomyces pastorianus
atgtcccatttgcaaatgagttcca

SEQ ID NO: 135762 - DNA, 25 bp, Saccharomyces pastorianus
gtcggaggtgatccaacagattatt

SEQ ID NO: 135763 - DNA, 25 bp, Saccharomyces pastorianus
taaccgattccgaccacaaatccgg

SEQ ID NO: 135764 - DNA, 25 bp, Saccharomyces pastorianus
atccggtttttctaagcaagctttg

SEQ ID NO: 135765 - DNA, 25 bp, Saccharomyces pastorianus
gctgaggtaccacaaggaacttcaa

SEQ ID NO: 135766 - DNA, 25 bp, Saccharomyces pastorianus
tcgcaagttttctctctgcattaac

SEQ ID NO: 135767 - DNA, 25 bp, Saccharomyces pastorianus
acaaggcttgtggtattattatttc

SEQ ID NO: 135768 - DNA, 25 bp, Saccharomyces pastorianus
gttgttagattctgaaactgtcaaa

SEQ ID NO: 135769 - DNA, 25 bp, Saccharomyces pastorianus
tcggatattatgtacgtcgtgggcc

SEQ ID NO: 135770 - DNA, 25 bp, Saccharomyces pastorianus
aacaaccccgtgagtctgagccttt

SEQ ID NO: 135771 - DNA, 25 bp, Saccharomyces pastorianus
aaactcatgagggtgttcaggatat

SEQ ID NO: 135772 - DNA, 25 bp, Saccharomyces pastorianus
gatttactagatttaacggtcaaga

SEQ ID NO: 135773 - DNA, 25 bp, Saccharomyces pastorianus
agtctgagcctttcatccaaacaat

SEQ ID NO: 135774 - DNA, 25 bp, Saccharomyces pastorianus
tcctagatttttgaaggctcactgg

SEQ ID NO: 135775 - DNA, 25 bp, Saccharomyces pastorianus
gtcgtgggccaatatcctagatttt

SEQ ID NO: 135776 - DNA, 25 bp, Saccharomyces pastorianus
ccactgctaacccaacattgttgtt

SEQ ID NO: 135777 - DNA, 25 bp, Saccharomyces pastorianus
gtggaacaatccactgctaacccaa

SEQ ID NO: 135778 - DNA, 25 bp, Saccharomyces pastorianus
gaaagtcgacgatgaaaataatgtt

SEQ ID NO: 135779 - DNA, 25 bp, Saccharomyces pastorianus
ttatggtcaaaaccaagacccaggt

SEQ ID NO: 135780 - DNA, 25 bp, Saccharomyces pastorianus
ggtactgccaggaagaaagatgcct

SEQ ID NO: 135781 - DNA, 25 bp, Saccharomyces pastorianus
atgcctggtcatatgggaaacgagc

SEQ ID NO: 135782 - DNA, 25 bp, Saccharomyces pastorianus
tatttgggttaaaggctctgtggct

SEQ ID NO: 135783 - DNA, 25 bp, Saccharomyces pastorianus
aaagatgcctggtcatatgggaaac

SEQ ID NO: 135784 - DNA, 25 bp, Saccharomyces pastorianus
ttaaaggctctgtggctgggcccaa

SEQ ID NO: 135785 - DNA, 25 bp, Saccharomyces pastorianus
ggaaacgagcatgttactatccaaa

SEQ ID NO: 135786 - DNA, 25 bp, Saccharomyces pastorianus
tgtggctgggcccaaaaacagtttc

SEQ ID NO: 135787 - DNA, 25 bp, Saccharomyces pastorianus
aaggctctgtggctgggcccaaaaa

SEQ ID NO: 135788 - DNA, 25 bp, Saccharomyces pastorianus
gacccaggtagggtactgccaggaa

SEQ ID NO: 135789 - DNA, 25 bp, Saccharomyces pastorianus
ccttcacagccgctttatgtggaag

SEQ ID NO: 135790 - DNA, 25 bp, Saccharomyces pastorianus
attgccgccgactgcaagcaggttt

SEQ ID NO: 135791 - DNA, 25 bp, Saccharomyces pastorianus
gactgcaagcaggtttgcatgttca

SEQ ID NO: 135792 - DNA, 25 bp, Saccharomyces pastorianus
gctacaagaattatcattgccgccg

SEQ ID NO: 135793 - DNA, 25 bp, Saccharomyces pastorianus
caagaattatcattgccgccgactg

SEQ ID NO: 135794 - DNA, 25 bp, Saccharomyces pastorianus
agaattatcattgccgccgactgca

SEQ ID NO: 135795 - DNA, 25 bp, Saccharomyces pastorianus
ggaaatatcccataagctacaagaa

SEQ ID NO: 135796 - DNA, 25 bp, Saccharomyces pastorianus
gtttatccaagtcggaaatatccca

SEQ ID NO: 135797 - DNA, 25 bp, Saccharomyces pastorianus
gccgactgcaagcaggtttgcatgt

SEQ ID NO: 135798 - DNA, 25 bp, Saccharomyces pastorianus
acagccgctttatgtggaagaacaa

SEQ ID NO: 135799 - DNA, 25 bp, Saccharomyces pastorianus
atggccttcacagccgctttatgtg

SEQ ID NO: 135800 - DNA, 25 bp, Saccharomyces pastorianus
atccataaatcccactctcttgaat

SEQ ID NO: 135801 - DNA, 25 bp, Saccharomyces pastorianus
taccctccatatactctataatatt

SEQ ID NO: 135802 - DNA, 25 bp, Saccharomyces pastorianus
tttcgataccctccatatactctat

SEQ ID NO: 135803 - DNA, 25 bp, Saccharomyces pastorianus
atgtgttgtttcgataccctccata

SEQ ID NO: 135804 - DNA, 25 bp, Saccharomyces pastorianus
cataaatcccactctcttgaatttc

SEQ ID NO: 135805 - DNA, 25 bp, Saccharomyces pastorianus
tcccactctcttgaatttcattaat

SEQ ID NO: 135806 - DNA, 25 bp, Saccharomyces pastorianus
gttgtttcgataccctccatatact

SEQ ID NO: 135807 - DNA, 25 bp, Saccharomyces pastorianus
attagatccataaatcccactctct

SEQ ID NO: 135808 - DNA, 25 bp, Saccharomyces pastorianus
aatcccactctcttgaatttcatta

SEQ ID NO: 135809 - DNA, 25 bp, Saccharomyces pastorianus
gtgttgtttcgataccctccatata

SEQ ID NO: 135810 - DNA, 25 bp, Saccharomyces pastorianus
cgataccctccatatactctataat

SEQ ID NO: 135811 - DNA, 25 bp, Saccharomyces pastorianus
gcgacctaacttcgagtagttttga

SEQ ID NO: 135812 - DNA, 25 bp, Saccharomyces pastorianus
ggtatcaccgaatccaaaagtagca

SEQ ID NO: 135813 - DNA, 25 bp, Saccharomyces pastorianus
tactgcgctcagtacacgcaaaggg

SEQ ID NO: 135814 - DNA, 25 bp, Saccharomyces pastorianus
gaatccaaaagtagcaacaatctgt

SEQ ID NO: 135815 - DNA, 25 bp, Saccharomyces pastorianus
aacaatctgtttatgtctcaacgac

SEQ ID NO: 135816 - DNA, 25 bp, Saccharomyces pastorianus
aatacaggattcttggtatcaccga

SEQ ID NO: 135817 - DNA, 25 bp, Saccharomyces pastorianus
agattactgcgctcagtacacgcaa

SEQ ID NO: 135818 - DNA, 25 bp, Saccharomyces pastorianus
tacacgcaaagggttgggcgaccta

SEQ ID NO: 135819 - DNA, 25 bp, Saccharomyces pastorianus
tggaacttggagagattactgcgct

SEQ ID NO: 135820 - DNA, 25 bp, Saccharomyces pastorianus
cgagtagttttgataattttggata

SEQ ID NO: 135821 - DNA, 25 bp, Saccharomyces pastorianus
gttgggcgacctaacttcgagtagt

SEQ ID NO: 135822 - DNA, 25 bp, Saccharomyces pastorianus
tttacagttgtagtctccgcttcgc

SEQ ID NO: 135823 - DNA, 25 bp, Saccharomyces pastorianus
atgctctgcttgtccaaggctttct

SEQ ID NO: 135824 - DNA, 25 bp, Saccharomyces pastorianus
atttcatgctctgcttgtccaaggc

SEQ ID NO: 135825 - DNA, 25 bp, Saccharomyces pastorianus
agctttgatttcatgctctgcttgt

SEQ ID NO: 135826 - DNA, 25 bp, Saccharomyces pastorianus
tatcagctttgatttcatgctctgc

SEQ ID NO: 135827 - DNA, 25 bp, Saccharomyces pastorianus
tctgcttgtccaaggctttctgtat

SEQ ID NO: 135828 - DNA, 25 bp, Saccharomyces pastorianus
ttgatttcatgctctgcttgtccaa

SEQ ID NO: 135829 - DNA, 25 bp, Saccharomyces pastorianus
cagttgtagtctccgcttcgctagg

SEQ ID NO: 135830 - DNA, 25 bp, Saccharomyces pastorianus
gtatttacagttgtagtctccgctt

SEQ ID NO: 135831 - DNA, 25 bp, Saccharomyces pastorianus
gtccaaggctttctgtatttacagt

SEQ ID NO: 135832 - DNA, 25 bp, Saccharomyces pastorianus
gcttgtccaaggctttctgtattta

SEQ ID NO: 135833 - DNA, 25 bp, Saccharomyces pastorianus
ggttacagcgggatctactacgctt

SEQ ID NO: 135834 - DNA, 25 bp, Saccharomyces pastorianus
gctcagagattcaaccacaggcaaa

SEQ ID NO: 135835 - DNA, 25 bp, Saccharomyces pastorianus
agtggtgtctctcagaagcctacta

SEQ ID NO: 135836 - DNA, 25 bp, Saccharomyces pastorianus
gggagtatgcgccaaatagttttca

SEQ ID NO: 135837 - DNA, 25 bp, Saccharomyces pastorianus
cagtccagctggtaattcgtgtata

SEQ ID NO: 135838 - DNA, 25 bp, Saccharomyces pastorianus
agtactgaagatatgcccgtcgttg

SEQ ID NO: 135839 - DNA, 25 bp, Saccharomyces pastorianus
tgaacgttttttgcgtcacagcgga

SEQ ID NO: 135840 - DNA, 25 bp, Saccharomyces pastorianus
aagcttgctcgatccttaactggaa

SEQ ID NO: 135841 - DNA, 25 bp, Saccharomyces pastorianus
acggactactgttgattgcatcggt

SEQ ID NO: 135842 - DNA, 25 bp, Saccharomyces pastorianus
cccgtcgttggctaggatcatcaaa

SEQ ID NO: 135843 - DNA, 25 bp, Saccharomyces pastorianus
tactagaagttattcccgggtcagt

SEQ ID NO: 135844 - DNA, 25 bp, Saccharomyces pastorianus
gcgtctgtgcaatactactatgatg

SEQ ID NO: 135845 - DNA, 25 bp, Saccharomyces pastorianus
attaagtaccgcgtctgtgcaatac

SEQ ID NO: 135846 - DNA, 25 bp, Saccharomyces pastorianus
ttgcgtatgcaatgccaacaacctt

SEQ ID NO: 135847 - DNA, 25 bp, Saccharomyces pastorianus
tttccacactttaccgaaagacaag

SEQ ID NO: 135848 - DNA, 25 bp, Saccharomyces pastorianus
ccgaaagacaagatcgtgtttggaa

SEQ ID NO: 135849 - DNA, 25 bp, Saccharomyces pastorianus
agagattaagtaccgcgtctgtgca

SEQ ID NO: 135850 - DNA, 25 bp, Saccharomyces pastorianus
gtgcaatactactatgatgccaaaa

SEQ ID NO: 135851 - DNA, 25 bp, Saccharomyces pastorianus
tgttttgcgtatgcaatgccaacaa

SEQ ID NO: 135852 - DNA, 25 bp, Saccharomyces pastorianus
tgaacacctttccacactttaccga

SEQ ID NO: 135853 - DNA, 25 bp, Saccharomyces pastorianus
gaaatgaacacctttccacacttta

SEQ ID NO: 135854 - DNA, 25 bp, Saccharomyces pastorianus
taccgcgtctgtgcaatactactat

SEQ ID NO: 135855 - DNA, 25 bp, Saccharomyces pastorianus
gcgtctgtgcaatactactatgatg

SEQ ID NO: 135856 - DNA, 25 bp, Saccharomyces pastorianus
tttccacactttaccgaaagacaag

SEQ ID NO: 135857 - DNA, 25 bp, Saccharomyces pastorianus
ccgaaagacaagatcgtgtttggaa

SEQ ID NO: 135858 - DNA, 25 bp, Saccharomyces pastorianus
gggtctcatccataatctagaaatg

SEQ ID NO: 135859 - DNA, 25 bp, Saccharomyces pastorianus
agagattaagtaccgcgtctgtgca

SEQ ID NO: 135860 - DNA, 25 bp, Saccharomyces pastorianus
gtgcaatactactatgatgccaaaa

SEQ ID NO: 135861 - DNA, 25 bp, Saccharomyces pastorianus
tgttttgcgtatgcaatgccaacaa

SEQ ID NO: 135862 - DNA, 25 bp, Saccharomyces pastorianus
gaaatgaacacctttccacacttta

SEQ ID NO: 135863 - DNA, 25 bp, Saccharomyces pastorianus
gcaatgccaacaaccttcaggaaca

SEQ ID NO: 135864 - DNA, 25 bp, Saccharomyces pastorianus
ttcaggaacaccatgggtctcatcc

SEQ ID NO: 135865 - DNA, 25 bp, Saccharomyces pastorianus
taccgcgtctgtgcaatactactat

SEQ ID NO: 135866 - DNA, 25 bp, Saccharomyces pastorianus
ttaccgtcagctagatcccgttgag

SEQ ID NO: 135867 - DNA, 25 bp, Saccharomyces pastorianus
tgaggagaagattgttccaccagaa

SEQ ID NO: 135868 - DNA, 25 bp, Saccharomyces pastorianus
attttggttgcttccatgacaggtt

SEQ ID NO: 135869 - DNA, 25 bp, Saccharomyces pastorianus
gatttttaccgtcagctagatcccg

SEQ ID NO: 135870 - DNA, 25 bp, Saccharomyces pastorianus
gctagatcccgttgaggagaagatt

SEQ ID NO: 135871 - DNA, 25 bp, Saccharomyces pastorianus
taatttcttcggaggccaaagaggc

SEQ ID NO: 135872 - DNA, 25 bp, Saccharomyces pastorianus
cgtcagctagatcccgttgaggaga

SEQ ID NO: 135873 - DNA, 25 bp, Saccharomyces pastorianus
acaaaagatttttaccgtcagctag

SEQ ID NO: 135874 - DNA, 25 bp, Saccharomyces pastorianus
aaacgctatagtaatttcttcggag

SEQ ID NO: 135875 - DNA, 25 bp, Saccharomyces pastorianus
tatagtaatttcttcggaggccaaa

SEQ ID NO: 135876 - DNA, 25 bp, Saccharomyces pastorianus
ggttgcttccatgacaggttccgtt

SEQ ID NO: 135877 - DNA, 25 bp, Saccharomyces pastorianus
aaaatgagctggtagacggtatttc

SEQ ID NO: 135878 - DNA, 25 bp, Saccharomyces pastorianus
agaaaatgagctggtagacggtatt

SEQ ID NO: 135879 - DNA, 25 bp, Saccharomyces pastorianus
atattggagaaaatgagctggtaga

SEQ ID NO: 135880 - DNA, 25 bp, Saccharomyces pastorianus
gctggtagacggtatttcagtacgt

SEQ ID NO: 135881 - DNA, 25 bp, Saccharomyces pastorianus
aaatgagctggtagacggtatttca

SEQ ID NO: 135882 - DNA, 25 bp, Saccharomyces pastorianus
gagaaaatgagctggtagacggtat

SEQ ID NO: 135883 - DNA, 25 bp, Saccharomyces pastorianus
agctggtagacggtatttcagtacg

SEQ ID NO: 135884 - DNA, 25 bp, Saccharomyces pastorianus
atatattggagaaaatgagctggta

SEQ ID NO: 135885 - DNA, 25 bp, Saccharomyces pastorianus
aatgagctggtagacggtatttcag

SEQ ID NO: 135886 - DNA, 25 bp, Saccharomyces pastorianus
tgagctggtagacggtatttcagta

SEQ ID NO: 135887 - DNA, 25 bp, Saccharomyces pastorianus
atgagctggtagacggtatttcagt

SEQ ID NO: 135888 - DNA, 25 bp, Saccharomyces pastorianus
aacaaaatccgcagggctatcaccc

SEQ ID NO: 135889 - DNA, 25 bp, Saccharomyces pastorianus
catcctcaacaaacgaccatcaatt

SEQ ID NO: 135890 - DNA, 25 bp, Saccharomyces pastorianus
ttatgaagtacgacagttctggccg

SEQ ID NO: 135891 - DNA, 25 bp, Saccharomyces pastorianus
aattcgaggcgcagctcaaagcgga

SEQ ID NO: 135892 - DNA, 25 bp, Saccharomyces pastorianus
gaagttcacttcacatccaatgaga

SEQ ID NO: 135893 - DNA, 25 bp, Saccharomyces pastorianus
aaaaggacagttcctcatcctcaac

SEQ ID NO: 135894 - DNA, 25 bp, Saccharomyces pastorianus
gttctggccgaaagctaactcctat

SEQ ID NO: 135895 - DNA, 25 bp, Saccharomyces pastorianus
gcctctgtaaatgagtacttcccaa

SEQ ID NO: 135896 - DNA, 25 bp, Saccharomyces pastorianus
atttacaaccacgaaactgcctcta

SEQ ID NO: 135897 - DNA, 25 bp, Saccharomyces pastorianus
gtacttcccaatctcacctgaaaaa

SEQ ID NO: 135898 - DNA, 25 bp, Saccharomyces pastorianus
ctacgcctcatatcaagacagcact

SEQ ID NO: 135899 - DNA, 25 bp, Saccharomyces pastorianus
ggcaccttccttaattgatgaccaa

SEQ ID NO: 135900 - DNA, 25 bp, Saccharomyces pastorianus
ggtagccaggctctaatgaccttgc

SEQ ID NO: 135901 - DNA, 25 bp, Saccharomyces pastorianus
aggctctaatgaccttgccactgac

SEQ ID NO: 135902 - DNA, 25 bp, Saccharomyces pastorianus
gtcatctgcaaagacatttactaag

SEQ ID NO: 135903 - DNA, 25 bp, Saccharomyces pastorianus
atactttgaccggtagccaggctct

SEQ ID NO: 135904 - DNA, 25 bp, Saccharomyces pastorianus
ttaaaaatgacagtcaccatgttgg

SEQ ID NO: 135905 - DNA, 25 bp, Saccharomyces pastorianus
atatacctccacaatttaatcctgt

SEQ ID NO: 135906 - DNA, 25 bp, Saccharomyces pastorianus
gacatttactaagcatatctcgttt

SEQ ID NO: 135907 - DNA, 25 bp, Saccharomyces pastorianus
tcattttttacatatacctccacaa

SEQ ID NO: 135908 - DNA, 25 bp, Saccharomyces pastorianus
tgatgaccaagctaccattattaaa

SEQ ID NO: 135909 - DNA, 25 bp, Saccharomyces pastorianus
ttgatgatctggcaccttccttaat

SEQ ID NO: 135910 - DNA, 25 bp, Saccharomyces pastorianus
acaagcaggagcagcgtggcgccat

SEQ ID NO: 135911 - DNA, 25 bp, Saccharomyces pastorianus
gagattccctcaaggacgaactgct

SEQ ID NO: 135912 - DNA, 25 bp, Saccharomyces pastorianus
ttctttgcgggctaatttactcgac

SEQ ID NO: 135913 - DNA, 25 bp, Saccharomyces pastorianus
aaaaagctatcctaccagtgcacgg

SEQ ID NO: 135914 - DNA, 25 bp, Saccharomyces pastorianus
ggaagctcgaagtctatggacctaa

SEQ ID NO: 135915 - DNA, 25 bp, Saccharomyces pastorianus
tgcacggccaccttcaagtgagaaa

SEQ ID NO: 135916 - DNA, 25 bp, Saccharomyces pastorianus
aaggctattcacctatcacaatccg

SEQ ID NO: 135917 - DNA, 25 bp, Saccharomyces pastorianus
aaattttgatgcgttccacagaatg

SEQ ID NO: 135918 - DNA, 25 bp, Saccharomyces pastorianus
gtggcgccatcactcatggaaattt

SEQ ID NO: 135919 - DNA, 25 bp, Saccharomyces pastorianus
gaaaactctctgatggaagctcgaa

SEQ ID NO: 135920 - DNA, 25 bp, Saccharomyces pastorianus
gaatcgtcctgctatctgggtaaat

SEQ ID NO: 135921 - DNA, 25 bp, Saccharomyces pastorianus
agtggaccataccacaacctatcgg

SEQ ID NO: 135922 - DNA, 25 bp, Saccharomyces pastorianus
acgatctggtcgtctttgatttatc

SEQ ID NO: 135923 - DNA, 25 bp, Saccharomyces pastorianus
tggcggcgacacacacaagctgaat

SEQ ID NO: 135924 - DNA, 25 bp, Saccharomyces pastorianus
gcctatgttgtgtttggcggcgaca

SEQ ID NO: 135925 - DNA, 25 bp, Saccharomyces pastorianus
tgcctcctcctttaacaaatcatac

SEQ ID NO: 135926 - DNA, 25 bp, Saccharomyces pastorianus
tgatacataccgctacgatccagca

SEQ ID NO: 135927 - DNA, 25 bp, Saccharomyces pastorianus
aatttttagagcctgtcggcgacct

SEQ ID NO: 135928 - DNA, 25 bp, Saccharomyces pastorianus
taaactatatctttttggcggacaa

SEQ ID NO: 135929 - DNA, 25 bp, Saccharomyces pastorianus
gcaggtacggccataaaatttctat

SEQ ID NO: 135930 - DNA, 25 bp, Saccharomyces pastorianus
gatttatcatcattccgtaggccga

SEQ ID NO: 135931 - DNA, 25 bp, Saccharomyces pastorianus
ccgtaggccgaattctcattgggaa

SEQ ID NO: 135932 - DNA, 25 bp, Saccharomyces pastorianus
atgcgttctactaccaacagagaaa

SEQ ID NO: 135933 - DNA, 25 bp, Saccharomyces pastorianus
aaatgtcactacgagacaagcaaaa

SEQ ID NO: 135934 - DNA, 25 bp, Saccharomyces pastorianus
ggtaaacaaaaaatgtcactacgag

SEQ ID NO: 135935 - DNA, 25 bp, Saccharomyces pastorianus
gaactttgttatgtctattcacaag

SEQ ID NO: 135936 - DNA, 25 bp, Saccharomyces pastorianus
gttatgtctattcacaagagatctg

SEQ ID NO: 135937 - DNA, 25 bp, Saccharomyces pastorianus
gcgttctactaccaacagagaaaaa

SEQ ID NO: 135938 - DNA, 25 bp, Saccharomyces pastorianus
cacaagagatctgttagaggtaaac

SEQ ID NO: 135939 - DNA, 25 bp, Saccharomyces pastorianus
atgtctattcacaagagatctgtta

SEQ ID NO: 135940 - DNA, 25 bp, Saccharomyces pastorianus
gaagaactttgttatgtctattcac

SEQ ID NO: 135941 - DNA, 25 bp, Saccharomyces pastorianus
agacaagcaaaaagtgttacgtgca

SEQ ID NO: 135942 - DNA, 25 bp, Saccharomyces pastorianus
ctattcacaagagatctgttagagg

SEQ ID NO: 135943 - DNA, 25 bp, Saccharomyces pastorianus
acaatggcgagaatacgtcgtatta

SEQ ID NO: 135944 - DNA, 25 bp, Saccharomyces pastorianus
gattggtgtttaacaattgccgaat

SEQ ID NO: 135945 - DNA, 25 bp, Saccharomyces pastorianus
acaattgccgaatgtacaatggcga

SEQ ID NO: 135946 - DNA, 25 bp, Saccharomyces pastorianus
ggtgtttaacaattgccgaatgtac

SEQ ID NO: 135947 - DNA, 25 bp, Saccharomyces pastorianus
tacgtcgtattacaagtatgctaat

SEQ ID NO: 135948 - DNA, 25 bp, Saccharomyces pastorianus
gtacaatggcgagaatacgtcgtat

SEQ ID NO: 135949 - DNA, 25 bp, Saccharomyces pastorianus
atatgatgccagattggtgtttaac

SEQ ID NO: 135950 - DNA, 25 bp, Saccharomyces pastorianus
gaatacgtcgtattacaagtatgct

SEQ ID NO: 135951 - DNA, 25 bp, Saccharomyces pastorianus
attgccgaatgtacaatggcgagaa

SEQ ID NO: 135952 - DNA, 25 bp, Saccharomyces pastorianus
gatgccagattggtgtttaacaatt

SEQ ID NO: 135953 - DNA, 25 bp, Saccharomyces pastorianus
taataggctagagaaattcttcaat

SEQ ID NO: 135954 - DNA, 25 bp, Saccharomyces pastorianus
gggttgccttgttaattgctggcca

SEQ ID NO: 135955 - DNA, 25 bp, Saccharomyces pastorianus
accatctgggacattttaccgttat

SEQ ID NO: 135956 - DNA, 25 bp, Saccharomyces pastorianus
tttccatgcagaaccatctgggaca

SEQ ID NO: 135957 - DNA, 25 bp, Saccharomyces pastorianus
gaaggagcacaagcagaattattga

SEQ ID NO: 135958 - DNA, 25 bp, Saccharomyces pastorianus
ttttaccgttataatgccaaagcca

SEQ ID NO: 135959 - DNA, 25 bp, Saccharomyces pastorianus
gccaaagccattggttcaggctctg

SEQ ID NO: 135960 - DNA, 25 bp, Saccharomyces pastorianus
aattgctggccatgatgcggatgat

SEQ ID NO: 135961 - DNA, 25 bp, Saccharomyces pastorianus
gcggatgatggttatcaacttttcc

SEQ ID NO: 135962 - DNA, 25 bp, Saccharomyces pastorianus
gataacgaaaaaactgctgaattga

SEQ ID NO: 135963 - DNA, 25 bp, Saccharomyces pastorianus
attggttcaggctctgaaggagcac

SEQ ID NO: 135964 - DNA, 25 bp, Saccharomyces pastorianus
aaacttgatgaaaataacgcgcaat

SEQ ID NO: 135965 - DNA, 25 bp, Saccharomyces pastorianus
tgtaagcacattttccccagaaggg

SEQ ID NO: 135966 - DNA, 25 bp, Saccharomyces pastorianus
ggtgtggagaaacgtgccacctcac

SEQ ID NO: 135967 - DNA, 25 bp, Saccharomyces pastorianus
tccccagaagggaggttattccaag

SEQ ID NO: 135968 - DNA, 25 bp, Saccharomyces pastorianus
gagtattctttggaggccatcaaat

SEQ ID NO: 135969 - DNA, 25 bp, Saccharomyces pastorianus
tgtggagaaacgtgccacctcacca

SEQ ID NO: 135970 - DNA, 25 bp, Saccharomyces pastorianus
ggaggttattccaagttgagtattc

SEQ ID NO: 135971 - DNA, 25 bp, Saccharomyces pastorianus
gtattctttggaggccatcaaatta

SEQ ID NO: 135972 - DNA, 25 bp, Saccharomyces pastorianus
agttgagtattctttggaggccatc

SEQ ID NO: 135973 - DNA, 25 bp, Saccharomyces pastorianus
ttgtactaggtgtggagaaacgtgc

SEQ ID NO: 135974 - DNA, 25 bp, Saccharomyces pastorianus
gtaagcacattttccccagaaggga

SEQ ID NO: 135975 - DNA, 25 bp, Saccharomyces pastorianus
ggagaaacgtgccacctcaccactg

SEQ ID NO: 135976 - DNA, 25 bp, Saccharomyces pastorianus
gacgattttatcgtttctgcaagat

SEQ ID NO: 135977 - DNA, 25 bp, Saccharomyces pastorianus
aagcacctaaacctacggcaagaag

SEQ ID NO: 135978 - DNA, 25 bp, Saccharomyces pastorianus
aagatctttcacatctagctccaac

SEQ ID NO: 135979 - DNA, 25 bp, Saccharomyces pastorianus
tagctccaacgcaaaattgactggg

SEQ ID NO: 135980 - DNA, 25 bp, Saccharomyces pastorianus
gatgatttcatccttgtttgattca

SEQ ID NO: 135981 - DNA, 25 bp, Saccharomyces pastorianus
aaacaccttcacatctcaaaacggg

SEQ ID NO: 135982 - DNA, 25 bp, Saccharomyces pastorianus
gtttgcaaagcctggacgagttttt

SEQ ID NO: 135983 - DNA, 25 bp, Saccharomyces pastorianus
gtgtcactactattacaagcaccta

SEQ ID NO: 135984 - DNA, 25 bp, Saccharomyces pastorianus
gtgactcttctttgggaacgtcttc

SEQ ID NO: 135985 - DNA, 25 bp, Saccharomyces pastorianus
tttattaccaacaactcagcaagat

SEQ ID NO: 135986 - DNA, 25 bp, Saccharomyces pastorianus
ttttcatcccagtcttttattacca

SEQ ID NO: 135987 - DNA, 25 bp, Saccharomyces pastorianus
gtttgaggtttcttccattctagag

SEQ ID NO: 135988 - DNA, 25 bp, Saccharomyces pastorianus
aaaataaaaactccgctgttcatcg

SEQ ID NO: 135989 - DNA, 25 bp, Saccharomyces pastorianus
attacatcctaatgcggtctatcgt

SEQ ID NO: 135990 - DNA, 25 bp, Saccharomyces pastorianus
gttacaatgtttgaggtttcttcca

SEQ ID NO: 135991 - DNA, 25 bp, Saccharomyces pastorianus
ttccattctagagaaactgccgcag

SEQ ID NO: 135992 - DNA, 25 bp, Saccharomyces pastorianus
aatgtcgttcttaacacaaagatcg

SEQ ID NO: 135993 - DNA, 25 bp, Saccharomyces pastorianus
gaaactgccgcagaatattttactg

SEQ ID NO: 135994 - DNA, 25 bp, Saccharomyces pastorianus
gcggtctatcgtttctgcaatatga

SEQ ID NO: 135995 - DNA, 25 bp, Saccharomyces pastorianus
tattttactgtttcactaccctctt

SEQ ID NO: 135996 - DNA, 25 bp, Saccharomyces pastorianus
tgttcatcgcttcctacgcaatgtt

SEQ ID NO: 135997 - DNA, 25 bp, Saccharomyces pastorianus
tcctacgcaatgttcttagccaagc

SEQ ID NO: 135998 - DNA, 25 bp, Saccharomyces pastorianus
ttgcatctctctattcattttacta

SEQ ID NO: 135999 - DNA, 25 bp, Saccharomyces pastorianus
tgcatttgtatagcatagccaagtc

SEQ ID NO: 136000 - DNA, 25 bp, Saccharomyces pastorianus
gtcaacaacaatactgcgttttcta

SEQ ID NO: 136001 - DNA, 25 bp, Saccharomyces pastorianus
ctgcgttttctaaggcatattttat

SEQ ID NO: 136002 - DNA, 25 bp, Saccharomyces pastorianus
ttattgccatttttgcatctctcta

SEQ ID NO: 136003 - DNA, 25 bp, Saccharomyces pastorianus
gttgcttgtgcagaataatctatgt

SEQ ID NO: 136004 - DNA, 25 bp, Saccharomyces pastorianus
tcattttactagttgcttgtgcaga

SEQ ID NO: 136005 - DNA, 25 bp, Saccharomyces pastorianus
tatagcatagccaagtcaacaacaa

SEQ ID NO: 136006 - DNA, 25 bp, Saccharomyces pastorianus
aatactgcgttttctaaggcatatt

SEQ ID NO: 136007 - DNA, 25 bp, Saccharomyces pastorianus
cttgtgcagaataatctatgttggc

SEQ ID NO: 136008 - DNA, 25 bp, Saccharomyces pastorianus
gccatttttgcatctctctattcat

SEQ ID NO: 136009 - DNA, 25 bp, Saccharomyces pastorianus
atgggcacatgcattgtattgataa

SEQ ID NO: 136010 - DNA, 25 bp, Saccharomyces pastorianus
gagttggtgggtttcactgagtcaa

SEQ ID NO: 136011 - DNA, 25 bp, Saccharomyces pastorianus
agttccgcgtaaataggcccatcca

SEQ ID NO: 136012 - DNA, 25 bp, Saccharomyces pastorianus
gcaaaccgtgctgacaaaatcgaaa

SEQ ID NO: 136013 - DNA, 25 bp, Saccharomyces pastorianus
gaattttccagccaaacttgtacaa

SEQ ID NO: 136014 - DNA, 25 bp, Saccharomyces pastorianus
tagaacctggttttgcgaatgaaca

SEQ ID NO: 136015 - DNA, 25 bp, Saccharomyces pastorianus
catccagcttcgtccaataacatta

SEQ ID NO: 136016 - DNA, 25 bp, Saccharomyces pastorianus
gaacaatcgctacaatctgcaaacg

SEQ ID NO: 136017 - DNA, 25 bp, Saccharomyces pastorianus
gaagtgaaagcagcttctgctcaaa

SEQ ID NO: 136018 - DNA, 25 bp, Saccharomyces pastorianus
gaagaacgccatacccgaaatattt

SEQ ID NO: 136019 - DNA, 25 bp, Saccharomyces pastorianus
cggaggtagaacttcatgggcacat

SEQ ID NO: 136020 - DNA, 25 bp, Saccharomyces pastorianus
cttttccaggtttccgatgaggcga

SEQ ID NO: 136021 - DNA, 25 bp, Saccharomyces pastorianus
agaaggctaacgctggtcggatact

SEQ ID NO: 136022 - DNA, 25 bp, Saccharomyces pastorianus
ttctccatccggcaattaagggctg

SEQ ID NO: 136023 - DNA, 25 bp, Saccharomyces pastorianus
gatggcattggtattttcccttact

SEQ ID NO: 136024 - DNA, 25 bp, Saccharomyces pastorianus
agtgccacaactcgaatcgctgatg

SEQ ID NO: 136025 - DNA, 25 bp, Saccharomyces pastorianus
gaacgtgccctggagacattttaag

SEQ ID NO: 136026 - DNA, 25 bp, Saccharomyces pastorianus
ttgaagaccaagatagcctcgccac

SEQ ID NO: 136027 - DNA, 25 bp, Saccharomyces pastorianus
ggtacccatgtttgtaaacccagct

SEQ ID NO: 136028 - DNA, 25 bp, Saccharomyces pastorianus
gaacacttacgatagactcttggaa

SEQ ID NO: 136029 - DNA, 25 bp, Saccharomyces pastorianus
tattatcaaacgacttctccatccg

SEQ ID NO: 136030 - DNA, 25 bp, Saccharomyces pastorianus
tcgccactttgcaccttgaatgaac

SEQ ID NO: 136031 - DNA, 25 bp, Saccharomyces pastorianus
ggatgcgcatgccataacccttgca

SEQ ID NO: 136032 - DNA, 25 bp, Saccharomyces pastorianus
gccataacccttgcatggttagcac

SEQ ID NO: 136033 - DNA, 25 bp, Saccharomyces pastorianus
cgcatgccataacccttgcatggtt

SEQ ID NO: 136034 - DNA, 25 bp, Saccharomyces pastorianus
gatgcgcatgccataacccttgcat

SEQ ID NO: 136035 - DNA, 25 bp, Saccharomyces pastorianus
atgcgcatgccataacccttgcatg

SEQ ID NO: 136036 - DNA, 25 bp, Saccharomyces pastorianus
taacccttgcatggttagcacacgc

SEQ ID NO: 136037 - DNA, 25 bp, Saccharomyces pastorianus
atggatgcgcatgccataacccttg

SEQ ID NO: 136038 - DNA, 25 bp, Saccharomyces pastorianus
atgccataacccttgcatggttagc

SEQ ID NO: 136039 - DNA, 25 bp, Saccharomyces pastorianus
ataacccttgcatggttagcacacg

SEQ ID NO: 136040 - DNA, 25 bp, Saccharomyces pastorianus
gcgcatgccataacccttgcatggt

SEQ ID NO: 136041 - DNA, 25 bp, Saccharomyces pastorianus
acatggatgcgcatgccataaccct

SEQ ID NO: 136042 - DNA, 25 bp, Saccharomyces pastorianus
aattgtggtactaggagatgcaaac

SEQ ID NO: 136043 - DNA, 25 bp, Saccharomyces pastorianus
ttctaccttttctacctgaattaca

SEQ ID NO: 136044 - DNA, 25 bp, Saccharomyces pastorianus
tttttccggcaagagtcgcgtgatc

SEQ ID NO: 136045 - DNA, 25 bp, Saccharomyces pastorianus
catactagaggaaacttctaccttt

SEQ ID NO: 136046 - DNA, 25 bp, Saccharomyces pastorianus
aatccaatctgtgaacatactagag

SEQ ID NO: 136047 - DNA, 25 bp, Saccharomyces pastorianus
agatgcaaaccttttggtctccaca

SEQ ID NO: 136048 - DNA, 25 bp, Saccharomyces pastorianus
gtaggaaatgccacatggatgcgca

SEQ ID NO: 136049 - DNA, 25 bp, Saccharomyces pastorianus
tttggtctccacatcaattgcagaa

SEQ ID NO: 136050 - DNA, 25 bp, Saccharomyces pastorianus
aaaagattgactgtttgcatgtgca

SEQ ID NO: 136051 - DNA, 25 bp, Saccharomyces pastorianus
ttgcatgtgcaattatcttatatat

SEQ ID NO: 136052 - DNA, 25 bp, Saccharomyces pastorianus
tacattatcaacacttttgcaccaa

SEQ ID NO: 136053 - DNA, 25 bp, Saccharomyces pastorianus
tcaggaccctattctatttgcaggt

SEQ ID NO: 136054 - DNA, 25 bp, Saccharomyces pastorianus
tgcacgatcattgttacgcgagcca

SEQ ID NO: 136055 - DNA, 25 bp, Saccharomyces pastorianus
ttcaaagcactttcacaggtaaatc

SEQ ID NO: 136056 - DNA, 25 bp, Saccharomyces pastorianus
aattcttactattgcacatcgtttg

SEQ ID NO: 136057 - DNA, 25 bp, Saccharomyces pastorianus
taatacttttggacgaggctacttc

SEQ ID NO: 136058 - DNA, 25 bp, Saccharomyces pastorianus
ttgagatctgttatcgactacgaca

SEQ ID NO: 136059 - DNA, 25 bp, Saccharomyces pastorianus
gatctcgttacattacgtcgttcca

SEQ ID NO: 136060 - DNA, 25 bp, Saccharomyces pastorianus
tgagggcggcttaaacctgtcccaa

SEQ ID NO: 136061 - DNA, 25 bp, Saccharomyces pastorianus
aggctacttcctctattgattacga

SEQ ID NO: 136062 - DNA, 25 bp, Saccharomyces pastorianus
atatgatcgccctagtgaactgttg

SEQ ID NO: 136063 - DNA, 25 bp, Saccharomyces pastorianus
taactcggaggaacgctttaacagc

SEQ ID NO: 136064 - DNA, 25 bp, Saccharomyces pastorianus
gaaattatgcaaaaggcttacgtag

SEQ ID NO: 136065 - DNA, 25 bp, Saccharomyces pastorianus
tggtatgttcatttgtagattgaca

SEQ ID NO: 136066 - DNA, 25 bp, Saccharomyces pastorianus
gttcatttgtagattgacattagca

SEQ ID NO: 136067 - DNA, 25 bp, Saccharomyces pastorianus
agcaatttgtaattcccaaggtcaa

SEQ ID NO: 136068 - DNA, 25 bp, Saccharomyces pastorianus
ggcgtggctttatattattggtatg

SEQ ID NO: 136069 - DNA, 25 bp, Saccharomyces pastorianus
ctcatcatgcatgaatttggcgtgg

SEQ ID NO: 136070 - DNA, 25 bp, Saccharomyces pastorianus
aaccgttcctcatcatgcatgaatt

SEQ ID NO: 136071 - DNA, 25 bp, Saccharomyces pastorianus
attcccaaggtcaatttgtttctga

SEQ ID NO: 136072 - DNA, 25 bp, Saccharomyces pastorianus
ttgtttaagaataagagccatactc

SEQ ID NO: 136073 - DNA, 25 bp, Saccharomyces pastorianus
taagagccatactcataggagaaat

SEQ ID NO: 136074 - DNA, 25 bp, Saccharomyces pastorianus
ggcttacgtaggaggctgtttacat

SEQ ID NO: 136075 - DNA, 25 bp, Saccharomyces pastorianus
ggaagactatagcattttcatccta

SEQ ID NO: 136076 - DNA, 25 bp, Saccharomyces pastorianus
ctggattccaatacgttcggtctat

SEQ ID NO: 136077 - DNA, 25 bp, Saccharomyces pastorianus
gttttactgcccatacaactatttg

SEQ ID NO: 136078 - DNA, 25 bp, Saccharomyces pastorianus
atgggaggcccaaaagaacactatt

SEQ ID NO: 136079 - DNA, 25 bp, Saccharomyces pastorianus
aagcgttcaacgaatctttgggcca

SEQ ID NO: 136080 - DNA, 25 bp, Saccharomyces pastorianus
atctttgggccatctgttttactgc

SEQ ID NO: 136081 - DNA, 25 bp, Saccharomyces pastorianus
gttgcattacttggagctggattac

SEQ ID NO: 136082 - DNA, 25 bp, Saccharomyces pastorianus
atacctctccttcgagggaacacat

SEQ ID NO: 136083 - DNA, 25 bp, Saccharomyces pastorianus
ggatgtaccctcacagatattttac

SEQ ID NO: 136084 - DNA, 25 bp, Saccharomyces pastorianus
gacgctagcactgtttgaatctttc

SEQ ID NO: 136085 - DNA, 25 bp, Saccharomyces pastorianus
acaactcatccatcatctacgtaag

SEQ ID NO: 136086 - DNA, 25 bp, Saccharomyces pastorianus
ttgtattggccacgataaccaccct

SEQ ID NO: 136087 - DNA, 25 bp, Saccharomyces pastorianus
acgcgtttgtattggccacgataac

SEQ ID NO: 136088 - DNA, 25 bp, Saccharomyces pastorianus
taacacgagaaggaagaaaaacgcg

SEQ ID NO: 136089 - DNA, 25 bp, Saccharomyces pastorianus
cgcgtttgtattggccacgataacc

SEQ ID NO: 136090 - DNA, 25 bp, Saccharomyces pastorianus
aaacgcgtttgtattggccacgata

SEQ ID NO: 136091 - DNA, 25 bp, Saccharomyces pastorianus
tttgtattggccacgataaccaccc

SEQ ID NO: 136092 - DNA, 25 bp, Saccharomyces pastorianus
aaaacgcgtttgtattggccacgat

SEQ ID NO: 136093 - DNA, 25 bp, Saccharomyces pastorianus
tgtattggccacgataaccaccctt

SEQ ID NO: 136094 - DNA, 25 bp, Saccharomyces pastorianus
gcgtttgtattggccacgataacca

SEQ ID NO: 136095 - DNA, 25 bp, Saccharomyces pastorianus
gtttgtattggccacgataaccacc

SEQ ID NO: 136096 - DNA, 25 bp, Saccharomyces pastorianus
aacgcgtttgtattggccacgataa

SEQ ID NO: 136097 - DNA, 25 bp, Saccharomyces pastorianus
tagctgctagtgaaattggtatctc

SEQ ID NO: 136098 - DNA, 25 bp, Saccharomyces pastorianus
agaagattccaagcttgcagaacaa

SEQ ID NO: 136099 - DNA, 25 bp, Saccharomyces pastorianus
gaaatgattcgattgttgggcagcg

SEQ ID NO: 136100 - DNA, 25 bp, Saccharomyces pastorianus
gggagactatgggatcaaacttttc

SEQ ID NO: 136101 - DNA, 25 bp, Saccharomyces pastorianus
tgagattgcataccttttccataat

SEQ ID NO: 136102 - DNA, 25 bp, Saccharomyces pastorianus
gatttagtaccataagtagcgctga

SEQ ID NO: 136103 - DNA, 25 bp, Saccharomyces pastorianus
gcagacttccgatgaatccacaata

SEQ ID NO: 136104 - DNA, 25 bp, Saccharomyces pastorianus
gagacgatcaccttcttaattgaaa

SEQ ID NO: 136105 - DNA, 25 bp, Saccharomyces pastorianus
aggttccattaagcagacttccgat

SEQ ID NO: 136106 - DNA, 25 bp, Saccharomyces pastorianus
gtagcgctgactttatccaaaatgt

SEQ ID NO: 136107 - DNA, 25 bp, Saccharomyces pastorianus
aagttcggtggcctgatcattcaga

SEQ ID NO: 136108 - DNA, 25 bp, Saccharomyces pastorianus
ggcactaacaaggatatgatattaa

SEQ ID NO: 136109 - DNA, 25 bp, Saccharomyces pastorianus
ggcagagacatatgttgcatcttat

SEQ ID NO: 136110 - DNA, 25 bp, Saccharomyces pastorianus
aagcgaatcacaaaaatagcacaat

SEQ ID NO: 136111 - DNA, 25 bp, Saccharomyces pastorianus
atagcacaatcacaaacaatggcag

SEQ ID NO: 136112 - DNA, 25 bp, Saccharomyces pastorianus
gttgcatcttatgttgttccacgat

SEQ ID NO: 136113 - DNA, 25 bp, Saccharomyces pastorianus
tgttgttccacgattatatttgaaa

SEQ ID NO: 136114 - DNA, 25 bp, Saccharomyces pastorianus
atgttgcatcttatgttgttccacg

SEQ ID NO: 136115 - DNA, 25 bp, Saccharomyces pastorianus
gcatcttatgttgttccacgattat

SEQ ID NO: 136116 - DNA, 25 bp, Saccharomyces pastorianus
gcacaatcacaaacaatggcagaga

SEQ ID NO: 136117 - DNA, 25 bp, Saccharomyces pastorianus
tcttatgttgttccacgattatatt

SEQ ID NO: 136118 - DNA, 25 bp, Saccharomyces pastorianus
atggcagagacatatgttgcatctt

SEQ ID NO: 136119 - DNA, 25 bp, Saccharomyces pastorianus
agagaattccagtctttttcaagaa

SEQ ID NO: 136120 - DNA, 25 bp, Saccharomyces pastorianus
aggttgcgactctacaaaaccctct

SEQ ID NO: 136121 - DNA, 25 bp, Saccharomyces pastorianus
gttgtggctggtaaatggtcaagta

SEQ ID NO: 136122 - DNA, 25 bp, Saccharomyces pastorianus
gatcaacgatgtgacagcaattcaa

SEQ ID NO: 136123 - DNA, 25 bp, Saccharomyces pastorianus
gtaagtacttgatcaaacagattga

SEQ ID NO: 136124 - DNA, 25 bp, Saccharomyces pastorianus
tgacaaaattcggtttacttctcca

SEQ ID NO: 136125 - DNA, 25 bp, Saccharomyces pastorianus
ttccctgctacaaatgttaccacta

SEQ ID NO: 136126 - DNA, 25 bp, Saccharomyces pastorianus
atgcaacaaaaattccctgctacaa

SEQ ID NO: 136127 - DNA, 25 bp, Saccharomyces pastorianus
taaagttggtctgccaagtgacaaa

SEQ ID NO: 136128 - DNA, 25 bp, Saccharomyces pastorianus
agcaaaacgatttcttattttcagt

SEQ ID NO: 136129 - DNA, 25 bp, Saccharomyces pastorianus
gaatctttaagtgttgtggctggta

SEQ ID NO: 136130 - DNA, 25 bp, Saccharomyces pastorianus
gatcgactcgattttgaattatgcg

SEQ ID NO: 136131 - DNA, 25 bp, Saccharomyces pastorianus
ggtttcagcgttggataagtgtatt

SEQ ID NO: 136132 - DNA, 25 bp, Saccharomyces pastorianus
gcatttgcaatttcaatgggatatt

SEQ ID NO: 136133 - DNA, 25 bp, Saccharomyces pastorianus
atttattcaaggtttcagcgttgga

SEQ ID NO: 136134 - DNA, 25 bp, Saccharomyces pastorianus
gttggtacagcgatcgactcgattt

SEQ ID NO: 136135 - DNA, 25 bp, Saccharomyces pastorianus
gaaagttgttggtacagcgatcgac

SEQ ID NO: 136136 - DNA, 25 bp, Saccharomyces pastorianus
aatattttgagcctacctcaacaga

SEQ ID NO: 136137 - DNA, 25 bp, Saccharomyces pastorianus
taacgaaatattttgagcctacctc

SEQ ID NO: 136138 - DNA, 25 bp, Saccharomyces pastorianus
gcaagtgtatttatgcctttgattt

SEQ ID NO: 136139 - DNA, 25 bp, Saccharomyces pastorianus
gagtcggttaatatagcatttgcaa

SEQ ID NO: 136140 - DNA, 25 bp, Saccharomyces pastorianus
gagcctacctcaacagaaaataaca

SEQ ID NO: 136141 - DNA, 25 bp, Saccharomyces pastorianus
atctgttcgtgctgcgcctagctat

SEQ ID NO: 136142 - DNA, 25 bp, Saccharomyces pastorianus
tatgccacactatccatctgttcgt

SEQ ID NO: 136143 - DNA, 25 bp, Saccharomyces pastorianus
gtggtgttttcaaccgccaatcaca

SEQ ID NO: 136144 - DNA, 25 bp, Saccharomyces pastorianus
gatattatcatgagtaagctggcga

SEQ ID NO: 136145 - DNA, 25 bp, Saccharomyces pastorianus
aagataccaatgttaccatcgcgcc

SEQ ID NO: 136146 - DNA, 25 bp, Saccharomyces pastorianus
atcgcgccgtacaatggcaggtgga

SEQ ID NO: 136147 - DNA, 25 bp, Saccharomyces pastorianus
gccaatcacagtatgctatgccaca

SEQ ID NO: 136148 - DNA, 25 bp, Saccharomyces pastorianus
taactgggaatttagcctgaaccaa

SEQ ID NO: 136149 - DNA, 25 bp, Saccharomyces pastorianus
aacttcattgaagcctaactgggaa

SEQ ID NO: 136150 - DNA, 25 bp, Saccharomyces pastorianus
tattcctccagtggctgttctatat

SEQ ID NO: 136151 - DNA, 25 bp, Saccharomyces pastorianus
tgttctatattaccgcctctacaat

SEQ ID NO: 136152 - DNA, 25 bp, Saccharomyces pastorianus
agcataattggctctttggctattt

SEQ ID NO: 136153 - DNA, 25 bp, Saccharomyces pastorianus
ctaagtttattcatccaggtgggtc

SEQ ID NO: 136154 - DNA, 25 bp, Saccharomyces pastorianus
aattgcctttgtatgcactccagtg

SEQ ID NO: 136155 - DNA, 25 bp, Saccharomyces pastorianus
gatttatgccgttgtaattgccttt

SEQ ID NO: 136156 - DNA, 25 bp, Saccharomyces pastorianus
gttcattgtcatttggccagtcact

SEQ ID NO: 136157 - DNA, 25 bp, Saccharomyces pastorianus
accatttcaggcgattgtgcactaa

SEQ ID NO: 136158 - DNA, 25 bp, Saccharomyces pastorianus
tataggccataaggtcgggtcccac

SEQ ID NO: 136159 - DNA, 25 bp, Saccharomyces pastorianus
aaggttttctcacatctcagttcat

SEQ ID NO: 136160 - DNA, 25 bp, Saccharomyces pastorianus
cactatgggtatccttgctggtata

SEQ ID NO: 136161 - DNA, 25 bp, Saccharomyces pastorianus
agatctatgatcctagccattgcca

SEQ ID NO: 136162 - DNA, 25 bp, Saccharomyces pastorianus
tcaacgattatccactaccgcaggt

SEQ ID NO: 136163 - DNA, 25 bp, Saccharomyces pastorianus
acatcggcaaggtcgtgtttaactt

SEQ ID NO: 136164 - DNA, 25 bp, Saccharomyces pastorianus
gaatatgaccgcctgcaagaagaaa

SEQ ID NO: 136165 - DNA, 25 bp, Saccharomyces pastorianus
aaatacgtgtgcatccatggtggca

SEQ ID NO: 136166 - DNA, 25 bp, Saccharomyces pastorianus
tgaaaacctcaatgaatccaccgcc

SEQ ID NO: 136167 - DNA, 25 bp, Saccharomyces pastorianus
gatttcgagattccgtactgtacat

SEQ ID NO: 136168 - DNA, 25 bp, Saccharomyces pastorianus
agtctttcccctgggtcagatacaa

SEQ ID NO: 136169 - DNA, 25 bp, Saccharomyces pastorianus
taaacgtgagaattcccctgacaaa

SEQ ID NO: 136170 - DNA, 25 bp, Saccharomyces pastorianus
cgtactgtacatgcagtggcctgaa

SEQ ID NO: 136171 - DNA, 25 bp, Saccharomyces pastorianus
ttcccacgttactcctcgagataag

SEQ ID NO: 136172 - DNA, 25 bp, Saccharomyces pastorianus
gagtgacgattttctcctctgggag

SEQ ID NO: 136173 - DNA, 25 bp, Saccharomyces pastorianus
agccacaattgcagtaccagtcttt

SEQ ID NO: 136174 - DNA, 25 bp, Saccharomyces pastorianus
gcaggccgccacagatgcaagagaa

SEQ ID NO: 136175 - DNA, 25 bp, Saccharomyces pastorianus
acgagttctttcttgatgttattga

SEQ ID NO: 136176 - DNA, 25 bp, Saccharomyces pastorianus
gatgatgctggtttgcaggccgcca

SEQ ID NO: 136177 - DNA, 25 bp, Saccharomyces pastorianus
gagaaatcgaatttataccgccgga

SEQ ID NO: 136178 - DNA, 25 bp, Saccharomyces pastorianus
gaacgtgttcagtacttgatggatt

SEQ ID NO: 136179 - DNA, 25 bp, Saccharomyces pastorianus
gatgctatttatcagggatgcccaa

SEQ ID NO: 136180 - DNA, 25 bp, Saccharomyces pastorianus
aagaagccgctaatgacgagctccc

SEQ ID NO: 136181 - DNA, 25 bp, Saccharomyces pastorianus
gttcatgtcgaattccagctttcat

SEQ ID NO: 136182 - DNA, 25 bp, Saccharomyces pastorianus
gagctccccaatgacggtaatgatt

SEQ ID NO: 136183 - DNA, 25 bp, Saccharomyces pastorianus
gcgaagacgattataatgcccatat

SEQ ID NO: 136184 - DNA, 25 bp, Saccharomyces pastorianus
tccagctttcatcagtgtgtttcac

SEQ ID NO: 136185 - DNA, 25 bp, Saccharomyces pastorianus
gttcccgatggctctattttggaaa

SEQ ID NO: 136186 - DNA, 25 bp, Saccharomyces pastorianus
ttattaccttcaatcgacttgggcg

SEQ ID NO: 136187 - DNA, 25 bp, Saccharomyces pastorianus
gcgttctttccgaacagtcgagtat

SEQ ID NO: 136188 - DNA, 25 bp, Saccharomyces pastorianus
ggtttattacaactgcttatccaat

SEQ ID NO: 136189 - DNA, 25 bp, Saccharomyces pastorianus
aaatttgccaattcattctagggaa

SEQ ID NO: 136190 - DNA, 25 bp, Saccharomyces pastorianus
tcaagagacagatttttacccctaa

SEQ ID NO: 136191 - DNA, 25 bp, Saccharomyces pastorianus
gcacgtgtcgaattgtcaacactaa

SEQ ID NO: 136192 - DNA, 25 bp, Saccharomyces pastorianus
ttaacctctaccctctgaaatttgg

SEQ ID NO: 136193 - DNA, 25 bp, Saccharomyces pastorianus
atgtaattactgttcccgatggctc

SEQ ID NO: 136194 - DNA, 25 bp, Saccharomyces pastorianus
tggtcgattgtattgcgttctttcc

SEQ ID NO: 136195 - DNA, 25 bp, Saccharomyces pastorianus
gacttgggcgatgagtttgcaactt

SEQ ID NO: 136196 - DNA, 25 bp, Saccharomyces pastorianus
aagcattttccttcgatacgtgaca

SEQ ID NO: 136197 - DNA, 25 bp, Saccharomyces pastorianus
tccttcgatacgtgacaagaattat

SEQ ID NO: 136198 - DNA, 25 bp, Saccharomyces pastorianus
tagagtttgaaggtactttcgaagg

SEQ ID NO: 136199 - DNA, 25 bp, Saccharomyces pastorianus
tgaaggtactttcgaaggtattgga

SEQ ID NO: 136200 - DNA, 25 bp, Saccharomyces pastorianus
ttttccttcgatacgtgacaagaat

SEQ ID NO: 136201 - DNA, 25 bp, Saccharomyces pastorianus
atgtcacaaatgataagggccttgc

SEQ ID NO: 136202 - DNA, 25 bp, Saccharomyces pastorianus
gcattttccttcgatacgtgacaag

SEQ ID NO: 136203 - DNA, 25 bp, Saccharomyces pastorianus
agggccttgcagaagcattttcctt

SEQ ID NO: 136204 - DNA, 25 bp, Saccharomyces pastorianus
ggaaaggatgttgttatgtcacaaa

SEQ ID NO: 136205 - DNA, 25 bp, Saccharomyces pastorianus
atgacggttttctctggagtaaata

SEQ ID NO: 136206 - DNA, 25 bp, Saccharomyces pastorianus
gcagaagcattttccttcgatacgt

SEQ ID NO: 136207 - DNA, 25 bp, Saccharomyces pastorianus
aatggcggttacaatatcctggaaa

SEQ ID NO: 136208 - DNA, 25 bp, Saccharomyces pastorianus
gaaagcccagatgacttactcaaaa

SEQ ID NO: 136209 - DNA, 25 bp, Saccharomyces pastorianus
caaacagtaccacgttaggcggact

SEQ ID NO: 136210 - DNA, 25 bp, Saccharomyces pastorianus
tctagggaagtgacccctccggtat

SEQ ID NO: 136211 - DNA, 25 bp, Saccharomyces pastorianus
acacagacgatgctcattcattacg

SEQ ID NO: 136212 - DNA, 25 bp, Saccharomyces pastorianus
ggacagcactccaaggcggcaaaaa

SEQ ID NO: 136213 - DNA, 25 bp, Saccharomyces pastorianus
atggctgctgttggcataaaccgca

SEQ ID NO: 136214 - DNA, 25 bp, Saccharomyces pastorianus
agaatttcactcaagcaaggatgca

SEQ ID NO: 136215 - DNA, 25 bp, Saccharomyces pastorianus
ggatacttttcctcataacgctcca

SEQ ID NO: 136216 - DNA, 25 bp, Saccharomyces pastorianus
gaagatgcaacttacgaccctaagg

SEQ ID NO: 136217 - DNA, 25 bp, Saccharomyces pastorianus
agccgaaacacataactcgacattt

SEQ ID NO: 136218 - DNA, 25 bp, Saccharomyces pastorianus
caggtattggttctcaggagctttg

SEQ ID NO: 136219 - DNA, 25 bp, Saccharomyces pastorianus
acctttgtagtcatcttacaggtat

SEQ ID NO: 136220 - DNA, 25 bp, Saccharomyces pastorianus
ttggttctcaggagctttggatgaa

SEQ ID NO: 136221 - DNA, 25 bp, Saccharomyces pastorianus
acaggtattggttctcaggagcttt

SEQ ID NO: 136222 - DNA, 25 bp, Saccharomyces pastorianus
tggttctcaggagctttggatgaag

SEQ ID NO: 136223 - DNA, 25 bp, Saccharomyces pastorianus
tgtagtcatcttacaggtattggtt

SEQ ID NO: 136224 - DNA, 25 bp, Saccharomyces pastorianus
tacaggtattggttctcaggagctt

SEQ ID NO: 136225 - DNA, 25 bp, Saccharomyces pastorianus
gtattggttctcaggagctttggat

SEQ ID NO: 136226 - DNA, 25 bp, Saccharomyces pastorianus
aggtattggttctcaggagctttgg

SEQ ID NO: 136227 - DNA, 25 bp, Saccharomyces pastorianus
attggttctcaggagctttggatga

SEQ ID NO: 136228 - DNA, 25 bp, Saccharomyces pastorianus
tttgtagtcatcttacaggtattgg

SEQ ID NO: 136229 - DNA, 25 bp, Saccharomyces pastorianus
tcattggctccgctagtcaagttag

SEQ ID NO: 136230 - DNA, 25 bp, Saccharomyces pastorianus
gatagctgaagccaattcctcattg

SEQ ID NO: 136231 - DNA, 25 bp, Saccharomyces pastorianus
gggagcctccatatttaaatgaaac

SEQ ID NO: 136232 - DNA, 25 bp, Saccharomyces pastorianus
gaacgccttattggatggcgcctga

SEQ ID NO: 136233 - DNA, 25 bp, Saccharomyces pastorianus
gcgctacggaattgcttcatgatga

SEQ ID NO: 136234 - DNA, 25 bp, Saccharomyces pastorianus
tgaaacccctctaagagcactgtat

SEQ ID NO: 136235 - DNA, 25 bp, Saccharomyces pastorianus
atccgataacatcctattgtccatg

SEQ ID NO: 136236 - DNA, 25 bp, Saccharomyces pastorianus
tatctggtcgttgggtatcatgatc

SEQ ID NO: 136237 - DNA, 25 bp, Saccharomyces pastorianus
aaaggtgttcttcacagagatatca

SEQ ID NO: 136238 - DNA, 25 bp, Saccharomyces pastorianus
gaactactatggtgggaacgcctta

SEQ ID NO: 136239 - DNA, 25 bp, Saccharomyces pastorianus
gaacccgagaatctatcgtcaagct

SEQ ID NO: 136240 - DNA, 25 bp, Saccharomyces pastorianus
caatgtttcgcccttgaagcagact

SEQ ID NO: 136241 - DNA, 25 bp, Saccharomyces pastorianus
aagcgccggcgcaagagacggtaac

SEQ ID NO: 136242 - DNA, 25 bp, Saccharomyces pastorianus
gtcatgaattctgccgccaatgttt

SEQ ID NO: 136243 - DNA, 25 bp, Saccharomyces pastorianus
cagcaagttgctcaatcgccaaaag

SEQ ID NO: 136244 - DNA, 25 bp, Saccharomyces pastorianus
gaagcagactcatgcacctacaact

SEQ ID NO: 136245 - DNA, 25 bp, Saccharomyces pastorianus
aagaggagcagccactaccaccaat

SEQ ID NO: 136246 - DNA, 25 bp, Saccharomyces pastorianus
aaatccaaaacgtctccaatcatct

SEQ ID NO: 136247 - DNA, 25 bp, Saccharomyces pastorianus
gcatcaggtggtgtttatactgctt

SEQ ID NO: 136248 - DNA, 25 bp, Saccharomyces pastorianus
taggtacgaatgtctcagtggccat

SEQ ID NO: 136249 - DNA, 25 bp, Saccharomyces pastorianus
gacggtaacgacacctacttcgaag

SEQ ID NO: 136250 - DNA, 25 bp, Saccharomyces pastorianus
aaatttgctcagacggtgacccaag

SEQ ID NO: 136251 - DNA, 25 bp, Saccharomyces pastorianus
aacagctgcggctacttagccttgt

SEQ ID NO: 136252 - DNA, 25 bp, Saccharomyces pastorianus
tactctaatgtactcgtctatggat

SEQ ID NO: 136253 - DNA, 25 bp, Saccharomyces pastorianus
gaaggaccgcaacagctgcggctac

SEQ ID NO: 136254 - DNA, 25 bp, Saccharomyces pastorianus
gtccgcaatactctaatgtactcgt

SEQ ID NO: 136255 - DNA, 25 bp, Saccharomyces pastorianus
gtactcgtctatggattgtgggatc

SEQ ID NO: 136256 - DNA, 25 bp, Saccharomyces pastorianus
ggctacttagccttgtgttacggca

SEQ ID NO: 136257 - DNA, 25 bp, Saccharomyces pastorianus
agccttgtgttacggcagtgcctta

SEQ ID NO: 136258 - DNA, 25 bp, Saccharomyces pastorianus
gacacaagaaggaccgcaacagctg

SEQ ID NO: 136259 - DNA, 25 bp, Saccharomyces pastorianus
ggatctcaccgcgacacaagaagga

SEQ ID NO: 136260 - DNA, 25 bp, Saccharomyces pastorianus
ttacggcagtgccttagtctgccat

SEQ ID NO: 136261 - DNA, 25 bp, Saccharomyces pastorianus
atggattgtgggatctcaccgcgac

SEQ ID NO: 136262 - DNA, 25 bp, Saccharomyces pastorianus
ggagcacgtgactacgaacactgtt

SEQ ID NO: 136263 - DNA, 25 bp, Saccharomyces pastorianus
gcaggcgaatggtccgcaatactct

SEQ ID NO: 136264 - DNA, 25 bp, Saccharomyces pastorianus
tacttatacatgtacctcacccgga

SEQ ID NO: 136265 - DNA, 25 bp, Saccharomyces pastorianus
agccgcgagcgggtatccgtagttt

SEQ ID NO: 136266 - DNA, 25 bp, Saccharomyces pastorianus
atccagaaccgccttctagtagcgt

SEQ ID NO: 136267 - DNA, 25 bp, Saccharomyces pastorianus
ttgcaggtcacgtggcaagccgcga

SEQ ID NO: 136268 - DNA, 25 bp, Saccharomyces pastorianus
ttctagtagcgtgcctgcccgacta

SEQ ID NO: 136269 - DNA, 25 bp, Saccharomyces pastorianus
ctcacccggatgcaagcgcaggcga

SEQ ID NO: 136270 - DNA, 25 bp, Saccharomyces pastorianus
gaggactgaaggagcacgtgactac

SEQ ID NO: 136271 - DNA, 25 bp, Saccharomyces pastorianus
tgggccgggtaaagtacttatacat

SEQ ID NO: 136272 - DNA, 25 bp, Saccharomyces pastorianus
gaacactgttgcaggtcacgtggca

SEQ ID NO: 136273 - DNA, 25 bp, Saccharomyces pastorianus
caagatacgctatacaaaaagattc

SEQ ID NO: 136274 - DNA, 25 bp, Saccharomyces pastorianus
gcttgggctatttgtattcacagaa

SEQ ID NO: 136275 - DNA, 25 bp, Saccharomyces pastorianus
gcatgcttgggctatttgtattcac

SEQ ID NO: 136276 - DNA, 25 bp, Saccharomyces pastorianus
gatggcctaagtttcaagatacgct

SEQ ID NO: 136277 - DNA, 25 bp, Saccharomyces pastorianus
gagctagcatgcttgggctatttgt

SEQ ID NO: 136278 - DNA, 25 bp, Saccharomyces pastorianus
atgcttgggctatttgtattcacag

SEQ ID NO: 136279 - DNA, 25 bp, Saccharomyces pastorianus
gtggagctagcatgcttgggctatt

SEQ ID NO: 136280 - DNA, 25 bp, Saccharomyces pastorianus
aagtttcaagatacgctatacaaaa

SEQ ID NO: 136281 - DNA, 25 bp, Saccharomyces pastorianus
ggcctaagtttcaagatacgctata

SEQ ID NO: 136282 - DNA, 25 bp, Saccharomyces pastorianus
ttgtattcacagaaggatggcctaa

SEQ ID NO: 136283 - DNA, 25 bp, Saccharomyces pastorianus
aaggatggcctaagtttcaagatac

SEQ ID NO: 136284 - DNA, 25 bp, Saccharomyces pastorianus
taaccaaagtgtcaggctatccaat

SEQ ID NO: 136285 - DNA, 25 bp, Saccharomyces pastorianus
gacgacatactctctcctatagatt

SEQ ID NO: 136286 - DNA, 25 bp, Saccharomyces pastorianus
ggaccatgcctggtatttttggttt

SEQ ID NO: 136287 - DNA, 25 bp, Saccharomyces pastorianus
gaggcaagtctcctattagcggata

SEQ ID NO: 136288 - DNA, 25 bp, Saccharomyces pastorianus
gaggctctcagacatttaccggaat

SEQ ID NO: 136289 - DNA, 25 bp, Saccharomyces pastorianus
gcggatactctacgaaactagctct

SEQ ID NO: 136290 - DNA, 25 bp, Saccharomyces pastorianus
aacatcgtgcaatcaatgctgtcag

SEQ ID NO: 136291 - DNA, 25 bp, Saccharomyces pastorianus
ggagcgatcgtcattgcttggatta

SEQ ID NO: 136292 - DNA, 25 bp, Saccharomyces pastorianus
gtaatgaaatgctcgatccacgccg

SEQ ID NO: 136293 - DNA, 25 bp, Saccharomyces pastorianus
gacagcatcctagagactttccaaa

SEQ ID NO: 136294 - DNA, 25 bp, Saccharomyces pastorianus
aatctccttaaccaatgttgttctg

SEQ ID NO: 136295 - DNA, 25 bp, Saccharomyces pastorianus
gtatatagttatagtcggagctgga

SEQ ID NO: 136296 - DNA, 25 bp, Saccharomyces pastorianus
tgttttcaacccaacttgccaaaag

SEQ ID NO: 136297 - DNA, 25 bp, Saccharomyces pastorianus
tatgatgaccacttatttagggaac

SEQ ID NO: 136298 - DNA, 25 bp, Saccharomyces pastorianus
aatacaaactttcatgtgcggctaa

SEQ ID NO: 136299 - DNA, 25 bp, Saccharomyces pastorianus
gtatcgcgacctcgtcaatatgatg

SEQ ID NO: 136300 - DNA, 25 bp, Saccharomyces pastorianus
tggctcgtaactatgcatttcttgg

SEQ ID NO: 136301 - DNA, 25 bp, Saccharomyces pastorianus
tttagggaacaattggctcgtaact

SEQ ID NO: 136302 - DNA, 25 bp, Saccharomyces pastorianus
atacgtggaagttaattgctactac

SEQ ID NO: 136303 - DNA, 25 bp, Saccharomyces pastorianus
gaataaaaccgtatcgcgacctcgt

SEQ ID NO: 136304 - DNA, 25 bp, Saccharomyces pastorianus
tgctactacagctcttatatcggtg

SEQ ID NO: 136305 - DNA, 25 bp, Saccharomyces pastorianus
cagctcttatatcggtgttttcaac

SEQ ID NO: 136306 - DNA, 25 bp, Saccharomyces pastorianus
gagcaatcgtcgttggagccagaca

SEQ ID NO: 136307 - DNA, 25 bp, Saccharomyces pastorianus
gtaatgcagtccaaggaacgcctta

SEQ ID NO: 136308 - DNA, 25 bp, Saccharomyces pastorianus
aaacaaggttcatctcatccgacga

SEQ ID NO: 136309 - DNA, 25 bp, Saccharomyces pastorianus
aaatggactttgaacttctgggtga

SEQ ID NO: 136310 - DNA, 25 bp, Saccharomyces pastorianus
gacgaaagtgtttccgaaccagctt

SEQ ID NO: 136311 - DNA, 25 bp, Saccharomyces pastorianus
aagtcatacccattggattcagagc

SEQ ID NO: 136312 - DNA, 25 bp, Saccharomyces pastorianus
aagacttcggatggccaaacaaggt

SEQ ID NO: 136313 - DNA, 25 bp, Saccharomyces pastorianus
ggagactcaagattatctggccctt

SEQ ID NO: 136314 - DNA, 25 bp, Saccharomyces pastorianus
aaaccgaggaggacgcaatcaatca

SEQ ID NO: 136315 - DNA, 25 bp, Saccharomyces pastorianus
ccaaaatgcatcttctgtaccacaa

SEQ ID NO: 136316 - DNA, 25 bp, Saccharomyces pastorianus
atggattctccagcattatcctctg

SEQ ID NO: 136317 - DNA, 25 bp, Saccharomyces pastorianus
ggttatcacgttttggtttctccag

SEQ ID NO: 136318 - DNA, 25 bp, Saccharomyces pastorianus
atttctaagggtgtcagctctccat

SEQ ID NO: 136319 - DNA, 25 bp, Saccharomyces pastorianus
tatgtcatcccagcaggttatcacg

SEQ ID NO: 136320 - DNA, 25 bp, Saccharomyces pastorianus
agacgaatacttccctaatgctcac

SEQ ID NO: 136321 - DNA, 25 bp, Saccharomyces pastorianus
cgttggaacaacgattcagcctcct

SEQ ID NO: 136322 - DNA, 25 bp, Saccharomyces pastorianus
agctctccatacttacctttcggtg

SEQ ID NO: 136323 - DNA, 25 bp, Saccharomyces pastorianus
gtcagctaggtgttctaatgtccat

SEQ ID NO: 136324 - DNA, 25 bp, Saccharomyces pastorianus
tttctccaggttacacccatttaag

SEQ ID NO: 136325 - DNA, 25 bp, Saccharomyces pastorianus
tcctcttattccgtcggtgaagaag

SEQ ID NO: 136326 - DNA, 25 bp, Saccharomyces pastorianus
gaacactttgcttactgtcagctag

SEQ ID NO: 136327 - DNA, 25 bp, Saccharomyces pastorianus
cacctcctgactttacatctatggt

SEQ ID NO: 136328 - DNA, 25 bp, Saccharomyces pastorianus
aaagaatctctttgatcataataat

SEQ ID NO: 136329 - DNA, 25 bp, Saccharomyces pastorianus
aataattcctttcatttacaatatt

SEQ ID NO: 136330 - DNA, 25 bp, Saccharomyces pastorianus
tttcttggctttaccattggcccaa

SEQ ID NO: 136331 - DNA, 25 bp, Saccharomyces pastorianus
acattggtttaagtcatttcttggc

SEQ ID NO: 136332 - DNA, 25 bp, Saccharomyces pastorianus
gtcatttcttggctttaccattggc

SEQ ID NO: 136333 - DNA, 25 bp, Saccharomyces pastorianus
ttaagtcatttcttggctttaccat

SEQ ID NO: 136334 - DNA, 25 bp, Saccharomyces pastorianus
ctctttgatcataataattcctttc

SEQ ID NO: 136335 - DNA, 25 bp, Saccharomyces pastorianus
tggtttaagtcatttcttggcttta

SEQ ID NO: 136336 - DNA, 25 bp, Saccharomyces pastorianus
aagtcatttcttggctttaccattg

SEQ ID NO: 136337 - DNA, 25 bp, Saccharomyces pastorianus
gagaggcattggaatacgtaaacat

SEQ ID NO: 136338 - DNA, 25 bp, Saccharomyces pastorianus
gttggagaggcattggaatacgtaa

SEQ ID NO: 136339 - DNA, 25 bp, Saccharomyces pastorianus
aataattcctttcatttacaatatt

SEQ ID NO: 136340 - DNA, 25 bp, Saccharomyces pastorianus
atctctttgatcataataattcctt

SEQ ID NO: 136341 - DNA, 25 bp, Saccharomyces pastorianus
tttcttggctttaccattggcccaa

SEQ ID NO: 136342 - DNA, 25 bp, Saccharomyces pastorianus
acattggtttaagtcatttcttggc

SEQ ID NO: 136343 - DNA, 25 bp, Saccharomyces pastorianus
gtcatttcttggctttaccattggc

SEQ ID NO: 136344 - DNA, 25 bp, Saccharomyces pastorianus
gaaaggaccgtccacctctagtgtt

SEQ ID NO: 136345 - DNA, 25 bp, Saccharomyces pastorianus
ttaagtcatttcttggctttaccat

SEQ ID NO: 136346 - DNA, 25 bp, Saccharomyces pastorianus
accattggcccaaagaatctctttg

SEQ ID NO: 136347 - DNA, 25 bp, Saccharomyces pastorianus
ttctttgagaaaggaccgtccacct

SEQ ID NO: 136348 - DNA, 25 bp, Saccharomyces pastorianus
atgtctgctaccaagtcaatcgttg

SEQ ID NO: 136349 - DNA, 25 bp, Saccharomyces pastorianus
gagaggcattggaatacgtaaacat

SEQ ID NO: 136350 - DNA, 25 bp, Saccharomyces pastorianus
ttccttcctttttttacacagctgt

SEQ ID NO: 136351 - DNA, 25 bp, Saccharomyces pastorianus
gaagaacaaatttgagaattcgcca

SEQ ID NO: 136352 - DNA, 25 bp, Saccharomyces pastorianus
gaagggttcacatttactaactatt

SEQ ID NO: 136353 - DNA, 25 bp, Saccharomyces pastorianus
gggttcacatttactaactatttct

SEQ ID NO: 136354 - DNA, 25 bp, Saccharomyces pastorianus
ttcacatttactaactatttctttt

SEQ ID NO: 136355 - DNA, 25 bp, Saccharomyces pastorianus
gccaaactttaagaagggttcacat

SEQ ID NO: 136356 - DNA, 25 bp, Saccharomyces pastorianus
tattttttctctccctagtattgaa

SEQ ID NO: 136357 - DNA, 25 bp, Saccharomyces pastorianus
ttttttacacagctgtcgttgtccg

SEQ ID NO: 136358 - DNA, 25 bp, Saccharomyces pastorianus
atattttttctctccctagtattga

SEQ ID NO: 136359 - DNA, 25 bp, Saccharomyces pastorianus
taagaagggttcacatttactaact

SEQ ID NO: 136360 - DNA, 25 bp, Saccharomyces pastorianus
gagaattcgccaaactttaagaagg

SEQ ID NO: 136361 - DNA, 25 bp, Saccharomyces pastorianus
ttccttcctttttttacacagctgt

SEQ ID NO: 136362 - DNA, 25 bp, Saccharomyces pastorianus
gaagaacaaatttgagaattcgcca

SEQ ID NO: 136363 - DNA, 25 bp, Saccharomyces pastorianus
gaagggttcacatttactaactatt

SEQ ID NO: 136364 - DNA, 25 bp, Saccharomyces pastorianus
gggttcacatttactaactatttct

SEQ ID NO: 136365 - DNA, 25 bp, Saccharomyces pastorianus
gatcaagcctttcatcaaggtcgtc

SEQ ID NO: 136366 - DNA, 25 bp, Saccharomyces pastorianus
gccaaactttaagaagggttcacat

SEQ ID NO: 136367 - DNA, 25 bp, Saccharomyces pastorianus
tattttttctctccctagtattgaa

SEQ ID NO: 136368 - DNA, 25 bp, Saccharomyces pastorianus
ttttttacacagctgtcgttgtccg

SEQ ID NO: 136369 - DNA, 25 bp, Saccharomyces pastorianus
atattttttctctccctagtattga

SEQ ID NO: 136370 - DNA, 25 bp, Saccharomyces pastorianus
tctctccctagtattgaagaacaaa

SEQ ID NO: 136371 - DNA, 25 bp, Saccharomyces pastorianus
gagaattcgccaaactttaagaagg

SEQ ID NO: 136372 - DNA, 25 bp, Saccharomyces pastorianus
gtagcggttataccgttgtgccaaa

SEQ ID NO: 136373 - DNA, 25 bp, Saccharomyces pastorianus
gaacaacctgggtcttacacgccta

SEQ ID NO: 136374 - DNA, 25 bp, Saccharomyces pastorianus
caaggtgctttgaaaatcggctgtt

SEQ ID NO: 136375 - DNA, 25 bp, Saccharomyces pastorianus
gtctaattcaccaagtttctgcctc

SEQ ID NO: 136376 - DNA, 25 bp, Saccharomyces pastorianus
gaccccttatctttgttagcattgg

SEQ ID NO: 136377 - DNA, 25 bp, Saccharomyces pastorianus
acatcagaggtggacaagccgacta

SEQ ID NO: 136378 - DNA, 25 bp, Saccharomyces pastorianus
ggtgcttttaatacagattggccaa

SEQ ID NO: 136379 - DNA, 25 bp, Saccharomyces pastorianus
attggcacgccagttggatgtagac

SEQ ID NO: 136380 - DNA, 25 bp, Saccharomyces pastorianus
ggtggtactcataacgttgaagctt

SEQ ID NO: 136381 - DNA, 25 bp, Saccharomyces pastorianus
atccaggtagctgtacgggtgcttt

SEQ ID NO: 136382 - DNA, 25 bp, Saccharomyces pastorianus
gttgtgccaaagaacgaccccttat

SEQ ID NO: 136383 - DNA, 25 bp, Saccharomyces pastorianus
caggcgacttggctttcaaaaaagg

SEQ ID NO: 136384 - DNA, 25 bp, Saccharomyces pastorianus
tacaaattcggcgacaccaacggct

SEQ ID NO: 136385 - DNA, 25 bp, Saccharomyces pastorianus
gtggacaggcaggactaacggaaaa

SEQ ID NO: 136386 - DNA, 25 bp, Saccharomyces pastorianus
ggttaggtaatgaatccactgctac

SEQ ID NO: 136387 - DNA, 25 bp, Saccharomyces pastorianus
accaacggctgttgttctctacaat

SEQ ID NO: 136388 - DNA, 25 bp, Saccharomyces pastorianus
aaatgattggtggacaggcaggact

SEQ ID NO: 136389 - DNA, 25 bp, Saccharomyces pastorianus
aatccactgctacaaattcggcgac

SEQ ID NO: 136390 - DNA, 25 bp, Saccharomyces pastorianus
tgagcaatgtcgatgatttatcaca

SEQ ID NO: 136391 - DNA, 25 bp, Saccharomyces pastorianus
gaacaaccaggcgacttggctttca

SEQ ID NO: 136392 - DNA, 25 bp, Saccharomyces pastorianus
aaaaaggtgatgttattactatctt

SEQ ID NO: 136393 - DNA, 25 bp, Saccharomyces pastorianus
aatgtcgaagacagggttaggtaat

SEQ ID NO: 136394 - DNA, 25 bp, Saccharomyces pastorianus
gagtaaaagtcccaccagcagcaga

SEQ ID NO: 136395 - DNA, 25 bp, Saccharomyces pastorianus
agagcattcaactttacacgccacg

SEQ ID NO: 136396 - DNA, 25 bp, Saccharomyces pastorianus
acgacgatattccagattcctttga

SEQ ID NO: 136397 - DNA, 25 bp, Saccharomyces pastorianus
acaacgctagcggtgatgattttta

SEQ ID NO: 136398 - DNA, 25 bp, Saccharomyces pastorianus
agcagccgcaatagaggcccacaga

SEQ ID NO: 136399 - DNA, 25 bp, Saccharomyces pastorianus
gttttacggcgataactgtacatca

SEQ ID NO: 136400 - DNA, 25 bp, Saccharomyces pastorianus
tgcagcttctgcatctacaggtggt

SEQ ID NO: 136401 - DNA, 25 bp, Saccharomyces pastorianus
gccacgaccatgatgacaacgctag

SEQ ID NO: 136402 - DNA, 25 bp, Saccharomyces pastorianus
aaaggtttatttgccggtgtgtctg

SEQ ID NO: 136403 - DNA, 25 bp, Saccharomyces pastorianus
gcgacaacacaagccattattacga

SEQ ID NO: 136404 - DNA, 25 bp, Saccharomyces pastorianus
tctactgatggatcctcaacacgtc

SEQ ID NO: 136405 - DNA, 25 bp, Saccharomyces pastorianus
tatcccattcgaccaacctgtattg

SEQ ID NO: 136406 - DNA, 25 bp, Saccharomyces pastorianus
gagctaaagggtattccaatccgta

SEQ ID NO: 136407 - DNA, 25 bp, Saccharomyces pastorianus
caagtcgttgtcgttcgtagaaatg

SEQ ID NO: 136408 - DNA, 25 bp, Saccharomyces pastorianus
ggtgccaaatctttatgtatcccat

SEQ ID NO: 136409 - DNA, 25 bp, Saccharomyces pastorianus
ggaagcccgtatcccagaaatctta

SEQ ID NO: 136410 - DNA, 25 bp, Saccharomyces pastorianus
gttcgacacccacagagttatcgtt

SEQ ID NO: 136411 - DNA, 25 bp, Saccharomyces pastorianus
cagccagaagtgtggaatcccgttt

SEQ ID NO: 136412 - DNA, 25 bp, Saccharomyces pastorianus
ggagtggttttgttccagcattgaa

SEQ ID NO: 136413 - DNA, 25 bp, Saccharomyces pastorianus
gaacgttatcttagcaccatggtgt

SEQ ID NO: 136414 - DNA, 25 bp, Saccharomyces pastorianus
aaagccaaggagctgttcgacaccc

SEQ ID NO: 136415 - DNA, 25 bp, Saccharomyces pastorianus
tggaaattttcccaatacgagctaa

SEQ ID NO: 136416 - DNA, 25 bp, Saccharomyces pastorianus
gtggttgatttctcccaagaggtgt

SEQ ID NO: 136417 - DNA, 25 bp, Saccharomyces pastorianus
gatttctcccaagaggtgtctaagg

SEQ ID NO: 136418 - DNA, 25 bp, Saccharomyces pastorianus
ggtgtctaaggaaaccgctacagaa

SEQ ID NO: 136419 - DNA, 25 bp, Saccharomyces pastorianus
aaggaaaccgctacagaaggcaaga

SEQ ID NO: 136420 - DNA, 25 bp, Saccharomyces pastorianus
ttctaagcaattttgaggatagtca

SEQ ID NO: 136421 - DNA, 25 bp, Saccharomyces pastorianus
atctgacatgatgaaatttctaagc

SEQ ID NO: 136422 - DNA, 25 bp, Saccharomyces pastorianus
agaggtgtctaaggaaaccgctaca

SEQ ID NO: 136423 - DNA, 25 bp, Saccharomyces pastorianus
gtcaaaaagtggttgatttctccca

SEQ ID NO: 136424 - DNA, 25 bp, Saccharomyces pastorianus
accgctacagaaggcaagaaacaac

SEQ ID NO: 136425 - DNA, 25 bp, Saccharomyces pastorianus
gttgatttctcccaagaggtgtcta

SEQ ID NO: 136426 - DNA, 25 bp, Saccharomyces pastorianus
aagtggttgatttctcccaagaggt

SEQ ID NO: 136427 - DNA, 25 bp, Saccharomyces pastorianus
tggatgtcaaatgcccaggttgttt

SEQ ID NO: 136428 - DNA, 25 bp, Saccharomyces pastorianus
cctacagttttcaaattactaacat

SEQ ID NO: 136429 - DNA, 25 bp, Saccharomyces pastorianus
tcgttttcgtttctatttatttcat

SEQ ID NO: 136430 - DNA, 25 bp, Saccharomyces pastorianus
catcaatttttttgtgaaacgactt

SEQ ID NO: 136431 - DNA, 25 bp, Saccharomyces pastorianus
ctacttcttggatgtcaaatgccca

SEQ ID NO: 136432 - DNA, 25 bp, Saccharomyces pastorianus
tatttatttcattacaggttttagt

SEQ ID NO: 136433 - DNA, 25 bp, Saccharomyces pastorianus
ttcaaggcccaagatcctacttctt

SEQ ID NO: 136434 - DNA, 25 bp, Saccharomyces pastorianus
acagttttcaaattactaacatcaa

SEQ ID NO: 136435 - DNA, 25 bp, Saccharomyces pastorianus
aagatcctacttcttggatgtcaaa

SEQ ID NO: 136436 - DNA, 25 bp, Saccharomyces pastorianus
aaggcccaagatcctacttcttgga

SEQ ID NO: 136437 - DNA, 25 bp, Saccharomyces pastorianus
ttggttcaaggcccaagatcctact

SEQ ID NO: 136438 - DNA, 25 bp, Saccharomyces pastorianus
ttttgacaagctattggattgggca

SEQ ID NO: 136439 - DNA, 25 bp, Saccharomyces pastorianus
ccttttggatctaaatggtgtggaa

SEQ ID NO: 136440 - DNA, 25 bp, Saccharomyces pastorianus
ttcctgactcagatcatagtataag

SEQ ID NO: 136441 - DNA, 25 bp, Saccharomyces pastorianus
gtttctggaccttttggatctaaat

SEQ ID NO: 136442 - DNA, 25 bp, Saccharomyces pastorianus
acgtctttcctgactcagatcatag

SEQ ID NO: 136443 - DNA, 25 bp, Saccharomyces pastorianus
gtataagataccataatgcgaatgt

SEQ ID NO: 136444 - DNA, 25 bp, Saccharomyces pastorianus
tggaaaattatgacgtccacgtctt

SEQ ID NO: 136445 - DNA, 25 bp, Saccharomyces pastorianus
taaagtttctggaccttttggatct

SEQ ID NO: 136446 - DNA, 25 bp, Saccharomyces pastorianus
attatgacgtccacgtctttcctga

SEQ ID NO: 136447 - DNA, 25 bp, Saccharomyces pastorianus
tggaccttttggatctaaatggtgt

SEQ ID NO: 136448 - DNA, 25 bp, Saccharomyces pastorianus
gcgaatgtaatcgtttttgacaagc

SEQ ID NO: 136449 - DNA, 25 bp, Saccharomyces pastorianus
ggcacagggtcaaactattcaaaga

SEQ ID NO: 136450 - DNA, 25 bp, Saccharomyces pastorianus
gagcggtaactatggacaccttaca

SEQ ID NO: 136451 - DNA, 25 bp, Saccharomyces pastorianus
gctatgctgggcattgtccattcat

SEQ ID NO: 136452 - DNA, 25 bp, Saccharomyces pastorianus
tgagctcatggtcccagagcgcttt

SEQ ID NO: 136453 - DNA, 25 bp, Saccharomyces pastorianus
gatccaggaaagattcgcaccaatg

SEQ ID NO: 136454 - DNA, 25 bp, Saccharomyces pastorianus
atgttgcactgtcaagagcggtaac

SEQ ID NO: 136455 - DNA, 25 bp, Saccharomyces pastorianus
gtccattcataaggcacagggtcaa

SEQ ID NO: 136456 - DNA, 25 bp, Saccharomyces pastorianus
agagcgctttcccattgatattccc

SEQ ID NO: 136457 - DNA, 25 bp, Saccharomyces pastorianus
aagccggccaagtttatgttgcact

SEQ ID NO: 136458 - DNA, 25 bp, Saccharomyces pastorianus
gaggagaattttcgaagccggccaa

SEQ ID NO: 136459 - DNA, 25 bp, Saccharomyces pastorianus
gacaccttacagttcctaaactttg

SEQ ID NO: 136460 - DNA, 25 bp, Saccharomyces pastorianus
gatattctaaatgccataagatacg

SEQ ID NO: 136461 - DNA, 25 bp, Saccharomyces pastorianus
atgccataagatacggagagctgac

SEQ ID NO: 136462 - DNA, 25 bp, Saccharomyces pastorianus
gactatgccgatggaattgctccta

SEQ ID NO: 136463 - DNA, 25 bp, Saccharomyces pastorianus
gctgactgtcgacattgctaaaaca

SEQ ID NO: 136464 - DNA, 25 bp, Saccharomyces pastorianus
gagagctgactgtcgacattgctaa

SEQ ID NO: 136465 - DNA, 25 bp, Saccharomyces pastorianus
ggatatagactatgccgatggaatt

SEQ ID NO: 136466 - DNA, 25 bp, Saccharomyces pastorianus
gactgtcgacattgctaaaacaata

SEQ ID NO: 136467 - DNA, 25 bp, Saccharomyces pastorianus
gagattagtaagtcgagtcattggt

SEQ ID NO: 136468 - DNA, 25 bp, Saccharomyces pastorianus
gtaagtcgagtcattggtaatccct

SEQ ID NO: 136469 - DNA, 25 bp, Saccharomyces pastorianus
tatgccgatggaattgctcctacag

SEQ ID NO: 136470 - DNA, 25 bp, Saccharomyces pastorianus
gatacggagagctgactgtcgacat

SEQ ID NO: 136471 - DNA, 25 bp, Saccharomyces pastorianus
atgccaggccattagctagattgga

SEQ ID NO: 136472 - DNA, 25 bp, Saccharomyces pastorianus
tttgttacagaatcgctggtggtga

SEQ ID NO: 136473 - DNA, 25 bp, Saccharomyces pastorianus
aaaattcccctatgtgaggtggaca

SEQ ID NO: 136474 - DNA, 25 bp, Saccharomyces pastorianus
gcagttaagatctctccgcataagg

SEQ ID NO: 136475 - DNA, 25 bp, Saccharomyces pastorianus
gaattgctcctacagaactgtatgc

SEQ ID NO: 136476 - DNA, 25 bp, Saccharomyces pastorianus
cgtcaagatttgaatgccaggccat

SEQ ID NO: 136477 - DNA, 25 bp, Saccharomyces pastorianus
atactagattcttcattaatggtgg

SEQ ID NO: 136478 - DNA, 25 bp, Saccharomyces pastorianus
gcccgagagataccaagcgatacta

SEQ ID NO: 136479 - DNA, 25 bp, Saccharomyces pastorianus
agctgtagataacgcgcccgagaga

SEQ ID NO: 136480 - DNA, 25 bp, Saccharomyces pastorianus
ggaaaaagttgtcgcattgaaggaa

SEQ ID NO: 136481 - DNA, 25 bp, Saccharomyces pastorianus
agaactgtatgccacaagaagagaa

SEQ ID NO: 136482 - DNA, 25 bp, Saccharomyces pastorianus
atgtgttagcattcctgtatcatct

SEQ ID NO: 136483 - DNA, 25 bp, Saccharomyces pastorianus
ggtacatcaacctagccgcattcta

SEQ ID NO: 136484 - DNA, 25 bp, Saccharomyces pastorianus
ggcatatgtgttagcattcctgtat

SEQ ID NO: 136485 - DNA, 25 bp, Saccharomyces pastorianus
agccgcattctactgtctaggtgtg

SEQ ID NO: 136486 - DNA, 25 bp, Saccharomyces pastorianus
aggtgggtacatcaacctagccgca

SEQ ID NO: 136487 - DNA, 25 bp, Saccharomyces pastorianus
gtgcccatggcatatgtgttagcat

SEQ ID NO: 136488 - DNA, 25 bp, Saccharomyces pastorianus
aacctagccgcattctactgtctag

SEQ ID NO: 136489 - DNA, 25 bp, Saccharomyces pastorianus
tactgtctaggtgtgcccatggcat

SEQ ID NO: 136490 - DNA, 25 bp, Saccharomyces pastorianus
ctgtctaggtgtgcccatggcatat

SEQ ID NO: 136491 - DNA, 25 bp, Saccharomyces pastorianus
cattctactgtctaggtgtgcccat

SEQ ID NO: 136492 - DNA, 25 bp, Saccharomyces pastorianus
gtgggtacatcaacctagccgcatt

SEQ ID NO: 136493 - DNA, 25 bp, Saccharomyces pastorianus
gccgcctacaagctgcgaattctta

SEQ ID NO: 136494 - DNA, 25 bp, Saccharomyces pastorianus
ttgccgcgcgacatagtcgtgaatg

SEQ ID NO: 136495 - DNA, 25 bp, Saccharomyces pastorianus
gagcttcctgcactagaggtattga

SEQ ID NO: 136496 - DNA, 25 bp, Saccharomyces pastorianus
acggtaagctgagcatacccttgcc

SEQ ID NO: 136497 - DNA, 25 bp, Saccharomyces pastorianus
gaacaaagctccgaactcgaagccg

SEQ ID NO: 136498 - DNA, 25 bp, Saccharomyces pastorianus
agaacaaaatctccggagccaagat

SEQ ID NO: 136499 - DNA, 25 bp, Saccharomyces pastorianus
tgcaccgcacgagcagcaggaggac

SEQ ID NO: 136500 - DNA, 25 bp, Saccharomyces pastorianus
gaagaagggcgctgagcttcctgca

SEQ ID NO: 136501 - DNA, 25 bp, Saccharomyces pastorianus
gccggagacccgatgagtatattga

SEQ ID NO: 136502 - DNA, 25 bp, Saccharomyces pastorianus
tgatcccgacgatggaacactacca

SEQ ID NO: 136503 - DNA, 25 bp, Saccharomyces pastorianus
tccgagctacaacttcgcagagaat

SEQ ID NO: 136504 - DNA, 25 bp, Saccharomyces pastorianus
ccgagattcggtggtattgtgcaga

SEQ ID NO: 136505 - DNA, 25 bp, Saccharomyces pastorianus
cgagagatactggtcgaatggtgct

SEQ ID NO: 136506 - DNA, 25 bp, Saccharomyces pastorianus
agtcatgtgagatccgagattcggt

SEQ ID NO: 136507 - DNA, 25 bp, Saccharomyces pastorianus
ttcggtggtattgtgcagagatcgc

SEQ ID NO: 136508 - DNA, 25 bp, Saccharomyces pastorianus
gcagagatcgcattgcattccccaa

SEQ ID NO: 136509 - DNA, 25 bp, Saccharomyces pastorianus
cagagatcgcattgcattccccaag

SEQ ID NO: 136510 - DNA, 25 bp, Saccharomyces pastorianus
agattcggtggtattgtgcagagat

SEQ ID NO: 136511 - DNA, 25 bp, Saccharomyces pastorianus
tccgagattcggtggtattgtgcag

SEQ ID NO: 136512 - DNA, 25 bp, Saccharomyces pastorianus
tggtattgtgcagagatcgcattgc

SEQ ID NO: 136513 - DNA, 25 bp, Saccharomyces pastorianus
gtgcagagatcgcattgcattcccc

SEQ ID NO: 136514 - DNA, 25 bp, Saccharomyces pastorianus
ttgtgcagagatcgcattgcattcc

SEQ ID NO: 136515 - DNA, 25 bp, Saccharomyces pastorianus
aaagcaaaattattcccttggacat

SEQ ID NO: 136516 - DNA, 25 bp, Saccharomyces pastorianus
caaaggtttccgcagccattatatg

SEQ ID NO: 136517 - DNA, 25 bp, Saccharomyces pastorianus
gtcaggaccgtttcttgaaaagcaa

SEQ ID NO: 136518 - DNA, 25 bp, Saccharomyces pastorianus
gttgcagtcaggaccgtttcttgaa

SEQ ID NO: 136519 - DNA, 25 bp, Saccharomyces pastorianus
caaggaaactcttggtacagaggat

SEQ ID NO: 136520 - DNA, 25 bp, Saccharomyces pastorianus
ggacatcactgacaaggaaactctt

SEQ ID NO: 136521 - DNA, 25 bp, Saccharomyces pastorianus
tggtacagaggatatgacattcaat

SEQ ID NO: 136522 - DNA, 25 bp, Saccharomyces pastorianus
ttgaaactaaaaccggttgcagtca

SEQ ID NO: 136523 - DNA, 25 bp, Saccharomyces pastorianus
attattcccttggacatcactgaca

SEQ ID NO: 136524 - DNA, 25 bp, Saccharomyces pastorianus
tccgcagccattatatgttgaaact

SEQ ID NO: 136525 - DNA, 25 bp, Saccharomyces pastorianus
ggtttccgcagccattatatgttga

SEQ ID NO: 136526 - DNA, 25 bp, Saccharomyces pastorianus
caccatttgtgtagatggtggctcg

SEQ ID NO: 136527 - DNA, 25 bp, Saccharomyces pastorianus
aaccaccatttgtgtagatggtggc

SEQ ID NO: 136528 - DNA, 25 bp, Saccharomyces pastorianus
catttgtgtagatggtggctcgtac

SEQ ID NO: 136529 - DNA, 25 bp, Saccharomyces pastorianus
accatttgtgtagatggtggctcgt

SEQ ID NO: 136530 - DNA, 25 bp, Saccharomyces pastorianus
accaccatttgtgtagatggtggct

SEQ ID NO: 136531 - DNA, 25 bp, Saccharomyces pastorianus
tttgtgtagatggtggctcgtactt

SEQ ID NO: 136532 - DNA, 25 bp, Saccharomyces pastorianus
ccaccatttgtgtagatggtggctc

SEQ ID NO: 136533 - DNA, 25 bp, Saccharomyces pastorianus
ttgtgtagatggtggctcgtactta

SEQ ID NO: 136534 - DNA, 25 bp, Saccharomyces pastorianus
atttgtgtagatggtggctcgtact

SEQ ID NO: 136535 - DNA, 25 bp, Saccharomyces pastorianus
ccatttgtgtagatggtggctcgta

SEQ ID NO: 136536 - DNA, 25 bp, Saccharomyces pastorianus
gactggatcgtattggatgtcccat

SEQ ID NO: 136537 - DNA, 25 bp, Saccharomyces pastorianus
gaagcaattgtttctactaccaaat

SEQ ID NO: 136538 - DNA, 25 bp, Saccharomyces pastorianus
cgatagctttgcttactcatccaag

SEQ ID NO: 136539 - DNA, 25 bp, Saccharomyces pastorianus
gatagcctcacgaattatcgatagc

SEQ ID NO: 136540 - DNA, 25 bp, Saccharomyces pastorianus
ggatgtcccattaacaagagcccag

SEQ ID NO: 136541 - DNA, 25 bp, Saccharomyces pastorianus
aagaaggtcgcgagctctgttgcaa

SEQ ID NO: 136542 - DNA, 25 bp, Saccharomyces pastorianus
agacacatgcctttcattatgcaaa

SEQ ID NO: 136543 - DNA, 25 bp, Saccharomyces pastorianus
aagagcccagatacttcaagatgat

SEQ ID NO: 136544 - DNA, 25 bp, Saccharomyces pastorianus
gcaaacctttcatctggagttacag

SEQ ID NO: 136545 - DNA, 25 bp, Saccharomyces pastorianus
aggtctccaattctatcggttcgga

SEQ ID NO: 136546 - DNA, 25 bp, Saccharomyces pastorianus
ggttcggaatacttcacctgatgaa

SEQ ID NO: 136547 - DNA, 25 bp, Saccharomyces pastorianus
gagaacagaatgtttggacttgtct

SEQ ID NO: 136548 - DNA, 25 bp, Saccharomyces pastorianus
ttattcgatggcttgttccctacga

SEQ ID NO: 136549 - DNA, 25 bp, Saccharomyces pastorianus
cgatggcttgttccctacgagaaca

SEQ ID NO: 136550 - DNA, 25 bp, Saccharomyces pastorianus
gcttgttccctacgagaacagaatg

SEQ ID NO: 136551 - DNA, 25 bp, Saccharomyces pastorianus
gttccctacgagaacagaatgtttg

SEQ ID NO: 136552 - DNA, 25 bp, Saccharomyces pastorianus
tcgatggcttgttccctacgagaac

SEQ ID NO: 136553 - DNA, 25 bp, Saccharomyces pastorianus
tattcgatggcttgttccctacgag

SEQ ID NO: 136554 - DNA, 25 bp, Saccharomyces pastorianus
attcgatggcttgttccctacgaga

SEQ ID NO: 136555 - DNA, 25 bp, Saccharomyces pastorianus
ggcttgttccctacgagaacagaat

SEQ ID NO: 136556 - DNA, 25 bp, Saccharomyces pastorianus
atggcttgttccctacgagaacaga

SEQ ID NO: 136557 - DNA, 25 bp, Saccharomyces pastorianus
ttcgatggcttgttccctacgagaa

SEQ ID NO: 136558 - DNA, 25 bp, Saccharomyces pastorianus
atgagtggtaccgacgataaggctg

SEQ ID NO: 136559 - DNA, 25 bp, Saccharomyces pastorianus
ggctggtggtccaaacattttaagc

SEQ ID NO: 136560 - DNA, 25 bp, Saccharomyces pastorianus
ggtggtccaaacattttaagcagat

SEQ ID NO: 136561 - DNA, 25 bp, Saccharomyces pastorianus
aagaatgagtggtaccgacgataag

SEQ ID NO: 136562 - DNA, 25 bp, Saccharomyces pastorianus
cattttaagcagatttgtcagtatt

SEQ ID NO: 136563 - DNA, 25 bp, Saccharomyces pastorianus
gataaggctggtggtccaaacattt

SEQ ID NO: 136564 - DNA, 25 bp, Saccharomyces pastorianus
taaggctggtggtccaaacatttta

SEQ ID NO: 136565 - DNA, 25 bp, Saccharomyces pastorianus
gaaacacaaaggagaacttctacga

SEQ ID NO: 136566 - DNA, 25 bp, Saccharomyces pastorianus
cacaaaggagaacttctacgagttg

SEQ ID NO: 136567 - DNA, 25 bp, Saccharomyces pastorianus
gtcagtattagaaacacaaaggaga

SEQ ID NO: 136568 - DNA, 25 bp, Saccharomyces pastorianus
tggtccaaacattttaagcagattt

SEQ ID NO: 136569 - DNA, 25 bp, Saccharomyces pastorianus
aattctttacggtggacaatacgat

SEQ ID NO: 136570 - DNA, 25 bp, Saccharomyces pastorianus
gcaagtccaatttctggtgggaatt

SEQ ID NO: 136571 - DNA, 25 bp, Saccharomyces pastorianus
caaggttggtttgtcggacccacag

SEQ ID NO: 136572 - DNA, 25 bp, Saccharomyces pastorianus
tgaacacatccgcaagtccaatttc

SEQ ID NO: 136573 - DNA, 25 bp, Saccharomyces pastorianus
ctgtcatccatgaacaaagtttcga

SEQ ID NO: 136574 - DNA, 25 bp, Saccharomyces pastorianus
agccaagagaccagatcatccatat

SEQ ID NO: 136575 - DNA, 25 bp, Saccharomyces pastorianus
gggatttatgggtcctgtcatccat

SEQ ID NO: 136576 - DNA, 25 bp, Saccharomyces pastorianus
ggacccacagtcataaaagccaaga

SEQ ID NO: 136577 - DNA, 25 bp, Saccharomyces pastorianus
tgcagtcacagaatgttgtcccaat

SEQ ID NO: 136578 - DNA, 25 bp, Saccharomyces pastorianus
aagatgcaaagaaagaccccgagtt

SEQ ID NO: 136579 - DNA, 25 bp, Saccharomyces pastorianus
ttgtcccaatgaacacatccgcaag

SEQ ID NO: 136580 - DNA, 25 bp, Saccharomyces pastorianus
tatgctcaacaacccgtagagtcag

SEQ ID NO: 136581 - DNA, 25 bp, Saccharomyces pastorianus
tgccttgcattttaccggttctaca

SEQ ID NO: 136582 - DNA, 25 bp, Saccharomyces pastorianus
atcgactgtatcacggaattatctg

SEQ ID NO: 136583 - DNA, 25 bp, Saccharomyces pastorianus
gggctccagctttgatgggtaatac

SEQ ID NO: 136584 - DNA, 25 bp, Saccharomyces pastorianus
tcaactttactgctattgctgcaaa

SEQ ID NO: 136585 - DNA, 25 bp, Saccharomyces pastorianus
gcactttcgagttccaaggccaaaa

SEQ ID NO: 136586 - DNA, 25 bp, Saccharomyces pastorianus
aaaatttccatctagttcacccaag

SEQ ID NO: 136587 - DNA, 25 bp, Saccharomyces pastorianus
accgctgccctttcaaattacttat

SEQ ID NO: 136588 - DNA, 25 bp, Saccharomyces pastorianus
tgtctggaaaccttcacaaaccgct

SEQ ID NO: 136589 - DNA, 25 bp, Saccharomyces pastorianus
cattccaggtgatccagttcaagtt

SEQ ID NO: 136590 - DNA, 25 bp, Saccharomyces pastorianus
gtgtatgctgtttcaccattcaact

SEQ ID NO: 136591 - DNA, 25 bp, Saccharomyces pastorianus
cttggctggaacaagctcttgcata

SEQ ID NO: 136592 - DNA, 25 bp, Saccharomyces pastorianus
cacgatattcgttgccatgacagag

SEQ ID NO: 136593 - DNA, 25 bp, Saccharomyces pastorianus
accacagtgatcgagtttcccacga

SEQ ID NO: 136594 - DNA, 25 bp, Saccharomyces pastorianus
gaagagcggactcaaattctacacg

SEQ ID NO: 136595 - DNA, 25 bp, Saccharomyces pastorianus
ttttcaaacatgtcagccaccgtat

SEQ ID NO: 136596 - DNA, 25 bp, Saccharomyces pastorianus
aagaggactctcaaccgacagaaga

SEQ ID NO: 136597 - DNA, 25 bp, Saccharomyces pastorianus
aggaaacacaggacgccagcgacag

SEQ ID NO: 136598 - DNA, 25 bp, Saccharomyces pastorianus
gcccacttgagcatacgagtacact

SEQ ID NO: 136599 - DNA, 25 bp, Saccharomyces pastorianus
agagggctacgaggtgctacaccag

SEQ ID NO: 136600 - DNA, 25 bp, Saccharomyces pastorianus
agaggctgacctaccagagggctac

SEQ ID NO: 136601 - DNA, 25 bp, Saccharomyces pastorianus
ctgtgaattctatcgcttggctgga

SEQ ID NO: 136602 - DNA, 25 bp, Saccharomyces pastorianus
aacgaaatgcttatgtccagaggga

SEQ ID NO: 136603 - DNA, 25 bp, Saccharomyces pastorianus
gtgaactgtttgatgctacccaagg

SEQ ID NO: 136604 - DNA, 25 bp, Saccharomyces pastorianus
gtccagagggactacaactatctga

SEQ ID NO: 136605 - DNA, 25 bp, Saccharomyces pastorianus
gggcggccacaactctaatttcaag

SEQ ID NO: 136606 - DNA, 25 bp, Saccharomyces pastorianus
ggtcaaacacatgatcctaaggagt

SEQ ID NO: 136607 - DNA, 25 bp, Saccharomyces pastorianus
tggagtgttccaagaagcacaagac

SEQ ID NO: 136608 - DNA, 25 bp, Saccharomyces pastorianus
ggacaattgctcaggtcaaacacat

SEQ ID NO: 136609 - DNA, 25 bp, Saccharomyces pastorianus
ggtgcaaacttgctctttggagtgt

SEQ ID NO: 136610 - DNA, 25 bp, Saccharomyces pastorianus
agcgatcatcgcaaaacaggagcaa

SEQ ID NO: 136611 - DNA, 25 bp, Saccharomyces pastorianus
tagcacggagtgtcagaggataatt

SEQ ID NO: 136612 - DNA, 25 bp, Saccharomyces pastorianus
acaggcggacgacgacaagcacgaa

SEQ ID NO: 136613 - DNA, 25 bp, Saccharomyces pastorianus
gattgcaggcatcgaaggacaccta

SEQ ID NO: 136614 - DNA, 25 bp, Saccharomyces pastorianus
ggtgttcaatggctcatctacgggc

SEQ ID NO: 136615 - DNA, 25 bp, Saccharomyces pastorianus
gacacctagctgaaatccgggccaa

SEQ ID NO: 136616 - DNA, 25 bp, Saccharomyces pastorianus
tattttgtcgtccaagctgtccaac

SEQ ID NO: 136617 - DNA, 25 bp, Saccharomyces pastorianus
gggccggacaccagcaacgaaatat

SEQ ID NO: 136618 - DNA, 25 bp, Saccharomyces pastorianus
atggccggcagaccgtgctaatcaa

SEQ ID NO: 136619 - DNA, 25 bp, Saccharomyces pastorianus
gacgttgatcttggacgggctcacc

SEQ ID NO: 136620 - DNA, 25 bp, Saccharomyces pastorianus
tacgggcgttcctgagtccatagac

SEQ ID NO: 136621 - DNA, 25 bp, Saccharomyces pastorianus
ggacaactcagcgatggtgacgact

SEQ ID NO: 136622 - DNA, 25 bp, Saccharomyces pastorianus
cactgggttcaagggtctcctgata

SEQ ID NO: 136623 - DNA, 25 bp, Saccharomyces pastorianus
acaaaacctcatccgactcgttggg

SEQ ID NO: 136624 - DNA, 25 bp, Saccharomyces pastorianus
gttttgatcaaaccctggctcaagc

SEQ ID NO: 136625 - DNA, 25 bp, Saccharomyces pastorianus
acaccgttgccagacttggcggaga

SEQ ID NO: 136626 - DNA, 25 bp, Saccharomyces pastorianus
aaggacattgtcttatctgctagat

SEQ ID NO: 136627 - DNA, 25 bp, Saccharomyces pastorianus
gttcaaggcagttgttttcaacacc

SEQ ID NO: 136628 - DNA, 25 bp, Saccharomyces pastorianus
ctggctcaagccttagacactatta

SEQ ID NO: 136629 - DNA, 25 bp, Saccharomyces pastorianus
atcaaaaccctgtttcgtcagaaga

SEQ ID NO: 136630 - DNA, 25 bp, Saccharomyces pastorianus
agagattacagccaggctcgcctgt

SEQ ID NO: 136631 - DNA, 25 bp, Saccharomyces pastorianus
tatgggcctggatgcaagaacactg

SEQ ID NO: 136632 - DNA, 25 bp, Saccharomyces pastorianus
aggccatacctgcactgttcaaggc

SEQ ID NO: 136633 - DNA, 25 bp, Saccharomyces pastorianus
agatttttacatcccaatgcaaggc

SEQ ID NO: 136634 - DNA, 25 bp, Saccharomyces pastorianus
gacactattagatccaaggcgcaat

SEQ ID NO: 136635 - DNA, 25 bp, Saccharomyces pastorianus
gtgggacgccttagcagatgcctct

SEQ ID NO: 136636 - DNA, 25 bp, Saccharomyces pastorianus
ggaagatacaaccatataccccatt

SEQ ID NO: 136637 - DNA, 25 bp, Saccharomyces pastorianus
gttggttttccagtgttatctgtca

SEQ ID NO: 136638 - DNA, 25 bp, Saccharomyces pastorianus
gatgcctctggcaaggacgtttgtt

SEQ ID NO: 136639 - DNA, 25 bp, Saccharomyces pastorianus
actgacaatttacaacgtgctctaa

SEQ ID NO: 136640 - DNA, 25 bp, Saccharomyces pastorianus
gaaaaatctgctactttcgaactaa

SEQ ID NO: 136641 - DNA, 25 bp, Saccharomyces pastorianus
gaccggagatttgtgggacgcctta

SEQ ID NO: 136642 - DNA, 25 bp, Saccharomyces pastorianus
tataccccattttgttagctttgaa

SEQ ID NO: 136643 - DNA, 25 bp, Saccharomyces pastorianus
gtattttcattacctcttattctga

SEQ ID NO: 136644 - DNA, 25 bp, Saccharomyces pastorianus
gattcattgagatcttcccatccaa

SEQ ID NO: 136645 - DNA, 25 bp, Saccharomyces pastorianus
tcccatccaattgaagttcccgtta

SEQ ID NO: 136646 - DNA, 25 bp, Saccharomyces pastorianus
gcgcatgggtgagcagagatcgtga

SEQ ID NO: 136647 - DNA, 25 bp, Saccharomyces pastorianus
cgcgcatgggtgagcagagatcgtg

SEQ ID NO: 136648 - DNA, 25 bp, Saccharomyces pastorianus
tgagcagagatcgtgaaatcgttgc

SEQ ID NO: 136649 - DNA, 25 bp, Saccharomyces pastorianus
cacgcgcatgggtgagcagagatcg

SEQ ID NO: 136650 - DNA, 25 bp, Saccharomyces pastorianus
ccacgcgcatgggtgagcagagatc

SEQ ID NO: 136651 - DNA, 25 bp, Saccharomyces pastorianus
ggtgagcagagatcgtgaaatcgtt

SEQ ID NO: 136652 - DNA, 25 bp, Saccharomyces pastorianus
gaccacgcgcatgggtgagcagaga

SEQ ID NO: 136653 - DNA, 25 bp, Saccharomyces pastorianus
atgggtgagcagagatcgtgaaatc

SEQ ID NO: 136654 - DNA, 25 bp, Saccharomyces pastorianus
gagcagagatcgtgaaatcgttgct

SEQ ID NO: 136655 - DNA, 25 bp, Saccharomyces pastorianus
acgcgcatgggtgagcagagatcgt

SEQ ID NO: 136656 - DNA, 25 bp, Saccharomyces pastorianus
catgggtgagcagagatcgtgaaat

SEQ ID NO: 136657 - DNA, 25 bp, Saccharomyces pastorianus
atgttctcttgaaattccccgttag

SEQ ID NO: 136658 - DNA, 25 bp, Saccharomyces pastorianus
cacatttgctattttccaacgttgt

SEQ ID NO: 136659 - DNA, 25 bp, Saccharomyces pastorianus
caaaattttgcgagaaactctgata

SEQ ID NO: 136660 - DNA, 25 bp, Saccharomyces pastorianus
aattccccgttagtgaactgaacag

SEQ ID NO: 136661 - DNA, 25 bp, Saccharomyces pastorianus
gctattgattcatgacaagattttg

SEQ ID NO: 136662 - DNA, 25 bp, Saccharomyces pastorianus
taattttatcttccccataaagtcg

SEQ ID NO: 136663 - DNA, 25 bp, Saccharomyces pastorianus
ggcaataatcgctttcattctaatg

SEQ ID NO: 136664 - DNA, 25 bp, Saccharomyces pastorianus
gataaagtcattttcaagcggcaat

SEQ ID NO: 136665 - DNA, 25 bp, Saccharomyces pastorianus
gataatctgggtattactacggcaa

SEQ ID NO: 136666 - DNA, 25 bp, Saccharomyces pastorianus
ttccccataaagtcgataaagtcat

SEQ ID NO: 136667 - DNA, 25 bp, Saccharomyces pastorianus
cagaattttatagcaatcacatttg

SEQ ID NO: 136668 - DNA, 25 bp, Saccharomyces pastorianus
ggcacgttcaacacgcgttatcgag

SEQ ID NO: 136669 - DNA, 25 bp, Saccharomyces pastorianus
gattgaggtcaagcgccgaaattgc

SEQ ID NO: 136670 - DNA, 25 bp, Saccharomyces pastorianus
acatggtttaccgatctgtcgcact

SEQ ID NO: 136671 - DNA, 25 bp, Saccharomyces pastorianus
tcctttgttggcttacctgttagta

SEQ ID NO: 136672 - DNA, 25 bp, Saccharomyces pastorianus
gattccgggcatttcattcaagaag

SEQ ID NO: 136673 - DNA, 25 bp, Saccharomyces pastorianus
tgctataccagctttatttgctccg

SEQ ID NO: 136674 - DNA, 25 bp, Saccharomyces pastorianus
gccctttctgggacacatggtttac

SEQ ID NO: 136675 - DNA, 25 bp, Saccharomyces pastorianus
ggtagttttccaagattccgggcat

SEQ ID NO: 136676 - DNA, 25 bp, Saccharomyces pastorianus
aatgacgctgtcgattggcacgttc

SEQ ID NO: 136677 - DNA, 25 bp, Saccharomyces pastorianus
tatttgctccgctcaagtcagggaa

SEQ ID NO: 136678 - DNA, 25 bp, Saccharomyces pastorianus
gaagaggctgccattatggccttaa

SEQ ID NO: 136679 - DNA, 25 bp, Saccharomyces pastorianus
gccagtcagcgttcaaaaaccttta

SEQ ID NO: 136680 - DNA, 25 bp, Saccharomyces pastorianus
gatgcaagaatccatagacgcaagg

SEQ ID NO: 136681 - DNA, 25 bp, Saccharomyces pastorianus
gaagattgcatttacgttcttgact

SEQ ID NO: 136682 - DNA, 25 bp, Saccharomyces pastorianus
gaaatttgtctctgatgtccttgaa

SEQ ID NO: 136683 - DNA, 25 bp, Saccharomyces pastorianus
tacgttcttgactaaaagcggtaag

SEQ ID NO: 136684 - DNA, 25 bp, Saccharomyces pastorianus
gttatccaagccaaagaagattgca

SEQ ID NO: 136685 - DNA, 25 bp, Saccharomyces pastorianus
gaaccttcttcaagcaaggagacct

SEQ ID NO: 136686 - DNA, 25 bp, Saccharomyces pastorianus
gaattttacaattaccaacggatgt

SEQ ID NO: 136687 - DNA, 25 bp, Saccharomyces pastorianus
gagacctacgaagagttatccaagc

SEQ ID NO: 136688 - DNA, 25 bp, Saccharomyces pastorianus
ggttgttgccagtaaaattccagta

SEQ ID NO: 136689 - DNA, 25 bp, Saccharomyces pastorianus
tccagtaatttcgaagccagtcagc

SEQ ID NO: 136690 - DNA, 25 bp, Saccharomyces pastorianus
gtagcctagacttcaaacacattgt

SEQ ID NO: 136691 - DNA, 25 bp, Saccharomyces pastorianus
ctcactgggacgatgtagctattca

SEQ ID NO: 136692 - DNA, 25 bp, Saccharomyces pastorianus
gccgcgatttcgtcatcagatgtat

SEQ ID NO: 136693 - DNA, 25 bp, Saccharomyces pastorianus
gttggttcggaaagctcactgggac

SEQ ID NO: 136694 - DNA, 25 bp, Saccharomyces pastorianus
gtctatacagttaccgccgcgattt

SEQ ID NO: 136695 - DNA, 25 bp, Saccharomyces pastorianus
cacattattcggtttggtcatatca

SEQ ID NO: 136696 - DNA, 25 bp, Saccharomyces pastorianus
aacatgaacatgaaaggcgccttag

SEQ ID NO: 136697 - DNA, 25 bp, Saccharomyces pastorianus
tttaaacgactcagatccaccggat

SEQ ID NO: 136698 - DNA, 25 bp, Saccharomyces pastorianus
actaaagttctaggcggtctataca

SEQ ID NO: 136699 - DNA, 25 bp, Saccharomyces pastorianus
aagtgctgttttctctgttttcaaa

SEQ ID NO: 136700 - DNA, 25 bp, Saccharomyces pastorianus
gtcatatcaacaatcaacccaatcc

SEQ ID NO: 136701 - DNA, 25 bp, Saccharomyces pastorianus
gacgccggttctgactttgtaatac

SEQ ID NO: 136702 - DNA, 25 bp, Saccharomyces pastorianus
gacctactgctatgaaagttctaag

SEQ ID NO: 136703 - DNA, 25 bp, Saccharomyces pastorianus
agatccttaattgcagaagctacag

SEQ ID NO: 136704 - DNA, 25 bp, Saccharomyces pastorianus
ttgaaaacagagaccctccaagtgc

SEQ ID NO: 136705 - DNA, 25 bp, Saccharomyces pastorianus
acagatctgatctcccaaatgattg

SEQ ID NO: 136706 - DNA, 25 bp, Saccharomyces pastorianus
gattacttcaccaagcgttttccaa

SEQ ID NO: 136707 - DNA, 25 bp, Saccharomyces pastorianus
aatgaaattcgacgccggttctgac

SEQ ID NO: 136708 - DNA, 25 bp, Saccharomyces pastorianus
tacccagtggagattggactgtcaa

SEQ ID NO: 136709 - DNA, 25 bp, Saccharomyces pastorianus
gatccgttaaaaagacctactgcta

SEQ ID NO: 136710 - DNA, 25 bp, Saccharomyces pastorianus
gtgtattctattatatcctatccaa

SEQ ID NO: 136711 - DNA, 25 bp, Saccharomyces pastorianus
cctccaagtgccctgttaatgaaat

SEQ ID NO: 136712 - DNA, 25 bp, Saccharomyces pastorianus
gtctcgcacctcaaggcggcagata

SEQ ID NO: 136713 - DNA, 25 bp, Saccharomyces pastorianus
aaaaatatagactcgcccattcctg

SEQ ID NO: 136714 - DNA, 25 bp, Saccharomyces pastorianus
gttagtattgacactgctcgtttgt

SEQ ID NO: 136715 - DNA, 25 bp, Saccharomyces pastorianus
tgctcgtttgtgtgttttcatccat

SEQ ID NO: 136716 - DNA, 25 bp, Saccharomyces pastorianus
agggctgccaattctataagtgtac

SEQ ID NO: 136717 - DNA, 25 bp, Saccharomyces pastorianus
attcctgctccaagaaccactgaag

SEQ ID NO: 136718 - DNA, 25 bp, Saccharomyces pastorianus
atttcatgctcaatcccattgtcgt

SEQ ID NO: 136719 - DNA, 25 bp, Saccharomyces pastorianus
gaatactgctgataatcgacgtgct

SEQ ID NO: 136720 - DNA, 25 bp, Saccharomyces pastorianus
gtgtaccctatttggagaatcgttc

SEQ ID NO: 136721 - DNA, 25 bp, Saccharomyces pastorianus
gaagatgaagttgcctccactaaaa

SEQ ID NO: 136722 - DNA, 25 bp, Saccharomyces pastorianus
agctcatatccaactcctaacttat

SEQ ID NO: 136723 - DNA, 25 bp, Saccharomyces pastorianus
gatcattatgcttttctggtctcct

SEQ ID NO: 136724 - DNA, 25 bp, Saccharomyces pastorianus
gaaaacgccatatcatctgagaaga

SEQ ID NO: 136725 - DNA, 25 bp, Saccharomyces pastorianus
cctcggcttcacgtgtttcaagaaa

SEQ ID NO: 136726 - DNA, 25 bp, Saccharomyces pastorianus
actcatattttggatttcgttcaga

SEQ ID NO: 136727 - DNA, 25 bp, Saccharomyces pastorianus
gagtgcaatatcacctcgaggtcgt

SEQ ID NO: 136728 - DNA, 25 bp, Saccharomyces pastorianus
gaaggctgctgattgatggtcaaga

SEQ ID NO: 136729 - DNA, 25 bp, Saccharomyces pastorianus
gtttcggcacactgtataactcata

SEQ ID NO: 136730 - DNA, 25 bp, Saccharomyces pastorianus
aatataattacgtgcccagtttcgg

SEQ ID NO: 136731 - DNA, 25 bp, Saccharomyces pastorianus
tcgaggtcgtgctatgttgagaaac

SEQ ID NO: 136732 - DNA, 25 bp, Saccharomyces pastorianus
gctgagtcctcaaaaactattcttg

SEQ ID NO: 136733 - DNA, 25 bp, Saccharomyces pastorianus
ataaacataggcctttccatagtaa

SEQ ID NO: 136734 - DNA, 25 bp, Saccharomyces pastorianus
aaaactgttccttccaaatggtcag

SEQ ID NO: 136735 - DNA, 25 bp, Saccharomyces pastorianus
attgcatcgaccatcataccgagac

SEQ ID NO: 136736 - DNA, 25 bp, Saccharomyces pastorianus
aacggtcgtccatcttcgggattga

SEQ ID NO: 136737 - DNA, 25 bp, Saccharomyces pastorianus
taccgagacctagtatgtccaacgg

SEQ ID NO: 136738 - DNA, 25 bp, Saccharomyces pastorianus
aaatggtcagtagtcagttcctcta

SEQ ID NO: 136739 - DNA, 25 bp, Saccharomyces pastorianus
tattcaaggactctggtgtcagccc

SEQ ID NO: 136740 - DNA, 25 bp, Saccharomyces pastorianus
gtgtcagccccaatgaaaggttgat

SEQ ID NO: 136741 - DNA, 25 bp, Saccharomyces pastorianus
gaaagtactaccttcgacggcactg

SEQ ID NO: 136742 - DNA, 25 bp, Saccharomyces pastorianus
caactcctctaatggcctaacgaat

SEQ ID NO: 136743 - DNA, 25 bp, Saccharomyces pastorianus
aaaagattgtccttcaactcctcta

SEQ ID NO: 136744 - DNA, 25 bp, Saccharomyces pastorianus
aacaccagtagcgacgttttacaag

SEQ ID NO: 136745 - DNA, 25 bp, Saccharomyces pastorianus
gagctaaaagctccttcgttggctt

SEQ ID NO: 136746 - DNA, 25 bp, Saccharomyces pastorianus
gtttatgttccacctcatcatagga

SEQ ID NO: 136747 - DNA, 25 bp, Saccharomyces pastorianus
gctggctccactcacgataaaaaat

SEQ ID NO: 136748 - DNA, 25 bp, Saccharomyces pastorianus
agacgtattcgcagactctaacaat

SEQ ID NO: 136749 - DNA, 25 bp, Saccharomyces pastorianus
gagaagttgtcctcttcaccaggag

SEQ ID NO: 136750 - DNA, 25 bp, Saccharomyces pastorianus
aggccacgttgtcagtttcgcataa

SEQ ID NO: 136751 - DNA, 25 bp, Saccharomyces pastorianus
ggtggtgacaacgaatcctcgtcaa

SEQ ID NO: 136752 - DNA, 25 bp, Saccharomyces pastorianus
atttatgctcaaactttcgctggct

SEQ ID NO: 136753 - DNA, 25 bp, Saccharomyces pastorianus
gggaacacaggtacctcctatgaat

SEQ ID NO: 136754 - DNA, 25 bp, Saccharomyces pastorianus
tgaatctaacccactgcatatgaat

SEQ ID NO: 136755 - DNA, 25 bp, Saccharomyces pastorianus
attccaggcgttccagtgctaatga

SEQ ID NO: 136756 - DNA, 25 bp, Saccharomyces pastorianus
gatttcttcgactcttacatcatca

SEQ ID NO: 136757 - DNA, 25 bp, Saccharomyces pastorianus
ggcggtgacctatatgaggcgatca

SEQ ID NO: 136758 - DNA, 25 bp, Saccharomyces pastorianus
ggaatattgctctggcggtgaccta

SEQ ID NO: 136759 - DNA, 25 bp, Saccharomyces pastorianus
aaagttgatacggatcgccatgaaa

SEQ ID NO: 136760 - DNA, 25 bp, Saccharomyces pastorianus
gcctccagtaataacgggtcaagta

SEQ ID NO: 136761 - DNA, 25 bp, Saccharomyces pastorianus
taataacatttgtctcgaagccatg

SEQ ID NO: 136762 - DNA, 25 bp, Saccharomyces pastorianus
gatgctgtgcctaagaaaaccaaat

SEQ ID NO: 136763 - DNA, 25 bp, Saccharomyces pastorianus
gcgatcaaagccgatgctgtgccta

SEQ ID NO: 136764 - DNA, 25 bp, Saccharomyces pastorianus
attgctgctctattagatttcttcg

SEQ ID NO: 136765 - DNA, 25 bp, Saccharomyces pastorianus
ggtagacaccaaaatattgctgctc

SEQ ID NO: 136766 - DNA, 25 bp, Saccharomyces pastorianus
gtacgatgggcctcaggacgacgaa

SEQ ID NO: 136767 - DNA, 25 bp, Saccharomyces pastorianus
gaagaccaagttcctccagttatac

SEQ ID NO: 136768 - DNA, 25 bp, Saccharomyces pastorianus
gaagtatttgttcacgcaagcacta

SEQ ID NO: 136769 - DNA, 25 bp, Saccharomyces pastorianus
gggaagccttcataccaggaacact

SEQ ID NO: 136770 - DNA, 25 bp, Saccharomyces pastorianus
ggcgatcacgattcagacgacgttt

SEQ ID NO: 136771 - DNA, 25 bp, Saccharomyces pastorianus
ataccggtaagtcaccactttcaag

SEQ ID NO: 136772 - DNA, 25 bp, Saccharomyces pastorianus
taagagttccgcaatcaactgctcc

SEQ ID NO: 136773 - DNA, 25 bp, Saccharomyces pastorianus
ctacagttcaacattcaccaggcgc

SEQ ID NO: 136774 - DNA, 25 bp, Saccharomyces pastorianus
aaatgatcacttaccgcatacaacg

SEQ ID NO: 136775 - DNA, 25 bp, Saccharomyces pastorianus
ggcgtggttctacgactacagttca

SEQ ID NO: 136776 - DNA, 25 bp, Saccharomyces pastorianus
aatgccaggaaccatcacgtaagcc

SEQ ID NO: 136777 - DNA, 25 bp, Saccharomyces pastorianus
gctcctgatatctctaccgttttag

SEQ ID NO: 136778 - DNA, 25 bp, Saccharomyces pastorianus
attgtctttggtgtcgtcaacttct

SEQ ID NO: 136779 - DNA, 25 bp, Saccharomyces pastorianus
ttgttgttctctgtacaccgttgac

SEQ ID NO: 136780 - DNA, 25 bp, Saccharomyces pastorianus
gtctatgcttctgttggagtcacta

SEQ ID NO: 136781 - DNA, 25 bp, Saccharomyces pastorianus
aaacaacggctcatccaagggtgct

SEQ ID NO: 136782 - DNA, 25 bp, Saccharomyces pastorianus
ctgttatgttgtctatgcttctgtt

SEQ ID NO: 136783 - DNA, 25 bp, Saccharomyces pastorianus
ggttccagtatccaagagaggcgct

SEQ ID NO: 136784 - DNA, 25 bp, Saccharomyces pastorianus
tgtatgtctattgccagtgctgcta

SEQ ID NO: 136785 - DNA, 25 bp, Saccharomyces pastorianus
aacttcttctccacttgttgttctc

SEQ ID NO: 136786 - DNA, 25 bp, Saccharomyces pastorianus
tgtacaccgttgaccgttttggccg

SEQ ID NO: 136787 - DNA, 25 bp, Saccharomyces pastorianus
gaaatcagcttcctgggttccagta

SEQ ID NO: 136788 - DNA, 25 bp, Saccharomyces pastorianus
gccccaatcgcttacgttgttattt

SEQ ID NO: 136789 - DNA, 25 bp, Saccharomyces pastorianus
tgccattggtggtatcgtcttagcc

SEQ ID NO: 136790 - DNA, 25 bp, Saccharomyces pastorianus
gtatggtcgtagaatcggtttgatt

SEQ ID NO: 136791 - DNA, 25 bp, Saccharomyces pastorianus
atgaagcaccacgacggtagtcatt

SEQ ID NO: 136792 - DNA, 25 bp, Saccharomyces pastorianus
aggtgtcggtggtatcacagtttta

SEQ ID NO: 136793 - DNA, 25 bp, Saccharomyces pastorianus
tatcacagttttatctcccatgcta

SEQ ID NO: 136794 - DNA, 25 bp, Saccharomyces pastorianus
gagaggcaccttggtttcatgttac

SEQ ID NO: 136795 - DNA, 25 bp, Saccharomyces pastorianus
agtaatctacactatcggtatcatt

SEQ ID NO: 136796 - DNA, 25 bp, Saccharomyces pastorianus
tcccatgctaatatctgaggtcgcc

SEQ ID NO: 136797 - DNA, 25 bp, Saccharomyces pastorianus
acggtagtcattacttgtccaaggt

SEQ ID NO: 136798 - DNA, 25 bp, Saccharomyces pastorianus
atcgtcttagccaagctaggtgata

SEQ ID NO: 136799 - DNA, 25 bp, Saccharomyces pastorianus
ggtgcctacgtaacggtttctatct

SEQ ID NO: 136800 - DNA, 25 bp, Saccharomyces pastorianus
gacgctactagaaatgatccgagac

SEQ ID NO: 136801 - DNA, 25 bp, Saccharomyces pastorianus
aatggatcccaccatctaggagaac

SEQ ID NO: 136802 - DNA, 25 bp, Saccharomyces pastorianus
atataccgtcgatcgttttggtcgt

SEQ ID NO: 136803 - DNA, 25 bp, Saccharomyces pastorianus
acagattatgacctagacgctacta

SEQ ID NO: 136804 - DNA, 25 bp, Saccharomyces pastorianus
tgtttcgacttttttctcgctatat

SEQ ID NO: 136805 - DNA, 25 bp, Saccharomyces pastorianus
aaatgtgctaccttggaagtctacc

SEQ ID NO: 136806 - DNA, 25 bp, Saccharomyces pastorianus
ggtgttcgcatacttttatgtgttc

SEQ ID NO: 136807 - DNA, 25 bp, Saccharomyces pastorianus
gattgttttcgcatgtttctacatt

SEQ ID NO: 136808 - DNA, 25 bp, Saccharomyces pastorianus
ttatctctgagtcgtatcccttaag

SEQ ID NO: 136809 - DNA, 25 bp, Saccharomyces pastorianus
gttgcctatgtccttatctctgagt

SEQ ID NO: 136810 - DNA, 25 bp, Saccharomyces pastorianus
aatgtcgattgcaagtgcctgtaac

SEQ ID NO: 136811 - DNA, 25 bp, Saccharomyces pastorianus
attacgatgggtctaggctcaacga

SEQ ID NO: 136812 - DNA, 25 bp, Saccharomyces pastorianus
aggccaattccagtactacgacttt

SEQ ID NO: 136813 - DNA, 25 bp, Saccharomyces pastorianus
ataaagtggcgcctgtactggcctt

SEQ ID NO: 136814 - DNA, 25 bp, Saccharomyces pastorianus
aaactgaactagtccatgggcccat

SEQ ID NO: 136815 - DNA, 25 bp, Saccharomyces pastorianus
tcaacgacgttcctggatggcgcac

SEQ ID NO: 136816 - DNA, 25 bp, Saccharomyces pastorianus
aatagaacttctgttccggtcactg

SEQ ID NO: 136817 - DNA, 25 bp, Saccharomyces pastorianus
gaaaaaagtctctcccctcaagaag

SEQ ID NO: 136818 - DNA, 25 bp, Saccharomyces pastorianus
taggcggccgcacaagtaagaagtc

SEQ ID NO: 136819 - DNA, 25 bp, Saccharomyces pastorianus
tattacccagttcgactccaaaatg

SEQ ID NO: 136820 - DNA, 25 bp, Saccharomyces pastorianus
gacgattctgagacgctgaaccaac

SEQ ID NO: 136821 - DNA, 25 bp, Saccharomyces pastorianus
gtcttccgctgccatagagcaagat

SEQ ID NO: 136822 - DNA, 25 bp, Saccharomyces pastorianus
ttggccctattcatccgtgacgaga

SEQ ID NO: 136823 - DNA, 25 bp, Saccharomyces pastorianus
atcatggtttagcaaccttcaccgg

SEQ ID NO: 136824 - DNA, 25 bp, Saccharomyces pastorianus
ccaccagattctccgatatttcata

SEQ ID NO: 136825 - DNA, 25 bp, Saccharomyces pastorianus
attggcagcgctgtcagtccaagaa

SEQ ID NO: 136826 - DNA, 25 bp, Saccharomyces pastorianus
agttccattcagactgacgcctaat

SEQ ID NO: 136827 - DNA, 25 bp, Saccharomyces pastorianus
gatgatcaataaccgtactcctcac

SEQ ID NO: 136828 - DNA, 25 bp, Saccharomyces pastorianus
gaactgaacacatacttggccctat

SEQ ID NO: 136829 - DNA, 25 bp, Saccharomyces pastorianus
cgtactcctcacaaaatccatgttg

SEQ ID NO: 136830 - DNA, 25 bp, Saccharomyces pastorianus
agttcatcctagactgtattggcag

SEQ ID NO: 136831 - DNA, 25 bp, Saccharomyces pastorianus
atacagttcgtttgtcttcatgtct

SEQ ID NO: 136832 - DNA, 25 bp, Saccharomyces pastorianus
atgacttaagtcttccaccagattc

SEQ ID NO: 136833 - DNA, 25 bp, Saccharomyces pastorianus
aaattgtgggcttctgtttccaggg

SEQ ID NO: 136834 - DNA, 25 bp, Saccharomyces pastorianus
gctggcatccttttaagattcttga

SEQ ID NO: 136835 - DNA, 25 bp, Saccharomyces pastorianus
gttcttcttccacacttaaacgatc

SEQ ID NO: 136836 - DNA, 25 bp, Saccharomyces pastorianus
atgtccgtcaatcttttccccaata

SEQ ID NO: 136837 - DNA, 25 bp, Saccharomyces pastorianus
tacggttgctaatcctaaattgtgg

SEQ ID NO: 136838 - DNA, 25 bp, Saccharomyces pastorianus
gatctaatactaaactccctgaaat

SEQ ID NO: 136839 - DNA, 25 bp, Saccharomyces pastorianus
tacatgtcgcgcaatcctttttaac

SEQ ID NO: 136840 - DNA, 25 bp, Saccharomyces pastorianus
atatcaatgaggttgttcttcttcc

SEQ ID NO: 136841 - DNA, 25 bp, Saccharomyces pastorianus
atgctggaggattctgggctgctac

SEQ ID NO: 136842 - DNA, 25 bp, Saccharomyces pastorianus
ttcaaattgtcctttatgtccgtca

SEQ ID NO: 136843 - DNA, 25 bp, Saccharomyces pastorianus
gtctcagccaccaaagatgctcgtg

SEQ ID NO: 136844 - DNA, 25 bp, Saccharomyces pastorianus
taaagtttcggcaaatcctctctcc

SEQ ID NO: 136845 - DNA, 25 bp, Saccharomyces pastorianus
atggcaaacctaatgggtcatacgg

SEQ ID NO: 136846 - DNA, 25 bp, Saccharomyces pastorianus
tttcggcaaatcctctctccaagtt

SEQ ID NO: 136847 - DNA, 25 bp, Saccharomyces pastorianus
aaagtttcggcaaatcctctctcca

SEQ ID NO: 136848 - DNA, 25 bp, Saccharomyces pastorianus
ttcggcaaatcctctctccaagttc

SEQ ID NO: 136849 - DNA, 25 bp, Saccharomyces pastorianus
ggtgtaaagtttcggcaaatcctct

SEQ ID NO: 136850 - DNA, 25 bp, Saccharomyces pastorianus
agtttcggcaaatcctctctccaag

SEQ ID NO: 136851 - DNA, 25 bp, Saccharomyces pastorianus
gatggtgtaaagtttcggcaaatcc

SEQ ID NO: 136852 - DNA, 25 bp, Saccharomyces pastorianus
tggcaaacctaatgggtcatacggg

SEQ ID NO: 136853 - DNA, 25 bp, Saccharomyces pastorianus
tggtgtaaagtttcggcaaatcctc

SEQ ID NO: 136854 - DNA, 25 bp, Saccharomyces pastorianus
gtaaagtttcggcaaatcctctctc

SEQ ID NO: 136855 - DNA, 25 bp, Saccharomyces pastorianus
atccctgtctcaatgactccaatta

SEQ ID NO: 136856 - DNA, 25 bp, Saccharomyces pastorianus
ttcacaacagactattccatccgga

SEQ ID NO: 136857 - DNA, 25 bp, Saccharomyces pastorianus
tctttaggctttggcatgtgtcctc

SEQ ID NO: 136858 - DNA, 25 bp, Saccharomyces pastorianus
gacttagaatcgtttctgccaggaa

SEQ ID NO: 136859 - DNA, 25 bp, Saccharomyces pastorianus
aatcatattctgagttccgccgcaa

SEQ ID NO: 136860 - DNA, 25 bp, Saccharomyces pastorianus
aatattcttggctcatctgtttccg

SEQ ID NO: 136861 - DNA, 25 bp, Saccharomyces pastorianus
agtgttcctctttctgctaatacag

SEQ ID NO: 136862 - DNA, 25 bp, Saccharomyces pastorianus
tgcctcggaacacccattgaatatt

SEQ ID NO: 136863 - DNA, 25 bp, Saccharomyces pastorianus
gaaggtttgccctgcattgaacacg

SEQ ID NO: 136864 - DNA, 25 bp, Saccharomyces pastorianus
atcaacgactgcaccaatttcacaa

SEQ ID NO: 136865 - DNA, 25 bp, Saccharomyces pastorianus
agcggccctaataacagtgttcctc

SEQ ID NO: 136866 - DNA, 25 bp, Saccharomyces pastorianus
tccttcgtcatctagctcaatacaa

SEQ ID NO: 136867 - DNA, 25 bp, Saccharomyces pastorianus
taacaagacgtcaaagggccctcca

SEQ ID NO: 136868 - DNA, 25 bp, Saccharomyces pastorianus
ataaatcaccttcaaacgtgcccag

SEQ ID NO: 136869 - DNA, 25 bp, Saccharomyces pastorianus
tatagccagagtacacctgctttgc

SEQ ID NO: 136870 - DNA, 25 bp, Saccharomyces pastorianus
tgcgagcgcagatccggttttaata

SEQ ID NO: 136871 - DNA, 25 bp, Saccharomyces pastorianus
actaccgaatagtgctctaccaacg

SEQ ID NO: 136872 - DNA, 25 bp, Saccharomyces pastorianus
agctccactccgaacaacagtaata

SEQ ID NO: 136873 - DNA, 25 bp, Saccharomyces pastorianus
aacgtgcccagacggttgacagtca

SEQ ID NO: 136874 - DNA, 25 bp, Saccharomyces pastorianus
acaaaggccaggtcatctacagtga

SEQ ID NO: 136875 - DNA, 25 bp, Saccharomyces pastorianus
gattaactactgctccaacgtctat

SEQ ID NO: 136876 - DNA, 25 bp, Saccharomyces pastorianus
gcagttgcttctaattccggaatca

SEQ ID NO: 136877 - DNA, 25 bp, Saccharomyces pastorianus
tagagagaccggtggctctgcagac

SEQ ID NO: 136878 - DNA, 25 bp, Saccharomyces pastorianus
gtagctaacgactcaccatgcggtt

SEQ ID NO: 136879 - DNA, 25 bp, Saccharomyces pastorianus
agaactctagacttgggtaatcctg

SEQ ID NO: 136880 - DNA, 25 bp, Saccharomyces pastorianus
gtggtggtcccgtaatcaagattaa

SEQ ID NO: 136881 - DNA, 25 bp, Saccharomyces pastorianus
agattctaacttcttgcctaatata

SEQ ID NO: 136882 - DNA, 25 bp, Saccharomyces pastorianus
agaggctgctaaagtccctttgcaa

SEQ ID NO: 136883 - DNA, 25 bp, Saccharomyces pastorianus
gttgctcatgcagttcatccaaact

SEQ ID NO: 136884 - DNA, 25 bp, Saccharomyces pastorianus
gctctgcagacctggagttccaaat

SEQ ID NO: 136885 - DNA, 25 bp, Saccharomyces pastorianus
gtccctttgcaattgtttgtcgtag

SEQ ID NO: 136886 - DNA, 25 bp, Saccharomyces pastorianus
cggtttaacgttggcggctgacaca

SEQ ID NO: 136887 - DNA, 25 bp, Saccharomyces pastorianus
aagtcgtttttcctttcatctgatg

SEQ ID NO: 136888 - DNA, 25 bp, Saccharomyces pastorianus
aaatggcttcaaagagttgagcgaa

SEQ ID NO: 136889 - DNA, 25 bp, Saccharomyces pastorianus
cagttcataacatcaaaaagcatct

SEQ ID NO: 136890 - DNA, 25 bp, Saccharomyces pastorianus
aaagtactttgtgacaagaatggct

SEQ ID NO: 136891 - DNA, 25 bp, Saccharomyces pastorianus
ggagtttgtcagtttcttaaatagc

SEQ ID NO: 136892 - DNA, 25 bp, Saccharomyces pastorianus
tcttaaatagctcacactctcctta

SEQ ID NO: 136893 - DNA, 25 bp, Saccharomyces pastorianus
ggccacgtcgcacaaaaaggaaagt

SEQ ID NO: 136894 - DNA, 25 bp, Saccharomyces pastorianus
gcatctggtgtcaaatggcttcaaa

SEQ ID NO: 136895 - DNA, 25 bp, Saccharomyces pastorianus
gtttcttaaatagctcacactctcc

SEQ ID NO: 136896 - DNA, 25 bp, Saccharomyces pastorianus
actctccttaccatacagttcataa

SEQ ID NO: 136897 - DNA, 25 bp, Saccharomyces pastorianus
tgggctggccacgtcgcacaaaaag

SEQ ID NO: 136898 - DNA, 25 bp, Saccharomyces pastorianus
cgaacgtgactcgtgggctggccac

SEQ ID NO: 136899 - DNA, 25 bp, Saccharomyces pastorianus
cttcgcggaagctgcaaagatacaa

SEQ ID NO: 136900 - DNA, 25 bp, Saccharomyces pastorianus
gcaattttagcaagaactatggatg

SEQ ID NO: 136901 - DNA, 25 bp, Saccharomyces pastorianus
aacttcaagctactaccttcgcgga

SEQ ID NO: 136902 - DNA, 25 bp, Saccharomyces pastorianus
gaaaaaattgacgaggccatagaat

SEQ ID NO: 136903 - DNA, 25 bp, Saccharomyces pastorianus
taagtgcaaagatggagctaacatt

SEQ ID NO: 136904 - DNA, 25 bp, Saccharomyces pastorianus
gaagattctgcaattttagcaagaa

SEQ ID NO: 136905 - DNA, 25 bp, Saccharomyces pastorianus
cgaggccatagaattgtttgaagat

SEQ ID NO: 136906 - DNA, 25 bp, Saccharomyces pastorianus
aagctactaccttcgcggaagctgc

SEQ ID NO: 136907 - DNA, 25 bp, Saccharomyces pastorianus
gggctgatccaatcataagtgcaaa

SEQ ID NO: 136908 - DNA, 25 bp, Saccharomyces pastorianus
gcgtttgagggctgatccaatcata

SEQ ID NO: 136909 - DNA, 25 bp, Saccharomyces pastorianus
actaccttcgcggaagctgcaaaga

SEQ ID NO: 136910 - DNA, 25 bp, Saccharomyces pastorianus
accaccgtgggcagatgtattttat

SEQ ID NO: 136911 - DNA, 25 bp, Saccharomyces pastorianus
gggatttttgactctcacttagaag

SEQ ID NO: 136912 - DNA, 25 bp, Saccharomyces pastorianus
acgctctattgtcagatgctttgca

SEQ ID NO: 136913 - DNA, 25 bp, Saccharomyces pastorianus
taccactctctactttctgcaaata

SEQ ID NO: 136914 - DNA, 25 bp, Saccharomyces pastorianus
actacgatactgcatacgctctatt

SEQ ID NO: 136915 - DNA, 25 bp, Saccharomyces pastorianus
aacctgttagatgcccaagttcttt

SEQ ID NO: 136916 - DNA, 25 bp, Saccharomyces pastorianus
ggcattctgctacacgggtattttc

SEQ ID NO: 136917 - DNA, 25 bp, Saccharomyces pastorianus
aggttttgccgtctaacacatctct

SEQ ID NO: 136918 - DNA, 25 bp, Saccharomyces pastorianus
acatctctggcgtcattttttggga

SEQ ID NO: 136919 - DNA, 25 bp, Saccharomyces pastorianus
ttgatctaaaccctgagtatccgcc

SEQ ID NO: 136920 - DNA, 25 bp, Saccharomyces pastorianus
tttttggcattgaccttggccgata

SEQ ID NO: 136921 - DNA, 25 bp, Saccharomyces pastorianus
gaaacatcgttcatcttgcaaggag

SEQ ID NO: 136922 - DNA, 25 bp, Saccharomyces pastorianus
ggaacggtctttagctattctagat

SEQ ID NO: 136923 - DNA, 25 bp, Saccharomyces pastorianus
gacattcacggccaataactgcgaa

SEQ ID NO: 136924 - DNA, 25 bp, Saccharomyces pastorianus
gcaattatagtcattctggcgcaaa

SEQ ID NO: 136925 - DNA, 25 bp, Saccharomyces pastorianus
tctagatgagattggccgtgggact

SEQ ID NO: 136926 - DNA, 25 bp, Saccharomyces pastorianus
cttgcaaggagctacggaacggtct

SEQ ID NO: 136927 - DNA, 25 bp, Saccharomyces pastorianus
aaccataagttgaagccgggcatct

SEQ ID NO: 136928 - DNA, 25 bp, Saccharomyces pastorianus
ttagccgagttggttcagcagatga

SEQ ID NO: 136929 - DNA, 25 bp, Saccharomyces pastorianus
gcattagcatcgcttatgcaacttt

SEQ ID NO: 136930 - DNA, 25 bp, Saccharomyces pastorianus
agttgcggaattggccggatttcca

SEQ ID NO: 136931 - DNA, 25 bp, Saccharomyces pastorianus
aagccgggcatctgcacgaaatcag

SEQ ID NO: 136932 - DNA, 25 bp, Saccharomyces pastorianus
gaaattgtctttcgactcagcaaga

SEQ ID NO: 136933 - DNA, 25 bp, Saccharomyces pastorianus
ggagcagtgcactagcaatcgttac

SEQ ID NO: 136934 - DNA, 25 bp, Saccharomyces pastorianus
ttcccttccaccatcattacaatat

SEQ ID NO: 136935 - DNA, 25 bp, Saccharomyces pastorianus
aagcatttgacactttgcagggcaa

SEQ ID NO: 136936 - DNA, 25 bp, Saccharomyces pastorianus
tacagtgtaactatcgcagagcaat

SEQ ID NO: 136937 - DNA, 25 bp, Saccharomyces pastorianus
aggcacgtggccagcatcaatgcaa

SEQ ID NO: 136938 - DNA, 25 bp, Saccharomyces pastorianus
tccccggcacttttcattgatgaag

SEQ ID NO: 136939 - DNA, 25 bp, Saccharomyces pastorianus
aaactatcaagcactgagccctcga

SEQ ID NO: 136940 - DNA, 25 bp, Saccharomyces pastorianus
tttgcagggcaacatcacatatctc

SEQ ID NO: 136941 - DNA, 25 bp, Saccharomyces pastorianus
tgggtttcctgtacaccagttaagt

SEQ ID NO: 136942 - DNA, 25 bp, Saccharomyces pastorianus
aaagttccatttgctgggtttcctg

SEQ ID NO: 136943 - DNA, 25 bp, Saccharomyces pastorianus
agatattgttttttccctagctgtt

SEQ ID NO: 136944 - DNA, 25 bp, Saccharomyces pastorianus
ggtctctcactaggtgttcacatta

SEQ ID NO: 136945 - DNA, 25 bp, Saccharomyces pastorianus
atagaaacagcacttcttcggccaa

SEQ ID NO: 136946 - DNA, 25 bp, Saccharomyces pastorianus
ataaaatcgtctttgccctatcttg

SEQ ID NO: 136947 - DNA, 25 bp, Saccharomyces pastorianus
acccatgttaattcctttgtgccag

SEQ ID NO: 136948 - DNA, 25 bp, Saccharomyces pastorianus
atcttggcttgggttcggtctctca

SEQ ID NO: 136949 - DNA, 25 bp, Saccharomyces pastorianus
tttattacactctctttcatccttt

SEQ ID NO: 136950 - DNA, 25 bp, Saccharomyces pastorianus
taagcagagctttcccatgttcaat

SEQ ID NO: 136951 - DNA, 25 bp, Saccharomyces pastorianus
gttgcccttttttgcctattatgca

SEQ ID NO: 136952 - DNA, 25 bp, Saccharomyces pastorianus
cctagctgttttcggtttggttatg

SEQ ID NO: 136953 - DNA, 25 bp, Saccharomyces pastorianus
gtaatctggcatacctacttattta

SEQ ID NO: 136954 - DNA, 25 bp, Saccharomyces pastorianus
aaaggcttcatcgtgggacctacgg

SEQ ID NO: 136955 - DNA, 25 bp, Saccharomyces pastorianus
atcgaaggcgagcatcatctactct

SEQ ID NO: 136956 - DNA, 25 bp, Saccharomyces pastorianus
gacctacggcgttgatagaacttaa

SEQ ID NO: 136957 - DNA, 25 bp, Saccharomyces pastorianus
tatattccagtttcgggaccaacct

SEQ ID NO: 136958 - DNA, 25 bp, Saccharomyces pastorianus
gacaccgatgaatatgctggcgatg

SEQ ID NO: 136959 - DNA, 25 bp, Saccharomyces pastorianus
gttgcttctccaatataccttacgg

SEQ ID NO: 136960 - DNA, 25 bp, Saccharomyces pastorianus
gagggattctctgaagtgcatcaaa

SEQ ID NO: 136961 - DNA, 25 bp, Saccharomyces pastorianus
gaaggcgttatttgagggattctct

SEQ ID NO: 136962 - DNA, 25 bp, Saccharomyces pastorianus
atcatctactctaagttgcttctcc

SEQ ID NO: 136963 - DNA, 25 bp, Saccharomyces pastorianus
gggtaaggttatctatattccagtt

SEQ ID NO: 136964 - DNA, 25 bp, Saccharomyces pastorianus
tttagcaaccgccagagcttacaga

SEQ ID NO: 136965 - DNA, 25 bp, Saccharomyces pastorianus
gatcaaaaatatactgtggccccaa

SEQ ID NO: 136966 - DNA, 25 bp, Saccharomyces pastorianus
ggtgattttaacctttcgatcctat

SEQ ID NO: 136967 - DNA, 25 bp, Saccharomyces pastorianus
aacgatttcttttgtgctggtcaac

SEQ ID NO: 136968 - DNA, 25 bp, Saccharomyces pastorianus
gatcctattatttgccatggataat

SEQ ID NO: 136969 - DNA, 25 bp, Saccharomyces pastorianus
gaacaacttgtatgcacgatgtcgg

SEQ ID NO: 136970 - DNA, 25 bp, Saccharomyces pastorianus
gccatccttaacaaacgaacaactt

SEQ ID NO: 136971 - DNA, 25 bp, Saccharomyces pastorianus
gccatggataatttgccctctattg

SEQ ID NO: 136972 - DNA, 25 bp, Saccharomyces pastorianus
ctgtggccccaagaaacaacgattt

SEQ ID NO: 136973 - DNA, 25 bp, Saccharomyces pastorianus
gtatgcacgatgtcggatcaaaaat

SEQ ID NO: 136974 - DNA, 25 bp, Saccharomyces pastorianus
ggcagagccatccttaacaaacgaa

SEQ ID NO: 136975 - DNA, 25 bp, Saccharomyces pastorianus
aatttgccctctattggcagagcca

SEQ ID NO: 136976 - DNA, 25 bp, Saccharomyces pastorianus
gatcaaaaatatactgtggccccaa

SEQ ID NO: 136977 - DNA, 25 bp, Saccharomyces pastorianus
atactgtggccccaagaaacaacga

SEQ ID NO: 136978 - DNA, 25 bp, Saccharomyces pastorianus
ggtgattttaacctttcgatcctat

SEQ ID NO: 136979 - DNA, 25 bp, Saccharomyces pastorianus
gatcctattatttgccatggataat

SEQ ID NO: 136980 - DNA, 25 bp, Saccharomyces pastorianus
gaacaacttgtatgcacgatgtcgg

SEQ ID NO: 136981 - DNA, 25 bp, Saccharomyces pastorianus
gccatccttaacaaacgaacaactt

SEQ ID NO: 136982 - DNA, 25 bp, Saccharomyces pastorianus
tttaacctttcgatcctattatttg

SEQ ID NO: 136983 - DNA, 25 bp, Saccharomyces pastorianus
gccatggataatttgccctctattg

SEQ ID NO: 136984 - DNA, 25 bp, Saccharomyces pastorianus
gtatgcacgatgtcggatcaaaaat

SEQ ID NO: 136985 - DNA, 25 bp, Saccharomyces pastorianus
ggcagagccatccttaacaaacgaa

SEQ ID NO: 136986 - DNA, 25 bp, Saccharomyces pastorianus
aatttgccctctattggcagagcca

SEQ ID NO: 136987 - DNA, 25 bp, Saccharomyces pastorianus
gagttggcggcttttgcagccgaaa

SEQ ID NO: 136988 - DNA, 25 bp, Saccharomyces pastorianus
atgatgatgacgaggtactcccggg

SEQ ID NO: 136989 - DNA, 25 bp, Saccharomyces pastorianus
gcatccagagggtatatcatctata

SEQ ID NO: 136990 - DNA, 25 bp, Saccharomyces pastorianus
tagatagaggtaattccccgagaga

SEQ ID NO: 136991 - DNA, 25 bp, Saccharomyces pastorianus
aagtgataatattagcagctcctta

SEQ ID NO: 136992 - DNA, 25 bp, Saccharomyces pastorianus
gttgtaatccttgatgatgatgacg

SEQ ID NO: 136993 - DNA, 25 bp, Saccharomyces pastorianus
attccccgagagagttggcggcttt

SEQ ID NO: 136994 - DNA, 25 bp, Saccharomyces pastorianus
atatagagatgatcgctggtgcgga

SEQ ID NO: 136995 - DNA, 25 bp, Saccharomyces pastorianus
gcagctccttagaagttgtaatcct

SEQ ID NO: 136996 - DNA, 25 bp, Saccharomyces pastorianus
caggaataagtactaacacagggat

SEQ ID NO: 136997 - DNA, 25 bp, Saccharomyces pastorianus
gaagttagggagtttgcatccagag

SEQ ID NO: 136998 - DNA, 25 bp, Saccharomyces pastorianus
ataatgggcaccatgctgcacgaat

SEQ ID NO: 136999 - DNA, 25 bp, Saccharomyces pastorianus
tgggcaccatgctgcacgaattaac

SEQ ID NO: 137000 - DNA, 25 bp, Saccharomyces pastorianus
gggcaccatgctgcacgaattaact

SEQ ID NO: 137001 - DNA, 25 bp, Saccharomyces pastorianus
ggagtgtataatgggcaccatgctg

SEQ ID NO: 137002 - DNA, 25 bp, Saccharomyces pastorianus
tggagtgtataatgggcaccatgct

SEQ ID NO: 137003 - DNA, 25 bp, Saccharomyces pastorianus
tataatgggcaccatgctgcacgaa

SEQ ID NO: 137004 - DNA, 25 bp, Saccharomyces pastorianus
gtataatgggcaccatgctgcacga

SEQ ID NO: 137005 - DNA, 25 bp, Saccharomyces pastorianus
taatgggcaccatgctgcacgaatt

SEQ ID NO: 137006 - DNA, 25 bp, Saccharomyces pastorianus
tgtataatgggcaccatgctgcacg

SEQ ID NO: 137007 - DNA, 25 bp, Saccharomyces pastorianus
atgggcaccatgctgcacgaattaa

SEQ ID NO: 137008 - DNA, 25 bp, Saccharomyces pastorianus
aatgggcaccatgctgcacgaatta

SEQ ID NO: 137009 - DNA, 25 bp, Saccharomyces pastorianus
catatttctccgtaaagtcagccga

SEQ ID NO: 137010 - DNA, 25 bp, Saccharomyces pastorianus
tatgccaatggtgatcagcgaggac

SEQ ID NO: 137011 - DNA, 25 bp, Saccharomyces pastorianus
gtgcctgatttgaacctacttacaa

SEQ ID NO: 137012 - DNA, 25 bp, Saccharomyces pastorianus
tcagcgaggacttcaaatcatgcat

SEQ ID NO: 137013 - DNA, 25 bp, Saccharomyces pastorianus
acgaaaccaagtgctgacggaatta

SEQ ID NO: 137014 - DNA, 25 bp, Saccharomyces pastorianus
tgtcttttgatatctgcggtaacca

SEQ ID NO: 137015 - DNA, 25 bp, Saccharomyces pastorianus
agacaaatgcatcaccactcagaat

SEQ ID NO: 137016 - DNA, 25 bp, Saccharomyces pastorianus
gcggtaaccaatttgttctttgttg

SEQ ID NO: 137017 - DNA, 25 bp, Saccharomyces pastorianus
aattgaccgtgttttatttaagcag

SEQ ID NO: 137018 - DNA, 25 bp, Saccharomyces pastorianus
tcggtctttgacagtgcctgatttg

SEQ ID NO: 137019 - DNA, 25 bp, Saccharomyces pastorianus
aagtcagccgaaaccctatttcaga

SEQ ID NO: 137020 - DNA, 25 bp, Saccharomyces pastorianus
gagaatactaacgaaacgcctatgg

SEQ ID NO: 137021 - DNA, 25 bp, Saccharomyces pastorianus
aattcatactgggagcgcattaggc

SEQ ID NO: 137022 - DNA, 25 bp, Saccharomyces pastorianus
atgtgacctggcaatactatatgac

SEQ ID NO: 137023 - DNA, 25 bp, Saccharomyces pastorianus
aagggaagcctggtgctactttcaa

SEQ ID NO: 137024 - DNA, 25 bp, Saccharomyces pastorianus
tgaagagcacgtatgaccatcattt

SEQ ID NO: 137025 - DNA, 25 bp, Saccharomyces pastorianus
tccaagttcactatttctttgcaag

SEQ ID NO: 137026 - DNA, 25 bp, Saccharomyces pastorianus
aagacgctattccacgttctttttg

SEQ ID NO: 137027 - DNA, 25 bp, Saccharomyces pastorianus
cttactccttcgtgtgaggttcata

SEQ ID NO: 137028 - DNA, 25 bp, Saccharomyces pastorianus
gaatgtatcacctctcaaggagagt

SEQ ID NO: 137029 - DNA, 25 bp, Saccharomyces pastorianus
gacaaatctcaagtttttccaagtt

SEQ ID NO: 137030 - DNA, 25 bp, Saccharomyces pastorianus
attagttcttcagcagcgtgtgaca

SEQ ID NO: 137031 - DNA, 25 bp, Saccharomyces pastorianus
cactctgcctgtgttgaaagacgcc

SEQ ID NO: 137032 - DNA, 25 bp, Saccharomyces pastorianus
gcgtatcgtacctcaagtgcttgat

SEQ ID NO: 137033 - DNA, 25 bp, Saccharomyces pastorianus
gaaagacgccaaagccctgtgtttt

SEQ ID NO: 137034 - DNA, 25 bp, Saccharomyces pastorianus
gataaattaccctcgactagtcagc

SEQ ID NO: 137035 - DNA, 25 bp, Saccharomyces pastorianus
tggtgccttcaagagagctgttcta

SEQ ID NO: 137036 - DNA, 25 bp, Saccharomyces pastorianus
tatcttctcgagtgcaatggtctaa

SEQ ID NO: 137037 - DNA, 25 bp, Saccharomyces pastorianus
acacttgttccttattccctggaga

SEQ ID NO: 137038 - DNA, 25 bp, Saccharomyces pastorianus
gaattgtgccactgacggacgctga

SEQ ID NO: 137039 - DNA, 25 bp, Saccharomyces pastorianus
gtagcggacgaatcactatcttctc

SEQ ID NO: 137040 - DNA, 25 bp, Saccharomyces pastorianus
acgagtccttgattggcagcgatgc

SEQ ID NO: 137041 - DNA, 25 bp, Saccharomyces pastorianus
tagtcagccaaacgtttatcccatg

SEQ ID NO: 137042 - DNA, 25 bp, Saccharomyces pastorianus
aggcctcgaggataatagaaggcaa

SEQ ID NO: 137043 - DNA, 25 bp, Saccharomyces pastorianus
ataaagaggaaaggcctcgaggata

SEQ ID NO: 137044 - DNA, 25 bp, Saccharomyces pastorianus
aagaggaaaggcctcgaggataata

SEQ ID NO: 137045 - DNA, 25 bp, Saccharomyces pastorianus
cctcgaggataatagaaggcaatgc

SEQ ID NO: 137046 - DNA, 25 bp, Saccharomyces pastorianus
ggcctcgaggataatagaaggcaat

SEQ ID NO: 137047 - DNA, 25 bp, Saccharomyces pastorianus
gaaaggcctcgaggataatagaagg

SEQ ID NO: 137048 - DNA, 25 bp, Saccharomyces pastorianus
tataaagaggaaaggcctcgaggat

SEQ ID NO: 137049 - DNA, 25 bp, Saccharomyces pastorianus
aaggcctcgaggataatagaaggca

SEQ ID NO: 137050 - DNA, 25 bp, Saccharomyces pastorianus
agaggaaaggcctcgaggataatag

SEQ ID NO: 137051 - DNA, 25 bp, Saccharomyces pastorianus
aggaaaggcctcgaggataatagaa

SEQ ID NO: 137052 - DNA, 25 bp, Saccharomyces pastorianus
ggaaaggcctcgaggataatagaag

SEQ ID NO: 137053 - DNA, 25 bp, Saccharomyces pastorianus
gacgggctagagatcttgactgctg

SEQ ID NO: 137054 - DNA, 25 bp, Saccharomyces pastorianus
agtacaatcggctctgttcctgaaa

SEQ ID NO: 137055 - DNA, 25 bp, Saccharomyces pastorianus
aagggccaaatccaagctgatcatt

SEQ ID NO: 137056 - DNA, 25 bp, Saccharomyces pastorianus
agcggcgtaccatgcgaagatattg

SEQ ID NO: 137057 - DNA, 25 bp, Saccharomyces pastorianus
ataactgcccggatattatcgaaca

SEQ ID NO: 137058 - DNA, 25 bp, Saccharomyces pastorianus
ggtgccaaacccatcacatcaaagt

SEQ ID NO: 137059 - DNA, 25 bp, Saccharomyces pastorianus
aggaatgttattgagcggcgtacca

SEQ ID NO: 137060 - DNA, 25 bp, Saccharomyces pastorianus
gcaaggatgcactctacaaatacaa

SEQ ID NO: 137061 - DNA, 25 bp, Saccharomyces pastorianus
atttcccgacagatcaaacgctatt

SEQ ID NO: 137062 - DNA, 25 bp, Saccharomyces pastorianus
aaacgctattgatgaggcacgcaaa

SEQ ID NO: 137063 - DNA, 25 bp, Saccharomyces pastorianus
atcgttcgtgaacctgttagaagag

SEQ ID NO: 137064 - DNA, 25 bp, Saccharomyces pastorianus
gaattacgatataccttcagaccca

SEQ ID NO: 137065 - DNA, 25 bp, Saccharomyces pastorianus
tgcaagaatcctcatcgctacagat

SEQ ID NO: 137066 - DNA, 25 bp, Saccharomyces pastorianus
atcccaactgttgagcttgtagtga

SEQ ID NO: 137067 - DNA, 25 bp, Saccharomyces pastorianus
atagatctggtcgtacggcccgtgc

SEQ ID NO: 137068 - DNA, 25 bp, Saccharomyces pastorianus
gagggtagcgtcgttgcactctcaa

SEQ ID NO: 137069 - DNA, 25 bp, Saccharomyces pastorianus
atagatttcgagctaacgctgcaag

SEQ ID NO: 137070 - DNA, 25 bp, Saccharomyces pastorianus
caaggtacacgataccgctgtaata

SEQ ID NO: 137071 - DNA, 25 bp, Saccharomyces pastorianus
atgaccgcggagatccttagaagaa

SEQ ID NO: 137072 - DNA, 25 bp, Saccharomyces pastorianus
tacaggccattgaggaccgtatcaa

SEQ ID NO: 137073 - DNA, 25 bp, Saccharomyces pastorianus
attggtgacgccatatcattcgtta

SEQ ID NO: 137074 - DNA, 25 bp, Saccharomyces pastorianus
gttacccagcgagatgtttctagga

SEQ ID NO: 137075 - DNA, 25 bp, Saccharomyces pastorianus
taagagctatgaaaattactcagcc

SEQ ID NO: 137076 - DNA, 25 bp, Saccharomyces pastorianus
tcaaaatggcttacggaatccttaa

SEQ ID NO: 137077 - DNA, 25 bp, Saccharomyces pastorianus
taggtctttcaaaatggcttacgga

SEQ ID NO: 137078 - DNA, 25 bp, Saccharomyces pastorianus
aatctttaggtctttcaaaatggct

SEQ ID NO: 137079 - DNA, 25 bp, Saccharomyces pastorianus
ggcttacggaatccttaagagctat

SEQ ID NO: 137080 - DNA, 25 bp, Saccharomyces pastorianus
gcttgtattcccaaaatcttagaag

SEQ ID NO: 137081 - DNA, 25 bp, Saccharomyces pastorianus
tacggaatccttaagagctatgaaa

SEQ ID NO: 137082 - DNA, 25 bp, Saccharomyces pastorianus
atggcagactttaaatctttaggtc

SEQ ID NO: 137083 - DNA, 25 bp, Saccharomyces pastorianus
aaggcttgtattcccaaaatcttag

SEQ ID NO: 137084 - DNA, 25 bp, Saccharomyces pastorianus
ggtctttcaaaatggcttacggaat

SEQ ID NO: 137085 - DNA, 25 bp, Saccharomyces pastorianus
aatggcttacggaatccttaagagc

SEQ ID NO: 137086 - DNA, 25 bp, Saccharomyces pastorianus
attggtggtgccaagactggttctg

SEQ ID NO: 137087 - DNA, 25 bp, Saccharomyces pastorianus
taagagctatgaaaattactcagcc

SEQ ID NO: 137088 - DNA, 25 bp, Saccharomyces pastorianus
tcaaaatggcttacggaatccttaa

SEQ ID NO: 137089 - DNA, 25 bp, Saccharomyces pastorianus
taggtctttcaaaatggcttacgga

SEQ ID NO: 137090 - DNA, 25 bp, Saccharomyces pastorianus
gaaaattactcagccaaccgctatc

SEQ ID NO: 137091 - DNA, 25 bp, Saccharomyces pastorianus
aatctttaggtctttcaaaatggct

SEQ ID NO: 137092 - DNA, 25 bp, Saccharomyces pastorianus
ggcttacggaatccttaagagctat

SEQ ID NO: 137093 - DNA, 25 bp, Saccharomyces pastorianus
gcttgtattcccaaaatcttagaag

SEQ ID NO: 137094 - DNA, 25 bp, Saccharomyces pastorianus
tacggaatccttaagagctatgaaa

SEQ ID NO: 137095 - DNA, 25 bp, Saccharomyces pastorianus
atggcagactttaaatctttaggtc

SEQ ID NO: 137096 - DNA, 25 bp, Saccharomyces pastorianus
aaggcttgtattcccaaaatcttag

SEQ ID NO: 137097 - DNA, 25 bp, Saccharomyces pastorianus
aacaactgggctgttatttttgcca

SEQ ID NO: 137098 - DNA, 25 bp, Saccharomyces pastorianus
agacccggcgttgctatgatggcct

SEQ ID NO: 137099 - DNA, 25 bp, Saccharomyces pastorianus
tgcccagcatgtagccctaaagtta

SEQ ID NO: 137100 - DNA, 25 bp, Saccharomyces pastorianus
tgtgcacagtaactagacccggcgt

SEQ ID NO: 137101 - DNA, 25 bp, Saccharomyces pastorianus
tgtggtagcaccaactgacagttta

SEQ ID NO: 137102 - DNA, 25 bp, Saccharomyces pastorianus
ggagcatccactttaccttgaagaa

SEQ ID NO: 137103 - DNA, 25 bp, Saccharomyces pastorianus
gaaactccagcctatgagcattgcc

SEQ ID NO: 137104 - DNA, 25 bp, Saccharomyces pastorianus
gatggcctcttctttagcagttgaa

SEQ ID NO: 137105 - DNA, 25 bp, Saccharomyces pastorianus
aaaccgttattaatgctgctctggg

SEQ ID NO: 137106 - DNA, 25 bp, Saccharomyces pastorianus
gatgacttccttactacagaccaaa

SEQ ID NO: 137107 - DNA, 25 bp, Saccharomyces pastorianus
gatggcttccgtcgttattgagcaa

SEQ ID NO: 137108 - DNA, 25 bp, Saccharomyces pastorianus
atgggtgtgtatactggatgcagac

SEQ ID NO: 137109 - DNA, 25 bp, Saccharomyces pastorianus
gagattgaaactcgatgttctgaaa

SEQ ID NO: 137110 - DNA, 25 bp, Saccharomyces pastorianus
agttttacatgtgcggccagagccg

SEQ ID NO: 137111 - DNA, 25 bp, Saccharomyces pastorianus
tgccaaccacttactgtgaatctag

SEQ ID NO: 137112 - DNA, 25 bp, Saccharomyces pastorianus
tagattcaacatgccaaccacttac

SEQ ID NO: 137113 - DNA, 25 bp, Saccharomyces pastorianus
aagaccctcttcaacagttttacat

SEQ ID NO: 137114 - DNA, 25 bp, Saccharomyces pastorianus
agcgtactaacgaagtgcctttaca

SEQ ID NO: 137115 - DNA, 25 bp, Saccharomyces pastorianus
ttacacaacattcctaaatctgctg

SEQ ID NO: 137116 - DNA, 25 bp, Saccharomyces pastorianus
aagggctgttctcaaagtgtcaaaa

SEQ ID NO: 137117 - DNA, 25 bp, Saccharomyces pastorianus
aagggtcttaaattatgcaccagct

SEQ ID NO: 137118 - DNA, 25 bp, Saccharomyces pastorianus
aaatctgctgatcaagttccattat

SEQ ID NO: 137119 - DNA, 25 bp, Saccharomyces pastorianus
gtctgacttgattccactacagtta

SEQ ID NO: 137120 - DNA, 25 bp, Saccharomyces pastorianus
gaaagggttctttactctatagtgc

SEQ ID NO: 137121 - DNA, 25 bp, Saccharomyces pastorianus
agaggctattcgcacactgtgaaga

SEQ ID NO: 137122 - DNA, 25 bp, Saccharomyces pastorianus
cttgccgttgccatccaaaatgaac

SEQ ID NO: 137123 - DNA, 25 bp, Saccharomyces pastorianus
tacagaaatcctactcttgccgttg

SEQ ID NO: 137124 - DNA, 25 bp, Saccharomyces pastorianus
aactggaccccgtactatatgagaa

SEQ ID NO: 137125 - DNA, 25 bp, Saccharomyces pastorianus
gatagttcaagtgtcgacgctgcgg

SEQ ID NO: 137126 - DNA, 25 bp, Saccharomyces pastorianus
gatgccgccctggaattaattcaga

SEQ ID NO: 137127 - DNA, 25 bp, Saccharomyces pastorianus
ttggttaccaagaagatgccgccct

SEQ ID NO: 137128 - DNA, 25 bp, Saccharomyces pastorianus
caacgcgtccagcatttttcggaag

SEQ ID NO: 137129 - DNA, 25 bp, Saccharomyces pastorianus
gggccacgagagtgctgcatgctaa

SEQ ID NO: 137130 - DNA, 25 bp, Saccharomyces pastorianus
aaatggtctgacacaagctttggga

SEQ ID NO: 137131 - DNA, 25 bp, Saccharomyces pastorianus
aaggcgtgtacaagaggcattagtt

SEQ ID NO: 137132 - DNA, 25 bp, Saccharomyces pastorianus
gattatgaacctagtgacccagaga

SEQ ID NO: 137133 - DNA, 25 bp, Saccharomyces pastorianus
aaggacgaaccagtcttcacaagaa

SEQ ID NO: 137134 - DNA, 25 bp, Saccharomyces pastorianus
gattgccaagaaaatggatccatca

SEQ ID NO: 137135 - DNA, 25 bp, Saccharomyces pastorianus
gacccagagacaccgatagaattta

SEQ ID NO: 137136 - DNA, 25 bp, Saccharomyces pastorianus
tatcagcccctgatcaaaggcgtgt

SEQ ID NO: 137137 - DNA, 25 bp, Saccharomyces pastorianus
gattggacttgaaggaacatacatc

SEQ ID NO: 137138 - DNA, 25 bp, Saccharomyces pastorianus
gaaagcagcttgcacttacgattaa

SEQ ID NO: 137139 - DNA, 25 bp, Saccharomyces pastorianus
caaacaaatggagttgctgtacaat

SEQ ID NO: 137140 - DNA, 25 bp, Saccharomyces pastorianus
cacaagctttgggatggttttgcaa

SEQ ID NO: 137141 - DNA, 25 bp, Saccharomyces pastorianus
atgtatcaattagtggatgccagtt

SEQ ID NO: 137142 - DNA, 25 bp, Saccharomyces pastorianus
ttgcatatggcaaagtccacgaaag

SEQ ID NO: 137143 - DNA, 25 bp, Saccharomyces pastorianus
actaccctagtgaggtgtatgctga

SEQ ID NO: 137144 - DNA, 25 bp, Saccharomyces pastorianus
ggtatcacacttcatgaattttgca

SEQ ID NO: 137145 - DNA, 25 bp, Saccharomyces pastorianus
gcgtgcggtgtgtagatgtatcaat

SEQ ID NO: 137146 - DNA, 25 bp, Saccharomyces pastorianus
gcttcagaaaaaaggcgtgcggtgt

SEQ ID NO: 137147 - DNA, 25 bp, Saccharomyces pastorianus
agtccacgaaagtgggcttcagaaa

SEQ ID NO: 137148 - DNA, 25 bp, Saccharomyces pastorianus
gatgccagttttggaacgggattcc

SEQ ID NO: 137149 - DNA, 25 bp, Saccharomyces pastorianus
tacaaccaaagatactaccctagtg

SEQ ID NO: 137150 - DNA, 25 bp, Saccharomyces pastorianus
gtatgctgacttggtatcacacttc

SEQ ID NO: 137151 - DNA, 25 bp, Saccharomyces pastorianus
tgaaccacgatgaaccaaatgatca

SEQ ID NO: 137152 - DNA, 25 bp, Saccharomyces pastorianus
gacatctggagatcttttgaattct

SEQ ID NO: 137153 - DNA, 25 bp, Saccharomyces pastorianus
tcatagaatgatgattgcggccacc

SEQ ID NO: 137154 - DNA, 25 bp, Saccharomyces pastorianus
gatgcatttttatcttcgatggctt

SEQ ID NO: 137155 - DNA, 25 bp, Saccharomyces pastorianus
ggaatcccaaagtcactgtcctact

SEQ ID NO: 137156 - DNA, 25 bp, Saccharomyces pastorianus
ggccaccaattctcacgattctatt

SEQ ID NO: 137157 - DNA, 25 bp, Saccharomyces pastorianus
tactcttccacttctgatgcatttt

SEQ ID NO: 137158 - DNA, 25 bp, Saccharomyces pastorianus
atttttatcttcgatggctttccat

SEQ ID NO: 137159 - DNA, 25 bp, Saccharomyces pastorianus
tggcgtaacaagtacattagccgct

SEQ ID NO: 137160 - DNA, 25 bp, Saccharomyces pastorianus
acattagccgctacgggaatcccaa

SEQ ID NO: 137161 - DNA, 25 bp, Saccharomyces pastorianus
gcatgctccgataattgcgacaggg

SEQ ID NO: 137162 - DNA, 25 bp, Saccharomyces pastorianus
gatatggacgacatctggagatctt

SEQ ID NO: 137163 - DNA, 25 bp, Saccharomyces pastorianus
ctttaaaattgtatccgcctggaga

SEQ ID NO: 137164 - DNA, 25 bp, Saccharomyces pastorianus
gtggacattcctgcaaaaacatcat

SEQ ID NO: 137165 - DNA, 25 bp, Saccharomyces pastorianus
gagagtatatgatcgccgtctcgat

SEQ ID NO: 137166 - DNA, 25 bp, Saccharomyces pastorianus
gagactaccaagatgtcgacacctt

SEQ ID NO: 137167 - DNA, 25 bp, Saccharomyces pastorianus
gactccgcccttttattgacaggtt

SEQ ID NO: 137168 - DNA, 25 bp, Saccharomyces pastorianus
aggttatccgtgtctgggatgcgca

SEQ ID NO: 137169 - DNA, 25 bp, Saccharomyces pastorianus
gacaggttcttcagacggtgttatc

SEQ ID NO: 137170 - DNA, 25 bp, Saccharomyces pastorianus
gaagtttgcccagtttgaagatcag

SEQ ID NO: 137171 - DNA, 25 bp, Saccharomyces pastorianus
attacatccttgacggctgatcagc

SEQ ID NO: 137172 - DNA, 25 bp, Saccharomyces pastorianus
gaggcttgaccgatatgttattgac

SEQ ID NO: 137173 - DNA, 25 bp, Saccharomyces pastorianus
gtttgcagatggctccctgagagta

SEQ ID NO: 137174 - DNA, 25 bp, Saccharomyces pastorianus
caatcgagatttgcagtggccaatt

SEQ ID NO: 137175 - DNA, 25 bp, Saccharomyces pastorianus
attgccatcctgtatctgatccaga

SEQ ID NO: 137176 - DNA, 25 bp, Saccharomyces pastorianus
aatgccgtggtacaattgccatcct

SEQ ID NO: 137177 - DNA, 25 bp, Saccharomyces pastorianus
gcagctctaagtcgaatgcccaaga

SEQ ID NO: 137178 - DNA, 25 bp, Saccharomyces pastorianus
atctatatctttgcaagctcacagc

SEQ ID NO: 137179 - DNA, 25 bp, Saccharomyces pastorianus
atacccaacgtcaatatccctggaa

SEQ ID NO: 137180 - DNA, 25 bp, Saccharomyces pastorianus
ttgatctgaaaaatgctcctcccgc

SEQ ID NO: 137181 - DNA, 25 bp, Saccharomyces pastorianus
gtctctagtaaataaccctgctctc

SEQ ID NO: 137182 - DNA, 25 bp, Saccharomyces pastorianus
taacggacacaattgcatggacatc

SEQ ID NO: 137183 - DNA, 25 bp, Saccharomyces pastorianus
atgattgctacgcttttcagaaatt

SEQ ID NO: 137184 - DNA, 25 bp, Saccharomyces pastorianus
tcccgctactgccttagagagtcag

SEQ ID NO: 137185 - DNA, 25 bp, Saccharomyces pastorianus
catgggactcatattcggtatgcta

SEQ ID NO: 137186 - DNA, 25 bp, Saccharomyces pastorianus
agctcttctgcaatttgccgagtat

SEQ ID NO: 137187 - DNA, 25 bp, Saccharomyces pastorianus
gagtatccaccagatgcaaaccatg

SEQ ID NO: 137188 - DNA, 25 bp, Saccharomyces pastorianus
gagtcctcatcgtctctttatgaaa

SEQ ID NO: 137189 - DNA, 25 bp, Saccharomyces pastorianus
gaggccgataagattacgttgcaat

SEQ ID NO: 137190 - DNA, 25 bp, Saccharomyces pastorianus
aatcgatgcagctgtaatcaccgtg

SEQ ID NO: 137191 - DNA, 25 bp, Saccharomyces pastorianus
agaacctctactctattgttatccc

SEQ ID NO: 137192 - DNA, 25 bp, Saccharomyces pastorianus
aatggtcaccgtcgaagaggccgat

SEQ ID NO: 137193 - DNA, 25 bp, Saccharomyces pastorianus
taacgtcatcattctaacatctaca

SEQ ID NO: 137194 - DNA, 25 bp, Saccharomyces pastorianus
ttgttatccctgtctacaccggatt

SEQ ID NO: 137195 - DNA, 25 bp, Saccharomyces pastorianus
aatcaccgtgctatctttggagtcc

SEQ ID NO: 137196 - DNA, 25 bp, Saccharomyces pastorianus
ctctccgcaattgcaagaagacgat

SEQ ID NO: 137197 - DNA, 25 bp, Saccharomyces pastorianus
taaatactatttacaagcggccgat

SEQ ID NO: 137198 - DNA, 25 bp, Saccharomyces pastorianus
ttctactacctctccgcaattgcaa

SEQ ID NO: 137199 - DNA, 25 bp, Saccharomyces pastorianus
taacttctactacctctccgcaatt

SEQ ID NO: 137200 - DNA, 25 bp, Saccharomyces pastorianus
aaatactatttacaagcggccgata

SEQ ID NO: 137201 - DNA, 25 bp, Saccharomyces pastorianus
tacctctccgcaattgcaagaagac

SEQ ID NO: 137202 - DNA, 25 bp, Saccharomyces pastorianus
gcaagaagacgatatcatcttagat

SEQ ID NO: 137203 - DNA, 25 bp, Saccharomyces pastorianus
gaagacgatatcatcttagataaat

SEQ ID NO: 137204 - DNA, 25 bp, Saccharomyces pastorianus
tactatttacaagcggccgatagaa

SEQ ID NO: 137205 - DNA, 25 bp, Saccharomyces pastorianus
aaataacttctactacctctccgca

SEQ ID NO: 137206 - DNA, 25 bp, Saccharomyces pastorianus
actacctctccgcaattgcaagaag

SEQ ID NO: 137207 - DNA, 25 bp, Saccharomyces pastorianus
agagagtctacatcttcacataaga

SEQ ID NO: 137208 - DNA, 25 bp, Saccharomyces pastorianus
tgaacccaaacacgaagtcccaaag

SEQ ID NO: 137209 - DNA, 25 bp, Saccharomyces pastorianus
actggcctggagactttaaaagcgt

SEQ ID NO: 137210 - DNA, 25 bp, Saccharomyces pastorianus
gaagtcccaaaggtcgtcgatgata

SEQ ID NO: 137211 - DNA, 25 bp, Saccharomyces pastorianus
ggttgaaacgaacgaatcatcctca

SEQ ID NO: 137212 - DNA, 25 bp, Saccharomyces pastorianus
gccaatactggcctggagactttaa

SEQ ID NO: 137213 - DNA, 25 bp, Saccharomyces pastorianus
gaaaatgttacaatccctgaaccca

SEQ ID NO: 137214 - DNA, 25 bp, Saccharomyces pastorianus
ggagtttgaaattcccgctatcgaa

SEQ ID NO: 137215 - DNA, 25 bp, Saccharomyces pastorianus
aaacaaccgtggataatggcgaaga

SEQ ID NO: 137216 - DNA, 25 bp, Saccharomyces pastorianus
ggtcgtcgatgatactgccatattc

SEQ ID NO: 137217 - DNA, 25 bp, Saccharomyces pastorianus
gaatcatcctcaaacgccaatactg

SEQ ID NO: 137218 - DNA, 25 bp, Saccharomyces pastorianus
taatctcctgcgttgcgaggttctt

SEQ ID NO: 137219 - DNA, 25 bp, Saccharomyces pastorianus
attggattttgccttcaactccaca

SEQ ID NO: 137220 - DNA, 25 bp, Saccharomyces pastorianus
agtgccgaaggtgcattttctgata

SEQ ID NO: 137221 - DNA, 25 bp, Saccharomyces pastorianus
gaaagctttgttaatctcctgcgtt

SEQ ID NO: 137222 - DNA, 25 bp, Saccharomyces pastorianus
gccttcaactccacatattcaaatt

SEQ ID NO: 137223 - DNA, 25 bp, Saccharomyces pastorianus
gcgaggttcttcacccaggtagtga

SEQ ID NO: 137224 - DNA, 25 bp, Saccharomyces pastorianus
gtggcgttgttcttatctcatgata

SEQ ID NO: 137225 - DNA, 25 bp, Saccharomyces pastorianus
gattttgtctcatttaggccaccaa

SEQ ID NO: 137226 - DNA, 25 bp, Saccharomyces pastorianus
gatatttatacgcacccagagctat

SEQ ID NO: 137227 - DNA, 25 bp, Saccharomyces pastorianus
aacataatcagcgtcatatcccaat

SEQ ID NO: 137228 - DNA, 25 bp, Saccharomyces pastorianus
atttgagtttgctactgttttcaga

SEQ ID NO: 137229 - DNA, 25 bp, Saccharomyces pastorianus
gtagcccaataagtgattctcgaga

SEQ ID NO: 137230 - DNA, 25 bp, Saccharomyces pastorianus
tcatttgcttactgtgacgcctggc

SEQ ID NO: 137231 - DNA, 25 bp, Saccharomyces pastorianus
tgtggcatttgtgtgtagcccaata

SEQ ID NO: 137232 - DNA, 25 bp, Saccharomyces pastorianus
aatggccttgcgtctgtctatggaa

SEQ ID NO: 137233 - DNA, 25 bp, Saccharomyces pastorianus
ttctcgaagaaggatcctccggtat

SEQ ID NO: 137234 - DNA, 25 bp, Saccharomyces pastorianus
gttgccgtggacatcatcaattttg

SEQ ID NO: 137235 - DNA, 25 bp, Saccharomyces pastorianus
gcatcttcacccataattctcgaag

SEQ ID NO: 137236 - DNA, 25 bp, Saccharomyces pastorianus
ggtctggcggtgattccgatgccaa

SEQ ID NO: 137237 - DNA, 25 bp, Saccharomyces pastorianus
ttgcagatcgctcagctgactttga

SEQ ID NO: 137238 - DNA, 25 bp, Saccharomyces pastorianus
acacggagcttttggatgagttcat

SEQ ID NO: 137239 - DNA, 25 bp, Saccharomyces pastorianus
atagctgcagtgaacaaccctcaag

SEQ ID NO: 137240 - DNA, 25 bp, Saccharomyces pastorianus
gcaatcctgagaatacagtgggtct

SEQ ID NO: 137241 - DNA, 25 bp, Saccharomyces pastorianus
tggcgactttcctaggacaaggttt

SEQ ID NO: 137242 - DNA, 25 bp, Saccharomyces pastorianus
gaagcccagatcgactcggtagagt

SEQ ID NO: 137243 - DNA, 25 bp, Saccharomyces pastorianus
gtcttatctctggtgctggcgccaa

SEQ ID NO: 137244 - DNA, 25 bp, Saccharomyces pastorianus
gacaaggtttgaagcccagatcgac

SEQ ID NO: 137245 - DNA, 25 bp, Saccharomyces pastorianus
ctacagtgttagtgattgataattc

SEQ ID NO: 137246 - DNA, 25 bp, Saccharomyces pastorianus
ggtagagttcatatttcaagccaag

SEQ ID NO: 137247 - DNA, 25 bp, Saccharomyces pastorianus
aagccaagagaaacagcaatcctga

SEQ ID NO: 137248 - DNA, 25 bp, Saccharomyces pastorianus
tacagtgggtcttatctctggtgct

SEQ ID NO: 137249 - DNA, 25 bp, Saccharomyces pastorianus
tggcgccaaccccagggtgtatcta

SEQ ID NO: 137250 - DNA, 25 bp, Saccharomyces pastorianus
tcgcaatggcgactttcctaggaca

SEQ ID NO: 137251 - DNA, 25 bp, Saccharomyces pastorianus
gatttcatcaagttcgatgccggta

SEQ ID NO: 137252 - DNA, 25 bp, Saccharomyces pastorianus
tcgatgccggtaagttggtttacgt

SEQ ID NO: 137253 - DNA, 25 bp, Saccharomyces pastorianus
atcaagttcgatgccggtaagttgg

SEQ ID NO: 137254 - DNA, 25 bp, Saccharomyces pastorianus
ctgtccaccgtatcaccgatgaaga

SEQ ID NO: 137255 - DNA, 25 bp, Saccharomyces pastorianus
gtcaagggtagattcgctgtccacc

SEQ ID NO: 137256 - DNA, 25 bp, Saccharomyces pastorianus
caagggtagattcgctgtccaccgt

SEQ ID NO: 137257 - DNA, 25 bp, Saccharomyces pastorianus
agggtagattcgctgtccaccgtat

SEQ ID NO: 137258 - DNA, 25 bp, Saccharomyces pastorianus
gtagattcgctgtccaccgtatcac

SEQ ID NO: 137259 - DNA, 25 bp, Saccharomyces pastorianus
gatgtcaagggtagattcgctgtcc

SEQ ID NO: 137260 - DNA, 25 bp, Saccharomyces pastorianus
gattactgatttcatcaagttcgat

SEQ ID NO: 137261 - DNA, 25 bp, Saccharomyces pastorianus
ggcctctggtaagattactgatttc

SEQ ID NO: 137262 - DNA, 25 bp, Saccharomyces pastorianus
gcagatggacttcgacggcgaccaa

SEQ ID NO: 137263 - DNA, 25 bp, Saccharomyces pastorianus
aaacctcacctagtctcggagacgg

SEQ ID NO: 137264 - DNA, 25 bp, Saccharomyces pastorianus
agcaaagtttgctggtttcaccttt

SEQ ID NO: 137265 - DNA, 25 bp, Saccharomyces pastorianus
tttcacctttgttgatgagtccgcc

SEQ ID NO: 137266 - DNA, 25 bp, Saccharomyces pastorianus
aaattccccagagacgtactgtcac

SEQ ID NO: 137267 - DNA, 25 bp, Saccharomyces pastorianus
atatcgactgggaggccttgaagca

SEQ ID NO: 137268 - DNA, 25 bp, Saccharomyces pastorianus
gaacaagcaccagccgatgatgact

SEQ ID NO: 137269 - DNA, 25 bp, Saccharomyces pastorianus
ggatacctccaattttgacccagag

SEQ ID NO: 137270 - DNA, 25 bp, Saccharomyces pastorianus
gagctcatccatttttcgcagatat

SEQ ID NO: 137271 - DNA, 25 bp, Saccharomyces pastorianus
tactttatggaacctggctccttta

SEQ ID NO: 137272 - DNA, 25 bp, Saccharomyces pastorianus
gacccagagttcacaacagcttcaa

SEQ ID NO: 137273 - DNA, 25 bp, Saccharomyces pastorianus
ctttgatagacttcgtatgtggagt

SEQ ID NO: 137274 - DNA, 25 bp, Saccharomyces pastorianus
ctgttttatggcgcttatgtgtatt

SEQ ID NO: 137275 - DNA, 25 bp, Saccharomyces pastorianus
ttatggcgcttatgtgtattcgtat

SEQ ID NO: 137276 - DNA, 25 bp, Saccharomyces pastorianus
tactgttttatggcgcttatgtgta

SEQ ID NO: 137277 - DNA, 25 bp, Saccharomyces pastorianus
actgttttatggcgcttatgtgtat

SEQ ID NO: 137278 - DNA, 25 bp, Saccharomyces pastorianus
gtactgttttatggcgcttatgtgt

SEQ ID NO: 137279 - DNA, 25 bp, Saccharomyces pastorianus
aagatgttcttgtttctgaacgaat

SEQ ID NO: 137280 - DNA, 25 bp, Saccharomyces pastorianus
atcatacatctttgatagacttcgt

SEQ ID NO: 137281 - DNA, 25 bp, Saccharomyces pastorianus
gaatcatacatctttgatagacttc

SEQ ID NO: 137282 - DNA, 25 bp, Saccharomyces pastorianus
atacatctttgatagacttcgtatg

SEQ ID NO: 137283 - DNA, 25 bp, Saccharomyces pastorianus
atctttgatagacttcgtatgtgga

SEQ ID NO: 137284 - DNA, 25 bp, Saccharomyces pastorianus
aatactctataaacaccggcgctta

SEQ ID NO: 137285 - DNA, 25 bp, Saccharomyces pastorianus
gtttcaacgcgcgaaggcaggtaca

SEQ ID NO: 137286 - DNA, 25 bp, Saccharomyces pastorianus
tgcacatttagcaccacatccttgt

SEQ ID NO: 137287 - DNA, 25 bp, Saccharomyces pastorianus
aggcattcagggaaaaatactctat

SEQ ID NO: 137288 - DNA, 25 bp, Saccharomyces pastorianus
atcaccaagtctgcgtttcaacgcg

SEQ ID NO: 137289 - DNA, 25 bp, Saccharomyces pastorianus
caccacatccttgtccgggaaaaga

SEQ ID NO: 137290 - DNA, 25 bp, Saccharomyces pastorianus
aaaaaggtgccacttactcttcgct

SEQ ID NO: 137291 - DNA, 25 bp, Saccharomyces pastorianus
gaaattggatgcacatttagcacca

SEQ ID NO: 137292 - DNA, 25 bp, Saccharomyces pastorianus
ttcgctgcttcatgatcagctttca

SEQ ID NO: 137293 - DNA, 25 bp, Saccharomyces pastorianus
acaattcttctcgttattttctttg

SEQ ID NO: 137294 - DNA, 25 bp, Saccharomyces pastorianus
tttttgttacaattcttctcgttat

SEQ ID NO: 137295 - DNA, 25 bp, Saccharomyces pastorianus
tgaggattctgatctgggcggtaat

SEQ ID NO: 137296 - DNA, 25 bp, Saccharomyces pastorianus
aggctcaactattgacaagtctgaa

SEQ ID NO: 137297 - DNA, 25 bp, Saccharomyces pastorianus
gatgaagacagcaaccaaccgggag

SEQ ID NO: 137298 - DNA, 25 bp, Saccharomyces pastorianus
aagcatcatgtgatcgttttgacac

SEQ ID NO: 137299 - DNA, 25 bp, Saccharomyces pastorianus
gatactctgtcttttccgaaacact

SEQ ID NO: 137300 - DNA, 25 bp, Saccharomyces pastorianus
cacgctgtgactttattaaatctag

SEQ ID NO: 137301 - DNA, 25 bp, Saccharomyces pastorianus
tatcaatgtagcttatccaggtttc

SEQ ID NO: 137302 - DNA, 25 bp, Saccharomyces pastorianus
gtcttttccgaaacactgagtacat

SEQ ID NO: 137303 - DNA, 25 bp, Saccharomyces pastorianus
ccgggagctgctgaagtgttaatat

SEQ ID NO: 137304 - DNA, 25 bp, Saccharomyces pastorianus
gtcgatacgagatacttaagcatca

SEQ ID NO: 137305 - DNA, 25 bp, Saccharomyces pastorianus
aatgatgcttcgatactctgtcttt

SEQ ID NO: 137306 - DNA, 25 bp, Saccharomyces pastorianus
caatgcagaagaattcaccccaagg

SEQ ID NO: 137307 - DNA, 25 bp, Saccharomyces pastorianus
aatgcagaagaattcaccccaaggt

SEQ ID NO: 137308 - DNA, 25 bp, Saccharomyces pastorianus
gtccaatgcagaagaattcacccca

SEQ ID NO: 137309 - DNA, 25 bp, Saccharomyces pastorianus
ttcctactcattccactgtccaatg

SEQ ID NO: 137310 - DNA, 25 bp, Saccharomyces pastorianus
gcagaagaattcaccccaaggttac

SEQ ID NO: 137311 - DNA, 25 bp, Saccharomyces pastorianus
atgcagaagaattcaccccaaggtt

SEQ ID NO: 137312 - DNA, 25 bp, Saccharomyces pastorianus
tattcctactcattccactgtccaa

SEQ ID NO: 137313 - DNA, 25 bp, Saccharomyces pastorianus
tactcattccactgtccaatgcaga

SEQ ID NO: 137314 - DNA, 25 bp, Saccharomyces pastorianus
tccaatgcagaagaattcaccccaa

SEQ ID NO: 137315 - DNA, 25 bp, Saccharomyces pastorianus
gtattcctactcattccactgtcca

SEQ ID NO: 137316 - DNA, 25 bp, Saccharomyces pastorianus
tgcagaagaattcaccccaaggtta

SEQ ID NO: 137317 - DNA, 25 bp, Saccharomyces pastorianus
tactctatatgtgtaccaaggacag

SEQ ID NO: 137318 - DNA, 25 bp, Saccharomyces pastorianus
gaggtttttggaagcaattgccctt

SEQ ID NO: 137319 - DNA, 25 bp, Saccharomyces pastorianus
cgaggatgtcgaagttagaaataac

SEQ ID NO: 137320 - DNA, 25 bp, Saccharomyces pastorianus
gtctttcagggagggaattaacgct

SEQ ID NO: 137321 - DNA, 25 bp, Saccharomyces pastorianus
gacaggaactgggtgaaatcaattt

SEQ ID NO: 137322 - DNA, 25 bp, Saccharomyces pastorianus
atatgtgtaccaaggacaggaactg

SEQ ID NO: 137323 - DNA, 25 bp, Saccharomyces pastorianus
gaaataactatgatgcgatcaagga

SEQ ID NO: 137324 - DNA, 25 bp, Saccharomyces pastorianus
aagaactggcctatcgaaaaatacg

SEQ ID NO: 137325 - DNA, 25 bp, Saccharomyces pastorianus
agcaattgcccttatttccagagac

SEQ ID NO: 137326 - DNA, 25 bp, Saccharomyces pastorianus
tgtcactgagcggtactctatatgt

SEQ ID NO: 137327 - DNA, 25 bp, Saccharomyces pastorianus
gaagcaattgcccttatttccagag

SEQ ID NO: 137328 - DNA, 25 bp, Saccharomyces pastorianus
acttcagctctgattcgatcgactt

SEQ ID NO: 137329 - DNA, 25 bp, Saccharomyces pastorianus
aagaagtgaagttgatgcgtcttcc

SEQ ID NO: 137330 - DNA, 25 bp, Saccharomyces pastorianus
aacgctgaagacgaatccaaggacc

SEQ ID NO: 137331 - DNA, 25 bp, Saccharomyces pastorianus
ctcatcgtttaagttggaattcgga

SEQ ID NO: 137332 - DNA, 25 bp, Saccharomyces pastorianus
gaagacgaatccaaggaccccaact

SEQ ID NO: 137333 - DNA, 25 bp, Saccharomyces pastorianus
gattcgatcgacttcacgattccaa

SEQ ID NO: 137334 - DNA, 25 bp, Saccharomyces pastorianus
tcgacttcacgattccaaacaatag

SEQ ID NO: 137335 - DNA, 25 bp, Saccharomyces pastorianus
tggaattcggaaactacccaagaag

SEQ ID NO: 137336 - DNA, 25 bp, Saccharomyces pastorianus
gattccaaacaatagctcatcgttt

SEQ ID NO: 137337 - DNA, 25 bp, Saccharomyces pastorianus
ctgctttgaacttcagctctgattc

SEQ ID NO: 137338 - DNA, 25 bp, Saccharomyces pastorianus
gaaactgttcagcttcacaaagaaa

SEQ ID NO: 137339 - DNA, 25 bp, Saccharomyces pastorianus
agcagatcctcaaaaaccaatccaa

SEQ ID NO: 137340 - DNA, 25 bp, Saccharomyces pastorianus
tgaacggaccacgtatccatgagtt

SEQ ID NO: 137341 - DNA, 25 bp, Saccharomyces pastorianus
gctcctgtgattgacgaaaactcaa

SEQ ID NO: 137342 - DNA, 25 bp, Saccharomyces pastorianus
gaccacgtatccatgagtttcatca

SEQ ID NO: 137343 - DNA, 25 bp, Saccharomyces pastorianus
cttgtactccaaggttgctggtcta

SEQ ID NO: 137344 - DNA, 25 bp, Saccharomyces pastorianus
tgatgtgggaagcttgtactccaag

SEQ ID NO: 137345 - DNA, 25 bp, Saccharomyces pastorianus
ctccaaacaattggaggtcttactt

SEQ ID NO: 137346 - DNA, 25 bp, Saccharomyces pastorianus
gtatccatgagtttcatcaagaaat

SEQ ID NO: 137347 - DNA, 25 bp, Saccharomyces pastorianus
gaaaactcaaagtggcaacccagtg

SEQ ID NO: 137348 - DNA, 25 bp, Saccharomyces pastorianus
aaggttgctggtctaccggatgctc

SEQ ID NO: 137349 - DNA, 25 bp, Saccharomyces pastorianus
caaaaaccaatccaaaacgtgactg

SEQ ID NO: 137350 - DNA, 25 bp, Saccharomyces pastorianus
gcttgctgtattttctagctctggg

SEQ ID NO: 137351 - DNA, 25 bp, Saccharomyces pastorianus
tgaaaagacacctttgattcgtcaa

SEQ ID NO: 137352 - DNA, 25 bp, Saccharomyces pastorianus
agggttctgggaagcttgctgtatt

SEQ ID NO: 137353 - DNA, 25 bp, Saccharomyces pastorianus
tcaaatcgagaggaatcgggcattt

SEQ ID NO: 137354 - DNA, 25 bp, Saccharomyces pastorianus
gcagcagcaactgcctgcagatcga

SEQ ID NO: 137355 - DNA, 25 bp, Saccharomyces pastorianus
aagtcattatccatggtgatcattg

SEQ ID NO: 137356 - DNA, 25 bp, Saccharomyces pastorianus
caaccaggtggaagtttcaaatcga

SEQ ID NO: 137357 - DNA, 25 bp, Saccharomyces pastorianus
cttaattgcagtgtagtggttccta

SEQ ID NO: 137358 - DNA, 25 bp, Saccharomyces pastorianus
aagtgcaggagccaaagtcattatc

SEQ ID NO: 137359 - DNA, 25 bp, Saccharomyces pastorianus
gcctgcagatcgatggcacttaatt

SEQ ID NO: 137360 - DNA, 25 bp, Saccharomyces pastorianus
cgtggttttacgttaagcatgagat

SEQ ID NO: 137361 - DNA, 25 bp, Saccharomyces pastorianus
tgacacaaacccctggatcaagtat

SEQ ID NO: 137362 - DNA, 25 bp, Saccharomyces pastorianus
agttggttcctatttatctctgata

SEQ ID NO: 137363 - DNA, 25 bp, Saccharomyces pastorianus
taaatttaccattagcggcactgtt

SEQ ID NO: 137364 - DNA, 25 bp, Saccharomyces pastorianus
acattttagcaattccaggccaagc

SEQ ID NO: 137365 - DNA, 25 bp, Saccharomyces pastorianus
atcactctgtgtgggaattgccaac

SEQ ID NO: 137366 - DNA, 25 bp, Saccharomyces pastorianus
ttctaggattcacttgcttcaacat

SEQ ID NO: 137367 - DNA, 25 bp, Saccharomyces pastorianus
aacgtttgggtgctccctttcatag

SEQ ID NO: 137368 - DNA, 25 bp, Saccharomyces pastorianus
attcttgctggttgggtctccgaga

SEQ ID NO: 137369 - DNA, 25 bp, Saccharomyces pastorianus
tttcatagtttctctggtcgcttta

SEQ ID NO: 137370 - DNA, 25 bp, Saccharomyces pastorianus
cggcactgttatcgcgtaaattgaa

SEQ ID NO: 137371 - DNA, 25 bp, Saccharomyces pastorianus
ggaccgcaaatggaactctatgaca

SEQ ID NO: 137372 - DNA, 25 bp, Saccharomyces pastorianus
agcagagcgttggagaaaagtctat

SEQ ID NO: 137373 - DNA, 25 bp, Saccharomyces pastorianus
gcttaacatcagattcggagagtat

SEQ ID NO: 137374 - DNA, 25 bp, Saccharomyces pastorianus
attcgatcctgagtttacatggaca

SEQ ID NO: 137375 - DNA, 25 bp, Saccharomyces pastorianus
aatccagtggttatgaaggcttgtc

SEQ ID NO: 137376 - DNA, 25 bp, Saccharomyces pastorianus
ggagagtatttcacataacccattt

SEQ ID NO: 137377 - DNA, 25 bp, Saccharomyces pastorianus
aaaggcccaattatctgtgtccgca

SEQ ID NO: 137378 - DNA, 25 bp, Saccharomyces pastorianus
tgaaggcttgtctaaattcgatcct

SEQ ID NO: 137379 - DNA, 25 bp, Saccharomyces pastorianus
cgattttcataaagcagagcgttgg

SEQ ID NO: 137380 - DNA, 25 bp, Saccharomyces pastorianus
cacataacccatttgacgattttca

SEQ ID NO: 137381 - DNA, 25 bp, Saccharomyces pastorianus
ctgtgtccgcagaaagcttaacatc

SEQ ID NO: 137382 - DNA, 25 bp, Saccharomyces pastorianus
gaaaagtctatgaatccagtggtta

SEQ ID NO: 137383 - DNA, 25 bp, Saccharomyces pastorianus
atggtttactatagagcccttaggc

SEQ ID NO: 137384 - DNA, 25 bp, Saccharomyces pastorianus
aacaaagtcgtttaagcattcctcg

SEQ ID NO: 137385 - DNA, 25 bp, Saccharomyces pastorianus
gcattcctcgaaaagaaacgtctct

SEQ ID NO: 137386 - DNA, 25 bp, Saccharomyces pastorianus
gtcagtttttccagaaacctccatg

SEQ ID NO: 137387 - DNA, 25 bp, Saccharomyces pastorianus
aataggcaaacatcgggcgtacctt

SEQ ID NO: 137388 - DNA, 25 bp, Saccharomyces pastorianus
ctccatggaaaaaccctggacgtgg

SEQ ID NO: 137389 - DNA, 25 bp, Saccharomyces pastorianus
ggcgtaccttaaaagtcttagacat

SEQ ID NO: 137390 - DNA, 25 bp, Saccharomyces pastorianus
tataatcacattcctcgtcagtttt

SEQ ID NO: 137391 - DNA, 25 bp, Saccharomyces pastorianus
ttaacgctacgcgtatttcttcgcc

SEQ ID NO: 137392 - DNA, 25 bp, Saccharomyces pastorianus
aacgtctctatgatggtaataggca

SEQ ID NO: 137393 - DNA, 25 bp, Saccharomyces pastorianus
gagcccttaggcaacatttttgtca

SEQ ID NO: 137394 - DNA, 25 bp, Saccharomyces pastorianus
acttgggagagtccgtatacgacta

SEQ ID NO: 137395 - DNA, 25 bp, Saccharomyces pastorianus
gagtccgtatacgactattcagttg

SEQ ID NO: 137396 - DNA, 25 bp, Saccharomyces pastorianus
gtccgtatacgactattcagttgcc

SEQ ID NO: 137397 - DNA, 25 bp, Saccharomyces pastorianus
gagagtccgtatacgactattcagt

SEQ ID NO: 137398 - DNA, 25 bp, Saccharomyces pastorianus
gaacttgggagagtccgtatacgac

SEQ ID NO: 137399 - DNA, 25 bp, Saccharomyces pastorianus
aagcggtacttgaacttgggagagt

SEQ ID NO: 137400 - DNA, 25 bp, Saccharomyces pastorianus
gggagagtccgtatacgactattca

SEQ ID NO: 137401 - DNA, 25 bp, Saccharomyces pastorianus
gtacttgaacttgggagagtccgta

SEQ ID NO: 137402 - DNA, 25 bp, Saccharomyces pastorianus
cttgaacttgggagagtccgtatac

SEQ ID NO: 137403 - DNA, 25 bp, Saccharomyces pastorianus
gtatacgactattcagttgccactt

SEQ ID NO: 137404 - DNA, 25 bp, Saccharomyces pastorianus
atacgactattcagttgccacttgt

SEQ ID NO: 137405 - DNA, 25 bp, Saccharomyces pastorianus
tctacacggacctgagcagcgagtc

SEQ ID NO: 137406 - DNA, 25 bp, Saccharomyces pastorianus
agggagacaccgtctacattgtcca

SEQ ID NO: 137407 - DNA, 25 bp, Saccharomyces pastorianus
agatgttcgccaacgttgccagaat

SEQ ID NO: 137408 - DNA, 25 bp, Saccharomyces pastorianus
tgacctatctcatgggcgcagctgt

SEQ ID NO: 137409 - DNA, 25 bp, Saccharomyces pastorianus
tgtgcccatcctcgcggttagaaag

SEQ ID NO: 137410 - DNA, 25 bp, Saccharomyces pastorianus
ggaaccaaaggtccttcatcctcta

SEQ ID NO: 137411 - DNA, 25 bp, Saccharomyces pastorianus
acattgtccactgggagccctcgaa

SEQ ID NO: 137412 - DNA, 25 bp, Saccharomyces pastorianus
gaatcagaaagcacgtcatgcacct

SEQ ID NO: 137413 - DNA, 25 bp, Saccharomyces pastorianus
tgcacctgtttgactgcgtcgcggg

SEQ ID NO: 137414 - DNA, 25 bp, Saccharomyces pastorianus
ggcgcagctgtcaaccagggagaca

SEQ ID NO: 137415 - DNA, 25 bp, Saccharomyces pastorianus
atgcaactactcaccaagggtgccg

SEQ ID NO: 137416 - DNA, 25 bp, Saccharomyces pastorianus
gaagagtccgatgaagagcaagtga

SEQ ID NO: 137417 - DNA, 25 bp, Saccharomyces pastorianus
agaggcgaacgagactcaaacgtga

SEQ ID NO: 137418 - DNA, 25 bp, Saccharomyces pastorianus
aagcagggccagtagccgcagcaga

SEQ ID NO: 137419 - DNA, 25 bp, Saccharomyces pastorianus
gacggaacacaatcgaatctacaca

SEQ ID NO: 137420 - DNA, 25 bp, Saccharomyces pastorianus
gaatctacacagcatcaaaacggaa

SEQ ID NO: 137421 - DNA, 25 bp, Saccharomyces pastorianus
aaacgtgagcagtctgtcgcggtcg

SEQ ID NO: 137422 - DNA, 25 bp, Saccharomyces pastorianus
tttagagattgacgaggagttccac

SEQ ID NO: 137423 - DNA, 25 bp, Saccharomyces pastorianus
tattgctgactaaacctgacggaac

SEQ ID NO: 137424 - DNA, 25 bp, Saccharomyces pastorianus
gagttcgactcggagcagatggaaa

SEQ ID NO: 137425 - DNA, 25 bp, Saccharomyces pastorianus
gagttcctcaagtggaccgtgttga

SEQ ID NO: 137426 - DNA, 25 bp, Saccharomyces pastorianus
gagcatattgctgactaaacctgac

SEQ ID NO: 137427 - DNA, 25 bp, Saccharomyces pastorianus
gggagcgcccgttcaagaagaaaca

SEQ ID NO: 137428 - DNA, 25 bp, Saccharomyces pastorianus
atcaccacctcaacatatgaacttc

SEQ ID NO: 137429 - DNA, 25 bp, Saccharomyces pastorianus
aaaaatagccctgcgttcacaaact

SEQ ID NO: 137430 - DNA, 25 bp, Saccharomyces pastorianus
aaaggtcaccttcagggagcgcccg

SEQ ID NO: 137431 - DNA, 25 bp, Saccharomyces pastorianus
ttttgaattctccttctcatttgcc

SEQ ID NO: 137432 - DNA, 25 bp, Saccharomyces pastorianus
gaaacagcaataggcccggcagtgc

SEQ ID NO: 137433 - DNA, 25 bp, Saccharomyces pastorianus
gggaaccagcgctagaagcactacg

SEQ ID NO: 137434 - DNA, 25 bp, Saccharomyces pastorianus
atatgaacttcaccaaccctttcat

SEQ ID NO: 137435 - DNA, 25 bp, Saccharomyces pastorianus
aatgcaaggtcactactcgttctcg

SEQ ID NO: 137436 - DNA, 25 bp, Saccharomyces pastorianus
ggcagtgctgccaacattatgatcg

SEQ ID NO: 137437 - DNA, 25 bp, Saccharomyces pastorianus
atcgccatcgaaccaacagtactta

SEQ ID NO: 137438 - DNA, 25 bp, Saccharomyces pastorianus
gaacgacaataattatatgccacct

SEQ ID NO: 137439 - DNA, 25 bp, Saccharomyces pastorianus
gcggcacagagggagaacgacaata

SEQ ID NO: 137440 - DNA, 25 bp, Saccharomyces pastorianus
cgactcccacgtggcggcacagagg

SEQ ID NO: 137441 - DNA, 25 bp, Saccharomyces pastorianus
ggataccagcaaccacaaccaagac

SEQ ID NO: 137442 - DNA, 25 bp, Saccharomyces pastorianus
ggcacagagggagaacgacaataat

SEQ ID NO: 137443 - DNA, 25 bp, Saccharomyces pastorianus
gagttctatgatttttgaaagaaat

SEQ ID NO: 137444 - DNA, 25 bp, Saccharomyces pastorianus
tgaaagaaatgtagaggacccatca

SEQ ID NO: 137445 - DNA, 25 bp, Saccharomyces pastorianus
acgacaataattatatgccaccttc

SEQ ID NO: 137446 - DNA, 25 bp, Saccharomyces pastorianus
cacagagggagaacgacaataatta

SEQ ID NO: 137447 - DNA, 25 bp, Saccharomyces pastorianus
atggataccagcaaccacaaccaag

SEQ ID NO: 137448 - DNA, 25 bp, Saccharomyces pastorianus
agcaaccacaaccaagaccacgact

SEQ ID NO: 137449 - DNA, 25 bp, Saccharomyces pastorianus
gaacgacaataattatatgccacct

SEQ ID NO: 137450 - DNA, 25 bp, Saccharomyces pastorianus
ccctccatgagcgagagttctatga

SEQ ID NO: 137451 - DNA, 25 bp, Saccharomyces pastorianus
cgactcccacgtggcggcacagagg

SEQ ID NO: 137452 - DNA, 25 bp, Saccharomyces pastorianus
ggataccagcaaccacaaccaagac

SEQ ID NO: 137453 - DNA, 25 bp, Saccharomyces pastorianus
ggcacagagggagaacgacaataat

SEQ ID NO: 137454 - DNA, 25 bp, Saccharomyces pastorianus
acgacaataattatatgccaccttc

SEQ ID NO: 137455 - DNA, 25 bp, Saccharomyces pastorianus
tgaaagaaatgtagaggacccatca

SEQ ID NO: 137456 - DNA, 25 bp, Saccharomyces pastorianus
gagcgagagttctatgatttttgaa

SEQ ID NO: 137457 - DNA, 25 bp, Saccharomyces pastorianus
acaataattatatgccaccttcccc

SEQ ID NO: 137458 - DNA, 25 bp, Saccharomyces pastorianus
atggataccagcaaccacaaccaag

SEQ ID NO: 137459 - DNA, 25 bp, Saccharomyces pastorianus
agcaaccacaaccaagaccacgact

SEQ ID NO: 137460 - DNA, 25 bp, Saccharomyces pastorianus
aggctaccgctttcaacaagacccg

SEQ ID NO: 137461 - DNA, 25 bp, Saccharomyces pastorianus
gaaagttgcctctgctaatgctact

SEQ ID NO: 137462 - DNA, 25 bp, Saccharomyces pastorianus
gatttcttgagaaaggctaccgctt

SEQ ID NO: 137463 - DNA, 25 bp, Saccharomyces pastorianus
agttgcctctgctaatgctactgct

SEQ ID NO: 137464 - DNA, 25 bp, Saccharomyces pastorianus
tctacaaagctcttcgtggtatggt

SEQ ID NO: 137465 - DNA, 25 bp, Saccharomyces pastorianus
taaagtaccatgatttcttgagaaa

SEQ ID NO: 137466 - DNA, 25 bp, Saccharomyces pastorianus
aagctcttcgtggtatggtttctca

SEQ ID NO: 137467 - DNA, 25 bp, Saccharomyces pastorianus
tcttcgtggtatggtttctcacaag

SEQ ID NO: 137468 - DNA, 25 bp, Saccharomyces pastorianus
gatgttgttgccaaattggaagcaa

SEQ ID NO: 137469 - DNA, 25 bp, Saccharomyces pastorianus
caccaagaaagttgcctctgctaat

SEQ ID NO: 137470 - DNA, 25 bp, Saccharomyces pastorianus
cctctgctaatgctactgctgctga

SEQ ID NO: 137471 - DNA, 25 bp, Saccharomyces pastorianus
ttggtacatatcctacggcgagtgg

SEQ ID NO: 137472 - DNA, 25 bp, Saccharomyces pastorianus
gttaggaatctcatttgggctcttt

SEQ ID NO: 137473 - DNA, 25 bp, Saccharomyces pastorianus
agcttccctggaaaactctcaataa

SEQ ID NO: 137474 - DNA, 25 bp, Saccharomyces pastorianus
ggcagttgaaatcagacgagtatct

SEQ ID NO: 137475 - DNA, 25 bp, Saccharomyces pastorianus
cacggaaaaggcgatgttgcattta

SEQ ID NO: 137476 - DNA, 25 bp, Saccharomyces pastorianus
aaagcagcttggtacatatcctacg

SEQ ID NO: 137477 - DNA, 25 bp, Saccharomyces pastorianus
gggacctagaagacctgtacacgga

SEQ ID NO: 137478 - DNA, 25 bp, Saccharomyces pastorianus
gggctctttggtttagtgagactat

SEQ ID NO: 137479 - DNA, 25 bp, Saccharomyces pastorianus
gtgagactattagccaatcctgaaa

SEQ ID NO: 137480 - DNA, 25 bp, Saccharomyces pastorianus
aatcctgaaactccaaagactatga

SEQ ID NO: 137481 - DNA, 25 bp, Saccharomyces pastorianus
gacagaacgtcaaaagcttccctgg

SEQ ID NO: 137482 - DNA, 25 bp, Saccharomyces pastorianus
gtaagtgcccctaagtatgtggaat

SEQ ID NO: 137483 - DNA, 25 bp, Saccharomyces pastorianus
atggctagcggttcattgcgtggat

SEQ ID NO: 137484 - DNA, 25 bp, Saccharomyces pastorianus
atgacgaatctctttttccttccaa

SEQ ID NO: 137485 - DNA, 25 bp, Saccharomyces pastorianus
agaagccgtttctacaaccgcaagc

SEQ ID NO: 137486 - DNA, 25 bp, Saccharomyces pastorianus
gagttcgaactactaagaccggctg

SEQ ID NO: 137487 - DNA, 25 bp, Saccharomyces pastorianus
gcgcatatttactgtcatcatttta

SEQ ID NO: 137488 - DNA, 25 bp, Saccharomyces pastorianus
gagggattcatccaacgagtaattc

SEQ ID NO: 137489 - DNA, 25 bp, Saccharomyces pastorianus
gagggagtccttaaccaagctgtga

SEQ ID NO: 137490 - DNA, 25 bp, Saccharomyces pastorianus
aagaccggctgattttggtccgctg

SEQ ID NO: 137491 - DNA, 25 bp, Saccharomyces pastorianus
atcacagaattttgctccccacaaa

SEQ ID NO: 137492 - DNA, 25 bp, Saccharomyces pastorianus
aagctgtgaagttaccgcgtggtga

SEQ ID NO: 137493 - DNA, 25 bp, Saccharomyces pastorianus
gtctgtagcttgtgcgtgtacgtgt

SEQ ID NO: 137494 - DNA, 25 bp, Saccharomyces pastorianus
gtacgtgtgtacacacttcaacata

SEQ ID NO: 137495 - DNA, 25 bp, Saccharomyces pastorianus
gtgcgtgtacgtgtgtacacacttc

SEQ ID NO: 137496 - DNA, 25 bp, Saccharomyces pastorianus
atgccgggccgcgtggcgtctgtag

SEQ ID NO: 137497 - DNA, 25 bp, Saccharomyces pastorianus
cgtgtgtacacacttcaacatatat

SEQ ID NO: 137498 - DNA, 25 bp, Saccharomyces pastorianus
acatatatgaatgccgggccgcgtg

SEQ ID NO: 137499 - DNA, 25 bp, Saccharomyces pastorianus
tagcttgtgcgtgtacgtgtgtaca

SEQ ID NO: 137500 - DNA, 25 bp, Saccharomyces pastorianus
gcgtgtacgtgtgtacacacttcaa

SEQ ID NO: 137501 - DNA, 25 bp, Saccharomyces pastorianus
gcgtctgtagcttgtgcgtgtacgt

SEQ ID NO: 137502 - DNA, 25 bp, Saccharomyces pastorianus
tgtacatatatgaatgccgggccgc

SEQ ID NO: 137503 - DNA, 25 bp, Saccharomyces pastorianus
tacatatatgaatgccgggccgcgt

SEQ ID NO: 137504 - DNA, 25 bp, Saccharomyces pastorianus
tctctcttcttctccactatactgt

SEQ ID NO: 137505 - DNA, 25 bp, Saccharomyces pastorianus
ttttcagcccattcggcgcgcgaaa

SEQ ID NO: 137506 - DNA, 25 bp, Saccharomyces pastorianus
ttcggcgcgcgaaatcacaagctgt

SEQ ID NO: 137507 - DNA, 25 bp, Saccharomyces pastorianus
accacatccattgctattgcccctc

SEQ ID NO: 137508 - DNA, 25 bp, Saccharomyces pastorianus
actatactgtgcttttcagcccatt

SEQ ID NO: 137509 - DNA, 25 bp, Saccharomyces pastorianus
tctccactatactgtgcttttcagc

SEQ ID NO: 137510 - DNA, 25 bp, Saccharomyces pastorianus
gcgcgcgaaatcacaagctgtatat

SEQ ID NO: 137511 - DNA, 25 bp, Saccharomyces pastorianus
atactgtgcttttcagcccattcgg

SEQ ID NO: 137512 - DNA, 25 bp, Saccharomyces pastorianus
gcgaaatcacaagctgtatatatac

SEQ ID NO: 137513 - DNA, 25 bp, Saccharomyces pastorianus
cggcgcgcgaaatcacaagctgtat

SEQ ID NO: 137514 - DNA, 25 bp, Saccharomyces pastorianus
ttcttctccactatactgtgctttt

SEQ ID NO: 137515 - DNA, 25 bp, Saccharomyces pastorianus
ggcgcttcgaagcatagaacattat

SEQ ID NO: 137516 - DNA, 25 bp, Saccharomyces pastorianus
gctgttgttcaatggatgcggttcg

SEQ ID NO: 137517 - DNA, 25 bp, Saccharomyces pastorianus
caatggatgcggttcgaggcccagc

SEQ ID NO: 137518 - DNA, 25 bp, Saccharomyces pastorianus
acagcttgtgatttcgcgcgccgaa

SEQ ID NO: 137519 - DNA, 25 bp, Saccharomyces pastorianus
aaggccaagctgttgttcaatggat

SEQ ID NO: 137520 - DNA, 25 bp, Saccharomyces pastorianus
cagggaaggccaagctgttgttcaa

SEQ ID NO: 137521 - DNA, 25 bp, Saccharomyces pastorianus
gcaatagcaatggatgtggtagaat

SEQ ID NO: 137522 - DNA, 25 bp, Saccharomyces pastorianus
atatacagcttgtgatttcgcgcgc

SEQ ID NO: 137523 - DNA, 25 bp, Saccharomyces pastorianus
atttcgcgcgccgaatgggctgaaa

SEQ ID NO: 137524 - DNA, 25 bp, Saccharomyces pastorianus
gggctgaaaagcacagtatagtgga

SEQ ID NO: 137525 - DNA, 25 bp, Saccharomyces pastorianus
cgccgaatgggctgaaaagcacagt

SEQ ID NO: 137526 - DNA, 25 bp, Saccharomyces pastorianus
gaagtgtgtacacacgtacacgcac

SEQ ID NO: 137527 - DNA, 25 bp, Saccharomyces pastorianus
acgcggcccggcattcatatatgta

SEQ ID NO: 137528 - DNA, 25 bp, Saccharomyces pastorianus
acacgtacacgcacaagctacagac

SEQ ID NO: 137529 - DNA, 25 bp, Saccharomyces pastorianus
acgtacacgcacaagctacagacgc

SEQ ID NO: 137530 - DNA, 25 bp, Saccharomyces pastorianus
tatatatgttgaagtgtgtacacac

SEQ ID NO: 137531 - DNA, 25 bp, Saccharomyces pastorianus
cccggcattcatatatgtacataca

SEQ ID NO: 137532 - DNA, 25 bp, Saccharomyces pastorianus
tgtacacacgtacacgcacaagcta

SEQ ID NO: 137533 - DNA, 25 bp, Saccharomyces pastorianus
tacacacgtacacgcacaagctaca

SEQ ID NO: 137534 - DNA, 25 bp, Saccharomyces pastorianus
ggcccggcattcatatatgtacata

SEQ ID NO: 137535 - DNA, 25 bp, Saccharomyces pastorianus
gcacaagctacagacgccacgcggc

SEQ ID NO: 137536 - DNA, 25 bp, Saccharomyces pastorianus
gcggcccggcattcatatatgtaca

SEQ ID NO: 137537 - DNA, 25 bp, Saccharomyces pastorianus
gcaccaactcctactgctagaagat

SEQ ID NO: 137538 - DNA, 25 bp, Saccharomyces pastorianus
tcgctgtaatgcaaacgctcaccac

SEQ ID NO: 137539 - DNA, 25 bp, Saccharomyces pastorianus
ggattattattctttccctcttaga

SEQ ID NO: 137540 - DNA, 25 bp, Saccharomyces pastorianus
gagttgccgatatcgtctatatagt

SEQ ID NO: 137541 - DNA, 25 bp, Saccharomyces pastorianus
cactgtttatttttgctacgcacca

SEQ ID NO: 137542 - DNA, 25 bp, Saccharomyces pastorianus
gaaattttcgtgctctcgctgtaat

SEQ ID NO: 137543 - DNA, 25 bp, Saccharomyces pastorianus
attccgccattgcatcctttaaaga

SEQ ID NO: 137544 - DNA, 25 bp, Saccharomyces pastorianus
gttgacacatttctaattccgccat

SEQ ID NO: 137545 - DNA, 25 bp, Saccharomyces pastorianus
ttaaacattcactcctatgtctagg

SEQ ID NO: 137546 - DNA, 25 bp, Saccharomyces pastorianus
gtagctttgggaagcactacttcaa

SEQ ID NO: 137547 - DNA, 25 bp, Saccharomyces pastorianus
tgaagtaccccgatccagatttttt

SEQ ID NO: 137548 - DNA, 25 bp, Saccharomyces pastorianus
tgaagacatcgaagaccactccacc

SEQ ID NO: 137549 - DNA, 25 bp, Saccharomyces pastorianus
actccaccccttgcatggatatttt

SEQ ID NO: 137550 - DNA, 25 bp, Saccharomyces pastorianus
tggttgttacaagccctccataaag

SEQ ID NO: 137551 - DNA, 25 bp, Saccharomyces pastorianus
atgtcgatgcgtgtgccccaagaaa

SEQ ID NO: 137552 - DNA, 25 bp, Saccharomyces pastorianus
aagggcccgctctaaggtgccaatg

SEQ ID NO: 137553 - DNA, 25 bp, Saccharomyces pastorianus
gggtgacgcgccaattcattcaatt

SEQ ID NO: 137554 - DNA, 25 bp, Saccharomyces pastorianus
gaccttggatctagaagacgttcat

SEQ ID NO: 137555 - DNA, 25 bp, Saccharomyces pastorianus
gtgccaatgctagaggattcccttg

SEQ ID NO: 137556 - DNA, 25 bp, Saccharomyces pastorianus
gtaactttgaaattgcccgcgttga

SEQ ID NO: 137557 - DNA, 25 bp, Saccharomyces pastorianus
aatatctcgttgaaagggcccgctc

SEQ ID NO: 137558 - DNA, 25 bp, Saccharomyces pastorianus
ttatagacactcatcgctgcagcat

SEQ ID NO: 137559 - DNA, 25 bp, Saccharomyces pastorianus
cggcaacatccaacttttactacta

SEQ ID NO: 137560 - DNA, 25 bp, Saccharomyces pastorianus
gcgtccaccatctttgataactaca

SEQ ID NO: 137561 - DNA, 25 bp, Saccharomyces pastorianus
aattatatctgttagccacggctca

SEQ ID NO: 137562 - DNA, 25 bp, Saccharomyces pastorianus
gaggatactgtttccggtgacaacg

SEQ ID NO: 137563 - DNA, 25 bp, Saccharomyces pastorianus
gaattattgctgcttgccatcgaag

SEQ ID NO: 137564 - DNA, 25 bp, Saccharomyces pastorianus
tttaaacctggctgaatcgtacatt

SEQ ID NO: 137565 - DNA, 25 bp, Saccharomyces pastorianus
aagagctatctcaaacctttcctac

SEQ ID NO: 137566 - DNA, 25 bp, Saccharomyces pastorianus
accaaattacgcttgctcttatgca

SEQ ID NO: 137567 - DNA, 25 bp, Saccharomyces pastorianus
acggctcaagctatcttgggtgact

SEQ ID NO: 137568 - DNA, 25 bp, Saccharomyces pastorianus
gtcgagctattactatctgattact

SEQ ID NO: 137569 - DNA, 25 bp, Saccharomyces pastorianus
tgtacaaacctactttcttggcaaa

SEQ ID NO: 137570 - DNA, 25 bp, Saccharomyces pastorianus
gagaaggatgcatctccagttccat

SEQ ID NO: 137571 - DNA, 25 bp, Saccharomyces pastorianus
atatggctgctgatcgtgccatcta

SEQ ID NO: 137572 - DNA, 25 bp, Saccharomyces pastorianus
tacacatattgcttccgtctcagaa

SEQ ID NO: 137573 - DNA, 25 bp, Saccharomyces pastorianus
aaaggcggcatctgcgcttaccgaa

SEQ ID NO: 137574 - DNA, 25 bp, Saccharomyces pastorianus
aaaggtgattgcttgtactgctcct

SEQ ID NO: 137575 - DNA, 25 bp, Saccharomyces pastorianus
ggaagatagtgttgccccagcagtt

SEQ ID NO: 137576 - DNA, 25 bp, Saccharomyces pastorianus
acatcgatcagtctcattccttgaa

SEQ ID NO: 137577 - DNA, 25 bp, Saccharomyces pastorianus
ctccgctgctattcaatttaccatt

SEQ ID NO: 137578 - DNA, 25 bp, Saccharomyces pastorianus
gaatcttttcttgcaagcaccatca

SEQ ID NO: 137579 - DNA, 25 bp, Saccharomyces pastorianus
atcggtgtcgagtgccatgtcaaat

SEQ ID NO: 137580 - DNA, 25 bp, Saccharomyces pastorianus
gatcgtccagtttatgttccaaagg

SEQ ID NO: 137581 - DNA, 25 bp, Saccharomyces pastorianus
tatcgttgctatctgtcgttcgcca

SEQ ID NO: 137582 - DNA, 25 bp, Saccharomyces pastorianus
tgtcgttcgccaccctcggtatatc

SEQ ID NO: 137583 - DNA, 25 bp, Saccharomyces pastorianus
ggtatatccaacgtgcaggccaata

SEQ ID NO: 137584 - DNA, 25 bp, Saccharomyces pastorianus
attgtgtggtatcgttgctatctgt

SEQ ID NO: 137585 - DNA, 25 bp, Saccharomyces pastorianus
ccctagcgtggaattgtgtggtatc

SEQ ID NO: 137586 - DNA, 25 bp, Saccharomyces pastorianus
ggccaatatcactctctaagaaaat

SEQ ID NO: 137587 - DNA, 25 bp, Saccharomyces pastorianus
tgcaggccaatatcactctctaaga

SEQ ID NO: 137588 - DNA, 25 bp, Saccharomyces pastorianus
gtagtgaagtccctagcgtggaatt

SEQ ID NO: 137589 - DNA, 25 bp, Saccharomyces pastorianus
accacagccactatactcacgtagt

SEQ ID NO: 137590 - DNA, 25 bp, Saccharomyces pastorianus
accctcggtatatccaacgtgcagg

SEQ ID NO: 137591 - DNA, 25 bp, Saccharomyces pastorianus
actcacgtagtgaagtccctagcgt

SEQ ID NO: 137592 - DNA, 25 bp, Saccharomyces pastorianus
tatcgctattccaaggttctgtaat

SEQ ID NO: 137593 - DNA, 25 bp, Saccharomyces pastorianus
atattactcatctcgatctttcctg

SEQ ID NO: 137594 - DNA, 25 bp, Saccharomyces pastorianus
ctttgtttgggttctattatcgcta

SEQ ID NO: 137595 - DNA, 25 bp, Saccharomyces pastorianus
gctcgtcactgaaattgctacttta

SEQ ID NO: 137596 - DNA, 25 bp, Saccharomyces pastorianus
agcttcactgctttggttgtaaatg

SEQ ID NO: 137597 - DNA, 25 bp, Saccharomyces pastorianus
ttttctcaggcctttacgagtttat

SEQ ID NO: 137598 - DNA, 25 bp, Saccharomyces pastorianus
gtatcggttccatttcttggcgatt

SEQ ID NO: 137599 - DNA, 25 bp, Saccharomyces pastorianus
ggatggttgctatcagcttcactgc

SEQ ID NO: 137600 - DNA, 25 bp, Saccharomyces pastorianus
accgtaaattactatgctggacttt

SEQ ID NO: 137601 - DNA, 25 bp, Saccharomyces pastorianus
gcaatttgccaagcggtatattcca

SEQ ID NO: 137602 - DNA, 25 bp, Saccharomyces pastorianus
gtatattccatctgttcgttgttcg

SEQ ID NO: 137603 - DNA, 25 bp, Saccharomyces pastorianus
tgtttgtatatgtgtgggagtgatt

SEQ ID NO: 137604 - DNA, 25 bp, Saccharomyces pastorianus
atatattcatatgtcgtgtgtttgt

SEQ ID NO: 137605 - DNA, 25 bp, Saccharomyces pastorianus
attgtgcgtgtatatgtgtgttggc

SEQ ID NO: 137606 - DNA, 25 bp, Saccharomyces pastorianus
tattcatatgtcgtgtgtttgtata

SEQ ID NO: 137607 - DNA, 25 bp, Saccharomyces pastorianus
atgtgtgttggcgtgtgtggtacaa

SEQ ID NO: 137608 - DNA, 25 bp, Saccharomyces pastorianus
ggcgcgtgtactatatatattcata

SEQ ID NO: 137609 - DNA, 25 bp, Saccharomyces pastorianus
ttggcgcgtgtactatatatattca

SEQ ID NO: 137610 - DNA, 25 bp, Saccharomyces pastorianus
gcgcgtgtactatatatattcatat

SEQ ID NO: 137611 - DNA, 25 bp, Saccharomyces pastorianus
gtgattgtgcgtgtatatgtgtgtt

SEQ ID NO: 137612 - DNA, 25 bp, Saccharomyces pastorianus
atatgtcgtgtgtttgtatatgtgt

SEQ ID NO: 137613 - DNA, 25 bp, Saccharomyces pastorianus
gattggcgcgtgtactatatatatt

SEQ ID NO: 137614 - DNA, 25 bp, Saccharomyces pastorianus
agtgacgacaccacaatccgaatgt

SEQ ID NO: 137615 - DNA, 25 bp, Saccharomyces pastorianus
gtagagaatctagccaccgacaaca

SEQ ID NO: 137616 - DNA, 25 bp, Saccharomyces pastorianus
agtgtatgcacacgttcaacggtcg

SEQ ID NO: 137617 - DNA, 25 bp, Saccharomyces pastorianus
ataccttatccaacacatctactat

SEQ ID NO: 137618 - DNA, 25 bp, Saccharomyces pastorianus
cacatctactatcttgcggactgga

SEQ ID NO: 137619 - DNA, 25 bp, Saccharomyces pastorianus
accgacaacacttctgatggcagct

SEQ ID NO: 137620 - DNA, 25 bp, Saccharomyces pastorianus
atcagacacaccgtcgaacgagcaa

SEQ ID NO: 137621 - DNA, 25 bp, Saccharomyces pastorianus
agtggttctcacgacggaagcatta

SEQ ID NO: 137622 - DNA, 25 bp, Saccharomyces pastorianus
tgatggcagctctccgcaggatgac

SEQ ID NO: 137623 - DNA, 25 bp, Saccharomyces pastorianus
gcccctatcgcttgtgtttgtattg

SEQ ID NO: 137624 - DNA, 25 bp, Saccharomyces pastorianus
ttgggtgataaagtcgcccctatcg

SEQ ID NO: 137625 - DNA, 25 bp, Saccharomyces pastorianus
gatttggcacaaggatcatcgggta

SEQ ID NO: 137626 - DNA, 25 bp, Saccharomyces pastorianus
gctatcggcataacccggacattca

SEQ ID NO: 137627 - DNA, 25 bp, Saccharomyces pastorianus
ggacattcagttctcaccaactcat

SEQ ID NO: 137628 - DNA, 25 bp, Saccharomyces pastorianus
gacagcggcactagggtacagccat

SEQ ID NO: 137629 - DNA, 25 bp, Saccharomyces pastorianus
tcgtcatcacccgatttggcgacaa

SEQ ID NO: 137630 - DNA, 25 bp, Saccharomyces pastorianus
cttcaccaagttctgctatcggcat

SEQ ID NO: 137631 - DNA, 25 bp, Saccharomyces pastorianus
atttggcgacaaacgacagcggcac

SEQ ID NO: 137632 - DNA, 25 bp, Saccharomyces pastorianus
acgggcagtagcgatgatttggcac

SEQ ID NO: 137633 - DNA, 25 bp, Saccharomyces pastorianus
gggtacagccattgccagaatataa

SEQ ID NO: 137634 - DNA, 25 bp, Saccharomyces pastorianus
aactcatacagcgtgctacaagcag

SEQ ID NO: 137635 - DNA, 25 bp, Saccharomyces pastorianus
gatgccaccattaaagagattgctt

SEQ ID NO: 137636 - DNA, 25 bp, Saccharomyces pastorianus
gtcatcaaggaacacttgcccgctg

SEQ ID NO: 137637 - DNA, 25 bp, Saccharomyces pastorianus
tgaagccttcccaatttaagatagt

SEQ ID NO: 137638 - DNA, 25 bp, Saccharomyces pastorianus
tctcctgaccgtgaagactgggctg

SEQ ID NO: 137639 - DNA, 25 bp, Saccharomyces pastorianus
ccagccatggttgcctcagttagaa

SEQ ID NO: 137640 - DNA, 25 bp, Saccharomyces pastorianus
tctctctagtctttgggaacgtcca

SEQ ID NO: 137641 - DNA, 25 bp, Saccharomyces pastorianus
ggtattgcgcccatgtatcagatta

SEQ ID NO: 137642 - DNA, 25 bp, Saccharomyces pastorianus
atgaaagctattgccatggaccctc

SEQ ID NO: 137643 - DNA, 25 bp, Saccharomyces pastorianus
acgacactaccaaggtctctctagt

SEQ ID NO: 137644 - DNA, 25 bp, Saccharomyces pastorianus
gctgctacagtggacaacgttcaaa

SEQ ID NO: 137645 - DNA, 25 bp, Saccharomyces pastorianus
tgattgctggcggtactggtattgc

SEQ ID NO: 137646 - DNA, 25 bp, Saccharomyces pastorianus
agtttactacttagactctcctgac

SEQ ID NO: 137647 - DNA, 25 bp, Saccharomyces pastorianus
gctgacgacgtactcggtttaccaa

SEQ ID NO: 137648 - DNA, 25 bp, Saccharomyces pastorianus
ctagtgaagtcttaccccacaggta

SEQ ID NO: 137649 - DNA, 25 bp, Saccharomyces pastorianus
cgatgtacaagttcgggctacctca

SEQ ID NO: 137650 - DNA, 25 bp, Saccharomyces pastorianus
gtgcctttgctcttcaagttcatta

SEQ ID NO: 137651 - DNA, 25 bp, Saccharomyces pastorianus
tatacgcccacatcgttggatggag

SEQ ID NO: 137652 - DNA, 25 bp, Saccharomyces pastorianus
caagcctgtgctggatcccaaaagg

SEQ ID NO: 137653 - DNA, 25 bp, Saccharomyces pastorianus
cttccaatcatttccgctggttgaa

SEQ ID NO: 137654 - DNA, 25 bp, Saccharomyces pastorianus
ttatcggaccgaagaccaagcctgt

SEQ ID NO: 137655 - DNA, 25 bp, Saccharomyces pastorianus
aagtatgcatccaactggctcttca

SEQ ID NO: 137656 - DNA, 25 bp, Saccharomyces pastorianus
gtcatcgtgatcgtggtcgtgcctt

SEQ ID NO: 137657 - DNA, 25 bp, Saccharomyces pastorianus
gaagataggtgactcgatccagatc

SEQ ID NO: 137658 - DNA, 25 bp, Saccharomyces pastorianus
ttcaatggttcaaaagtactgtaca

SEQ ID NO: 137659 - DNA, 25 bp, Saccharomyces pastorianus
tttacgttctttttccaagcaactg

SEQ ID NO: 137660 - DNA, 25 bp, Saccharomyces pastorianus
gtacagaatgtaaaagacgaggttt

SEQ ID NO: 137661 - DNA, 25 bp, Saccharomyces pastorianus
ttcggactactgatagcattagagt

SEQ ID NO: 137662 - DNA, 25 bp, Saccharomyces pastorianus
gttctttttccaagcaactgtgctg

SEQ ID NO: 137663 - DNA, 25 bp, Saccharomyces pastorianus
tatttatttcggactactgatagca

SEQ ID NO: 137664 - DNA, 25 bp, Saccharomyces pastorianus
atgcaagatatttatttcggactac

SEQ ID NO: 137665 - DNA, 25 bp, Saccharomyces pastorianus
gcaactgtgctgttcattcaatggt

SEQ ID NO: 137666 - DNA, 25 bp, Saccharomyces pastorianus
gagtcatttacgttctttttccaag

SEQ ID NO: 137667 - DNA, 25 bp, Saccharomyces pastorianus
tgtgctgttcattcaatggttcaaa

SEQ ID NO: 137668 - DNA, 25 bp, Saccharomyces pastorianus
gatagcattagagtcatttacgttc

SEQ ID NO: 137669 - DNA, 25 bp, Saccharomyces pastorianus
gacaaggccctctagtgataaatct

SEQ ID NO: 137670 - DNA, 25 bp, Saccharomyces pastorianus
agtcagtatcgtttgtgcttcatcc

SEQ ID NO: 137671 - DNA, 25 bp, Saccharomyces pastorianus
acgaacaagactttggcgcagctgt

SEQ ID NO: 137672 - DNA, 25 bp, Saccharomyces pastorianus
ttactacttgtctggcgctcatata

SEQ ID NO: 137673 - DNA, 25 bp, Saccharomyces pastorianus
tgggttgtgccatctttactacttg

SEQ ID NO: 137674 - DNA, 25 bp, Saccharomyces pastorianus
tgcttcatccaatcttgtctcgagg

SEQ ID NO: 137675 - DNA, 25 bp, Saccharomyces pastorianus
tgggctgacgaaactggtccctaaa

SEQ ID NO: 137676 - DNA, 25 bp, Saccharomyces pastorianus
gttttcaccgcaatatacctggcaa

SEQ ID NO: 137677 - DNA, 25 bp, Saccharomyces pastorianus
gacatcatttatctttacaacggct

SEQ ID NO: 137678 - DNA, 25 bp, Saccharomyces pastorianus
agagctttacctgctttaacgacgt

SEQ ID NO: 137679 - DNA, 25 bp, Saccharomyces pastorianus
ggcaatttcctatttgtttccaact

SEQ ID NO: 137680 - DNA, 25 bp, Saccharomyces pastorianus
gggtcgtcttaaccgatggtatact

SEQ ID NO: 137681 - DNA, 25 bp, Saccharomyces pastorianus
catttcgtcaatggtcaatttcgga

SEQ ID NO: 137682 - DNA, 25 bp, Saccharomyces pastorianus
agaactatggtttcgtgggtcgtct

SEQ ID NO: 137683 - DNA, 25 bp, Saccharomyces pastorianus
ggtcaaggaattttcatggccatct

SEQ ID NO: 137684 - DNA, 25 bp, Saccharomyces pastorianus
agcctgttacaattatctcaccatc

SEQ ID NO: 137685 - DNA, 25 bp, Saccharomyces pastorianus
aacactctcgatgaacatgccgttg

SEQ ID NO: 137686 - DNA, 25 bp, Saccharomyces pastorianus
gagagatatcaacaatgcccctgtt

SEQ ID NO: 137687 - DNA, 25 bp, Saccharomyces pastorianus
ttatgtctgtgtcggatctgtttgt

SEQ ID NO: 137688 - DNA, 25 bp, Saccharomyces pastorianus
attcgtcgtttggatcatttcgtca

SEQ ID NO: 137689 - DNA, 25 bp, Saccharomyces pastorianus
aggaactctctgacattagctactc

SEQ ID NO: 137690 - DNA, 25 bp, Saccharomyces pastorianus
gtttggcaattcttcatacactatt

SEQ ID NO: 137691 - DNA, 25 bp, Saccharomyces pastorianus
acttctagtctctttgattcaatta

SEQ ID NO: 137692 - DNA, 25 bp, Saccharomyces pastorianus
tggtactcttggctaaaaaaacagt

SEQ ID NO: 137693 - DNA, 25 bp, Saccharomyces pastorianus
caattagtggtactcttggctaaaa

SEQ ID NO: 137694 - DNA, 25 bp, Saccharomyces pastorianus
attcaattagtggtactcttggcta

SEQ ID NO: 137695 - DNA, 25 bp, Saccharomyces pastorianus
cttctagtctctttgattcaattag

SEQ ID NO: 137696 - DNA, 25 bp, Saccharomyces pastorianus
tcaattagtggtactcttggctaaa

SEQ ID NO: 137697 - DNA, 25 bp, Saccharomyces pastorianus
gtctctttgattcaattagtggtac

SEQ ID NO: 137698 - DNA, 25 bp, Saccharomyces pastorianus
tctttgattcaattagtggtactct

SEQ ID NO: 137699 - DNA, 25 bp, Saccharomyces pastorianus
ctttgattcaattagtggtactctt

SEQ ID NO: 137700 - DNA, 25 bp, Saccharomyces pastorianus
ctagtctctttgattcaattagtgg

SEQ ID NO: 137701 - DNA, 25 bp, Saccharomyces pastorianus
gattcaattagtggtactcttggct

SEQ ID NO: 137702 - DNA, 25 bp, Saccharomyces pastorianus
acccattccaacagacaggattcat

SEQ ID NO: 137703 - DNA, 25 bp, Saccharomyces pastorianus
tacccattccaacagacaggattca

SEQ ID NO: 137704 - DNA, 25 bp, Saccharomyces pastorianus
agctacccattccaacagacaggat

SEQ ID NO: 137705 - DNA, 25 bp, Saccharomyces pastorianus
taacatccgcgcctggttttgaaat

SEQ ID NO: 137706 - DNA, 25 bp, Saccharomyces pastorianus
caacagacaggattcatgcatgtat

SEQ ID NO: 137707 - DNA, 25 bp, Saccharomyces pastorianus
ccattccaacagacaggattcatgc

SEQ ID NO: 137708 - DNA, 25 bp, Saccharomyces pastorianus
tccaacagacaggattcatgcatgt

SEQ ID NO: 137709 - DNA, 25 bp, Saccharomyces pastorianus
aacatccgcgcctggttttgaaatg

SEQ ID NO: 137710 - DNA, 25 bp, Saccharomyces pastorianus
attccaacagacaggattcatgcat

SEQ ID NO: 137711 - DNA, 25 bp, Saccharomyces pastorianus
acagacaggattcatgcatgtattt

SEQ ID NO: 137712 - DNA, 25 bp, Saccharomyces pastorianus
gctacccattccaacagacaggatt

SEQ ID NO: 137713 - DNA, 25 bp, Saccharomyces pastorianus
acccattccaacagacaggattcat

SEQ ID NO: 137714 - DNA, 25 bp, Saccharomyces pastorianus
agctacccattccaacagacaggat

SEQ ID NO: 137715 - DNA, 25 bp, Saccharomyces pastorianus
taacatccgcgcctggttttgaaat

SEQ ID NO: 137716 - DNA, 25 bp, Saccharomyces pastorianus
gcgcctggttttgaaatgtctatat

SEQ ID NO: 137717 - DNA, 25 bp, Saccharomyces pastorianus
caacagacaggattcatgcatgtat

SEQ ID NO: 137718 - DNA, 25 bp, Saccharomyces pastorianus
tccaacagacaggattcatgcatgt

SEQ ID NO: 137719 - DNA, 25 bp, Saccharomyces pastorianus
aacatccgcgcctggttttgaaatg

SEQ ID NO: 137720 - DNA, 25 bp, Saccharomyces pastorianus
attccaacagacaggattcatgcat

SEQ ID NO: 137721 - DNA, 25 bp, Saccharomyces pastorianus
acagacaggattcatgcatgtattt

SEQ ID NO: 137722 - DNA, 25 bp, Saccharomyces pastorianus
atgcatgtatttaattgagcccctg

SEQ ID NO: 137723 - DNA, 25 bp, Saccharomyces pastorianus
gctacccattccaacagacaggatt

SEQ ID NO: 137724 - DNA, 25 bp, Saccharomyces pastorianus
aacaccgcttcaaatatgccgggaa

SEQ ID NO: 137725 - DNA, 25 bp, Saccharomyces pastorianus
gtgataacaacaccgcttcaaatat

SEQ ID NO: 137726 - DNA, 25 bp, Saccharomyces pastorianus
aaagttaattttgcatcgggtgata

SEQ ID NO: 137727 - DNA, 25 bp, Saccharomyces pastorianus
gcgctgagcaagatccttactccaa

SEQ ID NO: 137728 - DNA, 25 bp, Saccharomyces pastorianus
atgacgggcgctgagcaagatcctt

SEQ ID NO: 137729 - DNA, 25 bp, Saccharomyces pastorianus
gcatcgggtgataacaacaccgctt

SEQ ID NO: 137730 - DNA, 25 bp, Saccharomyces pastorianus
agcaagatccttactccaatgcatc

SEQ ID NO: 137731 - DNA, 25 bp, Saccharomyces pastorianus
aagacgtaatgatgacgggcgctga

SEQ ID NO: 137732 - DNA, 25 bp, Saccharomyces pastorianus
tatgccgggaagtaacgaagacgta

SEQ ID NO: 137733 - DNA, 25 bp, Saccharomyces pastorianus
ttactccaatgcatctcaaatgggt

SEQ ID NO: 137734 - DNA, 25 bp, Saccharomyces pastorianus
tccttactccaatgcatctcaaatg

SEQ ID NO: 137735 - DNA, 25 bp, Saccharomyces pastorianus
gggtctattcccgttgatcaagttg

SEQ ID NO: 137736 - DNA, 25 bp, Saccharomyces pastorianus
acattacagaaaaaggttgcctcaa

SEQ ID NO: 137737 - DNA, 25 bp, Saccharomyces pastorianus
ttgatcaagttgtcgtcagaggtat

SEQ ID NO: 137738 - DNA, 25 bp, Saccharomyces pastorianus
aggtgaccccttcgattataaggct

SEQ ID NO: 137739 - DNA, 25 bp, Saccharomyces pastorianus
gtatgatccttggaataagctcaaa

SEQ ID NO: 137740 - DNA, 25 bp, Saccharomyces pastorianus
atagagttcgagtatgatccttgga

SEQ ID NO: 137741 - DNA, 25 bp, Saccharomyces pastorianus
taaggctcaggcagatacattttat

SEQ ID NO: 137742 - DNA, 25 bp, Saccharomyces pastorianus
gggtccagcagcagccatagagttc

SEQ ID NO: 137743 - DNA, 25 bp, Saccharomyces pastorianus
gttgcctcaatattgttagctctga

SEQ ID NO: 137744 - DNA, 25 bp, Saccharomyces pastorianus
ggtatagccaaagagcacgccaagt

SEQ ID NO: 137745 - DNA, 25 bp, Saccharomyces pastorianus
gaatggcctcagtctaaaaattgtg

SEQ ID NO: 137746 - DNA, 25 bp, Saccharomyces pastorianus
atgcccaatattacggcccatgaga

SEQ ID NO: 137747 - DNA, 25 bp, Saccharomyces pastorianus
aattaccaagtccttgctgtagacg

SEQ ID NO: 137748 - DNA, 25 bp, Saccharomyces pastorianus
ttacggcccatgagattagacacaa

SEQ ID NO: 137749 - DNA, 25 bp, Saccharomyces pastorianus
ttaccaagtccttgctgtagacgtt

SEQ ID NO: 137750 - DNA, 25 bp, Saccharomyces pastorianus
agacacaattaccaagtccttgctg

SEQ ID NO: 137751 - DNA, 25 bp, Saccharomyces pastorianus
cacaattaccaagtccttgctgtag

SEQ ID NO: 137752 - DNA, 25 bp, Saccharomyces pastorianus
acggcccatgagattagacacaatt

SEQ ID NO: 137753 - DNA, 25 bp, Saccharomyces pastorianus
ggcccatgagattagacacaattac

SEQ ID NO: 137754 - DNA, 25 bp, Saccharomyces pastorianus
aatattacggcccatgagattagac

SEQ ID NO: 137755 - DNA, 25 bp, Saccharomyces pastorianus
tattacggcccatgagattagacac

SEQ ID NO: 137756 - DNA, 25 bp, Saccharomyces pastorianus
tgcccaatattacggcccatgagat

SEQ ID NO: 137757 - DNA, 25 bp, Saccharomyces pastorianus
ccttagatatatttggtggtaacct

SEQ ID NO: 137758 - DNA, 25 bp, Saccharomyces pastorianus
gacgaactaagtcacgggaaagtag

SEQ ID NO: 137759 - DNA, 25 bp, Saccharomyces pastorianus
ctaagtcacgggaaagtagatttga

SEQ ID NO: 137760 - DNA, 25 bp, Saccharomyces pastorianus
tagacgaactaagtcacgggaaagt

SEQ ID NO: 137761 - DNA, 25 bp, Saccharomyces pastorianus
attcggtagttccttagatatattt

SEQ ID NO: 137762 - DNA, 25 bp, Saccharomyces pastorianus
tttgacattcggtagttccttagat

SEQ ID NO: 137763 - DNA, 25 bp, Saccharomyces pastorianus
cattcggtagttccttagatatatt

SEQ ID NO: 137764 - DNA, 25 bp, Saccharomyces pastorianus
atttgacattcggtagttccttaga

SEQ ID NO: 137765 - DNA, 25 bp, Saccharomyces pastorianus
agatatatttggtggtaacctagtt

SEQ ID NO: 137766 - DNA, 25 bp, Saccharomyces pastorianus
gacattcggtagttccttagatata

SEQ ID NO: 137767 - DNA, 25 bp, Saccharomyces pastorianus
ttgacattcggtagttccttagata

SEQ ID NO: 137768 - DNA, 25 bp, Saccharomyces pastorianus
ctcacggtggtggtaaccatcaaca

SEQ ID NO: 137769 - DNA, 25 bp, Saccharomyces pastorianus
acggtggtggtaaccatcaacatat

SEQ ID NO: 137770 - DNA, 25 bp, Saccharomyces pastorianus
ggtaaccatcaacatattggtaagg

SEQ ID NO: 137771 - DNA, 25 bp, Saccharomyces pastorianus
cacggtggtggtaaccatcaacata

SEQ ID NO: 137772 - DNA, 25 bp, Saccharomyces pastorianus
catcaacatattggtaaggcttcta

SEQ ID NO: 137773 - DNA, 25 bp, Saccharomyces pastorianus
ggtggtaaccatcaacatattggta

SEQ ID NO: 137774 - DNA, 25 bp, Saccharomyces pastorianus
cctcacggtggtggtaaccatcaac

SEQ ID NO: 137775 - DNA, 25 bp, Saccharomyces pastorianus
tcacggtggtggtaaccatcaacat

SEQ ID NO: 137776 - DNA, 25 bp, Saccharomyces pastorianus
cggtggtggtaaccatcaacatatt

SEQ ID NO: 137777 - DNA, 25 bp, Saccharomyces pastorianus
atcaacatattggtaaggcttctac

SEQ ID NO: 137778 - DNA, 25 bp, Saccharomyces pastorianus
gtggtggtaaccatcaacatattgg

SEQ ID NO: 137779 - DNA, 25 bp, Saccharomyces pastorianus
atgcttttgaagttgctgattgagt

SEQ ID NO: 137780 - DNA, 25 bp, Saccharomyces pastorianus
tcagtttgaaaaagcgccggttcct

SEQ ID NO: 137781 - DNA, 25 bp, Saccharomyces pastorianus
gatttgattaacgtggatgagtcct

SEQ ID NO: 137782 - DNA, 25 bp, Saccharomyces pastorianus
gcgtaactattgcaacgaaatgctt

SEQ ID NO: 137783 - DNA, 25 bp, Saccharomyces pastorianus
tgagttagacagtatcgatttgatt

SEQ ID NO: 137784 - DNA, 25 bp, Saccharomyces pastorianus
gccggttcctctgactctagaagaa

SEQ ID NO: 137785 - DNA, 25 bp, Saccharomyces pastorianus
aaggacatctacgagcgtaactatt

SEQ ID NO: 137786 - DNA, 25 bp, Saccharomyces pastorianus
ggaaggtcgtagcaaggatctaata

SEQ ID NO: 137787 - DNA, 25 bp, Saccharomyces pastorianus
gatgagtccttaagaaggccgttga

SEQ ID NO: 137788 - DNA, 25 bp, Saccharomyces pastorianus
atacggcaacgagttggaaggtcgt

SEQ ID NO: 137789 - DNA, 25 bp, Saccharomyces pastorianus
caaattgacaatgtgtcgttgagat

SEQ ID NO: 137790 - DNA, 25 bp, Saccharomyces pastorianus
ttggccgtgattgctgttgtatttt

SEQ ID NO: 137791 - DNA, 25 bp, Saccharomyces pastorianus
cctcttggccgtgattgctgttgta

SEQ ID NO: 137792 - DNA, 25 bp, Saccharomyces pastorianus
tcttggccgtgattgctgttgtatt

SEQ ID NO: 137793 - DNA, 25 bp, Saccharomyces pastorianus
gacgtacgtcctcttggccgtgatt

SEQ ID NO: 137794 - DNA, 25 bp, Saccharomyces pastorianus
gtcctcttggccgtgattgctgttg

SEQ ID NO: 137795 - DNA, 25 bp, Saccharomyces pastorianus
gtacgtcctcttggccgtgattgct

SEQ ID NO: 137796 - DNA, 25 bp, Saccharomyces pastorianus
gctgttgtatttttggttacaatca

SEQ ID NO: 137797 - DNA, 25 bp, Saccharomyces pastorianus
ggaacattggaagagcaagctgagc

SEQ ID NO: 137798 - DNA, 25 bp, Saccharomyces pastorianus
agctgagcaaaacaagtacctcgac

SEQ ID NO: 137799 - DNA, 25 bp, Saccharomyces pastorianus
aagtacctcgacgtacgtcctcttg

SEQ ID NO: 137800 - DNA, 25 bp, Saccharomyces pastorianus
agcaagctgagcaaaacaagtacct

SEQ ID NO: 137801 - DNA, 25 bp, Saccharomyces pastorianus
gcatacgtcgtattcgatctcgata

SEQ ID NO: 137802 - DNA, 25 bp, Saccharomyces pastorianus
cgcttcccacttcgaattcaataga

SEQ ID NO: 137803 - DNA, 25 bp, Saccharomyces pastorianus
gatgccaggcactagatcaactact

SEQ ID NO: 137804 - DNA, 25 bp, Saccharomyces pastorianus
gacatttattcatctacaggctgca

SEQ ID NO: 137805 - DNA, 25 bp, Saccharomyces pastorianus
agatgggtctatttcaggtgccaaa

SEQ ID NO: 137806 - DNA, 25 bp, Saccharomyces pastorianus
agtaggccttttcttcaatcatcga

SEQ ID NO: 137807 - DNA, 25 bp, Saccharomyces pastorianus
acagcctcttcgcttattgcagaaa

SEQ ID NO: 137808 - DNA, 25 bp, Saccharomyces pastorianus
aaattgctacagctgaaccctggtc

SEQ ID NO: 137809 - DNA, 25 bp, Saccharomyces pastorianus
actatggcaaactcgggcagtgtct

SEQ ID NO: 137810 - DNA, 25 bp, Saccharomyces pastorianus
agcggagcattctacgtttaaccaa

SEQ ID NO: 137811 - DNA, 25 bp, Saccharomyces pastorianus
aaagtcgcaactgctctacgaagat

SEQ ID NO: 137812 - DNA, 25 bp, Saccharomyces pastorianus
cattggcgatgctgacttagtctac

SEQ ID NO: 137813 - DNA, 25 bp, Saccharomyces pastorianus
tcgagcaatgtctcacttcaaaatt

SEQ ID NO: 137814 - DNA, 25 bp, Saccharomyces pastorianus
tctcaatataaaccaggccacgata

SEQ ID NO: 137815 - DNA, 25 bp, Saccharomyces pastorianus
aacaagtcctcgagcaatgtctcac

SEQ ID NO: 137816 - DNA, 25 bp, Saccharomyces pastorianus
ttgatattgatcaagtcggatcgtt

SEQ ID NO: 137817 - DNA, 25 bp, Saccharomyces pastorianus
tgcctaagcaacatttcgtccaaag

SEQ ID NO: 137818 - DNA, 25 bp, Saccharomyces pastorianus
gaaatagtgcccgttctcaatataa

SEQ ID NO: 137819 - DNA, 25 bp, Saccharomyces pastorianus
aaccaggccacgatatttgatattg

SEQ ID NO: 137820 - DNA, 25 bp, Saccharomyces pastorianus
ttcgtccaaagaaatagtgcccgtt

SEQ ID NO: 137821 - DNA, 25 bp, Saccharomyces pastorianus
ttagtctacgtaacaagtcctcgag

SEQ ID NO: 137822 - DNA, 25 bp, Saccharomyces pastorianus
gtctcacttcaaaatttgcctaagc

SEQ ID NO: 137823 - DNA, 25 bp, Saccharomyces pastorianus
aatccgtgccatttcgccaaaatta

SEQ ID NO: 137824 - DNA, 25 bp, Saccharomyces pastorianus
tgatcaatatcatccctctggccat

SEQ ID NO: 137825 - DNA, 25 bp, Saccharomyces pastorianus
gccgaaagtaattttggagtctcat

SEQ ID NO: 137826 - DNA, 25 bp, Saccharomyces pastorianus
gacaactcggagcatgatcaatatc

SEQ ID NO: 137827 - DNA, 25 bp, Saccharomyces pastorianus
tggagtctcattcaaagccaacaga

SEQ ID NO: 137828 - DNA, 25 bp, Saccharomyces pastorianus
taccgcatatgagcccgacaatttt

SEQ ID NO: 137829 - DNA, 25 bp, Saccharomyces pastorianus
aagcaggacttagcgctaccgcata

SEQ ID NO: 137830 - DNA, 25 bp, Saccharomyces pastorianus
gcccgacaattttaaccaatccgtg

SEQ ID NO: 137831 - DNA, 25 bp, Saccharomyces pastorianus
tctggccatgtaattcctagcttga

SEQ ID NO: 137832 - DNA, 25 bp, Saccharomyces pastorianus
gactcagtttttctacagccatgga

SEQ ID NO: 137833 - DNA, 25 bp, Saccharomyces pastorianus
taacgtttgcgactacaaggtatac

SEQ ID NO: 137834 - DNA, 25 bp, Saccharomyces pastorianus
aatcaaactattgaccagcttggtg

SEQ ID NO: 137835 - DNA, 25 bp, Saccharomyces pastorianus
gaccagcttggtgatactttccata

SEQ ID NO: 137836 - DNA, 25 bp, Saccharomyces pastorianus
gcactcaagtcattatcgttgaaga

SEQ ID NO: 137837 - DNA, 25 bp, Saccharomyces pastorianus
aaaggacttttggaaacatgatgga

SEQ ID NO: 137838 - DNA, 25 bp, Saccharomyces pastorianus
tgggagctatgggtcagagaataaa

SEQ ID NO: 137839 - DNA, 25 bp, Saccharomyces pastorianus
tctgggatcagtataaaaacatggt

SEQ ID NO: 137840 - DNA, 25 bp, Saccharomyces pastorianus
aaaagcactcaagtcattatcgttg

SEQ ID NO: 137841 - DNA, 25 bp, Saccharomyces pastorianus
catgatggagatggccagaagatct

SEQ ID NO: 137842 - DNA, 25 bp, Saccharomyces pastorianus
taacacttctgtaaaactcaaaagg

SEQ ID NO: 137843 - DNA, 25 bp, Saccharomyces pastorianus
gatactttccataacacttctgtaa

SEQ ID NO: 137844 - DNA, 25 bp, Saccharomyces pastorianus
gagattagaggcagcaatcaaacta

SEQ ID NO: 137845 - DNA, 25 bp, Saccharomyces pastorianus
tgagtcggatcctctttctcagttg

SEQ ID NO: 137846 - DNA, 25 bp, Saccharomyces pastorianus
caggaacagcagatggaggaccaaa

SEQ ID NO: 137847 - DNA, 25 bp, Saccharomyces pastorianus
gaggccatcgccaacagagatcaaa

SEQ ID NO: 137848 - DNA, 25 bp, Saccharomyces pastorianus
acctgctaatgctgagtcggatcct

SEQ ID NO: 137849 - DNA, 25 bp, Saccharomyces pastorianus
ataagtgaggaatctctgtccccat

SEQ ID NO: 137850 - DNA, 25 bp, Saccharomyces pastorianus
tctttctcagttgccacagacgaac

SEQ ID NO: 137851 - DNA, 25 bp, Saccharomyces pastorianus
taagatggaggctgctctttgtcct

SEQ ID NO: 137852 - DNA, 25 bp, Saccharomyces pastorianus
gccacagacgaacgccgtaggtaat

SEQ ID NO: 137853 - DNA, 25 bp, Saccharomyces pastorianus
gaggaatctctgtccccatcggagg

SEQ ID NO: 137854 - DNA, 25 bp, Saccharomyces pastorianus
ggaaaagttacctgctaatgctgag

SEQ ID NO: 137855 - DNA, 25 bp, Saccharomyces pastorianus
tggaggctgctctttgtccttttga

SEQ ID NO: 137856 - DNA, 25 bp, Saccharomyces pastorianus
ggtaattcttcagctactaccgctt

SEQ ID NO: 137857 - DNA, 25 bp, Saccharomyces pastorianus
gagaagaagttgtcctccccggata

SEQ ID NO: 137858 - DNA, 25 bp, Saccharomyces pastorianus
tattactagcgataccacgaaggca

SEQ ID NO: 137859 - DNA, 25 bp, Saccharomyces pastorianus
agcttccaccttccttggagaagaa

SEQ ID NO: 137860 - DNA, 25 bp, Saccharomyces pastorianus
tatggtgaaccctggacagcttcca

SEQ ID NO: 137861 - DNA, 25 bp, Saccharomyces pastorianus
agctactaccgcttcagcagatatt

SEQ ID NO: 137862 - DNA, 25 bp, Saccharomyces pastorianus
ctacctggtatggtgaaccctggac

SEQ ID NO: 137863 - DNA, 25 bp, Saccharomyces pastorianus
aattggaatgtttcctcttccttct

SEQ ID NO: 137864 - DNA, 25 bp, Saccharomyces pastorianus
cacgaaggcagattttacgagcaaa

SEQ ID NO: 137865 - DNA, 25 bp, Saccharomyces pastorianus
gtagaggacctcgtgggcgtaaatt

SEQ ID NO: 137866 - DNA, 25 bp, Saccharomyces pastorianus
tgtcctccccggatactgaatctaa

SEQ ID NO: 137867 - DNA, 25 bp, Saccharomyces pastorianus
atggctttcaagaacctccaattcc

SEQ ID NO: 137868 - DNA, 25 bp, Saccharomyces pastorianus
gggcgcatatggatccgattctgat

SEQ ID NO: 137869 - DNA, 25 bp, Saccharomyces pastorianus
cagaacctattatcgctcacgttga

SEQ ID NO: 137870 - DNA, 25 bp, Saccharomyces pastorianus
gataccaccttctgttactcaggag

SEQ ID NO: 137871 - DNA, 25 bp, Saccharomyces pastorianus
aacaagcttccacttcagaacctat

SEQ ID NO: 137872 - DNA, 25 bp, Saccharomyces pastorianus
agtttctactgcaggtatcccatca

SEQ ID NO: 137873 - DNA, 25 bp, Saccharomyces pastorianus
caccccagctttagttggaggcgtt

SEQ ID NO: 137874 - DNA, 25 bp, Saccharomyces pastorianus
gattggtcatcctgatcatgcacgt

SEQ ID NO: 137875 - DNA, 25 bp, Saccharomyces pastorianus
tttgcctgctgttgatggctttcaa

SEQ ID NO: 137876 - DNA, 25 bp, Saccharomyces pastorianus
gatgacgttttatcgattcctgaat

SEQ ID NO: 137877 - DNA, 25 bp, Saccharomyces pastorianus
gtagtcctattccaatagctccgat

SEQ ID NO: 137878 - DNA, 25 bp, Saccharomyces pastorianus
cacagacttcatttggcgttaattt

SEQ ID NO: 137879 - DNA, 25 bp, Saccharomyces pastorianus
aaagcggtcctgcaagtatgcccaa

SEQ ID NO: 137880 - DNA, 25 bp, Saccharomyces pastorianus
atttaggacctcagttgaccggcgg

SEQ ID NO: 137881 - DNA, 25 bp, Saccharomyces pastorianus
gtatgcccaatttgtcctttaatca

SEQ ID NO: 137882 - DNA, 25 bp, Saccharomyces pastorianus
gttttctaccaccatctaactttag

SEQ ID NO: 137883 - DNA, 25 bp, Saccharomyces pastorianus
ggcggtgctttgcaatctcagtata

SEQ ID NO: 137884 - DNA, 25 bp, Saccharomyces pastorianus
gattacaatctcagttaaccgggtt

SEQ ID NO: 137885 - DNA, 25 bp, Saccharomyces pastorianus
taactttagtgctaccatgccgttg

SEQ ID NO: 137886 - DNA, 25 bp, Saccharomyces pastorianus
ggaggatatggttccgttatgcccc

SEQ ID NO: 137887 - DNA, 25 bp, Saccharomyces pastorianus
catgccgttgactgcccaaaagaca

SEQ ID NO: 137888 - DNA, 25 bp, Saccharomyces pastorianus
atgctttgcaacctcagacaactgg

SEQ ID NO: 137889 - DNA, 25 bp, Saccharomyces pastorianus
ggcgaaatgttactcaaagttccag

SEQ ID NO: 137890 - DNA, 25 bp, Saccharomyces pastorianus
ggcggccatgtgaacgttcctcagg

SEQ ID NO: 137891 - DNA, 25 bp, Saccharomyces pastorianus
aaccaactcaacctgttcagaatgt

SEQ ID NO: 137892 - DNA, 25 bp, Saccharomyces pastorianus
caccatctgcagctttttcgcaaaa

SEQ ID NO: 137893 - DNA, 25 bp, Saccharomyces pastorianus
tgctggttcttccaatttagttgaa

SEQ ID NO: 137894 - DNA, 25 bp, Saccharomyces pastorianus
aaagttccagatcgattagcagtga

SEQ ID NO: 137895 - DNA, 25 bp, Saccharomyces pastorianus
tagagcaactccattccaagaagaa

SEQ ID NO: 137896 - DNA, 25 bp, Saccharomyces pastorianus
tgtggaagtcgctcaaccaactcaa

SEQ ID NO: 137897 - DNA, 25 bp, Saccharomyces pastorianus
cacaacagattgctggttcttccaa

SEQ ID NO: 137898 - DNA, 25 bp, Saccharomyces pastorianus
aaactctcgagaacagccacaacag

SEQ ID NO: 137899 - DNA, 25 bp, Saccharomyces pastorianus
gaaaagacaactttggcggccatgt

SEQ ID NO: 137900 - DNA, 25 bp, Saccharomyces pastorianus
tctttcggaacatctacagaacctg

SEQ ID NO: 137901 - DNA, 25 bp, Saccharomyces pastorianus
agcggttccgcattcgcaagaaaca

SEQ ID NO: 137902 - DNA, 25 bp, Saccharomyces pastorianus
gaagaggaagctcccgtgagcactt

SEQ ID NO: 137903 - DNA, 25 bp, Saccharomyces pastorianus
acagaacctgatatcaagcgattca

SEQ ID NO: 137904 - DNA, 25 bp, Saccharomyces pastorianus
gtgagcacttctaacgaactggata

SEQ ID NO: 137905 - DNA, 25 bp, Saccharomyces pastorianus
gcaaatcaacaaacttcgcgatcgt

SEQ ID NO: 137906 - DNA, 25 bp, Saccharomyces pastorianus
cgcttgctatcattgctgctggtta

SEQ ID NO: 137907 - DNA, 25 bp, Saccharomyces pastorianus
cttcgcgatcgtatagagcaattga

SEQ ID NO: 137908 - DNA, 25 bp, Saccharomyces pastorianus
gcagtttaagaagctccgcgagccg

SEQ ID NO: 137909 - DNA, 25 bp, Saccharomyces pastorianus
aagcgattcagagctgggctcgcgc

SEQ ID NO: 137910 - DNA, 25 bp, Saccharomyces pastorianus
atggccaggatgtctcgcagtttaa

SEQ ID NO: 137911 - DNA, 25 bp, Saccharomyces pastorianus
gtgctgctaatatcaaggttcttgg

SEQ ID NO: 137912 - DNA, 25 bp, Saccharomyces pastorianus
ggtgctgctaatatcaaggttcttg

SEQ ID NO: 137913 - DNA, 25 bp, Saccharomyces pastorianus
ttaccaaggtgctgctaatatcaag

SEQ ID NO: 137914 - DNA, 25 bp, Saccharomyces pastorianus
caaggtgctgctaatatcaaggttc

SEQ ID NO: 137915 - DNA, 25 bp, Saccharomyces pastorianus
gtacttaccaaggtgctgctaatat

SEQ ID NO: 137916 - DNA, 25 bp, Saccharomyces pastorianus
tgctaatatcaaggttcttggaaac

SEQ ID NO: 137917 - DNA, 25 bp, Saccharomyces pastorianus
aggtgctgctaatatcaaggttctt

SEQ ID NO: 137918 - DNA, 25 bp, Saccharomyces pastorianus
tcgagtacttaccaaggtgctgcta

SEQ ID NO: 137919 - DNA, 25 bp, Saccharomyces pastorianus
gctgctaatatcaaggttcttggaa

SEQ ID NO: 137920 - DNA, 25 bp, Saccharomyces pastorianus
gagtacttaccaaggtgctgctaat

SEQ ID NO: 137921 - DNA, 25 bp, Saccharomyces pastorianus
acttaccaaggtgctgctaatatca

SEQ ID NO: 137922 - DNA, 25 bp, Saccharomyces pastorianus
tcgctacatactctgttccttctat

SEQ ID NO: 137923 - DNA, 25 bp, Saccharomyces pastorianus
atctccatctctaactggtccacta

SEQ ID NO: 137924 - DNA, 25 bp, Saccharomyces pastorianus
ttctgcagtcgctacatactctgtt

SEQ ID NO: 137925 - DNA, 25 bp, Saccharomyces pastorianus
tgcagtcgctacatactctgttcct

SEQ ID NO: 137926 - DNA, 25 bp, Saccharomyces pastorianus
gttgtcacatctccatctctaactg

SEQ ID NO: 137927 - DNA, 25 bp, Saccharomyces pastorianus
tgttccttctatctcgagtacttac

SEQ ID NO: 137928 - DNA, 25 bp, Saccharomyces pastorianus
tctaactggtccactacaatctgct

SEQ ID NO: 137929 - DNA, 25 bp, Saccharomyces pastorianus
tgcttctggttctgcagtcgctaca

SEQ ID NO: 137930 - DNA, 25 bp, Saccharomyces pastorianus
atactctgttccttctatctcgagt

SEQ ID NO: 137931 - DNA, 25 bp, Saccharomyces pastorianus
ttctggttctgcagtcgctacatac

SEQ ID NO: 137932 - DNA, 25 bp, Saccharomyces pastorianus
tccttctatctcgagtacttaccaa

SEQ ID NO: 137933 - DNA, 25 bp, Saccharomyces pastorianus
gtatttgcaagatagtgccgctcaa

SEQ ID NO: 137934 - DNA, 25 bp, Saccharomyces pastorianus
gtaaggaaaagcctacacctcctca

SEQ ID NO: 137935 - DNA, 25 bp, Saccharomyces pastorianus
tagtacttccgagtcatctaccact

SEQ ID NO: 137936 - DNA, 25 bp, Saccharomyces pastorianus
gatttcccaggcttctattggaaca

SEQ ID NO: 137937 - DNA, 25 bp, Saccharomyces pastorianus
aacatagatgacttcgtaccgccac

SEQ ID NO: 137938 - DNA, 25 bp, Saccharomyces pastorianus
acatctagcacttccgagtcatcta

SEQ ID NO: 137939 - DNA, 25 bp, Saccharomyces pastorianus
gtaccgccacaattgttgtcacaat

SEQ ID NO: 137940 - DNA, 25 bp, Saccharomyces pastorianus
gttgtcacaatctaccactacatca

SEQ ID NO: 137941 - DNA, 25 bp, Saccharomyces pastorianus
gggaactacatcttttgctttgtct

SEQ ID NO: 137942 - DNA, 25 bp, Saccharomyces pastorianus
gccgctcaatatgcaagctcttgga

SEQ ID NO: 137943 - DNA, 25 bp, Saccharomyces pastorianus
ggtgtggatgcctgacttccaaatt

SEQ ID NO: 137944 - DNA, 25 bp, Saccharomyces pastorianus
ttgtggtacaaaactccatacctaa

SEQ ID NO: 137945 - DNA, 25 bp, Saccharomyces pastorianus
atactctggggctggcgtaggcaca

SEQ ID NO: 137946 - DNA, 25 bp, Saccharomyces pastorianus
ttttgtggtacaaaactccatacct

SEQ ID NO: 137947 - DNA, 25 bp, Saccharomyces pastorianus
gagaacatactctggggctggcgta

SEQ ID NO: 137948 - DNA, 25 bp, Saccharomyces pastorianus
attacagctgtgagaacatactctg

SEQ ID NO: 137949 - DNA, 25 bp, Saccharomyces pastorianus
agaacatactctggggctggcgtag

SEQ ID NO: 137950 - DNA, 25 bp, Saccharomyces pastorianus
aacatactctggggctggcgtaggc

SEQ ID NO: 137951 - DNA, 25 bp, Saccharomyces pastorianus
aattacagctgtgagaacatactct

SEQ ID NO: 137952 - DNA, 25 bp, Saccharomyces pastorianus
gaattacagctgtgagaacatactc

SEQ ID NO: 137953 - DNA, 25 bp, Saccharomyces pastorianus
tgtggtacaaaactccatacctaaa

SEQ ID NO: 137954 - DNA, 25 bp, Saccharomyces pastorianus
tttgtggtacaaaactccataccta

SEQ ID NO: 137955 - DNA, 25 bp, Saccharomyces pastorianus
ggcgtctttttagtgtcataccatt

SEQ ID NO: 137956 - DNA, 25 bp, Saccharomyces pastorianus
ataccaacctatacttccattgctg

SEQ ID NO: 137957 - DNA, 25 bp, Saccharomyces pastorianus
ttactacctaggatcatcgacaatg

SEQ ID NO: 137958 - DNA, 25 bp, Saccharomyces pastorianus
gtaaccacagatattcaataccaac

SEQ ID NO: 137959 - DNA, 25 bp, Saccharomyces pastorianus
ttctcaatggcgtctttttagtgtc

SEQ ID NO: 137960 - DNA, 25 bp, Saccharomyces pastorianus
gtcataccattcttttttactacct

SEQ ID NO: 137961 - DNA, 25 bp, Saccharomyces pastorianus
tacaaatctatagccgggatcaccg

SEQ ID NO: 137962 - DNA, 25 bp, Saccharomyces pastorianus
ggagacatctttagagtaaccacag

SEQ ID NO: 137963 - DNA, 25 bp, Saccharomyces pastorianus
gggatcaccgaccttgttatattct

SEQ ID NO: 137964 - DNA, 25 bp, Saccharomyces pastorianus
gagttttaaaatttgctttgcggca

SEQ ID NO: 137965 - DNA, 25 bp, Saccharomyces pastorianus
gaccttgttatattcttcggagaca

SEQ ID NO: 137966 - DNA, 25 bp, Saccharomyces pastorianus
gaattcaggattgcagacagctgca

SEQ ID NO: 137967 - DNA, 25 bp, Saccharomyces pastorianus
agcaaacgagctttttcattggtag

SEQ ID NO: 137968 - DNA, 25 bp, Saccharomyces pastorianus
gacagctgcaagcaaacgagctttt

SEQ ID NO: 137969 - DNA, 25 bp, Saccharomyces pastorianus
ttttgccaatcgaccaagctagtgt

SEQ ID NO: 137970 - DNA, 25 bp, Saccharomyces pastorianus
atcgatatgatcttttcagttgcaa

SEQ ID NO: 137971 - DNA, 25 bp, Saccharomyces pastorianus
tctgatcgctctctttctatagaaa

SEQ ID NO: 137972 - DNA, 25 bp, Saccharomyces pastorianus
gcatttcgcgtatagtaggtgttct

SEQ ID NO: 137973 - DNA, 25 bp, Saccharomyces pastorianus
ggttttcctttaatgagactcttat

SEQ ID NO: 137974 - DNA, 25 bp, Saccharomyces pastorianus
ctcttatgggagtcaattcgcacca

SEQ ID NO: 137975 - DNA, 25 bp, Saccharomyces pastorianus
gtcaattcgcaccagaaggtgtcaa

SEQ ID NO: 137976 - DNA, 25 bp, Saccharomyces pastorianus
agttacgtacactccttggcatttc

SEQ ID NO: 137977 - DNA, 25 bp, Saccharomyces pastorianus
gtcttcttcttctggaaaaaggcct

SEQ ID NO: 137978 - DNA, 25 bp, Saccharomyces pastorianus
aagatatccttgtttatgggcataa

SEQ ID NO: 137979 - DNA, 25 bp, Saccharomyces pastorianus
gcagttttcaatttcagtagcgata

SEQ ID NO: 137980 - DNA, 25 bp, Saccharomyces pastorianus
gtacagtttttatctaccaaggaca

SEQ ID NO: 137981 - DNA, 25 bp, Saccharomyces pastorianus
atgagccttctgcaggtttctcgaa

SEQ ID NO: 137982 - DNA, 25 bp, Saccharomyces pastorianus
gcaaactcaaatggtgattcccgca

SEQ ID NO: 137983 - DNA, 25 bp, Saccharomyces pastorianus
cctcctacaccatgttttttggcaa

SEQ ID NO: 137984 - DNA, 25 bp, Saccharomyces pastorianus
gttcctgataatgaggcctcctaca

SEQ ID NO: 137985 - DNA, 25 bp, Saccharomyces pastorianus
tttctcgaaggatgccaaaccatgg

SEQ ID NO: 137986 - DNA, 25 bp, Saccharomyces pastorianus
ggtactggtacatatgccgccatta

SEQ ID NO: 137987 - DNA, 25 bp, Saccharomyces pastorianus
gaacaccattcccatggagtgctga

SEQ ID NO: 137988 - DNA, 25 bp, Saccharomyces pastorianus
ctttctttggtggatctgcttggag

SEQ ID NO: 137989 - DNA, 25 bp, Saccharomyces pastorianus
tctgcatgtgtttgctcctggccaa

SEQ ID NO: 137990 - DNA, 25 bp, Saccharomyces pastorianus
gtcacaacgttgatggctttcgtat

SEQ ID NO: 137991 - DNA, 25 bp, Saccharomyces pastorianus
ggagacctccaaagggtttcgatga

SEQ ID NO: 137992 - DNA, 25 bp, Saccharomyces pastorianus
ggaccacgaattcacgagtaccata

SEQ ID NO: 137993 - DNA, 25 bp, Saccharomyces pastorianus
gatgctcctatcactgatcctacag

SEQ ID NO: 137994 - DNA, 25 bp, Saccharomyces pastorianus
gatcctacagttccttaccaaaaag

SEQ ID NO: 137995 - DNA, 25 bp, Saccharomyces pastorianus
tgggctattggctacgtcacaacgt

SEQ ID NO: 137996 - DNA, 25 bp, Saccharomyces pastorianus
aactggtgagttctttctgcatgtg

SEQ ID NO: 137997 - DNA, 25 bp, Saccharomyces pastorianus
aaggttgagggcctacccgatgctc

SEQ ID NO: 137998 - DNA, 25 bp, Saccharomyces pastorianus
atttatgactcctcagtgggctatt

SEQ ID NO: 137999 - DNA, 25 bp, Saccharomyces pastorianus
tcggcaattaatttctactacggtt

SEQ ID NO: 138000 - DNA, 25 bp, Saccharomyces pastorianus
cagcttctagaagggatggtgatta

SEQ ID NO: 138001 - DNA, 25 bp, Saccharomyces pastorianus
agatgtggatggacggtgtattacc

SEQ ID NO: 138002 - DNA, 25 bp, Saccharomyces pastorianus
ggacggtgtattaccttggaaatct

SEQ ID NO: 138003 - DNA, 25 bp, Saccharomyces pastorianus
ttactccttttattacttcggcaat

SEQ ID NO: 138004 - DNA, 25 bp, Saccharomyces pastorianus
ttcatgggttgcttagcattttcat

SEQ ID NO: 138005 - DNA, 25 bp, Saccharomyces pastorianus
catatttttacgtcttcttctttgt

SEQ ID NO: 138006 - DNA, 25 bp, Saccharomyces pastorianus
tgttccagaaacaaaaggtctaact

SEQ ID NO: 138007 - DNA, 25 bp, Saccharomyces pastorianus
gaaatctgaatcctgggtaccagct

SEQ ID NO: 138008 - DNA, 25 bp, Saccharomyces pastorianus
gcattttcatatttttacgtcttct

SEQ ID NO: 138009 - DNA, 25 bp, Saccharomyces pastorianus
gaatcctgggtaccagcttctagaa

SEQ ID NO: 138010 - DNA, 25 bp, Saccharomyces pastorianus
gaagttgttgttccagaaaagcctg

SEQ ID NO: 138011 - DNA, 25 bp, Saccharomyces pastorianus
agcctatgctactgtttctatcatg

SEQ ID NO: 138012 - DNA, 25 bp, Saccharomyces pastorianus
gacggctgcccttcaatagaaaatt

SEQ ID NO: 138013 - DNA, 25 bp, Saccharomyces pastorianus
atgtgtttatgtatggctttcggtg

SEQ ID NO: 138014 - DNA, 25 bp, Saccharomyces pastorianus
aagaaccgattttcgaagaggcaga

SEQ ID NO: 138015 - DNA, 25 bp, Saccharomyces pastorianus
gaaaagcctgcttcagcctatgcta

SEQ ID NO: 138016 - DNA, 25 bp, Saccharomyces pastorianus
acaaggacttttccgagtataatgg

SEQ ID NO: 138017 - DNA, 25 bp, Saccharomyces pastorianus
gactgatcgtaaaaccaacttacca

SEQ ID NO: 138018 - DNA, 25 bp, Saccharomyces pastorianus
gctttcggtggatttatgtccggtt

SEQ ID NO: 138019 - DNA, 25 bp, Saccharomyces pastorianus
acatctgtcagtacccacagtggag

SEQ ID NO: 138020 - DNA, 25 bp, Saccharomyces pastorianus
agaagatgacggctgcccttcaata

SEQ ID NO: 138021 - DNA, 25 bp, Saccharomyces pastorianus
gacagtcatgattaactctctgcag

SEQ ID NO: 138022 - DNA, 25 bp, Saccharomyces pastorianus
agattgatcttctcgttgctggtgt

SEQ ID NO: 138023 - DNA, 25 bp, Saccharomyces pastorianus
gatgtcttttacttggagcagccac

SEQ ID NO: 138024 - DNA, 25 bp, Saccharomyces pastorianus
gtgcatggttatttacgcctccgtt

SEQ ID NO: 138025 - DNA, 25 bp, Saccharomyces pastorianus
aagttgggccgtcgtagatgtcttt

SEQ ID NO: 138026 - DNA, 25 bp, Saccharomyces pastorianus
tcctgcttcttttcactttattctg

SEQ ID NO: 138027 - DNA, 25 bp, Saccharomyces pastorianus
gcttagtgttgacgatcctgctgtg

SEQ ID NO: 138028 - DNA, 25 bp, Saccharomyces pastorianus
tttacattttctgcttttcctgcac

SEQ ID NO: 138029 - DNA, 25 bp, Saccharomyces pastorianus
ctccgttggcgtcacaagactatat

SEQ ID NO: 138030 - DNA, 25 bp, Saccharomyces pastorianus
gagcagccaccatgacggcgtgcat

SEQ ID NO: 138031 - DNA, 25 bp, Saccharomyces pastorianus
attgtgaattttgcttcctgcttct

SEQ ID NO: 138032 - DNA, 25 bp, Saccharomyces pastorianus
caactgttactcctgccgaaatgaa

SEQ ID NO: 138033 - DNA, 25 bp, Saccharomyces pastorianus
gaggttttgctctcagcaactgtta

SEQ ID NO: 138034 - DNA, 25 bp, Saccharomyces pastorianus
ggttcagatttattgggtcctctat

SEQ ID NO: 138035 - DNA, 25 bp, Saccharomyces pastorianus
ccgaaatgaacggattaggcgataa

SEQ ID NO: 138036 - DNA, 25 bp, Saccharomyces pastorianus
gatgaaatcaaatccgttggacgat

SEQ ID NO: 138037 - DNA, 25 bp, Saccharomyces pastorianus
gggtcctctatatggttatcaaacg

SEQ ID NO: 138038 - DNA, 25 bp, Saccharomyces pastorianus
acgattttggatgaacccgagagca

SEQ ID NO: 138039 - DNA, 25 bp, Saccharomyces pastorianus
attgctgacctactgatgatgaaat

SEQ ID NO: 138040 - DNA, 25 bp, Saccharomyces pastorianus
gggacagattaagccagggttcatt

SEQ ID NO: 138041 - DNA, 25 bp, Saccharomyces pastorianus
aagttcaatcggcacaagaggtttt

SEQ ID NO: 138042 - DNA, 25 bp, Saccharomyces pastorianus
aagccagggttcattgctgacctac

SEQ ID NO: 138043 - DNA, 25 bp, Saccharomyces pastorianus
gcagagattcgtcagggatccttga

SEQ ID NO: 138044 - DNA, 25 bp, Saccharomyces pastorianus
tgctagtgcctttgacagctgttca

SEQ ID NO: 138045 - DNA, 25 bp, Saccharomyces pastorianus
ggttgctacttgactccaacactag

SEQ ID NO: 138046 - DNA, 25 bp, Saccharomyces pastorianus
ggcgatctgagatctggtgccctac

SEQ ID NO: 138047 - DNA, 25 bp, Saccharomyces pastorianus
agctgttcatgccactttggtcaag

SEQ ID NO: 138048 - DNA, 25 bp, Saccharomyces pastorianus
gaacgtaccgcagaacttatggcag

SEQ ID NO: 138049 - DNA, 25 bp, Saccharomyces pastorianus
gacatgccatttcccaaactggtgg

SEQ ID NO: 138050 - DNA, 25 bp, Saccharomyces pastorianus
ggatccttgaatggtcccagattaa

SEQ ID NO: 138051 - DNA, 25 bp, Saccharomyces pastorianus
gtggcctctccaactgacaaaatat

SEQ ID NO: 138052 - DNA, 25 bp, Saccharomyces pastorianus
aatttagtgcattcttgggacctga

SEQ ID NO: 138053 - DNA, 25 bp, Saccharomyces pastorianus
gatggtgttcccgaatgctacaaag

SEQ ID NO: 138054 - DNA, 25 bp, Saccharomyces pastorianus
agaagccatttctagcactataagt

SEQ ID NO: 138055 - DNA, 25 bp, Saccharomyces pastorianus
atcgcagtctttgggctctgtcgaa

SEQ ID NO: 138056 - DNA, 25 bp, Saccharomyces pastorianus
gattccttatcgcaggcaagcatta

SEQ ID NO: 138057 - DNA, 25 bp, Saccharomyces pastorianus
caagtggcatagttgctttggctaa

SEQ ID NO: 138058 - DNA, 25 bp, Saccharomyces pastorianus
aatcagtgcgcaaatattctctcgg

SEQ ID NO: 138059 - DNA, 25 bp, Saccharomyces pastorianus
ggaggcatacgttaaatcgcagtct

SEQ ID NO: 138060 - DNA, 25 bp, Saccharomyces pastorianus
gccaattgctctacaaggcttcaag

SEQ ID NO: 138061 - DNA, 25 bp, Saccharomyces pastorianus
gtctttctttctttgccgcatatca

SEQ ID NO: 138062 - DNA, 25 bp, Saccharomyces pastorianus
gaataatcctgctacgcagccaatt

SEQ ID NO: 138063 - DNA, 25 bp, Saccharomyces pastorianus
tatttttaaatacccgttgttgcag

SEQ ID NO: 138064 - DNA, 25 bp, Saccharomyces pastorianus
aaccattttgatcttgctgtctaat

SEQ ID NO: 138065 - DNA, 25 bp, Saccharomyces pastorianus
tattctcaacagcataaccagcatt

SEQ ID NO: 138066 - DNA, 25 bp, Saccharomyces pastorianus
atagtgactggaataggctcatcat

SEQ ID NO: 138067 - DNA, 25 bp, Saccharomyces pastorianus
agagacgtgtcagccctactagagg

SEQ ID NO: 138068 - DNA, 25 bp, Saccharomyces pastorianus
gttcagaaacattacactctccatg

SEQ ID NO: 138069 - DNA, 25 bp, Saccharomyces pastorianus
gaagactcttccaaagctataacag

SEQ ID NO: 138070 - DNA, 25 bp, Saccharomyces pastorianus
ggctcatcatattttgacactacat

SEQ ID NO: 138071 - DNA, 25 bp, Saccharomyces pastorianus
tgaaatctttattcttgcttctaag

SEQ ID NO: 138072 - DNA, 25 bp, Saccharomyces pastorianus
tgacactacattcatgggctcaaat

SEQ ID NO: 138073 - DNA, 25 bp, Saccharomyces pastorianus
gaacttcaagtctaaaaggcgcctt

SEQ ID NO: 138074 - DNA, 25 bp, Saccharomyces pastorianus
ttccaaattccggtcctgtcaagaa

SEQ ID NO: 138075 - DNA, 25 bp, Saccharomyces pastorianus
gagatatctcgcactttttccaaat

SEQ ID NO: 138076 - DNA, 25 bp, Saccharomyces pastorianus
aggaaatacacactcaactggatga

SEQ ID NO: 138077 - DNA, 25 bp, Saccharomyces pastorianus
atacggatgatttagaactgcattc

SEQ ID NO: 138078 - DNA, 25 bp, Saccharomyces pastorianus
ggacgaatatcctggtgtagttttt

SEQ ID NO: 138079 - DNA, 25 bp, Saccharomyces pastorianus
gtctcagctctatacgatttccata

SEQ ID NO: 138080 - DNA, 25 bp, Saccharomyces pastorianus
gtttatcagtttgtctcagctctat

SEQ ID NO: 138081 - DNA, 25 bp, Saccharomyces pastorianus
gtagtttttgattccgcagcattct

SEQ ID NO: 138082 - DNA, 25 bp, Saccharomyces pastorianus
ttaacttggataaccaccaatttgg

SEQ ID NO: 138083 - DNA, 25 bp, Saccharomyces pastorianus
agaactgcattcagtgtttatcagt

SEQ ID NO: 138084 - DNA, 25 bp, Saccharomyces pastorianus
tatacgatttccatatggcgtttga

SEQ ID NO: 138085 - DNA, 25 bp, Saccharomyces pastorianus
gtgaggtatatctccgtactagaaa

SEQ ID NO: 138086 - DNA, 25 bp, Saccharomyces pastorianus
aatggtcacgatttattaacttgga

SEQ ID NO: 138087 - DNA, 25 bp, Saccharomyces pastorianus
tccacaaggtcatcatttacacgag

SEQ ID NO: 138088 - DNA, 25 bp, Saccharomyces pastorianus
gtccacaaggtcatcatttacacga

SEQ ID NO: 138089 - DNA, 25 bp, Saccharomyces pastorianus
ggcgtccacaaggtcatcatttaca

SEQ ID NO: 138090 - DNA, 25 bp, Saccharomyces pastorianus
gctgtctcagctactatgtgtacga

SEQ ID NO: 138091 - DNA, 25 bp, Saccharomyces pastorianus
ggctgtctcagctactatgtgtacg

SEQ ID NO: 138092 - DNA, 25 bp, Saccharomyces pastorianus
gtaggctgtctcagctactatgtgt

SEQ ID NO: 138093 - DNA, 25 bp, Saccharomyces pastorianus
gcgtccacaaggtcatcatttacac

SEQ ID NO: 138094 - DNA, 25 bp, Saccharomyces pastorianus
gggcgtccacaaggtcatcatttac

SEQ ID NO: 138095 - DNA, 25 bp, Saccharomyces pastorianus
ctgtctcagctactatgtgtacgaa

SEQ ID NO: 138096 - DNA, 25 bp, Saccharomyces pastorianus
aggctgtctcagctactatgtgtac

SEQ ID NO: 138097 - DNA, 25 bp, Saccharomyces pastorianus
acaaggtcatcatttacacgagctc

SEQ ID NO: 138098 - DNA, 25 bp, Saccharomyces pastorianus
tggcattagcttcttcttctacaga

SEQ ID NO: 138099 - DNA, 25 bp, Saccharomyces pastorianus
aaacctccacttcctattaaggcag

SEQ ID NO: 138100 - DNA, 25 bp, Saccharomyces pastorianus
agtgaactaggctgcttaacccttc

SEQ ID NO: 138101 - DNA, 25 bp, Saccharomyces pastorianus
acaaagatctgttacgtctccaacg

SEQ ID NO: 138102 - DNA, 25 bp, Saccharomyces pastorianus
gcagaaatgtttcatccccatcatt

SEQ ID NO: 138103 - DNA, 25 bp, Saccharomyces pastorianus
agatacattatcctcaccgacgaag

SEQ ID NO: 138104 - DNA, 25 bp, Saccharomyces pastorianus
gaagtcgaagccctagtccacaaag

SEQ ID NO: 138105 - DNA, 25 bp, Saccharomyces pastorianus
acaactgtctctaacttccaattct

SEQ ID NO: 138106 - DNA, 25 bp, Saccharomyces pastorianus
gtaacagcagcaccgatttaacgat

SEQ ID NO: 138107 - DNA, 25 bp, Saccharomyces pastorianus
taaccctcgtccaaaacgcgaagat

SEQ ID NO: 138108 - DNA, 25 bp, Saccharomyces pastorianus
agcagactcgcttccattgagtaac

SEQ ID NO: 138109 - DNA, 25 bp, Saccharomyces pastorianus
gattcgacttatttgccagcatctg

SEQ ID NO: 138110 - DNA, 25 bp, Saccharomyces pastorianus
tttagatcttactcagttgatccta

SEQ ID NO: 138111 - DNA, 25 bp, Saccharomyces pastorianus
ttggcgataagcaagtttatgactt

SEQ ID NO: 138112 - DNA, 25 bp, Saccharomyces pastorianus
actctggtcacgcaatttatgtctt

SEQ ID NO: 138113 - DNA, 25 bp, Saccharomyces pastorianus
ccagcatctgatgaaattggcgata

SEQ ID NO: 138114 - DNA, 25 bp, Saccharomyces pastorianus
gacttgcttattaatgccctcatgg

SEQ ID NO: 138115 - DNA, 25 bp, Saccharomyces pastorianus
aatgccctcatggatcgattggtaa

SEQ ID NO: 138116 - DNA, 25 bp, Saccharomyces pastorianus
gttgatcctaactctggtcacgcaa

SEQ ID NO: 138117 - DNA, 25 bp, Saccharomyces pastorianus
ctttgattcgacttatttgccagca

SEQ ID NO: 138118 - DNA, 25 bp, Saccharomyces pastorianus
cacgcaatttatgtctttgattcga

SEQ ID NO: 138119 - DNA, 25 bp, Saccharomyces pastorianus
attgccacaggcaccatattcactg

SEQ ID NO: 138120 - DNA, 25 bp, Saccharomyces pastorianus
cccaggaccaggtggtcaagccgct

SEQ ID NO: 138121 - DNA, 25 bp, Saccharomyces pastorianus
agacgttactccagtcccatcagac

SEQ ID NO: 138122 - DNA, 25 bp, Saccharomyces pastorianus
gtatcgaagacgttactccagtccc

SEQ ID NO: 138123 - DNA, 25 bp, Saccharomyces pastorianus
tggtaccagaaccaagaccccagga

SEQ ID NO: 138124 - DNA, 25 bp, Saccharomyces pastorianus
gaccccaggaccaggtggtcaagcc

SEQ ID NO: 138125 - DNA, 25 bp, Saccharomyces pastorianus
aaggccgacagagacgaatcctctc

SEQ ID NO: 138126 - DNA, 25 bp, Saccharomyces pastorianus
gaagacgttactccagtcccatcag

SEQ ID NO: 138127 - DNA, 25 bp, Saccharomyces pastorianus
atcgaagacgttactccagtcccat

SEQ ID NO: 138128 - DNA, 25 bp, Saccharomyces pastorianus
aaagtcaaggccgacagagacgaat

SEQ ID NO: 138129 - DNA, 25 bp, Saccharomyces pastorianus
cgacagagacgaatcctctccatac

SEQ ID NO: 138130 - DNA, 25 bp, Saccharomyces pastorianus
tggtggtaccagaaccaagacccca

SEQ ID NO: 138131 - DNA, 25 bp, Saccharomyces pastorianus
gctaagaagcaaaacagaccattgc

SEQ ID NO: 138132 - DNA, 25 bp, Saccharomyces pastorianus
taagaagcaaaacagaccattgcca

SEQ ID NO: 138133 - DNA, 25 bp, Saccharomyces pastorianus
ggctaagaagcaaaacagaccattg

SEQ ID NO: 138134 - DNA, 25 bp, Saccharomyces pastorianus
aggctaagaagcaaaacagaccatt

SEQ ID NO: 138135 - DNA, 25 bp, Saccharomyces pastorianus
ctaagaagcaaaacagaccattgcc

SEQ ID NO: 138136 - DNA, 25 bp, Saccharomyces pastorianus
agaagcaaaacagaccattgccaca

SEQ ID NO: 138137 - DNA, 25 bp, Saccharomyces pastorianus
aagaagcaaaacagaccattgccac

SEQ ID NO: 138138 - DNA, 25 bp, Saccharomyces pastorianus
gcaaaacagaccattgccacaatgg

SEQ ID NO: 138139 - DNA, 25 bp, Saccharomyces pastorianus
aagcaaaacagaccattgccacaat

SEQ ID NO: 138140 - DNA, 25 bp, Saccharomyces pastorianus
gaagcaaaacagaccattgccacaa

SEQ ID NO: 138141 - DNA, 25 bp, Saccharomyces pastorianus
agcaaaacagaccattgccacaatg

SEQ ID NO: 138142 - DNA, 25 bp, Saccharomyces pastorianus
acgcgtcactaagaataaggaaaat

SEQ ID NO: 138143 - DNA, 25 bp, Saccharomyces pastorianus
cgcgaaaacgcgtcactaagaataa

SEQ ID NO: 138144 - DNA, 25 bp, Saccharomyces pastorianus
acttgaaactgacgcgcgaaaacgc

SEQ ID NO: 138145 - DNA, 25 bp, Saccharomyces pastorianus
aactgacgcgcgaaaacgcgtcact

SEQ ID NO: 138146 - DNA, 25 bp, Saccharomyces pastorianus
aacttgaaactgacgcgcgaaaacg

SEQ ID NO: 138147 - DNA, 25 bp, Saccharomyces pastorianus
gcgtcactaagaataaggaaaatgc

SEQ ID NO: 138148 - DNA, 25 bp, Saccharomyces pastorianus
gcgaaaacgcgtcactaagaataag

SEQ ID NO: 138149 - DNA, 25 bp, Saccharomyces pastorianus
gcgcgaaaacgcgtcactaagaata

SEQ ID NO: 138150 - DNA, 25 bp, Saccharomyces pastorianus
gacgcgcgaaaacgcgtcactaaga

SEQ ID NO: 138151 - DNA, 25 bp, Saccharomyces pastorianus
gaaaacgcgtcactaagaataagga

SEQ ID NO: 138152 - DNA, 25 bp, Saccharomyces pastorianus
cgaaaacgcgtcactaagaataagg

SEQ ID NO: 138153 - DNA, 25 bp, Saccharomyces pastorianus
tatattataccttctatcaccgaaa

SEQ ID NO: 138154 - DNA, 25 bp, Saccharomyces pastorianus
tatctccataatagtttgcgcgtac

SEQ ID NO: 138155 - DNA, 25 bp, Saccharomyces pastorianus
ggcatatattataccttctatcacc

SEQ ID NO: 138156 - DNA, 25 bp, Saccharomyces pastorianus
gaatatctccataatagtttgcgcg

SEQ ID NO: 138157 - DNA, 25 bp, Saccharomyces pastorianus
gtcatacacctcacaggcatatatt

SEQ ID NO: 138158 - DNA, 25 bp, Saccharomyces pastorianus
agggtcatacacctcacaggcatat

SEQ ID NO: 138159 - DNA, 25 bp, Saccharomyces pastorianus
atcaccgaaaaagcttcttcttctt

SEQ ID NO: 138160 - DNA, 25 bp, Saccharomyces pastorianus
ataccttctatcaccgaaaaagctt

SEQ ID NO: 138161 - DNA, 25 bp, Saccharomyces pastorianus
ccataatagtttgcgcgtactgtcc

SEQ ID NO: 138162 - DNA, 25 bp, Saccharomyces pastorianus
gggtacagggtcatacacctcacag

SEQ ID NO: 138163 - DNA, 25 bp, Saccharomyces pastorianus
cttcttccttgaatatctccataat

SEQ ID NO: 138164 - DNA, 25 bp, Saccharomyces pastorianus
aacagatgtcatcttgcctggtaag

SEQ ID NO: 138165 - DNA, 25 bp, Saccharomyces pastorianus
gcataccgtagaacctcctgaagat

SEQ ID NO: 138166 - DNA, 25 bp, Saccharomyces pastorianus
gaaactgagagtgcgcttacattga

SEQ ID NO: 138167 - DNA, 25 bp, Saccharomyces pastorianus
tggtacaggccttgtcgtgcgagaa

SEQ ID NO: 138168 - DNA, 25 bp, Saccharomyces pastorianus
gaccctaaaaggaccatctggctgt

SEQ ID NO: 138169 - DNA, 25 bp, Saccharomyces pastorianus
gtaaggatgctatcaccactcaaat

SEQ ID NO: 138170 - DNA, 25 bp, Saccharomyces pastorianus
agctgactagtcacacatgggccga

SEQ ID NO: 138171 - DNA, 25 bp, Saccharomyces pastorianus
ggcgccaattcttttgacgcaaaac

SEQ ID NO: 138172 - DNA, 25 bp, Saccharomyces pastorianus
gacttggatatgtggcttcatcagt

SEQ ID NO: 138173 - DNA, 25 bp, Saccharomyces pastorianus
tagctcactaacttctacggaaagg

SEQ ID NO: 138174 - DNA, 25 bp, Saccharomyces pastorianus
ggaaagggatactccgccaagcaca

SEQ ID NO: 138175 - DNA, 25 bp, Saccharomyces pastorianus
aatgaattttttgactaacgagcta

SEQ ID NO: 138176 - DNA, 25 bp, Saccharomyces pastorianus
ggtcaatccgaagactgtacagtcg

SEQ ID NO: 138177 - DNA, 25 bp, Saccharomyces pastorianus
aggagtcatattttcgctactaacg

SEQ ID NO: 138178 - DNA, 25 bp, Saccharomyces pastorianus
ggaaatctctgaccaaaagccaatt

SEQ ID NO: 138179 - DNA, 25 bp, Saccharomyces pastorianus
gtatgctatcgaaacctgaaacttt

SEQ ID NO: 138180 - DNA, 25 bp, Saccharomyces pastorianus
ggttcagaaattgccatatcatcat

SEQ ID NO: 138181 - DNA, 25 bp, Saccharomyces pastorianus
atcatcattgggttataggagtcat

SEQ ID NO: 138182 - DNA, 25 bp, Saccharomyces pastorianus
atcaggtcgcagatagaccatttca

SEQ ID NO: 138183 - DNA, 25 bp, Saccharomyces pastorianus
cattcttggtgggtttggtcaatcc

SEQ ID NO: 138184 - DNA, 25 bp, Saccharomyces pastorianus
agtcgatgacccagagagccattca

SEQ ID NO: 138185 - DNA, 25 bp, Saccharomyces pastorianus
gagccattcagtccgcagaatcaat

SEQ ID NO: 138186 - DNA, 25 bp, Saccharomyces pastorianus
aacgatcacattgcaaggacttctc

SEQ ID NO: 138187 - DNA, 25 bp, Saccharomyces pastorianus
acttgcctgctatttggttgctaaa

SEQ ID NO: 138188 - DNA, 25 bp, Saccharomyces pastorianus
aactgttcatgttgggctagtggat

SEQ ID NO: 138189 - DNA, 25 bp, Saccharomyces pastorianus
atctctattctactttccacacttt

SEQ ID NO: 138190 - DNA, 25 bp, Saccharomyces pastorianus
aatgtcgtctctttcatatccgatg

SEQ ID NO: 138191 - DNA, 25 bp, Saccharomyces pastorianus
acgatttattggctgcaattccaga

SEQ ID NO: 138192 - DNA, 25 bp, Saccharomyces pastorianus
tgtttgaattcgaaatgcctactga

SEQ ID NO: 138193 - DNA, 25 bp, Saccharomyces pastorianus
atatccaaccaatgccaactgttca

SEQ ID NO: 138194 - DNA, 25 bp, Saccharomyces pastorianus
attgggtactatgacttgcctgcta

SEQ ID NO: 138195 - DNA, 25 bp, Saccharomyces pastorianus
gtttctgctgatactgttaacgatt

SEQ ID NO: 138196 - DNA, 25 bp, Saccharomyces pastorianus
atccgatgccactccattcaatgga

SEQ ID NO: 138197 - DNA, 25 bp, Saccharomyces pastorianus
agttctaacggtactggcagcgcca

SEQ ID NO: 138198 - DNA, 25 bp, Saccharomyces pastorianus
ggacctcagtcgtaccaaaagttgg

SEQ ID NO: 138199 - DNA, 25 bp, Saccharomyces pastorianus
gtaagaacgctccactagcagacta

SEQ ID NO: 138200 - DNA, 25 bp, Saccharomyces pastorianus
atgttggttttacaggctcctacgt

SEQ ID NO: 138201 - DNA, 25 bp, Saccharomyces pastorianus
tgattggaaccgtcttgcctactat

SEQ ID NO: 138202 - DNA, 25 bp, Saccharomyces pastorianus
gaagctaccgttttggcagatggca

SEQ ID NO: 138203 - DNA, 25 bp, Saccharomyces pastorianus
gaaatgctttgtcctacgctagttc

SEQ ID NO: 138204 - DNA, 25 bp, Saccharomyces pastorianus
tttatgttgcacacagtcgctgcca

SEQ ID NO: 138205 - DNA, 25 bp, Saccharomyces pastorianus
tgaagcttccccttgtttaggaaat

SEQ ID NO: 138206 - DNA, 25 bp, Saccharomyces pastorianus
tgcctactatgagtccagttccaaa

SEQ ID NO: 138207 - DNA, 25 bp, Saccharomyces pastorianus
gcagactatttatccgttcatttcc

SEQ ID NO: 138208 - DNA, 25 bp, Saccharomyces pastorianus
gttcttacagtattggcaaccacat

SEQ ID NO: 138209 - DNA, 25 bp, Saccharomyces pastorianus
taaaacaaaacatctagccgcgccc

SEQ ID NO: 138210 - DNA, 25 bp, Saccharomyces pastorianus
ttgtttttggaatcttgtgccccgt

SEQ ID NO: 138211 - DNA, 25 bp, Saccharomyces pastorianus
aaatgagtgtgcctgtccaaccttg

SEQ ID NO: 138212 - DNA, 25 bp, Saccharomyces pastorianus
gaagtcctccaagagattcgcgtca

SEQ ID NO: 138213 - DNA, 25 bp, Saccharomyces pastorianus
ttcgcgtcatgcagaatttcagtga

SEQ ID NO: 138214 - DNA, 25 bp, Saccharomyces pastorianus
attggaattccacgacttgcaagaa

SEQ ID NO: 138215 - DNA, 25 bp, Saccharomyces pastorianus
tgccgtcgtctatcctaaacgtgaa

SEQ ID NO: 138216 - DNA, 25 bp, Saccharomyces pastorianus
agccgcgcccttcgagaacgatgag

SEQ ID NO: 138217 - DNA, 25 bp, Saccharomyces pastorianus
gaatcttttagcctggtggttctta

SEQ ID NO: 138218 - DNA, 25 bp, Saccharomyces pastorianus
aaggtagcccacgatgtgctggagt

SEQ ID NO: 138219 - DNA, 25 bp, Saccharomyces pastorianus
tacgacgaacacattggtagtcaat

SEQ ID NO: 138220 - DNA, 25 bp, Saccharomyces pastorianus
tccggtactttctacaacttgtacg

SEQ ID NO: 138221 - DNA, 25 bp, Saccharomyces pastorianus
tttgtccggtactttctacaacttg

SEQ ID NO: 138222 - DNA, 25 bp, Saccharomyces pastorianus
gtacgacgaacacattggtagtcaa

SEQ ID NO: 138223 - DNA, 25 bp, Saccharomyces pastorianus
cttgtacgacgaacacattggtagt

SEQ ID NO: 138224 - DNA, 25 bp, Saccharomyces pastorianus
acttgtacgacgaacacattggtag

SEQ ID NO: 138225 - DNA, 25 bp, Saccharomyces pastorianus
ttgtacgacgaacacattggtagtc

SEQ ID NO: 138226 - DNA, 25 bp, Saccharomyces pastorianus
ttgtccggtactttctacaacttgt

SEQ ID NO: 138227 - DNA, 25 bp, Saccharomyces pastorianus
gatgtcttctaccaatgtttgtccg

SEQ ID NO: 138228 - DNA, 25 bp, Saccharomyces pastorianus
tgtacgacgaacacattggtagtca

SEQ ID NO: 138229 - DNA, 25 bp, Saccharomyces pastorianus
tgtccggtactttctacaacttgta

SEQ ID NO: 138230 - DNA, 25 bp, Saccharomyces pastorianus
agacggtaacttggctattggtgac

SEQ ID NO: 138231 - DNA, 25 bp, Saccharomyces pastorianus
gctggttggtctataactccagacg

SEQ ID NO: 138232 - DNA, 25 bp, Saccharomyces pastorianus
gttggtctataactccagacggtaa

SEQ ID NO: 138233 - DNA, 25 bp, Saccharomyces pastorianus
aactccagacggtaacttggctatt

SEQ ID NO: 138234 - DNA, 25 bp, Saccharomyces pastorianus
tggttggtctataactccagacggt

SEQ ID NO: 138235 - DNA, 25 bp, Saccharomyces pastorianus
gtaacttggctattggtgacaatga

SEQ ID NO: 138236 - DNA, 25 bp, Saccharomyces pastorianus
cggtaacttggctattggtgacaat

SEQ ID NO: 138237 - DNA, 25 bp, Saccharomyces pastorianus
cagacggtaacttggctattggtga

SEQ ID NO: 138238 - DNA, 25 bp, Saccharomyces pastorianus
ggtctataactccagacggtaactt

SEQ ID NO: 138239 - DNA, 25 bp, Saccharomyces pastorianus
ggctattggtgacaatgatgtcttc

SEQ ID NO: 138240 - DNA, 25 bp, Saccharomyces pastorianus
tataactccagacggtaacttggct

SEQ ID NO: 138241 - DNA, 25 bp, Saccharomyces pastorianus
gaaggtgagttttatagtcgctcct

SEQ ID NO: 138242 - DNA, 25 bp, Saccharomyces pastorianus
ttacttggaaaaataaagcgacaat

SEQ ID NO: 138243 - DNA, 25 bp, Saccharomyces pastorianus
aggtgagttttatagtcgctcctac

SEQ ID NO: 138244 - DNA, 25 bp, Saccharomyces pastorianus
gttttatagtcgctcctacagtgat

SEQ ID NO: 138245 - DNA, 25 bp, Saccharomyces pastorianus
ttttatagtcgctcctacagtgatg

SEQ ID NO: 138246 - DNA, 25 bp, Saccharomyces pastorianus
tgagttttatagtcgctcctacagt

SEQ ID NO: 138247 - DNA, 25 bp, Saccharomyces pastorianus
aaggtgagttttatagtcgctccta

SEQ ID NO: 138248 - DNA, 25 bp, Saccharomyces pastorianus
aagcgacaatgaaggtgagttttat

SEQ ID NO: 138249 - DNA, 25 bp, Saccharomyces pastorianus
ggtgagttttatagtcgctcctaca

SEQ ID NO: 138250 - DNA, 25 bp, Saccharomyces pastorianus
gagttttatagtcgctcctacagtg

SEQ ID NO: 138251 - DNA, 25 bp, Saccharomyces pastorianus
gtgagttttatagtcgctcctacag

SEQ ID NO: 138252 - DNA, 25 bp, Saccharomyces pastorianus
gcattctgaaacgaccgagtctctc

SEQ ID NO: 138253 - DNA, 25 bp, Saccharomyces pastorianus
atgttgaaaattgcatcgctgaaaa

SEQ ID NO: 138254 - DNA, 25 bp, Saccharomyces pastorianus
gaaagttgcattctgaaacgaccga

SEQ ID NO: 138255 - DNA, 25 bp, Saccharomyces pastorianus
ttgcattctgaaacgaccgagtctc

SEQ ID NO: 138256 - DNA, 25 bp, Saccharomyces pastorianus
tgcattctgaaacgaccgagtctct

SEQ ID NO: 138257 - DNA, 25 bp, Saccharomyces pastorianus
attctgaaacgaccgagtctctctt

SEQ ID NO: 138258 - DNA, 25 bp, Saccharomyces pastorianus
aagttgcattctgaaacgaccgagt

SEQ ID NO: 138259 - DNA, 25 bp, Saccharomyces pastorianus
tctgaaacgaccgagtctctcttgc

SEQ ID NO: 138260 - DNA, 25 bp, Saccharomyces pastorianus
agtctctcttgcccgcctaacaaaa

SEQ ID NO: 138261 - DNA, 25 bp, Saccharomyces pastorianus
gttgcattctgaaacgaccgagtct

SEQ ID NO: 138262 - DNA, 25 bp, Saccharomyces pastorianus
gaaacgaccgagtctctcttgcccg

SEQ ID NO: 138263 - DNA, 25 bp, Saccharomyces pastorianus
gcggtgtgctaaatttgaacccgtt

SEQ ID NO: 138264 - DNA, 25 bp, Saccharomyces pastorianus
ggatcgtctttaccgggtccttcag

SEQ ID NO: 138265 - DNA, 25 bp, Saccharomyces pastorianus
taaaagcatacagaactcccaagaa

SEQ ID NO: 138266 - DNA, 25 bp, Saccharomyces pastorianus
tatgctacaccccttcataacaaag

SEQ ID NO: 138267 - DNA, 25 bp, Saccharomyces pastorianus
gagtttacaggtgagtggtttcctc

SEQ ID NO: 138268 - DNA, 25 bp, Saccharomyces pastorianus
gaatagggagtgtttgatccacttt

SEQ ID NO: 138269 - DNA, 25 bp, Saccharomyces pastorianus
ttaccgggtccttcagaaaaacatg

SEQ ID NO: 138270 - DNA, 25 bp, Saccharomyces pastorianus
aaacatgacgatgcaaaaggccagc

SEQ ID NO: 138271 - DNA, 25 bp, Saccharomyces pastorianus
gaactcccaagaacttatcgaccaa

SEQ ID NO: 138272 - DNA, 25 bp, Saccharomyces pastorianus
gatccactttttaggcggtgtgcta

SEQ ID NO: 138273 - DNA, 25 bp, Saccharomyces pastorianus
gaaagttcttcctctacacaaaagc

SEQ ID NO: 138274 - DNA, 25 bp, Saccharomyces pastorianus
ttattgcgatttcccatatgacccg

SEQ ID NO: 138275 - DNA, 25 bp, Saccharomyces pastorianus
gttggtaagcattatcccgttgttg

SEQ ID NO: 138276 - DNA, 25 bp, Saccharomyces pastorianus
gggtggaacccaatgtcaagtatta

SEQ ID NO: 138277 - DNA, 25 bp, Saccharomyces pastorianus
gaacttggctattttcactcaccgt

SEQ ID NO: 138278 - DNA, 25 bp, Saccharomyces pastorianus
agcatcttacgctgttagactcgat

SEQ ID NO: 138279 - DNA, 25 bp, Saccharomyces pastorianus
gccagcgaagagaccattttacgta

SEQ ID NO: 138280 - DNA, 25 bp, Saccharomyces pastorianus
gggtgacgcacctgtacattcaatt

SEQ ID NO: 138281 - DNA, 25 bp, Saccharomyces pastorianus
cctactgctgagacctgacgaaatc

SEQ ID NO: 138282 - DNA, 25 bp, Saccharomyces pastorianus
gtacattcaattggtgtctccctac

SEQ ID NO: 138283 - DNA, 25 bp, Saccharomyces pastorianus
atgccaagggcggattttactacga

SEQ ID NO: 138284 - DNA, 25 bp, Saccharomyces pastorianus
agtgcctatgcatttttgaccgatt

SEQ ID NO: 138285 - DNA, 25 bp, Saccharomyces pastorianus
tacgtatactgctctttcccaaaga

SEQ ID NO: 138286 - DNA, 25 bp, Saccharomyces pastorianus
gattggacttttctaaatgacgttc

SEQ ID NO: 138287 - DNA, 25 bp, Saccharomyces pastorianus
agctacgacgactacactttaaatt

SEQ ID NO: 138288 - DNA, 25 bp, Saccharomyces pastorianus
gacgttcctttcgatcaagacttca

SEQ ID NO: 138289 - DNA, 25 bp, Saccharomyces pastorianus
gtgggaagacccaatatgctttaat

SEQ ID NO: 138290 - DNA, 25 bp, Saccharomyces pastorianus
ccagaagattggaatcggccgcaat

SEQ ID NO: 138291 - DNA, 25 bp, Saccharomyces pastorianus
ggccgcaatggattaacgatacact

SEQ ID NO: 138292 - DNA, 25 bp, Saccharomyces pastorianus
aaactttcccgcaatagctacgacg

SEQ ID NO: 138293 - DNA, 25 bp, Saccharomyces pastorianus
gaagctacaacatcaatggcgagtg

SEQ ID NO: 138294 - DNA, 25 bp, Saccharomyces pastorianus
ggcaaagagttattcctcatacgaa

SEQ ID NO: 138295 - DNA, 25 bp, Saccharomyces pastorianus
gattctgattcttttcacctacgag

SEQ ID NO: 138296 - DNA, 25 bp, Saccharomyces pastorianus
gtaatagcatgattttgggtcccca

SEQ ID NO: 138297 - DNA, 25 bp, Saccharomyces pastorianus
tccatcccggatgagtttggttcat

SEQ ID NO: 138298 - DNA, 25 bp, Saccharomyces pastorianus
ggcatctcatgctcataaatcctga

SEQ ID NO: 138299 - DNA, 25 bp, Saccharomyces pastorianus
tccccaggcagtttcgatgcaagag

SEQ ID NO: 138300 - DNA, 25 bp, Saccharomyces pastorianus
gaaggtatgagttttgtagccgtat

SEQ ID NO: 138301 - DNA, 25 bp, Saccharomyces pastorianus
gatccgaagcgcaaaacccttttga

SEQ ID NO: 138302 - DNA, 25 bp, Saccharomyces pastorianus
tatagtaggcattccccaatatggg

SEQ ID NO: 138303 - DNA, 25 bp, Saccharomyces pastorianus
ggcaaaatcagattccatcccggat

SEQ ID NO: 138304 - DNA, 25 bp, Saccharomyces pastorianus
tgggtccccaaaatcaccttatagt

SEQ ID NO: 138305 - DNA, 25 bp, Saccharomyces pastorianus
tgtagccgtatctcaaccaatgttt

SEQ ID NO: 138306 - DNA, 25 bp, Saccharomyces pastorianus
ttcggtgcagccatatattcttgga

SEQ ID NO: 138307 - DNA, 25 bp, Saccharomyces pastorianus
ttaacccctcatatcatctcaaaga

SEQ ID NO: 138308 - DNA, 25 bp, Saccharomyces pastorianus
acgcaggccttcttggatttgttta

SEQ ID NO: 138309 - DNA, 25 bp, Saccharomyces pastorianus
tatcgccgctaaatattctcctgtt

SEQ ID NO: 138310 - DNA, 25 bp, Saccharomyces pastorianus
gacaacaagatcttggcacacgcca

SEQ ID NO: 138311 - DNA, 25 bp, Saccharomyces pastorianus
aatagccctgaagaatatgcacgtc

SEQ ID NO: 138312 - DNA, 25 bp, Saccharomyces pastorianus
aagctggcttacttggtgttgagag

SEQ ID NO: 138313 - DNA, 25 bp, Saccharomyces pastorianus
gaaccgtacattcattgtgtcgttt

SEQ ID NO: 138314 - DNA, 25 bp, Saccharomyces pastorianus
aagaccgatgttctgtattgtacaa

SEQ ID NO: 138315 - DNA, 25 bp, Saccharomyces pastorianus
gaaatgtctgttcatatcgccgcta

SEQ ID NO: 138316 - DNA, 25 bp, Saccharomyces pastorianus
ggtaatggttctcgcgagcatccta

SEQ ID NO: 138317 - DNA, 25 bp, Saccharomyces pastorianus
actgttactttcatgggtgatctca

SEQ ID NO: 138318 - DNA, 25 bp, Saccharomyces pastorianus
tggaacttaaggacggcacggtctt

SEQ ID NO: 138319 - DNA, 25 bp, Saccharomyces pastorianus
ggtaggcaattatggtgtcccagat

SEQ ID NO: 138320 - DNA, 25 bp, Saccharomyces pastorianus
tgaccgtctggttacgttggaactt

SEQ ID NO: 138321 - DNA, 25 bp, Saccharomyces pastorianus
gtaatagaatccatattgccggttt

SEQ ID NO: 138322 - DNA, 25 bp, Saccharomyces pastorianus
gaatctacgggtgaccgtctggtta

SEQ ID NO: 138323 - DNA, 25 bp, Saccharomyces pastorianus
atcacccctccaatggaatctacgg

SEQ ID NO: 138324 - DNA, 25 bp, Saccharomyces pastorianus
atattgccggtttagttatttctca

SEQ ID NO: 138325 - DNA, 25 bp, Saccharomyces pastorianus
tgtcccagatatgcacttgagagat

SEQ ID NO: 138326 - DNA, 25 bp, Saccharomyces pastorianus
ccgatccatcttatgaaggccagat

SEQ ID NO: 138327 - DNA, 25 bp, Saccharomyces pastorianus
gtgctgagaaatccaccgctggtga

SEQ ID NO: 138328 - DNA, 25 bp, Saccharomyces pastorianus
gatcttagtcatcacttacccattg

SEQ ID NO: 138329 - DNA, 25 bp, Saccharomyces pastorianus
cggacaccaaccaatcgttttcaag

SEQ ID NO: 138330 - DNA, 25 bp, Saccharomyces pastorianus
gctttcatttgacttgtggtttcta

SEQ ID NO: 138331 - DNA, 25 bp, Saccharomyces pastorianus
gaacatattgaccaccttgagggca

SEQ ID NO: 138332 - DNA, 25 bp, Saccharomyces pastorianus
ggatcgtgcaattatcttgcctagt

SEQ ID NO: 138333 - DNA, 25 bp, Saccharomyces pastorianus
gggctatcgctaggttatccggaca

SEQ ID NO: 138334 - DNA, 25 bp, Saccharomyces pastorianus
gcgcttacggtacagttgggctatc

SEQ ID NO: 138335 - DNA, 25 bp, Saccharomyces pastorianus
tagaggtctaccatactcactggat

SEQ ID NO: 138336 - DNA, 25 bp, Saccharomyces pastorianus
gacaggctagaaccaatacagaaga

SEQ ID NO: 138337 - DNA, 25 bp, Saccharomyces pastorianus
tcggtgcccatttaaggaaacagct

SEQ ID NO: 138338 - DNA, 25 bp, Saccharomyces pastorianus
acaaaatcctttatcggtgcccatt

SEQ ID NO: 138339 - DNA, 25 bp, Saccharomyces pastorianus
gggagctcttaagcgtaagaccaca

SEQ ID NO: 138340 - DNA, 25 bp, Saccharomyces pastorianus
aagcctcttccgactctaatgagaa

SEQ ID NO: 138341 - DNA, 25 bp, Saccharomyces pastorianus
aatggtcttaacaactatcctactt

SEQ ID NO: 138342 - DNA, 25 bp, Saccharomyces pastorianus
atttcgataccgattatgacctaga

SEQ ID NO: 138343 - DNA, 25 bp, Saccharomyces pastorianus
gtattcttcattacgcagagtctat

SEQ ID NO: 138344 - DNA, 25 bp, Saccharomyces pastorianus
aaatgagctcgcaaggacgcctgat

SEQ ID NO: 138345 - DNA, 25 bp, Saccharomyces pastorianus
gacctagatcctcgtcatgatttat

SEQ ID NO: 138346 - DNA, 25 bp, Saccharomyces pastorianus
gacgtaactcaaacttccttggatt

SEQ ID NO: 138347 - DNA, 25 bp, Saccharomyces pastorianus
gacagcgatcgcaattatcctgata

SEQ ID NO: 138348 - DNA, 25 bp, Saccharomyces pastorianus
ggaacgttccaggaccatcgatatg

SEQ ID NO: 138349 - DNA, 25 bp, Saccharomyces pastorianus
aacgtatctatcatggcaaccaact

SEQ ID NO: 138350 - DNA, 25 bp, Saccharomyces pastorianus
tttgaacatggtccctatgcatctg

SEQ ID NO: 138351 - DNA, 25 bp, Saccharomyces pastorianus
actggtgcattatcagcagcagcaa

SEQ ID NO: 138352 - DNA, 25 bp, Saccharomyces pastorianus
tcccgcaacatcatccctggtacga

SEQ ID NO: 138353 - DNA, 25 bp, Saccharomyces pastorianus
gcagcaacagcagctcccgcaacat

SEQ ID NO: 138354 - DNA, 25 bp, Saccharomyces pastorianus
aatccagatggtggctgttccactt

SEQ ID NO: 138355 - DNA, 25 bp, Saccharomyces pastorianus
ggctgttccacttgctcttcccagt

SEQ ID NO: 138356 - DNA, 25 bp, Saccharomyces pastorianus
gaaatccagatggtggctgttccac

SEQ ID NO: 138357 - DNA, 25 bp, Saccharomyces pastorianus
cagtccaactgcactggtgcattat

SEQ ID NO: 138358 - DNA, 25 bp, Saccharomyces pastorianus
tgcactggtgcattatcagcagcag

SEQ ID NO: 138359 - DNA, 25 bp, Saccharomyces pastorianus
agatggtggctgttccacttgctct

SEQ ID NO: 138360 - DNA, 25 bp, Saccharomyces pastorianus
tcttcccagtccaactgcactggtg

SEQ ID NO: 138361 - DNA, 25 bp, Saccharomyces pastorianus
ctggtacgacctctcgctttctgaa

SEQ ID NO: 138362 - DNA, 25 bp, Saccharomyces pastorianus
gccgccttagctgcatttgtcatag

SEQ ID NO: 138363 - DNA, 25 bp, Saccharomyces pastorianus
ttcgttccagcgtttaccattagta

SEQ ID NO: 138364 - DNA, 25 bp, Saccharomyces pastorianus
gttatggtcttcatttcttgcaccg

SEQ ID NO: 138365 - DNA, 25 bp, Saccharomyces pastorianus
tgccatctcgtattgcttcacaaaa

SEQ ID NO: 138366 - DNA, 25 bp, Saccharomyces pastorianus
tttcttgcaccggttatgtcgtaac

SEQ ID NO: 138367 - DNA, 25 bp, Saccharomyces pastorianus
aatcttcgttcaagtgccatctcgt

SEQ ID NO: 138368 - DNA, 25 bp, Saccharomyces pastorianus
ggtccgtatgttctacgccattatt

SEQ ID NO: 138369 - DNA, 25 bp, Saccharomyces pastorianus
aattcgacagagtttactgccgcct

SEQ ID NO: 138370 - DNA, 25 bp, Saccharomyces pastorianus
tgggactatttgcttcttcactctt

SEQ ID NO: 138371 - DNA, 25 bp, Saccharomyces pastorianus
tttggcataacattgggctcagctt

SEQ ID NO: 138372 - DNA, 25 bp, Saccharomyces pastorianus
atccatcgtcctcaatgtcatttag

SEQ ID NO: 138373 - DNA, 25 bp, Saccharomyces pastorianus
aaagttcgagcctcatctatccaat

SEQ ID NO: 138374 - DNA, 25 bp, Saccharomyces pastorianus
acgggaaaagttcgagcctcatcta

SEQ ID NO: 138375 - DNA, 25 bp, Saccharomyces pastorianus
aatcacgggaaaagttcgagcctca

SEQ ID NO: 138376 - DNA, 25 bp, Saccharomyces pastorianus
ggaaaagttcgagcctcatctatcc

SEQ ID NO: 138377 - DNA, 25 bp, Saccharomyces pastorianus
tcacgggaaaagttcgagcctcatc

SEQ ID NO: 138378 - DNA, 25 bp, Saccharomyces pastorianus
aaaagttcgagcctcatctatccaa

SEQ ID NO: 138379 - DNA, 25 bp, Saccharomyces pastorianus
aagttcgagcctcatctatccaatt

SEQ ID NO: 138380 - DNA, 25 bp, Saccharomyces pastorianus
gatacctacattaaaaaaatcacgg

SEQ ID NO: 138381 - DNA, 25 bp, Saccharomyces pastorianus
gttcgagcctcatctatccaattca

SEQ ID NO: 138382 - DNA, 25 bp, Saccharomyces pastorianus
agttcgagcctcatctatccaattc

SEQ ID NO: 138383 - DNA, 25 bp, Saccharomyces pastorianus
gggaaaagttcgagcctcatctatc

SEQ ID NO: 138384 - DNA, 25 bp, Saccharomyces pastorianus
agcaacaacgatcacgattctcatg

SEQ ID NO: 138385 - DNA, 25 bp, Saccharomyces pastorianus
gcccatatattttaactcttcaaca

SEQ ID NO: 138386 - DNA, 25 bp, Saccharomyces pastorianus
aaattgcccgcagaaacagagtcta

SEQ ID NO: 138387 - DNA, 25 bp, Saccharomyces pastorianus
gatgatcactcaatacctgatgttg

SEQ ID NO: 138388 - DNA, 25 bp, Saccharomyces pastorianus
gtataaatccagtagcgaccaacac

SEQ ID NO: 138389 - DNA, 25 bp, Saccharomyces pastorianus
gaagacatcgttctaccatatgtga

SEQ ID NO: 138390 - DNA, 25 bp, Saccharomyces pastorianus
ggaacagctattttttgacctggaa

SEQ ID NO: 138391 - DNA, 25 bp, Saccharomyces pastorianus
gaagtcttagatcattcattatcga

SEQ ID NO: 138392 - DNA, 25 bp, Saccharomyces pastorianus
gcgaccaacacaaagcccatatatt

SEQ ID NO: 138393 - DNA, 25 bp, Saccharomyces pastorianus
gattctcatgctatgtgctcaccaa

SEQ ID NO: 138394 - DNA, 25 bp, Saccharomyces pastorianus
aatttggccctttgtcaactaccag

SEQ ID NO: 138395 - DNA, 25 bp, Saccharomyces pastorianus
aagtactttttcatccacattggcc

SEQ ID NO: 138396 - DNA, 25 bp, Saccharomyces pastorianus
gagattttggagtcttcgctgcaga

SEQ ID NO: 138397 - DNA, 25 bp, Saccharomyces pastorianus
gaaggaatccctatctaataaatct

SEQ ID NO: 138398 - DNA, 25 bp, Saccharomyces pastorianus
gtgcatgtgggtacttgggccataa

SEQ ID NO: 138399 - DNA, 25 bp, Saccharomyces pastorianus
gcccaatgtggaactagtaacggta

SEQ ID NO: 138400 - DNA, 25 bp, Saccharomyces pastorianus
taagacggagttgtgagcccaatgt

SEQ ID NO: 138401 - DNA, 25 bp, Saccharomyces pastorianus
tagactctcgagaaacaggcggatt

SEQ ID NO: 138402 - DNA, 25 bp, Saccharomyces pastorianus
atccacattggcctttatatataga

SEQ ID NO: 138403 - DNA, 25 bp, Saccharomyces pastorianus
tcttcgctgcagattcttgtgttaa

SEQ ID NO: 138404 - DNA, 25 bp, Saccharomyces pastorianus
cggatcccgacaagttctggttgat

SEQ ID NO: 138405 - DNA, 25 bp, Saccharomyces pastorianus
taaagatttggattccctaccggat

SEQ ID NO: 138406 - DNA, 25 bp, Saccharomyces pastorianus
agtgcagcttcagagacattaccct

SEQ ID NO: 138407 - DNA, 25 bp, Saccharomyces pastorianus
aatacaatgcctacagctggcccaa

SEQ ID NO: 138408 - DNA, 25 bp, Saccharomyces pastorianus
ggcattttcaaccatcattcttcat

SEQ ID NO: 138409 - DNA, 25 bp, Saccharomyces pastorianus
aaagattacggcgatcacacaccct

SEQ ID NO: 138410 - DNA, 25 bp, Saccharomyces pastorianus
tgccaccataccatttccactgaaa

SEQ ID NO: 138411 - DNA, 25 bp, Saccharomyces pastorianus
caggctcatcaaaaacggcatcaac

SEQ ID NO: 138412 - DNA, 25 bp, Saccharomyces pastorianus
ttgtccgtcagcagtgcagcttcag

SEQ ID NO: 138413 - DNA, 25 bp, Saccharomyces pastorianus
acaaggtcatatcgcggtcgtcgtc

SEQ ID NO: 138414 - DNA, 25 bp, Saccharomyces pastorianus
ctcacctcagtatatgccgataagg

SEQ ID NO: 138415 - DNA, 25 bp, Saccharomyces pastorianus
ggtcgtcgtcgtactcatctaatag

SEQ ID NO: 138416 - DNA, 25 bp, Saccharomyces pastorianus
gtagcattggcaactgctgccacca

SEQ ID NO: 138417 - DNA, 25 bp, Saccharomyces pastorianus
tcctttttaggagctgaaattgcag

SEQ ID NO: 138418 - DNA, 25 bp, Saccharomyces pastorianus
agtcgatcgattatgatttgctttc

SEQ ID NO: 138419 - DNA, 25 bp, Saccharomyces pastorianus
acacgagagactatactattattta

SEQ ID NO: 138420 - DNA, 25 bp, Saccharomyces pastorianus
aaagctaatttctgatagagcaagc

SEQ ID NO: 138421 - DNA, 25 bp, Saccharomyces pastorianus
caagcggtgaattgccaacaacagc

SEQ ID NO: 138422 - DNA, 25 bp, Saccharomyces pastorianus
atttgtacgccaatcctatgccaaa

SEQ ID NO: 138423 - DNA, 25 bp, Saccharomyces pastorianus
aattgacatcctttttaggagctga

SEQ ID NO: 138424 - DNA, 25 bp, Saccharomyces pastorianus
gattatgatttgctttctacgtgtg

SEQ ID NO: 138425 - DNA, 25 bp, Saccharomyces pastorianus
agcattcttccaaacacgagagact

SEQ ID NO: 138426 - DNA, 25 bp, Saccharomyces pastorianus
tacgtgtgatagacttacccattta

SEQ ID NO: 138427 - DNA, 25 bp, Saccharomyces pastorianus
ttttgtactacaacatccagattac

SEQ ID NO: 138428 - DNA, 25 bp, Saccharomyces pastorianus
aagcgagattttccataatccagag

SEQ ID NO: 138429 - DNA, 25 bp, Saccharomyces pastorianus
gagatccagtatctacattcgaaga

SEQ ID NO: 138430 - DNA, 25 bp, Saccharomyces pastorianus
agttcggttgatcttttcttgggtg

SEQ ID NO: 138431 - DNA, 25 bp, Saccharomyces pastorianus
ttcttgggtgggtcgaaattcttca

SEQ ID NO: 138432 - DNA, 25 bp, Saccharomyces pastorianus
gatagcattttgaccttttccgata

SEQ ID NO: 138433 - DNA, 25 bp, Saccharomyces pastorianus
gaagatagcccatcacagagatgct

SEQ ID NO: 138434 - DNA, 25 bp, Saccharomyces pastorianus
tccgtgctcatatacttgattgtcg

SEQ ID NO: 138435 - DNA, 25 bp, Saccharomyces pastorianus
tcatttcgcaacgacaccgatgtgg

SEQ ID NO: 138436 - DNA, 25 bp, Saccharomyces pastorianus
aacattttgcgcatctctacataag

SEQ ID NO: 138437 - DNA, 25 bp, Saccharomyces pastorianus
gagaacgctgcgtattccgtgctca

SEQ ID NO: 138438 - DNA, 25 bp, Saccharomyces pastorianus
gcgccactggactatgatcttgcta

SEQ ID NO: 138439 - DNA, 25 bp, Saccharomyces pastorianus
agagtcgtacccagaattcttggcc

SEQ ID NO: 138440 - DNA, 25 bp, Saccharomyces pastorianus
cactctgcacccatttgctaataaa

SEQ ID NO: 138441 - DNA, 25 bp, Saccharomyces pastorianus
aacgccatagacgaacctattggat

SEQ ID NO: 138442 - DNA, 25 bp, Saccharomyces pastorianus
accccaagcacaattccatttcatg

SEQ ID NO: 138443 - DNA, 25 bp, Saccharomyces pastorianus
attcttggccctatttagcagggac

SEQ ID NO: 138444 - DNA, 25 bp, Saccharomyces pastorianus
accaagattttaacgtccgaatgtg

SEQ ID NO: 138445 - DNA, 25 bp, Saccharomyces pastorianus
cctgtatactatgattccactctgc

SEQ ID NO: 138446 - DNA, 25 bp, Saccharomyces pastorianus
agatctcatttcctaccgatattga

SEQ ID NO: 138447 - DNA, 25 bp, Saccharomyces pastorianus
gttgcccacctccagtttctatttt

SEQ ID NO: 138448 - DNA, 25 bp, Saccharomyces pastorianus
caggcgttcaacgttgtcgaaacat

SEQ ID NO: 138449 - DNA, 25 bp, Saccharomyces pastorianus
ggatcatattccacttcaccaatgg

SEQ ID NO: 138450 - DNA, 25 bp, Saccharomyces pastorianus
gacagaaccgtccaagcaactaaac

SEQ ID NO: 138451 - DNA, 25 bp, Saccharomyces pastorianus
aaacctcgggtacatctgtgaaagt

SEQ ID NO: 138452 - DNA, 25 bp, Saccharomyces pastorianus
ctgtagagacatttggacgcgaact

SEQ ID NO: 138453 - DNA, 25 bp, Saccharomyces pastorianus
atatggcccattttctcccaaatgg

SEQ ID NO: 138454 - DNA, 25 bp, Saccharomyces pastorianus
gactggaaacgcatctagtacccta

SEQ ID NO: 138455 - DNA, 25 bp, Saccharomyces pastorianus
aaccatttggtttctgactgtattg

SEQ ID NO: 138456 - DNA, 25 bp, Saccharomyces pastorianus
atttcatcgtaagtcatccggcgaa

SEQ ID NO: 138457 - DNA, 25 bp, Saccharomyces pastorianus
aagttgtctgattccaaacctcggg

SEQ ID NO: 138458 - DNA, 25 bp, Saccharomyces pastorianus
aactggctcaagtgggtcatacttt

SEQ ID NO: 138459 - DNA, 25 bp, Saccharomyces pastorianus
caaatgggcacaccgcacgtttttc

SEQ ID NO: 138460 - DNA, 25 bp, Saccharomyces pastorianus
gtttttcccatgtctgtttggcaga

SEQ ID NO: 138461 - DNA, 25 bp, Saccharomyces pastorianus
gggcgacagagttattcttccattc

SEQ ID NO: 138462 - DNA, 25 bp, Saccharomyces pastorianus
cttcctcaagcatcagtagtacaaa

SEQ ID NO: 138463 - DNA, 25 bp, Saccharomyces pastorianus
actacaagctagttggtcatccaat

SEQ ID NO: 138464 - DNA, 25 bp, Saccharomyces pastorianus
ccatatttggtgaccgagggcgaca

SEQ ID NO: 138465 - DNA, 25 bp, Saccharomyces pastorianus
gacgggtccgtcatgcaaagagtaa

SEQ ID NO: 138466 - DNA, 25 bp, Saccharomyces pastorianus
gattcataatcgtccatatttggtg

SEQ ID NO: 138467 - DNA, 25 bp, Saccharomyces pastorianus
tcagaaatttagctacttcctcaag

SEQ ID NO: 138468 - DNA, 25 bp, Saccharomyces pastorianus
tggccagtggccagaatcacaccta

SEQ ID NO: 138469 - DNA, 25 bp, Saccharomyces pastorianus
ggtcatccaatcaatacttctctgt

SEQ ID NO: 138470 - DNA, 25 bp, Saccharomyces pastorianus
gcggaggtgggtgacattttaaaca

SEQ ID NO: 138471 - DNA, 25 bp, Saccharomyces pastorianus
ataggccatttaccagtcatccatt

SEQ ID NO: 138472 - DNA, 25 bp, Saccharomyces pastorianus
aatctaccagactcgcgaagtttat

SEQ ID NO: 138473 - DNA, 25 bp, Saccharomyces pastorianus
ggattggcatacctacactcgaaag

SEQ ID NO: 138474 - DNA, 25 bp, Saccharomyces pastorianus
aaaggccaaccgctaacgagcttct

SEQ ID NO: 138475 - DNA, 25 bp, Saccharomyces pastorianus
actcgaaaggtattctccacaggga

SEQ ID NO: 138476 - DNA, 25 bp, Saccharomyces pastorianus
gcccgtggtccaacttagaagtcgt

SEQ ID NO: 138477 - DNA, 25 bp, Saccharomyces pastorianus
gaagtcgtcgcagccatgttcaaaa

SEQ ID NO: 138478 - DNA, 25 bp, Saccharomyces pastorianus
gaaattttctggacgcatgcttcga

SEQ ID NO: 138479 - DNA, 25 bp, Saccharomyces pastorianus
agcttctttctcatccttttagtga

SEQ ID NO: 138480 - DNA, 25 bp, Saccharomyces pastorianus
gtctctgggatgcatcgttctggaa

SEQ ID NO: 138481 - DNA, 25 bp, Saccharomyces pastorianus
ggaaagtcaaaatcggcaccaccaa

SEQ ID NO: 138482 - DNA, 25 bp, Saccharomyces pastorianus
aattcctgaggacactttaccattg

SEQ ID NO: 138483 - DNA, 25 bp, Saccharomyces pastorianus
cggtagcttatgtaacgtctcaaga

SEQ ID NO: 138484 - DNA, 25 bp, Saccharomyces pastorianus
ggttcctagcccaaatacggtagct

SEQ ID NO: 138485 - DNA, 25 bp, Saccharomyces pastorianus
gtaaatataccatctccatcttcat

SEQ ID NO: 138486 - DNA, 25 bp, Saccharomyces pastorianus
gacaagacagttccagtgccggtaa

SEQ ID NO: 138487 - DNA, 25 bp, Saccharomyces pastorianus
tactgctaccttaaccgtacaaacg

SEQ ID NO: 138488 - DNA, 25 bp, Saccharomyces pastorianus
ttaaaacaatcttcactacccactt

SEQ ID NO: 138489 - DNA, 25 bp, Saccharomyces pastorianus
aatcgaattcgagtactgctacctt

SEQ ID NO: 138490 - DNA, 25 bp, Saccharomyces pastorianus
gaatctgctctcacaaaattgggaa

SEQ ID NO: 138491 - DNA, 25 bp, Saccharomyces pastorianus
gaaactaatgtgtcttcacctttaa

SEQ ID NO: 138492 - DNA, 25 bp, Saccharomyces pastorianus
taaaatttcttcaaccacggcgtct

SEQ ID NO: 138493 - DNA, 25 bp, Saccharomyces pastorianus
gaagtttggaggtcatcagcacaga

SEQ ID NO: 138494 - DNA, 25 bp, Saccharomyces pastorianus
aaaccatacctgacacaatccgatt

SEQ ID NO: 138495 - DNA, 25 bp, Saccharomyces pastorianus
agtctattttccagtcactcaaggc

SEQ ID NO: 138496 - DNA, 25 bp, Saccharomyces pastorianus
tgaagggtcgaatcgtcgttttgac

SEQ ID NO: 138497 - DNA, 25 bp, Saccharomyces pastorianus
gagactgtgcttgatgttggtttat

SEQ ID NO: 138498 - DNA, 25 bp, Saccharomyces pastorianus
ggcagattaaatgctgatcgcttta

SEQ ID NO: 138499 - DNA, 25 bp, Saccharomyces pastorianus
gaccttcctgatgaaagtgagccct

SEQ ID NO: 138500 - DNA, 25 bp, Saccharomyces pastorianus
gatcacatttattctcatctcctag

SEQ ID NO: 138501 - DNA, 25 bp, Saccharomyces pastorianus
gaactatcatctactttcttcaagt

SEQ ID NO: 138502 - DNA, 25 bp, Saccharomyces pastorianus
aaagccgtcctttatagagactgtg

SEQ ID NO: 138503 - DNA, 25 bp, Saccharomyces pastorianus
catctcctaggtctgaatgaactat

SEQ ID NO: 138504 - DNA, 25 bp, Saccharomyces pastorianus
catttgctgagcatgactggctaaa

SEQ ID NO: 138505 - DNA, 25 bp, Saccharomyces pastorianus
tgactcagcttgtttacccagattc

SEQ ID NO: 138506 - DNA, 25 bp, Saccharomyces pastorianus
tctctccatctctaaagctgctaaa

SEQ ID NO: 138507 - DNA, 25 bp, Saccharomyces pastorianus
aacactacagaagcgatctctccat

SEQ ID NO: 138508 - DNA, 25 bp, Saccharomyces pastorianus
gggtatctcccaagcctaagaataa

SEQ ID NO: 138509 - DNA, 25 bp, Saccharomyces pastorianus
gacaacagctactgattccacattg

SEQ ID NO: 138510 - DNA, 25 bp, Saccharomyces pastorianus
tgttcgcaaatccttatctacacct

SEQ ID NO: 138511 - DNA, 25 bp, Saccharomyces pastorianus
gaacgaaacctccttgagcagaatg

SEQ ID NO: 138512 - DNA, 25 bp, Saccharomyces pastorianus
attcataccgggatggtgttcgcaa

SEQ ID NO: 138513 - DNA, 25 bp, Saccharomyces pastorianus
actgcagccggtgttttgatgtcat

SEQ ID NO: 138514 - DNA, 25 bp, Saccharomyces pastorianus
gatgaaaaattgaccccgtttgagg

SEQ ID NO: 138515 - DNA, 25 bp, Saccharomyces pastorianus
tggtgcagcagatggtctcgattct

SEQ ID NO: 138516 - DNA, 25 bp, Saccharomyces pastorianus
gaatgaacctgcatcaagtcaaatg

SEQ ID NO: 138517 - DNA, 25 bp, Saccharomyces pastorianus
atggatatattttctcagctgtcac

SEQ ID NO: 138518 - DNA, 25 bp, Saccharomyces pastorianus
atattttctcagctgtcacgtgcga

SEQ ID NO: 138519 - DNA, 25 bp, Saccharomyces pastorianus
tgaacctgcatcaagtcaaatggat

SEQ ID NO: 138520 - DNA, 25 bp, Saccharomyces pastorianus
ggtgaagaatgaacctgcatcaagt

SEQ ID NO: 138521 - DNA, 25 bp, Saccharomyces pastorianus
ttctcagctgtcacgtgcgaaaaaa

SEQ ID NO: 138522 - DNA, 25 bp, Saccharomyces pastorianus
gatatattttctcagctgtcacgtg

SEQ ID NO: 138523 - DNA, 25 bp, Saccharomyces pastorianus
attttctcagctgtcacgtgcgaaa

SEQ ID NO: 138524 - DNA, 25 bp, Saccharomyces pastorianus
ggatatattttctcagctgtcacgt

SEQ ID NO: 138525 - DNA, 25 bp, Saccharomyces pastorianus
gaagaatgaacctgcatcaagtcaa

SEQ ID NO: 138526 - DNA, 25 bp, Saccharomyces pastorianus
tatattttctcagctgtcacgtgcg

SEQ ID NO: 138527 - DNA, 25 bp, Saccharomyces pastorianus
gctgcggaccagttacgactcgaaa

SEQ ID NO: 138528 - DNA, 25 bp, Saccharomyces pastorianus
cgtaatattcatttcccactgcagg

SEQ ID NO: 138529 - DNA, 25 bp, Saccharomyces pastorianus
aggagtttcattcttctactgggaa

SEQ ID NO: 138530 - DNA, 25 bp, Saccharomyces pastorianus
aatcaatggcaattacgctcctaaa

SEQ ID NO: 138531 - DNA, 25 bp, Saccharomyces pastorianus
aaatcacgcccatccaaaatcaatg

SEQ ID NO: 138532 - DNA, 25 bp, Saccharomyces pastorianus
ggtgtatgcacctcaatacgtttca

SEQ ID NO: 138533 - DNA, 25 bp, Saccharomyces pastorianus
gacgagccacatgccagatgattta

SEQ ID NO: 138534 - DNA, 25 bp, Saccharomyces pastorianus
tagtgatttcacgtcagctgcggac

SEQ ID NO: 138535 - DNA, 25 bp, Saccharomyces pastorianus
gaaactacatcattccattctccta

SEQ ID NO: 138536 - DNA, 25 bp, Saccharomyces pastorianus
taatgagaccatcacccacgaggaa

SEQ ID NO: 138537 - DNA, 25 bp, Saccharomyces pastorianus
gataaactattctcccttgaccaat

SEQ ID NO: 138538 - DNA, 25 bp, Saccharomyces pastorianus
cttcgacttgggactattggacttc

SEQ ID NO: 138539 - DNA, 25 bp, Saccharomyces pastorianus
taaccccattaactggcctctgtat

SEQ ID NO: 138540 - DNA, 25 bp, Saccharomyces pastorianus
gaaggcatcttctcatttctaggtt

SEQ ID NO: 138541 - DNA, 25 bp, Saccharomyces pastorianus
aaatcattcctggttttgttggcat

SEQ ID NO: 138542 - DNA, 25 bp, Saccharomyces pastorianus
ttataagccttctacgcaagacgta

SEQ ID NO: 138543 - DNA, 25 bp, Saccharomyces pastorianus
attcatagctgtcatatcggttttc

SEQ ID NO: 138544 - DNA, 25 bp, Saccharomyces pastorianus
gttggcaaatgtctctactggttta

SEQ ID NO: 138545 - DNA, 25 bp, Saccharomyces pastorianus
gactgggtactgcttgactgacaaa

SEQ ID NO: 138546 - DNA, 25 bp, Saccharomyces pastorianus
gtcacgatagattcttcacccttaa

SEQ ID NO: 138547 - DNA, 25 bp, Saccharomyces pastorianus
gttggcatactgctcattcatagct

SEQ ID NO: 138548 - DNA, 25 bp, Saccharomyces pastorianus
tttcttgttatcagccagttggttt

SEQ ID NO: 138549 - DNA, 25 bp, Saccharomyces pastorianus
tgtttgctcgcattcatatatggaa

SEQ ID NO: 138550 - DNA, 25 bp, Saccharomyces pastorianus
aaccataccttctaaacacgctaat

SEQ ID NO: 138551 - DNA, 25 bp, Saccharomyces pastorianus
gaaaaattccaaccttatgcctcct

SEQ ID NO: 138552 - DNA, 25 bp, Saccharomyces pastorianus
ctggcatatccagcgtgcaatacat

SEQ ID NO: 138553 - DNA, 25 bp, Saccharomyces pastorianus
tttatgctagtgaaccataccttct

SEQ ID NO: 138554 - DNA, 25 bp, Saccharomyces pastorianus
aagaggactttgtgacagggctcaa

SEQ ID NO: 138555 - DNA, 25 bp, Saccharomyces pastorianus
acagggctcaatggcggttctatga

SEQ ID NO: 138556 - DNA, 25 bp, Saccharomyces pastorianus
acatcaattgctttggtaacttaca

SEQ ID NO: 138557 - DNA, 25 bp, Saccharomyces pastorianus
gcattgaactgggttgctttgcttc

SEQ ID NO: 138558 - DNA, 25 bp, Saccharomyces pastorianus
tgggttgctttgcttctatctatta

SEQ ID NO: 138559 - DNA, 25 bp, Saccharomyces pastorianus
aatactgttaccttgtttgctcgca

SEQ ID NO: 138560 - DNA, 25 bp, Saccharomyces pastorianus
aaggattcctcggtaccgatcatca

SEQ ID NO: 138561 - DNA, 25 bp, Saccharomyces pastorianus
ataagtgtcagtatttccactcccc

SEQ ID NO: 138562 - DNA, 25 bp, Saccharomyces pastorianus
ccgatactttcgtttccatgggtga

SEQ ID NO: 138563 - DNA, 25 bp, Saccharomyces pastorianus
gcatcgcatgtctgaaattcggtat

SEQ ID NO: 138564 - DNA, 25 bp, Saccharomyces pastorianus
tgtgacaaattccaccctttgcaag

SEQ ID NO: 138565 - DNA, 25 bp, Saccharomyces pastorianus
ggagagcattccatagtctttgaag

SEQ ID NO: 138566 - DNA, 25 bp, Saccharomyces pastorianus
gtaccgatcatcaactctctatgtg

SEQ ID NO: 138567 - DNA, 25 bp, Saccharomyces pastorianus
acacacgactctttaaaggcctcca

SEQ ID NO: 138568 - DNA, 25 bp, Saccharomyces pastorianus
aagaacttgtctctgtggctgatcc

SEQ ID NO: 138569 - DNA, 25 bp, Saccharomyces pastorianus
atgtctgccattgatatctttgtta

SEQ ID NO: 138570 - DNA, 25 bp, Saccharomyces pastorianus
aaggcctccaccaatgccaatatat

SEQ ID NO: 138571 - DNA, 25 bp, Saccharomyces pastorianus
gcatatcaaatatacccctgacgaa

SEQ ID NO: 138572 - DNA, 25 bp, Saccharomyces pastorianus
aaagcatatcaaatatacccctgac

SEQ ID NO: 138573 - DNA, 25 bp, Saccharomyces pastorianus
aagactctttcaagaatcctagaaa

SEQ ID NO: 138574 - DNA, 25 bp, Saccharomyces pastorianus
aagcatatcaaatatacccctgacg

SEQ ID NO: 138575 - DNA, 25 bp, Saccharomyces pastorianus
cccatgtatgaaagattctacagta

SEQ ID NO: 138576 - DNA, 25 bp, Saccharomyces pastorianus
gaaagcatatcaaatatacccctga

SEQ ID NO: 138577 - DNA, 25 bp, Saccharomyces pastorianus
catatcaaatatacccctgacgaac

SEQ ID NO: 138578 - DNA, 25 bp, Saccharomyces pastorianus
ctacagtagatataaagactctttc

SEQ ID NO: 138579 - DNA, 25 bp, Saccharomyces pastorianus
tatcaaatatacccctgacgaacta

SEQ ID NO: 138580 - DNA, 25 bp, Saccharomyces pastorianus
atatcaaatatacccctgacgaact

SEQ ID NO: 138581 - DNA, 25 bp, Saccharomyces pastorianus
agcatatcaaatatacccctgacga

SEQ ID NO: 138582 - DNA, 25 bp, Saccharomyces pastorianus
gaatacactttgcaaaacgaggctt

SEQ ID NO: 138583 - DNA, 25 bp, Saccharomyces pastorianus
tggtgtcactgaagcaactgtagat

SEQ ID NO: 138584 - DNA, 25 bp, Saccharomyces pastorianus
gatgtggctaatcctaatagctcta

SEQ ID NO: 138585 - DNA, 25 bp, Saccharomyces pastorianus
aaacggatgtttaggcgccatggac

SEQ ID NO: 138586 - DNA, 25 bp, Saccharomyces pastorianus
gaagcaacctcgagaactttggatt

SEQ ID NO: 138587 - DNA, 25 bp, Saccharomyces pastorianus
gaacctgacgcttgttgagcagatc

SEQ ID NO: 138588 - DNA, 25 bp, Saccharomyces pastorianus
tgatgcctaaccaagagccagatgt

SEQ ID NO: 138589 - DNA, 25 bp, Saccharomyces pastorianus
ggcgccatggacaatatcacacgtg

SEQ ID NO: 138590 - DNA, 25 bp, Saccharomyces pastorianus
gattgcatagacactttggcagtta

SEQ ID NO: 138591 - DNA, 25 bp, Saccharomyces pastorianus
attctatttctactattccttccaa

SEQ ID NO: 138592 - DNA, 25 bp, Saccharomyces pastorianus
aaatctcttcgaggcaaggaactac

SEQ ID NO: 138593 - DNA, 25 bp, Saccharomyces pastorianus
tgacagagtatcacaaccctgccat

SEQ ID NO: 138594 - DNA, 25 bp, Saccharomyces pastorianus
acaaccctgccattgattcggaaga

SEQ ID NO: 138595 - DNA, 25 bp, Saccharomyces pastorianus
gttagatgacattgttctgccaaaa

SEQ ID NO: 138596 - DNA, 25 bp, Saccharomyces pastorianus
agagcccaaaattatgccgccgatt

SEQ ID NO: 138597 - DNA, 25 bp, Saccharomyces pastorianus
atcacctgtccttgaactggcttat

SEQ ID NO: 138598 - DNA, 25 bp, Saccharomyces pastorianus
tgaactggcttatttctacaacggt

SEQ ID NO: 138599 - DNA, 25 bp, Saccharomyces pastorianus
ttatgccgccgattacgaattgagt

SEQ ID NO: 138600 - DNA, 25 bp, Saccharomyces pastorianus
catatccagccgctctttatgagag

SEQ ID NO: 138601 - DNA, 25 bp, Saccharomyces pastorianus
gaaacttactactatccttgacctt

SEQ ID NO: 138602 - DNA, 25 bp, Saccharomyces pastorianus
attcggaagacccagatcaagagct

SEQ ID NO: 138603 - DNA, 25 bp, Saccharomyces pastorianus
actcaatagcaacatcacctgtcct

SEQ ID NO: 138604 - DNA, 25 bp, Saccharomyces pastorianus
gtgccctgtggctgctaaatgaggc

SEQ ID NO: 138605 - DNA, 25 bp, Saccharomyces pastorianus
tgtacacttattttgcgggttgctg

SEQ ID NO: 138606 - DNA, 25 bp, Saccharomyces pastorianus
actttttcctaatagtgccctgtgg

SEQ ID NO: 138607 - DNA, 25 bp, Saccharomyces pastorianus
gtgcaaccttattgcatcctggaaa

SEQ ID NO: 138608 - DNA, 25 bp, Saccharomyces pastorianus
aaattctggaggacgcattactaaa

SEQ ID NO: 138609 - DNA, 25 bp, Saccharomyces pastorianus
gatagtagccttttaccaggttata

SEQ ID NO: 138610 - DNA, 25 bp, Saccharomyces pastorianus
gctgtgctatctattgttggattca

SEQ ID NO: 138611 - DNA, 25 bp, Saccharomyces pastorianus
gcgggttgctgttacttggaaaatt

SEQ ID NO: 138612 - DNA, 25 bp, Saccharomyces pastorianus
gaacgtgcgatccttttagtcaact

SEQ ID NO: 138613 - DNA, 25 bp, Saccharomyces pastorianus
gaaagggcaggcttcgtgattctct

SEQ ID NO: 138614 - DNA, 25 bp, Saccharomyces pastorianus
attggtctcacgcattgtacactta

SEQ ID NO: 138615 - DNA, 25 bp, Saccharomyces pastorianus
ccaggtggttctaacatcaaaaaga

SEQ ID NO: 138616 - DNA, 25 bp, Saccharomyces pastorianus
agaagcggccgacgttatcatcaac

SEQ ID NO: 138617 - DNA, 25 bp, Saccharomyces pastorianus
gacaaagtcaatgatgttgtgtaca

SEQ ID NO: 138618 - DNA, 25 bp, Saccharomyces pastorianus
tcatcaacgtcccaaggaagtctga

SEQ ID NO: 138619 - DNA, 25 bp, Saccharomyces pastorianus
agagaagcggccgacgttatcatca

SEQ ID NO: 138620 - DNA, 25 bp, Saccharomyces pastorianus
aagcggccgacgttatcatcaacgt

SEQ ID NO: 138621 - DNA, 25 bp, Saccharomyces pastorianus
caacgtcccaaggaagtctgacaaa

SEQ ID NO: 138622 - DNA, 25 bp, Saccharomyces pastorianus
gttatcatcaacgtcccaaggaagt

SEQ ID NO: 138623 - DNA, 25 bp, Saccharomyces pastorianus
aaaagattagagaagcggccgacgt

SEQ ID NO: 138624 - DNA, 25 bp, Saccharomyces pastorianus
gtcccaaggaagtctgacaaagtca

SEQ ID NO: 138625 - DNA, 25 bp, Saccharomyces pastorianus
tatcatcaacgtcccaaggaagtct

SEQ ID NO: 138626 - DNA, 25 bp, Saccharomyces pastorianus
agtagcattctctctgacggtgaag

SEQ ID NO: 138627 - DNA, 25 bp, Saccharomyces pastorianus
aaattagctcgtgctccaatcgaaa

SEQ ID NO: 138628 - DNA, 25 bp, Saccharomyces pastorianus
gaagaagctctcgatactgctgtta

SEQ ID NO: 138629 - DNA, 25 bp, Saccharomyces pastorianus
aagtccgtggatctaccgaaggcga

SEQ ID NO: 138630 - DNA, 25 bp, Saccharomyces pastorianus
atgttcctgcctccatttatgaata

SEQ ID NO: 138631 - DNA, 25 bp, Saccharomyces pastorianus
ggacacttcaaacgattccgctaag

SEQ ID NO: 138632 - DNA, 25 bp, Saccharomyces pastorianus
ggtgcaccaacttcttccgaggaag

SEQ ID NO: 138633 - DNA, 25 bp, Saccharomyces pastorianus
atctgctacatatgccggttacgtc

SEQ ID NO: 138634 - DNA, 25 bp, Saccharomyces pastorianus
gaccgagaagtcgatgttcctgcct

SEQ ID NO: 138635 - DNA, 25 bp, Saccharomyces pastorianus
gtgggattgttcgtcgtcaactaga

SEQ ID NO: 138636 - DNA, 25 bp, Saccharomyces pastorianus
aaataactattaccggtgcaccaga

SEQ ID NO: 138637 - DNA, 25 bp, Saccharomyces pastorianus
tattagtgcgaaatccgctagtgct

SEQ ID NO: 138638 - DNA, 25 bp, Saccharomyces pastorianus
aaaagccccttcaagcagtgatgat

SEQ ID NO: 138639 - DNA, 25 bp, Saccharomyces pastorianus
attctgactctaactccagttcgga

SEQ ID NO: 138640 - DNA, 25 bp, Saccharomyces pastorianus
agttcgtccttctttgagttcatta

SEQ ID NO: 138641 - DNA, 25 bp, Saccharomyces pastorianus
gtatacttcatgaccttccaagaaa

SEQ ID NO: 138642 - DNA, 25 bp, Saccharomyces pastorianus
gttaaatccaagaccacctcaaatc

SEQ ID NO: 138643 - DNA, 25 bp, Saccharomyces pastorianus
atgtcgtctcctccgtcagttaaat

SEQ ID NO: 138644 - DNA, 25 bp, Saccharomyces pastorianus
tgtttcaagaggcatcccagatgta

SEQ ID NO: 138645 - DNA, 25 bp, Saccharomyces pastorianus
agttcggactccgtatcggattcca

SEQ ID NO: 138646 - DNA, 25 bp, Saccharomyces pastorianus
acctcaaatccgtctagtatacttc

SEQ ID NO: 138647 - DNA, 25 bp, Saccharomyces pastorianus
tcggattccagttcagattctaaat

SEQ ID NO: 138648 - DNA, 25 bp, Saccharomyces pastorianus
taacatgttcaaaaatccaggaagt

SEQ ID NO: 138649 - DNA, 25 bp, Saccharomyces pastorianus
acgaaacattaagtgatgacgataa

SEQ ID NO: 138650 - DNA, 25 bp, Saccharomyces pastorianus
aaatccaggaagtggcttcccattc

SEQ ID NO: 138651 - DNA, 25 bp, Saccharomyces pastorianus
gggcctaggcaaaataacatgttca

SEQ ID NO: 138652 - DNA, 25 bp, Saccharomyces pastorianus
acaaatcaatgaagcgtacgaaaca

SEQ ID NO: 138653 - DNA, 25 bp, Saccharomyces pastorianus
gaagcgtacgaaacattaagtgatg

SEQ ID NO: 138654 - DNA, 25 bp, Saccharomyces pastorianus
atgtcacaaatcaatgaagcgtacg

SEQ ID NO: 138655 - DNA, 25 bp, Saccharomyces pastorianus
gaatacgatctttccaggtcaaacc

SEQ ID NO: 138656 - DNA, 25 bp, Saccharomyces pastorianus
aaggaatacgatctttccaggtcaa

SEQ ID NO: 138657 - DNA, 25 bp, Saccharomyces pastorianus
gcaacacttttcctcaggggcctag

SEQ ID NO: 138658 - DNA, 25 bp, Saccharomyces pastorianus
ggaaggaatacgatctttccaggtc

SEQ ID NO: 138659 - DNA, 25 bp, Saccharomyces pastorianus
atcctggatccagcaacatatgcat

SEQ ID NO: 138660 - DNA, 25 bp, Saccharomyces pastorianus
cattgattccattctttgtcaggct

SEQ ID NO: 138661 - DNA, 25 bp, Saccharomyces pastorianus
actaagcctgactatttccaaattg

SEQ ID NO: 138662 - DNA, 25 bp, Saccharomyces pastorianus
aactcagatgcgtcgttcaatataa

SEQ ID NO: 138663 - DNA, 25 bp, Saccharomyces pastorianus
ctggctgcgccgttctgtaaaaaga

SEQ ID NO: 138664 - DNA, 25 bp, Saccharomyces pastorianus
agagagctaaactggctgcgccgtt

SEQ ID NO: 138665 - DNA, 25 bp, Saccharomyces pastorianus
gacgttcaactgtcgagacctttgg

SEQ ID NO: 138666 - DNA, 25 bp, Saccharomyces pastorianus
aggcttctagcatgagtccggacgt

SEQ ID NO: 138667 - DNA, 25 bp, Saccharomyces pastorianus
cagacctttgtacttaactcagatg

SEQ ID NO: 138668 - DNA, 25 bp, Saccharomyces pastorianus
gagtccggacgtcaagagagctaaa

SEQ ID NO: 138669 - DNA, 25 bp, Saccharomyces pastorianus
gaaacaatcctcgacaagcatttgg

SEQ ID NO: 138670 - DNA, 25 bp, Saccharomyces pastorianus
tacacgctagaacctctcattgaag

SEQ ID NO: 138671 - DNA, 25 bp, Saccharomyces pastorianus
acagccaaaatcaatccttctagag

SEQ ID NO: 138672 - DNA, 25 bp, Saccharomyces pastorianus
taaagcacaacgttccgatgattag

SEQ ID NO: 138673 - DNA, 25 bp, Saccharomyces pastorianus
aaggcgccttactttgaggagaacg

SEQ ID NO: 138674 - DNA, 25 bp, Saccharomyces pastorianus
aaatacccattttagctgcgccatt

SEQ ID NO: 138675 - DNA, 25 bp, Saccharomyces pastorianus
tgaacccaacagatttgtgcgagtt

SEQ ID NO: 138676 - DNA, 25 bp, Saccharomyces pastorianus
cttctagagatatcactgtgggcga

SEQ ID NO: 138677 - DNA, 25 bp, Saccharomyces pastorianus
ctgcgccattatcatctgtttcatt

SEQ ID NO: 138678 - DNA, 25 bp, Saccharomyces pastorianus
gtacaaggctcattggattggcgtt

SEQ ID NO: 138679 - DNA, 25 bp, Saccharomyces pastorianus
gaacaagtgtgctatctagtggcta

SEQ ID NO: 138680 - DNA, 25 bp, Saccharomyces pastorianus
aagtatttacttgctgaacccaaca

SEQ ID NO: 138681 - DNA, 25 bp, Saccharomyces pastorianus
ttttctcaatggttgctacgatgga

SEQ ID NO: 138682 - DNA, 25 bp, Saccharomyces pastorianus
aatgtcgtgtcaaatttccaggagt

SEQ ID NO: 138683 - DNA, 25 bp, Saccharomyces pastorianus
agggtgacaatccaactgttgcgca

SEQ ID NO: 138684 - DNA, 25 bp, Saccharomyces pastorianus
aatgtgtgttctatggatctggtca

SEQ ID NO: 138685 - DNA, 25 bp, Saccharomyces pastorianus
ggagcagttaccaatagattcatct

SEQ ID NO: 138686 - DNA, 25 bp, Saccharomyces pastorianus
ttggcccaagtatcagttaattttc

SEQ ID NO: 138687 - DNA, 25 bp, Saccharomyces pastorianus
aattttcaattctattccagtggtg

SEQ ID NO: 138688 - DNA, 25 bp, Saccharomyces pastorianus
aaattttggacagcacagggtgaca

SEQ ID NO: 138689 - DNA, 25 bp, Saccharomyces pastorianus
gctagtatcgtataatatccgctgg

SEQ ID NO: 138690 - DNA, 25 bp, Saccharomyces pastorianus
atcttcaatcctttattcactctgg

SEQ ID NO: 138691 - DNA, 25 bp, Saccharomyces pastorianus
attgccaggatttttcccaaactat

SEQ ID NO: 138692 - DNA, 25 bp, Saccharomyces pastorianus
aatatactggtccatgctaccgtgg

SEQ ID NO: 138693 - DNA, 25 bp, Saccharomyces pastorianus
gaagtaagttacctgccttcaccta

SEQ ID NO: 138694 - DNA, 25 bp, Saccharomyces pastorianus
tttgtgatgggattgctgaatggct

SEQ ID NO: 138695 - DNA, 25 bp, Saccharomyces pastorianus
atttcgcgccggcaatatactggtc

SEQ ID NO: 138696 - DNA, 25 bp, Saccharomyces pastorianus
ggcatgcgtcgttttgagatttcat

SEQ ID NO: 138697 - DNA, 25 bp, Saccharomyces pastorianus
ctgccttcacctatcattgtatatt

SEQ ID NO: 138698 - DNA, 25 bp, Saccharomyces pastorianus
atgtccgttgccaatttcgcgccgg

SEQ ID NO: 138699 - DNA, 25 bp, Saccharomyces pastorianus
gcctctattccagcacaagttaagt

SEQ ID NO: 138700 - DNA, 25 bp, Saccharomyces pastorianus
gtggtcaataaactacgcctctatt

SEQ ID NO: 138701 - DNA, 25 bp, Saccharomyces pastorianus
gaacttgtttgatgacggcatgcgt

SEQ ID NO: 138702 - DNA, 25 bp, Saccharomyces pastorianus
taagttgcaaacgttcatcagaagt

SEQ ID NO: 138703 - DNA, 25 bp, Saccharomyces pastorianus
tgatgttccaaacttcttctcagaa

SEQ ID NO: 138704 - DNA, 25 bp, Saccharomyces pastorianus
tacatttttccaattcggtggcaca

SEQ ID NO: 138705 - DNA, 25 bp, Saccharomyces pastorianus
caaaatattccaaccgcctcattaa

SEQ ID NO: 138706 - DNA, 25 bp, Saccharomyces pastorianus
tgttgtcatttcaaggttggtcctg

SEQ ID NO: 138707 - DNA, 25 bp, Saccharomyces pastorianus
gaaataccgctctttatgcatgatt

SEQ ID NO: 138708 - DNA, 25 bp, Saccharomyces pastorianus
gtaacttgattgtacttgcgcgcgt

SEQ ID NO: 138709 - DNA, 25 bp, Saccharomyces pastorianus
tccttcctggaagtggtgcttaaat

SEQ ID NO: 138710 - DNA, 25 bp, Saccharomyces pastorianus
atggcatctgctggttttcaagtac

SEQ ID NO: 138711 - DNA, 25 bp, Saccharomyces pastorianus
aatctcgtgggaaatcgtcaatggt

SEQ ID NO: 138712 - DNA, 25 bp, Saccharomyces pastorianus
taggtcaatttctcgttttccaaat

SEQ ID NO: 138713 - DNA, 25 bp, Saccharomyces pastorianus
gcgttttcttccaagcttgggctat

SEQ ID NO: 138714 - DNA, 25 bp, Saccharomyces pastorianus
gaagctatctcaaatcgccgaatcc

SEQ ID NO: 138715 - DNA, 25 bp, Saccharomyces pastorianus
attcaacagctttgttcactctcaa

SEQ ID NO: 138716 - DNA, 25 bp, Saccharomyces pastorianus
aacgaattatcccatcagcagaccg

SEQ ID NO: 138717 - DNA, 25 bp, Saccharomyces pastorianus
aacagttcgaattgacgcgccaact

SEQ ID NO: 138718 - DNA, 25 bp, Saccharomyces pastorianus
aaacgaatgggatgagctacgcaaa

SEQ ID NO: 138719 - DNA, 25 bp, Saccharomyces pastorianus
ctcgtatcgaggcagaaactatcaa

SEQ ID NO: 138720 - DNA, 25 bp, Saccharomyces pastorianus
gcgccaactacaatcgacatgcaaa

SEQ ID NO: 138721 - DNA, 25 bp, Saccharomyces pastorianus
caaactttgggtgtttctatccaca

SEQ ID NO: 138722 - DNA, 25 bp, Saccharomyces pastorianus
tgggatgcacaactaagcagacagt

SEQ ID NO: 138723 - DNA, 25 bp, Saccharomyces pastorianus
tcactctcaaaaatcccttcaacaa

SEQ ID NO: 138724 - DNA, 25 bp, Saccharomyces pastorianus
gcagaccgccagatacctttaaaaa

SEQ ID NO: 138725 - DNA, 25 bp, Saccharomyces pastorianus
gcacgtgttaacgacatcacagatt

SEQ ID NO: 138726 - DNA, 25 bp, Saccharomyces pastorianus
agtaatgtacgagtccctggattct

SEQ ID NO: 138727 - DNA, 25 bp, Saccharomyces pastorianus
gagtccctggattctacaacagatg

SEQ ID NO: 138728 - DNA, 25 bp, Saccharomyces pastorianus
ggaatatcgtttagccaaggttcaa

SEQ ID NO: 138729 - DNA, 25 bp, Saccharomyces pastorianus
tttcccggcgagctgtatgactata

SEQ ID NO: 138730 - DNA, 25 bp, Saccharomyces pastorianus
gacgttatattgtctaaacaccaca

SEQ ID NO: 138731 - DNA, 25 bp, Saccharomyces pastorianus
gaacaactcctttggtttagatgca

SEQ ID NO: 138732 - DNA, 25 bp, Saccharomyces pastorianus
caaggttcaaggaccattcacgata

SEQ ID NO: 138733 - DNA, 25 bp, Saccharomyces pastorianus
cagaaggcggtgatatctttgcatt

SEQ ID NO: 138734 - DNA, 25 bp, Saccharomyces pastorianus
gcattttatccatttttaccgtcag

SEQ ID NO: 138735 - DNA, 25 bp, Saccharomyces pastorianus
atgggtctttaatcttactcttcaa

SEQ ID NO: 138736 - DNA, 25 bp, Saccharomyces pastorianus
atttcacctaatggacgctctttta

SEQ ID NO: 138737 - DNA, 25 bp, Saccharomyces pastorianus
gggtcgtggctctcttatatgtcac

SEQ ID NO: 138738 - DNA, 25 bp, Saccharomyces pastorianus
ggtttttaaatcaccagctgatgaa

SEQ ID NO: 138739 - DNA, 25 bp, Saccharomyces pastorianus
gtggatagcactttgaacttcagta

SEQ ID NO: 138740 - DNA, 25 bp, Saccharomyces pastorianus
tcattaccagcaccagaggaaaatt

SEQ ID NO: 138741 - DNA, 25 bp, Saccharomyces pastorianus
aatttgagcaccgtatcaacccaaa

SEQ ID NO: 138742 - DNA, 25 bp, Saccharomyces pastorianus
caaaacctccaaaagtattctgctt

SEQ ID NO: 138743 - DNA, 25 bp, Saccharomyces pastorianus
aatgatgctagacccacagcgaaga

SEQ ID NO: 138744 - DNA, 25 bp, Saccharomyces pastorianus
gacaacgttactttatcattaccag

SEQ ID NO: 138745 - DNA, 25 bp, Saccharomyces pastorianus
aagagcgttgattttactggccttc

SEQ ID NO: 138746 - DNA, 25 bp, Saccharomyces pastorianus
tttgaacttcagtacaatctcggaa

SEQ ID NO: 138747 - DNA, 25 bp, Saccharomyces pastorianus
cgaactgcacagtatcggcctaata

SEQ ID NO: 138748 - DNA, 25 bp, Saccharomyces pastorianus
agttggcctatctacggaacagctc

SEQ ID NO: 138749 - DNA, 25 bp, Saccharomyces pastorianus
atggattcttcggttggatttgtca

SEQ ID NO: 138750 - DNA, 25 bp, Saccharomyces pastorianus
cagcaccagaacttattatccaggg

SEQ ID NO: 138751 - DNA, 25 bp, Saccharomyces pastorianus
gatgggagccaatcggattcacaag

SEQ ID NO: 138752 - DNA, 25 bp, Saccharomyces pastorianus
gttaccttcaagatcgagtcgcaca

SEQ ID NO: 138753 - DNA, 25 bp, Saccharomyces pastorianus
gaacagctcgtatccattataaggg

SEQ ID NO: 138754 - DNA, 25 bp, Saccharomyces pastorianus
agggacttgaaaccatccaactgtt

SEQ ID NO: 138755 - DNA, 25 bp, Saccharomyces pastorianus
tttacaacagtattgcagtggcggc

SEQ ID NO: 138756 - DNA, 25 bp, Saccharomyces pastorianus
gagaccagtttcttcttctacgtta

SEQ ID NO: 138757 - DNA, 25 bp, Saccharomyces pastorianus
gagtttttcccatcaattgttattg

SEQ ID NO: 138758 - DNA, 25 bp, Saccharomyces pastorianus
tgtggcatgactgccatcgtacgtt

SEQ ID NO: 138759 - DNA, 25 bp, Saccharomyces pastorianus
tttagttcagcataccaggacacac

SEQ ID NO: 138760 - DNA, 25 bp, Saccharomyces pastorianus
aggacacactctggcgaaaaacctt

SEQ ID NO: 138761 - DNA, 25 bp, Saccharomyces pastorianus
aataagtcattttccagtgctcagg

SEQ ID NO: 138762 - DNA, 25 bp, Saccharomyces pastorianus
aaattcgcgatttcaagttctttga

SEQ ID NO: 138763 - DNA, 25 bp, Saccharomyces pastorianus
ttagaagcagtacatttaacccggg

SEQ ID NO: 138764 - DNA, 25 bp, Saccharomyces pastorianus
tattgcgtcaatcaaggcagccgga

SEQ ID NO: 138765 - DNA, 25 bp, Saccharomyces pastorianus
gtgctcaggaattaaacgaccattt

SEQ ID NO: 138766 - DNA, 25 bp, Saccharomyces pastorianus
gtctgaataccaatgcttgtggcat

SEQ ID NO: 138767 - DNA, 25 bp, Saccharomyces pastorianus
aatacaagtgctctgactgttccaa

SEQ ID NO: 138768 - DNA, 25 bp, Saccharomyces pastorianus
cagccggaacaggtgatttgccaat

SEQ ID NO: 138769 - DNA, 25 bp, Saccharomyces pastorianus
gactagtggtcacaagtttgttcaa

SEQ ID NO: 138770 - DNA, 25 bp, Saccharomyces pastorianus
caaataatgatgacgttttccataa

SEQ ID NO: 138771 - DNA, 25 bp, Saccharomyces pastorianus
atcttaaataccgatatggatttga

SEQ ID NO: 138772 - DNA, 25 bp, Saccharomyces pastorianus
gtttgttcaagatcatcaatcatca

SEQ ID NO: 138773 - DNA, 25 bp, Saccharomyces pastorianus
tgacgttttccataaatactgcaaa

SEQ ID NO: 138774 - DNA, 25 bp, Saccharomyces pastorianus
atgcacggctagcacgagcgcgact

SEQ ID NO: 138775 - DNA, 25 bp, Saccharomyces pastorianus
gtcacaagtttgttcaagatcatca

SEQ ID NO: 138776 - DNA, 25 bp, Saccharomyces pastorianus
cagaaaatcatgaaaacggtaacca

SEQ ID NO: 138777 - DNA, 25 bp, Saccharomyces pastorianus
atggttcgagcacagaaaatcatga

SEQ ID NO: 138778 - DNA, 25 bp, Saccharomyces pastorianus
agcacgagcgcgactagtggtcaca

SEQ ID NO: 138779 - DNA, 25 bp, Saccharomyces pastorianus
gagcgcgactagtggtcacaagttt

SEQ ID NO: 138780 - DNA, 25 bp, Saccharomyces pastorianus
gactagtggtcacaagtttgttcaa

SEQ ID NO: 138781 - DNA, 25 bp, Saccharomyces pastorianus
caaccttgttctaagcatatgcatt

SEQ ID NO: 138782 - DNA, 25 bp, Saccharomyces pastorianus
ctaccacccaaatgttcatctttac

SEQ ID NO: 138783 - DNA, 25 bp, Saccharomyces pastorianus
gtttgttcaagatcatcaatcatca

SEQ ID NO: 138784 - DNA, 25 bp, Saccharomyces pastorianus
atgcacggctagcacgagcgcgact

SEQ ID NO: 138785 - DNA, 25 bp, Saccharomyces pastorianus
gcacgagcgcgactagtggtcacaa

SEQ ID NO: 138786 - DNA, 25 bp, Saccharomyces pastorianus
ggtacaaatcatgcttatcacgaac

SEQ ID NO: 138787 - DNA, 25 bp, Saccharomyces pastorianus
atgacgttttccataaatactgcaa

SEQ ID NO: 138788 - DNA, 25 bp, Saccharomyces pastorianus
tatgcatttagagtcaaagccacct

SEQ ID NO: 138789 - DNA, 25 bp, Saccharomyces pastorianus
atggttcgagcacagaaaatcatga

SEQ ID NO: 138790 - DNA, 25 bp, Saccharomyces pastorianus
ggagagcactgataatcaaccttgt

SEQ ID NO: 138791 - DNA, 25 bp, Saccharomyces pastorianus
tatgggtggtgattgccacgtcaat

SEQ ID NO: 138792 - DNA, 25 bp, Saccharomyces pastorianus
atgcaaggagtacaccgactgccaa

SEQ ID NO: 138793 - DNA, 25 bp, Saccharomyces pastorianus
taacgacgatctgatactgctgccc

SEQ ID NO: 138794 - DNA, 25 bp, Saccharomyces pastorianus
caccacctggatccgatgattgtta

SEQ ID NO: 138795 - DNA, 25 bp, Saccharomyces pastorianus
acttccgcatttgcatctggagcta

SEQ ID NO: 138796 - DNA, 25 bp, Saccharomyces pastorianus
aacaatttccattcggtagcttctg

SEQ ID NO: 138797 - DNA, 25 bp, Saccharomyces pastorianus
gcagctgttgctgatgccgctactt

SEQ ID NO: 138798 - DNA, 25 bp, Saccharomyces pastorianus
ctgctgccctcttccaagaaaaata

SEQ ID NO: 138799 - DNA, 25 bp, Saccharomyces pastorianus
gactgccaacatttcgagttcttga

SEQ ID NO: 138800 - DNA, 25 bp, Saccharomyces pastorianus
ggtagcttctgatccgacaagtccc

SEQ ID NO: 138801 - DNA, 25 bp, Saccharomyces pastorianus
attctaaaagcgacctaccacgtag

SEQ ID NO: 138802 - DNA, 25 bp, Saccharomyces pastorianus
caacaggtgttgtatgagtgtgaca

SEQ ID NO: 138803 - DNA, 25 bp, Saccharomyces pastorianus
atccggccttcttggcaggatagct

SEQ ID NO: 138804 - DNA, 25 bp, Saccharomyces pastorianus
ggccttcttggcaggatagcttttc

SEQ ID NO: 138805 - DNA, 25 bp, Saccharomyces pastorianus
tttttcaatctctctatccggcctt

SEQ ID NO: 138806 - DNA, 25 bp, Saccharomyces pastorianus
gacaaggacactttatatatctttt

SEQ ID NO: 138807 - DNA, 25 bp, Saccharomyces pastorianus
tcttggcaggatagcttttcgtttc

SEQ ID NO: 138808 - DNA, 25 bp, Saccharomyces pastorianus
ttggcaggatagcttttcgtttcaa

SEQ ID NO: 138809 - DNA, 25 bp, Saccharomyces pastorianus
tatctttttcaatctctctatccgg

SEQ ID NO: 138810 - DNA, 25 bp, Saccharomyces pastorianus
cttcttggcaggatagcttttcgtt

SEQ ID NO: 138811 - DNA, 25 bp, Saccharomyces pastorianus
tctatccggccttcttggcaggata

SEQ ID NO: 138812 - DNA, 25 bp, Saccharomyces pastorianus
gtatgagtgtgacaaggacacttta

SEQ ID NO: 138813 - DNA, 25 bp, Saccharomyces pastorianus
aaaggctttagtgttggtgagttca

SEQ ID NO: 138814 - DNA, 25 bp, Saccharomyces pastorianus
caggcggtgaaagaaccagttctgc

SEQ ID NO: 138815 - DNA, 25 bp, Saccharomyces pastorianus
taaaggcatgcataactagatccgt

SEQ ID NO: 138816 - DNA, 25 bp, Saccharomyces pastorianus
ggaaactacgtgtggttctaccgag

SEQ ID NO: 138817 - DNA, 25 bp, Saccharomyces pastorianus
gggctagactacgaccatttatttg

SEQ ID NO: 138818 - DNA, 25 bp, Saccharomyces pastorianus
gaagtaattcccaatggacccaaga

SEQ ID NO: 138819 - DNA, 25 bp, Saccharomyces pastorianus
gccttggccaagttgttacgagaca

SEQ ID NO: 138820 - DNA, 25 bp, Saccharomyces pastorianus
tccaaagtagcaacacaggcggtga

SEQ ID NO: 138821 - DNA, 25 bp, Saccharomyces pastorianus
cagttctgcacaccacgaaggaagt

SEQ ID NO: 138822 - DNA, 25 bp, Saccharomyces pastorianus
gtgagttcaaagacgccttggccaa

SEQ ID NO: 138823 - DNA, 25 bp, Saccharomyces pastorianus
ggacccaagaattactaaaggcatg

SEQ ID NO: 138824 - DNA, 25 bp, Saccharomyces pastorianus
atagaaatgatttaatcggcttgga

SEQ ID NO: 138825 - DNA, 25 bp, Saccharomyces pastorianus
aaatgatttaatcggcttggaattc

SEQ ID NO: 138826 - DNA, 25 bp, Saccharomyces pastorianus
aatgatttaatcggcttggaattca

SEQ ID NO: 138827 - DNA, 25 bp, Saccharomyces pastorianus
gaaatgatttaatcggcttggaatt

SEQ ID NO: 138828 - DNA, 25 bp, Saccharomyces pastorianus
agaaatgatttaatcggcttggaat

SEQ ID NO: 138829 - DNA, 25 bp, Saccharomyces pastorianus
gtgatagaaatgatttaatcggctt

SEQ ID NO: 138830 - DNA, 25 bp, Saccharomyces pastorianus
gatagaaatgatttaatcggcttgg

SEQ ID NO: 138831 - DNA, 25 bp, Saccharomyces pastorianus
tgatttaatcggcttggaattcaaa

SEQ ID NO: 138832 - DNA, 25 bp, Saccharomyces pastorianus
tgatagaaatgatttaatcggcttg

SEQ ID NO: 138833 - DNA, 25 bp, Saccharomyces pastorianus
tagaaatgatttaatcggcttggaa

SEQ ID NO: 138834 - DNA, 25 bp, Saccharomyces pastorianus
tgtgatagaaatgatttaatcggct

SEQ ID NO: 138835 - DNA, 25 bp, Saccharomyces pastorianus
gcagtagtatccgagcgttttcaga

SEQ ID NO: 138836 - DNA, 25 bp, Saccharomyces pastorianus
gatgctatgaacaccttacagagcg

SEQ ID NO: 138837 - DNA, 25 bp, Saccharomyces pastorianus
agtgcttataaaattgccggtggta

SEQ ID NO: 138838 - DNA, 25 bp, Saccharomyces pastorianus
gataggtgcgccgttataggcaaaa

SEQ ID NO: 138839 - DNA, 25 bp, Saccharomyces pastorianus
gaaccctcactaccgaacaatatgg

SEQ ID NO: 138840 - DNA, 25 bp, Saccharomyces pastorianus
aacgatgttgcttaatgcggattta

SEQ ID NO: 138841 - DNA, 25 bp, Saccharomyces pastorianus
attactcctaatcagttcattgcag

SEQ ID NO: 138842 - DNA, 25 bp, Saccharomyces pastorianus
tcattgaatcccgaactaagactag

SEQ ID NO: 138843 - DNA, 25 bp, Saccharomyces pastorianus
cggatttaggacagtttagcggctt

SEQ ID NO: 138844 - DNA, 25 bp, Saccharomyces pastorianus
ggcactgtactgcatgatttgggca

SEQ ID NO: 138845 - DNA, 25 bp, Saccharomyces pastorianus
gtttagcggcttattagaaccctca

SEQ ID NO: 138846 - DNA, 25 bp, Saccharomyces pastorianus
aaggagtctcgtggtgctcatgcga

SEQ ID NO: 138847 - DNA, 25 bp, Saccharomyces pastorianus
cattggcttcaaacatcgggcacga

SEQ ID NO: 138848 - DNA, 25 bp, Saccharomyces pastorianus
ggctcactgaaaacctctcaaatca

SEQ ID NO: 138849 - DNA, 25 bp, Saccharomyces pastorianus
gcttgcgtatcggttcatggagcga

SEQ ID NO: 138850 - DNA, 25 bp, Saccharomyces pastorianus
tggatttagtcgttttcggtcgcgc

SEQ ID NO: 138851 - DNA, 25 bp, Saccharomyces pastorianus
aaacggctgtttctgcttccaaaag

SEQ ID NO: 138852 - DNA, 25 bp, Saccharomyces pastorianus
attacagcctggcttgcctcataag

SEQ ID NO: 138853 - DNA, 25 bp, Saccharomyces pastorianus
ggtcgcgccgttgcaaataccattg

SEQ ID NO: 138854 - DNA, 25 bp, Saccharomyces pastorianus
ggatgtgcacgtttctgataagtca

SEQ ID NO: 138855 - DNA, 25 bp, Saccharomyces pastorianus
taggcgctaactcgctactggattt

SEQ ID NO: 138856 - DNA, 25 bp, Saccharomyces pastorianus
gtaagaaatgctcgcggctcactga

SEQ ID NO: 138857 - DNA, 25 bp, Saccharomyces pastorianus
cttctgtccgatgttgtgtctacaa

SEQ ID NO: 138858 - DNA, 25 bp, Saccharomyces pastorianus
catccaatctttcttctctaatact

SEQ ID NO: 138859 - DNA, 25 bp, Saccharomyces pastorianus
gcctataagacagcccagactttgg

SEQ ID NO: 138860 - DNA, 25 bp, Saccharomyces pastorianus
tttcgacgctttaaggtcactagac

SEQ ID NO: 138861 - DNA, 25 bp, Saccharomyces pastorianus
aactcgttgtcatccaatctttctt

SEQ ID NO: 138862 - DNA, 25 bp, Saccharomyces pastorianus
agaggcacttctgtccgatgttgtg

SEQ ID NO: 138863 - DNA, 25 bp, Saccharomyces pastorianus
gtgctgcggccaacaataatgacca

SEQ ID NO: 138864 - DNA, 25 bp, Saccharomyces pastorianus
gtcactagacgataactccacctct

SEQ ID NO: 138865 - DNA, 25 bp, Saccharomyces pastorianus
gtgtctacaagttcaggtgctgcgg

SEQ ID NO: 138866 - DNA, 25 bp, Saccharomyces pastorianus
aatcttgaattcacatttcgacgct

SEQ ID NO: 138867 - DNA, 25 bp, Saccharomyces pastorianus
ttgaaaccaagacagaggcacttct

SEQ ID NO: 138868 - DNA, 25 bp, Saccharomyces pastorianus
tcattgttattcttctccgcgggct

SEQ ID NO: 138869 - DNA, 25 bp, Saccharomyces pastorianus
tgggttagcaccagctgatcctgaa

SEQ ID NO: 138870 - DNA, 25 bp, Saccharomyces pastorianus
tagcaccagctttattttcatccga

SEQ ID NO: 138871 - DNA, 25 bp, Saccharomyces pastorianus
gccggcttggaggtttcattgttat

SEQ ID NO: 138872 - DNA, 25 bp, Saccharomyces pastorianus
ttttcttctggcttagcaccgaatg

SEQ ID NO: 138873 - DNA, 25 bp, Saccharomyces pastorianus
gaattatcatccttcttttcttctg

SEQ ID NO: 138874 - DNA, 25 bp, Saccharomyces pastorianus
tttctcatcggactttgctccaaaa

SEQ ID NO: 138875 - DNA, 25 bp, Saccharomyces pastorianus
ttccatcttgcttgtcttcatttga

SEQ ID NO: 138876 - DNA, 25 bp, Saccharomyces pastorianus
gaaaatgctggcttagccgttccat

SEQ ID NO: 138877 - DNA, 25 bp, Saccharomyces pastorianus
agagggctggttttgctggttcatt

SEQ ID NO: 138878 - DNA, 25 bp, Saccharomyces pastorianus
tttagaggcatcaccatcctttttc

SEQ ID NO: 138879 - DNA, 25 bp, Saccharomyces pastorianus
taagaggctagtgatcggaatattc

SEQ ID NO: 138880 - DNA, 25 bp, Saccharomyces pastorianus
gacgaagtctacgttcagaattcca

SEQ ID NO: 138881 - DNA, 25 bp, Saccharomyces pastorianus
taagaaaaattcgtcggatcctaat

SEQ ID NO: 138882 - DNA, 25 bp, Saccharomyces pastorianus
gatatcagctgttttagtgagcatg

SEQ ID NO: 138883 - DNA, 25 bp, Saccharomyces pastorianus
aatccgctactagttgacaaagatg

SEQ ID NO: 138884 - DNA, 25 bp, Saccharomyces pastorianus
gggagctcaaacaaagctgttgttc

SEQ ID NO: 138885 - DNA, 25 bp, Saccharomyces pastorianus
ggtgtttccttgtttgagttaatcg

SEQ ID NO: 138886 - DNA, 25 bp, Saccharomyces pastorianus
gagttaatcgttcctatattccaat

SEQ ID NO: 138887 - DNA, 25 bp, Saccharomyces pastorianus
caaagctgttgttcaaacggtaaag

SEQ ID NO: 138888 - DNA, 25 bp, Saccharomyces pastorianus
gacaaagatgctaatggtgtttcct

SEQ ID NO: 138889 - DNA, 25 bp, Saccharomyces pastorianus
gttaacgtcaccttggataatccgc

SEQ ID NO: 138890 - DNA, 25 bp, Saccharomyces pastorianus
ttggattcacttattcaactggcta

SEQ ID NO: 138891 - DNA, 25 bp, Saccharomyces pastorianus
aacgatgttgtttatggcgagggaa

SEQ ID NO: 138892 - DNA, 25 bp, Saccharomyces pastorianus
cgccgttttcctatttgatatatat

SEQ ID NO: 138893 - DNA, 25 bp, Saccharomyces pastorianus
acggcaggctatatcagttgttcaa

SEQ ID NO: 138894 - DNA, 25 bp, Saccharomyces pastorianus
aaaggcacggtagacggcaggctat

SEQ ID NO: 138895 - DNA, 25 bp, Saccharomyces pastorianus
gactgctcttaataatacgttcgct

SEQ ID NO: 138896 - DNA, 25 bp, Saccharomyces pastorianus
attcagggtataaactccccactct

SEQ ID NO: 138897 - DNA, 25 bp, Saccharomyces pastorianus
aacctatctgtgctgcactcttggg

SEQ ID NO: 138898 - DNA, 25 bp, Saccharomyces pastorianus
tctcctctgtggcattaaggtccga

SEQ ID NO: 138899 - DNA, 25 bp, Saccharomyces pastorianus
cactcttgggtacagttggtgcaaa

SEQ ID NO: 138900 - DNA, 25 bp, Saccharomyces pastorianus
ggtccgaaaaggttctgcaggattt

SEQ ID NO: 138901 - DNA, 25 bp, Saccharomyces pastorianus
actagtctatgcttagtctcggcca

SEQ ID NO: 138902 - DNA, 25 bp, Saccharomyces pastorianus
gaataagtatgatctggttgccaag

SEQ ID NO: 138903 - DNA, 25 bp, Saccharomyces pastorianus
gagtagtcgctgcaacaacgataga

SEQ ID NO: 138904 - DNA, 25 bp, Saccharomyces pastorianus
aacgatagaggctggtctggcacaa

SEQ ID NO: 138905 - DNA, 25 bp, Saccharomyces pastorianus
aaggaggtgctctcacggatcagta

SEQ ID NO: 138906 - DNA, 25 bp, Saccharomyces pastorianus
gcattggaggcgtcggatttcttat

SEQ ID NO: 138907 - DNA, 25 bp, Saccharomyces pastorianus
ggatcagtagagtagtcgctgcaac

SEQ ID NO: 138908 - DNA, 25 bp, Saccharomyces pastorianus
agcagtaaatatatctccgttcaag

SEQ ID NO: 138909 - DNA, 25 bp, Saccharomyces pastorianus
ttagtctcggccagcattggaggcg

SEQ ID NO: 138910 - DNA, 25 bp, Saccharomyces pastorianus
gtatggtaaccactcttttattcta

SEQ ID NO: 138911 - DNA, 25 bp, Saccharomyces pastorianus
taagggcctaaaccgagcagtaaat

SEQ ID NO: 138912 - DNA, 25 bp, Saccharomyces pastorianus
taccggaaccaaactggtcaactca

SEQ ID NO: 138913 - DNA, 25 bp, Saccharomyces pastorianus
agttgtgtttgcttaccgttgtatt

SEQ ID NO: 138914 - DNA, 25 bp, Saccharomyces pastorianus
cgcagagttctgtctgtgttgatga

SEQ ID NO: 138915 - DNA, 25 bp, Saccharomyces pastorianus
gagcagtggttgaattcgaaagtac

SEQ ID NO: 138916 - DNA, 25 bp, Saccharomyces pastorianus
gcttaccgttgtattagcaagtagt

SEQ ID NO: 138917 - DNA, 25 bp, Saccharomyces pastorianus
cttactcgcagagttctgtctgtgt

SEQ ID NO: 138918 - DNA, 25 bp, Saccharomyces pastorianus
aactggtcaactcattaagggtctt

SEQ ID NO: 138919 - DNA, 25 bp, Saccharomyces pastorianus
gaaaggatttttctgatccagttgt

SEQ ID NO: 138920 - DNA, 25 bp, Saccharomyces pastorianus
taagggtcttggctgcttactcgca

SEQ ID NO: 138921 - DNA, 25 bp, Saccharomyces pastorianus
attagcaagtagtagagcagtggtt

SEQ ID NO: 138922 - DNA, 25 bp, Saccharomyces pastorianus
tgatccagttgtgtttgcttaccgt

SEQ ID NO: 138923 - DNA, 25 bp, Saccharomyces pastorianus
atcaagaaatctctgggctcactag

SEQ ID NO: 138924 - DNA, 25 bp, Saccharomyces pastorianus
gtgtaaaaacggctgaaatcaagaa

SEQ ID NO: 138925 - DNA, 25 bp, Saccharomyces pastorianus
catttcgaaagtgtaaaaacggctg

SEQ ID NO: 138926 - DNA, 25 bp, Saccharomyces pastorianus
caagaaatctctgggctcactagcg

SEQ ID NO: 138927 - DNA, 25 bp, Saccharomyces pastorianus
aaatctctgggctcactagcggacc

SEQ ID NO: 138928 - DNA, 25 bp, Saccharomyces pastorianus
tctgggctcactagcggaccatcat

SEQ ID NO: 138929 - DNA, 25 bp, Saccharomyces pastorianus
ggaaatagaccatttcgaaagtgta

SEQ ID NO: 138930 - DNA, 25 bp, Saccharomyces pastorianus
tatcgaattctacgaaaggatactt

SEQ ID NO: 138931 - DNA, 25 bp, Saccharomyces pastorianus
gaaatcaagaaatctctgggctcac

SEQ ID NO: 138932 - DNA, 25 bp, Saccharomyces pastorianus
ctgggctcactagcggaccatcata

SEQ ID NO: 138933 - DNA, 25 bp, Saccharomyces pastorianus
atctctgggctcactagcggaccat

SEQ ID NO: 138934 - DNA, 25 bp, Saccharomyces pastorianus
gtcatatggcttgcaagatcttaca

SEQ ID NO: 138935 - DNA, 25 bp, Saccharomyces pastorianus
aggtgtaacacagctgtcatatggc

SEQ ID NO: 138936 - DNA, 25 bp, Saccharomyces pastorianus
ttacaagaattggtcacaggcgaaa

SEQ ID NO: 138937 - DNA, 25 bp, Saccharomyces pastorianus
gatgtcatagtttgcaaaatttcct

SEQ ID NO: 138938 - DNA, 25 bp, Saccharomyces pastorianus
gtcctccaggatagcttgcaaccaa

SEQ ID NO: 138939 - DNA, 25 bp, Saccharomyces pastorianus
taagaagggtctctttgcatcccga

SEQ ID NO: 138940 - DNA, 25 bp, Saccharomyces pastorianus
aaactagatcggactgtgacaaaga

SEQ ID NO: 138941 - DNA, 25 bp, Saccharomyces pastorianus
gaaggatcttgaacactacattgat

SEQ ID NO: 138942 - DNA, 25 bp, Saccharomyces pastorianus
tttgcatcccgatctttctcaatca

SEQ ID NO: 138943 - DNA, 25 bp, Saccharomyces pastorianus
tatgcgacagctgatcaaattgaaa

SEQ ID NO: 138944 - DNA, 25 bp, Saccharomyces pastorianus
gcgaaaacgaggaacttgctgcgaa

SEQ ID NO: 138945 - DNA, 25 bp, Saccharomyces pastorianus
aattcgcttctgaagacgcttctat

SEQ ID NO: 138946 - DNA, 25 bp, Saccharomyces pastorianus
ggtattctgaaggtgtctgccacag

SEQ ID NO: 138947 - DNA, 25 bp, Saccharomyces pastorianus
tgaattaaccggcattccaccagca

SEQ ID NO: 138948 - DNA, 25 bp, Saccharomyces pastorianus
gaatctttgtccaaggtcgcttatc

SEQ ID NO: 138949 - DNA, 25 bp, Saccharomyces pastorianus
agaaaactacgctcactctttgaaa

SEQ ID NO: 138950 - DNA, 25 bp, Saccharomyces pastorianus
gttctggtgccgctgattatgacga

SEQ ID NO: 138951 - DNA, 25 bp, Saccharomyces pastorianus
tgaaaccgccattgctgaagacttt

SEQ ID NO: 138952 - DNA, 25 bp, Saccharomyces pastorianus
cttctaagttgtacggaggtgctga

SEQ ID NO: 138953 - DNA, 25 bp, Saccharomyces pastorianus
gaggtcacatttgcacttgacgcta

SEQ ID NO: 138954 - DNA, 25 bp, Saccharomyces pastorianus
aaatccgaatctatcaccatcacta

SEQ ID NO: 138955 - DNA, 25 bp, Saccharomyces pastorianus
caaggtcgcttatccaattacttct

SEQ ID NO: 138956 - DNA, 25 bp, Saccharomyces pastorianus
ggctatcggtagacttctaacccat

SEQ ID NO: 138957 - DNA, 25 bp, Saccharomyces pastorianus
gattttccccttggatcgagaagcc

SEQ ID NO: 138958 - DNA, 25 bp, Saccharomyces pastorianus
tctagtgattatttccagtggtctg

SEQ ID NO: 138959 - DNA, 25 bp, Saccharomyces pastorianus
gaggagaccctagagtttttgaagt

SEQ ID NO: 138960 - DNA, 25 bp, Saccharomyces pastorianus
agggtcctctcttattttatgctca

SEQ ID NO: 138961 - DNA, 25 bp, Saccharomyces pastorianus
taaaatggatcctttccctcacgga

SEQ ID NO: 138962 - DNA, 25 bp, Saccharomyces pastorianus
gagaccgacaatacccactaaaatg

SEQ ID NO: 138963 - DNA, 25 bp, Saccharomyces pastorianus
ggaatcattgactcagcgcacaacc

SEQ ID NO: 138964 - DNA, 25 bp, Saccharomyces pastorianus
tttacccagacaaaccgacttctag

SEQ ID NO: 138965 - DNA, 25 bp, Saccharomyces pastorianus
agaggctaatccaccggccagaaag

SEQ ID NO: 138966 - DNA, 25 bp, Saccharomyces pastorianus
gtggattttgccatttctaaagagc

SEQ ID NO: 138967 - DNA, 25 bp, Saccharomyces pastorianus
actttcataagaggtcccatctgcg

SEQ ID NO: 138968 - DNA, 25 bp, Saccharomyces pastorianus
tcccatctgcggtacagacaactgc

SEQ ID NO: 138969 - DNA, 25 bp, Saccharomyces pastorianus
aagaggtcccatctgcggtacagac

SEQ ID NO: 138970 - DNA, 25 bp, Saccharomyces pastorianus
ttcataagaggtcccatctgcggta

SEQ ID NO: 138971 - DNA, 25 bp, Saccharomyces pastorianus
tttcataagaggtcccatctgcggt

SEQ ID NO: 138972 - DNA, 25 bp, Saccharomyces pastorianus
gtcccatctgcggtacagacaactg

SEQ ID NO: 138973 - DNA, 25 bp, Saccharomyces pastorianus
ataagaggtcccatctgcggtacag

SEQ ID NO: 138974 - DNA, 25 bp, Saccharomyces pastorianus
ggtacagacaactgcccctcacggc

SEQ ID NO: 138975 - DNA, 25 bp, Saccharomyces pastorianus
gaggtcccatctgcggtacagacaa

SEQ ID NO: 138976 - DNA, 25 bp, Saccharomyces pastorianus
ctactttcataagaggtcccatctg

SEQ ID NO: 138977 - DNA, 25 bp, Saccharomyces pastorianus
taagaggtcccatctgcggtacaga

SEQ ID NO: 138978 - DNA, 25 bp, Saccharomyces pastorianus
ttgacgaactcaacaaagctgccga

SEQ ID NO: 138979 - DNA, 25 bp, Saccharomyces pastorianus
tgccgagtccacagatagtaaaatt

SEQ ID NO: 138980 - DNA, 25 bp, Saccharomyces pastorianus
aaagctgccgagtccacagatagta

SEQ ID NO: 138981 - DNA, 25 bp, Saccharomyces pastorianus
taacgtccactggatttggaagcgc

SEQ ID NO: 138982 - DNA, 25 bp, Saccharomyces pastorianus
cactggatttggaagcgcactacaa

SEQ ID NO: 138983 - DNA, 25 bp, Saccharomyces pastorianus
gaagcgcactacaagcgtttgctca

SEQ ID NO: 138984 - DNA, 25 bp, Saccharomyces pastorianus
ggaagactaacgtccactggatttg

SEQ ID NO: 138985 - DNA, 25 bp, Saccharomyces pastorianus
caaatgtgaacagaatagttgcttc

SEQ ID NO: 138986 - DNA, 25 bp, Saccharomyces pastorianus
aacaaagctgccgagtccacagata

SEQ ID NO: 138987 - DNA, 25 bp, Saccharomyces pastorianus
tagttgcttctgttgacgaactcaa

SEQ ID NO: 138988 - DNA, 25 bp, Saccharomyces pastorianus
cgcactacaagcgtttgctcaaggc

SEQ ID NO: 138989 - DNA, 25 bp, Saccharomyces pastorianus
gactcttcaagaacgctttccatcg

SEQ ID NO: 138990 - DNA, 25 bp, Saccharomyces pastorianus
gagcaagaacgtttggcgcaactat

SEQ ID NO: 138991 - DNA, 25 bp, Saccharomyces pastorianus
gagatcgatgatcatttcatttcca

SEQ ID NO: 138992 - DNA, 25 bp, Saccharomyces pastorianus
ataaaagcgcacctcctgctataag

SEQ ID NO: 138993 - DNA, 25 bp, Saccharomyces pastorianus
gaaacacaatcagcacgtattcttg

SEQ ID NO: 138994 - DNA, 25 bp, Saccharomyces pastorianus
gggctaagaatttcgtgtcacaaat

SEQ ID NO: 138995 - DNA, 25 bp, Saccharomyces pastorianus
gcaactaagattctccttgaccttt

SEQ ID NO: 138996 - DNA, 25 bp, Saccharomyces pastorianus
tttccatcgccagtcgaaacacaat

SEQ ID NO: 138997 - DNA, 25 bp, Saccharomyces pastorianus
attaaaccaggtgacattcttgtaa

SEQ ID NO: 138998 - DNA, 25 bp, Saccharomyces pastorianus
gaagttatacaacccataggagcaa

SEQ ID NO: 138999 - DNA, 25 bp, Saccharomyces pastorianus
gtaggcgagatttccaacaacgtca

SEQ ID NO: 139000 - DNA, 25 bp, Saccharomyces pastorianus
ggcggaaatccataaacgagtatca

SEQ ID NO: 139001 - DNA, 25 bp, Saccharomyces pastorianus
ggagcaagcttttcagataggtaat

SEQ ID NO: 139002 - DNA, 25 bp, Saccharomyces pastorianus
actggaaatgttttgcctgtctctt

SEQ ID NO: 139003 - DNA, 25 bp, Saccharomyces pastorianus
agtttccactaattcatctgcatta

SEQ ID NO: 139004 - DNA, 25 bp, Saccharomyces pastorianus
aatctcccaccgtactgcagaagta

SEQ ID NO: 139005 - DNA, 25 bp, Saccharomyces pastorianus
cattcgatggtggagcaagcttttc

SEQ ID NO: 139006 - DNA, 25 bp, Saccharomyces pastorianus
gagttgctcgcaacgggtcgataaa

SEQ ID NO: 139007 - DNA, 25 bp, Saccharomyces pastorianus
ctgcattaacagaaaccgctcaaga

SEQ ID NO: 139008 - DNA, 25 bp, Saccharomyces pastorianus
gagtatcatgatacagtttccacta

SEQ ID NO: 139009 - DNA, 25 bp, Saccharomyces pastorianus
ttccccacaaacaagagttgctcgc

SEQ ID NO: 139010 - DNA, 25 bp, Saccharomyces pastorianus
agatatttcgatggcagctccacca

SEQ ID NO: 139011 - DNA, 25 bp, Saccharomyces pastorianus
tttacttgcaattgattcatcatat

SEQ ID NO: 139012 - DNA, 25 bp, Saccharomyces pastorianus
attgattcatcatattagtcgtttc

SEQ ID NO: 139013 - DNA, 25 bp, Saccharomyces pastorianus
cgtttacttgcaattgattcatcat

SEQ ID NO: 139014 - DNA, 25 bp, Saccharomyces pastorianus
acttgcaattgattcatcatattag

SEQ ID NO: 139015 - DNA, 25 bp, Saccharomyces pastorianus
tgcaattgattcatcatattagtcg

SEQ ID NO: 139016 - DNA, 25 bp, Saccharomyces pastorianus
gcaattgattcatcatattagtcgt

SEQ ID NO: 139017 - DNA, 25 bp, Saccharomyces pastorianus
ttacttgcaattgattcatcatatt

SEQ ID NO: 139018 - DNA, 25 bp, Saccharomyces pastorianus
gtttacttgcaattgattcatcata

SEQ ID NO: 139019 - DNA, 25 bp, Saccharomyces pastorianus
gcgtttacttgcaattgattcatca

SEQ ID NO: 139020 - DNA, 25 bp, Saccharomyces pastorianus
aattgattcatcatattagtcgttt

SEQ ID NO: 139021 - DNA, 25 bp, Saccharomyces pastorianus
ggcgtttacttgcaattgattcatc

SEQ ID NO: 139022 - DNA, 25 bp, Saccharomyces pastorianus
gaagcactgagacgtctgatatcat

SEQ ID NO: 139023 - DNA, 25 bp, Saccharomyces pastorianus
tgacgccaaagggacgaagcactga

SEQ ID NO: 139024 - DNA, 25 bp, Saccharomyces pastorianus
aaagccttagtctccaagtcgttga

SEQ ID NO: 139025 - DNA, 25 bp, Saccharomyces pastorianus
ataaactgccctatgacgccaaagg

SEQ ID NO: 139026 - DNA, 25 bp, Saccharomyces pastorianus
tcaagccgcggcagttaaccccaat

SEQ ID NO: 139027 - DNA, 25 bp, Saccharomyces pastorianus
gaagtgaccctgtttatcaaatgat

SEQ ID NO: 139028 - DNA, 25 bp, Saccharomyces pastorianus
accaatctgggtgagcttaaacaac

SEQ ID NO: 139029 - DNA, 25 bp, Saccharomyces pastorianus
gaagtcttggcaatttctagaaacg

SEQ ID NO: 139030 - DNA, 25 bp, Saccharomyces pastorianus
gttgacgccctcaaaccagggaaga

SEQ ID NO: 139031 - DNA, 25 bp, Saccharomyces pastorianus
gaaaaactaccgatctttagagatt

SEQ ID NO: 139032 - DNA, 25 bp, Saccharomyces pastorianus
tgatatcatctcagctgtcaagccg

SEQ ID NO: 139033 - DNA, 25 bp, Saccharomyces pastorianus
ctccaagaaatactatgaaatcgtg

SEQ ID NO: 139034 - DNA, 25 bp, Saccharomyces pastorianus
gaaaatcctatctccaagaaatact

SEQ ID NO: 139035 - DNA, 25 bp, Saccharomyces pastorianus
gagagtgctaatgctgcttattatc

SEQ ID NO: 139036 - DNA, 25 bp, Saccharomyces pastorianus
tcaaagaaagatcaggaatgccgaa

SEQ ID NO: 139037 - DNA, 25 bp, Saccharomyces pastorianus
tgttgagagtgctaatgctgcttat

SEQ ID NO: 139038 - DNA, 25 bp, Saccharomyces pastorianus
aatcctatctccaagaaatactatg

SEQ ID NO: 139039 - DNA, 25 bp, Saccharomyces pastorianus
atgccgaaaatcctatctccaagaa

SEQ ID NO: 139040 - DNA, 25 bp, Saccharomyces pastorianus
gaatgccgaaaatcctatctccaag

SEQ ID NO: 139041 - DNA, 25 bp, Saccharomyces pastorianus
gagtgctaatgctgcttattatcaa

SEQ ID NO: 139042 - DNA, 25 bp, Saccharomyces pastorianus
gccgaaaatcctatctccaagaaat

SEQ ID NO: 139043 - DNA, 25 bp, Saccharomyces pastorianus
agtgctaatgctgcttattatcaaa

SEQ ID NO: 139044 - DNA, 25 bp, Saccharomyces pastorianus
tcattaaccgtttctcgtgagcaat

SEQ ID NO: 139045 - DNA, 25 bp, Saccharomyces pastorianus
gatttcattggttctggtagtggac

SEQ ID NO: 139046 - DNA, 25 bp, Saccharomyces pastorianus
gttgtcaacattcttgcaattcggt

SEQ ID NO: 139047 - DNA, 25 bp, Saccharomyces pastorianus
ggtacagagttgagacgccgtttaa

SEQ ID NO: 139048 - DNA, 25 bp, Saccharomyces pastorianus
gccagacgaagaccgttatgctcca

SEQ ID NO: 139049 - DNA, 25 bp, Saccharomyces pastorianus
gaatggtcacttatttgccagacga

SEQ ID NO: 139050 - DNA, 25 bp, Saccharomyces pastorianus
gatttctacggtccatacgatgctc

SEQ ID NO: 139051 - DNA, 25 bp, Saccharomyces pastorianus
caaggactctgttgttggcaagcaa

SEQ ID NO: 139052 - DNA, 25 bp, Saccharomyces pastorianus
gattcctgaatggttctcatatcct

SEQ ID NO: 139053 - DNA, 25 bp, Saccharomyces pastorianus
atacctcaagctcagccgatattca

SEQ ID NO: 139054 - DNA, 25 bp, Saccharomyces pastorianus
gtcagcggatgaacctatttcacat

SEQ ID NO: 139055 - DNA, 25 bp, Saccharomyces pastorianus
cattagtgactatccaggtttgcgt

SEQ ID NO: 139056 - DNA, 25 bp, Saccharomyces pastorianus
gactatccaggtttgcgttaagaca

SEQ ID NO: 139057 - DNA, 25 bp, Saccharomyces pastorianus
aactaagactcgaattccaatcaag

SEQ ID NO: 139058 - DNA, 25 bp, Saccharomyces pastorianus
attacctcaacattagtgactatcc

SEQ ID NO: 139059 - DNA, 25 bp, Saccharomyces pastorianus
acctgcccaactaagactcgaattc

SEQ ID NO: 139060 - DNA, 25 bp, Saccharomyces pastorianus
ggtttgcgttaagacacctgcccaa

SEQ ID NO: 139061 - DNA, 25 bp, Saccharomyces pastorianus
gttaagacacctgcccaactaagac

SEQ ID NO: 139062 - DNA, 25 bp, Saccharomyces pastorianus
gtgattattacgtcggcggttcttt

SEQ ID NO: 139063 - DNA, 25 bp, Saccharomyces pastorianus
cggcggttctttagatagcgattca

SEQ ID NO: 139064 - DNA, 25 bp, Saccharomyces pastorianus
ttagatagcgattcaattacctcaa

SEQ ID NO: 139065 - DNA, 25 bp, Saccharomyces pastorianus
ttacgtcggcggttctttagatagc

SEQ ID NO: 139066 - DNA, 25 bp, Saccharomyces pastorianus
ttaatcggccacattgttcccgaag

SEQ ID NO: 139067 - DNA, 25 bp, Saccharomyces pastorianus
aagaaagcaccaagcctacctgaag

SEQ ID NO: 139068 - DNA, 25 bp, Saccharomyces pastorianus
tggtcctatcgggttggtcagagac

SEQ ID NO: 139069 - DNA, 25 bp, Saccharomyces pastorianus
aggccaacggtcacttgcaaattct

SEQ ID NO: 139070 - DNA, 25 bp, Saccharomyces pastorianus
ttgacctattagtctctgataagga

SEQ ID NO: 139071 - DNA, 25 bp, Saccharomyces pastorianus
ctctgctctgatgggttacggtttg

SEQ ID NO: 139072 - DNA, 25 bp, Saccharomyces pastorianus
acaaagttgggttgcacctccacct

SEQ ID NO: 139073 - DNA, 25 bp, Saccharomyces pastorianus
agattattaagccactctctcaccc

SEQ ID NO: 139074 - DNA, 25 bp, Saccharomyces pastorianus
attctgtacggttcattagcaccag

SEQ ID NO: 139075 - DNA, 25 bp, Saccharomyces pastorianus
tggttctcacgggttcttaatcggc

SEQ ID NO: 139076 - DNA, 25 bp, Saccharomyces pastorianus
cttcaagggtagagcacgtgtgttc

SEQ ID NO: 139077 - DNA, 25 bp, Saccharomyces pastorianus
agctcaacaagtactcgtatatcat

SEQ ID NO: 139078 - DNA, 25 bp, Saccharomyces pastorianus
acgagatgcgttgcaaagaagctca

SEQ ID NO: 139079 - DNA, 25 bp, Saccharomyces pastorianus
gaataacagatgttctcaatccatt

SEQ ID NO: 139080 - DNA, 25 bp, Saccharomyces pastorianus
agttgctacatctagacaattctct

SEQ ID NO: 139081 - DNA, 25 bp, Saccharomyces pastorianus
tcctgttggtggtccggtaacccat

SEQ ID NO: 139082 - DNA, 25 bp, Saccharomyces pastorianus
cggtaacccatgtaacatgcatcta

SEQ ID NO: 139083 - DNA, 25 bp, Saccharomyces pastorianus
aggccatgctttatgccaccggttt

SEQ ID NO: 139084 - DNA, 25 bp, Saccharomyces pastorianus
ttatgccaccggtttcaagaaggaa

SEQ ID NO: 139085 - DNA, 25 bp, Saccharomyces pastorianus
agatttcaagaagcctcaagtcggg

SEQ ID NO: 139086 - DNA, 25 bp, Saccharomyces pastorianus
taacatgcatctattggacttgaat

SEQ ID NO: 139087 - DNA, 25 bp, Saccharomyces pastorianus
gtatatcatcactgaacctaagggc

SEQ ID NO: 139088 - DNA, 25 bp, Saccharomyces pastorianus
cacactcctgcacgatatggacgaa

SEQ ID NO: 139089 - DNA, 25 bp, Saccharomyces pastorianus
cagccaactggaggacgtgcataaa

SEQ ID NO: 139090 - DNA, 25 bp, Saccharomyces pastorianus
gtgcataaagtgctcctgtctctat

SEQ ID NO: 139091 - DNA, 25 bp, Saccharomyces pastorianus
gaaacgcagaagatccagctcccca

SEQ ID NO: 139092 - DNA, 25 bp, Saccharomyces pastorianus
gtcggattccagctacaggcaggta

SEQ ID NO: 139093 - DNA, 25 bp, Saccharomyces pastorianus
aaaggcagatcacgcctacgatcgc

SEQ ID NO: 139094 - DNA, 25 bp, Saccharomyces pastorianus
gactgctctagagatggcgtttcga

SEQ ID NO: 139095 - DNA, 25 bp, Saccharomyces pastorianus
agcagcgtaagaagtccgtgccgcc

SEQ ID NO: 139096 - DNA, 25 bp, Saccharomyces pastorianus
gatcgcccggatgtgtctctgaatg

SEQ ID NO: 139097 - DNA, 25 bp, Saccharomyces pastorianus
gacgaagcccacgataagcagcgta

SEQ ID NO: 139098 - DNA, 25 bp, Saccharomyces pastorianus
aatgatgacgctagccatcggctga

SEQ ID NO: 139099 - DNA, 25 bp, Saccharomyces pastorianus
gaggctaattctgagcactcgttga

SEQ ID NO: 139100 - DNA, 25 bp, Saccharomyces pastorianus
ggaaaactctgacaagctaattaaa

SEQ ID NO: 139101 - DNA, 25 bp, Saccharomyces pastorianus
taagacattatgtaaatcgctaaac

SEQ ID NO: 139102 - DNA, 25 bp, Saccharomyces pastorianus
atggagctgagggaaaactctgaca

SEQ ID NO: 139103 - DNA, 25 bp, Saccharomyces pastorianus
ggaatcggacaagcagatactggaa

SEQ ID NO: 139104 - DNA, 25 bp, Saccharomyces pastorianus
gattacagaaacatcatcaccgttc

SEQ ID NO: 139105 - DNA, 25 bp, Saccharomyces pastorianus
aagtaacgaatgcaggcgctttaga

SEQ ID NO: 139106 - DNA, 25 bp, Saccharomyces pastorianus
caggcgctttagaggaatcggacaa

SEQ ID NO: 139107 - DNA, 25 bp, Saccharomyces pastorianus
atggtcgctagaggtagaacagacg

SEQ ID NO: 139108 - DNA, 25 bp, Saccharomyces pastorianus
agatatctacagatgtttcagaggc

SEQ ID NO: 139109 - DNA, 25 bp, Saccharomyces pastorianus
gagcactcgttgatgattacagaaa

SEQ ID NO: 139110 - DNA, 25 bp, Saccharomyces pastorianus
gaattccttgcttatgcggttgaaa

SEQ ID NO: 139111 - DNA, 25 bp, Saccharomyces pastorianus
agccgtttaggcttgctatgaggca

SEQ ID NO: 139112 - DNA, 25 bp, Saccharomyces pastorianus
gtgccttgcagatgaattccttgct

SEQ ID NO: 139113 - DNA, 25 bp, Saccharomyces pastorianus
agagcaatctcgctgcctcgaagta

SEQ ID NO: 139114 - DNA, 25 bp, Saccharomyces pastorianus
gattagtatttttgtcgaagccgtt

SEQ ID NO: 139115 - DNA, 25 bp, Saccharomyces pastorianus
aatctcgctgcctcgaagtaactgt

SEQ ID NO: 139116 - DNA, 25 bp, Saccharomyces pastorianus
aggcttgctatgaggcattcgccgt

SEQ ID NO: 139117 - DNA, 25 bp, Saccharomyces pastorianus
tgcctcgaagtaactgtgccttgca

SEQ ID NO: 139118 - DNA, 25 bp, Saccharomyces pastorianus
tgaggccaacaagagcaatctcgct

SEQ ID NO: 139119 - DNA, 25 bp, Saccharomyces pastorianus
tatttttgtcgaagccgtttaggct

SEQ ID NO: 139120 - DNA, 25 bp, Saccharomyces pastorianus
gcttatgcggttgaaaacattggtt

SEQ ID NO: 139121 - DNA, 25 bp, Saccharomyces pastorianus
gacaggattattaccgatttttgag

SEQ ID NO: 139122 - DNA, 25 bp, Saccharomyces pastorianus
ctattcaaggtctcgcccatcaatg

SEQ ID NO: 139123 - DNA, 25 bp, Saccharomyces pastorianus
gtgtgaagcacctgaatccaatcca

SEQ ID NO: 139124 - DNA, 25 bp, Saccharomyces pastorianus
gaacattctgttatctcgagcaagt

SEQ ID NO: 139125 - DNA, 25 bp, Saccharomyces pastorianus
actagcattttatccgttctttcta

SEQ ID NO: 139126 - DNA, 25 bp, Saccharomyces pastorianus
tttctaaaatcttcttgggccaact

SEQ ID NO: 139127 - DNA, 25 bp, Saccharomyces pastorianus
gcagacctactttcgactgttggga

SEQ ID NO: 139128 - DNA, 25 bp, Saccharomyces pastorianus
atgtcatgtgcaggtgccgttggca

SEQ ID NO: 139129 - DNA, 25 bp, Saccharomyces pastorianus
atgcctcaatccctgtgacgaacta

SEQ ID NO: 139130 - DNA, 25 bp, Saccharomyces pastorianus
gaatccaatccataccgttctatta

SEQ ID NO: 139131 - DNA, 25 bp, Saccharomyces pastorianus
ttgatctttctagtcgttccattaa

SEQ ID NO: 139132 - DNA, 25 bp, Saccharomyces pastorianus
actgttttggccgtgaacccagcta

SEQ ID NO: 139133 - DNA, 25 bp, Saccharomyces pastorianus
gattcgtttgttgacagcttccaca

SEQ ID NO: 139134 - DNA, 25 bp, Saccharomyces pastorianus
acaaacaagtgtggccgcgttgctg

SEQ ID NO: 139135 - DNA, 25 bp, Saccharomyces pastorianus
atctggtttagtacagctgcggcta

SEQ ID NO: 139136 - DNA, 25 bp, Saccharomyces pastorianus
gaacccagctacgatgattgtcaaa

SEQ ID NO: 139137 - DNA, 25 bp, Saccharomyces pastorianus
tcatgatcctctgatatctggttta

SEQ ID NO: 139138 - DNA, 25 bp, Saccharomyces pastorianus
agcttccacaatttgcctacttcta

SEQ ID NO: 139139 - DNA, 25 bp, Saccharomyces pastorianus
gcctacttctagctatcatgatcct

SEQ ID NO: 139140 - DNA, 25 bp, Saccharomyces pastorianus
gtgcatcaatctttgttctgccatg

SEQ ID NO: 139141 - DNA, 25 bp, Saccharomyces pastorianus
cacgacgtgccaatggaaactgttt

SEQ ID NO: 139142 - DNA, 25 bp, Saccharomyces pastorianus
gccatgaacaagcagtccagagata

SEQ ID NO: 139143 - DNA, 25 bp, Saccharomyces pastorianus
gacgatggtataaccttcgcaagat

SEQ ID NO: 139144 - DNA, 25 bp, Saccharomyces pastorianus
aactttttctcatctagtgttagca

SEQ ID NO: 139145 - DNA, 25 bp, Saccharomyces pastorianus
gcattggcgtcagtctttctgataa

SEQ ID NO: 139146 - DNA, 25 bp, Saccharomyces pastorianus
gcatccaaggaagctcgccaagaaa

SEQ ID NO: 139147 - DNA, 25 bp, Saccharomyces pastorianus
atcaattccaataccaaaacgctag

SEQ ID NO: 139148 - DNA, 25 bp, Saccharomyces pastorianus
tagcatacttaacagcattggcgtc

SEQ ID NO: 139149 - DNA, 25 bp, Saccharomyces pastorianus
gcgggcagttcttcttcgaatataa

SEQ ID NO: 139150 - DNA, 25 bp, Saccharomyces pastorianus
aactggatcagctgccattttaggc

SEQ ID NO: 139151 - DNA, 25 bp, Saccharomyces pastorianus
caaaagaggcttccagagtagcgat

SEQ ID NO: 139152 - DNA, 25 bp, Saccharomyces pastorianus
cagagtagcgattgaggcggttaat

SEQ ID NO: 139153 - DNA, 25 bp, Saccharomyces pastorianus
tgattcggttgtcaattcgcacgcg

SEQ ID NO: 139154 - DNA, 25 bp, Saccharomyces pastorianus
tacatagtgcttcctttggaggtat

SEQ ID NO: 139155 - DNA, 25 bp, Saccharomyces pastorianus
aagcctacatagtgcttcctttgga

SEQ ID NO: 139156 - DNA, 25 bp, Saccharomyces pastorianus
gcctacatagtgcttcctttggagg

SEQ ID NO: 139157 - DNA, 25 bp, Saccharomyces pastorianus
gtcaagcctacatagtgcttccttt

SEQ ID NO: 139158 - DNA, 25 bp, Saccharomyces pastorianus
acgattgtctcaacttactatgatt

SEQ ID NO: 139159 - DNA, 25 bp, Saccharomyces pastorianus
atagtgcttcctttggaggtatacg

SEQ ID NO: 139160 - DNA, 25 bp, Saccharomyces pastorianus
gtgcttcctttggaggtatacgatt

SEQ ID NO: 139161 - DNA, 25 bp, Saccharomyces pastorianus
ttcctttggaggtatacgattgtct

SEQ ID NO: 139162 - DNA, 25 bp, Saccharomyces pastorianus
gaggtatacgattgtctcaacttac

SEQ ID NO: 139163 - DNA, 25 bp, Saccharomyces pastorianus
ttgtcaagcctacatagtgcttcct

SEQ ID NO: 139164 - DNA, 25 bp, Saccharomyces pastorianus
ggtatacgattgtctcaacttacta

SEQ ID NO: 139165 - DNA, 25 bp, Saccharomyces pastorianus
gaatcctccctgctggcatgagaaa

SEQ ID NO: 139166 - DNA, 25 bp, Saccharomyces pastorianus
gtcatcgctatacgaatcctccctg

SEQ ID NO: 139167 - DNA, 25 bp, Saccharomyces pastorianus
aagtcatcgctatacgaatcctccc

SEQ ID NO: 139168 - DNA, 25 bp, Saccharomyces pastorianus
tatacgaatcctccctgctggcatg

SEQ ID NO: 139169 - DNA, 25 bp, Saccharomyces pastorianus
gttgtcaagtcatcgctatacgaat

SEQ ID NO: 139170 - DNA, 25 bp, Saccharomyces pastorianus
actataatgttgtcaagtcatcgct

SEQ ID NO: 139171 - DNA, 25 bp, Saccharomyces pastorianus
tgttgtcaagtcatcgctatacgaa

SEQ ID NO: 139172 - DNA, 25 bp, Saccharomyces pastorianus
aatgttgtcaagtcatcgctatacg

SEQ ID NO: 139173 - DNA, 25 bp, Saccharomyces pastorianus
atcgctatacgaatcctccctgctg

SEQ ID NO: 139174 - DNA, 25 bp, Saccharomyces pastorianus
gtcaagtcatcgctatacgaatcct

SEQ ID NO: 139175 - DNA, 25 bp, Saccharomyces pastorianus
tacgaatcctccctgctggcatgag

SEQ ID NO: 139176 - DNA, 25 bp, Saccharomyces pastorianus
ggtgcagccgctataactttcaaga

SEQ ID NO: 139177 - DNA, 25 bp, Saccharomyces pastorianus
gatcggaatcctgcatgaagagtca

SEQ ID NO: 139178 - DNA, 25 bp, Saccharomyces pastorianus
aagagtgtaccatgttgctgagcaa

SEQ ID NO: 139179 - DNA, 25 bp, Saccharomyces pastorianus
aagctgtcttcgcaaagcggtcggt

SEQ ID NO: 139180 - DNA, 25 bp, Saccharomyces pastorianus
ttcaaaagttcctgggcttcctcga

SEQ ID NO: 139181 - DNA, 25 bp, Saccharomyces pastorianus
tgagcacgtttttaggcgaatctac

SEQ ID NO: 139182 - DNA, 25 bp, Saccharomyces pastorianus
aattgcaggtacagcctctgaattt

SEQ ID NO: 139183 - DNA, 25 bp, Saccharomyces pastorianus
gaggttcaatgtcatccatacaaca

SEQ ID NO: 139184 - DNA, 25 bp, Saccharomyces pastorianus
tcatcaatagcattaccgacaccgg

SEQ ID NO: 139185 - DNA, 25 bp, Saccharomyces pastorianus
ggaaaatgtttaccggtgcagccgc

SEQ ID NO: 139186 - DNA, 25 bp, Saccharomyces pastorianus
gcgaatctacatttatgcccttatt

SEQ ID NO: 139187 - DNA, 25 bp, Saccharomyces pastorianus
gaatgaatctccaatcacggtgaag

SEQ ID NO: 139188 - DNA, 25 bp, Saccharomyces pastorianus
gttggtcagttatccatttcataat

SEQ ID NO: 139189 - DNA, 25 bp, Saccharomyces pastorianus
ggttggtcactgctaaagatatttt

SEQ ID NO: 139190 - DNA, 25 bp, Saccharomyces pastorianus
agctcaaacgacactggtatacttc

SEQ ID NO: 139191 - DNA, 25 bp, Saccharomyces pastorianus
gaatctttgttgtacgactcagcgt

SEQ ID NO: 139192 - DNA, 25 bp, Saccharomyces pastorianus
tacctttccgagcttgaatctttgt

SEQ ID NO: 139193 - DNA, 25 bp, Saccharomyces pastorianus
gcagctcatgtcctccaaattaatt

SEQ ID NO: 139194 - DNA, 25 bp, Saccharomyces pastorianus
tgaaaccatttacctttccgagctt

SEQ ID NO: 139195 - DNA, 25 bp, Saccharomyces pastorianus
aatattctgtgcatggttttccaat

SEQ ID NO: 139196 - DNA, 25 bp, Saccharomyces pastorianus
gaaggcggtgccagtaacattgtta

SEQ ID NO: 139197 - DNA, 25 bp, Saccharomyces pastorianus
gactcagcgtctgaatattctgtgc

SEQ ID NO: 139198 - DNA, 25 bp, Saccharomyces pastorianus
tcattgtcagaggaactggctactt

SEQ ID NO: 139199 - DNA, 25 bp, Saccharomyces pastorianus
tgctgaggaaaatagaccactgtct

SEQ ID NO: 139200 - DNA, 25 bp, Saccharomyces pastorianus
agaccactgtctgtagactcggaca

SEQ ID NO: 139201 - DNA, 25 bp, Saccharomyces pastorianus
agctctacggccatagtttttggat

SEQ ID NO: 139202 - DNA, 25 bp, Saccharomyces pastorianus
gtcttcacggaaactctggttaact

SEQ ID NO: 139203 - DNA, 25 bp, Saccharomyces pastorianus
attgctggtttcctacaagtcttca

SEQ ID NO: 139204 - DNA, 25 bp, Saccharomyces pastorianus
caccaatcgattcaccaatattcca

SEQ ID NO: 139205 - DNA, 25 bp, Saccharomyces pastorianus
ggttatatgggaccgtgcaaaaaca

SEQ ID NO: 139206 - DNA, 25 bp, Saccharomyces pastorianus
gatgtcattgacaccaatcgattca

SEQ ID NO: 139207 - DNA, 25 bp, Saccharomyces pastorianus
gactcggacagggagttccttaatt

SEQ ID NO: 139208 - DNA, 25 bp, Saccharomyces pastorianus
atttatcacattaagctctacggcc

SEQ ID NO: 139209 - DNA, 25 bp, Saccharomyces pastorianus
tattggttcaggaatctcagagatt

SEQ ID NO: 139210 - DNA, 25 bp, Saccharomyces pastorianus
atgctgctcctacggctattggttc

SEQ ID NO: 139211 - DNA, 25 bp, Saccharomyces pastorianus
cagtcttatgtgctctaattagtac

SEQ ID NO: 139212 - DNA, 25 bp, Saccharomyces pastorianus
tgttagtccactatgctgctcctac

SEQ ID NO: 139213 - DNA, 25 bp, Saccharomyces pastorianus
gtacactgttagtccactatgctgc

SEQ ID NO: 139214 - DNA, 25 bp, Saccharomyces pastorianus
ctacggctattggttcaggaatctc

SEQ ID NO: 139215 - DNA, 25 bp, Saccharomyces pastorianus
cggctattggttcaggaatctcaga

SEQ ID NO: 139216 - DNA, 25 bp, Saccharomyces pastorianus
acactgttagtccactatgctgctc

SEQ ID NO: 139217 - DNA, 25 bp, Saccharomyces pastorianus
tgctcctacggctattggttcagga

SEQ ID NO: 139218 - DNA, 25 bp, Saccharomyces pastorianus
actatgctgctcctacggctattgg

SEQ ID NO: 139219 - DNA, 25 bp, Saccharomyces pastorianus
atgtgctctaattagtacactgtta

SEQ ID NO: 139220 - DNA, 25 bp, Saccharomyces pastorianus
gatttcttacttcaatgagttcttg

SEQ ID NO: 139221 - DNA, 25 bp, Saccharomyces pastorianus
atttttacttccctatgctttgcca

SEQ ID NO: 139222 - DNA, 25 bp, Saccharomyces pastorianus
gtacctgtcctcatggccagttcaa

SEQ ID NO: 139223 - DNA, 25 bp, Saccharomyces pastorianus
gttggatgaaaatacgcacgctttt

SEQ ID NO: 139224 - DNA, 25 bp, Saccharomyces pastorianus
atcatatggcgccagagttcctgcc

SEQ ID NO: 139225 - DNA, 25 bp, Saccharomyces pastorianus
ttccctatgctttgccactgttatc

SEQ ID NO: 139226 - DNA, 25 bp, Saccharomyces pastorianus
gtatattgtttcatgaatgtgtcaa

SEQ ID NO: 139227 - DNA, 25 bp, Saccharomyces pastorianus
tggtggtatcatatggcgccagagt

SEQ ID NO: 139228 - DNA, 25 bp, Saccharomyces pastorianus
tttttggcgacgcttactgctttga

SEQ ID NO: 139229 - DNA, 25 bp, Saccharomyces pastorianus
gaacgataacacctcaacttttagt

SEQ ID NO: 139230 - DNA, 25 bp, Saccharomyces pastorianus
gacgcttactgctttgatttcttac

SEQ ID NO: 139231 - DNA, 25 bp, Saccharomyces pastorianus
gcagacgccgtagccagactaataa

SEQ ID NO: 139232 - DNA, 25 bp, Saccharomyces pastorianus
agcccggtattcatgcgatttttga

SEQ ID NO: 139233 - DNA, 25 bp, Saccharomyces pastorianus
tgtgtgcaaattcagcagacgccgt

SEQ ID NO: 139234 - DNA, 25 bp, Saccharomyces pastorianus
gttgtctattacgacgcagttcagt

SEQ ID NO: 139235 - DNA, 25 bp, Saccharomyces pastorianus
aaaaagagtctgcagcccggtattc

SEQ ID NO: 139236 - DNA, 25 bp, Saccharomyces pastorianus
gaaggctttattaacatcatcgaag

SEQ ID NO: 139237 - DNA, 25 bp, Saccharomyces pastorianus
aatcgtcaccatttgtttaactccg

SEQ ID NO: 139238 - DNA, 25 bp, Saccharomyces pastorianus
tccgttctttgccagatactagaaa

SEQ ID NO: 139239 - DNA, 25 bp, Saccharomyces pastorianus
gtttaaattttccaatcgtcaccat

SEQ ID NO: 139240 - DNA, 25 bp, Saccharomyces pastorianus
caattgaacgctttccttgacacac

SEQ ID NO: 139241 - DNA, 25 bp, Saccharomyces pastorianus
taacgaactactgcgagccttataa

SEQ ID NO: 139242 - DNA, 25 bp, Saccharomyces pastorianus
tatcgccgggtttactatcgcaaaa

SEQ ID NO: 139243 - DNA, 25 bp, Saccharomyces pastorianus
cagataagtgcgattctgccttggg

SEQ ID NO: 139244 - DNA, 25 bp, Saccharomyces pastorianus
gctctggaacagtgctaaatcgttt

SEQ ID NO: 139245 - DNA, 25 bp, Saccharomyces pastorianus
acaaggtcctgatgcgtttaaccgc

SEQ ID NO: 139246 - DNA, 25 bp, Saccharomyces pastorianus
accattagccaaccttgtgctgaaa

SEQ ID NO: 139247 - DNA, 25 bp, Saccharomyces pastorianus
taaatcgttttccaccattagccaa

SEQ ID NO: 139248 - DNA, 25 bp, Saccharomyces pastorianus
gtttaaccgcctgctctggaacagt

SEQ ID NO: 139249 - DNA, 25 bp, Saccharomyces pastorianus
acgaccggacaaggcgatatttcta

SEQ ID NO: 139250 - DNA, 25 bp, Saccharomyces pastorianus
tttttggttcattcactccttacag

SEQ ID NO: 139251 - DNA, 25 bp, Saccharomyces pastorianus
aaagtgtaccatgcgccagaagaac

SEQ ID NO: 139252 - DNA, 25 bp, Saccharomyces pastorianus
atagcaaactaattatcgccgggtt

SEQ ID NO: 139253 - DNA, 25 bp, Saccharomyces pastorianus
actaaatgggatgacgctgatgaaa

SEQ ID NO: 139254 - DNA, 25 bp, Saccharomyces pastorianus
aaagcttacctagtagcatggcaac

SEQ ID NO: 139255 - DNA, 25 bp, Saccharomyces pastorianus
gtggcgacagtcattgaagttatag

SEQ ID NO: 139256 - DNA, 25 bp, Saccharomyces pastorianus
agtagcatggcaacacttttgaaaa

SEQ ID NO: 139257 - DNA, 25 bp, Saccharomyces pastorianus
gattcagtggcgacagtcattgaag

SEQ ID NO: 139258 - DNA, 25 bp, Saccharomyces pastorianus
gaaactaaatgggatgacgctgatg

SEQ ID NO: 139259 - DNA, 25 bp, Saccharomyces pastorianus
gatgaagattcagtggcgacagtca

SEQ ID NO: 139260 - DNA, 25 bp, Saccharomyces pastorianus
tacctagtagcatggcaacactttt

SEQ ID NO: 139261 - DNA, 25 bp, Saccharomyces pastorianus
gcatggcaacacttttgaaaaattt

SEQ ID NO: 139262 - DNA, 25 bp, Saccharomyces pastorianus
gcagataaaagcttacctagtagca

SEQ ID NO: 139263 - DNA, 25 bp, Saccharomyces pastorianus
gaaaccattattgaagcagataaaa

SEQ ID NO: 139264 - DNA, 25 bp, Saccharomyces pastorianus
gcgcctattgcttttgctgattgaa

SEQ ID NO: 139265 - DNA, 25 bp, Saccharomyces pastorianus
tatgcgtcaaactttagcgccatat

SEQ ID NO: 139266 - DNA, 25 bp, Saccharomyces pastorianus
cgttgccattggattgatagcctta

SEQ ID NO: 139267 - DNA, 25 bp, Saccharomyces pastorianus
gatagccttatctgcaacagggacg

SEQ ID NO: 139268 - DNA, 25 bp, Saccharomyces pastorianus
ggccagaagttggacgaccctgtgt

SEQ ID NO: 139269 - DNA, 25 bp, Saccharomyces pastorianus
gaccctgtgttgaatgccattgtga

SEQ ID NO: 139270 - DNA, 25 bp, Saccharomyces pastorianus
agcgccatatgctgttctgtcacaa

SEQ ID NO: 139271 - DNA, 25 bp, Saccharomyces pastorianus
ttgtgagcaaaaactctcctgcaga

SEQ ID NO: 139272 - DNA, 25 bp, Saccharomyces pastorianus
gataaggaactatggcccgttgcca

SEQ ID NO: 139273 - DNA, 25 bp, Saccharomyces pastorianus
ttccacactacccatttgttacgaa

SEQ ID NO: 139274 - DNA, 25 bp, Saccharomyces pastorianus
ttgaagcttcgtgcatggagggcca

SEQ ID NO: 139275 - DNA, 25 bp, Saccharomyces pastorianus
ttgtgacaaagagacccgcaacttc

SEQ ID NO: 139276 - DNA, 25 bp, Saccharomyces pastorianus
taaatctgaagaagagccctcctct

SEQ ID NO: 139277 - DNA, 25 bp, Saccharomyces pastorianus
agggcattgtcgtcttcaaaaaagc

SEQ ID NO: 139278 - DNA, 25 bp, Saccharomyces pastorianus
gaaacgccgtcatcgaataaaaggt

SEQ ID NO: 139279 - DNA, 25 bp, Saccharomyces pastorianus
aaaaaagcaagaaacgccgtcatcg

SEQ ID NO: 139280 - DNA, 25 bp, Saccharomyces pastorianus
agcaaacaaagccttctgaaacaga

SEQ ID NO: 139281 - DNA, 25 bp, Saccharomyces pastorianus
gaaacagaacattcaaaggaaccta

SEQ ID NO: 139282 - DNA, 25 bp, Saccharomyces pastorianus
acgcaagccatcacccgtggtaaaa

SEQ ID NO: 139283 - DNA, 25 bp, Saccharomyces pastorianus
aaagagacccgcaacttcaacacca

SEQ ID NO: 139284 - DNA, 25 bp, Saccharomyces pastorianus
gtaaaaagggcattgtcgtcttcaa

SEQ ID NO: 139285 - DNA, 25 bp, Saccharomyces pastorianus
agagccctcctcttttattgatgag

SEQ ID NO: 139286 - DNA, 25 bp, Saccharomyces pastorianus
gttagggatcaaatcacttccttga

SEQ ID NO: 139287 - DNA, 25 bp, Saccharomyces pastorianus
aacaagccatcgaaactgccaacaa

SEQ ID NO: 139288 - DNA, 25 bp, Saccharomyces pastorianus
tacaagaacgactctaacaacaaca

SEQ ID NO: 139289 - DNA, 25 bp, Saccharomyces pastorianus
aacgatactgaaaactccttgaaag

SEQ ID NO: 139290 - DNA, 25 bp, Saccharomyces pastorianus
agaattgcaaacttcctcgatgaaa

SEQ ID NO: 139291 - DNA, 25 bp, Saccharomyces pastorianus
acaaggtggcgaagaggttaacgct

SEQ ID NO: 139292 - DNA, 25 bp, Saccharomyces pastorianus
acttcctcgatgaaattgtttgaac

SEQ ID NO: 139293 - DNA, 25 bp, Saccharomyces pastorianus
gaaggagttggttgctagagtacaa

SEQ ID NO: 139294 - DNA, 25 bp, Saccharomyces pastorianus
acttccttgaaggagttggttgcta

SEQ ID NO: 139295 - DNA, 25 bp, Saccharomyces pastorianus
ttttgacatcgatgccgatggtatt

SEQ ID NO: 139296 - DNA, 25 bp, Saccharomyces pastorianus
tgaggagttaaagaccaagaccgaa

SEQ ID NO: 139297 - DNA, 25 bp, Saccharomyces pastorianus
acttgggtaagccagttaagaatgc

SEQ ID NO: 139298 - DNA, 25 bp, Saccharomyces pastorianus
tactcaccagcccaaatcggtgggt

SEQ ID NO: 139299 - DNA, 25 bp, Saccharomyces pastorianus
tacgtgtcgtcaatgaaccaaccgc

SEQ ID NO: 139300 - DNA, 25 bp, Saccharomyces pastorianus
agttaagaatgctgttgtcactgtc

SEQ ID NO: 139301 - DNA, 25 bp, Saccharomyces pastorianus
caccagcccaaatcggtgggttcgt

SEQ ID NO: 139302 - DNA, 25 bp, Saccharomyces pastorianus
tttgaacgttttacgtgtcgtcaat

SEQ ID NO: 139303 - DNA, 25 bp, Saccharomyces pastorianus
agaggtcaaacttactcaccagccc

SEQ ID NO: 139304 - DNA, 25 bp, Saccharomyces pastorianus
gaggccagaggtcaaacttactcac

SEQ ID NO: 139305 - DNA, 25 bp, Saccharomyces pastorianus
caggccaaattgttggtttgaacgt

SEQ ID NO: 139306 - DNA, 25 bp, Saccharomyces pastorianus
tgggttgaggccagaggtcaaactt

SEQ ID NO: 139307 - DNA, 25 bp, Saccharomyces pastorianus
aaagacgcaggccaaattgttggtt

SEQ ID NO: 139308 - DNA, 25 bp, Saccharomyces pastorianus
taagaatgctgttgtcactgtccca

SEQ ID NO: 139309 - DNA, 25 bp, Saccharomyces pastorianus
tactcaccagcccaaatcggtgggt

SEQ ID NO: 139310 - DNA, 25 bp, Saccharomyces pastorianus
tacgtgtcgtcaatgaaccaaccgc

SEQ ID NO: 139311 - DNA, 25 bp, Saccharomyces pastorianus
gtaccttcgatatctccatcttaga

SEQ ID NO: 139312 - DNA, 25 bp, Saccharomyces pastorianus
gacgcaggccaaattgttggtttga

SEQ ID NO: 139313 - DNA, 25 bp, Saccharomyces pastorianus
gccagttaagaatgctgttgtcact

SEQ ID NO: 139314 - DNA, 25 bp, Saccharomyces pastorianus
tttgaacgttttacgtgtcgtcaat

SEQ ID NO: 139315 - DNA, 25 bp, Saccharomyces pastorianus
agaggtcaaacttactcaccagccc

SEQ ID NO: 139316 - DNA, 25 bp, Saccharomyces pastorianus
aacagctgaggcctacttgggtaag

SEQ ID NO: 139317 - DNA, 25 bp, Saccharomyces pastorianus
tgggttgaggccagaggtcaaactt

SEQ ID NO: 139318 - DNA, 25 bp, Saccharomyces pastorianus
gctgccttagcatacggtttggaaa

SEQ ID NO: 139319 - DNA, 25 bp, Saccharomyces pastorianus
ttctgccatgggtgaagaagctgcc

SEQ ID NO: 139320 - DNA, 25 bp, Saccharomyces pastorianus
aggatttgatggtcactatcatttc

SEQ ID NO: 139321 - DNA, 25 bp, Saccharomyces pastorianus
agctgctttcgatgaaggtaaggat

SEQ ID NO: 139322 - DNA, 25 bp, Saccharomyces pastorianus
gaaggtaaggatttgatggtcacta

SEQ ID NO: 139323 - DNA, 25 bp, Saccharomyces pastorianus
gatggtcactatcatttctgccatg

SEQ ID NO: 139324 - DNA, 25 bp, Saccharomyces pastorianus
ctgctttcgatgaaggtaaggattt

SEQ ID NO: 139325 - DNA, 25 bp, Saccharomyces pastorianus
gctgctttcgatgaaggtaaggatt

SEQ ID NO: 139326 - DNA, 25 bp, Saccharomyces pastorianus
tggtcactatcatttctgccatggg

SEQ ID NO: 139327 - DNA, 25 bp, Saccharomyces pastorianus
ttgatggtcactatcatttctgcca

SEQ ID NO: 139328 - DNA, 25 bp, Saccharomyces pastorianus
cactatcatttctgccatgggtgaa

SEQ ID NO: 139329 - DNA, 25 bp, Saccharomyces pastorianus
gtcactatcatttctgccatgggtg

SEQ ID NO: 139330 - DNA, 25 bp, Saccharomyces pastorianus
ctgccttgagaaagaatggtttcgt

SEQ ID NO: 139331 - DNA, 25 bp, Saccharomyces pastorianus
aatggtttcgttgtcatcaaaggta

SEQ ID NO: 139332 - DNA, 25 bp, Saccharomyces pastorianus
ttggttacccttgatatcttcactg

SEQ ID NO: 139333 - DNA, 25 bp, Saccharomyces pastorianus
gccaaggtccatttggttacccttg

SEQ ID NO: 139334 - DNA, 25 bp, Saccharomyces pastorianus
atttggttacccttgatatcttcac

SEQ ID NO: 139335 - DNA, 25 bp, Saccharomyces pastorianus
caaggtccatttggttacccttgat

SEQ ID NO: 139336 - DNA, 25 bp, Saccharomyces pastorianus
acacctttgaaaatgctgacgctgg

SEQ ID NO: 139337 - DNA, 25 bp, Saccharomyces pastorianus
aacacacctttgaaaatgctgacgc

SEQ ID NO: 139338 - DNA, 25 bp, Saccharomyces pastorianus
caatgttctgccttgagaaagaatg

SEQ ID NO: 139339 - DNA, 25 bp, Saccharomyces pastorianus
aggtccatttggttacccttgatat

SEQ ID NO: 139340 - DNA, 25 bp, Saccharomyces pastorianus
aaatgctgacgctggtgcctccgcc

SEQ ID NO: 139341 - DNA, 25 bp, Saccharomyces pastorianus
gtcaagagaagcgaataccaattgt

SEQ ID NO: 139342 - DNA, 25 bp, Saccharomyces pastorianus
gagaagcgaataccaattgttggat

SEQ ID NO: 139343 - DNA, 25 bp, Saccharomyces pastorianus
tcaagagaagcgaataccaattgtt

SEQ ID NO: 139344 - DNA, 25 bp, Saccharomyces pastorianus
aagagaagcgaataccaattgttgg

SEQ ID NO: 139345 - DNA, 25 bp, Saccharomyces pastorianus
ttgatgatggctacttgtccttgat

SEQ ID NO: 139346 - DNA, 25 bp, Saccharomyces pastorianus
ataccaattgttggatattgatgat

SEQ ID NO: 139347 - DNA, 25 bp, Saccharomyces pastorianus
agaagcgaataccaattgttggata

SEQ ID NO: 139348 - DNA, 25 bp, Saccharomyces pastorianus
tattgatgatggctacttgtccttg

SEQ ID NO: 139349 - DNA, 25 bp, Saccharomyces pastorianus
tgatgatggctacttgtccttgatg

SEQ ID NO: 139350 - DNA, 25 bp, Saccharomyces pastorianus
attgatgatggctacttgtccttga

SEQ ID NO: 139351 - DNA, 25 bp, Saccharomyces pastorianus
caagagaagcgaataccaattgttg

SEQ ID NO: 139352 - DNA, 25 bp, Saccharomyces pastorianus
ttgaagcgcttatttggcaaatcgt

SEQ ID NO: 139353 - DNA, 25 bp, Saccharomyces pastorianus
gaagttgaagcgcttatttggcaaa

SEQ ID NO: 139354 - DNA, 25 bp, Saccharomyces pastorianus
aggcgatgagtcaatcacgattgta

SEQ ID NO: 139355 - DNA, 25 bp, Saccharomyces pastorianus
gtcaatcacgattgtagacgttact

SEQ ID NO: 139356 - DNA, 25 bp, Saccharomyces pastorianus
aaatcgttgagcctgttttgagtac

SEQ ID NO: 139357 - DNA, 25 bp, Saccharomyces pastorianus
aatcgttgagcctgttttgagtacg

SEQ ID NO: 139358 - DNA, 25 bp, Saccharomyces pastorianus
ggaaaggcgatgagtcaatcacgat

SEQ ID NO: 139359 - DNA, 25 bp, Saccharomyces pastorianus
tttggcaaatcgttgagcctgtttt

SEQ ID NO: 139360 - DNA, 25 bp, Saccharomyces pastorianus
atcacgattgtagacgttactaata

SEQ ID NO: 139361 - DNA, 25 bp, Saccharomyces pastorianus
gacgttactaataaggacattcagg

SEQ ID NO: 139362 - DNA, 25 bp, Saccharomyces pastorianus
gacattcaggaagttgaagcgctta

SEQ ID NO: 139363 - DNA, 25 bp, Saccharomyces pastorianus
taaagtcgatgctaaactccacccc

SEQ ID NO: 139364 - DNA, 25 bp, Saccharomyces pastorianus
tacaaagaactttagcgcaccgaat

SEQ ID NO: 139365 - DNA, 25 bp, Saccharomyces pastorianus
agcgcaccgaatgtttcgtcatcag

SEQ ID NO: 139366 - DNA, 25 bp, Saccharomyces pastorianus
tgagaagcctcggaagtccaagcgt

SEQ ID NO: 139367 - DNA, 25 bp, Saccharomyces pastorianus
gcaaaagctggcactcaattagata

SEQ ID NO: 139368 - DNA, 25 bp, Saccharomyces pastorianus
gaaacaccggcttctacaaagaact

SEQ ID NO: 139369 - DNA, 25 bp, Saccharomyces pastorianus
ataagcgtatgagcgacctatcact

SEQ ID NO: 139370 - DNA, 25 bp, Saccharomyces pastorianus
gtttcgtcatcaggcaattcattga

SEQ ID NO: 139371 - DNA, 25 bp, Saccharomyces pastorianus
gtaattcaccaccacttggacatta

SEQ ID NO: 139372 - DNA, 25 bp, Saccharomyces pastorianus
gtccaagcgtgtcatcctcgaaaaa

SEQ ID NO: 139373 - DNA, 25 bp, Saccharomyces pastorianus
tggacattaccaacagcgttacaaa

SEQ ID NO: 139374 - DNA, 25 bp, Saccharomyces pastorianus
gtaaactactggattctacgatttt

SEQ ID NO: 139375 - DNA, 25 bp, Saccharomyces pastorianus
cacaggatgatgatgagagttcgct

SEQ ID NO: 139376 - DNA, 25 bp, Saccharomyces pastorianus
tcttatcgaaagcattttgggcaaa

SEQ ID NO: 139377 - DNA, 25 bp, Saccharomyces pastorianus
tagaatgcccctagatcatgaatat

SEQ ID NO: 139378 - DNA, 25 bp, Saccharomyces pastorianus
gatggtaccacgatttttgcaggaa

SEQ ID NO: 139379 - DNA, 25 bp, Saccharomyces pastorianus
aacctcccttggacagccttggaag

SEQ ID NO: 139380 - DNA, 25 bp, Saccharomyces pastorianus
gagttcgcttgattctctcaatgaa

SEQ ID NO: 139381 - DNA, 25 bp, Saccharomyces pastorianus
ggtttaaaaattcatctcttatcga

SEQ ID NO: 139382 - DNA, 25 bp, Saccharomyces pastorianus
ggtgctagctaacagatgtggtact

SEQ ID NO: 139383 - DNA, 25 bp, Saccharomyces pastorianus
aatgcgattttggtgctagctaaca

SEQ ID NO: 139384 - DNA, 25 bp, Saccharomyces pastorianus
gaaccagatatgtcaaacgtaaact

SEQ ID NO: 139385 - DNA, 25 bp, Saccharomyces pastorianus
acaggttacagttttcatgccagaa

SEQ ID NO: 139386 - DNA, 25 bp, Saccharomyces pastorianus
gaagctatacaattctgccctggta

SEQ ID NO: 139387 - DNA, 25 bp, Saccharomyces pastorianus
aaagttacgaaaagtgccacctatg

SEQ ID NO: 139388 - DNA, 25 bp, Saccharomyces pastorianus
tattccccgaatttgcattgacagg

SEQ ID NO: 139389 - DNA, 25 bp, Saccharomyces pastorianus
aaccagacataatactattccccga

SEQ ID NO: 139390 - DNA, 25 bp, Saccharomyces pastorianus
tagtaattcaactcaatccgcaaat

SEQ ID NO: 139391 - DNA, 25 bp, Saccharomyces pastorianus
gtgccacctatgtgaaaccagacat

SEQ ID NO: 139392 - DNA, 25 bp, Saccharomyces pastorianus
tagacgcaattcatggtgctaagat

SEQ ID NO: 139393 - DNA, 25 bp, Saccharomyces pastorianus
gaactggctaaatcaatatccgaga

SEQ ID NO: 139394 - DNA, 25 bp, Saccharomyces pastorianus
aattctgccctggtagtaaatccgc

SEQ ID NO: 139395 - DNA, 25 bp, Saccharomyces pastorianus
gatgaagggccctcttttgaactgg

SEQ ID NO: 139396 - DNA, 25 bp, Saccharomyces pastorianus
tctggtcttgatccaatcggaactt

SEQ ID NO: 139397 - DNA, 25 bp, Saccharomyces pastorianus
gagcagccgaagtgactatgtccct

SEQ ID NO: 139398 - DNA, 25 bp, Saccharomyces pastorianus
gtatgcattccgtggattcgcccaa

SEQ ID NO: 139399 - DNA, 25 bp, Saccharomyces pastorianus
acggtcgcattgttccaagatttca

SEQ ID NO: 139400 - DNA, 25 bp, Saccharomyces pastorianus
atttgtcgttgatccatttattggc

SEQ ID NO: 139401 - DNA, 25 bp, Saccharomyces pastorianus
tatgtccctggctgtctctgaggaa

SEQ ID NO: 139402 - DNA, 25 bp, Saccharomyces pastorianus
gtcgattgcttaggttacgggtcta

SEQ ID NO: 139403 - DNA, 25 bp, Saccharomyces pastorianus
tttccaacattggtgtcgattgctt

SEQ ID NO: 139404 - DNA, 25 bp, Saccharomyces pastorianus
attcgcccaagcgttagacaccatt

SEQ ID NO: 139405 - DNA, 25 bp, Saccharomyces pastorianus
attgccatttccacaaacggtcgca

SEQ ID NO: 139406 - DNA, 25 bp, Saccharomyces pastorianus
gtgcattgcatgactcactatgtgt

SEQ ID NO: 139407 - DNA, 25 bp, Saccharomyces pastorianus
ggtccccgtgggttagataagatct

SEQ ID NO: 139408 - DNA, 25 bp, Saccharomyces pastorianus
gttagtacaactttccaaatctcaa

SEQ ID NO: 139409 - DNA, 25 bp, Saccharomyces pastorianus
gaaatcacatatattggctgctaga

SEQ ID NO: 139410 - DNA, 25 bp, Saccharomyces pastorianus
gtactactggtgttgttgttctggc

SEQ ID NO: 139411 - DNA, 25 bp, Saccharomyces pastorianus
tgttgttctggcaagtgcgctactt

SEQ ID NO: 139412 - DNA, 25 bp, Saccharomyces pastorianus
agacagcacggattagaggccaaga

SEQ ID NO: 139413 - DNA, 25 bp, Saccharomyces pastorianus
ggatctgtcgaacgccattgtggca

SEQ ID NO: 139414 - DNA, 25 bp, Saccharomyces pastorianus
gtagcttctattatcaaaacttcgt

SEQ ID NO: 139415 - DNA, 25 bp, Saccharomyces pastorianus
aagatcttgatttcacctgacggtg

SEQ ID NO: 139416 - DNA, 25 bp, Saccharomyces pastorianus
ttggctgctagatcagtagcttcta

SEQ ID NO: 139417 - DNA, 25 bp, Saccharomyces pastorianus
gatggtgctacaattttgtcccaaa

SEQ ID NO: 139418 - DNA, 25 bp, Saccharomyces pastorianus
ggtgggtctaccatgttcaaagatt

SEQ ID NO: 139419 - DNA, 25 bp, Saccharomyces pastorianus
gttacgaaagattcttggcacctga

SEQ ID NO: 139420 - DNA, 25 bp, Saccharomyces pastorianus
tggtggctcgctgctggcacaaaca

SEQ ID NO: 139421 - DNA, 25 bp, Saccharomyces pastorianus
aaacgctgtctggtttggtggctcg

SEQ ID NO: 139422 - DNA, 25 bp, Saccharomyces pastorianus
gaaaggctactgtcacactaagaaa

SEQ ID NO: 139423 - DNA, 25 bp, Saccharomyces pastorianus
gatcaaactatccaggcttgcccta

SEQ ID NO: 139424 - DNA, 25 bp, Saccharomyces pastorianus
ttgactcctttacccacggtagtgg

SEQ ID NO: 139425 - DNA, 25 bp, Saccharomyces pastorianus
ggtgtagatgtttccgtgatttctc

SEQ ID NO: 139426 - DNA, 25 bp, Saccharomyces pastorianus
gacacttccttgagaactgccgaaa

SEQ ID NO: 139427 - DNA, 25 bp, Saccharomyces pastorianus
ggcacctgaaatcttcttcaatcca

SEQ ID NO: 139428 - DNA, 25 bp, Saccharomyces pastorianus
gcttgccctattgacgtccgtaaag

SEQ ID NO: 139429 - DNA, 25 bp, Saccharomyces pastorianus
aagcttttgcgcttgatcctttgat

SEQ ID NO: 139430 - DNA, 25 bp, Saccharomyces pastorianus
taatggcgatcttggaagcttttgc

SEQ ID NO: 139431 - DNA, 25 bp, Saccharomyces pastorianus
aaggcagtttccgaattacttgtga

SEQ ID NO: 139432 - DNA, 25 bp, Saccharomyces pastorianus
atgagaccagaaacgccagagcaat

SEQ ID NO: 139433 - DNA, 25 bp, Saccharomyces pastorianus
aactggaattcctttgccgttgatt

SEQ ID NO: 139434 - DNA, 25 bp, Saccharomyces pastorianus
gatttaccgccacaaaaacttactg

SEQ ID NO: 139435 - DNA, 25 bp, Saccharomyces pastorianus
gaaagggcgcaattactgtcgaaga

SEQ ID NO: 139436 - DNA, 25 bp, Saccharomyces pastorianus
gcgattgttttgaagctgccatctt

SEQ ID NO: 139437 - DNA, 25 bp, Saccharomyces pastorianus
tgaattagacgtccctgagcaggtt

SEQ ID NO: 139438 - DNA, 25 bp, Saccharomyces pastorianus
atgactggttatattctgggactag

SEQ ID NO: 139439 - DNA, 25 bp, Saccharomyces pastorianus
tgggactaggtgatcgccatccaag

SEQ ID NO: 139440 - DNA, 25 bp, Saccharomyces pastorianus
gcgttatgaaacctaaatctccaga

SEQ ID NO: 139441 - DNA, 25 bp, Saccharomyces pastorianus
gctgaaagatgtcacgcctatgcca

SEQ ID NO: 139442 - DNA, 25 bp, Saccharomyces pastorianus
tccgtgagcgttacactcggtaaga

SEQ ID NO: 139443 - DNA, 25 bp, Saccharomyces pastorianus
caaagcctgggcgagtatgctgaaa

SEQ ID NO: 139444 - DNA, 25 bp, Saccharomyces pastorianus
tgcccaacaacatcattcacttcaa

SEQ ID NO: 139445 - DNA, 25 bp, Saccharomyces pastorianus
gaacagttgtcgcaattggcagcta

SEQ ID NO: 139446 - DNA, 25 bp, Saccharomyces pastorianus
agaagctaatagctcccttggcagc

SEQ ID NO: 139447 - DNA, 25 bp, Saccharomyces pastorianus
gcctatgccaaagcgctacattata

SEQ ID NO: 139448 - DNA, 25 bp, Saccharomyces pastorianus
gcattaccaataccaactcaaagcc

SEQ ID NO: 139449 - DNA, 25 bp, Saccharomyces pastorianus
ccttcatgcccttggcgaatgggaa

SEQ ID NO: 139450 - DNA, 25 bp, Saccharomyces pastorianus
gcaggtgatacttccgtgagcgtta

SEQ ID NO: 139451 - DNA, 25 bp, Saccharomyces pastorianus
acagccatgcagatctgcattcaat

SEQ ID NO: 139452 - DNA, 25 bp, Saccharomyces pastorianus
acaccacagccatgcagatctgcat

SEQ ID NO: 139453 - DNA, 25 bp, Saccharomyces pastorianus
accacagccatgcagatctgcattc

SEQ ID NO: 139454 - DNA, 25 bp, Saccharomyces pastorianus
cacagccatgcagatctgcattcaa

SEQ ID NO: 139455 - DNA, 25 bp, Saccharomyces pastorianus
atctgcattcaataacaatgatcgt

SEQ ID NO: 139456 - DNA, 25 bp, Saccharomyces pastorianus
ctgcattcaataacaatgatcgtat

SEQ ID NO: 139457 - DNA, 25 bp, Saccharomyces pastorianus
agccatgcagatctgcattcaataa

SEQ ID NO: 139458 - DNA, 25 bp, Saccharomyces pastorianus
tgcagatctgcattcaataacaatg

SEQ ID NO: 139459 - DNA, 25 bp, Saccharomyces pastorianus
gcagatctgcattcaataacaatga

SEQ ID NO: 139460 - DNA, 25 bp, Saccharomyces pastorianus
catgcagatctgcattcaataacaa

SEQ ID NO: 139461 - DNA, 25 bp, Saccharomyces pastorianus
cagccatgcagatctgcattcaata

SEQ ID NO: 139462 - DNA, 25 bp, Saccharomyces pastorianus
tgcgtagcgtaatctcagggaacct

SEQ ID NO: 139463 - DNA, 25 bp, Saccharomyces pastorianus
gataatgatactgctggttccactt

SEQ ID NO: 139464 - DNA, 25 bp, Saccharomyces pastorianus
tggttccacttgctcttttaactaa

SEQ ID NO: 139465 - DNA, 25 bp, Saccharomyces pastorianus
gtggtcttcactcggttggtacaac

SEQ ID NO: 139466 - DNA, 25 bp, Saccharomyces pastorianus
ggaatctaccggcaagttcgtctta

SEQ ID NO: 139467 - DNA, 25 bp, Saccharomyces pastorianus
gcaaggattgcatgtcgtcatcaca

SEQ ID NO: 139468 - DNA, 25 bp, Saccharomyces pastorianus
gggatcatccagtaatcgccggagt

SEQ ID NO: 139469 - DNA, 25 bp, Saccharomyces pastorianus
aaaggttgtaccctcactgggatca

SEQ ID NO: 139470 - DNA, 25 bp, Saccharomyces pastorianus
gggaacctgtcactgtacgaggcta

SEQ ID NO: 139471 - DNA, 25 bp, Saccharomyces pastorianus
agttggatgccctagaatgccgtct

SEQ ID NO: 139472 - DNA, 25 bp, Saccharomyces pastorianus
gaacgcgggttcttccatttaaatg

SEQ ID NO: 139473 - DNA, 25 bp, Saccharomyces pastorianus
ttttgaagagaaacgctatgacgac

SEQ ID NO: 139474 - DNA, 25 bp, Saccharomyces pastorianus
gacttcatcagatatgacgttaaaa

SEQ ID NO: 139475 - DNA, 25 bp, Saccharomyces pastorianus
atatatactacaaaggcctacggcg

SEQ ID NO: 139476 - DNA, 25 bp, Saccharomyces pastorianus
atatactacaaaggcctacggcgac

SEQ ID NO: 139477 - DNA, 25 bp, Saccharomyces pastorianus
ggatgttgatataggatgttatttt

SEQ ID NO: 139478 - DNA, 25 bp, Saccharomyces pastorianus
gacgacaaactgttagacttcatca

SEQ ID NO: 139479 - DNA, 25 bp, Saccharomyces pastorianus
cagatatgacgttaaaacacctaaa

SEQ ID NO: 139480 - DNA, 25 bp, Saccharomyces pastorianus
gacaaactgttagacttcatcagat

SEQ ID NO: 139481 - DNA, 25 bp, Saccharomyces pastorianus
agaaacgctatgacgacaaactgtt

SEQ ID NO: 139482 - DNA, 25 bp, Saccharomyces pastorianus
gaagagaaacgctatgacgacaaac

SEQ ID NO: 139483 - DNA, 25 bp, Saccharomyces pastorianus
gttagacttcatcagatatgacgtt

SEQ ID NO: 139484 - DNA, 25 bp, Saccharomyces pastorianus
gaggagcgttgaacttagcgaacta

SEQ ID NO: 139485 - DNA, 25 bp, Saccharomyces pastorianus
tagcaagaaaccaacccagaccgag

SEQ ID NO: 139486 - DNA, 25 bp, Saccharomyces pastorianus
atcatttctcgcgaactgggacgta

SEQ ID NO: 139487 - DNA, 25 bp, Saccharomyces pastorianus
gactctgtattatgaggctctacgt

SEQ ID NO: 139488 - DNA, 25 bp, Saccharomyces pastorianus
gatcaaactatctgcatcgaagcta

SEQ ID NO: 139489 - DNA, 25 bp, Saccharomyces pastorianus
gtattacaccattcaattacgcttg

SEQ ID NO: 139490 - DNA, 25 bp, Saccharomyces pastorianus
cagaccgagctcttggaaaaggcat

SEQ ID NO: 139491 - DNA, 25 bp, Saccharomyces pastorianus
taaagcccgttattgtttggaacag

SEQ ID NO: 139492 - DNA, 25 bp, Saccharomyces pastorianus
caattacgcttgttttggtaggcta

SEQ ID NO: 139493 - DNA, 25 bp, Saccharomyces pastorianus
ggaacaggtcctatgtattacacca

SEQ ID NO: 139494 - DNA, 25 bp, Saccharomyces pastorianus
gtgggcattggttaacatcatttct

SEQ ID NO: 139495 - DNA, 25 bp, Saccharomyces pastorianus
tctatgttttggtgtaccgaaacca

SEQ ID NO: 139496 - DNA, 25 bp, Saccharomyces pastorianus
tggatcgcattggaacggaggaaat

SEQ ID NO: 139497 - DNA, 25 bp, Saccharomyces pastorianus
aatccagaacaattactgcaactag

SEQ ID NO: 139498 - DNA, 25 bp, Saccharomyces pastorianus
aaaggcgctattgaatatctggaaa

SEQ ID NO: 139499 - DNA, 25 bp, Saccharomyces pastorianus
aagcgtatactcaatttaatccaga

SEQ ID NO: 139500 - DNA, 25 bp, Saccharomyces pastorianus
aaaagtggagactctggactaacag

SEQ ID NO: 139501 - DNA, 25 bp, Saccharomyces pastorianus
taaacggaaatgataaaggcgctat

SEQ ID NO: 139502 - DNA, 25 bp, Saccharomyces pastorianus
atggtaatcatgaaagccactttat

SEQ ID NO: 139503 - DNA, 25 bp, Saccharomyces pastorianus
gtgtaccgaaaccaagacgttgatg

SEQ ID NO: 139504 - DNA, 25 bp, Saccharomyces pastorianus
gacgttgatgcgcaagttgtttata

SEQ ID NO: 139505 - DNA, 25 bp, Saccharomyces pastorianus
agccactttattgcagataaacgga

SEQ ID NO: 139506 - DNA, 25 bp, Saccharomyces pastorianus
gcacaagtttggctgataattctaa

SEQ ID NO: 139507 - DNA, 25 bp, Saccharomyces pastorianus
ggatatgcctatagattcatcaact

SEQ ID NO: 139508 - DNA, 25 bp, Saccharomyces pastorianus
gaatttggtgtctggaacctcttca

SEQ ID NO: 139509 - DNA, 25 bp, Saccharomyces pastorianus
gaaccccgatcgcatctcaagaaaa

SEQ ID NO: 139510 - DNA, 25 bp, Saccharomyces pastorianus
tgctacgctagctaatgacaaagac

SEQ ID NO: 139511 - DNA, 25 bp, Saccharomyces pastorianus
ggaacctcttcatatccacggaatt

SEQ ID NO: 139512 - DNA, 25 bp, Saccharomyces pastorianus
gttattaaacccgaatttgagccag

SEQ ID NO: 139513 - DNA, 25 bp, Saccharomyces pastorianus
gggattactatactgccacaaattt

SEQ ID NO: 139514 - DNA, 25 bp, Saccharomyces pastorianus
aagacggtgatctggcttttttgat

SEQ ID NO: 139515 - DNA, 25 bp, Saccharomyces pastorianus
gagccagtcccatcagttgcaagga

SEQ ID NO: 139516 - DNA, 25 bp, Saccharomyces pastorianus
agtgcaatctattaagcgcgaattt

SEQ ID NO: 139517 - DNA, 25 bp, Saccharomyces pastorianus
tccagtgatcgatcctaagacatct

SEQ ID NO: 139518 - DNA, 25 bp, Saccharomyces pastorianus
gacaagtacttcagcaatccagatg

SEQ ID NO: 139519 - DNA, 25 bp, Saccharomyces pastorianus
gatgttgctattgtcatcgtcaaac

SEQ ID NO: 139520 - DNA, 25 bp, Saccharomyces pastorianus
caatgtgagagactgcagatccaaa

SEQ ID NO: 139521 - DNA, 25 bp, Saccharomyces pastorianus
atgaggcaacatctgactgttactg

SEQ ID NO: 139522 - DNA, 25 bp, Saccharomyces pastorianus
tgcctccttatttacttgcgcaata

SEQ ID NO: 139523 - DNA, 25 bp, Saccharomyces pastorianus
aagatgttcttgagactctaagcaa

SEQ ID NO: 139524 - DNA, 25 bp, Saccharomyces pastorianus
ggccaagcttggattttactttgat

SEQ ID NO: 139525 - DNA, 25 bp, Saccharomyces pastorianus
gttatcccgtatcaggcaatggcca

SEQ ID NO: 139526 - DNA, 25 bp, Saccharomyces pastorianus
gagttttaaagttatcccgtatcag

SEQ ID NO: 139527 - DNA, 25 bp, Saccharomyces pastorianus
ttgacggactatagcttccatatgg

SEQ ID NO: 139528 - DNA, 25 bp, Saccharomyces pastorianus
gcatagaaggcttaggcgatccaag

SEQ ID NO: 139529 - DNA, 25 bp, Saccharomyces pastorianus
tccaagcatggataaaacacttatg

SEQ ID NO: 139530 - DNA, 25 bp, Saccharomyces pastorianus
tcatgcgatacgactccagcataga

SEQ ID NO: 139531 - DNA, 25 bp, Saccharomyces pastorianus
atgcaggactcatgcgatacgactc

SEQ ID NO: 139532 - DNA, 25 bp, Saccharomyces pastorianus
gactcatgcgatacgactccagcat

SEQ ID NO: 139533 - DNA, 25 bp, Saccharomyces pastorianus
aggactcatgcgatacgactccagc

SEQ ID NO: 139534 - DNA, 25 bp, Saccharomyces pastorianus
aggcttaggcgatccaagcatggat

SEQ ID NO: 139535 - DNA, 25 bp, Saccharomyces pastorianus
gactccagcatagaaggcttaggcg

SEQ ID NO: 139536 - DNA, 25 bp, Saccharomyces pastorianus
atggtgaatgcaggactcatgcgat

SEQ ID NO: 139537 - DNA, 25 bp, Saccharomyces pastorianus
gatacgactccagcatagaaggctt

SEQ ID NO: 139538 - DNA, 25 bp, Saccharomyces pastorianus
taaaacacttatgaacgatacctgt

SEQ ID NO: 139539 - DNA, 25 bp, Saccharomyces pastorianus
aacaacacgaactataacgacgata

SEQ ID NO: 139540 - DNA, 25 bp, Saccharomyces pastorianus
gaacccgtttatcgttgccacaact

SEQ ID NO: 139541 - DNA, 25 bp, Saccharomyces pastorianus
aatgttggctcctcacaacctcata

SEQ ID NO: 139542 - DNA, 25 bp, Saccharomyces pastorianus
tcacaacctcatacgaacaacaaca

SEQ ID NO: 139543 - DNA, 25 bp, Saccharomyces pastorianus
gaactataacgacgataacaccgtt

SEQ ID NO: 139544 - DNA, 25 bp, Saccharomyces pastorianus
ataacaacactactatggaattagt

SEQ ID NO: 139545 - DNA, 25 bp, Saccharomyces pastorianus
agtaaacaatgttggctcctcacaa

SEQ ID NO: 139546 - DNA, 25 bp, Saccharomyces pastorianus
gagcctaactaaccataacaacact

SEQ ID NO: 139547 - DNA, 25 bp, Saccharomyces pastorianus
gtttatcgttgccacaactgagcct

SEQ ID NO: 139548 - DNA, 25 bp, Saccharomyces pastorianus
ttggctcctcacaacctcatacgaa

SEQ ID NO: 139549 - DNA, 25 bp, Saccharomyces pastorianus
gttgccacaactgagcctaactaac

SEQ ID NO: 139550 - DNA, 25 bp, Saccharomyces pastorianus
acgattcttcgccaccaaaggaatt

SEQ ID NO: 139551 - DNA, 25 bp, Saccharomyces pastorianus
atcaccctctagtactcataacaag

SEQ ID NO: 139552 - DNA, 25 bp, Saccharomyces pastorianus
gacggattctactcaaatgcaacca

SEQ ID NO: 139553 - DNA, 25 bp, Saccharomyces pastorianus
acagcagcatttcgcacatgttcgc

SEQ ID NO: 139554 - DNA, 25 bp, Saccharomyces pastorianus
aagaagtcgggttggcatcaccctc

SEQ ID NO: 139555 - DNA, 25 bp, Saccharomyces pastorianus
aatcatcctagattccctatttgga

SEQ ID NO: 139556 - DNA, 25 bp, Saccharomyces pastorianus
agcggcttttcaggcaacgccagta

SEQ ID NO: 139557 - DNA, 25 bp, Saccharomyces pastorianus
ccgggccaaccattgaatgccaatt

SEQ ID NO: 139558 - DNA, 25 bp, Saccharomyces pastorianus
gaggtctttctgtttctagcgttaa

SEQ ID NO: 139559 - DNA, 25 bp, Saccharomyces pastorianus
caaattatggcccaacctttgtcca

SEQ ID NO: 139560 - DNA, 25 bp, Saccharomyces pastorianus
ggctattttagttatcctggcgtct

SEQ ID NO: 139561 - DNA, 25 bp, Saccharomyces pastorianus
ggcaaccctatgctccaaatatggt

SEQ ID NO: 139562 - DNA, 25 bp, Saccharomyces pastorianus
ggctttagttgaattttcttccgtg

SEQ ID NO: 139563 - DNA, 25 bp, Saccharomyces pastorianus
taacaagtacttccttggcaaccct

SEQ ID NO: 139564 - DNA, 25 bp, Saccharomyces pastorianus
acatggagctgtgactttccaacaa

SEQ ID NO: 139565 - DNA, 25 bp, Saccharomyces pastorianus
gccaaaatcttacctatgcatcaac

SEQ ID NO: 139566 - DNA, 25 bp, Saccharomyces pastorianus
cccacaatttcttctcaattctcaa

SEQ ID NO: 139567 - DNA, 25 bp, Saccharomyces pastorianus
tcatatctgctaggactttaaggaa

SEQ ID NO: 139568 - DNA, 25 bp, Saccharomyces pastorianus
agtgccgtaaaagccttagatagtt

SEQ ID NO: 139569 - DNA, 25 bp, Saccharomyces pastorianus
tacagcaccagcagccacaattaaa

SEQ ID NO: 139570 - DNA, 25 bp, Saccharomyces pastorianus
acaggagcagttattcacatggagc

SEQ ID NO: 139571 - DNA, 25 bp, Saccharomyces pastorianus
acaatttgcaaccacagcctttatt

SEQ ID NO: 139572 - DNA, 25 bp, Saccharomyces pastorianus
aatgcttccagctagtatttgacga

SEQ ID NO: 139573 - DNA, 25 bp, Saccharomyces pastorianus
atgttttccatcaaccctgggtgaa

SEQ ID NO: 139574 - DNA, 25 bp, Saccharomyces pastorianus
aaggcgcctcacaaagtggcttcgt

SEQ ID NO: 139575 - DNA, 25 bp, Saccharomyces pastorianus
ggctcgcaactttctggttatcatg

SEQ ID NO: 139576 - DNA, 25 bp, Saccharomyces pastorianus
atcgcagacaaaattcacggctcaa

SEQ ID NO: 139577 - DNA, 25 bp, Saccharomyces pastorianus
aggtttttcaaactgcacggctcgc

SEQ ID NO: 139578 - DNA, 25 bp, Saccharomyces pastorianus
gggtactctttaatgaatgcttcca

SEQ ID NO: 139579 - DNA, 25 bp, Saccharomyces pastorianus
ttcacggctcaaaaaggctgtacga

SEQ ID NO: 139580 - DNA, 25 bp, Saccharomyces pastorianus
gaaagaacttctgcctttgaacaat

SEQ ID NO: 139581 - DNA, 25 bp, Saccharomyces pastorianus
ggctgtacgagttaccacgcaaggc

SEQ ID NO: 139582 - DNA, 25 bp, Saccharomyces pastorianus
aattactttcaacgcggaatgctct

SEQ ID NO: 139583 - DNA, 25 bp, Saccharomyces pastorianus
aatggcagtgaaattggtgtcgacc

SEQ ID NO: 139584 - DNA, 25 bp, Saccharomyces pastorianus
aggccgctgaagtgaatgaaccatt

SEQ ID NO: 139585 - DNA, 25 bp, Saccharomyces pastorianus
gaatccattgccaactcccaatttt

SEQ ID NO: 139586 - DNA, 25 bp, Saccharomyces pastorianus
gattaccactgcatctacggtcgat

SEQ ID NO: 139587 - DNA, 25 bp, Saccharomyces pastorianus
atcagtcggtgagcgaggctcgtaa

SEQ ID NO: 139588 - DNA, 25 bp, Saccharomyces pastorianus
gattccatcgatttaaccagatcca

SEQ ID NO: 139589 - DNA, 25 bp, Saccharomyces pastorianus
ggataatggatcaacttcgttcaaa

SEQ ID NO: 139590 - DNA, 25 bp, Saccharomyces pastorianus
atccaattcaccagaatccattgcc

SEQ ID NO: 139591 - DNA, 25 bp, Saccharomyces pastorianus
taccacccctgccaagatgggaaga

SEQ ID NO: 139592 - DNA, 25 bp, Saccharomyces pastorianus
tgtcgaccatggagaggccgctgaa

SEQ ID NO: 139593 - DNA, 25 bp, Saccharomyces pastorianus
tcccaattttcacaacaatcctcga

SEQ ID NO: 139594 - DNA, 25 bp, Saccharomyces pastorianus
ttaccactaccgaagactaaaactg

SEQ ID NO: 139595 - DNA, 25 bp, Saccharomyces pastorianus
tgatgaacttttgaactggccagaa

SEQ ID NO: 139596 - DNA, 25 bp, Saccharomyces pastorianus
gccccattgtgtcacggctacaaaa

SEQ ID NO: 139597 - DNA, 25 bp, Saccharomyces pastorianus
aaatctaaaggtctcgtcgtcgaag

SEQ ID NO: 139598 - DNA, 25 bp, Saccharomyces pastorianus
gcctacaactttgaactgtcagacg

SEQ ID NO: 139599 - DNA, 25 bp, Saccharomyces pastorianus
gagatatcaccttggattatgagac

SEQ ID NO: 139600 - DNA, 25 bp, Saccharomyces pastorianus
gaaatttcttgatcatcctgatgct

SEQ ID NO: 139601 - DNA, 25 bp, Saccharomyces pastorianus
gtcgtcgaagcctttgccccattgt

SEQ ID NO: 139602 - DNA, 25 bp, Saccharomyces pastorianus
gaaggtaaccttgcagcctacaact

SEQ ID NO: 139603 - DNA, 25 bp, Saccharomyces pastorianus
ggtggaccgtaatccaggtcaagtt

SEQ ID NO: 139604 - DNA, 25 bp, Saccharomyces pastorianus
aagcacaagccagtggtcaaccaaa

SEQ ID NO: 139605 - DNA, 25 bp, Saccharomyces pastorianus
tttcaaacggcttcaaaatcccaag

SEQ ID NO: 139606 - DNA, 25 bp, Saccharomyces pastorianus
caaacggcttcaaaatcccaagcat

SEQ ID NO: 139607 - DNA, 25 bp, Saccharomyces pastorianus
aacggcttcaaaatcccaagcattg

SEQ ID NO: 139608 - DNA, 25 bp, Saccharomyces pastorianus
acggcttcaaaatcccaagcattgc

SEQ ID NO: 139609 - DNA, 25 bp, Saccharomyces pastorianus
aaacggcttcaaaatcccaagcatt

SEQ ID NO: 139610 - DNA, 25 bp, Saccharomyces pastorianus
tcaaacggcttcaaaatcccaagca

SEQ ID NO: 139611 - DNA, 25 bp, Saccharomyces pastorianus
tcccaagcattgctttgggaaccta

SEQ ID NO: 139612 - DNA, 25 bp, Saccharomyces pastorianus
cccaagcattgctttgggaacctac

SEQ ID NO: 139613 - DNA, 25 bp, Saccharomyces pastorianus
aatcccaagcattgctttgggaacc

SEQ ID NO: 139614 - DNA, 25 bp, Saccharomyces pastorianus
ttcaaacggcttcaaaatcccaagc

SEQ ID NO: 139615 - DNA, 25 bp, Saccharomyces pastorianus
atcccaagcattgctttgggaacct

SEQ ID NO: 139616 - DNA, 25 bp, Saccharomyces pastorianus
agcattcatatctatcgttgacagc

SEQ ID NO: 139617 - DNA, 25 bp, Saccharomyces pastorianus
attcatatctatcgttgacagcgaa

SEQ ID NO: 139618 - DNA, 25 bp, Saccharomyces pastorianus
aaagcattcatatctatcgttgaca

SEQ ID NO: 139619 - DNA, 25 bp, Saccharomyces pastorianus
atatctatcgttgacagcgaaaaag

SEQ ID NO: 139620 - DNA, 25 bp, Saccharomyces pastorianus
tctatcgttgacagcgaaaaagaag

SEQ ID NO: 139621 - DNA, 25 bp, Saccharomyces pastorianus
aagcattcatatctatcgttgacag

SEQ ID NO: 139622 - DNA, 25 bp, Saccharomyces pastorianus
tggcaaaagcattcatatctatcgt

SEQ ID NO: 139623 - DNA, 25 bp, Saccharomyces pastorianus
gcattcatatctatcgttgacagcg

SEQ ID NO: 139624 - DNA, 25 bp, Saccharomyces pastorianus
tcatatctatcgttgacagcgaaaa

SEQ ID NO: 139625 - DNA, 25 bp, Saccharomyces pastorianus
ggcaaaagcattcatatctatcgtt

SEQ ID NO: 139626 - DNA, 25 bp, Saccharomyces pastorianus
gaaatcaatggcaaaagcattcata

SEQ ID NO: 139627 - DNA, 25 bp, Saccharomyces pastorianus
gtgcctttcgatgaagtcttccata

SEQ ID NO: 139628 - DNA, 25 bp, Saccharomyces pastorianus
aggtaccaagggatgtgcctttcga

SEQ ID NO: 139629 - DNA, 25 bp, Saccharomyces pastorianus
ttcgcttaaagctaccctaaacgca

SEQ ID NO: 139630 - DNA, 25 bp, Saccharomyces pastorianus
gatttttactatggtccgggcgacg

SEQ ID NO: 139631 - DNA, 25 bp, Saccharomyces pastorianus
gcttgtcacctctcgtcaatgagaa

SEQ ID NO: 139632 - DNA, 25 bp, Saccharomyces pastorianus
gtttgtcctaaatgcacctgttgtt

SEQ ID NO: 139633 - DNA, 25 bp, Saccharomyces pastorianus
aaacgcaactagcaagtttgtccta

SEQ ID NO: 139634 - DNA, 25 bp, Saccharomyces pastorianus
cagagagctttccagttgtttgtaa

SEQ ID NO: 139635 - DNA, 25 bp, Saccharomyces pastorianus
ggatagcttagattacgacccgaac

SEQ ID NO: 139636 - DNA, 25 bp, Saccharomyces pastorianus
ttggaaaacccttggcttgtcacct

SEQ ID NO: 139637 - DNA, 25 bp, Saccharomyces pastorianus
cgggcgacggtgttgttcaccataa

SEQ ID NO: 139638 - DNA, 25 bp, Saccharomyces pastorianus
tcaaagggccgtgttattagcaaac

SEQ ID NO: 139639 - DNA, 25 bp, Saccharomyces pastorianus
agaactggcatctctggaggcgtcg

SEQ ID NO: 139640 - DNA, 25 bp, Saccharomyces pastorianus
accgatactggtgtttatgttgtta

SEQ ID NO: 139641 - DNA, 25 bp, Saccharomyces pastorianus
tagcaaacgctgtgtccatcgattt

SEQ ID NO: 139642 - DNA, 25 bp, Saccharomyces pastorianus
agatgcacctttcttatcatttgat

SEQ ID NO: 139643 - DNA, 25 bp, Saccharomyces pastorianus
ttatcctactgagatgctaagttct

SEQ ID NO: 139644 - DNA, 25 bp, Saccharomyces pastorianus
ataatggcgagtgtagaccgaaatt

SEQ ID NO: 139645 - DNA, 25 bp, Saccharomyces pastorianus
gaaggatccacttttgaccaatttg

SEQ ID NO: 139646 - DNA, 25 bp, Saccharomyces pastorianus
gttagatttgattcgcagagatgct

SEQ ID NO: 139647 - DNA, 25 bp, Saccharomyces pastorianus
tatcatttgattttcctgtaacaga

SEQ ID NO: 139648 - DNA, 25 bp, Saccharomyces pastorianus
atctctggaggcgtcgttacgaatt

SEQ ID NO: 139649 - DNA, 25 bp, Saccharomyces pastorianus
acctccttccgcgtatgttgataat

SEQ ID NO: 139650 - DNA, 25 bp, Saccharomyces pastorianus
cgtttttctaggtttcgagcaggct

SEQ ID NO: 139651 - DNA, 25 bp, Saccharomyces pastorianus
taaaaggcccttttcgttcatcaat

SEQ ID NO: 139652 - DNA, 25 bp, Saccharomyces pastorianus
cccttttcgttcatcaattctcata

SEQ ID NO: 139653 - DNA, 25 bp, Saccharomyces pastorianus
cgagcaggctaataggtatgccata

SEQ ID NO: 139654 - DNA, 25 bp, Saccharomyces pastorianus
ataaagactatcatacctccttccg

SEQ ID NO: 139655 - DNA, 25 bp, Saccharomyces pastorianus
gtccttttttggtagatgtctttga

SEQ ID NO: 139656 - DNA, 25 bp, Saccharomyces pastorianus
gagatttttctataacaaaggccat

SEQ ID NO: 139657 - DNA, 25 bp, Saccharomyces pastorianus
tcgtctacatcgtccttttttggta

SEQ ID NO: 139658 - DNA, 25 bp, Saccharomyces pastorianus
aaaggccataatgcggcagttttat

SEQ ID NO: 139659 - DNA, 25 bp, Saccharomyces pastorianus
ggcagttttatcgtctacatcgtcc

SEQ ID NO: 139660 - DNA, 25 bp, Saccharomyces pastorianus
ggagaagcagcaataccaccactac

SEQ ID NO: 139661 - DNA, 25 bp, Saccharomyces pastorianus
gtttgaagcccctatgcgatagaaa

SEQ ID NO: 139662 - DNA, 25 bp, Saccharomyces pastorianus
ataccaccactacgagatattttat

SEQ ID NO: 139663 - DNA, 25 bp, Saccharomyces pastorianus
gtggttcgaagactctggaaaactg

SEQ ID NO: 139664 - DNA, 25 bp, Saccharomyces pastorianus
gggcttctttgatactacagtggtt

SEQ ID NO: 139665 - DNA, 25 bp, Saccharomyces pastorianus
tgggagttccatagaatgcccgaaa

SEQ ID NO: 139666 - DNA, 25 bp, Saccharomyces pastorianus
atagggccacaatgctgaaagatga

SEQ ID NO: 139667 - DNA, 25 bp, Saccharomyces pastorianus
tattattgtttgaagcccctatgcg

SEQ ID NO: 139668 - DNA, 25 bp, Saccharomyces pastorianus
aggcaaatgcttaccgattgaccaa

SEQ ID NO: 139669 - DNA, 25 bp, Saccharomyces pastorianus
gagcttagacagttgggcttctttg

SEQ ID NO: 139670 - DNA, 25 bp, Saccharomyces pastorianus
gaatgcccgaaagcttgctctatta

SEQ ID NO: 139671 - DNA, 25 bp, Saccharomyces pastorianus
ggcagaagcgtcgttatccacgccg

SEQ ID NO: 139672 - DNA, 25 bp, Saccharomyces pastorianus
tggtgtggccaagggctccttcaag

SEQ ID NO: 139673 - DNA, 25 bp, Saccharomyces pastorianus
tccttcaaggactctttgatcaagc

SEQ ID NO: 139674 - DNA, 25 bp, Saccharomyces pastorianus
ttgatcaagcttatcggtcctacct

SEQ ID NO: 139675 - DNA, 25 bp, Saccharomyces pastorianus
ctccgttgtaggcagaagcgtcgtt

SEQ ID NO: 139676 - DNA, 25 bp, Saccharomyces pastorianus
aatctttgaagactggtaatgccgg

SEQ ID NO: 139677 - DNA, 25 bp, Saccharomyces pastorianus
ggtcctacctccgttgtaggcagaa

SEQ ID NO: 139678 - DNA, 25 bp, Saccharomyces pastorianus
acgccggccaagatgacttaggtaa

SEQ ID NO: 139679 - DNA, 25 bp, Saccharomyces pastorianus
atccacgccggccaagatgacttag

SEQ ID NO: 139680 - DNA, 25 bp, Saccharomyces pastorianus
aggactctttgatcaagcttatcgg

SEQ ID NO: 139681 - DNA, 25 bp, Saccharomyces pastorianus
aagactggtaatgccggtccaagac

SEQ ID NO: 139682 - DNA, 25 bp, Saccharomyces pastorianus
gaagacaccgtgactatccgcaagc

SEQ ID NO: 139683 - DNA, 25 bp, Saccharomyces pastorianus
caaagggtgttcgatgtgaaggata

SEQ ID NO: 139684 - DNA, 25 bp, Saccharomyces pastorianus
cattatgcgcaagtgtaacgagtga

SEQ ID NO: 139685 - DNA, 25 bp, Saccharomyces pastorianus
tatccgcaagctacaggccaacaag

SEQ ID NO: 139686 - DNA, 25 bp, Saccharomyces pastorianus
tttgctgaagacaccgtgactatcc

SEQ ID NO: 139687 - DNA, 25 bp, Saccharomyces pastorianus
aattcgcccaaagcgtggtttcgcg

SEQ ID NO: 139688 - DNA, 25 bp, Saccharomyces pastorianus
gggtgctgatctgttcattatgcgc

SEQ ID NO: 139689 - DNA, 25 bp, Saccharomyces pastorianus
gctacaggccaacaagtacgtgtta

SEQ ID NO: 139690 - DNA, 25 bp, Saccharomyces pastorianus
gtgactatccgcaagctacaggcca

SEQ ID NO: 139691 - DNA, 25 bp, Saccharomyces pastorianus
taacgagtgaattcgcccaaagcgt

SEQ ID NO: 139692 - DNA, 25 bp, Saccharomyces pastorianus
gatctgttcattatgcgcaagtgta

SEQ ID NO: 139693 - DNA, 25 bp, Saccharomyces pastorianus
ggcacttcgtctgcctttgaaaaga

SEQ ID NO: 139694 - DNA, 25 bp, Saccharomyces pastorianus
aaagtcactcgacgaactagctccg

SEQ ID NO: 139695 - DNA, 25 bp, Saccharomyces pastorianus
aaagagtgtcgagcgacttcgccgt

SEQ ID NO: 139696 - DNA, 25 bp, Saccharomyces pastorianus
aagacgttcaacacaggcgtggcca

SEQ ID NO: 139697 - DNA, 25 bp, Saccharomyces pastorianus
aaggcacaaaccattctgtccaggg

SEQ ID NO: 139698 - DNA, 25 bp, Saccharomyces pastorianus
tgtcattcctgtgcctctgaacaag

SEQ ID NO: 139699 - DNA, 25 bp, Saccharomyces pastorianus
ctagctccgctgatgatgaccaaga

SEQ ID NO: 139700 - DNA, 25 bp, Saccharomyces pastorianus
ggaccccatccaggctttggaaaag

SEQ ID NO: 139701 - DNA, 25 bp, Saccharomyces pastorianus
ttcgccgtgcgcttgggagaagaac

SEQ ID NO: 139702 - DNA, 25 bp, Saccharomyces pastorianus
ggagaagaactcactgccattgcca

SEQ ID NO: 139703 - DNA, 25 bp, Saccharomyces pastorianus
gggccttatatctggtgtactgcca

SEQ ID NO: 139704 - DNA, 25 bp, Saccharomyces pastorianus
tttgcagagaactcttcccttagct

SEQ ID NO: 139705 - DNA, 25 bp, Saccharomyces pastorianus
ggtctctggcaggtattcttttgca

SEQ ID NO: 139706 - DNA, 25 bp, Saccharomyces pastorianus
ttctctgccgatggttcgctagctg

SEQ ID NO: 139707 - DNA, 25 bp, Saccharomyces pastorianus
cgctagctggtgttcgtactgacga

SEQ ID NO: 139708 - DNA, 25 bp, Saccharomyces pastorianus
gcctgcgaaccctgtaagaggtcta

SEQ ID NO: 139709 - DNA, 25 bp, Saccharomyces pastorianus
ttagctcgttgatcgcttcaagcca

SEQ ID NO: 139710 - DNA, 25 bp, Saccharomyces pastorianus
ggagacgtggcctgactaacatata

SEQ ID NO: 139711 - DNA, 25 bp, Saccharomyces pastorianus
aagaggtctactttggactggcccg

SEQ ID NO: 139712 - DNA, 25 bp, Saccharomyces pastorianus
gaagcgagcaacacatgtcccactt

SEQ ID NO: 139713 - DNA, 25 bp, Saccharomyces pastorianus
ctgctctgcagttggttatcttgga

SEQ ID NO: 139714 - DNA, 25 bp, Saccharomyces pastorianus
atgtcccactttgccacaggagacg

SEQ ID NO: 139715 - DNA, 25 bp, Saccharomyces pastorianus
tattgctttgttgaccattggtgcc

SEQ ID NO: 139716 - DNA, 25 bp, Saccharomyces pastorianus
tgctttgttgaccattggtgccaga

SEQ ID NO: 139717 - DNA, 25 bp, Saccharomyces pastorianus
gaccattggtgccagagaagctgct

SEQ ID NO: 139718 - DNA, 25 bp, Saccharomyces pastorianus
ttgaccattggtgccagagaagctg

SEQ ID NO: 139719 - DNA, 25 bp, Saccharomyces pastorianus
tttgttgaccattggtgccagagaa

SEQ ID NO: 139720 - DNA, 25 bp, Saccharomyces pastorianus
gttgaccattggtgccagagaagct

SEQ ID NO: 139721 - DNA, 25 bp, Saccharomyces pastorianus
gctttgttgaccattggtgccagag

SEQ ID NO: 139722 - DNA, 25 bp, Saccharomyces pastorianus
accattggtgccagagaagctgctt

SEQ ID NO: 139723 - DNA, 25 bp, Saccharomyces pastorianus
ttgctttgttgaccattggtgccag

SEQ ID NO: 139724 - DNA, 25 bp, Saccharomyces pastorianus
cattggtgccagagaagctgctttc

SEQ ID NO: 139725 - DNA, 25 bp, Saccharomyces pastorianus
attgctttgttgaccattggtgcca

SEQ ID NO: 139726 - DNA, 25 bp, Saccharomyces pastorianus
aattgatcaatgctgctaagggttc

SEQ ID NO: 139727 - DNA, 25 bp, Saccharomyces pastorianus
attgctgaaactttggccgaagaat

SEQ ID NO: 139728 - DNA, 25 bp, Saccharomyces pastorianus
gctatcaccaacactggtccaagag

SEQ ID NO: 139729 - DNA, 25 bp, Saccharomyces pastorianus
atcaagcacactttggacatcatca

SEQ ID NO: 139730 - DNA, 25 bp, Saccharomyces pastorianus
caaaacccaatccaagttgttgttg

SEQ ID NO: 139731 - DNA, 25 bp, Saccharomyces pastorianus
gactgaccaaaacccaatccaagtt

SEQ ID NO: 139732 - DNA, 25 bp, Saccharomyces pastorianus
aagagaagacaccaccagagtcggt

SEQ ID NO: 139733 - DNA, 25 bp, Saccharomyces pastorianus
agctgtcgatgtttctccattgaga

SEQ ID NO: 139734 - DNA, 25 bp, Saccharomyces pastorianus
acatcatcaatgtcttgactgacca

SEQ ID NO: 139735 - DNA, 25 bp, Saccharomyces pastorianus
acgtcaagctgtcgatgtttctcca

SEQ ID NO: 139736 - DNA, 25 bp, Saccharomyces pastorianus
aaggctgttagaatcatcaagcaca

SEQ ID NO: 139737 - DNA, 25 bp, Saccharomyces pastorianus
aacgaggtcattcagtggttaacca

SEQ ID NO: 139738 - DNA, 25 bp, Saccharomyces pastorianus
ggcactctaatctatcttcagcatt

SEQ ID NO: 139739 - DNA, 25 bp, Saccharomyces pastorianus
tcaggcgcagtctatcatagtaact

SEQ ID NO: 139740 - DNA, 25 bp, Saccharomyces pastorianus
gaagtactctcttttagcacctagt

SEQ ID NO: 139741 - DNA, 25 bp, Saccharomyces pastorianus
tagggaagctttacctgtttgggct

SEQ ID NO: 139742 - DNA, 25 bp, Saccharomyces pastorianus
agtaactccgtattcgatagcccaa

SEQ ID NO: 139743 - DNA, 25 bp, Saccharomyces pastorianus
ataactggtatatcgcatggcactc

SEQ ID NO: 139744 - DNA, 25 bp, Saccharomyces pastorianus
gaagatagcatccaatttgaccaac

SEQ ID NO: 139745 - DNA, 25 bp, Saccharomyces pastorianus
tgtaggtttgacaacgctgatgctg

SEQ ID NO: 139746 - DNA, 25 bp, Saccharomyces pastorianus
gttttgcccggccttcacgaaggat

SEQ ID NO: 139747 - DNA, 25 bp, Saccharomyces pastorianus
tcagcatttccccaggacgatgaag

SEQ ID NO: 139748 - DNA, 25 bp, Saccharomyces pastorianus
ggcgcttccagtgtcattatatata

SEQ ID NO: 139749 - DNA, 25 bp, Saccharomyces pastorianus
tgggtttttacactatccttatgga

SEQ ID NO: 139750 - DNA, 25 bp, Saccharomyces pastorianus
gcatcagtgactacaagctactttt

SEQ ID NO: 139751 - DNA, 25 bp, Saccharomyces pastorianus
ttaaaggtgatcctgcttctcacgc

SEQ ID NO: 139752 - DNA, 25 bp, Saccharomyces pastorianus
gataaaatccacatcgtacgatcgg

SEQ ID NO: 139753 - DNA, 25 bp, Saccharomyces pastorianus
gatatacttgaactccttgcaacag

SEQ ID NO: 139754 - DNA, 25 bp, Saccharomyces pastorianus
aatgcagaactttatggcgcttcca

SEQ ID NO: 139755 - DNA, 25 bp, Saccharomyces pastorianus
atataccttggacgagtttctagat

SEQ ID NO: 139756 - DNA, 25 bp, Saccharomyces pastorianus
gtaactgctcgatacgtgttttgca

SEQ ID NO: 139757 - DNA, 25 bp, Saccharomyces pastorianus
ggagcaagtgattcgtcaacgttta

SEQ ID NO: 139758 - DNA, 25 bp, Saccharomyces pastorianus
aagtggtctacgaagcaagcatgat

SEQ ID NO: 139759 - DNA, 25 bp, Saccharomyces pastorianus
atggacccgaataccgatataaatg

SEQ ID NO: 139760 - DNA, 25 bp, Saccharomyces pastorianus
aattcaactaattgtagcggcaagt

SEQ ID NO: 139761 - DNA, 25 bp, Saccharomyces pastorianus
attatcgttcgctcatggtttgcaa

SEQ ID NO: 139762 - DNA, 25 bp, Saccharomyces pastorianus
aattgtagcggcaagtctatcctcc

SEQ ID NO: 139763 - DNA, 25 bp, Saccharomyces pastorianus
ggtgatgcgccaatttggcctataa

SEQ ID NO: 139764 - DNA, 25 bp, Saccharomyces pastorianus
gcaagtctatcctccaaatgtttat

SEQ ID NO: 139765 - DNA, 25 bp, Saccharomyces pastorianus
gtctatcctccaaatgtttatattt

SEQ ID NO: 139766 - DNA, 25 bp, Saccharomyces pastorianus
atattaggtgatgcgccaatttggc

SEQ ID NO: 139767 - DNA, 25 bp, Saccharomyces pastorianus
tagcggcaagtctatcctccaaatg

SEQ ID NO: 139768 - DNA, 25 bp, Saccharomyces pastorianus
tggtttgcaatcaagagctatctat

SEQ ID NO: 139769 - DNA, 25 bp, Saccharomyces pastorianus
tggcctataatattatcgttcgctc

SEQ ID NO: 139770 - DNA, 25 bp, Saccharomyces pastorianus
ggtggatgcgtggacttcatttttt

SEQ ID NO: 139771 - DNA, 25 bp, Saccharomyces pastorianus
taattccggtatatttgtttgccaa

SEQ ID NO: 139772 - DNA, 25 bp, Saccharomyces pastorianus
gcgaccacatgtatgttcactgcag

SEQ ID NO: 139773 - DNA, 25 bp, Saccharomyces pastorianus
ttgggcacgcgggtacaatgccaac

SEQ ID NO: 139774 - DNA, 25 bp, Saccharomyces pastorianus
aatactcctgtatttgcgaccacat

SEQ ID NO: 139775 - DNA, 25 bp, Saccharomyces pastorianus
ggatgccctaaatttgtcagcacta

SEQ ID NO: 139776 - DNA, 25 bp, Saccharomyces pastorianus
gagacggtgtttggacctggcacat

SEQ ID NO: 139777 - DNA, 25 bp, Saccharomyces pastorianus
ggaagctaccgagtatgcactgaat

SEQ ID NO: 139778 - DNA, 25 bp, Saccharomyces pastorianus
taaacgccaatccagcaatgaggtt

SEQ ID NO: 139779 - DNA, 25 bp, Saccharomyces pastorianus
ttttcggaccgtgtcttatggctaa

SEQ ID NO: 139780 - DNA, 25 bp, Saccharomyces pastorianus
tggcatcttgacacctaccgagaat

SEQ ID NO: 139781 - DNA, 25 bp, Saccharomyces pastorianus
aaatgtacaagcagtcttcctcggg

SEQ ID NO: 139782 - DNA, 25 bp, Saccharomyces pastorianus
gtcgtctgtgggtgacttttttgtt

SEQ ID NO: 139783 - DNA, 25 bp, Saccharomyces pastorianus
acctgtgttgattgtaatgacccaa

SEQ ID NO: 139784 - DNA, 25 bp, Saccharomyces pastorianus
ttaaggcgattcaccagtttaagtg

SEQ ID NO: 139785 - DNA, 25 bp, Saccharomyces pastorianus
actgagggcctttctattcatgaag

SEQ ID NO: 139786 - DNA, 25 bp, Saccharomyces pastorianus
ttcatgaagcccgtagacgtccgtt

SEQ ID NO: 139787 - DNA, 25 bp, Saccharomyces pastorianus
taaaccactcgataggcacaaccta

SEQ ID NO: 139788 - DNA, 25 bp, Saccharomyces pastorianus
gggattgttagcatcaggctctact

SEQ ID NO: 139789 - DNA, 25 bp, Saccharomyces pastorianus
agaagctcatccttttccagtatta

SEQ ID NO: 139790 - DNA, 25 bp, Saccharomyces pastorianus
ggcggaaatcgcaactagcttcttt

SEQ ID NO: 139791 - DNA, 25 bp, Saccharomyces pastorianus
ttgcgcctgaaatcgttgtcttcaa

SEQ ID NO: 139792 - DNA, 25 bp, Saccharomyces pastorianus
atggtttacgccatgattccattat

SEQ ID NO: 139793 - DNA, 25 bp, Saccharomyces pastorianus
gagaatgactggttgccctaacggt

SEQ ID NO: 139794 - DNA, 25 bp, Saccharomyces pastorianus
gtttgccgaatctgaacgtttccta

SEQ ID NO: 139795 - DNA, 25 bp, Saccharomyces pastorianus
aacatgtggtttagcgtttgccgaa

SEQ ID NO: 139796 - DNA, 25 bp, Saccharomyces pastorianus
gtttgagattatcttcatcttcctg

SEQ ID NO: 139797 - DNA, 25 bp, Saccharomyces pastorianus
gtatcattaaaccaaccaccgaggg

SEQ ID NO: 139798 - DNA, 25 bp, Saccharomyces pastorianus
gctcttgttggtaaagctccacata

SEQ ID NO: 139799 - DNA, 25 bp, Saccharomyces pastorianus
gataacaccgatttcagcggtttga

SEQ ID NO: 139800 - DNA, 25 bp, Saccharomyces pastorianus
tggtggttacctcggccaaaggcta

SEQ ID NO: 139801 - DNA, 25 bp, Saccharomyces pastorianus
gaacgtttcctacctgacattatta

SEQ ID NO: 139802 - DNA, 25 bp, Saccharomyces pastorianus
ttgtcgactacatcaaaccattgtt

SEQ ID NO: 139803 - DNA, 25 bp, Saccharomyces pastorianus
atttacggtccaacttatctgccaa

SEQ ID NO: 139804 - DNA, 25 bp, Saccharomyces pastorianus
ttatggatacattagctgctgcagg

SEQ ID NO: 139805 - DNA, 25 bp, Saccharomyces pastorianus
agactacggcctaccacgaagtttg

SEQ ID NO: 139806 - DNA, 25 bp, Saccharomyces pastorianus
gggcaaccttccagattcatggtgt

SEQ ID NO: 139807 - DNA, 25 bp, Saccharomyces pastorianus
aatggcttgctctggatcacttatc

SEQ ID NO: 139808 - DNA, 25 bp, Saccharomyces pastorianus
tgctctaccaaccaatgccaaggtt

SEQ ID NO: 139809 - DNA, 25 bp, Saccharomyces pastorianus
gccgttcctccatataacgatgtgg

SEQ ID NO: 139810 - DNA, 25 bp, Saccharomyces pastorianus
gaaatgtcatggtttctgctctacc

SEQ ID NO: 139811 - DNA, 25 bp, Saccharomyces pastorianus
agcggtaacgctttggtcgatattg

SEQ ID NO: 139812 - DNA, 25 bp, Saccharomyces pastorianus
ccatcctggccatctatttttgaaa

SEQ ID NO: 139813 - DNA, 25 bp, Saccharomyces pastorianus
aagaccactccacaacaatggcttg

SEQ ID NO: 139814 - DNA, 25 bp, Saccharomyces pastorianus
aagacattattccaccacttgaagg

SEQ ID NO: 139815 - DNA, 25 bp, Saccharomyces pastorianus
attccaccacttgaaggtatcgtta

SEQ ID NO: 139816 - DNA, 25 bp, Saccharomyces pastorianus
gacattattccaccacttgaaggta

SEQ ID NO: 139817 - DNA, 25 bp, Saccharomyces pastorianus
tccaccacttgaaggtatcgttatt

SEQ ID NO: 139818 - DNA, 25 bp, Saccharomyces pastorianus
tgaagacattattccaccacttgaa

SEQ ID NO: 139819 - DNA, 25 bp, Saccharomyces pastorianus
tagggtcatgcttaggttttgttaa

SEQ ID NO: 139820 - DNA, 25 bp, Saccharomyces pastorianus
aaacttacccaagattagggtcatg

SEQ ID NO: 139821 - DNA, 25 bp, Saccharomyces pastorianus
ttattccaccacttgaaggtatcgt

SEQ ID NO: 139822 - DNA, 25 bp, Saccharomyces pastorianus
cccaagattagggtcatgcttaggt

SEQ ID NO: 139823 - DNA, 25 bp, Saccharomyces pastorianus
gattagggtcatgcttaggttttgt

SEQ ID NO: 139824 - DNA, 25 bp, Saccharomyces pastorianus
gtcatgcttaggttttgttaaaact

SEQ ID NO: 139825 - DNA, 25 bp, Saccharomyces pastorianus
taatgctttttacagctcccttcaa

SEQ ID NO: 139826 - DNA, 25 bp, Saccharomyces pastorianus
agctcttattttcaaggcactcctg

SEQ ID NO: 139827 - DNA, 25 bp, Saccharomyces pastorianus
gctcccttcaacatactaatgcact

SEQ ID NO: 139828 - DNA, 25 bp, Saccharomyces pastorianus
ggcactcctgcgacttttgaaaatg

SEQ ID NO: 139829 - DNA, 25 bp, Saccharomyces pastorianus
ggcaaactcttgtcgttacgtacta

SEQ ID NO: 139830 - DNA, 25 bp, Saccharomyces pastorianus
tgcacttttaccctcaagcatgaaa

SEQ ID NO: 139831 - DNA, 25 bp, Saccharomyces pastorianus
attggcattgccacaaacccgatgt

SEQ ID NO: 139832 - DNA, 25 bp, Saccharomyces pastorianus
gatattttccgttgacattggagtc

SEQ ID NO: 139833 - DNA, 25 bp, Saccharomyces pastorianus
tgctcagcagtgttaggccaagtaa

SEQ ID NO: 139834 - DNA, 25 bp, Saccharomyces pastorianus
gacaagtcttcctacacaagatttg

SEQ ID NO: 139835 - DNA, 25 bp, Saccharomyces pastorianus
gccaagtaactgctggttcgcttta

SEQ ID NO: 139836 - DNA, 25 bp, Saccharomyces pastorianus
gaagatattttacttccagtagaag

SEQ ID NO: 139837 - DNA, 25 bp, Saccharomyces pastorianus
gttgaagatattttacttccagtag

SEQ ID NO: 139838 - DNA, 25 bp, Saccharomyces pastorianus
ttcttacaagttcaaaaacagaggt

SEQ ID NO: 139839 - DNA, 25 bp, Saccharomyces pastorianus
attttacttccagtagaagttgaag

SEQ ID NO: 139840 - DNA, 25 bp, Saccharomyces pastorianus
gtaaagacttagaatggatgacgaa

SEQ ID NO: 139841 - DNA, 25 bp, Saccharomyces pastorianus
aaagtagacacttcttacaagttca

SEQ ID NO: 139842 - DNA, 25 bp, Saccharomyces pastorianus
gagacactcatgagcatatctggtg

SEQ ID NO: 139843 - DNA, 25 bp, Saccharomyces pastorianus
atgagcatatctggtgatgaagaac

SEQ ID NO: 139844 - DNA, 25 bp, Saccharomyces pastorianus
gtagacacttcttacaagttcaaaa

SEQ ID NO: 139845 - DNA, 25 bp, Saccharomyces pastorianus
actcatgagcatatctggtgatgaa

SEQ ID NO: 139846 - DNA, 25 bp, Saccharomyces pastorianus
gacactcatgagcatatctggtgat

SEQ ID NO: 139847 - DNA, 25 bp, Saccharomyces pastorianus
gaagcaatcctctaagatatatgac

SEQ ID NO: 139848 - DNA, 25 bp, Saccharomyces pastorianus
gttctatcatgtcgcttccagatgg

SEQ ID NO: 139849 - DNA, 25 bp, Saccharomyces pastorianus
gtcgcttccagatggaagatggact

SEQ ID NO: 139850 - DNA, 25 bp, Saccharomyces pastorianus
tatcatgtcgcttccagatggaaga

SEQ ID NO: 139851 - DNA, 25 bp, Saccharomyces pastorianus
atgacagttctatcatgtcgcttcc

SEQ ID NO: 139852 - DNA, 25 bp, Saccharomyces pastorianus
acagttctatcatgtcgcttccaga

SEQ ID NO: 139853 - DNA, 25 bp, Saccharomyces pastorianus
gttaagaagcaatcctctaagatat

SEQ ID NO: 139854 - DNA, 25 bp, Saccharomyces pastorianus
gcaatcctctaagatatatgacagt

SEQ ID NO: 139855 - DNA, 25 bp, Saccharomyces pastorianus
gacgaagttaagaagcaatcctcta

SEQ ID NO: 139856 - DNA, 25 bp, Saccharomyces pastorianus
agttctatcatgtcgcttccagatg

SEQ ID NO: 139857 - DNA, 25 bp, Saccharomyces pastorianus
tctatcatgtcgcttccagatggaa

SEQ ID NO: 139858 - DNA, 25 bp, Saccharomyces pastorianus
tgcatcatatgaacggaaccctaag

SEQ ID NO: 139859 - DNA, 25 bp, Saccharomyces pastorianus
agtggtgtttcgttctggaccaacg

SEQ ID NO: 139860 - DNA, 25 bp, Saccharomyces pastorianus
gtctcctggtgctgtcattattttc

SEQ ID NO: 139861 - DNA, 25 bp, Saccharomyces pastorianus
gctgttgcgtggttttttgtatact

SEQ ID NO: 139862 - DNA, 25 bp, Saccharomyces pastorianus
gacatcgtggctattatgccctaaa

SEQ ID NO: 139863 - DNA, 25 bp, Saccharomyces pastorianus
atgtcagcttgtcaccatcggaagt

SEQ ID NO: 139864 - DNA, 25 bp, Saccharomyces pastorianus
tataccgtcttcttggtgtgtgtct

SEQ ID NO: 139865 - DNA, 25 bp, Saccharomyces pastorianus
gggtggtggttccaagtcatatcat

SEQ ID NO: 139866 - DNA, 25 bp, Saccharomyces pastorianus
atcgtggccgatttaattactagac

SEQ ID NO: 139867 - DNA, 25 bp, Saccharomyces pastorianus
cattggctgtttttgttggcattat

SEQ ID NO: 139868 - DNA, 25 bp, Saccharomyces pastorianus
ttaatcgcgtgcttattctcaggag

SEQ ID NO: 139869 - DNA, 25 bp, Saccharomyces pastorianus
gactctcccttaagtgttgactcta

SEQ ID NO: 139870 - DNA, 25 bp, Saccharomyces pastorianus
tgttaccaccccatggcagtgatgt

SEQ ID NO: 139871 - DNA, 25 bp, Saccharomyces pastorianus
gatactgacgcattcttacattctc

SEQ ID NO: 139872 - DNA, 25 bp, Saccharomyces pastorianus
atctcatccgctggtcaacaagtta

SEQ ID NO: 139873 - DNA, 25 bp, Saccharomyces pastorianus
tcttacattctcacttggcacgtta

SEQ ID NO: 139874 - DNA, 25 bp, Saccharomyces pastorianus
tggcacgttacccacaacggtatga

SEQ ID NO: 139875 - DNA, 25 bp, Saccharomyces pastorianus
atacctccgtagctttgtggactca

SEQ ID NO: 139876 - DNA, 25 bp, Saccharomyces pastorianus
aagttactggttacacgcatcctga

SEQ ID NO: 139877 - DNA, 25 bp, Saccharomyces pastorianus
ggcgacgcatttatgtctgctgaat

SEQ ID NO: 139878 - DNA, 25 bp, Saccharomyces pastorianus
ttgagacatgtagccaccgatacct

SEQ ID NO: 139879 - DNA, 25 bp, Saccharomyces pastorianus
gaatacttcaggtcctggcgacgca

SEQ ID NO: 139880 - DNA, 25 bp, Saccharomyces pastorianus
gatttcatcaagttcgatgccggta

SEQ ID NO: 139881 - DNA, 25 bp, Saccharomyces pastorianus
tcgatgccggtaagttggtttacgt

SEQ ID NO: 139882 - DNA, 25 bp, Saccharomyces pastorianus
atcaagttcgatgccggtaagttgg

SEQ ID NO: 139883 - DNA, 25 bp, Saccharomyces pastorianus
ctgtccaccgtatcaccgatgaaga

SEQ ID NO: 139884 - DNA, 25 bp, Saccharomyces pastorianus
gtcaagggtagattcgctgtccacc

SEQ ID NO: 139885 - DNA, 25 bp, Saccharomyces pastorianus
caagggtagattcgctgtccaccgt

SEQ ID NO: 139886 - DNA, 25 bp, Saccharomyces pastorianus
agggtagattcgctgtccaccgtat

SEQ ID NO: 139887 - DNA, 25 bp, Saccharomyces pastorianus
gtagattcgctgtccaccgtatcac

SEQ ID NO: 139888 - DNA, 25 bp, Saccharomyces pastorianus
gatgtcaagggtagattcgctgtcc

SEQ ID NO: 139889 - DNA, 25 bp, Saccharomyces pastorianus
gattactgatttcatcaagttcgat

SEQ ID NO: 139890 - DNA, 25 bp, Saccharomyces pastorianus
ggcctctggtaagattactgatttc

SEQ ID NO: 139891 - DNA, 25 bp, Saccharomyces pastorianus
ggagataccccgttctgttgaaaga

SEQ ID NO: 139892 - DNA, 25 bp, Saccharomyces pastorianus
gtgtcattggccctcatggtataaa

SEQ ID NO: 139893 - DNA, 25 bp, Saccharomyces pastorianus
aggctgtaacagcatctatattatc

SEQ ID NO: 139894 - DNA, 25 bp, Saccharomyces pastorianus
atcagaacgtcgtgtcattggccct

SEQ ID NO: 139895 - DNA, 25 bp, Saccharomyces pastorianus
ggtaagacatagcacaggcgcatta

SEQ ID NO: 139896 - DNA, 25 bp, Saccharomyces pastorianus
agagttctcgatcagaagaggttca

SEQ ID NO: 139897 - DNA, 25 bp, Saccharomyces pastorianus
ggatgttcaatttcggaaggctgta

SEQ ID NO: 139898 - DNA, 25 bp, Saccharomyces pastorianus
tcgattcatcattaaaacccctggt

SEQ ID NO: 139899 - DNA, 25 bp, Saccharomyces pastorianus
ggcgcattaatcaatgtcggcggta

SEQ ID NO: 139900 - DNA, 25 bp, Saccharomyces pastorianus
tcaacccggtgatcgattcatcatt

SEQ ID NO: 139901 - DNA, 25 bp, Saccharomyces pastorianus
atacgatttacgctcaacccggtga

SEQ ID NO: 139902 - DNA, 25 bp, Saccharomyces pastorianus
ttttaatttcgatggcacttctccc

SEQ ID NO: 139903 - DNA, 25 bp, Saccharomyces pastorianus
tacccaggctgctcaggttcaagaa

SEQ ID NO: 139904 - DNA, 25 bp, Saccharomyces pastorianus
tctgcgattctttattgtctacggt

SEQ ID NO: 139905 - DNA, 25 bp, Saccharomyces pastorianus
tggcacaacgaagttttctggcgaa

SEQ ID NO: 139906 - DNA, 25 bp, Saccharomyces pastorianus
gaggctattactaattctgcgattc

SEQ ID NO: 139907 - DNA, 25 bp, Saccharomyces pastorianus
gcgcaagtcgcagctaacacaaaag

SEQ ID NO: 139908 - DNA, 25 bp, Saccharomyces pastorianus
ataaaaattcctgctggttccctct

SEQ ID NO: 139909 - DNA, 25 bp, Saccharomyces pastorianus
gcacttctccccaagtttatggtaa

SEQ ID NO: 139910 - DNA, 25 bp, Saccharomyces pastorianus
ctgctgttgtcggaggcaatgtatt

SEQ ID NO: 139911 - DNA, 25 bp, Saccharomyces pastorianus
gaagatccaggcaaatacccaggct

SEQ ID NO: 139912 - DNA, 25 bp, Saccharomyces pastorianus
tacaagcttttcgtagaagatccag

SEQ ID NO: 139913 - DNA, 25 bp, Saccharomyces pastorianus
atgattctcgaagtttgcgcagatg

SEQ ID NO: 139914 - DNA, 25 bp, Saccharomyces pastorianus
agtttgcgcagatgacaaggaagga

SEQ ID NO: 139915 - DNA, 25 bp, Saccharomyces pastorianus
aagtttgcgcagatgacaaggaagg

SEQ ID NO: 139916 - DNA, 25 bp, Saccharomyces pastorianus
gaagtttgcgcagatgacaaggaag

SEQ ID NO: 139917 - DNA, 25 bp, Saccharomyces pastorianus
tgattctcgaagtttgcgcagatga

SEQ ID NO: 139918 - DNA, 25 bp, Saccharomyces pastorianus
gattctcgaagtttgcgcagatgac

SEQ ID NO: 139919 - DNA, 25 bp, Saccharomyces pastorianus
tcgaagtttgcgcagatgacaagga

SEQ ID NO: 139920 - DNA, 25 bp, Saccharomyces pastorianus
attctcgaagtttgcgcagatgaca

SEQ ID NO: 139921 - DNA, 25 bp, Saccharomyces pastorianus
ttctcgaagtttgcgcagatgacaa

SEQ ID NO: 139922 - DNA, 25 bp, Saccharomyces pastorianus
cgaagtttgcgcagatgacaaggaa

SEQ ID NO: 139923 - DNA, 25 bp, Saccharomyces pastorianus
tttgcgcagatgacaaggaaggaga

SEQ ID NO: 139924 - DNA, 25 bp, Saccharomyces pastorianus
gtaactcgattgcagttcttaaaga

SEQ ID NO: 139925 - DNA, 25 bp, Saccharomyces pastorianus
gttataacgcatagtgaacaaatga

SEQ ID NO: 139926 - DNA, 25 bp, Saccharomyces pastorianus
acaaatgatgaggtcttgtaactcg

SEQ ID NO: 139927 - DNA, 25 bp, Saccharomyces pastorianus
ggttgagcgaggtaacttcgacact

SEQ ID NO: 139928 - DNA, 25 bp, Saccharomyces pastorianus
cgacactttatataataatcgcggg

SEQ ID NO: 139929 - DNA, 25 bp, Saccharomyces pastorianus
taaagatggtaaagtggttgagcga

SEQ ID NO: 139930 - DNA, 25 bp, Saccharomyces pastorianus
gcgaggtaacttcgacactttatat

SEQ ID NO: 139931 - DNA, 25 bp, Saccharomyces pastorianus
ggtaacttcgacactttatataata

SEQ ID NO: 139932 - DNA, 25 bp, Saccharomyces pastorianus
gatgaggtcttgtaactcgattgca

SEQ ID NO: 139933 - DNA, 25 bp, Saccharomyces pastorianus
ctcgattgcagttcttaaagatggt

SEQ ID NO: 139934 - DNA, 25 bp, Saccharomyces pastorianus
ggtcttgtaactcgattgcagttct

SEQ ID NO: 139935 - DNA, 25 bp, Saccharomyces pastorianus
atactgccaaaacctgacatttatt

SEQ ID NO: 139936 - DNA, 25 bp, Saccharomyces pastorianus
ctaagttaagctcccctgcaaagga

SEQ ID NO: 139937 - DNA, 25 bp, Saccharomyces pastorianus
tatactcctgctaatactgttgaag

SEQ ID NO: 139938 - DNA, 25 bp, Saccharomyces pastorianus
ttgcgccaactttatccgacgttaa

SEQ ID NO: 139939 - DNA, 25 bp, Saccharomyces pastorianus
atatggtttagacctttttgcgcca

SEQ ID NO: 139940 - DNA, 25 bp, Saccharomyces pastorianus
taaggaccctattattgtatacgag

SEQ ID NO: 139941 - DNA, 25 bp, Saccharomyces pastorianus
tgcaaaggacccatttctttttggt

SEQ ID NO: 139942 - DNA, 25 bp, Saccharomyces pastorianus
tgcgcattaatgttgctcctaagtt

SEQ ID NO: 139943 - DNA, 25 bp, Saccharomyces pastorianus
gaaactggaacaactctagatgata

SEQ ID NO: 139944 - DNA, 25 bp, Saccharomyces pastorianus
atacgaggactatgcttatgccaag

SEQ ID NO: 139945 - DNA, 25 bp, Saccharomyces pastorianus
ctttagtagcaactcctttttggat

SEQ ID NO: 139946 - DNA, 25 bp, Saccharomyces pastorianus
atttagtcgcacatcctaaggaaga

SEQ ID NO: 139947 - DNA, 25 bp, Saccharomyces pastorianus
gcaactggacacttacattagcaaa

SEQ ID NO: 139948 - DNA, 25 bp, Saccharomyces pastorianus
ctgtcagaccagcatacacactatt

SEQ ID NO: 139949 - DNA, 25 bp, Saccharomyces pastorianus
aaaggtctagtgttggccagtttat

SEQ ID NO: 139950 - DNA, 25 bp, Saccharomyces pastorianus
ttttttgctgaaacggtcgcttcta

SEQ ID NO: 139951 - DNA, 25 bp, Saccharomyces pastorianus
aagatccttcacaggctgacgctat

SEQ ID NO: 139952 - DNA, 25 bp, Saccharomyces pastorianus
tacatcggtgtatttcgctctggag

SEQ ID NO: 139953 - DNA, 25 bp, Saccharomyces pastorianus
aatcggagtcattaacggcaagttc

SEQ ID NO: 139954 - DNA, 25 bp, Saccharomyces pastorianus
gacttgtcacaatttggtttctttg

SEQ ID NO: 139955 - DNA, 25 bp, Saccharomyces pastorianus
acggtcgcttctagaactggtgcag

SEQ ID NO: 139956 - DNA, 25 bp, Saccharomyces pastorianus
tattggccacgtttatgccaggagt

SEQ ID NO: 139957 - DNA, 25 bp, Saccharomyces pastorianus
gatagctcagggtctattgataaaa

SEQ ID NO: 139958 - DNA, 25 bp, Saccharomyces pastorianus
tggcgtttcgtcaaaccctcttgct

SEQ ID NO: 139959 - DNA, 25 bp, Saccharomyces pastorianus
gattatccattttcagtgggcgtgg

SEQ ID NO: 139960 - DNA, 25 bp, Saccharomyces pastorianus
aaccctcttgctggacgtataatgg

SEQ ID NO: 139961 - DNA, 25 bp, Saccharomyces pastorianus
agagttcatcacaggattatccatt

SEQ ID NO: 139962 - DNA, 25 bp, Saccharomyces pastorianus
gatagcgacggcgacggacgtttaa

SEQ ID NO: 139963 - DNA, 25 bp, Saccharomyces pastorianus
tctacgacattgacaaggacggttt

SEQ ID NO: 139964 - DNA, 25 bp, Saccharomyces pastorianus
atttatgagcattcctggcgtttcg

SEQ ID NO: 139965 - DNA, 25 bp, Saccharomyces pastorianus
gattcgccttcaaaatctacgacat

SEQ ID NO: 139966 - DNA, 25 bp, Saccharomyces pastorianus
aggacggtttcatatccaatggtga

SEQ ID NO: 139967 - DNA, 25 bp, Saccharomyces pastorianus
gggacgtggattttcaagagttcat

SEQ ID NO: 139968 - DNA, 25 bp, Saccharomyces pastorianus
gtaagagattaccactgttttccca

SEQ ID NO: 139969 - DNA, 25 bp, Saccharomyces pastorianus
taaacccaagtttgctgtgctcgac

SEQ ID NO: 139970 - DNA, 25 bp, Saccharomyces pastorianus
tttgctgtgctcgacgaatgtacat

SEQ ID NO: 139971 - DNA, 25 bp, Saccharomyces pastorianus
ttttcccaaccatctagttcagcat

SEQ ID NO: 139972 - DNA, 25 bp, Saccharomyces pastorianus
cttcttgaactaaatgccatcttgg

SEQ ID NO: 139973 - DNA, 25 bp, Saccharomyces pastorianus
gcgaatcacatcacctacagggcag

SEQ ID NO: 139974 - DNA, 25 bp, Saccharomyces pastorianus
attggtgtccaacaaaggttagcta

SEQ ID NO: 139975 - DNA, 25 bp, Saccharomyces pastorianus
gaatgtacatctgcagtagccccag

SEQ ID NO: 139976 - DNA, 25 bp, Saccharomyces pastorianus
gtatctcgttaatatcagtttgcca

SEQ ID NO: 139977 - DNA, 25 bp, Saccharomyces pastorianus
aacaggtgccactttgggagcggaa

SEQ ID NO: 139978 - DNA, 25 bp, Saccharomyces pastorianus
atcagtttgccacaggacaagttta

SEQ ID NO: 139979 - DNA, 25 bp, Saccharomyces pastorianus
gttggttcagatctttacactcgaa

SEQ ID NO: 139980 - DNA, 25 bp, Saccharomyces pastorianus
tctacgcctccaattcattactaaa

SEQ ID NO: 139981 - DNA, 25 bp, Saccharomyces pastorianus
gacaaaactttgtgctgtcactatt

SEQ ID NO: 139982 - DNA, 25 bp, Saccharomyces pastorianus
aaggaactttggcactgggcttaat

SEQ ID NO: 139983 - DNA, 25 bp, Saccharomyces pastorianus
cgtagcttctgctgaatctgtttca

SEQ ID NO: 139984 - DNA, 25 bp, Saccharomyces pastorianus
gctggatttgatcctctgttcattc

SEQ ID NO: 139985 - DNA, 25 bp, Saccharomyces pastorianus
ggttaactatggcaagcgcatcttt

SEQ ID NO: 139986 - DNA, 25 bp, Saccharomyces pastorianus
tgggcttaattgtctacgcctccaa

SEQ ID NO: 139987 - DNA, 25 bp, Saccharomyces pastorianus
tgatgttgctactgcatttgtcatt

SEQ ID NO: 139988 - DNA, 25 bp, Saccharomyces pastorianus
aagtttcagactttctactctcaaa

SEQ ID NO: 139989 - DNA, 25 bp, Saccharomyces pastorianus
atcaccatactttctattccgtagc

SEQ ID NO: 139990 - DNA, 25 bp, Saccharomyces pastorianus
gtgcgtgtcgtgtcattcgagtgat

SEQ ID NO: 139991 - DNA, 25 bp, Saccharomyces pastorianus
tgaagggtaccgttgcttattttgt

SEQ ID NO: 139992 - DNA, 25 bp, Saccharomyces pastorianus
gctatgtaactcttgtggtcttcga

SEQ ID NO: 139993 - DNA, 25 bp, Saccharomyces pastorianus
agtgattcgccctgttggaggccat

SEQ ID NO: 139994 - DNA, 25 bp, Saccharomyces pastorianus
tatcatagatttgctctcgactctc

SEQ ID NO: 139995 - DNA, 25 bp, Saccharomyces pastorianus
gagatcaagatcatcctcacctgtg

SEQ ID NO: 139996 - DNA, 25 bp, Saccharomyces pastorianus
aagcccaaggtcacccaattatcat

SEQ ID NO: 139997 - DNA, 25 bp, Saccharomyces pastorianus
actcgacaacgctagttacagttct

SEQ ID NO: 139998 - DNA, 25 bp, Saccharomyces pastorianus
tacagttctgtctctgcatcttcat

SEQ ID NO: 139999 - DNA, 25 bp, Saccharomyces pastorianus
atttgtccccgaacgcaactgcgaa

SEQ ID NO: 140000 - DNA, 25 bp, Saccharomyces pastorianus
ggaggccatcgtggtcgccaagaaa

SEQ ID NO: 140001 - DNA, 25 bp, Saccharomyces pastorianus
gaagtattcgtttcattcgctcaat

SEQ ID NO: 140002 - DNA, 25 bp, Saccharomyces pastorianus
gtattcgtttcattcgctcaatgtg

SEQ ID NO: 140003 - DNA, 25 bp, Saccharomyces pastorianus
ataattcagcaagtcctaggaagta

SEQ ID NO: 140004 - DNA, 25 bp, Saccharomyces pastorianus
tctttggctaacgaaatacttggaa

SEQ ID NO: 140005 - DNA, 25 bp, Saccharomyces pastorianus
attcgctcaatgtgtcgccaattct

SEQ ID NO: 140006 - DNA, 25 bp, Saccharomyces pastorianus
tcgctcaatgtgtcgccaattcttt

SEQ ID NO: 140007 - DNA, 25 bp, Saccharomyces pastorianus
tttcattcgctcaatgtgtcgccaa

SEQ ID NO: 140008 - DNA, 25 bp, Saccharomyces pastorianus
caagtcctaggaagtattcgtttca

SEQ ID NO: 140009 - DNA, 25 bp, Saccharomyces pastorianus
aatgtgtcgccaattctttccccaa

SEQ ID NO: 140010 - DNA, 25 bp, Saccharomyces pastorianus
aattctttccccaatatctttggct

SEQ ID NO: 140011 - DNA, 25 bp, Saccharomyces pastorianus
tttccccaatatctttggctaacga

SEQ ID NO: 140012 - DNA, 25 bp, Saccharomyces pastorianus
aggttgctagattggccggaaagta

SEQ ID NO: 140013 - DNA, 25 bp, Saccharomyces pastorianus
aggttttgcttgtatcccattagtt

SEQ ID NO: 140014 - DNA, 25 bp, Saccharomyces pastorianus
ccggctggttggttgaaatcgtcaa

SEQ ID NO: 140015 - DNA, 25 bp, Saccharomyces pastorianus
agttggtatttctgttcctttccat

SEQ ID NO: 140016 - DNA, 25 bp, Saccharomyces pastorianus
gtcgctgcatcattctctcaagaag

SEQ ID NO: 140017 - DNA, 25 bp, Saccharomyces pastorianus
attaacccaggtagagtcgctgcat

SEQ ID NO: 140018 - DNA, 25 bp, Saccharomyces pastorianus
gagatcattgacgaagcttccaaga

SEQ ID NO: 140019 - DNA, 25 bp, Saccharomyces pastorianus
agagctttagacaccgttaccaatg

SEQ ID NO: 140020 - DNA, 25 bp, Saccharomyces pastorianus
ctttccattccacctacttgatgaa

SEQ ID NO: 140021 - DNA, 25 bp, Saccharomyces pastorianus
aagcctcgcccacttaaattggaga

SEQ ID NO: 140022 - DNA, 25 bp, Saccharomyces pastorianus
gagctgggcagatccaactatggta

SEQ ID NO: 140023 - DNA, 25 bp, Saccharomyces pastorianus
tacttaaccggtgaatggtccacaa

SEQ ID NO: 140024 - DNA, 25 bp, Saccharomyces pastorianus
tttggttcgagggtcatgattgcta

SEQ ID NO: 140025 - DNA, 25 bp, Saccharomyces pastorianus
tatctcaagattgaacgccgatttc

SEQ ID NO: 140026 - DNA, 25 bp, Saccharomyces pastorianus
gacgaaaccatcttcaacttaccaa

SEQ ID NO: 140027 - DNA, 25 bp, Saccharomyces pastorianus
aagttaaaacttctcctgatgctaa

SEQ ID NO: 140028 - DNA, 25 bp, Saccharomyces pastorianus
atcattctttcgaagatgctcacac

SEQ ID NO: 140029 - DNA, 25 bp, Saccharomyces pastorianus
aaaccatggtttgctaccgtcaacg

SEQ ID NO: 140030 - DNA, 25 bp, Saccharomyces pastorianus
atgacacttacccatacttaaccgg

SEQ ID NO: 140031 - DNA, 25 bp, Saccharomyces pastorianus
ctgcttgtactggtgttcctgatga

SEQ ID NO: 140032 - DNA, 25 bp, Saccharomyces pastorianus
gtcaacggtcaagcccgtgacctag

SEQ ID NO: 140033 - DNA, 25 bp, Saccharomyces pastorianus
tgacctagccacaatgacatacgaa

SEQ ID NO: 140034 - DNA, 25 bp, Saccharomyces pastorianus
agaagctgtcgccaaggctgctgaa

SEQ ID NO: 140035 - DNA, 25 bp, Saccharomyces pastorianus
aaggaagaagctgtcgccaaggctg

SEQ ID NO: 140036 - DNA, 25 bp, Saccharomyces pastorianus
gaagctgtcgccaaggctgctgaaa

SEQ ID NO: 140037 - DNA, 25 bp, Saccharomyces pastorianus
aaaggaagaagctgtcgccaaggct

SEQ ID NO: 140038 - DNA, 25 bp, Saccharomyces pastorianus
aagaagctgtcgccaaggctgctga

SEQ ID NO: 140039 - DNA, 25 bp, Saccharomyces pastorianus
agctgtcgccaaggctgctgaaaag

SEQ ID NO: 140040 - DNA, 25 bp, Saccharomyces pastorianus
gaagaagctgtcgccaaggctgctg

SEQ ID NO: 140041 - DNA, 25 bp, Saccharomyces pastorianus
aagctgtcgccaaggctgctgaaaa

SEQ ID NO: 140042 - DNA, 25 bp, Saccharomyces pastorianus
ggaagaagctgtcgccaaggctgct

SEQ ID NO: 140043 - DNA, 25 bp, Saccharomyces pastorianus
aggaagaagctgtcgccaaggctgc

SEQ ID NO: 140044 - DNA, 25 bp, Saccharomyces pastorianus
gctgtcgccaaggctgctgaaaaga

SEQ ID NO: 140045 - DNA, 25 bp, Saccharomyces pastorianus
gcgattcagaagctttacggatttt

SEQ ID NO: 140046 - DNA, 25 bp, Saccharomyces pastorianus
cgattcagaagctttacggattttt

SEQ ID NO: 140047 - DNA, 25 bp, Saccharomyces pastorianus
cgcgattcagaagctttacggattt

SEQ ID NO: 140048 - DNA, 25 bp, Saccharomyces pastorianus
tagatagtgagcttcgcgattcaga

SEQ ID NO: 140049 - DNA, 25 bp, Saccharomyces pastorianus
agatagtgagcttcgcgattcagaa

SEQ ID NO: 140050 - DNA, 25 bp, Saccharomyces pastorianus
aatagatagtgagcttcgcgattca

SEQ ID NO: 140051 - DNA, 25 bp, Saccharomyces pastorianus
ttcgcgattcagaagctttacggat

SEQ ID NO: 140052 - DNA, 25 bp, Saccharomyces pastorianus
gtgagcttcgcgattcagaagcttt

SEQ ID NO: 140053 - DNA, 25 bp, Saccharomyces pastorianus
ggaatagatagtgagcttcgcgatt

SEQ ID NO: 140054 - DNA, 25 bp, Saccharomyces pastorianus
gatagtgagcttcgcgattcagaag

SEQ ID NO: 140055 - DNA, 25 bp, Saccharomyces pastorianus
gagcttcgcgattcagaagctttac

SEQ ID NO: 140056 - DNA, 25 bp, Saccharomyces pastorianus
attagccataattcttgtccccaga

SEQ ID NO: 140057 - DNA, 25 bp, Saccharomyces pastorianus
atcctttctgcacatgttacgctgt

SEQ ID NO: 140058 - DNA, 25 bp, Saccharomyces pastorianus
gaatgcaacggtggagccatccttt

SEQ ID NO: 140059 - DNA, 25 bp, Saccharomyces pastorianus
tgtccccagaggttcaccggtattt

SEQ ID NO: 140060 - DNA, 25 bp, Saccharomyces pastorianus
gagtcaagggctttgctttctgtat

SEQ ID NO: 140061 - DNA, 25 bp, Saccharomyces pastorianus
aaaacgcaagcagtatctccgaatg

SEQ ID NO: 140062 - DNA, 25 bp, Saccharomyces pastorianus
ggctgttcccgtaatgttttgagtc

SEQ ID NO: 140063 - DNA, 25 bp, Saccharomyces pastorianus
tattctgtctccaaccattgcagga

SEQ ID NO: 140064 - DNA, 25 bp, Saccharomyces pastorianus
gttacgctgtttagaccttacgaca

SEQ ID NO: 140065 - DNA, 25 bp, Saccharomyces pastorianus
atatcaccttttttgacacggttgg

SEQ ID NO: 140066 - DNA, 25 bp, Saccharomyces pastorianus
gtatcccttgtctttcaagtgttct

SEQ ID NO: 140067 - DNA, 25 bp, Saccharomyces pastorianus
gttgccaatttttgatcctttcctg

SEQ ID NO: 140068 - DNA, 25 bp, Saccharomyces pastorianus
aatctcttttctacttcttgttcac

SEQ ID NO: 140069 - DNA, 25 bp, Saccharomyces pastorianus
ttcgcaccatcctttatcattttga

SEQ ID NO: 140070 - DNA, 25 bp, Saccharomyces pastorianus
caagtcgcattctttggaactggta

SEQ ID NO: 140071 - DNA, 25 bp, Saccharomyces pastorianus
gggttctttttacttcaagtcgcat

SEQ ID NO: 140072 - DNA, 25 bp, Saccharomyces pastorianus
ggaactggtaacgtcgcttcaatct

SEQ ID NO: 140073 - DNA, 25 bp, Saccharomyces pastorianus
gaagtactcggtcatgtgttgctaa

SEQ ID NO: 140074 - DNA, 25 bp, Saccharomyces pastorianus
ctattgtccacatgcctaggtatac

SEQ ID NO: 140075 - DNA, 25 bp, Saccharomyces pastorianus
tgatcctttcctgatgggcgcatta

SEQ ID NO: 140076 - DNA, 25 bp, Saccharomyces pastorianus
tggcgatcctatcatctttgttcat

SEQ ID NO: 140077 - DNA, 25 bp, Saccharomyces pastorianus
tcatttatttaaccttcgcaccatc

SEQ ID NO: 140078 - DNA, 25 bp, Saccharomyces pastorianus
atacttattcattcggttcacctga

SEQ ID NO: 140079 - DNA, 25 bp, Saccharomyces pastorianus
aatcccgtcctggtcatgttgctat

SEQ ID NO: 140080 - DNA, 25 bp, Saccharomyces pastorianus
ttttacgcaatcttccatcgagctg

SEQ ID NO: 140081 - DNA, 25 bp, Saccharomyces pastorianus
atctatttcatttcaccgcttgttc

SEQ ID NO: 140082 - DNA, 25 bp, Saccharomyces pastorianus
tcaaagatggcgcttctgacccaaa

SEQ ID NO: 140083 - DNA, 25 bp, Saccharomyces pastorianus
aatgaataatgccacctacggtata

SEQ ID NO: 140084 - DNA, 25 bp, Saccharomyces pastorianus
gaagtcaaaccctgtcaatttcgat

SEQ ID NO: 140085 - DNA, 25 bp, Saccharomyces pastorianus
aacccctcctgcaaagagattgttt

SEQ ID NO: 140086 - DNA, 25 bp, Saccharomyces pastorianus
aagtcactcatccagtatccggaaa

SEQ ID NO: 140087 - DNA, 25 bp, Saccharomyces pastorianus
ggtttacgtgcagataccacttttg

SEQ ID NO: 140088 - DNA, 25 bp, Saccharomyces pastorianus
gagctggatgcttttgtctttagac

SEQ ID NO: 140089 - DNA, 25 bp, Saccharomyces pastorianus
aagggatccaatgtggtgagaccat

SEQ ID NO: 140090 - DNA, 25 bp, Saccharomyces pastorianus
ctcacatttatttggtcttaaacca

SEQ ID NO: 140091 - DNA, 25 bp, Saccharomyces pastorianus
tggtgagaccatacactcctgtgag

SEQ ID NO: 140092 - DNA, 25 bp, Saccharomyces pastorianus
actcctgtgagtgatctttcccaga

SEQ ID NO: 140093 - DNA, 25 bp, Saccharomyces pastorianus
gggttggtcctagcatctgctctgt

SEQ ID NO: 140094 - DNA, 25 bp, Saccharomyces pastorianus
gaagggtcacttccagctggtcgtc

SEQ ID NO: 140095 - DNA, 25 bp, Saccharomyces pastorianus
tgtgagtgatctttcccagaagggt

SEQ ID NO: 140096 - DNA, 25 bp, Saccharomyces pastorianus
tgtcacaccaaagggatccaatgtg

SEQ ID NO: 140097 - DNA, 25 bp, Saccharomyces pastorianus
cctagcatctgctctgtttgctaaa

SEQ ID NO: 140098 - DNA, 25 bp, Saccharomyces pastorianus
ttccagctggtcgtcaagcattatg

SEQ ID NO: 140099 - DNA, 25 bp, Saccharomyces pastorianus
gaaggtggtaaaatgacctcacatt

SEQ ID NO: 140100 - DNA, 25 bp, Saccharomyces pastorianus
gttccatttatttcaagcccgactc

SEQ ID NO: 140101 - DNA, 25 bp, Saccharomyces pastorianus
gagctgaaactaggtggcgactcaa

SEQ ID NO: 140102 - DNA, 25 bp, Saccharomyces pastorianus
gctaacgatgatgtgctattggatt

SEQ ID NO: 140103 - DNA, 25 bp, Saccharomyces pastorianus
aagtaaacttccaatgatctccaat

SEQ ID NO: 140104 - DNA, 25 bp, Saccharomyces pastorianus
gatttatttgatttcggaccatctg

SEQ ID NO: 140105 - DNA, 25 bp, Saccharomyces pastorianus
ggagatgcctttcgatgccaaataa

SEQ ID NO: 140106 - DNA, 25 bp, Saccharomyces pastorianus
gataccaaggctgtacaagggttga

SEQ ID NO: 140107 - DNA, 25 bp, Saccharomyces pastorianus
gcgactcaaacggtatatcttctgg

SEQ ID NO: 140108 - DNA, 25 bp, Saccharomyces pastorianus
ggaccatctgaggatgccacacaaa

SEQ ID NO: 140109 - DNA, 25 bp, Saccharomyces pastorianus
gaatacttcaacaactttaggcgat

SEQ ID NO: 140110 - DNA, 25 bp, Saccharomyces pastorianus
acaatcccgatgtttcgggcggcaa

SEQ ID NO: 140111 - DNA, 25 bp, Saccharomyces pastorianus
gacattgccccggaaacgataagat

SEQ ID NO: 140112 - DNA, 25 bp, Saccharomyces pastorianus
gaagatcgatatccttgtaagacta

SEQ ID NO: 140113 - DNA, 25 bp, Saccharomyces pastorianus
gaatcattcgtcagtaaagtcttgg

SEQ ID NO: 140114 - DNA, 25 bp, Saccharomyces pastorianus
ggtcaaatccagaggtgttattaca

SEQ ID NO: 140115 - DNA, 25 bp, Saccharomyces pastorianus
gtaagactagtcgatccttccaact

SEQ ID NO: 140116 - DNA, 25 bp, Saccharomyces pastorianus
gtctggttgctaggacagcatccca

SEQ ID NO: 140117 - DNA, 25 bp, Saccharomyces pastorianus
agttcaacgatcctctttacgtcaa

SEQ ID NO: 140118 - DNA, 25 bp, Saccharomyces pastorianus
gtcagactacatgctactttaacgg

SEQ ID NO: 140119 - DNA, 25 bp, Saccharomyces pastorianus
attcaagctttgtcccagttgggta

SEQ ID NO: 140120 - DNA, 25 bp, Saccharomyces pastorianus
gacagcatcccaacaatttctcaga

SEQ ID NO: 140121 - DNA, 25 bp, Saccharomyces pastorianus
gtgatttattaagacattgccccgg

SEQ ID NO: 140122 - DNA, 25 bp, Saccharomyces pastorianus
acgcttgagggcatctaagaaggaa

SEQ ID NO: 140123 - DNA, 25 bp, Saccharomyces pastorianus
tggatcagagaatacttaaggcatt

SEQ ID NO: 140124 - DNA, 25 bp, Saccharomyces pastorianus
cataagggacgcttgagggcatcta

SEQ ID NO: 140125 - DNA, 25 bp, Saccharomyces pastorianus
actacggtattggtgtgataaattt

SEQ ID NO: 140126 - DNA, 25 bp, Saccharomyces pastorianus
agggacgcttgagggcatctaagaa

SEQ ID NO: 140127 - DNA, 25 bp, Saccharomyces pastorianus
attatcccttgctcactacggtatt

SEQ ID NO: 140128 - DNA, 25 bp, Saccharomyces pastorianus
atcccttgctcactacggtattggt

SEQ ID NO: 140129 - DNA, 25 bp, Saccharomyces pastorianus
ttaaggcattatcccttgctcacta

SEQ ID NO: 140130 - DNA, 25 bp, Saccharomyces pastorianus
ccttgctcactacggtattggtgtg

SEQ ID NO: 140131 - DNA, 25 bp, Saccharomyces pastorianus
aaaaggctattcgtatttcagagat

SEQ ID NO: 140132 - DNA, 25 bp, Saccharomyces pastorianus
tgaactcattgaggaagctcaacgt

SEQ ID NO: 140133 - DNA, 25 bp, Saccharomyces pastorianus
gcaacgttattgataatgcaccttt

SEQ ID NO: 140134 - DNA, 25 bp, Saccharomyces pastorianus
atgcaccttttattagctcaacgag

SEQ ID NO: 140135 - DNA, 25 bp, Saccharomyces pastorianus
ttgcccaggcagagctcggatcgat

SEQ ID NO: 140136 - DNA, 25 bp, Saccharomyces pastorianus
atactcgttactgtctcaatcggaa

SEQ ID NO: 140137 - DNA, 25 bp, Saccharomyces pastorianus
tactagcggatagtcctctggacga

SEQ ID NO: 140138 - DNA, 25 bp, Saccharomyces pastorianus
gaacctgaaagcgaacaatgcgttt

SEQ ID NO: 140139 - DNA, 25 bp, Saccharomyces pastorianus
tccaaacctgactaccaaatgcatt

SEQ ID NO: 140140 - DNA, 25 bp, Saccharomyces pastorianus
gatgctacagctttatatggagaca

SEQ ID NO: 140141 - DNA, 25 bp, Saccharomyces pastorianus
gaagaatttcaagggtctaccattt

SEQ ID NO: 140142 - DNA, 25 bp, Saccharomyces pastorianus
gaatttttggagaactcaccggagt

SEQ ID NO: 140143 - DNA, 25 bp, Saccharomyces pastorianus
tggacgacatcttgcttgcccaggc

SEQ ID NO: 140144 - DNA, 25 bp, Saccharomyces pastorianus
agctgcgtggcactccattttagat

SEQ ID NO: 140145 - DNA, 25 bp, Saccharomyces pastorianus
gaagaatttgatgttgtcgctacta

SEQ ID NO: 140146 - DNA, 25 bp, Saccharomyces pastorianus
gctgagcgccttggacgaagaattt

SEQ ID NO: 140147 - DNA, 25 bp, Saccharomyces pastorianus
gaagttgtccaatttgccattaaat

SEQ ID NO: 140148 - DNA, 25 bp, Saccharomyces pastorianus
gattgagtctttgcgtataggcagc

SEQ ID NO: 140149 - DNA, 25 bp, Saccharomyces pastorianus
attttagatggtaagctgagcgcct

SEQ ID NO: 140150 - DNA, 25 bp, Saccharomyces pastorianus
agattcttcctgtcaactccgaaga

SEQ ID NO: 140151 - DNA, 25 bp, Saccharomyces pastorianus
tgcgcagatgaggacggaacgaata

SEQ ID NO: 140152 - DNA, 25 bp, Saccharomyces pastorianus
gaatttcagaccttgtcagctgcgt

SEQ ID NO: 140153 - DNA, 25 bp, Saccharomyces pastorianus
aatatcttcttgcaggagattcttc

SEQ ID NO: 140154 - DNA, 25 bp, Saccharomyces pastorianus
taggcagcaacctgctagatttaga

SEQ ID NO: 140155 - DNA, 25 bp, Saccharomyces pastorianus
ggtaattttaccaatagcctcaatg

SEQ ID NO: 140156 - DNA, 25 bp, Saccharomyces pastorianus
caagttcatcagtcatttgcgaagg

SEQ ID NO: 140157 - DNA, 25 bp, Saccharomyces pastorianus
gtgttgaaacgtttgacttactgaa

SEQ ID NO: 140158 - DNA, 25 bp, Saccharomyces pastorianus
gttgaacaaatactcgccttactct

SEQ ID NO: 140159 - DNA, 25 bp, Saccharomyces pastorianus
gtagctacgctacgattcgagagaa

SEQ ID NO: 140160 - DNA, 25 bp, Saccharomyces pastorianus
gtgtgttaagctataatgcatcaga

SEQ ID NO: 140161 - DNA, 25 bp, Saccharomyces pastorianus
gaactattatctaacgcagtcatta

SEQ ID NO: 140162 - DNA, 25 bp, Saccharomyces pastorianus
tccagaggcggattcgtttgacaag

SEQ ID NO: 140163 - DNA, 25 bp, Saccharomyces pastorianus
tattcacgtgctgaacaagttcatc

SEQ ID NO: 140164 - DNA, 25 bp, Saccharomyces pastorianus
atcaaagtcactcctggaacttgtg

SEQ ID NO: 140165 - DNA, 25 bp, Saccharomyces pastorianus
ggtatctctcatcttatattcacgt

SEQ ID NO: 140166 - DNA, 25 bp, Saccharomyces pastorianus
agcgtcgcgtactgtttcagcataa

SEQ ID NO: 140167 - DNA, 25 bp, Saccharomyces pastorianus
gtctttggccactcgacaacaattt

SEQ ID NO: 140168 - DNA, 25 bp, Saccharomyces pastorianus
gcagcatttcaagcactttgttaca

SEQ ID NO: 140169 - DNA, 25 bp, Saccharomyces pastorianus
acatcgtcttcttggtctttggcca

SEQ ID NO: 140170 - DNA, 25 bp, Saccharomyces pastorianus
ttgcccaacaagaaagcgtcgcgta

SEQ ID NO: 140171 - DNA, 25 bp, Saccharomyces pastorianus
attccgcacaagcaaataccacatc

SEQ ID NO: 140172 - DNA, 25 bp, Saccharomyces pastorianus
atcatcggcaaagctgatagcgaca

SEQ ID NO: 140173 - DNA, 25 bp, Saccharomyces pastorianus
ttgacttacagagttacttcccata

SEQ ID NO: 140174 - DNA, 25 bp, Saccharomyces pastorianus
ttgatgtttgctcgtattgcccaac

SEQ ID NO: 140175 - DNA, 25 bp, Saccharomyces pastorianus
acttcccatatgatcctttgtttct

SEQ ID NO: 140176 - DNA, 25 bp, Saccharomyces pastorianus
ggtttaaacatttctatgcagcatt

SEQ ID NO: 140177 - DNA, 25 bp, Saccharomyces pastorianus
atgcgtttgggagtgtttatggcca

SEQ ID NO: 140178 - DNA, 25 bp, Saccharomyces pastorianus
gcgcaaactagtaagcccctgtggt

SEQ ID NO: 140179 - DNA, 25 bp, Saccharomyces pastorianus
gaattgccaccaagatatgctgaca

SEQ ID NO: 140180 - DNA, 25 bp, Saccharomyces pastorianus
tatgctgacaccgataatttctttg

SEQ ID NO: 140181 - DNA, 25 bp, Saccharomyces pastorianus
aagagttcacgatccacatgatgaa

SEQ ID NO: 140182 - DNA, 25 bp, Saccharomyces pastorianus
ttggaattcctcctgcgtataatgg

SEQ ID NO: 140183 - DNA, 25 bp, Saccharomyces pastorianus
ggccaagttgggttcgtctttatag

SEQ ID NO: 140184 - DNA, 25 bp, Saccharomyces pastorianus
attacatgttaatttgggccaagtt

SEQ ID NO: 140185 - DNA, 25 bp, Saccharomyces pastorianus
aagcccctgtggtctgttgggacgt

SEQ ID NO: 140186 - DNA, 25 bp, Saccharomyces pastorianus
ggtcatcctctagaataacggcgca

SEQ ID NO: 140187 - DNA, 25 bp, Saccharomyces pastorianus
tggccaaattggaattcctcctgcg

SEQ ID NO: 140188 - DNA, 25 bp, Saccharomyces pastorianus
gcagcaattagtttggctttcttaa

SEQ ID NO: 140189 - DNA, 25 bp, Saccharomyces pastorianus
cccctatggattcagattctgcagc

SEQ ID NO: 140190 - DNA, 25 bp, Saccharomyces pastorianus
atccctggcgggtttgatgatgaga

SEQ ID NO: 140191 - DNA, 25 bp, Saccharomyces pastorianus
tgatgagatcgttcttcaggaaaga

SEQ ID NO: 140192 - DNA, 25 bp, Saccharomyces pastorianus
actctgcactctttgtttggtaaaa

SEQ ID NO: 140193 - DNA, 25 bp, Saccharomyces pastorianus
gaacgccttaggtacacgaacttca

SEQ ID NO: 140194 - DNA, 25 bp, Saccharomyces pastorianus
tggattcgagttttgcatccctggc

SEQ ID NO: 140195 - DNA, 25 bp, Saccharomyces pastorianus
gaacttcaggaactctgcactcttt

SEQ ID NO: 140196 - DNA, 25 bp, Saccharomyces pastorianus
catagtggcatcttgttggattcga

SEQ ID NO: 140197 - DNA, 25 bp, Saccharomyces pastorianus
ctcatcttggtagtaatagcggcat

SEQ ID NO: 140198 - DNA, 25 bp, Saccharomyces pastorianus
taagtctttctattacgtttgcaat

SEQ ID NO: 140199 - DNA, 25 bp, Saccharomyces pastorianus
agacaagtatattctgagatagtaa

SEQ ID NO: 140200 - DNA, 25 bp, Saccharomyces pastorianus
cttatctttttttctgtgttacaca

SEQ ID NO: 140201 - DNA, 25 bp, Saccharomyces pastorianus
tgtactggtaattttcaacgcgggt

SEQ ID NO: 140202 - DNA, 25 bp, Saccharomyces pastorianus
acatctacgcttcgaattcatccat

SEQ ID NO: 140203 - DNA, 25 bp, Saccharomyces pastorianus
tacgcttcgaattcatccataccca

SEQ ID NO: 140204 - DNA, 25 bp, Saccharomyces pastorianus
ttttcaacgcgggtctgttcttatc

SEQ ID NO: 140205 - DNA, 25 bp, Saccharomyces pastorianus
ctggtaattttcaacgcgggtctgt

SEQ ID NO: 140206 - DNA, 25 bp, Saccharomyces pastorianus
caacgcgggtctgttcttatctttt

SEQ ID NO: 140207 - DNA, 25 bp, Saccharomyces pastorianus
gtaatcacatctacgcttcgaattc

SEQ ID NO: 140208 - DNA, 25 bp, Saccharomyces pastorianus
tctgtgttacacaattagacaagta

SEQ ID NO: 140209 - DNA, 25 bp, Saccharomyces pastorianus
gatagtaatcacatctacgcttcga

SEQ ID NO: 140210 - DNA, 25 bp, Saccharomyces pastorianus
gtttatagatgtttcgcgttgcgtt

SEQ ID NO: 140211 - DNA, 25 bp, Saccharomyces pastorianus
taagaaggctgagcacaccatcctc

SEQ ID NO: 140212 - DNA, 25 bp, Saccharomyces pastorianus
gaaactacttgcttggtttatagat

SEQ ID NO: 140213 - DNA, 25 bp, Saccharomyces pastorianus
gcgttacagaataaggcagcctttt

SEQ ID NO: 140214 - DNA, 25 bp, Saccharomyces pastorianus
ttcgcgttgcgttacagaataaggc

SEQ ID NO: 140215 - DNA, 25 bp, Saccharomyces pastorianus
agatgtttcgcgttgcgttacagaa

SEQ ID NO: 140216 - DNA, 25 bp, Saccharomyces pastorianus
gattttcatttttcacatactgatg

SEQ ID NO: 140217 - DNA, 25 bp, Saccharomyces pastorianus
gagcacaccatcctcttatggaacg

SEQ ID NO: 140218 - DNA, 25 bp, Saccharomyces pastorianus
aatgaactaagaaggctgagcacac

SEQ ID NO: 140219 - DNA, 25 bp, Saccharomyces pastorianus
cacatactgatggattagcagacga

SEQ ID NO: 140220 - DNA, 25 bp, Saccharomyces pastorianus
catttcatagaaactacttgcttgg

SEQ ID NO: 140221 - DNA, 25 bp, Saccharomyces pastorianus
gagtcatcaaatcctgacctgccta

SEQ ID NO: 140222 - DNA, 25 bp, Saccharomyces pastorianus
tacagccttaccattaagcgttccg

SEQ ID NO: 140223 - DNA, 25 bp, Saccharomyces pastorianus
aatcatggacttttggtttgccctc

SEQ ID NO: 140224 - DNA, 25 bp, Saccharomyces pastorianus
aagcgttccggtgactatcattgat

SEQ ID NO: 140225 - DNA, 25 bp, Saccharomyces pastorianus
agctggtacagaaggccaccggttt

SEQ ID NO: 140226 - DNA, 25 bp, Saccharomyces pastorianus
gcatgtctttgagagagccacttat

SEQ ID NO: 140227 - DNA, 25 bp, Saccharomyces pastorianus
aagtcattctactcataccacgaac

SEQ ID NO: 140228 - DNA, 25 bp, Saccharomyces pastorianus
gtggaacagccactttggagtcatc

SEQ ID NO: 140229 - DNA, 25 bp, Saccharomyces pastorianus
gcaacaacgatgattcttcccctta

SEQ ID NO: 140230 - DNA, 25 bp, Saccharomyces pastorianus
ggtttgccctctccgctgaaaagga

SEQ ID NO: 140231 - DNA, 25 bp, Saccharomyces pastorianus
agataagtcgcatgaccgtcacggt

SEQ ID NO: 140232 - DNA, 25 bp, Saccharomyces pastorianus
aaacaatcagccgttccatcaagta

SEQ ID NO: 140233 - DNA, 25 bp, Saccharomyces pastorianus
tggccctccgacgagtatttcaaaa

SEQ ID NO: 140234 - DNA, 25 bp, Saccharomyces pastorianus
tgaggctactctttcgcataatata

SEQ ID NO: 140235 - DNA, 25 bp, Saccharomyces pastorianus
atctggcaacttggcttcacacgag

SEQ ID NO: 140236 - DNA, 25 bp, Saccharomyces pastorianus
gtatatccagcttctgactcatctt

SEQ ID NO: 140237 - DNA, 25 bp, Saccharomyces pastorianus
gagttgcacctgaccttttgaaaag

SEQ ID NO: 140238 - DNA, 25 bp, Saccharomyces pastorianus
gttcagacactttcagcctagattc

SEQ ID NO: 140239 - DNA, 25 bp, Saccharomyces pastorianus
atcaagtacttcctcgtccatttat

SEQ ID NO: 140240 - DNA, 25 bp, Saccharomyces pastorianus
aaatcaccaatcgttcgtgcctaag

SEQ ID NO: 140241 - DNA, 25 bp, Saccharomyces pastorianus
cacgaggcgtccaagtgttttccaa

SEQ ID NO: 140242 - DNA, 25 bp, Saccharomyces pastorianus
ttacgtggtgctaatccttacctca

SEQ ID NO: 140243 - DNA, 25 bp, Saccharomyces pastorianus
tgctgtgctcttctcgttaaggaaa

SEQ ID NO: 140244 - DNA, 25 bp, Saccharomyces pastorianus
ttgttgtctttcctaatcctcaggt

SEQ ID NO: 140245 - DNA, 25 bp, Saccharomyces pastorianus
agtttttcgtcatctctaatcttaa

SEQ ID NO: 140246 - DNA, 25 bp, Saccharomyces pastorianus
atgccatcttaagctctgctgtgct

SEQ ID NO: 140247 - DNA, 25 bp, Saccharomyces pastorianus
ttcgctccattcaatcgcagacttt

SEQ ID NO: 140248 - DNA, 25 bp, Saccharomyces pastorianus
cttcctttctctttatagctttgcg

SEQ ID NO: 140249 - DNA, 25 bp, Saccharomyces pastorianus
gtctttcagatatcgtgtcttccac

SEQ ID NO: 140250 - DNA, 25 bp, Saccharomyces pastorianus
ctaatcttaattccttctgcttgta

SEQ ID NO: 140251 - DNA, 25 bp, Saccharomyces pastorianus
actaccgacatactttcttttcatc

SEQ ID NO: 140252 - DNA, 25 bp, Saccharomyces pastorianus
ttttaatctaccctcaaatccggct

SEQ ID NO: 140253 - DNA, 25 bp, Saccharomyces pastorianus
agactttctcttttgtgcttccttt

SEQ ID NO: 140254 - DNA, 25 bp, Saccharomyces pastorianus
agaccagttgctttgccatggttct

SEQ ID NO: 140255 - DNA, 25 bp, Saccharomyces pastorianus
gcacccattggaagctttaggaaag

SEQ ID NO: 140256 - DNA, 25 bp, Saccharomyces pastorianus
attgttggtgccgttatggtcagag

SEQ ID NO: 140257 - DNA, 25 bp, Saccharomyces pastorianus
aagatttcgctccagcctttgatgt

SEQ ID NO: 140258 - DNA, 25 bp, Saccharomyces pastorianus
ggctgaaaaggctctaacctacact

SEQ ID NO: 140259 - DNA, 25 bp, Saccharomyces pastorianus
tttgatgtcgctccagactgggaat

SEQ ID NO: 140260 - DNA, 25 bp, Saccharomyces pastorianus
aaccctgaagaatactccatctgga

SEQ ID NO: 140261 - DNA, 25 bp, Saccharomyces pastorianus
ggttctgggaacactacaaccctga

SEQ ID NO: 140262 - DNA, 25 bp, Saccharomyces pastorianus
catgttcggttgtttagttgtctat

SEQ ID NO: 140263 - DNA, 25 bp, Saccharomyces pastorianus
tgggataagcctgttgttgtcaatg

SEQ ID NO: 140264 - DNA, 25 bp, Saccharomyces pastorianus
gacgaacttaccttgactttcatgt

SEQ ID NO: 140265 - DNA, 25 bp, Saccharomyces pastorianus
caagaaactacgcttctgaagcttt

SEQ ID NO: 140266 - DNA, 25 bp, Saccharomyces pastorianus
tgaagcaagcccctgcatttttggg

SEQ ID NO: 140267 - DNA, 25 bp, Saccharomyces pastorianus
gaacaatctagcgagtttgcttctt

SEQ ID NO: 140268 - DNA, 25 bp, Saccharomyces pastorianus
gcccctgcatttttgggtccaaagg

SEQ ID NO: 140269 - DNA, 25 bp, Saccharomyces pastorianus
aaactagatgtcaagatcgctgatc

SEQ ID NO: 140270 - DNA, 25 bp, Saccharomyces pastorianus
gatttcttactttaaactagatgtc

SEQ ID NO: 140271 - DNA, 25 bp, Saccharomyces pastorianus
ggtccaaagggcctaaagctaactg

SEQ ID NO: 140272 - DNA, 25 bp, Saccharomyces pastorianus
tctagcgagtttgcttctttgttcc

SEQ ID NO: 140273 - DNA, 25 bp, Saccharomyces pastorianus
agatctccaagaaactacgcttctg

SEQ ID NO: 140274 - DNA, 25 bp, Saccharomyces pastorianus
aagatcgctgatctagaacaatcta

SEQ ID NO: 140275 - DNA, 25 bp, Saccharomyces pastorianus
gctaactgaagctttggctattcaa

SEQ ID NO: 140276 - DNA, 25 bp, Saccharomyces pastorianus
gagcttttaactactaacgccatct

SEQ ID NO: 140277 - DNA, 25 bp, Saccharomyces pastorianus
gaagagggtctatgagctcgtcatc

SEQ ID NO: 140278 - DNA, 25 bp, Saccharomyces pastorianus
atcaaatagcccttggtcagccaat

SEQ ID NO: 140279 - DNA, 25 bp, Saccharomyces pastorianus
gaagggattaaacctccattcgata

SEQ ID NO: 140280 - DNA, 25 bp, Saccharomyces pastorianus
ggagtcttttgtggcaagaccgttt

SEQ ID NO: 140281 - DNA, 25 bp, Saccharomyces pastorianus
gagctcgtcatcaggaaatactatg

SEQ ID NO: 140282 - DNA, 25 bp, Saccharomyces pastorianus
gtttcttctagcagtatagcaacca

SEQ ID NO: 140283 - DNA, 25 bp, Saccharomyces pastorianus
gcaaccactggatcacaggagtctt

SEQ ID NO: 140284 - DNA, 25 bp, Saccharomyces pastorianus
gccaatacttcctcaaaacctttag

SEQ ID NO: 140285 - DNA, 25 bp, Saccharomyces pastorianus
aataaatctacaatcccatctccta

SEQ ID NO: 140286 - DNA, 25 bp, Saccharomyces pastorianus
aagttctgtcaaagagctctctctt

SEQ ID NO: 140287 - DNA, 25 bp, Saccharomyces pastorianus
atggctgcaggaccaatttgatcgt

SEQ ID NO: 140288 - DNA, 25 bp, Saccharomyces pastorianus
gcctactaaggagcaactggcttta

SEQ ID NO: 140289 - DNA, 25 bp, Saccharomyces pastorianus
atgttgcattatctatccctactgt

SEQ ID NO: 140290 - DNA, 25 bp, Saccharomyces pastorianus
tggtggtatttttcgtcttcatgta

SEQ ID NO: 140291 - DNA, 25 bp, Saccharomyces pastorianus
aaatcacaagtacaccgaattgcca

SEQ ID NO: 140292 - DNA, 25 bp, Saccharomyces pastorianus
tatccctactgtcgtggtggtattt

SEQ ID NO: 140293 - DNA, 25 bp, Saccharomyces pastorianus
ggatcgttgtatcagttcagccaat

SEQ ID NO: 140294 - DNA, 25 bp, Saccharomyces pastorianus
gatttcgatccactacaatacggta

SEQ ID NO: 140295 - DNA, 25 bp, Saccharomyces pastorianus
gtgttttgggtaagttctcggagat

SEQ ID NO: 140296 - DNA, 25 bp, Saccharomyces pastorianus
ctggctttagacgatgcaggtataa

SEQ ID NO: 140297 - DNA, 25 bp, Saccharomyces pastorianus
gtactttttcttatatgtcaacggg

SEQ ID NO: 140298 - DNA, 25 bp, Saccharomyces pastorianus
gtatctactgatatgggccaatatg

SEQ ID NO: 140299 - DNA, 25 bp, Saccharomyces pastorianus
ggcgtaaatattatcacaccagaag

SEQ ID NO: 140300 - DNA, 25 bp, Saccharomyces pastorianus
atcagcggcgtaaatattatcacac

SEQ ID NO: 140301 - DNA, 25 bp, Saccharomyces pastorianus
agaagaaagtgcctctgcgctaatt

SEQ ID NO: 140302 - DNA, 25 bp, Saccharomyces pastorianus
gaaagtgcctctgcgctaattgatg

SEQ ID NO: 140303 - DNA, 25 bp, Saccharomyces pastorianus
ggagaatatagacatcagcggcgta

SEQ ID NO: 140304 - DNA, 25 bp, Saccharomyces pastorianus
ggcattgatcattttaaagaggaga

SEQ ID NO: 140305 - DNA, 25 bp, Saccharomyces pastorianus
gtgcctctgcgctaattgatgtctt

SEQ ID NO: 140306 - DNA, 25 bp, Saccharomyces pastorianus
ctgcgctaattgatgtcttccgaaa

SEQ ID NO: 140307 - DNA, 25 bp, Saccharomyces pastorianus
gatgtcttccgaaaaattttaccag

SEQ ID NO: 140308 - DNA, 25 bp, Saccharomyces pastorianus
gggccaatatggcattgatcatttt

SEQ ID NO: 140309 - DNA, 25 bp, Saccharomyces pastorianus
agtgaaattgccacacttccttctt

SEQ ID NO: 140310 - DNA, 25 bp, Saccharomyces pastorianus
gatgtcaaatgcttttggctcccag

SEQ ID NO: 140311 - DNA, 25 bp, Saccharomyces pastorianus
gatgttcatacggtttcagcgaaga

SEQ ID NO: 140312 - DNA, 25 bp, Saccharomyces pastorianus
attataggtacttcatcggccttgg

SEQ ID NO: 140313 - DNA, 25 bp, Saccharomyces pastorianus
tccttcttctttccgaactttatag

SEQ ID NO: 140314 - DNA, 25 bp, Saccharomyces pastorianus
gtcttgtagtatccggaagcatgcc

SEQ ID NO: 140315 - DNA, 25 bp, Saccharomyces pastorianus
atgcttttggctcccagtgaaattg

SEQ ID NO: 140316 - DNA, 25 bp, Saccharomyces pastorianus
aatcgcggaacgtacgatgttcata

SEQ ID NO: 140317 - DNA, 25 bp, Saccharomyces pastorianus
gaagcatgcctaccggcattattat

SEQ ID NO: 140318 - DNA, 25 bp, Saccharomyces pastorianus
acttcatcggccttggactatgtag

SEQ ID NO: 140319 - DNA, 25 bp, Saccharomyces pastorianus
gcaaaggtctgttacaatcgcggaa

SEQ ID NO: 140320 - DNA, 25 bp, Saccharomyces pastorianus
atgaattttttagaaggagcacgat

SEQ ID NO: 140321 - DNA, 25 bp, Saccharomyces pastorianus
acatcatgttccctcactagctaat

SEQ ID NO: 140322 - DNA, 25 bp, Saccharomyces pastorianus
tcatgttccctcactagctaataat

SEQ ID NO: 140323 - DNA, 25 bp, Saccharomyces pastorianus
atgttccctcactagctaataatat

SEQ ID NO: 140324 - DNA, 25 bp, Saccharomyces pastorianus
gctttgggcagctcacatcatgttc

SEQ ID NO: 140325 - DNA, 25 bp, Saccharomyces pastorianus
atcatgttccctcactagctaataa

SEQ ID NO: 140326 - DNA, 25 bp, Saccharomyces pastorianus
attttttagaaggagcacgattata

SEQ ID NO: 140327 - DNA, 25 bp, Saccharomyces pastorianus
gggcagctcacatcatgttccctca

SEQ ID NO: 140328 - DNA, 25 bp, Saccharomyces pastorianus
ttgggcagctcacatcatgttccct

SEQ ID NO: 140329 - DNA, 25 bp, Saccharomyces pastorianus
tagaaggagcacgattatataaaaa

SEQ ID NO: 140330 - DNA, 25 bp, Saccharomyces pastorianus
tgttccctcactagctaataatata

SEQ ID NO: 140331 - DNA, 25 bp, Saccharomyces pastorianus
tgaagacgttttgccttcggacgat

SEQ ID NO: 140332 - DNA, 25 bp, Saccharomyces pastorianus
gatacagacaatcccgctatttcaa

SEQ ID NO: 140333 - DNA, 25 bp, Saccharomyces pastorianus
gttttcgtcgtcttcatgttcctat

SEQ ID NO: 140334 - DNA, 25 bp, Saccharomyces pastorianus
cttttattctgttccatcttctcaa

SEQ ID NO: 140335 - DNA, 25 bp, Saccharomyces pastorianus
aacgccggcgtgattgccacagaaa

SEQ ID NO: 140336 - DNA, 25 bp, Saccharomyces pastorianus
tatttatgattctttccgccgactt

SEQ ID NO: 140337 - DNA, 25 bp, Saccharomyces pastorianus
aacactgtggatgagctgccttggt

SEQ ID NO: 140338 - DNA, 25 bp, Saccharomyces pastorianus
aactctcgcagttgtatgggccatt

SEQ ID NO: 140339 - DNA, 25 bp, Saccharomyces pastorianus
tgtaccatcgcgttcacattgctat

SEQ ID NO: 140340 - DNA, 25 bp, Saccharomyces pastorianus
acattgctatggtctctgttttcgt

SEQ ID NO: 140341 - DNA, 25 bp, Saccharomyces pastorianus
gggccatttgttttggtgctatcaa

SEQ ID NO: 140342 - DNA, 25 bp, Saccharomyces pastorianus
ggagcaattccctgtgtacatttca

SEQ ID NO: 140343 - DNA, 25 bp, Saccharomyces pastorianus
atatattggttcatgcactcggagc

SEQ ID NO: 140344 - DNA, 25 bp, Saccharomyces pastorianus
tggtatgctgatagccatgcttatt

SEQ ID NO: 140345 - DNA, 25 bp, Saccharomyces pastorianus
agtcaaggccatcccatatattggt

SEQ ID NO: 140346 - DNA, 25 bp, Saccharomyces pastorianus
gccactaatttaaggccactgttta

SEQ ID NO: 140347 - DNA, 25 bp, Saccharomyces pastorianus
aaaagacccttctatctctgattcc

SEQ ID NO: 140348 - DNA, 25 bp, Saccharomyces pastorianus
gtacatttcagatataggtgccact

SEQ ID NO: 140349 - DNA, 25 bp, Saccharomyces pastorianus
gctatgtaatcactgttgcccttga

SEQ ID NO: 140350 - DNA, 25 bp, Saccharomyces pastorianus
gttttttcaaagatccggctatctg

SEQ ID NO: 140351 - DNA, 25 bp, Saccharomyces pastorianus
ggctatctgcctttccaactgaaaa

SEQ ID NO: 140352 - DNA, 25 bp, Saccharomyces pastorianus
catgcttatttgctgggccagtcaa

SEQ ID NO: 140353 - DNA, 25 bp, Saccharomyces pastorianus
cggatgcttgcttggagtgttctaa

SEQ ID NO: 140354 - DNA, 25 bp, Saccharomyces pastorianus
gtaccaaaacacagagcaccggatg

SEQ ID NO: 140355 - DNA, 25 bp, Saccharomyces pastorianus
agccattgaaagaaccctctcggtc

SEQ ID NO: 140356 - DNA, 25 bp, Saccharomyces pastorianus
aaagtctccaatacttcagaccaag

SEQ ID NO: 140357 - DNA, 25 bp, Saccharomyces pastorianus
cctctcggtcctcacaaattatgtt

SEQ ID NO: 140358 - DNA, 25 bp, Saccharomyces pastorianus
aatcatgctacgcatcgtcattctt

SEQ ID NO: 140359 - DNA, 25 bp, Saccharomyces pastorianus
attcttcccaatccagtcgcgatta

SEQ ID NO: 140360 - DNA, 25 bp, Saccharomyces pastorianus
gatgctacaggtaatcctcgtacaa

SEQ ID NO: 140361 - DNA, 25 bp, Saccharomyces pastorianus
accgttaaggtaaatccgtctgatg

SEQ ID NO: 140362 - DNA, 25 bp, Saccharomyces pastorianus
attactcaccctcttcggatgcttg

SEQ ID NO: 140363 - DNA, 25 bp, Saccharomyces pastorianus
taacgacaggatgtcacccttacct

SEQ ID NO: 140364 - DNA, 25 bp, Saccharomyces pastorianus
gaagcaatcagaatgaacactttgt

SEQ ID NO: 140365 - DNA, 25 bp, Saccharomyces pastorianus
gaggtaaattcattggttagactac

SEQ ID NO: 140366 - DNA, 25 bp, Saccharomyces pastorianus
atgtacacttccagagcgcagttgg

SEQ ID NO: 140367 - DNA, 25 bp, Saccharomyces pastorianus
agagatggacgaagctgttgatgaa

SEQ ID NO: 140368 - DNA, 25 bp, Saccharomyces pastorianus
ttccagagcgcagttggattctgtt

SEQ ID NO: 140369 - DNA, 25 bp, Saccharomyces pastorianus
ttggttagactacctcaattgagaa

SEQ ID NO: 140370 - DNA, 25 bp, Saccharomyces pastorianus
gccaaccgtagaattagcagccaat

SEQ ID NO: 140371 - DNA, 25 bp, Saccharomyces pastorianus
aatggctgacagtgcgggcttaatg

SEQ ID NO: 140372 - DNA, 25 bp, Saccharomyces pastorianus
gaatgttgaccaagtgccaaccgta

SEQ ID NO: 140373 - DNA, 25 bp, Saccharomyces pastorianus
aggaacttatgaaatctgggattat

SEQ ID NO: 140374 - DNA, 25 bp, Saccharomyces pastorianus
gaacactttgtcaaatcaaatggct

SEQ ID NO: 140375 - DNA, 25 bp, Saccharomyces pastorianus
aggagaatcagatcggtcctgagga

SEQ ID NO: 140376 - DNA, 25 bp, Saccharomyces pastorianus
gcaacagaggagaatcagatcggtc

SEQ ID NO: 140377 - DNA, 25 bp, Saccharomyces pastorianus
ggtcctgaggaaaaatggtcgaaat

SEQ ID NO: 140378 - DNA, 25 bp, Saccharomyces pastorianus
agaatcagatcggtcctgaggaaaa

SEQ ID NO: 140379 - DNA, 25 bp, Saccharomyces pastorianus
aatatagacaaatcgttgcgggaac

SEQ ID NO: 140380 - DNA, 25 bp, Saccharomyces pastorianus
gggccagaccctaaggagcaacaga

SEQ ID NO: 140381 - DNA, 25 bp, Saccharomyces pastorianus
cagaggagaatcagatcggtcctga

SEQ ID NO: 140382 - DNA, 25 bp, Saccharomyces pastorianus
tatagacaaatcgttgcgggaactc

SEQ ID NO: 140383 - DNA, 25 bp, Saccharomyces pastorianus
agaccctaaggagcaacagaggaga

SEQ ID NO: 140384 - DNA, 25 bp, Saccharomyces pastorianus
aatcagatcggtcctgaggaaaaat

SEQ ID NO: 140385 - DNA, 25 bp, Saccharomyces pastorianus
gccagaccctaaggagcaacagagg

SEQ ID NO: 140386 - DNA, 25 bp, Saccharomyces pastorianus
tgcagtgtccaggagtggagtcttt

SEQ ID NO: 140387 - DNA, 25 bp, Saccharomyces pastorianus
gcaacttgcttacgatgaagatgtt

SEQ ID NO: 140388 - DNA, 25 bp, Saccharomyces pastorianus
tgcccaaatttgaacttaccgaaga

SEQ ID NO: 140389 - DNA, 25 bp, Saccharomyces pastorianus
ttctctccacagatggcgagatgct

SEQ ID NO: 140390 - DNA, 25 bp, Saccharomyces pastorianus
accattccaagttagcacagcaaat

SEQ ID NO: 140391 - DNA, 25 bp, Saccharomyces pastorianus
ggtccattggaatagtatcaagcct

SEQ ID NO: 140392 - DNA, 25 bp, Saccharomyces pastorianus
aatgctttaaaatttctctccacag

SEQ ID NO: 140393 - DNA, 25 bp, Saccharomyces pastorianus
gacgcgtggctccaagagtatagtt

SEQ ID NO: 140394 - DNA, 25 bp, Saccharomyces pastorianus
tccaaagaattccatgctgtccaag

SEQ ID NO: 140395 - DNA, 25 bp, Saccharomyces pastorianus
agatgctacagacgcgtggctccaa

SEQ ID NO: 140396 - DNA, 25 bp, Saccharomyces pastorianus
agatttgttaaccaagcaacttgct

SEQ ID NO: 140397 - DNA, 25 bp, Saccharomyces pastorianus
gaactggtcaagcagatgcctacat

SEQ ID NO: 140398 - DNA, 25 bp, Saccharomyces pastorianus
agaaacgacgtcatgtggccaaagt

SEQ ID NO: 140399 - DNA, 25 bp, Saccharomyces pastorianus
aagtagttcaaatcaccagcgtgct

SEQ ID NO: 140400 - DNA, 25 bp, Saccharomyces pastorianus
agtcgctgggaaccttaacgctgca

SEQ ID NO: 140401 - DNA, 25 bp, Saccharomyces pastorianus
ttgctatcctgcacgaggtctacaa

SEQ ID NO: 140402 - DNA, 25 bp, Saccharomyces pastorianus
gcttgagaacgttgccctggaaaat

SEQ ID NO: 140403 - DNA, 25 bp, Saccharomyces pastorianus
gaggactttcgtccacgaccagaaa

SEQ ID NO: 140404 - DNA, 25 bp, Saccharomyces pastorianus
ataagcccataatgtccctgacagg

SEQ ID NO: 140405 - DNA, 25 bp, Saccharomyces pastorianus
caggacctggtcatgaagctgtcaa

SEQ ID NO: 140406 - DNA, 25 bp, Saccharomyces pastorianus
aagacactggcactatcctttcaga

SEQ ID NO: 140407 - DNA, 25 bp, Saccharomyces pastorianus
gacattgcttgatgaacgccgtact

SEQ ID NO: 140408 - DNA, 25 bp, Saccharomyces pastorianus
gttcaacagtctcccataacgaata

SEQ ID NO: 140409 - DNA, 25 bp, Saccharomyces pastorianus
atgcccgcgggtaatattggccaac

SEQ ID NO: 140410 - DNA, 25 bp, Saccharomyces pastorianus
gatacaatcaactatgcccgcgggt

SEQ ID NO: 140411 - DNA, 25 bp, Saccharomyces pastorianus
tggcattcctcctagtttccaaaat

SEQ ID NO: 140412 - DNA, 25 bp, Saccharomyces pastorianus
aaacggaagtgtcaccggctcaggc

SEQ ID NO: 140413 - DNA, 25 bp, Saccharomyces pastorianus
cagtgcctctagtagtggtggttat

SEQ ID NO: 140414 - DNA, 25 bp, Saccharomyces pastorianus
aaactctcttttactaggtggccag

SEQ ID NO: 140415 - DNA, 25 bp, Saccharomyces pastorianus
ggcaatagcggcgacaacggtataa

SEQ ID NO: 140416 - DNA, 25 bp, Saccharomyces pastorianus
gttccataccttctttgctacgaaa

SEQ ID NO: 140417 - DNA, 25 bp, Saccharomyces pastorianus
gcagttgtcttataacaccgttcaa

SEQ ID NO: 140418 - DNA, 25 bp, Saccharomyces pastorianus
aaagtgccctaccatgagtttcaac

SEQ ID NO: 140419 - DNA, 25 bp, Saccharomyces pastorianus
gccgccctcaatgaatgtttccaaa

SEQ ID NO: 140420 - DNA, 25 bp, Saccharomyces pastorianus
aacgaccttgaccagtgacttattg

SEQ ID NO: 140421 - DNA, 25 bp, Saccharomyces pastorianus
gcgtggctttgtcgccaagcaatga

SEQ ID NO: 140422 - DNA, 25 bp, Saccharomyces pastorianus
gaattgttagttcgtgttgctctga

SEQ ID NO: 140423 - DNA, 25 bp, Saccharomyces pastorianus
gccaggtggcaagtttttcgataat

SEQ ID NO: 140424 - DNA, 25 bp, Saccharomyces pastorianus
ggatttccgatcatacctttaaaca

SEQ ID NO: 140425 - DNA, 25 bp, Saccharomyces pastorianus
tgggttcactacagccagggcaagg

SEQ ID NO: 140426 - DNA, 25 bp, Saccharomyces pastorianus
tcgcctatggacagatatccgatgt

SEQ ID NO: 140427 - DNA, 25 bp, Saccharomyces pastorianus
acttcttcaactatcgcctatggac

SEQ ID NO: 140428 - DNA, 25 bp, Saccharomyces pastorianus
tgcaaagcgtttttattgccgccct

SEQ ID NO: 140429 - DNA, 25 bp, Saccharomyces pastorianus
tcgataatattgttggcgtggcttt

SEQ ID NO: 140430 - DNA, 25 bp, Saccharomyces pastorianus
gaacataccgttgattgcgcgatat

SEQ ID NO: 140431 - DNA, 25 bp, Saccharomyces pastorianus
gctggttcttgcctaagcacacaat

SEQ ID NO: 140432 - DNA, 25 bp, Saccharomyces pastorianus
aagcttgcccgttgtgtatgttttc

SEQ ID NO: 140433 - DNA, 25 bp, Saccharomyces pastorianus
tggtcacgccttgtaatcacgtatt

SEQ ID NO: 140434 - DNA, 25 bp, Saccharomyces pastorianus
tcgtcgtatttttatcattgtggct

SEQ ID NO: 140435 - DNA, 25 bp, Saccharomyces pastorianus
ttcaagcccctttcaaacgagtata

SEQ ID NO: 140436 - DNA, 25 bp, Saccharomyces pastorianus
gtatgttttcacttactcctctaat

SEQ ID NO: 140437 - DNA, 25 bp, Saccharomyces pastorianus
cgtatttcatacttcgtgtctagaa

SEQ ID NO: 140438 - DNA, 25 bp, Saccharomyces pastorianus
actcctctaatgtgttcaggcacca

SEQ ID NO: 140439 - DNA, 25 bp, Saccharomyces pastorianus
gtggatcagcactcttacatggtca

SEQ ID NO: 140440 - DNA, 25 bp, Saccharomyces pastorianus
ggccccgtcagctaaggatggtatt

SEQ ID NO: 140441 - DNA, 25 bp, Saccharomyces pastorianus
gtggccttcgtatggcgaacttcat

SEQ ID NO: 140442 - DNA, 25 bp, Saccharomyces pastorianus
gcattccatatactcgaaggctgta

SEQ ID NO: 140443 - DNA, 25 bp, Saccharomyces pastorianus
tatgagccggcaactgatttttcag

SEQ ID NO: 140444 - DNA, 25 bp, Saccharomyces pastorianus
atattcctcctgaaggtgagacgta

SEQ ID NO: 140445 - DNA, 25 bp, Saccharomyces pastorianus
gataaggatgcctgtacccagattc

SEQ ID NO: 140446 - DNA, 25 bp, Saccharomyces pastorianus
catggttttgcccaacgatgtcata

SEQ ID NO: 140447 - DNA, 25 bp, Saccharomyces pastorianus
gaatgatgacgcttccaaccttttc

SEQ ID NO: 140448 - DNA, 25 bp, Saccharomyces pastorianus
acatttcattcattgttcgcccttc

SEQ ID NO: 140449 - DNA, 25 bp, Saccharomyces pastorianus
gacgtactggtctgagtggccttcg

SEQ ID NO: 140450 - DNA, 25 bp, Saccharomyces pastorianus
agattatgatcgatggtttcccaat

SEQ ID NO: 140451 - DNA, 25 bp, Saccharomyces pastorianus
gtacccagattctatgagccggcaa

SEQ ID NO: 140452 - DNA, 25 bp, Saccharomyces pastorianus
gccctctcttagtggcgacaattcg

SEQ ID NO: 140453 - DNA, 25 bp, Saccharomyces pastorianus
gggtagcaacccaggtctcgagtcg

SEQ ID NO: 140454 - DNA, 25 bp, Saccharomyces pastorianus
tctgtgatagtggtggcacgcgata

SEQ ID NO: 140455 - DNA, 25 bp, Saccharomyces pastorianus
cttagtggcgacaattcggctagtt

SEQ ID NO: 140456 - DNA, 25 bp, Saccharomyces pastorianus
tgtccaggccgggtagcaacccagg

SEQ ID NO: 140457 - DNA, 25 bp, Saccharomyces pastorianus
tcgagtcgccctctcttagtggcga

SEQ ID NO: 140458 - DNA, 25 bp, Saccharomyces pastorianus
gcagcggagatcatcttgtctgtga

SEQ ID NO: 140459 - DNA, 25 bp, Saccharomyces pastorianus
attcggctagttggtccactgcagc

SEQ ID NO: 140460 - DNA, 25 bp, Saccharomyces pastorianus
catcttgtctgtgatagtggtggca

SEQ ID NO: 140461 - DNA, 25 bp, Saccharomyces pastorianus
tccactgcagcggagatcatcttgt

SEQ ID NO: 140462 - DNA, 25 bp, Saccharomyces pastorianus
tagttggtccactgcagcggagatc

SEQ ID NO: 140463 - DNA, 25 bp, Saccharomyces pastorianus
ggatttaactcatgtcctaagatgt

SEQ ID NO: 140464 - DNA, 25 bp, Saccharomyces pastorianus
aggaaataacccctcaatcaattga

SEQ ID NO: 140465 - DNA, 25 bp, Saccharomyces pastorianus
actgcccctaaagaatatcgattgg

SEQ ID NO: 140466 - DNA, 25 bp, Saccharomyces pastorianus
taacaacaacactgcccctaaagaa

SEQ ID NO: 140467 - DNA, 25 bp, Saccharomyces pastorianus
gtcctggaatcgtcacaaacctata

SEQ ID NO: 140468 - DNA, 25 bp, Saccharomyces pastorianus
gaatctgggactaaattccccatta

SEQ ID NO: 140469 - DNA, 25 bp, Saccharomyces pastorianus
taatgttggtaacgcccgatgagtt

SEQ ID NO: 140470 - DNA, 25 bp, Saccharomyces pastorianus
gactggtcaacaagctaaattgcat

SEQ ID NO: 140471 - DNA, 25 bp, Saccharomyces pastorianus
gagagctattatttaacctatccat

SEQ ID NO: 140472 - DNA, 25 bp, Saccharomyces pastorianus
gataagatgttcatggtcctggaat

SEQ ID NO: 140473 - DNA, 25 bp, Saccharomyces pastorianus
acatggagtctgtcttatcaagaga

SEQ ID NO: 140474 - DNA, 25 bp, Saccharomyces pastorianus
cacagtcttctacagtatcacctat

SEQ ID NO: 140475 - DNA, 25 bp, Saccharomyces pastorianus
tgcacctgaacagccatcatcattg

SEQ ID NO: 140476 - DNA, 25 bp, Saccharomyces pastorianus
atatcaataccaactaccgcttcga

SEQ ID NO: 140477 - DNA, 25 bp, Saccharomyces pastorianus
aatgcacattcttttccatttccct

SEQ ID NO: 140478 - DNA, 25 bp, Saccharomyces pastorianus
acctcctcaattcacactaatgcaa

SEQ ID NO: 140479 - DNA, 25 bp, Saccharomyces pastorianus
taagtacccacgtatttatccgcct

SEQ ID NO: 140480 - DNA, 25 bp, Saccharomyces pastorianus
taataatgtgccacctcctatgcaa

SEQ ID NO: 140481 - DNA, 25 bp, Saccharomyces pastorianus
tctgcagatcagcttttcattccaa

SEQ ID NO: 140482 - DNA, 25 bp, Saccharomyces pastorianus
ttatcgattttgcaggttttcccct

SEQ ID NO: 140483 - DNA, 25 bp, Saccharomyces pastorianus
gtatcacctatatgcacctgaacag

SEQ ID NO: 140484 - DNA, 25 bp, Saccharomyces pastorianus
caaccgccacccatagagagtagta

SEQ ID NO: 140485 - DNA, 25 bp, Saccharomyces pastorianus
gaaacagctgatataggtgaccaaa

SEQ ID NO: 140486 - DNA, 25 bp, Saccharomyces pastorianus
gttcatttctatccttgtgagaagt

SEQ ID NO: 140487 - DNA, 25 bp, Saccharomyces pastorianus
tattgggtcacacaaaccgtattaa

SEQ ID NO: 140488 - DNA, 25 bp, Saccharomyces pastorianus
agtctacgactgtggcgaaaggcta

SEQ ID NO: 140489 - DNA, 25 bp, Saccharomyces pastorianus
gacaaggagggtatcaaccccgcct

SEQ ID NO: 140490 - DNA, 25 bp, Saccharomyces pastorianus
gaatttggtacctacctagtcacca

SEQ ID NO: 140491 - DNA, 25 bp, Saccharomyces pastorianus
tacctagtcaccattggttctgatg

SEQ ID NO: 140492 - DNA, 25 bp, Saccharomyces pastorianus
ggctaaattgcttaacgctatgcga

SEQ ID NO: 140493 - DNA, 25 bp, Saccharomyces pastorianus
cgccttttctttattgggtcacaca

SEQ ID NO: 140494 - DNA, 25 bp, Saccharomyces pastorianus
gaaacacatattttaccattcgata

SEQ ID NO: 140495 - DNA, 25 bp, Saccharomyces pastorianus
ggttctgatggtaaaattgtcgtat

SEQ ID NO: 140496 - DNA, 25 bp, Saccharomyces pastorianus
ttacgcgaactaatctattttattt

SEQ ID NO: 140497 - DNA, 25 bp, Saccharomyces pastorianus
tacaacattggtactttacggaacg

SEQ ID NO: 140498 - DNA, 25 bp, Saccharomyces pastorianus
tattgtgtcgtttttcgaggttttg

SEQ ID NO: 140499 - DNA, 25 bp, Saccharomyces pastorianus
ttacaaagtccaaagggtagcagat

SEQ ID NO: 140500 - DNA, 25 bp, Saccharomyces pastorianus
gaaaaactactattaggctacaacg

SEQ ID NO: 140501 - DNA, 25 bp, Saccharomyces pastorianus
aattagcagaaacggtattgtgtcg

SEQ ID NO: 140502 - DNA, 25 bp, Saccharomyces pastorianus
ggacgatatactgtacaacattggt

SEQ ID NO: 140503 - DNA, 25 bp, Saccharomyces pastorianus
ggctacaacgagcttgtcaaatcac

SEQ ID NO: 140504 - DNA, 25 bp, Saccharomyces pastorianus
aaacttgatcaatatgccatacttg

SEQ ID NO: 140505 - DNA, 25 bp, Saccharomyces pastorianus
aaatctagactaccacaggacgata

SEQ ID NO: 140506 - DNA, 25 bp, Saccharomyces pastorianus
aatactactttgaggttagcccaag

SEQ ID NO: 140507 - DNA, 25 bp, Saccharomyces pastorianus
gggatctcccaagcttccaattggg

SEQ ID NO: 140508 - DNA, 25 bp, Saccharomyces pastorianus
tgaacgctgaacatggctatacaat

SEQ ID NO: 140509 - DNA, 25 bp, Saccharomyces pastorianus
agactggtctatggcaactttatac

SEQ ID NO: 140510 - DNA, 25 bp, Saccharomyces pastorianus
atggcctaacagcagacgagtatct

SEQ ID NO: 140511 - DNA, 25 bp, Saccharomyces pastorianus
atatccgcgtttggtaagcatgaaa

SEQ ID NO: 140512 - DNA, 25 bp, Saccharomyces pastorianus
ttgcaatttttaacgggatctccca

SEQ ID NO: 140513 - DNA, 25 bp, Saccharomyces pastorianus
gatgctaatactttttccggatgaa

SEQ ID NO: 140514 - DNA, 25 bp, Saccharomyces pastorianus
accctagaatcgttgtccttgacat

SEQ ID NO: 140515 - DNA, 25 bp, Saccharomyces pastorianus
aaatccttgaactcttctaatgttg

SEQ ID NO: 140516 - DNA, 25 bp, Saccharomyces pastorianus
gaatatatccatggcgttatcgacc

SEQ ID NO: 140517 - DNA, 25 bp, Saccharomyces pastorianus
tccttgacatttaccgttcctggaa

SEQ ID NO: 140518 - DNA, 25 bp, Saccharomyces pastorianus
aggctggtaatagcatatggagaat

SEQ ID NO: 140519 - DNA, 25 bp, Saccharomyces pastorianus
aacccgatcattaaaggctggtaat

SEQ ID NO: 140520 - DNA, 25 bp, Saccharomyces pastorianus
ggttaacccgatcattaaaggctgg

SEQ ID NO: 140521 - DNA, 25 bp, Saccharomyces pastorianus
gaatggtgggtttggcgttattaat

SEQ ID NO: 140522 - DNA, 25 bp, Saccharomyces pastorianus
gctacattcagaaacataaaccaag

SEQ ID NO: 140523 - DNA, 25 bp, Saccharomyces pastorianus
agccaataaattagctacattcaga

SEQ ID NO: 140524 - DNA, 25 bp, Saccharomyces pastorianus
gatatcaaaaattcgtcctcaaggt

SEQ ID NO: 140525 - DNA, 25 bp, Saccharomyces pastorianus
gattcattgggatcgatgtttaccg

SEQ ID NO: 140526 - DNA, 25 bp, Saccharomyces pastorianus
gggatcgatgtttaccgatatcaaa

SEQ ID NO: 140527 - DNA, 25 bp, Saccharomyces pastorianus
gacagttctgtcataaaccaaatga

SEQ ID NO: 140528 - DNA, 25 bp, Saccharomyces pastorianus
tcgtcctcaaggttaacccgatcat

SEQ ID NO: 140529 - DNA, 25 bp, Saccharomyces pastorianus
gcaccatgtacataggccttgactt

SEQ ID NO: 140530 - DNA, 25 bp, Saccharomyces pastorianus
aaagggttacgatttgccagatgaa

SEQ ID NO: 140531 - DNA, 25 bp, Saccharomyces pastorianus
aactgagacagcactgaacgccctt

SEQ ID NO: 140532 - DNA, 25 bp, Saccharomyces pastorianus
gggcagtgacgagcaacatttaaaa

SEQ ID NO: 140533 - DNA, 25 bp, Saccharomyces pastorianus
acattccctgcactgaatttgtgaa

SEQ ID NO: 140534 - DNA, 25 bp, Saccharomyces pastorianus
aaaattgcacatcctttcaccaaac

SEQ ID NO: 140535 - DNA, 25 bp, Saccharomyces pastorianus
aaagttgacattcacattccctgca

SEQ ID NO: 140536 - DNA, 25 bp, Saccharomyces pastorianus
gagatctaaatcagatgctgcttca

SEQ ID NO: 140537 - DNA, 25 bp, Saccharomyces pastorianus
attgttgtccaaccgaggatgacta

SEQ ID NO: 140538 - DNA, 25 bp, Saccharomyces pastorianus
acaaagtattcaatctagccctccg

SEQ ID NO: 140539 - DNA, 25 bp, Saccharomyces pastorianus
gaacgcccttaaactggtaacagat

SEQ ID NO: 140540 - DNA, 25 bp, Saccharomyces pastorianus
ggacctgtttccaccgtgggcgcca

SEQ ID NO: 140541 - DNA, 25 bp, Saccharomyces pastorianus
ttactggacctgtttccaccgtggg

SEQ ID NO: 140542 - DNA, 25 bp, Saccharomyces pastorianus
gcaagaaactgccaatagggtacaa

SEQ ID NO: 140543 - DNA, 25 bp, Saccharomyces pastorianus
cgtgggcgccacagcagcagaaaat

SEQ ID NO: 140544 - DNA, 25 bp, Saccharomyces pastorianus
tgttgaaaatattgcaggaattggc

SEQ ID NO: 140545 - DNA, 25 bp, Saccharomyces pastorianus
aatgatagtttaatccaagaactga

SEQ ID NO: 140546 - DNA, 25 bp, Saccharomyces pastorianus
ggaaggatcgttcgaaacagagcaa

SEQ ID NO: 140547 - DNA, 25 bp, Saccharomyces pastorianus
actgccaatagggtacaagtgttga

SEQ ID NO: 140548 - DNA, 25 bp, Saccharomyces pastorianus
ggcgccacagcagcagaaaataaat

SEQ ID NO: 140549 - DNA, 25 bp, Saccharomyces pastorianus
ggatcgttcgaaacagagcaagaaa

SEQ ID NO: 140550 - DNA, 25 bp, Saccharomyces pastorianus
tggtattactggacctgtttccacc

SEQ ID NO: 140551 - DNA, 25 bp, Saccharomyces pastorianus
aaatatccctatcgacgaggaccct

SEQ ID NO: 140552 - DNA, 25 bp, Saccharomyces pastorianus
ttggccgttcgcaatcatcctgttg

SEQ ID NO: 140553 - DNA, 25 bp, Saccharomyces pastorianus
gacgaggaccctgagaagcaaatac

SEQ ID NO: 140554 - DNA, 25 bp, Saccharomyces pastorianus
agatcaccaaagacagttagccaaa

SEQ ID NO: 140555 - DNA, 25 bp, Saccharomyces pastorianus
acaaatttttcatccccgcatttga

SEQ ID NO: 140556 - DNA, 25 bp, Saccharomyces pastorianus
aaggttacagatgcgttggccgttc

SEQ ID NO: 140557 - DNA, 25 bp, Saccharomyces pastorianus
gcaacctcgttcttcaccaaaagtt

SEQ ID NO: 140558 - DNA, 25 bp, Saccharomyces pastorianus
ggacttaaagcaacctcgttcttca

SEQ ID NO: 140559 - DNA, 25 bp, Saccharomyces pastorianus
aaaagttcggccattgagcgagcaa

SEQ ID NO: 140560 - DNA, 25 bp, Saccharomyces pastorianus
aagcctggcgaagatcttgactatt

SEQ ID NO: 140561 - DNA, 25 bp, Saccharomyces pastorianus
gcgtagaatttcatccaaagttgtt

SEQ ID NO: 140562 - DNA, 25 bp, Saccharomyces pastorianus
acagcttattgggatctaccataca

SEQ ID NO: 140563 - DNA, 25 bp, Saccharomyces pastorianus
gggtcgttattcctaaatctagatt

SEQ ID NO: 140564 - DNA, 25 bp, Saccharomyces pastorianus
ggctgcgatttgaccaggatcacct

SEQ ID NO: 140565 - DNA, 25 bp, Saccharomyces pastorianus
gattcctgaatcttcgattagagtg

SEQ ID NO: 140566 - DNA, 25 bp, Saccharomyces pastorianus
gtttttgttacaggcgcattcagaa

SEQ ID NO: 140567 - DNA, 25 bp, Saccharomyces pastorianus
taggtaattcaagtgcggccatgat

SEQ ID NO: 140568 - DNA, 25 bp, Saccharomyces pastorianus
accaggatcaccttgcctactttta

SEQ ID NO: 140569 - DNA, 25 bp, Saccharomyces pastorianus
gcgcattcagaaaaggaccccttga

SEQ ID NO: 140570 - DNA, 25 bp, Saccharomyces pastorianus
ttaaatctcctaacttccaagctga

SEQ ID NO: 140571 - DNA, 25 bp, Saccharomyces pastorianus
tctaccatacaagcagcaggcatat

SEQ ID NO: 140572 - DNA, 25 bp, Saccharomyces pastorianus
gctggcatattgctccaaaggctgt

SEQ ID NO: 140573 - DNA, 25 bp, Saccharomyces pastorianus
tgttctctacaaccttttcgcaagt

SEQ ID NO: 140574 - DNA, 25 bp, Saccharomyces pastorianus
tggtgaattcatatcggcggcatct

SEQ ID NO: 140575 - DNA, 25 bp, Saccharomyces pastorianus
ccggtcgcgggtatcttttagagat

SEQ ID NO: 140576 - DNA, 25 bp, Saccharomyces pastorianus
aagatttctgatccaggcgctgcta

SEQ ID NO: 140577 - DNA, 25 bp, Saccharomyces pastorianus
aattttggtctctttagcgctaatg

SEQ ID NO: 140578 - DNA, 25 bp, Saccharomyces pastorianus
taatgagcaggccacactgttctct

SEQ ID NO: 140579 - DNA, 25 bp, Saccharomyces pastorianus
gtaccgcaacttcgacgtttttgag

SEQ ID NO: 140580 - DNA, 25 bp, Saccharomyces pastorianus
gtgccgcacttaccagaactagatt

SEQ ID NO: 140581 - DNA, 25 bp, Saccharomyces pastorianus
gtatttctattctcttcctgtaagc

SEQ ID NO: 140582 - DNA, 25 bp, Saccharomyces pastorianus
ggattttcatattcactgccatcac

SEQ ID NO: 140583 - DNA, 25 bp, Saccharomyces pastorianus
gtagcagtacttaatccggatggat

SEQ ID NO: 140584 - DNA, 25 bp, Saccharomyces pastorianus
ttacatcaccggattcagcgaaaat

SEQ ID NO: 140585 - DNA, 25 bp, Saccharomyces pastorianus
aatgaaattttcagccagtcccagg

SEQ ID NO: 140586 - DNA, 25 bp, Saccharomyces pastorianus
atgaaattttcagccagtcccaggt

SEQ ID NO: 140587 - DNA, 25 bp, Saccharomyces pastorianus
ccggattcagcgaaaatatcaaagg

SEQ ID NO: 140588 - DNA, 25 bp, Saccharomyces pastorianus
gaagttgcactctaatatactaaat

SEQ ID NO: 140589 - DNA, 25 bp, Saccharomyces pastorianus
gttgcactctaatatactaaatgaa

SEQ ID NO: 140590 - DNA, 25 bp, Saccharomyces pastorianus
ctgcttacatcaccggattcagcga

SEQ ID NO: 140591 - DNA, 25 bp, Saccharomyces pastorianus
cttacatcaccggattcagcgaaaa

SEQ ID NO: 140592 - DNA, 25 bp, Saccharomyces pastorianus
acatcaccggattcagcgaaaatat

SEQ ID NO: 140593 - DNA, 25 bp, Saccharomyces pastorianus
ggaacagttaaagaagttgcactct

SEQ ID NO: 140594 - DNA, 25 bp, Saccharomyces pastorianus
tcaccggattcagcgaaaatatcaa

SEQ ID NO: 140595 - DNA, 25 bp, Saccharomyces pastorianus
gagacattgttgcaaacaccaacga

SEQ ID NO: 140596 - DNA, 25 bp, Saccharomyces pastorianus
gaacacgaacagaaactgctggcca

SEQ ID NO: 140597 - DNA, 25 bp, Saccharomyces pastorianus
atgggagccgtactcagctgttgta

SEQ ID NO: 140598 - DNA, 25 bp, Saccharomyces pastorianus
cgaaaggagcgcaggtgatgacaac

SEQ ID NO: 140599 - DNA, 25 bp, Saccharomyces pastorianus
gagaatgaagctttgctgagggaac

SEQ ID NO: 140600 - DNA, 25 bp, Saccharomyces pastorianus
gatgacaacctcagtgggcactcag

SEQ ID NO: 140601 - DNA, 25 bp, Saccharomyces pastorianus
ctgctggccagggaacaagagttaa

SEQ ID NO: 140602 - DNA, 25 bp, Saccharomyces pastorianus
acagcaggcaggctatggaagtcaa

SEQ ID NO: 140603 - DNA, 25 bp, Saccharomyces pastorianus
gtaattcaagggacagacctgcaag

SEQ ID NO: 140604 - DNA, 25 bp, Saccharomyces pastorianus
aatgacgaatacgatgccgaacaaa

SEQ ID NO: 140605 - DNA, 25 bp, Saccharomyces pastorianus
gctgttgtagaaaccattccggcga

SEQ ID NO: 140606 - DNA, 25 bp, Saccharomyces pastorianus
aaatggccaagcgataccgtccagt

SEQ ID NO: 140607 - DNA, 25 bp, Saccharomyces pastorianus
gatagctcttcctcagatgattcgg

SEQ ID NO: 140608 - DNA, 25 bp, Saccharomyces pastorianus
atgattcggatgatgattctgattc

SEQ ID NO: 140609 - DNA, 25 bp, Saccharomyces pastorianus
cttcttccatgtcacttgaatcttc

SEQ ID NO: 140610 - DNA, 25 bp, Saccharomyces pastorianus
tttagaaagaacaccgcagctcaag

SEQ ID NO: 140611 - DNA, 25 bp, Saccharomyces pastorianus
gaatcttcattggatagctcttcct

SEQ ID NO: 140612 - DNA, 25 bp, Saccharomyces pastorianus
agcgataccgtccagtttagaaaga

SEQ ID NO: 140613 - DNA, 25 bp, Saccharomyces pastorianus
agacaagtcatggaccagctggaaa

SEQ ID NO: 140614 - DNA, 25 bp, Saccharomyces pastorianus
aaggttaccaggtcgcattcttcac

SEQ ID NO: 140615 - DNA, 25 bp, Saccharomyces pastorianus
gcagctcaagaaagtcaaggttacc

SEQ ID NO: 140616 - DNA, 25 bp, Saccharomyces pastorianus
ttctgattcgaggaacgtgcaagtt

SEQ ID NO: 140617 - DNA, 25 bp, Saccharomyces pastorianus
aagcgcacggtctagtgagagaata

SEQ ID NO: 140618 - DNA, 25 bp, Saccharomyces pastorianus
tccactttaaggatgtcgtaactgt

SEQ ID NO: 140619 - DNA, 25 bp, Saccharomyces pastorianus
gataatgcaggaacaccgatggaca

SEQ ID NO: 140620 - DNA, 25 bp, Saccharomyces pastorianus
gtacttgggtcaactattttaacag

SEQ ID NO: 140621 - DNA, 25 bp, Saccharomyces pastorianus
ttaaactcaacatatcacctcacgg

SEQ ID NO: 140622 - DNA, 25 bp, Saccharomyces pastorianus
accgatggacaacgcgtactttcaa

SEQ ID NO: 140623 - DNA, 25 bp, Saccharomyces pastorianus
gcatcttccgccagtaaaaatgata

SEQ ID NO: 140624 - DNA, 25 bp, Saccharomyces pastorianus
gaagaacctggtaagcactcggaga

SEQ ID NO: 140625 - DNA, 25 bp, Saccharomyces pastorianus
tttcaacccgaaccccaagataatg

SEQ ID NO: 140626 - DNA, 25 bp, Saccharomyces pastorianus
ggaccaaaatagcatcttccgccag

SEQ ID NO: 140627 - DNA, 25 bp, Saccharomyces pastorianus
atcaggtagtcagacctaggaccaa

SEQ ID NO: 140628 - DNA, 25 bp, Saccharomyces pastorianus
gtgattcttgatatggccccggtaa

SEQ ID NO: 140629 - DNA, 25 bp, Saccharomyces pastorianus
aattgggcccttagtcaggcgtagc

SEQ ID NO: 140630 - DNA, 25 bp, Saccharomyces pastorianus
gagcatccttcacaaggttgtttat

SEQ ID NO: 140631 - DNA, 25 bp, Saccharomyces pastorianus
agttgtggaattcgattgtccggta

SEQ ID NO: 140632 - DNA, 25 bp, Saccharomyces pastorianus
gaacagggcctatatatttattcat

SEQ ID NO: 140633 - DNA, 25 bp, Saccharomyces pastorianus
gacagattatggaaattgggccctt

SEQ ID NO: 140634 - DNA, 25 bp, Saccharomyces pastorianus
gttgcatccattgaacagggcctat

SEQ ID NO: 140635 - DNA, 25 bp, Saccharomyces pastorianus
gaactggatccgttgcatccattga

SEQ ID NO: 140636 - DNA, 25 bp, Saccharomyces pastorianus
gattgcctagatgaactggatccgt

SEQ ID NO: 140637 - DNA, 25 bp, Saccharomyces pastorianus
tagccctgctgttttagttgtggaa

SEQ ID NO: 140638 - DNA, 25 bp, Saccharomyces pastorianus
gattgtccggtagaggattgcctag

SEQ ID NO: 140639 - DNA, 25 bp, Saccharomyces pastorianus
cgggtgatatttacattccacaacc

SEQ ID NO: 140640 - DNA, 25 bp, Saccharomyces pastorianus
acctcgggtgatatttacattccac

SEQ ID NO: 140641 - DNA, 25 bp, Saccharomyces pastorianus
ctcgggtgatatttacattccacaa

SEQ ID NO: 140642 - DNA, 25 bp, Saccharomyces pastorianus
aatacctcgggtgatatttacattc

SEQ ID NO: 140643 - DNA, 25 bp, Saccharomyces pastorianus
tatttacattccacaaccattaatg

SEQ ID NO: 140644 - DNA, 25 bp, Saccharomyces pastorianus
tacctcgggtgatatttacattcca

SEQ ID NO: 140645 - DNA, 25 bp, Saccharomyces pastorianus
gaaatacctcgggtgatatttacat

SEQ ID NO: 140646 - DNA, 25 bp, Saccharomyces pastorianus
gatatttacattccacaaccattaa

SEQ ID NO: 140647 - DNA, 25 bp, Saccharomyces pastorianus
tcgggtgatatttacattccacaac

SEQ ID NO: 140648 - DNA, 25 bp, Saccharomyces pastorianus
tgatatttacattccacaaccatta

SEQ ID NO: 140649 - DNA, 25 bp, Saccharomyces pastorianus
atacctcgggtgatatttacattcc

SEQ ID NO: 140650 - DNA, 25 bp, Saccharomyces pastorianus
tgggaactacttggcttagctctgc

SEQ ID NO: 140651 - DNA, 25 bp, Saccharomyces pastorianus
gaaattgatctcctttcggatacga

SEQ ID NO: 140652 - DNA, 25 bp, Saccharomyces pastorianus
ttaattctccttacgggcaagctgg

SEQ ID NO: 140653 - DNA, 25 bp, Saccharomyces pastorianus
gattatatgcttgaatgcctctcta

SEQ ID NO: 140654 - DNA, 25 bp, Saccharomyces pastorianus
aaaatcggaatgacgccagcctagc

SEQ ID NO: 140655 - DNA, 25 bp, Saccharomyces pastorianus
ggcaagctggcatcacttcggtgat

SEQ ID NO: 140656 - DNA, 25 bp, Saccharomyces pastorianus
gttgtcaccatctgttgaaccttta

SEQ ID NO: 140657 - DNA, 25 bp, Saccharomyces pastorianus
tctgcttcgagtgagtgacttaccc

SEQ ID NO: 140658 - DNA, 25 bp, Saccharomyces pastorianus
tagagggacagctgggctccgaaat

SEQ ID NO: 140659 - DNA, 25 bp, Saccharomyces pastorianus
ttcagatattttcccttcaagtact

SEQ ID NO: 140660 - DNA, 25 bp, Saccharomyces pastorianus
tgacttacccgatgcagtagcgtgt

SEQ ID NO: 140661 - DNA, 25 bp, Saccharomyces pastorianus
atgaactactacaaggcaccactat

SEQ ID NO: 140662 - DNA, 25 bp, Saccharomyces pastorianus
caattcgatgccctgtttagcggaa

SEQ ID NO: 140663 - DNA, 25 bp, Saccharomyces pastorianus
aagcatccaagcaaggtttctattg

SEQ ID NO: 140664 - DNA, 25 bp, Saccharomyces pastorianus
gacctattactacccgtactgtatg

SEQ ID NO: 140665 - DNA, 25 bp, Saccharomyces pastorianus
gaacactgtaccatgacatcacacg

SEQ ID NO: 140666 - DNA, 25 bp, Saccharomyces pastorianus
aaggcactgctctcaatcaattcga

SEQ ID NO: 140667 - DNA, 25 bp, Saccharomyces pastorianus
ggacgcactgtaatgcccaatgaat

SEQ ID NO: 140668 - DNA, 25 bp, Saccharomyces pastorianus
ttgccatccgatgaaccttacattt

SEQ ID NO: 140669 - DNA, 25 bp, Saccharomyces pastorianus
tctttatccatttccacattggcca

SEQ ID NO: 140670 - DNA, 25 bp, Saccharomyces pastorianus
cattggccacgaatttatcttctga

SEQ ID NO: 140671 - DNA, 25 bp, Saccharomyces pastorianus
aattaggacctatttgtggaccaca

SEQ ID NO: 140672 - DNA, 25 bp, Saccharomyces pastorianus
ggatccacggtcatttggtcatttt

SEQ ID NO: 140673 - DNA, 25 bp, Saccharomyces pastorianus
attgacccgtattccttcgaggatc

SEQ ID NO: 140674 - DNA, 25 bp, Saccharomyces pastorianus
attagtgtttcattgtcaacccgat

SEQ ID NO: 140675 - DNA, 25 bp, Saccharomyces pastorianus
gtcaacccgataatgctgtacaaaa

SEQ ID NO: 140676 - DNA, 25 bp, Saccharomyces pastorianus
gaaactcaacttcattgacccgtat

SEQ ID NO: 140677 - DNA, 25 bp, Saccharomyces pastorianus
gaagttatccggcagtttgctttat

SEQ ID NO: 140678 - DNA, 25 bp, Saccharomyces pastorianus
tatggttcactatagccttgagaaa

SEQ ID NO: 140679 - DNA, 25 bp, Saccharomyces pastorianus
tggtcattttcccaaccgaatggtt

SEQ ID NO: 140680 - DNA, 25 bp, Saccharomyces pastorianus
gaggatcctcttatttcttcgtttt

SEQ ID NO: 140681 - DNA, 25 bp, Saccharomyces pastorianus
gtttttgacaaacatacggcgcaga

SEQ ID NO: 140682 - DNA, 25 bp, Saccharomyces pastorianus
atggttcactggacgatctactttc

SEQ ID NO: 140683 - DNA, 25 bp, Saccharomyces pastorianus
atgtgtcaccgaaccactcattaga

SEQ ID NO: 140684 - DNA, 25 bp, Saccharomyces pastorianus
tggaagcggccatcgtcataaccag

SEQ ID NO: 140685 - DNA, 25 bp, Saccharomyces pastorianus
ggctctacaacaatctccatagcag

SEQ ID NO: 140686 - DNA, 25 bp, Saccharomyces pastorianus
ttcttcttctgtagcttacacccaa

SEQ ID NO: 140687 - DNA, 25 bp, Saccharomyces pastorianus
taaattctcctacaccggctggaag

SEQ ID NO: 140688 - DNA, 25 bp, Saccharomyces pastorianus
tgcattgcccaaatcctttgtagat

SEQ ID NO: 140689 - DNA, 25 bp, Saccharomyces pastorianus
ctaatgaacatgatcctcgtcgagg

SEQ ID NO: 140690 - DNA, 25 bp, Saccharomyces pastorianus
gtattgcggcaattacctgagaatg

SEQ ID NO: 140691 - DNA, 25 bp, Saccharomyces pastorianus
aggaaaatatgcaccggctctacaa

SEQ ID NO: 140692 - DNA, 25 bp, Saccharomyces pastorianus
gtacacacaaagactagcctctgat

SEQ ID NO: 140693 - DNA, 25 bp, Saccharomyces pastorianus
gaaagagcccctcaaaggcgttctt

SEQ ID NO: 140694 - DNA, 25 bp, Saccharomyces pastorianus
ctttttcagattccgctgtaccaga

SEQ ID NO: 140695 - DNA, 25 bp, Saccharomyces pastorianus
tggacccctgcgaacctagtgggaa

SEQ ID NO: 140696 - DNA, 25 bp, Saccharomyces pastorianus
aaggctgcctaatttgtcaacatta

SEQ ID NO: 140697 - DNA, 25 bp, Saccharomyces pastorianus
tattagaaccctcacctttttcaga

SEQ ID NO: 140698 - DNA, 25 bp, Saccharomyces pastorianus
acctctatcagatcaacggttcaga

SEQ ID NO: 140699 - DNA, 25 bp, Saccharomyces pastorianus
acaaaggagtgctccacgcagcggg

SEQ ID NO: 140700 - DNA, 25 bp, Saccharomyces pastorianus
ggagttggtgacagacctatacaaa

SEQ ID NO: 140701 - DNA, 25 bp, Saccharomyces pastorianus
gtgggaaaaactacctctatcagat

SEQ ID NO: 140702 - DNA, 25 bp, Saccharomyces pastorianus
accgttcccaacacaaaggagtgct

SEQ ID NO: 140703 - DNA, 25 bp, Saccharomyces pastorianus
tatagagctgacaaggctgcctaat

SEQ ID NO: 140704 - DNA, 25 bp, Saccharomyces pastorianus
gagcgggtccattaagccactgtta

SEQ ID NO: 140705 - DNA, 25 bp, Saccharomyces pastorianus
tcagctgctgctggagtggatgatt

SEQ ID NO: 140706 - DNA, 25 bp, Saccharomyces pastorianus
ctgttctctgtaatgcatgtggcct

SEQ ID NO: 140707 - DNA, 25 bp, Saccharomyces pastorianus
acacggtactgttctctgtaatgca

SEQ ID NO: 140708 - DNA, 25 bp, Saccharomyces pastorianus
cccacgtgccagaattgtttcactg

SEQ ID NO: 140709 - DNA, 25 bp, Saccharomyces pastorianus
gtgccagaattgtttcactgtcaaa

SEQ ID NO: 140710 - DNA, 25 bp, Saccharomyces pastorianus
ttgaagctgccctcgcctacacttt

SEQ ID NO: 140711 - DNA, 25 bp, Saccharomyces pastorianus
gattgtgacggagaggaccacccca

SEQ ID NO: 140712 - DNA, 25 bp, Saccharomyces pastorianus
gtcaaaacgcccctatggagaagag

SEQ ID NO: 140713 - DNA, 25 bp, Saccharomyces pastorianus
tgtaatgcatgtggcctcttcctga

SEQ ID NO: 140714 - DNA, 25 bp, Saccharomyces pastorianus
tacactttcagctgctgctggagtg

SEQ ID NO: 140715 - DNA, 25 bp, Saccharomyces pastorianus
tgcatgtggcctcttcctgaagttg

SEQ ID NO: 140716 - DNA, 25 bp, Saccharomyces pastorianus
aaaggagaagaaccgccactacaag

SEQ ID NO: 140717 - DNA, 25 bp, Saccharomyces pastorianus
agaaaaaccatctttgtcgaggact

SEQ ID NO: 140718 - DNA, 25 bp, Saccharomyces pastorianus
ggatcctctgtcatttcaaattcaa

SEQ ID NO: 140719 - DNA, 25 bp, Saccharomyces pastorianus
gataccgatcttataggatcctctg

SEQ ID NO: 140720 - DNA, 25 bp, Saccharomyces pastorianus
gatccgcaaattcaaaggctcctat

SEQ ID NO: 140721 - DNA, 25 bp, Saccharomyces pastorianus
ggacttccctactgatttaattctt

SEQ ID NO: 140722 - DNA, 25 bp, Saccharomyces pastorianus
gcaggattacgaccaattgtaccat

SEQ ID NO: 140723 - DNA, 25 bp, Saccharomyces pastorianus
gcattatcggccgtgttcaaggatg

SEQ ID NO: 140724 - DNA, 25 bp, Saccharomyces pastorianus
gaaaaaccgatcatccatgtgccca

SEQ ID NO: 140725 - DNA, 25 bp, Saccharomyces pastorianus
tcttcttctcacgacgttgctaaga

SEQ ID NO: 140726 - DNA, 25 bp, Saccharomyces pastorianus
aacaactttcctccaaattgcgctt

SEQ ID NO: 140727 - DNA, 25 bp, Saccharomyces pastorianus
agccaccaggaatttttcataatgc

SEQ ID NO: 140728 - DNA, 25 bp, Saccharomyces pastorianus
taatgccatcctgcagggagcaagc

SEQ ID NO: 140729 - DNA, 25 bp, Saccharomyces pastorianus
tttcaagccaccaggaatttttcat

SEQ ID NO: 140730 - DNA, 25 bp, Saccharomyces pastorianus
tctatttcaagccaccaggaatttt

SEQ ID NO: 140731 - DNA, 25 bp, Saccharomyces pastorianus
ttcataatgccatcctgcagggagc

SEQ ID NO: 140732 - DNA, 25 bp, Saccharomyces pastorianus
acactctatttcaagccaccaggaa

SEQ ID NO: 140733 - DNA, 25 bp, Saccharomyces pastorianus
agggcggtggactctatgtccacac

SEQ ID NO: 140734 - DNA, 25 bp, Saccharomyces pastorianus
atttttcataatgccatcctgcagg

SEQ ID NO: 140735 - DNA, 25 bp, Saccharomyces pastorianus
tatgtccacactctatttcaagcca

SEQ ID NO: 140736 - DNA, 25 bp, Saccharomyces pastorianus
ggactctatgtccacactctatttc

SEQ ID NO: 140737 - DNA, 25 bp, Saccharomyces pastorianus
aatagggcggtggactctatgtcca

SEQ ID NO: 140738 - DNA, 25 bp, Saccharomyces pastorianus
ggttgagactttcccgcgttattgc

SEQ ID NO: 140739 - DNA, 25 bp, Saccharomyces pastorianus
tttgctgctatttggtttggactgg

SEQ ID NO: 140740 - DNA, 25 bp, Saccharomyces pastorianus
gaattagcaggtccatttgtctcac

SEQ ID NO: 140741 - DNA, 25 bp, Saccharomyces pastorianus
atgatgacgacacagttccatatgt

SEQ ID NO: 140742 - DNA, 25 bp, Saccharomyces pastorianus
gacatcatggtctttgcgcacggac

SEQ ID NO: 140743 - DNA, 25 bp, Saccharomyces pastorianus
atacgctcaccacaacattgacgaa

SEQ ID NO: 140744 - DNA, 25 bp, Saccharomyces pastorianus
tgcgtgccaggcaaactgtggattt

SEQ ID NO: 140745 - DNA, 25 bp, Saccharomyces pastorianus
ggattggtgttttgtcatacgctca

SEQ ID NO: 140746 - DNA, 25 bp, Saccharomyces pastorianus
gcgttattgccagaatccagaactt

SEQ ID NO: 140747 - DNA, 25 bp, Saccharomyces pastorianus
aatccatgtttcttactggacgccg

SEQ ID NO: 140748 - DNA, 25 bp, Saccharomyces pastorianus
gcgcacggacatgcattgcgttatt

SEQ ID NO: 140749 - DNA, 25 bp, Saccharomyces pastorianus
tgactgcttgcattcaggagcctgt

SEQ ID NO: 140750 - DNA, 25 bp, Saccharomyces pastorianus
gcattcaggagcctgttccggcctg

SEQ ID NO: 140751 - DNA, 25 bp, Saccharomyces pastorianus
tccaagccgtgatcatcatcatctt

SEQ ID NO: 140752 - DNA, 25 bp, Saccharomyces pastorianus
gtgcgttgggattatgactgcttgc

SEQ ID NO: 140753 - DNA, 25 bp, Saccharomyces pastorianus
ttccggcctgccagcaaaatcgtct

SEQ ID NO: 140754 - DNA, 25 bp, Saccharomyces pastorianus
tcttcggcagattccccgtcgtcat

SEQ ID NO: 140755 - DNA, 25 bp, Saccharomyces pastorianus
acggttatgaccactcttgcgaagt

SEQ ID NO: 140756 - DNA, 25 bp, Saccharomyces pastorianus
gaatacggttatgaccactcttgcg

SEQ ID NO: 140757 - DNA, 25 bp, Saccharomyces pastorianus
aaaatcgtcttgctcttcggcagat

SEQ ID NO: 140758 - DNA, 25 bp, Saccharomyces pastorianus
gtcgtcatcctccaagccgtgatca

SEQ ID NO: 140759 - DNA, 25 bp, Saccharomyces pastorianus
accactcttgcgaagtgcgttggga

SEQ ID NO: 140760 - DNA, 25 bp, Saccharomyces pastorianus
cagcttacacacttacatgtatatg

SEQ ID NO: 140761 - DNA, 25 bp, Saccharomyces pastorianus
atatatttcagcttacacacttaca

SEQ ID NO: 140762 - DNA, 25 bp, Saccharomyces pastorianus
acatatatttcagcttacacactta

SEQ ID NO: 140763 - DNA, 25 bp, Saccharomyces pastorianus
gcttacacacttacatgtatatgca

SEQ ID NO: 140764 - DNA, 25 bp, Saccharomyces pastorianus
atttcagcttacacacttacatgta

SEQ ID NO: 140765 - DNA, 25 bp, Saccharomyces pastorianus
atatttcagcttacacacttacatg

SEQ ID NO: 140766 - DNA, 25 bp, Saccharomyces pastorianus
ttcagcttacacacttacatgtata

SEQ ID NO: 140767 - DNA, 25 bp, Saccharomyces pastorianus
tttcagcttacacacttacatgtat

SEQ ID NO: 140768 - DNA, 25 bp, Saccharomyces pastorianus
aacatatatttcagcttacacactt

SEQ ID NO: 140769 - DNA, 25 bp, Saccharomyces pastorianus
tatttcagcttacacacttacatgt

SEQ ID NO: 140770 - DNA, 25 bp, Saccharomyces pastorianus
tatatttcagcttacacacttacat

SEQ ID NO: 140771 - DNA, 25 bp, Saccharomyces pastorianus
gtgtattgtaccttcctattgtcat

SEQ ID NO: 140772 - DNA, 25 bp, Saccharomyces pastorianus
actgtctaatacgattgagcctgca

SEQ ID NO: 140773 - DNA, 25 bp, Saccharomyces pastorianus
aagtggtcgctaaactttgtgcgca

SEQ ID NO: 140774 - DNA, 25 bp, Saccharomyces pastorianus
tttcatgccttgatcactgccagga

SEQ ID NO: 140775 - DNA, 25 bp, Saccharomyces pastorianus
gattcactcagttcatggcttcaat

SEQ ID NO: 140776 - DNA, 25 bp, Saccharomyces pastorianus
gcgactttcaatttgcctcagtgta

SEQ ID NO: 140777 - DNA, 25 bp, Saccharomyces pastorianus
gattggttcctcatgggttttccaa

SEQ ID NO: 140778 - DNA, 25 bp, Saccharomyces pastorianus
gattacgaacgtcttcaggctaaag

SEQ ID NO: 140779 - DNA, 25 bp, Saccharomyces pastorianus
gtattctgcggctcggacaatttgc

SEQ ID NO: 140780 - DNA, 25 bp, Saccharomyces pastorianus
aaggcttactgccatactgtctaat

SEQ ID NO: 140781 - DNA, 25 bp, Saccharomyces pastorianus
gtattagccaccaattctaccaaca

SEQ ID NO: 140782 - DNA, 25 bp, Saccharomyces pastorianus
gaatttcctactttctgaatgtaca

SEQ ID NO: 140783 - DNA, 25 bp, Saccharomyces pastorianus
ctctgatcactgtccaaccgaaaaa

SEQ ID NO: 140784 - DNA, 25 bp, Saccharomyces pastorianus
gtatctcgaagcactttttggttct

SEQ ID NO: 140785 - DNA, 25 bp, Saccharomyces pastorianus
aaatcctcacgatgtgttccttcac

SEQ ID NO: 140786 - DNA, 25 bp, Saccharomyces pastorianus
gctcttgcctaaaattctgcacgtg

SEQ ID NO: 140787 - DNA, 25 bp, Saccharomyces pastorianus
gagactggtttagagctcttgccta

SEQ ID NO: 140788 - DNA, 25 bp, Saccharomyces pastorianus
agcaaatcttttggcgacacctatt

SEQ ID NO: 140789 - DNA, 25 bp, Saccharomyces pastorianus
gagcaaatccatgatatttccgtga

SEQ ID NO: 140790 - DNA, 25 bp, Saccharomyces pastorianus
ggcaagttttattgactctgatcac

SEQ ID NO: 140791 - DNA, 25 bp, Saccharomyces pastorianus
gacacacttgaagggcgttcgatat

SEQ ID NO: 140792 - DNA, 25 bp, Saccharomyces pastorianus
gagattgtatcatccatttgagcaa

SEQ ID NO: 140793 - DNA, 25 bp, Saccharomyces pastorianus
aggtttccatcgcattttgtctata

SEQ ID NO: 140794 - DNA, 25 bp, Saccharomyces pastorianus
tgtctatatagaccagctcgataat

SEQ ID NO: 140795 - DNA, 25 bp, Saccharomyces pastorianus
gaactgccgagagctgtcaaacaat

SEQ ID NO: 140796 - DNA, 25 bp, Saccharomyces pastorianus
gatccccgttgttttgaatgaccag

SEQ ID NO: 140797 - DNA, 25 bp, Saccharomyces pastorianus
ggttaacatgcttacctctgtaaat

SEQ ID NO: 140798 - DNA, 25 bp, Saccharomyces pastorianus
tttggcaaactttcttcggagggcg

SEQ ID NO: 140799 - DNA, 25 bp, Saccharomyces pastorianus
gaatgaccagctaacacacgtggtt

SEQ ID NO: 140800 - DNA, 25 bp, Saccharomyces pastorianus
acattaactccacctgaagcactta

SEQ ID NO: 140801 - DNA, 25 bp, Saccharomyces pastorianus
gaactttcgaaacgccgtggtgtag

SEQ ID NO: 140802 - DNA, 25 bp, Saccharomyces pastorianus
aaaaagatgcactctgtcgcagccg

SEQ ID NO: 140803 - DNA, 25 bp, Saccharomyces pastorianus
tgcaaaaatgttactgatccccgtt

SEQ ID NO: 140804 - DNA, 25 bp, Saccharomyces pastorianus
ggtaaatccaaggtcacctgggtat

SEQ ID NO: 140805 - DNA, 25 bp, Saccharomyces pastorianus
ccgattttatagttccagaggtcaa

SEQ ID NO: 140806 - DNA, 25 bp, Saccharomyces pastorianus
ttgatggtttacgtgccttagtgaa

SEQ ID NO: 140807 - DNA, 25 bp, Saccharomyces pastorianus
ggtatttacggagccaatccaaact

SEQ ID NO: 140808 - DNA, 25 bp, Saccharomyces pastorianus
gacgtggtccctatggaatttaccg

SEQ ID NO: 140809 - DNA, 25 bp, Saccharomyces pastorianus
ccttagtgaagcttgttacggcgaa

SEQ ID NO: 140810 - DNA, 25 bp, Saccharomyces pastorianus
aacaatgtcccaagtggccaacaat

SEQ ID NO: 140811 - DNA, 25 bp, Saccharomyces pastorianus
tcttcacgatctgcgatcctacaaa

SEQ ID NO: 140812 - DNA, 25 bp, Saccharomyces pastorianus
aaaccttcatgttgtcttcacgatc

SEQ ID NO: 140813 - DNA, 25 bp, Saccharomyces pastorianus
ccagcccttttcaatcgttgcataa

SEQ ID NO: 140814 - DNA, 25 bp, Saccharomyces pastorianus
gcaatgataagttctccagcccttt

SEQ ID NO: 140815 - DNA, 25 bp, Saccharomyces pastorianus
ccaggcacgtgatgtcgagtacttc

SEQ ID NO: 140816 - DNA, 25 bp, Saccharomyces pastorianus
ttcccaggcacgtgatgtcgagtac

SEQ ID NO: 140817 - DNA, 25 bp, Saccharomyces pastorianus
aggcacgtgatgtcgagtacttcct

SEQ ID NO: 140818 - DNA, 25 bp, Saccharomyces pastorianus
cattcccaggcacgtgatgtcgagt

SEQ ID NO: 140819 - DNA, 25 bp, Saccharomyces pastorianus
ggcacgtgatgtcgagtacttcctc

SEQ ID NO: 140820 - DNA, 25 bp, Saccharomyces pastorianus
gcacgtgatgtcgagtacttcctca

SEQ ID NO: 140821 - DNA, 25 bp, Saccharomyces pastorianus
cccaggcacgtgatgtcgagtactt

SEQ ID NO: 140822 - DNA, 25 bp, Saccharomyces pastorianus
attcccaggcacgtgatgtcgagta

SEQ ID NO: 140823 - DNA, 25 bp, Saccharomyces pastorianus
tcccaggcacgtgatgtcgagtact

SEQ ID NO: 140824 - DNA, 25 bp, Saccharomyces pastorianus
caggcacgtgatgtcgagtacttcc

SEQ ID NO: 140825 - DNA, 25 bp, Saccharomyces pastorianus
tccattcccaggcacgtgatgtcga

SEQ ID NO: 140826 - DNA, 25 bp, Saccharomyces pastorianus
tatcctgccaatagtgaccaagtat

SEQ ID NO: 140827 - DNA, 25 bp, Saccharomyces pastorianus
atatgcagctccaagggcgtagata

SEQ ID NO: 140828 - DNA, 25 bp, Saccharomyces pastorianus
aaacttgcgttaccaatcctagaca

SEQ ID NO: 140829 - DNA, 25 bp, Saccharomyces pastorianus
gcaagctcccgctaaaggtgatgat

SEQ ID NO: 140830 - DNA, 25 bp, Saccharomyces pastorianus
gctgacagtgtctcttttgcagaaa

SEQ ID NO: 140831 - DNA, 25 bp, Saccharomyces pastorianus
ttggatccaccacgcaagggctgtg

SEQ ID NO: 140832 - DNA, 25 bp, Saccharomyces pastorianus
ttgatttctttccacaaacgcacca

SEQ ID NO: 140833 - DNA, 25 bp, Saccharomyces pastorianus
aacacttccgttatcttggatccac

SEQ ID NO: 140834 - DNA, 25 bp, Saccharomyces pastorianus
aagggctgtgacgaattattcctaa

SEQ ID NO: 140835 - DNA, 25 bp, Saccharomyces pastorianus
atgtccgtgataacttgcaagctcc

SEQ ID NO: 140836 - DNA, 25 bp, Saccharomyces pastorianus
tatcgtgtaatgtccattcccaggc

SEQ ID NO: 140837 - DNA, 25 bp, Saccharomyces pastorianus
aatttgtccagggagcaggttctga

SEQ ID NO: 140838 - DNA, 25 bp, Saccharomyces pastorianus
aacttctccgatgggtgtcctagaa

SEQ ID NO: 140839 - DNA, 25 bp, Saccharomyces pastorianus
taccgttgacaacaaaaggctttcg

SEQ ID NO: 140840 - DNA, 25 bp, Saccharomyces pastorianus
aaggctttcgtctcctttgacagat

SEQ ID NO: 140841 - DNA, 25 bp, Saccharomyces pastorianus
tctagaatactcatgcacggtgcgt

SEQ ID NO: 140842 - DNA, 25 bp, Saccharomyces pastorianus
aatcagcaccatgactggaagtact

SEQ ID NO: 140843 - DNA, 25 bp, Saccharomyces pastorianus
gcaggttctgaacgatgttacttca

SEQ ID NO: 140844 - DNA, 25 bp, Saccharomyces pastorianus
taaccgccggactaagaagccaaag

SEQ ID NO: 140845 - DNA, 25 bp, Saccharomyces pastorianus
tagtctcaaagatggcctatcgctt

SEQ ID NO: 140846 - DNA, 25 bp, Saccharomyces pastorianus
tgacagattctggtaaccgccggac

SEQ ID NO: 140847 - DNA, 25 bp, Saccharomyces pastorianus
cctatcgcttacatatcaccagagt

SEQ ID NO: 140848 - DNA, 25 bp, Saccharomyces pastorianus
atccaaagtagagaggtgtttccct

SEQ ID NO: 140849 - DNA, 25 bp, Saccharomyces pastorianus
gggaggattctgattatctatccaa

SEQ ID NO: 140850 - DNA, 25 bp, Saccharomyces pastorianus
gattctgattatctatccaaagtag

SEQ ID NO: 140851 - DNA, 25 bp, Saccharomyces pastorianus
aacttacagcagaggaaaccaacca

SEQ ID NO: 140852 - DNA, 25 bp, Saccharomyces pastorianus
gcaacaagaaatgcccaacttcaaa

SEQ ID NO: 140853 - DNA, 25 bp, Saccharomyces pastorianus
accaaccaaccgcaacaagaaatgc

SEQ ID NO: 140854 - DNA, 25 bp, Saccharomyces pastorianus
acttcaaatttgactgggaggattc

SEQ ID NO: 140855 - DNA, 25 bp, Saccharomyces pastorianus
gaaatgcccaacttcaaatttgact

SEQ ID NO: 140856 - DNA, 25 bp, Saccharomyces pastorianus
aatgcccaacttcaaatttgactgg

SEQ ID NO: 140857 - DNA, 25 bp, Saccharomyces pastorianus
aaatttgactgggaggattctgatt

SEQ ID NO: 140858 - DNA, 25 bp, Saccharomyces pastorianus
gactgggaggattctgattatctat

SEQ ID NO: 140859 - DNA, 25 bp, Saccharomyces pastorianus
tctattggctcgctagcttctaacg

SEQ ID NO: 140860 - DNA, 25 bp, Saccharomyces pastorianus
attccaattttttctgatgcaaagc

SEQ ID NO: 140861 - DNA, 25 bp, Saccharomyces pastorianus
gtgtacaatctagaagccgctcttc

SEQ ID NO: 140862 - DNA, 25 bp, Saccharomyces pastorianus
cagtcgcaacacaaatatatcttcg

SEQ ID NO: 140863 - DNA, 25 bp, Saccharomyces pastorianus
aaaaatcctgccatagtacaaaccg

SEQ ID NO: 140864 - DNA, 25 bp, Saccharomyces pastorianus
gcttctaacgccctatcaagagtga

SEQ ID NO: 140865 - DNA, 25 bp, Saccharomyces pastorianus
gaggctcgttgaccgatattccaat

SEQ ID NO: 140866 - DNA, 25 bp, Saccharomyces pastorianus
ccgctcttcttctatacattctatt

SEQ ID NO: 140867 - DNA, 25 bp, Saccharomyces pastorianus
atcttcgaagattgcttcgctggta

SEQ ID NO: 140868 - DNA, 25 bp, Saccharomyces pastorianus
gtacaaaccgcacaaagttctgatc

SEQ ID NO: 140869 - DNA, 25 bp, Saccharomyces pastorianus
atacattctattggctcgctagctt

SEQ ID NO: 140870 - DNA, 25 bp, Saccharomyces pastorianus
cctttgcctgccattgtagaaatca

SEQ ID NO: 140871 - DNA, 25 bp, Saccharomyces pastorianus
ggttccttccaataacgcattcata

SEQ ID NO: 140872 - DNA, 25 bp, Saccharomyces pastorianus
tttgctatactatcgttaccgggtt

SEQ ID NO: 140873 - DNA, 25 bp, Saccharomyces pastorianus
aagggtaccgatttgttggccacat

SEQ ID NO: 140874 - DNA, 25 bp, Saccharomyces pastorianus
aggtgctttgtaactttgatcgttc

SEQ ID NO: 140875 - DNA, 25 bp, Saccharomyces pastorianus
atgcgttattggttttcaccacgta

SEQ ID NO: 140876 - DNA, 25 bp, Saccharomyces pastorianus
tggcaccaattttatacgttactta

SEQ ID NO: 140877 - DNA, 25 bp, Saccharomyces pastorianus
ttcattatttgtcgcgtatactcag

SEQ ID NO: 140878 - DNA, 25 bp, Saccharomyces pastorianus
atcgtggcgttaatattggcaccaa

SEQ ID NO: 140879 - DNA, 25 bp, Saccharomyces pastorianus
acactattgtcgcatctgggttcct

SEQ ID NO: 140880 - DNA, 25 bp, Saccharomyces pastorianus
caacagaaggctacttttcggttat

SEQ ID NO: 140881 - DNA, 25 bp, Saccharomyces pastorianus
ggatgaaaacccattggctgacttt

SEQ ID NO: 140882 - DNA, 25 bp, Saccharomyces pastorianus
atggtgcagctggattgtgatgtct

SEQ ID NO: 140883 - DNA, 25 bp, Saccharomyces pastorianus
acatcacacccaacataacgaactg

SEQ ID NO: 140884 - DNA, 25 bp, Saccharomyces pastorianus
aagggtcacttgaaatggtgcagct

SEQ ID NO: 140885 - DNA, 25 bp, Saccharomyces pastorianus
gacgctatgaaatcgctctggtatt

SEQ ID NO: 140886 - DNA, 25 bp, Saccharomyces pastorianus
ttgaggatttcttggctaggacggc

SEQ ID NO: 140887 - DNA, 25 bp, Saccharomyces pastorianus
gaactggtcgcataacaaggatact

SEQ ID NO: 140888 - DNA, 25 bp, Saccharomyces pastorianus
gaggagactctcagacggagatcaa

SEQ ID NO: 140889 - DNA, 25 bp, Saccharomyces pastorianus
attggctgactttgtggagttaccc

SEQ ID NO: 140890 - DNA, 25 bp, Saccharomyces pastorianus
ggagttacccatggacgctatgaaa

SEQ ID NO: 140891 - DNA, 25 bp, Saccharomyces pastorianus
atgtctggtttgtgtcggatatctt

SEQ ID NO: 140892 - DNA, 25 bp, Saccharomyces pastorianus
attgcacctgtggtatgaaaggaca

SEQ ID NO: 140893 - DNA, 25 bp, Saccharomyces pastorianus
acatgcggtaaatccaaaactaaga

SEQ ID NO: 140894 - DNA, 25 bp, Saccharomyces pastorianus
aagttggcggctgtggttcttgttc

SEQ ID NO: 140895 - DNA, 25 bp, Saccharomyces pastorianus
acgagttgaccgagattgatttcac

SEQ ID NO: 140896 - DNA, 25 bp, Saccharomyces pastorianus
ggcttgtaaagattgcacctgtggt

SEQ ID NO: 140897 - DNA, 25 bp, Saccharomyces pastorianus
tacttgggtcttcctgctttcaagc

SEQ ID NO: 140898 - DNA, 25 bp, Saccharomyces pastorianus
cggctgtggttcttgttctctaggg

SEQ ID NO: 140899 - DNA, 25 bp, Saccharomyces pastorianus
atgcctttagatgtagtggttgtcc

SEQ ID NO: 140900 - DNA, 25 bp, Saccharomyces pastorianus
aaatttacagaagacgagttgaccg

SEQ ID NO: 140901 - DNA, 25 bp, Saccharomyces pastorianus
atgtagtggttgtccctacttgggt

SEQ ID NO: 140902 - DNA, 25 bp, Saccharomyces pastorianus
aaacgatataagatcccaacaagat

SEQ ID NO: 140903 - DNA, 25 bp, Saccharomyces pastorianus
aatgtcgcagtacgaatccactccg

SEQ ID NO: 140904 - DNA, 25 bp, Saccharomyces pastorianus
tatagaactacgtcgctgggcggat

SEQ ID NO: 140905 - DNA, 25 bp, Saccharomyces pastorianus
aaacgccagtgaagcagtccgtcat

SEQ ID NO: 140906 - DNA, 25 bp, Saccharomyces pastorianus
aaattgcacgtattgtttggcgcta

SEQ ID NO: 140907 - DNA, 25 bp, Saccharomyces pastorianus
gaatttggatcccagactgcctcaa

SEQ ID NO: 140908 - DNA, 25 bp, Saccharomyces pastorianus
aagttatcctcactcaatcagcaac

SEQ ID NO: 140909 - DNA, 25 bp, Saccharomyces pastorianus
aggccaaattaatgtgcgttccacc

SEQ ID NO: 140910 - DNA, 25 bp, Saccharomyces pastorianus
aaaaattgctttgggcctgtgcgac

SEQ ID NO: 140911 - DNA, 25 bp, Saccharomyces pastorianus
tagctccactaactgcaaacacatt

SEQ ID NO: 140912 - DNA, 25 bp, Saccharomyces pastorianus
ggcgctacaggttcgttatcggtat

SEQ ID NO: 140913 - DNA, 25 bp, Saccharomyces pastorianus
gaactgatcctgtacttcatataga

SEQ ID NO: 140914 - DNA, 25 bp, Saccharomyces pastorianus
aaatctggaccgtacaacactgtta

SEQ ID NO: 140915 - DNA, 25 bp, Saccharomyces pastorianus
tttctttgttccagttgatggacag

SEQ ID NO: 140916 - DNA, 25 bp, Saccharomyces pastorianus
atctggaccgtacaacactgttaca

SEQ ID NO: 140917 - DNA, 25 bp, Saccharomyces pastorianus
ttagtcaaatctggaccgtacaaca

SEQ ID NO: 140918 - DNA, 25 bp, Saccharomyces pastorianus
ggaccgtacaacactgttacatcgg

SEQ ID NO: 140919 - DNA, 25 bp, Saccharomyces pastorianus
ccgtacaacactgttacatcggttt

SEQ ID NO: 140920 - DNA, 25 bp, Saccharomyces pastorianus
tctggaccgtacaacactgttacat

SEQ ID NO: 140921 - DNA, 25 bp, Saccharomyces pastorianus
cgtacaacactgttacatcggtttc

SEQ ID NO: 140922 - DNA, 25 bp, Saccharomyces pastorianus
tggaccgtacaacactgttacatcg

SEQ ID NO: 140923 - DNA, 25 bp, Saccharomyces pastorianus
gtcaaatctggaccgtacaacactg

SEQ ID NO: 140924 - DNA, 25 bp, Saccharomyces pastorianus
ttctttgttccagttgatggacagt

SEQ ID NO: 140925 - DNA, 25 bp, Saccharomyces pastorianus
atgatttcgttacctatagaaaaag

SEQ ID NO: 140926 - DNA, 25 bp, Saccharomyces pastorianus
tacctatagaaaaagatgatgccac

SEQ ID NO: 140927 - DNA, 25 bp, Saccharomyces pastorianus
ctatgatttcgttacctatagaaaa

SEQ ID NO: 140928 - DNA, 25 bp, Saccharomyces pastorianus
tatagaaaaagatgatgccacaatg

SEQ ID NO: 140929 - DNA, 25 bp, Saccharomyces pastorianus
atcttctatgatttcgttacctata

SEQ ID NO: 140930 - DNA, 25 bp, Saccharomyces pastorianus
tcttctatgatttcgttacctatag

SEQ ID NO: 140931 - DNA, 25 bp, Saccharomyces pastorianus
aatcttctatgatttcgttacctat

SEQ ID NO: 140932 - DNA, 25 bp, Saccharomyces pastorianus
aaatcttctatgatttcgttaccta

SEQ ID NO: 140933 - DNA, 25 bp, Saccharomyces pastorianus
gttacctatagaaaaagatgatgcc

SEQ ID NO: 140934 - DNA, 25 bp, Saccharomyces pastorianus
cttctatgatttcgttacctataga

SEQ ID NO: 140935 - DNA, 25 bp, Saccharomyces pastorianus
cctatagaaaaagatgatgccacaa

SEQ ID NO: 140936 - DNA, 25 bp, Saccharomyces pastorianus
accaaggcaattcaggtctcctgca

SEQ ID NO: 140937 - DNA, 25 bp, Saccharomyces pastorianus
gacaagtttgcaaccagcagctact

SEQ ID NO: 140938 - DNA, 25 bp, Saccharomyces pastorianus
gtttcactcccaatctcgatggaat

SEQ ID NO: 140939 - DNA, 25 bp, Saccharomyces pastorianus
aaaaagcctgttacttctgaccgtg

SEQ ID NO: 140940 - DNA, 25 bp, Saccharomyces pastorianus
aagattaatagatccccttcccata

SEQ ID NO: 140941 - DNA, 25 bp, Saccharomyces pastorianus
ttaatctaccacttcaatcatcacc

SEQ ID NO: 140942 - DNA, 25 bp, Saccharomyces pastorianus
gaactccgaatgcaaactccaattt

SEQ ID NO: 140943 - DNA, 25 bp, Saccharomyces pastorianus
gtgtccaacatcataaagccgtctc

SEQ ID NO: 140944 - DNA, 25 bp, Saccharomyces pastorianus
gtccttcccactgatacatcgaaaa

SEQ ID NO: 140945 - DNA, 25 bp, Saccharomyces pastorianus
gggtaattccgccagtaacatcata

SEQ ID NO: 140946 - DNA, 25 bp, Saccharomyces pastorianus
gaaaacttcacgtctcctaacacaa

SEQ ID NO: 140947 - DNA, 25 bp, Saccharomyces pastorianus
ctttcttgacaaactatctccggga

SEQ ID NO: 140948 - DNA, 25 bp, Saccharomyces pastorianus
aaactgaatgaatccttcctgaaaa

SEQ ID NO: 140949 - DNA, 25 bp, Saccharomyces pastorianus
gcaaatttctttggacgaagtcatt

SEQ ID NO: 140950 - DNA, 25 bp, Saccharomyces pastorianus
ggaaacagttactctaccatgtatt

SEQ ID NO: 140951 - DNA, 25 bp, Saccharomyces pastorianus
cagtacattgtagacgaggcagtga

SEQ ID NO: 140952 - DNA, 25 bp, Saccharomyces pastorianus
ggcagaggatgaataccgcattgta

SEQ ID NO: 140953 - DNA, 25 bp, Saccharomyces pastorianus
gaagaccttaagatacgcacggcag

SEQ ID NO: 140954 - DNA, 25 bp, Saccharomyces pastorianus
aaaaattcaaaggtgcatcgaggca

SEQ ID NO: 140955 - DNA, 25 bp, Saccharomyces pastorianus
tataaccgtgttaagcagagctggg

SEQ ID NO: 140956 - DNA, 25 bp, Saccharomyces pastorianus
gaagccgccgaggttaatagttgtt

SEQ ID NO: 140957 - DNA, 25 bp, Saccharomyces pastorianus
ctatctccgggaaacaacaacagta

SEQ ID NO: 140958 - DNA, 25 bp, Saccharomyces pastorianus
aacttgcagagctatacattgtgac

SEQ ID NO: 140959 - DNA, 25 bp, Saccharomyces pastorianus
gaaattttccctcgaaataggctat

SEQ ID NO: 140960 - DNA, 25 bp, Saccharomyces pastorianus
aatcagctactggaggatgccgtga

SEQ ID NO: 140961 - DNA, 25 bp, Saccharomyces pastorianus
gttttgctttcgacagtatgatcgt

SEQ ID NO: 140962 - DNA, 25 bp, Saccharomyces pastorianus
attaattcacgaagctacactggaa

SEQ ID NO: 140963 - DNA, 25 bp, Saccharomyces pastorianus
gtgactgggcatattcgaactcaat

SEQ ID NO: 140964 - DNA, 25 bp, Saccharomyces pastorianus
cacttttcccagagatatcccaaat

SEQ ID NO: 140965 - DNA, 25 bp, Saccharomyces pastorianus
cagcgtatttttccactgctgaata

SEQ ID NO: 140966 - DNA, 25 bp, Saccharomyces pastorianus
aactcaattaccttccgaatggacg

SEQ ID NO: 140967 - DNA, 25 bp, Saccharomyces pastorianus
gttgatcttaacacacttttcccag

SEQ ID NO: 140968 - DNA, 25 bp, Saccharomyces pastorianus
gagatatcccaaattgccccaatta

SEQ ID NO: 140969 - DNA, 25 bp, Saccharomyces pastorianus
aagtggcggatttctcgtggcaaga

SEQ ID NO: 140970 - DNA, 25 bp, Saccharomyces pastorianus
ccatttgggaataatcagcgtgcta

SEQ ID NO: 140971 - DNA, 25 bp, Saccharomyces pastorianus
tacacaggatgttttctcagctagc

SEQ ID NO: 140972 - DNA, 25 bp, Saccharomyces pastorianus
aaagttccttttactgacgccgatg

SEQ ID NO: 140973 - DNA, 25 bp, Saccharomyces pastorianus
gaaccggtagtgcattgccttctaa

SEQ ID NO: 140974 - DNA, 25 bp, Saccharomyces pastorianus
gatatatctgagtcacttgcatgca

SEQ ID NO: 140975 - DNA, 25 bp, Saccharomyces pastorianus
cttgcatgcagaccaccatttggga

SEQ ID NO: 140976 - DNA, 25 bp, Saccharomyces pastorianus
gaatttcccttagctgatgtcgata

SEQ ID NO: 140977 - DNA, 25 bp, Saccharomyces pastorianus
gtggttactccatggcaatatcaca

SEQ ID NO: 140978 - DNA, 25 bp, Saccharomyces pastorianus
tctcagctagcagtcaagtcaatat

SEQ ID NO: 140979 - DNA, 25 bp, Saccharomyces pastorianus
gaaatgttgtctccacacttgttaa

SEQ ID NO: 140980 - DNA, 25 bp, Saccharomyces pastorianus
atggcaggtttcctattgatcagaa

SEQ ID NO: 140981 - DNA, 25 bp, Saccharomyces pastorianus
aatggctctatcagggaagttttca

SEQ ID NO: 140982 - DNA, 25 bp, Saccharomyces pastorianus
gcccagtgtggatcttttatgtgac

SEQ ID NO: 140983 - DNA, 25 bp, Saccharomyces pastorianus
gttgcactcgactattggttctgta

SEQ ID NO: 140984 - DNA, 25 bp, Saccharomyces pastorianus
gcttcggcatatagtcaaacgtgtt

SEQ ID NO: 140985 - DNA, 25 bp, Saccharomyces pastorianus
gtgacaaatcgttactgacgccaga

SEQ ID NO: 140986 - DNA, 25 bp, Saccharomyces pastorianus
gtagtcaatctatcggatctcgttg

SEQ ID NO: 140987 - DNA, 25 bp, Saccharomyces pastorianus
taccgttaaggcttctttctgttga

SEQ ID NO: 140988 - DNA, 25 bp, Saccharomyces pastorianus
aaaataatgatttccccttgcccag

SEQ ID NO: 140989 - DNA, 25 bp, Saccharomyces pastorianus
agttgtattctatgctcgacgatga

SEQ ID NO: 140990 - DNA, 25 bp, Saccharomyces pastorianus
tgaactcagacaactcactcgagat

SEQ ID NO: 140991 - DNA, 25 bp, Saccharomyces pastorianus
ggaattgaccacctttgacatgaac

SEQ ID NO: 140992 - DNA, 25 bp, Saccharomyces pastorianus
acagggccaatcaacgaatcacgaa

SEQ ID NO: 140993 - DNA, 25 bp, Saccharomyces pastorianus
tctgtgttggagatcatcccatcga

SEQ ID NO: 140994 - DNA, 25 bp, Saccharomyces pastorianus
tcgtccattcattcagcacagtgtt

SEQ ID NO: 140995 - DNA, 25 bp, Saccharomyces pastorianus
gaaattgcgcaaagcctatccagaa

SEQ ID NO: 140996 - DNA, 25 bp, Saccharomyces pastorianus
cgtttattcttttcatcggagtcaa

SEQ ID NO: 140997 - DNA, 25 bp, Saccharomyces pastorianus
tttgctgccaggaacaccgtttatt

SEQ ID NO: 140998 - DNA, 25 bp, Saccharomyces pastorianus
tgacatgaaccgacctttgctgcca

SEQ ID NO: 140999 - DNA, 25 bp, Saccharomyces pastorianus
ggattcctttattaactgcccatga

SEQ ID NO: 141000 - DNA, 25 bp, Saccharomyces pastorianus
gcatcagttgattattcgtccattc

SEQ ID NO: 141001 - DNA, 25 bp, Saccharomyces pastorianus
tcaggttggttctcaacagggccaa

SEQ ID NO: 141002 - DNA, 25 bp, Saccharomyces pastorianus
ggtatttcctactctaaaggcgcag

SEQ ID NO: 141003 - DNA, 25 bp, Saccharomyces pastorianus
gatactataagactacggtgccaac

SEQ ID NO: 141004 - DNA, 25 bp, Saccharomyces pastorianus
cttacagtgactacagcgatggagc

SEQ ID NO: 141005 - DNA, 25 bp, Saccharomyces pastorianus
tggagcagacgacatgccggacttt

SEQ ID NO: 141006 - DNA, 25 bp, Saccharomyces pastorianus
aagccaattgctgttgctaatggga

SEQ ID NO: 141007 - DNA, 25 bp, Saccharomyces pastorianus
aaaggcgcagttacaggattaccaa

SEQ ID NO: 141008 - DNA, 25 bp, Saccharomyces pastorianus
atttgttaaatctgccttacctcac

SEQ ID NO: 141009 - DNA, 25 bp, Saccharomyces pastorianus
aaatgatcggcttccagactggctt

SEQ ID NO: 141010 - DNA, 25 bp, Saccharomyces pastorianus
catgccggactttcacgacgaaggt

SEQ ID NO: 141011 - DNA, 25 bp, Saccharomyces pastorianus
ggcaaacatctcaatttcgcaacaa

SEQ ID NO: 141012 - DNA, 25 bp, Saccharomyces pastorianus
gggataatctttcacttaagctagc

SEQ ID NO: 141013 - DNA, 25 bp, Saccharomyces pastorianus
atctctcccaacctggatactgaat

SEQ ID NO: 141014 - DNA, 25 bp, Saccharomyces pastorianus
ggcaatgaggatcccacatatcaat

SEQ ID NO: 141015 - DNA, 25 bp, Saccharomyces pastorianus
gagaatgacgattccgtacgggagt

SEQ ID NO: 141016 - DNA, 25 bp, Saccharomyces pastorianus
gtttctcccacagcggttatcgagg

SEQ ID NO: 141017 - DNA, 25 bp, Saccharomyces pastorianus
tggcgacgccggcaaggaaatattt

SEQ ID NO: 141018 - DNA, 25 bp, Saccharomyces pastorianus
gaatctaagagccttctggcgacgc

SEQ ID NO: 141019 - DNA, 25 bp, Saccharomyces pastorianus
acaacgtacaatttcactttccagg

SEQ ID NO: 141020 - DNA, 25 bp, Saccharomyces pastorianus
aatcaagactcaactgcgcaatggt

SEQ ID NO: 141021 - DNA, 25 bp, Saccharomyces pastorianus
gtacgggagttttcacgcacgctaa

SEQ ID NO: 141022 - DNA, 25 bp, Saccharomyces pastorianus
gaagcgcaagattctcctacatctg

SEQ ID NO: 141023 - DNA, 25 bp, Saccharomyces pastorianus
taaacgaattgatctctcccaacct

SEQ ID NO: 141024 - DNA, 25 bp, Saccharomyces pastorianus
gggagttgacagacaacacctacaa

SEQ ID NO: 141025 - DNA, 25 bp, Saccharomyces pastorianus
gacaacacctacaaaggcgcggctg

SEQ ID NO: 141026 - DNA, 25 bp, Saccharomyces pastorianus
aggttcttacagaggtggatccatt

SEQ ID NO: 141027 - DNA, 25 bp, Saccharomyces pastorianus
cgaagcttgggagttgacagacaac

SEQ ID NO: 141028 - DNA, 25 bp, Saccharomyces pastorianus
gagtaagaggtaaagatttcacgaa

SEQ ID NO: 141029 - DNA, 25 bp, Saccharomyces pastorianus
gaggtaaagatttcacgaagaacaa

SEQ ID NO: 141030 - DNA, 25 bp, Saccharomyces pastorianus
ttcgaagcttgggagttgacagaca

SEQ ID NO: 141031 - DNA, 25 bp, Saccharomyces pastorianus
aacacctacaaaggcgcggctggaa

SEQ ID NO: 141032 - DNA, 25 bp, Saccharomyces pastorianus
ttcttacagaggtggatccattaca

SEQ ID NO: 141033 - DNA, 25 bp, Saccharomyces pastorianus
ctacaaaggcgcggctggaacatgg

SEQ ID NO: 141034 - DNA, 25 bp, Saccharomyces pastorianus
ttgacagacaacacctacaaaggcg

SEQ ID NO: 141035 - DNA, 25 bp, Saccharomyces pastorianus
atttgaataatgagctagatttgca

SEQ ID NO: 141036 - DNA, 25 bp, Saccharomyces pastorianus
ttgaataatgagctagatttgcaga

SEQ ID NO: 141037 - DNA, 25 bp, Saccharomyces pastorianus
ataatgagctagatttgcagaaaaa

SEQ ID NO: 141038 - DNA, 25 bp, Saccharomyces pastorianus
aatgagctagatttgcagaaaaaag

SEQ ID NO: 141039 - DNA, 25 bp, Saccharomyces pastorianus
aataatgagctagatttgcagaaaa

SEQ ID NO: 141040 - DNA, 25 bp, Saccharomyces pastorianus
tgaataatgagctagatttgcagaa

SEQ ID NO: 141041 - DNA, 25 bp, Saccharomyces pastorianus
taatgagctagatttgcagaaaaaa

SEQ ID NO: 141042 - DNA, 25 bp, Saccharomyces pastorianus
tttgaataatgagctagatttgcag

SEQ ID NO: 141043 - DNA, 25 bp, Saccharomyces pastorianus
gaataatgagctagatttgcagaaa

SEQ ID NO: 141044 - DNA, 25 bp, Saccharomyces pastorianus
atgagctagatttgcagaaaaaagg

SEQ ID NO: 141045 - DNA, 25 bp, Saccharomyces pastorianus
tgagctagatttgcagaaaaaaggg

SEQ ID NO: 141046 - DNA, 25 bp, Saccharomyces pastorianus
gactcctccgaaatctgttaacaat

SEQ ID NO: 141047 - DNA, 25 bp, Saccharomyces pastorianus
agacgtggtgcttcgaaaacagcta

SEQ ID NO: 141048 - DNA, 25 bp, Saccharomyces pastorianus
aactcatttggaacccagcttctac

SEQ ID NO: 141049 - DNA, 25 bp, Saccharomyces pastorianus
attctaagtcttcatcaggtggatt

SEQ ID NO: 141050 - DNA, 25 bp, Saccharomyces pastorianus
aaacaaagtgccgagactcctccga

SEQ ID NO: 141051 - DNA, 25 bp, Saccharomyces pastorianus
aagggagtcgttggctaacaagaca

SEQ ID NO: 141052 - DNA, 25 bp, Saccharomyces pastorianus
actcccctcatatctcaggtgatga

SEQ ID NO: 141053 - DNA, 25 bp, Saccharomyces pastorianus
gccatcccctaataagcacttacaa

SEQ ID NO: 141054 - DNA, 25 bp, Saccharomyces pastorianus
acaagacagatccaccaactcattt

SEQ ID NO: 141055 - DNA, 25 bp, Saccharomyces pastorianus
tcaccatttaatccgttactttccg

SEQ ID NO: 141056 - DNA, 25 bp, Saccharomyces pastorianus
gcaatgatgaaaactacccttttgg

SEQ ID NO: 141057 - DNA, 25 bp, Saccharomyces pastorianus
gtgggagttagcagtatcatagaca

SEQ ID NO: 141058 - DNA, 25 bp, Saccharomyces pastorianus
gcattgatgatagggtgcttcgagt

SEQ ID NO: 141059 - DNA, 25 bp, Saccharomyces pastorianus
cttcgagtgggagttagcagtatca

SEQ ID NO: 141060 - DNA, 25 bp, Saccharomyces pastorianus
tgctagtccagttcagaagcattga

SEQ ID NO: 141061 - DNA, 25 bp, Saccharomyces pastorianus
agtccagttcagaagcattgatgat

SEQ ID NO: 141062 - DNA, 25 bp, Saccharomyces pastorianus
gggagttagcagtatcatagacagt

SEQ ID NO: 141063 - DNA, 25 bp, Saccharomyces pastorianus
gagttagcagtatcatagacagtat

SEQ ID NO: 141064 - DNA, 25 bp, Saccharomyces pastorianus
tagcagtatcatagacagtatcaaa

SEQ ID NO: 141065 - DNA, 25 bp, Saccharomyces pastorianus
tcgagtgggagttagcagtatcata

SEQ ID NO: 141066 - DNA, 25 bp, Saccharomyces pastorianus
gttagcagtatcatagacagtatca

SEQ ID NO: 141067 - DNA, 25 bp, Saccharomyces pastorianus
gctagtccagttcagaagcattgat

SEQ ID NO: 141068 - DNA, 25 bp, Saccharomyces pastorianus
gagcctaatatatttcatgcctaga

SEQ ID NO: 141069 - DNA, 25 bp, Saccharomyces pastorianus
tatatttcatgcctagatcctctag

SEQ ID NO: 141070 - DNA, 25 bp, Saccharomyces pastorianus
catgcctagatcctctagaggtgaa

SEQ ID NO: 141071 - DNA, 25 bp, Saccharomyces pastorianus
taaagattgggagtgcctgaatgcg

SEQ ID NO: 141072 - DNA, 25 bp, Saccharomyces pastorianus
gtggttgctctttgccttagagata

SEQ ID NO: 141073 - DNA, 25 bp, Saccharomyces pastorianus
aagagtgtacgtcggccgcgcttca

SEQ ID NO: 141074 - DNA, 25 bp, Saccharomyces pastorianus
ggagtgcctgaatgcggataaagaa

SEQ ID NO: 141075 - DNA, 25 bp, Saccharomyces pastorianus
gcttcattcctcttgagagcctaat

SEQ ID NO: 141076 - DNA, 25 bp, Saccharomyces pastorianus
ttgggaagcccaagagtgtacgtcg

SEQ ID NO: 141077 - DNA, 25 bp, Saccharomyces pastorianus
ctctagaggtgaaatggtggttgct

SEQ ID NO: 141078 - DNA, 25 bp, Saccharomyces pastorianus
gatttcaatctagggcttgggaagc

SEQ ID NO: 141079 - DNA, 25 bp, Saccharomyces pastorianus
cgaaatcaactgtagggcgtgctgt

SEQ ID NO: 141080 - DNA, 25 bp, Saccharomyces pastorianus
ccgacaccacgctagttcatgaaat

SEQ ID NO: 141081 - DNA, 25 bp, Saccharomyces pastorianus
gtctccactgatgatatcgtcactg

SEQ ID NO: 141082 - DNA, 25 bp, Saccharomyces pastorianus
gtcactgctttcatctggaaatcag

SEQ ID NO: 141083 - DNA, 25 bp, Saccharomyces pastorianus
ggcctataatacatgcgcacttgct

SEQ ID NO: 141084 - DNA, 25 bp, Saccharomyces pastorianus
gccgatgcccggacaagactaaggt

SEQ ID NO: 141085 - DNA, 25 bp, Saccharomyces pastorianus
aaatcagtttctcgagcccgtttat

SEQ ID NO: 141086 - DNA, 25 bp, Saccharomyces pastorianus
aaagtttgggcgttcttgcatcaca

SEQ ID NO: 141087 - DNA, 25 bp, Saccharomyces pastorianus
gttgaattttctgctatctcattgc

SEQ ID NO: 141088 - DNA, 25 bp, Saccharomyces pastorianus
accctaagtcttcgatttggcctat

SEQ ID NO: 141089 - DNA, 25 bp, Saccharomyces pastorianus
ttcttcgaactctacttgggcttat

SEQ ID NO: 141090 - DNA, 25 bp, Saccharomyces pastorianus
gtttattttcaccatgctacacctg

SEQ ID NO: 141091 - DNA, 25 bp, Saccharomyces pastorianus
tgctcgaccctgttagtgtttattt

SEQ ID NO: 141092 - DNA, 25 bp, Saccharomyces pastorianus
acgggactttaatcgctgaatgcac

SEQ ID NO: 141093 - DNA, 25 bp, Saccharomyces pastorianus
agtccgcattgccttggctgagaag

SEQ ID NO: 141094 - DNA, 25 bp, Saccharomyces pastorianus
cacagtgccagtgcttgaacttgat

SEQ ID NO: 141095 - DNA, 25 bp, Saccharomyces pastorianus
gagaacgcccatatgttgctggtga

SEQ ID NO: 141096 - DNA, 25 bp, Saccharomyces pastorianus
gctggtctaatatttgctgcgattg

SEQ ID NO: 141097 - DNA, 25 bp, Saccharomyces pastorianus
gttgctggtgattcattctcaatgg

SEQ ID NO: 141098 - DNA, 25 bp, Saccharomyces pastorianus
gggcctgaagtcgagttctaccaaa

SEQ ID NO: 141099 - DNA, 25 bp, Saccharomyces pastorianus
ttgatgcacttgatggtacacccac

SEQ ID NO: 141100 - DNA, 25 bp, Saccharomyces pastorianus
gaagcctgaatttcttgccaagaac

SEQ ID NO: 141101 - DNA, 25 bp, Saccharomyces pastorianus
cttatattccacctgaacagccgga

SEQ ID NO: 141102 - DNA, 25 bp, Saccharomyces pastorianus
gttgacaatgcttatattccacctg

SEQ ID NO: 141103 - DNA, 25 bp, Saccharomyces pastorianus
gcattcgcgttttaatattaacaga

SEQ ID NO: 141104 - DNA, 25 bp, Saccharomyces pastorianus
tattccacctgaacagccggaaaca

SEQ ID NO: 141105 - DNA, 25 bp, Saccharomyces pastorianus
ccaaccggtgttgacaatgcttata

SEQ ID NO: 141106 - DNA, 25 bp, Saccharomyces pastorianus
gacaatgcttatattccacctgaac

SEQ ID NO: 141107 - DNA, 25 bp, Saccharomyces pastorianus
gccggaaacaaagcattcgcgtttt

SEQ ID NO: 141108 - DNA, 25 bp, Saccharomyces pastorianus
aacatttcgcacttggacccaaccg

SEQ ID NO: 141109 - DNA, 25 bp, Saccharomyces pastorianus
tctaacgaatctaacgaccttgaaa

SEQ ID NO: 141110 - DNA, 25 bp, Saccharomyces pastorianus
gagataccttaagaaaccactttat

SEQ ID NO: 141111 - DNA, 25 bp, Saccharomyces pastorianus
ggacccaaccggtgttgacaatgct

SEQ ID NO: 141112 - DNA, 25 bp, Saccharomyces pastorianus
gccataaagctgtcacgaaaccctg

SEQ ID NO: 141113 - DNA, 25 bp, Saccharomyces pastorianus
ttatgggcccagtaatcttcacctc

SEQ ID NO: 141114 - DNA, 25 bp, Saccharomyces pastorianus
gaatccttcttttcttaacggctat

SEQ ID NO: 141115 - DNA, 25 bp, Saccharomyces pastorianus
cctcctgttctggtggacgatgtta

SEQ ID NO: 141116 - DNA, 25 bp, Saccharomyces pastorianus
aagtacgccgcctggagattcatta

SEQ ID NO: 141117 - DNA, 25 bp, Saccharomyces pastorianus
gatcatggcgatcaagaatccttct

SEQ ID NO: 141118 - DNA, 25 bp, Saccharomyces pastorianus
attcattagcggtcgtgtgctgcgg

SEQ ID NO: 141119 - DNA, 25 bp, Saccharomyces pastorianus
aggcttgcctggtccattagatcat

SEQ ID NO: 141120 - DNA, 25 bp, Saccharomyces pastorianus
atcggcaatgcaagacctgatttta

SEQ ID NO: 141121 - DNA, 25 bp, Saccharomyces pastorianus
cacgtcaacgtgcaggtttacctta

SEQ ID NO: 141122 - DNA, 25 bp, Saccharomyces pastorianus
ccgagtggccattgagggaccttat

SEQ ID NO: 141123 - DNA, 25 bp, Saccharomyces pastorianus
aaggagagccttaaacggtgtctct

SEQ ID NO: 141124 - DNA, 25 bp, Saccharomyces pastorianus
gtttctgtgtagtgttgctgttgct

SEQ ID NO: 141125 - DNA, 25 bp, Saccharomyces pastorianus
agatggtctatgcatcctccaagga

SEQ ID NO: 141126 - DNA, 25 bp, Saccharomyces pastorianus
tgctgttgctgatgaatcccttacc

SEQ ID NO: 141127 - DNA, 25 bp, Saccharomyces pastorianus
ccatcttacgatgccttcttagaga

SEQ ID NO: 141128 - DNA, 25 bp, Saccharomyces pastorianus
aaggaaacctctactgacccatctt

SEQ ID NO: 141129 - DNA, 25 bp, Saccharomyces pastorianus
tcccttaccgctttcaatgacttga

SEQ ID NO: 141130 - DNA, 25 bp, Saccharomyces pastorianus
tacgccatttacgattttgaatacg

SEQ ID NO: 141131 - DNA, 25 bp, Saccharomyces pastorianus
gaaaacgactgtctttacgccattt

SEQ ID NO: 141132 - DNA, 25 bp, Saccharomyces pastorianus
gacactgctccagtcagatcgaaga

SEQ ID NO: 141133 - DNA, 25 bp, Saccharomyces pastorianus
gattgttttcttcacttggtctcca

SEQ ID NO: 141134 - DNA, 25 bp, Saccharomyces pastorianus
ggatatcctaattgaattggctaaa

SEQ ID NO: 141135 - DNA, 25 bp, Saccharomyces pastorianus
gcatagtggagaattggatatccta

SEQ ID NO: 141136 - DNA, 25 bp, Saccharomyces pastorianus
atagcatgtgtgagcatagtggaga

SEQ ID NO: 141137 - DNA, 25 bp, Saccharomyces pastorianus
gccttttatagcatgtgtgagcata

SEQ ID NO: 141138 - DNA, 25 bp, Saccharomyces pastorianus
atgatcacccatattctttgttact

SEQ ID NO: 141139 - DNA, 25 bp, Saccharomyces pastorianus
cacccatattctttgttacttaaca

SEQ ID NO: 141140 - DNA, 25 bp, Saccharomyces pastorianus
gatcacccatattctttgttactta

SEQ ID NO: 141141 - DNA, 25 bp, Saccharomyces pastorianus
tgttacttaacaaacaaagtgcctt

SEQ ID NO: 141142 - DNA, 25 bp, Saccharomyces pastorianus
aacaaagtgccttttatagcatgtg

SEQ ID NO: 141143 - DNA, 25 bp, Saccharomyces pastorianus
gaggtaaaagagtatgatcacccat

SEQ ID NO: 141144 - DNA, 25 bp, Saccharomyces pastorianus
agagtatgatcacccatattctttg

SEQ ID NO: 141145 - DNA, 25 bp, Saccharomyces pastorianus
gaacaattacacaaggcgccacaag

SEQ ID NO: 141146 - DNA, 25 bp, Saccharomyces pastorianus
tttctgtcgacgctcagtctaagat

SEQ ID NO: 141147 - DNA, 25 bp, Saccharomyces pastorianus
gtatgctccaaacctacctagagta

SEQ ID NO: 141148 - DNA, 25 bp, Saccharomyces pastorianus
gagcaagagccatacaacgaacaca

SEQ ID NO: 141149 - DNA, 25 bp, Saccharomyces pastorianus
gatccaacactattctcagggacga

SEQ ID NO: 141150 - DNA, 25 bp, Saccharomyces pastorianus
ccggtgccggtaaatcaactattat

SEQ ID NO: 141151 - DNA, 25 bp, Saccharomyces pastorianus
tcgatatttccggtgttgatttaca

SEQ ID NO: 141152 - DNA, 25 bp, Saccharomyces pastorianus
gacgtatgctatttccttcactgaa

SEQ ID NO: 141153 - DNA, 25 bp, Saccharomyces pastorianus
ggctggtatatctttgacgtatgct

SEQ ID NO: 141154 - DNA, 25 bp, Saccharomyces pastorianus
tattaccgccttgttcaggtttttg

SEQ ID NO: 141155 - DNA, 25 bp, Saccharomyces pastorianus
gatttatcattacggtatgctccaa

SEQ ID NO: 141156 - DNA, 25 bp, Saccharomyces pastorianus
aagacgaagctgctttggctaagtt

SEQ ID NO: 141157 - DNA, 25 bp, Saccharomyces pastorianus
aagtcagagccgaagacgaagctgc

SEQ ID NO: 141158 - DNA, 25 bp, Saccharomyces pastorianus
acgaagctgctttggctaagttggt

SEQ ID NO: 141159 - DNA, 25 bp, Saccharomyces pastorianus
gacgaagctgctttggctaagttgg

SEQ ID NO: 141160 - DNA, 25 bp, Saccharomyces pastorianus
aagctgctttggctaagttggtttc

SEQ ID NO: 141161 - DNA, 25 bp, Saccharomyces pastorianus
agctgctttggctaagttggtttcc

SEQ ID NO: 141162 - DNA, 25 bp, Saccharomyces pastorianus
agacgaagctgctttggctaagttg

SEQ ID NO: 141163 - DNA, 25 bp, Saccharomyces pastorianus
agtcagagccgaagacgaagctgct

SEQ ID NO: 141164 - DNA, 25 bp, Saccharomyces pastorianus
gaagtcagagccgaagacgaagctg

SEQ ID NO: 141165 - DNA, 25 bp, Saccharomyces pastorianus
cgaagctgctttggctaagttggtt

SEQ ID NO: 141166 - DNA, 25 bp, Saccharomyces pastorianus
gaagtcaagaagcactggggtggtg

SEQ ID NO: 141167 - DNA, 25 bp, Saccharomyces pastorianus
ctgctgaaaccttcaagttgttcaa

SEQ ID NO: 141168 - DNA, 25 bp, Saccharomyces pastorianus
tgaaaccttcaagttgttcaacaag

SEQ ID NO: 141169 - DNA, 25 bp, Saccharomyces pastorianus
agttgttcaacaagtacagaccaga

SEQ ID NO: 141170 - DNA, 25 bp, Saccharomyces pastorianus
gaaaccttcaagttgttcaacaagt

SEQ ID NO: 141171 - DNA, 25 bp, Saccharomyces pastorianus
gttgttcaacaagtacagaccagaa

SEQ ID NO: 141172 - DNA, 25 bp, Saccharomyces pastorianus
gctgaaaccttcaagttgttcaaca

SEQ ID NO: 141173 - DNA, 25 bp, Saccharomyces pastorianus
accttcaagttgttcaacaagtaca

SEQ ID NO: 141174 - DNA, 25 bp, Saccharomyces pastorianus
tgttcaacaagtacagaccagaaac

SEQ ID NO: 141175 - DNA, 25 bp, Saccharomyces pastorianus
aagttgttcaacaagtacagaccag

SEQ ID NO: 141176 - DNA, 25 bp, Saccharomyces pastorianus
gctgctgaaaccttcaagttgttca

SEQ ID NO: 141177 - DNA, 25 bp, Saccharomyces pastorianus
tgctgaaaccttcaagttgttcaac

SEQ ID NO: 141178 - DNA, 25 bp, Saccharomyces pastorianus
gtgcaaatggccacccaagagctta

SEQ ID NO: 141179 - DNA, 25 bp, Saccharomyces pastorianus
gaagaacgtcggtccttgtacagga

SEQ ID NO: 141180 - DNA, 25 bp, Saccharomyces pastorianus
ttatgatctacgtgaggcccaagga

SEQ ID NO: 141181 - DNA, 25 bp, Saccharomyces pastorianus
aaagtaccaccactgtgcttgacat

SEQ ID NO: 141182 - DNA, 25 bp, Saccharomyces pastorianus
gaacatcgccattgctgttagggaa

SEQ ID NO: 141183 - DNA, 25 bp, Saccharomyces pastorianus
gttgcagagtgcgtctaccaaggta

SEQ ID NO: 141184 - DNA, 25 bp, Saccharomyces pastorianus
gatgaatacctgtcgcacgttatat

SEQ ID NO: 141185 - DNA, 25 bp, Saccharomyces pastorianus
gagcggaattgcactggacccatac

SEQ ID NO: 141186 - DNA, 25 bp, Saccharomyces pastorianus
gaatacttcattcccatcagcgatc

SEQ ID NO: 141187 - DNA, 25 bp, Saccharomyces pastorianus
gctggtttcctcaaaggccttggta

SEQ ID NO: 141188 - DNA, 25 bp, Saccharomyces pastorianus
acaggatatccttccatccagggaa

SEQ ID NO: 141189 - DNA, 25 bp, Saccharomyces pastorianus
tcactgcttcagctaaggattggtc

SEQ ID NO: 141190 - DNA, 25 bp, Saccharomyces pastorianus
gcttcagctaaggattggtctacga

SEQ ID NO: 141191 - DNA, 25 bp, Saccharomyces pastorianus
aatcactgcttcagctaaggattgg

SEQ ID NO: 141192 - DNA, 25 bp, Saccharomyces pastorianus
cttcagctaaggattggtctacgac

SEQ ID NO: 141193 - DNA, 25 bp, Saccharomyces pastorianus
gtaaatgaaatcactgcttcagcta

SEQ ID NO: 141194 - DNA, 25 bp, Saccharomyces pastorianus
atgaaatcactgcttcagctaagga

SEQ ID NO: 141195 - DNA, 25 bp, Saccharomyces pastorianus
aaatgaaatcactgcttcagctaag

SEQ ID NO: 141196 - DNA, 25 bp, Saccharomyces pastorianus
tgcttcagctaaggattggtctacg

SEQ ID NO: 141197 - DNA, 25 bp, Saccharomyces pastorianus
ttcagctaaggattggtctacgact

SEQ ID NO: 141198 - DNA, 25 bp, Saccharomyces pastorianus
tgaaatcactgcttcagctaaggat

SEQ ID NO: 141199 - DNA, 25 bp, Saccharomyces pastorianus
gaaatcactgcttcagctaaggatt

SEQ ID NO: 141200 - DNA, 25 bp, Saccharomyces pastorianus
ggctagccagagctcagattccgaa

SEQ ID NO: 141201 - DNA, 25 bp, Saccharomyces pastorianus
gaaacattcaatgctgacttaggcg

SEQ ID NO: 141202 - DNA, 25 bp, Saccharomyces pastorianus
atccaagcattttaggtgagcgcag

SEQ ID NO: 141203 - DNA, 25 bp, Saccharomyces pastorianus
caatgctgacttaggcggactgaga

SEQ ID NO: 141204 - DNA, 25 bp, Saccharomyces pastorianus
gaatcaattgtagtgcctacttcaa

SEQ ID NO: 141205 - DNA, 25 bp, Saccharomyces pastorianus
aaattagcggtgttggatccaagca

SEQ ID NO: 141206 - DNA, 25 bp, Saccharomyces pastorianus
tagccagagctcagattccgaatca

SEQ ID NO: 141207 - DNA, 25 bp, Saccharomyces pastorianus
gattccgaatcaattgtagtgccta

SEQ ID NO: 141208 - DNA, 25 bp, Saccharomyces pastorianus
agcggtgttggatccaagcatttta

SEQ ID NO: 141209 - DNA, 25 bp, Saccharomyces pastorianus
cattttaggtgagcgcagcagggct

SEQ ID NO: 141210 - DNA, 25 bp, Saccharomyces pastorianus
agcagggctagccagagctcagatt

SEQ ID NO: 141211 - DNA, 25 bp, Saccharomyces pastorianus
tacttgctgatccttgcgacatgaa

SEQ ID NO: 141212 - DNA, 25 bp, Saccharomyces pastorianus
tcagcccctgttgatgcgtatttca

SEQ ID NO: 141213 - DNA, 25 bp, Saccharomyces pastorianus
aaacgagttaccacattgctaaata

SEQ ID NO: 141214 - DNA, 25 bp, Saccharomyces pastorianus
aaacggctctgatcttacttgctga

SEQ ID NO: 141215 - DNA, 25 bp, Saccharomyces pastorianus
aatgttggtatcttcctattcaaaa

SEQ ID NO: 141216 - DNA, 25 bp, Saccharomyces pastorianus
gacgaatatacagctttccgttcag

SEQ ID NO: 141217 - DNA, 25 bp, Saccharomyces pastorianus
gatgcaattatgtccaaaagccacg

SEQ ID NO: 141218 - DNA, 25 bp, Saccharomyces pastorianus
cacttagagatattcgtctggcgat

SEQ ID NO: 141219 - DNA, 25 bp, Saccharomyces pastorianus
acttttcatcctccttgacaattga

SEQ ID NO: 141220 - DNA, 25 bp, Saccharomyces pastorianus
tcaacttctcagaccctaatgacga

SEQ ID NO: 141221 - DNA, 25 bp, Saccharomyces pastorianus
gcaatggactatttggtttctctca

SEQ ID NO: 141222 - DNA, 25 bp, Saccharomyces pastorianus
aggctcgcatactgagtacccaatc

SEQ ID NO: 141223 - DNA, 25 bp, Saccharomyces pastorianus
gggaactgacaaatcaggctcgcat

SEQ ID NO: 141224 - DNA, 25 bp, Saccharomyces pastorianus
atggacggaatcttcactacaggcc

SEQ ID NO: 141225 - DNA, 25 bp, Saccharomyces pastorianus
gagaacaaaacctcttcttcttctt

SEQ ID NO: 141226 - DNA, 25 bp, Saccharomyces pastorianus
atctacagattccaactgggctcca

SEQ ID NO: 141227 - DNA, 25 bp, Saccharomyces pastorianus
ggatactgggtgatttggtcttaac

SEQ ID NO: 141228 - DNA, 25 bp, Saccharomyces pastorianus
ggtcttaacggtcccatggtcaagt

SEQ ID NO: 141229 - DNA, 25 bp, Saccharomyces pastorianus
actgggctccaagtttcattgatat

SEQ ID NO: 141230 - DNA, 25 bp, Saccharomyces pastorianus
acgccgggtttatgcagtctttgac

SEQ ID NO: 141231 - DNA, 25 bp, Saccharomyces pastorianus
tattatgctcaccacgttcagaaga

SEQ ID NO: 141232 - DNA, 25 bp, Saccharomyces pastorianus
acaggcccatcttccgttggattaa

SEQ ID NO: 141233 - DNA, 25 bp, Saccharomyces pastorianus
agaagatggtagaacgctgtcggac

SEQ ID NO: 141234 - DNA, 25 bp, Saccharomyces pastorianus
acgctgtcggactacaatattcaaa

SEQ ID NO: 141235 - DNA, 25 bp, Saccharomyces pastorianus
tggtagaacgctgtcggactacaat

SEQ ID NO: 141236 - DNA, 25 bp, Saccharomyces pastorianus
gatggtagaacgctgtcggactaca

SEQ ID NO: 141237 - DNA, 25 bp, Saccharomyces pastorianus
cgctgtcggactacaatattcaaaa

SEQ ID NO: 141238 - DNA, 25 bp, Saccharomyces pastorianus
aacattcagaaagagtctacgttgc

SEQ ID NO: 141239 - DNA, 25 bp, Saccharomyces pastorianus
ctgtcggactacaatattcaaaagg

SEQ ID NO: 141240 - DNA, 25 bp, Saccharomyces pastorianus
gtagaacgctgtcggactacaatat

SEQ ID NO: 141241 - DNA, 25 bp, Saccharomyces pastorianus
attcagaaagagtctacgttgcatt

SEQ ID NO: 141242 - DNA, 25 bp, Saccharomyces pastorianus
aagatggtagaacgctgtcggacta

SEQ ID NO: 141243 - DNA, 25 bp, Saccharomyces pastorianus
gaacgctgtcggactacaatattca

SEQ ID NO: 141244 - DNA, 25 bp, Saccharomyces pastorianus
gaagatggtagaacgctgtcggact

SEQ ID NO: 141245 - DNA, 25 bp, Saccharomyces pastorianus
cattcagaaagagtctacgttgcat

SEQ ID NO: 141246 - DNA, 25 bp, Saccharomyces pastorianus
ctacgttgcatttggtgttgagatt

SEQ ID NO: 141247 - DNA, 25 bp, Saccharomyces pastorianus
agaggttgaatcttccgacactatt

SEQ ID NO: 141248 - DNA, 25 bp, Saccharomyces pastorianus
gctgtcggactacaatattcaaaag

SEQ ID NO: 141249 - DNA, 25 bp, Saccharomyces pastorianus
ttccgacactattgacaacgtcaaa

SEQ ID NO: 141250 - DNA, 25 bp, Saccharomyces pastorianus
gaccagcaaagattgatttttgccg

SEQ ID NO: 141251 - DNA, 25 bp, Saccharomyces pastorianus
ggtagaacgctgtcggactacaata

SEQ ID NO: 141252 - DNA, 25 bp, Saccharomyces pastorianus
gggaagactataaccctagaggttg

SEQ ID NO: 141253 - DNA, 25 bp, Saccharomyces pastorianus
gaacgctgtcggactacaatattca

SEQ ID NO: 141254 - DNA, 25 bp, Saccharomyces pastorianus
accctagaggttgaatcttccgaca

SEQ ID NO: 141255 - DNA, 25 bp, Saccharomyces pastorianus
aggtggtatgcagatctttgttaag

SEQ ID NO: 141256 - DNA, 25 bp, Saccharomyces pastorianus
aagttgaatcttccgataccatcga

SEQ ID NO: 141257 - DNA, 25 bp, Saccharomyces pastorianus
tgatctttgccggtaagcagttaga

SEQ ID NO: 141258 - DNA, 25 bp, Saccharomyces pastorianus
tcagaaggaatctactcttcacttg

SEQ ID NO: 141259 - DNA, 25 bp, Saccharomyces pastorianus
tccgataccatcgacaacgttaagt

SEQ ID NO: 141260 - DNA, 25 bp, Saccharomyces pastorianus
gtatgcagatctttgttaagacttt

SEQ ID NO: 141261 - DNA, 25 bp, Saccharomyces pastorianus
ggtatgcagatctttgttaagactt

SEQ ID NO: 141262 - DNA, 25 bp, Saccharomyces pastorianus
gtggtatgcagatctttgttaagac

SEQ ID NO: 141263 - DNA, 25 bp, Saccharomyces pastorianus
gcagatctttgttaagactttgacc

SEQ ID NO: 141264 - DNA, 25 bp, Saccharomyces pastorianus
ggtggtatgcagatctttgttaaga

SEQ ID NO: 141265 - DNA, 25 bp, Saccharomyces pastorianus
gatctttgttaagactttgaccggt

SEQ ID NO: 141266 - DNA, 25 bp, Saccharomyces pastorianus
ccccgcacaattacatgggatgata

SEQ ID NO: 141267 - DNA, 25 bp, Saccharomyces pastorianus
ttttagataaacaacctgaggatgc

SEQ ID NO: 141268 - DNA, 25 bp, Saccharomyces pastorianus
aatatacaaataccgttcgcaactt

SEQ ID NO: 141269 - DNA, 25 bp, Saccharomyces pastorianus
actcctttttgtgactttcttccat

SEQ ID NO: 141270 - DNA, 25 bp, Saccharomyces pastorianus
gataatatacaaataccgttcgcaa

SEQ ID NO: 141271 - DNA, 25 bp, Saccharomyces pastorianus
tcctttttgtgactttcttccatcc

SEQ ID NO: 141272 - DNA, 25 bp, Saccharomyces pastorianus
acatttatgtgccaccttgccatac

SEQ ID NO: 141273 - DNA, 25 bp, Saccharomyces pastorianus
aacaacctgaggatgctcaatggat

SEQ ID NO: 141274 - DNA, 25 bp, Saccharomyces pastorianus
caccttgccatacccagattttaga

SEQ ID NO: 141275 - DNA, 25 bp, Saccharomyces pastorianus
acatgtgtggaaagttcgtaagaac

SEQ ID NO: 141276 - DNA, 25 bp, Saccharomyces pastorianus
tgccatacccagattttagataaac

SEQ ID NO: 141277 - DNA, 25 bp, Saccharomyces pastorianus
catacctgaactgcgctgataaact

SEQ ID NO: 141278 - DNA, 25 bp, Saccharomyces pastorianus
agagcaagccttcttcggaacgtca

SEQ ID NO: 141279 - DNA, 25 bp, Saccharomyces pastorianus
aagcccactcacttattgtttttgg

SEQ ID NO: 141280 - DNA, 25 bp, Saccharomyces pastorianus
aatcctcaagatatcaagtccgcat

SEQ ID NO: 141281 - DNA, 25 bp, Saccharomyces pastorianus
gaacgtcattgcttaatctacctgg

SEQ ID NO: 141282 - DNA, 25 bp, Saccharomyces pastorianus
tatgcacctgaagttgttcgcgttc

SEQ ID NO: 141283 - DNA, 25 bp, Saccharomyces pastorianus
cgcctcttttaaaatctgcaccttt

SEQ ID NO: 141284 - DNA, 25 bp, Saccharomyces pastorianus
gaaatccttgaatacctttcccatc

SEQ ID NO: 141285 - DNA, 25 bp, Saccharomyces pastorianus
gattatgattttgcgcctcttttaa

SEQ ID NO: 141286 - DNA, 25 bp, Saccharomyces pastorianus
acaccttatcttctaggttccatgc

SEQ ID NO: 141287 - DNA, 25 bp, Saccharomyces pastorianus
gagtttttccacatcactacgagat

SEQ ID NO: 141288 - DNA, 25 bp, Saccharomyces pastorianus
tcaactggtcgttacttttggtaca

SEQ ID NO: 141289 - DNA, 25 bp, Saccharomyces pastorianus
tgcttctttaagtttaatagtcact

SEQ ID NO: 141290 - DNA, 25 bp, Saccharomyces pastorianus
agtcactcaactggtcgttactttt

SEQ ID NO: 141291 - DNA, 25 bp, Saccharomyces pastorianus
ttctgcccaaggtttatctttgctt

SEQ ID NO: 141292 - DNA, 25 bp, Saccharomyces pastorianus
ggaaaatcttctgcccaaggtttat

SEQ ID NO: 141293 - DNA, 25 bp, Saccharomyces pastorianus
caaggtttatctttgcttctttaag

SEQ ID NO: 141294 - DNA, 25 bp, Saccharomyces pastorianus
gcccaaggtttatctttgcttcttt

SEQ ID NO: 141295 - DNA, 25 bp, Saccharomyces pastorianus
ggtcgttacttttggtacaattgca

SEQ ID NO: 141296 - DNA, 25 bp, Saccharomyces pastorianus
gtttggaaaatcttctgcccaaggt

SEQ ID NO: 141297 - DNA, 25 bp, Saccharomyces pastorianus
atcttctgcccaaggtttatctttg

SEQ ID NO: 141298 - DNA, 25 bp, Saccharomyces pastorianus
ttttggtacaattgcatttgctagt

SEQ ID NO: 141299 - DNA, 25 bp, Saccharomyces pastorianus
atttgttactggaagcctacccact

SEQ ID NO: 141300 - DNA, 25 bp, Saccharomyces pastorianus
atggtcattgcaggtaccgttttcc

SEQ ID NO: 141301 - DNA, 25 bp, Saccharomyces pastorianus
gtgcccgaggccagattatacgcaa

SEQ ID NO: 141302 - DNA, 25 bp, Saccharomyces pastorianus
tgagttgccatacatcgccttgatt

SEQ ID NO: 141303 - DNA, 25 bp, Saccharomyces pastorianus
cgtatctattgttggcagcttctgc

SEQ ID NO: 141304 - DNA, 25 bp, Saccharomyces pastorianus
gtcgcagcaaacactttcatgaggt

SEQ ID NO: 141305 - DNA, 25 bp, Saccharomyces pastorianus
tattaggtctatttgccgctgcgat

SEQ ID NO: 141306 - DNA, 25 bp, Saccharomyces pastorianus
gggctactatcctcacaagattcat

SEQ ID NO: 141307 - DNA, 25 bp, Saccharomyces pastorianus
tatggttctgttggacgggctacta

SEQ ID NO: 141308 - DNA, 25 bp, Saccharomyces pastorianus
atcggtatgatggtgtgtgctgctt

SEQ ID NO: 141309 - DNA, 25 bp, Saccharomyces pastorianus
gattcccgtgcctttactattctta

SEQ ID NO: 141310 - DNA, 25 bp, Saccharomyces pastorianus
tcttggccaaatatggttattccga

SEQ ID NO: 141311 - DNA, 25 bp, Saccharomyces pastorianus
aatctcgtgatgaaaatgttcctga

SEQ ID NO: 141312 - DNA, 25 bp, Saccharomyces pastorianus
agtcattttcaacaagctatctaga

SEQ ID NO: 141313 - DNA, 25 bp, Saccharomyces pastorianus
gaacaaactggcactaaggatctta

SEQ ID NO: 141314 - DNA, 25 bp, Saccharomyces pastorianus
ggaagttctaccaaatcacgaagct

SEQ ID NO: 141315 - DNA, 25 bp, Saccharomyces pastorianus
ggtcatgggtgctgttaggcaacat

SEQ ID NO: 141316 - DNA, 25 bp, Saccharomyces pastorianus
catgacttccaatctaggtgctgaa

SEQ ID NO: 141317 - DNA, 25 bp, Saccharomyces pastorianus
gaaactgtcaatgtcgtcttgaaga

SEQ ID NO: 141318 - DNA, 25 bp, Saccharomyces pastorianus
gacgatcgactgttccaattgtatt

SEQ ID NO: 141319 - DNA, 25 bp, Saccharomyces pastorianus
gggtgcacgtccactgaacaggtta

SEQ ID NO: 141320 - DNA, 25 bp, Saccharomyces pastorianus
tttaactcaagaggccaaggacttc

SEQ ID NO: 141321 - DNA, 25 bp, Saccharomyces pastorianus
tcaatgattcgtctattcagcaaat

SEQ ID NO: 141322 - DNA, 25 bp, Saccharomyces pastorianus
cagtcccttacctacagaatctaat

SEQ ID NO: 141323 - DNA, 25 bp, Saccharomyces pastorianus
ggactcatttatagcgcaagaccat

SEQ ID NO: 141324 - DNA, 25 bp, Saccharomyces pastorianus
tgagcaggctcgtcaaggtaaactt

SEQ ID NO: 141325 - DNA, 25 bp, Saccharomyces pastorianus
gggaaagtccttcaagacgctgcta

SEQ ID NO: 141326 - DNA, 25 bp, Saccharomyces pastorianus
tagaattgactctcgtggcgctgat

SEQ ID NO: 141327 - DNA, 25 bp, Saccharomyces pastorianus
caagctcttgaacttcgtggtaaca

SEQ ID NO: 141328 - DNA, 25 bp, Saccharomyces pastorianus
gcgctgatacgaacacacctttgga

SEQ ID NO: 141329 - DNA, 25 bp, Saccharomyces pastorianus
gaagatggatcagtcccttacctac

SEQ ID NO: 141330 - DNA, 25 bp, Saccharomyces pastorianus
gaccatatattgtttgctctattca

SEQ ID NO: 141331 - DNA, 25 bp, Saccharomyces pastorianus
tgaccctgtcatcggccgtgaagaa

SEQ ID NO: 141332 - DNA, 25 bp, Saccharomyces pastorianus
caaaggagctggtaaaaactgtaga

SEQ ID NO: 141333 - DNA, 25 bp, Saccharomyces pastorianus
ttgcgtttgatgttgccaaatgtac

SEQ ID NO: 141334 - DNA, 25 bp, Saccharomyces pastorianus
taactggcgatggaatactagcgaa

SEQ ID NO: 141335 - DNA, 25 bp, Saccharomyces pastorianus
tcaaacagcggttggcagggattgc

SEQ ID NO: 141336 - DNA, 25 bp, Saccharomyces pastorianus
tactagcgaaggaaaagagcgatca

SEQ ID NO: 141337 - DNA, 25 bp, Saccharomyces pastorianus
cagggattgcgtttgatgttgccaa

SEQ ID NO: 141338 - DNA, 25 bp, Saccharomyces pastorianus
tgttgccaaatgtacaaaggagctg

SEQ ID NO: 141339 - DNA, 25 bp, Saccharomyces pastorianus
agagcgatcaagattatgctgacaa

SEQ ID NO: 141340 - DNA, 25 bp, Saccharomyces pastorianus
aattttgtgccaattaactggcgat

SEQ ID NO: 141341 - DNA, 25 bp, Saccharomyces pastorianus
aaaaacttcaaacagcggttggcag

SEQ ID NO: 141342 - DNA, 25 bp, Saccharomyces pastorianus
agaagaggcaagtttgaaggacgaa

SEQ ID NO: 141343 - DNA, 25 bp, Saccharomyces pastorianus
gatcaagaaaccacaggtgacgaag

SEQ ID NO: 141344 - DNA, 25 bp, Saccharomyces pastorianus
gaaaatccggataatacactatcag

SEQ ID NO: 141345 - DNA, 25 bp, Saccharomyces pastorianus
gctactagcatatcaatggagcaaa

SEQ ID NO: 141346 - DNA, 25 bp, Saccharomyces pastorianus
tggagcaaagcagaaatgccaattt

SEQ ID NO: 141347 - DNA, 25 bp, Saccharomyces pastorianus
gggagaatcgaatgcaatcaaccaa

SEQ ID NO: 141348 - DNA, 25 bp, Saccharomyces pastorianus
acactatcagagttactattgtatt

SEQ ID NO: 141349 - DNA, 25 bp, Saccharomyces pastorianus
gtggatacatttgacattgaaaatc

SEQ ID NO: 141350 - DNA, 25 bp, Saccharomyces pastorianus
tggtggacgctactagcatatcaat

SEQ ID NO: 141351 - DNA, 25 bp, Saccharomyces pastorianus
gcaatcaaccaagtcataggtcaaa

SEQ ID NO: 141352 - DNA, 25 bp, Saccharomyces pastorianus
ccacaggtgacgaagggtaatttga

SEQ ID NO: 141353 - DNA, 25 bp, Saccharomyces pastorianus
gtcaaatggtggacgctactagcat

SEQ ID NO: 141354 - DNA, 25 bp, Saccharomyces pastorianus
agagacattgtctcctcagagccga

SEQ ID NO: 141355 - DNA, 25 bp, Saccharomyces pastorianus
agacattgtctcctcagagccgata

SEQ ID NO: 141356 - DNA, 25 bp, Saccharomyces pastorianus
actgtgtctgaacctcaagaaataa

SEQ ID NO: 141357 - DNA, 25 bp, Saccharomyces pastorianus
ggaaatactgtgtctgaacctcaag

SEQ ID NO: 141358 - DNA, 25 bp, Saccharomyces pastorianus
attgtctcctcagagccgatagaga

SEQ ID NO: 141359 - DNA, 25 bp, Saccharomyces pastorianus
taaagggaaatactgtgtctgaacc

SEQ ID NO: 141360 - DNA, 25 bp, Saccharomyces pastorianus
tagagaatgttgaccccccaaaagt

SEQ ID NO: 141361 - DNA, 25 bp, Saccharomyces pastorianus
gggaaatactgtgtctgaacctcaa

SEQ ID NO: 141362 - DNA, 25 bp, Saccharomyces pastorianus
acattgtctcctcagagccgataga

SEQ ID NO: 141363 - DNA, 25 bp, Saccharomyces pastorianus
agagccgatagagaatgttgacccc

SEQ ID NO: 141364 - DNA, 25 bp, Saccharomyces pastorianus
aatactgtgtctgaacctcaagaaa

SEQ ID NO: 141365 - DNA, 25 bp, Saccharomyces pastorianus
ctgtaggcccagagtcagctagcag

SEQ ID NO: 141366 - DNA, 25 bp, Saccharomyces pastorianus
aagcggctaggaagttggcgtcatc

SEQ ID NO: 141367 - DNA, 25 bp, Saccharomyces pastorianus
gtcgaatctccggatatgacgcaga

SEQ ID NO: 141368 - DNA, 25 bp, Saccharomyces pastorianus
gctgtaggcccagaatcagatagta

SEQ ID NO: 141369 - DNA, 25 bp, Saccharomyces pastorianus
agaatcaatcaagtccccggaagcg

SEQ ID NO: 141370 - DNA, 25 bp, Saccharomyces pastorianus
aagggcgcatctgtagaatcagtca

SEQ ID NO: 141371 - DNA, 25 bp, Saccharomyces pastorianus
ctagcagggttgaatctccgggtat

SEQ ID NO: 141372 - DNA, 25 bp, Saccharomyces pastorianus
aatcacgtcatctgaaatgtcttca

SEQ ID NO: 141373 - DNA, 25 bp, Saccharomyces pastorianus
ggatgttgagccttcagaaatgtca

SEQ ID NO: 141374 - DNA, 25 bp, Saccharomyces pastorianus
aaccacttggtgatgtcgaatctcc

SEQ ID NO: 141375 - DNA, 25 bp, Saccharomyces pastorianus
aatgccaagtagttcgctgcctaag

SEQ ID NO: 141376 - DNA, 25 bp, Saccharomyces pastorianus
aaggtcttgcaacaggattacggcg

SEQ ID NO: 141377 - DNA, 25 bp, Saccharomyces pastorianus
caattggaatctaccgccggagaaa

SEQ ID NO: 141378 - DNA, 25 bp, Saccharomyces pastorianus
gattacggcgatagcttaagcatca

SEQ ID NO: 141379 - DNA, 25 bp, Saccharomyces pastorianus
gcatcaattggaatctaccgccgga

SEQ ID NO: 141380 - DNA, 25 bp, Saccharomyces pastorianus
cgccggagaaaaactggtctttgat

SEQ ID NO: 141381 - DNA, 25 bp, Saccharomyces pastorianus
gatatttacatctcaaaggtcttgc

SEQ ID NO: 141382 - DNA, 25 bp, Saccharomyces pastorianus
gcagtcatgtgatcgcttagatatt

SEQ ID NO: 141383 - DNA, 25 bp, Saccharomyces pastorianus
tcctcaactactgatgaactcgata

SEQ ID NO: 141384 - DNA, 25 bp, Saccharomyces pastorianus
ctcttcttcctcaactactgatgaa

SEQ ID NO: 141385 - DNA, 25 bp, Saccharomyces pastorianus
aagacaaacacattcctcttcttcc

SEQ ID NO: 141386 - DNA, 25 bp, Saccharomyces pastorianus
aaaagggtcttgcagtcatgtgatc

SEQ ID NO: 141387 - DNA, 25 bp, Saccharomyces pastorianus
aaaaccgtacagtcgctaagcaaga

SEQ ID NO: 141388 - DNA, 25 bp, Saccharomyces pastorianus
gaaattgtccttggcttgggctggt

SEQ ID NO: 141389 - DNA, 25 bp, Saccharomyces pastorianus
acggcaggtccatttacgattttat

SEQ ID NO: 141390 - DNA, 25 bp, Saccharomyces pastorianus
taaattgggcaactctccatcagac

SEQ ID NO: 141391 - DNA, 25 bp, Saccharomyces pastorianus
gattttatgtgctccaacggcattg

SEQ ID NO: 141392 - DNA, 25 bp, Saccharomyces pastorianus
ttccattacgaatatcatcctcctg

SEQ ID NO: 141393 - DNA, 25 bp, Saccharomyces pastorianus
aggccattgccagacagctaatcag

SEQ ID NO: 141394 - DNA, 25 bp, Saccharomyces pastorianus
tcgtcactatagagccccggaaatt

SEQ ID NO: 141395 - DNA, 25 bp, Saccharomyces pastorianus
agatctgtctgcttcttgcacgatt

SEQ ID NO: 141396 - DNA, 25 bp, Saccharomyces pastorianus
atttcggtagcgcaattttccatta

SEQ ID NO: 141397 - DNA, 25 bp, Saccharomyces pastorianus
gtccatcgcgtgtgtcctagtagaa

SEQ ID NO: 141398 - DNA, 25 bp, Saccharomyces pastorianus
gagcttgttctcctttgtttgttac

SEQ ID NO: 141399 - DNA, 25 bp, Saccharomyces pastorianus
tttcgccagtccatgtttcagtgaa

SEQ ID NO: 141400 - DNA, 25 bp, Saccharomyces pastorianus
tattactccaagaagccatccagcg

SEQ ID NO: 141401 - DNA, 25 bp, Saccharomyces pastorianus
gttacaccatcttcaattacctgtt

SEQ ID NO: 141402 - DNA, 25 bp, Saccharomyces pastorianus
tcgaaaatccctggttctttggtga

SEQ ID NO: 141403 - DNA, 25 bp, Saccharomyces pastorianus
ataccctttgggataccgcattaag

SEQ ID NO: 141404 - DNA, 25 bp, Saccharomyces pastorianus
ttttcagacgcatcaaaggccccaa

SEQ ID NO: 141405 - DNA, 25 bp, Saccharomyces pastorianus
gccatccagcgcctttgaaagtgat

SEQ ID NO: 141406 - DNA, 25 bp, Saccharomyces pastorianus
ttggttcccataagatgttccccga

SEQ ID NO: 141407 - DNA, 25 bp, Saccharomyces pastorianus
taagagatcgccatttcctgttttc

SEQ ID NO: 141408 - DNA, 25 bp, Saccharomyces pastorianus
gagtatgcccatattgatgtcctat

SEQ ID NO: 141409 - DNA, 25 bp, Saccharomyces pastorianus
ggcaatggtgcacgttcttatagaa

SEQ ID NO: 141410 - DNA, 25 bp, Saccharomyces pastorianus
accttcgtcggtgaatcatctcaag

SEQ ID NO: 141411 - DNA, 25 bp, Saccharomyces pastorianus
caaacttgttgaatccatgaacgat

SEQ ID NO: 141412 - DNA, 25 bp, Saccharomyces pastorianus
aaaaccgaccgtattgcagatcaag

SEQ ID NO: 141413 - DNA, 25 bp, Saccharomyces pastorianus
gatctacctgcatagagttggtcgt

SEQ ID NO: 141414 - DNA, 25 bp, Saccharomyces pastorianus
cacttggtagaaacgtagactgggt

SEQ ID NO: 141415 - DNA, 25 bp, Saccharomyces pastorianus
gttgttatcaactacgatatgccca

SEQ ID NO: 141416 - DNA, 25 bp, Saccharomyces pastorianus
tgcccaagagttatgagatctacct

SEQ ID NO: 141417 - DNA, 25 bp, Saccharomyces pastorianus
gtccctaactcaaggtaaagcactt

SEQ ID NO: 141418 - DNA, 25 bp, Saccharomyces pastorianus
gatatccccaagattgaggttgtta

SEQ ID NO: 141419 - DNA, 25 bp, Saccharomyces pastorianus
gaagtattgtacgtgctgctataaa

SEQ ID NO: 141420 - DNA, 25 bp, Saccharomyces pastorianus
tgcctatccgtttcaattccgaaga

SEQ ID NO: 141421 - DNA, 25 bp, Saccharomyces pastorianus
ttcaattccgaagaaccgtcaacat

SEQ ID NO: 141422 - DNA, 25 bp, Saccharomyces pastorianus
tcactttctgcctatccgtttcaat

SEQ ID NO: 141423 - DNA, 25 bp, Saccharomyces pastorianus
actttctgcctatccgtttcaattc

SEQ ID NO: 141424 - DNA, 25 bp, Saccharomyces pastorianus
tatccgtttcaattccgaagaaccg

SEQ ID NO: 141425 - DNA, 25 bp, Saccharomyces pastorianus
tctgcctatccgtttcaattccgaa

SEQ ID NO: 141426 - DNA, 25 bp, Saccharomyces pastorianus
gcctatccgtttcaattccgaagaa

SEQ ID NO: 141427 - DNA, 25 bp, Saccharomyces pastorianus
ttcactttctgcctatccgtttcaa

SEQ ID NO: 141428 - DNA, 25 bp, Saccharomyces pastorianus
tttcaattccgaagaaccgtcaaca

SEQ ID NO: 141429 - DNA, 25 bp, Saccharomyces pastorianus
ttctgcctatccgtttcaattccga

SEQ ID NO: 141430 - DNA, 25 bp, Saccharomyces pastorianus
tttttcactttctgcctatccgttt

SEQ ID NO: 141431 - DNA, 25 bp, Saccharomyces pastorianus
gcccttgtatacatttcagtttact

SEQ ID NO: 141432 - DNA, 25 bp, Saccharomyces pastorianus
gttgcccttgtatacatttcagttt

SEQ ID NO: 141433 - DNA, 25 bp, Saccharomyces pastorianus
ccttgtatacatttcagtttacttc

SEQ ID NO: 141434 - DNA, 25 bp, Saccharomyces pastorianus
gggttgcccttgtatacatttcagt

SEQ ID NO: 141435 - DNA, 25 bp, Saccharomyces pastorianus
tcaatccaacgtggaacgggttgcc

SEQ ID NO: 141436 - DNA, 25 bp, Saccharomyces pastorianus
caattgagtcaatccaacgtggaac

SEQ ID NO: 141437 - DNA, 25 bp, Saccharomyces pastorianus
acgggttgcccttgtatacatttca

SEQ ID NO: 141438 - DNA, 25 bp, Saccharomyces pastorianus
gagtcaatccaacgtggaacgggtt

SEQ ID NO: 141439 - DNA, 25 bp, Saccharomyces pastorianus
gacacaattgagtcaatccaacgtg

SEQ ID NO: 141440 - DNA, 25 bp, Saccharomyces pastorianus
gtggaacgggttgcccttgtataca

SEQ ID NO: 141441 - DNA, 25 bp, Saccharomyces pastorianus
gaacgggttgcccttgtatacattt

SEQ ID NO: 141442 - DNA, 25 bp, Saccharomyces pastorianus
gggacaatatccttcattccttgaa

SEQ ID NO: 141443 - DNA, 25 bp, Saccharomyces pastorianus
aaatcacccgatctgcctgaatatt
